United States Patent Application Publication US 2011/0183924 A1 - sequence listing, part 241

SEQ ID NO: 663306 - DNA, 531 bp, Homo sapiens
ggtgactctaccgagcttattacagcgcaggcaggcatgaacttgatggaaaggagacaagtccaactacccgagtccgtgtctaccagattcctgggacgcagaaattgtagattactgcctctgaactcacggctggtgtacccaataacggtggggacatgtgtgtcagagggacgctaccctgcaggaactcttagactggcacttggattgggaagcccctggttgcctaactgagcaagggacgtatctagtgaagtgaacgagaccagagagacaccactgaggacagggctcattcacactagcatgtcggagcataataggttgaccccatggcccggtggaggagatccccgtagccacctatctccttgtagctatcagcccatggccttaccccgacacacgggccttgctgcacaagaccccataccagcaccccgtgtactgggagccatgtgcctcttggatggaggtccaacttggtgtgtggatcccagaaggtggcagcagcaagctccatgg

SEQ ID NO: 663307 - DNA, 651 bp, Homo sapiens
aagtagcgattttattatcaatgttattcattcttttgaaatataaagtacttcagctgaattaaggttgcagataatttttaaaatacaacacacatcatgactagtatattaaaattatttatattcagatatttatatctaatatcaaatgaaaatttactaccaaattttcacagtagacattaatcagtctgacatgcttattgatcccataggtgtaattatagatcaacatgattttagtgtctattcttttattttactaaattaggaacgcagcatttacagaacaaataaacacaagtgacgtggccaccccaggatctaacagctcttcagtgagctatgttgcaagctcagaagtaatccactaacgaaccaagtcagactccagttcttcatcaaaaggtgctggtggaggttgtcagacgccttccaatatagatccccaatccgatggccagcaaatgagagagcagcagagatggaaggaaaactttcagaaattctgcagagaatatgccccccttcttcatgacgctcgtgttcctcatgctgagggtggccgtgcgccttgggtgttttaaaaggaacttctttggggggatattttccggccgaccttgacaatcccatttccaaactgag

SEQ ID NO: 663308 - DNA, 202 bp, Homo sapiens
cttcttacaattatattagcctgtcacaaaatgtacttgtgcaaaatcatgtgaatctctcaggatgagcaccgatctagtgaaggagtccggccctgtcttggacagttcgtaaatcagctccttcacgtcgtcagatgtcaacttcaaccaagtggggacgctgcgtcgatcgggtacagccgacctgcgagcaggcgta

SEQ ID NO: 663309 - DNA, 595 bp, Homo sapiens
ctccacgagggtgcagcgtgtctcttactaataaccagtgaaattgacctggccgctgaagaggcggtcatgacacagcaagacgagaagaccctatggagcttgaatggtattagatgcaaacagtacctaacaaacccacaggtcctaaatgtaccaagagttcgtgcattaaagagatctcttcgggtgtggggcgagcatcgtgagctagaatgcgcagtcctccgagtcagtacactgctaaagacttcacctagtcaaaggcgaactactatacgtcaatggatccaataagctgggagtcaacggaagaagttaccctagggataacagccgcgaatcctattctagagtccatatcaacaatagggttctaacggagctcgatgtaggatcaggacatcccgatggtgcagccgctattaaaggttcgtttggcaagcgattaaagtcctacgtgatctgagttcagaccggagtaatccaggtcggtgttctatctagcttcaagattgcctcccatgtactgaagaggacaagagaaataagggctacttcacaacagcgccttcccccgtaaatgatatcatct

SEQ ID NO: 663310 - DNA, 441 bp, Homo sapiens
ggttccattcacggatttcccctatttcaagggtacccccctagaccaaaccttacgccaaaatccattttcctataaaatttatgggggtaaatttaacttttttcccccaacactttttgggcctatccggaaagccccgaggttactgggactacccccgagcaaacaccacatgaaacatcctatcattggtagggtcattcatttttttaacagcaggaaaattaaaaattttcatgatttgagaagccttcgctttgaagcgaaaagtcctaaaagtaaaagaaccctccataaacctggagtgattaaatggatgcccccccccctaccacacatttgaagaacccgtaaaaataaaatttagacaaaaaaggaaggaattgaaccccccaaaggtggtttcaagccaaccccatggcctccatgattttttta

SEQ ID NO: 663311 - DNA, 183 bp, Homo sapiens
aagtctgcaaccatctacttcaagtccagaaacatgatggccaggatgagattatgaaaaacgcgcctttgaagaagatgtcggagagaagccgcaagttccagattctcaatgatgcgatcatcaccatcctgcataagtccctgaagtcaggcgacggggagcgcacgccagtggagcatg

SEQ ID NO: 663312 - DNA, 439 bp, Homo sapiens
  misc_feature (189)..(189): n is a, c, g, or t
  misc_feature (218)..(219): n is a, c, g, or t
  misc_feature (262)..(262): n is a, c, g, or t
  misc_feature (312)..(312): n is a, c, g, or t
  misc_feature (315)..(315): n is a, c, g, or t
cgggaaggaaacaggtgtcccgcggcggccaaaccttcggcagcaagcccaaggtcgccttgctcaaccccaaggcggtctcatggcacgggcctctcgaaactgtgggcaagaaagggtcctcgtgagaactaggctcagaagaagagcggggcggcgccacctcggggggagcggaccaggctgtgncgcaagggcgcgtccgggtccgcgtgtgnnttcgccgtgaatgagctggtgccgcaccaggtgggtcttgcgnctgaagctctttccactgcgggcaggagaagggcgggagcctgtgtggantcnctggtggcggactaggttggttttggagctgaagctgcggggcagacggcgcaggcgtggggcggctgccagtgtgctgcctggtggcggcccaggtgcgacttgcggctgaagcggcggtcgc

SEQ ID NO: 663313 - DNA, 636 bp, Homo sapiens
catggtaaaaccccgtatctactaaaaataaaaaaattagctgggcatggtggcagatgcacctgtagtcccagctacttgggaggctgaggtaggagaatcactcgaacccaggagcagaggtagcactgaatcgagatcgtgccactgcgctccagcctgggcgacagagtgagactccatttcaaaaaaaaaaaaaaaaggttaaaaagacaatctacttaagggggaaaaattttttaaataatatttcttttaatatcagggtcctggtatccagatttattataaagaactcttacaactcagtaataaagagacacccaattaaaaaccggacaaaatactttaaatttaatatttccttcaaagaagacttttaagggctaataagcacttgaagagattgttcaccattcaatagtcattagggcaatggtaagtcaaaatcataagggagcgggcagttcaaacccacgtgggatgggctataatcaaagagacaaacaatagtgtcagggtctgggagaattgggacctttttatacttggctggggggattgtaaattggccacagccactctagaaaacactttaatagtgcctgaaaatgttagtaagttagatatgaccca

SEQ ID NO: 663314 - DNA, 988 bp, Homo sapiens
  misc_feature (15)..(15): n is a, c, g, or t
tcttgttgtcacccncgctgtacggatatcgtcgacccaggcctctgccacgcgtcgggtcccgctgcttgttgagatgctccaggggtgctacctggctgctccgacaggcgctggccgagtgcctggggaccctcatcctggtgatgttttggctgtgtgctcctgtggcccagtgttgtgctcagcctggggcacccactggtggtttcctcaccatcaacctggcctttggctttgctgtcactctgggcatcctcatcgctggccagtgtctctggggcccacctgaaccctgccgtgacctttgccatgtgcttcctggctcgtgagccctggatcaatgctgcccatctacaccctggcacagacgctgggagccattcttgggatgctggaatacgttcatgggctgtattatgatgcaatctggcacttcgacgacaacacagacatattaatgtaatcgggccccaatggcacagccggcatctatgctacctacccctcatggacacttggatatgatcaatggcttctttgaaccagttcataggcacagcctcccttatcgtgatgtgtgctggacattgttgagccctataaccaacccgataccccgagtgcctggaggcacttcaaacagtgtggcctggtggatcctggtacaatatggaacctcccatgggcttcaaacatccggctattgccgtaaaaccttgaccaggagacttttggcacacgacttaatacaagaccttgcagcggcttgagaggcatcattgaatgtacttacaacgaacacgtgcaagccataggactgcaataggagtgaccaaattcgagatatacaccaacaaaccattgaaggacaacacaatagaagagaattagacacatcaaaagtacccaagcataacatgaatcagagatagccaccctgaaggcaaacaacacaaacgccaacaaaacgaaagacaatacaaac

SEQ ID NO: 663315 - DNA, 498 bp, Homo sapiens
cgactctagcaggatccttttgatatgctgtctaaataaaaacaaaaaaataaaaaaaatttacgggcagagtgagataagggcacaaaaggtcagggaagcagcaggaaccagttgacttgggggtggggaggtaaggttggaataatttctcagttctaagggaagagagggtgaggttggagcagcaggaataacaggtaagttttcagatgagccagatggtgggtggggtgcagtgggactacaggcacgcgccattacactcggatttctgacagtcagatttgtccacaaaactctcaattgggcagggctgctttcctgtgctaaaatctgggggagctagtggggccccatgaagatcttctgcagtcggcccaatccgaccacggggtcgggggagtggttggaggagctgggtgtagaccccgggggtgtggatcttgcagtgagctgaaatcgcgccagagcactccagccggggcgacagagcgg

SEQ ID NO: 663316 - DNA, 123 bp, Homo sapiens
gagcagctctcagttcgctccttcacagatcaggctggcagggccctgttgtccggtctcgctttgtctgcagagtttgctaacgctcagggggctcttaggtcctcgggagaagggaccaca

SEQ ID NO: 663317 - DNA, 176 bp, Homo sapiens
  misc_feature (55)..(55): n is a, c, g, or t
  misc_feature (58)..(58): n is a, c, g, or t
tgcctgggtgctctgaggactcccggtccgctcggaccacccgatccggatagtngtnccgatacctacacatgtcctcgtggctcgccagtttctggaccctgtcattctggactggaacgagctgggccgcgccgtccgcggctcctccgactcctcgtcctcgtccgagcgga

SEQ ID NO: 663318 - DNA, 859 bp, Homo sapiens
atgacgtcccatccacagctgggatgccgatggaaatggcatctgccataaaagaaaagcgagggataaaaagcccaaccgatgtggggcatagatgccaaggcgcgaagagtcagtctacggtcttgtagagaggctggtcgctttgttatatgtttagtcccgttatatagaacatttcgctcctccttggatacatcggaagcggaactgtctgcccagcgagcctgagccctcaggctgttggaaaagcatctgatgccttgtattcctttgactaggaggagtcattctacgtgaggttccttgatcgttggtttaagcgtcaactccagcactaaatacgagcaaccagtgctggagcttgtaatggtgtcgactgctgctgcaagtgcttgtctcctgtcggtgcagtgacactgtcattgacagcatctgtgcgttgcgtgttagtgtttgcaagatcctctgacaatgatctggcttatgtcccagggacgtggtatgtgtacttagctgagcaagccatagtacaaggacagcctgagaaatagttagactcttccacttcccttcaaggagctgtgaactcagatatgtaagtcagcttctcaggtggtcggacgtgtagagcgtaccactaggtaaaagagagtccagcacctcagggctctctgccttctatgtggcgaaattaaggtcttgccaatataatcttcctcttccaaaccattggtttcagtgcccctgctgggatcacagaatgcgcacaacggggtttggatcaagcggggaacccccgacctttaatgttgccttgccaaagccccttgggggaaaaacccgaaaccaggaaaga

SEQ ID NO: 663319 - DNA, 403 bp, Homo sapiens
agtaaaagggttcgtggctggcagcattatactatgaatggagaccgatgggtagtgaagcaatggttggccgtccaacttcagaggctgcgtggcgggggtctagttctgcatctgctcaaagaacttgtaggtaggattttcgtagccgttctgctgcatcttggacaggtggcgctcctctggggtgacagcggcgtcaacctccaccacaccaggatgaatggatgtgtactgtttcttcttcagcatcaccaaggtgatgacgatcactgtcgctatgacaacaccgcccaccatgagtccaatgatggcacctttgtttgaacccacatcttctgcaaagaacaccaatttttgatgatgaacttcatatcctgagtcatgtcggaattctgcatcc

SEQ ID NO: 663320 - DNA, 151 bp, Homo sapiens
  misc_feature (52)..(53): n is a, c, g, or t
  misc_feature (90)..(90): n is a, c, g, or t
  misc_feature (102)..(102): n is a, c, g, or t
gtgtccctgatgaggatgaggggtggctgtctgatggcactggggctttctnntctccagggcttcaggccaaaaaggacctggagagtntcatccagagantatcccagctggaggcccagctcccaaaaaatggactagaagagaagct

SEQ ID NO: 663321 - DNA, 136 bp, Homo sapiens
aaccccgaattcccgctttttgggcggctgaagcaggagaatggcctgagcctgggacgtggagctcgcaatgagccgggatatcgccactgcactccaccctgtgtgaggtaccgagcctccatttgtaatcatg

SEQ ID NO: 663322 - DNA, 531 bp, Homo sapiens
gagcggggcatcgcggtggtcgctggacttggggatgggcgtgagccccagccgctagtgctggtggccgccgctgctgccccgagctggagcccgagccgccgcctctgtgtccgctgcgtcgactgtcttcccagggcggctgcgtatgctgggcgaaaggagtagtcggcggtggcaggcggcaccaaggccccaagccctccttcgtgtcgtacgtacgccctgaggaaattcacacaaacgacccacggaagtaacaggagaacggacagtaactcttcacttgttgccaggtgaccaggctgcttggtgaagccagtaggagtcacccgtatgcggcatccaccgcacccatatcccagagcaccagccaatgcgagcgctacacaatgcggcacgcgcaccggccccgcccgcaacgaccactacccaggcacgaagcgcacacaacggccttgccagacacaaacccacacacaggacaaacaagcaccgacaccgcacacaagaaaacacaacccggctacc

SEQ ID NO: 663323 - DNA, 433 bp, Homo sapiens
  misc_feature (48)..(48): n is a, c, g, or t
  misc_feature (78)..(78): n is a, c, g, or t
  misc_feature (96)..(96): n is a, c, g, or t
  misc_feature (297)..(297): n is a, c, g, or t
  misc_feature (330)..(330): n is a, c, g, or t
  misc_feature (392)..(392): n is a, c, g, or t
agaattcacaagcgcacaggaatttcttgaagatggagaaagtgatgncttttaagatgccctctcttaactctgggngattttaactacaactcntgtctctcggtgatggtattgctttggatttgttgtgaactgttctacagctgtggagcagtatgtccctctgagaagctgagtatctatggtgacttggagtttatgatgacaaaagctaaacagatatccagcttcttctcttgtggttgtagatctaaaactgagatcatgaagaagaggcctctacctacaaaagtnatcttgctcattctgaatttagcattttctttnaaagacaagtgaatagacatctaaaatccactcctcatagagcttttaaatggtttcattgntatagccttaagaaatcactataaaatgcaaataaagttac

SEQ ID NO: 663324 - DNA, 213 bp, Homo sapiens
actgatggaggagctgatgcgatcctcgaatccgaggcggatcaggccggcggccgcaaggatgatggcgtcatattcgccggcgtccagcttggccagacgggtatagaagttgccccgcagaaaacggatctgcaggtcggggcgacgggtcagtaactgagcctgacggcgcaggctggaagtgcccaccacgctgccttcaggcggctc

SEQ ID NO: 663325 - DNA, 107 bp, Homo sapiens
gtgtgtgagcggcatgcaatggcagcaattgcatttttgtcatctctgccttccccggacacctaggctgtgcaaaataaggcttcaatctctgtcaggggagaaga

SEQ ID NO: 663326 - DNA, 306 bp, Homo sapiens
gtgagcccaaccccgttccatgagttgcttaagcagtgcccgaggtctccacacaggccagtcacctgctgtctcactcgagacagaccgcccatgggccatgcactctctcccagcctccattctcacggggtccccagtagtcacctgcctcccgctcatagctcaccaggtctcctcccatggccttccgcaggctgcccggcctccttccccttgcagccatcccaaggctcctgacctacctggcccctgagctctggagcaagccctgacccaataaaggctttgaacccaaaaaaaaaa

SEQ ID NO: 663327 - DNA, 126 bp, Homo sapiens
gatgaggaacgtcactttaagcatatgtggataaatgaccccagtgatacatacacaggcaggtgggaagatgggtgagttacttgggttctcctatctcattctatgctggttcctgcacctcat

SEQ ID NO: 663328 - DNA, 157 bp, Homo sapiens
gagtgatccctgctagctagataatagctggagcatatctatgagccaggaccagaggaatggcaggaatgagaagcagagaggagagcctgcagtcgcagtcgcagccggcagcaatgagtgagaggagcagaaagcgaggcagcaagcgagacag

SEQ ID NO: 663329 - DNA, 779 bp, Homo sapiens
  misc_feature (106)..(106): n is a, c, g, or t
  misc_feature (290)..(290): n is a, c, g, or t
  misc_feature (293)..(293): n is a, c, g, or t
  misc_feature (300)..(300): n is a, c, g, or t
  misc_feature (391)..(391): n is a, c, g, or t
  misc_feature (401)..(401): n is a, c, g, or t
gggaaaaggtggctctggccggggtggctcggtttcctggggctatgtaactgagctcgtctgacttaggggtccttcttcgctgccctcgccgcgtgctagcagngaagtttccgctcgggagagagactgtcctcacgcccgctgcgcctcctcgacgtgcagagcaggcttgctcgccgtgggagcgtcccggccgagaagccctgaggggggatggggaggccattttgtcccgaccgactccccggaaccgggcggagcggcgtgggagaggctgcggagacgcnggntcgccgncctcggaggcactggacgccgccactgtcgggggcttcctcaaagctgttcgtaggtcgcccgcgccgtctcgagcctttttcccacgctntccccggtcnctccggcctgagaacgcccgagtgaggagttggccgtagtgagagggaccgatcccttggggccagccggggagaggagagcccgagccggtcctcccaattggcgaagaaaacgtaacgatctgcttatcaggctagcttcctgatcgggggatccggagtgaaagaaagacctgcggatcctaataacggtacacccgagattgatgcctttaaatactacctttgaattaccaccagtagggaataaacgttcagataagaacagttgaattacaggaaagaaaaacaggtaagatattgggatcaacaggcagacacgataacacaaaaaaaccctataaagggcagggtacaagcaaaatacacccaggtaat

SEQ ID NO: 663330 - DNA, 130 bp, Homo sapiens
cacgaggagcatctgtgagcggctaactccccgggtatcccatgccaactcatcagtggtggtttcatcggtaaaagtcctaatgaagtttctataattgttacctaaggattctgactactacaatatg

SEQ ID NO: 663331 - DNA, 847 bp, Homo sapiens
  misc_feature (106)..(106): n is a, c, g, or t
gggaaaaggtggctctggccggggtggctcggtttcctggggctatgtaactgagctcgtctgacttaggggtccttcttcgctgccctcgccgcgtgctagcagngaagtttccgctcgggagagagactgtcctcacgcccgctgcgcctcctcgacgtgcagatgcatgtgcttgctctgcacctgtgtggatgctgtccctgtgcctgacgaatgcccttgatgtggtgtgtgatgtgtggtgatgtgccagtttattgtcacctagacctgagcatcaccctgtgatagcctgtgtgctgtgatgctgtgcattgtgtgatgatagtgcgttgctggtgatgcccatgctgtgatctgcactgcaccactacagtgaatggtggcacaattgtgaactgccatgcacaagcattgtcatgtgggtgccatatccattcacacatggctttgtatctagtcagtaggtcattgcacacttgctgccctgttcatcaagattgacacatataatatatcaccacaagctggtcgttaataccgccacagtagtccacttacacaggaggccctttggattgaaatcatggccctctggaaggatcgatgtgtaaccgcttattgcgcaccatgctcatctgtttgactggatggtcgggagccccagcagctccgccccttttggcgatgggccacatggctcatgtgtcaggtggcctggcaaggacatgcccccctgaggccactgggtttccatttcaccacaaaggttggagacctcaaacggcagatggaccagattacccgaacctccataggccatttcacatcagaaagaccttgg

SEQ ID NO: 663332 - DNA, 422 bp, Homo sapiens
  misc_feature (1)..(1): n is a, c, g, or t
  misc_feature (81)..(82): n is a, c, g, or t
  misc_feature (86)..(86): n is a, c, g, or t
  misc_feature (93)..(93): n is a, c, g, or t
  misc_feature (99)..(99): n is a, c, g, or t
  misc_feature (131)..(131): n is a, c, g, or t
  misc_feature (157)..(157): n is a, c, g, or t
  misc_feature (172)..(172): n is a, c, g, or t
  misc_feature (174)..(174): n is a, c, g, or t
  misc_feature (181)..(181): n is a, c, g, or t
  misc_feature (208)..(208): n is a, c, g, or t
  misc_feature (213)..(214): n is a, c, g, or t
  misc_feature (252)..(252): n is a, c, g, or t
  misc_feature (275)..(275): n is a, c, g, or t
  misc_feature (286)..(286): n is a, c, g, or t
  misc_feature (296)..(300): n is a, c, g, or t
  misc_feature (305)..(306): n is a, c, g, or t
  misc_feature (308)..(308): n is a, c, g, or t
  misc_feature (311)..(312): n is a, c, g, or t
  misc_feature (314)..(314): n is a, c, g, or t
  misc_feature (319)..(319): n is a, c, g, or t
  misc_feature (322)..(322): n is a, c, g, or t
  misc_feature (324)..(325): n is a, c, g, or t
  misc_feature (327)..(327): n is a, c, g, or t
  misc_feature (330)..(330): n is a, c, g, or t
  misc_feature (338)..(338): n is a, c, g, or t
  misc_feature (350)..(350): n is a, c, g, or t
  misc_feature (352)..(352): n is a, c, g, or t
  misc_feature (361)..(361): n is a, c, g, or t
  misc_feature (379)..(379): n is a, c, g, or t
  misc_feature (383)..(384): n is a, c, g, or t
  misc_feature (388)..(391): n is a, c, g, or t
  misc_feature (393)..(395): n is a, c, g, or t
  misc_feature (397)..(397): n is a, c, g, or t
  misc_feature (399)..(399): n is a, c, g, or t
  misc_feature (402)..(402): n is a, c, g, or t
  misc_feature (404)..(406): n is a, c, g, or t
  misc_feature (409)..(409): n is a, c, g, or t
  misc_feature (412)..(412): n is a, c, g, or t
  misc_feature (415)..(415): n is a, c, g, or t
  misc_feature (418)..(418): n is a, c, g, or t
  misc_feature (420)..(420): n is a, c, g, or t
nactttatcaagccttaggaaaaaaatgaaagaaacacctttccaatgatgcatcaagttaacgtctaagcaaaagatcannaganatcaganattgtngggtacacacgtatcttgtgatgtcttctganaaccaacttattcctctttctctganaagaacttgaccccncnccccggngctgagtgcttggcagccacatttgtnttganntcttgattcctgccctaactacacagggctgggatggncacctgccccaagtttggccagncatttattttnccagtaattnnnnnccgtnncnagnngncacanccncnntnggntgtgaggnttgacatgctananccccaggcnccgccgggtggccctgtncccnncccnnnncnnncngnccncnnncanccnccnccncnac

SEQ ID NO: 663333 - DNA, 701 bp, Homo sapiens
gggtggaggtgatgatggagggggagattggggggtcgtagcggaatcgggggtatgcgggccgaattcataaaaacagggaggttaaaagtagggtctgggtgacaaaattatgtggtgtagagtttcaggggagaggtgcgttcatatgtgttgtgtccctaggaaggatggtgtaggtgggtgaggggtgtttattataactaagtgttgggtgtatctcggctattgaaaaatagggcgaaggggccgtggcggcgtatccgagtgttgaacccgtgagaactagttcgcggactctcccctttcggcagaggcctcgaagggggttctgcggtgggctcctcgtggcataggtggtggagattaaatctcattatttagtgggccaggggtctcagtgagtggccgagggagttaactcagagagggtggtccatggagtgtgggtgactagggggtgggacgcggcttaaaggggagccccacttatatttaagatacagggtgtgcgcaatagtctacccacacggagtggcctaaggggtgacctctcatttattgagaactgcgtgggggggctacacggctcccgcaagtggcgcgcccgactcaaggggcagtaaagttcgggaagttctggatgcgctccacccctggatccagaggtattggaggtaacacggggcgctcaaaaccct

SEQ ID NO: 663334 - DNA, 108 bp, Homo sapiens
tccccaatttttcactccagcattttttttccctcttcccctcaattgctcaagcatttaaggcacgttctttcattcatgcacaactattcatccacattacgcaaa

SEQ ID NO: 663335 - DNA, 169 bp, Homo sapiens
acactgcgaaaacatcattaaagaatagagggcataccctcttttttatttcttaatggcttttggcggcatgccgtattacaactccatagtggcaattcgagataatcaattttggaggttagtttcactatgtgaagaaaaccttttctccattctcgagtttctc

SEQ ID NO: 663336 - DNA, 224 bp, Homo sapiens
gactccgaggttacaggcgttgtcagtgagcccggagttacgccttgccttctcttaggctttgaagcattttgtctgtgctccctgatcttcatgtcaccaccatgaagttcttagcagtcctggtactcctgggagtttccatctttctggtctctgcccagaatccgacaacgtgggtcaccgacgctcgacacttcgtaactccactggtcactagctgt

SEQ ID NO: 663337 - DNA, 116 bp, Homo sapiens
cccggggttttacccccgtcaccccccccccctttttaaaaagggggggggggggggggccccccggttttgggccttagtcccctttcccgcttttttcccccccctttggggga

SEQ ID NO: 663338 - DNA, 139 bp, Homo sapiens
ttatgcgggtgtaccgtggcagtttgctctgctgacctgatggctggtgtgacgggaggatttaacctgtgtgatggattggcctagagacaacctgttgagatagtcttgccccttaaactcgcccgctaaactcgct

SEQ ID NO: 663339 - DNA, 1029 bp, Homo sapiens
gagcgaaattgaggtcccagtgcgggagcctgcagaaatccaggaataggactcagggatctagggctgggatgttggtggttctgagcgcccaggaaataggagttctatgggagagacaggatcatctggttcagctgctcattataattatcctgtgaaagaagatgtacaaatactactgtatcaccgacgtacaaggcttgtccatggacaacttcatgacacatggttcggcaccgacagtctacacgatctaaacgcacatggaccgacatcccatgttcatgaattgggaggcttagctattcataagatagaagtactccccaacatgatgaatttaacatagtccctagcacaagcccagttaccttcaaggcgtaaattgacaggatgaccctaaaaattcctgtggaatggtagaggattcacaatagtccaagaatcttggacacgaagacgcaacttgcaagcctcccatttcctgcatttacacacttactacaaagctaccagtatcaagcacagagtgcaatgggccatacgggattagaccatatacgccggatgaactagaatccaggagtacagaacatcaactcctcaccttatgggctatagattgcaacaaggatgtgcagacaatcctgggggagacaaggactggctacttaagcacagtgttctggggaacaccctgattaccgcaattccaaacgaacgtaagtttacactctcggcatggaggcctggcacagctgcacatttgacttggcacctcgcggaccccagaactggatgggcctattcacacagttcgacgaagcatgtggcggataacctgccgcaaaatatgctccgagcgataaaattgaacatcggtcccagacacgtgtgagaatatcagggctagcggtaatcctagttcaggtcaccaataatgagaggcaaaagacttatataacaaagcggtatagtagccgacagcacatataccgatgggaaagaacaaatgacagatcatgg

SEQ ID NO: 663340 - DNA, 766 bp, Homo sapiens
cgcccgggaatggccatttatattaatacctctccccacacgttttcccattttaaagaggcaattgggccaacgatttttaatgtgttttactcccctatgggcaaccccaagtttacaatattatgcccccgcctcgaaactccggggtttagggtgggaaaccagtttcccaccggaaaggatttgtaagggtttacaaattaataccagaacccttgggaaattggtcccaggtccagagatttcccaggggaacctcgccccgacgcacaataaaaaagccttaggaccattccggcgacgttttttccaaacgcacattccgcgtaggattacatattttgccccccgggagtttcttcgcctatcccccagtgggactcagggggaccccgtcccgaaccgctgtagtgtgtccgatgccataccgtagaaaacctacatgcgtgactccaatcgatagcgtggaacactaggtctgtatttccactcggccgctgggacctcacgcagttggtaatcaaattgcccgggcaccacagacgcatttttgaattattctgggcgtcaaggagagacccctcctttccccccttccccattcagggtacaatgcccaatgtcggccccaagcccactcatggtccatccctcagccccttccccaaacctgcccaagtagactcccggcgccccttccccccactttccggagaacgccttccttccccccagaaaccccctttgttttaaacgggcggtg

SEQ ID NO: 663341 - DNA, 881 bp, Homo sapiens
ggagcagtgtggggcccggtgcgggctctggctgttcccgctggacgaggtgcactgccaagatggaggccaaccgcaacgcctgttacacagagcatcctgggaggcccgtgacgatcttctacaagacccttccacggcgatatgcagtgcggcgtgcacgcgccggtgctccaggcaagatgcttcccatgtggctcggagcacctgccctacccgctgtggtcagccgctgacgggctcagaggcacagccgtgctgcatctgtggaggcctgaacctcacggcgtgacggtcgctcgtcgagaacaatcacagctgttgcttttctgggcacctctgatggccggatcctcgaaggtgtacctcacctccaagatggcacctcctcagaatgtactgactctatccttgtggagataaacaagagagtcaatgcgctgacctggtacttgtcttggagagctgggcagtctgtacgccatgaccaggagaaggtgttccggctgcctgtgcaggagtgcctgagctacccgaactgacccagtgcccgtgatcccaggacccctactgcggcgtggtgcgtcgtcgagggacgatgcaccctggaaggccagagtgtccgcgggcctgatgtaggccatgccactggtctgtggaagccggatagcaaggtccttgcgtgggcgtcagcagcgccagtcacagaagatgatgctggtgggccacgggaggtgccgttgaccgttagacccctcctgtctgacgagggggacgacttgtggtcccttttgggagttcgcggcaacccggcgtttaaggcagcggattgaacccaggagcgatcccgtcaggcagcagacagtgggggcccaagctca

SEQ ID NO: 663342 - DNA, 110 bp, Homo sapiens
aatctgtgacgaagacacccattgtggctgttaactgctgctgcattgtgagctcgtcgcaaattacgaactctgggtagtgtgccgtgtgtcccactggcccgactgca

SEQ ID NO: 663343 - DNA, 1189 bp, Homo sapiens
ttaaatatctaaacaatagtgctttatggataaagggttagttataaagggatacaaaatggcctggtgtaaaataagtgttttcaaaatacatttctatgaggtagaagactatgtcttgagtaaaagaagcagttatctattatcaaaagtatctattcgaattggggtagtaaaaccaagaggggactcaaaagtgtggtagcagtgggtgggctcctctcccctcccgtgaattagcgtggttaccaggaggcaggggtgccgtgaagtatacttttaacctcacattattggggggcattagctcactagcaaacgtgtggttttacttattttcaacgagaattttctccagcaaagaggttatttaagagtggtcaaacctcaaattaaggggacctcgcgaaggggggtgtatacgtcggaaagttcggtgggaaccaccatttctttagtttcacctttcaccacaattgaggccaataacataataggcttgggggggtggtccaccaatttaagccaacgggtgagggggcaaagtttaccagagaaaccccagaatttattttgcggggagcaacacccttcatataacctatatattatttaaacggggcatcattttaatggtgtttttcatagcccgccaaaaaaatgggaaaaaaacccggggtctacatccctcaggatttaacggccttttgctcgcaatttcccctaagaaaaccattgggtgccctttacaccgggtccaacttcgcggggggcgaaaattcccccaacttcacgctgacactgactacaacacggggcacccccggggagggtaccccacggggaacccaagacagacaagggtacctaagggctaaagcgccaagaaacacgccccggggggtccacacgtggcggacggcccaaaactgggtccagattgaaagcgtcccacttgaacaacaccccgggcaattccacaaggatgaacaacaggcgctaaaacggacagcgctcccaaaacgaggggaggtcgtccccaaaaaaacccagggcgttgtaccacagagaccggactaagaaccgccaggagggacaaccacgggacacaacgcgcgttagcacaacgacaaagaggcgcccccccctccccctcccttctcacctctctccacctctcacaggggga

SEQ ID NO: 663344 - DNA, 1020 bp, Homo sapiens
  misc_feature (296)..(296): n is a, c, g, or t
tggaaacggattcttgctttgtgcgcccaggctgaagtgcaggggtataatctcagctcagctgaaaccttctgccccccgggttcaaaaaattctcctgctatcagcctctcccaagttagcgtggaatttacaagcgttggtgccaccagtgcccagcataatttccgtgataatttaagataaaagacaaggttttcaccgtgtgttgtggccaggctgttggtctcttcaatactctcctgtggccttcaagtgtgactccaccgtgcctttggccctcccaaagtgtgccntccgaattacggggtgttgacgccacaccggggcccaagcccctctccctgttgtgtgtttcacaccaactgggaagttagatttatacactagaagtgttagttaccctttttttactctttaactttcataaacacagttacacggcttcactaataaagtaacagactcgtggatatcgtgctccataagagagggaacaataaaattccacttattataatccagtgtctctttaaagttacacttgggggtttacaaaaccacttttattcaagccaccccgagattttaatcttacagcggtgggaccccgtggagagccccctgtggcgtggggaacagtgggccctccaaaaagagagccaagcttgcagaggccagttgtttacgtggggctatagccaacacaggatggccaaccaaaggggcacgttgggtatttccccggggaaacacagcggtgggattacgagaaggtatttctctttggaccaaaatggagaggtactcctattatcccccttttattaaaaacccccctgggtggccacaacgtgaccatacggggattatcgcaaggtggcaataagaacgtgcccatgttgcggatacaggtgccacttcaaacgtccctaaagtctatggcattcgcaaaaaaaaattttctgaaatataggctgggaaaactttttacacgggcatttttcagaaacgctttgt

SEQ ID NO: 663345 - DNA, 435 bp, Homo sapiens
cgcacctgtagtaccagctactcagaaggctgaggtgggaggatcgcttgagcctgcgaggtcggggctgcagtgagccgtgatcaaaccactgcactctagcctgggcaacagagtgagacctcatctcaaaaaaaaaaaaaaaaaaaaaaaaaaaaaaaagaaagaaaaaaaagaaaagaacaacaaaaaaagacaaatctaaactctttagcctgatgctcaagggcagagattctagagcctggggtcttgtggtggccccctagaccggtccctgtggagggaggaaagagcccaccaagcagtgttttgtaaaagccccagtgacacacagtgagggtgacaacctttcccccaggcctgcactgtccacgccagtagctcccaagttcgagaccagcttgggcaacatggcgagaccccgtctctact

SEQ ID NO: 663346 - DNA, 469 bp, Homo sapiens
  misc_feature (96)..(96): n is a, c, g, or t
  misc_feature (101)..(101): n is a, c, g, or t
  misc_feature (201)..(201): n is a, c, g, or t
  misc_feature (299)..(299): n is a, c, g, or t
  misc_feature (372)..(372): n is a, c, g, or t
tgaaatacttgtaatttcttagatctattatgctttttcttgattctctgaatgtatagtagtgcttctttagctaagaatatagttccccatcancaagntttgttttgcccaacagaccctttttcctttaggatgagattcagtggataattacattataattatgaccttctgggaagctgcttctcttatttgggnttgtgtgttgtgtgtttcctttccacactccttcagcagcctttgcctcccacttttatagaatttaccatatgggattttaactgtttgtcttccantagacaataagctccttgaagactgaatttccaggaacttttgttggatttgcatgtttgtgaagtgaattantgaaggctgcccagtttcatctgatcctagtcaaaacctaaatcccttatttctacgctaccttttgccaggtaaaaataaaacatgtaaaccatca

SEQ ID NO: 663347 - DNA, 146 bp, Homo sapiens
gaacaaaagcgggaattgggcccgccctcaaaggccaggccctaagggccgagaccacccaggagcccccttggggggggaggctgccggcaggggctgcgtcgggcgggcagacgggcccagaagcgggggaaggggcccggaaa

SEQ ID NO: 663348 - DNA, 152 bp, Homo sapiens
agcggctcaagagactggagcctggacggggacggacctcaaggcctcgatccagagacccccttcgagcagatgcatgggagaccctgcgctgctcaccacccccaacagtggcttgacacgaccatcacgaacaactagaacctgtacag

SEQ ID NO: 663349 - DNA, 405 bp, Homo sapiens
gtgaatgctgcaagtcgaatctagagtatcccacagtgactgtatcaagtggctatcttcacaagtgcttatcataccacattcacttctgaaacacccttgtttgcgatcgctaacctcactgggactagagcaaccgcagtctattcagagaatggaggctcttcatttctttaattcctttactccaaactcagccctccagtttcttcagaatgttacaccctgttaatcgtcactgtttccaataaggaacaaaattagtcagtttttggcagcaccttcatctttctagacctcctcctattctgtccttgtggacttatgtttaacatagaatatgaatgcgttcataacaaaaccattttctgcatttaaccagtcctggctctctctctgctgcct

SEQ ID NO: 663350 - DNA, 400 bp, Homo sapiens
gcaacaaagagtttaatggacacaaggccagccatgctgtatgggagacagagttattacccaaatcaattccccgaaaattcaaagtccagggagcctgcttctgactggggcctcaggacttgtggggtggagggagagcaggtccaggtggagccatcagtcgtcagaaatgcaaaaacctgaaaagacatctcaaccaccaatcttaggctctacaatagtgatgttatttgcaggagcagctggggagttgcaaatcttgtgatctctggaataatggctggtaatcttttatgtctacaccttagcagaattcaggctcctcacatcctcctaacctggtggcctttcattagcttcgcaaaggtgatttagtttgggggaagactgttatcat

SEQ ID NO: 663351 - DNA, 212 bp, Homo sapiens
agtcgagctgttaccagatatcagagacccagagacagaggtagacagatacccagagacagagggagacagagacccagagtagagagagatggagacccttagacagagggtagagaaagacccagagagagagggggacagagacccatagagagagggggacagagacccagagagagagggggacagagacccagagagagaggggg

SEQ ID NO: 663352 - DNA, 208 bp, Homo sapiens
gccacgtttcgcatggaccttacgatgtgatgaatggttttggcatgagtgtcttaaggattgctttcagattcgggttacagggcaaccagcgctgagcttcctattgcagagacaaagtaggatctagaactttcttgctaacaggttccagctaaaacaccaagttagattcttaaatgatgttcttttctatcattatttagat

SEQ ID NO: 663353 - DNA, 461 bp, Homo sapiens
  misc_feature (65)..(65): n is a, c, g, or t
  misc_feature (160)..(160): n is a, c, g, or t
aagatcactatagggaatgggcctagtcgcatgctccggcgcatggcggcgcgggaatcgattgncagttgaaacggttcccgatgttctctgcccagaagggcaggcccaggacaaacaccagatcggaagccgccaagttagccaggtagatttccgntatggttaagcgctgctgcctctgtcgttgctgccaccaccactgtcgccaaggcaaaaggaagaaggacaagactaaaaggttccccaagaggccaaagaagcagatagtgatgacgaaccctggcagcacccgatacagcaggtcccagtcttctagggcactctcgcaggaggtaatgttggcaggggcctgcaggcttcggttagagggctggagctccaacaagacctcggacgccatccacagtgacccggatagaaaagcaaagagctcacagcttcaaatcactagtgaattc

SEQ ID NO: 663354 - DNA, 145 bp, Homo sapiens
tctgtaatgctgattgtgtatggcattgatgagatgatgagacgcctcctcctcactctggactccagacgaggaaggtgatcccagtgacagcggggggcactgtgctggcagcagcgctgtgacgtgtcgcctatggcaaatc

SEQ ID NO: 663355 - DNA, 802 bp, Homo sapiens
ctacgcctgccgggccgggcgtggggcctgtgggaggttgcgcggccgggcccagctgcggggcggaggcggaggcggagtgagaggcctgcggcggcagggagcggcgtggactgggagcgggcgcctgtgagcctgaccctgagcctgagcctgatgcctgatgcctgatgcctggagctggtgctgtgcgaatgtgcctggcgctgtgctgatgcagcaaccattgttcggttgttctgggagagcttgttctgggggcttggcaggggttgtattgtgcctggcataggggctgtgccccttgaccccgccatggtgaggtgccattccattctggtcttgcgggacaccgtgaaggaggattgtttagacgcaagaaaccaggagtttccttgtgagaagaaaattcgagtcaggagtcttgacgtgcctgccaagaagtcacggctaccaaaaaacagagcgcgtcgggcccttccaggcactgaagcgttaaggaagaggtttgacgaatgcagcttggcggcatattcgagcgggcacttttatcaagccactcgagttttcccagcggggaggccccttggagatttgccaatcaccaacaccgagggtgctcaaggaacttgggcctattcccggccaagggccattaagggcggccccttaccaacttttgaccttcgataggttgatgagttatgcgggactttcttgaccagcagaacttgcggggggattcacagcattcgaacctttgttttgggaagatttgcgggttgctctgggatttgagatt

SEQ ID NO: 663356 - DNA, 129 bp, Homo sapiens
ataggttgcagcgagtcgatactgggccactgcattccagcctggatgagagagcaagactctgtctcacaaaaaaaaaagaaccaaatgagagagattcggaggctgagaagtcccaagttatatgtt

SEQ ID NO: 663357 - DNA, 259 bp, Homo sapiens
ctggttttgtttttgactttgctcaagggctgaaccctaatggtagtaccttccttttcttcctgtggctggtgccttctgatggggctggaatcactgaggtggatggttctaccctttctgccttctgtttgggacccagctggtgttctttggtttgctttcttcaggctctagggctgtgctatccaatacagtaaccacatgcggctgtttaaagttaagccatttaaaatcacataagattaaaaattccttc

SEQ ID NO: 663358 - DNA, 416 bp, Homo sapiens
  misc_feature (9)..(9): n is a, c, g, or t
tcctaaganaggttttttttcacttaggcatgcctaaacggctggatcactttgtggcgaggtcataaggaaccgccctgtcaatgtgggaggcccgcgggtttgctcctacagcaaatgatccacccgtgctggtgcttacgtgaccgctgatccagtctgtgctgtggctgaagcacatgaagtacccgctcttggttcgcactggccgtgggaatactatagctggatcccggaatgcactcttgaacgcgggtctaggggcacatagcgatatgatttcagattgccggataaggatatggaagatgcatatacatgctgacgccacaataagaaagtctactggagatagaagacaagcctctgggagctggaacatcacagggccttgtagacagggtgtgggctgcccg

SEQ ID NO: 663359 - DNA, 105 bp, Homo sapiens
gggaggaagattactccccaggttcctaggcattgcaggacttgggcacatctagctggtgggtggcccagagcctctgctgtaaggggcagcaggaggagtgga

SEQ ID NO: 663360 - DNA, 425 bp, Homo sapiens
  misc_feature (1)..(1): n is a, c, g, or t
nacgtctagaggatccctactggcattgttactgatgaaagcaaaattgcagtatgtgtatgatctcactgttatcaaaaagcatttatgcatgcttttatatatacatacacacttgcacacatgtaggcacatacaaacacatacatacatgtttctacatctatacagaaaatgttctggtaggaaaaataccaatctgtaagtctgtggggtaagaacagtaccatgtatggggaatgggactaaagagacagtagggagactttcacttttcaacttatacatgttgtacaataagcatattacatttgaaattttaaaaagagagaagaaaaagcatcatctggaatgtagacttctcaaaagactagtaaccagagttaggttttacagaaaggatggacttttttctaaaactctga

SEQ ID NO: 663361 - DNA, 818 bp, Homo sapiens
gggagcttgttactggttacttggcctcatgggggtccgagctctcggtgtcgagaacaagcggtgagatcggctgcgtatgccaggctcgaccaacacctactgtctggtagcgatcggaggctcaggagaacttctacagtgtgttcgaggggcgagctctccgataccatccccgatgagtgcacgcagtcgtatcgccggatgccgcatcatcgggcgcatgtgtgtggggaacaggcacggtctcctggtacccaagcaagtaccacgcgacacaggagtctgcaacagcattcgacaactagcgcgtcgcgcagagcagcagtgtcatgattagagcgggtggaaggagcggctctcatgccttgggcaaagtgtcaccaggctgcagtgactactgtggcctctggtccacccagacgtgtggacaggggagaccagaaggaacattcgtggcagagtgtgctcaagggtggaacgtgctgtcagtacgagacagctgcgccggaaccaggtggctaggtagggaacgcgtgaactgatgtcttcacgtcgaaatcagggacgggctggaagcagtcccgaagacgttccaagttgagaagatgcaggaatgaggctgtcctcatcgttgcttgaagtcgccaccgtggtggccggggactagtgaaccgaaggtagagaggtgattgatgatgaggatggttgggtcgacatgaggtggctgtgacggttgcgtagtggccatggacagaaagggaggagagaagactgtgaggatggttggagaaggtgtctgtcaaagctgaagtgaa

SEQ ID NO: 663362 - DNA, 232 bp, Homo sapiens
ccctatctcaaataaataaataaataaataaataaataaataaataaataaataaatttggcctatgaatggctctcatgcttgttaaaaaaaatagattcctgtgcctgtaatcccagcacttcgggaggctgaggtaagagaatcgcttgaacccaggaggcagaggttgcagtgagctgagattgcaccactgcagtccagcctgagcaacagagcgagagtcagtctc

SEQ ID NO: 663363 - DNA, 916 bp, Homo sapiens
gcgggcttaagggagcctggctagtgcctggcagcctggatggtccctgcagctcgtgggcctggccatgcttcgctggtcctgtggcgccagctttggctctttttcctgctgctgctcccgtggcgcgcctgagcccctgctgtgctgcctccatggcctgtgggatgtggaacctgacgatgcctgtggctcgtgcctggtgcctggcctggtgcttccatgctgccttgcagcgacgcagctcagtggctgtgcggtgtgccctctccaagcggtacttggacgctcttcagcttgccagtgtgtggccctgacgactgtgacgatggacgagtgatggcagccactgtgtggcccctgggctggcgccttcctctgtttgggccaagcggtacctggacctcctgaccacgtggtactgcagcttcaaagactgctgccctagaggggattgcagaatctccaacaactttacaggcttagagtgggacctgaatgtgcggctgcatggccagcatttggtccagcagctggtcctaagaaccagtgaggggctacttagagacgccccagccagaaaacggccttgctctgtcgttccacggctggtctggcacaggcaagaacttcgtggcacggatgctggtggcagaacctagtatcggggacgggctgatgaagtgaactgttgtccggcgatgtcccaacgccacgcgtcccacttctccttcaacacaagaccatgtggaacctgtaccaccgggacgcagcctgtacttcatgccataatcccggtacaaacgcatcacgcctcttgccatcacgcaccctgctccctcttcgactgaaccgctagacgctgcaaaccaggtatgcatggaaggcctcgcggcacccacttaaaaacgcccgc

SEQ ID NO: 663364 - DNA, 936 bp, Homo sapiens
  misc_feature (283)..(283): n is a, c, g, or t
  misc_feature (666)..(666): n is a, c, g, or t
  misc_feature (674)..(674): n is a, c, g, or t
  misc_feature (677)..(677): n is a, c, g, or t
  misc_feature (679)..(679): n is a, c, g, or t
  misc_feature (682)..(683): n is a, c, g, or t
  misc_feature (686)..(686): n is a, c, g, or t
  misc_feature (692)..(692): n is a, c, g, or t
ggtacatgtaaatgtttgttacatgagttgtgaagaattctgaggccatgcctgagatcagtgattcagaagtcctgtcactgaatagtaattgttgcaggggtgacatatgttccacatatttaccttctgtaagtgaagcagagtgaagaaccagaccaatgtagattttctagcacttatttttgggcaagttattttgttctctgggcctctcaatgtccttatctggaaaataggaggtcacattcttgctaggattaaatacattaatgcatgcaangtatttcctgattgccttgcagatagataataggtgcccagtaaatgttagttctgtcccttttttttgtatgggagaggagggacgaggagggagtgggctgttcttaaataggaatatttttaaaacgtattatgaacttatcacagccccatgtttcacttttcagggccaatgtaggaggcagtaaagaaagaaaaataaatgagacatctcttgtcaagttataactggttttatgtataaataatttagaaacacattacctataatacaaaacaattaaaaaatataccactctatttggctgtatttactacttttctgaaactgcttactcggaggttcggttcaccttacctccttatttttactcccttctntttgaccntcngntannatnaaccancaactttggtgaaatcctttctttccttggcttcagtgaaaacatcactttctaaacaatgaatttcgttttctactggacaggggccctttttatagaggcaataaacttgtatgtttaactttgatgattgattattgattcagttggtaatacaaattaaagtttggcttaaaaccagtgaaatatttctgggaagtaattgaatgatgactgtacacacacaaggaagtccggtaccggt

SEQ ID NO: 663365 - DNA, 654 bp, Homo sapiens
gcgggcttaagggagcctggctagtgcctggcagcctggatggtccctgcagctcgtgggcctggccatgcttcgctggtcctgtggcgccagctttggctctttttcctgctgctgctcccgtggcgcgcctgagcccctgctgtgctgcctccatggcctgtgggatgtggaacctgacgatgcctgtggctcgtgcctggtgcctggcctggtgcttccatgctgccttgcagcgacgcagctcagtggctgtgcggtgtgccctctccaagcggtacttggacgctcttcagcttgccagtgtgtggccctgacgactgtgacgatggacgagtgatggcagccactgtgtggcccctgggctggcgccttcctctgtttgggccaagcggtacctggacctcctgaccacgtggtactgcagcttcaaagactgctgccctagaggggattgcagaatctccaacaactttacaggcaaggacttcgttggcacggattccttggttggagaccctgtatcgggccggccttaatgagtaccttgtgctaagagagtgtccattcgccacgttccacttttcctcaccccaatatatgtggaccctgtacacgggcgcagctgatgagccagatccgggagacgcagca

SEQ ID NO: 663366 - DNA, 765 bp, Homo sapiens
  misc_feature (295)..(295): n is a, c, g, or t
tttaaatcggcacgaggaaatgactcagggccactccggccgactggtacaacgagcggatgagctgctcctggatatcccctgaggggaaggtcacgccttgctccttgaagccatctgtattggtgccggcgttcaggatggtggcgtacacccgccgggccagggacttcttggtcagcaggacggccaccacaccctccgagcggcagtacccattccccgctgtgtcgaaggccttgcaggtgccctcggggctgagcatccccagcctcaagaactgcacggaggtgtngggcttcagcaggacgttgatgccccccacgatggcggcagggcactgcccgctgtggatggcctggtaggcgttctgcagggccatcaggctggaggagcaggctgtgtccagtgcgatgctgggccctctgaagtcgaagaagaaggagagccggttggccatcatcgctcgctggcagcccaccatgctgtagcccacgagtgtctcggggtctcggctcagggcctccgaggtctcagagccgctcacgcccacccagacgccagtgtgtgttcctcggagtgaatctgggttgatgcctccgtccacgatggcttcataggtgacttccagcagcagccgcagctgagggtcatcgtgtgttgctgcttggggtgactccgaagaagaggctcaacctaaaggtcctaagttcggaccgcggcagcgctaaaccgctccggaggttctcggcctttcccggttgt

SEQ ID NO: 663367 - DNA, 307 bp, Homo sapiens
gcagaggccgggctgagacgtggccaggggaacacggctggctgtccaggccgtcggggcggcagtagggtccctagcacgtccttgccttcttgggagctccaagcggcgggagaggcaggcgtcagtggctgcgcctccatgcctgcgcgcggggcgggacgctgatggagcgcgccatcagcccggggctgctggtacgggcgctgctgctgctgctgctgctggggctcgcggcaaggacggtggccgcggggcgcgcccgtggcctcccagcgccgacgaaggaggcggcgttcggcctcgg

SEQ ID NO: 663368 - DNA, 298 bp, Homo sapiens
tcccttgtaggaatgacaagatcttggctgtaaagttagccaacatccgagttgtgtctgaggacttgctccaggacgtctccgcctccatcaagagccttcaggagatgccttagcagaaaacttagccatttgggggcagattccaacgcagagcctcggaggttgtggccccaagagggaagtcaggggctgcgctctccaaaaaaagcaaggggtcttgacacgctgtgggcatgcactaatgagaagggagaatgcgtttatctcttaaaggcggagcagcaggaggagtacg

SEQ ID NO: 663369 - DNA, 283 bp, Homo sapiens
ggtcgcgtatcttcaccgatggaaatctcatccttcggctgggggcagtggagtcacctgaggtcgggagttcgagaccagcctgaccaacatggtgaaacgctgtctctacttacaatgtagaattagctgagggtggtggcacttgcccgtaatcccagctacttgggaggctgaggcaggagaatggctggaacccaggagtaggaggttgctgtgagccgagatcgtgcccttgcactccagcctgggcaacaagagtgaaactccatctcaaaaaaaa

SEQ ID NO: 663370 - DNA, 821 bp, Homo sapiens
  misc_feature (280)..(281): n is a, c, g, or t
  misc_feature (293)..(293): n is a, c, g, or t
  misc_feature (296)..(296): n is a, c, g, or t
  misc_feature (299)..(299): n is a, c, g, or t
  misc_feature (303)..(304): n is a, c, g, or t
  misc_feature (313)..(313): n is a, c, g, or t
  misc_feature (322)..(322): n is a, c, g, or t
  misc_feature (336)..(336): n is a, c, g, or t
  misc_feature (345)..(346): n is a, c, g, or t
  misc_feature (352)..(352): n is a, c, g, or t
  misc_feature (397)..(397): n is a, c, g, or t
caaaaacaagccagcaaaaagatactgtagagaggttggcttgcttccctctcttcctaactgcatgttgaaaaataagccgttattgatcttaaacatcggtcagatgagtcatacattgggttattttttatatacatgtatacacaaaatatttcaaattgaaagcaacatcttaatggattcaaaactattacaagctgttgtctaaaacaggtgagaaaaaaatttataactgtaaaaacaaatgcacatattgatatttaaaatgcgtaattannaaaacccattgntgntgngttnntcttgtatnccaataatnaagccactactgtnggcactgtnnggtttnctattttaacactgaaggagtgaaagtatttcctatatttatgantttactactaaaatcttggcaaaaaacaaaaaaaattggctctaccgttgttttgggctgaaacctgcttaacctcaagggtgtttcatacttcccccccgaaaaattcccctgtgaaagttgggacaccaactggtattacccttaggttggcttaaggggattccactattatataaagtcaattaaaaattgacgtagtggtatatattgcaacatggtgtacagaggggaaataagtgaatacgtattaaaggaaccattcctcgtcattccttaacctttaatccccgtatataccatagtctactttgtcaaatttccagacgttcacggcctttggaatccataattcaaaatgtgcaccatgatggttacggggaaaatcgatatctaataacggtttaaataatccccgggaaaa

SEQ ID NO: 663371 - DNA, 604 bp, Homo sapiens
  misc_feature (42)..(42): n is a, c, g, or t
  misc_feature (48)..(48): n is a, c, g, or t
  misc_feature (60)..(60): n is a, c, g, or t
  misc_feature (123)..(123): n is a, c, g, or t
  misc_feature (126)..(126): n is a, c, g, or t
  misc_feature (130)..(133): n is a, c, g, or t
  misc_feature (135)..(135): n is a, c, g, or t
  misc_feature (138)..(138): n is a, c, g, or t
  misc_feature (144)..(144): n is a, c, g, or t
  misc_feature (546)..(546): n is a, c, g, or t
  misc_feature (553)..(553): n is a, c, g, or t
  misc_feature (563)..(563): n is a, c, g, or t
tctagagcccatgtttgatcggtacatgtgttaccgatacgngttacnatacgtgttacngatacgtgttaccgatacgtgttaccgatacgtgttaccgatacgtgttaccgatacgtgttnccnatgnnnnancgnacgtgntaccgatacgtgttaccgatacgtgttaccgatacgtgttaccgatacgtgttaccgatcatggcatacacgtgttaccgatcatggcatacacgtgttaccgatcatggcatacacgtgttaccgatcatggcatacacgtgttaccgatcatggcatacacgtgttaccgatcatggcatacacgtgttaccgatcatggcatacacgtgttaccgatcatggcatacacgtgttaccgatcatgtcatacacgtgataccgagcatggcatacacgtgttaccgatcatggcatacacgtgttaccgatcatgtcatacacgtgttaccgatcatggcatacacgtgttaccgatcatggcatacacgtgttaccgatcatgacatacacgtgttaccnatcatgncatacacgtnttaccgatcatggcatacacgtgttaccgatcatggcatac

SEQ ID NO: 663372 - DNA, 144 bp, Homo sapiens
cagcagcatccccatccaggcgcacagcatgtgggagggcaggggtgggtttggtcttgttccaacactggtccattttcatttttcacgtatgttcagcatcatggaggcagtcagtgtgcattagcaggtggcagtcagcat

SEQ ID NO: 663373 - DNA, 143 bp, Homo sapiens
aacccaatccaattatcccttttattttaaaatgtgcaataaattacttttgactatagtcaccctgttgtgctatcaaatactagatcttatttattctatctaactatatgtttatgctcattaaatatattcttctctca

SEQ ID NO: 663374 - DNA, 560 bp, Homo sapiens
  misc_feature (29)..(30): n is a, c, g, or t
  misc_feature (34)..(35): n is a, c, g, or t
  misc_feature (37)..(37): n is a, c, g, or t
  misc_feature (39)..(39): n is a, c, g, or t
  misc_feature (41)..(41): n is a, c, g, or t
  misc_feature (45)..(45): n is a, c, g, or t
  misc_feature (53)..(55): n is a, c, g, or t
  misc_feature (68)..(68): n is a, c, g, or t
  misc_feature (101)..(101): n is a, c, g, or t
  misc_feature (502)..(502): n is a, c, g, or t
  misc_feature (509)..(509): n is a, c, g, or t
  misc_feature (519)..(519): n is a, c, g, or t
ttcgagctcggtccatgcatgaccggaanncgtnngntntntctnttttatannnaggaaatttgtancactttttttagtattccacatgtaagtgatancatatgatattcgtctttctctggctgacttaatttatgattatctctaggtccatccatgttgctgcacgtgttaccgatcatggcatacacgtgttaccgatcatggcatacacgtgttaccgatcatggcatacacgtgttaccgatcatggcatacacgtgttaccgatcatggcatacacgtgttaccgatcatggcatacacgtgttaccgatcatggcatacacgtgttaccgatcatgtcatacacgtgataccgagcatggcatacacgtgttaccgatcatggcatacacgtgttaccgatcatgtcatacacgtgttaccgatcatggcatacacgtgttaccgatcatggcatacacgtgttaccgatcatgacatacacgtgttaccnatcatgncatacacgtnttaccgatcatggcatacacgtgttaccgatcatggcatac

SEQ ID NO: 663375 - DNA, 444 bp, Homo sapiens
  misc_feature (386)..(386): n is a, c, g, or t
  misc_feature (393)..(393): n is a, c, g, or t
  misc_feature (403)..(403): n is a, c, g, or t
atcaacgcctttatgctcacacgctttctacaactgtgcatacaataaagtgcacgtgttaccgatcatggcatacacgtgttaccgatcatggcatacacgtgttaccgatcatggcatacacgtgttaccgatcatggcatacacgtgttaccgatcatggcatacacgtgttaccgatcatggcatacacgtgttaccgatcatggcatacacgtgttaccgatcatgtcatacacgtgataccgagcatggcatacacgtgttaccgatcatggcatacacgtgttaccgatcatgtcatacacgtgttaccgatcatggcatacacgtgttaccgatcatggcatacacgtgttaccgatcatgacatacacgtgttaccnatcatgncatacacgtnttaccgatcatggcatacacgtgttaccgatcatggcatac

SEQ ID NO: 663376 - DNA, 758 bp, Homo sapiens
  misc_feature (378)..(378): n is a, c, g, or t
tagaacgatcccatctaatagtctcgattatagaacgtgaccttccgtgagacaatgacagataaccctagcctatccggataagatgtaggcctgtctccagggcagggaagctgggagggtcagggcaaagaaaggattagacgcagaggatatatggatagcctccttactaagaatccagaagtttctcattcccgcatgtatggagactgagcttatgaatatgagagcgtcttcgataaaaactgggatgcactcgaggacagaacatagtgactgggatgtatgcaggctagacttatgattctggactgattaggtcgttataatagctgtttgagtggcacaacagttgtacaatgtgaaagttacaanctcgtatgtttatctcatgatgtgccgctggactgaactttgggttcatttaggggtcaaagccagttgttcatgttaaaacttgaattcattctgatgcttggcccccatacccccaaccttgtccagtggagcccaacttgctaaaggtcaatatatcatcctttggcatcccaactaacaataaagagtaggctataagggaagatgtcaatattttgtggtaagaaaagctacagtcattttttctttgcactttggatgctgaaatttttcccatggaacatagccacatctagatagatgtgagcttctctttcttctgttaaaattattcttaatgtctgtaaaaacgattttcttctgtagaatgtgtgact

SEQ ID NO: 663377 - DNA, 175 bp, Homo sapiens
cagaggcctgacttttaagagagcgacttagtcatccccaagaaccgcaggtgcaaaggggagcttaagatgaaacacatgctggcatgacattcctattgccttgataagggacaccacgcagagatgaactgggactaaagcagagagaggagaccgacgagtgtcagacgca

SEQ ID NO: 663378 - DNA, 1634 bp, Homo sapiens
gcggaaacctgtggaccccgcctcgctctgggagtactaggtgccggccctgtccttcccctgacccatgacccacatggctggctccatgccaaaaccatccctgcatcaaccccttactcctgcacaggatgaggctccacgggcgtggatggcaagccaccccttgaactttcaaacatgtgaacaccccagacgaaaacaggttgcacccacaacacgtagatcagaacccataaatggagcatcacccaaacatcatcacacgcatcacgaacacggagattcccataacatcacaccatcaggagatcaagaaaggcatagcgggacatggggaccattggcgacgacggaattatacaaagactgcccaccatgaccccatctctgatacatgacacacaggcaggaccgagaatcatggcaaaccatcgatatatcattccttgaaccatacaagacacgggaatcactggacgaaccgtataatatatacatccttgcgacaaggccgggccttaacagggagacagccgaagagagaggacatgggagaaggcccacatgccgaacagactgccgacccaggtcacaccagcaaaacatacatctcaaggaccccacatcaaccaagacacaaaacagatacgatcacccaagcgacacccgaccaagagcaacgcacaccatgagcgcaaccaaaatagctaacacccaaacgaacacaagccacgcacgagggcgccacccctacacacaccatgaaaaagtgacaacaactggaacaacccccagaacaacacacccaccccaggacatagagcaccacaaggcggcacgcccacaggacccaggagcctggagagaaccaacggcacacagacaacccaccacggaaagccgacgaaccccacccaccggcaaacagccaaacaacacaaggaccaaaacacccagaaccaccccaccccacgacccaacggaaacaacacaacacaagacccaaaacacacgacgcaaaacaaaaacagcaaataaaacacccgacccagacgcgacgacggaacaaagaccaagcacaagaacaaccagacaaaacaaagaacacgcaacacaggccaaacaagaaaacaaaccagcaaagaaactcagaccgaaccaaacgacaacaacgccagacaaacaagaacaaaaagaaccaaacaaacaacaacaacaaccaaacaccatcgagaacagaacgagcaagaagcaagaaccaaaggaacacgaaacagaaaaaaaaacaaacaaagcagcagaacaaaaaccgaaaagacagcagaagaccaaagaaccacgaagaaagacgaaacaacgcaagaacaacaacacgacagacagcctcagcaaaccaacccaacagcggaaagcaagaaaaccgaaaaagacacacaacgacaacgccaacaccacacgagagcagagcacacaaacaaagatacagaaacaaacaaacaaaaaaaaaaaagaagccagaaacaacacacaacaagaccaaaaacaaaaggaacgaacacgccggaacacaaacgagaaatacgacaaaagcaacaaaaaaagacgacagagagaacgaaagctcaccaaag

SEQ ID NO: 663379 - DNA, 797 bp, Homo sapiens
catgcctgtaatcccagcacttgggaggccaaggcaggtggatcacctgaggtcaggagttcaagaccagcctgggcaacatggtgaaaccttgtctactaaaaatacaaaaaagtagccgggtgtgatgacgcacccagctactcgggaggctgaggcaggagaatcacttgaacccaggaggtggaggtcgcaatgagtcaagatcgcaccactgcactccagcctgggtgacagagggagactccatctcaaaaaaaaaaaaaggaaatatggtctatctggtctttaagccatttcataattttaaagatatgatattatcaccaggaaatataaaaccaagcaggcagctaaaaactggcgacgttgggtaacaacctggtattgagtggactagaaactacgcagaagaataattttcttattggaattttagagcaacaaaatttgggacccgggggaaaaccatacctttaacaaaatatggggatcacctggggctttggggggtccacacctgtcatcccagctccttgggggaaaccccttaggggcgtgtggattccaacctggaggctcagggaggttcaaggacccacgctgggcaacttggttggaggaaccctgtcttccacgaagaaaaggaacagaagagaacacacgtggggcgcgcgcccgcgaccagaagaagatttaaacactctgtggggcgcggggcgccaatgtaaacagggcacatgggcccagggaaccggggcgagagcggggggttccccaaaaaagccgggcgcacg

SEQ ID NO: 663380 - DNA, 1023 bp, Homo sapiens
  misc_feature (585)..(585): n is a, c, g, or t
  misc_feature (638)..(638): n is a, c, g, or t
aagcagtggtatcaacgcagagtcgccattacggccggggacctttccgagttggctgcagatttgtggtgcgttctgagccgtctgtcctgcgccaagatgcttcaaagtattattaaaaacatatggatccccatgaagccctactacaccaaagtttaccaggagatttggataggaatggggctgatgggcttcatcgtttataaaatccgggctgctgataaaaagaagtaaggctttgaaagcttcagcgcctgctcctggtcatcactaaccagatttacttggagtacatgtgaaagaaaacgtcagtctgcctgtaaatttcagcaagccgtgttagatggggagcgtggaacgtcactgtacacttgtataagtaccgtttacttcatggcatgaataaatggatctgtgagatgcactgctacctggtactgctttcagtgtgttccccctcagccctccggcgtgtcaggcatactctgagtacgatcaatttgtcgatgcagcgctatgcgggtcggaatctcactgagccacccatcattgtgaaataattacctcagttgtacaggactnggtgatcaggatccaggcactcacttgtattctactgtcaataaacgtttatnaaacttgatcctgctacgtgaaaacaaaaacatgaactccgattgacgtctctgctgctcgtacgctgagggcatggttcagagctttccatgcttttgacaaggatggagatgggatcatccaggcgcaaccgttctgggagtggatggggggtcacatgtagtgctgaaacaggtgggtcatgcagagccatgaggatcctcagattacagtgagccgcgattccaagcattaccgtcaggaccggggttgccctaggcacccgcctcggggggggcgcgaacaccccacaattgggggggaacaacctgtagagggacacaccgcgaatgggattcattacacgcacagtcgggaggaacagaccgagagtgttggcacaaa

SEQ ID NO: 663381 - DNA, 359 bp, Homo sapiens
cacgagggtgctaccagagacacctgctgtatcttagatgagagagacggtagttattgtgcaactacctgtggcattgcagatatcctgtgtacttatcaaaccaaagtggacaaggatctacaggctttggaagacatattacattaaggtgaaaacacaacattagaagtcaaacaggtgataaaagcaattcaacttacttataatcctgatgaatcatctaaacccaatatgatagacgctgttactttgaagtgcacgtgtgtagaagaaattatgaaatatgaagcattgattttaacacatgactcaagtgttcgatatttgcaggaaatatataattctaatcgccttgt

SEQ ID NO: 663382 - DNA, 632 bp, Homo sapiens
  misc_feature (509)..(509): n is a, c, g, or t
aagcagtggtatcaacgcagagtcgccattacggccggggacctttccgagttggctgcagatttgtggtgcgttctgagccgtctgtcctgcgccaagatgcttcaaagtattattaaaaacatatggatccccatgaagccctactacaccaaagtttaccaggagatttggataggaatggggctgatgggcttcatcgtttataaaatccgggctgctgataaaaagaagtaaggctttgaaagcttcagcgcctgctcctggtcatcactaaccagatttacttggagtacatgtgaaagaaaacgtcagtctgcctgtaaatttcagcaagccgtgttagatggggagcgtggaacgtcactgtacacttgtataagtaccgtttacttcatggcatgaataaatggatctgtgagatgcactgctacctggtactgctttcagtgtgttccccctcagccctccggcgtgtcaggcatactctgagtagataatttgtcatncagcgcatgcaaatcatattttactttggcccccattattgtgtaataattacctaagttgaactggactaggtgatctgcttccatgaattcacttctatcctagccgtcaatagattttaa

SEQ ID NO: 663383 - DNA, 430 bp, Homo sapiens
catcatggggttctggagtatcggactggtttatgacctggcccgtagtcctcacagcttagacctgtccagtcccaacatggccaactacagctcatgctcgctctgatagcctttgcgaaatactttcccggcattgtgaaccagcccacgtagcctttttggtcagctcagagtgcttctagccatgtaacaatgtctgagcaggatgcccaaggagcctctcaagattccagtagcaaccagcaggacccaggctagcctggggatgcagaagtgccggacgaggatctatgtatttccactccatgaccgaggttgccgatggggatttcattgattgggaggctgaaaccgactccgtggtgattgctgggccccctgaggtgctccgttcacctgagatgcacgttgagaatgtgctggagga

SEQ ID NO: 663384 - DNA, 445 bp, Homo sapiens
accccagatagcctcgggcgctgcctgtagtcatgctgacagctgtacagtagccgccaagactgctgacagctggagacggttctggtttcaactacggtatattgatatcggaagtattctagacagatcctcggttgggttttctagctacatgtttgtattgcacagatccccacctgccatcctatagtgttgtcttcctgtgtgttccgggggcttctggccacctgggcctgcccgggtaagtcctttcaggtggtggcccatacagagacccagtgtttcccatttagcgtccccctgatgctggccaactggaggactgcagggggctccaggtcactctctccttttatctcccctcagttcctgtggtgtccttcaagtttggttttgggtctgtactcctccacctcctgctattctactgttttgtctccta

SEQ ID NO: 663385 - DNA, 100 bp, Homo sapiens
aaaaagggatattttggttttgttaaaacccctgttgacttttttaccctgaacattttttttaacttgatttaataaaaatgtttattttgaaaaaaaa

SEQ ID NO: 663386 - DNA, 117 bp, Homo sapiens
cagccttcggagcgttctctgtcctacttctgactttacttgtggtgtgaccatgttcattataatctcaagagaaaaaaaaaactgtaaaaaaaagcaaaaaagacaacaaaaaaa

SEQ ID NO: 663387 - DNA, 698 bp, Homo sapiens
caaacaagggtcacctgcaacagcatagagtgtagcatttcgtcagggcatacgtgccgctcatgtagtggcagtctccagaaacggtaacgggggtagtcttcttagcagtacatatacgaaggcagcagcgcacttaccaccccttcacgagaatgctcctgtaacctacaaagtaggccttattcagccatctgcttcttttaccagcctggggaattgatcagaccgtggaaaatgttcctaaaccagttagctgcgttatccgatcaggctctgtaacatctcgcccacagatagcggcttaggagtacccccacgatacgcacagcacaccactgtgccttcgttgagctttcttcctgccataggtagctgggcttgcccaccctagtatgcgttagtagtggtttggcaaggttagaaggccacggcctctctgtcatgctggaaagtgcctactctctggaccactgtagcaaaggccgtggcactagtcatgggtctggaagctccagccatctgcagcaaaggcagcctatcccattgcaaggataggagctgaacgaagtaattcttcagctcttccttttgcataaatgtttagttgaagattataaattggattttctttcacacatactgatcattcttcacagtcttaaataaaacggccctcgatttctctccaatggaaa

SEQ ID NO: 663388 - DNA, 1015 bp, Homo sapiens
  misc_feature (509)..(509): n is a, c, g, or t
  misc_feature (577)..(577): n is a, c, g, or t
  misc_feature (630)..(630): n is a, c, g, or t
aagcagtggtatcaacgcagagtcgccattacggccggggacctttccgagttggctgcagatttgtggtgcgttctgagccgtctgtcctgcgccaagatgcttcaaagtattattaaaaacatatggatccccatgaagccctactacaccaaagtttaccaggagatttggataggaatggggctgatgggcttcatcgtttataaaatccgggctgctgataaaaagaagtaaggctttgaaagcttcagcgcctgctcctggtcatcactaaccagatttacttggagtacatgtgaaagaaaacgtcagtctgcctgtaaatttcagcaagccgtgttagatggggagcgtggaacgtcactgtacacttgtataagtaccgtttacttcatggcatgaataaatggatctgtgagatgcactgctacctggtactgctttcagtgtgttccccctcagccctccggcgtgtcaggcatactctgagtagataatttgtcatncagcgcatgcaagaatctcactgagccacccatcattgtgaaataattacctcagttgtacaggactnggtgatcaggatccaggcactcacttgtattctactgtcaataaacgtttatnaaacttgatcctgctacgtgaaaacaaaaacatgaactccgattgacgtctctgctgctcgtacgctgagggcatggttcagagctttccatgcttttgacaaggatggagatgggatcatccaggcgcaaccgttctgggagtggatggggggtcacatgtagtgctgaaacaggtgggtcatgcagagccatgaggatcctcagattacagtgagccgcgattccaagcattaccgtcaggaccggggttgccctaggcacccgcctcggggggggcgcgaacaccccacaattgggggggaacaacctgtagagggacacaccgcgaatgggattcattacacgcacagtcgggaggaacagaccgagagtgttggcacaaa

SEQ ID NO: 663389 - DNA, 580 bp, Homo sapiens
  misc_feature (512)..(512): n is a, c, g, or t
aagcagtggtatcaacgcagagtcgccattacggccggggacctttccgagttggctgcagatttgtggtgcgttctgagccgtctgtcctgcgccaagatgcttcaaagtattattaaaaacatatggatccccatgaagccctactacaccaaagtttaccaggagatttggataggaatggggctgatgggcttcatcgtttataaaatccgggctgctgataaaaagaagtaaggctttgaaagcttcagcgcctgctcctggtcatcactaaccagatttacttggagtacatgtgaaagaaaacgtcagtctgcctgtaaatttcagcaagccgtgttagatggggagcgtggaacgtcactgtacacttgtataagtaccgtttacttcatggcatgaataaatggatctgtgagatgcactgctacctggtactgctttcagtgtgttccccctcagccctccggcgtgtcaggcatactctgagtagatattgtcagcacgcngcaatcagaactcacgagcaccacatggaattactcagtggacagactgggacagatcagcccactgt

SEQ ID NO: 663390 - DNA, 915 bp, Homo sapiens
caatgagaagaagtgatgacagacagaccaagctgtgagatagtagatggcaccctgagtaagctagcaagtaactgagagaactgccagctgatgggaaagctgtagtgcatggcctcagacatcccagtgcctgcatcttgccagtgtgtgatggtgctgtgcttgccaccatgaacatggtgaaatcatgtgatgcatgttgatcttggatgtgaatgctatgtatgatctcttggttggtgcttgacataaaatgttttgccctgtgaaggccacccctgattattccttgtctcactgccatgatccacgtgatgaactaagtttgaaatataaaaaaacataaaatgaacagattgctaatcatcttgtgcatcatgatgcatgttcaatcatgaaacccaaagtgaagtgtggagttcaatgtatatccttgcaatgactgacaatggcctccgtcaaccactcccacattggacacacaacatgatggtttgctcatggtggtgctcctgatgaggaacccttcaggactggaactgagaaagatagatattgaggaagaagtatttgttgatgttagaacctgtcaaaaaacatattgacacatgatatagagcagcatgactatatggtgacgcacaccgttgccaatcatataccacaggggtcgtggcagaacattgtgaacctagaaatggccaatccactgaacatccaaacgcttggaaaagccatctccctgattttgccatttggtgaaatgcaacacatgtctacatcccagcaagggttaggtagtgaatgtgcactacccaagaaggcgtaggattgagatattgtagttggcaccacaattttggcaagtagcgaagcctagaataaaccttggcaaatgcatgcatacatgaa

SEQ ID NO: 663391 - DNA, 248 bp, Homo sapiens
tacctcagcatgaaacaatcaacattagcaaaaagtaataacatgagcagtacggacttaggctaccccctccagtttgctttccgtaactgctaattgtccctactggcaagtcaggaatgattgctgactcacagtatggctgctatgactgtgtataaacttgagggatgggtgcgggaacatagactcactcttccacattcccaagttgggtctagtgtgctgcccagtaacaaaccatggga

SEQ ID NO: 663392 - DNA, 583 bp, Homo sapiens
aactcgctgagaggtcatcaaatgaatacaggataccaggatgaatccagaaatgttgccttatctgcttctgtcaaatattctccaatgttctgaatcttagtcataactgttgcctgatcatgtgcagacattatcaaaagctgctcaaaaagatgctcgacatcatatagtcactaagaaaatccaaatcaaagccacaataaataacacaaccaccaggatggctaccaaaaaaatggaaaataacaagtgtaggccaggaagtggagaaatttgaacatacgtgcactgatggtaggaatgtaaaatggtgcaactgctgtggaaaacagtaaggaagttcttcaaaacgttaaatagaattaactatatgacccgacaattctactcctagatgttatacccaaaaaaatagaaaatggtactcaaacaaataccgtcacagcagtactatttacacatagtcacaaggtggaaataacccaaatttccatcaacagatgactgaataggtaaacaaaatgtgacatgtacatgcactggaatattatacagctataaaacatgaatgaggcactga

SEQ ID NO: 663393 - DNA, 503 bp, Homo sapiens
  misc_feature (371)..(371): n is a, c, g, or t
ggaatcgaggcggaccctgcatctgtgctctctattcccacagcccacctagtctagagaagacacaccagtattactacaactccacagagtatgtgcacagtaattgcggcttaaataaaatgcaaagcctcttcaccaagtgctcctatttccccaaatagaatgtaagcatcttgatggcagagaatacagcttaaatcctcccaggttcccaaccacctttaggaaggaatacagtagaggctgtgtggcaacaataaaaatttgccactcaggccaggcacggtggctcacacctgtaatcccagcaccttgggaggccgagccaggtggatcacctgaggtcaggagttcgagaccagcctggncaacatggcgaaaccccatctctaccaaaaatacaaaaattagccgggcatggtgacgggcgcctataatcccagctacttgggaggctgaggcaggagaactgcttgagcctgggaggcacagattgcagt

SEQ ID NO: 663394 - DNA, 245 bp, Homo sapiens
aaaaacaataccaagaaatatacattcggtagaaactattcttttgtttttgttgcattttgtttgaccttttaaagtagcttcgttctgaagctcagactagatagcctgggctaaccctgaactcccatcgctctctccctacatgcaagtgattttttctacatttatgtttttttctcctttgttttgttttacttattaaccctggtgagtgacaaaagcattctatatgctgtcgacgc

SEQ ID NO: 663395 - DNA, 438 bp, Homo sapiens
ggtgtgcatgtaataacaaaacacaatagatttccattagaaccatcctttaattcaataaattctttggatgaactctgtaaatagactactgacacatagcactcaaaaagtcttatgaaccttaaaacacaaagtattagactgggtagacatatggacaatacagctcatcattttatttttgacatgttggacttcaccatgcaagtaaattaatgcatatatgatatattgttttgttttgagaaagggttttactgtgttacccaggctggaatgcattggcaatgatcttggcttatcagaaatttctgttctcctgggtttaagtgatccttctactttagcctaccaagtttgtgggacttaataagcatacctctttgctcagctaatttttaaactttttttttttaaacattagtgtttcctttt

SEQ ID NO: 663396 - DNA, 291 bp, Homo sapiens
cccttattacgttgaagtacattccttcttttcctaatttgttgagagtttttatcataaaaggttaatgaactctttcaaataatttttctgcatctattgagatgatcataggttttttgccctacattctgttagggtggtgcatcacctttattaatttgcatatgttagctgggcatggtggctcacaccactaatcccagcacttcagaggccgaggcaggcggatcacctgaggtcaggggtttgagaccagccaggccaatgtggagaaaccccgtctctact

SEQ ID NO: 663397 - DNA, 170 bp, Homo sapiens
tctctccacactggtggttttataaaaagaggaagagagaactgagctaacacactcagcctcctcactatgggatgccctgtgctgcctccagactctgtagagagtccccaccagaaatttgtggccttttaggcgggagttaggcgaccaaaccagtgtggagagag

SEQ ID NO: 663398 - DNA, 834 bp, Homo sapiens
  misc_feature (463)..(463): n is a, c, g, or t
ggacgcatgcaggtgagtttgtctatctccgcaggaatgtgacaggtaggtctccagagccttctctctcctgtgcaataatggcaaactctttagaggaggacaataactcattgcagccaggtgtgcgggaatgaagatggcaacagtgtccaaagcaattgaagatcagctgctagtgggtgttagggaacaaggtatggtaagtggcgattgtgctatacacgcatatctgaggaagagtatctggggtgagtgaatttgtggttccttgtggatgtttctggaagataagccttacagacggagaaatgatggatctggcagtgtgggagccttatttgttcaggaccaacctaaaatatgtgggctgataaccggattatcctgtgaccgccaattctcaacgagtagtagttggtaaactagggaggaaggtccgatcgagtcgaaccgaatgggngtaagtagtccgggcgtgcgaaatcttagggtgcaatgaggacacatgtactgaaatcgtcttgtaccacaatgtcgattgatatccgtcaagatcggtacgaattgtacagatccctgtagttagccagtcaattaactatggtggggtttctcccgaaacatccacgcaggaaaccatttccgtgtagcggtgagtggtctagcgcttggtaggagcttaaagtggggaatctagccccaatagcgaccgggggttgcatccgggacaggcttggatgttcactctatgggattctcttgcttagaaatttcgcccaatcctatacatcgggttgacccccaagggtttggtcattaccattgccaaga

SEQ ID NO: 663399 - DNA, 246 bp, Homo sapiens
gaacgggtgctgctggttgcaaagtattctgaatccgtgacggaggccagtgagaaactggagcaggcctgagaagaaggccactgatgctgaggcagatgtggcctccctgaacctgccgcattcagctggttgaggaggagctggacctggtcccagtgagcgcctggctacagccctgcagaagctgtaggaggccgagaaggtggctgatgagagcgagagaggaatgaaggtcatcgaaaa

SEQ ID NO: 663400 - DNA, 128 bp, Homo sapiens
ccatagcaggcacaatggcatgcaatcttctagtggttgagcatagctctgaaatgctcaccagctctgaaatgctggcacgagctgcaacacatgtgctcaaataggatttcaccaaacggaatgtc

SEQ ID NO: 663401 - DNA, 234 bp, Homo sapiens
tcctaaactagggtttttaatgaccccaacaagcaagcatgcagcttcctgcttgaaagggtcttgcctcacccaagttaaagtgcagtggcctttgaagcttactacaccctcaaacttttgggctcaagtgatcctcaccctcccagtggtctttgtagactgcctgatggagtttcatggcccaaaaaaattaaaacagtgtctccaattttaataaatttttccaatcca

SEQ ID NO: 663402 - DNA, 446 bp, Homo sapiens
tataaaaagtcatcagatgatgcagcatactagcgataaaatgtctcatgctagcaaactagagcatttatcaattaagaaaagctttaaaatatatcatgtgtaccatccttagtctgcagactctgaatgtcaccttaaaatgtcagggttaaattacattacggttagtacatgaggcaggcgtgaactttacaacagaaaattgagatagatatacttacatttactttctcttttatggggtaataactgttataatgttaaattcgtatagtatgtcggtgcctcattaagaaactggagatattgatatgatctataagcaaatgtctccaatacgagaaaaagaggactgatttataaatgtggaggactgacacataatgtggaggactgatgggcgcagatctgttcagaactaaaaatggatgtcacaactgata

SEQ ID NO: 663403 - DNA, 162 bp, Homo sapiens
tgtttatcgatgccatgttctcataagtgagcgctaatacataaagatggcatcgataaacaccggtgtttatcgatgccaccaagacacaaagagggcggagagacagacacagaaagagggagacagcggggctggatggacgtgtggcatcgataaaca

SEQ ID NO: 663404 - DNA, 242 bp, Homo sapiens
aattcggcccgggcaatgggtgagccaagcagaagggccaccatgaatctaacacctcgaatgctaacatgaattatcagttagtgtgtgggtgcttgtaaatgagcagagacgggaagctatccaggaagtgtttgaataatcactgggattttgctaaaatcctgttttctactttaatcctttacatgtatagcataaggtggttttaacacgcacagcagtttgtgacttagattctg

SEQ ID NO: 663405 - DNA, 150 bp, Homo sapiens
atctccgcacaggcatcacagtcgcgttatgagtatgttccatcggtgtattagtgtatgtgcaatatccactgcaatcacgctataagactcgagtaaggtgactcaagtggcttcgccgtcagccagcgcagtttacccccagctgtt

SEQ ID NO: 663406 - DNA, 285 bp, Homo sapiens
ccctgcagaggggttagggcaatcagctaagcatggtggctcacgcttgtatcccagcactttgggagcaaggcaagaggattaccttgaggcaggagttaagagagcagccggcaacacagcaagacctgtctctacaaacaaaatttaaaattagcttagtgcactagtaagttgcagtccagctaccctgagaggctgaggcaggaggatcaccttgactccagggagttgggagggtacaggtctaaaacggcttcttgcagggtaccggaggctccaaat

SEQ ID NO: 663407 - DNA, 1749 bp, Homo sapiens
  misc_feature (274)..(274): n is a, c, g, or t
  misc_feature (1138)..(1138): n is a, c, g, or t
gttgactatctcctaacagcgaacaaacgacttgtacaaacacagttggtagtaccacttggccgggtaggtccctacaatgcggaggtcaaaggtggtaatccagcctgggaagcgtaggaggagcgacggaggaagagacgagatggaaccgccgagacagaatggagcgagaaggatggcactacctgtgcatgccgagggcaaagaccatttgcacatcatcgagacacacgaggactgcggaaggctagattgcaagcagttcaccatngccccgaagacgtctgactacgcactgtgctactaggagagtcaagacgtacacatgtgactggcataccaggctatcagaccgcccgatatgaccaccatactggctagagactcaattcaagctagatgctcagtggactagacctgcagggctagtataggcgaaggcgagatgcgccggcgcttgacatagagatagagctattgaagccccctcccagaaacctggatagcgaaattggcgcaactagttggcgaacacaacggcggcgacgaaaccctctattggcaatgtgacaccacacttgcgagtacctttgtgcccctgtaatctagacttctccaggtacctaatagttaagttccaacgtggaaggcccccacacgataccttgcgtccaagtgaaataccaaaaggcctttgggaggccttccctaggtaggttggatcgtgtggcaggatacaccccgttgggagtggacacatagcgaggccccattgttcatgttccccactggggagaaaccttccacccgttgggtcatatggaccaggagttggttctttgggcacgttctaagcatcctaacgttggggccatcccaaactgtgggtaattttggccaccgattaaacctaatattctcctcttacgcctggggattggccactgttgattaggcaacaacgagcccgtaaaacgagtgccgaaacctatgcacagtgaaacacacaaactccgccttgccgtgacgccagaggaattgccatgacagggtgcgttcacacattttgcgccccccgaggataagcgaccctggtaattgtcccggggcagacacctgacaatttcccaaaaangccaggacaaacatacatgactgggtcacatgcagtcaaacgtgcgacaacactgatcccaaagtgtggtatgggatgacccccgttcacccaaagtgtgttttgcccatgaacactgatccaaacagcataacggggacacagagattcagtagggcagataaccatgctagacaatatagtaaattaggtagataaacccacaagcaccaaacataagagaaacattcgcatgcacgcgaaggtcactatgtgcttggcgacgtctattgtacgatatcctagagaaatttggaaatttacatactggaacggcacacctgggacaggcgtgggggattaaaagaaaaacagcgcccgcttaccctatgggcaaagctggacagggacttggccacaaggcagggcgagcccacaccaagacgaacgggctgtgcaccaaagcgacagacccaggggagaaaactcctacgagcactgagaggaaacgagaccacagtgacaacagtgagccgaaaaaaaaacaaaggcagcagcagacagagcatagcaacgacggacagacccacacgacggagtgcaaacagagcaccgaagacacataagcacgt

SEQ ID NO: 663408 - DNA, 696 bp, Homo sapiens
acatgcctatcatatagtagaaccagacccatgagccgtaacaaggggccctcatcagtcctgcctaatgacctccggcctagccatgtgatttcacttccactccataacgctcctcatactaggcctactaaccaacacactaatcatataccaaagaagagggcgatgtaacacgagaaagcacataccaaggcaccataaccactgtccaagaaaggcttcgatacgggataatcctatttattacctcagaagtgcctctcttcgcaggatttttcgtgagccttttacccactccagcctagcccctaccccaccaataggagggcactgggccccaacaggcatcagcccgtttaaatgccctagaagtcccactcgcttaaacacatccgtattactcggcatcaggagtatcaatcacctgaggtcacgcatagtctaatagaaaacaaaccgaagaaccagcataattcacagcactgcttatgtacaagtgtacggggtctctattgtaccctcctacaagcctcagagtacttcgagtctcccttcaccatgttccgacggcatctacggctcaaccatttgtgtagccacaggcttccacggatcttcacgtcatcataggctcagcttcctcactatctgcttcatccggcactaatatttcactctacatccaacatcagt

SEQ ID NO: 663409 - DNA, 176 bp, Homo sapiens
gatagtatgcattagcttgctaaaaggcacctaagcagcagcatcatctctatgccttcagtaaattgtggaacatttctaaaatactccttggaagcagagacagtgtggtcctttgcatatcagtgactgagcaaaattttacggatcaatgtgtatgtgtctctgtgtgtctg

SEQ ID NO: 663410 - DNA, 187 bp, Homo sapiens
aactttttggacccccagttttttgattttttatttggggggggtttgggggcccggcccttttttttcccccttggaggaaataagatgggggggaaaggaaaagggggggaaactttcccctccccccttcccctttaggtttttgaaaaggggcccccgcagaataaatttgcccgttttttta

SEQ ID NO: 663411 - DNA, 251 bp, Homo sapiens
gaaaaccccctggggtttttttttgggggggaaaacattttcccccccccccccccttttcccttttggggggggcccccggggggggtttccccccccccccccccctccccccccctttttttttttggggggggggggggcccccccttttttttttccccttttttcccaagggggggcccccgggggggggggggggggttttttttgggtttttttttttaaggcccggtttttcccccccccca

SEQ ID NO: 663412 - DNA, 359 bp, Homo sapiens
ggctgagcgcagcggtttacttgtgtaatcccagcactttggaaggccggggcggccagatcacctgaagtcaggagttcgaaacaagcctgctcgacgtgttagaaaccccatctccactaaaaaaagaggcaggagaatcgcttgtaccgtatggagaggttgcagtgagtcaagattgctgccattgcactagaccctcggcggtcagagcaaaaattccgtggagcgccttctatgattacagtgctcatgtcgctcccatcgaccgataggatttatgactgcacaagattatgcatccgtacgttcgatcactggtccattacgcccttttgagagctgtataccatggggtg

SEQ ID NO: 663413 - DNA, 581 bp, Homo sapiens
  misc_feature (402)..(402): n is a, c, g, or t
  misc_feature (569)..(569): n is a, c, g, or t
  misc_feature (578)..(578): n is a, c, g, or t
tgtggagacggggttcaagaagatgggttgaatctctgtggctcgttttctctctgtgtcctttggccaccttgtccgggattcagatgcagttatgagatatgggcagagtgggataagtaaagcctcactttctggtcagagaactaaatagggagccccagggaacaggaaagtacgggggacatcacagagagggaggagatggggcaagtgaccccattaagtggcttatgaacggctgggctccccctccaaactgtaactatgtggatctaatcctaaggagcataccaaagactttgagaactgaactaaggaaaagaccacagcctacaaagagatctatctgcctagaaaggaaaagccttggaaactgacattgaaatcaaaaaagacggntgggaactggtggcctgaacccaaccgggtttaaggctggtcaaaacaaggtcaaaattctccataagatccagaatctgggctgggcacggtggcttacgctgtaatcccagcacttggggaggcaaggtaggcagatcacctgaggtcaggagtttgagaccagnctgggcaanata

SEQ ID NO: 663414 - DNA, 423 bp, Homo sapiens
tcaaagaagggagttgtgggggcaggacatgccccacaaggtgaaccagacaaatggctttacacctgtagtgtaaaggggccactatgaatccctatgtatgaaaggagggaggcaggtggcagttcagccacagaagggggcttatggaagacaggaggagctcatttcctcggacacatttgggctggtaagacctggtgttggtgtgtcttaaaaaaagagaagtcagtgctaccatttttggtattttaaagatattaaagaatggattccaacttggaaacaaaaaataaacaaaaacaaaaaagaaaaaaaaacaaagggggggggcggactaataaaaataacacggagaggcaccacagaattaagaagtaccaaaggatgtgatgaaaaaaggggggcacataaagagaggcg

SEQ ID NO: 663415 - DNA, 145 bp, Homo sapiens
cttcatctccgtcccacctcacaatttactgaccacaggaccctctcaagtagcaggactacaggcgtatgctaccacgcccggctaatttttctatttttgtgtggagacaggattgtgcgatgttgcccaacgtgttcttcaa

SEQ ID NO: 663416 - DNA, 486 bp, Homo sapiens
tcagcttcttaaaaaacaataatggtcatctggttgcacagattaatcccagatacttaattaataacgcaaatatctacgatcagcagtgagcttataaatgatcactaggtgtccaccgagaagataatcaaggctatatagaggtgtaaacctgaaaattggtgtccatttaataataggatacaattggcacggaagagttataaaaagataacctacacacatacagttacttggcctcaaacaactgcttagaaatacagtataaacatttacgaaccacgacaaagtgggggtccaaacttcaacaaagatcttctggaaacccagtataaagataacgggctcaagaccatatcccaaagtgaaatcagcaggagattggatggtaagattctaccttttaaaaaaagagcacactgggtaatacatggtttttaaactggagctacagtaatgctacaaatcccttcaccctcccaa

SEQ ID NO: 663417 - DNA, 149 bp, Homo sapiens
  misc_feature (131)..(131): n is a, c, g, or t
caggcggttggggccgccctccgtgtcgtgggcccagttgcaggggcagggtctgtcccgccatccatcccatccccgtccatttcattccatcccaacacggcccatcgttcgcagaggtcactgcagcncagcacattctgtccatc

SEQ ID NO: 663418 - DNA, 223 bp, Homo sapiens
gcttggatatccactgcatcatcgggatgcattttatcatgctgcatggattacactgcaatcaatcacgctgcatggaatccactgcattcagtcgggatgatttgggccatgctccatataatccacagcagtcaatcgggatgcattgggcctcactgcatggactccactgcatacaatcgggatccattgcgccacaatgcatggaatcagaccgctc

SEQ ID NO: 663419 - DNA, 1243 bp, Homo sapiens
ctggatgacagagtgagacttcatctcaaaaaaaaaaaaaaaaccaaaaaaaaacaacccgggtagctttggtcccttccccattgacaaatttatcaaatccagaagcttgagaagtttcgtctctaattaatttttctcctgaacaaaattacccaagtcaaaacaaaatgtatttttagaattcacggcagcatacgacctgaatttggtgagtctcgaggcttaatcttaacatcaccatttccctaaaaatgggttcctattactccttagaaatggctgggtgggcaacttggatggaacacagccaaatggcaccaggggcaggtcactttcccattacactggatcccacatattaaacaaccacaaagagcaaaaaacaaactccctggcagaatagcacaccagatctatgagggttatctcccaaagacctccctttaacctaacttcatctttgcgaaaagccaacatttcccatttgaccactaaacacaacattaaccccagtggcaaaacacgacgcttgaaaaagcccatacaaggtccccgggcccgcggacgcccagggcacacagtgtcgacgcgggcgcggctcccaacgccacgcagacttctcacaacgctccacgcgcacctgcggatcacacgacactgttccaacacacacacaagcaacagggatcagctcacacgtgtgaatccccccagttaaaaaacccaagggaccagcgcggcacacagacgaagaggctacaggaacgctgatccacaaagtgaaccacccaaagaaacgaccacggcgcactacaagctcaaatccccaccaagcgcaaccagggcacatggaaccacagtaacgcaacgacccgccccacccacagaccccgaaccccacgacagaacacaccgcaacaaacacaggccaaaaccgcagggcccgccactgaacaaacacagaagactacacaaccacctattgtacgcagcccaacacatcaaaaaaaacgaaccctatggtacatgaaaaaagggtcacgaacagggttaaagccacacaaaatattcatctccgcgtgagcacggacgatatcacaacattagaacaattccacgacacaccggcgccgacaaacccagtaatcgacagacccgcagtatcagccgagcactaatggtagacatggcgacaggcttattagttcttttttgtttttttattacggacgggcggccg

SEQ ID NO: 663420 - DNA, 154 bp, Homo sapiens
tctagaggatcctctgacttaggacgcgactttggaggcctgacagcagcgtctgatatttgccggcaaacagctggaggatagggcgcactctctcagactacaacatccagaaagagtccaccctgcacctggtgtttgcgcctagcgaggt

SEQ ID NO: 663421 - DNA, 150 bp, Homo sapiens
tgcggctactactattttaaattatattcggagccttctcaaaaaatagctcacattagaaactgtcctttagttccccatctctggcccatggactatagaggggagcaggtccaggacaataagtcctttaattaggaagccagcaag

SEQ ID NO: 663422 - DNA, 383 bp, Homo sapiens
ttgtttctggcgcgtcccacatgaccccgactccgtgtgttacagagtcggccgaataagctcagaagcagtaatgcagatgctgaagaaaagtaggaccggagccatgtacaagtcggacaggggccatgacaagtcggaccgtagccatgagaaactagacaggggccacgacgagtcagaccggggccacgacaagtctgacagggatcgagagcgtggctatgacaaggtagacggagagagagagcgagacagggaacgggatcgggaccgcgggtatgacaaggcagaccgggaagagggcaaagaacggcgccaccatcgccgggaggagctggctccctatcccaagagcaagaaggtaagccgaaaggatgaag

SEQ ID NO: 663423 - DNA, 482 bp, Homo sapiens
aaaaaaccatttctcttcttcctgttattggtagttctgaacgttaaatattttttttccatggggtcacaaggtacctcagtatatgattgcgagtggatttatagcgcacagaaatcaggtattggcagtttttcccttttcatttgtgtgtgaatttttaatataaatgcgtattcgtaaagcattaatgcaagttccaatgtttcagtgaacaagtttcagcggttcaactttataataattataaatgggcctgttgcctttttttgcccaatgccagcatttccctttttttggatcaagtatttttcttattgatggcttttaaatggtgtttgtagcacttttatcattcagtagattccttccatcccctatacttttctaactgagttgtccacatgcaaagaacatgtttttaatgtagtctgtaatatgtactgttcctgtaagtttgctattaaaaaacattaaaaaat

SEQ ID NO: 663424 - DNA, 200 bp, Homo sapiens
aaaaaggcttgttgatgtaatctgtgtgtaggccagcctcctggggcacagtgcgggatggcagagggacaaacgaaagctctccagcatagtccctgttctagaagccagatccatttactccagctcacttcctgactaggtcatttcaggatcatgccaaatatgaacagtctgtccactctctcgttggccttctt

SEQ ID NO: 663425 - DNA, 1521 bp, Homo sapiens
  misc_feature (233)..(233): n is a, c, g, or t
  misc_feature (1121)..(1121): n is a, c, g, or t
ctccctcttcttcgcctgtcgtgaatgaagtcgctgttcgttctccgtgaggaccggtgggtcaagctcccaccacgtattgtttttgggcaccccccccctcccgtctttgctttgagcgtgtggggcccttttttttgtttaaaacgacaagatggtggtgaacgccccccgcgcccctctctgttgtttggggggggggggaagatctgtccaccaagactgtggggggngggcccaccagtcgtttcgtctgttggatcgaaaagggataagagtttttcctctccccagtcgataggtgctgtccatcgtgaaataggagagcccctccttccgtcttgggggctgtcttataaggtaagtctaccaaccaggaggccgttgcctcctccaaaacgaccccgcgaaagtgtggtgtgggcgagcaagaagagtgaataagcgcccttgtgggaagagaaaatggggggccgcagaaccaacctgtggaaggaaaagtctttcgtgtcccagacaaggatccgctgccgacagagtcccccctggcggtgggggggaaatttttcttccgccgcagaatcctgcacttgtagaagtcccccccccaggggataaaaaaggggggggaaaaatttctcctcgttgaatgtggccccacacatgatgtagtaacacagacaacatgggtgtagaacacccctgcttttgggttaaagaacacaactggttgggcctctttttgagcacacatatagggcgctggtaggctcacgcccccccacctctatggtcttctagaggcgcacacgttgagcacacatcgccacatggtgtcgacacatcttttgtggttgtcacaccatgcgtgggttggtgacacacatataggtgtggtaattttttctatgatgcgtaaaatgcgccccacatctgtctatggaaaattttttctcctataaggcgcgagaaatttatcacattgagaatgtctaccactcgaataaaggggggtatagttcctcgagagtggagacaccacggtgttccgcgcacactctctcgtgatcactcggtaatttttgggcgcactctgtctggcccgctatagctatagagangttctctctgtgtggggtctttgtgtgaaacactcgggagaactagactccacgcctttttcttctgcacagtcacacaccgcactagagggcacacaattcacgagtataaccccacctcgagactaatgagagagatctatacttgtaataataagataaatgttcttcgagctcgtaataaccactctttgagccacgtgtgtttacacacacacatgtacactaaagagaatacaccactaaattcacaactagaagatttgaagaattgggcttgtaataagttagtaaccacaccaccacgtatgaaacactttctaactttgaaaggaatttccattattctcttaatgttgtgtaattgattaggtaactaaaaagcgccaattgttggcca

SEQ ID NO: 663426 - DNA, 1216 bp, Homo sapiens
  misc_feature (159)..(159): n is a, c, g, or t
ccggacgccgatgtcgctcgcattaacgtccccagaatggagactggaccagactcattattccccattgtcgtctttggacatcgtagatgcgggctggtccacctactatctggtccctctgatctataagatgacggtgggcatcagcacaagacngtaactcattgcaaaaggaatttagacgcaccgtgaggagccatgtctggacgataggtggaacatgggcctcctatcatgtcatgcctggggtctagcgcaataagactgagaagcctgagacagtgcaagcagtgagtcatcactcaatgtagactagtcttaccttgatggggaacatctggacgatcatggcaagtacctatggtgcacgattcattagagttgcccaccgggaaccaacaggcatgaatctgtatactctaggatgactatgcatgtgtccaggtgccaacatacttacgaatgcatcctgaactggtgatctggtttcccatgacaattgtggtcgcccctcgacctagaggctcgcttcgtggatcgatactcctcgtatgagtacatggcgttaaatcctttcgcaaagagactttgcgggacgcaagagcacccgcaggaacgtcctattggcgccctattactaggggcatttaacaacaacccttgtggggatggactgcacgacagcttaaaccttaacactttggtttcacgcgactggcctataatacgccataacaagtttgccgtaccattccaccaacccattgtgacaaaccccaaaaccgctataagcaagaacagccccggcaaaccgcaaggacctttcctggaaggggcccacaacttgggttccctaggcgagacacgcgatttcaccccccgaacctgctacatcatcttttcacggggaaaacaacatcccgggtgcgacctaaccccacaaccgcccgggacaaccccaaggtacactacgactactcgcgtgccccaaacgaaaaagccacacgcggacaccgggccaacaaccggggcctgcaccgcacacactgtgcgccggagaaagcccccaccaggagccactagaccgatagacccctccggaggcgccccaacagggcgggcacacgcccacacaacggtgccacaccccacgggcacacaagcaccactgcgacacgaacacaggcgcccagaatttggcagaagcacacac

SEQ ID NO: 663427 - DNA, 339 bp, Homo sapiens
gccggaccttcaggctgattgcaggcgaatcacttgagactgggaggtggaggttgtggtgaaccgagattgtgccattgcactccagcttgggcaacaagaccaaaactccatctcaaaaaaaaaaaaaaaaaaaaaaaaaagaaaagaaaaactgggtattttggggcagtgaatgcgtgggaggtggggtggaaaataaagggcttggtggtggaggaagcttggagatgagcttcccttttaataataacaatttaaacaccctatgtggaatgtgtagaattgagttttttcgggccaggtgcaggggctcacgccgtgcaatcaagccgggaa

SEQ ID NO: 663428 - DNA, 319 bp, Homo sapiens
ggtgatatttttacccctaggattcctgcccatttgtctgaaagctttagaatcattcctacacagatgcccaattttcccatcaagttctgttactcccacagccctgttaaaaattctcagcatggtggaacatgatccctgctaagaatacaaaaattggccgggcgtggtggcgcctgtctgtggtctcagctcttggggaggctggggcaggagaatcgcttgaacccgggagtcatgggttccagtgggccacgactgcgccactgcacttcagcccgggcaacagagtaagactctgtcttaaaaaaaaaaa

SEQ ID NO: 663429 - DNA, 651 bp, Homo sapiens
ggggagcagttttcccctggcctcagttcccagctccccccgcccaccctacgcatacacacatgccctcctggacaaggctaacatcccacttagccgcaccctgcacctgctgcgtccccactcccttggtggtggggacattgctctctgggcttttggtttgggggcgccctctctgctccttcactgttccctctggcttcccactcctgcggcctgggcacgcttcccctgcgcctcaccaaggggcccaacccccatctcatcctggcacgccctactccactgccctggcagcagcaggtgtggccaatggacgggggtgctggcccccaggattcccccagccaaactgtctttgtcaccacgctgcggctcacatatcatccttccccaccttccctagctccccgtacccaggctccgcaccccgccccctacggctcccgcgaaggcacggcccggtgagtcccctactccctcttcactgtggccacagcccccttgccctccgcctgccctctgcactccacactgccgccgcctcccccctgcccctccctcacggacccacgtgacgccccacagagccctgcggacgcccacctcccgctacgccgccccccgcccccccaccccctacctccc

SEQ ID NO: 663430 - DNA, 534 bp, Homo sapiens
aactttagaatcttttctcctgtgtttcaagtgacttccatcggtgtggtttctccaggggtgatcccagggacaccagcttgagaatcacctggggaaggggtagggtggggggaggagggggcttatcaaatgcagttccttgggaccagcccgtcctttgcttctctcagaacccctgtgagtagatggataatcaacctccttttaccatagatgaaactgaggctcggagaagttaggggacatgcccgagatgatttaattaaataatgacaggcatatcttcaactgctgcagcccctgccctggtcacaggctccctgtggaccccacctgctaaacataaacaaacccatagtgcagcagccacaactcaagctgggaggcctttgtggaggttgatttttatctccccgcagtcaggcacaagtgagagtttcataaatagttctaacaaagctgcctttcacagccagctctttgcactgtaaaaaataataataataaaataaaaacctgatttcagaaaaa

SEQ ID NO: 663431 - DNA, 164 bp, Homo sapiens
agggccaaatatcagagaacacgtatcacgaaaaaaactcgtgcgtcgtcgtagtactaaatctccctacaaatctccttaattataacattcacagccaccagaacctaatcactatttcactatcttcgttcgaagaccacacattatccaccaccgttggc

SEQ ID NO: 663432 - DNA, 117 bp, Homo sapiens
ggatctacattcaggtggctgtcctggacgtgaagtggacgtgagtgctggtacttcgtggtacatgctcgcaataaacctgttggattgagtctggtctgatttaaaacgcgatct

SEQ ID NO: 663433 - DNA, 331 bp, Homo sapiens
tgtacccgcacgctagacacagacctctcagcacacagacacacagacctcagcacctagacctctcagcacccagacctcagcacctagacctctcagcatacagacctctcagaacacagacctcagcacccagaccacagtacccagacctctcagcacacagacttctcagcacccagacctcacacatcacatacacacaaaccttacacacaccacacacacagacctcacacaatacacacacatacagaccacacacacacactgcacacagacctcacacaccacacacacacagacctcacacacacgtgcacctcatcat

SEQ ID NO: 663434 - DNA, 204 bp, Homo sapiens
gtagttgaatccattcactagaagactggtcaattgttctgatacaaaatcctttcttaagtggacattaataaaaccaggaccagcaatttcaactttttcaatacattcattgtatcttgatagaaggattcccctctctctattaaagagatgtccaatgcatcatagattttatttaactcttgctactctggaaaggtg

SEQ ID NO: 663435 - DNA, 137 bp, Homo sapiens
cctcagatgggtcagagtgactttggctgctgctgctgccgcttgccgggagctggaagagggctgcggctgggcctgtgccgactgtcgtcgtggtgctgacctggagcctttggtactgagcgcgtggctcgatg

SEQ ID NO: 663436 - DNA, 115 bp, Homo sapiens
taaagtgccgggagttagtaatgtgagccacgatacccagcccaagctcttgactttcaggcttcctcatcctgttgacttctctgcggcactaatttcacaatggcacgtggat

SEQ ID NO: 663437 - DNA, 380 bp, Homo sapiens
cccacaaatcctctccgcagcccttggtggacacacccagccagcatcaccagcagcagcagcagcagatcaaacggtcagcccgcatgtgtggtgatgtgtgaggcatgtctggcgcactgagtgactgtggtcactgtgatttctgtcgggacatgaagaatgttctggtggtgccccaacaatgatcctgtgcagaagtgccggctgctgccagtgccagctgcgtggcccgggaatcgtacaagtacttcccttcctctgctctcaccagtgactgccctcagagtccctgccaaggcccctgcctggcactgcccacccaacagcagccacatgccatcacatgaatgttagggcgcataccagtgaagatagag

SEQ ID NO: 663438 - DNA, 129 bp, Homo sapiens
gaaaaggcttgatattctgtggaaattaaaatgttattcctgcttcttaattaaaagtggttcaaaatccttcaaataaggttctgaaagctgtccgattgggatggttggaattccaacaaatagtca

SEQ ID NO: 663439 - DNA, 179 bp, Homo sapiens
  misc_feature (127)..(127): n is a, c, g, or t
ccactgccccactttcagagggtagagcaaaagcctcattgtgaaaggcactggacttggaccagggacaccatcaggggccttggtttaactcacgcactaaaattggagacgtggactaactcgnccaacagactcccttctgactctgaccatttttgaaacttgctgagacgaaa

SEQ ID NO: 663440 - DNA, 303 bp, Homo sapiens
atggtatctagaggatccctcatcccagaatacactgtaactaatgagtcatacatattccagagaccaatctgagatagatagcggccatgtgaggtttaccatctcgagtgatacagcaatggcagcagtagcggcagtggcttaggcctgggtgaaggcagtggctactcctacagcagtggtcacagccttggaggtggcttcagttctggcagtggtagagccctgagaagtggtctcagctccactcagggaagcagttccaccatcagatacaccacctcctcctcctccagcagg

SEQ ID NO: 663441 - DNA, 873 bp, Homo sapiens
aacttctcgtaagtacctaatcaaccacaaaacagacgcacccgtgagccttaacaaattgtcccgagccctgttctccggtttacaaacgtggttaaacaaaagtcccctcccccctctaaaacccctgtccagctccctcccctgcaagttccccagtttttcaaccacacggctgcttttccatttaccccccgcttcccaagtacttttccaggtcgcagcaaatctgtttgtcgacgtaccacatcccgctagctcctttttacgcacaaccaacattcgtggtgttatcacacaaaccgagtcacatgtgattggacctcccacagtccacaaatggtcgacaagtttctccccctgactacaactcggggtaccccccatgcatatctccttcggccgctcctcaaccatccgtaggcgtccaaacccaaaattcacaaggggcaccccacacttggacgcagtcgtatgaatcaacttacacccccgtcggttcctttcgacaaatcacatccaatgacacctctgattcccgaggacaaaccccatttgtccatattctggtagaataaacgcccccacttcttcgagccaatcctccgccattcggaatttcacttctggaacatccgcctactataccccgtaatactccctgccgcccctcaatagatgatgcttcccccccgccgtgtaaaaacataaaaaccccccccctttgttgtaaagcggcaaaatcttcccctcacgcgagaccccatcgcctcccgtcctaataaataataatggcacaaacaggtcctccctcatattcttttctacaccgggggggaaacaacccgaccgtttccaaacaccaaaataaca

SEQ ID NO: 663442 - DNA, 992 bp, Homo sapiens
tggccaccaattatttttcttttttgcgaggtgtgaggcaggcaacctgggaaggcagggtagggttgacctcttcttcctcacatggacaccaggccttagttctctcccagataagctaaggtcggacaggggtctgagggcgacttgagtgcagggaggatgcttagggccctgtgggacctcagagagacgctggggtcacaaggtatgagctgaccgcagtgggggtttgggggcgttgaacgtttgatgcaaggtctcaaagggttgacctgcaactcgaaagggaggaggcccacatataacccaggacttgcaggttgttatgcacttaccattgggcctcattacaggctctaacaaacaaatttgcacctcaagacggtagttctccacgatcgattcaacaaagaacacttgggggcgtcaaagcgttacgagacctcaggcgcgtgccaccagagtgagccggcttcaacattcgtagaccgcaagtggtcccaaaccgtccaaaaactcgcaagactcaaacgtgaacgcgtggtcaagccatatacaccccaagaatcaataataacggccccaaagagggtaccaccgtgggatcccactggcggggaccaagacggctcaacaatggcaaacgccaacacactccacggccgaacccgcgcaaaggcacgcaacagcgacacgagcacgcgataacaccagacgtagacgaccggggtttaaacccccgcaacgcccccccctagggcgactagcaacaggattgacaagaacgccacacagggaggtactacacagaatctcacctcagagggccccagaagaaggacgcccacaggactgcgacacatcaacgaaccccatacgaaacaccgtgagcactccaacaaggacaaccgctacaccgagccccgggggccaacccacgaacccagcaaagacgacaacacggcgacccaaaagcatcccacgacatg

SEQ ID NO: 663443 - DNA, 173 bp, Homo sapiens
agagacggaagagaggaaaatgcgagcacatctataataaatgggtgcagggtttcttgagggttaggaaaatctttgacatcatcagtagcgtatcacactgtgaatgtactaatgccactgacctgtttactttaaaatggtattttgtggtggttttggtttttggcagg

SEQ ID NO: 663444 - DNA, 223 bp, Homo sapiens
ttagccgatcgttacaaggtctctacctggtaagcatccaacgttactctctggtgggccaaagcagaagtcaaaaaaatcagacactgaatagtctgatgagatgaagagacacagaaaacccaccagccaaaacacaaccctaacaaagggagaggaatttctcacgtaatgcacagatcactcttgagaacagggatagatacggggtgggaattctgaa

SEQ ID NO: 663445 - DNA, 128 bp, Homo sapiens
ttcggtctaatcatgttggctcactatagccagccacttctaaaatctagaatggtttctgaggcgaaggaatcttgcagtcttctgtcttttaaacaaggttctcgaggcaaatcaggaatcttgag

SEQ ID NO: 663446 - DNA, 381 bp, Homo sapiens
ggcaataaagaaagagacagagtctcactatggcccaggctggtcttgaactcctgggctcaagcgatcctcctgccttggcctctcaaagtgtttggatttacctgcgtgagtcctttgctggccctttaaacaaattgtaacatactattcaagtatctaggttttaacagggtcagctcctttgttttatcttcctcttcagttaaaaccattctccagttgattttgaatgatttaatgaatgtcattttgatcttgatacaaatgcattccaaaactgtaattttgatgagtaaattagaattttaatatgggcttaattgttttttttgccactgttctccagcctgggcagcaatgagacccagtccccctgcc

SEQ ID NO: 663447 - DNA, 1647 bp, Homo sapiens
  misc_feature (1315)..(1315): n is a, c, g, or t
  misc_feature (1617)..(1617): n is a, c, g, or t
tgggggaggttcccttttatgggttctaaacagttggtgggaagggaaaaaatgaggccatctaaaggccggagaggtcgcccagggccccaaacactgtgccacccgtaaagttaggtggtgtggaagctgtggtctccgagggatgtgttgtgcgagcccttaagcacgagggcacggggtgggggcaggagcagcgaggggttccccgagggtgtgtgtgtgagagagggctgtgggtgaggggcaccagaggaatggggacctctccgtggtggctgtgggtgcccccgtgggtggccctattgtgtgtgttgtggagcgcacgctgtgggcgccgaggggctgcgtggctcgcggggcctctcacagttgtcacgcgcgcacagagggtgcctctcgcgtgtgccgcgtgagaacacacacacagagaccagaggtggcggtggggcccccacacgagtggggtgggcgctgtgaaaacgcgcgtggggacgcgtgttgtgtggcacccctttgtgttaaccccccgcgttgttgagacgggggggggtactccccggggggggcgaggggggcgccctcaagatgtgtgggccgtgtgcgccgggtgagcgccgtgtgttcggtgctcccaactgtgttgctccccagaggggttgcatatgttgtggccacccccacagcaggagctgtggtggggcaccaccgcaggggggggaagcacggggaaccagcgcgccgcacccacgaagggggtggcggctcataccagagggcgggggggaagtgtgtaaaaaggacgcggctgttgtagggggaacccaaccttcacatatattaataccgccgggtggggatacaccgagaggagcagaggggggagggggggaacccaccacacccccggagggcgggaggcggaagcatgtggggagggagtgcatggccacccgtagcatcctaattaatgagaaggaaggttgcttgtttgatggccgcctaacggtagaatgaatgtgtgaggtcacattgacggcccgaaatagagaatccacaccaggggggggaggtcattcccagcagggggccccccatttattgctgggtggccggctattattatctactatataccaaaaaccacatcaatactagtggagcaccacaaaaggtagggccgctcactaccgaaaaaacaaactgcaagtgatgccctgcggtggagggtgagggtggtccgctcccaggatggggtttgtatgtgttcccccccaccacacggtgggtggtcttgtgtggtgaccgcgacaanagcagtaacggagcaccacacttctgtgtaggtaggttcattatcaaccagccgaatggagagaaaccaccttcgttccaataacgaacaatccttattaatctaccccaccactattatctgttggatggggagaggcgagccacaactcagtatggtggtgggcgcgggcggacagcccccaatctacaataatcaattctccaccgacaggagggagaaaagattgtgaggcggcgaagcagataggacggagagcgagaagacaattatgttgtgtgaggggcccaccccactaaaanaaaagagttgtgagtctcactctgtgtgac

SEQ ID NO: 663448 - DNA, 81 bp, Homo sapiens
actgtgaggcatcctgtgtgtgtgaagcacccgccgtcagtcaagtatccctggtgcttcctctcagaactcatcaaaaag

SEQ ID NO: 663449 - DNA, 294 bp, Homo sapiens
aggggggggggtttttccccccccccccggggggaaattttttaaaccttttggtcgggttagcccccccccaaagggggccccctgggtttttccctttggggggccccccccccaagggggcatttttaaaaaaaaaaaataccgggggcccgggggggggggggggggggggggaacccaaaggggaaaaaaaaaaaccccggttttttttgggggggtttaaagggttttgaatttggggggggggggggggccccttgggggttttttttaatttttttggccggccca

SEQ ID NO: 663450 - DNA, 583 bp, Homo sapiens
aggatccccgtgggagacggggtccaccatgtgggcaggagggtctcaatatctggatctcgtgattggcccgcccgggactccgaaagtgctgggattacaggcatgagccaccacactcgggctccggtgacctttaagatgaatattttaaagactttttcccacatgtgtacctttccagaaggttcacaccattggtgctttctctagacctgtataaccagaagctctggggaacatgagttcttgagaatatcagcacgggcgtcagaggggatgaaataactttcaaagatcaggataactaccttgccaatgtatagggcttctcatggctgcagtttccagaacaacttttctttgggtccaggacgatcttccccatggctgtggttgggatatggttggttgggccctgccaagtctcatgttaacatttgatacccaacatgtgggtggcagggcctggtggaaggtgtttgggccatggggtgcatccctcatggcttggtgccatgctcaaggtagtaagtgagttctcgctctattagttcctgtgagagctattgttaaaaagaga

SEQ ID NO: 663451 - DNA, 123 bp, Homo sapiens
ccgaaattctgtttctcttgccctccgggtccagaatgccctgcactgcctcctggcctcagagcgctgctgcggtggtgggaaggctgcccagcagtgagggaaggcgacgtgcagcgtgct

SEQ ID NO: 663452 - DNA, 274 bp, Homo sapiens
  misc_feature (169)..(169): n is a, c, g, or t
tgaagcacttgtttctggtgtggacagaagccaagggccttgtgtaacttctgcgagctacagggtctaggttctgttggtggccttaagaggttttggaacagaagagggatcttgctgggtggaggatgatgactggcaagatccctgtgagggatccctcagcatncctggtgaggtggatcctgaggctggcccctgatggacaggaggattgcttgtggccagaagttcaagaccagcctgggcaacatattgagaccctgtctctaca

SEQ ID NO: 663453 - DNA, 139 bp, Homo sapiens
ctcccacagactaggaacaaaaacaacaagaaggacttgaggcactcataaatattaagcaattagctgcagcagctactcccctcccctccagtcgatccagtcaccaaggcaacttgggcagggtgcctgctggttg

SEQ ID NO: 663454 - DNA, 516 bp, Homo sapiens
  misc_feature (331)..(332): n is a, c, g, or t
ggaggaggatgacaaggaggacgatgacgacgacgaagatgatgatgatgaggaggacgaagaggaggaggaggaagaggaggaggatgacgatgatgacacggaggactttgctgaccaagaaaacttgcctgacccccaggacatcagctgccaccaaagcccttccaagacagaccatctcacagagaaggcctattcagacacccccagggacttccctgactccttccaggctggcagtcctggccatctgggggtgatccgggacttctccatcgaatctctgctaagggagaacctgtaccccaaggccaacatccccgacagnngaccctccttgtctccattcgccccggacttctttccacacctctggccaggggacttcggtgcctttgcccagctgcctgagcagcccatggacagtgggccactggatctggtcatcagaatcggaagatcaaggaggaggagaaggagagctgcccccacccccaccacccccagtacacg

SEQ ID NO: 663455 - DNA, 709 bp, Homo sapiens
actttttgaactgtctattatatggtggatgatgatttcatcgtcacgtgcatggacgctgttctgttcagaagtgctctttggactacattaagtcccctgtggagcagcagggctaggagatctctgcagtcccttccccgaccagcctctgccagaaggcaatggatgtgcacgtgtgatgtggccatacattcctgcaatatcattaccctctcctagagtcagtggatgtgtgcttgcccctagccccatggacctcaacatgccctgtacccagaatagtctcaaggttgatgcctactagcagactactagtagtattaaccatatgaagcgtgtgactttgtggcattgtgtgtgtgccccacaccagatgactacacaagatatagcacgatctacctcttgtgcgaagctgtgatagtgtccagctcaagactcgcacatattatcacatagcttgctttaattagtgcaacacaatgtggccagcgtgttgacgccaagttcatatccagcatcaactagacacaaatgcatgttgcgctacaaggcattctatccaagaagacagatgacaacagaggacaacgcctggagacccgccctatgaaacccgacataaggggccagaatgggtggcccttatggacgggttcagcagccccggacctgtggccccaagtgtacgccggaggaggagatg

SEQ ID NO: 663456 - DNA, 896 bp, Homo sapiens
aaagtgccgagattgcagcctctgcctggccaccaccccgtctgggaaggtgagcagtgtctctgcctggccgcccatcgtctgggaagtgaggagcccctctgcctggctgcctagtctggagaagtgaggagtcgtctacagcccgtcgccgcatcgcccatctaggaagatgaggagcgcctcttcctgagcgcatcacatctaggaagtgaggagcgtctctgcccatgccgcccatcgatctgagatgtaggggagcgcctctgccgcgggcaccccatctgggatgtgaggagcagcctctgcccggctgggaccccgtctgggagggtgaggagcgtcgtctgaccggcgtcccgtcgtaagatgtgcggagaccactctgcctggaaaccatacctcgttctgatgaaatgtgaggacgcccactcacgtcgccggacaaggttgcaccgttctgagaagctgagggaagactctcacgacctgtgtgagcaagcctccatcttggtcactgtgcactgacgcgtctactactcgtcacgatgaccctttcctggatatcgcagggagggagaggaattaacatgtagaagcgttgattcatggacttatccgaggcacgtgtcactttagcatgacaaagtactgtagtgagatgagtgggagcgggctgcgaacatagaacctgttcttcttggtggacgaggagcccaacggttattagattcggttagcacgaggtgtgataattatttgtttcaaaagaacgtgggagaccccaagaagatggcggggcgggaaagttatataaaggtttatttgtccatccgcgcgcgcgttttcttcgacaaggtttggcaacaggagagagaagagagtaagagatgcga

SEQ ID NO: 663457 - DNA, 367 bp, Homo sapiens
gcatttttatttcctattaaatctcttggtcttctattatctctatctggtacagcttggtcaccatttttttttattttactcactggaatgtagttccagaaatgaaaacacaaaacctcaaaacggttaactggaccttataatttcctttctctttcttgctttcttgcttttcctttcttgcacacaggtaagacctataacaacaaatggacaattacaaccaagttaaatcgaaccgggaggggaggtagctgaaatcggtctcaaagaataatgtcagcaaatagtatgtaagcatgggccaggaggggaataagaccaagagaaccgtctaggcggggactagaggtgcggaggggta

SEQ ID NO: 663458 - DNA, 492 bp, Homo sapiens
  misc_feature (53)..(53): n is a, c, g, or t
  misc_feature (75)..(75): n is a, c, g, or t
  misc_feature (189)..(189): n is a, c, g, or t
  misc_feature (220)..(220): n is a, c, g, or t
  misc_feature (326)..(326): n is a, c, g, or t
  misc_feature (462)..(463): n is a, c, g, or t
  misc_feature (469)..(469): n is a, c, g, or t
ccctaatcgcgggttgcgatgtatacacccgggattataaaacgccggccaangcgtcagaacgggcgcggcttnttgtgacaggtacgggtgtagcaggtgctactgttgtgttgatgcagtcgtacaaacctgaaaatattttagccactactaccgtcgatggttatgggcgatgggccacgcagnttgataatccgctgccgataagcccaccagnctttaccatgactggatatcagtcgtatttaggggaaaagatccggttggttggccaatagaactatccaggttgtcgatgctcccgatctggcgattatcgaaanccctgcacaaggtgtgaaaacaggacgtcggccagttgtgtcaggtagtggtattgcgggcgcgaccgtcgtgttgctcaaatcgggtgacccgtataacgccttgtggaccaccactgtcgatggctatggacgnntggtcngtgcaggggggaccgagctcgaa

SEQ ID NO: 663459 - DNA, 190 bp, Homo sapiens
ttaaagagtgatttgatgagctgctaatttgagagattttatcaagagcacctgatttgctaggcgcacagcacaagaggtggaaacatacaggagaagcaaggaattacagttagaggtcacaacttgcccgaagccagttctaaatttttatgaagcaatttcctcgcaaatgtcatgagttgttatt

SEQ ID NO: 663460 - DNA, 306 bp, Homo sapiens
agaccagacctagttgcagcattctagctctgccatctctcgaaagaactcagcttggttacttaacctctctcaggcgtggcatctccttatctgtcacactcaggaaactaaacctatcaagatagctgtggattaaagataatttattaccaggtatctggcaaagaaatttgataaaatgttagtgttcttgtcccttctcctcctcacaggtcaattaagaacgaaaactaaacaaaaacgagacataagcatctgggcacagaggcagaaaaactttgtaatctcatagttatacaactg

SEQ ID NO: 663461 - DNA, 469 bp, Homo sapiens
  misc_feature (211)..(211): n is a, c, g, or t
  misc_feature (298)..(298): n is a, c, g, or t
aattcttgaagtcatctgcaccgtctgcctgggaaaagatggtcaacgtgctgaaaggggtgcttatagaatgtgaccctgccatgaagcagttcttgctgtacttggatgaggccaacgccttggggaagaagttcatcattcaggacattgatgacacgcacgtcttcgtcattgcccgagctggtcaacgtcctccaggagcgagtanggggaactgatggaccagaatgccttttctcttacccaagaagtgaagaagcgctggtgttgagcactttgggaatcccagccacangacactttgagagaggccagctcagtgtctcgtggggtttatacttgttatgagcatgtcgtgggaaaggctgcagggtcattcattcagatgaaagcccctaactgatttggttggaccattaaaaaaaaaatatgtgtacagaagaactttagctgcaatttggctttt

SEQ ID NO: 663462 - DNA, 1642 bp, Homo sapiens
  misc_feature (420)..(420): n is a, c, g, or t
  misc_feature (547)..(547): n is a, c, g, or t
  misc_feature (549)..(549): n is a, c, g, or t
  misc_feature (601)..(601): n is a, c, g, or t
ccgtcgcgcctgggtcgcgttgggtcgcatttgggttccggcgggctgcgccggcctgcgcttccggccatgccacctggcggcaccttatcccacacgcgggcggctcatgctcggcctggtgggcgagatcatcacagcgcttcgagccgaaggagttcccgcctcgtggccctggaggtcctccggcgcttctggagacccctggagcagcactaccttgacctggatagaccgggcccttgttgcctgggctggtggagtacatgaactcagggcccgttgtggccactggtctgggaggggctggacgtggtgaagagcacggccgagtgatgcttggggagacccatcccgcagagttcgcaagcccggcacccattcgtggggacttctgcattcaggttggcaaggacactnacttcatggcagtgattcagtaaaaagtgctgaaaaagaaatcagcctatggtttaagcctgaagaactggttgactacaagtcttgtgctcatgactgggtctatgaataagaggtggacacaacngncagtctccttcagcacggcgtggtgtgtccctggacacagctcttcattccnttgacttagaggcaacaggattgatcattcttttatagagcatatttgccaataaagcttttggaagccggaaaaaaaaaaagaaaaaaaaaaaaaaaaaaaaaaaaaaaaaggggggggggggaaaagagatattctcccggggggggccccaagtagcggcggaacaccggggtttatgtggggacaagaggggggccaccaataaaggagggcccgattatataaacgccgaagaggcgcggggcgcggcggaataaacaaagggggggcgacggggggaaacagggggagaacgtggggagacactgtggggagaagaggacacctctataatcttctgcgggaggcgggaggaacacaatatagtgggcaacaaattttcccctacaaagaggatttttaagagacccctcacaggaggacaataattttcaaccatttctataaagggggtataaaaccgggctataacaccacaaacacgcggacaaaataagccatcggcgccacaggcaccaaacactagcgcaaccacgcacggacaaagcgcaattcggggcacccaattttaacacccgggcgcaacagatacaccaccaacaaggacgcaagacagacacacgcaacacaacacaccagaagaagcgccggagggagagagagagcagagaaaaaaaaagaacggaaggacacagcgacaagaaaagagagaacacacaaaaggaacgcagcaaacaacaaagaaaaaaaagaaaacacacaaaaaaaaaggagagaagacaggaaagaatccagaaagaaaaaacaggaaaaagaggaaaggacagaggaagaaagaaaaagaaaaaaagaagaaaaaaaaaaacaaaaaaaagaaagcagagaagagagaggacaaaaggaaaagaaaacaacgaaaagaagaaaagaaagcgaaaggagaaagagaaaaggaacaagaacacgcagagcaaaacagcgaagcacgaacacaccaaccgcaagcgacaacaacagaggaggaccaaaccaacggac

SEQ ID NO: 663463 - DNA, 1688 bp, Homo sapiens
  misc_feature (420)..(420): n is a, c, g, or t
  misc_feature (547)..(547): n is a, c, g, or t
  misc_feature (549)..(549): n is a, c, g, or t
  misc_feature (647)..(647): n is a, c, g, or t
ccgtcgcgcctgggtcgcgttgggtcgcatttgggttccggcgggctgcgccggcctgcgcttccggccatgccacctggcggcaccttatcccacacgcgggcggctcatgctcggcctggtgggcgagatcatcacagcgcttcgagccgaaggagttcccgcctcgtggccctggaggtcctccggcgcttctggagacccctggagcagcactaccttgacctggatagaccgggcccttgttgcctgggctggtggagtacatgaactcagggcccgttgtggccactggtctgggaggggctggacgtggtgaagagcacggccgagtgatgcttggggagacccatcccgcagagttcgcaagcccggcacccattcgtggggacttctgcattcaggttggcaaggacactnacttcatggcagtgattcagtaaaaagtgctgaaaaagaaatcagcctatggtttaagcctgaagaactggttgactacaagtcttgtgctcatgactgggtctatgaataagaggtggacacaacngncagcagtctccttcagcacggcgtggtgtgtccctggacacagcagcagtctccttcagcacggcgtggtgtgtccctggacacagctcttcattccnttgacttagaggcaacaggattgatcattcttttatagagcatatttgccaataaagcttttggaagccggaaaaaaaaaaagaaaaaaaaaaaaaaaaaaaaaaaaaaaaaggggggggggggaaaagagatattctcccggggggggccccaagtagcggcggaacaccggggtttatgtggggacaagaggggggccaccaataaaggagggcccgattatataaacgccgaagaggcgcggggcgcggcggaataaacaaagggggggcgacggggggaaacagggggagaacgtggggagacactgtggggagaagaggacacctctataatcttctgcgggaggcgggaggaacacaatatagtgggcaacaaattttcccctacaaagaggatttttaagagacccctcacaggaggacaataattttcaaccatttctataaagggggtataaaaccgggctataacaccacaaacacgcggacaaaataagccatcggcgccacaggcaccaaacactagcgcaaccacgcacggacaaagcgcaattcggggcacccaattttaacacccgggcgcaacagatacaccaccaacaaggacgcaagacagacacacgcaacacaacacaccagaagaagcgccggagggagagagagagcagagaaaaaaaaagaacggaaggacacagcgacaagaaaagagagaacacacaaaaggaacgcagcaaacaacaaagaaaaaaaagaaaacacacaaaaaaaaaggagagaagacaggaaagaatccagaaagaaaaaacaggaaaaagaggaaaggacagaggaagaaagaaaaagaaaaaaagaagaaaaaaaaaaacaaaaaaaagaaagcagagaagagagaggacaaaaggaaaagaaaacaacgaaaagaagaaaagaaagcgaaaggagaaagagaaaaggaacaagaacacgcagagcaaaacagcgaagcacgaacacaccaaccgcaagcgacaacaacagaggaggaccaaaccaacggac

SEQ ID NO: 663464 - DNA, 291 bp, Homo sapiens
tctagaggatccggccgagtgcatggtgggcgcgggggctcatgctgtaatcccagcactttgggaggcgaggcgggtggatcactgaggtcaggagttcgaaaccagctgggcaacatggtgaaaccctgtctctactaaaattacaaaaattagccgggcatggtggcaggtgcctgtaatcccagctacttgggaggctgaggcaggagaatcgcttgagcccggaaggcaaatggtacactgatctgagatcgagccattgcactccggccagccattgcactccgg

SEQ ID NO: 663465 - DNA, 903 bp, Homo sapiens
gactgtgggtcttaacggtgtcccgaagcgcgttttggaccccacatctccgaactctgcgggcactgtgcgcctgtgccgccttcccgtggggaggcccagtgactgcgttattacttgcacaagggttatgtgtagaacgcaaggaccataggcgtggattaagagaatgtagtcgaacgtctgttctgaaattcgggctcagacccgtttaaacacggtaagtgcttagcaccaagacctgtagttggaacactctgggggcgggcaactaagttggccggacataatgtggccttctagagcctatttctagatccatgttctcaacggaaccacctcgtgctttgtagccttaccttgaatcctggcctacttaattaagttggggccaccaccacacgtgaaggcttgctgaacccgcgtccctgaaagatttcactgtgtggaatgatccgtctgtaggtgaagctggaattgtcgttgtaaggctacccccagaatcactgatgttctccacatgaggttaagccgcggtaaactgcccgcgcaaatgaaaatggttctaatgtgaacttgaaccccaacacggggattcgtattatgcttacaagtggcccgacatgagctcatcgtggatcatgcaaatgagtcccttcaatcccccggaattgaggttttatagtcatggtcacctcttacttatgtttatatcactgtaagcgtaacctttggtcggaaagttaaacattcatagagaaactgagtctacggtgtaattccgagtctaataaaaggagtaaatcttaatccaatcgccgggagttgccttttggaacttaataattaatttttcttccgaagagattccttgttaaacaaaccaaaaaaacaaatttgtaa

SEQ ID NO: 663466 - DNA, 135 bp, Homo sapiens
agccaggaaaggctcccctgctggccctctggagtccaggagcccttaggaaggcgtgaaagccagtccctgaccagcaggcgttagttgtccctgagaagagcgcagtgaggcgcacctggtccagttcaccct

SEQ ID NO: 663467 - DNA, 344 bp, Homo sapiens
  misc_feature (52)..(52): n is a, c, g, or t
  misc_feature (59)..(59): n is a, c, g, or t
  misc_feature (91)..(91): n is a, c, g, or t
  misc_feature (333)..(333): n is a, c, g, or t
  misc_feature (339)..(339): n is a, c, g, or t
  misc_feature (343)..(343): n is a, c, g, or t
gtcaaaatactttttaagtcctgagtgccttacaggtagttgttaaaaaaantttaagncccaggcatggtggctcgctcacacctataancctaggatcttgggaggtcgaggcaagctgatcgcttgagcccaggagtttaaggccggcctgagtagcatagcaagaccctgtctctacaaaaaaaacaaaaattagctgggcatggtggcatgcacatgtagtcagagctactgggggtgctgaggtgggaggatcgcttgagcccaggagagtgaggctgcagtgagctgagattacgccactgcactctagcctgggcaacggtgagnccctancaant

SEQ ID NO: 663468 - DNA, 520 bp, Homo sapiens
  misc_feature (321)..(321): n is a, c, g, or t
  misc_feature (353)..(353): n is a, c, g, or t
  misc_feature (358)..(358): n is a, c, g, or t
cggcaacttcggctcagcgagcgcgggcggacagacagggccagggggcgagtggcgtcaatgtccgaccagttgccagctggtaccagtcctcgcctcggtcccgtcgctgtggccgccctgggcaagaagcacatgacgcacaaggccgcgtggcgctcggcctacgaggtatatgaccacacgcccttgcagaagcctctaaagctagtgctgaaggtcgtaggaagtgaagtgacttaactcataagattcggacaagactccaggtactatgatgacagatcagaccatgagcgagagaggcacgacgtacttcgncggatgaagaagcgctaccccacgacgttcgntatgngggccttgggggttttttttttttttatgttcatgacaggaggttattaagggtctttagagagcaatatctatactcttgatgtacattgcaaggagaccctgtttgatttgggacctgatgaccatgtgggaggtttttgttccaaccctttggttgggg

SEQ ID NO: 663469 - DNA, 254 bp, Homo sapiens
  misc_feature (15)..(15): n is a, c, g, or t
cttgtctccaccggnacacagggagggctggttggacttcccctcagaatagggcatgcgctgttgtgggaagtcagggaccccaaacggagggaccagctgaagccatggcagaagaacgtggattgtgaagatttcatggacatttattagttccccaaattaatacatttataatttcttatgcctgtctttactgcagtctctaaatataaattgtaaagattaaatggacacttatcacttccccagtc

SEQ ID NO: 663470 - DNA, 214 bp, Homo sapiens
tgaatgcaaggctcctgactggaacggactcctaagctgaactcacattaagttagcatgagctaaggcgagaagtggggacacagagtacgcgtgttccgtgacccagcaagcacggtattgctgctggacatgaaatacaacgtggagattaggtccagtttaaactggtttaagtagcaccagtgctgaccaggagaacatttataccggg

SEQ ID NO: 663471 - DNA, 706 bp, Homo sapiens
gcccaggactttccccagggattccgagtctggggattgcaccccgcccccagtaccccgtggtccaccccccggactgaaggagatacgtactctctcgccgtcggcccgttatgcccagaatcatatggtggaacccccgtacccctcccccacgttaatgctcgagagggattttcccccaggccgggccctgcacgcaacctgcagcaccgccccttggagggccccggtgtctctccccccgcccccctgccgctagggactgggagatattgtccactctgctggttgtgttatcacctccccccccctatcccccgcccgtcttccggatttttccactaaatttcacttattgggcacggaaggaggtcactgggttcactttcaacattttgttttttgtgtttttaaattaaaagaaaggtgtacccccgtgtttcacctcccctagaccactggatgtagctacccttttttgtatgtctttttttttttaagctactcgtgttgaattaggagtatacttggtgtggaaagagtatgaatttgcccagtgatttgccaatggggggaagctactgtgagcgtgtgtttttttaatttaccctatagagtgatttttttttccccccacgtccagtttttaccttgcaagtactggagtatttatttcatctattaaatgttatgtttctccaga

SEQ ID NO: 663472 - DNA, 194 bp, Homo sapiens
aaagcgaagaaggaagctcctgcccctcctaaagcttgaggccaaagcgaaggcttttaaaggaccaagaaggcagtgttgaaggtgtccacagccacacaagaagaagcatccgacgtcgaccaccttccgcgccgagacatcgactccgcgacagcccaatatctcggaggcgtccagagaacagctgacca

SEQ ID NO: 663473 - DNA, 999 bp, Homo sapiens
ggcctcctcccacaaagactgatggctccgtgactctggacaatggcatcatccgagtgaagctggacccaactggtcgcctgacgtccttggtcctggatggcctctggcagggaggccattgctgagggcgccgtggggaaccagtttgtgctatttgatgatgtccccttgtactgggatgcatgggacgtcatggactaccacctggagacacggaagcctgtgctgggccaggcagggacccctggcagtggggcaccgagggcgggccttgccgtgggcagggcatgggtcctggctacagatcagcccacaacagatcggctatagcacaagagaggattgtgcgtgagacgtagggtgaccccatatgtcccgattccacaaccgaggtacactggcatgaggaccacaagttcctgaaggtggagttccctgcatcgcgtgcggagttcccagggccacctatgagatccagtttgggcacctgcagcgacctacccactacaatacctcttgggaactgggctcgatttgaggtgtgggaccatcgctggatggatctgtcagaacacggctttgggctggcacctgctcaacgactgccaagtatggagcgtcagtgcgaggacagatcctcagaactctcgactcttgccgggcagcctaaaagccccggacgctactgctgacacggggcgccacgagtacacctatgcactgatgccgaacaagggctcttgacaggatgctggcgttatccaagctgctacagcataaattcccctgttggatctgacaggcccagacccagaggccagcaaactcatggagggcaataaaccgagggactacaaccagaggacgaaatggagaccggcaagaaaggcgggagcagaccccaggacaggacgaggaccggagctgatgagagccccggagacagtgaacagggtgacatgagggcggtacagagcaactgggaccagggaaaaa

SEQ ID NO: 663474 - DNA, 347 bp, Homo sapiens
cccccccccccccccccaggggggtttttttggggttttgggggggggggaaaaaaaaaaattcccccccccttggggccccaaaattttttaccccaaattgggggtttttttttttcccccccccccttttttgtttttggggtttccccctttttgtttggggggggggaaaatttggccccctggggggggccccgttttttttaaattttgggccccgttttttgggaatttaaaaaaattttttttttttttttttgggggggggggggtttttccccctggggggttttgggggaccaaaaaaaaattttttggggaaaaaaccccccctgtgggtttta

SEQ ID NO: 663475 - DNA, 391 bp, Homo sapiens
gataaggtagcgaggctggtcgccgctgctgctaggagtctcagcagatcctccagacagccagaagcccctgtctaaccgccgagagcctgctcagcctcgaacagagcctgcaggctcccctcagtgcttagccccaccccatggttcgtccgaccccccagtcctgagctgctcactgggagggggtcagggaaacggggcggaggggaggagggggagttaggggcattaatggtgatgcagtgcagccgggtgcgaaagcctggcagctggcgggagcctggcgactggccctcaatatgggggacagtggtggcttaatggacgaaatggaaagtgtccaagagaaccgacattggagatactggggagctggctgaagggggtg

SEQ ID NO: 663476 - DNA, 144 bp, Homo sapiens
gcagagatgagcgtatagtatatagagaggagagagagagaactatagagagagggcaaactatgtatatagaataagagtgtggtatagtaggtgtaagatacatatatagtagtatgtcgtttgtggtggagcgtgggcaag

SEQ ID NO: 663477 - DNA, 151 bp, Homo sapiens
gccggctgacggattggctcactcccaagcgtggacttagataaccttggaaggacgccagcactgtggtggcagctgaggaaaggacgatctgctttatttctgtgatctaccatctactagtctcctgatcctgtcaaaagaaaggaaa

SEQ ID NO: 663478 - DNA, 1722 bp, Homo sapiens
  misc_feature (1261)..(1261): n is a, c, g, or t
  misc_feature (1383)..(1383): n is a, c, g, or t
tgcaagagttctacgtcctaggcgctgataagtgagattcaacagtacaagatgtgctgaattcgtcctagtactcctctaagcacctgccctagcttgtccatgtgggagtccgtggtcaatattttggacgttactttcactcacgtaatgaagttaactatgattatcagctgcttcaggtcacagaggctttgttcaggattagactcagtgagaagaactagaagttgagagcttccatataagtagaaaacatagtatgtaccccatcgtaatgagtttagccagatattgagacactgtggtagttgatcccaaggactctaatcacggaaggacaaagatacgggtgccgttcatgcttatgctacacctcgttacagtacacacgtaagggggagatacgtggaaaacttttgtccttggtagtggtgactttctaatgcgctaagaaggacatgtgcatacttgacacatttcttcagatacgactcttggcatactgttcatgtaaggaaaaaccttatagtacctttctttgaaccttaggggaatagaacgcatttgacctttgccgagggggtgtggcacaccccaaaggtatcagatcaagaaagggactaccactatattaatgtagaatttttcaagggaccactttcctatttaacctcggcgtaaattccgtcttccattgtgtaaccttttttagttggagcgagctcaccacaaggacattttggcaaagtggtgttttgacaatccgcttggctaaaagaaacacacaataatataggcgcgcaatataacacgcgtctagacaagtggaacagcgccccccataccagttccaccaggcggtggataggaacacacgactttcgtttaggtctcgatgaagcagtgttccacaactggcgacttcttaaggaacgggcccactttgttgtagaggaggaactgtttcccaacgagacgccttggtaaaccgcatgcgacagtcgacgaacttcctttcgcgcaattgcggcaaagttggacacaagtttttgagaccttcatatcacagacggcagggggcacatagagctgtcggcacacaggatatggcggcaccacagttctatttgcgctcaaaagcggttgggccaaagcttacgaacccatcgggaacgacactttcacaaacggaacaggagccccatacggcgattggcacaggtgggcaacggcacaccccaaattttcgacgagcagngttttacgggacgaagtcaaacaattaatcagcatgcgcaccagatctctctagtggttgaggcaccattacagattgcggatgaggaggcgacggagctcgtagtatcacccacatctatntgagcccgacacaatgtgtacacatgcggcacagggaagatttaaacaagcccaccacagaggggagagggtacccgaaacacgtgcctaccagcgacgatgtaggccaacatggcggcccgatagaggactggcgacacacccacgacgagacgagacctcatgtgcgacaacattgcgcgaggcaaacaccgcccacaagacagcaacaagtgggcaggccagttgcggcactggggagaacaagaggaagcacagcaacaaaaacacagggcgaacacaacagagtattattagcgcacaaactgagcgagccccacaggggggagactaagccgg

SEQ ID NO: 663479 - DNA, 510 bp, Homo sapiens
tggtcaggcactgaagctgagggtcgcgcggcgcggtgtccctggaagaggcctactgcgcctcgccgagttcctctccgtccagctgggggcggaaaaaaactggggggggccggcggactgggccagtctggcgaagtccccttcacggttgacagttgacagtcagctcttgggcctttctggcatggcttcgaaagccccaggggggaggcaggcccttgctccagggggactcagccagccccctcggggtccgggcccccctctccagatggattcacattccaagaagaaaggccttcccacttcaccgcagtcccaggcgagccactgggggatgagacccagggacagcagcccctccagttggaggaggatcagagggcgtggcagcggctggagcagctcatcctgggacagctggaggagctgaagcagcagctggaacagcaggaggaggagttgggtcgactgcgcctgggcgtgggggcgacggactcagagaaa

SEQ ID NO: 663480 - DNA, 720 bp, Homo sapiens
  misc_feature (277)..(277): n is a, c, g, or t
  misc_feature (536)..(536): n is a, c, g, or t
agcggcttgcattagccggcgccgtacggatacgcacgctagtctgactttgtcttctccgacaacttggatcgtgttagcacgcaaggtctccagagccttctctctcctgtgcgccattggccactctttaaggggactaactcacttgtcagcctaagcttgtcgaaagaaaggaaggcacactaggttactcaagatcacatacaggaatcacctgatacgatgtgcgatgatctgggagcgaagctctcgcgttagttgagtgctgcttgcntattccagactgtgtccttggggacatatgatcgtcctggcgttgagtagaaacctttgcctccctattgtgggaatagttggtatagggtagatgcaatgagacggcgtgtaacatagcggaagcagatattcgtaatggagtagttcctgtcgattccactgggggatgacttaaatctatacttttcttagaacaaccgttgaacaaatatcgctgcgacaagcactacaaacgtactatgaatgtcctcgttcgnacctcggtcgccatagtgtgcgtaccttactgtggtgatgctcgagctgacagcctcgccaaggggtaggttgcgccgctaccacggacgacaagcacagggtgtgacgtaggtcttgtgccgtctatattcgcttggtggcgatgaagagagatggatcttagttcgatcattcgcaagatgt

SEQ ID NO: 663481 - DNA, 610 bp, Homo sapiens
  misc_feature (9)..(9): n is a, c, g, or t
  misc_feature (90)..(92): n is a, c, g, or t
  misc_feature (101)..(101): n is a, c, g, or t
  misc_feature (109)..(109): n is a, c, g, or t
  misc_feature (115)..(115): n is a, c, g, or t
  misc_feature (205)..(205): n is a, c, g, or t
  misc_feature (235)..(235): n is a, c, g, or t
  misc_feature (316)..(316): n is a, c, g, or t
  misc_feature (337)..(337): n is a, c, g, or t
  misc_feature (340)..(340): n is a, c, g, or t
  misc_feature (369)..(369): n is a, c, g, or t
  misc_feature (423)..(423): n is a, c, g, or t
  misc_feature (435)..(435): n is a, c, g, or t
  misc_feature (480)..(480): n is a, c, g, or t
  misc_feature (594)..(594): n is a, c, g, or t
gggtttgtnttttggtttctgaagtcctaaccctcaccaggcccaactgccacctacgccagccgcatggcccctacactgtgtctttgnnngaggcaggncagcaggnaggaanaaaagtgggggtgatgagaggttgttctgttcagccctccccactacccacaggcctgggcacgtgaaggaggtcagagttgggtgagcnggaaggcagggggggttccggacaggacanaccccagcttctctctgattactcgtgcatgggaagcagcgtcccagggaccccacgtgttctggcccagcccaagcttgntttggcggccgggtggctgcnatngcgtagttgctgttttggtttggccattncacatcttgttagagttgggcccacgatctgagggtttgtcttgagcctgagcnatatggcctgtnggtacaggcttcctcactgtacatccagctcagctgaatgtgtantagggtgtggtggtcttgttatagtccaacatgatgtcgaggacagtccagggggccccgcccacagacagggcagtgcgggaagccacacggtactccacagtgttcaggccnccctccctgtccacct

SEQ ID NO: 663482 - DNA, 546 bp, Homo sapiens
tgccctcgaactctcgcttgtcgggaaactgatctccactccttcggttgaggacaagtctgaagagccaccaggcacagagctccagaggaacacaagaggcatcccaccttgctctcaatcacaccaccttccctaagatccacagactgcgattcaggtataactgcagccagatgcttagtaaagaagtggatgcttgtgtcaccgacatttctcttctaagagaagtagtacaaccagctgcagtgtaatcaaacggttgcaaatagtggtgcaaattaacccaaatgaatctgtaactgctacatgccgctaccacttctccttcatgtacaagagagttatcttggacaccaaatgggttaatgttgttcagacagacatttatctacagaaactgtcagccgcccctaaaaaatgttccttctataataaacttaaagaccattgcttcatcagcagatcctaaaaatgttagtataccatcttctgaagctttatcttcggatccttcctacaacaaagaacaacacattattcatc

SEQ ID NO: 663483 - DNA, 796 bp, Homo sapiens
  misc_feature (340)..(340): n is a, c, g, or t
  misc_feature (361)..(361): n is a, c, g, or t
  misc_feature (371)..(371): n is a, c, g, or t
  misc_feature (406)..(406): n is a, c, g, or t
  misc_feature (411)..(412): n is a, c, g, or t
  misc_feature (444)..(444): n is a, c, g, or t
  misc_feature (454)..(454): n is a, c, g, or t
  misc_feature (474)..(474): n is a, c, g, or t
  misc_feature (478)..(478): n is a, c, g, or t
  misc_feature (497)..(497): n is a, c, g, or t
  misc_feature (514)..(514): n is a, c, g, or t
  misc_feature (528)..(528): n is a, c, g, or t
  misc_feature (534)..(534): n is a, c, g, or t
  misc_feature (541)..(541): n is a, c, g, or t
  misc_feature (561)..(561): n is a, c, g, or t
  misc_feature (567)..(567): n is a, c, g, or t
taattttatgcgtcaggagtgtttggattccaaatttctattcaggggaggggggctgtgtctcttcttgtatctctaattggaagcagtatcctttttatgttagcatttatggatatgaaatttgaagggttttgatacttgtgttaattattatgaatataataataatatgacataggatatgggccctcacattttgggggggtgtccatctgctaactattttgactgcaaagccatgtccattggagcccgttcccaatcagctcgtacttacttggagagacatatgtctgaatttatggagtgtaattaaaatgaactagttaaacatggnctgcgtgccttaagagagacncttactgcanaacaggacctgactacaaagaatgtttccattggnattgnnggtaaagacttagagtttacaatctatgatgntgatgatgtntctccattcctggaaggtcntganaaagacacagagaaaggcncagcctgctcaacctgntgatgaacctgcanaaaggntgatgancagtggacattaagtgatangccagnctatatatgtattatcaaatatgttagaatacatgggccacatactgatgacaataatctatactttgaaccaaaaggggcagagtgggggaatgctatgttttaagagtgcggccaaatgggaggtttttccaagacacctctctggaacctatataatggatacctttttgtttgagaggggtgtgtttaatattttctaaaggttatgggtgtctatactatggcg

SEQ ID NO: 663484 - DNA, 282 bp, Homo sapiens
tattgatcacttagcacagaaagctacgactaatatcactggggtttggctgcagttttatcatcctggccaacgaatatatgtccgagttgcttcccgagttttcatggttctcgagaaacttggtgacaatcagatgtcactgataatagtttggatatgtggagttcgggttgtatgctggcaagatatgatctttcggaaggagccattttaccatggacatgacaattatgatcagttggtgaggatagccaaggttctggggacagaacatttata

SEQ ID NO: 663485 - DNA, 431 bp, Homo sapiens
atctcgaggatctcgtattctaacattataagttatatgcagtgtcagcattttttttcacagcactagagaccctgtcaataggggatatgagtcagaatggcttattcacagatggggtccagattcagtggttggaacacagacaccacagtgagctcctttgcaaagtggcaaacataattttgcttactgccttcaaaaacatatatccatcgcgtttaggcttcatgatactgctcctgcaaaaatgcaagtcgaaagggactgcagggactctcgctgggggccctgtgagcatcgagcagggctctaacccatggcggtgaccatgctggaggggtgctgtggtccaaaggacaggctgaatggcgagtgcatcggcgtgagcgtggacagcatgtggctaccgttagagataccgggtaccg

SEQ ID NO: 663486 - DNA, 131 bp, Homo sapiens
attacttctaccttaggtttaggagtaatatacccggaaatctaagctcatggaaacatgtcttccatttttgcttggagccccttcttctagttgtacacacttcttcatccatatatgtgcgcatctcc

SEQ ID NO: 663487 - DNA, 672 bp, Homo sapiens
  misc_feature (116)..(116): n is a, c, g, or t
ctccctccctgttctttgcctctctatagagggacggacattggtatcttatttatctaccatctaaccattcctcacccctaagtgacctcgaaacaccacggaaatgaaaagtngttctcccaaataaatggaagcctcaagggttcaaatagttaaagctttttcctttgatactgaaaatctcagctagctctgttagattcttaagcagataacaaggaaaatttattttctaaaattaatcttctagcttccaaaggaaaattgcctattaaatggatggctccagagtcaatcaattttcgacgttttacctcagctagtgacgtatggatgtttggtgagtactcttaaaagttttgtattctttaaaaattatatttcatatgttatacaaaacaccattatctctttttggaatatgtaggttgatttgccttccctaacctgatcatctcctcatcagacttcttttgattcatttgacagtaaatagcctgacatctactgtgcatcagcttctgggcacagcttctgtaagggtccacagttctaattgcccagctccttccatcactcttcctttttgttcccctttgctgtctcttctttcctcacagggggatattttgcttattttttaaaaattgactacatccttttcttgaa

SEQ ID NO: 663488 - DNA, 606 bp, Homo sapiens
gatttctttacggaatactggtttgcagttttgatgtctggactatatcagcagatggtagacagtgcttatgttgatgtgttgttgctatcatcattgactgcataacttgacccgagagctgtaactatatcatggtcattctcactcttgcacatgacgggtaccgcttgacagttgcctacatcccattaccacaagcgattctggccttctatggcttccaacactgcgctactactagcacccactgttcgggctccgacaccattcctgctacatatacctgaaacgtctataccgatgggcagcctttgatactgttatagacttatctgttattacaagtactctaagcgtgaacgtttcaaatgatatctattaagaggtatacgaagagatgacttactcagacgcatctgctcctaatggctatgaaactgcaattatttgttccacttgtcatacctaccctccttcgtgaatcccccccatatcatcatcccattataacggttccattttttacaatgacgtcttctctatctgttagtggacaattacgcctgctcccgccccaccgcctttccctgtgtcctttgtgcg

SEQ ID NO: 663489 - DNA, 220 bp, Homo sapiens
  misc_feature (42)..(42): n is a, c, g, or t
tcgaaagcagaaactaaagtcttccaattctgtttaatccangtttttattagaatttgatcagaactgagtaatagctgactagtactgtggtaactgtctgaattaataaaagacggtaactgaggttctggaagaataagactgaacacataatattcagtttttacatatcatttaattacgaaattccaatttcaatgctgacttttcgtcgacg

SEQ ID NO: 663490 - DNA, 1357 bp, Homo sapiens
gttaaagatctagtgtaattaaggtggaaaacatatatgctaagacaaaagaaacatgattttacttccttaaacttgaagcaccaaaaaaacacacacacacatcacacgtgggtgatagctggggacatgtcgcagcatgtccaagtcaacacaggagcaatttcatagagcatcagtcaatcgaaatacatgcatcatccttctttcataaacattccaagcagttgcaaggtttgttttccacgatacgagatcatattagtcctcatttttcaaaacacaacaataagaaaaataggaaccaacccagaacacaacaaaaacaaagacaacaagaaactgcgcggcgaggcgctgccgcaatcaacaagcaccgccaccgcacctgggggaagctggccccgccaacggtacagctccgcgcgcgtactcggcacaactggaaacagccaagtcgaaacacaccagtgtgcgactccacaaacagatagacaaacaggcacgtcgaccgctgaataacaaagggccacaccaaagagagacagcccagagaagcactaagaacagctacaccaagcgagacacgccacaccacacaaggtggcacatacacacacaaaccaccagaaacgtggagacgatagacaccaccctccggagtttgcgaaagatccagaaaacccaaacaccaacaattagacaacggtatcacaccctagtaccaccaaaactgggcacgacagaaccccaagagcgcacatcacacactaaaacaaacaacacaaaagacaagagaaatgcaaaacaagcaagaacacaaaccaaaagcacgaaagaagacaaagacaaagacatacaaataccagggagcaccaacaccgccagccgaggcgagacacgaaccgaggagacaagagaacagacaagaataaaaaatattgagacaacacgaaaaacaacccaaaacacagagcaaccaccccggccaccacgactcaacacacccgtccgccgcagcctatagacaacggacgagagacaatcgccacaggaacagcgcagacacccacacaaaccgagagcaaaacagcaggcggcgaccaacaacaaaagagggggaacgaaaaacaaagcgagcgactaccaacacacacgcaaccctacgcccacgcgtaacaggcagagagcacacacgacaacacaagcacgaaaagcagccagccccctacccacgcgcacccccacacagagcaaaaacacaagaccgagaacgccaggctaagcgcaacccaggacagccacgggaacaaacacggagagacacgaacaacgaagcaccaccagaccgcacaac

SEQ ID NO: 663491 - DNA, 1130 bp, Homo sapiens
agcggagtgggcgtgagcgccggtgccgctggagcggtggacagctgcacaggagcaggtgcctggggcccggggatctggcccatggatactttggttagtgaccacatcgcagcgatgtagagtcaagtataccgctggtgggttccaggcccttacaagcaacaatctatctgccctgggtcaagtgtacagacgtaatatcagatacgtcattgtataccagccttacagatcgatacgagacatgtacgtaactatggagcaacatacccgtttatcactgtacccctcagtacgatacagcatggacaagtccttacgacccagccgagagtgagcgtgaagcatgcgcacagagaagtcgatggttgaaagctacgggcagatgccgagtggctgagccgcgaggtggatgacacttgtgtgccttgggcccctggaggaccgcacatgggcaagtcatacttagggtaggaagacacggtagtcaagagtggctagcaagaaaaatcagggggccaagcagaagaatggagagcctaggggtagaaccgagagtggaggacggggaccacaaaagggacgaaagaagaccgacattggcggccagtgcagaactacccattacagaccgtacaggagccggtggcgttggaaagagacaccgagcgacaaccgagggggccaagaaaagccaagagtggaaaagcgagaacggcgaaccaacagcccacgaggcaagaaagaggagacaacgggaaggcacatgggcagtgacatcgaccgcgacaggcgcaggagggggcaaggaaagggacaatggaaaagtgaaagggacgagatggtagagaggcgccagaggagaaagaaaaaatgaggagagcgggccgcaagcagaagacagggcgaggcaagcgcacagaaatggggagagaggcacgggagaggaaagacgaggaacagagcgaaggggagacgagcaacaagaggggaacacacgtgaagaggcggagcagacgcgcgtgtagaacagggggagacaagtagggggccgcggcaagaggaaggagcaaaacaacaagagaaggggtggggagaggcgcgccagggacggaagacgcaacaga

SEQ ID NO: 663492 - DNA, 423 bp, Homo sapiens
  misc_feature (423)..(423): n is a, c, g, or t
gtacaacgaagcttagaggatcctgcatgagactgctatcatggcagacaagcccaaactccactactgcaatgcacggtgcagaatggagtacacccgatggatcctggctgcacctgcagtcgagtttgaagagagatcaatgacatcttgccaagacttggacaggtctcagaacggatgcatatttgacgttccagcatgtgtcaagagctgagattgaaggcatgaatctggtgcaagccagagccactctgaactacagtgccagcaaatacagcctctatgggaaagacataacggagagagccatgatcgatatgtatatagaaggtctagcaaacttgggggaaatgatcctacttgtgcccgtatgtacacctgaggacaaagatgccgctcgccttgatcagagagctcctn

SEQ ID NO: 663493 - DNA, 516 bp, Homo sapiens
gtaaaggtccaagattctaaactgccgccatataaggatctcggtaaaaatctcccattccctacatattttcctgatggagatgacggggaactgccagaagatttgtatgatgaaaacgtgtgtcagcccggtgcgccttctaatacatttgcctaacatctttggacgtggcagaaccttacatattctgtgagcttcgatgagccagagtgatatcataaccaccagaaatcatactctcctttcttagtcacaacaaaatcacacatgtcatctttgtcaagggcataaattatcattcatacccccattaaattttgttagaaaaattaccacattaaatatatgagttaagtagattggattagctgaaaatggtgatgagcatattagcaaaatattcttaaataatggactcgattcttataaaaatacatatttcacaagtaatataaaaatgtctgaaaattataaatataattaaagtattgtcaatatataagaaaaaaaaaa

SEQ ID NO: 663494 - DNA, 1378 bp, Homo sapiens
  misc_feature (291)..(291): n is a, c, g, or t
  misc_feature (302)..(302): n is a, c, g, or t
  misc_feature (304)..(304): n is a, c, g, or t
  misc_feature (332)..(332): n is a, c, g, or t
  misc_feature (378)..(378): n is a, c, g, or t
  misc_feature (380)..(380): n is a, c, g, or t
  misc_feature (414)..(414): n is a, c, g, or t
  misc_feature (510)..(510): n is a, c, g, or t
  misc_feature (587)..(587): n is a, c, g, or t
  misc_feature (665)..(665): n is a, c, g, or t
  misc_feature (1226)..(1226): n is a, c, g, or t
tcagttcaaactcatttcccttttattaaagtccaagttcaccattacatgggctgggtacctcaataaagggaaaacttgttcaaataagggtaatatgttactcatcagtattctccagggtaactggttcacactcaatgtagcaatgtcaataaactccttggggaaagcccactccagtggcggtttatacactttgtgtctcaaggcccagttctccctcgcggaagtgtggaaatttcccagttctcatttataaagttgtggctcataagttctccgtggaantgacattaagngnggtataagatttctccttatatgtgaanggtctccgtgcttgtgtgtctccttataaacaaccctctctatagngnatatatcagaaacgcgtggtatcttagcaccaanaatctcactttataaccgcgtgtctgtgtctatgtgtccccgaccaaaagccagcacatctcacatgtgcatctctgtgtgcgcgcctctctgtgngaaacccaatatatctcatatagcggttaacacacaggtgtggtgtcttataatctcccccttttatagcgcacaanatttctccccaagggcgcatctctatatatatctcgtggcccttgtgtgttagacacgtttattgtgttttaaccccnaaagccagagagctatttctaaaactctctctctcatatctgtgtctctccctgtgtgtgaacccccatgtgggggaaatatacgccagcgagaaactgtgagctgtgggaattatgcccaacggcgcggggggcgcccgggggggtctacccgggggcgggacagtgtgccacagggagaggccctcgagagcgggtctccggccccggtgtgtgggttttcgccggccccaagaggggccagtgcgtggcggaaaaaagacggggcgccccaagcaattgcaccgggacaaaatgaggcggagacagcacgaggggccttagtaggagcaccacgaagaaagaaaagcaccggggtttgtaaaaagcctccgccggggggttttagactcccccggggaagaccggtgcgtcggggtgggggggcccccgctgaagggggccactaaattggcgacagtttttaatgtagcgaaaggggtctcctttttagaaagaaacgcgcggcggggtctcttggacgagaatgaatacctacaccgcccggcggcacacacaagnggggggggggcccttcaccccagaaggaggcgtcatctactacccaaacggagggtggatatttattcacagcggcacacaacttttggtctgtgcgccgaacctcggttggtgtgcaccccataacacgggggggggagcagcacaaactg

SEQ ID NO: 663495 - DNA, 941 bp, Homo sapiens
  misc_feature (209)..(209): n is a, c, g, or t
catactcttcttctggagcgcagttacgaaacaataaacgccaccaagggctcaaccaaggtgcaactattagaaaaagtttctagcgcttctcacgtgctactagcgagagtaccagtgagaaaccagcactccctgtggtcgctattcgtacgtatccgctcattgtgatcccacggggcaccatcagattccagccaaagcatagnaatgacgtctggggtgttattcgatgcgaagcggtggttcaacgagatgcgtgatgtggggcttgagtccctaccttgcatctctgatggagtgcgtcacctcgttctcagcaccagcgtcgatgccctgttgttctagccgtagcccccaggatttctcgcagattcctcatgccgatttcccgtgtcctagatgtgcttgtgtgatgacttctggacctctcttgtcctgtggctctgcgttgctctcctcctctctctgctagagattttctccaagggtgcgccttgtgggcaagtcccttaccagctcctgcttgatagcttggtaggcgccttactttgtccacaatcgcaactggtggctctcccgctgaatggggcctcagcaggtgcccaagctgctacaaccttggccactctgtttgctccaccccagcactgggcatggtaattagcctttccccatgttaatttattcagttttttcaagggtcaactgaattccccacttcctgggtaagaagcatgatctccttttaatttcacgtctaagatcctggcagcttccccctagctggttcctctgttagtcctgctggtgactgtcagctcattttcaatgtgggtctgcagaagggctttaggtcttccccaacccccttacctttcacaggagggaacctttcatcagggatcactgattattgctggcctgtgggtctgcctcag

SEQ ID NO: 663496 - DNA, 544 bp, Homo sapiens
  misc_feature (370)..(370): n is a, c, g, or t
ggtgtttggggcccttgggtcaagtgggcctcttgctccaagccctgcggggtgggggtgcagcgcaggagccgaacatgtcagctccttacagtggagctccaccggagtttgcccctccctcccgggcccccaagacatccagaagccttcctcccccggggccagggtcccagaccccagatttctccagaaaccctccctttgtacaggacccagtttcggggaaggggtggcccctttcggggtcccgtttcccccttagggagagaggagccccaggagtttcgagcggccagggggtcccggtttcgagcccccatcaagccaggaatgttgggttatgggagagtgccctttgcattgccantgcacgggaaccgcgggccccctgggggcccccccagttttgagctgtccctgtttttttttaggggggaaggggtttttcggtcccctactccaagagcagagcctttttccgcaaagggcggcccccaaattgggctccctcccccagaactgtttttccccccccttccta

SEQ ID NO: 663497 - DNA, 890 bp, Homo sapiens
  misc_feature (890)..(890): n is a, c, g, or t
attctagaggccgaggcgggtggatcaactgtggtcaggagtttgagatcagccaggcaacctggtgaaaccccgtctctactaaaaatacaaaaattagctgggcgtgatggtgggcgcctgtaatcccagctacttgggaggctgaggcaggagaatcacttgaacccgggaggcggaggtgcagtgagccgagatcgcaccattgcactccagtctggcaacagagtgagattccgtctcaaaaaaaaaaggaaagggaaaaaaaaatagcattatacctcttcctggtctcaaaccgccatgaaaattctgaacactccaaattcagtggaataatccaaaaccaaaatttataatgtataaaatatttatcttcttataggtaataggtatactttaaaaaggcctcgacggtatattatcttctaaacaggttacaattcatgtgagggtacattaaccaattatggttctctagttgagaacaattaaggcctatttcatggtgtgtaggcctcagtgcttaacagtgtgtgcaaataaatatcggagaattaccctggattggtaaaaaccatgcgtctgtgttaacaatgcaaaattcaaagggcctgtatctatgtaattcttggacatcattatttaatggatctcaagtattggatggtggggggactagtacataagtctcattttaaaactcattatgattgtttaaccaaatcttcctttaaagtactttacaatctggttttccaaagttatttggctcgaaacgttaatttggttcgaatggtatttccaatttttaagattgcggttgcgggagaatggtaatggggggagtggctcgcaaatggtaccttgtgtttctgcaacatatttcn

SEQ ID NO: 663498 - DNA, 144 bp, Homo sapiens
gagacagagtcacagagcacatgctaggaaggactagtgaattgcatgtctagtgaaaagccatcttcaacagtctgaggggctgctatatcacatagaaatgcaggtagggggctgggtgcagtggctcatgcctgtaatccc

SEQ ID NO: 663499 - DNA, 119 bp, Homo sapiens
gctctgtgtgtatctagaggatcccagcgctgcgcagtagtataaaagttggggataattattttttaacccctccccccaatacacacacaaaggccttccccatcccaacgggaagc

SEQ ID NO: 663500 - DNA, 540 bp, Homo sapiens
  misc_feature (5)..(5): n is a, c, g, or t
  misc_feature (206)..(206): n is a, c, g, or t
  misc_feature (222)..(222): n is a, c, g, or t
  misc_feature (244)..(244): n is a, c, g, or t
  misc_feature (246)..(246): n is a, c, g, or t
  misc_feature (267)..(267): n is a, c, g, or t
  misc_feature (301)..(301): n is a, c, g, or t
  misc_feature (305)..(305): n is a, c, g, or t
  misc_feature (308)..(308): n is a, c, g, or t
  misc_feature (317)..(317): n is a, c, g, or t
  misc_feature (325)..(325): n is a, c, g, or t
  misc_feature (349)..(349): n is a, c, g, or t
  misc_feature (352)..(352): n is a, c, g, or t
  misc_feature (363)..(363): n is a, c, g, or t
  misc_feature (383)..(383): n is a, c, g, or t
  misc_feature (405)..(405): n is a, c, g, or t
  misc_feature (429)..(429): n is a, c, g, or t
  misc_feature (433)..(433): n is a, c, g, or t
  misc_feature (451)..(451): n is a, c, g, or t
  misc_feature (500)..(500): n is a, c, g, or t
  misc_feature (506)..(506): n is a, c, g, or t
  misc_feature (530)..(530): n is a, c, g, or t
  misc_feature (534)..(534): n is a, c, g, or t
gaatnaattgattacgtgaacaggtaccgtgtacaatccccaagctacggcaaaacatcaggagaacgcaccgatcttacattgtacacagcgcagaacaggatcaccccgaatgtcaacagaagaccaaaaatcactttacaaaaaaaaataaaaataacacccatttttatatttaaaaaagtgccagcccttgagctgcaganattagaaaagcccaangacgtgccgccactggaacgangncgccagcaacgtgtggccgtnctggcctttaaagctgaactgaagcgctccaganactnatntctggagtncctctgtnttaggattttccctctctactgtngtnatgtgtgagcntgtcagcctcaccacgagtnaccttcatgcgtcctacgtgtnacggccagaggctttccctttgtnaggnttaaatctgagtacagtnaagaatgaagaaaccaaacaccagaaccctaaactcaaatgatatggancgaatntagagcggcagcgccacccctcanaganagcggc

SEQ ID NO: 663501 - DNA, 370 bp, Homo sapiens
aggaggacaacacattcacttttatttcagtcaagtcacaacacttgtctggctgctgccaagtgcccacagcttcccatttacagacacactttacagggtttcctgtgacagtacagcaagcctctttgttcaaacaggaccagtccaaattttccctcaaaaaaacaaaacaaaaaaaaaaaaaaaaccaaactccattccagtaaggggtaaatacatgaaattacagcaaacagacacttaaaaggacagccaagaaatcttccaacagtttattagaaagaatgtagacatttaaaaaaatccccactgtcatgaacataaattgaggttttccagccagggcataagctgaaatcaaaacaga

SEQ ID NO: 663502 - DNA, 357 bp, Homo sapiens
tccttctgcacgcgaagaagcagtggtaccctcaccccattggcgtgagtgctgtagttgtgaccaaagcagcctgtgcctggggccaagtgttattgggtgttttacatcagatatctcatgcaatctaatctactgtcatctctacactgatgatggccactgtgtgactgccacaacgcattaacctggtatttcccagtgtcaaagggccaggaaaagtgacaagtctggtttatgcttcctcatcctttatctgtccagacaacctcaacagagtaggttttcctgggtaagcagatactgcgggctggcagcccctcaatactaagattcttttcagtgagatctctcctt

SEQ ID NO: 663503 - DNA, 600 bp, Homo sapiens
  misc_feature (173)..(173): n is a, c, g, or t
  misc_feature (266)..(266): n is a, c, g, or t
  misc_feature (423)..(423): n is a, c, g, or t
  misc_feature (505)..(505): n is a, c, g, or t
actgattctgaccctcaccagtgaagagggtgtcagcatcacgcatacgctggacgggcagttcgacgaagccaataacgccgaaaaagcaatgaacaatctgaaggatggtctggcaaaactggggcaaaccctctattacgcccgcgatgtgcaaattaatttgccggggngctgtttgtaccaaacagtctgttaaaccagttccgccgtgaagctgctgacatgctggatgctgcgcgtcttgccagttaccagcgcggcancgtaaaccggttgctgatcctgcgccggtttatccgcaaacgcatctgagtttcctcgcgaacgtatacaaccagaaagcgcgtgaattttatcatcgctatggtgtgcagctgattgacgcggcgtatgaagcacatgaagagaagggcgaatccngctgatgatcaccaagcattgtctgcgctttgctttaatctgtgcccgaaacaggcgaaaaggcaatatcaaaagctggaangcgacgcaatgcaactggttaacggcgatgaagtttaacgctaaagttgattagctttttacgccacttacaaaatgtttgcaggaaaaccgcaa

SEQ ID NO: 663504 - DNA, 273 bp, Homo sapiens
actcagctcccaaagtgctgagattacaggtcgtgagccatcgcgcccagccgagtacttcaggtgtcttagaattttccagagtgtaccctttctgagaaaaacagagacttaaagctaggataactggtatactatttattttttttttacctccagccggggtgacagagcaagactctctctaaaaaaaaaatatttcccttgtaaatagtcccggcgacacgttttacacgcgttgccaggattgcaacgttaggtcaacatatacca

SEQ ID NO: 663505 - DNA, 157 bp, Homo sapiens
ggtccgtcacacactcgttgatgtcttcacaggacacgccatccgccatgatgcatagcgggataacaggagcatatggctgagccccaacagtgctgcacacctgcttgcggttcccattgtctttgcaggtattgggctgcggcagtggcagccg

SEQ ID NO: 663506 - DNA, 1593 bp, Homo sapiens
taccggatctttgctccatggttgctttcttcgtcgctggtagtgatggtgccttgttcgtatgtttgctgcgctcggttatcgtcactcgttcgtgtcggtctttccctactcagagttgggtgtcgattcgtctccgcgtcggtggtgtacacgtgtgtagcgtgcgtcctctcgtctcacccccgtttgtgtggcgcgcgggtgggggtgcccccccttttgtgccgcgccgctcttttgctgtgtgttgtgtcttccccccaggtgggtgttactgttctttgtctgcaagaccgcggggtcggggggtagagtcgctcgccccgcccttgtgtggtgagctcgtcctttgctcctcccggaattaatactaggccccccgcggttgtgaaaatacacatgtggcatgttcgttggcgtcgcgccctggatgttgtttgtcacaacgtgtggcgtgttctctcgggggggttttcttcttccgtgtgggggccacacccaccgagagttggtgttccgcctacgtgtgttattaggcgggttgtgcatacacgtcggggcacattttttggtcaccgctctgcgtgtccacctgtgaggtcgttcgcggttttcccccagccggggggttcgaaaggtatttgttgatgcggtaccttcgggccaacactcttccccccgagggtacccatcttttgtcgaaagtgagtgtcctgcctgtccacgcggcggctccttgtaggccccccttatgggagttcgaaacgcgtgttccgctttgtcaccccgcttatggtgtgggccccctgagtcctcgggcactgttggtgatagttatgccccagacgctgcgagatgcgcctttgggccatttccgtgttctagtgctcccgagtccacccgcttgtttaatcccggttggtatggcccccacccgttccccgcctatgtgctgcctctttcccactaatggggcggccgttatttttggcccactctcacttaatgggggggcctgttcacttttccccctggagtgttccccccccaaatttctccacggctaatcacccctattgagcccataacgctatcgccccccaaattccacatgtttcacactagtccaataattctacatcgcgcgctaaaaatttttaaacctttttttctccacacaaacacacttttctcgggccctaattccgcgaaatgcccccgacacgcttatactcggagactatacccccgaatgcacatatcaccccaccactgtgaaacacttcctcatacactcctttaaggctcacattcacttttcttctaagccacccacgtaaatacttaaataaattttccatgagtttgagagagccttcgcttccgaagcgagaaatgttcctatatagtagagagagaccctccactaaaccctcggaggtgagctaataatggagtgccccccacccctatccaccaccacttcgagagaaacccgtataacactccaaatttagaccaaaaaggaagggatcgtaacccccccaagctggtttcaaacccaccccctggcctccatgactttttcca

SEQ ID NO: 663507 - DNA, 340 bp, Homo sapiens
cgatcgttctgtctgctctggcggacgagaagtaacaagagttcactgttgacatccgcgcagcagaataccacacatgccattcggcaagggggcggaaaattcgcaaggtgcgcgacagcactggagcacgtgtcatcttccctgcggctgaggacaagtaccaggacctgatcaccatcattggaaaggaggacgccgtccgagaggcacagaaggagctggaggccttgagccaaaacctggataatgtggtggaagactccatgctggtggaccccaagcaccaccgccacttcgtcatccgcagaggccaggtcttgcgggagattgctgaaga

SEQ ID NO: 663508 - DNA, 312 bp, Homo sapiens
agagagagagagagagagatactgtgagagagagacagaatggtggcacacagacaggcatgtgtacgcgcacacacacaaacacacacagagacgcacccccccaacacacacacacacccaagacgaacacacactgtacaggagggaacacctctcccgcaggcagccctctgaagctggcgggtttgtgcgtctccgacgagtgagagccacgcggtgagagacgccgcccactgggcacagcaggggggatcgtgtgctctgttatcacaaggggctccaattttgtggggagactcaccgcgcaca

SEQ ID NO: 663509 - DNA, 182 bp, Homo sapiens
gccctccttaggccctccagtaccaaaaagggcaaaaggcccccccagtcccctcccatcccagacctttttggcagcctaaaaagggtaacccaactttgccctatgaaactgcttccctgagcatcattttcaaaggagcaacccctctgtgtggctataaaaagcctacgtgattgtga

SEQ ID NO: 663510 - DNA, 526 bp, Homo sapiens
ctcccctagggggcacgcgagtctaggtggaagaggcacatctatatgtgggtagtggagacggctacaatgaacaaagaaatctgtaatggtttcttccaacaattcgagaaaagacaagaaaaacacgcttagctgagactgtgccataatctgtttatgtgggatacgtgggtggtgggagctgctcgagaatgcacgcagtagcactaaactatggaggctctacagccacaatataccactcccctactgtccccaccaaagtccccttccaggatctagtactgagatccctctccaggaagcacgggaccacggacacggccatgtatgtgtaactaacaaagtccagtaggaacaccagtatgggtgagtccaatgatgattctggagtgtagacaccagaggtaggttgtggcacaccaaccagaggcctaccgtacacacccaaacatgtcctttaccggacatatggtctagaagatcacacaaagactgcctagaagggtctctggagccactg

SEQ ID NO: 663511 - DNA, 130 bp, Homo sapiens
  misc_feature (64)..(64): n is a, c, g, or t
tgctttcgcctccgcctgtggatgctgcgcctctccgaacgcaacatgagttgctctgccgccncttattcggggggtgccggctctttcctgctgtggccgggacctctgcggccgtggagaaggagga

SEQ ID NO: 663512 - DNA, 459 bp, Homo sapiens
tatgaagataagtttcctttcatccattaatttcatcttcagtggtctagtttgtaaaacaaacggaacaaaaacaaaggcagaagagcaactagttcttgaaataatgagttggttccctagcaatataatcaattaattttcatcctaggtttcattatgacttcacgggtctaaattgaaaaccaatcaactatcttccttttctcttacgatttaaaagttgctcatggaaatttgagaaatacagaaaaagtatataggagcttggcaacatagcaataccctatctctacaaaaaaaaatttaattaactgggcatggtggtgtgtgcctgtagtttcagctactcaggaggctgaggtgaaaggactgcttgagctcaagaggtggaggttgcagtgagccgagattgtgccactgcactccagcctggcgacaaagcaagactccatctca

SEQ ID NO: 663513 - DNA, 331 bp, Homo sapiens
tactgactatcctagaaatcgctggcgccttaatccaagcctacgtttccacaaaaagaataaaatacctaggaatacaggtaaccaggggggggaaagaactctacaagggaaattacaaaacattggtcaaagagatcagaattaacacaaatcaatggaggaagcattccgcgctcatggataggaagaatctatatcattaaaatgcccatactggttaaaggaatttacagattcaaggggtttcctatcaaactactagtgacattttttacagaattagaaaaaaattaaaaattgatgggggaactaaaacgaaacttggtag

SEQ ID NO: 663514 - DNA, 119 bp, Homo sapiens
catcatcatgatggattggctggtgcaatacaactaggcttaatagggacatgtcagattcacacaacaagttagtaaatataacacaagagaagatactacttacaatggcaaaaaaa

SEQ ID NO: 663515 - DNA, 339 bp, Homo sapiens
aaggaggactgtgctgaggtatattatcgcaggcttctccaagggagcactctcctatgtatatccctcttaagcctgcgtgaggatggcacattaaccctgtggcccctgcaggcaggagggtgtagggtgcccatacctaccttgccctttttcttgaaccgtagactgtgccggtttatgagtcagtgatgtgtgtctgagtgtgtgtctagaagtgctgaactccaccttgtgttattgggaaggttgttgtaacccccttagctttagagcctggcttccaagatgttccttttccgttctctgtcctgccttggttcccatggataccggagg

SEQ ID NO: 663516 - DNA, 448 bp, Homo sapiens
cggggataatcatggcgcccgtcggaacaacatgtgattgactgatcggagacgcctattcgacggtaggtgcgatccagcacggctgagaactgggtactgtttcgcgagcatcgaatccagccctggcacggttggactgctacaaccgctaccttgctctgtcgagatggagctgccacgccggcggttcagcgtgccgatggccgcatgaatgctggtagctcgcatagaccaacgaaatctacattcatggacgagcgaagttcaaagcatactcacgaaaatgacaaccttgaacttgcagaaaactatgaagccagctatacatgaactgcagccaccaacctataagctcatgactcaggcacagctggaagaggctacaagacaggcagttgaggcagatgtacgattaagccaccagttctggaagagcgagtaccat

SEQ ID NO: 663517 - DNA, 291 bp, Homo sapiens
caaagagctgcagaggcgttcgctctcgtcccggcaaagacgcccgaatgcgggcagctccgaaaactcctggaggagagcagacgacagagagcccgccgcgcgctacacacacgatcacgcacccacacggcgagtcaaaatgagacgccactgaactcaggctgggtgaactcgaggacacagacactcgctgctttacttatctattcagacatatcaaaaatgaaacttcgagacccactttattttgttctgtgttcaaaggaaataaaaggacatcgaaactga

SEQ ID NO: 663518 - DNA, 616 bp, Homo sapiens
  misc_feature (295)..(295): n is a, c, g, or t
  misc_feature (526)..(526): n is a, c, g, or t
taaaaaaaaaaaaaaaaaaaaaaaaaaaaaaaaaaaaaaaaggggggggcggctttaaaattatctcccgggggggggccaaattttacgggtgttacccaagttttttttgttaaaagagggggcccctatatatagggggagggtggtattatatataagcatagaggacaggggggcgggggttttaaaaacgttgggaggcgtggggagaaaacctgtggcgaagcgcttgggaagattctttgggtgagaagagagcccttatatctctctggggggggggagacattanttggggacaaaactcttaccccatacacgaggagaattgtaaagagaggcgtctcataggggaggtagatatttatatacacacatttatttaaagaggtgtgtgtatataggggtgggtgggtaacataccacatagggcgcgtgcacatatagagtgctgcgtgagcagcggtgactgtgatgaaagacacgtttttggtgggcgcatgatacgcgggaaggatatatntagatgtgttgtatgtagagaaacattattatctatattacacacagcgagggaagctcagttgatagtataaaaaaataagatagacgg

SEQ ID NO: 663519 - DNA, 268 bp, Homo sapiens
tctgtttaacattacagcgtcaatctgaattactgaagttctttaatttagcaatcttaggcaacctaaataggagcgaagatggccaatagggattctgcatagatcctgttctgctctgaaagcgagagggaagtttgtacgagaggccagctagaggtcgtcagggaaagctagctgcagtatactgtctttctgaaacagacagtcactcagaactgggagctaaaagccccaattcattcgttaacctcgtgaagtaggaggt

SEQ ID NO: 663520 - DNA, 552 bp, Homo sapiens
  misc_feature (239)..(240): n is a, c, g, or t
  misc_feature (258)..(258): n is a, c, g, or t
  misc_feature (289)..(289): n is a, c, g, or t
  misc_feature (300)..(300): n is a, c, g, or t
  misc_feature (368)..(368): n is a, c, g, or t
  misc_feature (422)..(423): n is a, c, g, or t
ccctgtatgcgtgtacaacatgtcccgtggttcagcgccggttttgaccgccacattaccattttttcacccgaggtcggctctaccaagtagaatatgcttttaaggctattaaccacggtggccttacatcagtagctgtcagaagggaaagaattggtgcaggtaattgtttcacacagaagaaagtacctgacacaatatattggattccagcacagtgactcactatattcaanngataactgaaaacattgngttgtgtgatgaccggaatgacagctgacangcagatcccanggtacagagggcacgctattagaggcagctaacgtggaaatacacagtataggctatgcagattcctngtggaccatgctgtgtaaaacgaattgccgatatttctcaggtctacacacagnnaatgctgaaaatgcaggccctcttggtttgtggtatggattttaatatgggtataagatgaacgagcaaggccctacaggtatataagatgtgatcctgcaggttactactgtgggtttaaagccactg

SEQ ID NO: 663521 - DNA, 102 bp, Homo sapiens
cacgatctttgcccaggcaggcaccaccctaagtgtgctccatgcttcctaagccgccagcccaggtccacctatgccagcctgggaggaggggagtgtggc

SEQ ID NO: 663522 - DNA, 379 bp, Homo sapiens
  misc_feature (223)..(223): n is a, c, g, or t
  misc_feature (246)..(246): n is a, c, g, or t
ctgtgtacatctccgccttactccgccttactctccgccttaccacccaagtagctgggattacaggtgtacgctgccacacccagctaattttttatatttttagtagagatgaggtttcaccatagttggccagagatggtctcagatctcctgcacctcgatgatccagcccacctcggcactcccaaaagatactggagattacaagtagtgagccacncatgcccgagcacgtaatttcanagtttttacagcctacaattttatccaatctgtaaaactggggatcgtaactaagatccacccacatggcgattgtcagagggactcgtagttcaacccaggtgatctcatagtcacagagctcaagcccgat

SEQ ID NO: 663523 - DNA, 148 bp, Homo sapiens
tggagaagacattaagggacatatatgcagttgctacgcaaggggcccgactagctctagtgtgccatggaagaggcaggatgagcagctcagccttcaggtgaagacactttatcgtggattccccagactgtcatccatcttgcta

SEQ ID NO: 663524 - DNA, 120 bp, Homo sapiens
cagcagttaactgcacctggagaacggcgtgcttgtgtgattaggagtcggcccggttcataatagtttcattgattggagtgcaacatgcgaagggcagttttccatacgctatctctt

SEQ ID NO: 663525 - DNA, 123 bp, Homo sapiens
agagctgcaggcccagtttagcagccccatgcagctgcccttgtccagcgaaggccctcgaaggttggtgctgctgtgttgctgcaattgccactgctgacaccagagctcaggccccaggtg

SEQ ID NO: 663526 - DNA, 890 bp, Homo sapiens
tcggtgcaggtgatcacctgaggcgggagttgagaccagcctggccaatatggtgaaacctagtttctatttaaaatacgaaaaattagccaggcgtgtggctgtaatcccagctacttgggagactaaggtgggagaatcacctgaaaccgggagggcggccaggttgcagtgagccaagatagcgccatgcaactccagcctgagtacaacccgagactgtacttaaaagaggtatcattccgaaaaccaccaagctcacctagaaaaggtgcacctaagatgctttactgataattacaatatgtggactttcagcctaaagacagttttacttggggagtcactggtactcagaacaccgatgctattttgggacctaatatggtggtcctggtcattgtcacgcagaacaatttattacccataccataacacatctagcgaggttggcgtttagcagttcagacctgtgtcgcattcacttatccaggtccatccatctactcagccattgagacatttggcctagaattcaaaactaagaaacttagaataatgaacacctatttctaaaactttttagaatggagtactcccacgaaaagtagattcctgtatcagctacatctattgtgactcagggtcatcccaagtcatgcactaaccgtgggccttcagagacaattcggactacttgaaaggctggggagtcacggaggtgtagtcctctcagagttatgaacattggtcggtaatgccaccttaagagaatttcggtccgaaggtacaaattggcagtgcatttagaaccggcagctgctagaccttctggaaactccaggaggacacccacgtggtaaaaacggcctgctcttggaacataacgg

SEQ ID NO: 663527 - DNA, 824 bp, Homo sapiens
accggtgttttctgcttgtcgggtttttttgtcatcttccgccccattttttcctgggtattccccctttttgggtggttcctcccccctgtctctctctttctggatacacttttttctctggtttatgacggtaaaatgttttttgccctcttttgtggttaaaatcgtggagtagtgtcccccattttttgttactgtcgtggtgctggtccccttctgaatcagtggtctttcctgacaaacaacacttgtgtggagagagtttttcacgacagaaccccctcgtgggctccttgtccgtcgtttgtaagaagatgagaccacacccgtcgtcgcggggggggtcacacaacaccaccggaggaccaacaagagttttcctcggggtctctcactactgctcccacacttttgtgccccgccagagtctctatccacaggcgtacaaatatgtgatatttttgcctctataatatcttcgcccctcccctctctctatatactcagcggggggaaaaacgcgtgttcatcagaacatcctttggtttttaaccatggcgtcctcctctacgtcattgagtgatatgaagaaagatgcggttgtagagtgaaaccgaactgcttcgtccattaatcctaccacgcgcagagaaaagaagaaattctttgtgggaccaccctgtcggtttttttttctgtgtggggggcccttttttgtttttttattttttaaaacaccgcatttttttttggggaccaccttggcccccaaattgtttcccagaattgggggccccccttataaaaattataaggagaga

SEQ ID NO: 663528 - DNA, 686 bp, Homo sapiens
aattattatactaccatgtagcatctcacttctaggactaactaatctatcgctcacacctcatatcctccctactatgcctacaaggaatatactatcgactgtccattatagctactctcataaccctcaagtccactccctcttagccaaatattgtgcctattgccatactagtctttgccgctgcgaagcagttgtgggtcaaccctactagtctcaatctccaagcacatatggctaaatacgtacataagctaaactactccaatgctaacataatcgtcccagcaattatattactaccagtgacatgactttccaaaaaacacataattaagaatcaacacaaccacccacagttcataattattagcatcatccccctacgtatattattaaccaaatcaacaacaacctatttagctgttccctcaatccttatcacatccgatcccctaataacccaccatcctaatacatatgctacctgactcctaccgcctcataatacatggcgaagccattcgccacttctctcagtgacctactatcacggagcaaaatactaatagctctctatactaatctcccctaaaaatctccttaattatagactcttcacgagcacaagaactaatcatatttatatcttacttcgaaaccaacttatcccacttggttat

SEQ ID NO: 663529 - DNA, 116 bp, Homo sapiens
ccgtcctttctttcgccaggctgggcacatagggagatctcatctctacaaaaataaaaattagcaggcagaggggcacacacctgtagtctcagctactcggaaggccaaggagg

SEQ ID NO: 663530 - DNA, 863 bp, Homo sapiens
gctgagctcgcgggtgcgcacgggtacgcagcatccgtggcttctgcctccaccccgtaactgcacgcctgcggggagctgccgagccatcgagaacgctcgccggtggaagccctgtccatgcctggacggctgacctggtggtgccgatactacgctgctcaagagcatgacgtgagtgctggagcagcgagcagctcatcgacgaccacttcctcttcgcacaagcccgtgtcgccccatgctgctggcctcgtggcaatgggccgactgagtggccctgacgcccgcggtatctggcacaatgacaataagaccttcctggtgtgggtcaactgcggaggaccacctgcgggtcatctccatgcagacggggggccacatgacatggcacggtgttcacccgattctgacaacccggccatcacccagattgaaaactctcttcaaacgtctaacggcactactgaagctacactgctcggacacgcgcttcacccatggatacatacaatcactcgacctgccgcataccacaccttggggccaaccctgggcgcctgcgagacgcagggtgtgcacatacatcacaggcctgaacccagaccgtggggccacagccatgcacgcacacgtcctccggcgccgggctggcactatcacggcccgtgtcactggcgcgatcatatccagcaacagcccgacaggggccaagcacgaagtcagggactgttgtgaccacgagtacatgccgcgtgacgacggttggacccatctcggaccgctctctcccaacggcgccatgacaccggccaagttggggcattcccatcaagaaccgatggcacgccttcggcctgccc

SEQ ID NO: 663531 - DNA, 325 bp, Homo sapiens
  misc_feature (13)..(13): n is a, c, g, or t
  misc_feature (18)..(18): n is a, c, g, or t
  misc_feature (65)..(66): n is a, c, g, or t
  misc_feature (100)..(100): n is a, c, g, or t
  misc_feature (126)..(126): n is a, c, g, or t
  misc_feature (155)..(156): n is a, c, g, or t
  misc_feature (230)..(231): n is a, c, g, or t
  misc_feature (259)..(261): n is a, c, g, or t
  misc_feature (278)..(278): n is a, c, g, or t
  misc_feature (292)..(292): n is a, c, g, or t
ctcgtgcgttgcnattcncaatgccagaagacagtggaacaatatctagagtgttaagggaaaannattttcagccaagaattatatactctgccaagtnatcatttctttacaaaggaaactggnagacattcttagatatacaggggttaggnnagtatatcaaccaagaactttccctgacaattttgctgaaggatttactgcagctaacagagaacctgaattannataagaatagggaggcaattgtatgccnnnactgatggtatgcattnccactagttaaggngcattaagtttaaattgttatgtatagggcatt

SEQ ID NO: 663532 - DNA, 248 bp, Homo sapiens
ggcgattgttttttcctcaagggcacttccttgagggctgaataccaatcagcctgcgatacaaaggaggggccccctgtcatccttgggactgtgcagtggctctgtggggacaatcccacgtgctgtcctccctacgacctcactcccctgggcttttgtgcaggagtcaatattgattactgttatttctttcttttttctctttttttttttgagacagagtttcactctgtcaccaaccggtg

SEQ ID NO: 663533 - DNA, 353 bp, Homo sapiens
cgtgcctgcaggtcttgcaggccgcttggacagtatggagcgtgaagctcgcgaggctgaggccggctgagcagtcgcgcctcccaggtgcgcaccatggaccgttcggagcgcatccgcacctataactggccggagaaccgcatcacggatcaccgcattggttacaaggctaataacctggactctgtttggaacggcgatatgcatgacctttttaaggccctgcaggaccaggagcgtgccgatgcgcctcgaggctgagggctaaacgggcgtggcatacacgtatggacaggcgctgcgccgtggggtgcagcgccttcgtgctgccggggtaccaagccccgagt

SEQ ID NO: 663534 - DNA, 888 bp, Homo sapiens
  misc_feature (73)..(73): n is a, c, g, or t
ccgccaacgaagagaagcaaacgtacacgccgatgcttaaggaaggcctccaattttaagaagatgatcccangctaccgacagcccatcatcatttccatgtgctccagctctctcagcagctctctgggatcaatgctgtgttctattactcaacaggaatcttcaaggatgcaggtgttcaagagcccatctatgccaccatcggcgcgggtgtggttaatactatcttcactgtagttctctattctggtggaaagggcaggaagaaggactctgcattatgataggcctgggaggattgcgtttttggtcccacgtctactagtagaacggtctcttgggtatataacgcgagataactatagtggtatgagctgttgtgtgtagtggggctatcttggtcttagtagccttctttgaaattggaccaggcccattccctggtttattgtggccgaactcttcagccagggcccccgccagctgcgatggcagtggcggactgctccaactggaacctcacaaacttcctagtcggattgtcttcccctccgtgctcactatttaggagccatacgtattgattatcttcactggcttcctcattaacttctaggcttcataccttcttcaaagtccctgagaacccgtggcaggactttgaggatatcaacacggggactttgacgggcaggcaccacggtgcaagatagacactggacaggacggaggttcactggagatgcaccaagcatcgagccctgctcaagagaaccaaccaaccaagggactaacatcgggacctacttccacacaaccctcacggacaggggaaagccacactctcacactcacaaaaaggagaagaacccaacagggaagaaa

SEQ ID NO: 663535 - DNA, 2346 bp, Homo sapiens
  misc_feature (1892)..(1892): n is a, c, g, or t
  misc_feature (2221)..(2221): n is a, c, g, or t
ggacctaggtagtataggctaggaataaggcatagaagtaggccagcgtaggacgcggagacccagtcatacatagaagagcgacggctataccccacataaccacctaggccctagcgtaggtaggacgaccaccacatagggcatacagccacgtagctagcgcaggggcatcatgacgatggacgacatcgcccataagaaacccatgatgacgcatatacgacaaccacgcataatccgaacgaccacgacaccggaccggcccatggcggccccgataacggcgaaaacgtaatagccttagcaacggtacacctacaacgacgtagggcaacacccaaatactactagcaccttagccaccacccaacgtagccaatactcggtagaataccaacctacaacgtgccccaccggctaactgatataggctacacagtattggagcctcagcgccgtgacaagctcccccaaatacccccaatacctaacaacaccctaccacttagagcgaacctacctaggagccaaacacgaggccgacctatcacctaaccaccggcgcagcacacctaacgggcttcaacaacctaacacaacccaaaccaactaaaccactcacctcaggatgccacgcgaacgtggctaccactgggggcaggctcataaaccgcgtataacccatccaatggcacccaaaacaccgttttttactatctaattttcccttccgatgtaaatactttagcactttgttcccactgctactacgcttcgctccctttcttggctgctaccattatatttctacccttgcctatacctatactggacctatttaaacgtcaggatgccttacccactacctccctaaccttctaactacccatacctatactctatccaactgttcctctcatctctacctccaccattcccctctccacctccacttccatattgcatcccatctcctcttaacctccctccacctccactcatttactctacccctttctcaatctctcctctatctccatcccatccccttcttacctatcaatccaccacttcctcccactatacctcaacactcatccctctttcctatcatatctcacatactcttcacctcactcgcggcaactgccactccaaccgccccacccgcatgactcactccaccttcgctatccactacccccttcaccccccacattaccacccacacacctcgtcccacctccaccacgctcctcacgcccgccgccactactctcctccgccgcccctcactcacactagatctaccaccctgcacaccctcacccctaccaccccacttgccccacccccactctcacccccatccacaaactcacaccctcggcactatctccctatcccctaccacactcactctctcctctgcttccccttctccatcctcccacgcacatctcaccccccacccctacttactcactactcctctactctcctcctcacctccctcactcactaccctaccactaacatctccacacactccacatcactcacgactatctccctcactccccacctaccactcttccacccacactctgcacacctctctcacaccttccactcacaacaccactctcctctatctcatcctcactttaacttctacactctctctaccccatctatcactcactgacctcacacaaccactcccatactcactcaccactacactcactactcacgccctctgcactacaacaccacctactatcggcctcaacactcctctcatctacctccactgcactacctctacacctcactctgtactctactacatcaccacgactacacctccactgcactacctacancaccgacatctaccatcactacacctacgctagccctctatcacataccatcaccacagcccacacctacacacacaacaccactactacatactacacctcaccctacacatccactcatacactcctacccactctcactcctctcactcgacgcacactcctctactcacccactactcacactctacgcccacacacaaccactcatcactctactcacacacactcacactacacttatctcacacacgactacatctctcactcactacttactacacctacgctctctctctctcacatctcactctctcactccgacacancactcacactccctctaccacaatcacactctcactcctactacacactcaccaacactcactactaactcacactccctcacgactcctccacactccctcaccactcaactcactatctctcc

SEQ ID NO: 663536 - DNA, 485 bp, Homo sapiens
gtggcacgctcaggcaagcacagagagtgactcccgtggggccatctactccatcccgatcatggaggacggaggaggtggcatctccacatctcagaagacccagcacgaggcccctcaggacgctccataaaatttgaaacacagtccatggtaccgcgcacggggttctcagaagaggcaacgtcggcattgccggcagaagagcaatctcaacattaatcaacagaaatccaggcagtatgcactcaagcggcggcggtgtgcggatgcggctctgtggtcatggcccagtgagctcatcagctccggtcccgtatcgccattctccccacggagccagcagcccaggagaagtcactcgtcccaggcgctagcaagggcagtcttgcagccgggttgcagtcaccacttcactgatggcgagtcataagcttccaggccgccacgggtccatggaccacctagtgagactctgcccactc

SEQ ID NO: 663537 - DNA, 426 bp, Homo sapiens
ctgcacgagagctcttttatatcacactcgagtccacagccacatattcagaacacactggcaaaactctgggggaaaaagcgcaaggttccctacaagaaggaaagaaagcgcacggcacatatctccaaacacaattgaggtcatttcagggtcattcccaagaatcccccaaggggcgattccaaatccctgaggagagacaagtgcgaacctgtgcaggtctcaatgagagacaactcacttatatgctttgcgtggtataacaccgtggtgggtggatttcctgtgggccacagacaaccgtgtgaccagaatatatgcgtggcgctgaccctctgggcggaacctgggctcttggcttccttcttgggcacccaccacatcttgcacagaccctctgtgtttacacccataacagtttgg

SEQ ID NO: 663538 - DNA, 863 bp, Homo sapiens
  misc_feature (269)..(270): n is a, c, g, or t
ctgcggagtgggtcatgggctgctgagggctgccccaaggtgctaccgggtttgcacgggcgcgcccggctccgtccgcgagtgcgccttcctgacttactgctgggtgcgcggggctgggggtgcgagtaccacccctgaagtctcttcctgggcgacctccggggcctcacttctaggtcctccttagaagagagaggatctagaacttaggacaaaggaagtgcccgttatccgacgagcaagctattccacgctgcgtgagctcnngcttagtctgctagcctcagacgcgtgcgtgcacagtgacgtggccctgtgtactgcagcgaaaaacttgcgggctcagtaaatgcataccactgagagtagttgtgagaacaggaacaaacatcttctgaagagctcggagcagaagcctttttggtcaaccatggaggaggatgaagacggcgagcccgagttcacggagcctgggctgcccctgttaaaagccaggccattgctcagctcagcgtaccacgtgctaagagccatctccatcagaagcctggccagacctggaagaaccaaagagcatcatctctctgacagagagttggtgttcaaatgaacctcagacaggtagtacgtagagctcctgaggccacgagtgattgaccagagagggtgtgtatgaaatcagcctggtgagccacaggtgtatctagggtctgaggtatccgtggcattgttgacgtgaacagaagctggacgtggatattggaacagctgttgtcaagatgttccctggaaacagaggaccggcatcagagagggtggcaccctgtgctgggcaagtaaagaaacgcattgaagagaac

SEQ ID NO: 663539 - DNA, 311 bp, Homo sapiens
  misc_feature (308)..(308): n is a, c, g, or t
  misc_feature (311)..(311): n is a, c, g, or t
cttatagagatgggtgtgcatgttgccaggctgatctcgaactcatgaactcaatgatctgcccactgagctccctcagtgttgggatacaggtgtgagccactgctcctggcctggctagcactttttttttttttttcctagcacttcttaatgacggtttccattgtatctggaacttcattgaaggttttttggaaaaataatataggatatgttgcaggtctattcacggctcccttgttggtaatgaaaatacttgatgtgaatggtgacaaattgggtccagttggagctgcctacgtgtngcn

SEQ ID NO: 663540 - DNA, 301 bp, Homo sapiens
  misc_feature (253)..(253): n is a, c, g, or t
ggtttttctgtgggggccccccccccgggggttggtggccgagagtaaatttttttcccccccgggtgtgggtgggggggtttgtggggcctctccctttttgggggtttttttcccccccccctttgggggggggggtttttgtgtctccccgggaaaattttgttttggggggagtttttttttaaaaaaggggggatttttttttcccccaaccaaggggggggggtaggggggggttttcccttttttncgccccccccttaaccccggggttttaaaggggggttttcccttttta

SEQ ID NO: 663541 - DNA, 261 bp, Homo sapiens
taggaggtgcggtggtagcttttctgtgcctcagtgctcattcacatgaagccacacttcatttgatagtgccaatgtcagctaattgtttgtatgtaagtagcaatggggtacgccgtttggctcaggcaatcatcccaccgtggccttccaaagtgctaggattacaggtgtgagccaccacgcccggccttttggtttttttttttttttgaattggaaaggttacctaccggggtgggccgggtggacctcaacgcc

SEQ ID NO: 663542 - DNA, 315 bp, Homo sapiens
tgcagtggcgctatctcggctcactgaagctctgcctcccgggttcacgccattctcctgcctcagcctcctgagtagctgggattacgggcgcccgccaccgcgcccggctaatttttttgtatttttagtagagacggggtttcacctgtgttggccaggatggtctcgatctcctgaccttgtgatccgcccgcctcggcctcccaaagtgctgggattacaggtgtgagccaccgtgcccggccttcattctttttcttaattttccttcagtatataaaaatatctagcccccgttgttagagagatatt

SEQ ID NO: 663543 - DNA, 266 bp, Homo sapiens
agcggagcggccgccgcctcctcccttccccgcctccgccggacgcatggcctcctccctccggcccaagcacgaactccccctcttcgaaaaatacgccgtcacataaacatggacataagagaagagagagaaacagaagagacggaagagaggagaaggaaggaagagagagaagagagaaagaagggagagaaaagaagatgacagcaccgaaaagaagaaagatagcggaagaaacgagaggaaagaagagaaaaaaaaca

SEQ ID NO: 663544 - DNA, 345 bp, Homo sapiens
gatgtccagctcaaccggccaacaagaggaatgccatgaacaaggtcttctggagagagatggtagagtgcttcaaaaagatttcgagagagctgatgtcgggcggggtgatctctgggtgcaggaaaaatgttcactgcaggtattgacctgatggacatggcttcagacattctgcagccaaaggagatgatgtggccggatcagctggtaactccgctgaacatcatcactcgataccaggagaacttcaacgtcatcgagaggtgccccaagcccgtgattggctgcgtccatgggggctgcaattggcggaggtgtggaccttggttacccgcttgtgac

SEQ ID NO: 663545 - DNA, 372 bp, Homo sapiens
cgatcgaactcgataaaaatgtcatgggtgaggccacgttgagtgcccttgacggtaaagaaaaaggttttgctgtaggtggtcaacacccggatcacccgccgatcgagcatgccaggcaaatctcctttccagggctgcatgatgtcgtccattttgacttccagtgcctctcgctcctcctgtgccggcggcttttccttcaccggagcagcatgaaccgaactgacgaacagcagggccgtgatacacgccaggcaggcgattagcaatcgttgagaagagaaggcattcatggaagacactccgaatggtgcgtcttttcattgtagtcaaactaaaaaagccgtcgacgcggccgcgaatttagta

SEQ ID NO: 663546 - DNA, 271 bp, Homo sapiens
ggcgaaaccgcttgggctattacagtatagaattgtcttctctctgtcaaggtggacaaacatgtcgcctatatttcagcacctgtaacccagagatcacaggtcttccctgagaaacttggtttctttctataaatgtgtgtggttttcagcgctcaactcctgtcttcaaatggtagtaagttctacttctacttctgtcattcagaacattttatgtcaaatgatgtaatgcagaaattcttgtgctattgaaacttctaaaactagg

SEQ ID NO: 663547 - DNA, 295 bp, Homo sapiens
  misc_feature (76)..(76): n is a, c, g, or t
ggatgtagtgaggacaaacctgatggatgtttatttgtgtatgcggggacatttatgttctattgtgcgcaggggngaaacggtatgtttctggtaacattgcgatttggaatgtaagtaatacttaatggtaatttttgttttctctttcacatatggagaatgttgccttataagtatttgagtattagaaattgatcaaatcactaagttagtttaataaattaaaaaatttatgcttcattattatagctatttcctaatagtctctgcatatgtcctcactacatgccat

SEQ ID NO: 663548 - DNA, 780 bp, Homo sapiens
gtcaattccctgccatttgcctctcctgtctcccatcccctgccccagaccaggagccccctgaggctttgccttgcatgctatgtgttcgctcttactcacttggtaattcaaattgtcctgcgaggttcattccccatgaccctttccgccacattggtaagagtagctgcgtgtgctaaaccactctctggaatctctttgtgttagcggtctcgatttgaggacattcatttcttcagcagcccattagacaactgagagcccagggagtgtcctacaggatagtttcatagtgacaggtggcacttggctaatagaatatggctgatattgtcattaactcatttaagtacctttgacatgggtatgtctaataaaactcggacccttcttgtgaaatcaagttaaataacgaccttgtctcggtcacctgtgccccttgtccatgactcgaggcacgtggtaaacaacttgccacagtgctaatgtggcttctctttgagggactattcgagggttagttggtaaaccgttacaaaatttccttttgccttgcccctttcaataccttctgtctcactgtacttcagagaatcatattgcgcaattgccccgtttgtaaaacaccatttgggagaaattcgcgttcccaagaaaagggacatggtccccccagtgattattcttacacaccagcctagcttaccaggggaaagcgccatattcgcccaaggccctacccaattggccaagacaacccacagtgaattgcgcatg

SEQ ID NO: 663549 - DNA, 152 bp, Homo sapiens
atagtcgtgtgtccagctctagtcagagaccgacagctgggagatcaagtcatggtttctgagctgcggaacaagtagtctgagaagctgctcagacactgcgagaggaacagctgccacacagcgtggaagcgggcgcaggcttgtcctca

SEQ ID NO: 663550 - DNA, 379 bp, Homo sapiens
ttatgtagaatctggagatggacttttggggcgctgaggcctatggtggaaatagaaatatcttcacataagaactagacagaagcattccgagatgtttctttgtgaagtgtgaattcatctcacagagttgaattttactttcaattgagcagttttgaaacactctttttgcagaatctgcaagtggacatctggagtgctttgaggtctatggtggataacgaaatatcttcacataataactagacagaagcattctcagaaacttctttgtgatgtgtgcattcaactcacagagttgaacctttctgttgttggagtagctttgaaacactcctttcataaaatctgcaagtggacattgggagcgctttga

SEQ ID NO: 663551 - DNA, 1009 bp, Homo sapiens
cagcttacctaagaacagctaaaagagcacacccgtctatgtagccaaaatagtgggaagattgaataggtagaggcgacgaacctaccgagcctggtgatagctggttgtccaagatagaatcttagttcatctcttaaaatttgcccacagcaatcctctactaatccccttgtaaatttacatctgttagtcctaaaggaggaacagctctttggacactaggaaaaaaccttgtagagagcagtaaaacatttaacacccatagtaggcctataagcagccaccaattaagaaagcgttcaagctcaagacccactacctaaaaaatcccaaagatagtaacgtgaactcctcacacccaattggaccaatctatcagccctatagaagaactaatgttcagtataagtaacatgaagaacattctcctccggcataagcctgcggtcagattaagacactgaatctgacaatataacaggcccaatatctacaatacaaggcaagcaagtcattattaccctcactgtcaaacccaacacaggtcatgctccataacggacataggttagtcacacaagtactaaggaggggacggtcgaacactaaaccacgcgctgtaggagcaaaaaaacattatcactataaaccatcatcgatgtagtacacagcaccctctgcacacgatgtaacgttacgtcggataacttagtaactacgagccctgactgcagtctgtttgggaacaggcccccgttccaggcgtgtcagagactcccgggagcatcggcttaccccatgggaagggacctgttataaccggttcctggactgatacccagggctatcacaactaacgtgaacggaatcaatcaaagaacaataaatgaggaacacaataggaaagtaaacacacattaagctgcgtacgacgtaaacagcattcacttccttgtggacacaaaatggggtacgcggatgtacgtatacgaataatactcggcaa

SEQ ID NO: 663552 - DNA, 156 bp, Homo sapiens
ggacccccggaaatgtgttacaggaccttcctggacgcccgtgggcttctggacgactaaacggaacggactggacttacccgggacaacaacggccttcccggatctaagggaatcaccctgccctgtattattcctgggacttgggctatcaca

SEQ ID NO: 663553 - DNA, 2452 bp, Homo sapiens
  misc_feature (1071)..(1072): n is a, c, g, or t
  misc_feature (1883)..(1883): n is a, c, g, or t
  misc_feature (2046)..(2046): n is a, c, g, or t
  misc_feature (2146)..(2146): n is a, c, g, or t
  misc_feature (2321)..(2321): n is a, c, g, or t
  misc_feature (2328)..(2328): n is a, c, g, or t
  misc_feature (2355)..(2355): n is a, c, g, or t
gtcaccaccccatcgtttgcactgcacgcacgtttcattctccgtacctacgcgcccttttcctacactttcctcttctccccgaccggaggagccgctcttatccgagcggtgcatttctggggcccgaggtcgagcccgaccgcttgacagcgatcgcctgagggaaagcgagaagaggccgcgaccgggacgagcacacacaagcggagtcgccaccgggagagaagtcgactccctagcagcagccgccgccagaagaggccctgacacacacagatacgcccggtacccccaggccccggttcaccaatggcgagcctggatacttgcaaaggtgggctcacggcaacagggagggggcactaatgttcttaccatgggacatacgcgctggtagcacagacacagcagcaggcattggttcacttggtcacaccatcgtcgggcacaacacttcccaacaatttatacacatttcacaggttctgctcctcgcgcacgcgaacgtcgctcaacttgtccaaacggcatttttcagagtggcaaatttggactcttaattacacactggtcatagggatccccacaaatggcattcccacagcaatcaacaagcaacggacaccaggatgaccactatctcagtggagggtgaacacggcacacacggacagaactcgctagccccaggcaccatggacccacgggataccaccacacacggaaccgtgcccaacggcttaacttgggactaacgggtcagaacttcccaaatacattgggcaacgcacctgggccagcaggcatccagacttgacagaccatggttcacatcacggcacgcgacacaccgacgacacatcacacaaccatgggttgggctgaacgatggaaataacggacgcaatgggctgagtgtacacagacatgggaggtcgaaatagccactacggcacgaaggcaactcggttggcgaaacaatccgtcgataccagaccacgggcgagacatgatgggttgcatccttgtttcttctgcctgtgttatcctgttttcgctatacatcanngagcagcctaaataccaagacacgctacacgtagcagagcagaagacagcagagcacacacagtatcagcagaccaatacgcacacagacagaaacgactaaatgaacaagcaggagcgagacacaagcgcgccacaacgctaacagaaaagcagccgaaagaaagagagctaaccgagatgaatacggagaccgagaagtaggagcagctcatgagacgaagaacagacaagcaaacgaagaagcaaaggggaacagcgcaaacgcatgacgagcggcaaagaaagacaagcaagcgagacacgacgactcgcgtgaatcagacgaagacagaataagtcgtacgaaagaaggacaaaggagaaacgatacagacgacacaagccaccagcagaaaagagagcataagcgagcgaggaacacgaaaggcagaaacacgacgaacagcagatagagcaaagcgaagacagaccagcagatgagagcaacacaggacacacaagcgcatgaaggtagcaaccgaacagccaagagagtacacgatgagtcgcgaacgacaggcacacacacacgcacagaagccggaagacgcagcgcaaggacacggatgacagaggagacactacgactcgagcgaagcgcgcagagagcgagagtcgccagcaagacgcgacagcgagagacaagaacgcgacacgacgactgagcgtagagagacagacagagagcagacagcagggacaaggagcgcgacagcgagctaaacagcagcagaacacgagacacggcagcgcaaagataagcagcagancatgacacagcagagcgttaacaggcagcacgactaggtcacgaagcaggagagatacgcgaggaagagagcagagggacagtcggagagtacggagcaatagacagcgcacggagcgacgcgacgagaagcgagcaccagaggagacgcgagagggctgacncgagagatgaagtacatgacgagtaccaagctcagagcaaagcacgtacggaccgatgagacagacgcactagagacagcgagaggatgacgacgcagcngcgaacgacgacgccgtgcacagcgagactgagcgccgtgaaggcgagctacgccatgcgcgcagagaggacgacgatagagacagagacgaggagaagtgaaacgcacgagaggagcgatgaaggcgagagaacagaagtcagcgacgacgagcaggaggggagagcacatgangagatgntcgagcagagacgcgagcgagtcacancgagcactagcgacgagtgtagcagcaacggagaggcgtgagtacgtacgaccaggagtagagcgatacacggaacgaagcaagcacgcagagagct

SEQ ID NO: 663554 - DNA, 154 bp, Homo sapiens
actcatctgccctcgcctaaggaaattacgcttatcctgtcacgaacacatttagcacacatgaaccaccataggccctgttgacatgtttctttgttttggacgatctcataagaactttaggtcttacagcacgaacccctcaaagtctgcc

SEQ ID NO: 663555 - DNA, 543 bp, Homo sapiens
actcatagttgttctagagtatccctgttctcctgctattactgcccaggttggagtagtggctcgacctctgctcattgcaacctccaccttccaggtcaagcgatctcatgcctcagcctcccaagtagcggggattatagacttgcaccaccacactgggctaattttggtattttaagtagagatggggttccgccatgttagccagaggggtctcaaactccgggtctcatgtgatctgcccacctgggcctcccaaagtgcggggataacaggcgtcagccacggcgccgggcctagagatacctttaaggggggttctaaagcctcagaaattatatatcctgaagagaaagataacagtgtaatccatggcataatgagggaaagttaaggcagagtatcttagggttgggttttccattaaaagatcagggtccttacagatttaaagtccatttaaaattttggcatagtaatatatgtacttggttgaaaaaagtctattagcccagaaggcttataatagggatcaagaat

SEQ ID NO: 663556 - DNA, 348 bp, Homo sapiens
tcggtaccggctcctgtggaattgtcatctttaaaagtggctaattttgcaggcacggtggctcagtgctgtatttgcagttctctgggaggtcaaagagggaggatctcttgaggacaggagtttaagaccagcctgagcaacgtagggaggccccatctctaatttttaaaaagtagctgaggctgggtgaggtggctcacacctgtaatcctagcactttgggaggccgaggcgggcagatcactgaggtcaggagtttgagaccagcctgaccaatatgatgaaactccgtctctactaagaatacaaaaattagccaggcatggcggtgggcgcctgtaatcc

SEQ ID NO: 663557 - DNA, 713 bp, Homo sapiens
  misc_feature (233)..(233): n is a, c, g, or t
acccgagggatattttctccgggttccattatcatcgctatccccacggggttcaagtattttagttgctcgcccccctcccgggaagcaatatgaaatgtttggtgccaggctctgtagccctaagattcttcctccttttccccgaggtgggcctgactggcattgtattagcaaactctccactagacatcggactacccacacggtattacgttgtagcccacttcacntatgtcctatcaataggagctggatttgccatcataggagggttcattcactgatttcccctattttcagggtacaccctaggccaaacctacgccaaaatccatttccctatcatattcatcggggtaaatctaactttcttcccccaacactttctcggcctatccggaatgccccggcgttactcgggctaccccgatgcataccccccatgaaacatcctatcatctgtagggtccttcctttctctaacagccggaaaattaataattttcctggttttagaagcccttcgcttcgaagcgaaaagtcctaatagtagaagaaccccccataaacctggagtggctatatggatgccccccccccttccccccctttgaagaacccgtattcataaaatttagaccaaaaaggaaggaatcgaacccccccaagctggtttcaagcccaccccctggcccccatggctttttcca

SEQ ID NO: 663558 - DNA, 345 bp, Homo sapiens
attggtgaatatcaggctctatcatcgtatttgcaggctccggcatggagggatgtactttaaagtcgccttcacctttttgttgtagaagagtatccatcgagattttgttaatccggccttcgtgcgtgggcgggagattctggatttttattccttcgagccgtgagttgcgggagaagggcgactctgtcgggaaaagttttactttcaggtaaggcgaatatcggaggtgggtgccgaggacaaatcgccattaaaataatgacgcaaacaatgtttaatgtcaatagtcaacgttaaacaatcaaatacggttaaattccgtgatggcgggcgggttag

SEQ ID NO: 663559 - DNA, 1649 bp, Homo sapiens
  misc_feature (616)..(616): n is a, c, g, or t
  misc_feature (1315)..(1315): n is a, c, g, or t
tggcacttccgggttaaaaaagccactatcctcagttgagcccgggggtgaaatggtgaaatcctgatctctctggtggcagtaatatatattaagtggggtggggccaggggctggtggaataaactatctattcctccagtaacagtctggcaatctccgagggccccttctaaccacaaagtatgggcttaaagcaagaggcagccagtatggaatgttatggtatatatccaaacaaggaaaggcatagtaagcgaagggtgtcaactaaaatgtggcgctgggtgggcccaagcagtatgggacacacagaatgttatgggcccccgaggcgcacagagagcgcagtgtccgagggctaacgagtggtccttccagtgtaacgtgggggtgtccctatatacaggggcgctatttgcgcgcacccaaatattcttgtggagaaactcccctctgggcctatatgtggtgggactatggcgcaagggctgagcctggggttcctttggaaggtgtaaagagagataatatgcgctaatgtggggggagaggagaagtctggagccgctctgtgtgggacctgtgggctatttgtgggtgacccaggggtgcnccatgtatgggggggaaatatgtgtttagaagtgtctggaaagggggctaatgcgtatgggggggggcccacttggtggggcatctaaaatattgcgctttggggtaacaaccctattcctctataatgagaagggggggcgaccaacagggggtgcggctgagaacccacaaattatttgtcccccttataaagggggccatctgtacaaacgccactgtgggcgggagataaagggaaaggtgtaacccccccaaagggggtgttacacaaaggttgggcccctacacaagggggtaacccaaaggattaataaacccccccaaaaagaaaaatggggatcctgtggcacaacagggacaaatttattggagctttaggagaacgcaggttgggggcccaaccacttagcaacacaaatttctccccttatgttggagcagtggggatcacaacggggcggaaaacaacatcttcgtgtggatgtcggtggccccacaggagtctatatttgtgggaggcgtctatatcgggggggggcccacccacatcgcttgggggacattgggggccaacgccagggagtataacaacccaaaccccgtggggcatgttaaacaacaccaggagaatgtggtgcaccgggtataaatttaacccactatgagaggagctagaaggggctgtgggcgacgacanagcacacagggaatagccacgggggtggccgcgtgtgccacacaaaagggaagcacaccaggagggatgattcgagaaacacacgaggcggcgctgcaggaaaaaacagcaccccgcgggggggtattgtaacacccggcgagcaccagagtgctttacaaaaagaagatgaggggataagagaccgtgcgaccaaaacaaaaaagtcgttgcccccgcgggcgtagtgaagaagacgaagcaatagtgatcaccacgagcaaggtagacaaacgcgccagtgtcgataggagcaacaactgagtcgctaggacgacacatacagccaactggt

SEQ ID NO: 663560 - DNA, 290 bp, Homo sapiens
  misc_feature (17)..(17): n is a, c, g, or t
  misc_feature (24)..(24): n is a, c, g, or t
  misc_feature (41)..(41): n is a, c, g, or t
  misc_feature (182)..(182): n is a, c, g, or t
  misc_feature (245)..(245): n is a, c, g, or t
  misc_feature (270)..(270): n is a, c, g, or t
  misc_feature (272)..(272): n is a, c, g, or t
gggctgcatggaagttnggcacgngacgcaggagcacccangcatgggctgacactggcttcctccacaccctgtgctttgtgtattatttgcctctctatatccactgaggacagatctcctggagagacagtgttgttactcacctgtgaatcttaaaaccttttgagacctggacgaanggaaaagtcatactctaactgtcaaatgctttattgcttacaagcattgtttaggactagaangatagtaccatgcaaacatagtttnanctctatccttgagaaaaa

SEQ ID NO: 663561 - DNA, 993 bp, Homo sapiens
  misc_feature (485)..(485): n is a, c, g, or t
  misc_feature (680)..(680): n is a, c, g, or t
agcgggtgtctcttgttcttgcctggtgtcggtggtatagtaatcagcgacttgtgtagggacagctgacaagtgaagatagacaacaggaaatagcgaaaaatatagagcaccctacccccaacagacagaagccacgatcgagaaatatccagaaagaacgaaaataagaaagagacaaccgagacgagacgtactaatgggaaaataatagttgagtgttaacatactaatttaccctacattggaacgatactaccgttatagtagtggccccagcgggattgaacagatgactaaacgagaatagagaggaacataatgaaaggaaataaacaactgagacaagccaatagaaataagaagaagcaacatatataagaacgatcacaacataacaaagctaaacagaataaacaaaaagcacctaaaggaaatcaaaataaagacaaaagacctcaaataagcgaaatccataaaagagnatcaaaggccataagactcacgcaatacactagaagaaataaagaatagcaaagagatatctaaagaaaaaacatacacagatcaaaagagccaagaaacacagaaatataaaaagatgaatatcaacagacaagaactcatgataggaacctaccgcgaaaaatacctgcacaataaaatagaaactatagagnactaattagcagtatgcaacctagatacacaaacaaacagaagataataaaaacccatgtaacataaaaccgagatcaaatagaccgaagatgtctaatagacctatgaaacgaagaaaaaggcaccaaacaaagataagcacaagtcatattaagaaccatgacaactgatgaccagcgaagaaaaacagaaacgtgaacaataaaaatggagaccgaaaaggaagtcacgataagacatgaaacagcaaataaaaaacgaacaaatagaccaaaccacggattaaataaagaggcatcaactgaggtacag

SEQ ID NO: 663562 - DNA, 250 bp, Homo sapiens
agggtcagacagaatttcattcttctttggatccagggggtgtggtaacttctcaaaaaattcctttaatttaatctgaatcttagtcagtaactggtagggatttcctctatactagtttccaatggtatccaagacgagaaaagagcatctccccgaaggccaggatctcaagagctcgtggaagaagggactcaaagggcatcccgtttccggagaacagcagtatcaggggtaccggagcttcgaa

SEQ ID NO: 663563 - DNA, 569 bp, Homo sapiens
cagaccgattcgaactgtgggtacccagtacatggtccacggtagaggtgccctaatcagtcaagagagtttgagagacgtgagcttatcaccgctgcactatgagcgtaaaaattgccagctcgtagatcaaggaattgcatgccctactggataaggtggctcctgtaaatatgagcagggggaacttcatggggacaacatggtggcaaacctaacatatgttcgtcaatagttcggttggcaataattcaacgtccgccaggcgagaacatattcaggcaccgtcagtcaaacatttctacagagtcacacctgatcccatatatagtagctaagaagtttacgtgcaacatgtgaaccatggggggagcatggacagtgctccaggcacggatagaagacagcacaacctgcaccagtgcatggcgagactaccaagccttttttcgccaccatgactggccagtctgatagccaacgaactaacttatattttgaccacagtaaggaatggatgtgagaatagatcatagagactgtaacggagacgactataggccttggag

SEQ ID NO: 663564 - DNA, 359 bp, Homo sapiens
agaaacctctcttccataaaacaacaagaacacgggcaaaaaatgtcaagactgggccgggcatagaggctcacacctgtaatcccagcacttggaaggccaaggcgggcagatcacaaggtcaggagttcaagaccagcctgggcaacatggcgagactccacctctacaaaaaataaaaaattaactgggcatggtggtgctcacctatagacccagccactccggaggctgagtggggaggatggcttgagcccaggaggtcgaggctgtagtgagctgtgctcacgccactgcactgcagcctgggtggcaaaacaagaccctatctcaaaaacaaacacaacctctcttcactt

SEQ ID NO: 663565 - DNA, 477 bp, Homo sapiens
cggcacgagggtagtggtttcaactaatggtagacaagacactgaagaaagcatcgtcctaggaatggatttctcctctaatgacagtagcacttgtaccatgggcttagttttgcctctctggagcgacacgctaattcatttggatggtgatggtgggttcagtgtatcgacggataacagagttcacatattcaaacctgtatctgtgcaggcaatgtgggttgacagggattcaaggaacaaacactgtgatgtactattggtggaagaatgaactggagcagcctttctggagagtgatttgccaatatgccttatcattttgcatgatctttgtcctagtaactctatttctatggatttactctaagtttgtaaacatggatgtgtgcaaagattttagctctaagaatgtttgtcagtgttctaataatagcaaaaaataaaaaacaaatgattgaaaaatagaaaaaa

SEQ ID NO: 663566 - DNA, 300 bp, Homo sapiens
tgcctacccttgttttggggatcttttgcggtacctcttgtgcggccagtttcggcgcagcctctagagggggtccccggacctgggctttctttgagggatgctctgggattcctgtcgttgccagagggtgcttgagagtcgtgttgtggtgtccacttgtggccatcagggcgctgtacggtgcttggtgtcccgccacctggagccttttgatggtggtggctccagcctcctaccagctagctgtgtagcaatccacctgcaccccggactcaaagctggctgctgcggctggag

SEQ ID NO: 663567 - DNA, 486 bp, Homo sapiens
  misc_feature (139)..(139): n is a, c, g, or t
ttttgctgcgacatcggggcgatcaggagagtggatacatgtctcgaggatgcaagtgacgatgttcagatacgttggaccagagagaggcactgaggaaagtaaaggcttcttcagaacctggtgttgcttggcaggnaggatgctggagcggagaagatcttccggagtaatggggttcagctcttgcaacgtttactggacatgggagagactgacctcatgctggcggctctgcgtacgctggttggcatttgctctgagcatcagtcacggacagtggcaaccctgagcatactgggaactcggcgagtagtctccatcctgggcgtggaaagccaggctgtgtccctggctgcctgccacctgctgcaggttatgtttgatgccctcaaggaaggttgtcaaaaagggtttccgaggcaaagaagggtgcatcatttgtggatccttgcccgggagcttgagggtcctcatcaagaaact

SEQ ID NO: 663568 - DNA, 1116 bp, Homo sapiens
  misc_feature (21)..(21): n is a, c, g, or t
  misc_feature (50)..(50): n is a, c, g, or t
  misc_feature (62)..(62): n is a, c, g, or t
  misc_feature (74)..(74): n is a, c, g, or t
  misc_feature (83)..(83): n is a, c, g, or t
  misc_feature (753)..(753): n is a, c, g, or t
tccaggggaaaataacttttntggaaaccccaccaatggcaaaatcggtnccgggcattaangctccttcttcnttggcaatncgggtctttcttcagtgggtcccatgaatggctttcttctcctccagggtctgggaagcgggccagggccaaactgggagggggtggtcaatggaacttaagggtgcaatcttctccaagagcccggccggtttcggtctggcaccagcaagggactggcgggaggggtggaggcacccggtttctgggttcccaccaaaaaggcctttcagcttggacaaagtcatgggtcccacttcacctataggggcacaagagccacccgagagagggttggaggccctggtcgagatgaggtcatagtcgagggggaggctatggtcctgggatcagttggccgtcctggataaggtagcccgggccaatctttataaattcttctgggggatcccacaggggcggggatggtcagccttttctggcccagggccgggcccacagagaaggctaacacgagcaggatgccatgccccaataacagggcaccttgggcaggcctcggggggtctgggggggcagttcctgggggtgccaacgatgggtgacccctttggtagccttggcccttggtcaccccgattgacgtccgaacaatctcatccgtggcgcaaacactggtgttcaccaggtacctggcgtgcacgagactctcgggggcccaagccaagcntcctcgggcaaagtggccccgttacacctgggatctacaacaaggggggccgtctccggggccaggaaacagggcgcatcggggtgtgggcatgcaccggataatggggagacacccaaggcgggaaagccttcacaaggggtctgggcaccccaacccagcaatctggcgacaccgacaaaggccgccctgaaaaatggccaccactataaaacccgcgggtcctcacggctcgtcaacacaagatcacgcgcggcgcacaggtgctccgccccggcccaccgggggtctagggagcccccacgtgctagcccgacacaatgactctcgcggggtcgcacaccacgcacggtcgacagcaac

SEQ ID NO: 663569 - DNA, 602 bp, Homo sapiens
atatgcagttatttgcatttataatattttgtgaaagttctgtattttcttgttttttttgagacggagtctctgtcacccaggctggagtgcagtggtgcaatctcggctcactgcacactctgcctcctgggttcacaccattctgctgcttcagcctcccgagtggctcggactgcaggcgcctgccaccatgcccggctaatttttgtattttagtagagatggggtttcaccgtgttagccaggatggtctcgaatctcctgaaccttgtgactctgaaccgacataggaaataaaaaagatagaagagaatagcaaggaagaagaaacaaaagaaagaaaaagggaaaaaagaaagaagagaaaaaagaaaaaacggaacggacagcagaaagacaactacaaaggagaataagcaaaacaaagaaaaacatatgaaaaaaaacaaaaagagaaaaaaacaagagaacacggacaaaacagaagaggagaagagaagaggagagaagataaagaacaagaggacaagagtaggagagggacacagaggacaaccacaggagaagaaagcgagtgggaaaaaacgacaagacaagac

SEQ ID NO: 663570 - DNA, 930 bp, Homo sapiens
  misc_feature (35)..(35): n is a, c, g, or t
  misc_feature (131)..(131): n is a, c, g, or t
  misc_feature (134)..(134): n is a, c, g, or t
  misc_feature (138)..(138): n is a, c, g, or t
  misc_feature (149)..(149): n is a, c, g, or t
  misc_feature (158)..(158): n is a, c, g, or t
  misc_feature (196)..(196): n is a, c, g, or t
  misc_feature (304)..(304): n is a, c, g, or t
  misc_feature (317)..(317): n is a, c, g, or t
  misc_feature (459)..(459): n is a, c, g, or t
  misc_feature (480)..(480): n is a, c, g, or t
  misc_feature (494)..(494): n is a, c, g, or t
  misc_feature (511)..(511): n is a, c, g, or t
  misc_feature (520)..(520): n is a, c, g, or t
  misc_feature (527)..(528): n is a, c, g, or t
  misc_feature (532)..(532): n is a, c, g, or t
  misc_feature (546)..(546): n is a, c, g, or t
  misc_feature (552)..(552): n is a, c, g, or t
  misc_feature (568)..(568): n is a, c, g, or t
  misc_feature (582)..(582): n is a, c, g, or t
  misc_feature (593)..(593): n is a, c, g, or t
  misc_feature (611)..(611): n is a, c, g, or t
  misc_feature (639)..(639): n is a, c, g, or t
  misc_feature (677)..(678): n is a, c, g, or t
  misc_feature (761)..(761): n is a, c, g, or t
  misc_feature (826)..(827): n is a, c, g, or t
  misc_feature (835)..(835): n is a, c, g, or t
  misc_feature (842)..(843): n is a, c, g, or t
cccccatggccatgggcacccgcccccactccccnattcgcgcctcttccatctgccggaaaacacctggcgtctaccctgtggagggttcgaaatccaaatcagggctcccaagtgatggaccctccaanaancagncctacagaacnagaatctcnaaaaaatgaccgtgaggggcctcagtgagaccagattntgtcatttggctccaccttcatcttgcagagccagctgttctcagattgccaagaaactagaagcaacttgcacggtgtggccagagcctcagctggatgagaggctnagatgggtggccngcttgtataccagtccctgaactgagctgtttacaggactggggaggctccacccagaaagctatcatttgtactctgctgggagtaactgggaaaaactccttccccgctgctaagtggaaagaggcctcatccggctttnacccaccatccgttgcagaancctccaggagcagnaatcctaagagtgggangcagccaanacccccnnccancaaaacctcccggnagtggnttcaggccctctagtngccatgaccaattngtgtgtgtgtntaatttttgcttcaagtnatgtagcaggacctgccccacgcacacncctacccctctttgaggagctgtgggaagtgtgggttnntctccagaacagaagagaatgatggatattctggctctggggccctctccaccaccactcacagtagccttgctgaagccatnacagatgggagaaggccatgccagccacgtccgccgaggggcgccagcctgaagctgccaggacnngaggttcngacctgnnccccatagctggaggcctgtgtgccagaagcccggattagggttggtgtccatccctggatagctatttgcacgaatcatggacata

SEQ ID NO: 663571 - DNA, 793 bp, Homo sapiens
gacactcgtgtgttgttttgcttcgtgccatcctcatgctgcgccttgtggtgggtgccgtggcccgttccgttggtggccgcgttcctgccatgtgccccttcttgttgtgggacccccccccctttgtgagatcaccgactctcccgtctagtgttgcttcacctgcgcggcggccacgacttcgttcggatcgaaggtgctccgctccgcggtctggtcatagtcccgctaccgctagtggccatcatagttggggcgtcctcgtcccgcgacgttcctcgttgtttcctggctcggtccgctttgacctcctggccgctactaatagattctctccttcttaaaaacgagcgtccctaacaatgatgttcctcacccataagatcggttctgtttgtaagcttttttgcgacccaccctgtagtatattcggcctcgctgtcccctccccgttgtgctccacacatactgggtggataatctctccttcgtggtgagaacaccacgcttcttccttgtgccgaaacactccttctttcctactttcctagacgccctctaactactactcattttttcctctcctagttcccgctctacatgtgtgccaccgcacacccagatgatgtctatctccatcccctcccccttttaccatattaaacccgctcttggacacacacaggacaccactctctcctttttatactaccttatccccctcttgcctccttttcgcttcctacccacgaacatactctacaccggtgtttcctctacaaaacaaaac

SEQ ID NO: 663572 - DNA, 839 bp, Homo sapiens
  misc_feature (397)..(397): n is a, c, g, or t
aggaacaagctccaaggtggtgggtttcaaaacaagaaggcgacggtttcttcggattggaaaaacccggcgtctggagggggcttgaagaatcactggggattgtgggacaaggactgaacaaggtgggggccttttgacgggccttcttgggtttccaggcaaagggcgtgcgcctaacaggcccttggtgtgttgccgtggggccaagcaggggaatcccggctttccccttggcacgggtttattctccttggtggtctgggtttcttgttccccgggggcattggggttcaagggaaatctcaattctggaaaagggcccttggtcaattggccttcggctccactggtttttggtggaacactgagcaaaagtctaattcccgtcatcaanggagaagtgtggcacgtgggcacggcaaatttccccggaagcaatcaaccgtctaaccaaatctgggtgggcaccttcattcccagacagctgtgaaccccaacggttagggcctaactctaagttcttgggaacaatttgcgagagtggaaagatcccagaaatggtctctgtgtcctacatacagcttctctaaggggaggctccggcaatcatggccttccaagaaactttcaatcattggtgtgaagtgggctcaacaaaaacagttaaagaaaacttataattttttgaaccccaaattaagggccgggcctggtatgaaaaaagggggccaaggctaagggattgatgttaaaagcacttatatgtgggagctgatagagggaatggaagaagtggctggtggaaacaaagtgttgggtaggcgggggggggagct

SEQ ID NO: 663573 - DNA, 986 bp, Homo sapiens
  misc_feature (985)..(985): n is a, c, g, or t
gaactcctgagcccacagaatctggcgctgggcgttccgctctccgcgcctgaccgcacctcagaactccggtaggacggggtgggtggcccccggactcaagctctgttccctggggaagagacctggatggtgcgaaccgcgcgtcgtgacccaagcgtcgggccccagcggacatccggagcccgaagcggttccccaggaaggcggcgctcgtagcgcctaactcctccctcccaggcgaatactggagaccgaggacccagggcgtctcacgccattttctccgctggggacccggctgagctcgccaatccacgcctactcgggccccaacccagcagatcacgtccttgagtcagaaactcagggtttaacatttaaggatcgtgggctgtgcgtctaggggagagaggtggtcctcagacgtgctggaacgactgcatgctgatccaattatcccgtgtggaggcttctggtccgaggctccgaacgcgggttccctgtaactcccagaactattcaatgaatgatccaggtcacaggatgataagggggaagatgggaagaaacagacgggagagccgcccagaaagactgcgggacgaaagaaatcgagaggaactgcacggcagtgagcgcctccaaaaagcctggatgaatgaattaaaactatataggccggactgggtggcatcacgccctgtaatcccagcaccttggggaggcaaggcgggtggactacctgaggtcaaggagttcgacccagctggtaacatggtgaacccggtctactacaaatacaaaatagcgggtaggaacagcctgaaaccacctggaagcaggggggacacaggcggagtcgcgcacacggcacaggaaccgcccaaacacaatcccgtgggcaccacgacgagggaacaagcgaggaaaccagcaggaggacaaaaaaaacgggcacgccaatgacgagtaaatacgtcang

SEQ ID NO: 663574 - DNA, 271 bp, Homo sapiens
gagcccttgctctgattgcccagagctagaggagcagtgggcgatgatcctagctcaacgtgcaaccctccaccctcctaaggttcagagcaatttcttctgccctcagccctccgggagtaagtctgggatctacaggtagcagccacagctacggctaaattatgttgtatttgttagtagacaatgggatatgagacggagagagccccgcggtcgcctgtcgctgtgcaggcacacaatagcaggcgccaggccgattctggaagtg

SEQ ID NO: 663575 - DNA, 362 bp, Homo sapiens
  misc_feature (294)..(295): n is a, c, g, or t
gatcgaccctgaatatccttcagtagcggctggatctcctgcgtcaccgatacgccctgctcgccatccttcacatcggcgcgcacggtgatcgccatatcgcgattacggcgccacagcaccggctcctcaagttcgtagcgcacctgtgcacttccgacaacggcaccacggtcgcttgcgggtgtagaggttgatgtccttcaacgtgtcgaggctcaggcgttctccaggcacggcgcgggcgacgatgtcgatcaggtcctcgtgctcgcgcaactgcgacagggtcgnnccattcatcacggtctgggtggccagcgatacgtcagccggcgtgagtcccagcgcgcgggccttgt

SEQ ID NO: 663576 - DNA, 144 bp, Homo sapiens
ctccagtgaggagacaggccatgtctttcaagatgcatgcagctcactgacttgtcatcctcaaagtatccgctacagtgcccacctagaagtttgtccgacgaagccttggcagaaaggcagactatcaattactcatgtact

SEQ ID NO: 663577 - DNA, 658 bp, Homo sapiens
ccgcgagaacaagcaggctggcagaactccatccgccacaatctgtccctcaacaagctgctctcgggaaggtgccgcgccacatactgactgaccctgggcaatggtgcaacatactgtgatgctggaccctgtctgatgctgacagatgtgttcatctggcgtgcaacacgtggcaagcatgctgtgctgccagctccaccacctcgcgggccaatgctggccattcaagcgctggtgctgcgcctcaacctccaccggcctcaccttcatggaccgcgcacggctccactctactaggcccatgtcgcccttcctgtccctgcatacaccccactgcgcaaagaagcacatttgaagttacaacggacaccacgtctggcctaacacaagacaccaccaatgccctaaagactccgtgttgactcagaactcgcgtgtggcaaaaaacaactcccattctccaaccgacaacggcacttgagccggtggacacggctgttcaaacggggagaaaccgatatgacacgaaaccagctcaacggacgacggcgctaagaccgacatcggatgccactgacggacaggaacggtgccctgagacagggacctaaaaccctaaaccacggctccgcaacactgaacagcgggacaacaa

SEQ ID NO: 663578 - DNA, 175 bp, Homo sapiens
tttcgtatgcgtttctgctttgggaccttttcattttgttgttgctaaaagtcacttcttttcatcattgcttcatacgacatgtagttaggacagggaataatcattcaacactccttatgcattacatgatgcaataaaccagtgtaggatatttagactatcaattgttggt

SEQ ID NO: 663579 - DNA, 1529 bp, Homo sapiens
gggtccagcgtaccagccgcggccgcgctcctccgccccgctcctcctcctacctactacctacctcctacctacctctctaggacaccccacgtacccctacactatccagctggcttgcagccaccacagaccccaagctactaccgccgctatactacctgtggacgcgcgtacctacgcaaccaatacctatatgcattacctatacctatacctataccttgctgaccgtatccaacaccacaggacgtccacgcaaccaacacacatcaatcacgagtgaatcgaccaacacacgagagcccacagaagaagaacgacagagaagaccacacgcacacaacagagacaccagaagacaacaaagacacaccaggaacgacaaacacacatagaacaacaaatcaccattgacaagtacccgcgcactgacacgtgacacctgaccagcccggaccaaacacataccgcccgcgacgcgtgcaagacaccccaaagcaccccaccgcccaaagaaagccccctcgcacccaacgcaccacacataggcaccaccacagggccctccccaacgacccatccacaccgcacacccccaaccaacgccaacccccacaagagcacgaaacccaaaacaacggacggcaagacaaaccccacccgacgacacaccacacgcaccgacacaacagacctacccgacaagggacggacctccaaccagtcggcgcgccaccacgcgcacaccgatccaaccccagcccacccacccaaagagaccacaacccccaccgcgcaccaccgcagccagaccgcacagccagcccccgcccgcccgcccactcaccacaacaccacaaacgacggcgcgacccgacgaccaccccacacccccacagcgccccgaaccaaacccacccacaaacaacccaccgcccacagacccacgatccaccggacccgccgcgacgcgagcaaacgcggccaacaccccgcgcccagccccccacgagcgcacccacaccaccgcgccagagccccccgccgcccgcgcccccccaccgcaccaccgccccagccgcacgagcgccacaccacccccacaccccacgcgcccaagcagccgcactacggcccgccaccaccccacgcacccccaggcccacccgcccgcgccccccacaggccccacgcccacccacccgcaccacccccccccgcccccggcagcgccccccgacaccccacccgacgcgcaccccgaccaaccccacgcacgcgggcagccgcgagatcaccccaccccgacccccgccggaagcacccacccccaccgcgcccacgcacccaccacaccggcccgcccccacccccaccacgcgccacgcaccagcaccgcaccgccaccgacacgccgcaccgccacagcggcgcaccagcagcccccccgcacgcgacgctacaaccgcagctggcacagagcagagcgcacccaacccaccagcgagccggacagtaccacgccc

SEQ ID NO: 663580 - DNA, 121 bp, Homo sapiens
cagcacgcccgaggaagcaaacagaaccacaggcagcgaaaggggacgaaacgaggacagcaacgcacgccacacacaagaaaagccgaacaggagacccaggcaacacacatcgggcacc

SEQ ID NO: 663581 - DNA, 193 bp, Homo sapiens
agcgcccgccctttttttggaataaaatttggaaaatggcaatgaaaaatataaaaaaaaaaaaaaaaaaaaaaaaaaaaaaaagggaaatttttaaaaaaaaataattctccccccccccttaaaatttttctcctctcccttccgttgtttttaaattaatttccctcccttttttataaaaaattccccc

SEQ ID NO: 663582 - DNA, 444 bp, Homo sapiens
ttagctacctctacgatgctgtagaaggaaatatcaaagagggacgaacaatcaacctgtccaatgcattaattgtcataatacacttgtatgacctcccattttgactccaggaaaagtgtaatgttggtacgggctcgagaaggaatctgcattctggtaactttgaccagaccttgggaatcctccccctcaatacatttaattaatgaagtgttacagcaaattctaaaaagatctaagagatttgttttcactttaagcgctgtgatcataggcctaattatagtcactgcactggccaccactgctggaatggcgttacatcaatctattcgaacggctcatttagttaacgattggcaagccaattccacccaaatgtggaatactcaacaaggcattgatcaaaaataggctaatcacattactgatttaagacag

SEQ ID NO: 663583 - DNA, 684 bp, Homo sapiens
cgtcgatgtgaatgattggcttgtcaagactgactcctgtaccaactgtacagggaaaccagcccaaaggtgtggagattgaaaacctgggcaagtctgaagtgcctgaatgaccacttggaggccaagaaaccattgtcgcacccccagtcatgtgttacagtagagattgtgcttgtccagaaccatcaggacccatgtaacggtagaggaggtgtgcagagcctaatgagcccgtgcacgaagctttgctaagagctgtgtgtgtgatgagaattgtgagaaggcaggctctgtataagtggcttctgaagaaagaaggaagggataaaaatgggatgcctgtggaacctcataagctgagcctgatgaagcatgacagattcccgtgaatatgtggctctggtccgtagaagatagaagtaatagagacaatagtagaagcaccaaaggcagtgactccttctagaattgctgattccttccaagtcataaaggaagcagtcgccgttgtcaggagtggctatatcaggctcccacatactaaatgacacggaagtgcccgaaaggaacgtgcctggtactgaagtactagagctggcaaagagaagtttacagagccccatgtaatacttcctggtgttcctttaaacacagtgactgggtcctgtcaggatcagaaga

SEQ ID NO: 663584 - DNA, 183 bp, Homo sapiens
tgcactgttgtcataccccccatccacccattccccagtcccaggcaagaatatggatgaatctcaaaaacattatactgaacaaaagatgctggactcaagagtacatactgtatgattccatttatatgaaactccaaagacaactctaatctatatagtgacaaaaggcactcatcagtg

SEQ ID NO: 663585 - DNA, 755 bp, Homo sapiens
  misc_feature (159)..(159): n is a, c, g, or t
  misc_feature (162)..(162): n is a, c, g, or t
  misc_feature (194)..(194): n is a, c, g, or t
  misc_feature (197)..(197): n is a, c, g, or t
  misc_feature (221)..(221): n is a, c, g, or t
  misc_feature (225)..(225): n is a, c, g, or t
  misc_feature (235)..(236): n is a, c, g, or t
  misc_feature (278)..(278): n is a, c, g, or t
  misc_feature (313)..(313): n is a, c, g, or t
gacgaatgcagacatgtggtacccacgtttgtgtgggaggactcatcataagtaacaaccaattctcagtaatttagtacaattcacccactgcattttcaggctaatcagtcaccctgcatataaacacctgtcaagctaaaaaaaaaaaaaaaaggntcngggacactcagacgccctggcaggtgagctgnggngagtacacggaactcagcagcaancccnccagggcacnngctgaacaccctccactgccacacgtcattctgggtcatatnacaagctgctcctagccgtgcattaaaataaaaangatgtgtagtgcacactcatagactccctggaacgacactttcaccagttcccatgagtaacaccatacactgccaccctttgagcatgggaatctgtctagtgcctcagagccagacatgtcaagatcaaacttcagacctaaacacccagacagaccctagggctcactagttttttctgttagcacccttcaaataactacaaccttgcccgatgcacaaggatatcactcagaagcttgactgttgcaagtaaactactaagtagaaaaacactcgaaactctacactcactactccttgactagaaggagaattaaacagtaattcccaagttaaatccgacaacactaccacagatcttttgccacttgagtgggactttaacttctatacccgtacatgtcctcccacacaacgtgggtaccacagttctgaact

SEQ ID NO: 663586 - DNA, 263 bp, Homo sapiens
aaatggaaaaagaactaagttttgatgtcctttttttggaggccctagatccaactgtgcctaaagcctgccctacctccgggctttaaagttttgtgagcccataaagtcccctttttgtttaagataattgaaatgaggttctgttttgattaatatagggtatttgtatttttttattgatttgtaaaaaacctttgtaatttttaattttagactttatgccctatataagtttattaaattagcatggccttccctga

SEQ ID NO: 663587 - DNA, 299 bp, Homo sapiens
  misc_feature (122)..(122): n is a, c, g, or t
agatttggagcggatcttggcgcggatcttggcgcggatcttcgccgcggatcttcgcgcggattcttcggcgcggattctcggcggcgcgacggtctgggcagtgcagtgggagttgctgngcgtcactgtcaacgtacgagtgtctaggcggctcggagacagacctccgtgagcgatggcaagctcgtgatctgatttagtacactacgacggaagcgggctcagatcttctgaccttgggtttagcaggggtgtcagaaaagtacccaggactccggcggcgagggtacgagctc

SEQ ID NO: 663588 - DNA, 416 bp, Homo sapiens
taccaccaattctaaatgccctggaagtgcaatgcatgggagaccacgactggtttttggagtgtgtgcccagcatttgggtgatgagcacagtaaggactattgctatggatggtacagaatggcttgtgtatagagtgccagaaatgtaactggattctggtagcaccaatacaaaattcctgttggtcctgagacttatgggcagaatcatgaatgtcatatggagaacctattgactgaaagaggtcccatcaaaaccaaacaatttgctcccattcatgctgaggctccagagttcatggccactgagtgttgagcaggcacaattctggtgactggtatcacggttgtcgctctgctagctccctatgccctggtggctcttgggcttttggggtgcgcgttgcagatgg

SEQ ID NO: 663589 - DNA, 1927 bp, Homo sapiens
gtacacggagactttctgaacgtgtgatgggattcccgctgaaccacttctgcaagactgactggtgaagctctactacccgacacccgatccggaggacctgcggacggagtgtcaagcactgacccctatcccggacacgcgatgacaccattcgaacgaccatcagatgactgatgtgagtgaggaggcgagatcgttgagcccgaactcagaggtgacgcaggtgtttcgccacgcagacatgatgaatggccgacggcgtcggagaagagcgatgtgaacatggcaccaacggcgaagagagactgacagtagttcaacatgtgacctacagaagagagaaccccaagacccatccagattacaccgaacacctgaccataccttgcgaagactcgaagatgactgggagcactattaaacaggaatattaccaaaagtgagacccatggactttcaaccacagaatatgcacaaacaaaacttgcaaaagggagttggtaccctgacactatattggtctcaccacagacgcaactggcacaagacacaacaccaccactaagaaacaagtagccatagcccgtggaaccttaactacgagcacacaagtgcagaaaaaagctggcgacacagcacacttcagttgcctagtattcggatgcacctcacacttggcgcagcacagcgaggacactaaacgacaggcgcaacacaacacacacagcaatagaacatgcgccacccaaaggcagacaagaccaatcccccacgtgaagagacagcgtaacaacagcatacacaacagacacacaacctagacagagcgagatcacaacacaagcgaaaacacagcccaaaccaacgaaaacgcaacccacaggcacggaacaaacgagagcaaccaccaaaacgcacgaataaaggaacaaccagtacaacgcagaacctggaacaaagaaaaaacataacacaacaatacaatggcgcaaacagcggcgaccaatacacacgagatccacaattccgcacgcacacgaaatataacaatgggcaaccaccacccacacacaagtagaagcacaaacgcaacatccacataacacacaacattaacacccattgccgacaagacatcttcacggaccacatcatcacacaggacataacggcaacacaaacatacaagaaccacccagaccaaaccaacaagcacgggtgacagcagatatacgaacagacgacaagcaaaacaacggccagtaacccacgaacagacacagacaaaccccacaaggacccaacatgacaacaacaaagaacaaaaaagctccagcagcacaaaacccaggaaaacagaaaaaaaaaacaaaagaaagacgaccaacaagaacaacaacaccatgcaacacgtacacaaaccaaaccaaggagaaaaaccaacaggagaaaccacacaaaacaaaccacaaaccaagacacaccgaacacccacacaacagacaaccaagacaaaaacaaaaaaaaaagacacaggacgatacaaacagccaaacgaacgagaacagagacgagaaacgcgaataggagacgggctgacagctacactagagcaacagcaaaaagataaaaagacatgagcgacgacagaaaccacgaacagagaacggatccaagaagcagagaacatacaacatcacagagtgcaacccaagagacaccaccaccaacacagagacacgacaagagcaagccgaaccaacacagacgagaaaacagaccacgcacgaccacaaggaggaggacacacaacagaagacaatacggcacatacacttaacagacgcgcagcagcctatagcacgagacataatcagacacagacagacgaacacagcacacaagcaactggcaagagaaaaac

SEQ ID NO: 663590 - DNA, 393 bp, Homo sapiens
acgcgagaatggccattgagtcgaacttcaggatgatccagtattttaataaagcttatgttgatgattaaagtctgccttgaagtggctggtctcgtcaaggagactaaagtacattcatttctctttctttaaaataaatccaattacagatacttggaacacccagtcctgatttgctcttttattatagtcttctatgtggacactttttagcatagccctgcttttattttatccctgcaggaaagactaggagagggaggacacctgttctttggagcaggtaatagaaagtatcatggatccacatcaagtaaagagaatataggttagaaaaaaaaaaagtcgcccaggtaaatggcttggcaaatgtgtggggaaaatggattt

SEQ ID NO: 663591 - DNA, 623 bp, Homo sapiens
  misc_feature (90)..(90): n is a, c, g, or t
  misc_feature (92)..(92): n is a, c, g, or t
  misc_feature (101)..(101): n is a, c, g, or t
  misc_feature (103)..(103): n is a, c, g, or t
  misc_feature (108)..(108): n is a, c, g, or t
  misc_feature (113)..(113): n is a, c, g, or t
  misc_feature (118)..(118): n is a, c, g, or t
  misc_feature (153)..(153): n is a, c, g, or t
  misc_feature (164)..(164): n is a, c, g, or t
  misc_feature (226)..(226): n is a, c, g, or t
  misc_feature (466)..(466): n is a, c, g, or t
  misc_feature (551)..(551): n is a, c, g, or t
  misc_feature (574)..(574): n is a, c, g, or t
tagattcatactcagagtttgaattctaaatctccatcgagcatcctgactttccaaaagccagccataaatcatatttctcttggaacnangcaggccananatgtncttancagcnacatctcttcccttcagtaatcaaggaaagagaanaattagtttanatgtagaacagaatttcaattaataaaatgtcatcggccaggcgcaatggctcatgtctgtnatcccagcactatgggaggccaagacgggtggattgcctgaggtcaggagttcgagaacagcctggccaacatggtgaaaccctgtctctactaaaaatacaaaaaaaattagttggatgtggtgcatgcctgtaatcccagctactcgggaggctgaggtcagaagatcacctgagcctgggaggtcgaggctgcaatgagccatgattgaaccactgcactctgtctgggtacccagngtgagaccctgtctccaaacaacgattttagagaagatacatgttttatataatcaaatacaacttttcctaataaccacatganaatttcagattttccccattcangtgtagtctgaaaatagcctttttttttcttgactggaaaagccatcga

SEQ ID NO: 663592 - DNA, 180 bp, Homo sapiens
tgctgggattacaggcgtaagccaccaagcccggacatctgaggtcttatttacaactgcaaaatgttaaataagaattctgattcccatccaatatgacattcatttaaattgaactttaataataaatgatgtgcacatatttcgaacacgatagaaaatgaaatctcgccagagttc

SEQ ID NO: 663593 - DNA, 163 bp, Homo sapiens
  misc_feature (137)..(137): n is a, c, g, or t
tgcgaagttaggagcggcttgtttggctccctttcgtgttttccgcggaaatatgtttctgcacatactgcacacaggtgtcctccaggaattcccgcatgttcatacgctgatgtgcggttgtagtgcatatgatngctgctcgcagggtgaagtgtgacca

SEQ ID NO: 663594 - DNA, 183 bp, Homo sapiens
ataaggaaaggttaaaaaaagtaaaaggaactcggcaaattttaccccgcctgtttaccaaaaacatcccctttagcatccccagtattaaaggccccccctgcccagtgacacatgtttaacggccccggtaccctaaccgtgcaaaggtagcataatcccttgttccttaagtaggggcca

SEQ ID NO: 663595 - DNA, 441 bp, Homo sapiens
ggatagcacggtgctatagtgtataataatgtatgtatacttgaaatttacaaagagagtacgtcttaagtattctcaccacaacaaaaaaggtaactatgtgaggtgatgaagatgttaactaacttgattgtggtaatcttgtcacaatgtacacacatgtcaaaataatcaagttgtataccttgaatgtaaacaatttttatttttcgattattcttcaataaagctggggaaagaaaatctcattattgtggtttttgttttgtctttttttttttttaaaaatgcagtctgcctctggtcacccaggcgtggagtgcaggggattgatcaaagctgatgtgcaacctcgtgcctcccaagttcaagccattctcctccctcagcctcccaagcatcgggaactacagatgcccaccacggggctaatctcaaccg

SEQ ID NO: 663596 - DNA, 130 bp, Homo sapiens
taggatacagttttctaggtctctttatatagatctgatactgaaagcaggaaaaattacatatacaaggccacaatccaaaatctggattagtatttagagactgaaaatgatattttcctctatgaaa

SEQ ID NO: 663597 - DNA, 538 bp, Homo sapiens
  misc_feature (9)..(9): n is a, c, g, or t
  misc_feature (118)..(118): n is a, c, g, or t
  misc_feature (146)..(146): n is a, c, g, or t
  misc_feature (165)..(165): n is a, c, g, or t
gagagctanttctgcaccacagcacagtcacatgtgactccttgagtctgcagcactcttatacacactgtattctaattttatcatcctgtatcattctaggtgtcagaacatctgnagtatagatacatttttactaatgatgnccttagccattatatattntgctctgtttccaaactacatagacacaccctgtagttacttatctatgactgtttcaccctctaggtcacaagttacttaaggccagggaccctgtcttattacttcttacctttcatagctataatgcccaattttaaatctaactttatcactataatttcaatttctaatacaacaattgttataatgtcataacaaagaaaacttgccccaacgatattcgtagaatttttatatccttagcatttaccgtaaatgaaaaacatagtaacaaatgcctataatcatataaatgaccttctcagaaaaataatgtttcactttttcctcatatagtgactggtaaaatgtaaaatatgaacaagcaaaa

SEQ ID NO: 663598 - DNA, 212 bp, Homo sapiens
acggcttcaactggaactttaggaggctgagttgggaggatcgcttgaccccaggagttcaggaccagcctgggcaacacagtgagacctcaactctacaaaaagatttaaaattagccaagcatagtggtacgtaccttttgttcccaggtactggttgggcagggtgaggtgaaacggatcacttaggcccaggtagtcgaggcttcagt

SEQ ID NO: 663599 - DNA, 175 bp, Homo sapiens
tgtaggacagcaatctcatcctctgctggtgatgggaacagaatgatggccctcagcagtgtaccaccccaacaaggaggccagcaacaacaaggtccaccacctcctcagtgaaagccacaaggaccaccccaacaggtaggccatccccctcctcctcaaggaggtgcgacgg

SEQ ID NO: 663600 - DNA, 109 bp, Homo sapiens
ccccaataataagaaaatgattattcttggctgaagcgttgaaagaatcatgcactcttcgcgccactatctaatgaaatgacttcccaatgtaatgtatttattacag

SEQ ID NO: 663601 - DNA, 209 bp, Homo sapiens
gactgataaaggcatgaggatgtggcctgcatgctgcctgatcttgcctagaaccagctgcacctgctgttctcttgcttatgcaaactggctgcacctgctattcctttgcttatgccccaacccttggctatcctaactccctgttctcctgcctattactgtattctctacttctaaataaaaataaaacaaaatacaaattaaaa

SEQ ID NO: 663602 - DNA, 438 bp, Homo sapiens
ctaacgcttatacttcctggcactgtagagcccagtctcatcttgtactttacctgccccaaccctaaaatcagccatttctccaaggtgtcctggttccttctgttggagaagagtattggaaaccactatctggtttctaaatgagcttgatgcactcattactgctagggtatcactgcttctaggccctctcaggggatagttaggaagtaatatatatatatactgacccacacatatcttcgtttacttccgtatctgtctgtatataaatataaacatgagtttatactgatatctctgatgctgatccagcaccacagagttcattctagcattctcttccttgcttctttctctgaaagtgagaaatttggctgatttaatgaataatacatgctaattttttcaactctaatatatatatgaagtata

SEQ ID NO: 663603 - DNA, 377 bp, Homo sapiens
  misc_feature (6)..(6): n is a, c, g, or t
  misc_feature (98)..(98): n is a, c, g, or t
  misc_feature (127)..(127): n is a, c, g, or t
  misc_feature (227)..(227): n is a, c, g, or t
  misc_feature (305)..(305): n is a, c, g, or t
  misc_feature (335)..(335): n is a, c, g, or t
  misc_feature (374)..(374): n is a, c, g, or t
tggaantggcgaaaaggtgcatgtcccctggaaggagcatctctaccaccctggaatctgggctgtcccctccagtggccatcttctttgttatctanactgacccaggctggaaagtggcgaatanagtgtgtgcccaaggagccccactcattccaaagccggctgcccctgccagagccatggcggggtcttcgggacgaggccctggaccaggtcagtggganccctggctgcatcttcgtccatgcaagcggcttcattggggtcaacccgccgagagggtgccttgagcatggcccgtncaccttggcccagcggctcatacctcccanaaatctcctagtctaataaaaccttccatctcattcttnaaa

SEQ ID NO: 663604 - DNA, 588 bp, Homo sapiens
atagagcatcatgaaaagcagcagaaatgatgaaccaataaaggacaaaaatggggagtcaaagaatcttgcttcctttgagtttatgacttctgatataagtgcaaaagaagagctagtttggcacccggttaaatcaagcacttctttggactttctggagctaaattacagtttagacaaaaatgctgacacaaccatgaaatggcagacaaaggcatttccaatagttggggagcctcttcagaagcatcacagttgggattggggctctcttttgttggagggatgtactaattctcagcctgtaaatgcagcaggccgatattttaattcaaaggtgccaataacacggaccaaatcaactccttttgaattgatacagcagagagaaaccaaggaggtggacagcaaggaaaacttttcttattgggaatctcaaccacatgattcttgttttgtagagatgccggctcaacaagtaatgcatgtttcttcaacagaactgaattattcactggcatatgactctaacacacgaatacgtactgcctctactgtaacgccccatgactctagtgctcttgg

SEQ ID NO: 663605 - DNA, 611 bp, Homo sapiens
gacagttgttccatggaataagggaagggggagtgtagagcagtagcatgaagcctgagccagatggagagcccaacgcattcaactctcgccaggacatgacttggtcgtcatcggatgacaacacagctgctggtccttctagtgtgggtggcgagttagatatggggaggcatccatgacgaggattgcatgggccatgacatgagcggatctcaagtgtctgcattgaatcgccaagcaccacaacggaaagagccaggccccgaggacaagttgcatgagcagtgtcgaccctggaggaagaatgcctgctgttctaccaacaacagccaggaagcccataaggatgtttccctacctatatagattcaactggaaccactgtgcgagagatggcacactgcctgcaaaccggcatttcataccaggacacctgcactctacgagtgctcccccaacttgcgggccctggatccaggcaggtggaatcagagctggcgcaacatgagcgggtactgaacgtgacccctgtgccaaagaggactgttgagcaatggtggcgaagatcgtcagcacctcctacacctgaaagagcaatggcacaaggc

SEQ ID NO: 663606 - DNA, 422 bp, Homo sapiens
ctcaaagaggaacctgaccatttccactctagacactggttgccagaaactgattgaacatgccgaataccgcaaactacgaactttcaatgagaagcgcatggccacggacgaagctgccgacgctctgggaagaacatggaagggatatgtcgcactaaggcaaggcggcaactacagacgcggtttccgcactaagcatggactgttgacccatggcagcgaacagccgttactgaaatagaggcaaactgtgatacaaccatcgagcactggacacagaatataagaatggctcgtgaatgcactagcaaggctgaaccgaccgaactgaacttgattattgtggacagaagggtattcctggactgactgattctacactgcctcaccgtcttgtacccagacgagtttgcagtctc

SEQ ID NO: 663607 - DNA, 777 bp, Homo sapiens
  misc_feature (650)..(651): n is a, c, g, or t
  misc_feature (777)..(777): n is a, c, g, or t
gtaaaccatagcaaactaaaggagcatgctataacaagatgaatgggctgggcgcagtggctcatacctgtaatcccagcactttgggaggccgaggtgggtggatcgcctggggtcgggagttcaagaccagcctgaccaacatggtgaaatcctgtctctattaaaactgtaaagattggtcgggcctggtggcgggtgcctgtaatcccagctactcgggagggctgaagcaggagaattgctggggcctaggaggcggaggttgcagtgagccaagatcacgccattgcattccagcctgggcaacaagagtgaaactccatctctaaataaataacgtaaatacatagatgaattttctcctaaaccaaatggaacaagcttctgtgtactcacaattggagcagagctacctttggctacacagtgccttacgagcagatttttggaaccaattgtgcacagggtccaggcgtaaacacatggactttcccaggaggaaagattgtggcgcccctagtagtcaacacttggagcgtacaaaacagcgctgcagcatgttggccacagaaaagtttttcttctctttcctttggtgggtcccttctcgtaagctctatgatcgacgtatgtacgtagtcttgtcnnagtgacgcggagacaagcagatcaccgtaggcggtaggagcgagagacaggatgtgggaagagcaggcgcgtgagacagagacgcgaggcaagcagggaagcggcacaaggcagacgagcgcggcn

SEQ ID NO: 663608 - DNA, 98 bp, Homo sapiens
agagaaaaactaggctaggtacgaggcgggggtgaatcggccgaggggagagtacggcagggcagcgctgcgcggggcctggggctgacccgtctgac

SEQ ID NO: 663609 - DNA, 132 bp, Homo sapiens
aaaaaagaaaccaaattaaacggggtttttggggcccaggttttggacaaacaaaaacggccggggatttaaaaaattgttggttttcaaaaaggaaagcagtttttttaaaaccaaccccaaaaaagggga

SEQ ID NO: 663610 - DNA, 2675 bp, Homo sapiens
ggccgccctggcccgcccggccccggggaacctagagtcgcaggcgcgtcttgaaggacggaattcggcgtcggactctgcgccccgcgtagttccggtggcgactgcggcgcatggcggccctgggacatcttgctggggaggcagcggcggccccaggcccgggtactccctgcgcgtcccgcggagcccggcttcccggcccagtttccagcgcccggaatccttccactgtctgtctctgcccagagcaacctacgtgcagtaacgctgactccagagcgcacccgttgggcgatgaaggcggcacagcgtcgaaaaaacaaaagaataagaagaaaacgcggaacagggcctctgtggcaaatggaggcgagaaggcctcagagaaactcgccccagaagaagttcccctaagcgctgaggcccaggcacaacagttggcccaggaattggcttggtgtgtggagcaactggagctgggcctcaagaggcagaaacccaccccgaaacagaaagagcaggctattggagcaatccgaaccctgcgcagcaaaagaacgcccttgccccggaagaggcagctgatgcactccttgtttggagactatagggctcagatggaagccgaatggcgtgaggccctgcgggctctcagagctgctgcttattcagcccaggtgcaacctgtagatggagccaccagaaagaagagccaaagggtctgcaggcctcgctctatatggagagccaaagccactctggacatgcctgatgaagagtttaggttcaatttcttttagcgtctccccgaacctgaaacaatccccctcccttggggtggtgtaggggtttgttttgagtgcagagcctttccaggacttctgttgtcagagaaccctggagttggtctgtccctggctggtccaaggatttgtagctgttgtgaaggtgtgagaccatcagataggcaaaagaccccgttcgttttctgatgaaatgttctctctttcagaagagagagagaggtgcatttagaaaatatgcaataaattgaagtgagtgttcaaagtattgtagaaggaatattgtactcagtctttaggattagattaagtggctgttggtaacaaagattagtggagaagctgtataatcgtacactggttttcacttttgaaaggaatccctgtcaaatggtttagtgcttaatgctgttatgtcatattgccctaatctctatttttgataaaattggataaggagtgaaagagtatgctgaccacctatgttagaggaagtacagaagatgcaggggtgtggtatccctgggtccagtccctcacctggtacctttgtgcatgttgccttcattcctgagcaggtatcatcctcagggaaccagcatggcacctaccaggccaggctctgttcttaggagcaaggagcttcttgcgctaacagttctggcctgagacctggattgagccttggcagacttcttgtctaaatgttggccattcagtctcaggccctctgttccatggaattgggaatctccaggtgacctaatcctcattggtggcttgatgtttgctggtatcttccaaactcagttcccagactagattgatacctggagcccagctgcctactcagcatttccacttgggtgcttcataggcatttcaaacctgatgtgtttaaaacacttgattaggctccggttttcctttggcttctgcttttcagtgaatggcatgactgcctatgtgggtggcaagccacccaggtgccgaggaaagagactgagggcacgagctgttccagtataataaaatatataaaataagaagagttatactagatctagatcatagacatgattatatgtgagtatcattaatcattagtttatagcaattactctttattccaatattataataatcctcactctacaatcataacctaggaaaaaccaggccatacagagataggagccgaggggacatagtgcgaagtggccagaagacaagagtgtgagccttctcttatgcctggacagggccaccagagggcttggtctagcagtaacaccagtgtctgggaagatgcctgttgcaaagtggaccatggtctagcagtagcatcagtgtcaaggaaaaacacccactacttagcagactgggaaaaggagcctccctttccccgggggagtttagagaagactactcctccacctcttgtggagggcctgacatcagtcaggcccgcccgcagttatccagaggcctgtctccctgtgatgctgtgcttcagtggtcacgctcctagtccgctttcatgttccatcctgtatacctggctctgccttttagatagcaggagcaaattagtgaaagtactaaatgtctgatatgcagaaataatggcataagctgtctctctctcttctctctctctctgcctctgctgccaggcagggaagggccccctgtccagtggacacatgacccatgtgaccttacctattattggagatggttcacattccttaccctgcccctttgtcttatatccaataaatatcagtgcagcctggcatttggggccactactggtctccgcgtcttggtggtagtggtcccccaggcccaggtgtcttttctttt

SEQ ID NO: 663611 - DNA, 896 bp, Homo sapiens
caggctgtaccggtcggagagtgtatggatcgactgcggcgcatggcggtgagcggtgtggagaagacgcgcgggtggctgggccttgcattgttggcggctctcggtgaccctcgtgctacccccctttctccaggccctgggacatcttgctggggaggcagcggcggccccaggcccgggtactccctgcgcgtcccgcggagcccggcttcccggcccagtttccagcgcccggaatccttccactgtctgtctctgcccagagcaacctacgtgcagtaacgctgactccagagcgcacccgttgggcgatgaaggcggcacagcgtcgaaaaaacaaaagaataagaagaaaacgcggaacagggcctctgtggcaaatggaggcgagaaggcctcagagaaactcgccccagaagaagttcccctaagcgctgaggcccaggcaagggcgggcttcggtcgggaagggtggaatccacgggtgcgaatccacgggcacgtgtgatctggggtccgcggagttaaggcggggaggggcatgggatggggccggcggctatggttttccagtgccctctcacagccacttccccaaatccatcacaggcacaacagttggcccaggaattggcttggtgtgtggagcaactggagctgggcctcaagaggcagaaacccaccccgaaacagaaagggacccttctgtagagctgggggatgtgaacagtggcactgcctggccttgcaggtgctgggcagagtatggagttggtggggctttgcggcggggtggtacagaggtccgtaatagagggtgtccctaagtccttaatttaattcgcagaagaagcaggcattggaagcaatcgaaacccgggcagaaaagacgc

SEQ ID NO: 663612 - DNA, 289 bp, Homo sapiens
caaagccagagcaggcattttcacatggctggagcaggaagaagagcgagtgagggaggaggttccacacacttttaaacaatcagatctcacaagaactcaggacaggggcaagggggaaatctacctccatgatccaatcacctcccccaggccccacccctaacattggagattacaagatgacatgagatttgggtggggacatatcagccactatagtgggaaaggtgatgaacagaattagttaagataagcagtgctcctttatgatggaagcataagcaac

SEQ ID NO: 663613 - DNA, 473 bp, Homo sapiens
  misc_feature (73)..(73): n is a, c, g, or t
  misc_feature (79)..(79): n is a, c, g, or t
  misc_feature (85)..(85): n is a, c, g, or t
  misc_feature (105)..(105): n is a, c, g, or t
  misc_feature (111)..(111): n is a, c, g, or t
  misc_feature (350)..(350): n is a, c, g, or t
  misc_feature (440)..(440): n is a, c, g, or t
tatgttagaggaagtacagaagatgcaggggtgtggtatccctgggtccagtccctcacctggtaccttttgnatgttnccttcnttcctgagcaggtatcatcntcaggnaaccagcaggctattggagcaatccgaaccctgcgcagcaaaagaacgcccttgccccggaagaggcagctgatgcactccttgtttggagactatagggctcagatggaagccgaatggcgtgaggccctgcgggctctcagagctgctgcttattcagcccaggtgcaacctgtagatggagccaccagaaagaagagccgggtactccctgcgcgtcccgcggagcccggcttccnggcccagtttccagcgcccggaatccttccactgtctgtctctgcccagagcaacctacgtgcagtaacgctgactccagagcgcacccnttgggcgatgaaggcggcacagcgtcgtaaaaa

SEQ ID NO: 663614 - DNA, 548 bp, Homo sapiens
gttctgtatctgtgaaaaaataaatttcttataaaactcggaaaaaaaaaaaaaaaaaaaaaaaaaaaaaaaaaaaaaaaaaaaaaaaaaaaaaaaaaaaaaaaaaaaaaaaaaaaaaaaaaaataaaaaaaaaaaaaaaaaagaaaaaaaaaagcaaaaaaaaaatataaaaaaatagaaaacaataaaaaataatgatgcaaaaaaaaaaatcatcaacaacgtaggggacggattcatagaagtcgtactcgatgtagtcgtcgcgaacccagaacaggacagcgacaataattgcccattccgaatggtgcccgcttggcccaaaccgaatattcgctggtgaaaccgaatgcacgtcccaaagagccatacaatggtacccaacacggcaacaacgtgcgcacgcacaaactgagtaaaaccacaagattacaacaacgaaagagagagagcagtaagtaatgcaggaaagcagacacaaaattgcgttagacgggcacgcctccgaaactcctgaggtgcactaacaacagcacgcaacgac

SEQ ID NO: 663615 - DNA, 3343 bp, Homo sapiens
ggccgccctggcccgcccggccccggggaacctagagtcgcaggcgcgtcttgaaggacggaattcggcgtcggactctgcgccccgcgtagttccggtggcgactgcggcgcatggcggccctgggacatcttgctggggaggcagcggcggccccaggcccgggtactccctgcgcgtcccgcggagcccggcttcccggcccagtttccagcgcccggaatccttccactgtctgtctctgcccagagcaacctacgtgcagtaacgctgactccagagcgcacccgttgggcgatgaaggcggcacagcgtcgaaaaaacaaaagaataagaagaaaacgcggaacagggcctctgtggcaaatggaggcgagaaggcctcagagaaactcgccccagaagaagttcccctaagcgctgaggcccaggcacaacagttggcccaggaattggcttggtgtgtggagcaactggagctgggcctcaagaggcagaaacccaccccgaaacagaaagagcaggctattggagcaatccgaaccctgcgcagcaaaagaacgcccttgccccggaagaggcagctgatgcactccttgtttggagactatagggctcagatggaagccgaatggcgtgaggccctgcgggctctcagagctgctgcttattcagcccaggtgcaacctgtagatggagccaccagaaagaagagccaaagggtctgcaggcctcgctctatatggagagccaaagccactctggacatgcctgatgaagagtttaggttcaatttcttttagcgtctccccgaacctgaaacaatccccctcccttggggtggtgtaggggtttgttttgagtgcagagcctttccaggacttctgttgtcagagaaccctggagttggtctgtccctggctggtccaaggatttgtagctgttgtgaaggtgtgagaccatcagataggcaaaagaccccgttcgttttctgatgaaatgttctctctttcagaagagagagagaggtgcatttagaaaatatgcaataaattgaagtgagtgttcaaagtattgtagaaggaatattgtactcagtctttaggattagattaagtggctgttggtaacaaagattagtggagaagctgtataatcgtacactggttttcacttttgaaaggaatccctgtcaaatggtttagtgcttaatgctgttatgtcatattgccctaatctctatttttgataaaattggataaggagtgaaagagtatgctgaccacctatgttagaggaagtacagaagatgcaggggtgtggtatccctgggtccagtccctcacctggtacctttgtgcatgttgccttcattcctgagcaggtatcatcctcagggaaccagcatggcacctaccaggccaggctctgttcttaggagcaaggagcttcttgcgctaacagttctggcctgagacctggattgagccttggcagacttcttgtctaaatgttggccattcagtctcaggccctctgttccatggaattgggaatctccaggtgacctaatcctcattggtggcttgatgtttgctggtatcttccaaactcagttcccagactagattgatacctggagcccagctgcctactcagcatttccacttgggtgcttcataggcatttcaaacctgatgtgtttaaaacacttgattaggctccggttttcctttggcttctgcttttcagtgaatggcatgactgcctatgtgggtggcaagccacccaggtgccgaggaaagagactgagggcacgagctgttccagtataataaaatatataaaataagaagagttatactagatctagatcatagacatgattatatgtgagtatcattaatcattagtttatagcaattactctttattccaatattataataatcctcactctacaatcataacctaggaaaaaccaggccatacagagataggagccgaggggacatagtgcgaagtggccagaagacaagagtgtgagccttctcttatgcctggacagggccaccagagggcttggtctagcagtaacaccagtgtctgggaagatgcctgttgcaaagtggaccatggtctagcagtagcatcagtgtcaaggaaaaacacccactacttagcagactgggaaaaggagcctccctttccccgggggagtttagagaagactactcctccacctcttgtggagggcctgacatcagtcaggcccgcccgcagttatccagaggcctgtctccctgtgatgctgtgcttcagtggtcacgctcctagtccgctttcatgttccatcctgtatacctggctctgccttttagatagcaggagcaaattagtgaaagtactaaatgtctgatatgcagaaataatggcataagctgtctctctctcttctctctctctctgcctctgctgccaggcagggaagggccccctgtccagtggacacatgacccatgtgaccttacctattattggagatggttcacattccttaccctgcccctttgtcttatatccaataaatatcagtggtggccccgaatgtctggctgcgctgatgtttgctggatgcagagcaaggggggcggggtggggagtgtgagtcatctccggtgattgatggggtcacgcgggtcgcgtttccaccggacggggggcccctccctgtttggcggcccaggtggagagagagaggaggcggcttatgccattgtttctgcatttcggagacttttggtgcttttactgattttgctgctgctgtctggagggcggggccgggtgtacagagtggagcaggagggtgaaatgggggcgtggccgctgaagcacagcatcgcggggagccggttaggcctccggataactgcgggccagcttggctggtgtcgggccttccacaagaggtggaggagcagagtcttctctggactcccgcggggaaggggagactccctttcctggtccgctgggtggcgggtgtttttccttgacactggggctgccgctggaccatggtccacttggcggcgggcgtcttcccggatgctggcgttgccgctggaccaaggagcccttctgctggccctgtccgggcatgacaggggcctcgcactcttgtcttgtggtcacttctcactgtgtctcctcggctcctatctctgtgtggcctggtttttcctgggttgtggttgtggagcgaggattattgtagtgttgggatggagagtggttgctgcagactaatgattgatgatattaatatataatcatatct

SEQ ID NO: 663616 - DNA, 297 bp, Homo sapiens
acaaaggcatccaggccacctctagcccaggctgtggagggcccagtgagaatgtcaggaagctgtctcgtgcagacttgaccgattacctcagcacacatttccagggccccttcgattggtgctggcagcagcttggatcatggagtgtaccaccagcaacttgttagcacctcgccccaaaagcaccttcggttggattcccattggccattttgcacgatgacgcttgtgcccacctcttactccattgccgttttcactgtggcagttgagacccggccaccggtgatgatg

SEQ ID NO: 663617 - DNA, 3360 bp, Homo sapiens
caggctgtaccggtcggagagtgtatggatcgactgcggcgcatggcggtgagcggtgtggagaagacgcgcgggtggctgggccttgcattgttggcggctctcggtgaccctcgtgctacccccctttctccaggccctgggacatcttgctggggaggcagcggcggccccaggcccgggtactccctgcgcgtcccgcggagcccggcttcccggcccagtttccagcgcccggaatccttccactgtctgtctctgcccagagcaacctacgtgcagtaacgctgactccagagcgcacccgttgggcgatgaaggcggcacagcgtcgaaaaaacaaaagaataagaagaaaacgcggaacagggcctctgtggcaaatggaggcgagaaggcctcagagaaactcgccccagaagaagttcccctaagcgctgaggcccaggcacaacagttggcccaggaattggcttggtgtgtggagcaactggagctgggcctcaagaggcagaaacccaccccgaaacagaaagagcaggctattggagcaatccgaaccctgcgcagcaaaagaacgcccttgccccggaagaggcagctgatgcactccttgtttggagactatagggctcagatggaagccgaatggcgtgaggccctgcgggctctcagagctgctgcttattcagcccaggtgcaacctgtagatggagccaccagaaagaagagccaaagggtctgcaggcctcgctctatatggagagccaaagccactctggacatgcctgatgaagagtttaggttcaatttcttttagcgtctccccgaacctgaaacaatccccctcccttggggtggtgtaggggtttgttttgagtgcagagcctttccaggacttctgttgtcagagaaccctggagttggtctgtccctggctggtccaaggatttgtagctgttgtgaaggtgtgagaccatcagataggcaaaagaccccgttcgttttctgatgaaatgttctctctttcagaagagagagagaggtgcatttagaaaatatgcaataaattgaagtgagtgttcaaagtattgtagaaggaatattgtactcagtctttaggattagattaagtggctgttggtaacaaagattagtggagaagctgtataatcgtacactggttttcacttttgaaaggaatccctgtcaaatggtttagtgcttaatgctgttatgtcatattgccctaatctctatttttgataaaattggataaggagtgaaagagtatgctgaccacctatgttagaggaagtacagaagatgcaggggtgtggtatccctgggtccagtccctcacctggtacctttgtgcatgttgccttcattcctgagcaggtatcatcctcagggaaccagcatggcacctaccaggccaggctctgttcttaggagcaaggagcttcttgcgctaacagttctggcctgagacctggattgagccttggcagacttcttgtctaaatgttggccattcagtctcaggccctctgttccatggaattgggaatctccaggtgacctaatcctcattggtggcttgatgtttgctggtatcttccaaactcagttcccagactagattgatacctggagcccagctgcctactcagcatttccacttgggtgcttcataggcatttcaaacctgatgtgtttaaaacacttgattaggctccggttttcctttggcttctgcttttcagtgaatggcatgactgcctatgtgggtggcaagccacccaggtgccgaggaaagagactgagggcacgagctgttccagtataataaaatatataaaataagaagagttatactagatctagatcatagacatgattatatgtgagtatcattaatcattagtttatagcaattactctttattccaatattataataatcctcactctacaatcataacctaggaaaaaccaggccatacagagataggagccgaggggacatagtgcgaagtggccagaagacaagagtgtgagccttctcttatgcctggacagggccaccagagggcttggtctagcagtaacaccagtgtctgggaagatgcctgttgcaaagtggaccatggtctagcagtagcatcagtgtcaaggaaaaacacccactacttagcagactgggaaaaggagcctccctttccccgggggagtttagagaagactactcctccacctcttgtggagggcctgacatcagtcaggcccgcccgcagttatccagaggcctgtctccctgtgatgctgtgcttcagtggtcacgctcctagtccgctttcatgttccatcctgtatacctggctctgccttttagatagcaggagcaaattagtgaaagtactaaatgtctgatatgcagaaataatggcataagctgtctctctctcttctctctctctctgcctctgctgccaggcagggaagggccccctgtccagtggacacatgacccatgtgaccttacctattattggagatggttcacattccttaccctgcccctttgtcttatatccaataaatatcagtggtggccccgaatgtctggctgcgctgatgtttgctggatgcagagcaaggggggcggggtggggagtgtgagtcatctccggtgattgatggggtcacgcgggtcgcgtttccaccggacggggggcccctccctgtttggcggcccaggtggagagagagaggaggcggcttatgccattgtttctgcatttcggagacttttggtgcttttactgattttgctgctgctgtctggagggcggggccgggtgtacagagtggagcaggagggtgaaatgggggcgtggccgctgaagcacagcatcgcggggagccggttaggcctccggataactgcgggccagcttggctggtgtcgggccttccacaagaggtggaggagcagagtcttctctggactcccgcggggaaggggagactccctttcctggtccgctgggtggcgggtgtttttccttgacactggggctgccgctggaccatggtccacttggcggcgggcgtcttcccggatgctggcgttgccgctggaccaaggagcccttctgctggccctgtccgggcatgacaggggcctcgcactcttgtcttgtggtcacttctcactgtgtctcctcggctcctatctctgtgtggcctggtttttcctgggttgtggttgtggagcgaggattattgtagtgttgggatggagagtggttgctgcagactaatgattgatgatattaatatataatcatatct

SEQ ID NO: 663618 - DNA, 1092 bp, Homo sapiens
  misc_feature (1)..(1): n is a, c, g, or t
  misc_feature (680)..(680): n is a, c, g, or t
  misc_feature (806)..(806): n is a, c, g, or t
  misc_feature (939)..(939): n is a, c, g, or t
  misc_feature (943)..(943): n is a, c, g, or t
  misc_feature (985)..(985): n is a, c, g, or t
  misc_feature (989)..(989): n is a, c, g, or t
  misc_feature (1009)..(1009): n is a, c, g, or t
  misc_feature (1077)..(1077): n is a, c, g, or t
  misc_feature (1080)..(1080): n is a, c, g, or t
nttcagaccaacataacggattgggtacatgaaaatacatggaagggttgcagtatccacattctcttacagatagtaagaaaggatacgcctcttcgggggatggagaaggatatgcacatcgcccagacgaacgaccacgccaacagacacacccgagcgagcgcacgcccacactgagcgcctactgaggaaacatcccccgaatgacgccccccaaccaccacaagaccggcgatattttgagacaacaggacactagaccaccggcacggcacgcaccccgccgctactacctcacaacccacgcccaggagaggccagagagcatccgcggaacaccatccggaagacgcagaccaccgccggctcgcagcggtcagagtcagccgatgatacggttaccccgctcgccacccgaacctcagaccccgagacgagcaaagacatcgcgttcacctcacatcaggcacgccgctgctccgcgcacccaaagtacatcggtatcccgagaggtcgaataaaggatcagaatagtacgagtagatgcattcccagccgcacaacccgcactcgcgcgcgacccgacaagccacgaacgcagacactacgaagacgcgagaacctcgacgctgacttaccctgaccgagaacgaataagagaggaggagacgcaaagnacatacaaccgcagaaaccccaggcgaccagcacacgacccgaccgtgacgcgactccgtgcacgagcctggccgagcaagaggatagtagaggcacgtatgcagagaagaagcggcgacagagtnatagtccgaggacacgcgcaccacagcgcggacaggcgagctcgcggacactcgctctccagtaacactatacgcgcagagcattatgaggattatgacgacagacgtgcgtgtacgagacgcatcgtacgantagnactgacatcgcgcgagtcaagtactatatgcaacgcgaccangcancacacgacagcgcgcatgcnccgccatagacacgcagtcgcgcacgacctatgcatcaagtgccagagatacgtacagctatacatangcntatgaaagtatc

SEQ ID NO: 663619 - DNA, 433 bp, Homo sapiens
tgcgtccggttacgtggcttatcttgtatcccagcactttgggagccgaggtaggagaattgcttgaacccaggaggtggaggttgcagtgagccaagatcgcgccattgcattccagcctgggtgaccagagagaaactccggctcaaaaagaaagaaagaaagaaaaacagccgggcacggtggctcatgcttgtaatcccagcactttgggaggccgaggcgggagaatggcgtgaacccgggaagcagagcttgcaatgagccgagatcgcgccactgcactccagcagggctacagagcgagactctgtcccaaaaaaaaaaagaaagaaaagaattttgattctctgaccagtatctctcaggttgctgcttcaagccacggtcaacccacaagccacggtcaacccacaagccacggtcaacccac

SEQ ID NO: 663620 - DNA, 1084 bp, Homo sapiens
ggccgccctggcccgcccggccccggggaacctagagtcgcaggcgcgtcttgaaggacggaattcggcgtcggactctgcgccccgcgtagttccggtggcgactgcggcgcatggcggccctgggacatcttgctggggaggcagcggcggccccaggcccgggtactccctgcgcgtcccgcggagcccggcttcccggcccagtttccagcgcccggaatccttccactgtctgtctctgcccagagcaacctacgtgcagtaacgctgactccagagcgcacccgttgggcgatgaaggcggcacagcgtcgaaaaaacaaaagaataagaagaaaacgcggaacagggcctctgtggcaaatggaggcgagaaggcctcagagaaactcgccccagaagaagttcccctaagcgctgaggcccaggcacaacagttggcccaggaattggcttggtgtgtggagcaactggagctgggcctcaagaggcagaaacccaccccgaaacagaaagagcaggctattggagcaatccgaaccctgcgcagcaaaagaacgcccttgccccggaagaggcagctgatgcactccttgtttggagactatagggctcagatggaagccgaatggcgtgaggccctgcgggctctcagagctgctgcttattcagcccaggtgcaacctgtagatggagccaccagaaagaagagccaaagggtctgcaggcctcgctctatatggagagccaaagccactctggacatgcctgatgaagagtttaggttcaatttcttttagcgtctccccgaacctgaaacaatccccctcccttggggtggtgtaggggtttgttttgagtgcagagcctttccaggacttctgttgtcagagaaccctggagttggtctgtccctggctggtccaaggatttgtagctgttgtgaaggtgtgagaccatcagataggcaaaagaccccgttcgttttctgatgaaatgttctctctttcagaagagagagagaggtgcatttagaaaatatgcaataaattgaagtgagtgttcaaagtattgtagaagg

SEQ ID NO: 663621 - DNA, 319 bp, Homo sapiens
  misc_feature (76)..(76): n is a, c, g, or t
  misc_feature (80)..(80): n is a, c, g, or t
cttcccgcatctaaagaagtccaggtcttactcctagaggccacatgcaagagaactgaggcatcccagctgacanccancacgcgcgggggggcgtgtgagtgaactttcctagaatacgaccctccagctcccatcaatcaagactgaagatgatatagccctggacagtgcggcttgactgcagcctcatgagacacccagagtcagaccacccagctaagctgctcctggatttctgagcggggagaaactatgatacaataaatatttgttgcaagccactaaaaaaaaaaataaaatgggctcgttggcctca

SEQ ID NO: 663622 - DNA, 2597 bp, Homo sapiens
gcggaccgaaactcgcgcggtgacatggtgagccatggccagggtacaaagtgatcctccatcttaaagaagatcagacagagtacctagaagagaggcgtaggggtttgttttgagtgcagagcctttccaggacttctgttgtcagagaaccctggagttggtctgtccctggctggtccaaggatttgtagctgttgtgaaggtgtgagaccatcagataggcaaaagaccccgttcgttttctgatgaaatgttctctctttcagaagagagagagaggtgcatttagaaaatatgcaataaattgaagtgagtgttcaaagtattgtagaaggaatattgtactcagtctttaggattagattaagtggctgttggtaacaaagattagtggagaagctgtataatcgtacactggttttcacttttgaaaggaatccctgtcaaatggtttagtgcttaatgctgttatgtcatattgccctaatctctatttttgataaaattggataaggagtgaaagagtatgctgaccacctatgttagaggaagtacagaagatgcaggggtgtggtatccctgggtccagtccctcacctggtacctttgtgcatgttgccttcattcctgagcaggtatcatcctcagggaaccagcatggcacctaccaggccaggctctgttcttaggagcaaggagcttcttgcgctaacagttctggcctgagacctggattgagccttggcagacttcttgtctaaatgttggccattcagtctcaggccctctgttccatggaattgggaatctccaggtgacctaatcctcattggtggcttgatgtttgctggtatcttccaaactcagttcccagactagattgatacctggagcccagctgcctactcagcatttccacttgggtgcttcataggcatttcaaacctgatgtgtttaaaacacttgattaggctccggttttcctttggcttctgcttttcagtgaatggcatgactgcctatgtgggtggcaagccacccaggtgccgaggaaagagactgagggcacgagctgttccagtataataaaatatataaaataagaagagttatactagatctagatcatagacatgattatatgtgagtatcattaatcattagtttatagcaattactctttattccaatattataataatcctcactctacaatcataacctaggaaaaaccaggccatacagagataggagccgaggggacatagtgcgaagtggccagaagacaagagtgtgagccttctcttatgcctggacagggccaccagagggcttggtctagcagtaacaccagtgtctgggaagatgcctgttgcaaagtggaccatggtctagcagtagcatcagtgtcaaggaaaaacacccactacttagcagactgggaaaaggagcctccctttccccgggggagtttagagaagactactcctccacctcttgtggagggcctgacatcagtcaggcccgcccgcagttatccagaggcctgtctccctgtgatgctgtgcttcagtggtcacgctcctagtccgctttcatgttccatcctgtatacctggctctgccttttagatagcaggagcaaattagtgaaagtactaaatgtctgatatgcagaaataatggcataagctgtctctctctcttctctctctctctgcctctgctgccaggcagggaagggccccctgtccagtggacacatgacccatgtgaccttacctattattggagatggttcacattccttaccctgcccctttgtcttatatccaataaatatcagtggtggccccgaatgtctggctgcgctgatgtttgctggatgcagagcaaggggggcggggtggggagtgtgagtcatctccggtgattgatggggtcacgcgggtcgcgtttccaccggacggggggcccctccctgtttggcggcccaggtggagagagagaggaggcggcttatgccattgtttctgcatttcggagacttttggtgcttttactgattttgctgctgctgtctggagggcggggccgggtgtacagagtggagcaggagggtgaaatgggggcgtggccgctgaagcacagcatcgcggggagccggttaggcctccggataactgcgggccagcttggctggtgtcgggccttccacaagaggtggaggagcagagtcttctctggactcccgcggggaaggggagactccctttcctggtccgctgggtggcgggtgtttttccttgacactggggctgccgctggaccatggtccacttggcggcgggcgtcttcccggatgctggcgttgccgctggaccaaggagcccttctgctggccctgtccgggcatgacaggggcctcgcactcttgtcttgtggtcacttctcactgtgtctcctcggctcctatctctgtgtggcctggtttttcctgggttgtggttgtggagcgaggattattgtagtgttgggatggagagtggttgctgcagactaatgattgatgatattaatatataatcatatct

SEQ ID NO: 663623 - DNA, 805 bp, Homo sapiens
atctcaatttgaattgtatctcccagaattcccacgtattgtgggagggcaccagagggaggtaattgaatcatgggggccggtctttcccatgctattctcgtggtggtgaataagtctcactagatctgacgggtttatcaggggtttccgcttttgcttcttcctcatttttctcttgccccttgccacgcaagaagtgccttttgcctcccaccataattctgaggcctccccaaccatgtggaactgtaagtccaattaaacctctttttcttcccagtctcaggtatgtctttatcagcagtgtgaaaacggactaatacacatggtaattccatgtttaactttttgaggaacagccaaactgttctccacagtggctgcaccattttacattcctgccagccgctcatgaagcttccaatttttccatatctttgccaagatttattattgtctgtctttttgattgtagcctttctagtgggtgtggagtggtatttcattgtggtttgatttgcatttccctagtaattaacggtattgataatcactttcatgaacttatttgccacttgtatgttttctttggataaatgtcttttccggtcctttgcctattttaaaatggtaccatttgtctttttatcgaattataataatatttatgtattctggatactagatccttattatatatgttatttgcaaaaattttctctcatctgtgttggtctttcactttttgacagtgtctttaataaccaaagttttatttcaaagaaaaaaaaaagaggaagaa

SEQ ID NO: 663624 - DNA, 1140 bp, Homo sapiens
caggctgtaccggtcggagagtgtatggatcgactgcggcgcatggcggtgagcggtgtggagaagacgcgcgggtggctgggccttgcattgttggcggctctcggtgaccctcgtgctacccccctttctccaggccctgggacatcttgctggggaggcagcggcggccccaggcccgggtactccctgcgcgtcccgcggagcccggcttcccggcccagtttccagcgcccggaatccttccactgtctgtctctgcccagagcaacctacgtgcagtaacgctgactccagagcgcacccgttgggcgatgaaggcggcacagcgtcgaaaaaacaaaagaataagaagaaaacgcggaacagggcctctgtggcaaatggaggcgagaaggcctcagagaaactcgccccagaagaagttcccctaagcgctgaggcccaggcaagggcgggcttcggtcgggaagggtggaatccacgggcacaacagttggcccaggaattggcttggtgtgtggagcaactggagctgggcctcaagaggcagaaacccaccccgaaacagaaagagcaggctattggagcaatccgaaccctgcgcagcaaaagaacgcccttgccccggaagaggcagctgatgcactccttgtttggagactatagggctcagatggaagccgaatggcgtgaggccctgcgggctctcagagctgctgcttattcagcccaggtgcaacctgtagatggagccaccagaaagaagagccaaagggtctgcaggcctcgctctatatggagagccaaagccactctggacatgcctgatgaagagtttaggttcaatttcttttagcgtctccccgaacctgaaacaatccccctcccttggggtggtgtaggggtttgttttgagtgcagagcctttccaggacttctgttgtcagagaaccctggagttggtctgtccctggctggtccaaggatttgtagctgttgtgaaggtgtgagaccatcagataggcaaaagaccccgttcgttttctgatgaaatgttctctctttcagaagagagagagaggtgcatttagaaaatatgcaataaattgaagtgagtgttcaaagtattgtagaagg

SEQ ID NO: 663625 - DNA, 1160 bp, Homo sapiens
ggccgccctggcccgcccggccccggggaacctagagtcgcaggcgcgtcttgaaggacggaattcggcgtcggactctgcgccccgcgtagttccggtggcgactgcggcgcatggcggccctgggacatcttgctggggaggcagcggcggccccaggcccgggtactccctgcgcgtcccgcggagcccggcttcccggcccagtttccagcgcccggaatccttccactgtctgtctctgcccagagcaacctacgtgcagtaacgctgactccagagcgcacccgttgggcgatgaaggcggcacagcgtcgaaaaaacaaaagaataagaagaaaacgcggaacagggcctctgtggcaaatggaggcgagaaggcctcagagaaactcgccccagaagaagttcccctaagcgctgaggcccaggcacaacagttggcccaggaattggcttggtgtgtggagcaactggagctgggcctcaagaggcagaaacccaccccgaaacagaaagagcaggctattggagcaatccgaaccctgcgcagcaaaagaacgcccttgccccggaagaggcagctgatgcactccttgtttggagactatagggctcagatggaagccgaatggcgtgaggccctgcgggctctcagagctgctgcttattcagcccaggtgcaacctgtagatggagccaccagaaagaagagccaaagggtctgcaggcctcgctctatatggagagccaaagccactctggacatgcctgatgaagagtttaggttcaatttcttttagcgtctccccgaacctgaaacaatccccctcccttggggtggtgtaggggtttgttttgagtgcagagcctttccaggacttctgttgtcagagaaccctggagttggtctgtccctggctggtccaaggatttgtagctgttgtgaaggtgtgagaccatcagataggcaaaagaccccgttcgttttctgatgaaatgttctctctttcagaagagagagagaggtgcatttagaaaatatgcaataaattgaagtgagtgttcaaagtattgtagaagggaagataaagagaaaaaaaggggggggggcaaaaatcccgggggccaatttagcgacgttttgtaagggcccttgg

SEQ ID NO: 663626 - DNA, 1823 bp, Homo sapiens
ggccgccctggcccgcccggccccggggaacctagagtcgcaggcgcgtcttgaaggacggaattcggcgtcggactctgcgccccgcgtagttccggtggcgactgcggcgcatggcggccctgggacatcttgctggggaggcagcggcggccccaggcccgggtactccctgcgcgtcccgcggagcccggcttcccggcccagtttccagcgcccggaatccttccactgtctgtctctgcccagagcaacctacgtgcagtaacgctgactccagagcgcacccgttgggcgatgaaggcggcacagcgtcgaaaaaacaaaagaataagaagaaaacgcggaacagggcctctgtggcaaatggaggcgagaaggcctcagagaaactcgccccagaagaagttcccctaagcgctgaggcccaggcacaacagttggcccaggaattggcttggtgtgtggagcaactggagctgggcctcaagaggcagaaacccaccccgaaacagaaagagcaggctattggagcaatccgaaccctgcgcagcaaaagaacgcccttgccccggaagaggcagctgatgcactccttgtttggagactatagggctcagatggaagccgaatggcgtgaggccctgcgggctctcagagctgctgcttattcagcccaggtgcaacctgtagatggagccaccagaaagaagagccaaagggtctgcaggcctcgctctatatggagagccaaagccactctggacatgcctgatgaagagtttaggttcaatttcttttagcgtctccccgaacctgaaacaatccccctcccttggggtggtgtaggggtttgttttgagtgcagagcctttccaggacttctgttgtcagagaaccctggagttggtctgtccctggctggtccaaggatttgtagctgttgtgaaggtgtgagaccatcagataggcaccccctgtccagtggacacatgacccatgtgaccttacctattattggagatggttcacattccttaccctgcccctttgtcttatatccaataaatatcagtggtggccccgaatgtctggctgcgctgatgtttgctggatgcagagcaaggggggcggggtggggagtgtgagtcatctccggtgattgatggggtcacgcgggtcgcgtttccaccggacggggggcccctccctgtttggcggcccaggtggagagagagaggaggcggcttatgccattgtttctgcatttcggagacttttggtgcttttactgattttgctgctgctgtctggagggcggggccgggtgtacagagtggagcaggagggtgaaatgggggcgtggccgctgaagcacagcatcgcggggagccggttaggcctccggataactgcgggccagcttggctggtgtcgggccttccacaagaggtggaggagcagagtcttctctggactcccgcggggaaggggagactccctttcctggtccgctgggtggcgggtgtttttccttgacactggggctgccgctggaccatggtccacttggcggcgggcgtcttcccggatgctggcgttgccgctggaccaaggagcccttctgctggccctgtccgggcatgacaggggcctcgcactcttgtcttgtggtcacttctcactgtgtctcctcggctcctatctctgtgtggcctggtttttcctgggttgtggttgtggagcgaggattattgtagtgttgggatggagagtggttgctgcagactaatgattgatgatattaatatataatcatatct

SEQ ID NO: 663627 - DNA, 1030 bp, Homo sapiens
cggaggcgccgtcctcccgggtccgccggtcccgtgagctcccgtgggccgcagtattggcgtcacagtggttgatagatcaaacccatggacgttggttctgtggtacaaatggagtacaggactcagtcgtcacggcgctgagtgagagaagccttatttccaagatggagaagaagcggagaaagaaatgagaagcctctcttcaggctgaaccacaaacaggccatgggattgaacttttactgtatgtcgggcaagacgtgctacgatggcgtgatcagctaatgttgcagcttttagctgaaacaacaaattcacctgttctaactccacagacagacacagcagtgtgcatcttgcaatatatgcaaatgtttactgagtcatattcgcgttgtgacccatgaagcttgtcaaccatctggcctgcttctgcctcgctggctccttgctctgtgcggaaagcaaaccatcttggtgcgacagaactgtgcacacacaaggcacaatcctttgttgccacacgaggcccccatggcccctgtgtgcgtgtggtccccacccttgcactttttcgcaacggctgggacacttcctcgattcaaacaagccttggtgcgacattatcgcacatcatcattcggtggcgctttccaccatggcgaataccttttaccagcgctaaaagcctaagcaaacagttccactttagtttgctcaaacgttggccccatggacacggagcaggcaggcaaagggactaacgccaccaacattcggcgacggcacatgcgacttacccccgtcccgaaacacgcaaacgtcgccacgtccccgcgcgactggaccctacaccccccttaggccgggaagtccacccgggacgggcgcggaactccccacggcaactacgacaacagcgcaacgaccagccgacgcaacaaagccgggagcggccggcctcgacgccgccgcggacacagacaatccagtgcccgacgagcgagttccgacccaacggggggtc

SEQ ID NO: 663628 - DNA, 132 bp, Homo sapiens
aggacctccgctgccaatggcacactgtgcttggttgagttcacaaatctgttgtaacctgtagcttcctgtactttctggctctctctactgtaaggtttgttctacagatctgaaagcatggctaggcgg

SEQ ID NO: 663629 - DNA, 173 bp, Homo sapiens
atcctagatatagtgtccatatcagagtggacgttcctcagatgtcactgccatgggcaagagcatttccaaagtatagtagtgtcccagattatacacgaagatctgtttgatacacgaattgactaagaatactgtctgtcttaagaaaaacatgacttctttgccttcca

SEQ ID NO: 663630 - DNA, 395 bp, Homo sapiens
gagacagggtttggttttgccacccaggctggagtgcagtggtgcgatctcagctcactgcactgcaacctctacctcctgggctgaagcaatcctcccacctcagcctcctaagtagccgttgcatgccaccatatcaggctactctttgtattttttgtagagacagggtctcgccatgttgcccaggctggtctcgaactcctgagctcaagcaatctgcctgcctcggcctcccaaagtgctgggattacaggaatgagccaccatgcctagccagcttttacttaattttaaattgtggggatcccactcaaccaaaaaagaatagcattgatagcaccttcaaatgttctagtcgttttcctgtaccattagatctagatagcgagttc

SEQ ID NO: 663631 - DNA, 191 bp, Homo sapiens
  misc_feature (14)..(14): n is a, c, g, or t
atcactgagcaggnactcacggctcatgagctgagatgctgccactgcactccagcctggacaaccggagtgagttcctgtaacaacaacaaacccaaaagaataaatagaaaattggaattgtttatatctgtttaagaagttgaatctgggctgggcacagtggcccacgcctgtaatcccagcacttt

SEQ ID NO: 663632 - DNA, 731 bp, Homo sapiens
  misc_feature (7)..(7): n is a, c, g, or t
atcgatntccattggtaggaagcggcgcacatggggtgggaccccggaaattcggccataatggccgggaagtcagggccggccgcaaccggcgtcagggcggttggctctggaaagttaaggctgggtggcctttgggaagccagggaaagggactttaatcggggtaactacggggggcacagggccaggttcggccacaagttccgggagttggagtttcaaccgaccggaaggtaaaaatatgccaccaccagcatttccaggatggaggccaggaccagaaaggaggctaaggtccataaaaccgggagggaggacctgaagagattaattgccgccggtgaaattcccaaagaggatgatgcatgggggcctcctcctgaccgaggggcccgccagaagctggaaatcgcaattgaagataaccacatttctttaacatcataaaaaatgggttccttaatggaggcaaatcattccagggttccaaaaggctaacaagtatttaataacctggacaagaactcaaagggttgggccttaagcctaatgggatcacatttaaggattaacccaatctagactggaaatgggggcgtcattggcggtgggcgggatgtagacttggccatttcacctaatctcatgtcacttacacatcaacggccgggcttaataacgatttgcctgcgctctgaccctcactcaattaaccgctcagactccct

SEQ ID NO: 663633 - DNA, 1002 bp, Homo sapiens
ctcaacgacggcagccagtgctgctggggtcgtgagtggcatggtggactccatcacccaggccatcaaccagctagatgaaggaccaatgggtgaaccagaaggttccttcgtggattaccaaaccaactatggtgcggacagccaaggacattgcagtgactgttcaggagatggttaccaagtcaaacaccaggccagaggagctgggccctcttgctaacctagcatgagcagttgacgtatggcctgtctgggccatcggaaggccaagcctgctagacggtggctgctgaaaatgaagagataggttccccatatcaaacaccgggtacaggagctgggccatggctgtgccgtgtctggtcaccaaggctaggcgcctgggagtgcagccccgagtgatgcctacaccaagaaggagctcatagagtgtgcccggagagatctctgagaaaggtctcccacgtcctggcgtgcggctccaggctggggaatcagtgggcacccaggcctgcatcacagtagccatcgctgatgtctggtatcatttgctgacctcgtacagacaacatcatgtgcgcagctgtggcacgctcaatcgtgagggtactgaaactttcgctgaccaccgggaggggattctgaaactgcgaaggtgctggtggaggagaccaggtctggttgcacacgcagtgtggagccaggagacagttggcgccggcgccccatgctccgggagaaccaataccgggcgcgcggatgtggcaagccgggttggccagccgggacgcgaggaaccggaaaccagggggcatagctaaggaagaaaaggtaccaagccggcgaccaccaaggctgacgcgcaccgcaactgcgaaaccacggtggcaaaaaacgcccgaagaccaggcaccgcaaaacggaaaagagcaggacggaagaaacaaaggaggggtaaacgacaacaaaaacaagcacagagaaaaaaaaaaaagcaag

SEQ ID NO: 663634 - DNA, 410 bp, Homo sapiens
  misc_feature (4)..(4): n is a, c, g, or t
  misc_feature (206)..(206): n is a, c, g, or t
  misc_feature (213)..(213): n is a, c, g, or t
  misc_feature (368)..(368): n is a, c, g, or t
  misc_feature (370)..(370): n is a, c, g, or t
gctncttaaactttcattttgtcccattgttaccctggttcttctgagcgcccagcttacccaccgagctcctttcggtcatcctcaggtttcctttgatgatgcgtcctccacttccacatgctctagctactggggtcttcatagccccacgctgggcaccagaaatgttggggtgatcaggcccaacaccaggccatgggggntacaaancccagcaggatcaaaggaatgagaaaagacaagttaagagtgtataaagtaggtccaggggcccagcgctagattgggggccgtgaaggccccaagctctgggatctcacactatttattggtgatcaaacaaagaagcaggtggtgaggacatnanggtaaacaggttagggcgttgggatttgggggtagaaagt

SEQ ID NO: 663635 - DNA, 124 bp, Homo sapiens
gtggggaatgaggatgataggcaaagcagtgtgagaaatgctacgtaggtggtgggaagcggaaagcagcatgagtcggtcaacgccgcaagtttcggcgtgatgggtacgggagctcgaatac

SEQ ID NO: 663636 - DNA, 427 bp, Homo sapiens
  misc_feature (97)..(97): n is a, c, g, or t
gtgattttaagggaggagacaacccttcatactgtcttatgcccaatttctgcctccaaagaaagaagtaaaatctaaaaggcagaaatgaaatccncaagcagacagcctggccccacatcctgggcctggtagttaaagattgacccatgacctaatcggttatgttatctatagattacagacattgtatagaaaagtaccatgaaaatccctgtcctgtcctgttccattctaattaccggtgcaggcagccccgagtcacgtacccgctgtttgctccatcgatcacgaccctctcatgcggacccccttagagttgtgagcccttaaagggacaggaattgctcactcggggagctcggtttttggagacatgagtcttgctgaagctcctggctgaataaagccctttcttctttaaaaa

SEQ ID NO: 663637 - DNA, 131 bp, Homo sapiens
gtgggtggcagtgaatacttatcactcatattctccttcagagcaacatcagaatcgcctgagaactgcaatgaacaatctgaccactgtgaagcaggcctctggagataggacaggcctctggagttggg

SEQ ID NO: 663638 - DNA, 1959 bp, Homo sapiens
agaaaaaatgtgctgcgttctgaaaaataactccttagcttggtctgattgttttcagaccttaaaatataaacttgtttcacaagctttaatccatgtggatttttttttcttagagaaccacaaaacataaaaggagcaagtcggactgaatacctgtttccatagtgcccacagggtattcctcacattttctccatagaagatgctttttcccaaggctagaacgacctccaccatgatgaatttgctttttaggtcttaattatttcacttctttttagaaacttaggaagaagtggataatcctgaggtcacacaatctgtcctcccagaaatgaacaaaagtcatcaccttttctgcttgctacacaggcaacgattcccccatcagctgcccggaccctttggcctggcttggtgtgcaggcctgtctgtttgcttaaagtcagtgggttctggtgcagggagtgagaagtgggggaagtgaaagggaaagcatccgtgagaaagcggccacggttttccctccttgtgtgcccatggggcaccagctcatggtctttttcagtcatcccagtttgtacagacttagcttctgaactctaagaatgccaaagggaccgacgagactccccatcacagcgagctctgtccttacatgtatttgatgtgcatcagcggaggagaacactggcttggccctgctccgctgagtgtctgtgaaatacctctactttccctcccatatccagaacaaaatgatacttgacatccttccacaaaagtcagcctaaagaagttatggtatcatatgttaaactaagctttcaaaaaccttagtgaaatagcaagtgactgctttcaagcagcagtcgacatgtaaatgaaggtgttcttagaattcgcattttgccagctcagcgcacctccacaacgaatgaaatgctccgtatgatttgcacaaatgacatagacctccccaaaagttaactggctctccttcctcacacagttcatcataacccaaccccccacccccgggtcatgaaaatcacagaacttataaacacattgaaccctagatctcaggcttcctgacctaccgccagtggccccttgctggccaccctatagggtcctccttccctggcagccccccatgtgggagaaatacctgattctcccaatctgcagtgggagagctttgctgaattccatcccaaagtcaaacatgggcaagaggtgaggatttcacttttaccctcaagtccgatttgtctgtgattttaaactaactgtgtatgtattgatgtttggaagattgtttgaattttaaagtgataatagtacttaatgttatccagtattgttcatcgagacctgaagccgagtaacatccacttcaccgatggctacgagatcaaggaggacatcggggtgggctcctactcagtgtgcaagcgatgtgtgcataaagccacagacaccgagtatgccgtgaagatcattgataagagcaagagagacccctcggaagagattgagatcctcctgcggtacggccagcacccgaacatcatcaccctcaaggatgtctatgatgatggcaagtttgtgtacctggtaatggagctgatgcgtggtggggagctcctggaccgcatcctccggcagagatacttctcggagcgcgaagccagtgacgccctgtgcaccatcaccaagaccatggactacctccattcccagggggttgttcatcgagacctgtttagaggattcagctttgtggcctcaagcctgatccaggagccctcacagcaagatctgcacaaagtcccagttcacccaatcctgctttgtaattcatgtttgagatgggtggccactgtacagatatttattacgctttccagactttctgaatagatttttttgaataaacatggttttatg

SEQ ID NO: 663639 - DNA, 389 bp, Homo sapiens
gtttttatttaaaacaagtatccatcatatctgtattacctacccaaagggtcctgttgttgatagatggttatttttgaaaattataagggaaactagtctaataggaccttttcttcaacaaaaaaggcagatcccccaagacgtttctcaggtaatgatcccgtgaatccggttcttagcattgaggcctaccctcatcaagccagcacatcctgcctgctgtcagctggtgggttattcttcagtaccctatcccatagccggaccttattccgtttacacagtttgtactttcagaattttcaaatagtaattgtcatttagactttacagtctgggaaataaagactagggttgtttcttaagtagctcagttatataaagtt

SEQ ID NO: 663640 - DNA, 986 bp, Homo sapiens
cgaatgcctcctttgacgtagagggcatccaggaccgtgtactttacgtattgaaagctctatgacaagattgacccagagaagctttcagtaaattctacattttatgaaagacctgggcttagacagatttggaccaagtgcgagattatcactggccactggcaagacgaacttctgggctttgaacattcctgatactagactgctgaaaagcttaactgtgtccacaacgaaacttgtacgcacttacacttgcagactacagaacggatgtactatgacataacagtatcagacccctctcggctttgcctgagacgaggactcagactgatagtgaccgccaatgctctggcagttgaggcaccacatgtcttggccattctttgcctgacctcatgacagcagtgcattctgcatgcgactttgtatttaccacttcgtactgtgtcatcactccttattggaaaaagtaaaaaatcctagtagagacgacccatgggacagaatgagagaaaacaatgaagaatgcaggcaacagatcgtgacacacggtagatgagaaccaaccaatcatacataaggagagacagaaggagatagagtgagaaagaacaaagacgacaggtatggatatcaacagaaggcgtgggagaggccacgagcgcaagggagaccgggcccatgacagagaggaggagacagaggggggacggcaggtgcacggaagagcggggccgcttgcgagcgctcggaggggagggtacggaactgctgtaagcgctcacgatctggattgtggatgggcgcttgctgtctcgcgagctgcatggtggatatctcggtccgtgggggtgggacagggttggggcgaacgagatcacaggatggggggcgtaaagtaaacgtggatatagcgtaaggaggatgttgggcagccgtgcccgttgtttagtgtggtgtggcgggtgcagtctcgctga

SEQ ID NO: 663641 - DNA, 246 bp, Homo sapiens
tttttttgccccccttggtgtggaaaagggcccgggtttcccctttttttcctttttttcccccgaccggggctggggggccccccttttttcccggagggggtgggcccccccaggggggggggttttcccaaaaaaaaaaatttccaaaaggggccccccccccccccctttggggccttgggggggccccccttggggggttttttttttttttttttttatttttagcccccccccccttta

SEQ ID NO: 663642 - DNA, 1276 bp, Homo sapiens
  misc_feature (1260)..(1260): n is a, c, g, or t
aaggaggcgcggtggggccgccgccaagaaaggtgcgcacagggggaaagaggagcggaggtggttcacagccccgggggcgcaaagccggtgcgccgcgtagagggaaggtgggccaaggggaaaggagcgcttatcgggagaagaccggcgtgtggtaagagaggtagggccaggttgccgcgtgcggaggcgtagcgcggcttgacaggccaaggaaaaggggccacccttgccaggccggggggggaaggccagcgaggtggaagcaggggccctggcaagaaagccagtggagaaagggagggcaagggtcgcttcggggtagcgggtgcgtgagaaccagccagaggagccgcgaaagccgttaccggagccacaggagtgtggatgggactgggaacccgtggtaaagagaggcgcagaaagggggaagggaagtcaggaagtccttgcgtggtgtgccgctggaagcgcggatgagaggtgggagagaggcgaggcgcagagagaagctggggggcagataggaggagcaaaggtgtgcaggtgagaaaagggctgtgtgtgccaggcgtggagtgtgtgcagcgagcgcgtagagagtgagaaggtgggagatagtcggagcgggtttcataggtgttgcgagagtaggtaagttgcgtagtaaatttgttagagagcagggtagtgtgtgcgtaaggtgcagggcgcaaaaggggagtggaggagagcagtgtagtgggagagttatgttcagagatagagaagctgagagagtgggttgtgcagtcgtggtgcccagggcgtgagagaagtaagagtgctggtgcgttagaatggagaccagtgcacggagagcagtcgtaagagcagtaggaggagagtggaagtgcgaaagccagctgatatagttgcagtagctctgggggaaagggaatgtgatagagagttgcgttggaagcaaaaaaagcgccagtggaggaaaggagggctagagtgaagcaggttgctgttaagagaagaaagaaaaagaagtgttctgaaagaagtggaagtgatccgttgaaaaaaagtgctgaaagtgataaaataatagtgggaaaaagcatcaaattgcttgaccaatctaggctcttcaagcattctatgcacagtgctcgtagccaggttagtggtggtccaagctcgatggggcattcacaagcttagagctagtcagactttagaggaaacagtactgctggagcacccttntactgctggggacaga

SEQ ID NO: 663643 - DNA, 439 bp, Homo sapiens
  misc_feature (330)..(330): n is a, c, g, or t
tcactcctcccgccccccgcccagatctgagagggaccgaaaacacacccccgactcgggcagccagggccgaaactgtcaagaggagaaaaggtaaagcggaaggagggtggccataaacagatttttttgccccttcttaaaaggacactgccgctttaaaagtttctttcccgggcccccactccccgcatctccgtattttgggggagcgtatttaattgaggcaacgcagctttcctccagtgtttgcagaaaaatcaaagccaggggggtgagcccgccggctgtcaaccttcccgccgcctcccccgccccactctgctcccncaagccgagaacgggctgcaaaagtttgcaacatttctggggggcggaggggggaggggaggggggtcctccgggctcggggcgccgccgcaggctcgcgcgcggccgc

SEQ ID NO: 663644 - DNA, 101 bp, Homo sapiens
  misc_feature (86)..(86): n is a, c, g, or t
gtgttgactctcacttttccagcacgggcagtgaacatggactttacctccaagcatgcggcctgctacttccagtgtagtcaggnaaccccccccgcacg

SEQ ID NO: 663645 - DNA, 1047 bp, Homo sapiens
cgttccaagtccctggcgagatgcatttcctgagctgaagaaggacccagacatggtgaaggaggatcattaatgaagaagaggtgcagtattctcaagactctcagcagagggcgtcgcatcctggacaggcaaattcagagcctgggagaaagtaagacattcccggagaaactgcttggctcctctatgacacctatgggtttccagtggatctgactggactgatctgctgaagagaagggcctggtggtagaccatggatggctctcgcacgaggcagaggacactggcccagctgaaatcacagggcaagggcgcagctggtggggcaagagcctcatccatgctggcaccattctaccgctatcgaagagctccggcgccccggggtctgccacgtcccagatgccttcccccaaagtaaaatttaccatgttggactccagtggtcgctatgtatctgacgaaacaacagttgggccacccgcgcgatggctcatgcgcccgcggacaaacagactgtccgaggaccgacggtgtcccacacggccacgcacgtcgctcgacgctggcgctgcccacaggaacctcgccctactggccagcaccaaagggagcggccagaatctatgaacgcacggctacacccggcgaagcgggcatgacagcaccgaacagctcacacaacaggtccacagcgcaccaccgcccaccggcccgcacgagccgcaggcccacccctcgaacccatatacggcgaccgaaacggcggaacagcacgccggaaactgagacgcccgaaccacgccccacaccgggaaccacacagacacatgtgcgaacccgcacacacgcatgggaccgcacaaccgccagagacagaccgacccaaaacacgccagcccgccaccaacaacgcgacgaccaccaccccacaccacctccacatcaccgcacgaacgcacaagccccaacagaccagcaacagcgccacgccccccaacaaccagaacacaaacacagaacacaacacgaggaacagcc

SEQ ID NO: 663646 - DNA, 346 bp, Homo sapiens
  misc_feature (17)..(17): n is a, c, g, or t
acgctcacactgcttancttaaatggctaaagagctgctgctcctccggaggtacatttcaccagccctggtagacggtgcggcagatgcccagtgcatcagacccaggcagctccagacaggccagccatgtatgaccagtgtcctgcctcgcctgtgcttgtcattctgggagctgatttgatttgtgtattactttatttcatttcacacaatcatatgtgctcacgaactgttttcaaaagcttcatgcatcttcaatcacttttttcaaggatgctcaactctggtttggctaggcccccaagtcactctctccttctcttgtccctgccatttgaatggc

SEQ ID NO: 663647 - DNA, 721 bp, Homo sapiens
ggctgcaagtgagctctccttttgagacagtccagatcagattgtcaccagcgataggccacattccagttagaactcaattggtctcccaaatttgcagacaccaagcgtgatttaaaagctgagctttttatcagaaagcttttctctgatgttcttaagtgttatgtgactgcgttgaacttatcaaacaacgtgctacatgtttagaatcccagatactcctgaattttaggatacgaactaattctgattgtgtcgtgcccaagtaccctggtcttgtgttctaatgtatagggaccgaatgccacattgctttttatatttcgtttctttgttgtgaactgcttgccagaaaccgaaaagtagctttgttttcctcttgtattgtgctactttgcagtatttgtgtgtgtggtcttttatttccttaatttgaaagggacagcactgtgtagtgtttataaactaaatgaagataagactattacttcttgtataaacattcatgctgagaacaactcaaagcagtagccacatggtgctggctcctttgcagcacaaacctggtcattttgatgaccgtacaacaggaagacttgaaaaatcacgtggattcatattaccaccgctctcatttcatggagtcgttctgatcaaaaaagctcacgtcgtatttcttcttttcctttctctgttctagaaatacggcgttggtacc

SEQ ID NO: 663648 - DNA, 897 bp, Homo sapiens
  misc_feature (892)..(893): n is a, c, g, or t
ggcagtccaaccctagccaataggggagagacacaaaagtagggactagctgcattaggaataagaaccctttcccctctcttatccagtatgctcttgccattgctccatccgcaagactcacccttctatagaagtaaatttgccttgctggagtgttaacttgttgctggagtgctaactcttcttgtgtgtcatcaaaaagttatttccaacatgaagctgcacccttggtggagggaacatctgacgaagttcaatgttggggaaagcaatatctggaaagattgaacagtcagcaggagaaacacctaggaaaattacaaggcctgtgaaagaaacatctgagaaatttgcatggccacaagaaagaccttcaaagaccacacaggaggaaaaagaaacatctgtaaagactgaatgagtggcaggagtaacatctaataaaattgaagtttggaagaaggaacatctaagatgatcacatgtcctacaaaaaaaagtacaaaagcaagtacaaatgacagggcggaatctgtaccaaggctggggtgcagtggccaatcatggtcactgcagctcaaatctggggtcagcagactcctgtgtcagctccagtagctgggacccggcaagcagaactcgaagttgtagagaacagagtcagatgtggtgcatcagatgtttccactttttcattacatcagatgggtggcggcgctcactagggaaccacactcttttcaccggttgaaggaaggcgggggacaaactccaagggcgcggtcaagggcggagctctcacacacacggcgggcggacacaagtgattctgtacgccttctccatctctcatgtcttatatctctatcctcaattcgtagcacacggnnaatt

SEQ ID NO: 663649 - DNA, 480 bp, Homo sapiens
cttgagagtggggtcagggataaaagactacatattgggtccagtgtacctgctccagtgatgggtgctctaaaatctcaaaattcaccactaaagaatgtatccatgtaaccaaaaaccacctgtacccccaaaactattgaaatcttaaaatagtaataattaacaaagtaaaacaagatcacaccctggaacaattggaggattgcttgctgccctgcatcttaaggcgtattctagcagcaaagcctgtgatgcactgacttggggcaagtaatccctcattctgagggcaaagggagaagatgttcctcgcgcagggaaatgaagtcttttcttattctccttgcttgagcctaaccacgtatgttcgtccagtgtagaatacatggcgcctttttgtcctttttggtattggtggaattaaagtactttttccatatctttccacttttccttagagaacttaaataaagttca

SEQ ID NO: 663650 - DNA, 149 bp, Homo sapiens
gccccaagcatgtagccaattttttttattgggaatatgccaattccattcttttcccttatggtctatagaactggggttttcttttttctatccaagagggatccagcgaacttttttaggttaaatccgaataaaagaactttact

SEQ ID NO: 663651 - DNA, 772 bp, Homo sapiens
ttacggacgaggacgcacaacctgacgtcatgctcctttctctctccccggacagaatgagcttcaccactacgctccaccttctccaccaactaccggtccctggagctctgtccaggcgcccagcataacgagacgacccggaccggtcagacagcgcggccagcgtccatatgcaggcgctgggggctcatggttcccggatctccgatgatcccgactccaccagactttcaggggcggcatggggtccgggggcctggccacgggatagccgggggatctggcagcgaatgggaggcatccagaacgagaaggagaccatgcaacgcctgaacgaccgcctggaccatctataccctggacaagagtgaggagcactggagaccgagaaccggaggctaggagagcaaaatccgggcagcacttgaggagcaagaagggaccccaggtcagagcactggcgccataacttcaagatcatcgaggacctgagggctcagctctatcgcacaatactgtggccaatgcccgcatcgtcctgccagcttgaccaatgcccgtctagctgctgatgacttatagcgtccagtcattgcagacagagctggccatgcgccagtctgtggagaacgacatccatggggctccggacaggtctttgctgaccacccaatatcacacgcactgcagctgggagacagagatcgatgctctccaaggaaggacctgctcttctgaacacgaaccacagcgcacgtacacgcctcca

SEQ ID NO: 663652 - DNA, 100 bp, Homo sapiens
ctgttttaggacatagatatttgtctgctgtgacactgcctttggttccgtaaattcccacaaggtaagacttggcaggcattaaattttatagtttggg

SEQ ID NO: 663653 - DNA, 311 bp, Homo sapiens
gctctgttgcccaggctagaatgcagtggcacgatctcagttcgctgcagccttgacctcttgggctcaagtgatcttcctgcctcagcctcttgagtagctgagactataggcatgctcactacacgtggctaattttttattttttgttgagatagggtctcactatattgcccaggctggtctcagactcctgggctgaagcagtcctcccaccttggcctcccaaagtgctgggattataggtgtgaggcaccacttctggtctcaaactcctttttaaaaaaagtctcccaggcccatctcttaca

SEQ ID NO: 663654 - DNA, 243 bp, Homo sapiens
gtcactctagaggatcgttaattgagggcgggtggggaacacagcgcccccatctatcctactctaccagacttgcaggcttattacttgtgggacacgagagcgtcagtaggcaccctcagattcactaccagacaatgtaatccccgtgacggctttgatatatttgccgcgaggataagaatgtccttggataagaaaggcaactactgggatcctatgaggatacctcaggctgtctga

SEQ ID NO: 663655 - DNA, 849 bp, Homo sapiens
  misc_feature (496)..(496): n is a, c, g, or t
gagttcgagaccaccctggcaaatatggtgaaaccccatctctactaaaaatacaacaaagttagccgggcgtggtggcaggcgtctgtaatcccagctgcttgggaggctgaggcaggagaatcacttgaaccctggaggtggcggttgcagtgagcacagatcatgccactgcactccagcctgggcaacaaaacgagacttcgtctcaaaaaaaaaaaaaaaacattagaatttgggattccttgggtcgggttctcccaaatttctttggaggggtccatgtggtcaactggctttcagctttggtttgggcaacccccgtgcccgaagttcgcatataggctgttcttcaccctgttttccaaggcttgaggaacagaaagtagcctcgtgtttggaggaggtggaagttaagtatacatttattttttacggtgactgtgtccagggaccactttttacaaaaggcctggttcccttcatggtttctggnaaacggaaagttctattcaatatggtctccccttggaatatagaatagttttttaaatacgggcttatttggaaaaacttctgagtttattcaattgtttgccaataccttccaaagtaggtaatatacagagacgtgtggtgatcagatggttagaaaaatttcttgggatattcaccattcgaaaattcctttattagtgaatgtcttgggactttaatctaaccaaaagttgcacatttattctgtgtgcattttcatattggtgtcacaggtttgtgcaacattaaatacttagtttgggttagaaaacacaagaaccacaagataaatagagaagaaaaaaaaacggc

SEQ ID NO: 663656 - DNA, 216 bp, Homo sapiens
ccaacaagcacaacatctgctcccacaacgagcacaacttctgcccctacaaccagcacaacctccactccacagaccaccacatcctctgcccctacaagcagcacaacctacggctcctaccacctagcacaatctactgcccctcacaaccatgcacaatctactgccccttacaacccagcacaggtggactcctctagacgtcgaccctgc

SEQ ID NO: 663657 - DNA, 565 bp, Homo sapiens
ggattgcgaccattcctcagaattctagatttctctcaactacgagcctggagtactcgggtacttgagtacagtggctcaccccagtctcctggttatatgaacttcttcacctcagcattacattcattaccgacagattacctaggaccagtacgatttggggtaatcaacaaataaacatcttgcgaaactggtatccttagtacactctggaagtgtgtatttacctagacatttcaacacatcacttgtcttccccagggaaggtcctgaactacacagctgaaaacctctgtaagtgggccttagaaaaccaggagacgctctttcggtggctgcggccacacggaggcaagagtctcctgctgaataacgagctgaagcaaaggcacagcgctgtttctgttcataccttttaatcccctggacgaaagtcatcctttaaatagacgagatcaccgaagtgagcttggagtacaaacaactgtcatggggaccaggtggtggagcgtctccttcagcacctgcggagggtggatgctccagtgctggagtcctggcc

SEQ ID NO: 663658 - DNA, 142 bp, Homo sapiens
tatgaagaaccgggtctgtcacgagtcaattataagagtttgtacagatgatgactgcaaagtgaaggcccccgggcagctggcgatgcccgtactcttgatctctctcttctcgcgcgcgcactctctcttcaacactccc

SEQ ID NO: 663659 - DNA, 1125 bp, Homo sapiens
ttttaaatcttgtttttgtgtagccgttcatgttcgatgtttgataccaagatatgtttcttacctatcatgactgcgatggatattgtctatctggataagtggggtccgtaggtgctggtgatctcgtacgcgtctttatagtgtgctttttcgtccactgctagggcagggtatatagtacgtgttctttctgtaataccgcacccttgtaactactctttagcgtgagccctagtcggtgaacatggccgaggagtcgaagtcactgtgcgtgtcgccaatgtgtaatgacatggtactactctactctcccctggtgtggaatggtaccagccacccccaaggccttgtccacaagtggattgaagtccacgacggatggggcccttcctgctgaatccgattatcaggtcctggctccggaatcatcttgcaagaccaagtcacaggagtcattcgttagatttgccccgacgaatcgattgcaaggattgtgcccatcctcgagaattccacgagtgcatatttcagcgctagatctggtcgtgcctccctgagggcgtaccatgtcgcgcttagtgaatggccccgcattctgtagatctccaatgcgcacaagggtgcacatgcctgcccgcgcacgcatgcggcttggtgccactagcgggtgtatcacacccagccctgcctggcctagctgcttctgcaccgagatatttgagagagtgtggctcggggacgatacagcctcatactagtgatctctccgcgcctgatgacacaactagcctgcctgtggtcagcgacccaagcgttatcatgcctggtcaagaagcgagggccattgggccaggttccgctgatcgtgggcatcttgctggtagtttcgatggactcctggtccttgcatctctgatatataggacgcagactctatgaagcaagacttctctcgtaccccagttgccacatagcagcagtcactggctgcgtctacccggcatcttctgctcgtgtcccattggtgagaatgagccccgtcctcagtgggcagcaggttctgagtactctcatatgatgctgcgattttcctggagttgacatacacaccgagtatttccc

SEQ ID NO: 663660 - DNA, 262 bp, Homo sapiens
gctttcatttgagtgagagtaaaaggggatctaagaataaagtaaaaataaaagagactcagtagcatcttagttctgagacccagagaccatttaggaggctactgtaatgtcaggcagaataacaaagcagaaggtggctgggggtgaccctggagtcactggatggtgaagaaggggtggagttctgatcacaggacaaccagagagagactctcagtgagtcaattaaattttgcctaaacttagttttccccactac

SEQ ID NO: 663661 - DNA, 351 bp, Homo sapiens
gatgtataactgtatcacttacaagttcatcttttctttacataatagatgagttccaaagaactactatgtagaaatatttttctaagtattttataacattttaatgtgcaatgaaaagtgcttattttaaaaaggattacttggtgctgttctcatgatagtaagtgagctctcttgagatctttttgtttaaaagtgtgtggcgcctccactctctctctcttgcccctcctcctaccacatgacagtgcttgttcccgctcgccttctgccttgattgtaggtttcctgcagcctccccagaggccgagccgatgccagtatcatgcttcccatacagcctgcaga

SEQ ID NO: 663662 - DNA, 123 bp, Homo sapiens
ggtgaagaaaaatgtgtgagatcatggattttttagacagttctaccgtcatccggcaccggtaaggctgcacttcggtgcgccgcgtccccgcttacaaattgtactggccctgcagtaata

SEQ ID NO: 663663 - DNA, 346 bp, Homo sapiens
ttagcgtcacagtatagctacatgagctgagcggctgaaatctgacgacacggcgttatactgtgcgagagaaacgggtccacaactatagatcgggcagttattgtcttgactcactgaggccaggcaaccctggtcaccgtctcctacagcatccccgcaccagccccaaggtcttccctgctgagcctctgcagcacccagccagatgggaacgtggtcatcgcctgcctggtccagggcttcttcccccaggagccactcagtgtgacctggagcgaaagaggacagggcgtgaccgcatgacacttcccacccagccaggatgcctccgggcacctgtaca

SEQ ID NO: 663664 - DNA, 1057 bp, Homo sapiens
agacgagcctggcgcggtggttcatatctgtgatcccggcctctctgatcttgcccaggaggctactggatctgcgagtgtctggagttcacgaactatatctggcgcttaatgggtgtctctgattaaaggaatgcccccaattcggctggagctttgcatggactagtttgcctgtaagtaccaagtctacatactggggaggcgtgacagattggaaagaatgtggtgtgacccaccggtgaggcgtaagtgtatgcatatgaagatcgatgagttggctaccaagtgcattatcggacagtgcattgtgtgatagggaaggagaagaggtcatttcgtatataaacaacaaatagacaatcataaatatagaagttggtaggaaaaaaaggggagggtataggaaagcttggatagaggactacgaagctgattggggggaggaaacgacaaggccagtggtagaatcactatgaagttaggtcgcgggtgatttacgtggaccatagtaccttagggaaaaagatggggaaagatgcactggaatgtatgagaaaaagtgtgatgtttgacaagaatgaggtcaagggactggttgatgagtagtgggggatcagttacatttaccatttgcgaagaacgggatgggaagaccacagttgagaaatggtggtctaagaaacatgagggtaaaggaagaaatgattagagaatgtgagagggagcagtgagacccaacagccacactaatagccgtggaacccaacgcgcctgtggaaaggattccggtactggcccaactgcactattccacgagcaggcgcaaatacaacccacaacatagtgttgcggcgcccacacgtccggagaagcgacaaactcagcccgttaagacagtgcgataccttggagccggtgtaatcacactttctgcgcgagccacatggacaccattgtgaagactgcgacgtagtaacacatggttccagtcacaagtaacaagtacgagtgcgccagcaaccgaccagtctgcgggacagagaccagaggaacg

SEQ ID NO: 663665 - DNA, 189 bp, Homo sapiens
tcgcccgaatctaatacggtcatatgttctgagtatcagtatatagacttttatagattttcttactttatttttttggaccaaactcacagcatgcagaagttctggggccaggaatctacatctgtgccacagctataaccagagtcacagaaccgacagtgctgcgtcacacagggtatcggggat

SEQ ID NO: 663666 - DNA, 112 bp, Homo sapiens
aattagtcctataacattatcacagcaactgactatggttatactcagaggcaacaatgaagcaccaccaccaccacccccagctactacacaaaactaccaggattcatac

SEQ ID NO: 663667 - DNA, 422 bp, Homo sapiens
tcgctcgggttcgcgcgaggtttagcgaggtctgcctataagatcatcaaaaagctatctagtggtgagtatgagtttcgcaatgctccttcagtagaggatcatgatgcgactgtcattgcgtcgtcgttcgagtttgctcggcataatagttatgaggatgtaagtccgtgggcgattatgagaatgactgcgccggtcaagcttcatggggttcggatgagaatggctgttactactaggcgctcactgtggcttattgacgagtatgcaatgagcgatctcaggtctgtttgtcgtcggccgcatggcgcttgttctcattatgcctcatagggatagtacaaggaaggggtaggctatgtgttttgtcagggggttgagaatgagtgtgaggcgtcttataccatagccgcctagtt

SEQ ID NO: 663668 - DNA, 176 bp, Homo sapiens
gctataccttctgcatgatgaattaactagaaataactttgcaaggagagccaaagctatgacccccgataatccagactgagctacctgaagaactagctacaaagagcacaccctgtctatcgtggcaacattagtcgggacagatttataaggtagaggtcgacaaaccctac

SEQ ID NO: 663669 - DNA, 323 bp, Homo sapiens
atataaaaatacaaaaattagctgggtgtggtggtgggtgcctgtaatcccaactactcaggagcctgaggcaggagaattgcttgaacctgggaggtggaggttgcaatgagccgagattgtaccactgcactccagcctgagcaacaaaacaagactccgtctcaaaaacaacaacaataacaacaacaaacaaccaaacatttttttaattatactttagttttgggtacatgtgcacattgtcgaggttagttacatatgtatacatgtgcgtgctggtcgcgtgcaccactactgtatctagatagtatttccatgct

SEQ ID NO: 663670 - DNA, 476 bp, Homo sapiens
aagactaggccgacttgtcacgcatgtcagcaagaaggacctgtacctggccgtgtgttcaacccaccgcctttgagttgacacagatgcaaccccttgaccaggacatctacgggcgcgaggacgtggcagccccaagctgttctacgccgaccaccccttcatcttcctagtgcggacacccaaagcggctccctgttattcattgagcccctgggaccaggcacccccagaatgacctggccgcagtgagacggattgagaaggagctctcaggaggggcttccgggcacactctgaccaagaaccatcgtgcctggcgttgtggggatgaactttttgttttgttccttccttttttagtcccccaaagatagggagggaagggggaacatgatctttttttgctatcaatccaagaacttatttgtacattttttttttcaataaaacttttccactgaaaaaaaaaacaa

SEQ ID NO: 663671 - DNA, 399 bp, Homo sapiens
ggtcgacgtgagctgtgattgcgccactgcacaccagcctgggcgacagaatgacttcatctcaaaaaaacaagacaaaacaaaattaaaaaaccctcaatcttgataaagtatcttttttttttttgagagaagtctcgctcttatcccccaggtttgagtgcaatggctcgatctcagctcactgcaacctctgcctccggggttcaaatgattctcctgcctctgcctcccaggtagctggtattaagtcacctgccaccacgcctgtctaatttttgtatattttagtggagacggggtttcaccatgttggccaggctggtttcgaactcctgacctcaagtgatccgcctgcctcggccttccaaagtgctgggattttccaaagtgctggca

SEQ ID NO: 663672 - DNA, 977 bp, Homo sapiens
gccacgcggtcgaaagacagtcggaacacgtatagcctattattcggcgcatggagcgtggagtccgtagagcacagctctaagcctccttattcgagccgagcgggggccaggcaggcaaccttctaggtaacgaccagatctacaacgtgatcgtcacagcccatgcattggtaagaatcttcttcatagtaatacccatcataatcggaggcttggcaactgaactagttcccccgtaataagtcggtgcccccgatatggcgtttccccgcgagtaaacgaacgagtaagcttcatgacgtcgttgacctccctctctctctactcctgctcgcatctgctatagtggaggccggagcaggaacaggtggaacagtctaccctcgccttagcagggaactactcccaccctggagcgctccgtagacctaacacatgcttctccttacacctagcaggtgtctcctctatcttaggggccatcaagtttacatgcacgaacaagttgatccaggtataaaaccccgctgccatgaaccgcaatacaccaaacgcccctcttcgtctgatccgtcctaatacacagcaggcctacttctcctatctctcccagtcctagctgcgggcatcactatactactaagcagaccgaactcaacaacaccttgttcgaagcccgccggaggaggagagcccatttctatagcaaacctagttctgatttctcggtcacctgaaggttaaaaattcttattctaacaggggtcggaataattccatatgtactttactactcggaaaaaagaccacttgggtgcctaggtatgggctgaggcatagatatacatggatcaaggctaacgcgtgagccccaaaattaaggtcgaataaggttaaccgaggcctatgtcccggaataaacggtataccacggggaagataaggatctccccggagaaaaaaaatggagtggc

SEQ ID NO: 663673 - DNA, 316 bp, Homo sapiens
atggtctggtacactttaatagtgtaggaagctgaatcatttatgcaggagagaggtcaggcttgatacgggaggatcctattggtgcgggggctatgtatgattatgggcgttgcttagtagtagttactggttgaacattgtttgttggtgtctatcttgtaattgaaattgctcggggacctacggttactgtgattacggactagggttacgactgagtggaccgacacaaagacaggacgtaacgtttaacttatgccttttcgggttgagggacttgccgcggtggcgcgggtacccgcgctcgaattcg

SEQ ID NO: 663674 - DNA, 1090 bp, Homo sapiens
gatcgtccctgggttgtgtgacccgtgttggcctgctgctcgaaaaatgccggggctatagacagatcgtgactcattactcctgtcagcccggatcatggtgtggtgccgtctcgtgacacggcactatggattcctggtctatgcacacatgggatagccgcgtgaaactatcctcctgtcatacacactacgttggccaggtcatagggcgactattcatattgaggggttgctcgagtgcgagtgtcatgctagatgattgagcacgacgacatatagccagtttggctagcatattgggagacgcgaacgagtagagtttcgcgcgcgggacatttagtcttgagtagccgccatggtaacctcataaggaggggggctcacgaagggctgcaagcatatgtggcgtgcaataactcgtgacttaattgagtttgcacaccttcgcatgcgccaagatcacgctttgtgagatgcgatacactcgtagagccaatttgggcgctttatgtcaagttgcgatccaaacaaagacctgaatccccatgtggtccccattggttggcatggcaaaagttgacgaaaccacggcgacaagtccatacggttaggaccgccggcagcacaattttgcgtggggggggtcgttgggcggagggcactggtattttaacgctctaggtaatacacagtgggcaagggggaaaattccctctgcgctgagtatcgcggttcccggcattgcaagatggatgcattgagatgtggttggccctcggtatgcgaaattccgaagccatgtgtgtgtgtctccgctaggacaaggccacacccgtttgggaatgttgttaatggccgccgattgccgatgaaaaattaaccaagcgttggacttcgcatgtgtcagattaaaggcaagttggccccattagtgcacgtactctggtcgcgtgtcaccccgtagggagaacaaccttatggtccccaaccgagggtttgactccccaattgtcgacggttccttgtaccctggtgcacacttttataaacacgtggtcgcaatattaaaaggcccaagggtgccccc

SEQ ID NO: 663675 - DNA, 941 bp, Homo sapiens
  misc_feature (938)..(939): n is a, c, g, or t
  misc_feature (941)..(941): n is a, c, g, or t
gactggctgctctgaaaagccatctttgcattgttcctcatccgcctccttgccgcgcagtcgcctccgccgcgcgctcctccgccgcgggactccggaggtttatcgccagagtccctgaatctcgcttctttttaatcccctctgcatcggatcaccggcgtgcccccaccatgttcagacgcagccgttagacaccagcctccgaaatcaccacccaaggacttacaggagacacacgggcacgttggtggcaaagaggcagaaattgaaagaagacgcccctgttaaacggggaatgccatgagggaaaaatgccggagcaggaggctgaccaatgaggtagacgaagcaacgagcacacgaaggtggggaggcaaagaggaggaggacaaagaaggtgatggtgaggaaagaggatggcagatgaagatgaggaagctgagtcagttacggggcaagcggcagtgaagatgatgaggatgacgatgttcgataaccaagaaggcagaagacgaggaaggatgactagacaggcaaaaaggaccatttaacaaaaaaaaaaaggccggcggtgacctattaacctccaattccggttcagaaattaaggtggtcacctttgagtataaagagaccgcccgccaccgtggaggttgcaccggaagatgaaaggcgtttccacaaaccaaacaaaccatgggaatttggcaccgggcgacacacaccaaatccaggccgctgttcttaaagcacttaaaaggacatgctgcgttataccttaaatatcgtcaatttgaggggcataaacttcgaacaacagtgggtggtccatcgcatctgggcgctaatcaggaaacgtaccagagcaaattgcgccctgttgtcattcgagcacaattctttggtctttcgacataccactcctcctcggtgtnnan

SEQ ID NO: 663676 - DNA, 255 bp, Homo sapiens
cgcgcgtgcgtacgcgagtacgctgagggtcgctgcgggagaggcgtagcgcaagcgacgagacgtacgcaggagacacgccggcgacgccgacgcgacgcgccgccgagccgcgcagcgcgccggacgccggtcgtcacgctcgacgcgcgctgagcgcgcgccgagcaggccgcgacgtcgcacgtgactgtcggtctcgcgggacgtcgcgaccttgaggtgcgttcgatcgagcgcgctggagagttgagg

SEQ ID NO: 663677 - DNA, 206 bp, Homo sapiens
aggaaagatgcccagactatagtaaataggggttaacagagatggaacattcaggtaccaggcttgtgagctagagaggtgacacactgcttacttaatggtgtcttatgtaacctacctcccccactattctttctttacttttctttttctttctttttttttttttgggtttggtttttttggtttttgtggtttttggggat

SEQ ID NO: 663678 - DNA, 386 bp, Homo sapiens
taatttttacataagaattattttccagcttccccgtaaacttggttgtcaaaaattatcccaagaactgctgctgccctaattgtgtccgctgcccagtttttgaataggggcccccatgatagtgttgagccctgtaatagggtaagttattatttcccttccattggaactttttcaaggccaacccttggtataaacctaaaattgtttaaaaattgggagttaaaaatggttatctttggcaaatggcttagagaaaaaaatgtaaaattgggttttaacttccccagcctttcataaatttgccccagggctatttggggattacccttaaattgaaaccatgttgtttttttcctgattaataaatttggtggcccata

SEQ ID NO: 663679 - DNA, 130 bp, Homo sapiens
gctaactggctgtatgtggctgcctgtccaccaaacactacgtaccgatgctaacgccacgcaggcggtgggcgcgggggaatcttcctcccctgccccgggctcggagttatgcatccggagccctgcc

SEQ ID NO: 663680 - DNA, 1162 bp, Homo sapiens
ctcagccctgtggttacatgccgctgatgtatctaagaagcatgtcactttcagtgttccctccctaactccctgacctgagaaccctggggcctgtggggcagtttgatgcctcctctcccttctgtgcggtctgctcccagatgccatggcccatggtgaaggacagagtgtgtgtgtccttggtggccttggtggggatgttgcgtcctcagctccctcccctcagcccctgcccctctgagtagcaatagaaactgaccctcgtctaaggccaaaaatgaaagactagagaagtacagagatggatcagtggagcgaggacccctgtatagaaatttgctgccccaacgagtgaggcaccacgagatgtaactcagcgatttcctcggcctttgtgcgtgtacgacaatacccgggaggccccctcctttgtggggacgcgtgcgccttgtcctatatatgctcccttcgcgctaccacccgaggctcgcgctggggctcctctcgcacatcgacttccttggcttgcttcctctggcgcggccataccttccgggcgcctcgcgcctgtggcgttcgcgactgctctttcgccgtgcggcccagaggcgccaaccgccccactggccacccctctctgctagcggccgccgcgcggtgccggcaccccctctttcacataggccggtgcccccattaggcccccaaccccctgccccctgtcgcgctggcgcaacttcctagcccggtcacccttcctcctacgggcggcgccacagccccctttggtggcccccgcactctctctgcgcgccacgcggtggtctttgtaatcaacggcggtggccggcgtgtactccaacccgcccccgtgctccgcttggccgccccactcttgcttcttctggcgcccgtcctcccaatcgggcgcccacagtgccaccacggcacctactgtctttgggcgcgtctacccaccagcgccccggacgggcgacacccatacatccctctaccccatcgccttgtgccacgcgccgtgcgcacccgctcgccccgcgtcactcctttactgtactcttctcccccctctcgcagtcggtgtcctccgtccctcgcaccgccgtggcgccgtccattaaacaacgcggcgggcgtc

SEQ ID NO: 663681 - DNA, 349 bp, Homo sapiens
ggaagagtttccgagttcgtgaagaggatggagaggggtgccgcatgacactcttccaacttcagaaaagccaagagagtcaaaacagaggatgagacaagagaacgacccagaggagcacgaaagaagtcaccgaagaggagaaaaccaaggagggcgcagccagaagccaaaggggtcaaggaggaggtcaagttggcctgaatggacctctccagctctggcttcctgatgagatccctcaggtttcttccccaaaccctcagattttatatttactatttcggtgtgtatttatatcagaatttattagatataaatatccccaggggacagaaaccaaggcccc

SEQ ID NO: 663682 - DNA, 237 bp, Homo sapiens
acattagccaactgcaagggaagcgtctgcgggggcagaggatgccagccctgtcctttgctcacccgtcgttccaccatacaggaaccctagaccccggccttgcttccacagagaactggcaggagtcccctggcctggccatcacagggactcacatcggagccttttaaaactccacattgtggctgagcacagtgattcactgcctatcatccaggactttgggacgccgag

SEQ ID NO: 663683 - DNA, 661 bp, Homo sapiens
cagacactgtgaacctacttgagggtggagggtaggagaaaagtgaggactgagaaactgcttattgagtactatgcttattacctggatgatgaaataatttgtatgccaaacctccatgacacgtaatttaattatacaacaaatctacacatgaacccttgagcctaaaataaaagtttaataataaaaaaacaaaaaaaaaaaaaaaaacaaaaaaaaaaacaaaaaaaaaaaaaaaacaccaaaaaaaaagagagagagggggggcggcgccgcccaacaagaatccttcccgccggggggcgccccacatcgagccccgccccccccgcttttctttgcacacggggggcccccccttagaggagggacgctctatattaaaacccgcggcgacgcgaccggcggccccgcggctctattatataaaacacgagaccggtgttaaagagcgtgggaaacaacacaagctagctcagctagcggggaggactctctgttatgaaaggagggacacccccttaattctcgctggggggggggagaggaaccactcaaggtttggggcaaaacatcctcactcacaggaagagatatttaacgagcctccctcggggggactacttaataactaatttttagagggataatataaggg

SEQ ID NO: 663684 - DNA, 898 bp, Homo sapiens
  misc_feature (319)..(319): n is a, c, g, or t
  misc_feature (418)..(418): n is a, c, g, or t
  misc_feature (462)..(462): n is a, c, g, or t
  misc_feature (526)..(526): n is a, c, g, or t
  misc_feature (533)..(533): n is a, c, g, or t
  misc_feature (538)..(538): n is a, c, g, or t
  misc_feature (798)..(798): n is a, c, g, or t
  misc_feature (816)..(816): n is a, c, g, or t
  misc_feature (820)..(820): n is a, c, g, or t
  misc_feature (825)..(825): n is a, c, g, or t
  misc_feature (853)..(853): n is a, c, g, or t
agcggggggtgctggaccaggctggagtgcagtggcgcgatctcagctcactgcagcctccgcctccagggttcaggcgattcttctgcctcggcctcccgagtaggtgacagcggcatggacatatgccccaggctttcctgctggggtccatccatgagcctgcaggtgccctcatggagccccagccctgccctggaagcttggctgagagcttcctggaggaggagcttcggctcaatgctgagctgagccagctgcagttttcggagcctgtgggcatcatctacaatcccgtggagtatgcatgggagccacntcgcaactacgtgactcgctactgccagggccccaaggaagtactcttcctgggcatgaaccctggaccttttggcatggcccagactggggtgccctntggggaagtaagcatggtccgggactggttgggcattgtggggnctgtgctgacccctccccaagagcatcctaaacgaccagtgctgggactggagtgcccacagtnagaagtnagtgntgcccaattctggggctttttccggaacctctgtggacagcctgaggtcttcttccatcactgttttgtccacaatctatgccctctgcttttcctggctcccagcgggcgcaaacttactcctgctgagctgcctgccaagcagcgagaacagcttctgggatctgtgatgcagcctctgccggcaggtgcagctgctgggggtgcggctggtggtgggagttgggcgactggcagagcagcgggcacgacgggctctngcaggtcttatgccagangtcnaggtngaagggctcctgcatccctctccccgtnacccacaggccaacaagggctgggaggcagtggcaaggaaagatt

SEQ ID NO: 663685 - DNA, 208 bp, Homo sapiens
aagtctagagacgagatgggaaagtagctgagacaagatagctagggaaactttaggctagatacaaaattcacacatgggaaatggcacggactctggggagactgggaagtgtcctcagccattcagctccttccggacgagctcttcatagttgatacaaccatgtgctgtcttcttgcccgtgccaccagcttctcgttctctg

SEQ ID NO: 663686 - DNA, 493 bp, Homo sapiens
  misc_feature (56)..(56): n is a, c, g, or t
  misc_feature (89)..(89): n is a, c, g, or t
tttacccccccctggtttttaatcctccaaaaaccttattgaacaatgggggtggntttacccccccccattgggaattcagaccctgnctttttggtggttcccggtcccaaaggggaaaaaaactgttttgggggcagctttatccccaaatttgggccttttttgcgggtcccggggggggaaattaagtgaggccccccaaaaccttgggcctggcccatttttctgaatgggggggggcccggcctttttttggcccaaaaccggggcccaagaaattttgattttcccaaggtgtttgtttagcccccccctttaatttcctttggccccttatagaaactcatatggtccccttttttttttgatactccccccacttgattccgggggatatccttttccggggttggtttgggtttaaaaggaaaatttttagatccccttaccctgggtttaaacctttccattaaatccttttggctgggga

SEQ ID NO: 663687 - DNA, 431 bp, Homo sapiens
  misc_feature (24)..(24): n is a, c, g, or t
  misc_feature (58)..(58): n is a, c, g, or t
  misc_feature (66)..(66): n is a, c, g, or t
  misc_feature (188)..(188): n is a, c, g, or t
  misc_feature (221)..(221): n is a, c, g, or t
  misc_feature (257)..(257): n is a, c, g, or t
  misc_feature (318)..(318): n is a, c, g, or t
  misc_feature (331)..(331): n is a, c, g, or t
  misc_feature (366)..(366): n is a, c, g, or t
  misc_feature (396)..(396): n is a, c, g, or t
ttctcagcaatgagcgcctgttgnactgctttgtgagcctccgggagcaggtaacctncgcccaanccgcctaggactccacatcaggcaggcacaggactggccccttgtcctcataaaaactctcagtacagcttaaactctgtaagatctaaccagcaggaggaccctcgcttcctctccgcatncttgcacctcttgcttctgagagtcatccagtnccagttctgtgacttgcattgactggctcaatcaanctacaactcaagcagtcacggggagaaggattgtagatgggcagtgactcacagggtcagnactcgggggagcngagtcaggaggtcagtgggcctggaaagaaggggnaagctgggtgggtaacgttctgggcccagnaagaaggcagagtttctccgcagggtgtgttcaag

SEQ ID NO: 663688 - DNA, 410 bp, Homo sapiens
tcttgtactgtacaagatgagagatggtggtatgaaaaagatttaaaagttatttaagaggtagcattggcagtacttggtaattaataaaagttcagatgtgtggaagagatggagaactcaaagatgactcagctttctaagacattgttaaatgctgttccatttactaaactagatattaaaaaaagaacagatttgggggaaagttatatacaatccatatacaatgtacactctcagatttcattaaacatcttgttctaagactatataaaactagagttggctaggcatggtggcttatgcctgtaataccagcactttgggaggctgaggcaggaggatggcttgagctcaggagctcgccaccagccttgcaatatagtgagacccccatctgtacaaaa

SEQ ID NO: 663689 - DNA, 215 bp, Homo sapiens
ttagggagctacggtgggatatcgcttgagcccaggaggtcaggctgcagtaagctgagatcgcaccactgcaccccagcctgtctcaaaagttaaaaaaaaaaaaaaaaacctgccaaattgtttcccaagtgattggtcccgtctctagtgtatagagagtgctttcatctggttctcacactggctaccagggttctccctaaaaaccctaa

SEQ ID NO: 663690 - DNA, 877 bp, Homo sapiens
gacccggctgactgcactcgacagcttagggtcgacacgaggctccctggacaaacctgactccttcatggaggagaccaactcacaggaccagcgtgcccctagcggtgttcagaaaccagtcccctcgggagcagcccctggatgcccgaacactggcttggtgttcaagaaccccttggggtagcatcccacgagtatgcaagcagggcctgcccagtgtctgtctaccccaagatcaggcccccgggctggcgactacacctaccgtgagggccttgagcacaagtgcaagcgggacatcctgctcggcggctccggagcctcggaggaccagacctggaagcggatccggccccggcccaactaagagcagcttcgttgggctcctacgtacctgtgccaaagacagtgatttaacaagcaggacctgtaagtacggggggatacaactgcacctttcgcctaccattcaggagggagatcgacgtgtggaccgaggagcggaagggcaccctcaagcgcgactgtcttcgacccgctggggggtgccaagcgcgggaggcctcaaccatcggcccaagctccttgaagggaccaccagggcatcttcaacgttccatctggggaggatctgggttgtgacaagtaaaccccgggatcatcacggcacaggaccccaggactctccgtctgtctgtccaaacctggtgtgcaagcaacagtttctacaacaacaagtgcctggggacattgtccggtccacctccttaaggtatccagatcggcagtccggggcccttcacgtcgagtggcgcctaaggtgggcaggtgctgcggagaagtgccattgcaagtttcgaacagggtggtgtgc

SEQ ID NO: 663691 - DNA, 1455 bp, Homo sapiens
gttgtccatcgcacgattgcgccacgctgtctgtccagatttgcgtaactagccttgctgggtagctctactgcctggtagatcgacgtggatccagaccctggatggggcgagactgtcgctaacgtcgtactagagtagcaattggaggggaggagattggactccttcgaactaccttcttcagttggaggagcgggtcgtctggtgagcaacgtgccccgggacttgggtctgtgagattttgagacaagctcaacaagtcaatttgaattggaagctttccgtcaccttgggacagcctcaacctgtgccaggactcttaccactcgcgttggaggcagactcctatctagaggtccaagggacatgattggcttgtgcacataaacttaattgcctcgaaggtggcacctcatcactcacgttaggacataggcgaccgaatcacctttgaacctctcgcttgatttgggaacccgagaatttccggctcgcgacctcgtgctttggacgcatgattgcagccagatgtctctcagaagggcgctttctattgcggtagtgtccaaacaacgcctgtttgggtgggggggggacacctaggggtgatcttggggggtttttcacccttacccccttggcttcagttgaggaaacaccgctacgttccattccatgctctgggagtaccagttggggggaaccgaacaagtcccaaaccgccttggggacagatttcttcaccaattattaaagccccaaagttaaggacgcccagagggttttttcacctggagtcttgggaaggttctgcaagtgcccgttagcacaaaattcccgcaatttccttccacccaaccccaagcgaacccaagggcccctgggcagctcagcttcctgacattttggttgggcctttccacggcaggcataggggaccggctgggagaggcccacccttgatgtaaccactcacttgctccgggctagcacaacacccctccccactcatcgggacgtggccccgcaatccttagcacttataacctttaaagccggcctctcattaaggacgaaaaaattggcggaccctgccaatcacactgggtgaaccccttgagaacctcgagagcagaggccctgcaattgtttcaccctggcgcgcgcttctcgaaagccaaccttggttgggcctcaactcccaggacacatattacccctggcgccatttttgccccgtaggtcccctcgtgtgagaaagcccccatgaaaccgttcttcgcgggaattcaccagagaggcttaaggaccaaccacagtggtagagtgccccccccagcgaaccgagtagcaacccacgtgggtgtcccacccaagcatctctcagtaacctcctcgcttgggcccacacttcccccacggtcgctaaccgcagctccatcgtataagata

SEQ ID NO: 663692 - DNA, 232 bp, Homo sapiens
aaattggggtatgataataggtgacgacgagggaacttaagacgagtgctcgaaagagatgcacttggttcagcctgcaataggttataacatgaatcatcatttcggactccttagtcagcactgaagacctcagggaatctggagccatcggcacgtgcaagactcgattttctccaaacgctgcatctgcaatagcagagaactctccagagagtgcctcagtccttgg

SEQ ID NO: 663693 - DNA, 645 bp, Homo sapiens
  misc_feature (186)..(186): n is a, c, g, or t
atgctggctatcggcttcctctccctgccagtttcccagcagatctgcccatggggagcagccccccgaagggcagtggcaacatcaagcagaggtacagagtgcccgagaagcttcgagtgcaattgcatgaccatgttccacgcgtgcttcatagtgcaggcaacaccatgcagaaccaaaatncgtgtgttggtggcaagatcctccgtcgttccgtgcacaacgcttgctgttgaactggagaatgagaacgaggaacgggggctagggcccgtaggtggagggtgtggctgcccgtcttcgacagtggggcgacctaggaacaccggtctgtgaacaggagaggacatctgtggcaggagcttgaccatcgttgtgatcttgtggaaattagttttgttattgttggtctcatatttgtagtttataattgttttgttgaagtttgctcttcctgagttgtactatacaagcgatacctcaatgcgggtagcctgtcttatctcgtgtcatggccctgtgacccctggaactgcggggcactgtgtcaaagcactgttaacggagacggctgactgtgtctgtgaatggtgacgaacttcccaaggggctctgagcatagtagaattctgtcgactgatg

SEQ ID NO: 663694 - DNA, 157 bp, Homo sapiens
ccccccccctttttttggtttccggggggttggtgggggggggggggttccccccccccctcccctcccctgggggggtttttggtcctggggtgcctttttgggccccccttgttccttaaaaaaaaattttacttccttttttttttcccggcca

SEQ ID NO: 663695 - DNA, 315 bp, Homo sapiens
  misc_feature (69)..(69): n is a, c, g, or t
  misc_feature (71)..(72): n is a, c, g, or t
  misc_feature (74)..(74): n is a, c, g, or t
  misc_feature (78)..(78): n is a, c, g, or t
  misc_feature (91)..(91): n is a, c, g, or t
  misc_feature (93)..(93): n is a, c, g, or t
  misc_feature (114)..(114): n is a, c, g, or t
  misc_feature (221)..(221): n is a, c, g, or t
  misc_feature (283)..(283): n is a, c, g, or t
gaccgctagcccgcagcgctcggcttcctggtaattcttcacctcttttctcagctccctacagcatgngnncnaganccctccttgctgntngccgccctcctgctgcttctntccggcgaggcgccgtgcgctgcgacacacctgccacctgcacctatcttgacctgctgggcacctgggtcttccaggtgggctccagcggttcccagcgcgatgtnccctgctcggttatgggaccacctgaaaaaaacgtcgtggtgtaccttcagaagctggttcngcctatgatgaccttggcgtttctggcctttt

SEQ ID NO: 663696 - DNA, 113 bp, Homo sapiens
gcgccgggttaagaaggtccaggtatgccagaaggtccaggtccagaaggtccaggtatgccggcatacctggaccttctctccactattatcctttaacccgagcgctacca

SEQ ID NO: 663697 - DNA, 307 bp, Homo sapiens
actctcttgatttctgtggacaccaactgggtgtcctacaaatcaattcaattctgacactaccaggattagcatcacatcccacaagttatgggctcggtcttacaaaccgcccccacttaagacactaattgagtccagaacctctcatctctacaaaaatttttttaaaaaattagccaggcatgattgcgcgcttctgtattcccagctactggggaagctgaggccaggaggttgaggctccagtgagccatgatggtgccactgcacttcagcctgggcaatacagcaagaccttgtctca

SEQ ID NO: 663698 - DNA, 185 bp, Homo sapiens
  misc_feature (121)..(121): n is a, c, g, or t
acacatcaccgcatgattgcagtccaggtctgtctgacaggggagatcagcatctgccccttggtcatcctgtgggctgtgggaccaggcctgtactcaaggcaaggtaggaacagtcttnctgttttcttcagggttgcaagcagagtgtccatgctgtgctcagattcaatgcagaccttctt

SEQ ID NO: 663699 - DNA, 133 bp, Homo sapiens
gctttcctttattataacctctagatcagtttgtataaaatcaaagacaatagctaatattagatatatgtccaaaagcatcaaggagcacaactaatatatgggatgacttagctcctgtaataattattgt

SEQ ID NO: 663700 - DNA, 1986 bp, Homo sapiens
  misc_feature (204)..(204): n is a, c, g, or t
  misc_feature (1100)..(1100): n is a, c, g, or t
atgaccaagtctacagtgcgtttgcgtatgagtgtcaagagtgactagagctaaagacattcgtagtgtgtcatcgtcacaatagcctcgcatagcatcgagatgcaaatgtcatctctctccggaggctggcctagaagcagtcgtggtcatatcggggaactcgagagatcgacgatgtgactaggcaagacaagcactagnacacatacaatcaaccctgatggcaacgcaacaatcatcacaaaatcgtgtccatgagttgcagaccagtgagtgcagcgcagcgagtatcagtgcgtatatcattgagcttgcctagtcagctagcacgtagaccagtccttatggtacttatccacgagaaagtgggccatgggggggcaggaaaggcggatattcatcgctggtactggcacgtggtgagaccagccgacaagaacgaaacttaggtttattccttcatgtggtcacacaatggccctggagaaacatccttggggcccccctataaaattccactaaagtgagcgagacattaggccagcgagttctgccaagcgtaggcgcagccgtaagtgcgcatggaatacgtgctcaatacgccaatttcccattgtaagaccacaaagggttgagcgaggacaccggaactgtagaccgttcgcccggcacacacggttgtccttgggttcgaatcctgtgagcgggaccaaagcatccctcaggaggaaagtaggcttcggacaacgacgggaccactaaccacactttacggcaaatttaacaaccgtcacacttttgtgttggagccctgttgacacccgtggtaacgtgtgctctcccgaccgcacaacacggttcctagggaacccacagatggaataaataggagataaagcataaaaacagctttcgaaaacataacctttggtcggttggatcggacttccaacgcatcagagttggatgtgggcgacgaagagatcatatgtgaggtttggtatggcaattgggggcgcactgctaggagggtgtccagaacaacgttaacatctaacttggggttggttggcacatttgaggcaatacctaggagntatggaattaatagacactttgtgtaccgctaaaagaaatagttcgcaccgggtggcaggttaccccacattggacgcccccaacttgtggaaggggtagaagcgcgagccaggcactgccaggaaatacaggtggcaccaaatcctagacctccccacacaagttcaaagagaagcaagacaactggtagctaagaacacagcgcaatagcatgccaagggaaggtaacaacggcgcacgcagggaggaacagaattgccggaacaccgaagtaaaatacacaaggagccatcactggggcaagcccgcaatcgtaaccccctgaggagcagcgtcagagccgagggaagaagactcagactataacaagaacaccccttattagaaccaccacactgggtgggtgggacgcacgccgaagcacaacaacacacacccccacgcacagcgacgcaccaagcaacacaaagcccatcactccaagacaacatggacatgacgcgaggcgcagccccgactatactcgagatacggatgctagcagcacgagacgagcgcacggccggctcaaacaactacagagagagacgacaggaacgaagacatgatgaaaagccatggaccggagcgacacaactctcagcaaggacgaacgacgccgcacgccaccacgcacacagatcgcgacgcacaccatgtggcggagagggagaaccaccgacacgtgacgaatacgtcagccacggccacgcagcgaggaagagcgaggacagagcagaacagcaatgcgaacaacaccctgcgaccgagcagaccgaagcgactccaacaccacgcatagagcagacaggacagccccgaggccagcggcagagagagaagggg

SEQ ID NO: 663701 - DNA, 236 bp, Homo sapiens
gaccccgccaggggcggccgggaccgcaaagccccgggagcccgcttaaggaggagcggcaaacgcagcgttttaaaccgcagccgggggtgcccccgcggccgagggccgacctcatctttaaccgttgcaggaaaagccccaagcggaagttggggtttcccgtttgaggttggagggcagtccccagctagggtttcggcccttgccgccccgggcctgtaaaaacgtgtttt

SEQ ID NO: 663702 - DNA, 413 bp, Homo sapiens
agtcaggcgaagtatggtgtgtctgctactaaacctttcttacattctctgtcatctcccctcatcgcagaggtctaaacttcggtcttctaagtttgattgggccctaaggcactgccatgtccatcattgtcagctagcgacacatgaacaccggaaacaaacataacttgtggtcccttaccacgagcgaaagagcgtcagctactcgggtgtaggcggggaggacgggaggcctcacacaagaggtggatcaggcgaagactgtggccaataaagctaaaactcacctgagtagtaaaaaactccagttgacacagagtagactacgaaagtggcttaagcatatctgagcacacactagctacgacccagggtgggataagataccccacagtcttggccggatgggt

SEQ ID NO: 663703 - DNA, 507 bp, Homo sapiens
  misc_feature (7)..(7): n is a, c, g, or t
  misc_feature (40)..(40): n is a, c, g, or t
  misc_feature (70)..(70): n is a, c, g, or t
  misc_feature (91)..(91): n is a, c, g, or t
gtccctncccccatcagccccccgtggcctacgcctttangaaattgctgcctcaatccttgtatcggtnctgaaaacaaccgttttgaanggaaaagttaatgcctgatttttagttttcctattgccatataaattatgggatctcccgtaaatgcatgttggtagatttcagttaaaactcccttaaacttcatttaatttacttcactttgaaagttgaacttggctgggagccatggcacatgcctgtaatcccaacactttggaagtctgaggcaggtagatcacttgagcccaggagtttgagaccatcctgagcaacatggcaaaaccttgtctctacaaaaaatacaaaaatcagctgggcgtagtggtgcacacctgtagtcccagctacttgggaggctaaggtgggaaaattacccgacccgaggaaggcaagactgcaatgagccatgatcgcaccactgcactccagcctggatgacagagtgagaccctgtc

SEQ ID NO: 663704 - DNA, 137 bp, Homo sapiens
tgaccggtggttgtgtgatcaaattatgtgttctcaggaaagtcatgtcagtggtatgtatatcattgttgggacgattagttttagcattggagtaggtttaggttatgtacgctagtcgagtgccaatgttggat

SEQ ID NO: 663705 - DNA, 409 bp, Homo sapiens
ctttccggatccccttggcgagaggcggggggtgtaacacctcagagcggtcctcttctctagaggggaggttttcaagaggtgcatcatcagcattaccggtgacctggcgggaaatacaaatcctcaggccccacctcagacctacggaatcagaatctcggggggtgggcacagcattctgattaaccaaaccctccaagtgattgggatgtattctaatggggagaccatctctagaaaagaatggctacctctggtatggaggtacaaaggacggacctcttacatcagggaacttcctttcccagagctcctcagggaatcaggcggaagtcagtcttcttctaagagcacattctaactcagtttttttcctcggtcctaggcggcttccctcttccccggg

SEQ ID NO: 663706 - DNA, 394 bp, Homo sapiens
  misc_feature (226)..(226): n is a, c, g, or t
  misc_feature (379)..(379): n is a, c, g, or t
gttcagacagcaattaagggctgggcacggtggctcatgcctgtaatcccggcactttgggaggctgaggtgggcagatcacctgaggtcaggagtttgagaccagcctgaccgacatggtgaaaagtaaaaatacaaaaataaaaaaattagctgggtgtggtggtgtgcacctgtagtccctacaaaaataaaaaaattagctgggtgtggtggtgtgcacctntagtcccagctactcgggaggctgaggcaggagaatcgcttgaacccaggaggtggaggctgcagtgagccaagatcacgccactgcactccagcctgggtgacagagcaagactccatctcaacaacaacaacaaaaagggattaagggggnagccacctggcttcc

SEQ ID NO: 663707 - DNA, 423 bp, Homo sapiens
cctaggcacagtggcttatgcctgtagtcccagcactttggaaggctaaggtgggagcattgcttgaccccaggagtttgagaccagcctgggcaacatggtgaaaccccgtctctactaaaaatacaaaaattagctgggcatggtggggagtacctgtaaccccagctatttgggaggctgacccaggagaatagcttgaaccagggagtcagaggttgcagtgagctgaaaatcgtgcaaccgcactccagcctggtgacagagcggatccgtctcaaaataaatacataaaataataagaaaaattaactgggcatgatggtatatacctataatcccagcttcttggaaggcttagacaagaaggatcaattgagcccagaagatggaggcagcattaagccagaactgctccagtac

SEQ ID NO: 663708 - DNA, 122 bp, Homo sapiens
aggcgttgtcagtgcggatgagtttcagcgaggggatcagctcttccgcatgcgggctgtgaaggacccattgcagatagggttccacctgtagtgctacagtggtgccacctcagtatggt

SEQ ID NO: 663709 - DNA, 232 bp, Homo sapiens
gtgagaaggatgagaaaagcgagagtgatgatgagaagcgtgagcacgatgaggatgctaagaaggacttcgtaaagatggagaagagtggcgtgacccacgctgccgatgtgcggaatcagactgagcaccagccctactacacatcgtctcctaacaggactgtctaggaatggcatcagactatacactgtcatgagcaggatcacactgccgtgcccacagaccagac

SEQ ID NO: 663710 - DNA, 373 bp, Homo sapiens
acggacactggctgattttaaatgagcgtaaaaggccgtctaactaatgcaggttcccctatgcatatagaaaaggctaagtatgtttggtcacttcatatgtaacaaggtgccctaatgttgtgctgtattcctgtggctttttccggtggaaccattccattcaggagcaaggagcaccattgattccaatcttgtggtggtgtttactaacccttccctgaggtttgtgtatgtttggatatttgtggtgttttagatcactgagtgtacagaagagagaaattcaaacaaaatattgctgttcttcagttttgtttgtggcatttgaaattactcaaatttaaaataaattactgggctgtggttaaga

SEQ ID NO: 663711 - DNA, 316 bp, Homo sapiens
aactgagcaactgcaccgagcctgggtcagcccaacacagggcgggtggacgtgctaggcgaggaacaagcaatcatgtttgcgtccccgtccgtcacattttccaaatcccttgcaggcagatagatactgacccataatatttgccgtgtcttggaaaagtcacaggtgacagacctcctgtagtcccacactttggagggggtacatgttcaagagaccctgacaaggaagggagttgagcgctgggtaggctactgctgaacagtgatttcttacagaatatatctcagagatgccagaaaccatcatctga

SEQ ID NO: 663712 - DNA, 401 bp, Homo sapiens
agagctattgttagtgtctctatgagcaatcgagtagaacttacacatcctaggatatctatcttcgtaattaattcttaaggtctcaagtgactcacttcatgttgtctctagatgtacatacccccaagcaagttgggggaactgagataacaattaaatcaccttctctgaagttctggctctgcagagaccaaaccttactgacttgtacagacttgtacaagtaaagacttatacagatagattttagtttcaagttacaatccgtatcttcctctttttttttttttttcctggtgtgggagtctaattaagaaaacgggataaatgacgctgtaatcaaaagttgcctggggtcctgatattcttctctgacctcaattcccggattgcatata

SEQ ID NO: 663713 - DNA, 840 bp, Homo sapiens
  misc_feature (60)..(60): n is a, c, g, or t
gctcagacattgggggacactctcagctctcggcgcacggcccaaggttccttcaaagangtctacatgtatcacgaaatccatgtgcaagctcagcttggagggtgatcacatctacacccccaagtgcatatgggtctgtcaaagcctataataacttagatgctgagcgggatgctttgaactattgaaactagaccatcaagaccaaaggtgtggatgaaggtcatccattgtcaacattttgagccaaccgtcagacaatgcagcagagacaggatatcgccttcgcctaaccagagaaggaccaaaaaggaacttgcatcagcgactagaagtcagctcttatctggcacacctggcgcacggcgcatgtagggcctattgaagacaacctgtctcaggatgacgcttctagtagactaaatagcttccatgaagggcgctggtgaaccgacagaggactcatctcattgacgatcatctgctccatgaaccaaccaggcagctgcaggcacattaacagagtctacaaggataatgtacaagatgtgatctggagcaaggacattatttcggatcacatctggatgacttccgcaagctgatggttagccctggctaagggtagcaagagcagaggatggctctgtgatggattatgaactgattgcacaagatgctcggggatctctcatggaagctaggagtgacagacggacaaggaacttgatgttcccaaagtgtgctccataatcatgaaccgaacggaccgttggcccaaactcaaaaggtaatgataggttcaccagttacagccttatgcccggttggaaagga

SEQ ID NO: 663714 - DNA, 589 bp, Homo sapiens
catgtaaagcctttaaagcgaatcctcagaaatggtctaaataaaacacttgatatgcctagaaaaaaaaaaaaaaaaaaaaaaaaaaaaaaaaaaaaaaaaaaaaaaaaaaaaaaaaaaaaaaaaaaaaaaaaaaaaaaaaaaaaaaaaaaaaaaaaaaaaaaaaaaaaaaaaaaaaggggggagaaaaaaaaaaactttttgccccccttgccccctctcttttttaatcctgaaaattttttttctccccccccattttgagcctttttggcccattccccctttaggggggggtttaaaaaataccggggccggtttttaaaaacggggggggggaaaaaccccgggggtcccccaattaaaccccttggaaaaaaacccctttttccccgggggggtaaaaaaaaaaaggcccccccccatccccttttccaaaaatttgccccccttatgggggaaaggaaatttgaacgccttattttttttaaaaaaccccggtaaattttttttaaaaacgttttttttttaaccaaaaggcccaaatggggaaaatcccttttttaaaaaaatttttaagaccgcgccc

SEQ ID NO: 663715 - DNA, 2722 bp, Homo sapiens
cccgggggagttgatagaagggtccttcccaccctttgccgtccccactcctgtgcctacgacccaggagcgtgtcagccaaagcatggagaatcaagagaaggcgagtatcgcgggccacatgttcgacgtagtcgtgatcggaggtggcatttcaggactatctgctgccaaactcttgactgaatatggcgttagtgttttggttttagaagctcgggacagggttggaggaagaacatatactataaggaatgagcatgttgattacgtagatgttggtggagcttatgtgggaccaacccaaaacagaatcttacgcttgtctaaggagctgggcatagagacttacaaagtgaatgtcagtgagcgtctcgttcaatatgtcaaggggaaaacatatccatttcggggcgcctttccaccagtatggaatcccattgcatatttggattacaataatctgtggaggacaatagataacatggggaaggagattccaactgatgcaccctgggaggctcaacatgctgacaaatgggacaaaatgaccatgaaagagctcattgacaaaatctgctggacaaagactgctaggcggtttgcttatctttttgtgaatatcaatgtgacctctgagcctcacgaagtgtctgccctgtggttcttgtggtatgtgaagcagtgcgggggcaccactcggatattctctgtcaccaatggtggccaggaacggaagtttgtaggtggatctggtcaagtgagcgaacggataatggacctcctcggagaccaagtgaagctgaaccatcctgtcactcacgttgaccagtcaagtgacaacatcatcatagagacgctgaaccatgaacattatgagtgcaaatacgtaattaatgcgatccctccgaccttgactgccaagattcacttcagaccagagcttccagcagagagaaaccagttaattcagcggcttccaatgggagctgtcattaagtgcatgatgtattacaaggaggccttctggaagaagaaggattactgtggctgcatgatcattgaagatgaagatgctccaatttcaataaccttggatgacaccaagccagatgggtcactgcctgccatcatgggcttcattcttgcccggaaagctgatcgacttgctaagctacataaggaaataaggaagaagaaaatctgtgagctctatgccaaagtgctgggatcccaagaagctttacatccagtgcattatgaagagaagaactggtgtgaggagcagtactctgggggctgctacacggcctacttccctcctgggatcatgactcaatatggaagggtgattcgtcaacccgtgggcaggattttctttgcgggcacagagactgccacaaagtggagcggctacatggaaggggcagttgaggctggagaacgagcagctagggaggtcttaaatggtctcgggaaggtgaccgagaaagatatctgggtacaagaacctgaatcaaaggacgttccagcggtagaaatcacccacaccttctgggaaaggaacctgccctctgtttctggcctgctgaagatcattggattttccacatcagtaactgccctggggtttgtgctgtacaaatacaagctcctgccacggtcttgaagttctgttcttatgctctctgctcactggttttcaataccaccaagaggaaaatattgacaagtttaaaggctgtgtcattgggccatgtttaagtgtactggatttaactacctttggcttaattccaatcattgttaaagtaaaaacaattcaaagaatcacctaattaatttcagtaagatcaagctccatcttatttgtcagtgtagatcaactcatgttaattgatagaataaagccttgtgatcactttctgaaattcacaaagttaaacgtgatgtgctcatcagaaacaatttctgtgtcctgtttttattcccttcaatgcaaaatacatgatgatttcagaaacaaagcatttgactttctgtctgtggaggtggagtaggtgaaggcccagcctgtaactgtcctttttcttcccttaggcaactggtgaactgtcatcacagagcctagaggctcacagcctcctggaggcaagcagcctccacttcggcatcacggacaatagtaaccaggaaaccagcgctcgcgcgggctagccggcactgcagcaccctccacaccagaatggaggacactctcgtgcgtctgctgcctcaggaatctcctgaccactcgtactccctccgacttctctagacatctactcctccctgctagcttatccgcattcctcctcttccacctcctcatgcgacgagagcgcccaacccgactcacacacgtgaacctgacctgccgcgcactatgtcgcagctcccacccgaccagacggacaatacgcgccagcgactggtccccccacgacgactccctgccaaccaccgcgacagaaccacctacgaccggcactccctccaacccctgcgaaggcacctcaaccccatggaatcctggccagatggtcccatcccaattcagcttcaggcaaaccgaaatataattaagtcctcctatagaccctacactcccccatccctcaccctcatatttcttaacgggacccctggacaacattaccaccagtccactcccaaccgacac

SEQ ID NO: 663716 - DNA, 2687 bp, Homo sapiens
gaattcctgacacgctcctgggtcgtaggcacaggagtgggggccaaagcatggagaatcaagagaaggcgagtatcgcgggccacatgttcgacgtagtcgtgatcggaggtggcatttcaggactatctgctgccaaactcttgactgaatatggcgttagtgttttggttttagaagctcgggacagggttggaggaagaacatatactataaggaatgagcatgttgattacgtagatgttggtggagcttatgtgggaccaacccaaaacagaatcttacgcttgtctaaggagctgggcatagagacttacaaagtgaatgtcagtgagcgtctcgttcaatatgtcaaggggaaaacatatccatttcggggcgcctttccaccagtatggaatcccattgcatatttggattacaataatctgtggaggacaatagataacatggggaaggagattccaactgatgcaccctgggaggctcaacatgctgacaaatgggacaaaatgaccatgaaagagctcattgacaaaatctgctggacaaagactgctaggcggtttgcttatctttttgtgaatatcaatgtgacctctgagcctcacgaagtgtctgccctgtggttcttgtggtatgtgaagcagtgcgggggcaccactcggatattctctgtcaccaatggtggccaggaacggaagtttgtaggtggatctggtcaagtgagcgaacggataatggacctcctcggagaccaagtgaagctgaaccatcctgtcactcacgttgaccagtcaagtgacaacatcatcatagagacgctgaaccatgaacattatgagtgcaaatacgtaattaatgcgatccctccgaccttgactgccaagattcacttcagaccagagcttccagcagagagaaaccagttaattcagcggcttccaatgggagctgtcattaagtgcatgatgtattacaaggaggccttctggaagaagaaggattactgtggctgcatgatcattgaagatgaagatgctccaatttcaataaccttggatgacaccaagccagatgggtcactgcctgccatcatgggcttcattcttgcccggaaagctgatcgacttgctaagctacataaggaaataaggaagaagaaaatctgtgagctctatgccaaagtgctgggatcccaagaagctttacatccagtgcattatgaagagaagaactggtgtgaggagcagtactctgggggctgctacacggcctacttccctcctgggatcatgactcaatatggaagggtgattcgtcaacccgtgggcaggattttctttgcgggcacagagactgccacaaagtggagcggctacatggaaggggcagttgaggctggagaacgagcagctagggaggtcttaaatggtctcgggaaggtgaccgagaaagatatctgggtacaagaacctgaatcaaaggacgttccagcggtagaaatcacccacaccttctgggaaaggaacctgccctctgtttctggcctgctgaagatcattggattttccacatcagtaactgccctggggtttgtgctgtacaaatacaagctcctgccacggtcttgaagttctgttcttatgctctctgctcactggttttcaataccaccaagaggaaaatattgacaagtttaaaggctgtgtcattgggccatgtttaagtgtactggatttaactacctttggcttaattccaatcattgttaaagtaaaaacaattcaaagaatcacctaattaatttcagtaagatcaagctccatcttatttgtcagtgtagatcaactcatgttaattgatagaataaagccttgtgatcactttctgaaattcacaaagttaaacgtgatgtgctcatcagaaacaatttctgtgtcctgtttttattcccttcaatgcaaaatacatgatgatttcagaaacaaagcatttgactttctgtctgtggaggtggagtaggtgaaggcccagcctgtaactgtcctttttcttcccttaggcaactggtgaactgtcatcacagagcctagaggctcacagcctcctggaggcaagcagcctccacttcggcatcacggacaatagtaaccaggaaaccagcgctcgcgcgggctagccggcactgcagcaccctccacaccagaatggaggacactctcgtgcgtctgctgcctcaggaatctcctgaccactcgtactccctccgacttctctagacatctactcctccctgctagcttatccgcattcctcctcttccacctcctcatgcgacgagagcgcccaacccgactcacacacgtgaacctgacctgccgcgcactatgtcgcagctcccacccgaccagacggacaatacgcgccagcgactggtccccccacgacgactccctgccaaccaccgcgacagaaccacctacgaccggcactccctccaacccctgcgaaggcacctcaaccccatggaatcctggccagatggtcccatcccaattcagcttcaggcaaaccgaaatataattaagtcctcctatagaccctacactcccccatccctcaccctcatatttcttaacgggacccctggacaacattaccaccagtccactcccaaccgacac

SEQ ID NO: 663717 - DNA, 409 bp, Homo sapiens
  misc_feature (326)..(326): n is a, c, g, or t
cattgctcaagtataggatccccccaaactctgaagtagagcccagaggttccgcacccctatggaatggcgcactctgttgctgaccacccagtagccatcagagagtcgcagccacatctgggtaggcacggccacgtggcattagagtaactgaatggtgccagtgtgggggatagagcccaggaacttcgttacagcttcctcgtggtatagagcctgtgggaacacattgctgaagccaccacctgtgatatagcccacaatttcattgtgtaatgaggaaaggttccgaaagtatgtgcctcccactgtggtcacatagngtctggagacaggagagatagggcgactcgggtgtcccccagacacagccccacacggggccacactgacacgtgagcgcgtg

SEQ ID NO: 663718 - DNA, 335 bp, Homo sapiens
  misc_feature (174)..(174): n is a, c, g, or t
attcggcacagattagtctattctcatgctgctatgaagaaaatacccgagactgggtaatttataaagaaaataggtttaattgacttacagttctgcatgaggctgaggaggcctcaggagacttacaagcatggtggaaggcacctcttcacagggcggcaggagacagantgagtaaagggaaaagccccttataaaaccatcacatcttgtgtgaactcactatcacaagaacagaatgggggtaaccactcccatgattcaattacctcccaccaggtccctcccaccacacatgaggattgtgggtactacaattcaagatgagattt

SEQ ID NO: 663719 - DNA, 686 bp, Homo sapiens
  misc_feature (156)..(156): n is a, c, g, or t
  misc_feature (197)..(197): n is a, c, g, or t
gggggccccccccccccctcctttttttcctcccagggcctcttcttggtggggccagaagggggcggtggattccccaatattagggggttgcctcccaacccaaaaaaaaaaattagacctggggcgctttgccccctccccccctcccccccnccgcgccgtggtttgttataaaaaaataggtttggcccggnccccccttcaggccaggggaaacggggcccccccttgcccttttttagggggcccccccggccctttcaccccccttcctgggggggtgttttcccggctttcctttttgggaggggcccccccccaagggggtttgggacccttttccgccccttttgggcttttaggggggggtcccccccccccccttcccccgggggccagggggggggccccccctttttttgtccccccccccccgggggctggcccccaatccggccttttttttttccccccccccccgggccccccccggggggggggaaacccccccggggggccgcccccaagagaaattttttttttccccccccccccccccggagctttttccgggggggggggccgggcccccggggggcggggggggcccccccctttgggggggggggggggcccccttttttccaagggtgcgggggaaaaaaaaacgggtttttttttta

SEQ ID NO: 663720 - DNA, 588 bp, Homo sapiens
ggtggtaggcagtagaatttgggcaagtctataactgagtagcactaaaatattagatataaggaaagtaagggcttgtatgtaattaatagacttgaaagaaaattacagaattattttcttaccagatatatgttatatttataactggcacatgtccagactttattgttaaatatgaatgcatatctcaaatacattttgtgtgagtgggcaaataaaatgcatggatacaataattaattgtctttataggcaataatatttacagttcgaaaaacatatattccccaaaatagagaagtcactagtctagatacagtaaacttcctttaaaactgaagttcttacttaattcgaattagatccagttagtaattagaccaatagtatatttactacttagatacagtagacatgatcttttgatttgagctatacaattattgtcaaagaatgtcagaagagagggacttagacatcatctaatccagcttcatgctcttaaggataaaaagcttaaggcctaagatattattttaatttcttatttcactacatgctatattaatgatataatttccaaat

SEQ ID NO: 663721 - DNA, 594 bp, Homo sapiens
catataacatttaattttttatacttacttagcttttaaattccatgacaaaaatgtttcatctgtacacataattactaaaattatttcatcccaccttttttaatatacattatgggtatttatttttttaaaaaagcaacaggaaaatattaatagatttaaataccccatgtaggcaaaacacactaatatttatggcttctaaacctgttagggatttccagggaaacttgttacaagtcataatgctttcataatctgccaggaaaagatcacattaacatccctatatgcttcagtacaaaggtatgctataaaccacactgggtaaaagtaatattcctggttttattttgggaagtaattattagtaagttaatgcttattaaatatatccttaaaaatttccatcacttcagaaacccataaagttagtgagctaaaggtttgtttttgggtattcttttgttaaattcaagtaaaacctttcatcttaaaagccaaaatggggcataatagctttacaaaggtgccccagttaaatctttgggacaggagacaggaagggtacctattcaggaacccctccaa

SEQ ID NO: 663722 - DNA, 872 bp, Homo sapiens
taggaaaagggactttattaaaaaaaagtcatctgtgattgactagttaaattaccatgctgttgacattaactcggggttgaaacctacctccgtcaaataacaaggggactctccaagcaaatgtctacacggcaatccaagcagaactcaaaagcccagagggagcacgggagacgaggccatcactccacttcccagggcgacaaccactttttggtaaacaccggtcagatgctaaaaatacggccttacacactaccgccaccaaagtttataagcaataagatcagagagcaggagcagcgtgcgagcacctctaacagtccaggctgaggcgctgaaggtgagttcccagggtgaggtccactctgcccggtctcgggccgcaccagggggctgcgggggcctgatagccgaggggaacaacgccacctacgtgcgattagggtcgggaagattccggcagtcaactcgggcctcatcgggggcgcgggctcccgggaagcctcggaggcagtgtgtggccccctcggcctcgggggagctgggcaggaagaggcgtggctaaaggcgggcccctgggtgtcaaaagcatccaggctgggccgacatggggcagtgaggggcagggggtctgcccggaaagccacaccggaaggcggggagctcgcacaagcaacaccgcccgcaaagagacgtctaaaaaccaccggtggtgaggaaaagtcggctctaaagactcctgagtagagtcctctcggtgccggcgctataagaagagggggagacacacgaagcgggttccgacaacgaggaggcaacaaagcaggaaccagaagatcgccgcagcggcccacgcccagacccac

SEQ ID NO: 663723 - DNA, 246 bp, Homo sapiens
  misc_feature (47)..(47): n is a, c, g, or t
  misc_feature (65)..(65): n is a, c, g, or t
ccccaggaggtagcaggtgacacatcgttcttcaaagagggtgttcnagcgggtgcccctctacngcccaccacagtataaagagaaaggagacagctggtgtgctggggggagggggagaggggatccagggttagtaggctaagaaccaactcccccttctgtaaccacagttttccggagggggccctctcccctaaccaccgaacacggtatagggagatcctcatagcagtcgacgctgca

SEQ ID NO: 663724 - DNA, 419 bp, Homo sapiens
cgcaattctgttcaaagtgctcactatgttgaagcatgccagaaaaactcctccagactttggaattctcaggcgcaaattgatcaaaaattagctaatcagattaatgatctctgccaaagtgtaacctggctgggagatagagttatgaacttgcaacaccgtatgcaattacactgtgattggaatacttctgattattgcataacgccttatgcttataatcaagatcaacatagctgggaaaatgtctcaagacatttaaaagcctgggatgataacttaaccttggatatttcacaacttaaagagcaaatctttgaggcttcacaagcccatttatccacagttccttggctcacacatttttggaagggcataactaaaaatactaaaatgattttaatcccttcaaatgg

SEQ ID NO: 663725 - DNA, 261 bp, Homo sapiens
tcagaggatccatgacgaggagaaaggcttcagcagaacaaaagaggagcgacgaactcgaggagctaaaagcgaggcgcgggaaggggcctttggccacggtggattaacgaaatctggcaaaaagtaagctgttccttgtgccttggggagatgggtgaccttttattccatctgtatttaaaaccttctctatatcctggcaataaacatcttttggccaggtattagctgggactaaggtgtggcttggaaatagct

SEQ ID NO: 663726 - DNA, 465 bp, Homo sapiens
  misc_feature (320)..(320): n is a, c, g, or t
  misc_feature (373)..(373): n is a, c, g, or t
gctcagccgtgccccctcaagactcttgtgaagagagacggatatgttcacacctaagcgtcagtattttccctgctaagggttattacgtcttttcccctctcagatcttctttgaggccattcctccttgctccacagctcatcccagcgcgttggtctttactgcttgtatgtccacgttgctcgactatggaatgcagctgcatacaagcttcagttcgtagagaagcccttgttgttcaaattctttttccctaaatcctctcagagtaccaaaatccccttctcatcactcccctccaaagaggtgactgggcnctgcctctgtttgacaaacctctaacccaggtctgacacagctgttctgtccnttggagctgtaaaccagagagctgctggggattctggctagtccgtcacacctccacccttgctctcacccaggagatccagtcttgtgttg

SEQ ID NO: 663727 - DNA, 932 bp, Homo sapiens
tgcttggacggaacccggcgctcgttccccacccctggccggccgaccatagccagccctccgtcacctcttcaccgcgaccctcgtgactgccccataggcccccgccgcctgcctccagcgcctgacgcagaccactcggcgcgcccggcgctgtcgccctactccttaggtcgcccgtcctattgagcggacccgctgtcctacccatcgcgaagagttggccccatgtaactgcctacctagtggatctccatgtagggcgcggccgagtctcacctcgtcctaggactcctgacccgtgcgcaagcgtcctacgcgcttcccattacgggttctcaccttggtccctactggttccttaagctatcatttcttgacaccgtcagaattgcacttgttgaggcttttctggaccacggaatctttgtagggcaacaagacagttaacctttatacgtataccaacttcgatactttcgttcaacttgcacggtgcaaggaaggggcgcaatgaccaaattgcctttggcagaaacaacacctcggaatttgtacaacgggccctttggccaagtaaaagctccaaaacccggaatcgggccggcgcgggcaccggtaagaaccttcggtttcccctttcgaaggtgcatagataccaaatgtgaacgaagcccgaaggcaacctggttttgaaaatttgcccaaccgtgggtgttgccaaagccacaggaacccgggggggctcctctttgccccccgaagttttgcccccccacacccttggggggacacaacacttttggctttgggatccaaatctttctcaaaagaccaaatattgtttttgggcccgcttaacgacaaaagccaggcgacccatacagttgggttccgcgcatctactctccagaggtccccgaacgtaaccc

SEQ ID NO: 663728 - DNA, 263 bp, Homo sapiens
gccatgaagtccctgtctctgctcctcgacatgtggcttatgggcctaggcagacctgcctgtctctagccaggcaccctgctggtgcatctgcagtgtttggttctgatggcaggcatgcagcagcaggcacaaggtgcctggcccaagcagcacccagtgtgaactagcattgtgagcagaccatgggacaccagagggagcaaccagccagcacccagtgccgagaccatacgacaccatgcagcatcatatcgtcagat

SEQ ID NO: 663729 - DNA, 400 bp, Homo sapiens
gtagccaggctagagtgatggtgtggtctcgagcacactgcaactaccacctcctgggttcaagcgattcattctcctgcctcagcctcccaacgtgctagcatctcaggcgtgaggccactgcacgcatggaccgaaagcaagctatctcatcccaagcgccaacctttatcaagtctagcctagtcttctatcgtctcctatgtgtccctcatgagtgatcacttctgagtcactcctgcgtggagagctcagccactgggggcgatatctttcccattggcacagtgtggttattggaagtatcctctttttagaacagaacacggattggaggtgctctctggggatatcctcctaccaagctgactgtagagatccttgtggtgcacagggagga

SEQ ID NO: 663730 - DNA, 136 bp, Homo sapiens
tggcgtatctagaggatccctatgagtaggaagatcagtgtttgattttcagtccttgtgatagtttgctgagaatgatggttttatgttgttaatgtggtgggtgagtgagccccattgtgttgtggtaaatatg

SEQ ID NO: 663731 - DNA, 824 bp, Homo sapiens
  misc_feature (497)..(497): n is a, c, g, or t
  misc_feature (505)..(505): n is a, c, g, or t
gggagaaaggagagaaaggaaagtcgcgagtgagcctgccgaccaccatcagcgcagcagtcctggagctgtgagtgagattcgggaccgtacattcctgacctacccctgtcgtcccgcacatccggccgcttctgtccatcgcgtatcccactatccacagcacaatctcgcttaaaatatcactgggtgcggaatatacctcaattgacacgttacgtatggggcgatgcaggtaggacattgggccgttcaccctcgtagcgatattctaccatagagaaggccactaatcagtgacaaactcgggcagctgcagatgtcggttcgatcccatgatacaaaatccctcgaagaaataacaagaaagcagagacagtgaggagagagagattcaacgcaacagtaccgcaggaatgcaagaagagccagatgatgacgcgaagtacagacactgaacccgaaagaaagtgtcgaccagacagagggcaatgcanactaaganctcaggaccgttgagggcaacagcgggtgggcacccccccgaggaacgctgggtccgcatccaacgcgtggtctcctgtgcaatagacgagtcagtagtcacaacccacggcatacgaggtaggcacgcagctcagggtccaggatcctgtctcggatggcccatctacctcgtctccggcatggacttatgccgatcacgagactcacgatcaagagcagggggtcacggaccgacgggggcgttgacgtgcacggggtgcgcagggagacacgaccgttttggggactttgtggccggcagactcgtcgtgcttcgt

SEQ ID NO: 663732 - DNA, 696 bp, Homo sapiens
ggttccggactccagctgtctcgtcttcagacagaagatgaagaacctcggggtggaccatgggtatctcagccctggcagtggtgaatgtcagctcagcctcagaggttgagcttctacattgatataggacatgatccacatcgcgggcacctaagggtcggtccaggcagtttatcggggatttcttgcagtgccgtcagatcctagcaacattttggaggagcttatactctgaaccctgaatgaagatgggagacacgaggaccttggatgcatattcgactatcaacagttgcgagcgtaacccttagtatgtggactgtaattgatagggcgaggaacgtggttatcttggcttacaccggtgtacaaacccgtttgatcgcgtacgcattcatgcccactctaagggcccttgtcagacctcacgtataaccagacgtttagaagggaacccgaaagctggttctcaacatgttggactcttcgacgctatgaaggaatcgtttgggaagtctcacgagaatatacaacataatagacataggacatacataaagagaggcggtggggtcaggtgacgtgaggtgaagggggtcaaaatgtggcgtgaaggaaagtccaagggggggctttggcgcaaatgaaggtagctgcggggagggaggttggttgaggggtgaactagggggg

SEQ ID NO: 663733 - DNA, 963 bp, Homo sapiens
gtccaagaaagagcaagagaggcatgatcctttatgtcacctattctcctcctgaagatgaccatgccatcatatttggcatctatctgtttgaagccagttgctaggtccagtcttctcttgagggtgggcatttacagcacagcagtgtgcaatcacacaggaggttaaaacatcacaccagcacaggcgacagcatgctatgtcacaggctggtgcaccattcttcacacaggcgcagtatggtccaagcacatgcaatcaagcaaccaaggcatttcaccagtcatatcccaggggtatagtgggcagcacagggcagcagtcatagcaatctcatgtctcagcgggtcaatgggggaacaatctcaccttgccaaggtaggttcgccataattgcagcatcaggccttggctgtcgcacatggatataccaggcaagtgtaaccagcatgcacagtaatcacgagcagcaaggcacccttgcattgaattccgtctttgtacgatcaccattctcactttaaagtttgggatatatctagggtgtacaaccccacgcccgggaccccgaaaggctacgaaggtcattagcagggagggagatactggttctcttcccagcagcaccacctacactagcaggttgcccagttgacacggctacgcgacagttgccataaatgacagggcaactaggacagtgtaccagggaccatattatcaggaccctttcataaatagtgtctcataggcgaggctcctgggtgacctacctttggcctacgttacgaaaattcaccgtttcccaagaaacgccctgcttaggaacggcaagtatagccatggttattcgggcccacacatatggtgtgccccattggatcagtgtactgtatatcctgggctatcacgggacaatctcccggcattacgcacacgggggcactagaatgtgtgggc

SEQ ID NO: 663734 - DNA, 117 bp, Homo sapiens
atcgtaaataacaatagattatttctggaacctcgtatacacgttgaatactcacatagtcaacaacgtacattaaaaacggaaacaaattcggaccttgaacattcttttactttt

SEQ ID NO: 663735 - DNA, 893 bp, Homo sapiens
  misc_feature (14)..(14): n is a, c, g, or t
  misc_feature (44)..(44): n is a, c, g, or t
  misc_feature (52)..(52): n is a, c, g, or t
  misc_feature (60)..(60): n is a, c, g, or t
  misc_feature (62)..(62): n is a, c, g, or t
  misc_feature (88)..(88): n is a, c, g, or t
  misc_feature (94)..(94): n is a, c, g, or t
  misc_feature (100)..(100): n is a, c, g, or t
  misc_feature (129)..(129): n is a, c, g, or t
  misc_feature (144)..(144): n is a, c, g, or t
  misc_feature (146)..(146): n is a, c, g, or t
  misc_feature (149)..(149): n is a, c, g, or t
  misc_feature (154)..(155): n is a, c, g, or t
  misc_feature (159)..(159): n is a, c, g, or t
  misc_feature (162)..(162): n is a, c, g, or t
  misc_feature (195)..(195): n is a, c, g, or t
  misc_feature (213)..(213): n is a, c, g, or t
  misc_feature (247)..(247): n is a, c, g, or t
  misc_feature (251)..(251): n is a, c, g, or t
  misc_feature (253)..(253): n is a, c, g, or t
  misc_feature (255)..(255): n is a, c, g, or t
  misc_feature (279)..(279): n is a, c, g, or t
  misc_feature (281)..(281): n is a, c, g, or t
  misc_feature (317)..(317): n is a, c, g, or t
  misc_feature (327)..(327): n is a, c, g, or t
  misc_feature (344)..(344): n is a, c, g, or t
  misc_feature (388)..(388): n is a, c, g, or t
  misc_feature (390)..(390): n is a, c, g, or t
  misc_feature (411)..(412): n is a, c, g, or t
  misc_feature (414)..(414): n is a, c, g, or t
  misc_feature (423)..(423): n is a, c, g, or t
  misc_feature (433)..(433): n is a, c, g, or t
  misc_feature (443)..(444): n is a, c, g, or t
  misc_feature (504)..(504): n is a, c, g, or t
  misc_feature (556)..(556): n is a, c, g, or t
  misc_feature (560)..(560): n is a, c, g, or t
  misc_feature (565)..(565): n is a, c, g, or t
  misc_feature (575)..(575): n is a, c, g, or t
  misc_feature (585)..(585): n is a, c, g, or t
  misc_feature (649)..(649): n is a, c, g, or t
  misc_feature (727)..(727): n is a, c, g, or t
  misc_feature (729)..(729): n is a, c, g, or t
  misc_feature (773)..(773): n is a, c, g, or t
  misc_feature (790)..(790): n is a, c, g, or t
  misc_feature (805)..(805): n is a, c, g, or t
  misc_feature (809)..(809): n is a, c, g, or t
  misc_feature (885)..(885): n is a, c, g, or t
tcggtttttctttnaattatttaccaaaaaaaaaaaaaaaaaanagtgattntttccctncncccccaacatttccgtttaccaaggncgagtnggaganaaattcattgaacaacgatttgtgccccnggcctggagcaaatncntcnccccnncccnacnccaccccaggcagcagggacagggcaaagggcnccaggcagaaatcctggnggctgggcagcagagtggcagtttggcgatcgcntctncncnccattcccagagcattcagacccntncccgtctgtccccccaccccaagtcccccagtcccncaaaggaggnagggagtggggactgcnggaagcaggacaggggcccgggtggcctgggcagccccccacananctggcagaggggacaaccccnncntctattgcncaccctggcncagccccccnnccccgagcagtaggccacaaaatgaaaaactttccaaattcagagagccgcggtgctgtntgccaggctcaaggaggggaggtgtgtggttgtgtggcttgttctggaaganaganatgtntttttaagtnactccatganggggccaaggcaacaattttgcctctttgcataaggggtctggacatctcagggtcctgtagtnactgggcctcttcccaggcgagttcagaagcctcggaagaagcctttcccccaccggcggacctcctggctccatcanangaagaggcagcccccaccggccacaccagcccctccggactgtnacgacttttggccactnggggcgacctctttntctnaacacctggagaattctgtaaaatgaccctggagaaaaaccttttatactacatgtttttccataaaatggcagcnaagtcccc

SEQ ID NO: 663736 - DNA, 176 bp, Homo sapiens
accgtgccgtgagactcatatctcttctctcttttttctagcagttttattgagatggaatccacatcccatgcaattcacttacttcaaatggatattcaatggcgtttaactatatatcacagaccagtgcaagcaccaaccttagatccgttttagaacattctcattagccc

SEQ ID NO: 663737 - DNA, 239 bp, Homo sapiens
  misc_feature (45)..(45): n is a, c, g, or t
ccctttttccttttttccccttttttggcccgcctttcccatccngggggaaactttttgattggcagtttgggtcccaaccagggattgttttggtttttgttccctttttgactgcccaaggggttcaaaaccccagcaatcccttcctttccctccctttttttttggggggagttggaagggactaaaattgtggggggaaggtagggggcccctcaataaaagggaaaccccca

SEQ ID NO: 663738 - DNA, 139 bp, Homo sapiens
cacccttatcacaatacaagaacactactgattactcctgccatcatgacccttggccataatagtgatttatctccacactagctgataccaaccgaacccccttacgaccttgaccgaatggggagtccggaactag

SEQ ID NO: 663739 - DNA, 916 bp, Homo sapiens
gtgtactacccggtaaagggctcgaatggacgtctatccgtgaaggttctctacctgtaccctgacggacaacgtcattatgatttgagattattccttaaccataccagtattatttgacgcttactgcatctgcactcgagaggatggttgcttttgatcaaccatgctgccggcctgatagtagtcttccaagcagccaatggtggaaggagtctacacagtagcattgtggtggattcctgaaagtctccgatacagcataggggcctcgagcgtcactgggttgttgagtcaaccttcatgcacgctgtgaagattactttggcgagctacaggttgctcaggacagatcaagttgggctaaatgcattattgcaacggcctgatgatgattccatgtcgttatagtgatactgcagtagggtgcgatgctgatctataatttgttattagccgatcattctggttagcagtcaattgcagaagaaactgttagacaattgtggtatgaagaggatatcggagtgtcatggttcttagaagtgattagctcttgtagatagaccgaggtatttggcaaataggaggggcctaagcggtgaggatgtttgggcctcagatgatgtccggtgtcttgaatcgcttaggtcagatatggtccactacatgctactggcaccctgtgcctccttgaaccatgcggtttcaagcatagaagggtgacgccacggtccagcaattagtctttgggttctggcaaccttggctgggctggtttttgccgctcacggggtgaggacccccgggaggggagaccagggtctgcgacacggttgggcccacctgtcccccgtgctttgaaagccagcgcacaggaacaccgactttcttgtggctcgcacacctccctgaa

SEQ ID NO: 663740 - DNA, 178 bp, Homo sapiens
tggctgcagttaaaaggtcttttgcattttgctctggctttcaggccaaaagcatgcatttttttacaagagcatcccaacaacatgctgtaaatatttaaagtttaaccttatgtgttgatatttgaaagaaaagccctttgaatatttccttttttaaaaataaaattgcccatta

SEQ ID NO: 663741 - DNA, 843 bp, Homo sapiens
  misc_feature (1)..(1): n is a, c, g, or t
  misc_feature (183)..(183): n is a, c, g, or t
  misc_feature (191)..(191): n is a, c, g, or t
  misc_feature (200)..(200): n is a, c, g, or t
  misc_feature (363)..(363): n is a, c, g, or t
  misc_feature (370)..(370): n is a, c, g, or t
  misc_feature (397)..(397): n is a, c, g, or t
  misc_feature (480)..(480): n is a, c, g, or t
  misc_feature (519)..(519): n is a, c, g, or t
  misc_feature (548)..(548): n is a, c, g, or t
  misc_feature (573)..(573): n is a, c, g, or t
  misc_feature (575)..(575): n is a, c, g, or t
  misc_feature (633)..(633): n is a, c, g, or t
  misc_feature (641)..(641): n is a, c, g, or t
  misc_feature (653)..(653): n is a, c, g, or t
  misc_feature (670)..(670): n is a, c, g, or t
  misc_feature (739)..(739): n is a, c, g, or t
  misc_feature (779)..(779): n is a, c, g, or t
  misc_feature (824)..(824): n is a, c, g, or t
nttcaagacaccgaaatcagttaacaaatataagaactaaacattaattagtgacagtaaaatggcagaaagcaaatataaaatacaaaaaacagctttactcagactttttgactgccatgtcctcctttagaaggactacagtgtggctacttggtctcttctggggcagaatgtggcagncctgaggngtgaaagcntctgccggtgacagaaacagctcctaccacagtaggggtggtctcagataaagcagggatggcttctggagtggaagtggctcctgtgtcactgggggtggtgtcagatgtgaaaggctggagtgtcttgacggcagcgggtgtctgtgggactgggtatgangtcagcntgaacagtcatggcctcttcttctgtntccaattctgtttcttgattttgaacttcctcaccctcttctaccataagcaggtggtagttgtataaagtctgatgataatnatgtatagctgtattaaatgcaatgtgcaatgttgtatnaaaaagtttgccaatctggggccataatnttttaattatttgtacttcatgaananggtctctctccattctttctagtagttgggaaaggttctgttggaattatatgcaatnaagggggngagcggtgagcngactgaaagctggagtnagtacaaaacagttttggaagagggatactctggcgaagatataaagtccaagtttggctctagacatngccactaccaagcgacggacatccctcagatggcccactnccctggttcgtaccacacaaagaagaatatagttattctgttgancttgaaatctatcaacagt

SEQ ID NO: 663742 - DNA, 1336 bp, Homo sapiens
cagggaaccccgccccctgcctttccctctcccctagaaaagggggggcctgtctcacccccgagacctccatatggagcactatagtaccacatccgagaaaggctcatgtacagtcgcatatgctctatccacatccagagcacctagcatgattactcgtgcggtatgcagcaaatggccattggattcgagagaacctgatgttggagacacagtacgcgttggacattgcatcgtctggcgctagatgactgcggtgacacactcgtatgtcgcatattcctgcgctcactcgccttacgccgctccatctgtcgctcaacacgctgtacccaggcttcagcatcatgtcgcacagtgctcgtgcgctatcaagtcggatgtgcgcgagtgatcaataccgtagtgtgtgggcatacacttgatggatcacccctacgcactcaagagtcaaacttataggtcgcatcttaatccaagacatgaagcagacacaccctacagacatgatgacacacggacactctctgactcgcgacacacgacccacttgagtctcacacaagcgagggcaacacaatatctcactcccgacgtcgcgccaacccgcacttaatggtaatacatccaatgtgatatcaccacatcgacaacatcctatgtatttcctagtgcagacttggcaaatttccactcacgtgacgtatatgcagactacggatcaagcggtcgtcgactggtcagaacgtgatccacctcgaagtgacattcaaacaacgacaaacgatcggactcacagacatcagacatctagaagcacggcaacaacctaaatcatacactcagaaacacatcacggccacaccacatgctccaacttcctacaagaacaaactgccgacggcaccacatacaaaccaacaggcagaacagaaaagaacacgccacacgtgacataacgaactaacacaaccaccaacaacgacgcatacacagacactagacgggcacgcccagacgaagaccaggcaccatacgccaaaaaccacgatagcggacagacttaggccagcataggaaccgaccagcagaccagatgaagggacaccaagcacggcggagacagacgacacagagacaccaccaagatcgactccacgatgccaatgagaggacaacggccgcactacacatccacacaacataggcacacagcaatacgaatagagcacaacaacacaacgggtggacacaaaccgcacaaccacaacatgaggcatcgagcacacagcccacaacacaaaaaaacagcgcagcacaacacaccccacag

SEQ ID NO: 663743 - DNA, 1112 bp, Homo sapiens
tagcagtagcaaaaccattttttaagtgcaaaacaaaggctgggtccttgtgctgctcccagctctttgggtttacaaattaggtttgttgggcccacagaaggacggacctttgccccctttcagtgcctcccaggaaacaccttatgccccgtgctcgtggtgcagtgcgggtgtgggcgtgggccccacaggggtgtgcaaggagtgggagttagttgaagggaggttcgcgggaagaaggaagttcgggaaggacgcctaggtgggaacctgtgggcgggggttggggcagggttggcgggctcaagtttgggaaaaaactgtgtggttccagtgtgtggggtgccaaaaggggctctcgcagcgtgggtgcgctcacggtgctccggggtctcacacaaactctcccgtgggttcacacattgccggggagtaaaggagatgccgcctgtgcgcctcacaggtgtgctgtggggccaccacaaggggtttcggccacatcacaccttagagcagagggggtcctcgtcggtggcccgccctggggtgggtgaggcgtgggcgtcggcgtgacaagtggcgtgggcgtgagtcaccctgcgacactgttgtggacagcgcgagtgtgtgctgcgtgagacacagcaagccccgcggggacagcgcgcgctgtggtccccacagcatgtcacggagaaaaaaaggggggcttccccgctcaacagatcacccggtggggtagaacacctccacacgtagaggagtgcaagtagaaaacaggcgccgccctcagcggggaccatcatgtggcgcaccggcgagaaaacgcccccgatcaaaaagagaggaggacacagcagctgcggacccctgtgcacacccacccactggggaaaaaaaacttgcggaatgaaggggacggaaccacagtttttgccgctcctccaactaacggtggccccagaggaacaacgccgcgaactcgaagacacgaaggatcatccatacggaggaggcaagtgagaattatccaccagcgtcacaaccgccccgggaaagatgtcgtcaggtaatggagagcttgcgaccccaccacccaccacattgga

SEQ ID NO: 663744 - DNA, 1173 bp, Homo sapiens
gactatgattaacaatattgtggccgggtgtggtggctcatacgctgtaatcccagcactttgggaggctgaggtgggtggattacctgaggtcaggagtttgagaccagcctggcaaacatggcgaaaccccgcctctactaaaaatacaaaaaattagccgggcctggtggcaggcgcctgtaatcccagctacttgggaggctgaggcaggagacttgcttgaacctggaaggcggaagttgcagtagctgaaattgcaccactgcactccggctgggcaacagagtgagactttgtctcaaaaagacaaaaagaaagactatttttttcactactagggggggggatatatatagtatccgggatcgcctattttcgcacaacataggtaggaagagacgatttcggaatggctcctccatccacaaaaaattgacccaggtatgagggcgacggggggggcgcaaatacctgggatgtgcgatttccccatgaagtatatacatcccactggtaccctcatgggcttttgtaccctcatgattgtgtccacttacacacccgggtcaaaaactacgggaatacacccaggaagctatgactcgccacacacttcattcttggaacacccaacggagggccacacaagtggtccgacacacaatacggggggggccaaacactccaagaggtgtgccccccaaaagcggggggagacacggggggccccggaagacacggggtcaccgagtaccccggaaacctcggacacagcggcaggcttggtggagccagcgacaattcccccccgcaatgtcacagcctaccgcgaataaacccgcaccactataaacgacacctctcctccgttctcatgtctattacttcctcttcgtctatgtatacctttctctcgcgccgtcgatcgacagacgaaaagcaaagacacgacctagcgacgaaacaaacgacaacaatgcacaagaggaccaagccaccgagcagacgacaaacatcaagccaagaaacaaacagcacaaatcgaacaaccgccaagaacaacgaaccccagaaaagagcagacagacaccaacaaaacacacacgaccaccaacaaaaacacaagaccgaagcagaagaacacacgacacagacgacaacaacacgtaa

SEQ ID NO: 663745 - DNA, 384 bp, Homo sapiens
gtgctgtgtggccccttgccccccagtgtgctggatcgaaggggtattttgccactggaggaaagcggaagtcgatctcccagttctcaagagaccagtggcagcctcttgccacagagcccagtccccacagaacacctgtactcaaatgagatgccggaggacagtagcactcccgaagagatgccacctgcagagcccccagagccaccacaggaggcagctgctgctgataagtagcctatctatggcagagacttttgtttgggattaattacggctatgagagatttcaggtgagaagttcctgagacagagagcaagtaagctgtcccttttctgtgtttctctggtctgtaggcacccagatgcacactggcttct

SEQ ID NO: 663746 - DNA, 139 bp, Homo sapiens
tagatctccatctgctgagctgcctctgccttcctgaattcatggcatgaagagggctgacccattgaatggagacattggcctgagagtctcctgtagagcctgtgcgtgttcttccccctgcagctctgctcctgtt

SEQ ID NO: 663747 - DNA, 282 bp, Homo sapiens
agcctgggcgacagggcgagactccttttcaaagaaaaaaaaaacctgaaccagaggggtccaaagggcaagggacaaaacccggcgggggggacccaggggaaccttctccccttatgcctttccatccttgcaaagagcccaccttggctgggagccattttcatggcccacacagagtaggtaaagagtccagttttaagccggccacggtagctcacgcctgtacccccagcactggggaggacagggctgggggatctttggagcccaggagttcga

SEQ ID NO: 663748 - DNA, 424 bp, Homo sapiens
ggcactctaaccatcgtctaccgagcccagcgaacaaccagccccctgatgtgcgctgtctctacaatggtgtctgcctccgtgaccacggctaagcacgagcagatcgtggtcctcgactcgcccatagacctctaattccaaggccccttctcagatgtagtcactacaaatcttaaattgcggaatccatcgtatagataagtgtgtttcaaagtctatactaccgtgcctcaccggtactgtgtgaggtccaacagtgcaatgattgacccagggtcacctgtaactgtttcagtaatgctacagccctttgactatgatccgaatcacaagagtaaacacaaggttatggttcaattgttgctcaactaaacgcttcagatatagaacctgtgtgcaatgagacagaacctcatgaatt

SEQ ID NO: 663749 - DNA, 407 bp, Homo sapiens
aaccaaacggggccgggacttgggggcttacctgcgacaacgggtagcacaggccttttgggagggaaaaaatacccaggttgcaaagcctgaggcctgtgatcaaatgtacgaaagcttagggggactccattcaaaatactacaaacacaaggacccttgccccaaaaacaccagcttcagtggcctgttgttggaaaaggacaaggtgatcctgtccccagaccccttggaaaaggttaaggaaataaataaaggcatgtggaaaaaactgcaggaaaagtttgcccccaagggtcctgaggaggattataaggcctgaggtcaggccttaccttgggcacaaacctaggggtggagttttgtacattgccattgtcaataaaactgccccagtttccccttta

SEQ ID NO: 663750 - DNA, 250 bp, Homo sapiens
ccaatgcagcggactcggtagtacgctggcgctgcggcgcaagaaggtgctgagcaccgagtgcacatggcagctgtacgagtctggctcagagccgcggcgcggcggtcctcgacccccgaccgctgttcaacgatcctgcgtggacctgtctgacagctgacactgttggccccggtcgccggtcgttccaacatttctcacagtccactggtgtgcccgcgggagtacggctagcagagtcgaggcc

SEQ ID NO: 663751 - DNA, 349 bp, Homo sapiens
gggcccccaccatttccctttttttacctttggggttcctcccacctttgagggctccccaccaccaagggaaggcctgttggcccaaccctatttccttttttttttcacttataactcaaaaccctttttgtcctcaagcctttattaatttgtttgtgcacattaagcctaacggttttggggagggggctgacaaaaaaaacggaaagggcttggtccaaccaggtgactttcaaaattcttcaacagggaaagccatccctggtcctgttgttgctcaaggtgttctggtcttgttccgggttgaggttttggggcttaacatccaacaggaccttcaaaaggc

SEQ ID NO: 663752 - DNA, 152 bp, Homo sapiens
gtcagtcggagctacgctgcagaagaaccgcctgcgagtaactacaaagatgcctgtccgtgcgcattctgcggccgtagtcccggcctttcctcggcgggcgacttggttccagaatgctttgggtcagcggcattgctgcaaggacttca

SEQ ID NO: 663753 - DNA, 731 bp, Homo sapiens
tgacaagtgagaatggcagccgcaacacgtacctggtacactgcgagggctgtgcccggcgccgcagcgcaggcctgcagggcgtggtggtgctggagcagtaccgcactgaggagctggctcaggcctacgacgccttcacgctggccccagccagcacgtcgcgatgaggccggacgccccgcccgcctgcctgcccgcgcaaggcgccgcggggccaccagcacatgcctgggctggacctaggtcccgcctgtggccgagaagggggtcgggcccagcccttccaccccattggcagctcccctcacttaagtttcattacgaagaaacttttatgagacgatttgtacgccaaactatgagggaaaacagggaacaaaattgggaaccgggggagggggctggcagccccctcgcccataaggagcctcccgctcaccgacttgggccttttaagcaacagacacaaggaccaggctccggaggacggaagggggtcacatacgggttcccatcagccgtgccagaccgaccgaccgcccgggcagcagaatgccgcgcgagaacgaggtatgcaccataagacctaacgggagacggaggtcataaaagtggagaatcgtaactaatgggctttaagacccgtcaccgcggaaacctcatgtgaaaataccaagggctagcgtgtaacccgtgtcagtgacatttaagaacactggggaatcgat

SEQ ID NO: 663754 - DNA, 321 bp, Homo sapiens
agccggtaccttttctctctacagtcacaaatttctttttcttttttttttggaaatagagtttcgctcttatggcccgggcgggagttgcagggcttgatctcggcctccgggcaacctcttgtgccctccggggttcaagtgattctccgtgcctcagcctccgcgattagcggggattacgggcttggcgcaccaagcgcccagctaattttggtacttccagtaagaagatgggggtttctccacgtgtgggtcagggtgggtctcagaactcccagacctcagggtgatccacccaccttcgtccaaccaattatg

SEQ ID NO: 663755 - DNA, 155 bp, Homo sapiens
ccgctcttgcgtctatcagctgtcttgataccaacaagaggtcaatgttagaatccctgatggtagcaagatgcgcgtcttctcccatcagcggattttatacattgacctcttgttggttatcaaaaacagcagtctgatgggagcaagatgcg

SEQ ID NO: 663756 - DNA, 683 bp, Homo sapiens
  misc_feature (41)..(41): n is a, c, g, or t
  misc_feature (120)..(120): n is a, c, g, or t
  misc_feature (127)..(127): n is a, c, g, or t
  misc_feature (190)..(190): n is a, c, g, or t
tattattataattattatatacccagatcacttcaggcgtncattccagcagagtggccctcatccttcagaatgtggatctgccgaattgaagaggcctgatttcagctccgcaggggnggatttntgttttgttttcttgttatcactgtcacacagcttataacatgtatgcttttcagaatacagntgtctagccaagccatcaagtgtctgaaattcaatattgggttatgcaaatacagcaaacttttatttaagtagatgggggggggtggttaaaatattaggaatcctagaccatattttcaagtcatcttagcagctaggattctcaaatggaagtggtatatataatatgttaaaaacattttgctttcctggctaattatttgatccttttaaattcaaatttgaatcatttggcatgtatgattatttctggtaaatggacacaggatttaagatggatatttggggggtctatttggtctgatatcttttgggctaattatgagggacccagattggttctttggttctttttttcaaattgggggtagaaatactgggataaatatgcaggaggtgatataaagaattatatcccaaggggatataaaagccattaccgatgaaaaagaaaacaaaagggctcgggtggcctcagggggggagcttgg

SEQ ID NO: 663757 - DNA, 651 bp, Homo sapiens
  misc_feature (71)..(72): n is a, c, g, or t
  misc_feature (77)..(79): n is a, c, g, or t
  misc_feature (89)..(92): n is a, c, g, or t
  misc_feature (94)..(95): n is a, c, g, or t
  misc_feature (100)..(102): n is a, c, g, or t
  misc_feature (104)..(104): n is a, c, g, or t
  misc_feature (147)..(147): n is a, c, g, or t
  misc_feature (225)..(225): n is a, c, g, or t
  misc_feature (231)..(231): n is a, c, g, or t
  misc_feature (297)..(299): n is a, c, g, or t
  misc_feature (442)..(442): n is a, c, g, or t
  misc_feature (501)..(501): n is a, c, g, or t
  misc_feature (519)..(519): n is a, c, g, or t
  misc_feature (537)..(537): n is a, c, g, or t
  misc_feature (539)..(539): n is a, c, g, or t
  misc_feature (556)..(556): n is a, c, g, or t
  misc_feature (578)..(578): n is a, c, g, or t
aaaaaaaaaaaaaaaaaaaaaaaaaaacaaaaaaaaaaaaaaaagcccctccctctccttctgcacagganncactnnngggtaacagnnnngnnggggnnnanggggaggacacaggactagcccaccaccttctcctcccggtcncccaagaagactgcttatagagtggaggaggcaaacaggtcccctcaatgtaccagatggtcacctatagcaccagcnccaganggccacgtggctgcagctggactcaatgaaactctgtaacaaccagaagaaacctgctttgggatnnnagggaggataaagccatgcagggaggatatttaccatccctaccctaagcacagtgcaagcagtaagcccccggctcccagtacctgaaaaaccaggtcctactgccttctggatgctctcttgggccaggaagggaaaagtntgggaggaatgtcttccagctgctaacgagaagtctgcacccacttgaaagggttaggngaataaaaagcagcattntttaaagaactgcaagtngngcaccaccaggcccctnccttggactttcccgtcctggncagcctcagagcctgcacactgaagctgggttcaaatcctgggtccttcctgcctgaaaaaatgacccctgga

SEQ ID NO: 663758 - DNA, 968 bp, Homo sapiens
  misc_feature (41)..(41): n is a, c, g, or t
  misc_feature (120)..(120): n is a, c, g, or t
  misc_feature (127)..(127): n is a, c, g, or t
  misc_feature (190)..(190): n is a, c, g, or t
  misc_feature (819)..(819): n is a, c, g, or t
  misc_feature (829)..(829): n is a, c, g, or t
  misc_feature (968)..(968): n is a, c, g, or t
tattattataattattatatacccagatcacttcaggcgtncattccagcagagtggccctcatccttcagaatgtggatctgccgaattgaagaggcctgatttcagctccgcaggggnggatttntgttttgttttcttgttatcactgtcacacagcttataacatgtatgcttttcagaatacagntgtctagccaagccatcaagtgtctgaaattcaatattgggttatgcaaatacagcaaacttttatttaagtagatgggggggggtggttaaaatattaggaatcctagaccatattttcaagtcatcttagcagctaggattctcaaatggaagtggtatatataatatgttaaaaacattttgctttcctggctaattatttgatccttttaaattcaaatttgaatcatttggcatgtatgattatttctggtaaatggacacaggatttaagatggatatttggtggctctctattgcactgactactataggcctaaaataataacgtccgccattgctataattttttatttcttctcggcctgcgcttatcactcctggattaacactcctcctaagcgatccaactcacgctcttccaggcactatctaccccacttcccccgacctactacaataatcactctttgtaatcttgggtaatctatcgacccaaaaacaattcacaacccacgttactcagcctcgtcaaacctcacaaggagttccgataccccccaaccccctctctttcatctacatccatctttcaccatctataatataaaacaacgagcattagcntcatcggganacctggaactatctcttaatgagtggagatctcaatcatcctcccacacgacgtgctgtcgcaggacgaacggccggacatagtttgtatagcaattcgtcctccccacatacgtaacctattcaccctcacttcgccn

SEQ ID NO: 663759 - DNA, 238 bp, Homo sapiens
tactctagaggatggtttcttgccacgactcgtatggctggacagcacacatggagacgactatgacagctcaagccctacgagacaactcaacaatgggttacatggcagcaaagaaacacctggcgataaaccctgaccattccatcattgagaccttcaggcaacaggcacaggctgctaccaacgaccagtctgtgcagggctctggtcactcctctgccctttactgaaacct

SEQ ID NO: 663760 - DNA, 699 bp, Homo sapiens
  misc_feature (69)..(69): n is a, c, g, or t
  misc_feature (261)..(261): n is a, c, g, or t
tgtctggggggtggcccggggcgccccacagggtcctttccaaggggtgccccggttccaatttccccnacaacccccgacccaaggggctgggacatttgtggtttcccttttaaaggaaaaccactttctcttcaactgggttaaaccgggcgaagtgggttagtctctccaaagggaggctggttccccaaggaaacaaaacctgtgttcggccaacaactgtgtgcgggcctgggggttgcatgtgtcccctggaantgggccctaaccattccaaacccccgcattgcttgtttccccctcctgggccgggggtttggcccccaaagggtttaggaaagctttttccctaaatccccctgtggggtggggccctggaggggtgctctgtgttaataaaaatgtaaggtttgccccccccccctgttgccggcatgggggtagtattaaccccccccccccctttgtttccagcccccgaaaaaggggggctcagggggaggtgtgggggatgcccctaagctcctgctttgggcctgttgttttgccccaacccgccccctgcccggctgcccaaaggggtggatgccccccggtcccccaacaaacctgggaacccaggaaaattcccagggcttggggaattttaaattttaagggccattttttttaataaaaggggcctttgggatccca

SEQ ID NO: 663761 - DNA, 194 bp, Homo sapiens
gatatctatggtacaggaacttttgtagtttgtctgtggagtccaggtgacagtgccattgatacctgcatgactgttttcgtactgattcccttcaaaacgtccatctgcattatcaaacaaaacgatgtctggtgtccagaccgagtctgaaggaacacgtataacttttattccatcttgagcctgtgtct

SEQ ID NO: 663762 - DNA, 252 bp, Homo sapiens
aaagttctcaaggagccaggtccattctgtcctcctcctgtgctatccttcacctgtttgcttttatcaaaaggtagcaaaagagttatgtatgacagcaaagaaggtggcagcagctccaggcatcacatccatatatcacaatgtccacaggctagaagagagaccctctctctctttttttaacctcaaagtaatctccctcagaaacatttccctctttcttcccaaatagatttcccttcatttgtt

SEQ ID NO: 663763 - DNA, 105 bp, Homo sapiens
tttccaaagctggagatctgctacattaacaaggtggagctggtggccattcttccgtggcaggctgagcgctccagatcttcagataggggtacacgagtctct

SEQ ID NO: 663764 - DNA, 207 bp, Homo sapiens
ccatgaaccagatagagcccggcgtgcagtacaactacgtgtaccacgaggatgagtacatgatccaggaggaggagttggaccccgacctgctcctggacccagccttggagaagcagcagaggaggaccttcactgcctggtgtaactcccaccttaggaaaggcggcaccagattgagaacatggggaagctttcaggagtggc

SEQ ID NO: 663765 - DNA, 119 bp, Homo sapiens
ggacttcaagaccaacctgggcaacatggcaagacttgatttctacaaaaaaaaattagccaggtgtagtggtacacacgctctagtcccagtcccagctactcgggaggccaaggagg

SEQ ID NO: 663766 - DNA, 184 bp, Homo sapiens
aggatttcgaccactaggtcgtagaagattcaagtgcagatcttgatgccaacattggttatggaagcacaaaaaaacaaagcacatgctgccatgtggttccggaagttctgggtcacaacgtcatggagctggaagtgctgctgatgtgcaacaaatcttactgtgccgagtacgctgcatt

SEQ ID NO: 663767 - DNA, 113 bp, Homo sapiens
gtgtgatgtatacttagaaatgttacaactttacaaatgttacaaaacattcactaagagctcatatttaacacgtagagcatctagtttcgaaaaatagaaatcaattatta

SEQ ID NO: 663768 - DNA, 445 bp, Homo sapiens
taaaggagtaggatggtatagggtgtaggcatgagtaataggggacatcagtgaggccggatgtcgaatgctctcagctaagccaggaaattcttttgccttgagtctcgtatccagacgttatggttggcagctgctacagtttctctccaatctacagagactaacctcggctttacaaaaccttaaaatttacctcttagactcacatacaaacttacatcagcgagcacacctgtttcccatcccttcgggctggctacacgcatatatcgacgttagcactggcgttcgggaagtagaccctccattacattgttgcgctgggcgactaaaaacgactaaacctcttcggcaaggaaatgctataataccagtcataactctatatgtgcatactgtcttccccagcatttccttgtctacacctttatgcaacagataa

SEQ ID NO: 663769 - DNA, 889 bp, Homo sapiens
gacatggtggcgggcacctgtaattccagctgcttgggaggctgaggtgggagaatctcttgaacctggggggctgctgtgagccgagatagttccattgcacttcagcctgggtgacagagtaagactctgtctcaaaaaaaaaaaaaaaaaaaaaacccagctccgtgacaacttcaaacaggttctctccaggaaaattcgtggtctccaggggctaccaatttggagaaccatgggttcgtggttagaataccactttcattaattattacttactccattcactcttttctattattttaagaagtttactagttagaatgtgttttgcgggagttcacgtggagacctttatttaaaagtgcagctctcgtgattccaggtgagccgtggggtgtggggcctggaaaaagtctggcattattctccccagggcttcccttgggtggctcgccagtgggtcgctggctctggagtaacaaaggggggtggggcgaattagatatggggacgccggtccatttatttattcccattctggacaaattggagtcacaggacgccctctatggtaatgcgacggggggactcaacgtctgatccctggtaacgcgggtttttctcagccgacaacagttttacttggcaaacactgtgcgagatacggtaacttactgaaaggttccctttaaaacctgtgctgtgttgcgaaggttcgaaatgaagcctctaaaagttaaggggcgtccggaacaccccggcgtacccgaggttccaatgggccgtgtccggagaaccaggggctaccgcacgcgaagggatgttgacacgggtgggggtggagcttcaccgaacgcatcaatttggtattgtacagcgcactctc

SEQ ID NO: 663770 - DNA, 166 bp, Homo sapiens
caccgggccggcgacagctacctgacagttctgatctctctcactgacactcagacttatctttctcgaccactctgccaggctgctatattttccaaagctttaacactatgtttcaccactataggtcatttctttggtcacaatagcaccaccggaagttcga

SEQ ID NO: 663771 - DNA, 790 bp, Homo sapiens
  misc_feature (189)..(189): n is a, c, g, or t
  misc_feature (388)..(390): n is a, c, g, or t
  misc_feature (392)..(392): n is a, c, g, or t
  misc_feature (394)..(394): n is a, c, g, or t
  misc_feature (396)..(396): n is a, c, g, or t
  misc_feature (399)..(401): n is a, c, g, or t
  misc_feature (404)..(404): n is a, c, g, or t
  misc_feature (534)..(534): n is a, c, g, or t
gtgctcgtcttttgtgagcagggggcttgggaatgggtgttactgattggttgaggatgaaatcataggggtgtggaaaacagtcttcatcagttgagtccacctctgcatggagccacaggatcagctgactcatgagtcatgggtccaggtggggtcagtctgaaagatctccaaaacaccaattgnaggttttacaatagtgatgttatctacagtgtttccagaaaggggttctgatccagaccccagcaaactaatgtttcctccccattttagaccacatagggtaacttctagacgttgccatggcatttgtatactgtcatagtgctggtgggaggagtgtcttttagcatgctaatgcattatattagcataagcatgnnnangncnagnnntcncttttgttgccatcttgtatttaatgggtttgggctggtttctttactgcatgctgttttatcagtgggttctttatgacctgtatcttgtgccaacctcctatcccatcctgtgactaagaatccacanactcctgagaatgcagcccagcaggtctcagccttattttacctagcccctgttcaagatggagtcactcttgttccaacacctctgacacatttcttcctcccttttacaagaggactaagtgttgtagagggaggaggatccatcatcagtaacttctttgggctgaataggggtggtgatattcctggcctaattattagggtctctttattcagggtagagaggagctcagtcaggaaagcattagtatgga

SEQ ID NO: 663772 - DNA, 1088 bp, Homo sapiens
atggagcggaagtagccgtgggggacatgtgccggcgcggctgggagcggtgtgggcttggcggtgaggccggagcagcacgtgcgcaggagctggagctcctggctgcgtcttccctgcagcgctaccctgcatgcgcctgccagctgccgtggccgctgctggtgggctacctgacccgcttctgctgctgcttgtctgtcctgcttgacccggatggcctgccaaggaacgccgatgcccttgcgattctgggtgctctggggtgctggtgggacaagtttaacgcatgtgtgattggtggacacacgctaggacaggaccgaactttttggtcgtgcggtgaaacacggcctctgggacgcgcacataatgaacgctgtcccaacgttataccgagttccaaggcgaggaattcgcgctgcttgtgatgatccttgcgctgcggcgccttgttgctggatagcacggcaggatctttacgtagattgccaaatccgaggcatttgcctagcacggtgcggccacgctgattggacgtccacccttggtcaaatgcggccctttgggatgtgcatagtctaggcttcgtatgcgaaatgtcgtgacactacattcctctatggacagctataacttgtcccgaacggttgcgcgtactatgctggtagaatcgcactccaccttggaacatagggttgatacgcttgggttcttcccaatgccaaatcacataacctgtgtccccctggatcatttgggtcggttcgggcagcaaatgtgttggaacagggacctgtttccccgtgtgcgcagaagaaaccggggtcgtctcagtcctggtgggactccttttgaccctccaaaacatcaggcaagagaaaactataggtctgcgtgcgtagcagtgttgcttgataagggttagggacgaccgtttggtgctcgttgtcctttggtgttacgctcgcaacgtggtcgtctcgcccctagggtggatatggcacatgtggatggcgaagcgcagtatataattcgtaggcgtcacatgatatgcgcggtaccgttcccgccggtggtctagtact

SEQ ID NO: 663773 - DNA, 1110 bp, Homo sapiens
  misc_feature (266)..(266): n is a, c, g, or t
  misc_feature (1026)..(1026): n is a, c, g, or t
  misc_feature (1029)..(1029): n is a, c, g, or t
  misc_feature (1033)..(1033): n is a, c, g, or t
  misc_feature (1041)..(1041): n is a, c, g, or t
  misc_feature (1043)..(1043): n is a, c, g, or t
  misc_feature (1052)..(1053): n is a, c, g, or t
  misc_feature (1060)..(1060): n is a, c, g, or t
  misc_feature (1065)..(1065): n is a, c, g, or t
  misc_feature (1068)..(1068): n is a, c, g, or t
  misc_feature (1072)..(1073): n is a, c, g, or t
  misc_feature (1082)..(1082): n is a, c, g, or t
  misc_feature (1099)..(1099): n is a, c, g, or t
ggttccgaggcgccgccggtagctggcacgtccggagaactggagcagccatcgtcgcaggtcatggtgtcagtaattaacactgtggatacctcccatgaggacatgattcacgacgcccagatggactactatggcacccgcctggcaaccgtgctcatcagacaggtccgtcaaaatctttgatgtgcgcaatggagggcagatccattatcgccgacctcaggggtcatgagggtcctgtgtgtgcaagtggcctggggctncaccccatgtacggtcaacatcctggcaatcggtgctcctatgaccggaaagtcattatctggagagaggaaaacggcacctgggagaagagccacgagcatgcgggacacgactcctcagtgaactcggtgtgctgggccccccatgactacggcctgatcctggcctgtgggagctcggatggggccatctccctgctgacttacaccggggaaggccaatgggaagtaaagaagatcaacaacgctcacaaccattggctgcaaatgccgtcagctgggcccctgctgttgtacctggaagcctcatagaccacccatcggggcagaaacccaattacatcaagagagtgttttgcagtacatggtgcgcttgtggagcaacgctcgatcccaagcatgataggaagcgagggagcgaaggaacggctcgagtggcaagggatggagcagcaagctagaagcgcacaggtgactgggttgcgagatgtggcctgggcccccgtccatcggcctgcccatccagcaccgatcgctcatgctgctcccaggatggtcgtgtgttcatttggacctgtgatgatgcctcaagcaatacgtgtgtcccctaaattgttgcacaagttcaacgatgtggtgtggcatgtgagctggtccatcacatgtcaacatccttggctgtctctggtggatgacaactaaggtgaccctgtggaaaggagtcagttgatggggcagagggtgtgcatcagtgatgtcnacngggncagggtcngnatcagcatnngtgacgngggcnagngaannagcgtgaangacggtggggctggtcnccaccggcagc

SEQ ID NO: 663774 - DNA, 6789 bp, Homo sapiens
  misc_feature (38)..(38): n is a, c, g, or t
  misc_feature (92)..(92): n is a, c, g, or t
agcgggtgtccggccaagcggcgccctgaaggcgtgtncggccgcagcttaggctctccgggagtccccggagagtaggggcggccggcggngctagtcttctggggagcgccgggtgcacaccggaccactgcgggaggcctagggccgagggccgaggagctggcctgcgcccggcgaccccggcttccctccgcagtcgcccaggcgtcccttcccccctacagccgagcggcgccgggcgcaggcgcattgggcgcccccggcagcccccgcggcgcgcccgtccgctgcccgtccgaggaggcggagggcgatgacgtcatcgagcggggcgacgggcattgggcgccattttgaacaaggggaaaaaagatccctccccggcggcggcggcggcggcggcggcgccggcggtggtggcggccccggggctgagcgctcggctgcagcggcgcggaggccgtctccctggtctgccgcggtccccgcccgtcccgccgccggctgccatggcaggagccggaggcggcggctgccccgcgggcggcaacgacttccagtggtgcttctcgcaggtcaagggggccatcgacgaggacgtggccgaagggcgtggagaggagagctcggggctgctgccacagatcatgctgagccgccagcagctccacctgcccttggctttgctcatccgtggaaatgacaacagcgtgaaaacggcagatgatgtacaaggattatgatgaaaatagtcttgacctcacggaccctctgagaggttcttgaccgttgcaccctcaagggcccacagaccgcactttgagaactgctgcttgaatgcaagctattagcagtaggagtgtcaaggacagggcagacttcaggattaactgttccttctcatctttaccagattgtactggttttgtctcaaaatacaaaaatagagtgtttattatgtaaagaaaatcaaatgatagaacagctgagaacagctggatcaagagcacagagcggaagttcctcttcatcccactgctgtcctggagtcttcctcaggacccactgctcctaactgtatctttgtagatcattttctatgtgtttatttatttatattttaaaacctagtttgtgtataagcaatcttttttaatccacaaatgtggaatcttattctagactttgaataagattttctgtattagtcagtattgttttttgctacttcttttcctttcctttccttttttggaaatagggtcttactcctctgtcacccaggctggagtgcagtggtgcgatcagagctcactgcagcctgatcaggctcaagcaatcctctccctgctcagcctcctgagtagctggaactataggcttgcactgccatgcccagcttttttctattttttgtagagacagggttttgctgtgttgcccaggatggtcttgaactcctggactcaagtgatcctcccacctcggcctcccaaaatgctgggaatacaagcatgagccatggcatgtggccgccacttgccttttttcattaagagtctataattggagatcttacagggaactgggctttctgctcagccatactcgagctcatttgacccccggccactgccccttgaaatcggacatcatttccaccgttgagtttaattactctggagatcttcttgcaacaggagacaagggcggcagagttgttatttttcagcgtgaacaagagaataaaagccgccctcattctaggggagaatataatgtttacagcacctttcaaagtcatgaaccggagtttgactatttgaaaagtctagaaattgaggaaaaaattaataaaattaggtggttaccacaacagaatgctgctcattttctactgtctacaaatgataaaactataaaattatggaaaataagtgaacgggataaaagagcagaaggttataacctgaaagacgaagatggaagacttcgagacccatttaggatcacggcgctacgggtcccaatattgaagcccatggatcttatggtagaagcgagtccacggcgaatttttgcaaatgctcacacatatcatataaattccatttcagtaaatagtgatcatgaaacatatctttctgcagatgacctgagaattaatttatggcacttagaaatcacagatagaagctttaacatcgtggacatcaagcctgctaacatggaggagctgaccgaagtcatcactgcagccgagttccacccgcaccagtgcaacgtgttcgtctacagcagtagcaaagggaccatccgcctgtgtgacatgcgctcctcggccctgtgcgacagacactccaagttttttgaagagcctgaagatcccagcagtaggtccttcttctcagaaataatttcatccatatccgatgtaaaattcagtcatagtgggcggtacatgatgaccagagactacctgtcggtgaaggtgtgggacctcaacatggagagcaggccggtggagacccaccaggtccacgagtacctgcgcagcaagctctgctctctctatgagaacgactgcatctttgacaagtttgagtgttgctggaacggttcggatagcgccatcatgaccgggtcctataacaacttcttcaggatgtttgatagagacacgcggagggatgtgaccctggaggcctcgagagagagcagcaaaccgcgcgccagcctcaaaccccggaaggtgtgtacggggggtaagcggaggaaagacgagatcagtgtggacagtctggacttcaacaagaagatcctgcacacagcctggcaccccgtggacaatgtcattgccgtggctgccaccaataacttgtacatattccaggacaaaatcaactagagacgcgaacgtgaggaccaagtcttgtcttgcatagttaagccggacatttttctgtcagagaaaaggcatcattgtccgctccattaagaacagtgacgcacctgctacttcccttcacagacacaggagaaagccgcctccgctggaggcccggtgtggttccgcctcggcgaggcgcgagacaggcgctgctgctcacgtggagacgctctcgaagcagagttgacggacactgctcccaaaaggtcattactcagaataaatgtatttatttcagtccgagccttcctttccaatttatagaccaaaaaattaacatccaagagaaaagttattgtcagataccgctctttctccaactttccctctttctctgccatcacacttgggccttcactgcagcgtggtgtggccaccgtccgtgtcctctcggccttcctccgagtccaggtggactctgtggatgtgtggatgtggcccgagcaggctcaggcggccccactcacccacagcatccgccgccaccccttcgggtgtgagcgctcaataaaaacaacacactataaagtgtttttaaatccaaacagaagtattgtctttttatttaattttattgcatagaatgaagttatgcagggttcttctttggaactaactgtttgagaaatgtgtgtccttctttggcagcgtgggggtatgtgtgcagcatttctgtccccaagctgctgcccgctgtgtttctgtagaagtagcccatcagatacaccaggtaaggtctgggaaaagccagaaccgaggccacctctgagaaagaaaattgcaaggaagaaccaaaattgctgccatccagtaagcctggtttaaagtagcttcaaattcactacagttgaagaaatacgtgcttgctttctaaggcttttgaaaaagcactttggggaaagtatactttttaaacattgctaaaattacatgcatgctaaatttcatcctgcatttcaagccagcaaaattaagcaattttaattacacgatgccaccagtacgttggtttattttcaaagtaggatctttgataccagaaatcaagattttccaagacaaataatacagagctgtaccaatgctgagtgaccagagcttgcttccgtgggatttaacacacgcccactacgtgtccccgaggggagtggggagtcgggctcccgtgcccctgtggagatggaggtgtgtgctgatcccccgtccgcctgtggagatgaaggtgtgtgttgattcctcctgctgctgtggagatggaggtgtgtgctgatcgcccgtcaccctgtctagatgaaggtatgtgctgattgcctgtgcccctgtggagaaggaggtgtgtgctgatcccctgtgccctgtggagatggaggtgtgtgctgctccctcgtgcccctgtggagatggaggtgtgtgctgatcccccatcccatccccctgtctagatgaaggtgtgtgctgattcctcatgcccctgtctggatgaaggtgtgtgctgatcccccgtccccctgtggagatgaaggtgtgtgctgatcccccgtgcccctgtggagatgaaggtgcgtgctgatcccccatctccctgtggagatgaaggtgtgtgctgatccccatccccctgtggagatgaagggatatgctgatcccctgtcccactgtggagatgaaggggtgtgctgatcccccgtccccctgtggagatgaaggtgtgtgctgatcccccatctccctgtggagatgaaggggtgtgccaatcccccgcgcccctgtggagatggaggcgtgtgctgatccccatccccctgtggagatgaaggtgtgtgctgatcccccatccccatgtggagatgaaggggtgtgttgatcccctgtccccctgtggagatggtgtgtgctgatccccgtccccctgtggagatgaaggtgtgtgctgatcccccatctccctgtgaagatgaaggggtgtgctgatcccccgtgcccctgtggacatggaggcgtgtgctgatcccccgtccccctgtggagatgaaggtgtgtgctgatcccccatccccatgtggagatgaaggggtgtgttgatcccccgtccccctgtggagatgaaggtgtgtgctgatccccgtccccctgtggagatgaaggggtgtgctgatcccccatgccctgtggagatggaggtgtgtgctgatccctcgtgcccctgtggagatagaggtgtgtactgatcccctgttcccctatctagatgaaggtgtgtactgctgatcccccgtccccctgtggagatgaaggtgtgtgctgatcccccatccccctgtggagatgaaggggtgtgctgatcccccgtcttcctgtggagatgaaggtgtgtgctgattcctcatgcccctgtggagatggaggtgtgtgctgatcccccatccccctgtggggatgaaggtgtgtgctgatcccccatccccctgtggagatgaaggggtatgctgatcccccgtccccctgtggagatgaaggtgtgtgctgatcccccatccccctgtggagatgaaggggtatgctgatcccctgtccccctgtggggatgaaggtgtgtgctgatctcttgtccccctgtggagatggaggtgtgtgctgatcccccatccccctgtggagatgaagatgtgtgctgatcccccgtcctcctgtggagatgaaggtgtgtgctgcttcctcgtgcccctgtggagatggaggtgtgtgctggtcccccgtccccctgtggagatggaggtgtgtgctgatcccccgtcccactgtggagatggaggcgtgtgctgatcccccatccccctgtggagatgaaggcgtgtgctgatccgccatcccactgtggagatgaaggcgtgtgctgatcccccatccccctgtggagataaaggtgtgtgctgatcccccatccccctgtggagatgaaggcgtgtgctgatccgccatcccactgtggagatgaaggcgtgtgctgatcccccatccccctgtggagatgaaggcgtgtgctgatcccccatccccctgtggagatgaaggcgtgtgctgatccgccatcccactgtggagatgaaggtgtgtgctgatcccccatccccctgtggagatgaaggtgtgtgctgatccccggtccccctgtggagatgaaggtgtgtgctgatcccccgtcctcctgtggagatgaaggcgtgtgctgatcccccgtccccctgtggagatgaaggcgtgtgctgatccgccgtccccctgtggagatgaaggcgtgtgctgatccgccatccccctgtggagatgaaggcgtgtgctcatcccccatccccctgtggagatgaaggcgtgtgctgatccgccatcccactgtggagatgaaggtgtgtgctgatcccccatccccctgtggagatgaaggcgtgtgctgatccccggtccccctgtggagatgaaggtgtgtgttgatcccccatccccctgtggaggtgaaggtgtgtgctgattactaatccacatgggcaagaacaggatgtccgtcattaccctgaatcaatgctaacacagtgccacttgagttcacattaagttagaaattgagaatctaaaggtacctttattttaactaaaaaataatttatatactgtatattgattgtgacacaatttacaaagtctgaggtgtggaacagttatttaagcattagtcaaccctggtccttaagacagttctagtaaaatgggattgtatatatttgttcaactattttgaccaaaaagttcaataaattttaaatgtttaactggaaaaaaaa

SEQ ID NO: 663775 - DNA, 1209 bp, Homo sapiens
  misc_feature (47)..(47): n is a, c, g, or t
  misc_feature (61)..(61): n is a, c, g, or t
  misc_feature (68)..(68): n is a, c, g, or t
  misc_feature (365)..(365): n is a, c, g, or t
  misc_feature (1125)..(1125): n is a, c, g, or t
  misc_feature (1128)..(1128): n is a, c, g, or t
  misc_feature (1132)..(1132): n is a, c, g, or t
  misc_feature (1140)..(1140): n is a, c, g, or t
  misc_feature (1142)..(1142): n is a, c, g, or t
  misc_feature (1151)..(1152): n is a, c, g, or t
  misc_feature (1159)..(1159): n is a, c, g, or t
  misc_feature (1164)..(1164): n is a, c, g, or t
  misc_feature (1167)..(1167): n is a, c, g, or t
  misc_feature (1171)..(1172): n is a, c, g, or t
  misc_feature (1181)..(1181): n is a, c, g, or t
  misc_feature (1198)..(1198): n is a, c, g, or t
tggtactgaggaggcctagcagggtgaaggcacggtcgcggcttcangggttctcggccgncctgagnccaaatcccaagctggagccgttcagctccctccaccgcttagagatttggggggctctggccgtcccttgcggaccattccgaggggagtccagaggtgtcagtaattaacactgtggatacctcccatgaggacatgattcacgacgcccagatggactactatggcacccgcctggcaaccgtgctcatcagacaggtccgtcaaaatctttgatgtgcgcaatggagggcagatccattatcgccgacctcaggggtcatgagggtcctgtgtgtgcaagtggcctggggctncaccccatgtacggtcaacatcctggcaatcggtgctcctatgaccggaaagtcattatctggagagaggaaaacggcacctgggagaagagccacgagcatgcgggacacgactcctcagtgaactcggtgtgctgggccccccatgactacggcctgatcctggcctgtgggagctcggatggggccatctccctgctgacttacaccggggaaggccaatgggaagtaaagaagatcaacaacgctcacaaccattggctgcaaatgccgtcagctgggcccctgctgttgtacctggaagcctcatagaccacccatcggggcagaaacccaattacatcaagaggtttgctatcaggtggctgtgacaaactcatcaagctgtggaaggaggaggaggcacggccagtggacaggatggcagccacgacaagcatagaaatcagtcactagctgatcgtgggtgactcgaggaatagtgcgcccttgggcccctatctgattcggccttgaccccaacatgaatgctatcgacgagctgctcccaggatggtcgtgtgttcatttggacctgtgatgatgcctcaagcaatacgtgtgtcccctaaattgttgcacaagttcaacgatgtggtgtggcatgtgagctggtccatcacatgtcaacatccttggctgtctctggtggatgacaactaaggtgaccctgtggaaaggagtcagttgatggggcagagggtgtgcatcagtgatgtcnacngggncagggtcngnatcagcatnngtgacgngggcnagngaannagcgtgaangacggtggggctggtcnccaccggcagc

SEQ ID NO: 663776 - DNA, 833 bp, Homo sapiens
  misc_feature (21)..(21): n is a, c, g, or t
  misc_feature (121)..(121): n is a, c, g, or t
  misc_feature (163)..(163): n is a, c, g, or t
  misc_feature (166)..(166): n is a, c, g, or t
  misc_feature (195)..(195): n is a, c, g, or t
  misc_feature (205)..(205): n is a, c, g, or t
  misc_feature (219)..(219): n is a, c, g, or t
  misc_feature (223)..(223): n is a, c, g, or t
  misc_feature (237)..(237): n is a, c, g, or t
  misc_feature (269)..(269): n is a, c, g, or t
  misc_feature (273)..(273): n is a, c, g, or t
  misc_feature (283)..(283): n is a, c, g, or t
  misc_feature (288)..(288): n is a, c, g, or t
  misc_feature (328)..(329): n is a, c, g, or t
  misc_feature (333)..(333): n is a, c, g, or t
  misc_feature (366)..(366): n is a, c, g, or t
  misc_feature (372)..(372): n is a, c, g, or t
  misc_feature (380)..(380): n is a, c, g, or t
  misc_feature (384)..(385): n is a, c, g, or t
  misc_feature (405)..(405): n is a, c, g, or t
  misc_feature (499)..(499): n is a, c, g, or t
  misc_feature (506)..(506): n is a, c, g, or t
  misc_feature (515)..(515): n is a, c, g, or t
  misc_feature (534)..(534): n is a, c, g, or t
  misc_feature (541)..(541): n is a, c, g, or t
  misc_feature (543)..(543): n is a, c, g, or t
  misc_feature (545)..(545): n is a, c, g, or t
  misc_feature (547)..(547): n is a, c, g, or t
  misc_feature (551)..(551): n is a, c, g, or t
  misc_feature (570)..(570): n is a, c, g, or t
  misc_feature (633)..(633): n is a, c, g, or t
  misc_feature (695)..(695): n is a, c, g, or t
  misc_feature (802)..(802): n is a, c, g, or t
atacccacctctgcacaaggnattagtaaaattacagtacagatcaagttccccaaatcatttttaaaagaaacgatcaatactaaatattagcagctaaaacatcattgattcttgtggntttagaactttcacacactgagagctccataagaggaaaaangcnaagaaaatcaacacaattgctcatcagangatagctgtnttttctagtatgtncaanacaaagagtatctnatgttctatcatcttccttcctcaagtttttngggnatattaagtnaaacnaataatcagtgctaagacatgcatcactgtgacataatgnnattnaatcagggctggtcatgctgggactctgctgtntttttntttgggtntganngacttgtatactctattttnagcgtccgaatatggtggttccttttgggtttaatatatcgctgtgggaatggatctcaaagtagcgattttttgcgacactgatcagagatcnaggtgtnacttagganttgaatgtgtgcgagatanagcgacntncntnttcntcttcggataatataaganaggttaaataaaaatagataatacaatttcagatatagaaagtgccaattcaacataaatttntttttgtgtttattttacaaaaagactttagaacacatgaggaacactagatgatgagagtnagcagccttttcagcctttgtttctttcttctttaaatacagatgttgacagttaagatggattagatgcagtccactttttcctcagttggctgatttttttcggnattataaaccatgaaactaaactgagtgaat

SEQ ID NO: 663777 - DNA, 315 bp, Homo sapiens
ttctattccagaccctcaccaccttgtgacatatattgccgcaacccttctgaaagcctccctcatcggaaaatccaaaatctgaaatgcttcaaatctgaaggtttctgagcaccgacaagacccaagtggaaaatttcacaccggacctcatttgatgcgtcacagtcaaaacgtagtcaaagctttgttacatgcacaaaattctttaaaatattgtagaaaattaccctcaggctatgtgtacaaagtgtatcagaaacgtaaatggttttcttgtttagacttgggttccgtcccctgagataacatcat

SEQ ID NO: 663778 - DNA, 718 bp, Homo sapiens
cacagtcacctacacacgcagcagcacgacaaacacaaccggtaaagccctatgcccacacccacaggcttgacattggcaccaccttcgcaccgtgcccaggggcactttcaagacactgcaaccacaagatgttatttattgagctggcgccgggacatgggcggggcctgccctacagtgagcagcccacacaggaacgctcctctcgcgagcggcccgggcagggaccctgtaccaacaccaacacctcctctccagcccaatcttctgggtccagaccagcttgtgccttctttagaaaacactcttaaaccttctaaaaactataaaccttttttcagcacatatggagagagctgacaatcaatgcacattgtataagccattttagcgtaaactggcattgcgcatctctgaagctccctcatggagcctcacagatccatttttagggaagggataaaggctcaaaacgaactgaccacctatgccccgtccaccaggataagtgacacccaagacccaagaaaaaaatgccgaggattcgcgaaaaaaaaccagcctccccgggagcggccaacagcaccaccgccaacaaaaaaaacccaagggtggcccaggcccaaatcgccaaaggcgggggtaaacaattaacgggggcggtttaaaaggccgggaccggaaaaacctgggcaagccaacaaaacgcctgaag

SEQ ID NO: 663779 - DNA, 567 bp, Homo sapiens
  misc_feature (509)..(509): n is a, c, g, or t
gttaactgttgtgcagattttttctgcatgttatggaatcaccttcacccagcccctgctccctctcctggaacgtacttcattcagcatgtgatgtgttttgcaatgtcacatggtatttcatcctttgcttctctctctggtagactgagctcctcaagcttgaaggctggctgtcccccttcccaccccagcccttgtagaggacccagcacgaaggtcatgataggtaacagttgctgagtggtcattctgtgctagagattgctcgcagtgcttttcctatgtcagtgaatcttcacaccaccgaagaaggaaggaaatactgttcttctcagtctcagatgcagaatccgaggcgtgggagcaattaacctgggtcacaaagcgagtgtatggcagggccagggtttggagccacgccgactggccgcagagccgtggagcgctgtactgcttcagcgaccatttgcagccagcacagtactgatgaagccccactgtggcangcgccgtccagccttgggatggagctgttcttctaaagctcggtgaaatctactacca

SEQ ID NO: 663780 - DNA, 1033 bp, Homo sapiens
  misc_feature (38)..(38): n is a, c, g, or t
  misc_feature (92)..(92): n is a, c, g, or t
  misc_feature (975)..(975): n is a, c, g, or t
agcgggtgtccggccaagcggcgccctgaaggcgtgtncggccgcagcttaggctctccgggagtccccggagagtaggggcggccggcggngctagtcttctggggagcgccgggtgcacaccggaccactgcgggaggcctagggccgagggccgaggagctggcctgcgcccggcgaccccggcttccctccgcagtcgcccaggcgtcccttcccccctacagccgagcggcgccgggcgcaggcgcattgggcgcccccggcagcccccgcggcgcgcccgtccgctgcccgtccgaggaggcggagggcgatgacgtcatcgagcggggcgacgggcattgggcgccattttgaacaaggggaaaaaagatccctccccggcggcggcggcggcggcggcggcgccggcggtggtggcggccccggggctgagcgctcggctgcagcggcgcggaggccgtctccctggtctgccgcggtccccgcccgtcccgccgccggctgccatggcaggagccggaggcggcggctgccccgcgggcggcaacgacttccagtggtgcttctcgcaggtcaagggggccatcgacgaggacgtggccgaagactgagctcctcaagcttgaaggctggctgtcccccttcccaccccagcccttgtagaggacccagcacgaaggtcatgataggtaacagttgctgagtggtcattctgtgctagagattgctcgcagtgcttttcctatgtcagtgaatcttcacaccaccgaagaaggaaggaaatactgttcttctcagtctcagatgcagaatccgaggcgtgggagcaattaacctgggtcacaaagcgagtgtatggcagggccagggtttggagccacgccgactggccgcagagccgtggagcgctgtactgcttcagcgaccatttgcagccagcacagtactgatgaagccccactgtggcangcgccgtccagccttgggatggagctgttcttctaaagctcggtgaaatctactacca

SEQ ID NO: 663781 - DNA, 2459 bp, Homo sapiens
  misc_feature (38)..(38): n is a, c, g, or t
  misc_feature (92)..(92): n is a, c, g, or t
agcgggtgtccggccaagcggcgccctgaaggcgtgtncggccgcagcttaggctctccgggagtccccggagagtaggggcggccggcggngctagtcttctggggagcgccgggtgcacaccggaccactgcgggaggcctagggccgagggccgaggagctggcctgcgcccggcgaccccggcttccctccgcagtcgcccaggcgtcccttcccccctacagccgagcggcgccgggcgcaggcgcattgggcgcccccggcagcccccgcggcgcgcccgtccgctgcccgtccgaggaggcggagggcgatgacgtcatcgagcggggcgacgggcattgggcgccattttgaacaaggggaaaaaagatccctccccggcggcggcggcggcggcggcggcgccggcggtggtggcggccccggggctgagcgctcggctgcagcggcgcggaggccgtctccctggtctgccgcggtccccgcccgtcccgccgccggctgccatggcaggagccggaggcggcggctgccccgcgggcggcaacgacttccagtggtgcttctcgcaggtcaagggggccatcgacgaggacgtggccgaagcggacatcatttccaccgttgagtttaattactctggagatcttcttgcaacaggagacaagggcggcagagttgttatttttcagcgtgaacaagagaataaaagccgccctcattctaggggagaatataatgtttacagcacctttcaaagtcatgaaccggagtttgactatttgaaaagtctagaaattgaggaaaaaattaataaaattaggtggttaccacaacagaatgctgctcattttctactgtctacaaatgataaaactataaaattatggaaaataagtgaacgggataaaagagcagaaggttataacctgaaagacgaagatggaagacttcgagacccatttaggatcacggcgctacgggtcccaatattgaagcccatggatcttatggtagaagcgagtccacggcgaatttttgcaaatgctcacacatatcatataaattccatttcagtaaatagtgatcatgaaacatatctttctgcagatgacctgagaattaatttatggcacttagaaatcacagatagaagctttaacatcgtggacatcaagcctgctaacatggaggagctgaccgaagtcatcactgcagccgagttccacccgcaccagtgcaacgtgttcgtctacagcagtagcaaagggaccatccgcctgtgtgacatgcgctcctcggccctgtgcgacagacactccaagttttttgaagagcctgaagatcccagcagtaggtccttcttctcagaaataatttcatccatatccgatgtaaaattcagtcatagtgggcggtacatgatgaccagagactacctgtcggtgaaggtgtgggacctcaacatggagagcaggccggtggagacccaccaggtccacgagtacctgcgcagcaagctctgctctctctatgagaacgactgcatctttgacaagtttgagtgttgctggaacggttcggatagcgccatcatgaccgggtcctataacaacttcttcaggatgtttgatagagacacgcggagggatgtgaccctggaggcctcgagagagagcagcaaaccgcgcgccagcctcaaaccccggaaggtgtgtacggggggtaagcggaggaaagacgagatcagtgtggacagtctggacttcaacaagaagatcctgcacacagcctggcaccccgtggacaatgtcattgccgtggctgccaccaataacttgtacatattccaggacaaaatcaactagagacgcgaacgtgaggaccaagtcttgtcttgcatagttaagccggacatttttctgtcagagaaaaggcatcattgtccgctccattaagaacagtgacgcacctgctacttcccttcacagacacaggagaaagccgcctccgctggaggcccggtgtggttccgcctcggcgaggcgcgagacaggcgctgctgctcacgtggagacgctctcgaagcagagttgacggacactgctcccaaaaggtcattactcagaataaatgtatttatttcagtccgagccttcctttccaatttatagaccaaaaaattaacatccaagagaaaagttattgtcagataccgctctttctccaactttccctctttctctgccatcacacttgggccttcactgcagcgtggtgtggccaccgtccgtgtcctctcggccttcctccgagtccaggtggactctgtggatgtgtggatgtggcccgagcaggctcaggcggccccactcacccacagcatccgccgccaccccttcgggtgtgagcgctcaataaaaacaacacactataaagtgtttttaaatcca

SEQ ID NO: 663782 - DNA, 211 bp, Homo sapiens
cctgtgatgtatccccaacacctgaaaacaggatgaaagccctgtttacttgcaattccttttacccagtgtatcatgtctacctatcaacagaaaattacaaagcatacttaaaatggcagaaaatgcagtttgtaagatgactgaacaatgcattacgaaccaggagtacagtcagtggcagcgagtgtatgggcagataacgggttac

SEQ ID NO: 663783 - DNA, 3609 bp, Homo sapiens
  misc_feature (38)..(38): n is a, c, g, or t
  misc_feature (92)..(92): n is a, c, g, or t
agcgggtgtccggccaagcggcgccctgaaggcgtgtncggccgcagcttaggctctccgggagtccccggagagtaggggcggccggcggngctagtcttctggggagcgccgggtgcacaccggaccactgcgggaggcctagggccgagggccgaggagctggcctgcgcccggcgaccccggcttccctccgcagtcgcccaggcgtcccttcccccctacagccgagcggcgccgggcgcaggcgcattgggcgcccccggcagcccccgcggcgcgcccgtccgctgcccgtccgaggaggcggagggcgatgacgtcatcgagcggggcgacgggcattgggcgccattttgaacaaggggaaaaaagatccctccccggcggcggcggcggcggcggcggcgccggcggtggtggcggccccggggctgagcgctcggctgcagcggcgcggaggccgtctccctggtctgccgcggtccccgcccgtcccgccgccggctgccatggcaggagccggaggcggcggctgccccgcgggcggcaacgacttccagtggtgcttctcgcaggtcaagggggccatcgacgaggacgtggccgaagggcgtggagaggagagctcggggctgctgccacagatcatgctgagccgccagcagctccacctgcccttggctttgctcatccgtggaaatgacaacagcgtgaaaacggcagatgatgtacaaggattatgatgaaaatagtcttgacctcacggaccctctgagaggttcttgaccgttgcaccctcaagggcccacagaccgcactttgagaactgctgcttgaatgcaagctattagcagtaggagtgtcaaggacagggcagacttcaggattaactgttccttctcatctttaccagattgtactggttttgtctcaaaatacaaaaatagagtgtttattatgtaaagaaaatcaaatgatagaacagctgagaacagctggatcaagagcacagagcggaagttcctcttcatcccactgctgtcctggagtcttcctcaggacccactgctcctaactgtatctttgtagatcattttctatgtgtttatttatttatattttaaaacctagtttgtgtataagcaatcttttttaatccacaaatgtggaatcttattctagactttgaataagattttctgtattagtcagtattgttttttgctacttcttttcctttcctttccttttttggaaatagggtcttactcctctgtcacccaggctggagtgcagtggtgcgatcagagctcactgcagcctgatcaggctcaagcaatcctctccctgctcagcctcctgagtagctggaactataggcttgcactgccatgcccagcttttttctattttttgtagagacagggttttgctgtgttgcccaggatggtcttgaactcctggactcaagtgatcctcccacctcggcctcccaaaatgctgggaatacaagcatgagccatggcatgtggccgccacttgccttttttcattaagagtctataattggagatcttacagggaactgggctttctgctcagccatactcgagctcatttgacccccggccactgccccttgaaatcggacatcatttccaccgttgagtttaattactctggagatcttcttgcaacaggagacaagggcggcagagttgttatttttcagcgtgaacaagaggtactggcccagccccgccgtcctgccctgccatgaagtgtgagcagctttctcagcacttcctgcagagaagtctggcaggggtgtgaattctctcttcccttcagggagagaataaaagccgccctcattctaggggagaatataatgtttacagcacctttcaaagtcatgaaccggagtttgactatttgaaaagtctagaaattgaggaaaaaattaataaaattaggtggttaccacaacagaatgctgctcattttctactgtctacaaatgataaaactataaaattatggaaaataagtgaacgggataaaagagcagaaggttataacctgaaagacgaagatggaagacttcgagacccatttaggatcacggcgctacgggtcccaatattgaagcccatggatcttatggtagaagcgagtccacggcgaatttttgcaaatgctcacacatatcatataaattccatttcagtaaatagtgatcatgaaacatatctttctgcagatgacctgagaattaatttatggcacttagaaatcacagatagaagctttaacatcgtggacatcaagcctgctaacatggaggagctgaccgaagtcatcactgcagccgagttccacccgcaccagtgcaacgtgttcgtctacagcagtagcaaagggaccatccgcctgtgtgacatgcgctcctcggccctgtgcgacagacactccaagttttttgaagagcctgaagatcccagcagtaggtccttcttctcagaaataatttcatccatatccgatgtaaaattcagtcatagtgggcggtacatgatgaccagagactacctgtcggtgaaggtgtgggacctcaacatggagagcaggccggtggagacccaccaggtccacgagtacctgcgcagcaagctctgctctctctatgagaacgactgcatctttgacaagtttgagtgttgctggaacggttcggatagcgccatcatgaccgggtcctataacaacttcttcaggatgtttgatagagacacgcggagggatgtgaccctggaggcctcgagagagagcagcaaaccgcgcgccagcctcaaaccccggaaggtgtgtacggggggtaagcggaggaaagacgagatcagtgtggacagtctggacttcaacaagaagatcctgcacacagcctggcaccccgtggacaatgtcattgccgtggctgccaccaataacttgtacatattccaggacaaaatcaactagagacgcgaacgtgaggaccaagtcttgtcttgcatagttaagccggacatttttctgtcagagaaaaggcatcattgtccgctccattaagaacagtgacgcacctgctacttcccttcacagacacaggagaaagccgcctccgctggaggcccggtgtggttccgcctcggcgaggcgcgagacaggcgctgctgctcacgtggagacgctctcgaagcagagttgacggacactgctcccaaaaggtcattactcagaataaatgtatttatttcagtccgagccttcctttccaatttatagaccaaaaaattaacatccaagagaaaagttattgtcagataccgctctttctccaactttccctctttctctgccatcacacttgggccttcactgcagcgtggtgtggccaccgtccgtgtcctctcggccttcctccgagtccaggtggactctgtggatgtgtggatgtggcccgagcaggctcaggcggccccactcacccacagcatccgccgccaccccttcgggtgtgagcgctcaataaaaacaacacactataaagtgtttttaaatcca

SEQ ID NO: 663784 - DNA, 2572 bp, Homo sapiens
  misc_feature (38)..(38): n is a, c, g, or t
  misc_feature (92)..(92): n is a, c, g, or t
agcgggtgtccggccaagcggcgccctgaaggcgtgtncggccgcagcttaggctctccgggagtccccggagagtaggggcggccggcggngctagtcttctggggagcgccgggtgcacaccggaccactgcgggaggcctagggccgagggccgaggagctggcctgcgcccggcgaccccggcttccctccgcagtcgcccaggcgtcccttcccccctacagccgagcggcgccgggcgcaggcgcattgggcgcccccggcagcccccgcggcgcgcccgtccgctgcccgtccgaggaggcggagggcgatgacgtcatcgagcggggcgacgggcattgggcgccattttgaacaaggggaaaaaagatccctccccggcggcggcggcggcggcggcggcgccggcggtggtggcggccccggggctgagcgctcggctgcagcggcgcggaggccgtctccctggtctgccgcggtccccgcccgtcccgccgccggctgccatggcaggagccggaggcggcggctgccccgcgggcggcaacgacttccagtggtgcttctcgcaggtcaagggggccatcgacgaggacgtggccgaagcggacatcatttccaccgttgagtttaattactctggagatcttcttgcaacaggagacaagggcggcagagttgttatttttcagcgtgaacaagaggtactggcccagccccgccgtcctgccctgccatgaagtgtgagcagctttctcagcacttcctgcagagaagtctggcaggggtgtgaattctctcttcccttcagggagagaataaaagccgccctcattctaggggagaatataatgtttacagcacctttcaaagtcatgaaccggagtttgactatttgaaaagtctagaaattgaggaaaaaattaataaaattaggtggttaccacaacagaatgctgctcattttctactgtctacaaatgataaaactataaaattatggaaaataagtgaacgggataaaagagcagaaggttataacctgaaagacgaagatggaagacttcgagacccatttaggatcacggcgctacgggtcccaatattgaagcccatggatcttatggtagaagcgagtccacggcgaatttttgcaaatgctcacacatatcatataaattccatttcagtaaatagtgatcatgaaacatatctttctgcagatgacctgagaattaatttatggcacttagaaatcacagatagaagctttaacatcgtggacatcaagcctgctaacatggaggagctgaccgaagtcatcactgcagccgagttccacccgcaccagtgcaacgtgttcgtctacagcagtagcaaagggaccatccgcctgtgtgacatgcgctcctcggccctgtgcgacagacactccaagttttttgaagagcctgaagatcccagcagtaggtccttcttctcagaaataatttcatccatatccgatgtaaaattcagtcatagtgggcggtacatgatgaccagagactacctgtcggtgaaggtgtgggacctcaacatggagagcaggccggtggagacccaccaggtccacgagtacctgcgcagcaagctctgctctctctatgagaacgactgcatctttgacaagtttgagtgttgctggaacggttcggatagcgccatcatgaccgggtcctataacaacttcttcaggatgtttgatagagacacgcggagggatgtgaccctggaggcctcgagagagagcagcaaaccgcgcgccagcctcaaaccccggaaggtgtgtacggggggtaagcggaggaaagacgagatcagtgtggacagtctggacttcaacaagaagatcctgcacacagcctggcaccccgtggacaatgtcattgccgtggctgccaccaataacttgtacatattccaggacaaaatcaactagagacgcgaacgtgaggaccaagtcttgtcttgcatagttaagccggacatttttctgtcagagaaaaggcatcattgtccgctccattaagaacagtgacgcacctgctacttcccttcacagacacaggagaaagccgcctccgctggaggcccggtgtggttccgcctcggcgaggcgcgagacaggcgctgctgctcacgtggagacgctctcgaagcagagttgacggacactgctcccaaaaggtcattactcagaataaatgtatttatttcagtccgagccttcctttccaatttatagaccaaaaaattaacatccaagagaaaagttattgtcagataccgctctttctccaactttccctctttctctgccatcacacttgggccttcactgcagcgtggtgtggccaccgtccgtgtcctctcggccttcctccgagtccaggtggactctgtggatgtgtggatgtggcccgagcaggctcaggcggccccactcacccacagcatccgccgccaccccttcgggtgtgagcgctcaataaaaacaacacactataaagtgtttttaaatcca

SEQ ID NO: 663785 - DNA, 176 bp, Homo sapiens
tagtagttggagaggctcttcttctgctaggaggaggaggaagagctcctggcaatcctggaacaggttctagttagatcccagagtctgtagttccatctttctcttttacttttcctctggctgcctgggatcttccccatttcacattcagtctgcggccatttacaatcaac

SEQ ID NO: 663786 - DNA, 2364 bp, Homo sapiens
  misc_feature (38)..(38): n is a, c, g, or t
  misc_feature (92)..(92): n is a, c, g, or t
agcgggtgtccggccaagcggcgccctgaaggcgtgtncggccgcagcttaggctctccgggagtccccggagagtaggggcggccggcggngctagtcttctggggagcgccgggtgcacaccggaccactgcgggaggcctagggccgagggccgaggagctggcctgcgcccggcgaccccggcttccctccgcagtcgcccaggcgtcccttcccccctacagccgagcggcgccgggcgcaggcgcattgggcgcccccggcagcccccgcggcgcgcccgtccgctgcccgtccgaggaggcggagggcgatgacgtcatcgagcggggcgacgggcattgggcgccattttgaacaaggggaaaaaagatccctccccggcggcggcggcggcggcggcggcgccggcggtggtggcggccccggggctgagcgctcggctgcagcggcgcggaggccgtctccctggtctgccgcggtccccgcccgtcccgccgccggctgccatggcaggagccggaggcggcggctgccccgcgggcggcaacgacttccagtggtgcttctcgcaggtcaagggggccatcgacgaggacgtggccgaaggagaataaaagccgccctcattctaggggagaatataatgtttacagcacctttcaaagtcatgaaccggagtttgactatttgaaaagtctagaaattgaggaaaaaattaataaaattaggtggttaccacaacagaatgctgctcattttctactgtctacaaatgataaaactataaaattatggaaaataagtgaacgggataaaagagcagaaggttataacctgaaagacgaagatggaagacttcgagacccatttaggatcacggcgctacgggtcccaatattgaagcccatggatcttatggtagaagcgagtccacggcgaatttttgcaaatgctcacacatatcatataaattccatttcagtaaatagtgatcatgaaacatatctttctgcagatgacctgagaattaatttatggcacttagaaatcacagatagaagctttaacatcgtggacatcaagcctgctaacatggaggagctgaccgaagtcatcactgcagccgagttccacccgcaccagtgcaacgtgttcgtctacagcagtagcaaagggaccatccgcctgtgtgacatgcgctcctcggccctgtgcgacagacactccaagttttttgaagagcctgaagatcccagcagtaggtccttcttctcagaaataatttcatccatatccgatgtaaaattcagtcatagtgggcggtacatgatgaccagagactacctgtcggtgaaggtgtgggacctcaacatggagagcaggccggtggagacccaccaggtccacgagtacctgcgcagcaagctctgctctctctatgagaacgactgcatctttgacaagtttgagtgttgctggaacggttcggatagcgccatcatgaccgggtcctataacaacttcttcaggatgtttgatagagacacgcggagggatgtgaccctggaggcctcgagagagagcagcaaaccgcgcgccagcctcaaaccccggaaggtgtgtacggggggtaagcggaggaaagacgagatcagtgtggacagtctggacttcaacaagaagatcctgcacacagcctggcaccccgtggacaatgtcattgccgtggctgccaccaataacttgtacatattccaggacaaaatcaactagagacgcgaacgtgaggaccaagtcttgtcttgcatagttaagccggacatttttctgtcagagaaaaggcatcattgtccgctccattaagaacagtgacgcacctgctacttcccttcacagacacaggagaaagccgcctccgctggaggcccggtgtggttccgcctcggcgaggcgcgagacaggcgctgctgctcacgtggagacgctctcgaagcagagttgacggacactgctcccaaaaggtcattactcagaataaatgtatttatttcagtccgagccttcctttccaatttatagaccaaaaaattaacatccaagagaaaagttattgtcagataccgctctttctccaactttccctctttctctgccatcacacttgggccttcactgcagcgtggtgtggccaccgtccgtgtcctctcggccttcctccgagtccaggtggactctgtggatgtgtggatgtggcccgagcaggctcaggcggccccactcacccacagcatccgccgccaccccttcgggtgtgagcgctcaataaaaacaacacactataaagtgtttttaaatcca

SEQ ID NO: 663787 - DNA, 247 bp, Homo sapiens
  misc_feature (30)..(30): n is a, c, g, or t
  misc_feature (33)..(33): n is a, c, g, or t
  misc_feature (58)..(58): n is a, c, g, or t
  misc_feature (126)..(126): n is a, c, g, or t
  misc_feature (172)..(172): n is a, c, g, or t
  misc_feature (201)..(201): n is a, c, g, or t
gaatataactatttttccgtcatcggcttnaanataaaaaggccatgaagaggttatnaagctctgtacggagtccatcatgtcactccagaataacctcaccagagttagaggaaagagtaggtncatttttggcatcagggacataagttgttcttgtctcagttcagcnaatggcagctgattctggcaaccaagatngcaagcatattgctcatcagattgggctcgtgccgaattcctgcag

SEQ ID NO: 663788 - DNA, 3482 bp, Homo sapiens
  misc_feature (38)..(38): n is a, c, g, or t
  misc_feature (92)..(92): n is a, c, g, or t
agcgggtgtccggccaagcggcgccctgaaggcgtgtncggccgcagcttaggctctccgggagtccccggagagtaggggcggccggcggngctagtcttctggggagcgccgggtgcacaccggaccactgcgggaggcctagggccgagggccgaggagctggcctgcgcccggcgaccccggcttccctccgcagtcgcccaggcgtcccttcccccctacagccgagcggcgccgggcgcaggcgcattgggcgcccccggcagcccccgcggcgcgcccgtccgctgcccgtccgaggaggcggagggcgatgacgtcatcgagcggggcgacgggcattgggcgccattttgaacaaggggaaaaaagatccctccccggcggcggcggcggcggcggcggcgccggcggtggtggcggccccggggctgagcgctcggctgcagcggcgcggaggccgtctccctggtctgccgcggtccccgcccgtcccgccgccggctgccatggcaggagccggaggcggcggctgccccgcgggcggcaacgacttccagtggtgcttctcgcaggtcaagggggccatcgacgaggacgtggccgaagggcgtggagaggagagctcggggctgctgccacagatcatgctgagccgccagcagctccacctgcccttggctttgctcatccgtggaaatgacaacagcgtgaaaacggcagatgatgtacaaggattatgatgaaaatagtcttgacctcacggaccctctgagaggttcttgaccgttgcaccctcaagggcccacagaccgcactttgagaactgctgcttgaatgcaagctattagcagtaggagtgtcaaggacagggcagacttcaggattaactgttccttctcatctttaccagattgtactggttttgtctcaaaatacaaaaatagagtgtttattatgtaaagaaaatcaaatgatagaacagctgagaacagctggatcaagagcacagagcggaagttcctcttcatcccactgctgtcctggagtcttcctcaggacccactgctcctaactgtatctttgtagatcattttctatgtgtttatttatttatattttaaaacctagtttgtgtataagcaatcttttttaatccacaaatgtggaatcttattctagactttgaataagattttctgtattagtcagtattgttttttgctacttcttttcctttcctttccttttttggaaatagggtcttactcctctgtcacccaggctggagtgcagtggtgcgatcagagctcactgcagcctgatcaggctcaagcaatcctctccctgctcagcctcctgagtagctggaactataggcttgcactgccatgcccagcttttttctattttttgtagagacagggttttgctgtgttgcccaggatggtcttgaactcctggactcaagtgatcctcccacctcggcctcccaaaatgctgggaatacaagcatgagccatggcatgtggccgccacttgccttttttcattaagagtctataattggagatcttacagggaactgggctttctgctcagccatactcgagctcatttgacccccggccactgccccttgaaatcggacatcatttccaccgttgagtttaattactctggagatcttcttgcaacaggagacaagggcggcagagttgttatttttcagcgtgaacaagaggtactggcccagccccgccgtcctgccctgccatgaagtgtgagcagctttctcagcacttcctgcagagaagtctggcaggggtgtgaattctctcttcccttcagggagagaataaaagccgccctcattctaggggagaatataatgtttacagcacctttcaaagtcatgaaccggagtttgactatttgaaaagtctagaaattgaggaaaaaattaataaaattaggtggttaccacaacagaatgctgctcattttctactgtctacaaatgataaaactataaaattatggaaaataagtgaacgggataaaagagcagaaggttataacctgaaagacgaagatggaagacttcgagacccatttaggatcacggcgctacggatgacctgagaattaatttatggcacttagaaatcacagatagaagctttaacatcgtggacatcaagcctgctaacatggaggagctgaccgaagtcatcactgcagccgagttccacccgcaccagtgcaacgtgttcgtctacagcagtagcaaagggaccatccgcctgtgtgacatgcgctcctcggccctgtgcgacagacactccaagttttttgaagagcctgaagatcccagcagtaggtccttcttctcagaaataatttcatccatatccgatgtaaaattcagtcatagtgggcggtacatgatgaccagagactacctgtcggtgaaggtgtgggacctcaacatggagagcaggccggtggagacccaccaggtccacgagtacctgcgcagcaagctctgctctctctatgagaacgactgcatctttgacaagtttgagtgttgctggaacggttcggatagcgccatcatgaccgggtcctataacaacttcttcaggatgtttgatagagacacgcggagggatgtgaccctggaggcctcgagagagagcagcaaaccgcgcgccagcctcaaaccccggaaggtgtgtacggggggtaagcggaggaaagacgagatcagtgtggacagtctggacttcaacaagaagatcctgcacacagcctggcaccccgtggacaatgtcattgccgtggctgccaccaataacttgtacatattccaggacaaaatcaactagagacgcgaacgtgaggaccaagtcttgtcttgcatagttaagccggacatttttctgtcagagaaaaggcatcattgtccgctccattaagaacagtgacgcacctgctacttcccttcacagacacaggagaaagccgcctccgctggaggcccggtgtggttccgcctcggcgaggcgcgagacaggcgctgctgctcacgtggagacgctctcgaagcagagttgacggacactgctcccaaaaggtcattactcagaataaatgtatttatttcagtccgagccttcctttccaatttatagaccaaaaaattaacatccaagagaaaagttattgtcagataccgctctttctccaactttccctctttctctgccatcacacttgggccttcactgcagcgtggtgtggccaccgtccgtgtcctctcggccttcctccgagtccaggtggactctgtggatgtgtggatgtggcccgagcaggctcaggcggccccactcacccacagcatccgccgccaccccttcgggtgtgagcgctcaataaaaacaacacactataaagtgtttttaaatcca

SEQ ID NO: 663789 - DNA, 1788 bp, Homo sapiens
  misc_feature (6)..(6): n is a, c, g, or t
  misc_feature (14)..(14): n is a, c, g, or t
  misc_feature (70)..(70): n is a, c, g, or t
caggangagggganccgcaggccttcggtgcctgggccagtttgttacccctgccagctgaatcttctcnttccagcgaggaaaccatgtccgacctccggtaaatggaaagcaaaggggaagacttggaatagacagtattccattttgtagcatattttcataactctgctaattggttatttgggggtattgcctgtacagaattattacttagccatgaatataaacttgtcctctttcgttatctactataagtgttctaattatgtgctgctgtgatctttgttttgaattcctatttccttccatttttaggtcccaatattgaagcccatggatcttatggtagaagcgagtccacggcgaatttttgcaaatgctcacacatatcatataaattccatttcagtaaatagtgatcatgaaacatatctttctgcagatgacctgagaattaatttatggcacttagaaatcacagatagaagctttaacatcgtggacatcaagcctgctaacatggaggagctgaccgaagtcatcactgcagccgagttccacccgcaccagtgcaacgtgttcgtctacagcagtagcaaagggaccatccgcctgtgtgacatgcgctcctcggccctgtgcgacagacactccaagttttttgaagagcctgaagatcccagcagtaggtccttcttctcagaaataatttcatccatatccgatgtaaaattcagtcatagtgggcggtacatgatgaccagagactacctgtcggtgaaggtgtgggacctcaacatggagagcaggccggtggagacccaccaggtccacgagtacctgcgcagcaagctctgctctctctatgagaacgactgcatctttgacaagtttgagtgttgctggaacggttcggatagcgccatcatgaccgggtcctataacaacttcttcaggatgtttgatagagacacgcggagggatgtgaccctggaggcctcgagagagagcagcaaaccgcgcgccagcctcaaaccccggaaggtgtgtacggggggtaagcggaggaaagacgagatcagtgtggacagtctggacttcaacaagaagatcctgcacacagcctggcaccccgtggacaatgtcattgccgtggctgccaccaataacttgtacatattccaggacaaaatcaactagagacgcgaacgtgaggaccaagtcttgtcttgcatagttaagccggacatttttctgtcagagaaaaggcatcattgtccgctccattaagaacagtgacgcacctgctacttcccttcacagacacaggagaaagccgcctccgctggaggcccggtgtggttccgcctcggcgaggcgcgagacaggcgctgctgctcacgtggagacgctctcgaagcagagttgacggacactgctcccaaaaggtcattactcagaataaatgtatttatttcagtccgagccttcctttccaatttatagaccaaaaaattaacatccaagagaaaagttattgtcagataccgctctttctccaactttccctctttctctgccatcacacttgggccttcactgcagcgtggtgtggccaccgtccgtgtcctctcggccttcctccgagtccaggtggactctgtggatgtgtggatgtggcccgagcaggctcaggcggccccactcacccacagcatccgccgccaccccttcgggtgtgagcgctcaataaaaacaacacactataaagtgtttttaaatcca

SEQ ID NO: 663790 - DNA, 4882 bp, Homo sapiens
  misc_feature (1946)..(1946): n is a, c, g, or t
agcggtatttcctcagtgattacgtacagagcgagtccctgcgggttaggggccccctctggagccatcctgatggctttgggggccttgcttccattttccattattatgtggactaccggagcgacagcgcagtccaagaccttgcaggatgtctcgccgcaagcaagcgaaaccgagatccctcaaagaccccaactgtaaacttgaagacaagactgaagatggagaggcactagattgtaagaagaggccggaagacggggaggagttggaagacgaagctgtgcacagctgtgacagctgcttccaggtgtttgaatcgctgagcgatatcacagaacacaagattaatcaatgtcaactgacagatggagtggatgttgaagatgatccgacttgctcttggccagcttcctcaccttctagcaaggatcagacttcccctagccatggagaaggttgcgattttggagaggaagaaggtggccctgggcttccatacccgtgtcaattctgtgacaagtcgtttagccgcctcagctacctaaagcaccatgagcagagtcacagtgacaaactgcctttcaaatgcacctactgcagtaagctgttcaaacacaagcgcagccgagatcgccacataaaactccacaccggggacaagaagtaccactgcagtgaatgtgatgctgcgttttccagaagtgatcacttgaagatccacttaaagactcacacgtccaacaagccatataaatgtgccatttgtcgccgtgggtttctgtcctctagttccttacacggacacatgcaggttcatgagaggaacaaggacggctctcagtccggttccaggatggaggactggaagatgaaggacactcagaagtgcagtcagtgtgaggaaggctttgacttcccggaagacctccaaaaacacattgcagagtgccaccccgaatgctccccaaatgaggaccgagcggccctccagtgtgtctactgccacgagctcttcgtagaggagacctccctcatgaaccacatggagcaggtgcatagcggggagaagaagaactcatgcagcatttgttctgagagtttccacacagttgaggaactgtacagccacatggacagtcaccagcaaccggagtcatgcaatcacagcaacagcccttccctggtcacggtgggctatacctccgtgtccagtacgactccagattccaacctctcagtggacagctcaaccatggtggaagctgccccgccaatcccaaagagtcgagggaggaagagggccgctcaacaaacccctgacatgactggtccctcgagtaaacaagcaaaagttacctacagctgtatttactgcaacaaacaattattttcaagtcttgcagttctgcagattcacctgaaaactatgcacttagataagccagaacaggcccatatttgtcagtattgcttggaggtcctgccctcactctataacctaaatgaacatcttaagcaagtgcatgaagctcaggacccaggtctgattgtttctgccatgcctgccattgtctaccagtgtaacttctgttccgaagttgtcaacgacctcaacactcttcaggaacacatccgatgttctcatggatttgcaaaccctgcagctaaagatagtaatgcattcttttgtccccattgctatatggggtttctcactgactcttccctggaagagcatattagacaggttcattgtgacctcagtggctcccgatttgggtctccagtgcttgggactcccaaagaaccagtagtagaagtctattcttgttcctattgtacaaattcgccaatattcaacagcgttcttaaactgaacaagcatatcaaagagaatcataaaaacattcccttggccctgaattatatccacaatgggnagaaatccagggccttaagccccctatctcctgtggccatagagcagacatctcttaagatgatgcaggcagtaggaggtgcacctgcacgtcccactggagaatatatctgtaatcaatgtggtgctaagtacacatccctagacagctttcagactcacctaaaaactcatctcgacactgtgcttccaaaattgacctgtcctcagtgcaacaaggaattccccaaccaagaatccttgctgaagcatgttaccattcactttatgatcacttcaacgtattacatctgtgagagttgtgacaagcaattcacatcagtggatgaccttcagaaacacctgctggacatgcacacctttgtcttctttcgctgcaccctctgccaggaagtttttgactcaaaagtctccattcagctccacttggctgtgaagcacagtaacgaaaagaaagtctataggtgcacatcttgcaactgggacttccgcaacgaaactgacttgcagctccatgtgaaacacaaccacctggaaaaccaagggaaagtgcataagtgcattttctgcggtgagtcctttggcaccgaggtggagctgcaatgccacatcaccactcacagtaagaagtacaactgcaagttctgtagcaaagccttccatgcgatcattttgttagaaaaacacttgcgagaaaaacactgtgtattcgaaaccaagacacccaactgtggaacaaatggagcttccgagcaagtgcagaaagaggaagtggagctgcagactttgctgaccaacagccaggagtcccacaacagtcacgatgggagcgaagaagacgttgacacctctgagcctatgtacggctgcgacatttgtggggcagcctacactatggaaactttgctgcagaatcaccagctccgagaccacaacatcagacctggagaaagtgccatcgtgaaaaagaaagctgagctcattaaagggaattacaagtgcaacgtgtgctctcgaaccttcttctccgaaaatggcctccgggaacatatgcagacccacctaggccctgtcaaacactacatgtgccctatttgcggagagcggtttccctcccttttaactcttactgaacacaaagtcacgcatagtaagagtcttgatactggaaactgccggatttgcaagatgcctctccagagtgaagaggagtttttagagcattgccaaatgcaccctgacttgaggaattccctgacaggctttcgctgcgtggtgtgcatgcagacagtgacctccaccttggaactcaaaatccatgggacgttccacatgcaaaagacagggaatgggtctgcagttcagaccacagggcggggccagcacgtccaaaaactgtataagtgcgcatcttgcctcaaagaattccgttccaagcaagatctggtgaaacttgatatcaatggcctgccatatggtctgtgtgccggctgcgtgaatctcagtaagagcgccagcccaggcattaacgtccctcccggcacgaatagaccaggcttgggccagaatgagaatctgagtgccattgaggggaaaggcaaggtggggggactgaagacacgctgctctagctgcaacgttaagtttgagtctgaaagtgaactccagaaccacatccaaaccatccaccgagagctcgtgccagacagcaacagcacacagttgaaaacgccccaagtatcaccaatgcccagaatcagtccctcccagtcggatgagaagaagacctatcaatgcatcaagtgtcagatggttttctacaatgaatgggatattcaggttcatgttgcaaatcacatgattgatgaaggactgaaccatgaatgcaaactctgcagccagacctttgactctcctgccaaactccagtgccacctgatagagcacagcttcgaagggatgggaggcaccttcaagtgtccagtctgctttacagtatttgttcaagcaaacaagttgcagcagcatattttctctgcccatggacaagaagacaagatctatgactgtacacaatgtccacagaagtttttcttccaaacagagctgcagaatcatacaatgacccaacacagcagttagtgcaagtacagtctctcaaggagaattgattttgtggcacaaaaagggaacatgttttactctttgcacgaaactttcattgttaatgtatattattcagaaacattgtattgtaccataaaacttgtattatcaaactgttggatgttcatgtgtttgaacttttgcgcaccggatagaccccttgtatataaagtgttgcacatgtattatgtcgtctgatactaaaatggtcttataaagacaagtggacttgggccctattcaggcaagattaaaaaaaaaaaaagactatgaccaaaatggcttaagataaagtatttttaaggaagaaagattaaaaacaactgttatacatgagactatggttggacttccttttctttacacttaagcctagaatttctctttaggtatatcagcgcttaaatccaagactattttttattgctgaagattcttgcaaaccatgaagagatgttctcacagaacagaaccccacagctggataaggcccgtatatatatatttgtaagccttgcaatgtgacaggtagcatcactatatatgcaatagttgttatgtagactgtcaaagaatttttttttccctggatacatttgaagctttgagtgttcaaggttttccttaatgatttcacgcagccaaattcttgaatcagttgaactaacctgtatgttactgttattaatgtttactctgcagtctgaacctggagattactggaattgttttccaagaggaaataaattcagtttaccattaaaaaaaaaa

SEQ ID NO: 663791 - DNA, 296 bp, Homo sapiens
  misc_feature (79)..(79): n is a, c, g, or t
  misc_feature (217)..(217): n is a, c, g, or t
  misc_feature (242)..(242): n is a, c, g, or t
cccccaataaattttttgtgaggggtcaaaaaaaagggggataaaatcccctacaatccccccccggggggtgggggtncaaacccccccggtcaaaaattttctcccccccaagaaggaaccccctcttcccgacggtgagaacaaccctttatccttagaagccccccccttaaaggaggacccccgccccggcgtagcgaagcggcgagtattnaaacaccacagagttttgtgcccanctcaccgaggtgcgaaaaaaccgagccctttattgtgacccccattgtgagcgc

SEQ ID NO: 663792 - DNA, 2158 bp, Homo sapiens
  misc_feature (38)..(38): n is a, c, g, or t
  misc_feature (92)..(92): n is a, c, g, or t
agcgggtgtccggccaagcggcgccctgaaggcgtgtncggccgcagcttaggctctccgggagtccccggagagtaggggcggccggcggngctagtcttctggggagcgccgggtgcacaccggaccactgcgggaggcctagggccgagggccgaggagctggcctgcgcccggcgaccccggcttccctccgcagtcgcccaggcgtcccttcccccctacagccgagcggcgccgggcgcaggcgcattgggcgcccccggcagcccccgcggcgcgcccgtccgctgcccgtccgaggaggcggagggcgatgacgtcatcgagcggggcgacgggcattgggcgccattttgaacaaggggaaaaaagatccctccccggcggcggcggcggcggcggcggcgccggcggtggtggcggccccggggctgagcgctcggctgcagcggcgcggaggccgtctccctggtctgccgcggtccccgcccgtcccgccgccggctgccatggcaggagccggaggcggcggctgccccgcgggcggcaacgacttccagtggtgcttctcgcaggtcaagggggccatcgacgaggacgtggccgaagcggacatcatttccaccgttgagtttaattactctggagatcttcttgcaacaggagacaagggcggcagagttgttatttttcagcgtgaacaagagaataaaagccgccctcattctaggggagaatataatgtttacagcacctttcaaagtcatgaaccggagtttgactatttgaaaagtctagaaattgaggaaaaaattaataaaattaggtggttaccacaacagaatgctgctcattttctactgtctacaaatgataaaactataaaattatggaaaataagtgaacgggataaaagagcagaaggttataacctgaaagacgaagatggaagacttcgagacccatttaggatcacggcgctacgggtcccaatattgaagcccatggatcttatggtagaagcgagtccacggcgaatttttgcaaatgctcacacatatcatataaattccatttcagtaaatagtgatcatgaaacatatctttctgcagatgacctgagaattaatttatggcacttagaaatcacagatagaagctttaacatcgtggacatcaagcctgctaacatggaggagctgaccgaagtcatcactgcagccgagttccacccgcaccagtgcaacgtgttcgtctacagcagtagcaaagggaccatccgcctgtgtgacatgcgctcctcggccctgtgcgacagacactccaagttttttgaagagcctgaagatcccagcagtaggtccttcttctcagaaataatttcatccatatccgatgtaaaattcagtcatagtgggcggtacatgatgaccagagactacctgtcggtgaaggtgtgggacctcaacatggagagcaggccggtggagacccaccaggtccacgagtacctgcgcagcaagctctgctctctctatgagaacgactgcatctttgacaagtttgagtgttgctggaacggttcggatagcgccatcatgaccgggtcctataacaacttcttcaggatgtttgatagagacacgcggagggatgtgaccctggaggcctcgagagagagcagcaaaccgcgcgccagcctcaaaccccggaaggtgtgtacggggggtaagcggaggaaagacgagatcagtgtggacagtctggacttcaacaagaagatcctgcacacagcctggcaccccgtggacaatgtcattgccgtggctgccaccaataacttgtacatattccaggacaaaatcaactagagacgcgaacgtgaggaccaagtcttgtcttgcatagttaagccggacatttttctgtcagagaaaaggcatcattgtccgctccattaagaacagtgacgcacctgctacttcccttcacagacacaggagaaagccgcctccgctggaggcccggtgtggttccgcctcggcgaggcgcgagacaggcgctgctgctcacgtggagacgctctcgaagcagagttgacggacactgctcccaaaaggtcattactcagaataaatgtatttatttcagtccg

SEQ ID NO: 663793 - DNA, 4841 bp, Homo sapiens
  misc_feature (1905)..(1905): n is a, c, g, or t
agcggtatttcctcagtgattacgtacagagcgagtccctgcgggttaggggccccctctggagccatcctgatggctttgggggccttgcttccattttccattattatgtggactaccggagcgacagcgcagtccaagaccttgcagaccccaactgtaaacttgaagacaagactgaagatggagaggcactagattgtaagaagaggccggaagacggggaggagttggaagacgaagctgtgcacagctgtgacagctgcttccaggtgtttgaatcgctgagcgatatcacagaacacaagattaatcaatgtcaactgacagatggagtggatgttgaagatgatccgacttgctcttggccagcttcctcaccttctagcaaggatcagacttcccctagccatggagaaggttgcgattttggagaggaagaaggtggccctgggcttccatacccgtgtcaattctgtgacaagtcgtttagccgcctcagctacctaaagcaccatgagcagagtcacagtgacaaactgcctttcaaatgcacctactgcagtaagctgttcaaacacaagcgcagccgagatcgccacataaaactccacaccggggacaagaagtaccactgcagtgaatgtgatgctgcgttttccagaagtgatcacttgaagatccacttaaagactcacacgtccaacaagccatataaatgtgccatttgtcgccgtgggtttctgtcctctagttccttacacggacacatgcaggttcatgagaggaacaaggacggctctcagtccggttccaggatggaggactggaagatgaaggacactcagaagtgcagtcagtgtgaggaaggctttgacttcccggaagacctccaaaaacacattgcagagtgccaccccgaatgctccccaaatgaggaccgagcggccctccagtgtgtctactgccacgagctcttcgtagaggagacctccctcatgaaccacatggagcaggtgcatagcggggagaagaagaactcatgcagcatttgttctgagagtttccacacagttgaggaactgtacagccacatggacagtcaccagcaaccggagtcatgcaatcacagcaacagcccttccctggtcacggtgggctatacctccgtgtccagtacgactccagattccaacctctcagtggacagctcaaccatggtggaagctgccccgccaatcccaaagagtcgagggaggaagagggccgctcaacaaacccctgacatgactggtccctcgagtaaacaagcaaaagttacctacagctgtatttactgcaacaaacaattattttcaagtcttgcagttctgcagattcacctgaaaactatgcacttagataagccagaacaggcccatatttgtcagtattgcttggaggtcctgccctcactctataacctaaatgaacatcttaagcaagtgcatgaagctcaggacccaggtctgattgtttctgccatgcctgccattgtctaccagtgtaacttctgttccgaagttgtcaacgacctcaacactcttcaggaacacatccgatgttctcatggatttgcaaaccctgcagctaaagatagtaatgcattcttttgtccccattgctatatggggtttctcactgactcttccctggaagagcatattagacaggttcattgtgacctcagtggctcccgatttgggtctccagtgcttgggactcccaaagaaccagtagtagaagtctattcttgttcctattgtacaaattcgccaatattcaacagcgttcttaaactgaacaagcatatcaaagagaatcataaaaacattcccttggccctgaattatatccacaatgggnagaaatccagggccttaagccccctatctcctgtggccatagagcagacatctcttaagatgatgcaggcagtaggaggtgcacctgcacgtcccactggagaatatatctgtaatcaatgtggtgctaagtacacatccctagacagctttcagactcacctaaaaactcatctcgacactgtgcttccaaaattgacctgtcctcagtgcaacaaggaattccccaaccaagaatccttgctgaagcatgttaccattcactttatgatcacttcaacgtattacatctgtgagagttgtgacaagcaattcacatcagtggatgaccttcagaaacacctgctggacatgcacacctttgtcttctttcgctgcaccctctgccaggaagtttttgactcaaaagtctccattcagctccacttggctgtgaagcacagtaacgaaaagaaagtctataggtgcacatcttgcaactgggacttccgcaacgaaactgacttgcagctccatgtgaaacacaaccacctggaaaaccaagggaaagtgcataagtgcattttctgcggtgagtcctttggcaccgaggtggagctgcaatgccacatcaccactcacagtaagaagtacaactgcaagttctgtagcaaagccttccatgcgatcattttgttagaaaaacacttgcgagaaaaacactgtgtattcgaaaccaagacacccaactgtggaacaaatggagcttccgagcaagtgcagaaagaggaagtggagctgcagactttgctgaccaacagccaggagtcccacaacagtcacgatgggagcgaagaagacgttgacacctctgagcctatgtacggctgcgacatttgtggggcagcctacactatggaaactttgctgcagaatcaccagctccgagaccacaacatcagacctggagaaagtgccatcgtgaaaaagaaagctgagctcattaaagggaattacaagtgcaacgtgtgctctcgaaccttcttctccgaaaatggcctccgggaacatatgcagacccacctaggccctgtcaaacactacatgtgccctatttgcggagagcggtttccctcccttttaactcttactgaacacaaagtcacgcatagtaagagtcttgatactggaaactgccggatttgcaagatgcctctccagagtgaagaggagtttttagagcattgccaaatgcaccctgacttgaggaattccctgacaggctttcgctgcgtggtgtgcatgcagacagtgacctccaccttggaactcaaaatccatgggacgttccacatgcaaaagacagggaatgggtctgcagttcagaccacagggcggggccagcacgtccaaaaactgtataagtgcgcatcttgcctcaaagaattccgttccaagcaagatctggtgaaacttgatatcaatggcctgccatatggtctgtgtgccggctgcgtgaatctcagtaagagcgccagcccaggcattaacgtccctcccggcacgaatagaccaggcttgggccagaatgagaatctgagtgccattgaggggaaaggcaaggtggggggactgaagacacgctgctctagctgcaacgttaagtttgagtctgaaagtgaactccagaaccacatccaaaccatccaccgagagctcgtgccagacagcaacagcacacagttgaaaacgccccaagtatcaccaatgcccagaatcagtccctcccagtcggatgagaagaagacctatcaatgcatcaagtgtcagatggttttctacaatgaatgggatattcaggttcatgttgcaaatcacatgattgatgaaggactgaaccatgaatgcaaactctgcagccagacctttgactctcctgccaaactccagtgccacctgatagagcacagcttcgaagggatgggaggcaccttcaagtgtccagtctgctttacagtatttgttcaagcaaacaagttgcagcagcatattttctctgcccatggacaagaagacaagatctatgactgtacacaatgtccacagaagtttttcttccaaacagagctgcagaatcatacaatgacccaacacagcagttagtgcaagtacagtctctcaaggagaattgattttgtggcacaaaaagggaacatgttttactctttgcacgaaactttcattgttaatgtatattattcagaaacattgtattgtaccataaaacttgtattatcaaactgttggatgttcatgtgtttgaacttttgcgcaccggatagaccccttgtatataaagtgttgcacatgtattatgtcgtctgatactaaaatggtcttataaagacaagtggacttgggccctattcaggcaagattaaaaaaaaaaaaagactatgaccaaaatggcttaagataaagtatttttaaggaagaaagattaaaaacaactgttatacatgagactatggttggacttccttttctttacacttaagcctagaatttctctttaggtatatcagcgcttaaatccaagactattttttattgctgaagattcttgcaaaccatgaagagatgttctcacagaacagaaccccacagctggataaggcccgtatatatatatttgtaagccttgcaatgtgacaggtagcatcactatatatgcaatagttgttatgtagactgtcaaagaatttttttttccctggatacatttgaagctttgagtgttcaaggttttccttaatgatttcacgcagccaaattcttgaatcagttgaactaacctgtatgttactgttattaatgtttactctgcagtctgaacctggagattactggaattgttttccaagaggaaataaattcagtttaccattaaaaaaaaaa

SEQ ID NO: 663794 - DNA, 241 bp, Homo sapiens
tggactatgctttgagccctaaatgagatatattttcaattactgtacgatacatattgctagtgctgggaatactctacagtacactttatttgctaaatgcatttcacacaagctgcatctgaaatgctttctgagcaaatgctcaggtttccatttgttcctcttgcttgcgttttcgatctgctgcttctttctcatgttggcctttcagcatattccttctgtgttacgtctaggt

SEQ ID NO: 663795 - DNA, 150 bp, Homo sapiens
gcgggttcatatggtatatttaatagtctacaaatcaaagattcaaagcagagcctaaaaacattccagtatattctcataccaactcatctacattgaaatgaaaatctatgtatggttctcacaaaccgttactattagacccgcaag

SEQ ID NO: 663796 - DNA, 4319 bp, Homo sapiens
  misc_feature (1905)..(1905): n is a, c, g, or t
agcggtatttcctcagtgattacgtacagagcgagtccctgcgggttaggggccccctctggagccatcctgatggctttgggggccttgcttccattttccattattatgtggactaccggagcgacagcgcagtccaagaccttgcagaccccaactgtaaacttgaagacaagactgaagatggagaggcactagattgtaagaagaggccggaagacggggaggagttggaagacgaagctgtgcacagctgtgacagctgcttccaggtgtttgaatcgctgagcgatatcacagaacacaagattaatcaatgtcaactgacagatggagtggatgttgaagatgatccgacttgctcttggccagcttcctcaccttctagcaaggatcagacttcccctagccatggagaaggttgcgattttggagaggaagaaggtggccctgggcttccatacccgtgtcaattctgtgacaagtcgtttagccgcctcagctacctaaagcaccatgagcagagtcacagtgacaaactgcctttcaaatgcacctactgcagtaagctgttcaaacacaagcgcagccgagatcgccacataaaactccacaccggggacaagaagtaccactgcagtgaatgtgatgctgcgttttccagaagtgatcacttgaagatccacttaaagactcacacgtccaacaagccatataaatgtgccatttgtcgccgtgggtttctgtcctctagttccttacacggacacatgcaggttcatgagaggaacaaggacggctctcagtccggttccaggatggaggactggaagatgaaggacactcagaagtgcagtcagtgtgaggaaggctttgacttcccggaagacctccaaaaacacattgcagagtgccaccccgaatgctccccaaatgaggaccgagcggccctccagtgtgtctactgccacgagctcttcgtagaggagacctccctcatgaaccacatggagcaggtgcatagcggggagaagaagaactcatgcagcatttgttctgagagtttccacacagttgaggaactgtacagccacatggacagtcaccagcaaccggagtcatgcaatcacagcaacagcccttccctggtcacggtgggctatacctccgtgtccagtacgactccagattccaacctctcagtggacagctcaaccatggtggaagctgccccgccaatcccaaagagtcgagggaggaagagggccgctcaacaaacccctgacatgactggtccctcgagtaaacaagcaaaagttacctacagctgtatttactgcaacaaacaattattttcaagtcttgcagttctgcagattcacctgaaaactatgcacttagataagccagaacaggcccatatttgtcagtattgcttggaggtcctgccctcactctataacctaaatgaacatcttaagcaagtgcatgaagctcaggacccaggtctgattgtttctgccatgcctgccattgtctaccagtgtaacttctgttccgaagttgtcaacgacctcaacactcttcaggaacacatccgatgttctcatggatttgcaaaccctgcagctaaagatagtaatgcattcttttgtccccattgctatatggggtttctcactgactcttccctggaagagcatattagacaggttcattgtgacctcagtggctcccgatttgggtctccagtgcttgggactcccaaagaaccagtagtagaagtctattcttgttcctattgtacaaattcgccaatattcaacagcgttcttaaactgaacaagcatatcaaagagaatcataaaaacattcccttggccctgaattatatccacaatgggnagaaatccagggccttaagccccctatctcctgtggccatagagcagacatctcttaagatgatgcaggcagtaggaggtgcacctgcacgtcccactggagaatatatctgtaatcaatgtggtgctaagtacacatccctagacagctttcagactcacctaaaaactcatctcgacactgtgcttccaaaattgacctgtcctcagtgcaacaaggaattccccaaccaagaatccttgctgaagcatgttaccattcactttatgatcacttcaacgtattacatctgtgagagttgtgacaagcaattcacatcagtggatgaccttcagaaacacctgctggacatgcacacctttgtcttctttcgctgcaccctctgccaggaagtttttgactcaaaagtctccattcagctccacttggctgtgaagcacagtaacgaaaagaaagtctataggtgcacatcttgcaactgggacttccgcaacgaaactgacttgcagctccatgtgaaacacaaccacctggaaaaccaagggaaagtgcataagtgcattttctgcggtgagtcctttggcaccgaggtggagctgcaatgccacatcaccactcacagtaagaagtacaactgcaagttctgtagcaaagccttccatgcgatcattttgttagaaaaacacttgcgagaaaaacactgtgtattcgaaaccaagacacccaactgtggaacaaatggagcttccgagcaagtgcagaaagaggaagtggagctgcagactttgctgaccaacagccaggagtcccacaacagtcacgatgggagcgaagaagacgttgacacctctgagcctatgtacggctgcgacatttgtggggcagcctacactatggaaactttgctgcagaatcaccagctccgagaccacaacatcagacctggagaaagtgccatcgtgaaaaagaaagctgagctcattaaagggaattacaagtgcaacgtgtgctctcgaaccttcttctccgaaaatggcctccgggaacatatgcagacccacctaggccctgtcaaacactacatgtgccctatttgcggagagcggtttccctcccttttaactcttactgaacacaaagtcacgcatagtaagagtcttgatactggaaactgccggatttgcaagatgcctctccagagtgaagaggagtttttagagcattgccaaatgcaccctgacttgaggaattccctgacaggctttcgctgcgtggtgtgcatgcagacagtgacctccaccttggaactcaaaatccatgggacgttccacatgcaaaagacagggaatgggtctgcagttcagaccacagggcggggccagcacgtccaaaaactgtataagtgcgcatcttgcctcaaagaattccgttccaagcaagatctggtgaaacttgatatcaatggcctgccatatggtctgtgtgccggctgcgtgaatctcagtaagagcgccagcccaggcattaacgtccctcccggcacgaatagaccaggcttgggccagaatgagaatctgagtgccattgaggggaaaggcaaggtggggggactgaagacacgctgctctagctgcaacgttaagtttgagtctgaaagtgaactccagaaccacatccaaaccatccaccgagagctcgtgccagacagcaacagcacacagttgaaaacgccccaagtatcaccaatgcccagaatcagtccctcccagtcggatgagaagaagacctatcaatgcatcaagtgtcagatggttttctacaatgaatgggatattcaggttcatgttgcaaatcacatgattgatgaaggactgaaccatgaatgcaaactctgcagccagacctttgactctcctgccaaactccagtgccacctgatagagcacagcttcgaagggatgggaggcaccttcaagtgtccagtctgctttacagtatttgttcaagcaaacaagttgcagcagcatattttctctgcccatggacaagaagacaagatctatgactgtacacaatgtccacagaagtttttcttccaaacagagctgcagaatcatacaatgacccaacacagcagttagtgcaagtacagtctctcaaggagaattgattttgtggcacaaaaagggaacatgttttactctttgcacgaaactttcattgttaatgtatattattcagaaacattgtattgtaccataaaacttgtattatcaaactgttggatgttcatgtgtttgaacttttgcgcaccggatagaccccttgtatataaagtgttgcacatgtattatgtcgtctgatactaaaatggtcttataaagacaagtggacttgggccctattcaggcaag

SEQ ID NO: 663797 - DNA, 87 bp, Homo sapiens
cgacccacgcgtcgcggacgcgtgggtcgacccacgcgtccggtgttatattaccatggaacgcctaataaagcaaaatgtggttgt

SEQ ID NO: 663798 - DNA, 870 bp, Homo sapiens
gtaaaatatataaatttagaatatcgatactattcttataacctaatattctaacaagacccaacttgcacgcagagcaagtacagtctctcaaggagaattgattttgtggcacaaaaagggaacatgttttactctttgcacgaaactttcattgttaatgtatattattcagaaacattgtattgtaccataaaacttgtattatcaaactgttggatgttcatgtgtttgaacttttgcgcaccggatagaccccttgtatataaagtgttgcacatgtattatgtcgtctgatactaaaatggtcttataaagacaagtggacttgggccctattcaggcaagattaaaaaaaaaaaaagactatgaccaaaatggcttaagataaagtatttttaaggaagaaagattaaaaacaactgttatacatgagactatggttggacttccttttctttacacttaagcctagaatttctctttaggtatatcagcgcttaaatccaagactattttttattgctgaagattcttgcaaaccatgaagagatgttctcacagaacagaaccccacagctggataaggcccgtatatatatatttgtaagccttgcaatgtgacaggtagcatcactatatatgcaatagttgttatgtagactgtcaaagaatttttttttccctggatacatttgaagctttgagtgttcaaggttttccttaatgatttcacgcagccaaattcttgaatcagttgaactaacctgtatgttactgttattaatgtttactctgcagtctgaacctggagattactggaattgttttccaagaggaaataaattcagtttaccattaaaaaaaaaa

SEQ ID NO: 663799 - DNA, 81 bp, Homo sapiens
ggcggctactatttaactgactattcttgatgtaaaatcttgtcatgtgtataaaaataaaaaagatcccaaaaaaaaaaa

SEQ ID NO: 663800 - DNA, 181 bp, Homo sapiens
acgaatgacagcgggattgaatctgagctcagcatcactactcagctccaaggtggatttagtgtgactatgtgcctgctattattttctacttatatagtcttaaatacatacttcccatggtacatttgtttatgacctattctcagtgttatatagtaatataagggggtacgagctc

SEQ ID NO: 663801 - DNA, 379 bp, Homo sapiens
gatgccagcctcaaggactccggatgtagatgtcaacatcgcagggcctgtgatgctgcactcaaagtcgacgtgaaatcgcccaaaaccaagacaacgctgtttggacaactgtacttcccagatgtcagcgtttgcaccattaaatccactacatttaaagctgagtgccctctccctcagccccaacactggagggtgacactcccggcacctgatctggcaactttcttcgccagcgcattcacgtcgaaggtcttgaaatccaggcgcaggtccccaaggtcacgcatgccgcatgtggcaccatctcagtgccacacaatatcgggtgaccttgaaaggccccaaagtgcaggcaaacttgggtgcacctgaa

SEQ ID NO: 663802 - DNA, 175 bp, Homo sapiens
ttttaggctgggcacaatgcctcatgcctgtaatcccaacactttgggaggtagaggctggaagattgcttgagtccaggagttcaagactgcctgtgtaatataatgggaaccctgtgtctaaaaaaaaaaataagtaaaaataaaattctggtaatttttaattcttaggaaa

SEQ ID NO: 663803 - DNA, 701 bp, Homo sapiens
agaaaaataggctaggtagaggctgggttttaattggccgaggctcgggctcacactgagtcggccccgtcgggggcagcagtgagcagcaggtgcccatcctggagaagttttgcttcactccccatcactgtgaggaggggtgcctagtctgattctgcgctgccctgcaggaggagctgcaactgtgcaaggtggctggtgcagtgcaactgctaggacctaatggtgacccagcaggtgctgaagatggtgtgtgccctggactggattggggcccagatccccctggtacccctcacagcaggaactgccccggttgttgtcggctgcctgcaggcttcagctcaacgggaaccttgcagctggagctggcgcaggtgctggcccaggagaggcccaagctgccagaggacccctctgctcaggcggctcctggactccccggcactcaagggcctgcctggacacttgccgtggagaacatgcccagccttgaaggatgacggtggtggaaggtgctggctggccacggtcacctgtattccctgcatcccaggactgtcagccccccatcgcctgcttgaagctgagctaaacggccacgaccggcaccccaggcctgtaggctgccagtgcgagctgaagaagcacgacgttgccaggcagtgagatccggagacctgcccagtgcctgggag

SEQ ID NO: 663804 - DNA, 118 bp, Homo sapiens
agatcatagaggatttccctccgtgtcagcatttaaatcagcacaagagaatcggctgcctgtgggcccctttcaagaaatttggctctaccaggaaaacagttacacattttaagag

SEQ ID NO: 663805 - DNA, 720 bp, Homo sapiens
cgcgtggcaaagatgaactatcatagccgagcatattatatcatggactaaccggtacaccttctgactaatggagtacctcgaaataactctgcctggtgagccaatgctaagacccgggaagccagacgagctacctaacaacagataaaagagcacactcgcctatgttgctcaacatagtgaagatttatctgtcgagaggactaacctaccgagcctgaggatagctggattgacaagatagaatcttagttcaactttaaagttgtccactagcaccctctaaatacccttgaccatataactgttagtacaagagaggagcagctatttgtagcactaggaaacaacctcgtcgtgagagaaacataattatcacccttcgctagcctaaaagcacccgccaattgagaaagcgttcaggctcacactcactacctacaaagaccagacatataattcgaactccttacacacacatggaccaatgtatcaccctatagaagaacgtagtgtatgagtaagtatcatgcatgctactgcggataaggctgcgtcacgatttattaccctcaatgtgaacccaacacagcgctgctcatagcgaatggctttattcatagaaagaggctcgaggtgcggacactgtacccaaatccacatatgacgagtcgtagtacgtcactgtgcgtcgatataccacagctgtgagtgatt

SEQ ID NO: 663806 - DNA, 183 bp, Homo sapiens
aattcccccatacagagctgatatacctgttaactgcatgaagggcttatgattcttgtccctaataataatttccctattctaggtatttcttttaacccccgtttaaaatttttaaaaaacccttttttttcttttaaaaaagccgtccccccaccccagtaattttgggaactcttcccc

SEQ ID NO: 663807 - DNA, 207 bp, Homo sapiens
cccttgggggaaaaaaaaaaaatttcgaaaaaaaaaatttagggggggggccccaaattccaagggggaaaatttttttgggggggggccccccccttaaagggggggcccccggggttttggcggcaaaaatccgaacccccccggggggcccgtttcccgggggtttccaggaacccatttaaattgtcaggctgctcccgcctc

SEQ ID NO: 663808 - DNA, 873 bp, Homo sapiens
ggctctgaaccagcggttggtgaagccagggaagagcgctctatacggatgcttcaatgaggtgatgatgacctttatgactcggatgaccagctgcgggcagagagtgcttccgggacccaggtgtcggcacatggctcaactcttctactaccttggcctgtggaagctattagctacatcctgtcgaagaaacgcatgggtgctgcaagggactccatccccgaagacaccgtgaccttccgtcagatccatcgtgtgaatgtgccagaactcactctatgccaccttcctccccaaagtggactcgccccggtgctgcctttctgaagcggatacctggatggttggatcttgccatctttttccttgtgggaagaaagctgatggatgagaaagcttcgagagatatggaggcccaacctgcaggcagcaggcccagatggcatccaggtgtctgctaccttgcattcttaagtgccaggggaccaccctcaagtcctcgggaggccatgggcaagcctgctgaagcttggtcatgggctggaagtgggcccgacgtcccaaccacgcgtgactttgggcctggtaccaccttctcaaaaggaccctggagattcaaggagggccttgggctgaaggaaatgtgttgggtgtgctgccagccgggaagtgcccagccaaaaggattttgcccacatgccggtgctcaaaggctgtgttaagggcacctgggttctaccctgttggcccacaaatcccgtataaaagaaggagggagggtcctttcccacaaaccacttggcgcgccatttggttcgggcgccagcttcttttctgactcctccccgtgtgtagcaagtgttccctcta

SEQ ID NO: 663809 - DNA, 517 bp, Homo sapiens
ttgacacttgtagtcactagggcagggcggtgcctctaatactggtgatgctagatgtgatgtttttggtaaatcaggcggcggtgagatttgccgagttccttttacttttttgtaaccgtttccttatgagcatgcctgtgttgggttgacagtgagggttataatgacttgttggttgattgtatgatcttgggctgttacttggtcaggttcagtgttttaatctgacgcaggcttatgcggaggagaatagctgatagagcacacccgtctatgttgcataatagtgggaatatttataggtagaggcgactaacctaccgtgcctggtgatagctggttgttcaaatatagaatcttagttcaacttttaatttgcccacagaaccctctaaatccccttgtaaatttaactgttagtccaaagaggaacagctctttggacactaggaaaaaaccttgtagagagagtaaaaaatttaacacccatagtaggcctaaaagcagccaccaa

SEQ ID NO: 663810 - DNA, 154 bp, Homo sapiens
acccagtgcgtggcatgtcttggaggcgagcctgtcccgctagcctgtgtgttcacacaccaaggagaagggtaggcgaggggttcggagtgtatatacaggttggaatgtgaaggtcctggctaccatgtgacttgtaagtgtaccttgtaaa

SEQ ID NO: 663811 - DNA, 203 bp, Homo sapiens
ctacaagaacacacactggcacaggactccctccccagctcggatcattcagtgccatcagtggacagctgcagtcctaccgcgctgcctgtgcagtgctgtctgtcgtagaagtcactcaggggtatctgagcacagctggtggggatccaaacatgcaactgcctgtgtatactcaagacatcctgcacatgggtgataca

SEQ ID NO: 663812 - DNA, 588 bp, Homo sapiens
gcgccatctatctgcccggcctcctctatctctcactcacgatctcactcacgatgaagcgccatctgcccggcctcctctatctctcactcacgatctcactcacgatgaagtgccatctatctgcctggcctcctctatctctcactcacgatctcactcacgatgaagcgccatctgcccggcctcctctatctctcactcacgatctcactcacgatgaagcgccatctgcccggcctcctctaactctcactcacgatctcactcacgatgaagtgccatctatctgcctggcctcctctatctctcactcacgatctcactcacgatgaagcgccatctatctgcccggcctcctctaactctcactcacgatctcactcacgatgaagcgccatctatctgcccggcctcctctaactctcactcacgatctcactcacgatgaagtgccatctgcccggcctcctctatctctcactcacgatctcactcacgatgaagtgccatctatctgcccggcctcctctaactctcactcacgatctcactcacgaagaagcgccatctatctgcccgggctct

SEQ ID NO: 663813 - DNA, 657 bp, Homo sapiens
agctgcctggctccctctggtccctgcttcagaggaggcctgggcctgtggccagctgaccttgtgagttggtctagagcccggagctcgccttgtgtgctgggcaccagtgggcccctgccaggcctgtcctctcctttttgagctgtcctcagccccatctcccttagagtgctttgtgggagctgcagtgtggggctggggtgggctatcatgcccagtcctgctgccgtcttggcactgcagtgggcagtgtctggtcaccacttccccctcttgctccatgtccttgtggatgtgaacgtgcacgacacttggacgtcgcatcctgcaggagccgcttgacgcatggcccgctcatggccatccacgatgtcctctgacagtgtgatcgatgtactggccctgggccacaggacatgggttcagcacgcgtggtcagcccacagcacgactgcacctcttgcattcccacaacacctgtctcccctgtcctgcctccctaccttgtagtcagttgattgacgatcgacgcgtcactgcacatctgcgacactgcacatccttccctctctctgcatgcctgcgtcgactcccccaccacacatcttcaccctgcttgcgctacccacccacagcgctccagcgactaccccc

SEQ ID NO: 663814 - DNA, 175 bp, Homo sapiens
  misc_feature (44)..(44): n is a, c, g, or t
  misc_feature (93)..(93): n is a, c, g, or t
  misc_feature (154)..(154): n is a, c, g, or t
agaggtgggcctggaggggccaccaaagatgcaggagctgggcnctggagagtgctgcaaagaagcatgagctggtgcctgtgtgagtgtcanacttgagaaaagttcagaggcctgtgagagaagtgctgggagtgcaggagctgtggtctanaagagtgccattttgtaacga

SEQ ID NO: 663815 - DNA, 260 bp, Homo sapiens
tataattgcaggtatgtaatctctcttggctctcaaacattacctaattgtatgaagatacgtgagcttcaaaaatacctacctttaagtaatttttaaaaaccttagcatcaggctgctgaagcgcttgacaaaactcctggggggtggggaaaagagggagaaaaagaacaaatgtatttgtattaaatccattgtaattcgtatccagtttttttttttaattttttttttttttttagaggatgtttttaaaagta

SEQ ID NO: 663816 - DNA, 281 bp, Homo sapiens
  misc_feature (281)..(281): n is a, c, g, or t
ttcacagttctggatgtcttatcagcagcatgaaaacgaactaatacgtatgtatagtatgactcccattattttatttatttacttactattttctgagacaagagtcttgctctgttgcccagcctagggggacaaagcagtgagacttccatctcaaacaaaataacataaagcaaaaaataaacaacatcacctttcctagaacatatacctttacttgcatagttaaacaacaggtagttaatagttaaccatttatcacaaggcataccgtggtn

SEQ ID NO: 663817 - DNA, 891 bp, Homo sapiens
gcagacaccaggagatgtgacgctctggtgccccgaaccctcctcctgctactctcgggggccctggccctgacccagacctagggcgggctcccactccatgacggtatttctccacatccgtgtcccggcccggcagatggagagccccggttcatctgcagtgtggctacgtggactgacacgcagttcgtgcggttcgacagcgacgccgcgagccagaggatggagcctgcgggcgccgtggtatagagcaggagaggcctgagtattgggaccaggagacacggagtgtgaaggcccagtcacatgactgacccgagtggacctggggaccctgctgcggtctactacaaccagagcgacggccggatatctcagacgcatccagatactgtatggcatgctgacgtggggtcggacgggcgcttcctccgcgggtatgaacagcacgcctacgacggcaaggattacatcgccctgaacgaggacctgcgctcttggaccgcggcggacatggcggctcagatcaccagtgcaagtgtggaggcggccgttgggcggagcagttgagagcctactggagggcacgtgcgtgggagtggctccgagataccttggagaacgggaaggagacgctgcagcgcactggacccccccaagacacatatgaccacaagcccaattctgaccatgaggcaacctgaggtgctgggccctggggctaactcccctggggagatcacactggaccttgccacgcgatggggaggacccgaccaggacgctgggtcgtgcagaccagctcgccggatgcacctcccgatggcgtcagtggcttgggaaggtcaaacccacgttcaattatgttgcaagccaccaaaggacttg

SEQ ID NO: 663818 - DNA, 197 bp, Homo sapiens
  misc_feature (22)..(22): n is a, c, g, or t
  misc_feature (185)..(185): n is a, c, g, or t
tgcataagcagggattacctgngttatgtaaaacgaaccatgacattataaatatagcaattatatttgtcagctttgggtgtataacaaagcaccccaaaacttactggtttaaagcaaccactaggttgagctctgctggacggctgcgtcattcctttgatctgggaaggtgcgtcatgctnctgccggcactt

SEQ ID NO: 663819 - DNA, 456 bp, Homo sapiens
atcccatgtctagaaaaccctatcgtctcgtccccaaagcttcttaagccaagaagcaactacagcaaagtctcaggatacaaaattaatgtgcaaaaatcataagcattcctatatacagagattcctatatctctgtgtctgtactgcacacctgaacaacaatagacaaccagagagccaaacatgattaactcccattcacaattgctacaaagagaataaaatacctaggaatacagctaacaagggaggtgaagggcctcttcaaggagaactacaaaccactgctcaaggaaatcagagaggacacaaacaaatggagaaacattccatgcttatggataggaagaattaatatcatgaaaatggccatactgcccaaagtaatttatagattcagtgttattcccattaaactaccattgacattcttcacagaattagaaaaaaaaa

SEQ ID NO: 663820 - DNA, 149 bp, Homo sapiens
cacgaggggttcctgtgtccgctggccatgtgtctgagtgtgtaccctctcatcatctaaacgaaatttggctgcattggggaggcctggtcccacgtgaagttttgggagcgcagcagcaggtgagttcatacgacccatcacctgcc

SEQ ID NO: 663821 - DNA, 175 bp, Homo sapiens
  misc_feature (1)..(1): n is a, c, g, or t
nttgagttacagcagaaaaagctcattccgctatcatatggtgaagaatgtctctggaagatcaggtggagatgctgcgtgacagatgaaggatggaagctgagaagccagagagagaggccaaatgagcagcaccacgaagctgtgggcaagagcagctggcgttctgccaagg

SEQ ID NO: 663822 - DNA, 439 bp, Homo sapiens
tctagagtatcctggtattcgctatactagattgcgaacgttatcctatatactctcacctcctcatgcctcacctgtataccctcacgtcctcaccacctgcttctctgtttgatcaccaataaatagggcgggttcccagtagctcggggcctttgcagcctccaatctagcgctggccctctggacacaccttatgaactcttaacttgtcttttctcattcctttgaccccgccagactttgtagccctcagggcctggtgttgggcccgatcacctcaacatcccattgtgattttaatttgcatttcccaaaaggctaataatgttgaacatcttttcatatgcttacttgctacctttataggtttttcttttagcccattttcttttctttcttcttctttttggtttttcaagtgacaaagtcttgctct

SEQ ID NO: 663823 - DNA, 247 bp, Homo sapiens
  misc_feature (164)..(164): n is a, c, g, or t
ccactaaatacaatgatattcctacgagcagggaggacagcaacacaggcaggagaaagaggtggcggtgaaacgctgtccgaatgagagggcggccacatgcttaaggtgccagtgaaaaaaccgacagccagaattctacagccaggaaagatgtcctccangaaatgaagtaaagtaatgccaacaagaaaccacactcgcagagcataccaagaacacacaaagcaggaaattactcccatgc

SEQ ID NO: 663824 - DNA, 160 bp, Homo sapiens
gtgaggggcacacaggattcggatgtgatgcgtgagttaacatacccgtgtcgattttgcaggagcaggctcacctccaaactcaaccagttgtccgcattcaggtatgtgaaggcttctgtctatcaatcagacctcaataaagtggttcaaacacaga

SEQ ID NO: 663825 - DNA, 491 bp, Homo sapiens
atgaggatacaccaggagatatcagctgtgatggcttggagaaacagtgtaaactggcagtgtaaacacgagcgagggcatgtatgagtagttgagaacgctgaataagagtatgactagacagaagatagtagggatgacaggcctgaattctgagaagcgaaagtggtaaaagtattgtccagtcctttttgagttggtggctgagcttcgtgaggtgtgtttttaatagaccattagtctgtcactggatactaagagcctgaaaaactgcttggctgatttgactaataaaggctcatctgttatcagactgtatagaggtgggaaggctaaactgaggaattatgtctgacagaggggaagaaatgactgcggtggccttctcagaccctgtaggaaaggcctttacttattcagtgaaagtgtctatttagactaagaggtattttagtttcctgacttgggacatgtagagtaaagctaatttg

SEQ ID NO: 663826 - DNA, 134 bp, Homo sapiens
aacgggtgatgcggttgcagaaatcagggtcaggcgcacatacacgcacgcacgcacacacacacacacacacacacacacacacacacacacacacacagatacagcagtatttttggaacattgtgaagtga

SEQ ID NO: 663827 - DNA, 464 bp, Homo sapiens
  misc_feature (329)..(329): n is a, c, g, or t
  misc_feature (411)..(412): n is a, c, g, or t
  misc_feature (448)..(449): n is a, c, g, or t
acccaaacagagctggacatagaggtgtataagtaacttttgtcaggagactcttagggaggaccttcagaaggccaagtgagatgacttccctagaaattctctcagggcatggggaccctggatggactccttggagcctgcatgcccctgtgtgtgcccaatggccccacgaatacacctgtgccaggtgctgttcacagtgcgtggtggggctgagatgcccagggcaggtgcccgtcagaagctggtgtagacacgtggaggaggtggggtattggacccaaagtgtgtatctgcacatagcacaggccgtgaggcaggctggntacggatggcaagtgtggtgcatgtgccctgggggttgcagggagggccccagtgaggccagcttctgaacccactggcgtnngctgcgtctgggacacaggtgtggctttgggtactnnacgctttggcagggt

SEQ ID NO: 663828 - DNA, 1153 bp, Homo sapiens
gcgggtttgccgccagaacacaggtgtcgtgaaaactacccctaaaagccaaaatcggtgaaaggaacacacgactcatatcaacattgtcgtcattgtgacacgtccattcggtgcaagtccaccactactggccatctgcatctataaaattgctggtcggccatcgacattagagtaaccattgacaaacatttgacgaaggaggctgctgtagatcgggaacagggctcctctcaaagtcatcgccatggagtcgttaggacataaactagaaagacggagcagtgcaacggtaggtatctgccgattcgatcatcgtaccttgtcggcacatttgtgagcacctagcatagctactactgatgactagtcaattgaatgctcccacggagcaacagaggacctgttatcagaataacagtgactatactaggtgacactcgtcacgcgctgacctggtgcatgtcactgacttgattgcgatgctggatgatccggtgacagttgcgaagctgggtgatctccgagagaatggagcaggacccagagagcatgcccgttctcggcttacacaactgaggtgtgaatacatgctaaatagtcggtgttagacaaaatggaattccacgtgagccagaccttacagaacagacgagatatgaggaaattgttcacggcagtcaagctacttacaattatgaagacattggatacatacccgaacacaagtaacatgtgtgccaaactcaggttggaactggtgacaaacatggtcgaaccaagtgctaacatgccttggatccaaggaatgacaaggtcacccgaaaaggattggaaatgcccatgaaaacaccctgatgaagctctggctgcatcaacacagtgtccaatgacaagaccttagcaatgcacacagaggagctacaacaggaggcaatgggaaaggcaccgaggggccaagaaaagcggaccaaaacggaagtgggaaccgggcacaaaaaaaaaagaagaaacacggcgagaacaacgacaacgagacacctggaaaaggacacagaaaaagtcataagaaccgaagaagagcggaaaaaatacagaagcaacaagtatacacaaaagaacgaagataaaaaacgacacagagacgaaa

SEQ ID NO: 663829 - DNA, 407 bp, Homo sapiens
tttttttatggcatattgggtctgcctctgtcacccaggctggagtgcagtgttgagatctcagttgactgcaacctctgcctcctgggctcaagtgattctttcacctcagcctcctgagtagggggtactacaggagcatacaaccatgcccagctaatttttttttttttcagagactgggtcttgctatgttgcccagtctggtttcgaactcctgagctcaagcaatctgtcagcctcgggctcccaaagtgctgggattacaagcacgagtgactgcaccctggccccatattttatttttagatgcaactgatgggaaacacaccatcaactcgataacagcctttcaaggggagaacaaaatccagagaaatagaaaccttacgatatcaatgttatat

SEQ ID NO: 663830 - DNA, 1327 bp, Homo sapiens
aacaacttcagggtgaagggaaaataattgatagaagacccagaaaggcgaccacctcgtgcaacgacagattccgcaaaagccacttgcacagacaacagggtgcaaggcaggcgaattttcagttgatagcaccgattatttgacctgacctattcgaggtcgtggtcggtctctgtgcaagcagggtctgcagggtggcctgtggcacgttggcacatcgtggcctgcaggcagcaaggcatttagcattctctgtaggcaaacgtgcacatttagcataggccatcagtggcaagtcgcatagatcttactttttccaccattcaccagtgagacctgaaagccagaaggcccaacacgtggcaggtcagcggaatctacacaactggcggacactgtcaaacagcaccgaatccaaccagcagtcccccaaacatacattccagcaaaaccacaatcatccttcatacatacaccagttgcactctgggcatccaatccaacatggtcgactgaaggcaaaaacaccttgcacacggcgaccagcaacatccaccccagtgcgccaaacacttgaacaacataagcgcaggaccctagcaacggttaggcaccggacggccacccaacacaagcgacagcggccaacaaccaacgacagaacacaccaaccaagcgcaccaaacacgcacgaaaagcgaaaacaaaacccaaaaccacaacagacacgcgagaacagacacaccaccacacacaacaccacaccacaaacacccacacacagcaccagacgacacaaaagggagaccagcgcgacccaaagaggaccgaaagacaccgcaacaacaaacacacacacaacagacaacacacaacgccaacagccagacaacaccacaccacacacacaggaccacaacaacacccagagagcacggccgcaccaaacaagagagcaaaacacgcaccacaagaacaagcacacaccaaacacaaccgtcggccgcagcaaaggggcgcgacaagcagcacaggcacgcgcaggaggaagagagaccctaggacacaagcagggcggcgggaagagagacgaacagaacggagagagaggaggggagcgaagccagaccggaacggagcgcgagaaaacggacgaggaagacgggagcaccgggccgagcgccgcgcacccaacaggggacccagcgaacggtgagcgaaagagacgaggagagaggcagagcagcgaacgggcaagagagagcagagcgggggacagacgcgcggcagggaaggaaaagaaaagaaaagaagaagacgggaa

SEQ ID NO: 663831 - DNA, 525 bp, Homo sapiens
  misc_feature (415)..(415): n is a, c, g, or t
tgagacagggtttcactgtgctgcccaggctggagtgcagcggcgcgatcatggcacactgcagtctcaagcgctcaggctcaggtaattctgagcctcccgagtagctgggattataggcgcacaccaccacacatggctaatttttgtattttttgtattgacggggtttgccatgttgaccaggctggtcgtgaactcccagactcaagttatctgcttgtctcagcctcccaaacaaagtgttggaattacaggcatgagccaccacgcccggcctggagcatttttaacatttgacttggtttgatttatttgtgaagtatgcattattatccccacttgcctctcatgtgagggaggcagaaaagttaaatgacatgagtgacagcatccagtggctgataagcagtanagccggtcttctcatgcagaatctgttgttcccaccatgtgaaagaaattatactataagattttgggttttttacttagatcacttttttaaagtattcattattcttg

SEQ ID NO: 663832 - DNA, 232 bp, Homo sapiens
atctgtgatgcaagagggtatagaagtatgctgataaatatccaggcaggtgcagtggctcacgctgtaatcctagtaactcccagtgggtggctcccacttatgggaggcccaggcagctggatcatgaggtccagaaatcaagaccatcctggccaacatggtgaatccccatactctactaaaaacacaataattagctgggtgcggtggtcgcgtgcctgtagtccca

SEQ ID NO: 663833 - DNA, 103 bp, Homo sapiens
caagcctctctggtatgggaaccagaatgatggccctcagcaggaccatcccgaacaatggagtggcagcagcaacaatggtccaccacctcctcagggaaag

SEQ ID NO: 663834 - DNA, 124 bp, Homo sapiens
agcaaacagcctggaacagtcgctctctgtattatacgatggggctactggttagaggcggcactagattagaatttttaaaacgcagggtggggtgaggcgcagaattttacaaacgaataca

SEQ ID NO: 663835 - DNA, 527 bp, Homo sapiens
  misc_feature (4)..(4): n is a, c, g, or t
  misc_feature (19)..(19): n is a, c, g, or t
  misc_feature (35)..(35): n is a, c, g, or t
  misc_feature (53)..(53): n is a, c, g, or t
  misc_feature (167)..(167): n is a, c, g, or t
  misc_feature (240)..(240): n is a, c, g, or t
  misc_feature (255)..(255): n is a, c, g, or t
actngccctatgttgtgcnaaccctgatccccccnaactccatacccctgaanagaaaccctcccccactttggccccctgcaaacgggccataagcccacctatgcccccagcccctttaatttttaagaaccttttgtaccaaccatatataatccttttgtaanatgtgccccatacctgtatacacacttttaaaaaaaatgttttaccacaatgcccccaggtgtagtggctcanaccctgtaatcccanacctgtaatccccagcactttgggaggtcaaggtgggtggatcacctgaggtcaggagttcgagaccagcctggccaagatggtgaaaccctgtctctaccaaaaaaatacaaacattagccaggcgcagtggtgtatgcctgtagtcccagctactcgggaggcttaggtgggagaatcacttgaacctgggaggtggaggttgcaatgagccgagatagcaccactgcacttcacctggtggagagcaagaccatgtctgagaaaaaaaa

SEQ ID NO: 663836 - DNA, 662 bp, Homo sapiens
cagcttattgtatatgagggagccaggccccgagggtgagcgagatggagaaggggaaggaaggggctttgggatctggaaaccagcaggccaggcagcatccacagtgttagtccaaagggtcggaccgtgtcgtcagcctagcgtttggtcagtgacggcctggacgggccaaggagactccgggcttgaacccaggcctcccgcacggctcagctgctgaatttttccttgaggctgtttggtgtgtgacccagcaagggccctgtgtaggacagcaggagggaggcgtcgggggccttagcagaaggggaacaatgagggcatttcatgaaccatctcaggcacttctgcatcacggaagacctggccctcccagccgtcctggggatgctcagggtgcaggcagaggctcgggaggccggactcaggggtcagaagcagggactggggcaggcgagcccggacagggaagaggggctccgatcaaagccggccgtgctgctgccgggggcccaggtgggtacaagctcctttgtgctttgcacaaacctgaatcccccaccagagaggatgtgtgtgaggagccagaaacgctgaatccaattaagagagaaaaataataataacaataaatgatcttggacaagaaaaaaaaaaaa

SEQ ID NO: 663837 - DNA, 855 bp, Homo sapiens
  misc_feature (9)..(9): n is a, c, g, or t
  misc_feature (122)..(122): n is a, c, g, or t
  misc_feature (175)..(175): n is a, c, g, or t
  misc_feature (184)..(184): n is a, c, g, or t
  misc_feature (186)..(186): n is a, c, g, or t
  misc_feature (190)..(190): n is a, c, g, or t
  misc_feature (204)..(204): n is a, c, g, or t
  misc_feature (206)..(207): n is a, c, g, or t
  misc_feature (211)..(211): n is a, c, g, or t
  misc_feature (213)..(213): n is a, c, g, or t
  misc_feature (215)..(215): n is a, c, g, or t
  misc_feature (224)..(226): n is a, c, g, or t
  misc_feature (258)..(258): n is a, c, g, or t
  misc_feature (261)..(261): n is a, c, g, or t
  misc_feature (268)..(268): n is a, c, g, or t
  misc_feature (270)..(270): n is a, c, g, or t
  misc_feature (272)..(273): n is a, c, g, or t
  misc_feature (277)..(277): n is a, c, g, or t
  misc_feature (288)..(288): n is a, c, g, or t
  misc_feature (295)..(295): n is a, c, g, or t
  misc_feature (297)..(297): n is a, c, g, or t
  misc_feature (345)..(345): n is a, c, g, or t
  misc_feature (348)..(348): n is a, c, g, or t
  misc_feature (353)..(354): n is a, c, g, or t
  misc_feature (357)..(357): n is a, c, g, or t
  misc_feature (364)..(364): n is a, c, g, or t
  misc_feature (366)..(366): n is a, c, g, or t
  misc_feature (371)..(372): n is a, c, g, or t
  misc_feature (390)..(390): n is a, c, g, or t
  misc_feature (399)..(399): n is a, c, g, or t
  misc_feature (402)..(402): n is a, c, g, or t
  misc_feature (411)..(411): n is a, c, g, or t
  misc_feature (415)..(415): n is a, c, g, or t
  misc_feature (424)..(424): n is a, c, g, or t
  misc_feature (440)..(440): n is a, c, g, or t
  misc_feature (442)..(442): n is a, c, g, or t
  misc_feature (445)..(445): n is a, c, g, or t
  misc_feature (454)..(454): n is a, c, g, or t
  misc_feature (457)..(457): n is a, c, g, or t
  misc_feature (475)..(475): n is a, c, g, or t
  misc_feature (483)..(483): n is a, c, g, or t
  misc_feature (494)..(494): n is a, c, g, or t
  misc_feature (502)..(502): n is a, c, g, or t
  misc_feature (505)..(505): n is a, c, g, or t
  misc_feature (772)..(772): n is a, c, g, or t
  misc_feature (809)..(809): n is a, c, g, or t
gtataaaangggtattttcttgaaaaaccacaagaaaaatacaactgctttttcattgcccaggtcagttactcgctacagtcagactgcatttaaattagactggcatctaatacttttgngtatttacaaacataattaaaactatactcctagaccaccagctttcaaaaangttggatcngnttgngttgcaataaatangnnccananangaataattnnnggggggcttatggggggggtttagaaattacnaanatttatnangnngttngggggtgaggnatattgngngtgctttgctttatacaaattcacttacttttttcagaattcctttgnggnagggnnggnacttttngnaatgnnattttacatgtgaaaagngaggttggnagngcctcagtnaccngcccagggncacacagctagaaggngngcnagcacttgngcnacatttctctttccagcnagattctnagcactcagcngtgctgcnggnggtcacagctggctgactggaccaggaagaaccttttagtgtcaggcgtgtgaatcacagcacttgggacaggttaccaagaaccatgatcacttaatttttatatttatacatgtacatttgtatatacatagagaaagtgcaggcaaaaccattatacagttactctaatagccatttgctactgccagcagtctcaggactgatccctgtctaagctggcaagtttacattctccttgtatcactacaggatttgctctggganaggagctgtaactcctcaacaaatcctgctttcagtntactactgcacagcttgaattgttcagtaggccagctttttgtgaa

SEQ ID NO: 663838 - DNA, 933 bp, Homo sapiens
ggactcagcatatggggacgctctcagctctcggcgcatggcccagctacctatcaaaatgtctagtgttcacgaaatcctgtgcaagctcagctggcagggtgatcactctacatccccaagtgcatatgggtctgtcaaagccttatactaccttcgcatgctgagccggcatgcttcggaccatggaacacagccatcaagaccaaatgttgtgcaatgacggtcatccattggtcaaccactttctgactccgatcctgcaatcacatggcaccagagcccacgccactacttgcgcctttcgctctttatccgtgtcagcctgtgccccctctccacgggtcacttgtggctttcaaggcctccttggctcgtccatgcccttttcttcttgcgtccctcccttgcccgccatcggtgctgcccttctctggctgtctctatttcgcccgtacctcctcctggccttccacgttctctgctctcccgtctccttggtagccttactccaccgcctcttcccctgtttgtcacatgtgcgcgcctttgggcccacctctcccgtggtcgttgacgtggctatctctttctctcctttctcatttctgtggtgctatttctgactttgcccttgggcttcttcaccatgctcacatcgcctctccacactccccgagcgtctgcgctgcgccttccggtcgcctctcgtcgccacatcgccttgttcacagctctcccactcgctcacggctcttctctttacacgcgctcgctcgcggccgtctcacctcctcctgtctggtcttacacgcgcactatgcgtggcgcactccgcttgcgtcccgctctcccccttgggtgcggctcgctgcaccttctggttcgcatgctcttctcttctctatctcttgtcgctcccccggcttctcc

SEQ ID NO: 663839 - DNA, 335 bp, Homo sapiens
catctgtgagggctcgagcgctgctgcctcgacgtatctccctagactaagtccacccgtccaggacacagccaggcactgctctgtgctgacttccactgcagccaaggctcacaaatgaagcatctgctggaggccaggactcctcggcatcggacacagtcaggggaaaagccagcctgactctgcaggacagaggtgtctagtggtcatttggcaggagaagactggtgtgccaagggaagcgagcatgatttctggagtggactaccatgcatggtctggagttcagtaaactggaaagtatcacccccaagtcacaagaaattagagct

SEQ ID NO: 663840 - DNA, 418 bp, Homo sapiens
aagtgattctcctacctcagcctcctgagtagctgggattacaggaatctaatgaccattgaactgtggccatgacttcaattacaagtatttttttcactaatgtcagactgtgggcctttgtatatacactttttacaaactttttggaagagcaaaacatatttcagcaacttttcaaaggtgaatcacagggttgggaaacccttttaaaccccatttaaacccaatttttttctccccattaaggacataagtcagctgaagtgaggataacatgaatagcacaaatacattatgattgctgcctggccaacagtaattataagaaactgtcagttttgagatgtgtcttgatttcagagatgttaaaaaagtttgtaagttaccattgataaaatatgagtttgcttcccca

SEQ ID NO: 663841 - DNA, 364 bp, Homo sapiens
tgaggtctgtcacctgttccctcgacgggacggttcactatcggtctcttggaagtatttagccttacgggatgggccccgcagattcacacaggatttctcgtgtcccgcgctactcaggtggtagctctgtctataaacatgtttcaaatacggaactatcaccccctatggtcgacctatccatgtcgttcttctacacgtgtatagtacattagtgctactcctacaaccccgtagatgccgaaacatctgcggtttgggctactccccgttcgctcgccactactaagggaatcacttttgttttcttttcctgagggtactgagaatagtttatgcctttttccttctaaagaactgg

SEQ ID NO: 663842 - DNA, 421 bp, Homo sapiens
gaccctagcaaggctcctccatcaggtgagagctgcttccactcaataacacttcgcactgattctccaagcccaggtgtgatccgattcttttggtacacccaggcaagaacccaggatacagacagccctctgtccttttgataactagagggtctcattgacctggttaacacaagctgcctacagacggcaaaactaaaagagcaccctggaacacacgcccactggggcttcagctgtaaacattcacccctagacacggctatggggttggagcctgcctgtctgtatgctcccctagaggtttgggcagcagggcactgaagaatcaagccacacccccatcgcacaccctgcgagggggacaagggaacctttctcttttcagttggtcttaataaacactgagtaaatgaaa

SEQ ID NO: 663843 - DNA, 177 bp, Homo sapiens
cccccttcctccagagtcactttgatccggaccgtggcgggtacgtgggctgtggagctcccaggcgatcctgaacctccgcctcaatatcctgtaccaccatgtgtaaccaccctctgcccctgatccctagctcgacccttattgattgtggctgcgctcgtcacgggggatcct

SEQ ID NO: 663844 - DNA, 1802 bp, Homo sapiens
  misc_feature (242)..(242): n is a, c, g, or t
  misc_feature (478)..(478): n is a, c, g, or t
  misc_feature (1057)..(1057): n is a, c, g, or t
  misc_feature (1084)..(1084): n is a, c, g, or t
ttgggctctaaagggggtaaagggggtcctataggttaaatatcggggccctatattttcaaaaattttttaggggagaatttaattctctataggacagagtggcgcattaaaaactgtggtggtttgtgctctccaacagaattttcaagagcatttgcaccggtagttattaccccgcggtgctcggtgttaggcggtgtaacaagtgttgtttgtggtttataaacgtctcgcggaanaatgtgtgacatctctgtgtgtctttataagccctataatgtgtgtggcgagaacagtctctctatgtagagtgtcgacaaagacgtgtcttttgtgtgctgatgtgtatacatctatatctatatatacacgacatatgtggggagagtgctctacttacaacatactggcggggagatgatatatctatacctgctgccgacatgtgttggtgctacaaagcgtgctacacganggcgagatgattctgcgcaacaagagttgatgcgccccgcggtgttgttgtctacctaatgagagacaacatattacgatgctgggcgggcgataacacgatgttatgttgttgttgaggagacgaagtttttgtgacaacgagaacaatattatgaagctcctgcgccgcagcgacgaatgaataaaaatctgccggagggattgattataaactgctgccgacataatgaagggggtatactacgaacgatgatttcaaccacaccactgtgggtggtggctctgggggccccccaccaacaatgattggttggaccaatcttcattgctgacgaatggttgctcgcttcatcaagacggcggggaagaagccgagggataatccttccggctgttgatgaagacaccacccttcttgccggacgatgcacgttgggcacatcacactaacggttgcctcctcacacacggaggagggatatagattggctgcccgatatattaacgaaggaggcgactactgttctgcttcacgaacgaacggaagagagcgcgcaccataaatcatatgagcaancggcgagcaccccctatcatacatganaggaaattggtctgatcaaatgctctgggctgagcgccgggctggtcgcgcactcacggagggacaaatcattcactgctgttttcctaccagacgataagagccggcgagtacttactatctaccacataaatatttcgtcaccccgcccgcattgagaaagacggccgagtatttcctctgtgagcacgaaacatgtttggtgcttcccacggggcactacaaattatataagcgacggtaatcagaaggactcactatacgcgagcgctacacttgtacactagcacgcacgcagtttgcctctaaacgaggcgagaacacaaacacacacgcggggggcggcgcgcatatattctaaccaaaccggcggcgacaacactcctttaatggcatggacaaagacggcccgaatcataattattaaagaggcggggcaaacaaccaaacattagcgttggacatgactatatctactatctaagagaagaggggggccgcggccattgtgaccaatcactactgttggaaaacaccgacgattggtgtctgccgacccaccaagtaaactggagttcttgctacatgagagcaaaactatcgccggaagaaaaaagaaccgatcggcgcagccccgcgacatcttttatacgacagaaaaggaggtattattctcccccctctatccgagaaagaggcgggggcgcgccccccaaaa

SEQ ID NO: 663845 - DNA, 294 bp, Homo sapiens
cagctcggaccgacataccacctcatctgcttttgaatatcacacattgcaatttagcatgacaaatgaatgcatgaactagcactgtgaaggagtcacaggctggggcttacgtttgaatctaatcctttttttttttcaccaagggcgtgaagtttggctatgtggcccaaatgggccttaaaccccggggctgaagtgatctcccgtgtctcagttctgcagattagggtggtggtgctcgggaactcccttagaagttcgaccgtgcaggcttgccaaagcttggcacgg

SEQ ID NO: 663846 - DNA, 539 bp, Homo sapiens
tgtgtgcctgtagtcccagctactcaggagactgaggtgggagaatcacttgagcctgggaggttgaggctgcagtgagctgtgtttataccactgcactccagcctgctgggtaacagagcaagactccatctcaaaaagaaaagaaaaaatgcctttgctacacttaatgaggccaggcaaaaaaaaaaaaaggtctccgtgtggaattctcattattagacaaccatttggcaaagctggctacgtgccattggttcccagtggttaacccttgtgtttctaccctttgcttcttttaactgatttttatattgacacgcatttttatattggttacccattttcgaaaaacttcgtgataagttgctagtggcttcccttataaacttacgatttatcattagtggctcccggtgttttatttgggagcaactgagtgtgggcacccagaggagttgttaaacaacccaggggtgccttcgtggtttattgtttttaaacattaaggtatttattacaggtttataacaacaaac

SEQ ID NO: 663847 - DNA, 376 bp, Homo sapiens
agggccccagtggaggatttttgcatgagaatcccaaatttttttcaaaaaaatttaaatatgctctggtttggggtctctctgtgaacccatccctcaaaaagtgggtaaagcccatacgttggaggatgaggatgtcattcaaattgtgaaaaagtgaaacctttcccttttcccatttgccgggcgaaccccaacagcgttccccatgatcaagccccccaccccagttctttttggttttggcagtccctggatcaggatccaggggagggaaatggaggccccccaactggaacttcttttgttttcccttggtgtccccttgtatgtcgaactgcataaaagatttggtaggctggtcagctccctccca

SEQ ID NO: 663848 - DNA, 562 bp, Homo sapiens
agctggaccacaacgttggctcgaccaaagtaagacacacgaaagtttggctttccatgtggacacgagtgtcgatctgcatagcttttgcaaagaaagagaaatctcccgatcttcactattgcacatagcatgggctttagttttgtctcgatggatgggaatcgatcgaccatgcttcggctacctttcctctggccgggacatggacgttggtggcctggacaatatggtggcacccctggtcaatcttctaatcggctgtgtcgatgtcagcactggacttaccgatgcattggcggagatacgcaattacagcattgacaacttgcgattccaacatacgtcgctcgcagaaatcgaaaatcgtctcggcctccgtggccagcacctcttcaacaccgtgctgtcagtccatgatcgtggacctcacagtcttgcgtccgatggtctccaggtcagaaacacgagtgaagatgatcctcacgaggtaagtattgcttatatcaatcaaacttcagtgtctaacaggaagcttagttcgatatgacatgcagccagg

SEQ ID NO: 663849 - DNA, 957 bp, Homo sapiens
  misc_feature (353)..(353): n is a, c, g, or t
  misc_feature (374)..(374): n is a, c, g, or t
  misc_feature (429)..(429): n is a, c, g, or t
  misc_feature (460)..(460): n is a, c, g, or t
  misc_feature (464)..(464): n is a, c, g, or t
  misc_feature (522)..(522): n is a, c, g, or t
  misc_feature (528)..(528): n is a, c, g, or t
  misc_feature (551)..(551): n is a, c, g, or t
  misc_feature (570)..(570): n is a, c, g, or t
  misc_feature (622)..(622): n is a, c, g, or t
  misc_feature (803)..(803): n is a, c, g, or t
ctgtcgggcttgtttccttctttactgccgtgtctacttctgaagtctgggaagtgccaagccacgcggctcaagggagctggctggtgttgagctgtggcagaagcacctggggctccaggagcaggctgggaactgcaggaccttgctcagccaggagcacttccccctccttgaggcaggaatactgaggtgcctccccacagatggagaaggtggagaggaggatgggcctcaggagcatctcaagccccagtagcaggagaaagaaagaaagagatgcctggttttcacagactggttcctgtggctgggatgactgcatcctttttttttttttttggaaacggagntttggcctttgtcgcccaggntgggattgcaagggcgtgactcctcggcttcaccgaaacctccgcctcccggatntcaagcaattctccggtgcctcagcctcccngagntagctggggattacagggcacgcacctccacgtccgggcataattgtggatatttaanggggangagggggttcctccagtgtcggntcaggcgggtctcgaactncccgacctcgaggtgatctggcccacctcgggcctcccaaagtgcggggatnacgggcatgagccaccgcgtttggccagaggcgtccttttaagcgaacatttagggcctggagtttggccacgtaggagtctcaagccaaagagaggtcctgaccatggggttccataacgagccttgtggtggctctcaaggagaaagcccaaagaccgggacattcatgaggtcgtggncaggtatgatgtcgagaaggggcccttggcaagaaccgggtgacgctggttgcccaaatgggttgacactgaaaagcgcccctaaaaaggagtcccccacgtggttgcccactatattagtccagagccggaaagccggaaaacacagcggggg

SEQ ID NO: 663850 - DNA, 274 bp, Homo sapiens
accgagatcgcgccagtctgggtgacagagtgagactctgtctcataaaaaaaaaaaagaaaaaaatttttcattcttaatatagggaaggcccggctagctttctgtcacttgcaaccaaaattccgggcttttacaaaaaacaaaaacaaaaagatttttaggtgttaaaacatctgctgtttggcacatttaccaagacagggagagcctctgcttggtttatccacggttaacttatgtcccctatgattttttatgtaacccacaggaa

SEQ ID NO: 663851 - DNA, 867 bp, Homo sapiens
  misc_feature (867)..(867): n is a, c, g, or t
cgtggcggattgtaagctgctggtttgcggctgggaagagcggcgagaagggttcggcatttcgtcgggatccccgcaaggatgagtgccgccagtagagtctcacccgcatggggtgaacgcgtcagcctccccagacgacgatgctgggatctagcacttgggaggcagcgagacttgggtaatgaagagagagaaccaaatagttcttgagacttatgtggtgcaggaaagcaagagaacatactgtcgtcttgtataggagatcacaaatcatgatctcacttccgaagcggggaagaagacacagaaatattaatgaagaatcgtggagtctcaatatcagataatagtatggtacagtatattatcaggacgatatcggggacattgtggacttgggttcagtgaggtagaagaccgtgatggtgacggtgatgtgcctggtagaggtgatgatgatgacgatgatgatttcactgatcctgaaagtccaggatgattctgagagcgattcagagtcaggagaaagaagaatctgctggagaactccaagctgtgagcacctgatgaaagtggaggatccacataataaagatgcacgagcatattgatgatgttgggttaatcagggctactagtccaaagcttagtttgattacaggtaggttttggtaactgccaggggggggaaagccgactgggttattgtacaggccttaaaatgagagaggagggcacgcacgggacctgtgggacacaccatttggggagcggcgaaaaaaagcacttctaaataactaaagggagatgggaacattattataaagagatggatttgataacaattcgtcaaattttttttgn

SEQ ID NO: 663852 - DNA, 112 bp, Homo sapiens
agtctcctagttacatcaggcactggatatgttagggtagtacggtagaactgctattcttcatcctatgtgggtattaaggagtatgctcagattttgcgtcgctaggttt

SEQ ID NO: 663853 - DNA, 1480 bp, Homo sapiens
  misc_feature (247)..(247): n is a, c, g, or t
  misc_feature (273)..(273): n is a, c, g, or t
  misc_feature (295)..(295): n is a, c, g, or t
gatcatgtattacacgatcgaagtcatagaggcctatcgtgatggcgaggagaccattattagacgatattaccaaaggcctttgcatcgagatgaatggcatcatatgaactctagacaaaaacacaataggtgatataaaacttacttaatcaaactcttgcatccatatcttacacctttgtagcacatccagggcacccaagttcatcccatacgtgcgcatatacatacgatgcgcatctcntgatacgtaagataggccataatctnaactagttgcgcgcgaggtccntgaccactacgaagtgttgggctctccgggtaggatttcccagagagtgcttgcaacggctgattcactgaatacacgcgatttcctgatctatgattttcaacaccagcattgtgtacaaggttccaccttaggccgttagcaatacttggtagaggtgtcctagatatccctgtggaaggtcataattcgctaaggcgtttgcaagggcatctagcgttagttcgtcaccatagctatacatgtacccttctccaaaataggaaatggaagaaaaagtggtcagtgcgaggaaatgaatgagcgcaccatgccattaagcgcgtggggccccaatagactcatggcgaagttatccgcgcgacgtgtcagtggatacctaatggtgagcgtgggccctacatttcacagtgcgcaaaattctgttggtttttattcacccgtaggagattgcccaaacggtgagttcccagtgttgctaccaggggaaattttcgccaaggcaaaggtcagcgggcaaccatagtagcgttttaagcaattcgcgcgcccaatgttctgaggggtataggtgagcgaattggaaaccttgtgcaccgaggagtttgagcccgtccccaacgggtggaaaggggctatacccttaaagaatgaaaagtcgttttcaatcttaacacaaaggggcttcgtgaaggcgaacattgccttggtaaaaaattggaacgtgccgatacgggtgcttggacagcacgggaggctgttgaaacaccaaagggccaattgtccgggaccattcccacggtttggggcaggcataaagtccatgccccagtggggcgttcccttatatacagcgaaatctaggacgcccgtttaaccccaataaaagcccttctcttagtaaacagcagaccacctgtggggaaaagcggcggcgtataaagcccctttccccagagtaaattcctcctttaagcccaaggcagggccaaccgaggcagagccccaaaagtgcaacaggtgatttcccttgtggcacacgagacaacaccttggggcgtgacattatatatatatcatggaggcgggcaattatggcgagggagaaacgctgggcgtcacttacaaaaaatcacatttctcgaacacaagctttgtagacaaagtgagctcttgcccccaagg

SEQ ID NO: 663854 - DNA, 599 bp, Homo sapiens
gactcaggaattcaccacccagcagctctcagtgctgcgctgccgtgtgtagtcgccagttcttttctactctaataaacttgctgtgtcacttactaaaagcaacagcagcatgaactgtgacacaaaactggccggcgtcttacacatctttaaaagtgaaaactatgcaaccttatcaccatacaccttatgtataatatttagcatagactatcacatttttaacaacatgaaaacagttctgctatatcttgacaactatagctaaggaataagaacatgcatcaggctaaaacagacttgaggcaaatttcccaacctgctttgctgtaagggagtaacagtgatgtgagatgacctttttttccttctgtttaaccaatgttctttacaacggtaatgatttatttttttgagacagggtcttactatgttgcccaggctggtctcaaattcctgagcttaagagatcttcatgcctcagcctcctaaagtgctgggattacaggcacaagttcgagatcagcatggggtaacacagtgagaccccattcttatataaatttcttttcttaacttatctattatacgacaga

SEQ ID NO: 663855 - DNA, 126 bp, Homo sapiens
gacttgtctctatgaaaatgatatggaaacttctaaaatggaattggtgcatatgtactgctgaataaagaccgatgaagaggtttgttgtagacttacaaactcaagttaagtggtttgaacacc

SEQ ID NO: 663856 - DNA, 196 bp, Homo sapiens
gcagatgcagagatttaatgttggagaagattgtccagtgtttgatcggactctttgagttttgtcagctctcaactggcggttcagtagctggagctgtgaagttaaaccgacaacagagctgatatggctgttaattgggctggaggattacaacatgctaaggaatcaggagcatcaggttctgtgacgtgga

SEQ ID NO: 663857 - DNA, 134 bp, Homo sapiens
tccaccttactacagacaccttgccaaccatttacccaataagtatagcgatagaaattgaacctggcgcaatagatatagtaccgcaagggaaggatgaaaaatataccacgcataatatagcaaggctaacc

SEQ ID NO: 663858 - DNA, 333 bp, Homo sapiens
ggttgatgtgagctgcagagcacgccacttcagtccagcctgggagagagagtgagactctgtaataacaaacaagacaaaacacaaaacaaaacagaaacctagctctcaccatactataaaattcagatccagaatagattaaagatgaaagacataaatgtaaaagctgacagtatgacactactagaagaaaacattggggatatgcttcaggacactggtctgggcaaagattttttgggtaagatctcaaaagcaaaggcaacaaaagctaaaatagataagtgggattatatcactctaaaaacctgcacagccattgcactccgg

SEQ ID NO: 663859 - DNA, 308 bp, Homo sapiens
cccgccgccacgctgtctgttagaatattattggtttgtttatgcaacaatcagcagctctgcctggcagatggaaaattccttatttcctcttctacgcttagagtatgatcctcagtcgttctcagtttggaatttctctcttccgcacttacctgctgtgtgactttgtacaggctaatttatctcccctaggcctcatttcctacatctattaaatggtggctaataattttatatacataagagactgatctgcttcctatagttctatactgtctagagtttggccatattctcataccgcc

SEQ ID NO: 663860 - DNA, 464 bp, Homo sapiens
ctctatatgatcctcgtacccaggcgcatttctggtaatctatcctaaggaaataatcataagagtagaatggacaataaaagggcttcctgagaatagatattgtcatgaatcattatttacaagggttacattactgactatggttacagtgaagggccagattaagcaaactctggaacttctgctcaatggaatactataggctttacaaggaatctattatcattgctgaagctactgagcaagcgtggagcaatatgggggctaatagtataatgcctatggaagaaaactggatacccaattcttgttcgccaattatgtaaatttcccaaatgcatattgcttcagatcaaaagaaagggtacacaacgtgaaagtcttgactgggataggcatagcgatgacaggagaagggattatgttgaattattttcctacctccccctcatcttctagaa

SEQ ID NO: 663861 - DNA, 389 bp, Homo sapiens
gcgtcgacgcgttccacctggaacacttccaggtaaccactgttgcagatcagcaacttgccctggcgatcacgcacatagatcgggtgcggcgtgcgttgatcaagactcgcatgaactcaacctgatcgctcaacgcctgctcggcctgcttgcgcttgcagtcaacatccgcaggtaggcgatccagcccagggcagtcaccagcaacacggcggcaatcccaaagccctggataattgcgctgcggttgcgcaccagtagctgtcgcctaccaccacttcgctgcgccacggattggtcaactcgtccatttcctcgggggcgatgctgagcagcgcattgtccaggatcgagaacaattccagcgagccgcggccgtggcaaag

SEQ ID NO: 663862 - DNA, 1064 bp, Homo sapiens
tggaaaaagtcagggaggcaagggggtgggtttgaaaccagtttgggggggtttgcgattcctttcctttttgtgggtctatagaattaagtgtatattaggggtttcttcgaagtggtggtggataggggtggggggcattccaatattagttcactcacagggttaagtgggagggttcttctctactatatatctgggcacttttcgcgcgcttcgaaagcgcgagagggctttctctcaaatctcacgtgaaaaatttattataccatattctccgtggcgtggtatagaagacaccagtgcaagtggagccctatagcgagaacgtgcaatgcggcagtgtcttcacagatggtggcgtggtacgtgccccttgcgcggctgcatcagtctcgcggcagattaacgcgtcctgcgcggagcacaaatcgcgcgggcgatatgagcgcgcgcgcagacacacagcgctgtgagcgcgcgggcaccacaaacaacacacgcctccaacacaattataccacaccgccgccgcgcgagacagcaacatactatcgtagagaaatgaacgaagtcgcaacaacaaacgtgagagccaaaactcacgacaggcgcgcgcagccatatcgacgcacctcatggaggcgcaccctcaagccgggccgcgacggcgccacccaccccccgcccgccccaacaactacacacacacggcgcgcgcagacaaccaccactccacagacccaggaacaacacctagacagacgcgcgccccccagcaccacgcgacactaagacacgaccacgacagcgcgtcgacagcgccacaccactcacagcaagcaggcccacacgcccacacgcacacaaacacgcgcgcaaccgacaaaggcaggacaaacacgccctaccgagccggcagcaaccaccagcgagtcagcacacgcacagccagcacacccaccgacgccgcacgccaaggacccacgcatgccgccgagcactcacgacggacgtcacaccagcccgacaacgcagcaaggccgaccgcaccaccccccggg

SEQ ID NO: 663863 - DNA, 391 bp, Homo sapiens
  misc_feature (2)..(2): n is a, c, g, or t
  misc_feature (26)..(26): n is a, c, g, or t
  misc_feature (256)..(256): n is a, c, g, or t
gntagccataatagccgggatatagnatttccataaatttaccctttatcaaacttgtttgcctcaatttttgtttatacattcataagttactaacccaagaaaatagaattttggctgggtgtggtgactcacacctataatacccaggattttgggaggccaagacagcaggatcgcttcagcccagcagttcaagaccagccctgggaaacaaaggagaccccgtatctacaaaaaaaatcaagttagcctnggttgccagtgcacacctgtgtcccagctacttgggaggctgaagcaggaggattgcttgagcctgggaggttgaggctacaatgaactataattgtgtcactgcattcaagcctgagtgacagagtgaaaccct

SEQ ID NO: 663864 - DNA, 425 bp, Homo sapiens
tccccactccaatgacaaaatccagtatatttaacacaacatatctcaattaggactcgccaggatttcaagtgctcaacagttacaggtggctagcgcctactgaattggacactgcagtttcagtgcattgaatttctatcccacttagcgctaattaaaacttcaccctctcacctgataattatgctaagatctcagaaagtaacccactacaggcagtttcacgccttaatttacctctaattactcttacagcaatgcaatgaatcatgatttaaaatttaaaaaaaaaattgctgttaaattattagtcaagcgcccagggcaatggacagtagagacataatgtaggccaagggccgagatgacaaaacggtccttttatttaaagctataacaataatatgaagccagccctgtaa

SEQ ID NO: 663865 - DNA, 95 bp, Homo sapiens
atgaacagaataagaacattagttgacaatgcttacagctgtgatccaaggataaaaaagttcaaggaagaagaaaaagccaagaaagaagcaga

SEQ ID NO: 663866 - DNA, 190 bp, Homo sapiens
  misc_feature (6)..(6): n is a, c, g, or t
gccggnccccacatgtggtaggtccacaaaagttggcgaagtcatcgtggtcacacagaagcaacaaacaacgaactgaacctacttggcgggatcaacatctctgcggatgattacaacccagagcgcgtcatctttgatatcgacaacgagtcgtatgtaacaaagtcaggtgactatttcacagaag

SEQ ID NO: 663867 - DNA, 242 bp, Homo sapiens
agtatcttaattgtgtgtattacatgtatgcaatatacatgcagtactgtcatatttgtaatagtttctaactaggtgggacacactggttcttttcttttttgtgtgtggggcatggagttttgctcttgttgcccagcctggagtgcaatggcacgatctcagctcactggaacctccacctcccaggttcaagtgattcttctgcctcagcctcccaagtagctgggattacaggcacc

SEQ ID NO: 663868 - DNA, 533 bp, Homo sapiens
  misc_feature (13)..(13): n is a, c, g, or t
  misc_feature (117)..(117): n is a, c, g, or t
  misc_feature (354)..(354): n is a, c, g, or t
  misc_feature (414)..(414): n is a, c, g, or t
  misc_feature (434)..(434): n is a, c, g, or t
  misc_feature (441)..(441): n is a, c, g, or t
  misc_feature (448)..(448): n is a, c, g, or t
  misc_feature (510)..(510): n is a, c, g, or t
tttcgctcccagnttatatgatcggggtgacaccccttgccggaggtggcccatgtcaagcacctgtctgccagccagaaggcactgaaggaaaaggagaagcctctggagcagctntccatgatgagaaagtcgagttgttcgcattaagttcaaggagaagcttttcttagatgaacaggggctcgaacgagtggaaaacggttgtgggcggtgccatgtttttcatcggtttcaccgcgctcgttatcatgtggcaaaagcactatgtgtacggccccctcccgcaaagctttgacaaagagtgggtggccaagcagaccaaaaggatgctggacatgaaggtgaaccccntccaggggttagcctccaagtgggacttcgaaaagaacgagtggaaaaagtgaaaaatgntggcctgggcctgcacctgngcctggntttgtcnccgccatgcaactccatgcctatttactggaaacctgttatgccaaacagttgtacccctgntaataaatggcccgttttcctga

SEQ ID NO: 663869 - DNA, 921 bp, Homo sapiens
  misc_feature (160)..(160): n is a, c, g, or t
  misc_feature (398)..(398): n is a, c, g, or t
  misc_feature (406)..(406): n is a, c, g, or t
  misc_feature (461)..(461): n is a, c, g, or t
  misc_feature (475)..(475): n is a, c, g, or t
  misc_feature (479)..(480): n is a, c, g, or t
  misc_feature (510)..(510): n is a, c, g, or t
  misc_feature (518)..(518): n is a, c, g, or t
  misc_feature (536)..(536): n is a, c, g, or t
  misc_feature (548)..(548): n is a, c, g, or t
  misc_feature (553)..(553): n is a, c, g, or t
  misc_feature (560)..(560): n is a, c, g, or t
  misc_feature (588)..(588): n is a, c, g, or t
  misc_feature (591)..(591): n is a, c, g, or t
  misc_feature (607)..(607): n is a, c, g, or t
  misc_feature (609)..(609): n is a, c, g, or t
  misc_feature (615)..(615): n is a, c, g, or t
  misc_feature (617)..(617): n is a, c, g, or t
  misc_feature (628)..(628): n is a, c, g, or t
  misc_feature (633)..(633): n is a, c, g, or t
  misc_feature (635)..(635): n is a, c, g, or t
  misc_feature (645)..(645): n is a, c, g, or t
  misc_feature (652)..(652): n is a, c, g, or t
  misc_feature (655)..(655): n is a, c, g, or t
  misc_feature (661)..(661): n is a, c, g, or t
  misc_feature (742)..(742): n is a, c, g, or t
  misc_feature (802)..(802): n is a, c, g, or t
  misc_feature (822)..(822): n is a, c, g, or t
  misc_feature (829)..(829): n is a, c, g, or t
  misc_feature (836)..(836): n is a, c, g, or t
  misc_feature (898)..(898): n is a, c, g, or t
ttgttgggtggtgaaataccctaactactttgtacagcacaccacgttttcagtagcaatttatgtgctcaccagtcacttagcaaaagatgacttcgtgaaggttcgagcaaggataaggggactcattcatttaatgactgtctcgactgttgtgagnactgcatctcaacagccagcatctggggtcccgacctgatagtttgtgtgtgggcattgccgggttgctcgctcgtggtaatgactcttccccgaggttctttctgtccaggcagaacaggcatttttccattctgaataggtatattctcgtacttttggtttgaatgtggatgtgggttaataacgacccgaatctatttgatcttccaggtcaccttgggctctgtttgtcagancctgttanccatagcctttagagaggaccttctgcttttagcttattttgttgctaacttttnacaaacaaagggcnaatnntaaaatgtcagtgttgtcagtggtcagaanccgtgtgnttgagcgggtgttgagtngcaggtggctcngctgncctggtngctggtgtgtcgggaggatttaacctcnctnacgcgcactctccccnanaaacancntgttgagatantcttncnccataacctntctcacnccntagtcnacggccccctcccgcaaagctttgacaaagagtgggtggccaagcagaccaaaaggatgctggacatgaaggtgaaccccntccaggggttagcctccaagtgggacttcgaaaagaacgagtggaaaaagtgaaaaatgntggcctgggcctgcacctgngcctggntttgtcnccgccatgcaactccatgcctatttactggaaacctgttatgccaaacagttgtacccctgntaataaatggcccgttttcctga

SEQ ID NO: 663870 - DNA, 265 bp, Homo sapiens
tcgatcgagctcggacgaaacctaattacggaggaatggcagctactcgactgtgatcagagaacctgttattgggatgtgatgttggagaactttagaaacctcatctcggtgggtaaggacagtgtctggtaacttgtcagtatctctcagaatgttttaatagtgcctttaagacttgtgaaagctgtgaacattcagaagcattaataagtttggtctggaattttagtggttacggtttcttaatccccttgaggatcag

SEQ ID NO: 663871 - DNA, 547 bp, Homo sapiens
  misc_feature (106)..(106): n is a, c, g, or t
  misc_feature (159)..(159): n is a, c, g, or t
ggggccggacgcaccttccccaggaccattcccctgatccaacagttgttaaacgccacggagctcacgcaggacccggccgcctactcccagttggtggccgtgntggtctacacccccgagcgggccaagttcgccaccggggtagagcggcaggantggatggagctgttcattcacacctttaagctggtgcacagggacattgtgggggaccccgagaccgcgttggccctttgttaaagcccgggcacccgcccagccgggttggggcctccttgccacaatagtttcccagggctgcccccgacaggttggctttcagtggaggccaaagatctggaatcggggtcagcggggctacagtccttccaggggttttggggcagctcccagcctcttcccatgttggtggccaccgtgtcccttgctgggggtgcattttccagtttttcctccgttttccaggggccgctctctttataagaaccctggtcattgaatttaaggccccccccaagtccagaatgccctcgcaagaccctta

SEQ ID NO: 663872 - DNA, 490 bp, Homo sapiens
  misc_feature (311)..(311): n is a, c, g, or t
  misc_feature (371)..(371): n is a, c, g, or t
  misc_feature (391)..(391): n is a, c, g, or t
  misc_feature (398)..(398): n is a, c, g, or t
  misc_feature (405)..(405): n is a, c, g, or t
  misc_feature (467)..(467): n is a, c, g, or t
ggatgcacatgatgctaccgtccagaaggctctgaagagagagatggagaggctcctggaaacccatctccactggatcacaaactctaacttgtatctcatttagcgtccgaggatacgcttagatgagatgaacaggggctcgaacgagtggaaaacggttgtgggcggtgccatgtttttcatcggtttcaccgcgctcgttatcatgtggcaaaagcactatgtgtacggccccctcccgcaaagctttgacaaagagtgggtggccaagcagaccaaaaggatgctggacatgaaggtgaaccccntccaggggttagcctccaagtgggacttcgaaaagaacgagtggaaaaagtgaaaaatgntggcctgggcctgcacctgngcctggntttgtcnccgccatgcaactccatgcctatttactggaaacctgttatgccaaacagttgtacccctgntaataaatggcccgttttcctga

SEQ ID NO: 663873 - DNA, 138 bp, Homo sapiens
  misc_feature (6)..(6): n is a, c, g, or t
  misc_feature (57)..(57): n is a, c, g, or t
tgtgcnttttggtgcacatacataaacatctcaatgcattaaagagcagtatggcancagcatgtctcatttccagccctaaggcagttttcctgctgactctctccccactattaccctatggccccgggccgaatg

SEQ ID NO: 663874 - DNA, 121 bp, Homo sapiens
  misc_feature (61)..(61): n is a, c, g, or t
  misc_feature (63)..(63): n is a, c, g, or t
  misc_feature (72)..(72): n is a, c, g, or t
  misc_feature (75)..(75): n is a, c, g, or t
  misc_feature (78)..(79): n is a, c, g, or t
  misc_feature (81)..(81): n is a, c, g, or t
  misc_feature (84)..(84): n is a, c, g, or t
  misc_feature (95)..(95): n is a, c, g, or t
ggtaagcgctgcctggctcaggcctctcctctgcccacttctgtctctatgaggatagcangnccgggcatnganacnntnctnctgcagggttnctccctcctgcagaccccaagccagg

SEQ ID NO: 663875 - DNA, 759 bp, Homo sapiens
atattccatggagaccctggctggaggattgcaggagagtcccaggaggcaggactgccaatggcaccaggcttcgcagccatgcacctgcagccctcaggcagcactgtccattgtcatacgagtgtggcaggtgtgaggcatcgcatctgctcaccccggggataatgcacagcagctacaggcagatttcgggccagagagcaaccgagtgagccttgcagcctctgctgccagcacaggcttgttccttcaacactggtggagagagacacgctgtcatcaggcccaagaaatactgccttccccatcctatccccggtcactgggtgcccgcagagtgtcccagaggagggagggagggaccctccactggttcaaatggcctgttctcagagatgcagcaatggaccctcgtgaatactgaactgataatcatgggaaggagactggctctcctggattccctcatgattcctctgagtgacaatgtgatgttggccgactgtgtcttcttcagaatatcatatacacttgaggtctccaggagcctccaattacattattttcctggctcatacagtgacaagtaattcttatcctggattcctcgttactgagacttttcttgccttttttgttagcttatgatttattctaggacttcctccaacaggttatacttaactgtctacctcagtctctggaagttttaaaaatgttcagctaaataaaagaagtagattctccctggaaacc

SEQ ID NO: 663876 - DNA, 396 bp, Homo sapiens
  misc_feature (1)..(1): n is a, c, g, or t
  misc_feature (47)..(47): n is a, c, g, or t
  misc_feature (78)..(78): n is a, c, g, or t
  misc_feature (184)..(184): n is a, c, g, or t
  misc_feature (314)..(314): n is a, c, g, or t
natgatgtccctctgaaccttaaagtccctttatttcctgtatgttnctcaaaatggcagatcccattcaaaaaattnctggagcccaattatttaaagttcccagataacaaggccgggcactgtggctcatacctataatcccagcactttgagaggctgaggcagatggatcgcttgagtnccaggaattcaaggccagctttgacaaaatagtgagaccccatctttacaaaaacaaacaaattagctgggatgatggtgcacacctctagtggctactcaggaggctgaggcaggaagattgcttgagnccaggagttggaggctgcagtgagctatgatgataccaccacactccaccctgggtgacaaagcaagaccccatatctttta

SEQ ID NO: 663877 - DNA, 208 bp, Homo sapiens
  misc_feature (145)..(145): n is a, c, g, or t
gaggctaaagtgaatctccattaactagcatatagttgcatctttaaaaaaatcatgcctgggctcgttggctcacgcctgtaatcccagtactttgggaggccaagtcaggcggatcacctgaggtcaggggttcgagactacnctggccaacatggtgaatactgtctctactaaaaacacaaaaagtagccaggcgtcgtggtgc

SEQ ID NO: 663878 - DNA, 164 bp, Homo sapiens
tgcggaagacgcgccccgctctcggggcagagcggaaaggcccatagggatgctggagaggcccagccacccctgcactcacacttgtgcagcattagctcataggtgtacttgcgttgttctgcgcaagcagtatcgcctgctgcttcaggcactcgcatgct

SEQ ID NO: 663879 - DNA, 205 bp, Homo sapiens
  misc_feature (4)..(4): n is a, c, g, or t
  misc_feature (10)..(10): n is a, c, g, or t
tatnctgganacaggcaggtaatggccatgataataatgatgacgtttatggcagtgataagcatcatcatccaaaatgaggcagaggccaggcacagggctcatgcctataattccactgctttgggaggcggaggttggaggattgcttgaggccaggcatttgagaccagcctgggcgatgtagcaagaccctgtctataga

SEQ ID NO: 663880 - DNA, 360 bp, Homo sapiens
atagtttaactgccagcagcgagattaaggctagagttaaatgatgatgagaggaaagagagcaaaattcacccatttatatctctcgcatcattcctggaggggtggctgaaagacacggaggcctcgaacgaggcgaccagctgctatcagtgaacggagtgagtgtggaaggagaacaccatgagaaagctgtgaacctactcaaggctgctaaagtacagcgtcacgctagtggtgcgatacaccccaaaagtcctgacccacatggaggctcgctttgaaaagctaggaagagccaggcgttcggaagcagcagcatttgctccttcagcagcatgcaaccgctgcagacagcgt

SEQ ID NO: 663881 - DNA, 161 bp, Homo sapiens
  misc_feature (71)..(71): n is a, c, g, or t
  misc_feature (132)..(132): n is a, c, g, or t
  misc_feature (141)..(141): n is a, c, g, or t
ggggctggagctggggctggttacttgttgacgtgcagagctgctcccgggggctgcagctcaaattgggnggagctggactcagatgcccccgtaggtgcaaaagcaacatccacatctcactcctcccgngtgcttttngcggtattcctgcagcgcta

SEQ ID NO: 663882 - DNA, 358 bp, Homo sapiens
  misc_feature (126)..(127): n is a, c, g, or t
gtgaccagcgcgattcaccgctctaatcgctccggttttccaaggccttgctcagtcatcctgccggacaagccctgaggctggaaggcacaggggaaatttgtttagggtggaggctccataacnnccagtaaaaaaaataagtttttgttttttggcgccatcggttaaggcgttcggctgttaactgaaaggtctcacaaaacttcttatgaagagctccaaattaataaaggatgcctttcataatgagctgatgggagatgaaaatatcaaaaactatgcctataaactggagatgtcgcttactggaaacaacatcaaataaaatactccctccaagtccactggagggcac

SEQ ID NO: 663883 - DNA, 160 bp, Homo sapiens
gcatgctagcatagaattctttaatttttgtgactctgcaaatgccataatttcccttttgtttagtgaaggatagttttgctagatacagaatttagcagttggcattctttttactttagacagtttgaaaatatttcccattgttggtccgagcgga

SEQ ID NO: 663884 - DNA, 474 bp, Homo sapiens
aggagaggcttaaaaccggcacgccgcgttcacttttctctcatcaccactcccagccacagtctgcggcgggtccatgagttacaacattgggaatgcctccagtcctacagacactgacgggagcattaaggccgtgattggtgtgttacaaaagaatgctggaataccgacctagttggcttgacaaatagccagatggaccctgttgacctagaccgcatgatgaagaaacggaacaccaccagtgatggctagcttgatttccaagaacccattaatacagttgaggtgctacctatagattgccatgactccttcctcaaggctttgccttcccagaagcggccactgggacccctttgccttggtcgttaaacccacccgcttttaattccagcctttttggcattatctgcccaagacaaccattccttgagcacattaagcacctgatggagccccccacctggc

SEQ ID NO: 663885 - DNA, 724 bp, Homo sapiens
attccctcaaggagtacctctggcgatgcattcaccctactgagccccgtggcagctaggttcccaggcaggtatgcgctcaaactcaggcaagcttatcgactcagcagcccatggagccgagtcgacgagactctggcctgcaggcaggtgcgacttcagcctttcttcgagcctgcgctacagactagcacgagttgtgtgagcttcggagccagtagcccccagtccttcactggtgccaatcgggggcactgactggagcaatgttgcaccgtggctgattggactccggagcattcagacagcaatgaccattgcgaagaatgcccagcccactgacacttttccgtgcctcctgctctcagatgacgcccgttagcagagaatctaagccatgacctggaccgaaggggtactgtcccaggtcaggggagaagtctctcagtccgccacatgctaccaatcatgaacatggcagccccaaagctgagcataggccataagtacagggttttccaacccccagcctcttgactggtgaccacctaccccttctttgtcactagtctcccacccaccccatgctttgctgggattcccatcaactctcagaactgtgtggggtttcgctggggccttgtggaagccatgacttcacaaagaccctacctgtcagttcttgtttctggggaggaggaatccacctgcactgagaatgagg

SEQ ID NO: 663886 - DNA, 148 bp, Homo sapiens
tagtaattccactcataccactctgaacatctacttaccccagtatccctcgattcctggacggcgatcgatcctgaagccccttcagtgccccctcatctgagacaccaccaatcccacctgtcacaccccccgtggctccctggac

SEQ ID NO: 663887 - DNA, 937 bp, Homo sapiens
  misc_feature (687)..(687): n is a, c, g, or t
tataataaatttcaccaagtatgggctcttctggtgatggtgtttttttctccgttggggaatttctaatcccaggcactcctcagtctcatggtttcattacctatgaggtttcatttacttcttggtaaatgtactggactttgggagttacttaagaaaccacagttcctaaaacatttatattggggagctcaacttcgtggcttcctactttaccaagaaggcagtaagttataacctcgtggccttgggtctttacatttttcaacttctcgtggatcccttaaaccttctgtggctcccaagtttacatacgcgtgtgccttattttccacttaaccacttcaacttaggctcacacaagtgtgatgtggcctcgtggcttgtgaccccagtgtgaatgtgagaaaggtgctccatagaagtgttttttattatttgtgttgtttctctttatcgcgcaacaatctttctcatgtggcgccacagagtgtggcccgcgtgtgtatacacactatctctatctctttcacagcgcgcctctctcccctttatagagagggagagggggcgagcccctatatagacgtgtaacacgcctatcaccagagggagtgcgagggtgtttcacgcagcactcctctctatctcacgcatataacacccgctagtctcgcctagaanaaggacatcctctcctcctgcaacacccccgagggggggcaacacattttctgacggccccgctgatctctccctctgccaccgagacgcgcgggagcaacacctcctcgtcggcgggtccttcctccaaccacgccgctgcgtggcccggatgcttctcagacacccgcccccggaagatagacgggcgtcgccctcatcgtccagcgaccagcacatttcctaccaacgcgggcgcaccctatgttct

SEQ ID NO: 663888 - DNA, 123 bp, Homo sapiens
agacactacagctggatttcttgatgccaatcttgccagattaccaccacctgcaagaagactatgacagggaagctcaactccagtaaagaactaagacaagtgtataccatgaaggtacca

SEQ ID NO: 663889 - DNA, 489 bp, Homo sapiens
  misc_feature (3)..(3): n is a, c, g, or t
  misc_feature (28)..(28): n is a, c, g, or t
  misc_feature (468)..(469): n is a, c, g, or t
aanaaggtgtcacgtcagaggaaatgcnaacgacttcatcacccagcgaatagccgcatttcgcgcggaatgttcaaattcggaacgcgctaccaccgtatcgtaggaaatatcagacacaccgcttaagccgcgcacgacttccagcatacgttgccgtggtgcgcttaatcgcccttgcaacatatcgcagaccaccagcgcaccggcattaatgaacggattacgcggtataccctgctccatttccagttgcactaaggaattgaacggtgatccagacggatctttgccgacgcgttgccagatttcctcttcggagtaatgacgcatggcgacaacgagactcagcactttggaaatagactgaatggaaaaacgttcttgcgcgtctccggcctgaaaaagctgtccgtcaacggtacagatagcaatccccaatcgggaaccgtctactgtagccagcanntggaatataatccgcgactt

SEQ ID NO: 663890 - DNA, 301 bp, Homo sapiens
  misc_feature (119)..(119): n is a, c, g, or t
aaagttcttaagaagttgaagcacctggttaataaattaaaataaaggtaaatgaacacaaaatgcatcaaggtaacctgccctaaattaatatcgccccgtagcactcacatcattanattctaaggtattaacatggtccacacagttgtggaaaaggcatgacagtgcactacgagtgtctacttagagagcggtgtcaacaccaggctggcacacggacctggggtcattcatgtaaaggtccttcggtgtcccggcgtttgaggatagaaccagcggatgggaagccggtcgacgc

SEQ ID NO: 663891 - DNA, 144 bp, Homo sapiens
gtgcgacacctttctgggcctgctggacagtcacctcattagggggccggtgacgccgagagccgggtctcctacctgaagatgaatggtgactactaccgctacctggccgaggtggccaccggtgacgacttgaagcgcatc

SEQ ID NO: 663892 - DNA, 887 bp, Homo sapiens
gggagggtgcaggcatggagaggaaacaggcagcacgtgcgcatgtggcggatgaagagggagcatgtgcttcatgccagtcctccgacgtgatacccgttctcccgaggtggtaccatcaagagtgtcattcttccatttcctccagatgtgtgaaggattatctactcgaggatggaactcgtgggtgttccaggagggtgatgatccaccaaacatattctcagccagacgtgtgatgatgacgcagacgaattcacaggtggtctgatgatgagaacacagccacgcttaagggacccaaagaatttccttgagtttgccagctaaatgtccaggacagctatcaattccttcgggggacagtgtcttccataggcttagtgtggagtgccccaaggggatgcgtatggatagcaattgagtagttctctgaaatgtaaaaccctcagcgaatcttcctgctttacaagaggtccgattcatcactcgtgactacactcagccgtgattcatgggtactgatgattctccagatcatgtatagaattatgagtcgtctccgaaatggtgtgaatgatcccgtgggctggagttcgaaggttggtccaaggaaaaaacaaggctgtatgggattctcaaaggaaatacgccaatattatggtccttttttcttaacaaagagagaaatttggagattttcaagacctttccagaaaacattcggcaaatttagaggagaccgggttggaataacgacactagggaaggggggtgccttggtaacacatgtgggaccgaatcagtggttcccggagaacgtctgttaaatacgggtttatggcaagagaccaccttgtaagatggtgtaccctattggtcaattt

SEQ ID NO: 663893 - DNA, 1246 bp, Homo sapiens
  misc_feature (780)..(780): n is a, c, g, or t
ggctctggctggactgccgcggaggaggcgagaaggaatccgacgctggggggcttgctcggtgctggcagcgactgctgctgcggatgggagggggccggctcggctgcgcccatggagcgccacggcagggctttccgcacctccgtctcgtcggcttggggagcaggcggccgggggacccccgaaagggccgggcggcaaggagcccaactggcggcggccgggcgagcaaggcgcggttcggttgcccgcgggtcggggcctcgggcttgaggggccaacacgaaggccggagaatcaggactggggggctccttaacaggcggggcccaaccttcgggtcctccccggccaaggcgcggttcaaaaagcccttggagggaaaaaaagccggcgcggctttttcttcccagtgcgttatggggcacttgcgactattccggttgcgacaaccatcctggggtccaacggcctgggtcattaattttttgggagcgccgataaatgaaccatttcaccttggtttgaacagaacggaaacgacgcggaagacagtctgcgacaacggtcctttcaacacaaagcccatttccgggacaggtctacccgtttgaagcctgccccaaattggttgccctttcaattgggcgtcctaaccaggggcacatatgcggggggacactcgtgtgccaaacgctttaaggcttggaaaggagaacctttgagactccctgggtggtgtgggaccggcaaaagggcgcccaatccttgccaacnctttaaatatcacggccgtcttccccccaccttcaaagtgtgaaagcattggctccttgggctttttaaacatcccaacatttgtggggcacgcaagcaattagaaagaccgttgcctccgaaagttccttccaaacaacgttggctacatttatgggtgcccgcaatggggaaagcggttccgaacagccgtaacaacaatctttggagcgcccagggaatttgcccttccaccaaattaagggctgaatctcttttccacggcgctttgtcgccaacacctgggcgattgcaaaccctaagcgcactttggcgtcgttggacattcacacaaggcgaaacttctcttagtaacacattttgggacctctcaacggtcccggagcattattccacatatggcggcgcggcgtccaaccacaggcggccctacactaatacgcttgtttggaaagaaaagcccgcc

SEQ ID NO: 663894 - DNA, 942 bp, Homo sapiens
gaggtgggacctttaagaggtgattaggtcatgagggttctgccctcataaatggattaatgccttcatctcgagcgtgggttggttatcacgagagtgggctcctgttaccatgaggcaagaagaccctcactagatgttgacaccatgcttttggactttctagcctccagaaccgtgagccaaataagtctcttttctttataaattacccagaccgtggctattctgttgcagcaacagaaagcaaagacaaagccagtttttgaattggttaaaagcctctccattgtacttttaacgttcactgatttcttaactttctcatttcctttacttcgtaactttcacttgaggttttactcattgctatagtgttcggctaacggtaacttaagctcaactaaagttccactttagatttccgagcaggcccacgccacccagggacacacgagggtctaccacgtcgatataggccccagcgcctgggagatggcaagggagaacaaaccaaagggcttcacttgacaagcctcaaacactttcgtccagatatgaccaggttgaatccctacacgagacatcaagacacgtccagggaattaagcactagtggagaacccttacagaggaataggacatttgtgcccaaaccagatggccccagagtacgtaaaaaggtctagaggatagtatacctatggatcagaaagaaacgggaggggataatcatagggacgacgagcactacacaccccaaagaggctcggggagacagaagcagagaaacgcgccgcgaagggacaccgcaagggggaaggaaggcgcagacccaaagccgtaggagagatagacaccacaaacgaaagatgctacaggggcaagagcacgaagggccaggagaacacccatgtatcggcaacccacgaggcagcagaa

SEQ ID NO: 663895 - DNA, 554 bp, Homo sapiens
cggggcaggccggcaagcagcctccggttgagtcccgggacagcgctggtaggggagtcagaagggagcccagtcggaagtgccaacaaccgtaaggagaccctcgcggggccggaccacagaggggaagcaaaaaaacaaaggggtgctggccaaaggaacccggtgtaaaagcgaacaacaaatcttccagggaaagggaaaacccaaagggggcagaacccaaaaaaattgagaaggaggacgaggagggcatctcgcagggagtcctcggaggaggagcagtgacccatgctgtgccgcttgtcctcactggaggagcagtttccttctgggactggacagcttttgctccgttccaaggccccggacctttcccccaggtcacaaccattaaaccgaccgagcctattgggcgcgcatactccgcaatacttcccaccgtagtgcccatcaaccgaggaacaggttacaacaggcaacactgatgccctgctgcaggaggctcccaagtcgacccttgatcttgtgcgatgcagtgtatccacgttgcc

SEQ ID NO: 663896 - DNA, 1405 bp, Homo sapiens
gctatgtgcgtgcggcgcggtgaagtgacaggagcagagcggccagaatgtgtttcctggctcagaccgtaacccttctggacatctatacacactggcaacaaacctccagcagcttggtcgtgcaagcggcaagtgcagcaggacagattgcggcactgccaagctcaagcaaaaaccgtgtgtccagcaccccatccagcgacctcggcagagctcggcaagaggcaggcaagcacagccagacagcctgcacacaccgccacaagccaaccccaacagcactcagcatctaccaaactcctcaagtccatgggggcggcactatgcccatccacagcatgaccagaaacaagccacaggccagcagcacagagcacagctggcaagcactgggacattcccatgcgcacaaccctgaccactagggaaggcacgtgtgcgcacaacctatctttacttggagaagtctccacagtgaagtcagccagagccctcagccagatactcacgttggtctccagcaaactagcaggcagagcagggccagcgtcccaggcactcaggcaggctagaagccaaagacatgggcatcagggagtcacaagccgggcccagggcacgaaagcatacaagcgcaaggaccaacctcccagctccacagagcatgcagaaccacacgctggcaggcgtcacaacatgccaactcgcaacacaacaatactacacaaggatccaaccagacgatgaccatcaggcacccaagacaccaacgggcacacccctcgacggaccacgacggctcaccccccagacacacccaccaggcgacaactgccagcgcgagcagcaacgacagtaccaacaccacaaggcgccgggtgcaaaggacacgagaggcacgaacagacagagcgaaactcgagaaagcgcgagcagcgggccacaactagacagacgaccgactgcaagaccgccgcgcacagcacaggaagacgcaacgacggggcaaccgacgccacgacgaacagcccgcaccgcacagcagcagcaaacggcccgggcagcgacgcacgcagccgaacacgagatgacccaacagcccccacggcacagaaccgcgcacggggagcagagacgtgcagagcgaacacctacgcacggccgaacacaggacaggagaaagaggcgacagcagcggacggcgaacacaccagaacagcacgagggacccgcagacgcgcgcgacgccggcacgcacacgccgccgccgcgcgacaagacaagcgcgcaaggccagagacggacggcgcaaggacgggggcgcagcgcacaacgcgcacgacagcgagaccgagaaccacgacctcaagacgaccgaacgcaggaagcgcgcgcgccgagt

SEQ ID NO: 663897 - DNA, 140 bp, Homo sapiens
ccctataatgaggctctgtagagtaagtcgcctctagtcataaatcttcccactatttagctacatagacgggtgtgctcttttagctagttcttagagtagctcgtctggtttcgggggtcttagctattagagctctc

SEQ ID NO: 663898 - DNA, 998 bp, Homo sapiens
ccgtgtatgatagagtcctccatctagttgtcgtgtgatccgcattcaccttgtgccgcgcaggtactgttgtgccgtgccgcgaccactcgtggtttgtggtgcccccccgccttctagtgctctgtcgcccaacttttcaagtagccccgttgcagctgcgtttcaacacagcagttgttccccggggggggaccccgcgcttgtgactgcgaccgtggaaccagaggggtgttgcagttcgggcacccctaattgctcgtccgttcagtcctcccttgtcactctccccaccggggtgtctcctgttacagccacaccgcaaggccacgacggggccatggggttcacccgcggaagaatcctggcgtgggtgacgttcctcgccggttctcccgccacctcctagcacagcacggtgcccacacgcgacacacggctttacaggggggcggcttccattcaggcctccctagagccaatgttccacctatcccccgtaacccggcgtgagcccaagggccccgaagatgggtcgcccacgggcccttacgttcaactgggtcgcacatttatttagcaccctccccgcccccccggggcagaaatcagactcccgcgcaaaatggggtgagggtgtgccccagttcgccacgcctataaggcgtgggcctatcaacatcggggaccacagatacacggtaggagctgtctcgcagcatcggaggaccgtggggcccaaccacccccccccagtagggaataagacccccacagagatgacgggacccccccaacgaaggggcgagggtccactcacaccccccgccccaatccgcagggcccaacaaaatcttcggcggaggaacaagcgaacacggacggagaaggggcgagtgcggggaagcgcgagtccacatacggggaggtgaaagggacatcgctcgcgttcggcatgtacctggaaaaaaaagcactattttgcaggccccataaca

SEQ ID NO: 663899 - DNA, 371 bp, Homo sapiens
  misc_feature (7)..(7): n is a, c, g, or t
cagcaantcatgacgactgaactcttccacaggcaagccctatatctacctacctgcatcagtcgtcacggatgccactgtggattcactgcgccgagtgagtccttgatcagcctgatagccatagaggtcatcgttggagtccttcgctgggccttggactgagtacttccgaacggaggagaggattaaagggctgatgcatggcacagatcttccttccttgtgaggccgtcgtcgtggggtgagccttgacataggcgggaagtctcatcctcttccagcctggaggagatctttaactggaagcgatcatacacaatgagaaggaacgtgctgcaagcctgcactcacttcatcctcagcagaac

SEQ ID NO: 663900 - DNA, 137 bp, Homo sapiens
acgaagaaagaaagaatagaaagaaagaaagaaagggaaacaaagaagacataaaggaaaagaaagaaaagaaaatctaatgccccgttccaatggtccagtggaaaaattgtcttccatggcaacccggtctctca

SEQ ID NO: 663901 - DNA, 1165 bp, Homo sapiens
  misc_feature (321)..(321): n is a, c, g, or t
  misc_feature (327)..(327): n is a, c, g, or t
  misc_feature (767)..(767): n is a, c, g, or t
tccccgggggcccggggggctttttttttggaccaaaaaaccccgggggttttccccgggggccccccgcggaaataaccaggagggctccactatggatcttctaaaacctcggggtgggacatgtgtggaggcggagaaaaaaacattggcttggggcgccatttcacccagatgtggcaagtctaagatggctgcgccaaacaggggtcccccgggggactctggcgttctctgtgtaagaatgtccataggagaacgcggtacagacccccccagggggggggggggcggccttacacttgagccgggggggcaccncctgtngcgaggtgtgttgtggctcggcggggccttcgagagcgtgccctgtagacctgtgcaccccagagggggggagggcgttctgtgtttgttcccccaagagggggtggcaccgaagagtggtctttgtcctgttgcccacaagtttttactgtgggagcccccagggggggttctccgaagaaaagttactcctgtggcgcggacacaactattatagcgcctcttgagtgggccccgagtctcccttttcaaaaattctctgtggaaggcagcgtgtggtgttggctcctttgggccccagcaggcccaatcagaatatcggagagaggggcgcaccccgagtttttggaatttgtcccccagtttgcaaaacgcccccccaaaaccggggttccagcagatgtgaggggggtattttagaggatctctcccccacgaanatagattagagagaccccccatgtgagcgcccccaaatacaatgtgtggctctggtgggccaacagttttgcagcgccctttagaaaagaaatctcggcaaacaggagaggccaatcttcggtggttcagacttttagaacacgcggggaagcgcagttgcgccaggaagacttatcctcggtaacagggggccttgggggacaagacccccctctctagaggggggttggggccacatctggggagaagaaacattccccccccaaataagcgggtaggaattcacctgagacaatgggcagtttgagacacatcttctcttcgacaaagcttcccccccaaggattcttccctgggtgccagaagaggggagatcactcctgcaataagaacaccg

SEQ ID NO: 663902 - DNA, 261 bp, Homo sapiens
tggaggatctctaagagtcgagcagtgctccagtcgttacgaaatttggaggtcagcacggtgctcacgtgtcgacggaactaatgtacagtgtaggcatgcaccgcagtggtgaatacacgtcgaccaggctccatgtatgcgttcttgtggaggtcagcacggtgctcacgtgtctgaaggaacttgtctagggaggcatgcaccgcagtggtgaatacacgtcgagctggaggcatgcatgcatgctcgggtactgga

SEQ ID NO: 663903 - DNA, 147 bp, Homo sapiens
tgagattgtaccattgcactccagccttggtgacagagcgagaccctgtcttgaaaaaaaaagaagtcagaggcaaaaataaaaaagaatgcaaaggaaccaagactaacctacaagactacaagatacagaaaattggctcaaaag

SEQ ID NO: 663904 - DNA, 714 bp, Homo sapiens
gcagcaggcggcgacatatggcggagaacagcggtcgcgccggcaagagcagcgggagcggcgcggggaagttggggctggtgtcctgcagagcaggtgattgctggcttcaaccgccttcggcaggaacagcgaggcctggcaatccaaagcagctgagttggagatggcagttgaatgagacacagccctagtgatcgatacacttgacagggagggtccgatgaaactcgtaagttgctaccgcattggttggcagcgacgttgctggtggcagcgaacctgtcaaagcaggtgctgcacccgctttggagaacaaccacaggagcacgactaccacgcacagatcatttgagacaactgacacagacagacttcagggcaaagggcaacacatgaacctagattgacattccgtggacacatgcacaaccattcggtcttcaatgggacgaacgcatgacgaagcccaaggacgagccacaggcaaaaacttcagacacgtgggcctgggtgctaaggcccagctccagcttggacgatgctatgggtcgttcgcttaagggaacccaaatggcgccttttggcgttattatcgttcataaccccttgacactccccagagttcttacatttgacttccatcataatatggtacactctaatccaatctcatttgtccctcattgcgtatagggataattaatctgacat

SEQ ID NO: 663905 - DNA, 102 bp, Homo sapiens
tccgtttcagcggacacattgaagccagctcagtcacaagccgtcaggtgtcgcgggatctataacaaggctcagtatctggagcagcgtacgacaatgatg

SEQ ID NO: 663906 - DNA, 366 bp, Homo sapiens
gtctcctgttgctgtattggtgagctcagctgttgtgagtatccacttaaaaagctgtggggggctaattacctttgaaagagcagtttgtctcttcagcgatgcgtatctcagtaaaaagttctctctcatggttctgccttatttttcatcatgtttactgcaatatcataaaccttgaataataccatgggacccatacaaagtgccaccggtgatggtgctaggaagtgcttcaacgaagcagagaagagtcatgacattacaagaaaaagctgaattgcttgagatataccatggattgaggtctgctgctgcacttgcccaccatttcaaaataaatgaatccagggtagggatcattgt

SEQ ID NO: 663907 - DNA, 111 bp, Homo sapiens
tccacttggttgaggcaggggcgtatggggaggatgcggatctgagctctcccagtgactggtgggcgcagccgggggtctgcagactgtgagtgggcctcctgttgtgtg

SEQ ID NO: 663908 - DNA, 373 bp, Homo sapiens
  misc_feature (46)..(46): n is a, c, g, or t
  misc_feature (64)..(64): n is a, c, g, or t
  misc_feature (103)..(103): n is a, c, g, or t
gcgtgatcatagctcactgcagcttccactcctgggcacaagtttnctctcacctcagccttanaagtagctgggactatatgcatgggccaccacgccaggntatttgttttattattgagtagagaagggggtttccctgttttgcccaggctgtgttaaactcctggcctcaagcatcctcgcaccttgcccttccaaagtgctgggattacaggccaccctgccctgcctcttcagttcctgactgttcccactggccagccccgaaagcccagcaacgagggagcaaggttggggcaggaaaaaaaaagcagcatcctcttgcgcccactttattagggggcaggggtgggaggacctaggcctgctg

SEQ ID NO: 663909 - DNA, 140 bp, Homo sapiens
ttcagcagccatagcatgagcaataaatagaaattaccctgtaaacaatatatatttctataactattgttgccctcctccctttcagtaatgtaaaaaattatcacagtatcttcttgtatcctaatatggggatcctc

SEQ ID NO: 663910 - DNA, 315 bp, Homo sapiens
  misc_feature (232)..(232): n is a, c, g, or t
  misc_feature (311)..(311): n is a, c, g, or t
tcttgctacactttaatgctaatatactttatcacagagtatcttattttactcaatggcaataaaaaaaataacagaacccttaaagggcatccacattgatttctcagtgtgtgattcattttgcattacgtgatataacatatactataagaatatacagcttctatatacagaaagcaaaacttacaaatagaagcagaaggactattacattccaacaagatatttnagggtgccagatgaaacaagcgaagataccattctgcttgagaggtgctcactgagcatagaggagaaacaaacatgtnaact

SEQ ID NO: 663911 - DNA, 165 bp, Homo sapiens
  misc_feature (86)..(86): n is a, c, g, or t
gtaagtcaattgctctatcagaaaagtctagaccagagtctctgttagttgtaactgacacactgacagaagctctagcatctgangcaatggattaggtcacatggactgcagttacactaaaatacaggaaatagtctatccatgggctggcaacatcctgtg

SEQ ID NO: 663912 - DNA, 242 bp, Homo sapiens
  misc_feature (107)..(107): n is a, c, g, or t
  misc_feature (129)..(129): n is a, c, g, or t
  misc_feature (175)..(175): n is a, c, g, or t
  misc_feature (190)..(190): n is a, c, g, or t
aagatcatgcacagagatgtcaagccctccaacatcctagtcaactcccgtggggagattcaagctctgtgactttggggtcagcgggcagctcatcgaactccatngccaactccttcgtgggcacanggtcctacatgtcgccagaaagactccaggggactcattactctgngcagtcagacatctngagcatggggactgtctctggtagagatggcggttgggaggtatcccatccc

SEQ ID NO: 663913 - DNA, 145 bp, Homo sapiens
caatttgccatctcccagaactgttaacaaaccccgacgaggtcgccccctatatcttcttacaatctcttccccttccccgaggctgctgtcctaccactccagatcattcctttagttaagagctgggcagtgaagtggatat

SEQ ID NO: 663914 - DNA, 229 bp, Homo sapiens
ctcccccccttttccccctttgggccgggggtgggggaaggggggggggtgttcctttcccccctcctgggggcctttttttgggccccccccccggccattttaagtccccccccccccttcctgggggggggtgggccccttcccctgggttttttacccctggggttgggggcctaaaaattttaacccattttttttttttttaaaactttttgccaaaggccca

SEQ ID NO: 663915 - DNA, 248 bp, Homo sapiens
ggtgaggcaggcagtggctcacagccttccatccatggggcaaagccagggcacagcagtgtgcaatctttcattccactccccagcctgtcctgtggcctgtcccactgtgtagcacttgttgttttccctgtccacatccatgctgtccagaccaccacattaacgcattttcatagtgccccccccccccaaacccacacacccaaacacacacccaccacgcaccacaaccaccacaaccagac

SEQ ID NO: 663916 - DNA, 471 bp, Homo sapiens
  misc_feature (463)..(463): n is a, c, g, or t
gtcggtcacctatttgtgtcggggttgagtgagcccagatcacgcctgcactccagcctggtgacagagcaaaacttcatctcaagaaaaaaaaaaaaaaaagagtgagctttttgaacctaccctcatgctcatagatagggcaacattgggtcaacagaaatattatttcatggctatggcttgggacaaagcaattaaaagaattttaaaattgtgttaagcagaaatttcagtgcattgttaaaaaaatctccaatttccccgtgagaaagagaaagagctggagtctcctttaaaaatttacctgccgtgtttttctgtggcctagttgagcctttatctctccttcttttcccaggactttgtaaattacccgtgttttctctagcttgtgcagcttgcaaggttaccttagacagattaaacttcaagttcgataaaacattgattttccctttgnaaaagtta

SEQ ID NO: 663917 - DNA, 358 bp, Homo sapiens
  misc_feature (29)..(29): n is a, c, g, or t
  misc_feature (31)..(32): n is a, c, g, or t
ctgctcccaggcaaaaaatctctacctgnanncctcgtccccttcatggggccactggccaccttctagcactgccttcagggtcaccagcacctccaggcgcaaacccaatggttgactcaggccctgcgggactctcatcagaagctcaccagaatctgtgatgatcgattcacagaggagctggcacctctgagtctagtacacaggaatgcagataagcttcagctgctgatcctccaacagcatcctgctaaattcttgtcacctctaataatttgtgggaatgtgttgggattttatatacacaattttattaagtgaagaccaaaaacctttggtttcttccattctttgt

SEQ ID NO: 663918 - DNA, 105 bp, Homo sapiens
ctcaccgcgtctcttccctctccccaaagcctggatcagcgcccagcgtcaggcgatggggcgacgtctcgaggtaaaacggaggaggtgcgggacgcggagact

SEQ ID NO: 663919 - DNA, 122 bp, Homo sapiens
  misc_feature (70)..(70): n is a, c, g, or t
  misc_feature (102)..(102): n is a, c, g, or t
tccaaattcaagaagaaaagaaaacagattacctgaatttcatgggaaaaggtggatcacctcccccttnttttcccacctttcaagcctttcctgtcaccngatagccagctgaaccaccg

SEQ ID NO: 663920 - DNA, 472 bp, Homo sapiens
catctgtcaccctctggattatccagtcatcatgaacccatgtttctgtggcttcctagttttgttgtctttttttctcagtcttttagactcccagctgcacaattggattgccttacaaattacctgcttcaaggatgtggaaattcccaatttcttctgtgacccttctcaacaccccacccttgcctgttgtgacaccttcaccaatgacatagtcatgtatttccttgctgccatatttggttttcttcccatttcggggaccttttcatcttactataaaattgtttcctccattctgagggtttcatcatcaagtgggaagtataaagccttctccacctgtggctctcacctgtcagttgtttgcttattttatggaacaggctttggaggggacctcagttcagacatgtcctcttatcccagaaaaggtgcagtggcctcagtgatgtacacggtggttact

SEQ ID NO: 663921 - DNA, 1145 bp, Homo sapiens
  misc_feature (1)..(1): n is a, c, g, or t
  misc_feature (3)..(3): n is a, c, g, or t
  misc_feature (159)..(159): n is a, c, g, or t
  misc_feature (254)..(254): n is a, c, g, or t
  misc_feature (345)..(345): n is a, c, g, or t
  misc_feature (356)..(356): n is a, c, g, or t
  misc_feature (375)..(376): n is a, c, g, or t
  misc_feature (482)..(482): n is a, c, g, or t
  misc_feature (488)..(488): n is a, c, g, or t
  misc_feature (491)..(491): n is a, c, g, or t
  misc_feature (580)..(580): n is a, c, g, or t
  misc_feature (789)..(789): n is a, c, g, or t
ncnaagttaacatcatagctagtaaacagaagtatgtagctacatcaccatcgtaaattggctttaatttagtaatgtgtgtgtcttgttgtgtgtgcatttactactcttaccagcagagagatagcggatataattgtaagcgtaacaccttgcccnatttgggaccgactgcccccttctcgggcttaccctccccccgattttttttaaccacactctactatggcggcgttcttccgctcactcgttcntgccgggcctgccataattctatttgttgtaagagtactctgctccgcccataacctcctttgctgtagcacaccactcttataacagagngtttctccctncctgctctcgggctctccnngacataaatttcctcgccgctgggactgttctgcctctcttttcttcgtcccggcggggggatttcctccgcgcgccgctggatcttggttttgcacgcgttctanccagcncanatggtggcccttaggatgcttcctattatcagggcctttgcctcttcacacgagagggttacccaccaagtcgcctgtcttggcgcatnaaaagagtagtaacctcacctcgcccctctcctcgtgtaagagcggtatacatagctgaaaccacactatcaactagagttaccgcccttctgtggccaagcagcttcccagaagtctgtttacttctattgcgagatggtaaaatgtctccaccggtcgtggtccaaagactccccgccgggttttctaccaccaaggcgctcagcgnccaagcggcttctttgcactaagcggtgctgcacaacgacacgcttctggtcccaccccataccgcgtggggaacacgccgcacagatcctcccaacgggcggttctatcattatatgacataccaccaccacctcagttagttccaaccacctcctcctcggacatttcaattttatgtgtttttccacccacgaaaccgcctctatgcatcagagatccaccataaattctactatgacttagcccacaataaattcatactaacccattggctttttttaagcgagacccccccgaatcccctttttcgggccccattttacaaaaaaatttcattaagcgggccacaaaaca

SEQ ID NO: 663922 - DNA, 172 bp, Homo sapiens
tacagtatgatagtctttaagaactcagctccttacattggctttggtagggggacgtggggcaacacccgaagagtataaatcggggtgggggtgttcggtccttgcagggcttcacgagatcgattcctgactactttgctgtgaattgcacaactcacacagtaatgta

SEQ ID NO: 663923 - DNA, 123 bp, Homo sapiens
accggcacgcttcaccgccaggccgatcgcagcgcgcggctgcgctgcacggtcacggcggaggcatcggtgaagccggccaggatgtcggcacgatcacgtcgccatcttcgccacgcgggt

SEQ ID NO: 663924 - DNA, 742 bp, Homo sapiens
ggagggacaggcttgccatgcttcctcctcctcggcctcaccattccatgaaccaaaattgaaaaaatggttgacctcactccaggtacgtggactgagtgaaggttctttcactggcttgatgcaatcctatgcaaccaattagttcttgcagaaaacatgatgcttatgagtccgggcacagctgcacttctatagatggacaagacaggtctgtctgccaatccagacgactgtgtagcactttggcaaaggagagaatgccacaagaagtactcttcgaacagatgacgtgcagtagaacgtgtactgcagagcccagtctggaatgatccttgaaaatattaccttccatgttgcttggaagtaggcgtccgtgtatttgccttgagttggtcccagacccacgtctacgagtcggatccgtgcacttcagactatccgtgggagcgcgggatctacccacaacattgcatatttgacacccccttccccccatcgccagacatcaggacgctgttgagtattttcgcgcgttgcgactattggacgttgcttcatttccaatggcgttcacacggataggctgtaacgtcaacttgtacccatggtacggaaaactcatacaactcagcatccagtaggcttacaacgcaatcatgtcctcccaacctctcctgatgctgcctaaatacacgcaggcgggcccactgactactgactgccctaaccctgtggatat

SEQ ID NO: 663925 - DNA, 880 bp, Homo sapiens
tcagggtttcatcttttaaataagctctgtgaaagacatcctaagcactgtatgagacacaacagaatattttttcttccagtattaaaaaaaaagacatttgcaaacatttaaaagccaactcttctatataatcagttgtgatgatctgaattagaaaataccccgtggataatcatgtcctgtaatacacattttccttttttttggaaagtggagatctcgcgtggtggcccaggcgtggagttacaggtggcgcgaatctttagcctcacgtgcaaccttccggcctcccgggtttcaagcgaaattctccgtggcctcaggcctccacaagttcacgtgggaattacagggcgttaacaccacaccagtgtccaggctctaaatttttataagtgtgttaagttacccagaagtggggggttttacacccaggtggtggggcaccagggcgtggcctgtgaaatgcacaaatattcttatatataggtataccattgtggggaaaacagtgtgccctctcctataaaccccagccaataataaaaaccacgtgtgggataccaagggttattattaacaaatgtggtccccgtgagagcaataatcacgcgattataaagtgtttattgcgaaaaggactccaagacttcgtgggccgcaaaaaacctttgtggccacaagagaaaacccaaatttatatttggggcaataagagctcttcccaaatgataaaacaccctttaaaggaaagagccctcaagagagctttaaagacaaaaaaccggtgggcattaaacagaggagcaagacaagatttaattcttccagggatgtctgcataccgacaacacggggtcccccatataaactcggg

SEQ ID NO: 663926 - DNA, 229 bp, Homo sapiens
ttatacggggtggattacagcggatactcgcgcatgcactgtggctcctacacttgtgacatgcagattgtctggagttgttacttgaacacaggccgttttcgtacctggaaaggataccccttacactacctattgcacttgttgcacgtgatataataaccaacgacagcaacacagcagatagctactgggcagctctgggtgctccagacttgtgaacacgccg

SEQ ID NO: 663927 - DNA, 201 bp, Homo sapiens
ttctactgcaactaaatgctggacaggatgtggggcacaggaattcttaatcactgctggcaggaacgcataatggtatagccactttggaagacagcttggtgacttcttacaaaatcaaacatactcttaagacatgatccagcaatcctgttccccctcagcatcctgatttaattttcctgttgcagtgtgcttccg

SEQ ID NO: 663928 - DNA, 204 bp, Homo sapiens
tactgagactccgtctatcttacacttctgtgatctgtatattcaaataaaattagtaaacaaacaaataatcaataaacaacatggcactgagatagtaaactcgtaaccctttttgttatggttaaattattggtcatattcaggaaaattgttaaaaacttggcaatagggcaaatgaatagctgcatattcgcacgttga

SEQ ID NO: 663929 - DNA, 170 bp, Homo sapiens
accgcataccggtacctttgcacggtcagaataccgcggcgttaaactggtgtcactgggcaggcatgcctctaatactagtaatgctagaggtgatgtttttggtagccaggcgggttttgtgttcgccgatttcctttcacttcttatagtctagccttggggcaggc

SEQ ID NO: 663930 - DNA, 145 bp, Homo sapiens
  misc_feature (82)..(83): n is a, c, g, or t
  misc_feature (105)..(105): n is a, c, g, or t
  misc_feature (145)..(145): n is a, c, g, or t
gaatgatagaacagcagaagcgtaagggcccagagttgccgctggttacagacaagcgcacgacatgagttgctgtttggcnnggggtcttcgcccatgaggccnggtcagcaacaggcgcacggcagggaggcctttcttcaan

SEQ ID NO: 663931 - DNA, 849 bp, Homo sapiens
ggtggtggctaacgcctgtaatcccagcactttgggaggccgaggcgggtggatcaactgtggtcaggagtttgagatcagccaggccaacctggtgaaaccccgtctctactaaaaatacaaaaattagctgggcgtgatggtgggcgcctgtaatcccagctacttgggaggctgaggccaggagaatcacttgaacccgggaggcggaggttgcagtgagccgagattgcaccattgcactccagtctgggcaacagagtgagattccgtctcaaaaaaaaaaggaaacggcaaaaaaaattagcattatacctcttccttgttcaaccgccatgaaaaattctgaacactccaaattcagtgtgaataatccaaaacaaaatttataagtttcaaataatttcattcttataagtaatagtatacctttaaaaagcctcagggtatattatcttctaaacagtacaattcagtgcagtaacttaaccaatatgttctctaagtagaagaacaactaggctattcactgtgtgtggcctcagggctaaaatgggtgccacattaatatttccggtgcaattaacttgattgtaaacaccattcgtttggttacccatggccaaaatttcaaaggacgtattagtaattcctggaattatattattggaatcccagcatgcggcggggggacagacactggttcattataactcaataggtggggttcacacacctcctttaagtattttcaacatggttccaggttctttgctcacagcaatgtcccatggtttcaccattgaattggtgggggaggaaatgggggggcgacacacaagactacag

SEQ ID NO: 663932 - DNA, 520 bp, Homo sapiens
tttgacgtggagctgctcaacttagagtgaaggcaggaaggaactcaaggtggctggagatggctgctgctcaccctcctagcctgctctgccactgggacggctcctgcttttggggctcttgatcagtgtgctaacctcactgcctcatggcatcatccattctctctgcccaagttgctctgtatgtgttcgtcagtgttcatgcgaattcttgcttaggtaacctcggctacagcagtaagccttcctggttgggcatcaagagtaaagcaggtagcacccgttcctgatcacggcgcgccaatgtcttgttctctcaatatacataccggtaccgtcacttggtcccccctctcaaggtgctcagacatagaatgtgcatggcgtaccgcacccagacggacttcagcccgttacctatgttgtccctttttctcttatcaattatgttaggtgttcactttgactatgtcctctctgcgaaaatgtacaataaagggtctgtgctttacaaaaa

SEQ ID NO: 663933 - DNA, 399 bp, Homo sapiens
gaaagagaatgtgcactgcgggtgggtctctaaactggcccacctgggggcgtggttgtctcttatggtagagtctgcagagatgaaataaactccagtctcctataaactcccaggcttattaggaagaggaaattcccacctaataaattttggtcagaccggttgatccctgtcttctgataagatgttatcaatgacattggtgcccgaaacttcattagcaattttaatttcgcctcagtcctgtggtcctgtgatctcgccctgcctccactggccttgtgatattctattaccctgttaagtacttgatgtctgtcacccacacctattcacacactcagggatccttccaatgtgctgcccccctcttaatactcaccaataaattctact

SEQ ID NO: 663934 - DNA, 133 bp, Homo sapiens
gactaaggacccgcgtggttcttgcagaacttctgaaagagtctcaggacccccttaagggtcctgaaccacactttgagaatcgcttgaatctgggaggaggaggttgcagtgagccgagactgcaccattg

SEQ ID NO: 663935 - DNA, 576 bp, Homo sapiens
  misc_feature (32)..(32): n is a, c, g, or t
  misc_feature (127)..(127): n is a, c, g, or t
  misc_feature (144)..(144): n is a, c, g, or t
  misc_feature (165)..(165): n is a, c, g, or t
  misc_feature (180)..(180): n is a, c, g, or t
  misc_feature (182)..(182): n is a, c, g, or t
  misc_feature (269)..(269): n is a, c, g, or t
  misc_feature (282)..(282): n is a, c, g, or t
  misc_feature (302)..(302): n is a, c, g, or t
  misc_feature (343)..(343): n is a, c, g, or t
  misc_feature (348)..(348): n is a, c, g, or t
  misc_feature (360)..(360): n is a, c, g, or t
  misc_feature (385)..(385): n is a, c, g, or t
  misc_feature (387)..(387): n is a, c, g, or t
  misc_feature (390)..(390): n is a, c, g, or t
  misc_feature (395)..(396): n is a, c, g, or t
  misc_feature (411)..(411): n is a, c, g, or t
  misc_feature (431)..(431): n is a, c, g, or t
  misc_feature (444)..(444): n is a, c, g, or t
  misc_feature (449)..(449): n is a, c, g, or t
  misc_feature (470)..(471): n is a, c, g, or t
  misc_feature (486)..(487): n is a, c, g, or t
  misc_feature (495)..(495): n is a, c, g, or t
  misc_feature (506)..(506): n is a, c, g, or t
  misc_feature (510)..(510): n is a, c, g, or t
  misc_feature (573)..(573): n is a, c, g, or t
gagactcaaaaaaggggctgggggaagggtgnagcaacgatttctcacctaaatcattacacagtggcagcaaaggggtgagaaggggctgagggaggtaatagccaggtaacttgagatctgcagnggtgagccaagcatcanaaaacaggatgatgctgaagntgcgatgaccagtcntnattttcttaagagaacattcaaggatttgtcatggtggctgggctttcactgggtgttatgtctacaaacagcactcttcaattganactgtcaattatngttcttaagatttatggaantggtggagcttggaaagttatgagattacaaaattcctganagtcnatttgaaaaacntcaggatggtagagtggatgggtcncnggnggggnntcagaggtccctgcngtttcttgggtcagataccnggggggtccagcnttgcnggggagcatgattttctttcnnaggctgagggtttgnngggggggngggtggggatngtgnagtccaatggctctccccttccccacctcagttttaggtagggtttttaatttaactcttagncat

SEQ ID NO: 663936 - DNA, 260 bp, Homo sapiens
tagacgtacggaggctcgtacgggcgcccagaaacagtgttgatgagctaggactgggagcagcgacaagcagcagtcgtggtgagataggaaagagtcaggagcagtgcgattggtgaggaagctaggagaggaaggagcgctacgattggtggtgagctaggaaaagggatcaggaagagcgagtgcaattggtgatgaaggtgcaggcggcttgcttggcaaccacacggaggaggcgagccaggcgctgttacgga

SEQ ID NO: 663937 - DNA, 1158 bp, Homo sapiens
gctatatatcagtatactagcttgctgtcggcaccgactgcgttacccggaaccgccgggccgaacagcatgacgtccgcttatggagaactacatcaaccgaactgtagaccgataattacatcagatggcagaatgattgtgggaacactgaaaggttttgaccagaccattacttagatataggatgaaagccatgaacgagtatacagctcttcacagggaggtagaacaagtggtactaggattatacatagtacgcaggtgacaacgtagcaagtcattggacgaacatcgatgaagaaacagaattctgcgcttgattaggacggaatatacgagcagaacctttaaaattctgtagcacacacatgaggcacaacaactaccatactttggacatctgctaacatccttagatacagaaaactggattattactgcaggaatgataatatggagatatttatgacctgtgtcacatggatacatgacctccctttactggagtccagtcgctacactaatgtagcatttaagaaataaatcctacaatttcgaattgcacaccaacaacacacccttcaagaataacagcactcaacattataacgttagggacagcctgggacaacatataaaaaattacacacacaaatgtgaaaaccaaaccactgggcaaaaacagggagacaagtactcacaacaaacacagaataacaacatataaggaacacgaaacgaacaaaagagaacacacacaggcaccaacagacaaacatactgacccaacactacatcacgagaatacacacataacacaacaccacgcacaacgaggaacacagacacgacagcaacgcaacacacaaagaccagaaccaacatacacgagcagacaaaaataacataaaacataatcaagaccaaaaggagagaacagtaggcaacagcgacaaaaacatgcccacaaactaagaggcgtgaccctgcaaagaaggatagagaaaacacaacaagcaacaacaagcaagaccacaaaacgggctacaaacaaagtcacaacaaagagcagtaaactcgaaaatgacagcagaccaggtgaacaacagaacaaaagctacgaccaatccgacacatgctccgcgttcgcgtaca

SEQ ID NO: 663938 - DNA, 949 bp, Homo sapiens
  misc_feature (8)..(8): n is a, c, g, or t
  misc_feature (87)..(87): n is a, c, g, or t
  misc_feature (93)..(94): n is a, c, g, or t
  misc_feature (102)..(102): n is a, c, g, or t
  misc_feature (110)..(110): n is a, c, g, or t
  misc_feature (164)..(164): n is a, c, g, or t
  misc_feature (169)..(169): n is a, c, g, or t
  misc_feature (173)..(174): n is a, c, g, or t
  misc_feature (191)..(191): n is a, c, g, or t
  misc_feature (194)..(194): n is a, c, g, or t
  misc_feature (213)..(215): n is a, c, g, or t
  misc_feature (218)..(219): n is a, c, g, or t
  misc_feature (223)..(223): n is a, c, g, or t
  misc_feature (233)..(233): n is a, c, g, or t
  misc_feature (239)..(239): n is a, c, g, or t
  misc_feature (242)..(242): n is a, c, g, or t
  misc_feature (245)..(245): n is a, c, g, or t
  misc_feature (251)..(251): n is a, c, g, or t
  misc_feature (265)..(265): n is a, c, g, or t
  misc_feature (276)..(276): n is a, c, g, or t
  misc_feature (283)..(283): n is a, c, g, or t
  misc_feature (286)..(286): n is a, c, g, or t
  misc_feature (295)..(295): n is a, c, g, or t
  misc_feature (302)..(302): n is a, c, g, or t
  misc_feature (306)..(306): n is a, c, g, or t
  misc_feature (308)..(309): n is a, c, g, or t
  misc_feature (343)..(344): n is a, c, g, or t
  misc_feature (346)..(346): n is a, c, g, or t
  misc_feature (348)..(349): n is a, c, g, or t
  misc_feature (379)..(379): n is a, c, g, or t
  misc_feature (384)..(384): n is a, c, g, or t
  misc_feature (435)..(435): n is a, c, g, or t
  misc_feature (441)..(441): n is a, c, g, or t
  misc_feature (454)..(454): n is a, c, g, or t
  misc_feature (459)..(459): n is a, c, g, or t
  misc_feature (473)..(473): n is a, c, g, or t
  misc_feature (488)..(488): n is a, c, g, or t
  misc_feature (490)..(490): n is a, c, g, or t
  misc_feature (496)..(496): n is a, c, g, or t
  misc_feature (505)..(505): n is a, c, g, or t
  misc_feature (538)..(538): n is a, c, g, or t
  misc_feature (559)..(559): n is a, c, g, or t
  misc_feature (564)..(564): n is a, c, g, or t
  misc_feature (578)..(578): n is a, c, g, or t
  misc_feature (581)..(581): n is a, c, g, or t
  misc_feature (894)..(894): n is a, c, g, or t
  misc_feature (948)..(948): n is a, c, g, or t
tgcaaagngagggattgttctcagccaacatttaccagtgattccgacacacgcaaaaacactcccaatcacggtgctttatacttncttttnntttctgcnctgaaaangaaaaggaaggtaaaaacaatgacagattagtttacagtgacttcatctttgtncttanattnncctttgctcttgagagntgntgtgggaaagacaggggannntcnntgcntgatggtgancggtgnccnggncacctnggtctggctaacangggttctaagngcttggncanggtgccgtnaacgcantagntnntaaacactgacaggcaacagttaagatacattannanannagggaagatacccacaattccattcttaanatcangcacaaaatctgacaatgaaacatatccaggggttgtgtgtccccatctgntctggnggtggcgctctgnaggcngccacaaggtgtgngtcacacactagggngncagacntctgttcancacagaattccggctttgctgaactgcaatgcntattccctcttctcactagtncaganatgttctgcaggcnggnacatgagccccccggctcattcacctgtacaacctcccctgacagatagtgagagccgcggcggggccaggggctctgtgtgctttggaggctactgcctctggaatgtttcgcattctcaaggtttggttgggctgtgggttttagttatgctccacacattgtttaggtgctcgctttatttttcatgtgcaactgttactgtctaaagctttcagaagaacgtgtacagacaccctgcagagacgagggtcatgactgggccctcctgcctcttgtggtggggtgggggcatgggggcgcgtcacagaantagagaaatgacatgttccgctgcagttaaactctagtccctgattcggtcctnc

SEQ ID NO: 663939 - DNA, 841 bp, Homo sapiens
ggttaatccgagaacggtggaggacgaccttgtgccggtggacacggtatcatgctggacacagtgcctctccctttcagtattggactccacaggttcttgaggagaaaaactggaacagcatctgtaacacaaagttacaattacacttgatgagaatgatgtctccaagacctttacagatataacacgatcctcctatagccagctactgattccaaataagtagaacgagccatgaagatcgaccacttatcaatagaaaaactcctgatggacagtgtccatgcaagagctcatcagaagctccaagaactgacggccattcttagaggcttcaatgccaatgaaaactcttccatagagactgcactacccagctacttgtgtacccatcttggagccctgtggtaattcagagtgtctgcacactctcgtcagatattacattctggcactgtcctcaatagatagctttatggactatgaccaggccactactggatgacatggagcaagtctgtgactgaatgctactgcacacgacatcataaccctaggattcagccacactctcaagttaaggataggacaaacagcgtagcaagacagatctataaaaacatctgacctacgatcagcaagtgaacacaatcgcacactaaaccaattactcacactcatactatatgagaaacccaacgaacagaactacaccggacataaaaataacccgactaccacaacacaaacatagatgaggagatgacggaggaacccaaaaacaccacaaaacggacgcacaaaaacacacaaagcaagaaatgatacgaacggaaca

SEQ ID NO: 663940 - DNA, 312 bp, Homo sapiens
tcattgattcattcatttatttgagacgaattctcgctctgtagcccaggctggagtgcagtggcatgatttcagctcactgcaaccttcacctcccagattcaaggaactctcctgcctcagccttccgagtagctgggattacaagtgtgtgccaccaggcctggctaatttttgtatttttagtagagacggggtttcaccatgttggccatgttttgttttctttttcacagtgttgcaggatctttgtgtacttaagtgtttttagaagatgaagttctagaagtggaattgctagtgcccaagagt

SEQ ID NO: 663941 - DNA, 251 bp, Homo sapiens
tggtggtcagtgaaggtgtgagacctggcctccctgctggaggaggaggattactactacctggtggtcagtgaaggtgtgagacctggcctccctgctggaggaggaggattactacctggtggtcagtgaaggtgtgagacctggcctccctgctggaggaggaggaggataactacctggtggtcagtgaaggtgtgagacatggcctccctgctggaggaggaggaggataactacctggtcgacgc

SEQ ID NO: 663942 - DNA, 883 bp, Homo sapiens
ggctcagcattgtggggacgctctcagttctcggccgcaaggccccagttccttcaaaatgtctaggtgtccggaaatcctgtgcaagctcagcttgcagcggttgatcactctacaccccacaggtgcatatgggtctgtcaacagcctatacttaactttgattgcctgaagggggcatgctttggacacatttgaacagcagccattcatgaccaacgggtgttgtggctgcacggtccacccattgtccaccatttggacccaacccgcagtgattgcacgagagaccgggattatggccttcgccctaacccagagaagggcccaaacaagggaactttgcattcaacgcccttgacggtcaagccctttatctggccactctgggagacgggtgacttatcgggccctaattggaagcaccaccctgcttcaagttagtgaacgggcttcctggagccaaaaaaggctttcccatgaagcgggtgctttggaaaccgggaggaggacctctcctcagtgggaggatccatcgtggtccccagaacgcaaagcaggaagctgcaggcaaatttaacatggagtctaacaagggaagtggtacaaagattggattctgggaagaagggaacaatatttgggacaacattctgtggatttcccgaaagctggatgggttgcctttgacaagggggtgcagaagagcagagggattgggtctggcattggttatgagctgtttgcgcaagatgggcgggagtcttataaaggctggagtgaagagggagggaattggtgtcccagtggttaggatattgtcgagttgatgtggccacttcagaaggagtggagggaagaagtagcttatgattgggaaatg

SEQ ID NO: 663943 - DNA, 912 bp, Homo sapiens
tgagaagatgtcttgagcctgggaggtagaggctgcagtgagctatggttgcaccattgtactccagcctttgtgacagagcaagatcctagaaagaaagaaagaaagaaagaaagaaagaaagaaagagagagagagagagagagagagagagagagagagaaagaaaagaaaagaaaagaaaagaaagaaaagaaaagaaaagaaaagaaaagaaaagaaaagaaaaaaagaaaagaaggaaagaaagaaagaaaagggtgttggactttgttcttgggatcagcttgaacctttcaagacctgtgctgaagcttatgtggggcaaatctagagtactcgctactccagggctagttcatccctactataaggtgtgatcttctgtcatctggttgaatgccatggaggtctcttcactctggctggtcagaagctggacctcttctggccttctgtgagccctgaccattgttcagcttggagcccccagtcatatttgatcagtcttgtggaatgtccccatatatgtgtttagcttagtgttcagccatggattcaaggaggacctgggccgatttctggagccctttctctacataactctctcttctctggcactctgcactctgaattgcagccacctcagcctccccaaactctactcgctgtgtcctcaactcagagacacatcatgctgtgctttggttcccctccctgctctgccgtcttggaagtttctccaggcagagggccaaggtgattggaagtctctcctggtttcttttccttctctctggaatcatggtcctgtgctgctcatctgaacactggtttttaagtagatgtgtagattgggatggagccgttttctttgattttgatagcagaacggcaagcacagttccaatt

SEQ ID NO: 663944 - DNA, 644 bp, Homo sapiens
  misc_feature (6)..(6): n is a, c, g, or t
  misc_feature (86)..(86): n is a, c, g, or t
  misc_feature (101)..(101): n is a, c, g, or t
  misc_feature (147)..(147): n is a, c, g, or t
  misc_feature (198)..(198): n is a, c, g, or t
  misc_feature (259)..(259): n is a, c, g, or t
  misc_feature (271)..(271): n is a, c, g, or t
  misc_feature (277)..(277): n is a, c, g, or t
  misc_feature (279)..(279): n is a, c, g, or t
  misc_feature (313)..(313): n is a, c, g, or t
  misc_feature (327)..(327): n is a, c, g, or t
  misc_feature (336)..(336): n is a, c, g, or t
  misc_feature (361)..(361): n is a, c, g, or t
  misc_feature (368)..(368): n is a, c, g, or t
  misc_feature (370)..(370): n is a, c, g, or t
  misc_feature (382)..(382): n is a, c, g, or t
  misc_feature (385)..(385): n is a, c, g, or t
  misc_feature (415)..(415): n is a, c, g, or t
  misc_feature (435)..(435): n is a, c, g, or t
  misc_feature (439)..(439): n is a, c, g, or t
  misc_feature (441)..(441): n is a, c, g, or t
  misc_feature (447)..(447): n is a, c, g, or t
  misc_feature (456)..(456): n is a, c, g, or t
  misc_feature (490)..(490): n is a, c, g, or t
  misc_feature (507)..(507): n is a, c, g, or t
  misc_feature (642)..(642): n is a, c, g, or t
ggggcngggggcttctgcccagggctcccctggaccaggacgccaggtagggcagggaacctcagttgttctccacccagccattntcagatatgaatgcnttaattacctccttcatagccaagttggggatgagctgttcctggnttttggggctccgggtcacggggtcaaaatgacccacacgctgcaggtgcncctcgatgttcttgcggtcgtaggtaaagccacttggcgtaaagaacggctcccgcatcancacaaagctgancttgcnanaaaggtagttggggatgtttcgcttcttcctctnctcaaccacctaanaaaaaagcncgtccatgtacgccaagaacttgtngtgcttngnctcaatgcaggnctncagggcccggacgtggcttttgtactcatnaccctcgtggtttcgctggnactntnccagcnccctctaangctccgcggcaataagcctggagaggaaggagtncagcacgctctactggnggatgcgccgctcctcaatgctgttccagcgcttcttcttcgcgatttgaagagcgctggggatgttgttcccgaagttcagccgctgctccttggccaggctgttagctcgctgcagaatggcgaaggcctcanca

SEQ ID NO: 663945 - DNA, 769 bp, Homo sapiens
cgatggtggcctccctgtagaaatttttacagtttctcgggggtgtggtgcccccggtggttcgctgccccccctctaaggttggggggggccgcccccaaattttttattctcgaggcgtcggtagtgctccctccgaggtatccctgctttgccccccagaggtgggccagaagtgagcatccataaagtagcccgcattctcccccctcggggaagtattttctccgcctcccccggggtatgcacacggggggggggagatgttaaatatcgccggcgttatccacttcttcttcctccctacatctcccgggcgttgtgtttcctcctcaccacacgagaagagaaatatattaaactctctccacgcaacatagatagagagagtggagccaacacaatggtcggggtgggagtagaggaacacacataaagaggctcttgttttttgcccctactgaccacaacaaattattagtactatttcccgactattatataccacacccacggggtgttttaataattttttataccaaaaaagatcttttctttttggtgaaaaaccacaccgttttttataaaaaaccctcgctgttttttaacaaaacccctctctataaaggttttttaatagtttttacaatatctgtcttccaaggggggttttttaaaattttttttttttttttaaaaaaaggagttcccccgatggtttttttccaaaaatccccccccccccccccccctttttaaaagggtttta

SEQ ID NO: 663946 - DNA, 218 bp, Homo sapiens
acctgtattggctgggactacaggcgcccaccagcacacccggctaatgtttgtactttttaatagagacagggttttactgtgttggccaggctggtcttgaactcctgacctcgtgatccacctgcctcggcttcccaaagtgctgggattacaggcctgagccaacacgcccggcctctaatttttttcatgcttttggttctttaacataagca

SEQ ID NO: 663947 - DNA, 451 bp, Homo sapiens
ggcgggcccggtggctcacgcctgtaatcccagctctcaggaaggctaaagaggcggagaggaatagctgtgagccccaggggaagtccgagacctgtgcctgtgggcaatatagcggaagaacccccgggtttcttcccgggaaaaaaagcgaaaccacaaacacacaccaagaataacaaactaaactccaaagacaagaccacacgcattgcgggttggtcgtcaggagacgggggcctatttgggggccccttctggggaaaacaagggtttactctagagaacccacatctccgggtagggagagaacacgaggggggggagacccaacgagagagagaacagagggagagaaaaaacacaggcgcggagacaaccaccagggggtgaggacagcacaaagaacatagacaggcgcggggagagacccacacccgagagagggaac

SEQ ID NO: 663948 - DNA, 1522 bp, Homo sapiens
  misc_feature (537)..(537): n is a, c, g, or t
  misc_feature (735)..(735): n is a, c, g, or t
gcttagccaaaccatttacccaaataaagtataggcgatagaaattggaaagcctggtcgcaactagatatagtaccgcaagggaatagatgaacaagattataacctaagtcataatatagcaaggacgtaaccccatataccgttctgacataatgagattagaactagacagagtaactttgcaaggagagcctgaaagcttaagcacccccgtaaatccagcacgaggctaccgtaagaacagtctatgaatgagtcatcaggccagtctatgataggcgaaatatagctggggaagcattgtatagtgtagcagggcgtagcaagatcctaccgaagactcgtgggtagattatggcgtaggattagtgccagatgactaggaaaatacgttaaggatgtcagagcatatgtcaaatatggtgactcccaccaaagataagccccttcattaaaatgcacccgtatgggtagagatatttgaaagcgtgggattggaagtacccagagagcagggggaacctatgccttctntcgtgcgaatcgaactcatgaggcaaaacatattacccttttgctaaaggcacgaaggaaggttaacacacagagtttgttagaggccactcaccaataaggtaagggcgctcaaagatatggccgaagctcaaacgctaagatctcagatggagaaaggcggtgatccagaggcctgcaaacgaacccccaacatancccgtaagaaaacataatccgcagaaacagtatttaaatgctttgaagactcccttcacaactccacatatttgggaacccaaagtactgattcacgcccttattaggaacagaaacttaaagtgtggttaaggtaataaacgctaaaccatttgaaaaaacattgcgtcctaccggcgattaaaagccgtgccgttcaagaatttaaaagacgactggaaacttgggcgaagttaaagcaggccccaagtattctacgcgaatcaaagacagacaaggtccatgtatatacgcctcagacttgtgcagacccaaagcaacaggggcgatggcgttcaattagagggaacggttcacaacagcacgttacaaggggaacgtctggggaaaatgtgtaacccccgacctggggttaccacagagaaagattcaagcctcctaaggagattcagccaacgatgatatagagaggaccgccggcgccgggcccacagtgcacagacaagggtttaacgcggccggagcgaacccctaaacacacgggcacaaggggtgcagatcaacgccactggtgcccctatagaaggggacccgccgtatgagtagtcggcccccccaagggggaaccgaggaccgatatgaagaacaacgggaaaaggtaggcgcccggaaagaagagggcgacacaaccggaggagaagcgggggttcgcgattaaagacaagaaaagcaacgacaccagcgagaatacacgaaaaagagaaggggggagacgaaccagacactg

SEQ ID NO: 663949 - DNA, 570 bp, Homo sapiens
caaggttactttgtatcgatatgacctccaaatgaaccacctgttccgactcagaagaggaagcccatccgagtgctgtctctctttgatggaatctctacagggctcctggtgctgaaggacttggggcttcaggtggaccgctacattgcctcggaggtgtgtgaggactccatcacggtgggcatggtgcggcaccaaggcaagatcatgtacgtcggggacgtccgcagcgtcacacagaatcatatccaggagtggggcccattcgatctggtgattgggggcagtccctgtaatgacctctccatcgtcaaccctgctcgcaagggcctctacgagggcacttggcggctcttcaaagagttctaccgcctccttgcttatgcgcggcccaaggagggagattatcgccccttcttctggctctttaaaaatgtggtggccatggacgttagtgaaaagagggacatcacgcgatttctcgagtccaaccctatgatgattgatgccaaagaagtgtcagctgcacacagggcccgctacttatagggtaaccttcccggtatg

SEQ ID NO: 663950 - DNA, 637 bp, Homo sapiens
  misc_feature (83)..(83): n is a, c, g, or t
  misc_feature (105)..(106): n is a, c, g, or t
agggtgccccccatcccccttcccgaatgcataattccccaacccagaacctgcctgtcccccactgtcctccacacaacgcncactccccacctcgtacctcanntccccggcttcagtcaatgactctcgaggtccacgcaccacagaaccgtcgacgaagagcatgatggaggtggaacggaagctggcccaccgcaagaccagcaagttccccgagaacccccgaggcttccctgaaccccagtgaccacaagctggatgagaagctgtgccagaggctcacacagcgctatgtgagcgtcatgaacaggctgcagagtctgggctacaacgggcgggtgcaccctgcgctgaccgagcagctggtgaacgcttatggcatcctgcgagagcgcccggagctggcggcgtctgagggcggcccctacaccgtggacttcctgcagcgtgtggtggtggagaccgtgcaccccggcatgctcgccgacgcgctgctgctgctctcctgcctcagccagctggcgcacgatgacggcaagcccatgttcatctggtgacgctggagctgggaggtccaggctcgctcagccccacagccctgtgcacggccattaaagcttcccacagacactga

SEQ ID NO: 663951 - DNA, 96 bp, Homo sapiens
gaaccgccatcttccagtaattcgccaaaatgacgaacacaaagcgaaagaggagaggacacccgatatatgttctctaggccttttaggaaacat

SEQ ID NO: 663952 - DNA, 354 bp, Homo sapiens
ctgtttagagtttctatatcttcctggtcaccaaaaacagcatgatactggtataaagaatagacacattagaccaatgaaacagaaatagagaaacctagaaataaagccaaatacttagagtcaactgattcttcaacaaagcaaacaaaaacataaagtgggtaaaggacaccttactcaacaaatggtgctggagtaattggcaagccacatgtagaagaattaaactagatcttcatctcccaccttatacaaaaatcaactcaagatggatcaaatacttaaatctaagagctgaaaccatgaaaattttagaagataacatcagaaaagcccttctgtcgtcttctc

SEQ ID NO: 663953 - DNA, 776 bp, Homo sapiens
  misc_feature (83)..(83): n is a, c, g, or t
  misc_feature (105)..(106): n is a, c, g, or t
agggtgccccccatcccccttcccgaatgcataattccccaacccagaacctgcctgtcccccactgtcctccacacaacgcncactccccacctcgtacctcanntccccggcttcagtcaatgactctcgaggtccacgcaccacagaaccgtcgacgaagagcatgatggaggtggaacggaagctggcccaccgcaagaccagcaagttccccgagaacccccgagagtcgaagcagctggcctgggagaggctggtgggtgagattgccttccagctggaccgcagatcctgtccagcatcttcccagagcgcgtacggctctacggcttcactgtctccaacatcccagagaagatcatccaggcttccctgaaccccagtgaccacaagctggatgagaagctgtgccagaggctcacacagcgctatgtgagcgtcatgaacaggctgcagagtctgggctacaacgggcgggtgcaccctgcgctgaccgagcagctggtgaacgcttatggcatcctgcgagagcgcccggagctggcggcgtctgagggcggcccctacaccgtggacttcctgcagcgtgtggtggtggagaccgtgcaccccggcatgctcgccgacgcgctgctgctgctctcctgcctcagccagctggcgcacgatgacggcaagcccatgttcatctggtgacgctggagctgggaggtccaggctcgctcagccccacagccctgtgcacggccattaaagcttcccacagacactga

SEQ ID NO: 663954 - DNA, 115 bp, Homo sapiens
actgtgagttgtatagtcgatggttgccttgtctcggtaatagctgtcgacccaatcctggcggctccgagcagaaagagccatggtcgtattggctttggatctgtgcataaac

SEQ ID NO: 663955 - DNA, 728 bp, Homo sapiens
atgagtgtttaggtgattgtgcatggcctttcagttctggctcataccgtgtgtcagcatcgcagtattcattactggggtgataccctatgaagtgtaacaaattgtgggaaagccgtttactgtatatggacaacttattggacatcacgagttgttcacactgggtgagatataccttttgaatgtataggtgatatgtgggtaaggcgcttgtagtatgcttgaattgcattgcgcttagtctgtaacactgcagtcggggtaacacatctggttgagtataacccggttagagatgctattaataatgtgggaagacctttagatacagttcagcccttaatagtgcatctgagaaaacatatgagtgttataccctaagagtctgcatggagtgtcgggaagtgccttcggtgtgtggctcaaacattgttgtaacatcggggtatttatgcatggtagtgacaactttcagaatgctgaagaataatcggcaggtctattctcatcttataatctcttattatataactcagaataacataagaaatattcctttgtcatttactaggatttgtaataccaatatttatactggtggaccattcagaaaaagtgggaaacattattacttaatggttacagcactgacagcatgaacttctatatgatgcattattctaatattacgcatgaacagtgataaacactggctcccccccctc

SEQ ID NO: 663956 - DNA, 187 bp, Homo sapiens
aaaaggcccccccccccaaaaaaacccctggtttttccccaccccctttccccaagggaaaaagggtttttttttattcccgggggggttttaatgggccccctttttttaaaaccccccctttaaattttgttttttttttaaaaaaagccccccttgaaatttttttttttaccgtccctgggga

SEQ ID NO: 663957 - DNA, 683 bp, Homo sapiens
cacactgtatgaattatagcacaaaaagtgactgtaggatcaggtgatagtcccggaatgtgcagtgtcttggtgcaccaagatgccttctaaaggctagacataccttggaaccctaatggggcagagagtatagccctagcccagtggtgacatgaccactcccttagggatggcctgaggtagaggggagtggtatgtgttttctcagtggaagcagcacatgagtgggtgacacggatgttacgatataaggctctagttacgggtgtcatagtcatattgagagactgacacacatcctagcagctggtaaacggggtgcctggaggccatggatggagctctagaaacattagcatgggctgatctgattacttcctggcataccgtcacatatttatgggaagtcttattagagggatgggacaggttagaccatatcctagctgtggaagctctggaaacactctctaaatatccctctattaaaaatcacttgacctaagtacacttcctacctttgcaggggactagaacatggaacatatctctgacatagttcttggtaatgagagccagacacaactgagattctgacgttgtcaggttctcggagctcatctacataatggagaccttcttaggtaaggaaaagagtaacctggatatgctggtatctg

SEQ ID NO: 663958 - DNA, 1050 bp, Homo sapiens
tatggatgacaccacacaatgattttacaaggcactcgacataatgaatccaataaacattatagcgaatattcgtctagtctgtgaaatagcctacgagtaagactgcgtgctgtagcaactatgatagctgaactgcctcaacatgacagtaccttgttgctcccgacatgttcgtgcatcatacatgtctatccgagactgactaataacaagacaacagtgtccgcgacactgattcataggagtgtagaacgaaaaggaagaagggattgctaaatgtgaagatatatgggacaccatcatccactagggatagacacatcgaaagtcttgaatatctgagatgggttcatcttgcccgagataaactcacatagacataggagtcacaagcatgaaactccacgggggcaggtctctcatagtgagagcatccctcctatgcaggataccgcaggatcgttgcgaaaaagcccagtactagatcatgttcaattctaacttctagctcgttgtacatagccagtgcgaagattgagcataagatctatttacaagagagtatcaactcatgttactcccacagagtacaatgagagaagtcaagggcatggcaatagaaagtacacatgtcacttgacagtaatgaaaaaaacagtcttaccacaaagaaatgcaaatcctggaggggcaacaaagcgtaaacatgctgaagaaccattgaaacaaggtgagaaaagcaaggacgtgacaaacatatacacatgattggagggatgcaaaataatgatgcgtgtgcttgatgtggtacaacgttagaatatgtgtatgctgagtaagaagaaataataagcaaaataagaataatggcattgaaaggggaagaaagcagagaaatgaatacgataaaaggtgcagaaatgaaaaatgaaatgacgaaaatataaataagatataaaaaagaaaaaaaatagatagaaatataaagaaagaaaagataaaaagaagagagaaaaaaaaaatgaatataaaagataataaattaat

SEQ ID NO: 663959 - DNA, 767 bp, Homo sapiens
  misc_feature (587)..(587): n is a, c, g, or t
attgcccggtggtcctccgtggccccgaggctcccgtggtccccgtgtgggtggcccatgtttcgaccaaattcggggaatagcttcccccctctttcccccggtttcgggtagtttgtttggtgcttgcgccagttttgcgcgggtagtatttgaggggggtacctgtcgtgggcccccttgtgcgcccccacttggctggtcgccgagccccaggtttccaccccccgcctccgggggtggtacacgcccgcccgtggaaggacgttttgcttcgtagcaacaccagtattgtacagaaggagtcttatcaccataagggcaggcgtagttttatgttcctctcttggtattgaattattcttgagagatatagaagaggttgcacccgccttcttattccggcaatatggaaaaggatttcaccccttgatcagcacaccattctggatgatgactcctcttattattgctggggcgccgcacctggggtaatcatccccgtctctctcgataaggtgggtgcgacctctttcgggccccccacgctgacactgtggaagtgttgtcgagcttttcgcccacangcacaccacgtggcggtcttcttccctgtagacacccacatggccctcaatttcccctacatctctgagaaagtataacacttaatacctcttattctaatatttcttccacaatttttttactactatttattgtataatttttttcacttaaataacccaccaaagtacaacaataca

SEQ ID NO: 663960 - DNA, 227 bp, Homo sapiens
cccgcagctcggggcttgcccgatgtccatcgtaagctcccacggcctctgacccatccttctcgtctctgccagccctggcttgttgcgcagccatctcctgtatgtcttgccaagatcgctgcaggtaacaacacatctatctacactcaggtctgttccaaccgctacgcgaaagctgtgcgcccagaggagacggtaatggtgtacagtatcctcccctgtgc

SEQ ID NO: 663961 - DNA, 151 bp, Homo sapiens
atgagagctcgctacctttggtgcttgtgatggcggctcctcactggcatgagaagatcaccatgcagaacctcaacgaccgcctggcttctacctggagaaggtgcgcgccctggaggatatcattccctctactcttaatctccccact

SEQ ID NO: 663962 - DNA, 805 bp, Homo sapiens
tgattcagccttctgcattttgccatgtatggtggcatctaatttcagtgtgattcattcctaaaatccaaacagatttctctgaagtacaaatgatgattgctgctgttgctgctgctgctggtggtggtggtgctaaatggtcagcaaaagcccctctctgtatcttcctacctcataattctaatggccagatttcaggaatgtgttttctatacctctgacggtacttctatcagaaaaattcagcaaatatgtatttactactgcaagcgttcttctcttttgactgtttgcttggtatagccataacttatacaaaatgttgctaagagaataattcataactccagttgacaacccagatataccttttagcaaatcaacaaaagtggcatggacatacaagtcacacatttcagctgtgtgacggaacatggatcaccatggtgctgtgttgcagcattgctctgactaagaggaggcagccaaagaaggccacatgtcatatggatgtggatataaaattccagaatatacagatctgagaacaatgtagatgagtacccaaggctataattgttttaagttaaaattactgctgattaatacagagtatctttggagtttgataaacttttctaaaattactttagtggtgtatctgtaacacattgagttcaatggttcaaagtgaactatgtagtgtgtgtgtatatacacacaacatatatatatatacatatatatatatatattctatctcaatgaagttaataaaattaatgatggtaaagccaaaaaa

SEQ ID NO: 663963 - DNA, 248 bp, Homo sapiens
  misc_feature (2)..(2): n is a, c, g, or t
  misc_feature (81)..(81): n is a, c, g, or t
  misc_feature (100)..(100): n is a, c, g, or t
  misc_feature (124)..(124): n is a, c, g, or t
  misc_feature (133)..(133): n is a, c, g, or t
  misc_feature (151)..(151): n is a, c, g, or t
  misc_feature (197)..(197): n is a, c, g, or t
cnacccccacctctactgtcgtgaaagtctggagagctgccatcttctgaccatgcagattctagggtctgttcatctgtnttccttatgtttgacttcntgagcgggtgtcatcaccatgagnatgaacttnccttgcaaccacgtcccngacaaataacaacatgccctaaaaaccccaaacacagtgtgcagcntaatcagctcacccgctcacagggtatctggtaccttaacctcctggccgg

SEQ ID NO: 663964 - DNA, 357 bp, Homo sapiens
  misc_feature (16)..(16): n is a, c, g, or t
  misc_feature (39)..(39): n is a, c, g, or t
aaggagggtgtttatntgcaggtcaagaagcaaacaganatcagggagctcatgcttaagacctgaactccacagtggcttacatgtaaggtgcagaggttacaggcaaaggcatcaatcaacacatggaagccatatattggtttggcctaaaaaggtgggatatcctgaagtaggggcttacaggttacaggtaaatccaaatattttctgatttgcacattgtttaaggaaggggatatttgtctaaagatgggatcagcaggccaggtgtggtggctcatgcttgtaacctcagcactttgaaaggctgaagaaggagggtaacttgaggccaggatttcaagaccagcctag

SEQ ID NO: 663965 - DNA, 1219 bp, Homo sapiens
  misc_feature (284)..(284): n is a, c, g, or t
tgaaacggacatcttgctgtactgtggcctaggctgaagtgcagcggttcaatctcggctcactggaaacctccgcctccgggtgttacaagcagatttctccatggcttcagcctcccaagtacgctgggagattaacagtgtgtgtgcaccaccatgcctgggctaattttcggtattattaagagaacacatatgggggtttacaccatgtgttgggccagggtctgggtttccagaactcctctggacctcgtagatccgcccactcttggctctcccanaagtggctgggagtattaacaggcgtagagctaaccagcgcccacaacccaattaaccctttttggaagcagttaaagattaacctcccttattgaaaaccgtgcaagaataacgggatcacaacgtgcctcgaggcacatattttcacagcattcacaagtgacattcaacgtttacatttaaggcggtaacctataggacaaaagggacacgtggggacaaaatgtggacaaacggtggtgcctctatcgggaacttcgttggggagaagcaaggggacgctttctcaaagggaaaacacaaagctccaatccccagaaaggcctccccgtagagaagtagacacgggggcacaagaaggactttccttctcaccacataagagatgggggagaatagacgagcgtgcttctgggagcaaccctctaaaacaggcacacatcccaaaagatctcacacttgaaagggtagaaagggcgcatgcagcactgacagcaaaaacgtgccttgtttgtaacacccgcaaaaaacagaaaagcgccgtactacacagctcttgaagcaaacaaagggggcagttcaccaatttcaaaaagagggcccaatgacaggcgactcacccacccatgtgataccccgccaacaattgttgccacaacaccacagcgatagcacaatctggtcgcacgcagtggaccccaagtggtaacccgatgccccagacggcacaccggaaacacaacaaagatatacaacacgggcaccaaaaggttctctacgagaaaagggaccaaaaacggaaaacaacaaaatccagagcaaatgaggactagtgaccagccacatcacaggagaacaggagtgcacacacaacacaggcgagccccgaaaaacgcaccgagaacccaacaaacaacatacggaagaaaaccga

SEQ ID NO: 663966 - DNA, 479 bp, Homo sapiens
gttgactctaagaggatcccgagctctctctgtggggactgagggtagtatggacctcagctggcaagctacttgcaagcccgttctgggcaggagctcccaaagggaaaggaggcaaggcagcagccttcagttggaatgaaggcgagatggtgtggaaggtgctcagaaggtctccggtctgcaagctctctttcatcagctcctgtgagtgggtcttcttggtatgccgggtgaggtgatgggtgcgcccaaatctctgggcacagaactggcacaggaagtccttgcatcctgtgtggaccaccaggtggcgtcgcacatccttccgggtgtagaagcatctttcacagtggtcgcactggtgcttcttttccttggttccgctagggggcttctcttccgcatgggctttgaggtggtccagtagcacctcggtgctccctagctccagggcacagaccccacagagagagcgt

SEQ ID NO: 663967 - DNA, 424 bp, Homo sapiens
ttcacgttgtgatcgctgcatcatgcgaatcatcgtcatgaccgcattgtgggctgtgtccctagacagctgccgaactgtaccaatatccacgggcattatgatcgcatgtagtgcatacctactggtcattatcatccagatactggacatgtagctcatacggcaatagtcctggatcacgatgtcttcggtgtccaggtggatacggcatcttcatacctcagctcggtgtagcagagtaaccaggactctcgggaatagagtgatctctggcttgagtctctgcacgagctcattcacaatggcaatgcaaagtcattatggagagtctaagtaggagcgcactctggccgaagtccttgtaattcctacacaagagtgctttcataagcttctgaagtccattgaaagtcaccttgat

SEQ ID NO: 663968 - DNA, 162 bp, Homo sapiens
ctcctcccaggagataaaacttgtgcctgaagggaatcaggcaaggaattgaacccagggaacagtgacaggtgaatggggttctgctgggttctgtcataggtcttccgtacgtccatctggggttccttgctggtttgcattaaacctccgcaggtagga

SEQ ID NO: 663969 - DNA, 1600 bp, Homo sapiens
cgggcgagcccccgaggcccgaggtgagagggaagagctgccgggccctgggtctgctggagtgctgtggctgccgcccggaacgacgaatgcgcggtgtgctacttgcgtgtgcagtgcgcgatgttcgctgcagcacctgccccctgtgcggtgaccgtgctggtctgcttcctgtgctgctgtggtgagtgatgaactgttggcctgccgttgcggggactgctcctgtggacccgttggccttgtgctgcggtctgcgggtggatgcccgtgtgccgttgccgctggtgtgatggtgtggctgttttccttacactgcatggtggccatgatggtcctaggatgccctgctggtgagcctctgctggacgtaatcttcgtagcttacctgttgggaaccaacacaaagtgtgccataggcgtattttcgctttgtgacttgagtttcccaatagatagttgacatgaaacgttttgcgattcgagactccttgtcgtttcaaaaacaggaatccactggtcaaagggtcttccgccttttgtgagttccagacccggttatacattatccggtacccgcgcgtggcccgtttggaatagaattcccccgagaacctcctggcgacttgctggtgttgacatgatcgtgagcctggaatgaggccctggatatatttatccgcccacccttattcaccattcctttcctggcaccccgtttgcctatggtggcacagtgcaactgcaattggcatgggcgaaaagccgtttttacccccctttggtctggacattagggcacagaaaggtgtgaaacctcctggatgtgcgccatgtgtggctgggtggattcagtgttatccaacatctagtaccaagccccgctatttgtcaccgttaggtaatgtacccctggacccgggtgcgaaaacgccataagctctcgtgagtggctcgcccttatcctcctggtacttgatcccgactgtttcaccttgcacgccttttaatctcttttggtcctaggtgtagcaggacagtgttgtgcgtcgcacgacacatggtgtgtcatctccactttcgtgaggccgctggtgttgggcctcgccgatgtttttgacgtgacgacgcgtgccactctgttctgcgttgggcccctgctgctcgcgttttcggccttgtagaagccccgccctcgctttggtgagggcatcatctgtgttacgtataatatgccagtgtgtgaagtgctatctgccaccgtttttgcgtttacgtctccatatttttctctctaggggtgtccgtgtcctccttagtgtaaaatggcacctcgggtattgcaacgtagaggtagtaacatgcggtagcgggtagatagagaagaagtggagccctacatgtggggtgcttgaggtctgtgagcaagtttccctcagtgttacgcacaacgttattgtgcagacaccaatattaagtcacgagagaagaggcagctatactaaacggtcagctgtgctcccactagcttttggagacgatttatatagcagtatacatagtagttattaatcagtaggttgagtagtatcacacg

SEQ ID NO: 663970 - DNA, 171 bp, Homo sapiens
agagacttggattccggactgggatgaaagagagttgattgaatcccggaatttggaaaccccagatcggagggcggacggtacaaccggagctgtccaggttgatttcccaaggcttctgcattggctgtacctgaaacttattgtggcctagactccccagtatccact

SEQ ID NO: 663971 - DNA, 158 bp, Homo sapiens
gatcacctttatctatacaacatacatacatatcagttgtaagatgtacactacatttctgtgacaaacatgctttatttttaataccaagaacattatagagtatcaatgcagagacctaaggataatctagtagacactaagttaaacttaagtct

SEQ ID NO: 663972 - DNA, 877 bp, Homo sapiens
acagcccgagatagaaagcttcttgctaatctacctccaccatgatgaaagtgtgttaaccaacgtgttctgctcacaaatgctttgtgctgaatccatggtatactatatctgagtcaaaattattataacctgggcttgtggatctgacaaatggactccaacagagtcaagcatttctcactatgtgcaatagacacttaggcagtgtgtggcacaaaccatatgcggactcaaacaaacggatcagatttccgcttttacctgcattattatgggaaagcgatcatctaatgaagtgttgaatgtgatacaagggaacacaacagtagatgatttcaatgatgagactcatggtctgcaactggagatcttcagagtcccacacaagcaggacgatataaaggacgaggattgaacgtgaagcccagagaacatggtcgaatgaagagagcacagatgagggctatacgcctatacaacttcgaggctgaccataagcgacacgagggaagcctcacgagagaggagatggcagaacagaacgggcgggcagcaagattcgccacacgaaacaagaccgacggaaacgtcgaggccactcacggctgtcctcaaggagcaaaagctcctgcgctcctgaagccaaacttgaatgaaaattgcttgagcctgtgaagcatgtactgcgagaatccatgacccccaagagggcgaggttcttgggaggcggtgtatcctggccacgcacaccagttcccacattgtcctccgaatatggatcctcccaaaggattatccatgggacttgactaacaggttactcgggcacatatcaatggaaaacgtatacaactggacccattcaatgatattg

SEQ ID NO: 663973 - DNA, 370 bp, Homo sapiens
gctcattaccgtcaggccgtcgttgaaggcatcgtacacccatcctcacagggagcactggtctcgctagacacaacactgacccctggccagctccacaagcgctggccttcagagaagaatctaccactttccagagctggccaagctcaagtgacacaacaccttcacctcccggcaccacagcagcccctgttgaagtatccacaacctaccacagccgaccgagctcaactccaacaacacactatttctgccagtaccacaacctatgggccgtagtgaggacatcaacaacagtccacagcagcccaggtgcaactgagaacagcactacttccctcacccgctactgcaacctccagttctt

SEQ ID NO: 663974 - DNA, 168 bp, Homo sapiens
atcacctcaggcttttcagttcccttagccgtcttactcaactgcccctttcctttccctcagaatttgtgtttgctgcctctatcttgttttttgtttttttttctggggggggtttagaacagtgcctggcacatagtaggcgctcaataaatacttgtttgttga

SEQ ID NO: 663975 - DNA, 394 bp, Homo sapiens
ttacaaatgtatagttatactaacattaaaagagagaatgggctgggcatggtggctcacgcctgtagtcccagctctttggggggctgagacaggaggatcacttgagcttgagaccagcctggccaacatggtgaaaccgtgtctctacaaaaaaatagaaaaaaaatccctgcatggtggtgagcacctgtagtcccagttactcaggaggctgaggcatgagaatcgcttaaacctccgaggcggaggctgctatgagctgagatggtgccactgcactccagcctgggtgacagagctgggtggtggctcatgaatatgtttgtaaacctgaagatttgagatcatataagccagatagaaacttaattggcattcttaacttttggtt

SEQ ID NO: 663976 - DNA, 781 bp, Homo sapiens
gcttgttttaggccattaaattgggggcattcgttacacagtaatcgcagctaatgctgctattgctttttattatattattattattaaagacagggttatgatctctcgcccaggctggagtgcaatggcacaatcatggctcactgtaacctcgaaactcctgggctcaagcgatcctcccagtcgcttaaccatccgcgagtggctgggactgcaggcacgtgccattgtgcctagctaatttatcattgttttgcagaacatgagatcttgccgttgttgcccatgctggtctcgaactcctgggactcaagtggtcctcctgccttgggctcccgaagtgctgggattattggtgtgagccatctgtgtctggcccgtagatgctcgtctgccctttgctcacttgaagctcgtcctcagtgttgtgacggctgttgagcagctcccttctctagccagtgctctcttcctctggcttccacgaatggtgctcctcttgagttctcttttattcctccctggctagtcttgtgcgacgttcctctttcacttagctccttctcttgcttgcttgcccctttcgcgacttagttgctccctgggtggttccacctgtggcctcacgccttgtggtccccagcacttccggggggcccaggcgatgtttgatgacgcagggcagcgagttccgcacgccgcctttgtacatatcgcaacctggtcggttagcacgatcatccccctttgcgcacctggcgcccatcggcccccatcc

SEQ ID NO: 663977 - DNA, 418 bp, Homo sapiens
gagtactgcctgagtcccagactctgcatcacctaactggtggcttgtccactctggaccccctgtcctccctctgtatgtaataaagatgaaggggcattgggccagataccgcttgtaatgaccccttctcacctctactgtgtgactgccaccattttcgctcgttgtgctgtgaagggcccttctgatgcgtgattccatgtgattgctagcagtgttcaaaagtattccccaatgtcttgtgtcctggcatcctgttggatcccgtccaggagaccactgcttgtgctgtatgtaccaagggtgatcctttcagaatgatcatgggctggccgctgccccttctggaagaaccttctctcaaccgcgacacatgtgacagacccctcgacaatcttgaactcgctggctagag

SEQ ID NO: 663978 - DNA, 158 bp, Homo sapiens
  misc_feature (73)..(73): n is a, c, g, or t
  misc_feature (132)..(132): n is a, c, g, or t
  misc_feature (140)..(140): n is a, c, g, or t
  misc_feature (152)..(152): n is a, c, g, or t
ggggggggggggggggggggccccggaacattcacccgaattttttttaaaataatgttggggggggggcggncgaggcgagaaaccggaaaagaggaggagagggggggagggaaagccaaaacgcaaggnggaggggngggggggccccntttttt

SEQ ID NO: 663979 - DNA, 743 bp, Homo sapiens
  misc_feature (378)..(378): n is a, c, g, or t
gagcctacgcaacaggagaatgatgcctctcgtagaaggatctccttgcatccctctgccataagaggagaagaggaaacacaagaagaaacggctggctgcagaggcgcccaatgtcctatttcaatggatgtgaatgtgcccaggtagtgctataaaatcgaccacggctcgtttagccagtggcacaagcggttaggttgtgtgtgtgggttgctctcactgtgccgtgctgtcagaccatacaggaggtagaatagcaagggttgacagaaggatgttccttcaggaggatgcagcactagaagcactctgagtcgaagtatgagtggggtaacacccatctgcaatgaagaacacgatttggggtatcctaancacatataaatacattatgaaaataaatggtgaaaatgaatgtgtgtgagagacagcgagtgttgtggcacttggcaaaaattttcatacaagacaataggacgtgtagggagagcgcgcgggggcgccacgaggtgaggtgaatagcgcgcaacctgggagcacatgtgtggtcccccacgggaaaatcgccgggcgcggcggcaccaaggggcggggggagttcccatcagcgcatataaaaaaggcgccgggggggaacagcccggggggtttggaacaaaccccagggatggagcggccaggaggaggacgcgccgggggtgtaacacggggggcgccaacgaggcccgataggaatcacc

SEQ ID NO: 663980 - DNA, 553 bp, Homo sapiens
catgatgatcttcttcagactcagccatatgcacccaaatgaataacatagccttgtagctcacacaaagcctgtaaaggtggatcttctatacggacatgcttgacacttggtgcaaaatctggacaagggactcccttcgtgaggacctggacccctgtcctggaccaatcattccagtgcacagagatcgacacgtgcgaacatcgggtccatccagaccatagacccaagacggcacatcttacaaccaatatatgaacaatcgggctactccttacgggctctcgttgtacagtgcacagacgtgaattgactgcgcagatatacgacatccaggaaagctcaccttgggcactcatacaatacgcatgtccctgcagcttttgcgccgatacaattccttaccagtgtagcaccggaattccacaagagctattattgaaagacaaccccatagggatgcacagcatgacaagaaaccatttgtctaacaaaagatatgataacgtcatagactgtagcatagcctcacattggaccgaaccccact

SEQ ID NO: 663981 - DNA, 940 bp, Homo sapiens
ccggtgtaccgccaggaaaagaggatgagaaatggacatagatcgtatatgggagaaggcacaaaagaataaagcaagtaacagagtgatataaaatgtagatggtataggacacagcaggcatagggatcatgagttgtccaaatgcggaagactctgtgcaagggtctaacgcgaattcacagagagggtgaagttgtgagaaagatatatacagaaaactgaagaacacaggccaagtctccatccaccaagcctaataagcgtcaattcaaggacagatgaagtcacgggatactagaagacggcactacatatgcaataccgtatcacctgaacaggaaatgcaaggaatggacacaaagggctttggtaacgggacggcattgctttgcaacttattcacaaagtaacattaatggtttgtggtaacacccagagagaatacatgccgtgatgtgttttccgtacacgttcaatagattagccacatttattcgcccgaacactaattagttgggcatagtttacaggaagtaacttacttatctgggagggattgaatgtactttaaagacataaggtttgtgtttgccccaagtgacttgtttacccatatctatattataactatggactgatctatcactggcgagaaccttcagaatgacactaaataggatacgtgaagaccgcagagattccggggcgtaaataatatggggggatgaggcttcaaagggaacgtacgtaagtgacaacggcatacaggttggcgagtaaaatcgaactaagtcatgtctgacaaactaagcacctgacagtgacaccggaagccgagcaacgaaagggagaggcatgatcaaagcgaaaagaaggcaagaaactgtgaggtggacacaaggagagaaacgcagaaaaacacgacattagacataga

SEQ ID NO: 663982 - DNA, 80 bp, Homo sapiens
tagagtagtcattattgtgacttttggcaccagagatttagctttgttttccttaacgatatcagcggacacacgccctt

SEQ ID NO: 663983 - DNA, 158 bp, Homo sapiens
  misc_feature (68)..(68): n is a, c, g, or t
agtgcatgctgcggtcgatctagaggtcccgagaagagacagaaggggagaaaatacccctttaattngtcctttagttgaatgttcagttcagaaaaacaaaaaaaatggtatttaaaaaaaactgctgggcacgggggctctcgcctgtaatccca

SEQ ID NO: 663984 - DNA, 372 bp, Homo sapiens
ttggggacacttccataggaaaggggcctggccctttgtgattgccacgtgtttcctgttaacccgcctgcccccagggcaaatttttgggttttgttttttcctgaacaaaaatgtaacccccccccggaaagccaatggttcggaaacccttttttgcccataagggtttttccaaagaacgtgtctccctaggaattaggaccctcatcggcccgagcccaactcctggataaaaggaataaggagaattgtgtttgtaacgagttacaggattgtttctttcctggattttaaacttttgttaaattgtgaaattatgggggggttttatagaaaaaaaaagtgaaataaagtcagatgggaaagcca

SEQ ID NO: 663985 - DNA, 272 bp, Homo sapiens
tttctgggactacgggcatgcaccactatagccggctacttttttttttttaaattttttggaaaaccggttttttgacatgttgcccaggctggtctcaaactcctgagttcaaggaatctgcccgccttggcctctcaaagggctggaattacagacataagctgccccccccggcctgtttagctgtttctagggaagtgactgggtttggaacaaaggctacattcctatccatcttgctcttaggccagctaagctctttttaatat

SEQ ID NO: 663986 - DNA, 396 bp, Homo sapiens
cggggagcgcctgccgtggtcataagtcaggaccgagtggcgctggaggacgggaagatgtttgtcaccccgggggcgggccgcttcgtccctcggaaaacattccctggggactttagttctacgaatgacggcatccaacagcgtcggcaagcgaggcttgtgctgtgacgatcgcacgtgtgtgccaccgtgtggctgtatgactgggccctgtccacgacggtgaatggtgcctgccaagccagggagtggcgctccggcccgcgcgtcctgcccaggcaagatctccgtccctcctgtgcgcaacctacatcagtcggggttcagcctatctgggtctcaggctgatgaccacatcgcccgacgcacagcacagaagatcatggcaccacc

SEQ ID NO: 663987 - DNA, 277 bp, Homo sapiens
tggtaatctaaccagtgtgcatgctgcctgcttctctccccagaggctacgccctgtgggtccagctgtctcttccatgactatatccatgctgctcaatgtggggtcaccgcatgaagaacggcaaagtcactcacaactcggaaaggtttcacagtcatggaacgagggacaaggcgagggaatcccaaacttgttctaagacatcctattgaagactgaacgaccgtttgctcaggctgttgtaacatattccaactctgagaacatggtgtcc

SEQ ID NO: 663988 - DNA, 322 bp, Homo sapiens
agggtatgctgcggtgactcttgagatccccgctgtagcctctctcatagtacactatagataacttttagagaattatgctaagtgcaataagccaatcacaaaagtatcaataggagttcccatcgtggctcagtggttaaagaatccgaataggaaccatgaggttgcaggttcaatccctgaccttgctcagtagttaaggagccggcactgccatgagctgtggtgtaggtcacagatgcagcttggatcccgagttgctgtggctgtggcataggccggagctacagctccaattagaccccagagagggtccagg

SEQ ID NO: 663989 - DNA, 105 bp, Homo sapiens
  misc_feature (51)..(54): n is a, c, g, or t
  misc_feature (56)..(57): n is a, c, g, or t
  misc_feature (60)..(60): n is a, c, g, or t
  misc_feature (63)..(63): n is a, c, g, or t
  misc_feature (69)..(69): n is a, c, g, or t
  misc_feature (72)..(73): n is a, c, g, or t
  misc_feature (75)..(75): n is a, c, g, or t
  misc_feature (84)..(84): n is a, c, g, or t
  misc_feature (90)..(93): n is a, c, g, or t
cctgcagaactggaggattctggagtttatttctgtgccagcagccagtcnnnngnnggnacncagtanttnngnccaggcacncggctnnnngtgctcgaggac

SEQ ID NO: 663990 - DNA, 109 bp, Homo sapiens
catatagaatcgagctggtaccggcacgatcgacccggctgaagtggccaccatcgaagtgggggcaatcccgacaacgtcgtaacggtgccgcagtgcacccatctgg

SEQ ID NO: 663991 - DNA, 480 bp, Homo sapiens
ctttgacacagacattaaaatatattaactctagcaacacgtaaaagtgtcaagaacataatgctaaatggtggagaagaacatacaaaattgaatgtgccgtattattacaatatttaaaaaaaatgagagaaaacactgaatggcaattgactaagatcaacagagctgcgattatctgtattatacaattttttgctactacactgtattaataatgagctacccgtattttctatactgatgcacacacacacacacacacacacacacacacacacacacagacaacaggcgagaccgagcgtgaacttcggaagcatgtaacattgctagtgggcgctacactgaggatataatttcctggagagttaaaatacagcattatgtacttaagctgaaccaccaaacttttacaagtttaaaatgtggtttatagaagatatgaccatgtgttcttaagtcacatctagagagaca

SEQ ID NO: 663992 - DNA, 379 bp, Homo sapiens
  misc_feature (256)..(256): n is a, c, g, or t
gaaatttgccaggcatattgggggcctttcagaaaaagcttggaataagggttggggagactccccctgccaaacttttccctcttataaaagtggaatgtttaggggcctgggtgaacgccccaatggttcaaataaatgccaattcctatggggttttgccagctaaggatattgaagaaattattgatgggctcagggcgggcaaaatcccaaaaccagggccaaggaggggacgttttttttgtgagccagnggggggttttccctttttgattgacccccccaagggaccgggttttggggtccaagcggccctttaatttatattgacctgtaaatatgtccctagagaaataaaatagggccttccctttta

SEQ ID NO: 663993 - DNA, 414 bp, Homo sapiens
acgatatccatgcgcgttacgcgcgcagctacgtcgtcggtgttcaccctggccagcggctgacccttcgggatcttggcgacttgctcgacttgggacgccgtcacaaggcgagtgccgtgtacctcgatggtgttgacgcacaacaacgacgagctgcggacgatccacatcgccacaaggacgagcaccaccacagcggcgacaacacccgcaatgatccggttacgcttcctacggcgtcgacgtcgtagctccatcgcgacgctgatgtcggaaaccggcatcaagccttgccctccagtaggcccaccagaaccgggccaactaaagtgacatctcctgcgccaagggtgatgacgaggtccccaggacgtacctcttcagcgagggcctccggaaggtcctgcttat

SEQ ID NO: 663994 - DNA, 182 bp, Homo sapiens
ggcggggataccagacatgagccaccatgccgggccggttggttttagacgtgtgatatatgcagtaccaatccatttagtgggtctgaagtcgcaccggacatgatggcttcttcaatctcccaggcactggtcacttcactggtactcaggatatcaagccatggctatcctatacttaa

SEQ ID NO: 663995 - DNA, 170 bp, Homo sapiens
ctattttcggcaccctgctatgggatcgacaccaagatcgcggcacgcatgctctggcgcatcctcaacggccacagcctgacccgccgggagcgcaggcagtttctccggatctgcgctgacctcttccgcctggtgccgatgaatagcgaggtgccgatgaatagcga

SEQ ID NO: 663996 - DNA, 576 bp, Homo sapiens
caaggttctagcaccccgcccccaattgcagcccaccacccctccctcactccggactcgcaacctgtggacatgagctgcaaggacacctgagtgtctccttcctgcccgatggagtgcactgagtgagtgctggtggtccgaggtggggcggaggaggaggaggagtgaagaagaggaggaggagtgaaggaggaagatggaggacgtgagcatacatgcctgctaccaccactggccaccagcactgctgcagcctgccccaagcactgcccccagcggcggggtccacatggctggtgactcgtggggctggatgactgggccagcttaccctgtgtctcccagctgcccacgctgacccgcgcccatgccctggaaatctgccagctggatgttgactgcaccatcagcggcgtactggccttgagttgcacttctcttcaagatggaagaagccaacctggagagccgagcgaactgccacgagctgatcgaggccaccaaccaatgtcaccacagaagccacctcaagtcggggatgagcccactcctgagccacacttggtatgccga

SEQ ID NO: 663997 - DNA, 875 bp, Homo sapiens
  misc_feature (567)..(567): n is a, c, g, or t
ggggagaaccacccctcctgtggggtggtgtttcacccacaccaggcgggggggggtgttgtccttcgatgaggaggtggagagcaaacagaagggggggtgcttcctaacaagaaaaggcttcctctcggcgtgtgggcgcggtcggaagagtaggtgctggtggtgttttaggaggagagtaatatcattggtccgaagagaagatgatccctccacaatcatttcgcgttgtgttcgccccggtcttcgcctcctgtcaacaaggatgttgaccacattttctcccccctcattatggggggtttttcgcgaagagcacacaccgcgcggggacactatttttgagagctcttttggataatcctcgcgagagtgatgacacatctctcccacagaggtggagagacacatatagagaccttccacacacactctcactgtttgctggggtgccccactcgtagacactttgtgctggaggctctctgcgctatcacgggctttctcgagagatgagtaacgacaccgcgtatgtagagattctgtgataccacacaccctttnctcggccacagccttgtgctcttcctcgcctgaagtgtttcctccacagggtgttaacacaaggccctttgttatatggagaacctttgtccaccctttgctccgctgggcacgttgggcacagcttctatctggcgccgaagcacagtgggtaaacggggctgttggccctcaagcacactttggccctgtaatgtcaccccttgtcaaatgtgcatctcctaggattggtgtttcagacattgatgtaccttttccccgcctctgctccagggtttagtgaagtaaacagtactttgggaagttta

SEQ ID NO: 663998 - DNA, 268 bp, Homo sapiens
atacctgaggctgacagtgtctaggtttcgaacactgcagagtattcaaaatgctagcattcatgtttgggttgatgcaggacccacagctctctatggagcaatcgcagatgtttcaggtggtccagacacataggaggttattcctgagagaacatccagcctggtggactggacaaaagccacactaaggtctgtttaccctgagaagggggactgttcctctccccttataaatgccaagtagaatacccctgatgaagcagct

SEQ ID NO: 663999 - DNA, 107 bp, Homo sapiens
ccttcccttttttttttccccgcccccggcacattgggggtttcggcccccgggttgtgggttctttgggggggggccctcaataaatttgaattgttgttgccgca

SEQ ID NO: 664000 - DNA, 211 bp, Homo sapiens
ggagaaagctctttactgggggtacagcgaggaggagcaaggccatctccccctacctgcccccaccccctcctagggtcctggggtgagggggggtcttccctcctccggaccaccactgttttcgtaacagtatatagaaaagatggggttgaggggcccactgttctaatccttaatcggaaaggctcggacgcgaccctaaccttgt

SEQ ID NO: 664001 - DNA, 724 bp, Homo sapiens
tggggttacacgcggtgttcaagatgcgtatcgaaaagtgcttatattctgtaacggggacccatctatcctggacacggcatgatgttcagtccgtcaatgcagtggcaaggttgttcggtatttggccaaactcgtatcatgtcattagacagagacttttattcagaagaagcgcaactcactcgcaaagttgaggtgggaccacaagctaattccagggagaagcgaggctggctatcagagtcttgacagggggcattaagttccattctgcagatttgcatgaaacgctgagacagatggaggactctatcaaaagtatccagctgcagtagctgatggaaatgaaaactattgaatgtgcgcatgtaaagagcagattcgaatagaatgtcacacagcggaaaagcggccaagttcttaatactttataaatggaatcaagattggaagcatacataatagaaggaggctgacgagcaggagttgcagtggtatccaagagtagagtgcaaggctagaatatccatcttgattctcgagcccctacttggcacgagcaaacacggggaagacatgtctggtaacgtaggacataatggctacaggcagtgtacacagaggcatggttggaccatggcgtagattgctcctgtgaataacactactctggtaacccattttactgttcatggtacaattttgtaacaatgaccctttg

SEQ ID NO: 664002 - DNA, 878 bp, Homo sapiens
gcatttgtgaagcggcgaaggaggtggtggctgcgtgggagctccggggaagccgttcgggctgcgtgctggtcggcccgcggggcggaggcgactcgcggcggggggatggccctagtgcgtgacctctgtgttcagctgtccatttcctgtgaccagtctcattgaccaggacttcggctccaagtctgacccagtctgctgtccttttaccaggattggtgggatggggcacgttgtgatgagcttggcgggcctgaacgggtgcggaactgtcaacgccctgagttctctcaagagctctactagctttgaggtaccgtgttggagacagtccacgaagactagcgctctggaagtcctattgtacatagacatagcaaagaggccagaatgctgaaggcgatgattgatcttcctagggggtgcttgaggtgtcccctaggaccagacttgtgtccagcctcaggttgctgagtctccccttgatgttgaagcctggaaaaagctggtcgtgggcgggggggaacaattcagcggacctccagcttcaggaattccccgggactgattcgttgtaattaacctattggcaggtatgagggcccagaaaccctagagtaaggactgacttttccttgcgacaacttcagatccaggtttcgtgggcggttcttcccggcacgttgggttgtggacactgggccccttggttgtgccggtctgcgggccttccagaacagcttgggaccttacattggagggcgttcttagagtcccccgtcacggattttctgtgttggcggacccgagccccccctgcccttgtggagcgccccgttttgccctggcggcgccttgctctcttggggcctcca

SEQ ID NO: 664003 - DNA, 895 bp, Homo sapiens
gcaggaaaaatgaatgcttggtattcattacttcatgtatatcaagcacagcagtaaaacaaaaacccatgtatttaacttttttttaggattttgctttgtgattttttttttttttttttggaaactggcctaacttgcttgtggctggtaaaaatagttaacggggaaataactggagatggatgggctagcttggttaaatggtgcttatgaatattttcatggaacaatccaagctaatattggttaaagaacacggtgttttaaatccatggtaaggggaataaaagttttatgaatgggactttccaactactttctctacagctttccatggtaaataagtctgggttcttgaaacttctctaaaggagaattgggtacattttgggaaatttatcccttatcccctctgggaagctatggggcgctcttaccaaggtttaacacacaaattttttcataccaaaattcctactaatatacctacgtggtgccatggtccatggatcccctcttttctccccaccctgaaaaaaattggtccctattttctgggaagacgggggggttcgtccgacaaaacattgggggtgttccacttcagaacttggggcatttgcgcattgttctttaacgtttagagaagccccaatggtctttggccatctcatgcctttggtagcctacgcggtagttggggctccaaaacctggggttaaaaattcttgagacctatgcgggctaagttagcctatccccatgcgcgggcgaatactccggttcgttgttgttcacactttggcgttggaaagacgactttgcgccagttgccgcttggctcaaacacattgacctgagagcgccacaggtggggcgcctcggagaacgg

SEQ ID NO: 664004 - DNA, 877 bp, Homo sapiens
agcggaggggtgcggtggatgtggagaaaatggcggtgtctaggagctgtgatcgacttcgtcggtgatgcttgactctgtcaatgtcacagcctattgtctcctgttgctccaggggtgacatcattcagacagcttctacagaggtgatcatggccaacagattcccaaaaaggacatggattgaaatcccctttgcctccatggctaggagatgagattgattgagatccatagaaatcacaattagagcccggcgtgctctatagagagcagaaaagaggggaatgttgggaaagtctgtattcttctgagatcttatgatggcctaaaggaacatcgtagcagcacgatgagacgaaagagcacgggtgaaacgtctagtgacctggctgagttaaccgagcctgtagtaatgaggtggcgatatttacgtactgggggcgacagaagcataaagcctatgccccgagacacactatttgagcaatgaaagtcatggtcctgctgagagagcttgtggtaaaaacaacaaagaatcagagagacgtcaggagatctgcgtgtccccaagagtctatgaggtaacctcttttgaattagccactgttggagtctgtgctctgactgagtcctggtcatggggggtatacacgtctgtcgcgataggttaggactacttaattgaatggaacggtataagggcctttgctatgcaccgggctttactttaggattgcccaaagcttggcccataactcccaaggaaacaactggatcacttgccctcaaacgttggattggaaccatgagatcgcctcttccctaagagaacgaataacagtggttaagaagtgccacaaaatggtgggagtca

SEQ ID NO: 664005 - DNA, 1316 bp, Homo sapiens
  misc_feature (364)..(364): n is a, c, g, or t
  misc_feature (1313)..(1313): n is a, c, g, or t
  misc_feature (1316)..(1316): n is a, c, g, or t
ttctgctgtcagaacttgatgtagatagcatattgggatctaatgaagatgtcatagattcatgctatggttataataaggtgtttgtagagtaacgtgtggtcgtcttggtggtggattttcgttgttggattgctcttgtgttagcgacgacaaggagactgtataaaaaagcgatatacatattatggcaataactctttggacaatttaattcagtgcatgacaagggaagaggctgcgcaaagaatgcgtgacgggttacctcatgtatcgcggtctgaacggaaacggtacagaagtaataaataactgatggactaatctactgccggtttcctattctttagaagcgtccagaggntacctcagtcgagtgccagcttgagtggtaatctagttgtcatgtcttgcatgttctctaatctggactatctcagttgagtaattctaatcgtgtgtgatgccacagcgtacgttgcactgatacaagagtaatcgttccattgagtagtctactacgaattggcgaacataggtcaagtctggtggcgatctcgtgtgaagcactcttcgtctcctacagaatttgtccacccgtagtgagtcagacacacgagataaagaaatcatagtaatacctcaagtatttactttacatgaatcagattaaatcgtctagttgaaacacgtgagaagaaaacctttaagaaaaaaggatggaactgacaagtagtgacagactgtttgtagaaacttggttactaaaactggtaaatggagttggacaggtgctttggagcatccaccctcgggacgttacaaagggaatcccgctgctgtaatcacgatgacccaaggttggttaaccagagtagagtggtaccggggggcaacacatggactgacgcggggaaaacaagcaaagacaaagggacgaactcactcagacgagacaacacagaaccagcaaacatagtgggaccccatttcgccagacaacaagagacagggaaaaatgcgcgcgaacatgtggcccagttactcgaggcgcaaccgagactcaccacacgcgagtaaacgggtgaacacaaagcggctcagagacagtagtacaacgacagcaaaagcagcaaaacatagaaggaacaaagataaaacagaacgagaccgcaaagaacggcgaacgaacaaagcaagacaaaacgacgacgagcagtcgaaaaaaaaagagatcgaagaccaacaccacacagcgaaaaaaaatagaaaacacctcccccctcgcactgctcctcaacaatgatcgatcngtn

SEQ ID NO: 664006 - DNA, 202 bp, Homo sapiens
tcccgcccggtcgctccttccccgcggcgggggcgggggcgggggcgggggcggggtccggggcacacggggcgcatctgcccagcgctgccctttcccgcgcgtcaactcccctcctgcccgggctgacggctctcccgccgctccctggccagtgacagactttttcctcgcgggtccgccacgtgcgccagccccccgc

SEQ ID NO: 664007 - DNA, 444 bp, Homo sapiens
cagctactcgggaggccgaggcaggagaatggtgtgaacccaggaggcggagcttgcagtgagccaaaatcgcgccactgcactccagcctgggtgacagagcgagactccgtctcaaaaaaaaaaaaaaaaaaaaatccgggccaggggttcacaccggtaatccaaggcactttggggtaggcaaaggcaggaggattcacgtggaaggcctaggagtttcgagaactagttcggggtaacaatagttaagaccccgctttcgtcatacaaagaaaaaaaaaaattacttaagtagaattatagaagcggggacgaaggtgggtgtacagcatgtgtaatttccagtagaaattgtgggagaggttcagaggacagaggtggattcagcaaggctaagggaagaaggggaacaattcagggtttaacacgggttgaaaggcc

SEQ ID NO: 664008 - DNA, 235 bp, Homo sapiens
  misc_feature (9)..(9): n is a, c, g, or t
  misc_feature (58)..(58): n is a, c, g, or t
  misc_feature (105)..(105): n is a, c, g, or t
  misc_feature (184)..(184): n is a, c, g, or t
ggaattttnctagtgaggagtggaggaagggggcctggtggaggagtagcagcctttncaaaggccctgaggcaggaatacctgggaagtgggggcgtgcttgtntaagatgaggctaaagaggaaggcgaggctttacttaggaggaatgggaagccactgagtgttaaaattaaaagcagtnggggctgggcacagtggcttacacctataatcccagtactttgggaggcca

SEQ ID NO: 664009 - DNA, 451 bp, Homo sapiens
tggtcaaaggagatactgaggccacttgaggagtctcggttttaaaggggtgcaatcaggaagggctgcctcccccatgggctgggtgtaatcaatcatgaaggactgtctccccgatgggccaggtgccatcagtcatgaaggactgtctcccccatgggccaggtgccatcatgacgggccatctccctgatgcactgccaggaacagggaggctggtgcccagcttgtggcctcactgcccagcctgggcttctttacagccttgtacgtggccacccacagggatccagctgatgtgaaggggaaggcctgtgggaatggggtcatttgtctcatttttacaaaaaaataattttactgtttttaaattttaaaaaatagtgcattttttggaaagaattgtatatccatacaaatataaaaataaactttagtatcaaatcttaaa

SEQ ID NO: 664010 - DNA, 267 bp, Homo sapiens
  misc_feature (3)..(3): n is a, c, g, or t
cancctagcctgggcaatagagctgaacgttgtcgatccgccgcctcggcctcccaaagtgctgagattacaggtgtgaaccaccatgcccggccactactttgttttttttatttaattcttcccttattgttttttggttgtcttttatttattttttgttaattctaacacaaaaaaatcaaaaaagccaaaaaggagctcttatggcccaggcgtggagttcctctttttgcccaggcgtggagtaggtctaatggcgggaac

SEQ ID NO: 664011 - DNA, 654 bp, Homo sapiens
gtttcctgtttaagatggcgacccccgaagcagcgcatgccgataagcttctgcgagccctagcgctgtggccccgcttgctgtcggccgcctcccaggcggttcaattaacctccagatgatggctgaacctgcaggaataccagagcaagatactgatgtctgacaacggagtgagagttcacagattctttgtcgcagacactgcaaatgaagctctcgaggctgctaccagactaaatgcaaaagaaatcgctataaaagcccagatcttagctggaggaagaggacaaggtgacttcattactggcttgaacggaggcgttcatttaacataggaccctactgttgtgatacagctgactaaacagatgattgtgctcaatctagcgcatgacaaactccgatggtgtggttaacacggagatggatgctgaagcctcgaatattcccagagactcctacctggcatttctgatggaccgtgccgtggattgttcacgtgctggtcgttacgccccagtggagcgaccacattggaggtgcctgattcagacccggagctcagtttttaggagcagattgacctttttgatgcatgatggacatgccagctcaccggatggccggatacctaggattcgctggcctttg

SEQ ID NO: 664012 - DNA, 119 bp, Homo sapiens
catatttatacaaaagagtgccaactcgaccagaaaacggcttttcccaaagaatgtattttgctggtgcccaccattacactgggataacccaaaggctggtgtcgcccggattgtcc

SEQ ID NO: 664013 - DNA, 168 bp, Homo sapiens
cgagagagcacaccgtctatgtagcaaatagtgggcaattacagtgactaagattctatcttggacaaccagctatcaccaggctcggtaggttgtcgcctctacctataaatcttcccactatttggctgcatagacgggcgtgctcttttagctgtcctcaggatc

SEQ ID NO: 664014 - DNA, 406 bp, Homo sapiens
cacacatccatcatatatcgctagtgtgggtttcatatgtgcagcatgtcatctaatctagagtgtattctgacagaaaacaaaaatccttagttctggttctacattgtcctctgcgccagggccccatcagagaaccaagttacctcagcctgctagaacttctgccaggcatgccctatagacttatggaagcagtgggtatcttcggggggcaggagccttgtaaaaggctcagcccataccaagtagcagcctgaggcagcagcaaacgtgggaagccatcacctggtacctcccttcctttcacttgcagatctctttcaagtgcccagctggaagctccttaatacaggagcgtgggacacagtccacgtcattcagccctctaatgtacggggtcaga

SEQ ID NO: 664015 - DNA, 610 bp, Homo sapiens
  misc_feature (42)..(43): n is a, c, g, or t
catcagcgagtagaggtgctccgaacctggggttacgtgacnnaggtgggcactgtaaagctggcagggcgggtggcttgtgccatgagcagccatgagttgctcctcactgagctcatgtttgacaatgcactgagcaccctgcggcctgaggagattgctgccttgctctctggcctggtctgccagagccctggggacgctggggatcagctcccaaacaccctcaagcagggaatagaacgtgtccgggctgtggccaaacggattggtgaggtccaggtggcttgtggcctgaaccaaacggtggaggaatttgtgggggagctgaattttgggctggttgaggttgtatatgagtgggcccggggcatgcccttttccgagttggcagggctttcagggaccctaaggggcctggggtcccctgcattcaacgcctgggttaaaagggttccccccttggggggggcagcccccctggtaggaaagcctgtgttgggtgccaaaatggagacagcggctaccttgttacggggggacattgtatttgcggccagcctttacacccagtgaatgccccatgtaaaaacatgatgataaaacagca

SEQ ID NO: 664016 - DNA, 703 bp, Homo sapiens
  misc_feature (20)..(20): n is a, c, g, or t
  misc_feature (220)..(220): n is a, c, g, or t
  misc_feature (235)..(235): n is a, c, g, or t
  misc_feature (242)..(242): n is a, c, g, or t
  misc_feature (246)..(246): n is a, c, g, or t
  misc_feature (250)..(250): n is a, c, g, or t
  misc_feature (261)..(261): n is a, c, g, or t
  misc_feature (273)..(273): n is a, c, g, or t
  misc_feature (277)..(277): n is a, c, g, or t
  misc_feature (288)..(288): n is a, c, g, or t
  misc_feature (293)..(293): n is a, c, g, or t
  misc_feature (299)..(299): n is a, c, g, or t
  misc_feature (362)..(362): n is a, c, g, or t
  misc_feature (382)..(382): n is a, c, g, or t
  misc_feature (419)..(421): n is a, c, g, or t
  misc_feature (469)..(469): n is a, c, g, or t
  misc_feature (473)..(474): n is a, c, g, or t
  misc_feature (476)..(476): n is a, c, g, or t
  misc_feature (482)..(482): n is a, c, g, or t
  misc_feature (484)..(484): n is a, c, g, or t
  misc_feature (496)..(497): n is a, c, g, or t
  misc_feature (504)..(505): n is a, c, g, or t
  misc_feature (509)..(509): n is a, c, g, or t
  misc_feature (514)..(514): n is a, c, g, or t
  misc_feature (518)..(518): n is a, c, g, or t
  misc_feature (569)..(569): n is a, c, g, or t
  misc_feature (572)..(573): n is a, c, g, or t
  misc_feature (576)..(576): n is a, c, g, or t
  misc_feature (579)..(580): n is a, c, g, or t
  misc_feature (593)..(593): n is a, c, g, or t
  misc_feature (597)..(597): n is a, c, g, or t
  misc_feature (602)..(602): n is a, c, g, or t
  misc_feature (622)..(622): n is a, c, g, or t
  misc_feature (638)..(638): n is a, c, g, or t
  misc_feature (698)..(698): n is a, c, g, or t
taaattatctaattctgtcncatctaacggcaactaagtatacgcttacatctgctagtggcacctaaaataaggatattgttggtcatctttaaagaaatgatcttaacataccaaagtagtggaatcaatagaataaaatatttaggtcttacaaagcggtacgacactaaagtaatataggataccactaaatttatatttctatgtatgggaagtnaaggtattcggtggnacatggngcgnggcngttcgtttttntcgcctatttcntctncggccctttcntcganattccntattagcgcgagagcgttcgaatatgtcaaataaataaatttgctccatacattcagttaaanccttcaactatgtagtaatncctaaagtgagtattatgttgctggattaatgccaannnatgtttcccatggcaatccagcctaatattaattgtggtatgggtgcngagnngntaaaangngggataattttnntagtggnngggnttgcntttnggggctctatgctgttcttaatcaaaactcttattttattatcaagaattncannagntcnngagagtgagtgantttnctgtnggagacaggaaatgaagaantactaacaccgggaangtatttttcctttctcaatattaacacatgatatatattcatattaataacaactctggnaacta

SEQ ID NO: 664017 - DNA, 101 bp, Homo sapiens
  misc_feature (93)..(93): n is a, c, g, or t
attcagcgctgcagagtgaacttttccaaaattctggaaatgtatgtgcttttctttttttcttaagggtgagtcagatgattccattctccngatggcca

SEQ ID NO: 664018 - DNA, 376 bp, Homo sapiens
gtcgacgaaaggcccacacgtcctagcagtcttcacagacaatcgggtacttcccactggcatgtttgtctcttgggatgtgatcaaaggcatcctttctcaaatttaaaatatctgaagaaaagcattttctttctttccataaatacctgaagtatcatcaaaattgcgtgcaacagacaatctctgacacttgtgtgatcattcattcttctcatgtcactgtgattttccccacctgagataaatgtaggctgacatattgattattcattcttggcggtgggaggagattttgctcatattgatcaaactgtttagggatgtttgtttatacagatgtcatgtgcactataacccagaatattagtcgacg

SEQ ID NO: 664019 - DNA, 182 bp, Homo sapiens
gtggacatccaaaactcaggtggcacttctactgaagcagttcacctcctccaactgctgaagtaccagcatgcgaacctcaactcctggaggaagaagcactccattaacaagtatgcctgtcagacacacgccagtggccagttctgaggctagcaccctttcaacatctcccgttgaca

SEQ ID NO: 664020 - DNA, 918 bp, Homo sapiens
agcggagtgctcccaacggcagagcagcgggggagataaacgaactggtgacacgtgtgctgtacattcagtcacagactgtggttgtccccagatgtgcctatgtatcgcaggagcacattcagatgaggagctggctcgtatgaccggatgtcccacatctgagagcagtgggccggtagagatacccgatcatactatgactccagacagcgaatccgcagcgaccatagtaaactgtctaagaagactgtccccctgtttcagcctacaagtacagtgagagtcttgcgacttgtgtctgcatggggtgacatcctcacttcgtgtcaattagtgaggcttcgatcgatcttcgcaggatggaatacagtccgaagtgatgagttcaccaactatatcagtaatatccggttatgtaatccactgatttgcatagtcgaccagcttacgatgtttaagctattggtatattggacttgcagaaagttaagtccttgaagcgccatcaagtcaataatacagtcatactttcaatcactacatcgcgtgcatgcttgcctgttaggaagctgcttcgatgggcggtcaccggatgtagtcactcgtctgcggccaggttccaagcgacggaagcgagctgcgagatgaaacatacgataggcgctcctattgtctgacaagtctgcccaaaccattcctgggactgaaagttgcccatttttcctttgaacttcgggttccctgaacaacttcttaactcaagttcgatcgagggtaacattctgcaagggcattcatacgtgatcagatgctctgggggggaatcatatgtcccttggaaacgttgggattgacttcaaattacagggacccaacgagcattcttcaggtgaacggttaccttttgggaatccg

SEQ ID NO: 664021 - DNA, 367 bp, Homo sapiens
aggagattacgtgttcctgcaagccgcgctatgtgtcccgaggagggatgagaacgattatctgacctctcacaggactgtggcccatgaacactctgaaatgtacacccagagtatggccttttgctggaatcttattggagccgtacgctatacgacttttgaatatcccaacacgatcaggaatacttgtaacactgggctgtatctgaatggcgctgagtctgccaagcgcactgaggaaggacatacctacgtttgcaacacttcgggtctataagccatgagctggaaacaattccctctatacggacacagaagtttttgaatgtttgccaccatgcgatgtttggtgatacagttcctg

SEQ ID NO: 664022 - DNA, 483 bp, Homo sapiens
  misc_feature (82)..(82): n is a, c, g, or t
  misc_feature (84)..(84): n is a, c, g, or t
  misc_feature (389)..(389): n is a, c, g, or t
  misc_feature (401)..(401): n is a, c, g, or t
  misc_feature (442)..(442): n is a, c, g, or t
  misc_feature (474)..(474): n is a, c, g, or t
  misc_feature (481)..(481): n is a, c, g, or t
tgagacaggttcttgttctgtcatccaggctggattgcagtagtgcgatcatggatcactgcagtgtgttgagccctggggnantacaccaccacacccagctaatttttgtattttttgtagagacagagttttgccatgttgcccaggctggtctcaaaactcctggactcaaatgatcctcccacttcagcctcccaaagtgctgggattacaggcttgagccaccatgtccagcctctattccttttcatatctgttgaatttcagtacccactcatatatgtaggtacaaaaagtgacttgggacttgtaccctttagggtaggatgcctgagtatagtaatctctaaagctgtacatgggatgggacttgttgggcatcacantgggtgaggcanccagaggcaaaggaaggagaaaacctggacccatggaattngctgtaagtttctcagaagttgagtcccattncctgaanga

SEQ ID NO: 664023 - DNA, 1153 bp, Homo sapiens
ctgtggtcttactcagaaatcagtgaacgagacagaacaagtgatatggctacagtgtaaccgtatggtccccgaggacatgccattggggcaaaactagtatgaaagcacatagatatctaacctgggcacagacttgaggaggtgatggtggaaggtggcggctgagtgagacgatgtagtagatgtagagctcagtgctggactccgagagcagtggaacattgcatggggcacaggcctccctgacgaaccactgactcctcacaccctatcgcaagccacctcttctgtctccaggaagcaggcttctagagctagcattcttgcttggaggagcaatgcatttagtttggagcattgaaatagcataagcacatgtatacaaggcctagaggtcaagctagaggcgagatgtcgcttcccatcccttgcctaatttgtctcttagaatagcacgcaggctggagctcacgaggaccgtcgggagaaggtagacaccacacgtgaacgagtgttgcgcgtacgctagtgcccgcgcattgcttaagacgaagaagtactcatcgattcccttgggccactcaagcaagtctggtgtgccacttggtgcagaatcttgacagtcctgtggtagtcctctaagtttgcctccatattgcagagagccagtgagttgtgcttcccagtatgagcgcgtctgtagcgaacgataagatggacgtattggccaggcacaggtcgcagtatttgccacgtaattgggttacgtagagaaaggacgaaaaggcgcacacatgagtgcttgaggttcatttcattaggctgcccccggggaacctagcgattcgcctcaggacagtgattccccgttccgcgaccgttcgtcccttggcggtgttcccttgtcaagattcctcgggacaagggggccattcccccgtgctaggaccaaggacgtcgccatgcaaggcccgctttagcccaggccattcttgttgaaacgagcgcttgccctctatgttccctggaggaccaaccttagcagcattgctgtttatgtatcctcccccagagttcctacggaaggaaataggggtgaaaaaacctttcgataacgcggaaaaaaactccaaaaaccagtttgggacga

SEQ ID NO: 664024 - DNA, 604 bp, Homo sapiens
tacacatgcgcaagaagccgtttacgataatacatctaaatccacaatactggaatgaattgaatcctcgtaaatgctggttcgaagctcaaccgccatgggctctatgactcttgccactgaagagtgatcatgtatgataaatgcatcggagatagtgggtgtgccaatgtccattccagatgtgtttgatacgaggacgttcgcgcttcacgggaccaaagattttgagaatggccccccagaacatatacacaccttttacgcagcgaaagtcagctacaactgtttcatccgctgcaggatattataccctccgtccgtcggaggcttctctttcatgccaagtacaggcgtcaataagcgcaaggaatacatggtgcgctagggccccggcgcgtttccccgctccagtccctcctcttaatttaaagactccctgcaccgtgtcacccaggtcgcgtccacccttggccggcgcctctgcgggactgggtttcccgggcgagagactgaatcccttctcccatctctggcatcggccccgtggagagggctgaggctgggggctgtccgtatctcaataaagagaatctgctctccg

SEQ ID NO: 664025 - DNA, 206 bp, Homo sapiens
tcgtactgcgttcataacggtatcgtaccgagtgatacaaggttactaactagatgtaaaatgcttacaatgacatagcggggacatgatagtattaaatgatgagaatgattgatgtttggctttggttgtgtttgagacagtaccattgactgttcctattacgcagatgaagaaattaagtatagagaggttaagaaacttga

SEQ ID NO: 664026 - DNA, 152 bp, Homo sapiens
ggggcccccaggggtttttcccccccccccccatttttcggggggtaaaccccaggacccccttaaggtttttttgggttccccccccaccccctggtaagtttccccttttcctgggtttgggggctttaaaattccattggggttcctta

SEQ ID NO: 664027 - DNA, 458 bp, Homo sapiens
agctggggccacccggcggcgtcggcatcgaatggcaatcgagcagcacagcatagccgtgtcgcgccagcgcgcggtcgaggagcatgtcgatgccacgatgataggggcggtgcagcgcgccgacgcgcgcttcgacctcggccaggcgcagccggctggcatagatgtcgagaccatgcgcggcgatacgggggacgacgccgagcccggcggccacacggtcgctggcctgaccagccgacggcggcagcggatcggcgatcatggccgggtcgatttcgtcggcgtcgcggttgaggtcgagataggcgcggccgtagcgggcagcgatcagcggtacgccctcggctaccgcgtcgccgagcagctcgtcgacataggcgtcctcggcgcggcggagctgcccgagcgtcagccgcgactgtgccaggaaggcgcccggatattcgcggccg

SEQ ID NO: 664028 - DNA, 713 bp, Homo sapiens
  misc_feature (16)..(16): n is a, c, g, or t
  misc_feature (132)..(132): n is a, c, g, or t
  misc_feature (164)..(164): n is a, c, g, or t
  misc_feature (414)..(414): n is a, c, g, or t
ggaggcagtatttagntgtgaggaaggttattggatttatgtgttttatctgtaacaatggttgtctcaatttctaacttcatactggtaagtgattgataaaaattggttggtgttttatgatatgtggantttttttgaaatagtaagttaaatgtagtgancaaattgtggaagagatttctgttaaataggaaatgtgtaagtttgtctaaaagctgatggttatgtaagttgcttaggcatttagatgacagcagattttgggttttgggagtgttttgtgccttttacatgccttggaggctttatggtttcagtgctgaggtggcacacctgtagcacacttgtgtaatgtgtggtttgggccagttacaaggaattgtgttgtttaagccaaagggggaagctgantgtgatttaccaaaaaaaattttgtaatttaaaccaaaatgtttgcggaattaccagtttgatactttttgtaattagaacagtgggcagtgtctgggtgaatgtgtttagcagccactgtgtgggattgttgtaacaggagtggaatgtacatatttatttacttttttaaatggtccaacagccaaatgccttttttatgaccattgtattcagttcattaccaaagaaatgtttgcactttgtaatgatgcctttcagttcaaataaatgggtcacattttcaaatggaaaaaaaa

SEQ ID NO: 664029 - DNA, 170 bp, Homo sapiens
  misc_feature (33)..(33): n is a, c, g, or t
ggcccattttgtagcagaagctgtcccacgggnaccacatgattccagtaggtgcctatgagacttcccttagcgacgtggaattcattcttgaccgaggagatccagacaccgctgttattgtaccacgagaagggctttggcttggccacttgtaggcctgcatggga

SEQ ID NO: 664030 - DNA, 131 bp, Homo sapiens
tcaaacattacaggatagagcatatgtggaaggagggtgaggactagatatgaaaaaagatgatgacataccccgggattcataatctaggagtttcctcctaggaccaattcaaaacttccaacaataag

SEQ ID NO: 664031 - DNA, 167 bp, Homo sapiens
ctctagtaggatccccgtaaaaggatgcgatcaccgagatctccttgagacgccggttctgcgagacgaccgccacgaggatcgcggtagtcagcccggcgatggagccgcccagcagcagcgacctctgcatgaggaaggccacggccagcccgggaaacaccgag

SEQ ID NO: 664032 - DNA, 336 bp, Homo sapiens
gcgacgttgggcctgtagcctctgttgttgaggttgaaatgcagctgctgtgtagctcagctcactgtagctctccacctccacatgttttaaatagttcttgtgcctcagcctcctacaggaggccagtttactggcacctgccagcacgcccagattatttatgtatttatctttagaatttaatttatttttaagttcctggatacactttctggatgtgcaggcgtgttccttaaatctgtgccatgctggtttgctgtacctattaactcttcaccttggtatttagccctgcatacattagctgtttatcctaatgctcttcccactccc

SEQ ID NO: 664033 - DNA, 249 bp, Homo sapiens
cttatacagtgctgctggaaatgtataatggtgcagttgctttggaaaacagtttggcagttcctcaaaatgttaaacagttaccatatgatccagtatttccactcctaggtgtgtacccagtagaaatgaaaacatgcccacaccaaaccttgtatacaaatgtttatagcagcattattcataagcaaaagtagaaccacctgaatgtccctcaactgatgagtgataggtaaatgtggtgtatcc

SEQ ID NO: 664034 - DNA, 226 bp, Homo sapiens
  misc_feature (98)..(98): n is a, c, g, or t
ggtttagctgcgatgtttacggggcatggtgcgtgtgtttttgaaatacactctcataatttaggcagaagctgatagtccagaaatgactatatatntgtttttttttttttttttttttttttttttttttttttttttttttttttttttttgtgggggggggggggggggggggggggggggggggggggggggggaggggggggggggtgaggttgatggg

SEQ ID NO: 664035 - DNA, 568 bp, Homo sapiens
attaaaccaaaaagaaaagaaaagttgccagttactgggattttgagatgatggtgaaaagaaagtcctaggaaatggatccacaacaggcctgcacattcatgtatgatatccttgcctttcttgacgtttttgtgtatgctgtctttgggtctcaaactcaggtgatttgtgggccacaggcacacaatgggcaagagtaaggacagatgtaagaaacagcaggccagggggaagctggaattgttggctccagctaaatgcattcagatctgaaaatattttttttaagactgattaaaaaatacatgatgagtcatgtcaaatactggccatggaccagttggtaactttaaatccttcctatatttcaaagcactgctttagtccagctgttcttagcagagggcgattttgcccctttagggacatctgtcatatgcttgagatgtttttgactgtcaaccgtggagaaaaggggcaggtatgtgacaggtaccttactcaatgagaccacggatgctggtaaacattctaccatggacacggagaggttcccgcacagata

SEQ ID NO: 664036 - DNA, 234 bp, Homo sapiens
  misc_feature (82)..(82): n is a, c, g, or t
  misc_feature (181)..(181): n is a, c, g, or t
  misc_feature (184)..(184): n is a, c, g, or t
  misc_feature (227)..(227): n is a, c, g, or t
  misc_feature (229)..(229): n is a, c, g, or t
ggccgagcatggtggctcacaccctttagtccccagcactttgggaggctgaggcatctttactaaaaatatgaaaatcagnccaggcatggtcataggcacctgtaatcccagctactctggaggctgagacagaagaatctcttgaactggggaggcagaagttgcagtgagcggagantcngccactgcactccggtctgggtgacagagtgagattctgtctnanaacaa

SEQ ID NO: 664037 - DNA, 266 bp, Homo sapiens
  misc_feature (36)..(36): n is a, c, g, or t
  misc_feature (104)..(104): n is a, c, g, or t
aatttttaagtaatccaagtagtcctgtaatgtttncactagttgatattctcatggctatgatgtaagtacctattttcccataatcttaccaggctaacttnggtctttctcaagctgataaatacctgaaggaaacttgttctttgcctataatgagatattacagatattttccccagtctgtttgttgactttgtttatgatgaaatatagccaaacttatcctttcctttttttgagacaggcttgctctgttgcccagg

SEQ ID NO: 664038 - DNA, 729 bp, Homo sapiens
gtggtcgctgtaccctgtttttttgtttttttactggggctctttggtgtttcttctatgggttattctttctgttgtatgtgacaattctcaagtgtattgtcgtaatgtcttatcagctgtccacttcgtcggtttttcgtggtttccagcgttccaggtacttattcctcagaaacgtttggtattcatgcatgtatatcagtagaataacaacgcttgcttctagtacagctgattcggggcagatgttaactgatatttcgtttaaccaatttgtaagtgtactgcttctatatattacacttctagcaaagctgtaactttactactcatgtcctaataggagaatactgtggtaatataagtatatttgttatagtaactaagttgaaataggcttggttttacagagttccagtatataagtaatcacaaattgaagacctgacagtatcttgggagtctccagtaatgtcacaaattagtgaatatagcatgccagtgtgcaagggtaatgtaaggattgttagccgatctaaatagttcaataagtactttaagaactgaagtatgttttctgatttgataagtattcagaagtgttctgtaatggattcagactgtcttcatttgtacgtataatgaaatgttgacagaccacgataacgtggtcacttagatagtgtcagaaatgtgtgtgttgtgttgtcacttcacaacggcata

SEQ ID NO: 664039 - DNA, 327 bp, Homo sapiens
ctcgcaaaaccatagtatccatcatccactccgaccgggcggccaaattttttccgcctcgtactgttggcctataagggcgcggatgcactagccctaaagaggcctccccatgacatggcctgagctgggcctccaccgactgctctgctcacccctgggctgagggaagggagagaagaggaacaagggtctccgaaaccccaaccctgaggtagactggattggccttgcggcccaggacccatacgcatgacagagcggactctgcctgagatgaggaggacttcctgctgcccccctccaccagtgccttttgcgagcgat

SEQ ID NO: 664040 - DNA, 867 bp, Homo sapiens
gcctcttaaatgtgggagtgtgcccgtactcctgggttaagagatgttcctcgaccctgcattgtgaatgttagcagatttgcgcctctactcggttggtgggagttagattcctcggcaaccctgtagtctctactcggacgtcacttacgcactacacgtcttgtagattttatctccctccggcgctctctctcgccggtttcgttgccgcgtcttctccaagccactttctgttttcttcgcgcacccccccgtcgtcgaattagaactcagcggtacttctcaacagcacttctcggactggtatggacacaccccacgcgcaaggaatttgcgccctgttcaccgcgctctcaacgctcgctacgcgcgcaccgcagagtggctccgccttactgtacctcgcccgctctaagacacccgggcggtgtcttagtgcccccacacagttgggagtgcctctatgtctcgggtcaaggacaagttgtctcccgcactcgcttcatgcacacggctgggcgcccccctcatgcgcgagtctcccccctcctcgcgtgtatacgtccacgcacacgctgacacacacgcgctccctctaagactcgcctctatgctctctctatcgctcgccagcgcgcgctcaatttatgacgctcaccccactgactcgacctaattgatcccgcataagtatagccacctagtctaacaattatatccgcgagatgttgtgaaacaatcctagacccaccccccacttcctctccaaccacctctattccgcccctcctccgccgttgatcgttcattccgctttattcccccctttaataatgataacaaatcttacacaacaaatcatca

SEQ ID NO: 664041 - DNA, 169 bp, Homo sapiens
tctacaggatcccgtcatcgtcctcatcacagagacttaagggaacgttctcctacccattcctgttggcagtatgctgtcgtcagctacgtacttggtatagacctccagtactgggctgtctccatcggaaatgttgacggccacctctacccacaagccatcctgg

SEQ ID NO: 664042 - DNA, 926 bp, Homo sapiens
gatatctgccacgcgccctttttcgttagtagggtctttccgccgcgctcttgtgcacgggcgaccacattttgtgggtctcggacatggctgtgggggtgaacaccctgttgcgcgggaccctttcttaccactggggcccttcattcctggccgtggagcgcttgtcccggcagcatgtgccccgcgtagctgtccacacgaagccggtgtagcttttcctcttccggcctctaggtaactcctcctgctggctgtccgcgtggaaacaacctggcacatccgcgccgcctctgttccctgcccttcatgggggtccctaagcatccacggccgttgcttgttgtccccctggagttttcctcccctgtgtctcctgggatgtatgggcccgaggtgttgtggccgcgttcattgtatccccagccggcgccctatctcggtgcccttggttattccaggccgccttggacccacaggcggtgaaccctcaagcctgttggctcccccaaggggagcccctctccaggggtgtcaccgagtgggcacctccgccgtagaagcttgcactcttagccgctcgcttaggagtggtgtggtcgacctggcgctatatgggtgaagccgaactcaggcgacattgttgtttgaagcggcctacactccattgtgttgctccctcggtcgagtggctaggggaatgtcaccacactccttcgtggtcttgtatctgcctggcgcgataatccacgcctagtgggcccccttgtgtaccgaggcaacaacgtgtcacttcccccccaccgcaaggatgccgcccatctgtatgtctcgcctcgaccagcccatgccgctcccacttcaccgtgccccccccctggtggacccttaaaaagaggtggtacggcaaacaaacaatgacaaca

SEQ ID NO: 664043 - DNA, 244 bp, Homo sapiens
cagtagtgagctgagattagagaatccactatttctatactcagtcttaagtatctgcatgcctactgtgtgtctctttgaactgagggagactctagtgtgtgtacgtgcgcgtgtaagtgtgagtgtaaaacactaccctaaatacaagccaacagattcatctgtggtttaaccagaattactagtgttccactccaattgctggaggaatacctcaactagtggagaagggaatcgaatt

SEQ ID NO: 664044 - DNA, 630 bp, Homo sapiens
  misc_feature (228)..(228): n is a, c, g, or t
  misc_feature (247)..(247): n is a, c, g, or t
  misc_feature (252)..(252): n is a, c, g, or t
  misc_feature (278)..(278): n is a, c, g, or t
  misc_feature (287)..(287): n is a, c, g, or t
  misc_feature (305)..(305): n is a, c, g, or t
  misc_feature (307)..(307): n is a, c, g, or t
  misc_feature (372)..(372): n is a, c, g, or t
  misc_feature (417)..(418): n is a, c, g, or t
  misc_feature (445)..(445): n is a, c, g, or t
  misc_feature (449)..(450): n is a, c, g, or t
  misc_feature (455)..(455): n is a, c, g, or t
  misc_feature (461)..(461): n is a, c, g, or t
  misc_feature (464)..(464): n is a, c, g, or t
  misc_feature (527)..(527): n is a, c, g, or t
  misc_feature (559)..(559): n is a, c, g, or t
  misc_feature (624)..(624): n is a, c, g, or t
ttgaaaaaggagccttagagccgcaagtttacgctaattggcacatttgctttatttatttatttttaaaacaaactgggttttttgaattttttcctttttgttcattccatcacattgaaaaggaggaaaacaaaaatgattttgaattcactcgatattttggactcctcagatgaacggaacattgcacacacacttggaacagagagagagagagagagaggnaagtggactcccacagggncacangcaccagatcaaataacttggatacngtgcaagantttcccaaaatgattgantnatcattaccaaaaacttgccataacaacaccaagaaacaaaaaatgtttaagccacactgtttgncttgggatctttcctgcttttttttttttttttttaaatgtttgnnccacagggggaaaggggggtagtgggngggnnagggnagggtnacnggggtgagggggggggggaggggcttcggggtggggctggggggggggtggggggggacaggntcagggggggggggggtgggggtgtgggaagncatttcttagagttcaggcatgttcttggtcagcctcaggttcctcttctttaccctcgtcctgncgggca

SEQ ID NO: 664045 - DNA, 260 bp, Homo sapiens
  misc_feature (27)..(27): n is a, c, g, or t
  misc_feature (101)..(101): n is a, c, g, or t
  misc_feature (132)..(132): n is a, c, g, or t
  misc_feature (163)..(163): n is a, c, g, or t
cggggccgaggcggaggagcggcgccnaccggggcccagccggagccgccgccctcgcccttgcctttgcctgcgcggctcagaatcaccatccgcggctngaggacagagccggccagtcccgggccgggngacccgcccgccaatggccaccaaggcatcngggttatgtatgattttgctgcatgaacctggaaattaatgaacttgacggttaatgaaggagaaatcatcacaatcacaaatccggatgtaggtgc

SEQ ID NO: 664046 - DNA, 287 bp, Homo sapiens
gacaaaaaggggccctgagacccccactttttttaggtgatggggtgaagataaagggggtttttaagccagagggggctcttttgggaaaatgtgcccgggccccccttttttttttttttaaaatccctaaagtttttccccttagaaaacaacccctgataatgtttcttttttataaagggggggtgtgtttttatcttttcgggccccttttctcttttggggtttcctcctctgttgtgccccacaaaccggtggtagaaatttgtaaaatacgtggcccg

SEQ ID NO: 664047 - DNA, 1171 bp, Homo sapiens
gaaagctgcactctgttgagctccagggcgcagtggagggagggagtgaaggagctctctgtacccaaggaaagtgcagctgagactcagacaagattacaatgaaccaactcagcttcctgctgtttctcatagcgaccaccagaggatggagtacagatgaggctaatacttacttcaaggaatggacctgttcttcgtctccatctctgcccagaagctgcaaggaaatcaaagacgaatgtcctagtgcatttgatggcctgtattttctccgcactgagaatggtgttatctaccagaccttctgtgacatgacctctgggggtggcggctggaccctggtggccagcgtgcatgagaatgacatgcgtgggaagtgcacggtgggcgatcgctggtccagtcagcagggcagcaaagcagactacccagagggggacggcaactgggccaactacaacacctttggatctgcagaggcggccacgagcgatgactacaagaaccctggctactacgacatccaggccaaggacctgggcatctggcacgtgcccaataagtcccccatgcagcactggagaaacagctccctgctgaggtaccgcacggacactggcttcctccagacactgggacataatctgtttggcatctaccagaaatatccagtgaaatatggagaaggaaagtgttggactgacaacggcccggtgatccctgtggtctatgattttggcgacgcccagaaaacagcatcttattactcaccctatggccagcgggaattcactgcgggatttgttcagttcagggtatttaataacgagagagcagccaacgccttgtgtgctggaatgagggtcaccggatgtaacactgagcaccactgcattggtggaggaggatactttccagaggccagtccccagcagtgtggagatttttctggttttgattggagtggatatggaactcatgttggttacagcagcagccgtgagataactgaggcagctgtgcttctattctatcgttgagagttttgtgggagggaacccagacctctcctcccaaccatgagatcccaaggatggagaacaacttacccagtagctagaatgttaatggcagaagagaaaacaataaatcatattgactcaagaaa

SEQ ID NO: 664048 - DNA, 247 bp, Homo sapiens
gccgcaatgttttcaagcgtcacatctgcagttgttgcaaaattcaagtctgctgcttacaacacatttggatcaccaatacccaatgatattgcgccagtgcgttaatcgcttcaataccagaagttgaatcttctaagccaatcgtttgttctggtggcaatgataaaatttcagccgcccgcacaaagatttctggatcaggcttacccttagcagcgtcgctggattcaacaatcccaacaaa

SEQ ID NO: 664049 - DNA, 834 bp, Homo sapiens
gtatttagattcctccccccattattcacaatcatattgtatttcgggaaccccaatgcgagagcgagtttgctttgaaacaatagttgtttttaaaagtttaatgtcaaataattattttttagaagtttttttttattttttaaagacaagggtctcgcgtttatggcccaggcttggagtacaggtgatgcaatctcagtccactgtgcaaccttctgggccctcccgggattaaagcagttctccgtgccttcagacctccgtggagtagctgggattacagggtgtgccccacaaacgccgggcttaattttggtagtttatagtagaagaacggggtttcaccttaccgggcgtggatctaaaatctccgtggacctcagaggtgatctaccgtggcctcgtggcctccgcgaaggtgctgtggattcacaggtgttgtagccacgtggtgttccagcctggtaacttattattttgtttataaaagagagattcttaattttctgggcttttggatggtatctggtgccgtgatagataatcatgggctagtaactcctagtacacgggtttcacagttgggtacctctcctgctattctctaattattacgccaactcaagtagttaaaaatcagtaagaaaaatgtctggagctagaagaacccatagaggaagatttggtaagtgcgaaatctcctcgtcataattgacgttctgtaaattcaggggttaagctgggccaggggtatcattaaggccgaaacaaggcttactatgtcccagaagggtattaggtaaaaatttaagtagaaggtataaggttacc

SEQ ID NO: 664050 - DNA, 964 bp, Homo sapiens
gaaagctgcactctgttgagctccagggcgcagtggagggagggagtgaaggagctctctgtacccaaggaaagtgcagctgagactcagacaagattacaatgaaccaactcagcttcctgctgtttctcatagcgaccaccagaggatggagtacagatgaggctaatacttacttcaaggaatggacctgttcttcgtctccatctctgcccagaagctgcaaggaaatcaaagacgaatgtcctagtgcatttgatggcctgtattttctccgcactgagaatggtgttatctaccagaccttctgtgacatgacctctgggggtggcggctggaccctggtggccagcgtgcatgagaatgacatgcgtgggaagtgcacggtgggcgatcgctggtccagtcagcagggcagcaaagcagactacccagagggggacggcaactgggccaactacaacacctttggatctgcagaggcggccacgagcgatgactacaagaaccctggctactacgacatccaggccaaggacctgggcatctggcacgtgcccaataagtcccccatgcagcactggagaaacagctccctgctgaggtaccgcacggacactggcttcctccagacactgggacataatctgtttggcatctaccagaaatatccagtgaaatatggagaaggaaagtgttggactgacaacggcccggtgatccctgtggtctatgattttggcgacgcccagaaaacagcatcttattactcaccctatggccagcgggaattcactgcgggatttgttcagttcagggtatttaataacgagagagcagccaacgccttgtgtgctggaatgagggtcaccggatgtaacactgagcacagtgtggtctcactacattgcccaaggtgtctcgaactctggactcaagcatccaacctgattcagctcccaag

SEQ ID NO: 664051 - DNA, 505 bp, Homo sapiens
agcggggtccccctcgcgcctctcgcagaggctcgcccccttccccgccacgtccctgcgagcgcgggcggcggggtgggcgtgtgcgcgcgtgaaggacgccgcctctctctcgctcctgcgtcgcaacggcggtggcggcggctctcgctcgggcacggcggggggcggcggcagttccggagtcccagatgagaagatgctcaaagtcacggtgccctcctgctccgccatcgtcctgatcttcgatcaacgacagtgcggaccccgggaaacgcaagcctcgtccggattactgatcgagggctccaacagggatgcgctgagacgataacatacgaggaaggagctcgagaactgggacggggtgctacaatccattgtgtacacgatgcaaagacagaagggagaccagaagactgatgctctcaaagtgttaaagaaaacgtggacaaaagaaatcgtaaaaaactgagatagaagtccttcataagcctctcaatca

SEQ ID NO: 664052 - DNA, 743 bp, Homo sapiens
  misc_feature (3)..(3): n is a, c, g, or t
  misc_feature (69)..(69): n is a, c, g, or t
  misc_feature (82)..(82): n is a, c, g, or t
  misc_feature (86)..(87): n is a, c, g, or t
  misc_feature (115)..(115): n is a, c, g, or t
  misc_feature (117)..(118): n is a, c, g, or t
  misc_feature (125)..(125): n is a, c, g, or t
  misc_feature (127)..(128): n is a, c, g, or t
  misc_feature (130)..(130): n is a, c, g, or t
  misc_feature (133)..(133): n is a, c, g, or t
  misc_feature (136)..(136): n is a, c, g, or t
  misc_feature (143)..(143): n is a, c, g, or t
  misc_feature (157)..(157): n is a, c, g, or t
  misc_feature (159)..(160): n is a, c, g, or t
  misc_feature (166)..(167): n is a, c, g, or t
  misc_feature (171)..(171): n is a, c, g, or t
  misc_feature (183)..(184): n is a, c, g, or t
  misc_feature (187)..(187): n is a, c, g, or t
  misc_feature (203)..(203): n is a, c, g, or t
  misc_feature (205)..(205): n is a, c, g, or t
  misc_feature (209)..(209): n is a, c, g, or t
  misc_feature (211)..(212): n is a, c, g, or t
  misc_feature (218)..(218): n is a, c, g, or t
  misc_feature (269)..(270): n is a, c, g, or t
  misc_feature (280)..(280): n is a, c, g, or t
  misc_feature (283)..(283): n is a, c, g, or t
  misc_feature (289)..(290): n is a, c, g, or t
  misc_feature (292)..(292): n is a, c, g, or t
  misc_feature (304)..(305): n is a, c, g, or t
  misc_feature (310)..(311): n is a, c, g, or t
  misc_feature (314)..(314): n is a, c, g, or t
  misc_feature (342)..(342): n is a, c, g, or t
  misc_feature (345)..(345): n is a, c, g, or t
  misc_feature (347)..(347): n is a, c, g, or t
  misc_feature (353)..(353): n is a, c, g, or t
  misc_feature (361)..(361): n is a, c, g, or t
  misc_feature (369)..(369): n is a, c, g, or t
  misc_feature (371)..(372): n is a, c, g, or t
  misc_feature (389)..(389): n is a, c, g, or t
  misc_feature (392)..(392): n is a, c, g, or t
  misc_feature (402)..(402): n is a, c, g, or t
  misc_feature (413)..(413): n is a, c, g, or t
  misc_feature (417)..(417): n is a, c, g, or t
  misc_feature (476)..(476): n is a, c, g, or t
  misc_feature (668)..(668): n is a, c, g, or t
  misc_feature (672)..(672): n is a, c, g, or t
  misc_feature (737)..(737): n is a, c, g, or t
gcnggcgggcagttgatcatgtttccctttgggccccataaccctaaaagggacagatcggccggagcnggggctgaagagncgannccccaaaaagggcaggcaacaaccaccngnnagacctnannantanatnccggggntgatacaacccatncnnctccanncccncaaaaccctcanngcnccggaccccatcactntncccngnnccacantccggaaaactaaggctacatgaaactccggagtactcaaatgcatccacnncggaaaaacngtnacctcnntnccctccgtacannaagcnnggncaaaaatgcagggccaaaaacaggggcngananggcctnagcacggncattgacngnnctggcgctaagatgttnggntggattaaanaacaaacctgngacngcaggcttttagtagacacggcgaaggaaaattttagcaccatgactagcctctacggntccatccaccccgcggactcggtgtacctcagcacccgcacccacggcgccgtcttcaacctcgagtactcgcccgacgggtcagtgctgacagttgcttgtgaacaaactgaagttctgctttttgaccctatatcttcaaagcacataaaaacactttctgaagctcatgaagactgtgtaaataatatnaganttcttgataaccggctgtttgctacctgctctgatgacactacaatagcactatgggctctgagnaaattg

SEQ ID NO: 664053 - DNA, 142 bp, Homo sapiens
  misc_feature (137)..(137): n is a, c, g, or t
ctttctccctggagaggttaccaaaccctggcttctcccgctgttcaggctgccatgtgggtatagctgtgtgttagtcgccagtctggcctcaggggccagaggacagctgtccagcatttctgttcatcccagcnctcca

SEQ ID NO: 664054 - DNA, 138 bp, Homo sapiens
  misc_feature (21)..(21): n is a, c, g, or t
  misc_feature (93)..(93): n is a, c, g, or t
  misc_feature (100)..(100): n is a, c, g, or t
tccgccctttcttttctaccngtgaaactcacgtgacggtgacgaccttcccacgacccccggacgggcgtggacggacgacggacgacctgntttgacntgtggtaccacggtacgcggtggacgcaactctactgt

SEQ ID NO: 664055 - DNA, 275 bp, Homo sapiens
  misc_feature (11)..(11): n is a, c, g, or t
  misc_feature (20)..(20): n is a, c, g, or t
  misc_feature (30)..(30): n is a, c, g, or t
  misc_feature (39)..(39): n is a, c, g, or t
  misc_feature (58)..(58): n is a, c, g, or t
  misc_feature (66)..(66): n is a, c, g, or t
  misc_feature (69)..(69): n is a, c, g, or t
  misc_feature (75)..(75): n is a, c, g, or t
  misc_feature (78)..(78): n is a, c, g, or t
  misc_feature (83)..(83): n is a, c, g, or t
  misc_feature (88)..(88): n is a, c, g, or t
  misc_feature (106)..(106): n is a, c, g, or t
  misc_feature (112)..(112): n is a, c, g, or t
  misc_feature (158)..(158): n is a, c, g, or t
  misc_feature (189)..(189): n is a, c, g, or t
  misc_feature (191)..(191): n is a, c, g, or t
  misc_feature (193)..(194): n is a, c, g, or t
  misc_feature (197)..(197): n is a, c, g, or t
  misc_feature (204)..(204): n is a, c, g, or t
  misc_feature (206)..(208): n is a, c, g, or t
  misc_feature (229)..(229): n is a, c, g, or t
  misc_feature (236)..(236): n is a, c, g, or t
cgacacagcgngacagcganggctatgctnttgctgtcncgacgtcttgtactctgcngctggganacncgcgcngcncacgncacgntgcgcaccgcttctgtcnccacgnacactgtgactcacacgtgcacactacgctgactgacggcaacacncacactctgcacacacttacggaacgacggngnannaantaaattncnnnggtgatgatacccaccctccnaatgaanacgggaagcaagttcatcagtaacaaaagtcagtgaggc

SEQ ID NO: 664056 - DNA, 406 bp, Homo sapiens
  misc_feature (295)..(295): n is a, c, g, or t
  misc_feature (358)..(358): n is a, c, g, or t
  misc_feature (379)..(379): n is a, c, g, or t
  misc_feature (393)..(393): n is a, c, g, or t
cctgcatagggctcggtgggagtgtaaattaggttcaaccattgtggaagacagtgtggcaattcctcaaggatctagaaccagaaattccatttgatccagcaatcccattactgtgtatatacccaaaaaattgtaaattattctaccatcaagacacatgtacacatatgtttactgaagcactatttacaatagcaaagacttgggaaccaacccaaatgcccatcaatgagagactgggataaagaaaatgtgggcacatatacacatatataccacaggaatactatgncaggccattaaaaaaggatgagttcatgtcctttggcaggggactggggtggaggctgggagnccacccttttttaacaaactnacacggggaccggnaaacccaaacatt

SEQ ID NO: 664057 - DNA, 106 bp, Homo sapiens
gttgtgagcagtgggcgcgacttgatcgtaaagtttgtcgagggcttcgcgctaccaggcaaacacattggcggcgcgggtacgtcaacgttgtaggtcgacgcgg

SEQ ID NO: 664058 - DNA, 241 bp, Homo sapiens
  misc_feature (114)..(114): n is a, c, g, or t
  misc_feature (201)..(201): n is a, c, g, or t
agaggggggcagcgcgttggcaaggggtccctcggaggtctcccggggatgggggctgcagcctcgcctgagtgcccctcgagcgttggtactctggactgcactgggggcagnagatcacatcggaccagccacctgacccccatgactggttggagctacaacgataatctccaggcgtaaactccgtcccagggcacncccctatctggggtctcgtcgtaatgcagtgtgcgtagcc

SEQ ID NO: 664059 - DNA, 1035 bp, Homo sapiens
  misc_feature (236)..(236): n is a, c, g, or t
cagatggctactactatcatgttcctggaccgcgtctcctaggaggtcattcactatatggcatatgcagcgcagacttaaggatcggtatgtgctgtaccttttgaactgccggtcagacacgaagcacaatggaaccctcacatactagagcgagaatggcgtacttgtatcacgtgctgacagtatacaaatggggttgcaggtaacaattccttaaactacatgtaccttanacaagcgtaaacaggttaggtaaacccgaatcaggagagagaactcccagggagatgcccaacacgacgtgtcctcacccaaaaggaaccacttcgttcccaacacgcagctgaactggtcctttcgtacagtggcacaacaagggggaattgtgcaagacgttacacattttccttcttgaagaaaaggtgagtggcattggggccatcattacccaaaagattacgcaaccatcttaagtaaaggccatggttagccctggaacgagggcctataccggtcacaaatttcccccccaagggaagtcggaaaaactctgggtgcagttccactgtaccacaggggcgtgggggactcatacacaccaagccaagagcattgcgcgagcaccgcattgatgttaaccttgggcgctttagcccacagatatggtcgaactcttgaccgacaccttactttgcgttttggttaccacaagatcaccctggtggtaacatgtccaaaagttcaacgaggtggcggcccaacaaaaaaatttacttgctgacaacggcacggaccggacaacaattcattggggcgccgacagtaattttggttcaagcaacaacccatcctgtgggatcaacactttagcgaataggggcgtccgtgggaacatattaccaagcgtttaccacttgcgactttctgggggcgcaccagcacgaaggaacgttcatctcattacccccgaacgaagacacctggcggtggtcactataagggcaagcgcgatcctggtcgcccacacctatg

SEQ ID NO: 664060 - DNA, 432 bp, Homo sapiens
atttaggatgtaagctaagtaatctacacacaaaaaggcagagttgcattcataattagtctctccttcagactgaatattacagacaaaatatagccattggtgttgcaatcacttcctttgggtttgtatccaagattaagaatttgggtctttggatgctgacattcttaaccttggatacaaacccaaattcttaatgtttttagttgataaagtttattcaaggtagacagcctgtgttgaataacttagtcttccacaaatttcaagaaaaatccattgtccctcttctccgccacagacacactttagttgaacattaagcatatttattaaagaaacattctccttgtgctttttctcccaagatggatggtgttcttacttagagttataagtgtcagaataaaaatgcccatgaggttgaaa

SEQ ID NO: 664061 - DNA, 432 bp, Homo sapiens
tcttcacaggaaaagccagcatcctctgctaaagcaccctggggccactaatgagcaatgggccagctatgccagccatcgcggctggtgtccatacgccagtagtggtgtccctttaaaaaccagcatggttccattgtcatccagggtggtagcatcaaagctccagccatctgaacagcgttcagtcacgtctgggtctggcttggtctcgccttcagcaccattcccatgggccctagtcggaggaagaggggtgccaatgcccagagcacagcataggctccacaacccacagtgcaccggtgtgctcacagtaccctagccatgttgagctgcagaggccacagcacatctctgggtgcacagttgaaccccctatatagagttgacagcagcaccacccacacctacatctctactgggaatgcg

SEQ ID NO: 664062 - DNA, 652 bp, Homo sapiens
aatcctacgtgacacttcagagataacctgtacagactgcagtaaacagtgagtcaatatatgagctataatatagatctcattgttacgtctggatagctctgtgttgaaatacttttttaagtgcagactaaaattatcaggaaattaaccttatggtatcagaccaattacttggcgcatggctgagattctacaattcaaggagccaagaaaataggttcaagatggaatatagtacatgcatataaggcagatgcacacatgctggttactttaagatagtgtgtaacgattagtcacaatgatagactataacatgagacaatacaaagttacatttttggaccatattaaaactgcaagaagacaggggtcttactgaagatcttttagaaaacttaaatcctgtcacaggatatatagacatgtgtagaatgtagctcaatttttaaaaagtaactgacctagagggtgaaagttgaaactgacacatttacaaattaagattatgcttatttggtacagaaaacaatgtttaaacacaagcagatctgttgtatgtaataagtaacacagagttttaaaacaaattaattatttagctttctggaagtttgcttttttccttccgaacctgaagtgtcaacgt

SEQ ID NO: 664063 - DNA, 252 bp, Homo sapiens
ggagctgggccgccagtgtacaagaccagcccaacttggacaactgccccttcatgaccagccacatctgaaaatggaaagcatttgcctttcagattacctgtgccttggagggcacaatgaccttgtcgaaatccacctgtcaggacgcctaggggtctgtaccgggctggctgtgctatcactttatgcacactccacccctgtattcccaccctggactggtggcccctgcgttggggaaggtctccc

SEQ ID NO: 664064 - DNA, 463 bp, Homo sapiens
aggttcggcttttctactagctatacaaatctgtcccaattattttcccatttaagaacaaaacaaggccaggtgcggtggctcatgcatgtaatcccagcactttggtagactccgaggtgggcagatcacttgaggtcaggagttggcaagcagtctggccaacatggtgaaaccccgttctctactaacaaatcaaaagccacttaaccggtgggttgcagtggggtcatacctgtaatcccaggcctttgggaaggccaaggcgggctgggattgtttgagctcaccaattaggagaccagcctgggcccagtggcaaaacccctgtctctagctacaagtacaaaaattagctgggtatggtggtgtgcaccctgtaagtctcagagccaactcaggaggctgagatgggaggctggtttgagcccaggaggcggaggttgcagtgagctgagatcat

SEQ ID NO: 664065 - DNA, 190 bp, Homo sapiens
gacaagttaaaggatggatgagcgggggattcgttcgaggggagacaagggagcgtgtgacagtatgggctctctctctctaactcgctctcgcggctactttaccgccgctgctcggcgacagaacacttccaccatgacacctcagcaagttccacttaaataaaggcatcaagcaggtgtacatgtc

SEQ ID NO: 664066 - DNA, 280 bp, Homo sapiens
aaaatagaagatagcaaaacttgaccttaaaattacatgggagaatacttgagactgccaagtaaaattatgagaaaacatgcactgcggagagacctgcctactagatctcataacagcgccatacatcgatacaatattgcctcgattagagaattaaagagaatccagaaatagagcccaggatatatttgagaatttgaaactaaaacctaaactaatttgatgagaaaaaggatagcttatctaattaatgatgttgataaaaccagctgtccct

SEQ ID NO: 664067 - DNA, 606 bp, Homo sapiens
  misc_feature (466)..(466): n is a, c, g, or t
  misc_feature (471)..(471): n is a, c, g, or t
  misc_feature (490)..(490): n is a, c, g, or t
  misc_feature (499)..(500): n is a, c, g, or t
  misc_feature (507)..(508): n is a, c, g, or t
  misc_feature (526)..(526): n is a, c, g, or t
  misc_feature (529)..(529): n is a, c, g, or t
  misc_feature (533)..(534): n is a, c, g, or t
  misc_feature (574)..(575): n is a, c, g, or t
  misc_feature (581)..(581): n is a, c, g, or t
  misc_feature (588)..(588): n is a, c, g, or t
  misc_feature (592)..(593): n is a, c, g, or t
tttattagataccatgtgcttttaatagctcatcaccggtaacacttcataatcaagagtaagttaacaagctagcatttaaaaatgtagactttcgtaagtgtataggccagcttgtggggaagtgaccaagatacataaggtaggagattcaagtgaccgcctggagtttctatacttcattctgcttacagaacatttattaaggttgtttaatatgtgacttttcatttgacattgtggaagtcctttattgtaaagctaatccttctgcctggtcacaagcagcagccacaacgacgatcactctggacccccacgctggataaattccatttcctcctgagacataggtttcctcctgtatttctgaggtaatgattttattaattctgcagtgtctggtggcccctgatgcatcagtaaatttggggacaaatttcctttagaatgctgggaaatacanaggantgggagggtagcgcaccanatctcaaanngtctganncactgagcttaggtttgnctntctnntagggaactttattaacggagcatgggcttcactacctgnncgaacntggtgcngaannccatttgctgccc

SEQ ID NO: 664068 - DNA, 335 bp, Homo sapiens
ttctcctcctcctgtctctaaacttaggctatatggctcttggaaccctttctctgaccccatctccactcctcttccccaatcccccaagccttactctatgtcctctgaagctcagtcagtaatcagcaaatctgttatattctacctcctctctttatgtactcttcacctttgccctaaaacctttacaattttctggaacatctcccagacaatattactagaaatactagaaattcccgcattctggaatagggggcaggcctgaagagaacataaaggaggaggaggaacacgaggcggcggaggcactacgcccaggcgagaggagg

SEQ ID NO: 664069 - DNA, 528 bp, Homo sapiens
  misc_feature (142)..(142): n is a, c, g, or t
  misc_feature (162)..(162): n is a, c, g, or t
  misc_feature (320)..(320): n is a, c, g, or t
  misc_feature (349)..(349): n is a, c, g, or t
  misc_feature (379)..(379): n is a, c, g, or t
  misc_feature (395)..(395): n is a, c, g, or t
  misc_feature (498)..(498): n is a, c, g, or t
agcggggcgtcggcgtgcgtgttccagcatgaagaggagagctggcctggggggcagcatgaggtcagtggtgggcttcttgtcccagcgggcttgcatggggaccccctgtcactcaggactttcagaggagacgcctgcngggctgcagaaacctctacnaagaaggacctcctcggccacttcggctgtgtcaatgccattgaattctccaacaatggaggccagtggctggtctcaagaggaaatgaccgccgggttcctgcaatggaccatgggaacaagccattcaattccagggttaaggcccataacagttnaaagaggaccaccatttccaacatttttngcttggctttcaacattgggaacactaaantgttctctggaggcantgatgagcaatttaatcctccatgatgtttgaaaggtaaataagattggtggtgtgttgaaggtgattgactttgtttttcatatatgaagaggcaaatatcnctttagactaaaatagttttggttttttga

SEQ ID NO: 664070 - DNA, 100 bp, Homo sapiens
ttcaccataaaaaaaaatgcagaaaatatcagttctttatagacatacaatctataacagccagtctaccagagagtgcggcaacagattagttctctat

SEQ ID NO: 664071 - DNA, 519 bp, Homo sapiens
aaaaaaaaacagaaaatcccctttattttgaaattgttaaaacccgtttttttggatttgaatttgaatgccaatactattggggtgaaaaacccccccccttgcaagttttaaaaattttaacgggggagggatttttgaaatttttttttaaaaaaaatgggtaaaaaaaaaaaaaccccttgtaaaaaagggttgggttttttgaaaaatcatcccccgggtttgtttaaaggatttttggcccctaaaaaggtaaaaaaggaaatgtgggaaaaattgtagggaaaaaaaaatcccccctgcttttaagggtttgtagaagccccatttaacattttaaaagggtttgtttccccaaaaccatttggggtgaaaaaatttaaatttttttttttaaagggcaaggaaaaattgtttttttttggccggaaacccctttttttttatttgcagattcctcctcaaaattggaaatatgccccggttttgttttcaataaaacaaaaaaatccttga

SEQ ID NO: 664072 - DNA, 114 bp, Homo sapiens
gatctatactactgacccggcatctgtatactagaccggcatctttactaataggcggcatctttactacatggccggcatctttactacatgaccggcatctttactcatgag

SEQ ID NO: 664073 - DNA, 244 bp, Homo sapiens
  misc_feature (75)..(76): n is a, c, g, or t
cagtttggatccttgcctagccttttccccccccaaatgggttttcctccaggggggcccctggaccccccccanntggaccccctccccatgggttttttccttcctttgaacttttttaggagtccctgcttgtgtggttcctgggacccttaaccaatgccttttgggaccgcccttttttttttttttttttcaagtattggaagggggggggggatatataaattaatcctgaaatcca

SEQ ID NO: 664074 - DNA, 273 bp, Homo sapiens
  misc_feature (23)..(23): n is a, c, g, or t
atgtaacttgctcacagttcaantaacaggtcaaagcagagtggggaccagaagcatgcatctcctatatcctaatgctctgtaaacctttgtccacaccagagaaaagggagatctcgagcaggacccagcaaactcacctgctctgagggatacatgcgggccttagaaatacccacctatgcctcagggcacactcacaaaaacagaaaaagacgaacggacactggacgtcacaacccagaggggtacggaccgacttgggacccacga

SEQ ID NO: 664075 - DNA, 378 bp, Homo sapiens
ggcaccccgtgtggctctcaatggtgccaggctggagtgcagtggcgtgatctcagctcgctacaacctccatctcccagccgcctgccttggcctcccaaagtgccgagattgcagcctctgcctggctgcccagtctggaaagtgaggagcgtctctgccccgccgccatcccgtctaggaagtgaggagcgcctcttcccggcagccatcccatctgggaagtgaggagcgtctctgcccggccgcccatcgtctgagatgtggggagcgcctctgccccgccgccccgtctgggatgtgaggagcgcctctgccaggctgcgaccccgtctgggagggagaagtgaattcaaacggtgctggaagggtcaaggg

SEQ ID NO: 664076 - DNA, 602 bp, Homo sapiens
ctttcttcgcttggaggaggaaaaagcggggaggacgttatcttgcattttggacaccagcttagtccatagcaggaaacgggcatcgtaatcagagtcaccactccatagtcattactaccctgttctcatgacatagttcccagattacacttctagacacatcctgggtcacaagggaacccgctgccttgaaggaaaggacccagtcctggcagcattcatcaccagcaaagtgaagagactttagatgctgaataaccagcagagatacccaggtactacactgagggctttgggtagccactgagacttgctgacttcaggcaaggctcagcacattaccagatgtgacagctacagggcaaaactgctgcttgagaaaagcagagggaaaagtaaaggggacttcatcttgcaccttaggtaccaacactgccacaggagggtagagcatcaagcgagctcttggggtccctggttccagaccctgactcttggatggcatttctggacctgcccaggccagaggggagcccacttccctgaagggtgagtccaggccaggcagcattcacacaggctgacttaagaaacttggg

SEQ ID NO: 664077 - DNA, 300 bp, Homo sapiens
gcaggaaagaccagtggacacaagaacatcataaaagcgcaggcatgaggtaagagcaacaattgtggaaaaaaccctatgtccacaagtctgggcaaatgtatacaagatgatcccacttgttctcatcaaccttccctagtacaaatttaattacatcatctgactgaacactactgactttactgaatctattccttgatttgatgttacctttcatacaaatcacagtagaaaaacgtatgaagttttttcaatacagccaagatgctggcttctcacctgtgaatatagttttca

SEQ ID NO: 664078 - DNA, 395 bp, Homo sapiens
ttcgaccgaacaaggtcgggcgttggtctgtcattcgcttcatagccggctcacgcttggggttccgtggcatgggtggtgacgagctgcagcagcagcgtgtgagcgtggtctaactcaaaggtatcaaccgcagtccgcaaagcttggacttgcgcgcgttcgccgagactttccaggcccgtgcacaccttctccagtaccgcatcgctcaattcactgtgctcaaagcatctcagcagagcctgcatgtgggcgaggagttcgggctccagcatgggcgattgaggtacttcgttatcgacgacgagtgcctcactggcctgtagctccttggcggctgactgcagcaagaggcgcagttgggtgatttgcggtcgtgcttcctcgcgcca

SEQ ID NO: 664079 - DNA, 156 bp, Homo sapiens
gcaacggggtgatttatgattggtcgcatatcgcgttttatgacgcgttttgtcagccggtggcttcccgatccactgatctttgccatgttgctgacattgctaacattcgtgatcgcgctttggttaacaccacaaacgccgatcagcatggtg

SEQ ID NO: 664080 - DNA, 952 bp, Homo sapiens
gatcacaccatggcgtatgagtgttcctctgtgtagactcaacctgcattactgaatcggcaaccccccacaccaccccccaacccacactccctcccacactcctaccacatccacctcccctccaccccactcaacctttccctccaactccactccccaccaccacacctctaacaacacacaccatcccaccctccctaccacccacccccttcacttctcctcatctcctcctccctcaccctcctcccccaccccaccatcccccatccctcactacccacaccctctccatctcacaccccacatacaccccccaccaccccgctacaccaccccaccccacccccccctcccccccacccccaccccccccctccccaccctcacccttacctcccccaacaaccactcaccccacctcaccccccaccctctacctcaccacccacccccctccccccctaccccacacaccccccaccaccccctcctcccctcccccctacccccctccccccctaccccaaccaccccacccacccctcccccccccccccctcacccctctctctcatccccccccccccccccccccccctccctctcccccccacccccccccacacccctccccccctcctctccacctcttcccccactccacctcacccaccacccccctcaccctcacccaccccccctctcctccccccactccacacatacatctcccacacaccctctcccctctcccccactcccccccacccaccaatccccccccaccccacccacaccacccacaccctcccccttcccctcaaccccccccacccacccacccccctccccaccaccccactccccatccaccaacaccaccccataccccacccctccccctccccaacccgcaactctcaccctcctcccctccctcccaacc

SEQ ID NO: 664081 - DNA, 159 bp, Homo sapiens
  misc_feature (135)..(135): n is a, c, g, or t
gccacacatgtgagctgcaggttgggactgcatcttctgaagcacagcttagctgtcattggcccttttgtcacagctggagctggagtggtgggaggctagaagacaatactgctaatctcacttattgtgaanttttaaaagtcaaactcatagaaa

SEQ ID NO: 664082 - DNA, 204 bp, Homo sapiens
aaggggtacacatacagataaagacagaaataataggtactgaaaagtacctataagggtggaagaattacctatggggtacaacggtcactatggtagatgggtacactagaagctcaaatctcagcattacataatatatccaggtaataaacatgcacatgtgcccccaaactatagaactacatactacacaaactaccg

SEQ ID NO: 664083 - DNA, 658 bp, Homo sapiens
ggctcgtgcctgtaatcccaatgctttgggaggctgaggcaagaggacactttgagcccaggagttggtggctgtagtgagctatgactgcgttactgcactccagcctgggcaacagagcaagattgtcaaataaataattatctatctatctatctatctatctatctatctatctatctatatattttttaaaggaaattggctgggtgtggtggctcatgcctgtaatcccagcactttgggaaactgagacaggtggattacctgaggtcaggagttcaagaccagcctggccaacatggcgaaaccctgcctctactaaaaatacacaaattagccaggtgtggcggtgtgggcctataatcccagctactccgcaggctgcggcagcagaatcactcgaattcaggaagcagaggctgcaatgaatcttgggccactgcactctaacctgggcaacagagcacgactttggcccaacaaaccctccctccgaacagaagagaatcgcacgaacgcagagcgcaccatccactgctgccctgagtagctctgctcaggcctaaacatctaaggcaccttgcctagcccgacgctcccacactgccgtcaccagctcgtcacacccctgccacccgcgccctctctcttctct

SEQ ID NO: 664084 - DNA, 202 bp, Homo sapiens
aggacccgccacggtagattcaccacgttttggaagatcgggttggaggtcagggcgaagagttcttcatggaagtcgatataggcgttcatgccggcttcggcatcgccggcatccaggtcttcgcgcatgtccatcagggtcaggcgcagttggccgatttccttgctgctgatcgactgggccaccaggccgacgatga

SEQ ID NO: 664085 - DNA, 587 bp, Homo sapiens
agggagaaactgaatagaggcaggctcttatactatcttgcacaggctggtctcgaactcctgggctcaagcagtcatcctgcctcagccttccaaagctcagggattacagacatgagccacagcaccaggccaacaatatttcttaaagctcctggagtgattccaatatgcagccaaggttgaaaactaccctttaaaaggctcggcatccagtgtggaagaccagcactcacacatccggagaccttacccggagccaggctgcccctgatcatctctgataactttaaaaggaaggcctcagaagcagccccagaagcaaaagtttctctctgaccttctcctgcctcttgtctctggcttttcattctcccccaaggctacccatagaaactagaatccctcttccccaaggcaggtcatcagaaaccagaaccggttttacccaaagccagccataaaacctaaaaatagtcctctcactcccattcccctttctgtgtaaaaactggtaggaaagaaatgatctgacctaccgtgtttgactgtcgtaagatacccattccagagagggtcccaccccg

SEQ ID NO: 664086 - DNA, 550 bp, Homo sapiens
  misc_feature (47)..(47): n is a, c, g, or t
  misc_feature (49)..(49): n is a, c, g, or t
  misc_feature (62)..(63): n is a, c, g, or t
  misc_feature (70)..(70): n is a, c, g, or t
  misc_feature (77)..(77): n is a, c, g, or t
ggggctgtggggcctaccgcggtggcgttcgcgtagaacagtggatncncgggctgcagganntcgcacnatgcgcncagccggggcagggcactggtggccttctcgaagggatgaggttcttgatcggggctgccgggtgggatgccccccaattttcaaaaaaaaagggttccaacatattttttgggggccccccccccccccccggttgtttctcccggggagggggggggggggcccccccccaaaaaaaggggggcaaaaaaaggggttttttctcttaggggggggggggggtttttttttaaaaaaaaagggggtagaaaaaggggggggggggccccccccccaaaaaaaaggggggggggggccccccctcttggggggggggttttttataccccccttttggggggggggggtccacccgggggagggggggggggggaacacaaaacactgggggggggggtaaaaaccccccgggccggggggggtgggtttgggggggggttctcccccccccccggggggggggggggggggg

SEQ ID NO: 664087 - DNA, 246 bp, Homo sapiens
acgctaagcagacctggagtttagatccgaacttcggcaacagcatctggagtgcctcaatgaacagcggctgtagggcatgtactgtagacgtgtcatgtggtggtcaagggccatgccttcaaggcccaccggcggtggcttgttgccagcagttcctacttccgggacctgtttcaacaacagccgcagcgccttgttggaagctaccggcgactgtagcagccccagtctttccagcagatc

SEQ ID NO: 664088 - DNA, 598 bp, Homo sapiens
tagatagagtcttgcttgtcacctaggctggagtgcagtaatgcgatcatggctcactgccgccttaactcctgggctcaagcagtcatcctgcctcagccttccaaagctcagggattacagacatgagccacagcaccaggccaacaatatttcttaaagctcctggagtgattccaatatgcagccaaggttgaaaactaccctttaaaaggctcggcatccagtgtggaagaccagcactcacacatccggagaccttacccggagccaggctgcccctgatcatctctgataactttaaaaggaaggcctcagaagcagccccagaagcaaaagtttctctctgaccttctcctgcctcttgtctctggcttttcattctcccccaaggctacccatagaaactagaatccctcttccccaaggcaggtcatcagaaaccagaaccggttttacccaaagccagccataaaacctaaaaatagtcctctcactcccattcccctttctgtgtaaaaactggtaggaaagaaatgatctgacctaccgtgtttgactgtcgtaagatacccattccagagagggtcccaccccg

SEQ ID NO: 664089 - DNA, 489 bp, Homo sapiens
  misc_feature (466)..(466): n is a, c, g, or t
gtctgtccttgggactaacaaagtcatctgctgtttggggaaatctctggtgttgggaacaggcccccaaatctggccataaactggccccaaaactggccataaacaaaatctctgcagcactgtgacatgtttgtgatggccatgacccccaccctgaaggttgtgggtttactggaacgagggcgaggaacacctggcccacccagggcggaaaaccgcttaaaggggttcctgaaccacaaaccatagcataagtgatctgtgccttaacgacatgttcctgctgcagataactagccagacccatccctttatttcagcccatccctttatttcctgtaagaaatgtttttagttaatctataatctatagaaataatgcttatcactggcttgctgtcaataaatatgtgggtaaatctctgttcaaggctatcagcacaaaagcccgtgagacccctantttttacgtcctcaccctaaaaa

SEQ ID NO: 664090 - DNA, 941 bp, Homo sapiens
  misc_feature (1)..(1): n is a, c, g, or t
ntgctcggaacgcaggagtacctttgggatggaaacaagagagctgggtgccatctaaccacgttggcttgttcaaactgctggaaagggtcaattggatccaaacagtttactaatagtatttaagtgacctcgagaagaggtaccaaagaagattttcccaggactgaacaagttccagaaaagactgaagaatagtcacaattctaatggaacaatatatacttaattcttttgtacctagaggggggggtttactcctttagagatagaggagaaataacatgttgccaggatgtcatattgtaaattgaaaattacattatatggagcatcacaatacggcatgtgatatatatctatatgagaaactattcattatgaccttaacgagaggagaactacttaaagggagtgggttctcatggtagggaggagaaatacgatgcgacactttgttgatgagagaaattgcgcttcatgcagacctaggtgccattctacgtgacggctctaggcggaagtattgcgggcaatagcttcggccaagaaaccacctggccttcggtgggctcagccgcggaaagtgtggcgggcgcttgcccttaggagcggggtgcctcatgatgacttggtggtggactccgtggcgtcggggcgggtggcggagggggtgcgaaggcgtctcttggcgggggggttgcggggtaaagcgagtggcgggagacagccgaactaacatgtagacatggggtcgacgccggtgtcgtcgagtcgagggggcgcgctgcgggccgtacgatatcgcgcatggtacagccgaggtaatggagcccatctccgcgcctgcggcgcggcccgtatgcaggtgcggagcgcgccgcgcgccgcgcgcgtagtggcggtgtgcgtgggtccgcgggcttccggtgcgcgctcgt

SEQ ID NO: 664091 - DNA, 400 bp, Homo sapiens
catgtttccctaaacatgcacaccatgcattaaccgtactaaatacatttccacagtgaaaacaaagtgcttctggatgttttgctacagtcagctgctttacagacaacagaatactttaggtactttggagccttctcaaaacctcatgtcttgggtggcggaaaccagcttgggattgctttgcgcacactgcctcttggcagtatgactacacaggggctccgcaatctcacacggcgaccgaaggccccccgttaagtccgacgggccccgctcaccactctcgcacaagtgtactaagctttctgggctccagcagtgcgtctcgtgtccggatcgctgctggacgaactgagatgattgccctcatacactccgcactctgtgggacacacat

SEQ ID NO: 664092 - DNA, 980 bp, Homo sapiens
  misc_feature (35)..(35): n is a, c, g, or t
  misc_feature (104)..(104): n is a, c, g, or t
  misc_feature (112)..(112): n is a, c, g, or t
  misc_feature (119)..(120): n is a, c, g, or t
  misc_feature (130)..(130): n is a, c, g, or t
  misc_feature (134)..(135): n is a, c, g, or t
  misc_feature (184)..(184): n is a, c, g, or t
  misc_feature (224)..(224): n is a, c, g, or t
  misc_feature (240)..(240): n is a, c, g, or t
  misc_feature (256)..(256): n is a, c, g, or t
  misc_feature (279)..(279): n is a, c, g, or t
  misc_feature (287)..(288): n is a, c, g, or t
  misc_feature (291)..(291): n is a, c, g, or t
  misc_feature (306)..(306): n is a, c, g, or t
  misc_feature (313)..(313): n is a, c, g, or t
  misc_feature (329)..(329): n is a, c, g, or t
  misc_feature (333)..(333): n is a, c, g, or t
  misc_feature (347)..(347): n is a, c, g, or t
  misc_feature (359)..(359): n is a, c, g, or t
  misc_feature (363)..(363): n is a, c, g, or t
  misc_feature (367)..(369): n is a, c, g, or t
  misc_feature (372)..(372): n is a, c, g, or t
  misc_feature (389)..(390): n is a, c, g, or t
  misc_feature (393)..(393): n is a, c, g, or t
  misc_feature (403)..(403): n is a, c, g, or t
  misc_feature (407)..(407): n is a, c, g, or t
  misc_feature (424)..(424): n is a, c, g, or t
  misc_feature (462)..(463): n is a, c, g, or t
  misc_feature (474)..(474): n is a, c, g, or t
  misc_feature (483)..(483): n is a, c, g, or t
  misc_feature (497)..(497): n is a, c, g, or t
  misc_feature (505)..(505): n is a, c, g, or t
  misc_feature (512)..(512): n is a, c, g, or t
  misc_feature (554)..(554): n is a, c, g, or t
  misc_feature (594)..(594): n is a, c, g, or t
  misc_feature (852)..(852): n is a, c, g, or t
  misc_feature (859)..(859): n is a, c, g, or t
  misc_feature (919)..(919): n is a, c, g, or t
  misc_feature (943)..(943): n is a, c, g, or t
aaattttttggttaaaaaaagaataaaggtatganagggtttgaggcctgagagcagtgtggtaagcccagcagggaagaagccccctatacttctctaaagcntgggtgcntggttgnngtgggaaggnaggnnctcaggggtaggggaggggatctcttcagcaattatgatgaccactgtnacctcctgggccagggttcccaggatactgagtaaggggnccaaagagtataaacncagctgtgagaatgcntgtttgctgggcctcatcaaggnctccaggnnctnagtgcaagggaaganggaaaanagagaaaaaaggtganaganagggatagataganctggtggttggngttntggnnngtncatgtttttgctcctgnnagntgatggtacngagnatgagactgtgaggtangggccccatcacatggtgctaacataatctgcgatggnntgggatgagtnccatgagtngctaaccacatggnaggtagcncggtgcngccggatggcttccctggctgtgactgcatcctggtccagcnagttttggaagaggcgcaggtgaccaaaggctccacggcnccagcgctccagccgcttggcgaactccagaagcccatctggcttgatgcagttggaactgatgtccagctgacagagagaggaggatgaatcctctgagaaaacatctgccaaggccagcaggccagcattccccaggcggttccctggcagccggaggccttcagtgtggagttgcccttcatagcagcaaccatctcaggcagaaattgggctgggcgcttctcaaacagacggcagaaggagaaggtaatctcntgcagantaaaattctgtagcaaaaagagcacctcgctctgacagtcagcgagattcatgtcatggnagctcagtcttttcagggctaggntgtactctttgagtgtttgcaaaaaagcccaaaatct

SEQ ID NO: 664093 - DNA, 105 bp, Homo sapiens
ctttatgttgcgttgggaccctgggtgcttgtatgccagtcccctcggctgcagactctcctttgggtccgaccaggccgctgtgacccagttctcctttatccc

SEQ ID NO: 664094 - DNA, 109 bp, Homo sapiens
aaagggggctttttaaaaatggggggggccttttttttccaaaacttccaagggatttttttgaattttttcccaaaattttaagcccccttttttatcccggttttta

SEQ ID NO: 664095 - DNA, 823 bp, Homo sapiens
agtgactacgtctacagtcaaaagttctcaacctatcttaggaatcttactttacttcaccaaaaacgtgtgtgtgtgtgtgtgtgtgtgtgtgtgtgtacatatatataccatatagtgtacacgctagtgtgctttagttaaaatacaaacgcctcgtgtagaaaacgagaagaattcgtgaaatcaccccgtgaaaaataatttattttctacgtgctatctcataactcgtgtactaaaatcaatttggaaaaattaagccccccttctctaacgtggtactctctctctttatggaaggttgtcagtgcacttcaacaattatttctagttacatttctttacagagagggactttattccagagataattcaattgttgtgggatgagtgtgcaatctttggcgtgtgggggggtaggagtgtgtgggctatggctagtttaagagggaaactctgtgagttggcgtgcttatatccaaacactttaaccaaattcagggtgttaacaaatttatattaacaacgtttagcaggttctatcagtgattattagggctacttgaagtgtagaggaggagaggggggcaggtggggaatacttactaggggaatgcaggtggcgtgtatatattgggctagaaaattatggatttgtggcaagattgtctacgtggtgtactatgatataggagtatctccccacttatacttttaaaatattcggctgtgtcatattaaaagatccttgaggtaagagaggacctttaaccctaagggaatccagaaggggtaatggggggggggggggtcaacaatc

SEQ ID NO: 664096 - DNA, 918 bp, Homo sapiens
cacactgtcacgctggctaattgtttttattgtattttagtagagacgggatttcaccatgttgcccaggttgttcttgaattcctgagctaaggcaatccgatctgctcgtggtgcctcccaaagtgcataggattacaggcagtgagccagccacagcatacttgtgcccggctgtagctatgttttaaaagagtcacctagatataccttttttattttggtgggcgagggagtctcactgtgttgcccaggctgaagtgcaggggtctcgatcttggcttctgtggctcagatagaatccccgactaccgggttcaagcagttctcctgcctcatgctccggagtagctgtggactacaggtacatgccacgcatatctggctaattatgagtatttcaagaatagatggggtttgcaccatatggttcgggctgttctccaagctccctgacttcaggtgatccactctgcctcggcctcccaagagtgctgggcttacagggcttgagccaccgtgcccaaatctagtatactgccttgaaatatggtagctcgaaagagtctgtggtgcctcagactgagacgggttgtagacggagtcaaggcggttgacagcccatttgcaacacgcttacgttctatgcatggtgagtggtgactttttgctagtaatagacatcgaacagacttttttacacttgaattacttatgttcccacttagtgtccctggtctggaccggcaattaatgaggtgaatcggtcccgtactgtttaccgtacttcttagtttcaccagactggtgtatgtgtgtaaacatcaaccgtcggcgggcctgcataacgcggagtaccgcgaattgcgtggcgaaaacacgagtggtcagagaacacgctatgtgatgttctcgtca

SEQ ID NO: 664097 - DNA, 666 bp, Homo sapiens
gctggaccgtgagatctgggctgaaacacggttggtgctgatggccacagacagagggagcccagccctggtgggctcatctaccttgacggtgatggtcatcgacaccaatgacaatcgccccacatcccccaacctgggagctccgagtgtcagaagatgcgttattgggcctcagagattgacacaggtaacagggaatgatgtggactcaggacccgtgcatgtggtatgtgctaagcccatcatgggccccaggatcccttcagatgttggacgctatggaggccagtgtctccctcacggggacccatggacatttgagcagatgtgacacagctagcagactgcgaagctgctggcacatgatgggcctcatgagggccgtgaccaaccatcacagtgctatgtggaggatgtcaatgacaatgcaacctgccttcatcacagagcctcataccaggtaatgctgcttgagcacacaccccacaggacagtcgccattcatctccgtctctgccactgatcgggactcaggtgccacgggtcacatttactacaactggattcccctgcgatggcttcagtgttgaccaaacactgggacctgttcacaataagtgggaacagtggcttggcatggagggtcaggagcagtggctgtga

SEQ ID NO: 664098 - DNA, 121 bp, Homo sapiens
gagtgtctcaatgagatcgtgagtatttgcagaccaaccaggtccatagcaggaaactggaagtccagagagccagcaggagcaacagtgtgtccaacaatgttgtcacccggaggaagtc

SEQ ID NO: 664099 - DNA, 215 bp, Homo sapiens
  misc_feature (184)..(185): n is a, c, g, or t
acatatttcaaatatcaattgatttgttcttgccctatgcaagtaccactcctcgcttccttaacagtacccgtggcagaattgtaaaacggggcccaccaagtcgcttgagtgattctagctgacatcctctttgcataaatgaattaattagccacgagtggtaccggagtctacagaattnncgtaatcatagggtcatttagctgggtttc

SEQ ID NO: 664100 - DNA, 150 bp, Homo sapiens
ggcacgagggggtaataactaaagttatatagtaactatagtactatagtattatatatatatatatatatatatataatactatataggcgatactactataaaaaggctatagtatacaatatatagatataggcaattaaagaatat

SEQ ID NO: 664101 - DNA, 251 bp, Homo sapiens
cttttgttaaaatttttccccccccccttattggtttgccccctggggtacccccccttacccccccttttcccccagggtttcaagaaatttaatttagggggcccagaaaatgcaaatatttctccttttttgtttttttttttttttaatttaccccaacaaccgggtttgggaacctttttccccccgggttctttaaaaaattgggggggttttaaaaaatttttttttttttttttgccccccca

SEQ ID NO: 664102 - DNA, 295 bp, Homo sapiens
  misc_feature (201)..(201): n is a, c, g, or t
acaggatctctgatgtatcgcccaacacaagaaagcagtcacatgaatgtttttggtttcccaatgcatataaaagttatgtttacactatactgtagaccagcaagagtgcaatagcattgtctaataaaacaatatacatacctaaatttaaaaatactttatagctaaaaaatgctgattatcaatctgagccatcgntgagtcgtactctttttgctggtggagggtcttgcctcgaggttgatggttgctgactggtcagggtggtggctgctgagtgttggggataaca

SEQ ID NO: 664103 - DNA, 229 bp, Homo sapiens
atgacgagtaatctcctgaaaggctgggtcggacactctcccgggtggcaccagaacaagaaaaggttcggtaccatgtctgtagcagccgtggaaaagaggtgttataacacaagatctcaaggaacgatggacggctgtaccatatgcgtacaacgatgatgcagttactatctgacgatagaagaacacctgaactgtaccatttctcaggttgagccggatataa

SEQ ID NO: 664104 - DNA, 114 bp, Homo sapiens
ttatatccgggtacaacctgagaaatggtacagttcaggtgttcttctatctcagatagtacctgcatctcgttgtaccatatggtacagcctcatactcgtctcttctctatg

SEQ ID NO: 664105 - DNA, 1295 bp, Homo sapiens
gccggtcgccagaagctgggtttgtcgcaaaacctatgtgaccccacggagacccttcgagaagtcgcgtctcgaccaggagctaaagttgattggagagtatggactccggaacaaacgtgaggtttggagggtcaagtttaccctggccaagatccgtaaggcggcccgggagctgttgacgctagacgagaaggatccccggcgtctgtttgaaggcaatgctctcctgcggcggcttgttcgcattggggtgctggacgagggcaagatgaagctggattacatcctgggcctgaagattgaggatttcttggagaggcggctgcagacccaggtctttaagctgggcctggccaaatctattcaccatgcccgtgtgctcatccgccaacgtcacattagcctttggagctgacagatgtgagcttacccttgagggttcagaatcgtgccctgcaaacagcttatgggggactggggacagccttgtttccccatagcccagcgcaagggtcactgcggctcaagccgtacaccttgtgaaggtgtctgccaggcactcaagcagctggacaggtaacagctcttggtgccaccccccctggagggagattggagtcaatgttgaggtgacaaagctgtctgtggaggtacaatctaggccttcattgctatatttctacttgttaatttgccagttgagaatgcacctgtctgaagtgactggggtaaatgaaattgcatgctcgttaacccttctgtaaatgagcaccaatcatgacagctatacagagtgaagtctcagatttctttctcaccagctttcgtttatgggcagagatgtactcttgtctgaggtggtttgagaccacatggcattacaatgtggacaggaagcaaatcaaagcattagtatgggcactcttgttttccttccaagttactgagtctgaggtcaggagtgcctgtgagcctgcttgagtcaaagggcaggaccaaatggttcagcctcactttgtccccttattctgttcttcctgtccagggtccgcaagcaggtggtgaacatcccatccttcattgttcgcctggactctcagaagcacatcgacttctccctccgttctccttatggcggcggccgtccaggccgagtgaagaggaagaatgccaagaaaggccagggcggggctggagctggtgatgatgaggaagaggattaattaatacttggctgaactggaggattgtctagttttccagctgaaaaataaaaaagaattgatacttgg

SEQ ID NO: 664106 - DNA, 292 bp, Homo sapiens
ttaggggcccaggggccgggggtcgcttttgccccccagttccagccccgtttgggccccctggtgaacccgttttcccccgaaatttgccgggggggggggcccccccccgtggtccctgccccccggggggccttggggggggggtttcctgggcccggggaggtccaacctgtggtggggtggggtcccccccctgcgctttgggcctgggggcccgggtttccccccttttcccaaaaaaaaaaaaggggttttgccggtgttaatttttttttgtttttttatttga

SEQ ID NO: 664107 - DNA, 184 bp, Homo sapiens
gctctgactcagcagactccacgaaaatgcagcccactgaccacatgtccacggccgtgagagtattcctaagacgccaggagaggtgttcaggaaggccatgtgcccgcgaagctgtggagaggctgcatgcggggacagggagaggcactcagtacgcccaggtactcaccgttggcaccaa

SEQ ID NO: 664108 - DNA, 221 bp, Homo sapiens
  misc_feature (50)..(50): n is a, c, g, or t
  misc_feature (87)..(87): n is a, c, g, or t
  misc_feature (115)..(115): n is a, c, g, or t
  misc_feature (124)..(124): n is a, c, g, or t
  misc_feature (172)..(172): n is a, c, g, or t
  misc_feature (181)..(181): n is a, c, g, or t
aacgcgagcagagaacgaaaggagaagaaagcaaaggttttgggaatgcnaaggggcctcattttggctgaagattaataatttttnaacatcttgtaaatattcctgtattctnaactttttnccttttgtaaattttttttttttgctgtcatccccactttagtcacgngatcttttnctgctaactgttcatagtctgtgtagtgtccatgggttct

SEQ ID NO: 664109 - DNA, 108 bp, Homo sapiens
atgttgctgacgcatcctgagagcagtcctccttttccacctgagctcttcctcctacacatcatagcggtgccggagctccaaggacagctaggacaaccaggacag

SEQ ID NO: 664110 - DNA, 291 bp, Homo sapiens
ctttcctgttgattaaaaacatggctctcttatacaggtgcgtgactggggaaagccctgagggcaaagtctcactctgtcacccagtgctggagtgaagcagcccaatcttggcttactgcaacctccaccccctgggttcaagcaattctcctgcctcagtctacctagtggctggtgattacaggcgcccgccaccatgcccaggtaatttttgtgctttagtagagatggggtttcaccatgttggccaggctggtctcaaactcctgacctcaagcaatccaccca

SEQ ID NO: 664111 - DNA, 320 bp, Homo sapiens
cccaactcaaccagtggggtgaaagagaaatccactctatacgctggctcatgcctgaatctcagcagttagagaggctgaggcaggaggatcacttgagcccaggagtttgaggcctgcccgggcaacataatgagacctcatctctacaaaaaaataaacttaaaaaaatttagccctgtgcagtggcatgcatctcaccctggggggctgaggtgggaggatcacttgagcctaaggaagatagagctggcagtgagctatgatcacgctacagcactcaatcctggacgacagagtgagacgctgtctcaaattaa

SEQ ID NO: 664112 - DNA, 257 bp, Homo sapiens
ggtcacacgcacggacaggagggtcgtgggttctgacatggtgacccgtggaactctccctcgagtcgacggtccgtggggtcgaccctatctccgtgcggtgattggcccaggtcccagggcccgcagggtcgaccagcatgtccctggcagacgtggggccctgcttccgagggcccgcgtgggtcgaccagcacgtccctggctgactgtgggcccagtgtccaagaatcgccttctccggatgtgcgtggtgt

SEQ ID NO: 664113 - DNA, 775 bp, Homo sapiens
  misc_feature (213)..(213): n is a, c, g, or t
  misc_feature (537)..(537): n is a, c, g, or t
ggtaatcatcatagtatgcattctaatcggaagggtattcttatctgcttaccgatcgcgacacaatgctatgctatatacaactaggctgaggccccaacgtagtagtccctacaggataatataacctttgctgacgccattaaaggcttcaccaaggagtccctgaataaccgcgccaaatctaacatcaatccctcgtgacatgtcacngtcccggatctgtaagcgtcatcggcaatacagcgtacttgctgattgattgaaccccgcgcatccctcgataacacgctagaccccccatggtgtgtgcgtacaagaagctttagggtcgtacgcttgatttatattcgtaagcgctccctacttagtctttagacggttgagtgcgtttcctcctggatcaaatggttgtagtcattgacattgctgacttagtcccgtggatacggcgtccacgtgtcaaagaagcctaaacccaaatgaatgcttcatgatgaagcttcactcatgatacattcatttcctgacttgtcnaacaagttcacctatatgaagtgggctcccttttaacacctcgtctcaactcgcgttatcgatcagacgacaaacgaaacacctctcgaattacgtgccttggcagtcaatggagtcctttggcgtcatgatatagatgattagtgctccaacaattagcgtgaggacctaaccagaggccctccttcgagcttgcggaaggggagtcgaagtagtctcgaggctacaagatcaatgc

SEQ ID NO: 664114 - DNA, 481 bp, Homo sapiens
  misc_feature (296)..(296): n is a, c, g, or t
attaaaattactaccaccaaccaccttcccacccacaacacaaggtctctaagcactcactctccacacaccccctccacggcgggtggacgcagcaggtgcggttggggcacatgtatcccgaataaccaagggcatcctactctcacacccaccacccctagtcaccattgtcaccaccctaacccatcacacacaacctcttttatatacccatccccccaccctcccctcacaccccgcactcaccccttccacccacctccccccatggcccgtgcacgcctctgggcccncttgacagccaacccccccagtgcaaaccccaaggccaagccaagccggatcagcaccgtggtctgatgaatggagagagtgagctggggaacaggaaagtctggggagccacaggagagggaccttgcaccctctttgcttcctcggttttttcaaaaatatatatacacatagcaatgtcaaa

SEQ ID NO: 664115 - DNA, 108 bp, Homo sapiens
gacagtgaagcgccccctaccttgtgaaagctaggcatacagccaaaccctcctctttcccacccaccaactacttgccaatttcctaggtcaccatgggtgtattct

SEQ ID NO: 664116 - DNA, 1278 bp, Homo sapiens
  misc_feature (135)..(135): n is a, c, g, or t
  misc_feature (149)..(149): n is a, c, g, or t
  misc_feature (258)..(258): n is a, c, g, or t
  misc_feature (388)..(388): n is a, c, g, or t
acagatccgggcagagggacagcgccaggcccagtgagtatgatggccctgcatgaatcatcgagggtcaacgcatggaggtctgtagatcagtccacacatacgcgctcgtgcttgtctggaaacgattggcgnagtgtgactttaangtcttgcgtcgatagccttgtggactagcgagctatgtcgcatgcaatgaccatgccaaaagatcatctatccggccggtatgagtaggaatgggcaaagatggatgtnctgagtgaccaatagatcatcctaaagattagctgaagtggcatgtaagcccagatcagcagagccgagcggatacacctttggggagaggcaggacggcctcaatttacaacaacgctctcagagaagntttcgagaagaatagagacaacaaaaccatataagtatacataggtgagtggggggcgctcgggaacgccttactaccctttgtgcaacactccaagggggggcgccgacactgtcttgaaggatttcgcgcctgttctttgtgtgtctcaccaagggggcgggtcaaccacataggagtggagtggaagacacgtaagtctcctggcaaggcacaaagagggcctccaggggccgcaatttccgttttcccataaatagttgggttagtgatgggggtggccatggccaggggagaaaccctttgggaaggcacttattgggagtgagaaagggtactcccattccttacttaacgtgggcgggggagcgcataccccaataaatggggaggtaaaaaactaaacaattggggtgaaagtagattatgtaagttggtccttagggaggggagaagactttttattcagcttctctgggacaaagtgggggttatttcgtcgtggttggttctccccattggaagtgtcgccgggggaaacaatgggatcagagatggttctgagatgaaaacaattccggggagggttacgggagaggaaatttttgccttgggaagctaccaaggggttattcaatgttcccgcagacgtgaataatgagacataaaaaatgagcggacaggagaggatttatctaaaaacgaagggggaaacacggacagagggggatgctgtgtaaacccctctcgtgcaccaagcagaattgtccacacattatcagccggggtacaccctgtggcccccttttgtaaggtggcctgtggtacaccgaaaccctaaggcgggaccagggtttagttaaagaccatgtgtgtcaaacattcgtgat

SEQ ID NO: 664117 - DNA, 251 bp, Homo sapiens
tctagaacattcccttgctagtccaactaacaacaggtgctgctctaagagaaactccagaggaatgaggaaactgagggctgaagacagggagcagacaggagacaaatgtaccgaaaaaaaagattcaagctaatcctaccccagcatcctcctgtcatgatctctggcaggaagaacaaaagaaggtaatccataaagacacagcccttacttagaaattctgacatagacagcaagacaaatctgct

SEQ ID NO: 664118 - DNA, 1018 bp, Homo sapiens
taacaggcttcgccttgcattgtgcgtagtcatatatataaagcctctatgcgcgcggtgcagcacgccttaacgtgcgtgcctcttcattgcacgtcataatatgatcctccaggtggcatataccttgatgtgtccccctgtccatgtcctactaatcgattctatcatcctggtgctgactcacactaaagcacaacgtaagcgccactatcggcgcacaatgcaatggtggcgcaccgtcaattacagaggaaagtcacgatacgcagggggctcatcacaatcattcatgcgtgctgcgcatgaatggtctggcaaatacggaaaatccatgctgttgacttacctcgtgtgatgtgtgctcctctgcgacgactctcgtcagccacgccttgttacaaacctgcatttcctcttccctgaaggcatcataagggaatggtgctgggccgctgaggctgatcgcctgcagggcaaatccccctcaaagtccctcacgccttgaggaaatgcgccatcctattgaggtcggattcatgatagaaacggacgacagcctaagatcaagttgggatccagccggcaagcggggccattcataatttgggatcccgggggatcgaccaatggttgccgggtgtctggtacagaggcctgtgaacagaaacgtgaaccttttttcatcttcaattgcctgatcacttttcaggccttggatggccctaagggataacgctggtgccatcccagtgaccccatcgtccaggggttggtccgcatagcaggactcatccttcttgggattcctgggcacaaatgttgcggttaacaacattccgctggtggtggcaaagcccggcgacagggtttaggggggggcaggatgtcctgacttccaagacaagtgggcttgacgttcgcgagtgttctaacggcccccaaaccagggtagaccacgatttctcacaggcggatgtagacgaacgcggacacaagccacaccgcgaaaaaaatg

SEQ ID NO: 664119 - DNA, 260 bp, Homo sapiens
tatagcggtcctctctgcttcatgtgtcctctcaacattcaagccaactagcgcttgataatagtgacaatcggcatcaaccaaccccacctagcatttacttcacatctagcatgcacgctttcttcaaagcaatactattcatatgctccggatccattatccacagcctcaatgacgaacaagacatccgacaaataggcggactgtataaagcaataccattcacaacaacaccaccaatatcaccatcatcacca

SEQ ID NO: 664120 - DNA, 175 bp, Homo sapiens
acaagccgggagaaaggccagatgggcaagctgtccttctcatggcttcccctaagactagtccccagtgactcacagtcccactgttcccattacagcagagttgcggagatgagcagacacccttactctgcagtaaggacacctggaaacctacccccaaactaccctcagc

SEQ ID NO: 664121 - DNA, 166 bp, Homo sapiens
tccggtatagagtggcatgtgaagatgtgtgctgaatgcctggaggtgagagttacggagggtggagtggggcgagagaagcctgagccattagcaggcgcagagtctacagggatctgcaaaccacattgaaagtccttggactacatcctgaaggcagtgctga

SEQ ID NO: 664122 - DNA, 297 bp, Homo sapiens
gaaaaaaggggggccctttttttttatttttggggggggaaaaccccccaggccgggggcgcccgggcccctgggggtggtttttttcccgggaggggttcccgggcttttttttttttttttggggttcccctttcccggtttttggggggggggctttttcccccccggccgggggcctggtttttgggggggttttgggttttttttggggaaggggttttggggggcttcccttttttttccccccccttattttttgggcccccggggttaaaagggtttttttttttttta

SEQ ID NO: 664123 - DNA, 327 bp, Homo sapiens
gggactatattgggctgggaagattctgcgaagcaggggaaacagtcagcggagtgaggagacaatctgtagaacgggagaatatgtgcaaactatttatccgacaagggactggtattgagaatatacaaggaattcaacagcaaaagaaaaatcccttttaaagggtgggcaagggacgtgaggagacatttctcaaaagaagacatacaaatggccaagtatatgaggaagtgtttaacatcactggccatcggggaaatgcatatcaagaccacgatgagatatcaccttaccccacttggaatgactattattaaaaagacc

SEQ ID NO: 664124 - DNA, 264 bp, Homo sapiens
acgcgttgacatggagactgtagtaactcagaattaaacgctgccatattgccagtgttagccgctgcagtatgcatacctgtaggacaacatgccatccactcctgtaagaacaagcacaataccacaacttaacaaagaaaaggcttatgcactgtcccttacattttggtattctttgttctacaaaaacagaggcaaaacagaatcacgtccagttcaccacaagttatgcacacccgtggcgagcaagtttagcggcat

SEQ ID NO: 664125 - DNA, 806 bp, Homo sapiens
cgcagttggatcactgcccgcaatcccaataccctggcaggccgtgcctgaaggatcactcgaggtcaggagttcgagaacagctggcagcatggaaaactcggtctctacgaatgacacaatgactctagtccaggcgtgttggcgcagcaccgtgcaactcgcagcgtacgtccggaggcttgaggcaggagaatcgcccgaaacctcgggtcaatgtcagtattttagtgctcagccatgttgagtcaggtttttcccaaatttcctgagttcggatgatccacacacctgtggtgtcccaaaggtgctgcgtgattcacatgaggacacgattggatcacctgaggtcacggtatgttcacagtatgcagccatggctcattaggatgatgaataccgccgagtctccagataaggaacaaaagtattagcgccgggcgcaaagtggctcacgcccgaaatccccaacaccctgtgtgaggcccgaggcggggaggatcaactcgaggtcaaggagtccgagaccagcctggccaaacatggcgaaactcggtctctacgaaaaactaccaaaaatcagccagggggtgattggcgcacaccttgcaaatccccagctaactcaggaaggcttgagggcaggaagaatcgcccgaacccagggtagacaagaggccgcagggggccaagattgtgcccttgcacgctagttctgggtgacagagcaagactccttcccctgtgtagaacacgagacttttttcacccttgtggttttaacacagaattcttcgttgggagcg

SEQ ID NO: 664126 - DNA, 512 bp, Homo sapiens
ttaaagtttagagatggatcataatgaattgtgccaatatttttctttgagagaaatgtatactatgttataaaccacaggtttcgggggagaaaggctggaggtttaaacaccctatttttgattctgaaaatgatattaatagaaagtgtcggtcacagtctgattatatagagacatctgccctaatggttgtgatacatcgtcatgaaatgcaaaacccctacagttgtgggcatgcacaagaaaatttccaaatacctaaagtgtgggcaggtgaacgtcctgggtggaatacgaagatgtattagacgtctttgtctctgcctacttgcggccatatgcttgtgaacggaaagtaaaagaaattccccttcttatacatttgtgctggcctgtacaggctcaggcactgcctcatctgttaaccgaggaccccatggtctgtcccatctttctgaagccaacctgctgatggtgacagttgcttcttcatgaaagcaagcaactgt

SEQ ID NO: 664127 - DNA, 196 bp, Homo sapiens
tagctgcagatgcttacctaccacggtcgtctccaccagaaaagatcgccaagtccgtgcgatcagattgtgacttacaaaccgtgtttaaaagctgctatacatgacttctgtcccttaaaagcttaccctatggctgtggacctctgtgttatgcctgggataccttccaagcactcattacgcccaggttacg

SEQ ID NO: 664128 - DNA, 298 bp, Homo sapiens
tgcgtgtgattccagaggatccccgcctaagtggtatgctccgaggcgagtgataccgagagctagccagcacgaaccctgagtccagacggccagctctgtggcaatccagccacatcaggcttccctgtacagatcctgcgctatctctacctcggctgcgccaaggactccaccaacctggacgtgctcggcaagtatggcaatcaagtatatcctcaaggtcacacccaagctacccaacgccttcgagcacggtggcgagttcacctaaaagcagatccccatctctgaccac

SEQ ID NO: 664129 - DNA, 265 bp, Homo sapiens
cattgagcccctgtgatgccttgagttctagtttggaaacgttatttctaatttctccccagtccctagctcccagataccagagctggtcccagaacactctccccttcactgggaacagagccacatccaacatccctattctatcggccatcatctgctgactgtggtctaagggatgtgtctggccccctagcacaggccctgagggccaggagaagatgaggttgctaaaactccaggacactaccaggccctcctcagt

SEQ ID NO: 664130 - DNA, 348 bp, Homo sapiens
  misc_feature (226)..(226): n is a, c, g, or t
  misc_feature (243)..(243): n is a, c, g, or t
gtttgctgtctgatatttatcattttaccaaatgggaatgtgaacacaaagagaaaatattttatttataaacaaaaataaataaaaacatggctgggcatggtggctcacacctgtaatcccaacactttgggaggccaagggtggaaagaacacttgagccccaggagaccaagaccaacctgggcaacacagtaagaccccatctctacaaaatttatttttnattagccagggaaggtngcacgcacctgtggtcccaactacttgggagactgaggtgggatgatcacccgagcccaggaggctgaggctgcaatgatcacaccactgcactccagcgtgggg

SEQ ID NO: 664131 - DNA, 361 bp, Homo sapiens
  misc_feature (218)..(218): n is a, c, g, or t
ggcgcataggcttcttacgtgttgaacccctcgtgtaggaccttgagctcttcctaactgtttgttcatggtggtgcggggttctacgcctgtgattcccctcactttgtgaggctgaggtggttggatcacctgaggtcggtagttcgtgaccagcctgtccagcatggagaaaccccgtctctcctaaaaatacaaaaattagccaggcgcctgtnatcccagctactcaggaggctgaggcaggagaacatgggaggcagagtttgcagtgagccaaaattccgccactgtactccagcctgggcaacaagagcgaaactccatctcaaaaaaaaattaattaaaaaaaaagttttac

SEQ ID NO: 664132 - DNA, 214 bp, Homo sapiens
  misc_feature (4)..(4): n is a, c, g, or t
  misc_feature (24)..(24): n is a, c, g, or t
  misc_feature (70)..(70): n is a, c, g, or t
tttngaaaatttttaaatccatgnttgccccaacccctttggggtggggcagaaggttaaagattcccantttattaaaaattcaggccctgcagggccctataaaacctgtggccatccttgagccccctgcccccaggtgccttgggccaaattcattgccccccttgggccccccttccccctaaaataaatttaacagtttcccgtggta

SEQ ID NO: 664133 - DNA, 106 bp, Homo sapiens
  misc_feature (2)..(2): n is a, c, g, or t
  misc_feature (8)..(8): n is a, c, g, or t
  misc_feature (60)..(62): n is a, c, g, or t
  misc_feature (69)..(69): n is a, c, g, or t
  misc_feature (89)..(89): n is a, c, g, or t
tncagcantttccagcagcgggtttgccgccagaacacaggtgtcgtgaaaactaccccnnnaaccccncatgggaaaggaaaagactnatatcaacattgtcgtc

SEQ ID NO: 664134 - DNA, 448 bp, Homo sapiens
caagatctacacctgtgactctaccctataagacttcatccgccatcttatgcagaccatagtgaacggctcctacacgctcaccatacaagcccatagtctaggaatatgaataggcagagacaaacataaatgccctgtacgatgaagaggcgcacagcccaggcatccatatcaccatcaccactgacaaagccttagtaggccatgtcaaagaacgcaaagagataccttttctatacaccactgttgctatattccttccgctgtaccggacgcgggtccactcccgtgagattgtgggcgcaggcttgcagacgaagaacactctgctctggtatttttgaaatatcctccacagcgcctgtgaagtcaaaaccgcaagtcttgggtcatactaccgataaccttgtagctgcatgccagcatccctgaagatgggtgtgtg

SEQ ID NO: 664135 - DNA, 187 bp, Homo sapiens
tggtgattacaggattgtctagcggcagtgattcgtgtgctagaggtgtcagtgcgctatacatgcagctgcagcagtgtcacatcacaccgagagagagcagtgactcttcccacacctcactgcacctaggactcactgccataggatgctggcactccagacattaatccccacccaacagatg

SEQ ID NO: 664136 - DNA, 619 bp, Homo sapiens
gcactttgggagaccgaggcaggcagatcgcttgaggtcaggagtttgagaccagcttggccaacatggcgaaactctgtctccatgaaaaatacaaaaatgagcagggcatggtggcacatgccaataatcccagctactaaggcggctgaggcaggagaatcacttgaatccgagaggcagaggttgcagtgagccaagatggcaccactgcactccagctgtggctacaacatagggtttttatacaagaaaaataaagtgaattaagcgtgaaaaaaaaaaaaaaaaaaaaaaaaaaaaaaaaaaaaaaaaaaaaaaaaaaaaaaaaaaaaaaaaaaaaaaaaaaaaaaaaaaaaaaaaaagaagaggggggggcgccgacgaaaaataagctaccccgagaggaggacacggggcgcgacacccagttgtgaggacagaggggcggacccaaaggaggaggagcgatataagaaagagagagggagagggggaggcaaaaaaaaagagagagcgggacggagaaacaaggaagcggcacgggaaaagctgaggagaaagaaaaacaccgacggggcgggcgagacagaataagggcgcagcgagaaagacgaga

SEQ ID NO: 664137 - DNA, 333 bp, Homo sapiens
ccgacacagcacatgtaccagatcgtgccaggtaaaactactaaacactcatacatcgtagcagagattaagttctattaccagataagaattgaagagaatcaaggcttgcatagcaatctagaggacatacctgttgtgggggttgatgagcatgatgacttggatgagagacttcttcattcacatgcagactgtgtgcattctcatggttctctcctataggcttcaactggttgacttgaggcatggatcatacacatcttctctgggcgggggcctgaagaagcctctagtcttgatgacttgtgaccataaagtagagaattgtct

SEQ ID NO: 664138 - DNA, 272 bp, Homo sapiens
tggcctactgggtgctgtggggaagggttaaggacctttaaaccccggagcgaggctctgcttacccgaggccgctgctgcgcggagacccccgggagaagccaccgccatcatgactgaccaggaggcaaaaccttcaactgaggactggggcgataagaaggaaggggaatataggaaactcaacggcacgggacagcagagagaatcacttcaacgtgaacatgacaacacataccaagaaacacaaagaagcatactgccaaagacag

SEQ ID NO: 664139 - DNA, 302 bp, Homo sapiens
gcggtcacctccgcgtaaattacattcccggccctgccctccctccggtggaacttcccctcaccgccagacttaagctgaggatcgttggatctcttgcggggttacagactaaagcccaggccacagaaccctattaaacgttctgtgcttgtcccaaggtttaaagtgatcctcccgcctcagcctccccaggtgctgagattacatggatgagccactccacctcgaaaggggccagaaatgtgaagtgctacctgaaggatgagcagcagctagccaggcaaagggggcaatggcgg

SEQ ID NO: 664140 - DNA, 622 bp, Homo sapiens
tctggatccttcatcacagggggcagaagacaactatggtggggtctggcaattggagttttactccccggcaagtgatgaatcttaacaactgtgcacctgttagactggtattattttaactgggtttccctaactttaacatagagatgaattacttagctttgaggaagttgtgagggaccagtgagggcgtatatggagaaacaacgaacaatggaactggcacaggtgaagtggtcaatgaagatctggggaaagattggacaactctgttctgacactggatggtaacattggtagtcagcaacttccctttcccccagagctggtgaaggcctgaatctgggcgaaccctcttccatggccccagttcacagaacttcccatatgtagttcccggacatatagccagtgactgatgggtcctggacactttcactctcactggctcatctggtcctctcaagaagcctatataagaagcgcgaaacagttggttccttggctgggtgtggggggctcattgctggtgttccagcactttggggagaatgaagcgggtggatcacttgaagtccagagtttgataacccctggccccttgtttcccgcttgttct

SEQ ID NO: 664141 - DNA, 510 bp, Homo sapiens
  misc_feature (11)..(11): n is a, c, g, or t
  misc_feature (20)..(20): n is a, c, g, or t
  misc_feature (59)..(59): n is a, c, g, or t
  misc_feature (103)..(103): n is a, c, g, or t
  misc_feature (119)..(119): n is a, c, g, or t
  misc_feature (132)..(132): n is a, c, g, or t
  misc_feature (155)..(155): n is a, c, g, or t
  misc_feature (190)..(190): n is a, c, g, or t
  misc_feature (227)..(227): n is a, c, g, or t
  misc_feature (354)..(354): n is a, c, g, or t
ctcccttgtgncctagagcncccagaattcctagtcaagaaggtacagcaaaattccanggtctcctacagacctgacccagtttgtccatcccgggtgtatnggtttcctttcctganggtaccatagatnaccccacccccaggagtttagtnacatataattaaagtactcccagaatggttccatnggaataaaatattcctaacccaaaagtgtgtttaggnccaggcacagtggctcacccctgtaatcctagtgctttgggagataaggcgggaggatcacttaaggccagaagtttgagaccagcctgtgcaatatagcgagaccctgtctctacaaaaaattctnaaaattagctgggcatggtgacacacggctgtagtcccagatactcatgagggtgaaatggaagatcacttgagtccaggagtttcaggctgcagtgagctgtgatcacaccagtgcattccagcttggatgaggcagcaagaccctgtctcaaaa

SEQ ID NO: 664142 - DNA, 831 bp, Homo sapiens
gggcgacgacggggagccaagcatgaatccactgctctcagggtgagggtaagagcgggacacggtgacttgagtccagtagatgatgacttgcctggagtatgattagagagactcagtctcagagtcatgagagttacaagagtggtggataagacaagattatcataagctggagtgggaaggactactgacgaaggaagagatttgacatcttctgagagaggggcacagagtcctggcagaagactctgaagaaagatcgctggcactgaagaagagtcgcagaggaaatatgggtgggagtcaacctgattttgggaacgtggggcgatggcaaagggtacagatgagttatccaccatgaataaatacaaatgtctgggcaggaaaatcagggagtaataggtgaaagtgaacagcttgttttgctgaaaggtggggggcaaatggaagggagagtggttgagattttcagactccaagagatattcacggaaaaggttttgcaacaggaagctgagattgacagcattcacgagttagttgtgggggcaacgtgaaatatcacggaaggcaccgaagacgtagagaaggcattaaaaagaaagtgggtacgggtggggatccctgttcttctcgaggatggggtcttttcctcgatcttcctcgaattggtagacagaaggcaggcaggcctcgagaaagttttagacatcgttgggggggcagagggatcgagaatggttaagtgtacaaggaaattggtgatggaggtggtttcaaagaacgggaaagggtgaagaagggttggattggataaggcaggga

SEQ ID NO: 664143 - DNA, 258 bp, Homo sapiens
tgccttgggctcggttaggttgaagccaacgcggctgaggcctaccccatctggcctcgtcgcagcccggggaaccgatagcagggcggttccccgggcgctccattctcatgcttcggcctgcttttgcgccgcccaagcgaaattgcggctggcgacgggaatgcccgcttgatagagccggacattcatacgccggttgatctcacgcccgacgccatattgtttcagcggccgcgtacggatggcggccttgat

SEQ ID NO: 664144 - DNA, 256 bp, Homo sapiens
tgtatccccctggagccgttttctccttataaaagtatttacatacatttacaaataaacaaccaacatcttaaccaaatacaacacttcagactataattaattcaacccaaggtatcatagtattctacactgcatgaaaattacatgttgatagatctttgagtaccttagaagttagtctaatattaacatattatcaggatccagttaggtactattctatttctttaattattccttctgtgagcaacag

SEQ ID NO: 664145 - DNA, 632 bp, Homo sapiens
attaaaagctaccgcagatgatacaatcatcaaaattcaacagtgggaaattctaaccacaaggtaacaacacaaaaagaatggaaacctatagttctccttggttagtggattttgggaaaaattcattcacacgtagccaataaacacattaatatctgggatggattaggagacataaaatgtgggacgagcttagctgactacacattgcacaagctgtggaacatttccttgtagttccactgggcgtaaagtctcttaaaatatccttcagaatacaatggcacatgtagtgatgttggcttactgtcacttcatagcacggcaaattaaataaagtaatcggtttatgatattgattatggctccaaaatacccgcaaactggaaatatctcacattgcccttacatgtgcggtgtggagtaagtagaggtagatttactatttctggatccaatatatggggcacctttccagagttgctctctaccagagctcattattttcaacgaatggtgaaacgaatcagacccctggatcagaaagaagtggaatgacaatacgagtcaagacagtatagttgcggcttcataagatagaatatttgcagttggtaatcattgagatg

SEQ ID NO: 664146 - DNA, 845 bp, Homo sapiens
tcagccttcttcgggcctcggcagcggtatgctggctcgctcgcctcatgccccagcgcccctcggctaccctcgtgccccaggcccgcagcgcctgccctgccctcggcctgcccctgacgcctgtgccttagtgtgcctgctggctctagagccccgtggctacgcgtaaggctgcctgaccgtggtcccgggtccctggcccccttaatggggccccgggctaaggagtgcgcctgtctggccgacacggacccatgcggagagcccccggataagcataggacccggaaggggacatgccgggtaagcttagccggggcgcgctacagcgcaatacgaaaccggctaacccaataccggcccgcaaggggcaccaacataccgcgccataaaccaagggcaggaagggggccccgtcacactacagcagggagggtgcacgaacaaccccatagtgtaattggaacaccccgtatggcagaggaacaggcgacagtcgcgacgcgacgggaaacgccttggggtacacccttttagtaccctgaacgaccacatgagccagcgcaatgaaaacaggccgtggcaattgtagcaacgcgcactaaaaaacgcatcaaaggccccataggaaagtaggcgcccaagagggggacaccgaggcgagaaaaacccaaccaggaagcagcgaaccgggaaaaacaagacgtataccaggcgaagacacggggacactcccaccgaaagcgacgcgccaatagagagcaactgacaaggaggtgacccacacaccgagcagacagagacggacaagggacgacacaaccgccagagaagagacggct

SEQ ID NO: 664147 - DNA, 156 bp, Homo sapiens
atcccttccaaaagtgagtttgagtaaataaatgggttaacaattgagagaaattaaacattacataaatacttcaaaagagacagcaagaatgacactgcctcttaggccagttattccagatgcctgaacaggtttaaggtatatggtcgctga

SEQ ID NO: 664148 - DNA, 372 bp, Homo sapiens
cccacacaacaggtttgaatcgttctagtaatcattatctagagtgatgatcataacaggttgacacagtggtcgttcaaagcacatgcatagttaccctagagatcaatccttcagatctatttaacgttcagaactaggtttggcttgtaacaaacataacttattgcgtggactcccagtctgttttaattagtaaaaggagggcactgtgcgagtggtggacagggaacaggctgtttgtttcactaacataggtggtttattaagagatcatgagtgaagtctcaggactcgcgttgggatttacagttagtaataaaagttctccccaatcaatgttaatcgatcaccatcacaatcagatgagag

SEQ ID NO: 664149 - DNA, 1763 bp, Homo sapiens
gtatttttgtgatgatttttagaggaacaatgtggtagccaaaactttgttcccaaggattctccacaagaacttttttacaaatgacagcttgaaaaaaaatactcgtggcacggataacctcaaagtttgggcctctaacaagtggtccccttataaacgcggggcgaggacaattttaggaaactcacaaatttgggcacattaaagaaagtgtccgcgaacgagccagtgttttccattattacagccaactcaaattagaggacacttatagtgcaccttaagagccaagagggtaacactttctcttgtggaacactttacacaattctcttattcaccaaactgtgagcgtccacacctctcgtggcccgaggtgagtgagaaggtgtgagaaatttgtctccacaacacacgctctcttaaatttatacattacgtgtgccaggccaattctgctgcgggtactatccccgcgtgatgagtgggcgcgtggtggtgtttctccacacgaggcgagtgtttatatagacacgaacgcgtgggcttgggttcaccaacatcataaataagcgcgtgggcgaggccctatatatatctcccccacgcttatgtgggcaacacaacaacgagtgttataaaattcttaatgagatttctccaaaattttggtgtgggcccaagtgtgtgagtataagcgtgtgatatatttatacactgttttgtaaaaaagaaaacaaacaaccacccatttatccgcggggggtggggagcgaggggtgttataaaagagaagaggtgtttaatagataataactaccgaaggctgtgtgggtgtggcaataacaactttaagagaagtttttacaaagcaggcccacaatatacgcgacatatagtgcggcttcacaaggcgggtggaacacctctttggggtgcaaacagtgtaaacaaacaacactactcttgtgggggtcatattaacaactatggggctcttatgcggttatatttggaattcccctatttttgcaaaaaccccccaaataaggaaggcatatttacacccccccctttggggtgggtcccccctggtggtcccaaggggaaagcaccaacacgcactgattttttgggacaccagtgtgctacaaaaacacatattctctataagaaaaattagtggcccccaaggcttttattagaaggagtccttccaacacacgcacaaacctctagggagttttgttcctgggggaccatataccacctcggggtgacgcaaactgagagagggcaaatatttcctgggtgcaacccacacttctcttctttggggacaaacgtggggttccttcaaattaccccttgatcacattacggcgctccagattccgacgataaaagagccctataaaaacaaggaagcggcgggagggagggttgtgagagatcatccacccggacaagagggaggaacaccccaattagcagtattctcatgaagagggccatacccggagagcacaaaaccatcctcttgagatgtcagagcagaagaggaggggcatccccaaaaaaacgacgaggagccaacgagcggggagggcggcagcactctatcatctaacacagcgacatcatacatagcaagaagtactaactcggggagagacagtgatacaaccaagcgggacgtacgcgagagtccatgtgcgtaagaaactacttatactgtcgtctctcagccagagtccaga

SEQ ID NO: 664150 - DNA, 1658 bp, Homo sapiens
tttttttttttattcggttcagtctaatccttttggtagtcactcattaggccagaactttagggcttaggagtgagtgatttaattaagaagggagtgcacattaacttatttagtgtggcgaggtatagtgtgttgtgtagggctctcagtggttaggggttaaaagggagggacaatttctagaactccaaatataatataagaagagggtaaatagccatactataagaagagaaattcttctcctcaccgctataagcgaggtgtacaacctctcgcctttcccacacccttatactatacaccattataagcgaacaaaatacacccacacccccgagtgtctctcgagcgcctctatactctcacagctctccacagcgcaccatatataagtgtgtgtagtagaacgagcggggatctctgtgtctatataacagtcattgcgccggatttcaccaacccccctataaggcgagaacacaatatatgcccacacctataaatctccacaaagagctttcatagagccagctatagtggcttatgagggggcgcgctataaatacaagcacagctctgcgtggtctgcgagcagacgaggtctctgtgagcgcccccgctcctttaccagacacaaaggagtgcgatcccctctcgaaacaacacaaatttgcggatcagccccgttttctgctcaccacatgctactacaagagatctccaaagcctatacggcgacacccctccaacatacaatataaggtgtactaaccaaaggctcgccgggagcatattcaacagcgacaagcaccccaaacgatgcctataagaaccatttcttcgcggtgtgcacaccaatctttggtgtgtagccccacaagcggccccctgttgtcctttctacaacgaggaggcccccaacgtaaacacatacataaattgtcagtaaagtggtggtcggagccctgccggcggggggggtgtccaccactatgcctgaaacgtccgcgaagcacaaaagccgctcttttatacacccacacggtggagcagcaaaacgagaaattattcttctgcggcagaacaaaaaacatatctcaggggggaagggggaaccggtggcgcttcgaaaacacacagccgcaatataaccccctttcagttaccaatgctctttcgcacataaacagacacacacaccactaagaccaaagacaagaaccatacgatacaacgacatagcacacaccagccgacacgacccgacaagaggcggggcgggggccggcgcagcacactaaactaaaaaagaacaagcacacccccaacagaagaaggtggcgagcccacacaacggtatactaaccgagccgaccaccacccagcaagtcagttatggctgtgtgcacacacaaacagcggcgggacgacgccacccaccgacacaagagagagaagcacgagcgcgagctactcatatacatagcaaacagcagcaaacagaaacaacgaggcagccgacggcagagattagtcaaacaaaacatcagcgctgacacagtaatcggcaggggacgaacaaaccagctgactaccacgccgggtggacaacccaccttagcgaagagcaaggacaaccaactacaccgagg

SEQ ID NO: 664151 - DNA, 622 bp, Homo sapiens
tcttgtggggggacatctgtattaatgggaggaccaaagtagaggagggctccaatgtgggggtgggctggggcaggaacgggcgggattgggggcagggcctaagaacccggaaagtgtgcaaaacaccccaacccccaagaggtctgcccttgcaagtgctatgcagctgtgccagggcagggggctacagggaactgaggctctccgaggctggctgggacaacactctccctctccccaaaatatgggcccccaagaagccggccagtgtggctctccactgtggcatctggggaccacccagtgtaacacaggccgggcacatctatcccctaatctggacacgggttctcccctgggagagaccctctgtgtcaggctatgtgtcccatggggagatcttgggtccctgagatgtgatgtgagaccgtgtaagagatctcccaggggggaacaccctactgtgcctctctccgagaggttcccgccaaggggagaggtgtgcaacattacattcacatcccgcaagaatgtggaggggcacgtttgggccccaatttggggggcaagacggcatggggcgttggggcgcccggtgggagggtggcaggggtgtggt

SEQ ID NO: 664152 - DNA, 715 bp, Homo sapiens
gtatgggcttagacaaatgtatgatgatatctacaattatggaatcatacagaatagtttcactgccctaaaacttctctatgcttcacctgttcatccctttcttccctaatcccctggcaaccactttaaaaaaaaaattaggttcagggggtacatgtgcaggtaaactcgtgacaagggggtttgttatacagattatttagtgacccaggtactaagcctagtacccaatagttacttttctggtcctgtcccttttcccaccctccaccctcaggtaggccccagtatgttattcctttgtgtccatgttatttcactcccacttgtgagaacatggaatatttggtttcctgttcctatgttagttgttaaggataatggctccagccccatccatgttcctgcaaaggacatgatctttctttggcaaccactttttactgtcgccatagttcttccttttctagaatgtcatatggaatcatatagtatgtagccttttcagactggcttctttcacttaataatatgcaattaaggttcctccatgtccattttcatggcttaatagtgcatctatttttagcactgaataatactccattgtctagatgaatagtttatccattcacctattgaaagacttcttgtgtggtttccaagtttggcacttatgaataaagtgttgtaaccatcaaaaaacaaaaaa

SEQ ID NO: 664153 - DNA, 402 bp, Homo sapiens
gccggaccggcttactgaggcagaggcgggagaatggcatgaacccaggaggcggagctagcactgagctgacatcgtgccactgcactgcagcctgggcgacaggccaagactccgtctcaaaaaaaaaaaaaaaaaaaagtttgcttctaaaccccttggttctggcaggtgtctttccctcctttccttacgggcccaaaggtttttaattaaactttccttcctgggtcctcaaaggtaggctctggatctaacaagtgtatggggggggcggccacttaaattgggattccctataagtatttgggtggtatcccgggcctcaaagaaaacgcggggggatcctctaagagtcaccctggcgggcttgcaacctggggcttggggccgtcgtttacc

SEQ ID NO: 664154 - DNA, 915 bp, Homo sapiens
  misc_feature (457)..(457): n is a, c, g, or t
tcgcaaactcttctaaggtttcgcatggctcggtaccctttgtcgcccgtctaaaccccatgggtgtgacacaccacgtgtttggccgacccatttcctctggcccccccagcgagatgttgtgccaacggcggcaaaactttgatgttgggccacacttatctgcgctgcctaaacacatctgcagtgtactgtcccccgccgcgcccctcttcatccccccgtggatagagcagtagcgctggtttctgcttatccaaggggacaccacagtcaagcccgcaacccattctattgcaataccacacaatattggtcacaagagtaccacaactgtggcaggaccaccaatggaaggacttttcttcccccaaagaagaatgcttaaagaactccctttgggccacctaatataaatgaaaaccacttctgttagtaatatacaatgttgtaaaangctgcactcacgtctcctggaagaaaccaacgctggtgatagtagcacccgcactatgcatgtttatgagacagagtttctactccgcaacacacactgttcctgctaattgcttgcgcgcacacttcccccacttgttactacactcacgtttttcggccagagtatcttccctcagaagcacaccgaatctcttagtggggggacactcgctaactactcgcaggcgtggcttctttgatacattctgtgccccgaaatggctgtaaaatgcagggcgggggaagtcatccccagcagagactcacctccagacaacacgccccgggcggttttaattcagcctcccgtgatgcaatcgcaagaacgcccaccacctctgacgcagccttcaaggaagctggcgattcattattatgggcgcccgctcataatctcacccaatcaaaacaaagcca

SEQ ID NO: 664155 - DNA, 660 bp, Homo sapiens
  misc_feature (541)..(541): n is a, c, g, or t
  misc_feature (658)..(658): n is a, c, g, or t
  misc_feature (660)..(660): n is a, c, g, or t
ggtggtctcctcactatgatggttttatttgctgtgcaggaagctttttaacttgatgtgatcccatttgcccaggcatgtcccagagagtttccccaatgttttcttttagtggtttcatagttggaggtcttagatggaggtctttaatctatttgattgattttgtacatggtgagagataggggtccagtttcatttttctgcatatggagttccagttttcccagcaccatttattgaagaaactgtcctctccccaagatatagtccttggcaccttgcgccaaaaaaaaaaaaaaaaaaaaaaaaaaaaaattgtggtgggcgcggcgcctggggcctaagagaaaaaggttttaaagaacccatccgtgtgggggcggcggggcgcccacgatagtggtatgtgtgagaccccgggcgccaaaaagcgcgcgtcccaaaaggagaaccccggggcgcacgaaccacagggggctggggttctcctgaccaaattaaaaaaagcggcgccggggcgaaccacgcgagggcgttntgggaaacaaccttcaagaggggagcgtcgggaggggaccataacaggcactctacatccagccgggggggtcacaggcagaggccagaaaacaaattagcccgccgcagggagaangn

SEQ ID NO: 664156 - DNA, 880 bp, Homo sapiens
  misc_feature (58)..(58): n is a, c, g, or t
  misc_feature (95)..(95): n is a, c, g, or t
  misc_feature (138)..(138): n is a, c, g, or t
  misc_feature (156)..(156): n is a, c, g, or t
  misc_feature (161)..(161): n is a, c, g, or t
  misc_feature (184)..(184): n is a, c, g, or t
  misc_feature (224)..(224): n is a, c, g, or t
  misc_feature (299)..(299): n is a, c, g, or t
  misc_feature (326)..(326): n is a, c, g, or t
  misc_feature (349)..(349): n is a, c, g, or t
  misc_feature (373)..(373): n is a, c, g, or t
  misc_feature (376)..(376): n is a, c, g, or t
  misc_feature (408)..(409): n is a, c, g, or t
  misc_feature (451)..(451): n is a, c, g, or t
  misc_feature (466)..(466): n is a, c, g, or t
  misc_feature (474)..(474): n is a, c, g, or t
  misc_feature (477)..(477): n is a, c, g, or t
  misc_feature (551)..(551): n is a, c, g, or t
  misc_feature (578)..(578): n is a, c, g, or t
  misc_feature (584)..(584): n is a, c, g, or t
  misc_feature (593)..(593): n is a, c, g, or t
  misc_feature (651)..(651): n is a, c, g, or t
  misc_feature (799)..(799): n is a, c, g, or t
  misc_feature (804)..(804): n is a, c, g, or t
  misc_feature (808)..(808): n is a, c, g, or t
  misc_feature (812)..(812): n is a, c, g, or t
  misc_feature (880)..(880): n is a, c, g, or t
acccgagcgagcagacgcggcctggcgcccgccctgcgcactcaccatggcgatgcanttcatcttctcagatacagcggtgcttctgtttgatntctggagtgtccacagtcctgctggcatggccctttcggtgtnggtgctcctgcttctggntgtantgtatgaaggcatcaaggttggnaaagccaagctgctcaaccaggtactgtgaacctgccaanctccatcagccagcagaccatcgcagagacagacggggactctgcaggctcagattcattccctgttggcagaanccaccacaggtgtatttgtgtcacttnggccagtctctaatccatgtcanccaggtggtcatcggctacttcancangctggctgtaatgtcctacaacagctggattnnccttggtgtggtcttgggctctgctgtgggctactacctagnttacccacttctcancacagctnagntggtgaggaacgtgcaggcactgaggctggagggacatggagccccctcttccagacactatacttccaactgncctttcttctgatggctattcctccancttatncccagcccntggaaactttgagctgaagccagcacttgctccctggagttcggaagccattgcagcnaccttccttctcagccagcctacatagggcccaggcatggtcttgtgtcttaagacagctgctgtgaccaaagggagaatggagataacaggggtggcagggttactgagcccatgacaatgcttctctgtgactcaaacaggaattncaaanattnaaancagggagaagggttcttggtgatgcagggatggaactggacacctcagctctctgctttgtgcctatn

SEQ ID NO: 664157 - DNA, 326 bp, Homo sapiens
gagacggggactgagagacaggactagctggatttcccagtccctaagcctagctgggaaggtgaccacatccacctttaaacatggggcttgcaacttagctcacacccaaccaatcagagagctcactaaaatgctaattaggcaaaaacaggaggtaaagaagtagccaatcatctattgcctgggagcacagcgggagggacaaggatcgggatataaacccaggcattcaagccggcaacggcaaccccctttgggtcccctgcctttgtatgggagctctgttttcactctatttcactctattaaatcttgcaactgcg

SEQ ID NO: 664158 - DNA, 555 bp, Homo sapiens
tagaaaaaagccgctctcacctcccgtacactaaaggtgtattatactatcttgtgtgctaacttacttagagatcctgtacttaagataggggatatgtaagctagctcaagctagcttttaggacaatcactttgtctaactcagaattatccctaagaagaaatctggtcttgttacacaacaaacttttattttgtgctcacctaagtttcagactccactactctcacagctattttgataacaatgacactagaacacttcactccatttcatcattgtttttgcatgaatatcatacaaatcagttagttcttaggtcaagggctaactacttctgggtctttcgccattaagttcacattataattagtgccagaattttagcaacttcacagatcgtgtattgacatttcttaaataacgcttcagatattattgctttagtgcttttttgtattggttaaaactgtacatttaacattgttatgttcctattttttacaattaatagtttgtatattttaaaataaattagtcgttaaaagtcaa

SEQ ID NO: 664159 - DNA, 303 bp, Homo sapiens
tgagacagggtcttactctgtcacccaggcaggagtgcaatggtgagatctcggctcactgcagccttggcctcccaggctcaagcaattctcgtacctcagcctcccaagtagctgggactacaagggcacaccaccacgcccagctaatttttgtattttaggtaaagacagggttttgccatgttgcccaggctggtctcaaacccctgggctcatgcctcggcctcccaaagtgctaggattacaggcgcaaacttttcttaagtatgaaattatttcaaaatagaaaggtcgtcgacg

SEQ ID NO: 664160 - DNA, 779 bp, Homo sapiens
gctcatcaggacgggatgcttcaagatttaagtgcaggcgtcttcttccctccttgttcacaacacagaacattagctcaggtacctgacaatgatgagcagttgttccagactatcaggctgaaagttggcttttcatggcctcccactgaaaatcaagaaagaaccccacagcccatgttcagaactcgggtctgcttgcagtcaagagcagccctttaaattcagctatggagaaaagtgcctgtacaatgtcagtgcctatgatcagaagccacaagtgggaatgaggccctccaatcccccgacaccatccagcactccagtgtccccactacaccatgcatctccaaacacagctcatactccgaaacctgaccgggccttcccagctcacctccctccttctcagtccataccagacagcacctaccccatggaccacagatttcgccgccagctttctgaaccctgtaattcttttcctcctttgccgacaatgccaagggaagggcgtcctatgtaccaacgccagatgtctgagccaaacatccccttcccacacaaggctttaagcaggagtaccacgacccagtctatgaacataccaccatggttggcggtgcagccagccaaagttccccctcctttgatgatcaaacaggaacccagagatttgcaatatgactcagaaggtgctagctgcaatccattatatgacggcagaaggcttccgggtcattcaagcagaacagaacgctgctgtttgagaaggtccg

SEQ ID NO: 664161 - DNA, 501 bp, Homo sapiens
  misc_feature (1)..(1): n is a, c, g, or t
ntaggtcttgtaacggaaaggtgtccctatccagaccccaagagagcattcttggatctcttgcaagatagaatttgaggcgaatccatagagtaagcttagtgatgtgtgtcagacctctgagcccaagcaaagccatcatatcccctgtgacctgcatgtatacatccagatggcctgaagcaagtgaagaatcacaaaagaagtgaaaagggccggttcctgccttaactgatgacattccaccattgtgatttgttcctgccccaccttaactgagcgattaacctgtgaacttccttctcctggctcagaagcttccccactgagcaccttgtgacccccgcccctgcctgccatagaacaaccccctttgattgtaattttcctttacctacccaaatcctataaaacggccccacccctatctcccttcgctgacactctctttggactcagcctgcctgcacctaggtgattaaaaagctttattgctcacgc

SEQ ID NO: 664162 - DNA, 575 bp, Homo sapiens
taacccctccttagcttttgcgctcaaaaaccaaattaaacccccccccccttgtaaagggggggcgggaaaaaagcaaaaacgcacaaacccgccgggaaaccaccaggtccggccccccgcaattaatcgcccgggagtgggattagggtttacatcgtgccccgtgttggctggggctggagaggaggggggagcacccgggggggcaagggccacttgagccccccatgggagaagctcagagggaagtgtgaaaaaggccacgttgccgcccgggctccggggagacagtggagtggtccccagaagtccgtgaggccgaaggggggggttggagcagggtacctccctacgggtgctcacgagagggtgaccctcgaagaggccaacagagaggggagcaacaggagatagcgcctgaagcgatgccccgaagggaaagggcgcaaaaccagggtgtactacaacaggagggggtaccaaacagggcagggcacagggatgcaccgccataccgaaaacatagagagaaacccaccaccaactcccaacggagaacatttatgccagac

SEQ ID NO: 664163 - DNA, 235 bp, Homo sapiens
taagtctcgatgatgtcatgaggtgcacaagctggtcatgtgcgggtaaaggatgctggtgatggagagaacttagttatgatcggttcctacattgtctgagtgttggccagataggctggtactccctggactttctagcagctgaagtctatgccttgggggtgaacgatgagggagagcagctagaagaggggcacacctctcttgtttaggcttccaaggaaaatcagaa

SEQ ID NO: 664164 - DNA, 107 bp, Homo sapiens
tttgatgccccttttaagtgccattgtaccgggtagcatagatgaatgtttaccaaaggactatgtattccaactcatgggtgtatatatattgcttggaagttttg

SEQ ID NO: 664165 - DNA, 390 bp, Homo sapiens
cacgagggggggtcctacgctgaaggaaggagctgaggactgctagcatgggaaccctggattgcctggtttgccaggctctatgggagacatggtgaattatgatgatatcaagaggtttatcagacaagagatcattaaactgtttgatgagaggatggcttactacacctctaggatgcagttccccatggaggtggcagcagctccaggccggccagggcctccagggaaggatggcgccccatggcggccaggtgctccagggtcacctgggctccctggtcagataggccgagaaggacgccagggtttgccaggaatgagaggattgcctggtaccaaaggtgataagggagacattggtgttggcattgcaggagaaaatgg

SEQ ID NO: 664166 - DNA, 161 bp, Homo sapiens
gaagtgtcttggagcgcttcagattcagctttaaaggccaggacggggccacacggtggctgggctgtggctcgtcccagtggcggcacgtcctttggcgtctctaatgtctgcagcttaagggctggcacttttttaaatattaaaatgggtgtattttt

SEQ ID NO: 664167 - DNA, 734 bp, Homo sapiens
  misc_feature (50)..(50): n is a, c, g, or t
  misc_feature (62)..(62): n is a, c, g, or t
  misc_feature (96)..(96): n is a, c, g, or t
  misc_feature (120)..(120): n is a, c, g, or t
  misc_feature (143)..(143): n is a, c, g, or t
  misc_feature (152)..(152): n is a, c, g, or t
  misc_feature (162)..(162): n is a, c, g, or t
  misc_feature (199)..(200): n is a, c, g, or t
  misc_feature (209)..(209): n is a, c, g, or t
  misc_feature (214)..(214): n is a, c, g, or t
  misc_feature (216)..(218): n is a, c, g, or t
  misc_feature (231)..(232): n is a, c, g, or t
  misc_feature (277)..(277): n is a, c, g, or t
  misc_feature (299)..(299): n is a, c, g, or t
  misc_feature (328)..(328): n is a, c, g, or t
  misc_feature (360)..(360): n is a, c, g, or t
  misc_feature (364)..(364): n is a, c, g, or t
  misc_feature (603)..(603): n is a, c, g, or t
  misc_feature (610)..(610): n is a, c, g, or t
  misc_feature (620)..(620): n is a, c, g, or t
  misc_feature (726)..(726): n is a, c, g, or t
tcaatggtacagtcaaacatcacatgtacagaacacccaatttcgatgcnctgcaattatangataaaataaaataaaatccattttcagcaaacnaaaatcaaaacattaaggatcccngaaatattcttaaaccctaatgngatttcacnggactccagncattttgtagtgggacattcacaatatgaccctattnncccagtctnggccncnnngggggccggatgnntggccgcatcggacactctgacaaaaaatggtaaccagtttttgntctgaaaactcctcttaatttngctctgaacacatcaatcaagcttttggnatgcatcctcctccttgcccctcatattttanaccnactgttgttcacagtacagtttgcacgacatctttgttcaaacatagctcagtttttctggcaccaaagcaaatttgggttaggttcgtgtatgcagagacaacctacggggagggcccataaggcaccctccacttttgcctgaggagatacgaaagcagaagtaatgggatctgtacttggggcacagagagggtttcagaggatccttgtgaaacactagttaaaagatgacgagnggggagnagtgcgaggnaagaaggaaattagtctgactggctttctgtcctgcaccattgattcaatggagactggggggaggaaatggaagactagggttggagatgggatgggtggggcanggatggaa

SEQ ID NO: 664168 - DNA, 359 bp, Homo sapiens
atcctcttaatgcgagtaatgcgaatgtgtttagaagtggctcttctaggggattaagcgggttaatgcctgttgggggccagtgccctccaagttgggggtgtagggtatagtctgaagtggtaaaaggctcagaaaattcgtgcgtgcacagttggtgtgtggtgcccttggtatgtgctttctcgtgttacttggcgccctcattggtatatggtaagtgtgttggttagtagcctatagtatgagagagcgtatatgaagtgaaatgtgaatctcacatgttgagcccgagagtgtctttaggaggtctgagagggcccgtgttagggctcatggtctgggtttccccgcgtgcc

SEQ ID NO: 664169 - DNA, 1062 bp, Homo sapiens
tgggaattaaaaacccggtttttttttcccagggccctagggcccaaccggcccccccggggggaaagggggcggggggccctttcccccccttagggcccccccccccagcgggaccgggcccccgtggttggggcccgccctaattttggtgaagggagacccgtgtgcccttgattgcgaccaaaacagatgcggacgctggggcgaccacccacttgtgtcggtcgcgagcgttataagcgatctcccctctgtagtgacgagggcgagggggggggggtgggctcctagagcgtctccccactggaaaaagaggggcatcgcctaggccacgaagtgacaaccgccacctaaccaccgcgaggaaacaaacggtcgtcgcggggcagaaaaaaaatgaagaggtgcccaaacgaggccgaaaaccgggcgcgcggggtttcccccccgcggggtcgaaccagggccacacagcaaaccgcgggaccaccatgaagaggggtctcgagaaaagcgagaaaccccgggtagtaacagacaacgtctcccacatgtgtgaagagaatggagcgggggacatcgacaaacagacggaacgggacggggagttcaccacaccgatatcgaggagaccgaacgcctccaccaacacagcgccgtcaaaacacccccacaggcgaaccacctgacgccgaccaacggttcgcagagaacaccaggcgtggtgcaacgacgcaaaagcacacacacaacaaaacatcgctagacagccaccgggcgacatgtcacgacgcagcggcgcgcgaccacctatgacaaacggtcaggacgacccatgcggacacggccagcaccacacggtgcatgccagaccgggcccacaagggggaaacacgtaccagcctgcaacattggcacgcgcatcaagtggcccacaccaaggggagacgaccaaccgccaaaccgccagcaagccccacaacccacgggtggaccgcgccacaccgtgacacccaacccacggtaccccggtacaggccagcgcagacctcgcctcgc

SEQ ID NO: 664170 - DNA, 406 bp, Homo sapiens
gcagtagcttgatctccggctcactgcaacgtcactcccaggtcatgaagtagctgggattacaggcacctgccaccatgccagacgtgttggccaggctggtctccaactcctgaccttgtgatatatatctatatctatctatcgctctctctctctctctctctctctctctctctctctccatctataaagcccaaaatatttgtggtcccgagcattttgtataaagggtactcaaagtgtagaaggcaaacatgaaaaggctaatacagattctctaacctacaagttctaattctaaatgaatgtctcattctacgagagtacactaagtatatacgtgatgattgcttttttacacccactccaatggtccagagctatctctaatatgaaaatactt

SEQ ID NO: 664171 - DNA, 925 bp, Homo sapiens
tgggggtaagggaaaatttaatttttccctaaaaaaaaaagggggttgggggggcccaagggtccccaaaaaaaaaaaaaaaccaaaatttggggtgtttcttcttctaaaaggaacattcaaaaactgtggtcaaaaaaaacaactcttctaattattatctatagaataaagaatggaaatcttaccttctttcggaagggagtataagtggtacaaacacgcgtttctcctatcatcagaggagaggtatacgaccaccgcgggttgttgttggactcccaagaactactatcgactaaaacaagagaggaaacgtgggggtccccagacgggggggtgaatttccaacccgttaaacacaccgcgcggaagaaacacaaaacaggtgggggtcgctgcggcgagacgccctctctatagagagaaaacatctccacgagaaaagacctctacgccacccgtgaggagcaaggtattatacatacccgcgggcagacagaaactcagagaggggcgtggtgggggcccccaaaaagaaattccaaccaagagcaacaaacaaggatgttgttttctcccccaaacaaaagcacgggtgtatactcaccctatcaagccccaggaaagaatgggggaccacaacgcgccacaaggtttaccacaaggggggtgagcaccccgcccaagaatgtttgtctgtcggggtggttatacaacaaaaacttacgcggggggaacaacagtgtaaaagctcaaacaacaacagcgggctacaaaaaaacacacaacacagagtggtgttactacaaccccggggggggtaaatataatcaaataaaagagtggctctgaggagaaacatttcttgagcaagggagtttcactactagctcggaagaggcaacaactgggggtgtgctgt

SEQ ID NO: 664172 - DNA, 205 bp, Homo sapiens
  misc_feature (6)..(6): n is a, c, g, or t
cccaantaagctactatcctcattagtagccagacctgagcgttacacagggttgcgaacacacctcggcttggctactaatgaggatagtagcttattggccagcgggtgccatgggccagcgggcccgctggcccaatgccattgaggttgatggacgcctcctcctcactctggcctccagacaggaaggtgatcccagtga

SEQ ID NO: 664173 - DNA, 279 bp, Homo sapiens
tcccccgggggggaaagggggcctttttcctcccccccccccccggggggggggggtttaaaaaaaaccccttttttttggggggggggggggggccttttttttcccccaaacccctttttttgccggggtttgggggggggttttttcccggcccccggggctccccccaaatttaagagggggaggtgggggggtttttttttttgggggttggggggggttttttccggttttggggggttttggccccaaaaaatattttatttttccccccca

SEQ ID NO: 664174 - DNA, 421 bp, Homo sapiens
  misc_feature (24)..(24): n is a, c, g, or t
  misc_feature (69)..(69): n is a, c, g, or t
  misc_feature (84)..(84): n is a, c, g, or t
  misc_feature (135)..(135): n is a, c, g, or t
  misc_feature (157)..(157): n is a, c, g, or t
  misc_feature (223)..(223): n is a, c, g, or t
  misc_feature (267)..(267): n is a, c, g, or t
atcattgtctggttgtcatggttnactttagatgtaaacttgactggattaaggattccctaaagtgtnaaggcctctgagccnaagctaagccatcatatcccctgtgacctgcatgtacacatccagatggcnggttcctgccttaactgacganattccaccacaaaagaagtgaaaatggcctgttcctgccttaactgatgacattatcttgtgaaantccttctcctggctcatcctggctccaaagctcccccactgagnaccttgtgacccccactcctgcccaccagagaacaaccccctttgactgtaattttcctttaccttcccaaatcttataaaatggccccaccccatatccctttgctgactttcttttcagactcagccctcctgcaaccaagttgattaaaag

SEQ ID NO: 664175 - DNA, 232 bp, Homo sapiens
caacaagcatacatgactaacacccttaattccatccaccctcctcatcccataggaggcctgcccccgactaacggcttatagcccaaaatgggccatatatcgaagaattcacaacaaaacaatagcactcatcatccccaccatcactagccaccatcacacctccttaaccacatacttctaccatacagcctaatctacaccacccaccaccactaagattatgtga

SEQ ID NO: 664176 - DNA, 816 bp, Homo sapiens
  misc_feature (202)..(202): n is a, c, g, or t
  misc_feature (237)..(237): n is a, c, g, or t
  misc_feature (333)..(333): n is a, c, g, or t
  misc_feature (565)..(565): n is a, c, g, or t
  misc_feature (612)..(612): n is a, c, g, or t
  misc_feature (622)..(622): n is a, c, g, or t
  misc_feature (692)..(692): n is a, c, g, or t
  misc_feature (745)..(745): n is a, c, g, or t
  misc_feature (786)..(786): n is a, c, g, or t
catccagcgagcatctgccgccgcgccgccgccaccctcccagagagcactggccaccgctccaccatcacttgcccagagtttgggccaccgcccgccgccaccagcccagagagcatcggcccctgtctgctgctcgcgccttgagatgtcacacgtcccccttgctcgcctctggctggtactgctcctgctgactgtncaggtcggcgtgacagccggcgctccgtggcagtncgcgccctgctccgccgagaagctcgcgctctgcccgccggtgtccgcctcgtgctcggaggtcacccggtccgccggctgcggctgttgcccgangtacgccctgcctcttgtcgccgcgtacgggtggcgactgcacgctgcgcccggggactcagttgccgcgcgctgccggaggagcagcaacctctgcacgccctcacccgcggccaaggcgcctgcgtgcaggagtctgacgcctccgctccccatgctgcagaggcagggagccctgaaagcccagagagcacggagataactgaggaggagctcctggataatttccatntgatggccccttctgaagaggatcattccatcctttgggacgccatnagtacctatnatggctcgaaggctctccatgtcaccaacatcaaaaaatggaaggagccctgccgaatagaactctacanagtcgtagagagtttagccaaggcacaggagacatcaggagaagaaatttccnaattttacctgccaaactgcaacaagaatggattttatcanagcagacagtgtgagacatccatggatgga

SEQ ID NO: 664177 - DNA, 949 bp, Homo sapiens
ggcggccgcccgcgcccgatccgcgaaggcgcccgccagatgcgcccagatatgagggatgatcagtagcaccatccaggccggcccgagtgcaggacaaccagaatcttggggccaacatgtgctgagagaaggtcactcacgtgatagtagcgatggctatcagtagcaccctagtcggctgacatacagtgaggctgactcgtgacattgcgaagactggtaggcggatcaagctgtctacatacgatacgaggccgtctttcgtcaacaagtacggtgcctcgagccattctggtgcgacctggaacccgggaaccatggacagtgtccgttcaggggccttatggacgatctcttcaggcctgactagatttcatctttggtcagtagtgtgggccgagtcaataaactgggccaagggtcactacacgtgagggggcggagctggatggattcggtcctggatgtggctgcggaagggaggtgtgaaagacatgcgagctgccttgggaggggtgttcacaaacgtaaacgcatgtcggcatgtggtgggccgcgccatggggcctccgggtgcaatgcgggcgaccgattgtcgtccatcatgaagagggtagcggtgcatccgatggtagtgcctggaactcgccagtcaatgaatcaaccattcaagtgcttgatggtggcttcgagcagaaaggatgtctaagacaaacggtgtgtcagagggccctacctaaagacctcgttatgtgtccattctaagcaaggcatggatgcgaagaagcaacggggatggagacccataggtgcaattccgactgaacgtaggccgcatcttgggagaactctagtgattaccgtgtccctgtccactgttggggcgaagacccaagctaacggggaaaccttcaaaacaaactgggtaatcggaccaaccattgag

SEQ ID NO: 664178 - DNA, 90 bp, Homo sapiens
  misc_feature (47)..(47): n is a, c, g, or t
ggatttgctggtgcagtacaactaggcttaatagggacatggaaagngaaaaacagttaccagccaatacaaaaacataccaaaaaaaaa

SEQ ID NO: 664179 - DNA, 100 bp, Homo sapiens
atcccgcctcgggggccggtgtctgccctgtcgggtgttttccgtgtgcctgcgggtttactgttgttcctgtggtgggtgacgtgtccccactgtgctg

SEQ ID NO: 664180 - DNA, 188 bp, Homo sapiens
cgaatcttctgcatgagctgagattctgttcgaccttgacgctgcgtctgctacgacattgcagtggctcgctacacgttctattccaccggaccgcagttctgtgccgattacctgggacgaccacgttggagcgatcattgcggagcccgggtctgccggtgcccggattgcacccgctatgggga

SEQ ID NO: 664181 - DNA, 114 bp, Homo sapiens
gtggagattgtccctggaagccacctggagtggatcccagaccgtgccctcaccttgctcttctgcctgctttcctgcatgctctccagtctccaaccagtaagggcaaaccag

SEQ ID NO: 664182 - DNA, 573 bp, Homo sapiens
  misc_feature (573)..(573): n is a, c, g, or t
ttctgggctctggactccacggatgcgtgggcagaggaatgtgggctatgtagtcataataaattaggacacaaaaaaaaaaaaaaaaaaaaaaaaaaaaaaaaaaaaaaaaaaaaaaaaaaaaaaaaaaaaaaaaaaaaaaaaaaaaaaaaaaaaaaaaaaaaaaaaaaggagggggggcgggactgctagatgttgtctctctctctcgagagtgggggagctatagttgtgctcgcccaccacacacttatttttattaaaaagacggtcgacgcctaattagtagagtgtcttcttatatttacgaagaggagcacgcgcggcgcgcgcgctcgcttatatccaaacacacgcagcgacccgggtgcgaagagagaacacacacacgcgccgcccgaccggggagcgctaccacccatcggaggaggagcgcacaacaccccccatactccggcgggaggggtgcgagaaccaacctaaagagagcgagacacacaaacacaccgccccgccgaagcaagcattcagacagagcaccgcccgcagcggggcgacaacacaacgtaccan

SEQ ID NO: 664183 - DNA, 490 bp, Homo sapiens
  misc_feature (181)..(181): n is a, c, g, or t
aagggcccccccccccccagggtcttttttgggcggcggggggggaggcccctcttttttttccacaccacaaagggggccccccgccctggcctctggttttgggggggtgtgccaattttttttaaaaccccccgcgcccaacccccccctttggggggggggcccgtgcgccccctcnaaatttttggggcccggtccccattttaaggggggtcccccccccccccccgggggttttttttttgggggggccggtggggggggggcccccccttttttttttccccccccccaaaggggggaccccccccccggttctgggccctgggggggggggttttttttttccccccgggccttcccggggcccggggggggcttttttttcccctttacccttttcccccccttttgtttttgaattccccggttccggttttgctggccccgtttccaatttttttttggggttttggggcggggggta

SEQ ID NO: 664184 - DNA, 436 bp, Homo sapiens
  misc_feature (368)..(368): n is a, c, g, or t
  misc_feature (409)..(409): n is a, c, g, or t
  misc_feature (422)..(422): n is a, c, g, or t
tgaaaactggccatttatggtcagaaattatctgccctaccttgtttgactgtaggtcataagacccctattccagagagggacctgccccatacccagaaggaaggaatgctgctcagagaggccaagaagaatctggacagacaggccttgctgggtttccctactctgtttactatcattagatcctacccttcatgtccattcatttctacaaggctgtccatactttatagaaccttaaaaacaatgggacaatttcccctgtatctttagggccttcattttgaaggggctcccatgtcacgtacaactgtggtccaaataatttttttttcttctatttcatctggcctttagtcagtggntttcaggcaaaccttcagagggtgaggggggaggttttccntttactgtgtaangtaattcagggatt

SEQ ID NO: 664185 - DNA, 685 bp, Homo sapiens
gatctaactcgggctacatagatactatattattatcagaacactacttaaaactcttcactaccagattaggatggagctagatagatagatagatagatagatagatagatagatagatgtggttttgtataattttacccttctaggacaattttttatgaattctacgtttctcttaattcagcacagacactcgtagtgtcattgttattcttaaagctagcgtaacacttgattcacatcagcattagtttggtttttttctaatcactaaaacttctctaatcactaaacactcatgaaagaatgtaaatcatggaacatgtagctttttaaacttatgtaacacgcagtttttaaaagataaaatatctttttccacagacaagtacctacatctgctcttactagaaatcttaaccctttcatctaagtatagtttgctctcacccagacatactcctgcctggccaagcactacatcttttatcctggaccaggccaaattattccattaccaatctttggaccatataatgtaatacagctcatgagactagatctatggaactctgaaatgaagcaatccagatgtccatatgtagcaaataccaagctatctgtagattaattcgctagataatatatgagtaccaacacattcagatcggggatctctaag

SEQ ID NO: 664186 - DNA, 286 bp, Homo sapiens
gtgatcgtagaatacgagcaattcagactctgttgcccagctatgtaacacacacatggacactttcaaagtgatatgtcaacagatacagagtaggcgtactaaagtggatactctagggaaagtgactgctacttaaggtggatcaacagcagagagatgatgtctcctgaggcaaaatcaatattcatagcatggtagaaacaactgccttttggtgggctggaatcataacagggagaagtggagatattcttagggatcagggtacgagctcgaatcgtat

SEQ ID NO: 664187 - DNA, 385 bp, Homo sapiens
  misc_feature (10)..(10): n is a, c, g, or t
  misc_feature (15)..(15): n is a, c, g, or t
  misc_feature (95)..(95): n is a, c, g, or t
  misc_feature (151)..(151): n is a, c, g, or t
  misc_feature (164)..(164): n is a, c, g, or t
  misc_feature (366)..(366): n is a, c, g, or t
gcccctaacnccttnaatcattcctaatatttcctgatgaagtgggatattatccccaaaatggaatttttaggtaatccttaaaattacattgntcaagctgggctcggtggcctcacatctgtaatccccagcactttgggaggctgancgtgggcagatcncctgagaggtcaggagtttgagaccagcctggccaacatggtgaaaccccatctctactaaaaatacaaaaattagctggacatggtggtgtgcatctgtagtcccagctacttgagagctgaagccagagaattgcttgagaacctgggaggcggaggttgcagtgagccgagagttgccactgcactccagcttgggggncagagcaagactccatctc

SEQ ID NO: 664188 - DNA, 1303 bp, Homo sapiens
cccggggcaggaggggaggccaggaagccggaaggaaactcctgaagctttttacggcaatgacacgaagacaaaagatgtgctgcgttgctctgcggtctggtccaagaagcttcagcgtcccaggagcaccagacagatgatctctctgttctagcagctggttccagggagcacgaatccgccaaggcactgagtttgtaagtgcaggtctctaaagagaattgtaggagaagctgctaacagtgggtggcaaagctctgttagaaacatagaagatatgaaaccgtgttttatggggagaacttataagcagttgggaggaggtcttgccacgggtccgatcacacagcgctcgcgctggaaattggcaaaggagtcataagattatccaatctctaaccaggatggatagatagatcgaccaaaagacggatgagaaggggatggccatatttgctccaatggctgctgggaagctgctaggcatggctcatggcgaactaatcaaaccgacagggagtatctccttaactcgcactccagtcccacgagcttcgtttcgtccacaacgacgacagaatgcagcgtcctagaccagggtataaaactagaaacgcgtgtcacgatagaggattcctcaagctttgatggaagcaactggggaggcttcgtggtggtgtggcttacggatatcgccagagatagccccccatcaatgtctaatttacaccaatgtttctcaatcctacaatcgttttcagtgtgtggcgcacctttttgaaaccaattgacacttcgagagtccctttccgaccgttgtggtaacccctgtggggttggaaaagagctgtcctgggaagagagcctagaggtaacccctaggtgacgaagaccgagattaatacgtcctggggaaacccgttcccctgggaaagaccctcaggcacaagggcgcggaagtactctcaaatgaccctgggggagggttcccttcaaacattccttgttcaacccccttggattggctgactttggcacgccgtccttaggggcctttggcagttctcctcaaaagggacttttcgccgccaagggccaaggccctatgtgttgttcccccccttggttaaaatacggattaaggtcttaaaaaaacctttcccattggttttccaatgcgggtgcctaatcccttttggcccgaatgtcccatttgtctcctgaaacagttcttgggttgtagcaccctttgttgggtgcccccttatttctttatcacggtgaaagaaccgggactccg

SEQ ID NO: 664189 - DNA, 475 bp, Homo sapiens
  misc_feature (456)..(456): n is a, c, g, or t
gcgagcgaatcaaccactgttggctttcctgatcatgtgatatagatcaccacgacgggaatttccatctgcggattctcatggtgagagaaatggatcattagcgccatatggagtacacgtgcgattttctcttaggctacatacattgcggagcaaaatggatatgcataatcggtaccgcgatgtcgtaccaacttacattttgcctgacattaccctatggcaagtggtaaagatctgtacgccttgccacccaacacgttagaggagtatcaacatatgtgagcctgacacccagttgaagaatcagtttgattattagggtgggatattttgtttttcacgtgagaagacatgaagaaattttaaaagataaacatcatataattgtgaaccatcagctgaaaagataaatttgtgttcaatatataggcagaaaaaaattcgcgtcanagatgttgaattgttactt

SEQ ID NO: 664190 - DNA, 352 bp, Homo sapiens
aaagcacacgcataagaatgacagcacaaaacccaccagtataaacacaagcaacatgaagttgatgataggacaaacaatggatatccagatgtacgaggaaagaaaccaccatcgtcaccacggcgcctgtcactccgacgctccactgaagtctcagaccagcgcacgctataagtgtggagataggcctagagaacatcgatcaggtcgataaaccatccaagctgtggggctatgaagtcccgcaacagaaacattggcaaatataattcggtctccatggaattctaagtggaagtccaaatgggtccagagtcctatcttgtggctgtgtggcaagaaaccactc

SEQ ID NO: 664191 - DNA, 936 bp, Homo sapiens
gcgctcttttgggccaaccttgtgtgcgtcaaattttgtgagtcctgggtctcctcgtgtccccttgggctccccaacaccaccccgggtccaccctctggcgccgtgtgagacacaatgtggtcgcgccgaattgtgtatgatttcccctctcgaccttggcgtcttttgatgaccctccccccttcccggcaaggtttctcttccttttcattccccgaggcaggtctgaagcgactttgcgcgcccacatggtgcgcaacttcctcttggggaaaccgcagccccctcttcccctccgcggggacaagcagagcccccagtcctggtcgttccccaggtggacaccccccccctgggggggaagatcttgtcttccccccgggccccccgactgggcgacccccctaggtcccgcggagggcccccaagtgggcccccgggaattcactgaaccaggaacttcttgggggacaaccatcagcatgtttgtctacccctgcgtcgcacgaagcgacgttgtgaccctactagtcccacgagcccattttgtcctacgttgtgaccgctgaaaataccacttttcagatcgcccctgtgattgctgcgggcccgttttgtaaagaagcccctctatatgaggccggcgagcaaccacgccctcggtggaacaacgatgagctcgccacaataatcatcacacggttctgctgtggcaccatataagctaatccacagagtttatgtgaaatcttgtcttcctctatggattaaaacggggggggcaaatattttccatggcgtcttaaagatttgtgaggacatgttcaagaatctcctagttgagtcccgctacagaacttcaatgagctcgaacatcccctcctcccaaagggggttttccacaaaaaggggaaaaggcggccaaaaaaaaca

SEQ ID NO: 664192 - DNA, 386 bp, Homo sapiens
  misc_feature (204)..(204): n is a, c, g, or t
  misc_feature (332)..(332): n is a, c, g, or t
  misc_feature (360)..(360): n is a, c, g, or t
ggggaaatgcataaagcagttcaagagagcagtctgtattccatcatcttcctttttcattccagtccttatttttgtaagtattacttttcctcctccggctacctggactcaaaatctcagttgtctttgacagtttttttcttgtccctgaccaaaaaagaatgatcatacccagaattcaatggttgatattttaagaangtatgttctagtgcttttcacagtgagtctaccatctggctaaaaacaccttgtagacaggcagtggcatttaaaaatgtaggacctatcgcccagtctgacagagcggggcttcagaatctacattnatatcaacctctcttaagcactcccgcngtgtacccagctcactgggcactttc

SEQ ID NO: 664193 - DNA, 312 bp, Homo sapiens
caataggggacacaccagttacttctcatgactgatgccctcatgtacctccgacggaactctgtccattcacgaagacaagttcatcacctctctgctcccatggcatttgcccctatacctcagcgccttgtagcagtcatgtgttatgagatggggagctccaagcaggtgggcatgacccaggggcctggtgaccaggacagacccccactgtccatcacctttcctggccctgtcctctgctaaacttcccacaggccttctgcccgaatcacacagagtatgccctaactctctcaggcctctggc

SEQ ID NO: 664194 - DNA, 435 bp, Homo sapiens
  misc_feature (12)..(12): n is a, c, g, or t
  misc_feature (29)..(29): n is a, c, g, or t
  misc_feature (367)..(367): n is a, c, g, or t
  misc_feature (419)..(419): n is a, c, g, or t
tggcccttggtnggggttggggttactgncctcaagctgggtaattgaaaaataagacatgatttaaaatatcctaggcccataaaagattgttaaaaaataagtacatcccacatgatcaaatatcattcaagtcattaaaaattatgacaaaggcttggcgcggtggccccacgcctgcaatccccagcactttgggaggctgaggtggtggatcacctgaggtcatgagtttgagaccagcctgaccaacatggtgaaaccttgtctctactaaaaatacaaaaattagccaggcgtggtggcgtgtgcttgtaatcccagctactcaggaggctgaggcaggggaatcactagaacccggganggcagaggctgcagtgagccaaggttggaccactgcacttcagcctgggcgncagagcaagatgctct

SEQ ID NO: 664195 - DNA, 585 bp, Homo sapiens
gcgaagggcgaagatctgagacgactgagagccagctatgaccggactatttcttgaaagcgcgatgacaggatgggaggcaatgatttcacatggaaaccacgcactgtgagacaatgcactatatccagatctgccgcaacaactagccgtgaaccctgactctctatccagcacaacataaaacgatcaatccttgcctttagggctgagggcctactgacactgaggctgatagccttgatcttcctcatcataaagagcgtacagaaaatatcaaagggagaggcttaccattttcccagggccatagctgagatgagatcctcttctttatggcaccatggcagatcactccaagccccatgcccgagactctaactcagatccttcagccaaactgtgatccatcccagaggaatcacttacctatggcagaacagctttaaaacttccagaagatgctcagattaaagtaacaaactaactcaacttttacaatgaggctcgaatccatttccactcatctgagacctatcttcacacatgacgtgtcactctcttacaaattgtgcaccaccacct

SEQ ID NO: 664196 - DNA, 839 bp, Homo sapiens
gggcttcccccccgtcatggggccccgttcgaggtacctccgctgcaataatctgcctctcggattatcggcaagctctcatgggtgctctccccctccccccgatgtgatggcgcgacgacatcgatggtggcgtatagaacctatcgagggctcgtctttgattcccccaacggagtgcacgatttttctcgcgcgcacaagtttctcccccttggggtgtactgatcttgtatatgtcgccactcgcgcgccagccgtccttaattgcggcccgctcttgctctcgcccgggaattgcgcgttcccgtcgtagtgtcacccaccttttgtgggttgggcgggattctacttcccctacgaaccgtcgcttcgactccctgcgctttgggcgcgcgtgcccacgaaaaagttggcgtgggggtcgcccactccacatggctgtttgcgcccggtcgtacacacgtgtgtgttatgaagaacaccacgcgacttgtcgtgcatattgactcagctgccccccgcggggggctcctcatcgcactcgtgtgcggcgcgtgtgcgcccagtatgctcgatgtatctcgccccacgcgacccctccttttgttacctgctctcgacacctctttgccatggcccgcgcctctccttgtatggcatctgtatcctccgcgtacgccccgcagggattgcgtcctcccgcgcttaggacgtcggtgagtcaccggagagtttgcatataggtggcgaaccaccatcggctcctgcccttggcgcccgtggtttccatgacgcgcagggcggcaaaaacccgtggatttttcccccacataaca

SEQ ID NO: 664197 - DNA, 446 bp, Homo sapiens
gcgcatgtacccgtgtcgcatctagtaatgccgctacatttaccctgagtttatgtcctggggggggggagataggtgtgtgaatgtagccccatgacaggcagggtgtccctcctatcctgcatgactcgtggcatgaacccggagagccaagaaagtgcacctttgacaatggtgcaccaggtcatggtggcaccatctcccctatggcggtggcatctggggcccttgtacactgggtacaaggaacctgaagtgcaggggagttgagctattgaggccacactgaggacagtccctctcactttgggaaagggagatggcactccggggtctgatgtaccagaattcctctccatggaaggagaggcgaacaccataagatattagagcagagaggggactccgcggccccaggcaaggcttctgtgacaaagatggggaaa

SEQ ID NO: 664198 - DNA, 1531 bp, Homo sapiens
  misc_feature (470)..(470): n is a, c, g, or t
  misc_feature (693)..(693): n is a, c, g, or t
tgggccggggaaatggagggctcggatgttaaaatttctacatgtggggtgtgaaacagggtgattttattttaaaccacaaaacatttcacacaaagacaaaaaagggttcacaaacccttggaagcgggatagtggtgtgggacaaaaatagtttaaaatttgtggcgtgatatgtgtgattatacctataaaaatataggaatttttataaaaatctacaaaaacaaaaaatataccaacgagttataggtgataaatgtgacaattgtggggcgggtttaagtgtctttatagaaaatgttttgtggccctttctctatagagcccttggtgtgcctataagagggggtatatataagcgggtggggtgcgctatattctatactttatagaagggggcaattctccatagtctctatatacacttatacagagagtgtgtgtgtctataaagagtggtgtggtcncctctcgcgcgagggggcattatatataagaggagggagtgtgagcagggcgtattagacaacctcatagaggggggtgtgtctgtgtggtgtaagagtctcctctcaaaaaacagtggtgtgtgaaagagtgtcgacagtgttgttctcgaaaaaaacagggtctcgcgagaaacgtgtgggtataagagaaaacaaaattatagaggtgcgggtatatccncattgtgaggaagattttttatacagacccaccaagcgcgctacaatagaacgaaattaggggcgacaaaaacaaaaaagatctacgaagaggtgacagctccccactacacatatagtggggcgggttttttctacaccaccaggtggggcgaggagatacagtgttacaaaaatcttccgccacgatattattttctttctgaagagaaacaccaacaagtggttaagggggggggtgtcgccttgtggggacataaaacaattactgacaaaagaaatatagcgggcatcattataacaagaggtggtatacataaacaatgggcgtgagcctaaacacgaggggggtaaacaagggggaataaaaacaggtgcggggtacaacctttcgtctggtggtgcacacaaaagtgtgtggggggcaagagcaacacactaatgcaggggagggtcatcgaaccatacttatctacaagaaccggaggtttctttggtgtaaattacaaacaacatactgtgggggcaccccaaaaccagagtggggcggcggggtctcccacacacaagtactacagactggccacagttagcaaagtcaaacgcacttacacaagacaacacacaaacaaacaggggggcgggggccgcgcccactcagaagaaactacatacacccccggcgcgagaggggcgccaccacgaagatatatgacggaacgacaaacgcacgcgaggctcgtccggaggcaaccaacaagcgggcggagaccccaccaacaagagcggaggacgacagacacaaacacgagagagaagcaacggggcgagcagagcta

SEQ ID NO: 664199 - DNA, 454 bp, Homo sapiens
aaccggtgtgaatgcccaagccctctagcatgtagaccaggtcttctgtggccaatgtttcctgatgcccccgtgtgcgtagggacagcctccaagtcctgccacagaagagtccacgaaactcactcccatctcagacaccataaggatggtgaaaccacagtggtggctggggccaagaggccaccgagatgagccttgcaaacctcccaatcgtcggtggcctgaaatactagagtcattcttggcttgggctcatgcattctgtggccatgcacaatcccacagaacgcagacagtgcttctcctttaagttactgtaaaactgtttcctctgccagcagtatctttcctttcatggtgaactctcattcttaaggttccagtctgaaagccaccggctcagggagaccttttctgatcaccagcctaaccccgtcccgaaactgagaca

SEQ ID NO: 664200 - DNA, 207 bp, Homo sapiens
atcgcacacgcacagtaggcgcgatgcaacagagaaaaaaccgaattaacccccaaacaggacttgacgggaagggaaggggggatggggagttgggaagaaggaatcacattttgcaaactgcccactaggggtcaccgtaccctcagaaccgaggctgcagaagtcacatccgcggcggtatgcgctggcggagggtcccagaga

SEQ ID NO: 664201 - DNA, 417 bp, Homo sapiens
cgcatgcaggtgggcacctgtggtcaggagttcgagagcagccttgccatcatggtgaaacaccatctctattaaaaatacaagaaaaggccgggcgtgctggctcacgcctgtaatcccagcactttgggaggccaagacggttggatcacgaggtcaggaattcaagaccagcctggccaagatgctgaaaccccgtctctactaaaaatacaaaacttagccaggcatgatggcacacgcctgtaatccccgctactcgggaggctgaggcaggagaattgcttgaacccgggaggcagaggttgcagtgagccaagattgcaccactgcactccagcctgggcgacagagcaagactctgccacaaaaacaatgtatcagaagacatatctaatcttcacttctgaatgttcc

SEQ ID NO: 664202 - DNA, 139 bp, Homo sapiens
cgcacggcttacgaagggcattgaataaataagtcaaaatcacaaatgacattgacgggatacatagggcaaaagttagtatgagtacttgttatgatacagtacacgcagtcaagaattcctggcttttaatcagagt

SEQ ID NO: 664203 - DNA, 385 bp, Homo sapiens
aaaccagcgtgtaaccactagtataacctgagcgctcagaccgaggagtggggactgtattaagaagtggacatcgtctggcaggagccctggtgccaccccgtggcaggatccagtcccttatgcctactgccatcacctcaccgtaagatccaatcagatcacacctcattgccctctgtctataaaacttgccccagccctcagctcagggagacagatttgagcatttcctcttgtctccttgctagtcaacacacaataaatctttctctttgcaaaagcctggtgctttgatgtttgactttccattactgtaggcaaatgaactcagtttggttctgcgacattaatttgcatacactcagtcccaatttagtattta

SEQ ID NO: 664204 - DNA, 232 bp, Homo sapiens
  misc_feature (167)..(167): n is a, c, g, or t
  misc_feature (188)..(188): n is a, c, g, or t
  misc_feature (215)..(215): n is a, c, g, or t
gggcagtggtgttgtggtggccttggcgtggtagtgacttccagctagcaggtaggtgccagtgtgtctgctgggatctggaatgtcttagcaggttcgctcctgaaaaatgctgaatatgatagctgtgaggggcggttccacttagctccgcaccttgaacacanaagcccacttgttggtgtctntagttccttggccagtctcctcctggnagctggaccaaagcgtg

SEQ ID NO: 664205 - DNA, 313 bp, Homo sapiens
cccttttaaaattaaaaataaaaatcctttgtaaaaaacttgcatcctaatttttttttattgcaattgaaagggtaaataataagccaatgtaagtaagcccttcctaatgtttaaaacaaactgggctccaacaagtggccctatttttattagggttttaaaggtttgggggggggtgggcgggggggggtgtgttttttttttttaaaagaaaaaaaaagtggggtctgtaaaaatgttacctgtagtggggttttttccaacaaacctgaaatttatacttttaaataaaactattgggtttttaaca

SEQ ID NO: 664206 - DNA, 914 bp, Homo sapiens
taccaagacaaacttaagcaaacacattgacccaaataaagtatatggctgatagaaattgaaacctggcgactaatagatatagtaccgcaagggaaagatgaaaaattataaccaagcataatatagcaaggactaggccctataacttctgcataatgaattgaactagaaataacttggcaaggagagccaaagctaaaaccgccgaaagcagacgagctacctaagaacagactaaatagaggtacacccgtgctatgtagacaagagatcagtgggacagatttataggtagaggcgacaaaacctatcgagcctggtgatagctggttgtccgaagatagaaatcttagttcaactttagatttgcccacagaaccctctaaatccccttgtaaatttagctgtaagtccaaagaggaacacgctctttggacactaggaaaaaaccttgtatgagagagtaaaaaatttagacacgccatagtaggcctaaaagcatgacaaccaattagagatagcgttcaatgctccaacagccagcatagctagaaaaatcccatgcatatgatctgaagctcctcagagccaatgggaccaatctatcaccctatagaagaactaatgtgagtataagtaacatgaaacacattctccttccgcattaaacctgggtcagattaaagctactgaactgcaatgaaccaggccaatatctacatcagctaataaaaagaaagtactccgaaaaaaaaaaggggcggcgctggaaaaccgcgagggacgaagacaggccgcgatctcacaaggggcccaagggcaagcaaagcagcacgggcgataaacgaagagaacgccgggccggaggcccccgggggcacgccccaaagaacggaacaggaaggcaccgg

SEQ ID NO: 664207 - DNA, 352 bp, Homo sapiens
gattttttaagagttcaaatgttaaacatgtttctgcaactctaatgtaccgttttcctggaaacatgctttaaataataattatatatgcccatctgtcttctctagatcataaactacttatacatgtatacatgtatatgcataacatagcatgacagtaataagtgatcagtacattctacatgtgaattgggtgtgcccagatgcattttgttagttctttgatctaccatagttactttggatttataaagtgcttttaaaagggatgttaccttgtcatagtggctcatgtctgtaattccagctacacaggagaatccctgaggccaggaatctgagaccatcc

SEQ ID NO: 664208 - DNA, 167 bp, Homo sapiens
  misc_feature (15)..(15): n is a, c, g, or t
  misc_feature (49)..(49): n is a, c, g, or t
ttccaccaggccggntctttctgattaggttttgtgattatcagcaganccagtcctgcactcccctgtaggggagagactctttctttcaaatggatgatcttcagaaataactggccacacccagatggaaatagcttgatttgttttcttttcttttttttttt

SEQ ID NO: 664209 - DNA, 502 bp, Homo sapiens
  misc_feature (24)..(24): n is a, c, g, or t
  misc_feature (125)..(125): n is a, c, g, or t
cgacggcagaggacccgactgtancctttgtctggtgttgaactcctaggctcaagtgatcctcccgcctcaccttcccaagtatctgggactatagctgcatgccaccatacctggctaatttntggaggggggtattttttgtagagacagggtctcactatgttgcccaggctggtctcatactcctgacctcagatgatccgcccccctcagccttccaaagtgctggggattacaggcatgagccactgcacctggccaggagagtttttttctgataatagaagtaatactttctcactttagaaaatgtgaaaagttcagatatataaggaagtcaaacaaaacgtctcctatatatgaagaagaaaagaagcaagttcaaaaaaaaaacaatgataccgaacgccacacatgggaagatgaggaggggtgtcctgccgcacaaagggggggcaccccaccgcgggggcacccatccccgtggacagagggggca

SEQ ID NO: 664210 - DNA, 433 bp, Homo sapiens
gttgcggctctgtattctggtttgggggacgactggaactgacacttgtgtacttgctgaggaactggaaacagtgaatgttgaggtaaggcctgatgctgtagtcaggaaagcagtagagcccactgaaggctgggtgatggttgtcagtgtggtggtagggatgtctgtagtcagggaagacagggtcatggttgtggaagtcaccatggaacctgaggtagtggaaactgaggagatggcagttgtggatgtgctgacggtggagtggatggtcgaagtgaagctgggagtactgtgagaggtggtctcattggtggttgttaccaagtttctggtacgaaattatggatgttcctttggttgtgagagaggaagtagtgactgggagagaaatctcagtggacaatgttccagctataacttgtggagt

SEQ ID NO: 664211 - DNA, 1537 bp, Homo sapiens
  misc_feature (1500)..(1500): n is a, c, g, or t
  misc_feature (1537)..(1537): n is a, c, g, or t
cttgccagtgtcgaggtgtagcgatcctagcccacttgcaaccttccaccttcccgggtttcaagcgattctcctgtgccccagcctcccgggtagctgggactacaagcacacgccaccacacccggttaacccctgtgtttttcctagttaaaaacggggctttcgccacgccggccaggctgtggtctctctcgaacctcccgacctctcaggcagatcttgttcctgtgcctctcggcctctcccaagagtgtgctgaaattcacaggcatttagccactgtggccctcttagggctcttgattttctgtgacttccacacaaacaagccagtgtgccacgttcaaaggtttgtggccctctcaatatagcgtggctctgtgtgtgaataagcctgtggcccaacaccacagtgtgttgtgttgcaaggggtatattgttcccaccctctgtgtggaaaaaaaaaaggggcaggggttttgcgccaaaaaagaaagcagctcattcttaaacgcgccaccccatttttgactttcaaacccctctgcatttttccttgtgtgcccatttttcattaataaccggggattttcccaaattgggctccctttttgtgcaccccaacttatatgtttgaagtggtgcttccttaaaacctcttctgtgtcctgtgggatattacccttgttataaagccccacaagccaagagggggggtgtctccccataaaagtggttttttttaaacaacgggtgttgtgaaaaaacggggtgtgtggacacctttcgaagggcagaaaaggtggaaacggggaacacagtttggaggacttgtggcgacacaacggggggtggtcaaagagcaattttaagagggccctcttctttattaatttggaaaaaggggattagaagaggttccaaaccattttttgtgatgagagatctaatgtataagctagatagttagaggataaaggttcatctatagatagtttcaatacacgatagggggggcccctgtgggttttattgtggggaagaaccaaaaaaggaagggcgtcctttattacacacaccgaatgaaaaaagggggagcgatatagagggagggtagtgttaggaggaacacattccacaacgaaaagtggtataaccctctataatagtttgcaaagggaggtctttttggattattccaccttgttgagaagaggggaagaaaaacttctcaccgacaaggttctttcttccttctcaaaagagagaacaacaccgcaatttttttattttccaccaaatggggagaaatacattatttccgcccccactatccagcctattttaccccccaccgaagattgtgtcccccctctcttcacccactttattgtcgcccggactctgtcactatcataccaacagatttatgtggtcagtcgtcagtgtcatacacaaaagatcaatcaccgctttatttgtgtcagagcatgctanctacccccattgatatcattccacacagtcattaaan

SEQ ID NO: 664212 - DNA, 457 bp, Homo sapiens
agaggatccaactgctgtcacttacgcgcctctgctggccctgctgtcccttacgcgctgttggcccttacgcgctgaccctggacttggacaggggtgggttgctgagccagcgtgaaatagtactggactggctcgtcaggagttacagactggcgcacctcctcctgacgctttggaggtttcagttcatctcttggaacaatatcgatgagaaaatcaaactgatcaaatttcgtaattgccatggcgatatcatttctctgtagagtccggcgcttgttatcttctgtgtgcgcgtaagggccagcctgctggcccttacgcgcgtgcagcccctgacatctaaggtcatcacagacctgttattgctcaatctcgtgtggctagaacgccacttgtccctctaagaagttgggggacgccgaccgcttcggggacgcgtaactagttagca

SEQ ID NO: 664213 - DNA, 1162 bp, Homo sapiens
gctaagatgctatttgctggctacaaatgtcccccaccccttggagcacaagatcatcatccagagtgcagaccacgccggactacagacccccaggaagcctttaccaaccgccgatcaccgacctcatcagcgagactgtccctgctggagtgagcgacttccggacagtgccgtgcttccccttcgccttctgccgtgattgtcagatttcctagaggcctcccacagaccacgacttcctgtacagcctgcagaacttctggcatggaaaagcccctgtgcaactggtaaagatatcaataagcaccaggaggtatctaaatccaccaggagccataggcatcacgttgacgtccatttaccagtcttccctggcacgattcttctgaattgtgctgccttggccaaacagaggaggaactaccctgccctgacagaggctggggatgacggaggaagagacagcgcggtccccatggctaacagagacccctccctggcgatgccagattcacatgggctggcagattctgcccccaaaacatgtccaaccagtcgtcagagaggaggcggtacctgggaggggcaccacggagctgccaaggaacagcattccccatagcacagcacagacctaccgaccacgcgacccaactgcgggcatgcagacactgcaaccggcacggccagacagaatgcacaacagctgcgaggacaagtcaccggccccaacggactctcatggcgggcacagacaccaacacagctaagtgatcaccggaggcaggccacacgcaacccgcggcaagaccatgggaacaaacagtgacagccccagaagacacacagctataccccaagaacaaacgaacactagacaggacggccaccgggcaaccaacgcggcaacccactccggcaggaccagcacgccacccaccgctgcacgcgcgccaacgcaacggtgagccccaaacactaccacccagagacagcgcccgggacacagcagagccagacggcaacagcacagaagcagaaatccgaggacccggagacaacaagagacagcgacagcagtcaccaaccaggcccacgcccgcgagtgagaagagagacagcacacagaaaacagagaacaccagcgggcacgacagaa

SEQ ID NO: 664214 - DNA, 289 bp, Homo sapiens
taaacgaccatgagaagagtctgaggcaggagaatagcttgaacccaggaggagaagactgcagggagccgagatcacaccattgcactccagactgggcaacaagagcaaaactatctaaaaaaaaaaaaaaaaaaaaaaaaaaaaaaaaaaaaaaaaaaaaaagggggccccccctggaaaaaaaaaacccttttttttaatccccccaaaaaaatttaaaaaaaaatttaagggaaggggttgaaaaaacggggggttatccgaaaaagggaaaaaaaattttggg

SEQ ID NO: 664215 - DNA, 745 bp, Homo sapiens
caccaattggacctcaaaacttaccacctttagccatccctgctcaaaggatgcccgcgtgccaatgttagacattcgcccaggactgatagcacaggctcccgggccacgattccctttactacagcctggaattccaccacaacgcggtatccctcccccatcggtacttgatgcagctcttcatcctccaccccgcggaccttttcctccaggagatcttttcagtcagccagaaagaccttttctggcccctggaagaccaagtatagacaatgttcccaacccagataaaagaataccacttgggaatgacaatattcagcaggaaggggatagagattaccgctttcctcctatagaaaccaggagggcattaccagacctcctcaggtggatgttagggatgtggttgggcgacgtctagatcccagagaaggccctggaaggcctccattagatgctagggatcatttggaagacctcctgtggacatgagggagaatcttgtgaggccaagtctagaccaccttggtcgaagagaccactttggctttcccccagagaagccttgggggcctagagattttgatgagagagagcatcgagttctgcctgtctttggtggtccaaaaggcttacatgaagaaagaggtagatttcgggctggaaataccgatttgatctagaagtggtcttggaacgaggattggtcagagtccgagatttgatgacggaaactggg

SEQ ID NO: 664216 - DNA, 228 bp, Homo sapiens
gcagggcaaagactaaaggctggcatcagaatccatattcttttcactgttgatgtgctagggctgcaggaacaaaatactgcaaactaggcagcttaaacaaatttattgtcagaggtctgactggaagtcccaaataaggaagctcaagatgaagagtcagaagtggtaacttgtttgttgcacaagaaacaaatttagcattctatttaggggatccagattacc

SEQ ID NO: 664217 - DNA, 137 bp, Homo sapiens
gtagcaaggctcgcagaaatgagcacagccctcaactacttgatgcagagtttctcttggaccactccaactcccactgagcccttatgctgctgggctggctggaaactttccccatacgcctctgggtaccgagc

SEQ ID NO: 664218 - DNA, 122 bp, Homo sapiens
cctcttctcagctgatttggctgcctccattgtaataggcctcatgagactccagcctaggcctggccttcagttcagcagcagagcccagagatgtactgggcaaaggtcctacaggtatg

SEQ ID NO: 664219 - DNA, 420 bp, Homo sapiens
tcggctatccagtgacaacgatagcccagcccaccatcctcaccaccacagccaccctgccagctgttgtcacggtcaccaccagcgccagcggctccaagaccaccgtcatctctgctgtgggcaccattgtgaagaaggccaagcagtgacctgaggggccaccctaggacttgaaaggaccgtgcagcccagtgaccactgcccagtgggaggcgccactttgtatatttcaggactgggacctactccccagatgccacctgagaggagcttctgtttgggcattccacgatgtgaaacgagcacgcgacccgggagaccccgacggctgctgtgaacgatgtgtctgtccacgccactggctgctgtctgctcatccatattgagaagtgccgtattcttacctcttggcatctc

SEQ ID NO: 664220 - DNA, 509 bp, Homo sapiens
  misc_feature (12)..(12): n is a, c, g, or t
  misc_feature (33)..(33): n is a, c, g, or t
  misc_feature (226)..(226): n is a, c, g, or t
  misc_feature (419)..(419): n is a, c, g, or t
gtgaccacggcncctcgcctgagcagtgggacntggtatacactccctgcttccttttctgaatgtggtgttgctgtaaatggattgaattatttttctcgagcttgctgtcagtaaacggaggaaggaggcctctgttcaaattgtgacttgggctgaggctggacgattgttatgtagttgtttctatagcccctatgattagacactttagtgtcagggcacnattatctaaattagccgctcttctgtcgggatcagggcgcataacggcgcaaagtagagctgtcaagatgggctagttttcttgggttctgaagaaatggatgtgcaaaggcttggtccgctacttgtaacaagctccagcccttaaaatgaaattaacttcctactcaggcaccctgctagtgccagctgtncatatacacagagaacagaaatattcctactgtctttgaaaccctggtgtacctctcagtggcagaataaacatcaacacaggttcaagt

SEQ ID NO: 664221 - DNA, 134 bp, Homo sapiens
  misc_feature (111)..(111): n is a, c, g, or t
gaggcatgggttgcgctagaaccaacgccctgatactcttcatccagttaagtggaaaccttagcaactataataaactatgagatggtaatcagtggcattattatctcnatgttttcatattgtcactatta

SEQ ID NO: 664222 - DNA, 563 bp, Homo sapiens
cacatatgaaagtttcactttttaagatgcattcttgtagctcccaccagatcgaagatagtgtctaacagctaacgcctgcacaggcgtgctgcatgctctggtggtaaatggatggacacggctattctaaactttgtgtgatacttttgctactatgggcaattaacttgaaaaaaataagcgatcccaaccctgtgctctgatgtacctcacatgccccttttatgacacctttgaccaaatgccttctatggttgacagagcacgcacaaaactacctgtgatacataaagggtccttacaagcttattatacataccgagattcccttacctaaagggagaggtgaacgcaaagactgcttcgaatggctattgcaggcgattgagttcataccatgccaacctgaagaagtattacacttgcagtagaactgtggagtggtgctgtcattgcaccatgggataaacacctatctctatggacgaccttgaatgacttgcaatatatatgtaaagactactctcttatgctatataaggaagatatacctttaaaca

SEQ ID NO: 664223 - DNA, 159 bp, Homo sapiens
atcacaacaaaacaaaacaaaatactaagaaagcaactagtggacatgaccctctgctaaactaccagctgtctttgcattttcaacacgtctctccgccaacgtcatgttttctaggtccaggatctgattcagtgttctcaccgtgcacatttgtgc

SEQ ID NO: 664224 - DNA, 218 bp, Homo sapiens
acaagagctagcgtctaaatatgcatagccctataatgcaaggggaatcacctcagtagacagcgccgcaatcggcttaattaaggcccctctcctgagttaagtcaggcctgagtgacgttgtaattctcaggtccgcatctgatagtgaagatccgtttatcagacacaccgtccccgggaagttcatataggctgtccagagtcttcagtgacat

SEQ ID NO: 664225 - DNA, 427 bp, Homo sapiens
  misc_feature (1)..(1): n is a, c, g, or t
ntggaggttaatccctattagtatatgaaagtattcagcacctattgagattgtgtccctcacgaagggcctcggcccaagttcgtgggttgggggggtacaaagtgtgccctctccagtggtatttgcgaacccgctcgcgcttaaaatccttgtaggaaaagaagtagctaaagagcacgtagcatgccagcaccttggtaatccccaaaatgctccccttcttcacattaatgcacttgttgaagtaccgatagtaccctctttaacacgctccgaaaatgccactaggactagagtcccgcctcaagatcacagcttgacagctcccacagtttcctctacaaaagtctcgtgtccttctctggctctgggcccgcacactcaacaccctcgtgccgaattcctacagcccggggtatcctac

SEQ ID NO: 664226 - DNA, 117 bp, Homo sapiens
acctcccgtgtgggttggtttcttaagggagctggagggttggggtgccaagaccttagagaatgtgcctggtcctttaagggctggactggtggcaggaacctaagttgcttactc

SEQ ID NO: 664227 - DNA, 118 bp, Homo sapiens
ctcgcggtgagttggctgcgccggagaggatccaaacaggaagctgggaaaatgtggtcagatgtgggcatgcgcaaaggggctacctgtgagagggaggtggggctcaggcaggtta

SEQ ID NO: 664228 - DNA, 402 bp, Homo sapiens
ggtactggtacacagtgcatcagatacgtagtggctgcttaagtgccaccaagtatgggcaaatttgctctacttatatggtggtatccttaacatgatctaccagcgccctgagctctgtatactgacatgtctggacacctatgaagcggcgtcttgagaggttcatttgtggcagagcttcggtatcgcaaggacagctcctagcacggatgagatgatatctattgaccctgaggtcaacattgccttcaatcaggctgctggttctagtcccgtgcagctccaccttggctctaccatccgcttgcatgggctcagcgcgacccggaagtggatctaccacatgactgaagtgagcacagatgatccctgacagtccgcctgctttgcggctgggcg

SEQ ID NO: 664229 - DNA, 426 bp, Homo sapiens
cagcctcccaagtagtcgggaccacaggcgtgcatcactacaccttgctaatttttttctcaaattcatagacagtatgaagtgtaatctcattgtgattttgattttcagccaccaaagactctctccttggttaacttaatgaccagctaatgactggagagattttcttaaatgccttgaaccaatgtgatctgtctcccaccctctgccaagggggaaggtgtgtatgtttgtgtgtgtgtgcgcgctgggtcatgccagagatactcaggcactttacagctttaccctggaattcactttttaagcaaggtcttgaaggtcagtcagagattagggcccttttcagtctttcctgggcatacacataaccttgaatattcgcatgaccttctagattctcaaagtcctctgtggatatct

SEQ ID NO: 664230 - DNA, 122 bp, Homo sapiens
ccggacgcacgctcgggagctgtcatcagccgcaacttcctgccgaccctgatgcgggtgggcgagcagtgtggacatcagccgctttttatattcatgtacattcacctggtgaaaaaaac

SEQ ID NO: 664231 - DNA, 337 bp, Homo sapiens
ggacagcaagaacttgcggatcttttttgtgaactataatgtaaaatctcccattactggaaatgatctatcccctccagtgtctttgaacttaatgttcaagactttcattgggcctggaggaaacatgcctgggtacttgagaccagaacctcacaggggattttcttgaatttcaacgacttttggagttcaccaaggagagttccctttcctcctcccagattggaaattcttagagatatgagatctctctcgactcgtgcactgcatcagtgtcagagactcacatcgcagagtggagcacttagtagctcctgtgagaacacacagagct

SEQ ID NO: 664232 - DNA, 401 bp, Homo sapiens
tcaagcaatcattgtcaatgccaaagtgcctattgaagttataattgtattaaattaaggctaaaaatttggaaattttattttatttttggcggctcgggtaactttagcccttacccaagcaaatgtgggtttttttggttgtttttttggttttgttttttttttttttttcctttttggggacacctgtaaaatatttggaaataggaaatgttgtgttattcttgcccccttgatattcaggggggattgtaaaaaataaatttttgggggatttcaaagattaagattattttgataccattatttccagatttaaaaaatggggttatcccaagtttcgagggggaaactactgcataaaataactaacttggaataaatattttgccccagta

SEQ ID NO: 664233 - DNA, 779 bp, Homo sapiens
  misc_feature (44)..(45): n is a, c, g, or t
  misc_feature (236)..(236): n is a, c, g, or t
  misc_feature (486)..(486): n is a, c, g, or t
  misc_feature (489)..(489): n is a, c, g, or t
  misc_feature (513)..(513): n is a, c, g, or t
  misc_feature (763)..(763): n is a, c, g, or t
ccccaaccccccccgaggggagaggagagaaaaaaaaaaaagannccctcccccccccctcctctccccgtcgccggggggggggggagctttctctctctctcaatataataaagacaaagagatgttgtgtttttttttttttatctccctccccccccccgccccgcccccccccaaccaagagtgtatggggtgtgttgggggtttccccccccccccccccccccgcgggnggggggggggggaggggaattatttttttttccatagtaaaaagaaaagaagggttgttcttttctctccccccacaaaaaaaaaataatttattttttgttgggggaggagaaaaaaaaaacccgccgggggggcggccccgcgccccccccccaccaaaaaaaaaatattatttatatttttttctttttctccccccccccccctctttttttttttttttttgttggagaggaggagacccacccnccnttgttttctctcctcccccccccnacccctctgtttgttggcgaaaaaaaacaaaaaaaaaaggggggccccccaaaataatacccccccccccaaattcccccccggaaaaacgcggcccaaaaaaaaagagggtcttttttttttccccccccccccccctccctctcttttgggggcgtgtttaaaagggtttaaagcttttttggccccccccgcgcggggttccaatattgtgagatcccgggcctctcccggtttgaagcttcgtccngaaaatcccctgcaag

SEQ ID NO: 664234 - DNA, 370 bp, Homo sapiens
cgacaaactacttacatctcagacatctgcattgcaagagccaacacaaacaaagaaaaatgtattgatttacacaggagactgagaaaactagatctcaagtcacacagttacacagagagctctcattcagatgccgggcatatcagctcagctacccagaaagttcagctttaatgaagactgtagttaaagaatgaaagcctgagcaggaaggatttctgacctgggcaaattctcaatgctctgcctgagtcacactggaggatggagataggctcctcattccagcggacagcagctgccacagtcacaagaccaccctccaaacagcaagggtcttacgatgacaacggggactctgaagaga

SEQ ID NO: 664235 - DNA, 514 bp, Homo sapiens
agcatgatatttttacggttcacctatatgcatgtatcaggaatataatcctttttattattgagtagtgtctattgtatgtatataccacagtttatttctcccttcatcctttaatgatatttgggttgtttccacttttggtcttttatgaataatgatgctatgaacatacatatacaagtttttcagtggtatatattttcatttatctggggtatatacctaggagtggaactgctgatcaaatggtcactctgtatttagctttttgaggagctgccgggttattttctaaagtagatgcttcattttatatactcaccagcaacattttggtttttttggtttttttttggcctgatttaaaatcttaactttgaaaaacttctctggtaagtttattgccacttcttaccaggaactctggctctctgtattattcctgaaggattctctttccaacttgggttgaccacttgcaatatctatggtgatgctcaaagaccttggg

SEQ ID NO: 664236 - DNA, 150 bp, Homo sapiens
tttcttttagaataaggaaacttaaaatctactttctattgactgaacaaagtgctagctgcaaattatcttgaaatcaattggctcttttctagcagtgtgtaatcatgtttgctcctgattcccgaatgacccaggagcatagtgtta

SEQ ID NO: 664237 - DNA, 380 bp, Homo sapiens
tgctgggtgtctagaggatccctccagcgccccaagtgcagagtcagaggagaggcggcgtggagctaggcccctcgcaggcagccccaaatcatggacgcacctgtggggagcaccacatctccacctgcggcctcacatctccccactccccttttggtacgtttaacggttgctttgtacgtggtttacgtaactttaaactgtaacagccttaatggaagaccaaatggtttgttatatgtgtatgtacaaagttttctattaacgctgcccgtctcccttataacctggacgtgagctgtcagagcagaagccactaggccagtgcgcgtctgaggctcagaccctgctgtggttggcttgggggccagctggag

SEQ ID NO: 664238 - DNA, 164 bp, Homo sapiens
gacaaaacgtcctggaactcaagctcttctccacagagtgaggacagagcagacagcagagaccatggagtctccctcgtgcccctccccacagatgtgtgcataccctgtgcagaggctcctgctcacagcctcacttctaaccttctggaacccgcccacca

SEQ ID NO: 664239 - DNA, 353 bp, Homo sapiens
gctgaggtgactctacaggatcctaattcaggatgattacttagactctttgttgacccagtgtgagcggcaaaattggactgacattcaggacaacaaatgcagctggctggtggttcagtgtctggcaggggcactccagaacagtaccagatcctgaaggaaaattacgggcagaaggaggctgagaaagtgtgccgggtgaaggcgctatatgaggagctggatctggcagcagtgttcttggaaccatgaggaagacaggtacagcgcacattatggctctcattggacagtacgcaggaacccttgccccaggcggctttctgggggttgggcgcaaaatctaaccg

SEQ ID NO: 664240 - DNA, 624 bp, Homo sapiens
ttaaggtggccagggcaggatgggtcaaagtcagagtggtgttcatggtcctggaggtggcaggaaggatgccagggccaggaaaaggaattatggacctcctgtaccaactagagtggggaaaaggaagaggaaaccaaggggaccagatgctgccagcaaactgccattggggacacttaacattaagtgccggttaaaattactgaagttagagagatttaaggactatcttctaatggaggaggaattcattggaaatcaggaccaaatgaacccattggaggaaaagcaggaggaggaaggatcaaaggtggatgatctgagggggaccccgatgttagtgggaaccttgaaggagatcattgatgccaatcatgccatcgggcttacatctgtggcctaagaacattacgttagcattctttaatttgtagacaaggttttgctgaaacttgcttgttggaccttgcttaaccacaaggtgcatgccgtgaaagggttgcttgcggatgacacggatcccctggtcacaggcgatgaaggtggggcctcccaggggactctatggttttctttaaccccatcctggtttctttactgggttcgcgttcgctcttctcg

SEQ ID NO: 664241 - DNA, 335 bp, Homo sapiens
  misc_feature (318)..(318): n is a, c, g, or t
tgagatgtagtctcaccctgtcgcccaggctggagtgcaatgccgtgatctccgctcactgccacctccgcctctctagttcaagcgattttcctgcctcagcctcccgagtagctgggattccaggcgcccgcaccacgcctggctaattttttgtatttttagtagagacgggattttatcatgttggccaggctggtctcgaactcctgacctcaggtgatctgcccaccttgggcctcccaaagtgctggggattacaggcatgaggcactgtgccggggccccttcctgtaaaatttttaaatgggagaattngggtgcgagatgttggt

SEQ ID NO: 664242 - DNA, 826 bp, Homo sapiens
  misc_feature (82)..(82): n is a, c, g, or t
  misc_feature (84)..(84): n is a, c, g, or t
  misc_feature (119)..(119): n is a, c, g, or t
  misc_feature (141)..(141): n is a, c, g, or t
  misc_feature (143)..(143): n is a, c, g, or t
  misc_feature (149)..(149): n is a, c, g, or t
  misc_feature (164)..(164): n is a, c, g, or t
  misc_feature (175)..(175): n is a, c, g, or t
  misc_feature (199)..(199): n is a, c, g, or t
  misc_feature (210)..(211): n is a, c, g, or t
  misc_feature (224)..(224): n is a, c, g, or t
  misc_feature (228)..(228): n is a, c, g, or t
  misc_feature (232)..(232): n is a, c, g, or t
  misc_feature (270)..(270): n is a, c, g, or t
  misc_feature (275)..(275): n is a, c, g, or t
  misc_feature (340)..(340): n is a, c, g, or t
  misc_feature (379)..(379): n is a, c, g, or t
  misc_feature (382)..(382): n is a, c, g, or t
  misc_feature (418)..(418): n is a, c, g, or t
  misc_feature (432)..(432): n is a, c, g, or t
  misc_feature (436)..(436): n is a, c, g, or t
  misc_feature (491)..(491): n is a, c, g, or t
  misc_feature (530)..(530): n is a, c, g, or t
  misc_feature (555)..(555): n is a, c, g, or t
  misc_feature (697)..(697): n is a, c, g, or t
  misc_feature (791)..(791): n is a, c, g, or t
gaacgggtcctgcgcctcctgacagtcacaaactctacaccgccgcgtgcgcctgcagacgctccgctcgctgccttctctncnggcaggcgatgacttttctccccgtaaaagggaanttgggctgaaggaatcgctttnanatactnaggaacccgcagcgntttgagggacntgaagctgtttttcttcgttttcntttgggttcannttgaacgggaggntttngatncctttttttcagaatggattatttgctcatgattttcnctctnctgtttagtggcttgccaaaggagctccagaaacagcagtattaggcgcagagctcagcgcgganggtgagaacggagggagagaaacccactcccagtccacnctngcggctccgccggtccaagcgctgctcctgctcgtncctgatggataaanagtntgacaaattctgcaacctggacatcattaggagtcaacacatcacgagcacgatntaccgtaaggacttggaagccctaggtccaagagagctntggagaatttacttcccacaaaggnaacagaccgtgagaatagatgccaatgtgctagccaaaaagacaagaagtgctggaatttttgccaagcaggaaaagaactcagggctgaagacattatggagaaagactggaataatcataagaaaggaaaagactgttcnaagcttgggaaaaagtgtatttatcagcagttagtgagaggaagaaaaatcagaagaagttcagaggaacacctaagacaaaccaggtcggagncattgagaaacagcgtcaaatcatcttttcatgat

SEQ ID NO: 664243 - DNA, 351 bp, Homo sapiens
gagagagaatgaacgctgagtgagccaggaagttgtacacacaaaaggaaagatgaacttagatttgtcaatttaaccatctctttttctttctttccatttatttttttggtctttatagggccgcaccctttgtatatggaaattccgtaagaaataactgcccgcggttatgtcttacggcgggctaatgctttgcacacgattttttaccgagtacaacaaaagacgtactccctctttgcaaagagcagggctgaaagaacaccattataaattcgacctgacttaaaaggtcttaagaggaattatatatctctgggtctatttccccgtaagacataaccgcgg

SEQ ID NO: 664244 - DNA, 323 bp, Homo sapiens
tctaggatgatcccgctactccgcctctcttgagcgggaagagcggacggacaggcccgatggtcgtcattactcagccggattcccttgagtccatccaagaatactactcccccagagtgaaccgatgaactgttggaatcttgaaacaatgttttgcgttggcataaccgcatactgcagtacacggagctttgcttcctcacaggagccaggacatgttgggagcttgcttggctcagaccgcattccttccagttcttggccagcctcatccacacaccagcagttccgaagatcaaaatgtgccaaaggagtgctga

SEQ ID NO: 664245 - DNA, 830 bp, Homo sapiens
  misc_feature (739)..(739): n is a, c, g, or t
tgagtcaggaagagctgcaatcaaccgacactggtcgatagtcagcatctctgttcatacacgcggaatcattatcttaacttgattaggatgctagcctcatactacaatatgtacagtcgcatatgatacccagaatatagtattgtgtttgttgatggagcgcccaatatagaatgtcttttgtgagtgaaacaccctagcttagcgaaatcactgaactccttagctgtaaaacagagctaggtggttatgcacgatttagtcatataggcactatctgtagatatattggattgagtagatttgtatcactctaaagcactcatgacttgcactggatggatctatttcctagctgagcctcgtctgacagctgcacacgtttcctctggcttctctcttttaaatcaagggtttttttgcaggagccttcattcttcacatcacatctgggtgccggggcccagcaggactctggattcggatgaccttggttgaggcaatgtaagacatttgtcctgtttccactacagtattcattaaatttttggctgctcggatcagggtgtgtaactgccacaggctgacttgaaaaccttcccttctagggtggggatctagactataacttcattgcgcatttttagtgggggggagtaacattacttctgtccccgtatgccaaccggtctctttctatactaggcgttctggccctcggtccggggagtatcgngagagtctccgattcccggtgccaatatgtggtgttagaaacccccgctcggtggaaagttatctgtagtggcctgtaggggcagagatag

SEQ ID NO: 664246 - DNA, 819 bp, Homo sapiens
agctgacgtgcgtgctccgtgtgaggctcgcacgaaggggagtggcctgggctggcgcgtgtgagctgagcatcgcagggcgggcggacaggcgcggcctctccgccgggtgtaccacctgtcgcggcgcgagacctctggtgaaacgaaaagatgttgtcccgtgttaagagtagtaaccaccacttgtacttatggcatgtcgacatttgcacataataagacaaaaggcaagccacttatgctgaacccaagaacaaacaagggaatggcatttactttacaagaacgacaaatgcttggtcttcaatggacttctacctcccaaaatagatgacacaacgatattcaagccttacgatttcatagaaacttgaacgaaaatgacctatgccctttggaacacatatatctacataattgggaatacaagaaacgacaatgagaaacttgttcactaggaatactgcaagatgacattgacgacgttaatgccaattgtactatacaaccgaccggttggtcttgcctgctcccagtatggacacatctttagaacgacctaagggatcatccatattcggatctcagacagaggtcactgttacgatcacattgtggataacctggccagaaacatcactgttaaggctgtcgtagtgacctgatggagacagaattcttgggtcttgcgagatcttgcgtgtctatggaatggcgaattccagtatgcaacaacgaagtaagtattaccggcttgttccgggaactacggtcgtgataagcatggcctgcctacttgtggtattgactcttggc

SEQ ID NO: 664247 - DNA, 109 bp, Homo sapiens
tgtgtgatacgtggtatctagtgtgtgcatattaccctggagatatggggagctgaccaggagcatttggattcacattttcagtgccttattgaaacccggaagttga

SEQ ID NO: 664248 - DNA, 209 bp, Homo sapiens
acaaattcgagcgatcgcttgtccgtgagtcaataagtacgcacatgtgctctgctacacttttagagtttcctctagagatgcaatttgactccacttcaggagtcccaaagcaaaatgtccatctctaagatgattatttaactgccatagtcattctgtgctatgatgtactgccagatgccagaaagaaggcacagtggactcag

SEQ ID NO: 664249 - DNA, 139 bp, Homo sapiens
tacatgaagggcgtctggagtcactccccgtagcagcgctggggcggcagggagttgggttggggtgggctttgatgcgggaggtgggtggtgtgcttgctagcttgggcatagacagcagcagtggacctgcctccaa

SEQ ID NO: 664250 - DNA, 294 bp, Homo sapiens
agcttcaacaccacaaaaacattgtgactaacattaaaaaggcaagctgtaagatactcaaagcttataaaggacaaattgcacattgttaagatgccgacatcatttgacaagggctggtgttgtgcatatcgcttctttttttatatgacaaggccaccgacaaacagggcaactatatctgcccccagccaaccacatcacaatgcaattctaatgaaacacataaccactaggcaacccctgttagcatacatccattttcaaaattctctaggctaacaacacattcag

SEQ ID NO: 664251 - DNA, 878 bp, Homo sapiens
tgggttcccatttggttatggttaaacttggtgtatggaatgactcattttaagtctctctttctaatatgcacatttctaagcaggtctgcctatatgctctctaaatacggctctagctgcatccacatatttaaataggattggacagtttaaatttccatgaacttttcccatgactaatagaaaatgtgtataaattctcaaatacatggagcttctcctaaagaatgcctttaatacgtgatttctatctgaaaatccatgggtggttcagagaaatacggtgtgttggtagcaatcctttgaaatccattgagactggcttaattggcaagtacaggtttccatattattcccatatgtgatgggcaaaatataaattggacaattgggggatatagtatacacacaatacacacaaaccatatatgtatttcagtacttcaaaatttctacatatcccgggaataggtctgctagcatccataaataactgagagatgtacgattaggagtagaacttcctttggtggctctctcatttttcttacatatccttatggcaatggtataagttgcatcaccaactgtaaaacatttttttcgcagcttacatgaaagttgtcccctttctattaaccacaaaggtggagatttcctagtaaaaccggcatcaaaaaaagctttgcccttggaaaaaacacacaaatcagcaacaacacgataaacgaatagatcagcacaaaaagaggggggggcagaataaaatcactacaggcgacacgaagaacacacacaattcgcaaacggaccaccatagacggaataaaaagaggcacgcgtaacaacgaagagaaaaccacgtgactaagaac

SEQ ID NO: 664252 - DNA, 272 bp, Homo sapiens
ccagcgcgacttgcgaaccaagagaaccatcgtagaatcctcaaccgtgcggaccatcaaccttcgagaaattcgagttgcctttttcccagccgcatcctgcctgtagatggccggggaaggctctagaaaaggggcgcattgcgatccaaccatcggcagccgattccgtgtcttgatcacggggtgggagggaaccgtggcgtccctgcgtggggcccatgggtgagacactccagtactgagacctagagtccagatgcttgtaggag

SEQ ID NO: 664253 - DNA, 205 bp, Homo sapiens
ggtcgatctctagcaggatccccctgttcccggggagtgtgtacctatatatacaggacaagtgttgatagtgtgtgtatttatatttacatcatacttttccacatcacacacacacatatattctgagagctaagtgaaaactctaagcagatccttcattatcttgcgttctacttctaatatttctgtcagtccctaatta

SEQ ID NO: 664254 - DNA, 334 bp, Homo sapiens
  misc_feature (34)..(34): n is a, c, g, or t
  misc_feature (56)..(56): n is a, c, g, or t
  misc_feature (79)..(80): n is a, c, g, or t
  misc_feature (98)..(98): n is a, c, g, or t
  misc_feature (116)..(117): n is a, c, g, or t
  misc_feature (127)..(128): n is a, c, g, or t
  misc_feature (150)..(150): n is a, c, g, or t
  misc_feature (164)..(164): n is a, c, g, or t
  misc_feature (166)..(166): n is a, c, g, or t
  misc_feature (173)..(173): n is a, c, g, or t
  misc_feature (188)..(188): n is a, c, g, or t
  misc_feature (194)..(194): n is a, c, g, or t
cggattcgtatctcgccatgagaggctgtattcnactgatgtctgcgattcagggnccaggattccaaaacactgacannaagtgactacttccccanctccaagatatgaaatcnngcaatgtgcnngatccgactcctgcacgtgaangcaccacgctaggnanactatanatacttctggatggnaatacnctgctcgttagacctcctctgtgtccaggaagcagagggaagaaattcagcgatcgcccagggctccattatgccccactgccatcccagcccaaagtgtgctgagaggagaagctgcacgcaagttctggatcttctcc

SEQ ID NO: 664255 - DNA, 644 bp, Homo sapiens
cttgcccgcccaaaggtgcctccggtccctttcccgagggaaagcttaagagcctgtctcttttgtgggtttaggccccctctcacgttctaattccggcggactttgccacccggcggttctccggcaatgcgcgccccaagcgccgtgaccacatctgcgcccgccgcccatggccttctctgttctttctccgaagtcttcgccctggcaattctatactcggcccctccactttctgcaccgagcgcattgaaggtgacccacgttcaccgcgagggaatataagagtccacaatggccgctccacttataagccacgcccgcgtgtataaatttttgagaccctcttttggcctggcttgttttgcccaaggcccctggccacacgtcacaccacttgggagccctcacttctgcccaatgttatggggcccgcgtggaccctggctcccgccacgcctggtgctgcaccccgccacggaggtcctgccccctcccctgctgctgctcccgctgaggagaagaaagtggaaggccaagaaagaagaatccgcaggagtctgatgatgaacactgggctttggtctttttgactaaacctcttttataaccatgttcccattacaaagctgaacctttta

SEQ ID NO: 664256 - DNA, 1348 bp, Homo sapiens
  misc_feature (1030)..(1030): n is a, c, g, or t
cctttgtggtaagaccacaccgggggaggtgggtgacgccccataatgaggatttgggtattgtaacagagtggtgtgatggtagcactttcatcaagataatcgtcccccacggtgtgtgtcttgtgaatctttagttccgggggggtcggtcaattatatggtgttacccaccctgtgttggtatagtgcgtttcaataaacgttagtaaaaagcggtggtttgtgacacccgctgttgtatgtgggtgctgtttggtattgttctacacaccgcgtcatggttgttccgctgcggcccccccccttcgtgttggtggttttttggtgtgtacaccacgctggagagatgctgctgttggtctccacatatgtgtttagtatgatggggggtggtccccccaccaaggtggtgttgttggtgtctctgtcttgtgttctctccacgtggtgttgaggacccacctctgtagggtgctggtccgcacgccgtgaattgtggttcgaccacgactggtgggttgggttgagttgtttcgtgcgaaaatatagtatggttgtggcggtccacttctgcgtggtgtgttgttctctggtgagtagttgttgtactatagatgttgtgagacacatcagcactagtgtgtttttaatattggagagacactgctttgtggtgtcaccgcacagctactactctgcttgtgtatagaaactctgtcgtggagatgcaaacagaatgtgtagagtctcggagaataatctcctctcttgtgtatacctggtgtggtaataaacactgcgtggttgtgtgtgtgtgtatagttgttaaccaccgccgtgtgtggggggagtaaataagagaggtgcactcaccaccacgcggggcgtcacacaatgtgagaggtcggtgtatatgtacatatgtgagacatcatatatagcgcgctgttgatagtgtgtgtgacagatatatataatatatatgagacccctgtgttaatcgtatatgtacacctgcggtggtggngccacaagagggctcgtgagtatatgatcccacactctggtgtgttgtcatttccacgcgatctgcgcggcaacacatgataagggtgtagactctcgagcgctgataaacctgcatgagaattgtcggataaggatctgcggagactctttggtgatcacacatgtgtcacacacacttattttgtaccccacccccagtctctcgacgccaccctgtgtgtgggtgtgtagtggtgtctgtgtgtagtaagatataaaacacaccaaccaccccttccgctgggcggcgccgtggtggttacaaataatacaagaa

SEQ ID NO: 664257 - DNA, 251 bp, Homo sapiens
tcctgacaataggtccgggtctgccaatacagacacgcagtgagccatcctccctcttctttagtcagcggtcgtgtcttgcatgatatatctagcatctggcatcagaaagtccatcgtgcatgtaatgagccttcaccccttgtttcttcagcctccgtcaccaacgaagctgcgtgttcttctacataagcacagttgctatgttacacccaagacattgatcagtgatgcagaaactgcttaccttt

SEQ ID NO: 664258 - DNA, 2109 bp, Homo sapiens
  misc_feature (2058)..(2058): n is a, c, g, or t
attttttttggcagccttatccaagtctggtacaacatagcaaagagaacaggctatgaaataagggatccagatggcaagaaagaaatttagtggattggaaatctctctgattttcctttttgtcatagttactataatagctattgccttaattgttgttttagcaactaagacacctgctgttgatgaaattagtgattctacttcaactccagctactactcgtgtgactacaaatccttctgattcaggaaaatgtccaaatgtgttaaatgatcctgtcaatgtgagaataaactgcattccagaacaattcccaacagagggaatttgtgcacagagaggctgctgctggaggccgtggaatgactctcttattccttggtgcttcttcgttgataatcatggttataacgttcaagacatgacaacaacaagtattggagttgaagccaaattaaacaggataccttcacctacactatttggaaatgacatcaacagtgttctcttcacaactcaaaatcagacacccaatcgtttccggttcaagattactgatccaaataaaagaagatatgaagttcctcatcagtatgtaaaagagtttactggacccacagtttctgatacgttgtatgatgtgaaggttgcccaaaacccatttagcatccaagttattaggaaaagcaacggtaaaactttgtttgacaccagcattggtcccttagtgtactctgaccagtacttacagatctcagcccgtcttccaagtgattatatttatggtattggagaacaagttcataagagatttcgtcatgatttatcctggaaaacatggccaatttttactcgagaccaacttcctggtgataataataataatttatacggccatcaaacattctttatgtgtattgaagatacatctggaaagtcattcggtgtttttttaatgaatagcaatgcaatggagatttttatccagcctactccaatagtaacatatagagttaccggtggcattctggatttttacatccttctaggagatacaccagaacaagtagttcaacagtatcaacagcttgttggactaccagcaatgccagcatattggaatcttggattccaactaagtcgctggaattataagtcactagatgtagtgaaagaagtggtaaggagaaaccgggaagctggcataccatttgatacacaggtcactgatattgactacatggaagacaagaaagactttacttatgatcaagttgcgtttaacggactccctcaatttgtgcaagatttgcatgaccatggacagaaatatgtcatcatcttggaccctgcaatttccataggtcgacgtgccaatggaacaacatatgcaacctatgagaggggaaacacacaacatgtgtggataaatgagtcagatggaagtacaccaattattggagaggtatggccaggattaacagtataccctgatttcactaatccaaactgcattgattggtgggcaaatgaatgcagtattttccatcaagaagtgcaatatgatggactttggattgacatgaatgaagtttccagctttattcaaggttcaacaaaaggatgtaatgtaaacaaattgaattatccaccgtttactcctgatattcttgacaaactcatgtattccaaaacaatttgcatggatgctgtgcagaactggggtaaacagtatgatgttcatagcctctatggatacagcatggctatagccacagagcaagctgtacaaaaagtttttcctaataagagaagcttcattcttacccgctcaacatttgctggatctggaagacatgctgctcattggttaggagacaatactgcttcatgggaacaaatggaatggtctataactggaatgctggagttcagtttgtttggaatacctttggttggagcagacatctgtggatttgtggctgaaaccacagaagaactttgcagaagatggatgcaacttggggcattttatccattttccagaaaccntaattctgacggatatgaacatcaggatcctgcattttttgggcagaattc

SEQ ID NO: 664259 - DNA, 2405 bp, Homo sapiens
  misc_feature (2354)..(2354): n is a, c, g, or t
cgtggtacagttgatatatccgtccaaatctgatacttcgtcaggtgctctcgaaacaaaatgtagacatgaatcgcggcgagtacaactgtattcctgcgctatctgtgtcaattttcctaattggtggttgatcctagaaaacctcaccgacagtgtgctgtaccaagttgattgtactgaatgtctgcgttctcggtttcgccgtacctgtattcgttatcagctaactataagtaattgacagatatgccttaacaaggatgcttcacaataccattgggataaaaaacaggtggatatccaacaattttgtgggcaaaaaaggcccgagactttttagtagtccggaaaatagggatccaacatgtcaacaaaacatattcgtggatgggcgaatctatcagaatgtccgttgtgtcatagatggatataatagggattgccttaattgttgttttagcaactaagacacctgctgttgatgaaattagtgattctacttcaactccagctactactcgtgtgactacaaatccttctgattcaggaaaatgtccaaatgtgttaaatgatcctgtcaatgtgagaataaactgcattccagaacaattcccaacagagggaatttgtgcacagagaggctgctgctggaggccgtggaatgactctcttattccttggtgcttcttcgttgataatcatggttataacgttcaagacatgacaacaacaagtattggagttgaagccaaattaaacaggataccttcacctacactatttggaaatgacatcaacagtgttctcttcacaactcaaaatcagacacccaatcgtttccggttcaagattactgatccaaataaaagaagatatgaagttcctcatcagtatgtaaaagagtttactggacccacagtttctgatacgttgtatgatgtgaaggttgcccaaaacccatttagcatccaagttattaggaaaagcaacggtaaaactttgtttgacaccagcattggtcccttagtgtactctgaccagtacttacagatctcagcccgtcttccaagtgattatatttatggtattggagaacaagttcataagagatttcgtcatgatttatcctggaaaacatggccaatttttactcgagaccaacttcctggtgataataataataatttatacggccatcaaacattctttatgtgtattgaagatacatctggaaagtcattcggtgtttttttaatgaatagcaatgcaatggagatttttatccagcctactccaatagtaacatatagagttaccggtggcattctggatttttacatccttctaggagatacaccagaacaagtagttcaacagtatcaacagcttgttggactaccagcaatgccagcatattggaatcttggattccaactaagtcgctggaattataagtcactagatgtagtgaaagaagtggtaaggagaaaccgggaagctggcataccatttgatacacaggtcactgatattgactacatggaagacaagaaagactttacttatgatcaagttgcgtttaacggactccctcaatttgtgcaagatttgcatgaccatggacagaaatatgtcatcatcttggaccctgcaatttccataggtcgacgtgccaatggaacaacatatgcaacctatgagaggggaaacacacaacatgtgtggataaatgagtcagatggaagtacaccaattattggagaggtatggccaggattaacagtataccctgatttcactaatccaaactgcattgattggtgggcaaatgaatgcagtattttccatcaagaagtgcaatatgatggactttggattgacatgaatgaagtttccagctttattcaaggttcaacaaaaggatgtaatgtaaacaaattgaattatccaccgtttactcctgatattcttgacaaactcatgtattccaaaacaatttgcatggatgctgtgcagaactggggtaaacagtatgatgttcatagcctctatggatacagcatggctatagccacagagcaagctgtacaaaaagtttttcctaataagagaagcttcattcttacccgctcaacatttgctggatctggaagacatgctgctcattggttaggagacaatactgcttcatgggaacaaatggaatggtctataactggaatgctggagttcagtttgtttggaatacctttggttggagcagacatctgtggatttgtggctgaaaccacagaagaactttgcagaagatggatgcaacttggggcattttatccattttccagaaaccntaattctgacggatatgaacatcaggatcctgcattttttgggcagaattc

SEQ ID NO: 664260 - DNA, 386 bp, Homo sapiens
cacgatgcttatgcctataatcccagcactttgggaggcaaaggtgggtagatcgcttgaggtcaggagttcgagaccagcctggccaaggtggggaaaccccatctctaccaaaaaatacaaaaattagccaggtgtggtggcgcatgcctgtggtcccagctactcgggaggctgaggcaggggaatcgcttgagtgtgggagacggaggttgcagtgagctgagatcacgctgctgcactcctgcctgggcgacagagtgagactccatctaaaaaataaaaataaaaaatccattaatctgcgcaactgagtttatgccaaatcttcaactgggagagattaagacagaagtattaagattaaaagaattctggccgggcat

SEQ ID NO: 664261 - DNA, 438 bp, Homo sapiens
aaactagaatccctcttccccaaggcaggtcatcagaaaccagaaccggttttacccaaagccagccataaaacctaaaaatagtcctctcactccccattcccctttctgtgtaaaaactggttggaaagaaatgatctgacctaccgtgtttgactgtcgtaagatacccattccagagagggtcccaccccgtgcccaaaaggaaggaatcctgcacagagaggccaagaagaatttagacagccttgctgggtttcccctctcagtctattactattagatcataccctttttgtccaatcatatttttacacagtccatagtttgttgaacctaaacataaaaatggacaattcccctgtatcttggggttttcattttgagggctcacatacaattatgatcaaataaatttgtttgctttttttcctgtta

SEQ ID NO: 664262 - DNA, 322 bp, Homo sapiens
cagttgagatgcacccactggatgaggctgaggcagagcaccacatcatactcaggtttttgggcctccaccagactcatctcgatccagcacatagttaccctgagggtgaagagttaggggtgaggtcaagagacgcattcaagaaccactgccgcccccacagtccactctgcagcctcactatagtcctggccacaacctcctctgacatgcctcaaaataactcccaaacggtgccctctggtttttttgggcagcagcaggaggaggacagcagcaggaggaggacagcagcaggaggaggacagcagcaggagga

SEQ ID NO: 664263 - DNA, 280 bp, Homo sapiens
acgtccaattaggtgcatgagtatggtggcctgcatgtattgttagctgtgttaggcgtacggccagggctattggttgaatgatgttggctgatggttccgataataactagtatggggataatgtgtggtgtatggtgtgccttgtggtatgaagtgggctagggcatttttcatcttagagcgaaagcctataatcacttgcgccctgttcataaggggcatggccatggctaaggtaaatagcatagtggtggtaggttaggttgtaacatgagtg

SEQ ID NO: 664264 - DNA, 214 bp, Homo sapiens
tggttgatctagaggatcccagttttaaatgggaagtgtactagtcgttctcagctgctaataaaaacatactcgagactgggtaacttataaaggaaggaggtttaattgactcagtttcacatagctggggaggcctcacaatcatggcagaagatgaaggaagagcaaagggactccttacctggcggcgggggtgggcaagagagaatga

SEQ ID NO: 664265 - DNA, 309 bp, Homo sapiens
cctaagtggaactgcccgtgttagtttgctaaggataacagcctcaagctccatccatgttcctgaaaaagacacgttctcattcttttttatagctgcatagtactccatggtgaatatgtaccacattttctttatccagtctatcactgatgggcatttaggttgatccatgcctttgctattgtgaatagtgctgcagggctggttgttgttgttgttgttttttaattacatttcttttttttttttttttttttttttttggaaaccggaccagtccaattaggggggtacccgaccccaatt

SEQ ID NO: 664266 - DNA, 247 bp, Homo sapiens
gccaccaaagaggtgttgatcttgatcgaaacctggagggcccttcaccagctgcagtggtaaatatctcaaatcaccctatagatatctgatagtccatccggatgtaggggcctccaaggaacaagattgttagctgctccatggtgcataagttagatacacacttggggtagtgaaaagaggcccggtaactcttcctctatctctctctctctctctctctctctctctctctctctctctc

SEQ ID NO: 664267 - DNA, 440 bp, Homo sapiens
  misc_feature (77)..(77): n is a, c, g, or t
ggaattgtgtggtgttatggtcccggcactcacaggccgccacttggcgcactctcagctccccccggctccatttnggtttctctttgcaccacttcggtgtttggcgaattcgagaaccttcgactctccagatggttctcgaaccttctagagagttgtagatctctcgaaaatcttcaatttaaaaaaaatataggcctcatttggccatttgtagagagtaaaaatccgatttgaaactcacattcgtgcatcaacttcttggagctcttgtattcggtttctcgggatttcaactgtctttggtcgcgattttgaagaaaatcctccaaatcgcattgtagatcatcctcttcccgacacacaggtgctaagcttgcattatttagagctattttcaattttatatctattttacggcataacaccacacaatt

SEQ ID NO: 664268 - DNA, 293 bp, Homo sapiens
aatcgagctctgtacctgaacattcgtgtcctaatactctattgatccaataacttgatcaatggaacaaaataccctagggataacagacgcaatcctattctagagtccatatcaacaataggggttatgacctcgatctgggttcaggacatcccgataatgcagccgctattaaaggttcgtttgttcaacgattaaagtcctacgtgatctgagttcagaccggagtaatccaggtcggtttctatctacttcaaattcctccctgtacgaaaggacacgaatgtaca

SEQ ID NO: 664269 - DNA, 157 bp, Homo sapiens
ctgtctaagtttgatccgaactagcgtggtcgatggactgccgtccagttaaggagacaggccacgctttccagtgcatgcgctcactgatttcatcctcaagtttccgcactgtgcccaccataagtctgtgcgacaagcctggcagaaggcagac

SEQ ID NO: 664270 - DNA, 197 bp, Homo sapiens
gtgaaaatcccgacgaaaggaatttaggccggacacagtggttcacatctgtaatcacagcactttgagaggctgagattacaggtgtgagccaccatgcacagcttcccagctaatttactttttcttctttaaagatggatctcgctatgttgaccaggctggtttcaaactcctgggctcaagcgatccgtctg

SEQ ID NO: 664271 - DNA, 783 bp, Homo sapiens
ccatccagtgttccgatgcactgtaccttcttgctagtatcaggtgccttgtatcccacatgcagccatgctgatggatgcccttatcagcaggcttttgcatccctgcagtctggggatgttactccctgatcaggtgatgctctattcttacccatcagtcagatgggacagctagtatcttccgcttcttcctacttcccctctgctgagttacatcccttttgtccagccctattatccctaccctctgatggtactcctctctttagatgtctgccataccccctgagaccctccccgtatggcaggagtatggttcctgctgtacctctttccccaaggatatgggttctggctcgacaatccggagggcccattgatgcactagcccctatttttcttccagtgggatatggcataaacttttagatctcctcttctcccttctcctcccttagcccttggatcaggatctaggggctctgatttttggattctgcaaaagcttggtatgacacctttggataaagcataagttctgatccaggtcacagatcaatctgcaagtaccagattcatctattgcctacactgacacaaatagccctcctcacacatggcacaagctacacacacacacacggaccctcatattcaccccccttgatcaaccacttatgaatatgtatttagctaacatgagtgattttagattttgttttaatcgtgacataaagtataaacataaaattcaacggagggataaataataatacagga

SEQ ID NO: 664272 - DNA, 193 bp, Homo sapiens
aatgggtgcacatgcgctcacattttgggccggcagttttgtgctggcagacactgacgtcgttcgacctgctcagcggtggatgtgggcctgcgacgaggccccaggcttgggtgcgccgtcgatcagcctggccgtgacagatgcagctctcctgcatacgtgcagctgggacacagccatagtatcgcgc

SEQ ID NO: 664273 - DNA, 794 bp, Homo sapiens
atctcctttaaagatcccaatcccatgcatattgatgcgtacctttcaagatcgattggaacctggtattgtgcgtttccaagtccgtgagccgaccatgtcaccagattgatctgtttcaagaaagcaggatggactatcattactccgtccaacaccaaatcagtcccagacgatcatccactctggatgtcgatccaatatggctttccatgaatgtcttcactgcttagatgacaataacgtgttcatggtggatgccaatgtaagttcctaattctaacagagatgtttgcaaaagctgggtatcgactaccattaaagttaacattcgtaatgccaattccctgggaggaggcttccattgctggacctgcgatgtccggcgccgaggcaccttacagtcctacttggactgaacaggcctgatggatgcttgtggctggcctcagatacacctaagaagcttaggggcaaggttcattctcctgctttaaaaagtgcatgaactgtagtgctttaaacagatcatctccttaacaggggtcgtaagcctggtttgcttctattacttttctttgacagtaaagaaccctaacttctgctaggtatgactctgtagtcctaaagttatttactatttgggcttgcaagttataaaatcttggtgaatgtgtaccaagaaagaaattagtcactgagtaacttgtgctagtaattatttaacagtctaactctgttattgaatgttcttttcgaaaaggcagttgaaattgttggtcctaatctgaatg

SEQ ID NO: 664274 - DNA, 175 bp, Homo sapiens
agtcccttccgtatcctatatctaacgtccttttctcttcttttctcttcaaaatttctcttcttcctatttccgctccctgaagcacttggtaaaatctgtccttttatgaaccatatcacctgaacctcttttaggtttatttttttttttttatttttttattttttttttt

SEQ ID NO: 664275 - DNA, 1479 bp, Homo sapiens
agttgcagcagcaccagcaggcaaccccggcacagcagcacgtgcacagccactgcaatgaactcagcatcagcaatgactgcaaaaagccccagcagccacatgtggcaggcaggcatgcacgatgatgcagcctggcaccagccaagctccaattcatcaagccctcccacccacagcagagtcccgtggcaaagcagcctgccagggcaacatggcacgaaagagcatgcatgcagcagctctcaattccaagtcactcagcaacacacggctgctagggcagcatgaggtcacatgatgagatggacacgagtccagacacagacccacccaagtgatccgaacagctccaccccgcgagcatcaaccagctgagataaagttgacgcagctagaccaccaggcgacacaccaaatacacaccagtggaacactctacctcgggacgaactctagcgcaaggacacccatccgaaaacacagggacacacccgagtaagtcggtaacaacaagcgaccagcggtctcatcggaccatcactaggacgatccagacacaataccaactcacacaaaacaggaccgacagcacagacggaattaatacggaacgctccagggaccctagaccaacaaaccagtaacacagcaaaccaagcacgtaacccacgagacagcatgggagcgcctagcacacacgctgccgataaccaaagacacaacaacacgaaaaacaggggagcggcgcaacggcgataatgcgagagccaacgcgggcacgggagcggaagagtcaatgacagtagccacacacgactccaacagacaggcgaggacacggctccccaaacagagcacatagcacagcggcagcgacgaagcggcacaggctcacccacacacaacagagaggaacaattcaataacacaccgaagcgacacgacgacaagcaaaggcagaccccaaagtagaagagcggagagaacgtagggcgaacccatggacatgagtcgaggaacggcgcagcagggcaacggaacacggacacgggaagccagcgccaagtgacgcagaaatcaagaagcaaccgtgagagcgacgagacgccagaggcaagaaaacacagccacagagacagcgcaacactgacaacacacaagggcaacccaaccaacagagacgcaacctccaaagacgacagaagatagcacacaccaggggactacagggaacacaaagaaagaagagtgaaaggagcgaagaactaacgaacgcggaacaccagaaagaacaagaagcaagcaaaaaaaccgaggagacgaacggaaagaaaacgcaacaagaagagaggacagcaagcacgagacgagtcggaagaaagtcaacgacatacgacaagcgaccggagaaacagacaagtagcgcacatgacaaaaagccaagcgacagatcagtagcaggaaagaactcaatct

SEQ ID NO: 664276 - DNA, 166 bp, Homo sapiens
tgccagagacatcctttttgatacttttatggtacaggctgagtggggcgccctcacctccagccagctttctgcggggtgttcagcacttactagctgaaacatgtcctgtggagcttccacctggccagggaggacgggatttgactatccgatgggaggaccc

SEQ ID NO: 664277 - DNA, 317 bp, Homo sapiens
tcggactagttcggatgatagggatagatagtactagggaggacgctcctagtttgttagggacggatcggagacttgtgtaggcgaataggaaatatcattcgggcttgatgtgcgggaggggtgttacaggggttgggtagggtgtcattgtctgggtcgcctaagaggtcttggtgagactacgtgttaactggtcttacaggagagacacggagacgaagtacgccgacggcgtctttgcttggtgtactcacgggtggaaggtgactctatcggaactggggaggtgattcctagggggttgtttgatcccg

SEQ ID NO: 664278 - DNA, 188 bp, Homo sapiens
gtttttttttttggcccccccggcggtttcccccaagttttgtttttggcatttggattttttcccctttgggatttttcttttttggcccttaattttcccccctttggggttggaaaaccctttggggttgggttgggttgggccctttccccccccatttttttttttaaaaccctggggccgga

SEQ ID NO: 664279 - DNA, 381 bp, Homo sapiens
catgaaagaaacaaaacccaattttatgtatgtacgtatgtatgtatgtatgtattttgagatggagtttcattcttgttgcccagactggagtgcaatggttcagtctcagctgactgcaacctccacctcctgggttccagtgattctcctgcctcagcctcccaagtagctgggattacaactgcccgacaccatgtccgactaatttttgtatttttagtagagatggggtttcaccatgttgatggggctggtcttcaactcctgacctccagtgatctgcctgcctgagcctcccaaggcgtgagccaccatgcccagcttcttttggcattttaaagataaagactcattatcttctggcatccattttttctc

SEQ ID NO: 664280 - DNA, 618 bp, Homo sapiens
gtctgagcagctgggaatcgctataggcctgtaggccagtcaccccataggcccataggccctatagtcccttttaccccgcataggccccattggcccataggacccactggcctgagccccccctggctccaccggctctggtggccccactgggccaactgtgtccagcgctgcacctagtgaacaccacgagtcctacatcagaatctggacccaaccagcaggttcattcagcacatggttgcaggccctggttggagcaaatgctccacaggtgccgaatccagaaggtcagatttcagcaacaactggaacagctcaacgcaatgggggttctaaaaccggtgaagcaaatttgcaggccctaattagcaacaggaggcgacatcaatgcaggccattgaaaggctgctgggctcccagccaatcgtaatcacatttctgtacctggacacaaaaatgtatcttatttaacagcctccaggaaacccagggctgcgtttccaactatgccacagaagcagagtttttccttgtgccaagagggtctgatgagaagacctggttgccccttctgagaaaagaggatgcttgtaaggatggctcaattgctct

SEQ ID NO: 664281 - DNA, 177 bp, Homo sapiens
ggtcttggctggtggtttatggcccgggccttctttctacgggggccagggtccaattttccacctggggtttaaaagttaaggaggaccagcctgggaacccctcgagtggggacgccatttctattaccagggcccccttatattttaaggggacaccatatggagattttatgc

SEQ ID NO: 664282 - DNA, 327 bp, Homo sapiens
tttttcccattggtccctgtcatctttgatctactctatatggggacagatgacctctgaagggtaattcatattggggtctctgggaaaggcaaagagcagacaggcactccgagacaggcctgttaagccctctttagggttcattgaatgtgaccagacgaataaggagggttctctgagttaggcctgctggacttccatcagcaacccctctgagatcccttccacatatgcaaacacacacaaagatgaggacagacaggaaggccttccaaatcaggtcccttaaccaaggaggttccaaggattattcccttatttcca

SEQ ID NO: 664283 - DNA, 113 bp, Homo sapiens
gggaaaggacaaaagtaaaaaggcgttattttaaacgggccttcccccgtaatagaagtcatctctcataccgagattatgtggataaaaaaggaaagtaacagggtttgtta

SEQ ID NO: 664284 - DNA, 107 bp, Homo sapiens
caggtcatttgagtatcattaagagtagtgatgggaagattacagtttgagggccaaacgtgcctgcttcctgtttttgtaaataaagttttgttggaacacagcca

SEQ ID NO: 664285 - DNA, 943 bp, Homo sapiens
agcatgattatttatccatggcttctaattatgtgcttgtcttggagcacgaactttctaatggtctgttaattagtctacttgttgttgatctttatggtgaaagttgtcaaaaaaaatgagtaaagtgtacactttagaatagttttatctgttaatctttctataagtctttaaatttacagtgtcatctcaggtagtttacaagtgcatgataattggaacagtctgattagtattgaattcagttgctgagtggaggggaccacactcttgtcttctactcttaagtgcttagtaattaggagtggaaggaaaacagtatatgaccctgtggttaaattagtaaacgttttaattctagggtaagggtagctggtcatcattatctctgttgctttagctttacataaaggtcccataattcgaatcctctatgaatccattaccctgccatgttatccatttaatgttattccattgaatgcatttaatctaagtgaactcttcatgcaccgttttgggaacttaagtggtttaaccattcttcctgtccacatggagaaacctatttgacaagtttctgtccaacgtttacagtttatgcgggtagaattctcccctccccccaataaaggatttccttctttaaccactagtggtattacaccatttaacggggtgatctggcccaaccaagtctttgcacttaacggtgcttttacacctccacaagcaaacccacacacaccgacaacacaacaaacggaagagatacaaaaccaccccgaggcacaaaccacacacgagttataaaaagaaccaattagaataaaaacaaatacgtacatgacacctgaaaaactgccttgtataagaaacactaaggagacaaaacaacacgaaaacacccaagtcacatcagtcaacttaggaaatacaa

SEQ ID NO: 664286 - DNA, 1244 bp, Homo sapiens
taaaaatttaaatcttaaattcccgtttccacgtatttccttctggcttccaaaaggaaaggagttgcgatagctcgtgtggccgtgtacatcgtccacagccccgtgggtcggggcggggtccccggggccgccgcggggggtcacacatgcagccccgggggtgggggcctggcgacggggttaaggtccgggggccggcctatatggctagaggtccgggccgggttgggggcccgccgctataggccgccgctgggctgggcgcagcctcctgggagacaactagaacgcagaccgacaaggccgctcacaggatcacgggcgtgtaaacgcctcagaaggctcgttagagcgcccgggcggccctctcacaaccacacacagaggtgggctctcccacacacggcctttgcggggcaagcgcgctttcgattaaagagcccgcccaagccccgggtgcgacaacagagtcgagatcacacctctcgggtcctctccctggtgccctggtggagatgtagcatgagaaccgccacggctgcagacaccaccgtcgtggcactctctgtgcggcaccccaccccttctctcctccaaacgtcgctacaacgggcagaaaacagcgccgcctacaagaaaacgcccaggacgaggcgccccatcaccctgaggcgactgtcctcccggggcgaacagcgccagcaagcaccgcgacaatcgttcgccccccccgagacggggttcatgacacaacgctgccgtaccaaccatgtgtgttgcacgacagaacaaaccacaacactccaggcgcacggcgtaacacaaccaactcttcagcactctcaagccccgtccacgacaagagtagccccccaaaggaggtcgtcccacaacaacgtaggacgtgagcgtgcaagccacacaccccccggatgatgcacccccgagcaacatgtcggcgcccccaactgagttcgcacaccccggcccgggatactcaaccccgcggcgggcgacaacgacgaaaacctcgacgcctggtccgatcacccccagccgggtgggagcacaatgactaacaacatctgctcccgcgattaacacattctcccgactggtggagagttctgccaccacagcaaggggggagacccctcgttcgcgcaccaccaacgcgtgtcaccagggcgagcactgttcagcaacagctgttctccaggagcgagcgataattcatcgac

SEQ ID NO: 664287 - DNA, 1356 bp, Homo sapiens
  misc_feature (1356)..(1356): n is a, c, g, or t
ggatcctctactcatctcacgacataaccttcgccgaccgctcactacgcgtactctaatcgctgcgggtctactcatcctgtgaagttcccatcaggtcatgagtctcttaggcctatcctgtactttcgatcctccagacgtttgccgacctcaggcgggaaccgtgtcgttccgctagagcggacgcaacggatgcgtactggacgtcgagtaccttcgataggcctgatgcaattgtgttgctcatcctgtgcatatcaatagtggtgactcgtcaggatgatcctggaggctgttgggacaagtagatgtatttgtcctcacttagattcatatcaggtagacgcgcaccgaaagttattgcgcagtatggctcgctcggttgtttgacaccccacaagattgtatgtcgtatcatagcatattcgtttgagccatcaactattccttcatgcgcctgagcattcgcgtgactaccgacgtttcttagccgttatagaggtttgtgaagtgagcgcgggaggcaaggcaaagggaaaaccggagggtgttagaaaaacggtgggtacttaaaaccacgcttatctcgctttggcaccccaatgcgtgcacacatttaacacttcccgcattagaccctgaggtgggatgcccattacactggtgtatgggaaccctgttataacccacatctgtattcatcccctttatacacatcccattaaagccattcgatgttcagactatcccctttcattaaatctataataacacgtgttgggacacaacatccacaaagtaatatccaatatacaaacgaaaaactataacttttaagttccacaacataactgtatatagaacccacacctaccaatttgcacccaatgtttaatgacgcgccagaatatattcagccgaaacacgcggaatgctcctctgttccgttgtacaggttgcattgtgaatttggcgccggtatcggccaattacgaggttcaaaagccagagtgccccaggattgccgccttaagcgattatcgtttccgcggtaactgtcgttaacgtttacccgccgaaagagttaccgcctttaccgcgcggtttgtcctatttgtgtgcgagacattacgaaacgtttaagttaaccgttaaccataaaagtccacgggggacacccgggagacagcgcccctttccgaagtggccaacactcgaaacccgctttattccattttgcgggaaacaccgcccaccaaggaccacggaggacaaagtgggacaagcccaggaacgtgcaacgtccacgcccgaagtattagttcactttaacattatagcgtcaccaaacan

SEQ ID NO: 664288 - DNA, 167 bp, Homo sapiens
ttacatatctgaacacacaatatctagaccctactgcgattagataccccactatgcttagccctaaaccctcatatcagttaaatcaacaaaactgctcgccagaatactactagccacaaacttatatactcaataggacctggtcggtgccttcccatatccct

SEQ ID NO: 664289 - DNA, 783 bp, Homo sapiens
  misc_feature (272)..(272): n is a, c, g, or t
  misc_feature (343)..(343): n is a, c, g, or t
  misc_feature (362)..(362): n is a, c, g, or t
  misc_feature (743)..(743): n is a, c, g, or t
  misc_feature (749)..(749): n is a, c, g, or t
  misc_feature (755)..(756): n is a, c, g, or t
  misc_feature (760)..(761): n is a, c, g, or t
gctgactcccaacagagcgcccaagaagaaaatggccataagtggagtccctgtgctaggatttttcatcatagctgtgctgatgagcgctcaggaatcatgggctatcaaagaagaacatgtgatcatccaggccgagttctatctgaatcctgaccaatcaggcgagtttatgtttgactttgatggtgatgagattttccatgtggatatggcaaagaaggagacggtctggcggcttgaagaatttgggacgatttgccagctttgangctcaaggtggcatgggccaacatagctgtgggacaaagccaacctggaaatcatgacaaagcgctccaancatatactccgatcaccantgtacctccagaggtaactgtgctcacgaacagccctgtggaactgagagagcccaacgtcctcatctgtttcatcgacaagttcaccccaccagtggtcaatgtcacgtggcttcgaaatggaaaacctgtcaccacaggagtgtcagagacagtcttcctgcccagggaagaccaccttttccgcaagttccactatctccccttcctgccctcaactgaggacgtttacgactgcagggtggagcactggggcttggatgagcctcttctcaagcactgggagtttgatgctccaagccctctcccagagactacagagaaacgtggtgtgtgccctgggactgactgtgggtctggtgggcatcattattgggaacntcttcntcatcnngggnntgcgccaaagcgatgcagcaat

SEQ ID NO: 664290 - DNA, 976 bp, Homo sapiens
ggtctgaaaaccctatccgcgttcatccgtgccttcaggtgtccccgccggatgggttcgtgactcctgtaggccgcgccggagacccttgcgccacctgcgccgcggagaattttctcaatggcgggtcggcctgtgggtcgccctttccgcctactcaggtcctattcactgagtagctctcccatctatccgaccggggacttgggtctggtgtctggagctcccgtcgctctacttggtgtccggacatctacgggggagtccgctcgtgggccctgtcccgcctccagtcatcgaaggaccttaatgactcgtctgggaagtgtctttaccaagagctagtacctgaagccgtatgttggaacctccagtcgcgggcactgcatgtcgccccattggttcagactttctttctactcccgtccagtccaggcatagaggttctgctccagtcaaactacccccttgtaactgatgggcgtgttggtcgcggaagctcccgttgcacccggggaatgccagtgctaacgcgcacgcaaagtttccctgggacgcacgggttgggaagttcgcacgcactcactcttttgaacgaaacttactcgattccccccaagcaaaagggcacaaagggactgccttttcttcgaagcggcacccgggtcaaggggttggaggccagccgttttccttgaattccgcatcacaaggccttcgagatagccccacccggtgtctttgtccccctttccaccgtgcttgggactcccccgggttagaagtcccttggaaccgtttggggaccatcagtaactggttacctcgattagctttgcgtaccggagtaacgttccatgaacccccttctagctacccgtgggctacgagctggcggcttaggtagttgggaaacccacccagacccttgggacttcttttaagcaaagccttgcaccggcgcgacgccctttgg

SEQ ID NO: 664291 - DNA, 1042 bp, Homo sapiens
  misc_feature (272)..(272): n is a, c, g, or t
  misc_feature (343)..(343): n is a, c, g, or t
  misc_feature (362)..(362): n is a, c, g, or t
  misc_feature (948)..(948): n is a, c, g, or t
gctgactcccaacagagcgcccaagaagaaaatggccataagtggagtccctgtgctaggatttttcatcatagctgtgctgatgagcgctcaggaatcatgggctatcaaagaagaacatgtgatcatccaggccgagttctatctgaatcctgaccaatcaggcgagtttatgtttgactttgatggtgatgagattttccatgtggatatggcaaagaaggagacggtctggcggcttgaagaatttgggacgatttgccagctttgangctcaaggtggcatgggccaacatagctgtgggacaaagccaacctggaaatcatgacaaagcgctccaancatatactccgatcaccantgtacctccagaggtaactgtgctcacgaacagccctgtggaactgagagagcccaacgtcctcatctgtttcatcgacaagttcaccccaccagtggtcaatgtcacgtggcttcgaaatggaaaacctgtcaccacaggagtgtcagagacagtcttcctgcccagggaagaccaccttttccgcaagttccactatctccccttcctgccctcaactgaggacgtttacgactgcagggtggagcactggggcttggatgagcctcttctcaagcactgggagtttgatgctccaagccctctcccagagactacagagaaacgtggtgtgtgccctatgcctaactatggacctgttgggtatcatatttgtttacattttcatcatttaagggagcactttaatagaatcgactctattcatctcaaccactcgcccgcacctaaacacgtacgtccttacttctattacatccccctacttgtttacctttcttctttacaaatccctttttattactttactttctttatctcatattttcttctttcctattttttttctcctttcatttttctcttnctttctctttttttttctttatacttattctcatcttattccctccgtcttcctcttcttctctcgcttttttctgaccaccaaacactatatt

SEQ ID NO: 664292 - DNA, 180 bp, Homo sapiens
agctaggcttctatcttcataagatcatagatacaacatgtgtaagccatagagatcttagctaggcatagaacatcagcagagcccacgagatgttccctcaacaaaagaaagttcgacagctgagctcatagatctcttgacactttccggctgtcgatcattactttccatcattac

SEQ ID NO: 664293 - DNA, 202 bp, Homo sapiens
gtgtgtcgagataaggtgtgtcagggcttgactggacatagtggctcacgcctgtactcccagctactagggaggctgagacaggagaatcgcttgaacccgggaggcgaagaggttgcggtgagccaagatggcaccactacactccagcctgggtaacagggaaactccatctaaaaaaaataaaaaatgaactgttggt

SEQ ID NO: 664294 - DNA, 309 bp, Homo sapiens
  misc_feature (43)..(43): n is a, c, g, or t
  misc_feature (221)..(221): n is a, c, g, or t
  misc_feature (232)..(232): n is a, c, g, or t
  misc_feature (258)..(258): n is a, c, g, or t
  misc_feature (261)..(261): n is a, c, g, or t
gtgcttagggtgacttaactaagaacccaaccggctttggggngtgtaaacagctgtacggtcgatccggattgtcgaccagcgtcgcgggaggtagagggtcgacgctgcttcgttgcctggatcgtcgcggcacggcggtcgatggccgccatggagtccacgctgggcgcgggcatcgtgatagccgaggcgtacgacagtagcgtggactgttggcntctgggatcanccttttctgggctgatcccagacttncgntatccccgggctactacgccctccgcgtgtggggcatctgcggtgttg

SEQ ID NO: 664295 - DNA, 517 bp, Homo sapiens
gagctcggtaccacttgtccacggttggctaaaggtccgaagaaaattgtggcacaactacaggcatggaatggcttcataagacaagcatcaacctcagtgttacacagcaggagagcacacagccctcccattgctcagatgtccttggccactgctttctggaagctgcactcatttaggaatgaacagatgcaactggcagaaaggaggcagaaggcttttcaaaaagcagcaggaaatgaacaagtagagaacgcattcactgagaccctggcaaaggatccaaagcattctgtaaaaggagttcagagcctgggagtcaatttattggatttgcaaaaatcagtaatggatagtttcagtgaaatgaaatatttcttacaagtagatatcacagggcatgcttacacttccccgggacctctcctttcacaaggcactatattcagggtatttgggaaacatttggactaacaggctgacttttactatttaatatagaatcctgcaaaaa

SEQ ID NO: 664296 - DNA, 325 bp, Homo sapiens
attacaggtgttgagccaccatgcctggcctgtcatttacttctaacatgggggtatttttctacctggctccagtgaccaaattgctgaagcctttttgtgaacctaaacctttaggattaacccatccaaaaccaaaaattaagttgataagggaggaatattgcctctccttttttcccttttaagaccaaaacccattaaagtaagccttaaattgaaaacccaggggatggcaaccaatattggatttgcccccttacccttattaggcgcattaccaaaagattttgtgaaggggaggaccaaggagccacgaggtgcc

SEQ ID NO: 664297 - DNA, 461 bp, Homo sapiens
  misc_feature (268)..(268): n is a, c, g, or t
  misc_feature (309)..(309): n is a, c, g, or t
gcgtcgacgttttattatctctcattgttctgtgggttggactgggtttagcaggtggttctgctggtctttcttggggtctcttatgcaactgcagtcagatgaggctgggactgccacattcaagatggctttgcttacatacctggcaccttagtgggggttggtgaaagactgaagactgaaaaaatctccctccctctctctctctcttcctcttactctgtctctctgtctctcccttctttagccgcacttccagttctgnaatcatagattcatgcttgtttttcagcttggtaagattcntggccttttcttcctcttctgcaagatttgtcggtaagtcacttatcctctcctcaaggagttttcgttcttttgatagtttattgttctgatcatccatgaccacgatctcatcctccagtttcttgatcttgctctcagccgtgcctctc

SEQ ID NO: 664298 - DNA, 116 bp, Homo sapiens
aaaattagtaaagggaccatcagtttgacaacctgttcggtgtactccacaaagcctgcctttaactccttagcatagcaaaccaacatctggcaaggcagttgatttttcttcta

SEQ ID NO: 664299 - DNA, 581 bp, Homo sapiens
  misc_feature (77)..(77): n is a, c, g, or t
agcgatcagaggatcccgtaagaactcactcccctcccctcatactccggctcttcgagagggcattcatctactantgagggatccatccccatgacccactcacctcccattagactccacctccaacacggggatcaaatttcagcatgatatttggaggggacaagtgtccaaactatagcagtgtatatatgtgtatatgcacatataaacgttcggttttggtagtcaatgcttattaacattgatgaactactagaactaatgagtgctaaccttgacggatataagatcaatatacaaaaatcaacagtattccaatacccaacaccccaaattagaaaacactattttaaaacagatacagggtcgagtgaggtggctgatgcctgtagtcccagcactctgggagggcgaggcggatggatcacgaggtcaggagattgagaccatcctggctaatacggtgaaaccccgtctctactaaaaatacaaaaatcagccgggcatggtggctggcacctctaatcccagctatttgggaggctaaggtgggagaatggcttgaacctgggagg

SEQ ID NO: 664300 - DNA, 1684 bp, Homo sapiens
  misc_feature (138)..(138): n is a, c, g, or t
aggttataggactcaacaggtctcctctgtgtttgcctcgatggcgcatcacaaggcgctctccacatgtttagacagtcgtgtctgtcgctctcaattgtctagaacgataaacagtgaccgaggacacatgtgggngggcacaacattgtggggagggccacataaaaagcgcgcccgtcgtttgcctggcaggagtgatgtgtgcaacaccctttgttgggtgagaggacgtcctccctttttgtgggggctacttataacagaagtgtggctggctgcatacaaagtgtgtttgaaggcaagtgtgtcatgaaaaaacacagattgtgtgggggcgctggctgccaccaagttggccggcgccgatgtgttgcgctctcacaaagtgtggggcggccctgctcctaataaaaaatagcaacagggtgcgccctcatgctgccacatagtgtgcgtgggccctctccaagtagaaggatgtgtttaattattgtagtcaccctcgggggataatcctaatacgccgtcgaataggtagtaagtagtaagtagtagaaagattggtgttctgcaagaacaatctgcctgccttctacaagttttcttcggaagaggggttcctactactccgtagtgggccgaaaagaaggagggcgtattaatgtatcctctcctgtttctcccgcgaaaagttgttcttgtcctcaaaagcacagtttgaccatcctgttcctagaacaagttgttttgtgagcacccactgagctattcccccaacaattattctgacagcgttgttttgtatccagcgtaccacaaaagatgctcctcagctgaaaatttatctatttctttttttatcacggtaatcatgctgttcctaaagagcactgttcttgtttctgcgcgcaacaagaacccgtggtcgtggttgtcaacagcaccgcggcggcagcaacgggggcgcgtttatcgtctctcgtaaaatgggaaacctcgtcgcggcttctcttctttggaagacttcgggaggacacacatcgcctctgtagaaagatgtgtcggtgctgtctcaacagcgccccgccgagattttcctctcgagagagaaaattgtagagacaccgcgagagagcacgcgcgcgagagagacacacacgcagaacgtcgcgagagagagagagagagatatagggtggcacaacagcgctataacgcggggggtgtctccgcgagactctcgagaggcacctgtgtcaccccctgtggcacacacacaccacacagtgggggcgcacacttgctcacacaccacggcgctctcacgcacgagtggtcgccgccagaggcgcccggtgtgcgttctcacaccgccacagcgcttctctccgcacatctcacacgcccgcgcggtggcacaaaacttcttctccacagaggcgagtttctgccgggtcgaaccgggaagaaggaaaggtgaagtaatgagaggctgcacacacaggggtgcgccccccacaacgtttctctctctcagaccctcacactgggcggcaaagaaggtttccccggaattccaacctcacagaacaaatgtgcccaattgacccatctcgggaaatgaggagagccccccttggacccaatgtttgcttaatgtgcttcactgtgaatttcttta

SEQ ID NO: 664301 - DNA, 1010 bp, Homo sapiens
gattcattccagaaacgtggagctccttgtcgcgctcagatgtcacatctggtccatgccaactctgtgtcgtgtcttttattgtgaccattgccccattcctcttgccctcgaaccataggtgagcagtctctgttgctactttctccagtgtctcccaggtaagtgtgaaacttctctgatttactgaacaaatccagtcagaattactctttgctgttatgtcctcatggcttttggatttgtgacctccgacttatacatattatcacaattctacatgccagcttgtgatgaggtgactactatgtaccaggcattgaggatgcagtagtccacagtgcaaagatcgtctgtcccttatggatggagctgtgtatcgtatgagagagaggacaggcaagagtgacaagaatttgagatagtgatataggctacggagaaagtagataaagtagggacaggggacatatgacatgggagtatggagctagagattcgagatttaatttcagtagatcagggaaggttcctaaagaacatgactttctgagtaaagacctagagaagtgggagaagattctactcagaacattctgacagttcctggggtagaaatgtgccttgtctgctcaagggcaaggacgcgcgtgtccactggtggtggtcgtgcccaaggttgagagacatccagggggctgctttgggtgcctgggctggagccatattcccgggggcaaagggtggttcaagcccccactctcaaggggtttgcacaacgccggcaagtggcactggaagcactgaaacaggtggtgtggcgtacccccggcggaggcgcaatccagggggggtgatcccaacaacgacagtagtagcaatccccccacgaacctgacagaagaaaggggtcataacagaagtaagaggagccgcccaaaaaaaaggcgtcagtgacacgaggcgggtgcgagaatcacaggccgccaccaacaaggcgtcacttcgac

SEQ ID NO: 664302 - DNA, 126 bp, Homo sapiens
aagcacaactgagtacaacactgaatactgtagaaatgcactttgctcagtaatacttgagtagtcgcaattatttgacttatccatttggttgttacaaaagaagattcttaactgtaattcgat

SEQ ID NO: 664303 - DNA, 584 bp, Homo sapiens
gcaactctgcctcccgggttccagcgattctcctgcctcagcctcctgagtagctgggattacagatgtatgctaccacgcccaggtagtttgtgtatttttagtagagacagggtttcactatgtttggccaggctggtctccaactcctggcctcaaagtgatcagcccggcttcagccttcccaaagtgctggggacttacatggcgtgatgccttgacccgccgttaatgtccccatatcctcttgcaagggtctcaccgtctgtgcctcagttccttcattctctggggccgcttcgtcctcctcagggctctctcgtgttctcgagggccctacgccagagtttaatggtgctgcctaatcgttggtatagagtttacaacgtgttcggtagcagcacagtcgcaccctaccgtaaacgcgaaatactaatacgcatgattaggaaaggcattgcactcggaagtgcacacgctaattccgctcgaccacgtctggatcacctttgtcgccttccacagggtcgttagtttgatcctggggcgacactatagtgctgacccggtctcttttaacacat

SEQ ID NO: 664304 - DNA, 494 bp, Homo sapiens
gcgtcgacaattttcctaataaatcccctctcatatagctgtatatatattctgttgtttccacctctctagagaaccctgaccagtacagaaaccttctagactatgacatttgggcttgactgcttcctggctaaataacttagaaggagatttaaccagcattcaactgaattgtagattgggaccggggaaatttaaacatttggattggagaagtctctgcttgttaaagataagtaggggcagggctttaaaaactacaggccagctgcagtggctgatgcctgtaatctcagcactttgggaagccaaggcaggaggattgattgagaccaggagtttgagaccagcctgggccacatatcaagaccctttctgtagtcctcactacttggaggctgaggcagaaggatcacttgtgcccaggagttcaaggttacactattccagcctgagtgacagagtgagatcgtgtctcaaaagaaaaaaaa

SEQ ID NO: 664305 - DNA, 182 bp, Homo sapiens
ggcgctctagaggatccagaccgaagccctactgctgcagagcagcagccacccctacccgaagacgcgaagcctggcctcatggagtcttcagcaaaagaaacttatcactttgagaggagcgccccctgccaaggaggcgcagctccacagaaaacctgggcagagggcttcgcgatggg

SEQ ID NO: 664306 - DNA, 222 bp, Homo sapiens
agactcaagaaacctttggggtgctgttctttggtcacgtgaacccagaggtgcacatgggccccttgggtgtctaaacaaagcggcatgggaagaaagccctaaccccctgcacattactctgctggagaacggggcaactgaccaatcagactctactctgcaccggggtctactgaataggaacattgatcatgatatacattgtacaaataatgcacg

SEQ ID NO: 664307 - DNA, 100 bp, Homo sapiens
tgctggggaggtggtaagaggaagccccctccctcagtgtggcagtgtgccagatagggtgctgctggcatgacaggaggggtcatggcaccatacggtg

SEQ ID NO: 664308 - DNA, 166 bp, Homo sapiens
acacatcagacattcatctctattctccaaagagcacaccatggctgctgtgttcctctaccttctcttactatcctcttattgatacctttatcttatatcttttagacttctcctatattatagagtgaactggcattggacttagctgctggtctcgatcctt

SEQ ID NO: 664309 - DNA, 508 bp, Homo sapiens
  misc_feature (5)..(5): n is a, c, g, or t
  misc_feature (8)..(8): n is a, c, g, or t
  misc_feature (11)..(12): n is a, c, g, or t
  misc_feature (20)..(20): n is a, c, g, or t
  misc_feature (45)..(45): n is a, c, g, or t
  misc_feature (59)..(59): n is a, c, g, or t
  misc_feature (172)..(172): n is a, c, g, or t
  misc_feature (174)..(175): n is a, c, g, or t
tcgtnaantcnngaatgtancgagtaggagggccgctgcggtgancttgaagcctaggngcagggctcctacacctacctctctctgggcttcttttttgatcgggatgacgtggctctggagggcgtaggcacttcttccgcgaattggccgaggagaagcgcgagggcgnanntcatcctcgagtttcagaacgatatcgggggccgtgcactcttccaggatgtgcagaagccatctcaagatgaatggggtaaaacccaggaggccatggaagctgccttggcatggagaagaacctgaatcaggccctcttggatctgcatgccctgggttctgcccgcgcggaccctcatctctgtgacttcctggaaagccactatctggataaggaggtgaaactcatcaagaagatgggcaaccatctgaccaacctccgcaggttggcggggcaaaaccagcgcagacttgcggccccagggtctctgggcgagtatctctttgagcg

SEQ ID NO: 664310 - DNA, 676 bp, Homo sapiens
tgagcatgggtattccgcctgtcttacaagtaggacgttatgtctttacataacatatgcattcagtgctcgccagtggtactgtacagtgataatcagttcctccgggacttttctttttggaggcagcagtcatatctcctcctcggtgccggtctgtgatgctggggcctgtaatggcagtcctcaggcgccctgcattagagttgtgtacctcgttgtactctggagctcccgacaaatgctgtccctcccaggatcctgttggacaggcagtactgctagctttagagtacgtctggacccgctcctagggtccttgtttgtccagagcaagaatttgatctgaataggcccatctctgtactccttattaaggcgatctcaccatgcacagtgagcttaggtgctcccagctcccaaaatggtgccgttttgccccttcccgtaagcaaacgtaaggctccttaaagcctcctggagttatgcgcaccaaggccttggccaacctaaagggttgcgcggttgattcctcgggcaatgtggcctggttaggcttcggagcccccagttaccaaagcgttcccagcagttttgagtcagctctgaggcagctctacctgtgcatggttggttatacatactaaagttagcatctttgtaggaatgcgccttg

SEQ ID NO: 664311 - DNA, 158 bp, Homo sapiens
gcttcctgctgcgcaccaccttcgcaagcacagtgaggccaaacctatgtgtgaatgtgtgccacgtgcttacgcttggctgatgcctgcgcatcatgcctcaccacacgacggcacctttttgcgctcggataaaggcacaagtccgtgcacattca

SEQ ID NO: 664312 - DNA, 163 bp, Homo sapiens
  misc_feature (134)..(134): n is a, c, g, or t
  misc_feature (138)..(138): n is a, c, g, or t
gcgggggtgcctggtccttagatccagtcacttcgtcgcggctaaaacacgggtcggggagaagaaaccggccgttcagtgtgctggttttcttgacggccaggactgagcctaaccccgaggagcggccgctngagnaccaggagcccacccggcgccggcg

SEQ ID NO: 664313 - DNA, 366 bp, Homo sapiens
cacccggagcacttactaaaaatacaaaaattagatgggtgtggtggcgcatgcctgtaatcccagctactcgggaggctgaggcaggagaattgcatgaacctgggaggtggaggttgcagtgaactgagatcatgccagtgaactccagcctgggcaacaagagcaaaactccgtctccaaaaaaaaaaataaacattatatggagcaagcctaagaaggttcatctaaactgtccatctgcccagcccctgacagtttgaagatgagtaaagggctatgagtacaggtccggacaggcctggggagggaacgggaacccacatcgtggttggacaactcccagaagtgagcctggatgcggaa

SEQ ID NO: 664314 - DNA, 417 bp, Homo sapiens
atgctttatcagcatccagtcacctctgaacagttgctgcttagaaattcttccaccagataccctaaatcatctctctcaagttccaagctccacagatctctagggcagggcaaaatgccaccagtctccttgcatagcaagagtgacctttactccagttcccaacaagttcttcatctccatctgagaccacctcagcctggaccttattgtccatatcattatcagcattttggtcagagccattcaacaagtctctagaaagttccaagctttcccacatcttcctgtcctctgagccctcccagtctctaggaagttccaaactttcccacattttcctgtcttcttctgagccctccaaactgttccaacctctgcctgtaagttacttccacatttttgagtatcttt

SEQ ID NO: 664315 - DNA, 1316 bp, Homo sapiens
ccacgcgtcggcagcggcgatgcccaggcccttccagctactgctccaggtctccccacgaggtcctcgaggcagtcaatcatgccccctgccattcctgaggctacatgagtgccagcgtggccacaccatcccgcacgaaccccggacgacaactgctgtagtcccagcttactgaagctaccaccaaggagagccccttggagagtctggcatgaacctggggggcagacacacccgagcactcaagtgccaagagctgacttacccatttcagggcaccctggagacacccaaccgagcatcagatatccattgacatcgaaatacattcgacgggacctggatggtgaggagtcgatggaagcaggatcatgagggagcattcccacgggatcaccaggaaccgatcagagaaccaaccactgactactgacgggacgagacacccattccacgggcacgccctgcctacacccacacagacacagaacgacaagacacacaccgcctacgagggaaatcctgataacctaacacacaacaacgacacacacaacaacgctcgcacttggcacgaaagcaggacggagggcagacgcgagggactcgaccacacagaaaagcacaacagcaacgcgaaggaccacactcacaaaagacgcacaacaagcacccaccctacagaatgcacacacaggccgcaaaacaatgatccacgcggccacacagcagaacacgagcgcacacacacacacaaacaacgcgaagggcaccaaagcctggtaacctacgacaaacgaccaaagaacacctgagcaggaacagcaccccccgagacagaaacgcacatcacacaccatacaagtagaacacagacccaaagggacaacagacagaagacaagaggacaccgggacacacaaagaggaaacgaagggcaacagacaaaagagacgcagaaggaaacaacacacgacgaaaacaaggatccacaccgaaccaaaaatgagaacagcaaacaccaacaaacccatgccaaaagagagggaaacaaggcaaccaagtgaacaacaacacaaggggagccaacccaaagagaacgacgcagcaaacaaaaggagggaagaaggaacaaaaaataaaccagacaacaaagccctgcaagagcaaaaacaagacaaagagacaacacaccaacgagaaaagaaaagcagcaacacaacaacaaacacacaacacgcaaaccacaaaaaaaaaagagcaaccaagaaccagaagaaaaaacaaaacaaaaaacaaaccggagcaaccaa

SEQ ID NO: 664316 - DNA, 200 bp, Homo sapiens
tgaggtctcagtttcctcattggaaaagtggaggcaatcagccgggcgccgtggctcatgcctgtaatcccagcactttgggaggccgaggcgggtggattgcatgagctcacgagtttgagacccgcctgggcaacatggcgaaaccccacctctactacaaatacaaaaaattatatgggcgtggtggcgcacacctg

SEQ ID NO: 664317 - DNA, 525 bp, Homo sapiens
ctcttctcgatgtagccgcctgtggagggagcagagagttccagaggaggctggcctggtggaaggcaggatgggaggtggtcgaggaggagggagcccagcgccctcccccatgggccggcccgctgactcttgccttgataaccaaggcacgcctatagggggcactcagtggcaagcaaccgagcggggtgagcgtgctatacgggaggaggagccggcaggacgtggagtgagtgcatgaggagaatggagcgggcgccatgaggaagggatggcaaggaagccgagttagaccgccagtggtgtagaacaggaaaggctgaacacgagacagcggacacacgccacgagaagagaagaagaagacaatagaaaaccgtgggaggcgtaggacggacagacacccgaaggaaactaacagatcgtaggcaataacgcatgaaacccacataccagcaaggtcctaagggggatacataaacgaaacctccctcacgacccacacgcgaaccccccgaacaa

SEQ ID NO: 664318 - DNA, 709 bp, Homo sapiens
ctgtacacagacatcatcaacatcttcctgtacaggttcagcgtaattgaccgatagctcggattgagctgaggtacagctggttgtgcccgagtcaggtggtgcggatgtgttggatgctgtgcatgggaaggcagtgatagattgtaatttcccgtgtctattgatcaccaggaatcaggcctgagggaaagaggattgcctgcatctccaagcctctccttgttatgtacacatgctaggatacgtgtctcgagtctggaaccgtgtgttggtgccacaaggaattggtgcccatttagttccttccccgatcctcctgtctagatgtggggcaaggcaaacgggccaataggtgtgacacagatgggactagtcatcctttgttcataacatcaatttgtgtgctagtgacgacctcgtgataatagcctattgcacctattcgccaatggggaccttgtggggggcaagcgacctaggtgtccccctgtggagggatcgaagtgcaactatggacagacccgacaccaaaggggtggacaggcgtagcaaccggatcatgtttgcacatacgatggattatcccaatgacttgatcaataatttcatgtcagcttagcgattcgaagaccccaatatgatcttgctcataagcaccaacacacctaatatggaataaatttggtagaaatgcaaacacattaat

SEQ ID NO: 664319 - DNA, 169 bp, Homo sapiens
atcgagggcacccacccatttcgtgcagtctgtgatggagagatagagctcatggtcattgcagacacacgaagtgggtgggtgtatggtcctcctgagattacgtgaaccatgcagtaacgtgggatgatttgagagtctgtagtgatgctgtgtgcatcactgtcat

SEQ ID NO: 664320 - DNA, 451 bp, Homo sapiens
ggcgctcaatggaattcctttctcactgaagattttcccaacttttaatcaatagaagcacagagaaaagaggcaaaacgatcaaagaaatttacgtttttcagacagggcgtcgacttcacaccaacaaaaaagaaaaacaaacgaataagctttcgatcttcattttctttctttcattttaaaggcagactgagacgcttttaaacgcgacgtcataaacctaagtaacttgacttgcaacaacaagttttttaccctcctagacaaagcaggtctctttatcataagcctcgcagcacttttctacaaaagctgcaaaataatccataacaactttaggtcgctctttcgccgctttggctcgtgtttatagagctaaacaggtgtaattcgcttttcgactcgcttttccttctgggaaagtgtgcatatatttgaatgaaggagg

SEQ ID NO: 664321 - DNA, 251 bp, Homo sapiens
ccgcaccttacgaaaggcaacatcatctggcctcaaccattagtatcgctgcaatgacaccatccctgaggacttccaagagtttcaaacccagaatatcgaccggtgcgataattaaaccaaggaagcaatctgtaactagcttttcggaacactaaaaccatatatgttttaacttacaattttctttagacttttaccaacccaaatatatcaaagcgttttatgtgaatgtagcctatcggagaaga

SEQ ID NO: 664322 - DNA, 191 bp, Homo sapiens
  misc_feature (11)..(11): n is a, c, g, or t
  misc_feature (20)..(20): n is a, c, g, or t
  misc_feature (155)..(155): n is a, c, g, or t
gatttcggcanaggcaaatnatttctaatttcacatgctctttattgagacatacctgagactgggtaatttattaagggaagaggtttaattgactcacagttcaatatggctggggagacatcaggaaatttacaatcatggcaaaaaaggangcaaacacatccttcttcacatggcggcaggtgaga

SEQ ID NO: 664323 - DNA, 286 bp, Homo sapiens
  misc_feature (6)..(6): n is a, c, g, or t
  misc_feature (51)..(51): n is a, c, g, or t
  misc_feature (66)..(67): n is a, c, g, or t
  misc_feature (73)..(73): n is a, c, g, or t
  misc_feature (88)..(88): n is a, c, g, or t
  misc_feature (129)..(129): n is a, c, g, or t
  misc_feature (237)..(237): n is a, c, g, or t
  misc_feature (256)..(256): n is a, c, g, or t
  misc_feature (276)..(276): n is a, c, g, or t
aaaaanagggacatcatcttagcaggacacagaggaaactagaagatagtngagcaatatactcannattctnaggggaaattttttncaacctaaaattctgtaccaactcttatgagctggattgtntccctccagtgtttctgtgttgaagccctaacccccagtaactcagatagggccatttaaagaagcaattaagttaaaataagaccattagagttggccataattcantctggtgtccttttaagangaggaaatttggacataggnagggccatgt

SEQ ID NO: 664324 - DNA, 290 bp, Homo sapiens
cgacctagaggatcgcccctggtatcccacccacttcaacccaaatcagctagacaaccccggccatgccctaactgagctcagggctctcacccagcctgaaggtctcaggctcattgcccttagcagcaccaactgcccttccatcttcagaatatccctagctagcttaaccagacacgctggacccttgtagacgttacctgacgcactgtgctagcccaggccgtgacggccctacagccatgcctggcagagctcgctacgctcccacggcaaacgcaataagc

SEQ ID NO: 664325 - DNA, 284 bp, Homo sapiens
aagtttttccccgggttaaagtttttgggttaaaattttgaggccaattgcttgggaaaggtttgctttggttttttgaaatttttttttaaaccaaaaaaaaggcccggaatttttcccgatttttaattttttttccaagaaaaactaaaaaaaaaattcccagttccttttcaatttggggttttaaccccaactaaaatttttttttttttgaagggattcccaattcccgtttttggccccttttaaaaaatttttttcccaaacccagggggggccca

SEQ ID NO: 664326 - DNA, 460 bp, Homo sapiens
  misc_feature (402)..(402): n is a, c, g, or t
agacaaaatcactgctttgggtgacagaaatgttaaactttaccttatgaactggacaaggaaagatgtggacgtctggttttggttaattttttggaggcttaaagaagtgattagatagctagcatgagcatcttgtgactcaccaggatgtcagttcctgcaggtgtaaaactttgttgccattcccagggctcagctggacacacgatgggggccgaggagtggagttgaggccagtggctgctccccaggggatcaggtgcagcaggtttgtttctttcccctgttaatcctgggagaccaaaccttgatttcagctatattttccctctacctttaccagataaccttacctttaccttacataacagccacttttcatatttgtgaagtaactcncccccacaactttttttttctgaaagtaaaacaacttggtgaacattggcttttattc

SEQ ID NO: 664327 - DNA, 145 bp, Homo sapiens
ggagcagagtggttaaggacttacaggaacttaactattctggaataaaggaatgaatcaactgaccttgggccagcaggtttataactaaattgttacttgcctattctacacccatgttaatcagatctcatgtacctgattt

SEQ ID NO: 664328 - DNA, 259 bp, Homo sapiens
tgaactcgattgtctgcacacgagggagctgagccgaagcttcatcaatcagatcatcctctgagtagggctgtcagaaggccccagttcctaccgcattccccttgaggctgctgtctgcttggccagcctctgtccagaaaggaccagagaaagccaggcgggatcgtcgacatgccggggagcaatgtggatggtctggtggactcctgggttttctcccccctgagtccctaataaagcccgtgaaccttggaaa

SEQ ID NO: 664329 - DNA, 530 bp, Homo sapiens
tcgttcgtgcatggcacgcgactatctgagcgctgccccaacagtgtcatctctgtatccgtgtgatacgtacctgtgattgacattagacgccaagttctagtccggccaattactctcgaggtgtcatgcacctcgtagcgatgcgggcattcttttgtcttgaatcttgtactacggagtcgagggcatataaaaagctgaatgatgacaggtagtgtcgtgatcctgtcctcttcaacttgccacaggccagtgatgctccccattcttgcttgataagtcttctgttgaccccatgtacctgagtgacccccacgtacctgagtgtgacaagcactatggtgcttgacctcagtccagctgcttagaccttgtaccttgccacacgcccacgtgctgaccaccttgcgtctagagttttgataaatctatcctttggctgattaatatgagtgagtggtgtcttctgacgccatatcttatctggaacactgtgtcgtgacttcactttcctgtctggagcacac

SEQ ID NO: 664330 - DNA, 235 bp, Homo sapiens
actagtaccctcacttcccgagttgggcggtctgctgaccaccgcttgtggaatacgttgcgtgtgcgaatttcgcttcaaccttctgcgccgcattgcccgcttcggggccctgcacttccacggccagcaagttctgcgaggcccagtcttcatcggtgcgcagttcaaaggcgaaacgcccgtctgtatcggatgtttcgggtttctcgatcttgatgtcctcgattaggct

SEQ ID NO: 664331 - DNA, 141 bp, Homo sapiens
acattaactttattgcttcactttcggtagcttctgatgatgacatgaagtcactggttgtgtagaaggttgattttgagcagaattagaccaagtaattggaaatactgaaggagcaaataaatatgatatgggagtgta

SEQ ID NO: 664332 - DNA, 204 bp, Homo sapiens
  misc_feature (58)..(58): n is a, c, g, or t
  misc_feature (64)..(64): n is a, c, g, or t
  misc_feature (98)..(98): n is a, c, g, or t
  misc_feature (128)..(128): n is a, c, g, or t
  misc_feature (134)..(134): n is a, c, g, or t
tttgggagggatcttgggccctgtggattgagctacttcatgggtgacatggagaggngggctnggccatgtgtgggagggatctgggccctgtgganggagctacttcatgggtgacatggagaggngggctnggccatgtgtgggagggatctgggccctgtggatggagctacttcatgggtgacatgggccgggagcccg

SEQ ID NO: 664333 - DNA, 257 bp, Homo sapiens
  misc_feature (126)..(126): n is a, c, g, or t
gagtgactatattctgggggcgaagctcagagcccttagtagaatggaggcggcctcctgggtggcactggtcagcccccttcactgcatgacgaatggtggaggaaattcccagcaacatattgnccatgccttgcagcagtgtggaggtccaacgaaggagctccccttgtttggctccagctctgaccagactgcgacaccatcaggcgggtgtcatcctccagcagctggaagaagtcctcactgtccactcc

SEQ ID NO: 664334 - DNA, 176 bp, Homo sapiens
gccaggctcagtgatcgccccatgccgccatcatccacgcgcccagaatcaacgtggtgcccatgccctccctcgggccctccttattattggccgccaccccatgatggcacagctgtgctgtccactggcactgtccagtcagcccaatgcccctgtcatcccactccaccccc

SEQ ID NO: 664335 - DNA, 630 bp, Homo sapiens
agctgggattcaggcatgcgccacacacccagctcattttgtatttttagtagagacaggctttcgccatgtaggccaggctggtctcaaactcctggcctcaagttatctgcccaccttggcctcccaacgtgctggaatcacagacatgagctactgcacctggccgtatagacttttttttcctatttttttcagcagctatgaaaatgtacaaggcatcttcaaaaagttcatggaaaatgcttattatgaaaaaatagtgcatgggttttaatttttccttttttttcttttggagacagagtcttgctccatggtccaggctggagtgccatcttggctcacgtgcaacttctgcctcccaggctgaagtgattcttgtgccccagccacccaaattattggtattacaggcacgcaccaccacatctggctaatttttgtattttaagtagaaacaggcttaggccacatgggccagactggtctcaaattcctgggctcaagtgatccacctgtcttggcctcccaaagtgctgggattacagccatgagccactgtgtctcgctggatttcaatttttttcaccaacataaacttatatgaacttgttataatgtctctga

SEQ ID NO: 664336 - DNA, 284 bp, Homo sapiens
gcgaaaagcaatcttggcatgtgtttccttctgataggggccagttgcaagtgccatcctacaaggtcgcgtggagcaagcttgctttgaaaaccctgatcaccttgagttctgagcagggactaggcttgcaggtaagataattggccagggcacccagtccagaaggagcaatggcacctgggcagtccagggcttaaagagcctgctccttttcggtagaggagaggccataactggtgtggtgggtggctttccttaggttggcaagcagccacctccct

SEQ ID NO: 664337 - DNA, 861 bp, Homo sapiens
gccaacttccggcgtccgtcgggcagcagcgggctgtctatcccggtgaggacccgcggccagtgcgggtgctggtttgccattagcggggcctttcctgaggacggcgtacggagtgtgtgggggaatgaaggatggcagcatgccgtgcttaaaagctgtggtagatctcagtggcacactttcaccattgaagatgcagttgtgccaggcgcacgggaagctcttaaaaggttcccgtgtggtcctgtaatcattaggttggtgaccaaatacaacaaagagagcaagcaagacctgtaagaaggtttgagcaacacttgggaattggattatctctgacagattgactttttcacattcttcttgactgtgcaggccagaagtttactaagaggcggaaacaagtcagacccaatggcttgcttaggttgatgcatcgcggcactacctgatttcaacggattaccacacaagttgatcctaaatgctgggggtcatggggatgggcaccaagaacacctttttccattattccaaccattctgaactcaaagccatcccggtttaactcccttggatgggagccacctttcgtgattagcaatccacaaaaggcaggttattaccacggagggaaaggatggttttaaccctgggggggctgtaccaattgtgtggcctgcttaaaaaggtatggccacatgataccaaaagcaacacgtccgtgggcgacacccgaagaaacgttctttgttggcaagcattgcgggccatggcttgtgaaccttgagaggcggcatgattgcggaatattcgcgcgatatagtgggcggcccaaatctcgcagcgggcgctaaa

SEQ ID NO: 664338 - DNA, 370 bp, Homo sapiens
aaaagccagagagaacaaacaaaaatataaagtaaaatttcagacctaagccctaatatatcagtaactacgttaaaagtaaatgatctgtaattgtcctggttgcctaggactgtagggcttcctggaacacaggacattcagtgttaaaactgggaaagacttgggcaaaccaggatgagttggtcactctagttacatttttttaaaatcaaggttctacaaaaatcccttaaaaagtgtttcctgaggccgggcgcagtggctcacacctgtaatcccagcactttgggaggctgaagcaggtggatcacgaggtcaggagatagagaccatcctggctaacacggtgaaaccccacctctactaa

SEQ ID NO: 664339 - DNA, 363 bp, Homo sapiens
cagtccctgctgttgactatatgttgataccatagcagagtgcacagttatctcctttcaggatatcatatctgcagatagatttatgtcgtcttgtccagggcatcatattatttggattgaatgtctctgtttgtaaaactggtcggtgtggacagacgataagctccaccattaccccttaagcttgtggactggggccattcgagtaaggggcttgttacacaccgactcattgtctgatctttcacaataaatagcagacaggtgaagagctttatagagaagtggaacgttggtacccttggatttgcctggttactgattttcttttgttgtctttaagtggaggttcattaagtt

SEQ ID NO: 664340 - DNA, 702 bp, Homo sapiens
cgtgcagcagcgggtccgggactgatgggcagcatgcgggggctggtggcgggcggaagctgaggtgacgaaggcatgcggcggtggcggccgtttccctcacggtggcggaagaccaaggcggcggcggctggaccggggatgctgggcctggcccggtcccctgactctgttgggctgttggcaagaggccagacagtgggtgcctgtgccggctcactggcgccacccctgtaggactcaccacctccaggaggctcactccatcctgaggtgaagaccgcacgtgtgtgtgcccttgtgcctctggaccagcatctacatagactagcatgcgtgcaatggcacagcacaggcctggaagtaggagtcgtgagtgctaggttgtgctagcagcctatgtatggcgtgaccttggtaccctcctgaggggagatggatttgtgcgaagccagagtgaaacattgcacacgttactgagtattgcagtcgacttcccaaacagaggcggcacttcataccaaaagggcctatcgatgaaaggggaatgtaccattgaaaagaaccatcatgtacaacacaatcatttctgttgaaataaacatacatgtcgcaagtagttagaggaagacacaactaaccattattagactgaatagtcctaggcatacacacacatccaagctgaactataaataaagg

SEQ ID NO: 664341 - DNA, 266 bp, Homo sapiens
gaggagcgctaccttccgaagtgctcctacttaaagtgcgtgaagagaggaatccaacctcaatgcgaagattgtttgccaccttgatgttggagttttttaaggacacagaatttcctattatgatttcttccctcttgccataaatttacctgaaccttttttttgctgtttccccaactccaattgccatctgaaactgcctgtttgctgtctaaatatgctgggctgcaaactaactgatcacatgcccttttagctttgaa

SEQ ID NO: 664342 - DNA, 764 bp, Homo sapiens
  misc_feature (299)..(300): n is a, c, g, or t
gcccagagtgagcccaggttgatttcaggcggacaccaattagatgtccacagcaatctccaggagcccaggacaccgggtgacccagagatgcaaaggcttagggagcttgctgcagccattgttcgggccctcagtgctcctcattctggggccctgctccatcgggcgatgtgacaagtcttgcccaggtcttggtcaagcacagtgcgctggggggaaaacccttttcatggcccctgagtattggcaagtgggccctaatatttcgccgtgtgtgcccgtggtcaccctttggnngattccccatcctgttgtgacaaaaagttcgggacccttttttttgtgtcgcaccaaagtggtttatcaccaaaaaaaccttcacacaaaaagtgtttttaacaacccacgttggggggaggtatgtgtggcacccaacccaaaatttgcgggggaaaaaaatggagggggggcggacacaaacaatgtagtgggttcacccccccggtagtggggatagataagaaaaaacagaggggtccaccaccaccccgtaagattttgtggtgggagggcgacaaccaaaaagaagaaaggacaaaagataacgggcaagctgaaagtttgtattttttttggtggcggcagcaccaccaaaaagttattgtcacttgcacacacaagatcccatgtatggatagttttttggttgcagaaaaaaaaccaaaaagacagtcaccaccttctgatgataccgctttgaa

SEQ ID NO: 664343 - DNA, 435 bp, Homo sapiens
aggtccccactgcacacgttacataaaatgtacatgtccaatcttgttattctctttagcattatgaaaataaatgtctccatttgcgactttatcttctctgtccaggaaacattccagatgcagatgcctgggcagccacctgctgagaggcaacaagggcagcagaggtcaagccttgaaaagggtcatattgacccgggattagcgggtaacccatgccaacgtgggtgtggtggtgcgtgtgcaggtgccgctggccgaagggggagtggcgatccctttccctttctgcctcccgttcccgctcagctgtagccttttccacaggagcaggagacttgctgcggtattggtttgtggctggtgacttctctctgctaagtaaatcaatgaccattcattgagaactgatggggaccgaactgtgcatgg

SEQ ID NO: 664344 - DNA, 252 bp, Homo sapiens
cggcatgagttcagttctgaaaaaggaaactggtgcttgccaggaagaaggaagtcttcctcttaagactctagcagattctcttagaccagtggtttgcattttctgatatttttatttttattttttctttttgagacagagtttcactcttgtcacccaggctcgagtgcaatggtgcaatcttggctcactgcaaccttcacagcccggattcaagtgtcctgcctcagcctcccgagtagctggaat

SEQ ID NO: 664345 - DNA, 139 bp, Homo sapiens
accttatactcctcaacgcttatactttctcacttcttcctcaacgctttatactttctcaacgctttatacttcctcaacgctttatacttccgtattgaattccagtataatattaagtatgcatggagaagtataa

SEQ ID NO: 664346 - DNA, 675 bp, Homo sapiens
ctggaggaattccggacgaggggaaatacacatttgctgctcacatggatggaacatacaaagtttgttttagtaaccggatgccaccatgactccaaaaatagtgatggtcaccattgatattggggaggctccaaaaggacaagatatggaaacagaagctcaccagaacaagctagaagaaatgatcaatgagctagcagtggcgatgacagctgtaaagcacgaacaggaatacatggaagtccgcgagagaatacacagagccatcaacgacaacacaaacagcagagtgggcctttggtccttctttgaagcccttgttctaggtgccatgacattgggacagatctactaccctgagagattttttgaagcccgagagatgtttaaaaagcctctttcctgagaccccaatcagaaattaactgttacccaacaacctggccataaaaaggcaatagtttctccatttttattttctgaaccgaccattacaacctatggttccttggggataaaagaaatggggggaaaaagcgccttttaggaaaaataaggggaaaattggcaggcgggtggccaaaatttttttggtggaaggggggcccaataataaaggccctcccaggacccaaaacccgggagaggagaggggggatgggtttttccctc

SEQ ID NO: 664347 - DNA, 331 bp, Homo sapiens
agtgggcctcggggggctgtccctgggcccgggagccaatgtgaacttcttgttttaaccgggatatacaagaacaacaagatgactttatttcttaactgtctccaatcacatgattaacagtatttgcatacctgttgctgcttgcccagcaggacacgggtggcagaccgagcttaggttggaccccccaaggttgagaaggagccctgggctgtgcccagagcagggctggggctcacatgggggggcctgaggaactttaaactggggcccggcccatggggccctcggacggaaaattcttggttggcagtgcaaacaggaaacc

SEQ ID NO: 664348 - DNA, 508 bp, Homo sapiens
tacccatgctggagtgcattgttttttttttttcggattcattcaacatttcttggggcaaaagggggggtgggattaaagtttatggttaggatactgcagggatacaagttaaagggattggctttgggggtaaacaaacctgggtttgggtcccaaccctgccacttggtaactatgggagctccctgggccttttttttttaatttatgaaataggaatttcacttcttacctccaagggttgttgaaagaattaaaggggccttggaacaaaactggggatcaataaatatttactgaacggatgttgtttgtttaaataaagcatgaaaaagagttcttaaaaagggtcctgtgtgtagcgatgtgttggaaaatattaacaactatttttacctttctttttcctcaccatccttaaagccctaaaataaagcccctggcacatttcggggcattgaacagctttaatgggaggcggaatacctagcaaaaaaatacgccg

SEQ ID NO: 664349 - DNA, 521 bp, Homo sapiens
  misc_feature (507)..(507): n is a, c, g, or t
tgtgtcccagctgcttgtgaggctgaggcgggagaatcgcttgatactgggtaggcagaatatgcagtgagccgacgtagtcgtgccactgtactccagactctgggcaacaagagagagactccatctcaaataaaaaaaattaaatttaatttaaaaaaatgaaagaaaacagccctgtgtggatggagtcatggctataatatgtatgtctatcctttcttcttgaggtaaacttacagtggggaattctctgttgaaaatggggtgagctatcctgagtctttcctttaaaaagttgtgttctggagttgggtttgtgtgggtgaggcgcgtaggatcataacagatggtgatgatgaggaaaggcagttcaggccgagagatgtcaggagcgtggaacggcagtggaagagggcagttccaggactgcttgaaggaggtgaggagatgggtgcgattgtggctagagttctgaaagggaggttcctggtgatgactgagagncagattgtggaaga

SEQ ID NO: 664350 - DNA, 547 bp, Homo sapiens
  misc_feature (47)..(47): n is a, c, g, or t
  misc_feature (502)..(502): n is a, c, g, or t
attcgcggccgcgtcgacagggaacacatgttgttctggtcggtcancgccacggcgggcatgttcaggccgctcagggccttgaccagcggcttgatccgaaccaggccgtcgaccagggagtactcagtgtgcaggcgtagatgaacgaatgaagccggcatagtgatcctgtctaatctgtagaaacaacaaggcccggattgtaccgggccttggctaaaacatcagcagcgttaaagttcgccggaccgcccatgactctcataggccagccgtaccggcgcgaaggagcgtcggtgaatcggcgtcggccccagccgctgcaaggcttccaggtgcaccggtgtcggatagcccttatgcccgccgatgccataacccgggtagatcaattcgacagctgccatttcacgatcacggctgaccttggccaggattgacgccgccgcgatcgccggcaccttgctatcgcccttgaccaccgctttcgctggcatcngcaactttcggcaacgggtgccgccgatcatcgccagcttgggct

SEQ ID NO: 664351 - DNA, 349 bp, Homo sapiens
ctggcgcacagcggacgctgacaactgctctgtgcagctgagttgctcttcatgttggatgtctttcccaaatatgaatagaaatgggcatgatatttgtctcccagaggcagttacatttataccctactatccagtttgtttttacatgagttctcataaaactgtgagtttctaagttttggctttttttttttttaaagggactttgcggggtttttgctgccaccaggaaagaagcccctttcccctcccgccatgattcggagccctcctcagccatgtggaactttactggcaccaatttttttttttggcccgtttccacgctgctgttaaagccactcct

SEQ ID NO: 664352 - DNA, 739 bp, Homo sapiens
tcgtctcggagctatggtgtatctcccctcgtcacaatgccttgtcagtaggaacatccattggtctaagattgtggtgtgatcttagtcttgtctagacagttgtgtagaaggttttgatgacctacagagattcaaggcctagagggtactcgagttgttgactggtggtgttgtccttgactgacgcttgattccttaagtgacctagcgttttaataccaatatgcgcacgttctcgtccactcctgtgcgccagcagcggtaatctcttgatggttgtcatgatcccttgtctgcaccttgtcatggtcacagctgtgtccattcctggatttagtcatgatatcgtcattgatggtcatgtccaatccaagccattgctgcctagactgtcatcgttcgaatcaatgttgtcacatgccttaccgtatgtcgtctgtccctgcctgagtttctcctggtcttatgtactgctgcagacacgtccagagtgaagatgggtgactagaggagtatgtgtgggtggggccagctgccgtcactttatagtttacttgctggttttcctaggacagcatggagctgtgtcccttagcctttcagaggctgtggagatcagggccctccgatgcactcccacatcttgcctgagtgttgattgtggaggcactgcagtccaggctcgagtcctcagtgcggggagcaggatgctgctgctgactctgtgcagcgcgaa

SEQ ID NO: 664353 - DNA, 476 bp, Homo sapiens
cgccgattcttgaggataaaaggccgcccctttacttggtccttattgaaacagtataagatccacaaagcagaatttctaaatatgccttgaagaactaaatgaagtgttttgcacttgcctttactagatattctttacacttgtacaattatgtagtaaatgtatgtttacagggtttatcatgtttacagattaagctaatttctgtagtcgcatttttatatttttagtatcactctagtaaaaaaaccaaataatttgtttaaaataaccaaagagttgttataatgcataatttgtattaaagtatattactatttcttatgccttttaagatactgtttactatgaagacaatgtttttaattacaaatccagaattctgtaggcaaaatgctacagttcatatcttcctttaaccaaactgaagtacataaagaccatgtacatgtattcatcaaacgtttattgaa

SEQ ID NO: 664354 - DNA, 1194 bp, Homo sapiens
gcgcgcctgaggaggaggaggaggcggggtgcgtgccattgctgctgtggtgtgtggcggctgcgggtgtgtgcgcggtgaccggcggtcctgcaggtgtgccggtctctacctgtgtggccttgtgctgcgggtgctgcagcctgctgcccttgtgtgccttgtggtgcttctgtgtcaccctgctgcatgctttgcgcgtttttcccagtgctgcccctggctcgggtgccggccctgagtgggggggctgccgatggcagcggggtcgtgggccgagtgcctgagctccagtgccaaccctttctacgaccgctacctgcgacaaggatccagcttgctgcggcaggtgtcatgacccagcttgcttttgaggtccctgccttggagaaacgcagtgacatttcggaagcagccaggtggggcattcccaggcaaggtgattcttattcaacacttgttgtgcggaccaggaagacaagaattgcctttggggggacaaccaggtcctgtgacacagagcgattcacttaagggacaaggacttctcagtttcacactcttttaacccattggaggatggctacacaacacggaagatataacttgccagcacggcaacattaactaccagatttggcaggcaaatatttttgccacgcaaaagagattaccagttcttacgccaggttattccctgccgagaagaagttttgatctcgacttctggaaaccggggctcaggtaccttgtccaagcatttttctaatgttgcctctgccacagaagggcgaccggggttagctgaaggtatatctggtagccgaaccaaagttgtaaccaggtgttccttgcaagtcttccacttttccgcttgccaacgtatatataagaagttatttccgatgacccccggatggcggaatgctatgacgccaaaggcccatcttgaatttacattatcgacgtatatccttgaacctttagcagggcaccgactaagtgtgccttacgttgctggattaccttgtccgacaccgtggcatttccgacgattttctgcaagtgtttggcctgagtcacacagtggaattcgccagagccaaagattcagcctctcttcattaggcccagctggatccgcaggacaagccctaacgggtataagtggacgcacccttataccccttagac

SEQ ID NO: 664355 - DNA, 464 bp, Homo sapiens
  misc_feature (241)..(241): n is a, c, g, or t
  misc_feature (290)..(290): n is a, c, g, or t
  misc_feature (312)..(313): n is a, c, g, or t
cacgtaggcttaggtcgaggcctgtggttataaggcgcgcgggacatggggctgttgctgcagctgcggcgtgttggccggcgtggagagccgccaggctctatcaaggggttggtgtactccatgcaacttccatgaacgtgaagcagcgtgtacgcgctggtgtgcgaaactgcatgcgctactccgcgcgtgctgagatgtcctggtgatctgactcgagcagcacgtgcgctatccntcgcgatagcgtgaggaagaagctgcggccgcatcctgatgccaatggntgtgtacgctggtagttgaggnnttgatatgtatgcggagaaggctggcgtttccgacagcgggcgtaggtggtgcctgagtgtcgacagtgctcgtgtatgcgagcccgtgcacgcatgtgtcgaatgggctcagaggtgctgagttggctcggctcacggttcagtcgtggg

SEQ ID NO: 664356 - DNA, 492 bp, Homo sapiens
  misc_feature (43)..(43): n is a, c, g, or t
  misc_feature (58)..(58): n is a, c, g, or t
  misc_feature (73)..(73): n is a, c, g, or t
  misc_feature (108)..(108): n is a, c, g, or t
  misc_feature (161)..(161): n is a, c, g, or t
  misc_feature (166)..(166): n is a, c, g, or t
taacccccaccttttttaattggatggaggttaaaaccttaantttacccttaagggnttggtaccaggttangggccctgggaacttccaaccccatttattccacnccccccatggcccctggtttccccccccacttccggaaaattaaaatgccggnttagncatccatataggtccatttcccccccctccctgctgctgtgtgattccttggactttggggtatgagtttttcatccttcatgcagggttctgtcagttcatggtatagtgattcagtgttaaaatggtggtgtctcagctggctgtgcacattccaaccttgtcaaattaatagtcctgagcaagcaagaaaaagaggtaataacatacccatttctttatgaatataagcttataatattttttcatgtgctatttttactgagcaaattgtatgtctcacatgttaacacaataaatatcttgacaattttattttctagcat

SEQ ID NO: 664357 - DNA, 1035 bp, Homo sapiens
  misc_feature (1035)..(1035): n is a, c, g, or t
agtatatcgtcacacctcatatcctccctactatgcctgagaaggaatagtacgtatcgctgttcattatagctactctcataaccctcagcacccactccctcttagccaatatggtgcctatgccatactagtctattgcggccgactgcgaagcagcggtgggcctagccctactagtctcaatctccaacatgtatggcctagactacgtacataagagcctaaacctacgtccaatgctaaaactaatcgtcccaacaattatattacgtaccactgcacatgatcgtttccaagaaaacggacataagtttgaatcaacacaaacacccacaggcgtaattattagcagtcatcccatctactattgtttgaaccagatcaagaacaacctatttagctgttccccaatcttttgctccgagcccctgaaaaccccgcatggctaatactaggctactctgaatcctatctccatcacaatcatgggcaatgcgaaccgccggcttatccaagtgaaccgctatcaggaagaaaagaggtgctagctcgtctatagcgtaatctcgcctacaaatgatcctgatgttatagcgatgacagccggccacagaactagtcatattaagactattcgttcttcgaaaaccacaggttagtccgcatcttggctatcattacccgattgagggaacccagcataaagccttggaagcgaggaagctacttagctattctagaggctaaatacgctctcattctccctaagtcatgtacggattgaaagtcacagaccctagggttgttacccatcgttatactagtgtcggtggcgcgaaatgcagtcgtgccccaggtaatgaaactccagtctgttgtaggaaagctggagccatttgtactaaacactgagcccgcggtggaatgcgcgccttaagagggggtatagcaagtaccgaaaagactccgttgttgtaagaacgtcgcaacgttaggtcgggccgttaacatcaaatccatctcgctgagggn

SEQ ID NO: 664358 - DNA, 660 bp, Homo sapiens
gggaatattatgcttgaggcacagaacgcgtcctacagagcgtttaccaaaatggaattgagagacaatgcgaatattgcacgtgtacactatgtatcaccgatatataaacccatcacgctcttatagtgccaagggactataacaaatcccttgcccgacacatataataagctgagaatgtaatgtgaaattcccacggtcttagccgctgctctattcaagaaagcattggcactaggagacagcaccaggtggctatgaacaactctgagcttaagaaccttgaacagacactggtaatgcctagtaaaggagttgagggcatgactaaacacctaacgtggtacttgaagagaaaccaactcttatggagtacacaaatatatgagctgcggggggtgttgttttgtatttaaataacaaagacactgatggtggaatatttcctttatctcatttgtggggatgcctatgcaaaggttatggaggtctgctacaagcgcggtggcctctttggaggagcaaatggaccttaaactcccggataaaagcaaggccccaaacaaagggctttttgacctgggtgggaagcggaccccccccccttggtgataaacttagaaaggcaatggagaaatagttaattccgggccccgt

SEQ ID NO: 664359 - DNA, 412 bp, Homo sapiens
  misc_feature (48)..(48): n is a, c, g, or t
  misc_feature (50)..(50): n is a, c, g, or t
  misc_feature (71)..(71): n is a, c, g, or t
  misc_feature (75)..(75): n is a, c, g, or t
ggcctgattgtggtatcgagtgtatgactgctcgtgaacacggcatananattaacccctcgaccatcatnatcngacccgacgctcggatatggcagattgtctacaaaaacgtcggagacaacgatcggggcattactcgcctgcaggagttcaactactacgccacgcgcatgctgcaaaaccgccagccaggcgaaaaggtgctggccgtggtcggcaggtctcatatgaacacggcccgcaacgttccaggagtggccgaactcacgggcggaataggagtaggcgtctacccggcaacaacaaccgacaaaagcattgccatcagtggcccttcaatccgccgagacgccggagccagcgtagcgaatagccatacggccggtgattaccagattttccagaaagt

SEQ ID NO: 664360 - DNA, 611 bp, Homo sapiens
  misc_feature (9)..(9): n is a, c, g, or t
  misc_feature (53)..(53): n is a, c, g, or t
  misc_feature (105)..(105): n is a, c, g, or t
  misc_feature (161)..(161): n is a, c, g, or t
  misc_feature (535)..(535): n is a, c, g, or t
  misc_feature (569)..(569): n is a, c, g, or t
  misc_feature (572)..(572): n is a, c, g, or t
  misc_feature (608)..(608): n is a, c, g, or t
cagtgaccnaaggcaattgtgaacacaggccaaaagcttacgtattttgtttngttttcatctgttcctgctgctgtcacaaaacaccgcagactgcgtgatttntaagtaatagagatttatttctcacagttctgaagctggaaagtccaagttcaagnatctccgcttcccagatggcacctcgttgccacatcctccagaggggtaaaatgctgtgtcctcacatggaggaagggaagcccttttataataaggctctaatcctgccaaggcacggggcttatgcccgtaatcccagcactttgggaggctgaggcagacagatcacttgaactcaggaactcaacaccagcctgggcaacatggctaaaacctgtctctacaaaaaatttaaaaattaaccaggtgtggtggtgtacacctgtggtcccagctactcgggaggctgaggagggaggatcacttgaacccaggaggtggaggttgcagtgagccaagattgtgccattgaacaccagcttgggcaacacancaaaatcccatctcaaggccacgcgatggtgtcnacnctcccagcactttgggaggccaaggtgggtggatcnact

SEQ ID NO: 664361 - DNA, 228 bp, Homo sapiens
ccctcaaaacctgtccctggcagccagtgctttctgtatagggccataatggaattttgaagaaatcttggggagggaaggggggttggaacaaatgtttgttccctggaggccagtccagggctcaggcctttagactcattgtaagttgcccctgcccacatgggaccaaagggtgtggttagtcaatgaagggggccagcattaaaggctgttggttaacctcca

SEQ ID NO: 664362 - DNA, 793 bp, Homo sapiens
ttcgtgtttttctatatttgcggatgtgagtactattgtattgaccggtaatcagcttatgacctcttagctcaaattgtaggtgtacacttactagtatcatgttggtagcttctctatcgcaggactgtgttagccgtttctggtatatttctcgggggtatatttgtcgagcctatcggctgttccctgaaattgtatgttagtccacgtgcctttttattggcaatgctcaaattgcgttgggtttcccaggttatctcaggaagcttgatgtcatatgtagtcacctgtacctgggaattcagtggttgcagtgtactgagatcacgccatctgtagttggcttgcacaaatggtgtagtaccccttgtctatttagcgagatttaagagagttacctgaatctggaatcctttaatctttggtttttccttaaactttgtctataagttgccagcatcttgtacatattgtgtcaattatcacattaatgtgttcatttcgtaagtaagtagtactcaattggataatgatcttactgttaaaagtggctctagtttgcagtgcccagcaggacactgacagtcacagctgtgtgactttttgtgggttacgtaatttttgttgagcctccttttttcttctattcaatgaggattatagggcctacctcataggattattatgcattcccctctgttcaatgcacgtaaagtttttatcttggattactaactcaccattaacaaccattgctgagcaccataggattatattttgtttcacgaat

SEQ ID NO: 664363 - DNA, 232 bp, Homo sapiens
atcaattagaatgtcgggtcactaccagtaccctaaagtaccagagatccaatatgtgcctatccataatgacgagttctttaattgtaaagctccataccttccactaggcacacatatcaaaggtcattccggaaagccgaccatgcatcagtatcacattagtgcaaaggcagatttatcacgataaattctttgcaacttctgagggcttcaattaagtcacttaaga

SEQ ID NO: 664364 - DNA, 969 bp, Homo sapiens
  misc_feature (328)..(328): n is a, c, g, or t
atccctgagaatccaaaattccccgtgccacctatcacaccccaaaaaaaaaaaaaaaaacaaaaaaacaaaaacagtgttgcggcccgaccttcgagccccgccgaagaaggcctttcctatagcaccaacttcgctgggcgcgccgcgcggcccccaagatggtgaagtagacacgagcgccaaatagccggtatccaccatagcgaagaaaccgcgggccacgggcaccaagcgcgcgtgggacattcctcacccaacttaacaaaaacgcccgcggcggcacaaccggacgcgttccgtgacaacaacactccagactgggatnctcctggagacgccaccaaacagcgggcacttctataacaaagcggggactctcaaagcgaagacctcgcgaaatatccaacattacgaacgccccgcgacacgggtgtccactataacacacaccactcgcaccacaatcaactaatcaacaacaccacgacccgacacgaaccgacacaacccccccaaacgaaccacacaaccaccaaacaactcacacacaagccgccgctcactaaccacccaatcgcaactcacctcccaaccaaccacacgacacaccgatatacacactccaatcccgacgtacgaatcatcgatcaaccgacgagccactcgtatagctccaacacgcaccgcgcgcgacgactgctgcacgatatagtgctgcactacacgctccaccggcactttacaccgccggtgtagtacaatacgagaagctaagaaacacaggacctgacgcgcaccatcctgaccgttcgtacgcactgtagcgtgcaggagcgtcaggctgcgtagtacggagtcacgtcttacgatagacaggcgtatggtagtttggcgtgccgatcatgcttgtctcagtcactcactgacggccgtcgatgcgtgccagcgtcgcgtatcgctcgtata

SEQ ID NO: 664365 - DNA, 482 bp, Homo sapiens
  misc_feature (446)..(446): n is a, c, g, or t
tagttcattcccctattccccctcagaaaaagcttaacagaaaaagaaaaaaagaggggggggggaggagatggtttggttggttttttggcctaagcggcctcaggcttcttttttctgacctcggttaagaaagctcagaaaaaaaggtggggggggggtctagcaagagagcactcacttcggaatgagtccaggtctcgggcactcaagaaagggacacggaaacccttctcttggcttctaactagaactacggtggtagattacctgggagatacaatggccaaaccaccagtgaagagttcctataagacaggaggggggcaaaggtgattagatggatcggcagccaacggatcaattaaccaataatcattagatggatggctttaggtcaacttagaaggaagctcttagggtcaggagaaaagaccctccttganttatcctagtcaatatttttctgaagactggtaagg

SEQ ID NO: 664366 - DNA, 395 bp, Homo sapiens
actgctcacacagagatgattagcatcacatggtgttttaaacagatcttttgacacttgagttcaccacaatagcaacaggaggtaactacaaaataattatagtagctcagtatgtactacagttaattttatgcagttatgatttaatactgtatctttgtttacatttctctcaaccgtgaatggtgccatgtacagtttgtttgtatgtttttataaattttaactttttataatagatttgtgtgtattttatagtaaatgataaaataggctagtatctatataactttttgaatttttcctatatttctaggctacatggtttgttttttccaaattgccacaaatctcaaaaaaattttccaatatacttacagaaaaaggcctgt

SEQ ID NO: 664367 - DNA, 122 bp, Homo sapiens
gactggcagttcggccagcttggacagcaccccatggacgggtacctctcccacaccgagcgggctccacggcgtgctcccctcatccccgatggagcattgcaccaccgcgctttttcgag

SEQ ID NO: 664368 - DNA, 194 bp, Homo sapiens
agaggctcccccccttttacgcaggcacagaaagacaaatactgcgtgttctcacttatgtgcgaaaactaaaaagcttgagctcgtgagaagcagagagtagaatggtggttaccaagagcaccggggcaggggaggggcagcttcgggtaggacacacgcccatccttggtatacacgttcctgagcagctt

SEQ ID NO: 664369 - DNA, 335 bp, Homo sapiens
ataccccgtgaaagcacaccccatgtgaagtgtgtgtaaaatctggtcaagtaagaccctctcagcacgtgtaaggtgccaaccaagcttaacctgagtgcaggtcagacagctgtgaactagccaatcggatcattcggatgtgaccggtcatatgtagagccgttgttgccgatgagcagtttcaccaggaccctgttaattgcctcagcacctagtgtacctaccactagccacttccagcctcaccgagatgagtcgcagaaagagaatgctctcacacatataggtgtgtgtgtgtgcatgtgcgtgtgcgtgtgcgtgtgcgtgtgtgt

SEQ ID NO: 664370 - DNA, 330 bp, Homo sapiens
accatcatgggcgtgaccttatgcgccgtagagcatgagcacccgctggccaccgtcgcggccaagagcaagccagaggtcgccgcattcatcgaggaatgcaaggccggcggcacgaccgaggccgagctggccatgcaggacaagaagggcgtgcccacgggcctgttcgtcacccacccgatcaccggcgcccaggtcgaggtctgggtcggcaactacgtgctgatgagatatggcgacggcgcagtcatgggcgtgccggcgcatgacgagcgcgacttagggttcgcgaacaaatacggcctgccgataaagcaggtcttcgcc

SEQ ID NO: 664371 - DNA, 181 bp, Homo sapiens
tgctgggattacaggcatgagctactgtgcccagctaacaacaggaatttatttctcacagttctggagtctgggaagttcaagaacaagaaattggtgagggcctgcttcctggttgtcttctcattgcatcctcacatggcagaagggcatagggactctctggggcctcttttataag

SEQ ID NO: 664372 - DNA, 373 bp, Homo sapiens
gaatttagatagaaacttagcaatgctttttgacagcaggtaacttggtgagtctggaagccaggtgagactgctaacctgtctgaaggtgagtgtgtcatttgagaaagacagaaggaaaaggaacattaaatgacttaggttcctgttctactggtctcatcttagtcattatctcatttactttatacagccacctgggaggtaagtgttatttttaccattaggtagaagaggaaaaggaggttaagtaagctgcccaagacctccagttagtatgcagtggagctaagacctgaacctaaacccatatggtttccatcccatgctctcttcttattaaacctatgctaactttcaccaaacttttaag

SEQ ID NO: 664373 - DNA, 84 bp, Homo sapiens
acctctctgtacttctgtgccagagttacgcatctttttttccagttgcagttcttcgggccagggacacggctcaccgtgcta

SEQ ID NO: 664374 - DNA, 1310 bp, Homo sapiens
tgtactgtaggcacatgtatatatcccagtaagcttcttattcttcactttcactttctacacttcttctactgaacctgcttttactaacgggtacctgtcttagctctgtgactaacttaacactactactactacaaagctcttcctgcagagacttactttactactatgaactatacttcttcagcctggctgaatcaaaagctacttctctcctacaaactttcgctcaaacatgctacttctgtactttctcagcaacttgaactgcaagctcatacttagcagcctcacacttaaacactacctctgtgccaagcaccacacagcacttaacactccatcctcttgagaaacttccgctgcaaactgccaaaactctaccgcgcgacaacaactagcgctttctaaagccacgtagccaacaacaacacaaccgacttccacacaactggccctatctgcaaactttcctccagcagcctactggcacaaaaaatgctgaagaaacacctaaacacttggctcctcgcacgaactggtcaaaacgcactcttatttcatcactcatcacagcatttggcatactagtggacccctgattcccataccatagatacgtgatcattatgaaactcaatttatcccatggattaattttcacaagccctctaacacaagcatttttccagaccttatttatacgcttatactaactaccttaaatgccaaaccttgcggggccccaaaggggtaccaggccaacctgggaagcattattctaattacaagaacaacaacactaacttaattatgcgacccacttactacgggctggcacttttcccctttactggtttaaaacttttggaagccctaacctacacaactttagaggccattactctcgagcaaacaacctcggttcccacaaaccaagccaaattatcccggcttatggcaatagagttggattcccattacgaagacgttaacgttctcggctaacctccatggggcaggattgacgctttccctctcaaacacgagttcaaactactctttggccgcacgacaggcaacaacatgcacacactggcacaactttctggggcaacagcacattgggcacacacaacgttttttgtcccccaacactatcccaaaggaaaccacaatcgtgctaaagccttaatttctatgacacaacgtaaacaaccacctgtagggcatcagtcactcaaacgaattcatttggtccggatcaccccccaacttgatcctcacaacaaacttcataaacgacc

SEQ ID NO: 664375 - DNA, 211 bp, Homo sapiens
gcgtcgacctctgcgagaaatacaaggtttggctggccatggcggcacacacctgtagcccccactacttgggaggctgtggtgggaggatcgcttgagcctgggaggttgaggctgcattgagctgtgattgtggcactgcactccagcctgggtcacagagcaaagagaccttgtctcaaggaggaaaaagaggaaagaaaagtcgacg

SEQ ID NO: 664376 - DNA, 277 bp, Homo sapiens
aacatatggtagtacgagctggtgtgaattcggcagaggctctctctaagttgttaaaataacttttcagaacaaaaaaaaaaaaaaaaaaacaaaaaaaaaaaaaaaaaaaaaaaaaaaaaaaaaaaaaaaaaaaaaaaaaacgggggtttttttggggggggggaaaaagggaggaaggggcggggtaggttcgggccccttttttggaagggggaagggggggccctaagggggggtaatgaaacggggtccggttttagggggggaaaggatg

SEQ ID NO: 664377 - DNA, 430 bp, Homo sapiens
  misc_feature (5)..(5): n is a, c, g, or t
  misc_feature (38)..(38): n is a, c, g, or t
  misc_feature (61)..(61): n is a, c, g, or t
  misc_feature (68)..(68): n is a, c, g, or t
  misc_feature (96)..(96): n is a, c, g, or t
  misc_feature (144)..(145): n is a, c, g, or t
  misc_feature (184)..(184): n is a, c, g, or t
  misc_feature (352)..(352): n is a, c, g, or t
  misc_feature (390)..(390): n is a, c, g, or t
  misc_feature (426)..(426): n is a, c, g, or t
gcccnaattaacaaccccttcaaggggcaagaacttgnacaaggacgactttaacttgggnaaacccnaaaaaagcagcggaagatcgattgtaanaacgacgtccatgacccaggcaacagaacttcaagcagaaagtggtannctgctgcggaggttcaaagtgtccgacgaggtgagtgcnccgcgccttctgctcgcggcccccacgcctgcaacagcacctggtcgggaggaggcctctggggtctgtctccgggccacctctggttctgccgctcaccgtctgcacggccccgccagcatcgcacagtctgcgaggcgcagtgacagtgcactgctcccgggctcnaggtacaccgctgggtctctgctgaagtacaagtcgtnaatacactggaagtcggaaagtcattttcagggggntgta

SEQ ID NO: 664378 - DNA, 104 bp, Homo sapiens
acctccactttctcacttgtcactattctttcatttatgttgtgttcgtaccattcaatattttacttgtaatgcctttcaaaattcaagtagctataggtgtg

SEQ ID NO: 664379 - DNA, 354 bp, Homo sapiens
gggggtcagggacccacttgaggaggcagtctgtcccttttcagagcttgaacaccatgctgggagaacaactctctctttaagatgtgacacagggacactaaggtgtgccaaagctggtgtggccatattttctgagatgccctgcccacagaggggggatctaaagaggcgataggccttgctgaaaagtgggggactccacccatttcgagcttccaggcctttttggttaccctggcagcacaaaaccggcttcttaagccttaacaattggggattcccctccacctgccaagctggaacttatgggagggcaatcttaaactggtggccttgcaatgaacaagggtt

SEQ ID NO: 664380 - DNA, 294 bp, Homo sapiens
  misc_feature (253)..(253): n is a, c, g, or t
  misc_feature (288)..(288): n is a, c, g, or t
gagccattattattgaactgactgtcctgccaccattgaattatgtttgcacctttgtccaaaaccagttggccatgcgttatgggggtctccttctacaccttctcttctgttcccttgatctaagcgtctgttcccttgctgttaataacaccccacggtattgattactgtagcttcgtagtaagtctcgaaatcagcagcacaatcccccactttatggacaagatttacattcagcttgtctttaccngcaaaacgcctgctcagatttttagaggaattacngcatct

SEQ ID NO: 664381 - DNA, 108 bp, Homo sapiens
gcaacgcactgcttaagctgaatcttagggaaaaataaagttactatgcaagaaggtagggaacggactcgtctattcagatagaatcgcagtttgtgataagcttgg

SEQ ID NO: 664382 - DNA, 129 bp, Homo sapiens
tctcatcttgaatcctccttgtcctctgcctcctcctcctcttggcgtttcttgtcttcttcttcctccttaagcctctgctcctctgtcctgttgctgaggagtttggcaacgagacgtggggcgtaa

SEQ ID NO: 664383 - DNA, 965 bp, Homo sapiens
  misc_feature (1)..(1): n is a, c, g, or t
  misc_feature (3)..(3): n is a, c, g, or t
ncncagagtagaagagactgcagcgaggaagacacacccctcagatactgtgcgacgggggagccacggcgagtggggcacaaccgggtcccccgtggtgatatccgcctggggcggaaccccaacgtggccccggagcaactttgtgtaaagcagaattcttctcaatagagcgagggccgtttaagtggaagcacgtgggagacgaaactgggcgtcaaccgtgaggaagaatgggcagcgatgttccgttcagaccaaaggggcggcaccaccacacggcagtgtggggggaaagcgccccagcccggacgcacgtcacacggaatggaaccctagaaggggggtcttcaaagagccgccggtcgattccttgggccccccggcgccgaaactgggggcccggaggcttactacctgggaggacggggtttttacgttggtggcccgccaacacgggtttttcttagacagataagtgggtgagaaaggccacaccaccaccgggtgaaaatcttcagtgtgcgttatattatgggcgcataatacccgcctggtggaggtgaaggtctttcccgccactactctgtgcgttctcccagaagacgcgaccagatgtaaccccgtgtttgtctgtccccccccgttgtgtagaaacagaaagttccgaaagttcagccggtgttgtgcacagaacgtcctgtgtgtccgggcagtaataagagaaactaatataaagtggtagaatggagggaaccccatggcagctccgccgcaagttacggaggatggagtgccgtgaaaacgccaccatgcaagctcgttttgaaggagagataccatagtagagcacagttgaacacaccaaaaagtgtgtgtttccatgcattagaccggcagttcctgcctaaaattctttttaaacaccatcccctttttagaaaaaatttctccccaccaaaaca

SEQ ID NO: 664384 - DNA, 133 bp, Homo sapiens
  misc_feature (3)..(3): n is a, c, g, or t
tangctgtgtgacttggacatttagctgcacctcagcttcctcaactggaagacgtttacagggtgtcatataaaaaataaattacagccaggcccagtgtctcaggcctgtaatcccagcacggatcacaag

SEQ ID NO: 664385 - DNA, 373 bp, Homo sapiens
tttagctgcggctgagcatgctggctcatgcctgtaatcacagcactttgggagaccgaggcagcaggatcaccttaggtcagcagttcaggatcatcctggccatcatggtgaagctccctctacactattaacgctacaataacccaggtatggtggcacacgtctgtaatcccagcgacttgggagactaaggtggaacaattgcttgaatccagtatgcacaggttgcagtgagccaagatcacagcattgcactccagcctgggtgacacagtgagactccatctctaaaacaagcattttgtgcattacttcgagacactaagcaaacaatctttaaacattttggactggagccaggcgtgatgac

SEQ ID NO: 664386 - DNA, 228 bp, Homo sapiens
accagacacgtacactagtcgtagttccagatatctaccccacataaattcacatgtatacacaaaaagagaggcaaaaagagccataattaaagtagtgttatacaacagcaaaacatcagaaacaacttcatgtccaccaaagagcaattgttacaggaggctgcagcgccggaggccacctctagaacacacaagcattttcacagccctggcgcatgcttccaa

SEQ ID NO: 664387 - DNA, 482 bp, Homo sapiens
atccttggattgttttttcctgtcatttatgatgtagaggcctcataaagagccgcaaaattttcaaaggtggattacaggaggtggcaaccccgttaaacctggaacggataggcccccaacctcaggcaggttttttttccttgctcccaggaagggcctttttcaaaatgaaaaaaatgtttttttaagatcatattgatgatgcccaaatttgtggtcctttgtatggccttggttttggttcctcctatggccaaaatggccccgggaattctttttaaagggaagccccccccccgttcctgccataaaatagcccttttttttttttttcgggcccccccccggcttgtatataggttttttttttggtttaatcccccgaccaatagacaggccctttccccccccttttttggcccctttttttttttccctttccgttttaagtttgcccgttcctttttccgtttttttta

SEQ ID NO: 664388 - DNA, 2135 bp, Homo sapiens
gaaaagagatgcaccattttcttcttgttctttggataagctaagctcattcccatcttggagctgttgcactggcccttgtgtggctggtccctcctcatcaccagggtcccagctccaatgtcatcttctctgagaagccgtccctgaccaggcttagttgcttcccaccccagcctgacacactccagcccatcacccagtcagtgttatttgcttcatttttacattatggtctaaaattaacttgctagtttactggtttactagtttattatctgtctccttccattatccctctccttccctccttcccttccccttccttccttccttccttccttccttccttccttccttcgagacacagtcgtactctgtcaccccggctggagtgcagtggtgtgatcttgcctcactacaacccctgcctcctgggttttagcgattcttctgcctcagcctcccgagtagctgggactacaggcacccaccacgatgccaggctaatttttgtatttttattggagacagggtttcaccatgttggccaagctggtctcgaactcttgacttcaagtgatccacctgtctcggcctcccaaagtgctgggattacaggcatgagccactgcacctggcccttttattattcatagtaagacacacagggaccacaattgtctcttctactcagtagttggattctgagtgcctagttcagtatttggcaagtaagagttctacatttgatatcctggtttacctgacaacaaagtatctccaaattcattcattcattctttcattcattcgataggtatttactgaacatctaacttatgcccaacactatgctgagagatatgagataaccatgaatagtacaaaagcaatccctgcccttgcagagcaaacagccaaatatcaggagacaggtaacacacaaggaaatgtacaagaaagttgagccagcacttttataagtgctggttctagtactagctttcataagaaagtactggttctagtactagctttcagtactctcttgtgaaattttcaatattcagtcatttcaacctcaaaaatggcaacataattatgtttcaacataattgttgttttaaacaaacaattttgtttcaacataattctcctgaactgggtggaaggctatcaagaaaaagcttagcttcttcttcaggtaactgcaagagacagggttctctagagaaacagaacaaatatacaaagagattcattataaggaattggaagtccaaaatctccagagcctctgtacttgtacaagtctgaaggccgacaggcaggagaattctctctttttggggcaaaggtcagtgttttgttctatccaggctttcagatgattggttgaggctcactcacattagaagggcaatctgtcttactgccattagaatgcaacctgttttacttagcttactgatttcaatgttaatctatttcaagagcaccctcacagaaacacccagaataatgtttgatgaaatatctgggcaccctgtgacccagtcaagttgacacatgacactaaccatcacagtacgcttagggtcttgtcactcggagtgtggcctgtgaaccagcagcatttttatcttctgggagcttgggcacgatctcaggccccacctcctgcttattgattcagaatctgcattttaacaagatccccaggtgatctggatgcaccgtaacatctgagaagcactcaaactatgtgccgcaaacaaacgccaaattcttaggcatttgtgtggcttggagcacatagttggttctttctactgtctaattcattacattttttcagcacattcctgtctataaaatgtttttttgtatgcaccccaatatatgcacatttataagcatatgcatgaacccacgaacaatgattaggtacattatgaagcatacgtaaggacagaaatttcaaaccaagcttgagggtgaaataaatattatttgaaaacctgttgctaattgtgatgacttcatactatcattagttactatctcaatgcataatgtacagtgacgggtgaagtttatcattaataaaaaaaatctggattttaaccatt

SEQ ID NO: 664389 - DNA, 118 bp, Homo sapiens
  misc_feature (42)..(42): n is a, c, g, or t
gacaagtcctacttccccagcatccccaagctgctgcgggantggtgccccaggaccttatccggcagtctcacctgatgactggaagcggtccatcgtcgcctacttcaacaagcac

SEQ ID NO: 664390 - DNA, 206 bp, Homo sapiens
tccaacaagggggcataactttatttatgatagaaacagtacaaatttcaaaccaagctggagttactcctttgagacaccaaaaaaagtggcttccatatgggtacattggtaattccattatcggatttacaatatcattactggtgttcttcagggctcggactgcctttggtttcgacacatttgcttgggacatgaccaat

SEQ ID NO: 664391 - DNA, 1519 bp, Homo sapiens
atcacacagtattgccataaaccgggtcaggttaacctttcattcccttagtgagctgggctgtgggtgcagccaaaatgtatttgtacggatggaatgagacgaaacggatgtgggacatgatgctatgtgaatgaatggtgatggactgtgtcatgaactgcccctgctgaacggaatggatgatgcaccaatgtcccctgtgcttcttgcctatgctctcgctccgagcaaccatcccagcactcgagcggtagatccaacccacatcattctctgcccttctctctgtctcttgatctccctcttccttcctcttctctcccctatcttcccccctcctctcccacttctcctctctttctcctacatctcactctctctcctcttcctaccccttctctctctcttctctccatctctcgccccctccctccttccctcttctcaccttcacttctctctacagcctccatccatctcactatctctaatcacatatattcatgatacctactctattcttattcctctccaccatcactcaccaaaaacttctcaacctccttctctccatctctcacatcctccctctcatccccctcagtaacatatcatcccgccccaccatctccccctcctttactttattccttactcgtattcccatcgcttcctcacccacccaccctccccccatcctctacatcatacctacgttctcttcccctcatctactacccacccgctccatagtcttttctcccacctcaccaccccactccttcctataattcacttcaccaccccacaccacgatcttcccacttcccatcatctgacctccctctcatcacacaactccttccactacctctactctacactcctcactccccctccaccttacactccttcacttccactctctagcttccacaccccttccataaccactcattcatatcacatcctatacacttttctcactccacccttcctctcacctcctccacctccacacactcacctcctacccaccctccctatacccccactccccctctctcccccccctccctatcaccaccccccacctccccctacccactcccctattcccccctcccctacacacacacctacctccctccctcttcccaccccatgactcactcccaccctatatctcactcttctccctaatataacctctatctctccaccccaacctatatcccactctctaccccttcccacctacccattacatcttatactcctatctctttccctcccttcatcctcactccatcccctcctctcctcccctcccatcccctaatcctccatactctctttaccccctcctcccttcctacctcctctctactcatcccctcgctaacatccatcctataccagacccactaccctaccatacctcacatcattccccttctcttcattcattcccgccccttccccctctccctctctcctcctcccaagtaccccc

SEQ ID NO: 664392 - DNA, 244 bp, Homo sapiens
agtaagatacccactgtgccttcctctcttttgtggtcccttctaagcgcaaagtgcctagggctgtgtatctcctggcagcagttctgaggtggccctattttgccaacccagcctggttggagggactgacagggcttctgcccctaggtgtcccctgaacttggcccacaaaaggcctgaggaatataggggactgtgattgtgtgtgtggtgtgtgatgtgtgacagtggacttgtttgt

SEQ ID NO: 664393 - DNA, 104 bp, Homo sapiens
cctcagttcacctgcttcacacttaggcttctgtgcttagctatcttgggggcgtgttattttctttggggctttggatccagtatggggatatgtgtcgatgt

SEQ ID NO: 664394 - DNA, 164 bp, Homo sapiens
gatatttaattacacaaacgtagaagtaaattataaaaagttaaagtactagcacatatacttgttaggaaaatggtctctgtcaattgcccattttcccaattaaattaacctacgatttccttgttttaacgagcttatttttttccataacaagttgtact

SEQ ID NO: 664395 - DNA, 781 bp, Homo sapiens
gtccgtcccaagaagctgtatttgtccttgtcctttatagtcttcaagcttttcagatctgcctacacacctgactcaccttttttggtcccagttttcaaaacacaaatacacaaatcaacataaaatgtagcctaacaatgtttggattaaatccaattcaataatagaaaaagctgagatatattgtaatgggaaaaaaatggtggcttggagtcagacatactaccatctattaatgtggatctaccaaatatctgagttaccgcactgagtgccttatgcacatcaccacaacagccctatcacagaggtttccatataggaactgggcctttgagggcttataaacacgcccaagatacagagctgctaaggggtggttctaaaattgaactccagatctgtctttctgcctgggtgctcttttcaccctgcaacactctctgtcaacagtgaatcttcagatacagtgaatgtttagttacacataatgcattgccctggaatagtactttgaacgtttataaagtctcatttgatttacagaataactctgtgatgtaagtgtacttatccctgtataccgtgagagaaaactaaggcttggtcagattcagtaacttagacaacattaagtaaccttgcattaactatgctacgaacttaatacatggcatcccaagtattcctaaacctcacaaattgtccatgcatgtaataagatcacgaaactcttaagcagcaagttgagcacagaactccaaactgtaatcccgac

SEQ ID NO: 664396 - DNA, 687 bp, Homo sapiens
  misc_feature (354)..(354): n is a, c, g, or t
attgagcaataatgatctgcagtggacacaggaatacgcaaaggcagtggagcttagaaaggggcagaggtgcacaacaaaaatcggaactaactgcatgtacatgatagctgaagccacaaaaatagattgttatccagggtaaatgtataaaacataaatgtatgacataagtaacgctgatggaactggggggaacacttacatttatatagtagaaaaggataaacggctctgagaggaggaggagattttaaaaaaatagggctgtgaaagccaaggaagaacatgatttcaagaaagaagggataatatcaagtgttcaaagagagcaagaactggcatgaatactanaatgaggagactaattttggcacacaggactggtgacctcatcaaagtattagaagagcagatggcattagattaaaaagtgaatggggtattggcccatgaacagatgagtgaatcaatgaagtagaacaaaactggaaggtgaggaatgctataaatccagactattcttttaacaagtatagcagtaaggaaaagagaaaggcaagacataagagtcaaagctgaggaaggaattttagcatagaagagactgaaatattagaaaacaaagggaaaagaaccaccacgggaggagggactgaaacactagaagaggttacataacttagg

SEQ ID NO: 664397 - DNA, 206 bp, Homo sapiens
cgatacgactttttttatttattttatttttacctcatactcaacctcaaattcaaaatatcctttctctcaacactgtctcttttccaaatttactttcttaaacatgaagctttaggaaagctttaggagtcagcagctccttctctttgtccctttgtcactaagtgttgtggattcttctttggcccttctgtcgtcttctc

SEQ ID NO: 664398 - DNA, 184 bp, Homo sapiens
atcatgtctcataaaaaaaacaaaaagaccattaaatccacagtattataggtatggtataggtttaggtataaaacacagggtctcactctgtagctgggagtgcagtgggcactgatctgggctcactggcaaccttcagccttcccagggctataagcaatccatccgggatatagcctcc

SEQ ID NO: 664399 - DNA, 272 bp, Homo sapiens
agtacacatttgacatgaagcccacatgtccccaggaagagcttcactcaaagcttcatggtgcatttcgacagaattttacattccgcttgtaactgttgactgggagcaaatggtgaccaccaataccggtgtttgacgaacaccatgtctccactctggccaacagtgaacagtaccaactaccacacaatttggtagcacatccgtggagaggcaggcgcaagggcttgtcagatgggacgagcttggtgtgtaggatgctagtccag

SEQ ID NO: 664400 - DNA, 778 bp, Homo sapiens
  misc_feature (646)..(646): n is a, c, g, or t
  misc_feature (684)..(684): n is a, c, g, or t
  misc_feature (708)..(708): n is a, c, g, or t
  misc_feature (716)..(716): n is a, c, g, or t
  misc_feature (737)..(737): n is a, c, g, or t
  misc_feature (746)..(746): n is a, c, g, or t
tttttttcctagggcggatgcgcctgcgctcagctgcctgggcgggctgggaggcgcgggttgaaaagtctcgttccaagtttggagagagagagaagagcgcctcagacctcggtacccgcgagcggggaggaggcaggaaagaaggacgcggcgtctggggagcacccaggcagcaagacggggcccgggctttcgacagtggggagtgtgacgcgcttgggaaaggcaggagcgccagcggtcgggctgctcttggctaacgagaggagtccgaggcggcggcgaggggcgaacgacccgacgcaagatggcgagtaaagagatgtttgaagatactgtggaggagcgtgtcatcaatgaagaatataaaatctggaagaagaatacaccgtttctatatgacctggttatgacccatgctcttcagtggcccagtcttaccgttcagatggcttcctgaagtgactaaacctgaaggaaaagattatgcccttcattggctagtgctggggactcatacgtctgatgagcagaatcatctggtggttgctcgagtaccatattcccaatgatgatgcacagtttgatgcttcccattgtgacagtgacaaaggttgaatttggtggctttggttctgttacnggaaaaattgaatgttaaattaaaatccatccccaaangaaaaattaaccgtgctccttacntgccgcanaatcctccctcattgcttacnaaaacaccntcttctgatgttttggttttttgaacttttcc

SEQ ID NO: 664401 - DNA, 724 bp, Homo sapiens
  misc_feature (592)..(592): n is a, c, g, or t
  misc_feature (630)..(630): n is a, c, g, or t
  misc_feature (654)..(654): n is a, c, g, or t
  misc_feature (662)..(662): n is a, c, g, or t
  misc_feature (683)..(683): n is a, c, g, or t
  misc_feature (692)..(692): n is a, c, g, or t
tttttttcctagggcggatgcgcctgcgctcagctgcctgggcgggctgggaggcgcgggttgaaaagtctcgttccaagtttggagagagagagaagagcgcctcagacctcggtacccgcgagcggggaggaggcaggaaagaaggacgcggcgtctggggagcacccaggcagcaagacggggcccgggctttcgacagtggggagtgtgacgcgcttgggaaaggcaggagcgccagcggtcgggctgctcttggctaacgagaggagtccgaggcggcggcgaggggcgaacgacccgacgcaagatggcgagtaaagagatgtttgaagatactgtggaggagcgtgtcatcaatgaagaatatcttcagtggcccagtcttaccgttcagatggcttcctgaagtgactaaacctgaaggaaaagattatgcccttcattggctagtgctggggactcatacgtctgatgagcagaatcatctggtggttgctcgagtaccatattcccaatgatgatgcacagtttgatgcttcccattgtgacagtgacaaaggttgaatttggtggctttggttctgttacnggaaaaattgaatgttaaattaaaatccatccccaaangaaaaattaaccgtgctccttacntgccgcanaatcctccctcattgcttacnaaaacaccntcttctgatgttttggttttttgaacttttcc

SEQ ID NO: 664402 - DNA, 556 bp, Homo sapiens
  misc_feature (195)..(195): n is a, c, g, or t
  misc_feature (243)..(243): n is a, c, g, or t
  misc_feature (248)..(248): n is a, c, g, or t
  misc_feature (251)..(251): n is a, c, g, or t
  misc_feature (268)..(268): n is a, c, g, or t
ggcagttactgagaactcataagacgaagtaaaatccctcttcgtcttatgagttctcagtaactgccctgaacacatcctgcaaaaagcccagagaaaggagcgccatggattactacagatatgcagctatctttctggtcacattgtcggtgtttctgcatgttctccattccgctcctgatgtgcaggatngcccagaatgcacgctacaggcccattcttctccagccgggtgccccnacttnagngcatgggctgctgcttntctagagcatatcccattccactaaggtccaagaagacgatgtatggtccaaaagaacggtcacctcagagtccactgtgctcgtgtagctaaaatcatatacacaaggggtcacagtaattggaagggtttccaaagctggagaaccacaacggcgtgccactgaagtaactggttattaatcacaaaatcttaaagtgttttaccaaggtgcggtcttgatgactggctgattttcctggaatggaaaataaagtggtctaggtgtatatggtatggtgagaataa

SEQ ID NO: 664403 - DNA, 795 bp, Homo sapiens
  misc_feature (16)..(17): n is a, c, g, or t
  misc_feature (25)..(25): n is a, c, g, or t
ccagtctggtaccccnncgcgttanggatatcgtcgaccaggcctcgccacagcgtcgggctctcttgagaatccaatccctcgagggagctcccaaaatgggccgcaggagcattgcgtcccccagatttgtgggattctgcacagataccctccttccccacctccatagaggatgatctgggccagctgtctgacctggagccagagccagatgcccaaaattggcgagcatacagtggtgcaatggatgatgctgcgctggtgctcacccagcgggagattgaccggcaagaggtcatcaatgagctgtctctgtgactgaagcttcccagctgcgcaacactccgggtcctggacctgatacttctaccagcgaatgcctgactggagaacctgatgccccgggatggagctggacccggctcttcccgaagctgcctgaactcatacgagattcacaattccatggttgtgaagccatgaagaagctccggggaggcaaggcccacatctatcccacagacgatcacgtgaaactcaatgctgggcaccggcttatgcatggccctgcccgagagggaatacccagcacagtggactggcacacaggacacatgcgcccatagtcagtccaagaggcccgtaagacgctcactcaacgaccgcaagcaaccgccacgggcacgaggtcgaattcccagagtcatacactcgccaggacaggcaggagaggcgcaccctcaggagtcaggagcgcagcagctgacagagacctcaccattctctggaagg

SEQ ID NO: 664404 - DNA, 308 bp, Homo sapiens
  misc_feature (135)..(135): n is a, c, g, or t
cataacaattctttgaagaaaggaagggattaaataatttttttccctaacactttcttgaaggtcaggggctttatctatgaaaaagtagtaaatagttctttgtaccctgtgtgaagcagcagccagctttanagtagtccattcttgctaatggttagaacagtgaatactagtggaattgtttgggcggctttaagtttttctaaacaaaaattcttaaataatagattccaagacctggtacaaggatttcctgggggaccgaaaattcttttaaaagtaaagcttctgtcatccaaaaaaaa

SEQ ID NO: 664405 - DNA, 401 bp, Homo sapiens
gagctctcttggtgggggaaacatatgagtactgatcatctgaagaagaaaatccctccagcagagttttataaggaaacatagttaggtccaaatgaagtttggaagaatgtaatgtattgcagcctttatgaagtggtggaaaagacaagaatgggaagtaacatggagagtttactgcaaaaactagacagagaaaaactggttctggttaaaccttggggcagcacgaggcatactttttcttctccccccttatcagatggttcctcccatatgaatatcagcaggccaagtctcgagtcctacatgcttggtttctatttcaagcacctcacagcatcgttcattcacaaagaggtccaaccaatgcagccccacagagagcacgtcgggtaccg

SEQ ID NO: 664406 - DNA, 152 bp, Homo sapiens
cacactcagtgcaaacagctcatgcaccatgcattccgggcattccagtggccggtcgttttcacacgccaggcaacacagctcatgcacccatgcattccgggcattccagtgggcctgtctgttcttcaccactccaggcacacagcagc

SEQ ID NO: 664407 - DNA, 120 bp, Homo sapiens
aggcctgggtaaagactgataggaaaagaaggcagaaatttgaagaaaatgaacatgaaacaggtaccaagataacaatctcatctttgcaggatttgagcatatacaacccggaaagaa

SEQ ID NO: 664408 - DNA, 739 bp, Homo sapiens
  misc_feature (35)..(35): n is a, c, g, or t
  misc_feature (68)..(68): n is a, c, g, or t
  misc_feature (127)..(127): n is a, c, g, or t
  misc_feature (167)..(167): n is a, c, g, or t
  misc_feature (195)..(195): n is a, c, g, or t
  misc_feature (288)..(288): n is a, c, g, or t
  misc_feature (294)..(294): n is a, c, g, or t
  misc_feature (311)..(311): n is a, c, g, or t
  misc_feature (321)..(321): n is a, c, g, or t
  misc_feature (327)..(327): n is a, c, g, or t
  misc_feature (353)..(354): n is a, c, g, or t
  misc_feature (356)..(356): n is a, c, g, or t
  misc_feature (360)..(360): n is a, c, g, or t
  misc_feature (363)..(363): n is a, c, g, or t
  misc_feature (367)..(367): n is a, c, g, or t
  misc_feature (373)..(373): n is a, c, g, or t
  misc_feature (375)..(375): n is a, c, g, or t
  misc_feature (423)..(423): n is a, c, g, or t
  misc_feature (468)..(468): n is a, c, g, or t
  misc_feature (474)..(474): n is a, c, g, or t
  misc_feature (500)..(500): n is a, c, g, or t
  misc_feature (510)..(510): n is a, c, g, or t
  misc_feature (544)..(544): n is a, c, g, or t
  misc_feature (568)..(568): n is a, c, g, or t
  misc_feature (579)..(579): n is a, c, g, or t
  misc_feature (582)..(582): n is a, c, g, or t
  misc_feature (591)..(591): n is a, c, g, or t
  misc_feature (630)..(630): n is a, c, g, or t
  misc_feature (638)..(638): n is a, c, g, or t
  misc_feature (647)..(647): n is a, c, g, or t
  misc_feature (657)..(657): n is a, c, g, or t
  misc_feature (692)..(692): n is a, c, g, or t
aggcaagagagggtggaggaaattctgcaggaganaggcttcctccagggtctggagaacccagaggnagctcctcctgagtgctgggaaggactctgggcatcttcagcccttcttactctctgangctcaagccagaaattcaggctgcttgcagagtgggtganagagccacggagctggtgtccctgggancctctgcccgtcttctctccactccccagcatggaggaaggtggtgattttgacaactactatggggcagacaaccagtctgagtgtgagtanacagantggaaatcctcgggggncctcatcccngccatntacatgttggtttttctcctgggcannangggnaanggtntggtgntntggaacgtgtttcggagcagccgggagaaagaagggcgcttcagctgnataattctttcattgtctcagcctggggcggtgggctgtacctgnaccttncgctgggtgtacgtctgtccccctgntggggcttanccttatcatcgttatccgggggacctattgtacntgggcccctatatggggaaccctntcctttcgtgncanaggcctcanggcatggctaaccctcaatcctttcggtgcaaacaatgntaacggcncaggcggtnctttctggcnctcaaccggggccttcaaggctcttcgaaccggcntaaccctggggccaattcggtgtaggggccaaggtgtggccaaaatg

SEQ ID NO: 664409 - DNA, 721 bp, Homo sapiens
  misc_feature (35)..(35): n is a, c, g, or t
  misc_feature (68)..(68): n is a, c, g, or t
  misc_feature (127)..(127): n is a, c, g, or t
  misc_feature (167)..(167): n is a, c, g, or t
  misc_feature (195)..(195): n is a, c, g, or t
  misc_feature (288)..(288): n is a, c, g, or t
  misc_feature (294)..(294): n is a, c, g, or t
  misc_feature (311)..(311): n is a, c, g, or t
  misc_feature (321)..(321): n is a, c, g, or t
  misc_feature (327)..(327): n is a, c, g, or t
  misc_feature (353)..(354): n is a, c, g, or t
  misc_feature (356)..(356): n is a, c, g, or t
  misc_feature (360)..(360): n is a, c, g, or t
  misc_feature (363)..(363): n is a, c, g, or t
  misc_feature (367)..(367): n is a, c, g, or t
  misc_feature (373)..(373): n is a, c, g, or t
  misc_feature (375)..(375): n is a, c, g, or t
  misc_feature (413)..(413): n is a, c, g, or t
  misc_feature (460)..(460): n is a, c, g, or t
  misc_feature (478)..(478): n is a, c, g, or t
  misc_feature (488)..(488): n is a, c, g, or t
  misc_feature (513)..(513): n is a, c, g, or t
  misc_feature (535)..(535): n is a, c, g, or t
  misc_feature (574)..(574): n is a, c, g, or t
  misc_feature (638)..(638): n is a, c, g, or t
  misc_feature (652)..(652): n is a, c, g, or t
  misc_feature (680)..(680): n is a, c, g, or t
aggcaagagagggtggaggaaattctgcaggaganaggcttcctccagggtctggagaacccagaggnagctcctcctgagtgctgggaaggactctgggcatcttcagcccttcttactctctgangctcaagccagaaattcaggctgcttgcagagtgggtganagagccacggagctggtgtccctgggancctctgcccgtcttctctccactccccagcatggaggaaggtggtgattttgacaactactatggggcagacaaccagtctgagtgtgagtanacagantggaaatcctcgggggncctcatcccngccatntacatgttggtttttctcctgggcannangggnaanggtntggtgntntggaacgtgtttcggagcagccgggagaagaggcgctnagctgatatcttaattgctagcatggagcgctgcgcctgaaatgaanttagtgcgctgaagctgnaaatgtgggntaaataaaagtaaagggactatgantggccctttgggcaccttcttntgcaagctcagcagctacctcatcttcgtcaaaatgtangccagcgtcttctgcctcaacggcctcagcttagaaagctaaatggcaatcgtgaggccagtgncaatgctcggctgnggctgcgggtaagcggggccgtggccanggcagttctttgggtgctggccgccctcctggccatgcctg

SEQ ID NO: 664410 - DNA, 168 bp, Homo sapiens
ctcccctctcgctcaaccgaacacacagacagaaacaacagacacatggggtctacttaacgggggacaggtggaacggagagacgagaagcagaaaagttaactattgctgtattagggcttaatatcggggtgatgcaaggcgttttgaaacgcgctactctagat

SEQ ID NO: 664411 - DNA, 461 bp, Homo sapiens
aggctctgggcatcagggagctgtggtgtctgcaggcgccctgcccgcccgccctcccttctcttcccctaactccgaagtcatgtgaggcgtgggagtggcaggagccgctcttcccacgagtaagaacctgtgctgcagtggtgtccaagccggactcctgcctccatcgagaacctccatggccttgtggaacctgggatctcagaggcaccagcctgcaaacctcccgtttaaatgcttctttttttattttttatttttattttcttttgagacggagtttggctcttgtcgcccaggctgcagtgcagtggtacatacaatctcggctcactgcaacttctgcctccgagattcaagcgattctcctacctcagcctccccagtagctggaattacaggtgtgagccactgcgcccagccgagcatgactatttttaaagttcatggtgcttcta

SEQ ID NO: 664412 - DNA, 250 bp, Homo sapiens
gcacattgagcccgccaggcaggatgccctcgtgcttgagcccctgttccacgcagtcctgcatggcacgccagagcgccatcaggccgctgcggatttcttcttccgaacgccagaccttctcgttggccagcatcagttcggcgacccgcaggttgtgcttctggcacaggcccagcagttccaccgcactggaaaaatcgtaaggcagctcgctgcggtccaggtccgccacaccgctgtcggcctg

SEQ ID NO: 664413 - DNA, 103 bp, Homo sapiens
aagacgtaaataaaataaaattaaaataaataagtaatgaattgtcagtggtggacctctcgggtgtgactatgcttttcttttagctggggtagtcacagag

SEQ ID NO: 664414 - DNA, 497 bp, Homo sapiens
  misc_feature (253)..(253): n is a, c, g, or t
  misc_feature (259)..(259): n is a, c, g, or t
tcttcttgggcctggcaacgatcttcctgctctgacccttcccgcgggggcaaacctgccctcgctttgcttcttattcccaaactcgacgcaaaaaaaagccagcacagggctggcttcggctttcaggtgtcaatcaattggcttctgcggccgcctccacgtcgtgcgcgatgagcgagacgagagcattttgctggcggtgggagagctgacgaaaacgctgcagcagttcgcgttcgtgcagtgacanctactnaccttaagcttgcgggcaaaaggccatatccctatagaaaggacacccttcgactcagattccgcgctggcctggacgaaggttgccgagcttcgctgcagctgcgggaaatttttccaaccagtccgcaaaaacgcaaatcagtactggcataaagcctttaggcggttcaatatttgtcacagaattgacgccaatgaaatggcaaattgagcatatgcggcctcttgcattcgcg

SEQ ID NO: 664415 - DNA, 319 bp, Homo sapiens
  misc_feature (98)..(98): n is a, c, g, or t
  misc_feature (130)..(131): n is a, c, g, or t
  misc_feature (148)..(149): n is a, c, g, or t
  misc_feature (173)..(174): n is a, c, g, or t
  misc_feature (198)..(198): n is a, c, g, or t
ggcgttgtcagtgggcaggcggtgctctaatactggtgatgctagaggtgatgtttttggtaacaggcggggtaagatttgccgagttcctttttacntttttttaacctttttccttatgatgcatgcnnctgtgttgggtttgacnnagtgagggtaataagtgacttgtnntggttgattgtagcatatctgggnctgttaatctgttcatgttcagtgttttaactctgacgcagtgcttattgcggaggcagacatgttttcattgttacattattactaacattatgttcttctataggtgtgatacgatttg

SEQ ID NO: 664416 - DNA, 444 bp, Homo sapiens
  misc_feature (200)..(200): n is a, c, g, or t
  misc_feature (206)..(206): n is a, c, g, or t
taatgtcgcgcactaggctgggagccactcacacaagctcaaaccctagccttcgtcgcgagcgccgtgctgggcagcctactgataattgcactcatcaagggtcgccgaatcaaattcgatccactccttcgctagccctcccccgccgccccttctccctaccttatgtcgcctgacactcgtaaatagccgaacanctactnaccttaagcttgcgggcaaaaggccatatccctatagaaaggacacccttcgactcagattccgcgctggcctggacgaaggttgccgagcttcgctgcagctgcgggaaatttttccaaccagtccgcaaaaacgcaaatcagtactggcataaagcctttaggcggttcaatatttgtcacagaattgacgccaatgaaatggcaaattgagcatatgcggcctcttgcattcgcg

SEQ ID NO: 664417 - DNA, 330 bp, Homo sapiens
ttaaaaaactcaagtgttggcgggtagcacccgcccgcggctgtaatcccagcactttgggaggccgaggcaggaagatcatgaggtcaagagatcgagaccatcgtggccaacatggtgaaaccccctctctattaaaaatacaaaaattagctgggcgtggtggcgcacacctgtagtcccagcaacttgggaggctgaggcgggagaatcacttgaacccgagaggcagaggttgcagtgagctgagatcacatccctgcactccagccttggtgacagagcgggactgcatctcaaaaaaaaaaattctagtgttgtaagccctca

SEQ ID NO: 664418 - DNA, 231 bp, Homo sapiens
  misc_feature (54)..(54): n is a, c, g, or t
  misc_feature (82)..(82): n is a, c, g, or t
  misc_feature (113)..(114): n is a, c, g, or t
  misc_feature (173)..(173): n is a, c, g, or t
cgcggtcccatagctacatggtacaggctgttgtctgctgctgcactgcaaaantagtccatttcctgtggatggtcaggangtcatgtagtccggcacagtcatgtcagtcnnggcaagtatgtcagtccggcacagtcatcatcagtccacggcacagtcatgtcagtccnggcaagtcatgtcagtccagggcgcatcctctcagcagtcgcacctagccaggccatg

SEQ ID NO: 664419 - DNA, 942 bp, Homo sapiens
tagaaggccatacgattgtgctctgggtgacggggcatccccctccctttttgttctgtttgtttgtttgctacgagtccacattcctgttgtaatccttggttcgcccggttttctgttttcagtaaagtcctcgttacgccaaaaaaaaaaaaaaaaaaaaaaaaaaaacaaaaaaaaaaaaaaaaaaacaaaatttaaaaaaaaaaaaagaaaaaaaaaaaaaaaaaaaaaaaaaaaaaaaaaaaaaagaaaaggaggggggggggcgcagaaaatcttcccgccgagggggcgggcgccacgcccgccccatttttttcgagaggcgggggcccctagggggggcgcgaaaaaaaccagccaagccgcgcaggcccgaacgcactacataactcccaacatccgacggcaggagggacatgacaacccaccgacgccgagtgcacccatgttaagaggacggagccaaccacacccatacaagtcgggcgtcggggcgcaccacaacctacgcgcgaggagccgcaccccacaccccaacgataaacgccacgctgcccccgacggacaaccaaacacccatgacctgctggagcagacgatgacgccaacacacacaccaacgtccacccactacgcgcgcggtcgcacagcacaaaccacgcggcgccgcgtgggaagtacctctaacgagaacaacaactacaccaaccaaggaggggccaccgtgaaaagaacagcgcgcgcagcgccgtacgcatcagcgcagacagcccgacgcgcggaagagccagatctgagagacgacacaagccaacgagaagacaacacaacacgcagccgatcagccaccccacacagcccaccagccgcgcaaccgagacaacgaacgacaaaccacgcacgcgaaacgagagagccccatcgacctacgcgcat

SEQ ID NO: 664420 - DNA, 1897 bp, Homo sapiens
ggagagagagagagaactagtctcgacgttatatttttttattttggggttttaaagtgtgaaaggggagatgaaaatcggtctaattctctcattgggacctgggtcaggtggtctcccgtgtgtcaccagagcgggaaacagaggggaaccccgtgaacaacgtgttggcgggagagaaacgggtgtcctctcagggaccctatattggcagccaaacaacagccactcgtgacataacaggcctcgtgcagacgcccaccccgtataacgcagcggccacaggagcatctacacgcacacaacagcgtgggacacagcggtacgccacaacacagcgacacacacggacaaccaacccatacacacagacgcgcacctcccccgcggggcacgcaccacaaaacactctacaagaacatacgcgtgacacaaccagagcagcccctaatcaaacacacaccgagcacacatcacacgcgtgggcaaaacaccgagggcttcgacgcgccacagcgtcctcctaccgcgacaagacatcacaacgagaaacaacttacctcacccaccgaacacgcgcaccccaccgccgcggcgggcgccacaccacgtactacacgacacagagtggacacagacaacacaaaccaacacaacataacaagagacacaacaacgcggtgggctgttgcgcgtgtggcccgccattcctccactaccaccctccacggcccgggcgacccccaacaacacacccgccggccaacacaacacaccacataacaccacaaccacacacaccacacgcccggcggacagccacacacagacgacgacacacacgccaccctgcgacaccgaccacacaacatcaccgacagacgagcgccacacacctacctcgagagagacaccacacacaacaacacaacacagagcagggacgaccaccacacaacactgcgccaccccacccaccacaagccacacgcccacacaacgcaacagcaacgcgacaacacaccaccacgcaacacctcccactcacgtcaaccacgcccccacaccaccgctccacaccgccaacccagacaacaaatcacgttagcagccagacccacacaccccaaccacggtgcacgcgcccccccaccaaacgcgcatcaacactccccccaccgataccacacacgacacccacaccacacccacccagcccagcgagccccgccgaacactcacacaagcaacacccgccacagcacgagaccagcacacagcgacggcaaacgcactagcccacgcaccgacagacgttccaccgcaaccaccacaacagaccccccaggcaaccaactagcccacgcgccaagcgagtcaccacacacacacagcacaccggcgaagccacacacacaggacgacacacacaaccacaccgctccacacaacataactaggcatgcaccgcggccacgccccaccacgacactgcacacccaccaccgaacaacagcacgaacaaagacacccacgccaaacacaaacgaccagccccgactgcacaaacacaggcgtcgcacacacgagaacacgccgccggagcacaaaccacgcacgacgtacgaacaccaacgaacgcccggccaccgaccacgaacacgcaacgagctaaccaccgccgagccgccgcaagagcacacaccaccacacaaaccacaacacgccacacaacaagacagagacgaaacaccacaacacgacacagaacccaccaagcaacacacactagccaaacaacagcgacacacccaacaccaggcgcccacaccacaacacaccaccaacacacgagcgcacgccccaccgaacagaaccggaacacagtagacaaccg

SEQ ID NO: 664421 - DNA, 493 bp, Homo sapiens
tattaaagggcatattaatgtaaaactataaaggccctgaattattttcttaggtgatttaaatttttctctttaactacaaattgtgtttcaatattaatagaagtcttaaaatattagataaatgaaccctagttattttgaggtagctccttgaaagtaaggcaactccagctacccttttaacctgctaagtggttacgttttgtcttgtttccttaaaaaaaccataaatagtcttattaaggaaataatgaaaaggtttccagaaatagactttctcaccaacagtttaatagccgacatttattgaacgtacacattttaatgagaattaggataaaatattaactgcctctgttatacagagaaagatgacatgcttttcctcatagcccaaacggtacatgctgaaatgacagcagaggatttttgtctgtgttccctgaaccaaagttttatcagtctaaaataaaatttgtgtttttatttt

SEQ ID NO: 664422 - DNA, 715 bp, Homo sapiens
gccggctcttcaaggcccagaacgcaccttctccaggccagtcccaggcggactcgagtagcctggagcaggagaagtacctgcaggctgtggtcagctccatgccccgctacgccgacgcgtcgggacgcaacacgcttagcggcttctcctcagacccacatgggcagtcacggtaagtggggcagtgtccggaccagtggacgcagcagtggccttggaacacgatgtggagactcccggactagctggcagagacgcactggacaccacacccaggacacaacgggggcccatcacacgaaaccgggacattcctgacgtccgcagacggagacagaccctctatatccttgggaggacaaaagcaccagcgtcaagggtgtgcaggtcagaaccgcctgcagacaagatgggagctggatgcccatagaggtaattcgaggacacggcaggtgaaggctagacttcaagaagctgctgaaagacatgtgtcccaggcatgccccggctgattgagacccaagaaccaagactccttcctgagactcactggaggactcagagaggatgatccagaatccacaaagctgctgcaggtgtctgtgcatggaggagaagctccggaatcaggctcctccgagcatatgggacatgaggatggcttgggcacattaacacccaagtgggatccatggagaagaggatctcaaac

SEQ ID NO: 664423 - DNA, 117 bp, Homo sapiens
aaatctctcattgcgaacagtgactatgctgaggcttgcagtttggactgaaagtgggctcaccccctgcttactagctgggtgacttgtgcagtccttcacctctctaagcccaat

SEQ ID NO: 664424 - DNA, 173 bp, Homo sapiens
accctgacggaattgttgagagcatagaataagagtctagttggagatcaggaatagaaagcagaaaaaatcctggagagaaataatattcacaagagactggcacactgagcaattatgcctgtagaaatgcatgcatgaggtcttaacattgacacaatgttaccatcata

SEQ ID NO: 664425 - DNA, 230 bp, Homo sapiens
atcgtgtcttggattgcggaaagaccttatgggtgctgtgaagagcagaaggttgcttgccattcaagctatgaaggaacgggaaatccaggaaagagaaatgatagtgaaactgtaacgccaagctgaagaagaacgaatactgaagcacaaagcagctgttgagggatctttccaggaaggtattgtcaaggccaaactagtcattcgcagtgtccaatattcacgtt

SEQ ID NO: 664426 - DNA, 362 bp, Homo sapiens
ctgcagggtttcaatcctatcagttactcttctcaacatcgcctatcaattatttgctgttttgctctagggttctgatatttaaaagaagatacaagtcaagctgtgagattttgcctgagttttctggatacttgcctcaattttatgctgaatgtctgcttcggataccagctatccagggggggtccccttgcttcgcttgctccctttgcaaatttgagaaacgcttggtatttaccaggggttcataaaatcagacctctgccaggaacttaaactgaatgaaatagcaatccagagactattggatgttctgttgaggcattctctgggtttaagtgttcaaaaattcataacta

SEQ ID NO: 664427 - DNA, 1723 bp, Homo sapiens
  misc_feature (1)..(1): n is a, c, g, or t
natccttacttggttattgagactagccgcaggtgtacacctctgtgtgccccgcccacgttagctggcctcttttttttggggtcgaccactacatattgatagcgtagcgcatgctggttgttcgtacccgacatcaacagccaggcggggtgtggtgtgtctcaccgcgtttctcccggcgaatgttttctctcccccgagcggtgttgttttgctggttagctgccgtaccagctcggactgctagctctcctcatcacgccccctcttgtggcagcccctttttttacacaagggggggcccgccctttctcagtctgtccccgcctctctgttattgtggtggcccccttctctccggctctcgttgtgccccacactacttgttgggtttgtcttctaacaagtgtgttgcgcagctgtgcttgcctacttgtttgggcggcgcgcgtgcgcgctcgtcactaggattgtgtctgtgaggggggcctcgtcttttgtttttgtctccgtccctttccgtcccccgcccgtgttcgtctgccgcttttgtttgttgccccctcaacttgttgttgtgtggggggcgcgccgctgcaggggtgtgtgtttatactacaccgccgctgggtgggttacgttgtgccgccacaatgcttgtggctccttcatggggtgcgcaccagccacacgggagacgccactgcccgacagcgcgttgggtgtcccccccaacataataatggggcccccttctttgcgggatttatcgccggggggtagatgtaaattgtctcctgcagttgtgttatgttttcggcccgtctcgtccacgagagagatgttgtgttgttcttttcttgtttttcggccgcaacgaggaatgatggttttttgtcgtcgagggaggccgcgtctgtgttggagacgcacacggcgtctcctccgaggacgcctgctctgggtggccccctcttttgcccccctcccctctcctcttgtttatgttgggaggggaggcgccacctcttgcggggccgaccactcgcagcatcacagcagagtcgtcttttcactcctctgccctgcgtcttgttagatttgtcccccctcctctcagaggaggtagtgtccccccaccacttctgcgtcttgtagtaacggacaccgctacttctcccctctggtgttttatcacgtctccgtcgacttcttctcgagagagatttattcgctatctccactctcgggagacatgccaacgcgatagagattggttatatatagagagaaaccacacactcgctgttacaccccaatatatatattctcagacccgtcgtcgtttatatgcacacacatatttatactcggggttttcttatatttaccacctctctcttccagagacgcctccaggagtactttctggagtcttccccttgctcaccacatgttctcgcgcgcggcgatttatccggcgtccacacacatattttgtggagcccacacaggcgttctccacggagctttctcaccctccattattggcgtcaacatttcctccacttatttgctttctaccccccaacttataatttccacctttacaaacccaacaatccactttggctttgaaacccccccctgatatactggcatttttttaatattggtttgaatatttttgtatgtttccattttttgatgggggttttta

SEQ ID NO: 664428 - DNA, 285 bp, Homo sapiens
tcggcctgtagacgctgaactatgaggaatgattccatttatatgatgtacctgaagtagtcaaatttatagaaacaaagtagaatggcgactgccaggaactgcggagaggggagaatgggagttatagttcaatatatacaaagtttcagtttgggaagatgaagaagttctggagattaatgctggtgttggttacacaacatcaatgtatttaatgccactaaactgtatactttaaaagggtaaatttttttttttttttttttttggaaagactggttt

SEQ ID NO: 664429 - DNA, 614 bp, Homo sapiens
  misc_feature (160)..(160): n is a, c, g, or t
  misc_feature (323)..(323): n is a, c, g, or t
  misc_feature (365)..(365): n is a, c, g, or t
  misc_feature (389)..(389): n is a, c, g, or t
  misc_feature (398)..(398): n is a, c, g, or t
  misc_feature (430)..(430): n is a, c, g, or t
  misc_feature (439)..(439): n is a, c, g, or t
aataggtttctggctgatgtggagaaagtttttgtgatttggatagatgaaattagttataatatttctttaagtaaaagcttaactttcttttagttctgtgaaggctgagagaggtgaggaagttatagaagaaatgtttgaagctagtagaagttgntttatgaagtttaaggaaagaagctgtctttttattccattaaagtgtaaggtgaagtaggaagtgttgatggagaaggtatagtaagttatccagaagatctagctaagatcattgatgaagatggttacattaaacaacagattttcagtgtagatgaaantgccttttattgaaagaagatgccaccaaggacttttatagntagagaagagaagtcaatgttggnttttaaagntgtaaaggacaagttaactctccctttagggntaattcagntggtgatggtaagcagaagctcatttaccattttaaaaatcctagggcccttaagaattatgctgaatttactctgcctgtgctctataaacggaaaaacaaagcctggatgacagcatatctgtttatagctcagtttactgaatactttaagcccactgttgaaacctgctca

SEQ ID NO: 664430 - DNA, 111 bp, Homo sapiens
ggccggacccgcgcccgcaaaaaaaaaaaccccccccccccccggccggcggagaggaatcggggttcggacgggggccgccagggggaaagggaagggggccaagtggcg

SEQ ID NO: 664431 - DNA, 367 bp, Homo sapiens
tgaagcgtcaggatggagcgatagtcctggaattcacctgattcggaccttagattggtgcacacagatcccctccagtcttctccctctccatcagcagcctgtaacaagtgccttgtgagaaaagctggagaagtgaggggaggcaggttattctctgggaggttgggtgggatgaaggggtaacccctaagaagatgtgaagtgtgggtttgggtaaggaaaaatggcttaacattccccaaccccaaaacaagttcttacagaactaaagaattaagggtaccatcaaattaccttaggcctgaagaaaataaccccgatccttggttgggacagcctccctggttgcccttgacggcttgta

SEQ ID NO: 664432 - DNA, 358 bp, Homo sapiens
  misc_feature (18)..(18): n is a, c, g, or t
  misc_feature (63)..(63): n is a, c, g, or t
  misc_feature (69)..(69): n is a, c, g, or t
  misc_feature (72)..(72): n is a, c, g, or t
  misc_feature (88)..(88): n is a, c, g, or t
  misc_feature (99)..(99): n is a, c, g, or t
  misc_feature (111)..(111): n is a, c, g, or t
  misc_feature (115)..(115): n is a, c, g, or t
  misc_feature (134)..(134): n is a, c, g, or t
  misc_feature (188)..(188): n is a, c, g, or t
  misc_feature (197)..(197): n is a, c, g, or t
  misc_feature (202)..(202): n is a, c, g, or t
  misc_feature (211)..(211): n is a, c, g, or t
  misc_feature (216)..(216): n is a, c, g, or t
  misc_feature (228)..(228): n is a, c, g, or t
  misc_feature (263)..(263): n is a, c, g, or t
  misc_feature (266)..(266): n is a, c, g, or t
  misc_feature (290)..(292): n is a, c, g, or t
  misc_feature (299)..(299): n is a, c, g, or t
  misc_feature (320)..(320): n is a, c, g, or t
  misc_feature (322)..(322): n is a, c, g, or t
  misc_feature (328)..(328): n is a, c, g, or t
  misc_feature (332)..(332): n is a, c, g, or t
  misc_feature (336)..(336): n is a, c, g, or t
gaaaaaaaccaattaganaaaagaaaaaataaaatcaagttttacaagcaagcatcatgaganaaagcngtnaagacgccttttcagntcacaccaganccgacaccagtntctnccccagcccacatgaagangtttttattcaatacaaacagtaacagacgcaacacaatggccatagaatgagnacataagtncattnccctttttnccgcnttctggctatangctctgacaagcctatcattcttttcttaccaggngancagaaatcatctgctaatgccagnnnctttaangctcttaattcagctgggganancttcanttgngggnctttatactagctacttgcttc

SEQ ID NO: 664433 - DNA, 1064 bp, Homo sapiens
  misc_feature (9)..(9): n is a, c, g, or t
  misc_feature (144)..(144): n is a, c, g, or t
  misc_feature (171)..(171): n is a, c, g, or t
  misc_feature (182)..(183): n is a, c, g, or t
  misc_feature (187)..(188): n is a, c, g, or t
  misc_feature (194)..(194): n is a, c, g, or t
  misc_feature (197)..(197): n is a, c, g, or t
  misc_feature (211)..(211): n is a, c, g, or t
  misc_feature (217)..(217): n is a, c, g, or t
  misc_feature (220)..(221): n is a, c, g, or t
  misc_feature (223)..(223): n is a, c, g, or t
  misc_feature (245)..(245): n is a, c, g, or t
  misc_feature (302)..(302): n is a, c, g, or t
  misc_feature (440)..(440): n is a, c, g, or t
  misc_feature (480)..(480): n is a, c, g, or t
  misc_feature (628)..(628): n is a, c, g, or t
  misc_feature (649)..(649): n is a, c, g, or t
  misc_feature (654)..(654): n is a, c, g, or t
  misc_feature (708)..(708): n is a, c, g, or t
  misc_feature (754)..(754): n is a, c, g, or t
  misc_feature (802)..(802): n is a, c, g, or t
tggaaagcnactggtttgtgtgggttacacagatgaaccatattcccatgcacattgatcatgaccggaacatgaactggtttccacccagctccaggcaacatgcaatgtccacaattctgccttcaataactggttcagtgnacacctcaacttccagattgagcaccntctttttcccnngttnnctctanacnattaccacatagtngctccnttnntntagtccttgtgtgccaagcatngcatagagtaccagtccaagcccctgctttcagccttcgcctactttatctttttantaaaggagtctgggcggttctggctagatgcctatcttcaccaataacaacagccaccctgcccagtctggaagaagaggaggaagactctggagccaaggcagaggggagcttgagggacaatgccactatagtttnatactcagagggggttgggtttggggacataaagcctctnactcaaactcctcccttttatcttctagccacagttctaagacccaaagtggggggtggacacagaagtccctaggagggaaggagctgttggggcagggtgtaaattatttcctttttctagtttggcacatgcaggtagttggtgnacagagagaaccaggagggtnacagnagaggagggacctactgaacccagagtcaggaagagatttaacactaaaattcnactcatgccgggcgtggtggcacgcgcctgtaatcccagctacccnggaggctgaggcaggagaatcgcttgaaccggggaggtggaggttgcngtgagctgagatcacgccattgtactccatgcctgggcgacagagcaagactccattgtactccagcctgggcgacagagcaagactccatttcaaaaaacacaaaaaaaatccactcatttaaacggtgagctcagctcacgggtcccatttctcaggtggctccttccatccctcattcgcaaacctcagagggcatacggcgttgaacccttgatgagccagcacttataaccgcagggcacctttactgcttacgcat

SEQ ID NO: 664434 - DNA, 240 bp, Homo sapiens
  misc_feature (30)..(30): n is a, c, g, or t
  misc_feature (47)..(49): n is a, c, g, or t
  misc_feature (51)..(51): n is a, c, g, or t
  misc_feature (100)..(100): n is a, c, g, or t
  misc_feature (104)..(105): n is a, c, g, or t
  misc_feature (108)..(108): n is a, c, g, or t
  misc_feature (123)..(124): n is a, c, g, or t
  misc_feature (129)..(131): n is a, c, g, or t
  misc_feature (159)..(159): n is a, c, g, or t
  misc_feature (207)..(207): n is a, c, g, or t
  misc_feature (219)..(219): n is a, c, g, or t
  misc_feature (239)..(239): n is a, c, g, or t
atcaatagcaaacccactgccatattagtnattctgaatatactaannncntccagctagattgcagtttaataattaaactgtacatactgtgcatatnatgnnttnccatcttatgtaaannatttnnngaacacaagttgggaaatgtggcttctnttcatttcgtttaattaaagctacctcctaaactatagtggctgccantagcagactgtnaaattgtggtttatatactnc

SEQ ID NO: 664435 - DNA, 1227 bp, Homo sapiens
  misc_feature (207)..(207): n is a, c, g, or t
  misc_feature (337)..(337): n is a, c, g, or t
  misc_feature (357)..(357): n is a, c, g, or t
  misc_feature (366)..(366): n is a, c, g, or t
  misc_feature (379)..(379): n is a, c, g, or t
  misc_feature (593)..(593): n is a, c, g, or t
  misc_feature (895)..(895): n is a, c, g, or t
taggatttgaccgagtctttatcggggctcccgttacttcttattctaactccaggtttacggacacaagtgcgtggaaaaccaatttccgtgcccttacccaccgccttcaactttgtttaagaaaaaaacgaggattctaacaccggaggaagtgttcacattctttcggccattctcccacttctccttttcgtgcccttaggncattctcgatttgtgtgtgcccacccgagggggccccactcagagagcacttgagaggctctctgtgtgccacccaagtggacagagcaagacacagagcgtgtgtgtgaaacgctctcaagagagtgtnccctctctcttaatacgagncctctctcnctcttccgagagngtgtcttctctgtgtggccccgaccgagagcgtggcgaaaagccgagactctcgcgcgagaggggggcctctcgaaaaactctcccgcggcgcgcgcccagaaagagtctctcttatatctctcgacgaggcgaggcgcgaccccccggggcccccctgtggagagagcccctgttcaagcgccaaactctttcgccgcgagataaaacgcgcnacaagagagaggcctcttctggggcccccccctgaagagagggcgtgcgcacaaaagcacggcgctctcctcgggagagaacaatgcggcgcgcggagagaggcgcgggaggtatcatcaggacaccccgccggggggagagaagacccttctgtgcgagagagagaccccttgtgaggaaccctcctgtgcagcggcgcggggtgtctccagaggggggccccctgataatagcctcttgttgcgcccgagggggttgcggcctctctataacagggagctttgtgttgcgccttatactnaatccccccgggggtggggggcccagagggggtaattctccccgggatttgtcccccccctattccccaagaacctcttgggcgcctctaaaacgagagagaggtactattctcttcttcggaagcccaagagaagggggcgagaccccccaaaagagaacccgcgaaagagaaatacgggggtgtgtgccgccccatttgtgggcgcccggaccccaagaacctcccggtgagagccccatcaaaaggactttccacttcaaaaacggccaccctcttcttttaaacgcgggagacgcccgtagggcacctctctcctcaaaaaaaacccg

SEQ ID NO: 664436 - DNA, 776 bp, Homo sapiens
  misc_feature (74)..(74): n is a, c, g, or t
  misc_feature (335)..(336): n is a, c, g, or t
  misc_feature (338)..(339): n is a, c, g, or t
  misc_feature (345)..(345): n is a, c, g, or t
  misc_feature (398)..(398): n is a, c, g, or t
  misc_feature (405)..(407): n is a, c, g, or t
  misc_feature (493)..(494): n is a, c, g, or t
  misc_feature (496)..(496): n is a, c, g, or t
  misc_feature (659)..(659): n is a, c, g, or t
  misc_feature (672)..(672): n is a, c, g, or t
  misc_feature (676)..(677): n is a, c, g, or t
  misc_feature (753)..(753): n is a, c, g, or t
atttactttttctaccgagcgcgccatgtgttggtacacggaattccgggcatttatggcccggggccctttcnttcccgaatccgcgggcatatgggcccaatcaaccccccgaaaagggcctccacaagggttttacctataatagagaagaaggcccccccaattggggggaagaggcacccctcgcccacgcggggggggggggttttttttaacaccgggggccaagaaggggccccccctctctctacaaagcagcgggggggtggccccaaaaaaaaaataaaagggggggtgtggaaaaacacaaatctttgttggagggcggcccnnannaataanttaaaaatatttatttttttttgggggggggggggcggcgccgctcttttttntttttgnnncaccccccctcataataaaaaaaaaagaaaaacccgggggcgttgcctccccctcctggggaagaaaaaaaaaaaaaaaaaaaagnncnccgcggcccccccccccccctttataaaataaaaaacaaacacccccccccccccccctcttttttttaataaaaaaaaaaaaagacccccccccccccccccctcaaaaaaaaaaaaaaaaaataccccccgccccccccccggggggagcaattttatttntctcccctccccncccnntttctttttttttttataataaaaaaaaaaaaaaaaaaaaaaaaaaaaaaaaacccccgcgccgcgcccccccccncataataaaaaaaaataaaaaaa

SEQ ID NO: 664437 - DNA, 327 bp, Homo sapiens
ttttcccccccccccccccggccaccaaatggtttttttttttgggggcagccccccccccccaggttttcagggctcccccaaagttttcccctttttttttccccaacaatggaattttttaaagccccccaaacaaaccccttaggcctcccggcccccgggtgggggaatttccccctttgtttttttggaaaacctttttccaaaaggcttcccccccaaggccagaagggaagtccccccctcccgggtggcggatggggccgtgggcaagggcccctcccaaacccccccattttaaccccccttttttttttggggtta

SEQ ID NO: 664438 - DNA, 419 bp, Homo sapiens
cggagcacaaagacggtttttttttaactaagaaataccataaccccgggtgggggtgtatgcgatgttagaaatacccgcccagtctgagcgagatggcaatacccttgctactctagaaaatagataaaacctcgtcgagcgagcaggtgcctactagcttctcaaagagtaaggaggaatatgaaggaaaacctgttgagacctataggtggaggatgaaaagcgactggaccaggtgattgctgtttgcccaggatggaatcttattacacctttcaatttgcccacagaacgccgtaaataactcttgtaaagtgcacctgtagtccaacggggtacagttctgtgaactctaggataaaacccttgttagagagtattcttcagccctattaggcccgcagacccactttccc

SEQ ID NO: 664439 - DNA, 213 bp, Homo sapiens
  misc_feature (205)..(205): n is a, c, g, or t
cagaggaccagatcttcaggtttctgcgatgcagcccagacagtgctggactgacagagactggggtggaggcggctgagcctcgccatctctgtgtgccgcacctgttggtctattgaaggtgcagcagccctttcctcttcgtgccctgggaccagcagcacaagttcccttgtcttcatggggcgagtatatgaccccaggncctgatga

SEQ ID NO: 664440 - DNA, 455 bp, Homo sapiens
aatcaacttaagtgaagtagctaaccttacctaccatattatcgatacataagcagagcgcattgaatgcatgcttcttgagctccgcacagttcaaggcacactatgacttcatgtgggttcaatgtgagcttctctaccactgttgacgcatactgcattcaagatgtactcatatgaacttcaatcatttcattggagcggacaggtgaaaatattgagtatgaccatttacaccacactgggagacaacgtggtaacacctattcatgctctgaccagttgattgttatgtagtgaccgtaccatatgattcaccctcttaacatataccactcattggcagttaatatgctggtgtgagaccataaccacggtttggggagaccgttttaatgaaccataacgaaatactgtacccgttatatgaaaaccgcactcagcattcatctccc

SEQ ID NO: 664441 - DNA, 329 bp, Homo sapiens
  misc_feature (268)..(268): n is a, c, g, or t
caatggtttagagatccttgaatgcaaatacagggtggcagtaactgaggtgattgatctgaaagctgaaattaagggccttaagggagaaatataattaaatctgtggaaactacactgatgagagggccaggtatgagagtaaaatccagatgtatgatgagcaggtgacagagccttagagaggaccaccacgggagagtggtagagaagatggcccacatgggagaggggagtcgcaaaagatgaccagcatagccagcgaaantcacagtaaccttaatacggcccaggatgagttgagtcacattcagtgaggagttagctca

SEQ ID NO: 664442 - DNA, 768 bp, Homo sapiens
aacaacttaggacggtgggatcctcttttcgctggtcttctaatcttcagctgtcatcttcgagaaatggtaggcggccaagtgataacgtttctgccataggcatactaactgggttcgaatacatttatgatacgccataactgtgctcacagtgccaccatgtcaatggcactccctgacgctgggttgtggtctctctccaatgtacaagacggaaaagcatacatcaccgcatacggaagacacgtttcttcagcgcttgactttactgactttgacatacttccaaacaagtgtcatgagtacttcgaagttagctgactcagcatttctggtgtccttggtgggttgagcgccaagtgtcaatattcagcgacaaacaagttggcgttggagcgtgtttagttatagatagtgtacagtggtgagctttccgtaacaaacgttgtattctacagagtgggctcttgtatcgttgtctgagagaaaagcctttgtagcttaacatgggcgctaggactgtccaaggtgtgagaagcagcgaattaccctcatgtgaggtgactaagaggtgttgttgttttcgccttagaccagttgtcgtgttgtgaactgttgcgagtctcaacatttagacaggttaaacttcactgcttgcttggggggcagagaactgtttggatgcttcgaggacaacatttttttatcccgcttcccatttttcctaataaatcctcccccttaaatttctctaccaagggcagg

SEQ ID NO: 664443 - DNA, 369 bp, Homo sapiens
cccgcagagagagagaatatacccaccaggacaagatcctgcatggaagcatagcagcaactattcgtccgcaggagcgtttaacaacgtacacgcgtccgctcttaacagggcagaagaacttccagacctccgaccagagcagcgagatgtgtacaccctaactgcacgcatgtcgctggctagtgagggcacagactcactcacacatgcgtgcatatgcacacacacagactcagacctccttacagcaggcatagagctacatcccagtgtcttgtccactaactatagggctccaaagctaagggagcgacgcagcagagacgggaaagatctaactgacggaaaaagctcctcctcgcccca

SEQ ID NO: 664444 - DNA, 352 bp, Homo sapiens
agagagagagagatgagagagagagagagagagagagagaggtaacatagctctaattattaaattacttttgcagcagagtaccatatctgtttcatatctgcagagatctgttttcaatgcagttttattctacttcttattctgatttaagatgggatgatagttttgacaaaattgaacttattttaatttctgtgtctgattttttcatttactgtaggagctgttggtggtgatgacttgaatttttttttttaatggggaaaaaaaacctcatgagcatctgctatgactctagaatgttagtcactgaagcaaattagtgtagttgtagatgttgcaagtaata

SEQ ID NO: 664445 - DNA, 201 bp, Homo sapiens
ccagggttttccccggggccctttttgggggccccccccccttttaaaaaatcccttgggggggggacccggggaattttaaaacccccccggttttttttcgggtttttggggggggggggggggggggggccccaaattaacattttttggggtcccccgggtttaattttttttttttttaaaatttttaccccccca

SEQ ID NO: 664446 - DNA, 360 bp, Homo sapiens
cgagggttcaaagtcctgtatgctgatcaagtgggcgcggtaatttacacgctagctccagatgatacggactgatacttgacgatttggctacaaggcagtgattgtaattttgaccgcttccccctatcatgggcggtagattacctattgcaaaggaacttttatgtcagataattggccacccgatcccaaccaaacctcacaggcaaagccacctgttcatccagataattcggaaaacttggcagccaatacgccatacgcagggcaagaatgggcacttgctagaaaaaaccctcattggcagccttggtggagcagcgcggtgcaagacgccttgggtataccctttaagct

SEQ ID NO: 664447 - DNA, 447 bp, Homo sapiens
aatcttccttgtaagtagacgcgtctcgatataacaaggttgctaagattaacaggaagaacagatctatccgtgacatgatgaatagaaggacgtagaacgatatacaaatggggttcagtattatctgtggtttcagacaactaccggaggtcttggaatgtatccctcaaggatgggggtgagtactctattatcataaacaggaaatgagggagcccaagagatgctgtgctgagggacacacacttggacggaaacaaactggggaaaaaatcctcctggtactgaacagcttaggctagtcttccttcaaattgagctcacctcacacaactgtcacttacacatgtatggggagcaatcacattatcctaaagcctcatttaaatctaccattctcacttaattctctgagtttcttaccagccttctctgaggagagag

SEQ ID NO: 664448 - DNA, 202 bp, Homo sapiens
atagacggtgcctcagcctgccgagccgcagtttccgtggtgtgagtgagtccgggcccgtgtccctcttgctgccgccatggctgcacgttgagcgccgaagacaaggcggcagttgagcgaagaagtatgatcgccccgcacttatgggaggacggggaaaaagcggccaaagaagttaagctgctgctactcgctcctg

SEQ ID NO: 664449 - DNA, 111 bp, Homo sapiens
tctccagcagttgtttcaagcctcatgcctcagcagtccacttcgggaggtgggggcactccacactggggggccctgcagctccagggctggtgctctagcagtatccgc

SEQ ID NO: 664450 - DNA, 114 bp, Homo sapiens
tgtgagcagcacccacaacccggaggtgagcatctgacctcccggaggcagtaccagtacccccaggcgagcatctgaactcatggagcagcacccacgcccccaggtgagcat

SEQ ID NO: 664451 - DNA, 132 bp, Homo sapiens
accatgacccaagcatgcatgcatgcctgtatgttgacgtgtattcaccaatgctgtgcatgcctccctgtacaagttccgtcagacacgtgagcaccgagctgacctacaaatatcgttaagctggagcct

SEQ ID NO: 664452 - DNA, 170 bp, Homo sapiens
actttctgtacggtacgggcacgcagataccaggtggcctcccctttctccgcgcctgagggtaactgaaataggacaaccgaatcaggaacgaaccccaggactgcagccatccaggttttgcgattatgtttactcacaaaacaaagctcatcatgcgtttgaaaaaa

SEQ ID NO: 664453 - DNA, 253 bp, Homo sapiens
catcatgggatcctgtttgttgctctcagcctattatgcactggttttcctttctgattctgggcaggccacgtgtcctctctgggcctgagtttcttcactataaagtgtaagtgctgatctggattatcactgaggttcctttaatctcttgaaagtctatagggtctctgataatttacgagaaagtcttcctttgcttatctcaaatccagggaccgcattatgttccagaaccccttttattgggttc

SEQ ID NO: 664454 - DNA, 442 bp, Homo sapiens
ttaagggcctactagatactgggtctgatgtttctattatttcctctaatttatggccttcctcctggcgtaaacatccaactaacatataactagcagggattggaaaagctgatgaagttcaccagagcacatttatcttgccttgcactggccctgagggtcaaaagggtaaaattcagccttatatcatgccaatctccactaatatttggggtagagatttgctgacacagtggggggctgaaattaatattccacataactcttacagtgctcccagtcaaaatataatggaaaacatggggtttgttcccggactcggtctcagtccaagacatgaaggaattactaaacctcttcaagttactgtagaagagggctggtttaggtcatccttttcaatgacagccactgctatgcctccctacaatgaaaatct

SEQ ID NO: 664455 - DNA, 119 bp, Homo sapiens
gtcagtcgctgtctatctaacagcatactgatcacacttcgtatagtatctcggactatgctattgtccatatcacagggatgatagcattaaggactcgtggatgcgtacgagctcga

SEQ ID NO: 664456 - DNA, 608 bp, Homo sapiens
atcgagggcctgctcagaatgatctgccaccgtcggctcccaaagtgctgttattacaagcagtgagccactgcaaccagatcagtcgtttctatatctgatacagtatctgtcataggaccataacatttactaaataaatggaaaatactgtttactgaagtgtctttcctttataactgataccctgcagaacccctaagtattatttagcattacataaggttgctctttataaaatatttactgaaagagtaaggactcaagtaggtcaagtggcgacagttttatgtgtagcatatggcagtgccattaactgaatgacctgtcttgaatcgacagagcatctgtctttattcccattgctgccataccagatgaagaacaaagcacatcacagattgagaatatttttatttttaattcaaaaataaaagccagagaggcaacttaccatgttatcccaactttgacttcttatagcatactctttactgtactgtgctctgtgttgtgtaacaataattgatttgacggccatttgcattcactttgaaatgtcaaatgtaaacaaaatttacgtgtaatacttatactatattgtaaat

SEQ ID NO: 664457 - DNA, 305 bp, Homo sapiens
tgctggggttacaggcgtgagccaccgcgcccagcctagactatggattttattcaccaggcagtggggagcccttaacggtcttagagcagagagaagttctaggaaaattaacgtgctcctacgtatgtagaattgattagagtagaagaggctaaggagaaaaacgatttcttccgtttttttttttttgggcgacagcttctggtggtggcccgggggggggtgcgggggtccacccgcggcccagggcggcctcaacactcaggggcggaggaattcttccaacctcgagttccgtgtga

SEQ ID NO: 664458 - DNA, 112 bp, Homo sapiens
cagtatggtttcctaataaaaagttttcaccaaaatgtagtccaaatgcaatgttaattgtatccattgtgtaatacaaatacaaaatacaatgttcccttttgttcttata

SEQ ID NO: 664459 - DNA, 303 bp, Homo sapiens
gctcgtaccctcacacgcacttgtgaggtggaggtagaggcgggcggatcacaaggtcaggagattgagaccttcctagctgttgaaaccccatctctactaaaaatacaaaaaattagccaggcgtggtagcacgcgcctgtagtcccagctactcgggaagctgaggcaggagaatggtgtgaaccggagaggcagagctcgcagtgagctgagattatacccatgcacttcagcctgggtgaatgagcgagactccatctcacaaaaaaagtaaacaaagactcttagctggctaattcg

SEQ ID NO: 664460 - DNA, 448 bp, Homo sapiens
aaattcgcggccgcgtcgactgaatactccaaacttgttcttgcgttagtcggtgaatggatcagtgtgctttctttcagtattgttttattataggtgccgccaataaatgatttgtcaaatacataaattagattgaactttgcttcctggccttcaccaatgtcctaggcagtcctggagttgaccctgggcttggaatttcgtaagaatgttactcatttagaggaaatgccccaatgttgacagtaatcgggcatctcacagtttgctggataggagctagtaatctcagggctaattctaaatagtaaactcagaattctcattctagtcaggtatggcagactacattgcatattagaagaaagttggtgagttcttctgacaaatggagattccctacagacacttaaaaagagcagtcaagtcactcccagacacagga

SEQ ID NO: 664461 - DNA, 368 bp, Homo sapiens
aggagagagagagagaccagcctgaccaacatggagaaaccctgtctttactaaaaatgtaaaattagccaggcatggtggcacatgcatgtaattccagctacttgggaggctgaggtaggagaatcgtttgaacccggaggcggaggttgcggtgagccgagatcgcaccattgcactctagcctgggcaatgagagcaaaactctgcctcagaaaaaaaaaaaatcagtgtttaattctgggatctgagcaaagttatgcctcttccctggaggtgaacacgttacagcgtttagtattattattcgccgtgggcaaggggtcttcacaacacattattttacctggcgaatatgttcaaatgtt

SEQ ID NO: 664462 - DNA, 362 bp, Homo sapiens
tttttttttgagacggagtcgctctctgtcacccaggctggagtgcagtggtacaatctcggctcactgcagccgccacctcctgggttcaagcaattctcctgcctcagcctcccaagtagctaggattacaggcgcccatcatcatgcccagctactttttgtatttttagtagagacagggtttcaccatgttggccaggctggtcttgacctgacctcaagtgatccgcccacctcggcctcccaaattgctgggattacaggcgtgacgaccgcgcccagcctatttatatattttttagagcaaacccgtggcctgcaggccccaggacggctttgaatgaggccaacacaaattg

SEQ ID NO: 664463 - DNA, 271 bp, Homo sapiens
  misc_feature (124)..(124): n is a, c, g, or t
aaagcatggccacgcatggtggctcacacctgtaaaaccagcactttgggaggccaaagcagggcagatcacccaatgtcaagagtttgagaccagcctggccaacatggtgaaaccccgtctntactatacaaatattagctggacgtggcggtgtgcgcctgtagtcccagctactcaggaggctgagtttttattttttatagagataggagtctcactgtgttgccctggctgccctcctcctgggctcaagagtctcgtgcccgtt

SEQ ID NO: 664464 - DNA, 666 bp, Homo sapiens
ccgctgggtccccttccacactgtggaagctttgttcttttgctctttgcaataaatcttgctactgctcaatcttagggatacatgcgtggtggtatgagctgtaacactcaccaggaagcgcactgcagcttcattcctagaagccatgggagaccagtgagcccgcacgggaggaacggaacaacatccagatgtgcgcggccttaagagctagtaacactcaccggcgagaaggtctggcagcttcactcctgtagccagcgagaccacgaacccacgcagaagggaagaaactcgcgaacaacatccaaacagtcagaaggaaccaaactccgggacgcaccaccttaagacgctgtaacacgtcgagtcgcaaggagtccgcatgttgtccatgtcttgaagatcagtgagaccaagaaccctatcaatttcctggacactatttttggcgagccagatggggaacatattcgcctattcaccaagcggtgaagaaccatcacctatagctgagcggcgaagaccatcgacctatcaccaagcaaatcgaaggccatcaagctacagatgggcttacaaatggaacccaaaatgagttcaactaacaacttctaccaagggcccctggaccgacccaactggcacttcccctggcctaga

SEQ ID NO: 664465 - DNA, 1271 bp, Homo sapiens
  misc_feature (398)..(399): n is a, c, g, or t
  misc_feature (1224)..(1224): n is a, c, g, or t
atagtctttaatacacaatcagcaaagcttacaatccactcaagagacttactattttgtcactgttgaaaatgggctaaatgatgtaaattgaatgtggctgtcaactaaaacaaaattcagtatagaattagtattcatccagtcatggacatacctgtagcatagttttctcttgagacataataggccgtttcctactgtaaaaacttacagccagcttcatacaataaagtaaattttttcctgtgttttggcaggctcccgtcatacatgtgtattggtggtgctgttaccaaaatgatcattgttactatggtggcatacagcttcatggagcagaaagtttctacttggtatttaattaataaaatgttgaggaatggctgaaacagttnntaatgaagtatttttacattgctggtattgtgttttcagcatattggtagtttataatacagacttcttgttgtcaaagatcttcccgcttaaaaattatattccttttctcacgtgtttattagagaagaacaaatgataaaaattagcattttaatgatatatttatgtgtagaaatagggggagaaaaaaaggccaactgaggtaatctaggtgaaaaagtttgttttcagtttagctacatggtttaaccagaattagaagaagaacttcatttccaaccaaagaacaggccgcacagccaccattttggggtcttgagcagagagagaaaacaaataggtggtttgtgagaactctgaattatgtagaaaaccagcttttctacataataaataagctttgccttatttattaaagttaggatttctttgcagttcttaaatgtacatttaaattatatcaagttgactttagaagaaaaaaattataagcagcctacctctatcatgtatctttgttgttaaccagagtttttaaaatggaaaaaaatttctgtaatttatttttggttctatgagattataattaaaccccaaattatatatttaaaaaacaaaaaccaaaagatttttagtcattattatagtaactgaaattaagtagagttacttttttttaaaattatttttaaaaataattactactttggaaataaattggctgggcatggtggctcacacctgtaatcccagcactttgggaggctgagatgggaggatcacttgagccttgcaggtcaaggatgcggtgagctgtgaccntgctactgcaccccagcctgggtggcagagcgagaccctgtctcaca

SEQ ID NO: 664466 - DNA, 221 bp, Homo sapiens
ttgcttaccaaaagtaaacccaggtcctggaccagatgcaggggaggtacatatccatgagtgaagaccagtgtcttcctcacatgggtgggtcacacaattgtgacctcagttttagggccaagatctgtgttggtttcttagaatgatagacttttcctccaggggaccacagcaggtgaagctcaagagcgcatggatctgctgtggtcccctggaga

SEQ ID NO: 664467 - DNA, 409 bp, Homo sapiens
  misc_feature (142)..(142): n is a, c, g, or t
  misc_feature (189)..(189): n is a, c, g, or t
  misc_feature (295)..(295): n is a, c, g, or t
cccttcgacgtcgcggcggagatccccgccctcacggcggaactcggcgggcgggcgggcgccgtcgtcagcttcaccggcctgtcccgcgacgaggacgggcgcgtgcccgccctcgagctcgagcattatcccggcatgnccgagcccgagattggcctcgtgctcgacgagcccgcccggcgctgnccgctccagggcgcggtggcgatccaccgccacggcctggtgcggccgggcgagggcatcgtgctggtgctcgccgcctccgcccaccgcaccgccgccttcgagnccgcgagcttcctgatggactacctcaagacccgcgcgccgttctggaagcgcgagcaccgggccgacggcaccctgggcggctgggtcgaggcgatggagcacgacgcggccg

SEQ ID NO: 664468 - DNA, 641 bp, Homo sapiens
  misc_feature (1)..(1): n is a, c, g, or t
  misc_feature (235)..(235): n is a, c, g, or t
  misc_feature (238)..(238): n is a, c, g, or t
  misc_feature (243)..(245): n is a, c, g, or t
  misc_feature (247)..(247): n is a, c, g, or t
  misc_feature (249)..(251): n is a, c, g, or t
  misc_feature (264)..(264): n is a, c, g, or t
  misc_feature (598)..(598): n is a, c, g, or t
  misc_feature (623)..(623): n is a, c, g, or t
ncctggccggatcagtcttttattatcagttgtcaaatatctttctaaatggttgtagaaatgtatgtcattcattttaatattagggaagggtgagcaaaatattacataaatattaaaaatattaataaaaatcaaattatctgaatagttattaaaaaacaaatttttatttgtattaatattttccatggcggtcgtaaatagagaatgggctgctagccatttaagtgantgntaacnnntntnnnatctaatttattnccagtttgccttcaaagttgttagaaactgcttttgactgtattgagacctttctaaattgtctttcatagatcagacacccttcactgggggggttgcccattaagtctttggaagagattaaaagtcttttccagagatggtctgtccgaagatcaagttctccatcgcttaacagtgggaaagagccatcttctggagttccaaacgcctttgtgagcagactccctctctttagtcgaatgaaaccagcttcacctgtggaggaagaggtctcccaggtgtgtgagagcccccagtgctccagtagctcagcttgctgctttactccacnctgctttataaaaactgaaatgtanatttctctttctatggca

SEQ ID NO: 664469 - DNA, 406 bp, Homo sapiens
  misc_feature (63)..(63): n is a, c, g, or t
  misc_feature (105)..(105): n is a, c, g, or t
  misc_feature (113)..(113): n is a, c, g, or t
tctgcggggggcctgtcccatctcagatctgctctgtgggccaggcatggtgtctcacgctgntcatccaggcactttgggccgggcgcggtgggtcacgctgtngatccagncactttgggaggccgaggcgagcggaccataaggtcaggagatccagaccatcctggccagcatggtgaaaccccttctctactaagagtgcagaattggctgggtgtgttggtgcatgcctgtggtcccagctgcttgggaggctgaggcaggagaatcgcttgaaccttcaaccgggaaggtggaggttgcagtgagccgggattgcgccattgcactccagccggggcaacgagcgaaactgcgtctcaaaaacaaaaacaaacaaaacaaaacaaaacaaaaaactctg

SEQ ID NO: 664470 - DNA, 616 bp, Homo sapiens
  misc_feature (573)..(573): n is a, c, g, or t
  misc_feature (598)..(598): n is a, c, g, or t
ctggccgatctgtttttattttttggggaaaactttttcatttattgagcatttctgaatgagaaaatttttccatccaattaattggccttccatgattaatgtgaatttctcagtttagtcactgatagaagttaagatttaagagaaaccagggtacaaataagaaaaagttctatgaaaatagaaattcaaatccacattatgatattgataactcttcttgatgaagctactttgcttactggtccatttaaaagaaaattcaaagtaacaaacttgtagaatctttctaaattgtctttcatagatcagacacccttcactgggggggttgcccattaagtctttggaagagattaaaagtcttttccagagatggtctgtccgaagatcaagttctccatcgcttaacagtgggaaagagccatcttctggagttccaaacgcctttgtgagcagactccctctctttagtcgaatgaaaccagcttcacctgtggaggaagaggtctcccaggtgtgtgagagcccccagtgctccagtagctcagcttgctgctttactccacnctgctttataaaaactgaaatgtanatttctctttctatggca

SEQ ID NO: 664471 - DNA, 432 bp, Homo sapiens
gttttttttttacccagggctctggaaggacaccaaactgttttgcttgttaccttccctccgttttctcctcgcctttcacagtcccctcctgcctggtcctgtccagccaggtttaccacccaccccacccctttttttcgggtccctgcccctccagattgcctggtgatatattttgtttccctttgtgtttccttttcaggtttgagggtctttctttgcaggtttctgaagacggaagatctccgttccgctcccagcgggtgcagtgtaaattccccttccccctggggaaaagcactaccctgttttggggggtttaggggtgtttttgtttttcaggtgttttggttttttgttttttttttttcctttgccttttttcccttttatttggagggaatgggaggaaaaaaaacacaaaaaaaa

SEQ ID NO: 664472 - DNA, 379 bp, Homo sapiens
agagcccccagctgcaggacagttcataatgggcctttgggaaataagccctcaaatcatcttgctgggagctcttttactctaggaagtggagaaggagccagtgaagtgcctcattccagacaggctgctttcagtagccccattgtaagtatgaatgcatgactagagtcttgcacatccacaatgtatgatgagagagcagccttgtaattatgatagagtcaaactctgttgtcttttctaccttagaagagactacatgattgcagctcagcaagatcaccacacataattagaagtataaacaaacaatatcacactagtcgacttttaaaaaataactcaatgttgagaggtagtatgccatttgtggaaa

SEQ ID NO: 664473 - DNA, 301 bp, Homo sapiens
  misc_feature (80)..(80): n is a, c, g, or t
gctcgacggcagaaggccagcagcgtcggtgcaaatcgggtttcagacgttgtttgatcacgctccgttgctgcatatcncgctcggtccacagggcaaacacatcgacggcgaactgggtgacgttgcccgtcatcagcgtggtcggcggggtgcctttcatatgctggcgggaaatggcgctctgaatcgccatggcgtgaccccggtcatgccggtgatcagcgccgtcgtgctgtcgccgtcgataaaggggccccagaaaatcgccaggaaagcgaaggcggccagtatcagggta

SEQ ID NO: 664474 - DNA, 1121 bp, Homo sapiens
agagcccccagctgcaggacagttcataatgggcctttgggaaataagccctcaaatcatcttgctgggagctcttttactctaggaagtggagaaggagccagtgaagtgcctcattccagacaggctgctttcagtagccccattgaaacagacgtggtaccagacaccaggcttttagacaattagtcagattacacctcggctctttatgccactagatgagaccatccaaaatccaccaatggaaactttgtacattatcgactttttcattgcattggcaatttgcaacacagtagtggtttctgctcctaaccaaccccgacaaaagatcagacacccttcactgggggggttgcccattaagtctttggaagagattaaaagtcttttccagagatggtctgtccgaagatcaagttctccatcgcttaacagtgggaaagagccatcttctggagttccaaacgcctttgtgagcagactccctctctttagtcgaatgaaaccagcttcacctgtggaggaagaggtctcccaggtgtgtgagagcccccagtgctccagtagctcagcttgctgcacagaaacagagaaacaacacggtgatgcaggcctcctgaatggcaaggcagagtccctccctggacagccattggcctgcaacctgtgttatgaggccgagagcccagacgaagcggccttagtgtatgccgccagggcttaccaatgcactttacggtctcggacaccagagcaggtcatggtggactttgctgctttgggaccattaacatttcaactcctacacatcctgccctttgactcagtaagaaaaagaatgtctgttgtggtccgacaccctctttccaatcaagttgtggtgtatacgaaaggcgctgattctgtgatcatggagttactgtcggtggcttccccaggtaagtttatacaaaagtgaaatagtagtgatttgaaaagctcggagattaaaagaccatacttgatggctttataaaggcaaagaaacagctatttggggactaatcacatttggtgaagtagggggaagctgcctaggatttgatgggaaagcaagtaagttttggggctaccca

SEQ ID NO: 664475 - DNA, 128 bp, Homo sapiens
tagactaacatttcgtgtagtgagttgtcggtctacctgggttaggtctacctggaggtctacctgggttaggtctacctggaggtctacctgggttaggtctacctggaggtctacctgggttaggt

SEQ ID NO: 664476 - DNA, 1083 bp, Homo sapiens
agagcccccagctgcaggacagttcataatgggcctttgggaaataagccctcaaatcatcttgctgggagctcttttactctaggaagtggagaaggagccagtgaagtgcctcattccagacaggctgctttcagtagccccattgaaacagacgtggtaccagacaccaggcttttagacaattagtcagattacacctcggctctttatgccactagatgagaccatccaaaatccaccaatggaaactttgtacattatcgactttttcattgcattggcaatttgcaacacagtagtggtttctgctcctaaccaaccccgacaaaagatcagacacccttcactgggggggttgcccattaagtctttggaagagattaaaagtcttttccagagatggtctgtccgaagatcaagttctccatcgcttaacagtgggaaagagccatcttctggagttccaaacgcctttgtgagcagactccctctctttagtcgaatgaaaccagcttcacctgtggaggaagaggtctcccaggtgtgtgagagcccccagtgctccagtagctcagcttgctgcacagaaacagagaaacaacacggtgatgcaggcctcctgaatggcaaggcagagtccctccctggacagccattggcctgcaacctgtgttatgaggccgagagcccagacgaagcggccttagtgtatgccgccagggcttaccaatgcactttacggtctcggacaccagagcaggtcatggtggactttgctgctttgggaccattaacatttcaactcctacacatcctgccctttgactcagtaagaaaaagaatgtctgttgtggtccgacaccctctttccaatcaagttgtggtgtatacgaaaggcgctgattctgtgatcatggagttactgtcggtggcttccccagattgagcaagtctggagaaacaacagatgatagtaagggagaaaacccagaagcacttggatgactatgccaaacaaggccttcgtactttatgtatagcaaagaaggtcatgagtgacactgatctataggagtggtg

SEQ ID NO: 664477 - DNA, 690 bp, Homo sapiens
gcgctcggagcctacgctgcccatgctgctacctgaaacccagagtcctgctgccctggatgtccccgctgcccctggagccctgatgcaccctgggaagtccctgatgcctcgctgcccctgtgatgtgccctgagcctgctgcctgcctgcaccctggatacccctgctgtcccctgctgatgcttgcctgatgtgcctgccctgcctgcctgcccctgctggacatgtacctgccttcctccccgtctgtcctgctgcacatggcctgccccctgaccttgtttccaccaacctccatgtgatgtgatgtgcacacctgctgctcatcttgcctctgacttacttcactggatcctgtgtgattgacctgacttgctggccacaactttcttgcctgctgatgttgcatcctgtgctgcttgctttgtggtgccatgccctgatggtgccctgtactgctgttgcccctgatgttgcctgctgatgcttgtcccctgcagatgtgaaccttgctggcccaacctgccctgcttgcttaatgacttgtgcctgatgactggctgctggctgccttgcaacccctgcctggtctgccggtgtccactggcatgggtcctgttgttgccacctgctgcacctgctgatgccaccttggccctggccttcttgtgtgcgactgatgcttgc

SEQ ID NO: 664478 - DNA, 210 bp, Homo sapiens
tgcatgaagttatcttcttcggtgaccactatccgagacccaaccctgcatgcccagttccagtgattactcggaacctacagagggtgacaaaggagcttctgggaaaaggtgagagaaggaatagcggaaagtggaagaggaaatcgttgaagcgttagtactagaagctgaggaagagggaggttctcccatggaccacagggctgc

SEQ ID NO: 664479 - DNA, 192 bp, Homo sapiens
gagccacaccggagatgctgggtgagatgggagggacagactggggagcaggaagcagatccagagccaaagcactgcgaaataacagcagaagccccaggccatcaatgcgcatgggagctcatcacatgcacacacacacacagacatgtacacactcaagcatgtgcacacacaattgattgcaccagg

SEQ ID NO: 664480 - DNA, 492 bp, Homo sapiens
gtgatttgtttgctttattgatgaggcctgccgtatttctaagatgtttctgtgtcatctccaagacaatattcagaatgaatctccaatatatgtgtacgttctttttgtactaatttgtgccttttgtaaaatttgagagttcatttactcatgtttaaaatgtaaggaaggctgtatagagcttctatattacagtagagtctgacttttaaatataaaagcaaataattttctgtctgtattctgtctctttctcagttgccacaactgagtgtctgtacctctcttatctgctagggatacattccaagatgaccagtggattcctgaaaccggtgatagtactgaaccttctgtacactgtgttttttcctatacactacgtacctatgataaagcttaattcataaagcttaatttaaaatttattaaagattaatttaaaattaagcacagcaagggattaacaactgttaataaaatagaaca

SEQ ID NO: 664481 - DNA, 210 bp, Homo sapiens
  misc_feature (8)..(8): n is a, c, g, or t
  misc_feature (26)..(26): n is a, c, g, or t
ccaggggnacaaggcagggtcagagnttgaggtaagtttcagagcaagagtgaaagtttattaaaaaagtgttagagcaggaacgaaaggaaataaagtacacttggaggagggccaggtgggcatcttgagagagcaagtacacggttttgacctttgacttggggtttatatcttggcatgcttctgggggctgcgtcccttctcccc

SEQ ID NO: 664482 - DNA, 365 bp, Homo sapiens
cctggcttatgagagtgatctctgatactgctcacagtcttccaattcattcaaaaatggctcttctccaacacctaacttctttaaaggaaactggacaaaaacagatgaagaaaaacttcagtgcacctaggctcttgaaacagacctttttttagactttcgttttccttttaaagttaaatctgcagtatacacaaccttagaaagaatattcattcagccatttaacagtttttttacaaaaatgccctccccttgcctaaatttgcttgtgcttaattcctgctgtacccttgctcctgttctttgatgttcagcatcagttatttgcacagtgcaaccatttaaatctaggcatcacc

SEQ ID NO: 664483 - DNA, 262 bp, Homo sapiens
acttagaaagccgtgtttactttttggatattgaggcctcttcaagtttcaggtttgaacacgtgggttgtgggcggtgcggctagactctggttcactggcaagaactgggtgtgtctagtacagaggagtgatataagagtaatttaagtttaagtgctcccaacatgaacattatccccgtagcatcaggttaaattctagggtttgcaagggcccaagcagacatttgcacaagagaactttgggcctttgttcaaat

SEQ ID NO: 664484 - DNA, 127 bp, Homo sapiens
atcttcttcttacgtagctccgtacgactgtctcgggcttttaccattgctgctatcgattatggttgaaggggcatacaaatttctggtgtgttcttcgtaccggaactcgattgaggaccagagt

SEQ ID NO: 664485 - DNA, 902 bp, Homo sapiens
  misc_feature (902)..(902): n is a, c, g, or t
ctgacgctattcgcgctcgtgtgcaggcccggctctggctcctggtcccgtgtgcgagggttaactgctgatggccccggcctcgtgtccccgtgactagtgcctgtgaccccgggtgccatgaatgcatgtgatgtggctcgtggctggctgcctgcagtgctgctggacaatggctgaaacctgcctgcccgggctggagtgagaacaagaacccccacctgctgccgggccccccaaggattgttggatgattgaaatgatgtgatgtgcaagctgactgggtggcagggtcaactgtgggtgatgggcatgactggcaagaacggcgtgctgagcgagcgcgggctttgagagcacatacccaagacggaggatgccttgagaacatcgatggtcacgccttttgtgaagtgacaattcaaggtgatgcaccgttgaaaaccatgctaagagaaaaatgcggtgtttcacttggcaaatgggatgcctgaaggatttacgggtgccttgcagtgtcccccttgcagggaattgccttgctcctattcccgaccgattcaactggccctgccttcaggcccacatagttgttaccttggctattaaaggcggctttggttggcagccgcgtgctctccttttcgatctttttcgaacattatatttggcgcccctatcggaaaagaactttttttttggctacgcaccgttttccgttgtgagcacaaacgcccacattggggaaccagcaggagagggcttgatttttagcagtgcttcccctgtcgccccggcacggtggtataaagtggcttggcggtctgacagccgccttccttggcctttgaacggtttggaacggcgcttactcttccaaacttccttcggtggttcatctn

SEQ ID NO: 664486 - DNA, 746 bp, Homo sapiens
agcggaggtgggagaggcatgctagcggctggcgagttcacgtggatgaaagcagaagactcatctaaagttagtggtggaacacctatcaaaatttgaagatccaaatcagtaggttcctttaaacagcgaaacccgaatgaggtactagaaacacgagaaataagattcgggaacaaaatcgatatgacttgaaaacagcaggaccacaatctcagttgcttgctggaatcgtggtggataagccaccttctactatgcaatgtgaagatgatgatcatggcccagcagctcctcctaacccatttagtcatctcacagaaggagaacttgcaagagtataagaggacaaatcgggaacgttacaccaaaagggctaagaagagaaaacctagtggaggcggtatcaccaaggagctactatctccatggcaagtgcctgtcatggtagtaaatggcaaggatgatatgcatgatgttgaagatgagcttgctaagcgaagtgagtaggttaagcacaagtacaagcatagaagaaacatcgagattactatgaagtcttccagagtataatcgaggaaggtctgtcgacctgaaggctaccccttaaaatcgccattcaagaaaaagaagaaattcgggactccttcttttctgaaaaagaagttgaaaaagggtaaagattgagcttagataaagggttgtgatagtaatattataacgaggtgaattgaaaaaataaaaga

SEQ ID NO: 664487 - DNA, 435 bp, Homo sapiens
agatatgatgctgcttgaggtggatgcatcggtgcgactacagttgcgtgccagcatggctggctaagctctttagtgttgtggagaggagatcttacttgcgtcgaccagtctggtgttaaactgctggcctcaagtgatcttcctgccttggtctctcgcgaattgctgggatttacaggcgtgagccactgtacccgccctaaaacatgtcaagtcgtagcgatttttatatataagatctactctaggcacttgtttaaaaaactccgtgttcagccaccaccctgcaaaaatcatatcaacaaatttgtttataatttaaagcattgcaaacattcggaagttacatttctagacaagaactgacaaaaccactctgctctgaattttataccagtcgtaattaacataatgattaccgaaaatatgact

SEQ ID NO: 664488 - DNA, 1028 bp, Homo sapiens
ctattctctacaaagcacaaagacataggaacactatacctattattcggcgcatgagctgggagtcctaggcacagctctaagcctccttattcgagccgagcatgggccagccaggcaagcttctaggtaacgaccacatctacaacgttatcgtcacagcccatgcattagtaataatcttcttcatagtaatacccatcataatcggaggcgttagggcaacgtgacttagttccccgtaataatcggtgcccccgactatggcgtttccccgcagtaaagcaagcataagcgttctgactcattaccgtcgcctcgtcgtccgtactccatgcatcgcaatcatgcatactagatgagagggccaggagacagagaacagcgttgacacaggtcatacccatcccgttagacagggaactacatcccaccctggagcctccgtagacctaaccatcttctccttacaactagacaggtgtctcctctatcttaggggccatcaatttcatcacgaagcaattatcaatgatagaaagccccgtgacagtaacccaagtaccaaagcgcccctcttacgtcgtgatccgtgcctaagtcacagcagtcctacattctcactatctctcccagtcctagctggtggaatcactatactactaacagacgcaactcaacaccaacttcttcgacacagcggaggaggagaaccgatcatatacaacaactattctgatatccggacaacacgaaggataatcataatctacaggctcggaaaatctccatatgggacctacctcgtccggcaacaagaccatggatacatagaacggcagagcaagagctcaagggacacaagggaccaggatagacaccaagagtaacgagcataacaataaacgaacaaattacacggaaaaacagaacccaagcgacagaaagagcaaaaacagaacaaaaactcgcaagagcgacacaaccaggccgatctacaacaaacacaaaaaagcacagacacaggt

SEQ ID NO: 664489 - DNA, 151 bp, Homo sapiens
aaaagagagagaagattgaaaagaagatgaaggtgaaattaggaagaagcttgaaaagagaaagaagatttaaagaagaggaagaaggaaaagaggaagagtagatctaagaagatgtagtaaaccatgaggagccacagagtattttttt

SEQ ID NO: 664490 - DNA, 465 bp, Homo sapiens
  misc_feature (181)..(181): n is a, c, g, or t
atgtgctggtatacagtgtatcaattagtggtacgtaaggcctagagttacagtggaataatctcagtcagatgattgttattattcattaatattatttcatttttaggtcattttgtctttgcctaaattttagtaagacactcttcagggatcacagtgatactaaataggtaaaatngcctacagagagaacgggaagtcgagtatacatgtatacacacactagcattctcaaggggccatctgtattatgcatatccttgtttttcattacagaagactatggagaagaagttagtgagacagcagacgaaacaactggaacctcgacctgtaaggatgaaaggctgatatatcataaccttctgaatgagttcagtcgcctggaagaaagatatgatgacctcagggacgagatgacccttatgggggtgagtcgaacactctcgtgagtcgatcagt

SEQ ID NO: 664491 - DNA, 119 bp, Homo sapiens
  misc_feature (6)..(6): n is a, c, g, or t
accggntagagcggtctctactaacataatacccattattttacagtgtttgcagcctgcgaagctgcactgggcctatcactactagtaatagtatccaacacatacggtaccgatta

SEQ ID NO: 664492 - DNA, 1000 bp, Homo sapiens
gtagacagaacatcagggagaaagactatctcttgtatatttcataaacatagcattagtagtccaaattcagaattcttcttaagtctcagatactttacactttttctctcttaagcagcagacagaatgcaagtaaatagtatatataagcaccaaaaggatctatacgatgaaaagtgggtgctttaacagttaatatctgatttttacatttatttacatattatattaactggtagcacaagtgaattatagatagggcacatttattatagacaagttgtcatatctcttcaagtattattgcttattataaacataatattactatgtagatttgatctaactctattgctaattatcaaataggagatcatggacttcgaaagaaactaccattattgatttataaacaccactttacatgagtcagtttaccatatgtcttaaacagaaataaccaagcacaacaaggcaaagagccacaataaacaggtattatgattactttaacactgtataaccttgaaaagctagttaacctgaaattatcaggaagtaattaaccttactatggaactatctacactgctgtgtatcatgtctagataacgtgcacaataaacgtagtaatatggctgatacatcaggacaagtgagtaagagaccagggaaaaagaccaaagatgggaagatccgacacaacagaaaaccaagcagaagagagacaagaaagaacacaaaaaacaaaacgaggtaacaacagcaagacaaacgaaagagacaaatagaaagagaaccagatagtctgagaagtactgaccgtattagtcgagcgatcaagaatgaggcgcagagcggggaatcggcgagagaaatacaatgctaaaagttgatcagaagaacaacgaaggaggaaataggatgaagttaatcttcgtaaaacaccggagggatggcgtgaatgatgcgacggaatgccatcagtaggcgaacg

SEQ ID NO: 664493 - DNA, 582 bp, Homo sapiens
gaggctcctggagcccgacgcagagcagagcgctggtcgggagcaatgcaggtagccggcatctgatggattccttacaaagtagtgctggaggggccagctaccttggtgcttccggctgcaagggggcaaaggacttcaatgtgcgccctctccatttcccggctcactcctgggggcaaagcggcgcaggccggacatggcctgctgggtgactgggtgctgagcatcagaaggcgagaatgcgggtagacctcacacacatctgaagctcagaacaagatccgggcctgcgggggagcgcctcaagacgtgggagatccagcagggagccacagcgacgtgtgccagatgaccaacaccctgcaccgacagagtacggaggcatgggccgcggaaccgtccacgggccggatggaaccgagtgcatgaggcaacagaaacaagagccagagcacgtgcaacagaaccacgctgacaccaataactgcaaaacacccccaaaaacaacagaacaccagaacaagaacaggaaaaacacaggagaacaacagaacggcggcaaacgcaaccagacagaag

SEQ ID NO: 664494 - DNA, 246 bp, Homo sapiens
  misc_feature (81)..(81): n is a, c, g, or t
  misc_feature (122)..(122): n is a, c, g, or t
  misc_feature (147)..(147): n is a, c, g, or t
  misc_feature (201)..(201): n is a, c, g, or t
cccagagtaaagaaatcttatgtatcaatcatgaaatccaagaagacgtcctatcaattggtagtctgtcctttggactgnctggcgtgagtatttttagggtacctattgcatgattatgncgggagcacagttataagcaaattntctccattccctgaagaggatgagaggagaggtttttgcccttagcctgcaggnaataatacctcgcataggaagcttatgatcatggatccctgtgag

SEQ ID NO: 664495 - DNA, 979 bp, Homo sapiens
ggcagtctgtctgagggcggcgaagtggtggctcattttaagatgaggcttctgtgcttctcctagtggcggcgtctgagatggtccggagcgaggcctcggacaaatctgggcgggtgccccacgcatgagacttacccgatgcagaaacgccacgggcgcccgcgtgctacacagtccagaagtgcggtgtctcccgtgacgggtacatacgagcggagctgttaggagagagttacactgcggggttaactacacccccaggggatcaccacagaaacaagtccgcacatcgcaaggaagcaccaacattcagccatccctcatcaaaacacaaaattaatatacgaccccaagcacttcagccattccatttcccgtgtgtacaaggttcattaccacacacttcagcttccgtcaaacacaaggcgcctcacacatcacctcttcgtctggggcccacacgggacactaccctctctgtgtccttcaccttcttcgtgccaattgcacataggtctctcccttcaagcaccactcccggggaccacggtgggagcggaccacaactacagaccaactcacaccggggctcacactgcgcccacttcgtacttgagactgcggatctcacacttccccttggaaagcacaacaaagtgcactcctggcccagaaacccccacggctgcgtcaacttgtttccaaaccagagtggtgtgggcatttttttacgatcgcattaacacttttcccacacctcttgacttggatcacccccttggtccggtgcgggacataaacaggctactgggacaattcctgtggggctccaactcgtgtcagcaatccaccctgtggcacaacacacatctctggatcaccaaaacttctcttctgcaccaatcggcacattggaaccgcctccacattggtcgccatatggcgccttccacatcacacaaccacatgcgaatca

SEQ ID NO: 664496 - DNA, 547 bp, Homo sapiens
tggctatgtaccatggtgagtgctgtcacataacccagtgtgcttaaatatgggaggtgactataaaatggatgaatacagcaagttgagctttcctcagtggcctcacaagtaaccgtaccctgtgtattacttattttcatgtaatacgagatatatagaatactagtagtgagggacaggctgggagataggaccaatacttatgagttcttccttcaggccccagccagctaagttgtcttttgttcaatgagtcaaatttctccacaatagatgttgcttttcgggctaccattaccttaattttaaaccaaaaatactgaatacggatgttggttattgtttgaatatgcaggtatttctgtgttaccttgaaatcactggcagtacatttcagttttgtgctgcgttaaaaattgttgttaattagatacaacttattgataactatgtatgtcttgtcacatctctacaggatttagggtatgatgattttaggtgtctcagtggttatgtgatttagtgagtaaaataatgaacagta

SEQ ID NO: 664497 - DNA, 1528 bp, Homo sapiens
  misc_feature (979)..(979): n is a, c, g, or t
  misc_feature (1153)..(1153): n is a, c, g, or t
ccgcaccatcgaattgtggtggtacccgccagttttctcccttcactgctttttttctggccactcattgtttgtcccgggtgcgtgtttgttacatcgtcgtgtggttgtcacaagtgaagctccactttctcatcggagggatcacttgggtactgagtatgcgttcgtggcagtcctctgccgcgggtggttaatacttcttctcccacctcgttaattgtgttggggcgaatactaagccgctcaggagggggttggttcttttctctaacaagaaggggggggtaaatgtgtggtgcccaagttgtgtgggctttttgtgaaccccgctggagttgggccgcccacctttgggggttccgaaggcgtttcttacactatatcactcccgtattgccgtgttgtggttgttcgtcgtgggtccctcttgtagttgggtcctctccacgtgatgcgcccctgtgctcgttgtctatgccgccgccgttggggtcgccatagccgcccgggttgtgcgaccctatggcccccattgccccctttttgggcgcccgccgccaagcgggctttgttttgtgggaatcgtcacttctctctggggggccgtgttattacactgctgggggacaacgcttggtcgataatagggttttgggggacacgaccacccacggcgcgataatagaaatggatgtttctgtatcggcctgcgtccatctctgggtagaaacactgggggcgtcgtgggttttttgactcacagacgactctggtgtgtcttatcaagtgtgggggcgacacacgccctccggagggtcctctctggggcttgccgcccactgtcaacatgtgtggggcgccgccccacaccccgcactgctcacacagggggagataataattagggagagcgagacatattcttgtggatactcttggagagggccccccctcggggagaccctcacagcagttngtgctcacacaaagaggggtggaagacacacagttgtccctcttgtctctcggtgagtggtgaacatctctctttgtcacacagctgtgtctctctcgtgatagagaataaaatgtgggagatgtcctccgtcagcaggagactctctccgcacaccctgcgggcgttttgggnggtgtcacacagagaacacacggcccacgccgacagcagagagtttataggggccctctctaggggcgacactctggggcgtctgtgtggtggtgccactcttgagaaccgccgagtctctctctgggcctctctggcgcctctcatacttgtgcgtcgttcgttcttgcgtctttttggcgctcttctcacggtgttgcacaccgctggtctctccacccgcctccacgctcacgcgtggtctctgcaccgcacaccacctccaccccctctcaccccttctcaccttttctccccacctatcgtgccgcacccctccacggccctgtgttggtatagagcctacctgtatgtccattaccccccctggagcca

SEQ ID NO: 664498 - DNA, 957 bp, Homo sapiens
gtaccatctcagttctaggaatactagtatatcgctcacaggctcatatcctccctactatgcctagaaggaatacctactatcggctgttcattatagctagcctctcataagccctcaacacccactccctcttagccaatatgtgcctatgacagttactagtcttgccgcctgcgaaggcgcgggggcctagccctagtagtctcaatctccaagcacatatgggctagactacgtacataacgctaaaccctactccaatgctaaaacgtaatcgtcccaaacaataatattacatagcactgagatgacttgccagagaaaagacgtaatgtgaatcaacacaagcacccacagcctaattattagcatcatcgccctagtattttgtgaaccaaatcaggaacaacctatttagctgttccccaagctttgcctcggagcccacttaaaacccccctcctaatactaagctacctgactacctacccctcacaatcatggacaagccaggcaagttatccagtgaaccacttatcacgagaaaaagtctacctctctatactaatctccctacaaatctccttaattataacatacacagcacagaactaatcatatttatatctatcttcgaaacacacttatccccacgtggtatcaacacccggaagaaggcacaagacaggaacggctgaacgcaggacatactttccaagcagacccacaagatgggtccgttccctaaggtcgacagttgaagtcaaaaagcctaggtccacagatctcatgcctcgtggcacaagaaagtctgggcaaatcgatgggccaccacagtaagcgaacccaggcactggtcagcgtcagcccggaagtagcgggcaacagggaaccaccacgcagaacagcgctggagagggccggctgacaacaccccacccaccccaaacagga

SEQ ID NO: 664499 - DNA, 300 bp, Homo sapiens
  misc_feature (14)..(16): n is a, c, g, or t
  misc_feature (23)..(23): n is a, c, g, or t
  misc_feature (84)..(84): n is a, c, g, or t
  misc_feature (266)..(266): n is a, c, g, or t
ctcgtgcaatttcnnncagcttnacattctggattctcctcttgagtaaaaggactcagccaactatgaagttttttgtttttnctttaatcttggctctcatgctttccatgactggagctgattcacatgcaaagagacatcatgggtataaaagaaaattccatgaaaagcatcattcacatcgaggctatagatcaaattatctgtatgacaattgatatcttcagtaatcatggggcatgattatggaggtttgactggcnaattcgctttgggctcgtgtattctcatttgtca

SEQ ID NO: 664500 - DNA, 409 bp, Homo sapiens
gagtaacgtacgagcggtgccagtgtccctgcttagaaaggatttttaaatcgggtgcgtttttgcctgcgctccaacaacatccattggttgtactaaatcttttcacgcccgatattgtagcatcctagtgcgacgacgtgtaagagcagcaggtatcatcaagtgggcttctctgggcttgcagccaaaactaattgcagtactcaaaatacgaatcgacgtcttgtttgtattgcaatttagcctcagagtgcaccgaaaggccgtgctcagttactcacagataaatggccatatcgacgtccttgtcgcatagcaaagaccagtatcaacttgattcaaaattgtacaaaccacctctgcttcgaacgattgaaattatgtcgaatttctcctcgaatgatat

SEQ ID NO: 664501 - DNA, 202 bp, Homo sapiens
  misc_feature (117)..(117): n is a, c, g, or t
gcacaatcagttgtactttacatttaaagatcacttgagtgatggccgcctttccctcctacccgctcctttcccacatgccttccaagggtagcttggtactgtagggctgcagantgagcccatggttgtgtgtacgtgccctcaccttctcatgccacctgaggtcactttatgggtcttgtcctcagagggtcggagt

SEQ ID NO: 664502 - DNA, 562 bp, Homo sapiens
  misc_feature (537)..(537): n is a, c, g, or t
actgcatcaacgccgctggctagatggtagtctatttgaaagataaatcctgtgccataacagtgactgaccaatcgtgctctagggacatgggagagatcgccaggaaacatgagtaatataatcaagtcactcagtacaggggacctacagacagcatagacgtatgtctcagaagagtacgaatgatctatacgagcgatgtcgacaagaatcgtgccttcgatatgggaggatctgcccgttgtcaagtcgaagatggaagcatcccggtttccgaagaagttctcagccttacaggcgtcggaaggatatttccgaaaaaaataccttgcctcttgctcaactaccactggttaaatcacagcacacttcaaatcccagtactgataactcagagcaggttttgggatgacaggacaaagaatttgaactaatgcaaaaataagtagcaaatattaggaagagcatttgtataaagtctttatgtacaaatgaaaacatactcatggctgtaatcccagcattttgggaggncaaggtgggcggcgttggatgcagt

SEQ ID NO: 664503 - DNA, 140 bp, Homo sapiens
gaactgtacgttgtttgttatgattgaaactaatgatagagagagaaacagtataaaggctaaaattgggacgaccagacatctgatagagagtgcctaagagatcaagataccctgcagcaagatattacttcaagagt

SEQ ID NO: 664504 - DNA, 149 bp, Homo sapiens
tgggttaactattatgtgggtttgtcccctaaagtacttttaaaataaagactggtttgtttatttatttatttatttatttatttatttatttatttatttatttatttagagatggagtctcgctctgttgcccagtgtggagagag

SEQ ID NO: 664505 - DNA, 1347 bp, Homo sapiens
  misc_feature (453)..(453): n is a, c, g, or t
aatggatccagctggactggcatatcacgccgctgctgctcaactactgccagtgtgcatagctggtgtgtcgaggagctactacgtaggtgctggaccgagctgctcttccagtcctcgaacataggtacgacgacaacgtcaaggccgtacttcaagcggggcaaggcccgacgcggccgtgctggaatggcccaggatggcctcaggctggcatcatttgtcctaagagtggctgcgagctgggacccgaggctcgctggccgccttggtggtgagcctgagagctggcgggaccctgggaggccaccggcatccgggcaggaatggactgaagatggaccaaagcccgggttccggcgggagatctatctcccaatggacatggagcactttggcccttgcctttaaccgtggcctaaggcccaactgtctagccagacttggccaatnaccccctcctatgcccccggtgccatggcagttcgattggcatatgcctggtgctataatataacagggcccttttactatcaatcgtcgtcagaacaagagcgaaacgcacaaacggggcgcgcgcccgagatacactaggaacataaatacgggtattggcgggggggcacccaacgcgttgttttcacacgccgtcatagcccagagtctttaaacttgggcttcccacacgcgagggtgcccccatagatggactgggaggcccacggtcacataaattaggcgccttgggagacccctgtgtggcgcggacgcaatctatccaaaaactctggtccgcttgaacctggggagaacacacccttagagtatagagccctcgggggagatatcgccattgcgggcgacagggggaaacccttattaacataacccgagacggccggaggcaacccccttaagcttgtgccgacaagatcctttaaccccttaaatagtaggaaatttaagaaccgcctatgtagagggggttaccacattatgtcacaccccttttttgcgaccaccctggatcaaccaggggggcgaaaccacccaggaaccgggcgcatataatccccggccccccgctcattcaacacaacgtcttgggggcaaacccgggaggtagtagccttcacagcccaacattttatcacggcgcgcaaccactaactaactagtcagcgatacacccacattccacccacaccataggagagagatcacttccccacaccgagagcacagtctccccccaacgacaaccaaacaaggtcgagagcgtgcccaccattcacaacccctacctcctgcggccccaaacactctcctcgcgcgcccctcccgccg

SEQ ID NO: 664506 - DNA, 697 bp, Homo sapiens
gggaagccaactggctcgtggcaggtccaggagcacgagacgggggaccctcgcatgaagcccaagcaatgtgagccgagacctgggccttgcagcggacctgcccggtggggcttggaaggagcagctgcacagatccctaggctgtgttactgccagccggaactgcgtggtcatctctgatgtgctgagcagggtggacaagcatgggccaccggctggaccatggctggtcacctggatgattgagaaaggccctgtggggtgggaccatgttgcctgtgtcccatctgacgcatgccgagaaggctggtggagtgactgcttgctgtccaggagcccaggcatgaggccagagccatgagctgtgggctcaaaccgagctgtcccggtgggtgccataaggccggacaatgccaatgcccaatccggggacctgaatactgcatggctggctccgatcctcccggatggcgactggcgggaccttgtgccctctatgcatgaggggtcagctggccccgagggattggggtcgatcattggccttaaccccctggcttgatgtccaggtgaacgaaactcctgtggcgccctggatgccctagctcctgccaggctgctggggggagctctgcaggtggtccacagccaggcagcttagacaggcagcctgggcctccagaggagtcctagc

SEQ ID NO: 664507 - DNA, 230 bp, Homo sapiens
aacgtcgaccgggggactgtacacatgtatcatagagtcatactgatgctctgaacctcaagaggatgtgaaaatgacttgcgtgtagttaccccaagatgaagatttattgaagcagttatgctccacgcaacctggcactacattatgtgctaggttctactattttcccacttaattagaatgtaacacattgtgccaaaataataaaaacaaaaaatcctgggaaa

SEQ ID NO: 664508 - DNA, 99 bp, Homo sapiens
aaaagcagcccagcccaaaggggggctttgttggccttttttggggctttgttttatgtttcttaccccccataaaaacaatgttggctccactgtgga

SEQ ID NO: 664509 - DNA, 690 bp, Homo sapiens
ggggtaccgggatgtggcggctaacgcggcgctccagcttgagggggggttgacggccttctggcgggtggcggtggttgaaggcgcatgagcttgcttggcccgtgtcgcttctcgtcccaatgaaccgtgacgcgacgagtgagggcacgagggtcgctgtcgaggggctgatcgtcttccacgtagcacgtcgtcggtgacgtgacgccggcgagtgtccgggacgtcgttcccgccagacccctccggtttcccctttcctgggacgcctcgagggcggctggcggccaccgtagacagggagcgctaccgttcccggacatagcgataacctactgtcgtgactgttgtctgtctagtgccggattgggaatctcgtgaatttggcacaagactgaagcaagaagctgtatcccgcgggctgcacaccaatgccagacaagctgtccaatgttggtgttggcttccatgggacataaaacttgcattggccaagaagcttatccttgatgcagatattacaagatgccgggacgaaatagagcggcagctagagagagaaaaagacgtagaacaatgaagaaagttgcagaagactagcatggaatgaagacatgaagacaagacactgaataactaattaaggaagcattgaggaaaaaaaccaaataaaacaagaataacaca

SEQ ID NO: 664510 - DNA, 886 bp, Homo sapiens
ggccgctcgcccctcttttccatgtatccgtccaggatcccatgacagattctgtgtcacgtctccttacgatagttggagcggtgctgaactgtcagcaccatctgtaccgggtcccaacgtcgatgcctgtgctgcagaccccccaggtcagaacgatggggcccacaggctgcccccaccgctcaggggccacactcggcgaaggggagcctggagaaggggtccccagaggataaggaagcgcagagggagccccctgctggatcctggccactgagtgctcgcgcagcaggtgcacctggccagcgtggcgccggtgctgcctccgagtccgccagatcaccacactgccccgggtaaatctccaaaaatcttgccagatattctgtaagaaaatcggggacacccctatggtctagaatccaactaagatctgggacgaagtgcggcctgaagtgtgagctcttggccaagtgtgagttcttcaacgcgggcgggagcgtgaaggaccggatcaggctgcggatgattgaggatgctgaagcgcgacgggacgctgaagcccgggacacgatgatcgaggccgacatccgggcaacaccgggatcgggctggtccctggctgcggcagtgaggggctatcgggtgcatcatcgtgatgccagagaagatgagctccgagaaggtggacgtgctgcgggcactggggccgagatgtggaggacgccacaatgccaggttcgattcccggaggtcacatgggggtggctgtgggcgaagaaggaaaccccatctaacatcacaaagcgacgcaggcggaaccctggcataccccggtctaaaccgccggtgggacggacgcggccaggcgggccccgatagc

SEQ ID NO: 664511 - DNA, 196 bp, Homo sapiens
cgttggcttctcttctgatcctggaattgtttctaagtcactgaagacagaggacaagggtaccactcggagttgcctcttaagactgttttccgtccataggagccacctatggccactccctgcagcagggggaactgttcgtggttcctgcaggacgtcacagattgtgttcaccatctcgtcgatcagtgtc

SEQ ID NO: 664512 - DNA, 864 bp, Homo sapiens
caagagagggagcttgagtggtttggggacactgtgttgccgcgcgcgcatgggtggttacacatccgtgttgggggacacctttcttccgggttgcttgttcgcctgttcgcgcgggtcccccgttccacggacttgtgtttctttttagcagccccgcagtctcctcaaaatgtgggcgcggcagattctgctcttttggaaggagtatctccgccgtctccggggtggtacttcccccaaaagcgcaatgcggcgcgtcccaggaacgttgttctctcgcgcccccccaatatggccgatggcgaccttcacaggggtcgctgtctcaccagagccaatacgttctgggtgttcatgccgagtgtttccaagacaggacccggtttggtagttcaaagtaaccaggcagcagccccttgttggatttggggccgagaaggtcctaaaagggctgtttccgaaagcaccacaatcggcgtgggcggcggaaaaagggtagccccagagacagtgtttttgttcccgcacaacagcccgacgccaaacattgggggctattgataagcaaccattcttattggggcaactactgcgtttgttgtatgttacaagagcgcggcaccacccgaccctaactggggtttgcccagacaagttacatattgccaccatgagtgaattaccacaatgagaccaaccagggcaccataaatttcttgtgtaacaaacgagccccacagaacattggggggtcaaagataaaccgcccacccattgtttttgacgcaggtataaccaagctttcccctggtgtctcctgttcaatactacaccattgccaccccaccccgttcttctcta

SEQ ID NO: 664513 - DNA, 628 bp, Homo sapiens
gggaagaaattccagacacaccatgtttaagagctgtaaaggggggccaggcgcagtggctcactcctgtaatcccagcacttgggaggccgaggcaggtggatcacgaggtcaggagatggagaccatcctggctaacacggtgaaacccgtctctactaaaatacaaaaatagccaggcgtggtggcgggtgcctgtagtcccggctacttgggaggctgaggcaggagaataacttgaacctgggaggcggagcttgcagtgagtggcatcgcgccactgaaatccagcctgggcgacagggcgagactgtctcaaaaaaaaaaacaaaaaaaaaaaaaaaccaaagaaaacaaaggccgagacaaaaagggtgttataggaaacaggcacagatgtgcccacaacacgattaagaggaacccacgatgacaatgtagacacacgacttgcaaatctgtggcggctccctcataaggcggctgctcataacaaataacaagaatcagctccgatcaggcggtcgtgatagaactgccgatccacgcatgtcgtcctctgttgcgctaacgtgtgagctggtattgttcgtcgatagagggctccagtgtggttgttgtcgtgtct

SEQ ID NO: 664514 - DNA, 1366 bp, Homo sapiens
  misc_feature (652)..(652): n is a, c, g, or t
  misc_feature (1282)..(1282): n is a, c, g, or t
gggagtccccatcccattttcatcctgagcccaacaggccctgtgcattggcctcttgtcccttgggacacgttgtagcccacaggtgaggggcaggacctgaaggtattggccgtgttcaacagatcagtcatcatgggtgctttttgtcaacatgcttgttggattgatttggggatgtttggcccgagatgagaggtctgaggacaagagactgtgaggtgtgcgtgaggccctgcctgagccatcccttttcctttctggccccagcctaggtggctggcgcagtggaatatctatatatttgggcgatttagcggggctccggcggcaggccacgagaagtgctcttgggagtcttcgcggtggccgctggttcattcttagattcctatcttgatctcgaaagcacaagtgtcgaagtacggggagcgcaagacggtcatgggacacatgcctccttaggaaggaacgcatgaagttctgcgaagacgtcgtgctcgatgtggaacgtggagtgaccgcacgttccagtactgttactctgtcctaggcatctggccactcttcgcaatcagctgctctctcctggaagagctaaggtggaaggggcctgtgcattggcgggaagctctggtagctgagcatgggnccactgcagctactgaactacttcgcgctggtgggctagagaagactatgatgggggccgggtaaccttcgtgtaaagccacggagcgccgcacacaggaacgcatggcaagggactgtggggcaccttggtcctattagcggtggggctaccattctcggtagtaaatcaacggatccaaggaaagaaagcggatctttattccacagagtcccattcctgaaagttccccgctgtggaaacatgagggcggcatttcaaagatggcttaagcagatttggtgggcactttatgacaccttttatccttgccgaggtaggtcccaaaaggtaagcctcaaagtgaacagtatcaaacgagcagagaaaccggggcccctagaatacggtctttcagaaacggaaacagcgttgggggatctccactatcccccaagggtaacatttggcacgatccttgggagccacacagtggccagcggttcctagagaggagggttcccagtccccaagggggggaacaccctatagagctgtttgattgcggctaacaacgtatacattggccccaatagttaccacgcccgtccaagggacccaattagaaccattctgtggaaggagcgcctnagcacacaaaagaccggtggggacacacccacaaaggtctgtaccacccgatcaaaagcccttgtttgtttttaacatcagagg

SEQ ID NO: 664515 - DNA, 212 bp, Homo sapiens
catcactaaagccaaccatattctggctgaagacgcggaagtagtagccattgccaatgatgagctctggcaccacgcaggtcgcgccggttatgctccaagacggtgaccactcctggggcaggtaggaaggtaggcatctctgggctaggccttcctgatgccgagagcctctcctgggtccttgatcttccaccctactatggaggatt

SEQ ID NO: 664516 - DNA, 1589 bp, Homo sapiens
  misc_feature (339)..(339): n is a, c, g, or t
  misc_feature (385)..(385): n is a, c, g, or t
  misc_feature (430)..(430): n is a, c, g, or t
  misc_feature (457)..(457): n is a, c, g, or t
  misc_feature (526)..(526): n is a, c, g, or t
  misc_feature (1064)..(1064): n is a, c, g, or t
  misc_feature (1113)..(1113): n is a, c, g, or t
  misc_feature (1137)..(1137): n is a, c, g, or t
  misc_feature (1139)..(1139): n is a, c, g, or t
  misc_feature (1301)..(1301): n is a, c, g, or t
  misc_feature (1335)..(1335): n is a, c, g, or t
  misc_feature (1498)..(1498): n is a, c, g, or t
tcgatagccaaaatcgaaagcgactaagacattcagcgatactgacccgctggcatcttggcgccactgcgcttgaagaagactcgaccgaacactctcctcactctatattcggccatcgtcaacgcagtaggcgaagactccatagtgtaagacgagcttgacgcgcccttctcgacaatggcatggtaccatgcgctctccacagataataacatcgtcgtccaaatctacatagaggcaacaagagaactgcggcgaaaaacagttacttgagacatagtaaccaccatcacgatcctatggcagtcctgagtgcgacgtctgtgggctcgcacncaatgctgagttgaagttccacatgccaatgatctgttgcatctgnaccaggttgtgatgcttgctaggggactagtaaatcttgcagaanctcgtggtcggagacgtctggatctcnataggccatagacccttggcactgctatcgattggtgcacattgcctcctccgctctcgggcgtagcantcattcgaggcagagaggactctccagcgataaagaccagaacttgcaaagttgggcgattagttttggttggcgactatgtggagaccgtgagctggcactagggggaggcacaaagtgttttttggaattacgttaggatttgcgaagtactggcaacatccgtttctctcggtgttgcagaggcaaaaggacaacaagtaccgaggctagagttttagaaggctaagctcaacttagttgaattgttttcgcatgggctcaactcgaaactcttcaatggaatcacatactgtgtggccgcctaaacgtaaacataccaatatgaatttggggtggcaaacaaagtagctgagggagtggactctcgagcaacataccgtatgtgttctggtccacgtctgtagcatacctaatacggtactaagcgatgcgcatggggacgcaccgactcgttttgttcaaatgctctttcctgtgtattgtcttgcataggtcgcgactccgatgcagtacccaattactagccctaatggcncctcgttggactactatcctcaaacctcgagtaaattcgattccctcgntccgaatacagcgtgaaatcgaancngccctaaaggtgtatgacttcgagtagtggcccacggaagtgtaacacctgttatggagccgaaatgcccaacaggattgtatcccggtcctcgctcatgctggcgcccttgaaaccgtgttcgcccgccaccgtcggctcaatccccggaacatcgcgcangagccctttgcgcagtgttacctacatctttctnctcgtttcacctgtactgtgtacctcgcagccaactctggtggcgggcggccggcgccatcctcttccacgaaaccatcctcctggtcgacgcgcgtctccaacagacgcaccgctcctactcaacacacgccatgctcctgtccgacgctccatcgctgccnccacacctgcgctcgcgcttttgtgctcaacacgcacgcccaccgaccaattcgctcgtctgctccaccgctcctcatcacactcgttcgc

SEQ ID NO: 664517 - DNA, 438 bp, Homo sapiens
  misc_feature (24)..(24): n is a, c, g, or t
  misc_feature (419)..(419): n is a, c, g, or t
  misc_feature (437)..(438): n is a, c, g, or t
cctttaattttccaagccggtttnaaaccctatatttttttttaatcctagaaggccttcctaatttgttttgaatagaatatgccataactacttaatagaatgcttgcccctatcagtatagttaatagaatgttaatacttactgctgagcgtggtggctcacacctgtaatcccagcactttgagaggccgaggcaggtggatcacgaggtcagatcgagaccattctggctaacggggtttagtaggaatcccatctctactaaaaacacaaaaaatttgcccaggcgtggtcgcgagtgcctgtagtcccagctgctcaggaggctgagacaggagaatggtgtgaaccctggaagcagagcttccagtgagccaagatcacgccactgcaccccagcctgggcaacaggagncggtccgtctcaaaaaann

SEQ ID NO: 664518 - DNA, 424 bp, Homo sapiens
acggaggagataatagtgaagatccgctgggaggctgacagccaggctcatgcacctggtggagggagaatgtgtgtgtgtcttagcttaaaacagtcacagttcttgtctatatagatgaacaaatatttcttgatcattctgtaagaccaggaggttggtaagagtgactaaccagcctaacttaaatacacatgtataaagatgtccactgagaaagatgctctgtagagaatctgctaccgaagttggctcacgaatttgtgttaagtgtcattaaccaagattaggacgtcagtggcttaaatcctttgaatcctttccagggactgcaagattattggataaagagtagcatgaatcttgtgctctaatattacacagtaagttcacagaagggatgtaagtcaaagacttgttacat

SEQ ID NO: 664519 - DNA, 131 bp, Homo sapiens
tgttatcccaggctgggagtgcgggggagcaaatctctgctcactgcaccctctacctcccgggttcagacgattctccggcttcagcctgctgcgtagctgggataacaggggcctgcaaccatgcccgg

SEQ ID NO: 664520 - DNA, 326 bp, Homo sapiens
atccttccctcactcacggcaggaactcgtatcccgcatatttaagaactcttaaaattcaacaacaaaaagacatactcaatttaaaaatgggccatggatttgaatagaagatatacaagtgaccaatatgcgcatgaaaatgctggatatcattagccatcagggaaatgctaagcaaaatccacagagtgggctggggtgtgccaaaataaaataggccatagcaagtgttagatagaggatgtggagaaattggagccctcatacactgcgagttggaacatattatggtgcatcagctttactaagcattttggcagttc

SEQ ID NO: 664521 - DNA, 285 bp, Homo sapiens
tgacccgtgtctctgctggctgtggagccccccttggttgtcagggtcgcagggcagtgctggaaacgtctgtgcccatccacgaagcgcaaggcgcaggctggcggtcgctccacacagcctggagggtctgcctcctctgctcccacgccttctctgctcagcagttgcggcgcaccacatgtggtctggcgtgagtcttgcgttgtggggccatagctttaggagtcctgtgagaatgagatcgcagttctcaccatgctcccaataatgagggaaacattg

SEQ ID NO: 664522 - DNA, 274 bp, Homo sapiens
gtcagtattgaagcaagcagcaaagtttgtacgcctgcgtgtatctgctcaacaggcatgcttattcatcgacaagcgtggcatcactgtcgtgctggccgaaatccgcgccgctggcaagatctaaggagctctatcatgcgtgaattgattcgaatgatctctagcgcctggtactggtcacttctacactaccgacaagaacaagcgtactaccccggacaagctcgccaagaattttgtgcgacccgcgcgatcgcacagcacgtgatct

SEQ ID NO: 664523 - DNA, 373 bp, Homo sapiens
gagtatcaatcatggcagaaggcaaggagaagcaggcaccttcactaggtggcataagggagttgagtgcagcaggggaaatgccagatgcttataaacacatcatatctcatgtagaactcactcactatcacaagaacagcatagggtgaaacaaccccatgattcagtcatctccaactggttccggccctgacacatgggggattatggggagtataaatacgaggtgagatttgggtggggacacaggcacagcatattaacctgagagttcaaccagcacatttctttaatcttagcacgcctttatctatgtagcttcaagtgagaagctcctccatatgttattagtcaactctaccccgcggat

SEQ ID NO: 664524 - DNA, 414 bp, Homo sapiens
  misc_feature (108)..(108): n is a, c, g, or t
  misc_feature (132)..(132): n is a, c, g, or t
ggaattccgccattgaaaatctatatacaatttttgactcttcaaaaacgtaactactaatagcctactgttgatcagaagccttactgataacatagttcacacatnttctgtatgttttatgtgttacgnatgtattattacaataaagtaagcttgagaaaagaaattgttattaagaatatggtaagagccaggtgtgatggtctgcgcctgtaatcccagctacctgggaggctgaggcggaaggattgcttgggcctgagaggttgaggctgtagtgtttgtgccactgcactccagtctgggcgacaagagttagaccctgtctcaaaacacaaacaaacaaaaaattgtaagaaaaacatttatcacaggaataagggctatccttcatgtatagagatctttgaa

SEQ ID NO: 664525 - DNA, 218 bp, Homo sapiens
agtgactctaagatcccctgttgtgtgtgagtgtggtattcgttaagttgggtgtgtggtgtgttgaggaatgtgtggggtgtgtgccatgtgtgctgggtgtgtatggtgtcttgtgtcatgtgtgtcgtgtgtttgtctgcgttgtggacttgagtaatctcaggcctcaggtgcaggtcacagggccggtcccagggctggctgctcagaaccgc

SEQ ID NO: 664526 - DNA, 495 bp, Homo sapiens
tgtggagagggtctcaggtggggcctttctcactccaaggctctgggactcttggagctctggtaggagcaggggagaccaaccctacctcggatgcaggggcagcatccgatgaccccgataatgaccacaagaaagaggcagcacctctagggcaggaaagtgctgggggtcagaggcatgggtgccattccaggctgagccaggcgggctgtgtgagcctgcgtgagtcacttaacctctgaacctagtgcttcacgtgcaaaagagggaagcttccctcatcctcctccagccgtcacccgctgcctcccttctctctgcagcaaaatggctccgaagcgtggtctacacttcttttctctgattctttacttaaattggcacttattaggctgagcgcaggggctcaggcctgtaatcccagcacttgggggggccgaggcgggcagatcacttgaggttaggagttcaagaccgggctggccaaaatgg

SEQ ID NO: 664527 - DNA, 109 bp, Homo sapiens
ccctttcctccagcccagagtccttcctctgcggacggcacacaagaatcagtatccccacagacatacggaccatatatcaccaagccacaaagctggaatgacaaca

SEQ ID NO: 664528 - DNA, 446 bp, Homo sapiens
actcgattcctggccagaaagaagcatgtgaccgcccccgtctgcaaggatcgcggcagggcgggcggggcaggtgccgcagcctccgcgcgcaaaacccgccggcggggcccgggtcgcaccgtcccctcttgggccgagcacatgaaacccacctcgtccctccgtccccctccccaggggctgcaatgaggacgctgggagtttgaatggaaacgaaggccgggcaggggggtccgcgcgggcgtgggttttttatccaagtcggtgacctcttggttaagtcagccctgcggtttcaacgcccaatccccccaaaaaagcctgtgggggtccacgtctccttgtgtcttccggggatccggcggagaatgtggcggggccgggcaggggggtcccagtcccacgccgggtgcgtcgtgccccgagtctccccagaaggcggc

SEQ ID NO: 664529 - DNA, 105 bp, Homo sapiens
tagcagagcagctccctcgctgcgatctattgaaaggccatctcttaatttttgaaataatcttaaactgcgcaatccagattctcgctctccatttttgtcgac

SEQ ID NO: 664530 - DNA, 403 bp, Homo sapiens
cccttatctgaaatgcttgggtcagaagtgtttttgtatgttggattttttcagactttggaatatttgcatatatttaatatctttgggatcagacccaaatctaaacacagaaatcatttatgtttcctatacacgttatacacatggcctgaagatttttttccttctctttttttttgagacagagtctctgtcgcccaggctccgtctcaaaaaacaaaacaaaacaaaacaaaacaaattagctgggcatggtggcacacagctatagtcccagctacttggggagctgtggcagaaggatcgcttgaatctgggagggtgaggctgcaatgagccaaggttgtcccactgtactccagcctgggtgacaaaaggaaaacttcgtctcaacaacaaa

SEQ ID NO: 664531 - DNA, 261 bp, Homo sapiens
  misc_feature (155)..(155): n is a, c, g, or t
  misc_feature (226)..(226): n is a, c, g, or t
gctggcgcccagtaagagagagagagagccaaagctgtccgttttgcagatggacaggaaggagccaggacacagctcagcttgctcacgcccagagagagaaaaagttaagctgctgaccctgaaggcaagggagagcaggctgcacagctgtntgtggaagccacgggctcaagcagccaaggcaggtggacagtgtgagagagctagtgtaagcttgttgatnagagctgttgctgaataaaaccatattcacctgcc

SEQ ID NO: 664532 - DNA, 88 bp, Homo sapiens
  misc_feature (84)..(85): n is a, c, g, or t
ggcacgaggatctcctgacaggagctgaccctgaagctgcctgggaaccaacggaagccgaagccagagctagagcatctaatnngaa

SEQ ID NO: 664533 - DNA, 153 bp, Homo sapiens
agtcttaaattttagggggatcaatttcacccccgggctcttttttacaagaaaaccaaataaaaaaattttttttgcaggatttaaatttaaactattttgctaagaggggcccttggttttttttaaatgccttaaaaagggggggcccca

SEQ ID NO: 664534 - DNA, 241 bp, Homo sapiens
tgtcccgctgactctagaggacccctataggcgctaggtagtacagagcgctgacggacgtggtaatgctgcgataagcctagataagttgcaatcgaacgtaagagtctagtgataccgaatggagcaatctattaagatggagtcttactacgaaagagggaaccacgtgaacttgaaacatctaagtacacgtgagacacacgaaagtaaaaacgatacccaaatgtacgcggatgag

SEQ ID NO: 664535 - DNA, 258 bp, Homo sapiens
gcgcttattgaagcgccaatggccaatagagacacgactcacaagactgcggctttctcctctggatggcagaagacgtatctcactcggcttgcttcagtccaggaggcatcacgccaaaggaagctctatgccacaggacgaaatgtgcagactggctgattctcacgtttttctacagcattctacttacatgggctctatctaatggcgacatacgctagagcacaacacagccgacacagctgctttagctta

SEQ ID NO: 664536 - DNA, 401 bp, Homo sapiens
tacatgctctcattgcattttgaatataataattacagagggggacagcatctcgagactccctaggccgggcgcggtggttcatgcctataatcctagcactttaagcggccgaggcaggcggctcatgatgtctagagatcgagcacatcatgcaccacaccatggtgcaaccccgtctctactaaaaatacaaacacatacagctgggcctggtggcgcgtgtctgtcctcccagcatattatggtgacgcgtgtacgtcaatcccagatcacttgggaggcaagaatcgcttagacccagggagttggcagtgttgccgtgcagctgcagcatcgcgccattgctatccagcctggcgcacacagtgacatccgtctcagtacacactgccggtggg

SEQ ID NO: 664537 - DNA, 344 bp, Homo sapiens
  misc_feature (12)..(12): n is a, c, g, or t
catccattcagntgaaagccccttaactgatttggttggaccattaaaaaaaaaatatgtgtacagaagaactttagctgcaatttggcttttttaagtgttatttgttattaaaatgtaatcataattgtgctggtgagatggctcagttggtaaaggtccttgccactaagcctgacagcctgaatataatcccaggggcctacacactggaaggggagaactctacaggctgttgtctgacctgtgtgtgtgtagctccctcccacacaaatacggaaatataagaaaatgaaatcataaatgtttttcctaccttcttagaaccaattaaatacaccaga

SEQ ID NO: 664538 - DNA, 238 bp, Homo sapiens
tctgcgctggtaacgcccctcggcgccaagccgggtatggaaccggctgcccgagaatgtagcgcaaacagatcatcgacatggcgctggagtgaaagcgaactctcgccccgcgagttggccaccaaatttaccgatgagaagcagtactttgtctgcgaggccacggtttatcgcctgctcaaggcacaggatctgatcgccagcccagcctatatcgtcatcaaggcccgcgacg

SEQ ID NO: 664539 - DNA, 503 bp, Homo sapiens
  misc_feature (372)..(372): n is a, c, g, or t
  misc_feature (475)..(475): n is a, c, g, or t
  misc_feature (501)..(501): n is a, c, g, or t
ggattacttcatgctcgtcctcggaaacccaagcggcacaggaaagtccaaaaaggaagcaaagacgagcatccgaagtctcacccaaaaataactactgctgcgtattatagcgtattataattggggaaacagcattccaaacttctctccatgcacaggccgggcgcggtggctcatacctgtaatcccagcattttgggaggccaaggtggacggatcacctgaggtcaaaagttcgagaccagcctggccaaaatggtgaaaccccgtctctactcaaaatacaaaattaggccatacgcggtggctcacgcctgtaatcccagcactttgggaggccgaggcaggtggatcacctgaggtcagganttcaggaccagcctgaccaacgtggttgaaaccccgtctctacttaaaaatacaaaaattaactggggcgtggtggcgggcacctgtagttcccagctactcnggagttctgaaggccggagagtctcntg

SEQ ID NO: 664540 - DNA, 774 bp, Homo sapiens
ctgtaatctcagcctccggagtggctgggcctacaggtgcccgccaccacacccggctgattttttgtgtttttagtggagatggggtttcgccgtgttggccaggatggtctcaatctcctgacctcatgatccacccaccttgcacctgtagtcccagcactttgggaggccgaggcgggtggatcacctgaggtcaggagttcgagaccagcctggccagcatggcggaatcctgtctctactaaaaatgcaaaaattggctggacatggtggcgggcacctgtaattccggctacttgggaggctgaggtgggagaatctcttgaacctggggggctgctgtgagccgagatagttccattgcacttcagcctgggtgacagagtaggactctgtctcaaaagaaaaaaaaaaaaaaaaaacacaatcctgggacaaattcaaacaaggtctccagggaaaatctgggtccatggggctaccaattttggaagaccattgggtctgggtagatacacttttcattaatatacttactccatcactctttctatatttaagaagtttactagtagcaaagtgtatgcgggagttcacgggagaaccttattaaaagtgcagcttctgaattcagtgagctggggtggggcctgagaagtctgcatttctcccaggctccctgggtgcttgccaggggtgctgctctgagtaaccagggggctggggaactgctctggagccgtccattataatcccaatctgaccaactga

SEQ ID NO: 664541 - DNA, 375 bp, Homo sapiens
  misc_feature (36)..(36): n is a, c, g, or t
  misc_feature (103)..(105): n is a, c, g, or t
  misc_feature (118)..(118): n is a, c, g, or t
  misc_feature (129)..(129): n is a, c, g, or t
  misc_feature (142)..(142): n is a, c, g, or t
  misc_feature (151)..(151): n is a, c, g, or t
  misc_feature (164)..(164): n is a, c, g, or t
  misc_feature (193)..(193): n is a, c, g, or t
ggggggggggggggggggcggggttggtgctgtggngggggggggggggcgggcgtgggtgaagggttttggggaggtttggggggaggggtggcggggcggnnncgcgggggtgttntggtggggaanggcgggtgtgggntgggaaganggtgtcgtgggtnaaaagggggtttgggggggcggggcgggncgccttgtggcggggcgaatggccccgtaggatatttcgcccaacacaagggggggcactcaccccccacattagcaacataacccctcattcacacggggaaacccccccagggtcaaacccctatcccccattctcctcctatccctcaaccccgacatcattaccgggtttttttctta

SEQ ID NO: 664542 - DNA, 552 bp, Homo sapiens
agacggagtcttgctctgttgcccaggctagagagtgcagtggcgcgatcttggctcaatgcaacctctgcctcctgggttcaagcaattctcctgcctcagcctcctgagtaactgggattacaggtgcccatcaccatgcccggctaagtttttacttttagtagagacggggtttcaccacgttggccaggctggtctcaaagtgagacctagtctacaaaaactaaaaatatatatatatataaaatatatatataacatttgataatatatatatgatatatgtatcatatatacgatacatatatcatacatatatcatatataatatatatcatacatatatgtatgatatatatatcatgtatatgtatgatatgagatatatatgatatatatgagatatgtatgatatatacatatgtatgatatatacatatgatatgtgtgatatatacatatcagatatatatgatatatatctcagccaaccatgacagcacctgcctacagtcccagctattcgggatgttaaggcagaagaatcac

SEQ ID NO: 664543 - DNA, 321 bp, Homo sapiens
tacactgtcgtgtctgcacacacacatcgcgcacacacacacacacacacacacacacacacgccacagagttttacatggacgggtctctgagtggagtttattaggaactctaggagagacaggacataggtcttttcaattttctttagtagagctcacatgagactgcttatactgagtgtgtcacagagaacactgagagagaggtatacgggggataagcagcacgctctggtgtagctatgtctcgtaagatggctgtttatagtgatatctcccaatagcgctccattgcacagtctagacacatgtgtccgt

SEQ ID NO: 664544 - DNA, 461 bp, Homo sapiens
ggactttcaatacatgatcaaaatcttcacgtttggctttatgcagttttctaatcttcactaacttctgtgaatcagtttcagcacagaacttcagcggtgtatccttctgtttcttcaggtcatatatggatgtttcatatactcctgtccagtttctccaacagcttggctttctgtgccagaggtaaacataaatgcttcctctttttatcagttaccctgaggggtatctgcaggccattttgtcattttcagcaatatctttacaccacacagcaaagagagtaagcaaccaaacacagttgagtcatgcatgcaggtcttggctccatgtggggcattgtgggaaacctgccatcagcatgcctggcctgcacatatgccattttactatcctttgtgtgtgtgcttgcttgcgtgggggaaactgggtgtatgtggcaaagatatatggcagc

SEQ ID NO: 664545 - DNA, 159 bp, Homo sapiens
aaacaaaccgcgaagcagtagaagtaacatttgcagatttccgatggggtcctctatccatatttcaaatcctaatggagacaaacaaaagtgatggtcagtatttctttgaattctacaaggacttcaagcacatgtcttgatgagttattaaagagg

SEQ ID NO: 664546 - DNA, 406 bp, Homo sapiens
acataacacttccttctaggtccagtcatcgcatgtgaccacagtcatgtatgatctgcttcaactgacagctgtagtcaaagtcccataggtctgtattctagtgttggagactgaagaaacacttaacatccttcagaataactctgcctcagggcaattttggtttcaagtccatctttggaatgacacagaataatcaatctaagttttcacaggttacaaaagtaatattttcgatttctggtctcacctcaaaaaccttgccatttcccatgatagaataccaagaaatgcagggccaagcacggtatattttttttcttccatttggaactagtaaaaacgatgccattagaaagtactttgcaaattaaaatatacacacatggttaggtctacctgg

SEQ ID NO: 664547 - DNA, 120 bp, Homo sapiens
cgtactattctttccattcttttcctttttatctatattacttcttatttacggtaaatataccctttccatataatgcctatgactaggagcatacaaacaacagttggggtctgcttc

SEQ ID NO: 664548 - DNA, 83 bp, Homo sapiens
ttttttaaaaaaattcccggtttttgggggaatttgggccccttccccggggaaattggaaaaaatgttttttttaaagccca

SEQ ID NO: 664549 - DNA, 201 bp, Homo sapiens
tgaggtagtagtttgtgctgttaattgtcagttcagtgttttaatctgacgcaggacttatgcggaggagaatgtaacatgtactagatacctaacatatagtctcttctatcagggtgatagctggttgtcacaagatagaacctacagtacaacataaaatcggcaacacagaaccctctaaattacccatgaaaatta

SEQ ID NO: 664550 - DNA, 1420 bp, Homo sapiens
  misc_feature (256)..(256): n is a, c, g, or t
ctgttgggggtctgggtatggtgtattgtacacatgggtgggtaccgaacaacgttcgtcgctgtattatttggggggggcgcgtatacttatatatgctggcttcgtacacaggttgtttgtctcctcacgccgatgctgtgtgccgcgccgcgggtgtgtccgcaccgtgtgttgtgctgcccgtccacaccagcagcgtggggtctagcaccggttctgcggggggtggttatccccccttgttgatggcacncaccatgtgcggttgttctagttgtacatgtagtcggcccgcggtggttgttttgcttgcgcggcgggacggcgttcggccagccaatgcttatgtctcaacaaagataaagaaaaatagggagggggaccacaacatcttgtgagttcgacaagacaagtccactcctcgtctcgttttgtagacagcacttaatagtttgcagcatgattattacacgtgcgagtaggttgattgcgtcacacgccacacagcagggttgctggataaacgccacacaagtaaattttgttgagtgttatcaacaaaatgatcgcgggagagaagactaaaggatgaacgcaacactgtttgtgtgagggttgtggtgatccacacccaactattgttgtctcaatctgaccacacagacacgcgttctatcaatgcgtgtgactcgcccctcgcgtggcaacaacataatccgtggtggtggtgcacacactacaccaccaggggctttctgcttcttcatagactcacaactcccaccttgtgtcttcagcattagggagactcacgaggatgagcagcgcattggccgcacaagagatgagtggggaagcaccaccacgagtgcacacatattctgtttgtgtgactcaactccgggcgccacagaggagtgtctaattcacggtgttgactcacacgcgtctcgtccacacactgatagtgccccactggagatgtgttggtgggaagcgttgttggatagcgcgcacaggcgttttttttggcggaggcctcctctcttggggcgccgccctctatacatctcgccgggcaagtcgtgtggcaccggctgcatctgtcgcgcgcacacacgttgcgcccctctgttgtccccccgaaaggcgggttttacggggcactctttttaccctgcggagggaaacagttctccaacgacccccttggtggccacgccctggtatactcttgagagtcaggaaaataatttgtaaacccacgtataaaatcggccacgcttttgttgaactacacagaagactagtattactaccacaattgtcacatcccgttcctttaccaaaggattttccccaaggggtttcaaatcagggtcccagagggcccaattaaagaggtttttttttttga

SEQ ID NO: 664551 - DNA, 398 bp, Homo sapiens
gcactggcaccaaagtctgtcagcccagcctgcccacctgaatggtgggggtggaggtctgagaactctgtgtatcttgttcagcagaggatcagtttatatctgtctagtaatacttaacttagggagtccacctgaatatccatctaacaaagatgtctgtcatcgggtgggtcagtcaggtggtcactctggttgcactggttctatcaggctgttggctggtctctctctctctggctcggggactccctatgtgccacctgctggacctgtatctctggaggcctttgggtgtttgtccatgtcggtgctccctctgtctgtctgcctatctggcggtctctgtatctgcctgcctggggttggactgagtccgctgtggttatgcctgcctg

SEQ ID NO: 664552 - DNA, 192 bp, Homo sapiens
  misc_feature (11)..(11): n is a, c, g, or t
gctaattgttngtatggttagtagagacggggttgcaccatgttagccaggatgatcttgatctcctgacctggtgatcggcccggctgcggcctcccaagagtgcgtgagattacaggcgtgagccaccgcggccggccttgtttgtaatctttactatatctttctaagatagtgtgggacatgtgcaag

SEQ ID NO: 664553 - DNA, 1241 bp, Homo sapiens
  misc_feature (1241)..(1241): n is a, c, g, or t
agcgggcgggtccgcagtcggtgcgccctgctcagccatcgccagcgagccgccgatatccgagtcgcgtccggtcgaggtactatgggcagccgcggcttctgcccaccgcccgcgtgccgactgtcgaagttattacaaaaggacaaatgtgcccaacggatgcacatagtagtttccttctcgattgctcatcaaggacaatgcgtataattatattggaagatatgcatctaagggcgagtgatatcctatgcttcgcgcagtactaaacagccatgttctcactggaccctactggcgaccccactatcgtcgattcatggtatagggctcgtcgttgcgtagcatgcgtgtgaatacgaactatgtgtatccctcatgacactaatgcacgcatatacaaaccgaccctgcccagacacgcgttctgatagtaggcagcggaccatattacagtgcatttacaaatgagttgaactaatttgatacaaaagcagatatgtgtgagtaaaatatattgggcttttgaacacacaatggcgtgtgggcacggcgatggtaccctgtgctatgggtccccagggccctttattccctatgtgtatgcgtaaggacagtaccttctacgcatatattcatttataccttgcctccattatggttcgtataagcccaaaacctttatattctgcgcgtagttactcagaccgcgcttaacgttccaggaggacaggcatagaattgtcccgatcgccctccggggagatacatagacactataagacgttatgtgcggagaacctatattgtatcttgaccccgtgtggacacagaaacccccgttgtggaaggaacctagccgacccaaggtactcttctttcaccgcgggtttatatagggttgaagcggaacggtccttttacagacagggaaaaatcatagtatggcgctacacccgtaaatggtgcgaatgtgcccccaaccgggcggaattaagacggttagcggatcggttgttttcgtttggccattgtattgcgagaccagaagggaggctcgaacgcggtgaattagagggggggggccttcccaagggcaacctattgaaggtccagaggaggaaatcaatcgcaagtggcttggcgcaaaaatcttttaattcattttgcgaaaaccgaaaccatatttccgaacagaattggcccgggaaggggcgacccaagaagtttaccttccn

SEQ ID NO: 664554 - DNA, 940 bp, Homo sapiens
gaagttctggaaggcagtggggtttgagattggacccaggtcaagatagaacatgaaggtgggatgaggacatgaacagaacatggccaagaaggatctgggggagcagccaggacgaggcggagctgatccgagaggacatccatggaggctctgcacaatttaccgcgtcgggccgcggggagcgcagggcggcggcgctcagggccacgtcaggaggagttgcagcgcgaaccgctctgcccgacgctgagaccaaccgtccctggcagcgccgaccgttcgagtacctgcgcagtgatcagcaccggtagagcggtggcgcgggccgcggacgaccccgaggcagaagacccgattcccgaggccagaggaggcgctagacggcctgagcacggtaggggacctacgaagtcagacgctgagtcggaccaccctcggatcctggtgtccccgtgggtcctgacctggccggttctagtcatggcggaagctgggaagtggatcactcctgaaccaacgtgttcagaggacgtagacgagcttcgtactcgacgtgctgcgcataacgtcgggcgagaggctggccaggggatgctcggatgcaacagagtgaactgcgggcccgcaggaagcctgggcgctcgggcgtggtggtggaggtgctttgcgtgacagcttgcaggtgcccaatggcggccctcgagcaggggcgaagtacagccgacgttgctgcaggaaggatcaacgtacgcccttcagcctgctggcctgggttgcggcgggcaaacaatcgccgaaccccatcctcatccgagaagacttgttgcaccttccctttctcggggcctcgggcagcataattggtgaacacggccaggggagggccggtagtttcgacgatccagtgtgcgtgatagctgcatctagaccatcggcg

SEQ ID NO: 664555 - DNA, 523 bp, Homo sapiens
  misc_feature (1)..(1): n is a, c, g, or t
  misc_feature (59)..(59): n is a, c, g, or t
  misc_feature (98)..(98): n is a, c, g, or t
nccaaagacaggccgagtccctgaacccacttcatggggaagttcagcagagacacagntacagtgttgggatcggtgaggaaagtgtgtagctttancccaacagtcaggcagccctggtgcttgtaaagggtattggagaagaggacttctccctctcacccaccactgcagacaaagctctgacttctcccatgggagttctgcctgggtgcatctgtagacagcctttctggaacactgcatccccacaggatgggtgccctccaggttcaggcttgcataagaggtaaagtcacaacccctctctacgcagaacatcagaattcttggagaggaaaagaggtgactgtccaatcaaaatagccaggacgctgtgtcaggagtgtgactgggaagcagattgttttcctactagcctggagggagaactgtggtagcttcctcccttccctcagaaaagaccttagtgcatttcactgagagctcccccaaccacctctgtcaaggctgggacctctgc

SEQ ID NO: 664556 - DNA, 1080 bp, Homo sapiens
  misc_feature (573)..(574): n is a, c, g, or t
  misc_feature (587)..(588): n is a, c, g, or t
  misc_feature (601)..(601): n is a, c, g, or t
  misc_feature (611)..(611): n is a, c, g, or t
  misc_feature (613)..(613): n is a, c, g, or t
  misc_feature (615)..(615): n is a, c, g, or t
  misc_feature (635)..(635): n is a, c, g, or t
  misc_feature (638)..(638): n is a, c, g, or t
  misc_feature (656)..(656): n is a, c, g, or t
  misc_feature (659)..(659): n is a, c, g, or t
  misc_feature (663)..(664): n is a, c, g, or t
  misc_feature (667)..(667): n is a, c, g, or t
  misc_feature (670)..(670): n is a, c, g, or t
  misc_feature (707)..(708): n is a, c, g, or t
gtttccttccttcttgtcttttccttgtcgcactttcgttgattttttttctattcgctcatcctggttgcttatgatagtttgccccgcgctgtgttagttcgcccttcttgttcctctatctaccggggttacatttccatgtctggtcccctttgcgttgccatttcgctgcgtaaaatgggtggcttagttgtgctgtacgatggaggtaaaggcgatctctattgtcagcgtgctactgtgttcctctttttgttgttttgatcacccggagtcttcgctgctgtctctccaagccccggatcttgcatataggtgtcgatcttctgtctcacaggcaaggcactagtccttccccgggttcacggtcatttctgccgggcctgcagcctcccgactagctgggactacatgcgcacatccatctcacgcccggcataatttttttgtaatttttagtagagatcggggtttcaccatgttattccatggagtggtcttcaatctcctgatcctcatgatccgcccgtcttggcctcccaaatgtgctgggattacaggcatgagcanncgcgcccagccannattctacttcttnaaaatcacanananctagtcttaaattgatgacntgntcgtatgttcaaaatgtnaanaacnnaanaanagctaacaccagtctatttatattaactttttttttnntaaatcaaaaattgttaatgttagaaacatactatgaagtgcctttatctgcttagacctaaggaagattttaaagttgggttgcacaggaaatgatgatgcttcaatttcttaatagttaaaaagtgctaaatactacttgaaattattgtttacagattagtgacaagagctggggttaggatccggttggactctgacatcggatgccctcaaacatacagaacttccaaactcaagtccagccataagctattttgccaacatgtcagagtaatctgtatttttggttacttgttgagttctgttctacatataaccacccccacgcagttgctttttatagatatctatattaagtcaactttctgt

SEQ ID NO: 664557 - DNA, 329 bp, Homo sapiens
ccctgcagccttgaactcctaggctcaagcgatcctcccacctcagccttctgagtggctgactataggcacatgccaccacatccagcatccagctaacttttctttttttttttgggaatttcactttcgtcacccaggctgtagcgcaagggccggatcatggatcactgcaacctcggcctccttggttaaagcgactttcctgcctaagcctcccgcgtagttggggttacaggcatgtgccaccagcccggccaattttatattttgggaacaccaggatttctccatgtgtgacagccgtgtggctctcaaactcctgagct

SEQ ID NO: 664558 - DNA, 1053 bp, Homo sapiens
  misc_feature (573)..(574): n is a, c, g, or t
  misc_feature (587)..(588): n is a, c, g, or t
  misc_feature (601)..(601): n is a, c, g, or t
  misc_feature (611)..(611): n is a, c, g, or t
  misc_feature (613)..(613): n is a, c, g, or t
  misc_feature (615)..(615): n is a, c, g, or t
  misc_feature (635)..(635): n is a, c, g, or t
  misc_feature (638)..(638): n is a, c, g, or t
  misc_feature (656)..(656): n is a, c, g, or t
  misc_feature (659)..(659): n is a, c, g, or t
  misc_feature (663)..(664): n is a, c, g, or t
  misc_feature (667)..(667): n is a, c, g, or t
  misc_feature (670)..(670): n is a, c, g, or t
  misc_feature (707)..(708): n is a, c, g, or t
gtttccttccttcttgtcttttccttgtcgcactttcgttgattttttttctattcgctcatcctggttgcttatgatagtttgccccgcgctgtgttagttcgcccttcttgttcctctatctaccggggttacatttccatgtctggtcccctttgcgttgccatttcgctgcgtaaaatgggtggcttagttgtgctgtacgatggaggtaaaggcgatctctattgtcagcgtgctactgtgttcctctttttgttgttttgatcacccggagtcttcgctgctgtctctccaagccccggatcttgcatataggtgtcgatcttctgtctcacaggcaaggcactagtccttccccgggttcacggtcatttctgccgggcctgcagcctcccgactagctgggactacatgcgcacatccatctcacgcccggcataatttttttgtaatttttagtagagatcggggtttcaccatgttattccatggagtggtcttcaatctcctgatcctcatgatccgcccgtcttggcctcccaaatgtgctgggattacaggcatgagcanncgcgcccagccannattctacttcttnaaaatcacanananctagtcttaaattgatgacntgntcgtatgttcaaaatgtnaanaacnnaanaanagctaacaccagtctatttatattaactttttttttnntaaatcaaaaattgttaatgttagaaacatactatgaagtgcctttatctgcttagacctaaggaagattttaaagttgggttgcacaggaaatgatgatgcttcaatttcttaatagttaaaaagtgctaaatactacttgaaattattgtttacagattagtgacaagagctggggttaggatccggttggactctgacatcggatgccctcaaacatacagaacttccaaactcaagtccagccataagctattttgccaacatgtcagagtaatctgtatttttgtatgtgatttctacttttatagacttgttttaaaacaataaaacacatttttataa

SEQ ID NO: 664559 - DNA, 341 bp, Homo sapiens
ggttttcctttggggacgtggttaacggtccaaaagaatcccttttagaaagcattttaggccagccatggtggctcacgtctgtaatcccaggactttgggaggctgaggcaggtggatcacctgaggtcaggagttcgagcccagcctgaccaatatgatgaaaccccgtttttactaaaaatacaaaaattagctgggcatggtggcatgggcctgtaatcccagctactcaggaggctgagacagaagaatcgcttgaacctgtgaggcagaggttgcagtgagccaagatcgcgccattgcactccagcctggacaacaagagcaaaactgtctca

SEQ ID NO: 664560 - DNA, 110 bp, Homo sapiens
aaggtcagctctggtagggtcagttcgtccagcaccctgcgcaggccattgatgttggcctccacactcatgcgcgtgtcaactctgtctcatacttgtgtgctggaacg

SEQ ID NO: 664561 - DNA, 89 bp, Homo sapiens
agtccaagggggctggcccggttgttctatgcagaagaaagcagtcaataaatgtttgccaggctgggtgcagaatttaaaaaaaaaaa

SEQ ID NO: 664562 - DNA, 104 bp, Homo sapiens
atgtgtctatcactagggcagtggggagacgtctataaccctgctgcttcccaaggatggctgtctataatttggggagagatagggtggagaggcagtggcaa

SEQ ID NO: 664563 - DNA, 1060 bp, Homo sapiens
  misc_feature (1060)..(1060): n is a, c, g, or t
ccttttccttttttcaattaaaaagttgaaataaattaacgtttaataatgatgtaccaattctgaggtgaccagaggacggggtccgggcgtagccagattctagaggcacagcggtgcgacagggaagtgtgagattagaatggaggagcaatcgagggaatagtcatcggaccgagcgaccagatcggcctaacaccagcactaaactaaaaagaatacaaactcaaaaactagcccaagaagaaccacaagcaacaagagcagcaagaaacgacgagaggaacacaagacaaggcacacaccaacacggaccgaacacgcgaaaaccccacctcgagcaccacaaaccagccacgaacgaacagccgcccaaaccccaacgcggaactaagacgcgagccaagaccaaaaaaaaaccacatcgacaacaaaaccaatcgtaaaaaccaacactcacaacaaagcgagaacagcaagacaacaaacaacagaagacacagaggaacaacaaccatgacaacagaacaaacagacaaaagaaatagagacacaaacaagacaaaggactaccaaacaaaaaggcacgacaaacaccgaaacaaaaacagtccgcacacaagaacaacacacccagcaaaaaaaagaagcgaccaaacacacaagaacaacaaccaagaaaacaacaaaagaacgcaacgggaaagacataacaaagaacagggaagacacagaaccgaaacagagaacaaagacaacacacaacaaacaaaagcaagcgcacgaataacgacataaaaccaaccaacaagaccaacaccacacatagcacagaacaaaaaagagacgaaggcaagagcaaaacagacacgtcggaggacagatacaaacaagtagaaaggaaacaccaaatagcagaaaaagacgtaaaagcagaacaacaagcaaacaacacaaaacaggcagacaaacgtaggaaaagacacacataaacagaccacagaaacaagacgagactcaaaacagagacacgctcaacaaagagaacaatcccacatan

SEQ ID NO: 664564 - DNA, 966 bp, Homo sapiens
ctgcagcccgggtgcgcaaccgggggctcgatgcgcctctttttccatacccctctgggggcatttaccggtgcgactgaaaggcccccgctttgatttgtttttggcccgctttcgcccgtgtcgcggcttaatgtgactgttcttctacaccttgtgggaaatgtgtgagcaccccttccgcttgttctcccgacccaccttgcaagcctctcaccaagggccgaactatcttatctctacgggccaccatccatgttaagtcgggtgcccgccccaacggtatggctccctactgcaaaccgagtcgagttggctgcccccattcgctattagcacgcccgcaagggccttcagtggcgggcgccccttccctttttaggcggcaccacagtggggcagttcaggtggacttttctctttcaagataaggaagggtcccgtctctagagggaagtattccaggtggtttcctatagccggcttttaaacatagagtcggggcccacatagtggacacgagattcgatgggcgtccttccgggagcgaacatccacataaggtgttttaccaggaggtgttttcctcgccgaccgcctatgtacaaaccgtcgcaccccatggacgcggcttatataggcgcctcgccagcgttggtcgcccgcgattccctggaatcgaagttacgtgggggggtcttcctcgttgcaggttttgcgccgttgcccgcgtactagttgatgtcacacctctcacctgtctgggacgtctcatcatttggttgacccgcgcagggcataagttctggtctgcggatttataacattcaaccgcgcggaggggcgttgttctttctttgaggagactacccctcgggcgacttcctcctctttgtggccttctttgttgacggttcccccaaatttggcttttctcaccccaataacccaagttctgacacgaca

SEQ ID NO: 664565 - DNA, 354 bp, Homo sapiens
ctaacattagttgtggaaatgcaaaatggtatggtatagccattttggaaaacattttggcagcttccaaaaaagttaagtataggccgggcgtggtggctcacacctacaatcccagcactttgggaggccaaggcgggcagatcacctgagatcaggagttcgagaccagtctggccaacatagtgaaaccccatctctactaaaaatataaaagttagctgggtgtggtgaagcatgcactgtaattccagctactcaggaggctgaggcaggagaattgcttgaaacctggaggagtaggttgcagtgagccaagatcgtgtcactgcactccagcctgggtgacaaagc

SEQ ID NO: 664566 - DNA, 130 bp, Homo sapiens
cacgactgtgacgacctccttgtgagagagggagcagtttgatcttcacgtcttcctgcacgctgagctgggagagggtcttcttgattgcgcagggccgtccaggtgggctggcgcctgttggaatacc

SEQ ID NO: 664567 - DNA, 103 bp, Homo sapiens
ccggtaagtagatgctattgaggagtatcctgaggcatgggggtcaggcgttgaggccttagtgagtgttttagtggggttagcgatggaggtaggattggtg

SEQ ID NO: 664568 - DNA, 384 bp, Homo sapiens
  misc_feature (18)..(18): n is a, c, g, or t
  misc_feature (359)..(359): n is a, c, g, or t
  misc_feature (380)..(380): n is a, c, g, or t
ctggattattccagagantcgaggatctcggcgtaggcgtcggcccccagtacttcttcgatacccatgtggttgttgacgaagaaatgacgcggcacgtacagcatcggcagggcgtcggaggtccagacaccggtttcgctgtcgacttcaattggcaattgcggggcgatcttggccatggaaactcaactccagaaaattcgttttgatgcccgccgcgcggatggcggcgggtgaaggattaagcgagcagtggcttattcgccccagacgtccttgagcacgttgacccagttctcgcccatgatcttgcgcaccacgcgctcgctgtggccgcgcttgagcaggtctcgtangttgggactctctgaatattncacg

SEQ ID NO: 664569 - DNA, 206 bp, Homo sapiens
  misc_feature (9)..(9): n is a, c, g, or t
  misc_feature (25)..(25): n is a, c, g, or t
  misc_feature (90)..(90): n is a, c, g, or t
  misc_feature (106)..(106): n is a, c, g, or t
  misc_feature (163)..(163): n is a, c, g, or t
  misc_feature (176)..(176): n is a, c, g, or t
  misc_feature (189)..(189): n is a, c, g, or t
ttttttggntttccaggctatttantcaagtaatttacaatgtacacattcctgagtatacaccatggtggtgatataatttatgggggnatttcctccattcagnttaaaaggtgtttcttcccaagaaactgaacttttctgtcaaatgcacttgatcgantaggagaattggnttcataaaatggnttcatagaaaatttttt

SEQ ID NO: 664570 - DNA, 201 bp, Homo sapiens
aatcagctcggtacccctcggctctgctactctctagtttatattcatgatattctaactagactaccggtagtgtagggctccagttagttacgcacgtatttgatgtaggcactttatggtctattagatatgcaaattgggaacttcgtatcgtggttaaaagttaagttataacgatcccagaagccttttttgcgg

SEQ ID NO: 664571 - DNA, 512 bp, Homo sapiens
gggttccatcggcccattgtgggttgccccacggtttggtacccacaaaggtgcgcgccggccccggtttcaacctggagaagctcagggtggccggcattcacaaaaaggtggcccggcccctcggcttttttttggatccaaggagggggaacaagtccccggagtcccttcaggccaacgtgcaacggttgaaggagtaccgctccaaattcttccttttccccaggaagcccccggccccccaaaagggagacagtttttgcttaaaaacttaaactggccccccacctgaccgggccggttatgcccgtccggaaggtttttaaaaaggaaaaagctcgggtcctcccttaggaaaaaaaaaatttcaaagccttcgctagtttccgtttggcccgggccaacgcccggctttttggcatacgggcaaaaaaagccaaggaacccccagaaccggttttttaaaaaaaaaaataaagccctcctgggggcttggaatccgtcggcca

SEQ ID NO: 664572 - DNA, 240 bp, Homo sapiens
cccgggtttggggtttaaaaagggggggggcccccttggtttccccccccctaaatgagggcccccaaaacggggggttttttaaaaccccgggccccccccccccctttcaaaaacccctttttgcccccccccgggtatttcccccggggcctttgggggggcctggggttttcccgggattaaaaaaggccccccccccccttttttttccggttccaaaaaacggacctttttggg

SEQ ID NO: 664573 - DNA, 372 bp, Homo sapiens
cacgaggcgtcccagctcgggtagcggtcgtccagcgatttctgcagcgcacgcatcacgatgtcgtccagcaccggcggcaattcgggccgcagcgctgacggcggcaccggatcggcgtgcgtgatctggtacatcatgctgaaattgttgctgccctggaaaggcagctggccggtcagcagctggtacatcaccacgcccagcgaaaagatgtcggtctggtgattgagcgggtgttccttgatctgctgcgggctcatgtaggcaggcgaaccgacgccagacacctgggtttcggtggccgataccgacatcgcggcgccgaagtccgacaccttcacattggtgccgccgaccgcggcgccgtcc

SEQ ID NO: 664574 - DNA, 120 bp, Homo sapiens
gaagcgccgggagttaattcttccgccgcccccccaagaaagttcgctaaaggaatttaacccagaacccaaccccttccaaaggaaaaaaaaaattttaaaaccaaaacccaaaaaaaa

SEQ ID NO: 664575 - DNA, 357 bp, Homo sapiens
ccatttggtatttcctattacccccctcctattttaaatatttatcagtttaaacttgtgcagggtagtaaacatgcaagttgttatgattgagctgtattcccataagtagaattttaagtaaactggtgaatttgggccataaatgtttttgctttttgtttgatttttttttccaagccaactgttagaggtacacatttatttatctgttggccaaatttgattatgattttaatgtttgaaagattgcccttgtttgcttttactaaatgtggggtaaaaaaaattttttgttcccagtatatgaaaaaatggagtaatttaaccagtaaataaccattttgtggatgctta

SEQ ID NO: 664576 - DNA, 934 bp, Homo sapiens
ggtaagctttatcgtatatatattttttaaagaagagaaaaacaccttgagccttaaaacggtgctgctgggaaacattgcactcttttagtgcatttcctcctgccttgctgttcactgcagtcttaagaaagaggtaaaaggcaagcaaaggagatgaaatctgttctgggaatgtttcagcagccaataagtgcccgagcacactgcccccggttgctgcctgggccccatgtggaaggcagatggcctggttcgctcggtcaccggtgcctctcagaacaccagcagttaaccttcaagacattccactgctaaaattatttattttgtaaggagaggttttaattaaaacaaaaaaaaattctttttttttttttttccaatttaaccttcttacaacatagggtcggtgggagctttcctcaacaggggtatgggtcatctggtggtacatatggtctcttaactggaaccacgttttttttaatgaatctcttaatactttttttattattaaaacgcaagtttcttggatcctcaccctagatgggtataacggcctttgggccatccctttttctggtggttggtggaacacaacctgtaacatctggtggctttaggggtataagtgagagatggcacatgtagtgtatcactggagtattgaggtgttttttgcacaagaccctggggcgtggccaaatttgggtgtgtctgcggatgtgtgtgtttttgggcaacaaacacatggagctggtgtactcaattctataaactatattgggaaggaggaagaactggagggtatacccagtaaactaatttatatcgggggacaagagtagagagggtataaaaagccaacattttctttaaagatattaagcgtaggcagaacataagcggataggagtactgtacacattag

SEQ ID NO: 664577 - DNA, 157 bp, Homo sapiens
  misc_feature (141)..(141): n is a, c, g, or t
aggagtcttcaggccctggcacagcacacggactgcagcctcattgatgtcgttagtatgctaacctgtgagctccttgaagtgcggcttggcccttgagcacggatggccaggtgctcgcaagttggcagcctgagagtntgaaatacttccagct

SEQ ID NO: 664578 - DNA, 124 bp, Homo sapiens
catccgactattgggaggctgaggcgggaggatctgcttgacgcccacgctttgacgcctaccaggatgacgctacatgacatacgtgccaccatgcaccatccacgtgcatgggacgactacc

SEQ ID NO: 664579 - DNA, 198 bp, Homo sapiens
ggcgcgaattcactagtagattatacccggctcctgggtagcacatcatacaggtctcgtatctaaggcagccccgctcaggtctcaaggcaggctaggccacacagcccctgagtccaggggtaagggcctgccgtgagtaggattgaccccaaaggtcagcgactgggcagggagggccctgacctagggggaagg

SEQ ID NO: 664580 - DNA, 1348 bp, Homo sapiens
  misc_feature (410)..(410): n is a, c, g, or t
  misc_feature (645)..(645): n is a, c, g, or t
  misc_feature (778)..(778): n is a, c, g, or t
  misc_feature (1235)..(1235): n is a, c, g, or t
tcccctacaaaatattttttgggaacccaccagtctacggccctctttgtccaagccacttgtgacgctcccctgatctatcctccaatctagggggacccctttttcttcccccttgcttcttgcggaccctctttctatcaaatcttccagggtaccgggatctctcttggccggggaatccgccctcttctttaagagcctcgttctttcttttcccaggcttctttggcgatctcccccatgtaaaagaagcctcctctggtctcccggcctctctctttcttctctgggcggggtcacctaatgtagcgctgcgctggtcctggagtgtttgggctcccctatatttttttttccccacgtctctctctatatatcccccgagttttctctcacacacgcttctnttataacactttttgggggcgctgcgtctacacccctatctcttttctcttctctcacgcgagagagagagatcatcacgcgtaaagagtggtttcgcggggcgacagctggcgcccgaggaccctcccccacacgagaagagaaaacacccatcttctggtgacgagaatagtcgcggggagaaggagtcgtcctcctcccctaatattgtcggggggaggaagaagagacccnccccccgttggtgggtacagcacgcaagcgtgggggcctccgttggtggctgcccctatcgaagacggggaggaggacaccccccccccaaggagtaattggacggggcaaaactctcaccggtcgagggggncagccaccccctactatcacacgcagagaaatattcgccccgcccacagctggaattaaaacttcacaccagattcataaatcctccctggtgagaaaagaaaggggggggggggctgattggtgttcctcacatcctccccctgcctcccgccattttatttatagaaagttggcgcccacacctagttgaaagaaggggggggaaaaatcatacacgaatggtggggcgaccaacacacggccgttgaattaaaaaggcccacgacggtggtggtataatgagcgtcctatgtggtggggcggctctacccccatataataatacccttcccctgttctgccaggtggggtaatgataacttcccaccaattgtttgtcacgagctggtggcccgcccaaggattcttctgttacaacagcacctaatcaaaaggtggggcaaaaggtatggacntctccgttggcgacccagttgtttgcaagataggatgcaacaccatagtgtaggaaacccccccgccggttggtggcggtgggacaacaccaggggggtgcgtgcgacaacat

SEQ ID NO: 664581 - DNA, 882 bp, Homo sapiens
  misc_feature (3)..(3): n is a, c, g, or t
  misc_feature (346)..(346): n is a, c, g, or t
  misc_feature (360)..(360): n is a, c, g, or t
  misc_feature (429)..(429): n is a, c, g, or t
  misc_feature (437)..(437): n is a, c, g, or t
  misc_feature (442)..(442): n is a, c, g, or t
  misc_feature (449)..(449): n is a, c, g, or t
  misc_feature (464)..(464): n is a, c, g, or t
  misc_feature (472)..(472): n is a, c, g, or t
  misc_feature (498)..(498): n is a, c, g, or t
  misc_feature (501)..(501): n is a, c, g, or t
  misc_feature (503)..(503): n is a, c, g, or t
  misc_feature (561)..(561): n is a, c, g, or t
  misc_feature (576)..(576): n is a, c, g, or t
  misc_feature (592)..(592): n is a, c, g, or t
  misc_feature (596)..(596): n is a, c, g, or t
  misc_feature (680)..(680): n is a, c, g, or t
  misc_feature (701)..(701): n is a, c, g, or t
  misc_feature (713)..(713): n is a, c, g, or t
  misc_feature (717)..(717): n is a, c, g, or t
  misc_feature (725)..(726): n is a, c, g, or t
  misc_feature (740)..(740): n is a, c, g, or t
  misc_feature (744)..(744): n is a, c, g, or t
  misc_feature (754)..(754): n is a, c, g, or t
  misc_feature (820)..(820): n is a, c, g, or t
  misc_feature (849)..(849): n is a, c, g, or t
gtnaggaattcccgggatgaggaggtcccgaatagcggtcgccgaaatgttccggtgtggaggcctggcggcgggtgctttgaagcagaagctggtgcccttggtgcggaccgtgtgcgtccgaagcccgaggcagaggaaccggctcccaggcaacttgttccagcgatggcatgttcctctagaactccagatgacaagacaaatggctagctctggtgcatcagggggcaaaatcgataattctgtgttagtccttattgtgggcttatcaacagtaggagctggtgcctatgcctacaagactatgaaagaggatgaaaaaagatacaataaaaaaattttnagggtttaggttgnacaccagaacagaaacagaaaaaggcgcgcgttactctgctttccgaaggagaggtaagtttcctcaanacaagtcnccaanttcatgnttccttttcctcccncatttggnggagggcacacgctgcttattgctgnagncnagataccataccgggatacgggatcctgggggaccagggtcactgcattgttatctgnaagaatcctgcagcntgccgatacaatgcgnaccntcctcctttcaaaaagaacctgtgggttttcacgatgacccaaaatgtcacaaaagacacttgcgattccaaacagttggaatnggaaaagagagaagcatatantttcccagccancttncttttctnngttctctgtctccngganctggcctcanaattgtagaatggtgggtgtgggctgtccctcactggggaagaaagggtagtacagctgggatgtngagagacaacaatggttgaaactttaatngatggctctcaaataaccctatgaaaagtgctt

SEQ ID NO: 664582 - DNA, 168 bp, Homo sapiens
tacaactacattctatcatgtcctaaacccactgaacttgtgcctcattagtggggctcactgattttttgtttttgagggtctcgctctgttgcccaggctggaatgcagcggtgtcatctcgtgctcactgcaacctccctgggcaacagggtgagatactgtctc

SEQ ID NO: 664583 - DNA, 313 bp, Homo sapiens
gttccctgggggatccagggataaggaaaaagtggcctaaaaacaggtcttggattcacccccctggggggtccttttgggggaaacaggccccaaaaggggggggtggaacagggaactgccccttcttggggggcccgggggtgtgtaaaaaaaaactttttgttttccccttaagccaatgtattggggccggttgtttttttgaacaattcaggaatcaaggggtgtggagaaacccccccatgttgttggccacaggtgaatgaccctaaaccggggccatgaaaaaaaagccccctgtttctcccca

SEQ ID NO: 664584 - DNA, 244 bp, Homo sapiens
  misc_feature (164)..(164): n is a, c, g, or t
gggatttttagtattttaatataatacagttccaatcagtgtgtctggttcatctcagtttctttcactgccataaccgagggggcaggggactgctttcagttttctctgccctttctctattgtcagctgatgaccaggggtgtaaagggtatctgctgccnatcgagacttttaaactgtcacgtttgtcattattttttcttgatcttgacagatttggcatcccttctgtcgtcttctc

SEQ ID NO: 664585 - DNA, 305 bp, Homo sapiens
  misc_feature (187)..(187): n is a, c, g, or t
tgcccagctaattttttaactttttgtagaaagagagtcttactgtgttgcccaggctgcttgttatcccagctactcaggaggctgagacaggagaatcacttaaacccaggaggcggagattgcagtgagccgaaactacggcattggactccaggctgtgcaacagagcacgactccatctcanaaacaaacaaaaaaaaaagagtgtcaccttgggctacttggccagacacagagagcaaggagacatccctattatctgtcaaaaataattgttggggctgagcacagtggctcatgcc

SEQ ID NO: 664586 - DNA, 175 bp, Homo sapiens
gttgcaagcatggccattcatgcatctcaagcaggcaagtgcagtacaggcccccactccacaggcaggcagcttgtcccaatcaagcagttcaatggttgtgcatgtgcaggcaattcaggtgcaggcaccttcaagattcttgctctccaggcaccatcaatagcctacgggc

SEQ ID NO: 664587 - DNA, 893 bp, Homo sapiens
ttatggtgctgtctctttgctagcaaatgctctcagaccactgtggcagtgaatcatcctctaatttctatgattgctttttagaagggaaaagatacaatgcttccaccttaataattcgttgtaaagttattcgaactaatccgtggccgtccatatatgtgttctggttcgattcaccgtggattgatgctatctgaattcaagttataagcgtcctataggccataatttacttcttaaactcttttattattctgtgcacaaacattgggacgagagccgtttcttgaaagacgggtacattcgagcatacagaaagtatctgaagtaattaatgatggttcaccaagcatggacatgctgtacatgaagctatgactagttgcttcacaatcccactgtaagatgccagtgtcttcatctcttcatgaagggtgcctagcaggaggtatacagtatgtccagtcacactggaatagcatgctcgattggaaacaaaggatctatctctgaacaagctgtttggcgatgaaggagattcttcgtgttgtgttcaacgatgagtccctctccccttgtccagagagaaatgccagttgtatcgaacttaagtgccttttgtccggcggaaattggatgcttaacctgattcttaattcgagcgggtaagggcccgagatcatgttgctgtcgatttcaaccagtgttgatctccgaaattcaagaacacggaataaagatctgcgatgccatacagatgctctggtgtcaccaccataagtggggcatcctcacaatgcaaaacagccccggtgcagggtaccattgctgatgacttactcgtgtatactcaagcgcatcgggagagttgggcaatttcagaaattggc

SEQ ID NO: 664588 - DNA, 732 bp, Homo sapiens
caggcctttggctccaggacttaccccagtggccaccccgcttctcaggctttgagactcaggctgcattactgcaccagtgaccctgctgctccagctcacagacagcagattccaggacctcccagccttcatacttgcatgagtcaattcccacataaatcccatcttacgcagctggatggagcctattggttctgtttctctgggaaaccctaatacggacccatagatacaaaatcttctatatgcttcttcctcggagaagatccctacatcttttatcctctcagcgtggccttgacgcccattctaaagcaaggggagaggttctagtgaggaggaaatagcatggggaccaacaggatggcacgctaggccttcgatggcccttgcagaatgtccagcacgactgccaagtgctcgtcaggtcttttctggactgaggacatctctctcaagcctgggctctcctgacgctgccttggcaagctctagaaggcagccccatcctctggattaatccgccctgctaaatgttctctctggcatgggattcactactgcctaaggccaactcagccttgagagtctgggtccatactattgttgactgcaattagaaccacatattagcaaatgctagcttttaaaaattacaggtacaggcagacctcagacatactgcgggttgagttcccacagaatcataataaagtgaatattgaaaaa

SEQ ID NO: 664589 - DNA, 216 bp, Homo sapiens
  misc_feature (10)..(10): n is a, c, g, or t
  misc_feature (47)..(47): n is a, c, g, or t
  misc_feature (58)..(59): n is a, c, g, or t
  misc_feature (64)..(64): n is a, c, g, or t
  misc_feature (66)..(66): n is a, c, g, or t
  misc_feature (86)..(86): n is a, c, g, or t
  misc_feature (101)..(102): n is a, c, g, or t
  misc_feature (120)..(120): n is a, c, g, or t
  misc_feature (145)..(146): n is a, c, g, or t
  misc_feature (154)..(154): n is a, c, g, or t
  misc_feature (165)..(165): n is a, c, g, or t
ataaataagnctgttaaagttttctggacaatgccagcatttggaantttttaaaggnngtaangntcttattgatggcaactaangggtgtttgtagcanntttatcatacagtagatnccagccattcactatacttttctanntgagttgncctacatgcangtacatgtttttaatgttgtctgtcttctgtgctgttcctgtaagtttgct

SEQ ID NO: 664590 - DNA, 133 bp, Homo sapiens
cagcaagacaagtcaagcatctgatttgttactggatcacttcagtctgctctaaaccagctctctctcagggctgtctcttcttccatccccgccactcccattctcctcttctctttcttcccatttttcc

SEQ ID NO: 664591 - DNA, 1130 bp, Homo sapiens
  misc_feature (28)..(28): n is a, c, g, or t
  misc_feature (72)..(72): n is a, c, g, or t
  misc_feature (89)..(91): n is a, c, g, or t
  misc_feature (143)..(143): n is a, c, g, or t
  misc_feature (269)..(269): n is a, c, g, or t
  misc_feature (657)..(657): n is a, c, g, or t
  misc_feature (899)..(899): n is a, c, g, or t
  misc_feature (980)..(980): n is a, c, g, or t
  misc_feature (993)..(993): n is a, c, g, or t
  misc_feature (999)..(999): n is a, c, g, or t
  misc_feature (1046)..(1046): n is a, c, g, or t
  misc_feature (1056)..(1056): n is a, c, g, or t
  misc_feature (1065)..(1065): n is a, c, g, or t
  misc_feature (1099)..(1099): n is a, c, g, or t
tgaagaatggatggcaatggcttgacancccccaggattgaagatataggtgtgataactactgcattagtngctcccagcctggattnnntttccagctgcagggcacgatcctacccttctcttttcctctcacagaagtngttctgggcaagaggaagcatgaacagctggtcccataggatgaattgaagcagcaaatctcctagagaggttaaaagtatgtacctcgctaggctgcaagcagcccaaggaccaagggatttatnatctgcaaaagaatcttggaggtaattggtaagggcacgaaaacagtgataacatctttaaaacatctggggtgctggtgaacttggcagaagaaaggattaaaaaaggtaagaatgggggaaggggatgggtccttacagggtattaatccagattagatgttaaatataagtatcttggttaaagtattgtaagtgggtatgaatgtgagggaagaaggaggaggatgatgttaggggaggggacaataatggataatgaaatggaatagagataattaggggataatttagagggcaatacctcctaagtgcactggaagtgtagggaggggtaagttggggataacacaaattaaatggggaatgagaggagcaactgaaagtntcaaattcaggctatagatgggaccccagccccccatactctcccgtcctacatgagatgggcagtggagggccaggacagcaactccaagccagtgtaggttttggaggtagacagtgaggaggcttgcttctgtcctttgttagctgagtgcccttggacagcttacttacctactctcagcctcagtttccccatctctaaaataaggctaccaatacctaccttctctggccattgtnaggatgaatgaaagagctctgaaagtatttctgtaattagcagacatcagagattgttattctccaaggtaagaggccccntagatccctggcnggtganagtgttaagattctttttccctcctctgcggtgcccgctccttttcnagccttgtgnctgcctctnatcctctcttttcgccaacccccactcctccttngggacaccttgcggcgcccagcttcttgcac

SEQ ID NO: 664592 - DNA, 223 bp, Homo sapiens
cgagtgtgagaactacaacctggtgcatgatgtgaaccacaacatgtgcagaatgtgaacacgcaccagtgcagagggaaccactgaccaggttgatgagaactgcaacagtgcagatgggaaccacaaccaggcagagggaactacaaccaggcagagggaaccacaacaggcacgggtgtcacagcacagaaaagttgtcaaggcaatccatccacctgag

SEQ ID NO: 664593 - DNA, 111 bp, Homo sapiens
gtcgagactttccggaggcctacaagcccacagtgtacgagaacacagggggtggacgtctcatgatgcatcagatcagcctgggcctttgggaaaaaaaccggacaatga

SEQ ID NO: 664594 - DNA, 903 bp, Homo sapiens
  misc_feature (36)..(37): n is a, c, g, or t
  misc_feature (40)..(40): n is a, c, g, or t
  misc_feature (56)..(56): n is a, c, g, or t
  misc_feature (623)..(623): n is a, c, g, or t
  misc_feature (658)..(658): n is a, c, g, or t
  misc_feature (770)..(770): n is a, c, g, or t
  misc_feature (777)..(777): n is a, c, g, or t
  misc_feature (785)..(785): n is a, c, g, or t
  misc_feature (790)..(790): n is a, c, g, or t
ttcatattttacgcaaatgtacagccacaagacaanntancgcacgacttttattnccaccgtcagaaaacaggcccccacacaggaggagaatgacacaatgaacccacatttcaagctggtttccaagtgtttttggagtctcggcttttgacaggtcccaatgctactgtcaagaggaggtatggccagatactcaaatttgctccagactttgctgtatatcagatgatcccatgatgcttgcagcctggaacagttccttataaagggagagaggggacaaaatcacttatgctgaagcaactttaagcaatacactgaagatttcaagggaagtcagagactgcatcagagaaaaactggcatacaaaagattctgctgagtactgaaggcaaaattggactgagccagatgaaagagtattataataataagagtggtcccagcagagaagacaacacttgaggaagaagaaagtatgactgataatatgctcacggccctgcaaagtctcactttgtctcccaggctggagtgcagtggagtgatcttggctcactgaaatctccaccttctgggttcaagtgattctcctgcctcagactcctgaatagctganactacaggtgcccaccaccatgcttagatgaacanttgaagtttttagtttaacttgtccaggattccgtagctacatgaccaagatggattcaaaacctgatcttaggatgccaaggccaatggctttctttatttcaagctgacntttgggnccatttgngtaanaccttcccagaaaaggtcccagtctatacccccggagaagaaatgctagtttcccaaaagtttcaataaaactagcaaggaaggttccaaaatttctgaacctagagagggag

SEQ ID NO: 664595 - DNA, 891 bp, Homo sapiens
  misc_feature (36)..(37): n is a, c, g, or t
  misc_feature (40)..(40): n is a, c, g, or t
  misc_feature (56)..(56): n is a, c, g, or t
  misc_feature (520)..(520): n is a, c, g, or t
  misc_feature (632)..(632): n is a, c, g, or t
  misc_feature (639)..(639): n is a, c, g, or t
  misc_feature (647)..(647): n is a, c, g, or t
  misc_feature (652)..(652): n is a, c, g, or t
ttcatattttacgcaaatgtacagccacaagacaanntancgcacgacttttattnccaccgtcagaaaacaggcccccacacaggaggagaatgacacaatgaacccacatttcaagctggtttccaagtgtttttggagtctcggcttttgacaggtcccaatgctactgtcaagaggaggtatggccagatactcaaatttgctccagactttgctgtatatcagatgatcccatgatgcttgcagcctggaacagttccttataaagggagagaggggacaaaatcacttatgctgaagcaactttaagcaatacactgaagatttcaagggaagtcagagactgcatcagagaaaaactggcatacaaaagattctgctgagtactgaaggcaaaattggactgagccagatgaaagagtattataataataagagtggtcccagcagagaagacaacacttgaggaagaagaaagtatgactgataatatgctcacggccctgcaaatgaacanttgaagtttttagtttaacttgtccaggattccgtagctacatgaccaagatggattcaaaacctgatcttaggatgccaaggccaatggctttctttatttcaagctgacntttgggnccatttgngtaanaccttcccagaaaaggtcccagtctatacccccggagaagaaatgctatttcacaaagcttccataaaaactcaagaggaatgggttccagagcttctggaagcctgaagatgtggaagactctggagggtggtgcactcaggaagggcatggaagttttgcacagctgtctccatgcctcatcctccacatgtctttacatctggatcctttataatatcctttacaataaactcaga

SEQ ID NO: 664596 - DNA, 164 bp, Homo sapiens
cattttttttttccccccccttttaaaaaccggttaggggagaagcccccttaggaagcctggggtgcccaaaatcccatttaattccatttcccctttttgcaggcggtttgggggtagggcccctttttttttgccccccaaaaaaaaagggttttttttta

SEQ ID NO: 664597 - DNA, 768 bp, Homo sapiens
gaagtgcggctgattgacttcttgctatggtatacctctcactcctgcctggtgttccaacccgttctgtggccatagtattcattttggaccctcttcgagcgctcattcctgtcgagttccagatgaatccattagcgtgcttcagtaaggcccgtagacagtgtatgcagagtgagcgtaataggctgcacctggacgagggactcagagctacacgtagtacttggatgcagtctgctgctgagtaggggctctcaatgcctacgttgggtgactgcccgagcgtcctattagtgacaccgcttgtacatgactctcgggaccagcactgccccgagcgagtccaaggccttctctgcaggccttggacattcaatcgagctgactggcatgggcccgatctggggactactgtccagtcggcgtcctgaaactgatgcctggttcgcctcgtgctgcttgtgctctgccctctgcctccatggttcctctcgccttccttttcttggtgtaaaggtaccttcctttgctgattgtgaatggtgtcccctttgcttgcttggggagcctcccccaggcccaggtttgctgctccatatgatgacttggggctgcctgggacaggctcctgaggaggattggaacggctgaacagtctcccagagtccgctaaagctaggtctgctcccaatagggattggaaagcaagggccaaaatttcaccaagaataatatgttaataccgacaacttttggccggaacct

SEQ ID NO: 664598 - DNA, 154 bp, Homo sapiens
tagcggaccttgggtgttggtccagaaatcacagcagggacttagtatccttaatacaaatggaaacattaagttcatcatcagatgataaaaggaacaaaaaaaaacctgatactcatctcaaaagacataagaaaacacataaccaagcaac

SEQ ID NO: 664599 - DNA, 104 bp, Homo sapiens
agcggggttcgtggactgcttctgactgcgccgcctgtgacccgcaccccgccgctctcccgcctgcccgtccccgtgccgggctgcgaaggtgtcccctgtgc

SEQ ID NO: 664600 - DNA, 179 bp, Homo sapiens
gcaagaaagcaccaccatacctggctaatgttttaaattttttgtatagatggggtcttgctattttgcctaggctggtcttgaactctggggctcaagtgatcctccaccttggttccaaagtgccgggattacagcatgactgtattctatgaagagtccaatgcttgttttaatgg

SEQ ID NO: 664601 - DNA, 116 bp, Homo sapiens
cgacggagagacgacaacgactgtgtgtctgattggtcctgggatttttgagctgtgccatttatggtactcattgcctatgcatcccctttttagattttttttaaattttatct

SEQ ID NO: 664602 - DNA, 698 bp, Homo sapiens
  misc_feature (11)..(11): n is a, c, g, or t
  misc_feature (70)..(70): n is a, c, g, or t
  misc_feature (93)..(93): n is a, c, g, or t
  misc_feature (107)..(107): n is a, c, g, or t
  misc_feature (113)..(113): n is a, c, g, or t
  misc_feature (123)..(123): n is a, c, g, or t
  misc_feature (160)..(160): n is a, c, g, or t
  misc_feature (172)..(173): n is a, c, g, or t
  misc_feature (175)..(178): n is a, c, g, or t
  misc_feature (182)..(183): n is a, c, g, or t
  misc_feature (186)..(187): n is a, c, g, or t
  misc_feature (189)..(190): n is a, c, g, or t
  misc_feature (192)..(195): n is a, c, g, or t
  misc_feature (201)..(201): n is a, c, g, or t
  misc_feature (203)..(203): n is a, c, g, or t
  misc_feature (205)..(207): n is a, c, g, or t
  misc_feature (210)..(211): n is a, c, g, or t
  misc_feature (213)..(214): n is a, c, g, or t
  misc_feature (251)..(251): n is a, c, g, or t
  misc_feature (255)..(258): n is a, c, g, or t
  misc_feature (260)..(260): n is a, c, g, or t
  misc_feature (270)..(270): n is a, c, g, or t
  misc_feature (272)..(272): n is a, c, g, or t
  misc_feature (290)..(290): n is a, c, g, or t
  misc_feature (292)..(292): n is a, c, g, or t
  misc_feature (303)..(303): n is a, c, g, or t
  misc_feature (305)..(305): n is a, c, g, or t
  misc_feature (318)..(318): n is a, c, g, or t
  misc_feature (324)..(324): n is a, c, g, or t
  misc_feature (337)..(337): n is a, c, g, or t
  misc_feature (340)..(341): n is a, c, g, or t
  misc_feature (366)..(366): n is a, c, g, or t
  misc_feature (371)..(371): n is a, c, g, or t
  misc_feature (379)..(382): n is a, c, g, or t
  misc_feature (389)..(390): n is a, c, g, or t
  misc_feature (394)..(395): n is a, c, g, or t
  misc_feature (400)..(400): n is a, c, g, or t
  misc_feature (412)..(412): n is a, c, g, or t
  misc_feature (418)..(418): n is a, c, g, or t
  misc_feature (426)..(426): n is a, c, g, or t
  misc_feature (428)..(428): n is a, c, g, or t
  misc_feature (432)..(432): n is a, c, g, or t
  misc_feature (438)..(438): n is a, c, g, or t
  misc_feature (441)..(441): n is a, c, g, or t
  misc_feature (444)..(444): n is a, c, g, or t
  misc_feature (453)..(454): n is a, c, g, or t
  misc_feature (456)..(456): n is a, c, g, or t
  misc_feature (460)..(460): n is a, c, g, or t
  misc_feature (465)..(465): n is a, c, g, or t
  misc_feature (488)..(488): n is a, c, g, or t
  misc_feature (498)..(498): n is a, c, g, or t
  misc_feature (511)..(511): n is a, c, g, or t
  misc_feature (536)..(536): n is a, c, g, or t
  misc_feature (552)..(552): n is a, c, g, or t
  misc_feature (562)..(562): n is a, c, g, or t
  misc_feature (576)..(576): n is a, c, g, or t
  misc_feature (583)..(583): n is a, c, g, or t
  misc_feature (611)..(611): n is a, c, g, or t
  misc_feature (697)..(697): n is a, c, g, or t
ttccgaaaatntccacagcctcacgcctacctgcccttaccctcagctcttggctgggtctcccactatnccccatccctccttccctcagangctgggtgccaganggtggntgagaagagnttctcaaagctgggcaggtcccaggaaaagccacttnatcgacctgggnngnnnngggnnggnngnngnnnngggttntntnnngtnntnnttttgggagccagatgaaatgaatcagaaaagggganaaannnnanacgactgaantncccaaattgacttacttntnccagaggcgananttataagcaaggncacggnttatgctctccgnttnnggagtgatggggggaggtaggttgnttttntttgttgnnnnttatttnncacnnttcanatattttatttngttgcnccaagttncnatgnagaagnggnttntgctggtgnntnaggncgcanatgttgctttagctgccgtcccntgggcatctngccgacaagactnttttattgcaggtgcgttctcttgntagtgtggtggggccnattttccctntccccaccctttanctagtcncagcatggttctgaacaaaatgaaagtnttaagggccatagaggggaaagaaaaaaaaagagaaccagcacattacaaagcgaccatccccacatccattcctaggacgggctnt

SEQ ID NO: 664603 - DNA, 117 bp, Homo sapiens
tctagcggatccctctcctacccacgatccaatagggatgtggaacaagaactttgtgacagttttcttgtaccacatacctattggatcgtggtagtaggtcgtgaggtaggaggt

SEQ ID NO: 664604 - DNA, 712 bp, Homo sapiens
  misc_feature (349)..(349): n is a, c, g, or t
  misc_feature (462)..(462): n is a, c, g, or t
gtagctgctaagaaatttaaggacatcatacattatgatccaacgaagcaagaccatgccacttacgaaagaaaaagagatgataaaccaaaagaaagtaaagcaaaacgaaaaaagaaaagggaggaagctgagaaactacctgaggtgtctaaagaaatgtattataatattgctatggatctgaaagaaatattccaaactacaaaatataccagtgaaaaggaagagggcacaccctggaatgaggactgtggtaaagagaaacctgaggaaatccaggaccctgcagctctgaccagtgacgctgagcagcccagcgggttcacgttctctttttttgattcanacactaaagacataaaggaagagacctacagagttgaaacagtgaaacctggaaagattgtctggcaggaagaccctcgtttacaagacagcagttcagaagaggaagatgtnactgaagaaacagatcacagaaactccagtcctggagaagcatcattacttgagaaagagaccacagaaactccagtcctggacgaagcatcattacttgagaaagagaccactagatttttctttttctctaagaatgatgaacgacttcaaggttctgacttattctggagaggagtaggaagtactatgagcaggaactcttgggaggccagaacaaccaaactgcgtatggattgtcgaaaagaaa

SEQ ID NO: 664605 - DNA, 182 bp, Homo sapiens
  misc_feature (114)..(114): n is a, c, g, or t
  misc_feature (143)..(143): n is a, c, g, or t
cgagagatgcgttgactccttgatctctgcgccagccttggttgtgctcgcctgctgtctgcacgtgggtgtctgcacgtgggtgtcttgcatgtgggtgtcttgtgccctcanagtgtctctgtgtctgcacgtgggtgtcntgcaccctcacgtgtctcgtgtccgcacaagcatgtgta

SEQ ID NO: 664606 - DNA, 300 bp, Homo sapiens
ttacaaattacatattcataccaattcttattacagaatgaagctgttattctactataagcatttttcatatggtaaatattttgatccttgtggtagccctgatgatatacatactatcaatagtcacattttataggatgaggaaactaaggtacagtcaggttaagtaactattcctagaaatcaagataccatcatataccaggaaaaggatggagctggaattcaatcaaccattctgactgcggggcccatatctatgactatacatattgactgtaatttggattggttgcg

SEQ ID NO: 664607 - DNA, 432 bp, Homo sapiens
  misc_feature (109)..(109): n is a, c, g, or t
  misc_feature (418)..(418): n is a, c, g, or t
tatagatggtgtcttgttttgttgcccaggctgatcttgaaatcctggcttcaagtgatctgccctgcctgggcatcccaaagtgttgggatcacaggcatgagctacntgcagccggccaacttttggctgcttaatgtactgtaagtgaagttgtttgtttatgatgtgaaccttacctcttagcccatttgaagctggaaatgcaacttagcactattaggcctactctccctatctctcacctgacattacttttctcattcctctcttgggcataaaatattacatctcttcacctccaattggaacagacttatgtttaaccgtaggaaattccagacaggaagtacttccatggaaaaggggccggtggaatgagatgtgtttgacagtttggctgtggcttgtgaagtangaaccagaatagag

SEQ ID NO: 664608 - DNA, 630 bp, Homo sapiens
  misc_feature (12)..(12): n is a, c, g, or t
  misc_feature (128)..(129): n is a, c, g, or t
  misc_feature (132)..(132): n is a, c, g, or t
  misc_feature (141)..(142): n is a, c, g, or t
  misc_feature (145)..(145): n is a, c, g, or t
  misc_feature (147)..(147): n is a, c, g, or t
  misc_feature (207)..(207): n is a, c, g, or t
  misc_feature (345)..(345): n is a, c, g, or t
cagcacactganttgcttcccagcctccagaactataagcaagaagtttttttatagtaacaaatttattgttcacagttcttgcttataaactttataaaccagactaaggcatttcgttatagagnnccncggctatannttntnctagaaatgtgacactggaatgatgtggctctcaagatgacagtgttgcttctgaatgtntatgttcatgtcatctttaattgcatgaacaccagttttagcatcttcccttgagtagaaagagattctctacagcaagtattacgtaagaagtactggtggccaggcacagtggttcacgcctgtaatcccaacacnttgagagcggagccagaggtatcatttgagcctagaagttcgagagcagcctgggcaatatgtctaaaccccatctctacaaaaaaaatacaaaaatgaaaaagccgggtgtgattgtgtacacctgtagtcccagcaacttgagaagctgaggtggcaggattgcttgagcccaaggggagggttggcggcagtgggtggttcgaggctgcagtgagccatgattataccagtgcgctccagcctaggtgacagagcaagagccggtctcgattatgtgataga

SEQ ID NO: 664609 - DNA, 130 bp, Homo sapiens
gaaactgtccaagcacatggaaattatacaatatgctcctatatgactagtgggtcaataaagaaatttaagataggaaagtgataatcattttgttattgtataataaatttttaagtagaaaaaaaaa

SEQ ID NO: 664610 - DNA, 471 bp, Homo sapiens
gatcgttatacatcccggaacatatgtatgcacagagtttcggatatcacctggtcggaacgctcatacgcggaaacgcgatatcacatagataacatctgctgcgacgtggccgtgttaaccgcggacaggccaggatgtaggcgaaaccgtacgagtcatccgcgttgagatgccactcctgggtgcctcacgcgtgtagatggcctgcagcactcatcacgcgacagagcgagcaagaatttggaagattccagtgatgtaaaacctgccccccttggtgagggtgaagagttggcgagaagaacaggaacagagacagaatgctgaatatgatctgacaggatcatggtggcctggactgactgcagccattcgtttggtaatgatgagaaacagaggtggacacatcccaaactatcccttgctcagaagaaagatcaggtaactcaaaagaaggcaaactccctc

SEQ ID NO: 664611 - DNA, 318 bp, Homo sapiens
  misc_feature (313)..(313): n is a, c, g, or t
cgatctcatacacggatccccttcgtcgaagaacaacggcaaagacaggtatgacctctcctgcgggtgtagcccttacggtcgatcttgtggccgaaaggcagactaggccacggtttacagtaccatgatcgggcaaccttttcccgagcccccgcttgaggtgccaccagggctggcgcgctgatatccacagcgctccatgacagtgaacaccttccttgcccggcgtgctgggacccatggcccggctgcagggtggcctctgatacagtatccgcacactaccgtgcccgttgttccttcgacgaanggtac

SEQ ID NO: 664612 - DNA, 542 bp, Homo sapiens
cagccacacgtgtgggagtgagaatctggcagtgagctactgtccaccagcaaggcactgtccaggcagtgggacaccatgagacacgatgtgccgtcgaaaacactgagatagactgttaagtgacaaagttcacagcagcactatctgtagcagatgaaagatggaagccacccaaatgtccccccgctaagaatggataagcacaacgcgctcagtccacacagtggaggacaattcagccataacgaggaaagcagctctgacacgccacagcacggatgaacctcaaaaatgacgtggggtctaagatcagaccccaaggttgcatacagtgtgatttcatcgataggaaatatccagaactggcaaatccacagaggcagaaagcagattagaggctgccagtggttgtacctgcagggagggagggcagagacaagaggctggggagagacctgccaggtgcagtcacctcaggaaggtggtgaaagtgttttggaacaaaacaggtgatggttgtacaacactgtcatgatttt

SEQ ID NO: 664613 - DNA, 402 bp, Homo sapiens
tcatgaaggcatagaagaattgtcatcgcccatctcctttctgtggataggcgggacaaggccggcccctggcctggggcctgggatgcgagggctctcatagcttgtacatggtgacggtttcagttccttgtcctcagtcgtggcctggaccgacttcacgaggtcttgggtctgcagcatgctcatgttccaggacgccacgtagttgaggctctcggccaccgaatggtcgcgggaatacagcaggttgaccttggtgctctgcaccgccacggggctcttgctggaaatctcggctgccagcgctaaggcagcatccagcatgacctctttgtctgggaacacccggttgaccagcccactgcccagggcctcgtcagccatcatcttgcagttcgc

SEQ ID NO: 664614 - DNA, 230 bp, Homo sapiens
atgatcatttgcccgtcttcccacattccttagcatgacccatgctgcatcacagacctcgccccaaagcttcatatataaactaaatgtaacgtatctgctacttcttcctgctccataaccagctggtctctgtggtagttatgcggtcaggtatagatgacagtcatcacttctctgggaaggagaagaagagtgggccaggatgaatattggtagaagactaggtg

SEQ ID NO: 664615 - DNA, 770 bp, Homo sapiens
  misc_feature (17)..(17): n is a, c, g, or t
tatacgctagtaaggcngggtgaatcggccgaggaggtcatccatgacaactttggtatcgtggaaggactcatgaccacagtccatgccatcactgccacccagaagactgtggatggcccctccgggaaactgtggcgtgatggccgcggggctctccagaacatcatccctgcctctactggcgctgccaaggctgtgggcaaggtcatccctgagctgaacgggaagctcactggcatggccttccgtgtccccactgccaacgtgtcagtggtggacctgacctgccgtctagaaaaacctgccaaatatgatgacatcaagaaggtggtgaagcaggcgtcggagggccccctcaagggcatcctgggctacactgagcaccaggtggtctcctctgacttcaacagcgacacccactcctccacctttgacgctggggctggcattgccctcaacgaccactttgtcaagctcatttcctggtatgacaacgaatttggctacagcaacagggtggtggacctcatggcccacatggcctccaaggagtaagacccctggaccaccagccccagcaagagcacaagaggaagagagagaccctcactgctggggagtccctgccacactcagtcccccaccacactgaatctcccctcctcacagttgccatgtagaccccttgaagaggggaggggcctagggagccgcaccttgtcatgtaccatcaataaagtaccctgtgctcaaccaaaaaaaaaaaa

SEQ ID NO: 664616 - DNA, 211 bp, Homo sapiens
tttcaaatgtccttagttgacggaagggatccattcagatagttgagcaagcattcaaattttatttgtggtttacattagtgataacaggagcctgtggagatgctataaacctctgttttttctcttcttttctcttgttttttttttttttttttttggaaacggggtctcattgggtcccccagggaggaggctcagggtcggcggg

SEQ ID NO: 664617 - DNA, 736 bp, Homo sapiens
  misc_feature (17)..(17): n is a, c, g, or t
tatacgctagtaaggcngggtgaatcggccgaggactcatgaccacagtccatgccatcactgccacccagaagactgtggatggcccctccgggaaactgtggcgtgatggccgcggggctctccagaacatcatccctgcctctactggcgctgccaaggctgtgggcaaggtcatccctgagctgaacgggaagctcactggcatggccttccgtgtccccactgccaacgtgtcagtggtggacctgacctgccgtctagaaaaacctgccaaatatgatgacatcaagaaggtggtgaagcaggcgtcggagggccccctcaagggcatcctgggctacactgagcaccaggtggtctcctctgacttcaacagcgacacccactcctccacctttgacgctggggctggcattgccctcaacgaccactttgtcaagctcatttcctggtatgacaacgaatttggctacagcaacagggtggtggacctcatggcccacatggcctccaaggagtaagacccctggaccaccagccccagcaagagcacaagaggaagagagagaccctcactgctggggagtccctgccacactcagtcccccaccacactgaatctcccctcctcacagttgccatgtagaccccttgaagaggggaggggcctagggagccgcaccttgtcatgtaccatcaataaagtaccctgtgctcaaccaaaaaaaaaaaa

SEQ ID NO: 664618 - DNA, 185 bp, Homo sapiens
ctcttcatcctccatacgttactaaagctatgccaacggcaagaccacgcagaatcttctcatgtggagtttctggttgcttaaccaaccaggtcctcaatagccggagcttttttagagcccaacataactaaacctagggccaggccagcggcttccccgggggaaaagtagggtaccgagct

SEQ ID NO: 664619 - DNA, 691 bp, Homo sapiens
cccacaaaaagcccaattggtagagacatgcccagtccaaccaggggcccctcgtgccaacggcacgaggcggggctctccagaacatcatccctgcctctactggcgctgccaaggctgtgggcaaggtcatccctgagctgaacgggaagctcactggcatggccttccgtgtccccactgccaacgtgtcagtggtggacctgacctgccgtctagaaaaacctgccaaatatgatgacatcaagaaggtggtgaagcaggcgtcggagggccccctcaagggcatcctgggctacactgagcaccaggtggtctcctctgacttcaacagcgacacccactcctccacctttgacgctggggctggcattgccctcaacgaccactttgtcaagctcatttcctggtatgacaacgaatttggctacagcaacagggtggtggacctcatggcccacatggcctccaaggagtaagacccctggaccaccagccccagcaagagcacaagaggaagagagagaccctcactgctggggagtccctgccacactcagtcccccaccacactgaatctcccctcctcacagttgccatgtagaccccttgaagaggggaggggcctagggagccgcaccttgtcatgtaccatcaataaagtaccctgtgctcaaccaaaaaaaaaaaa

SEQ ID NO: 664620 - DNA, 905 bp, Homo sapiens
taattcagttattgtggacttggcctgtatcttttatatgctagttgtacacgttggacgttcagattgacacagacaccatggggaaggtgaaggtcggagtcaacggatttggtcgtattgggcgcctggtcaccagggctgcttttaactctggtaaagtggatattgttgccatcaatgaccccttcattgacctcaactacatggtttacatgttccaatatgattccacccatggcaaattccatggcaccgtcaaggctgagaacgggaagcttgtcatcaatggaaatcccatcaccatcttccaggagcgagatccctccaaaatcaagtggggcgatgctggcgctgagtacgtcgtggagtccactgactgatttcaccaacacataggaagaaggcttgggtgctcaatttgcagtgggagtgaagccccaaaagaagtcatccatctcatgcacaacactcatgcttgatagaccacacaatgtacagacaataggtgttgtagaacccatgagaacgctacagaacacacaagatctctaagcattctattcaagacaaaagacactacacatgacaatcaaccaaaactgcctaaaagaacacccacatgtgtccacacgggatccattactcaatgaaccacagctatttgcgtaattctgatgagacaaaggcaaatccattgagacaaccaagttacaatgacccagtacacattgtccagacaccagcaatgcactggttgaacttggaccccatatcagagggacaaatacagtttgagcgtatgacatgagccgactgatggacatcatccgagaagagatacatcaccctggatcacaatacatgacgcatgcaccaaagagactaaggacatagtattactc

SEQ ID NO: 664621 - DNA, 214 bp, Homo sapiens
  misc_feature (151)..(151): n is a, c, g, or t
ataacttgtccattgtgaaccctggtcacagtgctctggggctttcaaaggcacctcgcatgcctttttgtagcctgtcagccccagcatcatggacacatcatcttgttgatgcggagttacgtgcaaggggttgcgagccgcaccccgngatatcgcacacgccatctttgtccacagctttttaccatgtacctttttgtgctcacatatt

SEQ ID NO: 664622 - DNA, 1084 bp, Homo sapiens
  misc_feature (539)..(539): n is a, c, g, or t
  misc_feature (570)..(570): n is a, c, g, or t
  misc_feature (619)..(619): n is a, c, g, or t
aggcagtggtatcaacgcatagtgtcgaattatggccgggttgatgttcgccgatcgttgactattcctctacgctatcagtacaagacaattggtgacatattactatccatatgtagttcgagcgtcaatgatgcgtggatgatgtctagcgctaccagtatccttagagacttccctatatatcctagcacgcaggctggagcacaagtcaggcatagccttcattatggtaatcgaccaacatgtaacagtgaatactcgtttactgcacacagtgctgtggagtaattaatactttcttacatagttgataagccatgcatatttgcggggagttattggcaaaaatgtattgagttcacacctaatcaatcgggggacccctcatattttggaagtccccactcgaccattagtcaaagattaggctatcatgacgcttgactctccactttcatcctaacgtacctgcatcagctgatctgcctcaatagtgcggatggaccgtgttagcaaagtgacacaagagttggacnataagttcataactctcttctccgttggacnagtggaaatcttacatgctcgcaaccacttgagtaggacacatactcgntaggaactccataagacttaggtcttcattcctctatctatcacttcatgcagtgatgtgcatcctcgtcttcatgcgtataaaggaggcacctttctcacatttcactccaagctaatctaataaatactaattatggagaacaccgccttctgtccaataaaaccccgaattgaacccaaaatttgcaccacatcattgcgttacttatgattcccggtacttataaatacagcggggtagggtctctaatatataccttaatatgcttcgcctagcgccttgaagactggctggggcaattctatttggatatcttactcttaacagaaactccgcgtaaacttctaaatcagagacttgtgttttggaacccccgccaggaagaggaaagggaggatccccatgtgttattgcgaactgattttggagttttttcgggcgaccccctggtggtgtattcgg

SEQ ID NO: 664623 - DNA, 1585 bp, Homo sapiens
  misc_feature (258)..(259): n is a, c, g, or t
  misc_feature (269)..(269): n is a, c, g, or t
tcgccccacttgattttggaaggatctcgcttcctgggagatggtgatggaatctcccatgaatgaacaagcctcccggtctcaagccctgacggtgccatggaattgcccatgggtggaatcatattggaacatgtaaacccatgtaagttgaggtcaatgaaggggtcattgatggcaacaatatccactttaccagagttaaaagcagccctggtgaccaggcgcccaatacgaccaaatccgttgactccgacnntcaccttccncatggtgtctgagcgatgtggctctctgctcctcctgttcgacagtcagccgcatcttcttttgcgtcgccagccgagccacatcgctcagacaccatggggaaggtgaaggtcggagtcaacggatttggtcgtattgggcgcctggtcaccagggctgcttttaactctggtaaagtggatattgttgccatcaatgaccccttcattgacctcaactacatggtttacatgttccaatatgattccacccatggcaaattccatggcaccgtcaaggctgagaacgggaagcttgtcatcaatggaaatcccatcaccatcttccaggagcgagatccctccaaaatcaagtggggcgatgctggcgctgagtacgtcgtggagtccactggcgtcttcaccaccatggagaaggctggggctcatttgcaggggggagccaaaagggtcatcatctctgccccctctgctgatgcccccatgttcgtcatgggtgtgaaccatgagaagtatgacaacagcctcaagatcatcagcaatgcctcctgcaccaccaactgcttagcacccctggccaaggtcatccatgacaactttggtatcgtggaaggactcatgaccacagtccatgccatcactgccacccagaagactgtggatggcccctccgggaaactgtggcgtgatggccgcggggctctccagaacatcatccctgcctctactggcgctgccaaggctgtgggcaaggtcatccctgagctgaacgggaagctcactggcatggccttccgtgtccccactgccaacgtgtcagtggtggacctgacctgccgtctagaaaaacctgccaaatatgatgacatcaagaaggtggtgaagcaggcgtcggagggccccctcaagggcatcctgggctacactgagcaccaggtggtctcctctgacttcaacagcgacacccactcctccacctttgacgctggggctggcattgccctcaacgaccactttgtcaagctcatttcctggtatgacaacgaatttggctacagcaacagggtggtggacctcatggcccacatggcctccaaggagtaagacccctggaccaccagccccagcaagagcacaagaggaagagagagaccctcactgctggggagtccctgccacactcagtcccccaccacactgaatctcccctcctcacagttgccatgtagaccccttgaagaggggaggggcctagggagccgcaccttgtcatgtaccatcaataaagtaccctgtgctcaaccaaaaaaaaaaaa

SEQ ID NO: 664624 - DNA, 708 bp, Homo sapiens
gagagagagagatagagagagagatagagagagagagagagagagagagagagatagagagagagagagagagagagagtgtgagcttgtgctcctgcgcctcagctcctctcgcatcttctcctgtttgtgctttcctctttcccttcttaccctcctgcaccagccccattctcctgtgctctccaggcctatggctatgtatgtgctcatattacacgtatcatgatttccattttctatgcactcgtacctgtcttcatgtcccttccttggtgacagactcttcttctccttattattctgtgctctctgtctctgtgcatcctcatctcctgtaatctgtgtcttgttaacttgtcttttacttcccacacctcatctcatactcccctgttattccatctcccagcttatcatcccctgtccttcattctcctttacgcctgctttaccatcctcacttctctgagtttttcttttatctttccatttccctttatttgcctcttcctttccttcccttctcctttttgttccttctcttcctttcttgtattcttctctctcttcgttctctcccctttctcaccttccttttcccctgcctctctcttgcttccttatctttgctcctctttgaccctctttttcctttttgtcttccctctacctgccggtttctttcatgtccttgttttctttctt

SEQ ID NO: 664625 - DNA, 1268 bp, Homo sapiens
tttaggatatcgagaccggatccacgtgactgcgatacaccactgcgcaaaatgtgaagagtctgcggagtcaacggatttggtcgtattgggcgcctggtcaccagggctgcttttaactctggtaaagtggatattgttgccatcaatgaccccttcattgacctcaactacatggtttacatgttccaatatgattccacccatggcaaattccatggcaccgtcaaggctgagaacgggaagcttgtcatcaatggaaatcccatcaccatcttccaggagcgagatccctccaaaatcaagtggggcgatgctggcgctgagtacgtcgtggagtccactggcgtcttcaccaccatggagaaggctggggctcatttgcaggggggagccaaaagggtcatcatctctgccccctctgctgatgcccccatgttcgtcatgggtgtgaaccatgagaagtatgacaacagcctcaagatcatcagcaatgcctcctgcaccaccaactgcttagcacccctggccaaggtcatccatgacaactttggtatcgtggaaggactcatgaccacagtccatgccatcactgccacccagaagactgtggatggcccctccgggaaactgtggcgtgatggccgcggggctctccagaacatcatccctgcctctactggcgctgccaaggctgtgggcaaggtcatccctgagctgaacgggaagctcactggcatggccttccgtgtccccactgccaacgtgtcagtggtggacctgacctgccgtctagaaaaacctgccaaatatgatgacatcaagaaggtggtgaagcaggcgtcggagggccccctcaagggcatcctgggctacactgagcaccaggtggtctcctctgacttcaacagcgacacccactcctccacctttgacgctggggctggcattgccctcaacgaccactttgtcaagctcatttcctggtatgacaacgaatttggctacagcaacagggtggtggacctcatggcccacatggcctccaaggagtaagacccctggaccaccagccccagcaagagcacaagaggaagagagagaccctcactgctggggagtccctgccacactcagtcccccaccacactgaatctcccctcctcacagttgccatgtagaccccttgaagaggggaggggcctagggagccgcaccttgtcatgtaccatcaataaagtaccctgtgctcaaccaaaaaaaaaaaa

SEQ ID NO: 664626 - DNA, 1422 bp, Homo sapiens
tctccccagcgccccccccctatcttttttttctttctagagaagaacaaaaagagtggaggggagagaggagggggggggggagggaggcaggaggcccaaacagcggcggaacaataacagagcagtggcgcggggggacgggagccaaacaagcaggcgggagctgaaaaaccaggcagaagaatcaaacagacaggagggcgcgacacccactcccaccgcgccaaacacacccgcgcgaaagacaagcggaacaagataaaacacgagaatactaagagggggagcacttatagacaagagagcggaggggaggccgcgaggagagaagaacaacactcacgcctgggaaggaaatacacgaggaggagaacacgatgagggagagggggggagaggcgcaccaccctcgcggaggaagacgagacacaagagacaagatatttagcagaagagagacaacccagaggaagaaaaacaaagaggacgggaagccaccagaagagaaagagggaaggaccgaagcgaaacggcgagcagaaaactgagcgaggagagagactcccaccagagggagagagggagcacaaaggaagagaacagcaaatatgacagaggcgccccccacaacaaagcaaagaggtgagagagatatatcagacaaacaacacacgagcgccgcccggccaagacaagagaagcgacagagcgagaggagaaaaaaaaagaggagagaaccaagcaagagagcgtaatatcagcacggaaacgacgagcagaacgaacacacgcacggccgcaacgatgaacaagaattgcgacgaaaacacacctagagccggcagagagcaaacaaagagagagcacaaagatcaaacgagcgggccacagaacacgcactcatcaagcgcaccacacacacacatcatagggaaacacacaaaagcatcaaaagcaacggaggagaagaaagagaaaggagaggacgaacacccacaccgcagagagggcaagcagacaacaggaaagggacgtaggaacacccgaccaagacaacgccgaaggcgaagacacaaaagaagaagaaaccacggcaggacagcagtgaaagaacaagagcaacgagagaccaggggcaggactcaacacaccgacagagaagagcagagcaatcaatacgaaggagacagcagaaggaaggacacagacgagcacgacgaagagaaacaaaagatgagagaccgaacaagctgagcgaacaaccaaaacaaaacagaggagcagagtagagcggagagaggcgacaaacaaaatagaagcagaagaatagctcaaacacgaagaagcagggcgaacaacataaagaagaagagaaagagaaagataaaaaccgacgcaaataaagtacaagaaagaccc

SEQ ID NO: 664627 - DNA, 313 bp, Homo sapiens
acaagactacataagaccaccagtctaagtctagagaacagtcacagcatgactgaatcgcacatacaaaaaagctttcagaaatagactagaatctctaaagagtaggtgtacacatgccatgtaatacatagatttccacttaatggtacaacagaataataagctattcttagcatttatgtagtagtaaaagtcaatatacacattaatataattcctttcttcaaaatcttatacctaatctgatatatctaaaaatagcacatgtaagtcatgtgtataacatgctatagaaccttctaaaactagg

SEQ ID NO: 664628 - DNA, 378 bp, Homo sapiens
tgtagtgaggacgtagggagcgtggccgctttcccaggcagctgtagggtgtgaagcagcacaggcctgacacagacagtggcagggctctcaaaaagccacttgagtagagtgagggctggcgacacagcagagttcccaccctgcttccatgctgggctgggccacatggaaaccttccaggtgccttttcccaggtgccactgtaccccttcacttgggggcacctctccctggcaggtactagtcttaccaatatagctgctggagacagaagagaactgagcacaaagggaaagtgatctgtacacctcccattcatggaatggtggccctgctgtgtgtcttccctccgatcacgcttatagagcaccatgg

SEQ ID NO: 664629 - DNA, 1272 bp, Homo sapiens
tcggggacgcgccggcgccggcgactcgcgcgcgccgccggcccacgcgggacccaggggcaggggcggcggagtcaacggatttggtcgtattgggcgcctggtcaccagggctgcttttaactctggtaaagtggatattgttgccatcaatgaccccttcattgacctcaactacatggtttacatgttccaatatgattccacccatggcaaattccatggcaccgtcaaggctgagaacgggaagcttgtcatcaatggaaatcccatcaccatcttccaggagcgagatccctccaaaatcaagtggggcgatgctggcgctgagtacgtcgtggagtccactggcgtcttcaccaccatggagaaggctggggctcatttgcaggggggagccaaaagggtcatcatctctgccccctctgctgatgcccccatgttcgtcatgggtgtgaaccatgagaagtatgacaacagcctcaagatcatcagcaatgcctcctgcaccaccaactgcttagcacccctggccaaggtcatccatgacaactttggtatcgtggaaggactcatgaccacagtccatgccatcactgccacccagaagactgtggatggcccctccgggaaactgtggcgtgatggccgcggggctctccagaacatcatccctgcctctactggcgctgccaaggctgtgggcaaggtcatccctgagctgaacgggaagctcactggcatggccttccgtgtccccactgccaacgtgtcagtggtggacctgacctgccgtctagaaaaacctgccaaatatgatgacatcaagaaggtggtgaagcaggcgtcggagggccccctcaagggcatcctgggctacactgagcaccaggtggtctcctctgacttcaacagcgacacccactcctccacctttgacgctggggctggcattgccctcaacgaccactttgtcaagctcatttcctggtatgacaacgaatttggctacagcaacagggtggtggacctcatggcccacatggcctccaaggagtaagacccctggaccaccagccccagcaagagcacaagaggaagagagagaccctcactgctggggagtccctgccacactcagtcccccaccacactgaatctcccctcctcacagttgccatgtagaccccttgaagaggggaggggcctagggagccgcaccttgtcatgtaccatcaataaagtaccctgtgctcaaccaaaaaaaaaaaa

SEQ ID NO: 664630 - DNA, 270 bp, Homo sapiens
ttgtttaattcgatcattttatccaccttgtgatattcaataagttaagtataacacaacatgcgcctaaggtataattaaataatatgtacatcgccgtctggctgaatcaaaccacgtccgactttaccgcttaacccttgtacacggcttgtttgtaattatagggaccacctacacgcccatgacaacgtgcaagccagaaaggaggagtaccacagacggaagttggtactctcttattatatcacttatgattatatcttcaat

SEQ ID NO: 664631 - DNA, 409 bp, Homo sapiens
tttttttcagtagatacaggtttcaccatgttggccaggctggtcttgaactcctgacctcaagtgatctacctgcctcagcctccttacttttatctcacatttttttttcttttagacagggtcctgctgtttcccagcatggaatgcagtggtgtaatcatggcttactgtagccttgatctcctgggctcaatggatcctcccacctgggcctcccaagcagctgggactacacatgcatgctaccacacccagctactttttgtatttttttgtacagatggggttttatcatgttgtccaggctggtctcgagctcctgggctcaaggaatctgcctgcctcggcctcttcagcttgctttttaattttgctgattgtttcttttctgtacagagcttttatt

SEQ ID NO: 664632 - DNA, 1868 bp, Homo sapiens
  misc_feature (258)..(259): n is a, c, g, or t
  misc_feature (269)..(269): n is a, c, g, or t
  misc_feature (1592)..(1592): n is a, c, g, or t
  misc_feature (1610)..(1610): n is a, c, g, or t
  misc_feature (1619)..(1619): n is a, c, g, or t
  misc_feature (1622)..(1622): n is a, c, g, or t
  misc_feature (1637)..(1637): n is a, c, g, or t
  misc_feature (1642)..(1642): n is a, c, g, or t
  misc_feature (1662)..(1662): n is a, c, g, or t
  misc_feature (1674)..(1674): n is a, c, g, or t
  misc_feature (1681)..(1682): n is a, c, g, or t
  misc_feature (1684)..(1684): n is a, c, g, or t
  misc_feature (1729)..(1729): n is a, c, g, or t
tcgccccacttgattttggaaggatctcgcttcctgggagatggtgatggaatctcccatgaatgaacaagcctcccggtctcaagccctgacggtgccatggaattgcccatgggtggaatcatattggaacatgtaaacccatgtaagttgaggtcaatgaaggggtcattgatggcaacaatatccactttaccagagttaaaagcagccctggtgaccaggcgcccaatacgaccaaatccgttgactccgacnntcaccttccncatggtgtctgagcgatgtggctctctgctcctcctgttcgacagtcagccgcatcttcttttgcgtcgccagccgagccacatcgctcagacaccatggggaaggtgaaggtcggagtcaacggatttggtcgtattgggcgcctggtcaccagggctgcttttaactctggtaaagtggatattgttgccatcaatgaccccttcattgacctcaactacatggtttacatgttccaatatgattccacccatggcaaattccatggcaccgtcaaggctgagaacgggaagcttgtcatcaatggaaatcccatcaccatcttccaggagcgagatccctccaaaatcaagtggggcgatgctggcgctgagtacgtcgtggagtccactggcgtcttcaccaccatggagaaggctggggctcatttgcaggggggagccaaaagggtcatcatctctgccccctctgctgatgcccccatgttcgtcatgggtgtgaaccatgagaagtatgacaacagcctcaagatcatcagcaatgcctcctgcaccaccaactgcttagcacccctggccaaggtcatccatgacaactttggtatcgtggaaggactcatgaccacagtccatgccatcactgccacccagaagactgtggatggcccctccgggaaactgtggcgtgatggccgcggggctctccagaacatcatccctgcctctactggcgctgccaaggctgtgggcaaggtcatccctgagctgaacgggaagctcactggcatggccttccgtgtccccactgccaacgtgtcagtggtggacctgacctgccgtctagaaaaacctgccaaatatgatgacatcaagaaggtggtgaagcaggcgtcggagggccccctcaagggcatcctgggctacactgagcaccaggtggtctcctctgacttcaacagcgacacccactcctccacctttgacgctggggctggcattgccctcaacgaccactttgtcaagctcatttcctggtatgacaacgaatttggctacagcaacagggtggtggacctcatggcccacatggcctccaaggagtaagacccctggaccaccagccccagcaagagcacaagaggaagagagagaccctcactgctggggagtccctgccacactcagtcccccaccacactgaatctcccctcctcacagttgccatgtagaccccttgaagaggggaggggcctagggagccgcaccttgtcatgtaccatcaataaagtaccctgtgctcaaccaaaaaaaaaaaaaaaaacnctcgaaactagtttctcncgaagcggnctnccgaggaaggcctgngggantctcggaaacgtgtctgtcntgtgaaggcgcntgggttnncncgttccccagggctcgtgggctaggaaggcagcggcgaggtgccntccccaggttaccccttcgggggcccagccgagcaacgtggggcgaaggcggcggcaaaggcccgggcttgggacctttggcggccggagttcccagccatggcggatctgtgagcgcttcagcagcgggtccaggagc

SEQ ID NO: 664633 - DNA, 201 bp, Homo sapiens
ctatagtgggtcgagtcacagtctgagtagtaacttaacgtcctaacctcaatgtataaaatagcatgggggaatagctaaacctttttaaaaaaatttattggatattcctccctgcttaaaagatttcaccagacaaaccttcatataaaaattcaggccctttcttggacaatttttaaacattggtatctttactag

SEQ ID NO: 664634 - DNA, 250 bp, Homo sapiens
aatcccatgatagcgatagctatagtgctacatagagaaataagtgactattaaatgagacacatgagagaggaaatcaccagaggtgagagtatcgtagtcatcagatgacactgagtagtatcgaatatacacattcttacaatcacagagtatagaagacaacacaattgaaaatgagcgagagacttaacgcacacttcataatggtcaggagacgggcaggaaaacacagcacaaagggggctta

SEQ ID NO: 664635 - DNA, 2230 bp, Homo sapiens
  misc_feature (258)..(259): n is a, c, g, or t
  misc_feature (269)..(269): n is a, c, g, or t
tcgccccacttgattttggaaggatctcgcttcctgggagatggtgatggaatctcccatgaatgaacaagcctcccggtctcaagccctgacggtgccatggaattgcccatgggtggaatcatattggaacatgtaaacccatgtaagttgaggtcaatgaaggggtcattgatggcaacaatatccactttaccagagttaaaagcagccctggtgaccaggcgcccaatacgaccaaatccgttgactccgacnntcaccttccncatggtgtctgagcgatgtggctctctgctcctcctgttcgacagtcagccgcatcttcttttgcgtcgccagccgagccacatcgctcagacaccatggggaaggtgaaggtcggagtcaacggatttggtcgtattgggcgcctggtcaccagggctgcttttaactctggtaaagtggatattgttgccatcaatgaccccttcattgacctcaactacatggtttacatgttccaatatgattccacccatggcaaattccatggcaccgtcaaggctgagaacgggaagcttgtcatcaatggaaatcccatcaccatcttccaggagcgagatccctccaaaatcaagtggggcgatgctggcgctgagtacgtcgtggagtccactggcgtcttcaccaccatggagaaggctggggctcatttgcaggggggagccaaaagggtcatcatctctgccccctctgctgatgcccccatgttcgtcatgggtgtgaaccatgagaagtatgacaacagcctcaagatcatcagcaatgcctcctgcaccaccaactgcttagcacccctggccaaggtcatccatgacaactttggtatcgtggaaggactcatgaccacagtccatgccatcactgccacccagaagactgtggatggcccctccgggaaactgtggcgtgatggccgcggggctctccagaacatcatccctgcctctactggcgctgccaaggctgtgggcaaggtcatccctgagctgaacgggaagctcactggcatggccttccgtgtccccactgccaacgtgtcagtggtggacctgacctgccgtctagaaaaacctgccaaatatgatgacatcaagaaggtggtgaagcaggcgtcggagggccccctcaagggcatcctgggctacactgagcaccaggtggtctcctctgacttcaacagcgacacccactcctccacctttgacgctggggctggcattgccctcaacgaccactttgtcaagctcatttcctggtatgacaacgaatttggctacagcaacagggtggtggacctcatggcccacatggcctccaaggagtaagacccctggaccaccagccccagcaagagcacaagaggaagagagagaccctcactgctggggagtccctgccacactcagtcccccaccacactgaatctcccctcctcacagttgccatgtagaccccttgaagaggggaggggcctagggagccgcaccttgtcatgtaccatcaataaagtaccctgtgctcaaccaaaaaaaaaaaaaaaaaaaaaaaaaaaaaaaaaaaaaaaaaaaaaaaaaaaaaaaaaaaaaaccggggcttttttggggggggggaaaaaggggaaaggggggccgcgccgtaatcaagtaagtttgtcctgacccaccaagtttttagttgacacagagggggaaaaatcgggggggccccccaatatagagggacgcaacaaaaaattaccagacagcgcgcggttacccgtcttttatccttcatccccgcacacacggaacacagacaaagaggaacgagagcagacataggagaacaagaacaaaaccaactagcagacgcaccaaacaggtagatgaaacacgagggacgcagacaagagaagccaagcagtaaggaacacagaagacacgaacgagaggagcacaaagacagcagacacacacaagaacgggagcgccggaaaagagagagaacaaacgaacaagaaacaagcaacaggagagaagaaaggcgcgagagaagggagcaagaacaacggacggacagcgaaagagacgccgagagaggagaaaggacaagaagagacacaaaacaccacagcaaagcactgggcagcgagggaaagaaacacggagaagaaagggacgaagccggggaagacaaaaaagca

SEQ ID NO: 664636 - DNA, 324 bp, Homo sapiens
tacatcaaagctgggaaattctctacaaaagaaacctaaacaggccaggcgcggtggctcatgcctgtaatcccagcactttgggaggccgagacgggcagatcacgaggtcaggagtttgacaccagcctagccaagatggcgaaaccccgtctctactaaaaactacaaaaattagccgggcgctgtgcaggcacctgtaatcccagctattcgggaggctgaggcgggaaaatcggttgaacccaggaggcagaggttgtggtgagccgagatcacaccactgcactccagcctgggcgagaagagtgaaactccgtctca

SEQ ID NO: 664637 - DNA, 1661 bp, Homo sapiens
  misc_feature (258)..(259): n is a, c, g, or t
  misc_feature (269)..(269): n is a, c, g, or t
tcgccccacttgattttggaaggatctcgcttcctgggagatggtgatggaatctcccatgaatgaacaagcctcccggtctcaagccctgacggtgccatggaattgcccatgggtggaatcatattggaacatgtaaacccatgtaagttgaggtcaatgaaggggtcattgatggcaacaatatccactttaccagagttaaaagcagccctggtgaccaggcgcccaatacgaccaaatccgttgactccgacnntcaccttccncatggtgtctgagcgatgtggctctctgctcctcctgttcgacagtcagccgcatcttcttttgcgtcgccagccgagccacatcgctcagacaccatggggaaggtgaaggtcggagtcaacggatttggtcgtattgggcgcctggtcaccagggctgcttttaactctggtaaagtggatattgttgccatcaatgaccccttcattgacctcaactacatggtttacatgttccaatatgattccacccatggcaaattccatggcaccgtcaaggctgagaacgggaagcttgtcatcaatggaaatcccatcaccatcttccaggagcgagatccctccaaaatcaagtggggcgatgctggcgctgagtacgtcgtggagtccactggcgtcttcaccaccatggagaaggctggggctcatttgcaggggggagccaaaagggtcatcatctctgccccctctgctgatgcccccatgttcgtcatgggtgtgaaccatgagaagtatgacaacagcctcaagatcatcagcaatgcctcctgcaccaccaactgcttagcacccctggccaaggtcatccatgacaactttggtatcgtggaaggactcatgaccacagtccatgccatcactgccacccagaagactgtggatggcccctccgggaaactgtggcgtgatggccgcggggctctccagaacatcatccctgcctctactggcgctgccaaggctgtgggcaaggtcatccctgagctgaacgggaagctcactggcatggccttccgtgtccccactgccaacgtgtcagtggtggacctgacctgccgtctagaaaaacctgccaaatatgatgacatcaagaaggtggtgaagcaggcgtcggagggccccctcaagggcatcctgggctacactgagcaccaggtggtctcctctgacttcaacagcgacacccactcctccacctttgacgctggggctggcattgccctcaacgaccactttgtcaagctcatttcctggtatgacaacgaatttggctacagcaacagggtggtggacctcatggcccacatggcctccaaggagtaagacccctggaccaccagccccagcaagagcacaagaggaagagagagaccctcactgctggggagtccctgccacactcagtcccccaccacactgaatctcccctcctcacagttgccatgtagaccccttgaagaggggaggggcctagggagccgcaccttgtcatgtaccatcaataaagtaccctgtgctcaaccaaaaaaaaaaaaggggggggtctaaagttccccggggcccaggttcgctcccggtttggtcaaggggccctaaggggcgaaaaaacag

SEQ ID NO: 664638 - DNA, 424 bp, Homo sapiens
  misc_feature (1)..(1): n is a, c, g, or t
naccttcatcctcttcaccggcactccctcagcccctgacatcgagtttatgaaacgcctgaccaaggtggtcaacatcgtccctgtcatcgccaagcgggacacactcaccctggaggagagggtccacttcaaacagcggatcaccgcagaacctgctgtccaacggcatcgacgtgtaacccccctgaaggaatttgatgaggactcggaggaaccggctgttgaaccgagaagttccgggagaatgatcccatttgctgtggtggggcagtgacccagaagtacccagggtcaaacggcaaagaggatccttggggaggaagaccaggtggggtaccatcgaagttgaaaacaaccacacagtgtgagtttggccttaccttgcgggacctttctcatcaggacgcgccatcgtgcgctt

SEQ ID NO: 664639 - DNA, 375 bp, Homo sapiens
atcatatgaatataagcagggtggtgaatattacgcatatttcttttcattttttttttttggagagatgagatctggtaatgtggcccagacggtgaaggcaggggctattcacagggtgccatcataatacactacagccttaaacttcggggctcaaggggtcctccggcctcagccttctgagtagcgggaactataggtgcactggactatatctgactggttggtggcagtttgggcggcccaactcctaactctccttcctacttagaattccctatttggtatcctatttatgaaacagggtgcccagcctggctcttgggaagacagaagggccaggttcgcactcggcccacggcataagggggg

SEQ ID NO: 664640 - DNA, 337 bp, Homo sapiens
aagtatcaaattaatcatgtgtgaggctcttgagaggaaataaacaatacacgatgcatgtggggataagagcatattctaaatgtgcaaacaagtacttcataatcctcaatggtaacaatagcagctgacattgatcaagcacgcttcccgtgtatcagtcgtactgcccagatcatgtatatatctgtaccgtgatcaatctcccaactcgtagaaacaggtacggccatgatccccagtatacagatttaggaaactgaagcttagcagagccgacactcaaaccgcagactagatatacctgactccagaagcaggaactgaactattcacc

SEQ ID NO: 664641 - DNA, 319 bp, Homo sapiens
  misc_feature (1)..(1): n is a, c, g, or t
  misc_feature (14)..(15): n is a, c, g, or t
  misc_feature (36)..(36): n is a, c, g, or t
  misc_feature (44)..(44): n is a, c, g, or t
  misc_feature (73)..(74): n is a, c, g, or t
  misc_feature (81)..(81): n is a, c, g, or t
  misc_feature (88)..(88): n is a, c, g, or t
  misc_feature (110)..(110): n is a, c, g, or t
  misc_feature (117)..(118): n is a, c, g, or t
  misc_feature (153)..(155): n is a, c, g, or t
  misc_feature (160)..(160): n is a, c, g, or t
  misc_feature (168)..(168): n is a, c, g, or t
  misc_feature (183)..(183): n is a, c, g, or t
  misc_feature (217)..(217): n is a, c, g, or t
  misc_feature (226)..(226): n is a, c, g, or t
  misc_feature (242)..(242): n is a, c, g, or t
  misc_feature (252)..(252): n is a, c, g, or t
  misc_feature (261)..(262): n is a, c, g, or t
nggtgtggtggcannaggcgtaccagcctcggaatncagaacgncgccggcgagttcgtggacctgtacgatnncgcgganaatgctncgctagcaatcgcatcatcggngccaagnnccacggatccatccagatgaacgtggccgaagttnnncaagntcacaggnaggtttaatggccantttaaaacttatgctatctgcggggccattcgtnggatgggtnagtcagatgattccantctccgattngcaaggcgnnggcatcgtctcaaagcacttttgactggagagaatcacagatgtggaatatttgtca

SEQ ID NO: 664642 - DNA, 173 bp, Homo sapiens
  misc_feature (90)..(91): n is a, c, g, or t
  misc_feature (146)..(146): n is a, c, g, or t
cacatggtgcaggatcctgtctcttttatgaaagaaaaaaagaaaagaaaaatatacagctgcgaaaactgccaacaggtgtccacattnnctttcaggcccattcatcaggaaactgcaggccagagtgagacttgtgtggccanctgaaggttggcttgcttctttcctgg

SEQ ID NO: 664643 - DNA, 478 bp, Homo sapiens
gttcacccctagcttagccttatgacctgggctgtccttccccagaagctgtctggcccctttgagagacaatgtcttcccctagccacatggttcaaccaagtcatccattggcatctatactccagtgtcttaaaatgtggattaagggtggcctcacccttaatctcctctatgcatatctccttcttaattcttcccggttcctctggggaaataggtccggtggtaactctccatcttacacgacagtagagagcaaatagagttcagagaggggaacagtgtcgtgcacaaggtcacacgagctggtgtgtgggatgggtccccaggctgtggttccttcagcctctgcacatttccagtgcactcacatatccctgtctgatgggcggtcaaagcacagaagattcttccttgacctagagtcaggagatcagcgccctgattcttgtcatccccatggccctctgtcgct

SEQ ID NO: 664644 - DNA, 394 bp, Homo sapiens
aagtggggggcccctgtttggcttccggctgggggggcgggaaccagattttttttcgtttcccggtggtttccagtgtgtgggcctcaaaatcttggttaatgctccgtcccaaaaagccctcgtccaaaagggggcgcccttccatcctgtgtgtgggccccctggaaggtggcaaccccccctgggtgggtctttcaggggggccccttatgtgtaatggtgtgctccaaggggtcccttcctggggctcggtcccttggggggcccccaataagccttctgtccccgccagagtttttttttatgtgaagtgggtccaggcccccttaccggggttatctttgacgcccagccctgtcccctacccccagtaaaataaaatgtgcatcca

SEQ ID NO: 664645 - DNA, 192 bp, Homo sapiens
tgggaagggtttagccattatttctttaattttttttctacccctttctgggttcttcaaattggacttctgccggttttgtttgtttgttgtttgtttgtttgtttttaaagtcaaggtcttactctgtcacccagactagagtacagtggtgcaatcataactcactgcagatttgaacgccttctgggc

SEQ ID NO: 664646 - DNA, 419 bp, Homo sapiens
cagaccagcttgatctactgtcgctattataatattacagaccagctagatatactgtctctattatattctgacagacctgctagatctactgtctctattgtaacatgacagaccagctcgatctcctgtctcaattatattatgacagaccagctagatcaactgtctctttgtgtctattatattatgacagacctgctcgatcaactgtctctttgtgtctattatattatgacagaccagctagatctattgtctctattatattatgacagaccatctagatctactgtctccattatattctgacagaccagcttgatctactgtctctattataacatgacagaccagctagatatactgtctctattatattatgacagaccagctagatctaatgtctctgtcgacgc

SEQ ID NO: 664647 - DNA, 365 bp, Homo sapiens
tattaccgagagagggtagatacactgggctcttcatattcatggatttaacatttgaagttttgactactcgcgggtgaccccagtgttctgagtaatcaactcccagtgttctttgtcttcctttccagttcattgattccttactttgtggtcttgctcttctccctccactgcttagatttctggtccatataaataccttccatgcccttgcttctcacccttcttccatttacctggaaaaatcccagacttgagtgagcctggccactaggcttcttggaatgtggatctggcagctaagccttattagagaacatgactcagcagagcagactgagcctatcatacatgcacattaa

SEQ ID NO: 664648 - DNA, 492 bp, Homo sapiens
gcccgaggaagatactgagtggagcacaggagcagtcacctgctgccactgctactgccagctactgctgcctggctgcgtctgcacctctcgtgcctgccatgtgtacctgcctggcgcctcggtcgacctgcccacgactacatcatcacgacagaccactctagaacaccactgataaccctggaaccacgacaggaacctctgtggaccacatcgacaagaaatacaactagcaactgacgaaactatcaataaccaacaataaaaaacgtcataaaataaacaaacactaaatataaaaaacacttactcgatacacaacatagccaatcaacaacgcgaaacattcaaaacaaacaaccatctcacagacatccactcaacataacaccacaaacaaaacaaacaaaaaacaacagaaaaaccacatcaaaacacacaactttggacatcacagatatcacaccaacaaaaaccccaaaccaaaaa

SEQ ID NO: 664649 - DNA, 334 bp, Homo sapiens
  misc_feature (73)..(73): n is a, c, g, or t
  misc_feature (253)..(253): n is a, c, g, or t
  misc_feature (281)..(281): n is a, c, g, or t
  misc_feature (305)..(305): n is a, c, g, or t
  misc_feature (315)..(315): n is a, c, g, or t
acccacaatcggaaaatacttctgctcaactatgtcgcgcagattcagttcagcaatggttttaccgagaatnatgcgcgattgcagcagttggatctccggtgcagactcgggcgatgagttagggatcatatcgctcaggccgctgagaatggcgttgccctgtttttgctcaacctggaccagagtatctgcctgataaattggtgtgcttaacagcgagtaagcgacagatttcagcgtgaaataacgnggtcacgttgataataaacttacggtgntcccataactcgccgaccagacgnagcagatcgntctcattttcctgtagtgc

SEQ ID NO: 664650 - DNA, 234 bp, Homo sapiens
  misc_feature (156)..(156): n is a, c, g, or t
  misc_feature (169)..(169): n is a, c, g, or t
  misc_feature (218)..(218): n is a, c, g, or t
aatcgagctcgtaccccaccttatgcgtgggtgggggacctgaggggcaggcattggtcacctgggagggacactgtgcaaaggacacaaacaacaaattcagagagctcaaaaatccaaagccaaactggaggaagcccatgcaatgggaccacntcctcacacgcangcccttatgcctcctggctttagtggccagtgtgtagcaagtgattttntgtttttgtttttgtt

SEQ ID NO: 664651 - DNA, 141 bp, Homo sapiens
atggctgttactaaatggctgttacataaatggctgttacctaaatggctgttacctaaatggctgctacctaaatggctgttacctaaatggctgatatctaaatggcaactcggatcgccaaatccagcagccatttag

SEQ ID NO: 664652 - DNA, 182 bp, Homo sapiens
ggatctgagtgtaaacagacgagctagttttacaaggatcgtgtattattacaccaggactgagagtattctcagataccgtactgataacgccctcaacactcacctccggttgaccttgaaactctgcacaagcagaaagtgaaggctaggccaggatgatgacctgcatatagtcccag

SEQ ID NO: 664653 - DNA, 236 bp, Homo sapiens
tgtgtgggggacgccacagatggatgaggacggggctgacgcagctgatgggccgcccgggtgagaacacgtgaacacgcaggtggactagcgcaggcaggaccaacatactcaccagtgtcatcacatagtatctgaaaaaggtatctgaagcactcaaccaccaagtctcatcaaatactgcttccccaagcagctgtagcatgtacatctcttgctgcttccagcacgcatca

SEQ ID NO: 664654 - DNA, 302 bp, Homo sapiens
tttgggcccccccccccctggggtcccccccccccctgggttaaatttcccccccccccccctgccgggggtttttaccaaaaccaaggttaattttccccccagggccattgcccccccaaatgggggaactgggggtggggcccaaaaaaaaattgttttccccccaatgggggggccttttttccaaccaaacaaaacccctggcccttttggggggaacttttttttccccccccctttgggggggggggtggttggggccccattgcttttaaaaaaatttttttttttttctggga

SEQ ID NO: 664655 - DNA, 172 bp, Homo sapiens
atgaattccccaaaagttcatgtgttggaaacctggactccaatgcagcagtgctgggatgggattctggggaggtgattggctcatgaggactaatccattcatggactaatgggttctcagggagtggagcagttatcaccagggggctggttataaaagccagctttgc

SEQ ID NO: 664656 - DNA, 445 bp, Homo sapiens
  misc_feature (47)..(47): n is a, c, g, or t
  misc_feature (73)..(73): n is a, c, g, or t
  misc_feature (188)..(188): n is a, c, g, or t
  misc_feature (394)..(394): n is a, c, g, or t
gggacgttaacaacacttggtatggtcattctttttaatgttagccnttctatttttagcccttctgtgtagnggtgtcttattatggtttgatttgcatttccctaatgactaacaatgttgagcatctttttttttttttttttttgagacggagtctcgctctgtcgcccaggctggagtgcagnggcgggatctcggctcactgcaagctccgcctcccgggttcacgccattctcctgcctcagcctcccaagtagctgggactacaggcgcccgccactacgcccggctaattttttgtatttttagtagagacggggtttcaccgttttagccgggatggtctcgatctcctgacctcgtgatccgcccgcctcggcctcccaaagngctgggattacaggcgtgagccaccgcgcccggccgagcatctttttcaag

SEQ ID NO: 664657 - DNA, 4076 bp, Homo sapiens
atggatttcctgcttggagtctcaggccccagcgtctggcacaggcaggggcctgcggagctgagggcagtggaccagctgcagggagggcgacctgtatgcggagcgccgttcctgcgacatggaccgcggccagcccagcctggagcctgctgccgcggccccccgagcctcgggccggtgcgtgatcgcgcccgtgcgcgctgtgctccgcctgcgccgccgggtgtgtgtcctacgcaaacggcgcctcctgcagccgggtggggggcccgacgtcgggaccggggcgcccaggccgggctgcagcccccgggcaccgcgcgcggacctggaccagccaaagttcttcaccttcgacagccccgcggagctaccctccaggacgccacgcaagaagcgccggcgcagccgcctggtgctttacccggagacctcgcgcaagtatcggccgcgcgtggagcacaggagccgcgcgcagcgctgccttctgctgctagtcgccatcgtgggcttccaagttctcaacgctatcgagaacctggacgataacgcgcagcgctatgacctcgacgggctggagaaagcgctgcagcgcgcggtgttcggccagcccgctgccgtatcgcgcatcgtggcgctgatgcgggactacctggccacgcatgtgcacagtcgtccgctcctcctggcgctgcacgggcccagtggcgtgggcaagagccacgtgggccgcctgctggcgcgccacttccgctcggtgctggaggacagcgcgctcgtgctgcaataccatgcgcggcaccactgccccgaggcgcgcgccgcacaggactgccgcgaggagctggcgcggcgcgtggccgacgtggtggcgcgggccgaagcggaggagaagaccccactcttggtgctggacgacgtggagctcatgccgcggccgctgctggacgagctgcacggcttcctgcagccgcagcgctcccaccacttccacaacgccatctacgtgctcctcagtggcgcgggtggcgccgaggtcacgcgcttcgtgctgcagaacgcgtcccgcgcgctgcccctgcgccccgacggcttccgcagtgccgaggccgcagcggcgcaggcggaagaagacctgcgcgccagcctgctggctgtgctgtcccgggagcatccgctgtggcaggccgcggccatcgtgccgtttctgctgctggacaagcgggatgtggtcagctgcttccgggacgagatggcgggtgagggcttctttcctgaccaggcccgcgcggagaacctggccgcgcagctcagcttctaccgcgtggctggccgcgagtttgccgtcaccggctgcaagcaggtggtggccacggtgaacctcctgtagtggaggcgcaggacgggacgtttgggttgatggcggcagtaggagggcgaccagggaccttgtgggctggtgcaggcccctgaggtttctagtgaatttgtggctgcccggctggtgggtgcggatcagcttggagctctgcttccaggtccacacccgcctcagagtccggagtctgtccctgggggcggcaggacagcagccacctccctcccaaacttgcccattgccctgctgggcgtcccaggcatggtctggtgcgttctccctgtggccccaagaggtgggttcccatggtacaaggatgatctcagggccaacaattcccggggtcacacagctgggacgtgaccccgcctcttgggggtggtcgcgtgttgctcagtgctgaagtggggttctcattccggcccccctggagatgaccccggaggaggccacagccaaccatgacagtgctggggctctggctgccttctccacccaccccacccctcactcaggtcgtgttttcaggagctcaaggctggagtgtcttgacagtaaggggaggggagcggaggcggaggcgcctcaggcagcctctccccctccttcctggaccccccaaccccgggcccgccagccctggcttgggcttactgggtgaccgagagcccgcggggcaagcgggaggtgcctaggcctctccccatccccctcttctccgcacgtgggacccttagcccgtggccagtcccctggtcaccacgattgcgcgacctccctttccctggggccttttgtgccccgagttccgcccacccgcaccctctgcgcagagcgccctccccacgccagtcgaccccacaccccacactccccacgcgccgcctcccggaagccctcctggacgcctcccgtggatgggcccaccgcgcccacgggggctttaggggaaggtgctttgggcgttttttgcgccatgtctcctcggggccggcggttgcctcgggacggttctcgcctcctcccacagccccggtgtctgggacgcacccggcagccccgctgctgccgccttgtggcgcgcccggcccagccggtggcttctgtggtcgccgggggctgagcgcgcggctgggccctgagtcccccaggccgccccgatcctctgtccccgccgccggccccgctgcagtcccaacccgggcctgcccgggaggagcgcaggggcggcgatgaccagtcccgaaaggggctcagagggcagcgaggaggtttcacgccggtgcggggcgccgtcgaggtgggggcaccgcgaaggtggaggcggggccgcgccggaagccccgagtcgagcgcacacggcgggcgcccctggcaagtgggactcctccggccccgaggcctgaactcagcccggagaccgcgcccaccagcgccggtgtccccggaggggccccgctagttccctgagcagaggtcctgcggcttcccggagggtgtcctgttctctcccccgcctcgcatccattctcgccctggtggttggtgtctgtggtcgggggcgagggccgtctagtggagacggggattcaggccgcttgaaagtctgggatctctgggcggatggcagcggctccgcggagctcgagctcggcgcgcaggtcctgggcccagggcgggagcgctagcgagagggctgccccgtcctgcccagagggtcctgaggactcccgctgctcctggagtcttggggaggggtccggctccacggggtgggggtgggggctaccaggaaacctttgcctcctggggctgtgcaggaccggctagccagcgctgggaaccagggctgagttcagcccagctctgtccaccccaaccccagggctaggggaaggagctgggagaaggagccccacctctcccaggcgagtatctgtcccaggagcccacacagagggacacccagctctggtctggccttcgtgttggcttcaaggtggtaacagagagagctgcagagtgggggtgtgtttgccagtccctgcatgggtgaatgttggggtgcccactgctccccaggcaggacccccaggactgtcagctccccttcccacagagcacccacctggaggtgtcacctgccggcaagcgtgggccattcatccacctgtcagtcaacaacacccgctgagcatcggcttgtatcaaaaggtccagacctaaggggaaattttatctctttctttctttctttcttttttttttgacacagagttttgctcttgttgcccaggctggagtgcaatgacacgatctcggttcactgcaacctctgcctcctgggttcaagcgattctcctgcctcagcctcccgagtagctgggattacaggcgcccgccatcacgcccgggtaatttttttgtattgttggtagagacggtgattcactatgttggccaggctagtcacgaactcctgacctcgtgatccgcccacctcggcctcccaaagtgctgggattacaggtgtgagccaccgtgcccggcctctttttatttattcctaaaatattaccttgaggccaaattctgcgcttaaggagaatgtgcaccaagtgctggggtgggggctggttataaacgaggccacaaatcatgcttgttaataaattgtgtggttcaaatctgaaaa

SEQ ID NO: 664658 - DNA, 111 bp, Homo sapiens
tactcttaggattttttctctaagccctttacgaggtgatagtcatcgctgtccgaggtgtcatacagcaggttgtaggcgaacatacccctgaagtaaccgtagggctca

SEQ ID NO: 664659 - DNA, 273 bp, Homo sapiens
ttaagtgaaaaacatggggaaggggaaaggggaatggctgcttttgatatgttccctgacacaaattttgaatggagccccccccaccaagtgatgaaagtgttgaaaaacttaaaaaccaatgcttgttgggcaagaatgggattgaggattattttttctcaaaaaggcattgggaaggaattgagccagatttttttccccacggcaaacccctattgtagtaaaaaagttttttttactattttaaaaaaacagaaattgggagattca

SEQ ID NO: 664660 - DNA, 2518 bp, Homo sapiens
atggatttcctgcttggagtctcaggccccagcgtctggcacaggcaggggcctgcggagctgagggcagtggaccagctgcagggagggcgacctgtatgcggagcgccgttcctgcgacatggaccgcggccagcccagcctggagcctgctgccgcggccccccgagcctcgggccggtgcgtgatcgcgcccgtgcgcgctgtgctccgcctgcgccgccgggtgtgtgtcctacgcaaacggcgcctcctgcagccgggtggggggcccgacgtcgggaccggggcgcccaggccgggctgcagcccccgggcaccgcgcgcggacctggaccagccaaagttcttcaccttcgacagccccgcggagctaccctccaggacgccacgcaagaagcgccggcgcagccgcctggtgctttacccggagacctcgcgcaagtatcggccgcgcgtggagcacaggagccgcgcgcagcgctgccttctgctgctagtcgccatcgtgggcttccaagttctcaacgctatcgagaacctggacgataacgcgcagcgctatgacctcgacgggctggagaaagcgctgcagcgcgcggtgttcggccagcccgctgccgtatcgcgcatcgtggcgctgatgcgggactacctggccacgcatgtgcacagtcgtccgctcctcctggcgctgcacgggcccagtggcgtgggcaagagccacgtgggccgcctgctggcgcgccacttccgctcggtgctggaggacagcgcgctcgtgctgcaataccatgcgcggcaccactgccccgaggcgcgcgccgcacaggactgccgcgaggagctggcgcggcgcgtggccgacgtggtggcgcgggccgaagcggaggagaagaccccactcttggtgctggacgacgtggagctcatgccgcggccgctgctggacgagctgcacggcttcctgcagccgcagcgctcccaccacttccacaacgccatctacgtgctcctcagtggcgcgggtggcgccgaggtcacgcgcttcgtgctgcagaacgcgtcccgcgcgctgcccctgcgccccgacggcttccgcagtgccgaggccgcagcggcgcaggcggaagaagacctgcgcgccagcctgctggctgtgctgtcccgggagcatccgctgtggcaggccgcggccatcgtgccgtttctgctgctggacaagcgggatgtggtcagctgcttccgggacgagatggcgggtgagggcttctttcctgaccaggcccgcgcggagaacctggccgcgcagctcagcttctaccgcgtggctggccgcgagtttgccgtcaccggctgcaagcaggtggtggccacggtgaacctcctgtagtggaggcgcaggacgggacgtttgggttgatggcggcagtaggagggcgaccagggaccttgtgggctggtgcaggcccctgaggtttctagtgaatttgtggctgcccggctggtgggtgcggatcagcttggagctctgcttccaggtccacacccgcctcagagtcctggagtcttggggaggggtccggctccacggggtgggggtgggggctaccaggaaacctttgcctcctggggctgtgcaggaccggctagccagcgctgggaaccagggctgagttcagcccagctctgtccaccccaaccccagggctaggggaaggagctgggagaaggagccccacctctcccaggcgagtatctgtcccaggagcccacacagagggacacccagctctggtctggccttcgtgttggcttcaaggtggtaacagagagagctgcagagtgggggtgtgtttgccagtccctgcatgggtgaatgttggggtgcccactgctccccaggcaggacccccaggactgtcagctccccttcccacagagcacccacctggaggtgtcacctgccggcaagcgtgggccattcatccacctgtcagtcaacaacacccgctgagcatcggcttgtatcaaaaggtccagacctaaggggaaattttatctctttctttctttctttcttttttttttgacacagagttttgctcttgttgcccaggctggagtgcaatgacacgatctcggttcactgcaacctctgcctcctgggttcaagcgattctcctgcctcagcctcccgagtagctgggattacaggcgcccgccatcacgcccgggtaatttttttgtattgttggtagagacggtgattcactatgttggccaggctagtcacgaactcctgacctcgtgatccgcccacctcggcctcccaaagtgctgggattacaggtgtgagccaccgtgcccggcctctttttatttattcctaaaatattaccttgaggccaaattctgcgcttaaggagaatgtgcaccaagtgctggggtgggggctggttataaacgaggccacaaatcatgcttgttaataaattgtgtggttcaaatctgaaaa

SEQ ID NO: 664661 - DNA, 504 bp, Homo sapiens
  misc_feature (11)..(11): n is a, c, g, or t
  misc_feature (40)..(40): n is a, c, g, or t
  misc_feature (77)..(77): n is a, c, g, or t
  misc_feature (99)..(99): n is a, c, g, or t
  misc_feature (103)..(103): n is a, c, g, or t
  misc_feature (119)..(119): n is a, c, g, or t
  misc_feature (124)..(124): n is a, c, g, or t
  misc_feature (149)..(149): n is a, c, g, or t
  misc_feature (151)..(151): n is a, c, g, or t
  misc_feature (154)..(155): n is a, c, g, or t
  misc_feature (163)..(164): n is a, c, g, or t
  misc_feature (178)..(178): n is a, c, g, or t
  misc_feature (188)..(188): n is a, c, g, or t
  misc_feature (193)..(193): n is a, c, g, or t
  misc_feature (205)..(205): n is a, c, g, or t
  misc_feature (504)..(504): n is a, c, g, or t
tgatttaaaanattttattttctttatgcaggtaggcagntagaaatttcaaagtctaacaatgacattcttgaagngggcacagccttttaaactcangctntgtatacagtaacctnggggnactggttcccagatcttcactttcntnaanncacagggnntgtccttttctttncagagggctnctctnatattccatcgncagtttttaagaaagaaggtggattacaatcagtgctccattctggtttataccgcttattgttgagggtctgaaatactatggctactagacctgcatactccaagttcatcccctttattggtgccgtcgagtaccgataaacggcgctgggaaactatccagtctctagaagagcaacttaattctagacttgatagaatcccatattgcaccggcgctggcaaaatgtttaacctttatctaaaaatgacttcatgtgacagtaaacacaaaaaacatagacccatgatgacgan

SEQ ID NO: 664662 - DNA, 436 bp, Homo sapiens
  misc_feature (11)..(11): n is a, c, g, or t
  misc_feature (40)..(40): n is a, c, g, or t
  misc_feature (77)..(77): n is a, c, g, or t
  misc_feature (99)..(99): n is a, c, g, or t
  misc_feature (103)..(103): n is a, c, g, or t
  misc_feature (119)..(119): n is a, c, g, or t
  misc_feature (124)..(124): n is a, c, g, or t
  misc_feature (237)..(237): n is a, c, g, or t
  misc_feature (239)..(239): n is a, c, g, or t
  misc_feature (242)..(243): n is a, c, g, or t
  misc_feature (251)..(252): n is a, c, g, or t
  misc_feature (266)..(266): n is a, c, g, or t
  misc_feature (276)..(276): n is a, c, g, or t
  misc_feature (281)..(281): n is a, c, g, or t
  misc_feature (293)..(293): n is a, c, g, or t
tgatttaaaanattttattttctttatgcaggtaggcagntagaaatttcaaagtctaacaatgacattcttgaagngggcacagccttttaaactcangctntgtatacagtaacctnggggnactggttcagccagagtctaacaatgacattcttgaagggggcacagccttttaaactcaggctatgtatacagtaaccttggggaactggttcagccagatcttcactttcntnaanncacagggnntgtccttttctttncagagggctnctctnatattccatcgncagttttcgtcaggagatcgaaggttgtagatgtctgcacgtggcttccttggaggtccaggggtgactccctcttccaaaatccattctgtacccgctggctgctctaaccacacacaaaacgggaacttacgggcaggaca

SEQ ID NO: 664663 - DNA, 803 bp, Homo sapiens
caacgtcctgtgacactggtcagggtcttgtcgtgccccacaagaaatcccacaggctgtggaaattgtgttccgcgtctccatttggggtgataattatcaaactgattaatcgcataagtgatacagcgtcatccgaagatgacagttcgtgcagatctcttcacccgcgggcagaatcacacactcacatggaacgccttgcggacccacactttcactcgcgctttctttccacacaggggggtgctcgcgagatcataagggcgcttttctccggcatatgaggagggagagtcttttggtgtccttcccccccctgccccccccaccgcgagggagcgtgtttcgataacaacgaagttctaaatttgataaacctcctcggaaggatagagataattcgaagacattgtcggggagagcccccactctcttaagacatttgggtccgcaccacccgctttcgaaaaggggtcaggctcttggttcaagttatgtatctcccttacgcaacccactgttgtgaactgtacatatagagtaagttcttaatctacattgggtaccgccccccctcgtgtcatgatatcatggtgtgcgttgcacacaaatgtccgggggatgcccttcagaagttgtctttaaatcctattccggagggccagaccgccggaagagtgtctaagggtcccgtaacaagatcatgttgacccccacctcttcatgataaggtctacaccccccgctacgccacacagttctttgccggtgaccaaagattttctcagcccccacaaaca

SEQ ID NO: 664664 - DNA, 943 bp, Homo sapiens
acacacaatccctcgtacagaacgatacgaagtacgctccacgcgaggtgtctggtgcattagtgggttttggttcacacctgcctttggaccagttcactccctctttcgtgcgcgcccggaaattgctttgcaggacaagacccttcccgggggcacttctttaagcacatgggagccttttctctggtccccgggtgacggtgtctacccggcccctggccgcccctgcaggtcccattaggcgcgatgaggcgtttgcaacttcggcccccctgtaagtgcgcctccacctgggtcctcgcgtcgttcaaatccttgcctgctggccggcacctatgcttctgccccctggtgcggtgggctgcatcaacagcccgtggcgggtgctccgccccgcgtgttctctccccctctcccggggggtaactgagccccataggtggcccccctgcacgcaatttggcccctgccgggccatctcctgtggacctcagttattctagggaccagggcctctggtgtccaatcgtggggctcactccatcagagtgggtccccccccggagggcatcccccttgccgggtcccaagcgcggccccccgtagagatcgtccacgggggctggtaaaaattggtgtgtcaggccatctggcataagaatggggtcggactctactcgggcctcgagttttttatcaggcgctcaacccctaggttgatccccctcgtggtcgggagatgctatccaacccctgggtctatcatcaacgagtgggggagcaaacacccagggtgtcgccccagtctccagggaaacacatggcgtgtatcccgcaccgacggattgcagtcgcgtatgtcagtcacgaccgacaccctccacccactcccggggccccccccgggtgcccaaaaaaaggggttacagcccacatgaca

SEQ ID NO: 664665 - DNA, 541 bp, Homo sapiens
tctgatagatcagaaccgccgtttagacttatattcagttctaaggcgattgtgctacgatgcgtaaggtaaagctgagaacgaagggagccccagtactggccagcatgagatctacaggatatacctcatcttgcctatttctgataaactttcttttacgaataaagatgcaaatatttgcttccaaacagttttctcaaatatccacaacatccctggccaagatatatgactgtaaatgaacaaaaagagaaagcatgtaccaatttctaagtgatgaaagtattattactacaatctcacatttatgtagcctaatcttcaagtttaaaatatcttactagttctgactgaaccagaaaagaaatctataaatcccaggaccttatcgtacatttgggtcatggcccaccattttgcttcctgtggcagtggtaagaaaagaacattcctctctctttccctacaaaacaactcattttgttcacaggaatatggaggaaggcatataagaaagtactcagtgagctgggtgggg

SEQ ID NO: 664666 - DNA, 1426 bp, Homo sapiens
ataattcaacgcacgtgctcaatcacaacttttactggtgctctctatattaccctacctacaagcctcagagtacttcgagtctcccttcaccatttccgacggcatctacggctcaacatttatatgtaagccacaggacttccacggcacttcacagtacattataggagtcaagcttctcctcgactagtcgtgctctcactcctgccaacctaagtagtttcacgttctacagctccgaacacagtcacttttgcgcgttcgcaagcccgcgcgcactgcatacgtggacacttattgctagcactgctgtgttactgagctactctatcgtggtacatgctcgtcgcacatcgtatctacagatgcacgcgcgctcactctcacccaccacaaacaacacacacacagccacccacaccacagttacacacaacacacagcgcgcgcgagagggcacacgaccatcccacgacggcgagactgctctcactactcccaccgcgcgcagagaaccaccaagacgactcaactggtgcccacacctcacacacagcgcgacactaccccgcggcagcacacacacccggagcgccacccaaaaaaacaagtgacaagcgcccgaggactatgagaccagaagcgccacatgtcgagacaacagtagcgaccccctggagacccgcgccctgacacacacaacagcggacacacacgagaacaacggggggccaaaacaaccatcgcgggccgaacgccgcccacgagagcggggaacacagccaacacggcggacgacaacaacgaacaccacacacgacaaaaaaaccacacagccccggcgagcgcaccggcgacgaaaaaacacaaaacaagcgggcgcgcgcaccgaccaccacaccgcaaacaggcctccaacagccggcggcgccacctcttcaccaccgacgagcgggcacccccaccccccaaggcggcccaaaacgcacccgcgcacgcaggacagcccccccaagacacaagcacagcacggcgagcaaaagacaacgacgacgcgacagtactcccgcacacagccacccgacgaccaccccgagtgcaccaacacaactatacaacagcccaacgcggagtcgaaaccagccacaattgtacaagagaaagagtcaacaaccaagctgcgcgccaccacactgaacaggcagcgacccgactacgcacccccaccccatcacccgtgcccacagcaggcccgccaccatacatacaagccagcaccacagccacccgtggagacaacgacgcaacacgtaaggacgacagcgaccgatatcacaacacaaacgcagcaacaacccggcaatccccacaacgcaagcaccccacgggccagcaagcagggagccaaccagaagcaaaccgg

SEQ ID NO: 664667 - DNA, 801 bp, Homo sapiens
  misc_feature (527)..(527): n is a, c, g, or t
  misc_feature (535)..(535): n is a, c, g, or t
cacgcgtgcgtccacgcgtccggaagaccaaggactcataggaacgatatattcggcatttgagtcccacgattgtcagattttgaatccaggtggagctggcggctgagtgcatggttagagtcactcccatgtcctcctcagacttcctacatgttcacatcactcatgaggatatattttgccctaccattggaaagttatcatgtgatatgatactatccgtgtgttacatttagcttgtgttaagcatctgtcagctctgcacgctagaatgttagctctctaaagtggcagaggtagctgtatcctgccacagttggtgcccacggtctgggaagagttctgtgggcagcatggtggagtacactcatggcatttggtgagagttgaaggcgccccctgtcaatgccagggactctcacctcgcctgagctatcttggctgtggggtccagtgcggtgataccctgtgtgaagcatcaatcgctagactgaaatgtccatgacctgtcctgcccttccagnggtcgagntgttacgtactgtcgtagcgcacatcacctagactgcgcagccagtgaggagcgggccatgcggcagcagcagcagtgcgtgagccagaacgggcagggtggaggccgtgcccaggggatcctgctgtctcgcacacttgcatgttgaacgcacagaccagtcacggaggaccacgtcctggcggcaggagaagatcacccggaccaaggaggaggccctggagctgatcaacggtacatccagaaagatcagtcgggagaggagg

SEQ ID NO: 664668 - DNA, 1565 bp, Homo sapiens
  misc_feature (796)..(796): n is a, c, g, or t
agcggagaccctgccgcctgagagagagcacagcctggtgggttctggggtctacggcctaggggcccggggaacgtttgcgccgccgcgaccagtgctgcgatcccgagccgcggcctccatgccccgaggaccaggggatcggcgcggcgccctgccctacggaacccccgcgggccacgcagccagtcgtctcgccgctcctccgtgcttggacacaggtgtttaacgccttctaacacatgtcactcctatcaacgccaccctggcttacactgccacgcttacttccgcccccctccacccggcgacaccacacacggtccccgacctgcgccacccttaaccacccctccgggaacattgaacgcacaccgagacaccgctccgcgacacagctcgcacacccccccacgccgcctccggcgacgaccccgccactccacaccgacctccccggcccccggacacaccacttacccaccaccccctacgcccgactcccccaccccccgtctctggaccacgccacaccctgcctcctacccccaactccttctccccttctacactgcctaaccacaccctcgcgccgccttccattggccccccccactatctccacaaccctccaacgcacggcccctgcaccccgcacactgctgccgacacacacccgctctgacacccccacacttaacaccacccacttgcacccggccccacactaaacccccacccacacttgaaacacgcacacggccaacacacctccacttcgccacggccaccgccncaggcccgcgcccccacgcccgaacccaccaaccacagggccccaaacccacgcacacacctgcgacgatcccccgcgacacacacgatcgcccacgcaccccacacctaactcctgacccacccacggagcgcccctgcccatcgcgacccagagcgacgccccacacacattaacgcgcggcgcacccccacacgacccacgcgacctcggcgcgagcaccaacaagccgacacttacggtacggaacacgcacacaccaccactacacgcgccgacccaccagcactgtccccacagacgactaacagcgcccacacagcgcgctacaactcgcgggaccacaacactgcgcgcgccactgcgccccctaccgcctggcgcccattaggacacttaacgcctcaggaacgagaacggccacgccgacacacgacgcgcgctctactaccacacgaccgcgcagccctcacgacatacctaggacgccgcacgtgaaccagcgacgggaagcccccgaccgtaacgcgccgagacacaccacggcgaacccgcggacggcacaaccacggaaaccgtccaaccgaacagacggggacacttcgccgggccgcgagacagcgagcacgcgggcgcagcagcacgacccgttagagacacgcgcggacagacccgtggcaacgacagcatgaagcacaccggccaccaaccacctacgagcacgtggcgggcgcgcaccgatcactgacggactgcagcgacgccccac

SEQ ID NO: 664669 - DNA, 190 bp, Homo sapiens
caaattactgcagcataaatattggaggctgagacaggaggggtcagtagacattgtggccccatccgaggacacccccggacagggccaaacaggaaggatataaccccacccactttgccaaagcacagcccccacaccacaaacacatacagaccctacagagcatcaggacagcaacagtcgacgc

SEQ ID NO: 664670 - DNA, 1197 bp, Homo sapiens
agtcatggccttgggattaacagtagcttccgacatggtccagcctacctttcgcaattatcttgcagcctctatcagacccagtatcagaagttacactgaagacagtgcatgaaagacaacatggccataggcgaatacatggccgtattcagctgtaccagtccgccattttgctaccaagaaagccaaagccaaagggcaacaggacagtcccaaaccagagtgaactattaatgctgccttggctagaggatataatcaacttggaagaggtgaatgacgaaactgaagtctgtagatagaacgctctcaacggcataatttcactcagactctcaatataaggacctcaccaggatacccttgacaagactcgctagtggtaacctgctgcacgcgcgacgctatgctctaaaccacgtattagccagatctccatgaagtcgccacagcctgatctcggtgcaatatggccagcttccccagagtgtacagctgcagctatcaaggctatcagcacaacgtggactgaatctgaacccagaagtggcagggacgctaattcgggtacccattccccaagtaaccagagcagcccagcgaacatgctggtgcacctggacaaacagagcaccatcaacggccagagactctttacggccaggttcgcaccaagctcactgcacaagctggtcgaatttccaaggctaccgctcagaggaacaccatataggctattcgccgaagccgactacgccatacagggcggacttcaacatcgttggacgtaacctggactcggtcacttcggcaagtgttcacaccaataaagctcttgggatgcacagaccaatgaggcccgagcacactctcccagacagcccagggattatggccgcgaacccccacgcggtcggtcgaccatagcggcacaattctgttcgattcccaactttttcgcaaatacttcgtcaccccgacgtgcatcaaatccactgtctcatgcatagtcgacacacatcagcagggaaccaccgacagcgtgaagtatctaccaaaacataacgagtaggtgaagatgacttcatcaaacaactgcggggcgcaaccagaccatcacgatcatctacaaactccaaccacaggctgccggtgcctcaacaacataactataatgatcggaactatatgaag

SEQ ID NO: 664671 - DNA, 1340 bp, Homo sapiens
tagcgtctagagacgccgaatggtggcagcccctctgagagcccgcaggttggggtccgcgcactgctgggtgccggccagctaggcggagaatcgaggaggggttcccgggctcatcgcagaggatggaagggcctagattactgaccaatgacaaacagtgtgggcttaattgtcctcagtcttcgagggagagaatgtggacgtttagcatttgaacattgaatatttgagattgaagatttctgaataatcgccccttagcaactctggtactgtaccgtacttgcattactgtccagggtaggtggcattgagctatatatcaactggtctacacgaggggaggtgggaatgacctgacattgcttgccgcagattacagagaactatgaatatcccaatgtgggcagcaaccaggttagacaaaagaactaaagcacgtgtcactggaaaggcatatgagcctcattgactgttccagcacagtacctggaccatggttcgacaccgcaggaacacccacagacagcgcgtcctgtgagaccctatcccgctactgcaacgtcacagccgcacagaggccactagcggcacaacgctcgccgaaacacacactagacacaataccagcgacgggatcccacggcacgaacgactccacaacagggggcagcaggcaacgaacaatctcaacgacattaaacttcacaggaacgtttggaaaacgttacgcacacgtaggtaatggggcaaaaccaacgaagggaccaccaattgggagaacataccaaaagagccacagaaaaatatcacaaaacaggcacagattaggacaagggaacaatgcagagcaacaggaagcgaaatcgagggagacaacatacatacgaagggagagaaacaatggaacacggaacgcaagacaaacaaagaagacgacagagacaaaagaaaacaaaagagcacacgagaagagacacacgataacaggggacgaagaccaaaaaaacgcaaaaaaagcgaaacagaaaaagagaagagacaaacacgaaaaaagaatacaaccgaacagagaagagggaaaaaaaacagagaaaagagcaacagcacaaagagacgcacacaaaacgcgggaagcagaggaacgagagcgccaagagaagagaggacggcaaagagcagagaacccgaacagaagaacgaagcgacgaaagaaggacgacgagacagaaagacaggagacgcgaagcagacagacaacgaaacaggacgcggagagaggcaaaaacaaaaaaggaagaggaaaaagagagcaaaagaaggaagagagcagaagc

SEQ ID NO: 664672 - DNA, 146 bp, Homo sapiens
caaccaacgcttttatcactcgcgtgagtggaagtctgtgcgcgaccgggtgatacttcgcgatgaaggtcttgacatggggcaccccgattacccgatcaatgggcgcatttacatccaccacatgaacccgatgcagcccatcg

SEQ ID NO: 664673 - DNA, 229 bp, Homo sapiens
tttatgagctggcctggccctgcccacaatacccaccggtgtaagcacacaggccccagacagggctggatggcactgaagctggtagcctgatctacctagcactgcagctgggctgcttcgccctcaccaagttctcactgggcttcctgcttggccaccaccattgtgcgcactgctgcgctttgcaacgcctcatgggccccgaaaccttcattaacgaaccggg

SEQ ID NO: 664674 - DNA, 163 bp, Homo sapiens
ggtcgacgattgagactctacctctcacccaggctacagcactggcacaatcagagctgactgcagcttcgaactcctgggctcacgcaattctcctgcctcagcctcccaagtagctgggactatcggcatgctctaccatgctcggctaattctttgtttc

SEQ ID NO: 664675 - DNA, 283 bp, Homo sapiens
  misc_feature (44)..(44): n is a, c, g, or t
  misc_feature (53)..(53): n is a, c, g, or t
  misc_feature (55)..(55): n is a, c, g, or t
  misc_feature (64)..(64): n is a, c, g, or t
  misc_feature (70)..(71): n is a, c, g, or t
  misc_feature (77)..(77): n is a, c, g, or t
  misc_feature (101)..(101): n is a, c, g, or t
  misc_feature (112)..(112): n is a, c, g, or t
  misc_feature (116)..(117): n is a, c, g, or t
  misc_feature (126)..(126): n is a, c, g, or t
  misc_feature (133)..(133): n is a, c, g, or t
  misc_feature (143)..(143): n is a, c, g, or t
  misc_feature (165)..(165): n is a, c, g, or t
  misc_feature (205)..(205): n is a, c, g, or t
  misc_feature (228)..(228): n is a, c, g, or t
  misc_feature (243)..(243): n is a, c, g, or t
  misc_feature (256)..(256): n is a, c, g, or t
  misc_feature (271)..(271): n is a, c, g, or t
tccagtccctgtaatttttctatatacgagtgtttcgcatccanataaagagntntacagttcngtgctnnagtgancagatgcgagaatgtacgagaaancacatagagcnacanntatgagatnaataaanaacacaactncactcgcgtgatgtcagagagntagagttactcagagtactagtttttaaactgttactganatttaagaaaaatatgtggaaanaggtatggaaaatangatgaaaagaganataattttaccaganaatgcagtttgt

SEQ ID NO: 664676 - DNA, 414 bp, Homo sapiens
ctgtcatgcagtaaaacatgtatttaaaatgaaaattgatagccaggactacagagccccgaattaataccaatagaagggcaatgcttatagattaaaatgaaggtcacttaaacagcttagagtttagttcaaaagttgtaggtcattcacataatttgaaggcgatcttttaaaaagagattaaaccgaaggtaattaaaagaccttgaaatccatcacgcagggagcattgcgtcatttaaagcctagtaaacgcatttactaaacgcagacgaaaatggaccgcttaattgggattggtaggataaaaccatttggagaagatagaagtttgaagtgaaaaactgtaatacagaagtacgggaaggcgaaaaaaagaattgagagaatatagcgaagaaatgggtaccg

SEQ ID NO: 664677 - DNA, 579 bp, Homo sapiens
  misc_feature (88)..(88): n is a, c, g, or t
cactgtgtacccacgtcgtgtggaggcgataggtgctcagagggtgacacagcgggagcaggcaaaccaggaccactgctgtgacagncggctcttgttggtctcaaaccaaggccccgaccacttgctttagatctactcgatagagtggttcagcttgaactccacgccaggagcccaccccaactactgaaactagctgaggtccaagtcggtgcagcaggcccaggtgccgggagaggccatcctgctcgccaaccacatctaccgcctgcacgcctatctccagcgcttcgcctagtcctcccaccacaaacgtgggatccgtgcacgttaacgattactaggactatgcagaatcctgggggtgtggggttgcgggggggcggtgctgttggttggtgggaggggggctgcgggggtgtcgtgggtcgggggctggggtcgtggtgcggcgtgttctgtcttttcctgtttcgtcgttttctgtctctttgttttggcttctcttttctttgtccttttttcttcctctcgtttttctgtcttttcgtcctctttttctgctccttccgtctt

SEQ ID NO: 664678 - DNA, 349 bp, Homo sapiens
  misc_feature (134)..(134): n is a, c, g, or t
tcggggaactccctctcctagccaagggaagccattaggactgtaccatgcactccggcccagatactgtgctttcccatggttttcgcaacacacagaccaggagattcactccagtgcccacaccaccaggntcctcggattacagcacaaaactcagcagcagtttgggcggacactgagctagctgcaggagtttttttttttgtttgtttgtttgtttgttttttctccataccccagtggtgcccagaatgctagtgagacagaatcattcactgccctgggaaagggggctgaagccaggggagccaagtggtctgggcttgggacttgaactcttacctgg

SEQ ID NO: 664679 - DNA, 163 bp, Homo sapiens
  misc_feature (66)..(66): n is a, c, g, or t
  misc_feature (130)..(130): n is a, c, g, or t
gattggtaggatctactgaataagaatgagttatctatttacattatctcatttcagaaacttaancttttttgtgaactatgtacactaagcagattataggtacactactgtagagtatgatacttcncaaaataatttaaatatcggcaagaaaaagagt

SEQ ID NO: 664680 - DNA, 236 bp, Homo sapiens
ctgtggctggttgtaagcaggacggagagtgttagctgagggatggattgtacaggtaaggcgagtgttagcggccgtgtgtctatcacagagaggagagaatatcgggcgggcgtggtgtcagatgcctgtagtccctgctagtctggaggctgaagcgggaggctcacttgagcctgggaggcagaggttgtagtgagctgtgctcatgccactgcaatccagcctgggcgacc

SEQ ID NO: 664681 - DNA, 224 bp, Homo sapiens
ctggttctgaggatcccctaaaaaattacggcaggtacagtggtcatgctgtatcccagcactttgggaggcgaggcaggtggatcacaatggtcaggaaattgagaccatcctggctaacaaggtgaaaccctgtctgtactaaaaatacaaaaattagccgggcgtggtggtgggcgcctgtagtcccggctactcgggaggccaaggcaggagaatggcat

SEQ ID NO: 664682 - DNA, 141 bp, Homo sapiens
tttagttttttttcctgaaagcaaaaggaaaaaaaaacccccctccctcaaaaaggccaaggtcccgtccccctgttgtcggtgatttgtttgtttttttgaaaggttgaaaattgtgtaataaacttgatggcgctgtca

SEQ ID NO: 664683 - DNA, 117 bp, Homo sapiens
ttcgactaccttcctattatgtctagatatatgtatacgggtctacgcattagcagaaagctcatcaagtaggcacgagtctcgttaagttcctgatatgtaaatggtatataacca

SEQ ID NO: 664684 - DNA, 279 bp, Homo sapiens
tcagctggccccaagaattgttaatggtcatctgtcagtggactagcacatggcagtctgcttggaacccattcagaccaatccagttgagcggtgtgtgggctggggggctcttctcccccatcaacggaatccttggtgtgcaccaatcttccccagagctccggagcgccctcgtcctcacttgcaggtttgggcgcaagagcttgcaggaagcccggagcacagatttcgttctgaccttcagttcactttgtcgcccttgggggccagctggag

SEQ ID NO: 664685 - DNA, 774 bp, Homo sapiens
agcggggctggtaaccccgccagcggagggaccgggccgagcccgacggacccctccgagtgtctcctggggcccagccgttggtaccccatttcccccgggtccggtatttggggtggtctctgtctgacccgagatcatctcacacctgtctcagggggacccatcttgggacgtgaaactttttgaaagtttagaagcgaacttactgtgggctctcacgtgtgaatatgtgtctaggtgcatccattaagccatgagtgacttcacgcagttcgaaattacagttttgtcagcgcatcaacatatccttatcctttatggtctggtattgcttgctcaaacaggtggaaacatttttaaagttgcttttgtagcagagttaaacaaatggctgatagtggcttagataacaaaatccacaaaatgccccgactgttcatctgcttctcagaacagatgtacttatgtgtatgttccagcaaaacaagggttcgtccagtatcggtggttggcacctgtcaccagacatcaagcatcggtagtgcacaaatcctttgctctcacctgggagcaggaacacatgtacccacatcttcacggagatattaacctccaggacagaattggcccctccagaacccttcaatgtgcgagacgaaagcatctagcaacaatgggggtcgggccactttaccgcaagcacactttccctccataagcgattggcacggcgcgctatgaggaaatcttaccttggggacctttgggaaa

SEQ ID NO: 664686 - DNA, 141 bp, Homo sapiens
tgcagtgtctacctagagaagggaaagtcaacatttcctggaataggctaggtggtctggggttccatccatccggacataggaagtagattaactggaagaatggagagagaatggaaaaagtgggcgcatccagacttg

SEQ ID NO: 664687 - DNA, 268 bp, Homo sapiens
  misc_feature (121)..(121): n is a, c, g, or t
cactgttatattctatcagtggaagcacagtgaagttaagactgctccaaacaatggatgtgcagagatgagatctgctgaccttggagaggccctggcacgtgcagtcatcccccagtgncagaaggatgaattgcgggagactctcaaatccctaaagaaggtcatggatgacttggaccgagccagcaaagccgatgtccagaaacgagtgttagagaagacgaagcagttcatcgactgcaaccccaaccagcctcttgtcatc

SEQ ID NO: 664688 - DNA, 764 bp, Homo sapiens
ggccacgtgttttatgggcatgatacatatataaatatatagatataaatatatatgaatatatttttttaagtttcctacacctggaggtgcatggactgtacgaccggatgactttatatcgtatacagatttcgcacgccaaacctcggcagcttgggggaagaagaaaaatgcctttctgttcccctctcatgacattgcagatacaagaagatggaaatttttctgtaaaacaaaacttgaaggagaggagggcggggaagttgcgtcttatgaacttatccttaagaaatggtactttttatcgtaagacaaaatcaaacaggactacttaaacattcgtcatattaagaaacaacagtttatctagcatttgtgacataccaataatagagtccatgtatttatgtggaaacaggttttagggaaactactcagaattcacagtgaactgcctgtctctctcgagtggattggaggaattcgtcggtcagagcagtccccttttatctccttccacgggccagggaagcgcgccgccctcactggctttgtgaccggttattctgatgacaactggggcggatcgacagagtctcccttttccgcacagtgggtcggcttttcaaattactttacggtcgaatgtctggataacatttcacttaagcagcggtgaatggtcgaaacactgggctccaataaactttcctcgaaaggacccatctctcctgaaaaactaagtgtacaaggccactagc

SEQ ID NO: 664689 - DNA, 295 bp, Homo sapiens
gttcacattgaaccgcctgaggattaaaatcacagttgtttctgagaaacagttctccaaaaggtatttgaaatatcttaccaagaaataccttaagaagaataatctccgtgattggctacgtgtggtcgcatctgacaaggagacttacggaacttcgttatttccagattagtcaagatgaagatggttcagagtctgaggactaattggcctctgcttgtaatacaatgaaagtattctaaagaaatataaaattggactttatgagaaaataaaagtcgatttcactcta

SEQ ID NO: 664690 - DNA, 998 bp, Homo sapiens
  misc_feature (255)..(255): n is a, c, g, or t
gatacagcacgaaggctcgaggccctagaccagagttggtggctggacctcctgctgacttccgagttgcgatgctgtacttctctttgttttggtgcggactcggcctctgcagagactgtgggtcggcgtgggtcaggaatgggcactatcgcccatcaggcatcagaagagcgtcagggccaggccctcagcactggcgtgaaggcaaagcagggtgcgtggaccacgggcaggagagcctgtcggagcagntgagtcctgatcatgtggcgaggttgctgacagagggacgatccggacctggctacgatgtcagtgagcctggaggctcatagacctcggacgaagcttctgcatgtctgatcctcgctgcatggaaggcccgtggtggtcctgagcgtgaagcaaccagagacctcgggggggtaatcctggcaagagatacgtattgggggagccaagacgggggacgtgaccagatggcgacggtagcggcaggcgatggccaggggctcgaagagacggtggacaccggactacccggagcaggcgcatgcagtccacggtcacaagctctaccaccgggccccgcgagcagacgggacgcggagaccaagcaccctcgcagcctcacaatggcgcctctggcgacgtgggacgtgcgcagagggggctggagttggaacacctgataccctgtctgcccgggggcggggattcggcacggacattgtgctaaaattgccctagaaggtagactcaaacggctcctcagccgcgcttggctgccgcgagacttccggggggcaccttagaggtcgactcgtcgtccagcccaagcacgaagaaatcacagaaccacgcaccaccgtcacacacgtgctgtcaccggcgactccacacagcgcaaccatacacggcagttgcagccctcccgctcgcgctcgctaccacccttacacaacagacaaaacacaaacaacacgcaaaaaaga

SEQ ID NO: 664691 - DNA, 387 bp, Homo sapiens
cacgtgcttgctgggcttagtatggcgctgccctgagttcttactgatctgagcctactacctctgctggaagcccagatccgattgtgtgccaacctagtaccggtgcccattaccaacgacattgtgtaccggatcactggccagtgggtgcatatcgtatcggcctttcttacctttaacatgacagatgatacgatctttcttagagagtaccagacactgtcagaactcagggcttgtatgacttcagctacctgaatggtcagcgatagaatgggaacgtcgtcagagtctatggaggccgagaacatgttgctcacctgctgtttattagggacaccaagagcatgaggatcgttactacctggactatgagatctgtgg

SEQ ID NO: 664692 - DNA, 569 bp, Homo sapiens
  misc_feature (190)..(190): n is a, c, g, or t
agtacaggagccttattaacgcaaaaagggccctgtgctttgaattcccccccacaggaatgttgcggagggcaagaaacccgcgctggttttcgggatgcagaactgtagtattcaacaaagacccaccagcggttatgcaggtggtttgagctcggcctatgggggcctcacaagccccggcttaagntacagcttgggctccccctttggttttggggggggttccagttccttcaaccgacccagttcctccagggccgtggttgttaaaaaaatcaaaacacgtgatgggaagttggtgtttgagtctttttacgtcctgcccaagtgaaaagttggggtagcccctcccagcctacccctcttgtgttgccccagagccttggaaggaggccgtttttcagggtagccttgggtacaggagacccccctgagggtcagccctagccctcagcccccctggggagtttaattcctggggaccccccttgcccatgcctccaggtacaaaacaattcaattgctttttttttttggtccaaaataaaccctcaggtagttttgca

SEQ ID NO: 664693 - DNA, 357 bp, Homo sapiens
ttttccacccatttcccccaagctcgggttttcggttgggggaaggccccccctaacggtgagggggggaactgcggcccattcttcaaatccaaaaagggcagggcctttttgttcagttttaaaaaacccccaaaaagggagtaacccaaaccctttgatcccagaccctaaccccggattaaaaccaccccaccctttcaggttgatttaaaacacccctggaaaaaaagggttgaaatatcccaagtgggaaaaacccggtttttaaaagtgccagcccccttttgaaaacaaaaaaggggcaggccagaaatggcccagggagaagggttaaaaaaaaacccacccccccca

SEQ ID NO: 664694 - DNA, 374 bp, Homo sapiens
agctcataccccatgccgtatgacagaggtggagctagaaatgggaaatggagaaagaggagaagagattgctctgggaacagctgcaaggataagagagctcaaagcaggccgaaacatccaggctgcaggaggaacttgctaagctctccgagaaactgaaaaagaaacaagcaagttattgccgtctgcagacagaaaaggagactctgtttaatgacagcaggaacaagattgaggcaattacaacaccggaaggaagctgaatcacaaagcccagttggctcgaacccagaagctgcagcaggaacttgaggctgccaatcagagcttggcagagctgagagatcagcggcagtaggagctttagcctg

SEQ ID NO: 664695 - DNA, 259 bp, Homo sapiens
gggcccgatgaagatgctgtttcgtagtctattttgtgtcactggagattcgtacaagctcaggctgagtttaatctttcattggggcagggggtgatctaaaagactctctacgccgacttctattgacttgggttaatcgtgtgaccgcggtggctggcacgaaattgaccaaccctggggttagtatagcttagttaaactttcgtttattgctaaaggttaatcactgctgtttccccgaaaacggcatcttcat

SEQ ID NO: 664696 - DNA, 517 bp, Homo sapiens
  misc_feature (236)..(236): n is a, c, g, or t
  misc_feature (510)..(510): n is a, c, g, or t
tcgacctcatttaagaaactaatgagtactggtttgtaaagaattatcaacattatccattccatttatgaagaagaggagaacagtttattagctgttctcctcttcttcataaatggaatggataatgttgaagaggagaacagctaataaactgtattgtaaaatccatatgttaagtgtgtcttgaattttgaaagaaaaaaatatattttgcaagctaacattttcttganacaatttgaggcatcatgtaacttataaccgaatccaagagccgttcgcgcaagagtgtgttaccacattgaaatacacagtgctgctgttagactaaatgtcgtaggttgttaaccacatagaaacacactagtatgaagaaaactgttgtaaaatctcaagagcttcagaaactgccttacaagaccgcagcataagctattttggaagtatttaccaatagtcacatggtggtaaatatccaagtggttataaaaggatgccatttatatnttaaatt

SEQ ID NO: 664697 - DNA, 233 bp, Homo sapiens
agggaggatcgcttaacgccaggagttcagggaccagcctaggaaacacagtgagacctcaactctacaaaaaaatttaaaattagccaagcatagtgttacgtacctatgttcccaggtactggttgggcagggtgaggtgaaaggatcacttaggcccaggtgatcgaggcttcagtgagccatgatcacaccactatgctccagcctgggtaacagtaagaccctgtctc

SEQ ID NO: 664698 - DNA, 132 bp, Homo sapiens
ctgaggtagctctcaggatcttggattgagatagcacggtgccattaaactttaagatcttgtgccaaacgtctggccaaatgtcgttctgccaagtacagacttctggaggactgtggactgagtgcatag

SEQ ID NO: 664699 - DNA, 253 bp, Homo sapiens
gagtgtctcagactctgaactattgcgtttaacagtcgaatgattgtgtagatacggattgagctggatgggtacagcttaaatcatgggtccagcctaaaaaccaccatttaacttacactgatcaatttcaacatggactgttttcggttatttgtgttgaaataaagcatcattaatgcacatctgcaggggtttgccatacagcccaaacggtatacagttacaatcattaaaagttcttatttttgta

SEQ ID NO: 664700 - DNA, 479 bp, Homo sapiens
  misc_feature (76)..(76): n is a, c, g, or t
aaggttgctaatcaattgactctgaattaatcaaaagggcaatattctaggtagacctaacctaatcaagtgagcnctttaagaacagagagttttctcctgcttgtggcagtagaggaagtctgagagattcaaagtgtgaaagagactctacaggaggaatgttctccattgctgaaatgacaatttcccacagacaaggacctgagggaagcctctagaagctgagagtagtccctgccaacagccaaccaaaaaaactagggaccatagtcctacaacagcaaggaactgaattctgcaaacaatctgattgcgcctggaagcaaattcttccccagagcctccagataagagcccagcttctgaccaacatcttgatttctaccttgtgagaccctaaacagaggacccagttgagcccacctggacttaagatctacagaactgtgagataataaatgggtgttgttttaagg

SEQ ID NO: 664701 - DNA, 100 bp, Homo sapiens
tacaaagtgctctcagatattatggtgaggttattaccatcacaagtgatgatacaatctggctaggccaatgcgcccactttttcgcaaagactattcc

SEQ ID NO: 664702 - DNA, 100 bp, Homo sapiens
gctcgtccgttactttggagccagctttcgcatatcaggcgctatagcggtattgaagcccagctgggcgatgtgctgagctgatagtgagctgcagaat

SEQ ID NO: 664703 - DNA, 259 bp, Homo sapiens
ctattttatgtaacaatcatctttatgatcttttgagtttcatttattttcatattatcattattaggattatctttatttggctaattttctgtctagttcctcgtctatatcaactccttcatcatagattattgtgcaagatataatttgtctttttattcgctacgcttattgtttgcccaatatattgaagtctaaaaactgactttacaaatcatttaacattctcttctattttcttagtgtttatttggca

SEQ ID NO: 664704 - DNA, 837 bp, Homo sapiens
tgcctttcgaatttaaacacaggaggcggaacacactaacaaaaggtaagatatcaaacatccagatggagggaaacatataggacaaatgacctagatttttactacaaataagaaacttcatcgaaattgcacagaattaagaaaaagagagacacagatggaagaatgcatggcttaacaaatttgcgcacaaatccaacaaattacaatgagtcaatgctaaacaatatcagcagaatgtagtatactaggttctctcataccaactgttagaccataattaaacaggtgtgacatttgaatgacactcaattatggctgtcactgatcctatatgcttatgatcccaccagaacagcaagtaggcacacgtcgccccatatcacttacattatcgaaatcatagactcatggagccaaactgcaacaaattagaatcccagctaatagacaatatactgtgccatatgaccttgagccaatatacagatcaactctataatgacaaacaactggcgggtgattaatgagcatccaatgcacaacggtcgccctgactgataaaagtgcgaggatacaccggcaacaccagagaaccaccacaaaccggggggaaaccaagtgcagcgggcaggcaactagccacaacagtagcgtacgaatagacccacacggagaactgacaaaaccggacaccacatagagccgccgggggcaagaccccaaaaaacaccccagagacaacagcgcagacggagggtaaaaacaaaggagaacaaaaaatcgcaggaaggcaggaaggaaacgaacacaaaaagagggacgaaacacaac

SEQ ID NO: 664705 - DNA, 822 bp, Homo sapiens
  misc_feature (12)..(12): n is a, c, g, or t
  misc_feature (63)..(63): n is a, c, g, or t
  misc_feature (69)..(69): n is a, c, g, or t
  misc_feature (100)..(101): n is a, c, g, or t
  misc_feature (135)..(135): n is a, c, g, or t
  misc_feature (207)..(207): n is a, c, g, or t
  misc_feature (215)..(215): n is a, c, g, or t
  misc_feature (217)..(217): n is a, c, g, or t
  misc_feature (221)..(221): n is a, c, g, or t
  misc_feature (223)..(223): n is a, c, g, or t
  misc_feature (237)..(237): n is a, c, g, or t
  misc_feature (261)..(261): n is a, c, g, or t
  misc_feature (269)..(269): n is a, c, g, or t
  misc_feature (271)..(272): n is a, c, g, or t
  misc_feature (274)..(274): n is a, c, g, or t
  misc_feature (278)..(278): n is a, c, g, or t
  misc_feature (281)..(281): n is a, c, g, or t
  misc_feature (284)..(284): n is a, c, g, or t
  misc_feature (288)..(288): n is a, c, g, or t
  misc_feature (290)..(290): n is a, c, g, or t
  misc_feature (292)..(293): n is a, c, g, or t
  misc_feature (298)..(298): n is a, c, g, or t
  misc_feature (307)..(308): n is a, c, g, or t
  misc_feature (310)..(310): n is a, c, g, or t
  misc_feature (314)..(317): n is a, c, g, or t
  misc_feature (319)..(319): n is a, c, g, or t
  misc_feature (321)..(322): n is a, c, g, or t
  misc_feature (325)..(325): n is a, c, g, or t
  misc_feature (327)..(328): n is a, c, g, or t
  misc_feature (331)..(332): n is a, c, g, or t
  misc_feature (452)..(452): n is a, c, g, or t
  misc_feature (507)..(507): n is a, c, g, or t
  misc_feature (557)..(557): n is a, c, g, or t
  misc_feature (560)..(560): n is a, c, g, or t
  misc_feature (565)..(565): n is a, c, g, or t
  misc_feature (627)..(627): n is a, c, g, or t
  misc_feature (677)..(677): n is a, c, g, or t
gctgtgttgtanactttttattggtatggataacctttattaaagtaacaaatctgaaaacanattttncttttgctggaaagaaagtactatgttagannagaactaagagaaaccagaaatcatttgtaaaangtaagcatgtgatatggtttaaagtaatgtaacaaccagaaaaacagtattaaccatttgaatgtgcgtgtntgtacaancntcananaccaatgacatacnccccaaaccccctgccccaccccncttcctcngnncnaccngcnggnttgngngnncaggntaggcgggnngngggnnnngngnnggngnnggnntgttgtttcttctgtatggggtttccttgccagatagggggctaatcatgcaatagcttgagtttctctgaacgtgataaacacccaggattactagaaccagaaagcgtgtgttcactnttttttttgtttgctgagcggtgctacaaaaacaacagaaagttccttcactttnatctggttatatgcccaaacctctaatcaagaaataatgcagctacaggngcnaattnaattactataaaacattccttcatctgtaaaacatttcttttcccctcaaattaaaaatttnaaataaaatgtcttcgtttttgataagcagctccaccaccagtctctganaccgtatatcattcaatgcagccatggcgtctagttctggagatctcataagggtgggtccaaagacgattccaaggttctctgcattcataagattctccttttcgtggagggtcactctctttagatgtgccatgaggtaccg

SEQ ID NO: 664706 - DNA, 263 bp, Homo sapiens
cgcaagctctgcaagtaatggacgtgcacatggactgctggaagcccttcccaggcgcaaagtgtaagtctccggccaccttattgacttccaagaagccatacacctggcagccttcattcttctgctcctgcatcttctggctgaagccctctcgccggcactgctcaatagtatctgggttcttgaaggcccagcctctacggcgatatgcctcccgcacagtcttcacaggtgttacagcacttgatatcttctgcctc

SEQ ID NO: 664707 - DNA, 812 bp, Homo sapiens
gatagaggccgtgtagcgctcaccgttagtcctaaggagattccagtcgtgtagaggagaagtcgaggttcccaggtaactgggacgcactttgctgtctgccatcgtaagattgagggctgcaagcccatgcagaggtactaatcactctttacacttggagaagcacaccatcttgtactccaagacatgcattcattcatagcatcacctaccagcagcgatgctagcctagccagcagactgagcagcacgcatggccgccagcaggcggccagatacctgtcagaatggtgcgaacaggccatgccagctcaagctgcatatggctttgacgtatttgaaccgtgcagagcaaattttagcaagaacccaggcagaggaacgtacgcttctaccctaacgcaacgccgctcctctttgtgtggcgcaaacttcgtttccttccacgaccattcagctgtaggcacagcataattgcaccgtacatactacttctgcacgtaagatacttgggacacacggcaatggcggagagtgccttcacttcataactggattaaccggtgatctatagggcttttattctcgcttggggaagaccccagataaccccattaagcggggcattacttttgcctacacaggtagggacagctttgcgaaccaccattagttggcacaacattcccgagtggcatacaagggcacgctcattgtcagttggtcgccgccatataatggccattggccctataaagataggacagttcccttgtaccagagtttccgaagaaacctttcacttccag

SEQ ID NO: 664708 - DNA, 464 bp, Homo sapiens
ctgacgatccatgtgtcctaatgtactgcggacatatacagagtagggctgaaattggccatgcactgtacatgtggatggtgcttattaggacaaaaacatctcagcggctatcactctacaggtaaaatcatgcctatttagtttgaaggtgtaggttacatgtatcccataaatataaagtaagggaaaggggagaaacgctcgctaaaatccggatatataagtgatgcattcatggaattattccacacttcacgcgatgcacatacagataaaagttagtcccttcgaagagctaacactctgtaagacctatgatataagactcctgtaaccttatttacttacttatataaagaaagttttcatacctattaaatcattctcaaggctatatctatcaaggttcatgctttctaattcctcttgggggtggggcaatcaagctgggggatccacta

SEQ ID NO: 664709 - DNA, 190 bp, Homo sapiens
gatgatcttcaagaagggacgtagggagagagagtccctgcagcagatgggcgaggtcacctgcgaagggatccgtctgaagaagatccttattgaggactggcagaaggcacgggaggaagaagcagaaaagctcattgcgctacaggatgggaagaagtctctggaagaccaggtggagatgctgcgc

SEQ ID NO: 664710 - DNA, 247 bp, Homo sapiens
agggagtgatcagaggatcccctcagcttatacttccttcttctttcttccttcttccttcttttcttcttctttctttttcttcttcttccttattcttcttcctctttcttcatctttttctttcttctttccttctactttttcttcttcttctttcctctttcttcttcttccttctcctcctttcttcttcttattcttctccttctccttctttttcttcttcgacgtatctcgcgttgag

SEQ ID NO: 664711 - DNA, 808 bp, Homo sapiens
ttaagaaatacatttgtaaggctatggctgcccgaagatgtaactgaatcactgcactagcataataaaacatgaatggataagcagttgcttcttgtggatgaacaaagaaagtggtctcttgagatggaacctaatcctggtgaagatgtgaacactgttgaaatgataacaaaggattcagaatactccatagacttagtttatgaagtagcagcagggtttgagaggattgactctaactttggaagttttcctggccgggtgcggtggctcatgcctataatcccagcattttgagaggccaaggtgggcagatcacaaggtcaggagttcaagaccagcctggccaacatggtgaaaccccagctctactaataatacaaaaattagccgggcatggtggcacacgcccatagtgccagctactcatgaggctgaggtaggagaattgcttgaacccaaggaggtggaggttacagtgagccaagatcgcaccactgcacttcaagcctgggcgaagaacgagactctgtctcaaaaaaaagttttcctgtggtctcacacaaaaatctttcatgaaaaagaatgtcaatcaacgtgacaaattcatcatgtcttcattaagaaactgaacagcaccccaatttcaagcacacttgatcaacagcatcacattgaggaaacctcacagcaaaagatatgactcatgcagcagtgaggtaggcgtaaaaaattatctatcaccgacacagaccctcatttcataaaatggaggcaaagactcgagggagctaagtgccgagag

SEQ ID NO: 664712 - DNA, 444 bp, Homo sapiens
atcatggtatacgatttaatttgcttttctgttctttttttttaagactatcgatgtgagatgggcttagattggactacggttctcatgtaactggctgagaaaaggtccaccttcgctgcacccatgcagtgtctaaaagggaaccacacacccatgaatcacgtttacttaccagaaaattccttcctcaattccggtctgaaggccttgtccaaggccctgatctccttcagctccttctcctccaccaagaggcggatgatactctaacccagaaaccctcctgctcctgtcacaaggcagctccagcctgtcatggccaatccaaagtagcagacaacacactccaggaaacagaagatgctggggagcagatctgattctagggtgaccctggagagggctaaaaaaagagatcaaagggttatatactcacacaga

SEQ ID NO: 664713 - DNA, 1358 bp, Homo sapiens
gggtaacctaagctggcagtggcgtgatccggcaccaaatctggcccgtcggtgcggtgctggagactccatgagtgccctggacatgaacaagcatgagatggaggcaggcggggcagctatgtgactcgtgtgtggaaggtgtggccatgcgtatgggcggacgaggaagtggaccctgcacactgggagctttgtcaataatcccacgcgtggctggctgcttcccaacagacaaagtcatggtgacccggtggttaccttactttggttcgggtgactgtcggggttagttgtcgggggtgtccctccaggttcaactcgctgttgcccttgagacgtttccaacgaccctgtgcactctatgtgtcatccgatgtggatggccaatcgatgtcttcgcgttgtagttgatgtgcttgttgcgcgagggttgacctatatggggcgcgcggacgaaagtgggcacgtgacgcatacacggcacccattgattaaggcccggcacccagtcttcaatgttctaattaccctagggagcgtagcgaagggtaaaagccgttgggataaattttttgcttgggcacacgttgcgcgaaagttccaaccgtacgtgcaatccggggtgcttccaaaccctaagtacaccgccaccgttacatagaccccttccaatttgtggccccgtggccaacgtaaacgtttagccaaaaaacaatggatcttcaagttcgtgggcgcgaagactcacaacccgaccaaagttgaccagagattcctgagttgccttcccatttttgtgccaagtttctcccgggcaggaggcgggaagtttcccctggggaacgcaactctagggcccaaggaggataactttgattcgggccgcggtaacttgcgatttggacgcaagaacaagggaaaggggcccctttgcgtggaaaaattcaatggaaggtaaagccacgtgggcgcgaagcaaaattttacggttgagcgaagggaatgggttccccccaggaaaaggggggtgccttgtgccccacaatggggaaagtggtttcaaattcgaaagccagagacccgaagttttagtggcgccatggtggcaccttattctgggatggtgttgggcaggacctttccgaacaccgaaaggttaacgcctttccaaggtggaaaaccccccagaggctctaagaaagctttggggttcaaagatccgccctttcgaatttggaagccacgtggacattgggctttggggcgttttttgacgtggggggagtccaaagagaaatcgcgggggaatttggactgtggacacgtgcgcgagcgccgaaacagagaaaggcaca

SEQ ID NO: 664714 - DNA, 415 bp, Homo sapiens
cacaaaatgttactagcccttttgtactctgaactgtgctcggtaaagttatgatagacattctacatacctttctgcacactgtctcaaagcgaattgcattttacagaataaactggacttaacattcttaagaactatctcgggactccacgcaatcgggccattactactatacagccgcatttatccggcatcactacgactgcctgcgatcggtaaacaaaatgcttaacctctaggagggtcacactagcagagatgggaattccatatagtgcctatactataggcctgtaccgttaaacaaccagcaaggctgatcccgcgccacaaatcactatgaatacttcatttcaacttgtatgccaacttttccaggggatcataggttcgctcttatgtcgggcggctc

SEQ ID NO: 664715 - DNA, 396 bp, Homo sapiens
ttgccaaataaaaaaaaaaaaatccctgctcccccccttccctccccccccaggatatttagggtaaaggagaaaataatgggaaagggcctgggccgtggattaaaagggctatttaaagtccaaggagtgttttgtttccattcctagtatggtccgggaaaggggaactgagtatcctttgttgacttgggaaacccggagccccttttttggttggttaaccaagccagccaatgtggaaaccaacgtttcttttttcccccctatggttttttgtcctacttagaccggctgtttttatttcctggtttttcataggaaaaaaaaaatatttaggcttaaagtttgtaatgatccatgggtcataattcctttaatcttttcctccaagga

SEQ ID NO: 664716 - DNA, 1117 bp, Homo sapiens
gggccggacccccacccgccgaggggcccagtgaggacgcggcagagtcacggtggcagcattgagagttggacaccctgggtccttgaagtgatctctagtgccccagccccaaatcctgccaccattcctgtgctgctgtgtggacaccatggctccagaatgatggactgctggaggggatggccttaggggtgcagtttctggagatgtgcttggcaaactacatgtgcgcaacggtacaagcgtggttggatggactgggcacctgtgcttgtgctggggaccctggtcatgctgcttccagtgagctggctgcccgacatcgagcaagtgcttatgcccagcagtatggctgactgtggcccgaaagtggcgggggaccgtggagacagggcccccagtatggcacactggacgaagtgcctggcatgccttatttcactggcggctgagctggctgagctgcgctgcacctggaggtgcgggagaagctgcaaagggcaggacagttgagcagggtgcgcgccttgggcagctgtgtggggctttccacctggcctgtgctgggctggcttccgcgagaagccggggcgagcgaggacggcttccgcaaggcccagaagccctgagtgaagagggctgaaggaggtagaggcttcccatgaaaagctaccacgcagccggaaggatgagcaagacggccagacgacggggaagccacgcaaggcagacagcgcgtctcccaggagcagctgcgcaactggaggaacgtgtggacgctgtgccaggaggcgaaaagaagatgccacggatgacagaccgtgcaaagatgatcggtacatcacgtacttgacggaattgtgaaacagcatttgataacatggcaggaagatagacgcaagaggattatataagggaatgggggttaaattaaactaactgggcgcttacagaggagagtcatagccacggagtgaaagaataagagaaagaaaaaatattaggagaaacagaagaagatagaagtaaaatgcgtagtcagaggagaggaagtgggggagagatagaagtagcctgagagaagagtatagtttgtagtcgcgttgttgaaaaa

SEQ ID NO: 664717 - DNA, 691 bp, Homo sapiens
gcctcgtgccgcaactaccgaggaggtttcaaccgcagcggaggtggtggctatagccagaaccgctggggtaacaacaaccgggataacaacaactcgcaacaacagaggcagctacaaccgggctccccagcaacagccgccaccacagcagcctccgccgaccacagccaccaccccagcagccaccgccaccacccagctacagccctgctcggaaccccccagggccagcacctacaagtaagaacagcaacatccctggctcaagcgccaataccagcacccccaccgtcagcagctacagccctccacagtccgagttacagccagccaccctacaaccagggaggttacagccagggctacacagccccaccggctccacctccaccagcaccatgcggctacaactatgggagctacggcggttacaacccgtgcccctatagcggatggaagcctgcaccgcacggacctaactcgtcaagccagctatagaccagtatcagcagtatgctgcagcagtggaatgcatgtactatcagtaaccagggccagttggccgccatactacgtggaactacgacgtacgggagctactccgggaacacacaggggtggcacaagatacacagtagccagtgtgacccagaggctcccggaggcccctgcgcgggttcctccaaca

SEQ ID NO: 664718 - DNA, 127 bp, Homo sapiens
acccctcactttatacttcacactgtggatcaccctgaattctttctatgcacaagataccaagaaccctctctatggggtctagatatgggacccctttacctgtaactatacatagctactagca

SEQ ID NO: 664719 - DNA, 161 bp, Homo sapiens
agtaaagtagacggttaggagggtgatggttgctattaattgtggggatgaagaggcgtattgttattttgtgaattcttcgcataatggaccacttgggccaaacccgggtaacgggggcaggcctcctacggagaggagggtggattgaattaagggtg

SEQ ID NO: 664720 - DNA, 838 bp, Homo sapiens
  misc_feature (56)..(56): n is a, c, g, or t
  misc_feature (124)..(124): n is a, c, g, or t
  misc_feature (131)..(131): n is a, c, g, or t
  misc_feature (203)..(203): n is a, c, g, or t
  misc_feature (206)..(208): n is a, c, g, or t
  misc_feature (213)..(213): n is a, c, g, or t
  misc_feature (224)..(224): n is a, c, g, or t
  misc_feature (244)..(244): n is a, c, g, or t
  misc_feature (252)..(252): n is a, c, g, or t
  misc_feature (257)..(259): n is a, c, g, or t
  misc_feature (266)..(266): n is a, c, g, or t
  misc_feature (269)..(269): n is a, c, g, or t
  misc_feature (286)..(286): n is a, c, g, or t
  misc_feature (289)..(295): n is a, c, g, or t
  misc_feature (327)..(327): n is a, c, g, or t
  misc_feature (660)..(660): n is a, c, g, or t
  misc_feature (690)..(690): n is a, c, g, or t
  misc_feature (771)..(771): n is a, c, g, or t
  misc_feature (804)..(804): n is a, c, g, or t
atttttattacaaattattttttatccaaatcatatccttaaaactgtttataganaacccagggaataaagtgaactgttcattgtggaaggccttaaattacattattacagtagaaaatanaggaggnagaagataactgaaaagactaatgcaacattagattcaaatctatagctcctgtagctacttaaaacatggnttnnnggacngaacccaacanttccagcaaccatagagacngttaaganggagnnngccctgncancccttatatcatgcttnccnnnnnnnggtaggaagatgttagatccaggacacatganatatgacattttatctacaactcctgtttgctttactgagggtgtagtttcaaaattcagtcaccttcttcagcttcagattcagattcttcttcagcatttttgagccattttacaaactttttcatttgctcaaggaaaacactcttcccctttgcaacatgtgcatctttataccactacaaaatgggctcctcgctcaggacttcagctttataaaaaagcaccactattttctggaaggctttcatgaaatgaatgttgtcatagcaatactcctgaatcttcagtaacagagttagctcagactgaccttgagtagtaaaggcagcnagtagagggctgtattgcttcaagtgcttnatggcttgctctgctacaagctcctctttttttgttccattccacagtgctcattacacttgaccagactattccgatganaactggctctgggatgttgttttttttcatctnctccttgacatataaattatatccttaaatggat

SEQ ID NO: 664721 - DNA, 485 bp, Homo sapiens
ggtccccatgcatagtgtggaaggcaaagggggtggatcatgaggtcaggagctcaagattatatttgggaagtgaacaggaaggaaaatttatgcagtctggaggcaagggtgtggagtgattctggctgtttcttttctttttcctttttttttttttggaaagggagtctcgttttgtcacccaggcgggagtgcagtagcgcgatctcggctcaatgggctcacggcaacctcggcctccggggtccaagtgattctccggcctcagcctcccaagtagcggggactatgggcgggcgccaccacgcccaggtaatttgggtattttaagaaaagacggggttccaccatgtgggccaggagggtctcaatctctggacctcgtgatcagcccgcctcagcctctcaaggggcggggattacaagcctgagccagggctcccggccacttggctaaggttcctgggcatggtcggcggcct

SEQ ID NO: 664722 - DNA, 198 bp, Homo sapiens
cgagctcggtaccccagctgaacgagcagtttaactgggtgtcccggctggcaaacctcacgcaaggcgaagaccagtactatctgcgggtcaccacggtgagatgttagatcacgcatgctgttgtgcgggagcccgagctgtgatcgggagcaggggcatgtgtgcttttgactgagcatttatcacacggcaaaa

SEQ ID NO: 664723 - DNA, 431 bp, Homo sapiens
ctgctccgcccctctctgctcctcagtttttcatatatgtacaatgagactgatgttagaaacaacagtaatgataataagacccatttccagtggttgggaatgagaatgaaataaggtccagggtgtaaagcagtttatccttcctgggcttggcaggagtacgttgccctttgggagtgcagaagaagaaccagttcccgttcactggccagcctcaggcatctgtcatgtgtggggccctggaatacagagacgaatgagacaggctgatgcctctaggacgatcatataaaatcccaagctcaagctcaggacccaggccttacctggctttgtggcactggcatcgtcgcctgctgttctggaaacacaccagggatgcttgttcatggtggtgaccaccaagcagagaggggcggagcaggggt

SEQ ID NO: 664724 - DNA, 213 bp, Homo sapiens
cttacatgcagatctgaggaagttgtcacagcaatcgtgcctgctctggctgtctgtgtcttgaaggtcattgtgtccttcggttccttgggagtaggtcttcgaaacttgtgtgtgcagagctcccagccccttgaatgaggaaggatcagagaagaggctactgggggagaattcagtgcccccttcgccctctagggagcagacctccac

SEQ ID NO: 664725 - DNA, 512 bp, Homo sapiens
  misc_feature (28)..(28): n is a, c, g, or t
  misc_feature (61)..(61): n is a, c, g, or t
  misc_feature (92)..(92): n is a, c, g, or t
  misc_feature (117)..(117): n is a, c, g, or t
  misc_feature (197)..(197): n is a, c, g, or t
  misc_feature (203)..(203): n is a, c, g, or t
  misc_feature (239)..(239): n is a, c, g, or t
  misc_feature (249)..(249): n is a, c, g, or t
  misc_feature (251)..(251): n is a, c, g, or t
  misc_feature (315)..(315): n is a, c, g, or t
  misc_feature (338)..(338): n is a, c, g, or t
  misc_feature (374)..(374): n is a, c, g, or t
  misc_feature (424)..(424): n is a, c, g, or t
  misc_feature (428)..(428): n is a, c, g, or t
  misc_feature (451)..(451): n is a, c, g, or t
  misc_feature (475)..(475): n is a, c, g, or t
gaaggatatgagggccccctccctctgngctttcctctctagagggcctcagtctcctccngcaggctgggctgcacgacccccaatccttncacccctaacccggaggagggggcnataccagggagggcagtggacagggagcctgggggagtaggtggagcgcagggcagggtccatggagtgcagagggggtngcagcnaccaaggtggtcagttcctggcagcaatgaccacanaaagtcccanancccccaaggcaacagcagtagccccaaacagccactaccatgggatggaccaggcacccttgcnaggtcactaagcaggaagcaggntggggtggcccagcattttccggtacaaggcggtcncagtgctccgctgcgccgcatgcttcttcaccagctttgagagctctgcntggntcgtcttgttggaaggttccagnttcagggctgccctcaggatgggnattgcctcactgtactccccctgctgggccagcacct

SEQ ID NO: 664726 - DNA, 799 bp, Homo sapiens
gggcctgattgacctgcgtgaagagagagaatggccgctgcctgccgtccagtctgctggtccgctcgccgccgccagtcgctctagtgccggacgccctcgtgtgcgcggcggagacaacgaggattccggtgggaactctacttcttggtgccaccgcctcatgcactgtgtaggtcgtgaatcagtattcttagaagggctttatggaccaccggctacgaacgagacctccgtttatcttgaacgactgtgataccagaagagctgacatgactggtctatgggctgaaacactgttcaattattgctaaccctatcagagaggaatgcatgtcagctgattgtagtagccagtcctcttgacttcttcaccagctcaaacacccaacagaggagctatcatctcagggccagtccaacactgactaaggacttgaacgtgccaacgcagcacgaatttacgctagaagtgcactcgtttcgaaaggaaagatcttcctcagaactgtgatccctatcattccccctagttgctcaggaatcaattgaaaaagatgattacgtcaatttgcgattgagctacatttcaacaaagtggtaaaactcacagagcacttcgacgatggttccactttgaccaagtataagtatgtaaacagttttccaacttgatttcactgcggaaaacttcccttcagggaaagagcaggaaggccccttagacctcacttgtgaatcgacttgcagaaccaacaatatcagcacgcattgctacaaggtgaacactgatgagaaa

SEQ ID NO: 664727 - DNA, 475 bp, Homo sapiens
tcgcgtcccactggaagctatacgatgtggcaatcaagcatgacatgatgcgcacgtcaggtaatcataagagaaatgcagatcataaccacaatgagacatcatcccacagcccattggaagccactataaaaacaacaacaacaacaaaaaaaaaaaaaaaaaaaacgggaaataacaggtgcggccaaggttttggaaaatttaaacccttgtgcagtacgggataggattgtaaagggtgatgcagccactatggaaaacagtttggatggtccctcaaaaagctaagcattagaattcctatgtgacccaagcaagcccacttctgggtaaatatcctaaagaattgaaagcaggggcctgaagagatattggcacacccattgttcattacggcattatttttacaacaggcataggcggaataaaacgctgggggaccctcatagagtgaccctgcagggcattgaag

SEQ ID NO: 664728 - DNA, 109 bp, Homo sapiens
ctcgtataaagggccaaatcaggatgttgatccttggccactatcaatagtcatacagctatctatcacaggcctgttataatactggtgcttgttgtgattattcgag

SEQ ID NO: 664729 - DNA, 855 bp, Homo sapiens
  misc_feature (762)..(762): n is a, c, g, or t
  misc_feature (847)..(847): n is a, c, g, or t
ctcctcccgccaggcgctttctcggacgccttgcccagcgggccgcccgaccccctgcaccatggaccccgctcgccccctggggctgtcgattctgctgcttttcctgacggaggctgcactgggcgatgctgctcaggagccaacaggaaataacgcggagatctgtctcctgcccctagactacggaccctgccgggccctacttctccgttactactacgacaggtacacgcagagctgccgccagttcctgtacgggggctgcgagggcaacgccaacaatttctacacctgggaggcttgcgacgatgcttgctggaggatagaaaaagttcccaaagtttgccggctgcaagtgagtgtggacgaccagtgtgaggggtccacagaaaagtatttctttaatctaagttccatgacatgtgaaaaattcttttccggtgggtgtcaccggaaccggattgagaacaggtttccagatgaagctacttgtatgggcttctgcgcaccaaagaaaattccatcattttgctacagtccaaaagatgagggactgtgctctgccaatgtgactcgctattattttaatccaagatacagaacctgtgatgctttcacctatactggctgtggagggaatgacaataactttgttagcagggaggattgcaaacgtgcatgtgcaaaagctttgaaaaagaaaaagaagatgccaaagcttcgctttgccagtagaatccggaaaattcggaagaagcnatttaaacattcttaatatgtcatcttgtttgtctttatggcttatttgcctttatggttgtatctcaagaataatatgacagcntgaggaaa

SEQ ID NO: 664730 - DNA, 1057 bp, Homo sapiens
gacccaggcatcgcgcgcgagaaggcggggtccccacactgataggtccggaaaggcgacttccgggggctttggaactggggagcctcccggaggcgtcggcacctgaacgcgaggcgctccattgcgcgtgccgcgttgaggggtttcccgaaacctgatcgcagaagaccccaaaccgggctggggggcgtccgcctgcgcgttcttgcggcattgaagctgggccagtgggggcacttgtgcggcctgaagggcaggagccgggggcggtatcttccgcctggcttggcaattcggctgctccctcctcgtgggggtccccggaggagcggcggacacgaagaaaccggcagtaccccacgaacttcatgccctggtgtgtcgaacgcgttggttaggacaagaaatgccggggagcactcaacagccataacgctgcggggtcaccagtggtcaccgagacggcggagtccgtggccaggcatgggtagaggtgtactgcgggggcttgggcgcagggacaaccaggaaatagaattaaccctggacccgaaggcatgggatgcgggcttccagaggcaaatgtggtggcccatcgtggtcaacaaagaaagaagttggcacacggggggttggacctgttggcccaacacaggcataagacattggcagggagggaatactccctttcttgcgtcccagaggttggctctcccaagaaggggcagggcattcctgacaagacccacttccaaggggatattgtccaccttaatcgacgcataaggtggacccggcaacgcagtcgcggggcgcctgcgccggtgacattctttcccaacggcgggacctctgacgtggaacaaggaccctgcgggacatacactccatactatgagaggcgcgcgcggggcgcataaggaacacggacacgcgccgggaggagggccgaatgccccgcgtgcatccgccacagagaaaacccccgggccctggcacaggcgggctcaggcggcgagccacagagagaaacactctgggcacgcggcacgaa

SEQ ID NO: 664731 - DNA, 857 bp, Homo sapiens
  misc_feature (320)..(320): n is a, c, g, or t
  misc_feature (354)..(354): n is a, c, g, or t
  misc_feature (358)..(358): n is a, c, g, or t
  misc_feature (405)..(406): n is a, c, g, or t
  misc_feature (409)..(409): n is a, c, g, or t
  misc_feature (412)..(412): n is a, c, g, or t
  misc_feature (432)..(432): n is a, c, g, or t
  misc_feature (438)..(439): n is a, c, g, or t
  misc_feature (471)..(471): n is a, c, g, or t
  misc_feature (474)..(474): n is a, c, g, or t
  misc_feature (482)..(482): n is a, c, g, or t
  misc_feature (485)..(485): n is a, c, g, or t
  misc_feature (491)..(491): n is a, c, g, or t
  misc_feature (522)..(522): n is a, c, g, or t
  misc_feature (537)..(537): n is a, c, g, or t
  misc_feature (764)..(764): n is a, c, g, or t
  misc_feature (849)..(849): n is a, c, g, or t
ctcctcccgccaggcgctttctcggacgccttgcccagcgggccgcccgaccccctgcaccatggaccccgctcgccccctggggctgtcgattctgctgcttttcctgacggaggctgcactgggcgatgctgctcaggagccaacaggaaataacgcggagatctgtctcctgcccctagactacggaccctgccgggccctacttctccgttactactacgacaggtacacgcagagctgccgccagttcctgtacgggggctgcgagggcaacgccaacaatttctacacctccgacccttcccaccatccttccnccaccatacaaaaacttcccaaactttccccccnccanctcactctccccccccatctctcacccctccacacaaaactatttcnntantcnacctcccatcccatctcacncattcnnttcccctccctctcaccccaaccccattcccnccncctttccnccncacccnacttctctccccttctcccccccaaaccaanttccctccttttccnacactccccaccctcacccactgctcctctcccactctccctcgctattattttaatccaagatacagaacctgtgatgctttcacctatactggctgtggagggaatgacaataactttgttagcagggaggattgcaaacgtgcatgtgcaaaagctttgaaaaagaaaaagaagatgccaaagcttcgctttgccagtagaatccggaaaattcggaagaagcnatttaaacattcttaatatgtcatcttgtttgtctttatggcttatttgcctttatggttgtatctcaagaataatatgacagcntgaggaaa

SEQ ID NO: 664732 - DNA, 449 bp, Homo sapiens
ccccagacgcgaacccaattggcatctcccagaaagtataacaaaacccgagcgggttgcccccttcaccttctatacaaccctctatcccctttccccagggctcctgtcctccactccagatcattcctttagtacagagctagggcagcgacgtggatatcactgaaggagatcggaagccagactacactgcttacgtatgccatgatccctcagtgcataaaggaggaagacaccccttcagatcatgatagaggcatctgtatgagcccagagtcctatctggggtctcctcagcacagcccctctaccagagggctctccaaataggagcctcccatctccaggtgtactctgtgggtctgcccgtcccaaaccttacgatcctcctggagagaagatggtagcagcacaagtaaagggtgagaaagtggataagaagctca

SEQ ID NO: 664733 - DNA, 410 bp, Homo sapiens
  misc_feature (28)..(28): n is a, c, g, or t
tcgagctcggtaccttccacaggttatntagagatgcagtgcagaaggctaacacgaggactcgtcaaaaagacttctgaaatatttgatttccaggatttggtagattaagtgtgtctatttgtaatgaggagtccatcatgtccagattggattgtaaataaagctgtaaagccctacacattcatcaatgccttcactgtcttgtccacaatcagaagaggtggtaaaatgtccaaatggaactctgaaaaataacctagccaggaattttcagaaactggactgaagtggctggattccctacctataaatgtaaccatgagagttgtgacaaacaaaaatctgggatcttcacctaaaaaactgagtaggcttcggaggcttctggttacatccccaatggtagg

SEQ ID NO: 664734 - DNA, 383 bp, Homo sapiens
  misc_feature (371)..(371): n is a, c, g, or t
tgggtggatcacttgaggtcaggagtttaagactagcctggccaacatggtgaaaccccgtctctactaaaaataccaaaattagccgggcatggtgttacgcacctgtaatcccaggaggcagaggttgcagtgagccaagatcacacccctgcactccagcctgggcaacagacagaacaagacagtctcaaaaaaaaaaaaaatcaagaaagaaatactatgcagttggatgtcttccctcacccagtttaactgtacaagggcagcactactctagatcttctgagcacttgccttttctatgtgtactatctttatatttaattgttttaatatgccatcataggtcatcttaaggcaatttctangcactgtttgga

SEQ ID NO: 664735 - DNA, 132 bp, Homo sapiens
gtgtgggtttttgtcatgttccacacacttgtccattcttcattttcactgattgttcagcatcatgtgagcagtcagatgttgcatttgcagtgttggcagtcagcattcagtgctgtcagcgtcagcaca

SEQ ID NO: 664736 - DNA, 119 bp, Homo sapiens
tgcccacggcaggtgtactgtgaagcaacaaggattactacaaaacaaaaattataccaggcatatttttacaattcgtgcttgaatattccaatttttaagaatcacgatatgcttaa

SEQ ID NO: 664737 - DNA, 143 bp, Homo sapiens
  misc_feature (77)..(77): n is a, c, g, or t
  misc_feature (79)..(79): n is a, c, g, or t
tgcctaacccacgtgtttcccagcagcctcccttcttttttcctttaaattttaattatgtgtgtgtataagtgcananacgtgttttccttccgtttgttttctgcttaagaagtttagaagtttaatccatctgagaaaaa

SEQ ID NO: 664738 - DNA, 369 bp, Homo sapiens
ccccaaggacatctaaaattctatctatgttggtatctaaaatttttcatgctgaagttaaatagttgacaaagtatgtatttgctgcggtcgtgtaaatattggtatcttaaaatactgttacatgactattttcatatccagtacaatttacatatcacaacaatttgacacccttcattcatttatcttctgtattgccataccacttttcagccgagaatcctatcataatgtaatctattatgcccgacatcttttaatcattcaccccattacttcatgtctcagaagatatatacgtgaaccattttcttagctcttgctttaagaaggttgtacttatctcagtccagaacctattatcgt

SEQ ID NO: 664739 - DNA, 1275 bp, Homo sapiens
cactctcttctgggttggggcagggagtcctggacggacctagggatctcgagatgccgtagtcacgcggaggtaatgaacgcatcagatggatgcagggatgttgcatcagtatgcccatgacatgagcatccccttggggtcttcgtgagcttgtggatgaatgagcacacagtgtacttcgtgtgagcttgtcactaacaacctaccctgagctccggattccatgtcacaacaattcgttatgcacgaccatcgcgaagacatggagaagagaggactccttatggcattccatttcgagggcgctctgtgtgtgtgcacattacctagctagtccgagaatagcatatcatacatagtgagttcgtgtagctggtaatgaatggcactagccttgttcgtccacgacttgagggctaatattggcactaggactcgacttaacgataatcggggactttgccgatggcaccacaatgacgtgacgaagtcgcatttacatatcgcgcaacacaatgtctgcgtaaacgcttggtgggtgtgctcaaagggagcctcgcggacaaacacactaagggataaactaaatacccggggacatagcgaacctaacaccaccaacacatgcacattgggacttaacaagctgggggagcattgggacaccgcaaggttaattgatttggcggcgcggaaaggaagattctctctgtatcgcttattggcgattggccgagaggatctacaaggggcacactgcgcttgtttcgcgaagctagtacctagttcccggtgagcatcaatctcgatgggtaatattctttacatcaccaatgtgaccggtcaccgtatataaacacataagaggcattcttttttgtccttgggcgagccgacttgttgtgcgatggcacatttgaggcattcaaggagggtacggtctcgggacggtgatggagggtcgaccgacaggggaggaaggcgcgcggacactgttgtgctttgtttaaatttcgggagagggccccttggtatttggtacccatgggcggcgtggggaacctcttaaaataatcacgtgggggcatacttgaggaatggggaagggcgaggtaaacccacgaataagtaattgactgaaagtcgcttgtgaacatgttcctatggttggaaatcgcgaaagtctggggagcacaggtgaaatgtgggcgaaaaacgaggattgatgtgggtcaccaaccggggtgggagagggagggtatgcgcaaaatc

SEQ ID NO: 664740 - DNA, 628 bp, Homo sapiens
gagagagaaggaaggaggtggtgtgcaggatggcgacggcggcctatgagcagctgaagctgcatatcacacctgaaaaattttatgtggaagcttgtgatgatggagcagatgacgtacttaccattgaccgtgtgtccacagaggttaccctgcagtcaagaaagatgttcctccttcagctgtcacaagaccaatattggtatactgggcacaatccatctggtggcaggtaattatcttatagtcattaccaaaaaaaaaaaaaaaccaaaaagcaaaaactcgggaagaaaattggaattggaacttaaggggggcataaaaaaagtagctgaccttgggaagggctgacactattcaccattcagggacagtaggtatgcagccagaggtctgggtgcagggagctgaccgacatttaatgatggagtgggctgtgacaaaggggtatgacgtatcccagagaaaagtgttgcttgcaaagacttcccattaagggaaacctgggagaatatttcccaactttgaaggtgccaggataaaatgtcagaagtggtgtttaggacttacggaaggtgtttgaaagtccccccaggattgaacaactttcggtatctaatctata

SEQ ID NO: 664741 - DNA, 142 bp, Homo sapiens
agggggccccagcagcttcgaacctacacctgagggctaccaacaggtggcgctctggctttgcactgcaaaaactgagaccagcccccttttcccacaaataaagcccaataaagcctgagaagtgaggaaaaaaaaaaaa

SEQ ID NO: 664742 - DNA, 326 bp, Homo sapiens
tgagatacatcccacaaaccactatttgtagcccacagtgtggcacggatcaggtaccacagccctactccataggcgacaaggctataacaaatgatattaccaaaaacctgtatcatttaagggctctcgtcactgcatgcatgaacttcttatgtaattcttctggttcctgtttctttatctatatcataaaagctcaataccacaagatgcatgaactactaatagacacaatacagctgtaaccttgaattggagtctgtaccaaggctgacagctgatggcactggcccgggcaccataccccagaaacagccgagtct

SEQ ID NO: 664743 - DNA, 161 bp, Homo sapiens
cgataatagtcatctggaatatgcatgatgtaatatctcaaagacgtaacaattttcatttctctgtgactggtgatgttgagcaccttttcatacaccttttgacctttttttttttcttttttttttttttttttttttttttattttttttttatttt

SEQ ID NO: 664744 - DNA, 816 bp, Homo sapiens
ctaacgaggtgacacactcaggagacacaggtgtggaaacagacggcagaatgcctccaaaggtgacttcagagctgcttcggcagctgagacaagccatgaggaactctgagtatgtgaccgaaccgatccaggcctacatcatcccatcgggagatgctcatcagagtgagtatattgctccatgtgactgtcggcgggcttttgtctctggattcgatggctctgcgggcacagccatcatcacagaagagcatgcagccatgtggactgacgggcgctacttttctccaaggctggcaaagccaattgggccagcacctgggcaccactcaatagacaaatggcgtctcgaaggacacaccaactcaggaagactggctggtgagctgtgcttcctgaaggatccagggctctggtcgtggaccccttgtatcattcctacagattatctggaagcaaaatcggcacagttctcgacgaagtgcccggccatcacctcattcctgtcaaggagaacctcgcttgacaaaactctggacagaccgtcctgagccgcccttgccacgcctctccctcaccactgggcctggatttacacacggcactctccctggaagcgacacacggtcggcagaccgttcgcgctcgcacccatgggcctgagacggaaccggtacactgttgcgttccggctgcatccctcgcccatccacactcggcgcactcagccgtggccctccttctacaccctcccgcaggaaatcacgatggtccgcagccacccaatcccacctcattccacccttccctacg

SEQ ID NO: 664745 - DNA, 391 bp, Homo sapiens
tcggccggtttggcagatcagggctgactctggccatggccttctagatacatgaagggcgtgatggaagggcaaagagtggggaaggaagggaagaggaggagaaaggaagaaaagagggcagagcccttgcaatctgattgcctctccagggccccatgccttagtactgctgcaacagcaattacgtttcaccatgagtttgggaggggacattcattcaaaccatagcacgtatggacaaaaaaagggtgtagagaaaaccagaagttgctttttcccttttcactacttagatttatgatctttttatatatttttgtcattcataatttctttttaattatacaactgggactgtggattaaaacagcatgttgtcactcatgct

SEQ ID NO: 664746 - DNA, 313 bp, Homo sapiens
tatgaccggggtgcgagtgtgcaactgaaaagggtgcaaaggcggtaagagtaaaagtcatatggcttccctatacaggctgctgtgcgtgaacacagcaggctctgatacagatcctccaggccacatccctcctcctgactgcttgctgacaattcacacctgtcacctcattcttaatccagttccaaacttctcgactctgaagaaaaaaatccatccaaagccgacctcgtcattctgttctgtctactcactgtaattgcatactttattcatactatatgagtctacaagtgttactgccttggaa

SEQ ID NO: 664747 - DNA, 906 bp, Homo sapiens
  misc_feature (121)..(121): n is a, c, g, or t
  misc_feature (164)..(164): n is a, c, g, or t
  misc_feature (241)..(241): n is a, c, g, or t
  misc_feature (243)..(243): n is a, c, g, or t
  misc_feature (246)..(247): n is a, c, g, or t
  misc_feature (249)..(249): n is a, c, g, or t
  misc_feature (256)..(256): n is a, c, g, or t
  misc_feature (258)..(258): n is a, c, g, or t
  misc_feature (264)..(264): n is a, c, g, or t
  misc_feature (267)..(267): n is a, c, g, or t
  misc_feature (269)..(270): n is a, c, g, or t
  misc_feature (275)..(275): n is a, c, g, or t
  misc_feature (279)..(279): n is a, c, g, or t
  misc_feature (281)..(282): n is a, c, g, or t
  misc_feature (305)..(305): n is a, c, g, or t
  misc_feature (311)..(311): n is a, c, g, or t
  misc_feature (318)..(318): n is a, c, g, or t
  misc_feature (335)..(335): n is a, c, g, or t
  misc_feature (339)..(339): n is a, c, g, or t
  misc_feature (364)..(364): n is a, c, g, or t
  misc_feature (384)..(384): n is a, c, g, or t
  misc_feature (390)..(390): n is a, c, g, or t
  misc_feature (396)..(396): n is a, c, g, or t
  misc_feature (402)..(402): n is a, c, g, or t
  misc_feature (410)..(410): n is a, c, g, or t
  misc_feature (413)..(413): n is a, c, g, or t
  misc_feature (416)..(416): n is a, c, g, or t
  misc_feature (433)..(434): n is a, c, g, or t
  misc_feature (442)..(442): n is a, c, g, or t
  misc_feature (445)..(445): n is a, c, g, or t
  misc_feature (451)..(452): n is a, c, g, or t
  misc_feature (457)..(457): n is a, c, g, or t
  misc_feature (546)..(546): n is a, c, g, or t
  misc_feature (748)..(748): n is a, c, g, or t
  misc_feature (780)..(780): n is a, c, g, or t
  misc_feature (891)..(891): n is a, c, g, or t
ggtgagtcggagctcctatggaggtggcagcgggtaccgagtggcggctgcagcagcgactcctctgagctgagtttgaggccgtccccgactccttccctccccttccctcccccttttntttgttttccgttccccttccccctcccttccctatccccgangaccggaacctgaggaggcagctgcggtggcagctgtagagttctcggtgaaggtatttcatttctcctgtcccctntnttnntnaccccancnattaanatnannctttngaananncttcgttgtaaagccgccaaaanggagantgcgaangcagaagggggtgcttntcgnttcaatacttcttcgggcggaggangaaataagggtgcacctcancaatancccaanactgcnggcaacancanatncctggggaaaaccccanngcaaaaancanagaaanngattnctgcacgaagcactagacgagatgacaactccgcagcaaacaactccgcaaacgaaaaagaacgacatgatgcaatcttcaggaaagtnagaggcatactaaataagcttactcctgaaaagtttgacaagctatgccttgagctcctcaatgtgggtgtagagtctaaactcatccttaaaggggtcatactgctgattgtggacaaagccctagaagagccaaagtatagctcactgtatgctcagctatgtctgcgattggcagaagatgcaccaaactttgatggcncagcagcagatgggtcaaccaggacagaagcnaagcaccacattcagacgcctcctaatttccaaattacaagatgaatttgaaaaccgaactagaaatgttgatgtctatgataagcgtgaaaatccctcctccccgagagnagaacagagagcatt

SEQ ID NO: 664748 - DNA, 187 bp, Homo sapiens
  misc_feature (37)..(38): n is a, c, g, or t
ggggggggggggccctttttttttttccctttttttnngggggggaccccccgggggggtttttttttttgggggggggggggttttggggtccccttttttccccccccccgtttttggggggggggggggggggggggatttttttttttttttttttattggtttttaaaattttttcccccca

SEQ ID NO: 664749 - DNA, 1203 bp, Homo sapiens
  misc_feature (48)..(48): n is a, c, g, or t
  misc_feature (64)..(64): n is a, c, g, or t
  misc_feature (75)..(75): n is a, c, g, or t
  misc_feature (83)..(83): n is a, c, g, or t
  misc_feature (104)..(104): n is a, c, g, or t
  misc_feature (114)..(114): n is a, c, g, or t
  misc_feature (158)..(158): n is a, c, g, or t
  misc_feature (205)..(205): n is a, c, g, or t
  misc_feature (210)..(211): n is a, c, g, or t
  misc_feature (218)..(218): n is a, c, g, or t
  misc_feature (224)..(224): n is a, c, g, or t
  misc_feature (227)..(227): n is a, c, g, or t
  misc_feature (272)..(272): n is a, c, g, or t
  misc_feature (282)..(282): n is a, c, g, or t
  misc_feature (284)..(284): n is a, c, g, or t
  misc_feature (290)..(291): n is a, c, g, or t
  misc_feature (294)..(294): n is a, c, g, or t
  misc_feature (302)..(303): n is a, c, g, or t
  misc_feature (333)..(333): n is a, c, g, or t
  misc_feature (339)..(339): n is a, c, g, or t
  misc_feature (341)..(341): n is a, c, g, or t
  misc_feature (343)..(343): n is a, c, g, or t
  misc_feature (346)..(346): n is a, c, g, or t
  misc_feature (373)..(373): n is a, c, g, or t
  misc_feature (402)..(402): n is a, c, g, or t
  misc_feature (416)..(417): n is a, c, g, or t
  misc_feature (430)..(430): n is a, c, g, or t
  misc_feature (432)..(432): n is a, c, g, or t
  misc_feature (438)..(438): n is a, c, g, or t
  misc_feature (442)..(442): n is a, c, g, or t
  misc_feature (446)..(446): n is a, c, g, or t
  misc_feature (453)..(453): n is a, c, g, or t
  misc_feature (462)..(462): n is a, c, g, or t
  misc_feature (466)..(467): n is a, c, g, or t
  misc_feature (476)..(477): n is a, c, g, or t
  misc_feature (490)..(490): n is a, c, g, or t
  misc_feature (497)..(497): n is a, c, g, or t
  misc_feature (499)..(500): n is a, c, g, or t
  misc_feature (506)..(506): n is a, c, g, or t
  misc_feature (525)..(525): n is a, c, g, or t
  misc_feature (527)..(527): n is a, c, g, or t
  misc_feature (559)..(559): n is a, c, g, or t
  misc_feature (580)..(581): n is a, c, g, or t
  misc_feature (589)..(589): n is a, c, g, or t
  misc_feature (714)..(721): n is a, c, g, or t
  misc_feature (725)..(727): n is a, c, g, or t
  misc_feature (730)..(734): n is a, c, g, or t
  misc_feature (736)..(736): n is a, c, g, or t
  misc_feature (747)..(747): n is a, c, g, or t
  misc_feature (768)..(768): n is a, c, g, or t
  misc_feature (792)..(792): n is a, c, g, or t
  misc_feature (811)..(811): n is a, c, g, or t
  misc_feature (828)..(829): n is a, c, g, or t
  misc_feature (838)..(839): n is a, c, g, or t
  misc_feature (841)..(841): n is a, c, g, or t
  misc_feature (843)..(845): n is a, c, g, or t
  misc_feature (847)..(847): n is a, c, g, or t
  misc_feature (850)..(850): n is a, c, g, or t
  misc_feature (861)..(861): n is a, c, g, or t
  misc_feature (866)..(866): n is a, c, g, or t
  misc_feature (868)..(868): n is a, c, g, or t
  misc_feature (870)..(870): n is a, c, g, or t
  misc_feature (875)..(876): n is a, c, g, or t
  misc_feature (879)..(879): n is a, c, g, or t
  misc_feature (980)..(980): n is a, c, g, or t
  misc_feature (1040)..(1040): n is a, c, g, or t
  misc_feature (1173)..(1173): n is a, c, g, or t
aaaaccccacaaaaaaaacaaaaaacaaaaaaaaaacaaaaacccacncaaaaaaaacaaaaanaaaaacaaaanaaaccaanaaaaaaaaaaaaaaaaaacanaaaaaaaccnacaaaaaaaaaaacaaaaaaaaaaaaacaaaacacaaaaaaacnaaaaaaaaaacaccccacaaaaaacaaacccaaacaaaaaaaaaaanccccnncacaaanaaaaanaancaaaacacaaaccccaaaaaaaaccaaacccaaacaaaaacaacnaaccaaaacncnaaaacnnccnacaaacannaaaaaaaaccaaaacaaaccaaaaaaaaanacaccnancnaanaaacaacaacacccaacaaaaaaaacnaaaaaacaaaaaacacaacacaaaaacanacaaaaaaaacaanncacaaaaaaacananaaaaancaanaacnaaacacnccacaaaanaaannaacacccanncaaaaaaacaaanaaaaacncnnaacaanccccccaaacaccccaccncnccccccccaccaccccccccccaccccccccncccccccaccccccccccccnncccccccnccccccccccccccccccccccccccccccccccccccccccccccccccccccccccccccccccccccccccccccccccccccccccccccccccccccccccccccccccccccccccccnnnnnnnnaaannnaannnnnanacacaactatnaccattacccctatttacgcncacactataccacaagctctctcnacaaaaaaccaccctcctncccgctcccgcgcacanncccgccatnncngnnnanaancacgccctccncccancncncccannccnccagacagccggctagccccactgcccgttccttttacgcccaagttttgctccttgagagcagattggctgatgcccctgcaaccccagcccaagctctncctcaaagaccgagtgacataagccattcccaccctcctaggttcacatccagggctgtntcttccttgggggaggagatggtgtcgtttagatcagggtaaggcagtcaggcgggtgttcaccactgccttttcttcctctgagcgtgagaacactgaacccagccactgcccctggtcccttcctgaaatntctaataaatccttttcccttcttgagcta

SEQ ID NO: 664750 - DNA, 969 bp, Homo sapiens
  misc_feature (5)..(5): n is a, c, g, or t
  misc_feature (287)..(287): n is a, c, g, or t
  misc_feature (307)..(307): n is a, c, g, or t
  misc_feature (314)..(314): n is a, c, g, or t
  misc_feature (318)..(318): n is a, c, g, or t
  misc_feature (338)..(338): n is a, c, g, or t
  misc_feature (377)..(377): n is a, c, g, or t
  misc_feature (408)..(408): n is a, c, g, or t
  misc_feature (410)..(410): n is a, c, g, or t
  misc_feature (428)..(428): n is a, c, g, or t
  misc_feature (434)..(434): n is a, c, g, or t
  misc_feature (436)..(436): n is a, c, g, or t
  misc_feature (457)..(457): n is a, c, g, or t
  misc_feature (469)..(471): n is a, c, g, or t
  misc_feature (502)..(502): n is a, c, g, or t
  misc_feature (612)..(612): n is a, c, g, or t
  misc_feature (615)..(615): n is a, c, g, or t
  misc_feature (746)..(746): n is a, c, g, or t
  misc_feature (806)..(806): n is a, c, g, or t
  misc_feature (939)..(939): n is a, c, g, or t
tctgngcccatttcgcaccaaccccagcatgatgattgatgacctcctgactccatgctcaccagggacccaggagccatggagatgacttggatggatgtccctggggacaaactcttagagcctgtggtttgcatgtcggacatgctgcggtctctggccaccacccggcccacggtgaatgcagacgacctcctgaaagtgaagaaattctcagaggactttgggcaagagagttaaaagctgcttcacttgggcaatggtgaaggtgggaggttgattggggnaaaaccaggcactccccatntcaacanccanacagggcaccagggcatgtnccaatcaatacagagttccctctgctatctggccatctnccagggaaccagaaggaaggacctagcagcnanagagacactccactgccntggagnanacagtggacactgctcttccnacttccacaaannnaggatgctcatcagctccttctgccccccanccccctttttccatcttttgttcccctaaattaatgctgcttggattttcatcttatttataaagataaaatcacctggaagtgtcaaggagtggggcggggtggcgggnganaagcagccgtgctgccaggtcacccagaccccagacagccggctagccccactgcccgttccttttacgcccaagttttgctccttgagagcagattggctgatgcccctgcaaccccagcccaagctctncctcaaagaccgagtgacataagccattcccaccctcctaggttcacatccagggctgtntcttccttgggggaggagatggtgtcgtttagatcagggtaaggcagtcaggcgggtgttcaccactgccttttcttcctctgagcgtgagaacactgaacccagccactgcccctggtcccttcctgaaatntctaataaatccttttcccttcttgagcta

SEQ ID NO: 664751 - DNA, 449 bp, Homo sapiens
gtgcttgatatcacagaggaaactctgcattctcgcttcctggagggtgtccgcaagtgttgccagtgtctgtctgcagattggctacccaactgtgtgcattcagataccccagttctatctattcaacgcggatacaaactgagatccctggtccgtggtgtactgtggcaggactggcattacgaccatatccacacattggcctgcacacaaaggtcgaatgggcgcattctcatctggagccgtagaaatcgcatataccttggtcccggtgtatggggttggggatcccgtagagccacttggtactacccgcggcaattgagtttgggcggcccaataggcccttgggtgccaccgcaatgctccaaatccttaaagtacccatttggccctttttccaccctttgggggccctttaggtgcccttttggtggcctttagga

SEQ ID NO: 664752 - DNA, 989 bp, Homo sapiens
  misc_feature (5)..(5): n is a, c, g, or t
  misc_feature (287)..(287): n is a, c, g, or t
  misc_feature (307)..(307): n is a, c, g, or t
  misc_feature (314)..(314): n is a, c, g, or t
  misc_feature (318)..(318): n is a, c, g, or t
  misc_feature (338)..(338): n is a, c, g, or t
  misc_feature (377)..(377): n is a, c, g, or t
  misc_feature (408)..(408): n is a, c, g, or t
  misc_feature (410)..(410): n is a, c, g, or t
  misc_feature (428)..(428): n is a, c, g, or t
  misc_feature (434)..(434): n is a, c, g, or t
  misc_feature (436)..(436): n is a, c, g, or t
  misc_feature (457)..(457): n is a, c, g, or t
  misc_feature (469)..(471): n is a, c, g, or t
  misc_feature (502)..(502): n is a, c, g, or t
  misc_feature (612)..(612): n is a, c, g, or t
  misc_feature (615)..(615): n is a, c, g, or t
  misc_feature (766)..(766): n is a, c, g, or t
  misc_feature (826)..(826): n is a, c, g, or t
  misc_feature (959)..(959): n is a, c, g, or t
tctgngcccatttcgcaccaaccccagcatgatgattgatgacctcctgactccatgctcaccagggacccaggagccatggagatgacttggatggatgtccctggggacaaactcttagagcctgtggtttgcatgtcggacatgctgcggtctctggccaccacccggcccacggtgaatgcagacgacctcctgaaagtgaagaaattctcagaggactttgggcaagagagttaaaagctgcttcacttgggcaatggtgaaggtgggaggttgattggggnaaaaccaggcactccccatntcaacanccanacagggcaccagggcatgtnccaatcaatacagagttccctctgctatctggccatctnccagggaaccagaaggaaggacctagcagcnanagagacactccactgccntggagnanacagtggacactgctcttccnacttccacaaannnaggatgctcatcagctccttctgccccccanccccctttttccatcttttgttcccctaaattaatgctgcttggattttcatcttatttataaagataaaatcacctggaagtgtcaaggagtggggcggggtggcgggnganaagcagccgtgctgccaggtcacccagacctccagacagcccccagacctccagacagccggctagccccactgcccgttccttttacgcccaagttttgctccttgagagcagattggctgatgcccctgcaaccccagcccaagctctncctcaaagaccgagtgacataagccattcccaccctcctaggttcacatccagggctgtntcttccttgggggaggagatggtgtcgtttagatcagggtaaggcagtcaggcgggtgttcaccactgccttttcttcctctgagcgtgagaacactgaacccagccactgcccctggtcccttcctgaaatntctaataaatccttttcccttcttgagcta

SEQ ID NO: 664753 - DNA, 401 bp, Homo sapiens
cggcacgaggagtaatagggtgacaagctggccttggagccaggctagtgggaaagacctgagcctgcagctttcaacagcgggctttcctggacttctacttcaattgcagagagccgttcgcagagacttccactgtagctctgtgccagggcggtagagagtccttggtgactttggccaggggccaggatgggttctgcgtggatctgagttgcttgggggagcaagtcctccaggcctgtgcctggggtcctggtactgaccgtcctcccccactgccctagtaagggcactgaacccacatcctggatcttgagaaaagctggggccgcctgtggttagcagctgctttctcaaatgacatatttgggatattttctttttcttcccaaacctga

SEQ ID NO: 664754 - DNA, 311 bp, Homo sapiens
atcgctgtccattttggaggtgggcactgagggcatgttctcaaaagcccgccttacgtcccaacggcccaaacgtattgggcccaatctaccggcatctacctgggaaatacagttgcacttgtgtagttatgggttatcgtcaacttcaggcaggagtagaaatcatatttcttttaattgaagctgcttctgacagcttggtatatgccttatgagttactaagtacatttcaacagaaatcagatggtatctgctctctcagaaatccggtctcccattcccgcggcgccgggcggccgcgcgccga

SEQ ID NO: 664755 - DNA, 380 bp, Homo sapiens
  misc_feature (32)..(32): n is a, c, g, or t
  misc_feature (184)..(184): n is a, c, g, or t
ctcggcctcccagagggctgggattacaggtngggaccagtacgccgggcctacaaggttttaaattatttttcaaaaagaatacattcatgagattcaaaattcaaaaagcacaaaaagataatgaggaaatccccctccaatacttggcctgccccccaagtaccacgagacccgagtccgncaaggcaactggcatgaggcttcttgaggctctctctagaaaaattctatggaaataaaaacaaatatgtggggaaaaaaccacacataaatctttattaataattctttccccttttggaaacaaatggacaaaatatacactatcctgcccctcaaataggttacacgaacaataaaacccgggaaatgacctg

SEQ ID NO: 664756 - DNA, 235 bp, Homo sapiens
gaagctggaaatcaccagggattgggtcagtggtcgctgctgtcgtagctgcattgaatccgtggatggatattgatgcgacgtcccgtcctagtcgattgccaccttggtagacgagggatggctccgcaccctcagagtaggagatcaagctccaggctccttcttggttgtcatagtgatcgggtaagcttattgccccctcttcttataccctatagagcttctagactag

SEQ ID NO: 664757 - DNA, 1163 bp, Homo sapiens
  misc_feature (698)..(698): n is a, c, g, or t
cagaaaggccatgtacaatgaggaagtactcacgccgctgaatgccgaaggtctgaccagaaaaagaaggagagaggttctcggcaactgtctatcatcaacccatgtgtggttggttgacaacgaactggcgtgtcacccggaggtgcggcttcacaactgtctggacacaatcgccgtagattattatcgctgactggaatgcatgtgccgtcgaacaagctgtatgagccacgggacaaaggaagaccgctttccagatcagaggaacggtgaggcaacacatttgacgataggtgcagggtggtgtattccccgcgcggtgaaccctgtttcctggactgcagtcgctgcaacctgggtacgcgtactaccacgcggtgtgcaaatgaatggggctggtgttgtgtccatgtatatgacagagaccgggctagggtggccattattgtaactatgttgatcgggtagccctcatggatcactcaaagtccgatgtatgtccatcataacgaatggaatctagcagcgaagaagatcttcaggtgcatggggccagtgttcagatccatagaattggatggactcacgtgagacggttgggagagaaatcctccagaaaagcatgcgttaatctgactgctatacgtggccaggaaacgacaaggaaaaggcatgtggcgcgcataggccgcggnattcaccaagggagagggctgatggaatccttcgataaaccttgaccaggatgatgaaactactgatggatataccgcgaagtcgaaggcggcaaaacgcaattgagtccgagaaaaggacgtggtgttgacttcaccaattagtttttaagcgaaaagattatggaaaagtcttaatttcccatcgagacatctccaggggggcataaccctcgcagaaatcaaggaggtaagcgattcctgggacgcaattgggcaaggtgtttgcctcctgcgaagattgggggtgttcctggagagatggtcctgttggggaaaacccttgaatctaagagttaagccttggagttgaactggaaaaaaggcacaacccccgagtttaaagggaaagagcacaaaaggacccgattggggtgagcgcgcgccctgcgtcccaccgggaaaaaaggactcttgctataccag

SEQ ID NO: 664758 - DNA, 808 bp, Homo sapiens
ctgacgggcagtttgacgtggcggaacagaggaccccggaggagcacatgaaggagaagatctgaccagatgggatctccattgcccagctcctgcccacactcccgcctgttgccctgaccagagtcatcatgcctcttgagacagaggaatcagcactgcaagcctgaccgaaggccttgaggcccgaggagaggccctgggcctggtggagtgcgcagagctccatgctactgagagagcaggaggcatgacatccgtcctcttcatactctagttgaagatcaccctgggggaggtgacctgcatgccagagtcacacagatcctccccagcagatccatcagggagccatccagcctccccactaccatgaactaccactctctggcagccaactcctatgagtgactccagacaaccaagaagaggaggggccacagcaccttccctgacctggagatctgagttccacagcagcactcagtaggacggtggccacgttggttcattcatctgctcctcaaagtatcgaagcaggggagcccggataacacaaggccgaaatgatggggagtgtcatcggaaattgcccaagtccttcttcccctgtgaatacttcaatcacaagatatcagattcactctgcaattgtactaagacctaggagctgactggcagtggacccccaacggccaaccgtgtacactctccgccacctgctgcagctctccactctggctgcaggtgaccacccgatcatgccactacggctcctgaatatactggcctaacgcatcagcacgtc

SEQ ID NO: 664759 - DNA, 818 bp, Homo sapiens
agatattaatattaactggctgctgctgttggttaggaacttgttgattagtcatctccgcctttttaaaatgcagtgtaacctgcacatcttttatgttaatgaatgcaaatggccaatgagtgtataaatacttttcagcatcaaaaaaaaaaaaaaaaaaaaaaaaaaaaaaaaaaaaaaaaaaaaaaaaaaaacaaaacaaaaaaaaaacaaaaaaaaaaaaagaaaaaacaagaagccgaacgagaagcaaaaagaagaatagaacacaagagagagacggagagcgagacgaaatataaatcacccacagagaagagtcacgacagacaaacgaccccccgcggacgtgtgaaatgcgccacgagagcacacctcgttcacctaaaaaacccccctaaatactcaagcggcgcgccagcccaccccggaactagaggagtcgaaacaacaactcagtcaccagtaaaaacaagagccgcaaataaccgcctacgacaggcagttacaaattaaaaaacaacaccactaacacggcgtcgccaaaaaagacgcacacaacaaaagccgcagccgcaagcaactaacgaaacagcacgagcgatctccgaaacgcgatgaggagagtacaccgggagaataaaacaaaagaaaagtgaaaaacaagtcaagaactacccagaagaacgccaacggccacacaacacgccgccacacgctcccgcacacgtacgcgtcagcccgacaagcaccagcagctcaagccataacgaaccaccacgcaaggaccagagtgccacacccacgatccgacc

SEQ ID NO: 664760 - DNA, 2139 bp, Homo sapiens
  misc_feature (780)..(780): n is a, c, g, or t
gtgtttgatgtttatgattgttgttaagtataggtggtgtggtgtgagtgctcgatgatacgttgtagttagtgatttatggtgtggggttgtgtaatgttttttatgattgtttgatttgttgttgtggttgtatgtagggatgagtgttgtttgtgagtgtgtgatgtatagtgagtgtatgtgacattgttaggtttctgagtggattgtttgtgttgggtcgtatggttttatgtggaataatgtttgtgtcgtgatagttatggatgtttgtagataatgatgtatgatggtgatgtatgaggtgagtgagtagtgtggttggatgaggtgtgatggtgtgtcgtgtgatagggtgagagagagtgtgtgggtgtgattgtgatttatgatgtgtaagtttgtctttgtgtgttgtttcgggtgccttgttggtgtgccgcgttgtcggcgtaggcgcgttttgtagcgtgggtgtgtgtgctgtgggtgtgctccttggtgtgtcgtggttgttgggttgctgtgttctgttggttgtgtgttcgtttgttgcctctggctgttggtttctggttgttttcttctggttttgttattgctaccttatttgtgcttggtgtgtgtgttggtttgtgtgtgcgtcggtggtgtcgtggtggcgttcggtcggtgtgtgtcgtgttctggttgttgtgtgtctcgcttcgtctgttctttgttatgcgttacttgctctctacgtggtcgcattgggtgggctggcgttcgcgctcntggtgtgtttgcttgttgtgtgtgcttggacgtcgtgatcgtgctgctgtgagctttcgcgcgtgtgtggctgttgtggcggtcgctcgtgtgctggcgcagcgtggtgatgcgggcgtgtcgcctcgctcggtgtggtgtggcgactctgcgtgtgtgagcgtcgagggggacacggggtgtgtcgctgtgtgtgtgtgtacgcggtgtgtgtctggttgtgggtaggtcgcttgtgttgttcgtcatgcttgttgtgtcttgttgtgggcgggtatagcgtgctgcgtgctggtctgtgctgtgatggtgagtgtatgtttgttggtgagggtgtatagtgcgtgtggtgtgttgttgggtgtgttaggtgggtgatatggggctgtcgatcgtgggctggctagagtggatgcctcggattgagttgtaatgcgttgtaatgtagcttcgttgataatgtgttgtatggttttgatgtagtgtgtcgttgatgatctatagtgtatgtgggttcgtgcgtttatggtttggtcgtgtggtgtggccggttgtctggagagttggttattggaggtagtgggagtggatttcgtgtatggattgcaatatagtagaggatgttatattgagtggtggatgtgtgcgtgtggtgttgtgctcggtggtggttggggtgtgtgtgggtgcgtgttgtcggggtggcgcgtcgaggtgctgtcgttgtcgtttggtggccagtggtggcgtggagggtcgcgtgacggattgcctggattagtgggggtatgatctctcgtttggtcgggtttggtgtctgtaggtttgtgtggaggccggatcgcctggcgttggtgtgtgtctgggccgtcgtcgtgtgcgtgcgggagggatgggaggtgtttgtggcttttgtgttgtggattggcgggagggcgtgagtgcggggggagaggtgtgtgaggttgtagttgttgtgtttagatgggtatgtgttgtgagtggtagttgttaatggtatgtatggtagtagtaggtgagtacagagaatcgtaggtaagcgtggttgcgtggggttgtctgtgtggtcggtttgagaagtagtccgcatcatgctggtcagtcagaaagataaggccagttcctcagagccaatagtaggagtgcaggctacctggtgatcctctgaggggcaggagtgcttcctggtgtgtgtatgagaatcccttgccatgccttgtattcactggcagtgaaatgcctctgtggtcctgtccaagatcgtatcgttcactgatttctgaatcatgttctagttgcttgacctgccacatgggtccaaacttcatgggagcataa

SEQ ID NO: 664761 - DNA, 150 bp, Homo sapiens
catgttccggacattatccgctgggctcctacgacagctttgatgccccaagcgattacatcattacggagaagacagatcttgctagcagaagaaggacagtgaggggttatgggttcgtagctccgagggggccaaggacgcaagacc

SEQ ID NO: 664762 - DNA, 158 bp, Homo sapiens
  misc_feature (107)..(107): n is a, c, g, or t
  misc_feature (127)..(127): n is a, c, g, or t
tctccgtgtatcaaatggtcttgaaactcttaaaaagattgttattacctcaaatagaaagggtgattgtatttgatatatcctggggacactgctcgtatgcaccntcttaataaaatgaaagccnattaaataagacatcatttaagggatagagg

SEQ ID NO: 664763 - DNA, 156 bp, Homo sapiens
aaaccctaattacgcagtcagttttcttttaggtaagagcaataataccaaataataattcttgatacatttaaagaaacagcccctccgccctaaataatcatagttctttctttggtggtagagcagagtggttaaggatgtagactcgagaca

SEQ ID NO: 664764 - DNA, 483 bp, Homo sapiens
gtaacagttaggcaggagctaaaatcttcaggtagtgagggaatgataccacccatacttagatagctcctcattttcctactttcacagatactgattccatctttagacattttgaacaatgcaacaatgttaattttcttatactttgttcaatatactttcatgtgtagtcaggtactagcgttttcctttttgccccgttttattctggttattagtaattcactagtttctaaagctaattgtatcatcattgctttttacacttgaaatatccagtcactatttgtgcagagccaattcaatttttcttcttgaaagaatataactcttagctacaagaatggtccagcaatggtaatagaattattctccatggagaatacctttttgcttctctagctctcccttttaacattagccttaatctgatagcaaaatcagcagtcctaaaacaaaaggaaaaataatgatgtttct

SEQ ID NO: 664765 - DNA, 158 bp, Homo sapiens
cacacatattagccctggggcttctccagtgatccgaggcccggaccacgggtgacatatctggtggagaagctgaacctcgtgcacatgactcggacagtactacgctgactgaacacacgcgactgagcacacgcgactgaagcacacgcgactga

SEQ ID NO: 664766 - DNA, 326 bp, Homo sapiens
gtgtttcatttgtcgaggagaggaagatgcactggttcaccaagtaatctggtccctgaggaatcagtttatggtgagaagagagtctcgattatcgagaaggagatgacaaaattgagtacctgacgcctggaaccccttccgctccaagctagcagcatcaatcctgggtggtgtgaaccagatccacatcaaaccgggtggctaaggttctctacctcgaggggctgcctcgtggcaccacgtttctcccatcgtctctgaacatcgattgagtccggcacttgtctacttactatagctagtcgaggttcttcccatccgac

SEQ ID NO: 664767 - DNA, 175 bp, Homo sapiens
cgcgatgcgcggagaatgactggttctagatcgttgatccaacagattgtgtaatgcgtaaggttggctcttccccagcaccgtgggggccctggcacccctttcagatgttcccaggtcttgcctatgtggataacatgcaactctggggcattgtaggtacgccatttcttga

SEQ ID NO: 664768 - DNA, 367 bp, Homo sapiens
ttttttttttgagacggagtctcgctctgtcaccaggctggagtacggtggcatgatctcagctcaccgcagcctccacctcccaggctgaagcgattgccctgcctcagcctcccgagtagctgggactacaggcgcatgcaccacgtccggctaatttttcgtattttagtagaaacggggtttcaccctgctggccaggtcggtcttgatctcccgaccttgtgatccgccggcctcggcacccaaagggcctagattgcaggtgtgagccaccgcacccggccccatatcagttcttttagtgaattgtagctagcagaagcacgtagagaaggaataagtagaataaagtgtcatagaaata

SEQ ID NO: 664769 - DNA, 1001 bp, Homo sapiens
  misc_feature (424)..(424): n is a, c, g, or t
ctgcaacctctgcctcctgggttcaagcgattctccatctcagcctcctgagtagtcatgtgcaactacacggtgtgtgccacgaggccatggctaatttttgtgttttatgtgtgtgatgacggggtttcatcagtgttcaccagcgcgtggtctcgaacgtccatgagactctaagcctatcctaccctcactcatgcttctcaatagtggctgggacttacgaggtcatgagcttatcatagccttgatcctcttatgtcacgaattctcttgcatcatgtctaatgcgtgttttgttcgcccatctgagctgtttgtccaaaattcatatccatagccacttcatgggttcctaatcctgacaagtgtccgaagcatttacccagtgataagggttcttgcgtgcatttgtacccgtgcnctatacgttacatattcggtcgttcttgcaccattgctgattagacttcagggagcacgtctattagaggtgttcacgtccgcgatatagcatttggtaatgggtttccttagaacaatgacggcaccgtcgattcgatcggtgccaatatcgcttttggggctcatggcacaagactactttgtcaaatattatccaagctcatatagcctccttttgttgtggacagttgtagaagtccggacttggacttgacgtgtgtcaaggctgcatcgctctgacgcttccgttgttgtcctgtggctctgggcgagatcaagccagcggttcccaaatgtactatgtagtttaacttgtaatatggcgtctttttatggggcttgggtttctctcaaagaatcacgaatttaactggcactgtttggctattacaaattaccgtggaccatggcttattttattggccttgggaatgcccttagtaaatgaaatctaaaatgtgacatttttgtgggagaccagaaattcaatctaaattgaatctggcctgagggtttaaaagcatttttcgaggaca

SEQ ID NO: 664770 - DNA, 455 bp, Homo sapiens
gcgtcgacgaggccttgacctcccagacttaggtgagcctcccgcctcggctgctcagagtagctcagactgcaggtacaagccacggctcctggctaatttttaatttttttgtagagatgggatttcactgtgttgcctaggctggtcttgaactcctaggctcaggcaatcctcccaccttggcctcccgaagtgctagaattataggcatgagccccccaccgcatctggcaataggaatctttataaatgatttcagctaattaatattcctttgaaatttagaccttatttgagtatcagttttatactttggacatataaaatacattggatagatttgcttttcatataaaagataatcactttgggaggccagcgcgacggatcacgaggtcaggagtttgagaccagcttggccaatatggtgaaacctgtctctactaaaaata

SEQ ID NO: 664771 - DNA, 261 bp, Homo sapiens
cattccccgtactgaaggccaggagaagaagggtttttttgaagatcgtcgcccttctgccaactgcgacccttttccggtgacagaagccttcatccgcacgtgtcttttaaaggaaaccggcgatgagcccttccagtacaaaaattaagcggcctagacctccagttgtggagcccttcttagtttttaatccaactccaactcttccccttctcccagttgtcccgattgtaattcaaagggtggaatatcatggtc

SEQ ID NO: 664772 - DNA, 433 bp, Homo sapiens
taaatttaaaacttctccatagtagtttggcaaacgtgacacatcagctaactgctatctcctttatactttaaaatggtaaagtctgaataaaacactgactcaggagggcatgaatcttatctaagctttataaagaaaaacgaagcacactaatgtaaaacattaataattccaacagttgaatggggcagacactttaaaagtgatctattatttttgctgtcagtcactcataaagccagacagaaaaatgtaagaattatcaaacttccaaaccacctttttccctgttcatgcacatatctccctcgtacgttgatacttcctttgatgagttaccataaatgtcgatcttgtgactgaagtgttttttagtcaaggaaaactgattatcccaaaattaaagtgcaaaacgatagcatgcctgagt

SEQ ID NO: 664773 - DNA, 180 bp, Homo sapiens
gcatgttatcattctctactgaaaatccggcgctacttacctgccaccggtacatattttgtatggcgcgcatgtatacctgctgcttattttaaatcgcagccaaaagatcgtccagcgcttctgcattactgtaagggatcgtatccccggcgtattctggcgacgggatgttaatcg

SEQ ID NO: 664774 - DNA, 166 bp, Homo sapiens
ttcaaagttgcacctgtgcgtatatctttaacttatcaacatctaagtttcagatttctggagtagaaattgacttgtataagccggacaattgtatatacatagttgttttgactgcatagagtaaaattccgatgtctcgattttctacctctatcagtctgga

SEQ ID NO: 664775 - DNA, 843 bp, Homo sapiens
  misc_feature (458)..(458): n is a, c, g, or t
ggccgggcgcggtggctcacgcctgtaatcccagctctcaggaaggctaagaggcaggagaatcgcttgagcctgggaggtggaggttgcagtgagccaagatcgctccattgcactccaggcctgggtgacagtgaaatcgtccatctcaaaaatatatcacagaataagagtatgtcttgtcatccagctcctatgtcctgttatccagctccaagtacagctgtgtgtatatcaagcgattttcaaaaacctttaaactaccaggatgaagatccagatgtttttccatgggttaagaagacgaataccatcatagcagaaatcatgaaaaaaaacgctgttgtcggccggcggcgctatagtgccaccgcagttgaagagcgatgtgtttgtataacactcgaatccgggggagggggcgcgcggcccctcggaaaaaggacataggcgtggcncttgtgcgccagaaacgagggttcggcctgagaaagggagcaaccgtgggggcgatgaaaagaccgccggcttgggagttttgcttcgcccagatgaattaaaaaaaaccgcgctggggggggaagaagcacgaagagggtgtttcttgaagcagagttcccccccatcagtgggcgggctgccaagggaagaggcagcacaccgggaattttttattcacaaacgtggggtttcaccaagaggagacgctcagggattattacaaatttatgccgcgttcttgggtggtgacttggaatttcggctcaacatcggcccattttggtactttgggtttactccttggaattctattcacacagcgcaacaaaatcacttattatc

SEQ ID NO: 664776 - DNA, 1012 bp, Homo sapiens
gggcgaggctgcaccagcgcctggcaccatgaggacgcctgggcctctgcccgtgctgctgctgctcctggcgggagcccccgccgcgcggcccactcccccgacctgctactcccgcatgcgggccctgagccaggagatcacccgcgacttcaacctcctgcaggtctcggagccctcggagccatgtgtgagatacctgcccaggctgtacctggacatacacaattactgtgtgctggacaagctgcgggactttgtggcctcgcccccgtgttggaaagtggcccaggtagattccttgaaggacaaagcacggaagctgtacaccatcatgaactcgttctgcaggagagatttggtattcctgttggatgactgcaatgccttggaatacccaatcccagtgactacggtcctgccagatcgtcagcgctaagggaactgagaccagagaaagaacccaagagaactaaagttatgtcagctacccagacttaatgggccagagccatgaccctcacaggtcttgtgttagttgtatctgaaactgttatgtatctctctaccttctggaaaacagggctggtattcctacccaggaacctcctttgagcatagagttagcaaccatgcttctcattcccttgactcatgtcttgccaggatggttagatacacagcatgttgatttggtcactaaaaagaagaaaaggactaacaagcttcacttttatgaacaactattttgagaacatgcacaatagtatgtttttattactggtttaatggagtaatggtacttttattctttcttgatagaaacctgcttacatttaaccaagcttctattatgcctttttctaacacagactttcttcactgtctttcatttaaaaagaaattaatgctcttaagatatatattttacgtagtgctgacaggacccactctttcattgaaaggtgatgaaaatcaaataaagaatctcttcacatgagaaaaaaaaaaa

SEQ ID NO: 664777 - DNA, 821 bp, Homo sapiens
agcaagaagtgactagccctttttggggagagtaaggcatgggaagtttttacagaaagaggaacaactgaatggcctttgaggataaccaagagccctacagttgcatatggactccgtgaccaccttcagtaactttcctgctcattgcacatctttttcaggatttggtattcctgttggatgactgcaatgccttggaatacccaatcccagtgactacggtcctgccagatcgtcagcgctaagggaactgagaccagagaaagaacccaagagaactaaagttatgtcagctacccagacttaatgggccagagccatgaccctcacaggtcttgtgttagttgtatctgaaactgttatgtatctctctaccttctggaaaacagggctggtattcctacccaggaacctcctttgagcatagagttagcaaccatgcttctcattcccttgactcatgtcttgccaggatggttagatacacagcatgttgatttggtcactaaaaagaagaaaaggactaacaagcttcacttttatgaacaactattttgagaacatgcacaatagtatgtttttattactggtttaatggagtaatggtacttttattctttcttgatagaaacctgcttacatttaaccaagcttctattatgcctttttctaacacagactttcttcactgtctttcatttaaaaagaaattaatgctcttaagatatatattttacgtagtgctgacaggacccactctttcattgaaaggtgatgaaaatcaaataaagaatctcttcacatgagaaaaaaaaaaa

SEQ ID NO: 664778 - DNA, 1302 bp, Homo sapiens
  misc_feature (64)..(64): n is a, c, g, or t
  misc_feature (868)..(868): n is a, c, g, or t
tggcctcaaaaggtgactttttttcaaaaaaaaaaattgacaaaatgtgttccatctcccttgngcctccctttcccttccccccttcctgtgctgtgcctccttcagcccccagagatttgaccccgtggcgtggggcgtgggtgtggcaggacagccccttcagatgtgaggctcagcaccattgtgaggggcatttccctcaagtggagggtgttgtgttagaagaggctcctcaagtgttctctcgaaagagagtctccctcgtgtctcttctcttctcgtgctccaccgagtgtttaatacccaccacctttataggggccaacaccgctccaccttcgaacgcgaatctcgtggtggacatttatagttttccccctgtgttggggtgtgcgggaagaggctcacataagttgtgagagtgacactataaagagaaaacacctgtgtgctgtgccactatctcaaaaagtgcactctctgtgggccccagaggcgagtgtctccgagggtgggtataaaatctccaagacactcttctgtgcttgagagacgcccgaagaagacggaaaaaactctcccctctcgaagtaagaatcgtcgaggggatctcatcgggtatcgcccctttgtggagagcggctcccaataataatgtctcttcacaatggttgacgagtgttgggcgaggagataattaccagcgggatgaagatcgtccttgtcgagaagcgacatgtcgcaatttcttttctctctcgggggagagaaccgccacaagtgtgttcacaacctctttcatccctctccagaggggagggttgtctctgacgatctagaaagagacatgtttggaacctgtgcncccctgttgggagcgaattagaaatgttcgggcctaccgagggggggtaattctccacgatcatacaaccaaatggtctgcaaccaattatgacgtgttgtgtgtcatccccaaggtgtattcctccacaacatctaccctactctgatggttatccaccccccaggtgttgtcggccatgttgtcctacacacacttgtcggtcgcgggagaaattcacgcccctccgacgagggtgggtatcaacaccacttttatctcccacttcctatgtgcacccacaagacaatttcccggagacactgtgggggcgtccccccctatcatgtaaacactctatctagtggggccaccaccctctcaaagcgacaacttattcaacaaaaaggcgccatatcagtcacggcctttgacgcaacgacaaacacaccaca

SEQ ID NO: 664779 - DNA, 188 bp, Homo sapiens
ctttctttttggtagagaagggattcactcggttcccaggcggtctcaaacggcgggcctcaagcaatcctcaagcaagcctcccaaagggtggggattacaggtgtcagccaggtgccgggcctctttatttacctaggaaaactggcagcacggaggtcctggtcctttaagtggactagagtggg

SEQ ID NO: 664780 - DNA, 967 bp, Homo sapiens
gggcgaggctgcaccagcgcctggcaccatgaggacgcctgggcctctgcccgtgctgctgctgctcctggcgggagcccccgccgcgcggcccactcccccgacctgctactcccgcatgcgggccctgagccaggagatcacccgcgacttcaacctcctgcaggtctcggagccctcggagccatgtgtgagatacctgcccaggctgtacctggacatacacaattactgtgtgctggacaagctgcgggactttgtggcctcgcccccgtgttggaaagtggcccaggtagattccttgaaggacaaagcacggaagctgtacaccatcatgaactcgttctgcaggagagatttggtgactacggtcctgccagatcgtcagcgctaagggaactgagaccagagaaagaacccaagagaactaaagttatgtcagctacccagacttaatgggccagagccatgaccctcacaggtcttgtgttagttgtatctgaaactgttatgtatctctctaccttctggaaaacagggctggtattcctacccaggaacctcctttgagcatagagttagcaaccatgcttctcattcccttgactcatgtcttgccaggatggttagatacacagcatgttgatttggtcactaaaaagaagaaaaggactaacaagcttcacttttatgaacaactattttgagaacatgcacaatagtatgtttttattactggtttaatggagtaatggtacttttattctttcttgatagaaacctgcttacatttaaccaagcttctattatgcctttttctaacacagactttcttcactgtctttcatttaaaaagaaattaatgctcttaagatatatattttacgtagtgctgacaggacccactctttcattgaaaggtgatgaaaatcaaataaagaatctcttcacatgagaaaaaaaaaaa

SEQ ID NO: 664781 - DNA, 634 bp, Homo sapiens
tccaattccaacagtatgagctagttacacatcacagaccttggatcaagtgacaggttctgtgtctaacctgagtcgactcaaccatgtagccatagcattgcctgatgtggaaaaggctgcagcattttataagaatattctgtgggccacatttagtgaagcggtccctcttactgaacatggagtatcatgatggttatgtcaacctgggaaataccaagatggaactgcttcatccattggcacttgacagtgcaattgcgggttctttgcataaaaacagcgctggaggaatgcatcacatctgcatcgaggtagattatattaatgcagctgagatggatttgataatataagaagatgcagcttctacctgaagaggtcaaaatactatcacatggcagaccactgatgattctgcatcctaaagactgtggaggagtccttgtggaactggagcaagcttgatttatatttgctagcaactcaattaattgacctgtttcatcatggtaaagtgtagcagtcaaagactgatataccgaaagatgaaaggtagacatatgtaagaacatacatatgtgtatgatccagactagcaaacatattagtagaatcgaatttgaagaaa

SEQ ID NO: 664782 - DNA, 833 bp, Homo sapiens
gggcgaggctgcaccagcgcctggcaccatgaggacgcctgggcctctgcccgtgctgctgctgctcctggcgggagcccccgccgcgcggcccactcccccgacctgctactcccgcatgcgggccctgagccaggagatcacccgcgacttcaacctcctgcaggtctcggagccctcggatattcctgttggatgactgcaatgccttggaatacccaatcccagtgactacggtcctgccagatcgtcagcgctaagggaactgagaccagagaaagaacccaagagaactaaagttatgtcagctacccagacttaatgggccagagccatgaccctcacaggtcttgtgttagttgtatctgaaactgttatgtatctctctaccttctggaaaacagggctggtattcctacccaggaacctcctttgagcatagagttagcaaccatgcttctcattcccttgactcatgtcttgccaggatggttagatacacagcatgttgatttggtcactaaaaagaagaaaaggactaacaagcttcacttttatgaacaactattttgagaacatgcacaatagtatgtttttattactggtttaatggagtaatggtacttttattctttcttgatagaaacctgcttacatttaaccaagcttctattatgcctttttctaacacagactttcttcactgtctttcatttaaaaagaaattaatgctcttaagatatatattttacgtagtgctgacaggacccactctttcattgaaaggtgatgaaaatcaaataaagaatctcttcacatgagaaaaaaaaaaa

SEQ ID NO: 664783 - DNA, 389 bp, Homo sapiens
  misc_feature (119)..(119): n is a, c, g, or t
  misc_feature (339)..(339): n is a, c, g, or t
  misc_feature (341)..(341): n is a, c, g, or t
  misc_feature (384)..(384): n is a, c, g, or t
  misc_feature (386)..(387): n is a, c, g, or t
tccaatttatttcccccctgaagttctgtttaaagatgaagaattcattctttgaaatagggattgaacctagaattatgacctaagaaatcctaatgccataatggcccgggcacggntgtcacgcctgtaatccccagcactttgggaggctgagtgggcagatcacgaggtcaggagatcaagaccatcctgtgaatggtgaaaccccgtctctactaaaaatacaaaaaattagctgggcgtggtggcaggcgcctgtagtccccagctactcgggaggctgaggtgggagaatggcatgaacctgggaggcggagcttgcagtgagctgagatntngctactgcactccagcctgggcgacagagtgagactccatctntnnat

SEQ ID NO: 664784 - DNA, 100 bp, Homo sapiens
gcccagagttacggcgcctagcaactcccatcttttatctatctggctggcagggaaggaaagaacttgcagtgttgctgaaggaagttgctagggggcc

SEQ ID NO: 664785 - DNA, 624 bp, Homo sapiens
  misc_feature (507)..(507): n is a, c, g, or t
cccggtaagctgcagtgcatctaccccgggcacaatggctacggaaaatggcgcatcgtgcatgccggtgggccgctctggcgacccctttgttttctgcaccgaaggcatgccgcagcactgctgggtggcccttaatccgctagccggcaccaccatgaaaatttgcaaatactacaaccgcatgtggatagagacgtatagaaaaatctgccccaaagccatgcgcatggggcattggcaaggcaagggcgcgcctaacacaacgccgtttgtgcattaaacgctggcccttggcttatgcgtgacgtttgcctgccttttattggccttacctcagagctttcaaacaggaacaccatcatgaaaaacaaaacacttcattcttgccgcccggccgcttgggcgctggcggtgggcgcatgcctgttgctgctgggcacgcccgcgcgtgcgcagtggctggtgcaagacgaaaaactgtacaaactggtaaaagagggcatngttgacaagattgctacatcgggcaacggcaaaggttcgtttaaaaaagatggtacggttaaggacgatagccacgaattccatgcgctaacgcttactactaaagagctattgact

SEQ ID NO: 664786 - DNA, 244 bp, Homo sapiens
gtagagacgggtttcaccgtgttagtcaggatggtctcgatctcctgacctcgggatctgcccgcctcagtctcccaaaatgctgggattacaggcgtgcgacctcgcccagccgaaatctctgaattcttgagagagagatatctggtcatttcagtgggtgcccccgggtgtggtggctcacacttgtaatcccagcactttgggaagccgaagcaggcagatcgcttcagcctagtcgacg

SEQ ID NO: 664787 - DNA, 496 bp, Homo sapiens
  misc_feature (287)..(287): n is a, c, g, or t
ctctgggtgcctgccttctccttactgggacagtaggtataagagcttggttaggccgggtgccgtggttcatgcctgtaatcccagtgcttggggaggccgaggcgggtggatcacctgaggctgggagttcaagaccagcctgaccaacatggagaaaccccttctctattaaaatacaaaattagccaggcatagcggcacatgtctgtaatcccagctactagggaggctgaggcaggaggattgcttgaacccgggaggcggaggttacggtgcgccgagantctgccattgcactccagcctgggcaacaagagcagaattccgtctcaaaaaaaaaaaaaaaaatgctgggcgtggtggtgcatggctgtagtccagctacttgggaggctgaggcaggagaatcacttgacccgggaggcggaggttgcagtgagctgagatcgagccactgctctccagcctggctgacagagcaagactccatctc

SEQ ID NO: 664788 - DNA, 966 bp, Homo sapiens
aatctgcgctcgtgcccttggccgaccctctactctatgatgtgtgactgctctcatcatccaggtgctgagcgcaagatcgggctgtgtacccatccagacctgtaccccgtcgtgctacatttcctgccccgtgcataactcgaaatggaggtagtgcgctcggatagcccaaactggcgtgcagctcgaattgttggaacgttcgaccgcaagctaactgaatacgataagtcctagcttaacatggcgtatcgttcttgctgataggtcatcattcctacacggcgggatttagatccccatgcatcactgtgctgaccaggtctgtgttctcatccacttcactagctcgcattgtccgttgcatcagagactccaaactcatcgccttccttaaccatgttaatgtctagcaatctctttgtgattggctcagtgccagtgtcctcctcgcattgcacgttctctggggtccttgttcaccttgagttttgtacctctgctgctgacgtatttctgttctcctctcgtcgtgcacgcagggcgtcagacgtttctctttttcttctcctcaggtccatatctcgtcggtcgcaggccgttggggtcgcatgaagctcagtgctccgttggaagcaggttcttaggtaacttccttcctttacccctgtaaggttcggttgtgtgggtctcaacgcgcatttggtttgccttctaggcttcacctggtctgtggattattccctgtgtgacggttcctggtactcgtggttcttccccgctcgagggctctgtagggttcgttcgaggggccagggactgttatgcttttcgaacacgcttgctgggcttcccggcccggcatgggatggcccccgtcagggaacttccggttgaccccctcgctgttgggacacttgcccttccgattgggttcgcagatgtttcggttaagcaaccctg

SEQ ID NO: 664789 - DNA, 199 bp, Homo sapiens
tgatcctgtcctgttcaagtccagtggactctccttcccaactgtggaagaagccagtgttacctctgtgcacattcatttcaatattccctgacctacagatgtcatctgttctttgcctccttctttgaactgcttgtaacatcttactggttccttcattaaccatgaattaagtaaaatcatcagtgagaatgta

SEQ ID NO: 664790 - DNA, 365 bp, Homo sapiens
tcacagagccggaggtgagcaacaggtgaatgaggggaaacttcttctgtatttctagccctcccatcacttgcatgaccacctaagcaccatgtcctgtcagatcagcagcagcattagattctcctaggaacatgaaccctgttatgtgcatgtgagggatctaggtttcactctccttatgagaatctaatgcctgatgatctgtcactgtctcccatcaccctagatggacagtctagctgcaggaaaacaagctcagagatcccactgagtctgcattatagtgagttgtagaattatttcattatatattacagtgtagtaataatagaaataaagtacacaatatatgtaatgtaaaa

SEQ ID NO: 664791 - DNA, 107 bp, Homo sapiens
gccttcttacaagtaggctctcctgtctctagccctcgtgggctgtcttgagttctgtggtctctggaaccagggggggaaatgtttgtaagtaccctaagctctca

SEQ ID NO: 664792 - DNA, 341 bp, Homo sapiens
  misc_feature (91)..(91): n is a, c, g, or t
  misc_feature (159)..(159): n is a, c, g, or t
  misc_feature (232)..(232): n is a, c, g, or t
  misc_feature (237)..(237): n is a, c, g, or t
  misc_feature (258)..(258): n is a, c, g, or t
  misc_feature (319)..(319): n is a, c, g, or t
cccctcctttctttcaaggacagtgttttttgtagtaaaatccctggtttaaacaaagctttatttagggggtaaagttaagctgctaaanccccatgttggctgctgctgttgaaaaactgggctttgggagtaaaaaaaaaaagttatttttttgtnttaaagaatttttaaaaaattagtcatgagacttattcttctttccagggaacaaactgattggttttaaaanactanccagttaagtaaaaggggggnggaacatttttttttttccaaaactggaaaaatgaacctggttttaaaagaatgtcccccnaaataaaacatgtgaaccagta

SEQ ID NO: 664793 - DNA, 240 bp, Homo sapiens
  misc_feature (4)..(4): n is a, c, g, or t
gatntacgtcgtagtcgacataacgatgcgacgtgatgcgcggttattccatgacccgcggaagcttcgggaaacaaagctttgagttctgtgggagtatggttgcaacgttggcaacttaaaggaattgacggaagggcaccaccaggagtggagcctgcgctttaatttgactcagcacgggatacctcacccggcccgtatattaatctcataacgaagacaggggtactgagctcg

SEQ ID NO: 664794 - DNA, 354 bp, Homo sapiens
  misc_feature (37)..(37): n is a, c, g, or t
  misc_feature (114)..(114): n is a, c, g, or t
  misc_feature (130)..(130): n is a, c, g, or t
  misc_feature (245)..(245): n is a, c, g, or t
  misc_feature (294)..(294): n is a, c, g, or t
  misc_feature (318)..(318): n is a, c, g, or t
ttgaagtatcgtatcacagcaggttacaataactttnggataaaaggcaattggtaaactgtccaaaacaaggttccaaataacacctcttactgatttgaccgctcacccatnacattattcccaaatnagtttttgattcaaaaacatgaaattagcattctcacctgattattttaagcatattgaaaaaggaaactaattggaccattttctatttgtctattgttatacaaaaaggctanacaattgttacactttattcaaaataaaaataaataagagagtggtttnagaattaagtgttctacaccattnctactaattcttcaaaaagtgagaaatgtagctggt

SEQ ID NO: 664795 - DNA, 522 bp, Homo sapiens
  misc_feature (17)..(17): n is a, c, g, or t
  misc_feature (43)..(43): n is a, c, g, or t
  misc_feature (53)..(53): n is a, c, g, or t
  misc_feature (70)..(70): n is a, c, g, or t
  misc_feature (150)..(150): n is a, c, g, or t
  misc_feature (185)..(185): n is a, c, g, or t
  misc_feature (242)..(242): n is a, c, g, or t
  misc_feature (463)..(463): n is a, c, g, or t
  misc_feature (465)..(465): n is a, c, g, or t
  misc_feature (518)..(518): n is a, c, g, or t
acatcaggttgtggaancagttacaaaaggttcattttatccncagatccccntgtcaaagggtgagacnaaagttccatggtaagtccttgttagagttagcacatcctaaaaaaaaacttggagactgttccagtagcccattctgantgtgtgaccttcatggtagctttgaattacagtcncccaaatagagtatcccatgagactttaaagaaaaataatagcaggggccgggcgcnggtgcacgcctgtgatccccagcctttgggaggccgaggcgggtggatcacctgaggtcgggagctcaagaccatgctgaccaacatggagaaaccccgtctctgctaaaaacacaaaattggccgggcgtggtgcgcatgcctgtaatcctagctactcaggaggatgaggcgggaaaatcacttgaacccaggagacggaggtgcggtgagcgtagaancngccactgcacttcaccctgggccacaagagagaaactccgccaaaaaaaaagnttat

SEQ ID NO: 664796 - DNA, 985 bp, Homo sapiens
  misc_feature (565)..(565): n is a, c, g, or t
gatccattgtggaagagctgctggatcatgtgcctggcaccagacacttctggggatggtacaggatgtgacaacagtgacctgcatcatcatttgcttcaggccccgaaagcacagcgagagtcgtccaggccagagagtgggcgaaggcgaaaactagaggagggtgcgtcgtcgtactgagggggcgtgagagtaacaagtgggcggacagcgtacagaagaagaaggccatagtcgaggactagcagtcatccagaccccgtgcccacctagactgttttctgagccctccggacctgtagactgagctttagtcgttgtcttcctttaggccttagcaggggggtatgaggtgtgcaggggcgagctgggtgggcattccactctcgcctcatgccaatagagtggcatcatcgcgctccaagacttgcagccggagtagctcgtctgcttgtccgttacgccaggccgaactgcatgctcctcgtggctcatcaccgggttctgtgcctgtgtctctgtcgatgttgagcagggcaaggactggtcgggttctgggttngttatactcctgtgaaaccttctattgtaaggaccattctttttgttatatggacggtctcccatgggcccgtcggggcccgacgttgtcagccgcgagtctcatgttggtaacacttttcaaatccaaaagaacgttgtattgcaggaacttaaaaggggccaaaaaagcttataaatgaagacaaataatggagaataacaataaagaaaaaaaaaaaaaaaagtaaacaagaaaataaaaagggaaaccaacaggggggaagaacaagaacagatgatgaaggtgacaaagaaaaaaatagattacataatagtgaataatggaagtcaattgaaaatgataagtaacgaacaaaagtattatgtagaaacagacaagaggaaaacaaagaggggaaggatataaaaagtgtgtggg

SEQ ID NO: 664797 - DNA, 590 bp, Homo sapiens
  misc_feature (286)..(286): n is a, c, g, or t
  misc_feature (388)..(388): n is a, c, g, or t
  misc_feature (402)..(402): n is a, c, g, or t
  misc_feature (411)..(411): n is a, c, g, or t
  misc_feature (486)..(486): n is a, c, g, or t
  misc_feature (500)..(500): n is a, c, g, or t
  misc_feature (506)..(506): n is a, c, g, or t
  misc_feature (525)..(525): n is a, c, g, or t
  misc_feature (539)..(539): n is a, c, g, or t
  misc_feature (584)..(584): n is a, c, g, or t
  misc_feature (586)..(586): n is a, c, g, or t
aattcgcggccgcgtcgacgtgatacaggccttcttgattatctttggctttgtacctgaggcaggagagaagagatgtccaaccagtgagatctttaagagaaaagtttgtattttaaatgtcaatgtgcctgagaaatgtcagcttcaccacgctcttgcttcctaatgctctatacaaagagggctgactatatttcttgaagtggtgtaaaaacttagagattttataagagaaccagggctcccttcacctctcctggtccctcagtcacatatgaaagcnttttacaagataggaactggaatcctcattctcccagttcctgctgttcttaaactcaggagctattttccagcctaggggtagtctgctccataagaggancctagtgtcataancctggagcngggtttggagaagagatctccgggcctacagacctttccaacgaagtgggaagactgcttaaacacgcacacaancccccaataacagnctaagnggtcacacgaaacggccangacttaggcttcgnatgacataatacatttccaggggggggggatacccgttaatttcncntttt

SEQ ID NO: 664798 - DNA, 207 bp, Homo sapiens
ccgaggtcgcacccctgtactccagcctggcgacagagcgagactccgtcaaaaaaaaaaaaaaagaaaaaaaaaaaatagctttaattatcattggtcccttctttatttcctctttagccaattcctgcctttggcttgccaattataatagctgaattctacgcagccttcttaagctcagtcaaccggacgggggaatcctct

SEQ ID NO: 664799 - DNA, 82 bp, Homo sapiens
cagatgtaaacaggagcagcttcaacaattccaattagtctgttacggagtcatccacaagcatgccttgcttttaaacaac

SEQ ID NO: 664800 - DNA, 336 bp, Homo sapiens
ttatacctgtgggtatcatcagatcaggaagggtccagcgttggggacgagccccaagttgagaacagtaagtgaacaattattgtactgaaccacttagttacatgacagctaatcataaacaacctgtgtgtaatatgtatttccttacacacgtagcacccttcagcaggaccctataaaactttcctccagcccttgcctctttgcaggtagccccttctctgctgagctgcccactgcaacatattttcacaatttctctaataaatctgcccttctttacctacaactatcttggtaaatggctttaccacctgcaaaactgaccctagg

SEQ ID NO: 664801 - DNA, 1814 bp, Homo sapiens
  misc_feature (470)..(470): n is a, c, g, or t
tcgtcagtcgaccactggcagtacgggtcagagtcaggagagcagccatctatgggagtggaacatccgctcaataacgaagtgaaccagtacaaggttcagagcggtccaagagagccactaagtcagcacagagtatatcatacgcgtagaggcatgtagcggtcgaagtcttataacaagctttcagtggaccgaagaagaaaccgatactcacaacattcgaatccagtgtttagtgtatgaatcagcgttgttgtgatagagttcatgcacacaaagcacaggcacgccgtcttgatcccaatttcaccgggagtgagtccgagaaacgtatgaaaagcgttccataggggccaggtgaaacaacaagacagacggacacagtgtggtatgtcggggggctacctagtatacttgcaatgcactagtcgcagagtggttccaagagcacgtgatagcgcacaaanagcgtaggatatgggctaattgtttgcgacatgacagcctgttgaacacaaggcacggggacctctgcgaaggctcagacatccatctaggggacgaaaggcgtggaaagaagtgcaatacaaatcttttcgaaccacaagggcttgagtcccgcatgggcaccttcccgcactttattaggtgtgcctgaatgaggcgacgttgtgtcccctttgtgcctcgtacggaggtctcctttctgtgcgaaatgggcgcgccagatgaagcgctggatacccctgtggacaatatgtcggcgctaagggccccacgcaagtttgaaaacctcccggacaacaaggcctaatgtaacacaatatattctctttaacagtttccctgtctcaccgcaatacgtgggggctctaggcacaagttttgcagacagcctgtttggcaagaacgcggcgcggcatccgggagctccatgtctccggaacgggcataagataattaagagacttaaaccacccttgtgggagttcccttaagcatggcttccttctaattttcaaaagagccaccgtcaatgtcggcctgggcccctgtcaggcccaaactgacaataaagcccgacaggacaggagtggcgtgggcagggcgcgcagaaagccaaaggaaagaagtgactccgacgctcccgagaaggggcggcgcccgaagcgaccaaccaccggggcgtaagcgcagaacacacggagcggcggtcgctacccagaacagacgaggcgctcccctcggatagtcgcgctgatcggagccagctaaaaacaatatagggacgccagacgacaacacgatgtgaccagcgagtgtttcagcaaacaaacgtgcgggataccacgagagagtcacaacgagcgacaacccgtggcggcacccacgtggagccgcgaaccataaccctgcgggtcgggtgtgggcccacagtgggcccaggggactcaacaaggaacgaactagaacggcgaagccgagataacacgaactcgcggcgcaccgaggtcgctcaaccaggcccagtcagctgcgtcagccgcaggacgagtcgccgggtatacgcacaataagagaagccaagccgcagatacagcagtacacccaatgccagagacaacacagcgtgagatcacacagtgcgtaacacgatcgagcaaagcgcaggcaaacggacgaagtgagcgagggataaagcgacacagcgcgcaaatgcgtgccacacaaacgcgatgagacgctaagctcgactctatcactacaatcatccacgacaaccccaaacacacacgcaccacgccgacccc

SEQ ID NO: 664802 - DNA, 968 bp, Homo sapiens
cttgtcgagtagctgtactctctagacgaagtctatgtagttaccaattaatactgagatattttaaaaacatgttccttaagtttaacagtaataaactaataactcgctaacatacaataccattttgataaaaataacttttccaaaacaaaaactaatgagaacaggaacatgtatacatttatgcatttaaatctggcttaataaaagcaggagattttcatgctgctttgcattccaacttaaaaattacacagcatacacacgctggaaaactccactgtgcacttgtgagatcaggagaatgaaaactatgtaatatctcagtagtacaatgaaaatagtttgacttatatcacagcctttcacagaaagggtgtacgggaccattacgggtctccagacctctttgagaaccactaatactttaaactagtgtatttctagaacagtatttaactatgtcagggcacacataactattccctgggtttatcttgttcgctagtgagacactgacacttcgccgacctctttcaaccactaccttcacacggtactacatatgcacgggtataatgggctggttatgcgatagtccatttgtacacaccaatcttcatattctcaatctccttacaatccccgcaggggacccgaactaacttcatagggattgaaaagcaccgcaaacggcaacagagaggtctaagctaggacaagccacgcgtcaggggggacacggactaggactatacatgcaacaccatgaccactactcaccgccctcccctcccaacacgaccctcaccaaactcaacgcatgctagaacaccaacaaccgcacactgcacacctccaccaggacacacacccagcaaaccgacacgcacacaccaacacagcacgacaaccacacaccagccaccagcacaacaagacacagcgaaccaagaaccaaccac

SEQ ID NO: 664803 - DNA, 162 bp, Homo sapiens
gacctgtggctcttggaggtaaagcagtcctctatgactattagtcctcatcggacaagttcttggatccagtggaataaagcatgaacatcacatctgggccgattaggggacacaggggatgtgcctggaacgtacccacaggtcttcgtcctgatgtgt

SEQ ID NO: 664804 - DNA, 235 bp, Homo sapiens
  misc_feature (109)..(109): n is a, c, g, or t
  misc_feature (209)..(209): n is a, c, g, or t
gtactgagtcaccatgtagcctttgtggccttgagttcctggttttcactattgaaaatgggaattataaaatccagagcaggtcactcttacctgtgaagcctccggngaccccattccctccatcacctggaggacttctacccggaacatcagcagcgaagaaaagactctggatgggcacatggtggtgcgtagcaatgcccgtntgtcgtcgctgaccctgaaggagcat

SEQ ID NO: 664805 - DNA, 233 bp, Homo sapiens
tgggtgggatgtgtattggaggggtttcagactgctcagtgggctctctgccaacagcaaagtgaggaaacagtagctagtggatcaagtccaagtgtgctgcccgtgcccccaggtgcccctcccagtgtcacggagccacagagggacagacactcaggcagtggccctcgtcccaggttactacatgttgcccctctggccctgattttctggccaccccgtcggtggag

SEQ ID NO: 664806 - DNA, 409 bp, Homo sapiens
  misc_feature (27)..(27): n is a, c, g, or t
  misc_feature (79)..(79): n is a, c, g, or t
  misc_feature (157)..(157): n is a, c, g, or t
  misc_feature (356)..(356): n is a, c, g, or t
gtaataaggctaactgccaaaattganaaagactttaacccaagttcctgtccattgacagggacattatatataaagnaatatacatactgtaattcaccctcatcaagagttaattttatggccgggcacaagtgtcacgcctgtaatccctaanacttcgggaggcagatcactttgagctcaggagatttgagaccagcctgggcaacgtggcaaaaacccatctctacagaaaaatacaaaaatgagctgggcgtggtgactcccgcctgtagtcccagctgtatacatgggaggctgaggctggaggattgcttgagccaggtagcggaggttgcagtgagccgagattngccagtgcactccgccctgggtgacagagtcaagaccttgtttcaaaaaaaaa

SEQ ID NO: 664807 - DNA, 581 bp, Homo sapiens
tctcttcttgtctgcatgtcttatttcagtaaggcagtcttcatcttttctgaatgtcttatttcagtaaggtggtcttcacactctgatatcctttcttccacttggtcaattcagctgttgatacttgtgtgtgcttcatgaagttctcatgctgtgtttttcaggtccaccaggtcatttgtgttcttctctaaactggttattctagttagcaattccttttgtagcaggaggagccacagacaaaactcctcagacaccgggttaaagagggaaggagctttattcagctgggaacttcagcagacttgcgtctcaaaagccaagctccctgagtgagcaattccgtcccttttaagggctcacaactctaagggggtctgcgtgagaaggtcgtgattgattgaacaagcagggggtatgtgactgggggctgcatgcactggtaatcagaacggaacagaacaggacagggattttcacaatgcttttttatgcaatgtctagaatctatagataacacaaccggttaggtcaagggtccatctttactaccagccccaggtgtggcacccggc

SEQ ID NO: 664808 - DNA, 119 bp, Homo sapiens
cgatctagaggatcccggaaggaggtaaggactaagctcaggtcgctctaagcacaaaggtggtctttctacaaccagatgcaagcggagggatttccctaccacccctttttccccag

SEQ ID NO: 664809 - DNA, 1197 bp, Homo sapiens
ggagtccccggtgttcctttgtcttagacatcactctgatttgtacacgccatggtttcttgctctgttacgtgtcctgctgctccagctcttcagtaagcccatcgcacactcaccacggtgtttctgtacatttcctatagtgttaaggtcatcttcatcatgatgtcagtgttcaaaaagtttcgaactttggaacatttgtgatttctaatttttagattacagacaatcaacctgtatttgtatttcccaataaaagattaaaaagtttgatggttgatagttgagtgtcaacttaattagagtgaaggatgcaaagtattgttcctggatgtgtctgtgagggtgtcaccaaaggagattaacatttgagtcagtggactgggaaaggcagacccatcctcaatcttggtgggcaccatctaatcagatgccagcatggccagaataaatgcgggaagaagaatgtggaaagactagactggcttagcctcccagcctgcatctttctcccgtgctggatgcttcctgccctccaacatcagactccaggtgcttcagctgtgggactgggactggcttccttgctcctcagcttgcagaccacctattgtgggaccctgtgatcgtgaaattccccttcatatacacatgtatcctattagttctgtccctctagagaaccctaatacaaaaagttaaagaatataaacgaacaacccaatagaaaaatggacatgagccatgagcagttgcctcccagaagaggagacaaagggaacgaacaatggctggggtggtcgcggccccaacatgagaatgcagaacacaagcaagccagggtgtggctgaggatttgggcccgatcagagccatacttttaccctgaattctactagttactccaattccattttctcccatggaatcacgaagagcaagacccactctgttccagaagacctataagctggaggtggacaactcgatgtaaatttcatgggaaaacccttgtaacctgacatgtgagccactcagaactcaccaaaatgttcgacaccataacaacagctactcaaactgtaaaccaggataacaagttgatgacttcacactgtggacaggatttccaaagatgtcagaacaagactccccatcatgataagggtcccacccctcttaactgtccttgtt

SEQ ID NO: 664810 - DNA, 700 bp, Homo sapiens
ttccttatcagtaactggagttctcctgcttgcactagagaaggtaaagagagaatcagtattcttatatggcaatctggggaagcagcaatatgccactgtacaaaactgaagaaaagttcctaattgtactttgtgaagggagatgaaaggacgtttaaagtatatatattctgtcaagaggaaagaagataaaactatgccagttttatatcaatagcttgtagaagctcagctcttcttggtcttggtagactgcctagattcccacagcagacaaggttgagaatccattggctggaatctgtggtattgatgagttacagtgatggaacatgtgcttggccacaggcaggtccagtcactgcaaaagtgaccaaagccagcaggtcacccttaacttcagaaacaattatggggtggtgaactgtactttaaatttgcagagaaaccgtgtaagtaatgggcaggtaaacggaacaaattttcccgcactgggcacaattaaatattttgggccaagccaaacaaattcactggagaattcccaaaagttatatttaaacacaagaagatagctaatgagttccagatctatcctctattggcttttaatatttacaaacaatccttaattttcccctattaaggaggggattactagattggttacctttctgggaggataacctgggcatca

SEQ ID NO: 664811 - DNA, 764 bp, Homo sapiens
aacaacacgttcctctttccccatatattcatatatttttgctcgttagtgtatttcttgagctgttttcatgttgtttatttcctgtctgtgaaatggtgtttttttttggttgtgggtttttatttcttgttttttttaaactggggaaccaaccaagttggtaaagatgtgatgttttaacctgacgagttatcaccacgaggtagacggtcaagtgtgagaagagtgatatcaataactggttttggtttctaaaatcttaatataaatcctgtgtataaggagtggcttttttttttaaggagtaagtcctgggaaccactgagttggattgcccatcctccaattttggggggtgaccgtggttctcacccagaggggccggtttaacctcctccatgtgaacataagcgtgggataggttggcttaacagggtggaaataaagtggcctttcctaacagaaaaaaaacacacaaaaaaacaaaaacaaacaacacatgtgtgtgtgtgcggcgcgcgcgcttgcggccccatcagaaaaaaagcgtttttttatacgacaactcttggtgtggggggggggggccccccaagtggagtttcgtacacctcggccacccggcgttccaaaggagaaccgtgggccacaaagacgggggggggggctgtcccccaaataaaaacgcgggcggacgccgggtcttttgaacacctcaggggcgtcgggccacggggcttaagagggcaaggcagaaaagg

SEQ ID NO: 664812 - DNA, 956 bp, Homo sapiens
atggcccccttatgttcagcatctgccgagtgacatcatctgccatgccctcctggaccctgacaatgggaacaatggctggaagctctgtttagattttcctgatgatctggcatctgacaatgagagatccaaggcagtcgagtaacatctcacaatctgctcctattgatatgtgtccttgtatttgtcgtgctggacatgcctggcctgcacgggatgtgttgccaatctgggtgctgtgtatgcccatgtggcattggctttgtgttgctgttgcagctcatcccatctggtgtggactgttggctcagcaatcacatcgaacacctgtgctaccatgacttgctgacattgcaagacaaaaagcccagatgaacctccatacacaattgacctccaatacagtgatgaactctgtggccgaagttgacctttgcacctgttggttataacatgtgaaagaaacaacacatcatattcacgatgatgggcatagcagcagatggaccctgaagaccctcgagagaggaagctggcatctgaaagcagcacacttgacctctagagaccacggtatcacacaacaagtaggagcctgtgaaaaggacccaataaagagggaagccgcgccaaggtagggaccgaagggacgcgcccagagagaacaggtaaccacggcatagagagtgagcgaatagagtgaaagcgaacgggcaaggacgactaggacacttacgaaacgagtgggaagcatacccagaaccaagggaccggggccagacaggaggccgaccgaggacgcagaaggcagaagcacaagcggagaactgaggaagaaaccaaaagcaccgagcccagcaagagacaagacgaagaacacggtgacagacatagacactaccctaccacaaacatgcagaaatacacaacaaaaaagaaaggagagccgcaaa

SEQ ID NO: 664813 - DNA, 174 bp, Homo sapiens
cggatctatggaccaggctgacttcaagagatctcaagggaatacacagactcacttcccagggggccaggcccacgtgaggagctggaggtatcagtcaaaaggactcttagtcccaaggggtggcaagagcaaaagcaagttactgtccttgctggggtccaatgggtaccg

SEQ ID NO: 664814 - DNA, 483 bp, Homo sapiens
tcccaagtcacggaagcgtgttaggtcgtcacgtctcagggagaccccacattccctgacgtcggttcctggcgcctgcggagggtggccccacagagagaggcacacgcacccagatgcgagtcacagccagtgtctgacaagcaccaataccctgaatgagatgaggtcactgctatggtgtgggcatctgtctcctgaaatgctgaaactcacttgcccacgcagcctaattaggaggtggcatcttcagaaggtgacttgaccatgaaggctttgccctcactaacagcttaatgctgtcaccaagggacaggctcatgattccaggagtgagttcattctaaaagggtgaatatgccttcaccccatcaccacgtgagcacacaggaagaaggcccttgccagcctccagaactgcaggccaatccgtttctgttcatgctaaagtcttccatcttgggtgtactgttacggcagcac

SEQ ID NO: 664815 - DNA, 799 bp, Homo sapiens
  misc_feature (14)..(16): n is a, c, g, or t
  misc_feature (629)..(629): n is a, c, g, or t
ggggcgaccctcgnnnggcgcaaacggtaaccgaaagaggcggttagaaacgatggttaacaaggcaaaaggggcaagagccgatatatgatacgttataaacgcaccctggagccgtcaagttagtcttcgacacatgacccactcgtaaaaagggaacccaaagtttttaaccggggggatgcgacgtactaccgccccaacagcagaatgtttcaccacgaatcacatacaacctcgactttagaggtacttacaaatttaacaccacggacaatagtttgaagcctcattataatgaacaaatccgggcctgcgcggctttagcagaggaccccaacttgagcgaaaatttcatgatgtgtcagggccgcggtcattggtacgatatcgaaagcggatcatatggccggaatgtgtcatgcctccaaaaagcagcgtcggtctgttcgttatcgctctgtatgttttcataggagatcctctaacttttgatttgtaatactcgggggactcccacacacagcgagggtgccagggtaacggatggttatctaactaagtagaaaggtaaattatttagagatctgcgcgtgaatgtagtttaagatacacataatgtaagacanataaatatattattctctcagtggcaagaatttcttatttcacagctagaactcctgtgaagagagcgatcagaaacataaccatgagcaattggcgaacaacacttacacaatggctcacgcacgtccacgtgtcaatgatactacaggaaacatggacttcttaatat

SEQ ID NO: 664816 - DNA, 330 bp, Homo sapiens
cataaaccaaattttttacttaacatgagtgcactttactaatcctcatggcacagtggctcacgcctgtaatcccagcacttgggaggacaatgtgggtggatcacgaggtcaggagttcgagaacagcctggccaacatggtgaaaccccgtctccactaaaaatacaaaaattagccaggcatggtggcgtacacttgtaattccagctactcaagaggctgaggcaggaggattgcttgaaccctgaaggcagaggttacagagccaagatagcgccactgcactccagcctggatgacagagcaagactccgtctcaaaaaaaaa

SEQ ID NO: 664817 - DNA, 351 bp, Homo sapiens
  misc_feature (75)..(75): n is a, c, g, or t
  misc_feature (145)..(145): n is a, c, g, or t
  misc_feature (165)..(165): n is a, c, g, or t
  misc_feature (190)..(190): n is a, c, g, or t
  misc_feature (202)..(203): n is a, c, g, or t
  misc_feature (216)..(216): n is a, c, g, or t
  misc_feature (224)..(224): n is a, c, g, or t
  misc_feature (227)..(227): n is a, c, g, or t
  misc_feature (235)..(236): n is a, c, g, or t
  misc_feature (242)..(244): n is a, c, g, or t
  misc_feature (249)..(249): n is a, c, g, or t
  misc_feature (256)..(256): n is a, c, g, or t
acttaaaagccttcttcacagtaatctagccacagtgtgtatgtggacccttgatgtagtattaatgacccgtcnacttcctgcctgaccatttcaagtgatgcccacattacttcacagggtggctctttcattgtcgaacacntctaacagttagaaaaatanagcccccagctagtataatggtcanaagcacaggttnnaaatcagaccacntgaattcntancctttctnntcctcnnntgagntaggtanatttgggcaaggtatgtaatctctccatgactgtttactcatctataaaataaaaatgttacccgggcgcggtgggtgtgactcagagtggtgtg

SEQ ID NO: 664818 - DNA, 592 bp, Homo sapiens
agcggagtgtcagcagtggcaacctggtagggtccctttccataccgtggaagcttcgttctttcgctctttgcggtaagtcttgctactgctcactctttgggtccgcactacctttatgagctgtaacactcaccgtgaaggtctgcggcttcattcttgaagctagtgagaccacgaacccaccgcgaggaacaacaactccagacgcgccgccttaagagctgtgacactcactgtgaaggtctgcagcttcactcctgagccagcgagaccacgaacccaccagaaaaaagaaactccaaacacatccgaacatcagaaggaacaaactccagacatgctgcctttgagaactgtaacactgcaagggtccacagcttcattcttgaagtcagtgagaccaacaacccaccaattccggacacagtgttttcctaagagacctcgaaagtagcacaaaggcaagatttagtagagaagattgctctagaaagcttcattttgatttttaaaatattaggttggggacggataaactgcattaaatacttgtctgtctttggggacaactttaatctcatggaatgtt

SEQ ID NO: 664819 - DNA, 394 bp, Homo sapiens
aaccctgtgttggagttcttctccgcctcatgcatgcgattgaataagaagtcatgtgaagtcccgtgcggaattgggctccagcgtgagctgcttgtgatccgccttagtggatataaagtcttccagccctgccagcacttaaagagactggttctggtggtcctgcaaggtgtttcatcgcggaagagtacatctcatagagttgcactgtggaggttagcttgacctgcaagtttcctagcatcatgcgccacagtcagaggcactctttgtcgttagagtcaaagcggtccccaaggacaatgtaactgagtacattacagactgtgcggctcaggaacacggtaggcccgatagcggctccgccagtgctctcgagggtgtatatgcg

SEQ ID NO: 664820 - DNA, 136 bp, Homo sapiens
aggagtggctatggcatgaagcagatgaggcggactggaagactggaccacagccgacttccgaaccaagaagaagaagagaaagcaggtcggcagtcctgatgagccagatagcatagccaccctacgatagcca

SEQ ID NO: 664821 - DNA, 123 bp, Homo sapiens
actctacaggatcctttttcttgccaacgatcgagtgtcctcatgagtgatcacttcacattcctcccaaatggagagctcaccactgtggctatttttcccattggaaaagtgtggttattt

SEQ ID NO: 664822 - DNA, 458 bp, Homo sapiens
  misc_feature (255)..(255): n is a, c, g, or t
  misc_feature (261)..(261): n is a, c, g, or t
  misc_feature (364)..(364): n is a, c, g, or t
  misc_feature (397)..(397): n is a, c, g, or t
  misc_feature (423)..(423): n is a, c, g, or t
  misc_feature (454)..(454): n is a, c, g, or t
tgagacagagtctcattttgttgcccaggctggagtgcagtggcatgatcttggctcactgcaagctccgcctcacgggttcatgccattctcctgcctctgcctcccaagtgggactacaggcgcccaccaccacacccggctaattttttgtattttttagtattttttagtagagacggcgggggggggggcgggtttcaccatgttagccagggtggtctcgatctcctgacctcgtgatccgcccacctnggcctnccaaagtgctgggattacaggcatgagccaccgtgcccagcctggagctggttttttgaaaaaaaaaaaaaaaaattaataaaataggctactagctagactnttaagaagaaaagagagaagaatcaaattaacncaatcagaaatgataagggggatatnttactgaccttaaagaaatttcaaacaacgntcaa

SEQ ID NO: 664823 - DNA, 105 bp, Homo sapiens
cctccaaagtgctgggattacaggcgtgagccactgtgcctggccaaaaaaaatttttttaattgccataatttgtaaagtaaaatctgcatgataggagggggg

SEQ ID NO: 664824 - DNA, 219 bp, Homo sapiens
ctaccttctttactgtgacttctcagtcctgctacataatcagttatagtgttaaatatcaactcctctgtctacctttcgaggcctaagtgatctgacccatctgcccaatttatctgtcacctcttgctctacgaggtctcctcacagtcgctcacaaaacacagtcaagttcaatgggcttactctgactgtacatacttctcgagagtttccctc

SEQ ID NO: 664825 - DNA, 272 bp, Homo sapiens
gggggggggggtaaattaaggaaatttttttcccccctctccctttttttttggggcctccctcccctcctttttttgccaggtaaatgggggatgggctatgggtttgcaaacagctggacggtcagggggctttttttccagagggtcctcctaggcccccccttctccctcctttcccctccttttccttccttccttcctttccttggggcaatgggccccatttggaaggttgagagaaaccaaaattaaagagggaaagaggggga

SEQ ID NO: 664826 - DNA, 432 bp, Homo sapiens
  misc_feature (10)..(10): n is a, c, g, or t
aaaatcctanaatgtttctttaaaaaaaaatcccttgccaggcatggttgctcacacgtgtaatcccaacactttgggaggccaaggtgggaggatcgcttggcccaggagtttgagaccaggctgggtaacatagtaagatcctgtctctacaaaaaataaatgaaattagccaggcatggtggcacacacctcagtcccagctacttgaaagattgaggtgggaggatcacttgagcctgggatatggaggctgcagtgggccaagatcctactccagcctaggtgacagagtgagatcctatctcaaaaaaaagaagaaaaaaatcctgcagggcacagtgactcacacctgtaatctcagcactggatcacttgaggccaggagtttgagaccagcctgagcaacatagcaaaaccctgtttctactg

SEQ ID NO: 664827 - DNA, 242 bp, Homo sapiens
gcacgagaacggagtgagattccatgtcaaaaaaaaaaaaaaaatgtacatttttaaaaggggatttatttgagaagcaaaaacaacagaacacttcacaggctactttacccaataaaatagaaaataattacaaatttctgcaagcataaacactcaggtatgctaacaatagtcacaggattataacaattataaacagacaaccccacttcataaataggttaaaagcaaactgtata

SEQ ID NO: 664828 - DNA, 1093 bp, Homo sapiens
  misc_feature (848)..(848): n is a, c, g, or t
tttattttttaaaaaggaaaacccggaaatgatttcggggtcgagggataggaggaaaatgggggataggtgtataaacctgagggtgttctcctcgggtagaatgagggtaaaggtggtacaacggtggggggatcaatgacccccaatgggtgtgtcggtggctacactattgtaaagggagatattcgggctgtgacccaaatatgtggcgccctgtaacttagcacagtgattatttgtcacaggacaacgttggtcacatccgcccagagaggttctcccacgataggtaaataggtggggggctaacggcgagcgttaaagcgagcctttgccagaaagtctctctcaacaaagctataagtgcggcagatcgatgtttggcaccgtccttgaagagaggataatcgatgcacacctggtcgagtgctgtctcagcacgttctggatgtttggcaacggcgaaaataattaattgaggcgatagtaacgccccgggggggccatatttctgacgataacgatcttggccgggaaaacaaatacaaagggggctctgtcttgacacaatggtcgtgttaccacaccaacagggctaattgtgggcttcattggcgcgacttttcccactgcgagccgatataaagggcccttgtcgtcgtcactaacggccagcattgaggcctgggttgaatatactcacttgcgccccaatagggagtatagtaacccagcaccggggtaaccgcaactgtgttctgggacacgggggttcgacaaatgtacgttgttgacggggaatataaccaaaagccgggcaaggttgttaagaaagatccggcggncagtacaatattggccccaggaagagggggctctacattgggatcaccggaatcataaagggcgcgcgccagagagagatctttcaataaaaacgacgtggtagcaccgcttataagttcgggccacgcgtgaatattcgtgtcgggcgcgacagatcaacagttcgcccagcgtggtggtataccgcacagcggagcgccatactgtgaagacatatcgtcgtgcagtgctcgtcacacagcag

SEQ ID NO: 664829 - DNA, 545 bp, Homo sapiens
  misc_feature (44)..(46): n is a, c, g, or t
ccaaggcatccagtcccaccccactacctcacccgtcccccccnnnttttgtgggcaaccagcacctctgttttctggtggaacttcctcttaaatggcttgacaataaccaccaaccagcactgccatacatgtgtcctgtacctatcagaggcactagggcagttttggaacagagagcccatagaaaggctactgcttagagatagccattttcttcttaggagctcggacccagctgaatctcagaccgcatcggcaggagagctcggaaaatctccttcttttttttgagctacacaaaaccaaaatttggaattcgtagctaataaccataaaaattaagaaatgactgttggaagagcactggaaatcacctgattaagttaagaaaaaataactagctcatgagacaattattttcaggccagctgtagcctgtacccttttgaaaatcccctgactagtgagctcattttttgttggaatatagaatttttcttttctaaaaaacaaaaaaaatggcctccctggactacagggtg

SEQ ID NO: 664830 - DNA, 103 bp, Homo sapiens
agattttaagtatacgggttcttcgaatgtgtggtagggtggggggcatcgaaccccccaaagctggtttcaagccaaccccatggcctccatgactttttca

SEQ ID NO: 664831 - DNA, 797 bp, Homo sapiens
  misc_feature (284)..(284): n is a, c, g, or t
ggcgtacaccagcctctcggacacccctcagtaacaaaagcccatcagttcctctgggcatcgaccgcgcaccatgcaccgccttccccgacagtgtcccgggggcgtgtggctatcagtttgtgaaggtaggcgtccagccacagtcttcccagacattcttcgagaggagcctgatggatgtccgaagcagggtctcctccagtgagccggcatgtgctcgcgtggtaatgtcgagagttgccaattgcttgtgcacaatgcagagcactatcactcggagncggaggcgatccttgtggatttaacgctagtgccggggcgctaagtggtggccggccaaagacggtggttgcttccaactcgcggggaacgtgcacacgagtgtccccacgtgtaccgtacgatcgttctcgtacaggacaacggagcggtggttcgcgaggatatgctacgagtggcatgtgccaggcttgggctgaagtgacgaccgaagtgacgacggtgacggaccttcgccgtggtgccaaagtcgtccgagtggcagcgagtgattgatctccagtctgcgttgtggatagcccaacgaatgaataggctagttgcgggtgcttccgaaggtaacactggatgcaaggttgcgaggaacatgggcatgggttcgcagggatggcgttaggaatagggcaatgtgcggtggattgacagaactcgggattgttcaattaggttgacgggagcaagggcgggttgagcctagtttctgtttgggggatgatggtttcttgatgacttgg

SEQ ID NO: 664832 - DNA, 1611 bp, Homo sapiens
cacttatctccagtctacccattttccagggcacgcacaaatgcaaatcatgccacacaagggcaacaaacaattaagtgcatggacaacacacagttatactcacagcaatcattctgtaaagcaaatccaaacaggggccgggcgcgatggctcaccctataatcccagcacttatggaaggccaaggtacggaggatcacctagaggtcaggagtttgagaccgctactggccacacatggtgacaacccatatctctactaacgacatactaaacaactagtgccaggacgctgtgtggtctacacagccctgtgagtccaaagcactatagagacagtgccacaggatgagtgcgtgagcaagtaagggttcaggcaggatccatgacttatcctggcacaaacatggttggaaatcccccttgatcatcttaactttaaaagaaaatatacagaaaagaactaatacatacaaagaaacacacagtgtgagagggacaaagcgaagtaggtccactatagataaatgatgtatttctatgataacaaccaagactatgtgatgtgtaacagagagtatagccagtagcactggttgtctagagtagaaaagcacaaacaagaggacaacaagaaaagaagtggtcatcagcagatagagagaaggtgaacaccgctgagcgagctgagaaacaacacaagcgcaaccaaggagacaatgcgacacagacacagagaaagagaaaaaaacagagccgccctaggggggacaaaacaaagcagacaaacaggaaaagacaaacacaacgaacacacaggctaggaggagagcactgcaacaccgacgaccaccacaaagcgcaggagagcatcactcacaatcgagggggtagggtcttcacaaaatagtgagatttgtagtaatgtaataacaaaaaattagagtactcggagttgagtgtgttgatggtaggagatagacgaaagaggaagagtagggtgcaggcagaagagaataggagagagacacaggatagaagggagtagaagtaagaaaggttagatcagaagaagtcgagtgatataatacggaaagagtgatacgtgtagagtgaaggaagaatagatagatgtgatgagaagcgatggcgtgcgtggaagagagataaggggtgtacagagggaaagagaggaaaagaagagaagacaacaaacgacagagggaagaggacggaggagtgagataaggagagatagggagaagtaggaggagaggagaggggaaagacgaacggacgggcacagagagtgcaggaggtacggtgggggtcgtaggtgaagagaggtgtgagtgtgcattggaagtgtagagtaagaagagttgaggatgagtgaaggatgggagtggactgcctgacgcggggggagcggatggagaagagggtgaagtgggaatgaggaacggagagggggacggattaggaagagggtgaggtgacgtgttgagggagagatcggaggcgcgagcagaaagagaggacgtgaggaggtggtgggaaggaggcaagaggggggcgtgcgatgtgggactgagcggggagcaggga

SEQ ID NO: 664833 - DNA, 739 bp, Homo sapiens
catgagtggacttcctcctggcccagagaagggtccaacccgtggccccttctccccaccctttgcccccagcttcttcctctgcccctgggcctccaatgcgatatccatattcatcctccagtagctctgccgcagcctcttctagttcctcctcctcctctgcctcccagtaccctgcttcccaggccctgcccagttatcctcattccttccccccaccaactagtatgtctgtctctaatcagccacccaagtacacccagccttctctcccatcccaagctgtgtggagccaggtccacctcctcctcctccctatggccgcctcttggccaacaacaacacccatccaggccctttccctcctactgggggtcaatctacagcccacccagcagcccctacacatcaccatcaccagcagcagccacagcaacaacatcatcatggaaactctgggccccctccacccggagcgtatcctcaccctctagagagcagtaactcccatcatgcacacccttacaacatgtcaccctccctggggtctttaaggccctaccccccaggccagcacacctgcctccacctcatggccaggtgtcctataaccaagcaggtcccaatggtcccccagtctgaaagctcagatccaggtccctgtcgctgtggtagaggggataagggacattgggacctcagagttgggaaaaagaatcaatctaaaggagtgatg

SEQ ID NO: 664834 - DNA, 719 bp, Homo sapiens
gggccttgtgtttgattcatggcgttggctgcaatttgcagggctgggaattcaggagactatagcgtacccgaccccgggtatgggaagtggagaagtggcacaggagactaggatccagaagcccagaggctcagcggtgcttctggagttccagtgatcccggagtctgaaccggcagtgagagtggggaaagagggatgccgatgcgacatgctcaaataccctgcagaccaatgccggctacctggagcagcgtgaagcagccagcggggtgacccatcagaaagacagtttggaagccatggaactgtaccatggcacggagtggagctagacaggtggaggactaggaccaggatgaacatcatccacgtcactgggacgaaggggaagggctccacactgtgacctaacacggaatgtatcctccgaagctatggcctgaagacgggatactattagctactccccacctggatgcaggttacgggagcaggatccgcatcaatgggcagcccatacagtcctgagctacttcaccaagtacttctggcgcctctaacaccggctgaggagaccaaggatggacagactgtgtctccatgccccctacttccgattcctgacactcatgggcttccacgtcttcctcaagagaaggtgactgcagtggaggaggtgcacattgacggggctatacgtgccacgtatcagag

SEQ ID NO: 664835 - DNA, 271 bp, Homo sapiens
  misc_feature (161)..(161): n is a, c, g, or t
  misc_feature (170)..(170): n is a, c, g, or t
cgtctttggctacccgaatatcactggcgcccagatgaatcgcaatgccctcactttcgaggatgtccttgatggcggcgcagacatcgtcgtcttcgcgcgaggccagtctgggcccgcgttcgaccaccgtgacctcggcgccgaaccggcggaacatntgcgcgaantccaggccgatgtagctgccgccgatgatgaccagatgctctggcaccgtgtcgagttcgaggatgccgacattcgtgaggtagtcgacgcggccgcgaag

SEQ ID NO: 664836 - DNA, 460 bp, Homo sapiens
gtttgcggtgcttttccctgtttttaattcacagctctcaagtgagcacctgaaattacctttttatcaacacgagcttcttgagagaggcccttacaaatcagcacacggctgggcacggtggcccgtgcctgtaatcccagcactttgggaagccgaggcgggtggatcaccagaggtgggagttcgagaccagccttggcaacatggtgaaaccccatctctactaaaaataccaaaaattagccaggcgtggtggtgcatgccttgtaatcccatgctagtcagaaggctaaggcaggagaattgcttgagcccgggagaaggaggttgcggtgaaccgacgattgcgccattgcgttccagcctgggcaacaagagtgaacttctgtcccaaaaacaaaacaaataaacaaaacgattgctcatttcctccctggattctctccccaagccccag

SEQ ID NO: 664837 - DNA, 375 bp, Homo sapiens
  misc_feature (41)..(41): n is a, c, g, or t
  misc_feature (115)..(115): n is a, c, g, or t
  misc_feature (209)..(209): n is a, c, g, or t
  misc_feature (255)..(255): n is a, c, g, or t
  misc_feature (342)..(342): n is a, c, g, or t
  misc_feature (347)..(347): n is a, c, g, or t
aaatattaattttataatttgtatatattcattatttaggntcacatatgtttatgtaacatacccatttgcttgggtatcatttcataccagcaaactaataggaataattttntgaatgatcttctattttgctaaatttgctaattttgctaaattttgctaaatttgcgagtgatcttctattaagtgggagtccatagagcagntcctcttgggtaaggaggaaaaaatgggccagccatgggtggcctncacacctgtgaatcccaggcactttagggagggctgagggcagggcaggatccacttgagggttaggggggttccaaggaccagccnggggnccaacatggggtggaaaccctggttctc

SEQ ID NO: 664838 - DNA, 367 bp, Homo sapiens
  misc_feature (367)..(367): n is a, c, g, or t
cccgagtgacacgttgaattcgccataatgaacggaaccttttgcgggcggcgatctctgaaattacttagcgagcaaccgtaattaacctgactttttgctgatactcactgtcagtggaatcacatgacaaatccggggatggattgagcggcactcagtaggaagcagcccttcgagcactggtccagcgcacaggatatagctgggtccatgaaataggacagaggtgaagtcattattcggcaactctcacgctaccttgtatgggaatagcttataccattctgcgagatgatcgtgtatatttatgtgtgactgatcatgggtccttgggcacattagcggatatgcatgtgtcacatgn

SEQ ID NO: 664839 - DNA, 447 bp, Homo sapiens
agatcccgccccctccggtggcaagaggacccagaacccgaggacgagaacttgtatgagaagaacccagactcccatggttatgacaaggaccccgttttggacgtctggaacatgcgacttgttttcttttttggggtttccatcatcctggtccttggcagcacctttgtggcctatctgcctgactacaggtgcacagggtgtccaagagcgtgggatgggatgaaagagtggtccctccgcgaagctgagaggcttgtgaaattccgagaggccaatggccttcccatcatggaatccaactgttttgaccccagcaagatccagctgccagaggatgagtgtccagttgctaagtggggctcaagaagccccgccttccccaccccctgcctgccattttgaccttttttcagagcccctaattaaaggggctgaaagtca

SEQ ID NO: 664840 - DNA, 102 bp, Homo sapiens
aaatgtaagaattagccgaacagtgcatatttctccctcctaagtatgcaatggacgtgacctgatagatcacgattgaatgaattgacaattgataggatg

SEQ ID NO: 664841 - DNA, 113 bp, Homo sapiens
gaacagggctgtcaaagcgtcgggcgttgattgcgcaccggcggctcacaggtcgggtggtgtggctggtggttcttgggcgcttgtatttctagctaggttctcaaagtggc

SEQ ID NO: 664842 - DNA, 302 bp, Homo sapiens
agaggtacggtacttatcgactctgtttctctctgcgtaaatgaagcctcagagacagattgagtgcttcttcacctatgttatctgtggtaggtggaattatagcccgccaaagataccctagagcagcagtcccttacctttttggcaccagggagtggtttcatggcaagataattttcccacgattggggtaggggtatagaggtatgtttcagtgatgaaacatgttcaagcgtcagatcttcagtttattagacttctccataagaagtacgcaagccatgatgcttggacatgtg

SEQ ID NO: 664843 - DNA, 204 bp, Homo sapiens
  misc_feature (43)..(43): n is a, c, g, or t
  misc_feature (91)..(91): n is a, c, g, or t
gtggttagagaacccagatacttaaaatgtaggtgttcaatangggaatactgattgtgcattgtatatggatagcatgcctaattgtgcntttgtgaaagttgccaattcaaaatgtaattggaacagttatctttgattagacaaacttgggaagagaatgttgaggtgcagagctcaccattctcttcccaggcttgtcta

SEQ ID NO: 664844 - DNA, 466 bp, Homo sapiens
tgaagacaaagctagctgacagatatgctacccagcgttcattaaaccagctcggtgcggagtagtctgactagctctaaggaggactggccgagagctcctgccgaaatcaatctgtaaatggaaaagcaccacttgctactggagaggatgatgatgatgaagttccagatcttgtggagaattttgatgaggctccaagaatgaggcaaactgaattgagtcaacttctgaagataaaacctgaagaagttactgggagctgctattttatattatgactgctttttaagaaatttttgtttatggatctgataaaatctagatctctaatatttttaagcccaagccccttggacactgcagctcttttcagtttttgcttatacacaattcattctttgcagctaattaagccgaagaagcctgggaatcaagtttgaaacaaagattaataaagttctta

SEQ ID NO: 664845 - DNA, 165 bp, Homo sapiens
tagctcttattctatttctcaggttgccgtggaccaaatgaactctcagtctatttgtctatcagattgcagtcttcagcaagtgtctgagtaacttggtcaggaccttccttccaggagagcctggtgaccctctgagagcagccatgtactggggagttctcc

SEQ ID NO: 664846 - DNA, 374 bp, Homo sapiens
agcatcctggttagcaggaagatttcgacgccttcggcagttcgcattctctctgcatacctgtgaggtggctcaggcccagcattgtacgcacactcggtggacccagtggggcctccagagttcctatcatagccagcttggcattcatagaccaatgtgtcgtgcagcttgcaccatgtgtagtcattctcagttctggcattcatcaatgcttgggtatctcgtgatttactgcgcgtgggttgaactgaccatccatctttcccacgtgtagttgatccctatgtctcgccatctagagagagagagagagccacagagagagagagagagagagagagagagagagagagagagagagagagagagag

SEQ ID NO: 664847 - DNA, 690 bp, Homo sapiens
tcaaaggggggtactggcaactcggttttataattagggcctccatttaaatctaattttataatttttatttataagcagcaaatgaacacaaaaagggccagtttaaagatggtgtggccggtaacacaaaagtgttacgagggtttcaggaaagcctcttggattttggttgggcctgcatggcctgggtaccgtacagaggaaacagctacactgggagctaggaaaccaaagcaagcttggtggaaaccgggcacagggatagagaatggcgggggagagtcatacgagcaaaggggaggggtcctggaggccggccagggtcgtaaaggcgtgtccaacactaaaggggcggtatccctacaaggtaacattcaactggtgactctcaacacttccagagtcttaaggggttcctaggtgttatcagggtaactagtgttttaccaccaatggcctttcttggtccctagtaccgtgaccacaatatttgctgactaggaggtttaataaccttcggttactccaagaaccattaattaattgggtgtggtcttatgtcactcaaatacacttcgggtacctgttatggtcagggatacacgctgggtattggcgccacgaaaaatgcgcttgaagaccacaaaggctacgaggcagctgggaccttcatataaccactcggtc

SEQ ID NO: 664848 - DNA, 164 bp, Homo sapiens
tactcgggaggttgaggaaggagaatccctagaatctgggagggagaggtcacagaaagccaaaattgtgccactgaattccaggctgggtgatggagtgagactccatctcaaaaaataaatataattaaaatagataaaaaaaaattgttgtttctttcttc

SEQ ID NO: 664849 - DNA, 133 bp, Homo sapiens
acatgtaggtgcctcgcaggagctcttcttcccactctgggggttcgctatcactgtgatcgaacactaacgataataataccaagaacactagcctgtaacttcctaaatacacaagcaacatagaacacac

SEQ ID NO: 664850 - DNA, 361 bp, Homo sapiens
  misc_feature (90)..(90): n is a, c, g, or t
  misc_feature (104)..(104): n is a, c, g, or t
  misc_feature (160)..(160): n is a, c, g, or t
  misc_feature (163)..(163): n is a, c, g, or t
  misc_feature (174)..(174): n is a, c, g, or t
  misc_feature (179)..(179): n is a, c, g, or t
  misc_feature (186)..(186): n is a, c, g, or t
  misc_feature (204)..(204): n is a, c, g, or t
  misc_feature (238)..(238): n is a, c, g, or t
  misc_feature (244)..(244): n is a, c, g, or t
  misc_feature (246)..(246): n is a, c, g, or t
  misc_feature (254)..(254): n is a, c, g, or t
  misc_feature (258)..(258): n is a, c, g, or t
  misc_feature (260)..(260): n is a, c, g, or t
  misc_feature (292)..(293): n is a, c, g, or t
  misc_feature (299)..(299): n is a, c, g, or t
  misc_feature (302)..(302): n is a, c, g, or t
  misc_feature (304)..(304): n is a, c, g, or t
  misc_feature (307)..(309): n is a, c, g, or t
  misc_feature (314)..(315): n is a, c, g, or t
  misc_feature (346)..(346): n is a, c, g, or t
  misc_feature (356)..(356): n is a, c, g, or t
ccatcaaaattttagggaaggggggtatatgtgtagtagggatcccgtttgaaaacaggcacttttcccctgaggatgggaaaggagctnttcagttggagatntaggcagtgggttaagccagacccctaaagtgaccctttccttttttgccctattnttntcagaccctcngaaanacatccnatttttttaaatccctgnagctccaagcctggtttcatttgcttccctgccnggctcntngtgtgtanaccncntttgtgcccccctgacctgaaggttccatgtnnctgtanacncntgnnnacttnnatgccaacatttaaaataatttgataaagtntttgtagccnctcca

SEQ ID NO: 664851 - DNA, 177 bp, Homo sapiens
atccaggcctgagttgctgggcttctccatggccctgctgagttagggtgcgtctggtggcctgcaccgccatcccgcagtgccacgatagctcctttgcgggtgacaacatcatcacggcccaggccatgtacaaagggctgtggacttgatctgcgtcacgcggagcacggggat

SEQ ID NO: 664852 - DNA, 164 bp, Homo sapiens
  misc_feature (30)..(30): n is a, c, g, or t
  misc_feature (39)..(39): n is a, c, g, or t
  misc_feature (97)..(97): n is a, c, g, or t
tgatttttgccagaaatggagagctcgttntaaggaaangcggcgctcctgggagagaagaggcttttgggccaccttgaggcacgacgggtgccgnttcgtttccctgcgaccgctgcctgtttcgactgagccccttacaggaggacgtggcgggggcagac

SEQ ID NO: 664853 - DNA, 1021 bp, Homo sapiens
ggctgactggaggctggcggcacaggcgacagggacctgcggcagagtcttgctgcgacacccaggctggagtgcaatggcgctatctcggctcactgtaacctccgcttcccggtattcaatgctgattctctcctgccgtcgagacactctccgtatgtacgagaccagtacggagctgagtaagcagctaggatgaacttcaatcactccgagcgagtcaagtgtctagctggtaagtggatatacactcagcagggggtagcacgagtcacgtaacaagtagacctctggggccctaggaaaatggatgacccaagattgacgaactggtctgaaccgtcctcgagatgctcctgaaggacgggcccaatggtaagcatcgacgactcgggtcatgagaagacactcgcagtgttgtcaaggacttcttgaaaggcaacattaagaaggagctgtttaagctggccactcacggacactttacttcgacagtatcgtcaggccctcgcaggaggaacatggagcgcaagaaggaccatccagccttagcccctttgtacttccccagtggagctgtcaccggaaggaggcgctgaccaaggacatggagtatttctttggtgaaaactgggaggagcaggtgcagtgccccaaggctgccagaagtacgtggagcggatccactacatagggcagaacgagccggagctactggtggcccatgcatacacccgctacatgggggatctctcgagggggccagagtgctgaaggaaggtggccagggagcactgaaactccccagcaacagaggaagggaccagttctacctgttgagaatgtggacaatgcccagcaggttcaagcagctctaccgtggccaggattgaacgcctgggacctgaactttgaagaccaagagaggatcgggacagaagccaacaaggttttggagtataacatgcgagatattcaatgaacctgggccacgccgttcccatggcagaagacctggaga

SEQ ID NO: 664854 - DNA, 321 bp, Homo sapiens
tttttagtagagtggggttctccatgtaggtcaggctggtctgattcctgacctcaggtgatcctcccgacttggcctcccaaagtggtgggattacaggcatgagccatcgtacctggcctctttttttttttggaaacagtcttgctctgtcgccccagttgaattgcatgggcgcgatgtgggttcattgtaacctccacctctgggtttcaagcaattctcatgcttcagcctcctgagtagctggatattacaggcttgcaccattatgcctggctaatttaggaatttccataagagaggggttcccaccgtgtg

SEQ ID NO: 664855 - DNA, 430 bp, Homo sapiens
ggattagcacctgcagctctcaaccctgcacccaccctcctccagggaccatccaccatcatccttcatgtctgcgatggagcctccataagaatgcctggactatgggtcccgagcagttccaggttgctgaacacatccacgggccaggagggtgtgccccccactccacggacacagaagctcctgggctgggaccctttccgaccctgccctgtgccccggcccacctggctgcccatctgcggcctttctcatctccttttcctgcgttctgtgataattttgtgttgcactcttgatatttaaggctaatgtgtaactagaaaactgagttttaatatttaatgcccttggatttgggaaatctcttactacattatgtttggatatactttctctgaggggataaatattttttcgaggctgt

SEQ ID NO: 664856 - DNA, 135 bp, Homo sapiens
gagtactctagcaggatcgtttttcttgcccacgatcgcgtgatgtcgagtaacatctcacaggtgtcaaaaagctgaccaataaggccaccctgtggtatgtgcccctgtcgctgaagaatgtggaccacggtc

SEQ ID NO: 664857 - DNA, 150 bp, Homo sapiens
gtctgaggggccacagtaattacaaacttactatccgccatcccatacattgggacagacctagttcaattgaattttgaggaggctacttaagtagacaagtcccaccgtcacacgattctttaacctttcacttcatcttacccttca

SEQ ID NO: 664858 - DNA, 758 bp, Homo sapiens
ggataatcctatttattacctcagaagttatttttcttcgcaggatttctctgagccttttaccattccagcctagtcccttacctccccaattatgactggcactggcccccaatcagggcatcaccccgctagatcccctagaagtcccaacctcctacacattcatccgttattactcgctatctaggcgcagtatcacatcactctgtacgtctcaccgatagtctaagtagaagagaggaggccgaagaccaaataagttcacgcactgcttaattacattggtcactgggtctctattttacctctcctacaagcctcagagtacttcgatgtctccccttcaccatttccgacggcatctacggctcaacatttttgtagccactgggttccacggacttcacgtcatgattggctcaactttcctcactatctgtcttcatccgccaactaatattttcactttatcatccaagacatcacttcggttcgaagccgccgcctgatactggcattttgtagatgttggttctgactatttctgtatgtctccatctattgctgagggtctttataccaagcaaccacctatcacggaaaaaactctacctcttttttggggagttctgcccctcccgaaaaaacctttttttaaccacatctcttgggccgcggcggcccccatggtttcctatcacctgcgcaaacagggttcctccgaaactcgcgggctcaaccccgggggggggacc

SEQ ID NO: 664859 - DNA, 197 bp, Homo sapiens
cgtgcggggtgatctgaggacccaatgcagggactcggagcgacgagggtagctaccagcatggtcggtcatactggatgaggatgctttgatctccttcttggagctcatccacatatttcttggtatagtgcaccagtgctttggagatggactgacggatagcataaatcttgtgcacgtgaccaccacccttt

SEQ ID NO: 664860 - DNA, 672 bp, Homo sapiens
taaacacacaaagcagctgcggagcgatttaatggtcttctccttcgacagcttcgttgtacatagctgggcccccgaggccctgactgtcccggggaaaccaagccagcgtggggtgaagctactttgaaacctcacccacagttcacacggtgggtggaaaagaagaaaatctagcaaagtaaatccaacaacaacccaaattaacagtattattaatcttcctaccccaagtcgggctctcccccaggccctgaatctgggtctcaggaaggaggcaggaatagacgctgaccgagacagggcatctctccacccaaacatcccatcttcgtgaggtggtcccaaagctgtgcgccaccccttgtgtgggacaatcaggcactccgtgggctctctaccagcgtgtgatgagacgtacaaaaggagggtctgagcccagaaataaacaagagcatccgtgaggctggagaggcaggcccagggtgcccggaccacccggctctgcctgaaaggatgggcggggttccagagggcccggccgccacctagtgactgctggggacagtggagatgcatgacaggatgcccacctcgccctaggcagtcaaaagcggggtacacacaaacactctaaaagcacacatttagcaggaatccccagtcttccgg

SEQ ID NO: 664861 - DNA, 431 bp, Homo sapiens
gtagggtaaaggtgtgggtgggaggtgaagcagtgatcaggtagggacatgagtctttgcccaaaatttgtgcacccaattcagaattatattgccctaaatttgaacttttggggaatggcgacattgtttgctgacagattgcttttaaactaaagaacgaagaattggaaaatttttttctagggcagagagaggccacttttcatacccagtgtaatataaattccagtgtggatccggattgaactctacttacacagtatctataaattataactgtaggtggatctttggcaagacagttaattacagtgtgcaaataaaattttgtgaaattgctcatttaaaatatagcttttaggagcttgctatttaaaggacttctgtggtagatactttttgaagataaaacattttaaagcaattaa

SEQ ID NO: 664862 - DNA, 1403 bp, Homo sapiens
  misc_feature (458)..(458): n is a, c, g, or t
  misc_feature (542)..(542): n is a, c, g, or t
ccagagcccccttcccaggcagagatttccaggtacctgattattgtgctgaacactgttcccggtgcaccgaggagagggctctgaagaatgacagacacaaaacacagggggacgggtgcgcatccttcccccacgaagcagaaggcgactgggccacttcctacagtcgtatgtaccagtagtgaacgccgaataggagaggacgttcactggcatctgcgttgactagtgttgctagccccaatgcccatgacagtaatgtccccgcggcatggatacacggagtgcaatggatgtatccaacactcagactcgtgtcctcgatggagatgctgtgcttgcgtgcagctcgacgccacttggattctcgtcctcctatcggtgcacggctcatgaatagcccggtattgcaaccgtcgcttgccagcatgcattgcttgctcttactggccaanaccagcgtagaagcaattgtatgcaccaagtgcaaggagcaagaaaaccaggaatcctttgtatgtgggggcttgcagaagtcncgttcacgaggctattgcgcccagaattcgctggaacgctggttctcgaggagagatggtaccaatacatgatccactggtacggcatatttctagagccgtgcaacccaacgtgtttcataactcaagggtactccctctctattcacacgcttcatgccctgtggacctggctgtagtggggtgagtgcactgttctcccagtctggggagcgcggcacgtgccgtgcggcggaacgtactggtcgatccgctggaattggggttctgcctgatgcattgagcgtgcgtgccttgggcgtgctagagcttgaggccaatttccgctggcaaagttctgtgtaacacaggtatctttctccgagttgccttttgagatgttgaggcaccagaaggacctttacttcctcccagaggaccctccttcagaaccacgtgttgagactttgggcgcggaaccctggtacacatcgcactggggagaaattctgctggaggcccctcccagagggggaaaggcgctcaggcaatgccgtttaaccctggtggaggacagctgttttttcccaccctcttttagttcttccccataaaaagttgcttggaaaaattatccaccacaagcagttactaatgtacccgacaaatagtacttctcacacacagcaacaccgttgttttatccacccacggttctcatataaacacagactaccaatcagttaccaaaagtacatccttagtactcgcacacccacccactttgtcactacttcatcaaaccaccaaagtactatagtcacaataatttatcgtactaacacatacacacactacaactatctccccactcactactat

SEQ ID NO: 664863 - DNA, 792 bp, Homo sapiens
tgagggtctcaactttccagccatagcttccctcaactggatgaagcaactgtctccccggaccatcacacctgaccatgccccatactggtgtctgcaaggatcgtatgaccgtgcagggacctgctcgcccaggcgtgagctgcccgccatctctgcacaacggagctgaacgctgccaaaatctgagcaatgaaccgcatcagggtgaagggaagatgtactgcacagcatttatatttgagctcgaaatggatgagagagagcccacagagtctacccaacagcttaacaagccatgaggtcatcgagagagtgaccctgaaccgcccattcctgtttgcatggggatgatcaaagcgccactgccctgcacttcctgggccgcctgtggccaacccgctgagccacagcatgaggcccagggcccacagaaccacagtgacctggcaaggccgtcgtgcccatggcctttagaggacaaaggccagacagcagataacaaccccggacaaatcgagacgactgtgtcaccctccagtcgtcccgcgacctatttccttcataatgagctctgacctttgagcgtggaaagcagctcgctttctaccttggtcgtaagtaggtgactgcagtggagtgacgcagctagaagccatgcagcggcacagatgcacctcccagtttgcgtgggtttatttatagagcaatgaggggtggggaggcaagaaccagtgacttagcgacgcgactactgttccaagaagaattccaaccgaccagcttgtttgt

SEQ ID NO: 664864 - DNA, 103 bp, Homo sapiens
atccttagtctgactggggtgatcatgaaaatagacagctgtgtcagtagaaaattcattgcagaattggtgctgacaatggttgacattggttggttggtgg

SEQ ID NO: 664865 - DNA, 649 bp, Homo sapiens
aaaacgaaataaaggaatgctaggggcaaatttaaactgaaaatatcatttatttcacaagtggattcttggctctttttgcacaggtagcctaagaaaaaaatgtcatcaagtaggtaatgaacccttgtaccaacaaacagccttttgggaaacggcttattccagggttcagccaagaaagttagcaatggcacatcttatttgtattaaaaccaaagaaagctttcaaagatgaatgtgtgtctttttaaaagacacaggcagctagcagtaaggggttatactctgtcaaagttgtggtaagttgagcaccaagaaacataataattgtgtttatgaaaacacattaaatccatagaaatccataattccaaaatgacactataaaatgagagagccagagaacaattagcttgtcatctttagaggtagctgttaaaaccatttcttactttgagaattagaaattacagggaaggaatgtagcacttatcctgtctttacagtaagaactgtatttcatgataacctagttgcccagcttgggagagaaagccctcttacgcaagaatgccagctaataagagaagagcattcaaaagaattagaataacatcgtttctcagctctatgaaatattgaccag

SEQ ID NO: 664866 - DNA, 207 bp, Homo sapiens
ctccagaaatccctccttttaatgtgcaatacgattccatgataaggattttgctcagccatccattcttcagtcgggagtgcccattagcaagcttgttcgttcctggcttgctgactcatcccaagaccatacactgataagcagcagcctttggagtttacagaatgctgcacatatctgtcctttcccatttggaatcagctc

SEQ ID NO: 664867 - DNA, 111 bp, Homo sapiens
tgagagacgtgttgcaatgtgtgctgagctgtttttaaaagaagctgaaaatgccaagcgagagggtgaaactagaattcgacgaaatgctgaaaaggatttttgcaaggg

SEQ ID NO: 664868 - DNA, 184 bp, Homo sapiens
ctcccaagtagctgggaccacaggtgcgtactaccacgcctggctaattttttgtaaagacagggtttcaccatgttgcccaggctggtctcaaacacctgagctcaagcgattctggaggtaatttttctccccctcaaaaaaaaaatttttttacatatgtatatattgggtagttaacgtg

SEQ ID NO: 664869 - DNA, 490 bp, Homo sapiens
cgagacggatttcactctcgttgcccaggctggagtgcacgtcgcgatctcggctcaccacaacctccgcctcccgggctcaagcgattctcctgcctcagcctcccgtgtagctgggattacaggcacacgccaccacacctggctaattttgtatttttagtagagatggggtttccccatgttggtcaggctggtctcgaactcccaaactcaggtgaggcttgatcactcttttaggttctctgtggctaaggtgacgcccacacccgaatgaagttccccttccccagcctcaggcatccatggcaggaggtgaagttgtggggattgttgataatggatggaatgtgaacgagttgcatcaggaaatgcaggctgagcacagtggctcccgcctgtaatcccagccctttgagaggtcaatacaggaggattgcttgaggccaggagtttgattccagcctgagcaatatagtgaaaccctgtc

SEQ ID NO: 664870 - DNA, 311 bp, Homo sapiens
  misc_feature (32)..(32): n is a, c, g, or t
  misc_feature (246)..(246): n is a, c, g, or t
gtggcgtgatcttggctcactgaaacctcttncccctgggttcaagtgattctcgtgcctcagcctctgaactagctgggaccagaggcgcgtggcaccacacctggctaattttgtatttctagtggagatggggtttcaccatgttggccaggctggtctcgaactgcaggcctcaagtgatccacctgccttggcctcccaaagtgctgacataggtgtgagccaccaggcctggccccattnagtgggtctttttcttattgtgggttttctcgtgttatacacttcatgtaaaatgaaaagttttt

SEQ ID NO: 664871 - DNA, 125 bp, Homo sapiens
tgtgattagaggatcccatctcaggcaggacgaatgcctgtagcaagtcagcgcaggctggctgttcatgaataagggcttctgaagagagcacagttgtaccacaaggtacaagagaccacaag

SEQ ID NO: 664872 - DNA, 467 bp, Homo sapiens
ttctccaatcccactttccgcttaactgaaaagcttaaaataaatatctgaattatgtatcctgaagcttgaaatttctttattaatcgatgaaatatgaattctaaattctagcattgaagcttcacaaagatcctcaatatcttgagcaaggatatatgagtatgtgtaagatggtgattcgatatacacacacgtgcagattagacagatgtcggggtggttcccttcttctctctctgtcatctgatatacagcagcttattctctaaggtggaagcggtctcggaggacgtctcacactggtcacagtagtagctggctatacagatcatgctacaggtgtgctttgactgtgtatcagatctctaaaaaatatctgtaaggtcatatctatgactgatatgagtctagcatctcactgtcgattacataccatgtcagatatgcatcgttgatgtatgtag

SEQ ID NO: 664873 - DNA, 138 bp, Homo sapiens
  misc_feature (19)..(19): n is a, c, g, or t
  misc_feature (56)..(56): n is a, c, g, or t
  misc_feature (93)..(93): n is a, c, g, or t
gtcttgcagagtagctgcngtgagtgggcgtgtgccgaagcggtctggcccaaggntgggggcggccgagggtcttcgggagcaggccgcagngcggagagatcctgggatcgccgtccgccgctgctacccggcatg

SEQ ID NO: 664874 - DNA, 856 bp, Homo sapiens
tttgcttctcggtgctctgcagtcgctagaaatctgccagctgctacaatttgctactgaggtcttggaaattcctggctactagtgggctcgtggtacatgttccatggaaacataatgtcgtgatgcccgatcggtggtacagataaatgttcctgaaatcaacgtgtgattattacctgctttttagcacgggacagacatagcagtcattgatgtgttctgcacgtcgtcccttgcatatccattcggatgaggaaactatatgaaggagaagaccaagttccctgagtgaggaagaacaatatgggaaacattgtgaacactgtaggggaaattatatgtgtctgttcaccatgaatcgagattaagcaccatcatactcttggctgtggccctttcagttcctaaagtgtccctgacatctgtgctgcggcaccttgaacaaggtaattgcaactgttgccataagcgcggaaagctggtatctactcaagaagtctccgatgactagatggggacccttgcagggtcccccaggccgtggtgagagtccactgaaagggttaccgtacgccagggttgaatatataaccaacccgacactgaggtaacgccaaacgtgtttcttcgtggttcaatccgtggggataacacctatccacaggctatatattaagtatacaaccttttgcaacaaggggattcgcacagagtggatcatcattggttatcctttgtgggaccactctatggatatcccccgtaataatatgtcattttggcatggcggccttgccttccaaaccacttccccatacagcgcagcccgtggagaaattggcagcgtaaaacg

SEQ ID NO: 664875 - DNA, 1379 bp, Homo sapiens
gcaaactgaggagcccggagctgccgctgggtgtgatcggggccgtgggtgcacgccgggagagatgcctgctgccctggtgcctgacctgacctttgtacaggcctggcttcccttcccggttcctgggtgatggaaacagagatggtggggagtgtgaatcatgcatgtggatagtcggagctctcggagagccggagcgggtcagtggatggcgcgatgtgccgagagcgacgtgcgctagcctgggcgtgcgacgcgcccacgggcaggcgtgcgcgtccggaacacctgcaaggtaacccattgagccatggcagtcgaacaccaaactggggacgacatggacgaagcatctggccaacacacctacatacaaccgacgacatgcaggagatggcacccgagacggaggcaaccacagtgctaggctgacacgagaggagcagaaccagtgaacacaccacaggccacgacagaggaagcaagatggacgtcaagcataaatggtccgagaaactaaaaacaagaccacgagaacaacgtaaccgatggacccactcagaaggacacagagacatgaaccacatcataacaacacaatgactgggaccgcagccaacatgaaccacacggatcacaggcaacatacaggaacaacgagcagcacacacacaaaaagggacagaacaacaacagcgaaacagaaaggggaacataaaccggaccgacagacccccacgacaaaggaccgaatcgcctgaacacataactgagacacacctgggagcaggaggaacggagggaaacacaggaaccggaaacataacacacaccaagggcaagcaaaagactcccacacgacacacgaaaggccgtacaagcaattcaaacccacacaggacgggaactgacgatggagaacataacaatagcaggcagagagaatcataagggaaagacgcaaggtgtcaaaacgatcagaacctatgaaaacttaagaagcacagaaaagaatggcaaacaacgagaggtagtaagtaccaaaataccatgtcgaacaaagaaaagactaaaagtagcacaacatgaacaaggagtcaaaaacaaattgtgcaattggaagagacaaaaccgaggagacgcagcacagccaccgacgcacacctccggggaacagggcgagacgagacgagacaccagagaaagaaccagacaacccacacccagacgaaaagcgcagaatcggaacacgacgcacaccacacagacgcacaaccacagagacaccagaaacaagcagacaccggcaaacaagacgacacgcgcgctcacgaaccacacaaaaatcaaacaacagaaggcatgagcaggagccc

SEQ ID NO: 664876 - DNA, 464 bp, Homo sapiens
  misc_feature (77)..(77): n is a, c, g, or t
  misc_feature (439)..(439): n is a, c, g, or t
  misc_feature (456)..(456): n is a, c, g, or t
ctggctgcgtctttttgtcccgtgcagaggatgttttcgggttggcttttcccatggtgggcttttgcttctttgtngtcgagctcggttcccccttgcgggtctcataatgcatgtggcacttaggtccaaggtctccagagggtgaaagctggagtctgtcaatgtcctactgagacagcacagcccacctagctagccacatttgttttagtctgaaccatatatacttatagaattcagtcaaagatacaccatctgatacagcttcatggggtggactctaacagtagttgcaatgttttagaatgagacttacttctctgctatctagatctgaactccttggcttctttacttagttcaagccccagcctaggaaagccagttacataaaagttggctcaggagtcttagagctttacctacaatatgaganacgcaaggggatcctcnaggtccct

SEQ ID NO: 664877 - DNA, 165 bp, Homo sapiens
taattgttcaagtgtaatgagacgaatctgtatacgaatcaggatttctttaaaatctaaataagggggaagaactagatttccatagactgtacagtactggcattgatgattaggatcatggtgactgctgtcatgatcataaactgaggaatcagagagaaa

SEQ ID NO: 664878 - DNA, 342 bp, Homo sapiens
acacaagatgctgtgacaaaatctccaggagcatgcaattagatggctatagcatttttgcaatcggtgtggccgatgcagattactcggagtgggactagcattggcagtcagcccagcgcacgcaatgtcttcttgggggatgactttgacgcctatacgaaaatcgaagatgagttaattacttttgtctgcgcaaacagccatcagcaacctgtccagtggtcacacaaggcatggccattgcatcttgcaggcatttaagatgatggacaatgtttggtttggttgaaaaagatttttcatccgtggacaggggtctctatgcgcagcctggtcacc

SEQ ID NO: 664879 - DNA, 372 bp, Homo sapiens
accattcctctctgccactcgtggttctgttctgtcttcgctgtccgcgtcactcgaattggcgtgggtcttagtcctcacctctctcagcaccttcattcttctctgtttctgtacttgtccctgcctaacaccaccttcttccctgtaggttttttcagtttctctctctgatctttagtttttccctttgtttacggtttctgggacgggctcacactctcccctttcctccctttccccttttcctcatactcctcatttcttctgttttccctctgaggtcctatttgaaatgttttatttttcttctccctaaccttccagacctctcctctctctccccctgtgggcaggacctgaggctctaac

SEQ ID NO: 664880 - DNA, 1570 bp, Homo sapiens
gccggggctgcaccagtgcatattaaaggcttttggcagcaaaaaaaaaaaaaaaataaaaaaaaaaaaaaaaaaaaaaaaaaaaaaaaaaaaaaaaaaaaaaaaaaaaataaaaaaaaaaaatagaaagaagaaaaaaaaaaaaaaatgaaaatgaaaataataaaagaaaaataagtaattaaaaaaaaaaagaaggaaacagaatgatataaaataaacagataagagataatgacatagaaaggaatagaataaaatagaagaagtatgaagtgatagaggatacgagaataaagaaagtatagaaatgagtgtagaattataataaaatgtatatattaatgatagaatgtgatacaatataaagaaaaaatgaaaacaatgatgaaagtactaaataaacatagagaggaaattccaacaacatgcaacaaggtaacatgcaaaaaaatgatccccaaacacatgagtaacattacattggtaccaaagtgacaccaatcaatgaaatccacaactagaacatattgcaatcagcagtagaccatatcaaagacagtagagataacgtcagtctcttactgctacatacgcgaagacgaaacaatagaacgaaaaagaagcagatcaaatcacatatacgtttattatcagataagaaaacaagaacaaaagagagaaaaaaggaagacaaaagaaaacaatataaaggtcaataatgcaacaaagtagacaatagaaatcaaggaacaacatgaagacgacaacagattaagaccaaagaaccagaggaaaacagagcaaacaaatgaagcacaaaaacgatccacacaacatagagaaaaacacacagaagacaacaaaagacaccagcaaaagaaaaaaacgaagcaagagaaaaagactagcaacagaagaacaaaaagacacaaaacaaaacagaacaaaaaacacacacaaagaaaaaaccaagcggaaacaaaacacaaaaacaaaaacaacacacaataacgaacaacacaacaacaaaacaagagaagagaaccaacataaaaccacaaagagaaaaagaacaaagcgaaacaactgagaaaacaaaacaaacaaacaaacaagagaacacaaaaaaaacaaaaacacaaacgaagaaagaaacaaaaaaaaaaaacagcaaagagaaaaaaaaaaaagacaaacaaacaaaaacaaaaaaacaaaaaacgaccaacaacaaaaaaacgaaaaaacacacaacaacaccacggcaaaaaaagacgcagatgaacagacaaaaaggggaaaaagaaaaaaaaaacaaagaaaaaagaacaaaactaaaaagcaacaacaaaaagaaagaacaacacgaacaacaaagcaagaagagaaaagacacaagaacaagacaacaaagaagacagaaaagacaaaagaaaacagcacaaacgaaaacacaaagcacgcaacaacaaaaagacaacagaagagaggagacgaaacaaagaaacagaacacatcaaaaaaaacaacataacatgaccaaagaaaagaagaacacaagaaaaaa

SEQ ID NO: 664881 - DNA, 144 bp, Homo sapiens
ctagaaaatcccctattactggagatgaaagggttaaatattcatattacacagagggagatgatttttagatcatgttttcaagtttcatactgatgtgaatgttaattgagtttaataagctcggggcactttttattagac

SEQ ID NO: 664882 - DNA, 1509 bp, Homo sapiens
tccgcggagcgcgcgcggcacgatgtgacggtcgggtgcaggcatgatgaaggccctccgtggccgggctcccgtccgcgccgcgcgtgctgctgatcgctgagaggaacccagatttccctttccctgagtacgttttagatcgagacggataccgagcgcgacttcctcgtgcagttcgactctggtgcatgacctgctgcatccgtacgatgattccgttggcactgtaggacacacgggtattcgtccgaaccgtacgacccgtgcaacggctgaccgcttctctcatactagccgccgccctgcagcggtgcgccgagcgccctgccatgtggcgatgactcgccacatactatcaacggcaacggacgacggctccccccttgcttctcaactgactctaccagtccggcattctctaggtcgctagaggcactcgaaacgcggagcgctcgtccccgcgacgttcgcgcgaccgtgaccgtgactccacgcgaccctttcgtaagtgcccactgtgggatgcatccctgtatgcggcccccttgtgcgcgtgccgggcgctgccctccgtgcggcgcagccgcagttggccggcctcgctgcccctgagctgaggtcccaagcccgcccctaggcgcggtccgtcccccacacggtgggtcggcccccgttccgctgccccggggcggaccttcgccccatcgccgcgcgcatctggcaggcaccacctctgccgcgacgggttccccgccctgtgcgctggcattacctcttaggcttcccccgccccgtgtcccccgcgacggcgctcacgcgccgcgttcattcgccccgcaacttccggcggtcctcccaccgatgtgtggcttaattcggtctcgcctccctccgcatggcggcctaccccttcagcccttcgcctcagccacctctccgctttctcggcgctccagcgcccaccctccccctcccgcccacgcactcgcccgccgtgtgcccctctcccctgccgcaccagcgatgcggacttgaccccctcagcacctccccaggccagccacccaatcccccgcacatgcgcccccaccatcactctacgttggcatccagccggtgaactagctgctagaccacacatcaacacccaggctcgcgccccaaagccctctgcgagcgccctacacgcagcactaacacaattccaccctatggcacaccactagacgcccaagccaccaccaccaaagccccatcgcttcaggttttcgtgtacccacaccgcaccccacaccctctcaccgaaacctttccccttcaacccaaacagcaatctctcggccgcgaacgacccaataatctacaacacatctactcactatccattagcgcgacgaaactcaccggaaccctctccacccggcttaccctcccatcgtatcgccacaactgtccgaccctcatcacttcttcgcccggcgattccctcacaaccgcgtaacgaag

SEQ ID NO: 664883 - DNA, 131 bp, Homo sapiens
ttatctgtttctagtgtcgtccgagttctctgatgagtgagaataggttgcccactggtgtagaagcttattatggtgttcatcatccagttacggcaagatattagaactatctctctacgacatgttca

SEQ ID NO: 664884 - DNA, 312 bp, Homo sapiens
atcgagctcggactcctcagccttccaaagtgctcagattacatgacagtgatgcatgtgcctagcttagctctttatcattgttccttctattgaagagggagtcttgcagttgtcacccagtgtgtgtgcagtgtcatatcgtcaggtcaggggaacctcgacctccaaggtacaagtgatgctccttgcctcagcttcccaagtaggtgggataacaggggcccgcctcggtgcccgtaataataccgcggtatctacgagaaaagacgggatatcattatgtgggccaggcggaccttgaaatcctga

SEQ ID NO: 664885 - DNA, 283 bp, Homo sapiens
cttagccaataatatgcctatgatgatccctgacagcaaaaagtttgttttctgagactgcaagactgccagtgtccaggtagagactgagcaaaggatgttatgggctgtaccagctcccagagcttcggaagaaagagcagcagctctctcttggggaaccatcagagaatgctgttgatgtgttatgtgtctgtctgtcacctggtcacgaggttttaccacctttgcaattgtcagatatttttcactccctgaataaagtatgtttgcttaaaattga

SEQ ID NO: 664886 - DNA, 939 bp, Homo sapiens
agtgatgatgaaaactaaattgaaatgtgaatacctaactgatacaatgtgggattaagtggaggattatgagaagaggataaccaagatgagatttgagacaacagatttctgggaatgatcacgtaataaatgtctgaatacatatcgtctgtgacatcgttaagacacattctgagggtatatgtctccactaggaatcgaggcatctactgtatgtcgagggaggtgggtccctaatccaccgggataaaaatcccatacagtcctatgcatgtcctcctgtgattggttgaaggtaatggacacctggttccaggagtgtcacaaataactagaactagtatctgtgccgcgccacaagaccccaacgccactaggtcataatgcataattctggtaccaagaatattgaggatcctggtccaggcaccggatatttagctgggcatacaaagttcagtgcataagacagggagcctgttgagaagggctgctccgcgactgtgaccagctcgtgacagcgtgcatatcagaagctgtgcgttgccatatgggtgcacagctcactgaaggtgaagccatggagttggggctccagtccaagctgtctcccccatgcctaatctgttgagctaattactgggtccctaatctaccgtcgtgctggctcagacaaaccaagtccgataaaggcacgtttgtagaactccggttctcggataagaggaacacatccccaggctgtccttgaagctactcgacgttctgtgtcccatctcaacgcatcttcatctgcggtaccgctcgccacccgcggcgcagattcgcacacaccgggcttcttcctggagagggaggggggcaaccctccacacaaacaccggggccccctccaaagggcgaacccaccgcccccggggcgccccacacaattcc

SEQ ID NO: 664887 - DNA, 162 bp, Homo sapiens
tcgaactccagacctataatcccagcactttgggagggtgaagtgagaagatcccttgagcccaagagttcgaaaccagcctgggcaacgtaaggagaccccatgtctattagaaaaacaaaaaaggaagagcctatctgacctgcgctaagtggacgttgg

SEQ ID NO: 664888 - DNA, 230 bp, Homo sapiens
ggccaaccccatcttctgaggatccaggcttttcttctcctctggggaatgccagatcctcatctgtaatcaccagatagggccttcttctcaaacacatgcaggaatgttaagagtcctcctcgggtcacctccctcatggagtttgagggaattatcttggccaccagaagccgtgggaccacaaaggcctacttctgaatagaagtaaccagttcatacatgatctc

SEQ ID NO: 664889 - DNA, 775 bp, Homo sapiens
  misc_feature (775)..(775): n is a, c, g, or t
gtccatcttcctgaggaaggcctgggagataattttgacctggtagatcattctgacttacacatttcggactttaaccctagtctgaagactctgtgcaaactggccgtgattcattataacctaatccagtcctgtttgcctcatgatatcaggtggcgacggctgaagtgccatgtactcaccaacagtcagatagtcacgtcgtcctccagtcgtctcctcccatgggtagtgaggaagtttgctcgtccacctccctctctcctgagcctgcgtgtctatctttcagcatggccctctgcacccatcttgtcatcccggcctgtcttcctttgtacctcctcggatcttcggtaatacctctcgatgatgtgaggtggttgcggcgtacgtaggtgttctctgttgcttgtgcactacatgtggggaagctgatagctgggcgatgcgtagcgctaagagcttctctatccccctccttcttgaggcctgaaggggctcccgttcccctttgggtcgctcatgctcctccatttcccaaccgtcacttatgcagccctgtcgtccctgggtacgcattagttctactggggccccagtgggaccacgtaccaagtgcttatcttgactggtgccaactgggtaacgggcgcactggtgcgtcgtaccgtgggccgacagccctagtcggcctgtttcatgatgacctttcagggagggctttaccccccgttccccgccccttttgccttctgttcccgtttctccgctn

SEQ ID NO: 664890 - DNA, 432 bp, Homo sapiens
  misc_feature (10)..(10): n is a, c, g, or t
  misc_feature (23)..(23): n is a, c, g, or t
  misc_feature (320)..(320): n is a, c, g, or t
  misc_feature (416)..(416): n is a, c, g, or t
cctaatgaanatgggttactatncactgtgcctcccttttaataggtgaatccaaatgaaggtgttacagagagtttcagtaacgagttggtggtaagatctgaagacttggactcaggcttgcaggcacccagcacccccacactttaagtaagaagttagttattgccgggcgcggtggctcaatcctgtaatcccagcactttgggagaccgaggtaggaggatcacgaggtcaggagtatgagaccatccctggccaacatggtgaaaccccatctctactaaaatacaaaaaattagcggggtgtggtggtgcanacctgtagtcccagctactcaggagggtgaggcaggagaatcccttgaacctgggaggcagagattgcgccactgcactccagcctgggcgacagnagacgaatccgtctca

SEQ ID NO: 664891 - DNA, 1466 bp, Homo sapiens
  misc_feature (833)..(833): n is a, c, g, or t
taatacaacgtttaatcatctgggttgatcaaaaaatgcaaggcctcagctcataggaacagcagcagaaattagcgagagacacgggacttttattacaaaaaaatttgtgtgtgctttacaaaacattatgtgcaaaaaaagcttaaaaaaaccagagaccaaaggcagcatcctgctaattttccatctactattaagaaaaaaaaatatctggtacctaaggttttaatttcccttaaaaaaatattattccgcttaggcacaattggctggggggctttagaaagatataagccaggttctccacagaattccccctttggaggtgacttgtgtttcccattttctccggcttttatatagcttaaggcatttttttctcttctcgtgacaagggtgtttgtttgggtggctgtggcttccagggttggggttacacgtggcaaaaaaaacaaaagtgtgtctctccgtgttagaccccgaggccaacggggcccaagaattgcgagtttccgggaactccgaggggaacgggctcacagaaggtgacacacgggggccgtgaacatctcgggacacagcgggggaacgataggccacggtgaagtgtggtatagcgccagggccccccaggggaaaccccgtgggaccccaagtgtgttcaccccttgtggcgggcccccaaatcaactccagaaaactttgttacaacggctatgcgcgatatgcgccacacaaattggtcattcgacacaacacaggggtggcgttgtacacagccgttggtcgagaacatctgctggagtaatagaaaacgccccagagggggngtcacccacaacacaagtgtcgccgcagtatctgggggcggcaccaaaagaagccaaccgggggctgttaaaaacggggtgtgtgggcgctcatccccaccaaggagaagggagatacacgttatacaccacatatgttgcaccaggagagagagattaagtaggacagcactcgcaccaaacaggccagtagcggatgagaggcgagaccacgctaaaaggcagcccacaaccgaagtggagggcgtgcccacacacacagcagccggaagaacccatgtatcaccaaacacagcccggcgaacaacaaaaaacggaggagtatggtgagtacacaggtccgacccactcgccagatggaatgtcaacccccgaagataatgatccatgacagctgagataagaaaggagcaacacaagctgaagtgagccaaccaagaggtaggcatgaatgtaccgacacacacaagcgaggaagaaaaaatcaacacgaccaccgacgatagaatatgaatcaagccgagtgaagtccaaagacaagaagagcaaggcgagaggctcactacgatgactatgagtacgcacatataatgcacatatatatgtgtatagtcgattagttctgcaatcaga

SEQ ID NO: 664892 - DNA, 107 bp, Homo sapiens
tgcacacgccgaacatccatactgtcgacacgctgaggaatcacactgtacacgccagatatccatattcttcttaaaatcacggtcatgagtggactgaatgctct

SEQ ID NO: 664893 - DNA, 124 bp, Homo sapiens
atcttcagcatcatgttatcctgggcctcagctcctggggacccacgtccctgctctaacacctgcctcggtttttcctactgtcctcagctggcgtgctgggtcccctctctcagtcgacatc

SEQ ID NO: 664894 - DNA, 601 bp, Homo sapiens
gctcatacttaattttttgttaattaaacatttattatgatagctttttaaagctgtgttgtctttgattcagggcagaacagcaagaaacatgagacctttatgtcaattagctgatcccctggaaggtggaaacacattgtcggcccgccttcatggggggaaagggatatcaatggtgtgaaaaacacccatgcaaatttttgatatgaagaagaaataggggttctccaacccggaaaagtttgctcctaatgctaccccctaggggacacccccccaaggggctataaaaggggctgggatatacgggggggcccccccccccgaggattttttttagacatataccgaccagggcggctttgcatgagcacaagccatgagctggtgcccagctaaaaggggcgaggaaatttaaaaagagggggtcaacggccatgggcgtcccaaagataaagttttcccttagaataaaatgggggggggcccggggagattttgcctccaaggatgtttataagcggtgtgtggttatcacacaacaaccggggccggagggaataggtgcttgggcaagactatgactcccttatgcggg

SEQ ID NO: 664895 - DNA, 201 bp, Homo sapiens
cacctccacaggaggcagtatggacaacatggtgacaccccgatctctactaaaaatcaaaaattagcaggtgtggcggtacccgcgtgtaatcccagcttctcgggaggctgagcgaggagaatcacttgcaacctgggaggtggagtgttgtggcgtagtcgagtatcgtgccactcaacctcaagcgttcgatcacag

SEQ ID NO: 664896 - DNA, 140 bp, Homo sapiens
ttcccaggacatcaacagctgtgtcaggcacttgctaaggatcctaaactgcagcaaggctacacgctatgggattctcccagcggcaggccaatttctagagggcagtggctcagtacatgcccgttcaccctcccatg

SEQ ID NO: 664897 - DNA, 2163 bp, Homo sapiens
  misc_feature (1948)..(1948): n is a, c, g, or t
  misc_feature (2096)..(2096): n is a, c, g, or t
  misc_feature (2101)..(2101): n is a, c, g, or t
  misc_feature (2104)..(2106): n is a, c, g, or t
attaactgttttgatgagtacctattttgatgcaaaggaacggccctgggacctcatagggccacagatgggcttcctgggcctagcgtgccttggttgtggccatcctgcttctactcagccctgccatgctatggggtgcagcacaaacccaggacccaggcctagccactgcccacagctgatggtcactgttttggctggctccagagtggacaggtacgctctgtccacagcagctgctcaggcacagtatgccgtcaggtgcccgcttcttaccactgtgtgtcagctgggattggccgacagcgtggtggtgacttctaggtagaccgatggaccctaaatgggcagtggcatgtttctgctgtggtgggaactggcagggagagggtcacctccactctggttggatgcggagctggtccctctggctgccatgctgtgttggggctctctgacctccctgcttgcattgggtctgggagagagagtggaatatttggtagggaccttgacagaagagagccctgggtgcttgtggtgcaaagatcttcatgcccagttccaaagtgaggtccctcccaaagttgttttcgtgtgaggcagagaaagccacactctgaatacattttatgtctcaggaattcacattccaggttcaggaattttattccaaagtcctttggtgcactcaccgtccaccgttccccaaggcagggagagggagtggcccgtccctgggaggctggcaaagtgctctccaggaggggtcagacgtccttgtgatctgcccaggtgtcacggaaggagattttctagctccacatctgtctgcacataggaaggaacaagataggactctaaacctagtcatcttggaataaaaagaagagctggtttgttttagagcagggcggggggtgggggagggaagcgggtgttggctgtttccaaagagagcacttaatttaatttttcctttaaatgacccagggctgttccgtctgatagatggaagggtaacattgccttaaaacagaaatatgcaggcgttggctatttttggcataagagcgtgtcttcattcccaaagtggttctcgtttaatggcagggtgcggtccttaggccccggcctggactgggaaatgggggtagggcaccaggagagaaatcctcctgggtactcctggccagaccctcctgaatcatctgcggcttaaactcatctcgcttgaagggcagggagaaacccatgaatctcaggcacggttcacaggggtcctcaagggcaggtttccatttcatcatgaagtgagggactcctgtggaagagggtggtgggccttggaacgctgcctccactgaggcgggcacacaaggcggaccctcctgaaacagcctccattttcttcaaacatgcagaatgttttcccagactgcgtctatttcagggtcttccatttttgtggtttatggccatgcttgccagttttggtggggttgaggaacccataggactcatagaaataatagtgaaaactcaaacccttattttgggacttcagttctcgtggtccataggggcagagatgtcaaagtgaaggttgcctgagtgaagggagagttcccctataaaaggcctaaaattgatttggggctcagccatcaaggggctggtgttgctcctgtcccagacaaggaagcccctctttacatcagccatattaggggaacggttgtcagctccccaaatgcctactggatcctacagccatacaggaaaacagacggacacagccctttccttaaagagccctggggtcctgtcctgcaggatgctgcataggaatgggcagagatgtcctggatgggaacatggtcctggaggtgccctacctgcatcctgctgcacccccacccacgacactcgagtgcaagatcgnctcactcctaaccctgactttattcccaggccccacaccgaggcaggtgcaggattcgccatggtgcagcctccgggtacaaacatctgaggcactggcgatccagtccttgcagcacctgaacacagctcagacatgaggggataangtggntgnnnagagagggcttgcatctgcctcagattgactcaatgttcggtccccccgggtgtcca

SEQ ID NO: 664898 - DNA, 1138 bp, Homo sapiens
  misc_feature (923)..(923): n is a, c, g, or t
  misc_feature (1071)..(1071): n is a, c, g, or t
  misc_feature (1076)..(1076): n is a, c, g, or t
  misc_feature (1079)..(1081): n is a, c, g, or t
gtttaatggcagagtgcggtccttaaacgagaaccacttagggaatgaaagacacgctcttatgccaaaagtggttctcgtttaatggcagggtgcggtccttaggccccggcctggactgggaaatgggggtagggcaccaggagagaaatcctcctgggtactcctggccagaccctcctgaatcatctgcggcttaaactcatctcgcttgaagggcagggagaaacccatgaatctcaggcacggttcacaggggtcctcaagggcaggtttccatttcatcatgaagtgagggactcctgtggaagagggtggtgggccttggaacgctgcctccactgaggcgggcacacaaggcggaccctcctgaaacagcctccattttcttcaaacatgcagaatgttttcccagactgcgtctatttcagggtcttccatttttgtggtttatggccatgcttgccagttttggtggggttgaggaacccataggactcatagaaataatagtgaaaactcaaacccttattttgggacttcagttctcgtggtccataggggcagagatgtcaaagtgaaggttgcctgagtgaagggagagttcccctataaaaggcctaaaattgatttggggctcagccatcaaggggctggtgttgctcctgtcccagacaaggaagcccctctttacatcagccatattaggggaacggttgtcagctccccaaatgcctactggatcctacagccatacaggaaaacagacggacacagccctttccttaaagagccctggggtcctgtcctgcaggatgctgcataggaatgggcagagatgtcctggatgggaacatggtcctggaggtgccctacctgcatcctgctgcacccccacccacgacactcgagtgcaagatcgnctcactcctaaccctgactttattcccaggccccacaccgaggcaggtgcaggattcgccatggtgcagcctccgggtacaaacatctgaggcactggcgatccagtccttgcagcacctgaacacagctcagacatgaggggataangtggntgnnnagagagggcttgcatctgcctcagattgactcaatgttcggtccccccgggtgtcca

SEQ ID NO: 664899 - DNA, 107 bp, Homo sapiens
tcatactggcaacacccacacatgcagcccagcacaacaccactagcacacaccaggtcatctatcccatgtatcagcaccacacacacaccacattggcacacaca

SEQ ID NO: 664900 - DNA, 187 bp, Homo sapiens
  misc_feature (13)..(13): n is a, c, g, or t
  misc_feature (99)..(99): n is a, c, g, or t
  misc_feature (121)..(121): n is a, c, g, or t
aacagcgcacgtnaaagaggctcacgcgcgctgtcccattaatggtgatgatgtgaatggccagacaccccttcattcaggtggcagtctggcccatgncaaggttgatattccatctgantggtggcgtgctcaatctgatagtgatccatcaggtagtgttggatctgatccaacaaggcatcgt

SEQ ID NO: 664901 - DNA, 465 bp, Homo sapiens
  misc_feature (180)..(180): n is a, c, g, or t
  misc_feature (215)..(215): n is a, c, g, or t
  misc_feature (227)..(227): n is a, c, g, or t
  misc_feature (237)..(237): n is a, c, g, or t
  misc_feature (240)..(240): n is a, c, g, or t
  misc_feature (246)..(246): n is a, c, g, or t
  misc_feature (271)..(271): n is a, c, g, or t
  misc_feature (275)..(275): n is a, c, g, or t
  misc_feature (282)..(282): n is a, c, g, or t
  misc_feature (303)..(303): n is a, c, g, or t
  misc_feature (346)..(346): n is a, c, g, or t
cccccccccccctttccccaatggggggggggggggggcgggggggggttttttttaccccgcccctttttttttcccccccatttgcctgggggccccccccccccttttttttcccccctttaagaccccggggccggtcccccccccgggttttttctttgggccgggggggggttncctttttcccccggggaccccttttcccctttggncctttttggggncccctttaanccngttttntccaaaaaaccggggggggccgggncggnttttccngggtttttttccccccccggnccccggggatttttggtttttttagggggaaaaaaaacccccntttttttttttttggggccttcccccccatttttaaaaggggggccccccttggggggcttttagggtttttttttttaccccccggaaattaaaccccctttggggtaaaacccccca

SEQ ID NO: 664902 - DNA, 473 bp, Homo sapiens
  misc_feature (9)..(9): n is a, c, g, or t
  misc_feature (167)..(167): n is a, c, g, or t
  misc_feature (172)..(172): n is a, c, g, or t
  misc_feature (200)..(200): n is a, c, g, or t
  misc_feature (279)..(279): n is a, c, g, or t
  misc_feature (436)..(436): n is a, c, g, or t
gggcggcanagggaggcgtttggggccgctccagggtccgctctgccattcctgaactggtccctcgtccccgtgactctggcatcagggaagcgaactgttaggcgagaggaggaggcagcagaaccatatccccttcttcctcggggcgggggcgggccaggcgnttgancggggagggctccgggaggagtgcctgncagccggctgtctgccgcgatggatgacagtaaggtggttggagcaaagtaaagaagcccgttaaacgtggtcggaacnaagccaaaattgacttgaaagcaaaacttgagaggaacccggcagagtgcaagagaatgccgagcccgaaaaaagctgagatatcagtatttggaagagttggtatccagtcgagaaagagctatatgtgccctcagagaggaactggaaatgtacnagcagtggtgcatggcaatggaccaaggaaaaaattt

SEQ ID NO: 664903 - DNA, 757 bp, Homo sapiens
tccgccgtgttggagctttcgctgtctggggccgggtgctccgggcctcccagctgtcgccgctagctgagttagggctcccgtccacgctgccgcacgggcttgctgagggccggctcgtactgggaggcttcgcgttcacctgaacatttccgcctcctctggatgggggatgagaggcggggctgatgcatcgcatcagtcctggaccctgacttcggacttggagaatgaaagcgccgaggatggaacggtgagttagttggggttatgacgcttggcgcgctgggagctggcacccctggtctcctggacttcacttcccaggaggcctcgcgcgcgactggaagtgttggtagcctataagaaggcgaggcggaacccggcgatctgtctctgtgggcgtgataggcgagtcggctgtagtgcactacagggtcatgagttctatctgcattcgtcctatggaacgctcgcggtagacggcaggctccggatgcctgtgtagcgacgagggcgggttccggaagatcccggactcactttcgctcccgacgtgatggttagcgggtgaggtcctgcagagactgttcacgtgatatgctcaaggtgcccatttcgcaggacattggagcccaggccagtgctctgagcctatcatgtagggctaggggagtgcgtgatcagacatggtgtctgggacggttctatctatgtccttgctggtgctggggtcccggggctctatgtgcatcct

SEQ ID NO: 664904 - DNA, 101 bp, Homo sapiens
aagccctgtcactccttggtacctgggatctgagcacgaagctgagtgggaaacagtgggggctccgaagcgcccagcaggccagcgccctcctttctaga

SEQ ID NO: 664905 - DNA, 499 bp, Homo sapiens
aaccaggaagcctggctgtccaatgttccaaatctggatgtgaaatggaccatgcagacaggacccaaggggcatgggggagctggcagaggcacccgggaaaagtggggaagcacctgtcggccaggaaggtagagaggcacctaccccagaacacggtgccagcgtcacactcttattaacagatgcaataaccaccttcggagaccagacccctcaaagagcactcagcccacaatgtgacgcagagaaaccagagacccaggcagggagtgcacccacggggacactccgagggtggcctcctgcctgccctgattacttaaaaaggagattcttggaaacctttgcgggcccacaggtgcaccctgactcccagggatgggggctgagccacccaggaaacaaatatgaaatcaaagatccagacagccctgaccctcctgattccagggtccataaataagtcattcttaaaatagtggttgttttctctcta

SEQ ID NO: 664906 - DNA, 139 bp, Homo sapiens
ctcattgaaattaagagagacatagagagagactcaccaaaatgcccaacggtgacaaagtgtgcagaaccgagaatcattcttcaaaaactcaccttgatcttgaagacccgctcgtgataccaatggagtgtggctg

SEQ ID NO: 664907 - DNA, 178 bp, Homo sapiens
cttgagacataaagagcctccagatctctggcatgctgtttacagatcaacagacgtcgatggcaagggaataattgaggaaaacttccctggccttgctagagatctatgacatccaaatacaaaaagctcaatagatacacccggaaaactcattgcatacaagattataacctag

SEQ ID NO: 664908 - DNA, 144 bp, Homo sapiens
cagcccattagggcctcgctataggtttgaacaaagtgctgcaaaaatccagagaatggcatgaacctgggagacagagcttgcagtgagccgagattgcgccactgcactccagcctgggcgacagagcaagactccgtctca

SEQ ID NO: 664909 - DNA, 244 bp, Homo sapiens
gataagacctgacatatagtagaaactcaattaatacagatgagtgaactgaatgtaggtccctgcccttgaggaagatcacaatttagtgtagtcatatgtacacttaacatacggcaacatgtcctacagacatgacgtcatatgggcgactgtatttttactgaagcactcgtcaacgggtacttactgtaaaccctacgatggtcatagcctactacatcacctggagctgtaccatact

SEQ ID NO: 664910 - DNA, 495 bp, Homo sapiens
  misc_feature (7)..(7): n is a, c, g, or t
  misc_feature (44)..(44): n is a, c, g, or t
  misc_feature (52)..(52): n is a, c, g, or t
  misc_feature (73)..(73): n is a, c, g, or t
  misc_feature (87)..(87): n is a, c, g, or t
cccaaangggccttcctgaaaccccaaaagccccccggggaaangggaaacngagtaaagccaggcccttgtncctcactgcccccnctaagggaacttggtcacctcggcacttttaagccctcagtttctcccagttcaataataaggacaagagccttttccccatgcattcctctttccccgggaaagttgactgaggtgacccagtaatagaattgaaaagggagagtgtcttcagtgcaatgtggcatccctggattgggtcttggaacaaaaacaggacattagtgggaaaattggaaatctgaaaaaagtctgaattttagttaatataccaatttcagtctcttggttttgacagatgtaccatggtgatgtaagatgttgaccttggggtaggctgggtgaagggtatacaggaactctttgtactatctctgcaacttctctgtaaatctagtatcattccaaaataaaagtttatttaattta

SEQ ID NO: 664911 - DNA, 169 bp, Homo sapiens
  misc_feature (20)..(21): n is a, c, g, or t
  misc_feature (23)..(23): n is a, c, g, or t
  misc_feature (57)..(57): n is a, c, g, or t
  misc_feature (74)..(74): n is a, c, g, or t
  misc_feature (96)..(96): n is a, c, g, or t
  misc_feature (108)..(108): n is a, c, g, or t
  misc_feature (127)..(127): n is a, c, g, or t
  misc_feature (136)..(136): n is a, c, g, or t
  misc_feature (144)..(144): n is a, c, g, or t
  misc_feature (150)..(150): n is a, c, g, or t
ccattatgaaatcagaattnntnttgattctgtgcaatcaaaacaaaaggcagaatngaatgctgagattggtnaaaattgcaatgaccatcttgnaccacagatttntgctatgtgtcatcaaaanatctagttntgagtaanattttnacgattgttataaaattat

SEQ ID NO: 664912 - DNA, 408 bp, Homo sapiens
  misc_feature (53)..(53): n is a, c, g, or t
  misc_feature (92)..(92): n is a, c, g, or t
  misc_feature (135)..(136): n is a, c, g, or t
  misc_feature (159)..(159): n is a, c, g, or t
  misc_feature (176)..(176): n is a, c, g, or t
  misc_feature (194)..(194): n is a, c, g, or t
  misc_feature (407)..(407): n is a, c, g, or t
ccgtttttggagccccccaaggaaggccctcatcccctgccgctacttttttngggaatgtgggttccatccaggattgggggcctttttgntcaccccctttgcacccaggatcctagtcccctgccctttggnncagctgcttcctgcaaaaaaacnagtttttggtctccctnaaaaaccatgtccctcgngctgttttttgcctgtcccccctgtgccctgccctccagcttgtatttaagtccctgggctgcccccttggggggccccccgctcccaggttcccctttggtgtcatgtcaggccttttgcaaggaaaaaccccttggggaaaaatggaaaagggcaaaaaaaattaataaatttcccttggcccccgggtgagctgagggtttttgcaaggna

SEQ ID NO: 664913 - DNA, 340 bp, Homo sapiens
cgctattacaaactatctatctgcggggaggaatggggtgcgtttgtactgttcaaactgtcatcctattgttacgttgttagatatcgggagtagtgtgcattaggtgcagtagataaggcgtcagtagaactagaggttaagtgagggtgatggtcgctatcatcgtcgggctcattaggctcttgttcttcgtgaactcttcgatcatggcccctttgggctaaatacgccggttagcgggggcatggcctcctagggagaggagggtggttggaatcccgggtgtttgtcctgttcgcttgtttcaggtgcgatatagttgtatactcgcggagtc

SEQ ID NO: 664914 - DNA, 620 bp, Homo sapiens
ggactctgagaggaccccccttgcgggtacatactcttatatacgccaacggttaagaaagggtcaacataaaaaaaaagacattgtgataataaatactgctcttggggctgtaataaataaaaagtttatataccaagggaatgcactttaccagccacaagtatcttcaaaaattaatgaaacaaaattatatatggccatagttcacagttacgcagccaaaagctgctccaataacagcctttaaacaacatgggagcttcctcccttctccctccccttcaggaagtatatgcacagttccaaagtcctctggctgaaatgctctcaacagagagaatttaagaatcaatgcaccttactgcaaaatggtctgaaaaaccttttaaaacaggtatctcaaggaaaactgcatgctggttcactcttggatagtccaaagtcaagaactgtatgccttagcctgttctggtaccacccagtccagcaggccacaggggaatagtatacgaaccaccacatgtccatctactacaacatactctagatcattcttttggcttccctgtagatctcacagtggaaaagaggagcccataggtccatacgaaaagtca

SEQ ID NO: 664915 - DNA, 923 bp, Homo sapiens
tgggaaagggggagcaggggggggggtggggaaagacgcagggggggttttccgggtttcggaccccaggggccggagggtgaaatcctcccgtgcaggggactcctcaatagccacgtgtttcgccagaagagaaggagaggggataaacccgagcgccaccatccacgcaagccgcaccagtgccgctcctaagcctgcacagccgcggcggcagaagcagttgagagttccagggtctccctccactggctgtagtaacccgggctccggggccatcggggggtgcctccgtgagtgccccttcacccagcccctgtgaagactcccaggggggcgagggaaatagtcagagggattcacaatctttcagctaacttattctactccgagtgaatcggctgatgtgttaacagaggaactaaggtccaacgacaagacgaggattctcaaggttccagtccaggctcacagagcgccaaagcgctttaacgggcgaacagtgctgagttggcggaagcctctacatcgagaatcccgggggggagcgttgcccgaggggtagcagggacagcttggcagttctcctggagttcgctgaggagcagttgcaagccgaccatgtttttcattgggttccacaagaaccgggaggacagagccgccttgctccgaaaccttcagctttgggggcttggagatgtgggagaacgggggatcccttgtccccaagagacccgagcttgcttctgggctacacgttcgagaagagagtcttcgggagaagacggcaggaatatggccgagctaggagactgggaaatcggccctggggcccacgcgtgtacccgggtgggttagaaccgtaaagtcgtcatccggcgggattggccgcatgtgtaccggggcaattacgtcaccga

SEQ ID NO: 664916 - DNA, 241 bp, Homo sapiens
gtttcaaaaaaaaaaaaaaattgtttccttgtcaaattgaactaggtccatttgaatatgtgtattgctttaatgtatggaagtttttagtataaaagctgaaggttcatgcctttcggttaataaatgtttgaaataaatgtttaggggtttttgatccccatgtcaagttgttctttcccctcttttaaaatatccccttttatttccccagaaaagtaaatggtttgtgggcgtctta

SEQ ID NO: 664917 - DNA, 588 bp, Homo sapiens
  misc_feature (28)..(28): n is a, c, g, or t
  misc_feature (74)..(75): n is a, c, g, or t
  misc_feature (79)..(79): n is a, c, g, or t
  misc_feature (94)..(96): n is a, c, g, or t
  misc_feature (99)..(99): n is a, c, g, or t
  misc_feature (129)..(129): n is a, c, g, or t
  misc_feature (356)..(356): n is a, c, g, or t
  misc_feature (587)..(587): n is a, c, g, or t
acttcccaaattacagtcatttccccantccccagggggtaaagcaatgaggtgtgaagtctgccagcggtctnnccgnggccgctgagcgctnnnaangaatggcagcggccgcatgcagcccatctnccaagctgggggaacgacagggctgcgcccacttcccagggccgggagggagaggctccaggagaaaaaggccaggtgtctctcccaaagctgctcacccctgccgtcctgcctggaggcagaaatgctaggaacatctgaaaacaggccctgcgggacgcgaacaatgggcatagaaaaacgccatcacccaaaggctgcctccagggttagcgctgctcgcccangccgcctgcgcgtccacaagtgtccgatagagaagcaatgcagtctccatcgatggaggagcaagagagccggcgcctctaaggcttccaaggtaaagcctagggcagcggcgggaccgccagggaggcccaagcggccactgcagggcagttcgagttctggtctggaggcgcgctgtgtcgcgccgtcagatgggtcaaaggctgcgcatggcgacctctgtcctctana

SEQ ID NO: 664918 - DNA, 677 bp, Homo sapiens
  misc_feature (21)..(21): n is a, c, g, or t
  misc_feature (69)..(69): n is a, c, g, or t
  misc_feature (84)..(84): n is a, c, g, or t
  misc_feature (105)..(105): n is a, c, g, or t
  misc_feature (115)..(115): n is a, c, g, or t
  misc_feature (117)..(117): n is a, c, g, or t
  misc_feature (128)..(128): n is a, c, g, or t
  misc_feature (130)..(130): n is a, c, g, or t
  misc_feature (133)..(133): n is a, c, g, or t
  misc_feature (136)..(136): n is a, c, g, or t
  misc_feature (140)..(140): n is a, c, g, or t
  misc_feature (167)..(167): n is a, c, g, or t
  misc_feature (170)..(170): n is a, c, g, or t
  misc_feature (186)..(186): n is a, c, g, or t
  misc_feature (199)..(199): n is a, c, g, or t
  misc_feature (210)..(210): n is a, c, g, or t
  misc_feature (212)..(212): n is a, c, g, or t
  misc_feature (230)..(230): n is a, c, g, or t
  misc_feature (242)..(242): n is a, c, g, or t
  misc_feature (244)..(244): n is a, c, g, or t
  misc_feature (255)..(255): n is a, c, g, or t
  misc_feature (269)..(269): n is a, c, g, or t
  misc_feature (279)..(279): n is a, c, g, or t
  misc_feature (323)..(323): n is a, c, g, or t
  misc_feature (349)..(349): n is a, c, g, or t
  misc_feature (388)..(388): n is a, c, g, or t
  misc_feature (390)..(390): n is a, c, g, or t
  misc_feature (417)..(417): n is a, c, g, or t
  misc_feature (460)..(460): n is a, c, g, or t
  misc_feature (466)..(466): n is a, c, g, or t
  misc_feature (469)..(469): n is a, c, g, or t
  misc_feature (492)..(492): n is a, c, g, or t
  misc_feature (585)..(585): n is a, c, g, or t
  misc_feature (660)..(660): n is a, c, g, or t
tttactttagttagatgagtnctacaaatttaaagctttgaaaagctactacttttacttctaatacanccagatgaacacgangtagcaatatcagcttgtatnccagagaaancncattagttttncnggngangganccacttatccacgtctgtgggtactgngcnggcagattcacagggngggggtaaagcanccacaatggcncnggcagcatcaggatcacncttgaaggggcncncagacaaagtngtattcatgcaacnaattcctttnccattcgttttcttagtcactaatgctttccaatggtcatgagnccttttaataatatcaatggcaaagnccttatctttaaattctgcattaaacgcaaacccatttncnggtttcccatcaggaaccttatacctnctaaaccagtccacagtagcttctaggtagccaggtttcagcngtttgncancattgatatcattataattggcngcatcaggatcatccacattaatggcaatgactttccagtgggtttccccttcgtcaatcatagccaatatgcctagccctttcacgccaatnatttcacctcttgcacataccttgcttccaatttcacacacatcaattgggtcattgtcaccacaacagccagtntgtttatcattgtcccc

SEQ ID NO: 664919 - DNA, 187 bp, Homo sapiens
aagtatggctgtgtgcgcttgtgtaagagtgtccaggttcacgcccggtgcctctcatgagtctcagaagcgcatcagagccaaccttgcgagcaggattcctgcagcctctcggcgcatagagacctaggcagccgcaggacacctggcatttcaacaggagtgaacctggctgactctcggacgc

SEQ ID NO: 664920 - DNA, 305 bp, Homo sapiens
tttattctactttgaccgtccgaaggttatgcagagaacgtatctagtggctcttgtgcaatagaacattaatggatgccatactcttgcttgcacccggtaggattgacaccaacctctaataaggtctcaaaagtctaccctcttccacacatgtttttgattccggatctgtttcccgatttgagcaccttctatgcactgtagcattcccttgagccttatttgatgaagaaggattaatctcaggacggcaagcagcagtatctgcagttcttagaacagcgttagagactggacgggct

SEQ ID NO: 664921 - DNA, 310 bp, Homo sapiens
cccgacgactgacatacacgcacgccagcgcttgcaccatctccctggtcacttgagagaacattcccaagatatagtgagaggccacacgggcttatttgtgagttatcgaggttgtaggactcaattccggtttaagaaggttctttttgtgggggatagaaacagaggtctggctatgttgcccaggcttgtcttgaactcctggcctcaagtgatccacccacctcggtctcccaaagttctgggattacagacatgagccaccgcgcctggccgtgtctggccttttttagttatttcttttttt

SEQ ID NO: 664922 - DNA, 335 bp, Homo sapiens
tttttttggtgggggaggtgaataaaattgggcagctaaatttttcagttccatgtgcctcccaaattaaaaacaaaaaataagtagtttttttgaatttacttgcagacaaagtaaaaactgtgctgcattatgtttttttgtaaacaaatgacattttttggccagggacattccatccaattttttgtcaatccccctgttgtattaaacaacaaaacttaaagggaaaaatgatttttgtatacccttaatttctttgcatggttttattttaaataatttatgtaaaaatcctgacttttttttttttggaaacatcaaattaaaattga

SEQ ID NO: 664923 - DNA, 332 bp, Homo sapiens
gcgccctatggttatgcgcttgtaggttgtgaggcgctgattcgtgacttcaaacatcaggacaacggcctgttgggcatacgcgtcgaaggtggccgtcgttaccgcgtgcgtagtccggcgtgcagaaagaccagttgctggtggccgatgtgcaatggctgcaagaattgccggaccagccgctgggcgaagaggacgccgacttgctggcgttgcttgaggccttggccaaacacccgatggcggcctcgctgaacatgggcggccaggccgaaggccatcaagccctgagcaaatacagtggccatatctgctcacattaaacgagg

SEQ ID NO: 664924 - DNA, 292 bp, Homo sapiens
aaaggttatctttgaagaacatgggcaccttgtaatatgttacaggctgagacactaggatgaaagaaggcacatctctcccctcaagtttagtcttgcggtagaactttaaaaaaaagccaccaatggggataattgagttttaaacttgatggcaatgatttaagtgaagagaacacctgggtttattttctggtgttggagaggtgaataaacatcaacagttgaacctttgatttcagtggatttcaacatgagggggcagggactgcttcagcgtcgacgcggccgc

SEQ ID NO: 664925 - DNA, 124 bp, Homo sapiens
atcagggcggaacctgttctcttgggcctagatcttaccccgcgcggagctggcttgcggatgtactcttttgagaaactatcatcattatcatgatagccctcacttcctccctggttattca

SEQ ID NO: 664926 - DNA, 182 bp, Homo sapiens
cttaagtctggaaatgtgtttgtttcttgagattgtgtcttgtcaattgcctggtctggtcacgaactcctgagcatcagtgatcctcccacctcagcctcctaagtagctgggactacaggtacgcgtcacagcccccagctagttgcatacttttttttttttttctgaaacaagatttt

SEQ ID NO: 664927 - DNA, 578 bp, Homo sapiens
gcaagggaagctgggaaattgtagtctacctggtttccctggaagaaaggaaggtggttttagtgaacacacagcagtgtctgccacatgaccatgctgcattggttattacatatttgaatatcacccctaggtaaagtcacaaaggtagcaagtggcagagccaggagtaggacctaggtctgtgtaacctcagatctggattctttgcagggcctctcatactcctttaatggctggctcaggttctgcacctctggatgcagtgggtgttgtgattgcctatgtggactctctttccaggcaccaacaattctataaaacatgtgactgctctccctttcccttccatggactatctgggctacaaatttgagagtaggttgttgggaatttttgtgagcagccaactcaggatcaggtctgtgaagctcctggcttatgtggtgctcagtggctctcttgggagtgaggggcgatagacaaactgtgtcactctccccaggagggctgggctgtcattagcattcagcaaggctgtgagtcttgttgtacaaatcagctgtttaaaggcctta

SEQ ID NO: 664928 - DNA, 104 bp, Homo sapiens
gagagtcgagatcacactattgcacttcagcccggcgtgagagacgcaagaccctctgtcaaaaacagacgcaggaacgcaagcttttccactttcctttctct

SEQ ID NO: 664929 - DNA, 272 bp, Homo sapiens
accccaattaatgcttaaagagtgaatctacattttgtatgaaatctgttgctactatgttattctcagttcttcaaataagaaaccaacaccaagaaaatatttgttttgttttttttaagaatcattacacttctttcttaaaaataaagagaagtgtccacattatgtatttttagacttggctgacagggtatagctaaattttttttttttttttttagaaggaatctcacttcttctcccaggctggagtgcagtggcatgatctt

SEQ ID NO: 664930 - DNA, 418 bp, Homo sapiens
  misc_feature (48)..(48): n is a, c, g, or t
  misc_feature (354)..(354): n is a, c, g, or t
cacgaggtgccaccgaagttgccgaccgcctggccgtggatgccgtanatgaagcggccggtgtcgccaccaatagccggctggaagttatccagccgaaggatgccggacgacagcagcgaaatcgtgtccggaatcagcgatccctcacccgccgggatcaacgaggtgaacttgccgcagcgaatggtggtctcgggcaacgacgtcggaacctctagattgtcgtagaagaccagatcagcgcgaattccactaggtgcactatagggtccaacctctttgtcgcgagtccgtccgctaccattcttctcctggagagcaagcaacactacagcagagtcgtccagatcntcagggttgaacgtctggatgctgaagtcgttgtagtcaatgaagtcatcgccggggagctcgg

SEQ ID NO: 664931 - DNA, 233 bp, Homo sapiens
taaaaggggggccccaggcccccccccaaacccgttggcccccaagggccagggaggatttttggccctggggggtgacttggcctaccaacccctcccgttcagggccctggatgtggaaaacagcccgtgaggtccgtgaggttttggccgtttttacacccggggcctccccgggttccaaaaaaggcccggttttaaataaagggccggggcaggatgaaagggaaata

SEQ ID NO: 664932 - DNA, 298 bp, Homo sapiens
  misc_feature (12)..(12): n is a, c, g, or t
ggatccttacgnagtgcaatggctcatgcttataatcttaatactttgggagactgaggcaggcggatcacgaggtcaggagatcgagaccatcctggctaacatggtgaaaccccgtccctactaaaaataccaaaaaaaaaattagctgggcgtggtggtacatgcctgtagtcccagctacttgggaggctgaggcaggggaatcacttgaacccgggaggcggaggttgcagtgagtgaagatcatgtcactgcactccagcctaggtgacagagcaagactctcaaaaaaaaa

SEQ ID NO: 664933 - DNA, 174 bp, Homo sapiens
aaatggtataatatatctgtcatttggcaggtctacatatctttttcctgtatcgaaaatctactgtctcaaagagtctaggctacatattcttaaattgcttcagattactggttctatctatttattaatacatctttcgatccattcatccactcttcgataagctgggct

SEQ ID NO: 664934 - DNA, 656 bp, Homo sapiens
  misc_feature (12)..(12): n is a, c, g, or t
  misc_feature (25)..(25): n is a, c, g, or t
  misc_feature (30)..(31): n is a, c, g, or t
  misc_feature (48)..(48): n is a, c, g, or t
  misc_feature (83)..(83): n is a, c, g, or t
  misc_feature (95)..(95): n is a, c, g, or t
  misc_feature (109)..(109): n is a, c, g, or t
  misc_feature (112)..(114): n is a, c, g, or t
  misc_feature (117)..(119): n is a, c, g, or t
  misc_feature (121)..(122): n is a, c, g, or t
  misc_feature (124)..(125): n is a, c, g, or t
  misc_feature (127)..(127): n is a, c, g, or t
  misc_feature (129)..(129): n is a, c, g, or t
  misc_feature (134)..(134): n is a, c, g, or t
  misc_feature (147)..(147): n is a, c, g, or t
  misc_feature (177)..(177): n is a, c, g, or t
  misc_feature (186)..(186): n is a, c, g, or t
  misc_feature (215)..(215): n is a, c, g, or t
  misc_feature (277)..(277): n is a, c, g, or t
  misc_feature (352)..(352): n is a, c, g, or t
  misc_feature (355)..(355): n is a, c, g, or t
  misc_feature (366)..(366): n is a, c, g, or t
  misc_feature (434)..(434): n is a, c, g, or t
gatacgccagcnacagacgccggcngccannatctgcatccctatgcnacgctaggaccctggggaagagcgcaggagcccgngtgaagggctgnaatgaggggactgnggnnntgnnnannanncncncctanaaggcagaagccntcgccccaccctcgagctccgctcgggcanagtgcctgnctgcctagccgctgctgcgggcgcccacntcgcccagccatgccaggcccggcaccgacgcggggaagatccctttctgcgacgccaaggnagaaatccgtgccgggctcgaaagctctgagggcggcggcggcccggagaggccaggcgcgcgcgggcagcggcngancatcgtctggnggaatgtcgtcctgatgagcttgctccacttgggggccgtgtactccctggtgctcatccccaaagcnaagccactcactctgctctgggcctacttctgcttcctcctggccgctctgggtgtgacagctggtgcccatcgccttgatggcagccacaggtcctaccgggccaagctgactctgaggatatttctggctgtcgccactccatggctcccagaatgacatcttcgaaatggtccaggaccaccgagccacaaaaagtactcagagacggatgctgaaccc

SEQ ID NO: 664935 - DNA, 1037 bp, Homo sapiens
tgactagcagaccacttagcgaaaccttttacccaaataatgtataggcgatgagaaattgaaagctggcgcaatatatatagtacctgtaagggaaagatgaattgattatacaccccagcataatatagcaaggactactccctatacctgctgcataatgaatgaactagaaataactttgcaaggagagccaatgctaagaatccccgaaaccagactgagctacctaaagaacaggctacataggatgcacacccgtctatgtagcacaatagtgggaagatctataggtagaggcgataaagctaccgagcctggagatagctgggtagtccaagatagaatcttgatgttcaacatttaaaatgtatgtccaacgagtaaccctcataaatccgccttgtaaattaaatctgttagtcgcaaagaggaacagctcttaaggacatgtaaggaaaaaagcttgtaacagagagtaagaagatctaagcacccatagctaggcctagaaagtcagccatccaatatcaagaatcgcgtagcaagcgcaaacaatccatctaactaaaaggaaccccatacatggtacactgagactcactcacatccaatgtggaagccaatatatcaccctatagagggagctactgttagtatacagttgacatgaaagcattcttctttcgcataggcctgtgtcgattaataacacgtgactctgacacatgtagagctcaattatctacgatcaccgaaaagtcagtattgaccctcactgtgaaccaagaaagggatgcatagggaagggtacaaaagtacggattgggccactaccccggctgtttgcaaatatacctcgtgtacaagttgaaggcgctgctggagattttaagcccgaccaccgaaaggggacactggccaaaggccgtgagggcccaccgacgcgtgtaacaaaaaacgccgaaagcgtgtccagacactaggtttgagacacaaacatcaatatggggccacgtccacatggagaatacgag

SEQ ID NO: 664936 - DNA, 189 bp, Homo sapiens
ttcagtgctgtgtgtggtggatcacacctataatcccagcactttgtgaggctgaggcaggcatgatcacctgaggtcagttcaatgccatcctggacaacatgctgaaacccatctctacaaaaatacaaaaattagctaggcttgatggcagtcaagttactagttactgatgggacgcaaactggt

SEQ ID NO: 664937 - DNA, 432 bp, Homo sapiens
ctagaggatcccccgcagcacactgcaacaccaagagtcaggcagtgaagtactcttcaggcagcattgccttgaagctgctcatctgtttcaaagctaatgatatagaaaaggcggttcaatggctggacacgaatgttgtggatctcctaatgaagcatatttataaaggatttgagagcccgtctgacaatagcagtgctatgttactgcaatggcatgaaaagccacttgctgcttgaggagtagaatccattgttcgtatcttgactgcaacaaaaacatttttgtctgacaggaagtgcattatctgcctcggcagtgggaattgctggtacaaagaccaaaacaaccaaatgccaccgctgccctgtgggtagcatctgatactctcagctttgccttattgctttttcatatctgtaaagaaaa

SEQ ID NO: 664938 - DNA, 423 bp, Homo sapiens
cggaaattcggccattatggccggaaggatggcttaatttttaaattaatggcctaaccaattttaccatccgatttagggttccctttttaacaaaattttggccaacattggtaatctttggcctggctgataatacccattttaaggggggtaaggggaaatctaatggggcttttaattggaattcccctgataattaggaaggttgagtccctttttaggaccggtttttaatctgggggtcttttgaaaaaaaatttaaccaggttttggccctcggaattaggccagtggatattggctgttaagtggaatggttaattaatatattgggggggaacttctggttagatatataatggcccatagtttttttaactgggctggctttggggattaaattcaaataattcttgaatc

SEQ ID NO: 664939 - DNA, 272 bp, Homo sapiens
tatcgatgccactagccatgttcaggaaaacaccctcttgcccctgtttctgtccagtgaggatgatcagaatgtgtccctggggtgtatggctggctcgcagttttctcacgtgctgactgaagggttcattgccgtgtctcaacagctttcgatggacatcttcaataggataatatctaggcattaggcgaagttgaagcacccgggtaccgccgttcttgtcagcagcaacgggttctgtaacagttggtgggatcgataaacactgt

SEQ ID NO: 664940 - DNA, 484 bp, Homo sapiens
  misc_feature (22)..(22): n is a, c, g, or t
  misc_feature (25)..(25): n is a, c, g, or t
  misc_feature (33)..(33): n is a, c, g, or t
ccccttgacacataggacgccnggncgatggcnggcacccgcaggcgggccacatggacgccgtgcacctccccgtctggcggtagccatcagggaagccaagatgggtgcatcgggtacatccaggatctatggagaaagaagcagcctgacgccaggggctctccagggagggtccgctgccggcagcaccggcagctctctgctctccacagggctccccgccccacccggactgacaaagcgcgccgaccgggctacaaggccaagcaaggtaacgatatatataggaaccgcgttcgccgaggcggccgaaaacgcccagatcctaagggcgcacctcacgccaagccctgccatcatggggctaaccagctaaagttcgctcgaagccttcagtccgccgcacaggaacgagctggacgccactgaggcgctccgagaagcccgcaccactgggccggcgaagcccacatctcctccg

SEQ ID NO: 664941 - DNA, 609 bp, Homo sapiens
tgccatagagtgaactagtgctatagaacagaaattcatttaatttagtatatcaacagcctatgttgttaatctgggctctggtatgacataaaaattgagaaatgatatactcggtgtatcgcatcaacgtgtgaccttctattgtaggtctatcattaggcaagtgtacgcttacgtgatctagtgtctaaaagtggatgtttcaaatgagttacgaaggaagatatggacgtgttgttgaattcgactttagttcactgtcctgatctaatgaaagacaggcatttggatcagctcctcctttgtgccttttatatcatggcaaaggtaatgtatacacttgggagaagaggctgggcatggtggctcacacgtataatcctagcactttcggaggtcaaggtgagcagatagcttgagcccaggatttcgagaccagcttgggcaacatggtgaaacctcatctctataaaaagtataaaaatcagctgggcattgtggcttgcacctataggcccagctacttgggagactgaggtgggaggatctcttgagcccaggaggccaggctgcagtgagccgagatcagaactgtactcagctggc

SEQ ID NO: 664942 - DNA, 292 bp, Homo sapiens
cgggtagcagtcagacaacaaatggcaggcggttattagatgtagctccaggaggttgagttcagcccaatggggactccgtccaagatgtggcagttggaaggcccagtttccaagggaattcttttatcttttattaaattgaggcaaagtctcgctctgtcatccaggctgaagtgcaatgatgtgatctcagctcactacaacctctgcctcccaggttcaagcaattttcctgcctcctcttccctagtagctggaattacaggcacgcgccacacgcccggctaat

SEQ ID NO: 664943 - DNA, 106 bp, Homo sapiens
  misc_feature (105)..(106): n is a, c, g, or t
gctcaaaagcaagggaaactatatactgacttcatagaaaaggagctccaaaagagataaacataagattttcaaagccaaaacctcttaattgcccaaagaatnn

SEQ ID NO: 664944 - DNA, 155 bp, Homo sapiens
atgtgctggcagaagcaggaagcgcttcctgcttctgcctcccgagtaggatgcgcaccactgtgcccagctaatatttgtgtttttagtagagatgggctttcaccatgttggccaagctggtcttgaactgctgacctcagatcatccacctg

SEQ ID NO: 664945 - DNA, 433 bp, Homo sapiens
gtctaaaataagacgcagagaaatacagtcagaaaatttacctagataacaagaggctctcaggctaggggaccatccctttcatcttctcttaagggactataagaaaaactaccacttgtatatttctcctgtgcactggccgtccagtgacaatgagcaacaccctatgaatagagtctcgagacatactgaccttgctcctcatacgagcatctctggtgcccaaggaacactgcattacccgtctctttgaggagatgtgaccccaacaaggataagcacatcaccctgaaggagtggggccactgctttggaattcaagaacaggacatagataaaaatctcttgttttgaccgaacattttaaagaactcaactttccagcatcctcctctgttctaaccacttcagaaatatatgcagcgttcca

SEQ ID NO: 664946 - DNA, 552 bp, Homo sapiens
gatagagttaataccctggcgagagggataaaagaggaatgacagcgctattcccatgaaccatgatatataccccgatcatcagcagcgccagcgcgcgaggacacggcgcggatcggtggcgcgatcctggccacactgtccacctaccagcagatgtggattagcaagcaggagtacgacgagtcgggcccctccatcgaccaccgaaaatgctactaaacggactcagcagctgcatagcatcagctgcatgggttcatcgagaatagcaaatttgcccctggccaactgcacacacctcatgctagcctcacaaaactggaataagccttcgacccgcacttgtccttgaaagcttgtatctgatatcagcactggattgtagaacttgttgctgattttgaccttgtaattgacgttaactgttccccttggtacttgtttaataccctgtacatatctttgagttcaacctttagtacgtgtggcttggtcacttcgttggctaaggtaagcaactgtgcttgtggaagaccaggtagagccgag

SEQ ID NO: 664947 - DNA, 366 bp, Homo sapiens
tggcctcccccccccaacacaacccagactgtgaactgcatccttaggactcagagttcttccaaagtgggaccccctcaagagttggagagagaacttgcgtgctagcggcccagcctgggggcaagggtttgatggcagccttccccctctagccctgagctgggtgaagatgatgctgtcccggagagctgcttccaactgtcattgagctcccgggagccctatgggaggaggggctcagggtcactcttttcaggaagcgccagccctaggaaccccagaaaagagtggtacctaaggctgaaattgtttttgctgttgccaggggtgggtatttgagagtaaaacattttatttcttttt

SEQ ID NO: 664948 - DNA, 238 bp, Homo sapiens
tcgatctagaggatccctggtgaagaggaagcatggcgctccgaagtaccaggaactcgaaaattaatgctgaaaataaggcgaaaataaacatggcaggcgcaaagcgcgtacctacggcccctgcttgcaacctccaagcccggactgaggccaagaacagctctaggggacattggtaacaaaagtcagtgaacaacttgcaggccaaaaatgcctatgaagaagcgaagcaaaa

SEQ ID NO: 664949 - DNA, 692 bp, Homo sapiens
gcattgccgctctgtggcctctctgggttgcttctcccggccctctgtggatgggtcttttcctggaggcgccccctcttgaaaaggtggtgcctccccgggggttgcacgccccgcccaccggttgtgttgcgtgagtcattgtcgggggactctcgcgtgcatttgcctagaggatgttagattcgcgcttctgtgactaaaacttttcccccctctcgatggtgggcccacaaggtgctttccccagcgcgctgtttccgcctacgcccgcgcgtgtagttgaggaggtgtggggggtgaaatactttgagaatgagatgggttaaaagcgctttgaccaaggttgtttcctgagcagtgggggcccactatatcgtcttcacagtggtgtgcgtccaccctggtctgttcactcctccctcgatagttcgctggtgagtgattacagcaagtcacgcctctcctgcctctgtgagcgtctgtcggtcatggagcgcacctgctcccacctatgatacgtgtaaataacggactcacgacccagccagcgcctaagatcagccgcccgcgctgtaccgagcacgcgccccaacccgtaggtgccacgagggccgccagaataatcggggcggctatcataccgtgcgtgaccccgaggacgcgccacgaagaaagatcaatacaagata

SEQ ID NO: 664950 - DNA, 105 bp, Homo sapiens
ttaggatcccctcatcaaacccttcatcaaaccctgtcatcaaccccctgaccttttgggttttaagcaggaggtgtcagaaaagttaccgcagggtttcgatga

SEQ ID NO: 664951 - DNA, 136 bp, Homo sapiens
gaaaaaaaaaaaaaaagatggcctggggctgcattttttgggtccttaaagtgggctggaaaaacctaaagggcccagcatgtggctgggaaactgttggtggccagtgggtaaaaaaaccctttcagtttcccta

SEQ ID NO: 664952 - DNA, 113 bp, Homo sapiens
ctggctgccaggtcggctcgaataaggaggcttagagctgtgcctagtgactccagactcatgcgccgaataatagtgtatagtgttccaatgtctttgtggtttgtagagaa

SEQ ID NO: 664953 - DNA, 459 bp, Homo sapiens
actctacaggatcttcatcaaccctaaatttattatgcacaaatttccctgtagattttattaagaacttaactgctcaggcacagtggctcatgcctgcaatcccagcactttgggaggccaaggcaggcagatcacctgaggtcaggagttcgagaccagcctggccaacatggcgaaacctcgtctctatcaaaaaaaaatacaaaaattagccaggcgtggtggcgagcacccgcaatctcagctactcaggaagcagaggctgcagtgagccaagattgcaccactgcactccagcctccctgggcaacagagcaagattctgctgcaaaaaaaaattagaaaaaaaaaccaaaacttaattatttggaaaattatcttcatctattagttgatttgaaaacacacattacttttcaatccataataaattcagggtggatggggtaccgagct

SEQ ID NO: 664954 - DNA, 300 bp, Homo sapiens
accagcaagagacgtccactggtggaaatagtgtcgaatctccaggtcactgaggatgtactggcaccttttaagccagcacgtgattcatcatgtcattggggatatgaacatttcgctttggtatcctcataatgttttctgtagttcaacgcactcctcatcttttggaaatccatactgtgaaccacaccagggaattcaccgatcacttttccatcctggtagtgacctttctgcttctcatatgtctctttgtatttgagctcactgttcaccatatcaacatactttccgaat

SEQ ID NO: 664955 - DNA, 147 bp, Homo sapiens
ttgcatagagacctctcaacattttacccatcagtctaaaaactatatactatcaccaaatatcccattaaaaaaataaaacctacattactagccaggtgcggtggctcatgcttgtaatcccagcactttgggaggccaaggtgg

SEQ ID NO: 664956 - DNA, 327 bp, Homo sapiens
gagtaatttttctttgggcctcgttaagaagcaaataatagggcaccggggtacagtggctcctgcctgtaatccccagcactttgcgaggccaaggtagcggatcatttgaggtcagaagttcgagactagcctggccaacatggtgaaatcccgtctatactaaaaatacaaaaattagccaggcgtggtggcaggcacctgtaatcccaggtacttaggaggctgaggcaggagaatcacttgatcctgggaggtggaggttgcagtgagctgagatcatgccactgcactccagtccggggtgacagagcaagactctatcta

SEQ ID NO: 664957 - DNA, 715 bp, Homo sapiens
atgggacatgcagcgcaagtaggtctacacagaagcgacttcccctatcatagaagagcttatcaccttgcatgatcacgccctcataatcattctccttatgtgctgcctagtcctgttatggcccgttttcctaacggctcacaaacgaaagctaactaatactaaacatcgtcagaccgctcaggaagaatagtaaaaccggagctgaactaatcgcagcccgtccaatcagtcgcatagccgctcatcgcgcctcaccagtgcgcctacgcaaattcctgtttggcataatcaagacgagggctcaaatgaatcctcctcgcacttaccattcgagaatcgaatgtgggcatcacaagtggtacgtgaagcctacggagtgacaccgtagcataagaggtggactaacatctatcacactgcgctgatcatggagcttcaccacgcagtattcgcatagaagcgcaggcgacctgtcgagctgcttggacgttgacaaacgagtagtactcgccgatggatgcccccatgcgtatgtaataacatcgcaagacgtctgctctcatgagctgtcccaattaggcgtaaatccagatgcatcccgacgttaaacaaacatttcacgtaccgacggggtatactacggcaagctcgaatctgggggcaaacaagttatgccatgtccagaattatccctaaaatcttgaatagg

SEQ ID NO: 664958 - DNA, 775 bp, Homo sapiens
agcggagaagtgacggcgaaggcggtgcgacagacagctggagggcagaggaggcggctgcggggtgtcctgtcctcgaccatgagtgccgcagcaggactgccggtgatccggaaaggtgttcattcaggcgagcactacacgctagtggtcattcacagctgccagattccagaccagagttccctgcggtagtctggagacaccggattgatacgtgctacgcgagtgttgaaagaacacagttcgaactctcaaataacctttatgcagaagcaagagaagctcggggccagtcatatctcgaaggttgtccggcttgtttaacagcatataccatcggttcctatgcatggaagctcattcatgagaaggttctgaagaaagtctccacaagtacattcaagtagcagaatcgagaagatctatcgctccacgaaggagctcctccgtgacagatcgctattgagcgaggactgcgagtcattgatattaccatttatgtagagaccgaggtatgagcagtggaagataaatccgaagaatttaatgatcccacattcgcagctcgtggtccgccttcactgtatccaactggaccgagtcgagatgctgtcccttacgtgctcctcgagagcatcattccttgctatcgtgctgccagagactcacggtgcacatttacgtcccaaggaactcactttctataattccatcacctggagtgacctctagtcgctcagcatccactttgtgtctccaaattgtgtaagac

SEQ ID NO: 664959 - DNA, 443 bp, Homo sapiens
ggatctcatgataatagctacgaaaaagagaaaagacaagagaggagggaagaaaaaaaaaccgaacagcctgaggaataagtttagccaaggaagatgagagatctactagaaggaaaactacaaagcacggatgaaacaaatcgaagaggacacaaacaaagggaaagacatcccatgctcatggatgggaagaattaatatggttaaaatgactcttctatccaaggcaatgggtagattcaatgcaaccgctatcaaaacaccaacatcagtttttcaaagttagaaaaaacaatcctaaaattcatatggaaccaaaaaagagcccaaatagctgaagcaatcctgagcaaaagggacaaagctggaggcatcacactaccggacttcaaaatatactacaaggctctagtaaccaaaacagcatggtattgacctaa

SEQ ID NO: 664960 - DNA, 851 bp, Homo sapiens
gcgtgtaaatggtgcttcctagaaggtccgtgtccacgtgaacctcttaatctcagcatccggagctccaggaagggaaaatccagtcagatagaatctatatataccatttcttgggaaccttcagccctcaagattccaaatcatgacctcagtttcaatcagttgtccttagtcctcatgtcactgcttgggcgctgcctgtggtgaagcagtagaagccggtgatgcaatcgcccttgggtaggtgtggtcctcagcattacaggcatttgtgcctgctgggggggtatatgcagaaaaagaatgcccagatgtgacttggaaaggctactgagtcaaacctcacccgtgaaaaaccttgtgcgcttaagaggctaaacctgagctgtggtgtgtgaaagggtccaaggaatcagtaaatacagggagttcacatttttccatgtgttccatgaagtggaaaaaaaacatacctttataatggacacacaaaagttgttttctttacaacatatagtgcaagaaaatgaggctataattgtgtaggtaggtagtcacagaagtcagaggggtgacattttaccttacgtaatatccataatcttaggaattctcttcaaaagctgtgaacataggagaagggaggtctggccagaattttaggaattcaccatgtcgggtataatcaggccctgaacgtaggggcttaaataaaattggttgggccccacgtaaatttttgaatacgagccgggaaagaactttccctgggaccttcacatgtcggttccatcgcgggacacactgtaacacaccgtgggagcacggtgggacaaattgacccgaga

SEQ ID NO: 664961 - DNA, 354 bp, Homo sapiens
tggttggatggccaccatttggtttttggccaaataaaaaaaggccttatttttttgggggccctggggccttttgggtcccggaatggcaaccccccccaaaagttccccctttctggttgggggccacctcaaaaagttttgcttgtgttttttttttcccccccgatttttccttttgtgggtggggggggccccccccccccccctttggtccggggttccaaaaaatttttgtggtttcccccgcggtcccctttggggtcccttttttcctttttccccccccccccccggggggtttcagggtttttttttttttttttaaattaaaatttaataccctttttccca

SEQ ID NO: 664962 - DNA, 348 bp, Homo sapiens
  misc_feature (24)..(24): n is a, c, g, or t
tgggggccctttgggggggggggncccccccttccctttttttggggggccggggcccccggggggccaggttacccccccccgggttttttgggggccccccccccctttccccggggggggcccgccctttgggggttgggggggggcccttccccccgggggtataggatattttttaaaacccgttttggggggggggccccccccaccccccctgggggggggttttttacccccggggccccccgggtttttttttgggggaaacccggcccggggggaaaaaaaggtttttttttttttttttttcctgggggttttttttttaaacccctttttttttta

SEQ ID NO: 664963 - DNA, 187 bp, Homo sapiens
ggtcgtctggattgggtggagaggagccaggttgggagtggagggatgtttacaggaatgcagagtaggaccattgtcgcagccggattcctggtctggggcaccaacgtccaagggggccacatcgatgatgggcaggcgggaggtcttggtggttttgtattcaatcactgtcttgccccaggct

SEQ ID NO: 664964 - DNA, 248 bp, Homo sapiens
gtatacataaaatagagttgtgaacttaaactagagaaagctgcaaaaagtggtttggagagcatggcagggcagtgaagaagggctaatagaagcaggtcccttgcccagaaccctcaggtaggcctattggttggatagcggacacctgaggcaggaggtggcagggcccaagtccaggcaggcagcagcggggctctacttgagagctgagcgtggagaggtagcgctcgcctataacttgatcc

SEQ ID NO: 664965 - DNA, 288 bp, Homo sapiens
cctaacgtatttagaagtagcttaagattcaagagacaatatgacagacttcgaagagtagcatgaggaaggaaaagatacaaggttactaaaacatgacggaggttgagatgaagcttcttcatgaagtaaaaaatgtatttacaagaaaattgagagaaaggactacagagccccgaattaataccaatagaagggcaatgcttatagattaaaatgaaggtgacttaaacagcttaaagtttagtttaaaagttgtaggtaattaccctcatttgaaggcaatcg

SEQ ID NO: 664966 - DNA, 272 bp, Homo sapiens
gtcagtgtaaattctgcttcccaggttcaagtgattctccgtgcctgagctccgagtagctgggattacaggcatgcaccaccacgcctggtaattttgtatttttagtagagatgaggtttctccatgttggtcaggctggtctcgaactcccaacctaaggtgatctgcctgcctcaggctcccaaaatgctgggattacaggcattagcccactgtgcccggctgctggtgattcattattgattgattcattgccacacggtctctca

SEQ ID NO: 664967 - DNA, 806 bp, Homo sapiens
agcggctgttgctgtcgcgccgctgcgtggttgctgtcccgtggacccctaccatggaggagaccatctaaagatccccccacatcagtctgtcttgtctggtgtcagcgtgtacaatgttgctctcaggtcagtctttaagcagtgtggagaagttctacagtccctggaggggacgtcagatgtcattataccttcacccagcatttcatccctcgtcgaacggattggattggcatctgtagagtggggtggaagacgaaccagtgagtattacaccttcatgtgggttactttgcccagtgacctaaacaagaaatcagctaaacagcaggaagtccaagtcaaacgctgactacctgcccaaggatgatgagtattagcagttctgctatgtggatgaggatggtgtggtccggggagcaagtattgctttgcaattccggccagaaaatgaggaagacatcctggtggttaccgactcagggagaggtggccgagattgagcagcacaacaaggagctctgccacgaaaaccaggagctgaaggacgggtgtatcagcctccagaagcagaactcagacatgctggctgagctccaaaagaagcaggaggagctagaaaccctacagagcatcaataagaagttggaactgagagtgaaagaacagaaggactattgggagaccagagctgcttcaactgaaaagaacaaaaccagaagatgtcctcagacaagtgagaagacggggactccgacgtggatcaggttcaggccccagttgtcactccagagacagaatgg

SEQ ID NO: 664968 - DNA, 378 bp, Homo sapiens
ctcacgcgggtcgggtgatgagtaaggagacgatctgtgagcacataccgaaatcgtaattccctcgtgggttgcctctttgccgctgtcctgctgggtggactctcgtccacggtgctggcagaggaaaatggcagcgaccattcaaccactgttcctgttacagcaacggacaagccagcaacggcaaacgattcgaagctagatcacggggcgatggaccatagccagatgagccatgagtcgatggatcatgaccaaaaaaccaaaaaggcagattgagatcatgaccagtaagtttttacgcccaacgctgatggcacttgcagtctctaccggtccagcattctttttcatggctcaagccgctgaagagat

SEQ ID NO: 664969 - DNA, 158 bp, Homo sapiens
tatctaaggatgtactcccactggttgcagcgacagggtaggtgcgagcacccaggctgacagcgtgaacatcaccagcttccagtgccatcacgagaaccgtgtcctccacacttgacgcgggctgtgaccacctgtgactgcagtccacaccgggt

SEQ ID NO: 664970 - DNA, 388 bp, Homo sapiens
  misc_feature (250)..(250): n is a, c, g, or t
ctggccgcatcagattttattttattttatttatttattttgagacacagtcttgctttgtcacccaggctggagtgcaggggggtggggtgatctcggctcactgcaacctccacctccagggttcaagtgattctcctgcctcagtctcctgagtagctgggactacagatgcccgccactaagcctggctaatttttgtatttttagtagaggcggggtttcaccatgttgaccagggtgtgggtanatcttctgacctcatgatccgctcgccttggcctcccaaagtgctgggattacaggtgtgagccactgcacccagcctaaaagtcattttaatttgtaagatatgtttactggtttagagagacagaggctaactttt

SEQ ID NO: 664971 - DNA, 536 bp, Homo sapiens
  misc_feature (21)..(21): n is a, c, g, or t
  misc_feature (65)..(65): n is a, c, g, or t
  misc_feature (73)..(73): n is a, c, g, or t
  misc_feature (226)..(226): n is a, c, g, or t
  misc_feature (229)..(229): n is a, c, g, or t
  misc_feature (271)..(271): n is a, c, g, or t
  misc_feature (287)..(287): n is a, c, g, or t
  misc_feature (295)..(295): n is a, c, g, or t
  misc_feature (316)..(316): n is a, c, g, or t
  misc_feature (319)..(319): n is a, c, g, or t
  misc_feature (321)..(321): n is a, c, g, or t
  misc_feature (352)..(352): n is a, c, g, or t
  misc_feature (355)..(355): n is a, c, g, or t
  misc_feature (370)..(370): n is a, c, g, or t
  misc_feature (384)..(384): n is a, c, g, or t
  misc_feature (394)..(394): n is a, c, g, or t
  misc_feature (401)..(401): n is a, c, g, or t
  misc_feature (407)..(407): n is a, c, g, or t
  misc_feature (436)..(436): n is a, c, g, or t
  misc_feature (444)..(444): n is a, c, g, or t
  misc_feature (496)..(496): n is a, c, g, or t
gtacaggatggatgtggaganggaaaacagcaagtacacacagtgggacaggccacaggacaggntgggagtnaataaagagtgcacactgcttccctgctttccccagtaactgaaggatctaagccacctcctcctcaacatcctcctcgaactcgccctcctcctcggctgtagcatcctggtactgctggtactcggacaccagggcattcatgtggctctnggnctcggtgaactccatctcgtccatgccctcgcccgtctcccngtcccggccggccttncgccgggncatggccgtggactgctcggnggngngcttgaacagctcctggatggccgggctgtngcnaaaaaaggggggggngatttttagacccngaggagggangtaaaanaaagcngtgttaaaattgtaggggatccactgaanaaaatagntggtgtttttgttttggtctttagcttttctcatccactccttcatggacangcggccctgaccacggcggcaaccgtcagcagcggccatg

SEQ ID NO: 664972 - DNA, 173 bp, Homo sapiens
ggagcacatttaacctgagcacgcttcatggggagctgccagcctgccatcgctgcgcgctatcgtggcccgagccaacagtctgaagaattccgggagtccccgactgacatcttcaagctcagatgatctctcagatcctggaacttgacgccacaatccagcttgactag

SEQ ID NO: 664973 - DNA, 328 bp, Homo sapiens
gccgaattattaggtactacccaaggtaatcagctgctggggatcaagcctgccatcgttatctgttgacataatcattcagcgaatctgtctttctcaacaagtatccagtatctggatcttcattagcagttggatcccatctgtaatcaccaagaaattctgtccaaactaacaaatccatcaccattctagtcatgttcttctaaacttcttgaatgaaaattccgtcatataatcaacttcttcaggatgctcaaacagccataaattcttcaaagcatcacaccgggacctgaatcctggttagctttttcaaatcgcttct

SEQ ID NO: 664974 - DNA, 618 bp, Homo sapiens
  misc_feature (521)..(521): n is a, c, g, or t
ggtgaatgcccactgcctattcattcccattaatatgacgtaaatactataaattcttttagtggcttcttctggtaattatctgatgtttctggcaatacacttatactgcttttagaaaaccagttttagggttgggcatggtggctcattgcctataatcccagcactctaggaggctgaagtgggtggattgcttgagcccagaagtttgagaccatcttgggcaacatggcaaaaccctgtctctactaaaaatataaaaattagccaggcatggtggcgtgtacctgtagttccaaacacttgggagactgaggcaggaggatcacctgagcctgggaggcagaggttgcagtgagccaagatggagccactgcactccagcctaggcaacagagcgagaacctgtctcaaaaaaaaaaaaaagtcaattttagatattatctcttgagttccaattatggaaaataagcatttagttttcttatgtccccccatgtgcaaatgcacactcactntatcctcccatcttcacaatattattctaatctccatttctggttaaatctagaattagcatttacattgttatgactatgcatttatagcatttat

SEQ ID NO: 664975 - DNA, 131 bp, Homo sapiens
cccagtttttaatggagtggatgacatggctcttgcaaactcctcctcctgggttcaggcgattcatctgcctcagcctcccgagatagttctgcctggcattaaaggagctgttcatgccactgccatta

SEQ ID NO: 664976 - DNA, 928 bp, Homo sapiens
  misc_feature (7)..(7): n is a, c, g, or t
tgcttanacaagacacagaaacagaagggagaagaagagacgagagacggaagcaaagtgagagggtagcaaatactgcccccccttttggatccctcccggggacacggctagtcaccacagcgcctgccttctttgtgggtccccaattcagggccccggccccctgggttcaacgccgggaaagtggaaaccccgccggtacaccccgctctgtataaggagtctgatcttgacgaatcctcgcaagggttcgtccacttcccggctaagggtaccccggctcccccccaaaggagctgtcaagccttcatcactccccccttaaattgcaacagtcggcaaattacgggccattataatagtcctattgagtggggggctaaattcctcaagagcaattaagaggtaagaagaccgttagcaggtctttctaaaaatgcgggtgcgaacgcccggaactttctttctttcttcgttcctcataaacacgcccgttacacccccctgttccacaccacaacctcctccccctccgtgtaaaaaaacacagcctttaaacctatagcctgcgttaaaatctttgttttataacacgcacaccacggctctttctcgtaataatgtgcaccccctctcggcgaagtgtgttgttagattaacccccttccctctgggtgatttctttcactaacccctcctcccctgtcccgggcaccaccaattggagggcattataattgagcgctggagaaccttctcaaaccacgcgtttgtatctgtggggcaccacgcaccccaagatgattataaataattgggacgaggaatcagttttcacaacagcaacccgttttggcatagatccccttaaacggaaaaatttttttttccctcaagaaaaccccccctttcggcccacaaaaca

SEQ ID NO: 664977 - DNA, 285 bp, Homo sapiens
ctgaggatcccgacactgatcgagcaggcctgtgagaatcaattcaggacagtattttttctgtggtcctttctccatcctggatcagagataaactattaagacgtaaaaaaatactcaaaaatatgtaagtgtttgggttgaacctttagattggctcatgatgtttaacataacaacatttatttcaaatcactgaattcatggagatgtggacacgctgggttggctctattttggtttatgtgtgatagtggttctgtcatcatcattcatgtttttaag

SEQ ID NO: 664978 - DNA, 124 bp, Homo sapiens
tgctccggctgatctagaggatcccgtgtctttctgccaggcatatcctgggtcttctagcaggactaagccagtctgtggacgctgatatagaggatgagctgggggactctgctctgtcctc

SEQ ID NO: 664979 - DNA, 261 bp, Homo sapiens
tgactctagacgatcgcttatgtggttgtgggtagaggagcggagttgttgcagaacgcaggatgtggtgcttcgctgaagcttcaggacctcatcgaagagattcgcggggcaagactcaggcccaggagcgggaggtgatccaaaaaggagtgtgccacattccggtgctccttccgcgacgggaaccaagtgcacaggcaccggcagcttggcccaaactgctctacgtccacatgttgggctacccacacccacctg

SEQ ID NO: 664980 - DNA, 133 bp, Homo sapiens
cggcacggggtgttcccattttgatgttggggccgaaaatcgttgtgaaagtgttgaaggcacaagcacggggtcagaaagctaaataaaaaaatgaaacttttttgggtaataaaaatgaaaaggcgctgta

SEQ ID NO: 664981 - DNA, 186 bp, Homo sapiens
tttatccataatatggaaaggaggaaatttctaccctgatgcaggagggaatggctgatattattcattaccacaggcctagcatcacatgtggaacaactcctctcttctatcgatggactgcttaagcggggtgttacccggcatggcttgtgttattattgacttcagccctctaggctacag

SEQ ID NO: 664982 - DNA, 129 bp, Homo sapiens
  misc_feature (72)..(72): n is a, c, g, or t
gcggtgacggtgctgcgcaagaaggggccctacggccgcccaggcaaatccaggcaaggctaatctaagccncacaagagccgaaggagaggttgtggaacctcccaagaatatggcgctgctggccaa

SEQ ID NO: 664983 - DNA, 226 bp, Homo sapiens
gaattccccccccccccccccccccccttattcagttggtgggggccataaggtggaaagaagttttccacgggagagaggggaaacggaggaaccgtccacggccaccgtgtgacctgtggaatgtgtgaatcccctgaaattgttccctgctgcggtttaaacccggggggatgggaagggagaacctttccccgggttggaagagaaggatgattcttaatcc

SEQ ID NO: 664984 - DNA, 433 bp, Homo sapiens
gacatgagcagctgagcctgagtgcgaagacggagagaaggccgaccacagtcatgacatcaacccccataacctggggacaactcaagaaaaccacacaggaggctgagaaactactggagcaccagggacagtctgtaaagttggatggaccatcaatgggaaaatgagagctgcccacccatggccttacactccttcaattaatacataaacagaaaggaggatatacagagagccaaaggcccatgggacgtgaccaacattcctctgagtctatacgatcaaacagcacactgtttatcatgaatacagaatgtgggcaaactcatgactgtgcctgccccagaaggtttgctgagggcaattgcttcctgacgcctagctccttgaggttatctattgggacatccagagaatgcagtcttgctag

SEQ ID NO: 664985 - DNA, 157 bp, Homo sapiens
cgcgtagagcggtctgatagactgcatacacaggtcagcagatttcttaagtggaaatatagacagacctgggaggctttggtatataaagagttgagaaagtcatggcatttgggtcaggtcaacgaccctcttaccgagaacccgctcttacgcg

SEQ ID NO: 664986 - DNA, 419 bp, Homo sapiens
tggagaaagagcgtgggggacagaaacagggcaggcaggtgagtggcggaagatgagccggatggacatgtccctgacagtgcatgcagcaagctcaggcaatctagggaggcaggtcgatctgcaaatgagccatgcaaagacagcacagacaaaaggaatccactcttgaggagtatcacaaatctccaatgggagcagagttcagtggccgttctctggtcggtgggcaggaaatcagggaaggcttcatggatgaggaagccttattctccatagacagagtgcgagaataagtggcaatgtgtgagaagatgcttgcccaggaagtacctgtgtggttttctcagcgacttaacttttcactccagtgaatactcctaataagagctggcatggatgactcagtgctcatacca

SEQ ID NO: 664987 - DNA, 131 bp, Homo sapiens
gactttagaggatccctcgtccatcccccttcgtgtgtccatccgccttcgtgtgtccttccctcttcgagtgctcatagctcttcgtgtgggcatcacgctgccggcgggcaccacccttcagtggatga

SEQ ID NO: 664988 - DNA, 147 bp, Homo sapiens
tcagctcggtacccggcacgacaccttcacggtgctgaccgccgaccaggcgccaggcgtgttcgccagcaccgtcctgccgcagctggccttcgtcgacgcggcggtcggctacgatccgaacaacgtcacggtgtccttcacccg

SEQ ID NO: 664989 - DNA, 1436 bp, Homo sapiens
  misc_feature (737)..(737): n is a, c, g, or t
cggacgacactattgtgtgtggggccccgtggtgcccggtggtgggtacctgtgggagttctgcggcccccttctgccccgccggggtgttgttgccgccgggatgctatctcggcgccacgtgccctctggctccatatttaggcgcgccgcattaccaccgcgggtgtgccggcgcccgcccccggtggattgccgtgtgcccgccgcggcgggtcttgtgtgagcgccccccgctgtgtttgtgcgccccgggggaacccgaagagttgggggggaaagatattttttcccactgtgggcgccacacagggaggacgggtgggccttcctccggggaggttttctcccttggggggaagcacaccaaggtgttgttgtcccccccccccctttttcgggggacacgccgggttttgccccccgggatgtccccccgtatgtgggcccgacacactggtgtctttgagccgcggagagacccatctatgggtacaccccctcgcgggagaggtggacacccccccggcgagccccccgggaaaccttcgtgcgttggtgcccacgcggcggatctttctctggtgagccccacaagggcacccctccacgcccgggggatagcccccccacgcccttgtgggcgcccgcgagacggcgatcatgtatttgtttcccggcgcgcccccaatagtgggtgggctgccgaccccttcgcgctgttgttaccgctctcnctcgcggagagaccatctctctatttgtgtggacacacccccacagagatattctcgcgcacccccagtgacgtcaccttgtgccaccgctgggacacacatctcacacccacagcgcctcgcggcggtgagtggtgtggtgtgtggagaggacacgcaagtgtgtgggttttcacgctgtgtgtgtggaacttctgcgacccaccagatgggctcgggacttggaaataccgcccgccggaaccactctcgggtgtctccctctcttagactttatattgggttgttctccccagagagactgtcccccagcggaatttgtgttcttgcccggttccaaaagcccaacgtggacccaggacttatggaagaggttttggaataataatacttggcttaagactgcccagggcggagagccccttccccaacaccacattgttggagacaccagcccaggaagacccagggagaagcgccaagagagaccggccactggccagctcaccagagaaggcccaaggagcctctcgcccacgccaggccggcccacccagaacgccacgccacgccacgccacgcccacccgatttgtgtagcccaagtcttacccaccccccccagcacccccgacagactaggcttaggcccctctgccctcccttccttgtacctttatccattataaaatccacttcc

SEQ ID NO: 664990 - DNA, 922 bp, Homo sapiens
  misc_feature (283)..(283): n is a, c, g, or t
  misc_feature (326)..(326): n is a, c, g, or t
  misc_feature (349)..(349): n is a, c, g, or t
  misc_feature (452)..(452): n is a, c, g, or t
  misc_feature (560)..(560): n is a, c, g, or t
  misc_feature (575)..(575): n is a, c, g, or t
  misc_feature (676)..(676): n is a, c, g, or t
  misc_feature (714)..(716): n is a, c, g, or t
  misc_feature (720)..(720): n is a, c, g, or t
  misc_feature (728)..(728): n is a, c, g, or t
  misc_feature (737)..(738): n is a, c, g, or t
  misc_feature (750)..(751): n is a, c, g, or t
aacgaggcttccggtggcgcaaagggtgtcgggagcggcttcctgcaaaccttccctggcatctggagggaccaccgttgccgcgtcttcggcttccacgatctgcgttcgggctacgcggccacggcggcagccactgcgactcccactgtgcctggctctgtccatattagttcccaggcggccgtcgcctgttccagcagcggcagcggcagcggcagcggcggacatgttgtgaggcggctggcgctgggtgtctgaaggatggtttggccgaggcggngtgcaacggctgctggctgtgcggcgtgcagctggcagcttgnggcctctgggctctatagagccngagccctgctgggtaccctgccctggtacctgctggcgagtgccagtgcccctggatcttgccctctgctccgacgccgttgggggaccagttaggcgacagngcccgccctctgaggagaccacgaaggtggttcccccagaccgctcaaattttccggaaccaccgcgctttccccctcctcaggcctgggctgtgctctctctagaantcctcgggaccccanttttcttcccaaaactcatcctaaagtctctcacacacgcgagtgttcccagccctcaagccaggtgctcctccgttacatttttcatgcaccctcttcgnaaaagcaccccccgggatcactctccgagaggcgactnnngganaaaatctncggtggagnnaggggaccagannctggggacgtccaacaaaagccgggacagccgagaaaaaccaggaagggaactaaaggacatacatacatcatgggaaccgaatgaagatctccactatccgcaagagacggatatcaataacaagatcaaacgagagtcaccctaatggccgggcggccaaccaacgccg

SEQ ID NO: 664991 - DNA, 439 bp, Homo sapiens
aacggatctatgtcagtgatctcatgaagtagagtaagtagtttgcacatacatgtgcacgcaactagactttaaagatttttcatagaaattctcaaagtgcgtatcacctgttcagttagttaattcagattatactggggtaggttatttttttttttaaaagacgggggtttccatcatatggcccaggctcatctcaaactctttcctataaacatgaggcacgcgtgaatgcaggcgcacacacactcacacacctctcacatcagtaatcctcttataaatcccagtccaattctggaaacagtccccttgataacactgtagcctttttcctccaccatataatgagccatcacctctgaaaatttccagtgtatgagccacttctattgcgggaaaacacctatctccggttcagagtatccaggcgagc

SEQ ID NO: 664992 - DNA, 700 bp, Homo sapiens
cgcggtggctcacgtctgtaatcccagcactttgggaggccgaggcaggtggatcacgaggtcaggagattgagaccatctggctaacatggtgaaaccccgtctctactaaaaaatacgaaaaaaaattatccgggcgtggtggcgggcgcctgtagtcccagctactcgggaggctgaggcagaagaatggcgtgaacccaggaggcagagcttgcagtgagccgagatcgcgccactgcactccagcctgggtgacagagtgagactccgtctcaaaaaaaaaaaaaaaaatttagccaagagggggggtttgtacctgtagtcccagctactcagggaggctggggctggaggcttggggaaattcacttaagcccagggagtcccggggctgcaagagagtcatcattggccccatggccctctatccgggggtaacgcgtgtgatgtgagacctggtctcttaaaattagaacttcggggccaagcacgggggctttacgccgtgtaatcccagcacttagggaggccaggggggcccttcacgagggtcgggaaatcgagaccatccggggccaacttggtaaaacccgtctcttacttaaaatttttcaacaacaattttaccgtgggggttaggggccttgcctggaatccccagtactcgagaggtgaggcaggagaatccctgaacccg

SEQ ID NO: 664993 - DNA, 227 bp, Homo sapiens
  misc_feature (101)..(102): n is a, c, g, or t
gtcttgcagagaggagcgcctctctcgccagtgctcagcctcatgccaggcgtgatgcagttagggcgcagtgggcgcgatcggttcttgtctcctcaganntcgcgagcgcgttgggggagaccacagagcacgtattcctcttgcccctggattgcttgggtccgccggtccctgggggaggcgcttcagcgacacaagatgcgatcgtctgcaaggaacccacg

SEQ ID NO: 664994 - DNA, 738 bp, Homo sapiens
ggaatctctgaggcacgccgtgatgcccaggaagagaggacgaactggaggtccaactacttccttaagatcatccaactattggatgattatccgaataggttacatggtgggagcagtacgaggtgggctccaaggtgatgccgcagatccggatgtcccttcgcgtgaaggtctgtgggtgctgatggggcgaagatagcatcatgatgcgcaacgtcatccgaggggcacctgggaaagagcaacccgagctctggaagaaagctgctggcctcatatgcgggggaatgtggggcttggtgttcaccaaggaggacctcacgtgaggatcagggacgtgttgctggccatgttaggtgccagctgctggtgcgatgctggtgccagttgccgcagtgctgaaggtcactggtggccagtccaggaagcactggtctcgggacccgaggaagagctccgtattaaccaggctttaggataattcaccaatagaattcatccagggggcactcatttgaggagtcctgagtgatgtgctgcgtggtcgtgacgtgtgagacaaagttgggagccagcgaggccacgctgctgaacatgctgcaagatcttgcccttcttcttgggtctggtcatcgagcaggtgttcgaaatgggtgcatctacgggccctgaaggtgttgctatcacggaggaaattcctggatgcatcgtcttgctggagggtgtccgaagttg

SEQ ID NO: 664995 - DNA, 250 bp, Homo sapiens
tagtcatgtccgtcccaactgcttgctgtcgactgcaaataccttagggggggggggtgttgctttgagggaagttacgcttatttttatttttttattgtcttatggttttttttccctttgtcctggaaaaacggggttctcgttatattgcccaggcggttctcaaacccctgggctcaagctatcctcccgcctcttagcctccctgaaacctggaattacaggcgtgacccaccgcccccggcct

SEQ ID NO: 664996 - DNA, 180 bp, Homo sapiens
cgatcgagctcggtcctccattcatattatcttgcatgatgtcatttctcatcagaaattactacctttaaagcggtaggtttaattgataacttcttttcaatgtggatgtcagcttggattgtggcgtggatgtttgcatttccaagtgtattagtctgtgcaccgattgctcaaaag

SEQ ID NO: 664997 - DNA, 151 bp, Homo sapiens
aacattaggcttaatctaatattatctatatacagtaaaatttaccctttttagagtgtagttcagtgaatttgacaaacgcatcatgtttctaccaccacaattaagatgtaacacatttccattacctcccaaaactccctcgtcgacg

SEQ ID NO: 664998 - DNA, 877 bp, Homo sapiens
ggctatctgcaggctggccagcttcctctgcgctccggaaagtctgcggcccagcgcggactagtgatggacctccacagctcctggacattgcccaggagtccttgtcggcgttcttctcccagcctccgccgatgccggcggtgctgtggttttgaagggcgagcgccaatagagattggctgtgggctgtgtgtgctgggatggctcagggtgtctggcgcaacccgacgggcggaccttaccgtcaccgcctcctggcacatggattccttccaggtagatagcagacacggcagtcacccgaggctgttatcctaggaaccgtgctgcaggatggtatctaacaggagtctggattaacctcccatggatatcgactgcatttgcagtacaccagagggccctggtcatgggtgccccactggtttctgtggctgattgtggcccgtactgtggcccaagcatgtggaataagccattggctagggtgtgaaccactgtgataggccgacattgagatggggcagccatcagtcactggtagccaacagaccagaccgtgtagtcatgtgacttggaggaaatacgcaggtgattagcgtacccggaccatcgttaccttcactcttcgaggagaataccatctgatttagcagacggtgcagttggctggatccagggctcgattgtgaatattctagagagcctagtacaggattctaaatagtagcggactcgcgaacgcatgtcagaaactggatcgcagtggcatgacgaggtaaaggcggatggccagtgtcagtcccgggacccggcactccttcgagttgtcccccatggatgttggcaaagagcaagatcctaagaaatggcc

SEQ ID NO: 664999 - DNA, 325 bp, Homo sapiens
tcagagtcaatttgggaaaggccttcaaacatcactatggggggatgtgaactgttatatcctggttcaatacgtgcatcttttcaaatgttttcaatcataatcggatttccacaattacatccttcagtctttgggggggaaaatttataatggcttcccgcaattttataaatccttccgaaatcttcctaaccgctctaaagaggcgtgaaaaggaattgtatattaaaactagtctttttgtaagtcgggggacaggtagctatttccatggaataaagtggggcggttttggccaggccaataaatggagggaaaactc

SEQ ID NO: 665000 - DNA, 320 bp, Homo sapiens
ggatcacaggagggtagggaagaaacgtggatgccgtattgattgatttatttaattcattgatgaagacaaagtcatcgcgtcgtgtgcccaggcaggacgtactcagctcactgcaacctccgcctcccaggttcaagcgattctcgtgcctcaccctcccgatagctgggattacaggcgcacaccaccatgcctggctaatttttgtatttttagtagagacggggtttcaccatgttggccaggatggtctcgatctcctgacctcatgatccgcccacctcagcctcccgaagtgctgggattacaggcgtgag

SEQ ID NO: 665001 - DNA, 101 bp, Homo sapiens
gagaagacgacagaagggaggaggtgaactgtttccacattcaagattaaactgagtgaatcatcaaatatcaaaaaaaaaatatataaaagtcgtatcga

SEQ ID NO: 665002 - DNA, 415 bp, Homo sapiens
  misc_feature (38)..(38): n is a, c, g, or t
  misc_feature (49)..(49): n is a, c, g, or t
  misc_feature (138)..(138): n is a, c, g, or t
  misc_feature (179)..(179): n is a, c, g, or t
  misc_feature (224)..(224): n is a, c, g, or t
  misc_feature (288)..(288): n is a, c, g, or t
gagacaaattacgaccactggaaaccagccacccaagnaagatgaccgnagaacatctgcccatcaaggcccttaatgctacaggacaagcaaacctcaagctggaggcacttttccagtgaaagcaggccaggtgcnggttgtcacgcctgtaatcccaagccctttgggaggccaangcgggtggatcacttgaggtcaggagttcaagaccagcctggccnacatggtgaaacctcgtctctactaaaaatacaaaaatcaaccaggcatgacggtgcacgcctnttatcacagctacttgggaagcagcggctggagaattgcttgaacctgggaagtcgaggctgcaagtgagctgagatcaatccatggcagtctagcctgggcaacagagcgagactctgtttcaaaa

SEQ ID NO: 665003 - DNA, 686 bp, Homo sapiens
cagaggttatttgagagggatatgacctccaaagtttccacctgtccaactgagaagagtaagccatccgagtgctggctctctttgatggaatcgctacagggctcctggagctgaaggacttgggatacaggtggaccggtacattgcctcgaaggtgtgtgatgactccatcacggtgggcatggtgcggcaccaggggaaaatcatgtacctcgagcacttccgcagcgcacaaagaagcatatcctgaaatggggcccattcgatctggtgattgaggggcagtccctgaaatgacctctccatcgtcaaacctactcgcaaggctctctacaaaggcccttgccggctcttccaagagttctaccgcctcctgcatgatgcgcgtcccaaggagggagatgatcgccccttattctgactcattgaaaatgtggtgaccatgggcttaagtgaccatgaggtacatcttcgcgattctcgagtccaaacctgtaatgattgatgccaaagaagtatcaagcttcaacagggcccgctacttatggggaaacttaccgtatgaaaaggcgttgattccactgtaatttacgtgaagctcaaatgctaaggctgaaggatacaattcccaaagtagacattctacaggtaattcacgaaggtacggtcattgatctgacgga

SEQ ID NO: 665004 - DNA, 230 bp, Homo sapiens
tgcagaggcgttagtttgtttttgatctcagataggtaatacagaattcactaggcaggctatgcttgtattgctttgaatggggacctttgttaacgcaggcccatgaagaactcaaagattataatctctgtatctaatccattggagtaattattccaattccaaccagccgtattgtttggcccgggtaacaataccttaaaatattgaaaaattcttgaattcct

SEQ ID NO: 665005 - DNA, 172 bp, Homo sapiens
aggacacctgccttggtcctcgggatgatatatagcaagacataagcgtacaggtgtgaccagtcttcatcctgatgcccaagcgcggaagaatgcacaagaagaaagtatcaaagaaatacttgcaaaaagtaaaatagttgaagaaatgctgaaaatgaaagcagaccta

SEQ ID NO: 665006 - DNA, 703 bp, Homo sapiens
  misc_feature (352)..(352): n is a, c, g, or t
ccggatgcttgaggataaccgtgcgctggcacacgcatgattcatgccgcattctggttttcaacaaccagtgggatcgccacggctacctccgcgtatcctacccagacgttttcccataataatacttcaacatgctagcattggttcgaaacactttcctatctagctcctcaagcggtgatgacaactatctgtaatctctcttggagggtggaagtttgattggtggctctgactaccaatcatgactcttaccggcacctagtgcgtacccctcgtactattgatacttctatgctgctggaattcctctaggatgacgctgaatcttgcgaagtcttgtgatccntcattccaggttcatctcgatggaaaactctggattaagatgcttgtgcgacaaatagtgtgctggtgacactttggaagtgttggactcgtatcgcatgactcggattcaatgggtgccccattacgactccctctcgatggcaagggcagcgtggatggcagtgccgataagctagcttgggtactaccagagcccccggaagctagaaaccttcgctgttttcacaatgtcgtagggctgttatacaacacagtttggaatcatcccagggggggcatccgatttgatacatccttgcactcgtagtgtcgcagcttgaatcccagcactgtggaacacacaatttgg

SEQ ID NO: 665007 - DNA, 1470 bp, Homo sapiens
  misc_feature (7)..(7): n is a, c, g, or t
  misc_feature (145)..(145): n is a, c, g, or t
  misc_feature (1034)..(1034): n is a, c, g, or t
  misc_feature (1167)..(1167): n is a, c, g, or t
  misc_feature (1199)..(1199): n is a, c, g, or t
ccacccncccttctgcgtcgctctctttttcttgcttatgtttctgttttttggttcgtgtgttctcgattgtttcgtcgccacccacgcctaccgcgtgcagctcgcagcgtcggctggagtaggacgggaccaggagagaganttggtgagggtagagggcgctgtcgctgtgacctggttgtgcgtatctgtttcttctctattcggagggtcgatcgccttagttgtttcttacgcagatcgagtgagttgtttgcgtgtctgagggtgtctcttgtgtgtgctctgcagtgccgttgttcctctctggttgtgcgtaacgattgtatttctgcgccgcgctggggtaactacctatctttttttggcggggtcgcgtctcctccatcctcgtatttcgctacgggacaattcgttgtttgaccacgtgggttctgcccctgctctctcctcgtgggagtatagagttttctctgtctgggttgataaagtgcgccggagaatccccgcacctgtgtgggctgcctcccccacgaatgtgggtgggcgcctccccccactgtggtctgtgttgtgccgcagtccttttggcgtgccgccaatatgttatctgcacggtgtgttttccccccccgcgggggatatttgtggccgtcgtgagtgcgtggcctctcaccggcgcctcgttttggtgtaagatcatcaagtaattgtggtgtgttggcccccgcggtctggctatgtggcgagcttttttgccttctctactgcgtagagacaaacgaatgtgtatgggaagtgggccccacatgctcctcgcttggactcctgatggccaggatatatattagcgtcttggtatattgtgtgcgcccgccccaaaatgctgtgtctggtctggagagacaactcaagcggtagcaatggtggtcgcacacacaagctccggctccctctctgtagcgcgtcgcgcttcgtttgttcatggtggtcgtgtgaaagacaccatgtcgcgcgctgagttgaagganatttcacatgtatagcagacgaagcaaaaaggatttgatagagatctgggcgtagtctccctcccacgggcagtagttcgtaagcgtattttgtctaaaagagggtccctacgtatagatgagcgcacagagnaatcactcggtctgtaactaacgctcacctcntagttgcctcgcgcacgcgtacgaaagtgaccactagtgtgcgcgccgcccccgccttgtgcgttttcatagagaatgttatatccctccggtgcaatacacattgcgagcctcaatcgccttattgttcctccgcggcgagtccctcttcatggtgtgatcttcgacccggggatgtctctccaccacgagccacacattgtctacttgcagctacacgattttcacccaataatcaattgtgtgcgacacacaaacaatggacagaaca

SEQ ID NO: 665008 - DNA, 329 bp, Homo sapiens
ccgcagctcggtctttatttttttggcagaacttgatgagctcattttaaaattcatacagaaatgccagggactacgaaacaacctatagaatcttagaaaaataataaacaaaattggagaactcacatttctcattttcaaaagcgtactgtgaagctcctgttatcaagactgtgttgtaccactcacaagacggacatattgatcaatgaactagaattgacaatacagaacttaattcatacgtctgtggccactgattttccacaggattgccaggccccagtctgcgggggtcccgatgctcggaaattcgtaatcatagt

SEQ ID NO: 665009 - DNA, 313 bp, Homo sapiens
gggcattttctttttagtttttcattaaaaaaaattccatatctccccctataaaatcaaataaagggattattttttccacccctcttaaccttttttggggaggacaatttttgtttttccggaaattcccataaaatccagaagcaagattccgtaagttgagaactttggccagttgatcagctttccctagggggctttgcctttaactaaagggggggagggtagattatttcaaaaatgtatgtaaaactgtttcctgaccaataaaaggtatgaacggggcagaaataaaaactttttttaatta

SEQ ID NO: 665010 - DNA, 172 bp, Homo sapiens
atatcacagcaccaaatttccatctccatcattaccttcatcccatataggcataattagaacattgacttcctctctttcttcttcccactcatcctatccctactcctaatcacattacctattcccccggaacatctcagtacacagattaaggtctacctggcgggat

SEQ ID NO: 665011 - DNA, 514 bp, Homo sapiens
cagggcacaagcactgagtcagcctgggttcaatgcccgttccataactcacggctgtgtgaccttggcgctctgactcagaatgtccaagctttgatttttttaattgaaaactgatggaaaatccacataaaaggtttagcacatggtaaacaatgcacaaaaattattcatgagattgctcaaatgttacaacactgagttcctgaaaacagcagtttgtatcagaaaacataccaaatagtatttttaaaggtttgtattatctctacttgtaaagaaagacactgatttcatttttccttagtactttattttatgtaaaagaattctagcattgtacaggcatgtagattaatgagccaattgtgtatacttttgtgaattgaatagttagtataaaaaaaatttatgttactctttgaatagtgaaatttcacttcactattaaatccaagaaacatttttaaaaaacgtttgtcaataataaaatatttatggtcaaaaaaaaaaa

SEQ ID NO: 665012 - DNA, 119 bp, Homo sapiens
tgcagacagctgatctctgggtcccagtcagttacatggaaggctgatctattttggagctgttgggggagggctcagcaagacaggagctgaggcagaatcacagagagatggccctt

SEQ ID NO: 665013 - DNA, 452 bp, Homo sapiens
tcatcaccatgagaatgaactgtcctggcaaccacgtcccagacaaataacaacatgccctaaaaaccccaaacacagtgtgcagcttaatcagctcacccgctcacagggtatctggtaccttaactcctgccgggtctgagtattgtaaatactcaaagtaattgttgaatcagttcggttgacctgggagtatattctgggggaagcgcttaaagatgccaggtggctacctgaatttctgagtactgtaatgatcccagcatttctcaattgtgtgaaacaacattcatgagtttgaaaccaatgagtcaggtacttactgtagcaggagtggcagactggccaagcaggacccctaccctgttctcttttccagtgcaaaagggccattctcttctgtttgccctagttgttctctaaaatgttataaatgtggacacttctatttt

SEQ ID NO: 665014 - DNA, 124 bp, Homo sapiens
tcggtaccatctcctttcttcatcaccaaagtagctttgccacaggtactacttctggaatacttcactgaagttcttagatacctgtttgaaagttaactgaatagcttcatatttcctgaag

SEQ ID NO: 665015 - DNA, 290 bp, Homo sapiens
tttttttttggggtagaaaggattatgaggtacaaattttttattgggatcatacttaaaaagacagagcagaatcacattcattttcttaatagtatcacggtaaacatagcgaattggggcgctttaagatggctcggaaaatttctgaagagtggaccatagcagccgggtaagccttttcctttcccccaaagctctccggcccttggcagaaagacggtgggtgacaacggatgctaactaaatagcatggggtggagctggccaaatccttccacctcctccca

SEQ ID NO: 665016 - DNA, 875 bp, Homo sapiens
gggcaggaaatgcatgttcatctggaataaactggattttcaatgtcctggtttcactaacatttttacacacagcagagtatcttacatactatggagctttcttcctctatgctggatttgctgctgtgggactccttttcatctatggctgtcttcctgagaccaaaggcaaaaaattagaggaattgaatcactctttgacaacaggctatgtacatgtggcacttcagattctgatgaagggagatatattgaatatattcgggtaaagggaagtaactatcatctttctgacaatgatgcttctgatgtggaataattttcagctgctcatatatttagttatttaaacaaactggggggagaagaacagcaattggtgacttcactgccctgcttctaatctggttctttccacagcctagttttgattgacttcatattctagaatacttgattaggaggaagatacaaccatgatgactttttttttccacaaggaacaatattttaaaaaatatttacagagattttaatctaataattcttaagcaaatgtgtgtaatgccttcctgaaatagtctaaaatgaatattgtacccagtggcttcagtggtatccttttttcctaagaccatttataattattagtggcaacagagtcagtgctaatctagccaaattacatatgtataatatatttataaaggattctgggagatggtccaagggtgttctgtgtcaaaagaaggcctattggccctcagtttttctacagagtagtggcttatctctgatcagctggtacaaactaaattccatgtaagctttcatcaacaaattccaaagtgcctcctacaagggcacagctg

SEQ ID NO: 665017 - DNA, 349 bp, Homo sapiens
cgcagaagtccaatgccgggcgtggtggtacgcgcctgtaatccaagctattggagaggctgagccaagagcatcccttgaccccaggaagcgaaggtgccagtaacccaattttgcaccagtgcactccagcctggtaacaagagcaatattccttctcaaaaaaaaaaaaaaaaaaagtccacttgaagaagataatcaaagaattacgcagaagaccactgctcaatagaaatcacataaggtaagtcaggctctgtggctcacgcctgtaatcacaactctttgggagaccgagacaggcggcttgcttgagctcaggagtacagccgtggcaacatggcaaacc

SEQ ID NO: 665018 - DNA, 1311 bp, Homo sapiens
ttcttctttgttcttccttgtctgttcttttcttcttttcttgttcttctactttcgtttcggtcttgtcctcttcaccttgtctccttgcccccttttctttttttctgtttcttttctttcttttgcttgcttttttctttcacgcctgtttgttcttcttcctcgcccttacgataaactactctcctcctgtcctcccgtctccgttctggtcctgtgtgttcttttcctcttttttcttgttgctattgtctcttggtgtttttggtgtttatcgcttatgtgttcatttgtttgttgcatgtctgttttggttcttgtctcttgccgggttgctgctttagttctttgtctgtgtattgttgtttggcactatattgtctctttgtaggtggcctttatatggtgtccttcttccgtttttctatggcttgactttgttttattgcttgttctgttttttgccttgattatgggtatgtttgttgcagattctcgttgttctgttattgtttgtttggtgtgttttgctctactatgttcgtctttctatgagtgttttccggtcctcttgtttctacctttccagttgtcgttgtatttgttgttccgcctgtttctcttcgatcttatgcgtcttgacagcgtactttcctaatgcggtaactagttggtcttgggtacgcttgtcttgaatgtatatgttttcatgtgcttgctggtttatatctattctctagtgccgttgttactgtgctttccggattaggtctgagtccatgtcacatctcttgttcatgtgcattgaattgcgcagcatgatttttatggataactgtatgtgtcgtcgtttttctttctcagtactagactatcactgtattgtgtcttttgcactgatgatccggatttaatgtgatatcacagtctaatttttattcataagccgagatgttttgctggcactgagcagagtcttgctacctcagtcagtattgttttggtcttgcctaccttcccgtcgaccgactttggcctactcgtgtcagccgccaccccagccccacctcgtccccacgcttacccgccgccccgacttggcttgcttcgttgtaggagttgtgagtggttcggttctgtttacatcagttttaagcgagaggtatgcctgtactcgcttgtgcagaaaacacttgttccagacttcaatcgactgggtttatgtcccttcacatagttattaaggttagtttactttaaatgtcataatgtattttattgtaacagacattgtattgccacattgcc

SEQ ID NO: 665019 - DNA, 401 bp, Homo sapiens
cagcttccgagcaacgccttcgtgagcacggctaagtggcagctcctctttggcctcaagtgctcaacatgatggccgaggagaagctggttgatgcctggattgcagcaccgagaaagcagaagaaggcctggagaagttgctcccgtgctcctcttgagggctgcctgagctggtgtgcaccctcccctgtgtgccggaagactgggaattcctgctaagtgtggcttctagagtgtttgtgttgtacccggttctgacttgctatggcgagtgcgcatcctgtcatcatctccactgtcccaagcagtcactatgtggcggccgggccagctggaacccagaccatcctctcaggcagagcagggtggtccgggcacactgggcctgcctctccagcc

SEQ ID NO: 665020 - DNA, 194 bp, Homo sapiens
ttagcaggcataggtcggtctagtcttctattagctcttagtagattacacatgcaagcatccccgttccagttgagttcaccctcttaaatcaccacgaatcaaaagggacaagcttcaggcacggcagcattgcagctcataaaggcttagccttagccacaacccccaaggggagaccagcagttgattag

SEQ ID NO: 665021 - DNA, 523 bp, Homo sapiens
ccatgttgggcatcactgtaacttctgcctctcagcctcaagcaatcctcccatctcagcttcccgagtagctgggactacaggcatgagccaccacacctggtcccctttttttttgagatggggtctcactgtcgcccaggctgagtgtagtggtatgatatcttaatccaccttcttaatccgactcacggcaacctccgcctccggggttcaagcaatcctcctgcctcagccttccaagtacctgagattacaagtgcacaccaccatgcccagctaatttttgtatttttagtagagataggctttcatcttgttggccaggctggtcttgaactcccggcctcaagtgatcctccctcttcagcctcctaaagtgctgggattacagtcatgagccaccgcactcagcaaaagctccttccttttatggctaagtagtatttccctgtaggtctagatctcaatttgatggacatatgggttgtttccagtttttggcaattatgaatcaagctac

SEQ ID NO: 665022 - DNA, 113 bp, Homo sapiens
tctctccacactggcatgacctatctaggttctctccacactggcattcccagtgccttctaagccaggcttagagaatgggcaaggctgctgcagagcaaaagtgttagata

SEQ ID NO: 665023 - DNA, 114 bp, Homo sapiens
ataatatcctgcagagtgttttccaacttggttccattctccctgtcactatcaggcattccgtgccttctttccactccgactctgtttggctttactgactggttcttcatc

SEQ ID NO: 665024 - DNA, 258 bp, Homo sapiens
atcccccgggtaccagcagctggtgagctgtcccatccttccccagagcctttcttaatcgtgcaactatctcagtattctttctaaggcttcgtagaatctttcgtcatcttttacttcgctgttataatgaacatcattttacatgcagcaaactgttaccacatcatcaggtgttttccagtacactaaataccctctcattcactcattcttacagtctactagatatttcctactagattgcttgttccgctg

SEQ ID NO: 665025 - DNA, 1000 bp, Homo sapiens
  misc_feature (312)..(312): n is a, c, g, or t
gggcccggcgtcaggtcccagaccggggctagagacctgagggccggggtccgggcccggcggcgggactccaggcggttgatgcgctgctcaggagtcagccatgacctgaaacgagcagggactggatccttgatgatggttagacagtagttctgtagattgcagcgcgtgcacagcgtgtgccattcccaatgtcctggcgatttgatgcggttcgatattccttcgttgtgtgcccttcagtcacttgagtaacgagatctacttagttggtaactgcgcgcgagagacactttgcggcagtgcaanggtccagtctactgctgcagctcatgataggacgtatcgacgttcctgttgagttccctttccgaggtgcgaggtccttcgggcatcaaaagccttcccatcactcagtgctctcagctggagttcctcttgaccatcacaggactattgttggactcaggatgtcggtcagaagttcgcattaccaaactgagaccttgcaacgtatggtccttgcagttggacacttgcccatggatcatggaggagcaacgcacccggcatcctgtcccttgcgattgaccctggtccgatagccattggtgccaagttaacgacggaatacagccaggttttgtacgacatgccgtgacaggctgaagcaaaaaagaccgtttcccaccatgagtaaggcaccctccattggcgtgtcccaaggtaggcttggaggtggtattgcttgcttaactagcccatcgagatgtcgtccaggccatgttgtactcgataggtgtacttagctgggccatgccacgtacttcagacttgagcaagtacaacttctgctacaaacggggtcaacaagacacgtgtcagggcgctacttgcgcgcctgtcggacgacaggatttcccttgaattccccgttgtaccccgagaaaggagattgagtgaacattgcgttcaggctcatgagtactaatgttcc

SEQ ID NO: 665026 - DNA, 134 bp, Homo sapiens
ggggccccgacaaccacccattttttttaaaagtggggtgggggggggaccggggcagccgcacgcgggagggaggggggggcccccggggggggcggagggggggcgcccaaagcgggggggggggggggggc

SEQ ID NO: 665027 - DNA, 93 bp, Homo sapiens
gatgctgcggtcgttctagaggatcccggcaccacttgtgctgtgctcaggagactctgattttactattgagaaaaataaaggcgtcaatct

SEQ ID NO: 665028 - DNA, 181 bp, Homo sapiens
actttccctctgtctctgtatgggggagcttcttccttctttcttgcctattaaactttctgctcctgtaatcacagcactttgggaggcccaggagggaggatggcttgatgccaggagtttgagaccagcctggccatcataagaagacttcatttcatataaaataaagtgaatgagt

SEQ ID NO: 665029 - DNA, 386 bp, Homo sapiens
gctgaccctactctcagtgcctggggctctatggagcttccctcttgtgctggaaacctctttgccatctgggaaatgcctctgccacatctggtaagtgccatagccttgagtgaagtgattggtttatgtatatttctttttcttctctcaggatacatcattcactcttgggggacgtgaagaagctcatcactgatgagtttgtgaagcagaagtacctggactatgccagagtccccaatagcaatccccctggaatatgagttcttctggggcctgcgctcttactatgagaccagcaagatgaaagtcctcaagttggcctgcagggtaccacagaaggatcccaaggaatgggcagctcagtacagagagggtccagg

SEQ ID NO: 665030 - DNA, 175 bp, Homo sapiens
  misc_feature (7)..(7): n is a, c, g, or t
tatcgantgccacccagccatcaaaggatgtaaaaggagtaggagagtagttaataactctattctgttacatgccttgattggctggtgggcaatggggaggaagggattggaagaactaacgcaagagctaaattactccaaactacaacagggaaagtggcatcgactaaac

SEQ ID NO: 665031 - DNA, 199 bp, Homo sapiens
agtattaggcgatgagtagggagggctactaggtgtaatagagtattgctgcgtcagcgtctgctgttgctcatcggtgatgatagcagtgggatagtgtgttcgaagagatataaaatatgatagttctgtgctgtgactgtataattaaggagatctgaggggagatagtatagagaggtagagttttttcgtgata

SEQ ID NO: 665032 - DNA, 150 bp, Homo sapiens
tggtggtgtgcgtctgtagtccctgctattcaggaggccagggtaggaaaatcacttgagcccaggaattcaagcctgcagtgagccatgatcacatcaccacacttcagcctcgtgaacagagttgcgacttggcagcaaaaaaaaaaa

SEQ ID NO: 665033 - DNA, 881 bp, Homo sapiens
  misc_feature (224)..(224): n is a, c, g, or t
  misc_feature (293)..(293): n is a, c, g, or t
  misc_feature (305)..(305): n is a, c, g, or t
  misc_feature (325)..(325): n is a, c, g, or t
  misc_feature (580)..(580): n is a, c, g, or t
  misc_feature (586)..(586): n is a, c, g, or t
gagttaacggggacgctttagagaaacgcactcgcctctcctgttccggttgggtcggcgcgggcttctcaggcgccacgtgggattcggcccgggtgctcttgtgagctgctgctcctgcggttggtgagattacctgggtctagagtgcggagctgctccgtggccacgaggacgtcaccatgcccaaagcaccaaagggaaaaagtgcaggacgggaaaanaaaagtcatccatccatatagtagaaaagcagctcaaattacgagagaggcccacaaacaagaaaaaanggaccacatcgncagaatgaaaaggccttgcngtctcaaccttgttggtgaaaaactgcaatggtttcaaaatcatcttgatccccaaaaaaagagatattcaaagaaagatgctttgtgaactaattgaaagagattccagacattctaaatgcagtaatctgaaaacatttagggaatgggactttgatctgaagaaattaccaaacattaatatgacgaaaaatttgcgctaatgatgcaattcccaagacgtgcaagaggaaaactattatactgtagaccanagattntgggggcaatgtggacctaaacggatgatcagtgatcagatgaggaaatgaatgcagggctaatagtcttcacttggattggaaataataattgggagtcaatatttttcttgattatggtcctaattgtctgcacacaaattgggacggattctttattgagagagtcttgggttaaaatgggtttgtacttttaaagggaaggtcattcctcatgtgaagtaattgtgggagtggtgtcatgaaagggggggacaagaaaaagggtgtgttgaccacatggtggacacacagg

SEQ ID NO: 665034 - DNA, 1451 bp, Homo sapiens
ggtgtgctttatcgggcgtgacattacatttcaccgcgcgggccttcgcagcgtgcgctttctggtgccccctttctgcttccagcctcatagaccaggtgcatggaccccttagctctatcgtactcatgactctgtgacccttccgcgcgaagagaggaagccaagtaaggagcgacctattcagaccttggaaattctaaaagaatcatgtacctagagtgtcagtaattgattcagggactgtggcgcatagcgtcgttctccctagcagataagtggccgtcggctgcgcagcctgtgacggagggcactcttgtacccgatacgatgacttgtctgtacgagacctacatagtaaacctgcgtctccacgtaggagtactacgctcgctggcctataaagccctgcagtcgtacgaattctgtaccctatccgtaacagacacgcgggcagaccgactggcccctgcgactgggcttggcccacgacagttgggcacacactacaaaaccccttctctgtccctatccataataccaagtaactacaactactctaatcaccccacagcacaactacaataaaaccaccgaccaccatattactgcaatccatacatccaatatcaaccacctacatcctcaaacatccttgtcaaacgctcccattcaacaaccaatcatctcacctcacactctggcaaccaacatgcatcccctcaaactcaccccctctgcagccgacaccctccaaacatatcaccaactcattccccgctacgacactattgcccttgccatcccaatcgaaccgccgcccctttctccccgctcactgtagtccgcactccactcccacaacaccttcataattccaaaacacccccccacaccttcacatccgccactcccacccacatgacccctacacactctcacccatttctaatcacaaccactcccattcccattccaccacaccaacctccaaacacaccccttcctactgcacagcctcatcacactcccacctggtccaccacacacaacccacaattcgtactcccatcacccaacccaccctcaccacacacacccacacgaccacacgcacactggccaaccaatcccataggcatcgaaccaagcagccatcccacaaccacggccacccaacacgagtcatcacacacaccaccagacccagcaaaccagttctccaccagtcacgaccagacctgccaccacactgcaaccgccagcacacgcatggtcaatccaatccacacagacagcctccgagctccaaccctcagtccggccgtgacatctcccttctaacgatgtgacgtccaccactacatatatcacagtcacaccaccaacgacacaaacaaaccagagcagcacgaccaagccaggtcgcaacatctacgcagtcgatcaca

SEQ ID NO: 665035 - DNA, 207 bp, Homo sapiens
gtcctgttggtttttttgggttttttgtaactggggggcaaaagcaatttccctacccggggcattccttttttcatgttgggaaaagtttttcccttttttttttaaggggtgggggttgggggggtcagcatgattattttttaatgtaaaaaatgtgacttttggatataaaatgaaaataaatgtttaattaaagggccctta

SEQ ID NO: 665036 - DNA, 1044 bp, Homo sapiens
  misc_feature (224)..(224): n is a, c, g, or t
  misc_feature (293)..(293): n is a, c, g, or t
  misc_feature (305)..(305): n is a, c, g, or t
  misc_feature (325)..(325): n is a, c, g, or t
  misc_feature (743)..(743): n is a, c, g, or t
  misc_feature (749)..(749): n is a, c, g, or t
gagttaacggggacgctttagagaaacgcactcgcctctcctgttccggttgggtcggcgcgggcttctcaggcgccacgtgggattcggcccgggtgctcttgtgagctgctgctcctgcggttggtgagattacctgggtctagagtgcggagctgctccgtggccacgaggacgtcaccatgcccaaagcaccaaagggaaaaagtgcaggacgggaaaanaaaagtcatccatccatatagtagaaaagcagctcaaattacgagagaggcccacaaacaagaaaaaanggaccacatcgncagaatgaaaaggccttgcngtctcaaccttgttggtgaaaaactgcaatggtttcaaaatcatcttgatccccaaaaaaagagatattcaaagaaagatgctttgtgaactaattgaaaggtacttaaactcgattcatgcagtgatgctggatgcaggattgagttacttaagcagtatcagggacatggcagtgggagtgcgggcactgttcccgggagaccgtcatcaagcagacgatgtgagcgggagcggacagcatgtttgacgggatatggccttgagattccagacattctaaatgcagtaatctgaaaacatttagggaatgggactttgatctgaagaaattaccaaacattaatatgacgaaaaatttgcgctaatgatgcaattcccaagacgtgcaagaggaaaactattatactgtagaccanagattntgggggcaatgtggacctaaacggatgatcagtgatcagatgaggaaatgaatgcagggctaatagtcttcacttggattggaaataataattgggagtcaatatttttcttgattatggtcctaattgtctgcacacaaattgggacggattctttattgagagagtcttgggttaaaatgggtttgtacttttaaagggaaggtcattcctcatgtgaagtaattgtgggagtggtgtcatgaaagggggggacaagaaaaagggtgtgttgaccacatggtggacacacagg

SEQ ID NO: 665037 - DNA, 845 bp, Homo sapiens
  misc_feature (200)..(200): n is a, c, g, or t
  misc_feature (215)..(215): n is a, c, g, or t
  misc_feature (403)..(403): n is a, c, g, or t
tggttccggaaagcgctgacaaattagaatgtggatcggttggaagaactgaagaatgcaaaacatgaagagagtgattgaggcaaatcggagtggagctggtacagtactgtgaccagtgcttctatagccagggagcagaaacgatctttgggcccttgtctgtgctgaggactatgcagtaaagatctgcctctaangcagtccgactgtantgcgtgcagattgtgcggttaataaaatacttacttatgaaatgttcactagaggaggaagctcgttgtgaagagtgtccaggaaggttggtgagaggataatccgtgagagcgtcttgatcgtatcaggaaggtgtgtcgtaagagtaacaatgcattcatgaggcgcgaatgtccgcatgttacgnatcaccacgagcggagagaacactcctgttcttaacatagcataagcagattagacaaaccgtaggctcgataagcggtcccaggatagatatggcttgcgcccaaagcgttggtagacgtagaggacgattcgcacaggggcgacagaaatttgtagactttgggtcgcgggaaaacaagcgcaacaattgcgataaaagggctattgttactgtgtgaaatgggcatgaaatttcactagggatgtagtggttggcaggaaacaactagggaagagtagcatcgagttgcgagaaagagagtagtccaaagcaggaaagacgagtgaacgaacaacagaatggactgacgacagagatgctgtatggcatcgctccgtcgaacatcgtaacaagcgggtgagactggtgtcccattacaccgggcaaagctcgtatgctg

SEQ ID NO: 665038 - DNA, 234 bp, Homo sapiens
attcatcggggacctcgctattcatcggctacctcgctattcatcggcacctcgcctattcatcggcacctcgctatgcatcggcgcctcgctattcacccgtgtctgttcactgaccaagagtccacaatttgtcaaggattgaaaagtggggcagaagctctggcttcctctttaagtggtaatgcttcataccaacttatcccaaagtaacctgggtagtatttgtcgaag

SEQ ID NO: 665039 - DNA, 334 bp, Homo sapiens
  misc_feature (18)..(18): n is a, c, g, or t
  misc_feature (25)..(25): n is a, c, g, or t
  misc_feature (54)..(54): n is a, c, g, or t
  misc_feature (75)..(75): n is a, c, g, or t
aatcaacaacagaaattnatttctnacaattctggaggctgggaagtccaagancaaggtgcttacagatttgtnttctggtgaggacccacttcctggttcgtggatgtttgtcttctccctttcacatggcagaaggggtgatggagctctctgggtctctttatataagggcactaatcccattcatgagcgctgttactctcctgacctatcacttaccaaaagccccacctccaaataccatcacattggaaatgaggatttcaacattaggaattctgggggcacacaaaccattcagtctactgcagacattaaatagggatctagg

SEQ ID NO: 665040 - DNA, 777 bp, Homo sapiens
  misc_feature (130)..(130): n is a, c, g, or t
tggaacacaataccatttatttttgatacacaagacaaacatatttgaaaggtacatccagaagtgttcaacatggaaatttccttacccttctgtggtgtcatggcttaatgtgtgtcttcccagaacntttgaaatgttggcatacctgggtggatgtaccttctcaacatatggttgggtctgggtgtactcactatattaaatggtcattggtgcttcaaaaaacacaacaaacaaacacagagcaaaccaagccagcagcaccacaacaaacaaagaggcgggcgcgcccgaagacaatatccccccaggaggaagccccacacaacacgcacccccaccccccgagacgttgctaggcaaacaacagaggaccaccccatcagatgtggcaccctcctaacaacgacaacaccagacacaggagccactgcactaaaacaagcccctcgacagcgcgcaaaacagcgaaacgaggcagacacaaatcggagaagaacaacccaaaaaagggcggaggcaaacaccacagggcaaccaaaacaccgatgcgaagatatacacaacgctcaaaacgcgacaactaatacacgatatacaaggccataaaaccacgcgtcgtacacaacagcgcgagtatgactgcacccaggcgcaacgaagaagtagatgcagcgagagaaaatagactcacccaagaacagcagcaccctcccaccgccgccgctccctagaaaacacacgccgtcccccctcccaccccccactaccccg

SEQ ID NO: 665041 - DNA, 162 bp, Homo sapiens
gagtgtcccccaaaattcagaataataacacacccgagcgccatgagtgtcgcccggccatgatactggggtactgggacatccgcgggctggcccacgccatccgcctgctcctggaatacacagactcaagctatgaggaaaagaagtacacgatgggag

SEQ ID NO: 665042 - DNA, 897 bp, Homo sapiens
  misc_feature (190)..(190): n is a, c, g, or t
  misc_feature (715)..(715): n is a, c, g, or t
ggcagatcgggagtcccgagggtctgtctcttgacttcaatcagtgtttggacggaacagatcgtggggactctcttccgatgccttccgagcgcaccctcacgaatttctctcatcaggcattgtcgagatgcgtccggagacctagtccttactcgagcacaatcttttcatgcttctggtgatctgnactagcaccgtcttggtgtggctattagctccattactgtgctagaagcgagacacatgaggctccgctagaattcagtcgagatattatgtccaccggaacgtggaggtgaggcgtcgttacagaccttggtcgaattagtactctcgcaaggtctccgtacacctaccgtactctcgtggtggtttctattctcagaggcagcagatggattgttggctcatagggagaggcagtggagccgacctgtctgtgcacgggaattgtggtcctgacgtgaggaaagcgcgaagggtctacgatgccgtcatcctgattaagattgcaaaataccaagctgtgggggagccagcgacctcatccatttcactagtgtaccaattctagacgaaaagacgccaagcctggaaagacttgtagatggggagttaacaaacccgctcgaggaactggccatttgaaaacggtctggggctattggtccattgggatgaatagaattgctgaaaccgagggcgcctttanggagtcttgaatcgtccccctgggtgattctttgccactgggaatgggatcctcaccaattgctttgctgtggaactttaccctagtgaaggacgttccacagtttcctgaaggaattaaatggataagttgaaaaagcttttatccagacgaaagcattggggtggggaccaacccattga

SEQ ID NO: 665043 - DNA, 1064 bp, Homo sapiens
  misc_feature (329)..(329): n is a, c, g, or t
  misc_feature (441)..(441): n is a, c, g, or t
gggagcgacggagatctcgccgggttcacgttcacgctcgtgtggtgtgcgagcacgccttccggttcctcatccgtaggcgaggagacctcgagttggctagaaagttcagcgatgatcatatgtctcaacggatccatgcgctaagggaaggatcgttgtgacctcatcgtcggggaatcccgacgtgtatgaggtttgatctgcttcaccatcaaaaggtctcgtatcactagtctgcctggtgccccagttcgggtgacttcatacctggtgtatgctactgagcgaccgctagaagtctgccgggtagcaactggagtaagaanctcgcctagtactggggcaagggctgtactcaacagggcgtgtagtagcaacattcactgtatacaactattcgcagcctagcaccatcggggtggagctacacgcacacanctgaaacagtctacggagatacccaatgacgaaagcattggtacgaaaactggatatggatcgagcataaggcatcgtggacaggacacacattagaatctaaaacgtttgggggttgcgggaagcgtcgccactttgctagggggcgttgtccactttgacgcgtcatggacaataggcatggtggcccgtttgacgaacggcgggtcgcccctgttaccggacagcattcgcgtgacttgtggggtggggacaaactacttgaagtccatcctggccagtcccgggcggtccaagtggtccatcaataggcggtgctcaatgctgggcgaacaagctggccatggcaggagttccatgatcctgccagtcgggtgcaggccaacttcagggaagccatgcgcttgggagcagaggtttaccagaagcctgaagaaatgtccttccacgaggacactatggcgaaagatggcagccaaatgggggggcatgaagcgggttttgggtacacaaattccggagacttaagaaggccgggagtgctgagctgctagggaaagcccggccaccggataggggcacggctggactaggccccaactacagtgggacttacggctagg

SEQ ID NO: 665044 - DNA, 270 bp, Homo sapiens
gagatccgaagccacgatggtatccaggtaaggtacagtgaggcatctcccaggcggtcagtgtgcacgtagtgtcgcttctgaacataagagcaggtcctcgagtgcggtcgtgcagtgacagtcgggggtgcagcatgagggagatggggtaggtcgagttgcgggagatggggtaggtggagttgacgggaactgagcagggcacagtcacatcctgtctgggattcgtgtagtgcttcacgtggcatgtcacggacttgcggtcta

SEQ ID NO: 665045 - DNA, 302 bp, Homo sapiens
gactatcggagctgacgttgccagatattatccgttcaccgcgattcaggcgcctgaccgacatagtgccaccgatggacggggatattgtgctggtatcgcctgctccatcgcatttgcacctagatgatcgcagcaatgggcgactttgtgcatgcccatacagggttacgccgcgtagtgcatggccctgcatttcccgactggcaaattctcgatcgctaggcgtagtagtgagaggttggagtggcgacactggttttgaccgcgtagggcaccggcgaattggcgagcccgtcggc

SEQ ID NO: 665046 - DNA, 1609 bp, Homo sapiens
  misc_feature (423)..(423): n is a, c, g, or t
  misc_feature (810)..(810): n is a, c, g, or t
  misc_feature (814)..(814): n is a, c, g, or t
  misc_feature (821)..(821): n is a, c, g, or t
  misc_feature (872)..(872): n is a, c, g, or t
ctccagctaaagccgagagaagccaagtgcaggatgagcaagttccaggcagtgggaacagcctgtgcaagctctgaggtggccacgggctggcacatggaacggagggcagagggactggtgcagcaggaggggggacggcgggaaaacaggagcctggagggagagggaggagacggtccgcagtgcctgctggctgggagggatgcagattctgcccaagggagcaaagtaccccacgcaatacacaggctcttcatgctggtgctggtttttcattttttctgacacagagtctcactctgttgcccaggctggagtgcaatggccagatcttggctcactgcagcctccgcctcctgggttcaagcgattctcctgcctcagcctcctgagtagctgggactataggcgtgcaccgcnatgcccagctaatttttttatttttagtagagatgggttttgccatgttggctaggctggtcttgaactcctgaccttaggtgatccgtccacctcagcctcccaaagacctgggattacaggtgtgagccagtgcacccagccttgtgctgggttttaaagcagctctccctatatctcatgcttcaccacctaccagagtgaggctcagggtgaaactcagagcaaggtgcaagacaacttcaggtatctccatgctcgaagccctgacctactgtattgccccgaaagtcttccctgctgtggctgcatcttttccacgtggataatcttggttcacctctagcacaggaattcttttccggggctcctaggatgggctgggtnggtnggagtgnaggatgtctgcctcccctgagtttgtatggaaaaggtattcttttggtgcncttctttctgggagggagtctattgctttgtcttttcagaagggctcatggcccttcgaaggtgaagacccaggatgcagggtgatctgcacttggccctcaaggccaaggtcaggctgtggctgggccgggtggtgatcctggctctcacctgcatgcagatgcacttgagtccaaaccccaccctgggcaaagcaagggcccatttaggtctagaagagacaggagtgggcaggacaggcctcatgaatgcaaaaaagaaagtctctgagcatctaccaaatgctagaagctgtcttgcacctgtcatctctgtttttgctgtggatggtttaaaaaactttccctagattcccccctctcatgcagatttttgtatattctgatgtctttgtctaagtcttagaaaatgaaagagctggagccgtcggaggtgcccacacccacctgcagtgctgactcaatggttttgttctttgaacaggggtgtttttaaagggtacaagcacacctgcggttcttctctcaggtcttccggagagattcaggaggcagagtcatgagtcccagggactctgggattcttaccttctgcaaaatatcccgccgcagctcagaatctgatgagtctcttaactttgcttctaagctctgtgtggaggggagagagagaaatctcaagggtgcattcacaagaacattaaacacgcaatagaatgtgttggcaaaaaaaaaaa

SEQ ID NO: 665047 - DNA, 328 bp, Homo sapiens
  misc_feature (181)..(181): n is a, c, g, or t
agtcagaggaagaacatccaagtgagagcaggggtggggtggggtacttctaggagtccttggagaaaagtaagaaaccaggagtgtttccagttccaccctttcctgcggcaccacctccctttttatattgctgaatgccaacctccctggggcggaacctggaggtcctgtttcttanggacttggttgccacagtccaggagcatttgaaggcacagtgcaggggctcagattggcacagaattctttgtgaaatatgagtgccacagactgtaacagatagcttcatgcacactatgcattttattggtttgtttggaaaatg

SEQ ID NO: 665048 - DNA, 505 bp, Homo sapiens
ttgctcacaaacccattgacattatcaatatgatcagcaacggcgactcaatcgtcagagcgatcaaccccattgcataatgtgttcagaatgtcctatctagctatccatgtgaagatattggcttcgccaccataggcatcaaagtgctccaaatgtccacttgcaacttctactaaaggaaggttcaaaaatactcaatcaaaagaatgtttaactctgtgagatgaatgccacatcataaagaagtatctcagatgttgcttatctagatttttatgtgaaaatatttcctttgtctaacttaggctgcaaagtcctccaaatgtccacttgcagattctacaaaaagagtgtttccaacactgctcaatcaaagaaacattcacctctgtgagatgaacgcacacatcacaaagatgtttctcagaggttctactatctaattatatgtgaagatattcctttatccaccattgttcctcaaagcactccaaactgtcca

SEQ ID NO: 665049 - DNA, 301 bp, Homo sapiens
ttcctcctgctgaggacccagcagaatgatgcagcgtgcccaggactttcagcagagtcagtcagagatgcagccaccgatgatgcctgggctgcctcaatgtgcaggtcttcctcccatgaaacctgtggaccagtgactgcgttcccctcagcaccaggtaccaggtgagccagagcgctgagggggcagcacactgcagtgcaggcccacttgtgcgctcattcttgcccctggaggtgcatctagcctgaggaatgccagctgggtctgggaagggggcacagtggatttgcgggga

SEQ ID NO: 665050 - DNA, 144 bp, Homo sapiens
agctgttctagaggatacccacgaaggaccacaaaactaatctagtcaggttctcaggcaggcagttctgcttcagattagagcagaacccataaaatactcaagtcctgggatatgggctatcagtggtacctgagctcgaat

SEQ ID NO: 665051 - DNA, 291 bp, Homo sapiens
ataaagagagtaatactagtaagtagagtcagaaggaagtacaaagtaacagcaatatcagagaacagcccacatagagaaaacgatgcaaagaaaatgaggtacaggatcacaaaaagtggtataagaacacctgatactagcagtaatacccaactgattctacacagtactataagagcacatatggtatacacatctcaattaaattcacacagcaattctatgtgagatagaaagttaacatccttatctaaataacgagccagaggctcataaatgtaaaatgtg

SEQ ID NO: 665052 - DNA, 421 bp, Homo sapiens
cagactacctgataaaggacatggtcgagcccttaccagtcccaaatgtataagaggtgacacttgcgaatattgtcaacacaaagaaacactcatagtcggccccagtcaaaggcggcaccatgaccgacctggatgaacaggaagatgaaagcctggttacgacggtcaaggatgaggatgagaacagtacggggaacaagggagagctgaccagaaatccagacctgcatgaggacaatgtgactgaacagacccaccacatgatcattcccagctacgctgcctgtttggactacaataatgttcatgcaattgatcggagggttttaccatattttttgaacggcaagaacaagtccaagattccagagaactacctggcctatcgaaactatatgattgacacttaccgactgaa

SEQ ID NO: 665053 - DNA, 251 bp, Homo sapiens
gaatcagctcggtaccctctataggcgaaagtgctaggatttcgcattagccagtgtgccaggtctccatatttgtgctctttatgacatcttcccaggagataatggtgtggtccctacagagggaatgtgttggggacagctccttaaaagatctcttacgtggttttcactgctaatatttatgactaaatataaaatctctaagctttatcatgggaatttgtagatgtatcttcggccttatcgag

SEQ ID NO: 665054 - DNA, 307 bp, Homo sapiens
tttgagcttgcagtgcagcgaagatcgctccactgcgctccagcctgagcgacaaagcgataccttgtctgaaagcgataagaaaaaaagatagagctaagctggacgagcgaggaaaatgggtagggatagaatataggcggactataatttgcccacggaaggtgcccttatttcctcacctttcactgctctggcggcgctcctgacgctagaccttccggcgcccctctttcttacaggtcctttaaggcaagtcaggttttccacctctctaaaaagctcttattgcccaggctgtatgtgt

SEQ ID NO: 665055 - DNA, 618 bp, Homo sapiens
  misc_feature (561)..(561): n is a, c, g, or t
ggttattgcattgttttctgtatcggtactcaagttggcttctgtgtccttttgagaaatccctagcagttttttttttcttttgagacggagtctcactccgttgcccaggctggagtgcagtggtgcaatctcagctcactgcaagctctgcctcccgggttcacgcgattctcctgcctcagcctcccgagtagctgggactacaggcgcccgccaccatgctcggctaatttttgtatttttttggtagtagagacggggtttcaccgtgttagccaggatggtctcaatctcctgacctcgtgatctgtccgccttggcctcccaaaggttggggattacagacgtgagccaccgacccagccgatattgttttattttaatcaaggcaaaactgtattgtaaatactgcttgaatttatactttattttttttttttttggagaaggggggctctacactcttttcgaccccagttggaagttgcccgggggggtataatcatagctcactacagcctacaaacttccggggcccaagtgatcttcccacttaanccccaagtagctgggaccaccggtcctgtgcaacaatccggcctattaaaccaaatt

SEQ ID NO: 665056 - DNA, 121 bp, Homo sapiens
taaatcagctcggtacccggtgcgttggcccaacacggtgcgttggcccaacacgtgtcgttggcccaacacggtgcgttggcccaacacggtgcgttggcccaaccggtgcgttggccca

SEQ ID NO: 665057 - DNA, 115 bp, Homo sapiens
cccccccccccccccccggggggggggggttccccccccggggggggcccttcccccggtttttcccgtttgggtttttttttttggggttttttttaaatttttcccggtttta

SEQ ID NO: 665058 - DNA, 158 bp, Homo sapiens
agaatttggatgatgctgaattattatgcagactaattccacccagttgagacacaccaagcttgttcacttgtatttattgaaactggggattcttggccggtgctgtcccctgtatttactttaaggcactggatcacttatcattctatgggtgt

SEQ ID NO: 665059 - DNA, 203 bp, Homo sapiens
accggatacactgctatgacagaatgtgcagtctgtcattcccgcctaccggttctccgtgagcaacgatcatgccattggaatagtagacagcgggataattaagaggacacacgggatcttcacacactgggcagcactcatcgttcgggccacgtagtacctctcgccagtagatctacaccacactgggcgagtgaagc

SEQ ID NO: 665060 - DNA, 358 bp, Homo sapiens
  misc_feature (302)..(302): n is a, c, g, or t
  misc_feature (322)..(322): n is a, c, g, or t
  misc_feature (332)..(332): n is a, c, g, or t
tcttagaaggaagaccagttaaagttgttcaaaagggtccatagagaagccttaaaagtatgaatttagggccgggtgtgaatgctcacgcctttgatcccagcactttgggaagtcaaggcgggcagatcacctgaggtcaggagttcgagaccagcctgaccaacatggtgaaatctcacactactgaaaatacaaaaattagttgggcacagtggcgcatgtctgtagtcccagctgctcgggaggctgaggcgggagaatcacttgaacctggaaggcgggggttgcagtgggctganattgtgccattgcactccancctgggcaanaagtgcaaaactccatctcaaaaaac

SEQ ID NO: 665061 - DNA, 416 bp, Homo sapiens
cagaacagctaagaagctaatttaagaatggccagcccctgaaagatgtaggcaaccttttgcagaatgataaatgggatccaggactggactgtgtttgaaaggcatcaactgaatgtggatgttaatgacctggactgtcagggtccccctttacctcccagagcctcagagcccccaagacaaaataattttgaatactgttccatggggggaatttactaattcaaaaagcccgcctgggccaattttcaggtttttatgtaaataagtattagttaacctggtgcaaaatgatttggcaaacaaaagcatttgggacgtttttgaacaaagaaccctttggaaaaattttttgggggacatgattgatagaaacatgctatctttagtaaatttaaaattttgaaacccca

SEQ ID NO: 665062 - DNA, 123 bp, Homo sapiens
gatcttctacttatccttttttcctccctcttaaactttaattttgatacatttgggagtgaaatgatgacaataaatgcaaagtaattattgaagaaacagtaattttgtattagcttactg

SEQ ID NO: 665063 - DNA, 135 bp, Homo sapiens
ggctgaaacgatgcacgtgactggcacaatttccagaaaacagatactggcggcaacccccaatcccactgtgggtcacgatgactttgaggaggtggtatgcattgggtcagtggccgaacttgaagcacctgt

SEQ ID NO: 665064 - DNA, 131 bp, Homo sapiens
tgttgagccatatgacgtaagtcgtggaagcctgtgctactaaaaatgttgagctgtagatccgtcgacaatggtgaagggatgactcgcaagtaaccctgaggcttgtaggggggtaaaatagagcccca

SEQ ID NO: 665065 - DNA, 128 bp, Homo sapiens
  misc_feature (77)..(77): n is a, c, g, or t
gcccagaccgagagacacagtgatgacctcagcctagggtggggccatctaccctccctgcaactgggagtgtcgantggccccacccagaccgagagacacagtgatgacctcagcctagggacacc

SEQ ID NO: 665066 - DNA, 285 bp, Homo sapiens
aaataaacataatggtttcggtatagtaatgcaaattacgtgtatcaacgaaggatacggcacataaaaatgacacctcatattggattcccggattttgtaaggtacaatagagcatataaaaaatcgctaattactctcaatacttaccgattaaaataagaggttatgtattaatgacctaactgggttatttcgaaaagtttttctttgcaagtggatgtggcagcgaaaactttttttctttatttaaccaaattatggtttttttttttttttttgtgt

SEQ ID NO: 665067 - DNA, 897 bp, Homo sapiens
gagagaagaccctagatgaagttggaaaagagctctggctgactccacccactgtccccaagcattaaaggttgtggccatgagtttacagaattacccacattccagttgccagctgggatgaaaagcttgtgctcagagctctgggaatcatgggatcacatggttactgtttagcccaacagcatgctctgtctagactggacctcccagccccttgtgttgagaaggctaagtttttgtggagtcgaggtgggagactgagaaatgatgaattaaccctgtgttgtcatcctcatgacattcctgaggtaattcagcaggttagaagtgaggacgtctagtctttgtgatgcataatttcctcatcttgtgacatgggccatccagatccaactccccttgaaatacaggggcaggaaaggaggctgaggtgcttggtggtgtctcccattcccctggtctaatttcagaccgggctgtggatcaaggtggattttacttgggatcaacttgtccttttatgccttgaaattaattgtagagaagtcatcaaagtcctgtgatttggctagcgcataggtgtcttatggagatctcttctagggcggtatattactagattagcctgctgagggatgtcacaggtttctattcgggattacagcctcggtagagtagaccacgcgggacgccccttgtcgtgtcttgacccagtctgcgggaaggcggggggggcgcaacagtggcgggattgcggcaaggggggcccgtgaggggaggccccgcgtcgtagaaaaagggtgtggggaaaaccccatgttttcttgtcgggagaattgacaaaatcgggaaaaaaaaaagatggccaacaacaatgttgtccaacaaacgtgt

SEQ ID NO: 665068 - DNA, 343 bp, Homo sapiens
  misc_feature (5)..(5): n is a, c, g, or t
agctngaggagatgatgaggaggacataaagaggtgaggaggaagtaggataataggacaggtcacggagctcctggaggctgaacagggcggtagtgcgtgatactctggtaggcactgtcccggccgtacattgggcgttccctacccttgcactcctcttcagaagaagacaaaagatcgtcatcatgcacctggtgatggaaagcgtcagcatctgggaatgaagtcactgactggcggacagccctggacgggccggcagactcgggctccccataagtcctggtggtgaagtagctctcttcatagtagtcgtcattgtagccattgcactccggcc

SEQ ID NO: 665069 - DNA, 1011 bp, Homo sapiens
gcgcttccgccggtggccttcctgtgggcgggagagggcggcgggagcccaatgagggagcaataacgtggcaaccacccacgagcccgcgtcggtgcccgccccgcagggggacctactatccggcgccgagccggaggggggaaacggcgcccgctgccgccggagctcgagcaacagtccatcccgcgcgtggcgtgcgccggctcgctatggcagcgcggcccaccctctttcggcctcagctgtccggggtgctttcagcctccgctgtggatgctgcggccgtctatcgaacgccacatgaaggtgctccgttgctcgcgcgctcatcgcggggtccggcgttcttcctgtgcttggcgggccccttctgcggccgatgaggaagaaggaaggggccctaagtcaccgttgcaaggtgtattttgagataggaatgggcagatgaagaatgtaggcagggtgatatttggtctcttcggaaagatgttcgagaaacagggataattatgtgggacttagtacgggagagaaggagttggtaaaagagggagaaaatcatggggtaaatggaggagtacatgatcacaggcggagattcacaggggacgatggacaggcggaaagcagcatctacggtgagtgggtacccggatggagaacttgcacccggaagcaatagggggccctggctgggttggagcagggcgccggcggggacacgagagaccgagcgggcgaccgagatgttatggcaggggcggacgcacagccggggcggcacgtgcacgacatggagtgtgggccagggccaaaaggccggaagggagcgcgcgcggtggacagcagaggagacagagggaacaccggggggggacactaaccgcgactcggagggcgacaccagcagagagggaggaagcaaaaaacgacgaggggaaggcagcaacacagcgcgagaggcgcgaggcgagcagcgacggacgagggaggaagacggcaaagagg

SEQ ID NO: 665070 - DNA, 339 bp, Homo sapiens
agcccagaatatcctgtggtacagaaagaaagagaagagaagagaaagagacagagaataatgaggacatatcagaaggacacagacagtaatcccagcactttgggaggccaaggcgggtggatcacctgaggtcaggagttcaagaccggccaacatggtgaaaccttctctctactaaaaataaaaaaattagccgggcgtggtggcacacatctgcagtcccagctaccggggaggctgaggcgggagaatcacttgaacccaggaggcagaggttgcagtgagccgagagctcgctactgcactccaggcctggacagagtgagaccctgtctc

SEQ ID NO: 665071 - DNA, 538 bp, Homo sapiens
aagttgaatctgcaaatacggggagtcctgttgatgttgccagtaaaattagcaggtgttctggtcctgtggccatctgcctagtaaagctttttgcatgaaccttctatgaatgttactgttttatttttagaaatgtcagttgctgcgtccccagacttttgatttgcactatgagcctataggccagcctaccctgtggtagattgtcgcttatcttgtaagaaaaacaaatctcttaaattaccacttttaaataataatactgagattgtatctgtaagaaggatttaaagagaagctatattagttttttaattggtattttaatttttatatattcaggagagaaagatgtgattgatattgttaatttagacgagtctgaagctctcgatttcctatcagtaacagcatctaagaggttttgctcagtggaataaacatgtttcagcagtgttggctgtattttcccactttcagtaaatcgttgtcaacagttccttttaaatgcaaataaataaattctaaaaattca

SEQ ID NO: 665072 - DNA, 453 bp, Homo sapiens
gtgtctccgctgtgtgtctagtgtcctacatctcctcttcttcttaagtgtcttattctcatctcagtgctgctgtcacagtaataccagaggctgtgcgcggttataaacaaaacacattgattctcccacagtcctggaggctggaggtctgagatccaggtgtgggcaaggctggttcctcctgaggcccctctcctgggcttggagacgccgtcttctccctgtgtcctcacagggtcgtccctctgtgtgtgtctgtgtcctcatgtcctcttcttatgagatgtcttagtccatatcaggctgttgtcacagaataccagaggctgggcggctaagaaacaaaacactttgattctcccacagcccatggaggctggaggtctgagatccaggtgtgggcagggctggttcctcctgaggcccttctcctgggctagaagaccccgt

SEQ ID NO: 665073 - DNA, 117 bp, Homo sapiens
accacccatcaacactattatgtccctcatcctcaccaccactaccaacaagcacatctatcacagcatgacctctaccaccattgtccctgtcaccctctccgttgcccttacctc

SEQ ID NO: 665074 - DNA, 613 bp, Homo sapiens
tggccggtccgtactgcgcgggatatgtaccgtaagcgaaatgataaattatacctaagcataattatatccatggactaacccctataccttctgcatatgaattaactagaaataactttgcaaggagagctacagctaggtacccccgtataaccagacgagctacttatgaacagctatgatagcacacccgtctatgtagcataatagtgcgaagatttataggctagaggcgacaaccctaccgagcctgcttattcctggctgcttgtctatataatcttagttcaactttaaatttgcccacagaaccctctaaacccccttgtaaatttaactgttagtccaaggaggaacagctctttggacactaggaaaaaaccttgtagagagagtaaaaaatttaacacccatagtaggcctaaaagcagccaccaattaagaaagcgttcaagctcaacacccactacctaaaaaatcccaaacatataactgaactcctcacacccaattggaccaatctatcaccctatagaagaactaatgttagtataagtaacatgaaaacattctcctccgcataagcctgcgtcagatttaaacactgaac

SEQ ID NO: 665075 - DNA, 122 bp, Homo sapiens
gaccggcttgatatgggccgtttgacatcgccgtatcgcttgatcagctgaaacgtctttcgcgtccgtcgcccgcgcccaacgcctgatccgtcggcgccgccacgccgcccggcctgcag

SEQ ID NO: 665076 - DNA, 919 bp, Homo sapiens
agcggaatggcttgaaccaggaggtggaggttgcagtgagccaagattgtgccactgtacaccagcctgggtgacagagcaagactcttatctcaaaaaaaaaaaaaaaaatgctccagggcttaaatgaaaagtaaaatttctaagttaataaagatgaaaaaggggtgactatttagtgattgaacaataacttaaaggtgtcttattaaagcaacgtgagtgtctagccctaaatttaaccagggtaaaaacgggttaacactaaccgtgaagtttgggtgaaataacgtgtctctttaacttatggagatgttgcaagaaagtgcacattccagggggacggggagctatgaaatgtgactaaatttcctccttgcaggtgtttaccttcaagatggtataggtattctctcctcttcttcccccagtccccattacttattggcacactgtgttttaactggactcccggtttggatatttatcaccaagaccataaactcatcaatatgaatttctggatgtatactcacgacggtcttggatttatgtccctaaaattttttagatagggtatgtgttgctttggccagaattctttggggctaaatttttacttcctttccccaagcttgcttgagtcttccttaaccgtggttttctcttaacaccaatgatgaaccctgagaaaaatgcctgcattgtggagcttggcctagaacaggagctgagtatttaagatgtttttactcctcggggtcacccttgaaaattatgtgttcccctaaaattcttctggtattccacaaggcctttttaattggtcaagcaattttcttttcactgttaccctttagatatttctatggattaccctgggtccacaccgtggagagacacttcggagcaacaccgg

SEQ ID NO: 665077 - DNA, 286 bp, Homo sapiens
ctttagagatccccgctcacaattgcggcctgttgcaacctcacttcttgctccctcagaatgcagaattccacttaggggtcataacgcagattagatacctggtccgtttcatatcaggagtgatactctattaatccgttttaagtatcttgctgaggcttgacaatggcgtgacaccttggatgtggtgcttgcgtttgccgagtattgcgccactgcattctggcctgtgcgaaatagcgagactccttctcgcacaaagacaaaaaagagccccgaaaaa

SEQ ID NO: 665078 - DNA, 167 bp, Homo sapiens
taggcaaaggagtgtcagccacataaggccgaagcagaaaaggatggagtgaaggtccccacaaccctggcaggaatactgccatcaaaactcaaagtgccttccaaatgcacaacagctcagcatttgctattacgcacgacttgtatgcatgcacgcacattgca

SEQ ID NO: 665079 - DNA, 168 bp, Homo sapiens
ggtgatctagaggatccgtggggctccatcaggcacgcaactcctcagctcatggaggtctccttccatcttcttcttcacccgtcagggcctcgctggcagacctcccgggacgcagagacacgcagccgcaacgaggcctgtgaagggagcccaaagggtaccgag

SEQ ID NO: 665080 - DNA, 577 bp, Homo sapiens
gctccagaatatcctggtcacctctacttccaaaaacagttaaaatctggtttactcggtctccactcttcctcacggtcatggccatgggactactctgataacctccttatggatctttctgtttctactactaccccaattttgggccttttccccatttctaactgcatcattaatatcctctttctggcttactaaatgtgctgatccagcacatttagtcagtacgccacagggcatttattgcccacagtaacagggctgttggacagtggcagaagaggccgggactaaggtaatttggtgctgagagggggaaagaagcacaaggttgggtcggtggcgtaatggaattttaaacactcttatccacaacaaacactttttggtgtccggtggtgtaaaagacatcagatatatcacggatttccaaacaggtgagcatccttttaacgagcggggcaggtggggagtgtcgtgctatggatggagtgaggagatttggttgaacgaacgctaagatggccagacgcacctcttcgatctcaattctgcagcctgggatccaaagctg

SEQ ID NO: 665081 - DNA, 200 bp, Homo sapiens
ggtagatttgttactgcaggtagcacacaccttcaatatgactctgtctcaaaaaattatataaataaataataaaaatgtgttttacacaaaagatgaaagaatatgcctactggtagagctaggcgctaaggtgctggcagttttacccaccatgccaaagtgtccttctgaactgctccccaaggtaatgctcagat

SEQ ID NO: 665082 - DNA, 245 bp, Homo sapiens
gtatataacttaacctgacgtaacgcattcacagctgcatcataatcctctctcaaggatgacataccctactcccactattagtggatcctgtatctccaccctgccatcatgcagctttggacctgatcgcggaagtacaaccatgttctcatctctccaataacataggcttttaaaccatatcccaatttgacttaagatatgagtttatcaataatatctacatcaatagtttatgctgt

SEQ ID NO: 665083 - DNA, 1092 bp, Homo sapiens
  misc_feature (398)..(398): n is a, c, g, or t
  misc_feature (435)..(436): n is a, c, g, or t
  misc_feature (523)..(523): n is a, c, g, or t
  misc_feature (558)..(558): n is a, c, g, or t
  misc_feature (576)..(576): n is a, c, g, or t
  misc_feature (620)..(620): n is a, c, g, or t
  misc_feature (667)..(667): n is a, c, g, or t
  misc_feature (671)..(671): n is a, c, g, or t
cggacgcgtgggtttgccgccagaacacaggtgtcgtgaacactacccctaaaagccaagaatgggaaacggagaaagactcatatcaaccattgtacgtcattggaccacgtagattcgcggacatagtccaccacctagctgtgccattctgtatctatacacatgccggctggccactcgagcaaatgagaagccacattgataacacattgtgttgacgacagtgatggcctgcctgagaactgtgtgaatatgcggcatcctatcaagatagtgcccgtgagagctccttgggcatacaatcctgataaccgactgtaggcgtagagactgttgcggtatcacgcagtgtgactagttctcacttgctcagagacattattgatcgaccgcangctagaaagtagcttgacgtgctgatcttagtacacnnttgatctgtccctcgagggacctaccaatgaacgatctccttattgcagagaaagaccactgtacttagcaagggtggtacgagtcntcaagggcagtgagcataggtgcttgtgtccttcnatgttgctccgcatcgcntcggatgctgtggctcgggaatgtctgagagcgtgcgtagtcantcacatagcaagtaggcgctgagacactccgaagagctgaatgcccnttcntagggcgttaagcagcagctgtggtagtagagaagcgaagccttaatatgtacgggtagttctcaactacataacatgggatctaccgactggagtcacacgcctaacagtcgcagaaagcaggattatcgacggaacattccttgaagggaaggtcatgcactgtacattcaaggaacaattgggcgtacaaatccccgacacagatacgcactttggtgtccaagttgcctggttcggaatcggtgacgaacatgcatggagcccaagtgctaacatgcctgtggtgtcaagggcatggaagagtcacccgtaaggattggccaatgccagtggaaccacgctgcgttgagggctctgggactggattcctacaccaactccgtccaagatgaacaaggccttggcgccttgcctctac

SEQ ID NO: 665084 - DNA, 315 bp, Homo sapiens
gcagggtacaaggacctctatggacggattaagaggcaactgcccctcaggaatgtgatgtgctctgtgtgatcagtatatccatgaatctaaatggggagggggtgagagcacagaggagctttacagaaggaagcacacttcatccagcacaaagctgtcccctgtatcactcaaccactgtcatcctctaaagttctacgttcactgacataactcaactatccactcctctggcttttagcaaatcacatatcatgagtagccttgtgcgttgtggacaataactgcgttgtatgaacgatacgcgactta

SEQ ID NO: 665085 - DNA, 320 bp, Homo sapiens
tggatatttatcccttatcccttggcagatatatgatttgcaaatatttcctccaattccacaggttgccttttcattttgttgcttgttcctttgctgtatagaagctttttagtttgatgcagtcttatttgttcatttttgctttagttgcttgtgcttttggtgttatagcaaaaaaaaaaaaaatcattgccaagaccattgtcggggaactttctctcaacattttcttctaggaggtttatagtttcagttcctacagttaagtctttaatccattttgaggtaattgttttgggggatcatatgtcagtttt

SEQ ID NO: 665086 - DNA, 887 bp, Homo sapiens
cctccgggtttgaccaccgtttttgtcggggtttcgaccccgcatttatggcgttttgaggtgcgccctctagtgggtgtgccccgcgcctgttgcgtcagccctcctttgggggtcgcttcctcctcccccccgcatgttgggacactctttgcgcgccacgtagtctggtccccgcccctgtggtctcagcccctctgggccccccctcgcggctgttctcctcccccggagctccccgtgtccctcgccttttgcctcccgcaaatcgtgcttgtcgtcaggttgcataccagggttgcctcctgttcaggcgccgcactactcccccccaatgccttgcgtcgagtgtagctgcggagaagtcctgtcccccccgtgtgccattgggggggcgcgcctcggcccctgactcctgtcttcaccccgtgactgcaagacgtgttgcggtgcccttgctcggtcctcgccgcggcgggctggcccccccgtcggcgtgactctgcacgtctgttggagtcagtggtcctggcccggtgtccccaggcccctcttcgagggcgtcacaggtggtacccgttctcgccctttgctcacacccgtggtgccatctgacccctcttctcggacgggcgagaggtcgatctccctgctctcacggggggcccccccctccttcgtcggtgtgcggtctgcggcaccccctctctcgcggggagttacccggtcgacgctgtgtttcttggtgcttgcttccccctctcgtctcccggtgggtcccccctacaattcttccgctctgtttgtggggcgccgagtagtcagacatggctacctttgtgccccaggcaaaaaagtcaccatcccccggcggtccccacatgacg

SEQ ID NO: 665087 - DNA, 140 bp, Homo sapiens
  misc_feature (52)..(52): n is a, c, g, or t
gcatcctcgagcatgaccgaagcatgcatgcatgcgctgcaggacgacgtgnaacaacgactgcgctgcaggcctacctgtggggctccgtcgacacgtgagcaccgtgctgccctccaaatatcgttaagctggagcct

SEQ ID NO: 665088 - DNA, 788 bp, Homo sapiens
  misc_feature (92)..(92): n is a, c, g, or t
  misc_feature (199)..(199): n is a, c, g, or t
  misc_feature (320)..(320): n is a, c, g, or t
  misc_feature (560)..(560): n is a, c, g, or t
  misc_feature (581)..(581): n is a, c, g, or t
cattggtccgagagattagagcaataaatacattcagtcatttatttataaatgaatgacagaatattcaatccaaatagaaacaacctttngtcagtgatgcaacataacatggagtcttatattgagaaagtgaatatgaatattttaaatagatgcctaggaaatctgtgtttgctgtttacatttaatgtacttngccacattagcagtaccacacttcttttactttcatccttctaagaactaatgaaagatagcttgctattagctttgacatgttgcacatgccattatgttgttctctaagaacaactaanttctctccagtgttcatgtgtgattcctttttcatcattattactttaatgtggatgaatactatttctaggaacttgattatcactgaacagattgcatatgtaaatgcagataattcttgagcaatatagtgaaaatgatttcacacacagtttgaaatctcatattacacaggggtaaatttttaacattaggacattagctggctggttctataaatgtcctgtattgtctgctgnttcctttgtggagatgtgtcnccgttcggcatgttgggccaaggggaggctccaactacacatattatcccacttaactatctttacctatgacaaacccagacagctccactatgtatagaactggccgtcgccgtcattgcaccggttcaggtggcatcttgggccttacaattcgttcccgtcacacaacccaggggccgacaaccaatgagacacagacgctcc

SEQ ID NO: 665089 - DNA, 185 bp, Homo sapiens
cactacccgcacacatacgtacatcagtgattctaatgatcagctttgactggacctcagctacacacgaatctccgatgaacaactctacagagcatcttttagagcaagagattcatacaggccaagtgatgagcgggggagtcaccacagtgcttcagcgcccaggtgcattctccggcctc

SEQ ID NO: 665090 - DNA, 616 bp, Homo sapiens
  misc_feature (4)..(4): n is a, c, g, or t
  misc_feature (74)..(74): n is a, c, g, or t
  misc_feature (85)..(86): n is a, c, g, or t
  misc_feature (94)..(94): n is a, c, g, or t
  misc_feature (97)..(98): n is a, c, g, or t
  misc_feature (107)..(107): n is a, c, g, or t
  misc_feature (109)..(110): n is a, c, g, or t
  misc_feature (118)..(118): n is a, c, g, or t
  misc_feature (120)..(120): n is a, c, g, or t
  misc_feature (122)..(123): n is a, c, g, or t
  misc_feature (132)..(132): n is a, c, g, or t
  misc_feature (139)..(139): n is a, c, g, or t
  misc_feature (148)..(150): n is a, c, g, or t
  misc_feature (167)..(167): n is a, c, g, or t
  misc_feature (192)..(192): n is a, c, g, or t
  misc_feature (213)..(214): n is a, c, g, or t
  misc_feature (226)..(226): n is a, c, g, or t
  misc_feature (230)..(230): n is a, c, g, or t
  misc_feature (241)..(241): n is a, c, g, or t
  misc_feature (257)..(257): n is a, c, g, or t
  misc_feature (268)..(268): n is a, c, g, or t
  misc_feature (317)..(317): n is a, c, g, or t
  misc_feature (324)..(324): n is a, c, g, or t
  misc_feature (336)..(336): n is a, c, g, or t
agcnacagctcaagagttctggggcttgggaacagaaaagggctccttcctgctccaccccaatctgggttgcntgggcgtgggnnggggcgancgnnccctgcgangnntactgggnangnntcttctttnccttctnggggcagannnccctcctctccacaaangtgtgcgcacttgcgcgctcattangcatgtgcacacatcatattnncacactcaagcnatgntcttgatttcngggctctattgcgggntcaggtatcanccccagagccgaggtgtgtgagagctaccttagcagactcacaaaaggntactgcngaggcaggggtnaaccatcccaagggcctggcaagggagagactgaattctgtatcccactgatgtgagagggaattctaatgagcaaatgggaccagcggggcccagttagggaggtccagatgccagttctgagatgccacccagctctgccttgctcttcagtagccagtcagtgaaaaagcagagtgccaggaggccagtaccgagcaggtcccccagccctgtaagtagggggatgcagtggttgtcaggatccagggcctggtgccaagtcagccgaaccatcact

SEQ ID NO: 665091 - DNA, 281 bp, Homo sapiens
  misc_feature (269)..(269): n is a, c, g, or t
  misc_feature (276)..(276): n is a, c, g, or t
tgagattttggccgggcttggtggctatgcctgaaatcccagcactttgggagtacaaggtgggcggatcacttgaggtcaggagttcgagaccagcctggccaaaatggtgaaacctcattctctactaaaaatataattagccaggtgtggtagcacacacctgtagcccagctacttgagagactgaggcaggagacttacttgaacctgggaggcagaggtccagtgagctgagaacatccattgcacttcagcttggaccagcnggagctntgctt

SEQ ID NO: 665092 - DNA, 957 bp, Homo sapiens
cttccttttcttggctcttccgtgtatcctattgtcttctgtttttagtttgtgtggtgtccttctgggggtacctaccctcctgtgtgccccctggaccccttggtgccggtgtccacatttccctggtgttgctcatacccccgcgaattctggttatgctcccacccccgtgtggggtttttgttccccctggtctttacctttccgttctttcagggtgttacacgggagatttggaactgtcagatttgccaatgtcttctctgacctgaggaggaggatggcaacctcagcctggatggtgcagacagcacttggcttggtggcccagctttcacccaccctaccacactggaaatgtgagcgtgtactcctggcccttttctgtcacggaccctgccgcgcccctgctatcagctggcttccgactcccccttttccctggacccgcccggtggcacaccctggatttgaccctgatccgtgcccgccttcccggagaatttgttcccctccctacacgcttccccaccacggagtttgtcccacggatttgggccccatgttccaagccaattccaccaagttaactgaggcccaggccagacgtgccagtccatctatctggcctgcagcgctttttctgagacgcgccatgaacgaggccttctggtgacccccagttttctgctgtgctggtggagcccccgcccgatgagcctgccctggtgctggcctgagttccccggagctgtttggtggccctggtgatggcccctgaggctggagcccccctggccacgcccacgcctggctctgttctctgtcctgtcaccccactccccacactcccctggtggcctgaactcccacctccctggtggccccactccccccgttcctcaccgatatggtttttacttctgtggatttaataaaaacttcacccagtta

SEQ ID NO: 665093 - DNA, 283 bp, Homo sapiens
ttgtcccctatatttaagatgtccccggatacctcaacaaccccttgttctccctctctgggggttttgtttttctcagaaccctttataaaaaagttatcacctttttcggagcttgatggtaaaagtttttcccggtatacccaaaacccggataaaaaggcccttggacccccctttttatgtgtagtgtactaaaaaaggtttaataactgagggggctcttggggaaatggcggcgcccctattcttattctaaaatcaaaaaattgatccctcgaaa

SEQ ID NO: 665094 - DNA, 432 bp, Homo sapiens
  misc_feature (308)..(308): n is a, c, g, or t
  misc_feature (347)..(347): n is a, c, g, or t
cccggaaagtgttgcttcaccagcaggggcttcccttgccctgtttccaagtagtaagtcgggactgggtgtctacctgtctgctttgctgaggacttgagcggagttccaagcttgcagactcaccattatggatggttctgacgtacccagtggacgatgcctttttctctttatgacgggtacacagaactgagccatcctcttaagggcacatgcacctgggtggtcctgccagagggaatcctggttcctgggagtcagggtcctccctgccacactccctatagtcatgattggtccggatncgggtaccgtgcttcacgggactgcagagcagcacttgnccccagtgggcagatctgaggagcagatgatggccacacacaggacaggctcacctaataaactgttcagtgtggtggcacatga

SEQ ID NO: 665095 - DNA, 729 bp, Homo sapiens
cgggagaaaggtggtattgcattgtgattttgattttcgtttccctgatcattagtgaggttgtgcattttttcatatgtttgctggccatttatatcttcttttgagaattgtctattcgtatccttagcccactttttggtgagattgtttttttcttgctaatttgtttgagtttcttgtagattctggatattagtcctttgttggatgtatagattgtgaagattttctcccattctgtgggttgtctgtttactctgctgactgttccgtttgccatgccaaaactctttaatttaattaagtcccatctatttatctttgtttttgttgcatttgcttttgggttcttggtcatgaagtctttgcctaagccagtgtctagaagggtttttccaatttttcttttggtagcattttcatagtttcaggtcttagatttaagtccttaatccatctgtgagtggattttggtataaggtgagaggtgaggatccagttattctcctgcatgtggctggcactcgcatgttggtaccagcagagttcacaatggcaaaaatatggaaccagcccaaatgcccatcagtcaatgagtggatcaggaaatggtggtatatatccatgatggaatattactcagccatagaaaggactgaattatgggctttgcagcaacctggatgcaactgggagattgtcgtcctaagtgaagtaactgaggaa

SEQ ID NO: 665096 - DNA, 136 bp, Homo sapiens
gcgtatgcctcatcgacggtgatgaggaagttgctcaacgcatcgctgccagactatgactgccacacgtccaggcccagcacgccaaagcttatcataggcatagatactgcgatcgagacaactactcgacact

SEQ ID NO: 665097 - DNA, 242 bp, Homo sapiens
  misc_feature (33)..(33): n is a, c, g, or t
cccccccaagggggcccgggccccggttaccanccccctttgggggggttaaaaacccccttttttaaaaaaaaaaggtcccctttccaaggtttttaattttttttttggtttaaaggttaaaaaaaaaaaggcccccgggtttttttaaaccgtttttttaaaaaaaaacccccccaaaagccccttttcccctttgatgggaaaagggaggaaggtttattaaaacctttgctggttta

SEQ ID NO: 665098 - DNA, 128 bp, Homo sapiens
ggcaggttcagaaaggcgagatgtggccgacaggagcatgtgggaatgtgtgagtatccacagccagctcacagtgcagttgcactcagaacaggagactcagtggacacacaggtctcacggatgca

SEQ ID NO: 665099 - DNA, 115 bp, Homo sapiens
cgagtgaggagacaggccatgctatcaagtgcatgcagctcactgattgcatcctctaagttgccgcacagtgcccaccagaaagtatgtccgacaagcctggcagaaggcagac

SEQ ID NO: 665100 - DNA, 336 bp, Homo sapiens
ttgtgctgggtgacctcttgtatggaagagaaacaggaaacttaatctacaggtggaaagggtacaacatgacagtagatttctcattggaaaccacggaggacagaaggaagtggcacaatatttttcaagtgctggggggaaaataaaaagaactgtcaactcataatcctatacccagtaaaaatattcttcaggaataaaggggaaatcgagaacattctcagatgaagagaaactaagagacttggttgccagtataggactactctaaaagaatagctaaaggaagttctccaaacagaaaggaacagaatagagaatccagcacaagaa

SEQ ID NO: 665101 - DNA, 173 bp, Homo sapiens
gaaagttagtcgtttttggtcttgttttcatttttgattagaggaacttctgaacttggaaggggaagttggcagcaactctcctgggccatgtatcaacaatcttctgacagcaggagcagtgatagttggggattgtgagatgaatgagaggcccatcgtgaattcaagat

SEQ ID NO: 665102 - DNA, 332 bp, Homo sapiens
aaaccaaacaccacatgttctcacttataagtgggagctgaacaatgagaacacatggacacatggggggatcaacacacattggggcctgtaggcagaaggcggtgggaggagagagagcttcaggaagaatagctaatagatgctgggcttaatacgtgggtgattggttgatctgtgcagcaaaccaccatggcatatgttcacctgtgtaacaaacctgcacatcctgcacatgtaccccagaacttaaaaactgaaaaaaaaaataacttttccatgcaaccaaacatcacctgtttccccaaaactattattaaaaaaacctacag

SEQ ID NO: 665103 - DNA, 329 bp, Homo sapiens
ggcacgaggttttttttcaaaacgcaaggttaaaaaataaaaatgggccacgcatggtggctcacgcctgtcatcccaacactttgggaggccgaagaagggggatcgcttgagtcctggagttcaagaccagcctaagcaacaagcacaaaacctgtacctacaaaaaaatatacaaaaaactagccaggtgtggtggcatactcctgtagtcccagctactgaggaggctgaggtgggaggactgcttgtgccacggaggcggaggttgcagtgagccgagatcttgccactgcactctagcctgagcaacagagagatcctgtctc

SEQ ID NO: 665104 - DNA, 190 bp, Homo sapiens
agagctggtccttgtgggttgtagtctctctcggtcgtctcggcatactctcttctcgagccgcagcctggggccgcactgtgtgttggtgtgggttttcgaagcgtccgcctatgttggcattccgctgtgtcgtagccatccagcggcatagatgcaccccacagattacgaagcaggggtaccgatg

SEQ ID NO: 665105 - DNA, 218 bp, Homo sapiens
attctagacattcaaggagatactcattcatcatctaggatactacacagactactgactatactgccttccattctgtgccctccggttcattttccgcatcaaatctaaagagagccctttaaaacaaatctgatttgcatcactatgctgcgttgaggaccattactcacctctcattccctacatgaggccccactctctatctctggactaga

SEQ ID NO: 665106 - DNA, 350 bp, Homo sapiens
cccccccgggttttccctttttgcttccgggttggatgttgggggggattgggggcgggtaaccatttccccccggggaccggtatggcctggtttcggattttatacgcccccccttaggggatttggccccccgggcccaaaatttgggccggggggaagtcccaaaagcccccccccggccgccgcttcccaaaaacccgcccccgaaaaaaagcccgccgggaagaacccccctcccagggggaagaagcccgggggcttaactttttaatttgttttttccctaaagggccaatccttttgggccggttttttttaataaaagcccggttttcccggccggggga

SEQ ID NO: 665107 - DNA, 192 bp, Homo sapiens
ccctcgaaacccagtcttcagcttgcttgattcagtttgaacctggaattgccacatgccgaggtcaggcacttcgctctagttcaactgccactccatgcccaattggcacaagctgtggtgctgagtggcataacaagctgatggcggaatcccaagctgtcacatcttcaggtcacacaatttctgtcc

SEQ ID NO: 665108 - DNA, 121 bp, Homo sapiens
gtgtgataaacatgcaggggcagggtatgtttttgatatattgattttctcctttcagtagatacctagcagtggttttgctggattgaatgatagttcttttagttctttgaaaaaccat

SEQ ID NO: 665109 - DNA, 204 bp, Homo sapiens
  misc_feature (143)..(143): n is a, c, g, or t
agggaggaatgaaagatgtgggcagcgctcggacgcccagacggagggaaccggaccgtgtgaaggttagggtcccggggccaaagaacaggagtcccgggaggcgggcggggtacggtcggaagcgggctgactcctgcccntccgccggctgcttctgctgaggagggttgggggggagagcgggtgggtcctcccgcgcaa

SEQ ID NO: 665110 - DNA, 142 bp, Homo sapiens
catccaggggttgtgccaggccccacccctcacaactgctttgtttcagggtatcgtggatgggcccactcggtcccaaaatcagcccaggcccatctttttccatcatctcacttcaaaataacataataatttataaaaa

SEQ ID NO: 665111 - DNA, 134 bp, Homo sapiens
gtggtttgacttctatggtgttttaaaaaaacacagattttagtgttaatatagtgtaaatgtactcacctaggtattcattgaatgaggttatatagcatgatgtatacagttggtgaaatgtgcagtcaagt

SEQ ID NO: 665112 - DNA, 212 bp, Homo sapiens
  misc_feature (209)..(209): n is a, c, g, or t
agcacttatgaatctggtgacaattaacattgtctaactgcgttaccatcctcacatacaaaagtaattgatactcagcaatgaaagctgcatgtgcatataggggagagaaggaggtttcaccatgactgacaacatggagtcatggttctggtgaaggagcagggtgttgggttgcacatttggtcacctggggaaatactaccagncag

SEQ ID NO: 665113 - DNA, 125 bp, Homo sapiens
cccaaaaggggggccccctttttggttggtaattgggtttggggttttccccctttttttttaggaactttttttgggattttttttcctttgcccccccccttttattaaaaaaaatgggttga

SEQ ID NO: 665114 - DNA, 823 bp, Homo sapiens
aaaccaacaaagataaaaaaagacaaagaagggcattacataatggtaaagggatgaatgcaacaagcagagctaactattctacatatatatgcacccaatacaggagcacccagattcataaagcaagttcttagagacctacaaagagacttagactctcacacaataataatgggagacttgacactccactgtcaatattagacagaacaatgagacagaaaattaacaagaatattcaggacttaaactcagctctggaccaagcagactacagaatcagaacttgaactcagcttggaccaagcagacatctacacaactctccacttcaaatcaacagaatatacattcttagcagcaccacatcgcacttattctaaaatggaccacataatttggaagtaaaacactacacaccaaaaaaaaaaaaaagaaaaataaaaaaacaacacttttgggcgcgctcgggcccgaaaaaagtttttaaacccatcgtggggcccggggcccccaggaagggcaaacgcgggcccaggggcccaagaaaaccggcgcagaaccaagggggggtttcccccaaaaaaaaaagccccggcggacccaggtctggcacacccgaggggtccggagacaacaaggtcccaaccagggcccagggagcgcgaaataagcaggcggggcgcgcccaccacacatcgacccaccacaccacgcaagacaacacaacagcccgcacaacaggatacgcgaacctaaacagactccacacgcccccagctacaacgcagcactagcacacatccacgcaagacccaac

SEQ ID NO: 665115 - DNA, 424 bp, Homo sapiens
  misc_feature (28)..(30): n is a, c, g, or t
  misc_feature (33)..(33): n is a, c, g, or t
  misc_feature (35)..(36): n is a, c, g, or t
  misc_feature (40)..(42): n is a, c, g, or t
  misc_feature (44)..(44): n is a, c, g, or t
  misc_feature (46)..(48): n is a, c, g, or t
  misc_feature (50)..(50): n is a, c, g, or t
  misc_feature (69)..(69): n is a, c, g, or t
  misc_feature (75)..(75): n is a, c, g, or t
  misc_feature (93)..(93): n is a, c, g, or t
  misc_feature (150)..(150): n is a, c, g, or t
agctgcgcaccccagatggacgatatcnnnctngnncttnnngngnnncnagcggacaagtatcggctngccggnatatccactgttcatcancttgccgacgctgactgcggcgacgccagcatcatggcgtacgcgtacatgcaaggntggacagcggtgtatcgtcctgacaaagtgcggcaacgtcggaatagggcgcatggaaacacggtggatgaaaacacggcgcgcgtaaatggagtacggacggaccgtgcacgcagtgatgccgacattgtccgcagggcagacgtcgaaatcgatgtggacatggaagcgtatctagagcgcggatgctacttgtggggaatctgggatggagccacctaccggccctttgtgacgtggcagcagctgaactcggacgccgaagcgcgaaatt

SEQ ID NO: 665116 - DNA, 1007 bp, Homo sapiens
  misc_feature (337)..(337): n is a, c, g, or t
  misc_feature (404)..(404): n is a, c, g, or t
  misc_feature (422)..(422): n is a, c, g, or t
  misc_feature (431)..(431): n is a, c, g, or t
  misc_feature (434)..(434): n is a, c, g, or t
  misc_feature (447)..(447): n is a, c, g, or t
  misc_feature (449)..(449): n is a, c, g, or t
  misc_feature (463)..(463): n is a, c, g, or t
  misc_feature (474)..(474): n is a, c, g, or t
  misc_feature (487)..(487): n is a, c, g, or t
  misc_feature (729)..(729): n is a, c, g, or t
  misc_feature (785)..(785): n is a, c, g, or t
  misc_feature (794)..(794): n is a, c, g, or t
  misc_feature (799)..(799): n is a, c, g, or t
  misc_feature (801)..(802): n is a, c, g, or t
  misc_feature (812)..(812): n is a, c, g, or t
  misc_feature (828)..(828): n is a, c, g, or t
  misc_feature (941)..(941): n is a, c, g, or t
gggctgggtcggccggagttacgggatgagaattaatagagcggtagtctgtattaggaatgtgtgtcatatgtgtgttctataaactaagcatcggtgggtttagagtgttaaagtgtcagcacattccttctcctttgtctctcaggctaacatgagagaaaatagaaaagtcttggtgtggggattggaagctcaggggccaaatgtccttgccagatccttagagcattacttgactcctaaaaatagtagtgtatgttatttgatggctttgtttccatagttccatcactgacaaaactgtcaatactgttgatggagcagcagcatagcntagagtgatgcattcttacccagaggtggcaataggagagggtccatgtaaataggacgaggtagancagtggcatgattggtanggagaaggngtntgaagggaggacntngattccaaaaaagnatcgtcctcantggtgtcgtctgnactcaaccagctggcagattacacttgccaagtcgttccctttccttctaagtcagttggctccatattcacttgaatatgcctctgtttgggcaaagcaagatacctccacttaacctttatccaaggaagctctgtggtgtcctcttggtcataaagttgtctcctacctaacccagttttaccaaatggaagtaacaaggggacaaactatggaagatggactccatgccattgcagtncagccaccattctcttttccatataaggagccccattacataagctacgggtgaangttgaacantatgntnnatatttcaanagtggaccacctggtntagcatcatcatgggatgaatccattgaactttttggcaaaggggaaaccttttcactaaaaaggctacacttttccggtaaaggccctttctgggtttaaccttggccaaanttcccacttggcatttttttaaattttttaaaggattcaaattttacccctggaaaaaggggtcca

SEQ ID NO: 665117 - DNA, 769 bp, Homo sapiens
ttgtgtgaggatcccggggccgccgcgtcgctcgggccccgggatccacacacacacacactcatagcagagcagctctgctatgagtgtgtgtgtgtgtgtgtgttgtttcttttttttttttttatagtatccaaaaatagccctgaaaaattcagagtccttgcaaaattgtctaaaatgtcagtgttggggaaattaaatccaataaaaacttttggagagctgtggaaacaaacacaacaaaaagaaaacaaaaaacaaaaaaaaaaaccaaaaacaccacaacaaacaccacaaacaaaaaaaaaaaaaaaaagagagggggggcggcgcggcacaaacaaaaaccccgcggggggggcgcgcaccaaatctccgccccaccccgcctttttttgtcacaacacagggcgcccgcccaccaacgggggccgcactactaaacacgggcgggggcgagcggggcgcggcccacaacacaccgagcgcggcgggcgggaaccaaacactgtacgtcgggcaactcttggcgagaaaacacccacccctctcggggggggggaaccaatagggggcaccaccccccacaacgaaatcagattacacagcgtgcgaggggaacacacaccctggggcggctggaccgggcaccaccacagccaatctttctcgggcgccgcgagaacactgcgcgctccgacgctgatctcctcccaaacacttttccacccgccgcctccacataacaacccccgccacgacaaca

SEQ ID NO: 665118 - DNA, 221 bp, Homo sapiens
ggtctggtgctagagtcccttgtcagatgtaggctctgcggactttggtactgggccaaaaaatgacaacaattgagctagacagaaagttgcctaggaaattctcctccatttgagaaggaaagtgaacccgagtcacctatggatgtggataattcttaaaatagttgtcaagactcagaagcagactaggagaccagtccaggtagtttagcatttaa

SEQ ID NO: 665119 - DNA, 326 bp, Homo sapiens
tttctaactgcggttcagtgaatcgtcagaagggggcattactgctctgggtgagcacaggatgatgacaggtgtcatctactctgtgcaaccgtacacgaaggaggtgtgcagtcactcccgcttggatgagatcatacgccattaccagttgctcactgaggagaatatacctgaaaacccactgtgcttcctctatccccgaatcccccgggatgaagcttttgggtgctactaccagtagaaagttaatctccaggaacggaggaaatacctgaaacacaggctcattgtggtctctaatagacaggtggatgaactgcaac

SEQ ID NO: 665120 - DNA, 156 bp, Homo sapiens
ggtgagacgcttggcgaaatacctaactaatgtaaatatagagattgataggctcagcaaaccgccatgacatgtgtatacctatatacaatcctgcacgttctgcacatatatcccacgacttaaagtataatagaacaaaaagggtaccgcgcc

SEQ ID NO: 665121 - DNA, 138 bp, Homo sapiens
  misc_feature (15)..(15): n is a, c, g, or t
  misc_feature (37)..(37): n is a, c, g, or t
  misc_feature (66)..(66): n is a, c, g, or t
tggagcaaggctttngctgtattaaccttcccctgtnatcaccctgcatctgttatcttcattgtncctgctaccactgtgaagattgtgagccttggctggtggctgtaacatgatccagcctgtcaatgcggctgt

SEQ ID NO: 665122 - DNA, 382 bp, Homo sapiens
  misc_feature (1)..(1): n is a, c, g, or t
  misc_feature (15)..(15): n is a, c, g, or t
  misc_feature (65)..(65): n is a, c, g, or t
  misc_feature (80)..(80): n is a, c, g, or t
  misc_feature (127)..(127): n is a, c, g, or t
nagccctttagtgtnttaatgtatatgcacatataccctcattatacactagtgttactaatatnctcattggaattgtngtggttgttctcttagcactcattataaattagcaggaaatgcatanaactatgtgaatcaattgattcacaatgatttcacccatgaaccctttgtcaaatacacaaatagcatgacttcagtgtgctttatcctctcatgtgatctagtaaatgatttttttagctgccagaagggtgttcttcagaagcattgccactgtcatgggtcccacacctcctggacctggagtgatagagacagctctctttttaacagcattgcacgtggactcgtgccgtattcggcacgagctcgtgcc

SEQ ID NO: 665123 - DNA, 356 bp, Homo sapiens
ttgactctctgcggccagattccacacctagtatatgtagatacacaggagactgagttacagcacatccaaacaaggaatcctatgctgctgtgcagggataatgaaaatgaatatttctgtgaggaagaacttcacactctttggttgttaagaaacgggtgtggtggctcatgcctgtaatcccagcactttgggaggctaacgcaggtggatcacttgaggccaggagttcgagaccagcctggccaacatggtgaaaccctgtctctactaaaaatacaaaaactaggtgggcatgttggtgcacacctgtaaacccaactacttgggaggctaaggcacaagaatcgctt

SEQ ID NO: 665124 - DNA, 264 bp, Homo sapiens
  misc_feature (192)..(192): n is a, c, g, or t
ttcgacggaagcatacaaatcaaggatggaattaggtcacactggctagaaacatacggtgacaatgagtcttgctaaaactgtagatggcatctctgtaaaataggaaagagtaggatgaagctgctgaatacagtgtagcagccacgttgcttgcctatggtaaccactgatgactgagatgaacatccnatcatggacgtgaggcctttaaaatagtcccctgacgtgcacctttctgtaagtttcagattagtgagctcc

SEQ ID NO: 665125 - DNA, 331 bp, Homo sapiens
tgcaagtagggaaaggagcctaatatatgtgaaattaatacataactagtaatatgaaacatggcatatatatgagacatgggttcatctgcaccagatgtcagaaaatacagttttataggaatatagagaacagggatgatgtgtataatttagcttctgtcttcccttgggaggtacagaaggagaaagataaatgacatcagacttcgctggtagaaaatatacctcattctttgagtgcttctataggtgagaatgttcgttgaatcccccatttgcgtagactttagagtcccttacctaaaatataatctccttgcgggtatgt

SEQ ID NO: 665126 - DNA, 191 bp, Homo sapiens
atcgcgccgttaccttctcacattgtgaaagaagcacgaggactcaggccaaaccttcaacactttgcttagaaacctcatacaccccggtaatcccagctactcaggaggctgaggcgggcgaatggcttgagctgggaggcggagtttgcagtgagccggtatcacaccattgtggctccagcctgggc

SEQ ID NO: 665127 - DNA, 1126 bp, Homo sapiens
aacatttatggcctcaagatactatacattcaaagcaccccaatgtctactcttttatattttatttttacttcccttttcttcttcctatattataacatgaaagaaacattggttattaatctgcattattcaaagaatcttttgtgtatgtacacggtgtttaagggactatgtacgggatatcccaacgtgaaaagtgctctctggtgtatgcacaacccaaagtctcgtggtctatagtgttccagggggcgacatgggcgccattgtgcatactccttatcagccactgtgctcaaccaaaaatatatggtgcgacgatagctacactttaaactatgtgataacagtgtgataaccaataccattagcatctattacacaccagtgcgcacacattcgctcagcaacacagacgtcgctaacacattggctcactagaatgctccatatatgtgtttatcaatccgtgagacaattatcaatgcgacacactgtatcattgagtatcatagctacttgcatacaccgtgaaaagcttgtttgaggtgtaccccagaggtgaccaatacccatagacataagcctttgggtaaacttccatggctaagatttcccaaaaaacagaaatttccgatgggcccaaggcagtgtcacacacccattcaagaaacattatatttcccatcagtgcataatataatcataatagaacagtgggaatattcaaaaatttaacaactatcaattactgacggctaacaccatcgtggcaacaggggccgcagaaaaaaaacgaaaaaaatcaaagaggacgcagtgtccgtatctccccaacacgtttatttccgctgtacaacgagtgtcttcaccaacaacgattatcacgcgcggatacaccccacagacatgcgatcaatcagcaaaacaaaaaaagtcgagcaacccaactaacaaacaggacagactcagacacattaaaatacacggaataacggaggcacaaggacccgacaacatacaacacacacaagcaaccaaagaacaagtgggacaacaccccggcgccaccaccagctgagaaaacccaaagagacaaacggaccctcactaacaatcgcgt

SEQ ID NO: 665128 - DNA, 345 bp, Homo sapiens
  misc_feature (345)..(345): n is a, c, g, or t
ccgagcattttgggctcccaagacgctggcattgcaggcgtgagccaccacacacgccttacatgcattttttattaccacatactgatactctgaccctactgaacaagagcttcaaattccaccctcaccccagaccctggtaaccactatatcactatctttctgaatttcccttcatatgaatgggatcaaacatgagttgtccttgtgtgattagcattcttacttagcatgccatcaactgctcgaacagtcactgtagcaactactacatgcccagtggcctgcaggaaagatctgcagggtcaggccactctttgtcttcagctttgctcggctccn

SEQ ID NO: 665129 - DNA, 273 bp, Homo sapiens
gaaggggtacacataaaccactaagagacatgataataagaggtacggcagggtagctataagggttgaagaatacactatggggtacaatgcacactattgtagatgggtccactagaagctcaactctcaccatgacctgctatatcgcaggtatactagcatgcagatgtagcccccagatactaaaactacatactccgaatagcgtgagcaaaaccatttgcatcgaacacttgacgacgggcttaaagcaagtgctagaacgttgag

SEQ ID NO: 665130 - DNA, 282 bp, Homo sapiens
gacagagtcttgctctgtcacccaggctggagtgtgatggtgtcatcttggctcactgcaacctctgcctcccgggttcaggtgattctcctgcctcagcctcctgagtagctgggattacaggtgtgagtcaccacacacggccttccctctaggattttgaaagaattgcaacatcaccttccataattggctggttccttttcaggaaaatgatgccatttttgatggctgatctttgtgtatgagcctttccccacctcccccttctgtcgtcttctc

SEQ ID NO: 665131 - DNA, 868 bp, Homo sapiens
gctaattttgtattttgtagagacagggtttcgccatgttgcccaggctggtctcaaactcctggactcaagtaatccactgccccagctcccaaagtggtgggattacatgcgtgagccaccacacccggcctaatgtagacattttttatgattttggaaaagggggccaggcaccaaattctaacaatttgggaggctgaggcagatggatcacctgaggtcaggagtttgagaccagcctgacaaatggtgaaaacctgtctctactaaaaatacaaagttagctgggcatggtggcaggtgcctgtaatcccagtacttgggaggctgaggaaggagaatcgctgtgaacctgggaggcagaggttgcagttgagtcaagatcacaccatgtgcattccagcctgagcaagaagagcgaaactccatctcaaaaaaacaagcaggacacaaacaacatcattggcgccacgcacgggcccctccagacaggattttagccctttttttggggccgggggccactacggactacgaaacgggcgacaacattggtcgaagaggaacccgggacgaagaccatgagcggatccaacacaaaaaaaagcgcgggcgacacagcaggtttgcccacccaaggactcacgggaccaacggcgtctatcacgggctccagagccatataaattcccagcgtggacaaaacaccgagcacagcgagacacaaacacggacagacagtacaacatccagcagcgcatcacagcagacagacaaagagaagacaaagaagcaatgctaagccggcccagtcgaccaagacgatgacaacaccaatgcacgactagccgcacagcagaggaac

SEQ ID NO: 665132 - DNA, 203 bp, Homo sapiens
atcgcaacacctgtcatctgcccgtgcgctggcgatggatcccggcgtgatgctgtttgatgagcccacgtctgcgctcgatccggaactggtgggtgaagtgctgcaggtgattaaacaactggcgcactccggcatcaccatggtgatcgtgacacacgagatcggttttgcgcgcgaggtggccgataacatggatgaca

SEQ ID NO: 665133 - DNA, 402 bp, Homo sapiens
  misc_feature (23)..(23): n is a, c, g, or t
  misc_feature (88)..(88): n is a, c, g, or t
  misc_feature (91)..(91): n is a, c, g, or t
  misc_feature (96)..(96): n is a, c, g, or t
  misc_feature (135)..(135): n is a, c, g, or t
  misc_feature (257)..(257): n is a, c, g, or t
  misc_feature (278)..(278): n is a, c, g, or t
  misc_feature (312)..(312): n is a, c, g, or t
  misc_feature (319)..(319): n is a, c, g, or t
  misc_feature (344)..(344): n is a, c, g, or t
  misc_feature (366)..(366): n is a, c, g, or t
  misc_feature (370)..(370): n is a, c, g, or t
caatcgccgttcccacactcatncattaaaagaatatggcgacataccttattggcgacgtccatggttgttacgatgaactgatcgnatngctgnataaagtagaatttacccctgggaaagataccctctggntgacgggcgatctggtcgcgcgcgggccgggttcgctggatgttctgcgctatgtgaaatccttaggcgacagtgtacgtctggtgctgggcaatcacgatctgcatctgctggcggtattngccgggatcagccgcaataanccgaaagatcgcctgacaccgctgctggaagcgncggatgncgacggagcttgcttaactggctgnggcgccagcctctgctgcaaantcgnacgaaggagaaaaaagctggtggatggcccaa

SEQ ID NO: 665134 - DNA, 467 bp, Homo sapiens
tctctatccttatctaactcctgattcttgatatttttaaaacataaatgtagccagtcataaatacataaatgtcaaaagcatctagcagatatgacacattatgtatagaggaacactataattatggcagatttctcactggaaacagagttagctagaagaaagtgcgtgaacatctttatagagtactgagagaataaaggcaatgtgatgaatttctcagacattgcaaaggagaaagaatttatcaccagaagacctgtattacaagaagtgttaacagaaatcttttacagagaagaaaaatgctgtcagacggaattctgaatctacccaacaaaggaagagcactggaagtggtggctatgcgggtagatacaaaatacttttggccttttaaaacacaaatatccttctgagatataaccaaaagcatccagacaggttcatcagttagaagttat

SEQ ID NO: 665135 - DNA, 196 bp, Homo sapiens
gacctgttatctaataaaaaaaaattttgaataggctgggtgtggcggctcacgcctgtaatcccagcactgtgggaggctgaggtgggagatctcttgagccctggaattcaagaccagtctagtctgggaaacacagcaagacccgcctcgctgggcgcggtggctcacgcctgtaatcccagcactttgggag

SEQ ID NO: 665136 - DNA, 298 bp, Homo sapiens
cccccggttatgcatgtttcccccgagacagagtctcagcttcagcccaggctggagtgcagtctggccaatctcaattgctcactgaaacctccgtctcccaggttcaagcaattctcctacctcagcctcctgagtagctgggactacaggtgtgcaccacaaagcccggctaatttttgtatttttcgttgagacagggtttcgctatgttggccaggttggtctcaaacttctggcctcaagcaatccagatccacctgcctcgacctcccaaagtgctgggattacaggcgtg

SEQ ID NO: 665137 - DNA, 152 bp, Homo sapiens
cggcggtagttggcacaagctcagagccacatcaacactgccccctacccagcacccacagccctcacatacccctggacatggacccagggagagccagtgagaaagcaccctccctataggaactgaggagtgggcatcaggcctgagga

SEQ ID NO: 665138 - DNA, 122 bp, Homo sapiens
  misc_feature (29)..(29): n is a, c, g, or t
ccactgaaattctcagtgaaggtgggaanacaggggtcttgcctttgtcacccaggaatggaagtacagtgggcacaaatgaaaagctcactgccagccttgaacctcctggggctgaaagt

SEQ ID NO: 665139 - DNA, 111 bp, Homo sapiens
ggcccgccgtcacaacatgcacaggcgccgttcacaacatgcacagattaaacttcacctacaaactccttaatatgatctgtggagatagggtgggtgggggggggaggg

SEQ ID NO: 665140 - DNA, 339 bp, Homo sapiens
gactgtgtaaacgacatcaccaatattgacacttcttactgagtgctggaaatatagccagttagtatactaaggctctgaaacgatgagggatttatttccacataggatttatgatgtgtcttaatgtgataccgtttagctctgttttgaccatatttatgtgcctctctgttgggttaacaagtccagctttgacatacttcctgtagtcatcgtttcttaagggttgagtaattttatgccttatctgggacctcatgatatcatttatttgtaaacggtatttggaaaaaaattaatttgagatgccaaatggtattatttttcctctgatga

SEQ ID NO: 665141 - DNA, 1575 bp, Homo sapiens
ggcacattgctgctgcaagtagaagttcagtagaacgatactgttagcaggactacagaaacgttacattgatgcttctctgatgcaaaatccaaagagtttgcacatgatcatcaagattggccgtactcactactcagagatagttctagattgccacttactcttgggccatggaatttcatgtggttatcgtctcacaccaacgataaaagtatgcacatgacaagcacatacaacagctgtcatgacctacagaatctatgagtctcgctaggttgggtagggcgactgcctgtttcgcgtgacaagggttaacacctacgtaggacatatgcgtcgtttcgcagtacactagggttgctggccaacagagtgagttttgcaggtttaccagcgtgccttgccctttatagctgcagctgccttccgtacattaacattgttgaatgctcttctgtggcctgtctacaatgcatcggcctactgtggttggacggcctcagattgtggagccacatgtacacaacttacttggtccttgacaattcttgcacttgtcatgaattacgctgagactgaatagtttccggagttgctataggggattccttggtctcgccttcgcgcttcccagggtccttggggtcgcaatctgcattccttgtgtcctggaacaacaattggacacccttgtgacaacgccaggtactccaatgtgcgcatagggcataaagggttgaaattccactaatcctccaagctgtttgaaatatcccacattgaatcgccatttgcgaatttgccgaggtcccccaattgcttctatttagggcgggaaaacccaaataggtttgccccgttgtccaaacttgctcagaacaagcgtcgaccccataatggggtaccacttttttgggaacgcttttggaacactggtcttctccaaaaggccccaacactcgcacttcgcactttgcacatacacaagtgtggcttggtttacgcaattttcccatggccgcaacggcattgatcatagaggcggggacaatccgccgtttcccagcatccttccccttctctaatctacgaacaaatatcccttgggcgaatggcttcggtgcggaaaagttccccccgtgggccccaaaatttaacatagcgcacaacatggggcaattatcacaccacaccggggcctgttagttggacacattgacatgcgtccttcttgtagacgcggcgcttgagcgtgaatatcaaggccactccctacagaaatttccctcgcaataattaagggcgctacttggaaccaaaggggccatagcctgaaaagaattctgggcctcaacgtaataccgcttccagcagaaacaccagtgtggggatttctaatcacccgtttaaagccgacacaacacgctggctctatgttcgtaaagctttgtgggcgtatccttctccccaaaagaaatcctttgttcgtaccggaatcctgagggcgaacacaacacataagagggaccttcgctgagtggcccccacaagcgtcgcttctacccttaccat

SEQ ID NO: 665142 - DNA, 204 bp, Homo sapiens
tccctgcagctctcttacatgtattgccatccgcgaggcagccaccagcaacctgaagaagctagtggaaaacttttgggaaggagtgggcccatgctacaatcatccctctaaggtcttggccatgtccggattaccccaactacctgcaccgctattactacgctgcctctgtcctcaactgtgcatgtctgagagtctgtg

SEQ ID NO: 665143 - DNA, 222 bp, Homo sapiens
  misc_feature (92)..(92): n is a, c, g, or t
aaaaatttttcccggggggaggggggggggcccccggttttttttcccccctttttccccccggcccccctcccaaaaagggaatttttgtncaaaaaaaaaaaacgggggggtttttccccggggtttttcccaaaaattttttgggggttttttggggggtaaattaccccccgggcaaaaaggggggggttccctttaaaaaaaaaaggggggggttta

SEQ ID NO: 665144 - DNA, 392 bp, Homo sapiens
actagtccaaccatactatatcagagaaaccaccaagctgaaatgacaggattccactgttttgcaccctaagtccacagttatctgtaagggtccaccaattcagcccttctcaacctaagaaaacaaagctcgtgctgttgattgcacctccacagctgtccgttaaacttcaggagtttattatctgcttattactgacatttgtattttgtcagatttgaccaattttattaatttatctttaaaggactttcggctatttaattatacaacaaatttgctataatcaagaacttctctattcaatcagattagagttattaccataaaatcttgatttacttgcctccctcttcaattttcttacaattaaagaccatactggcagg

SEQ ID NO: 665145 - DNA, 440 bp, Homo sapiens
acggacgacgagtcctcgtgtgcacccaggagggaagaggcagaagggacagcaggagccacctcatgtaagtgtgaaacatcctggggtgtgtgtgggaactacaagctgtttgagattaaagaggctggagtgtgaggcaggatggtgattgaggctgagcggagagggcagctggagcagcctgcgtgcgtgatggagtgactgcattattctcattcttcatgtgtttgactttaggagctaagtagtttagttcatgccatttagcaaatgctgatttgggattatcatggaagactgatgcctaggttaattttggaaaatgctcaccagagatcccactgaacttttgcgtcttcagtactttataagcatgggtctggctatgctcccaaaacatttcatggagttcacagctgttcttagggtatcctctg

SEQ ID NO: 665146 - DNA, 773 bp, Homo sapiens
atttcagggacctcaggtgcacctccggctgcctagccctccccccagctccctgcaccgcgcgcagaagcatgcccctcgaggcctacatgaggaggcctcaaagcaacccgctggagcccacagcagagcctgtgccttcctccccgcctcctcccactgggactcccagcagagcccaccagccagccctggccctacccccctaggctccagagaagcccctgctaggggctgtctgggtgtccgccatccagggtctggcagagcctctgagatgatgcatgatgccctccctctcagctgcatgctgcaggagcccctgtgcccacttccctgcgcccttgaggggccccagcgtctgcagggtgactgcctgagacagcaccactgctgacgagagtctgaggactgtcctccacgcaagacctgcaactgaggggccctccatgacacagatgaggggcccactgacccaccctgcgcttctgctggcacgcgcagggtgacttcttggggccccaaaggtgcccatgtggcacggcacgcgtgctgctcgtggcacaaaatcgtagagagcttgcacccctccgcagcatccacgcgcctcacaccatgcggcaaagcgccttagccttgaaatgtccccagtcgcctcgttcgagagagaccccacggacggggacttacgcaaggccgatccacatggagcccagacccttgccttccactgttcctacaccccagaactcagcgaaacacaagggcctccc

SEQ ID NO: 665147 - DNA, 117 bp, Homo sapiens
actagcagatcacagagggccaacattaggagagagtcaggacagggggtcctgagagcagtagggactgagccttgggtccagcagcccctcctctctcctgcagggaactgccgg

SEQ ID NO: 665148 - DNA, 1003 bp, Homo sapiens
  misc_feature (91)..(91): n is a, c, g, or t
  misc_feature (238)..(238): n is a, c, g, or t
  misc_feature (388)..(388): n is a, c, g, or t
  misc_feature (909)..(909): n is a, c, g, or t
aggaagttttactgagagcatatcgtgatgtgcgctgcagggtcctcagtgaagatgtgttgcacagatggctcaataagctgggttcccntcaggatatcctgggctcgatgaagtagctgcttgggagttctcgacggagatagagatagaacgcagcggcgcgtaagcggatagcagctatgcaaacaacgtgctcaccgatcgtgcaagctatgctcgagcgcttcgagtgaantatcggaagtgcctagtgcaaatcgaaggtacgtcactaccggtcggagggcgtacaggatcagtacaagagtctcagcggcctcccgaacggcgtgaaaacaaggaagggaggtcggtgggaggctggtgaccaattgtaggagacacncacccattgggatgagtatgatgggcatttgttgcggcataccggtggaaaaacccactccgagagccttcacgggaccccttccaactgaacttgttcgttttgcactggagcaccaatcacgtggattgaaactgcacagaaagggccgttttcctattaaggaactttgggccataaaatccttaaggaacgaacggcccttttaacccaaagttaactggcaacagaaacactgggcagcgactgacgggacatggccaacggaaagccagccttgtgaagaaagggaccttttcagggcacgcgattgaacagacacagttacctggccaaaaggtcaattccgggtgttccatttgccccaacaacccccagaatggccgcctgggctgtccttctgggcgcccaagaaaagaaaaggggccccacccttggaaggggaagaatcccagggttgaaaccgggaggggcaccttgttgggaccagaggacaggctagggaacttgggggccccggncggaacgaagggccttgagagccaggcaagggtaacccctgttggaaaacccaaaggtaggttttgggcgcaagggcattgacggcactggatg

SEQ ID NO: 665149 - DNA, 884 bp, Homo sapiens
gtggtggggacctgccgcggtggcaggtgctctgagagccggtgccatcgggtgcgcgaaggaccgacggatgtcacgggctgggtgctgtgtcctggtgatgccactggatgcgctggccctgtgggccctggtggtgcgcgggcccggggttggtgcttcccacgtgcacgaccatgtgagacctgtgtgtttgcgaggctccctggggctcaggcttggacccgcgatgggggctggagcctgggcctccataaacgggggaagctgacttggtcctagcggagacggataagcatcgggaggggtgcgccgtcatcacaaccccccattagcccgtagaaactcgaggaaacaaccaccaccaaaacactataacgcattgtacacgagtgccaatgagccaaaagccacacacagctaagacagaccagagaaggagaaccaaaaagaataagcagaggccaagagcattgtaaccaggcaacaaccaaacacaaatgcaacttggggagcatgtaaagcacaatgaaagatagagactacaatgaatgaccaatcatcacatgagataaccacgaccacccattaccacaggtggacgagacaatacagcttgaaccaaagggacttggcaataatcccatggtcacatacaagagaaaaacccaaacaataaaaacaacatgaaagacactagaaaccgccgctaaaaccgaagacaaccagaagaggaagaacaagagcacaaaccacaattgagaagaaacaaatgaaaaaacaacacacacaaggaaggcaaacgaggggaaagaagaaaaaaaattataaacaaagtaaacggaagaagtagcaaaaaaacaacacaagaataaaaaaacaaa

SEQ ID NO: 665150 - DNA, 175 bp, Homo sapiens
ggcccgggggcccccaggcccatttgggaattttttttttttgggaaattttttttaatttttttttccccggggccccttttttttttccttttaaccccaaaaagtttgagaagatttttggaaaaaaatggttttttccccaaaaaaaaaaaagggcccccctttttgggga

SEQ ID NO: 665151 - DNA, 255 bp, Homo sapiens
tgactccaggatacccctcagctgagcacacgagtgaattcgtcccaaaaaaaaaaaagagaaagaaagaaagaaagaaagaaaacttgggcctgctcttggccaggcacaggtggtccatgccttgtaattcccaaccccaaacccttttgggaaggcacaggttggaagagatggcttgaggtcagaaaatttcaaggacccagacttgggcattacaggaaaaattaccaaaaatttaggcttgtgcattga

SEQ ID NO: 665152 - DNA, 315 bp, Homo sapiens
ccccccaaaaaaaaaaagggggggtcttgggggtttgggacaaaaaaaccccccctgggggggggccccaaacccccccctttggggggaaaaaaattcccccagttttttttttggccccccggccccccccggggggggggggggccccccccttttgggggtttttttttaaaaaggaacccccaaacccccccggtttggggggggggggggcccccctttttttgggggaaatttgggggggggggaactttttggccccccccgggcccccccccttttttttgggggaaaaaggggggtttttcccca

SEQ ID NO: 665153 - DNA, 907 bp, Homo sapiens
ctggacatgggctccgctccctgggccccggtcctgctgctggctgctcgggctgctgcggctccatggcgggggccctgcaggggccccggaccccgcgcttccaggagctgcttcttccatgcatggcgtctggaccactttcaacttcgatgcgcttcggcaatcaagacctatccctcagctgacttcctggtgtcaggacacggttctgggatccggggtcgaggggcccatcttacttctacactgggaacgagggcgacgtgtgggccttcgtcaacaactcgggcttcgtcgccgtgagcatggctggccgagcggggtgggctctactggtcttcgcggaggcagccgcatacgtacgggaagtcgctgccgttcggtgcgcaagtccacgctaacgcggaatcacatcggagactgctgacgggtggagcagtgccctgagcctgagcttacggcagagctgctccgtcgcgtctacgacgcgaggctcgtgaggcccaggatgcccccggccatcgccttcggtggaagtaataggggggatgctcagtagccttacctgatgatgaagtataccccacctggtgggcgtggggcgctgtggccaagtgcgcgcgttgctaacttgtgtgcagagcctctgacgagtccgaaccaagtttctttccgggacgtcaccgtgcgtgactttgaagcgggccacgaagacccaaatgcacccaggggtgtgacgggaaacgcgtttccgaccagatcaagggactgtttcctactgggaacgccaacacacggggccgatgagaaataggacctggcagtccgtttcaaaccgaaatggactgaccggccataattacgcgcggaaatctaacgggctggacatgttgaatccaccatg

SEQ ID NO: 665154 - DNA, 325 bp, Homo sapiens
  misc_feature (26)..(26): n is a, c, g, or t
  misc_feature (242)..(242): n is a, c, g, or t
cagttccaaagtcgcttgcatatttncaggtatcttcagcaacgccccactctagtggtatcagtttactgtattagtctgtttttgtgttgctgataaagacatacctgagactgggaagaaaaagaggtttaattggatttacagttctgcatggctggggaggcctcagaattatggcaggaggtaaaaggcacttcttacatggtggcagcaagagaaaaatgaggaagatgcaaaantggaaaaccctgataaaaccatcagatctcgtgagatttattcactaccatgagaacaagatgtaggctgggaggctaggctt

SEQ ID NO: 665155 - DNA, 102 bp, Homo sapiens
aaaaaaacttaaaaaagaaagagaggctcttggcgataaggctccaccaaagcctataacccaaggaccctttgacaaccaagcgagttgtattaatgaaac

SEQ ID NO: 665156 - DNA, 168 bp, Homo sapiens
cagttacaacagcgtactgaaggggaggaagaaatcaccagtgcgactctcagcctccctggcgagctgcaccgttcttggcactgaaactccagcccctctcactcacatgtgtggcgactgaggctcagaggaggtacggcacacggggctcagatgcttactggc

SEQ ID NO: 665157 - DNA, 348 bp, Homo sapiens
agcgtcctgagtgcgagccatcctcccacctcgggctccgaaagtgccgggactacaggcgtgagccactgtccctggcccctaaaacataattttatgtttgtcttctgaatgacgatctttgacttctgttcacttgcaaattaaagttccattttcatcacatcagtgtcacaattttaagtcatcaaaagtgaaaatttctgtaacattaacaagtaaaaaatttttgtacaatttttgtaaatacctttcatggatatactcaaaagggcagcatcataattccatccatatcgcaatggtttcgcaaatgcaacattctagtacaaagagtcacataaacac

SEQ ID NO: 665158 - DNA, 309 bp, Homo sapiens
  misc_feature (37)..(37): n is a, c, g, or t
  misc_feature (87)..(87): n is a, c, g, or t
tgaaggacaattttagtacacaggcatttaaaaacanaaggctgcagagaaagcacttaccagaaaggtctgattatagaagaaagntatctccatttaatttcatgtatagtaaccactgtaaagcttgggcttccgttcacacctaataaaggtgagtcagctcaccagttttgacatatctagagccttgtttgtctccacaataaattcctcactatctttagctggtgacatttgttttttgtttaaatatttgcaataaagatgaaagaataaagcagcagtgatgcaattttgtaaaaaaaa

SEQ ID NO: 665159 - DNA, 565 bp, Homo sapiens
agagatcaagtctcgctccgctgtccaggctagagtggagtggcatgatcatagctcgctataatctcaaactcctgggctcaatcaatcctcctgcctcatcttcctgagtagctgggattaccggtgtgcaccaccaccatgcctagctaatttttcaatttgtttatagagatggttcttgatatgttgcccaggctggtctcaaactcctggcctcaagcaattttccagcccttagcctttcaaaatgctggaaatacaggcatgagccactgtaccagtctactgttcttatccctcttttccttaatgggacttgctggtttatttttattttatttttggaagacagagtctcactctgtcacccaggctggagtgccgtgttgctcactgcaacttccacctcccgagttcaagctattttcatgcctcagcctcccgaggtcaagcttttcttatgccctaaccctcctgagtagcctggaattaccgggtggtcggccccccatacctggactaaatttttgtattttttagaaaaagatggggtttcccccct

SEQ ID NO: 665160 - DNA, 106 bp, Homo sapiens
gaacctactggatctcattgaactaaaacacaaggcaagagataaaccttatgatagtaagaagtttgcggactgcacttcagaaggagatcacaacgcgttatca

SEQ ID NO: 665161 - DNA, 535 bp, Homo sapiens
  misc_feature (3)..(3): n is a, c, g, or t
  misc_feature (40)..(40): n is a, c, g, or t
  misc_feature (43)..(43): n is a, c, g, or t
  misc_feature (82)..(82): n is a, c, g, or t
  misc_feature (85)..(85): n is a, c, g, or t
  misc_feature (102)..(102): n is a, c, g, or t
  misc_feature (105)..(105): n is a, c, g, or t
  misc_feature (143)..(143): n is a, c, g, or t
  misc_feature (178)..(178): n is a, c, g, or t
  misc_feature (180)..(180): n is a, c, g, or t
  misc_feature (186)..(186): n is a, c, g, or t
  misc_feature (190)..(190): n is a, c, g, or t
  misc_feature (194)..(194): n is a, c, g, or t
  misc_feature (196)..(197): n is a, c, g, or t
  misc_feature (209)..(209): n is a, c, g, or t
  misc_feature (222)..(222): n is a, c, g, or t
  misc_feature (234)..(234): n is a, c, g, or t
  misc_feature (236)..(236): n is a, c, g, or t
  misc_feature (269)..(269): n is a, c, g, or t
  misc_feature (271)..(271): n is a, c, g, or t
  misc_feature (275)..(275): n is a, c, g, or t
  misc_feature (277)..(277): n is a, c, g, or t
  misc_feature (282)..(282): n is a, c, g, or t
  misc_feature (286)..(286): n is a, c, g, or t
  misc_feature (307)..(307): n is a, c, g, or t
  misc_feature (312)..(312): n is a, c, g, or t
  misc_feature (318)..(318): n is a, c, g, or t
  misc_feature (338)..(338): n is a, c, g, or t
  misc_feature (354)..(354): n is a, c, g, or t
  misc_feature (373)..(373): n is a, c, g, or t
  misc_feature (392)..(392): n is a, c, g, or t
  misc_feature (403)..(403): n is a, c, g, or t
  misc_feature (410)..(410): n is a, c, g, or t
  misc_feature (412)..(412): n is a, c, g, or t
  misc_feature (438)..(438): n is a, c, g, or t
  misc_feature (448)..(448): n is a, c, g, or t
  misc_feature (463)..(463): n is a, c, g, or t
  misc_feature (473)..(473): n is a, c, g, or t
  misc_feature (534)..(534): n is a, c, g, or t
tcngctgtagacatttattgaatcatctgttgccccaacngcncattgtatttcccagaagattggccacaggcaaaataanatnacccaccacaaatccgnttntggggggcttcttcagctccttagtcatccagtgttcnctttggcaaacagaccagtttacagacttttgttncnaatccnaggncccntnnccccccgtagcnttccggctagagngagacacgtttntnctttggtagtttgtctaaggcggagttttcccncntgtnanccttncccnatccaagtgtgtgccagctgnttggngacctnacggcacccctacccctgangagtgtaccgtctaanccgggggcgaaccctgtcntccggacaggctgagaggnggcggggaaangggctcnanggcgcctgggccgaccctgctggggnggggcctggnctacaaccacctgcncccagaaatnacactgccttaggccggagacccagcaaaagccaactatgggaaatctgagcattagaggng

SEQ ID NO: 665162 - DNA, 159 bp, Homo sapiens
ccctagcacacctttgcatgccatagcaactagcagttgggtttttagttttgttttctgtctgttttgagaggatgtgtgtgtggggggtctcactctgttgttcaggctagagtgcagtggcacaatcacagctcaccgcagcctcgaacttccagg

SEQ ID NO: 665163 - DNA, 409 bp, Homo sapiens
gcttgtgatcccagcactttgggacgcgaggcagggcagatcacctgaggtcgggagtttgagaccagcctggcaacatggtaaaaccccacctctactaaaaatacaaaattagtcaggcgtggtagtgtacacccataatcccaggtacacaggaggctgagacataagaatcgcttgaacccaggagacgggtgttgcagggagctgagatcgtgccactgtactccagcctgggtgacaagagtgaaactccatcttaaaaaaaaaaaagtgaacccttgtagtttcttcctctgtttgacagagggaccctaagagggccccagtgataccccacctcctggtgtccaaggccatgatgttgatcacccttcccccaccttgaatgtaggtggcacatggaact

SEQ ID NO: 665164 - DNA, 394 bp, Homo sapiens
cgttctgggagacagctagtagccaaaaatcgacagatgcccagagcccatccttctgcatacgagaatcggatgttacgttccacgacagtcagaatctgaaagaagggactacacgaaatttgggaaatgacatttgatctcatttgcctctcaattggaagtcatgatatcaatgaatatcagatggaaaaataagctcagaagtaggtgagaattatgatctctaaaacgcaggtcctgatttctaatccttctcacaaaattccggatcacaaattgcgggctgatgagaagatcttacaccgaagcgactaactggcactaatgtgagtcagcaacatgtgacaaggctaatccaggagatgcagaaatgcacctgaggtccaggtgt

SEQ ID NO: 665165 - DNA, 252 bp, Homo sapiens
acaggcaatttaacagttaccacatctggacttcaatgaatacacagtctgggtagagtcttctaaaatggataattaccaaactacattagaaaggcgagcactatttgtggtctaacgtcaagagggaaacaaatcagattataaaaccatctgtacattatgattggcactctaaacatgtgagagtgtgaacaaggtctgagacgggtgaatacagggaatgacaatattgaaccggatagcttgccg

SEQ ID NO: 665166 - DNA, 345 bp, Homo sapiens
acagggtcttgctccgttgcccaggttggagtgcagtggcccatcagggctcactgtaacctccgactcctgggttcaagtgaccctcccacctcagcctctcaagtagctgggactacaggtgcaccaccacacctggctaatttttgtattttttgtaaagaggggggtctcactgtgttgcccaggctggtctcgaactcctgggctcaagcggtccacctgcctccgcctcccaaagtgctgggattgcaggcatgagcccctgcacccagccctgtattcttattcttcagatatttatttttcttttccctgttttaaaataaaaccaaagtattgata

SEQ ID NO: 665167 - DNA, 542 bp, Homo sapiens
acttgcttcctgcacttcttgttgttgatggtttgtttattttgagacagtcttgctctgtggcccaggctggaatgcagtggtataatccggctcactgcagccttaacctccaatgatcaagcaatcctcccacctcagcctcccaagtagctgggtctacaggcatgcaccgccatcatgcctggctgcctggtttgttttgagggtttttgtttgtttgtttgtttttgtttttagagacagggtctcaccatgttgcccaggctggcctcaaactcctgggctgatgttatcctcctgccttagcctcccaaattaatctgttctatatttccattattttgtcatttcaagaatgttatgcaaatagaatcatacagtcgggaaccatttgggattggcttttttcacttagaataattctctggacattcaccgaggttgctgcatgtatctatagttcattccttttcattgctgagttggattccatggaatggatgtgccacattttgtttaaccatttatcttgtaaaaga

SEQ ID NO: 665168 - DNA, 126 bp, Homo sapiens
gcgccgtgttgcgctcaactgtggtagaagacgtggtgtggccacatagttctcgtccagctgcttaaaggaggaacggaccatgctggaggacatctgggtgacgctgtacgagctggacaatgt

SEQ ID NO: 665169 - DNA, 287 bp, Homo sapiens
cagactgctctaacagaccctattcaatatgcctgcaaagactgattgaaagacggagtgatccagacagtgtactaacatctgataagccattcccttcacagtcacatctgtgtactgcatgtagccaaactatgccatggtcttctctgaccatcactggccactatcgaacactctctatctgcctatgcctatataagctacacagaacatcacacagactttagcttactgtagattactacaaatatggacaattaggacagatgggtcccggctcccgc

SEQ ID NO: 665170 - DNA, 180 bp, Homo sapiens
  misc_feature (78)..(78): n is a, c, g, or t
cgagggtaaggcggactactgcgtgaggaggtactgttgtagcatatagagctctccctagcttggttatggaggctngaggttttgaaactgacaatttaagccataagatctggtcaagggatacccttcccactaaggacttggtttctcaggaaattatatgtacagtgcttgctg

SEQ ID NO: 665171 - DNA, 1641 bp, Homo sapiens
cggcacgcgctgggtcgaccacacgcgcttcgcggcacgcgctggggcgccgccacagactgtaggtgctgcctagtgtttacgcgctggctctttgtccgggcgttgagcggcagctctagcctcccttgtctagtccgagattcgcctgttgcgtggtactcaacggtgcaccatgtatatcccgacaggctcgagcagcaatgggctcggcgagatcactgcccactattttttaacaacgactcggccattcccgcaggctcgcctctgcgcaacgctcggctctagcaagctcgcttcacacctcagcacaacacagcacagtaaaccgtgcgacgcatgaccagtacggctctagcaagctagcacgcactacggcacgactcagcgcaagcgcacgcagcacgcacggctctcagataacgccacgcggcactacacacacggacacggactcctccgcgctcaaacggggatccaccggcaccgcccgctccctgaacgcaaccgcctccccaacgaacagcctcacaacgccagcagcaccatccaggacaaggcccggagcaacgccggaaacgcaacacgcactcttccgacagagcctaagaaggaacgacgcgcatgcatcggcatcgacacgggcacgccttacgaacagctccccgggcgtggccccgtgcctctcacatcccccgaacttcccatccgtggccttcccacttgcacaccccacctactatcacacactccccaacccacaccaactcccttggacaagccaaaattaagtgcaccttcctcaaaggggctacccccaacaaacacgcaatcaccaacccacccttgtactttgcgcacttgctcgacaccgcaaacaaactcgatataccatataactacatcaaaatgcaaacacagcaaacacacacaacacacacgcaaaccaccaacaagccatctcgctaacacaaacacgcccgcaacgctgcgcactccaccacacaccccatcccgcgacaccacccgaccggccaactccgccctcaggcggccccaacaatcgctccgctgcggaacaccccacacgccaacactctcaccgcctcttcgggctgcacatcgccgaaaacgccaacacatactcttggagcgcacacgacaagcgacctagcgtacacacacacgatcaacaacgcagcgttcagcgtacaacacatcccaccttggtcaccccgaacgcccaccaaccacaccccccaacaccgcgcactcatcacccaacctagcccgctccctacctttcgccaaacacacaacccaactatttcaccccccgacaacccacctctaaccacaatcacaccctgcaacaaacacccccaacatcctccacccactctccatcacctccaaccacaatatctaacatacagccgcacacactcccacacacccccccccccattcatttcactcctactctacctaccaccagcttccaccacttcactacaactcctcatccaatcagtccacactcactcaataactcacattctatcaccatacgtaccactcagcatcaaattcatatcactcatatcctaccaacacacacctactccatcactactc

SEQ ID NO: 665172 - DNA, 177 bp, Homo sapiens
ctgatgcccgtgatgcgagaaagtgttgtgtgtgtgcgcacgtgcgacgaacgtgtattatgtatcgggctggtgtgtgtgccgtctgcgtgagtctgtggttggggtatgggttgtagtttgttccccggtgggtttggtggaacaggacactgggttaaaattctcattctggtc

SEQ ID NO: 665173 - DNA, 274 bp, Homo sapiens
ctcttagccgacctttgtaagtaagggttcaagggcggggggaaagcccgggaaatgaatggggagggggttttcaaaaaaaagggcccccattgggggggttagggggggctcccccaaatacaaggggggggggccgggggggtttccccccccggagggggatttttttttttttggggcccctttttttaaaaaaccccccccgagggggggccccttttaaaccccccgggagggtttttttctcgcgggggggggttttttttttttt

SEQ ID NO: 665174 - DNA, 304 bp, Homo sapiens
aagtcctgagggctgacatacctgtactgcttccaatcatgggccaccgtcttgaggccagggaatctgcctgttttgttcactagcaagcttagtgcctgtactagtaagcttagtacataccgaaataagttgataactcacagatgtgttgcagggatattaactggtggtatagttccacactttattgattgattgattgagatagggtctcactctgtcccccacgctggagtgcagtggtgtgatcattgcagcctcagcctcctgggttcgggtgatcatccacctcagtctccca

SEQ ID NO: 665175 - DNA, 825 bp, Homo sapiens
tcgatttgaattcttgattttaatttaaacttagttttcatttgttcatactcaacccactcaaaatgagtgtcatttcaaatctatgtataggcctgaaggctgtccagcaggcattccaaagccttgggctccgtggtttgtctccagcttacacaccctagtgggatggcttcagtcttatcctggcttaccaagcgagatatatgcacgacagaacatacgtgcaatatctgtagcagcccactgctggatcacggggctgttgtatccaccagcaagtgcacaattgagatacctgatgggtctctgcagctgctccagcccctattcacaaccagtttccagctggaaaatcagcctgccattcatgaatgctagcacctcaattggtctgtttaatcctggagccaatcaaacataggatgagatagaatgacgcgaaggtagtccctaaaagtaggaagaagatgcacacaacaacatcgtgagaaaacgaaaggaatattgccgagaacaacaatctagacttgtttcgaatgtcgacagttttatctccaacctggcgcaacgacttacccgataaagcatcgagttcctatcgaaaatggcaaagcgggcccacccagatgcggagtagatgctaacaacacgttgattagttatgcacgtgttgaccaattaccgattactggatgatgcctcgaaaatgaaaacccacccacccggacgagtatcaattgaccccgtgcaggaaacaaccatggaccgcgtaatgtcaaaagtcgaagtggacccgaacagttgcctctgacaggaatacgt

SEQ ID NO: 665176 - DNA, 423 bp, Homo sapiens
taacgtattgaaggaaaaaattcaaaccagacagagaggactggaatatataactagcgcttcagtgcaaagacacagacctacatcatgagaaacaacagcccactaggaaccataacctcccccacccaaaaaaaaaaagtcactgaccatagcaagatagcaatatgtgagttctctgaccaagaatttaaaatagaagttttaagaatatgcagtgcatagcaattcacaaatttatgaaagtaatttaacaaataaattgaaataatttttaaaaatcaaatagacatcttaggaatcaaaaatgaatttgctaaactgaaaaactcattggaggctctgaacagaagaatggaataagcaaaggaaagaatcagggcgcttaaacacaggctatttgatattacactgttagagaaa

SEQ ID NO: 665177 - DNA, 479 bp, Homo sapiens
  misc_feature (441)..(441): n is a, c, g, or t
tatggtggctcacgtctataatcccagcactttgggaagccgaggcaaaacgatcacttgaggtcagcagttcgagaccagcctgcccaacatggtgaaaccccatctctactaaatatacaaaaattagccgggtgtggtggtgtgtacctgtaatcccagctactctggaggctgacccataagaatcgcgtgaacccgggaggcggagcttgcagtgagccgagatcgcgccactgcactccagcctgggcgacggagcgagactccgtctcaaaaataaaaaataaaaaataaaaatacttatacacctaacactattgtgcacatacttactgttcttatacaactaaagccaaaacatgtcacaaatacttgatggatgagatagacattatatggattctttttgaatctgtaatgcatgcttttactggattntattagggcattctctgactcccaatccagattagtcc

SEQ ID NO: 665178 - DNA, 472 bp, Homo sapiens
  misc_feature (1)..(1): n is a, c, g, or t
  misc_feature (19)..(19): n is a, c, g, or t
  misc_feature (34)..(34): n is a, c, g, or t
  misc_feature (100)..(100): n is a, c, g, or t
  misc_feature (108)..(108): n is a, c, g, or t
  misc_feature (459)..(459): n is a, c, g, or t
naatttgggggaagtaaanaccccatccttaaanggggtggtcaaaaaacagccttaagtcaacttcctattttggtttaatgccggctcccctcctccnaagtaccnacttcccttgggctcccatccccagataaaagaaatccaaaggccaaagcactacctcacaaaatgagttgctgaagacttcccacgataaataggttgttccctgagctcctgtttcccaatagacatttctccaatcttttttattttttattttttcttgagacagagtctcgctctgtcgccaggctggagtgcagtggcgcgatctcggctcactgcaagtccgcctcccgggttcacgccattctcctgcgacttcttttcttatttgccttatttcttgaaattctttctcttgcctgattgttctgactggcattccagtactatgttgaataggagtggtanatggtagacatcc

SEQ ID NO: 665179 - DNA, 105 bp, Homo sapiens
gtcctgcttctttccaatgactaggagcagcccagcctccttcctgccaccccctgcgcctgggcagtgccttgcgtttgatgttacctccacaccatctgcctc

SEQ ID NO: 665180 - DNA, 345 bp, Homo sapiens
cgcctactactactaactaaattcgcggccgcgtcgacctggtcggcgtagcgcccgaacggataccgcgactccagtgccttcagctttgccgtagcgctggtgtagctgtggttgttcaggtcggtctgagcttgttggtacagctcgacctcgctcaggttttcgtcgacgacttcctttgttgacgagcaagcagcagtcatggcgaggatggcgatcagcagcaggtgtttcacttgcatggcggcttgcgtccctatgacggccgctgtcttgggcggggccgtcctgttatgatgagcgccccttggagtcgacgcggccgcgaatttagtagtagta

SEQ ID NO: 665181 - DNA, 213 bp, Homo sapiens
  misc_feature (12)..(12): n is a, c, g, or t
  misc_feature (97)..(97): n is a, c, g, or t
gggccccccgangccgccccatttcccttccagcaaattcaattgggcaatccaagcccctaaataccagcccaagtcggttaatccctgtttggantgagcccccgttggcttttgaactggaattttgcagctaccccctccccgactagacccttaggcattggggagttttaaatggactaattttattaaaggattgtttttttttta

SEQ ID NO: 665182 - DNA, 271 bp, Homo sapiens
ccgcaaacgtggcaaaaccccatctctacaaaatacaaaaattagctgagcatggtggcaggtgcctgtagtcccagctactccggaggctgaggcaggagaattgcttgaacccaggaggtggaggttgcagtgagttgagattgtcccactgcactccagcctgggtgacagagtgagactgtctcaaaaacaaaacaaaacaaatgaatgtaaaacatttagtgaagtgactggtagctagtggagggtcattaagcgcttatatgac

SEQ ID NO: 665183 - DNA, 147 bp, Homo sapiens
aggatccctacgtaatatgtactcaggtgatctgctgtctcgggctccagaatgctgggatacgggtgtgagcacagtggctgggccggacttctttttttgagatgtgtatttcttgtgaggtaggaaagctcgggtcctttgact

SEQ ID NO: 665184 - DNA, 359 bp, Homo sapiens
  misc_feature (15)..(15): n is a, c, g, or t
  misc_feature (22)..(22): n is a, c, g, or t
  misc_feature (96)..(96): n is a, c, g, or t
  misc_feature (116)..(116): n is a, c, g, or t
  misc_feature (133)..(133): n is a, c, g, or t
  misc_feature (192)..(192): n is a, c, g, or t
  misc_feature (213)..(213): n is a, c, g, or t
  misc_feature (222)..(222): n is a, c, g, or t
  misc_feature (354)..(354): n is a, c, g, or t
tggatgttgtagagntccttgngggtagtcccgggtggagccccatagctaactcgatggagtgcagagcctgggcccagtgggacattggcatanagcatggcatgtgttgcatnactggcgtactggtggncttgtggatgtccatctcactaggcagtccccatgtgccttggattctcacattttctnacttacctttccttggaacancgtctggtnagtatctgggggggggctgctatttgggatgaagactcttcctataatcctgtaggcctggagaggggatagctaggtgaaagcggctggactcttcttggagtcactgctgcttcccacgcgaactattgntgtgg

SEQ ID NO: 665185 - DNA, 277 bp, Homo sapiens
  misc_feature (78)..(78): n is a, c, g, or t
catactcgtacttgtttgatgaatgccagttttctctgctggactgtaagccctgtgagagcaggtagtacgtctgtnttgttctctgctataccctccagtgcttagctttgtgattacgtggtacaagcacttgacactgttgattaccattctcgtaataaggtcattctaagcctgttgcactgacctgtaaaagtgcacaccttggaagagaatacagttggccttccatatctgcaggttctgcatccatggattgaacaaccacagattg

SEQ ID NO: 665186 - DNA, 532 bp, Homo sapiens
  misc_feature (5)..(5): n is a, c, g, or t
  misc_feature (202)..(202): n is a, c, g, or t
  misc_feature (228)..(228): n is a, c, g, or t
tcctnaccccattgcaagagaggatgcatctgggagagcaaagcaattaagggattcaggcatcagcctgcagagggctgagtctgggttagtcctgcccgcaggttagcgagatcctttgtgtgtttttgggttggacgggtgccgtttcaaaatagaggcacagattgcttcatgcacgagggggtcccgggcactgganacaagtgccaagttgaaggcaggggncctgccagagctgggtgtgggtattcaggccctcacctgccctgcctgcagggccagaccctgaggaaagggcgccccctgctggtctttttggatttaaaatgttgggggaaaaggttagttccagttcagttcccaatttaacaagagggaattaaggaaaagaaaagagggcgttccccggatcccaggaaagctgggctatgactgcaataaggagttgttccttcacctgagatgtgcttcttttggttcatttctggcttgacaacaagaaataaacgtggtatgttcctgaaaaaaa

SEQ ID NO: 665187 - DNA, 411 bp, Homo sapiens
  misc_feature (205)..(205): n is a, c, g, or t
ccctccaacacctctgggggctcttggctgcgtccccacaatcccagcgactgcctctgccgcctcacctctgaccttcccgactctagatgatttcattccccctcatctgcagaggtgggcccaccacagacagtcagccgcgcctctggctcctttggccccattaggcagacggcaccatccttctcaccaccacctccgntggtccctcctggcccggagggacctccgaagagtctcgggaggctgacctcacaggagcttgtttcggagtaccgattccagtcctcttactaaatgaagttttcttcttccccttattgggactgattcccaagctttccatcaagttaggaaggcttccattccgccttattcctccaaaaagattggcaaatctaactattg

SEQ ID NO: 665188 - DNA, 777 bp, Homo sapiens
ccgcgccctgggcctgggcgtcgagcagctgcctgtggtgtttgaggatgtggtgctgcaccaggccaccatcctgcccaagactgggacagtgtccctggaggtacggctcctggaggcctcccgtgccttcgaggtgtcagagaacggcaacctggtagtgagtgggaaggtgtaccagtgggatgaccctgaccccaggctcttcgaccacccggaaagcccgagcccaagcccacaagagcccctcttcactggcccaggctgaacgtctacagaggagctgcgtctgcgcatggataccactaccgagacctcatacttccaaggcatcctgagacgcaagcctgcacggtgactccacatgcacggctgcatagcgcaaagcatacactagcacctgaaccttcaatgtaccaccacatgcctgccaactgttccatacatggaacacaggaccaacaaaagagacctgctaacataggccaaccacgtgaacaaacgacacaacacaccatccaaacatacacaaacacaacggcaaaacaacacgtcacacgcaacgcagcgcccaccacgcaccccaggtgggctacacaatgcacagccgaagcagggtgagctcgacggaacaaacaaagaaccacaaggaccgccacaatcacccacagatcccacaagaagcaccaaaccacacaacacaaaccacaagacaagaacaacacacaagagacagcaaatcccacacaacccaaccaaactcacagacaacgcaca

SEQ ID NO: 665189 - DNA, 154 bp, Homo sapiens
ggcggttttggtcgttcgtttgggcggtgctggtttttcgctcgtcgactgcgctcttctcgggcagggaaggccggcggccggttcggaagaggtggcttaaaacttcggccgttggggtgaaaagaaaatggggccccgaacccaaggcaga

SEQ ID NO: 665190 - DNA, 1039 bp, Homo sapiens
  misc_feature (134)..(134): n is a, c, g, or t
  misc_feature (230)..(231): n is a, c, g, or t
  misc_feature (338)..(338): n is a, c, g, or t
  misc_feature (417)..(417): n is a, c, g, or t
  misc_feature (442)..(442): n is a, c, g, or t
  misc_feature (566)..(566): n is a, c, g, or t
  misc_feature (694)..(694): n is a, c, g, or t
accttgggtgggaaccaagggaatggttttggacggaatggccctgtgaattctaaagaaaggtggggcctgtgggtggtgtcgtgtcacagccctggtctgggtgaagaaccccaacttctgaacaggtgggncaacaacgggcaaggcccggcaaaaggcaccaagggggccaccccggccaacaagggccccgggcacgaagtgggggcaccaacttcctgtgaagnnaaccctgtgcttggtcacaggttggctaaggcccacagtgaaacaacacgaaaggttgagaaccacaattggggaacaaaggaaagggggaactttgtgcctataanaggcccaccgcaaggcaaaacttctagaccagaccaggaaaccccaaggaatggggcggccccagaggcgtctcttctncaatattgtgggccccaaaggtgcntttacaccaaacccgttaatctacaaacgggttgtgggcctatgggtctctatggaaacaccagagtctcctgtgagaccagagggggtaagaaaggggtccctttgtgaggacacgctgtganttgtggcccctctcgataatcgcacacaacatgtgggtatcctctcgcacacgtgtgtcccctgtgtctctggggtctctggcctgtgcgtatacaaggaagcggggggacaggtgggggcattctcncccgcaaagggcgcaaacgtgcctattgtgggaatgtggattggggggccctctctggggcaagtgtcaagcgggaaggggttggttacccccgcgtagggtagggtgcgaagggtgggggcctggtagagcgtcgaaccagagggcatctagggagaggagggccccaatatagtttccgtgcgttttagagccttgtgtataccacttccgggttttgggcccctgttaagggtccccaacatttaaggcccctgttgggttttaattggtctcccggcggtggttgggctctggggtgtttcccccacgctttcacggggggactcgttctcttgtttgcgc

SEQ ID NO: 665191 - DNA, 688 bp, Homo sapiens
gggataaaaaagccacttagttcaaaattaaaaaaaaaaaaatttaaaaaaacaaaaaaaaaaaaaaaaaaaaaagagaaaaaaaaaaaaaaaaaaaaaaaaaaaaacaaacacaaaaaaaaaacaaaaaaaaaaaaaaaaaaatattaaaaaaaaaaaaaaaaaaaaaaaaaaaaacttttgggcccttttttcccaatcatcttttaactttgcaacttttttacctgggcccgcaatttggagtcatttgcccctttccccctttaaggggggcttttcaaaaacaaggcgctgttttttaaacaatttgtccttgaaaaaccctgggttcacccacttataacccttttggaaaaatacccctttttccaggttgggcatatcccaaaaggcccccccccaagcccttttccaaaatggggcccccctaaattggcatcgggaattttccccgctaattttagtaaaaaatccggttaaatttttgtaaaaacccccttttttttacccaaagggccaatattgggaaaaccctttttaaaccaaggtaattccccccaaaagggctgaatgttgtcccactttggaaaaaaagtccccttttaataaagttggtttcacacttaaagggttaaaacccctttttaaagggggcccctttttttcctttccccttattttttgc

SEQ ID NO: 665192 - DNA, 1177 bp, Homo sapiens
  misc_feature (455)..(455): n is a, c, g, or t
ggaaacagacagacttctctcttacgcaaacaggttgctgaagtatgaagctacttaaagaaagatgtttgtacgtgcacggttagatgcttcataaatatcccatgtgcaggacttcatagtgcagccacacttgagagaaacaacaatagtgaaatggagcaaaaagtctaatcttataagccctaagtctatgagtccaaactatgtaaagatgtgtaacgacaagcaacagagaatatcagacaagacgctaacatctctgcgataggacccaggtaacccatactgattttctcaccaaatgtagtagacaggaccatgcacatgcaacagcacccatttgaggaatacatcactactaagaacacttagtcagaccaagcgagggacaggtattcactatttcttgagatgaaggtaattatgacacacgcaatatttcatagaactcnaaggaataataaaacagcatggaacatagaggttatatgcaagagaaggcaatagtgatgattgcttcagacaccacggttaagtggataaataattcacgtggcatcgatggaaagccaaagactatagacgatagacgacgcttagagaaacatgacgttgctctaagagtcttacagtgcaggcatcaggacaaaatcatgtattacaatgcctagatattgcctggaaactgtgccacatggtctaaccttccagcatgtgataatcaagtggattgcgcagttgtccaaggatctgggacaaatcgatatacccacagagaaaggaagcaaatcagaaaaaagtcgttgacatagaggtgtttccattcgaaccgaagtagcttccacttgaacttgttcgtgatccaagttctggggaaggaaggacacactttagagtcgagccaagagcctggaatgaaacttccagtgacacactgctgttgaactattccccatttgtacccgtcggaacagaagaaacgcagactgaagtggtacgcaagaaaccttgggacaacgcaagacgaatcccttcctgaatattggggtcgttgaacaccaacgacggaaactgggaaccttgggggattaacacattgggctcgccatgggacacgtacaggtgtgttcatggcagtgaattaccaatcatttgatatggcaattcacactgg

SEQ ID NO: 665193 - DNA, 208 bp, Homo sapiens
  misc_feature (189)..(190): n is a, c, g, or t
gctctagagtgatcccccgttgtggctatataagcccgtttggtacaaggtgcgtgcctggtttgcacggagaccgtgcacagcgacgcgctgctggcgctgatcctcaagggacgcctgcaagaagctctacgccgatgcgcacctgatgtctcacctggcgctgatgtgtggggggtaccggagctnncgaattctgtaatcattg

SEQ ID NO: 665194 - DNA, 1180 bp, Homo sapiens
gcatgcgactcctacatcggaccgataactacgactgtgccggcgcttctacgtccaccgtgtgtgagtccctgatcgaatgaacctgcgacgcgcgtatccagtgccttcttccgtgatcagcgcatcgcgcgactcgttctctgtgcgccgcgtgggctggtccctggcttggtcgccttggcagagagcagtcgtcgcagtgagagctgtggcgcaggccattcgcgtcgtggtagtgtgtcttgaactgagcggttgttcgcgtggatacgagcccgtgtgtgcgtttgtccttggagtcgtgtcgatgtgcaaccgtggagtcgattctcgtcgtaggtctgcgtggcatgtttctaatgctcggtctggatccagtcttgtggtcgctgagggttccgatgttggtgcacctgtgtcttgtgaatggctgtcgaggttgtgcgctcgtaatgtagactgggctggccagagttctgggtctcgtggcccctgcggtccgtcagtcgcggcgttcccccgggtcgatttgagctccagtctggtgggagtgtacagtacttgcgatggggtccacggctacggtggccctgagggcctaggtccatgggtttcggtacccctgcggaagtgtgggtctaggtccgtcttttccgtgtcgacgtttcaagtctggtcatatgcccacaaagggcctaccttaacaaatgggaagctctccggttggcagcccgtgtaccgccctgacattgggtttgtgcatttgctgacttggttgcaaagtcggaaggtgcgcagacctaatttgaatccccgcatttttcccaaagggcaatggatgaggggggccaggttcgggcgtgagagatgctttacgacgtggggtgaccaccatgttggattcccgtggttaaaggcattcgttcacagtcggatcaggatccgctcattcctctcagactgtggtgtagcgattaaggaagagctggcaattagggagatcccaagctcggataagttcgccttgaccgtggttaaccaccgttgagaccccctgcgagacagttgagatttgtcagacccaaatagggccaaaagtcccggcctttgggggcccacgaattggaatggcgcagttttcctaaataaggcgaacagcgtttacgcgtaaacacgc

SEQ ID NO: 665195 - DNA, 487 bp, Homo sapiens
gatgcttatagtactctactatttgtagcatacagactaacttattctaaaagggaaagctctgtctagctgctatgtgaaaagttatgtggtatctgtaagccatttttttctttatctgttcaaagacttatgtattaagacatgaattacatttaaaattagaatatggttcatattaaataataggcctttttctaggaaggcgaaggtagttcataatttgaatagatgacagatgtgcaagaaagtcacatttgtcatgtatgtaggagtaaacgtgcggtggatcctctgtcttggtaactgaggttagagctagagaggtcgtgaggtctcactacattcgtgagtgaaggcagctgttaattcagtgttgccttatgtgtgcgtacattgcaactgcttacatgtcactctactgtaatgcattccgggcacccttgttacttgggagaggtggtagctcaagaacattccgagagat

SEQ ID NO: 665196 - DNA, 380 bp, Homo sapiens
gccagtagtactgtggagtggtggtgagctgagattgctccactgcattccagcctgggtgacagaatggtactctctctttctctcacacacacatgacacacacaaaataaagaaaaagggctggcgtggaggctcctgccataatcccagcactttgggaaaccgaggtgggcagattgcttgagttcagttcgcagagagcctgggcaacatggcaaaaccccatctctacaaaaataaaaaaattagctgggtgtggtggtgcctgtagtcccagctcatctggaggctgaggcaggagaatcgcttgaacccaggaggtggaggttgtggtgagccgagatcgtgccactgtgccccagtctgggtgacagagc

SEQ ID NO: 665197 - DNA, 775 bp, Homo sapiens
cgcagcacagcaaacccgccgggatcaaagtgtaccagtcggcagcatggctacgaaaggtgggaatcgtggacccggctactccacccctctggaggccagtgaaaggacccaggaaagagatcgtctaccagccctgcgttgaccgaagacacagcgcactgatggccccagagttatgctggaccaactggtggatgatgaccccaagtctcctccagatatggccaggtcattccaccgggctgacccatgcaccaatcctagaaggacgagctgcatcactcaggactggaacacctgcgaagcagctgctatcgtgtgatagcaccaatgtcgtcgcaccaagctggtgctgcccagtcatcatctcctctcgacatctatgtggtggacgtgggctctgagccccgggccccaaagctgcacaatggtcattgagcccaaggacatccatgccaagtgcgaactggcctttctccacaccagccactgcctggtccatcgtgggaagtgatgatcagcgtcccttgggagacgtcaagggcaatggcaaagggggttggtagctgctggatggggagacgttcgaggtgaaggggacatgggagagacctgggggtgctgcaccgtgtgggctatgacttctggtaccgaggctcgacacaatgtcatgatcagcactgagtgggcagatcccaatgtcttacgagatggcttcaaccccgctgatgtggaggctggactgtaacgggagccactatatatgtctggg

SEQ ID NO: 665198 - DNA, 1637 bp, Homo sapiens
ggaatgaagctgagcctgctgagggcctccggggctcctcctcctgaggggaggcagtccgtggagctgccaaagggagacctgggcccggcctccccgagccaggagctcggatcccagccggtgcctggaggggatggtgcgcctgccctcgggaagagccccctggaggtcgaggcacagtgggcagtcgaggagggggcctgtcccaggacagccaccgccctcgctgaccgggctattaggtggcagaggccgtcctcaccgccccccttcctgccggctgcttcggaagaagctgagcctgctgagggcctcagggttcctggcttggccaagaatagccgggaatatgtgaggccggggctgcctgtcaccttcatcgatgaggtagactcggaggaggccccccaagcagccaaactaccctacctcccgcaccctgccaggcctctgcaccctgccaggcccgggtgcgtggcagagcttcagccccggggcagcaacaccttcacagtggtgcccaagaggaagccaggactctgcaggaccagcacttcagtcaggccaacagggagcctcggccacgggaggccgaggaggaggaggctagttgcctcctggggcccacgttgaagaagcgctaccccaccgtgcatgagatcgaggtgattggcggctacctggcctgcagaagtcctgctcaacaaggctggctcctcaagaaagaagatgaagatctccttcaacgacaaaagcctgcagaccacatttgagtacccttccgagagctccctagagcaggaggaagaggtggaccagcaggaggaggaggaggaggaggaggaggaagaggaagaggaggaagagggatccggctcagaggagaagccctttgcactcttcctgccccgggccacgtttgtgagcagcgtgagacccgagagctctcggctgccagagggtagctcaggcctgtccagctacaccccgaagcactctgtggccttcagcaagtggcaggagcaggcgctggagcaggccccgagggaggcagagcccccgcccgtggaggccatgctcacacccgccagtcagaatgacctctcggacttccgcagcgagccagccctgtatttctgagcccagcactgccaggaccaaggctgagcccagctgtgggagtcccggaagctgggcagtagccagggactactgcacccgcttctgccttgtttggcctcactgtatcccacccacccctcctggccctggaagcagctagggtgcctcctgccatcggggccaggtctgggtctcactccccggccctgatttgggagggtccaagggggaagtggggtggggaactgcctgtgggtgagtgccaggggcctgctgggtggtggccatctgcgacccggcagggggctgtgcagattctgcacctggccattccctgtcctgtctcctcagcctgcctcacagtggccatggggtgtcggggtgaagggctgtcccagctacttgtcctctgcaggaccctaagcccctgcccgcagcccacatgccctctgtgatgagtggcgtctttcctgcctctgatgatggactcaataaacagcactggacaaggc

SEQ ID NO: 665199 - DNA, 584 bp, Homo sapiens
  misc_feature (258)..(258): n is a, c, g, or t
  misc_feature (290)..(291): n is a, c, g, or t
  misc_feature (344)..(344): n is a, c, g, or t
  misc_feature (393)..(393): n is a, c, g, or t
  misc_feature (402)..(402): n is a, c, g, or t
  misc_feature (429)..(429): n is a, c, g, or t
  misc_feature (434)..(434): n is a, c, g, or t
  misc_feature (479)..(479): n is a, c, g, or t
  misc_feature (573)..(573): n is a, c, g, or t
gatctacaatggcttcaccagttctgccactggtactctggtctgtgagctggcttcggggaatggtctgtcctctatgatgatgtgatcgatactgttagaaatacgagtgaatgtggcttgtagaattctatgctccatggtgtggtcactgtcaaagattaacaccagaatggaagaaagcagcaactgcattaaaagatgttgtcaaagttggtgcagttgatgcagataagcatcattccctaggaggtcagnatggtgtcagggatttcctaccattaagattnnggatccaaaaaaaagacagaagattaccaaggtggcagaacatgggtgaagcnattgtagatgctgcgctgagtgctctgcgccactcgtgaaggatcggcntggggggangaaggggaggataaagttctggaaaanaaggnagaagtgatagttcaagtaagaaggatgtgattgagctgacagangacagctttgataagaatgttctggacagtgaagatgtttggatggttgaattctatgctacttggtgtggacactgcaaaaacctagagccanagtgggctgcc

SEQ ID NO: 665200 - DNA, 530 bp, Homo sapiens
  misc_feature (56)..(56): n is a, c, g, or t
  misc_feature (83)..(83): n is a, c, g, or t
  misc_feature (112)..(112): n is a, c, g, or t
  misc_feature (125)..(125): n is a, c, g, or t
  misc_feature (127)..(127): n is a, c, g, or t
  misc_feature (171)..(171): n is a, c, g, or t
  misc_feature (202)..(202): n is a, c, g, or t
  misc_feature (219)..(219): n is a, c, g, or t
  misc_feature (301)..(301): n is a, c, g, or t
  misc_feature (317)..(317): n is a, c, g, or t
  misc_feature (347)..(347): n is a, c, g, or t
  misc_feature (372)..(372): n is a, c, g, or t
  misc_feature (393)..(393): n is a, c, g, or t
  misc_feature (399)..(399): n is a, c, g, or t
  misc_feature (420)..(420): n is a, c, g, or t
  misc_feature (423)..(423): n is a, c, g, or t
  misc_feature (456)..(456): n is a, c, g, or t
  misc_feature (482)..(482): n is a, c, g, or t
gcggcttcattagagatttcaattttcctcttcagtttgaatgtggagtattaggngagccttttgcatgtcaaggtacaggnagcagagatcacccctgcactgctacctncattttcctgctngnagtaaaaattagttaagtggaaatgattatcatatatattttcnctcttccttttgaatgtacacaatgtaacangagtgacagacctgcanattccaatccccaaacaaacccaagatagttgttgtccactttcattggcaaatacagcacagggggcattgtctgcgaatnggcgatgtcatccccncgggggtggtgggggctcatttcctttatngctctcttttaaatttgggctttcnaaagcgacatctaaaggcatnatatcnccccagcccatagcgccaaantcngccatctccccccgctcctcctcatctgggggngggctctcttcacgcactaaagtggncggggggggctcttggggggaggggggggggggggggggggggggttc

SEQ ID NO: 665201 - DNA, 1760 bp, Homo sapiens
cacgcgtcgaccaacgactccttcgagatacggccggcccccaagccagttatggagaccatccccttgggggacctccaggcccgggcgctggccagcctccgcgcaaactctcgaaattctttcatggtcatccccaagagcaaggcctccggggctcctcctcctgaggggaggcagtccgtggagctgccaaagggagacctgggcccggcctccccgagccaggagctcggatcccagccggtgcctggaggggatggtgcgcctgccctcgggaagagccccctggaggtcgaggcacagtgggcagtcgaggagggggcctgtcccaggacagccaccgccctcgctgaccgggctattaggtggcagaggccgtcctcaccgccccccttcctgccggctgcttcggaagaagctgagcctgctgagggcctcagggttcctggcttggccaagaatagccgggaatatgtgaggccggggctgcctgtcaccttcatcgatgaggtagactcggaggaggccccccaagcagccaaactaccctacctcccgcaccctgccaggcctctgcaccctgccaggcccgggtgcgtggcagagcttcagccccggggcagcaacaccttcacagtggtgcccaagaggaagccaggactctgcaggaccagcacttcagtcaggccaacagggagcctcggccacgggaggccgaggaggaggaggctagttgcctcctggggcccacgttgaagaagcgctaccccaccgtgcatgagatcgaggtgattggcggctacctggcctgcagaagtcctgctcaacaaggctggctcctcaagaaagaagatgaagatctccttcaacgacaaaagcctgcagaccacatttgagtacccttccgagagctccctagagcaggaggaagaggtggaccagcaggaggaggaggaggaggaggaggaggaagaggaagaggaggaagagggatccggctcagaggagaagccctttgcactcttcctgccccgggccacgtttgtgagcagcgtgagacccgagagctctcggctgccagagggtagctcaggcctgtccagctacaccccgaagcactctgtggccttcagcaagtggcaggagcaggcgctggagcaggccccgagggaggcagagcccccgcccgtggaggccatgctcacacccgccagtcagaatgacctctcggacttccgcagcgagccagccctgtatttctgagcccagcactgccaggaccaaggctgagcccagctgtgggagtcccggaagctgggcagtagccagggactactgcacccgcttctgccttgtttggcctcactgtatcccacccacccctcctggccctggaagcagctagggtgcctcctgccatcggggccaggtctgggtctcactccccggccctgatttgggagggtccaagggggaagtggggtggggaactgcctgtgggtgagtgccaggggcctgctgggtggtggccatctgcgacccggcagggggctgtgcagattctgcacctggccattccctgtcctgtctcctcagcctgcctcacagtggccatggggtgtcggggtgaagggctgtcccagctacttgtcctctgcaggaccctaagcccctgcccgcagcccacatgccctctgtgatgagtggcgtctttcctgcctctgatgatggactcaataaacagcactggacaaggc

SEQ ID NO: 665202 - DNA, 2081 bp, Homo sapiens
ggaatgaagctgagcctgctgagggcctccggggctcctcctcctgaggggaggcagtccgtggagctgccaaagggagacctgggcccggcctccccgagccaggagctcggatcccagccggtgcctggaggggatggtgcgcctgccctcgggaagagccccctggaggtcgaggcacagtgggcagtcgaggagggggcctgtcccaggacagccaccgccctcgctgaccgggctattaggtggcagaggccgtcctcaccgccccccttcctgccggctgcttcggaagaagctgagcctgctgagggcctcagggttcctggcttggccaagaatagccgggaatatgtgaggccggggctgcctgtcaccttcatcgatgaggtagactcggaggaggccccccaagcagccaaactaccctacctcccgcaccctgccaggcctctgcaccctgccaggcccgggtgcgtggcagagcttcagccccggggcagcaacaccttcacagtggtgcccaagaggaagccaggactctgcaggaccagcacttcagtcaggccaacagggagcctcggccacgggaggccgaggaggaggaggctagttgcctcctggggcccacgttgaagaagcgctaccccaccgtgcatgagatcgaggtgattggcggctacctggcctgcagaagtcctgctcaacaaggctggctcctcaagaaagaagatgaagatctccttcaacgacaaaagcctgcagaccacatttgagtacccttccgagagctccctagagcaggaggaagaggtggaccagcaggaggaggaggaggaggaggaggaggaagaggaagaggaggaagagggatccggctcagaggagaagccctttgcactcttcctgccccgggccacgtttgtgagcagcgtgagacccgagagctctcggctgccagagggtagctcaggcctgtccagctacaccccgaagcactctgtggccttcagcaagtggcaggagcaggcgctggagcaggccccgagggaggcagagcccccgcccgtggaggccatgctcacacccgccagtcagaatgacctctcggacttccgcagcgagccagccctgtatttctgagcccagcactgccaggaccaaggctgagcccagctgtgggagtcccggaagctgggcagtagccagggactactgcacccgcttctgccttgtttggcctcactgtatcccacccacccctcctggccctggaagcagctagggtgcctcctgccatcggggccaggtctgggtctcactccccggccctgatttgggagggtccaagggggaagtggggtggggaactgcctgtgggtgagtgccaggggcctgctgggtggtggccatctgcgacccggcagggggctgtgcagattctgcacctggccattccctgtcctgtctcctcagcctgcctcacagtggccatggggtgtcggggtgaagggctgtcccagctacttgtcctctgcaggaccctaagcccctgcccgcagcccacatgccctctgtgatgagtggcgtctttcctgcctctgatgatggactcaataaacagcactggacaaggcaaaaaaaaaaaaaaaaaaaaaaaaaaaaaaaaaaaaaaaaaaaaaaaggggggggggccaaaaaattcttcccggggggggcccaatttgtccccgtttttttgaaaagggggccccctaaagggggggggcgtcgattattaaacagcgccgagagcaggggggcgcgggcttataaacaacgggtcgtgaggcggggaacaacgcgggcgtcgtggggagcctctttgggggaggaagggagccctattatttgtcggggggggggagacaatagggtggggacaacaccttcccctatacgaggatattataaagcgctcctaaggggaaaattattaaacttttaaaggtgtaatctgggggtaaccccaggcgggaaaattgtacggcgggttaagaaatttggcagggggatattagttttgagaattttttcgagga

SEQ ID NO: 665203 - DNA, 411 bp, Homo sapiens
  misc_feature (2)..(2): n is a, c, g, or t
  misc_feature (25)..(25): n is a, c, g, or t
  misc_feature (86)..(86): n is a, c, g, or t
tnttccaggattttaaaactcaggnactttcagatgcccagccatcaatgatattctctcactggaaagtgggttctcaaagcaanggtcctgacaaaagcatcagcgttactggggaactttgttagaaaagcaagttcataggctgggcattggtgctcatgcctgtaatcccagcactctaggaggcctaggcaggtgggtcacttgagctcaggagttttgagaccagcctgcacaatgtggtgaaaccctgtctttactaaaagtcaaacaaattagtggtgcattcctgtaggcccagctacacgggaggattgcttgagcccaggagactgaggtgcagtgagccgtgattgctccacttcattctagcctgagcaacggagtgagaccttgtctcaaaaacaa

SEQ ID NO: 665204 - DNA, 927 bp, Homo sapiens
ctccctggggcgcggtgatgtgtgccggtgcccgccccggttttgaacgtcgttcggggagcccttgccgcgtctcccttgtggctggtcacaccgaggctcgcaggcccgccggaatttttggcgctgaaccccgtagggaataggtgctttgttattaagcgctccctttttcacggggatgttcccccggtcatcatctcgaggtgggtgccctcccccccccccaagtgccgcggcctgcggcaacacccctttttgcggccgacaataattcaggctgttgcgactttttctttctcgtcagaacaccagtgtgtctggcctatcttttccatctcggcgataattggctgggcgcccgaccgcagaaagggtggcccaccagtgttttgatatctgcgccccccgcaaaactccgagtggttctagtagaggccaagcgaccactgttagtgctttggggcacgcagaatggaagatataatcgaccgcccttcgaatattttatcggtgagggcctacaggtggcaccctttctggcgctacccggcgatttgcgcgagcacccccgcccgatagagcatctcccccactctagtcgttgtgggtgcgcaactaagtaaaaatgattggcagtgtctgcgcttttatttgcacgcacccccgagtgctcctcctcgttgcctcatgatgccagcggagaaccaccccccgcccgccccactcgtggtgctgtcccgcgagacaccaacagaatctgttagggaggatcccgcccacgatggccctcctgggttctgccccacacttattgctccgtgatggtccctcgcctcacggccttgaccgccggtggtctcacgaaggtatcaacgttatatggagttctgcaaaaaaactcaaaaacccctcgcccacaaaaca

SEQ ID NO: 665205 - DNA, 708 bp, Homo sapiens
  misc_feature (397)..(397): n is a, c, g, or t
  misc_feature (399)..(399): n is a, c, g, or t
  misc_feature (405)..(405): n is a, c, g, or t
  misc_feature (444)..(444): n is a, c, g, or t
  misc_feature (450)..(450): n is a, c, g, or t
  misc_feature (465)..(465): n is a, c, g, or t
  misc_feature (467)..(467): n is a, c, g, or t
  misc_feature (477)..(477): n is a, c, g, or t
ataatcgtggacgtgtacagtggttcacctgtgagaatgatcaacgatatttattatttgctgggggtcaggccctgtacacatcgctgagaacagaagagcaaaatcactgccctcacagagcttgcatttagtgaggagtcacacagaacacactcactgtgcaaaatcagtgtacttgcaaacaagagttgaacaagaggcaggctcacacaaatgagaggttatcccttagagcagctctgtccaatagaactttctgtaatgatgaaaatgttctgtgtctgtgatgtctaatacatggggctagagcaatgtgggactgaatgtttaatttcatttaatttaaatgtatttaaatctaacttaaataggctggtgtggtggctcacgcctntnatcccngcatttgggaggccgacgcgggcggatcgcgtgagctcnggagtncgagaccagcctggncngcgtggtganaccctgtctctactaaaatagcaaaaaaaaaacaaggagaagagatcacgccagggtgtgcatgcagagacgcctgtaggcccccgggcaaatacggaaggcatgaggcaccgagaatgggctgggggccgtgggcacgcatgaaggttgcagtgacgccgggaatctcggcggggtgcacctcaagccgtggcggagaaaacggcggagactcatatctcaaaaaacaca

SEQ ID NO: 665206 - DNA, 221 bp, Homo sapiens
agaggttccccgcccttaccctctgcgctccacggctgcagcatagccttcttcccgcccgcctcccactctctctcccttatcctgggtgcccgcgtggctgctactctccgaggcttctgtgtcaccgggtcgtggaaatgtcaccgagtatcagagcttcgagcctcctccatatccatcccaggtggcatcactacgtggcatttgtgtgctacgca

SEQ ID NO: 665207 - DNA, 290 bp, Homo sapiens
agtgactccacaaacagcctaattattagcatcatccctctactgattttttaaccgaaagtcaacaagcaacctatttagactgttccccaaccttttcctccgacccccgtaacaacccccctccgtactactaacgtacctggactccataccccgtcacaagtcatggcaacgccagacgccaacttatccatgtgaaccacgtatcacgagataaaaactctacctcgtctatactaagtctccactacagaatctccgttcagggtaccgcagctcgacattcg

SEQ ID NO: 665208 - DNA, 271 bp, Homo sapiens
cagtttttttaaaatgggccccaccaaaaaagccccagttcatgcacctgtggcaaagttcacgttttgtggtttcatgttagttcccctataggtcctggggaattagggccccttaatgtttgttccccaaaataaatatttttccccccgcctaaagggaggattttttggaaaattgggtttcctaaaactgtcccccccaaaaaaaggggattggttttttaaaaaaaaaaggggttttggaaataaagtccaatggaaaattcca

SEQ ID NO: 665209 - DNA, 954 bp, Homo sapiens
agcggaggggccgagacgtcgggcgtgcgggcggctgcgagcatgatcctggtgctgcaccacatcctcgactcgactgttgtctcacatttgccttgcaggtctgggggccattatcgatctttcttcaacggcgcaggagctgaagcgcgaacggcgtcagaccggcgacgtcagtgcagacccgaccacctctgcgggggaaactggctagcgcctacctatttggatgggtgtagttccctacttgggtgttgtttttgaaccgcactcgatgattgatctagggccaagaagtggaaagtcccgggggaaagcgatatatctcccatgaaagcgggttgggtgctgccaatggggcttgaaggcgtttcgtcaagaaacctggctcacgcgggtaaggacggcccttggtggggcaagggcgttggttgaggctactcccaacatgggtcttcgatgaagtaaacacccaaaaggttggcttgggtggtattgcccggctcaagatcgggagccacccgggcagggggcttgggggggggccccgagggggacacggcttgttaaatctaatgtgggcgccagcaatgggtggaggctcaagcagaagagtgtgaccacatggggagagagaagtttgtgagggcccttggcatgagacggtgttgtgacagataagacatacacccgctttgtgtgtcagcgcccccatgccggggtagagggagttggcagcgaggtaaccgtgccaggcaaggcagcgcggggggctcgccagggggaacggcctcacccaccagaaggcgccgatcaccatgaatagaaccaagcgccccggaagaaggtgtgaacggggccgggacaggaaatccataaaaggggggcagaggggggcaggggcggtaacaggacaggaacccgggggaagcacggcacaccgaatcaccttcg

SEQ ID NO: 665210 - DNA, 320 bp, Homo sapiens
ctgtgtgtagcacaacctagggtcagttttgcaggtggtaagccatttaccaagatagttgtaggtaagaagggcagatttattagagaaattgtgaaaatatgttgcagtgggcagctcagcagagaaggggctacctgcaaagaggcaagggctggaggaaagttttatagggtcctgctgaagggtgctacgtgtggaatgaggtcattgtgcccgcaggttgtttgtgattagctgtctctaacaattgttcatacaataattgttcattattgttctcaacttggggctctccccaacctggggacccttcctta

SEQ ID NO: 665211 - DNA, 181 bp, Homo sapiens
gggcccccccaggggggttttccccccgaacccaatccccttggggggggggggaaatccttttaaaaaatttgtggggggaatttttcccccccccaaattggggggtcggggttttaatttttttcccccaaaaaaattttggcggcttttccaaaaaaaacccccctttggggggtta

SEQ ID NO: 665212 - DNA, 851 bp, Homo sapiens
taggctaggtagaggctggtgttaatcggacgaggttggtccggttgtgtgcgcctaatctcaggtggtccacccgagaccccttgagcatcaaccctagtcccccgggcggccccttattcggtccgacaagatgaaagacacaagtcatgaatccatggaacagaactcgccaaactgcaggcacaagtgcgcacttggtgggaaaggaactgctcggcacaaaaagcatgacaggtgcgttcactatgaacagaccagctagtcatgatgacgagaaaaacttcagttctccttaaacaagttgaggggtaaactaatatctctggtattgaagaggtgaatatgtttacaagaccagaggcaacacgtgatccagtttaacaaccctaacagttcaggcatctctggcagcgaacactttcaacattagaggccatgctgagacaaagcagctgacagaaatgctacccagcatcttaaagccagcttggtgcggatagctctgactatgtttaagggaagactggccgaagctctgcccaagacaagtctgtggactggacatacagcaccacttgctactggagaggatgagtgattgatgaacgtttccatgatcttgtgcatgaactctcgatagaggcttccagagaactgaggcaacacctgaattgagtcaacttctgaagatcaagaagctgaagaagttactgggagctgcctagttttatattatgactgctttttaagaaatttcgggtatggatctgactaaaatctagatctctaatatcgttaagcccagtccctgggacactgcaggctctttgcagttgggttatacacaa

SEQ ID NO: 665213 - DNA, 143 bp, Homo sapiens
ggagctcggtaccggtagacacttacgattcacttacaagctgcatagaatgtacaaaatagaaaagaaaataaatcaagccacaaagcttctaaaaaaggaacccgcaggcacttcctctggtggaatgttgtaaaaagctt

SEQ ID NO: 665214 - DNA, 566 bp, Homo sapiens
gagcggggcggggcggggacccccgggaggggcggggaggggcgcggcgggggcgcggagagagggagggaacgagggtgacgcccggctgccaccccgtctgggaagtgaggagcgtctctgcctggccgcccatcgtctgggatgtgaggagcccctctgcctggctgcccagtctggaaagtgaggagcgtctccgcccggacgccatcccatctaggaagtgaggagcacctcttcccagccgccatcacatctaggaagtgaggagcgtctctgcccggccgcccatcgtctgagatgtgggagcgcctctgccccgccgagccgtctgggatgtgaggagcacctctgcccggacgatgacccgtctgggtggtgaggagcatctctgcccggacgacccatctgagaagtgaggagccgatccgcccggccagccgacccgtctgagcaagtgaggacgcctctctgcccggcagccaccccgtcatgggaaggtgagtgagcgtctcccgtgtagccgacccatcctgggaggcgacgttgggagggtcagacccgaa

SEQ ID NO: 665215 - DNA, 329 bp, Homo sapiens
cacgaggtagggctcccaccctgataggcttggagcagaggactatgtgcctcacccagtttctgagggacccctgtggctgcggactgttcccaacaagcccaggatagatggtgggggccatgtggagggaggtgccatgtggcacatgtccaccgatcacctgtggcctgagaggctgggtgcctgtcctggcatggatggggagtctggtggaagcatttatgatgggtttggcttgcactgaacagcggggtgtgagggtctcacatgatccatatggggttggatgtccctgttgctggcccaacagaaagacttggggacat

SEQ ID NO: 665216 - DNA, 698 bp, Homo sapiens
taaaaaagttgtttgttggaccccataagtgaatttcaagcagtgaggatttgggggtgcctgaaatggccgagggcacagggagtgagctgtatgtgtgaggaattgggtgagcgagataaaagtccacgggtgtcaacccctaaaacatgggtgaccgtacatttttatacatctccactctacggcctttaacaggcttcccgatttaacaggccttaccaagtttccattctccttagagagagaacggtgcttccaaacagaaatcaggatgtgaccacaaagcctgaaaacaccttgggccacccagcaaagaacggggcacactggtgttggggtctagcattgagccatagttgcccgagttaaaactggcaggccactctgccttgcagtggcctctgatatcattggtggggtgcatccacaggggtgcccgagcatgtactatacagacggccccagggattgagacccaagtcatcatgaaaagggcccaagtacagtcttaaggcgataaatccacatagctaagacgtcagagggccaacaccagcattcaagccgggttgggacaagtctcaggtcccgtgacacagggaagggcggggctgccaaggactgcccagcaaatttgggcagaggaaccccaaaccggaaaggaacggtctggcaggtaagcgacacgcgggacc

SEQ ID NO: 665217 - DNA, 121 bp, Homo sapiens
gacctggggactgaattgatgcgatgggaggctgtgcggctcgcggggcgcttttcggattcgagggggaggagacgtcccggagccccggctccctctgttggaccatcagtgcgccgcc

SEQ ID NO: 665218 - DNA, 475 bp, Homo sapiens
ctcgcgtccctggtgttgagtgtcagcccgtggttgtttctgcgtctggtagttcctcccccgcccgtcctcccactggggaaccgccggccccccaaggacgccaatgcaccaactgtttcccacgccgtttagaatatatcgggccccaaccccccgcccttgggagagaaacttgcgggggggtccctgtccactgtgaaccttttccagaccctgtgggggatgttccccctgcgccccggctgtttacccgtgtgtacccacaacaaccccacttgtggcctgtgatggacggcccgcgcacgtttaccgccctaatgagggccgcgggaccgtccttatatctcggcgcccgaacttctccggggccgcctcgtcggcccggcggagctcctttccccgcgcccggacatctcccccccccgggccccccccattgggccaatccaatttctaattttatcaaccaaaa

SEQ ID NO: 665219 - DNA, 630 bp, Homo sapiens
taccggagagagaactgaacagctgagaagtatcttagggtccccagacatgcattgagatctcacagaggggcccaagggccattgactccaggagctgagaccccccagtgagggaggtacctctagactgagacactcacaaagggaccccagttcagcaagggtcagaggaaggtctggaggagaagagagtaaagggccctgggtgggcaggaggctgaggagggagcctggggagagcaccaggtcggggcatcaggccagtgcctggaaggtgtggccaaaggggtctctagctgctgctctgttgctcctgctcatggatgagtttggcgatggggccggtgatgccgcctatcaaggtccagtactcatcgaagctgatgcgcccatcatgattggcatccaggttctggatgagcttatccggagccttccggttccctgttgtccgacagcatgtggttcagctctttctggagcatctcgcggaagctgctctcgctgatcttgttcttgaccagggtgtacttagacacatatttgtagaagtttccaccaggacaatgatggcttctccagctccgtgtagcagtctctttcctggagggaccgagcccaaattgg

SEQ ID NO: 665220 - DNA, 269 bp, Homo sapiens
  misc_feature (37)..(37): n is a, c, g, or t
  misc_feature (124)..(124): n is a, c, g, or t
  misc_feature (133)..(133): n is a, c, g, or t
  misc_feature (156)..(156): n is a, c, g, or t
ttgagctatgaaaatggctttcagcagagaggcaatntggggctcgggggaatggttctacttgaagttcctcctgtgtggctgggtctggggccttttatggactcagaatggggagtgagtnctgattggnttgtgaggaaagcgcaccaaacnggaagacaagtcctccatctggtccgaggatttaacttgtagcttggctttcaagctttaaaattcttcagcatggaggtggggtttcaccagggacccaaccctgtctgcct

SEQ ID NO: 665221 - DNA, 546 bp, Homo sapiens
gcccttcttgaaattggtgtgaaacttggtgtctgagatccttaagggaacattggccacccttactgctgtcggaagggcgttgttccaggttgatgaagatccacccaccttgtgggtaatggctagtcatcccggagaaagagcttgcgatccaactgcatactggaatggcactttaaacagaactcacttgacacatgcaacaacgtctatggggaaaaaagtactgaacgcggagctagtttatggttcactacaaccagtatagacgcagcagaagctgggatttagtctaaatttattggagttggatatacgtagaactctagtcctatgtgtcagtttagggggtcatcctgcgaacttggcagcctacagacctatagtgccagatacagagcaatgtctttcatagagttgaagaggtggatacgttctgtacaagagttcgtgtgctgctcgacacaaaagccactgccctagatctgaaaatatggaccaaacaaaggcgctaaaccctaacccaagagccctcagaccagt

SEQ ID NO: 665222 - DNA, 87 bp, Homo sapiens
ttttttttttcacttgaatatcgaagaagtttaatacgctgccataaaataagcgccttgaaaaagctcatggaatagaagtcagtg

SEQ ID NO: 665223 - DNA, 886 bp, Homo sapiens
  misc_feature (611)..(611): n is a, c, g, or t
  misc_feature (822)..(822): n is a, c, g, or t
  misc_feature (876)..(876): n is a, c, g, or t
gaggggtgggaggatcatcagcccggcagtggccctgtggccagcaggtgcactcaagaagctaaggccaggccatctgagcacaaagattgcgagaaggaaggggagttcaccctgcacggccgggccatcctggagatggagcaatacatccgggagacgtaccccgacgcggtgaagatctgcaatatctgtcacagcctcctcatccagggtcaaagctgcgaaacctgtgggatcaggatgcacttaccctgcgtggccaagtacttccagtcgaatgctgaaccgcgctgcccccactgcaacgactactggccccacgagatcccaaaagtcttcgaccctgagaaggagagggagtctggtgtcttgaaatcgaacaaaaagtccctgcggtccaggcagcattagccatcgtgccctgctgaggggctggctgccttgagtggcctgatcgccacagcccttcttggaagaaaggcgtccgtgtttcaggttccacgcgagtcacctctttcgtcttaatgttcaccgtccacagctttggaataaaccatcctgggaagttgctgcaaaaaaaaaaaaacacaacaaaaaaaaaaaaaatntttgggcggccttggccctgaaaaagttttttaaccctttgcgttgggcgcggggcccccgttggttagtggactgtggccaagagcgtgtcccaggggaaatccgggccaacagacgaaggtgcttggatttcttccccagattatataagagccgcgggggacaacgcatgtgttttctgaacaatctccagagtgaagtcgggagggncaaaagggagcctcattaccaggggtgcccacagaaactagaataaattctcgnggtgtgtggt

SEQ ID NO: 665224 - DNA, 72 bp, Homo sapiens
gagactaaagagggctgaccgtttgtccgaagttggccgaggcctacccgctaggccgtgtttgcactcccg

SEQ ID NO: 665225 - DNA, 1003 bp, Homo sapiens
  misc_feature (728)..(728): n is a, c, g, or t
  misc_feature (939)..(939): n is a, c, g, or t
  misc_feature (993)..(993): n is a, c, g, or t
attcctccatgtctttagggtctttgcctcaggtgtcccttgccgaggctctgccagggggatgtggctgatgcccgttggctggggctggagaaaagctgcgtagacccttgtgtcttcctgagcactgggctgtgggatcacagagggaagagaggtggtgaatggggagagggcctggctgagggtggccacctcctgtgtgtccctgagaaggaaggggagttcaccctgcacggccgggccatcctggagatggagcaatacatccgggagacgtaccccgacgcggtgaagatctgcaatatctgtcacagcctcctcatccagggtcaaagctgcgaaacctgtgggatcaggatgcacttaccctgcgtggccaagtacttccagtcgaatgctgaaccgcgctgcccccactgcaacgactactggccccacgagatcccaaaagtcttcgaccctgagaaggagagggagtctggtgtcttgaaatcgaacaaaaagtccctgcggtccaggcagcattagccatcgtgccctgctgaggggctggctgccttgagtggcctgatcgccacagcccttcttggaagaaaggcgtccgtgtttcaggttccacgcgagtcacctctttcgtcttaatgttcaccgtccacagctttggaataaaccatcctgggaagttgctgcaaaaaaaaaaaaacacaacaaaaaaaaaaaaaatntttgggcggccttggccctgaaaaagttttttaaccctttgcgttgggcgcggggcccccgttggttagtggactgtggccaagagcgtgtcccaggggaaatccgggccaacagacgaaggtgcttggatttcttccccagattatataagagccgcgggggacaacgcatgtgttttctgaacaatctccagagtgaagtcgggagggncaaaagggagcctcattaccaggggtgcccacagaaactagaataaattctcgnggtgtgtggt

SEQ ID NO: 665226 - DNA, 981 bp, Homo sapiens
ttcttttactatatccacaataatacgggttcctcaacacaaatgttagtacttggtcgcaacacccttgttggagtgttgccaatatacccctgctatacctcattagtggtggcccgccctgtttattattcccccgttggttcttatacttatattcatctaggtcccacatacgtggtagaatacacttggtggcaacggaagacactattttaacttttttctcccacagtagtagtgttgccaacaccctaccctctgggttgttctatgcttgggaccactctgtcgggggtgcattatccctctttttttgtctgttcatagctattctgttttgctgacaaacacagcgtgcttaatggcttctctttctcatcgtgtttttagcgattcttgcagtggtttctgtccaacattttgcagagatgacacagagtctgtctctacacgacatagagtccccctctgggggtcatagatattattgcttatgattatattgcgcagcgaaatctggtggcgtttctcctgtggttaccatatagagtgctaggctgtttcaaacatttttgtcttttacattgaatatagtgtctcaacattttctgtttttctgtggaaggctgtgtcttcctaataggatgttcatcggcttattgtgccacagggcgtcacatggcgttaagcattgtatatcccagacaactattgggagtgcacgtaggtcatgtggcaggattaactaacggtcaggagttcgagaacagccttggccaaaaaaggcgaaaaccccgtttttacgtataaaataccaaaaagttagccgggcactggtggtgtgcgcctgtaatcccagctaactggggaggctgaggcagaagaatcgcttgaacccaggaggtgaggttgcagtgagctgagattgcaccaactggactacagccctgggtgacagagccggagaactctgtttca

SEQ ID NO: 665227 - DNA, 1233 bp, Homo sapiens
  misc_feature (1)..(3): n is a, c, g, or t
  misc_feature (958)..(958): n is a, c, g, or t
  misc_feature (1169)..(1169): n is a, c, g, or t
  misc_feature (1223)..(1223): n is a, c, g, or t
nnnaaaggaagaagagtccaccttgcgaccgtatccgctagcgcggcctgggatgcgcttgggctccctgttcgttcccacatgcagggcagcacaaggagaatgggcgtcatgactgatgtccaccggcgcttcctccagttgctgatgacccatggcgtgctagaggaatgggacgtgaagcgcttgcagacgcactgctacaaggtccatgaccgcaatgccaccgtagataagttggaggacttcatcaacaacattaacagtgtcttggagtccttgtatattgagataaagagaggagtcacggaagatgatgggagacccatttatgcgttggtgaatcttgctacaacttcaatttccaaaatggctacggattttgcagagaatgaactggatttgtttagaaaggctctggaactgattattgactcagaaaccggctttgcgtcttccacaaacatattgaacctggttgatcaacttaaaggcaagaagatgaggaagaaggaagcggagcaggtgctgcagaagtttgttcaaaacaagtggctgattgagaaggaaggggagttcaccctgcacggccgggccatcctggagatggagcaatacatccgggagacgtaccccgacgcggtgaagatctgcaatatctgtcacagcctcctcatccagaagtcttcgaccctgagaaggagagggagtctggtgtcttgaaatcgaacaaaaagtccctgcggtccaggcagcattagccatcgtgccctgctgaggggctggctgccttgagtggcctgatcgccacagcccttcttggaagaaaggcgtccgtgtttcaggttccacgcgagtcacctctttcgtcttaatgttcaccgtccacagctttggaataaaccatcctgggaagttgctgcaaaaaaaaaaaaacacaacaaaaaaaaaaaaaatntttgggcggccttggccctgaaaaagttttttaaccctttgcgttgggcgcggggcccccgttggttagtggactgtggccaagagcgtgtcccaggggaaatccgggccaacagacgaaggtgcttggatttcttccccagattatataagagccgcgggggacaacgcatgtgttttctgaacaatctccagagtgaagtcgggagggncaaaagggagcctcattaccaggggtgcccacagaaactagaataaattctcgnggtgtgtggt

SEQ ID NO: 665228 - DNA, 798 bp, Homo sapiens
  misc_feature (755)..(756): n is a, c, g, or t
  misc_feature (759)..(759): n is a, c, g, or t
  misc_feature (784)..(784): n is a, c, g, or t
agcggcagaagaatgcttgaacctgggaggcagagattgcagtgagccgagattgcgccattgcactccagcctgggcaacaggagtgaaactctgtctcaacaacagcaacaacaacagcaacaacaacaaacttttgtctcccagtttctgtgggtcaggaatccaggtgcaccttagctgggtcctttggctcaaggtcttgcacaaaatctccatcaaggtatcagcagaggctggggcccatctcaaggctcagatgggggaggatttgcttccaagctcactcacctgaatgctggcaggattctgttcctcatggcctgttgggctgaggggcttagctcctcgacagctgttggccaaggcatctctcatgttcctggccatgtgggtgtcttcatagggcagctcatacagtggtgggaggcttcgtcagagccagcaagccagaggaggcaagcaggagggaagccaggtcctttcgtaacctactctcagaagtgacatcccggctgagtctggtggctcatgcctgtaatctcagcacttgggagaccaaggcagatggatcacctgaggtcaggagttcgagaccagcctggccaatatataatgaaaccccatctctactaaaaatacaaaaattagctgggtgtggccagtgcatgcctgtaatccccagctacttgggaggctgaggcaggaaaattgcttgaacctggaaggcagaggttgcagtgagctgagatcgnnacnattgaactccagcctggcgacaganctagactctgtctc

SEQ ID NO: 665229 - DNA, 658 bp, Homo sapiens
  misc_feature (383)..(383): n is a, c, g, or t
  misc_feature (594)..(594): n is a, c, g, or t
  misc_feature (648)..(648): n is a, c, g, or t
tcctggtcccccacggcaggggacttatgctgttttcatgtttagaaacaaaaaggagttccgcgctgcccccactgcaacgactactggccccacgagatcccaaaagtcttcgaccctgagaaggagagggagtctggtgtcttgaaatcgaacaaaaagtccctgcggtccaggcagcattagccatcgtgccctgctgaggggctggctgccttgagtggcctgatcgccacagcccttcttggaagaaaggcgtccgtgtttcaggttccacgcgagtcacctctttcgtcttaatgttcaccgtccacagctttggaataaaccatcctgggaagttgctgcaaaaaaaaaaaaacacaacaaaaaaaaaaaaaatntttgggcggccttggccctgaaaaagttttttaaccctttgcgttgggcgcggggcccccgttggttagtggactgtggccaagagcgtgtcccaggggaaatccgggccaacagacgaaggtgcttggatttcttccccagattatataagagccgcgggggacaacgcatgtgttttctgaacaatctccagagtgaagtcgggagggncaaaagggagcctcattaccaggggtgcccacagaaactagaataaattctcgnggtgtgtggt

SEQ ID NO: 665230 - DNA, 1350 bp, Homo sapiens
cctcgtagtgggattgagtatctaggataatgcatgatcgagtgcaagtcattctgtgtggtctgttatctctgttgatgttagtattacgcagtgaatatagtagcagttcgtttatgctgtagctcgcactactacagactgtatgatacacaactgctggcttgcttttggacctgtaatcttagaagcacgctgttttgttacaacaaaagcgttttataaatttctgtttgttctctcccctccgtcttcaatgcttgcgaccccttttttgataccaggtcttcaaaaaaaaaggctgcttcttgtcattagtgtagaatatatatggacacggggaccattatatattgggacggcctttttcaacactggttagggtgatttttccccccaccatatgtgcctgtgcttccaaccgtgagatgccacacacctaaagctcttgtgggattcaatgaagggtggcccaagacacaacaggggttgcttttgttgtgatggtttatgttgttttttaggcgttttccctttggaggagaaataaaatgggttaaatggagagaactattgttaaacagggtcctgggttttctttcttggcaaacaccacgtatgctaaaactttgccctgcttttataataatgcactttttgttaagggatcacgccttgggtagacccggtatttatagcgggaagtaagcacccctctggagttctttggtttgcaaaagccccttttcccactcaagtgcctatgaataataggcccctggtgtcaagccaatgcacagggggttgtttggttataatgcggttgcgtgcacacgcaagtggggcactaaatgaaataataaatttaacccacgtggagcacaaaggtgtgtaccacaagtgagaatttaaaataaattggtggtggaattggccacgtaagctaaagtgggcttttataaagagagtaattgaaagaattgaaaagggtttttctttcttttttaaaaaagagaaaaccaaactattgagttgtaagaaaatggaaaagctaagggtttgccctcttcaagtctaactctccttccacgatagtgtaaaatcccaaaactgtttttccctctcccctaccttgtcccccctattaaaatagagaacacgggattgacttaaagtcccgctcctgagaaaacacagtataaaatttgtacacaaaatattctttctatggaaatgagatttgtaattctgtagaacttattacctgggagatgttttgatgtaaaatcccatcctttgggttgtgggttttttgttttctccaaactcaatctgatctttaaagttcca

SEQ ID NO: 665231 - DNA, 696 bp, Homo sapiens
  misc_feature (40)..(40): n is a, c, g, or t
  misc_feature (58)..(58): n is a, c, g, or t
  misc_feature (135)..(135): n is a, c, g, or t
  misc_feature (142)..(142): n is a, c, g, or t
  misc_feature (421)..(421): n is a, c, g, or t
  misc_feature (632)..(632): n is a, c, g, or t
  misc_feature (686)..(686): n is a, c, g, or t
ggggaaaacccgtggggaattccggggattggaaaacccnttgggtttgggcccaagnttattttcccaagttcggaatttcttgaaaccggggtttgccccccaattgcaaggatttatttggcccccacgganattcccnaaaagtcttcgaccctgagaaggagagggagtctggtgtcttgaaatcgaacaaaaagtccctgcggtccaggcagcattagccatcgtgccctgctgaggggctggctgccttgagtggcctgatcgccacagcccttcttggaagaaaggcgtccgtgtttcaggttccacgcgagtcacctctttcgtcttaatgttcaccgtccacagctttggaataaaccatcctgggaagttgctgcaaaaaaaaaaaaacacaacaaaaaaaaaaaaaatntttgggcggccttggccctgaaaaagttttttaaccctttgcgttgggcgcggggcccccgttggttagtggactgtggccaagagcgtgtcccaggggaaatccgggccaacagacgaaggtgcttggatttcttccccagattatataagagccgcgggggacaacgcatgtgttttctgaacaatctccagagtgaagtcgggagggncaaaagggagcctcattaccaggggtgcccacagaaactagaataaattctcgnggtgtgtggt

SEQ ID NO: 665232 - DNA, 215 bp, Homo sapiens
  misc_feature (68)..(68): n is a, c, g, or t
  misc_feature (91)..(91): n is a, c, g, or t
  misc_feature (162)..(162): n is a, c, g, or t
  misc_feature (175)..(175): n is a, c, g, or t
  misc_feature (204)..(204): n is a, c, g, or t
gtaccgatgaccctcggtaggaattcggcacgaggagtggcagcgcaaggcagccagtttcgcgaagntgtcggcgcgcccggcccgcagnacccggcacgcgcttccccgcagcacccggcacgcgccttccccgccgccacgatgcccaagaggaaggtnagctccgccgaangcgccaaggaagagccaaagagaagattngcgcggttgta

SEQ ID NO: 665233 - DNA, 606 bp, Homo sapiens
  misc_feature (331)..(331): n is a, c, g, or t
  misc_feature (542)..(542): n is a, c, g, or t
  misc_feature (596)..(596): n is a, c, g, or t
cagatgagctgggccggctgcccgcaagagactactggccccacgagatcccaaaagtcttcgaccctgagaaggagagggagtctggtgtcttgaaatcgaacaaaaagtccctgcggtccaggcagcattagccatcgtgccctgctgaggggctggctgccttgagtggcctgatcgccacagcccttcttggaagaaaggcgtccgtgtttcaggttccacgcgagtcacctctttcgtcttaatgttcaccgtccacagctttggaataaaccatcctgggaagttgctgcaaaaaaaaaaaaacacaacaaaaaaaaaaaaaatntttgggcggccttggccctgaaaaagttttttaaccctttgcgttgggcgcggggcccccgttggttagtggactgtggccaagagcgtgtcccaggggaaatccgggccaacagacgaaggtgcttggatttcttccccagattatataagagccgcgggggacaacgcatgtgttttctgaacaatctccagagtgaagtcgggagggncaaaagggagcctcattaccaggggtgcccacagaaactagaataaattctcgnggtgtgtggt

SEQ ID NO: 665234 - DNA, 184 bp, Homo sapiens
cactcacacgactgaccgagagaacctgcggatcgcgctcgtatatacaaccagagcgaggctggttctcacaccctccagatgatgttttggctgcgacgtggggtcggacgggcgcttcctctgcgggtaccaccagtacgcctacgacgtgcaggattacattgccctgaaggaggacctg

SEQ ID NO: 665235 - DNA, 101 bp, Homo sapiens
acaccagtgcacacacagcacacacactagcacacagcacagacacaaagacagcacacgcatgcacgacggcacacgcacacacagcaaacacataaaca

SEQ ID NO: 665236 - DNA, 315 bp, Homo sapiens
  misc_feature (1)..(3): n is a, c, g, or t
  misc_feature (220)..(220): n is a, c, g, or t
nnnaaaggaagaagagtccaccttgcgaccgtatccgctagcgcggcctgggatgcgcttgggctccctgttcgttcccacatgcagggcagcacaaggagaatgggcgtcatgactgatgtccaccggcgcttcctccagttgctgatgacccatggcgtgctagaggaatgggacgtgaagcgcttgcagacgcactgctacaaggtccatgaccgtngagtaccgtttccctgttcccaggggcgctctgggtgctgtgttgatcagggaccagtgacataggtacaataccatgttaacttgtttaaccgg

SEQ ID NO: 665237 - DNA, 204 bp, Homo sapiens
cacagtcatatcgaattgagctggtcccaggacttgttcacggtagccagttctgctcagcgcgcgatccgcagtgctgcagggtgcgtgtgggcgaactggagcaggactggctgccggtgaacaagtcctggtgcctcaacgagcgccactacggcggcctgcagggcctggacaaggccgagcacgccgccaagcacggcg

SEQ ID NO: 665238 - DNA, 285 bp, Homo sapiens
ctcgactcttagagtatcccccactttacgcaggcgcagagaccatggtggtcctctcttctcagcccctccctgaacactagtacatcacctggaaggtggtcctgctcacagcatcacttttaaccttctgtaacctgcctatcactgctcaagtcacgatcgaatccctgacactccttgtccccgaggagcaatgatgtgcttctacttatccactatttgcctcataatcttgctggttccatcttttacaaaggacaactgatggacctcctaccattc

SEQ ID NO: 665239 - DNA, 135 bp, Homo sapiens
aaatgcaagtgggccgaggacccaagaaattgcacccctttcgcttctaggtcctgtggttcaacataacatataggacaatctgcaaggagatgccagagatctaataataaaatgccaacaacatagagatat

SEQ ID NO: 665240 - DNA, 359 bp, Homo sapiens
gctgtgtgttgctccagtatgtcaacgacctcctgctgggacaccccacagcaattgggtgcgccaaaggaacagacgccctgctctgacacctggaggactgtgagtataaggtgtccaagaagaaagctcagatctgcagacagcaggtacgctacctaggatttacaatccgacagggggaacgcagcctaggatcagaaagaaagcaggtcatttgcaacctaccagagcctaagaccagaaggcaggtgagagaattcttaggagctgttcttagggttctgcaggttatggatcccaaatttgcagtactggcaactctgtacagttacagaggtgacatgacttcgatgggt

SEQ ID NO: 665241 - DNA, 106 bp, Homo sapiens
ggctatcgggcccattaccccaggaaatgttagtctatacccttcccgtactaaattaatccccctcggcccaaccctttcatcctactttaccatcttgtgaaag

SEQ ID NO: 665242 - DNA, 116 bp, Homo sapiens
tgcatcttcatggtttgctgaagatggcggtatataggctgagcagaggtggtgtggctaggctaagcgtttgagctgcattgctgcgtgcttgatgcttgtccctgaagatgctt

SEQ ID NO: 665243 - DNA, 161 bp, Homo sapiens
tcactagtacggcgcagagtgtggaatacggttacgggaaccaacacttaattactaggatgatagtgacttatgagttaccggtatgaatgaaaattgatactgtagtctaattggcaatgtatgtattcaaagtctggtttaccctatatttcgattga

SEQ ID NO: 665244 - DNA, 121 bp, Homo sapiens
tagagatccatgacaggagacgatatcattgcctgagaaaagagcatgacatgtgtcatgagtgagggtgctatgttccaatttggtttcatgtgattttcaatgtcagaaatatacttat

SEQ ID NO: 665245 - DNA, 425 bp, Homo sapiens
tccagcgtcacccggcctggcgtggtgctgcatgcctgtagtccccgctgtccgcgcggctgcggcaggcagctcacctgcgcctcggactttgctgttaccgtgagctatgatcataccactgcactccaacctgggcgacagcaggaccctgtctctaaaaaaataacctttgtattaactaaatcataaaactcttctaatactgtcggtttagttgcacgagctgtaagaactctaaatatagtattacagatacaatctggataagcccaatcgaaaatacacttaacgatactgaaataagtataacagtgtcaaactgtgcatcatacatcttgtctaaaatagcttccagcctaattggcttaactgcaaataaaaatagtgatctgcttaaaaaatacaccaataataatgtacca

SEQ ID NO: 665246 - DNA, 831 bp, Homo sapiens
gggcttctggctggccctgcgtggccctggcgccagcctggaggtcttcggcacggctactgcacctgcgctctacctgcgccagcgcctggctggcgcccccgcgcccaaggcctacgtgctgggcagcccagccctggcctgctggagctggagtgcctgtgggctgtcgccatgcgttgggcggttggggccctgaggccaactgcgagggcggagggctccctggcgaacttgtcttgcatcggctgccggttgggaaccccgaacgttgcgccgcggggtggatggtagggcttttgacccccggcaactttcaagctaaaatttgaaaggcttcaccagtggccctcttgcggcctacctcttgcaggccagcgccccgggcttgccctttgcctccggtggggccacccaaccatttggaccaacccggtgcttacccgcctttggacgaagcgtggccctgctttcatccggcgggggataacccgggggatgtcatgactcgcgggaagccctggttgtaaaattaggccgccccaaggtgtccggggcccgacattcattcggggaagccccagccggcattcagtttatcgaagtgggttgcccccagggaaattaccgggtaatacacccccggaagacgcacccgtcattgggtggggaaaacccgtccttggacaacagaacatcctcctaggcgccatcttgttgccttgaagaaccatccttacccctcaacggaatcaccactccagaggattgtgaggaaaaattcgggaaagtaactggcgttctaaaaagaacttggtcctgaattcaaag

SEQ ID NO: 665247 - DNA, 487 bp, Homo sapiens
ggcgtagtacagtccaccgtagtccaaagagtacatatagtgcaccaagtgtcacctacatacacactaagctatcgaacatacatctgctgtccaggaacgcttaggagacattcctgcctttctacatggaaaacacatagtacaagtattggaataatctgtaattcaacacggcatattcatgtactacatatttcagcactaaggcggttgcttcactttatatctatataacacacagtggtaacaatcttttccttttgtgcagataaacccatcctacattcagattctctcaagcactaatacaaatacttatttggtagaggaagatttcaggcaagtacgggcccttccaaaggccactgtgagacctcccccgcccaatccccgttatagctcccattgtctttataactcgagtatgtcacaagtagaactgggtggaataagccacaaacttaaaaggctagttaatacacag

SEQ ID NO: 665248 - DNA, 378 bp, Homo sapiens
tgtttttaaaagaaccagtactggccgggtatgctggcttttacctgaaatcccagcacttgggaggccgaggcgagtggatcgcctgagatcgggagttgagaccagcctggccaacatggtaaaatcctgtctctactaaaaatataaaaattagccaggtgtagtggcgcgcgtctgtaatcccagctactcgggaggctgaggcaggagaatgcttgaatccgggaggtggaggttgcagtgagcctaggtcgtgccactgccctccagcctgggtgacagagcgactgcgtctccaaaaaaaaaaaggtaaaattaaaattaaaaaaaataataataaccagtatttggtttactaaaataaaatgccttggt

SEQ ID NO: 665249 - DNA, 117 bp, Homo sapiens
tctacacggatcccccagaggtcaggctcgctcatgtcaaacaaattgaacttattgaaaggaagacgagtacctatctttagtggggagtctagtagactattctcatgctgcgtg

SEQ ID NO: 665250 - DNA, 272 bp, Homo sapiens
tcaggtacaacagcgaaggaatatgaggggaagacttgagcgtcagtcaccaaagaaggcccggaactgtccagaggagtgaagaagagaaaaagaagcaggagagagaaaaaaacaaagttcgacgaacctctgcaaaatcatgaaagacatatcggagaaaaaagttgaaaacggtgagttgtgtcaaatccgatatggtgacagtctccattgctggtattggtcacagagcacgatactggcgtggacatgcaatacataggaggaga

SEQ ID NO: 665251 - DNA, 176 bp, Homo sapiens
ttttttttttaattttgaaaaaaacgcccttttttttttgtaaagggctaggaaatttccaattgtttccaggggcttttcctttttccttgccttccaacttttaaaccaaaccctttttttttttttttttaatatttcctaagggctttaaattaaattttttttaaaaagga

SEQ ID NO: 665252 - DNA, 1009 bp, Homo sapiens
agcggattgccgtgtgcgcacccggacgtgcggtcccctcggctcctcgcccatggacgcggacgatcccgggcccccaagggctccttgcgggaagtttcctggagcacctctccgtgggccggcaaggcatcggcgtgctgaccagcggcggggcatgctcaaggtatgaacgcttgcgtccgtgcccgtggtgcgcattgggtatctacgtgggggccaaggtgtcacttcatctacgagggctaaccacggggcattgggtgggaccggagcgctcaaaacattccgaagacggcaccagacgtaggaagacaagtggttctccaagcattccttgcaaagttgaggccgaggaccgaactcatttgggacaatgtgccagcgaggtatgccagagcccttttccggcacggcgggaacaggggcctgcctgcaaaggggcctgggttttggcacacaaccacgggcagtggcaaaacgcggccggggataatcaaccaaacaacgctgtgtggccgcatgacatcccgcgccggagagggcaccagggaccacgccccttccacaacggggggggccccaaaaaccctatctattcccggggaacaagtcgaacgagttgtgaacacgttgggagcaatgggcttgggacagcagacagcactgcggccaccaaacggaaaaacgggagcccagaacatattccggaaaacagagacagaggaccgggatgcacagaaacagatcacaggaccactacaccgaataaacacgagcgcgacgacggcacgccgatagcggagggggcgcccacccaacgccggacaacaatagggacttaccctatggcaggagaacaccaccggaacattttgaaacccacgatcgggccagcaggaccagcacacggtacccatgcgaacaaggaaatacaatcagaagagccggacgaacaagccaccgacacgaaccccaacgggccccaacaagccacaccaacgaagat

SEQ ID NO: 665253 - DNA, 122 bp, Homo sapiens
  misc_feature (11)..(11): n is a, c, g, or t
  misc_feature (34)..(34): n is a, c, g, or t
  misc_feature (109)..(109): n is a, c, g, or t
  misc_feature (119)..(119): n is a, c, g, or t
gtggcgatganaccactactgctgtattgtgcanacgcggggctggcgaccctcagggtggagctggaatctccagccaagtcctccgtgctcgtggtggaatcgtcanggtgtcttgntac

SEQ ID NO: 665254 - DNA, 265 bp, Homo sapiens
gtggccaggccgcgagcgcccctatcaaccccctattgtagtaaacttggaaccttggaaatgaccaggccaagactcaagcctccccagttctactgacctttgtccttaggtgtgaagtccagggttgctaggacaagaaatcagcagacacaggtgtagaccagagtgtttcttaaatggtgtaattttggtctctctgtgtcctggggaatactgggcatgctggagacatatcactcaattctctgaggacacagtagga

SEQ ID NO: 665255 - DNA, 131 bp, Homo sapiens
aatatgaatcatatgagataatgaatagaattcattcttaaggattgattcattcagttagggaggcagctaggcatggtgaacaggtgagcacaccttagttataattaactggaaggttggttaactat

SEQ ID NO: 665256 - DNA, 347 bp, Homo sapiens
  misc_feature (217)..(220): n is a, c, g, or t
gcaacaccctcctccccgagttataggaatagtacgcatcatgagactatatatgccagacacacgacgctaggtggtttgtatatctttataccacaataaccttgatgttaggtagtagtatccctgttttactgtgagaagacgtgaggcccagaaaggttaagtggataattgtatggctagtttgtgataaactaatagatactacaactannnnatttacctttctggttcttgtttttcagtcttacctttctctagcaattacatatttaagctcttttagagctagtttacaaatatatgttttatgttaggacttactgtgtggggagttttgaatt

SEQ ID NO: 665257 - DNA, 777 bp, Homo sapiens
  misc_feature (340)..(340): n is a, c, g, or t
agcgggggagccccggcgacccgggcttctgtgacacatggcgggtaggctgggaccataacacaatcatgactatctgaaggaagaggacggttttcctgaagatgaggtcgactgaatcggagatagataacactttaaagtttaggtagcagagttggatgcctttccgaaggttcgtgagagctatgtagagacttcagccagtggaggtacagtgtacctctaaatagctatttactactatggctttattagccatagatggaattctcagtatatcaaggatacatggacttgcaaagtactgaactacggaacgtagatcacaggcactttnattctaggcatagacttgacatgaagttccatcatatgatattactcgtttgccaatgcaagtgtcaactatgattgggagcggatgtgttggatttcgcagaccccatggttgcatctgcagatggtttagtgtatgaaccaagcagtcattgtgatctttcaccacagcagaagagcagtggctcgaggcatgctgtcagctgacttcagtagtaggctacaagtaagagcattcacgttccacgatgtgatatttcaagagagtgcttttgaacgagtacattccacagcgtcttccacctaaggagaagcatgattctgtccaccagtctcctaggatgcatgcgagaattccctggccatgctactttgtcgaataaaagtagcgagggcaatttttcgcataaccaggtggggcgacaggcaagtgccaca

SEQ ID NO: 665258 - DNA, 129 bp, Homo sapiens
  misc_feature (45)..(45): n is a, c, g, or t
  misc_feature (116)..(116): n is a, c, g, or t
  misc_feature (124)..(124): n is a, c, g, or t
cagcgtgaaatcaacttgttggcctatcatgtggcatgcatgggnatggtcctttccctaccggttcactgcttgaccttcgcttcctcagcaccttcaagcccccagcctacgangaaggatnttgtt

SEQ ID NO: 665259 - DNA, 252 bp, Homo sapiens
  misc_feature (6)..(6): n is a, c, g, or t
  misc_feature (198)..(198): n is a, c, g, or t
ggtttnttgggggtttggtttttcaccctttttgtgatttgcatgatgtgcttgcccactaacttttgaattgcactttttaataaatattcttaacatttttgaagaggtattttatctcatttgagatcatggtaggtaagaaaatatgctgttgtgaagtaaaagaatttatgaactaaaagggtgattgacctnatgtttacactccgtctaatgtttgatatataaataagtatttcaattaggaaa

SEQ ID NO: 665260 - DNA, 102 bp, Homo sapiens
aaatacatttgcctatgaaatgatcaaaggatttaagattttttttgagacggggtttcaccattgcactccagcctgggagacagagcaagactccatctc

SEQ ID NO: 665261 - DNA, 549 bp, Homo sapiens
aataccaataaaactctgaggagtacacacaggtacaagtgttttatgctatttgcttattctataccagagttataaacccttaagatagatggcaacataattgttaaattctacagattaacttcgctgcaattaaagcaacactcctcatagccaatagcatagtcacagtcttgagttgttatctggtgtgaacacagatttaagtccgataaagacatgtataaaaacattaatttatttgattgtcacagttagagctcctattagtataaaatggctgttgaacatcaaaacataaaaattttatttatacgatggcaaatataaatggcagaaaaatccacttttgaaaaaaattagaaagatatacaaatatatgtgcctaaaagtcagtgccacaatatgttacggtgccttaatacatagtgtaacttgacactaacaatttccagactcaaggaacatgtttttgtctaatataactatcctatttgtcaatattatggtggttttaccatttcagtgttctctattttatcccca

SEQ ID NO: 665262 - DNA, 532 bp, Homo sapiens
cctgggcagcgctgctgcagcgcacggcctcggccctgtgccacattctccacggtgattggtctgtgctctcagatctgcctacacttgtcataggattctggccactggccggccctttatgcccatcccatttagcctctctcacctctcagcatactgaccaaacccattacttctaacattttccaacaaagcttcctggacagcaaaaccttatgccctggctcttactttgccaccttcttaccttactctctcctggttaatacacaactctgacaaatccccaactctcatttcctaatattcccatttagccctctttaatgcccttccatatctgttgtttttctgcactgcatgttctggcccctacctcattcacacgttctctttccctatttagcatccaacctccatctttggttctctccttctttgcgatattgcatataagtctcctcagttgcttctctcacttttgggaagtcctaatatgcctcagttcagagcccggggggatcctcta

SEQ ID NO: 665263 - DNA, 451 bp, Homo sapiens
acagagcatctcatatggatgcgcgccagcttcagccaggtgagtatcacagtccatactagaatagtagcagagttcgatatagacttcagcagcatggatcggtaagccgatgagtgaatgatagtctggtatgcacattgcaagcttgttacataaggcttgatttaacgtgagcattctgcctgaggaaaatggcttaagcagtgtgagatgtgtgcgcatgtcatgataggcctgcggattaggtgcaccgtctatgaatctccggtctgagcccagcaagataggtataatctgggtcattatgcagatcaatgctcccatggcccttattctgggcatcctcctgtgagcgttgggtgattggaggctatgcagagtatttcatgatgctattacacacacgtcagttgtagcgcgtagagcgtacagggattgctagtataag

SEQ ID NO: 665264 - DNA, 123 bp, Homo sapiens
actatatttcctttagcttcctctctccaaactcctggactcacagcgatccttctactggtcctcccacacagtgctaggttaccactggcgtgaaccactgtgcccgtcccggtattttct

SEQ ID NO: 665265 - DNA, 1094 bp, Homo sapiens
atgaatcccctggcccaacccgtacatctattctaccatcttgcaggcacactcatcacaggcgctaagctcgcgacgtgagtttttgtaccctgaagtaggcctacgaagatagagacatgctagcgtgtatgatatccagttcatacccaaatagaactgaaccctcgtatatcaacagaaggctgccatcatggtatttcctcacagcaatgctacacgcatccataagtcctgtctaaatagcgtatcctcttcattcaatatacgtctcacggagcaagtgagaaccagtaaagcgcaagtgcatagcaatacaattacatcagtcactttaatcaactccactacagtggtcctacatagcacatgtagaacaggtaggacagtagccggccttctcagatgtggtggagatcccctacgaagggtttaaccacgcaaaagtggcaatgcgcgctcgtggagcacattcccgtggcacatgtcgtgtgcatttacttacaacgattgaatacaaaaaaagctaggaccgccgcccattacattctaacttcacattattacacaaaaattggcgtacatcgagcgtcccacatcgaaagcggtgaaggcccagttcgtcacggtcaagaatccgtcgttcgaaaattctatttagctcccaatgtcaataaaggctagagagcccagactatgaaaggggttgtggacatttactcaacacgaaaaaaccacgagccataacgacgaaagaaactcatgtcagacgattacctccagtacaagttaaaccgcaaagtagtgcggggcgtggaaaattaattaagaccggatgcctaccggctagaaaatacgccgtaaaagcaagttatacccaaattgcctttaatattgcaaccgtaagggaacttgtttgaataccataaaagctactttaacggcgattgcgataactaaagtcagacgtcacaggattcagaagaagacgagtgaaacagcgtaactcaacaaatcgtcgacacccatggaaaaccaagacgtaaaagagggcactaaagaccaatgagattccaatccaaaccatgcatcag

SEQ ID NO: 665266 - DNA, 1177 bp, Homo sapiens
  misc_feature (961)..(961): n is a, c, g, or t
ttaaattgacctcacagtgtctgcaggctgaacaggaagcattggctggggaaggccctcaggaaactgacaatcacggcaaaaggcaaaggggaaccaggcacttttggccagtgtttggagcaggaaaaacagaaagatttgaaggtgggagggcttgcacgcttttaaacaaccagaattcccacaagcgcctcactcaattattctacgagaaacagcaagggggaagttcggcccccattaagcccaattcaccttcccaccaggttccctcccaacaaacactgtgggaatttacaatttgtgaccattgtaaatttgtgggtgtgtgtggatataccaaagtgtgtaaaccagtgttcaaggggtataagtttcaacccgggttgtgaaagaaatatgtgattgtgatttgtgaatgtgaactgtggaagaaatgtgtgaaagtatccctagtgtcactctgtgtgtatcacccctatatgagagctggtgtgaagtagttgcaagatgtggacgcacaaatctctctgcgaaggctctctcacagtggagaaaaccctctcccgggcctactccccagaggggtgtctccaaggcacaaatttgtctactctcagtagtcctctcctaaggcgactctcctcacctattaagaatataatgcactttgggggagtacatatcatcggagggacagaacacgagcgccacaaacacccagagaaacaccactggtgtgggagcatataaaaaaatgtgtagagggggactaatattataattataccaaaagttaatacaaaacaaagcagagggggagaggtttattctctacgcaccacatgttgtattttttgatggccccgccgggatactgtgggaaatcaatgtttgtaagaaaacaagctgatcccccgtatgtaaaccccgcttgcggtggttagaatattaacanaccccccggttggtgcctactacacggaggagtagtactagtcaaacagatatttaaagcggccattggggacacaattttctcaacccaggggggcgcgtgttttgaaaaggccccaaacgcgcgggaacaccccgcgggggggaaaaaacatagaacacccacattgtggtagaaaactttttatacgaacaaacagaggggcagcaagggatc

SEQ ID NO: 665267 - DNA, 227 bp, Homo sapiens
agtgagaatgatcttcatgtagttagcatggtagaggacattgtgtggtacagggcattattgagtaatgaattataagtatagcagaatatgtatagtgtttataccatgatgctgctttcttcaaacctacatatccgcagtagtactttttctctattataaagtattaatttagagtaccattttatacttctgatgtcttcattagaaatacaaaaatacaa

SEQ ID NO: 665268 - DNA, 234 bp, Homo sapiens
gccatcgcactccagcctggacaagagcgaaactccatctcaaaaaaacaaaaggatatggcctgacacacaataaccattcctaaatgattcactctttttgtttgtttgagagaaaaggtttcattatgttgcctaggctggtctcaaactcccaaagtgctgagattacaggtgtaagctgccgcgtccggcccaattcatgattggggggggggggaggggggggaattc

SEQ ID NO: 665269 - DNA, 99 bp, Homo sapiens
ctcccacttggtagctcctgttcagaagtgtacttcaagcggataaatttcccatcaacatcactctcttcgatgcacacatttccagtggctagaggc

SEQ ID NO: 665270 - DNA, 344 bp, Homo sapiens
actagtctcccaatggctccaggggccccatttgtagatgtaccaagccgactctataccctatggcctgtgtcccttccttttcctctcttgctccagccttacttgtaattcctcagttcacacctccatcatgtctgtgagtctcaagatctcctagcccttctccagacctgttcaagacacccctagcccttctccagacctgttcaagacacccctagcccttctccagacctgttcacgtgcccctttcatcaatccccatgtgcagaaccatagttgtccatttcacattgacttccatgtatctggagggcaaggagccagctctgacccaaata

SEQ ID NO: 665271 - DNA, 383 bp, Homo sapiens
  misc_feature (35)..(35): n is a, c, g, or t
  misc_feature (328)..(328): n is a, c, g, or t
gccaagcccagctcagtgtggaccagcgcaggggnctatggaggcttaggaaatgcaaggtacctgcatggaccaggcaaacgtgtagggtgtgtgaagttcgagaccaggcggatggccctagggtgaaaccctgtaggagcacagacagggagggccctggcattgggccgtgtgaggacgtggcctttgttttccccagccctgagaagatgcataccattgaaaagcgtttccaactgaaggcaagagaaaggaaatgagaacacagagcaattaattttcacaaaattgacttttaaaagaattaattaacgtttaagtttgntacttggaagtctttggaatcatgtttcaagtgggtgttgttgagacagagaagt

SEQ ID NO: 665272 - DNA, 642 bp, Homo sapiens
  misc_feature (32)..(32): n is a, c, g, or t
  misc_feature (34)..(34): n is a, c, g, or t
  misc_feature (43)..(43): n is a, c, g, or t
  misc_feature (53)..(54): n is a, c, g, or t
  misc_feature (60)..(60): n is a, c, g, or t
  misc_feature (69)..(69): n is a, c, g, or t
  misc_feature (80)..(80): n is a, c, g, or t
  misc_feature (100)..(100): n is a, c, g, or t
  misc_feature (107)..(107): n is a, c, g, or t
  misc_feature (169)..(169): n is a, c, g, or t
  misc_feature (178)..(178): n is a, c, g, or t
agtacacgagacgcttcgaggagggtgaagtncnacgtttttnatgcgtggcnnaagacncccgtatcntttatggaggntctgtgatggggcaacctgnaaggagntggccagccagcctgatgtggatggcttccttgtgggtggtgcttccctcaagcccgaattngtggacatnatcaatgccaaacaatgagccccatccattttccctacccttcctgccaagccagggattaagcagcccagaagcccagtaactgccctttccctgcatatgcttttgatggtgtcatttgctccttcctgtggcctcatccaaactgtatcttcctttactgtttatattttccccctgtaatggttgggaccaggccaatcccttttccccttactataatggttggaactaaacgtccccaaggtggcttttccttggctgaaaaatggaaggcgtggtgggatttgctcctgggttccctaggccctagtgagggcaaaaaaaaaaccatcctttccctttttaccccgtgaggccaagatcccctcaaaaggcaggagtgctgccctttcccatggggcccgggcctttgtgctgtgtatgtgaaccccccatgtgagggaataaacctggccctagga

SEQ ID NO: 665273 - DNA, 108 bp, Homo sapiens
gggcgctgtggcctggtgggtgcgccttgtgcctggaggcgtgggaggcctgcccccagtcctgcgtgctacccacgcagatgccgtggctggcttcgcgggggcggc

SEQ ID NO: 665274 - DNA, 138 bp, Homo sapiens
caatactgtataccacctcatctcaaaccccaggaccgctcacagatcttgtctcgctgtgctgtgaacacaagacatgcagcaacctggacctgcctactctcacgccctgaaacatgtacccgtgcaaaactgttc

SEQ ID NO: 665275 - DNA, 226 bp, Homo sapiens
  misc_feature (142)..(142): n is a, c, g, or t
  misc_feature (160)..(160): n is a, c, g, or t
aggaccctttgtgcccagaacgacgaccagccttaagcaatcttatccgaagtacggatccggcttagcgatatccttacctacatttgtgcaccatgtcagagggtgtgccccttgggacctgtgcggatatgggtacggnccggtgcgagatttacancctcttcccccagtaagaacacaagggtttaaaattggcatttactttagattgttcatttcaata

SEQ ID NO: 665276 - DNA, 82 bp, Homo sapiens
aaccatattaattggtattggttaatttgtccagggttttgacagaattttgtttacaagtaataaaaattttatctccaaa

SEQ ID NO: 665277 - DNA, 118 bp, Homo sapiens
tcttgaccctccgttactgacatgaggcggagaacggcgtaagtcgggaagcggagctgcgtgagcgagattgtgccacttctctccaacctgggccacagtgatgagactccgtctc

SEQ ID NO: 665278 - DNA, 366 bp, Homo sapiens
  misc_feature (166)..(166): n is a, c, g, or t
  misc_feature (198)..(198): n is a, c, g, or t
  misc_feature (298)..(298): n is a, c, g, or t
tgttcttgaaaagtggttcagcttccacggtcatccctagacaatttgccttttttttttcaagacacggtcttgctcctgttgccaggctggatgacacgtggcgcttggatatgggtcactgcagccttgacttcccagtgtcaagcaatcctcccacctcggnctctggagttgcagcaggacgtgtgccaccanaccctgctaatttttaatttcattttttcagagatggggtttcactatgttggccaggctggtcttgaactcctgacctcaggtgattgcctgcctcggnctcccaaagtgctgggattacaggcgtgagccatcacgcccagccagtacttctgcaaggaacccacg

SEQ ID NO: 665279 - DNA, 130 bp, Homo sapiens
gcggggattcaaaaacggaaaaagcttcccaggtttacccttgggggggggggggttttttaaagaaaagggggttaggggggaccccccttcccccccccggccaaaataaagttgggcccccctttca

SEQ ID NO: 665280 - DNA, 173 bp, Homo sapiens
attcggatgatgatggagactgtgagcctttcacatatgatggaggacagagcttgctctgtaacatgcacaagattcccgtgatgatggtgagtatgagagcctgtcacatatgatgtagggccccactgcttcctctgtatgatgctcaagattcccgtgagcacacagga

SEQ ID NO: 665281 - DNA, 355 bp, Homo sapiens
ggcaagggacatgggttggagggatcgcttacacctgagacgaactacagaacagcacgtaccagaggttggaagtccaagtcaaacgcagaaggacttcctcacttagcaaccaagagtttcagttttacccgaggcgttctcagcagcagcaagtaccttttggtggatttccaggctgaccttaggcaggcattcttagctgagacaccagggaggtggttagcgccatattggagtagcggggaatctgattccaggcaaacacgaggctccatcactctgtagaggcttctcccagcttacattgctctgtaggagcaccgcgtacactatatcaggatcgctcccgaga

SEQ ID NO: 665282 - DNA, 755 bp, Homo sapiens
  misc_feature (433)..(433): n is a, c, g, or t
  misc_feature (511)..(511): n is a, c, g, or t
  misc_feature (537)..(537): n is a, c, g, or t
  misc_feature (545)..(545): n is a, c, g, or t
  misc_feature (582)..(582): n is a, c, g, or t
  misc_feature (595)..(595): n is a, c, g, or t
gccttttcccgcgcgtgctgccttcgccgctcgggccgccgggggaaaacatggcatctgccctggagcagttcgtgaacagtgtccgacagctctcagctcaagggcaaatgacacagctttgtgaactgatcaacaagagtggggaactccttgcgaagaacttatcccatctggacactgtgctcggggctctggatgtacaagaacactccttggggcggttccttggtggtttggttgggagagtgtttctatagtgcccgagtgctcccgagattgcaaagcgctattctcagcgtttagcatgctcttcatcaggcagttgtgatggggagcacattcgagtatgcaaacagacactttgctgggctttgcatcagctaacaaatgcacttgtggaaagaaaacagccctgcgaggaattggcatncttaagcaagccatagacaagatgcagatgatacaaaccagctgacctcaatacatgctgatctctgccagctttgtngctagcaaaatgctttaagcctgccntccatatntgacgtgatatgatggatatctgtaagagaatggagnctatgatgcaaanactttttatgtactatcatcatgggcgggatgatctatatctgtggtgaagagatttggatggagctgtctactttatgaacaggctataactactcctgggcttggcggagctatatcatgttggatcatactaaaacgaaattacggccgtgaatctg

SEQ ID NO: 665283 - DNA, 591 bp, Homo sapiens
gatatgatgcacctgggcgagtgcttggggatggtcggctgaggtgtgaatgccgatggcggcacgcacgctgcggtagcatgatgtgtaggatggcatgctgaacagttgtgatggcggtggcagaggctgtagctggctgctgaatgtggatgggttgcaggactggatggatggctggcggcctttgtacagctgaagcatgagaaaggcctatacattgctatggccagaatgctgctagctggatgtgttgctgacacagcaatgcatgaaagcttgctgatactatatccagtctccataaagggagatgaaggtgattgggcttggccttacacaatgagggccagacgaaaagcatcctcaagaccccagtctgtagaccatcaaatacgtaggaataccacacatgaacagcgtagcattaactagaaaggacaatgctcaaagagtcttgtgtgcttactaagagcacgcacaagataggaatacacaaggagccttggcatgacttgattgataatacaagggaacatccagggaagtcccccattcaatgaaggtcaggagaagatagaaatgagagag

SEQ ID NO: 665284 - DNA, 179 bp, Homo sapiens
gttgttggcagtgtagtgactcatgtaacttgtggcgtgtggagctgtcgccaaattttgattgtgaacataggtgtggctgattcatgagaggaccgctgtcctcagatgaaggagtgggtcggagctgtgatcgtgaatgaatatagggagtgagactcaccaggaagcagagggct

SEQ ID NO: 665285 - DNA, 368 bp, Homo sapiens
cggaacgcgtgggcggtgagcgagcctatcgcacacgaggacactgcctctcgccaaggagtctccttcactccctctccacgaagaaggagaagaggaaacacccagaaggaacgcctggtgcagagcccccattcctacttcactggaatgtgtaatgcccccggagtgctattaaatcaccaccggtctttagccacatgcaccaacgggaagttttgtgtgttggctgctcccctgtcctttgccagcctacaggaggaaacacaggcttacagaaggattttccttcaggaggaagcagcccttaaagccctttgagtcacagatgagtgggagaaccatttccattaacaccttttggatta

SEQ ID NO: 665286 - DNA, 431 bp, Homo sapiens
gtacaatcctcacaggtgctgagtcctgatgaaggggtgttggttggtgttagggagcacagaaaaggtgctgcgaccccatagagttatggaatctgatggagcagaaagtgactctaaaccggaggtcacgatgtacatcttcaaactgcacacgtaacctctgagcagaagcccctaggaggtggggaacaccagctacagacgcctccccggcacatagaatcacagtccatccccccaattcaaaaaaggtcctgccactactcaggactgtctaacaaagtacaagcagtgacagcaagttaactacaatcctacctcctacaccccttacgcccaaaccccagcatccctaagaagtgacccctagttagaggctgtggtgagctatgattgcacgatcctccactcaagggatacctctaaag

SEQ ID NO: 665287 - DNA, 233 bp, Homo sapiens
  misc_feature (223)..(223): n is a, c, g, or t
tcttatcgaattcgacggtttctcccgctatgggttgagtggaagagagggagacttttttacctggggttggtggtgtagtgaaacacaaggatgggagaggttttgcaaatagcctgagaacagaaaccaatgtgcagtcaccgacacacttgaccagttaactttgcacttgtacttggctgtggctgttcccggctgtggctccccttcggcttccttngtcttcttct

SEQ ID NO: 665288 - DNA, 165 bp, Homo sapiens
ctagatcttgagcatcacctgagcaaagaggagaatacggatgatatcaagaacaatgaggagaatcacaggtgatatcagaatctgctttactgaggcgttggctactatgtaaagtcaagcatctttcagtagactcataaaagcttgtagagcagagttgtc

SEQ ID NO: 665289 - DNA, 100 bp, Homo sapiens
cccccgtcagagctatctacaggcagcaggcttgtagcaggctgtgggtttggtgtggtttgtcagaggctaaggtctgcagagtttccacacccagaag

SEQ ID NO: 665290 - DNA, 226 bp, Homo sapiens
taataacatcgtaatcggtaggcttggaactgagagtaccgcgtaataatcggagcccccgagatggcgtctccccgtataaacgagataagcgtctgactcttacctccctctctcctacgcctggacgcatctggatataggtggaggcacggagccaggaacacggtagatcagtctacgctcccttagcagggtaactactcgcaccctggagcctccgaag

SEQ ID NO: 665291 - DNA, 207 bp, Homo sapiens
ctcgagcatagaggtaaagcattttaactaaaaaaaaaaaaaaaaaaaaatcctaatttggtttttaaagaaaaaaaaaaatctataaaattccctattggcttagataaatacgaatataatatcttactgtgttctcacttgggtggaacacaaatggtgccaagaaatccacgtcactatactgggcaaacccaaagggtgggg

SEQ ID NO: 665292 - DNA, 689 bp, Homo sapiens
ggctgctgcagtgttgtgagttggaagctggggagctcggcatggcggtccccgctgcggccatggtggccctcgtgcgttgggccagagcggccccggtctcgatggccccgtggtgctcagttgagcagcgtgcccgtcgtcgctactgtgcttgggatgcacggagtctgttccggggccacagcaagacgacgcgagttcctggcgcacagcgccaaggtgcacatcgtgtggccatggaggttgcgacgggagtcgccttagcctcggggtcctttctgacaatgacggacaagcgtcttcttgctggagaaggaccggttggtcaaagaacaacaatttatcggggacatggggatacgtgtggatccagcctttgttggcattccaacgtaattcctgacgctattccgtgtacggtcgtctggagattaataacccattcgcaatctgggactgtgaggatctacaaaatgcattgccactgtgaacactaaaggggagcaacattcaatatctgctggatgtcctcgatgggcagatcactggctgatacggcaactaaggatgactgtggtgaccgtaatagtggatgccaagcagcacacctgttccgataggccgaagagcaggtgcagaggttcgaggtcagacgaaatctccctggaacaatgacaatcagtatg

SEQ ID NO: 665293 - DNA, 331 bp, Homo sapiens
atgccgtgagacaacagtgaaaccccatctattaaaaaaaaaaaaaattagccggtcatggtggagggtgcctgtagtcccagctactcgggaggctgaggcaggagaattggcttgaacccgggaaggcagaggttgtagtgagctgagattgcgccactgcgctccagcctgggcgacagagcaagagtccatctaaaaaaaaaaaaaaaaaatttgcgtcctaaatgagcgaagacgaaatgagttcccttgaatgcccccaaaaaataattcagaaattaacaaaggtaaacccagtaacggtaattttcacaattaacttttggta

SEQ ID NO: 665294 - DNA, 283 bp, Homo sapiens
ctcttgagcatactaggcccattgtccggacgatgggtctgtagcatccagaaatccctctataccttgtggctctttcttctcatctgtgagctggcctaccacccgagtctcgtcattcccgctctcctctgggcccatgagaaccgattgacccctcgctatgtatacttacaccatgtcgtctgtgtctacacagcttttttcttatgagacagggtcttgctgtgtagcccaggttggtctctaattcctgggcccacgctgtcctcctagctcagcc

SEQ ID NO: 665295 - DNA, 272 bp, Homo sapiens
gttggtgcagccatgtataaggtatatagttgacaagcaaaaaaagtgctgccacctttgatgatgatttttgctaaatggagaaacatttggctgcatccacatagacctgtatgttttgtttcaagttgaaagcttgcctccctttggcaacattcgtaaatgaaagcagaattttgggggtgcttttgccaaatatgtgagttttgtgcttctaggatgtatcatgggtatttgggctctagtaataacacccattttaggtagcatgt

SEQ ID NO: 665296 - DNA, 304 bp, Homo sapiens
gtggtatctttgatagtagcagagggtccgggacaactgtgaaccaggacaggaaatgccaacattctcccacctctttcccacccaacagaattaagacagtgagtgggcagagctcatgtggcagtgagggtgccaggtggctgtagggtggaagtctaccctgcagggcagaaaggttctccattctgagccctctcttcaatggctcagaaagcctaacccgcgacaaccaatgtataccttgaccgccctccaagccatcaaggccctgtctttgttctgcaggataagtgtgatccct

SEQ ID NO: 665297 - DNA, 134 bp, Homo sapiens
tccaaagaattcggcacgaggcgactccttgacgttgacaatcgagtactactcccgattgaagccccattcgtataataattacatcacaagacgtcttgcactcatcgagctgtccccacattaggtctaaa

SEQ ID NO: 665298 - DNA, 1318 bp, Homo sapiens
  misc_feature (483)..(483): n is a, c, g, or t
agcggggaacgagattggcggcttcgtggtgagaagcggtgtaggagtacaaattggtatgcttcataaagcagatgctaagacaggcaggtgttcttctgtctatgaatcatccttgttttgcattaccgacttgtagtcatagcactgctgtggaacactagcccactgggcgtgtgagcatggagctcataaaatggagtggattggtctagaaggagaagctatcttgacaacatctttattaccatgtacagaatggacgactcttatattggtgttgtgttatcaaactcctacagtatgtactactgtgcgttacgcaagagtgacatgatagagttggagaacgtcatgagtcattgcctaatgaagctctactagatgggtacgggacaacaatagtgatggtaatcgacgcttcattatgttggaggaggggcacattgatgagaaacagcggcactaaagccataattcgcncttcaggcacacaagtattgcgctgaatgaaccactgaagttgactcgtcgcgaccgcgaaaggaacagcgattgtaatgccagagttgctctcgtgagaagaacccaagaattttgtggacaggcaaaagaagggttgtactatcaatggctttgtaggggcaaagtgaaccccgttatttgcagatatgaaaatcaccacggtataacgtctgaagacacttggttttaccgtataataccttcgaaactaagaaggcctacctcgggaaagagggtcaattgccatccgagtgtgtaacggcgctaaccttcacccatccatttgcatttcggattacaaagtacacttcctcggaatggtgctccctctccagaagcccggaaacttgaactgaggttagccccaagtaggaggtttcggcgatgtgtggcgacggaaaactccaaatcacgaatggaaataactgtctggctcttcgaagattattttggcccaatttttttgggtagcggaaaccatactttccaaggctcgtgggcctggtttaatttcctaggacgtaggggtcacctacattaacgttctcaatacgcctgcaccataccggtgtaactcataccacgagtagagttactttccttccaccaaattatttgcagaaacacggtggattaccctatggtacgagatattttcaagcccgaaaacacatccacgtgcgagacggatatggataccacttccgcgcccaaatgtggtcgttagtcaacagcttcctttgaaatgtcttcacacaagggggtaccccacagacaggcacaaaaatacttg

SEQ ID NO: 665299 - DNA, 173 bp, Homo sapiens
  misc_feature (37)..(37): n is a, c, g, or t
ccccagggaaaaaaaattctttccccaatagaaaggnctgcccagaaaagaaagaaagaaaagttcccctttgctttgggctcgctgtatattgataagggtaagaattgtgttgcatgaatacccgctttgggggggatttgaagtattttgatgttgtgttttgcaaatat

SEQ ID NO: 665300 - DNA, 439 bp, Homo sapiens
cagagattcatctcttgacctcagtgtcacatgtctgaaaatatcaagtatgtttgagtgtcagaacctgagaaagaagcgttgcctataataaaaccttcataaaataaacaactgatttctcaccaaattcatgaaggcaaaaactcattgaggtggcgtatcaaaagactgaaatacactgtcaatcaagaattatacactttcaaagaaaccttcaaaagtgaaggagaaattaaggtgaagataaagaaacaaacgctgatggagttcatggaacctagacagtccttatgagaaatgctatatggagtcccacagactgaactgaaaggagagtggagaggagcagaaaatcttacacctaaaaagaacaacagcaacaaggaaggtgtcccagaaatgtcattacatttgtgtatgtgagcgcaatagtgtt

SEQ ID NO: 665301 - DNA, 829 bp, Homo sapiens
tcgctggtgttgccctggctcccggatgtgcgattgttgggctgctggtgctgtgatttgctgtgatgtggctgcccagcctgcatgcatgcctgccgtcagctctggtgccctgtgctgcctgccttgccctgtgtgtgcattgaatgctggtgagtctgtgatgcttgtgatgctttgcctgtgttgccctggatgctgggatgtgatgactggatgcctgatccctgtgccttgagcaatgctgtgcctgcgcacattgaggtgatgtgctgtgctgtgcctgactggttgtgctgtgctggtggattgcatggaactgagcctctgactccatggttatcattggattcccatgctgctggtgacagccatgggtaaccatggatgcctgaacaacagagtccgttgacgcaagtggttcagccttttacataccatcccattttccaccaccctccgcaagaatggaattcccacagagtatggggtgccacacgactcaagactatgccggccagaccggtgagcataagcctgacactctacggaagtacgcaaggcccacgggtatgcagagcagcaactcacccagcacacaaaatggatctcttacgcagacagaaggttggagcacagacagacggccagcagtcacaggacacaaagtaggtgaaaattcgagagagtaatctaccccgaaacggttgcatttctctaatattccttccgcttccgggacctgacttcggcagatttttggggcggttggcaaatctagatttagaagtaatctttatgaacgttgtctaaggtgaatattgctacg

SEQ ID NO: 665302 - DNA, 653 bp, Homo sapiens
ctcctgcgatacacgttcacccaggcctggcccgccaacagctactcagctgcttaaactggccccacaagtaccagacccgagaccaagccagagaagaaaccagagactcgttggccccgggccgagaagaaggctgctggccaaggggacgtccccacgaagagaccccctgtccttcgagccggagttacaccgtcacccccttggtggagaaccagaaagctcagctggtggtgattgcacccgacgtggatccccatcgagctggttgtctttctttgcctgcccctgtgtctgtaaaatgggggtccccttactgcattatcaagggaaaggccagactgggacgtctagtccccccggaagacctgcacccactgtcgccttcacaccaggtgaactccggaagaccaaggcgctttggcttaagcttggtggaagctatccaggacccaattaccaatgaccagattacgattgagatcccccctcactggggtggccatagtcctgggtcctaagtctgtggctcgtatccccacagctcgaaaaggccaaggctaaagaacttgcccctaaactgggttaaatgtacactgttgagttttctgtacattaaaataattgaaataacaccaattttccttcca

SEQ ID NO: 665303 - DNA, 1950 bp, Homo sapiens
  misc_feature (96)..(96): n is a, c, g, or t
tagtctgcgtgctgttgtgtttctgggcgcgggtgtgcgtcgttccgtattttcctggttggtgctttgtcggctttggtgctgtgctctctagcngtctgctgtgttcgttgtgctgcttggtctgtctgttgctgcgtcgctgagtgttgtctgtggcgccgacgcgagtgctgtggtcgtgtcgcgcgtggttcttcggtgcggttgtctgtctgcttgcgtttgtttctgtgcctggggcgctcgtcgtgtgggttggcgggtggttgggtgggccggcttctgggggttgcgttgtgcggtgctgttctgtggcgtctgtttggttggttttgggcgttgtcgtgcgtgggtgctggcgcttggtgtctttcgtcctgtcggtctgtggtgtcttgcgtgtgttgttgtctcgctagtggttaggttttgtgttgcggttcccacgtttgtgttggacgctggtcccgtctgtgtgggtgtgtgcagatgaacctcaccgacttggcggctgttggttggtgggtgggccccccacttgtctgttgggatctctctgctcgagtggtgggggtgtccaccacagacgtgtgtgtgttgttacgccaccgtataagtctccgcgggctgttttggtggtttttattctcgtcgcggtgcctctccgttggtttctgttagtgttatccgcgttgtcgtttgtgtaatggtgttttggtcggtgggtcccttgtggtgtggggtccgtccatatttttctgtgccgcttccgttggtgggttttgtcctcttgggaggttgtgctcctccggtggtgctgatcgtctttggctgttgttcgctcctccaggttggtggtgtctcctcaacgatgagtgactctctattctgttggtccacagtgtggtgttcctgctcgggggaggttttttctctacttcgtatggtgatgtgcgactctcgtcgtcgcgatgagtctcggtacgcccgccggtggggcttgtggcacaagtgtgtggtgtgctgttccgctccccctgggaggtgtttctcgccccgtggtgggttactgctaggggtgtcgcccccctcttgtttttgttcgtgatgtcgctcttgtagcggccggctgttttgttgggggctcttttgtgtagagattttgtttgtgagggctaccccccgcgggcattattcgcccctcggtggtcggcccccccagaggtggaagtcgctccgcatctccccttgtggctgctctctgtggggcgcgctctcacaccgcgcttgtcttgagatgatagacgagatgtgttgtttttctcttgtgagagagagtgagagtgatgatggatgatttttgtgtgccccccccctccgggagcgctttgcgcactctctccgcgcgccccctggaggcgccacacccacctgtgtgctcaccccgcggtgggtgtgtgtggagaccccgcgtgtgacttcggcgtcgctgtgttccgcctctggtggtgtgggtcgccgcgccgttgtgggggtgtgcggtgcgccctgatgtgtaccgcgccgcctccgccgcgatatgtggccgcggggggatattgtgttgtgcagagagttgtgtatatatgtgtgggtgtgtggtggatgactggagaagtatatgtggccgttgaatatgtgtggagaagtgaaagtagtgatgattgtgttaccatgttgtgtgttgtatggctgtgggtgttaagataaggaggtccacgatgtgaatagcctcttggactttgtgagaggagaaaatgtttgttatgtttggagtgtttttgtggacaccagcgtttttagggtttgtttgacacatggaaaaaatagaagagtgatttatcccccccccttgtcgtgtttccccaaacaccccaaataaggggggtaccacccccgaaataaaat

SEQ ID NO: 665304 - DNA, 1459 bp, Homo sapiens
  misc_feature (321)..(321): n is a, c, g, or t
  misc_feature (944)..(944): n is a, c, g, or t
gcagctcctccgcccgaccgggcgctcgcactctgtcgctcctggtgcagtcaccaggacctcctcgcccgcgcgcgcgaccgatgctacagccagtcaatgatagaagatgcaagaatgctgaacgctcgactagggtagcaatctgcctatggcatcgagctgagcacggcgcgatgcctgacaagattggctggcggaagatatgacgcactgagactgtgagagtattgaccctggcatgttcaacatgccacagagaagaaaccttcgaaggtgacaccgaacgaatgagagctggagtaatatctacgtctgagnggcgtctccagatgaatgccgcaagagtaaaatatgctgtgatgctgagtcgagatggataagaatggccatccgatggccttgatagcccggacgcttagcatttcatcttgcaaacgaggacgacatccaagcatggattgaagggacagcagttcggcatcggatgcgcctagggcagcgtcgtaggccaactagcttttagcaggacacccgtgtgacgtgataggcttgatgaaagcgcatgcaagagtagacgaagatgaagcacgaagagctttgaaactccgttccatatgagagcagtccgaggcaccttgaaagaggacttgaaaccgacctgacaaagtagggaaggattgtcccagcgtacggtactacccaagatctgcaagacattggagggctacaactgcccataattagtgcgggcaaagaaattgtcggaacgcggacaaacaatactcgtagattgacgggtggggaccctcagcctaagaccatcgcgttcttagtccacttggagggatgccgaaccttgggggacacggttggacgaagtatcggaagctggggcttggaatgggtcgtcctagaaaaggggtcccaaaggttcgcggaanaaaggcgtgaggaacaggaagtgcaacgtttaaatgacactttgtgtgtggaattctcaagaagcactgtttgaaacagagcgcatttaacagtgggcgttggtgagaaagagggataataggtatagtttctcggctcaacacagaggaaacatgagacggaattattttcgcgtagtagaaaagttatacaagggagcgtagtatctagaagaaaaactgcacaaagacaggaagtctatagaaaacatgagggagggaaataatagcgcgcgaaaaaggtggtcaacaagcgagaattgggggagaaaaaaagaatgatatgaaattatataagaaacgaaacagagatatagtaacaaaaataaaaacatcacatattataacaacaaatggacgtcagagaatcacaaatacagatcaggaaacacacaaagagagaagagcagatcgataagacaaaaccttcttaataagaggggaaagaatgatgaacaaacgagactcgcacgaaa

SEQ ID NO: 665305 - DNA, 120 bp, Homo sapiens
tcgtgatggcacgttgatcgcgcaggatgaagtctagtcgtcaacgaaaaattcgggattcgcctcaccgatatcatcacccccgcggagcggatgcgtaagctccgcggcggataatcg

SEQ ID NO: 665306 - DNA, 156 bp, Homo sapiens
ctggacacatggtgaagacttggacattccttcaaagttactagataaagaaaacaatatttagtaaatgaaactagatttcaaggtaggaaaagtagtactcaagaatgtatttttggatacaaaaattcagttacacaatctgtcaatcataat

SEQ ID NO: 665307 - DNA, 343 bp, Homo sapiens
agcctgttcatcttctgcctcagtcatcagaacctgatggagttttgccctgaccaacccagagaagagcatgcaccaaagaaacggagagaaaggaaaccaaagcctgatggaggagctggatgcctgaagtcctggatggtgtaccacccgacgcatgagtggcatggcccttcagccatggataggctagtccctgcagaatcccatttattggctgaatcttcagactggggaaagagagtgcaaaactccaatatgaggacaagttcctgaaataacttgaaaggcaaaaggatggatatcaacaccaacacctacacatctacaggatactcaatga

SEQ ID NO: 665308 - DNA, 138 bp, Homo sapiens
  misc_feature (1)..(1): n is a, c, g, or t
natgtagcttctcgtgtacatcgcgcatcattggatatggtagtgtgttggtagtaggctagtattaggagcgttatggagtggaagttaaatcacatggctaggccggaggtcattaggagggctgtcgggggggta

SEQ ID NO: 665309 - DNA, 364 bp, Homo sapiens
cgagctgctggggaggctgaggcgggagaatggcgtgaacccgggaggcggagcttacagtgagcagagattgtgccactgtactccagcctgggcgacagcaagattctgtctcaaaaaaaaaaaaaaaaaggttttttttggcggggggaggaacatatttttcatggaacttcccaaacggtggcctttttttttggggggtttttgttggaggctgaggttaaggtttttcttaaaaaaaaaaaaaagggtttgggggaggagaaattttcccggccctttttttttttggcggttcccccttgtttaggcagttcccccttgggtaagaacttcccccttgattaaccacctccccctt

SEQ ID NO: 665310 - DNA, 1236 bp, Homo sapiens
gaatatggcgacctccacgggtccgctggcttctcctccgagcttgcactattcggcttcctctgggaagcgtcctggcggcctcgactcgggggcctcccgcgacgacgacttgctactgccctatccacgcgcgcgcgcgcgcatcccccgggactgcacacgggtgcgcgccggaaaccgcgagcacgagaagttggcctccgactcctcgcgactcccgcgaccgccggcggatctggccgtgcagcacctatcgtagtcgcaacttcagggaacccgcgccggtgaaccggaccaccggtgacgcgggaccagtagaggcccccttagcgccaccgatcctcgggtagcataggaagccaccgggatggggcccccaggggcgggcatgcaggcggggcggaggactgaacggcgccccaccggtgggcatgggacgaaccgggcggccgggagcgggcccagagctggcccgtggtacggccacgcaagaacaccgcggcccagctgtacttaccacggccgatgggcaacgtccgagagcacgaacgtggccattgcgacgaacaaccggtagggctggcaggacgaaccgaacggcggaccgggcgatgacggccaagacattcccacgcgggagagagactttgggccacggtaaaaacaggacagaccaacgtacacgggggggcaagtcccgggcacccggcggcaaagaggggcaaaccccctttgggctaccaaacccgggggagttaaacccgtgaggtctatgaagggcacaagcgaagggtacgcctaggccacgccaccgtggggacgaaaaagccccccaaggagatgcggagaccaacggccttgctctagcaacattcggcgaggcgcccgatggtgggcggccctgcgcgaccagccggacaaatagggcgacaagacactccataaccgcatgcaaaccgacaagcagcagcccaaagagaccaaacacaggacagggtgggacgaccacgcacggacccagccccggggcagtctaccacggggctagcccgctggtgaaggcacagcaagctatgggcgcacgacgctcggcactacagtcaggcccccacggcgaacacggggacccgacatgtggaccacggccacaaccccgtgagcacaaggagcgccacgacacatggacacgcccccctatgacatgggggcaacaaagcgcgccacaacgggggg

SEQ ID NO: 665311 - DNA, 541 bp, Homo sapiens
cccggcgcccgaagaatctgtcagaggttcccctggcccctccaaagacacgaaggatctttccctggaggaaacttccgaacgaaattacgaagctgcagaagaaagagcaagtcccatgaacgctgaggtctgaagcagctggctgagaaacgagagcacgagaaagaagtgcttcagaaggcactagacgagaacaacaacttcagtacaatggcagaagagaaactgacccacaaaatggaagctaataaagagaaccgagaggcacaaatggctgccaaactggaacgtttgcgagagaagtatcagcacattgacgaagtgcggaagaacaaagaatccaaagaccctgctgacgagactgaagctgactaatttgttctgagaactgactttctccccatccccttcctaaatattcaaagactgtactggccagtgtcattttattttttccctcctgacacatattttagaagctaatgtaggactgtataggtagatccaggtccagactgtcagatgtagttctagggga

SEQ ID NO: 665312 - DNA, 318 bp, Homo sapiens
cagagtccaacagtgcccaaatagcttaaaataagtttccttgactcagtctgatgaacgaatttcctttcctggccaacgcactaaaatgatacggctctgatgagtggaggaacaccagggttcttggtgctcatgccagtttagataaaacgacatggacacacgtggagtggttttaaggagcggagagtttaataggcaagagggacaagaaggaagggagaaggaagaagctcccctatacagagacagagggaggggggctccaaagccaagagagggaacccccatgacccttagtcttgagccatgagt

SEQ ID NO: 665313 - DNA, 141 bp, Homo sapiens
gaggatttagtgtcatcccctttgtgctgtcatctacttcgtggggtgcaggatccaccatcgtggggtgctgtgagggttggaggtcctgtgtgagccctgggaatgcatggttatctgagcagtagcatttcctgtgga

SEQ ID NO: 665314 - DNA, 215 bp, Homo sapiens
tctttcctccaggtcctgaaacctgtccccgttccagcatgattacaatcctcagggcgctcctgatgtatatggatgtgagatgatgttctgtttttattcccctctggcttttgtggaatgaaatgattttcactttgtaatcttgttaaccgtatcctctggacactgagactggaaggagaataataggatcttgttgtttttaaactata

SEQ ID NO: 665315 - DNA, 122 bp, Homo sapiens
taggccttttgctgcttttgacgtagactgttttcctgcaaatggtgcctgattatagaaaatttatgctctgtatatatgtggtatgatgaaactctgctactttcaaaaggctgcgataa

SEQ ID NO: 665316 - DNA, 1295 bp, Homo sapiens
gctacgcccgacttgtgcgcgcgggacgaccccgtcgttgcccttttcccctggactggacagtcgcggagtggcacgcacgatgcctggatgtgtaactgttaatactgacgttgacaccacggcagtgcatgcttcagtcaagagtctcctgttgacaagtactttcccgtcatccaatgtccgggagaagctagaagaagtccctcggaactgggctcggatactcgtaccaatcgcatggaccaaagcacatacaagaagtttgcgtccactatgactgaagaagcctgagttcctatgactgcggatccttgcttcgcgacaagactgcgagtacgctgtgaccatcctgtgggttggctgctttggggtgtttcggacattctccattgaggcgataggatcgttagtagagtgcgagtacaggtaccaagaaagaaagcaggtggtttccaatgactcgcgaagggtaaccgtatcgatgtcccgtaggagccatccccaaaaggaagtagtcgaggtccacgtggccagcggggttccccgttccaaaagcgccccatgccgtatgggggggcattgcaaatagatttgggtttgggaaatagacggtacgcaaaggcaattgtgccagtggccgcagcgcaaaaccattggacaggcactctccaagcggggacacgaagaacggaggtatctctttgggtaacgagggcaaatccagccgtgtgtaccagtgggttgtggccatgtgcgtcggcacaaaaagcgatacggcaaaggagcgatttttagtagaaacagaaacagctactggtgctaggggggatctcattagcttaaaacactttggggccgttaccaattttacgggtttgaacagtacgcgtgggaaagagttgaggcaaaagagaaagggaaaggaacttgtatgcgatatacagcataagacttgaacgatattaaaagaaagaatgggtcgcgagtgagggaagcaacattgcatgaaggggagggaagcggtgagttgaagcttcggacacaaagagctgaagttactagataaacgcagagtagggtgagagcttgacaagtgttggatccaacgcaagcggtagggtgtgacaactcaaagtagggattagggaacccgcttggattgggggtgtaagtagaaagctgggatggacgaaaggaaaaagatatcgggtggagaagcgggattctggagggccccatttggaagttacaagttgagcggggcgagacgatatagagtatatctccaaatg

SEQ ID NO: 665317 - DNA, 618 bp, Homo sapiens
  misc_feature (22)..(22): n is a, c, g, or t
  misc_feature (62)..(62): n is a, c, g, or t
  misc_feature (66)..(66): n is a, c, g, or t
  misc_feature (79)..(79): n is a, c, g, or t
  misc_feature (91)..(91): n is a, c, g, or t
  misc_feature (182)..(182): n is a, c, g, or t
  misc_feature (307)..(307): n is a, c, g, or t
  misc_feature (312)..(312): n is a, c, g, or t
  misc_feature (341)..(341): n is a, c, g, or t
  misc_feature (357)..(357): n is a, c, g, or t
  misc_feature (377)..(377): n is a, c, g, or t
  misc_feature (480)..(480): n is a, c, g, or t
  misc_feature (505)..(505): n is a, c, g, or t
  misc_feature (508)..(508): n is a, c, g, or t
  misc_feature (530)..(530): n is a, c, g, or t
  misc_feature (539)..(539): n is a, c, g, or t
  misc_feature (558)..(558): n is a, c, g, or t
  misc_feature (583)..(583): n is a, c, g, or t
ggactagactcttctggtaggnagagagcccctcctcggccagtttccgagcctggtccacnactnctcagttcttctngctcttggcttntgtggccttggcatccagcgtgcacggggcatgagtaaggcgcttcacagcatcaagcacacatggactacagtgctagcaccagcaaaanggcattaatgacagacaaagtaaaaccagaagtagagagggtggcccagcactccgtgctggaatccgtcgcggtgctctgtcaggaagtagagtcacatccccaaagatctcgcgcccacaganaccanaagctgtagaatgaagcggaggggatgcnggcggagaaaggcgancaccacccaaaggctgagtngtccccacaagcaagcagtgatggtttacatgcacacatgtgatagttgttacccaggatgtaccggctgtctcccttggcatactctttccagagttgaganaagaaggcttggactccaagcaggnctncgtagtagagaacgaaccagcnctcgatcancaggagaatgaacccacanactgcaaaccagcacagggacagtngccgccaagtccccaatgggacaaccgcagcacga

SEQ ID NO: 665318 - DNA, 97 bp, Homo sapiens
  misc_feature (2)..(2): n is a, c, g, or t
  misc_feature (87)..(87): n is a, c, g, or t
tntacaatttaatatccaatttaattttttaaaaacttaagtaaaaaatataacagaattgaaacatttaaggtacactcactaccnatctccagta

SEQ ID NO: 665319 - DNA, 150 bp, Homo sapiens
tgctaggattacaggtgtgagtgactgcctggccagcagagatttctgaggtagttttcctgctatagtaacactttggtcaaagtgcaggtctcgttaaggagaacaagtattccagtacatctttaaataccgttgcttgttccgctg

SEQ ID NO: 665320 - DNA, 105 bp, Homo sapiens
  misc_feature (5)..(5): n is a, c, g, or t
  misc_feature (34)..(34): n is a, c, g, or t
  misc_feature (62)..(62): n is a, c, g, or t
ctcgnaattcaagtcttctaacagatgtacgggngacatgaaaagcgtaaggagtgtatatntgtaatcaatagaccaacaactaaaataaaggctgatagatta

SEQ ID NO: 665321 - DNA, 225 bp, Homo sapiens
ggattttcatttggttcattgtatttaaatgtgagggatggatggctgcggggctccaagtaagttattgggatgttttttatattccaggtgggctggacatttttattttattttcccaaaagctttgtgatgtaaatgctatttccatgagaaaattcataaagggggttttgttcctttgaaatgtataatgtaaagacattaaatttcctcatttaagga

SEQ ID NO: 665322 - DNA, 709 bp, Homo sapiens
cgcacgcgtgcggtggacgcgtgggtcgacccatgcgtccggagatgtgtcagtagaagcatgagctttgaatataaagttatgagatgtcttcataggcagtatggcctatgcttctgccgacagaaacatacagtacaaagttctctaggagtgtctagtgtgttccagtgcaggttcgaagagaatataattatacttccgtcagctcatggttttgctaacactatctgggactccacattccacttcttaattgagtatgagggtggttggaaagctagccatacgttgaagtggcgtttgattgactaatcaaaaatgtacgcagacattatagcgcgaaaagaagcttacagacggaaggcacgtttcaagaagctaattcagctgtgccaggatattattcctagacatattcgcaccgtggaataggccacacaacgtatagaccatagacactaaggtgtgcatctcttagacgtggagtagtacacggcatcacgaacgaatttatagcattacagcagaaatacctgttgtcatggctcatgtcggtgcggggcatcaaggtccgtgtaagtcccatgcacatttgggacggccgacggtgtggcatgatcaccgagaggtcaggacgttcgagacccagccttgccaacgatagtgaaacccgtgtgctcgtactgaaatataactagatggcacg

SEQ ID NO: 665323 - DNA, 904 bp, Homo sapiens
ctctagaataggttgcgactgtctataggctcgtgtgctgtcccccctgttgtcctccccagtttgtgcccagcgaggttgaatgcgcggctctcgccttccgaaggcgttaacccttgtcgtcaggtgaagccctcctccctgggggcccggtgtttcccacgcagccgagggctcttttttcccgaggaaccggggttttctttcctgtccttgggggtctttacgcgcccctttcgaggggtatccttctcctaccggacgcctctcttttggtgactccttggacgaaggtgggaacccatttggtgacaacgccccccccctcgtgtggcgccgcgagctgacaccacgtcgtggtggcgaccaaactttagggccccccgggggccaccaaagggaaacgggccggccaaccatcccagcaaagttccccaagggtgcccccgcccctttctcatcacgagatggtcccctggccaccccctgatccagcggagctttccccacaagggggctcgtctcagaccccgtctactgaccgaacagaggttccccatcgagcgccatactttaatactggggggtagccagcgtggcgccccacgaacgcggggactccacccacggggggtctacacagggaaaggaactcccatcggggtgcttcccccacagggcaaccccacctggggggccccacgcgcgggcagtaaccaagcactaaggccgctgcacacattctcgctctgcccacccgtgaggagcatccccggaaacgaaatcacctccacgaggtgaaccggctcgtaactcaggagtcccccccacgcgagagtcacatggcagggccgctggcaccccttttcctttatcattattttcaacccccgcccacaagcaa

SEQ ID NO: 665324 - DNA, 157 bp, Homo sapiens
catcaacttctgactctgaggggtctgttccacttcggaaaacataggggcaagcacaaaagcacaaacatgggtcaaaggaaatcttaaaatgagaacacacaaaaaagtgaaagagaaattggaaggggaaaaaggacaaaagcataaggctccc

SEQ ID NO: 665325 - DNA, 863 bp, Homo sapiens
ggatgttatggaacttgagccttgatgtgaggaaggattctctgctgtgccggtgctgacttggacagtgattttccccattgatccagatcagattctatctggtatcctcataaaaaggaggccgggttcctactcccaagctgagagaacttggtggaatgcagaggacctcatcagtgatctcacgtactccagcatgttggtggtgctggtttagtgtctccatctaggatgaagcctccaggccctgaacagaggagaggattgacctctcaggattgtgtagaaacttcaggagaattgattccttagtaagaaagatggtcgtgctgtatccctactgacttctccagctgctggatataaaaagcatgtttgatcctctgcctttgcgggaccgattctgaaggacaatatccaaataatttgctgaggcaaactctgtccagtgtcaataaattccgttgatatacccaataaatcccccctggatagttcggcattctccaccatatgttccatgcctactgtgctatccgtcgtcgacgaatgcaagggctctcttagagagtcctagagtttcaggtagaatgtgggaagagcaggatgaacaattgtggagttaactcaaatgagggctttatgtgcacgatgggacacgattgctgagaatttctggtcgctctggaagtttaggctacggggtttgaaaatctgggacgagctaggaaagggggcgaatttggggtgaaactaaactcagggaggtgcttatttagggaaaatgggatttttaagggcggggacattggggggttccaattaggaagatatcaaacggtggggggtgggtgaatgag

SEQ ID NO: 665326 - DNA, 533 bp, Homo sapiens
  misc_feature (159)..(159): n is a, c, g, or t
ccccaagaggttgggttggccatccaggcgccgcgggtccagttttttcctctccctcccccagggagttttttattagataatgcggggggagagaaaccaccccctttgcccttggtcccgcccattctcgggcctagggtgccccccgatagaaangggtttccgcgcccccactattgggtggaattttttccggaaaagggctccccttttgcggggagaaacaccgtcccccgggttaggggtgggtccgtttttaaccggcccagggttcccccccttgggccccccccccccccgcccctggttggttttacttaaggaggggctcccctgtccccccccgggccaagggtttccggcaagaagcccatttttccgtttcccgcggtgaaaggttccattcccgcccccccccccggtccgaaggttttggtttatcccccctttatgggggccccaaacctttttttttcccccaatatgggggtctccccaaaaaccgcccctggatcctccaatgcctttga

SEQ ID NO: 665327 - DNA, 115 bp, Homo sapiens
atgtacagattgctggggcttggtgtaaaactaggcgggtgttttctcgtgtgaatgagggttttatgttgttaatgtggtgggtgagtgagccccatagtattgtggtgtgttg

SEQ ID NO: 665328 - DNA, 152 bp, Homo sapiens
  misc_feature (104)..(104): n is a, c, g, or t
  misc_feature (124)..(124): n is a, c, g, or t
cttaaatgcctgttgtgatatcttctttaaacctggagagattgaatcaacctttctctaaaattcctttcctttgcctcctcctctaacttttcctcctttcncgcttttcctcaggctttgnttttcctcatgctttgcttcactctatt

SEQ ID NO: 665329 - DNA, 310 bp, Homo sapiens
tggcatccatacgaaagtctcagttatttatggattcaatcatggtattccccaatagagatcacaatagagatctccaacagtgatctcaggcatttaagaggaaaaatattcccgggtaaaggggaaaatggtgcggatgtggcttcgggaaaacctccattctaaagcagcgtcatagtgaaccattccatttaaaactcgggacggtcccttctccagctgggctgtattccacattcagggagtaaaactggtatggatcatgggggccccatgtgggtcccaggggctctggggtaatttctgg

SEQ ID NO: 665330 - DNA, 245 bp, Homo sapiens
acacctttgattaatccagttaaagcttctgaagagcctacatcttagtggtaggagacaagaagacaaggaatgtcaacatagtggttacatgaaccctgtgctagattcagagaagacctgtggggaggttggaccaccagaggaaagatcttctttagaacagatcctactttatctaacacattcaatagccagaactctgtaagtgttttgtagcacttgggtaaccgacagctcgaatt

SEQ ID NO: 665331 - DNA, 238 bp, Homo sapiens
ggctttttttttccccctcctttggcccccctttgaatgtttccccgtttattgggatttttcccgccatcaaacccttcagggaaaatttccctagctttttactacctccgatcaaggacttttggtaattggcataacctcctggaatagttgaaacagggatatttttctttgcttccctctgttgtctttgtcttttcccgtcttcataaaagtgctggtgcccggggtttta

SEQ ID NO: 665332 - DNA, 556 bp, Homo sapiens
accggtcgccgagcggacagcataattaaaggaagtcgggatggatgctacgtttaaatacatgtgaaacatacggtgacaaacatactggggtttactattttttatcctaaagccatcaagagtgcctcccaaaataagaccagtgaagacaaagtatactatcaaatatggcttccagaacaaaaaccctctaacaagaatcaaacctatttacaaaattttacgagtcttttaaagtttcatgtgaaacaaaaggtctgatatagcagtggtaattaacatagaattttcttagtttcattcttcctctcttttaaacagatgtcacaaggtaagacccagaatggcgcttaggacttggggttcgactggattctgtgctgtcagtttgggaatctggcttctttgtgtggttatgcactggagttgggatctgagatgggcgagctgaagtgctatctgcgctgcttgtcctagggcttgggtggtaattaaaaggagtcactctgcagcaagagtcccagtaggtgaagtgtgtgtgcttgttccgctg

SEQ ID NO: 665333 - DNA, 1058 bp, Homo sapiens
gggcggtctccgtgggacctggcaggttccactgcccggaccccctggactccccaggccgagaaacgatagggacttggctgacggaggggcgaaggacagacagacggacggacacgcggagggtcgcagacctgggccgggactccctacctggtccagctgctctccctgactggatcccgtcgtccctccgcgtgtggggacccctcgacccagcccgatgactccgagatcccaggaattcatgcccgaagcggagagaccctcctagccttcgaggcgaccaccctaggctgcccacgccccttctgaagcacagggtggacgcagaagtcagcaggtgggcaggaggatgagaaagcgggcacggagcacggcagggacggacgcggacggcgagggagaagggggcggcgcatgggagaaggggagctacagcggagtctctgcgtgcccgcatgcgacgcgctgggtggcaactggaccccgggacgggcgacggcggcagggatcccgtcggcccacaacataggacgcacaagtcctgggaaccatgtaccgttccaggatatccaccagatttcccagaatacccgtgaaactgttgcaggtgaaggtatgatcaccacgtgactatcactacttgacgctggagtccgtccacagaattggaaccaccccgggtcgaatagaggtgcgcacaaacatcacacccttgagagtgggagacatatccccgatggcaaccaaggaggggaccagggaaggagactttgagccaagggggcaccaagagctagtaccccaggcggacaccagaaatctcactggagaaagagtcaggttagccaggggagtttaagccacggagaaagatagtttcggggaaaagatgtatggcctcgaggagtagcataagtacgggatgcaaattgagagagagagtaaatacgtagcgtattgtacagtaggattttgatagacaagattgacaagagtagtgcactaggtgatgggagtgcatatatagtatatagattatgttaagatatgaa

SEQ ID NO: 665334 - DNA, 1365 bp, Homo sapiens
gggaccagaagctttcagatttgatggtggtgtttgcaagcccatcgctacaagcaccaacacatgcaaacacatcactcaccatctttcacggcccagcaagttcatggcagcacttcacatgtatcatgctggcagcactgcactccatgatccacacagtactaggcacacatgggcctgggcaagccgtcagcaggccttggcaaacacccattgccagcagtgacatggcaggcatcattcacgtgccatcaagggcatgatttcaccattcatatcatgcaggcagtctatcgcatgcatgtgccagcagcagctttcataccctgcgccagcagaacaattgcaaatacatttgtacccttaacgtagtcttgccactgcaccgcacggagtcattccttccacactggaatgcactctggactcttacaccgtacgacagacggccaacagtcatcacatcgccattctcccgatccgctagcaggattttcgcaccgggacagtattgacagatagcagacaggaggcaaattaaaaaacgaggagcattattcgagtaatctgaaactttcctggacatcccagatacacacgtactcacctgtgtaattgccatttacaatcaattttaaccacagcacagccgccaccatccagcgcccacaaccaaccgcacgccacccgcaccacacccagcgcccacgaggaccgcacaacaaccgacaaaccaacgaaccaacgacgccccaacacaatgaccaaaaacatccgccacggcacacccaggcagcgaaccataccaacaaccccgccgaccgcaaactcacagcacaccaccctagcagcccccgccgcctatcccgacacaagaggaaaaacgagaaacaaaggacagccaaccagcaccaccacgacgagacgacaagacgaaaccaacgcgcacgacgcgcaccacaagcaaatcgacacactccaaccgcatggagacgacaagcagacgacacgccaccgagcatcgaagcgaaccgcgcccccgcacgtgccagcgagcaccgctgacgcacacgaccgacagagcgcagaacgaaaggcgaagagaacacacgcgaagggaaaggagccgggcgggcgacacggagcccaacacgggacgacaacgtagcccgagcggccgccaccacgacctagaaaggcgcaacgccgcaaacgaccagcaccacagcgcacacaccgctagcgagaaagacacggaatgcgagcagcgacacacggcagcccgtagctgcgcagaggcgaaagcgacgacgaaaaggagcagccgccaccacgaggacaacagcggctagcacaaccggc

SEQ ID NO: 665335 - DNA, 314 bp, Homo sapiens
tcgaactcttgacctcaatgtgatccacccgatcgggtcccagagtgctgggattacaggcgtgagccactgctccccgcctaaatgctacttagcttggttgctgattttgctgtgtgtttatgttttttttttttgggccatatttcagggcggggaagagcaggtgtctagtttttttccagccaacatcagagccggcagaattcttttaccatagagagggagtcgggaattcagccagtatgtgtgtgaccaggggtgtgtggttgaatgtgatgcctggtggaatattccatcctccagggtgctga

SEQ ID NO: 665336 - DNA, 575 bp, Homo sapiens
gtgacgcgtggggttgacggcttctggcgggtggcgggtgttgaaggcgagagacttgttatggcccgttgtcgcttctgtcccaagaaccggacggagagtgagggcacgagggtcgcgtgtcgggggtgctgtcagtcttccactgtacactgtcgtctgtgaggagcgctagtccgtgacatcttccgcgcaaccccttccggctccctttcctgaacgcctcgaggcgagcggcggccacccggaagaccagggcaaggccggcaaaccattcgccccccgaatgcgccgttaccacacgagagtccgccgagacgcgcggagaggaaggcgacaacagagaacaagacgaggccagagaccagcgaagacaacagagtgcacaaacgccccgcaaccaacaacgcccaacagacgagggcaccaacaggactagcagaaagagcacaaagacgaaaaaccacgaaaaaaagagaaggagagacgggacaaaaacacaaagaaaacgaccaaagaacagaaaggaagtgggacacacaacaacaaatgaaaaaagacaaacacgcagcgca

SEQ ID NO: 665337 - DNA, 235 bp, Homo sapiens
ctcgagaaggaagtcatcatgtatactcataaaacacaatttcattccttggtattattctctctgctgtgtgttaggtaagggctgcagagaaaataaggggtacactcacatatacacacctgaaactatcttgcaagtgttcccaaaccgtttctttgctatttattcccaaacattttaggaatttgttgactttaagatctcggtaagtttgtctcccgggggtaccgga

SEQ ID NO: 665338 - DNA, 393 bp, Homo sapiens
  misc_feature (2)..(2): n is a, c, g, or t
  misc_feature (33)..(33): n is a, c, g, or t
  misc_feature (314)..(314): n is a, c, g, or t
anaaaccccccacccatagggcctacagaaccnagtcgggagaaggaaggtggccttggcagcaatactcacccaatcccagacaccccctcaatggggctacagacagatatccctgtgatggggtacagttaagggacatctcaggactatttctcccattgcaattaaatccatgcacattgggtcggcagtgccccaccagtagagagagtaccagagtcagtccccagcccaagagaactaggcgactgcttgggttggcttctggatccatccataaaaggggtgccaccgaaccacaggcatgtacncacaagggcaatcccagacaagcccttaaatttgtaacccacccgaggggttcgccttgcccactccagcctggggaac

SEQ ID NO: 665339 - DNA, 119 bp, Homo sapiens
  misc_feature (12)..(12): n is a, c, g, or t
  misc_feature (38)..(38): n is a, c, g, or t
gctttggccctncaaacaaataaccggcccctaaaagntatgttatcccttttattaatcatcatccaagccctaagtttggcctatgagtgaccaccaaaaggatttgactggaccga

SEQ ID NO: 665340 - DNA, 414 bp, Homo sapiens
ggtcgacggagggatcatgaggtcaggagtttgaggccagtctggccaatacagtgaaaccccatctctactaaaaataaaaaaaattaactgggcatggtggcgggcgcctgtaatcccagctacttgggaggctgaggcaggagaaccacgtgaacctgggaggaaccccggaggtggaggttgcagtgagccgagatcgtgccactgcacttaagcccaggtgacagtgtgagactctgtctcaaacaaaataaatacctctctagtgaggtggctcacgcctgtaatcccagcactttgggaggccaaggcgggctgatcacttgaggacagaagtttgagaccagcctggccaacacggttaaacgccactactggtggcgggcactagtagtcccagctatttaggag

SEQ ID NO: 665341 - DNA, 225 bp, Homo sapiens
cacattgaatcactgttgacattacatgccaatggtttactcatgttgctgctgtggacgacagtacgggaaacgagaacaaaattactatcactaaatgacaagggccgttaggagcaaggaatacattgaacgtatggtccaggaagctcaggatgtacaacgctgaagatcagaagcagcagggacacggtgtcatccaagaaattcacagacagttcctat

SEQ ID NO: 665342 - DNA, 176 bp, Homo sapiens
cggcctcctgcccattcggggacatagcctgggatatctggatcttgggctgggactgagtgtgccaatggccattaggggcctgcatgagcacctcaggtagtgggcaggggtgtctgctatgcctggtgttgttcttgtccattgctgtcaccaataaaggcatggaagaacag

SEQ ID NO: 665343 - DNA, 434 bp, Homo sapiens
  misc_feature (65)..(65): n is a, c, g, or t
  misc_feature (426)..(426): n is a, c, g, or t
aaaagctggtcttggccggcctcgaggctcggcccttatggcggtccgcggccgcataataatantccccccccccccggtagtttctaaggatcatgtctgcgagccaggattcccgatccagagacaatggccccgatgggatggagcccgaaggcgtcatcgagagtaactggaatgagattgttgacagctttgatgacatgaacctctcggagtcccttctccgtggcatctacgcctatggttttgagaagccctctgccatccagcagcgagccattctaccttgtatcaagggttatgatgtgattgctcaagcccaatctgggactgggaaaacggccacatttgccatatcgattctgcagcagattgaattaggatcctaataagaccgacccatggtcacttggttcgcataancaatccac

SEQ ID NO: 665344 - DNA, 194 bp, Homo sapiens
gctgatggacttcaagctatcctccagcctcagggctcgagtagcttgtgtgagcaaccacacctggttaattttttttttttagggatggggttttaccatgctgcccaggctggtcttgaactcctgagctcaacgttatttgtttgccttggcctcccaaagtgctgggattacagattgtgagtaggcag

SEQ ID NO: 665345 - DNA, 213 bp, Homo sapiens
tggtggtagttggggaggggatgctcctgggctctccctgtgtgcctggggtggggttgagcctcagtagtgagtcagagtctgaggagtccctgaggaggaggagctggagactgctgccgtcggactcattatcttcatcctcatcgtcatcctgcgtcgtcgtcgtgctattcacagcagtattacttctcctatctctcccagtcctag

SEQ ID NO: 665346 - DNA, 1844 bp, Homo sapiens
  misc_feature (65)..(65): n is a, c, g, or t
aaaagctggtcttggccggcctcgaggctcggcccttatggcggtccgcggccgcataataatantccccccccccccggtagtttctaaggatcatgtctgcgagccaggattcccgatccagagacaatggccccgatgggatggagcccgaaggcgtcatcgagagtaactggaatgagattgttgacagctttgatgacatgaacctctcggagtcccttctccgtggcatctacgcctatggttttgagaagccctctgccatccagcagcgagccattctaccttgtatcaagggttatgatgtgattgctcaagcccaatctgggactgggaaaacggccacatttgccatatcgattctgcagcagattgaattagatctaaaagccacccaggccttgggtcctagcacccactcgagaattggctcagcagatacagaaggtggtcatggcactaggagactacatgggcgcctcctgtcacgcctgtatcgggggcaccaacgtgcgtgctgaggtgcagaaactgcagatggaagctccccacatcatcgtgggtacccctggccgtgtgtttgatatgcttaaccggagatacctgtcccccaaatacatcaagatgtttgtactggatgaagctgacgaaatgttaagccgtggattcaaggaccagatctatgacatattccaaaagctcaacagcaacacccaggtagtttgctgtcagccacaatgccttctgatgtgcttgaggtgaccaagaagttcatgagggaccccattcggattcttgtcaagaaggaagagttgaccctggagggtatccgccagttctacatcaacgtggaacgagaggagtggaagctggacacactatgtgacttgtatgaaaccctgaccatcacccaggcagtcatcttcatcaacacccggaggaaggtggactggctcaccgagaagatgcatgctcgagatttcactgtatccgccatgcatggagatatggaccaaaaggaacgagacgtgattatgagggagtttcgttctggctctagcagagttttgattaccactgacctgctggccagaggcattgatgtgcagcaggtttctttagtcatcaactatgaccttcccaccaacagggaaaactatatccacagaatcggtcgaggtggacggtttggccgtaaaggtgtggctattaacatggtgacagaagaagacaagaggactcttcgagacattgagaccttctacaacacctccattgaggaaatgcccctcaatgttgctgacctcatctgaggggctgtcctgccacccagccccagccagggctcaatctctgggggctgaggagcagcaggaggggggagggaagggagccaagggatggacatcttgtcatttttttctttgaataaatgtcactttttgaggcaaaagaaggaaccgtgaacattttagacacccttttctttggggtaggctcttgccccaggcgccggctcttctcccaaaaaaaaaaaaaaaaacactaatccatttccctaacctagtaacctccagatcccagaggctctcctcacctcagctgagctcctttgaaagtgattcaagggactatgtcactcagcctcatttgctggaccaaatctggagggagaacccctaaaacccctaagtgaggttgcccagggggttgtccccaggtggggggaagcaggggagagaaaatggtagccatttttacattgttttgtatagtatttattgattcaggaaacaaacacaaaattttgaataaaatgacttggaaactgaaaaaaaaaa

SEQ ID NO: 665347 - DNA, 129 bp, Homo sapiens
  misc_feature (35)..(35): n is a, c, g, or t
ggcacaatgacctgtcgaatccaccgtcagacgcntagggtctgaccgggtggcctgtgcctatcaccttttatgacaccttcccccccctgtattcccacccctggactggtggcccctgccttgggg

SEQ ID NO: 665348 - DNA, 1782 bp, Homo sapiens
  misc_feature (65)..(65): n is a, c, g, or t
aaaagctggtcttggccggcctcgaggctcggcccttatggcggtccgcggccgcataataatantccccccccccccggtagtttctaaggatcatgtctgcgagccaggattcccgatccagagacaatggccccgatgggatggagcccgaaggcgtcatcgagagtaactggaatgagattgttgacagctttgatgacatgaacctctcggagtcccttctccgtggcatctacgcctatggttttgagaagccctctgccatccagcagcgagccattctaccttgtatcaagggttatgatgtgattgctcaagcccaatctgggactgggaaaacggccacatttgccatatcgattctgcagcagattgaattagatctaaaagccacccaggccttgggtcctagcacccactcgagaattggctcagcagatacagaaggtggtcatggcactaggagactacatgggcgcctcctgtcacgcctgtatcgggggcaccaacgtgcgtgctgaggtgcagaaactgcagatggaagctccccacatcatcgtgggtacccctggccgtgtgtttgatatgcttaaccggagatacctgtcccccaaatacatcaagatgtttgtactggatgaagctgacgaaatgttaagccgtggattcaaggaccagatctatgacatattccaaaagctcaacagcaacacccaggtagtttgctgtcagccacaatgccttctgatgtgcttgaggtgaccaagaagttcatgagggaccccattcggattcttgtcaagaaggaagagttgaccctggagggtatccgccagttctacatcaacgtggaacgagaggagtggaagctggacacactatgtgacttgtatgaaaccctgaccatcacccaggcagtcatcttcatcaacacccggaggaaggtggactggctcaccgagaagatgcatgctcgagatttcactgtatccgccatgcatggagatatggaccaaaaggaacgagacgtgattatgagggagtttcgttctggctctagcagagttttgattaccactgacctgctgggaaaactatatccacagaatcggtcgaggtggacggtttggccgtaaaggtgtggctattaacatggtgacagaagaagacaagaggactcttcgagacattgagaccttctacaacacctccattgaggaaatgcccctcaatgttgctgacctcatctgaggggctgtcctgccacccagccccagccagggctcaatctctgggggctgaggagcagcaggaggggggagggaagggagccaagggatggacatcttgtcatttttttctttgaataaatgtcactttttgaggcaaaagaaggaaccgtgaacattttagacacccttttctttggggtaggctcttgccccaggcgccggctcttctcccaaaaaaaaaaaaaaaaacactaatccatttccctaacctagtaacctccagatcccagaggctctcctcacctcagctgagctcctttgaaagtgattcaagggactatgtcactcagcctcatttgctggaccaaatctggagggagaacccctaaaacccctaagtgaggttgcccagggggttgtccccaggtggggggaagcaggggagagaaaatggtagccatttttacattgttttgtatagtatttattgattcaggaaacaaacacaaaattttgaataaaatgacttggaaactgaaaaaaaaaa

SEQ ID NO: 665349 - DNA, 1492 bp, Homo sapiens
  misc_feature (65)..(65): n is a, c, g, or t
  misc_feature (1433)..(1433): n is a, c, g, or t
  misc_feature (1445)..(1445): n is a, c, g, or t
  misc_feature (1447)..(1448): n is a, c, g, or t
  misc_feature (1458)..(1458): n is a, c, g, or t
  misc_feature (1461)..(1463): n is a, c, g, or t
aaaagctggtcttggccggcctcgaggctcggcccttatggcggtccgcggccgcataataatantccccccccccccggtagtttctaaggatcatgtctgcgagccaggattcccgatccagagacaatggccccgatgggatggagcccgaaggcgtcatcgagagtaactggaatgagattgttgacagctttgatgacatgaacctctcggagtcccttctccgtggcatctacgcctatggttttgagaagccctctgccatccagcagcgagccattctaccttgtatcaagggttatgatgtgattgctcaagcccaatctgggactgggaaaacggccacatttgccatatcgattctgcagcagattgaattagatctaaaagccacccaggccttgggtcctagcacccactcgagaattggctcagcagatacagaaggtggtcatggcactaggagactacatgggcgcctcctgtcacgcctgtatcgggggcaccaacgtgcgtgctgaggtgcagaaactgcagatggaagctccccacatcatcgtgggtacccctggccgtgtgtttgatatgcttaaccggagatacctgtcccccaaatacatcaagatgtttgtactggatgaagctgacgaaatgttaagccgtggattcaaggaccagatctatgacatattccaaaagctcaacagcaacacccaggtagtttgctgtcagccacaatgccttctgatgtgcttgaggtgaccaagaagttcatgagggaccccattcggattcttgtcaagaaggaagagttgaccctggagggtatccgccagttctacatcaacgtggaacgagaggagtggaagctggacacactatgtgacttgtatgaaaccctgaccatcacccaggcagtcatcttcatcaacacccggaggaaggtggactggctcaccgagaagatgcatgctcgagatttcactgtatccgccatgcatggagatatggaccaaaaggaacgagacgtgattatgagggagtttcgttctggctctagcagagttttgattaccactgacctgctggccagaggcattgatgtgcagcaggtttctttagtcatcaactatgaccttcccaccaacagggaaaactatatccacagaatcggtcgaggtggacggtttggccgtaaaggtgtggctattaacatggtgacagaagaagacaagaggactcttcgagacattgagaccttctacaacacctccattgaggaaatgcccctcaatgttgctgacctcatctgaggggctgtcctgccacccagccccagccagggctcaatctctgggggctgaggagcagcaggaggggggagggaagggagccaagggatggacatcttgtcattttttttcttggangaaatgtcagtntnntgaggcaaanagnnngccccgtgacattgtgagccccctatgta

SEQ ID NO: 665350 - DNA, 1853 bp, Homo sapiens
  misc_feature (160)..(160): n is a, c, g, or t
gggatcagtgtcgtgggacgccaaggaggtcccgtataccagaagacaaggtggcccgcgagtggcgagtggacggccgcgagagagccgtcactcgcaggagtacactaggaagtgagattgtatagaaacgcttggagagtagagcgatgaaccatcnatcgggcagtctcactttctcactgctggctgtcttgacgcgcgtaatggtatctggatgaaacgcccgtctgcgcagtccagctggcgagccatatcaaccatggtatcaaagggtatactgatgatgatatagtctctaatgctcgcagaatctggtgtgtactgtgagcaaacacaggtcaactgttcgccatgatcgaccttgctgcagtctagcatctgagagttcagatctaaaagccacccaggccttgggtcctagcacccactcgagaattggctcagcagatacagaaggtggtcatggcactaggagactacatgggcgcctcctgtcacgcctgtatcgggggcaccaacgtgcgtgctgaggtgcagaaactgcagatggaagctccccacatcatcgtgggtacccctggccgtgtgtttgatatgcttaaccggagatacctgtcccccaaatacatcaagatgtttgtactggatgaagctgacgaaatgttaagccgtggattcaaggaccagatctatgacatattccaaaagctcaacagcaacacccaggtagtttgctgtcagccacaatgccttctgatgtgcttgaggtgaccaagaagttcatgagggaccccattcggattcttgtcaagaaggaagagttgaccctggagggtatccgccagttctacatcaacgtggaacgagaggagtggaagctggacacactatgtgacttgtatgaaaccctgaccatcacccaggcagtcatcttcatcaacacccggaggaaggtggactggctcaccgagaagatgcatgctcgagatttcactgtatccgccatgcatggagatatggaccaaaaggaacgagacgtgattatgagggagtttcgttctggctctagcagagttttgattaccactgacctgctggccagaggcattgatgtgcagcaggtttctttagtcatcaactatgaccttcccaccaacagggaaaactatatccacagaatcggtcgaggtggacggtttggccgtaaaggtgtggctattaacatggtgacagaagaagacaagaggactcttcgagacattgagaccttctacaacacctccattgaggaaatgcccctcaatgttgctgacctcatctgaggggctgtcctgccacccagccccagccagggctcaatctctgggggctgaggagcagcaggaggggggagggaagggagccaagggatggacatcttgtcatttttttctttgaataaatgtcactttttgaggcaaaagaaggaaccgtgaacattttagacacccttttctttggggtaggctcttgccccaggcgccggctcttctcccaaaaaaaaaaaaaaaaacactaatccatttccctaacctagtaacctccagatcccagaggctctcctcacctcagctgagctcctttgaaagtgattcaagggactatgtcactcagcctcatttgctggaccaaatctggagggagaacccctaaaacccctaagtgaggttgcccagggggttgtccccaggtggggggaagcaggggagagaaaatggtagccatttttacattgttttgtatagtatttattgattcaggaaacaaacacaaaattttgaataaaatgacttggaaactgaaaaaaaaaa

SEQ ID NO: 665351 - DNA, 233 bp, Homo sapiens
  misc_feature (105)..(105): n is a, c, g, or t
  misc_feature (189)..(189): n is a, c, g, or t
ccacgcgtcgggagatctctggatcatgacatccttttcctggcctgccgccgcggctgcgccgggccgatacgactccagcgacccttggggggtcgccccagncctggtagccagcatctcctctgggatggcggtccaaatgtcaggccggcccggcgtctgcaccaggtccccatcgtacgcagncccgctgccttcccgtcctcccgccaaggggtgcgaacaggcag

SEQ ID NO: 665352 - DNA, 241 bp, Homo sapiens
atggtgatctagagatcccccaacgatggtcctcagcttggtcagctccaacacattgtgctttcctcaagttgggcatacagcagcaatgcctcatgaatacttggtatttcctcacttggaataccctttttttttttttttttttggggaagggtgtctcgttgtgttgggcccaggctaaagtgcaagggtgcaaccccggcccatggaaatcctcgggcttcagcctccctagata

SEQ ID NO: 665353 - DNA, 136 bp, Homo sapiens
ggccgcggcgttcccgctcctgctgctgctgctgctgctcgcctggtgcgcgggcgcctgccgaaggtgctccaatattacctcaaggattacagcctgaacaacagctacagttgtggaatgagataaaatgata

SEQ ID NO: 665354 - DNA, 1687 bp, Homo sapiens
  misc_feature (1127)..(1127): n is a, c, g, or t
ttatcgtgggtgatgatatacttgtggcgttgtattagaatgattgttgggtggggccccacacagtggttgtccggccgtcttgtttgtcctcttggtttggtggagatggttttccctcccgccgccgagagtcgcttgatttggtggagggaggcttgctttctccggcgggtttgtgtgtggtggtggggggtcgcccctcacccctgggttgggtggtgtggggatgacgagcttcataatatgtgtgggcgccactgtgtcctcctctgatgattccttctagagttggatagtggttgtttcccctcggtagttgtgttgtccccccgcagaaagtgtttgttacgtcgtgggttgggtgttacatgcagggaagatcctttttgtcgctctgtctccacccagttatcaacgagtgtgcatccactcgttggtgtgtccgccaggggacgacctcctcgtcgtgaagagggggtagtgttctaacaccaccagtggtggcggcaggtgaatgaaggatcgcctgctgtggggggagtaacataggtgtctcctctcgctgtggatatgatctgcgctgtagtataatggtggtggcccaacagcatgaaatgggatatatgtggagatgttctggggggagatatttgtgtgtgtcgcagcgtgtatgattggtcttcttcatcgtcagtatattattagaaggagagatgctcatcttccggggagatatataatttgcgccccccttcggtgccgcttattaaaatatcttcggggaggtgagtaggccaccccccccagcatgttttttcgtcgctcgtgtgctgtccatcattgaaaggggtgtgtgagaaaaatcgtctgtcgctcagacaactctcgcgcagagtggtgtttagtctctctcttagagtagagagatgcctctcccctcgcgctgtattggggctatatttctcagcacgcggtttctctcgcgtgtctgtgggttctaccatagggggagccacgcttgagactctgctctctcacatatcctctgcacatagctcacagcgggggggtttctcgcggacacacgcgtagtacgctgtgtgtctctctcttgtttctacagnccctctctctcctgagagacacacaggtgtgagagtgtggagatatgtgtgtgtggtctgtctgtagagtatgtgttgtgataggggttattaccgtgagggctcgcgctctgtgtgtggctctcacgcaagattctacacacatgtgtccacgcagtgtgtagagaatgtgtatggtgtgttcttatgggagaaatgtttgttgtataatgttttgtgtgttgttataacgaagaataaataataaacatatcacataagttgtttacaccacgggccacagtatattagccacgctgtgaaacacatttttaactcgcacgagaaattggtggtgtttggtgtcacgaaacaccacatgtggaatatatgttgttcacccccccgagattatatgggagaaaaaaataccagattctgtctttgtgggttgctctactatggcgatcccaccaggtactgtgactgaatcggccccttttgtttagaaaaatattttaaaaggttagtaaaaaaaagaaaaaatactcgagcatataactcgggctgagaagagtact

SEQ ID NO: 665355 - DNA, 398 bp, Homo sapiens
gactcattgctgttgacacagagatgtggtgttcaaatttcccttcaaggaaggatttattgccccagctgcagtgggtattttgatggaacagctttcagcttttaatccttccatggaacacatcactatggaaagccgtctcaccaaggtcatgcccttctaggagaggctcacatctaatgatggatggatggatagaggcagggacataaaagaccagccactctgactcaaactgggatgatccttttgagccatttctgctccagaactccctgtggctgagtctgtcaaacctatatcacagttcaacttcctctctacccagtccctctttctcccttccttcccacaggtgttgattgcaagagcactcctgaacattaaactttgtc

SEQ ID NO: 665356 - DNA, 182 bp, Homo sapiens
cagtcttgagcctcgcttggccgggcccgtttctcttccgaccgtgctacgttttcttttgcctgacgacgaccctcccactggacggcacggggacctttcttgtgactctttctgggtcggggtttgtgctagctgctacctggacggccgtacggggcttcgtgtggggtgctcctcta

SEQ ID NO: 665357 - DNA, 879 bp, Homo sapiens
tggcagggcttctgcaagccctctgctcccaccctggcccatttcagcagacgaggaaacaagatggcccgaagaagagttccgcccgggacggaacgtggcatagctcgcagaacagaacccagatctccgtgagtatccctctcctcttgctagccacgttgcgacgtcctcagcgggcatggaggcatgctggttgaccgcggtggccgatcggggatgctagtccagaccccaagcagtgtggggacgcccaatggaatagtttgctgactcagaggaagtcacgttagttgggggaactgtcacgagctatgcttcagtgaccagtgaatcgtggcaagaacgctgggcttactagttatagtagcccgtgtgcagtcgctgatgtactatgtttccaggacagacgagggtgagtccagggatggcgttggcaagatgggcttgcgaggtgacattccgacgatgggctaggaggtgagtgcccatgcacgtgtccagcgtgtgtggtccttaagccccttgtaggtaccggggacgtggtgaccggggtcgagatgaaaggctctcccttgcccttgggatccccgtctactccctcgatgcctagtgggagcctccctcttctgcttgagcctgtcgaggacaggttcgggaccctgttctccgtacctggcgtgtgtcaagaaatgaggcacgtgttgcaagccttcctccaacgtgacgtggcaggtcactgcctgctggggccgttaatccagctcttggacagggtgccaccctcctgttcttgcaggacgggcgggagttgtcaacttgtccgtgccacaggtggtggtgctgtgtggggggcccccggtctgggcctcccacctg

SEQ ID NO: 665358 - DNA, 91 bp, Homo sapiens
gccaaagatgtctacaaagaacatttccaagatgatgtctttaatgaaaagggatggaactacattcttgagaagtatgatgggcatcttc

SEQ ID NO: 665359 - DNA, 178 bp, Homo sapiens
tcggtaccccaaaatccaaacagggcccaagttaaaattaccccaaaattaccatgtgctggcacataccattattccactggtggctggaaaactgggttgcaggaatgtctgtcacttaaaagggccaccaccccaatggccatatggtagaaatgagggaaggatggactagaag

SEQ ID NO: 665360 - DNA, 707 bp, Homo sapiens
  misc_feature (462)..(462): n is a, c, g, or t
agaatcatgattaaattgagcgagcgctaactaatcacgcgaagagggccgcaggcgggccgtcttccgcaagcgtgcttccaggcctccactccccacctattcggcggtaccctgttacttctgctcctgcgcgctgcttcccgtcgacctcacagagcagtagcgaacactcacggagtcgataggggcgcgcaaagggggtagtgagcgggcgttgaccagtgcgcgctgcgcgacgctcttggagatgatctcttagagcatgactagagatccacgatacccggggtacgcagggacaattggagcctccggagctcacgggatgccggtcgaccgccggtcgcgggagtcccgccctgcctagcccgcacagtctcgttcacgcccgaccaggccagccgactctcgcgtggcctctgtcgtgtcccagatctagaccgaaactacttgtctggncttgctgctgtacaaactgagttatgctgacagacgaccttctcacgcgtttcttcagtgatgcctgcagcacttgtggcgaatagccaggttatctgtgaagtgtggcgccagtaatctacgaagaacgtacatgatggaatgatccgagcaaatcgtgctctagttaccgttatattgccatggacaccagaatttccaggtgttgtggtgcgaccaattggtgaatttcgtagttccataga

SEQ ID NO: 665361 - DNA, 671 bp, Homo sapiens
cgaaaattaaattgtacctggggtaagccttgaaggtgaatatattactctcccttgtttcaacaaaaaagcagtgcttgcttcccaaggcaggcttaataggagataatgctgacgccttgacctgtgaggtcaggaagtctacctaacctgcaagcctcaccctcgtcatgccaaaacaatcccaggttgtagacgtcagccctgctcttaacgcagtaatgaggcatgctctttgtcccggcgaccaagacaggcttccgtgtggcgagctcttcgcttagtgccaagcctttacgacagtgtggatcatagcaaggttatacagagaacgagggcgtgtatatggctcacaatcctttggcatccagtaacagtatgtgttcatcatatagtaagcacttcacctgacctggtggaactaaaggaattccctgtggggactgtaaccaggtcctttctaggcttgggtaggcaaatgtctgagctactgcaggtcactcatgtcaccacagtggcgcttgcttgccttggcccatgtatcgaagacagcattggcctctccgtgggcataagaagagataaggctgatttgaaccccagggttatgccctgagcagcaattgtgtcgcccaattatgaaaagggcatatatgctgagtatgtaatca

SEQ ID NO: 665362 - DNA, 174 bp, Homo sapiens
cggaggcctgaatgccccatgcgcaccccacagctcgcgctcctgcaagtgttctttctggtgttccccgatggcgtccggctcagcctcttcctcccatcaggcagtgcatcgtctttggagctgcagcagggacggatggcggaacctccagtcccttagaggcgactgaac

SEQ ID NO: 665363 - DNA, 1343 bp, Homo sapiens
tacttatatccacaccgctagccctcaccgatgaatctcataacccacgggtcccccacggctctgccaactgtagtgctcgactggttccttcatcacgcttcaggccaacgttcgaacgtcacctactgacgactggacgaactgtggcgcgatgtgaacgagaccgaaaacatggcctactgaactaccgcagcatgagacggctcacgtattaatgtcacatcaggcaagcaatacccatttagccacacaattcattcagcgcatgtggcatgcatgcacagcaacattagcctgcccatcaccccgagagatagcatgatccgtgattcagaatccagcaaatcgagtagtagtcacatcgacagtccacgtccagccgctggatagtagcaagctggcagctcggcaggacttcagatccgtcatcaagtctatccaggtccactatcagcctcgaacccatgggcgccaacatatactgggcgcatccaagacgcagcgcacactggctacacatgcagctaccaagcacaccctcatcagcagcctatgccagcgggcaaggccaccgccttagcaactctccaaagcacagcaagagaactttaaacccctacactcaggagccacaagccccttaagtcctctcaccagacggcgccccaccgctaccagccgagctcaccgcgccctaccctgcatagcctactcgttctacaaactaacctgcgtcaacaacactgcactgcacctactcggggagatcgcaccaccaacctggcatccagcggcaacactcaactcactcagacccatccctcggcgccacccctcacacacaaaccccatatccacgtgctgccccacaataccacaatagctcaccaaacacgcacgaacacgcccactacaccaccccgcaatccacccatcggtgcaaacctggccagcgcacaactcacacgacaacacccaccgcaacaacccaaaccaggcaggcagcaacggacacccaaacgacagacaactcacctcctacagcaggggaggcaacccaagcagactcgataagccggaacaccaacaacgacaatatggccctgcgcatgccaaccagaggcggccaaacccacaattaaaaagcaagcaccagcatcaccaacaaacgcccatgccaccccagggataccataatcaaacgtcaagccaccgacggcgcgcaccacgcgcgacaataccaagtgcaaaaacctgagagaaccacctcggtagacaacagcacaacactaaacactaccgagcagtggcgccccatcgacgcaagcgcaacccaccac

SEQ ID NO: 665364 - DNA, 177 bp, Homo sapiens
cagagtccaaacagtgctcagagtccaaacagtgccctcttgtctcagcctcccaagtaactgggaccacaggcctgccacctactaatttagcttgcctggctaaatttttttttctttttttgatacggaatctggctctgtcgcccaggctggagtgcagtggcgcgatctcgg

SEQ ID NO: 665365 - DNA, 225 bp, Homo sapiens
tgatcactcgtacatgctctgcggagagtgaatgtcatccatttcaccactgacaggtggctctgggtttactcggaccatgcccattccatgaaacacatgtgcccttgcgctctgcggaagtaaccatggtggacagccacacatggtaacctgccctcggtatatggaacatgccatagcatgcaggggtgctgcgaaggagccacagttcatttgatagtc

SEQ ID NO: 665366 - DNA, 815 bp, Homo sapiens
  misc_feature (295)..(295): n is a, c, g, or t
  misc_feature (312)..(312): n is a, c, g, or t
gccttcccaagagcccctgtggtccgggcgcgacaatggcggcggcggcgaccgccgtgcgctcctgatgcagcgagcttatggagcttccctccgtggccggggccggagcggctctttgactcgctccggcttcctgggtgactgcttcctactgctcgtgctgctgcatctagcgggcgccaggtcgggcttctgccgtcctcggtcctgcgcctctttcttcgcggatccactgttcttcctggtcagctgcgcgtctgcctagacagtgtccttcgcatgattcgtatgngcaggaccatagtagtngtcggtgctaggagtgctcgatggacccggactatgtgaaggcatcatccggactcacgggatacacacgtggtcagaggtccatcattgtccataccatagtgaacacgcgtttgcgagccagcaatcgatagtcaactttgccttagccagcctgttagacagcgcccttctagctcaagtaagttccccgcacagctctatgatgctgtcgtgggctcgtcgcgcggcttccatgagaagagtgacatggtgcgggggtgatgttggtggaagtcaccgtcagacgacgattgcgtgtgacttacctactgaaagggtcttcctcgccctatttgcctcttagtctgctatttcccgtggatcgaaagatggccaaccaatagcgccggtgaacgggagactaccgtagcgccttccagtttcccgggcccatgtaatactattccaaagagtgagtggtacaaatactacttttacccctggcaagagttcagatgacc

SEQ ID NO: 665367 - DNA, 781 bp, Homo sapiens
cacgcgtctgcaggctggaggctccggatgcccgagtaagcttcccacaggggagtttgaccatgggcaggacacctaccagccacccacccagtggacagcgagcgggcaggatgtgtgacgtgagccccaccagccagtgcctgcagctcctggagccttctgacaagtgggatggcaggacctggaggacctgcagatcctcatcaaggtcaccatgggaatgtgtaccacatgaccagcatctcagctgctggaccctggctcaagttccgtgggcgacttggataccatactccaacaacctgctcattaggtgccatcaacattgaaaaccggcaaggccaactccgtgcgcagtgccgtcactcaggagttctgggcccgtaccctgacactgccgctacataccacggataacattgtgactacaggtgaggttgggcgatcgggagaacgatgaactagcgggagaaggggcctcgattgcccggggaggccattgcagcctctgagaggcccatcgccagcccctttgggggggacctggggccgctcagtccactccgaacgaggctatttggccagtgaatccccccgaagaaacaactgaaggagaaagggcccttgcctgagctcttgacccttcgattgacccgggtggcctacctaaaagaattcgccactggttgggacaaggcgtggacctagatcaaggggaccttgaaggactttcaggcgcctgggcaaggcaccgtgaagtgcatcattgatagaccca

SEQ ID NO: 665368 - DNA, 489 bp, Homo sapiens
  misc_feature (469)..(469): n is a, c, g, or t
gtaaaaaaaattcttggagccctcagtctctccaagttgggctaattcaccagcaagtgaagctgagtccaatctgaggctacagcccatctagctatgttaccaatttctttcttattcccatttccccttctgtcagcttttttatcctttatttaaaaattcctgcccctatgatcattattttaaatcagtgctagacgctaagcagagctgcattgcctaaggctagagatggggagagggaatggagtaccagggggcaaagcagaccgtgcagggtgaggggactgttttgtatcttgacgatagcagtgattacaccttgtatacaaatgccaaaattcatcaaactgtacacttaaaattgatgatgtttattttatgtaagctataccttaataaaaagaaaaagtgttcaaaagatcatgttttcacacaaagtaggcatgtaataaattaataaaanaataatcattaccacagtaa

SEQ ID NO: 665369 - DNA, 353 bp, Homo sapiens
  misc_feature (42)..(42): n is a, c, g, or t
gtctgagcaagcttgaaaagtactttcttttctgggaacaanttctttggtgaacttcagtgcactattagcgaggtgggggcttctggtgtttttggggaaccaccagaggccccttcttttcaggaacaacctcctatgggcacctccgggcactttcagtgggtgggtacgttcaggttttttgggcaacgacagcgggtgctttcttttcggggacaggtttcttaggtggtacggtcacttgtgggaggcgccgctggttcttggctcttccacaatttcagcgggaggtcttctagggcaccttcctcaggctcctcgaacacttcggggggaggccttcccagttt

SEQ ID NO: 665370 - DNA, 368 bp, Homo sapiens
ttgcacgtcatcctgtatgcctgtgaggtgccgccgtaatctggggctttgtcaacacggaccagatcgccaaggatgtgaagcagttctatgaccaggccctacagcaggccgtggtgaatgatgacgccaacaccgccaaggctgtggtgaagacctcccacgagacgcttgactgctgtggctccagcacacttgactgctttgaccacctcagtgctcacgaacaattggtgtccctcgggcagcaaaatcatcagcaccctcttcaaggaggcatgccaccagaagatcgacgacctcttctccgggaagctgtaacctcatcggcattgatgccatcgtggtcgctgtgatcatgatcttcg

SEQ ID NO: 665371 - DNA, 433 bp, Homo sapiens
caaacaaagatcaaaattttctggaattaacaacacgagtagaaaagaggttgttaaaagaatgctttcacacttgtgacagtttatacaatgaaatcaccgttatcccattctttatcaggtatttgaccctgcccagatgggtaaagttagaaacatcctacatgttcacatttgtatattaaatataaagtttctatgaaaaatagctaagaagagtgcggtggctcatgcctgtaatctcagcactttgggaagccaaggagggtgggctgcttgagcttagggggttgagaccagactggcaaacatggcaaaaccccatctctacaaaaaaatacaaaaaattagctgggtgtggtgtgtgtacctgtaatcccaactactcgggaggctgaggcaggagaatcgcatgaacccagaaatattaaag

SEQ ID NO: 665372 - DNA, 947 bp, Homo sapiens
tgggggggggcccccttttaaaagggggtttggggccaaaaggcggccaagggggggggacacgggggaaagcccccccttccccccaaaaaagggggttcccccccccttttcccccgggggggggggctcccgccaaaaagaacccgccagaggggaggcgacccgacgtgacccccacgagtggttaacaaggtgctcgcgcgtggaagagacctcacagccacgtcgtcgatgccccacaccaccaccggggtgtggcccgcaagcgaggaggatgaacaccgcccaggacaggagcgtgcatccccccacagcacacacagcaggaaacagccggagacgcacaacacccgcgcgaccgcacgacgcgctcccctcagcagagggaggggcccacagtgaggggacaggccgacaatgcgcgcgacggcacgagagagggtcgcagcagccgccgaatagaaaggaaacgggggcgggcgctcccccgcgagcagagaaggccatctttcttcgcggccgcggacagaaaaagccccctcgagagggacgccccctcatcagaagaggtgtgtgtcgctcgtcaggagacaaccaccacaaacaccctgtagaaaaagagagccccccgacatcacgaggagaccacgcgcgcgagaagagagtatgtcacccccccaagaagaaatcgtgcccccccgcgtagtgacaaccaccacggatcgtagcgaagaggcgggtgtaacaaatacatcacagcgccgcacaccctctgatagcacaccagaggacaaagaatggcgccgcaccacgaggctaccgcaccccgactgactgagaggcacacccattcaaggaacgagggcacaaataaaacaggggggcgccaacaaagcaccaccccacaatcccatcacgaagagccacccaggaaaacacacagg

SEQ ID NO: 665373 - DNA, 153 bp, Homo sapiens
atgctaagttaaataaaaattcagaagtgtgccaggaaaatgcgtttgatggtaaacggaatcacatttatggtttgtgatttcggaattttttagtatacattttattgctaccttttgtttcccttgtgacaaatactacgaacgtcaaag

SEQ ID NO: 665374 - DNA, 269 bp, Homo sapiens
ttttttaaaatttaaataagggatcccttttccaaatgcagtaatccaaatgtggtctagtgtaatgaaataaaatgtgatctagtgtaatggaagaccttttagaacctgggggtattaactttgggtatatagggtaaatatcccccctggactgttaaaggcccacaattttagtatggcttgttggcaaaaagtgctaccccgtttcaattaaacaatgtatgtttgttttaactgaactaaaataaatacctgctttatcctga

SEQ ID NO: 665375 - DNA, 212 bp, Homo sapiens
tggtgcctgaagctgaggagaagtttttggaggatgttaaaaagtcgtaccactcagaagccttcactgtcaacttaaaggacaccgaagaggccaagaaacagatcaacgattacgtggagaagggtactaaagggaaaatagtggatctggtcaaggagctcaacagagacacagatttcgctctggcgaatcacacatgctcagcagac

SEQ ID NO: 665376 - DNA, 112 bp, Homo sapiens
ctatcatgaaaggcggcctgcgttggacaaggaaatatcttcacataaaaactagagagaagcattgtcagaaacttcttggtgatgattgcattcaactcacggagctgag

SEQ ID NO: 665377 - DNA, 393 bp, Homo sapiens
  misc_feature (3)..(3): n is a, c, g, or t
  misc_feature (9)..(9): n is a, c, g, or t
  misc_feature (41)..(41): n is a, c, g, or t
  misc_feature (129)..(129): n is a, c, g, or t
  misc_feature (201)..(201): n is a, c, g, or t
  misc_feature (270)..(270): n is a, c, g, or t
  misc_feature (297)..(297): n is a, c, g, or t
  misc_feature (307)..(307): n is a, c, g, or t
  misc_feature (328)..(328): n is a, c, g, or t
  misc_feature (351)..(351): n is a, c, g, or t
  misc_feature (388)..(388): n is a, c, g, or t
ggncagggncaggctccctgatgggcctttactccccgttncccgtaagccacagagagggtcctgccgagggtcaaaacctattggccatgatagccaagatgccctgtcccttttcatttaggtccncacggtgtgcagaggctacatgatgtgtgatgacacccctcattgatgttaatgaatggtgctatacttganttttctaaggtgtcattagcaattctcctgcctcagcctcctgcataactgggactacagggaagcacnattttccaccaaaactctcaagaaggncttgttgcanctggaaaagcaattaaatgtnaatcgtgatccaggagaaagtancaactcacataactcccaaattaaaagttttccattngataa

SEQ ID NO: 665378 - DNA, 742 bp, Homo sapiens
gacattctgttagaatagccccaagtaatgagtaacgggagccgagtgcttgtgatagtagagccacattcttgtctctaacacacccgttttgtttggtcccatccctgtatctctcgttgtgagatcgttgggtgtatgctccccatggaattctgggtgaaactagtatcaactgatgtcctttgactttcacagggggcggcatatagatatcattgtaacatactaggtgaatggggttttaccccatcctagttttagtccttttcaatgctttatacaagtttgacctgttaagaatatgtggatacctccacgtatgtgctctggacaccctttatgccaagcctaaacagaggattctgtaactatggaatacgcatcgctgagagcttatctgaggtacccatgaagtcctgagcatacgtaccagtgaattccgcaagatgtaagatggcactagtaaatgtaggcctggtttttactacaagaattcccgagcatgcatggtcctccctgcaactgaacatttgcaacatgctactgatattagggcttttttttttttgggacaatgcctctgtcccaattctgagtaacagcctctggttcttgccatctaccagagttctctagcaaatctgagcatctaacagggtgaaaaacttcctgaaatggcttccgtgattgcctgactttactgggatcaaattcaagttgcacgctggcactcagtgta

SEQ ID NO: 665379 - DNA, 185 bp, Homo sapiens
cataacactaggacagaactttacaataaaccgcttacattcaaatgcttcagttattatgtatacaagtcttaaagtgcatctactatgtcaggaatacatttcagtaggttggtggattcaggagcttggatgggagaaggagagggagaagggaactggtccagaatggtgtagaaattgaa

SEQ ID NO: 665380 - DNA, 164 bp, Homo sapiens
  misc_feature (148)..(148): n is a, c, g, or t
tgcagccaagcatgagaggcctcagaagaatctaaagctgtcgacaccttgttcctggactttcagccttccagaactgcaggaaaatttagtttctattgtgtaagtcactcatgatttgtgtgtatctttgtttcattggtatccnttagtcaaacgtatat

SEQ ID NO: 665381 - DNA, 445 bp, Homo sapiens
  misc_feature (3)..(3): n is a, c, g, or t
  misc_feature (47)..(47): n is a, c, g, or t
  misc_feature (118)..(118): n is a, c, g, or t
  misc_feature (140)..(140): n is a, c, g, or t
agnatcaacccttcacactataacttggttgtatagcctttctcagngctgtcagtcccacatacgatcatttctttacaaatgatttaatatgtatctgtgtcaggacataagtcantgggacagtagctttccgctanatattgcgtgaactctgttaaaactgattatcactcatcatggctttatttttaacctataataaccctttcatatactggtttttacagcattgcaaatctgtaaaataacttttattggaaaatgtcatgagtcatttttcattatttgtactaaacaatgttttatgtactccttttgtgttttatcttttgtttttccatctgtactcccctcatcctcctaatgttgagaaaatcaaatttcctgggagtgtccttgttaagtgatcaaaagtaaatgttctctttgccattttagatgg

SEQ ID NO: 665382 - DNA, 100 bp, Homo sapiens
  misc_feature (18)..(18): n is a, c, g, or t
  misc_feature (75)..(75): n is a, c, g, or t
ttacattgtatgtatatnccatattttgttgatgtactcattagttgactgtttttctaaatttttgaattatgnaaatatccattcaaaaattaaactt

SEQ ID NO: 665383 - DNA, 441 bp, Homo sapiens
  misc_feature (298)..(298): n is a, c, g, or t
ggagagggggctcatctcattctaaagctaaaaggcttccaaataccttattctatgtcccggtaattcatatagtatattttactttcttccccaaatactacagaatggaaaagagaacatttaaaaatacaaggacacttaggaaagtaaagaaagctaattttatatggaacaatcatcagattaaaaattacttatggaggcgggacaggggggctcaggccggtaatcccagcacttggggaggccgaggcgaggcggacggcttgagcccgggagtgcgaggccagccggngcaacaaagtgagacctcttctctacaaaagacaaatcgagaagtgaggcgggaggatggttggagcccaggaggtcacgagggcaataagctgtcatcgtgccatggcactcccaacggaacagagggagggagaccccgtc

SEQ ID NO: 665384 - DNA, 128 bp, Homo sapiens
gcacctacaaagagtgagtgtatatttgatattcacatgcaacgttaaaattaggacgtaatctcttaatgactcctgttgaaatgttaaggaaaataaaattatttcagggcaaattaaaagaattc

SEQ ID NO: 665385 - DNA, 144 bp, Homo sapiens
cgcaggcatccccagtggtgcaagcagtggcccaaccgtgggcacaggcaacagcaggcaagcctgtgcaatgtcgtggttctcattccatgcaacacatcagcctgcacagggcacaacagtgtggtcaggccatgcacagca

SEQ ID NO: 665386 - DNA, 168 bp, Homo sapiens
aggggaagcttttaaaggacacgaagtccctgttacgcggtgttggaccaaggttggtaagtccacaaagctgatcgcagagttggcgatggttttctggtggagacggccgtggtaggtaagcatctgcagctcatctggaatactacagtcttgaggacgtgcttt

SEQ ID NO: 665387 - DNA, 206 bp, Homo sapiens
tgaagtagatgtagagttttattagtttttgttgttaatgcaaacaggttaccaggttaaaataatgggttacaaaatagtattgtaatccttatggtaacctcaaacctataaaacatacactggatacataaaaaataaaaagcaaaaacctaaatcatatcaccagagcaaactaccttccctaaggaggtgaaggagggggg

SEQ ID NO: 665388 - DNA, 1223 bp, Homo sapiens
  misc_feature (172)..(173): n is a, c, g, or t
  misc_feature (180)..(180): n is a, c, g, or t
  misc_feature (182)..(182): n is a, c, g, or t
  misc_feature (185)..(185): n is a, c, g, or t
  misc_feature (231)..(231): n is a, c, g, or t
  misc_feature (233)..(233): n is a, c, g, or t
  misc_feature (235)..(235): n is a, c, g, or t
  misc_feature (237)..(238): n is a, c, g, or t
  misc_feature (241)..(243): n is a, c, g, or t
  misc_feature (245)..(246): n is a, c, g, or t
  misc_feature (248)..(248): n is a, c, g, or t
  misc_feature (251)..(251): n is a, c, g, or t
  misc_feature (266)..(267): n is a, c, g, or t
  misc_feature (271)..(271): n is a, c, g, or t
  misc_feature (300)..(300): n is a, c, g, or t
ggagagagagagagaggtggcagccaggtcggcccgcaggccagaggctgtggctcggatcccaccgctgcggaggggtgccaccacgctgggtgtgacaacgccagctgtgtcctggggagatgctcccacggaggtggtggcctgctcggggagcctgaaggcctccccnnaccagcnangangggtctggctcccaaggcgggcttcctcccgaggcccagtggggcngncncnnccnnngnncncanccatgcggaagtccnngccntggagcagaggagcagccgcggcctcggnccctccgcatgctgtgaacccggcgcgggtcagggctgcgtggtggatcgcttcagagagggcaggacggagcaccagtaccccagcgagccgggctgaggcatgtcatgtcacccaggggaccaagtccaagtcgcgtagaacggcgccgggggcaggacaagggacgaaggccagcgcgacgcgtctgtggctcgtgactactgcgtactgctaggacagcgggtatcgacacggctcttggacgtcacatgctacgtagagcaagggccgggggaagcccctggggctgggctccaccggagcttggtacaccgaaagcgtggggatgatgaccacaccatcgcgagaccccccacacaccggatcccagtcgtccccgaggcatgataagagaggcggactgccacgatcaaaggcgctgttgggggagaccccgccaaagaccaccccttgattgggttggcactgcaacaggggacccggcgcgccgataggatgaggcttaggtgagagatccacgagagcatcgtggagagtgcccgtacaggttgacacagcgtagataatcacagggacctcctgggggaacgggggcaggggaccccctggggcgaggacctggtgcgccgggttccccacgaaggcgggacccccaacgggggacccgggggcacacaagagggttcgacaggcaagaagaggggtggcgccgggggagttaccccgccatatggtggcccaacaacgagaagagcagcgaccaagggcgatgggcacaaacaagaacaggcagtgacaatggagagcattcgtacggcacagttggagagccccgagcgccaagacaggtggacaccatcggagaaggcgacggcagggagacaacagagagaggaatagcaacacgaagcaaaaacagg

SEQ ID NO: 665389 - DNA, 971 bp, Homo sapiens
  misc_feature (172)..(173): n is a, c, g, or t
  misc_feature (180)..(180): n is a, c, g, or t
  misc_feature (182)..(182): n is a, c, g, or t
  misc_feature (185)..(185): n is a, c, g, or t
  misc_feature (231)..(231): n is a, c, g, or t
  misc_feature (233)..(233): n is a, c, g, or t
  misc_feature (235)..(235): n is a, c, g, or t
  misc_feature (237)..(238): n is a, c, g, or t
  misc_feature (241)..(243): n is a, c, g, or t
  misc_feature (245)..(246): n is a, c, g, or t
  misc_feature (248)..(248): n is a, c, g, or t
  misc_feature (251)..(251): n is a, c, g, or t
  misc_feature (266)..(267): n is a, c, g, or t
  misc_feature (271)..(271): n is a, c, g, or t
  misc_feature (300)..(300): n is a, c, g, or t
ggagagagagagagaggtggcagccaggtcggcccgcaggccagaggctgtggctcggatcccaccgctgcggaggggtgccaccacgctgggtgtgacaacgccagctgtgtcctggggagatgctcccacggaggtggtggcctgctcggggagcctgaaggcctccccnnaccagcnangangggtctggctcccaaggcgggcttcctcccgaggcccagtggggcngncncnnccnnngnncncanccatgcggaagtccnngccntggagcagaggagcagccgcggcctcggnccctccgcatgctgtgaacccggcgcgggtcaggggcttgctgctgtccttcgaggggagtgaggagcccatgacccatgcatgcctgggcttgaccactcgtgtcacccagtggtccactgtcccagccgtgaaggccctgggcacagcaaaggtagaaagcagcacacctgtcattgccgtgacaacgctgtctctttgagcggtacagaaggccctggctgcaacagcaggcagcatagggcccgggaagccccttgtggctggctccccgtggcttgtaccccaatgctgggtgtgccaccctccagccccacacacggtccagctcccgcctgtaggagcggcgcagccaaggcttgtgggggcccccaaggccccctgtttggtggagggcaggggccgtggcctagttggctggtggggtcgcgggctctggggctttcggtgaagctgtctacgggctctgtgaccgggcatggatgccttgcggccttgtggccggtccagagcacgcccacgtggccgtgccaatgtcggggcgaaggcttgcggggttaccgtcatgggcacaagagggcgctccgggctgtcacagcgcgtccatgacctgtcagcagtgagcccggccgaggtgccctcgtggctcggggactagaagggggcatacg

SEQ ID NO: 665390 - DNA, 862 bp, Homo sapiens
accccctcctcccggtctcccccgctttatattcgcccccggcacgtttttgtcccccctctttctctcactcgcagacgctgggtgggaccacgacgtttttctcgacgacgtggaccaagcctcgtttactcacgagatgaggtgtgtactaattctctcgcgcacgacgggagtatgtcggtcgcgacacgctcttgaggggggccgcgcgcgcacttattgatgcgcgcgagcgcctcgtgggggtgttggagcacggacaggagcgctcggcgtcgaccccctccacacgcttgtggtgaggagcggtcttcctctatacttgggagcgccccaccgccagcgtggtgttgaggaccacgctcttctctctctcggtagaggcgctcggtcgagctctctctctttctcgcgcccactcgctcgcggcccacgcggatggcggccgcgcgcactcttatcttggcggcgcttcaatacccccgcctcttctgtgagccgcggcgctctcactcgattgaaacctctctgtgctgattttttcccgtctaacaccgttctttctccacataactggtctactctgcttatttctccacggagataccaacatcaacctgcggggagagtctggcaggaaaatatcctcctctgagataccccggccaccattaatgtcgctcaagcaccaacgaggggcaccccaccactatccgtcgcgccccaatttctgcctgtgggggaacgcaaaaaaaaaggtagcgcggaacatcccccccctcccccccccccatggggggggggaaaacacaccccccttgggggaaaccccccccaaacccccctttccccgggaata

SEQ ID NO: 665391 - DNA, 133 bp, Homo sapiens
cttaagctcatgaatacagacttagtggccttcacaaaaaaccaaaaggaccctggtgtccttgaccgcatgatgaagaaactggacacaacaagtgatggtcagctagatttctcagaatttcttaatctga

SEQ ID NO: 665392 - DNA, 317 bp, Homo sapiens
acttttatgaatttatttatagtaaagataaaagtccgaatgttttccacacatacgtggtaatttggggggcttgccactccctcactcctgggactgacacactggagcccacgctgttcaccctgcagccccatccttgcgtgaaaaaatggcgccacctggggctgtgcaacgtgtcagcctgcttattccctttttcagctcaggacagagaaacacaattcattcataagggttccattctgttttaggcagagatttataaatcagcattttttttcaaagagtacaaagttaaaccattctgcttaaaa

SEQ ID NO: 665393 - DNA, 485 bp, Homo sapiens
gtgatactggatcctcatctctcaactgtataccaaacatcaactcaagatggattaaagacttacatctaagacctgaaactgtaaaaattctagaagctcacattagacaaacccttctagacatgtggcgtaggcaaggatatcaggaccaagaacccaaaagcaaatgcaataaaaacaaagataaatagctgggacttaatcaaactgaagagcttttgtacagcacaaggatcagtcagcagagtaaacagacaacccacagagtgggagaaaatcttcacaatctatacatctggcaaaggactactatccagaatctacaatgaactcaaacaaatcagtaagaaaacaacaatcccatcaaaaagtggcctaatggacatgacaagacaattctcataagaagatatacacctggccaatgaacacatgagaaaatgctcaacatcactaaatgatcaggagaacgcgtaaaatcg

SEQ ID NO: 665394 - DNA, 894 bp, Homo sapiens
gtgttccaacccgaggtctaatacttctaaagcttcatctcctcgaggtacaaaattttccaaacgccgcccacttgtctttcaccagacaatggttagtaacaccacttgtatagggggcctatatctatcttctcttccctcccgaagaattatttcttgtgtggtatcaccacacacatcccatagatccttgtggcgcggttctaaaaaaaaatggtcgcttcctccgcctataggtgcgaattgctcccccttcctggtggcacacaattaatccactcccttctcgagcacaattttgcttgataaccggatagatttctcggcgagaatcccccccgtgcggccccaacatatgaggagaagccccccctgaataaggtccggcggcgcccacgctcaattcaaaagggggggtagggtcaacccacaaaattattaatagggcacgccccccttcggagaggggggggtacatcccaccccgccagtctggccgtcaaccaaataaaaggaccggttgcaccacccaagcgggtggggcacacacaagaagggcccgcgccgcactaaaaaccttcgctgggcgcgccccaagaaggtggttacctcccccacaaacatgtcgggcccccgctgctccccaataacctcctcggcgaggacccgtgcacctattccaaatatgagtgccccaccaacaacgtgtcttcccacggcctataacaaatccgcgagagaatgttatttctcacaaacaccactggcggggttttgagcagttctcaatgagacttgcagagaccacctatgaaacaaattcaggtagtctgttttaaagcaacccctcgattgtccccctagcccccagcccatccttttaaacactca

SEQ ID NO: 665395 - DNA, 312 bp, Homo sapiens
  misc_feature (1)..(2): n is a, c, g, or t
  misc_feature (14)..(14): n is a, c, g, or t
  misc_feature (38)..(38): n is a, c, g, or t
  misc_feature (43)..(43): n is a, c, g, or t
  misc_feature (53)..(53): n is a, c, g, or t
  misc_feature (180)..(180): n is a, c, g, or t
  misc_feature (300)..(300): n is a, c, g, or t
nnctgtaatcccanccacctgagaggctgaggcagaanaatantggaatccangagatggatgttgcagtgagctgagattgcccactacctccaacctgggtgacaaagcaagattctgtgtcaaaacaaaacaaaacaaaacaaaaaaggagggactcagagagccagggaccagggnaaggacatgaagcagcgttcggaggacagagagagagaagaatggggaggggaaaggagcggcacatggggttgagcagaggaagaaaatcagaaaagatggcttagaagaagtcagcantctgcgaagtct

SEQ ID NO: 665396 - DNA, 722 bp, Homo sapiens
cactgaggctcacgccagtattcccagcactttgataggctaaagcggtcatcttacctgagagcaggagtgctagaacggcctggccagcatggtgaaacctcagactgtaccaacaatactgaaattaagtgcacatgctggcaagagactggcataccagcttgttgacagactgacgcagtagaatcatttgaaccagacaggtgacggttgcagtgagtcatgatcgagcttcagcactcctgtctgcgtgacagatccagactccatctgacataggatgacttcaatgttacagagtcgagcgagtacaagctataagtctaaggctcatgcgcatcgagcgccgatggcataacagaagctccagacataggagactttcgacagatagcagacttatctacagtcatctatcagtagctcagttatatgcaagtgctaggcatcatgcagacttgaccaccaaagatatgtctgctgaaggctacaataacctgtaatcgtcacgatgaacacagtgacgtcagggctacacgtgcgatatgtaggacatgcatttggacttgcactatgaaacagacctctaaatactactgcattacttgctaacttaaccttgccaggtacctgagtctagcccagatgttttaacatgctaacaagactaaccaccttggattccatcaggctcatttgcccagtggccctcccgggac

SEQ ID NO: 665397 - DNA, 523 bp, Homo sapiens
  misc_feature (86)..(86): n is a, c, g, or t
  misc_feature (100)..(100): n is a, c, g, or t
  misc_feature (513)..(513): n is a, c, g, or t
ctcaggaagaccccatctctacaaaaaacaaaaacaaacaaacaaacaaacaaaaaattagctgggcgtggtggcgcatgcctgtngtcccaggtactcnggaggctgaggtaggagaatcacctgagcctgggcaatagaacaagactctgtctccctaaaacaagtttccttaaaagctattatttgccagaattctgtccttctttcccttttcacttcatatgctttccctgcactatcttatttatgcccatagctgcttctaccaccctcacactggtgacccacctcaccactattttttcttgcatggaaattgaaagtatataattgcatacttttattgggggtacaaactgatattaagatttctgaatataatgttaattaaattgaactggttaaaatttttgtggtgagaacatttggaatttattctcagcaatgttgaaatgtgtaatactctattaactgtattcaccatgctgtgcaatagaactaaaaaaaagnccataaaaaa

SEQ ID NO: 665398 - DNA, 101 bp, Homo sapiens
  misc_feature (16)..(16): n is a, c, g, or t
  misc_feature (51)..(51): n is a, c, g, or t
  misc_feature (96)..(96): n is a, c, g, or t
ctggcatgaaatagantgcagttcctccatcgcactgggtaaggcctccantatttgacagcacacagaaaggttttcatcatcaagagagttctnctggt

SEQ ID NO: 665399 - DNA, 202 bp, Homo sapiens
cttgacgcgtcgggatgatcacagtcttcaggggtgatcccggctgtctgtcttggtgctctcgagcttccggaccatctacatgccctcagattcgagcgggccattggactcactgttgtaaccagctcctagcaagactgagcaatccgcacaaatgtgggtttttttttttttttttttttttttttttttttctttt

SEQ ID NO: 665400 - DNA, 165 bp, Homo sapiens
tttttccccaaattttgggggggggggggttttttttccccccccccccccgggggttttttttttggggggaaaggggggtgtccccctttttcccaaatttttttgcccgccggggggggggggggttggttttaagtcaaaaaacccttttcccttgtttta

SEQ ID NO: 665401 - DNA, 773 bp, Homo sapiens
ttcaaggtcgtttgtttgtccaaatttgtgggcaaaactgctaacgctggggcaccacacctgtaggggcaacggctatgagtagagtggagtttggagccaggaagcttcgggccctgtcaagacccagaaggttttggaatggaattcatagggagctgtgaggacttggcacccacgcagggtagtccacgagttgctgccattcagcgccaggtaagccagtccccgtggttttaaggtactcacgcgcgatggcgttggtacagcggtcagtgcatatgagcatttgtcaaaccatagggcgcccgccggtagtgaatcctgtcgggcatcgccaaacaccgcagcagtcgatgcgttcccaagtaatgaaacgcccaagcttggtcttctcaaagttgatgatgtccccgtgaaggaagatcttttcagccagagtatgacccagagaggagcgagacactcccgagggacacacgacgtccccattcgtcagagcgatctggctcgcaggcaccagatcctaggaaggtctgttcctgtcctcccctgtgcagggtatcactctagggtgaccctggaattccgaattcctggttctcccttgtaaaatagtgttgtcgtgtctcttttttttaaaaaaaaaaaaggccgggcactgtggctcacgcctgtaatcccagcactttgcgatacccaggcgggtggataacctgaggtagggagttcgagaccagcctgacccacatggagaaaccccatctctacta

SEQ ID NO: 665402 - DNA, 153 bp, Homo sapiens
tcgacctgctgactgagtaggattacatgtgcttaccaccacgcctgactgcttcacgaatgtgtgcacatgctttgttatgcgcgctagagagacagaacgcacgtgagatgtggtttccctcttgttgcccagacaggagggcactgacgt

SEQ ID NO: 665403 - DNA, 401 bp, Homo sapiens
atatacatacacatgaggacttactacatgcgtggaactatgtcaaacatattacatatctcttttagtcttcacagaagactttacgaggacgttattaatatcatccctacttaacgggtaagaaaactgaggcacagaaaggtcaagtaacttgcccaaggttattcagtcactgagtggtcccatcctagctgctgaggtttgattctggctctgccccgataatttgtgccaccagttcatactgtacagttgacttgtgagtgtttgcaaaattcatctttcaaatcagaataaaatagaactgtcataaagaacaaataagctagtgcatgggaagcactagaaattctccaagtcataagaaacacccgacaaattgtcagcagcagggtacc

SEQ ID NO: 665404 - DNA, 959 bp, Homo sapiens
cctctagcggtgactcggcatgaggctggctgcggctgcttcgcggagccgccttggccggcccggtgcccggggctgcgcgcctgcggcttcagccgccagcttcagctcgtgactcgggctccagcccggcgtccgagctgcggcgtatccgggccaggtggacttctacgcgcagcattctcgccgtccccgatctccatgaagcagttcctggacttcggatcagtgaactgcttgtgaacaagacctcatttatgtatctgcggcaagagttgcctgtcagactggcaaatatcatgacagaactaagtctccttccagataatcttctcaggacaccatccgttccaattggtacaaagctggtctatccagagtcttcaggagcttcttgattctacggaccaaaagtgctgaggctgctacacgctactctatgacctttaccagatactgtgatacggatcagaaaccgacaccactgcatgtcattcccaccatggcccagggtgtgatcgactaccaggagagctcctggggtgcgatcctgtcaccagcccacaatgtcccacgtacttctcctgcgatcgattctacatgagtcgcatatcaatctacgaatgttactccatcccgacactccctccatggctcgcgtgcgcaccacagcgccccaaggaagcttccatacctccatcgcacacacccctttgtcacggcataactcccaaactgacatcgtccttgcacgctatacacccactgcctcacgcacaactgtccacccgcctctgccgggacatcgcaattcatcattacactcctcccgcaacatcgacctcgcctccagcataaagcgaacaatccccccggaacgagcccactaccacagtaggctcccgtccccgaacgcaccttcaagaaacatgcggcttcacacctctacgcaacgtcac

SEQ ID NO: 665405 - DNA, 976 bp, Homo sapiens
  misc_feature (31)..(31): n is a, c, g, or t
  misc_feature (336)..(336): n is a, c, g, or t
  misc_feature (476)..(476): n is a, c, g, or t
  misc_feature (616)..(616): n is a, c, g, or t
  misc_feature (753)..(753): n is a, c, g, or t
  misc_feature (773)..(773): n is a, c, g, or t
agcgggacgtcccgggcctcgtgccctggtncaacagtctacccgcctccttgtgaacagaagatgcgactgccagctgccgagggcgttgcggtcctgactgttgcggccgatgtccccagtgactagcgtggtgatcgctcccggagccctgtcctgattccctgatccatgccagggccagacagtcttgaaggaagcctcatcctggccttcccttactctgacgtaagtcacaggatttagaaggcagaagtcatgcgagaggagtggttgcagtgcgagtccttcctcaccttcctgtgatcctggcgtgtgccccgaactgaccgcgcnctatgctggtacaggagcaaaccgttggaagaccaagatataaagggtactgatagatctatgtgaccttacctttcatcgcccagaacactggcaacagcatgagcacagtacgtctacgggaccagacaactcgtctntgcggacgaactaacggtttggcgtcgaacgtgcgtttgacaaaacttgacctccttggatagcccatacttcttgtagcccgaaacatcacgggacacagaaacgcacgtggcgacaactctgaccacggccatcccgntatacagaccgcggcgacttggtgtgtataccgtgcttgcgccagctaactggcttcggactactacgactttctctgtcctggcaacccaacgcagatctactgagccttgggcctcgctgttgggcccgtctcgnacacggggtgggcctttgcntggcctaactcagcacttgaggcttatatgaccaccaggcgcaaaagtccacaaacttgtacacaggacatacatttccgcgcctgggcgtttacaaagggctagcgcgaccttcccagcatgccacacgacatgttgaaccgaatggcacttgaacttctggacggttctatcctaccaagacaggtgaactgacgacagac

SEQ ID NO: 665406 - DNA, 1416 bp, Homo sapiens
  misc_feature (150)..(150): n is a, c, g, or t
  misc_feature (223)..(223): n is a, c, g, or t
  misc_feature (259)..(259): n is a, c, g, or t
  misc_feature (670)..(670): n is a, c, g, or t
  misc_feature (1061)..(1061): n is a, c, g, or t
ggcgcggaccgagagataccagccgtgtccctcgcggaatcatgacgtgacgcacgcggtcatgccatcggtggctgcgacacaggctacgatagaagcctctcgtcggtcgagtgcatcttgggcagctgactgtcgatatccaccatntcgtagcttgattgcgtcgtatccttggcacggtcacctgctagttagtcaaaaacttggtgtcgtcatcatntgatatgccatctcactctatatgcgtaccatggtngtccacgggaatacgtgctcagctccacggtggcaagaagcgtaaagactccttggtcgctccggtatctagcgaagttgaaggaacccatcctgtgatatgcagcatccgcgacgccaatttgtagttgcgtgagatccctttggatggggccccgacctaagttccacggggaccctaagagtttaaccgacacttgcacctaggaaacttatccgaaattcgcatcaattacgcggtcgcgattacaatcatggagcgaagatagccgactacactttggttccctggggctgtttcctcctatagtgatccatttgatagggacatgtgccgctcacttactggctccgagaaagtcctttcccgtaataccaccatgggggcaaaacagtgtgcgcgttagacagncgccaaagcgtttgggcctaccccgcaagagacatcggtgagtgggggtttggtaaacaattacggtaagccaaccattggcttatttggcagagatgtactttcccttagttggggcccattcatagaccatggttaggagctcctagggcacattacatttaaaaacttttagcgaaaacccaattattttatgcacccatgttacccaagacgcccaaatataccctattaaacacgcacaggaggaaagcgacttaactttccaaccacagggaagcccaagctcctaatcatttgagaacgacacctgttgctcgtggcggagcaagccgttgtcggggacagcacaaagaggcggttgtccatatgttcgagcaaagagtggaancgcccgattccaattcctgtgggggatagggaggatcaccagacgcagatggttaaggaaccaccgttccaatcccccaaaggccaatcttcctcgtcttggaaccttcccccattaggaggagtttaagaaagcgattccacctctacctaattagggggggagggcgtttcttactccacccgcgcggaataggctgcccaagagttccccgaaccgcaaaccgataatattgaggaccctaatgtacgcgcgcgtacaagtgttccacacagaatgttacgcctattagccggcctttccagacaagtttggtacaacgccccaacagagtgtctgacggcacgcacgacat

SEQ ID NO: 665407 - DNA, 190 bp, Homo sapiens
tactgtggtgtaccgtgaccataaggacactaatcccattcataagggctccactttcatgatctcatcatttttaattatccatatctcaaagagctcacctcctaatactctcacttgggacataggattttaaaatagaaattttgggggatacaaacactcattccataattgtatttttctgtgt

SEQ ID NO: 665408 - DNA, 420 bp, Homo sapiens
  misc_feature (11)..(11): n is a, c, g, or t
  misc_feature (64)..(64): n is a, c, g, or t
  misc_feature (165)..(165): n is a, c, g, or t
  misc_feature (169)..(169): n is a, c, g, or t
  misc_feature (171)..(171): n is a, c, g, or t
  misc_feature (173)..(174): n is a, c, g, or t
  misc_feature (204)..(204): n is a, c, g, or t
  misc_feature (222)..(222): n is a, c, g, or t
  misc_feature (274)..(274): n is a, c, g, or t
  misc_feature (364)..(364): n is a, c, g, or t
cctggcgaaanccccatctctactaaaaatacaaaatcccaggcgtggtggcaaaaacctgtantcccagctactcaggaggttgaggtaggagaattgcttgaacctgggaggtggaggttgcagtgagccaagattgcgccattgcactccaacctgggcaanacangncnntccgtctcaaggaaaaaataaaaataaaanaagggacgggcccgtganatccccacccttggaggctgtcttcttcagctctgccctgccctagctccanaccctctcccaggacccatcacgcctgtgcagtggcccccacagaaagactgagctcaaaggtgggaccacgtctgctaacttggagccnccatgccaaagcacagtgcctgcatgtatttatccaataaatgtgaaattctgtcc

SEQ ID NO: 665409 - DNA, 626 bp, Homo sapiens
  misc_feature (135)..(135): n is a, c, g, or t
  misc_feature (304)..(304): n is a, c, g, or t
  misc_feature (318)..(318): n is a, c, g, or t
caaagacaaatttttccaaacctggccactcttgtcggcattgaagatcctgcagtgagcaaaagtctctgcctccacagaatttactatctagtgggaggtagcaattgaacaaggaaccaagcagaagggatnctgcaaagtgataagggctgcaaagagaaagtggagggtgttagtgagtgtaaggcaagggcagggtaggagggtctcactgagaaggcaacctttgatctctccctcagggcatgcttgctcacactgagaatttgatcagagacataaaggagctgaaggagcaccnccatggatctgagnggaagagagttccaggcagagagaacagcaagctcagagaccctgaaacaaggctgctccttgagggctccagaaacagccagactggtgtgaatggagtggggtaagcgcagaagggtgaggtcacacggtggggaaaagagatgtgatcataagggcctttgcggtgtgtgtgagctttagcccgagtgagaggggaatcctctgatggatttgagcagagatctgacaagagctgactcacttttaaaaaggatcactctggtggtagcactaccagtgctggatataaaaagacccgaagccac

SEQ ID NO: 665410 - DNA, 101 bp, Homo sapiens
  misc_feature (15)..(15): n is a, c, g, or t
ctctagacatcgtantgaatggctaatgctgtaatcccagcttttgggaggtgaaaccctgtctctgctaaaaaataaaaaaaattagctggacatggtgg

SEQ ID NO: 665411 - DNA, 141 bp, Homo sapiens
ctggcctgcttgtgcaaggcaagtgcggcggcgcttcaagatgcgctgcctgaccacgcctagtgctgctgcgggccctggcccatggctgcatcgtgcaggaacctcctggtggccggagcctccacagcgagtgcagtg

SEQ ID NO: 665412 - DNA, 1187 bp, Homo sapiens
tttggggcatatgaaaatttattactacagggttttcaccattaatatttatgactctgggctcttctcctttcttggcctttggtattaggggccaaaagaagaaacattgggctacttggacaacctttaaagcgggacctccaggaattatcaccaacagcatgaccttggcagaccaaattccgagcaaccagaaacttcatcatttctcctcaataagagttcaagccaacccggtcagtggggttacaaggggcgtggtgatttccttgggccatctctgggatcgagggtggacccttacacactttccataagtgggcagaaatgtgggcgtggtgtggggcttacaactcctatatttttctccgagcagcgatccctttgtggctgtaagaagagcaccctccaagagaggggtgggcccttataggggcgtggtgccccaaagtgagcttttctataatagcgggttatactcagtgccaacttttcggggctcctcggtcgggggaacatagcgggagcctttcctatagccagtttaccgaaagttcccaggaaaaattggcccattccgggtgggggccacaaaacaacgtgtgattaaccattaacaacaaaccacttaaggggagcgaaccgtgatctcctataatacataggatatccgtataaatcaatttttattgggccaaaaattaaacctacctggggaactcccgtgtgcttccacccccattttaacacccaaaagacaacgacaatttaattcttataaaaatctaaggacctgggggctatccccctcttaattagagggcggggggcgcagggggacttaatagagcagttaaacggtcctaaaagaattttaaacaagttgcgccctatagcccacattcttttttacacacgcagagggcaacaccacataaaccccccttaaattcccccaataacacggggtaattattccgaaaaaccatctagggctttcaacattttaaacccaaatataggccctgggggcgaaagcgcataaaacggcgaaacaattactgccgggggcgcgctcataaatcaatgggccctattgttggtaggagggcacccctttagaatatatttatcacaacttaaaatatgcccccgatcaaataatatatatccagcacagtaca

SEQ ID NO: 665413 - DNA, 991 bp, Homo sapiens
gatggcacatgcagcgcaagtagcgtctacaagacgctacgttcacccatatccatatcaagagcttatcacgcttatcatggatcacgccctcataatcgattttcctatatctgcattcctagctcctgtgatgccctgtatatcgctaatcgactcacatacaagaacgtaagctcaagactgaacaatctcaggactgctcagagaaatggaaaacgtcagaactatcctgcccgacatcatgctaggtcctcatcgccctcccatccctacgcatactttacataacagacgaggtcaacgatccctcccttaccatcaaatcaattggccaccaatggtactgaacctacgagtacaccgactacggcggactaatcttcaactcctacatacttcccccattattcctagaaccaggcgagctgcgaatccttcacgtagacaatcgagtagtactcccgattgaagcccccatatcgtataataattacatcacaacgacgtctagaccctcatgagccagtccccacataaggctcaaaaacaagatgcaaattcacgtacgtctaaaacccaaaccactttcaccgactaacacgaccgaaagagtatactcacgagtcaatagctctagacatctgtggagcaaaacacagtaacatgcccaatcgtcactaaaatcagctaccactaaaacctctttcgaaactaagcacacgtctttaccctatagcacacccttttacaccctcaatcagaccacaaaaaaccgacagcgacaccaccaccacaaacacatcatggagagaccacgctaacacccaaaaacgaccatacaagaccatgatagggcacgaacgaccacaatgagaagaaatgcaacagtatctaccagctacctcacagcaaacacggccagccacagacgcgaggttcaaacacaatcaacaccgcggccacgagagtagcacacatcccgcgccag

SEQ ID NO: 665414 - DNA, 378 bp, Homo sapiens
ccttgcgcaagttactcaattttttagcttcatcctctatgcagaataagcccttccctaaactgctatatttatgattttgtgatgacccatataaacctgggattaccctggtgggttcctattttacttttatatccaccttcataatttcgggttcggggcctccctccagggtgccttgttttataatttgtcttgctccatgacgggttcttttcccttcttgtgattttaaaaaggataaactatgtgttttaattggatcaattgctttgttttttcaaaaacagaaattagactatactcctccttctttcctttttgtagggggaaatggggtcatttgaagtcccttaacattagatttgaaattta

SEQ ID NO: 665415 - DNA, 405 bp, Homo sapiens
ctgagaggtggggagctgagatttggtcaaagggcgcagggtttcagttagacaggaggagtaagtttcagagatctattccacagcatggtgactatagttaataataatgtgtatttccaaattgctggccgggcacagtgtctcatgcctatagctctttgggaggctgaggcatacgaattgcttaagcctagaagttagaaactaggctgggcaaaatggcaaaaccctgtctctaccaataaatacaaaaattagccaggcatggcagcgcatacctgtagtcccagctactcgggaggctaaggtgggagaatggtttgaacctgggaggcagaggttgcagtaagccaagatcacatccctgcactccagcctgggtgatagatccagaccctgtca

SEQ ID NO: 665416 - DNA, 865 bp, Homo sapiens
  misc_feature (296)..(296): n is a, c, g, or t
  misc_feature (615)..(615): n is a, c, g, or t
gccctggtgtgatcccgtcctgcgcgttgtctctggagtagcgtctttaatctccgtccgccttctctcctacctaagtgtgtgccgccacccgatgaagatcgatggacatggacatgagccccctgaggcccccagaactatcttttcggttggtgaactaaaggccgacaaagattatcacttagggtggatcactgatgaaaatgagcaccagttatcttaaagaacggtcagttaaggggctgtgccacatggatgagttgcacctttgtttgacagcagaggcaatgaantacgaaggcagtccaattaaagtaccactggcaacctttgaaaacttgtctgtacagccaacgtttccctcttgggggctttgtgaaataacacccacccagtgtctaaagggtcgacagtgtggttcaggggccagtgcattatttagtggacagcaccttagtaagcttgtggaggaaagatgcagaggtcagaaagactggacaggagcgaggaggattgttgaaactctaaagtatattctggaaaggcggtctgccccttgaggttggttagcaagggttcccaccaggaaaaacacgtgacgactttgctggntgatgaagattgattcgcccgattgtatgattgaacagagggatgctgatgcccgaatgctgactgaatgcactgcattcgatgaatgacgcgaagtttgaagaaaaaacggggcagcgtgaagaaatctaattacgagaatatccgaggcaaaaattgccaaagtcaaatccggatgggaacgaccaaacctctatacaccccagttcaaaggagagaatcttctaaaaaggggaaaatcctaaaacca

SEQ ID NO: 665417 - DNA, 141 bp, Homo sapiens
ccccgccgctgtcttatttattttgactgaaagtgagagggaactttgtggcctttttcctttgtctgtaggccgccttaagctatctaaatttggaacatctaagcagctgaagggaaccagggggtttcgcaaaatcac

SEQ ID NO: 665418 - DNA, 695 bp, Homo sapiens
gggcatattatgcttggggcactgcgtgagagccatttattgattaacgagggggacctaaagcacgagcagtattgtcaagagagcggcatcatatgaccgaatataaagcacccatttacacgatgtgtaaaagtgcttaaacaactggatcagggtgcgcatgttgagaggagaaagttaccggacagtacgtacgctcttatcccctgcacaatatataatgaggcaccactaagggagagcgggcatattcttaaataacacaggttattcctggaagatggaataaacagggataattccttctcacggagattctggtatttttcacaacactgctctggcttgtgttataaaaaagcactcgctattttttacaaagagttctttgcagcgagagtgggcgcttaacttttcaaattaaaaaggacatggatgtgcacaatggttttgacacttgttttaacggttccctaaggcgggtttaggtaggcacgcaataagccggtttgtgctctgtggaaaccccgaaggtgccttaagcctcccttaaaacaagcaattgctttctaaaaaacttccacaataaaaaaatggctgggatataggagacaacctccccctatgggggaacttaggccccggcgccccatggggaaacaacccactaatttccctgggcccggttttgg

SEQ ID NO: 665419 - DNA, 95 bp, Homo sapiens
  misc_feature (75)..(75): n is a, c, g, or t
gccggacagcgaggccaagatttcaactgcgggacggtcaggggagacctccaaaaacagggaaggacagccagnatgacactgaagcatgctac

SEQ ID NO: 665420 - DNA, 203 bp, Homo sapiens
ccggggtttttttttttggggcccaaaaaaaaaagggggggggattacctttttcacccccaatgggggggcgcccggatgggggttggggggggtcccctggtttccccccttgttgggggggtagtgggggggaaaaagttttttgtgtttttttttcccccccgccttttttttttggctcttttttttaaaaaaattta

SEQ ID NO: 665421 - DNA, 469 bp, Homo sapiens
ggtgttagttccttgagggcagggccatgtctttttctttcctatctcccattagctgggcccttttcacacagtggaagctaggaaacatttattgaatgaatgaatgaatgaatcagtgacccagcttccaagaaacatcctctgattgggaagataggaagataaaccaataattagagtgcatggctcacgcctgtaatcccaatactttgggaggctgaggcaggggaccattggggccgggagtttgaggccagcctgggcaacacagcaagaccccatctctacaaaaaataaaaaaaaattaactggacatagtggtacacccaggtactcgggaagctgaggtgggaggatcacttgagcccgggaggttgaggctgcagggatacatgatcacaccactgcactccagcctaggcaacagagtgagatcttgtcttagaaacaaacaaacaacgattaa

SEQ ID NO: 665422 - DNA, 1099 bp, Homo sapiens
  misc_feature (559)..(559): n is a, c, g, or t
  misc_feature (808)..(808): n is a, c, g, or t
  misc_feature (1094)..(1094): n is a, c, g, or t
  misc_feature (1096)..(1096): n is a, c, g, or t
  misc_feature (1099)..(1099): n is a, c, g, or t
tttgtttttttttttaaggtgaaaaagccagcggacttaatggctcggggggcagggggctcaggagctctggggggggcgggtccgcttcctcttcaccatctcacagggcttcgtggcgtgcgcaggatgtggcgctgtggcccgtggggatgtggctgccatgtgcgcaggctcgggggggtacgtgggtcctgggggactcagtgtgtctgatgctgctgagcggtggggcgagcattctggtgggatgggtgggtccgcacatagagagggggcaggcttccgcgggccggagatctccggtataaggaccaccaggacaccttggccgtcaggtggccggctccaggcccaaagtctgggggggaatcagtccggttgtagcgggaaggaatggcggggccttcaagttattggggctcagggctggaaggtctgggtaattcctctggatcagggaaactgtggacgcagttccggaggaccatccatggcaagatgcgcagacagggggggggtcccttcgcaggggggaccggaccttcagggcctcggntccagggccagggggccctccaggaagttctcggggggggaaacctgggaagatgaacgggcggaagcagagtctgggggagctcatcggactctgaacgcggccaaggtgccgggcgaaccgaggggggttggggtccccctaatggccaatcgagatcgcccgggaaaactaaatcccaaatttgtgggtggattgcccaaactggtcacacgggagcagagcgggggtcacccgggggggagacancactggggtgagcacacactcgcggggcccgctgggtgggcctggggcaccacaagaaagagcgctctggagaacacacacagcctgtggggaaaagagggccacacttggggaagagacgacagacacccggtgtggaaagaacaagaacaggcgctaaaggagactgcaacaagagccaacaaggagggaacgttaacacgcagagagagaaaaaaacaagaaaaagacgactagatacaaaatgagcgtcgcgcccgcgccgctctccgcgagtgagaggggnanacn

SEQ ID NO: 665423 - DNA, 189 bp, Homo sapiens
ttgggggtttgacccttttttttttaatctacttttggtaaaaagcctttaataaaaaaaaaaaaaaaaaaagagaggtgtgaggggcaaaaagcaaacctatttcccctgcctcatagggttttgggaagtcatcccccccagtttgttggttttgtttcccactgttaataaagcatttaaacagta

SEQ ID NO: 665424 - DNA, 164 bp, Homo sapiens
cacgaggtgtcacgcacgtgcgtggcctggctttgcgagttgctggattaccaaatgactctgaagggaaactacatgtcttactcaaatatttcttctttcctctggcaattattaattgaaatgagtatttttcggggccagaagagtgtaatggcgttgag

SEQ ID NO: 665425 - DNA, 1019 bp, Homo sapiens
  misc_feature (633)..(633): n is a, c, g, or t
  misc_feature (761)..(761): n is a, c, g, or t
ttttgttaaccaacaactatttacttaatgtgttagtttgtttattttcttatattttcttgtctcccgacgcccccatcgtaaatctggtggttgccttttgtagtctatggtccacacatgctcttgtttttctctccccacggttcgttatcggaactccgagtggtcgttacaaaattctttatgtccggtgcccacaggtggcccttatagagcgtaatttaaagaagatccgagtactttcacacctacacaaatggggtgcccacactcctgtgtcaatccccatgaaatgttccttggggttaatacgcctctttatatgtctttttgcgggcacccccttctctatgtgtgtattaatacttttgtatggagtatctgttctccctctctctctttgttatgtttttttttttgtttaagggcgtgctgctacgctttctatagtatcaatcctggatcttcaaggctcaggtgatacagggctaacgacccccctgggcttggccccgttcgcaaagcccccctaaccctttcccccctaggggaatgacccaaaatgcctctcatgacatctgcaagttgaggggaccaaaaaaggggggaatgcggtggggcaacgaaggngcattcaattgcaattgtgcaaaccaactgaaaaaatcacacaatgcacaataaacgtattaacgcgcgacacgacttactaatacatatatgtgtgcattagcatcaagttctatccatcccgcaanagcctacactagctaatcacgcatgcccctcgtgtggagcttgtggagaggactgaggccattctccttagagagaattggggtggctattaggatggacaagggacttcctgtaacaacgcatctcatagtcttggaatgactacttaaaaagaccacaatgtgcaatcgaagtcctcggccacatctgtcaactttgggggatgctcgctccaaccgacatgctgtaaacttgcaccgttcccgttttaatcgtcc

SEQ ID NO: 665426 - DNA, 154 bp, Homo sapiens
agtcagggcgagctgaaaaaatgacccagcaaaggccagactgacagatcccattcccaccacagagacttcaattgcacccacacccccaggtaagcatctacagcctggaacagcaccctgcacccccaggtgtgcacgtgacagcctggaa

SEQ ID NO: 665427 - DNA, 485 bp, Homo sapiens
agcgacgcagttgataatgagccgatgaagaattcagtgaagcgtgcatgataggaagtgagaagcagccctagaactgctgctttacctgaaaaagaccagtattgcttatccagctatacgatatcttctgtatggcgcgaagggacacaggacccgaccctaagtctttgccatgtcattcatttctgtgcaaaaccaggactggctgatagtacatattccagatgctcatctatgggtgaaaccattgtcgggatctatctgcagtccagctacaacaaacagcgcttggatcaacctttagaggcttcaacctggctgaagaatttcaaaactaccaatgagcgcttcctgaaccagataaaagttcaagagcagtatgtctggaatacgagagacagcacttgagaaagggagtcctctgggagaaagtggttgaaccgggctaacacgggtgagggaacgcccacaatgcagtgtga

SEQ ID NO: 665428 - DNA, 498 bp, Homo sapiens
atgtgtcaccaggaaggggactactgtcaaaaatatgcatgtctctgtagtaaaaacctcattcccacaaaaagggctgccatctggtgctcgcggtcaagtgcgacctctgggtcccttttatgcccactttgggattattggaaaattaaaagctatctatggtttcaaatgtatatcttggagtagactttttatggatagctctaaagattacaacattaatgcctaatttttcatggtctacttagagtagatatataacctctttaagtggaacatataaatcttaaactatgtaggtccttggcacgaccctttggtcctgtaactgtaattatgtataacacataccttcactgaaaaccccatcaaagtgtaattctttttggctttcaacagtcaagcatattttcaagaacttaacagaataaaaataatacatttatctcgattttacctcgtcatttgctcttccctcatttctgaagttccaca

SEQ ID NO: 665429 - DNA, 260 bp, Homo sapiens
tcatctgctactggcatctcgtggactggaggcagcccttctgtaccagaacatgtcaaaagcttttactgtaaagctagagaacaaactagtatgctggatatgggcatgtagctaacaggttagaggcatgggattatcctgtggactttttttttttatatgggtttgggggtccgaaatgtttaagggtggccctcctaagccggtggaaagtgtctcggccacaacattgggtgatgtggggcctcaaagaatgt

SEQ ID NO: 665430 - DNA, 428 bp, Homo sapiens
accatgtactggagttttgcagaggccatgtgtgatgtataatagcacaacagattgagtgcggaagcagataggagaattcagctaccttatattaagtcagccattaaataggtttgcaaaaatgggtcaggcgcagtcgttacgcctgtaatcctaacactttgggatgccgaggtgggcagatcactttgaggtcaggcgttcgagaacagcctggccagcatggcaaagacctgtctctactaaaaatacaaaaattagccggacatggtggcatgcccctgttatcccagctacttgggaggctgaggcaggagaattgcttgaacccaggaggcaaaggttgcattgagctgagtgagccaagattgcctcactgtactccagcctgggcaacagagtgagactccatctccaaaaaaaaa

SEQ ID NO: 665431 - DNA, 267 bp, Homo sapiens
ttcttttatttatttaacatttattactttactatcatgtactctaatatggcaacaagattgaatctatcacttggttgtaagggaggagaccacccctcatattgtcttatgcccaatttctgcttccaaagaaagaagaagttaaaactaaaggcagatatggaatccacaggcagatagcccagcactgtgccctgtgcctggtggttaaaaatcaacccctgacctaactgcttgtgtttatctatagattgcacacattgt

SEQ ID NO: 665432 - DNA, 424 bp, Homo sapiens
ctccttttcacatcatatatctctgccagaatgatatcattaccctcagagtcagaagactagaaaataaatctcttagtagataacttcggttccttattctggatggtttaattggattaattctaattaattaaaccttttacggtcaattataccattaattaagaattcaccaatcggctctggtatttaaatgtgacaaacatcctaatttactaacttatgcaaatttggtgctatagtttttatcttttttaaagtttccaacttgctatcaaaatcatagttttccttattttttgaccaaaccaccatccagaaatttcaaacaggttctacttttttccattcaacttaagctaccatacttttttcttctgctattagtgttctgttaagttatgctcttgtaataaaatca

SEQ ID NO: 665433 - DNA, 84 bp, Homo sapiens
acctctctgtacttctgtgccagcagtttagggcagttagccggttggatgtacttcggcgccgggacccggctctcagtgctg

SEQ ID NO: 665434 - DNA, 167 bp, Homo sapiens
acatggaaatacacataagatgtaagattagtataataaagagtcaattaagggccattatggatgggtgcttaaagcatcaagtgaagggctctagaaggttgcttagaaagtagcaggttccacagaggaagaagagccagatgttaagtccccagagcagaaaa

SEQ ID NO: 665435 - DNA, 117 bp, Homo sapiens
aaatcccccatttcatccccaagcaacaagtgatgaacacacacacacacacacacacacacacacacacacatagtcccgtagtgactaacaggatctcccgtccagggagatgtg

SEQ ID NO: 665436 - DNA, 137 bp, Homo sapiens
agactggcatcagtcatcagatgtgttagaacatagaatagctatgatggactgatgcggatgtgtgagaaaaagaggactccagttgtgattgatattaggagacagatgctgtgatcgagatgtgggaagaatgt

SEQ ID NO: 665437 - DNA, 614 bp, Homo sapiens
ggtcaccacagtagtgtccctctggctcagtcggcccaggccctctcagtcctccccaagccccacaattcgtgccgcggtctgagacgcggccccggacggcggcggtagcagctgctgcatcgatctccaccgctccagccgatggaagacctggaccagtctcctctgggtctctgtcctcggacgagcccatcccggcgcgctaggccgtcgttcaagtaccactttcgtgaggcgagcccgaggacgagggatggaagaccgatggatggaagggaagaggatgatgagggatgaagacaatcgtaggatctggagctggtgcgatgagttcccggattgcccgtgtgggtgatcccggtaggcccccatgatgtcgtactgaggcgatttgctggggggcccgttgccgctcggggcccagagggctgtcgcagttcgccgtgtacaagtgcctctttctggtgcagggtcttgggtgatcgcgcgggaggataattcgtcactgatccggcacgtgtttccgccggtcgggatcgcccaagtggctccgggggcaggctcttccttagggagtgctccgcgatcccgcgcgtaggtgggtgggaccg

SEQ ID NO: 665438 - DNA, 1323 bp, Homo sapiens
gccaccactacccggctaattttttttatttttaatagagatgaggtttcaccagtgatggccaggtctgatctcgagctcctaacctcaagtgatcctcccacctcagtcctcccaaaggtgttggaataataggcatgagccactgcatcccaggactttaagttctttgtaaagttgcatgcattattatttttaagagacaggaatctggactacgattgcccaggcgtggtcttgtgaactccgtgggcctagaggtgatccgtccgtggccttatcctccatagaatagcgtgggactacagcacctagtttggagatttccgtggtcgtgtattccccaagtgggggacatctcattgttggcctttctggtttgtttcttttttttgtggggagcgaggggagcttcgcgcgccttggtgctgcccgcgggtgtgtggagtcccggggtgccagacaaacctatagaggggccaccacgctgggaatacgctccgcggcactcgcgcgtggattaatcaaccggctaactaattctctctagcgcgctctcagagaccctctcacacgaaagtaagcgtgtgggaaaaacaagagagggggcgccgcaggcgccaagaccacgcggggggggataaatcttcggggggcgaagtagtggagagcgaagagaagacagcggggggaatatacccacctgttggtgtaccggcgcggggacgggggggttcaccacactccgcgcgggaaccggcggggaaaagtgagccgcggattggggggggcccccacaaaaagggtgggggggggggagcaaacacgcgcgggacctatggcgccccagcttggcgccccgcggggaaccctaggatgtcgaagcgtcatgaaaagggcggatggaaccgcgagaaacattcggggggagatccccacggaaaaccctatgggggcaccccctcggggggaggaaacacggcgcaggaggcacccacgacagacgcaaagaagggctactagtgagcggcgagggcgacaagcttcggcggccatttaacacggggggagagcaagccacacgggggtgatatacacactaaggaggaggaaccttcgtgaaaaacgaggggcgggcgccagaaaaaaaagggggtggtggcgggtcccacccaaaggccacagcaccaaagagggtgatactacgagaagacggctaccccaaagagggggcaccagtagtattccgcaccactggtgacaccaaggggagacacacctttagtgtggaccacacccacgaaaagaggggcggccgccaac

SEQ ID NO: 665439 - DNA, 622 bp, Homo sapiens
gctcttgaccaggcattacggttatgaacatgaaactggctgcctacgctccccgcatgaaggagataaaagtaagaggagggaatgagatctgagaaagtcatgatcatgactgtgccactgtgtcgcatcatagagatctcagacattggacctcttctaaaggatggtataaaatgactctcaaccactttggaaatacatatgtgtatataagaggttattgatcaacttctgaggcagacattagtctcgctttttttcatttttgttgtgtcttataaactgactgtatatctttgcttggatactgtgattccaaaataaatctcatccaagcaagttagagtccagcctaatcaaatgtcataattgttgtacctatagcaagttctaaataatagatttattatgtacattatagtatatgtaagtagctactgaagtaaagatcatgaagaaagaacttgataggtgtacatgcgagaccatgtaaaatatgtaaattctagtaactgaaatcctttcaacagattttatatagcaactgtctctgcagtagtacactaaaactgggcacatggaaagggccaatgggagtggcccaccctgtaatctcaga

SEQ ID NO: 665440 - DNA, 968 bp, Homo sapiens
  misc_feature (49)..(49): n is a, c, g, or t
  misc_feature (58)..(58): n is a, c, g, or t
  misc_feature (62)..(62): n is a, c, g, or t
  misc_feature (68)..(68): n is a, c, g, or t
  misc_feature (81)..(81): n is a, c, g, or t
  misc_feature (94)..(94): n is a, c, g, or t
gcacgagtgggtgctgctaacgcgggccccggaacgcaccatctgttgncatcccggncggncgaggncattgcagatttnggaagatggcaangttcatgacacccgtgatccaggacaacccctcaggctggggtccctgtgcggttcccgagcagtttgcgggatatgcctcttaccagccgttcagcgaaggtagatcgctgtaggaataggttgcagcactggacgaggagccgagcatagccaagataagaggtacacaaagtaagtactcctctcagatttggtggtggaagtcgaaatatgcttatttccatgaggaggatgatagtagcttccagctggtggcagtacggggcgcacgcagaaggagggctaccaagggaatcgaatgagagtttgcccagcaggagatcatccggagagacatggatcgtcggagcatgttgcagttcaatcctgcatgaatcctgtcctacccagtgtcaagacaaggatggagagatgaagcgcattcagacgtgctagaaaccgttccagaaaccaaatttggggttaggcagaactgggatcagaactcaactgagaggcccgtggactcttcacgttgaagtccgaggggagtgggaagtgaccgaggcgtgggcctggcctcagatggttgcgctggctactgtggacctatgtcctcctcgtggcgtgtgagggcggcgggcccacgttgagtccggtgctgtgcacgggtcgatccgaggtgtggatttgccgaggaagatgtaaaggtttttcatgtgtctacacccctgggaactgtttgcgtcactggggaactcgggatgtgtgcctgatgcatctgcaggttgatgtacctcaggtccggatgggtcaggtgcccccgtgtaggagactgttgtcgcagggaacatacccaaggttttcgctctggtctgatcggggggacacgg

SEQ ID NO: 665441 - DNA, 102 bp, Homo sapiens
gcggccgcctactactactattgctcgaattcaagcttctaacgatgtacggggacatgaaaacagagaccaaaacacacagaaaaaaagttgtactgcacc

SEQ ID NO: 665442 - DNA, 259 bp, Homo sapiens
tggaagaatgcatgagcaatggatacaaattaccttgctcttggatttgctgagcattatccctattctgatgtcagagattatgtttattatggaatagagctttccatttgttcttactctctagggagacaatcttccataacagctttgggggggtcttctaaatctttcaaattgtgaagtcactttattcatactagatttgaataatatgatgggcaaaatatattctctcagagtcttggacactgctgat

SEQ ID NO: 665443 - DNA, 87 bp, Homo sapiens
ctccccgcctaccgttccttcctctttatctctcccacttgtcttgctcaatatgacttggtaattacaatgttgattgaagtctgg

SEQ ID NO: 665444 - DNA, 932 bp, Homo sapiens
  misc_feature (270)..(270): n is a, c, g, or t
  misc_feature (297)..(297): n is a, c, g, or t
ggctgcttgctgttgccacagtagctataaattaaccaataacgccacaccagacactataatccacacccaataatagtgtaacagtgtatagccagtcactaataaatgttatttccataagccaatgagaatttgtgacaaacctctttggatcatcccacttctggacccttttttgcctttaagaaactgcttgttgcaaagctccaaagggagttcatatccaaggatacttgggtctgtttcttccaggcagctgtcctcatntggctcaagtaaactctttgaattacntttgtgcttcagccccttccacttagattaacaacatggatttgtgtcaccatgtacggcaattaaaatgttcacacttttccccccaagggcactgatgtgttttcctgagcacttggaatagctacgtagtgtttactgtctagattatggtttctcaaccttggtgctacttacctttaggaccagaggattctttgctgtgggaggctgccctagcaatgctaggtgtttcgtttgacctctaaattacacacctccaccagtcttgacatccccacaataacactagacattgacaaatgtctcctggggaaaactctccaccagttgacagggaaagttctggaaatattggaatggtcaattgagattttatgttatccaaaacaagtatttttcttgtgttttcaaacatctacttccatctacttatctattgattttgtacttttatttgtaacttaattccatcaaggagagagagttcattttctgttatgctaaatttttgaagaatgtatggatttttttatgacatgatatatggatgatatgtagatattacatgtttgtatcatcaaatctcaggcgataataaaataaatacttataatatgatatgtcactgtata

SEQ ID NO: 665445 - DNA, 150 bp, Homo sapiens
aaactgaggggacgtccacatttgacggtgggagagaacagagtgaaactgactccacgtccacatttgattgtgggagagaacagaggaaatctgactccacgtccacatttgatggcgggagagaacatatggaatctgtctccactt

SEQ ID NO: 665446 - DNA, 497 bp, Homo sapiens
gtcattcatttgcttacatatatgagaatacgtttttagaagccaccaggacacatcttgaaaactttgctgctaaaaatttcttccatcagataccctaaatcatcattctcaagttcagattctgcagatcactaggccatgggcacaatgcagccaatttcttctctaaggcataacaaaagtaacctttgctccaattcccaataaattctcagttctatctgtgaatctcctcagcctggacttcactgtccatatcactatcagtattttggtcacaacaatttaaccagtctctaggaacttctaaacttttcctcagcttcctatcttcttctgagccttccacactcttccaacttctggcctgttaccaattccaaaactgattccatattttcaggtgtctttatagcaatgcccccactttttggtatcaattttcagtataaggctgttctcgcattgctataaagaaatacctgagaaggggt

SEQ ID NO: 665447 - DNA, 321 bp, Homo sapiens
ggctacctgctggatgccgagaactgctactgcgtgcagctgtcccagatccagtgtgctgattggcagctgtggaggagcagctggcccagcttcgctgcgagatggagcagcaagacacaggaatacaaaatcctgctggatgtgaagatgctgggtggagcagtgagattgccacctacctgcctgcctgctggagggagaggatgcccacctgactcagtacaagaaagaaccggtgcacaccctgtcaggtgcgtaccattgtggacgcgtgtccaggatggcacggtcatctcctccctgcgagcagtgtccacc

SEQ ID NO: 665448 - DNA, 651 bp, Homo sapiens
ctagctacatcaataaatctgaaagacttgggttgggggaaaaagcattgataagagaatatgtgaaatgaccgcctacatgtaaaatttaaaactacacaacatgtatgtttgtagctatatacatatgtgtagaagtataaaattgggaatgttaccaacttcaggacaatgactctttctgaggagagaaaaggaaggggtccattcagattggtccactgccgggctccataatcgccagtgtaaccttgggtaagtcacttaatctttccatgcctcggttacctcatgtattaaacaggaatgataatagtacctatttcatagagttgttgaggattaaataagagaattcatgtaaagtacctggtacatagtaagcactgaataaatgttagttatgtttttcatcattttgattttcttcctttcctcttttctctgcctgtttaaactctattctccctttaaagcttaaaggtcatctcctgtgtgaaatatcctttcatcatctagccagaggattattaccttcctctgaatttctgaaccactttgtttctggagtcaacaggcatttattaagaacctgccatagtgtcgtgtgctgtgctaagacaaaaattatacattcaaaagagcttttga

SEQ ID NO: 665449 - DNA, 108 bp, Homo sapiens
  misc_feature (68)..(68): n is a, c, g, or t
actttaatcgtgacaaacgaacctttaataggcggactgcaccatcggcgatgtcctgcatccaacantcgagagtcgtaaacccttattgttagagtattggactct

SEQ ID NO: 665450 - DNA, 159 bp, Homo sapiens
gtgaggctgggggtgtgagaggggctgggatggttggctttgtgatctggggtctgtaacacttgtggggttgggcccgcatgcccctcccaagggagagggagggtggggtccccctgtgctcatcagtgtttaatcgaggggataccgagactcgaa

SEQ ID NO: 665451 - DNA, 416 bp, Homo sapiens
tgcctgtgcccctgggcaggtcaggcgtactgagcagagggctcaaaagatgtctgggacgatataatcagtgtaggcaccatcgatgagtacaaccacattgttgtgatgcaaacccctggtgaccgtgaaccggcggttcctcaccaccatagtggcatctggctttgtggggtcggagcctgagtggatgtcagacacttcatatccgatggggtggaagtattgtgtcaacagcccgtgcgtccgggatgacatcagatgactgtccagcacatagtagcccaggaagtcctggtggaccgagctccccttcgacacttggtgcaaatcaacctcaaaggtgccaccgtcgtccacagacaccaccaggttcctcttcttctggtgccgaatcctgcagcccgggggatcca

SEQ ID NO: 665452 - DNA, 809 bp, Homo sapiens
  misc_feature (1)..(1): n is a, c, g, or t
  misc_feature (298)..(298): n is a, c, g, or t
ntgttcccccccctgttctcgggtgaaaaagaagctcgggagaagattggggcccccccctaattttctctcgaaaaagttcctctggtgggagatgcctgcgcccactcatcgtgtgcgagtagataggagtttctccctcggggcacaaagccgccactactgtgggtgtgttttggagagagagctctttttctcacagaagatcagtacccccacacctctctggtggtgtccctctttggctctgtgttcgtgggaatatatcggagagaggcacaggacgcacagtgttgcncggtgggggggggtgtctatattcacacaacgcaaccgtgggagcacacagaaaaaggcgtggctgggggagagacgtcgggcacacagggtgcaccaccacagtgcttgcccacacgagagtggcgctcacagagagaggcgctaaaaaatgaaaatattttatatccacccatagatatccctcgccacccccacactgtctttaatcacgtgggtgggagagaaacggtctcacgagaactcgtttgtgtatgccacgggtggccactcttaaagtttatgtatgtattaagagctgggtaaatgagtaaccacactgcacttcgtgaaacctcttcatcgaaaggagaaaggaggaaatgttttgtgggccaccccttgggttttttttttgcgtgtggccattttaagattatttgttttttaaaacaggacttttttagtgggaaccacttggccccaaatttgtccccaggattttggggcccccattaaaaaatttaatgaga

SEQ ID NO: 665453 - DNA, 160 bp, Homo sapiens
gagacagggactcgctcttgtcacccgctactgttatttctcccttcccaataaatatttcattttcacttaaaatatgtcagtgtacattggttccctgatctgctctcagatggccaagggcttatgtttgagtaggtcacaggttcatctttctgta

SEQ ID NO: 665454 - DNA, 1077 bp, Homo sapiens
  misc_feature (11)..(11): n is a, c, g, or t
  misc_feature (279)..(279): n is a, c, g, or t
  misc_feature (531)..(531): n is a, c, g, or t
  misc_feature (678)..(678): n is a, c, g, or t
  misc_feature (686)..(686): n is a, c, g, or t
  misc_feature (760)..(760): n is a, c, g, or t
  misc_feature (838)..(838): n is a, c, g, or t
  misc_feature (930)..(930): n is a, c, g, or t
gcgatccccgngctgcaggaattcggcacgaggagcacattacttctctgtaaaaccctcttaggggataatagaagttgaaacgagatcatggaggcaaagccctcagcgccctgcctgacaaggtgataacagtccactcgagtacacagacacagttcacagtatcagtttgatgagccagagtaacaaaatctaacctttgcttaatttacctggtacaggtgacaacgtgcccaaaaacacatcccccttgctgtggcccaatcttgtcagctntttccttcacctctctacacatcccaaatcatttgagaaatacacgagagttcctgctctcccatcttaaggagccagtcagagctccacccagaaatgagtaggagccccccactccaggggaaccaccgtgtgatggcacttgtggtacttgccctggcccaaggaatctctcccttcccacctcagcttgtcaccgtgtctgaaatgtcaccattaaacattcagtaccttgcctctggaagacattgngtgtttgccactctcctgatcgattgcagctatgcctaagaggggataacttataaaaatgtggaaaccatctgtccattaagtgtgggaaaaaaaccatataaaatctttttatttcttcatcccagattctttaaaacttgaatntcctactngtttctagataagacatgatgacatcatttcgagataagtttctaaaaagccgaatcagagctagtcttcgcangggagaggtcgccgcccgggttcgtgcacgatggcactagcaatctttcccctaactgattgatgccatgaagcctanaggcacgacggccaagaacattgtgacagtgccaaccttaaacactccactgctatatgttcaaaaggtggtactttgacaactaatctagntaacatcttgatggagtaggttgaatggaatattaaaccgaggcacctctttggccaaggacgaaaagaatctatgtgcaacgacttcatggagggttctctaccttatttaacccgccaaattcttggttctggttataaataaaa

SEQ ID NO: 665455 - DNA, 184 bp, Homo sapiens
atctaaggatcccccaagcagattaatacagactcatgctgtagctgagcaaacacgtcatgtttcaggaaggtactgaacccccaggacaggagcatactccaggaaccaggatacaggaaggttccagggacaatacatgagtacattgccatgacgaccatgttaaccatggaaggggctt

SEQ ID NO: 665456 - DNA, 309 bp, Homo sapiens
ggagaagcaaaccaaagagataacactagtaagacatgaccgtgaccaaagccagaataccaaaaattacctacatacggcaagggagaggcggacaaacattcgcaaggtagcgcgacagcactcgagagcacgtgtacatcttaccctagcggctagaggacaaaggaccaggaacctagatacaccatacattgagaaagtgaggaccgcacgtaccgaataggcactagacaggagctagaagtgaccttaaataccaaaacctaggataaattgtgcgtagaaagtactaccatgactaggtag

SEQ ID NO: 665457 - DNA, 104 bp, Homo sapiens
  misc_feature (104)..(104): n is a, c, g, or t
ggggaagcagcactggtggtgcctcagccatggcctggaccgttctcctcctcggcctcctttgtaactgctacaggcatctgttgcacctcctaatgttctgn

SEQ ID NO: 665458 - DNA, 338 bp, Homo sapiens
  misc_feature (307)..(307): n is a, c, g, or t
gtgatccacccacctcagcctcccaaaatgctgggattacaggtgcccggcaccacacctggctaattattgtatttttagtagagatgtggtttcactatgttgccctggctggtctcgaactcctgatctcaagtgatccacctgcctcggcctcccaaagtgctgagattacacgtgtgagccactgcagctgccctctagattttttttttttgttgaccattgcttatttggtttgactttcattttcttccccattgtggtagtcattttctgaatgcctgttagtttgtccatcttctcnccgctgtagtgccctagagtcagatgaactc

SEQ ID NO: 665459 - DNA, 150 bp, Homo sapiens
ctgaaccgccacctcatggttcctagtcggattcgttaaccacggagccatgacgggaactgcctaagctcttcctttcttatacacagcaagacgctcagatttcagcaatgaagataaacgcttttaacagtaattggatataagtac

SEQ ID NO: 665460 - DNA, 136 bp, Homo sapiens
ggacccatactacttgatacattatgtcaaaatttaagccatgttaaagaaacataaatacttttagataccatccatcaatacttgaaagaaataactgcttagccctagctcctgagctaggaggatttggtct

SEQ ID NO: 665461 - DNA, 394 bp, Homo sapiens
tcgaccgggagatcacctgaggccaggaggttgaggctgcagtgagtcgagatcatgtcactgcactctagcctgggcaacacagcgagaccctgtcctaaaaaaaaaatcagcatttttggtagagtcgtttggtcttgaaaataactattggccgggtgtggtggctcacgcctgtacaccttgggaggccaaggcgggcggatcacctgaggtcaggagttcaagaccagcctgacaaacatggggaaaccctgaccccgtctctactgaaaatacaaaattagccgggcgtagtggcgcatgctgtaatgccagctactccggagctgaggcaggagaatcgcttgaacctgggaggcggagcggaggttgtggtgagctgagattgcgc

SEQ ID NO: 665462 - DNA, 912 bp, Homo sapiens
  misc_feature (11)..(11): n is a, c, g, or t
  misc_feature (65)..(66): n is a, c, g, or t
  misc_feature (68)..(68): n is a, c, g, or t
  misc_feature (74)..(74): n is a, c, g, or t
  misc_feature (98)..(98): n is a, c, g, or t
  misc_feature (100)..(103): n is a, c, g, or t
  misc_feature (124)..(124): n is a, c, g, or t
  misc_feature (239)..(239): n is a, c, g, or t
  misc_feature (253)..(253): n is a, c, g, or t
  misc_feature (286)..(286): n is a, c, g, or t
  misc_feature (300)..(300): n is a, c, g, or t
  misc_feature (317)..(317): n is a, c, g, or t
  misc_feature (319)..(319): n is a, c, g, or t
  misc_feature (335)..(335): n is a, c, g, or t
  misc_feature (341)..(341): n is a, c, g, or t
  misc_feature (343)..(343): n is a, c, g, or t
  misc_feature (348)..(348): n is a, c, g, or t
  misc_feature (350)..(352): n is a, c, g, or t
  misc_feature (355)..(355): n is a, c, g, or t
  misc_feature (359)..(359): n is a, c, g, or t
  misc_feature (369)..(369): n is a, c, g, or t
  misc_feature (371)..(371): n is a, c, g, or t
  misc_feature (377)..(377): n is a, c, g, or t
  misc_feature (383)..(383): n is a, c, g, or t
  misc_feature (397)..(397): n is a, c, g, or t
  misc_feature (424)..(424): n is a, c, g, or t
  misc_feature (451)..(451): n is a, c, g, or t
  misc_feature (459)..(460): n is a, c, g, or t
  misc_feature (469)..(469): n is a, c, g, or t
  misc_feature (473)..(473): n is a, c, g, or t
  misc_feature (499)..(499): n is a, c, g, or t
  misc_feature (510)..(510): n is a, c, g, or t
ctatccccttngtctttcatgtggtccaaagcccctccaggatagcacagtgctttggctctccnncnttagtngcttagggtgtcaatctatctccngnnnntgccctggcccagtccttttnctgcccctaccccaccctattgcacatcaaatcatgtaaacatggctatggggatggcccagaacagcagtgaggcagattgatgtgtaaacagatttgggatcaggggctaganccagttacccagcnctaccccatgctgaggccacagttaagtatggnaaagcaggaggttntggtcccaaactctggntnagattatgcaatagtncagatngntctgntnnnctntgcnacccaccctntnagattncaggtnctgaggtccaagtngccttgggcttccctccaggcctaggnagcagatggcagtgttcagtttttttnttcccacnnccagctggnggtnactggtgctgggtcttcctagatgcntgggggaaacnggagatgggcagcggcagtttgttcagccccagggttcgagagaagataggtagttctgagcttaggaccaggagatagatacagttcccaattatctgcgtcatggcagtgtcgtgccatctgggccgcagtcccggaagagtggagagctatagaagcccacaactgaggacaccattaggtaaaagatgagtacaacctgaatgacggcaccaaaggagcccagcttggagaaggagacctggcctaaaggaggtaccctgcatgcctcggggcatggcagcctcatcgatgagcagctccaggatgtggatggccacaatgagcacagacaggcccgtcagcaccagcaagcacagcatagccagggggtagcccaggtttcgttgccaggctgaaag

SEQ ID NO: 665463 - DNA, 473 bp, Homo sapiens
  misc_feature (36)..(36): n is a, c, g, or t
  misc_feature (48)..(48): n is a, c, g, or t
tggaacaggggtgggggggggctcgggaagaagtgngaccggtgtctnggcggtgcgggcgtgaagataggtactggttttggattaggaattggtttctcacttaccttctttaaaagaagaatgggggcattagccttcggttctggcatgggattaggaatgggggggtccaactggcaggatgatttccaggcgtccatatcttctacacggaaaatatggcaaaggggaggagcaggggcttcacctgggaacatcccagggggagggcaagggaaatcatggttattcctcaggaatactggaggggcctggaggaaggtggcattcttctggaacaagggtatcaggaagggtttaaactccaggacctgggtatgcatttgaaaccaaggctggttcttggtttggattttctctctggaaggtggaaggggcgggggcttaaataaattaaacaaaaatggggg

SEQ ID NO: 665464 - DNA, 105 bp, Homo sapiens
ttgaggattcctcgtaacgagcgcctaacagccattcgtaacaccctcctaacagcgcctccgtaacacctgccccagtctccagcagcggcgtctggttacgga

SEQ ID NO: 665465 - DNA, 516 bp, Homo sapiens
ctcgcgaacgtgttatcccttgctgatcctagtcgctgctgcctaggttccatttcctttcctcctcagctcaagttacaggccgcatattttgtcagttaatgccagtacaatctgtgttagtcctaaggactttagggattgtgatgagacctgcgatggagaagacactgagaagtcagtgatctgcaatcatttgctcttgtttccacatcacctctgggatattacagctgtttgtttccaaatggctaatcatcaactaaaagcacttgtttcaagttttgttctgcactcccacgactgaagttgtagattgagccgaataaccatgggaagtgaccaagcaaagacactcgattggagtcagttgaatatttgtaccctcagtggagcccttctggtcttttcttccacttctgcagaatttcctctagcaaatacttctttctccttgcttgcctccaccatgatatttgaataagagatggccagaggataacacgttcgcgaggg

SEQ ID NO: 665466 - DNA, 932 bp, Homo sapiens
ttgctgccggcatggaataatcgatctcaggggattcaatagttgatgctaggcgagaaggctgtataccctaaaaggtgtacgaccgcccgggtctgacaagcatcccggcgtgcttagatcaacccgtgcctatatagaaagaatctccatcgttcgcacatttagctcagtgacgctgacttgctgaagagagtagataagaataccatgggcatcggataccctcgctggactttgggtgcatcccagtggactcaattgcgggcaaccatggatgttgtgtaggaaggtccgtggtccgaaggggacaatgagtgtatccagctcttcctacgaaaatattgtatgtggtgtatagacaacggggaactgaatctatttgtgaactaagcgtctatccgtgttttctggccttgtcgatattggcaaggtctatgatacatccattgcaaagataacctgtcatagggtgggacctaggatgaatagaaacgttaacattgtcgtcctagttgcgtatgttggtaatttctaacgatttgcccctttatagatgtacttggtggtctttaggtcacaaggtttactgaggataaggcattggacttgatcgaatttatgggacatcattagtttttaaattactccgtaatattttattataatcttaaaggtcacatgttcgccactttgtaattggtggagttatgctaaggataaaattcttaagtcctggcttttagagtcaccttcgtataattggggaatcgagggtacttgaaggagaattttacatcgttattttgacccgtcctattctggacttaggggaagggtgaaagtggggttaatattggtgcgggcataactttttttcctttaattggtaatgcttgagtgttaaggactgctagggtattatactgtgg

SEQ ID NO: 665467 - DNA, 959 bp, Homo sapiens
tgaacatttaatgatgccgtggctttcctagcatatcaggttatacttatgtttattaagacctttcttagtggttcctttacagtcggaattatattggtgttgatctttcttagtggttgcttaagaagttggagttactcatttataactaatccacgttggcttcagatgacactataccacttggcaggtagggtggtatataataacaaactaatcctaatccttgcctctcgttcctgtatcattgcctgtcattcattttgctaaggtataagcagacataagcatacataatgtgaatatatggtggctattattatttgaacaaactacatcttaggtcatttaagaatcaagaaaaataaaagtttttatttaccttcacttactccttcttgatgcttctccttggttggtgttgatccaaattctgacctatattcttttccttccctccagagaaacttcttttaatgcttctttcaaggcatgtctactggcaactaattctcttaatttgggttgtcagagagtcttttacttctacttatatttctttgcagggataatgtcatgtagttatataattctagttgctgaattttctctctgtactttattaattatttattatattggacaccgagtcttgctctgttgcctagggtggtaccgcaggatgtgatcccagtccatgaacctcggctcctagtgcaacgaattattgtactcaagcgggagtagcggaatacagacactcgccgcaacccagacatgtggtaagggaaccggctcacagttgcagggggtgaattgacaggccatacccccaatacaagtgggacaccggacggacagggaaacaaaggacatgggagcacaagaaaaagccaaagacaccaagaaacacacgaaaagaaaagaaaaaagagaaacaaaacaacagaccaaga

SEQ ID NO: 665468 - DNA, 540 bp, Homo sapiens
gacttggagtgctcttgccagattatgggctgagtcctgctagggagggtggccccccttccccaggaggagcccaccctgagacctggttggggggcagcttagaccctaccttagactccagcaggctgtcttgggagcatgtaattatgttttttttgagacagggtctcctgttgcccaggctggagtgcagtggcaccatcacagctactgcagcctccaccccacaggctcaggcgatcctcccatctcagcttcctgagtagctgagaccacaggtgcacaccaccatacccagctaattttaagattttttatagaggcggagtctcactatgttgcccaggctggtctcgaactcccgtcctcaagcgatcctcttgccttgggctcccaaagtgccgctgggtttgcaaggctgtgaactaccatgcccggcagagcatttaatattctccaaatgtctttcctcgtgtgctacctgggctcactgctttctggggctctcgtgttgctggtgtctccaccccaccccac

SEQ ID NO: 665469 - DNA, 129 bp, Homo sapiens
gttgggaaaaaaaactaaagggcccccccccccttttgaatttttaattttttaattaagggtcaaagtggggccaccttttttttaccccaaccccctattttttttaataaatgtgggacctgttta

SEQ ID NO: 665470 - DNA, 379 bp, Homo sapiens
  misc_feature (355)..(355): n is a, c, g, or t
ggtacccgagcaacatgggccgctgttcgcaccaaacgcgtgtaagaaggggggccgggtcgtcatagagaaagtactagatgcagcctgtgtgcacatagacgatatccgactacggaatgaatgcgtgccagtaggcgcccatgggatgatctgccaattatcccgcaagtaatagaagctccaggcaatcaggaatgatcaagcgagagctctaatgtcaacccgcatcattgagtgacatcgagatagttccatcgaagaggggctccgatggtagatgatggtagtcttccctattctagagcgtagtctaggccaggaagtgagtagaaggatatagggaatgtagaanaattataatcgttccgctgattgt

SEQ ID NO: 665471 - DNA, 881 bp, Homo sapiens
  misc_feature (57)..(57): n is a, c, g, or t
  misc_feature (66)..(66): n is a, c, g, or t
  misc_feature (178)..(178): n is a, c, g, or t
  misc_feature (407)..(407): n is a, c, g, or t
  misc_feature (411)..(411): n is a, c, g, or t
  misc_feature (424)..(424): n is a, c, g, or t
  misc_feature (428)..(428): n is a, c, g, or t
  misc_feature (458)..(458): n is a, c, g, or t
acagatctggcctgatgaagctgaccattgccatggcagctgttgaccaatgaatgncaaggtctngattttattgcaattgctattgccacaagtagcattgccgtttctggatctcaaacttcaaaactaaagagaaatcatcagtatttctaccagcaacatcttcatgtttttntccttcactttcatcagcagaaagccaaaaacgagaacttcgtgaagaacgtggtttcttaatttgcctatttgaatcaagatcttgcctgggcccgttggtttggtatatctgaagccatatacctttatgcgaggagaaacggaaactgagttttttgaattctgatatttttgttggaaagacaggcttccctaccagagctgttaaatatataaattgccattcnaaanataatgcattccnatgnagttgacacatttcactgcatacttattcnaatttgaatgaaaatttctacctataatttattaaatgagtcatctgaaatatttagagaaaatctggttttaccattacttgaagtttgttcatcctgctctccctctctcatcctttctctcttcctttccttctttccttgtctcctttattgttatttttcctgtattcttgtgttttttgttcgtttgtttgtatctcatgtgttgagggctgagttaataatgtgcctcaattcatggcacatttccatcttgaaccaaacaggaccctctcttgggttatatattttcttatgtacctactttcatttttatccccaatctgcttgccatttatctacactaaagagcaccattttaatatgtgttgttttcataaagtattatatgatatattattaatcatacgctgaggcgca

SEQ ID NO: 665472 - DNA, 929 bp, Homo sapiens
atagagatgctggtctcgaattcctgggctcaaacaatctccccatcttggcctcccaaagtgctgggattacaggcatgagtcactgaaccccacgtgctaaatttgtgtgtgtgtgtgtgtgtgtgtgtgtgtgtgtgtgtgtgtgtgatgagagagttgtcgctctgtctcacgcaggctggagtgcaaagggtcgtgtctctcagcatcagctgacaatctccacctctcgccgggttcaaacgattctcctgtctcagcatctcacacaatataggtgagaaatacaggcacaagacgattctcctgtcatcagatctcgcgcaatgtatgctgggagaaataacagggcacgcggcacaaacacgcacagagtaatgtgtgattaattgatcgagagtagaagaacgagggtcatcaagctgatgttgagggccaaggaatgggtcgtaggatcgtcgtaagacgcgtcgattgaatcgcggcatcatccgcttgctgatcttcccaagaggtgctacagagaattacagggcgtgagaccaacagaacgaggaggacttacgctgctaaaatttataaaggagggacttttaagggggagctggggggcgctcccaaaggggttgtagcatgtcccaataaccgaggtgctgatcctacaacatcagacgctcttgggtacttgtggcgcggggggttagactcgtgagttacgctgttgcgccagtttgtggaaaaatattgcacccatggacattgaggaaatcaacagacctagaaagcgaggggttcactgaaatgtgagtactccacaggatataccaattgtggcgaccaggatggcccaagggtgaataagatgggggaaccacccaatatataaatgccattcgtagaaacagagtgaccagcacgggggcacc

SEQ ID NO: 665473 - DNA, 815 bp, Homo sapiens
ctttgctgtctttcgggcagactccattcagcctacagctccctgctcacttttcacctgtccactcctcggtccaccacctgtaccatgcccgcctgtggtgcacgtgtccccacccttcctgcactctttgcttgaggatcttccgatggggaccagggaggcaggcgccatggttcccgcactctcctggttgagcaccatatcaccaacctggctggcataccttaaactctgccctctagttggcttgagggggtgagacaagtctagtgtcctgaaaattgcaactttagattgcagaccccttagaaggcaaacagcaacagttaaatgacaacccgaggcggctctgtggaccacatgcaggacaccagcagcccttcctagaagctaaagatcccgagccaattgaggcctgagcatgtgccgtgcccaggatggaggaccccacacctgttgtgcctggagacccccttatgttgcaggcgagacctttactgtagacttccaggaactggattggcggaactggatactgagccgagggtaccagtgaatactgcaggtgggaggttcgctccccaaacgtgttggaggccaagcattgttgccctttcattctggcgttcaggctcctaaaggcaaaaatccttggctgccgacctctgtgtgcctattgccagggccctttttctcttactggtataatggattggcaccggtgtcgatcgtgggagccttgctactaccaacagctggttggtggaacacatcatcccaccgctttttgggcgatcttctccccccaacgt

SEQ ID NO: 665474 - DNA, 117 bp, Homo sapiens
ttgagcagaagtaactagtaaatagcagctggattacagtagtatccccttaatggggtaggtatacgttccaagacccccagtggatggctggaaccacggatagcaccaaaccct

SEQ ID NO: 665475 - DNA, 395 bp, Homo sapiens
  misc_feature (18)..(18): n is a, c, g, or t
  misc_feature (94)..(94): n is a, c, g, or t
  misc_feature (200)..(201): n is a, c, g, or t
  misc_feature (224)..(225): n is a, c, g, or t
  misc_feature (229)..(230): n is a, c, g, or t
  misc_feature (267)..(268): n is a, c, g, or t
  misc_feature (298)..(299): n is a, c, g, or t
taaaaaaaaaaacctaanttgtcgagcactaaataaagatccagattttggtgggggaaggtgggtggggaaaaataattcccttccccccaanctcaaggcattgtgtgtttttaacccctcccaagaactctgcatttaggtacttgaggctgactactaaagtttaagtaaccttttccattgtaatattctgtaannactaccaattgaaattagaacannagannacttttctgaatccaatcctatttttattttatacannatttctcagctgtgatctttggagcaaaanncaacggcaggaaaaaatagtttgtaccagtttcatgaagtatgtctttgggtttttgtaaataattttaactcaaataaaattgctactttcaata

SEQ ID NO: 665476 - DNA, 164 bp, Homo sapiens
catgcagcttggtgatgcagcttgagataatcttcctggcgaaagatccttaacttcattacatctgcaaagccctttgcccatacaaggtaattttgacaggttcctgggattaggacatgggcatcttgggaggccactactggccttaccacaactgggca

SEQ ID NO: 665477 - DNA, 337 bp, Homo sapiens
  misc_feature (267)..(267): n is a, c, g, or t
tcggtgctctgatgatccctttttttttaggagaatgacgcttctgtcgcccgtggttgaaatgctgtgggcaatctcggttcactgcagctccacctcctgggttcatgccattctcctacctcagtttcccaagtcgctggaactacgggcgcccaccaccatgccgggctaattttttggaatatatagtggagaggggtttccaccattttgggccaggtgggtctccaactcttgagctcgaggttggtcggcccacgttgncctcccaaggtgtgggacataacgggcttagagcctcaatgcccagccagagattgtattttgaccactg

SEQ ID NO: 665478 - DNA, 894 bp, Homo sapiens
ccctcatcctgctgctctcgggagccctggcctgaccgagacctgggcctgctcccactccatgaggtatttctacaccgccgtgtcccggcccggccgggagagccccgttcatcgcagtgggctacgtggacgacacgcagttcgtgcggttctgacagcgactgccgcgagtccaatgagggggatgcctgccgggcgcctgtgggtgtgagcaggatggggcctggaagctatctgggaccgggagcacacaggggccaaaacaaggttaccccccccccccaaaacacatggctggttctccacaaggttggccaaaccaaagggggcccctgggaaaccgcgccgtcgaaactggcttttggcatgcgggccgcccatatgggcgcgcgtgcgaagaacgcccccctgctgtggacatcaggccagggcggcacttaacccattaacccacacaagcgcctaccaaatcgggacacactggcggcccgctggcaaacatgcgcgcgaggcgacccccccacactggtggcagcgggacggccgcatatttcccgcagattttttccccgtcaaaagcgggccgtcgataactatcactcagaccccacgccaccgagttttagacccacacccgctaagacgggtggaatccgtctgatgacgcgcgggacgcaccaacacttcttggggccgacgcctcttggaccaccttttttggcggggccggggggaccgccccctcactttggcgcggcgcacgacgcgtgcatcaaagacgaccgccgcccaccccaattgagcggcgacacgggccgtgagcataggggtccacaccatgctcccccacgccgggggtgaacaaaacccacctgggagcgagcgagggac

SEQ ID NO: 665479 - DNA, 480 bp, Homo sapiens
ttgtcaacgacaggaaactgttttgatcctgattagtggctccacgggcggttgctgtgacctcaggctctagtgttcttctagctcatgtgctcactgcgtcggtcgatctactattgagactaacctgaatacacatagtactgttctcagggcttgtagtatctatacatgtctggggcatgtctctataatgtggttcgacgtacgaacattgcagataagccacccaattactctctcctgaactccatatcatgtacgtcccttctctcgtcagcacaatccactcgtacttattgggcacaaatgctaatattacatctacctctgtactgccctgctgtgaaccaggaccttgggagtgctctgaggttagtaattacttccacacagacctctaatcaaggtgcttctacagcctaaatagctctcaaaacatcaggctcctttctatactcataatctttggtccagctc

SEQ ID NO: 665480 - DNA, 709 bp, Homo sapiens
tgtaacttataacactatgaaaagattgaccaacaatttcacgttggctgtgtgctttagattgttgtttaaggcatattctttcgcttgaattgctgtgttcatgagagttagggtgttttatgcttcttgaattaatttgataacatatttaatgaatatgtaccaggttaatgatagtaaaatctatgttgtgaacatagcgaagttgtgaaagcagtctattagagtaggtgaaagtaaagtatatatttgccggttatccatatcttttagaagtcctgacagaacaaccagtttatttgcacataggtagcttctgttttgaaggaaggtaaagttataaggaaactcaaatactataagatgtgtcaaggtatttctccagaattaattgcaaagctagtggtggagggatttaatcagtttctaaaattttcttctcaataagacatatgttgggataccttaggggaaagataccctcatttataattgggccctttatgcatttaatccaccatggataggaccatttaaacaatttcatataacgaaaacatcgtggctcatactgtacatctatttctgtgctttggaacctactgtggtcaatagtttcatcgaaagctgtcagcaatacgggacataaaacgtgctgtattatactttgtggcactctgcattaacccgctattttcccacaata

SEQ ID NO: 665481 - DNA, 443 bp, Homo sapiens
gggtgggcctggatttttctctcccccagagggcccgggccggggggggggggtgacccccccccctcgggggctcccccggggggggtcccgagggggggagcgaggggggcgccctctcccccccggggccccctttcgttggggaaaccggtttttagaaaacccaaggtttcggccgggggggtccccccccggggggggggttccccccccccaaaaagtttcccccgggggggggttttggggggggggggcccccccctttctttctggtttggggggccccccccccccccttggggcggggcaccttttttcccgggggggcccccccctttggggggcccccgggctttttttcccccccccccccccccccccctggggttttttttttttttgggggggggggggggttttataaaggggtttttttccca

SEQ ID NO: 665482 - DNA, 504 bp, Homo sapiens
taaacctagacctgaatccagaaggctaggctctataatcagtgatgccccagaatttggttttctcatttgtcaaatgatttaccatttctgaagtattaagcttttttctttttttaaatgcataaatgtatactgaaagaatatactccccagagtttttttttgttttgttttgttttgtttttgagacagagtctcactctgtcgcccaggctggagtgcattggtgtgatcttggctcactgtaagctccgcctcccgggttcatgccattctcctgcctccacctcctgagtagctgggactacaggccaccatgcctggctaattttttgtatttttattagagacggggtttcaccgtgttagccaggttgatcttgatctcctgacctcgtgatctgcctgccttggccttccaaagtgctgagattacaggcgtgagccactgcgcctggttgggaatgtagtttttttagatgagtaccttgctacttagaa

SEQ ID NO: 665483 - DNA, 156 bp, Homo sapiens
gaccgccaaccgccacaggcaacacgccagctaagagccagcgctcactggcacgcggaaacctccagggggaaagtgggccaactctgccgctgccctagtgttataactcctcggccccttagtgtagctccagagaggccctacttgaaatac

SEQ ID NO: 665484 - DNA, 373 bp, Homo sapiens
  misc_feature (34)..(34): n is a, c, g, or t
  misc_feature (86)..(86): n is a, c, g, or t
  misc_feature (150)..(150): n is a, c, g, or t
  misc_feature (276)..(276): n is a, c, g, or t
gacccactaacctgaagtgaaaaacaaagcttgnaggatgaaacacatgctgactaaaggaccttgataggctacatgagtggtancaggagtagtaccatggccttggactagcccattaccgtgtgcttcaagtgtgcccagcatagnccaactttggtggcctgaagtgttgatcatccctccccaattcagtcagccagcacagagagacaaacacttgtttgggaaaagtgagagaagaggatgagagactcctggtatccaggaaatgtnccagatcttattaagtcacccatgatatacctctgaagtatgaaatatggatcactactgacttgtggactccctagtgagatatagctgcagtaac

SEQ ID NO: 665485 - DNA, 691 bp, Homo sapiens
ggtgcaaagccatttgtttaaaaacatctttaacccatttgttcaaattttggaagtttcccatcaaaattttttcaagaatggaatttacaccatttgctggaaataaaatggcctccccagaatggtagtttcgagttcaaacaacaagagcccgtggtatatggggtttaaaaatgtaaactcctatgcaaacttcggccaatagccctcaattcctatgaccactaatgacacacctccgtaaagtggtatttaaggtgcaagttgtaaactaaaaagtctgtgtattccgcttggttaccaaatgtatatttgtagccctttccggccatagcattcaaggtgttgtttaaagtgaaaaacaaaagtgataatgggtcaaagtctccattgtggatagaaataaagaacagcaacgctttggaataggccaaataaacaacccaattcttaacgtttttaagtgaaaggatgaagaacctggggggtgggtccagagcaccttttaacaaagaaggcgtaacctaatgttgagtcttaccttaaatatttcacaatcatgttgacgtccaaggcccggaactattgaaaaaagccttttgaaaatatgggctttaaaatccacaagtcctttcctcttgccccggtttctccgtggatgacataaaaaaagggataagctggaaaa

SEQ ID NO: 665486 - DNA, 246 bp, Homo sapiens
tgcgccgcgccgggcagagccctgcaagggaccggatcggtgttggggctcctggagttctgggacggcaacctgccgattctgttcgacatcgctgaccggctctcgaacgcaggcgcggacctgctcgccagtcgcgtcctcgaatcggcaatccccctcgcccaactgcgagctcatgcaccggtgcagcctcgccaaatcttccaggcgggggcgaattaccacaagcacgtggtcgatctg

SEQ ID NO: 665487 - DNA, 97 bp, Homo sapiens
ttttttaaagttcagctttttattgaacatgttataaagaggtttagttacaaaaagaccaaagcccatgatatcagtcagacctactacgggattt

SEQ ID NO: 665488 - DNA, 310 bp, Homo sapiens
accatgtcttactacctgaaccactgtaaacacaattccacttcgtcactatgaatttaactgtaactaggtacctcatataagtggaataatatgatagtgatccttattgtgtctggtttatttcacttagcataattatttctagcttcatgttgcagcatgttatcagaattttcttcctttaaaaggctgaataatatttcattgtggatgtatatactaccttttgtttatccattcatccgtatgacagacattggattatttacatgtattagctattgtgaataatgctgctatgaacatt

SEQ ID NO: 665489 - DNA, 916 bp, Homo sapiens
  misc_feature (41)..(41): n is a, c, g, or t
  misc_feature (69)..(69): n is a, c, g, or t
  misc_feature (86)..(86): n is a, c, g, or t
  misc_feature (89)..(89): n is a, c, g, or t
  misc_feature (97)..(97): n is a, c, g, or t
  misc_feature (108)..(108): n is a, c, g, or t
  misc_feature (114)..(114): n is a, c, g, or t
  misc_feature (121)..(121): n is a, c, g, or t
  misc_feature (143)..(144): n is a, c, g, or t
  misc_feature (150)..(150): n is a, c, g, or t
  misc_feature (158)..(158): n is a, c, g, or t
  misc_feature (195)..(195): n is a, c, g, or t
  misc_feature (222)..(222): n is a, c, g, or t
  misc_feature (226)..(226): n is a, c, g, or t
  misc_feature (236)..(236): n is a, c, g, or t
  misc_feature (238)..(238): n is a, c, g, or t
  misc_feature (240)..(240): n is a, c, g, or t
  misc_feature (244)..(244): n is a, c, g, or t
  misc_feature (252)..(252): n is a, c, g, or t
  misc_feature (259)..(260): n is a, c, g, or t
  misc_feature (280)..(280): n is a, c, g, or t
  misc_feature (291)..(291): n is a, c, g, or t
  misc_feature (295)..(295): n is a, c, g, or t
  misc_feature (301)..(301): n is a, c, g, or t
  misc_feature (305)..(305): n is a, c, g, or t
  misc_feature (351)..(351): n is a, c, g, or t
  misc_feature (375)..(375): n is a, c, g, or t
  misc_feature (409)..(409): n is a, c, g, or t
  misc_feature (426)..(426): n is a, c, g, or t
  misc_feature (438)..(439): n is a, c, g, or t
  misc_feature (441)..(441): n is a, c, g, or t
  misc_feature (459)..(459): n is a, c, g, or t
  misc_feature (472)..(472): n is a, c, g, or t
  misc_feature (511)..(511): n is a, c, g, or t
  misc_feature (516)..(516): n is a, c, g, or t
  misc_feature (567)..(567): n is a, c, g, or t
  misc_feature (594)..(594): n is a, c, g, or t
  misc_feature (752)..(753): n is a, c, g, or t
  misc_feature (901)..(901): n is a, c, g, or t
tttttaccatgaatgtataaaaataaataatggaatgaatntattcttctgctgtaaacccgggtggcntatatcaaaatccactnggngaattttntttagaaagtnctctanagaaaangtctgaagaaaaacaggaaatnntttcanaggaaaanttttgaaaaaggacctgcatgctttaagtgcaagaangcttgaatggaaatgtcatatattacntctntcacattttnanantggntcctccgnaaaaaannttcttgtgaaacaccatgcngcatacaaatntccntgggangggncacctttcttctgctcccatgatatggtgttgctctcaagcaagtnacaatgccttgtgcttttccaatntgacttgcagcttgttctgcatgaagatcctttntacccaatatttctagngttaagtaaagnngngagctctgtgtgttttcngcataattttccngttccttgatattacgatatgctttgtcatccagttttnccccnttttcttcggggattttcataagccatcttttagtcagattatgtcttttnccagccttccatagttcaatggccacnggctgatgtggtggattgtcacagtatatatcttccacagtttttttccaaaactgcattcgcatcagtccaattgttttctcagggactgagtctttaacctgagccagttccacattaaaggccctcagtgcaaaaacagagcttcgggattctgnngggagcagcagggagcataaataaccttcataatcccgtttcctttcttcatcctgtgtagtagcagaaccccggtggtgggtgttaccctttcatcaccagtgactggtccaggacagtgcatatttccctgatctggccaattagncttgagaacaagtcc

SEQ ID NO: 665490 - DNA, 102 bp, Homo sapiens
tgggggaccccaaaaggccccctaaacaaaacaataaaaggggggaaaaaaactttttacttaaaagggacaggggaaaaccttaaaaaaaatatccaaatt

SEQ ID NO: 665491 - DNA, 1073 bp, Homo sapiens
aaaaaaaaaaaagaaaaaaaaaaaaaaatataaaaaaaaggagagagaaaaaaaaaaaagagaaaacaaaaattattggaaaaagggggacacataatattgggaactttttaaattagaaaggagaagattaaaaagtaggtaatggaaaaatgtgtaaaatgttggggattctatttgtaagaagcgagccatacattaagtggtgagcgttgtacattatttggcggacagtattgtcgcctatacctgaataattgtatgacggcattcatagaggaataaacctattaaccattcttgtaaacgggtgttatacactgtggtggtactacatataccgtgtgcatatatattgccatgcgccaacggttgtactagaatttcgatggcgcctaaccattgaatcatagttgaatcttagcagaaacaaaattactcatcatacacacgagagagagaagctatggctgagagtaacaaagcactgccataaggagtggacactgacgaatcagcactatcacgatgcgcactgatcggtagtactagatagtacatcaacacgctccatgcaaatctgatgattcgtaagcacccaacgctattcagatcgagtcaaccaacatcacgaccatgatcacagagaacatgaaaagatgactgaaacgagcataacacaacgacaggccgacacgcgaccaactacgacgaccaccgcataactaaattaagcagcaagaaacacaagcccacgagagaacacagatcagagagaaaaggtacaacacaagaacgacagcagcgtaacagcaagcagacagcacaacacaccacggcaagcaagactgagaacaaacaaggcaacagcagccaacggcacccgacacaagtaacacacaaatataagaatgcgacgtaatcaacgcaaacgcacaacgaaaggcagaccccagacacagcgcccaaccaagccaagcaacggaacaaagagacgatcgagaacagcgacacacacagaacggaacggacgcaaacaggcaacaagcaacgcgcagcacacaacccacacg

SEQ ID NO: 665492 - DNA, 634 bp, Homo sapiens
  misc_feature (128)..(128): n is a, c, g, or t
  misc_feature (143)..(143): n is a, c, g, or t
  misc_feature (157)..(157): n is a, c, g, or t
  misc_feature (161)..(161): n is a, c, g, or t
  misc_feature (165)..(165): n is a, c, g, or t
caacaacactgagcatcttgaccaaggtcacttggcccaaccacaggctaatcccaggccatgtgcacatcccaggattagcttgtggtttatcagttgtcaattttttttttttttaatacagggtntcactctgtcacccnggctggagtgcggnggcnatcngagctcactgcagcttcaatctccgggctcaagtgatcctcccacctcagccttccaagtagtggggactacccacatgcaccaccatgcacggctaatattgggtccttatcggggttctacggcttggtgtaacttatggtttaggttttctggagacagagtctcgctctttcgcccaggccggactgagtggcgcaatctgggctcactgcaagctcagcctcccgggttcacaccaatcctcctgcctcagcctcccgagtagctgggactacgggcacccgccacaaagccgtggctaatctcggtattccaggtcgagagggggttccatccgcgtcagccagggggtatccagacctcctgacctcgtgatctgccgctcagcctccaaagtgtgggatacagggtgagcaccgaccggccctgtggtatcaagtaacacggtttatcactgcaagtgcta

SEQ ID NO: 665493 - DNA, 175 bp, Homo sapiens
gtgcacataatagcagaataaaaccacatatatgtgtaacccgcagctttgtggacaactgtctccagctgcatgaagcgaacgtttggactccgccactgcttgcatggcgaaatattgggcatctgagttacaaaatagtgtagcttacgactgtgtacagctacatggaggg

SEQ ID NO: 665494 - DNA, 131 bp, Homo sapiens
tatcgaccgcaatgtctggttgatgtctgcaggccgcttgcacatgctcgaacagcaggcaccggcgtcagtcagttcgatgccgcggtaaatgcgatcaaacaggcggatcgccagttgctcttcaaggc

SEQ ID NO: 665495 - DNA, 397 bp, Homo sapiens
gctcgttactaaagtcgcaaacaacggttatacaggagaggagttgttagaatggcttccggtttatggtacgctggacggcgtactcaatgtaaaacgtgaactgaaagccttggaactggggaagctgaagcagtccatctatatgcttgaaaatgagctgagagagaaggacgtaaaaaacaagaaacttcttgtgccccgtttaatcaattattatttttggcttatagaccattatatgaatggtactgttgaaaagtcaaaaatcgatgaaattcttctaagaattaaactgctcgacgagaaaatcaatgaccgctatatacggtaatgacactgtgaggtgaatatgtcagatgtattagaaaagagtgtccgcgatatatttaatgag

SEQ ID NO: 665496 - DNA, 385 bp, Homo sapiens
aaagggacaggtaaaataaaaacagagtctaagttctgttgggtataggatcagaaattgtcaagaatcgggtagtgggctgggcacagtggctgacgcctgtagtcctagcactttgggaggccaaggtggatggatcacctgaggttaggagttcaagacctgcctgaccaatatagtgaaaccctgtctctactaaaaatacaaaaacaagagttagccaggtgtggtggcgggcgcctgtcgtcccagctacttgggaggcttaggcggcagaatggcatgaacctgggagttggagcttgcagtgagccaaggtcgcaccacggaactccagcttggcagcctgggcaacagagcgagactccgtctcaaaaaacaaaac

SEQ ID NO: 665497 - DNA, 157 bp, Homo sapiens
ccctgccacggattgtggctcaactgactccaccttcctcagtgaaaaacagtgtgagacctgaaccatgctgctgcagccctgcggggtccctcggctcctacagctacctggagtccccactggggcagcacctactccgtgatcagcggatgag

SEQ ID NO: 665498 - DNA, 944 bp, Homo sapiens
ggacttcaggacaagattgaagatgctgactctggaatgaggactccccttgtggctagggagtactgattgtgaccagtagagttgtgccagctctattacgagagtgcacacaagggtaatagacgatgtggagataggatgcattccggatgccttgtgagggctcagtcacactctcagccactcctcgtctatgcttcttagctgtggcataaataaatgtggagagtcacaagtcgcccctattattgattgtggaatcattgaccacaagggcttgtgggctcctcgtgtagcgcacatggaatagtcttgcaaccgtccatgagactcttacccactattcctcttgacgcgggatgagttggccaggaggtgtcgcgcaaagtgcgtccagcgctgagttacggtgggtatcgctaggagcgtgttggctacggtattcctatacattaagtctcagcgtgcgcgaaaaagcgcgaaaaggaccagcgcactcgccatgtgaatgcactagctattgcggtaccattaccttgaccctagttcgttcgtcacaaaggaatgggtagagatgagagagttcccccgagtaaaacatccgcgtctacgatgatcatggctaccatcatgataatagcaaggacaacaatatccgtggattcctctgatccactagaagcccctgttaatgggtcctaccaagtatatgaactaaattgctgatgataaggtagtgtttcccactagataaggtcaaggcgtccagtcccaggggactcgtttgtcgtccatatcacactttcgaacatagagcacggatatccccttgtggagggtacctcggaggggatacaatgaattccgttgcatatgacatgccgattttggggcacgcctggggtggacaaaaattactcaaagagtgacaatggagtcag

SEQ ID NO: 665499 - DNA, 1139 bp, Homo sapiens
  misc_feature (33)..(33): n is a, c, g, or t
agcgggctgagacagaaggccgcctaccggggnggccggctagccgcggactcgggcgaacccaccctcgcgatctgtcaacgcgcagggaccatgtcggcggagaccgcgagcggccccacagaggaccaggtggaaatcctggagtacaacttcaacaaggtcgacaagcacccggattccaccacgctgtgcctcatcgcggccgaggcaggcctttccgaggaggagacccagaaatggtttaagcagcgcctggcaaagtggcggcgctcagaaggcctgccctcagagtgcagatccgtcacagactaaggagatggcaggcattgacagcttcactccatgaaggccatctctgtttctctcctccgcttaaccaagctgttgtggtttttcagcatagtgttgtatgttccattgctagctgtcctgctgtttaacacagtgttgtattttttttctaaatgtacataattagaaaagaaaataacaataggaagctatgtgtatcttctgtgtaaagcagtggcttcactggaaaaatggtgtggctagcatttccctttgagtcatgatgacagatggtgtgaaaaccatctaagtttgcttttgaccatcacctcccagtagcaatttgctttcataatccatttagcaatccaggcctctgttgaaaagataatatgagggagaagggaacacatttccttctgaacttacttccctaagtcactttccttatgtatcatctaatacaatgatggttgagtgaaaatacagaaggggtgtttgagtattcagatttcataaaacacttccttggaatatagctgcattaacttggaaagaagcctgttgggccagaagacagaaactccaactggcaaaaaagcaagcatctaagaaaaaaaaccaccaaagttcttgaatttactatatttaaatgcattggttaagtttattttgctaaataaagtgaactgctttttgtctctaaaatgatattctaaataaaaccttaactttttgttgaaaatgcactgaaaaaaaaaactcttcacaaccaatcacacaacaacacctaccacaccacatcaacaacacacaactcccaacacaaaaacaacaaatcacaa

SEQ ID NO: 665500 - DNA, 182 bp, Homo sapiens
  misc_feature (46)..(47): n is a, c, g, or t
tctagaggattccaaatctctcattgcgcctggtatactttaccannccacctgtgtcggtttcgggtacggtcttacgcggaggctatttcctgggaccccttcaccgcccggtcaatccaataagaccgaacgatacacggcatccgtcaccatccgctggccggggaatattcaccccg

SEQ ID NO: 665501 - DNA, 218 bp, Homo sapiens
tctttgcttagccagttttcacaaaaatgagttagttcatcagcttctctcagtgatgtccaattaaggttttctggttttaagagtcattgtgaacttacagatttaaaggtatttaatgagattcagctgtttgcagtcatctttactgatgcacaaatgtcccatcattggccattagaagcctctttaaattgacccctaagttcagagccagg

SEQ ID NO: 665502 - DNA, 1681 bp, Homo sapiens
agcggagtttttgagggagacctaaaactgtatcatcctagcccgtatctctcccttttaactgttctttatgtgtacattctgtgcccaaaagaaaacaacctttcattaattgggcaattgtccaggctcttagcttggcatccagctctcagagctgtgaaatcaaccgcaccagatctacgctttgaaatgaggcaacatctaactggaaactcgctcaaagtaaggaagtggatgaaaagactcagggtcccttttctcttccccgtcttctctcagccacatctctcttatcctatcttggtgaagaagcttgcttggctaggagagaggtcagggacgagaagatagtgacgagaaagttccatgagactctcagaagtcccagcctgaacatcaaacctgaataaccaggagagacgtaacctcggcatactttcagtggtttacctcctgcccacgctgcaggtttttcaggtccttgctcgagtgtgtgctcataggcgtaaataaacgtgctatcagcagcctgcgtcagccagcccagctatttaagcaggctggcatcagcaaacacagcttccaaacccagggcttgcgcttgcctttgcctcttccaccgcgcagggaccatgtcggcggagaccgcgagcggccccacagaggaccaggtggaaatcctggagtacaacttcaacaaggtcgacaagcacccggattccaccacgctgtgcctcatcgcggccgaggcaggcctttccgaggaggagacccagaaatggtttaagcagcgcctggcaaagtggcggcgctcagaaggcctgccctcagagtgcagatccgtcacagactaaggagatggcaggcattgacagcttcactccatgaaggccatctctgtttctctcctccgcttaaccaagctgttgtggtttttcagcatagtgttgtatgttccattgctagctgtcctgctgtttaacacagtgttgtattttttttctaaatgtacataattagaaaagaaaataacaataggaagctatgtgtatcttctgtgtaaagcagtggcttcactggaaaaatggtgtggctagcatttccctttgagtcatgatgacagatggtgtgaaaaccatctaagtttgcttttgaccatcacctcccagtagcaatttgctttcataatccatttagcaatccaggcctctgttgaaaagataatatgagggagaagggaacacatttccttctgaacttacttccctaagtcactttccttatgtatcatctaatacaatgatggttgagtgaaaatacagaaggggtgtttgagtattcagatttcataaaacacttccttggaatatagctgcattaacttggaaagaagcctgttgggccagaagacagaaactccaactggcaaaaaagcaagcatctaagaaaaaaaaccaccaaagttcttgaatttactatatttaaatgcattggttaagtttattttgctaaataaagtgaactgctttttgtctctaaaatgatattctaaataaaaccttaactttttgttgaaaatgcactgaaaaaaaaaactcttcacaaccaatcacacaacaacacctaccacaccacatcaacaacacacaactcccaacacaaaaacaacaaatcacaa

SEQ ID NO: 665503 - DNA, 1381 bp, Homo sapiens
agcgcggcggaatcatctatctcgcccccgtcgcaggcagggatacagttcctgcaaggggtcccggggggcgcgggaggcgcaggacgctaggctctgccgtcagcccgcaacagcgctcagtccagggagggaggcccgggtggggggcagccgtaagcccccgctcagcgtgcagccaccggggacttgcgcggccgtggcaccgctggagggggcggcctggggctggggctgcccggcggcgccgcgaccgccttccttcgctgcgtcccgcccgccccacgcctcgctcaccgccgccgcttctccctgccccgcagcgcgcagggaccatgtcggcggagaccgcgagcggccccacagaggaccaggtggaaatcctggagtacaacttcaacaaggtcgacaagcacccggattccaccacgctgtgcctcatcgcggccgaggcaggcctttccgaggaggagacccagaaatggtttaagcagcgcctggcaaagtggcggcgctcagaaggcctgccctcagagtgcagatccgtcacagactaaggagatggcaggcattgacagcttcactccatgaaggccatctctgtttctctcctccgcttaaccaagctgttgtggtttttcagcatagtgttgtatgttccattgctagctgtcctgctgtttaacacagtgttgtattttttttctaaatgtacataattagaaaagaaaataacaataggaagctatgtgtatcttctgtgtaaagcagtggcttcactggaaaaatggtgtggctagcatttccctttgagtcatgatgacagatggtgtgaaaaccatctaagtttgcttttgaccatcacctcccagtagcaatttgctttcataatccatttagcaatccaggcctctgttgaaaagataatatgagggagaagggaacacatttccttctgaacttacttccctaagtcactttccttatgtatcatctaatacaatgatggttgagtgaaaatacagaaggggtgtttgagtattcagatttcataaaacacttccttggaatatagctgcattaacttggaaagaagcctgttgggccagaagacagaaactccaactggcaaaaaagcaagcatctaagaaaaaaaaccaccaaagttcttgaatttactatatttaaatgcattggttaagtttattttgctaaataaagtgaactgctttttgtctctaaaatgatattctaaataaaaccttaactttttgttgaaaatgcactgaaaaaaaaaactcttcacaaccaatcacacaacaacacctaccacaccacatcaacaacacacaactcccaacacaaaaacaacaaatcacaa

SEQ ID NO: 665504 - DNA, 185 bp, Homo sapiens
cctaggacttcacgaccagcctgggcatcacggcaagaccctgtctctacaaaaacacagtaattagccgagtgtggtggcgtgtgcctatagtcccaggtactggggggctgaggcagcaggactgcttgaaacctggagatccaggctgcagtgagccatgatcatgtcactgcactccagcc

SEQ ID NO: 665505 - DNA, 1238 bp, Homo sapiens
  misc_feature (33)..(33): n is a, c, g, or t
agcgggctgagacagaaggccgcctaccggggnggccggctagccgcggactcgggcgaacccaccctcgcgatctgtcaagtctgtccccaggggaggtccccctttcgggaggaagtttttaaggggatttctcaaaatcacccccgcgcttccttcactccttccttagagccggagcgcgcagggaccatgtcggcggagaccgcgagcggccccacagaggaccaggtggaaatcctggagtacaacttcaacaaggtcgacaagcacccggattccaccacgctgtgcctcatcgcggccgaggcaggcctttccgaggaggagacccagaaatggtttaagcagcgcctggcaaagtggcggcgctcagaaggcctgccctcagagtgcagatccgtcacagactaaggagatggcaggcattgacagcttcactccatgaaggccatctctgtttctctcctccgcttaaccaagctgttgtggtttttcagcatagtgttgtatgttccattgctagctgtcctgctgtttaacacagtgttgtattttttttctaaatgtacataattagaaaagaaaataacaataggaagctatgtgtatcttctgtgtaaagcagtggcttcactggaaaaatggtgtggctagcatttccctttgagtcatgatgacagatggtgtgaaaaccatctaagtttgcttttgaccatcacctcccagtagcaatttgctttcataatccatttagcaatccaggcctctgttgaaaagataatatgagggagaagggaacacatttccttctgaacttacttccctaagtcactttccttatgtatcatctaatacaatgatggttgagtgaaaatacagaaggggtgtttgagtattcagatttcataaaacacttccttggaatatagctgcattaacttggaaagaagcctgttgggccagaagacagaaactccaactggcaaaaaagcaagcatctaagaaaaaaaaccaccaaagttcttgaatttactatatttaaatgcattggttaagtttattttgctaaataaagtgaactgctttttgtctctaaaatgatattctaaataaaaccttaactttttgttgaaaatgcactgaaaaaaaaaactcttcacaaccaatcacacaacaacacctaccacaccacatcaacaacacacaactcccaacacaaaaacaacaaatcacaa

SEQ ID NO: 665506 - DNA, 1788 bp, Homo sapiens
agcggagtttttgagggagacctaaaactgtatcatcctagcccgtatctctcccttttaactgttctttatgtgtacattctgtgcccaaaagaaaacaacctttcattaattgggcaattgtccaggctcttagcttggcatccagctctcagagctgtgaaatcaaccgcaccagatctacgctttgaaatgaggcaacatctaactggaaactcgctcaaagtaaggaagtggatgaaaagactcagggtcccttttctcttccccgtcttctctcagccacatctctcttatcctatcttggtgaagaagcttgcttggctaggagagaggtcagggacgagaagatagtgacgagaaagttccatgagactctcagaagtcccagcctgaacatcaaacctgaataaccaggagagacgtaacctcggcatactttcagtggtttacctcctgcccacgctgcaggtttttcaggtccttgctcgagtgtgtgctcataggcgtaaataaacgtgctatcagcagcctgcgtcagccagcccagctatttaagcaggctggcatcagcaaacacagcttccaaacccagggcttgcgcttgcctttgcctcttccaccactgagaagggtctagcggagcacaggtcaccagctgggcaacattcagaaagttagtcttcctatgctcattttcctgggctgttacagaagaagactggaagagcgcgcagggaccatgtcggcggagaccgcgagcggccccacagaggaccaggtggaaatcctggagtacaacttcaacaaggtcgacaagcacccggattccaccacgctgtgcctcatcgcggccgaggcaggcctttccgaggaggagacccagaaatggtttaagcagcgcctggcaaagtggcggcgctcagaaggcctgccctcagagtgcagatccgtcacagactaaggagatggcaggcattgacagcttcactccatgaaggccatctctgtttctctcctccgcttaaccaagctgttgtggtttttcagcatagtgttgtatgttccattgctagctgtcctgctgtttaacacagtgttgtattttttttctaaatgtacataattagaaaagaaaataacaataggaagctatgtgtatcttctgtgtaaagcagtggcttcactggaaaaatggtgtggctagcatttccctttgagtcatgatgacagatggtgtgaaaaccatctaagtttgcttttgaccatcacctcccagtagcaatttgctttcataatccatttagcaatccaggcctctgttgaaaagataatatgagggagaagggaacacatttccttctgaacttacttccctaagtcactttccttatgtatcatctaatacaatgatggttgagtgaaaatacagaaggggtgtttgagtattcagatttcataaaacacttccttggaatatagctgcattaacttggaaagaagcctgttgggccagaagacagaaactccaactggcaaaaaagcaagcatctaagaaaaaaaaccaccaaagttcttgaatttactatatttaaatgcattggttaagtttattttgctaaataaagtgaactgctttttgtctctaaaatgatattctaaataaaaccttaactttttgttgaaaatgcactgaaaaaaaaaactcttcacaaccaatcacacaacaacacctaccacaccacatcaacaacacacaactcccaacacaaaaacaacaaatcacaa

SEQ ID NO: 665507 - DNA, 419 bp, Homo sapiens
  misc_feature (379)..(379): n is a, c, g, or t
gatctctcgtacccgtcagacgctgaactatgtggggttcaagacttcagtggtgaaaataactgtagatctgctgcaaatagcaagagaacgagacacagaagtggagcctgaagatgtgactgaactgctccaatctcataaaacttgttggtgaggagttgcttcttatggatgggcaaataaagtggtttcctgagatggaatctactcccagtggagatgaaatgacaacaaaggatttacttgataaagcagtagcagggcttgagaaaattgcttctaattttgaaggcagttctgctgtaggcaaaatgctatcaaatgtactgcatcctacagagaaatctttcaagaaagaagtcaactgatgcagcanactttatcactgtgttaataaactgccatagccacatagt

SEQ ID NO: 665508 - DNA, 1283 bp, Homo sapiens
agcggagtttttgagggagacctaaaactgtatcatcctagcccgtatctctcccttttaactgttctttatgtgtacattctgtgcccaaaagaaaacaacctttcattaattgggcaattgtccaggctcttagcttggcatccagctctcagagctgtgaaatcaaccgcaccagatctacgctttgaaatgaggcaacatctaactggaaactcgctcaaacgcgcagggaccatgtcggcggagaccgcgagcggccccacagaggaccaggtggaaatcctggagtacaacttcaacaaggtcgacaagcacccggattccaccacgctgtgcctcatcgcggccgaggcaggcctttccgaggaggagacccagaaatggtttaagcagcgcctggcaaagtggcggcgctcagaaggcctgccctcagagtgcagatccgtcacagactaaggagatggcaggcattgacagcttcactccatgaaggccatctctgtttctctcctccgcttaaccaagctgttgtggtttttcagcatagtgttgtatgttccattgctagctgtcctgctgtttaacacagtgttgtattttttttctaaatgtacataattagaaaagaaaataacaataggaagctatgtgtatcttctgtgtaaagcagtggcttcactggaaaaatggtgtggctagcatttccctttgagtcatgatgacagatggtgtgaaaaccatctaagtttgcttttgaccatcacctcccagtagcaatttgctttcataatccatttagcaatccaggcctctgttgaaaagataatatgagggagaagggaacacatttccttctgaacttacttccctaagtcactttccttatgtatcatctaatacaatgatggttgagtgaaaatacagaaggggtgtttgagtattcagatttcataaaacacttccttggaatatagctgcattaacttggaaagaagcctgttgggccagaagacagaaactccaactggcaaaaaagcaagcatctaagaaaaaaaaccaccaaagttcttgaatttactatatttaaatgcattggttaagtttattttgctaaataaagtgaactgctttttgtctctaaaatgatattctaaataaaaccttaactttttgttgaaaatgcactgaaaaaaaaaactcttcacaaccaatcacacaacaacacctaccacaccacatcaacaacacacaactcccaacacaaaaacaacaaatcacaa

SEQ ID NO: 665509 - DNA, 424 bp, Homo sapiens
tgaagactgggacgaccctgggtagaatctagtttttaattatttttaatgtaaaggatcaaattaatttaaatatggttttgaagtctacagaacttttagttctgtgctgtctatgtggaccctttggtaaaatgcaaattttgatatggacgttatccttggtctggtgagatgtttcatatttgtggccgttaatttaaaaattttgggttaatgctgcctgtgtctatgggggtctgtcttctttgatagccatctattcatttggatcatggggccctctttaatccttcccccaatcaaataagcttttgctattggtttggggttgggatttccgtttcggaaacttttgaaaaatgctaataattacccaagggttttgtcaaattttaaaataaatgtgtgtgtgtttctttta

SEQ ID NO: 665510 - DNA, 1282 bp, Homo sapiens
  misc_feature (33)..(33): n is a, c, g, or t
agcgggctgagacagaaggccgcctaccggggnggccggctagccgcggactcgggcgaacccaccctcgcgatctgtcaagtctgtccccaggggaggtccccctttcgggaggaagtttttaaggggatttctcaaaatcacccccgcgcttccttcactccttccttagagccggaggtcggtgagggcccgcggaatcatctatctcgcccccgtcgcagcgcgcagggaccatgtcggcggagaccgcgagcggccccacagaggaccaggtggaaatcctggagtacaacttcaacaaggtcgacaagcacccggattccaccacgctgtgcctcatcgcggccgaggcaggcctttccgaggaggagacccagaaatggtttaagcagcgcctggcaaagtggcggcgctcagaaggcctgccctcagagtgcagatccgtcacagactaaggagatggcaggcattgacagcttcactccatgaaggccatctctgtttctctcctccgcttaaccaagctgttgtggtttttcagcatagtgttgtatgttccattgctagctgtcctgctgtttaacacagtgttgtattttttttctaaatgtacataattagaaaagaaaataacaataggaagctatgtgtatcttctgtgtaaagcagtggcttcactggaaaaatggtgtggctagcatttccctttgagtcatgatgacagatggtgtgaaaaccatctaagtttgcttttgaccatcacctcccagtagcaatttgctttcataatccatttagcaatccaggcctctgttgaaaagataatatgagggagaagggaacacatttccttctgaacttacttccctaagtcactttccttatgtatcatctaatacaatgatggttgagtgaaaatacagaaggggtgtttgagtattcagatttcataaaacacttccttggaatatagctgcattaacttggaaagaagcctgttgggccagaagacagaaactccaactggcaaaaaagcaagcatctaagaaaaaaaaccaccaaagttcttgaatttactatatttaaatgcattggttaagtttattttgctaaataaagtgaactgctttttgtctctaaaatgatattctaaataaaaccttaactttttgttgaaaatgcactgaaaaaaaaaactcttcacaaccaatcacacaacaacacctaccacaccacatcaacaacacacaactcccaacacaaaaacaacaaatcacaa

SEQ ID NO: 665511 - DNA, 210 bp, Homo sapiens
gtagacggccactgagcacaagtgagaactctaggaatatttttaaatcactcccagcttcatgtctctttttcttctgaaaagctatatgcttttcatgctacaagccttttttatagaactatgaaaatcaccttcagatgcagccaaattttattgccccaaaacagaggataaattgggggtaaacacacacctgtattgcggtaa

SEQ ID NO: 665512 - DNA, 1834 bp, Homo sapiens
agcggagtttttgagggagacctaaaactgtatcatcctagcccgtatctctcccttttaactgttctttatgtgtacattctgtgcccaaaagaaaacaacctttcattaattgggcaattgtccaggctcttagcttggcatccagctctcagagctgtgaaatcaaccgcaccagatctacgctttgaaatgaggcaacatctaactggaaactcgctcaaagtaaggaagtggatgaaaagactcagggtcccttttctcttccccgtcttctctcagccacatctctcttatcctatcttggtgaagaagcttgcttggctaggagagaggtcagggacgagaagatagtgacgagaaagttccatgagactctcagaagtcccagcctgaacatcaaacctgaataaccaggagagacgtaacctcggcatactttcagtggtttacctcctgcccacgctgcaggtttttcaggtccttgctcgagtgtgtgctcataggcgtaaataaacgtgctatcagcagcctgcgtcagccagcccagctatttaagcaggctggcatcagcaaacacagcttccaaacccagggcttgcgcttgcctttgcctcttccaccactgagaagggtctagcggagcacaggtcaccagctgggcaacattcagaaagttagtcttcctatgctcattttcctgggctgttacagaagaagactggaagagaggtaatttccaaggttcttcccagctctgaagttgtgtgtcaaagcgcgcagggaccatgtcggcggagaccgcgagcggccccacagaggaccaggtggaaatcctggagtacaacttcaacaaggtcgacaagcacccggattccaccacgctgtgcctcatcgcggccgaggcaggcctttccgaggaggagacccagaaatggtttaagcagcgcctggcaaagtggcggcgctcagaaggcctgccctcagagtgcagatccgtcacagactaaggagatggcaggcattgacagcttcactccatgaaggccatctctgtttctctcctccgcttaaccaagctgttgtggtttttcagcatagtgttgtatgttccattgctagctgtcctgctgtttaacacagtgttgtattttttttctaaatgtacataattagaaaagaaaataacaataggaagctatgtgtatcttctgtgtaaagcagtggcttcactggaaaaatggtgtggctagcatttccctttgagtcatgatgacagatggtgtgaaaaccatctaagtttgcttttgaccatcacctcccagtagcaatttgctttcataatccatttagcaatccaggcctctgttgaaaagataatatgagggagaagggaacacatttccttctgaacttacttccctaagtcactttccttatgtatcatctaatacaatgatggttgagtgaaaatacagaaggggtgtttgagtattcagatttcataaaacacttccttggaatatagctgcattaacttggaaagaagcctgttgggccagaagacagaaactccaactggcaaaaaagcaagcatctaagaaaaaaaaccaccaaagttcttgaatttactatatttaaatgcattggttaagtttattttgctaaataaagtgaactgctttttgtctctaaaatgatattctaaataaaaccttaactttttgttgaaaatgcactgaaaaaaaaaactcttcacaaccaatcacacaacaacacctaccacaccacatcaacaacacacaactcccaacacaaaaacaacaaatcacaa

SEQ ID NO: 665513 - DNA, 1137 bp, Homo sapiens
  misc_feature (66)..(67): n is a, c, g, or t
  misc_feature (71)..(72): n is a, c, g, or t
  misc_feature (77)..(77): n is a, c, g, or t
  misc_feature (79)..(79): n is a, c, g, or t
atatatgtgatttcaccattaaaataaaacaaagaaaaactgtgttgttgacgactctcttaatcnnccanngctanancgcgcagggaccatgtcggcggagaccgcgagcggccccacagaggaccaggtggaaatcctggagtacaacttcaacaaggtcgacaagcacccggattccaccacgctgtgcctcatcgcggccgaggcaggcctttccgaggaggagacccagaaatggtttaagcagcgcctggcaaagtggcggcgctcagaaggcctgccctcagagtgcagatccgtcacagactaaggagatggcaggcattgacagcttcactccatgaaggccatctctgtttctctcctccgcttaaccaagctgttgtggtttttcagcatagtgttgtatgttccattgctagctgtcctgctgtttaacacagtgttgtattttttttctaaatgtacataattagaaaagaaaataacaataggaagctatgtgtatcttctgtgtaaagcagtggcttcactggaaaaatggtgtggctagcatttccctttgagtcatgatgacagatggtgtgaaaaccatctaagtttgcttttgaccatcacctcccagtagcaatttgctttcataatccatttagcaatccaggcctctgttgaaaagataatatgagggagaagggaacacatttccttctgaacttacttccctaagtcactttccttatgtatcatctaatacaatgatggttgagtgaaaatacagaaggggtgtttgagtattcagatttcataaaacacttccttggaatatagctgcattaacttggaaagaagcctgttgggccagaagacagaaactccaactggcaaaaaagcaagcatctaagaaaaaaaaccaccaaagttcttgaatttactatatttaaatgcattggttaagtttattttgctaaataaagtgaactgctttttgtctctaaaatgatattctaaataaaaccttaactttttgttgaaaatgcactgaaaaaaaaaactcttcacaaccaatcacacaacaacacctaccacaccacatcaacaacacacaactcccaacacaaaaacaacaaatcacaa

SEQ ID NO: 665514 - DNA, 416 bp, Homo sapiens
  misc_feature (6)..(6): n is a, c, g, or t
  misc_feature (331)..(331): n is a, c, g, or t
  misc_feature (337)..(337): n is a, c, g, or t
  misc_feature (414)..(414): n is a, c, g, or t
tcgatncatggctcactgtagcctccaactcctaggctcaagtaatcctctttccttggcttcccaaagtgctgggattacaggtgtgagtcactgtgcctggcccacattttcattcttggctcactgtagccttaatctttcaggctcaaatgattctcccatctcagcctcccaagtagctgggaccacaggcatgcatcaccacgactggctaatttttgtattttttttgtagaaccgggtttcaccatgtgcccaggctggtcttgaacttctgggctcaagttatctacctgcctcagcctacccaaagtgctgggattacagngagttnaggccaccatggcccagtcatggaactttcaagtcaaattattttaaaatgggagattacattcacaatgcttattntg

SEQ ID NO: 665515 - DNA, 841 bp, Homo sapiens
  misc_feature (396)..(396): n is a, c, g, or t
gactacgtgtctagatcgcgagcggacgacctggtggagaaggtgcggcgcgaggccggcgcagggagcgcgcgaagaagaggagcgcgagcgcgagcgggaacgcgagacagagcgcgaccgcgagaaggagcgcgagcttgaaggcacgcgtgaagttaggcctcacggacggcgccgtactccggcgtggaagtgccgcagtctcggggcccagttgtcgccatcgcgcctccagtgtgaacacgggcagctgcgtggggctacaggtgtccccctacctgggtcctgacactccagcctgtggcgcactctcagtgaatatgcccggtcatcactgtccatgtcgtcctgtgcaagtcgctaaccgaagtcccattgcgtactgtgcacccntgtgcgggcaagtgagacccgggggctcctggggttacaaatgtcccggtgtccatgtactagcgagtagatccagcatgcgccgggcagagggaacgggaagcccgtgaacgagatctccgtgatcgtctcaagcctggctttgaggtgaagcctagtgagctggaacccctacatggggtccctgggccgggcttgtgatccctttccccgacatgggggcctggctctgcagccttggaccacctggcctgcaccctttcccctttcatccgagcctggggccctggagcgagaacagtctagcgctggcagctgggccagccctgcggcctgaccatgtcctatgctgagcggctggcagctgagaggcagcacgcagacaagggtggcggccctgggcaatgaaccacttggccgtgtgcagatgctcaatgtgactccc

SEQ ID NO: 665516 - DNA, 1615 bp, Homo sapiens
agcggagtttttgagggagacctaaaactgtatcatcctagcccgtatctctcccttttaactgttctttatgtgtacattctgtgcccaaaagaaaacaacctttcattaattgggcaattgtccaggctcttagcttggcatccagctctcagagctgtgaaatcaaccgcaccagatctacgctttgaaatgaggcaacatctaactggaaactcgctcaaagtaaggaagtggatgaaaagactcagggtcccttttctcttccccgtcttctctcagccacatctctcttatcctatcttggtgaagaagcttgcttggctaggagagaggtcagggacgagaagatagtgacgagaaagttccatgagactctcagaagtcccagcctgaacatcaaacctgaataaccaggagagacgtaacctcggcatactttcagtggtttacctcctgcccacgctgcaggtttttcaggtccttgctcgagtgtgtgctcataggcgtaaataaacgtgctatcagcagcctgcgtcagccagcccagctatttaagcaggctggcatcagcaaacacagcttccaaacccagggcttgcgcttgcctttgcctcttccaccgcgcagggaccatgtcggcggagaccgcgagcggccccacagaggaccaggtggaaatcctggagtacaacttcaacaaggtcgacaagcacccggattccaccacgctgtgcctcatcgcggccgaggcaggcctttccgaggaggagacccagaaatggtttaagcagcgcctggcaaagtggcggcgctcagaaggcctgccctcagagtgcagatccgtcacagactaaggagatggcaggcattgacagcttcactccatgaaggccatctctgtttctctcctccgcttaaccaagctgttgtggtttttcagcatagtgttgtatgttccattgctagctgtcctgctgtttaacacagtgttgtattttttttctaaatgtacataattagaaaagaaaataacaataggaagctatgtgtatcttctgtgtaaagcagtggcttcactggaaaaatggtgtggctagcatttccctttgagtcatgatgacagatggtgtgaaaaccatctaagtttgcttttgaccatcacctcccagtagcaatttgctttcataatccatttagcaatccaggcctctgttgaaaagataatatgagggagaagggaacacatttccttctgaacttacttccctaagtcactttccttatgtatcatctaatacaatgatggttgagtgaaaatacagaaggggtgtttgagtattcagatttcataaaacacttccttggaatatagctgcattaacttggaaagaagcctgttgggccagaagacagaaactccaactggcaaaaaagcaagcatctaagaaaaaaaaccaccaaagttcttgaatttactatatttaaatgcattggttaagtttattttgctaaataaagtgaactgctttttgtctctaaaatgatattctaaataaacgtgaaaaacacggccctcttttcgggttgtggcgaggcgacatcaaccacgaaa

SEQ ID NO: 665517 - DNA, 103 bp, Homo sapiens
cgacagtatacgaatcgagccggtaccagatgatgcagaaacccagagtaaaggggaacagagacccggagagacaactcagaaggaagcatgacagacggag

SEQ ID NO: 665518 - DNA, 773 bp, Homo sapiens
  misc_feature (47)..(48): n is a, c, g, or t
  misc_feature (52)..(52): n is a, c, g, or t
  misc_feature (66)..(66): n is a, c, g, or t
  misc_feature (69)..(69): n is a, c, g, or t
  misc_feature (73)..(73): n is a, c, g, or t
  misc_feature (84)..(84): n is a, c, g, or t
  misc_feature (106)..(106): n is a, c, g, or t
  misc_feature (108)..(108): n is a, c, g, or t
  misc_feature (117)..(118): n is a, c, g, or t
  misc_feature (148)..(148): n is a, c, g, or t
  misc_feature (154)..(156): n is a, c, g, or t
  misc_feature (181)..(181): n is a, c, g, or t
  misc_feature (184)..(184): n is a, c, g, or t
  misc_feature (189)..(189): n is a, c, g, or t
  misc_feature (198)..(198): n is a, c, g, or t
  misc_feature (215)..(215): n is a, c, g, or t
  misc_feature (250)..(250): n is a, c, g, or t
  misc_feature (255)..(255): n is a, c, g, or t
  misc_feature (259)..(259): n is a, c, g, or t
  misc_feature (266)..(267): n is a, c, g, or t
  misc_feature (286)..(286): n is a, c, g, or t
  misc_feature (290)..(290): n is a, c, g, or t
  misc_feature (299)..(299): n is a, c, g, or t
  misc_feature (326)..(326): n is a, c, g, or t
  misc_feature (388)..(388): n is a, c, g, or t
  misc_feature (607)..(607): n is a, c, g, or t
  misc_feature (613)..(613): n is a, c, g, or t
  misc_feature (617)..(617): n is a, c, g, or t
  misc_feature (624)..(624): n is a, c, g, or t
  misc_feature (626)..(627): n is a, c, g, or t
  misc_feature (629)..(629): n is a, c, g, or t
tggaccgctgggccgggcgtcatgggcggcctcttctggcgctccgnnctgngggggctgcgctgnggnccgngggccccgggnccgagcctgctagtgcgccacngnctcgggagnngccctcctggacccggtgagcggaccctgngtggcnnntgaagcccgatggcgtgcaacggtnggntcgtnggggacgtnatccagcgctttgagangcggtgcttcacgctggtggggatgaagatgctgnaggcnccanagagcgnncttgccgagcactaccagngacntgcggaggnaagcccttctaccctgccctcatccgntacatgagctcatggacctgtggtggccatggtctgggaagggtacaatgtcgtccgcgccntcgagggccatgatgtggacacaccgactcggctgaggctgccccaggaaccataaggggtgacttcagcgtccacatcagcaggaatgtcatccacgccagcgactccgtggagggggcccagcgggagatccagctgtggttccagagcagtgagctggtgagctgggcagacgggggccagcacagcagcatccacccagcctgagctcaagctgnccttancacncaccccncnngnaccaagtacctccgtcaggaagaacccaaggccacatccaaagcatgctgttcccaaacacttacttccctgttcaccgtctgtgccaacccagcccagaggagtctgagccaccaaccttcagtgccgtattactgtacccca

SEQ ID NO: 665519 - DNA, 380 bp, Homo sapiens
  misc_feature (31)..(31): n is a, c, g, or t
  misc_feature (38)..(38): n is a, c, g, or t
  misc_feature (42)..(42): n is a, c, g, or t
  misc_feature (98)..(98): n is a, c, g, or t
  misc_feature (101)..(101): n is a, c, g, or t
  misc_feature (231)..(231): n is a, c, g, or t
  misc_feature (257)..(257): n is a, c, g, or t
  misc_feature (309)..(309): n is a, c, g, or t
  misc_feature (334)..(334): n is a, c, g, or t
  misc_feature (343)..(343): n is a, c, g, or t
gtcgtctagagatccccggtggagacggggnttcacantggncaggcgggtctcgaactcctgacctcaggtgagcgtccggcctggcctcccaaagngcngggatggcaggcgtgagccactacacccagccaatcagtggcttttaaactacttaaataaaaagagccaacccaaaatctggtgcatgctggggaaacgggcagtggaatatgagaagtttttattggnggtgcacacaggtgactcgggctgtngtgtatgggttctggcctcgatctgtagcaagcaatcggtggtttctggccngcctttggggaagaaatgaaaaaanaagcagcangagtctccatacatcatgatggtgatggcacggggcc

SEQ ID NO: 665520 - DNA, 898 bp, Homo sapiens
  misc_feature (47)..(48): n is a, c, g, or t
  misc_feature (52)..(52): n is a, c, g, or t
  misc_feature (66)..(66): n is a, c, g, or t
  misc_feature (69)..(69): n is a, c, g, or t
  misc_feature (73)..(73): n is a, c, g, or t
  misc_feature (84)..(84): n is a, c, g, or t
  misc_feature (106)..(106): n is a, c, g, or t
  misc_feature (108)..(108): n is a, c, g, or t
  misc_feature (117)..(118): n is a, c, g, or t
  misc_feature (148)..(148): n is a, c, g, or t
  misc_feature (154)..(156): n is a, c, g, or t
  misc_feature (181)..(181): n is a, c, g, or t
  misc_feature (184)..(184): n is a, c, g, or t
  misc_feature (189)..(189): n is a, c, g, or t
  misc_feature (198)..(198): n is a, c, g, or t
  misc_feature (215)..(215): n is a, c, g, or t
  misc_feature (250)..(250): n is a, c, g, or t
  misc_feature (255)..(255): n is a, c, g, or t
  misc_feature (259)..(259): n is a, c, g, or t
  misc_feature (266)..(267): n is a, c, g, or t
  misc_feature (286)..(286): n is a, c, g, or t
  misc_feature (290)..(290): n is a, c, g, or t
  misc_feature (299)..(299): n is a, c, g, or t
  misc_feature (326)..(326): n is a, c, g, or t
  misc_feature (388)..(388): n is a, c, g, or t
  misc_feature (732)..(732): n is a, c, g, or t
  misc_feature (738)..(738): n is a, c, g, or t
  misc_feature (742)..(742): n is a, c, g, or t
  misc_feature (749)..(749): n is a, c, g, or t
  misc_feature (751)..(752): n is a, c, g, or t
  misc_feature (754)..(754): n is a, c, g, or t
tggaccgctgggccgggcgtcatgggcggcctcttctggcgctccgnnctgngggggctgcgctgnggnccgngggccccgggnccgagcctgctagtgcgccacngnctcgggagnngccctcctggacccggtgagcggaccctgngtggcnnntgaagcccgatggcgtgcaacggtnggntcgtnggggacgtnatccagcgctttgagangcggtgcttcacgctggtggggatgaagatgctgnaggcnccanagagcgnncttgccgagcactaccagngacntgcggaggnaagcccttctaccctgccctcatccgntacatgagctcatggacctgtggtggccatggtctgggaagggtacaatgtcgtccgcgccntcgagggccatgatgtggacacaccgactcggctgaggctgccccaggaaccataaggggtgacttcagcgtccacatcagctagtcacaggcattgctccccatagactagagggcaacagggagcagcagagtggtccactgggactccatcagggtgcacactgaagccttgagcctcacgattgctccatgtcactggcacacaggaatgtcatccacgccagcgactccgtggagggggcccagcgggagatccagctgtggttccagagcagtgagctggtgagctgggcagacgggggccagcacagcagcatccacccagcctgagctcaagctgnccttancacncaccccncnngnaccaagtacctccgtcaggaagaacccaaggccacatccaaagcatgctgttcccaaacacttacttccctgttcaccgtctgtgccaacccagcccagaggagtctgagccaccaaccttcagtgccgtattactgtacccca

SEQ ID NO: 665521 - DNA, 102 bp, Homo sapiens
gtactattagttcttctcaaatatcatggccaacatctggcttctaaaggaaaggctttgggtcttttcaatcacttgctgatacgggtgagactagcattg

SEQ ID NO: 665522 - DNA, 193 bp, Homo sapiens
gccgtggttcacgcacgttgtaacaaacatgtagtggctgggcgcggtggctcacgcctgtaatcccaacactttgggaggccgaggcgggtggatcacgaggtcaagagatcgagaccatcctggctaacaaggtgaaaccccatctctactaaaaatacaaaaattagccaggcacggtgcgttggcccaa

SEQ ID NO: 665523 - DNA, 298 bp, Homo sapiens
ttagatagggacaacagagggatatgctgtcgagatgtaatacttggcctagcttgacataagcgggggttgcagtgctggtggtctattccttggacactacgcacttaaataatacatgttagtgctatggaaactactaacactaggaatactactagaagctacgcagtgccagtattacatggaataatacatgctatggagacttctcaaaactcaggagctattgaaactgcgtaacacctaggtgcctcattgcaccttctaaaactatggggtcaccggagctcgaatt

SEQ ID NO: 665524 - DNA, 141 bp, Homo sapiens
caaccgaccggcctgtcttaatcattttaagtgtacagtcagaggcataagtacattacagtcttgtgaggcgcacaacatccatctccagaactcttttctctcacaaaactgaaacactgtccccattaaacactaatt

SEQ ID NO: 665525 - DNA, 1464 bp, Homo sapiens
ggttgtaccccctttcactttgtcaagttcgtatttattcccctttatgtttgcagagggggtagaggcagagtcacgggctggtcagagggtctgctcccatggaacagagagagaaggacggtgatagcagcatggctgctgtgtggcacagtgctgggcatactgtggagtgaggccgatacctcgggagtgacgtgggtgccaagtggcgtgccctgtacaccgccatcattatgcatgtgcgtactgtcccccacagtcatagagaatagggcccgcgaacatcacagaacgaccgccgcaagatgcagcagggtcaagccacgggagtggcgcgcggacatggtacgcgtaccccacgcagttaataggccccacaatgagcagcggagagtaagagcaagcaaggggtaaaatgtaactcaggcataagtaatggtaagtggcctgggcatttaacagtacagagtgacgaacacatacacatggtccgcattaagttcggaagagaaaaaacaagggagagcgaagagcaaaataaaacgacagtgagaaatacagagagcccaggacaacgccgaaccaaacaaagaagaggaaacacagggagacgaaggaaaaggacttcagaccaaatagaccagataatcccaggaagggcaacacaatagaggataaatccacacaggggtggagtagtacacagggtgaagtcaaagcaacaccggaaagacgacaaaaagcagagagaagaagaaaagacgaaaaaaccaccgacacgtaagatgaaagaagagagaatatcaaaaggaaacaatagggcacagataagagacgaaaggggagaccggcaacaaggcccaagacaaagagagtcagaaaaaacaaaaacagggaaaaatcgaaaaagccacagaacaaagacaagaaatacataaccagaagagaagagaacaagacaataaccatagacttatccttggagaagaggatggaccaaacacgagggtagcaccaagaagtacataggcacggacaaggtgaggataccacagaagggagcacagaatacagcaagaacagcaagaaatgaaaaatcaatagcaacaagaggaaaacaaaagacaaagactacgacagggcgacgaggagcgatagagagcaacggaagagggccgtacctgcgcagagtacaccaatgtcagactgcgagaaaacacggcagagagcagcagaacacagcgggacggacccaagcgtgacgcacaaagggagaggaaagcaccacagaagcagatggtaccacaagcaaaagactcacaacagcacaaagagaaggaggacgagggacaaggagagaggagaagaaagcaactagaagaaagaagacaagagcagagaaggacgacacaagcagaacagatagaggaacaaggaaatcacagcacgagacacaacggc

SEQ ID NO: 665526 - DNA, 184 bp, Homo sapiens
aaaaaaaaaaaaacccccaaaacataattacccgtgcctggtggcccatgcctgtagtcccagttactccaaagggtgaggcaaaaggattgcttgagcctgggagattgaagctacacccttccggggggtacaataagctgtttgggcccctgcactccagcctgggcaagaccctgtttca

SEQ ID NO: 665527 - DNA, 345 bp, Homo sapiens
tcatctgcggggacttggcgatctcacgaggcgtcgacgtccgctctgcgccctgggatgccttgctggacgaaaggctcatgctgggtaggctgaacgccacttactcgtctactaggtggatggacgcaggccgctctatagtcgcgtagataggatagcatgccagagtactagctcgatgcctcaggtctccatacaaatacatcccacaaccaagaccattcatgcctctgcacacacgaagcctatcctattttttttttcctttgcgaaagcagaagccaggtctctcttctcaaatggttcagcattcccaatcaaaaagtgatgcgtgttaaccta

SEQ ID NO: 665528 - DNA, 362 bp, Homo sapiens
ccggaatccatgaccccgagaggtgccacgaccaatgagcttgaaagaaagtggtccataaattgagttcccgacacgcacttgggaaagacactatggaaaggcttgcccactctatttatcctctccactgaatgttttcgttatgaaaagttaaaatgctgaagaagccccagtttgaaattgggaaagctcactggagcttcactggtgaaggcacgtagtttctggagaaagccacctggggaacgagaaccaggtgctaaaagttgaacgagctgatggatatgaaccccccgtcccagaatctgttttaagttcagacttccaatagtggccaatctaaaagtgctatttgtgga

SEQ ID NO: 665529 - DNA, 914 bp, Homo sapiens
ggttgttgacaccaacatggagacttggtaccgtgtcccgtacttagtgctcgaatgtcccaatctgaagctgaagaagccgccctgtttgcgcatgcctgtcggccatgaatgtgtagtgctctggtggtggtgtcttatttccctcatcaccgggagagatataagttgtatgatgttagtgtgtttgataccctccaagtgtcggttctatgactgattgaatatggccctcacggaggccagtagctttctttggcctacagagtaaatggacaatatattatggaaggacttgcatccagcttcctatttacaatgggaggttaggtttcataatcctggaccgatcgaatgcaccaaatatcccaaaatcaatagattccttcttctgttcatgtggattcgtctgtgtcctattgagttttttcatggtagagtattcatgagaatgaaatgcggggtatctgatgggttagagtgctttgagaagaaatcagggatactggatttgctcctgtcaatgagtttaaagggttgtaccaatcctctaatatgaaatgttgcgcaacagattggagacgcggggtaagggaattttttcgtcgaacaaacacggaggggtttggaagctgggcaagaatttcctggggttaagagggcaggtttttaccgaagatttttccgcggggaatgggtaatcacgcaggtgggggggaggcttaggtgagacaagaatttcacttagataagtatcatacggtgtgttgagccccatttgggcagagtcgtggtgctaaataaaaacccgagggacgagaaggatcagtgtgcttcagggagaaatattattttagtagggagtgaaaaaagcgacagcaggtgtggtatgtatcatttctagtatatatagg

SEQ ID NO: 665530 - DNA, 123 bp, Homo sapiens
atggggagtcgaaatgacgtgcagtgctttccccaaagagtccagaggcacttgtgccaaaaatagacgcagtgagtgagtgtgtgtgtgtgtgtgtgtgtgtgtgtcgcagcaggaggagga

SEQ ID NO: 665531 - DNA, 478 bp, Homo sapiens
  misc_feature (27)..(27): n is a, c, g, or t
  misc_feature (69)..(69): n is a, c, g, or t
  misc_feature (91)..(91): n is a, c, g, or t
  misc_feature (132)..(132): n is a, c, g, or t
  misc_feature (260)..(260): n is a, c, g, or t
  misc_feature (443)..(443): n is a, c, g, or t
agctcgcaccccggccccatgcacagntgctgctgatatatagaactttttagggtttcacagaccacnaatacaggcgttagcttagagnctggtcacagaagagaatgcgatgaacaccgccctgccagngtgaggacggaggggctgatgtgtttgtgcccccccaccacccccccatatacaaaggccatctctagggcagaaatctctcaacagctcaagcccatcctcgctgccccctccacgaaacgacacanctcaagcttggcgctgggaagttttcccgatgctgggttgattcctgatcacccaactggacagggccctctccaggacctcccaggttctccctggtaccttccctccctcaggaggaggcagcactgtctctgaagccaccaacgagtaatgctagaagaatcagaagaaggaagtttctnatgaaaaggcaccttcaagtctaaaggcctctttg

SEQ ID NO: 665532 - DNA, 836 bp, Homo sapiens
aagtctcagaaccagaagcaatgtgaactcttaagaggttcttccttgtaaaatgagaccgatgatttgggcgagccgtctttgctgccatcttcctcatcataagtgtggaacataggcattgctttgaatctggatagaaaggacacatctgcacctgccccctttattttaaatctttggggaaagatgagtaactttccccactactctgccttcctgttcagtaactcttacttttgcctgaagtaacagcatcttctacttctccatctagagatttcgtgtgtgtgccatcaaggttagcaaacttcatacgtagcctaacacttaaaaaatgcactcattatcttaaaacctaataaattccacgagtttcaattgtggttctcctctggttgcccttcctaaaaaatgagctgaacgatgacagctattttctctttacatgcttgggttatgactatcttaaacgttcttattctaacactaaactgttgaagcctcaaggtattacagaagcgctcgcaccaggcccattggtctcctgggtcccggacaacctgtccatataccacatttgctgacctgtgctccctgcactccactcacacgttgaaagctcaaactacgtcttgaaaggggaatcagccttcagcgatccgcacggaaccccacgagaaggccccgaacttgcacagcgtcctgtacaatacacgactactgcagagtgtccataacctctctgccatgaatacttccttgcgcaacctgcatttggctacacaacgtgtcagacacacgatccgccaacacttgccctctgtcaaacctcc

SEQ ID NO: 665533 - DNA, 587 bp, Homo sapiens
  misc_feature (446)..(446): n is a, c, g, or t
gggccaaaagggcgcttgagacagagccagcaggcgagcgggccgcccaggtccctggccccctgctgccagtatgaaggtcccaccaagcctctgctccaaccaggggaaccgtcatggttgggaacagccaaggtgaggaattctgtgggtcacaccccctgaaaaccactggcctccgccgggcgcggtggctcacgcttgttgtcccaacactttgggaggcccaggcgggtggatcacgaggtcaggagttcaagaccagcctggccaagatggtgaaaccccgtctctactaagaaaaatacaaataattagcagtggcagcacctgtcatccaggctgcttgggaggctgaggctgggagaatcacgtgaacccagcgggggcagaggttgcggtgagccgggattgcgccagtgcagctccagcctgggcgagcaganttgagactccttctcaaaaaaaaaaaaaaaatgggcacacgggaacacctggagacaaacacgggacaaagggaaccaggagacacaggagacaaagagacaaggagaacaccagacaaaccggagacaaaagcccaacca

SEQ ID NO: 665534 - DNA, 325 bp, Homo sapiens
  misc_feature (9)..(9): n is a, c, g, or t
  misc_feature (134)..(134): n is a, c, g, or t
  misc_feature (145)..(145): n is a, c, g, or t
  misc_feature (157)..(157): n is a, c, g, or t
  misc_feature (187)..(187): n is a, c, g, or t
  misc_feature (282)..(282): n is a, c, g, or t
  misc_feature (285)..(285): n is a, c, g, or t
ttggtcatnctcatgaacagattagaagaatggagctattacacaaaggaactaggcttgattctaagatgttacataaaatatatgctgcgaaatgtgacagcatgagtcgtacatcagattagtagattttncgttttctttnagactgtctatntgtgccaattctgatcttttcatttgctgnatcctgctgtctcccatctatgagaactgaagaccgcagccgtgaagaatgatgatgtgccaagatttcattttttctatgttctcatgtatctnttncgccctctttggtacctaacattttacggtaagtaacgcc

SEQ ID NO: 665535 - DNA, 314 bp, Homo sapiens
atccggtgccgttgcaggatctcgaacaccgattgacgaggcccggcggcgaatcgacgcatagccacggtcgtaagttgggtccccgaggcaaccagtgctcgctcgagggtgtccatgctcgtgctaccaccggtgcccatgatgagtcgtgatgtgagctttagaccaccgatgtgcagcggttcgtcggaagacgtcgccgcctttctatcacagctcactattgtttcctccacgttcgtcacgtctgtttcttccgtcatcatccgccttgtaccgccgtcacgactcgatgactcctcgcaccgggg

SEQ ID NO: 665536 - DNA, 348 bp, Homo sapiens
  misc_feature (348)..(348): n is a, c, g, or t
cgcagatctatcgactgaggcaccatgtgcacgccgcgtggggtgcgcctgagcgcggaagcccgcacacaggtggaggtgcttaggcggaatcttttccaggaggctgtggaattcctctacagaatcttgccacagttgactttccttcgggccccactggacattcccattccagacaccttcacccaaggatgatgagaaggaaacacgataagccggagaagaaagaagtccctaagtgtggatttcttcctgtgaatgagaaagtcctgtgcctgtttggcctgtgtaagccacaagtctggactcttagagtgcgttctgtggagtacatggattccaccn

SEQ ID NO: 665537 - DNA, 692 bp, Homo sapiens
  misc_feature (215)..(215): n is a, c, g, or t
gggccccgagcacccgtggattcgagcaaccttcaattcaggctttttggcgagggtccgtaccgatgccgctaacgctggccttgtaattatccctgggatcgaactattatgcaagggtgaggctatcctcgatcaaggtgctaggggtgattccgcaccttaagcgaatggagcatcaccatgaggggtgtgacatattgtcaccggtaccnccagcagtagatgccagggtcctaagttgataatgatgtcgatgaggggcgggggacactgagcttgatctttgtgagcagtgatcattgttctacggcgaaatacagtgtttgcatttgatcatggaaaagtgatgcggtttcaaaaggccgtttgttgagaataccgatatgtttaaaaatacaattgaacagattttattcttcgcttcccgtcagtgacctttagaaaaacagttgtgctatcgttctaaaatgaagtcgttccatcataatctatgatcttgtacagcacctatagagttaacctgttcttatggagttggaatacccagtacaatgttgaaaaaggatggaggctttcttcatatccactgtttctaaagccctatgtgtccgctgttgtgtgaagattgacatttaccatgattttccttagtcctgcaggacatagagagttatcaaagcctgccccat

SEQ ID NO: 665538 - DNA, 402 bp, Homo sapiens
aaagtatcacatcacctctggctgacaaaaacacacctgacttcatctatggggtatataatacaatgatctgagatattagaagtgtaactaggtcacgcctgtaatcctagcacttatgtggaagctgaggagggcggatcatgaggtcaagagatcgagaacatcctggccaatatggtgaaaccccatcactactaagaatacaaaatattagctgggtgtgatggtgcgtgcctatagtcacagctacttgggaagctgaggcaggagaatcacttgaacccaggaattggaggtgacagtgagtaatcattgtgccactgcattgcagtctgagagtgagtgaagcagaaagaaggaaaatcatatgatcatctcaatagattgcagaaaaagcat

SEQ ID NO: 665539 - DNA, 639 bp, Homo sapiens
acaccctgcgacctgtccagactgcaagatgaatagcatatgtcgtagagtcccacataagagcttctttctatcagccgtctccgaagttgcacgtgtcagccatggttatacatcgcgtccactgctcatctgacagcatcatttacaggttcacactgttccacttgagtcttcatactatgctcgcaatatggtccgatcagtaaatagttctctcagcattcatcggctgttgtgttggcctttgtgtgactcacagtatagatgcctgcatctatcttggtcacgtcccgagcaacttcaaagagcagtatctcctccacagaaagctcctaaacttcccactgcggaagcccgcgcaggcatgttacagagagggatcggcctcgaagcattcttcttacggtcctccgagactcctttaaactcctgtatcaattagcagtagtctcagcagaagagaactcacaggctcaacagttagagttggtagagtcaccaggctttggtagcgtctcgtgggaatgagctagtagcatgaaatcttatgtgcatcccacagaattcgtggtggaagcagtatttcctcctcctctttctcgtcgctctgggcaggtactgcgagaacggtatcag

SEQ ID NO: 665540 - DNA, 255 bp, Homo sapiens
tgaacatacaagatttatctcactattgtggatactgcacttggcatgaccaatgactgacttgatcaataacctaggtactatcgccaagtctgtgaccacagcgttcaaggaagctttgcaggctggtgcagatatctctatgattgggcagtacggtagagaataaaatactagcatatttggttgctgagaaagtaactgtgattcacaaacgtcacgatgatgagcagtaagcatgggagtcccccagca

SEQ ID NO: 665541 - DNA, 178 bp, Homo sapiens
ttaccccacacgcaacttgggcctgttgggggaacgggggagggagagcatcaggataaataactaatgcgtgcagggtttaatacctaggtgatgggttgataggtgcagcaaaccaccatggcacacatttacctatgtaacaaacctgcatgttctgcgcatgccaagttgcgtg

SEQ ID NO: 665542 - DNA, 933 bp, Homo sapiens
  misc_feature (181)..(181): n is a, c, g, or t
  misc_feature (232)..(232): n is a, c, g, or t
  misc_feature (933)..(933): n is a, c, g, or t
agaccgagcgaaactcgctgctgagttacgaggacgctgggacctggagattggagagagctgagctggcactatgaagtattgactacagcttaataagtagagctggttgctctcgggatatagaatagagacatggtagctggtagggaaagtcagtctggcacaagatcgtcgaggngactctggtgatgctcaaggttctcattgacctttatgtaggtaggaactngcagacataccgatgagagtatattctaccaggctgctggatagagagaagggtagaagggcagaaatagggagatgttagtattcttagtaatgtaactgtaggtgtagtctgatacatcaggatttggtttagctgactcgaggatcctgcagattcgaagagacttcggaagttgagtgtccttgtcactactttctggactacaagaggcatttgcttcctgcgatgacgaagaataaccatggccatatgtcactggggcttcggcagctggacatgtctcggaccccttcggactggtgtactgtgccagcagtttgccgatgtcggattcagtaaaatctcgagagatggacgtggttcgcttacaagtcaccggagtcagaacaactgtctgggtcccactgcggtacacggcgtctcaaatccgtcccgttgggaccatctggaaccgcggactggtaccgggcgctggagacgctgagcgaatgcgtacctcccgatagcggacgcctagtcacccgacggacacgcacatgcgtaggatcggctttttgacgaacagccgcatcctgctaatgctgcttcttcttctccctctctcctctcctctcccccacttccatcactcacccaacccgctcacacaacggcacccacaagggcacaaaccgcaacgcaacacgcaagcgcaccan

SEQ ID NO: 665543 - DNA, 136 bp, Homo sapiens
gtcgacgacagtctacagatctgtccaatctccataaatatgagattgacaagacagagtgcttcttctggaggaaaaagaagtagaattaaaacaaaaaaaaaaaggaggaggggggaggggggagtaggaagaa

SEQ ID NO: 665544 - DNA, 790 bp, Homo sapiens
tgcgctagcaccgttaatgatccagcctctgaggcgcattccaaccttccagcctgcgaactgaggagaaaaaaaattgctagattatcatagccccattacatacctatgaggcagagcaaaaaaattaaattttaaccatgagggaaatcgtgcacatccaggcatggtcagatgtggcaaccagatcggattgccaagttctgggaggtgatcagatgatgaacatggcagtcgaccccaccggacacctaccacggggacagaagaactgcagactggaccgcatcatctgatgtactacaatgaagccacaggtggcaaatatgtatcctcgatgaccatcctggtggatctagaacctgggaccatggactctgttcgctcaggtcctttaggaccagatctttagacacagaacaacattagtatttaggtccagtcatggggcaggtaacaacatgggccaaaaggccactacacagagggcgccgagcatggatgattctgtcctggatgtaggtacggaaggaggcagaagagcaagtgacttgcctgcagggcttccaagctgacccacatcacatgggacggagggcacaagagactctggacatgggcactcatcactatatccagcaagatccgagaaaagaaataaccctgattacgctcatgacataccttcaatgtggatgccatacacacaaaagttgtatgacacgggtagaaccctaacaatgcaacctctccaccatcaaggaaaacttgatgaactaatgatgacaca

SEQ ID NO: 665545 - DNA, 291 bp, Homo sapiens
cgaggtaggagagggggcatacctggaccctgcaagcatgcccaccactgccacaaactgccgcaccagtgtcttgtatgcagcgccttcctcgatgaagccaacatgagcagtaagctgcagcaagcgcggagttgtggaatgatgacaatggagggtcacctgtgtgtgccgggatcggcagattggctccaaagagcgcatgagatatgtggggaacctagggtgaaggcaccttttggcaagtgtggtaggagtgctatggaccattgccatgagtggaagtctcag

SEQ ID NO: 665546 - DNA, 1468 bp, Homo sapiens
  misc_feature (1468)..(1468): n is a, c, g, or t
gccagccatatcttggctggtacctctctaatattcctatgagtcccaagattgggatcataacttacctatcggctttgccctgctctggatatctgtcactgctggcctgatccgcatcactgatctcgtgccatgccttgatccttacttacaatgctcgccgtatctcttccaatgatcatatcgagccatgatagtattaaatggtagggcggtctcgggtacgagtgtcttgagcctgctgtttcaggctcattgcttatatttcattaggccgtaaagtcagtgttcagagtagcgggaatagcgtattgataatctagcctagttgagtagtcgtctcgtgttgaatagtccactactggacgaatccaagggcatatcatacttgactgttgagcgtaatccactctcattggcctcccaaggatcgtttcttgaagcatcatttcttattgcaagagaggaagcaataagcatatcaccaggggtgtaccttacttcaggtggctgaggatccttgtccgtcgttgtgccattgaatacgttccgtctagccttgagtttgttgcgtgttgcaatattctaagacacgtcgttgtgtccctcctacccatacaaacacttggagagggtgaaacaccccaacaactattccgagttgccccccatttcaccggacccatattacccccagcatgacaaactgtatccgaacagccagacctcaccatgttcatcgcgggttggtaatcacatgtgcacttgtgcgtagtcacaagtaggatgcagcaaagcgctttatgaggtcaagacacataaacaaatcattcaagcggatgaagtagttataaacttgacaccaatcatatcaaacacctagacagagccaatacaatgcgtgcggaaaacaaaacgccctcggcaaagaccacatggcacatggggggaggtcaacgtcacattgccaaatgaacaaagaaggaacagacagtacatgaagacccaagacagtccatcactacccgtagaattcaaggagcagagaacaagcaaactcacgacagggaacaaaatgacaccgcacaccacaacggccacccaaaaaggccccagaaacaacacacggcccaaaaaaacaaaaccacacgcacaccagcaacccacagcacatacccaacaggaaaaacgctaaaaggcaagaaaacgcaaaagaaaaacactaacccacacctcttgtcttctttatttatttttctctttaccacagccataaacacacacatcgcacacaaataatacaacactaacaccgcaaccagacaacatccaacacacaacgatcgtcactcaaacaagatgacaacaactaacacactacgtaaaaacattatacaaataaaactataaaaacaaaaaaaacagaagcagcaatgcacacccttcccacacactataagagatn

SEQ ID NO: 665547 - DNA, 132 bp, Homo sapiens
ctgaaccatctacgagagcagaggctgcgaaggagtcacggggcgcgcatgccagtgaagactacaaggtgcggattgatgagtacgaggactccaagcccatccaggggccacagaagaagccctttgagg

SEQ ID NO: 665548 - DNA, 1067 bp, Homo sapiens
ggactgacatgtctctcgaagaccccttttttgtagtccgaggcgaggtgcagaaggcggtgaacacggcccgcgggctgtaccagcgctggtgcgagctcctgcaggaaagcgcggcggtcggacgcgaggagctggactggacgaccaatgcagctgcggaatggcctgcgcagcactcgagctgggacctcgaggacctggaagagaccactcggtactagtggaacgccaacccaggcaagttcaagctcccagccggggacctgcaggacagaaaggtgttcgtggagcggatgcgagaggcagtccagcgaaatgaagcgaccatactgcgtcagcccaaacagccgctaccatccttcgcgcagacggaactaacacgagagactagctcgcaaggcaagccagctgccccagaagctcacccaagcgacctgctggatgccagcgcagctctcgcgcccacatctcgcctacatcgcacggcagcagccaggccacacagcagctgcatcatggcatgacacaggcatccaacagctggaggactgggctgtctgggacgcatccaggttctgaagcacatgtccggccgcgttggagcacacagcctggacgaagccagggcatcatgctgcgatgccttcgcccaagcagatggaccacacccagtctcgcatggacggcggtctcagggaagttggccaaagtattccacaatgacgaactgaccgccgacagtggctgtgccatcgccgagccagctggggtgccaccctcgatctcactctaccatctctctctgaacccagccctccccgggcaggctggaccccataagccggggaagcaccaaagcactctgtgacctagcctgccccccaagagggaagaggggccccacgcacacacggccaacgatgaggtccccagggagagacacccgagccgtccccaaaccacgcgggcaccaggaacaccgcgcagaacacccagagggcgcagcgacagagcgtagacgaagcagagcacgagcatcgccctagccaaacaccggtcgacag

SEQ ID NO: 665549 - DNA, 335 bp, Homo sapiens
  misc_feature (42)..(42): n is a, c, g, or t
tgagcagcaggaagagaaattggaagatcaaaggaaagcatnaaaaatgatcacaggccaggcgtggtggctcacacctgtaatcccagcatttggggaggccaaggcaggtggatcacttgaggctaggagttcgagtccagcctggccaacatggtgagaccctgtctctaataaaaatacaaaaaattagccaggcgtggtgcatgcgcctgtagtcgcagctactcaggaggctgaggcaggagaatcgcttgaacccgggagatggaggctgcagtgagccaaaatcacgccactgcactccagcctgggtgacagagcaagactgtctt

SEQ ID NO: 665550 - DNA, 375 bp, Homo sapiens
ggccttagctgtttcctgaggtaaaaacaacgtctagcaaatccttgttgatcattaaaggggtttcgtgggaggaaaacccgtgcgtcatttcttaaaaaactgagagcttgattggtgaggtaaccagcccagcagtatggatgagttccaaatagagcctatccagatctgttgattctcagcactgtgaccaggttgcagtttatgagctatccagtaaatcaataatatcattttatacaaaatatcataatttattttcacatgatcttattacttcagatcacctttgaactatttatatccaaatagcctatttgattttgttattgaaatataattcatttactataaaatttatcattttaaagc

SEQ ID NO: 665551 - DNA, 660 bp, Homo sapiens
  misc_feature (276)..(276): n is a, c, g, or t
  misc_feature (449)..(449): n is a, c, g, or t
  misc_feature (487)..(487): n is a, c, g, or t
  misc_feature (584)..(584): n is a, c, g, or t
  misc_feature (602)..(602): n is a, c, g, or t
  misc_feature (641)..(641): n is a, c, g, or t
  misc_feature (656)..(656): n is a, c, g, or t
gtagagacggggttttgccatgttggccaggctggtctcgaactcctgacctcaatcaagtgattcacccgcctcagcctcccaaagtgctgggattacaggcgtgagccaccgcgtccagccatacatgtacattttcagggttcaagtgaacatacagtttcctttataagtatgtaaataaatttcatagcactacaaaaatacaagtcatctgagaagtttacagtggtcccagtactgtaggagagaattaaataaaataaaatagctgtngattatttaaagctaattagattaatcaagttacagtatcatccttcagattaaagtgctctgatataaccaatgccacagcaaacgaaatcctggaaagagattgcactgccaatgattttgtctcttaacctcaatgttaccaggactacattaaaaaaaatcctgatttnataactgctatcatcttcccccccaccacccttttagnctgtgatattcttcccctggaaagattcaagattagattaagattctatcatagcccggggaaaaaaattaggaaattcccggaaaccttctaattncagtctttaagttaggtnacaaccaaaatttacctgaaaaaactcagcctgggggcnttttagctagaaggnaacc

SEQ ID NO: 665552 - DNA, 261 bp, Homo sapiens
tcccagctacgcagcgactctcccagctactcacccacctctcccagctactcgcccacctctcccagctactcgcccacctcccccgagcgtactcacccactgtcccctagcctactcgcccgacgttcccctagctacgacgccaccgtctcccagtctactcggccgacgtctcccatgctactcgccaacttcacccacgctattcgcccacttctcccagtctactcacctacctgggcttagggtctacctgga

SEQ ID NO: 665553 - DNA, 144 bp, Homo sapiens
tctccaagatctcactgactacatcagtgcgcaaatgtctaatcgaacatgtttcagaagctgagaatacacatgaatttactattttggtgaccctaaaacagacccatttaaaatccaggagtaattctctcaaattcacca

SEQ ID NO: 665554 - DNA, 215 bp, Homo sapiens
  misc_feature (110)..(110): n is a, c, g, or t
aattcggcactagggcgaccgcagcttcagccagaagtccaacctcatcacccaccgcaagagccacatccgggtgatgaggttggacttctgctgaaggcatttgcgcnagtcggggcagacgtagggcttctcgccggtgtggatgcgccggtgccgcgccagtagggtttgtggcggaagtgcttgcgtcagtcgggacacacgaagggccg

SEQ ID NO: 665555 - DNA, 247 bp, Homo sapiens
ggttttttttagggattttagtcagggttttccccggggccgggccaaaaacgggggttggccgcttgcttccccgctcctcctggcccagccctttggtgtccccccctgcccccaaagaatgttaaccccgtggggtttgcccccgcccggccccaaagttgccagactcccgcccccctgtttcctcctgcctgggggggccctggggatggaagggggtgggattaaacctttccccctggga

SEQ ID NO: 665556 - DNA, 1109 bp, Homo sapiens
gagtgcccaagttgactcatccttactcactcattccctcaaaatatttattgagcaccaacaatgtcacaagcactgtgctaaacactgtggtgaagtagaacaattgctaatcatttcctgggttccacttactcttgatttaaaaaaaaaaaacaacaaaagagtttgtgtgtggccaggactaaacagctgcttcttaatttgtggaattttaaaactaatctatttgatttcaaacacaaaatcaagtacttgggaagtgaataaagtaagagatagcctgtctcactttccagaggtcagcagtcactaatactgtggtgagtgattttactcaaaggacatcacactattcaagcagctgggtttggacatgtaatgtcggggtcatcttttcatgtcaatacatagattaatctttatttcaaactgtctacctaaaatatcactacccacataacctatacatcggtgtggccagaactttatggaacactaaactgttaaagtgtcttatggctaacaaggtcacagtgaaccttgatatattcattaaatccttttcctcatgtatcttggcactcttgtgctagtatgtctaatagggtgaatacattcctaacatttcttgatccaagctaggtccaagttacattcattctcaatctggggtacactatccataagagttgtcaattaacaggttggacccacgtttacaataccacccatcagtgtatgtgacgccttaattgcaagtgtatgacagggactttgtctagcacaaaggttctatagaatacagggatatcaatgagaattgtcactgcgaaaattacactttatgtaacaagtacaaaacccggaaatctaacccaacaggaagacaatcccgatgaagagagcaagaggaacgagtgataagggcgacacgcggaaaaaatagagattcgtaaaaataacaagccatgcccacatcgatgtgggagaggacaaaactagaataggagcgaacgacaaagcagcgatgcgcggcagcatccgaaagatacggaactctcgaacatgccgcagcatgtggcaacctgccctccgcaactccccga

SEQ ID NO: 665557 - DNA, 3745 bp, Homo sapiens
cttgaaccaggcagaggttgcagtgagccaagattgcgccactgcaccccagcctgggcaatagagcgagactccacctcaaaaaaaaaaaaaaaatcagttctaactctattttcctcagtgtggcttctagaatattctccagctcacaaccagctaggctgcatttctgttgcacaactgcagtcaaaagcaggagccggcagacagagagtattttcagctttgccagttctggcatctgtcacaagtaacccactaccgcacgccaaccccatccacactgcaccgcccacctgacgtggctcacacgctgtccccaccaacaaacgcctggttcaaggcccctctcgaggcacccagcagcctatgcagcccaatgtggcgtcggggatgtgatgtcacagacagggatatgctgaggacgcgtcaggcaggcactggagcagctcacctgtggcccctgcgaagacgtcgccctgggccggactctctgatatgacagcagtggcctctaccgtggacgctcggtcaaaggtcagtgcccccgaggtcgtgatctgtcccgagggggtcacggtgaaggtggtagccgcggtggctggaagcaatgtgatgttcttgggggagtccttcttcacgggagttgtgggcagttcattctccttcttgcgccttttgtaaggcacaaaaagcctgactgggccacttaaggtcatgtcgtcgcagcaggcagcacaggtgcaagaggcagcgtgagggtttaagatcccatcctggatgaggcactgcaagggtcggcccgcgtagcgaatgcttcttttccagtccttactgctggctcttcctgccatggcctcaaactcggtgggactgtaccagttctccccctgcttgatgcaccgtccccggccgcctgagccgagcctgttcttgtacagagtgccgctgatgttccggcaccgtacgggcagctcactgtcgtacacagaagggtcccagttgtatttagttccacctttttcttggccgggagccagaggggttggaggagactgaggacctggggtgaggggagctgccgggcctttcagcccggtggtctccacgatgctcccatctgtgtggacgacaatcagtgtcgctttttcggtgttcaggctgtccccgatctgaagggccgtcctaccagacagaacatgtcctgagatggatgccgcgttcgccacagacgtggtgaagacattgtctgcagcagcccccacgttggccactgtcactgtggtcacctctgcgaaggctgcggcagcggcggcctcgtcggggccgggcagggcctcggcgcccatgtccatgtgcccgggctccgccgccatcaccgccactgccgtgacccgcggcgtctcccgctccgcctccgagtctgcgtcctcctccgagtcctcgtccctgctcagcaccggctcctccgcctcgcctcctgccgcggccgcggccgccgccgccacagcggccgcggccgccaccgccgccgcctcagccaggcccagctgctttgccgccgagtccgagtcctccatccggactccgccgagccttcccgaaggcgccgtccgggaccgcccgaagcgccggtcgcggagcccgaagcggggcccgaagaggacgcccgagctgggccgaggccgcccgaagccgccgcccgaatagggaccgaaaaggcagccagccgccgagcagagccgagccgagtccgcccgcggagcggagccgaggcgaacagaggctgcccgagtaggagccgaacctgcacgaagccgccgagccgagaccgagtcctgaaccgaggagggtcgaagttccccgaagtgggaagccgaatcagtccgaataggtccgagtcctcacgagggcttccgagagactcggcccctgctctcctcactgtcctgacaggctgaggcggctgtcgtccccggccgacagggctggacggctctaggcagattctcgccggcggccggcgcaattctgcctctcagagagagcttagtgccgcgggtttcgcccgttcccgccgccggcggaagccgagtcagcccgaggccgagccgagacgagccgaatgtccccgaggccgaatgctcccgaacgtcggttctccacctcttcccttccgaaagtgcccgagcggtgccggacggactaatcgggcctcggccgtggctcggacgtccgctcccgaaacgcggcgcggtcgggccccttcgtcaggagacgcgaaaatggccgaaggagcgcgagcgcgcgggccgagaggctgccgggatcgcgacggaccggcgggcggggcggggagaggatcctccacagtgctctcttcagttccccttcaaatgctgttttatctcagcggaacgtactacgccctgtatttcctcgccacgctcctgatgatcacgtataaaagtcaggtgttcagctatcctcaccgctacctggtcctcgatcttgctctgctgtttctgatggggattctagaagcagttcggttatacctgggcaccaggggcaacctgacagaggctgagaggccgctggccgccagcctggccctcacggctggcaccgccctcctctctgcccacttcctgctttggcaggccctagtgttgtgggcggactgggccctcagcgccacgctcctggcccttcacggcctggaggccgtcctgcaggtggttgccatcgcggccttcaccaggtagctacggacacccgggataccccacactggggccctcctcctgggcctgaccagtcccccagctgtcacctccccattcctggacaggaagggcacttttcctagtgactggccatagatggttttggatggttccatctgttctggcaggagtgggagcaggagccagggcagaacaaactgctggaggccctggtgttgggaacagctgcggggagggtagggaccagacagaactgccttcaagatgagtcccaggagcgcacactcagccctgtcagtggggtctggctttagcagccaggcctccacagacccccatgggcccccagggccgagagggaggacagagcccttcagaacagaggcctcatctcactgcatcccccatcaccccctagttccccaatggtcctaatttgtgttctgagatcccagtttactccgtggccaggccccacctgtgtttccaagtcgggctggagacgcaggatggggtaggccttgtgctctgagcaaccccagctctgcctcacaggcaggcaggcccggtgcaagagtggactctgggttcctaaagcaataaatgcaaacaagccaacagctctgctgcctagcaatttccatcttagccacacttctcccttcaggggcttcggaggagaggtcagggctaaggccggggatgagactgcaggagagagagcagcggagggccacattcggagcctccgtccactccagttttatcagcttttgccttttgcacggagtgctaaacaaattctagctctgtgtttttttcccattcccagatttactatcagttctccttaaaaagtatctaagctgttacagtagctttcccttcacttgattctattgtgtgttttctatgtttggaataattacacccaaatatctagatattttctcttcaccgcattttgtaaataaagagatgtgtatgcctccctg

SEQ ID NO: 665558 - DNA, 4000 bp, Homo sapiens
cgaagccgagcctccgtggacctagattggccccattacattccaccctgggcgaaccagatgcgagactccgttctcctaacccttcacctgtaaccagataattcgaccagtaattacctggagaagtttcgacacgttcactcttgcgttggcagaaggtggagcagtagttgaccttgtggcagccggtgcactcgctcatagcctcccggccgcagttaacgcaggactgctccttccgctctgcgtcagcgtggatcttggcctggtttgtggcagcttctcggtaggtgctggcatgcttggcttgctcaaacagcgtcttcagctgctgcgctgtgttgagcaaggagttgaccatctcttctaggtacagccagctccgcggctctgacagctccagcccattgaccaacgcgggaggtgccgctttggtgggagtcgggggtgggaccgccagcgcaggcagggatgtcaacactattttgggatgtgacgttggcaacgcagcttctggaaacggtgcgatctggcagctgtcctgatagccggggtagtgaggctcagggtggctggccctgcatgggggctgcacgctggcctcttggactgtggcccctgcgaagacgtcgccctgggccggactctctgatatgacagcagtggcctctaccgtggacgctcggtcaaaggtcagtgcccccgaggtcgtgatctgtcccgagggggtcacggtgacttggagaagacctcacaggagaaaaccaggatggccaggatggcaacttgccactaccaattgttcgctgtttaaactgtgaaccatggaaatgtgaggtggtagccgcggtggctggaagcaatgtgatgttcttgggggagtccttcttcacgggagttgtgggcagttcattctccttcttgcgccttttgtaaggcacaaaaagcctgactgggccacttaaggtcatgtcgtcgcagcaggcagcacaggtgcaagaggcagcgtgagggtttaagatcccatcctggatgaggcactgcaagggtcggcccgcgtagcgaatgcttcttttccagtccttactgctggctcttcctgccatggcctcaaactcggtgggactgtaccagttctccccctgcttgatgcaccgtccccggccgcctgagccgagcctgttcttgtacagagtgccgctgatgttccggcaccgtacgggcagctcactgtcgtacacagaagggtcccagttgtatttagttccacctttttcttggccgggagccagaggggttggaggagactgaggacctggggtgaggggagctgccgggcctttcagcccggtggtctccacgatgctcccatctgtgtggacgacaatcagtgtcgctttttcggtgttcaggctgtccccgatctgaagggccgtcctaccagacagaacatgtcctgagatggatgccgcgttcgccacagacgtggtgaagacattgtctgcagcagcccccacgttggccactgtcactgtggtcacctctgcgaaggctgcggcagcggcggcctcgtcggggccgggcagggcctcggcgcccatgtccatgtgcccgggctccgccgccatcaccgccactgccgtgacccgcggcgtctcccgctccgcctccgagtctgcgtcctcctccgagtcctcgtccctgctcagcaccggctcctccgcctcgcctcctgccgcggccgcggccgccgccgccacagcggccgcggccgccaccgccgccgcctcagccaggcccagctgctttgccgccgagtccgagtcctccatccggactccgccgagccttcccgaaggcgccgtccgggaccgcccgaagcgccggtcgcggagcccgaagcggggcccgaagaggacgcccgagctgggccgaggccgcccgaagccgccgcccgaatagggaccgaaaaggcagccagccgccgagcagagccgagccgagtccgcccgcggagcggagccgaggcgaacagaggctgcccgagtaggagccgaacctgcacgaagccgccgagccgagaccgagtcctgaaccgaggagggtcgaagttccccgaagtgggaagccgaatcagtccgaataggtccgagtcctcacgagggcttccgagagactcggcccctgctctcctcactgtcctgacaggctgaggcggctgtcgtccccggccgacagggctggacggctctaggcagattctcgccggcggccggcgcaattctgcctctcagagagagcttagtgccgcgggtttcgcccgttcccgccgccggcggaagccgagtcagcccgaggccgagccgagacgagccgaatgtccccgaggccgaatgctcccgaacgtcggttctccacctcttcccttccgaaagtgcccgagcggtgccggacggactaatcgggcctcggccgtggctcggacgtccgctcccgaaacgcggcgcggtcgggccccttcgtcaggagacgcgaaaatggccgaaggagcgcgagcgcgcgggccgagaggctgccgggatcgcgacggaccggcgggcggggcggggagaggatcctccacagtgctctcttcagttccccttcaaatgctgttttatctcagcggaacgtactacgccctgtatttcctcgccacgctcctgatgatcacgtataaaagtcaggtgttcagctatcctcaccgctacctggtcctcgatcttgctctgctgtttctgatggggattctagaagcagttcggttatacctgggcaccaggggcaacctgacagaggctgagaggccgctggccgccagcctggccctcacggctggcaccgccctcctctctgcccacttcctgctttggcaggccctagtgttgtgggcggactgggccctcagcgccacgctcctggcccttcacggcctggaggccgtcctgcaggtggttgccatcgcggccttcaccaggtagctacggacacccgggataccccacactggggccctcctcctgggcctgaccagtcccccagctgtcacctccccattcctggacaggaagggcacttttcctagtgactggccatagatggttttggatggttccatctgttctggcaggagtgggagcaggagccagggcagaacaaactgctggaggccctggtgttgggaacagctgcggggagggtagggaccagacagaactgccttcaagatgagtcccaggagcgcacactcagccctgtcagtggggtctggctttagcagccaggcctccacagacccccatgggcccccagggccgagagggaggacagagcccttcagaacagaggcctcatctcactgcatcccccatcaccccctagttccccaatggtcctaatttgtgttctgagatcccagtttactccgtggccaggccccacctgtgtttccaagtcgggctggagacgcaggatggggtaggccttgtgctctgagcaaccccagctctgcctcacaggcaggcaggcccggtgcaagagtggactctgggttcctaaagcaataaatgcaaacaagccaacagctctgctgcctagcaatttccatcttagccacacttctcccttcaggggcttcggaggagaggtcagggctaaggccggggatgagactgcaggagagagagcagcggagggccacattcggagcctccgtccactccagttttatcagcttttgccttttgcacggagtgctaaacaaattctagctctgtgtttttttcccattcccagatttactatcagttctccttaaaaagtatctaagctgttacagtagctttcccttcacttgattctattgtgtgttttctatgtttggaataattacacccaaatatctagatattttctcttcaccgcattttgtaaataaagagatgtgtatgcctccctg

SEQ ID NO: 665559 - DNA, 3643 bp, Homo sapiens
  misc_feature (379)..(379): n is a, c, g, or t
  misc_feature (396)..(396): n is a, c, g, or t
  misc_feature (399)..(399): n is a, c, g, or t
  misc_feature (415)..(415): n is a, c, g, or t
  misc_feature (426)..(426): n is a, c, g, or t
  misc_feature (441)..(442): n is a, c, g, or t
cgtgttctgcaggtggggctgcgttaggtgtggtgtgtttgtcgtgttgcttgtgtttcgatattgtgggtttggtgtgctgttgtgtgtgtggtgttgtgggaccgtagttcgcgtgtgtgccggcgcactggttgttattgtgtttcggggcaggtcctgtgggcggtccgacggtcttgtgccggtgtttgtcgtctggtcggtgtccgtcggtgttccgggcgtgtgatgtgggttacacggggccactgtcggcgtggaggtgtgtgatggtggtgtcagctagttgtgtaccttccgagacgcgtgttctcacgtccgcgccagagtcctcagggggccgttcgacctgcgtgggcgtcacaggagtgcgagnggccccagcttccaggncgnccgatggagcctcacncgtcaccttcnccatcacgctttcanncacgtggacttcgtctgcctggacggtgacagctgctgactggccgcatatgtgctggtgatccttccagtccttgcgttggcagaaggtggagcagtagttgaccttgtggcagccggtgcactcgctcatagcctcccggccgcagttaacgcaggactgctccttccgctctgcgtcagcgtggatcttggcctggtttgtggcagcttctcggtaggtgctggcatgcttggcttgctcaaacagcgtcttcagctgctgcgctgtgttgagcaaggagttgaccatctcttctaggtacagccagctccgcggctctgacagctccagcccattgaccaacgcgggaggtgccgctttggtgggagtcgggggtgggaccgccagcgcaggcagggatgtcaacactattttgggatgtgacgttggcaacgcagcttctggaaacggtgcgatctggcagctgtcctgatagccggggtagtgaggctcagggtggctggccctgcatgggggctgcacgctggcctcttggactgtggcccctgcgaagacgtcgccctgggccggactctctgatatgacagcagtggcctctaccgtggacgctcggtcaaaggtcagtgcccccgaggtcgtgatctgtcccgagggggtcacggtgaaggtggtagccgcggtggctggaagcaatgtgatgttcttgggggagtccttcttcacgggagttgtgggcagttcattctccttcttgcgccttttgtaaggcacaaaaagcctgactgggccacttaaggtcatgtcgtcgcagcaggcagcacaggtgcaagaggcagcgtgagggtttaagatcccatcctggatgaggcactgcaagggtcggcccgcgtagcgaatgcttcttttccagtccttactgctggctcttcctgccatggcctcaaactcggtgggactgtaccagttctccccctgcttgatgcaccgtccccggccgcctgagccgagcctgttcttgtacagagtgccgctgatgttccggcaccgtacgggcagctcactgtcgtacacagaagggtcccagttgtatttagttccacctttttcttggccgggagccagaggggttggaggagactgaggacctggggtgaggggagctgccgggcctttcagcccggtggtctccacgatgctcccatctgtgtggacgacaatcagtgtcgctttttcggtgttcaggctgtccccgatctgaagggccgtcctaccagacagaacatgtcctgagatggatgccgcgttcgccacagacgtggtgaagacattgtctgcagcagcccccacgttggccactgtcactgtggtcacctctgcgaaggctgcggcagcggcggcctcgtcggggccgggcagggcctcggcgcccatgtccatgtgcccgggctccgccgccatcaccgccactgccgtgacccgcggcgtctcccgctccgcctccgagtctgcgtcctcctccgagtcctcgtccctgctcagcaccggctcctccgcctcgcctcctgccgcggccgcggccgccgccgccacagcggccgcggccgccaccgccgccgcctcagccaggcccagctgctttgccgccgagtccgagtcctccatccggactccgccgagccttcccgaaggcgccgtccgggaccgcccgaagcgccggtcgcggagcccgaagcggggcccgaagaggacgcccgagctgggccgaggccgcccgaagccgccgcccgaatagggaccgaaaaggcagccagccgccgagcagagccgagccgagtccgcccgcggagcggagccgaggcgaacagaggctgcccgagtaggagccgaacctgcacgaagccgccgagccgagaccgagtcctgaaccgaggagggtcgaagttccccgaagtgggaagccgaatcagtccgaataggtccgagtcctcacgagggcttccgagagactcggcccctgctctcctcactgtcctgacaggctgaggcggctgtcgtccccggccgacagggctggacggctctaggcagattctcgccggcggccggcgcaattctgcctctcagagagagcttagtgccgcgggtttcgcccgttcccgccgccggcggaagccgagtcagcccgaggccgagccgagacgagccgaatgtccccgaggccgaatgctcccgaacgtcggttctccacctcttcccttccgaaagtgcccgagcggtgccggacggactaatcgggcctcggccgtggctcggacgtccgctcccgaaacgcggcgcggtcgggccccttcgtcaggagacgcgaaaatggccgaaggagcgcgagcgcgcgggccgagaggctgccgggatcgcgacggaccggcgggcggggcgggtaagatggcggccccgcggcgagggagaggatcctccacagtgctctcttcagttccccttcaaatgctgttttatctcagcggaacgtactacgccctgtatttcctcgccacgctcctgatgatcacgtataaaagtcaggtgttcagctatcctcaccgctacctggtcctcgatcttgctctgctgtttctgatggggattctagaagcagttcggttatacctgggcaccaggggcaacctgacagaggctgagaggccgctggccgccagcctggccctcacggctggcaccgccctcctctctgcccacttcctgctttggcaggccctagtgttgtgggcggactgggccctcagcgccacgctcctggcccttcacggcctggaggccgtcctgcaggtggttgccatcgcggccttcaccaggggcttcggaggagaggtcagggctaaggccggggatgagactgcaggagagagagcagcggagggccacattcggagcctccgtccactccagttttatcagcttttgccttttgcacggagtgctaaacaaattctagctctgtgtttttttcccattcccagatttactatcagttctccttaaaaagtatctaagctgttacagtagctttcccttcacttgattctattgtgtgttttctatgtttggaataattacacccaaatatctagatattttctcttcaccgcattttgtaaataaagagatgtgtatgcctccctg

SEQ ID NO: 665560 - DNA, 119 bp, Homo sapiens
tggtcccgtagtcagtgatgagatatatatatcaatagatagatagataaaattgctcttatatagcccatttattcatcattggccctgttggcccatcctcagtgtggctgtgagat

SEQ ID NO: 665561 - DNA, 4401 bp, Homo sapiens
  misc_feature (379)..(379): n is a, c, g, or t
  misc_feature (396)..(396): n is a, c, g, or t
  misc_feature (399)..(399): n is a, c, g, or t
  misc_feature (415)..(415): n is a, c, g, or t
  misc_feature (426)..(426): n is a, c, g, or t
  misc_feature (441)..(442): n is a, c, g, or t
cgtgttctgcaggtggggctgcgttaggtgtggtgtgtttgtcgtgttgcttgtgtttcgatattgtgggtttggtgtgctgttgtgtgtgtggtgttgtgggaccgtagttcgcgtgtgtgccggcgcactggttgttattgtgtttcggggcaggtcctgtgggcggtccgacggtcttgtgccggtgtttgtcgtctggtcggtgtccgtcggtgttccgggcgtgtgatgtgggttacacggggccactgtcggcgtggaggtgtgtgatggtggtgtcagctagttgtgtaccttccgagacgcgtgttctcacgtccgcgccagagtcctcagggggccgttcgacctgcgtgggcgtcacaggagtgcgagnggccccagcttccaggncgnccgatggagcctcacncgtcaccttcnccatcacgctttcanncacgtggacttcgtctgcctggacggtgacagctgctgactggccgcatatgtgctggtgatccttccagtccttgcgttggcagaaggtggagcagtagttgaccttgtggcagccggtgcactcgctcatagcctcccggccgcagttaacgcaggactgctccttccgctctgcgtcagcgtggatcttggcctggtttgtggcagcttctcggtaggtgctggcatgcttggcttgctcaaacagcgtcttcagctgctgcgctgtgttgagcaaggagttgaccatctcttctaggtacagccagctccgcggctctgacagctccagcccattgaccaacgcgggaggtgccgctttggtgggagtcgggggtgggaccgccagcgcaggcagggatgtcaacactattttgggatgtgacgttggcaacgcagcttctggaaacggtgcgatctggcagctgtcctgatagccggggtagtgaggctcagggtggctggccctgcatgggggctgcacgctggcctcttggactgtggcccctgcgaagacgtcgccctgggccggactctctgatatgacagcagtggcctctaccgtggacgctcggtcaaaggtcagtgcccccgaggtcgtgatctgtcccgagggggtcacggtgaaggtggtagccgcggtggctggaagcaatgtgatgttcttgggggagtccttcttcacgggagttgtgggcagttcattctccttcttgcgccttttgtaaggcacaaaaagcctgactgggccacttaaggtcatgtcgtcgcagcaggcagcacaggtgcaagaggcagcgtgagggtttaagatcccatcctggatgaggcactgcaagggtcggcccgcgtagcgaatgcttcttttccagtccttactgctggctcttcctgccatggcctcaaactcggtgggactgtaccagttctccccctgcttgatgcaccgtccccggccgcctgagccgagcctgttcttgtacagagtgccgctgatgttccggcaccgtacgggcagctcactgtcgtacacagaagggtcccagttgtatttagttccacctttttcttggccgggagccagaggggttggaggagactgaggacctggggtgaggggagctgccgggcctttcagcccggtggtctccacgatgctcccatctgtgtggacgacaatcagtgtcgctttttcggtgttcaggctgtccccgatctgaagggccgtcctaccagacagaacatgtcctgagatggatgccgcgttcgccacagacgtggtgaagacattgtctgcagcagcccccacgttggccactgtcactgtggtcacctctgcgaaggctgcggcagcggcggcctcgtcggggccgggcagggcctcggcgcccatgtccatgtgcccgggctccgccgccatcaccgccactgccgtgacccgcggcgtctcccgctccgcctccgagtctgcgtcctcctccgagtcctcgtccctgctcagcaccggctcctccgcctcgcctcctgccgcggccgcggccgccgccgccacagcggccgcggccgccaccgccgccgcctcagccaggcccagctgctttgccgccgagtccgagtcctccatccggactccgccgagccttcccgaaggcgccgtccgggaccgcccgaagcgccggtcgcggagcccgaagcggggcccgaagaggacgcccgagctgggccgaggccgcccgaagccgccgcccgaatagggaccgaaaaggcagccagccgccgagcagagccgagccgagtccgcccgcggagcggagccgaggcgaacagaggctgcccgagtaggagccgaacctgcacgaagccgccgagccgagaccgagtcctgaaccgaggagggtcgaagttccccgaagtgggaagccgaatcagtccgaataggtccgagtcctcacgagggcttccgagagactcggcccctgctctcctcactgtcctgacaggctgaggcggctgtcgtccccggccgacagggctggacggctctaggcagattctcgccggcggccggcgcaattctgcctctcagagagagcttagtgccgcgggtttcgcccgttcccgccgccggcggaagccgagtcagcccgaggccgagccgagacgagccgaatgtccccgaggccgaatgctcccgaacgtcggttctccacctcttcccttccgaaagtgcccgagcggtgccggacggactaatcgggcctcggccgtggctcggacgtccgctcccgaaacgcggcgcggtcgggccccttcgtcaggagacgcgaaaatggccgaaggagcgcgagcgcgcgggccgagaggctgccgggatcgcgacggaccggcgggcggggcgggtaagatggcggccccgcggcgagggagaggatcctccacagtgctctcttcagttccccttcaaatgctgttttatctcagcggaacgtactacgccctgtatttcctcgccacgctcctgatgatcacgtataaaagtcaggtgttcagctatcctcaccgctacctggtcctcgatcttgctctgctgtttctgatggggattctagaagcagttcggttatacctgggcaccaggggcaacctgacagaggctgagaggccgctggccgccagcctggccctcacggctggcaccgccctcctctctgcccacttcctgctttggcaggccctagtgttgtgggcggactgggccctcagcgccacgctcctggcccttcacggcctggaggccgtcctgcaggtggttgccatcgcggccttcaccaggggcttcggaggagaggtcagggctaaggccggggatgagactgcaggagagagagcagcggagggccacattcggagcctccgtccactccagttttatcagcttttgccttttgcacggagtgctaaacaaattctagctctgtgtttttttcccattcccagatttactatcagttctccttaaaaagtatctaagctgttacagtagctttcccttcacttgattctattgtgtgttttctatgtttggaataattacacccaaatatctagatattttctcttcaccgcattttgtaaataaagagatgtgtatgcctccctgaaaaaaaaagaaaaaaaaaagaaagacaaaaacacaacgaacgaaacacagaaagacaccacgaagacaagacaagcaaccagcggcaaacacacgtaggggggggggagcggcgccgccgcagagcgaggggcgcagacagcgaaagaggggggggggcgacgcgaccgcagagagagaaccaaccgagcggaaacaccgtgagctaccaacgagacaacgcgcgggacagaagaagcggcggcaggggtcaccgcccagagcaagaaacacccccggcgggaataaaaagacagcggtgaaaaaacaaaaacaccagagagcgggaagatcgacggaggagacaagacagaggcgcacgaataaagaaaacaaagcgaagccagcacagagaagagagagacaaagacaacacaacacacgacaccccccaccacgcagggggtagaacaaacgaccaaacgacaacaacacgacagcacacacaagccggcaaaaggagaaaaaggcgagggaaggaagaagccgaacagcacaaccaggggagagcgcacacgcacacgggaaaagcacagaagacaaacagacaggcggacggaggacggacgcagggcgcagcgcgaggggcaggcaggcagcgacagggcagggaaagcacgagacagagagacagagaggacggtgggggggggacggagaagtagaaggaaggaaacgagaaagcaccacaggggagaagagagagagggacaggcggc

SEQ ID NO: 665562 - DNA, 650 bp, Homo sapiens
ccgatggcgcaggcctgtattaggaaagattggacataatctagcagttacaggaatcgagatggagtgcttgggcaaggacatgaagagcaagatactgttggacatctgtagctggtcactgacgaagaagggattagcgaccattgccagcaagatagtagactctatagaactcgcacgagtagagataatgccagggcagactcagacacgagtcattagattgaatgagatcataatattatgttcttagaggcgtcaacgttgttcacgttctaataggagacaaaggctgaacaaagaagggcgtactattctagctacacatgaacatggtcatggtgtactatagcttcgcacgcatagacatcgtcggattactgatcggcgttcctgccatgaggactttagagtagcaggcagttactgttctgtagtgtaggcattagacatgaatcaaagtagagacattgcttctacaattagcctgaaagggtactatagtggcatgtacagagtcagatcgctaggatataggagtggagttaactaggcatgtatcttgaagactgcataactatgtacacacctaggtagagagggccggtgctgagttaggatactatacgacgctctttaacggccct

SEQ ID NO: 665563 - DNA, 3335 bp, Homo sapiens
  misc_feature (379)..(379): n is a, c, g, or t
  misc_feature (396)..(396): n is a, c, g, or t
  misc_feature (399)..(399): n is a, c, g, or t
  misc_feature (415)..(415): n is a, c, g, or t
  misc_feature (426)..(426): n is a, c, g, or t
  misc_feature (441)..(442): n is a, c, g, or t
  misc_feature (2942)..(2942): n is a, c, g, or t
  misc_feature (2960)..(2960): n is a, c, g, or t
  misc_feature (2988)..(2988): n is a, c, g, or t
  misc_feature (3077)..(3077): n is a, c, g, or t
  misc_feature (3112)..(3112): n is a, c, g, or t
  misc_feature (3119)..(3119): n is a, c, g, or t
  misc_feature (3123)..(3123): n is a, c, g, or t
cgtgttctgcaggtggggctgcgttaggtgtggtgtgtttgtcgtgttgcttgtgtttcgatattgtgggtttggtgtgctgttgtgtgtgtggtgttgtgggaccgtagttcgcgtgtgtgccggcgcactggttgttattgtgtttcggggcaggtcctgtgggcggtccgacggtcttgtgccggtgtttgtcgtctggtcggtgtccgtcggtgttccgggcgtgtgatgtgggttacacggggccactgtcggcgtggaggtgtgtgatggtggtgtcagctagttgtgtaccttccgagacgcgtgttctcacgtccgcgccagagtcctcagggggccgttcgacctgcgtgggcgtcacaggagtgcgagnggccccagcttccaggncgnccgatggagcctcacncgtcaccttcnccatcacgctttcanncacgtggacttcgtctgcctggacggtgacagctgctgactggccgcatatgtgctggtgatccttccagtccttgcgttggcagaaggtggagcagtagttgaccttgtggcagccggtgcactcgctcatagcctcccggccgcagttaacgcaggactgctccttccgctctgcgtcagcgtggatcttggcctggtttgtggcagcttctcggtaggtgctggcatgcttggcttgctcaaacagcgtcttcagctgctgcgctgtgttgagcaaggagttgaccatctcttctaggtacagccagctccgcggctctgacagctccagcccattgaccaacgcgggaggtgccgctttggtgggagtcgggggtgggaccgccagcgcaggcagggatgtcaacactattttgggatgtgacgttggcaacgcagcttctggaaacggtgcgatctggcagctgtcctgatagccggggtagtgaggctcagggtggctggccctgcatgggggctgcacgctggcctcttggactgtggcccctgcgaagacgtcgccctgggccggactctctgatatgacagcagtggcctctaccgtggacgctcggtcaaaggtcagtgcccccgaggtcgtgatctgtcccgagggggtcacggtgaaggtggtagccgcggtggctggaagcaatgtgatgttcttgggggagtccttcttcacgggagttgtgggcagttcattctccttcttgcgccttttgtaaggcacaaaaagcctgactgggccacttaaggtcatgtcgtcgcagcaggcagcacaggtgcaagaggcagcgtgagggtttaagatcccatcctggatgaggcactgcaagggtcggcccgcgtagcgaatgcttcttttccagtccttactgctggctcttcctgccatggcctcaaactcggtgggactgtaccagttctccccctgcttgatgcaccgtccccggccgcctgagccgagcctgttcttgtacagagtgccgctgatgttccggcaccgtacgggcagctcactgtcgtacacagaagggtcccagttgtatttagttccacctttttcttggccgggagccagaggggttggaggagactgaggacctggggtgaggggagctgccgggcctttcagcccggtggtctccacgatgctcccatctgtgtggacgacaatcagtgtcgctttttcggtgttcaggctgtccccgatctgaagggccgtcctaccagacagaacatgtcctgagatggatgccgcgttcgccacagacgtggtgaagacattgtctgcagcagcccccacgttggccactgtcactgtggtcacctctgcgaaggctgcggcagcggcggcctcgtcggggccgggcagggcctcggcgcccatgtccatgtgcccgggctccgccgccatcaccgccactgccgtgacccgcggcgtctcccgctccgcctccgagtctgcgtcctcctccgagtcctcgtccctgctcagcaccggctcctccgcctcgcctcctgccgcggccgcggccgccgccgccacagcggccgcggccgccaccgccgccgcctcagccaggcccagctgctttgccgccgagtccgagtcctccatccggactccgccgagccttcccgaaggcgccgtccgggaccgcccgaagcgccggtcgcggagcccgaagcggggcccgaagaggacgcccgagctgggccgaggccgcccgaagccgccgcccgaatagggaccgaaaaggcagccagccgccgagcagagccgagccgagtccgcccgcggagcggagccgaggcgaacagaggctgcccgagtaggagccgaacctgcacgaagccgccgagccgagaccgagtcctgaaccgaggagggtcgaagttccccgaagtgggaagccgaatcagtccgaataggtccgagtcctcacgagggcttccgagagactcggcccctgctctcctcactgtcctgacaggctgaggcggctgtcgtccccggccgacagggctggacggctctaggcagattctcgccggcggccggcgcaattctgcctctcagagagagcttagtgccgcgggtttcgcccgttcccgccgccggcggaagccgagtcagcccgaggccgagccgagacgagccgaatgtccccgaggccgaatgctcccgaacgtcggttctccacctcttcccttccgaaagtgcccgagcggtgccggacggactaatcgggcctcggccgtggctcggacgtccgctcccgaaacgcggcgcggtcgggccccttcgtcaggagacgcgaaaatggccgaaggagcgcgagcgcgcgggccgagaggctgccgggatcgcgacggaccggcgggcggggcgggtaagatggcggccccgcggcgaggtgagctcgggcggggtgggggcttccgggcttgcngcggcgggcgcggcgttnccctgtggtgacaatccggttccgcttncggtgcgctcacggggccgtgccaccgtctctacgtgagcgagacagctccgtcaccccatcgagaagcgcggcctggcctggcctggntggcgggcgtcctgcaccccgaagagctcccccgngcgcggncgcntggcccgggcagggtgggtgcggagcggtctgggggccccgtccccggcggtcttgtccgcgcgtgttttgtgaagacccgtggcggaatgggcgcggttcggtagctggactctggcaaagaaatcgggggccggtgctcagcgtctgctgaagattcgtcggaggggaggacaccacgtaatggcactaaggccttgtgtgggtcacaac

SEQ ID NO: 665564 - DNA, 3757 bp, Homo sapiens
  misc_feature (379)..(379): n is a, c, g, or t
  misc_feature (396)..(396): n is a, c, g, or t
  misc_feature (399)..(399): n is a, c, g, or t
  misc_feature (415)..(415): n is a, c, g, or t
  misc_feature (426)..(426): n is a, c, g, or t
  misc_feature (441)..(442): n is a, c, g, or t
cgtgttctgcaggtggggctgcgttaggtgtggtgtgtttgtcgtgttgcttgtgtttcgatattgtgggtttggtgtgctgttgtgtgtgtggtgttgtgggaccgtagttcgcgtgtgtgccggcgcactggttgttattgtgtttcggggcaggtcctgtgggcggtccgacggtcttgtgccggtgtttgtcgtctggtcggtgtccgtcggtgttccgggcgtgtgatgtgggttacacggggccactgtcggcgtggaggtgtgtgatggtggtgtcagctagttgtgtaccttccgagacgcgtgttctcacgtccgcgccagagtcctcagggggccgttcgacctgcgtgggcgtcacaggagtgcgagnggccccagcttccaggncgnccgatggagcctcacncgtcaccttcnccatcacgctttcanncacgtggacttcgtctgcctggacggtgacagctgctgactggccgcatatgtgctggtgatccttccagtccttgcgttggcagaaggtggagcagtagttgaccttgtggcagccggtgcactcgctcatagcctcccggccgcagttaacgcaggactgctccttccgctctgcgtcagcgtggatcttggcctggtttgtggcagcttctcggtaggtgctggcatgcttggcttgctcaaacagcgtcttcagctgctgcgctgtgttgagcaaggagttgaccatctcttctaggtacagccagctccgcggctctgacagctccagcccattgaccaacgcgggaggtgccgctttggtgggagtcgggggtgggaccgccagcgcaggcagggatgtcaacactattttgggatgtgacgttggcaacgcagcttctggaaacggtgcgatctggcagctgtcctgatagccggggtagtgaggctcagggtggctggccctgcatgggggctgcacgctggcctcttggactgtggcccctgcgaagacgtcgccctgggccggactctctgatatgacagcagtggcctctaccgtggacgctcggtcaaaggtcagtgcccccgaggtcgtgatctgtcccgagggggtcacggtgaaggtggtagccgcggtggctggaagcaatgtgatgttcttgggggagtccttcttcacgggagttgtgggcagttcattctccttcttgcgccttttgtaaggcacaaaaagcctgactgggccacttaaggtcatgtcgtcgcagcaggcagcacaggtgcaagaggcagcgtgagggtttaagatcccatcctggatgaggcactgcaagggtcggcccgcgtagcgaatgcttcttttccagtccttactgctggctcttcctgccatggcctcaaactcggtgggactgtaccagttctccccctgcttgatgcaccgtccccggccgcctgagccgagcctgttcttgtacagagtgccgctgatgttccggcaccgtacgggcagctcactgtcgtacacagaagggtcccagttgtatttagttccacctttttcttggccgggagccagaggggttggaggagactgaggacctggggtgaggggagctgccgggcctttcagcccggtggtctccacgatgctcccatctgtgtggacgacaatcagtgtcgctttttcggtgttcaggctgtccccgatctgaagggccgtcctaccagacagaacatgtcctgagatggatgccgcgttcgccacagacgtggtgaagacattgtctgcagcagcccccacgttggccactgtcactgtggtcacctctgcgaaggctgcggcagcggcggcctcgtcggggccgggcagggcctcggcgcccatgtccatgtgcccgggctccgccgccatcaccgccactgccgtgacccgcggcgtctcccgctccgcctccgagtctgcgtcctcctccgagtcctcgtccctgctcagcaccggctcctccgcctcgcctcctgccgcggccgcggccgccgccgccacagcggccgcggccgccaccgccgccgcctcagccaggcccagctgctttgccgccgagtccgagtcctccatccggactccgccgagccttcccgaaggcgccgtccgggaccgcccgaagcgccggtcgcggagcccgaagcggggcccgaagaggacgcccgagctgggccgaggccgcccgaagccgccgcccgaatagggaccgaaaaggcagccagccgccgagcagagccgagccgagtccgcccgcggagcggagccgaggcgaacagaggctgcccgagtaggagccgaacctgcacgaagccgccgagccgagaccgagtcctgaaccgaggagggtcgaagttccccgaagtgggaagccgaatcagtccgaataggtccgagtcctcacgagggcttccgagagactcggcccctgctctcctcactgtcctgacaggctgaggcggctgtcgtccccggccgacagggctggacggctctaggcagattctcgccggcggccggcgcaattctgcctctcagagagagcttagtgccgcgggtttcgcccgttcccgccgccggcggaagccgagtcagcccgaggccgagccgagacgagccgaatgtccccgaggccgaatgctcccgaacgtcggttctccacctcttcccttccgaaagtgcccgagcggtgccggacggactaatcgggcctcggccgtggctcggacgtccgctcccgaaacgcggcgcggtcgggccccttcgtcaggagacgcgaaaatggccgaaggagcgcgagcgcgcgggccgagaggctgccgggatcgcgacggaccggcgggcggggcgggtaagatggcggccccgcggcgagggagaggatcctccacagtggtatcctgctgcgtgcccctccaggacagcacccagaggcccgaattgctgctgggcgagagagcactcggcctcaccccacgttttccctaagttctgtctagtaattccactttggagaggggggtgttccttgacagatttagagagttgatgtaacttcctcggatcagttctgctggctccatcccctacctgctcagccctgcacaaagtggctaagcacgccacactgccggctcccaaggcgatggccacctgcctctgtctcggccgctagtggcaggaagatggaaatccctcactttgtccctagattcattttattttattttgttgtttatgtttttttaaggacagagccttcctctcacccaggctggagtgtggcagtcacagctcactgcagcctcagcctcctgaagctctggcatcaggcgggagccactgtgcctggccccatagactcatgttagcataaacaaataggaaatgtacacagctcaggaaatggtactagatacttaagtcccccaaacagaaatatatttctctgaagaactgaaaagtggccgggcgcagtggctcatgcctgtaatcccaacactctgggaggctgaggtggacagatcacttgacaccaggagtttcagaccagcctggccaacatggtgaaaccctgtccctactaaaaatacaaaaaattagctgggcatggttttgcacgcctgtaatcccagctactcaggaggctgaggcagaagaatcacttgaacccaggaggcggaggttgcagtgagccaagattgtgccactgcacagtgtccagtc

SEQ ID NO: 665565 - DNA, 1053 bp, Homo sapiens
gggagaagctgcttcagtgaacacttgtgaagagcagtgaggttgcgcccccagcgctgccgctaaaccccccaaggcaaagcctgtgccccacacagtcctgtgccaatggacgggagcccaccctccctgcagtgatgctgagtggtacttgggggtggacatttcaagggaggaggtgaacgagaaactccgtgtgacactccctgatgtgcacctatccatagtcctgagatgcttctagcacgatccagtgacgacgtacacgctgaccctcaggcacagtgcggggaacaataagcttgatcaaggtcttccaccgacgatgggcactatggcttctcagagccagctcaccttctgctccgttgtggaccctcatcaatcacataccgccacgaagtctctggcccagtacacatgccaagctggacaccacggctcctctacacctgttgtccaatgtaccagcaggaccagattgtcaagggaggacaggcgtggcaggcacgtgggacgaccagagttaagggtctaatcaccaggcaattgaccatggacaagacgcccgccgcagttatgacccaggctttactgacggagtaccacacgggagcctaccccagggcagcctgccgagtgacgggcgtaacgtgtcgaaacttgccggtcctctcacatgcggaccttcattccacggactactttccacaagtaaagcgcctgggccgcacgaacgttcgcacggaccacacgactgctccgcacacggggaacattacccgttgggaagacggcctatacaccggtgcgcattcaccggcgggtccaacaccggaacacgccagcggccgcacttggtgacagcgtccggggaaatctcgctttcgcattggtaacccttcgccggaaggcccggggagcttcctcacgatccccccgtgcacatttgcgacaggaaggaaggccccgcattggacacaccgcgaccgtcgctgcggtagaaaggctttgcggcagtgcgagtcgcacgcattaggcggcagcccccca

SEQ ID NO: 665566 - DNA, 135 bp, Homo sapiens
tggatcacttgaacccaggaatttcaggttgtagtgagctgtgatcacacagctgtgctccagcctggacaacagagtgagacctgtctctcaaaaaacatggaaaaatgtaactacctatatctatatatccac

SEQ ID NO: 665567 - DNA, 478 bp, Homo sapiens
ccagcataactattcttatatcagacaaaacaaactttaaagcaacagtggttaaaggagacaaagagggacagtatacaatggtaaaaggccttgtctaacaggaaaatatcacaattgtgaacatatatgcacctaacactgcagctcccaaatttataaaataattactaatagacctaagaaatgagataacaacacaataatagtgggggcttcaatattacactgacagtactagacaggtcatcaagataggaagtcaacaaagaaacagtggatttaaactataccttggaacaaatggacttaacagatatatacaaaacacttcatccaacaactgcagaatacacattccattcaccagcacatggaatgttctccaagatagaccatatgataggccacaaaatgagcctcaataaatttcagaaaattaaaattattttaagcactctctcagaccacagtggaa

SEQ ID NO: 665568 - DNA, 227 bp, Homo sapiens
gtctagagggatatgaagcaccgccaggtccttggagttttaagctgggggctcgtagtggtctgggcggagcagtttggtggattaaactggtggcaggtttcagggctcaagcatacggggggtatctaattcccatgttggggtcttagctcatggtggtggtccaaatagtgataaagcccactttcggtaagattaatttgggtggtccacactggggtcac

SEQ ID NO: 665569 - DNA, 3183 bp, Homo sapiens
  misc_feature (379)..(379): n is a, c, g, or t
  misc_feature (396)..(396): n is a, c, g, or t
  misc_feature (399)..(399): n is a, c, g, or t
  misc_feature (415)..(415): n is a, c, g, or t
  misc_feature (426)..(426): n is a, c, g, or t
  misc_feature (441)..(442): n is a, c, g, or t
cgtgttctgcaggtggggctgcgttaggtgtggtgtgtttgtcgtgttgcttgtgtttcgatattgtgggtttggtgtgctgttgtgtgtgtggtgttgtgggaccgtagttcgcgtgtgtgccggcgcactggttgttattgtgtttcggggcaggtcctgtgggcggtccgacggtcttgtgccggtgtttgtcgtctggtcggtgtccgtcggtgttccgggcgtgtgatgtgggttacacggggccactgtcggcgtggaggtgtgtgatggtggtgtcagctagttgtgtaccttccgagacgcgtgttctcacgtccgcgccagagtcctcagggggccgttcgacctgcgtgggcgtcacaggagtgcgagnggccccagcttccaggncgnccgatggagcctcacncgtcaccttcnccatcacgctttcanncacgtggacttcgtctgcctggacggtgacagctgctgactggccgcatatgtgctggtgatccttccagtccttgcgttggcagaaggtggagcagtagttgaccttgtggcagccggtgcactcgctcatagcctcccggccgcagttaacgcaggactgctccttccgctctgcgtcagcgtggatcttggcctggtttgtggcagcttctcggtaggtgctggcatgcttggcttgctcaaacagcgtcttcagctgctgcgctgtgttgagcaaggagttgaccatctcttctaggtacagccagctccgcggctctgacagctccagcccattgaccaacgcgggaggtgccgctttggtgggagtcgggggtgggaccgccagcgcaggcagggatgtcaacactattttgggatgtgacgttggcaacgcagcttctggaaacggtgcgatctggcagctgtcctgatagccggggtagtgaggctcagggtggctggccctgcatgggggctgcacgctggcctcttggactgtggcccctgcgaagacgtcgccctgggccggactctctgatatgacagcagtggcctctaccgtggacgctcggtcaaaggtcagtgcccccgaggtcgtgatctgtcccgagggggtcacggtgaaggtggtagccgcggtggctggaagcaatgtgatgttcttgggggagtccttcttcacgggagttgtgggcagttcattctccttcttgcgccttttgtaaggcacaaaaagcctgactgggccacttaaggtcatgtcgtcgcagcaggcagcacaggtgcaagaggcagcgtgagggtttaagatcccatcctggatgaggcactgcaagggtcggcccgcgtagcgaatgcttcttttccagtccttactgctggctcttcctgccatggcctcaaactcggtgggactgtaccagttctccccctgcttgatgcaccgtccccggccgcctgagccgagcctgttcttgtacagagtgccgctgatgttccggcaccgtacgggcagctcactgtcgtacacagaagggtcccagttgtatttagttccacctttttcttggccgggagccagaggggttggaggagactgaggacctggggtgaggggagctgccgggcctttcagcccggtggtctccacgatgctcccatctgtgtggacgacaatcagtgtcgctttttcggtgttcaggctgtccccgatctgaagggccgtcctaccagacagaacatgtcctgagatggatgccgcgttcgccacagacgtggtgaagacattgtctgcagcagcccccacgttggccactgtcactgtggtcacctctgcgaaggctgcggcagcggcggcctcgtcggggccgggcagggcctcggcgcccatgtccatgtgcccgggctccgccgccatcaccgccactgccgtgacccgcggcgtctcccgctccgcctccgagtctgcgtcctcctccgagtcctcgtccctgctcagcaccggctcctccgcctcgcctcctgccgcggccgcggccgccgccgccacagcggccgcggccgccaccgccgccgcctcagccaggcccagctgctttgccgccgagtccgagtcctccatccggactccgccgagccttcccgaaggcgccgtccgggaccgcccgaagcgccggtcgcggagcccgaagcggggcccgaagaggacgcccgagctgggccgaggccgcccgaagccgccgcccgaatagggaccgaaaaggcagccagccgccgagcagagccgagccgagtccgcccgcggagcggagccgaggcgaacagaggctgcccgagtaggagccgaacctgcacgaagccgccgagccgagaccgagtcctgaaccgaggagggtcgaagttccccgaagtgggaagccgaatcagtccgaataggtccgagtcctcacgagggcttccgagagactcggcccctgctctcctcactgtcctgacaggctgaggcggctgtcgtccccggccgacagggctggacggctctaggcagattctcgccggcggccggcgcaattctgcctctcagagagagcttagtgccgcgggtttcgcccgttcccgccgccggcggaagccgagtcagcccgaggccgagccgagacgagccgaatgtccccgaggccgaatgctcccgaacgtcggttctccacctcttcccttccgaaagtgcccgagcggtgccggacggactaatcgggcctcggccgtggctcggacgtccgctcccgaaacgcggcgcggtcgggccccttcgtcaggagacgcgaaaatggccgaaggagcgcgagcgcgcgggccgagaggctgccgggatcgcgacggaccggcgggcggggcgggtaagatggcggccccgcggcgagggagaggatcctccacagtgctctcttcagttccccttcaaatgctgttttatctcagcggaacgtactacgccctgtatttcctcgccacgctcctgatgatcacgtataaaagtcaggtgttcagctatcctcaccgctacctggtcctcgatcttgctctgctgtttctgatggggattctagaagcagttcggttatacctgggtgagtggactgtaacaccgtgaagactctgtcctaagagttgctatcttttccacacctcgtccgagcc

SEQ ID NO: 665570 - DNA, 610 bp, Homo sapiens
tttgttttctgtttgttctgctttgttttttttttttgcatgcttcctttctttttttacgccttttttttttctttgcacaaaaaaggagaagacacttttttttttttacaaacgacagtcctatttttccccccccctgagcacagacgggaaaaaaacctgttctttaaaaaggcccccatcacctggcctagtgaaccaacggttttgggctcccccgagatgcccccacgggggtcttttccaccccccgagaaaggggggggtgtacaaaaaacccttttttttttccccattccagcccccctattacaaaacaaactgtttttgtctacaccccttataaaaaaccggggtttttttataaaaaaaaaaagaaaccgctggccccctaattagctctttttttgggggaaaaagacccagggtttttttacccacgggaaaaaaaaagctgttttttcttgaacagaccctcagacagtgcggcgtactaggcggtgggcgggaaggccctttcgcgcctcccccttttaaatgtaaattttggccgcggggtttttctcttcgaacactcgggggggaggcaggggaccaacctttttcc

SEQ ID NO: 665571 - DNA, 232 bp, Homo sapiens
  misc_feature (51)..(51): n is a, c, g, or t
  misc_feature (77)..(77): n is a, c, g, or t
  misc_feature (120)..(120): n is a, c, g, or t
  misc_feature (164)..(164): n is a, c, g, or t
gaacacagccgcacccgggtctgtgccagcgtggttggagtgcctcctatngctcatgctcctggtgctgcgggacntgggggacggcgctggctgcagaagaaggggagctgccccttncagagcaacacagaggccacagccctggcttgacaacatccttntcaattcggatggtgtcaccctttcggcatctgtcaccagtatccgtagaccacccagactaggtccc

SEQ ID NO: 665572 - DNA, 2935 bp, Homo sapiens
tttttttgcgcacaaaattgtttccctttctgaaacaaagcaaccttatttacaaaaaccaaaaccaccttaacaacaatagctgtcacttttctttaggaaaagcttcatttgtaaatgactctccacagctcccttttccagaaaggtggggcaggggccttgtgagccaaggtgggtcttgcgcactgggcacaggcaccagggtggcctggggttactcggcacaggtcgtgtcttcccatttgttccaaggttacctccttccgctctgcgtcagcgtggatcttggcctggtttgtggcagcttctcggtaggtgctggcatgcttggcttgctcaaacagcgtcttcagctgctgcgctgtgttgagcaaggagttgaccatctcttctaggtacagccagctccgcggctctgacagctccagcccattgaccaacgcgggaggtgccgctttggtgggagtcgggggtgggaccgccagcgcaggcagggatgtcaacactattttgggatgtgacgttggcaacgcagcttctggaaacggtgcgatctggcagctgtcctgatagccggggtagtgaggctcagggtggctggccctgcatgggggctgcacgctggcctcttggaccctgctcagcaccggctcctccgcctcgcctcctgccgcggccgcggccgccgccgccacagcggccgcggccgccaccgccgccgcctcagccaggcccagctgctttgccgccgagtccgagtcctccatccggactccgccgagccttcccgaaggcgccgtccgggaccgcccgaagcgccggtcgcggagcccgaagcggggcccgaagaggacgcccgagctgggccgaggccgcccgaagccgccgcccgaatagggaccgaaaaggcagccagccgccgagcagagccgagccgagtccgcccgcggagcggagccgaggcgaacagaggctgcccgagtaggagccgaacctgcacgaagccgccgagccgagaccgagtcctgaaccgaggagggtcgaagttccccgaagtgggaagccgaatcagtccgaataggtccgagtcctcacgagggcttccgagagactcggcccctgctctcctcactgtcctgacaggctgaggcggctgtcgtccccggccgacagggctggacggctctaggcagattctcgccggcggccggcgcaattctgcctctcagagagagcttagtgccgcgggtttcgcccgttcccgccgccggcggaagccgagtcagcccgaggccgagccgagacgagccgaatgtccccgaggccgaatgctcccgaacgtcggttctccacctcttcccttccgaaagtgcccgagcggtgccggacggactaatcgggcctcggccgtggctcggacgtccgctcccgaaacgcggcgcggtcgggccccttcgtcaggagacgcgaaaatggccgaaggagcgcgagcgcgcgggccgagaggctgccgggatcgcgacggaccggcgggcggggcggggagaggatcctccacagtgctctcttcagttccccttcaaatgctgttttatctcagcggaacgtactacgccctgtatttcctcgccacgctcctgatgatcacgtataaaagtcaggtgttcagctatcctcaccgctacctggtcctcgatcttgctctgctgtttctgatggggattctagaagcagttcggttatacctgggcaccaggggcaacctgacagaggctgagaggccgctggccgccagcctggccctcacggctggcaccgccctcctctctgcccacttcctgctttggcaggccctagtgttgtgggcggactgggccctcagcgccacgctcctggcccttcacggcctggaggccgtcctgcaggtggttgccatcgcggccttcaccaggtagctacggacacccgggataccccacactggggccctcctcctgggcctgaccagtcccccagctgtcacctccccattcctggacaggaagggcacttttcctagtgactggccatagatggttttggatggttccatctgttctggcaggagtgggagcaggagccagggcagaacaaactgctggaggccctggtgttgggaacagctgcggggagggtagggaccagacagaactgccttcaagatgagtcccaggagcgcacactcagccctgtcagtggggtctggctttagcagccaggcctccacagacccccatgggcccccagggccgagagggaggacagagcccttcagaacagaggcctcatctcactgcatcccccatcaccccctagttccccaatggtcctaatttgtgttctgagatcccagtttactccgtggccaggccccacctgtgtttccaagtcgggctggagacgcaggatggggtaggccttgtgctctgagcaaccccagctctgcctcacaggcaggcaggcccggtgcaagagtggactctgggttcctaaagcaataaatgcaaacaagccaacagctctgctgcctagcaatttccatcttagccacacttctcccttcaggggcttcggaggagaggtcagggctaaggccggggatgagactgcaggagagagagcagcggagggccacattcggagcctccgtccactccagttttatcagcttttgccttttgcacggagtgctaaacaaattctagctctgtgtttttttcccattcccagatttactatcagttctccttaaaaagtatctaagctgttacagtagctttcccttcacttgattctattgtgtgttttctatgtttggaataattacacccaaatatctagatattttctcttcaccgcattttgtaaataaagagatgtgtatgcctccctg

SEQ ID NO: 665573 - DNA, 495 bp, Homo sapiens
  misc_feature (279)..(279): n is a, c, g, or t
  misc_feature (281)..(282): n is a, c, g, or t
  misc_feature (286)..(286): n is a, c, g, or t
  misc_feature (288)..(290): n is a, c, g, or t
  misc_feature (292)..(294): n is a, c, g, or t
  misc_feature (297)..(297): n is a, c, g, or t
caccgtcggaagtcttctcccctgcacttcgctgcaggttttggaaggaaggatgttgtagaacacttactacagatgggtgctaatgtccacgctcgtgatgatggaggtctcatcccgcttcataatgcctgttcttttggccatgctgaggttgtgagtctgttattgtgccaaggagctgatccaaatgccagggataactggaactatacacctctgcatgaagctgctattaaagggaagatcgatgtgtgcattgtgctgctgcagcacggngnngacncnnncnnncgnaacactgatgggaaatcagccctggacctggcagatccttcagcaaaagctgtccttacaggtaagaagacagagagctaccgaatgattatatctgtgtaactccttacttgattttataaaatcttgttatgctgaatttttcttttcactgatgaagctaagcaaatatatctgccattatctactactttaaaa

SEQ ID NO: 665574 - DNA, 203 bp, Homo sapiens
gagccggtccggttagagcggtctccacagctcatggtaatgctggatccttacccactaagcaagaccaggattgaacccgaaacctcctggttcctagtcggattcgttaaccactgagccatgacaggcgctcccagtactcactacttttaattccctgcagatgtgatatatttttaacttcgtagaccgctcttacc

SEQ ID NO: 665575 - DNA, 2703 bp, Homo sapiens
cagctcttcactggagaaaaggaatgtcttgtgtttgtttaagagtcacagagtatttttcttaggaagggaacacacagttatttcagaccgtgccccgctttgttgtcagtttccaaacaggaacacaccagtctctggtcttcctggccagaacatgtcctgagatggatgccgcgttcgccacagacgtggtgaagacattgtctgcagcagcccccacgttggccactgtcactgtggtcacctctgcgaaggctgcggcagcggcggcctcgtcggggccgggcagggcctcggcgcccatgtccatgtgcccgggctccgccgccatcaccgccactgccgtgacccgcggcgtctcccgctccgcctccgagtctgcgtcctcctccgagtcctcgtccctgctcagcaccggctcctccgcctcgcctcctgccgcggccgcggccgccgccgccacagcggccgcggccgccaccgccgccgcctcagccaggcccagctgctttgccgccgagtccgagtcctccatccggactccgccgagccttcccgaaggcgccgtccgggaccgcccgaagcgccggtcgcggagcccgaagcggggcccgaagaggacgcccgagctgggccgaggccgcccgaagccgccgcccgaatagggaccgaaaaggcagccagccgccgagcagagccgagccgagtccgcccgcggagcggagccgaggcgaacagaggctgcccgagtaggagccgaacctgcacgaagccgccgagccgagaccgagtcctgaaccgaggagggtcgaagttccccgaagtgggaagccgaatcagtccgaataggtccgagtcctcacgagggcttccgagagactcggcccctgctctcctcactgtcctgacaggctgaggcggctgtcgtccccggccgacagggctggacggctctaggcagattctcgccggcggccggcgcaattctgcctctcagagagagcttagtgccgcgggtttcgcccgttcccgccgccggcggaagccgagtcagcccgaggccgagccgagacgagccgaatgtccccgaggccgaatgctcccgaacgtcggttctccacctcttcccttccgaaagtgcccgagcggtgccggacggactaatcgggcctcggccgtggctcggacgtccgctcccgaaacgcggcgcggtcgggccccttcgtcaggagacgcgaaaatggccgaaggagcgcgagcgcgcgggccgagaggctgccgggatcgcgacggaccggcgggcggggcggggagaggatcctccacagtgctctcttcagttccccttcaaatgctgttttatctcagcggaacgtactacgccctgtatttcctcgccacgctcctgatgatcacgtataaaagtcaggtgttcagctatcctcaccgctacctggtcctcgatcttgctctgctgtttctgatggggattctagaagcagttcggttatacctgggcaccaggggcaacctgacagaggctgagaggccgctggccgccagcctggccctcacggctggcaccgccctcctctctgcccacttcctgctttggcaggccctagtgttgtgggcggactgggccctcagcgccacgctcctggcccttcacggcctggaggccgtcctgcaggtggttgccatcgcggccttcaccaggtagctacggacacccgggataccccacactggggccctcctcctgggcctgaccagtcccccagctgtcacctccccattcctggacaggaagggcacttttcctagtgactggccatagatggttttggatggttccatctgttctggcaggagtgggagcaggagccagggcagaacaaactgctggaggccctggtgttgggaacagctgcggggagggtagggaccagacagaactgccttcaagatgagtcccaggagcgcacactcagccctgtcagtggggtctggctttagcagccaggcctccacagacccccatgggcccccagggccgagagggaggacagagcccttcagaacagaggcctcatctcactgcatcccccatcaccccctagttccccaatggtcctaatttgtgttctgagatcccagtttactccgtggccaggccccacctgtgtttccaagtcgggctggagacgcaggatggggtaggccttgtgctctgagcaaccccagctctgcctcacaggcaggcaggcccggtgcaagagtggactctgggttcctaaagcaataaatgcaaacaagccaacagctctgctgcctagcaatttccatcttagccacacttctcccttcaggggcttcggaggagaggtcagggctaaggccggggatgagactgcaggagagagagcagcggagggccacattcggagcctccgtccactccagttttatcagcttttgccttttgcacggagtgctaaacaaattctagctctgtgtttttttcccattcccagatttactatcagttctccttaaaaagtatctaagctgttacagtagctttcccttcacttgattctattgtgtgttttctatgtttggaataattacacccaaatatctagatattttctcttcaccgcattttgtaaataaagagatgtgtatgcctccctg

SEQ ID NO: 665576 - DNA, 2589 bp, Homo sapiens
aattcggcacgaggcgtggagcaggtgtgagggacaggtgtggcgggctggtcacctgggacagttgtgcggggcaggcgcgcggggtaggcgcgcgggaaccggacgaggcgagaggccggcgggcgcacttgcctgcgaaggctgcggcagcggcggcctcgtcggggccgggcagggcctcggcgcccatgtccatgtgcccgggctccgccgccatcaccgccactgccgtgacccgcggcgtctcccgctccgcctccgagtctgcgtcctcctccgagtcctcgtccctgctcagcaccggctcctccgcctcgcctcctgccgcggccgcggccgccgccgccacagcggccgcggccgccaccgccgccgcctcagccaggcccagctgctttgccgccgagtccgagtcctccatccggactccgccgagccttcccgaaggcgccgtccgggaccgcccgaagcgccggtcgcggagcccgaagcggggcccgaagaggacgcccgagctgggccgaggccgcccgaagccgccgcccgaatagggaccgaaaaggcagccagccgccgagcagagccgagccgagtccgcccgcggagcggagccgaggcgaacagaggctgcccgagtaggagccgaacctgcacgaagccgccgagccgagaccgagtcctgaaccgaggagggtcgaagttccccgaagtgggaagccgaatcagtccgaataggtccgagtcctcacgagggcttccgagagactcggcccctgctctcctcactgtcctgacaggctgaggcggctgtcgtccccggccgacagggctggacggctctaggcagattctcgccggcggccggcgcaattctgcctctcagagagagcttagtgccgcgggtttcgcccgttcccgccgccggcggaagccgagtcagcccgaggccgagccgagacgagccgaatgtccccgaggccgaatgctcccgaacgtcggttctccacctcttcccttccgaaagtgcccgagcggtgccggacggactaatcgggcctcggccgtggctcggacgtccgctcccgaaacgcggcgcggtcgggccccttcgtcaggagacgcgaaaatggccgaaggagcgcgagcgcgcgggccgagaggctgccgggatcgcgacggaccggcgggcggggcggggagaggatcctccacagtgctctcttcagttccccttcaaatgctgttttatctcagcggaacgtactacgccctgtatttcctcgccacgctcctgatgatcacgtataaaagtcaggtgttcagctatcctcaccgctacctggtcctcgatcttgctctgctgtttctgatggggattctagaagcagttcggttatacctgggcaccaggggcaacctgacagaggctgagaggccgctggccgccagcctggccctcacggctggcaccgccctcctctctgcccacttcctgctttggcaggccctagtgttgtgggcggactgggccctcagcgccacgctcctggcccttcacggcctggaggccgtcctgcaggtggttgccatcgcggccttcaccaggtagctacggacacccgggataccccacactggggccctcctcctgggcctgaccagtcccccagctgtcacctccccattcctggacaggaagggcacttttcctagtgactggccatagatggttttggatggttccatctgttctggcaggagtgggagcaggagccagggcagaacaaactgctggaggccctggtgttgggaacagctgcggggagggtagggaccagacagaactgccttcaagatgagtcccaggagcgcacactcagccctgtcagtggggtctggctttagcagccaggcctccacagacccccatgggcccccagggccgagagggaggacagagcccttcagaacagaggcctcatctcactgcatcccccatcaccccctagttccccaatggtcctaatttgtgttctgagatcccagtttactccgtggccaggccccacctgtgtttccaagtcgggctggagacgcaggatggggtaggccttgtgctctgagcaaccccagctctgcctcacaggcaggcaggcccggtgcaagagtggactctgggttcctaaagcaataaatgcaaacaagccaacagctctgctgcctagcaatttccatcttagccacacttctcccttcaggggcttcggaggagaggtcagggctaaggccggggatgagactgcaggagagagagcagcggagggccacattcggagcctccgtccactccagttttatcagcttttgccttttgcacggagtgctaaacaaattctagctctgtgtttttttcccattcccagatttactatcagttctccttaaaaagtatctaagctgttacagtagctttcccttcacttgattctattgtgtgttttctatgtttggaataattacacccaaatatctagatattttctcttcaccgcattttgtaaataaagagatgtgtatgcctccctg

SEQ ID NO: 665577 - DNA, 165 bp, Homo sapiens
ctaagacctcatctatttgtgtatagctgcagcatacttaaagtagatccgtacttaatgtagcttcattgcttaaaatttttgggctatgcgataatgtctcatcagtagtaagaatctcagggttatgctatatacccccatgggaggtatagacatataaat

SEQ ID NO: 665578 - DNA, 376 bp, Homo sapiens
gggtccaacacatcagcaggatccacctcgtggacaccgtggaacgggctgcgcaaggttgacttctggcattccgatccgtgcaccatgatcaagggaacttctgggcacctgtggccgcccttcatgactcctaagtcctcgcgggcgttctccagcccggaggcctgccgctccatgaagctactgtacaaggcgtcaggggtgtttgacggcatcccccactatcgcttcgtggctcccaaaagcctgttggccaatgggtccatctcaccacccaacgacggcttcggcccgtgcctggagtctggcaattcagaactgtcagcacctgcaggttcagtgccccctggtttctctcccatcctcacgtcgc

SEQ ID NO: 665579 - DNA, 644 bp, Homo sapiens
atcataagcttgattgcctataagatacaggcgcgccgtcaggctcctgagtcgattctctggctccaactctgggaactgagcggactctgaacatcagcgggacccagcctatggataggctgactattattgtcaggcgtgggacagcacctctggagtggcattcggcggggggaccaggttgaccgtcctaggtcagcccaaggctgccccctcggtcactctgttcccgccctcatctgaggagcttcaagccaacaaggccacactggtgtgtctcatacgtgacttctacccgggagccgtgacagtggcctggaaggcagatagcagccccgtcaaggcgggagtggagaccaccacaccctccaaacaaagcaacaaacaagtacgcggccagcaagctatcttgagccttggacgcctgagcagtggaagtcccacaagaagctacagctgccaggtcacgcatgaagggagcaccgtggagaagacagtggcccctacagaatgtcatagggtctcaaccatcacccccagcagggagaatgagctgcggatcccagggaggggttctcctccacccaggaatcagcttggtacgagctgaatcgtatctgtctccttttacggggggagga

SEQ ID NO: 665580 - DNA, 580 bp, Homo sapiens
gtgccatctgtggtgtggctttgggccagtgtgtctcctggacagcatgatgctgtggtgcttcatctgtgcgctggccagctggcttttgccctgtgccaaggtgcttcacatgcagcatgtgctgtcttgtgctgcccacaatgataatgtgctagctccccagacatggacctgtgccacatgtttcttgctctcatgtgaatgatgggggtgaagttgacaccccacaacaaggagactggtgcatgcacatgtgatgtgctcttcctgtgcttgtgaagccacacatcatccccttcatcctggatgaaataggcgcctgacattgaggacagacacatttgtggtgtccttgcgcggcctggcgtcaccatcagctccattgagaagaagctgtcagcgtttctggccatgcccccagtggtcatcctgctgctatgaccaacactccatgtcgctgcgtgctgggacgtggtgtccacctgtgtatgccaccagtgcactgcactgcccaggtggaaggacctcgggatggctcattggccgcagcctgtctgatgcctgctgttccgctttc

SEQ ID NO: 665581 - DNA, 236 bp, Homo sapiens
ggcagctggaattagccgtgatacagaagtccactgggcatctgattcgcacaggtacccttccattcgtctgggtgcgagaaatgctcagggactttaatatcagatctgcgcttcctgagcgcaggtatcggtgctaagcaggaggcaagtgaggcctatctggttggcctgtcggaagacaccaacctgtgtgctatccagtgccagccgtgtaacaattatgccaagagaca

SEQ ID NO: 665582 - DNA, 437 bp, Homo sapiens
  misc_feature (436)..(437): n is a, c, g, or t
gacttgcctgtggttacagagcattaatgtcacagctagaattccaacagctcaagcttttaaaattaccccatgccacttccagggcactgcattgaaagtcagctttggtttaggctctgccaccaattatgtgaccttggacaaatcccctcactcacaagcccactttcctaaactgcaaaatgaggtcaggggtggtggacccttagtcctcagcagagtcctgcagttcctgtgtccctggagcccgttggtctccctctgtaagtctgaccttgggcagcacggtgtctttgcccagagcggttctcattcccttctaaggcagtgtctgtcactcatgccttttgggagctggggctcctatgtggactctgatttaagggctataaggcctgtctcttcctacccaatagaggtttcctaaaaaaann

SEQ ID NO: 665583 - DNA, 785 bp, Homo sapiens
gggtcgccgaggagcctgaggaagagggcggcgaggtggtggtgactgagcggagcctggtgacaggatggtgggcacagatgggtgtggtataggagatctgcaatcccaacggtgcaaagtttgtgccagctaaattcaaaaaactccgtggtgccaggaaaaattcagcacattctctgcacgaggaaaccttggcaccaaaagagagttatgactatctcaagactctggtggtgatgtcatatgtgtgagagggagacttcgatgagactctgaattatccagaacagaaagttgtgactggtggaccaggtcacaacaattggcctcgtgactcctaggggactctcagtgttatcaccaggggggagatagtggccaagcttaagcccttgttgcaggaggccacattttgatggtgcacattccttatctcgggacacaacccacaaaattttgaagcatttgagcattgaaccatcatttctacattaatccagggttcctggccactgggggcatatcagtggcctgtgcgaaacaaaaactattattccccatccattgtggtgtgcatggcatatccagggcttctaccaggggtccaaccttatgtgtatcaggttaacttggcagatggatgtgacaagtagaacggatcgatcacaaaaaacctttaaggccaggctgtctggatgattatggtgtaaaacatggtctggtgaacatcaagttcatcaccattacggcattaaaaagaaacaaataacacacaaattggg

SEQ ID NO: 665584 - DNA, 154 bp, Homo sapiens
acgcgagtactcgaggtggaataggtatgtgattaggagtagggttaggatgagtgggaagaagaaagagaggaagtaaagttgaattatgccgtttttgggttgaggtgatgatggatggtggagcatttgtgtgcatgtgaaagtctgtttt

SEQ ID NO: 665585 - DNA, 97 bp, Homo sapiens
gcggccgcctactactactactactgctcgaattcaagcttctaacgatgtacggggacatgtttataagttatatcagaaccgggacattttacag

SEQ ID NO: 665586 - DNA, 133 bp, Homo sapiens
  misc_feature (46)..(46): n is a, c, g, or t
  misc_feature (100)..(100): n is a, c, g, or t
  misc_feature (118)..(118): n is a, c, g, or t
ggggcctcagcccatcttcttccagatggtgaatgaggcggtgagnactcccgccaaaaagatggtcacggtctgccacgtgggcgtcccaaagtagganaggaggccgtcccaaccnccctggtcttggatc

SEQ ID NO: 665587 - DNA, 374 bp, Homo sapiens
  misc_feature (343)..(343): n is a, c, g, or t
tagagacggggttttgccttgatagctaggctggtctcgaactcctggcctcaagtgatctgcctgcctcagcctcccaaaagtaatccccccaaagtgttgagattacaggcatgagctgccacacccggccaagatgctgaatttcatcaccctcgcagtgcccctgtggccgtgaaagcttttggagtcgtctttggagggctgttactctatctgcatccttccgctcctctctcctactcccttgttcaaatacccttggcaaggctgtctttttaatttgtctttcatatatgggggttattttaattcattaggtcctaaaatggaacaaaggggntagggggctgggggcatctgggggttgtgga

SEQ ID NO: 665588 - DNA, 129 bp, Homo sapiens
tcatgtcggtccaattcggaattcccggtagctttgacctggtactaaaagtaaccaaggacaacgcagctcattgcagcctcaacctcctggcttcaagcgattctcaaacctcagcttcccaaatag

SEQ ID NO: 665589 - DNA, 404 bp, Homo sapiens
cctcagcatcatgcaatatacctattcacacacctgcatgtcctcctgaatctcacatcaaagtcgcatgtgacactaaaccttggttgagatatcaccttagagaggccttagctgaatattctatgtaacaaacaaacaaaacaacacaaacaacctgtcctccatctcttcaccccaataaatttaaccttatagcacttctcaggttatactaatatacactgacatatatatagatagactatatgagacagagtcccactctgttgcccaggctggaataacgcacatcagagagtaacttgattctacatgaaaaaaataaacaaagagcactggtgaaggtaactatgtcagtaaatataacatacagtataaattggttaacgattgtaactctc

SEQ ID NO: 665590 - DNA, 292 bp, Homo sapiens
aaaccccggggccttcccccccccttggtttttggggggggcccccctttgggggcgggggggccccttgccaagcccttttccccccccggggggccccccctgcccccccccccgggcccccccccccccgggggttttcccttcctttgaatttttttggggggcccggggggggggggtttgggggcccttaccccccccctttgggggggcccctttttttttttttttttttcggtttgggggggggggggggggttttttatttttttttggtttccttccttta

SEQ ID NO: 665591 - DNA, 331 bp, Homo sapiens
gcggtccctaggtagactaacacacaggaaaagactaggagtatgttaaaaagaaatgaaatcatatccttggaaacaacaggaatgcagctggaggccattatcctaaggaaattaatgcagcaacagaaaacaaaatactgcatgttctcacttataagtgggagctaaatattgaacatgcttggacataaaaatggaaacaatagatgctggggactactagggaggctggggcatagactgaaaaactacctgggttaggtctacctggccaggtagacctaacatcgttaggtttttttttctcagtgagtacaatatgacttct

SEQ ID NO: 665592 - DNA, 141 bp, Homo sapiens
gtttttcaggtcttcaccaagtatcacagtaataacacacatgaagtgtcattattcacatagtccactgactcctcacatctgttatcttattataaagcacctatttgtagtgactatcagcatctacattctaaacag

SEQ ID NO: 665593 - DNA, 518 bp, Homo sapiens
aaggagaacggaggagagggaaagagaagcccaagcgtctgtgatcatatgacgggccaaggctgagcagggtatcacagagaccctttgaaatgcatttgtctctcatcctagactagtatacaccgacttctcctgttgggttgaaacacgcatgtcaaccttgcgggagagtcagagctaggatgtacaagaactgattctaaccagaagtccgcaagtactgtggacaagaatgcttaaccatgctgcttcagccttgagagacctaggttcttacacatatgcacacacgcatacacacatgcacgcacacacacatacacacatgcacgcacgcacgcatgcacaccaatttatgtttttattaagtgccttgaaaaaatgaagaaaaatgtattttccctttatgtaaaaattagtgaatatcttatgaattaaggcattcctctttccctaaccccgatggctccattcccaagtaccccaactcactgctgatcctattaaaggaatga

SEQ ID NO: 665594 - DNA, 111 bp, Homo sapiens
actgtctaatgctcaggtcgatggccaaagctgattttcaagtttcgcgtctttttaaacagacgaaagtgaaccttattaaagctgaatgactcattcaaggccatatag

SEQ ID NO: 665595 - DNA, 390 bp, Homo sapiens
gatgaatactaatccaactaacttttcttgtacatgtactatgattcaggtactatgccaggtgttttcactgaatccttgcaataaccccacgtatcattatctaaattttacagatgaaaaaatcaaatgacttgcctaacgcaacttatgtagcgagtaagtggcaatctgggagtcaaaagaaagttgtgtgactccaaagctagtgcgggtttccaatataccacatttctttatctatataaacaatccttcttggactgactatatgatttaccagtcctcacaatgtttttacttgatcctggagaaaaataagtttgtgtaaaacagctcaatgccttttcactggaagtattgagaattatgaacttggaagttcagatg

SEQ ID NO: 665596 - DNA, 536 bp, Homo sapiens
caagtctcttggacatagaaaaaaccttgtaaaaaaggaaaaatttaccgcccaagtgggctaaaagccacccccaattaagaaagggtcaagccccaaccccccttccttaaaaaattcccaaccatataattgaccccctcccccccaattggggccaatctatcccccctatagaagacctaatgttggtataagtaacatgaaaccttttccccccgcataagcttgcgtcagattaaaccactgaactcacaattaccagcccaatatttccaatcaaccaacaagtcattattaccctccctgtcaacccaacacaggcatgctcataaggaaaggttaaaaaaagtaaaaggacctcggcaaatcttcccccgcctgtttaccaaaaacatcacctctagcatccccagtattagaggccccgcctgcccagtgacacatgtttaacggccgcggtaccctacccgtgcaaaggtagcataatcccttgttccttaaataggggccctaaaaaaaaagcaacagatgga

SEQ ID NO: 665597 - DNA, 600 bp, Homo sapiens
ggcccccccccccctttgtggaggactcctttttttttgccccccccccggggggtgttttaaaattctgcccccgggggtttttttccccccccggtttttggggggggaggcgcgtggttgggttctccccctcccccccaagggaaagatttccccccccccccccccctcccccgggtggtggtggtggggggtgggttatagaatttgtgggcgacccccccccgggggccctttttttagagaaagacccccccccaaggtttttccccgggggtctcttttttgggggggggggggggggggggccccccggattttcccccccccccccccgaacctttaccccccccctttttttttttgggggtttttttttttccctttaagggcccccctcccccccttttgggccaccctccctttttctttggggtgggggggggggggggggggggtttttttgccggggcccccggggggggccttttttttttttttgggggccccccccgaaattttttacccccccccccggggttcggttccggggggggcccctgggggggtttttcttttttttttttccggggggga

SEQ ID NO: 665598 - DNA, 539 bp, Homo sapiens
ctcctgttccagattgtcatgtgcctgctcccccttcaccttctgcccatgcttataagcttcctgagacctctctagaagccaagcggatgcagcaccatgcttcctgtaaaggcctgcagaacgatgagccaattaaaactcttttcttgataaattactcagtctcagttatttctttataacaacgcaaaaatggcctaatacgtatatgcacccaacactggaacacccagatatatacagcaaatattattagagctaaagagagcagagatagacttcaatacagtaatagctggagacttcaataccccactttcagcaatggatagaccttccagacagaaaatcaacaaagaaacatcagacttaatctgcagtatagaacaaatggacctaacaggtatatatagaccatttcttccaatggctgcagaatacacatttttttctcctcagcacctggatcattctcaagaatagaccatatgtttggttgtaaaccagtcttccaacattcaaaaacttgaataata

SEQ ID NO: 665599 - DNA, 705 bp, Homo sapiens
tcccttctggagctgaaatacaattttaagctgggtcaaagtaaaatactgggataaaatggtttcttcagctgggatgtggttggcacacacctggtagtttcagccactgggaaaactggaggcaggaggatcacttgagcccaggaatccgaggttgcagtaagctgtgatcatcccatctgcactccagcctcagtgtcagtgtgagaccccatctctaaagaaagagaaaaaaaggttcttcaaaatttttaaaacccgggcaatgaagggggtactgggtgaatttctttccataaagaagagggcattttatatctaccttggagtaatacctttatgtcatatggtcatagaaatacctaggatataattagacagcatataattactaatatggagaatcagggtcaccttggtgggaatagcggtgattttaaaaggcctagaattactttcaggggtgtcacatcatctcatattcacggactttcttcctttgggggaggtggagccaaatggataatcggcagtctaacaaatcttctccctttaaggttacttcaaatctatcaggggaagaacttccattccaaagtccatgctcaggtagagagcagccagcgtgacttgtgtcggacattatccatttaggaggggaaataacactctttgctttgaaaagaactgctgacagggggg

SEQ ID NO: 665600 - DNA, 92 bp, Homo sapiens
atgggatatttttattttttatattttaaaatcaaaaatgtcaaatgtcattgggtatgcatgctttataataaatttacccttggtcctta

SEQ ID NO: 665601 - DNA, 1728 bp, Homo sapiens
tctctcttaactcataactggggccaaaggcagggtgacatcactggggatgccagtgtgtggaggctatcccctgaccagtcctgtccacagtcaggagggcaggggctgcagtgcacagaccgcattgttgtggcatggaggggggtcccacaaaggccttgtcagctcatgggaccacattggcagccagcatagtgacagaagcctcagataggcagtgagccattgccaagactccatggtcccttggtgtctgtggccaccaaacagatgacagaaccagcccctcttgttcagccacctgggaggctgctcccaagcctgttgagcttgaggatccttaaccactcaccagctctcttcagttccccttcaaatgctgttttatctcagcggaacgtactacgccctgtatttcctcgccacgctcctgatgatcacgtataaaagtcaggtgttcagctatcctcaccgctacctggtcctcgatcttgctctgctgtttctgatggggattctagaagcagttcggttatacctgggcaccaggggcaacctgacagaggctgagaggccgctggccgccagcctggccctcacggctggcaccgccctcctctctgcccacttcctgctttggcaggccctagtgttgtgggcggactgggccctcagcgccacgctcctggcccttcacggcctggaggccgtcctgcaggtggttgccatcgcggccttcaccaggtagctacggacacccgggataccccacactggggccctcctcctgggcctgaccagtcccccagctgtcacctccccattcctggacaggaagggcacttttcctagtgactggccatagatggttttggatggttccatctgttctggcaggagtgggagcaggagccagggcagaacaaactgctggaggccctggtgttgggaacagctgcggggagggtagggaccagacagaactgccttcaagatgagtcccaggagcgcacactcagccctgtcagtggggtctggctttagcagccaggcctccacagacccccatgggcccccagggccgagagggaggacagagcccttcagaacagaggcctcatctcactgcatcccccatcaccccctagttccccaatggtcctaatttgtgttctgagatcccagtttactccgtggccaggccccacctgtgtttccaagtcgggctggagacgcaggatggggtaggccttgtgctctgagcaaccccagctctgcctcacaggcaggcaggcccggtgcaagagtggactctgggttcctaaagcaataaatgcaaacaagccaacagctctgctgcctagcaatttccatcttagccacacttctcccttcaggggcttcggaggagaggtcagggctaaggccggggatgagactgcaggagagagagcagcggagggccacattcggagcctccgtccactccagttttatcagcttttgccttttgcacggagtgctaaacaaattctagctctgtgtttttttcccattcccagatttactatcagttctccttaaaaagtatctaagctgttacagtagctttcccttcacttgattctattgtgtgttttctatgtttggaataattacacccaaatatctagatattttctcttcaccgcattttgtaaataaagagatgtgtatgcctccctg

SEQ ID NO: 665602 - DNA, 585 bp, Homo sapiens
agcctgccgtctacttcaatggagcagtttctggacgtgagactgggtggacttccctgctggatctgaatccaaacacaagtcatgatttttggcaaattctgttctcatgttcctggcaagttctactgtgtgacgatgtatgaaatgataaatggttttgcatgacaatgccatgtgatgcagctgcttttagttgctcttgtctggccatgtttcgaatgcctttcatgcaagcaaaggtgccagacgctgggtggtagcaggttcacgggtgaaacattgagcaggaagcagtctgagctgtaggggtgcgtgctagttgttgaacgcttggtattccctagattatgttattgggagccattgagcatgagcattgccaaccggtgactgagcctcagtagagtagcagagcagttcaatatgttatttgggtccccctgatctatttctttggttgtgcccccatttgtgcaagcccaaatggagacggggtttccagttggtccagttcctttccagagcttaagccaatcgggtgccaaaggaaaacctggttgctatggattcagaccgaaatgg

SEQ ID NO: 665603 - DNA, 1763 bp, Homo sapiens
  misc_feature (379)..(379): n is a, c, g, or t
  misc_feature (396)..(396): n is a, c, g, or t
  misc_feature (399)..(399): n is a, c, g, or t
  misc_feature (415)..(415): n is a, c, g, or t
  misc_feature (426)..(426): n is a, c, g, or t
  misc_feature (441)..(442): n is a, c, g, or t
cgtgttctgcaggtggggctgcgttaggtgtggtgtgtttgtcgtgttgcttgtgtttcgatattgtgggtttggtgtgctgttgtgtgtgtggtgttgtgggaccgtagttcgcgtgtgtgccggcgcactggttgttattgtgtttcggggcaggtcctgtgggcggtccgacggtcttgtgccggtgtttgtcgtctggtcggtgtccgtcggtgttccgggcgtgtgatgtgggttacacggggccactgtcggcgtggaggtgtgtgatggtggtgtcagctagttgtgtaccttccgagacgcgtgttctcacgtccgcgccagagtcctcagggggccgttcgacctgcgtgggcgtcacaggagtgcgagnggccccagcttccaggncgnccgatggagcctcacncgtcaccttcnccatcacgctttcanncacgtggacttcgtctgcctggacggtgacagctgctgactggccgcatatgtgctggtgatccttccagtccttgcgttggcagaaggtggagcagtagttgaccttgtggcagccggtgcactcgctcatagcctcccggccgcagttaacgcaggactgctccttccgctctgcgtcagcgtggatcttggcctggtttgtggcagcttctcggtaggtgctggcatgcttggcttgctcaaacagcgtcttcagctgctgcgctgtgttgagcaaggagttgaccatctcttctaggtacagccagctccgcggctctgacagctccagcccattgaccaacgcgggaggtgccgctttggtgggagtcgggggtgggaccgccagcgcaggcagggatgtcaacactattttgggatgtgacgttggcaacgcagcttctggaaacggtgcgatctggcagctgtcctgatagccggggtagtgaggctcagggtggctggccctgcatgggggctgcacgctggcctcttggactgtggcccctgcgaagacgtcgccctgggccggactctctgatatgacagcagtggcctctaccgtggacgctcggtcaaaggtcagtgcccccgaggtcgtgatctgtcccgagggggtcacggtgactggaaaggcagaagcacatttcacgcggccaggcagtggcgcccacggcacacaggtcccgtgccacccacgggcgccaatccttgtgggggcctgggctgaagggcgggcagtggtaactgtaccctcccatgtgaaggacacgggggaaatcccagaccttggagaagacctcacaggagaaaaccaggatggccaggatggcaacttgccactaccaattgttcgctgtttaaactgtgaaccatggaaatgtgctgcccagccagaaaacaaacataaaataaaactttcagtgatttttaagtacttcgtggttcgaattaagaaaaaatctttaatccaagctgaaggtaaaaagcagccgtgtcccacagcaaggctgccctgtgtcccacagcaaggctgcctctccagctcaaaaaaaaatcctggcgacagatcttgagactctgctgctgtgggactcttcctgcacccaccacccagggcctcaggaaggagctgacagggtgttttagaaagaccttactctataaatgcaaaaacccagacttagttaacaaaagcctattacaaagacattttctcctattgctacctctccccatttaaatcctgtctgtacaaaaaaataaaaacattagctggt

SEQ ID NO: 665604 - DNA, 297 bp, Homo sapiens
gcattaattgttgagtcctgtatattctggttatatcccttgtagatgggtagttgcaaatgttttctctcattctgtggatatgtctcttcactctgttgattgcttcctttgctgaacagaagcctttacttgctgtaatcccatttgtctatttttgccttggttgcctgctactccttcaggaccttacacaaacaaaagccgtggcctagattccagtgtcctgaagcactttccaccaagcttttgcctctagctagctttcactacgctctctcagactcctctagcaac

SEQ ID NO: 665605 - DNA, 417 bp, Homo sapiens
ggtcacagaactaactgttctgcatggttcacatcgtgtgcaccagagcataacactctgaatagacggagtgcacagtcactaatgagcggaggcagatgtcaacagcacccctgaccatggtcttaacaccatcaattagaaggattgctctgtgtattgcgcactgcatgatgttccctgggctcagacggccgatgtagatcccaatgtgccctagcggtaccgcctgaatggagctcgggttctagtgtatgatgcacgccgagcctgatagcaacgggctgcttactatccctgctgtgcacgatgtgataactgagtaggttagacagtgctcaatacatggagctcagagaccgtgcgccacagatactacggattagcatacagctgttggcatgacatcgtagtggg

SEQ ID NO: 665606 - DNA, 300 bp, Homo sapiens
atggcatgagctttcatggagcgtgccgatcaacgaacacacgcagttctcgaccttgctggatgtgcattacctggcggacaaggccggtaagagcccgattgtggagcagcggttgcaggcgtcggtgtcggggtagttgtaatacaccttctgatctaccttgccctctgtaggagcgagctttaatataacgtcaacgataacgcgtgttttctggataaacgcggccctgttagtgcttcggagtaagctcgccctacagagcatgctagtcttagtacctacgactagccgtgt

SEQ ID NO: 665607 - DNA, 1780 bp, Homo sapiens
  misc_feature (744)..(744): n is a, c, g, or t
  misc_feature (755)..(755): n is a, c, g, or t
  misc_feature (1723)..(1723): n is a, c, g, or t
gttccacgaccgccattcccggctgagccccgccatcggggctgtgttgacggaggatgtgacagggctagatcggcgatcagcgtcgcgctggcacacacgcgagagactgctcggaagagcgcgaccatgcctgatgcaggcatgcctgacatcattctcgacggccgtgagactcaagttggtcggtcagacccaaaggattcgcggcgtctccataggtttatctgtggtggatgagttctatacgaaatgtgaattgaaggcactgggagaattagactctccaagcgttggacgaatatgatcaatgtggatggagcgacgaggatttgttgtcgacgtaaggtaagcacgaactcgacattggtttgacatgacaatatcggaagcactcattgggttagacgcaaataatacgtccccctgcggaggcgcgatacctcagtaggcatcgtgcgcagcgcgaaatgcacacgatggagcatttgcagcgtactcagcgtcgtggcggcattcgtatttaccgccgcactagcatcatctcgaagaccatatggacgtaatctctcggctgctctgtggcccatgagctccgcgacgtcccgagtgtacatcaatcctagtggggaccgaagatgggggcccagacagtaatcacgcagggagcgggcagcccggtaggccctggcgtcgacccgtcggtggtcccatggcacgtgttgcgcatgcagagatacgcgnagcatcttcanaggatgtcctggtggagctgctcaatcccgagggggtccttgccaaccgtgaaagccaacatcgtcctggcgcggtgtccgggcaaccgagagggagtcccgcgcgaatgggggtatcctcttgtagtgcattcccaagcggaaaccaattcgcgtgccgagaggaaggttaacccccagaaaaagtctgaaatttcatggaaaaaccagcccttctcgagcttggatccaatggccccctccaaaccccaaaaggctggtcccagaacacgggggggggtggagaagccccccttaaaaaatcggcccaaacacacattgcgttccggcggttccccaaacaaagacgttggattgggaaaaaaacaaccttagggagtgaaaaaaaaccttaacgtgggcacttttggaaacaaaaacggaaaggggccccttggtaatttgcgacacaattcttgggttttgcccggcagacctcctttaaaaaaagatttgaatccacaacccccaccagagacatcaacggggggggaccactttcaaagcaaaccctgcgtgtgtggtccgggcgcacccattatatacggggcggcacacccaacccagtaacttggggcgggaacccgggggcgcaagaggggaaatcgacgacaaccctctgtcgaaaagactgagcggggggaacccactaggggggcgccaatcactggcagcacgaccagcatctaaatcgccccacgggtgctgcgacccacagttatacgcccggggaggaaccacaagaaacagaggacacgcggacgggaggacaaaacaccaaacaaacgagtgaactaacgacacaacagaaaatagttgagacagtacacaccaacaacacaacaaaaagccggaaccatctagcgaggccacaactgaagcagacgaggcaacagacccagcacacacaatagccactacggacaagnaacacagaactacgagaatacagtagcacacaacagtaccaagccagctcgagaggt

SEQ ID NO: 665608 - DNA, 354 bp, Homo sapiens
taatgatgctacctagttgattaatgtgtctagctggtgctggcgattactgaagactgtcactaggaatgcgcatgtgctcctcaattatttaagcatgttactgtaccacctttgctttagagcactgggatgatattcactaagtgccccttgttttggacttaatatgcattaatgcaattgaccacctctagttttagactaatagttgatctccacatattgcccttgcataaggggcatgttaattatgaatgaaccattttcttttaatattaatgtcatttgtatttgtggacctgtgtatgagagaccctatgttctctcccattaccctttggattgtgcttg

SEQ ID NO: 665609 - DNA, 104 bp, Homo sapiens
catggttttcacttttaacattcttactggtaaaatggaaggggtgggtgacgtctgtgggttccctgggcttactggcaaaccctcaaacctgagtactggcg

SEQ ID NO: 665610 - DNA, 110 bp, Homo sapiens
aaacacatatgaatatggcagcatttaaacgtctttagactgggcatggtgactcatagctgtaatcccagcacttcgggcaggccaacggtgggaggactcatttgacg

SEQ ID NO: 665611 - DNA, 142 bp, Homo sapiens
tcccgtgatgatgtctcctcgattgaactgtgtgggcccttgtgggatgaaggcagtgtctcatccatctttatagccttactgtccctcagactatccctgggagggccaaggcaaacagtttcatctacgcctatttgcc

SEQ ID NO: 665612 - DNA, 245 bp, Homo sapiens
cacaaaccacacactaaggtctccattgcgattgaccaatagcccataccatatagggtgtaaaatgtgttgatcttctccctgtatatagctgtctattgcatagaattatctccatatatattagacattgctgctgaattatctgcaccggggtcaactggggcacttatcaacaatgcagatggttgcgttatacatcacgtgcgaccccactgccatctctagagcacacatagggccag

SEQ ID NO: 665613 - DNA, 928 bp, Homo sapiens
  misc_feature (84)..(84): n is a, c, g, or t
  misc_feature (126)..(126): n is a, c, g, or t
  misc_feature (182)..(182): n is a, c, g, or t
  misc_feature (225)..(225): n is a, c, g, or t
  misc_feature (266)..(267): n is a, c, g, or t
  misc_feature (272)..(272): n is a, c, g, or t
  misc_feature (276)..(276): n is a, c, g, or t
  misc_feature (305)..(306): n is a, c, g, or t
  misc_feature (308)..(308): n is a, c, g, or t
  misc_feature (313)..(313): n is a, c, g, or t
  misc_feature (333)..(333): n is a, c, g, or t
  misc_feature (339)..(339): n is a, c, g, or t
  misc_feature (352)..(352): n is a, c, g, or t
  misc_feature (362)..(362): n is a, c, g, or t
  misc_feature (368)..(368): n is a, c, g, or t
  misc_feature (396)..(396): n is a, c, g, or t
  misc_feature (403)..(403): n is a, c, g, or t
  misc_feature (407)..(407): n is a, c, g, or t
  misc_feature (409)..(409): n is a, c, g, or t
gccggagagggctatggaaagccgccggcggggaatcccggccgtagagggacagtggataggtgcccgaggcctacagctggnctggggctcgtgtctgggcttcggacgttggggcccggtggnccaccctttccgtagttgtcccaaatggagctggaattggatgctggtgacaaganctgctggcttcctgctagaggaaagtggagattggggacgganccgatgaggccgtgatggccccagtgactgtgcgctgcgcnnttctngagngtaccgagcgactgggaagtagatgattnngntgtgntccctgctgagtcccccagngtcgtngaacattctcagnctcctccaanccctgncttgtccaccatgaccacacctactccnctcccangggnanactgtctctatggatctagagagtgagagctgtagaaagaagtaggggacccaagatgactccagcagcatatggaggagctggcagagcaggagattcgctaggctagtactgagcagcatgagcgagaagagtctattggcagaacgcgaggggcttattctgcctgagacacttcctctcgactaagacagagggaacaaattctgaaacgtgtgcggaggaagattcgaactaaaagatctgctcgaagagagccgcaggacaacacagaccggtgtatgtagggggttccgagagcagcggtcttgaagataccacagcccagaatatggccgcttcatgaactaaacgtacagcttctggagcaacgagaatttgtcccttctagaatcaacgtgagcgaagctccaggccatgggtggatcgacgatatctaacgcagaacctgtaggagccagtacctgcatttttggtgccactaaatctcctttggctccttcctgttcctctatgacc

SEQ ID NO: 665614 - DNA, 480 bp, Homo sapiens
  misc_feature (8)..(8): n is a, c, g, or t
  misc_feature (14)..(14): n is a, c, g, or t
  misc_feature (203)..(203): n is a, c, g, or t
ggcaggcngatgcntgaaaaacctctttctaaaaggccctttgtttatacttttttttttaaccagagtcattccaactgagtcctttgaattacctgctggaaaaactaggattcattttggaggcctgagaaagaaagagtcatggtagagttcctttttggatttagctcaataatgatggtcaagattgggcaatgggntgcgcgcatggctcatactgtatcccagcactttgggaggccgaggtaggcggatcacttgaggtcaggagttcgaaactagcctggccaacatggtgaaatcgcatctctactaaaaatagaaaaattagccagatatggtggcacacgcctataatcccagctactcgggtggctgaggcacaagaattgcttaaatctgggaggcggaggttgcagtgagctgagattgagccactgcacttcagcctgggtgagacaatgagattctgtctcc

SEQ ID NO: 665615 - DNA, 479 bp, Homo sapiens
  misc_feature (13)..(13): n is a, c, g, or t
  misc_feature (69)..(70): n is a, c, g, or t
  misc_feature (78)..(78): n is a, c, g, or t
  misc_feature (252)..(253): n is a, c, g, or t
actgtatcccggngagtgcagaggcttaaggtgggatggcagaagaagctatgcaaaaaagtggggagnnggaggctnttgttataaacaacacaaatgaagaaccaaccccttctgtattctgaagctgagcagagttaaggaacctcaaggacaggatgtctacttactgatgggccctgagggctcttggctgggtgttattcccctctcttcagatggagctttggacaagatctgaagttgattctnntggaagtcagagataagcagtatgtacttgctggttttggttggctgcttttaaaagaatcagaactgaagagtgggtgaagacagagggatgtaaagttaacctatgggaagcagaatgaataccactatactgccatagtttcattttaaacaaaatagagtcatagaccagaccaaagtattaccttgcttctgaaagaaatgtctccctccccgggatacag

SEQ ID NO: 665616 - DNA, 94 bp, Homo sapiens
gtcccctagtagccgggccattgctgccacctctggagaagctgggcccccaagaaactcctcggccactgtgactatcaccaggatgatgcag

SEQ ID NO: 665617 - DNA, 456 bp, Homo sapiens
caatccaaagaaaaagaaaaaaaaagaaaaaacattaaagccttaaacttatattaaaagcttttcttggttattggttgaatattccacaatatctggggctgttaaattaccttttattggcattaagttgccctgcaatctggccgtattacattatgattaatcccactgaattaatttctttaagttacccacaaccaccttcctgttccaatgttcccaccccattttaaatattattccagagttcctgtttaccttctgatttgatattaccatccataaaatctttggagcaatttgtaagttccgggttagttgctattagattaccgattaaggaaaaaaagttactttaactttcccccaaaggttaacttccctttacgaattaattaagtttctgcttttattatttacgttatgtattaatttaccctggctttcttctac

SEQ ID NO: 665618 - DNA, 87 bp, Homo sapiens
gcggccgcctactactactactactgctcgaattcaagcttctaacgatgtacggggacatgttaaatgcaaataaaactagttcat

SEQ ID NO: 665619 - DNA, 228 bp, Homo sapiens
gctatggccaaactttttatttagtattctgcagttgtttaacacacacttaaatggtcttattgggggaagggaaaggggagggccttgcaaacccccaccgaaatgtcagaaaggcccaatggccccccttttccaatcgcttctttgggtccaccgggcgaacaccactccccttacataggcctgtgatcccaggttcttcgtactgagaacattgaaattcca

SEQ ID NO: 665620 - DNA, 158 bp, Homo sapiens
  misc_feature (68)..(68): n is a, c, g, or t
  misc_feature (85)..(85): n is a, c, g, or t
tccctctcacagcagtctcgctgttgttaactgttttctctgcttgaccacagtggcctcttcctcgnggctctgggcgtgacantgagaggtcatgctccccgggggccacaccactggtcctccacttccccgagtgcttctgtgctagtgcctcg

SEQ ID NO: 665621 - DNA, 1401 bp, Homo sapiens
gactcctatccctcagcaatcatggcaagccaaagccatttatccaggggaccactatgagggaacaaagttctaggcattcatcatagtactaagtctgcccgtagcaaagtactcgctctagtgtataagcattcacagtccatccagaattcactcatattgtatatctacttcgaaaccgcacttatcccgagctatggctatcatcattccagatgtgaggcgacacgatgcctagaatgctctgtatacgtcaaggcctcgattactatcgcgtaattcataatgaagcctaatttagagcttcccatgtacctctcatgactcaatcggccatcgttaatattaagactcgactacatccaccgcataagggcgtcagtttaacatccaatttcgttacataactctacttcgtgctactgagccgccatagcatacctcatgcgaaaagcgtccttcgtagcccgcacatcaaatatacacttgatagcacgtataggctgtcacaaacaaatagaggcatatatacaatcaaggtaaagcacgaataacttctttttcacacgcgacttcccgaaggtataagtcgacttcgccgcgtgtggaaagaagacggccacaaattggttcggggcataaggccccctcccattcggtcgtctgcgagttccacaaatgtaggctaagcttgtggtcggcgccaagtaagcttcctttggtacaaacgttacagagacaaggggaagtcaatggcggtacatatagagtaatctgggcccgttcaaaaggcacttcccaattatccatccgaaaaacccaccctctttggagacgcaaaatatatcaacaaatagtaggccaccgtaaacaccagccgtgttccccggttttggttcaacattgagtaccccccctttaagtggaagtggttatctcacaattacttaaacagcaaagggcgtaccgcaagtgcttggagcctttaggctgtaaccaaagaaccaaagtagggcttcacataagagtgccggactcaccatttgtggcgacttaaaccttccctttctaaacttccaggtcgccaacacattaatgggcccccttccggataaggtaaaacccaggaccaacatttgctgaccagtgtccgaaaaaaagcccccgctctggaaaaggcattttcacccgagggcaggcaggttccaatttgcttccacttaaatgttcgcgtcgcaccaccggggaccttttaacgagttcccctgcaatttgaaacctaatttttcctgagacccttaaaggcacaaacacttccaaaagccttacgggacagccgggcaccatccacaaagggtgcgggacattcaccattaggtcctcttcatccgtggcaag

SEQ ID NO: 665622 - DNA, 168 bp, Homo sapiens
  misc_feature (1)..(1): n is a, c, g, or t
  misc_feature (53)..(53): n is a, c, g, or t
  misc_feature (55)..(55): n is a, c, g, or t
nctgtgttatcaagaacattatggtcaggcgcagtggctcaggcctgtaatcntnacctcagtgatccgcctgccttggcctcccaaagtgctgggattacaggcgtgagccaccatgcccggccagggttttacatgtatttggcttttcttttttctttttctttt

SEQ ID NO: 665623 - DNA, 186 bp, Homo sapiens
acgggaggacgaggggagacggaagcactcggcaagacgaaggaaatgcgagggaacaccagaagccagaggacatgagtgacaacgaccgtccctagagcctcgggacagagttcaaccctgcggacaccttcattcgtggactttcacacctccacgagctgacagctgagagaataaagtatc

SEQ ID NO: 665624 - DNA, 312 bp, Homo sapiens
tgtcagatgccgttagtgattcaactgtgaaataaaaggtccaaccataatgcttaaaaaaaaaaaaaaggccagcatggtggctcatgcttgtaatcccggcacttggggaggccaaggcagaaggaccatttgaggccaggagttaagagaccagcctgggcaaccaagtcagatcacatctctacaaagattgtaaaaaaaaagaataagccaggcatggtggtgtccatctgcagccctagcgatctgggaggatgaggcagaaggaccgcttgagcctaggagttggaggttacagcgagctatgat

SEQ ID NO: 665625 - DNA, 242 bp, Homo sapiens
ttgtgtgggctcggtctgttgtcaagtcggctcttctccagtctaatctcgctctctatgagtaggcaaactgtcttgaggtgggggtgggggtcgcagagtcaacttgtcagaggattaacaacaattcaatgtatatgcctcttctttggatgacatacttcaatgtactacatgcttaatgcaaactaacacaagtagacacatgcactgtacagtgggagagtacaacctgccggtgg

SEQ ID NO: 665626 - DNA, 100 bp, Homo sapiens
aggagactttgtatttagaatattcatgtaaaacttgtgaacaagctttcattttgatcaaactgatcttccgttttattacaaaaatgaaggtcgacgc

SEQ ID NO: 665627 - DNA, 136 bp, Homo sapiens
  misc_feature (29)..(29): n is a, c, g, or t
  misc_feature (100)..(100): n is a, c, g, or t
ggtcctcaacagcatgtggcagtaccganatctgaggagtctctacaaaaaggatggatggtcacaataccactttttagcctcgttttcaaccatcganagggaccggcaaaggccctactcctcctcccgcacg

SEQ ID NO: 665628 - DNA, 85 bp, Homo sapiens
ccgagcccgggaaaaaaaaagaaaaaacccccccggaaaaaagtgttaaacccccccccacagaaaaaaaaaaagggcgcgcttc

SEQ ID NO: 665629 - DNA, 403 bp, Homo sapiens
agtggtggatatgtacatctaggaataggattgcgcatgtgtgtccctagggtaactggtccgtgggtcaagtgatgggatcaattgaatatagtagtgcgctttgactggtgaagtcttagcatgtactgctcggaggttgggttctgctccgaggtcgccccaaccgaaatttttagtgcaggtttggtagttgcggaccggtgagtaagtgcgagtacgtgtagcattcaataaactatagtctccatagggtctgctcgatcatgctgggttgcgcgtaagggccaggaggcgcatagggaccaggatatcgcaacctatgcgcatcttttaaatgggtaagaagccctgctcgctggcgtgtagccgggggtggaatgcgagcgcgtacgggccagca

SEQ ID NO: 665630 - DNA, 213 bp, Homo sapiens
agaaggaagttgtggaagaggcagaaaatgtgtagagacgcccctgctaacgggaatgctaatgaggaaaatggggagctggaggctgccaatgaggttgacgtagaagaggacgacggtgatccggaacaggagattaaaaagaaagcgagagttcacggactctggcgataaagctgccggagtccgcggcggcggaagaggcgcgcggcg

SEQ ID NO: 665631 - DNA, 320 bp, Homo sapiens
ggtgcgacctgtgggattaatgggtgccatgtaatagaaacaagcagatttgtgggtcatagatctgggcagagctcagctgggcaattcttctactctttgtagcctggactgaggtcatttggtgtcaccttgcctggaaggttccagaatcttcactcacacatctgataccttagtggtgatggctggaagactgagcttagctgggattattttctgtctgtttgtttttcagacggaatctctgtcacccaggctggagtgcaatggtgcagcctcggctcactgcaacctttgcctcctgggttcaagctatt

SEQ ID NO: 665632 - DNA, 222 bp, Homo sapiens
aatctgggcaacaaagtgagaccccatctctacaaaaactaaaaataaaaaattagctgggcatgttggcacacacttgtttatccgctactcggagactgaggtaagaggatcacttgagcacaggaggctacagtgagctatgatcgtgccactccactccagcctgatgacaaagcgagacctgtctcaaacaatgggggaataaagatatagtcattg

SEQ ID NO: 665633 - DNA, 776 bp, Homo sapiens
tgactgtgctgacacaatacaatggctcggagctccgggtgctcagatctcatgacgttatgagtccttggtaccccgcgtgagatataattgtctctactgtgctatgctctttgaattctctctcgttcaatagttgttgtacgcagtatggtagcgtgaccaagtaagacaatctggcttgcaatctttaagattgcctaatcgatctcagggttaatttcatctcgtgcgcaatgcttacccttcgattgaggcgaatatcgaccatgaatttatcgcgttgttcctatcgtatatgcgatatatccaaaatcatatgtagcacatgtgcactcctatcgagttccctttcgtgaaacgatgacctcgttttagcaacttctacaagatcgcataaaatcaatatacaacaatgcggggaaaatggtgcacaaacgaggtcatttgaaattgagagaacgggcggaatcactcaaaaacatcaatcttttaattaaaatctcataggaaattgaagaatacttttgtaccacaacaaaaacatctatataagtaaagtttgaacttagaggaagcgaccttcggccctttagacattattctgggaaactggctgctcccatgtgaaacaggagcactcggctttttacagctaacatgcgaaacaaacttcttacgtgggaacacacactccactttgcacacggaacgaattccggaattatgtatcaaaacaatccgtttgtaacctacctatagataaatttccctgg

SEQ ID NO: 665634 - DNA, 1235 bp, Homo sapiens
gacgtcgcgttgagtatgtcgatcaaaatgttgtcacgatcacagcacatggattcccttgcgcattcctgtgttcgtgcccagcagcaacgtcgttagagcaggtggaggaattacgtgcaacagtcattccctaatggaattaaccagcgccatagtgcgggcatcaagacctctatgcgtagctttcactgcgtctttgcgatagacgtagagtcggtagaggtctatcatctggtgtcgcggaaatctacgtaggattggccaacggatccacacgtggatacacacgaagtgaaagtgagtgtagtgccttgtacaccatatgtcagagaacagccatgcatgtgtagttgtgggcattgcttgtctcaagatgcaaagcgatctgagaggcaatcgagagcactaccaatacacgtgtcgttggggtatgaagtttagtagtgcaagtgcgattgacttgacacggtaaacgtccgtacttagagtaagacggttaggagactaaaggtactaagacagacagcatactgccctttaaaacccagagataagattgccttagcacgattgaggctcgggactgacctggatgtgtcaccgcaaaagcacagctggaaagaaagggccgtcacgagacggaagcccagacaacctaaagcggacacagtcgaatcgccgcagccagatagccacacagaaacacagaatgccgtacagcataaaccgacagggacacaaaaaacaagggacgcacactgactgcaagacgaccacaaggggaaagcgagagccaccgatggtgcaacaaaaccacagaccaaggggcccgagcaagaagggatcagcaacaaaaagagtaacatgagaaagcgaagtaggatagagaacacgtaccagagatagcatcaaataaaaaccggggccgaccacattgcccacacgcctacaaacaaagaccccaagcaaaaaaaaaaaaccaaagcaacacaggccacgcaagaccaccaaagcataacataccaaaaaagtgacataaaaagtatgaaatgcgacattataagaccaaacgaccatcacatggagacagaagacagagaacgaaaaagacaaaaacaacgcaaattcaaaccaaagagaagaaacatagactgaacagggaaaacaaaaacacgaaaggaacaactgaacaaaaaatagcatgactagaagtaaaacacagtaaatagaaa

SEQ ID NO: 665635 - DNA, 218 bp, Homo sapiens
  misc_feature (149)..(149): n is a, c, g, or t
ttttaaattctttttagattcaacttttaaaaaatacattaggccaggcatgatagctcacgcctgtagtcccagcattttgggaagccgaggcagggggatcatctgaggtcaggaagttcgagatcagcctggccaacatggtgaanccctacctctgctaaaaatacaaaaattagctgggtgtggtggtgggtgtcttgtaatcccagctactt

SEQ ID NO: 665636 - DNA, 276 bp, Homo sapiens
ctgaggcaggagaatggcgtgaacccgggaggcggagcttgcagttagccgagatcatgccactgcactccagcctacatgacaatgtgacactccatctcaaaaaataataataataacaatataagaactagctgggcatggtggcgcatgcatgtagtcccagctactcctgaggctcagtcaggagaatcgcttgaacttgggaggcggaggttgcagtgagctgagctcataccactgcactccagcctgaacagagtgagatcctgtcaa

SEQ ID NO: 665637 - DNA, 234 bp, Homo sapiens
tagaggatcctccgctctcacccaccccgggggctggccccacagcaccggggctgaatcggccaagaccaggcctctctcatcccccgacgtgggtattaagctctgtggattccaaatggcaccatcaggctgcattcctccatgagccggctcttgagcagtgacaggacataaatcaatgtgttaagaagtcagagtcagtgtggaaaatgaggggtgggtggagagcgg

SEQ ID NO: 665638 - DNA, 118 bp, Homo sapiens
ggtaccccgtggtagcaacctgggaaacagcgccctgcagcgccagccccagcgccgggaacaggatgaaggtgcagcccaggatcagcgcgtgcatgcctgcactgtcttacgccgg

SEQ ID NO: 665639 - DNA, 187 bp, Homo sapiens
cgcgagtatgcaaacttggacaggtggtgtccatgaactatacggtcaatcttctccagagacccgacgcttcgtctgcaccagcacggacttgcagaggggtgagcacccgctttcttggttcccacacacacagcctttcagcgatgacaaagtcttcggctcactatcacccatacgtggacaa

SEQ ID NO: 665640 - DNA, 805 bp, Homo sapiens
tttagattatgccgtgcaactagtcttaaatttaatttgccaaaaaatggcatatcccagtgtgccccagtcctcatacctaaggtcccacctcagattggcacctgtgcgtgtatatggatacactttccccccaggaccctgcctggttatgggccaggtcagcccagtaaactcgtggtgcctcactcacgaggttctgggttgaggccctcgtcccgcctcagtgctgtcccgagctgccgagccaggtccgcagtcccccgtcttgcctctgtctgccggctgctcccggtggcctgatacctactggcccccatctgggccctgggctgacacgttggcgagctacctgctcacatgtcgctacctcgactccctggcatcacagcttcagggtggaccaattcacccaacgtcagattcggcccgtagagctaggtctcccgccatttcttcccgtaacagcacctgcagctactccaggctctgggtcactaagcacagtgcttgccccatctcacggacacggtcctccagggctcccgaaagctcggggaggctcatggcctgcagggacgcttgccagcccttgaagtcaagctggggggacggctaggcccataagttggctgcacccagggggcatggtcctgccatcactctgagatgacacgctcagcttagacaggctcgcagactggtccaggacaagggcaagatcccgggccaggcccaagtctcccgaagccgggcctgagaggtcctcgcgggcgcggtcttgctcccagcaagcaagtctcga

SEQ ID NO: 665641 - DNA, 1642 bp, Homo sapiens
tggactttaagttcacatttttaaaggtttaaaaactatggttaacagagcagttataagaacagaactctcttatatttctttatttacaccacacactaaaaaaaaaaaaaaaaaaaaaaaaaaaaaaaggggggggcggggccaaaaatttccccgaggagggggcccacaaaggttaagacgagcgatacaccccgcgagttttgtggtggccacacaagggggcgcccccataatagagagaggagaagcggtatatatatataagacgctaagagcgccgaggggcgcgagcgcgttttaaaacaaacggctggagagagacggggggcaaacaagcgcggaacccgctcgggggggggcactcctttggggggaaaagagagagaccaccctctataaaatttcagggagagggggggtgcgcaactataatttttgtgggacgccaaaacatatatcacttataccgagagaagagatatattcaaagacgcctctacagaggggagaaacttttatacaacatctttttaacaaagtgtggtgatacacacagagcgggtgtgtcaaacaaccacacaagcgctgcgccaaataacgtgcacgtgcgcgcgagcaccgtgacaagaacaaccattcagtgcgcgcaaaacacccgaggagagctatacgtgaccactttccgcgccacacacaacttcattatataacgcgagcgggggcgcaccctactgcctaccaacacacccacaggacagaaaacgaccacacacaacagaaagcaagaaagacggcaagaaaggacaagaaagagtaggaaagcgatgagaagaccaacgtaacgaaatcaaggagaccagataaacacaagcgaggcactcaagagaggaaaagaagagcagatcgaagaaacaagaggaaggacgaaaacaaaacaaacgacaagataacgcgacggacaagaacgagaaggcgaggagataacaacaatgaaaagaagaccaacgaacgattagtatacacacgaacagagcagaagacaagaggaagagcgaatagaaagcagaaccgacaagagaagaaacagagaagaaacgaggataaccaccagaagagagcgacaaacaaggagagaaaggagagagagaacaagagagagcagagaaagaagaaaagaaacaacaaagaaacaaagagcggaagacagagaataacagcacagcaccaagaaaaaggaaacagaagacgagaaaacgagaaaaaggaaaggaggacaagacaaaggcgcgacaaagtgaaggagaaaagagcgacagaaaaggggaaagcaaagacaacgaaaagagagaacgagaagaaagagaaaagacgaaagaaaaagcaaaaggacgaacgagagaaaacaaagagacaagaaagaggcacgagagagaacagaagcaacatagaaaaagacaagaaccacaacaacaacacacacaataacagaagagagaaacaaacagaagagaccacacgaaaagcaggtcgaaaagaagaccacaaaagcagcagcggagagcaaggaaaagaaggagaaaacgagagaacagcgagaaaacacgtgaagagacgaacaaaccaacccgcacgacaa

SEQ ID NO: 665642 - DNA, 119 bp, Homo sapiens
atgaaaatgattgtaatctgtagacttattacctgggagatgtctgatgtaaaatcccatccttgggttgtgggtttttgttttctccaaataaatctgatctttaaagttcaaaaaaa

SEQ ID NO: 665643 - DNA, 968 bp, Homo sapiens
tagtcatcggccaagctttaaggtaggaaaaacgtcacccttgggcgcttcacacggcgaagccagttctcttggcgattgcgtttcaggccagtaggcgctatctaccgagtgccctctttgagttagttgtgtcctcgaaccggtgacccctaacggggctagcgggccaaatttatcttccagtcctccagaagggacgatactctcttaaaacttccaaggggataaaaactcaccccaaagaacgcgtttttgtagcgccaaagagggccttttgtttcgtcgctacttattacgcaatggacaactatagaccagccgtgtgcgacataagtttaaaaaaaacccccataggtatgcgacctgtacgtatgctagttgcccaaggaacagggaatacgccttattggcgtctttgaatgcttggggcgcatgtattttaaaacagttatggagacttggtacttctcagctttgggaaaatcattgtcgttgacagacaattgctcagacgagacctgacacccgtgtacaaactgtctgttattccctccataaccgaaagcttgcaggtttagagagtcttcagacaacaatagaaatggttgggtacatgatcctaaaatgtgttaaatggctaaaaggtaattaattccggtaaaaggggtaagttgttttggtttttggaaacgataaattctagaagttgctcataggaaaagcgtataacataggtcttcagaaactataaaagaattttcatatagtattaaaatccatagactaaaatctgagaattttttaacatatgcaagtcatgccaaacataagctaccaaaataaagagcaatgtgttctggctgttttatacttcaacaattttttccctaagtggtaagcaattactttaaaacatatttttaaaaacatcggtatcgggagctgcggtgtaaaccgccgtcgtc

SEQ ID NO: 665644 - DNA, 885 bp, Homo sapiens
  misc_feature (355)..(355): n is a, c, g, or t
  misc_feature (450)..(450): n is a, c, g, or t
  misc_feature (526)..(526): n is a, c, g, or t
  misc_feature (529)..(529): n is a, c, g, or t
  misc_feature (555)..(555): n is a, c, g, or t
  misc_feature (608)..(608): n is a, c, g, or t
  misc_feature (701)..(701): n is a, c, g, or t
  misc_feature (714)..(714): n is a, c, g, or t
  misc_feature (739)..(739): n is a, c, g, or t
  misc_feature (753)..(753): n is a, c, g, or t
  misc_feature (755)..(755): n is a, c, g, or t
tccagcctggatgacagagcaagaccgtctcaaaataaaaaaaaaaaattaaaaaataataacagcctctctggccactgaaaaacttctcactataaagcatgtattcaaggattaccaatgcaaatgggcagcaattaacctggagaccccatgcctatggcagtctcaagaacggaactagagatgctatgtttgaaaatcgacgcatgattaaagcgatacttctggaagcatgcagggcaggcggcccggccatgacgcacagactctgtacagccctgcagacctcagccaccatgctaacaggcggacacttttaccatgcaatcaagggcacgggatcagctgcttngggaagacttatttccaccccctccagtctctcaggctggagcgcagtggcgtgatctcaactcactgcaacctctgcctcctgggttcaggcgnttcttctgcctcagcctcctgagtatgtgagactacaggcacgcaccaccacgcccagctaatgttggtatttttngcngagatggagtttcgccatattggccnggctggtctcgaactcccgatctcgtgatctgcctgcctgggcctcccaaagngctgggattacaggcgtgagccactgcgcccagccaggaagactttcttcatggcaaacagtgggttctttcaggggacatttctgtaatgtncaaaagaacctgnaaaaacaaaagcacctagggagacngaagactgggaaangnccatgaagggcagagctctctcagtaatggaggaacctaataggactgctgctaatggagcccaggtgagcctggattgcaggccacgtggaccagcaccaggttgtgtgagtgcgggtagcctcttagg

SEQ ID NO: 665645 - DNA, 950 bp, Homo sapiens
  misc_feature (420)..(420): n is a, c, g, or t
  misc_feature (515)..(515): n is a, c, g, or t
  misc_feature (591)..(591): n is a, c, g, or t
  misc_feature (594)..(594): n is a, c, g, or t
  misc_feature (620)..(620): n is a, c, g, or t
  misc_feature (673)..(673): n is a, c, g, or t
  misc_feature (766)..(766): n is a, c, g, or t
  misc_feature (779)..(779): n is a, c, g, or t
  misc_feature (804)..(804): n is a, c, g, or t
  misc_feature (818)..(818): n is a, c, g, or t
  misc_feature (820)..(820): n is a, c, g, or t
tttttttttttgagatgggggctccctcttttgtccaggctggcgtgcagtagcgcaatctcggctcactgcagcctccgcctcctgggttcaagcgattctcctattctcctgagtagctgagattacaggcgtgtgccacgacgcccggctagtttttgtatttttagtagagaccggggtttcaccatattggtcaggctgatctcggaactcctgacctcatgatctgcccgctttgacctcccaaagtgctatgtttgaaaatcgacgcatgattaaagcgatacttctggaagcatgcagggcaggcggcccggccatgacgcacagactctgtacagccctgcagacctcagccaccatgctaacaggcggacacttttaccatgcaatcaagggcacgggatcagctgcttngggaagacttatttccaccccctccagtctctcaggctggagcgcagtggcgtgatctcaactcactgcaacctctgcctcctgggttcaggcgnttcttctgcctcagcctcctgagtatgtgagactacaggcacgcaccaccacgcccagctaatgttggtatttttngcngagatggagtttcgccatattggccnggctggtctcgaactcccgatctcgtgatctgcctgcctgggcctcccaaagngctgggattacaggcgtgagccactgcgcccagccaggaagactttcttcatggcaaacagtgggttctttcaggggacatttctgtaatgtncaaaagaacctgnaaaaacaaaagcacctagggagacngaagactgggaaangnccatgaagggcagagctctctcagtaatggaggaacctaataggactgctgctaatggagcccaggtgagcctggattgcaggccacgtggaccagcaccaggttgtgtgagtgcgggtagcctcttagg

SEQ ID NO: 665646 - DNA, 521 bp, Homo sapiens
agagcttatcagtgcattgcctggcactgaatggtggcccagagaaactgtaactgctggtatctctcagccagaaagaaaatagaaggcggaatttctggcctgatttggaggggtagggagggggcagaggacatccttgtctatgtaaactgagtgtgcagtccaggaagagaaggtctcgttgtctttgtgggggcccagcataatcagggtgctcttattgttttgaacagacaccaaatgacagggctgtcatatagctctgagctcggatccttaggtctttcttactctgaaagctgtagaagtgggagaggaccttagcttttctctcgaagtcccggtgacgtcccggcagatagatgtagggtgttgcgttctcctgaaggtggggcattgtgatgctggggcactggtgggaagtcagagtttagtagacattcagctgtttttttgttttgtttttgttttgaaacggagtccagcctgggcgacagagcaagactccatctcaaaaa

SEQ ID NO: 665647 - DNA, 917 bp, Homo sapiens
tcgtggtggcctgctctccatggctttctcggttgatccccggcgattagttgttgtcgatttctagagcgcgtgtgcccacacgtacgacgggtgtagtagtctccccccccccgtgtggggtgtgcaccacggccccccccgggggatttccagccagcacgcgcgtctttgagacaccacccccagctggggggtctggccgttctgaggacaaaatttaacccgcgcgtggctcccatcactgcggaatgattttctatgcacgcggaacgaacgggtgactaggtacgtctgacgtcccacaatagttggtgtcttaaaccgcggacactttctcaagctgctgcaatgtaaccccccctcttatgcccgacgcctaaggattacaaaatcaggacctagtagtacactgcaggaattgtgttaaaaacagcgagtagcggtatttcccccccccaagagtttttaaagttgagtgtatcccccctttatttgaccgcacgtataagcgtgtagttggtggccagctccttacaaacgcattttaaactctttagaagttatttcccccctacaactcccattattgttttgtctacttgatgtttaaaagatgcccattgcgcttttttcattcacccacacatggcacaacaaaggtacttctgcacaagatcattcttgttcaccttacaatggccccccattgtcacccccccctcggtccccccattgtctaacgctcctccccccattggctaaataaagggtctttacttatacgcccctctgtataataaatgaccccctgttttaacaccccccttcttttgctataagccactaatagaactcagttcctacacccagttgcatagtgttttttgaaaaaaccccgggaaaacaaacaaaac

SEQ ID NO: 665648 - DNA, 578 bp, Homo sapiens
  misc_feature (551)..(551): n is a, c, g, or t
gtgggcgcctgtagtcccagctactcgggaggctgaggcaggagaatggcgtgaacccaggaggcggagcttgcagtgagccgagattgcaccactgcactccagcctgggcgacagagcaagactctgtctcaaaaaaaaagccaggcatggtgtatttggactgtggtcctgggagatggaggctgcagtgacctgacatcacactgctgcattctagtctgggcaacagagtgagaccctatctcaaaaaattaaaaagttaggtgaggctgggtgctgtttacacctgtaatcccagcactttgtggggctgaggcaggcagattgcttgaggtcaggggttccagaccagcctggccaacatggcaaaaccctgtctctactgaaaatacaaaaattagctggtcgtggtggctcacgcttgtaatctcagctacctgggaggctgaggcaggagaatcacttgaacccaggaggcagaggttgcagtgagccaagatcacaacactgcactccagcctgggcgacagagtgagaccccatcttanaaaactcacggattcctctgttggggg

SEQ ID NO: 665649 - DNA, 833 bp, Homo sapiens
gaggtgattccaaccaccctttaagtttctcataagcataagaaatttatttctcgatggttctcagtggctgggagagtttcctgatcaatggactctttgctgagtgtgcctactctggtgaggctctgccttcctggttcactagctggccagtcttcttctgtgtctttacctgggacgaatagggcgaggcaagtctctggcttctcttcttgtggggggactaatcccagttccacaaggtgttcctcctcatcacccagtcacttcccaaaggaaacacctccaaatataattgcattcaaacattagattgcactgtgaatttgcgggggacataaacattcagtctatagcagcaatgaataatatattgttcctggagaaacatattccagaaaaaccttttccctgaaactcactcctctgtaatctgcctcaaccagctcattgcctggcctatctgtaggaactcagtatcttatctcatcctacaaaaattgacttttatatcatacagtgctccataacctatctttctcacttattcacataatcatgtcatgcatctagcttcctgcgctgtcagtcgactataccattgctataaccccgatctcacgccatgccaacaacatgggcctattcaacgttaatcccaacaactctacagacaccccacttttcacctcgcaatccccttaacccactttgccacaattcaaactctcttacattttcaactgcccaggcaccacacccacgaacgacacacttgcccacacaattctccaacgtttcacaactgtcccaacaattgacacgaaatc

SEQ ID NO: 665650 - DNA, 374 bp, Homo sapiens
cccgtatttctaacattagtacgcggaatgcaaaatggtatggtatagccattttggaaaacattttggcagcttccaaaaaagttaagtataggccgggcgtggtggctcacacctacaatcccagcactttgggaggccaaggcgggcagatcacctgagatcaggagttcgagaccagtctggccaacatagtgaaaccccatctctactaaaaatataaaaattagctgggtgtggtggtgcatgcctgtaattccagctactcaggaggctgaggcaggagaatagcttgaaacctggaggtggaggttgcagtgagccaagatcgtgtcactgcactccagcctgggagacaaagcaagactccatct

SEQ ID NO: 665651 - DNA, 371 bp, Homo sapiens
  misc_feature (119)..(119): n is a, c, g, or t
  misc_feature (142)..(143): n is a, c, g, or t
  misc_feature (212)..(212): n is a, c, g, or t
  misc_feature (233)..(233): n is a, c, g, or t
  misc_feature (289)..(289): n is a, c, g, or t
cacacagaggcatttgcaccagctccctgcacacacgtgcctggcgtgctcagaggaacaccaataatgctcaggaagacagggcttgctcaataatgtccggctgtcatttctccacntaagagccttccatggctccctnntgcctacagcattgaatcccaacaagtcatactctttggactttgaaggttctccaccctgtgccccancctccccacagagctcttcantctgtctctgttccctgctttggccagtggctatcctcattgtgacccacactacncctctgcccacactgcagctctttacccagtaaccctccagttcctcacaacgtatgcctatttccgtcatgccccggactg

SEQ ID NO: 665652 - DNA, 1746 bp, Homo sapiens
  misc_feature (722)..(722): n is a, c, g, or t
  misc_feature (793)..(793): n is a, c, g, or t
ttttttttttcccaaaaaagagattttttttttatatttacaaggatacctgacaaatatagaaacccaaaaagggacccccggggggggcacaacttctatgtggtttccccctctccccaaacaaaacaggggggagggagggtgtgcgccccttacccctctttttgtgtgctcaattctcgggcgcccctctttgctctccctctctgtggtgtgccgtctctcctataggggcgcggggggcccccacactcttctctcgctgtgagagacagctgtgggagtatagtcgtcgcggtctcacagcccagcacactctgtgtcacagtgtgtcccccacagagacctctctctctttctctccacacaaagagagagagagtttctctgtgtgagagcgagagagagagagacactctgtgtgtgggcccacaaacaccacaagagacagcgcagaatgtagaagcgtatgtagtacacatattgtgtgcgcgcgcgtgtgtgtatacgcaacgcacacgcacaatagtagcacgcgcgtatgtgcccactaaagaatatgtgagacacattgtgtgtacacatcaaaaacaacacaaacacacacacatgtgtgcgcccacagagcagtgtgtttagtctgtgtgtgtcgacacatcacagagagagacacaaacacagtgtgggcacaccagcagaaacactctgtgtgggggganggccgccacagagagaagagagacaacaccaaagaagagagagaggtgtgtgttgtggcgagaccacacgngctgcgaccagaagcggaggtgtgacaagactctctcctgtgtgtgtcatctgtcgtcgtggtggcgcgccccccacttctctctgccgaggagaggcggggggggcgacaccacatgttgcgcgtcgtcgacagttgtgtgcggcgggaaaaaacgcacaacaatgttctgtagcgtggtttttcaggcgggcgagaacacctcattcgccccgccaccaagggccaccacccttcttcttctctaggggtgttggtggcggcggcgcaccccaccgcagggggggcctcttcgtgtgggggggccctattcacccggcggtgtggcgccccacaattgtcgtgtgtggaccgcgtggcaggatttctctccccgttagtcacgcgcccacaatcatttttttgttgtgtttgtcctctccagaaaatactccccccgaaggggggggggagaggagggcgccccaacacggggtcgtggggtcttctttgtgttgcgccccccacctgggggtgatacaacaacgagggcggccatggctagtaggggcggaggaacactaatccacacgccccccccctgttacctgcgtcgctacactctatccagtgatgatagcccccgaagagaggggggcggcgggcgtccgttcccccaaccccaccttaatatagtatgggaggcgggaacacgatctacggcaaaacatctggtgtgcgagcacagcagacgagcatctactacactagttgagtagcccgccccgccacgttggtggtgtgttgcacacacacaacaacaaacatagttggttggtctgtgggagggaagacaaacccccccggagtcgggggcggcacgcaacacacccccgccccgctccatagattgtggtgcacaccacacatcggtctggtttgctgccagcgcgaacacgaggtcaccaacaagc

SEQ ID NO: 665653 - DNA, 384 bp, Homo sapiens
  misc_feature (235)..(235): n is a, c, g, or t
ataattgtgagatgacataaggatctattgagacctcgaccagggaacagaatcaacctgggtctgggataaagagtcactgacatgataaagtacgtgaaagccaagcggagtgaagatgaaatgggtgggtggtttcccgttaaagagttactgacagggttgtccaacgcctttgacaacccttcatcagcatgaacacattatgggcttgcatgcgttggtgcgacgccanggtgtggcatgcaaacggtaagtcaacacgttccctgatctcaggaggaggcagaactaattaacgatttctgtgggaataacaatctagacccacgtctcctagcaccgtgctcaacatatctatagctcttttatttacaatttatt

SEQ ID NO: 665654 - DNA, 380 bp, Homo sapiens
gctggcaggaggcctgggtctcaccagcaggagtgcgtgcaaggtgggagggtcggtccattacagaccccacatcctggagcacccccatctcccatgtgtgaagtagcttcctccctcagcctgcaagggtccgatttgccatcgaaagacgacctctacttttttcttttgtattttgataaacactgaagaagctggagctgttaaatttatcttggggaaatctcagaactggtttatttggtgtcgtggaacctcttaccgctttcaatacacaattagtaatcaactgttttgtatacttgttttcagttttcatttcgacaagcactgtaattatagctgttagaataaagtctcttaactattaaaaaaaa

SEQ ID NO: 665655 - DNA, 174 bp, Homo sapiens
gaagaaggtggggaggaagaggaggaggaagaagaaggtgatggtgaggaagaggatggagatgaagatgaggaagctgaagcaggttcgggccaacgggcaagttgaagatgattaagattgacgatgtcgattaccaagaagcagaaagcccgacgaggatgactagacagc

SEQ ID NO: 665656 - DNA, 295 bp, Homo sapiens
tcacatccacacataccaaaatgtactctttcataagtgagtaactaagatctctatacctggaatatcatgtatgtgtcatttacctggatgtttacagttcaggaaggacaatagttttgtttatttacagcaactgaatacttataaactgttgttccttgggggttatttattccataaaaaataagttcttttctcatggatatataatacctatatgtagagagcacgacaggtgaacgattggtgggggggaggatagggcttatttaaattcaaattgatgtcttga

SEQ ID NO: 665657 - DNA, 256 bp, Homo sapiens
gaagagtgggatacaggtgtgagcactgcaccagaactcacaacaggattgcattagtgctctgatccacagcaattaaagaatcttcaggagcatgtgaatttatcaagaagagtctcactgttgcccaggctgcagtgcaatggcacgatctcagctcactgacaacctctgcctcccgggttcaagcgattcttctgcctcagccttccacgtagctgggattacaggtgacctctgagaaggatgtgcaaac

SEQ ID NO: 665658 - DNA, 283 bp, Homo sapiens
tatggagaagtatttcagctccagggtgcccaacccaaaaacatatcccagttccttgtaaaaattggccgggttaaggccgtctcacctaaaggttcttgggttttaagggcttggggccccctaaagtttaagtgaggttttccttccaatgagaaaaatttccctttttccccttgtcccgggtttaaaacccccccagcttgtataatgtacccctttgggggccccttttaatttggaaaagggtaaccccttcatccaataatttgaaaaaacccca

SEQ ID NO: 665659 - DNA, 524 bp, Homo sapiens
  misc_feature (13)..(13): n is a, c, g, or t
  misc_feature (73)..(73): n is a, c, g, or t
  misc_feature (78)..(78): n is a, c, g, or t
  misc_feature (114)..(116): n is a, c, g, or t
  misc_feature (222)..(223): n is a, c, g, or t
  misc_feature (313)..(313): n is a, c, g, or t
  misc_feature (332)..(332): n is a, c, g, or t
  misc_feature (357)..(357): n is a, c, g, or t
  misc_feature (373)..(373): n is a, c, g, or t
  misc_feature (484)..(485): n is a, c, g, or t
aattcgcggccgntcgaccacatggccaacaagcatatgacaagatgctgaacatcactaatcatttagaganatgcnaatcaaaaccatctagtcagaatggctgttattaannngtcaaaaaaaaaaggttatgcttcctggtcagggaacaacagaaagatgctggtaaggctgtcaagaaaaggaaatgcttatatactgctagtggaagtataaatnngttcagccactgtggaaagcattttggagatttctcaaagaactgtaaacggaactaccatatgacccaacaatcccatatgggtatatncccaaagacatagaaatcnttctaccctaagggacacatgtacncccatattttcactgnagcactattcaccataacaaaggacatgggaatccaacctaaatgacaatccatggtagaatgggataaagtgtggtcatacactatgggattacttacaccggcctaatnngatggagattatggtccttgcagcggacgtgggtgtgct

SEQ ID NO: 665660 - DNA, 461 bp, Homo sapiens
tgacgatgaaaaatgcaggcatcgtgatgggtcccatcagcctgctgatcataggcatcagaggacagtgcactagcatgggtatcctggtgaaatgtgctcaacacttctgccgcaggctgactaaatcctatgtggattatggtgatactgtgatgtatggactagaatccaacccctgctcctggctccggaagcacgcacactgaggaagacgtgtagtgaactatcttcctgattgtcacccagctgggattctgctgagtctattatgtgtatctggctgacaacttaaaacaggtgatagaagcggacaatgggaccaccaataactagccacaacaatgagacggtgattcatgacgcctaccatggactcgcgactctacatgctctccttcctgcccttcctggtgctgctggttttcatcaggaaccaagttatgttataccggggatcc

SEQ ID NO: 665661 - DNA, 289 bp, Homo sapiens
gggaatagttctatgcgagttataataggtccacaagatcaccatatgagccacgaacccctgcataggaataatcatatccggagccaacctgatggttcataagccatctgccatatctagatgggctccatgtatctattagcagagtcccaagtttcatcagcactgaaaccaaccatgccgtcgtaacggtctccaggtctccctccttctgtcataggccatgaggtctccccctctaggtggtggtggtggaggaagaggaagattccgagctctgctaccg

SEQ ID NO: 665662 - DNA, 879 bp, Homo sapiens
cgctggtacgcgccggaagttcgggatgccgcggctcatgcgcggtgcacagaggcttgtttcagcgatctgtaacaacaggaggaggccgcagacctcgtgatgaggaatagcaaggagagaattcacgctccagctgcaaagagcctacaaaatctgagactgtcattgcttttataaggattccagctttcccttcctggccagaaatgttcagcctggactcattcagaaaagatcgggcccagcacaggcagctgtcagtgccgaaacttgcgcgcccacacccgccgttccacctatggtgtgtctaccccataacccaggacgggaccatctctcgatgactctctagggacctagttacagacagagcttcgccacaggcgcgcagagaaatcttgcatcaagaggtgatgacttggagaagcaggcgcatcggaaaatctgcacatgcaggaagatcggaccgttagatcgtacgtgcatacataatggtaccgacggagaataggaaaggcgacgactgcactagtaaagatggaccaagtagcgtggcagcgtagcaacggctagggcagacccagacagatcgaggctgagcggcagggtgcgagctgccggctgccagcctgatacagaggcgggggtctggctaggtccccggactgagtggttgggacggcaggtccaagtgctcgagtgctaggctgatctggctcggctccactgatcgacagctggctggcagcccggacaccccaccatgccccgctacttgctggcgggcagctgaagtcccgagagtatccgcaccagcggggacccagggggccgtagtcgcggtcgtatagcgacgggaagaagaggacggcactg

SEQ ID NO: 665663 - DNA, 1012 bp, Homo sapiens
  misc_feature (335)..(335): n is a, c, g, or t
  misc_feature (377)..(377): n is a, c, g, or t
  misc_feature (394)..(394): n is a, c, g, or t
  misc_feature (403)..(403): n is a, c, g, or t
  misc_feature (440)..(441): n is a, c, g, or t
  misc_feature (456)..(457): n is a, c, g, or t
  misc_feature (460)..(460): n is a, c, g, or t
  misc_feature (478)..(478): n is a, c, g, or t
  misc_feature (505)..(505): n is a, c, g, or t
  misc_feature (513)..(513): n is a, c, g, or t
  misc_feature (516)..(517): n is a, c, g, or t
  misc_feature (525)..(525): n is a, c, g, or t
  misc_feature (537)..(537): n is a, c, g, or t
  misc_feature (541)..(541): n is a, c, g, or t
  misc_feature (557)..(557): n is a, c, g, or t
  misc_feature (591)..(591): n is a, c, g, or t
  misc_feature (600)..(600): n is a, c, g, or t
  misc_feature (630)..(630): n is a, c, g, or t
  misc_feature (634)..(634): n is a, c, g, or t
  misc_feature (642)..(642): n is a, c, g, or t
  misc_feature (695)..(695): n is a, c, g, or t
  misc_feature (711)..(711): n is a, c, g, or t
  misc_feature (721)..(721): n is a, c, g, or t
  misc_feature (938)..(938): n is a, c, g, or t
  misc_feature (991)..(991): n is a, c, g, or t
gaagtcataggacgggagatacaagtgagcacgagaaaatcctttgtataaccccccggggggaccactctttcgccaggctttttcccatttgtgcgacattttagcattatgttcaccaccatgtttaagtccgctgtaggtaaatcgtaataccatctcatggcttgagctgggtttatccggaagttcaagatatgcccgtttcgtcgttacggcagtatgatgccatgcaatgtccgcccctattttttttttagacgattgtgagcagtactagtccgcaaagtagatgagtccttagcaaagtgagctcatactatctgacatgactnagccgatgcagatagactgttccaaaaaaattttttacaaanattgaacattgtagctncaagacctnagcaggtgtcaacacaggacaatgttctcagctagannacatgcttcatctcnnctnagagagctgcaaacatcnactcctcagtttgagttagcctatatntcccaggncannagtatccnacactatagatnaagnagaatacctttctcanggctgaatagctcatagttcctctcctgcacccnagcctcacnatagcctacatagaatagactacactttcncatnttttgccncggctgagatcagtcactcaccgtacaacggggacagagccattcaccgttgnggatctctggaagtgngggattcagncagtggatgtggtaggaagaaggacaggtatcacagcagagcagttccccaccatccttgcagacccgacagaattccatatggtggtcatcctcctcttcgaggtctcccccaacctcttccaggatctcctcaccctccgaattgtcctctttagcttcccactggatgccttccttctcctgcagtaaaggaccacagattcagattattaccnccacccgccaccgcagtctgaagccagtgcccatcattcctttgaatgcttcncaagctcacaacacctcgtgc

SEQ ID NO: 665664 - DNA, 448 bp, Homo sapiens
  misc_feature (152)..(152): n is a, c, g, or t
ggccaatgggccgcgggccaggggggttttccccccgtttttttccccccccctttggccaaaaaaacccgtgttaagtgcccccccgggcccccaagggttattttccccccccccaaaaattgggttggtttggggggtggggggggccnaatttcccaaccccttttttgggggggcgggggggccccccaatttttgccaaaaaggaactctttgcccccgggcggggggggggcccttatcttcttgggggccccctttttggggggggcccccccccccctttggggggcccccccccctccccggaggggccccccctggcccccaagggggtttttttttttcccccccggttggggttttccgggggcccccccttttgccggggaaaaaaaactttgttttggggccccctttaatttttttttttttccccccttca

SEQ ID NO: 665665 - DNA, 932 bp, Homo sapiens
  misc_feature (140)..(140): n is a, c, g, or t
  misc_feature (157)..(157): n is a, c, g, or t
  misc_feature (255)..(255): n is a, c, g, or t
  misc_feature (297)..(297): n is a, c, g, or t
  misc_feature (314)..(314): n is a, c, g, or t
  misc_feature (323)..(323): n is a, c, g, or t
  misc_feature (360)..(361): n is a, c, g, or t
  misc_feature (376)..(377): n is a, c, g, or t
  misc_feature (380)..(380): n is a, c, g, or t
  misc_feature (398)..(398): n is a, c, g, or t
  misc_feature (425)..(425): n is a, c, g, or t
  misc_feature (433)..(433): n is a, c, g, or t
  misc_feature (436)..(437): n is a, c, g, or t
  misc_feature (445)..(445): n is a, c, g, or t
  misc_feature (457)..(457): n is a, c, g, or t
  misc_feature (461)..(461): n is a, c, g, or t
  misc_feature (477)..(477): n is a, c, g, or t
  misc_feature (511)..(511): n is a, c, g, or t
  misc_feature (520)..(520): n is a, c, g, or t
  misc_feature (550)..(550): n is a, c, g, or t
  misc_feature (554)..(554): n is a, c, g, or t
  misc_feature (562)..(562): n is a, c, g, or t
  misc_feature (615)..(615): n is a, c, g, or t
  misc_feature (631)..(631): n is a, c, g, or t
  misc_feature (641)..(641): n is a, c, g, or t
  misc_feature (858)..(858): n is a, c, g, or t
  misc_feature (911)..(911): n is a, c, g, or t
cccggggggccccttttcgtcagctgttcccattgtggccagtcctggttagtaaaccccggtttagtccgctgagtcaatcgtaaatcatctcctggatggagagggctatacatgaagatccagtatgacagtccgtngtgacgcgtatgacccnagcatgtcgccctagttttttttatacgagggcacgcagctcactctacaagttaatgagtccttagcaaagtgagctcatactatctgacatgactnagccgatgcagatagactgttccaaaaaaattttttacaaanattgaacattgtagctncaagacctnagcaggtgtcaacacaggacaatgttctcagctagannacatgcttcatctcnnctnagagagctgcaaacatcnactcctcagtttgagttagcctatatntcccaggncannagtatccnacactatagatnaagnagaatacctttctcanggctgaatagctcatagttcctctcctgcacccnagcctcacnatagcctacatagaatagactacactttcncatnttttgccncggctgagatcagtcactcaccgtacaacggggacagagccattcaccgttgnggatctctggaagtgngggattcagncagtggatgtggtaggaagaaggacaggtatcacagcagagcagttccccaccatccttgcagacccgacagaattccatatggtggtcatcctcctcttcgaggtctcccccaacctcttccaggatctcctcaccctccgaattgtcctctttagcttcccactggatgccttccttctcctgcagtaaaggaccacagattcagattattaccnccacccgccaccgcagtctgaagccagtgcccatcattcctttgaatgcttcncaagctcacaacacctcgtgc

SEQ ID NO: 665666 - DNA, 633 bp, Homo sapiens
tgcccccgcaaatattccttttgggcgagaacaacgcggctagatattatttcacgttggaagaggagacttccttgacaacgagcagcacggaatggtgccacttgcctcaccgcacaccccaccgggctcatcaggcggggggtgaaacaaacaatagtcggtaagatctcaccacgttgtttgtcgcacaacaatcacgcggtcctataagaagaagggacaaaagtggggggtaccacacaaaaaggccactcttttattctctgttgttaaggcgttccttgatcacgagggggcccacatcatgtggggccctatgcggctgtgtaatgtgccagttgttgctgtgtgaactcaatggagacatgccacagagggagtggcccctggtgtacaagcgttgtggaccacgctgacaatggagacctggtcgttcaattcgggtgccccaaataaacatcactggaggggagagaacgccatacgtccacatccaagccccccttatggggtaaatttttggaccattgggccaacggcctttttgggtcccttcctaattctcaatttttaaatattcttttttaggccccaggtgtgaaaagaaccaaaattccaatcccccccgga

SEQ ID NO: 665667 - DNA, 638 bp, Homo sapiens
gccaggctgcccagattcaaatcctgactccgccacttttcccactgtatgatcttgggcaagtcacttcacctctctgtgccttggtttcctcatttataaaatgtggattacaggccgggcgcagtggctcacgcctgtaatcccagcactttgggaggccgaggcaggtggatcacaagatcaggagattgagaccatcctggctaacatggtgaaaccccatctctactaaaaatacaaaaatattagccgggtgtggtggtggagcacctgcggtcccagctgcttgggaggctgagagcaggatgaatggcgtgaaactgggaggcagagcttgcagttgagccgagatagcgccaacttgcactccagcctgaggcctaacagagcgaagaggtaccggtcgtctgcaatgtaaccatattacagtatgaatgtaagttactagcaagaaacacgacaaattgaagtgacacttaagtgatggggttaaatttcataagtaaccgttcgccgtactatactggtccagggcaatgagaagcctagcggatgagcattctccgaggggcaggagactgtgtaacgaaggagaccaataaaaaaggctcaagaaacccacagagtaagaaaat

SEQ ID NO: 665668 - DNA, 521 bp, Homo sapiens
tgagcagtaggtctcaattgtaggcttaaaatattcagcacatcatgttgtaaacagatgtgctgtcattcgtgctttgctattccatttctagagcacaggcagagtagatttagcataatgcttaagggccctacaattttcagaatgataaattagcactggcttcaacttaaactcactggcttcattggcctctagcaagagaatcagcctgttctttcaagcccatgcactgacctctctctacctatgaaagctttagagggcatcttcttccaatagaagggcgttttggctccattgaaaatctgtttttagtgttgccaccctcatcattagctagattttgtgtataacttgctgcaactgccccactaatgcctgctgcttcatcttgcacttccatgttatggagatggcttttttccttaaactgcacacaccaaggctggctagcttcgaacttttgttaagccacaccttcacctttatgagcttaaatgtaatggtgaaagtta

SEQ ID NO: 665669 - DNA, 333 bp, Homo sapiens
  misc_feature (2)..(2): n is a, c, g, or t
  misc_feature (9)..(10): n is a, c, g, or t
  misc_feature (12)..(12): n is a, c, g, or t
  misc_feature (42)..(42): n is a, c, g, or t
  misc_feature (78)..(78): n is a, c, g, or t
  misc_feature (164)..(164): n is a, c, g, or t
  misc_feature (182)..(182): n is a, c, g, or t
  misc_feature (188)..(188): n is a, c, g, or t
  misc_feature (194)..(194): n is a, c, g, or t
  misc_feature (198)..(198): n is a, c, g, or t
  misc_feature (208)..(208): n is a, c, g, or t
  misc_feature (218)..(218): n is a, c, g, or t
  misc_feature (251)..(251): n is a, c, g, or t
  misc_feature (266)..(266): n is a, c, g, or t
  misc_feature (276)..(278): n is a, c, g, or t
  misc_feature (281)..(281): n is a, c, g, or t
  misc_feature (302)..(302): n is a, c, g, or t
  misc_feature (310)..(310): n is a, c, g, or t
  misc_feature (323)..(323): n is a, c, g, or t
  misc_feature (331)..(331): n is a, c, g, or t
anaatcaanncncctttaccaagcacaggaatgaggcagaangtcaccggagtgcaatctttcagcgagcgggaaganccagtaataaagcacacagagagttaacatcacagtacagtaaaatgccacaaagcccagaagctgcagagagagacagacaaagngggattcttctgagtgtnccccangagaanggancgtttcaacngttcttttancgctgaggtttagctgaaggatgtcggaagggnaacaaagattgtccngaggtacacnnnggntttctgcaagcttctaggaangtttccanagttcgcctgcanttcgccantg

SEQ ID NO: 665670 - DNA, 171 bp, Homo sapiens
tcgaaaggctgaccacaggacaatcgtcctcatcggcctgctgtggaggagagtcttcaaccagacccaccttcaccacgccaatgaagggaataaacttctgataggagtcttcatcagggaacttatgccggcaagtcagcatggcttcggcccaacggagagaagctg

SEQ ID NO: 665671 - DNA, 220 bp, Homo sapiens
gcgccaccagatgcaactgccattgacatgttctgcagctgttcgatcctctcgctgaagccggacacccactggatgacggtcatgccggcaggcaccgggtagtgggaccagctcctaggcaaggtccctttcactagctcgttgatcagcgtgcgcaagtagttgggatgcttcttctttccttcgcacacccggacgacatctgcaaggaggctca

SEQ ID NO: 665672 - DNA, 223 bp, Homo sapiens
  misc_feature (66)..(68): n is a, c, g, or t
gctgcgtttaggagttcagtcccacagaggccacttgggttccagaggtggctgtcagaagcagannntaaggctgaggtatcttcttttgtgtgtgtgtttttccaaggccaacacacttctacagagtctctattaaggcaagctctctaagtaaatgtcgtagctcatagcactgtgtaaacatcttcagtcgcgatatatccctctgacctcctctcga

SEQ ID NO: 665673 - DNA, 534 bp, Homo sapiens
  misc_feature (236)..(236): n is a, c, g, or t
  misc_feature (282)..(282): n is a, c, g, or t
  misc_feature (312)..(312): n is a, c, g, or t
  misc_feature (345)..(345): n is a, c, g, or t
  misc_feature (373)..(373): n is a, c, g, or t
  misc_feature (379)..(379): n is a, c, g, or t
  misc_feature (388)..(388): n is a, c, g, or t
  misc_feature (397)..(397): n is a, c, g, or t
  misc_feature (424)..(425): n is a, c, g, or t
  misc_feature (431)..(431): n is a, c, g, or t
  misc_feature (446)..(446): n is a, c, g, or t
  misc_feature (459)..(459): n is a, c, g, or t
  misc_feature (484)..(484): n is a, c, g, or t
attaatgccttaaaaaacacaaaaagttctgaacacacatttattatctggaggaataaatgcactccaaatgcttatcatcagaactctggaaaaagacatataaattctctccagtattttaaaaattggtatctaaataatttcattttgaactaggttagcaacctaagttgtcttcattcagcttttaaaattgaaaaaaaattgtttcaaatataataaagacttaagtncacattcaaaatttattttctgttacagttttcttgccaaaagganttgaagaatttttttgcttatcttacttangacaaatgttgtcagattaaaaaaaaaataacnggatagttgttgtaaagctaactctatntgaatnggtttaatntagccccangttaaaccaccttttaatggtagatcnntttcgncttgggtggatgtcnctttttaaaaatntcaggtttttctcatatcatttctnggatggggcttggccccattcttacaatttttttcaacatggactttttt

SEQ ID NO: 665674 - DNA, 660 bp, Homo sapiens
ggagcggcgcagcaagatcccagctcggaccccggacggcgcgcgccccgaagcccggatcccagtcgggcacgcagctgaacgccagattactgtgcatcccgaatcacgaacacctgcattaatgaatcggcaggcacgctgagtatgcacgcacgaaagcaaggatcaccagcggccccacaacccgcacacagaacacaacacagacagaatcaaacaaagaagacacacaagcagcgcaacacgctcggaaggacaagagagaaacgaaagcacagcagagacgacaaaaccacaaacacacagggacccgacaaagcacaagacaaacacaactacccacgcaacgcaacaaaaaaaagagaacaaagcacagagagaaagaaagaacggaataggacgacagacaacacaacagagaacggacgaaccaaggaacacacagagaaaacaagaaaaagaaagaaaacaatcaaaggaacacacaaggagaagactcacacgagagataaaaacaacacacaaacacgacacacaagaaacaaagacgaacgaaaagaacacaacaaagcgaaaaaaagaagacagaaatgaaaaggactacgacacgacaagaaccacaaacgaacgcaaaacacaaaaaaacaaacaaaacac

SEQ ID NO: 665675 - DNA, 360 bp, Homo sapiens
tttttttttgtaaaagatttggagagatttattctaagccaaatttgagtgactataacccatgacacagccctcaggagaccctgaaaacatgtacccaaggtggtcagggagcagctgggttttatacattttagggagacatgagacttcaagtacatttaagaaatacattggttctgtccagaaaggcaggacaactcgaagggcggggaggggaggggagcggagtgcggacgttccagtttataggcagatttaaaaattttttggttgacaattggttaagtttatctaaagacctgggatcaatagaaaggaatatctggggttgagtagaggttgtggaaccaaatttta

SEQ ID NO: 665676 - DNA, 416 bp, Homo sapiens
  misc_feature (5)..(5): n is a, c, g, or t
aaacntaaaagcccgaaattaaaagcagctggtgagtaatcttaaattttagtcattaaggaaaaattttaagacaaaactctaattcagctacttacctggaaacaaggctcaggctggtgatcgttctctgccatcttagaagctggaaacaacttacactcaccttccctgtcagaagcaagctgaaactcaggaaaggaggtgcctgctctccatcaccacagaagcaggaaaacttgccttccttgttggaaatgagtaaaacttccagaaaaggagttgtacagcaaaatcaaacttagatctcaaccagattttgggagatcagggactctttgcaggggagaagctccacaacctcagcaaattatcctgttggtttgggcaataaagatagcccaggttggtatcaa

SEQ ID NO: 665677 - DNA, 305 bp, Homo sapiens
  misc_feature (1)..(1): n is a, c, g, or t
ntgaacatctccgccttaccttccgggcttcagggcccagtgcgagaccctcactgcaggccaaccatcttagacctctctctggttccaggctctatataatatcccctcccaagctgacttttattcccatcctgcagccactaacatctgctaggtgataaagaaaagcagatgcaatggcgcgatctctggctcaccagcaacctgccgaccatacccgggcttcaagcgcttctcctgcctcagcctcccggagtagtggaattacatggcatatgcctagcatagtccgtgctaagtta

SEQ ID NO: 665678 - DNA, 954 bp, Homo sapiens
  misc_feature (16)..(16): n is a, c, g, or t
  misc_feature (92)..(92): n is a, c, g, or t
  misc_feature (105)..(105): n is a, c, g, or t
  misc_feature (310)..(313): n is a, c, g, or t
  misc_feature (324)..(324): n is a, c, g, or t
  misc_feature (333)..(333): n is a, c, g, or t
  misc_feature (346)..(346): n is a, c, g, or t
  misc_feature (350)..(350): n is a, c, g, or t
  misc_feature (366)..(366): n is a, c, g, or t
  misc_feature (384)..(384): n is a, c, g, or t
  misc_feature (393)..(393): n is a, c, g, or t
  misc_feature (399)..(399): n is a, c, g, or t
  misc_feature (417)..(417): n is a, c, g, or t
  misc_feature (434)..(434): n is a, c, g, or t
  misc_feature (440)..(440): n is a, c, g, or t
  misc_feature (449)..(449): n is a, c, g, or t
  misc_feature (471)..(471): n is a, c, g, or t
  misc_feature (495)..(495): n is a, c, g, or t
  misc_feature (508)..(508): n is a, c, g, or t
  misc_feature (570)..(570): n is a, c, g, or t
agaagccaactatgantattaacgatgtccaacccttctggcccaccagggtccttttgacactgctctaacagccctcctctgcactcccncctgacacaccangcgctaattcaaggaatttcttaacttcttgcttctttctagaaagagaaacagttggtaacttttgtgaattaggctgtaactactttataactaacatgtcctgcctattatctgtcagctgcaaggtactctggtgagtcaccacttcagggctttactcgcgtcacggattccgtcggcatagctccggggtgcgcagttnnnngaaaatgggcncaacccgtnagccccagttcangcanctgtggcagagttacngttctgtggtttcatgtnagttacctnatagtnactgtgtaattagtgccncttaatgtatgttcccnaaaatnaatatatcnacccccgactagatgtagtatnttttgtataattggatttcctaanactgtcatcctcnaagaaagtgtattggttttttaaaaaagaaagtgtatttggaaataaagtcagatggaaaantcattttttaaattcccgttttgtcacctttgttctgatataaagagtggccactatgtacccctctttcggccccactgtattctcacgtaccccactggagctgggctaagtaaaataggaaattggtttcaccgccctgaggccacattagacacctttggaagatggcactaacctgtctcaccctggacttaagcgtctggctctaattcaccacgtgctcttttctcctcacctgtatccacggttccctccccgagggagccacccacgttctcactgggtggcacacccacgtctctcttctctccacgctgactaaactttttttctgtaccagttaatttttcccactactaatagaataaaggcagttttcta

SEQ ID NO: 665679 - DNA, 231 bp, Homo sapiens
agagaattacggctacccgccgcagttacgatcattctatttccccgctcgtatgatccccacgtccaaatatctcatcaacaaccgactagtcagcacccaacaatgactagagtcaaagctgaagctcaagaacaagatgataaccatacacaagactagaggacgaacctgatctcttatactagtatccttaatcatttattattgccatttttattttcttctctg

SEQ ID NO: 665680 - DNA, 113 bp, Homo sapiens
cgtttccaaagacacaaagctctaagagttaattatgtatcatccaatccattccctacagagaaaacttttgcatgatagcaacttttaaatctagtctatcttggatatcc

SEQ ID NO: 665681 - DNA, 685 bp, Homo sapiens
gcgcggcccgatgctctccccacccccccagtccgttcgggaagggaggggctgggggctaggcgcccatcactccaggcacgggttcgtttctgggtggggggttgaaccccggatacatacccgtaccaagccgagggcaactttggagtgcccctggaaggctaggatccagatacttcgctgatgtgcttacgctgaagaatcacacacccgacagagcgtcttgcgtgcacacccctgtgctgggttcaggcaggctacgcacactgcgagcccatcccgtttccctgctttggcaatggaggagctacttaatggcactcaacctgctcgattaattggcagcttccagttgggctgtgcatgcaaccttgggactaacttctgttgcaaggggagtgcgcggaacagttgcttgcaatagatcatgatgcgcgaattgagataacacgaagaaaatcgattacatgcagagctggtaaatatcacatggaagaacaagtaggagccgcaagagcaagacacaaacatggtcagaaagaaatgagagagtagttgagcacatcaatgatcagacaactttttctatcaatctggcggtagtaaatagacaccttgagtagttgagattattaacattaatcgcgcacttgcaaacgagagaagaacagagaaaaggcgt

SEQ ID NO: 665682 - DNA, 592 bp, Homo sapiens
tagacctgaatcaccgaactctctaccccagctgtatatccaaaatgtcgcttaactaacaagctgacgctggacaagctggactgttaaatgggaagcgggtctgttatgatgagtcgacttcaatgttcctatgaatgaacaaccatgataacaaacaaccagaggattaatggctgctgtcccaagcatcaaattctgcttggacaatggatgccaagtctggtagtacctatatgagccacctagtgcctggcctgatggtgtgcccatgcctgacaagtactaccttagagccatgtatgctgtagaactcaaatctctgctatgggcaaggattgtacttgaactatgaagtgacttgtgtaagtgcccagaaatgtggagacatgcctgtgccaacccagcttgctgggtcttgtacatccttgcctggcgaacctccgcttaacatgtaggagctgaagacgggaaggggaaacagactgctaactgggaaccacggataaagcctgagccagccaaactagaagcatccgagcacactaccaagcaggggaagcattcaagatgcaaaggaacgacaagacca

SEQ ID NO: 665683 - DNA, 319 bp, Homo sapiens
ttgggttgtggcgcgtggggtgtgggcggggaagaacagagtctcgctcctgtcacccagtctagagtgcactggtgtgatctcggctcactgcagcctccacctcccaggttcaagctattctcctgcctcggcctcccgagtggctgggattataggagcgcactaccacacttggctggtttttgtatttttagtggagatggggtttcgccgtgttggccgggctggtcttgagctcctgacctcgagtgatctgcccgcctcggcctcccaaagtgctgggattacaggcgtgagctgtgccgcgcccacaacc

SEQ ID NO: 665684 - DNA, 200 bp, Homo sapiens
tagtgacaaaccccaaaagaagaaaaagcacaagccccaggatggttcctcaggcgaatggaatgaaagaaccatctatctctttctccaaacccgagactaccgcaatctttcaccaaggaggagtagatgagtagcgatcctaaagagaccgctgacagaacacagtatacccgagaggaagaagtctacacccaagg

SEQ ID NO: 665685 - DNA, 658 bp, Homo sapiens
ggtgctgagacctttgcaaaggatctccttcacgaggactggaactttatagtggagaaccacaatgggtagggtcaagaaatggctgtgaaagacctattctagagagaaagaggaaaaccttaactggtatggcacaatcttgaatgggatgacagagggcagcgggcagacttctcccgcaggtgacactcctgcctcaggtcccaatggttctgctgactccagatgttccccatagctgggaatcagagaggaaaacgtgtcgtgtttcacatgatcagacactgttcaccactggcacctggtgggcccgaaagatttagggcatccaggtcaaagttgaggcccggaggcatctctccagccagctcttttggaggatggcctaaatcttgtagctgctgcataaagatccagcaccatctcaaaacgagccttttgagtggttcactgtctgtggggggctctgcctcaaagtgctcacatattttggcccttacgctgtgctgctcctgatatcttccaactgtctggaagtgagatcccggtgatctttgagcctcttggaactttctggacccctcgggggggtacgccgactttcgagaaggctcgcaaaaccccttaggggggtccctcccaccttttatcaggc

SEQ ID NO: 665686 - DNA, 401 bp, Homo sapiens
ggcagtattgggctggcggacgtgtgctgcctccccagtgctcaaaatcacacctctaaaggccacgcaggtgggacccatcaagacattgcaaatcgatagaaggacggccaggaaggggaggggatcgaacctgtcaaaatagatattcagaaaatctgtgctctaaaataaggcagcccttccctcacagcacacttattccctaatttcaacaggagtcctagtcttgccccacagctgtcacagcctacagcaaattagaaactggggtggggggcggatattattccaccagtaatacccttgggacggggcacacaagatgtttgccctcctacctctctgtcaccttcccaagaaagggtcaagatgaaacagtgtgcgtatatggtatagcg

SEQ ID NO: 665687 - DNA, 332 bp, Homo sapiens
tggggcactggcatgtataactagacaatcgttaactaatgaaaactcaatttcaaaagtgggcatccagaggccaggcattttggctcaggcctatatccctagaacttgggaggctgaggtgggatgtattgcttgagctcaggagtttgagaccagtctgtgtcatgtatgtgcgacctcagtctccacaaaaagaagaaacaagccaaaaaaaaaaaaaaaaaaaaaggttatacccagtttttttttatagggccagacacccagttatgtgtttttaaggagctccattttggctctttgttctcccttagttattcacgggtggg

SEQ ID NO: 665688 - DNA, 269 bp, Homo sapiens
gttacccagcacaaggttgattttagaatatgtttcatgcgcagataagaagaatgtatattgtgttgctgggtgaagtgttctgcaggtgtctgtcaggtccacttggtaaagtatcaagtttatctcctgagtatctttgataatcctctgcctcaatgctctaatactgtcagtggggtgttcaggtgtcccatgattattgtgcattggctaagtctcttcataggtctctaagaccgttttatgattctgggtgtctccagtgt

SEQ ID NO: 665689 - DNA, 487 bp, Homo sapiens
  misc_feature (91)..(92): n is a, c, g, or t
tggagcgattttttttcaggttctcatcacatatggggaaagggtcattcccagagcaatgcctaatttagtaatttgcccatgttggggnnctgcaccgccagcccactagctaagcacagtccctcgacaaatctgctctgaaatctcaagtcctactgacgtcagaggcagctgatgtcactcagagaacagcagtcttgtcttggaagcctggatgtcagtgctggttctgcctttgtggcctgtgtgatttctgaccaactaaattccagttagctaatgttcagctttctatgaacaggtgtctgaaaatgaaacttgccctgctgtatcctataaactgtctgcactctgaggaagggtctgggctctagattctgattttatacccagtcccactggacaggagggactggggctgtttctgttttataccaggcctggtgacagaaagactgggaggggttggggggcgaaatggatt

SEQ ID NO: 665690 - DNA, 341 bp, Homo sapiens
atcatcccatccccacaggttatctaacgttggcgcaccttgttgaataattgcatggtgagtgaacgtcgagtcgatctcaaactcagggttataaagcgaaaggtcgtatattagctctagcagtcgctgcgagtgcgcgcgatctaattcaaattgctcatgagttttgtagttccaggtaatcagatgttgtgatttggttaagaaaaataagttgggatttatttgcattgttttcttcccattcttagggctgggttggcgtacaacccagcttgtcattaacgacttatttaggcattccaatcaatgcgaatgtcgacgcggccgcgaattta

SEQ ID NO: 665691 - DNA, 362 bp, Homo sapiens
ccggcgaatttcaagcgcgcaaatgtgattcttcttaatgaggcacatcatagagttgaccctcaggtgtgctggatggcacgctgggtatgttcagagtgactggaacttcataccgattgtcgttgggatcatgaatcttgaactgtagcatttcattcttatggtaagtgacattcaggcaaagggggttcacgggtgtgtaagggaaggcataggcatgcacagaagactttaaggagatctcagctgttgcccccttggagttatactaacatcatttacagagtataagtcgttgactaaatagcatacagggactcctgaaaaattggatgcctcccagattcggcacgggcagt

SEQ ID NO: 665692 - DNA, 268 bp, Homo sapiens
taatcccacgttatatgtctagatttgcctcttctggacaccttcatataaatggagtcatacaatatgtggtttcttgtgtctggctttttaccactgaacgttttcagagttcatccatgttgtagcatgtatcagtttttcattcctctttatggctgaataatactgcattgtatggatataccacagtttgtttactcattagttcatagacattggggttgtttccaactctctgatattataaatgctactgctgtgaaaa

SEQ ID NO: 665693 - DNA, 347 bp, Homo sapiens
  misc_feature (1)..(1): n is a, c, g, or t
  misc_feature (9)..(9): n is a, c, g, or t
  misc_feature (161)..(161): n is a, c, g, or t
  misc_feature (198)..(198): n is a, c, g, or t
  misc_feature (206)..(206): n is a, c, g, or t
  misc_feature (264)..(264): n is a, c, g, or t
  misc_feature (317)..(317): n is a, c, g, or t
  misc_feature (334)..(334): n is a, c, g, or t
  misc_feature (343)..(343): n is a, c, g, or t
nagaccatncctcaaggacccgcagccgggacttatgccggttacaacaacatgtaccactacgcctgggggtggccactcggacatcgacctcatgggtgggacgagagcgggctgtggggcgtgttacgccaccaaccagaacgctgggcaacatcgtnggtcagtaggcttggaccccgtgttccttgcagaccntgcagacntggggacacgagcttaccccaagcgcaggccggggaggcttttattatcttgcggganttgttacgttaaccaacggttatttagggggtaccaaggttcattattggatnaccagaccattggcttncactattgnattt

SEQ ID NO: 665694 - DNA, 370 bp, Homo sapiens
cttgaacctgggaggcagatgctgcagtgagctgagatcctgcccctgcactccagcttgggcgacagagcgagaccatgtatcaaaaaaaaaaaaaaaaaaaaaaaaagcatggttggactttaaacctacccctcaatatcctccagaaatgtgcataagaacgcttgtcttcagcctgagcaacatggtgaaacccagtctctaccaaaagtacaaaaaattagccaggtgtgctggcacacacctatggtcctagctacccaggaagctgaggcaggaggatcgcttgagcaggggaggtgggggttgcagtgagctgaggttgcaccactgcactccagcctgggcaacacagtgccccctctct

SEQ ID NO: 665695 - DNA, 963 bp, Homo sapiens
  misc_feature (37)..(37): n is a, c, g, or t
caggcagtacacatcatcaattatattaaagctcgancacatcaatccagactattaaaacttttatgtgcggaactgggtgctcagcaacacagcacttcttctaacatacagaggtgaaggtggctttctcgaggtaaagttcttgtcacagactttttgaccacttcgtcgtgaactttcggtttccatggattctgcttttcgactatctgatgtgtctaccacacattcatccttggctggctaaggacttgcataatcttcgccagactgttatctcaactcaccttcaactcgacgtcactattgcgtccacactgccacacggaacaccatgtgcaccggtctacaaccagtcattcgcactccacactgtcgtccactgtcaacgaaaaacattggacatttcggggccctcatctgtaggccccgcacgcaacccctttggatgcgtttacctaaccactcaggtgactttttggactgacacttacttcttaccgttgataaaacgatattcgcaagtgccatgtggccgcaccttaaggcgttgcgccgctactctgttaaaatactttccggtaaccaaatgacactaatgctgtgggtcagaacttccatttcacacgttactgttacacacagcttcaatcagacaccggggactatgagaagcctgcatgatttacacttggcgtctcaaggtgacgcacacataaagtgaactttcactaacagatattggactacctactcggaatacccacgcatgcagggatcagtgcgtgacttttcctcgtaacatgcaccggtgtaacagctttcatataacgcgcccaccaacattcgacacgctgcgtgcctcatagcaccgctgcaaatcacctatcacggctgtgctacacacacaccgtctcacagcgacgcggtcgtcgacccgcctaaacacttccaaaccac

SEQ ID NO: 665696 - DNA, 251 bp, Homo sapiens
gcgagtagatcgagacatgtaagcagcatcatggaggtttgaagataccgcatttaggatggatgaataccaaattctgcttgctagctttctaatattgatatgcttatacacttacactttatgcacaaaatgtagggttataataatgttaacatggacatgatcttctttataattctactttgagtgctgtctccatgtttgatgtatctgagcaggttgctccacaggtagctctaggagggctt

SEQ ID NO: 665697 - DNA, 269 bp, Homo sapiens
gtcttgcagcaaagcacggccggataaatgactaggcaaaacgtagctcctggggtatagccatcattacaccagtagcgcctatagctctgacacatcccatactcagtgcttctgtctccaacattgtagtttgtcactcgtgtgttgtagtcactctcccatttggacaaacacatccagtttgctaggctgatacccctgtagccatccattcccaatcttttcagagttctggccaactcacacctttcaaagaccttgccctg

SEQ ID NO: 665698 - DNA, 238 bp, Homo sapiens
gacacccaatcttaatgaccaccatgtccttgggcatcattataaactggtacaccagcctctgtcctttcactttggccagtatgcctctttggtagtagtatcttagtgcccgccccattgtctcatagttcatgccaggcttgtttttctgcttcccccacagtttgaacacagttttggttccaccagttagaagatgcctttctctcgctgggtccacttgatgtacttggga

SEQ ID NO: 665699 - DNA, 532 bp, Homo sapiens
gaatacctgcatatagctggaataaacgttaaattactgttccgttatttgatttcttatccggctgctcccctatcagacctcatctttttgtgaatattattttttgtttacctccctccattcattcacatgctcatctgagaagacttaagttcttccagctttggacaataactgcttttagaaactgtaaagtagttacaagagaacagttgcccaagactcagaattttttaaaaaaaaaatggagcatgtgtattatgtggccaatgtcttcactctaacttggttatgagactaaaaccattcctcactgctctaacatgctgaagaaatcatctgagggggagggagatggatgctcagttgtcacatcaaaggatacagcattattctagcagcatccattcttgtttaagccttccactgttagagatttgaggttacatgatatgctttatgctcataactgatgtggctggagaattggtattgaatttatagcggattgaagttggggatcctctag

SEQ ID NO: 665700 - DNA, 244 bp, Homo sapiens
  misc_feature (88)..(89): n is a, c, g, or t
  misc_feature (92)..(92): n is a, c, g, or t
  misc_feature (95)..(95): n is a, c, g, or t
  misc_feature (98)..(98): n is a, c, g, or t
  misc_feature (100)..(101): n is a, c, g, or t
  misc_feature (107)..(107): n is a, c, g, or t
  misc_feature (109)..(109): n is a, c, g, or t
  misc_feature (115)..(115): n is a, c, g, or t
  misc_feature (221)..(221): n is a, c, g, or t
cggtacccattgcatatggcaaggccaaggagttgtgtaaggcagcggacatggtgcaggatatcaagatgaaccactagtgaggtgnngcntanggnannccttgncnttgcanttgcatatggcaaggccaggtcagaagatgaaccacgtgacgaaatagaaaaagctacctatggagttgtgcccctacgcaggtacttggccttgccatatgcaantatgcaggccttgccataataca

SEQ ID NO: 665701 - DNA, 168 bp, Homo sapiens
  misc_feature (24)..(24): n is a, c, g, or t
  misc_feature (59)..(59): n is a, c, g, or t
  misc_feature (69)..(69): n is a, c, g, or t
cccaggtcctgctgcccccctganaccctggcctcccgggcatgtacacagagtctctnggaggtctgncccagggtggtaacatgtgcgccatggttcctacttctcatagcagcgacagtgccaggccagcactgaccacctaaggtggacgggcgccttactatt

SEQ ID NO: 665702 - DNA, 455 bp, Homo sapiens
  misc_feature (255)..(255): n is a, c, g, or t
  misc_feature (348)..(348): n is a, c, g, or t
  misc_feature (407)..(407): n is a, c, g, or t
  misc_feature (443)..(443): n is a, c, g, or t
tctaccgtcatgctgaccggtaaaccaaaaagcgtaatggcctgatcaagaagatgtggtgctaaatcgtaccagataccgctgcctgggccgccctgttcacgccaacgatcgcgcacctgcgacggaagcggtcaaaatgagactcaaagtaagcaacttcacccagcacgccttccgcgagtaaaccttttagcgtcaagaaatcgctatcccagcgacggttatggaatacagacagcacacgccccaggntttttgccagcgcatccagctctcgcgcttgtgacagtgtcaggttaaagggtttatcaacgaccacattgtttacccgccttcaagcgccgnttttgggttaacggggaaatggggtatcgttggggtgttgggattgacattcaggtctntgtttgggttcgtttaaacagatgctttggctcagngacaaccgtcca

SEQ ID NO: 665703 - DNA, 116 bp, Homo sapiens
  misc_feature (6)..(6): n is a, c, g, or t
  misc_feature (10)..(10): n is a, c, g, or t
  misc_feature (116)..(116): n is a, c, g, or t
ggtgantctngaggatcccttcttatggcaaggccaaggtcagaagatgaaccacgtgacgaaatagaaaaagctacctatggagttgtgccctatcttggccttgccatatgcan

SEQ ID NO: 665704 - DNA, 355 bp, Homo sapiens
taaataaggggtccccctttttggtttgggcaaagaaatcccggtttcccagggccttttggtaaaaaaaagggcccttttcccttggataaggtggccttttgcccaagatttttgggcccaaaatgggaggggtttcttttggggcctattttattcccctgggcaaaaaaatcggttttttgcccgggccccccccggttggggtaccggagccttgggggaagtttttaaaaccccggggggggatccccccgccttttttttggttttccagaatggtttggggggcccggggtcccttgggtgggcaatggcttttgggggggggctttttttttttttttttttgcca

SEQ ID NO: 665705 - DNA, 287 bp, Homo sapiens
cagcgcatcttacgtgtaggtgcgcgagtgtctcaccactctgcacttccaggactctgtcatctgcctaggcgggaaatgctgtcgttggattgcaaccccgaggtggatggtctgaagcatttgctgaagacagggcctcggtcaacgcaccccggatccttgcaacagtcgcctgtccacttagccgcaggaagcgggctttgcttgctttcttctctggcagctgcaaaacggtcgctgacctcaagcagcaggtaactaggtaactgtcgctgtgtattccg

SEQ ID NO: 665706 - DNA, 264 bp, Homo sapiens
  misc_feature (183)..(183): n is a, c, g, or t
  misc_feature (203)..(203): n is a, c, g, or t
taagaatcctagctttaaagaaaagaactaggattttaggttaccagaaactggctctgagcggagaaactggctctgagcgggagaaactggctctgagcgggagaaactggctctgagcgggagaaactggctctgagcgggagaaactggctctgagcgggagaaactggctctgagcgngagaaactggctctgagcgngagaaactggcactgagcgggagaaactggctctgagcgagagaaactggctctgagcggg

SEQ ID NO: 665707 - DNA, 887 bp, Homo sapiens
ggatccaggcgtgagaccctgcatttcggggcatgatgctattgaacgactgtgtccgtgagtcctcaacttcaggatgttgacaagcattgctgccgatactgctgctgtctggctgggccttttgtagccataggacgcctcagatggccgtccaacagacttcatatgctccagatctcctacattccgcgtaggccctatcagcgtgtggtaccaggggcaacggcgttcgtctggggggacacctaacgcactgtgcgtgtgaaggcccatgacacacaatcactcgaacgatcaattcaagctgacagccacccttgagaggtagccccagaggagcttggggctgccgtcagcgccaatgaggtggaccctgcaaagctcgcgtaccatggcatccgagtttccacaggtccatcgatgcagacctggatgtcgaccacggagacggacgctttggaccttttccctcttggacgcgattccggctggctttcgctgcgggcgtgttgagctgcacgtccctgagggctcttagaaggccccatgtctttcttcggagaggtggaccttgtagacatgggggaagctaccgtttttgtagaggatattcctgggcctggcagacgaagcccttgatggccagggcaagactacaccaagggtcaccatccgggagatgggtcaacccttcacccctgacagtcaagcattcacacgtggccatagcaaatgccggtcgacttcggggtattgaaacctgagcgcggaaaatttcccttggaagggacaaccattgtgttggcaggtactggtggcaaggacaaccatattttcccgagcggacaccaacacgaaacagaatacttcctacttaaggaaat

SEQ ID NO: 665708 - DNA, 153 bp, Homo sapiens
aaaaaggggatgattttaggttgtcctaaattttgctgtccccccttccagggaaggggcattgtaaatgaataaaacattttcaactccttttggatttatccccccagaaacccttttttccctgtaataaatcaggatggttttttttga

SEQ ID NO: 665709 - DNA, 254 bp, Homo sapiens
  misc_feature (173)..(173): n is a, c, g, or t
  misc_feature (193)..(193): n is a, c, g, or t
gctgttgtaaggaaactggattgcatggctgcgtaagttaagatggcttctgttaaaaaccttagaatggcgggagaaactggctctgagcgggagaaactggctctgagcgggagaaactggctctgagcgggagaaactggctctgagcgggagaaactggctctgagcgngagaaactggctctgagcgngagaaactggcactgagcgggagaaactggctctgagcgagagaaactggctctgagcggg

SEQ ID NO: 665710 - DNA, 1390 bp, Homo sapiens
ggctcggtacttgcatatggcaaggccaagcagacgccccagggaggaacctggttttaatgggccctgtgctcagggaggccttcagtcagcagggtcgcctcagcagcatttgggagcctgccctgcagctccctgcctccaccctgcacgctgtgcccacacccccccacaacacgtaggtgaaagcacaggcaccatgcggaggccccgagcaccccttagtggggcggggtggggggaggaagtcagtccataatgttgtagttacggatcttggggggcctctggcagcctttagcttttgcaggatgagaccgggaggctcctgtggtcttggccttgccatatgcaattgcatatggcaaggccaaggacatcgggacctggctgcaggtgctggagaccatcggtgtgctggcggtcattgccaatgggatggtcattgccttcacatctgagttcatcccccgagtggtctacaagtaccgctatagcccatgcctgaaagaaggcaactctactgtcgactgcctcaagggctacgtcaaccacagcctgtccgtcttccacaccaaggacttccaggaccctgatgggattgagggctcagaaaacgtgactctgtgcagatacagggactaccgcaatccccccgattacaacttctccgagcagttctggttcctcctggccatccgcctggccttcgtcatcctctttgagcacgtggccttgtgcatcaagctcatcgccgcctggttcgtgcccgacatccctcagtcggtgaagaacaaggttctggaggtgaagtaccagaggctgcgtgagaagatgtggcatggaaggcagaggctgggtggggtgggggcaggctctcggcccccaatgcctgcccatcccaccccagcatccatcttcagtgccaggagcacagacgtgtagggccagagcccgtccagaggccaccaggagctgagacagtgccaccaccagcacctcccacaagcccaccgctgtgcgtgttgaggggtgctgtgagaaggctgtgcccatgtggggccgcaggaatcccctgtatgttcagggctgtgagctgccaccctattccgcctgctccgtctttgtgggggctctcaggcttggcacagccctgacttgaactctgggtgaccctgggcacccacagaactgggagtgagggctcctcaggcagccacaaggcaggaaaactggcgcaaatttcctgggcctccctctgacttctgggcgccagatcctgccgtgcccccatcctggctgttgggggtgtcctgagcccacctcgctggcctgttcccttcagccaacccgtttctgcagtaaaattaagcctgtctgtcttgcaaaa

SEQ ID NO: 665711 - DNA, 2922 bp, Homo sapiens
aaaccccagctggaactccggccacagccagcatgcagggcgaagagagcctccggatcctggtggagcccgaaggggacagcttcccgctgatggagatcagcacctgtgagaccgaggcctccgagcagtgggactatgtcctcgtggcccaacgtcacacccagagagacccccggcaggcgcggcagcaacagttcctggaggagctcaggagaaagggcttccacattaaggtgatccgggaccagaaacaggtcttctttgggatccgtgctgacaacagtgtctttggcctgtaccgcactctcctcctggagcctgaggggcctgccccccacgccgagctggccgcgccgaccaccatcccggtcaccacgagtctcagaatccgaatcgtgaacttcgttgtcatgaacaacaagacctcggctggtgagaccttcgaggatctgatgaaggacggggtctttgaggccaggttccccctgcacaagggggagggacgcctgaagaagacgtgggcgcggtggagacacatgttccgggagcagccagttgatgaaatcaggaactactttggggaaaaggtggccctgtacttcgtctggctgggctggtacacctacatgctggtgccggccgccctgacgggcctcttagtctttctgagcggattctcgctgtttgaggccagccagatcagcaaggagatctgtgaggcccacgacatcctcatgtgtcccctcggcgaccacagccgcaggtaccagcggctctcggaaacctgcacttttgccaagctcacccacctctttgacaatgatggcacggtggtgttcgccatcttcatggctctctgggccacggtgttcctggagatctggaagcggcagcgcgcccgcgtggtcctgcactgggacctgtacgtgtgggacgaggaacaggtgaggtggagctggcagcgcagctgaggccgacccgagcaggggctgttggcgcccgatgccctgcacggcccacatatgcctgccgtgtctgaggaggaaatggcacttcagctcattaactgccccgactacaagctccggccataccagcactcctacctacgcagcaccgtcatcctcgtcctgaccctgctcatgatctgcctcatgatcggcatggcccacgtcctggtggtctaccgcgtcctggcctccgcgctcttcagcagctcggccgtgcccttcctggaggagcaggtgaccacggccgtggtggtgaccggggctctggtgcactatgtgaccatcgtcatcatgaccaagatcaacaggcgcgtggccctgaagctttgtgacttcgagatgcccaggaccttctcggagcgagagagcaggttcaccatccgcttcttcacactgcagttcttcacccatttctcgtctctcatctacatcgccttcatcctgggcaggatcaacggccaccccgggaagtccacgcgcctggcgggcttgtggaagctggaagagtgccacgccagcggctgcatgatggacctcttcgtgcagatggccatcatcatgggcctgaagcagacgctcagcaactgcgtcgagtacctggtcccgtgggtgacccacaagtgccgctctctgcgggcctccgagtccgggcacctgccccgggaccccgagctcagggactggcggcgcaactaccttctgaacccggtcaacaccttcagcctgttcgacgagttcatggagatgatgatccagtacggcttcaccaccatcttcgtggccgccttcccgctggcgccgctgctcgcgctcttcagcaacctcgtggagatccgcctggacgccatcaagatggtctggttgcagcggcgcctggtgccgcgcaaggccaaggacatcgggacctggctgcaggtgctggagaccatcggtgtgctggcggtcattgccaatgggatggtcattgccttcacatctgagttcatcccccgagtggtctacaagtaccgctatagcccatgcctgaaagaaggcaactctactgtcgactgcctcaagggctacgtcaaccacagcctgtccgtcttccacaccaaggacttccaggaccctgatgggattgagggctcagaaaacgtgactctgtgcagatacagggactaccgcaatccccccgattacaacttctccgagcagttctggttcctcctggccatccgcctggccttcgtcatcctctttgagcacgtggccttgtgcatcaagctcatcgccgcctggttcgtgcccgacatccctcagtcggtgaagaacaaggttctggaggtgaagtaccagaggctgcgtgagaagatgtggcatggaaggcagaggctgggtggggtgggggcaggctctcggcccccaatgcctgcccatcccaccccagcatccatcttcagtgccaggagcacagacgtgtagggccagagcccgtccagaggccaccaggagctgagacagtgccaccaccagcacctcccacaagcccaccgctgtgcgtgttgaggggtgctgtgagaaggctgtgcccatgtggggccgcaggaatcccctgtatgttcagggctgtgagctgccaccctattccgcctgctccgtctttgtgggggctctcaggcttggcacagccctgacttgaactctgggtgaccctgggcacccacagaactgggagtgagggctcctcaggcagccacaaggcaggaaaactggcgcaaatttcctgggcctccctctgacttctgggcgccagatcctgccgtgcccccatcctggctgttgggggtgtcctgagcccacctcgctggcctgttcccttcagccaacccgtttctgcagtaaaattaagcctgtctgtcttgcaaaa

SEQ ID NO: 665712 - DNA, 266 bp, Homo sapiens
gaacggatgtttccccctccttttccaacctctacccccccattaggggatttttctataaaaacagtggaaccccagccctaaagtcctgctgaaataaagtccttttgttttaattggttttaaaaaaaaaaaaactacttttggtccccttagctatgaggggggggcaaattcagggatttaagactaatgattttgttttgttttggtccccaaagagcaaatcaaaaaaaaattacagcaagaaaaaaaaaggggtttta

SEQ ID NO: 665713 - DNA, 1518 bp, Homo sapiens
ggctcggtacttgcatatggcaaggccaagcagacgccccagggaggaacctggttttaatgggccctgtgctcagggaggccttcagtcagcagggtcgcctcagcagcatttgggagcctgccctgcagctccctgcctccaccctgcacgctgtgcccacacccccccacaacacgtaggtgaaagcacaggcaccatgcggaggccccgagcaccccttagtggggcggggtggggggaggaagtcagtccataatgttgtagttacggatcttggggggcctctggcagcctttagcttttgcaggatgagaccgggaggctcctgtggtcttggccttgccatatgcaattgcatatggcaaggccaaggacatcgggacctggctgcaggtgctggagaccatcggtgtgctggcggtcattgccaatgggatggtcattgccttcacatctgagttcatcccccgagtggtctacaagtaccgctatagcccatgcctgaaagaaggcaactctactgtcgactgcctcaagggctacgtcaaccacagcctgtccgtcttccacaccaaggacttccaggaccctgatgggattgagggctcagaaaacgtgactctgtgcagatacagggactaccgcaatccccccgattacaacttctccgagcagttctggttcctcctggccatccgcctggccttcgtcatcctctttgaggtgagccagaaccgggagaggcctcggagtggttctgggcagtgctctccccagtccttctccccggccctgaacccccaaatgccagctggcacctgaccgtgctgggcctctcctgtgcgcgctagcacgtggccttgtgcatcaagctcatcgccgcctggttcgtgcccgacatccctcagtcggtgaagaacaaggttctggaggtgaagtaccagaggctgcgtgagaagatgtggcatggaaggcagaggctgggtggggtgggggcaggctctcggcccccaatgcctgcccatcccaccccagcatccatcttcagtgccaggagcacagacgtgtagggccagagcccgtccagaggccaccaggagctgagacagtgccaccaccagcacctcccacaagcccaccgctgtgcgtgttgaggggtgctgtgagaaggctgtgcccatgtggggccgcaggaatcccctgtatgttcagggctgtgagctgccaccctattccgcctgctccgtctttgtgggggctctcaggcttggcacagccctgacttgaactctgggtgaccctgggcacccacagaactgggagtgagggctcctcaggcagccacaaggcaggaaaactggcgcaaatttcctgggcctccctctgacttctgggcgccagatcctgccgtgcccccatcctggctgttgggggtgtcctgagcccacctcgctggcctgttcccttcagccaacccgtttctgcagtaaaattaagcctgtctgtcttgcaaaa

SEQ ID NO: 665714 - DNA, 415 bp, Homo sapiens
ggggggagggtaaaaaaaaaattttaaaaaaaaaaaaaaaaaaaaaaaaaaaaaaaaggaaaaaaaaaaaaaaaaaaaaaaaaaaaaaaaaaaaaaaaaaaaaccttgtggcccgcttggccccagtcgcttttaaactgggccaggtttttccttggggccgaatttggggctaattgggccatttgcccttatggggggccgttttccatttaatggcccgcggtttaaaaaggtcgaactgggaaaaccctgggggtaccccaattaaatggcttggaagaaaatccccttttcccaggttggcttaatagcaaaggggcccaaccggttggcctttccaaacagttgcccaccttgatgggcaatggaaatttgaaggcgtaaatttttggtaaatcggggtattttggtc

SEQ ID NO: 665715 - DNA, 1292 bp, Homo sapiens
  misc_feature (1211)..(1211): n is a, c, g, or t
  misc_feature (1231)..(1231): n is a, c, g, or t
ggctcggtacttgcatatggcaaggccaagcagacgccccagggaggaacctggttttaatgggccctgtgctcagggaggccttcagtcagcagggtcgcctcagcagcatttgggagcctgccctgcagctccctgcctccaccctgcacgctgtgcccacacccccccacaacacgtaggtgaaagcacaggcaccatgcggaggccccgagcaccccttagtggggcggggtggggggaggaagtcagtccataatgttgtagttacggatcttggggggcctctggcagcctttagcttttgcaggatgagaccgggaggctcctgtggtcttggccttgccatatgcaattgcatatggcaaggccaaggacatcgggacctggctgcaggtgctggagaccatcggtgtgctggcggtcattgccaatgggatggtcattgccttcacatctgagttcatcccccgagtggtctacaagtaccgctatagcccatgcctgaaagaaggcaactctactgtcgactgcctcaagggctacgtcaaccacagcctgtccgtcttccacaccaaggacttccaggaccctgatgggattgagggctcagaaaacgtgactctgtgcagatacagggactaccgcaatccccccgattacaacttctccgagcagttctggttcctcctggccatccgcctggccttcgtcatcctctttgaggtgagccagaaccgggagaggcctcggagtggttctgggcagtgctctccccagtccttctccccggccctgaacccccaaatgccagctggcacctgaccgtgctgggcctctcctgtgcgcgctagcacgtggccttgtgcatcaagctcatcgccgcctggttcgtgcccgacatccctcagtcggtgaagaacaaggttctggaggtgaagtaccagaggctgcgtgagaagatgtggcatggaaggcagaggctgggtggggtgggggcaggctctcggcccccaatgcctgcccatcccaccccagcatccatcttcagtgccaggagcacagacgtgtagggccagagcccgtccagaggccaccaggagctgagcgggagaaactggctctgagcgggagaaactggctctgagcgggagaaactggctctgagcgggagaaactggctctgagcgggagaaactggctctgagcgngagaaactggctctgagcgngagaaactggcactgagcgggagaaactggctctgagcgagagaaactggctctgagcggg

SEQ ID NO: 665716 - DNA, 231 bp, Homo sapiens
agtgaaaaaagaagtctcaagaaaaaacaatcagcaggcatatatttattttagttgttataagttgttggccaggcacagtggctcacttctataatcccagtacattgggaggctgaggcaggaggatcggttgggcccaggaggttgaggctgcagtgagccatgatcatgtgatcacgccactgcactctagcctgagccacagagtgagaccctctctgtgaaaat

SEQ ID NO: 665717 - DNA, 534 bp, Homo sapiens
  misc_feature (98)..(98): n is a, c, g, or t
ccgacccgagcaggggctgttggcgcccgatgccctgcacggcccacatatgcctgccgtgtctgaggaggaaatggcacttcagctcattaactgcnccgtccagaggccaccaggagctgagacagtgccaccaccagcacctcccacaagcccaccgctgtgcgtgttgaggggtgctgtgagaaggctgtgcccatgtggggccgcaggaatcccctgtatgttcagggctgtgagctgccaccctattccgcctgctccgtctttgtgggggctctcaggcttggcacagccctgacttgaactctgggtgaccctgggcacccacagaactgggagtgagggctcctcaggcagccacaaggcaggaaaactggcgcaaatttcctgggcctccctctgacttctgggcgccagatcctgccgtgcccccatcctggctgttgggggtgtcctgagcccacctcgctggcctgttcccttcagccaacccgtttctgcagtaaaattaagcctgtctgtcttgcaaaa

SEQ ID NO: 665718 - DNA, 787 bp, Homo sapiens
  misc_feature (433)..(433): n is a, c, g, or t
  misc_feature (529)..(529): n is a, c, g, or t
  misc_feature (764)..(764): n is a, c, g, or t
ggctcggtacttgcatatggcaaggccaagcagacgccccagggaggaacctggttttaatgggccctgtgctcagggaggccttcagtcagcagggtcgcctcagcagcatttgggagcctgccctgcagctccctgcctccaccctgcacgctgtgcccacacccccccacaacacgtaggtgaaagcacaggcaccatgcggaggccccgagcaccccttagtggggcggggtggggggaggaagtcagtccataatgttgtagttacggatcttggggggcctctggcagcctttagcttttgcaggatgagaccgggaggctcctgtggtcttggcctttgcctgggctgctgtcttcatccctggggtggcaatgcctgcctgcatcttgacgggcctcctgtcggctgctggaggagctgggagcncggaggctgcatcacggaaggcgggcacacaggcctcacttgggcgagaagagacccagagacgcatggccttcctcctgggccggctcccgaccngagcccatctgagctcagcccacaggaaggggaggtgccaagaaccccaagcacaggtggctgcaggctggtgggtgccgaggaggccactaggaggctgagacggtgagagccagggccaggcagtggcctgagagctggacagcctctgggtatctccacaccccacccttctcctgcctttcagaagataaacgcaccgcgaacgccccgccgcccaggcctcgctaccttnagtactcagggtctgccgtcgtg

SEQ ID NO: 665719 - DNA, 133 bp, Homo sapiens
caaggggtcattacttatggagtttagaaaactttcaagttcgtgacatatgttaagtgcacttaaatagacagggagagaaagatttataaagggcagtcattcaaagaggatttttacagttggggtgtgc

SEQ ID NO: 665720 - DNA, 782 bp, Homo sapiens
gagacgcagtctccgtcgtgacgttagtcgcagtcttcgccgctaacgttgtatgagtggctaaaatggtgaaatgctgctccgccatggatgtgcttctcgctgctgtgcaaaattcgaagttaaaaggactgacatttcacgtattccccaagatgaaaacatcaaaaggaaatgggtattagcaatgaaaagattgatgtgaatgcagcggcatttgggagcctaaaaaaggagatgtgtgtgtccgaggcatttaagaagacagatttgtgacagaagtgtccaaatattaaagctgaaacctggagtcatactttctatcttgtgattctccatatcacctacaggggacaaagagaaaaaccttcatgtgtagaaaaaatttcaccctcaaaaccgttccagccactaactacaatcaccatctgtgttgggtgcttcctcatgtattgaagaattccaatcccagttcattttgtgaacatagctacagttgtaatggacagtccaaagaaaacttaaagcataaattagatcatgtgatcggcgagctaggaggatacaacgggacagtctacggaaatgttttagaccggggaaaacgttttcagaactccattggggaagacactcagggacttaagggttactgtctgatccgcaagaaccgcaaatgatggccttctcgtgggcctgtggccgggagcattgacaggtattttcgggacatttgtgtcgttcccaaatggttggccacttttaaatcttccccaatttcc

SEQ ID NO: 665721 - DNA, 858 bp, Homo sapiens
cagagagggtgcccgcagtgtgcattgctatatattgggggtcccgcaagatcgatgttagcacccggggaaagattaaacgtcgtggtgctacgccccgctgacgattgtagccacaattatagttgcccctggtcgacccgcgtaggtgttgggcgacagaacaaagaaggtgtgggtttataagaaggcggaagattagcccctgcgtgagctccgtttgatatgttgcgcccgttaatgtatggtgcgtccacccgcccccacgatcgtaccgctatttacatcagtggcgtattatatactacccctgttctcccttcggtcaagtgggcgccgaaaattcgcagtgtctatgtagccggcgagagaagcaccttgtggtaaattaaacccgatcacgtctgatctcacacgatgttttttaaaaacatatagacggcgtcatcgattatgttagccactacgagatatacagacagcaccatttgtgttggtagaatgctgtccaccagataaaggagcaccgtatgtatatgcttatacgcgaagaccacacaaagatagtaggagaggggccacacctacattcgttagcccacacacacctattacaggctgatagaacataagtgtacgaaattatgtgttggcccgcagtcgtcgattgtggtggtgcaggagttcggttttacttaatgagcgcactccggcagatagaccttcgtgatgtagaaagacagtggtacccacttatactttgtagtgcacactgtagagtgcatgtctttaaaactgtagttgtgtgaatacctctctctgtgaagatatattataaagaagaaacataaaaaaaac

SEQ ID NO: 665722 - DNA, 844 bp, Homo sapiens
gtccgtgatgtccgggtcttaagcgcggcgctatctcttcccttgtccttctgcactcttcgggacgcgcctctgtcctattctctcctcctggtggtcatttttctcccgcgggcgcctgcgtttccccccgcaattgggcctctttcaccctttgtggttgtccaacgccccggggcgcctggccgtgctgtccccccggtgtgttggccccgcctctgtaacacccccttctttctggaggtcctccgcattcttcatggaagcgggccccaccagcactgggctacactctcgctccggcaccatacggaggtccccttggccaagcatcttttgtcccgcgagccagcaacccacgtaattgcgggtgcctgggcgtaacccccccgtcaggcccgtgtcgccccccagaggggccgcccccagaagtcccctgcctggagcactggagtgtccctcaaccttttctagcccttatggaaggtgattagggtccacaaacggtccacccgaggtcagtcagcgagcacacactttcttccctgcactcagggaattcaccccaactttttgtgacaggagggtcccaatgtacgagcacccgaagcacactgtgcgaagtctgtcaaccaccaaccctggcgcaaccatcagtctcccctgatcttttttatcgatgagcttccccactcttgtgagcaatctcgtcgaggacgacacgcataggaataacccgtatttcccagaggaggggagaaaaaactattttaggccaaccccaacagtcctttcgcttgcaccccgcctttcaaagatttcccctccccccccacataacaca

SEQ ID NO: 665723 - DNA, 1968 bp, Homo sapiens
  misc_feature (120)..(120): n is a, c, g, or t
  misc_feature (162)..(162): n is a, c, g, or t
  misc_feature (232)..(232): n is a, c, g, or t
  misc_feature (780)..(780): n is a, c, g, or t
  misc_feature (947)..(947): n is a, c, g, or t
tagtactacgctcgcagagtgactgtgtctattatgctatgaatgagctatactgtctccaggaagtcttctcctcctcgctgcatgcgaaacctggtacaaccatctatcatagccaanatccatcattgcactccatgtatatgtcggtacataagtagngctaatcagcatatctaaaaaacatatagaagaattcaccctgctcatttgtcagctgttctggagctcnccttgaggtattgagccgcatgtgctactcacgtcatgtaccagtgcgcagagacgctgtcttgcgtcttgtacatgacatgcattgccaatacatgtatggcactgcttaatcgtgcaaagtacatatagtacctcaaaaggtgcatgcatacaccctgtacatgggtaaattcatggtaagggcaccctgtgtgcatgccctctactttctccttcaagaatccattcgttcacaaatactatgaatgcgacggggcattgatataggagtgttagtgcttgtatagagcccgacacaacactatgcctataaggactatagatacgtctgtgattacacttaagctacgcgtacgatactctcttgaatccacggaccaaatgaagcgggagtggggaaggtaagatttcaggggccatactataccttcattcgcggtgaaccaagaaacgccaccataattagctaatttaaatcgcttacttatcctgataaaaattttctaatatccatttattctccttactaatatatactagctcctnaaaaagcttttaccatgaatcccccgttcgaaatttttcggcgctaatcctaaatcatacttaaaggctttgtgatgatattatccttccaacaaggccccaaacgctagcggacaacactctttcattcttaaccgtttattttcttcttgaccccttgtggaaanaacctaaaaggcatgaagacaatttagtcaccgctaaagaacaaaccccccgtatgagatgtaattctctgggtaccacaactcggcgatctcggttcattttcccttgttaaagtatgctgtgccattgaggcaccttacggcagatataaaccccgtggtcatttgtggtgtggccacaccaaaaaactttgtgggggccaattttcaattcggcacgcaggacacattgtccatgtgcaccagatgtggaccctagcgtaagtctcctatgcgaggtacgagatacccccattggggccaggatccaattaaggacgcatggcacgagtactaggccccattagcacatgaaagaaggacctgtcgtaacaattgttgtagagccgctggaggggcataaatatccttaccagtggcgaagcgtttgataatttctccacgaaaatatgttggccaccatgatttccacagtcaattggttgtgagaacatatatatgcagtagagcagacgcgtgtgcacacaactacacagaagcagaggccacagcacacaccaaggtgtacgtcgtcaccacagatacataatagggccatagaaaagagggatataccaccaagacggggggaatccgccggcataaaaaagaggacgccatgtatatgggcagcagcaaaacgtagaccaagagaatcgagagcgagacacgacgagaacgacatcgaacaagaaggaaatgaggagcggagcgcagagacgaacgaaacgcggagccgagattcacacgaccgggatagtgcgcacatgtagtacagtcgaaagacaagggcgacgaaacaaacgaaacgacgagaagttagacacacaagagtggatctagtgcagcactccacatgaagtctaagacgacgtagaggacagaggacagaatgaacagacagcggcgacagtcgacgcgtacacagagaaggctaggaagcagctgaggagcacagcgaccgaagcgcggaggtgggaga

SEQ ID NO: 665724 - DNA, 889 bp, Homo sapiens
  misc_feature (30)..(30): n is a, c, g, or t
  misc_feature (65)..(65): n is a, c, g, or t
  misc_feature (68)..(68): n is a, c, g, or t
  misc_feature (101)..(101): n is a, c, g, or t
  misc_feature (103)..(103): n is a, c, g, or t
  misc_feature (116)..(117): n is a, c, g, or t
  misc_feature (137)..(137): n is a, c, g, or t
  misc_feature (141)..(141): n is a, c, g, or t
  misc_feature (143)..(143): n is a, c, g, or t
  misc_feature (145)..(145): n is a, c, g, or t
  misc_feature (148)..(148): n is a, c, g, or t
  misc_feature (169)..(171): n is a, c, g, or t
  misc_feature (177)..(177): n is a, c, g, or t
  misc_feature (189)..(191): n is a, c, g, or t
  misc_feature (199)..(200): n is a, c, g, or t
  misc_feature (204)..(204): n is a, c, g, or t
  misc_feature (206)..(206): n is a, c, g, or t
  misc_feature (213)..(214): n is a, c, g, or t
  misc_feature (235)..(237): n is a, c, g, or t
  misc_feature (247)..(247): n is a, c, g, or t
  misc_feature (257)..(258): n is a, c, g, or t
  misc_feature (262)..(263): n is a, c, g, or t
  misc_feature (268)..(270): n is a, c, g, or t
  misc_feature (282)..(282): n is a, c, g, or t
  misc_feature (286)..(286): n is a, c, g, or t
  misc_feature (289)..(289): n is a, c, g, or t
  misc_feature (293)..(294): n is a, c, g, or t
  misc_feature (297)..(297): n is a, c, g, or t
  misc_feature (300)..(300): n is a, c, g, or t
  misc_feature (308)..(308): n is a, c, g, or t
  misc_feature (314)..(314): n is a, c, g, or t
  misc_feature (320)..(320): n is a, c, g, or t
  misc_feature (341)..(341): n is a, c, g, or t
  misc_feature (366)..(366): n is a, c, g, or t
  misc_feature (377)..(377): n is a, c, g, or t
  misc_feature (380)..(380): n is a, c, g, or t
  misc_feature (829)..(829): n is a, c, g, or t
  misc_feature (874)..(874): n is a, c, g, or t
ggggagaaacgacttcaaaactgcgatagngctacttatcggtgggtatctggtgattcttagtnggnacaaatgccctgcctagcccccttaactgcgtnanttcacagatgganngttttgttgttggtgttgtngggngncnggnttgccttacacgtggggaggnnngaccancttgagtgaaannncgcggtgnntttnantttgttnntatgtgtgttttaatgcaacnnncagctcacantttccaagtnntttnnttttnnnttgcatcatgtntttnttntttnngtnagntcttaaantgaacntcattnttcatggtatccacaaatttnctatctgtcactatttattaattcnttccatcaaangancttaaactagagaattaagcccactttatgaagagcgatttcacggctgcttgaaccattcgaatttggatttgtgttcagcactttaaaaggttcaactttttgcttctacccagattggtctcaggtctgtcttctcatccatccctttctaaagccaaagcacatttgtagcacataatccaggagaagcagaagtaaatgctatgactggtggtatttcttagcctggttttgtagtttttaggcagtaagtagattatgagcgaacaaatgtgaaggttcatgtggagtcataatacctgtgatctaggtatggtcttagtcaagctcagagacaacaaagccttctaggtcattaggcaatggtgggtttctagcaccatagactgtctactgacctcatttttcttttggaatggagttagacatggggagctcaaaaaganagacctagcaattcatttgagtggaagacacacatcaaagctgtnacaggcatgtagatt

SEQ ID NO: 665725 - DNA, 118 bp, Homo sapiens
tttcggctgactctagaggcgcgtaattctgcaccacagccttggttggtataaggcaggagtatgtatgacggtcatctgtgatgagcagtggctcaccaccgtcttgaacgaggtg

SEQ ID NO: 665726 - DNA, 364 bp, Homo sapiens
tcttcccatgagactgctggtgtcttctccagtgaggcctcatcctgcgagaactcatacagggtgaccgaggcaccgtccagcatcttctgagcggacacatgcagacaatggggctcgggggccaacctcagcaagacctcaggaaggacggacacaggcctacacaccaggccacagacaatggggctcggggggccaacctcagcaagacctcaggaaggacggacacaggtctacacaccaggccacagacaatggggctcgggggccaacctcagcacagacctcaggaaggacggacacaggtctacacaccaggccacagacaatggggctcggggggccaacctcagcaagacct

SEQ ID NO: 665727 - DNA, 737 bp, Homo sapiens
aggccttctttcgaaaggcctctgacttggcatacaggcgcaggttgcagtagtcagaggccttctttcgaaaggcagatggacgtgagccctgccccgtggtcccaggcagtggagggacagatccggagcctgggtcagagaactaatgaaaggaagcatcgaagaacggaagaccaggaaggcacatacgaagaaaaagaagagagagaagcacatgtacggcgaactcagacgatagccagacagggacagacccagaaaagcaaacaatgacaaacaagaacacataagaagagacaaaaagagaaaaaggacagagaaagaacacagagagaacaaaacaaacaaagaaaaaaaaaaggaaaaaaaaaaaagtaaaacacatagacaacaaaaagaacaaaaaaaacagaagaaaaaaaacagaaagaaaaaaaaaagaaaaagaagagacaaatacaagaaaaaaagaaagaaaagagacaaagagagaaaaaaaaaaaaagaaaagaacaaaaaaagaaaaagaaaagaaggcacacaaacaaacaagaagagagaaaaaaagaccaagaaagaaaaaagagaaaagcaagagaaaaagaaaaacaaaaagaaagaacaaaacaaaagaacaaacgaaaaaacaaagaagaaagaaaaagaaaaagagaaagaaaacaccaacaaaacaaacaaaaagaaagatacaagaaaaacaaaaaaagaagcac

SEQ ID NO: 665728 - DNA, 176 bp, Homo sapiens
gctgtacagtagtattgatcattaaattgtactggcaccctgattgtgacgcactcatagctaatctaagctgagtgtctattgctccagcgtacactataatcaacagcaaagctaaggagctgcaggcactttatagcctgtaaagcctgaaatattttactatcaactcatca

SEQ ID NO: 665729 - DNA, 326 bp, Homo sapiens
catgcaactctgcctcccgggttcaatgtgattctccttgcctcagtctcctgagtagctgggactacaggtgcgtgccatcaggcctggctaattttcgtattttaagtagacatggggtttcaccagtgtgggccaggctggtctcgaactcctgacctcatgatccgcccgcctcggcctcccaaagtgctgggatcatacggcgagagccactgtgcccagcgaagcagggtcacttttcaagggtggtaagctagctggggttagaactaaacggcagagagccattccatacctgtagttctagctactggcggaggcca

SEQ ID NO: 665730 - DNA, 485 bp, Homo sapiens
tgtttcatggctcttttcggtgtccccatgtattacgaacgtacagtttctctccctcctcccctcatatgcactatgctcagatttcattatggtgcggcccatgtacattcaagtgtgatacttggcacatgaaaacattcaaacagtctctgtggaaatctgagagaaattggaggaaagctgccgagatgcattcctcctgtagtagctacaagctaatgcttcatcctctctaataactttagatagacaggggctagtcgcacagaactctgagaagccctggaaaaacgcagatccttgtttgacgatctcaagcgcagagtctgcaagttcatcccctctttcctgaggtctgttggctggcggctgcagaacattggtgatgacctggaccacgccatttgtggccctcatgtctggctcggcaacaggctccttgttgacactcaacacattgttatacaagctgacttccagct

SEQ ID NO: 665731 - DNA, 840 bp, Homo sapiens
  misc_feature (42)..(42): n is a, c, g, or t
  misc_feature (71)..(71): n is a, c, g, or t
  misc_feature (86)..(86): n is a, c, g, or t
  misc_feature (98)..(98): n is a, c, g, or t
  misc_feature (126)..(126): n is a, c, g, or t
  misc_feature (128)..(128): n is a, c, g, or t
  misc_feature (130)..(130): n is a, c, g, or t
  misc_feature (136)..(136): n is a, c, g, or t
  misc_feature (181)..(181): n is a, c, g, or t
  misc_feature (274)..(274): n is a, c, g, or t
  misc_feature (299)..(299): n is a, c, g, or t
  misc_feature (314)..(314): n is a, c, g, or t
  misc_feature (319)..(319): n is a, c, g, or t
  misc_feature (321)..(321): n is a, c, g, or t
  misc_feature (392)..(392): n is a, c, g, or t
  misc_feature (445)..(445): n is a, c, g, or t
  misc_feature (450)..(450): n is a, c, g, or t
  misc_feature (594)..(594): n is a, c, g, or t
  misc_feature (702)..(702): n is a, c, g, or t
  misc_feature (726)..(726): n is a, c, g, or t
  misc_feature (730)..(730): n is a, c, g, or t
  misc_feature (744)..(744): n is a, c, g, or t
  misc_feature (769)..(769): n is a, c, g, or t
  misc_feature (788)..(788): n is a, c, g, or t
  misc_feature (804)..(804): n is a, c, g, or t
  misc_feature (818)..(818): n is a, c, g, or t
  misc_feature (827)..(827): n is a, c, g, or t
  misc_feature (831)..(831): n is a, c, g, or t
tttggtttcgtggtgtcccaacaaaaaatcccgttggcacgntaaacctcatgaactgggagtgcgccatnccgggaaagaaaggnactccgtgggangaaggcttgtttaaactacggatgcttntnanagatgnttatccatcttcgccaccaaaatgtaaattcgaaccaccattttntcacccgaatgtgtaacttcgggaacagtgtgcctgtccttctaagaggagaacaagaactggagcccagccataacaatcaaacagatcctnttaggaaaacaggaacttctaaatnaaccaaatatccaanacccngntcaagaagaggcctacacgattaactgccaaaacagagtggagtacgagaaaagggtccgagaacaagccnagaagtttgcgccctcataagcagcgaccttgtggcatcgtcaaaaggaaggnattgntttggcaagaacttgttaacaacatttttgcaaatctaaagtagctccaaacaataactagtcacctgggggggttgagcgggcgccatcttccattgccgccgcgggtgtgcgatctcaattcgctaaattgcccgtttccanacagggtctcttcttcggtcttttgtatttttgattgttatgtaaaactcgcttttattttaatattgatgtcagtatttcaactgctgtaaaattataaacttttanacttgggtaagtcccccaggggcnagtncctcgatctgggangcaggcatccttctcaccgtgcagngctgcacttggcctcagcntggctgtatggaaatncaccctccctcctnccgttcctntctngaaccttct

SEQ ID NO: 665732 - DNA, 336 bp, Homo sapiens
acccagagttaggatcgtggctgagcgtttacatgggagtcatatcgctgagagcgtgcgccagctcctcgctgatggctttgtacttcagcttctgagcgtacagctcgtcttgtaagccatcaatgcttttctgcaatctagatactgacctctccgcaaactcagcccgagtctcagtctccttcagctggtcgtgaaggaccttgatctcttcctcatatctgtcttccttctgcgagtacttatcagcctcagccttcagtgacttcaagacccgcgtcacagttctcaattgttcttcaagctcgtgacattggccttctgagagctcag

SEQ ID NO: 665733 - DNA, 150 bp, Homo sapiens
acctgtttgttaacaagtcaccaagggctggaaaaccagatactcttcagggttgacacaaaaaataggcacttaatttgctcctgagtgtgagccaccagggaaggcctcacccggagattagcaggtcagggccctcccgccgcccag

SEQ ID NO: 665734 - DNA, 609 bp, Homo sapiens
atttgtggtgggaggactttgcatgatccagatagttgtaggatcccagtgtagtaggagttatctacccctcagtagtatggccaacctgggcagtcctgcaagtgatagattagataggttttgagatctggtaagtgggtgtagtttcaacatcagttgctgcttctcgccacacagcgatcgagaccatagggggccagcactagtggcagctgggggtagccttcttcccgctaggtaacgtggaggtcacctgtgaaatacaccagtagttgttgcatgccaacagttccacgccagttgcctgccacacagccttgactcactggactagggctaagaacttgccagtgaggctgccgcacaagcactccagaagtggttgggcaggcactcagacctccgaggcggctacaaattcaggccacctcacttagggtttcagtcacgccagagtttgtctctgagggtgtgcagttttagttactgttgcaaatagatatagtaaaaatttaatttcaaatcaaaaactgtcctcccaccacaaacgtgggatccgtgcacgttaacgattactaggacaggaaaatcctttctgggttgttt

SEQ ID NO: 665735 - DNA, 486 bp, Homo sapiens
  misc_feature (463)..(463): n is a, c, g, or t
ggctcggtacttgcatatggcaaggccaagcagacgccccagggaggaacctggttttaatgggccctgtgctcagggaggccttcagtcagcagggtcgcctcagcagcatttgggagcctgccctgcagctccctgcctccaccctgcacgctgtgcccacacccccccacaacacgtaggtgaaagcacaggcaccatgcggaggccccgagcaccccttagtggggcggggtggggggaggaagtcagtccataatgttgtagttacggatcttggggggcctctggcagcctttagcttttgcaggatgagaccgggaggctcctgtggtcttggccttgccatatgcaagccaaggagttgtgtaacaaagatggaagatgaaccacgtgacgaaatagaaaaagctacctatggagttgtgcccctacgcaggtacttggccttgccatatgcaantatgcaggccttgccataataca

SEQ ID NO: 665736 - DNA, 458 bp, Homo sapiens
ggctcggtacttgcatatggcaaggccaagcagacgccccagggaggaacctggttttaatgggccctgtgctcagggaggccttcagtcagcagggtcgcctcagcagcatttgggagcctgccctgcagctccctgcctccaccctgcacgctgtgcccacacccccccacaacacgtaggtgaaagcacaggcaccatgcggaggccccgagcaccccttagtggggcggggtggggggaggaagtcagtccataatgttgtagttacggatcttggggggcctctggcagcctttagcttttgcaggatgagaccgggaggctcctgtggtcttggccttgccatatgcaagccaaggagttgtgtaacaaagatggaagatgaaccacgtgacgaaatagaaaaagctacctatggagttgtgcccctacttggccttgccatatgcaagtag

SEQ ID NO: 665737 - DNA, 609 bp, Homo sapiens
accaccgttatagaggatccctctctgctcccagattcttgctagcgtcatcaatttggtggatcttttcaaaaaaaccaactcctggattcattgattttttggaagagtttttgtgtctctatctccttcagttctgctctgatcttagttatttcttgccttccgctagcttttgaatgtgtttgctcttgcttctctagttcttttaattgtgatgttagggcgtcaattttagacctttcctgcttactcttgtgggcatttagtactataaatttccttctaaacactgctttagctgtgtcccagagattctggtacgttttgtcttttgtcttattagtttcaaagaacttatttatttctgctttaatttggttatttacccagtagtcattcaggagcaggttgttcagtttccatgcagttgtacagttttgagtgagtttgttaatcctgagttctaatttgattgcactgtggtctgagaaactgttatgatttttgttcttttgcatttgctgaggagtgttttacttccaattatgtggttggccaattttagaataagtcgatgtggtgcgagaacaaggttatctattgctt

SEQ ID NO: 665738 - DNA, 2556 bp, Homo sapiens
  misc_feature (2140)..(2140): n is a, c, g, or t
  misc_feature (2143)..(2143): n is a, c, g, or t
  misc_feature (2147)..(2147): n is a, c, g, or t
  misc_feature (2149)..(2153): n is a, c, g, or t
  misc_feature (2156)..(2157): n is a, c, g, or t
  misc_feature (2177)..(2177): n is a, c, g, or t
aaaccccagctggaactccggccacagccagcatgcagggcgaagagagcctccggatcctggtggagcccgaaggggacagcttcccgctgatggagatcagcacctgtgagaccgaggcctccgagcagtgggactatgtcctcgtggcccaacgtcacacccagagagacccccggcaggcgcggcagcaacagttcctggaggagctcaggagaaagggcttccacattaaggtgatccgggaccagaaacaggtcttctttgggatccgtgctgacaacagtgtctttggcctgtaccgcactctcctcctggagcctgaggggcctgccccccacgccgagctggccgcgccgaccaccatcccggtcaccacgagtctcagaatccgaatcgtgaacttcgttgtcatgaacaacaagacctcggctggtgagaccttcgaggatctgatgaaggacggggtctttgaggccaggttccccctgcacaagggggagggacgcctgaagaagacgtgggcgcggtggagacacatgttccgggagcagccagttgatgaaatcaggaactactttggggaaaaggtggccctgtacttcgtctggctgggctggtacacctacatgctggtgccggccgccctgacgggcctcttagtctttctgagcggattctcgctgtttgaggccagccagatcagcaaggagatctgtgaggcccacgacatcctcatgtgtcccctcggcgaccacagccgcaggtaccagcggctctcggaaacctgcacttttgccaagctcacccacctctttgacaatgatggcacggtggtgttcgccatcttcatggctctctgggccacggtgttcctggagatctggaagcggcagcgcgcccgcgtggtcctgcactgggacctgtacgtgtgggacgaggaacaggtgaggtggagctggcagcgcagctgaggccgacccgagcaggggctgttggcgcccgatgccctgcacggcccacatatgcctgccgtgtctgaggaggaaatggcacttcagctcattaactgccccgactacaagctccggccataccagcactcctacctacgcagcaccgtcatcctcgtcctgaccctgctcatgatctgcctcatgatcggcatggcccacgtcctggtggtctaccgcgtcctggcctccgcgctcttcagcagctcggccgtgcccttcctggaggagcaggtgaccacggccgtggtggtgaccggggctctggtgcactatgtgaccatcgtcatcatgaccaagatcaacaggcgcgtggccctgaagctttgtgacttcgagatgcccaggaccttctcggagcgagagagcaggttcaccatccgcttcttcacactgcagttcttcacccatttctcgtctctcatctacatcgccttcatcctgggcaggatcaacggccaccccgggaagtccacgcgcctggcgggcttgtggaagctggaagagtgccacgccagcggctgcatgatggacctcttcgtgcagatggccatcatcatgggcctgaagcagacgctcagcaactgcgtcgagtacctggtcccgtgggtgacccacaagtgccgctctctgcgggcctccgagtccgggcacctgccccgggaccccgagctcagggactggcggcgcaactaccttctgaacccggtcaacaccttcagcctgttcgacgagttcatggagatgatgatccagtacggcttcaccaccatcttcgtggccgccttcccgctggcgccgctgctcgcgctcttcagcaacctcgtggagatccgcctggacgccatcaagatggtctggttgcagcggcgcctggtgccgcgcaaggccaaggacatcggtcagaccgggcgggcgcaggatgggcgggaactgggcggcctcaggcctgtgggcttcccgctggccaggccggctcacctggaaaaaataatctctcggatctcaggccgcagacagcccccagcccttctccgacggcctcggatgcgggttgagcctgggtgggagggtaccaggagtgggcggggccgagcgctttgtaggctcctcccacaaaccgtcanganctcngnnnnnctnnacgcccccaagggggacccnggttctgccagtggctggggctggaacagagcagccggcctctgtcccaagactggccacgctgagacggacaggcagcaggggagcgacgggagctggggcgctggatgtggggaaagggagagaggtgttagggaggcccccagtctcgggcccaggttacaaggtcttaccctggggtgggaacccaggaggtggagtggcttgggggcacagctgagaagttcaggaagatggaggatgaggattcccaggttcctccctgtccatgtcaggctgaggggtgcaggagcacaagaggccatgctctgccatggctggggacttcctttgtgaatactgcaagcctagggctgcaaggggacaacacgcacagaga

SEQ ID NO: 665739 - DNA, 460 bp, Homo sapiens
  misc_feature (44)..(44): n is a, c, g, or t
  misc_feature (52)..(53): n is a, c, g, or t
  misc_feature (62)..(63): n is a, c, g, or t
  misc_feature (87)..(89): n is a, c, g, or t
  misc_feature (97)..(98): n is a, c, g, or t
  misc_feature (437)..(437): n is a, c, g, or t
gagccatcatgattctcgactggataattgtcatctctaattcncctgaagnntctcagctnngctctagacctgatcagtatacannngttcttanntggaaaaccccttgggtccaccctgcacgctgtgcccacacccccccacaacacgtaggtgaaagcacaggcaccatgcggaggccccgagcaccccttagtggggcggggtggggggaggaagtcagtccataatgttgtagttacggatcttggggggcctctggcagcctttagcttttgcaggatgagaccgggaggctcctgtggtcttggccttgccatatgcaagccaaggagttgtgtaacaaagatggaagatgaaccacgtgacgaaatagaaaaagctacctatggagttgtgcccctacgcaggtacttggccttgccatatgcaantatgcaggccttgccataataca

SEQ ID NO: 665740 - DNA, 636 bp, Homo sapiens
  misc_feature (20)..(20): n is a, c, g, or t
  misc_feature (37)..(37): n is a, c, g, or t
cggttgtttaaaaaacccanactgttttagttattgnggctttatgatgttcctttcctgattttcattgttaatttattcagtgaatttagtaaccctgagcaaaagcctatttatttttctgtgcaaaatcaattttaattccatggtctgctagtcactcacatattacatttctctattagttataaagtaaaataattgcagtaatgatttaagaagcaactggagctcaaacgaaattttaatcctagtggattttcccatttggaattaataatgtattgaatagagaaattgcctagatccaattgccatagacatgcatccattattgtaaatacagctggctctctgtatccactgattccatatccacaggttcaaccaaccacagattgaaaagactgggggaaaaaactcaaaaacaacaaaaaaagaacacaatagtaaaaactaatacaaattttttaaaaaatacagaatacagtgtaacaactatttacatagcatttacattgtcttaggtattataagtaatctctagagatgatttaaagtatacaggaagatgtatataggttatatgctactatgacatttatttgcagatactgagggacagctctatcatct

SEQ ID NO: 665741 - DNA, 225 bp, Homo sapiens
tacactagtatggctagtagaggaatagcacagtgtttccctagtttataccatcccctgcaaactgcagagtggcactcattgcttgtaggacggaccagctcctccaaggctctgaaaaggggcttccagtccctgtacaccttgccctgccttgcctccgggagccaggggcttgtgcacttggcaggtcccttgcggtacccagaacaaccgtcgaagggg

SEQ ID NO: 665742 - DNA, 839 bp, Homo sapiens
  misc_feature (827)..(827): n is a, c, g, or t
ggctcggtacttgcatatggcaaggccaagcagacgccccagggaggaacctggttttaatgggccctgtgctcagggaggccttcagtcagcagggtcgcctcagcagcatttgggagcctgccctgcagctccctgcctgcctgggctgctgtcttcatccctggggtggcaatgcctgcctgcatcttgacgggcctcctgtcggctgctggaggagctgggagctctctatgaccagagagtgaagcgtctcactgaagaactgtggccggcgtctccaggaaaggaaggagcctcgctttctccagggcaggggcagcgtggggcggggcaggccgggtgtgtctgtggggagtgggcgcgtgctcacactctttaagctgcgactgcttcctttacgacaggatgaagttctggagttgagtcaccctgggaggtgacaccagaagggctggatcccaggtctagcaacctccacgtgtcctggagggtgccactggcaaaggaggaggagctgtgggattggcgaccatgctcctcagggtgcttgggagcctggggtggctttggggacctgtcttctttctgccgaggtgatttacaggtcaccgtgtggatgctgtgttgtgtcttcgggccttgcagggcgttaagtccgctgcccacctgtgctgagcggggctggtgctttcccaagtttcttgaaggagcctcatcctcggcactcttggcgtcctgagatgtaaaatggggctgcacctgtcccaaaggtgggctgcgatccaaaggcctcctgggctcctcgcctggcttccgggcctcangggcaggaggga

SEQ ID NO: 665743 - DNA, 687 bp, Homo sapiens
  misc_feature (20)..(20): n is a, c, g, or t
  misc_feature (37)..(37): n is a, c, g, or t
cggttgtttaaaaaacccanactgttttagttattgnggctttatgatgttcctttcctgattttcattgttaatttattcagtgaatttagtaaccctgagcaaaagcctatttatttttctgtgcaaaatcaattttaattccatggtctgctagtcactcacatattacatttctctattagttataaagtaaaataattgcagtaatgatttaagaagcaactggagctcaaacgaaattttaatcctagtggattttcccatttggaattaataatgtattgaatagagaaattgcctagatccaattgccatagacatgcatccattattgtaaatacagctggctctctgtatccactgattccatatccacaggttcaaccaaccacagattgaaaagactgggggaaaaaactcaaaaacaacaaaaaaagaacacaatagtaaaaactaatacaaattttttaaaaaatacagaatacagtgtaacaactatttacatagcatttacattgtcttaggtattataagtaatctctagagatgatttaaagtatacaggaagatgtatataggttatatgctactatgacatttatagggattcatggattttggtatctgcccacggggccctggatctagattctttgcagatactgagggacagctctatcatct

SEQ ID NO: 665744 - DNA, 482 bp, Homo sapiens
tgcggtcactctagagatcccctcagcaccatggaggatgtcagcagcatggcgtgttggtgtctattgtgaggctggggtttaaagatcatctaggggccaggcccgatggctcacgcctgtaatcccagcactttgggaggccgaggcgggtggatcacctgaggtcaggagttcaagaccagcttggccaacatggtgaaagcccgtctccactaaaaatacaaaaattagccaggtgtggtggcaggcacctgtagtcccagctactcaggaggctgaggcaggagaatcacttgaacctgggacgtggacgttgcagtgagccaagattgcgccaccggactccagcatgggtgacagagcgagaatccatctcaaaggggggacacatcatctaggtcaagccgaccacagatttatgtgtgcagtccagccacgatcaggcaactttgggcccatcctccatgggggtgaggggt

SEQ ID NO: 665745 - DNA, 295 bp, Homo sapiens
gggttagctgtgttggcaggctgtcttgaattcctgacctcaggtgatcagactagctcggctcccaaagtgctgggattacagacgtgagccgccgcgcccagccagcagatttttatttttttaaaccacggggcattcctaggcacggtcacaaagcagaaatccataaggtagatctcattttctatgtaagatatactgggaaatttggttttttggagacacagtctcacggtatggcccaggcacgatctccactcacggcaacctcagcctctcaggttcaagcaag

SEQ ID NO: 665746 - DNA, 142 bp, Homo sapiens
ggctcggtacttgcatatggcaaggccaaggagttgtgtaaggcagcggacatgtgcaggatatgaagatgaaccacgtgacgaaatagaaaaagctacctatggagttgtgcccctacttggccttgccatatgcaagtag

SEQ ID NO: 665747 - DNA, 569 bp, Homo sapiens
  misc_feature (437)..(437): n is a, c, g, or t
  misc_feature (459)..(459): n is a, c, g, or t
gctggccaggctctaccttatctggctatctctgccacaaaccctttcctagccacacactagggagcggggcagagcgtcaggtggtgggatttcatctagaccaacctcagcactatggacatcggggaccagataatgctgggtggggggggccggtccggtgtgtaataggatgtaaagtaacatccctgggcctccacccccaccatggtgacaaccaaaagtatctccagccagggccaaatgtcacaagaggggcaaaaccttcccgtacggagagctagtatgggggccatggaccaccgggaggttagccaatcagagcagaaggggggggcggaaaggaaacggggtcttagttccacaagtaaaataggctttagggtcaggcggccctgcagatgagtgggtcctgattctgtcccccagtcggngaggaaacgggatatccgtggnagcagctgccatgagacacctccccacacgtgccgctgaggaggagctggggggccatgggtggctggcccaccttgtcaaaatactggcagaggagggctctggtctct

SEQ ID NO: 665748 - DNA, 127 bp, Homo sapiens
ggctcggtacttgcatatggcaaggccaaggagttgtgtaaggcagcggacatgtgcaggatatgaaatagaaaagctacctatggagtgccttggcctgccatatgcaaggtaccgagctgattta

SEQ ID NO: 665749 - DNA, 127 bp, Homo sapiens
  misc_feature (123)..(123): n is a, c, g, or t
taaatgttttgatttatataatagtataattatatttgtgtagggctagggctaggattagttcagagtgttcattggtcatgaaatcttctgggtgtaggccagatgctttaatatttagcnctac

SEQ ID NO: 665750 - DNA, 1352 bp, Homo sapiens
gtcatctggaggagatttgcattctctttccgctcccaaaggggaggacattgaaactgagtggcccacgatgggaacaggggaaacgcgccaggggtacaaggatggcctctgaggtgaaggcagaggctatagcatgggagttcggagcgacctatggacctgtgggccttagacgcgatctttggtgctgtcatgtactgtacactatcgatcgatctggcttcacgcgtgctccatgtctgcgtggcttgtacaaggacgtgccggcgaagcacgtccggttgtcaaccaacccagcaacgatcgcaacacaacttgtgtgctgtcaatgccctcatgtgatctcctcgagccatcctagagttcgtggccgcaccaatgcgtaacgcacgtggaaaccaagagacatgaagctagcggcagtaacccgaacacactcatgccagctggtcgagacgccaatgggacagtgcgctacggcggaagccgagctccctgaacactcgatagtggtcgatagtagcgccaaaacaccgaacgcatataaagcaccacagagacactcgaagactccctaattggtgggggcccgcgacccaaggggcgcattgaccccaatctgagggacgcccctaggggcctaggggaaggggaaagccaagccacacaggcgaggcccgcatataagaatgcccaggcgcactatgcgcctatggcacctttcgcttgttaaccaaaaacctccgggaggagctgataaacagtagtttgggcaatttgcccgccccgggaaaaggggtccggtggtcacactccataggaaaggcgaaattccactcctttgcgggtctccatacgttcctacgtgccatatgcgcaaacccatgctgagcgcttcgtcaatttggctatagggctaggcttggaattggaatgcccggtcctggcaaggagttgggggactcggctttgtcagaaggaggacgtgcctggtggaggatttcgccctttttttaacctggacacctccgaccgagattggtgttggcgctggctccattgggggcggcgctggtgatgtgtctttacccccgaaaggtggggaccaaaacccgcggggtgtttgttgtctcccctccttacaacatggccgcccacaactgaaaatgggtctttggatttgggcccagatggagtcagaactcagtgcgttgaattcaaccgcgattggtgcaccccttggggtttacgtttaatttagacttcgtagagatcttggctaaccccagtttccattgggaaattatgtctcttgggaactcaaaagacggacatagtggggggggaga

SEQ ID NO: 665751 - DNA, 1193 bp, Homo sapiens
ggtgtgagtgctgtggtctctgctgcgtgactgcctggtggtgcctggcgctggtgtgtggctgcccccgtgcctcgccgagtgcagctgctgccctgaatgtgccatgttgcctgctgctcctgctcctgctgtgccctgtgctgcccatgtggttgtgtgctgtgtggatgtgcctgcctgctgcatgtcttgcctgcacttgcttacaacctgcctgtgctggcctgtctgtttctgctgttccctgcttttcctgtgccacctgctgtgctgcccaattcttttgtatactgctgctggaatgctgcctggctggtaatgtggttgtggaaccccaatgctgggcacgacgcctgctgtgggatatttgctgtgccctggcctgaaccattgcccggtccagtacccctgcctagactgtgagttgggctgcgttgtgttgttgctcccgatggcaaacacaatgaacccttgggatggcagttgagactgtgctggcaacagacagttaccatacagtgcaaagacgtgtgtgcgactttcaaagcctgttccctggaataccgttttctggagacagcagtgcgcgaaccttccacctggttgacatggcttttacacgatgttgacgccaatatgcttccacctggccagccaaaagggaccgcgagaaagataggtttataagttacggaattattcgagaaagaagagcaccaagcgcagattaagtttggagccgcaaaggagagtttggttaaccagaaagtagggagaatccgttatgcctaataacggtggcaagactggagcacaaagagcgaagacgttcgtaaattaagcagacagtgagaacattggtggggaagttttttatacccagtttacatttagccgtttggcgcacccgcttgacacacagttaacagtgaaacgagaacaagttccaacaactggcccccccttggggccccagcggagaccaagcactttcccacagccaaaccctttggcacacgcatgaaacgcctagtgtttttgggagatccattgggattcccgtcccagcgtttatgcccgaaaacggcagcgcgcgcacgttcggtatttcgagcccagacgcgtttcggctggggaaaggagagatccttggagactttcccactgcagctgagacctcagcgggggag

SEQ ID NO: 665752 - DNA, 377 bp, Homo sapiens
gtttacttatagcactgctatatttgtctttatctgccctgtgatttcgcttcctgtccttcaaaggtcttttatcgtaattctaaaggaaaaaaacagtgtattcttatttgataactaggcaaaatcatttgccattgtttatttcataaatatttattcttctatctcatacactgatcaggtatactttaaaaattctgcattactcttgcctctcatgtacttaatccagttatcaattattgtaaaatgttaactggagatactgcattcagtcggaccacttaacacttaccaggaatgttagtgattcatctgatctagtaagtgaccatgtaagctataaccttgtgatagctaattccatctatttg

SEQ ID NO: 665753 - DNA, 246 bp, Homo sapiens
tgccctgagacctctgatccctgccctctcctccccgtgcccggtccggcgtgttctgtcctacctcacgtgcggggagcggcatcggtcgagcggtcagtgtacgcctggccggagagggggccaccgtatctgtctgttacctggagcggacagcggcacaggagacagagcgggtgctgggcctgccagggagcaaggaggggccgccccgagggagccatgctgtcttccaggctgacgtgt

SEQ ID NO: 665754 - DNA, 544 bp, Homo sapiens
ataggcggatcacatcgcagattaggggctggagaccggcccggccaacacagcgaaaccccgtctccaccaaaaccaatcaggcgtggcggacgcgggcctgcaatcgcaggcattcggcagactgaggcaggagaatcaggcagggaggttgcagtgagccgagatggcagcagtacagtccagctacggctccgcatgagagggagaccatggggagacggagacggagacggagacggagacggagagggagagggagagggagacttttaaaagaaactgacatttgtattgatataatatggtggaggcccaggttcaccacgtggtccccgctgatctagtaacaggtctgcagggatgaaattcctggataccctacttggctttctgtctccaccttggaaggggtatagagtgcttaattacagctatgagaggttggaaatctaggctccccacttggcctttgctagaacgggtaggttaaaaccacagtattaacttggtgtatggctggggtagattggttatagtctaa

SEQ ID NO: 665755 - DNA, 104 bp, Homo sapiens
aacactgggaatatttatcacaatccaagagtcaaaactattgatgccaatcactagtgtctcatgcctgtaatcccagtgctttggagtaggccaaggtaggt

SEQ ID NO: 665756 - DNA, 406 bp, Homo sapiens
  misc_feature (322)..(322): n is a, c, g, or t
  misc_feature (358)..(358): n is a, c, g, or t
  misc_feature (393)..(393): n is a, c, g, or t
ctgaaagaaaaaaaaaaagcctagactatatataaccaagaaggtgaaacatctctaccaggggaactacagaacactgctgaaaaaaataatagatgacaaaaattaatggaaaagcattccatgttcattaattgtaagaatcaatattgttaaaatggccatactgctcaaagcaattacatattcaacgccaatcctatcaagctactaacatcttttttcacagaactagaaaaaaactactctaaagttcatctaaaaccaaagaatagcctgaattgtcaaagcaattctaaacaacaacaaaaacaaagctggnggcatcacattacttgacttcaaactgtaccacagnctacgatagcaaacagcatgcaaaacagacatagntcatggcacaaaa

SEQ ID NO: 665757 - DNA, 141 bp, Homo sapiens
ggagcccttcccaacatggctgttggtcatggagatcctcaatggtcacgctggtgcccctacggaaacgcaccaggaacaaaatgtcagtggcaggtgggagttcaagttgccagcatggagaaccggtgtgcattggat

SEQ ID NO: 665758 - DNA, 166 bp, Homo sapiens
gttctttttagtgtaatattaataaaaggggtaaaaggatattcattttaagaaaaccatatattagtaacctgtagcctgtccttataggtagaccgtaaacaaggtcttcacagtatgaacatgatggaggcagcagcatccgaagccttgcttgaagaacact

SEQ ID NO: 665759 - DNA, 868 bp, Homo sapiens
gacagtttgatgcatctcaattcagccaaggccctgtgcctggcacttgtgtgactggatcccacagtcgggtcttgtcccacaggacctccccagaacccaccttctgcaccctattgtggcattgtttttcagggagctcattaagctctgaacagtctggctccattgcaacatcctggaggctttactaaccaggccttcttgttgggcaccttccctagagctggattctcccccaaggcttaatttctctcttcctacaagacccttgattccccatcagaaggtagggggtcttattcatccctctgcttactctccttttcattttcaaccttccgcaagcctctttttgactgccaaccctttagggcctgccaaatgggcctcttgtttaaccttgaggctctttgccggtcagagtcccggataccccagtagatctctgtctctctagaacgaatcagtaggcagtctcgaagggcagtgtcggattgtcctgtcattgctttacaaagttctgaccacagacagttgattgagcttatcaagaagtactttcagaacagcctgctgtttaccaactttacttgtgcttccccagattgccagttttcccgtgctttctgtcagtaccagcagcgcactgcaatattgtgcgccccaccccttgccggatgctgttcctggccggaactcctcaggttcaagacagggggatgggtctggggcctaaccccgcatggcggctttaatctttacacacggtgtcgcgcgttctaacaacagggtcacccttgtgtgagggagcagttctgcgcattccacacccgggtatgatcttccgccgcagggaggggcctcc

SEQ ID NO: 665760 - DNA, 161 bp, Homo sapiens
aacaaaggtgcctaagcaagacggggcactagaagtatgcctacacaaagacaggtatgtagactagatagttaaatgacatggagggagagacgaggcctgtgatgtgaggatctctgtttcttggctcagatccgtaagtaggcacagagtttacctgg

SEQ ID NO: 665761 - DNA, 1948 bp, Homo sapiens
  misc_feature (313)..(313): n is a, c, g, or t
aatccattccgatccggacatttatctgtgctatctttgatgcttgtccctatgtgctattcatttctggtactgtactactgcatctagaatcactcctagttggacttgggcaatctccgtgcgtccttgtgtgacatcagctggtgcgtgcatcttcgtcgtgtcgccatgtgtacggcatggcagtaattcgatgttccctagcctgattttcgagtctacagtcctgattgcgtgcgtcgtcgtggcctctctgtcagcctctctctggtggagctagtgtaccccacggtaacatctctcgtctcgngactacgtcaggcgctcgccggattcacaccttcatatactgattcgtgaccaatgaatgtgcccacaactttttccatgccgagggtggcgcacgcgataccgatagttctgccctcgacgtggcgcaagtcaatcagtcattcagacgagaattcattcactgaggcgtagtcctgtactatcgaggtcttgctaagcacacggaaggtgtccagtccatttgcacaaccggtgggcaaagtaaaattctccccattcgccttcatacatatccttcatttgctctccccatttcaagatccttttctttcttgctaacttccaacatttcacctctctttgcaaggctttcgaagaacggtttgttcgcagttgtcgtttttgcccccttctaaatgtgattaacgtttcgtgtctcagagggaatttggaagggctcccctaataaattaacgatgtataaccgtattttggtatggaagggatgtaacctctcggacgcttggagggcggtcaggttcctactttccaattcgcggtccccacacttccaaaaaggggaaaaacacgagggcggaacaggtcaccctcttatcggaaaagcgcgtcttgaatcgagaggaaccccgcttgtttaaaatgcctgatagttttacaacacgatagcatatcctgaaagggctaactttcccttcaaagttgaggacagaacctattattgtcgcgttccgacatatcatagagctgtatataactttccaagggcagtataaagggtggtgaaaatggggcataacagcgaaagggggcttttagttgtgtccaccacccggtggtgtggagagactcactctttgggggtcactgctcttgaaacgctttccccacggcatcggatttcaccccgtgtggtccaccagggattcaaccatgaggaaataaaatctcgcccctgaaaaaaacgtttctttggtgccattctccccagtgggggcctgttaactaaatgagaggggccctaaaaaccaatgatactcttgtcatcacggttttccatgcaaccaggtgatgaactacgcggcgcgccttttttatcaccacccaactaaccagaaggaagaagatatttccaccaatgaaaaatttgtcgggctattatagcaagaacagacggaccttagtgtgatctacacggtgtagtagtagccgcgacaaacataagtaccccccaacggattgaattagtgaggagacaaactagtatatcaccagcagtcaacaacatgtggacagtgacagagaagagtcaacaaggaaaggcgcgaatcataatgagggactagtatcacaacagccgctggtagatagggagggagaaagaaatagcctagtggtgtcgtaaactaagacagaactaaacacctctcacccacttcggtgtataagtagacgctgctacacagcaagagcgagtaaacatgatatacattacaaatgatgagctagacagcaccagtcgacttaccattctaatgttttgcttgtacacttttatcatacttacaagacaaatagaagagaagcacgaaaacgcagagagaggagaagagcgaggagggagagcgaggaagga

SEQ ID NO: 665762 - DNA, 107 bp, Homo sapiens
ctctagcaggatcccccgactttaatacttccaacgatgtatccagttgtgagggcaacgtctaggttgccagcagcctgcggttaattccagctccgtgatcagcg

SEQ ID NO: 665763 - DNA, 192 bp, Homo sapiens
atccactctccctactgtatcctagcctggattgtactgccatgatctcagctcgctgcaacctccctgcctcgggctcccgtgattctcctgcctcagcctcccgagtagctgggattataggcatgtgccaccccacccagctaatttttgtatttttagtagagacagggtttcaccatgttggccagg

SEQ ID NO: 665764 - DNA, 713 bp, Homo sapiens
gggtatctgtgatgatcttatccgaaacctgaacttctgttgaaaaaaaaaaatataaaaaatcatcaaaaaaaaaagcctcactcgaaacataaaaaagaacattaaaacaatgaattggaaaataaaaaaaaaataccttgtgggccgcctgggccaagcatattttaattttgacaaagttaagggggggggccaaaattaagcccccttgggcaaattgaccttatagggggtcgtataacatttaacgggccgcgttttaaaacggatggaatgggaaaacccttgggatacccaaattaaatccctttgaagaaattccccttttcgccattgggggaaaaagcaaaaagccccgccctgatggcctttccaaaaagtggcccaccctaaagggcaaatgaaatttgaaacccttaatcttttggaaaaatcccggaaaatttttggtaaaacaacctaatttttaacccaaaaggccaaaatcggaaaaaccctttttaattaaaacaatttacccggtatggggttgggtgtttttcccgtttgggaacaagggccccctttaagaaccggggccccaaggtaaagggggaaaaacggctttaaggggaaaggccccttacggaaaccctcccttaataaagtttttggggggaaggggcccaaaaaccaaaaaagggacccttaaggggccccccatttaaaac

SEQ ID NO: 665765 - DNA, 452 bp, Homo sapiens
ctgttcttgaggatccccctatctgtacagtacctggtttgggggaaactgccaggaactggcatgggcaggtctgttgcgccccagaggttggaggattctgggggtgagagttccttctttggcaagggagagggtggcacaaagcccaggcagaggggtcagctcggggtgagaccatgactagcagtactacttcccaccctgaacagaatccagggatgctctgtcctggacacgtcagaagctggggttgacggtggccctcgggtcaaaggtcaggagctagatgtgctggccagggtcagaggtcaggaggtcggaggctgatctctgaggtcaggaggcagagatgggagtgctctacagggtcagagggcagggagtggggggactgttctgtggagtcagaggtcaagatgtgggagctgccttcagcctgttgccactcc

SEQ ID NO: 665766 - DNA, 150 bp, Homo sapiens
gacacgacagcataatgagagtagagaatttttttggccaggcgcggttgcttacgcttatctttctattcctatgtccagcactttgggaggccgagacgggttatacgaggtaggagattgagaccattcttgctaaaagtaaacccg

SEQ ID NO: 665767 - DNA, 427 bp, Homo sapiens
ctatgtgaggaagacacggcatttagggctgaggatgtgtggtccgaacgcttctgctccatgactaactgctgttcgctctacgcctaggaacaagaaggccaggaagcccgcgcacatgcagcaaggctcttaaggataccggaaaaacacccgtggagccggacgtggcaattcaccggatacgtatcaccctcacaagccgcaactgtaaatacttggaaaaggagagtgctgacttgataagaggcgccgaaggaatcttatagcgaaaggaccagttcaattgcctaccaagacttagagaatcactacgattacgccgtgtggagaaggttctaatacgtgggatcgattccagagtagaattgacgcgactcattggcttgcacagcccttatgagattgttcagcatattagttcctc

SEQ ID NO: 665768 - DNA, 674 bp, Homo sapiens
  misc_feature (12)..(12): n is a, c, g, or t
  misc_feature (94)..(94): n is a, c, g, or t
  misc_feature (97)..(97): n is a, c, g, or t
  misc_feature (99)..(99): n is a, c, g, or t
  misc_feature (102)..(102): n is a, c, g, or t
  misc_feature (115)..(115): n is a, c, g, or t
  misc_feature (119)..(119): n is a, c, g, or t
  misc_feature (131)..(131): n is a, c, g, or t
  misc_feature (152)..(152): n is a, c, g, or t
  misc_feature (158)..(158): n is a, c, g, or t
  misc_feature (177)..(177): n is a, c, g, or t
  misc_feature (181)..(181): n is a, c, g, or t
  misc_feature (184)..(185): n is a, c, g, or t
  misc_feature (218)..(218): n is a, c, g, or t
  misc_feature (223)..(223): n is a, c, g, or t
  misc_feature (225)..(226): n is a, c, g, or t
  misc_feature (228)..(231): n is a, c, g, or t
  misc_feature (242)..(242): n is a, c, g, or t
  misc_feature (245)..(245): n is a, c, g, or t
  misc_feature (281)..(282): n is a, c, g, or t
  misc_feature (287)..(287): n is a, c, g, or t
  misc_feature (289)..(289): n is a, c, g, or t
  misc_feature (301)..(301): n is a, c, g, or t
  misc_feature (318)..(318): n is a, c, g, or t
  misc_feature (329)..(329): n is a, c, g, or t
  misc_feature (333)..(333): n is a, c, g, or t
  misc_feature (349)..(349): n is a, c, g, or t
  misc_feature (381)..(381): n is a, c, g, or t
  misc_feature (386)..(386): n is a, c, g, or t
  misc_feature (389)..(389): n is a, c, g, or t
  misc_feature (392)..(392): n is a, c, g, or t
  misc_feature (407)..(407): n is a, c, g, or t
  misc_feature (484)..(484): n is a, c, g, or t
  misc_feature (552)..(552): n is a, c, g, or t
  misc_feature (674)..(674): n is a, c, g, or t
ttttttgagtanttcggctatgggaactgagaagcctgaggtgatgggggctctgccttaggcctcctcttcggcctcctcaccgaaatcctcntcntnttntggggtggcatcntgtnttttgttgtttntcagagacgaggtcgttcatnttgttntcagcctcggtgaattccntttngtnnatgccctcgcctgtgtaccagtggaggaaggcnttccngnngnnnntggcagtgaantgntccgagatgcgcttgaagagctcctggatggctgtnntattncnaatgaaggtgantgccatcttgaggccangaggtgggatntcanagacggctgttttganatttttggggatccattccacaaagtagctgntgttnttnttntgcacgttaagcatntgctcatcgacctccttcatggacatccgaccacggaagacagcagccacggtgaggtatcggccgtaggcggaggnaaaaaaaaaaaaacatgttcttggcatcgaagacctgctgggtgagttccggcactgtgagagctcgntactgctggcttccacggctggtgagaggggcaaagccaggcataaagaaatggagacgtgggaaggggaccatgttgactgccaacttgcggaggtcagcattgagctggccagggaaacn

SEQ ID NO: 665769 - DNA, 1121 bp, Homo sapiens
gggcgtgatgtctcacagaaagttctccgtgtcccagacatgggtccctcgtgcttcctgtcatcggaagcgcagcagcaggcagtcgtgggaaggtgaacgagcttgccctaaggactgacccatccaagccggctccacctcacagccttcctgggatacaatggctggtcattgacgtcacatcgttgcgggaagtcgacgaggccggttgatccaacgttgaatcgaagaaggaggtggtggaggcgtgtgagccattgtagatgacaccagccatggtggcttcgtgggcattcgtcgggctatccgttgcgataagccaccttccgagggtcctgcgcgtgaccccttacgagagaacttgtactgtgtcgtctggatgccatcagtgcaagttgagttgaaattggcaactgagtgggccgtcttactcagttaaaggcaactttctgggcaagtaaaaattgcttacaagagaatgaaagcgggccttgtaacgcgagaggtagcttgctagagggaacacgtgggacgacggtgaatgcacgggagttgagccaagggaacgcgagggcgtggcatggaagcgagcgttcaagcaagccagtcgacacgaaaggtaacctgcgcaaagatccatcccagatggtccaattgcgaccacacccgcaagattgcgcgcctgtctttccctcctgtcggccagaagtgaaggcctcgactcgtgactgggatgatccaagtgtgaaacctggatggcctactgtcgtgccagaggaaggcctgagaactgaggccccgtcggatgacgcgctttgacggcaaggcagggtaaccttgttggaaaccaaaggtagttctggggcacttgactagaagatcgattcgacgctcaatcaggcgagtagaccaacggtgccaaaagggcttaccaaaagggggtcaacccaggtcgtttggcactaccctaaggaatgctgcccccggaaagaaccaaccgagggcctgcgccaaggtggcctgtattggggcatggcatcctgctcgtgtagccttcttctgtgggcacgcgccgggcagaagggttaccatcacccgatgggatcacagaagttata

SEQ ID NO: 665770 - DNA, 404 bp, Homo sapiens
ccgggaaaaaaggcggggcgggggggagagggggggacccccccggatgtttggaacgttgagagagttaggttggtgttgggccggaggaaagcgggaagactcatcgtgagcgtgtggcatttgggaaagccccgccgcattttttaaccctagatctcgaaatgcatcgttggattcctgtccatttggacttgtaaggtttaaatgtagggggccaatcttgtgaaaacaagtggcaacaagaacggcgagactacggaccccggggacggccccataaaaccgggcggccacacatagccccaacaactgaagaaagcacgcagagcaactcgccagaccaccgagacgctcagggatagcaaaagcacaaagcagcaacctccaaacaaagggaaaga

SEQ ID NO: 665771 - DNA, 898 bp, Homo sapiens
ggcggctgcgtcccagtagcccggcctggcctcgtgcaccgcgtgtctgtgggggtccctgggccgctggctgcatgtggcctggggctggctggctgaggcctgaggtggctgggaatgccactgccctggcctggcatgtgtgaactgtgcaagtcgatcccctaacccagaaatgccccagtgctgctggtctctatgtgtgctggcccctgctcctgcttctgttttatttttttacggacagtggtgtcgctctacctgccctgggtttgtaatgcaatggtgtgatcacgggctcacctgcagcctcgcacctccctgggctgaacgcgatcttcccgcctcaggcctccatgagctaacctgtggaaccagcagtgcgcgccctgcctgtgctttttttttttcttcttactctcatacggcggccccagccacgcggcggcgccccccatctgcgacgccccggccccccccacctcacaactcccggcgcccacaaccaaacacgcaccgtgccacccccccccacaaaagcaagtcagcaccaacaccaagagccaaatacacacaaacgaaaaacgagtccaaaaactaacaaaagaaagggacacaaaacaggcacaaaaccgccgcaaacacaacaacccaacaagaaaaacacaacggcaacgaccaaacagtagagaagtacaagcggccacacccccatacaccaccacccacaacaacaacccaacaaccacacctccaaacgcaaaccaccatcaattaaaaacccacccacgaaaacccacagcacacacaacgagcaggcagcggacccccccaagaagtagtaaagaaccaaaaacaaaccgatgaggcaaaaaagtagaacgaccaacaccgccca

SEQ ID NO: 665772 - DNA, 610 bp, Homo sapiens
  misc_feature (1)..(1): n is a, c, g, or t
  misc_feature (50)..(50): n is a, c, g, or t
ntataaacttgtctgtcaccatatttggggagtttgcagctacttgagtnggggggggaaattctggacctcatggtagtgtgggtcatttctctaggtttaaattttcctccccagtccaccagttttgtttaccttccagtctacttggttgctttttctgttgtaatcagcaggtgatataggcagtagcaagcatactctatcttggctgctgctacttcaattttacagataaggacactgaggttcaaaaagtttaggtaacctgccgaggtcagatagctagtaatctgccaaattagtattctgattctggattctaaatttggtccaactcctgtactttgtactgtatcatgttgctcttccaagatttcctggcttcatcagtttaaatagttgatagattgtaacaaagtttgcaggtcacttccttagtataatagagtatacgaatgtcaatttaagtactgttagaataaaatgatgttaactactgcatatgagtccctggatactccaaggagagtcttgttcttacattaattgaaatacttcaaatgtgtcatcatttagaaataagaaataagaccacgtgaaggaagtt

SEQ ID NO: 665773 - DNA, 818 bp, Homo sapiens
gggcggcggcggcgatcgtgacagaagtggcggttgctgacgcctggaaattcccctaaggtggagcaccacccaacccccctggtcccacctccctcaagctcctccgctccctcaccccctggtggtcactctgggtcctacctggtatcgagttatggtaaggtcagcctcgccagccaagctcatcaatggcggcatcgccgggctgactccggtgtcacctgcgtgtttaccatcgatcctgggcaagaccaggctgcagaaccagcagaacggcagagcgtgtacacgagacatgtccgactgcctcatcaagaccgtccgagtccgagggctacttcggcatgtaccccgggagctgctgtgaacttgaccctcgttcaccccgcgagaaggccacttcaaagctgggcagccaacgacttcttgcgacatcagctctctaaggacgggccagaagctgaccctgcgcttaaagagatgctggcgggctgtgggtgctggcacctgccaagtgatcgtgaccaccgccatggcgatgctgaacgatccagctgccacgatgcagggcgcaatcgccgcccagaggaagatccttggctggccagagacagctcatcgccccaggaggggtgccagaacataagtggaggactcaagctggccctcggaccacggacacacaactgaaccgaaacctgttgcgagcaccgtgaattgcggtatctaaagggactcggggcaagctgctaggatgtcccaactacagaatgaataccgcgtttgacacctacaacagagcgccgggtcgaaaa

SEQ ID NO: 665774 - DNA, 149 bp, Homo sapiens
attgcacatgttcctactccacatcttcatccatgtggtgtcctcgggctaagatggtgaacggggcatggggaccgaacggtgcatggggaccgaacggtgcatggggaccgaacggtgcatggggaccgaactgtgcatggggaccg

SEQ ID NO: 665775 - DNA, 508 bp, Homo sapiens
  misc_feature (3)..(3): n is a, c, g, or t
  misc_feature (89)..(89): n is a, c, g, or t
  misc_feature (96)..(97): n is a, c, g, or t
  misc_feature (99)..(99): n is a, c, g, or t
  misc_feature (102)..(102): n is a, c, g, or t
  misc_feature (109)..(109): n is a, c, g, or t
  misc_feature (117)..(117): n is a, c, g, or t
  misc_feature (121)..(122): n is a, c, g, or t
  misc_feature (132)..(132): n is a, c, g, or t
  misc_feature (134)..(136): n is a, c, g, or t
  misc_feature (143)..(144): n is a, c, g, or t
  misc_feature (150)..(150): n is a, c, g, or t
  misc_feature (152)..(152): n is a, c, g, or t
  misc_feature (154)..(154): n is a, c, g, or t
  misc_feature (158)..(159): n is a, c, g, or t
  misc_feature (172)..(172): n is a, c, g, or t
  misc_feature (180)..(181): n is a, c, g, or t
  misc_feature (186)..(186): n is a, c, g, or t
  misc_feature (200)..(200): n is a, c, g, or t
  misc_feature (208)..(208): n is a, c, g, or t
  misc_feature (364)..(365): n is a, c, g, or t
  misc_feature (383)..(383): n is a, c, g, or t
  misc_feature (424)..(424): n is a, c, g, or t
  misc_feature (483)..(483): n is a, c, g, or t
atnatacaaagtatgaatttggttacaattttgttctgaaatccccgtttcttttcattatttccatagcaccctaaaaatacacaggnggcaggnntngtncactggngctaaatngtanntgtgggtaanannngaggggnngggtgngntntttnngctctgggtcggngtatattnnatggncgagagagatagangtgggganctcacaaatgctataaccaacaggatctagtttttccacgtgatggagttccaagcttttttttttgttttgttttgtttcgcaaaataaaaacaatacacattccaagagaaatgaatgcatctgttgacacgtctctatttctcatttacatanntacacacgtaccataaancgctgatgatgacacggccatgtgtggacgggtcaggcccnaggcccgtcgggagcagacctgtagctctctgggggatcagggcttccattagggaganagtattagcagtttcttaaaacata

SEQ ID NO: 665776 - DNA, 314 bp, Homo sapiens
gaggatccccccgctggccaatggatttgatagtacttatcacttctgtgcgagcttgtggaacagctgactcagtgaactgcttcctgtcttcagatgcgtgatgacacagatgtgtcaagcttaatagatcttatatgtcaatttaagaataagaagttttatagccaccctggttttattccaaagttactgctcatgcaatttggggctccatccttaggaagatactggtgaagcaagaggagcattttttcatcatgcgtgtgtgaaatgtcgtggtgctatagaggggtgactatggggccaggggg

SEQ ID NO: 665777 - DNA, 324 bp, Homo sapiens
  misc_feature (286)..(286): n is a, c, g, or t
caattggccaggcctggtggctcctgcctataatctcagcactttgggaggccgaggcgggaggattgcatgagcccaggagtttgagaccagcctgggcgacatagcaagaccccatctctacaaaaaatacaaaaattagccagacgtggtggggggtgcctgtagttccagctactgaggagggagttgcttgaatccttttgcttcaatcctccttaaagcaggtagattgcttgagcccgggaagtggagtttgcagtgagcccccctcccccccctacantacagactggatgtcagaatgagactcaaataaaaaaa

SEQ ID NO: 665778 - DNA, 437 bp, Homo sapiens
agctgactctagagtgatcccccgccgatcacgcatcggtcgtgaccttcggtggacagcagtgagcgatgctcggacaggagcggcgcgcaaatctcctgtgcggccgccgaagcaatccttgaggaggaaggcgatggccgatcgaagcgcgtcgagatcggcccggtagacgatcgagcggctgaagcgctccgaacgaacgagtcctgcccggctgagaatgctcaagtgcgacgacatcgttgttgtggggaacctcgagaacggcgcgcgacctcaccggcgggcagaccctccggctccgcagtcaccagcaagcggaagacatcgaaggcgcgtgctctgggccagacgcggccaggggaggataacttgttcaatttccatattgtcggagactaaatcgacatatttgagggatccagtgacctcac

SEQ ID NO: 665779 - DNA, 100 bp, Homo sapiens
tagcaataggtaaatgcatctctaccaactaaccgcgaagtcatcaagcccatcatttctaaccaccacgttttggcaaaatgggacattactatttgcc

SEQ ID NO: 665780 - DNA, 253 bp, Homo sapiens
acaatcgagctcggctacgctcgataagggccgaaccgcacagtgctggagattacagagcttgagccaccacgctcggtcacacaggtatcgttctagatcaacgtcttgctgggattgtttgacagggcctcagtcatccgagtgtccccatatctcatggagagcgcagagttgatctccccgtgatggtctgctctgaaacgatgtttgcttctgctcagcctgtgtgacattgttttcccctatcgag

SEQ ID NO: 665781 - DNA, 832 bp, Homo sapiens
tcatacatcttctctttccttgtttcctctacaatggaggagaaacaaatatatttcttactagcaaaatagaaaattgaattatttttctccaaattgagactctcagaaaaggaagattgaattagcgtgttatttgttagttgttttgtatatgttttcgtttttttgagatggagtttcactcttgttgcccaggcctgtagtgcaatggcacaatctcggctcactgcaacctccgccccctggtttaagcgattctcctgcctcagcttcccgagtagctgggattacaggcatgcgccaacatgtctggctaattttgtatttttagtagaaatggggtttcgccacgttggccaggctggtcttgaactcctgacctcaggtgatccagccactcggctcccaaagtgttgggattacaggcgtgagccaccgaaacccggtcccttgtgtaccatctgtataagagaattcttttagctaggagtgcagaatttcaaagtaccattttgaatgatcttaattttgctttcatgagaacacatttccaatcatgaatcatgctgtattgtactaagagggaaaagtgtatttcaagtcaaagggtgagagacttaaggttataggtagaccttgagagacctaagggtgagcagacttgaccacactggaggacgtaacattagggatctacttctacctcaattaagttagacgaatataacattcaagaggcttacaaaagtcaaatttaatcggcccaatggtatggtctccaatgtttcatttcaagaacaagaagggttcctcttatatcagaataggt

SEQ ID NO: 665782 - DNA, 767 bp, Homo sapiens
gactcgggaagacttcagagaagtctcacaaaggactcggtggctgttttctcagtgccgaagccggccatgtcgtctcagaagcggctgaccaagggcttgcctcaggacgctcgcgccctcaggtgtgttcatctttttgctacgggccctagacaatacgatggaacgttctatgaatttcgtacttattaccttaaaccttcaaatatgaatgcgttcatggaaaattcttaagaaaaacattcatcttcggacctcttactctgaatgtgctggattcctggagtgtagaattttggaggcagaacgaataaagtgtttccatattctggaagtatgataatttgtgtcatcggaggatgaagttcggaaaagctttaggccaactgttaaggaatggcaagaacaatctatcattccaaaatttggtcggcatgggttaaaccaagaggagggaattacttacctgattaccgtggtccaaattagaaaagctccaaaagaaggggtctaatggacctagactggtttctcagatggaaaccgggtggggccagcctctcgtggggggtggatgcttttgaaaagaacccaataaaggcccatgtcaatttaggcgtccaccaacagttcgtggggttttcaccccaaggacattgggggactcaaccaaagtcacggcctcgggggcatgaactgcaatagtcctgcactgggaacattatcccctggatagccaaagtggggcatgccgaaggtcaccc

SEQ ID NO: 665783 - DNA, 849 bp, Homo sapiens
  misc_feature (128)..(128): n is a, c, g, or t
  misc_feature (511)..(511): n is a, c, g, or t
  misc_feature (573)..(573): n is a, c, g, or t
ggcgctttgcgtacacaagcgcatctatgggctgtccagcagacacccatgaacactcgaatgctcatttggtgacgatgcaccgacactctactcaatagtcgcgaggattcactagcatattgccnctgccaaggataatggttgatggtgagacggtcgacacctgatgaccattggacctgctctccacaacagcagggcaggaaatagaccgacaagacgcttccagcagcagctgcatagtgcacaatagagggaacgctgtcccgtgagacattgtctgcatggaagcacggaccgaatctgtcggcatggtattctcatgtagtgtgcgctgtggcttgaagcctatgcccttcgaaggatctactaccatctgtggcatcaccacgggcgagcaatcccatgcagtcatgtgattcgtggcatgtaaacgtacaatgcatatcacatgcatgctgtgtgtaccctcgggaacgcgtatgctccaccatcgtacaactcgganggcgccggccggagtacatggtgaaagtaccgtatcatgtgagcttggtgcaatgtgtgtgncatcctcgcctgctgggcagaacgcggatgactgagctggagcgcctatacatgagacttccatgttgcggcatgtgacgtcgtcgtggaagagtcttgacacttcgcgcggagaaatagctatgtaacgaccgaattggtcgtggaagttggcacgtggggccaagaatgaacgctccatccaaatggcttgacctaaaggagtctcgctcggatactctcataatgcccatttacagatagcaatgggcacgaggcctcggaggccgtgtggcc

SEQ ID NO: 665784 - DNA, 706 bp, Homo sapiens
gcgtcggtctgcgggagaagatggcggtctccacaggagttaaagttcctcgtacattttcgcttgtcgcaagaatcttgacagacagggacaacaacggagtaggacgatggtaacagtttacgactggaggtcttgaccgcatgatgaacgctatgaccccttacaatggtggacatggcatgaattatcgggccaccaaggacctaagttatgaaaacagacatatatacgcctgacaccagtcgcatgtggaccctaacagtacccagaaggctcctccgtcagtatagattctgtagacacaaaattaatatgacaccggcaataacactcattccaggttgggatgggtggatgcccggagcatacgcaggtgttaagcgaaaattggcaacaattcatactacgccttaaagttgtacttcgaagagctaaagacgtctaatgatgtccaactgtatcacatcatgccagcttccaacagccgaccagaaggacgaaactatacaacaattaattctcagctggatctcaaacttgtcttacaatcaacaaaccttctactcatgtcaagtgtcttgattcacatatcacaatgcaaaatacacattaagtaacacgaattccagcctggtaaacattgacctggacatttgtcacgctatattactatatgtcccccaatatgtctccggtaacaggg

SEQ ID NO: 665785 - DNA, 1014 bp, Homo sapiens
  misc_feature (9)..(9): n is a, c, g, or t
  misc_feature (76)..(76): n is a, c, g, or t
  misc_feature (107)..(107): n is a, c, g, or t
  misc_feature (109)..(109): n is a, c, g, or t
  misc_feature (277)..(277): n is a, c, g, or t
  misc_feature (315)..(315): n is a, c, g, or t
  misc_feature (322)..(322): n is a, c, g, or t
  misc_feature (338)..(338): n is a, c, g, or t
  misc_feature (396)..(396): n is a, c, g, or t
  misc_feature (417)..(417): n is a, c, g, or t
  misc_feature (510)..(510): n is a, c, g, or t
  misc_feature (523)..(523): n is a, c, g, or t
  misc_feature (659)..(659): n is a, c, g, or t
  misc_feature (721)..(721): n is a, c, g, or t
  misc_feature (802)..(803): n is a, c, g, or t
  misc_feature (808)..(809): n is a, c, g, or t
  misc_feature (814)..(814): n is a, c, g, or t
  misc_feature (844)..(844): n is a, c, g, or t
  misc_feature (891)..(891): n is a, c, g, or t
  misc_feature (893)..(893): n is a, c, g, or t
  misc_feature (897)..(897): n is a, c, g, or t
  misc_feature (902)..(902): n is a, c, g, or t
  misc_feature (909)..(909): n is a, c, g, or t
  misc_feature (912)..(912): n is a, c, g, or t
  misc_feature (927)..(927): n is a, c, g, or t
  misc_feature (934)..(934): n is a, c, g, or t
  misc_feature (939)..(939): n is a, c, g, or t
  misc_feature (977)..(977): n is a, c, g, or t
gtgtttttntttctcactgattgtttcctgaaggtatcacaggtcttggcaaggtcaagttaccatcgctggttanacatatcctggatatgttcaggttccctgtntnaaggccttttgagccacttggagatgtaatttaaaaaggcaaaacaatgcacagaacaattggggaaaagttacaagtaaaataattttatgcagacagaaatgtttttaaagccgtccatgatttagtagaaagaatcaggagcttgaaacaattacttctgtcgcnctttttctgaggtttcattccaatgagagtcgcacacngtcagcntggttttgtggctgcngatagtcgtactttcttgaaatggaatacatttccagttgttgtcttaaacgaatctngcttatcgtgtcataaaagtngggctctgacaaagtttcctctgtaggtggcacactgaatatcctcataattctccttttgttccttttggcatacatgaagagaccgaagcnaacaaggataacnatcaagtaaacattggtggcttcattccaggcttcgtgaacagtataatcaatagaaccatcgtcacccatcactccataacccccagccatggggaagctcacaggcctccacccaacatccaggaaagccattnacaggtgctgggcagtccacagagtcactgaattatcccaacaaccctgctgggcggcactnaagctccattttacaggagaagaaactggggtggcggcggtggttatataacttgtccaaagccacaaaggcctgggcgtnnttttnnggggntgttttacacacgactcccaaacctgaacncttccagtcttggccccgatcctgcgagatctgctccttccggaagntntttnttttnttttttnttntaatgttatcctctnccaggancagcncgggtcccagggcggcgaggctctagggacgttccgcngccgccgcctgcgcgtgaattagctcaaccccccgcg

SEQ ID NO: 665786 - DNA, 321 bp, Homo sapiens
ttatttttctgagacagattctaggtctgtcacccggctagagtgtagtggtgtgatcataactcactgtaaccttgatctctcgggctcaagcagtcttacccattagcctcctgagtagctaggactacagatgcatgccaccacacccagctagatttttttgttttttgtagaggcagagttttgcagtgttgcccaagttggtctcgaactccgggcctcaagcgatcctcttgcctcctaaagtgctggaattacaggtgtgagccactgagcctggccctaaaaactgtgtggtgcctactatgaaggagaaat

SEQ ID NO: 665787 - DNA, 184 bp, Homo sapiens
gattagatactcagtatctcagcgcatcacactctcaagtaggctccctatttgcttctatagtcgaacgaaagggtcgaatgatacagacttaaacgaacttcattagctctgaagatgtcagaaactatgactatttcgcatccttatcaatcaccattcctgtgcccatctcagggcgatc

SEQ ID NO: 665788 - DNA, 1098 bp, Homo sapiens
agcagcagttgtgagtaccacgaccagcaccgtcactgccggctcacagcctttccttcttcggggcgccccaggcctctgctgccagacttcagccccggtgcatgggctccatgattccagtgtggcaaacctcctgccttgcccactaaccaccatcgagtcaccaccttcacgccatggtccctgcacactgccgtgaccaacggccaccagactagctagacgcgtgccgactttagtggtttgggcagcaccctcgccacctccgatcccggccaccgagtgagtccagtcccacttctgtactgtttcgacgtaaccacgagctacctcccttacgttcgaactattcctcgtttgagacttctaagctgcccaagtaccccgactcccgagtccatagtcccgggtgatccgaagcctccactgagcccctgcgatttggtggagtcgctgcgtgtaggggtgcaatggcaacctgcggggcccgcctcaagccagagccctttgctcccccaagcttttggcaagcctcctattcatcatttttggaatagcatctttgcgagcccccagtgcgttgcatgcatctccagcaccttgctaccctcctgtatccaatgatcaacggtacgtgccttgcgttgacgtgccgtacgacaccatcccgatctctatacttctggctggtgctcgaccgcactccgagcgtttggggttcgaacagccaacggcttcgggcgctacggcagcttgcccgccagtctacatctagccccggccctttgtgggcgcgcctcgcagcttgtcctgctctttcttctccgtgctgctaggctagcccagacttcccgggctttggggaggcccatccaacgcccagtaatcccggcccgaagtcgattcggggtgaggcaacgctcgaggcttcgccgctgcatactgggccatgctgatcctactccaacccactttctacccccctttctcccggtttatgcgcggcggcttccgggccaggccccacctgccttgggccaaggtgggcggagcctttcggcggaatccatccgtttgccctccccaagggtctcc

SEQ ID NO: 665789 - DNA, 483 bp, Homo sapiens
  misc_feature (328)..(328): n is a, c, g, or t
ctagcttccacttattttttgggatcatgaccttaagattcagaaagattttgcaggtttcttccattccagcctaccatcaaatgcaggcaaggaaaataaaagatttcaagggcacgaaaatatattttctcaaggtattttttaaaaatataggaattctctctcaaaatattaactattatttagattatattttgaaatgaacttgttggcccatctattacatctccagctgccccttgaacatgggggttaggggagctgccaattcgtgggtccccaaaattttaactccctaatagcctactattggccataacccttnctgataacataaccagtaaattaacccatattttgggtgttatatgtattatcccctatattcctccaataaagtaagctaaagaaaatgttttttagaaaatcataagaaaaagaaaatattttttcttttccttaaatggaagtgggtcccca

SEQ ID NO: 665790 - DNA, 707 bp, Homo sapiens
  misc_feature (359)..(359): n is a, c, g, or t
tgcacaactttaaaactctaaagtcctgcgttgcgccgctgattgccttgtcctaagagttgaacttgtctgtttgaacgtttgtgagtagtcacgtcttttatgccccccttgagggcctaatgccattagatcgaagctttcgtgtttgcaccatggactgttataatgtttatgtaatacaatatttctacgttcccacagtctttgcgtgttacacagtcacctgtgccgcttccgtttgccaccacgcgaagataaaaagatgggtcatatctaaacaaggtcgaaatgtgaacaagcgtgtcttgtgtgagattatgtgatgtatgacttgcacgaggttacgagtgtgacanattacttcagggcacaagactcttaggtacgttgtcactttgtgcttatgacaccaattggaggaaaatcaaattcaggtcttacttaaagcgtattcagtgtatacctgcacccaagttgttgccaaggctggacaagcttggaccttttctgtgtagtgactttttaatctatagttatttcactaacctggagatcagagctgttgctttcgcatgaatgtagtgtagtgtatcatgaactggagtttgctttgttaatagtatctgtactccttgtatttttaagagctattttgtaaacagatgatgatttcttacactggactcaatgataaaccggccctg

SEQ ID NO: 665791 - DNA, 241 bp, Homo sapiens
actagcttttctaaagggaatcatttttttaaaagtagtgcccctggcacagatgctacagtgaagattatcccttcttaggatatttattttcagtgaacattttttgcccaaaggtagtgttgccctgggacccaagccttttaacaaataaccagttgaaatcaaaccctgcctcccccccgagttttgttgtgtatttgatagtaaattgatttaaaaataaaagtggtttttgtta

SEQ ID NO: 665792 - DNA, 1869 bp, Homo sapiens
  misc_feature (1291)..(1291): n is a, c, g, or t
tccctacgagaggaggggaagagcaatcgctgagagaatggagggtgggcgatagcgagtgtgatcaccgaagttggtcttgtagtctgttactgatcgctaatggcacgtctatcatctatgcttatctttgtcttatattctggttattgtgtgttcgtctattctgcttggtgtattcgttgtttgctgtttgctctatgtacagtgtgttgcttgtgggatatctactactatcttctgcactgttctgtgacttgttggggttgttagtagtaacggaacctagctttttgtttctgcgatttgtgtcctatagttgatatgttgagtgtgttgctcttctgcttctcgggatcgttgtgttgttcgtactggctttctctctctctctccccgcttttttggtacttcgttcttgcctccccgctcccctccccctctctcttgtgctgttgggttagtgagctcgtcccgctcgcccggctgttgctgtgctttcttcccgccgtctgtggggtgcgtgtcatggtcggagagtaagctcgccctctctctgtggctcggagtttatctgtttgcgtcgtggtgtttttgtggtggcgcgcgctggtgtgtgttgggactccgccatctttcgttgtggtctcgcgccgatgtgttgttgatgctcgtgccgtttgttgtcgtcctgtttttcgtccacgggtcgacggggagtgtgtggatctctgcgttgtctctgtcgtttgttgtgtttgttttgttttgatcgtatggtttgctggcagcgactgatatagatcggccggcttgtgttttggggggcggtccgtgtggtggcgtgcgttcgtttcgctcgtcgccgtctagtttatttggttggttgtccccaggaggtgctcttttgtgtttgctgttggggcgcgccagcccacagagttggtgttgtaagggcgccccctgtgagagttgtttggttgatggatgctttctgttaggccgcccgccgcgtgtgggcggagagagagtaagattagtgtggtgtggcgccgcccccccccccactgcgctccccgcggtggatgtagtgtagtagcctacacgtcgggttttggggtttgtacgcccccccccaaggcccgcccccctcccgttgttacaataaaaggctcatcttttttgttctctccgccccgcacgacttcgtggtcctgacactactatatttataatattattatcctacgtcctcccgcggcgtctacgactacgtacttgagcgagtggncctcccctactctagaggagtatcctccttgtgacaccagaagtttcgtactccttcttcttgttaacatgaccagtagtatttttatatcagaccctcctcatccatagatatcataatctcgtcgtatcctaagacagagagatgaaaaacaatatatgtttgaactcccctctcctttactctaatggtttcaccccgcccttctactactctctcttgctccacgacacaatagttgtcgcacgacgtgcgcgacgcgagagtatatttatatgatagagagtgagatttctctctctctctgtgtgtgacacactgttcgcgcgctcattgttctctgtatgaatggcgctctgtcacacgcactctgtgcgcacgcggacgcccgcttgtgtgctccacacacaccgcggcaatgaccccgcacgccctctcttggagaggcgccggcgcgctcactgcggggtactcccacagcggtccgagagaggtttgtgagcgccaccctccgcgccccccacacgtgtggcgaacactctcccttctctctctcacacacaacaaagaacaaacaa

SEQ ID NO: 665793 - DNA, 162 bp, Homo sapiens
tgatggaatggatgacatcatcagtcaagaatcctcattggatatggaggggaattataaaaaggcacagagaaatgagagagagtctatcagacagaggttggcacttggaagcttctttgatgatgcccaggaatttataccacctgtagcaaaaggtgg

SEQ ID NO: 665794 - DNA, 607 bp, Homo sapiens
  misc_feature (27)..(27): n is a, c, g, or t
  misc_feature (80)..(80): n is a, c, g, or t
  misc_feature (86)..(86): n is a, c, g, or t
  misc_feature (98)..(98): n is a, c, g, or t
  misc_feature (107)..(107): n is a, c, g, or t
  misc_feature (154)..(154): n is a, c, g, or t
  misc_feature (180)..(180): n is a, c, g, or t
  misc_feature (233)..(233): n is a, c, g, or t
  misc_feature (237)..(237): n is a, c, g, or t
  misc_feature (244)..(249): n is a, c, g, or t
  misc_feature (319)..(319): n is a, c, g, or t
  misc_feature (348)..(348): n is a, c, g, or t
  misc_feature (362)..(363): n is a, c, g, or t
  misc_feature (370)..(370): n is a, c, g, or t
  misc_feature (374)..(374): n is a, c, g, or t
  misc_feature (394)..(394): n is a, c, g, or t
  misc_feature (411)..(411): n is a, c, g, or t
  misc_feature (425)..(425): n is a, c, g, or t
  misc_feature (442)..(442): n is a, c, g, or t
  misc_feature (455)..(455): n is a, c, g, or t
  misc_feature (462)..(462): n is a, c, g, or t
  misc_feature (479)..(479): n is a, c, g, or t
  misc_feature (492)..(492): n is a, c, g, or t
  misc_feature (496)..(496): n is a, c, g, or t
  misc_feature (542)..(542): n is a, c, g, or t
  misc_feature (546)..(546): n is a, c, g, or t
  misc_feature (549)..(549): n is a, c, g, or t
  misc_feature (573)..(573): n is a, c, g, or t
  misc_feature (599)..(599): n is a, c, g, or t
  misc_feature (605)..(605): n is a, c, g, or t
  misc_feature (607)..(607): n is a, c, g, or t
tggaggttcgctattgttcgccccaanctggcgtccactggtgtgatttcggctcactacaacctccgcctctgggttcnggcggntctcctgcctcngcctcttgngtcgctggggttccgggcgcacgccagtacgcccggctacttttttntttttagtcgggatggggtttctccntgttggtcaggctggtctcgcactccctacctcaggttatcgcacccgccttngttnctctgcnnnnnnggggttacaggcgtgggcgacagtcccggccttttttttttttttttataaaaagggggcaggggaaatnttttacagaggggaggacaggagttcggnttcccgggcccccnncggggtncccngcccggggggggcggggacnggcttcctggggtctgngcctgcgggccggngctctgggggtgggggnggttttcttgggngtgtcgncttctgtgatctctgcngaaaggtcttccncccngggctggtcccttgggagggcaactttgggtttctttttggaagcncgcngcngggtgtttggatgccgacgggtantacggcggggctctggtgttaaaaanttattntn

SEQ ID NO: 665795 - DNA, 1123 bp, Homo sapiens
gagatcacgccactgcactccagcctgggcgacagagtgatactcggtctcaaaaaaaaacaaaactaaacttttaatttaaccaaatgtgctctttctatactatctcttgtttcatttaatggtatctgtgaatacctttccatagcaaaaaatacagctcttacaacatcaactttatagactgtataaattatggtatgctattatttatttatttatttttgagacagggtctcactctgtcacctaggctgggtgacagagtggtatgatcatggttcacgatcatggctcaatgcagccttggcctctccaggcacacacaggtgatcctctcacctcagtctcctgagtagctgggactacaggcatgtgctactacacctggctagttttcgtatttttggtagggacagggttttgcaatgttgcccaggtaggtctcaaacttctgggctcaagtgatctggcctgcctcatcctcccaaagtgctgggattacaggcgtgcgccatgaccccactgatacgtcataatttaattaatcctctcttatgggatatttagtgtattctaagatctcacgtttttgacatcatccaattttgcagagagggtattcagtatcatgtaagtgcttggtaaagacttagcaataagggtagtagaaacaggagattttaaaccaaaattaaaccattaggaactggcctggtatacatggaaaggagagaggcgacgaaaacgcacgaaagtatagggcatacctcggacatgcacaggactagatcctgacacggacttgacggggccaagcgggagccagggggagacacaggctacaggaaaaaaatggggacccgcgcgtcccgcgggtgatcaacaaattccctcaaccaaggaccaacagaatggagatacaaagcacacagacgatagcaagacagtaatatatagaagagagaagaacaaagcacacgggcagcacaatcgacaaaacaaagagacacaagaaggaaatatgaaacgaacgcaaacgaagttaaacaacacacaaaatcgaggacagcgcaaatacacgacacacgaacacgagaaaaagaagagaaagcacatgagt

SEQ ID NO: 665796 - DNA, 559 bp, Homo sapiens
tgcggtcgttctacgaggatccccctgggtgggacgacgggacacccgggactacgggtgtgtggtacgcgcgggacggttgtcacatgtgcaggttgggtgacaggagcttcagtgtgtggccaggactgtgagtggcacgaagtgaactcaaggcgaggaagaaacctgatggcagatgcccagggtggggtaggcgctacatcctgttcccccagcaaacctctgggacatctgaacgggaccacctggggcccccacgactgtgacggacacacctggctacgccccctgcagacagggggccgtgaacggtcctgtgaagctcaggctctgtagccgtgagaagagagacctgggtccgatgaacacccaaaagcctccctggaaggaacaatacggcggtggggcttcagcagcttcgcaggcagctcactaggtgtcctagtttgggtgcgaacacttaagggaccgaacagttgaagggccaagatcgggccggcgcagatacgcgttctttccttggcatctaagaagtaatcctcttccccaggcgagt

SEQ ID NO: 665797 - DNA, 160 bp, Homo sapiens
  misc_feature (2)..(4): n is a, c, g, or t
  misc_feature (18)..(18): n is a, c, g, or t
  misc_feature (60)..(60): n is a, c, g, or t
  misc_feature (74)..(74): n is a, c, g, or t
annncctcttctttcggntaatttctggaggggtgggggggaggggacatgaaatcatcnttagcttaggcttnctgttctgtgaatgtctatatagtgtattgtgtgttttaacaaatgatttacactgactgttgctgtaaaagtgaatttggaaatg

SEQ ID NO: 665798 - DNA, 319 bp, Homo sapiens
tacgacctctagacgaccccccggggaaaattatggctgcactgatggcatacttacgaccctttggattactaatgaaaacaactactctctgagcagatgtccgactcctctgatatttatcctgaatgcgttactgtacatacgtattgccagaattccactgtccttccctctaggtgatctgtgaaactggttcgctattcacttgccccgtagaaccccacgaattcatgcaaatcaagaggttccaatctacgtgtccacatttaagaacactcgtgaaactgcccggtacatgcaaggtgtaccgagctcg

SEQ ID NO: 665799 - DNA, 836 bp, Homo sapiens
gaggctcggccggagccgtggatgccgcgccgctgcccaggacctgctgccctgcgcctttgtcctgccgccgcccaccgcctgtcgcccgccgcccatggagcgctgcctggccgtcgcgccgggtcccgcttcctgctgctgctgctcggctgtgcttgctgctgctggctggccggagtggacgctggatgtcctcctggatggcctgctgtgctggactggacacctggatggccactcatcagaaggactgctcgctgccatatgctactggaatccaaagaattgcaggatggtgcagtgagcagtgctgccacagccagctggacggagcttgcactgtgccacgggcatcagcactggccaacgagcaggaccgcatgtgccacgacacccacggtgacaacgcccagcctggaggccacatattgtgaagaggtgctgccattgcagtactgctgagggacggcggccattgaccagggaccagagactgcagagatacagcctcatggttggctaacagtgtggacatggtcttccgggacatgcagtgtcaagagccacagagaaccgagcagataagcatgtcagagacgggccatccaaagacaaaacgcgcaatacagcaaatccgagtatgacggcgttgcaggagaagcctgacccaaggacaggacccccaataatctggaattgacacggcgatgcccggagtgacacagtctggaacccatgagcaagcatacacacaaatgaccgagacacacacacattgcttgacctaacggattagatcctagatacagtgcactccacaaggagaaaaacaa

SEQ ID NO: 665800 - DNA, 184 bp, Homo sapiens
atggagaacagtattgaaacacctcaagcaatcccactactgggaacttatccaaaggaaagaaaagcattatattgcagagacatctgcatccccatgtttattgcaacagtgttcacaatagccaagatatggatcacctagtttccaacaacagatgaatggactttaaaatatggttata

SEQ ID NO: 665801 - DNA, 214 bp, Homo sapiens
aagaagcacatgcccaggcagaagaccaggaggcccgtgtgcacagtcatagaacccgacatacgttgctcgcgtgccgcatctgtatgggtagaagggaaaaggagaaatcaaggatgacttctacattctctagattgttttgcaagttgatgtttgccttctacaatagggaaaatgctgtggaggaaacattgggagcaccaccaataca

SEQ ID NO: 665802 - DNA, 508 bp, Homo sapiens
tcagctgtcaatcctaatgcaagaagttacttgctgattcattttttttgagatagagttcgctctgtagcccaggctggagtgcaatggcgtggtctcggctcactgcaacctctgcctcccaggttcaagtgattatcctgcctcagcctcccaagtagctgggattacaggtgcgtaccaacacgcccagctaatttttgtatttttagtagagatggggtttcaccatgttggccaggcaggtttcgaacgcctgacctcaggtgatctacccgcttcggcctcccaaagtgctgggattacaggcatgagccaccacgcccagcctgtaaattaaactttatcgtaggtatgtatgtataggagaaaacatagtatatatagggtttggtactgtctggggtttcaggcatccgctgggggtcttggaacgcatctccttcagacaaggcggggactaattgtattttcatttgatttgcgtagattgaacagcggaccctaa

SEQ ID NO: 665803 - DNA, 1049 bp, Homo sapiens
ccgctgttcggtgtggtcttgtgccgttgttgtggctagcctatgctcctcaggtggttgtgccagaggtcctgcagttttgctccggtgtggtggtgcgcgtcgtggggttgtgtatgttgatcgcgtgcagcttccgcatgcgactgcgcattgcgcttggcgtgtatgcgcggagtggccggcttttggcaatgggtgccctacgggtgagttatgcatgataagggtgccccttttggtcggtgggggcgcttgcgagctgtgggatgcaacagtggcaatatgcgtggcctattgctgtgtggtgactttacctaggtgtgttgtgttttgcatgggggttttttctgttttgtgtaggttggccggggagtcatgatttgcgcgacctgcgtctaacgtactcggtatgcaggtgactgcaagatcgctctaggtcaaaggtttccctagtggagttgcttggagaggccgagggttctggcaatttggctcgtgcgggacatgggagttgtggaagtactggtttaccgcccctttgtcaatatcatggagcagtctttgtgtgttcctggtacattgttcttaagtcagcgttgctcagagagccgcatccctagtttgtctttctggctataattcggctgtaacacggagtgccatcccttggttcgtgcatgttactctacactggtgaaaagggggactcgtctcggcttgctcctggtgccctgtgatactgtggattttgatttcgccctctttggctccagtaataggcgttgctatggagtccatcacccaggcatcagatggggccattgaaacgctttgtcatgcttcttcagtaccatggactttgaaatgaactcatccttgctgtgagcatccaggagcccttgagaagtttatatatgactatgacactggtaatgtcacacctagaattacggtcctccttattcccctgtcacctccaacagtgaacgctaatgaagtttcaagacaagccagagagctctattttaagcagcggtatgttatac

SEQ ID NO: 665804 - DNA, 287 bp, Homo sapiens
ttagatcgggtgtcctacatgtagttgcggcacggttcagtacacagagtaactgctgctatcgagtatgcacatattgaagtatgatggtttgactgtatggcagtgttgtagcacgcctctggattttattcccccatggcctcttttttaaaaaaccttatacacagctcccttgtgtgactttttcctcaggtcttcaagtgacgagacgcagtattaagaagacccttgcatatctaaatttttaactcattttacaatgacaaaattcctagtgttcagta

SEQ ID NO: 665805 - DNA, 380 bp, Homo sapiens
agtgcggtcctgccatgtacacttttgattcccccaaaacttaactgctaatagctactgttgactggtaaccttattgataacataaataattgattaatcccatacttaaactagtatctacatatattctatgcattcatgacatacctaaccttttcttgatttttttttttttatgtttctaggctacatggttcatctgctagttttttcatattgtcacaattcccaaaaaaattttccaatatgtttattgaaaaaaagccctacatataagtggacccacacagttcaaactttggttgtccgagggtcaactgaaatgaaaattaaattaatgaattttgggaattccagctattcacattgggaaatgc

SEQ ID NO: 665806 - DNA, 108 bp, Homo sapiens
ctcgcccgattctatacgcatagtgtaaactgtagagtaagaagaattgagaggatgaataccataaacacactgctgtgtaaatacatattattattattattattc

SEQ ID NO: 665807 - DNA, 550 bp, Homo sapiens
  misc_feature (230)..(230): n is a, c, g, or t
gggccaagccccaagaaggggaagggggaaatggcaaaaaatgtcccagctttcttcggccgggggtttccctcgggggttgggccggtattttttggatggttttctttacgagggtcccccaagttttgctccaggtgggcccgttgagtgaaaatgaggattcccaagggtgatttgtttggcaaacaggaacagcagcatcccaaaatacaggcccaggaggcagnggagctccttgagggccccccccaccaacccagaggggatgcccatggtgaaaattcctgagatggccaggactttggaccagatttgcagaggcacgaaggccaagcccccaaaggacacgaagctggttttgtcgatgaggatccaaatgccgaagcaaaagatcaggctgccgaggacgaaaaaaaaaaggttgaaaacgaaaaggaagtacttgatgaggctgaggcagctttcctgggctgacattttcacctagtggggtaagcggtccactccccacacaaaaaaggtgctgacagtgggggagacagggaga

SEQ ID NO: 665808 - DNA, 126 bp, Homo sapiens
tgtgtagcgccgggttaatagtacttgccgcagatagtcttaaaactaagcgaggatggtataaatacgcggcacactcattctcaaccccctgtacaaaacacattgcctaccccttccttgtac

SEQ ID NO: 665809 - DNA, 181 bp, Homo sapiens
agagctccacaatacattatcgcgaatacccagtaagaagtagagtggacactacaacatgaatcagagaagggagaaacgggttaatccagtaggatttagcaaattgcctcttaggagtagtattagtctagagtccaggatgtactgttgtcccacccttccctgaaaaagctcacct

SEQ ID NO: 665810 - DNA, 277 bp, Homo sapiens
  misc_feature (3)..(3): n is a, c, g, or t
  misc_feature (140)..(140): n is a, c, g, or t
  misc_feature (191)..(191): n is a, c, g, or t
  misc_feature (207)..(207): n is a, c, g, or t
  misc_feature (209)..(209): n is a, c, g, or t
  misc_feature (222)..(222): n is a, c, g, or t
  misc_feature (231)..(231): n is a, c, g, or t
ganaggagagccgggccgccgccgtctctgcggcccgcgggtgactgggccgttgccgccgtccgcgctcggcccccgcggagagatcgggctgaggggagctgcgcggctggctctcctctggtagtggccaattgaangtggatgacccaggttgtatcgggaggaatcgagtgtgtatcttggccaangaggtctggcggagananaggctgtatctantttcatgtnccctgtgcgtccaggcctcgagtggcctatcgttgacatttccgca

SEQ ID NO: 665811 - DNA, 315 bp, Homo sapiens
gagctcgcaggatgagtacggcttcgctgggcgtagcgttaggagaagtacgctctcaggccctgcctgcggctgcccgggcgcgtttctgtactgaaccaggaagtacccaaaggggccctggtccacctgccatgagaggcccagtgagaccgaggtcacggccgccaccgccagctcccgcaggcggttctccagcggcagaggtgtgggcaggggcgctgaaaagagcagagcaggcccatggggcaggaggcaggaccctgcgcaagggaggcagtgctctcccaggactggagtgagcatttcttagcg

SEQ ID NO: 665812 - DNA, 756 bp, Homo sapiens
  misc_feature (681)..(681): n is a, c, g, or t
  misc_feature (745)..(745): n is a, c, g, or t
tgtttatcgatcccacacgtgatgaaaattgaagcacaattcattcaccctccaaagtatctcaagctagaaatatcttcctccgcagatccccgtaccctgatatggaaagatctttagatgtactaagtgaaagatgccaagttagtgacatatatttatagcatgttccctaccctgtcaatgaaattccgtctaccctgagagcctctgtggaaaccttaaccccagctctctctctttgtgaaaggaatatatgaaatcagatatgtgggtctcccctttcagaaccggaccagccttaatttaagaagaactgtgggccgggcgcggtggcgcgtgcctgtagtcccagctactcgggaggctgaggctgggaggatcgcttgagcccaggagttctgggctgtagtgcgctatgccgatcgggtgtccgcactaagttcggcatcaatatggtgacctcccgggagcgggggaccaccaggttgcctaaggaggggtgaaccggcccaggtcggaaacggagcaggtcaaaactcccgtgctgatcagtagtgggatcgcgcctgtgaatagccactgcactccagcctgggcaacatagcgagaccccgtctctataaaaaacttaaaaattagctgggtgtagtagtgaacgcctgtagtcccagctacttnggaggctgaggcaggaggatcacttgatcccggggaggttgaggctaacatgagccgagatcanaccaccgcatt

SEQ ID NO: 665813 - DNA, 310 bp, Homo sapiens
gtcgtttaaacctaggagtctgagaatcctggcaacgtaccgagaactcatctctaggaaaaataagaaaattaggccgggcgcggtggcgcgtgcctgtagtcccagctactcgggaggctgaggctgggaggatcgcttgagcccaggagttctgggctgtagtgcgctatgccgatcgggtgtccgcactaagttcggcatcaatatggtgacctcccgggagcgggggaccaccaggttgcctaagagggggggtctcgctatgttgtccaggctggagtgcaatggtcaaacccaacgctaattt

SEQ ID NO: 665814 - DNA, 560 bp, Homo sapiens
  misc_feature (447)..(447): n is a, c, g, or t
  misc_feature (449)..(449): n is a, c, g, or t
  misc_feature (528)..(528): n is a, c, g, or t
gtcgtttaaacctaggagtctgagaatcctggcaacgtaccgagaactcatctctaggaaaaataagaaaattaggccgggcgcggtggcgcgtgcctgtagtcccagctactcgggaggctgaggctgggaggatcgcttgagcccaggagttctgggctgtagtgcgctatgccgatcgggtgtccgcactaagttcggcatcaatatggtgacctcccgggagcgggggaccaccaggttgcctaagaggctggagtgcagtgacacaatctcagctcactgcaacctccacctcctggactcagcaatgctccaccttagccttccaggtagctgagactgcaggagtgcaccgccatgcccagctggtttttgtatttttggtagagacggggttttgccgtgttgcccaggctggtctccaactcctgggctcaggtgttncncccgcctcggcctcccaaagtgctgagattacagccgtaagccaccacacctggccctgttttgttttaatttaaaggntatctaatgcattccacattcagcatatgtgg

SEQ ID NO: 665815 - DNA, 285 bp, Homo sapiens
  misc_feature (259)..(259): n is a, c, g, or t
  misc_feature (284)..(284): n is a, c, g, or t
gtcgtttaaacctaggagtctgagaatcctggcaacgtaccgagaactcatctctaggaaaaataagaaaattaggccgggcgcggtggcgcgtgcctgtagtcccagctactcgggaggctgaggctgggaggatcgcttgagcccaggagttctgggctgtagtgcgctatgccgatcgggtgtccgcactaagttcggcatcaatatggtgacctcccgggagcgggggaccaccaggttgcctaagtccgtagcnggtgtgccggatcctctagagcaanc

SEQ ID NO: 665816 - DNA, 1113 bp, Homo sapiens
  misc_feature (43)..(43): n is a, c, g, or t
  misc_feature (207)..(207): n is a, c, g, or t
  misc_feature (283)..(283): n is a, c, g, or t
  misc_feature (355)..(355): n is a, c, g, or t
  misc_feature (737)..(737): n is a, c, g, or t
  misc_feature (764)..(764): n is a, c, g, or t
  misc_feature (922)..(923): n is a, c, g, or t
  misc_feature (955)..(955): n is a, c, g, or t
tcaataaatagtggtcatgatcattctgattatttgcaatatncctctttttcatcttaatacatacacttacagtagcgtgcataaaaaaatttaatgtttgtcaagctcaataaaaattccagttatttcatgtaactgaatattcagacatacaatctttctaagcaagcttaaaaggacaatgacgtcttaatcggcagtccntttccacaatttggtaatatattacagaaacattggatcataaactaaatcgtctaggtgttccacctccccttcntcaaattggtacacgatggtttcaaaatctttttcccaatcgtattttttccgaccgttggacgttcgaatnggctttttaaaaagggagcgaacaaaacagtcaaaacctttaaaaagcagattctgtaaagttcgcttgatctctaataaaggaccatcgtgattcacttttaattggagcatggcctgtaagcaataggtgattagggcgatccaaatttgattgtaaacggcattttgactttttccataaaatctttttatcttaaggtgctgtttcatccatttaaagaaggtctctatcttccagcgatatcggtataaatctgcaatctcttccgcagaaagatcaaagcaattggttatgatgatcacgggattcccttcgctgtcgaccgtttcgatcaatcggagaggatgagtcattttggtatgattacggtcatttcctnaaatgacaatctgatccctataaatcnaacgttctggattgggaatccgttccgataaaacttcaatctctgcgttctttttaagccgggtaatgaatcgcaccccttctcggcataagcggtcgaactgtttgtaatcgacataccctcgatcaaacaagtacatcgcatttggatcgatttcnntgagttcgtccatctgtgtgcgatcggcatgnttcgcgggtaagataatcccttgatccggaacagtgatatccttcgttacaacaacctttaaatggagtcgaacaccagcctttgtcttacgaaaagttgcccatggatattggctccaactcatgctcatcgtggtagaatctatgaccacattaat

SEQ ID NO: 665817 - DNA, 149 bp, Homo sapiens
ccccttcgtgagatgctcttgaagggggtggtcaggcctgggtccatggttgcagctccctggccaggttgggctgagacctctgcctctcccagtgagaccaacctgccctctggacggatggaatggacactgtggagccgatgatg

SEQ ID NO: 665818 - DNA, 831 bp, Homo sapiens
cttcgatcaggtcatctccgagaactacagacgatggtgcagctggcgtgagtcccgtgcaggacggttacgtgctcattctctgtaccaaggtcgttgccggacgtggtcaccgtctgtaactcgagaagtcagtcttgtgcagtcaaatgtgacgccgatgcttattgcactcgatttgactgtaagcatgacttacatgctggcccaactcgtctcgtgttagattgcaaggacaagagttacagagtgacttcagtcacagttctacattccactagagcaggaccgcaagtacattgcttgagtgaaccagcaccttgtgcatttccttgctggtgcactatacctcatgtcaggccttatgcatccagtggtaccttccgtggaacagcacgagggaagaattacttcacagcgccctggtgagcgtcatggatgtacctgcacatgcgctccgataatgtctaaacagtaccatcccacgagtctgctaaggcaactagccggacgtcattaactgaaggtatgagctgacgttggtgtctagtcatgatccctgcaagtcaaggagcagctgcagctacatctgtagtggcgaaacttgatgtctcaggtgtgccacggacagacagtgatcggagggagccctatcaaacaggtctgtatccaagcttttctgactattatagagtctcccaaacatctgatatggatgtatcacatctggatgtcatgcaaatgccttaccgtttccgtccctctcacggttgctactaccttacactacggtaactgtgcccttagtggccagtctggcggacccctgtg

SEQ ID NO: 665819 - DNA, 596 bp, Homo sapiens
  misc_feature (254)..(254): n is a, c, g, or t
  misc_feature (256)..(256): n is a, c, g, or t
  misc_feature (260)..(261): n is a, c, g, or t
  misc_feature (264)..(264): n is a, c, g, or t
  misc_feature (267)..(268): n is a, c, g, or t
  misc_feature (272)..(272): n is a, c, g, or t
  misc_feature (286)..(286): n is a, c, g, or t
  misc_feature (288)..(288): n is a, c, g, or t
  misc_feature (296)..(296): n is a, c, g, or t
  misc_feature (314)..(314): n is a, c, g, or t
  misc_feature (317)..(319): n is a, c, g, or t
  misc_feature (488)..(488): n is a, c, g, or t
  misc_feature (555)..(555): n is a, c, g, or t
  misc_feature (589)..(589): n is a, c, g, or t
gtcgtttaaacctaggagtctgagaatcctggcaacgtaccgagaactcatctctaggaaaaataagaaaattaggccgggcgcggtggcgcgtgcctgtagtcccagctactcgggaggctgaggctgggaggatcgcttgagcccaggagttctgggctgtagtgcgctatgccgatcgggtgtccgcactaagttcggcatcaatatggtgacctcccgggagcgggggaccaccaggttgcctaagctantncagnngcngannatantcactgcagcctcnanctcctagnctcaagtgatcctcctgnctnnnctcccaagtagctgggactacaggcgtgtgccaccatgcctggcgaattttttaattttttgtcaacactgggtgtcactatgtcacccaggctggtctcgaacttctgggctcaagcagtcctcactccttggcctcccaaacgtgttgggattacaggcatgagcanggtgctcaagcttgcttttgtttctttgcgcctggagtgcagtggtgcgatcatggctcactgcagnctcaacttcccggacccaggtgatttctcccacntcagtct

SEQ ID NO: 665820 - DNA, 435 bp, Homo sapiens
cataaaaacgactcctgtgcctgtgacaagagatctgactggtgtctggacaattgtaaggaagtaactctatgtaactgtgttgctgtactaacgcacggccaggtagagggcgcagcttccaaacccacagttctccgtccaccatctcccaccagatgctacctacagtttttatatagtattaaagtaatattgtaattttatgttgaggagacagtcttgctctgttttgcccagagcttgaagggcagtgtctacgattcttgactcacttgcaagctaattgcctccttggggttcaagcggattctcccaactacaagcctccaagccagctggtgattaccaacattaaaccaccatgcctggctaattattgtgtattaagtaaaaacggggttttgccatgttggccagattggtcccgaacac

SEQ ID NO: 665821 - DNA, 325 bp, Homo sapiens
  misc_feature (254)..(254): n is a, c, g, or t
gtcgtttaaacctaggagtctgagaatcctggcaacgtaccgagaactcatctctaggaaaaataagaaaattaggccgggcgcggtggcgcgtgcctgtagtcccagctactcgggaggctgaggctgggaggatcgcttgagcccaggagttctgggctgtagtgcgctatgccgatcgggtgtccgcactaagttcggcatcaatatggtgacctcccgggagcgggggaccaccaggttgcctaaggagnggtgaaccgacccagtcggaaacgacagtcaactccgtgctgatcatagtgaaccctgtgatacatcatcg

SEQ ID NO: 665822 - DNA, 212 bp, Homo sapiens
gaccgaagtgaaaagcgcccaagtaagaagttgttaaaccgtccaaggcaaagattttaaaagcccccgggtccgaaattaaaaagcgagggaatccgatgttttaaatttttaaaacggaatttttgaaccaaatggcaggtctgtgtatttaaggagctgcgaggtttgttttaccggcttattctggacctgccttccaccccaagttt

SEQ ID NO: 665823 - DNA, 308 bp, Homo sapiens
gtcgtttaaacctaggagtctgagaatcctggcaacgtaccgagaactcatctctaggaaaaataagaaaattaggccgggcgcggtggcgcgtgcctgtagtcccagctactcgggaggctgaggctgggaggatcgcttgagcccaggagttctgggctgtagtgcgctatgccgatcgggtgtccgcactaagttcggcatcaatatggtgacctcccgggagcgggggaccaccaggttgcctaagcccgcgtgaaggtccccatatctgataccggagcaagtccggactcacgttctgctct

SEQ ID NO: 665824 - DNA, 620 bp, Homo sapiens
  misc_feature (47)..(47): n is a, c, g, or t
  misc_feature (545)..(545): n is a, c, g, or t
  misc_feature (609)..(609): n is a, c, g, or t
ctggtgtagtaagcacggactcgcgccgaggtgataacaccggacanggacaaggtgaataagcatgtgttccagtgagggtgtaaaagcagacaggccaagtgcacacagcattggagtgcagtgcagcgtcagacatcgtagaggatgccgccgattgggccaaacagcaccagtgccagggcacaggtggcgcagtgccatgtagtcacgagcatacctgcgggagtgctgaggctgggaggatcgcttgagcccaggagttctgggctgtagtgcgctatgccgatcgggtgtccgcactaagttcggcatcaatatggtgacctcccgggagcgggggaccaccaggttgcctaaggaggggtgaaccggcccaggtcggaaacggagcaggtcaaaactcccgtgctgatcagtagtgggatcgcgcctgtgaatagccactgcactccagcctgggcaacatagcgagaccccgtctctataaaaaacttaaaaattagctgggtgtagtagtgaacgcctgtagtcccagctacttnggaggctgaggcaggaggatcacttgatcccggggaggttgaggctaacatgagccgagatcanaccaccgcatt

SEQ ID NO: 665825 - DNA, 406 bp, Homo sapiens
acgttccccactggggtccccgaccatgggagtgagcctctcccccaagcctctcctcaccatctggtgtctgtattgttgtctcatacagatctgccataatcgtggctgacttaggacctccaattcacccctttccctcaccacaacattctgggaacagacaagggagtaaatcagtggctctcccaatacagtgaacagtagtcggctgccatctgggctccagctaggcagtctgacagtgccctgtagtagagtaggccacctctcacaagtccacatctgtgcctcccagactcgaaagacagctgaaggagtggtagccaggattttgctgccgtctggggaccagagcaggttggtcaccccacctcctcgaaaccagggaagggggacacaggtc

SEQ ID NO: 665826 - DNA, 518 bp, Homo sapiens
  misc_feature (443)..(443): n is a, c, g, or t
  misc_feature (507)..(507): n is a, c, g, or t
tagcaccccgctacggtcttacacagaaaaacaacagagaattggaaaagcctaagaaagtacatgtaactgaagacatgaaacacgaaaacaatgcaccggtgtgagatctcaccagcacttgggaggccaaggctgggaggatcgcttgagcccaggagttctgggctgtagtgcgctatgccgatcgggtgtccgcactaagttcggcatcaatatggtgacctcccgggagcgggggaccaccaggttgcctaaggaggggtgaaccggcccaggtcggaaacggagcaggtcaaaactcccgtgctgatcagtagtgggatcgcgcctgtgaatagccactgcactccagcctgggcaacatagcgagaccccgtctctataaaaaacttaaaaattagctgggtgtagtagtgaacgcctgtagtcccagctacttnggaggctgaggcaggaggatcacttgatcccggggaggttgaggctaacatgagccgagatcanaccaccgcatt

SEQ ID NO: 665827 - DNA, 438 bp, Homo sapiens
  misc_feature (363)..(363): n is a, c, g, or t
  misc_feature (427)..(427): n is a, c, g, or t
aatacaagatgtagattagcatggcatgtatttgttttttttttaaactagtcggctgggaggatcgcttgagcccaggagttctgggctgtagtgcgctatgccgatcgggtgtccgcactaagttcggcatcaatatggtgacctcccgggagcgggggaccaccaggttgcctaaggaggggtgaaccggcccaggtcggaaacggagcaggtcaaaactcccgtgctgatcagtagtgggatcgcgcctgtgaatagccactgcactccagcctgggcaacatagcgagaccccgtctctataaaaaacttaaaaattagctgggtgtagtagtgaacgcctgtagtcccagctacttnggaggctgaggcaggaggatcacttgatcccggggaggttgaggctaacatgagccgagatcanaccaccgcatt

SEQ ID NO: 665828 - DNA, 503 bp, Homo sapiens
ggagaactagtctcgagttttatttatgttatttaaggtttgagggggaatgctggaccaattgtaatgggtatggacaacctgtcctataagtaatgctagggtgagtggtaggaagttttccataggaggtgttctgagtggggccgtagcggaatcgggggtatgctggttcgaattcataagaacaggaggcttacaacgtacgggtctctgagtcgacacaacctactgtcgtgtacaacgtccaggggcacgagttgcgatcaatatgtagtacctagagaagattgtacaaggatcgagaggctgctaacaaaaacataacacatgaaccgagagagcacacaccagaaccaacagtacaagaaaataggaggagcaaaggggcggccagacaggacagaaatccagcacagcttgcaaaagcccgaaaacaacaaaaagcaacaccccgcaagacggaaaaagacacaaacagggacaacaaaagcgaaccaaca

SEQ ID NO: 665829 - DNA, 153 bp, Homo sapiens
ctgcctcagcctcctaccaccccctgctaatttttgttattgttgttgttgttagagaatggggtctggctatgttgcccaggttggatcttgacctaagggcctcaagatgatcctcccacctctagcctccataacgcactgtgcaatttc

SEQ ID NO: 665830 - DNA, 560 bp, Homo sapiens
gagaggagaagagaaaaaaaaagagtaagataggagggaagaagaaagaacaaaaaaaaggacaagagaagagaacaggaggagcaaagagaaaggagaatagattcgtaaaagagagagcagaagagaaagacggaatagaaatagaacgacagtgcagaaagatgaaagcagaagacaggatacagagatacaatataaggatataaagctagcaagagagcagcatagggagcagaaaagacagaaagagacagagaaaaacaagcagcactaaatgcacggtcaaaggaaaaagacaggcttacacggtatggagcaacgcaataagctgctatatatgtgatagagacatccagcattctgcatgagaaatgtaagtgaagtagagcattataatcgaaaatttataatccagatttaatccacaaaataacattaataatccagatcagctcctcataatatcactcggaatatcgctctgtctctctctctctctctctctctctctctctctctctctctctctctctctctctctctctctctcctcgtgc

SEQ ID NO: 665831 - DNA, 190 bp, Homo sapiens
ggcttaatcattgagaccgaattagtcacatggtcttcaagattgtcacctgtacaatctctgcaaggaagaaatgtttgactagaccactggcgtgtgacttcagaggtccgaaaggagagctgtgggctgcttttgaaccccatgtttcagcaaagtattcttcatgccagatggttgctgcggaaat

SEQ ID NO: 665832 - DNA, 1647 bp, Homo sapiens
  misc_feature (314)..(314): n is a, c, g, or t
ggggacttcgaggcccgtgttacgcggtactgggcccctcgctcccgtcctccagtcggactgcgggccttggcagcgccggccccgtgtgcgacacgtgaccgccggctgtgggcggggcgcgctccgcgcccccggggccgcttctgtaagtgtgtacgtggcacggcgtctagtcgccgaagatagacagtctcgggtctcctgcaggaccacgaggttatcttgtatggatacgcagttccggtcccgcgacgtgaattcgtgaggaagcatatcacgggctcgcacgaaggtagatgcagtatggagtncttggcgacgtgtgcccacgtggctcgcgcgatacatgagctggggatcgtacccacggccgcgcaatctggcgcgcccggggtgacgtctcgcgtctgcgcccgaggacgtcgatctctcaggggaccgccacaggaggacaccagcggttgatgtgtactgtggcttcggtcgtgcgtggcccccggtgcgctagattccgtttgccattctcacggtgggcccgacgcgttgagtccgctcagctgttcatgcactggacggaccccgtctgggatccttctctcgctgagggggggtcccaccccgggtcgcggcacccgcgggagttatgatcatgtgcagtgcgcacacacgcgcagggactggcgggtgctgcatgccgtccggggttctcttccacggccgcgctcccgcgcgtgtcagtcgtgtaacggcgcggtagttccgggagtcacagtcgatgccgacccctttcttctgagggggcgcgcccccatggccagacaggggcgccaggaagtgctcagggccactggagacccagttacctagagataacccacgaatgaccgggcgagcgcgtcatcagccgcgtcccatgggcgctggggacggcattggaaccaacagggtggccgcctgcacgcgacatgggacggggcccgcctgtgtcgccgaaccgagggccgacgagacagcaaccgtgccaatgcgcccccggggggctcaacccatggaccgcaccgtggccaaagggaaggatcagccgagggcactaggggcacaccccggcagggggagctataacggaattcctcccaaacgggtccaaccagggcggaagcgggaggggggaacccagggacacgagacgcggcggcgaagaacgcaaccatagcccaggccacacactatacgcagcggccggcccaccgcctcacacaactcaccgaaggcggaacacccgaagcagtcaacacgggcccgtcgtacggctcgctaagggtcgaacacattccagaccagacatggtgacacacaatacttgacgacttgttactcgccattacaccagacacaggccgcttgtcaggcactccggcgcatatccagtcagcacaggaccgcggcaaacaaggcaaccaccaggagcagcggaaccaacaccacatacggtagccagggcgaccccccgcgatgacaaacctcgtgcacccagaccacaatatagtcggagcacatgggcacaaaccgaagagcgagtcgtccatcctaagcagcagagcaacactaagagatcgtcgctagtcaactcacagaccccagtaa

SEQ ID NO: 665833 - DNA, 121 bp, Homo sapiens
attaattgctcgtgaatgtcataaaagcaaaatgtatatctaaaaaaaaagggagcggcgccctttttttcctggatatctgtgtattttcaaatgttactatatattaaagcagaaatat

SEQ ID NO: 665834 - DNA, 516 bp, Homo sapiens
acgccgagttcggagtatgtgagatccaaaggaaatgctatatgtaaatcttgttgtaaactgaaaaaagttatgcactcgattattatatttgatgatggcaccttgtagggatctggttaatgcctcatattcactgagtgcttgactttatctatattaacacatctcatctttatgacaatctgtgagaagtaggtactgtgcattcatattttacagaggaaagtacagcttatatatggtagacccaggatttgaattcatagagtctacttcgtagaaggtgtgttcttagactccagatgctcatgcgtgtctatattggtttccgtgtgtgacttctccttcctttccttctcccctcccttccttccttccttcctttccttctttttttttttttttttttttttttttttggggaggggggcccacctttttcccccggggggggggggcgcaccttggcaattcccccggggacccttgacccccggggccaagggagccccc

SEQ ID NO: 665835 - DNA, 104 bp, Homo sapiens
catatcaatccaccccggcgggacgcatcggaatacagacctgagtggaaatttctttgagaaacctcgaggttctacgtcagacgcgtatggacggacatcct

SEQ ID NO: 665836 - DNA, 1074 bp, Homo sapiens
tgatcactatgcgaatccgttgccttggagacactggatttctgagtgaacgggtgtcataaatgtgaacaagggaaaatgcgatgggtcctgccattcttgcgttgtgtaccctccatgatatctgaatgaagatccacggagtggagatccagacaaggatgctgatacatggatcgcacaaactcgcgattacaagttcgggtccatgaggtgtcatctcgtatcttagtacgagagttgtgtgcacagaagcgtggacaggtcacatgattaccggacagtactgggactgcaatcatggtgtcacgcgcagttcgtttgccgttcagtgacgtcgaagtgatcatcggttatcattagagttggactcatatgctcttccttgcaggaggataatccgggggcatcgtacgtcaactgaaaaactcatgatgaattcttagtatataagataagcatttgaaaagaacagtaaaggacaaactaagacaaaatcaggcatctgctagagccggtcaggcccagcatgaaagcatagaacacctcaccacagaaggcgcgagccggaccgcggataaaggcaacgcggaacatgacagtccagaaagaccgcacgaaactgcgggcggttccccgactgaaacgcccggggaaaccgtccgcaaaacccaagaagtgacccgggtacagggaatacaaaggcgcaagaggcggacaagacccgcccaggtctgaacgaacaccagcacacaacggatgacagaaacccgtacaacagtgcacaacacagcagaacagccacacgattaaaccacaacaaaagaactcataaccggcacaacaactcaaagtggcaaaacaaagaaaaggaaggcggcagccgagccggacgacagcgacgcaacacatcagcaccacacgagcctgaggaaagagacgcggcacgaaggccaagcaaaacccagaccagaacgaggaaggcagacacaacgccacgccccggcaaacgcacaacctaaagagagaccagagaaccacgacagcacggaagacagacaacagaggaaagcc

SEQ ID NO: 665837 - DNA, 103 bp, Homo sapiens
cagaatactgaactccagtttagagtcattgcagctgcccaggttggcaactttgcattttccaggccacagttgctcgcgattgagatggggcagctgctgg

SEQ ID NO: 665838 - DNA, 228 bp, Homo sapiens
ggtctatttgttagtaaataacagggaaatcattttcacttttttttaaaaataaggtatttacaagcataccttgtagttattgtgggttcagtttcagaccactgcaataaagtgaatatctcaataaagtgagtcacatgaagttttttggttttcccctgcatataaaagttacatttacaccatcctgtagtctattaagtgtgcagtagcattatggctaaa

SEQ ID NO: 665839 - DNA, 284 bp, Homo sapiens
caatgcggtagctgctatcatgcttcatagcgcctaacaggaagaactgcatcgaatcgaacagtttgtcgaactgcccggtgacgggtgccagcggggcagatgtaagccctgggagggagtcgagcccttctacatcagccacaggctggtcaactgattcctggtcaaactgaggcacgagaagctgagacatccgcatggcctgacagttgattctcgacagctttgggtagagtgcccaggccgccaagagccgggccttgtaagccaaccggtcccta

SEQ ID NO: 665840 - DNA, 134 bp, Homo sapiens
tgatctagaggatcccattggaagatgtgctgggatgtgggagtgccagaaagccacgagagacaaagaggaggagtaggggaggtcaggaagggagcaggcgggcagttaccctacacagcacatcttccaat

SEQ ID NO: 665841 - DNA, 350 bp, Homo sapiens
gcttatcaggaaagaatttttgtaaggctggtcctttgtccaatcagagctatagtggtttggattgtaaatcaggtttggtaaggttctgacaattttcccaatagctcctatttttagcaaatttagcaagattgtgttttttcttgtagccttaggaatttgcgaagttcccatgccaaccaagccctgaaccctccacccataggtaactttcgttttcttaactttagggttcttcttagttgataaaggagcatccattttggtcttccagataacagaacacaatctgacagggcaattatgtggctaaaataatgaaatattaaaaactgaattttccccag

SEQ ID NO: 665842 - DNA, 132 bp, Homo sapiens
tgagagaggaggaggtatcttggaatcacgactacagcttggtaatacatggacacctggtcagattcttattccttcactttaggggaaaatctctggtttttaaaaagtgataaatttggtgttaggtca

SEQ ID NO: 665843 - DNA, 240 bp, Homo sapiens
tctaaggatcccccaggtttatcgtaaacactctgtgctagaggaatattgtatacacaggatttcataaagttcgaaatgaccggcatttatagtttgttctttttgcatatgtcttaataaatattcgtcctacaatttcttttcatactaagagttttgttatgattgccaaatttctcaagccaagaacaggcccaggaaaactttgaaagtgccatatcagaaacacatttataa

SEQ ID NO: 665844 - DNA, 120 bp, Homo sapiens
gtcacaacccaaaataaatgtcatagtcaagatttgtagataattaaattactattctgcagttgggagttaaatgtgatagcacatacgctgacattatgcatttagagatgttattaa

SEQ ID NO: 665845 - DNA, 1128 bp, Homo sapiens
gctgtgatggacaagaactgggccgtgctctatgacctcttgtgcggcaactagacgtgaattgattcggcatccgcaatgtgcttcagacgtatcctgatccctctaactaattgctagatcgtaacaacccttcagtgtgatcctgtccgaagatatcactgaacccaccaaggatcagtctatcaagagaaaaaggtgggagtaggaacacgatcatcgaaaccatctccatcgtaacttgtagctgtgcgagtgaacatttcgcaccttggcaggagacattggagtgaaatcctataaatacatgttgaagcacttgtcctatggtaatcgacgagggatagcttatgccatcataggatggggaacagtagagtgagagctcagggactcttcgacctactagtcactatcttgagccatgtatacactgcgagtcctgtgtgcgtggcgccaaagaagtaattgtggatggtgggtagaccatgcgccgaagagagaacccgagtctgctctatgcaagcggcagcctcaacaagttaatatgggtggcgatggatcattactatcgggacagctctactcgtgtatgtgatgaccgggatgtactggggggaccctttctggaaatgggtgctggaaaatttgccctggtatagtcaacatggcgacggacttagggagctggtcgaaagaggcctactttgggcattggaagtaacctgttaccaggagtcctggggcatggagtcctgggatttctgctcgttccgttgtggtcctggtgcgcctctgtggaccccatcgcgatgcgcagggaattagccccccacgtaatgtatttaacatgtggcgcggactggtccaacgaggggcttgcaataaggccgaagctttgcgctcttggcgggccccgtcctggacaacgtgcggaacacattttggtaaggtcgtctatccaccagaatattcaaccccgagaaattatcgcccccaaccttgtctgagaagcgccccaaaaacaccgagcggaggggcgcaccaaaatagtcgcggcacgcaggacacacccaaccccaccgcctttgattcagcaccaccatgaggggcgagcagaaactcaca

SEQ ID NO: 665846 - DNA, 221 bp, Homo sapiens
tttattggaatagagaatacagacagcaggaatcacgcttggtgatgtcacctgcaggtcccctgcccccacgggctctcccacttgtctggatcaggggagacctccactttgaagaacaatatgggctgggagcctccaatgtgcattctgttcccagcttcacgattagcagcatgatcccatcagcaacagcaacagcaacagcaacagctacagca

SEQ ID NO: 665847 - DNA, 483 bp, Homo sapiens
  misc_feature (354)..(354): n is a, c, g, or t
  misc_feature (394)..(394): n is a, c, g, or t
  misc_feature (418)..(418): n is a, c, g, or t
  misc_feature (425)..(425): n is a, c, g, or t
  misc_feature (437)..(437): n is a, c, g, or t
  misc_feature (441)..(441): n is a, c, g, or t
  misc_feature (447)..(447): n is a, c, g, or t
  misc_feature (449)..(449): n is a, c, g, or t
  misc_feature (452)..(452): n is a, c, g, or t
  misc_feature (469)..(469): n is a, c, g, or t
cagtatggaaccccagctggggtccctattgagtgccgactccccccacgccagcagctgctcctccagccacacccctcctgtccccacctagcccttgagcctaggtggcctgacccgctcacaggcaccagatgggtcctgagaccctccccaggctgttaagctcattctgctgggggtacaatgaggggagggcagtaagttaacacgctccggactagcaagtagaacgcctggggggatgcgtgtgcctcagtttcctcctccacaactgaatatagtggctgaaaactggggagatacttgatggcgcgaatgtccgttttctctcccttcccacctctgcaggangcaggacggggcaggcagcacctggtaggcacagtgcttngcccctcctccccttccttctggnagtcttngggccttagtgntttnaacaancngtncttgggcaaataaaagnctaggttgtttact

SEQ ID NO: 665848 - DNA, 247 bp, Homo sapiens
  misc_feature (91)..(91): n is a, c, g, or t
  misc_feature (148)..(148): n is a, c, g, or t
  misc_feature (187)..(187): n is a, c, g, or t
  misc_feature (203)..(203): n is a, c, g, or t
  misc_feature (232)..(232): n is a, c, g, or t
  misc_feature (242)..(242): n is a, c, g, or t
cgacagcaagaaccggtcgccgatcgtctccggcaagcagctgaaggaagacgacgtctataacggcgatcacgggccggggaacgacatntactacaaggccgccaacgtgctgcacacgctgcgggcgctgatcggcgacgaggcnttcttcaagatcacccgtatcgccgtctatggccgcccngaccccaagcccggcnacttcaccacccgctatctgggcaccaangactatatcnagatc

SEQ ID NO: 665849 - DNA, 698 bp, Homo sapiens
  misc_feature (36)..(36): n is a, c, g, or t
  misc_feature (82)..(82): n is a, c, g, or t
  misc_feature (97)..(99): n is a, c, g, or t
  misc_feature (104)..(104): n is a, c, g, or t
  misc_feature (112)..(112): n is a, c, g, or t
  misc_feature (119)..(120): n is a, c, g, or t
  misc_feature (123)..(123): n is a, c, g, or t
  misc_feature (125)..(125): n is a, c, g, or t
  misc_feature (142)..(142): n is a, c, g, or t
  misc_feature (144)..(144): n is a, c, g, or t
  misc_feature (153)..(153): n is a, c, g, or t
  misc_feature (159)..(159): n is a, c, g, or t
  misc_feature (183)..(183): n is a, c, g, or t
  misc_feature (188)..(188): n is a, c, g, or t
  misc_feature (193)..(193): n is a, c, g, or t
  misc_feature (207)..(207): n is a, c, g, or t
  misc_feature (219)..(219): n is a, c, g, or t
  misc_feature (221)..(221): n is a, c, g, or t
  misc_feature (236)..(236): n is a, c, g, or t
  misc_feature (259)..(259): n is a, c, g, or t
  misc_feature (267)..(267): n is a, c, g, or t
  misc_feature (276)..(278): n is a, c, g, or t
  misc_feature (280)..(280): n is a, c, g, or t
  misc_feature (300)..(300): n is a, c, g, or t
  misc_feature (302)..(304): n is a, c, g, or t
  misc_feature (307)..(309): n is a, c, g, or t
  misc_feature (314)..(314): n is a, c, g, or t
  misc_feature (318)..(318): n is a, c, g, or t
  misc_feature (335)..(335): n is a, c, g, or t
  misc_feature (346)..(346): n is a, c, g, or t
  misc_feature (356)..(357): n is a, c, g, or t
  misc_feature (411)..(411): n is a, c, g, or t
  misc_feature (415)..(415): n is a, c, g, or t
  misc_feature (448)..(448): n is a, c, g, or t
  misc_feature (482)..(482): n is a, c, g, or t
  misc_feature (495)..(495): n is a, c, g, or t
  misc_feature (504)..(504): n is a, c, g, or t
  misc_feature (517)..(517): n is a, c, g, or t
  misc_feature (581)..(581): n is a, c, g, or t
  misc_feature (664)..(664): n is a, c, g, or t
ttccaggcgaagtgcaatactttgattccatgtttnaggaatgacacggataaacctggaaatcctcggggggttgaacaanttcttcacacgtccnnnggtantagtaccnccttcannccncncgtccaccatggcggancnccgcctgtncggccnccattccactccctgctcactgtngtggntggtntagctctttacatncatttcagaggncngagacttgcagcccngtgttataattgccgttatcttnttgatctngagtagatnnntntctagccgctgcttgttgtngnnngcnnnggctngccnggcattcacacgtcccngggcattcagncgggcacggnngggttcccagtaatctccccaccaagatttcttaaacgaagaagctgttatttncttnttttctatctttccattttccatacccaggggngtggaacatccatttacctcacaaccttgcagtnccaatcgaagggnaggtctgtnataggctcgagtnggagagatcctaatatatctagccacaataggtgggtcaaactgattctcttttattgtagatncatctgaattgccattaaaatacatcacattccttgtgctgttccctttgaagatctgccagttgatcttgttggaactgtangctacatagaactctgtggtatagcaggacttca

SEQ ID NO: 665850 - DNA, 719 bp, Homo sapiens
  misc_feature (203)..(203): n is a, c, g, or t
  misc_feature (210)..(210): n is a, c, g, or t
  misc_feature (606)..(606): n is a, c, g, or t
  misc_feature (608)..(608): n is a, c, g, or t
  misc_feature (687)..(687): n is a, c, g, or t
cgcacgatggcgcgtccttggtcactgtaacctccacctcccgggttcaagtgattcttctgcctcagcctcccgagtagctgggaccacaggcatgcgccaccatgcccggataattttgtatttttagtagagacagggtttctccatgttggtcaggctgttctcaaactcccaatctcaggtgatctacctgcctcggnctcccanagtgctaggattacaggtgcgaaccaccacgcccagcccgaaacacattttttgtttgttcattgttttgttttcgagacagggtctcgctcttttgcccatgctggaatgcagtgcgctatgccgatcgggtgtccgcactaagttcggcatcaatatggtgacctcccgggagcgggggaccaccaggttgcctaagaggctggagtgcagtgacacaatctcagctcactgcaacctccacctcctggactcagcaatgctccaccttagccttccaggtagctgagactgcaggagtgcaccgccatgcccagctggtttttgtatttttggtagagacggggttttgccgtgttgcccaggctggtctccaactcctgggctcaggtgttncncccgcctcggcctcccaaagtgctgagattacagccgtaagccaccacacctggccctgttttgttttaatttaaaggntatctaatgcattccacattcagcatatgtgg

SEQ ID NO: 665851 - DNA, 316 bp, Homo sapiens
gtcgtttaaacctaggagtctgagaatcctggcaacgtaccgagaactcatctctaggaaaaataagaaaattaggccgggcgcggtggcgcgtgcctgtagtcccagctactcgggaggctgaggctgggaggatcgcttgagcccaggagttctgggctgtagtgcgctatgccgatcgggtgtccgcactaagttcggcatcaatatagtgttcttcccatatcatggaacttagattaaacctatgcatttgtgtgccggcccaggtcggatccggagcaggtcaaagcatcccgtgcatgatcagtagtgg

SEQ ID NO: 665852 - DNA, 615 bp, Homo sapiens
  misc_feature (254)..(255): n is a, c, g, or t
  misc_feature (269)..(269): n is a, c, g, or t
  misc_feature (288)..(288): n is a, c, g, or t
agcggggcggctggcgtggggctgcttagatgcgccacggtttcggtagcgacggtagctctagccgggcctgagctgtgctagcacctcccccaggagaccgttgcagtcggccagcccccttctccacggtaaccatgtgcgaccgaaaggccgtgatcaaaaatgcggacatgtcggaagagatgcaacaggactcggtggagtgcgctactcaggcgctggagaaatacaacatagagaaggacatttcnnctcatatcaagaangaatttgacaagaagtacnatcccacctggcattgatcgtgggaggaacttcggtagttatgtgacacatgaaaccaagacacttcatcgtacttctaccgtgggtcaagtggcctattcttcatgtgcaacatctggttaatagaggcgatggactgtgccatacacccagtgatccagtccaaaaacaaggactgcagcctagattccataataccagagactgaaattgtcatgccttgctaagggaacatcgtcgatgtttgaagccttagtgtgatccgtacagggcattcgtctgtactagtttgtcgtggttatgaagacaattagcagaatagtctac

SEQ ID NO: 665853 - DNA, 558 bp, Homo sapiens
  misc_feature (166)..(166): n is a, c, g, or t
  misc_feature (262)..(262): n is a, c, g, or t
  misc_feature (544)..(544): n is a, c, g, or t
gagacttgatggctggcgatggcttgacctgactgacagctacccctgcgcatggtgcacaatagtcactcgtcgaccatcttctctcgagttcgaatgtccatcattcgcttacagaccggggcgctgggtaatcaattggacctacctgcaagtctatcgtggnacccatgttccgagaatgagaccgtaagtcggagacaggctcgacgagattgagcgttccaccggagacgatagattaggaatacttgactgggantaaggacagaaatgctgaccaacactgagttatcctcatatgtggctcgctcgctcgtttcagacaggaccacctggtgacctaaaatgttctggatgaattcaaagaagcaagtggttatacgtaatatgtacgtaaggagtatatgtgccactacgaagccctttgtctccagcttccctttaacaataccatggcatgttcgtgctggtcatgcatagagcaaacgctctcgagtgtaatcccatgaccatatacaccagtggagtagaggtaattgantccccgtcggacga

SEQ ID NO: 665854 - DNA, 859 bp, Homo sapiens
ggcgcgcgcgaaacaataataagatcgtgtttgaggtcgctgcccgagaaggaattcggagcatgacgcgaggcccgggctcgcgcggggcctgggagtccgggagggagaccggcagcggccggcatgaggcagggcgacggcgggacgcttgggtgagcaggcgcgctcggccggccagcccggcggtccgggtcgaccgagagaacctttggttggcggacaccgggaaacgcgggtcataagtgggccgcaaatcaggcgccgggggggctttcccggttcctccggtgggccgggggcctccgcgggaattatgggcgcgagggtgccatgttgcttaggcggccccgctctgggggtgtaaaggcgcccctttgtgagctctgtccagtcgccgcgccgggccaattggcgagtggattcccaccacattcctgttccggtgaagattgggccgtgggattcgtcaccgcggccacggtggcgtcttggaatgggccctttacaggtgggtccctgcgctctctggcgcccgtattctatccttgtttggcgcccgggctggtggggggggcggggacggaggactcttcccccggggcgcattattaagtcgggcggggagcgtgcctcccactagggggcacgtgttttcttctaccggcgggagcgtggcggcgactagccggtctggtggctcaatcatttggaccgcccggtctcggggcggcggcccacgcgtggccagtatgttcgagaagggtgcggtgggacagggaccccgggtggtcttctccgggccagacgtaggcacttctacgtggtgctacccagtggcttgttggtggccgttcat

SEQ ID NO: 665855 - DNA, 285 bp, Homo sapiens
tggtctctgcattaactgtgagaaaacatcatagtctgaatctgcctaatttcaaatgccaagctgtgcccacattcagcccacaactgaacctgaatactcaatatatccttagcattgctactgttgtcatcatggtggatgttaagtacaggtttgcccaagctatgatgtttaattgttgccttactgcttctgtatttcttctgtttccctgaccctttgggacaccaggggcatggaatttaaaagtagtaaaaaggtaaaaatgggaaaaaaaaaaaa

SEQ ID NO: 665856 - DNA, 320 bp, Homo sapiens
  misc_feature (32)..(32): n is a, c, g, or t
  misc_feature (64)..(64): n is a, c, g, or t
aaagaatggatcatggtctggcacaacgtggnatgagctgaagccattatccttatgaactcanccagaacagaaaaccaaaatccacatgtttcacttatagtagaagctaaacattgagtacacatggatacaaagaagggaaccgcagacactggggcctacctgaggtcggagcatggaaggagggtgaggatcaaaaaactacctatctggtactatgctttttatctggatgatgaaataatctgtacaacaaaccctggtgacatgcaatttacctatatagcaagcctacacatgtgcccctgaacctaaaa

SEQ ID NO: 665857 - DNA, 353 bp, Homo sapiens
  misc_feature (353)..(353): n is a, c, g, or t
ggcacgaggagccgcggacgcgctacagctgagaaggggacccaagaagtcggccgcggccaaggccgctaggaccgccgcctcagctcacgctgccgacggcagctatagacattctgcgtgagggccgcgctcctggacttcgcctttcccgagccctggaggtggcgagaatcgcagccctgccgagcgcggtggctcacgcctataccgtaatcacagcactgtgggaggccggatggcgatgtggtatacgagagtgagaggagacctatagagagatagctgtgtagatgagatggtcattatctggatatatagctgtagaagatgtgttccactaggttcagagn

SEQ ID NO: 665858 - DNA, 180 bp, Homo sapiens
ccctccataatgtgtgcccattctctttatggcgtttcaactttttcttctctttaagtctttacatctttgctttgtatttggttttttctttctttctttgtgggtttttaggaagaaacggagtctttgtctttcgcccagcccgaactgcaggggcgctggccacacattcggggg

SEQ ID NO: 665859 - DNA, 299 bp, Homo sapiens
tttttttttttaagggccaaaagccagtggtggttttcatgttccaagtttgagagcaccagcccctcttcttttgggccgggaagggttccctgtcattgagcagcccagcctgagggggggcctttgtcacccctttttccccggccttatttgacagggggttacatggggctccccttacggcccggggattaaatcagttacgggccagggtttccttggggggccgggaattttgggtcctcctatgacccttgggggcctaaatgaaatttttaaaatccccgagggaccca

SEQ ID NO: 665860 - DNA, 553 bp, Homo sapiens
catcgatgctgtccgaataatacaatgggaaagaagtgctcctccagagcctccccctaggagtcacatgttctctacacttctgctaatgagagcattatcataagtgctgcaaagtgccaaagagaatcgttttaataaacagggtttgtatgctcttaaaaaacttgaagacaagcacttgattctattagctaaagtacactgcagctatcaaaggatcacggtggaatggagccacatactgctgtctccaaactgacatcatcggcacttaaaagattgaattcttaaacacattcggctccaggtaagcgctcccagactaattagagttatccatgcaaagttctagaactataagtgtgcttcaaatattttgtactgcatggtatgattgtgtttctcaactgggggaggccactcaatgtaaaccataattactattgcagattacctgggaagaaaaacagtatgcattacaggcttcagtaacagccagctttaaagcacagacagtgaccaggactgtcagatgacttccctaggggac

SEQ ID NO: 665861 - DNA, 549 bp, Homo sapiens
tctcttcttgtctgcatgtcttatttcagtaaggcagtcttcatcttttctgaatgtcttatttcagtaaggtggtcttcacactctgatatcctttcttccacttggtcaattcagctgttgatacttgtgtgtgcttcatgaagttctcatgctgtgtttttcaggtccaccaggtcatttgtgttcttctctaaactggttattctagttagcaattccttttgtagcaggaggagccacagacaaaactcctcagacaccgggttaaagagggaaggagctttattcagctgggaacttcagcagacttgcgtctcaaaagccaagctccctgagtgagcaattccgtcccttttaagggctcacaactctaagggggtctgcgtgagaaggtcgtgattgattgagcaagcacggggtatgtgactgggggctgcatgcactggtaattaaaacggaacctatcaagacagggatttttacagtgcttttttattcaacggcttaaattctattgataaccctacccggtctcgtctagggtct

SEQ ID NO: 665862 - DNA, 137 bp, Homo sapiens
taattcttttctccatctcttgtcccactgcatgagcatatcccacagcatgtggaggggcaggccacccttcataatcccagcgtgctcagaaggctgaagcaggagaatcgcttgaacccaagagatggaggttg

SEQ ID NO: 665863 - DNA, 1538 bp, Homo sapiens
  misc_feature (357)..(357): n is a, c, g, or t
tgggtttaaatctggtgtttggaaatttttttcaaatgtggaaagatattacagaatagaaaacacatcattctagggtttcaaaactcaccaagagtcaggtgagaaaaaagtgtacatttcatttaaagtggtaactcattggtaaataaagaaatctggaaagaggcgtgacacgattctcaactccacaattgtgaagaaatgtgactctagaattttccaattaatctctttttataaactaaagtggagttaagtgtgtagaatatataggtggtcacgtatcacaagttgtgcgacatctcgtggactctcattctcaaacaatatagtgtcaacattccgcttgtgtgngcgtgtggggtatgtgtggatgtgtgtttccagaagaacttacaaaatttatcatatagcccattctcatataaccatatagtatatttttctcaggtataacaagagcaattatatattagaagccacagtgaaacaacactcgagaacagaagtggtctctcgagagagagaggcctttatatataaatctctctctatagagattattcacgaccaccattttttatttaacgcgtggccatttatattgtgtcttataaagaggaaacaccaaaatgttttttagagtctagagtgcgccataaattctataaagcccaaaagtggggaaagaaagaaaacactgtgtcttatttccaagagatttatttacgagattcttccgcgattttaccaggcagctttaaaaagaggggcgctaaatttattttcaacaacacaaatttaggcgtgtgtttaaggccccaaaaaaaaggtttggccgctataatattggggacatgaaccgggggttacttcaatgtcttccttgtggaaagggccacgaagaaggcctatccaaagaataagggggtgctttatttaaaacaggacttccagcgttgttgtgtggaaccctttccttcccattttttacaaagagattcccttggtaataaacaattccctataaaaggtcttggagagttttccaaaatttccccaggaaaagatggcggggggagggcgcacaaatataatttcggagaaaattctccaggggggcggagactataatcagcgcttaccacacgtagtagaccgggcgtccacaaggtgttttcccccaaaaaaaccgggaaaagaacacaccgcgggcgtcttattcccccaaaagtgacgcgttgggttcgataagacccacagagggatctcaaacaaaggatggaaaccaccccagttgtatggaacgactataggtggtacgcacgacgaaaacagaggagtaagatactaaacaaggaaggcagcgaaatatctcaagccacattatcaacggggtggactaaccgcaacaacagaggcgccactagtagagaagaagacgaccgcaaaaagacgaacagagccactgaacaaaaagggagagggaacaaagaaagaaacaagaagcaggcgacatatatactaacaatgcc

SEQ ID NO: 665864 - DNA, 318 bp, Homo sapiens
  misc_feature (166)..(166): n is a, c, g, or t
  misc_feature (197)..(197): n is a, c, g, or t
  misc_feature (301)..(302): n is a, c, g, or t
  misc_feature (311)..(311): n is a, c, g, or t
tgccaaagcgtagtacccaactatcaggaagctgaagggggaggatcgtttgagctcagggggtggaggttgcggtaagcctagatcaagccactgcactccagcctctgtgacagaaccaggccctgtctcaaagagaggaagagagaacagagacattctgganacattctttttctttctttctttctctttcntttccttccttccttcctttccttccttttcttcctttccgtttctttctttccttccttccttccttttcttcctttccctttctttttttttttcttttttnngggtcacgnttgggca

SEQ ID NO: 665865 - DNA, 150 bp, Homo sapiens
ctgtcgtctagaggatcccgtcttaccacctcaatgaaccaagcttggaggattaaaaggcatttagcttaaatacaaaaataaatttcgttgaaaaaacgtgtaaatatttttttcttttaatttagacacacgcattcatacttctcc

SEQ ID NO: 665866 - DNA, 477 bp, Homo sapiens
  misc_feature (365)..(365): n is a, c, g, or t
  misc_feature (395)..(395): n is a, c, g, or t
agcaattctcctgtctcagcctcccaagtagctgggactacaggcatgcaccaccacgcccagttgtatttttagtagagatgggtttcaccatactggtcaggctggtctcaaactcctgaccttaggagatccacccgccttggcctccaaagtgctgggattacaggcatgagccaccgcacccggcccatgctctctcttacacacatgcagaccacatcctttctctctcaccagatataccagtctacacacacacacacacatacacacacactctattaagatactttcacttttatatatacacactcacatctagatttctgcctggatggcataatttgggtcctctcagtganaactatttaccaaccctagatatcatacantgccactctactctgggactttgatggttgggggatgagagggaggtcttgtgtttcaaggggggggggggggggggaattc

SEQ ID NO: 665867 - DNA, 335 bp, Homo sapiens
  misc_feature (81)..(81): n is a, c, g, or t
  misc_feature (112)..(112): n is a, c, g, or t
  misc_feature (303)..(303): n is a, c, g, or t
gggccccctggggaattgggtctgctactgatggatgactgtctgagaggcttgcatatgcatgggcaatgaactccaggntggagggcactgtactgagatttagcagganctgactccaaatcaatgacatccccacactgatccctttccaattttagcttgctgccagttgaaccagtgggcccacctagaattacctggagcttccatctttctccgggtgtcatgacgccccttctagccatgccagccctgggccctccatggtgtctttgtccctgcaactctctcatccagggnaccacaggcaagaagctcccttctctactctg

SEQ ID NO: 665868 - DNA, 545 bp, Homo sapiens
ttggggctcattcagggattcgggaatggtatgggtggtacattctttggtgtctattcggttggtcaagtgagtcaagactggctttggtccatttggattggtgtgtattagtctgagtctgggtccgtttggaggtatgagcaaagtttggcgggattagaagttaacctttagggaaatcccttatttgggtatgtggcaaggctaatagatccactgaagatctggaaaattccaggaacttttcacctgagcctttcttctgagaaaggctgcagtcagaggggtgtgcgggtaaagtattgggggggcagctgccatcagggtcatggccttcatataacatgcttcgggctcagggtcatggccttcatataacatgcttcgtgccatcatgatcctggccttcatataacaaacatgcttcgtcagaggtgtgggggttgcaaaaggagctgcatgcttcacgggagtcgagggcctctctccggtactgactttaagccagaacttgtggctgggacatggaagctgtgactcct

SEQ ID NO: 665869 - DNA, 295 bp, Homo sapiens
ggctgcccctgcctcagggtcattttcctgccaggcgagggccctccccctttgccttttgggtcctcccccctcaggccagcccgggaccttttagagctggagcaggccctgggggccaaagtgccagatgaccgtcagaggggcaggggccctcctccccccccccccccctgtaactccagctgcccctccatctccagctgctttcaatggcttcccggtgtgttgttcgggggcagccccccccttgagtctggccaagggggtgatttaacagctccgcttctcccca

SEQ ID NO: 665870 - DNA, 135 bp, Homo sapiens
tggggacagcggtcacccggacactaggtgggctgtctctccacctcctcacattatgctaacaggaacgcagacacattcagatgcctttgcagaaagagatgccagaggctcttgcctcaggatctccgatcc

SEQ ID NO: 665871 - DNA, 456 bp, Homo sapiens
  misc_feature (46)..(46): n is a, c, g, or t
  misc_feature (74)..(74): n is a, c, g, or t
gaggagaatctgatttccagagttaccacattataatactattcanatgtcacattttagcaaagattacatgncaaggaaaaaccagaaaagtatggcccatacacaggtaaaaaaagaaattaatagaaactaccccctgaagaagcacagacttcggatgtacaaaacaaagacttttcatcaactcttttagatatgctagaagagctaaaggaaaccatggacagagaacaaaaaaattaggaaagcaatgtctcatccaatacagaatatcaataaagagattgaaattgtagaaaagaaccaaatagaaattctggagttgaaaagtattataactaaaactgaaaattcactagaggtattcagcagcagactggagaagtcagaagaaagaatcaacaggcttcaagataggtcaattaagattatacagtctgaggagcagaaagg

SEQ ID NO: 665872 - DNA, 189 bp, Homo sapiens
  misc_feature (56)..(56): n is a, c, g, or t
  misc_feature (82)..(82): n is a, c, g, or t
  misc_feature (116)..(116): n is a, c, g, or t
  misc_feature (125)..(125): n is a, c, g, or t
  misc_feature (142)..(142): n is a, c, g, or t
  misc_feature (168)..(168): n is a, c, g, or t
tagtagagatggagtttcaccatgttggtcaggtgggtctcaaactcctgacctcnagtgatccgcccatctcctcccaaantgctggattgcaggcatgagcgcctaccaggaanctatctttncttgagttatgaaactnttgcaacagttgttcaaattggtgtntgtccttcctatagctttcat

SEQ ID NO: 665873 - DNA, 408 bp, Homo sapiens
accagccaagtgggcccgtgtagtctctctcacaggcccccacaggggccacacagtccctcagtgcacatctcgttctccggcacatgtcctcgtgtgcttaatgtcacactcctggttgaatataacgttcagcaaggccacatttaggattgggtcattaccggtacctttggtctcaccccagcttgcattctcacacttggtccctgaagcgcaccacatatcattcaggcgacagccagctcaggcccacacgttggttcagggtcacagatctctccagcttgagcagcacaatctggagagcctgagggcccacacagcatcttggctactgggacccgctgtaggcctggctctacatggtgtgggttctggcacagtgtgcacaaacacctcgcgtgc

SEQ ID NO: 665874 - DNA, 301 bp, Homo sapiens
gtgagctgccctcctttttataaagaaaatttgactcctcgtaatcactactttatgtgaagaaaaaaggcattgttaacaatggctcaaaactgtttcttgcaacacgtgaggcagcctcagtccgcgcttctagcacggcgaaggccttgcacggcatcctcacttgcctctggtacctatctacttcccatggtgtgacacgggatgtaccaggtacttaatacatgtgcttgatttgcctcttcatcgtgatacagacagagcatgatgaggggcagctccctggcgggcgatcctc

SEQ ID NO: 665875 - DNA, 131 bp, Homo sapiens
gggaaaatcactgggaagtgatgttaagtgatggttaagtgatggttaagtgatggttaagtgatggttaagtgatggttaagtgatggttaagtgatggttaagtgatggttaagtgatggttccccgct

SEQ ID NO: 665876 - DNA, 272 bp, Homo sapiens
  misc_feature (153)..(153): n is a, c, g, or t
tgcagaattcatggtgattcaaacctatctctacgatgtcagcatgatctaaggagctctgacggtcgcatcgtcttgtgcgaccttgtatgggaaagccggcacgcaatgctttcgcgatagctcacccagtgataagtggccgaccatagntatcagccgaccatctatcatttccgggtagtgttcgccggtgcttgacttgagctgagcctttttcttgtccagccactcaaccaagtaaaggcgcaggctctgcttatctaaatcta

SEQ ID NO: 665877 - DNA, 143 bp, Homo sapiens
tggcatagggcatgcatctttctttgagtgacgtctgtgcaggccctgtagtccgccacagagctctgagctgcacagggcacgagtgctggcatctgtgtggacagcggcaccactccctctctaattccacagtgcccatg

SEQ ID NO: 665878 - DNA, 145 bp, Homo sapiens
ggaatgttttttttttccccttaaaaattgtaattcctgaaaaactggtgctttaaaaagtccccctgtcagattatattatttaacaattgaaaattgtaaaaaaacttgttttccctctcaaaaaaaggggacttttttttta

SEQ ID NO: 665879 - DNA, 488 bp, Homo sapiens
  misc_feature (13)..(13): n is a, c, g, or t
  misc_feature (35)..(35): n is a, c, g, or t
  misc_feature (116)..(116): n is a, c, g, or t
gggaaacgcgatnccatgttttctccagtattacnctcaacgagcagggagatcgagtctatacgctgaagaaatttgacccgatggtggacaaaaccaagggaaaccccttggcnttccaagggcccccaaattccctgcctcccgggttcttcccccaagaattgaccaaaattacctttctcgaccaccggaatcaccatcaagaaacgcttcaaggtgctcatgacccagcaaaccgcgccccctgtcctccttgaaggggggttcccctttaaaaacttggattgtcttttctgcccgttcttggtttaacccccccatccggcaaggacttccggtaacacaaaactcttacggactggtggagcccctggattggccttttttttggcccaaggcccaattactcttttttggggcaatccagtctctcgtggcgattgatcaatgctttgttggttgaaggggcaaatcatggtggcatc

SEQ ID NO: 665880 - DNA, 795 bp, Homo sapiens
tcacaaaccagtctgatttaattaggaagtaaaataggtggaggggggggggagggggatcatcaaaaggctgactggggaccgcgggattgggcaaccataccagtggtgaggttgtggcaaggggaagcaaccccctttcaagaacaaggtcacaaactttttgtggcaaggaagagattgaggggtgtgggaccctcactgtggtcaagtgggactgtgcctcaggtgaggccagtgtgggtttacatgtgcaacagggaggactcatctcgaggcacactctcagccattatagaggctgtgggcgactctgtggtgaagggctgagaggcctcagggcgtgttctcctcagaaggcttgtggtgatctcacctgtgggaagatgcttcacgcccgtggtgagtctctttctccaccacttcctctgtggcaggcgaggttaaactgtgcttccagtacttctccccgagttcaccttgggcttgccccctgtggtctccccctggcctgttgggaccccagtggtgatctttatgggctgaatgtcaggggcaccactggatctcctctgccaccgggggcagcttctctagcagctttgtccagttgagcagcctctggtgtcacgctgggaaggttctggccttctgggccatctgtcagcctcggctcgggctcgggcctttggcaagggcctcagttccccagctccgcaagacgcggtttgctccgctgattaataggggactctctgccggtaggcccattgaggcccgtccggggtccgcccg

SEQ ID NO: 665881 - DNA, 219 bp, Homo sapiens
tccgtctcagaaacaaaccaaaacccccaaaacaaacacattgtacagccgtacaaaaatattttctatcttcatatgcctattctataagcttaaaaaaatttgttttaaaaaaaaactttcccagcactttgggaggccaaggcaggtggatcacaaggacaggagttcgacaccagcctggccaacatggtgaaacctcatctctactaaaaatac

SEQ ID NO: 665882 - DNA, 218 bp, Homo sapiens
  misc_feature (12)..(12): n is a, c, g, or t
ggatttccaagntcatgcctgtaatcctatgactttgggaggtcgaggcaggattgtttgagcccaggagttcaagaccagcctaggcaatatagcaagaccccatctctattatttaaaataataaaaatattaaaaatttattataaacaaaacaaatatcaggatacatctgtattcacagaaaaatgtactgataaggtaggctgctgtagttg

SEQ ID NO: 665883 - DNA, 616 bp, Homo sapiens
ttggtgggaccagcgaccggcatggccaggaagttgctggctctatgagctctgtgatgtctacttggatgccgtgaacctgtgctgaatggggtgcaccacgtggcctgatgtgcccgccaacctgtacattgcctggacttgttggccgtgcgcgcgtgctctcgccgcttcatgccgcgttctgttgacggaggagctgttccatgaggcttgccccggggggatgcctgcaagctccccgctagcctctgtgtgaccccctaccccgggggccctcgaggagttgctccgtgggagagggacccccgagggctagcaagcccgggcacttggaggctgtgctgctaccgccacttcacccctgcgatgagccaggtgcgcttcccccttgcagcgtgcccgaacataacggaaagctcaaccccggtgaagtcccgggcccatgagctgggtcgtccagtgcagcatcgttgcgagcgcagattcgacgagcccaactgggcgagccccccccttgggcccttcagcgcgggagagatcgggacctccgtttgcgatgcgcactatgggccaagctccgacaggttgttggctgggatgttcctggtccctg

SEQ ID NO: 665884 - DNA, 1886 bp, Homo sapiens
  misc_feature (195)..(195): n is a, c, g, or t
  misc_feature (221)..(221): n is a, c, g, or t
  misc_feature (398)..(398): n is a, c, g, or t
  misc_feature (449)..(449): n is a, c, g, or t
ccacgcgtctgcgtggtacatgctaatttgtgatacgcctcgctcaaacctccgattaagtcttagtggcatggggtgatagtaaacaacgtgtctatacactcctctctcctctctgttgcatgcgctaccgcccatgcggtgattgtggcgatgccatcgtcgatctctatcctccatctaagaatggttctngtagcctatcatagtcactcgatcantcgtcgcgcaatgtctcttgcttctgaaagacaccctcctagtacgtcacatcctgtttgcgttgtagggcagatgtcatccttcgatacctctacacaagtagttctgactctggtaccatgggagtaacccatccgcgcttgtcataatcctcggtctcgtcccactacctctantatcaccgctctcaaatcaacattgtgagagacctgtctcgtctaccttgntgtagatcgacccgagtttgtaaatacccctactactacagaactcatagactgacgcgtgagagataggtacatccaggagccacccgaggtgtattcgcgatcgtacagaaagctctatgggtgtgctcgtaagtgaatgaatggtaggggttgtgcttgcccagaccgtgggccctctcccctgtgtggttaccgttgcgtgacccaaccattctccttctcgttttcaattggggcctagtgtaattggccacgccacacgggtgtcctgggtctattaatcacacattacattttcccaacccatttggttcaaacctaacgttgcattttcttacacacaaaacgggggtaagttaacttttacacttgccacattaacattcgccaaaccaatgtgcacacttggttgcgacacaacttctgattggacacagagagcccgcgtctcaggcttcacccacaagatctataatataccggccaaccgtggcgaagagagacgcaccgccttttgggattttaagccgacgggaaattctccacagttcacacctggctggaattgaagtccaccttaagggtggacgccaccccgaaagctcttaggccgagacgtggtgggtgaacaattttacaacactgctccaaccgtgggctccaaagtgccaggcagtcgaacaaacactttgaccacacttaagtgccttttgcgatacgtgggcgagttgtaaaatcaaccccatttggcaactggggctggggcgacataaccaccgcatttggtgttgccacagcggcggcaatgtctttctaaccccggacgacgaactgtgcggggggcgtgccccattccagaggggggctaatttaccccaaccactacagatcagagaaacttatacacatgacgacgcgtcttctcccaacgtgtcggacaactctaatatacagccttcacttatcacccgccgctgcgcgatctagtggcgtcgacgagcagctgtcaccctgtggaccaaatatcgcaccagcactgccgtgcaaacacacaaccacggcgctcaagacgggggaccccatactcctcggcgacactatcacatgtccataccgcacgcgccactctactatcacatctcgctgactctaccaccagcctcatatcctgcaactacatccaccaccaacttctctgtgtgccacaccactcactctcgctaccaccactcacacacacatctgtccctcgcggcacaacacccccccaccacgccctaccaacttaccaccactatcctacccccccccgcacccaccccacccaccacacccactacaccccacccccacatcccatacacacccaccacattccacccccatcacccacatcctcaccccccgctccccctcccactctactacactccc

SEQ ID NO: 665885 - DNA, 515 bp, Homo sapiens
gatcttactcagacacgtgacgtgaggtataatgacttgtggttgacttgtagatatgggcgtgaatgtcagttcagtgttttaatctgacgcaggcttatgcggaggagaatgtctgcatgttacttatactaacattagttcttctatagggtgatagattggtccagtggggtgtgagagagttcagttctctgtttgggatttgtcaggtagtgggtgtagagcacgaacgctttcttaattggtggctgcttacaggcctcactcatgggtgttaaatttctcactctctctcacacaggttttctcctagtgtccaaagcagctgtccgtcttcggcactaacagttaaatttcacaaggggatttagcagggttcggtgggcccaatttaaagttgaactaagattctatctatggacaaccagctatcaccaggctcggtaggttggtcgccactacctataaatcctccaactatttagcgaccggtcaagttgtctggagtccca

SEQ ID NO: 665886 - DNA, 257 bp, Homo sapiens
gcggacgctactagtactaaattcgaggccgtcagacggtgtgcgtatgtggtgtgtggtagatggattgtgtggagtgtatggtgtgtggttgtgtggagtgtgtggagtgtgtggtgtgtggagtgtgtggactctgtggtgtgtgtggtgtgtgtggtgtgtgtgtggagtgtgtggtgtgtgtggagtgtgtggtgtctgtgctgcgtgtggtgtgtgtggagtgtgtggtgtgtgtgtggagtgtgtggtgt

SEQ ID NO: 665887 - DNA, 283 bp, Homo sapiens; identical to SEQ ID NO: 524208

SEQ ID NO: 665888 - DNA, 704 bp, Homo sapiens
gggagacgccgggtgcgatgcggcggcagcacgaggggataaagagtctgacctggagaccaaagtcagtcgggagacagtgggtctgtgagagaccgattagaggggcatgtggcgtcctacgatgcgccattgcacacatggcatacgcgtggaagaatactgaaaaactagagcagaagtacacgcgaccataggatgacattgatcttgatgccttggtctgcagaaaattataaagtgggttgggtgctggccaaagacccggagcttgcagataagtccaaacatggggagtactgaagaagagaatgaagataagcagcgactttgatgaagatgatttccttgagagaactggaaggaatgtgtcttgtgtgaagcttctaaggcattaaagttgatagataaactgttgcacgtgaatgccaagtaagaagaacaaatgaattgattggaattcatctcaacatggattaaatagaagggattctggtaagtggctaataaacaagagttgttgatgataatgtatagcgaagaattcggtaaggataagaggattcatgttcattactgactggcaagaaacgatcatgtggccaaatgtactctgggagtgatgatgatgatgattttataaatactttcctatgaagggctaaagggaaaggtcgaatatcctgtaagaggtgggatggggt

SEQ ID NO: 665889 - DNA, 849 bp, Homo sapiens
tcctttgggtatcagctggaggcactggtgtcctgcatcctggtgctggcctcaaactccacacccaaaggaggcactggtgtcctgcatcctggtgctggcctcaaactccacacccacctgcagctggtcactggctttgtggtaatacgtcgcatgcatgcctgcctggcccagcgttactgtagccaaccagttgttcagtgtgtatttcccagctagagacatgacagtgccctcctctcctggccgccggtggtagacgagctctccacccaggccagacacggtgtgatgctctggaggtagtgggccacgaggattcctgaacccaccaagacatctgggttgcccaggtgacagcagctgtgaagtcagaaccacggtactcgccatccacctgccagttcacgaacttggactgctgggtctggatggccattttggacctgaggcctgggctcagctggtggatgacctgtgcattgaggctgccactattgtccatgtcacccaccagcacggggaacgcctctgtgggactcagctgcttcgtccccacgtatgtgaccccaaagtggtagttggactccccaattgtgccgagggctactgtgtgggtcacctggaaacggttgctcaaccctttgttgactgtaagtttgacaccttcatctgaactggaaacagctctgcactccggtgggactctcgaacgtcccgggtggggcaggcatccgagtcccatcttcggggcgcgaggccgtgcgagccggagtcgttccacacgcaggttgacccgggccgcggcgccagggggattgaccgggggagggggggggggggcca

SEQ ID NO: 665890 - DNA, 153 bp, Homo sapiens
cctgcctcagtgcacccacatgggagctgtggttaccagtctgcaggcagctctcgggagaggctgacagagtgggcccccatgtggaagaaagaagctccaaaatgaatcacaactggcgggtctgacttcgggcctttgcagatgctgttc

SEQ ID NO: 665891 - DNA, 416 bp, Homo sapiens
gagctgcatgtagaatgagatcacatgcttttatatgtgaaatattggttttagcaattaacagaaggcatactgtcctattagtatgacataattttagaataacctgaatgattaagttttaacggtcttgtagttgtatgtatacatttaatggcactgtggaacgtgagctgtcagtattattgttttcttattcaatgatctcataactgtggtgcttgtggcataactctcatggtatatagttcagtatctttggtccgttttcgcgataactatatgtatttctagtgttgctagtaagtgtttcatagccacatgcataacctcacatgttcgttatgtgtttcttctgttatgtatgtcttgtatagaactgtccttatcattagtcttaccgcacacattttaaa

SEQ ID NO: 665892 - DNA, 736 bp, Homo sapiens
cttcgaatgctgcgcgagctggaggcggaggtagctgtggaggtccgagccgatgtgaccaggccggacatcgctcgccatcttcctctctcgctgccgcgcatccgtgtctcgaaaataacttttttagatctaaagaaagaaagacaaaagtagtcgtccgcccctcacgccctctcttgcctctcagccttccgccggtgaggaagcccggggtggctgctccgccgtcggggccgcgccgccgagcccacggctacgccccgggacagacacccgcaaccacgaggaccccaatgcatcccttcatacacccggtgccgccactcactgaatagggcgagaaataagacactacagagcgatgatcctttagactcctcccaaagatattcatccggaaacaaaaggtgacttcacacaccagaacgacacacatctgcagcacacatacacaggacaagacgccctgacacggcacaccgctatgcacaacaacacacgtcactaaacaccaacaccaggggatcccaacaaagagaccaacgcaagggggctcgaggtaaaccgcggtatacgccactcaacccatccacactggatcccgtcaagactggccccagacaaggcacacaccggacagcaactggagcccgcaaaaagcaggaaaagagacacccacccaagtggaacacacccaacgggcaggcacctaagaagcggcacaccacaagca

SEQ ID NO: 665893 - DNA, 254 bp, Homo sapiens
aacattatactctttttaaatattaacttcatttttaatatcggtggcgtatgtagtaggcctgaatattcatggggtacatgctgcgtgttcgatacacggcgtgcatagtcgtaaaaatcacatcaagtaaatgtgttgttcatcccctcaagcatttatcctttgtgttgcaaagcatccagttctactcttccagtaactaataaatatacaatgattttgacacttggtaccctgtttgtgctatcaaa

SEQ ID NO: 665894 - DNA, 812 bp, Homo sapiens
ggagtcagttccgtggtagaggtgacctggactctctgaggctcattttgcaggtggtgaaatagtggccgcagtttttaatcatgtctgagatgaatcaggagtgcttgtgactggagcagactggtcaagattgcgatattcacatgcgtgtagcaggtattggaaagtggatgctgtcttgtggaaaagatcagcctagtaattctagtggctgttgagatatcagccccatgatgggtgtccatggatggtgtcctaatggaagctgcaaagatggtggcgccttcgccctcctgaaagatgtcgatcgcaacaggataaagaagacgtaggcttcagaaggacctggactgtggccattctatgtgggctccatgccaagaagggaaggcatggacgagacaaaggatgtagctgagaaggcaacatgtgaacaatcttcagaatcccaggggtgcacgccttagagtaggatacgccagagaagtcagttaaggttatagtgcgggtaatccaagcctagatagacaactgcctgagcttgcttccaagtcaggctccaatgccagtcccctaaggagaacttcagttgcttgacctcgtttggatcacaaccgagctaaagctcaaatttgctcttcacatttgggtgttgactgcttcatgatgtacagaatggtcattatctgcgggacaacccattcctcgaactcaataatcccgatgtcaaccattgcaaggtgaaacttgccagcgaagggcagtcggcgttcactcagcttcgcgacacgcatgccgctggctcaagc

SEQ ID NO: 665895 - DNA, 124 bp, Homo sapiens
ggctaatttgcgagctggcggatgtagaggaaggcgtgtgataggccacacccggctccaggccagcagctccgtcaaggtccactgcatgaaactcatgaaggggagcgcaccaggcgaggtg

SEQ ID NO: 665896 - DNA, 1006 bp, Homo sapiens
ggataggtacgattcgtaggcgcccgggactcgaacgacgtacgtgcgcactggttgtagctgtagctccagcgcatcgtggtcgtgattgcctgcgtagtatcctcacaaactctcaattgtcccgggcgcggacaagagcgatttcctggaacgaatccaggatgagcagttcgtgaggagtcaataaccggggtctatcaacaagcgtagtccaggaagagcgtcgaacatcgaagtggaggccaccgccccggagaaggaagccctcgttgctctggggagaacggccgttggccggcccaatgggcacgggagggggccaaacccagggttggaacgaattccagtgggtgggtggccccaattgggttccaacaaagttgggttgccaagtgtgttgttatcaaagagaggagacatttttgggcccttttggattgaacaggggattgcttggagacggtgggcacagggtcaacggagggatgggacaaaaggaaaaagaagattcctcttgttgtggagacaacgagggagggttcagagcggcgaatatttcaactttaattctggccttgtagggaggaaaaaaaaagaacccaacaagaggggtgttccatcaaaggagggtcaaaacagtttggagtgcccacacaatcattgtggccggagccaccacaggtgggaatttgctcagaagccgtttcggcagggatagtggattccgacccaaaggggggattcgagaagtggatgtgtggtggaaactgttttgggccagtgggtaccaggaacagggttagaaaagtgccttttcagatctcacattcgtggtagagatcctaggagaggaacgagaggtataactgccacaagttgggggaacggtctactggttgtgaggggccggcgtgaaggagagtttatggggaggttgtgagaaaaaatgaataccaggtgaaggcctgtacatgaggttggttaaaagtggagagacgcgttt

SEQ ID NO: 665897 - DNA, 238 bp, Homo sapiens
aaaggggggtgacgtgtgcagatctctgctcagcttcccttgcgtgtaagggcctgccctagccagggctccctctggcttccagtaccctctcagggcataggctgcacaccagcagagggcagctagatggacctttccccggctcggaagggtgggcctgccgggcgggggcggtcagtcacccttgaatagtaagccaaaaaaaacaaacaaacaaaaaaacacacacaacaac

SEQ ID NO: 665898 - DNA, 1329 bp, Homo sapiens
agcaacttttaaaagaacaaaagaggccaggagtggtgactcacgcctgtaatcccagcgctttgggaggccaaggcaggtggatcacaaggtcaggagttcgagaccagcctgaccaacatggtgaaaccccatctctactaaaaatataaaaattagccgggcgtggtggcacgcgcctgtaatcccagctactcaggaggctgaggcaggagaattgcttgaacccaggaggcagaggttgcagtgagctgagatcacgccactgcattccagcctggccgacagagcgagactccgtctcaaaaaaaaaaaaaaaaaagagaaacaaaagaaaattactttaattacttgtggtaagcccgtgacagccgagaatttggggcaataaagcaaaattataagttaccatagtgtgcagaatatcttactagaacctctttcaagttactacatgtgaaattttatctcattcaaccatttattcattcattattcatatactcagtatttaagcttggcattgggtggtatctgggacacctattacgaggagtggccagattgatatacagggtagggcatttggcccttgaaagggtttttcccctccagctggtgggggaatgggataccaacatttaactacgggatatacgggaaagagtatattccgtgaggtgccctgatggagatgagagatcgacaaaatattgggtcccaagtcctggttatacgtggtcccaaacgaggaaacttccaattgtccacagtgggacattcccccatggccgagcatatagtgctccatcgggacccacagaatgcttcgggacaacccccacaccatcttggcaacgggctaacacgcggggaaccccgagaccgtacaacagggcagagggccgtaccgaccgggacaaacgctcccaacacagagagtgtgtcgagacaggggcaaactatgccccttagcgggcccccgagggaaataaacgaccacgaggacacccccaataaaacaccacggcgcggcgagacaatgctaccacagcggcgcccaaagcacttacacacaacccccacaacaaaggtgggcggaaccaaagaacgctacatacgcagcgcgcgacacacacaccgcaccgaaaacagaacgcgacggcgagaaaaaacagggcgggcggagaactcgaagcgcggcacacaccacgtaaagcgacgtagagtaaacaaccagcgcaaccgacgaggcgcagagaagagctcggggagacacaagctgacgaatgactgcaacaaaatcagagcagcgacagccaacgcgcc

SEQ ID NO: 665899 - DNA, 273 bp, Homo sapiens
  misc_feature (147)..(147): n is a, c, g, or t
tactgccagattctccatactacgaaaaatcctgtccacgaattttctagacaattgtttactattccatgttaataaccttgttaccaccagaggcaaagctatataagttatacttgtttctagtctagactattcaccttaatnaactcataaagttgtagagaaaaattaattgattagaaagtatttttatctgatctgtcagccaaaaataaattactatttctctatattaatgagaaaactcaaccataatatgtctgtttatgc

SEQ ID NO: 665900 - DNA, 340 bp, Homo sapiens
agcatatgcagtgcaagagtagctgacagtacacagaaaaccggtcctcagagtcagaatattactctacatactctcgtaatgttcacgatgtctcctgatactgtgccacatgctcctagatattttaaagcaggatatacctctttaggaagtatatcctgagttactctatccaactatccgtcaggcatcactaccactcctttttcttcatactttgattctcatttttccttttcccttcacgacctgtctcactttgctgtaagttctctataaactagtattggtcaacatactgatactctcctccaaaatacattagcatcatctcttc

SEQ ID NO: 665901 - DNA, 1656 bp, Homo sapiens
  misc_feature (1367)..(1367): n is a, c, g, or t
cctcgtcagaaccgagagccacgtagtggtgggctgcacgttcatcggcaggtagtgaggccgcggtcggttgcgtcggagatgcgcggacccggaggcagcaatcaagttgttgcgtccatgggatcgtcgggtgaaccgcagcgaagttgttcagatccttgtcccatcgctgtacaagggcgtatgaatcaggtcaattaaaggtcgcggcaaaaccgctggggattccaacacgcatctagggttcggtacagatccctggccttgcacaccaataatacaatcatggaaatgtcgcttctataactacgtgttcggagtcctctgagctacggattgcacattaaatatgcaacggataacgtgaaggaagtagcataccaatactcgtgtggatggtgcgctgccaaggtgagtgaccaggacagtcgtaggccctggtttcaccttaccgcgtgggaaccacgcagaggtactgaaggcgatgcgctgcattgggtcatgccagctatcagggttcattcccatagaggttgcttcagagctataatgccgtgactgttgacgcagacttccgacggcagaagaacagcactgacatgtacggctggatggtgactgtccggccgaaggtgatagggaaaaggagtttacgctactaggatacggaggagcttgggaacattggttgatttgaagcttgcatctggggatataagtccccgcagagttggtggaagacggtgttttggagataccatttagagttgatgtggaatttaatgcccaggatggccaacgttggttaggaaccagggggaggggggctaagggggtcctgctggaagagaacagggggggtttgggttaagggttcggaatggaacagcggctatcaacagaaagagagcgccaccaagggacgagtgttggagaaggcggttcggcacccctgctgggccagatcccccgggagtgggagacccacaccacgtgggcggggtaaaacccccaccaagagtgtgggagagacaacagcgagtggcgcgcgacaagcaggcttacacagggcgggaggagagacaccaccagcatagagagagccactcaggagaaggtgcggggagcatcttccccaccaagatatcgagaagagaggcagggctctccccatccggtgtaacaaaagagcaggcggcaacacgacccatcattcggccagagcaaccatgggcacagaagacaggctaggattatgtagtaactgatcctccttcttttttcttgtgcgtcgtcttcgttttcgtttgtctgcgtctgccgtgtcggttaagccggaaggacacggagcacaagcaacgcgnagcggggagcgagcagaaccgaagccgcgtgagccatgcgacaggaggcgcgggcagcagaaggaggcggagaggcaggacgagcacggacgcaagggcagggcagcaggcgcagacgacgaaggagcagcgaggaacgacagatagcgaggcgcgcggaaacgagcagcaggaccggagcaacgccacggcgcacgggacaccagggcagccaagtcgagaagcaggaaaggcggacagcagcgaaggacacgaaggagaccaacgacgcacacgcagccacgcacag

SEQ ID NO: 665902 - DNA, 147 bp, Homo sapiens
catgcctatccccaaggcagggcgtgtcacaccttctggacatttggcacctccatatcagttctgtgatggctatgatgcgcggacgactggaagtggccgctcagggcccaataacattccctttgtgtccccgttatgaatcga

SEQ ID NO: 665903 - DNA, 420 bp, Homo sapiens
ccccaaggggcccaaggaagtggagggggggtaacccccccccctgggggtctccccggaagggtttccaaagcggggcaccaaggggggccccctcagcccccgggggcccctttggttggggaaagcggatttcgagaaacccaaagttttcgcctggggggtccccccccgggggctggggttccccgtcccaaaaagttttccccggggggggggtttaagggggaggggccccccccttttccccgggttcaggcgggacccccccccctcttttgggctttggcccttttttcccggggggccccccccctttgggggcccccgggtttttttttccccccccccccccccccccccggggtttttttttgtttatgggggggggggatgaataaaaaaaggggttttttgcca

SEQ ID NO: 665904 - DNA, 433 bp, Homo sapiens
  misc_feature (102)..(102): n is a, c, g, or t
  misc_feature (144)..(144): n is a, c, g, or t
  misc_feature (168)..(168): n is a, c, g, or t
  misc_feature (186)..(186): n is a, c, g, or t
  misc_feature (192)..(192): n is a, c, g, or t
  misc_feature (212)..(213): n is a, c, g, or t
  misc_feature (245)..(246): n is a, c, g, or t
  misc_feature (300)..(300): n is a, c, g, or t
  misc_feature (409)..(409): n is a, c, g, or t
  misc_feature (420)..(420): n is a, c, g, or t
gagatctccgtgcgctcagtcaccacgtcactgtatcaattcatccttcctgcaaatcagtctgtgtaggcagacatgtttgtcaccattcatccacagagnacactgggttactttcactttttgggtattatgaatgatgtngctgtgaacactcaggtgtacatnttggtgtggacaagtgtnttcatntatcttaggtatagacctgnnggaggaatggctgggtcatacggtaactctannggtttaacttttcgaggaaagtgccagactatcttcccaagtggctgcagcagnagtgtctacgtgcctcaccaacacttgccacgaccgtccaagaagcacgtgcggtgggggctcaagggtgatctgcatttccctaaaaagtaatgacattaggcatctnttcatgtattntactggcattttt

SEQ ID NO: 665905 - DNA, 100 bp, Homo sapiens
gcgttatcaacccagaagctaaaaggatgatgaggttgctcagctcaagaaaaagtgcagatacccctgtgggacatcccagaaggacctaaaagacctg

SEQ ID NO: 665906 - DNA, 480 bp, Homo sapiens
  misc_feature (33)..(33): n is a, c, g, or t
  misc_feature (105)..(105): n is a, c, g, or t
  misc_feature (307)..(307): n is a, c, g, or t
ggcgaccccgccactttcacccaacccgtgganaaagttgcccggaagggttttttggacaccctgggggttttgccccgggccgggggggggttgaaaggggcnaaatcctggggccttttgcccggggacctggctgaggagtggggcctttcggatttggccggggaccgggggggggttggggggggccccaaaggcggtaaccaggcccgcataaatgccggggagggtcccccaaaaatccccgattgaaaaaaccaaagggggtttgggaaccccccggaaatttagattatcagtcccngggggtcctacggggccccaatggccccccccccaaccccccccggttttggggtttttttttaaaaaaaaggggttttaaaaaggtccccccttttaagggaaaaaaaggccttcccccccccccggaaagggccctttaaatctttttttaaaattttttttaaaaaggga

SEQ ID NO: 665907 - DNA, 198 bp, Homo sapiens
tttgagaaacatttaataactgtaatgtgtttgtggtacaggctgagtacacgatgcacaggaggccataggggtttaggcaaactgggagcacaaacagttgaatgatgcaggcactggccatcaacagctgtggcggcttcagcgccaagcaacagagagctgacggaagccacaagggtacgacatatttctgca

SEQ ID NO: 665908 - DNA, 1006 bp, Homo sapiens
cgatggtttttcatatcatggtcgtggttgtagtccgtgcgagaataccaaaaaaaaaaaaaaaaaaaaaaaaaaaaaattggggggcggctcgtcggccccgtgaaaaagatctgctggaaaaccaatcggttgggggcgcggggacccaatagaggttcaatggtgaacacgtgtcgtccactagcggtctcccaaaggaaaaaccggggaccaggaactaagggcggggattcctacaccaaaataacaaaacgccgggggcgacacccagaacggtttcgagaaacaaaacacccgagaagggagctccgaaaggcacaaacgcggggatctcatccaacaagagagagctcaacgggaggccgaattaacaaaattaagcccccggcggtggggacccaacagaaaacacaacagagtgtcaacacacgacgaaagtcacaaccaaccaacacccaccgtacgccccaacgctgcagccatacaagcgcaccaccacacccccagcccaccgcgccggccacgctcctcggagccagcagcgccacgataccacgctcacacacagacacgcaaacaacgaaactatcacgccacgaccacacaagccatcactccacctcgtgccaagccaccagctccgcaacaggacgtagtcccgacggtgcagtcaggtgtggtgtaacagcgtggtttaggttgcgtgaagggggagcgaggggagcgtgggctggcaacgcatcatgcgcgagacgagtgaaacacaaggatcggctgaggttgcaattggatcgggaggcgcttgataagacatagggctcagtaaatcgcggccgtccgagggaagcagatgcaaactacacacgcagaccataggaggctcatcatgcaatgtgcggaggggtgcacgcaggttatgtccgcgtctcctcgcgcaagcacgcccatgcacggcaccacgaccccactagtcgccacccccgatgcacttcgcgctcagcgc

SEQ ID NO: 665909 - DNA, 896 bp, Homo sapiens
  misc_feature (896)..(896): n is a, c, g, or t
tataaaatttatagtataaaaggggacataggtaggattagcgtggtaagggcgatgagtgtggggaggaaggggggtgggtaatggtatgtacaaacttgtcatttaatttatcacgttgtcaaatatggggagctaggtgtgattgcaggtggcagatagataaggcgtaggtaaacaagtagaggtaaaggagggctgatggtgcgtaatgaatggtggggactagaatcgacgcgctaatacggtacaaaacggtaagaatacactaccagactaaaatgggccccaattgggcgcaacacaacgcccgcgaaaagcagacgagcacaagagccctcccaaagggaaagaagggaccgcgtaggaaccgagcacataaacgggcgtcgcacagcgaacaagcgtaacgcacacgtacaccaagagtagccaaaaaaaaaaataagataagggtaccgcaggagagactacgaaaataccaccaagcagcgcactacaccacaggacactcgcaggccaagcacgctaaacgagcaaacacaagcaaaaacacagcacacacaatctcacgaacatagaatccaaccacacaacagccatagaccagagacaccacaccacagccacataaaaaacaagccacaaaaagaatagcacacacaactaaaagaacagaacaaaaccgcaacaaaagaacaaaaagaggaaccaaaagagcagaacacaaaaacaaaaagcccaaccccacaaaaagacgaagacgctgaacaaagagacaaagcaaaacaagcaaacaagaacaacaaacacgaacagaagcagaaaaaaccaaagcaatcaaacgactaaaccaccaaaacacagcacacaaaccacacacaacgagccacacn

SEQ ID NO: 665910 - DNA, 350 bp, Homo sapiens
aacttaatctataattaaaaaaaaaaaaaaagaaaaagaaacagcccaaggtcagctttcagagcattttagttagctgtgaaaactagcatctttccttgcctgggagaccagtgttagaagcgacctcctggaactcttaaatctctgtcaggatatttgcctgcctgaacttgataggagggaataaaaattgtgcttcctttcaggctaattgacatgttcactgggtccccatgtatgcttttctgtaatccacctccaagcacagagattgaatctgaaacctggaaatcaacttggatattcgtaacgaagttgacatgagcaatgtcagataggcctcgtgc

SEQ ID NO: 665911 - DNA, 1905 bp, Homo sapiens
  misc_feature (13)..(13): n is a, c, g, or t
  misc_feature (16)..(16): n is a, c, g, or t
agcgggcgtctgngcngctgcccggcgccggcttccgggtggtgcgagcgagatggggcggagggccggtcttgcagagtagctgcggtgagtgggcgtgtgcgccgagcggtctggcccaagggctgggggccggccgagggtcttcgggagcaggccgcagggcgcggagagatcctgggatcgccgtccgccgctgctacccggcatgtcggcggaggcctcgggcccggctgccgccgcggccccgtccctggaagcccccaagccctcgggtctcgagcctggccccgccgcctacggtctcaagccgctgaccccgaacagcaaatacgtgaagctgaacgtgggcggctcgttgcactacaccacgctgcgcaccctcacgggacaggacaccatgctcaaagccatgttcagcggccgcgtggaggtgctgaccgatgccggaggttgggtgctgattgaccggagcggccgtcactttggtacaatcctcaattacctgcgggatgggtctgtgccactgccggagagtacgagagaactgggggagctgctgggcgaagcacgctactacctggtgcagggcctgattgaggactgccagctggcgctgcagcaaaaaagggagacgctgtccccgctgtgcctcatccccatggtgacatctccccgggaggagcagcagctcctggccagcacctccaagcccgtggtgaagctcctgcacaaccgcagtaacaacaagtactcctacaccagcacttcagatgacaacctacttaagaacatcgagctgttcgacaagctggccctgcgcttccacgggcggctactcttcctcaaggatgtcctgggggacgagatctgctgctggtctttctacgggcagggccgcaaaatcgccgaggtgtgctgcacctccattgtctatgctacggagaagaagcagaccaaggtggaatttccagaggcccggatcttcgaggagaccctgaacatcctcatctacgagactccccggggcccagacccagccctcctggaggccacagggggagcagctggagctggtggggctggccgcggggaggatgaagagaaccgagagcaccgtgtccgcaggatccatgtccggcgccatatcacccacgacgagcgtcctcatggccaacaaattgtcttcaaggactgacctctgaccctccccctgccttcctcttgccttgggacccagtccctctctctttccctccccttcccagacttttgccccggctctgctggccaagtcgtgggtcctcctctgtcccttcattgcatggcacagctcactttggcccttctccacccgtcccaaccccattgctaacaacatggtacattccggccccaccactcagagccttccgaagccaacacttgtccccaccctggccctgcgtccttccctctccagctggttaagagggatttagaattccctttctctttttttagtgcatcgtccatgccaaagtgtgcggcccttcctgacatcaccacagtctgagcagcctcccgcgtcctgcagggtagtccgccccctcctccccaccatcctccctacctccttaactttgtactagactggcctgggcctgcccagctcagcgttatcagtctgtttcatattatttattattttaattttctattaaattattgaaataaagttaagttgagaaactggtgctggctcctggggagagggacggggagatgcctgtgttaggaggtatctggccgggcgtggtggctcacacgtgtaatcccaactactcaggaggttgaggcagaaggatcacttgagcccaggagttcaagaccagcctgggcaacaaagcaagaccctgactctac

SEQ ID NO: 665912 - DNA, 240 bp, Homo sapiens
aggtggaggtcgtctggctttctcagctaagcgagagtctattcatgtggaaacgaggctaggtgattaagagagcaaaagggagagtcttaaaacaggattagtgaaaacaaggttgggcattacaacacaaggaacaaaataatgcttaggatcaagaggaaaaagatataggagcaagcgtcatggaaccaggttagagggagcaaggaagacaaaaggcatcttggactgggtcag

SEQ ID NO: 665913 - DNA, 1247 bp, Homo sapiens
  misc_feature (13)..(13): n is a, c, g, or t
  misc_feature (16)..(16): n is a, c, g, or t
  misc_feature (661)..(661): n is a, c, g, or t
  misc_feature (694)..(694): n is a, c, g, or t
agcgggcgtctgngcngctgcccggcgccggcttccgggtggtgcgagcgagatggggcggagggccggtcttgcagagtagctgcggtgagtgggcgtgtgcgccgagcggtctggcccaagggctgggggccggccgagggtcttcgggagcaggccgcagggcgcggagagatcctgggatcgccgtccgccgctgctacccggcatgtcggcggaggcctcgggcccggctgccgccgcggccccgtccctggaagcccccaagccctcgggtctcgagcctggccccgccgcctacggtctcaagccgctgaccccgaacagcaaatacgtgaagctgaacgtgggcggctcgttgcactacaccacgctgcgcaccctcacgggacaggacaccatgctcaaagccatgttcagcggccgcgtggaggtgctgaccgatgccggaggttgggtgctgattgaccggagcggccgtcactttggtacaatcctcaattacctgcgggatgggtctgtgccactgccggagagtacgagagaactgggggagctgctgggcgaagcacgctactacctggtgcagggcctgattgaggactgccagctggcgctgcaggtgagggccttcggagtccccatgcctatgttcctgggnagagctgccaagcaggtattagagcagaaaaanggagatatggggtatggcttggagagcctggctttggctggccataaccccagagaatttgaggtgccatcttctgcatccctgccgcctcaggcagcacccccaccccagcctcatgccaggacctttgcaatggttaaatagctgctctctacttcccactgttcctatgcattcagtccagctgttacactcgcacctgagtaattatctttcagcacaagcccgatctattctctctcttgcttagaaatcctaaatagctccctcatgtcactagggaaaaacatctaaatttaaattgaacatataataacctctgcgatctggccctatcctgggaggcagcattctcccatggcttccgcccccccaggagctttctaatgctttaaagggtgaaacgagtgaaatgcttaattcaaagtgaaatctcacagacagcagggcacactcccaagtcacaacagggtaggggatacatagagaacccaccgtgctagcgctccaattttgtggacccctataggggttctgaaggagcagagccttg

SEQ ID NO: 665914 - DNA, 1465 bp, Homo sapiens
  misc_feature (13)..(13): n is a, c, g, or t
  misc_feature (16)..(16): n is a, c, g, or t
  misc_feature (1450)..(1450): n is a, c, g, or t
agcgggcgtctgngcngctgcccggcgccggcttccgggtggtgcgagcgagatggggcggagggccggtcttgcagagtagctgcggtgagtgggcgtgtgcgccgagcggtctggcccaagggctgggggccggccgagggtcttcgggagcaggccgcagggcgcggagagatcctgggatcgccgtccgccgctgctacccggcatgtcggcggaggcctcgggcccggctgccgccgcggccccgtccctggaagcccccaagccctcgggtctcgagcctggccccgccgcctacggtctcaagccgctgaccccgaacagcaaatacgtgaagctgaacgtgggcggctcgttgcactacaccacgctgcgcaccctcacgggacaggacaccatgctcaaagccatgttcagcggccgcgtggaggtgctgaccgatgccggaggttgggtgctgattgaccggagcggccgtcactttggtacaatcctcaattacctgcgggatgggtctgtgccactgccggagagtacgagagaactgggggagctgctgggcgaagcacgctactacctggtgcagggcctgattgaggactgccagctggcgctgcagcaaaaaagggagacgctgtccccgctgtgcctcatccccatggtgacatctccccgggaggagcagcagctcctggccagcacctccaagcccgtggtgaagctcctgcacaaccgcagtaacaacaagtactcctacaccagcacttcagatgacaacctacttaagaacatcgagctgttcgacaagctggccctgcgcttccacgggcggctactcttcctcaaggatgtcctgggggacgagatctgctgctggtctttctacgggcagggccgcaaaatcgccgaggtgtgctgcacctccattgtctatgctacggagaagaagcagaccaaggtggaatttccagaggcccggatcttcgaggagaccctgaacatcctcatctacgagactccccggggcccagacccagccctcctggaggccacagggggagcagctggagctggtggggctggccgcggggaggatgaagagaaccgagagcaccgtgtccgcaggatccatgtccggcgccatatcacccacgacgagcgtcctcatggccaacaaattgtcttcaaggactgacctctgaccctccccctgccttcctcttgccttgggacccagtccctctctctttccctccccttcccagacttttgccccggctctgctggccaagtcgtgggtcctcctctgtcccttcattgcatggcacagctcactttggcccttctccacccgtcccaaccccattgctaacaacatggtacattccggccccaccactcagagccttccgaagccaacacttgtccccacctcccgccaacaccncaccagcgtgcgcag

SEQ ID NO: 665915 - DNA, 1807 bp, Homo sapiens
gtaagccgatcggtctggaccaaacaatagagaacgtctgaagataattgtgaaacaggccgcagggcgcggagagatcctgggatcgccgtccgccgctgctacccggcatgtcggcggaggcctcgggcccggctgccgccgcggccccgtccctggaagcccccaagccctcgggtctcgagcctggccccgccgcctacggtctcaagccgctgaccccgaacagcaaatacgtgaagctgaacgtgggcggctcgttgcactacaccacgctgcgcaccctcacgggacaggacaccatgctcaaagccatgttcagcggccgcgtggaggtgctgaccgatgccggaggttgggtgctgattgaccggagcggccgtcactttggtacaatcctcaattacctgcgggatgggtctgtgccactgccggagagtacgagagaactgggggagctgctgggcgaagcacgctactacctggtgcagggcctgattgaggactgccagctggcgctgcagcaaaaaagggagacgctgtccccgctgtgcctcatccccatggtgacatctccccgggaggagcagcagctcctggccagcacctccaagcccgtggtgaagctcctgcacaaccgcagtaacaacaagtactcctacaccagcacttcagatgacaacctacttaagaacatcgagctgttcgacaagctggccctgcgcttccacgggcggctactcttcctcaaggatgtcctgggggacgagatctgctgctggtctttctacgggcagggccgcaaaatcgccgaggtgtgctgcacctccattgtctatgctacggagaagaagcagaccaaggtggaatttccagaggcccggatcttcgaggagaccctgaacatcctcatctacgagactccccggggcccagacccagccctcctggaggccacagggggagcagctggagctggtggggctggccgcggggaggatgaagagaaccgagagcaccgtgtccgcaggatccatgtccggcgccatatcacccacgacgagcgtcctcatggccaacaaattgtcttcaaggactgacctctgaccctccccctgccttcctcttgccttgggacccagtccctctctctttccctccccttcccagacttttgccccggctctgctggccaagtcgtgggtcctcctctgtcccttcattgcatggcacagctcactttggcccttctccacccgtcccaaccccattgctaacaacatggtacattccggccccaccactcagagccttccgaagccaacacttgtccccaccctggccctgcgtccttccctctccagctggttaagagggatttagaattccctttctctttttttagtgcatcgtccatgccaaagtgtgcggcccttcctgacatcaccacagtctgagcagcctcccgcgtcctgcagggtagtccgccccctcctccccaccatcctccctacctccttaactttgtactagactggcctgggcctgcccagctcagcgttatcagtctgtttcatattatttattattttaattttctattaaattattgaaataaagttaagttgagaaactggtgctggctcctggggagagggacggggagatgcctgtgttaggaggtatctggccgggcgtggtggctcacacgtgtaatcccaactactcaggaggttgaggcagaaggatcacttgagcccaggagttcaagaccagcctgggcaacaaagcaagaccctgactctac

SEQ ID NO: 665916 - DNA, 681 bp, Homo sapiens
  misc_feature (7)..(7): n is a, c, g, or t
  misc_feature (87)..(87): n is a, c, g, or t
  misc_feature (204)..(204): n is a, c, g, or t
  misc_feature (270)..(270): n is a, c, g, or t
  misc_feature (313)..(313): n is a, c, g, or t
  misc_feature (319)..(320): n is a, c, g, or t
  misc_feature (323)..(323): n is a, c, g, or t
  misc_feature (332)..(332): n is a, c, g, or t
  misc_feature (338)..(338): n is a, c, g, or t
  misc_feature (361)..(361): n is a, c, g, or t
  misc_feature (401)..(401): n is a, c, g, or t
  misc_feature (450)..(450): n is a, c, g, or t
  misc_feature (483)..(483): n is a, c, g, or t
  misc_feature (493)..(493): n is a, c, g, or t
  misc_feature (499)..(499): n is a, c, g, or t
  misc_feature (505)..(505): n is a, c, g, or t
  misc_feature (572)..(572): n is a, c, g, or t
  misc_feature (583)..(583): n is a, c, g, or t
  misc_feature (587)..(587): n is a, c, g, or t
  misc_feature (593)..(593): n is a, c, g, or t
  misc_feature (617)..(617): n is a, c, g, or t
  misc_feature (660)..(660): n is a, c, g, or t
gggcaancccagaaagacggctgggggcaggggtgctgcgtactgttcaatgggggccataatgtggctgtaactgtcttcctcatnttgcaagaacactgctggcagatccagctcctcatttagcgccttcacccgggccactttctcagcctccttctgcccgtgtttttccttcagggtctggtgctgttctggggtggnccgttgcggacactgaaccaccagccagctgcgtttgttgtcctgggtgtcggtgccagttttgcnggtcgcgctggggtcccccagggggtcggggtggtcttcctgnttctgnnagnactcccccntctccngcggggtcttcttggacgttggnagtgctccttctcgccatcagttcctgccgtgtgcatggntgcagctttgggggggtagagggggtgggaagctgtcttgtgcttgacngtgggtttgtgcctgggtagggggggggggganctcctcgggngggcantgcgcntcctgggccctccctcgctgtccaggcatggttgcgcgctgtccctcacctcccctcacctcttttnagtgaatctgncaanatccanattgccctggggggctgtaaggangtccaaggtctgcccaatctcagtctgaaaagaactctaagcnagaaaaaggcggtccatgagc

SEQ ID NO: 665917 - DNA, 2287 bp, Homo sapiens
  misc_feature (13)..(13): n is a, c, g, or t
  misc_feature (16)..(16): n is a, c, g, or t
agcgggcgtctgngcngctgcccggcgccggcttccgggtggtgcgagcgagatggggcggagggccggtcttgcagagtagctgcggtgagtgggcgtgtgcgccgagcggtctggcccaagggctgggggccggccgagggtcttcgggagcaggccgcagggcgcggagagatcctgggatcgccgtccgccgctgctacccggcatgtcggcggaggcctcgggcccggctgccgccgcggccccgtccctggaagcccccaagccctcgggtctcgagcctggccccgccgcctacggtctcaagccgctgaccccgaacagcaaatacgtgaagctgaacgtgggcggctcgttgcactacaccacgctgcgcaccctcacgggacaggacaccatgctcaaagccatgttcagcggccgcgtggaggtgctgaccgatgccggaggttgggtgctgattgaccggagcggccgtcactttggtacaatcctcaattacctgcgggatgggtctgtgccactgccggagagtacgagagaactgggggagctgctgggcgaagcacgctactacctggtgcagggcctgattgaggactgccagctggcgctgcagcaaaaaagggagacgctgtccccgctgtgcctcatccccatggtgacatctccccgggaggagcagcagctcctggccagcacctccaagcccgtggtgaagctcctgcacaaccgcagtaacaacaagtactcctacaaggaactggcagagtcctcccccttgaggtcagtactgttgtgagctccattttacagatgaggaggtcgggacaccaagaggtgaagtaacttgcctagtgtcacccagttaaaaaatggggacaccaggacccccggggaggtggcctggctcccggtccctcactggagctgctgtgctgtgctgtgctgggatttgctcagcgcatgtggcttcccttctgagacccgtttagcctggccccaggggtggaggaggctctctgttgagcaccaaagccctgggcaggagcagaggactgggaatgcatccaggcccgtcttctgggggtacagagggaggggtgccaactgcgctgaggcctcctggtcccctggtccccagcacttcagatgacaacctacttaagaacatcgagctgttcgacaagctggccctgcgcttccacgggcggctactcttcctcaaggatgtcctgggggacgagatctgctgctggtctttctacgggcagggccgcaaaatcgccgaggtgtgctgcacctccattgtctatgctacggagaagaagcagaccaaggtggaatttccagaggcccggatcttcgaggagaccctgaacatcctcatctacgagactccccggggcccagacccagccctcctggaggccacagggggagcagctggagctggtggggctggccgcggggaggatgaagagaaccgagagcaccgtgtccgcaggatccatgtccggcgccatatcacccacgacgagcgtcctcatggccaacaaattgtcttcaaggactgacctctgaccctccccctgccttcctcttgccttgggacccagtccctctctctttccctccccttcccagacttttgccccggctctgctggccaagtcgtgggtcctcctctgtcccttcattgcatggcacagctcactttggcccttctccacccgtcccaaccccattgctaacaacatggtacattccggccccaccactcagagccttccgaagccaacacttgtccccaccctggccctgcgtccttccctctccagctggttaagagggatttagaattccctttctctttttttagtgcatcgtccatgccaaagtgtgcggcccttcctgacatcaccacagtctgagcagcctcccgcgtcctgcagggtagtccgccccctcctccccaccatcctccctacctccttaactttgtactagactggcctgggcctgcccagctcagcgttatcagtctgtttcatattatttattattttaattttctattaaattattgaaataaagttaagttgagaaactggtgctggctcctggggagagggacggggagatgcctgtgttaggaggtatctggccgggcgtggtggctcacacgtgtaatcccaactactcaggaggttgaggcagaaggatcacttgagcccaggagttcaagaccagcctgggcaacaaagcaagaccctgactctac

SEQ ID NO: 665918 - DNA, 2501 bp, Homo sapiens
  misc_feature (13)..(13): n is a, c, g, or t
  misc_feature (16)..(16): n is a, c, g, or t
agcgggcgtctgngcngctgcccggcgccggcttccgggtggtgcgagcgagatggggcggagggccggtcttgcagagtagctgcggtgagtgggcgtgtgcgccgagcggtctggcccaagggctgggggccggccgagggtcttcgggagcaggccgcagggcgcggagagatcctgggatcgccgtccgccgctgctacccggcatgtcggcggaggcctcgggcccggctgccgccgcggccccgtccctggaagcccccaagccctcgggtctcgagcctggccccgccgcctacggtctcaagccgctgaccccgaacagcaaatacgtgaagctgaacgtgggcggctcgttgcactacaccacgctgcgcaccctcacgggacaggacaccatgctcaaagccatgttcagcggccgcgtggaggtgctgaccgatgccggaggttgggtgctgattgaccggagcggccgtcactttggtacaatcctcaattacctgcgggatgggtctgtgccactgccggagagtacgagagaactgggggagctgctgggcgaagcacgctactacctggtgcagggcctgattgaggactgccagctggcgctgcagtccagggcatactccggtttctccagttgttccagaaatgtgtttttacagctggttcatcaaaccagggtccagtctagatcttcacgttgcatctggttatctgcaagttaacaatggaaagcatgactttgcggatagtttcatgtaataatgttgaagagatgataagagttataggtattctgtggcacgaatgtgattgctggttcagcaaaaaagggagacgctgtccccgctgtgcctcatccccatggtgacatctccccgggaggagcagcagctcctggccagcacctccaagcccgtggtgaagctcctgcacaaccgcagtaacaacaagtactcctacaaggaactggcagagtcctcccccttgaggtcagtactgttgtgagctccattttacagatgaggaggtcgggacaccaagaggtgaagtaacttgcctagtgtcacccagttaaaaaatggggacaccaggacccccggggaggtggcctggctcccggtccctcactggagctgctgtgctgtgctgtgctgggatttgctcagcgcatgtggcttcccttctgagacccgtttagcctggccccaggggtggaggaggctctctgttgagcaccaaagccctgggcaggagcagaggactgggaatgcatccaggcccgtcttctgggggtacagagggaggggtgccaactgcgctgaggcctcctggtcccctggtccccagcacttcagatgacaacctacttaagaacatcgagctgttcgacaagctggccctgcgcttccacgggcggctactcttcctcaaggatgtcctgggggacgagatctgctgctggtctttctacgggcagggccgcaaaatcgccgaggtgtgctgcacctccattgtctatgctacggagaagaagcagaccaaggtggaatttccagaggcccggatcttcgaggagaccctgaacatcctcatctacgagactccccggggcccagacccagccctcctggaggccacagggggagcagctggagctggtggggctggccgcggggaggatgaagagaaccgagagcaccgtgtccgcaggatccatgtccggcgccatatcacccacgacgagcgtcctcatggccaacaaattgtcttcaaggactgacctctgaccctccccctgccttcctcttgccttgggacccagtccctctctctttccctccccttcccagacttttgccccggctctgctggccaagtcgtgggtcctcctctgtcccttcattgcatggcacagctcactttggcccttctccacccgtcccaaccccattgctaacaacatggtacattccggccccaccactcagagccttccgaagccaacacttgtccccaccctggccctgcgtccttccctctccagctggttaagagggatttagaattccctttctctttttttagtgcatcgtccatgccaaagtgtgcggcccttcctgacatcaccacagtctgagcagcctcccgcgtcctgcagggtagtccgccccctcctccccaccatcctccctacctccttaactttgtactagactggcctgggcctgcccagctcagcgttatcagtctgtttcatattatttattattttaattttctattaaattattgaaataaagttaagttgagaaactggtgctggctcctggggagagggacggggagatgcctgtgttaggaggtatctggccgggcgtggtggctcacacgtgtaatcccaactactcaggaggttgaggcagaaggatcacttgagcccaggagttcaagaccagcctgggcaacaaagcaagaccctgactctac

SEQ ID NO: 665919 - DNA, 2119 bp, Homo sapiens
  misc_feature (13)..(13): n is a, c, g, or t
  misc_feature (16)..(16): n is a, c, g, or t
agcgggcgtctgngcngctgcccggcgccggcttccgggtggtgcgagcgagatggggcggagggccggtcttgcagagtagctgcggtgagtgggcgtgtgcgccgagcggtctggcccaagggctgggggccggccgagggtcttcgggagcaggccgcagggcgcggagagatcctgggatcgccgtccgccgctgctacccggcatgtcggcggaggcctcgggcccggctgccgccgcggccccgtccctggaagcccccaagccctcgggtctcgagcctggccccgccgcctacggtctcaagccgctgaccccgaacagcaaatacgtgaagctgaacgtgggcggctcgttgcactacaccacgctgcgcaccctcacgggacaggacaccatgctcaaagccatgttcagcggccgcgtggaggtgctgaccgatgccggaggttgggtgctgattgaccggagcggccgtcactttggtacaatcctcaattacctgcgggatgggtctgtgccactgccggagagtacgagagaactgggggagctgctgggcgaagcacgctactacctggtgcagggcctgattgaggactgccagctggcgctgcagtccagggcatactccggtttctccagttgttccagaaatgtgtttttacagctggttcatcaaaccagggtccagtctagatcttcacgttgcatctggttatctgcaagttaacaatggaaagcatgactttgcggatagtttcatgtaataatgttgaagagatgataagagttataggtattctgtggcacgaatgtgattgctggttcagcaaaaaagggagacgctgtccccgctgtgcctcatccccatggtgacatctccccgggaggagcagcagctcctggccagcacctccaagcccgtggtgaagctcctgcacaaccgcagtaacaacaagtactcctacaccagcacttcagatgacaacctacttaagaacatcgagctgttcgacaagctggccctgcgcttccacgggcggctactcttcctcaaggatgtcctgggggacgagatctgctgctggtctttctacgggcagggccgcaaaatcgccgaggtgtgctgcacctccattgtctatgctacggagaagaagcagaccaaggtggaatttccagaggcccggatcttcgaggagaccctgaacatcctcatctacgagactccccggggcccagacccagccctcctggaggccacagggggagcagctggagctggtggggctggccgcggggaggatgaagagaaccgagagcaccgtgtccgcaggatccatgtccggcgccatatcacccacgacgagcgtcctcatggccaacaaattgtcttcaaggactgacctctgaccctccccctgccttcctcttgccttgggacccagtccctctctctttccctccccttcccagacttttgccccggctctgctggccaagtcgtgggtcctcctctgtcccttcattgcatggcacagctcactttggcccttctccacccgtcccaaccccattgctaacaacatggtacattccggccccaccactcagagccttccgaagccaacacttgtccccaccctggccctgcgtccttccctctccagctggttaagagggatttagaattccctttctctttttttagtgcatcgtccatgccaaagtgtgcggcccttcctgacatcaccacagtctgagcagcctcccgcgtcctgcagggtagtccgccccctcctccccaccatcctccctacctccttaactttgtactagactggcctgggcctgcccagctcagcgttatcagtctgtttcatattatttattattttaattttctattaaattattgaaataaagttaagttgagaaactggtgctggctcctggggagagggacggggagatgcctgtgttaggaggtatctggccgggcgtggtggctcacacgtgtaatcccaactactcaggaggttgaggcagaaggatcacttgagcccaggagttcaagaccagcctgggcaacaaagcaagaccctgactctac

SEQ ID NO: 665920 - DNA, 521 bp, Homo sapiens
tccggtgtcttatcatctattttaacagaagtatcaaaaagtgatatatattatttaatttatttttgagacagagtctcactctgttgctcaggctggagtgcaggggtgcgatctcggtcactgaacttccacctacctgggtacaagcaattcttgtgcctcagcctcccaagtagctgggttacaggcgtgtgtcaccacacccagctaattttggtatttaagtagagatggggttcaccatgttggctggggtgctcttgaactcctgacctcaggtgatctgcctgactcggccatccgaaagtgctgagattacagccgtagagccacgcggcccggccctatgaacaaggacataggagactccaccatattataggtctgtaccacataattatccggccactatattcagataagtaatacgcgatatactaaacttggcttacaattggtataatatttcaatatacattctgtaagtgagcaactgaattacctctctctcataatta

SEQ ID NO: 665921 - DNA, 217 bp, Homo sapiens
cgccagtactattgacccaccgatgggggcttcgacatgggcttaggcgatgtcataagtggagtccgtagacgaggtatctttactatcacaagctacttgtgtcagctagtcatattaatgttgttggctcaggagtttgatagttctcgggcagtgagagtgagtagtaaaatgtttagtgagcctagggtgttgccatcttgagcctgtgtct

SEQ ID NO: 665922 - DNA, 909 bp, Homo sapiens
aaatttgcccccacacccactccacaccagtaataaaaagccaccacacactaaaaaaaaaaaaaaaaaaaaaaaaaaaaaaaaaaaaaaaaaaaaaaaaaaaaaaaaaaaagctggtgcggcggccgcacggcggccgccgaagaacaactctccacaccacacggcggggggcgcgcgcggcggcccccagaagaaaaagagcacacggggcacagagggacccacaagaacagaaaaatcggcgcggcgacgaagaacagagcggcggcggaggatctctccacgcacaccacaaagaaacacgcgccgcgcgcggggagcacgagcgaggcaggtgtcgtcaacagcaaacccccaaagaggaggaatacgaacggagagcacaacccgcggggagaacaatacaaaagaagacaagagagacacaccagaacaagcaacacaaacaacaaaaaacataagaacccccgtacggtgaggggcgaaaaaaaaaaagaaagaaagaaaacaaacaaaacaaaaacaaaaacaaagcaaaaaagaaggaacgagggagggaaaagcaggcgggacagaagagacagaaaaacgaaggcacacacgcgagacgggaagaagcgagaggacgcacacagaggcgcgaaaagagacgaaggagagaacaacgaccgcgagcaagcgaggagaaaggaacaagagagacgagggaaagcgacagaaaggagaggacaagagaaaagagaaacggtagagaggcgaagaaagaacaagagagacagcgagggaggaagaaaaaggcagagaaagacagagagaagagaaagaacagacgaggaaggaaagacaagaaagagagaggaaaggcgaaaaagaagaaggaacaaaaggagagaaaagaaaagaaca

SEQ ID NO: 665923 - DNA, 1931 bp, Homo sapiens
cactacattagaaaaaagccacacctagaaatctctgcaagtggccaggcacaggataaccagtaaggacattcttgctccaaagcaggggagccgggcgtggtagcgtgtgcctgtcatccccagctactcaggaggctgaggcaggagaattgctttaacccgggaggtggaggttgcagtgagccgagatggcgccattgcactccagcctgggcaacaagcgaaactctgtctcaaaaaaagaaaaagaaaactgataacacaaaaggcaggatgtagaggaggctgttttagccaggggggctggggagggctggcctgaggaggcactgtgtgacctgcgatctgaatggcatgacggacacgccacgctgacagctgagcaaagaagcatcccgggcaggggcacagccagtggccggggcaggcacaagctggatgtgtgaagcagcaaggtgtccgtgggaccaagggcccagcaagcaaagggagagtggcagagaggctggcggacttggagcctgcagagccctgcgggaccactgaggagtctggagttgtccccaaccagcttttgaaggcttttaagtgggggagtacgtggcctttggttgtgctgttaaccaccttccgcttcttccccagcaaaaaagggagacgctgtccccgctgtgcctcatccccatggtgacatctccccgggaggagcagcagctcctggccagcacctccaagcccgtggtgaagctcctgcacaaccgcagtaacaacaagtactcctacaccagcacttcagatgacaacctacttaagaacatcgagctgttcgacaagctggccctgcgcttccacgggcggctactcttcctcaaggatgtcctgggggacgagatctgctgctggtctttctacgggcagggccgcaaaatcgccgaggtgtgctgcacctccattgtctatgctacggagaagaagcagaccaaggtggaatttccagaggcccggatcttcgaggagaccctgaacatcctcatctacgagactccccggggcccagacccagccctcctggaggccacagggggagcagctggagctggtggggctggccgcggggaggatgaagagaaccgagagcaccgtgtccgcaggatccatgtccggcgccatatcacccacgacgagcgtcctcatggccaacaaattgtcttcaaggactgacctctgaccctccccctgccttcctcttgccttgggacccagtccctctctctttccctccccttcccagacttttgccccggctctgctggccaagtcgtgggtcctcctctgtcccttcattgcatggcacagctcactttggcccttctccacccgtcccaaccccattgctaacaacatggtacattccggccccaccactcagagccttccgaagccaacacttgtccccaccctggccctgcgtccttccctctccagctggttaagagggatttagaattccctttctctttttttagtgcatcgtccatgccaaagtgtgcggcccttcctgacatcaccacagtctgagcagcctcccgcgtcctgcagggtagtccgccccctcctccccaccatcctccctacctccttaactttgtactagactggcctgggcctgcccagctcagcgttatcagtctgtttcatattatttattattttaattttctattaaattattgaaataaagttaagttgagaaactggtgctggctcctggggagagggacggggagatgcctgtgttaggaggtatctggccgggcgtggtggctcacacgtgtaatcccaactactcaggaggttgaggcagaaggatcacttgagcccaggagttcaagaccagcctgggcaacaaagcaagaccctgactctac

SEQ ID NO: 665924 - DNA, 730 bp, Homo sapiens
  misc_feature (18)..(18): n is a, c, g, or t
  misc_feature (71)..(71): n is a, c, g, or t
  misc_feature (94)..(94): n is a, c, g, or t
  misc_feature (110)..(110): n is a, c, g, or t
  misc_feature (134)..(134): n is a, c, g, or t
  misc_feature (303)..(303): n is a, c, g, or t
  misc_feature (314)..(314): n is a, c, g, or t
  misc_feature (351)..(351): n is a, c, g, or t
  misc_feature (413)..(413): n is a, c, g, or t
  misc_feature (420)..(420): n is a, c, g, or t
  misc_feature (437)..(437): n is a, c, g, or t
  misc_feature (448)..(448): n is a, c, g, or t
  misc_feature (502)..(502): n is a, c, g, or t
  misc_feature (521)..(521): n is a, c, g, or t
  misc_feature (588)..(588): n is a, c, g, or t
  misc_feature (597)..(597): n is a, c, g, or t
  misc_feature (612)..(612): n is a, c, g, or t
  misc_feature (644)..(644): n is a, c, g, or t
  misc_feature (652)..(652): n is a, c, g, or t
  misc_feature (697)..(697): n is a, c, g, or t
acgcccagcagttgtgantgctccccactccttttctgagtttattagcattgtttggttttcttcttgtngcttttaaatcctcgagcggcancctgaccaaagcaganggtagagggtattctatgtttgtngatccgccttttacctgccggtgcaggggaggctgcaacaggctcagagcagatttccatggcctccccttctgaccgctctccactgtaccctggggcttctgctgaggctgggcttctgcttttctttggcttatcaaaccggaagttcgcggggtaaaggtgcatnctcaccatgtnatccttccggtctctgctggtcttgaacttctctgtncagctttctaccaagcactgatacatgttctgcctcttagataggatctggaagagcgaatngtgccantacaggatgtgggcgtncagcaggtgtncggaagggaaggcccgcttgcaaaaggagcaaacatttccgtgcagcgtgtagnagtagtgctcgtagtcgtncagggcatcgaacacctggaagcagcgggccacctggcaggcaaacgcgggcaccctggggcttctnaggcacgtnggccacctgcatgancacgtcctcggaggtagaggtggcgctgcacnttcccatnctcgaagaactggttgctcccgcgggaagcgcacgggggcgcgcnaagaagcgaaaaggcgcggccccagccggggga

SEQ ID NO: 665925 - DNA, 1719 bp, Homo sapiens
  misc_feature (87)..(87): n is a, c, g, or t
  misc_feature (89)..(89): n is a, c, g, or t
ccaaggcgagggccacggccacacggggggcctacaagaacatctgtgcctgctcgcagattcggcttcgcctcttacccctgacgntntaggcaggtcctttctgcttctcagcttcagctcagtcatcagtaaatgggtttgggtgaggacaaagtgatagtggcgagcctatcccaagtgctctcattctaggaactggcagagtcctcccccttgaggtcagtactgttgtgagctccattttacagatgaggaggtcgggacaccaagaggtgaagtaacttgcctagtgtcacccagttaaaaaatggggacaccaggacccccggggaggtggcctggctcccggtccctcactggagctgctgtgctgtgctgtgctgggatttgctcagcgcatgtggcttcccttctgagacccgtttagcctggccccaggggtggaggaggctctctgttgagcaccaaagccctgggcaggagcagaggactgggaatgcatccaggcccgtcttctgggggtacagagggaggggtgccaactgcgctgaggcctcctggtcccctggtccccagcacttcagatgacaacctacttaagaacatcgagctgttcgacaagctggccctgcgcttccacgggcggctactcttcctcaaggatgtcctgggggacgagatctgctgctggtctttctacgggcagggccgcaaaatcgccgaggtgtgctgcacctccattgtctatgctacggagaagaagcagaccaaggtggaatttccagaggcccggatcttcgaggagaccctgaacatcctcatctacgagactccccggggcccagacccagccctcctggaggccacagggggagcagctggagctggtggggctggccgcggggaggatgaagagaaccgagagcaccgtgtccgcaggatccatgtccggcgccatatcacccacgacgagcgtcctcatggccaacaaattgtcttcaaggactgacctctgaccctccccctgccttcctcttgccttgggacccagtccctctctctttccctccccttcccagacttttgccccggctctgctggccaagtcgtgggtcctcctctgtcccttcattgcatggcacagctcactttggcccttctccacccgtcccaaccccattgctaacaacatggtacattccggccccaccactcagagccttccgaagccaacacttgtccccaccctggccctgcgtccttccctctccagctggttaagagggatttagaattccctttctctttttttagtgcatcgtccatgccaaagtgtgcggcccttcctgacatcaccacagtctgagcagcctcccgcgtcctgcagggtagtccgccccctcctccccaccatcctccctacctccttaactttgtactagactggcctgggcctgcccagctcagcgttatcagtctgtttcatattatttattattttaattttctattaaattattgaaataaagttaagttgagaaactggtgctggctcctggggagagggacggggagatgcctgtgttaggaggtatctggccgggcgtggtggctcacacgtgtaatcccaactactcaggaggttgaggcagaaggatcacttgagcccaggagttcaagaccagcctgggcaacaaagcaagaccctgactctac

SEQ ID NO: 665926 - DNA, 120 bp, Homo sapiens
actggtgttatcccaacacaacgaggcagtcagcatgactggcagtggctgaagatctcagttctgatctagataattaaaacattgattcaattaactttggttaccggggtgtggtta

SEQ ID NO: 665927 - DNA, 1296 bp, Homo sapiens
taacctcctgaggacagaactcttgtttgttcactgctatttttgcagtgcctagaacaatacctggtgcagtgcactcactcagtatttgtcaaatgaaaaaatataccaagaggctaggcagggaaggagatgaaggagagaaaacaaataattctgcctgcctgacttcagagctgagccttgaagtatgactttgctgagtaaaggagtggcagagaggccaggccaggcccaaggacctgactgcagggctaggaggtgtgttggtgcaggggccctaggcagggggatggccctgcgtgactgcaccagaaggaaggagctggggccggctggcaagcagaccaaggtggaatttccagaggcccggatcttcgaggagaccctgaacatcctcatctacgagactccccggggcccagacccagccctcctggaggccacagggggagcagctggagctggtggggctggccgcggggaggatgaagagaaccgagagcaccgtgtccgcaggatccatgtccggcgccatatcacccacgacgagcgtcctcatggccaacaaattgtcttcaaggactgacctctgaccctccccctgccttcctcttgccttgggacccagtccctctctctttccctccccttcccagacttttgccccggctctgctggccaagtcgtgggtcctcctctgtcccttcattgcatggcacagctcactttggcccttctccacccgtcccaaccccattgctaacaacatggtacattccggccccaccactcagagccttccgaagccaacacttgtccccaccctggccctgcgtccttccctctccagctggttaagagggatttagaattccctttctctttttttagtgcatcgtccatgccaaagtgtgcggcccttcctgacatcaccacagtctgagcagcctcccgcgtcctgcagggtagtccgccccctcctccccaccatcctccctacctccttaactttgtactagactggcctgggcctgcccagctcagcgttatcagtctgtttcatattatttattattttaattttctattaaattattgaaataaagttaagttgagaaactggtgctggctcctggggagagggacggggagatgcctgtgttaggaggtatctggccgggcgtggtggctcacacgtgtaatcccaactactcaggaggttgaggcagaaggatcacttgagcccaggagttcaagaccagcctgggcaacaaagcaagaccctgactctac

SEQ ID NO: 665928 - DNA, 560 bp, Homo sapiens
  misc_feature (167)..(167): n is a, c, g, or t
gtattgttagtatatctattctaatcattttatcttaaatgctgctcttgggagtgaatattcaagtgtgcatcaattttttgaatacttaccctggaagatataaactgggcaagtattttgtgctctgtgtatttttttactgcattagacattgaatagtaatntgcgttaagatacgcttaaaggctctttgtgaccatgtttccctttgtagcaataaatgttttttacgaaacctttctccctggattagcagtttaaatgaaacagagttcatcaatgaaatgagtatttaaaattaaaatttgccttaatgtatcagttcagctccccagtattttaagaaggttgagaaggcctggattaaagaaaaaaaaaattttccatccttttttttaaaaattaggcttaaattggtttttaaacccctttccaaaaaaaggggggttggaccggccctaattaaacttcttttaaggttggtccctttccccgggcctggggccaattttccagttctggctgaaaaaccttttgatccaaagttaaaaaaaaaa

SEQ ID NO: 665929 - DNA, 1885 bp, Homo sapiens
  misc_feature (94)..(94): n is a, c, g, or t
  misc_feature (118)..(118): n is a, c, g, or t
gcctttctaactccgttgcgccatggtcctgtgaaaaagcttgtggtgaaggggggtaaaaaaaagaagcaagttctgaagttcactcttgatngcacccaccctgtagaagatggantcatggatgctgccaattttgagcagtttttgcaagagaggatcaaaagtgaacggaaaagctgggaaccttggttggaggggtggtgaccatcgaaagggagcaaggagcaagatcaccgtgacatccgaggtgcctttctccaaaagggtattggaaatatctcagcaaaaaatattggaagaagaataatctaggtgactggttgcgcgtagtttgctaacagaaaagagagttacgaactcacgttacttccagattaaccaggacgaagaagaggaggaagacgaggattaaattcatttatctggaaaatttgtcatgagttcttgaataaaattgggaccaaaatgggggttaatcgtggtatctctgcagtgtcggttcggaccagaccatttggaatcatagtcaaagggctccctttggtccgcactcatttatttggacttgacctctttttccctggttaaaattcagtctccggggtataccacgctacaggacgggggctaccgactgaagccttggaccacatccgtcttgaatggcagagaacacggcctcaacagtcgccacgcaggtttatgggcccagaccaggcacggccactaaaaaacggcttatctcgagccaggtactcgctcggaacgaaaatcccttgttcgctgggtgctgtactgtcaactatgtcttcttatagtgacgcccaactacccacaccaactcgtgatcacactaactacacatctactaccgcataacgatcgatcgatcacagacgtgatcaatctacgactcaagacacctacagagacccagactaacgatcagtactgtagcacgtcgaagacagagagaacaacgaggaccaccgaagcacagagccagcgagacaaagaccggagagcgcacgcaagcacaaaacagaagcaggacggaacacggaagcgagagaaccagacgacacccaccaggagaagaacgacagagaagcagagaaccgaactgcagaccgagaccagacgacaacagacgcacaccgcacacacacaaccacacgaaaggcagagagccacgcagacagcccgaacgaaccaagatgcggacacacacagagaccacacaagcacacaccacacgcaacgagagaaacagaacggggagagaacacagcagggatgaacagccataaacactcgcgagccgcacgcgggacggagacgacagaagcgaagaccgagagaccacgagacgaccagcccaaaggagaagacacgaacgccgcgaagcgcacggcggacgcagcagccacaccgcgcacacaccgaggagacgagagactgcacgacgaggaggacaagcgaagaacacgagaagcgaccgcccgaccagagacaacgcagagcaggcaaacgacgaagagagcgcagagcgcacgcaggcacgaggacagaagaggcacagcgagacagacagaacgagacgcagcagaacagcagacaagaaggaaccaagcgcaagcccgagaagcgacgcgaagacagaccaagacgacacaggcacgaaacagacaccgagaacgcccaaccgacgacaccagaccgacatagaatcggacgacacacagcaacaagagccgaaagcagagaaacatcaccggcaacagagaccacggagcgagacgaaaagagcacgcgcagcaaagagacagaagagagcagacacgcacacgacgaaagaccgcaccaacgaacagtgcgaaga

SEQ ID NO: 665930 - DNA, 943 bp, Homo sapiens
gccgggcacggaatctgttgcaaacactattgctgtatctcaatgtcagtatctcagcttatctgcaacctgtcacttcttgggtttcaggcaattctccagcctcagcctcctgagtagctggggaatatgaggtgcaatcaccacaatgcctggctaatacatgtacttttcagtagaagtcagagggttcaccatataggccagattaggtctcgaactcctgacctcaagtgatcggccatgcctctagcctcccagaagtgctcgggattacatcgcgtgagccaccacatcccagcctccatctttaaactatgttaaatgtgaaatttctatcatgtaccgttagcctcacaagatatttctattccgatcatctcgacatggtgcctgtgtccccgtattaggagcagacgaaacgctactgctcgttacgttatggtgtcttagtgatgtgacacaaatgtccaagaagattaggagaaagaggaatatttatgatattcgttggatgcttttggttacccaagtagtgacacctaaacttaagcgtttagtaaggagatctgacattctttgcaccgtcccttccctttactcatcgccgaatactactcaaactgggacattattgtgcttattggatcttaaaagtgtaattgatattatactttggttttatctaaacaagtaaaatgtaatttgccgtcttgacaaaagactgacacaagagcaaataagctggaataatacgggtgttatgtgctttcctccatttttgagcatatgatccaaaatggtctgtataatataaatgagaatgatgcagcttaagtaagccttgtgtataccatgtgtgatggacccctgtcataaagccatttcttggtttgtttgggaaagaggcatatgggatttatacacattcgcttgtaaatgg

SEQ ID NO: 665931 - DNA, 218 bp, Homo sapiens
agctgggattacaggcacgcgccaccacacccggccaattttgtattcttagtagagatggggtttctccatgttggtcagggtgatcttgaactcctgaccttaggtgatccgcccgcctcggccccccacaatgctgggattacaggcgtgagccaccgcgcccggccatcctgccagcgttttcttctgtgcactttgggcgctcgtgccgggta

SEQ ID NO: 665932 - DNA, 869 bp, Homo sapiens
cacgatggctcacgcctgtaatcccagcactctgggatgccaaggcgggcagatcacctgaggttaagagtttgggaccagcctggccaacatggtgaaaccccgtctctaccaaaaaatacaaaatacaaaaatttagccaggcttggtggcattgcacctgtaatcccagttacccaggaggctgaggcagaagaactcacgtggaccctgggaggtcagaggcttgcagcgagccaagaatccaacctgtgggcgacagaagcaagaactcgtgatctcaaaacaaaaaaaaaaaaaatctcgggacattctcctttatagcgattatttggcccattctccagatagaagagagttctcctaaacagcgcatcaacaaggtgggaacaccgaggcaacagaacgtggccacaccgccgcggtttatcccccgagacagctgtgagggaaggcgccaaagggaaaaggggcgggacctcacagagaggcacacaagagagaagctgtggaacaccagcaccgtgggcgccccaaaatgagtggagtaaaaacaccgcgcggatcaatatacacaataaacacattcccagagcaaaaatcaacccgagagaccagagagaggggccgccaagcaaaaacaccggtaaatggaccccagagcagatatatcaaggcgaggaagcgacagaaaggcgaagggaaaaaacgtgcggcagtgaaaacccaagagggagcaggtaggaaagggagcgccaatggagaacgccaacaagcaacacgggcaccacccagggcgcgaccccaacgtcatgggggaaaccagcagtaagccaaagaaactcaccaatgacacacaaaaaaccaaa

SEQ ID NO: 665933 - DNA, 1206 bp, Homo sapiens
gatcgcaatggcattcctaatgcttaccgaacgaaaaatatctaggcatatataccactacgcacaggcaccacaacgtatgtaggcaccctacgggactactacacaaccttcgactgacgccactaaaacatcttcaccgaaagagccccataaaacccagacacatctacacatcagccctcatacatcacacgacaccgaccctttagactcatcacccatacgctcattcataactattgacaccacccccatccacacaataacaccaagccaccacatggatccatcaacccatcccaaacatcagcgcccatcacgctaatacctcatatccttacaacacaaacccataccataaacacattagtcccagaactatcacttccaaaatacaccacttacctgcacattacacagcggatctgacaagaccaactccacaacatcccttcagcacaagtcttaaccgacacgccatgacattaccgagaccgcatacactgggacgcaacggccaagaccaaggccgcacaaaccaccaccacgtacatcacctaacctggacaaggaacgaaagcaccattacagcccagcacatgcgcagctcagaccgtcaccatacacttactacaaaacaacagcattttaacaccataaaaacataaaagaatcgaggactataccctcatataaccaacccatactacttcaccaaacccacccattcaaactacaaccaacaaacaaacaccacaacagaactcacaacacactcccatccccttaccacattcaccacatcacaccatatcaccacaactcagaaaatagacaccaccaccaatcaaccacccacccaacacttcacacacttaacctgtccacaatataaaaacaataccgactcccccaacaagcaaaccagtataacacaccacgacaaacgaaaacacaccagaactgcacgacagaaagaaaggccacacagcacatatataacgaaaccaaacacaatgacacccagaaaacacgaagagaaacgatcacagcaaaagacaaccaagagatctaccaaaagaacacatagacacacgaaacatcgacaaaaaatacaaacgacccacaccaaacggcccaccccaatcgacatcacaccgcacaacatatcacacactacaaactaacgagccaccgcaaaca

SEQ ID NO: 665934 - DNA, 133 bp, Homo sapiens
taagacaccgtgttacatgaaagagaaccgactttaactttacttttcccctcaagcttggcctgctctcatgcaaacgcggatgcctcagaaagaagatgtctactggagtcactaacaacgcttttgatta

SEQ ID NO: 665935 - DNA, 1382 bp, Homo sapiens
ggagattccggtcctggtagctcctcaggtgctcgcgtgtcacattatggtggcaggttcatggagaatagcttgaggtgacgatgacagcagacacgacagtgggtctctgggatctgcactgtgactgttgtgggagagtcgccttccagaagccctgagtcacgcagccttcagaggcaccatagtggctacgtagaagcactagtactcgtgcctgagtgctctcagtagcttggtcccgttttatccccgagcaagcgaggaccttgtggaccttgtgagctgctgcgatctcgaattaaccagtggtgacacggtcaggcaccaggcctagccagtcccacttacggttgaggactcttgccttggaggtctcttggcgtgattggtttccgaatacactggaagactgcagagagctcctccagcgcttgggagacgtgcgttgggctgaaaagcctggtggtcttaacgtcccacgctgggtatcgtatcgcttgtaacacttatgtattccagaagaagtgcgtgttgccttgcacccccctggttgacatcaagcgagggctcccgtggttgctagcaatgcactgcgcaccgaacttgcggggaaggggttggggcccatcaggaattgttgggcacgttgttctatcgctgtgaaaaccgccggggttcgtattgatcccccttgtgggtggccttggtgttggccattttccgtcctaaacataactagcagtatactcccatttcggggttaatcacaccgtttctaaccaatcaagagttgtgcttgaacaagaacgaagggataccgatttagccaccgcgtcctttcaattgatcgatttgctgaaccgttagggacccggtggagtcatctcccattcctattcgtccctgggcgcctgtgttcgccacggtgcgggccatcggggatacagcgatagcgataaccaagggcacaagaaatggggtccgcgtttgctatgggttggcgtaggaggacgtttggagaccccgagaataagcgttcaaggaaaggaaggttgggatcccaagcaggagctccagtggcaggaactggggcggccattcgaaccggtggggccttttgtcaccccaaacttggtgaggccatcccctaggtatatttgttccacccggtctatcggcgttggtaacacacaaagagtgaccagaaagttccccttcagtctttgcccctcatttaccaccgttgacaacatcactgtacatgtgaatccttcaaggcgcttttcaagacaacctgtcgcgtgcggcaccttggctccggtgggtgtcccaccccactataggccagggggggcactcaacaagtgtttccacctagc

SEQ ID NO: 665936 - DNA, 179 bp, Homo sapiens
tgtttttaaaaaaaacagggcccataaccagtgggcaactttaggaaggatggggatctgtttccgatttaggcataacctgttaatcacaggtgtccaaacttttggcttccctgggccacatttgaaaaaaaattttcttgggccccataaaataccctttcgatagctgatgagct

SEQ ID NO: 665937 - DNA, 136 bp, Homo sapiens
tttttggagtctgatcttatttatttgttactcaaagaatcttatttctggctggactcagacttagaagtaggagctcgcagagaggaaagtgtgcgtctcttcacaatttgttcctggcgcttctcctcagcct

SEQ ID NO: 665938 - DNA, 233 bp, Homo sapiens
aattttcctgcctcagcctcccgagtagctgggagtacaggcacacaccaccacacccagctaatttttgtatttttagtagagatagggtttcaccatgtctcccaggctggtctcaaactcctaacctcaagtgattcgcctgcctcggcctccaaagtgctgggattgacaaggtgggagccactaccagctggcccagcagctctgtttctgataaaaggtggttgggg

SEQ ID NO: 665939 - DNA, 959 bp, Homo sapiens
tacagcggcgtgatcacggctcactgcagccccaacctcctgcgcttgggtgatcctctcacctcagcatcctgggtggctgggactgcaggcatgcgcaccacatcttgctatttttttttttttttttgggtatttttaattaagaaagacgagagggtctcacccggttgttccccagggctgggtctcggagcctccttggggcttaggtgtagactcccacctgtgtttgggcgcctcccaaggtggctggggttttatagggcgctttggcccacttttgtggtcacgaccctagttttattttttcgtggtggaggacaaaaggggcctcactttttgttcgcccatgtgttgggtccttaaacctcgtgtgtccttaaggtgactcctctccactttggcccctgcaaagtgtgagtggcgttggcgggcctaggttcaccagtgctgggccctatatttttggcttaacaccggttttaggcacactcagcctcgtgtatatcaagttaccttgagggggccccgggtgcctagacccccattgaaaagactccaggtttgccacattgacgctttggcccaggatatgcgggtcccgggcactgggggtgggacctctttctaccaagacggggtcgccttcgggcttggtaggactagccgcgccgggcggacacaatcagcttcgggcgggcgccggcaaagagttccttccgttaatcccccacagaggggggccctatccggtggttcttcccacccttcactaagcgtcccagggttgggacacttggtctggccccaacgcggggtctctctgttcccgatattttggacgccgctcgaggtttccgggtgtgtgcccgggcccaccccccgttggggggccggccggatgtggacgccggcctgctgtcactcacctcggccgcgtggccctctttctagcg

SEQ ID NO: 665940 - DNA, 175 bp, Homo sapiens
ccccttttttttttttatttcccccccgcgcccgcacccaaaagaagaggggagaggattttgtgttgccccctctttaacaaatttttgttaaatgcacgctagtgcgctccctcccaccctgtgtttttcccttgttgttgggttggcaaaataattttttttgtgcccccca

SEQ ID NO: 665941 - DNA, 137 bp, Homo sapiens
aacacagaggaggaaagcaagacgctgagcctggtgtcgcgggatgccaagcccctggaggtgtacagcgtggacttcatggtggacaatgcccagctgggttttctggtgtctgaccgcgaccgcaacctcctctg

SEQ ID NO: 665942 - DNA, 549 bp, Homo sapiens
tcacatgatgtaggaggtgggatttcagctggatcttaaatgttgggtttggagtggcagagttctaggagacagaaaatgagttgtgggtaagaacagacaggaggggtgaggacagtaataaagaacaggggtggtctggagctaaaggtctttgtacttgagacactgaaggagccaaaaaataattaatatactgttagcaacttattatagtcctcttagatgctaaattatgatgtagacattttgaaaaatggtctcggccaggcgcagtggctcatgcctctaatcccagcactttgggaggctgagatgggcagatcacctgaggtcgggagttcaagaccaacctgaccaacatggagaaaccccgtctttactaaaaatacagaattagccaggtgtggtggcgcatgcctctaatcccagctactcaggaggctgaggcaggagaatctctcgaacccgggaggcagaggttgcagtgagccaagatcacatcgttgcactccagcctggacaataagagtgaaactctgtctcaaa

SEQ ID NO: 665943 - DNA, 459 bp, Homo sapiens
  misc_feature (41)..(41): n is a, c, g, or t
  misc_feature (66)..(66): n is a, c, g, or t
  misc_feature (97)..(97): n is a, c, g, or t
  misc_feature (182)..(182): n is a, c, g, or t
  misc_feature (197)..(197): n is a, c, g, or t
  misc_feature (333)..(333): n is a, c, g, or t
  misc_feature (392)..(392): n is a, c, g, or t
  misc_feature (441)..(441): n is a, c, g, or t
ttaaaagtttgtttaatgggaaaaaaatttattttagagtngggagggatgtagaaggtggagtangaaggggagggagaggaaagagggtgatggnaagaggataaatatgattttttattggtttgtggggttttgggaaagagttttggctttaaattgggttatttttttaaagggtntttatttggtaaatnagggaaggaattagcataaggaaaaggttggatatttttttagtgttatgaagtattgatatggtagttaaaaagctgagggatgtttttaaataaagtgttttatattaggaactctgggctacaatatagtttnagggaaaagttccaatctgagcctctttgcacctgcaataagcaaataccttttctttnctgaggatcatttgcttaaagcactgaagagtgagctgctagctgcagnagtggtggtaaagaatga

SEQ ID NO: 665944 - DNA, 361 bp, Homo sapiens
cgggtgtaattataagggtctggcgagctctaccacgggtgtatagtgggcctccaaggaacacagagctctgtaagtacaacgtaacgcagtgttattcgcaggacacgagttggatcctctagtacggtgctcactcaccgtgccagttgtgctgcaccgactatagccacctcagaaagtagatctccgcctgatggagagtgtgctcttgtcacccacacggcgtccgttacaattatcaccagagaaacaaaatgtaggagacgtgagaccataagtctgggctaaaagatctgaaatctctccacatataatatgcatctcttttcaaaatgtgcagtgagtctatacattttct

SEQ ID NO: 665945 - DNA, 859 bp, Homo sapiens
gggacagagtgcggctgctgagagccgagccagctatcccgatcctctgagtcgtgaagaagggaggcagcaagggggttggggttggggcctgaggctaagcccccaggctccgtcttgccacagggacaggagccatggctcagaagatatgggactgtggtgcagaggctctcctcggcattccaggtctgtaggcctccgctagaagacacgtcgccttgtcttatgcaccgacctgtgatggagagccatccagatctcgagaggactccacctactaaaccagggccaccggaggctgctagtccccagatgttcagcagcccccgcaagctgccaatgatagtgtggctgacagttcaggtttcacgacaggtgaccgctaatggcctaaggtcatggcttataaagtccagaatgccaccacaaaaggcccaaatggtgtctatgatttctctcaggctcataatgccaaggatgtgcccaacacgcagcccagaggcagcctttacgtgccacatatgtaccccaaagggtccacatgctgactatgatttttcccaggcagcaaccaactggtgacgttagctgctaacaagtctgagatggcttcaagggcccaggaatgccactacttaaagtggggcccaaatgccaagcctacaagttcctctccagtctctcaatgccaatgactcttgcgcccaaagcaggggctttagacccctttccacaggcctcggaatgataccaatagggcaccaacaaggcttataacccagaacccagaatgtaacatcaagccaacatgggcctttccaggttggcttaaagcggacccagttcttctgactga

SEQ ID NO: 665946 - DNA, 210 bp, Homo sapiens
aaagtgaaaagaggacatcaggacaggcttgcaggttcaccccgggaagtccatccacttttagctgagtgttgaatcttttaaataggtaccagaggtcttccaaaaactcatagatgtaggtcatgatgtcctctttttgtgcctgtgactcagaaacaggtttaatcatggacaggtatacccaactggttctccccggaagttcca

SEQ ID NO: 665947 - DNA, 252 bp, Homo sapiens
ttgggccagccaggcaaccttctaggtaacgacacacctacaacgttatcgtcacagcccatgcatttaattatagtaatacccatcataatctggaggctttggcaactgactacgttccccgtaataatacggtgcccccgactattggcgttcccccgcattaaacaacataaagctttctgactcattacctccactctctctctactcctgtctcgcaatctggatataagtgggagggccgggagc

SEQ ID NO: 665948 - DNA, 1380 bp, Homo sapiens
ggtattgtagagcgcagcggctgacgggcctggatcgccttcgccggcgtcccggcccgcaaaccattcggtgcccggtgccgttacttcgtccggtgacctaaccgcgtacgacgtagtgctggagctgaatgagagtgagcaacggatccggcatccagggagacgagataccaagtgacaaacagacttctagcaagggaacgccgtgtcggcatggaccttgaggacacgtgatgcatcggcgcggcgggacgcgcattaggcgatagtaaacgcgagcacatggtgaccagacaacgcatccgatccgtcatcgaaggacactacacagatcacacaggcccgcaacaacttgctgaagccacttcattctcctatacgtagacgaacaaagccagacaatacccaaccctaacgagcgaccacagccacagccggccctagggaacgctacacaggacccaacgaaggacccccacgggagacaccgacgccaacagcagaaagcacccacagcgtgaaaagacgcgctaagaacgacaaccaagaagcacacaaagagcgctaacacaacacccaaaaacaacaaggccaaacaccaagaggaacacccagaacaggacaacacgcgaacaccgcaacacgacaaacgatccccgaaagacgacaagacaaaaacgcaccaggtacccaaccacacataaaagacgcacagaacagagacatgacacaacggaagtgacaacaaaaggcacagcagaagcgcgaaaccccagaacagggaaacccgcaccagaacacaccctgacagacacacaccaaaaacacacgccaagcacaaaaccaggaaacacaggaccccaccaaacaaaatctgcaacaccaaaggaaagagaacccaagaaaaaggcacagaaaagaggcatacccacaaatatgagacaaggccagacgaaagcaatgataccacgaacccaactgacgcacaaaaggaacccggacatcacatcgaacaagaaacccgacagccgaccaacagaaatagacacaacacaaaagagatgcaacaaccacgcaaggagaaacccttagagacacaccataagacaacagagaccggacaaccacacaaaccacacgacacaacacccatcaaaccaacactgcaacacacagtacgacccaaaacacagcggaaagacacaacaacacacaaacacgaaccaacaacatgggaacacaacaagaaacaacaccagaccaacaaacacaaccacatgcaaagaccagccaccacactacactacgacaccgacacgatacacccacacacacaccaaaacacacacgaaaacacagacaacacaacgcaacccc

SEQ ID NO: 665949 - DNA, 461 bp, Homo sapiens
  misc_feature (100)..(100): n is a, c, g, or t
  misc_feature (102)..(103): n is a, c, g, or t
  misc_feature (136)..(136): n is a, c, g, or t
gttaaaaaaaaaaaaaaaaaaaaaggtaactatgctcattattttcaaccaagttctatggaggtggtaccttcacaggagtccccaaaggggtttggtngnnaacaacttggggcgggtttttttaaacccttcntttaaaacacattcttttttctgggaacctaatgttagcagacacagttgctagtttgaacaggaatgcagatgaatggatgaaagtgggctccctaccacccagaaatatgaatgtgcctccttaccaatatgctacaaatcagacctctgaattagaagatgccatcatgcaactaacttactatctggagatgtgtattttgttaacctaggcaaagaataacaatttctgcttattccagtaggtgtgacaagctcagagaagtgagcgacaagctagagaagtaataattaccaataaagtaaattccaaagccgaaaaa

SEQ ID NO: 665950 - DNA, 106 bp, Homo sapiens
taacaaagcgatggtgtactatgggaatggcaacagttgctgaggcctgagtctgcagtctagcaacaatgtccttccgagctttcatgacagcatccagctttcc

SEQ ID NO: 665951 - DNA, 725 bp, Homo sapiens
ctattcctccccccacgtggttcaaggacgtcgcccccccccccttgctgcctcccaccccccgttcctttttgggtaaccccccccgcggccgttgtttctggctccccccacagggtgggtgccccccccccttcggctgtgtaatcactttgggcgaggcacacccaatcttggcggctccccccccccccccctattgtaggcgcgtgctctactcaggccaaggcgcgcgcccccatcccttgatgcgccgccctaacctctaccttgctgggcgccaacacataatcttagcggacccgcagcggggcttccagcaccaccagcccccgggaaactcgccagtaggttgggttccacaacagcgcgcgcgcgcccaagccctcacacaacataggagagaatatatatacggaggacaacagactatctgcgggaagaaggactcaggtcgccccgagagaacttgccgcggtgtaccaccccactccctggggcggtgagccccaccccctctgcgaccccccgagcgcttggcatcgacacgagatgcacccacacactcatcgtcattgtcgggcagaacgcaggagccacacccgtgcggccggcaagcgagggacggatgccaccctggcctcaccccacgaagaaatctagcagccagcagagcctccccaaaaaaaaccaaaacatgtgtatttctcgcgacatcaaaacac

SEQ ID NO: 665952 - DNA, 342 bp, Homo sapiens
ttttttcccccccccgggggaccgggggcttgggttttttttgtgccttccactggggccgggccccggggcccttcttgggttggggccggggtttttttaaggccccagggcccccacccccccctccgggggggttcgttggggccttgaaattatttatggggggggcccttccccttggcccccaaacccccccccttttttggcccccaaagtttgttttttgaccctctgggggggctttaaggggggggttttgtttgggtttttttttttttttttttccgttttttttgacttttttttttttaaaccatttatcccttttttcccggggta

SEQ ID NO: 665953 - DNA, 250 bp, Homo sapiens
ggaaaggattggatattgtacttaaatgtgcatgatgaagacagggatgatcaaacaagatgtaatgttttgatcttagatggagacctatatcacaaaggccttcttaaaaattcacttgatgccgtatctcttaaggatactctagttatgccttggttgttgacaatgtcaaagaccttggacttcttttgattctttaacaggaaattggcaagtgtttgttagtgaacaatgttgacaaacgtta

SEQ ID NO: 665954 - DNA, 123 bp, Homo sapiens
tatgcccaaagagacagaaactatatgaatcaacttacataagctcatctaacaacagtgctgattctgaaatagaaagcaattgtatgggcaaagcgcgcagaaaacagaaatacatgggtt

SEQ ID NO: 665955 - DNA, 305 bp, Homo sapiens
ggggggaaaaacatcccccccaaaaaagaagttttggcccccgaccggggggagaggaagaaaaaccccccgttttttttaacccccctttgggccccaaaaaataattttgggggggggggccacaaaaaaaattgttttttaaaaaatttttccgaaattaaaaggggggaaaaaaaaaagggttggcccccggggaatcgggtttttccctcccaaattgggaaaaggcccccctttttttggggataaaattcaaagttttggaaaaaaatttttggttcccaactgatccatggtgccta

SEQ ID NO: 665956 - DNA, 94 bp, Homo sapiens
  misc_feature (93)..(93): n is a, c, g, or t
ttagtttttaaatctctttactgtttaagacatttttagtggaagtatttatctttggcatccaataagacctttaaggatttgcagttttcna

SEQ ID NO: 665957 - DNA, 1129 bp, Homo sapiens
  misc_feature (504)..(504): n is a, c, g, or t
aggccaaaaatagatgaggctgttgttcaagtagcgcaaaaaaaggttttaaaacaaattttgtgggtttctcctttgagagccgggtatgtgggtgtaaagtgttttttgaagaagttgtttaaaaaaacccggtcgtctttaggggaatgccaccccaacgagcgccctgttcccctcctcttggggggacccccacagtttgagcacaatctgtctccgacgccaccctggggatttcagcgggagggcacccccccttccaaatgggaagaataatcccttcggacacgtgggaatatatgagatcacaggcctttgggaatgaattgttagtgacggttaaggtgatatcccttatagaggggataccataatgggagtattttcaaacgcgggtttacaccgtttgcccccatgtagaaagaagtataattggaaccccttgcctggaaaattttatgcaccagggagtacacatccggaactcgctacccctccctngtcccgccccgtgtagaagggaaatccccaggcaccatgtttagagaattccgcaagatgtattggaattcccctccttcttataaaattgggaaagcccctcttccaaaccttccccttgtattcccctttaacccgccccgtgtatcccgaagatttaaagattgttgctccaatcttgccccgcccattaaccctggagagaagttagcccccgctggagatgtttaatgatagcagcttctcctcgggcccccgaagggagaatccaagggagaaaaaataaagactcgggagaataattaaaaaccactgtctgaaaaaacacgctccacgaccacacggaaccgagagcgaaaggaaaaagaaatattccaaagcgtattgaaaaataaaaagagaaaggagaaaccggaggaaaactggcttgaaaagagccacgtgtagatcaagcagggaaatacagccaaaccgtagcttcggagaagtttaaacagctgacccaaactggccaagcttcccttcataaaggatgaaggtaaagaccaggccctttaagtcctcttcaagcatttttttttaaattaccagatcacagttaaaaagccaatccatgatgccaaga

SEQ ID NO: 665958 - DNA, 129 bp, Homo sapiens
agtgtattgtcaggctcggcttggtgaaaagatttgcactcgttcatcatcttctccaacgagttcagattgggtaaaattctattatttactaaggtgtatactgtagtgtttgtcacaagagaatct

SEQ ID NO: 665959 - DNA, 256 bp, Homo sapiens
gcggcacacctccgcttctggggttcaagcaattctcctgcctcagcctcctgagtagctgggactataggtgcatgccaccatgcccagctaatttttgtatttttagtagagacggggtttcaccatgttggccaggatggtctcgatctcctgacctcatgatccacccacctcggcctcccaaagtgctgggattccaggcgtgagacttgcgcccggccagccctgttgtctttcaaagaacctcggccca

SEQ ID NO: 665960 - DNA, 114 bp, Homo sapiens
tgtgcggccttaggggtagtgcgggaaggcacaccagaggatagaagattctcctctggcctcttggtcagcaccctccccccagactaaaagatgtttcggggaactccaggg

SEQ ID NO: 665961 - DNA, 967 bp, Homo sapiens
tgtgccctgctaatatttgtatttttggtagagacgaggtttcgccatgttggccaggctggtcttgaactcctgacctcaggtgatccacctgcctcggcctcccaaagtgctgagattaaaggcatgagccaccatgcctggcctcattgtagtttcgatttgcatttctctgatgatcagtgaagttaagcatctttttatatgcctgttgagatttaaatgtcttattttataaaatgtctgttctgggctgggtgtggtggctcacgcatgtaatcccagcacttggagaggctgaagtgggtgtatcatctgaggtcaggtgttcgagaccagcctggacaatatggtgaaaccccatctctgctaaaaatacaaaaattggctgggcatggtggtgggcgcctgtaatcccagctactcaggaggctgaggcatgagaattgcttgaacccaggaggcggaggttgcagtgagctgagatcgcatcactgcactccagcccgggtgatagattgagactctctctcagaaaaaacaaaacaaaacgttgtttttgggacgggcgcggttggctcacgccctgtaatcccagcactttgggaggcaaggcgggccgatcccctggagtcaagagtccgagacagccaggttaaccactgggaaagcctgtctctataccaatccaaaaattaggccggctctgtatgtccacagcccgcactgttccgattctgcgcctaatacattactcgatggctacgctttcatgttgttgactaaagcagtaacgctaaaagcacggacgccctcaggatcggcgggagggcacacacatcaaccggggaaccccacagagcatttaacagcctgccacagacccagaacacgagagatagcccagagatgcccgcatcagaatggccttactccctcataatatggcgtagctcaaagtgtactt

SEQ ID NO: 665962 - DNA, 164 bp, Homo sapiens
ggtgtgcgatctctcagttttcctttctgttgggcactttaaactttgttgatctttgtaaattttctcatggcatgcctcttgtggagaagtatttggaaagacataccgtgtctgaatttctctggactctcccattatttctactgttcagaccgcgggct

SEQ ID NO: 665963 - DNA, 607 bp, Homo sapiens
  misc_feature (111)..(111): n is a, c, g, or t
  misc_feature (123)..(123): n is a, c, g, or t
  misc_feature (127)..(127): n is a, c, g, or t
  misc_feature (187)..(187): n is a, c, g, or t
  misc_feature (193)..(193): n is a, c, g, or t
  misc_feature (203)..(203): n is a, c, g, or t
  misc_feature (288)..(288): n is a, c, g, or t
  misc_feature (295)..(295): n is a, c, g, or t
tacttttcacaggggtgttgccccaatgtggctctatgtaccacagtacctgggcttggggtactgcatgttcccccgctagccagccccacccatcataaacactacagnccagccaggggncggntgtgctgtgggtcttacagcatcctttttcaaagcttgccatgttgcctcacagacatcngccatnggaccccagntctccagccatgtccagttctctgcagatactgaatgtatgtgccaaggcaagccatctgcagctgctgttggaagggcagtgcngatccancagatggaaacttggtcacctcagcgtaggtgtgggcccagtccaaatgcagttagagcatgttaacctacagttgaaatgacagagcaggtacaggtactaacagaggtaaatcatatccctcaggcaaaatacaggctaatctttcatccctggataacaatgcagccaccaagggcttttgctctgggtgatggtaccacacctcaactccccatggttcctttgagtcctgtatctgtgccaaagtcacaggagagctcataataggccaaacagacagtgcacatgtcccccagaggagagttcctt

SEQ ID NO: 665964 - DNA, 266 bp, Homo sapiens
  misc_feature (1)..(1): n is a, c, g, or t
  misc_feature (165)..(165): n is a, c, g, or t
  misc_feature (214)..(214): n is a, c, g, or t
  misc_feature (249)..(249): n is a, c, g, or t
  misc_feature (253)..(253): n is a, c, g, or t
ntactctgatgcatatagttgtcttctgacttgcttcttttctacctcacccttttttccttccatatctttggtccatctttaatcatataactcttttcttaatttatgctcttgttcttctgacctcattgtttctgggtttccttattgtgaagctgattngccctgtgtttacttaagttactctgaaatgttgccaaatccatgcagngctctttttatttagtgtccatcacttgttttctncctngttccatatgata

SEQ ID NO: 665965 - DNA, 209 bp, Homo sapiens
  misc_feature (193)..(193): n is a, c, g, or t
cttcggcacgagcattctataaagcttgggcctttatttttatatacattcagttaaaaggcacactacagtcatcactaggcactctgctttctaggcagttgtattgaaacagagaatctctgtgtggacttggatatgacccaagctgagtattatctaaacaggtggtggatgaatgcgcatgtacctnattatgctgacatact

SEQ ID NO: 665966 - DNA, 524 bp, Homo sapiens
atcgcagcttgatagccattctctccgtacgagccccttaagttacacgccatgtaccagcccttccttgagatgatacacgaggctcagcatgccatggacatccacttccacagcccggacttccagcacccgacaacagaattcatacgagaaggcgacgatgaccggactgtgtgccgggagatacgccacaactccacgggctgcctgcggatgaagtaccagtgtgacaagtgccgggagactcttgtatgtggactgttccaccaacaagccctcccaggctaagctgcgacgggagctcgccgaatccctccaggtcgctgaagaggttgaacaggaaatacaacgagatggtaaagtactaccagtggaagatagctcaaacactcctcctatgatggagcagctgaacgagcagtttaactgggtgtccccggcttgcaaacctcacgcaaggcgaagaccagaacatctgagggtaccaacgggggtaccacacttctgactcgcacgtcctt

SEQ ID NO: 665967 - DNA, 486 bp, Homo sapiens
  misc_feature (27)..(27): n is a, c, g, or t
  misc_feature (65)..(65): n is a, c, g, or t
  misc_feature (67)..(67): n is a, c, g, or t
  misc_feature (74)..(77): n is a, c, g, or t
  misc_feature (79)..(79): n is a, c, g, or t
  misc_feature (81)..(81): n is a, c, g, or t
  misc_feature (146)..(146): n is a, c, g, or t
  misc_feature (168)..(168): n is a, c, g, or t
  misc_feature (173)..(173): n is a, c, g, or t
  misc_feature (196)..(196): n is a, c, g, or t
  misc_feature (204)..(204): n is a, c, g, or t
  misc_feature (212)..(213): n is a, c, g, or t
  misc_feature (216)..(217): n is a, c, g, or t
  misc_feature (222)..(224): n is a, c, g, or t
  misc_feature (235)..(235): n is a, c, g, or t
  misc_feature (249)..(249): n is a, c, g, or t
  misc_feature (265)..(265): n is a, c, g, or t
  misc_feature (267)..(267): n is a, c, g, or t
  misc_feature (269)..(269): n is a, c, g, or t
  misc_feature (272)..(272): n is a, c, g, or t
  misc_feature (285)..(285): n is a, c, g, or t
  misc_feature (293)..(293): n is a, c, g, or t
  misc_feature (302)..(302): n is a, c, g, or t
  misc_feature (325)..(325): n is a, c, g, or t
  misc_feature (332)..(335): n is a, c, g, or t
  misc_feature (351)..(351): n is a, c, g, or t
  misc_feature (361)..(361): n is a, c, g, or t
  misc_feature (367)..(367): n is a, c, g, or t
  misc_feature (372)..(372): n is a, c, g, or t
  misc_feature (381)..(381): n is a, c, g, or t
  misc_feature (386)..(387): n is a, c, g, or t
  misc_feature (389)..(389): n is a, c, g, or t
  misc_feature (395)..(395): n is a, c, g, or t
  misc_feature (397)..(397): n is a, c, g, or t
  misc_feature (403)..(404): n is a, c, g, or t
  misc_feature (409)..(411): n is a, c, g, or t
  misc_feature (415)..(415): n is a, c, g, or t
  misc_feature (420)..(420): n is a, c, g, or t
  misc_feature (483)..(483): n is a, c, g, or t
gaagcaagacaaaaataaaatagatanttcattaaatagaaaccacaaagaaaaactacaagtanantaggtannnntngngagtccagagttgctctcaaagaagtatgtaaccaaataaaactttgttctggtagaaagttacncaaatatatatacctcattttngagcntattcttaccaaacacatttgantaccagtncagcgggnnttnnacttnnngtatcactgangccccttaaaattnttcaaatactttctanananacnaacactgcctganttattttncttcctgantctcactcccactcccccgcctntttcctnnnngggggggggggggggngagggggagnctcgcnctggngggcagggnggggnngngggggntnatcttnnttcannntaanttctncccccttttttcactccattccccatccccatcccccctctaatcttttacaacataatcccncca

SEQ ID NO: 665968 - DNA, 218 bp, Homo sapiens
ggatccccgtggtcctatttgcaagggagggcaaatgatttggtgaatgtacctttgggctaaagatcagacgaaaattcccatataagcggtcggaggtgctgatgtacatcatcaaagaatggctgatgtgtaccccggagatcattgaacagatgcaggctatgctttggagaaggtagtggggattcagttgaaggaagttgatgcccggggaa

SEQ ID NO: 665969 - DNA, 241 bp, Homo sapiens
gcctagaggacccgtcatttctacacatgataatataatacgtatatggttgaagttattttattttttactaatgaattattttaatattccttattgaataaatgctgtaacttgttttgctactggcaacttattctataaacgttctacgttaaaacataactttttccacagtgcagtgacacaatatgtattaactcagagtgtgtagaacattgaagcgggtaccgagtctcga

SEQ ID NO: 665970 - DNA, 884 bp, Homo sapiens
  misc_feature (683)..(683): n is a, c, g, or t
  misc_feature (749)..(749): n is a, c, g, or t
  misc_feature (816)..(816): n is a, c, g, or t
  misc_feature (838)..(838): n is a, c, g, or t
  misc_feature (874)..(874): n is a, c, g, or t
tcgtaaacaagctctgctcatgcagtcttcttagaccaacacactctccatataacacccctatcctccctgttaaaaagtctgatggctcataccgactcgttcacaacctccaagccatcagtcaagctgtcctccctattcatcccatagtccataacccctatccacttctctctctcgtcgctaccaacaccaccctctacactgcaattgacctgaaggatgccttctttaccatttccctacaccctgattcccaaaacctatttgctttcacctggactgaccctgacaccctccagtcacaacaactcacatggactgtcctccctcagggcttcagggatagccctcatttctttggacaagctctagcccgaaacctcacttccttaaacctgtctcccagtcatcttcaatatgtggacgaccttcttctttgcagcccctctctaaaagactctcaaactcacacggccactgctctcttaaactttctcgctatcaaagggtatagggtctccccctccaaggcccaactctccatctccatgatgacttacttaggaattcaactttcccctggggcccaggctatgactccagccagggcagcattaatagaaaatctacccccacccttcttcaaaagcgaaatcctttccttccagggctagcangcttctttagaatatggatttccaactttgcccttctagctcatcccctctatgaagtgggcaaangcccttccaatgaacccctaaaccccttacataacatacttcccagctttcacaaacttccaactgntcttggcactgggtaagttcgnccttactggaatttccaacctttactcttatactgntgaagctgag

SEQ ID NO: 665971 - DNA, 147 bp, Homo sapiens
accgcaggcagttgcacccaccacatccatcatctgcacagcatgcatatgcttttcccctgcttgcccagctgatctgcacacatgttttcgctggccccattcaatccatcagcatccaagcaaagcattgcatgtgcacttcag

SEQ ID NO: 665972 - DNA, 1052 bp, Homo sapiens
  misc_feature (1052)..(1052): n is a, c, g, or t
gcctctgcgtccaattgctccggtagcgaggctcgtgagtgtgtggcggccagtgacgaaccggctccgagggcccgataacgtgacggcccgcacatgccagaccgggctagtcgtgagggtctcgcttgatttgagaatggctagctgtcgaatatgaatcagtggctgaaataggtgtcgtgtgcctatgggacaggtgtacgacgggcccgtgatcccacacacgtgggcacacatttgtgggcctcaagatgtgtgagacgtccaccgactggagagaaggacggctggacggagcgccatgcaccaattgttctaccagtgcagtgaagagttgggttatactgaaggcgattgtaggtatttctgacgtcagtcccaagtggtaagtgcgagtctgagtggagcagtctggagcgcagcatcctcgaacctgaacgggagatcagaggtgacccaggggggttcgagcatgtagaccagggacctaaggacgatatcgtggatcagggggacccccagacagggcttgccagccgagaccggatccagaggactgtgagtgcggcctacgtttctaagaggccatagatatccgttgaatgccgatgtgcatcggttcaccgagatctgaagccagagaacattctggtgacacgtggtggaacagtcaagctgggtgactttggctggcagaatctacaggtaccagatgggcacttacatccgtggttgttgcactctggtaccgagctcccgaagttcttctgcagtcagcatatgcagcacctgtggacctgtggagtgtgggtgtatttgcgagaggttcggcgacaggccctctttggggacctgagcaccgtggacaacttgcctatgggggctccaagctagtgggcgagagttccggccgggggctttcccagaggcctcggggttcacgggagcgcccgggtgaacgtttccccagagtctcgctcgcactcgggaccgcgaggcggcacatctccggcgcttgtggtcctcctctgctcgcgtcttctcctttn

SEQ ID NO: 665973 - DNA, 441 bp, Homo sapiens
catcccagcagacacagacttcaccagcaaagacgatttatttacttcaagagttaagagtggcagtttggggatagcaccaggagatatcagctgtgatggcttggaaaaacagtgtaaaccggcagtgtaaacaagagcagggcatgtatgagtagttgagaatggtgaataggagtatgaccagacagaaaaatagtagggatgacaatttttttttttttctttgaaggccacagtctaagtgggtctggtgtctggcaatgagacactggggcctcaataaaacggagcgtctatacaggcagcttaaatgggctgtcaccctgtagcattctgaggataggcctgaattctgagaagggaaagtggtaaaagtattgtccagtcctttttaagttggtggctgagcttggtgaggtgtgtttttaaaagcacctt

SEQ ID NO: 665974 - DNA, 756 bp, Homo sapiens
  misc_feature (197)..(197): n is a, c, g, or t
  misc_feature (319)..(319): n is a, c, g, or t
  misc_feature (333)..(333): n is a, c, g, or t
  misc_feature (646)..(646): n is a, c, g, or t
  misc_feature (662)..(662): n is a, c, g, or t
  misc_feature (687)..(687): n is a, c, g, or t
  misc_feature (716)..(716): n is a, c, g, or t
  misc_feature (749)..(749): n is a, c, g, or t
  misc_feature (753)..(753): n is a, c, g, or t
gagacgtgcatgctggatgcggtggctcatgcctgtaatctcagcactttgggaggccagggtgggaggatcgcttgaactcaggagtttgagaccagcctgggcaacatggtgaaaacctgtctctataaaaaattaaaaaataataataataactggtgtggtgttgtgcacctagagttccaactgctggggangctgagatgagaggataccttgagctggggactggggaggcttgggttacggtgggctgggattgtgccactgcactccagcttggacaaaagagcctgatcctgtctcaaaaaaaaagaangatacccagggcangttaagttcggagaggcacagagctcccatgccctctgttgaacatgcgaccctcccagcatctcctgtgtccagcaaccctgaaagctctgcaaacccctttcagggtgtttatggaggctttattatgcaagcatgattgataaaacctttggctgttggtgattaagtcagtctccagcccctcttccccctggagttcagtgcatgaggctgaaagttccaagcctcttaccatgtggttgcatggtaatcagccctcctcttgaagaaatttaggagcttgcagtcacccagtcatctcaacaacatncccaaatgcattcttnccatgctggagatccaaagtcttanagctcttgtgttaaaaacctgggaccaanaccaattttaaacaaaaatgctcctgtcacatntttnatt

SEQ ID NO: 665975 - DNA, 357 bp, Homo sapiens
ctacggcccgggccgtcggcattgtcgaaggctccctcccctcccctccctggcatgagaatgaatccgtcgaacctaggacgaggaggatgcagggatgctacaccacaccattgcactctagcctgggcagcaagagcaaaactccgtctccaaaataaatacatacatacatagatgcatacatacatacagggagtaaaaaaggatactactgacacctgagcagacagattgatccaagaagcgaaagataaattccagaagatgacctgaacacagagacacacacaaacacacacacacacacacagacagacacaaaggcgtgaaagactccatgaccctaaaggaata

SEQ ID NO: 665976 - DNA, 435 bp, Homo sapiens
ctgcaacagtgtgatgtcacagcatgttacactcttgcgactggttgggtgtgagcacctgcagtcgtgtgatgtcagaggatgttacacgtcgtgctgactggttggggtgagtacctgcagtagtgtgatgtcagaggatgttacactcttgctgactggttgggacatgagcacctgcagtagtgtgatgtcagaggatgttacgctcttgctggctggttggggtgtgagcacctgcagtggtgtgatgtcagaggatgttactctcctgctgacgggttgggatgtgagcacctgcagtagtgtgatgtcagaggatgttacgctcttgctgactggttggggtgtgagcacctgcagtagtgtgatgtcagaggatgttactctcttgctggctggttggggtgtgagcacctgcagtggtgtgatgtc

SEQ ID NO: 665977 - DNA, 139 bp, Homo sapiens
accccctccttgccccaggcttgagtgaatcacagccctattcaggcaggagctgatctactggggtattagcgatccacttaaaggatgaggcagacttggtgaaaagattggtctgagcagtgcttccagagccaaa

SEQ ID NO: 665978 - DNA, 287 bp, Homo sapiens
  misc_feature (95)..(95): n is a, c, g, or t
gggccatcagggctcactgtaacctccgactccctgggttcaagtgaccctcccacctcagcctctcaagtagctgggactacaggtgcaccacnacacctggctaatttttgtattttttgtaaagaggggggtctcactgtgttgcccaggctggtctcgaactcctgggctcaagcggtccacctgcctccgcctcccaaagtgctgggattgcaggcatgagccactgcacccagccctgtattcttattcttcagatatttatttttcttttcactgtttta

SEQ ID NO: 665979 - DNA, 85 bp, Homo sapiens
gctggtcagcggctgcatctcgagtgcgcggtgggcactggaacggtcgatcggtccatcatggtgcggcgggcgagcgggcagg

SEQ ID NO: 665980 - DNA, 187 bp, Homo sapiens
tatacgttatatagaacagacagcatggatggaaatggtagctttaaggttgtaaatagatttctaaaacaaagaaactaaaattacagtgttctggaagtctgtaagttgatgttttgaaaattaagaatctgtttttccaaggaagtcttttcgtgtaacataagccgttttggcctgactttct

SEQ ID NO: 665981 - DNA, 1197 bp, Homo sapiens
gatggccacacgcgttgcggtaccagtaagtgctccgtccgggcacgccgaatcctagtcccggtggggggcctgcagcctcatgttcctagcgaccgaagcgcgcatcacgcgggtgcttggctccggttccgtgctgcggttccagcctcgatcctcagaccgcgtgcgggaggggcggggcgtgcaagcttgcgggtcctggccggagcctggactctgctgcaggctccagcgcagaccccatgatgctcgatctgcctggtcctgctctgtcctggggccttctgcggcggccggcggtggatcagggctgtgagcccagatcagttttatggtcctccattgttggacatgtctacgagaagaacgctaatgagggttgtctgcccgaggttatcgggtagccctgatagtggaatctgtcgaccataacactcagctggcaggtcacccgaaatggggcctttgttcaggtgcctgtgaacaagatgccgatccactacatgatgtaagctgtgacttgattcgacgagtgtgaactttgcctaagcaattattgtattggaactgcactacggaatacagggttctcatcgcagacctgagcctgcatcgtgggcatggataccgcctagggagccatggaaactttcaccgaggaatccatcctcctttgttggcgttaggattcaatggaaggttagcttagctggcccagaggaaggactcgcacaaattcctcccaataccaagggcttcgactttgttgggcaccgccaacacggtacttccgcaggacaaatcgcggcaccgacagatttgaagaaccattcaaacaagttcgggtcaccgattcaggccccgcgttaataaattgggcggagttggcacaattgaaagaaggggagacccccaataggggagcacgtttgaatccgctcacagacggcacttcgttagacaccctgtgaaaactataccagccgtaacattacgcaagcacttggaatagtcgcgattccgggcagttttggacacctggattccatgacacccaacccttggctttatataccccacagaagaatgaagttgaagtagggactctcacatgtcgagcttgcagatgacaaggtctcggacaggggagacgatccacgtttcggacattccaggcatcgccctggaggtcgc

SEQ ID NO: 665982 - DNA, 682 bp, Homo sapiens
ggaatgcggtcgcccccttgggagaagtacatatctgggagtaagcaggcggttccgtgctcgcgctcccgctcctccgcccgaccgcgcgctcgccccgccgctcctgtctgcagcgcccagggcccctcgccgtctgccaccatggactgcctatcaaggaagaagatgcagatgctgaatgctcgacaaggagaacgccttggatcggagctgagcaggcggaggccgcactaagaaggcggcggcaagacaggagcaagcagctggaagatgagctggtgtcactgcaaaagaaactcaagggcaccgaagtatgaactggacaatatactctgaggctctcaaagatgccctaggagaagctggaagctgcgcagtagtaagaataggccaccgatgctgaagccgagcgtagcttctctgaacagacgcatccagctggctctggaggaagacgttggatctgtgcccaggagcgtctggccaacgagcctttgcagaagctggaggagagctgagaaggcagtcagatgagagtgagagaggcgtgaatagtcattgagagtctgagcccaatgaagatgaagaaaaaatggaagattcaggagagtccaatctgaaaagtaggcagagtgagattgctgaattatgccgagcggaaatatgaagaggtgggccg

SEQ ID NO: 665983 - DNA, 952 bp, Homo sapiens
cggcgggcattgtctaccggccgcggcaaaggcgagcttggggacccagcgtgcgcggggcccgacgtggctcgaggccgggatgacctgtggctgcagccatgtgacgaacagatgggtagagccctgacggaatgcatcagtcaaacacacgtggctgtgcatgaatgagaacaattcatgagctttgatctactctcctgaatgcagatgctgctgaacgtggatggcgaactcggcgacaggttgcatgaggacctcgaagccagagttccagtccctcttctcccgtcctggaggagctgaatacgaaggctaggtgcttactgcacacgtacttaaaatcagtgcacctgtgcctagccgcacggctacgagctgcaggaaccagcatggctgcgctgctagctgcagggccctggagagctccgagggagcttctggagacaggcaagcagactctgcaggccatggtacagtcgtaggtactttcctcaggcatgccgatcgaaatcagaagatggagtgaccatgggcccatgccttccggctatcattgaaagcgagggtcagtgacaaatcatgtagtcacctcgatggtggacgttcgcgcaagagcggcagatgcgtacaggcattcaagttcctgcctgtgcccagagcacccgtgatcgatgctggtctgggttccctggtggccggataactgtgtgacccgtggctgtggggcatgcccgtactgagggacagcaaggattgacctagaaacgtgactggaagtagcgcgcggaaccagaccttgcgacgtggcccggcccccgtcctccaaggaaggaacctagacccgtggatgggtgcaatcgaagggacatcccggagatcaccagaatgttacaccccatgcacaggagtcgtcaaggtatggagacttgaagattacagtgaacttccg

SEQ ID NO: 665984 - DNA, 317 bp, Homo sapiens
  misc_feature (29)..(29): n is a, c, g, or t
  misc_feature (38)..(38): n is a, c, g, or t
  misc_feature (166)..(166): n is a, c, g, or t
  misc_feature (271)..(271): n is a, c, g, or t
cctggtgttatcatgcaggctgaacctgnccctgggtnactccctgctctctgccagcccctttctcaccccttggttccccatggcccctggtctctcccctctgctagaatctcgctgagggattggtggggagggggtggtcacgcactgggtggagatctgntgccccctggatggccggacaggaagggccagggcggacaaggtctttgagaactcggtggcatcccgctcctgatggcctgggtcccaccgcccctcccccagncttcctgacagcagaggagattgatgtggcttgcgctgaaacggga

SEQ ID NO: 665985 - DNA, 303 bp, Homo sapiens
agctctctctgtggggccacgccttcggtgggctcacagcagtttttccactcaactcagacacccacactcacagatacacacagacacatgcacagatacacacgcacaccctcactgacacagacataacacagagacacacacacagtcacatacacacgatccctggaacccttcctaaacttcagccacagacggacatgcccctcagaccccctttctccggtgctccccatctaccctgtgctcggggggtggggacccctcatcagctgcaggacacccccacagagagagcgt

SEQ ID NO: 665986 - DNA, 175 bp, Homo sapiens
gtcggtaccgtgttagtagctggaactgaattgttttgatgactctgagatcaatgtgagtcagtctgaatgctgctggtgctgatcgagttagatagagcccatgacatatgccatgcttttttgatagaagcctttggtgctcctgaaaccccagtgtttgtctgccattgtg

SEQ ID NO: 665987 - DNA, 163 bp, Homo sapiens
ctgtgcacgctggcatccttaacccactgagcaaggccaggatcaaacccgcatcttcatggatgctagtcgggcgccttaacaactgagccacaaggggaactcctatttcctctttttatgtgggtgtaactcataccctgtgatgatcttaatgcttccc

SEQ ID NO: 665988 - DNA, 494 bp, Homo sapiens
ggcactcagtcccactcgaacccgggtgaataaacagcctgtgttgctcacactatagcctgatcaaggtggtctctctacaatgagatgctcgcataacattctggtgccgaaaagcccggaggactaggcgtgaacgtcctccggataggatgctctccatcgtatcgcatccacggatagccatcgtattcgtccacattgggaagagacttccttgcgtccactcagggacctcagatacagctcacgctagaaaacgtcccgggctctccgggcctgaatggtaggttatgctactaaacaaacagggactagcgcaatggttgaagtggtccatcgtgaaggcagtggcgggggttcgatgggtgcacagcccattcgctgacccacttggtggagttccacacaggtacacgatctcacgaaaggtctcctggaagccaggaaagagtctgggggacgatctggaagaagcacgaatgaagtagaac

SEQ ID NO: 665989 - DNA, 781 bp, Homo sapiens
agcgggacggcgtcgatccgcccgctccgctagcggcgttcgccccatatccggtccctctggcccggcctaggacccggctctggcttgttcgggctcatggcggcgcgaggtcgcaggtcccgatgcgaaatcatatttatgtagaatacttgcgttgacatctgcctgatagactctccaagaattacagaagcactccccacatactaatgcttttgaagacagccggtaggttcccggcggcgagagggcggaaaacacgcgagctgctttccctgatcttgcgagctctggctcggaatgcctaatggatgtcacgtaggacatcgaatatgccaggggtcatgactgcacatgacaagatggagtattgacccataatattgtgaaggaagagcgagagaatgaacgaagaaagacgatcctggtggactataaaggactattaacatagggatgtagtccatgcgatgtgagagcagcagtgggtgctgattgcctttgatcccgaggtagtaccagtaacatttgcttgatctacaaggaatctggagggtggccttcaatgaagcacagtgaccagtcttggcttctgctgcctagaaggtatctcattacaggttgcataggacttgatattaagcttaacttgacctctggaaaggctgttcagagactattggactcagataacccagctccaattctgctcacgtgcttgatggggctcgagattcgtcttatccatgctaacatgttccgatcccatccccgtaca

SEQ ID NO: 665990 - DNA, 352 bp, Homo sapiens
gaacccggaaattcggccattatggccgggaagctctttcctttcgctgctgcggccgcagccatgagtatgctcaggcttcagaagaggctcgcctctagtgtcctccgctgtggcaagaagaaggtctggttagaccccaatgagaccaatgaaatcgccaatgccaactcccgtcagcagatccggaagctcatcaaagatgggctgatcatccgcaagcctgtgacggtccattcccgggctcgatgccgggaaaaacacctatgggcccggcggaaagggcagggaacattgggcataaggtaagcgggaaaggggtaacaggccaaattgccccgaaattgcccaa

SEQ ID NO: 665991 - DNA, 169 bp, Homo sapiens
cgcgggcgatctagaggatcccaacgtcagcacctcctgggataaagtcttaaacctcccactttgtctgtacatactggcctctgtgattacatagatcagccattaaaataaacaagccttatctgccttatttgccgtgattacatagatcagcccatttaagtta

SEQ ID NO: 665992 - DNA, 351 bp, Homo sapiens
  misc_feature (26)..(26): n is a, c, g, or t
  misc_feature (37)..(37): n is a, c, g, or t
  misc_feature (129)..(129): n is a, c, g, or t
  misc_feature (167)..(167): n is a, c, g, or t
  misc_feature (182)..(182): n is a, c, g, or t
  misc_feature (247)..(247): n is a, c, g, or t
ttctcatactattaatcttctgtctngaaaaattgtnattctgcattctaagtttagattagcttccaacattttatctttgcattttcaatcttgtgaactattctcaggaattctttaatacaaagngtatcagcaacacttcctgtggacctcttcaccctttngtcacagccactttnatctcttaacattaatcaattcataaaatgatgaaaccagaatttactggctgaataaggttttnatttagtctctttgtaattatcattttctttcaacaagacaaccaacttcaacacttcacccgaatgctagccagactgattggggaaaaaatttgaagtttat

SEQ ID NO: 665993 - DNA, 341 bp, Homo sapiens
atatatggttgtatagtttattaggcggaatgaattggggtggtatttcaattgcatgaatcaacaggtttaatgttcgtcaatgatatgcgtatgcctttgcggatgtctttagttcgtaaagaagatatggggaaatacaaaatatctaccgatgaagttcctggatttatgggacacggtacgcccacaatttgcaggcccgtacgctggagtaacacattgatattcatgcaatcagcattaggggtaccttgtaatcgaccaactttcggtacgatgtctgcgattgatttaaaaaccacaaaagttggtatggcaagtaccaatgggaacagctg

SEQ ID NO: 665994 - DNA, 181 bp, Homo sapiens
atgcggatgatatctctataccaggcagatacccgagagagatatataaggtggagacgagctagtacacttacttaagaaataccaaatactagactatactagatccaaagcaaagtgtatatcttgatttgacactggatatggcactgggaaagaagaaaaacgtggagccatgtac

SEQ ID NO: 665995 - DNA, 100 bp, Homo sapiens
ccccttttatctatctctatagcttgtagttcattgaatgaatcatagaggaaattagaaatgcagctatttacagtttgagaaaatctacgaacacact

SEQ ID NO: 665996 - DNA, 900 bp, Homo sapiens
agaggctcctgtgtttgcccccgctctttgtccgccgcgctgttgcacccgaggattggttgcactgtcccccgccattcgagaggacgttgtgagcgcgccggtacctcctgcgagtagtagttgctccccttggcggcagccttttacaccattacgatgttgggacatcgaacgctcctgaacatccacagggcacatttgccgcgaggcgtatgcctggacattttaagttacctcacatgcttggtatccgacacggcagtgtgttctgtgctgaaacaggtgtgcgcgcccggttgtcatagagaatttctatctcggcccaactctcaggggccaccacgtcgtcagaccaacagacgagaggtcagcttttacaactgtgaggtaatactctagcatcctttctctccaacagacctgcctcatccacgggacaaggtcttttctgttccccgacgagcccccccacaaaattcgggggggacaattcttctcgtgaggggataccctcataaatagggtggcaaaacaacacgcccaaagttcttctgtcactgttgttttggttcggccttcatgccaccgtcgactagtttcctcacctcactgtattggtgaatgccagtgtgtgtcgtagtcggataaaaaacagactctccgggcgggccgtgcgaaaccacggcgcggctgtttgcggcatctctacatctccccccgcgcccccttattgccgtcgagactccgtcgcgcacgctactcctttcgcctcgtcttgaagaccccccgccagagcaacatctagcgaatgatttctcccgccacttgtggttctctatgctgcaagatgaagaagtacaagtgctcacccttgaggctcaccccccaacatgacga

SEQ ID NO: 665997 - DNA, 279 bp, Homo sapiens
gagcagcatttcatatccgcagtcgtccagcccagggcgctgcctctccaacgggcactgggtagcacaggaaaagcgcttctactaggggctctgtctcagacttggtccctgtcttcggtcgctctgtaaaacagggatcctggttaggtggctctgtgtgataatgatgagattaggaatgcaaagcacctagtatggtgcctggcacatggcaggctctcatcagaggtcgattcccttcacttggtacctatttccccacagtaacaaggctgc

SEQ ID NO: 665998 - DNA, 108 bp, Homo sapiens
  misc_feature (8)..(8): n is a, c, g, or t
  misc_feature (63)..(63): n is a, c, g, or t
  misc_feature (85)..(85): n is a, c, g, or t
  misc_feature (87)..(87): n is a, c, g, or t
  misc_feature (89)..(89): n is a, c, g, or t
  misc_feature (91)..(91): n is a, c, g, or t
tcggcccncgttatcatcggcacggggttggtgtaaaataggcgtagtagaagtagaggttanggagggtgatggtgccgatgantngngnggtgccgatgaatagcg

SEQ ID NO: 665999 - DNA, 801 bp, Homo sapiens
  misc_feature (19)..(20): n is a, c, g, or t
  misc_feature (34)..(34): n is a, c, g, or t
  misc_feature (41)..(41): n is a, c, g, or t
  misc_feature (64)..(64): n is a, c, g, or t
  misc_feature (68)..(68): n is a, c, g, or t
  misc_feature (72)..(72): n is a, c, g, or t
  misc_feature (76)..(76): n is a, c, g, or t
  misc_feature (80)..(80): n is a, c, g, or t
  misc_feature (82)..(83): n is a, c, g, or t
  misc_feature (85)..(85): n is a, c, g, or t
  misc_feature (88)..(88): n is a, c, g, or t
  misc_feature (93)..(94): n is a, c, g, or t
  misc_feature (104)..(104): n is a, c, g, or t
  misc_feature (107)..(107): n is a, c, g, or t
  misc_feature (111)..(111): n is a, c, g, or t
  misc_feature (114)..(114): n is a, c, g, or t
  misc_feature (119)..(120): n is a, c, g, or t
  misc_feature (127)..(127): n is a, c, g, or t
  misc_feature (149)..(149): n is a, c, g, or t
  misc_feature (155)..(155): n is a, c, g, or t
  misc_feature (159)..(159): n is a, c, g, or t
  misc_feature (165)..(165): n is a, c, g, or t
  misc_feature (183)..(183): n is a, c, g, or t
  misc_feature (192)..(192): n is a, c, g, or t
  misc_feature (209)..(210): n is a, c, g, or t
  misc_feature (215)..(215): n is a, c, g, or t
  misc_feature (224)..(224): n is a, c, g, or t
  misc_feature (227)..(227): n is a, c, g, or t
  misc_feature (235)..(237): n is a, c, g, or t
  misc_feature (248)..(248): n is a, c, g, or t
  misc_feature (251)..(251): n is a, c, g, or t
  misc_feature (253)..(254): n is a, c, g, or t
  misc_feature (261)..(261): n is a, c, g, or t
  misc_feature (269)..(269): n is a, c, g, or t
  misc_feature (281)..(281): n is a, c, g, or t
  misc_feature (285)..(285): n is a, c, g, or t
  misc_feature (290)..(290): n is a, c, g, or t
  misc_feature (293)..(293): n is a, c, g, or t
  misc_feature (298)..(299): n is a, c, g, or t
  misc_feature (304)..(304): n is a, c, g, or t
  misc_feature (311)..(311): n is a, c, g, or t
  misc_feature (317)..(317): n is a, c, g, or t
  misc_feature (320)..(320): n is a, c, g, or t
  misc_feature (326)..(326): n is a, c, g, or t
  misc_feature (329)..(330): n is a, c, g, or t
  misc_feature (337)..(338): n is a, c, g, or t
  misc_feature (341)..(341): n is a, c, g, or t
  misc_feature (351)..(352): n is a, c, g, or t
  misc_feature (395)..(395): n is a, c, g, or t
  misc_feature (398)..(398): n is a, c, g, or t
  misc_feature (400)..(401): n is a, c, g, or t
  misc_feature (415)..(415): n is a, c, g, or t
  misc_feature (428)..(428): n is a, c, g, or t
  misc_feature (505)..(505): n is a, c, g, or t
  misc_feature (516)..(516): n is a, c, g, or t
  misc_feature (536)..(536): n is a, c, g, or t
  misc_feature (551)..(551): n is a, c, g, or t
  misc_feature (556)..(556): n is a, c, g, or t
  misc_feature (565)..(565): n is a, c, g, or t
  misc_feature (591)..(591): n is a, c, g, or t
  misc_feature (613)..(613): n is a, c, g, or t
  misc_feature (626)..(626): n is a, c, g, or t
  misc_feature (711)..(711): n is a, c, g, or t
  misc_feature (720)..(720): n is a, c, g, or t
  misc_feature (727)..(727): n is a, c, g, or t
  misc_feature (763)..(763): n is a, c, g, or t
aagcgcagggccgccaacnnccagcggcagcggngaagggnaggggaagggaaaaggaaaaganggangggnaagnagangnngncgngaggnncaggaagggnagnggcnggnagcgnngggaggngggccaggggggcgagaggggncggggngggnggggangggacagggagaaagagngcgagcggnggcggaccagggagaanngcganggcaagagnagnggggggannnccgcgccgggnggngnngccaggngggagggnaggaagaggggnaagnggggngangggannaagangcggggnaggggnggnagacgnganngcggggnngangggggggggnnagaaaagaggagaagtgaagcgtgggggtgagagtagtgaggnaanannaaaaggtgaagtgngtagggaagagtngtgtgtgtagtgaaagggagtgaggtagtgtgtcagtggggaaaacagtgggtggtggagtggtggaaaggtccagnggcgcccccantgaaagccccgcagagtggngccagcctcccttantccgnccctgggantttgaaaccgccaaaagagcggtgcntgaacccctgagcgccttcggnaagtggccggaancccagctcgtggttacccctcacctcaccctctgtcccacgtctgccgggacacccccaggtttgcgtttcgtacaagtgaagancagggaggntgccccngtccacgtgggcccccgggtgaagtgcgagtgaacntccagtgtccaattggtaagaaccagcgtttggtgggc

SEQ ID NO: 666000 - DNA, 363 bp, Homo sapiens
  misc_feature (50)..(50): n is a, c, g, or t
cgaagatggaggaggtgcaggtactggagcttgatggtcgaggccatctnctgggccggctgacggccatcgaggctaaacaggtactgctggaccggaaggcggaggtcgtacactgtgaaggcatcaacattattggctatttctacagaaacacgatgcagtacctggcttgactccgcaagcggatgaacaccaaccctagccgaggctcctaccacttacgggacaccagccgcatattatgacggaccgtacgaggtatgctgatgtacccaccgccctacgacgagagaaagcgaatggaggtttctgctggcctcagagcgcgcgaatgaagcctacggactgcctatctgggcg

SEQ ID NO: 666001 - DNA, 826 bp, Homo sapiens
gattccaccagctgtcaatgcataccatgaagcagctagtcttctaggtaagaagtatggacatgacagttacatgagtgtggtaagaaggcttcggtttgctctatggagaaatcgacttctggagttggcaaggaatggagaatggtgtgtagggaaacgccttggaaggttgtgcatgtggtaagaggaatgaagtgcagaaagacaacgaaaaagagtgatagtctctagctagcatatgtaagtgcatagacactaccatggaaactggaaggcacggatactagggcatctgtgataaagcatcatagagcttgggtgaaatatgcgctccccgtatctgagctccattggatgagagcgagtctcttcaagtcaaatttgaggatcaggagatcggaagcccagatcttgcctgggctatgctgcattgagcattgcgatctatatggtagaacacggcgagagaataccatgacgaaggcgacagtcctactactagcttggacacctagggagctatccttaagaactcgtgccgaatgttcaagtgttagagctctgaaacactatgtgactaatggcttgtgtgaggactctccagtccctgccttgaaactgcaggaacgagtaccgtggcacccaccactggacgtactacctttggcagccgaccccactaccagactgctgctatgaccgttgatgggccacaagctctcagtatgatgacgcagtggcaacagttgcagcgacgtctatagaaactcctcgagaaccgacctggctgtctacacgacccggccccactcgccgctgcgga

SEQ ID NO: 666002 - DNA, 130 bp, Homo sapiens
gtttcaccatgttggccaggctggtcttaaacttctgaccttatgttatgcggcttcctttgggccttccaaaggtgcttggattacaaggattagccaattttgccttgccaagaacttttcaagtttt

SEQ ID NO: 666003 - DNA, 377 bp, Homo sapiens
  misc_feature (55)..(55): n is a, c, g, or t
  misc_feature (311)..(311): n is a, c, g, or t
ggtcacgggaagcgcttatgtgaatcccacttctgatattgtaagattctctccnagggcctgaaagcttaaggggttgagcaactcctcccttctcaggccgcagccccaggggcgcaaggccgcttgcatcagcagcgtgcgtgagcagatgcgccagcaagatagcaaaagcaggaagagagccagccggaagacaagtacctctgaagatggagaaagaggccatctgggtacaacgttgcagttacgtcagaccaggacacttcctgtttacaggagactataaaacctttgccccatcctcactnggggtgacgccgttttagcctcagcccgccagcacccaggctctcattaaaacagcatgttgctcc

SEQ ID NO: 666004 - DNA, 153 bp, Homo sapiens
cggtccgtgatgtatcgccaacacatagaggcatgctttaatcgtatgtcccaagttctctgcaaaaaaaaaaccaacaaaaacgaaaaaatctcaaaatagctcataaggttttacagaaagtttacaaattggtggtggggcgataaatca

SEQ ID NO: 666005 - DNA, 440 bp, Homo sapiens
  misc_feature (36)..(36): n is a, c, g, or t
  misc_feature (58)..(58): n is a, c, g, or t
  misc_feature (152)..(152): n is a, c, g, or t
  misc_feature (191)..(191): n is a, c, g, or t
gacatgggtaagataactaattatgtctttttagtntgatgaaatgtgggccagagtnttggaagaagcatagccctattcagtgtccactaggtggattgcagaaggcatgagtttgtccttttttccccttaccttaaataacacttcantagctaactttttccaaaatatccatttaggcatctctnatttcttaaagccaaatatttcgtccccagttcttaactctgagtatgctaaatcaggctggtgggaagaaactttatatttcgttttgatatggtgtagtggtttgtttattctcttgtaaattcctttttcgggacataacttcggatgtgtcccagagtactgtagaactggtttttaaaatttcacattttttgttggtttaggtgtttcttttgtccctaggatttggatctataccaagttct

SEQ ID NO: 666006 - DNA, 918 bp, Homo sapiens
  misc_feature (1)..(1): n is a, c, g, or t
nggcttggtactgtgttgcttaggcttgcgtggcgtggttgtcgtgtgtgtgtttgtgtgtggtgtttgtttgtcttagtgtggcgctgggctgcgaggtccattggacgctcccttcgggtactgccgagaggtgtaaccaccccaatgggtttttcccaccgtgccggtgccgtttttggggggagctgcgcaaactttgtgaacctatacaggtttcccggtgcccggcccgcacaattcccggggtttttgcctctttcgccggcgataattacgttctggtaatggcgaaccaccctttgggagggggtgggaagaaacacaattttgggcgacccacaccaccaccggtgaaaaacttgtggggacccccctaaagggcggaaaatttgggggaccaaactattcgccccctaccgggggggggggccccaatttggcgaacacacgacaccacaaagggggtattggcgttgtcccaccacccgcccccatggttttgcggccgcggcccggcaagagttttatatgagggcccagcaaatgcttttcgctgacgagtggaggcgctcccctagtcactttctcggactctcctctcgtccccaaaattgtgtaactcaccccccatccccatggctgcccccgagcactctaacctgcatcccccacatagaaccacctgcttttatgccaccaaagctcctcggtggttttgggcccaaaaactcgacgcgccctccattttgttggcctacatgtgcttacaaccgttctatttattgttttctccttttcattggaaactaaaaaccaatcccccaccaaagggtttttaaacataaatcttttttttcgcccccccgggcggggtggctaaacacccccttggtccttggcccggggaaaaaaaca

SEQ ID NO: 666007 - DNA, 172 bp, Homo sapiens
  misc_feature (116)..(116): n is a, c, g, or t
  misc_feature (120)..(120): n is a, c, g, or t
  misc_feature (151)..(151): n is a, c, g, or t
tctgacatgaacttggtcaagttctgagccagaaccaccccgagccgcttgagctcaatcttcacgctgtactcagccttcccagatctggagccatacaggcccaaccccgtccnatanacctttttgcccactgcaaactggatgctgncgtattgcccgcggtaccgcc

SEQ ID NO: 666008 - DNA, 159 bp, Homo sapiens
caatcccccggccgcacagcttctccggccccactgcttctcatacttccacgtggcctggggtctctgacagcacccatggatctgatacgctggctggtcctgctagtcctgcgtaatgcgcattcttgtgattcttgatgtccacctgtagaccat

SEQ ID NO: 666009 - DNA, 493 bp, Homo sapiens
tggaggtgactctagaggtatccacacgtaacgcgttcacactacgccttcaggataaggaaggattcccccgagcaggagagggtcatctttgcaggcacgcagctggtagatgggcgactctttctgactacaacatccagaaggagtcgagcctgcagctggtcctgcgtctgagaggtggtatgccgatcttcgtgaagaccctgaccggcaagagcatcacgcctgtgaatgtgtgagcccaggtgacaccgatcgaaaatgttggagggccaaggatcccaggatacatgaaggcatcccttcccgaccagcaagaagctcaattcttttgcaggcaagccaggcctgggaaggatggccagcacctcttttcttgacttacatacattccagcaaggaagtctgaccccttggcaaccttggttcctttgcggtcttgagaaggtaggttattgccagattctttcggtcgaaagaccccttgaac

SEQ ID NO: 666010 - DNA, 3121 bp, Homo sapiens
ggcacgagtggctgcttgcggctagtggatggtaattgcctgcctcgcgctagcagcaagctgctctgttaaaagcgaaaatgaaacaattgcctgcggcaacagttcgactcctttcaagttctcagatcatcacttcggtggtcagtgttgtaaaagagcttattgaaaactccttggatgctggtgccacaagcgtagatgttaaactggagaactatggatttgataaaattgaggtgcgagataacggggagggtatcaaggctgttgatgcacctgtaatggcaatgaagtactacacctcaaaaataaatagtcatgaagatcttgaaaatttgacaacttacggttttcgtggagaagccttggggtcaatttgttgtatagctgaggttttaattacaacaagaacggctgctgataattttagcacccagtatgttttagatggcagtggccacatactttctcagaaaccttcacatcttggtcaaggtacaactgtaactgctttaagattatttaagaatctacctgtaagaaagcagttttactcaactgcaaaaaaatgtaaagatgaaataaaaaagatccaagatctcctcatgagctttggtatccttaaacctgacttaaggattgtctttgtacataacaaggcagttatttggcagaaaagcagagtatcagatcacaagatggctctcatgtcagttctggggactgctgttatgaacaatatggaatcctttcagtaccactctgaagaatctcagatttatctcagtggatttcttccaaagtgtgatgcagaccactctttcactagtctttcaacaccagaaagaagtttcatcttcataaacagtcgaccagtacatcaaaaagatatcttaaagttaatccgacatcattacaatctgaaatgcctaaaggaatctactcgtttgtatcctgttttctttctgaaaatcgatgttcctacagctgatgttgatgtaaatttaacaccagataaaagccaagtattattacaaaataaggaatctgttttaattgctcttgaaaatctgatgacgacttgttatggaccattacctagtacaaattcttatgaaaataataaaacagatgtttccgcagctgacatcgttcttagtaaaacagcagaaacagatgtgctttttaataaagtggaatcatctggaaagaattattcaaatgttgatacttcagtcattccattccaaaatgatatgcataatgatgaatctggaaaaaacactgatgattgtttaaatcaccagataagtattggtgactttggttatggtcattgtagtagtgaaatttctaacattgataaaaacactaagaatgcatttcaggacatttcaatgagtaatgtatcatgggagaactctcagacggaatatagtaaaacttgttttataagttccgttaagcacacccagtcagaaaatggcaataaagaccatatagatgagagtggggaaaatgaggaagaagcaggtcttgaaaactcttcggaaatttctgcagatgagtggagcaggggaaatatacttaaaaattcagtgggagagaatattgaacctgtgaaaattttagtgcctgaaaaaagtttaccatgtaaagtaagtaataataattatccaatccctgaacaaatgaatcttaatgaagattcatgtaacaaaaaatcaaatgtaatagataataaatctggaaaagttacagcttatgatttacttagcaatcgagtaatcaagaaacccatgtcagcaagtgctctttttgttcaagatcatcgtcctcagtttctcatagaaaatcctaagactagtttagaggatgcaacactacaaattgaagaactgtggaagacattgagtgaagaggaaaaactgaaatatgaagagaaggctactaaagacttggaacgatacaatagtcaaatgaagagagccattgaacaggagtcacaaatgtcactaaaagatggcagaaaaaagataaaacccaccagcgcatggaatttggcccagaagcacaagttaaaaacctcattatctaatcaaccaaaacttgatgaactccttcagtcccaaattgaaaaaagaaggagtcaaaatattaaaatggtacagatccccttttctatgaaaaacttaaaaataaattttaagaaacaaaacaaagttgacttagaagagaaggatgaaccttgcttgatccacaatctcaggtttcctgatgcatggctaatgacatccaaaacagaggtaatgttattaaatccatatagagtagaagaagccctgctatttaaaagacttcttgagaatcataaacttcctgcagagccactggaaaagccaattatgttaacagagagtctttttaatggatctcattatttagacgttttatataaaatgacagcagatgaccaaagatacagtggatcaacttacctgtctgatcctcgtcttacagcgaatggtttcaagataaaattgataccaggagtttcaattactgaaaattacttggaaatagaaggaatggctaattgtctcccattctatggagtagcagatttaaaagaaattcttaatgctatattaaacagaaatgcaaaggaagtttatgaatgtagacctcgcaaagtgataagttatttagagggagaagcagtgcgtctatccagacaattacccatgtacttatcaaaagaggacatccaagacattatctacagaatgaagcaccagtttggaaatgaaattaaagagtgtgttcatggtcgcccattttttcatcatttaacctatcttccagaaactacatgagagtgtgttcatggtcgcccattttttcatcatttaacctatcttccagaaactacatgattaaatatgtttaagaagattagttaccattgaaattggttctgtcataaaacagcatgagtctggttttaaattatctttgtattatgtgtcacatggttattttttaaatgaggattcactgacttgtttttatattgaaaaaagttccacgtattgtagaaaacgtaaataaactaata

SEQ ID NO: 666011 - DNA, 119 bp, Homo sapiens
catctcaatgaccccatcctgaacaagaacggtgctcgcagatggactgctctctcttctgcattctcttccctgggggacccaggaactggggctcctctacgagtcgagctgcgagg

SEQ ID NO: 666012 - DNA, 198 bp, Homo sapiens
ctgtagctgagagcgagctgtccaggccgagatgagaataagaggacacaatgaatcatccaaagagaaatgaggcaggcgggacatgtacaagacgtgcggcagatccggcaggcaacaccaagcagcgcatcgacgagttcgaggccctgtaacagccagtgcaggaccatgggcagaggggcgctcatagttggg

SEQ ID NO: 666013 - DNA, 219 bp, Homo sapiens
tgatacgcggctcgagagatctccagcgtgatctcccaagtagctgggactacaggctcacaccaccaagcttggctaaattttgtaggttttggagagacgggctcttgccacgttgcctgggctggtctcaaactcctgggctcagatgatccacctgccttcgcctcccaaagcactgggacatgagccaccacgcccagccgcgtagtcagatcg

SEQ ID NO: 666014 - DNA, 492 bp, Homo sapiens
gattctggctctctgggtagctgggattagagatgctgccaccacgcttggcaattttccttttttttttctttattttattgaaacagtctcatcctgttgcccaggctagggtgcagtgacgcaatcttggctcactgcaacctctgcctcccaggttctaggattcttccatctcaagccttctgagtagctaggaccacaggtttgtgccacatgcccagctaattttagtcttttactttgggacggagtatcactcttgtcgcaagactggaacgcaatggtgcaatcttggctcacttgaacctcaaactccctggttcgagcgattctcctgcctcagcctcccaagcagctggaataccaggcatgcgccaccttgcccagctactaaaggtataaaaagaaaagacgtggactcaccatgctggccaggatggtctcgatatcccgaactcatgatcagccctctttggcctcccagagagc

SEQ ID NO: 666015 - DNA, 427 bp, Homo sapiens
ggtaccccagctggctggcgggtttccttggcctgctgggcacccgaatcatcctgtaaagcggaggtcatcgccatgtgcgagctgtacgtcaaggccgacccgattctctacgagtcccgctcgcgctccctgcgcatctgcggcgtggtgaccaccgtgcgcctggaaaaccagttctgggacatcctcagcgagatcgccgaggcggatggcatgaccaccaatcaactgatcgccaagctgtatgaagaggtgatggactaccgcggtgaagtggtgaattttgcttcgtttttgcgggtgagttgcacgcggtatttgagcaagcagcgggttcacgccccagagctcagccttgtgaatacaagaaatggcgcgcagaagatctgaatgtggccactcgttcaattgggagccgggcttg

SEQ ID NO: 666016 - DNA, 721 bp, Homo sapiens
ggcaggagtcccagctgcttgcttaggaactggcagcttttcttgccggtccctcccctgcctccagaatcacagcccttctccccaagggaggctgaggaggcttctccaccagtggcagacccacccgtccctggcattcttgggctccagcccgcatcaggcccctactcgtggcgctccccagaaggagccacctcatcagtggcctcagctccaccctggactccacagactccggagatgaggttacctgacccccttcctacctacggtaaacaaaaacactcaattgggttcccaggacggtccttcattatataaaccagatacatgttcttagtcatgggtccgcaggaacaaagggaagctgggtacagaacgggcgcctatttcgtaatcccttacatgctttgaggctataatggtagaaccaaatggttgcgttatccctcacctggttgtatgttggtgtgtgaccctattatcatttaaacccccaacgagaaaagcaatattaactcatcctctgtagagacgcgttttgaaaaaagagccttcggcgcccacagatggtgcaaagggggtaaacaaggacggccatgcaacggttgttggaactggggcacctttggtggacacgtggggacctggtgttagcgtggcgggagagcttaatgaagagacagacatgaaaggggagatagaaaatgtaccagaa

SEQ ID NO: 666017 - DNA, 333 bp, Homo sapiens
tagacgttcttcacacaggtggtggatgtgagtgccacctctctgacagctatgagactctgagacacagactaggacaagagcaagtaccacagcgtcagccagctctacttacaggggcgcccacgctgcgcttctgatgtacgacatcaccaggaaggattccttcctcacggctccgcgacgtggctgaaggaccctgcgacggcggagctgcacccaggagaacgtcctggtgactgctggtgggccacaagacggacctcagaccaggaacgggaggtgcacttccagtgacgacgaccgtgtaacacagctgcagacaagtggctg

SEQ ID NO: 666018 - DNA, 170 bp, Homo sapiens
attgagatcgcttgctcctttaccagacccaggtgtcagctgaaccctcttccttctcagaagtgggaggagtgcacctactgcgacgcaggcagaggagagtgtcctctccggtctgccagcagctctggtgagtggcggaccactggctcaacagcttcactcctctc

SEQ ID NO: 666019 - DNA, 153 bp, Homo sapiens
aacgggtgatgcggttgcaagctgtcagcatcaactggcggcagacgccccgtgtctccttgcggatctcggtgcacaaggactgccaccgctaggaacggctagcaacggactaatatgcagtcaggatgccctcggaagttgccactatgc

SEQ ID NO: 666020 - DNA, 376 bp, Homo sapiens
  misc_feature (16)..(16): n is a, c, g, or t
  misc_feature (61)..(61): n is a, c, g, or t
actcattctagagtgnagtggcatgctcatagctcactgcagccttgaattcctgggctcnaaggtcttagctttccaagtctcagctttcctggctcctgcctcagctttccaagtagctgggattacaggcacataccaccatgcctggctttgtttgttttttgtgtggaccagcctggccaacatggtgaaaccccgtctctactaaaaatacaaaaattagatgggtgtggcagtgtggcctttaatccagctacccaggaggctgaggtgcgagaattgtttgagcccaggaggtggaggttgcattgagctgagactgcgccactgcactccagcctggacaacagagtgagatgctgtcttaaaaata

SEQ ID NO: 666021 - DNA, 168 bp, Homo sapiens
taatcagctcgtaccgcttctgcttctgccgcttctgcttctgcttcctgctttgctgcttcctgcttctgcccgtcaccctcgtcctaccacttctcctccttcttccttgcttcctgcttctgcttcctgcttctgctgcttcctgcttctgcccccccccacgcc

SEQ ID NO: 666022 - DNA, 275 bp, Homo sapiens
gagccagattttatctttaaaaaaaaaaaaaaaaaaaagggttaagctgaacacattatttcaaaggtaaccaaactgcaaagtaacaaaagggccacccatgttcccctaataagttatacacaggcacatccttttatcctgaacacatttgttaaacagggcgtttttgatagcccgccggcccatgtggacacactcacgggggtgctccctttgtttgaccatgccagctaagtagctaagccaatgcagcagcgcagggttaaaaaaga

SEQ ID NO: 666023 - DNA, 459 bp, Homo sapiens
cctcaggtatataagggtgatcctgcaggttaatactgtgggttttaaacccctacagcgggggttaaaccaactgagtcaaccagcttccttgaaaaaaaagtgaagaagaaatttgattgggcctttgaacagacagtggaaactgccattacatgcctgtctgctgttttatcaattgatttccaaccttccgaaatagaagttggagtagtggcagttgaaaatcctaaattcaggatttttacagaagcagagattgatgctccccttgttgctctagcagagagagacttaaccttgtcgttagtttaccaggtccgtgatgccccttacctgtgtgtttgggaacccccaacccacatcatggagggccctggattgaaaaaggagcctctcccactcctcctacccccgaaatggttaggactctatataaataaaaacaaggcttttgga

SEQ ID NO: 666024 - DNA, 482 bp, Homo sapiens
ttttcccttcccccgttctggccgcgcccccctgccccccctgaaggggtggtttcccgccctcccgagagtgggcttggccctaggccctcccgctcagcccagaaagccccagaaccccggtgctggacccgggccctccgggaggggaccctgcggctagagtgggctaggcctggctttgcccctccagatttgaacgaatgtgtgtccccttgagccctcaggagagccgccaagaggggtgggaccaggctgggaggacaagagcccagccaactgcccaagccctcctgctcccccccacccccgccctagccccttagcctttcaacctgtgctctggaaaggctacccaatactggcccaggtccggaggaccccaaatgagcccgcccccgccccttggctttgtgttaagcacatttcctcccctgagagtgtttctgttggccataaaatgccccttgactgtttgttgt

SEQ ID NO: 666025 - DNA, 215 bp, Homo sapiens
tgccaacgctgcgcttaaggagaagatccggctctagaggaacacccactacgaggaagttcgaaggctccacgagcgcttaccccgagaggaggtacatgtgaagcttgacaaggcccggccacatctcacggcacgaatccatgagaggccgacgcggcctgaacaaagaacagacaactctcgcgcggctcccgccgacttctacagcgtag

SEQ ID NO: 666026 - DNA, 930 bp, Homo sapiens
gagtcccggctggagcgactcggccgtggtggtggccgttaccgttgcctctgggaggctctggcggcggggcggcccgcggggttcgcggagcgcaggggccgcccttcgcccgtggcgcctcaagcagctcgcgccgacacaggggaggcgagacggccggctgcggaggcgggcgggagcatttgttgcccgggcccccctccttggggggctccgtgccccccgggggggacttgttggcgaatctgggacagcccccacggggggcggggggggcccggagggcataacaaggagccccgggggacaggggggaattgggaccaaaggataggcggccgcgaggggaaaccggttaccgaatttggacttggatttgaccaggaacttgcatgcgacttatgacggttattgttttgaagcggacccaatcctgggagtgggcgggaccacaaaagacgaacttgacgggacctggcttcccaaaatttccccaggtgggttgttatccaaccatttattcgtcctatatctcactgcacctccaggtaccataggccaggaaaaagggggctcctcattgattcggcacgtggtggtaccctaaccaattttcgcagtgttgcaacctggtcttggaaaggccacccttctggaacaggggcggtggtacttgattactgaagttttgcctttgaaaccagggtcccggtcttggtactcaggttggagaaacccagtattaggatccagttctttccactggggtttgtgaaattaccaatacattctctaaagtgattggggcagttctacacgtaacttccactataatgacgcacagttgtctattccaagatctcacgagatttgcaatgcggggattccacctaagttactcaagtgacgcaggtcgttccccggcat

SEQ ID NO: 666027 - DNA, 371 bp, Homo sapiens
  misc_feature (222)..(222): n is a, c, g, or t
  misc_feature (315)..(315): n is a, c, g, or t
  misc_feature (354)..(354): n is a, c, g, or t
acacaatatatccacccaatatatcccaatatttaacccaacatttccccacgcaggaagcattccagcctctggctgggcgccatcagtatcctgtcagggctggagtggggtctgagagggaagcacgtctctggagcccgcctgcaggtggctttgtgacttgacaatggcccaagtgctgccattgcagagatggggaaactgaggtaagaggaggcnaagccgagggccctgcagggacctgcatccagcatctgcgcccctgcccaggcctgcccgtagatcaaggttgctgcaaggacctcagcccanttcccatagccgccttcctgttccaccagtgaggaggtnaggctcataggggccct

SEQ ID NO: 666028 - DNA, 440 bp, Homo sapiens
tgcccctgtgtgatgtgtgcgcagtggcccagtgccctggctcctcaacccttctgcaacaatgggccaagccctgggccccagtgacacctgtagagctggcccttctacgacctctggtgcctcagacaaccccctgtgacaggcctgttggttggccagtgatgagtttttcctggagcagaccaatgaagaaatgtgagtgaagctgtgccatgcacgcctgcacaccaagcctgtcccagtgctgccctgccgtggaggtggcgcctgcctgagcttcctacaatccatcctttgaagaccaccagaccctgctctcatctggcccacgaggtggagagcagcggcagaaggagtgcggagaagctgagcggagctggccctgcccgccacggagcatgcgcaccaggagtccactccggactgtggagggtgtg

SEQ ID NO: 666029 - DNA, 413 bp, Homo sapiens
  misc_feature (236)..(236): n is a, c, g, or t
  misc_feature (248)..(248): n is a, c, g, or t
tgcccatattcttctaaatacacttccaccacacttgatacatattctcccaataatttctgctgtgcaaattacttagcttaggcgaaatattcggagcgtactgcgccgcggtaatttacaactctcccttggatgttttgcttcgccccctagggtattcttcgtgggagcgcgagccaccctcccgttttatagcctgtgggatatacatgactgtctgagcgacctctccncggagatgtggnggaacaccaccccaggagctttattgcaaatgtgcccccccagagctgtcggcaagctttcttaatatgctttggtagaccaacttatgggccacaacttcctccgggccactcgtgggcgcacaattcacccgcgatgtattcccacaggaactaatacaaaca

SEQ ID NO: 666030 - DNA, 894 bp, Homo sapiens
  misc_feature (19)..(19): n is a, c, g, or t
  misc_feature (72)..(72): n is a, c, g, or t
  misc_feature (107)..(107): n is a, c, g, or t
  misc_feature (112)..(112): n is a, c, g, or t
  misc_feature (119)..(119): n is a, c, g, or t
  misc_feature (128)..(129): n is a, c, g, or t
  misc_feature (162)..(163): n is a, c, g, or t
  misc_feature (196)..(196): n is a, c, g, or t
  misc_feature (215)..(215): n is a, c, g, or t
  misc_feature (217)..(217): n is a, c, g, or t
  misc_feature (219)..(220): n is a, c, g, or t
  misc_feature (230)..(230): n is a, c, g, or t
  misc_feature (241)..(241): n is a, c, g, or t
  misc_feature (250)..(250): n is a, c, g, or t
  misc_feature (256)..(256): n is a, c, g, or t
  misc_feature (265)..(265): n is a, c, g, or t
  misc_feature (270)..(270): n is a, c, g, or t
  misc_feature (276)..(276): n is a, c, g, or t
  misc_feature (278)..(278): n is a, c, g, or t
  misc_feature (286)..(287): n is a, c, g, or t
  misc_feature (289)..(289): n is a, c, g, or t
  misc_feature (301)..(302): n is a, c, g, or t
  misc_feature (311)..(311): n is a, c, g, or t
  misc_feature (315)..(315): n is a, c, g, or t
  misc_feature (333)..(333): n is a, c, g, or t
  misc_feature (337)..(337): n is a, c, g, or t
  misc_feature (341)..(341): n is a, c, g, or t
  misc_feature (359)..(359): n is a, c, g, or t
  misc_feature (364)..(364): n is a, c, g, or t
  misc_feature (368)..(368): n is a, c, g, or t
  misc_feature (370)..(370): n is a, c, g, or t
  misc_feature (373)..(373): n is a, c, g, or t
  misc_feature (376)..(376): n is a, c, g, or t
  misc_feature (382)..(382): n is a, c, g, or t
  misc_feature (385)..(385): n is a, c, g, or t
  misc_feature (398)..(398): n is a, c, g, or t
  misc_feature (400)..(400): n is a, c, g, or t
  misc_feature (418)..(418): n is a, c, g, or t
  misc_feature (437)..(437): n is a, c, g, or t
  misc_feature (443)..(443): n is a, c, g, or t
  misc_feature (494)..(494): n is a, c, g, or t
  misc_feature (520)..(520): n is a, c, g, or t
  misc_feature (563)..(563): n is a, c, g, or t
  misc_feature (615)..(615): n is a, c, g, or t
  misc_feature (618)..(618): n is a, c, g, or t
  misc_feature (620)..(620): n is a, c, g, or t
  misc_feature (626)..(626): n is a, c, g, or t
  misc_feature (683)..(683): n is a, c, g, or t
  misc_feature (693)..(693): n is a, c, g, or t
  misc_feature (735)..(735): n is a, c, g, or t
  misc_feature (756)..(756): n is a, c, g, or t
  misc_feature (770)..(770): n is a, c, g, or t
  misc_feature (787)..(787): n is a, c, g, or t
  misc_feature (850)..(850): n is a, c, g, or t
gaaacaaacatgtaaaaanccagggattctagaaataaaaactcaattaattcaaattaaagatcatccagnaccctggttcacaaacactaggtgaagaatgcatntgagncaccaantgaagagannggcggggggcgggggttgttctctgtggggccnncggtggttgggttggtgtgggggtgggtctccnttggtttccctggggtgtngntnncctccctttntgtggtttctnctctttctntttgtntttgttgtntttcntggttntntttttttnntnccctccccttcnntggcctgtncttntttggcctgttccttttngttntttnctctcttgctctggtttnttgcnttcntnttnttntccttnttnttttttttttttntnttttgttgctggtttggnttctgtttttgctgctgtntggttnggggctttgggggtggggttgtgttgggttgttgtgtggggttgtgctgtncttggtcccctctcttcttgggttcncttactgttcttcctgctcctcttttgcgtcctctcggttctntgttagtgctctgttggcattagctgctatcctggtgtcctgtctgcttatnagngntcgggntgggctcactggccagcacttggtggggctggctggtaagagacggcagcggtggcngcttcttccnatgggtcaggctgctgctcagcacagccaagcgggtgctgtnctgcctggcacggtccatgtnctcatgctgctccntgccctgtgagtctgcngcagacacatcaatgatgttgctggctgtcttggccaggatgggagagagcggggcctgctcntcagtgcgagcggcaggcaggctgtggtagttgggctcggctcc

SEQ ID NO: 666031 - DNA, 425 bp, Homo sapiens
  misc_feature (71)..(71): n is a, c, g, or t
tcagaccaggccgaggagctagagcctgcctcggcgcttctggaccacccagatgtcgccactcatttgcngcatacaccagaaccctctcccctacctccaggatgggaagagaggcaggatgtccttggaaggacctactacgtaaaccatgaatctagaagaacacagtggaaaaggccaagccctgacgatgacctcacggatgaagacaatgatgatatgcagctgcaagcgcagcgagcattcaccaccaggcggcagatatcggaggatgtggatggccctgacaaccgggagtcccctgagaattggggaatcgtacgagaagatgaaaacaccgagtatagtggtcaggctgtccagtcacctccatcgggtcacattgatgtgcagactcaccctgcagaagagggggtcgacgc

SEQ ID NO: 666032 - DNA, 573 bp, Homo sapiens
  misc_feature (187)..(187): n is a, c, g, or t
  misc_feature (280)..(280): n is a, c, g, or t
gcaacgtcgtactttgtaggtggtaagaattcacatccactcggtggaagtgaatctataataaaagtaaggaacatgctcccaagggggggcttggctgaccacatcttctcccatgggccgatatcctgcagactctccttcccttccttgagggtggttctcttagtctttcagacggtggggntcgtttcatcccctgatgagcccagggcagtggtgcaatcatggctcaccgttgcctggaacccctgggctcaacggatcctcccacctcagnctcccgaatagctgggactgaaacgcctaacctttttactctaacttgttactttgaattttgtcctgcttgtctctttaatcacctagccttgcttactacatgttaaacattacacagaacttctcctctagcttgggaagggctggacaaactccaattgacctttctaatttacaagaccacttaaaaggcttcctcacacttgaccccctcccgtaacggagttgggcctgggtaaacagatcctcagcatttcaaaagagcccaattaactgataaggtacttaacc

SEQ ID NO: 666033 - DNA, 132 bp, Homo sapiens
ttatcgaaaccctgtaaccttccccttattaaacctcatcaaaccctgtcatcaaaccctccaatggatccttgttaaaggatttaaagtttactcattccaattacaggtccttgaaagagtcctgtattg

SEQ ID NO: 666034 - DNA, 287 bp, Homo sapiens
ataactaactccgggcctcagggtactcctgtcttgactttcatcatttttactgggatgtttatttgtggatctggttgagtttatccttctggagtttctggtgttaggtttatgttactcaatacattatgttggtacactttttttttctttttttgagatggagtcttgctctgttgcccaggctggagtatagtggcatgatcttggctcactgcaacctgtacctctcaggttcaagtgattctcctgcctcaccctcttgagtagttaggtctacctgg

SEQ ID NO: 666035 - DNA, 395 bp, Homo sapiens
gtaatacggctctcttggcacgtatttaagagatattgggtcttaatttcaattccaattcttcattgctgttataagcaaagcaatggacctttgtatgttaactttgtatcctgggcagagaagaggtagaggtaggcggtcagcgctggagccaggtcaggctgggcaggcggtccctgagtgcctgaggcctcaccttctccttggtcatgtccagggggctcaccaagtaccgtcacagccacacttttaaaaccaaggtctattgggctgtgcggcagggtgcaggccacctaaggtgtcccagctcctgggggacccatgaggccctggccacagccccgcacacagccgtcagagacacacgttttttgtttttttgttttttgttt

SEQ ID NO: 666036 - DNA, 1371 bp, Homo sapiens
cccctctacacaacactgcttggttacttcagcctggtcgggcttctccgcctgcactccctgcttagcgagcattactaccaggccatcaatggctgctggacgaacactcgaactgaacaacgaagagctatgtacttcccgctgctgccagaagtgccaggtcaccacactactattatgctttgggctttgcactatcttgactgactgccgctcgcttacccaggatagccactccagggtcttctgccacacatcctccatctacactcccagatgtgaccaactgacgcactgcttcccagcaggaccacagtacaacgtatgacgatgacttcaacacacgcagaactgagcacgactgcacttgccgctgcctggccatatagccactcacagactagtacccacaatgcagatactcgactgaagagcacttcaccatccgagcctgccgcgagcatcaacactacttgggtgaccacatgcagtgcttcgccgccacttgacacgcaaacaggtagaaccctaacaaagctcatactgcacacgacactattatcaaggtctaacctcacaattgccccccaacacgctctccactatgctcgagcccaatagataacgcattgcacctaaaaccattactcgacctacacttagatagcaaaccccccaacatcaatatccaacccatacactgcactgcccccatattcccctttgctccacgcccatgcgcctttgcacaacgcggcgttggtatcttctccgctcggaacttggaagacggcataaccaacgaccccaagagcccaacggcggtcggcacccaggtgccccttcctctccaacatcccacaatatacaccggtcgaagtgcctctttccccccattgcaacagttcctttcagttagccacaacctctaacccctaacatttggctgcccactatgattaggcgggccaccgcaagctgcaggcctcttgggtgctcttatggcgtcctcgttattcctcctgatggtgcgacacccgctgatgtccaacctcagtgggaaatgacccccatcgggtgggaaatacggtttactccccctggcgggaaactctcccccacagcggtcacctttctactttcttgggctttccctcttctcccagcaacgctcacctaacccacatcggcgacctttggcaccagtggaacaacccctctatccagggtgcttgtgtttggtggagaacccccaagcgcactgggggctcataatctcctttacagcagcgacgcccgcatttgtggacgaactttcggggagcctcgtgccaacacacttcttatcacacaacgggtctccaaccg

SEQ ID NO: 666037 - DNA, 958 bp, Homo sapiens
ggagagagagagagagagagagagagagagagagagagagagagagagagagagagagatctccccgccctctcgcgcggcccgtggggccgtaagaggcgcaggaggatgtagagggggcgggggtcgcactaggttgtgtctcatagagaaagagaggcgtctcgtgaaagggcggagcgactagttgtgcggccggaaccccgcgggcggggcgccacgactatttaaacgatcgatcctctatcttgtcgttgttgacgaggacacgttgagatcgtgtcgctcttttgagcggcggctatctctctcttctatactctctcatgatatatccacaggagggagtctccacgatggtatcctcactaatatctcggtggcggctagattgatgatgaatgtgaagaagaacgatcggtcgctcctcttgttaggcgatgtctccaagatggatctctatctagatcggtcgtggttaggtatatccactccggtagatagatcgtcgtcgctccccgcaggaatgtaacagcgaggcgaggttgcggtgcgagcaagcctccttcgttgaattgagtagattgagttgagcttatcagtgtacctacttcaagagggggagtgagttaggaacacatctcctcggtggctaatgcgtgagggaagcagttagtgaagcggatcctcgtttgtcggttggtctctttcggtcgcaccaagcgcgccgtgcggctcgctcgatgtgctgggtgggcttgcatgtgataaggaggggggcgccaaggaaaagaaccaaacgaaatggttaatttttctcatagcggaatggccatggattcgggtgtggaggcgcaggaaggtgaactttagaaggaaagtagcgggatcgaacgaaggaagacggaactttcctccgatagagagctcgtcggtgtccaggagcaccctagattgg

SEQ ID NO: 666038 - DNA, 128 bp, Homo sapiens
tttcgaagtctagtaggagtgcatcaggatcagcttacaagccccaagtaatcgtaccatcagagagccaatagcaaacatgtcattctatgtccacactgggtccccacacatctttaagacggatc

SEQ ID NO: 666039 - DNA, 870 bp, Homo sapiens
  misc_feature (1)..(1): n is a, c, g, or t
  misc_feature (65)..(65): n is a, c, g, or t
  misc_feature (68)..(68): n is a, c, g, or t
  misc_feature (91)..(91): n is a, c, g, or t
  misc_feature (97)..(98): n is a, c, g, or t
  misc_feature (104)..(104): n is a, c, g, or t
  misc_feature (106)..(106): n is a, c, g, or t
  misc_feature (112)..(112): n is a, c, g, or t
  misc_feature (150)..(150): n is a, c, g, or t
  misc_feature (171)..(171): n is a, c, g, or t
  misc_feature (176)..(176): n is a, c, g, or t
  misc_feature (189)..(189): n is a, c, g, or t
  misc_feature (192)..(192): n is a, c, g, or t
  misc_feature (202)..(203): n is a, c, g, or t
  misc_feature (212)..(212): n is a, c, g, or t
  misc_feature (217)..(217): n is a, c, g, or t
  misc_feature (221)..(221): n is a, c, g, or t
  misc_feature (240)..(240): n is a, c, g, or t
  misc_feature (245)..(246): n is a, c, g, or t
  misc_feature (262)..(262): n is a, c, g, or t
  misc_feature (271)..(271): n is a, c, g, or t
  misc_feature (362)..(362): n is a, c, g, or t
  misc_feature (438)..(438): n is a, c, g, or t
  misc_feature (461)..(461): n is a, c, g, or t
  misc_feature (644)..(644): n is a, c, g, or t
  misc_feature (648)..(648): n is a, c, g, or t
  misc_feature (659)..(659): n is a, c, g, or t
  misc_feature (668)..(668): n is a, c, g, or t
  misc_feature (708)..(708): n is a, c, g, or t
  misc_feature (725)..(725): n is a, c, g, or t
  misc_feature (747)..(747): n is a, c, g, or t
  misc_feature (810)..(810): n is a, c, g, or t
  misc_feature (835)..(835): n is a, c, g, or t
ncttcccccccccctttgttcctccccacgctccctgcctcccctcctgtccctgcggctaatcntgncagtccttggggttgtcgaggcncccttnngcggcnantggctncttggttctccctgccttggctggtgcccccgcccggncccttgccgggcccagtcccntgccntccttgggcctcnggngcccgacagnngggaatggntgtgngccncggctttcctccctgtccngccgnncttgcgggttatcgtncagcctgcnccccgcctctttcccccgcccccccccctcccgccctcccctccccgcctcccgcgtcctccggctcccccccccctgtcgtctggccgcnccgggccgtctttcgcgtctgccgcctgctgccccccccggcccgcctggccccccctgccctcggcccccctccncccggcctcccttggccccggcngcccccccggggccctgccccttgcctggctccccacttccggccctggggcagacctggtctggctctgcggccttccccccctctggctctctggctcctccgctcttccttgccgcttttccctgccgccccccgccggttggctccgggcctggggtgcggctccccttggggcttcanaaancaccatagtancacaatctnttgctggccttgggcattggtctgattcaccacgtggatnacagaactggggttgtnctgagaggctgagagggctgtnccttcgctacccttgtccctcctcttcctcttccttacgttctggctcccctggcactgtttntagaataaatgccctgcaggctgcnctcgttcagcgacgttcccaggcccgatccctctt

SEQ ID NO: 666040 - DNA, 671 bp, Homo sapiens
tgaagggttgtttaaaattcttcccaccaaaatgcttaaacccccttacggactccgtgattgccaaggctctcatccttcgtaaacagtagttatgccttagaccccattgtaagtgggcaccttgatgtttttctaccttagtggcacaagcttacaagatgcgttgcaggtcctaacctgttatccgtggctatgaaatggtcccagggtagtgaagctctgtaaagcctataaaagcaatttctgacaaaacatgtacagtaatatgagtgaggggaactaaaatgaagcataaaatctaccacttactattcagatggctcacttaaagattataagatcttgatccatttttaaaaatccaaaatggaagttgtagacattatctgtagtttatgcacaccaataaattagaaagccaatgtagacacgcataaccaaagaaaatgccttgggtctacataacagttgaataaatgtaaagttgctttttatttattgaaatttgtgcatgtctctttatgcttccctgatttactgattttttaaaaactaaccaactgcctgctttgatagttcagagaagagagctttcgttgtaatattagatttatgtttactggttgacatataagcggtgaaataaatagacttacctaaaaaaaaaa

SEQ ID NO: 666041 - DNA, 1676 bp, Homo sapiens
  misc_feature (636)..(636): n is a, c, g, or t
  misc_feature (939)..(939): n is a, c, g, or t
  misc_feature (1215)..(1215): n is a, c, g, or t
atgctccccccgcgccatattttgtgtggtgccttcggtgtgaagagtaatgcgttctgtgcttgtctcccctcgatatacatccaccggcctcgtgggtgttttgcctccctcgccgctataggtttgaaggtgggagacgctgggctggttgtttgtgtgtagttgtgtccgcctcctgctgggggggcgtcccactccatattgtgtacgaaggggctttttcttcttagttgggagggccgctgcccccaactgtggtaagctcgccctccctgtgttttggtaagacccctttgttagaggttggttggggcgcccaccacattcaaatggggggccgcccaactgtatgcacaaaagtgtgccagttgttgttgttgaaaagttgatagatcatttagtatagttgagccgtgttggtctccctgtccccgctgttgcccccaaaaaagggggggagaattcttcgaccccccaccccccacacacactggggggttgttgttaaaaagggaaggaaccccccgcgtcgtgtgtcgaaagaccccccccctctggtgggaaggccttcgtggcctgtatatgtgccactggtcgtcggggttgtcttcgggcctcgtgttttgggggcgnctttctattggagcccacgcgtcggaatagctcgccacgccgctttctcttcgcggaaaatgtgaagaatatattatcttggcgaagattcttgttgtttataaaagaaacatcacactccttcgtgggggggccacatcccgcgcgtctcgcgaaagttgggtcctcttcccctcatacccgcgagaaaaattgtggagaacacacgcggagtgttatcccccacgtcttatgttgatagaccgcgacaaaaggtgagatggcgctgtttctcacactggacgcaccacacccgcttttggnggtctctcctgtgttgacacacaggggagagagtcttgtcctctccctctactgaagccacatcctcacagggagaactctattgtggggctctacacacacactggagattaatggagaaagagagcggagactgttttgtgtataggtgttataaaaaaagagagagatatttgtgtcccacacctctggacgacacccacgggccacatatgtgacgtgtgagggcatagatatgtgtgatattgacaccactcgggtgtgataataagagtntgaatatctcttggggaccacacaagagatattttaataagaaaatttgttataaacacattctgagaaataagagaagctctaaagtgtttaatcacaccctctcttttgtttctccactcgagaatttctctatacaagagagatgtataagctcttaaatagctcgtgtaattctatttctctatcattggtttcttgaaaaatatcctcgcacttttttggtgaatcacatgttcacaccacaacactcacattatatgagaacattataatctagagattcccacatcggcccacatataaaatggcctttataaagaaataataataataaaatttttaaagatagcttgagtaagaccaattggcaggtaatatttcagtacctaaattaagactctgacattggattgtgaattataatgaaaagccccctttccttactaaaaaccacaaca

SEQ ID NO: 666042 - DNA, 169 bp, Homo sapiens
tcttagatcgaagctcaatttagatgctaagaaatgcctaaacatatctgtagctaaactctgagggaaaccatttttttcttttgagacagagtctcgctgtgtcgccaaagctggagtgcagtggcgcaatctcggctcactgcaacctctgcctcccaggttcaag

SEQ ID NO: 666043 - DNA, 884 bp, Homo sapiens
taaggagggggggggaaaggggggggggcgcagagggagaaaacaagttccagaaaaggtgatcacagaaaataccgtggaagtgcccaagagagttcgagccaagaaggcgccgaggctgtgacaccgtggtgggcgactaggtggagaacttctcgagccgtggatgagtgcgagaacgaaaattgtgggctatatcagcgcgcgcgcgaaaaggagaggggggagactcgggtgtagtgggcgcccacagccctcggcgtcacgcgcacaggtcccctcttctccctctggcgcgggagagggtgggtgttaacaactctcacaacacccccgaagagagacggggtgtgtgatacaagtgtggggtctcacagaactgtgtggcatatacacgcgtcgtgtgtggggacacagtgggtcgctgcgcgagagggggtgcgcatctcgcgcggacagtgagcggagggtgtgggtgaaccccccaaagggggctatcactgtggaggacagagaacacctgtgggagtcccctctgtgaggaaatagacggggcgcaccgggggatatctcccaacagagtgtcctctgtggcacacgtgtgggcgagtaacaaacatagtgggagagggggtatagggggggggccatatttattataacacaagagacacacacacagagtctcgcactacacaaataatcgaggggaaaaaaaaaaacatctccaagaagaacctatgacgtggtgtccaaaagcgtgggcagagcgagagaataaagcccaatacacacaccacacgacggggtgtgtgcccgcgccacaagtgtgtgggaccaccacgtgggccatctacaattatatactcaccagggaaaactgg

SEQ ID NO: 666044 - DNA, 223 bp, Homo sapiens
atagttttgatttatgtggtttatatacaataagatattttgagagagaaagagactacattcatatactttttactataatacagtactataattgttctattttattattgttaaaataaaaattaaactttatcacaggtacatacatataggaaaaaacatagcacatataggaaaaaagagtgtatatagggttcagtactatctgcagttactgggg

SEQ ID NO: 666045 - DNA, 736 bp, Homo sapiens
actgtatacgcaagcgtgggtcaacggaagcagtcgaagttaaacggctgactcaggtactgtaagggtttttacttcactcgggacaactcttaaatttggcccattgagtaatatcaaggctagttttggagagactggtcgtttaatagtaagaagccagtgttgtcagttgctagaataattcctatgttcttagagagtaccgttggttatattccacagcggagtaattaggttgtaataccgttgccacgctcaggacagtcagtcagcgtgcgttctagatgaatgggaagtcgcaaccctgcgccctccatgttttgtggttcctggggcttcaattcaagtctggtcaagtctgccatggctggggagttcatgtccatgggaacacgatacatcagattgtagtcatcactgatgtctgcacgtcatcgccaaagactcgtagtactacttgacttagctcagagcatagcttagggcaggctgcctaacaacatggcattcagacagataaagctgaaacaagcttcaagttgcttcatttgtatgcagagactagagaacatggtagataattatatattatacgcctttgtgtaagttcatgtaatacgtgaagcagtctttgtctcaaaagagtatgcccttagctgagaaaggatatgtgaacggtacatttattgttggggagagtggattgtttacatcatgtcttgaccttttgtcc

SEQ ID NO: 666046 - DNA, 834 bp, Homo sapiens
gtcttcttgccagcctcaaggacggagtctgagcctccatggtgcaccacacagggaggacagtggacctgttctccgtggtcatggcccagcagaggggaagggcagttcagtgagtgtaggcaaaagaaagagcgatcagactcttactgtgtctatgtagaaaggaaagacataagagactccatttgaaaaaggcctgtactttcaacaatttctttgctgagatgtgttaatctgtagcttgccccagtcactttgaacaaaccactttgacccaacctgaagctcacaaaagcatgtgtgtatgaaatcaaggtttaagggatctagggctgtgcaggacgtgccttgttaacaagttgtttccaagcagtatacttggtaaaagtcatcgccattctctattctcaataaaccagggcacaatacactgtggaaagcctcagggagctctgcccttgaaagcgccgtatgtccaaggtttctccccatgtgatagtctgaaaagtggcctcgtgggaggagaaagacctgaccatccccgagccgacaccagtaaagggtctgtgctgaggtggattagtcaaagaggaaatctcttgcagttgagagagaggacgcggtgtctctgctgcctggactgatgttcggttaaaccgttgtacttgtcatctgaatgggggaaaacgctatgtggagtggaccgttggggatgggctgtttttacctggagtggggggaaataattgtaaacgtggtgacttctgatctggtaagtgcagggggaaccataaggcgaattggaaaaaaaaagggaaggggttgggccgg

SEQ ID NO: 666047 - DNA, 191 bp, Homo sapiens
  misc_feature (16)..(16): n is a, c, g, or t
  misc_feature (36)..(36): n is a, c, g, or t
gctccccttacagcangctggctgtggcacggtgtnggcgacggtattggctggtggatggcggtggtcaatccggtgccggtgtcgctttgccgcgccatgggcgccgatatcgtcatcgcggtcgatctgcagcatgacgcgcacctgatgcagcaggatctgttctcgatacgtatcgaggaagaaag

SEQ ID NO: 666048 - DNA, 229 bp, Homo sapiens
agatcatgactatggcatcgctagccttcagcaagcttttctagatcgacacaggtttctccacgttgaagctatagcttccaggtcacggcgcagtgtaggttgggtttgattaagggaatacctaaagacctattgggccattatttcctgataacgcttctggtattcgtcactgagcagaacttgccttatgacgaataccagaagcgttatcaggaaataatgg

SEQ ID NO: 666049 - DNA, 265 bp, Homo sapiens
gtttatcttccgcagtcattagtctagcactatccaaactagcaatctatctgtctatggcagccagtctgctagaagacggcaccacaatacctatcctccctattcccctaactgatattaataatcctcttatcaatcattagcaaggtaacttcaatgtcattaagtattaacattctaaatatgtaaagctatagaagaaaggtcctgcctattctatttgaccctcccaaatcattctagtctggtttaccaaacagaa

SEQ ID NO: 666050 - DNA, 547 bp, Homo sapiens
  misc_feature (32)..(32): n is a, c, g, or t
  misc_feature (130)..(130): n is a, c, g, or t
  misc_feature (192)..(192): n is a, c, g, or t
  misc_feature (195)..(195): n is a, c, g, or t
  misc_feature (197)..(197): n is a, c, g, or t
  misc_feature (210)..(210): n is a, c, g, or t
  misc_feature (294)..(294): n is a, c, g, or t
  misc_feature (297)..(298): n is a, c, g, or t
  misc_feature (335)..(335): n is a, c, g, or t
  misc_feature (338)..(338): n is a, c, g, or t
  misc_feature (358)..(358): n is a, c, g, or t
  misc_feature (426)..(426): n is a, c, g, or t
  misc_feature (466)..(466): n is a, c, g, or t
  misc_feature (479)..(479): n is a, c, g, or t
  misc_feature (485)..(485): n is a, c, g, or t
  misc_feature (497)..(497): n is a, c, g, or t
  misc_feature (517)..(517): n is a, c, g, or t
  misc_feature (519)..(519): n is a, c, g, or t
  misc_feature (533)..(533): n is a, c, g, or t
  misc_feature (545)..(545): n is a, c, g, or t
ttgggggaaagaatgaagaggagtagagaatntataattcattaacaatgtacctttcctggaagggtggacagcaagaataaggacaagcaaaaatcatcccctatttaaaaaaaaaaaaaaaaaagtnaccagcaagttgttccgggtgggaggggggagcagaataaaaaaaaatctgcaataatttcnaantntttttcaataaanaagcttgggaaggggttcctgcaagtttcatgagggagggacaacttccaggtagttttggggaagggtataagggcctatgcnggnnggccttttatcccaaaaaagccaagaggaggtttacnggnagcccccccaaacttctggntgtaacctgccttgtaacttttttcaaaagcagccgctgggagcccaccaggttgttatgaccacccnggaacaaaacaacaaggggcaacgggtggtttttcttgtnattcggcactttnttttancttttaaaaggntacataaaaaaaaacttcanantattacccacagcntctccaagtttntt

SEQ ID NO: 666051 - DNA, 462 bp, Homo sapiens
aactcacacatgccccccgtgtcccgcaccttatttttgggggggccgtcagtttttttttcccccccaaaaccaagggccccctttttattttccgggccccttaggttccatgggtggtggtgggcgttaacccccaaaacccttaggttaagttttatttggtcgtgggcggggtgggggtgcattattcccaaacaaaaccccggggggggccgttccacagcccgttccgtttggttagggtccttccccttcttcccccgggctgggttaattgcaagggggtcaagtgcaaggttttccccaaagcccttcccgcccccctttagaaaacccttttccaaacccaaggggagccccggggtttttcggttggccgaggatgttttggccgttccccgttttcattctttcccgggcccccgcctgggaattaagccccccccccttcccttggga

SEQ ID NO: 666052 - DNA, 150 bp, Homo sapiens
tgtgttgagttcttacgacttctaatattgcaacagaaaagctgcgtataaggatttaacactggcatattagagctcggagtacacatgggccacataagcgaattcccttccggagcgcacacgaggtgaccgtgtatgcaattacgc

SEQ ID NO: 666053 - DNA, 192 bp, Homo sapiens
tggaccttctgcagacaacagcaatcacataaaagaagggaccaaatgtcatgcatcacagacatcaagacaacagaaacagcaggccacatatatctacattaaacactgaagcaaataaactgtaagtgctctatcctcctttcaagacaacccagataagtggggaaacctgctttagaaaccctgccc

SEQ ID NO: 666054 - DNA, 195 bp, Homo sapiens
ccataataagaagtggacactacagtattagcttcatcgtgtgggagaaaaaaccttagtataatatatggatgcagacgacttgatgaagatcttaatttgttttggtttaaaatagtgtttccttttttttttttttttttggaaattgtccaaaatttctatccctacggataggaggttaattttcctgtg

SEQ ID NO: 666055 - DNA, 177 bp, Homo sapiens
gacattcatcatgaaggtatccagagctgattcgtcaggcaacaggtagccggacctacaacatgatccagtactatcagaatgacatccctactgaggaggggaccattcgagggcctctgccccatgtgcccttcaagctgccccacaatcatggagccctgcgacctacccgcc

SEQ ID NO: 666056 - DNA, 205 bp, Homo sapiens
tgcacctggaggcccacttgaaacggtacttacaaccgttccgggctccgaagaagttcttccctctacaccagtaacacgactggcctaccgcgggaccgaggccgaagtggttgtggtacgcacaacaaggacacggcatacctggggtctcggggaggaggtcggggacagggtgggggaaggggggtcgggtaggtatccg

SEQ ID NO: 666057 - DNA, 667 bp, Homo sapiens
gcccccgaacatgccggggtttacgcaaagatttcatgactaagaacccataagcaaatggtacaaaaacaaagataagtaggtggaacttaattaaaatagagagcttctgcacaacaaaaggaacagtcagcagagtaaacagtcaacccacagagtgggagaaaatctccacaatctatacaactgaaaaaggactaatatctagaatatataaggaactcaaattagcaagaaaaaaaatcccatcaaaaggtgggccaaggacatgaatagacaattctcaaaagaagatatacaaatggccaacaaacatatgaaaaaatgctcaacatcactaatgatcagggaaatgcaaatcaaaaccacaatgcaataccaccttactcccgcaagaataaaaaaataatagatgttggcatggatgcagtgaaaagggaatactttcacactgctggtgggaatgtaaactagtacaaccactgtggaaaacagtgtgaagattccttaaaaaactcaaaagtagaactaccatttatttgatccagcaaaaccactactgggtatctacccagaggaaaagaagtcattatatgaaaaggacatttgtacacacatgttgatagcaaaacaacttgcaatttcaacaatatggaaccagcctaaa

SEQ ID NO: 666058 - DNA, 246 bp, Homo sapiens
ctataatggcagtggcatgaacatggctcactgtaactctacatctcgggttcaagtgattctcctgcctcagcctcctgagtaactgggattacacgcacccgccaccatgcctggctaactttggtatttttagtagggatggggtttcaccatgttgactaggctggtctcgaactcctgacctcaagtgatctgcccacctctgccattaaaggagctgttcatgccactgccattaaagga

SEQ ID NO: 666059 - DNA, 481 bp, Homo sapiens
  misc_feature (405)..(405): n is a, c, g, or t
tcgggcggaccccaagggccttagccaaagcctaatccagaacaaagctaactctcttcaactctatgaaagctgagagaggtgtggaagctgcagaagaaaagttgaagctagcagaggttggttcatgaggtttaaggaaagaagccatttccataacataaaagcacaaggtgaagcagcaagtgctgatgtagaagctgcagcaagttatccagaagctttagctaagatcattgacgaaggtggctacactaaacaacagattttcaatgtagatgaaacagccttctattggaagaagatgccatctagaactttcatagctagagaggagaagtcagtgcctggcttcaaagcttcaaaggacaggctgactctcttgttaggggctaatgcagctgngtgactttaagttgaagccaatgcttatttaccattctgaaaatcctagggccccttggggcttaagggaccttgg

SEQ ID NO: 666060 - DNA, 339 bp, Homo sapiens
gtctctttaggttgaatattgtactgttccgtgcccttctgtattcttgtctctttaggttgaatattgtactgttccgtgcccttctgtatttttgtctctttaggttgaatattgtactgttccgtgcccttctgtatttttgtctctttaggttgaatattgtactgttccgtgcccttctgtatttttgtctctttaggttgaatattgtactgttccgtgcccttctgtatttttgtctctttaggttgaatattgtactgttccgtgcccttctgtatttttgtctctttaggttgaatattgtactgttccgtgcccttctgtcgtcttctc

SEQ ID NO: 666061 - DNA, 138 bp, Homo sapiens
cagaggcgcgcagcttacgaagacctggagattgtgctctgaggacgccccatgtaagtggggacgggtgctgcttctccacctcccccaaacctgcttctgtgccctgatgcgtatacccagactcagagaccgtga

SEQ ID NO: 666062 - DNA, 400 bp, Homo sapiens
agtacgaaggttgtgtgtcacaggttcctcatggaaacacgtgcgatgatcatataaccatagagaggatacagtcagtatgaccaccaaacccaggagccatatataaaaatactgataacatataactatataaaaacattttagccgggtgtggtggctcacacctgtgattctcagcagacaatcagatcaggagatcacagaaggtcaaggaactactgagagcagcaggaatggcagagcagtgggggtcagcaggaagcttggagaaatctgcaaaatagtagcattacaaaggatcaaaagtcagtgaggttcaacaagaggtagggtgggataatgcacaaagacagagggaacacttccaggttcattctgtgaggtcagcacaccatga

SEQ ID NO: 666063 - DNA, 303 bp, Homo sapiens
ttaccggacgggcgtaagtttcgaaggggagggagcacgtgtcagctgtccccgagtgtgtattggtgcctggtcaacactgaatggaacaagtaggtgacctgctgttgctgcgtgcttcctcctcttcttcctcctcctcctcttccttttcttcttcctttcttcttcttctttctttttttttcttcttcttctctttttcttcccagcttcttcttttgatttagggtgggtatagtcagagctctctacctctcccccaggccttcctatgcctcacaaagcactgctccagaagaa

SEQ ID NO: 666064 - DNA, 119 bp, Homo sapiens
  misc_feature (31)..(31): n is a, c, g, or t
  misc_feature (89)..(89): n is a, c, g, or t
  misc_feature (115)..(115): n is a, c, g, or t
aataaacccaggtggtcctgctccagatttntgctctaaattgcagaattatgctgcttctcataaatttcacacacacacacacacanacacacacacacacacacacacatantgtg

SEQ ID NO: 666065 - DNA, 239 bp, Homo sapiens
aaaaaaatggggggggggttttttgggaaaaaaagggccccctcccccttttttttttttggggtcccgggctttaatttgggggttttggggggggggggggatttttttaagtgattttttttttttggaacgggaatttttttaagttttttggggttgccccgggaagggattttcccccttggggtttttgggggttttttggggaccatttatggggaattggccccccccca

SEQ ID NO: 666066 - DNA, 251 bp, Homo sapiens
cataaacccagcactgagacaggactcgcgatgcatgtgctgtttaagtgaatggactgcacccaagactaccaagtccagagcccaaggcacacgaagggcggcaaggcagaaacttttaggagcatctgttcaccgaggcgcagaaggcagccagcgcccagacgcttctgggtaacctaagtgaggcttctgcagacaacaaaagaggaagggtccctttgcaaggacagaccagccctcagcttcct

SEQ ID NO: 666067 - DNA, 211 bp, Homo sapiens
  misc_feature (87)..(87): n is a, c, g, or t
ttattattttatttttcatctttatttatcatggagattcctttcgctttattggaaaacgtaagacttgggtacatcaaataaaancaatttctggggggggaattcaatgaccacaatcaaaaaccacgttttcactgtctgggtcacagtagtaacccaaagaacatattcgcttagtcgccaaactcctcggtgtgtacatcattga

SEQ ID NO: 666068 - DNA, 132 bp, Homo sapiens
  misc_feature (69)..(70): n is a, c, g, or t
ggcaacccctgcgtggtcctctgttggcagccttctctcatcagagctaaaagagaactcaggtagggnnttaattgccaagttccagacttggggatgttctgacgaataattggtcctgaccattggggc

SEQ ID NO: 666069 - DNA, 191 bp, Homo sapiens
tagtaccatgctcctccccaggaaccccagctgacagacaggcagactcctcttcatccttccaagcaccacctcctccaggcagccctcctccagtgcccaccaacctcctccagcagccgtacagaccgcttgcttgtagcaacttgcattcaatcccttgcccaggaacttccatatgcgggtgtggc

SEQ ID NO: 666070 - DNA, 458 bp, Homo sapiens
gtaccagcgtgtcggcgcggtctgttcgccgacgatgctcttgacaatggcggccactgtgccacgtgcaaggttgaccaccgccgccgagtagttctgacggtagacgcggtagaccactggagacttgacgccggcggccgcggaattgtcattggaggtcaggctcagatcatcgttgcggcccgtgcctccggggccgttcttgccatacagggtgaaggcttgcagggagttcagatcgaatacgttggaaatgcctgtgctggcctgagtcggaacggtcgcggaagtggagggaccgtaggtctgaccgttgtaattgaacgagccctggtagacgacatttgcttgttcttccaggttgctgggttggtcgaggtccaattggttccagcctgcggaggcgacgccggcggatccggtcatcagcaaggcggcggaaagtgaggcgagtt

SEQ ID NO: 666071 - DNA, 883 bp, Homo sapiens
gctgagagtgacccccacgtcagcggagcctctcatgggaggtgttcctgacagccggctggaggtggagcgagagcgtgagctgccgctccagcaccacacagctgtcatcacgccgctccaagtccatggcacgagctgaaactgttggagaagattcctgagaatgccgaggccacggtggtccttgtttggctgcgtggagttgcctctcccgtcccaccatggtcttgtgtgcggctccgggaggctgtggagttggacgcagtgttggaggtgccggtgcctgtgcgtttcctcttcctgctgcgtgggcccgagtatgtgcctagacatggaactacgcaacgagatcggcgcgctccgtctccaccctccagtgtcagacagagtcgattcctacgaggcgagcgctaccgtggtcatgacgtaagctgggaggacctgctgaggctggtcgatctaaggccttcctggactgcgagcgtggtgcgtgtcggcttcagcaagtgctagggcgaggagctgcgtgcgcgtctgtggcccacttccagtcgccagatgctcgagacgcgagaggagcagggcggtggtacctacaggggctgggctggagcccaaatctgcccgcgatagggcgctcctgcggatggtagacggcggcaggggggccgctgaatgatggattcgcccttcggcggacggggcggcctttgggggggttgatccgagatgtgcggatgccgtatccccgataacgtggagtgatttccgagaggccttgggcctcagtgctggccgcgtcatcctcctcggttttaggcctgcggtcttgggggctctctgtgggcgaccccgtttcggcgggggtcgcgggggtcgc

SEQ ID NO: 666072 - DNA, 1221 bp, Homo sapiens
ctgtctcactcatttacacctaatgcacccaagctatctataataccttaacgcatgtactatccccttatgagcgggcgcgagggatgatagggctgtcggcatcgtagagtagtgtaaaaagtgccacatagactcacatctatcgtttacctacgaaaggcatatcctactccgccttttatccccaatactgagttagttagtctgataaccagtcaacccgtacgtcagtccaacgcaattatcgccatgcgtcggtacgccaatagacacgtgctaactacttactctgctagggcaatgcttacttcgattgcaatccatagattgtgaatgcagccgacccgtatctaattgagtccaagcgagttagccgttcccatctacatattatccatctgtcagcatatgctgacatttgcttagctgatctacttcccttacgacaattcgcttgctccgccatctaatgcgcaagggcccgaacggtggtggccacaacttacttaggtagagcccatgcgtagcttggcagcaaacagaccaccgatgaacacacacattgaaacagaaaaaacgcgcccggggcttccttatccctgaaggaagattatcccaccataacattatagaaggggcccacgcgccaattgtgtttaggggcccgcaataagcccctgggttatgttcatctcgtgaccctaactgtgggggtgtaacgcgctctatgaaggtggggaaaacgggtatacaacttataggacctacactgggcaagcgagaggtccgcgaagcggtttatggtaacgtacagcagtcccgtgggaatctcggtggcaccaaccttacggatctaccctatgggctgaatactctaaagaaaaaaagcagaagaactcttatggtactccgaggaatagttcgaaccctcaaactctcggacaccaaggcttgagcctttacttaggaagcaattttaaacccccctccaagaggggctccacattgtttcaaacgttgcttacaccgagggtacattacgtggtggctcacaaccaagttaggtccgcaatatagacgtagcttggcattgtagaaacgcactccggccacacggggacgacatgagacttcaccgcaaccccctgctcacttccacaggacatcagagtctaacaaaaaggacactctcggatagagcgacaccataactacgag

SEQ ID NO: 666073 - DNA, 442 bp, Homo sapiens
ggagagagagagagaatgtagctgcgtggggacaatccatcgtggagtgttctctcagccttacggtctggacacggagacttgcgcggcgagatgctccagcgatgctgggctgacttctgctacctggggcacggctatctctgactctcccgcacagggagacatctccgcagcgccaagccacagcgggctcagcggcgccagcaggctgacactaccatatagacactggcagccacagcacctggcgcgctcagcggcacgcacggctgctgcgcttcatgacgaccaagcgatccctgcggcgccgcgggcgctgcggcgcctggcggcccattctcatggccatccatatctgaatctctccaacctgcaacacgcgcatccaagcagccacgctcacacacaaccgagcgtctctctcctccgcatctccctc

SEQ ID NO: 666074 - DNA, 771 bp, Homo sapiens
gcacagactcagagagaacccaccatggggctgtctcctgccgacaagaccaaggtcaaggcctgactggggttaggtcggtgcgcacgctggcgagtatggtgcggacgccctgtgagaggatgttcctgtccttccccagcacaagacctacttcccgtcacttcgacctgaggcgacgggctcatgcccaggttaagtggctcgactggcgcagtaaggtggcacagagcaggctgctgatgctaacgccagtgaagggcaccgtggcacgacgatgccctaactgcagctgtccaggtccctgagccgaactgcacggcgtcactaagcttcgggtggacccggtcaacttctaatgctcctaagccactgactgctggtgaccctgggcgccgcctccccgccgagttcacccctgcggtgcacgccttccctggacagagttcctgggttctgtgagcaccgtgcttgatctccgaaatatcgttaacgctggagccgtcgcgtggctatgcttcgttgctgccttttgggtcgtccgccctgtgggcctgtatcccaccttggccattgcgatgactgtaacctccggcgtggatcgtgtggtccatacacagttcttgatgttggcgactggtaacgaaggggggtattggaccatcaccaccaaatgcccatccgtgcagtcatggacctgggctggcccgggagcctgactgacttagctcatgaacatctccaccgagcgcggtaaatggtttcagcacc

SEQ ID NO: 666075 - DNA, 370 bp, Homo sapiens
cttacataacctgcaaaaacatgagagctatacacaaagtataagacttgaagatggctcagatcttaaacgctctcctcataggcaatagatatatagacccaggatgcagacattattttgtaaataatttcctttggaagctggatgggacagacaaattacaggaaggtgagagatggaactgcacaggaaaaaagtttgtctttgtcactttaatcttatcattactagagaatatttatgaatattttagaataatatatttttaagcccaaatctcaccaaatgttttttctaaaacaaatactttttgttgttgtttgtttttgttactgtgtctctcaaaaaaatacagaagaataatgta

SEQ ID NO: 666076 - DNA, 95 bp, Homo sapiens
tcctcggcggcggaaggcgaacagcgaggaaccctaaccctaacaaccagtagatccgatctgcaaggcctgcgacgatggcggcttcccttcgc

SEQ ID NO: 666077 - DNA, 726 bp, Homo sapiens
ggtcgagacgcgcagcgcgcagtccggtgggggccttgtcttacccctctctgcgcgcccgcgccccctttcgcgtcgcaaccagaagcccagtgcggtgcctggagccggacccgcgcccgcgccgctcccgggacctgcgatcccgtgccgcccacgatgattagcgcgagcgagagggctcctgcgcgtcctcttgtcttcctgtcttggactttacggccacatggacctatatgggctgaatagcttccctggcctgcaacgccccaaaatggattctgcgaggatgacaatgtttgcgtgtgtgccagcctggcttggctgggtcccctttgtgaccagtgcgtgacctctccctggttgccttcactggactcttgtggctgaaccctggtgcagtgcattttgcagccgactggcttggtgaccggggatgctctgtgatagagatgttcgggcctgctcctcggccccctgttgccaacaacgggacctgcgtgagcctggacgatggcctctatgaatgctcctgtgcccccgggtactcgggaaaggactgtcagaaaaaggacgggcccttgtgtgatcaacggctccccctgccagcacggaggcaccttgcgtggatgatgagggccgggcctcccatgcctcctgcctgtgcccccctggcttctcaggcaatttctgcgagatcgtggacaacagctgcacccccaagca

SEQ ID NO: 666078 - DNA, 184 bp, Homo sapiens
aggtctgcagaaacggctgctcgactctatttcgacgcgcggacgctcgaggaggagcaggtggtcaacatcctctacctggccctcggcacgctgaaatgggtcgatccgaacaacgcggcgaacatccgtcacgcgccgctgatcctggtgccggtggcgctggagcgcggcaacgccgccg

SEQ ID NO: 666079 - DNA, 121 bp, Homo sapiens
ttgtcacgctcggcccgtgttcaggtgggggctgccccgtgggccggcttcctgggacccggcgctctcagcagtgaccccgataaatgaaccacgcaagatcattaccacggtgctataa

SEQ ID NO: 666080 - DNA, 193 bp, Homo sapiens
tccgaggtgatccacccacctcggcctcccaaagtcctgggattacaggagtgagcactgctcccagcttacagcctttttttaagacccaatatgtcagtccagctttttttgaatatagcaagaactagcacataatacatgcaaggagaaaaactttgtaaactaaagtgaatgcctctggatagggaga

SEQ ID NO: 666081 - DNA, 373 bp, Homo sapiens
aaaaaggccagtgtggtaacctttcctgtttaccttaacttcacccgggcagacctcattttccccgtgggctttgaaaatgctacaaaagaggatccttccaggtttttcgaacggggggttgcagttttgtgcccaaagtaaacttttttaactgcccccttttgtaaaaatgaaaggtgggatttaacctttattccttttttaaaaatttggaaggtttgagcctgttaaaaaaaaatggttggttttaggttggaggaaacttaaaggaattttacggttgggagtggtggaaattggaaggaaacccggagggattttggaaggccaaaggggggggtccttttaggaaataaaacccttagcatta

SEQ ID NO: 666082 - DNA, 1160 bp, Homo sapiens
tgggagggggtgtacattttatgggaaaccttaaatacgtgtctcagaatcaatcagggctctgggtgcagcctacacagaaaaatgaagcttttggggttaggggcaaggagagagacagtacagaggacaaagacccctcacgatgaagtgctcttcagccagcttatattcagcttttggccacagctttcttcaagggggtctcccaccatattaaaaggccgtgtccggggagagtggctcaatattcaccgtgccaaaatcgtgcgtggaactccttggagtggttctcctctcgaggggctaccagttttcccacattattgacgcgtggtgaaagacctcagaaaccgtggaatggggtgtgagaccaaaaaagcggcgtgatattttcgccggtgcacgcggagacagcggctcaacctgtggtcttccttcgagaaagagttcatccaatacccgagggagtggccaagtgaatatccgtgggagggcattgggtagatccgtgcgaggactctttgtgcaccccaagggcgcaacatcgtaaggcctcacggccaacaaggtgtggagatccaggatacagagaagggggagtctagaaggatccacagtgggataggatgcccagtctcacgaaagtgggcaccgcgaacagtacaggggggtacgcactccaagtggggcaaaccgtaggtaagcacggcgcgccggagacagaccaacgtcatcacgcagtgaacactagataagccgggaacaacgagggtgaaagaaccccttcatgggcacgtggaaacacacaccaccggaataaaacccaaggtaaatgggacacggtaaggttgcaaaacccccacggaaaagaggatagcgaccaccaaagggcacaaaccctctgagaaccacctggtgggaacgcaaaaacgtgtctacaccacaacaaggaaacacatctggacactagtgggccagacaattatacgagccagcgcgcccatcaacgaccccgggccaagccacagggggacacagagccaaacacgggcgccccaaagggggctataagggcgagcaccaacagactcaacaggaaaaaaaaccgagacaagactgcacaccacagaaaacgaaccaaggtaaacacaaaggac

SEQ ID NO: 666083 - DNA, 158 bp, Homo sapiens
ggtccacatggcggtggtagacaggaggccggagtgaagtacgcaaagaggacgagaatggcgattacaccttcggccaggtgacaacacttttttagagaacaccccggaggcggtcgcacaggcggtgaaaacgcgctttgaactgtggacgggcg

SEQ ID NO: 666084 - DNA, 717 bp, Homo sapiens
  misc_feature (377)..(377): n is a, c, g, or t
gcttcagtctccacccggactacgccatggtgggggtatgtgggtcgggtggccgctgctccgtgcctccggggcctttgcgggtgactcaccgccttcagcgtcgctgtccccagttcagttcttattgcgggtccgctccgtcgggaggctccatcctgtcatgggatcgtatgcggggcaaagcatctccttctgccagaagcaggggccctgacaacgggctgcatcgatggcggtcattggcgcagtgggtggacgttcagcttcgattgagggagtaccaccagattctaaatgcccttggaagtgcagagggcacgggagactcagacttggttgtaggaggtggtccagcatttgggtgagtagcacangtaaggagctatgtgctatgggatgggtgacagaaggtgtaggtgtagaggccagaaagtactgtgattctggtgcaccgaatcgagaatttgcctgttggtcgctgagacttggggctagaatcatgtaatgtcatttgggagcaacctgattgtatgaaacgagcgtcccatcaaaaggccaattcagatgtatgctcccatttcatgctgaggggcccagagttgcatggcaatggggtggtagagccaggagaatgttggtggactggtatccacgggttgtcggatctgctagctgcctatgccaagggtggcagagatgggcttaatggaggag

SEQ ID NO: 666085 - DNA, 872 bp, Homo sapiens
ggagacgcgcggggggaagatggcggctgggttcaaaaccgtgaacctctgagtatacaggagattctgaaaagaatgcgtcctgatggaaagagacttgtgggtgaatcagaaccacaatgtcaacatcggttcaattagcaccgcaaggatggtccgtgcttaaagtgaagtggggaaatactacagtaattctgtggcggtcacaacgcagatttggcagcaccatcaaagattgcccttgataaaggaatacgtgtgtcctaattgtgtgtatctaccacccttgtgttcatcgagatcgggtctgacctcctgagacagaggcccaagttgactagccagttcatggcagatgtctttgcaaacttcaccagatatttcagacaagaggaacttatgcacttctccagggaaagctggtcgggtctaatactgtgatctcattggcctcgatacgagtggacaaccattttgatggctgcaacatttgttgaaagcggtttacaaaacttgtcccggttgcctgaagttacctacttaactgaagacacttgtttcagcaaaaggtactttaaaccgaaggacgacgttattgtgactaatcagaactcatccagttggcacttcctttggcggggttgctgaccctttgctaataggttgacccctactgcggaggggaactcttggagacgggaccttaacaatagtatggctgagggaggcaactctgtggttttccaaacagggttggtcggcaattagtctaaaatttgttggtaagctcgggggcgctaaataggggcgagtgacatgggatatttaccacatagaagagttagcacacaggtcccgtaaggaggagggga

SEQ ID NO: 666086 - DNA, 291 bp, Homo sapiens
aaaaatagctcggaccgtgatgctcccaggtgtaacatacaggtgacaagacgtagcgtacagtagacttgaccatataacacgccaccaataaagacacttcccagacatgaacaaacaggaacatgaggtcggacagatgaaagtcgcagggagatgtaagcagtggcctctccagcataacccctcctgtctgcacctgggcacgcgacccgctgaaggcagcagagagaccccagttgtgggcgaggcgtggaccgtgcagggtccaccgtgggatgccatcaggga

SEQ ID NO: 666087 - DNA, 849 bp, Homo sapiens
  misc_feature (38)..(38): n is a, c, g, or t
  misc_feature (632)..(632): n is a, c, g, or t
gtagaccttgaaaaacaaagaaaatgagcatctgtgtnatattgattttttctaccaattttatatagactttatgttttagagcaatcttaggttcctagcaaaattgagaagaaagtatagatatatcttgtataccatctccccccacatatgcataacctacctctcctgttatcaacatcccccaccaaagaggtacatttgttaaaactgatgaacttacattggcacatcataatcatccaaagttcatagtttaccttagggttcactcttagctctgtattctatgggttgtgataaatggaaaatgacatgtacctgccactatggtatcatacagagtagtttcactgccctaaaaatcttctgtgctgcacctatttatccctgtgtctccccaagcccagccaaccactgatctctttaactgtctttatagtttgtcttttcctgaatgtcatatagttggaatcatacaatgtgtggccttttcagaatggctattttgcttagtgatatccatttgcttagaaatgtctatccaatagacatttcttccatgtcttttcgtgttttgatagtggggttttttctttttagcactgaatattattccattgcctgtnacacagtttactttttcattcacctactgaaaaacatcttggctgcctccaagtgctggcaattataaacttgccaaccatgctataaacaacaatgtgaaggtttttgggcagatatagttttcactcctttgggtaaataccaaggagctcaactgtatggtaagagtatgtttagttttttaagaaactgccaaactgtcttccaaagtagctg

SEQ ID NO: 666088 - DNA, 598 bp, Homo sapiens
aatccaatccaaggttcccaaatcagcccgcacatccagacttttctctctcctccggctttattaaaaaatccgctcgagctctcgcctttacttccgaaaaagaaaaggggaactcgcagaacccgaaaggtcctctaagccgtcgagttgccggtagggagaagaggtcggactatagtgaattggccagtcctcgtgaaactccctctagcgctaaatctctatcgcctccgtaaagccgaagccatgaagtagtatttcctccaccgaagcggtcgtgtcctagttcgacccttcctccgcgggaacggagcgagttttattctggttctaatgagctatctaagccgacgaggctcgaggattttggtgtaccttctttaagtggggtaagtaaatcggtaccttcgagggtaaggtccgatgagggtagtgccgggagtagtcttaatggtttgggtatacctagttcgtctctccctactaggggtaggaccgctaaccctaactttattcctccgcctcttactccgatcgagaatccgttatttccgataagtacggagaacccgttcttagaggagaagcctccttt

SEQ ID NO: 666089 - DNA, 352 bp, Homo sapiens
  misc_feature (52)..(54): n is a, c, g, or t
  misc_feature (56)..(56): n is a, c, g, or t
tttagtagagatggagtttcaccatgtgggccaggctggtctcgaactcccnnntnacctgtttgcccacttcggcctcccaaagtgttgggactaccaggtggatccatcacacccggccaacttttctttttttttttttttaggagacagggtcttgctctgttttccaggttggtctcaattcctgggcccaagcagttctcccacctgggcctgccaaggtgctagtattataggcgtgagccactgcgcccagccctttatagtttttttcttttttttgagatgaagtttccctctgtcaccattgcactccaacctgggtgacagagagagactccgtttaatt

SEQ ID NO: 666090 - DNA, 271 bp, Homo sapiens
agccggcgtggtgtcgcatgcctgcaatcccagctacttggtgatcctagaagcaggcgaatcactcgaacccaggaggcggaggttgcagtgtgctgagattgcaccattgcactccagcttgggcaacaagagcgaaactccatctcacataagaaaaaaaaaagaccaggcgtgggggcccacgcctgttaatccctaacactttggggagaccaaaggcgggtggatcgcaaagtcacggagataggagaccatctccactaaaaaa

SEQ ID NO: 666091 - DNA, 307 bp, Homo sapiens
acttttcttggataatcaggaggtgccccagtggtcacagtgtggcattccgagttggcgcggatggccgggtcaagatacggaccagcaggtgttagggctcaagacaccaccctcttcatcttatggggcccatgagcctgtccctgctacaggcgggtgcccgcaagcttttggcctcacagtctcttcgccggatgctgcccgtggacaagtttctgcccatcatgttcgaccaggaccccaactagcgattcataggacacttttgggccctggacctgggggccttttttgtccaatccct

SEQ ID NO: 666092 - DNA, 569 bp, Homo sapiens
  misc_feature (361)..(361): n is a, c, g, or t
ccgggagccctcaaacctcgaaagtgccaggtgttagccaccatgcctggctcatctccataattcttgggacaactctacagacaaaactgagtaagtaagggctgggtgtggtggctcaagcctgtaatcccagcactttgggaggccggggcgggtggatcacctgaggccgggagttcgggaccagcctggccggcatggtgaaactccgtctctactaaaaacacaaaaattagccgggggtggtggcgggtgcctgtaatctcagctacttgggaggctgaggcaggagaactccttgaacccaggaggtggaggttgcagtgagccgagatcgcaccacagcactccagcctgngagacaagagcgaaattctgtctcaaaaaaaaagtattcgccttggaagaattaagggtctcaaactgctttcagataacaaacacacagctaaaagtacttacaaactgtattaactcattcaacaaatgtttgagagtctactgtgtattagttgtttatagagaacagcaatgaacaagaagaacagtaattatcaaaacttagt

SEQ ID NO: 666093 - DNA, 737 bp, Homo sapiens
agcggggtggtccgttgacagctgcggtcgccggagcttctcctctcctcgacgacctgaggcagagcagtcattatggctgaagccttggactgctgtcatgctggttgctctttgttggccactatggagtagacctgggccgtctcgcaaagcaagcagcccgaatgccttgtgacggattggccaccattgggtgagcacgaccgattaacctgtgagtgccatgggtcatgacctgagaagcttcatcgcttaccctacctcatgcggtcggacggtcgagcttgaagaggcatgcctctatgattgagtagagcgtagggtggcaagctctcatggctggtggacctggcgggcaagcactacgtgagtaggctggcctggggaccagggcttccatgggtgggatgggctgggggtcgcatggcacggtggcacccatcagctcagtgcaagcaagtccgaggtgagccatttaaataccagacatgaagcatcattggataggtgcttgcacgactgactggggcaggtgtgtgtgtgtggagcctttgcgtggcgctaccgatgaatggcgggggatgtggcccttgaagcgcggtcccccatcataccattatcgagcagatgactattgacggaccggtgtacctatcgttgacatgtacatgcacctgttaatcccgaagctgaggttgttctacagtgcccatggatgagtacaggaaccataa

SEQ ID NO: 666094 - DNA, 173 bp, Homo sapiens
ttttggaattttggggggggggtcctttttggggattatggcccccccccgggattttagggtagggggggggggggcccccctggcaaatggggcccccgggccccccgggggttgacaaaatcccccctttgtaatgtcctggggcccataaaacccaatggcggtttcca

SEQ ID NO: 666095 - DNA, 115 bp, Homo sapiens
ggtacccctagcaccttcctgtacaataaatacaaaaaatagccagtttgtggcagcacctctgtgttccagctacttgtgaagctgagattggaggatcacttgagcccagaag

SEQ ID NO: 666096 - DNA, 1471 bp, Homo sapiens
gcagcggcggcggctgctgggctgtagcggtgccggatgccgacgcggtggcgggcaccgcgggcaccgcgcactgccgctgccccagtgtgtcgccccggccgcgacgcacctttgtccgggggtggggcccgcctgctgattctgccgccgttcccctacgcaatagtagctagcgatgctccgggtagctagggcagctagcattctagggcgtttcactagggctcgtgatagggtggctcagcccttgtgtccccggtcggaaggttgagtacttcgtccgacacgagcgagtgcgtgcctgtgtggcctcgcgtactatggcagcgcttcggtttgaacgctcgcttgagaggcctctagggacaatgagattcattatgcgcacggtgttgccctttgttcatcgcacagtgggtgatacggtgtgctcagtgtcctcggatctgttcgtcttttgcacccggtggttgatgttgcacgtttctcgtgaaaggaggttgcccggaggtctacatctggacgggaatgccgcgagttgccaccatgcgcatacaaaggaggggtgttccccttatggcagggacgtagaaacgaggagacggcgaggacgcccagagagaaggcaacacagaagattagttcgtcgtttaccacattattttatggagacccacccacaatagggaagcggggacgacaaaccggtttattccacgcaccgcgtaatgggggagccaaaccgcacgccaaaataatatatatccaacgcgtttaggaataggtcatcacgttagagaccagagagccagaagggacactagtatttatcctatttcaagagatacccacaggcataaagtttctactcgagttggtgggaacaaccccagaggtggatagaagtaatcataggggcaacggcgcccagaagaaataacaagacgacaggagatatagaaccgcatggacggataaaggactcgacacagtaaagttatcgccacgtactcacacggattaccaggcgagtggaagagcaaagagagcaccccggccacagggtggacgggattaagccagacggataagggaggcgacttttaaacatcacatatcacgaagagtagagacccttagaggggagagatattaaccatattaacgtttaccagaaagtacagcagcaagaagaggagccataatagagagatatcagccattatcacaacagaagataaatacagccacatacagccagcggagtgagacagccaccccacgatattaggatataggcaccccagccatatatttcagacgagcagagcacaatatatagataagaaggtgaggtcgaagcaagcgcctgatatcacccaacagaaaggaatcatgagctaattaagacgcgcacataacaagtaattcaacaacatatcccagagggtcaagagaacagcagccg

SEQ ID NO: 666097 - DNA, 264 bp, Homo sapiens
cagagtctgactctgagctcaggtgatcaccgtgctcggccgtcccagagtcggattacaggcatgagcactactccgggcttacctccttcttaatctgaaatctatcttctgtatcctttcttctgtgtgaattgctcttcctgatatctccgttcagcatgtccttacccgtcagatacgttttccggctgtcggccgcctctatcttcgtgtgctctctcccctcgtgggctcctgcctttctgacaggtccttcttcct

SEQ ID NO: 666098 - DNA, 1813 bp, Homo sapiens
  misc_feature (1609)..(1609): n is a, c, g, or t
  misc_feature (1813)..(1813): n is a, c, g, or t
gagcagcggcggctggcgcggagagacgcagcggaggtttacctggtttcggaccccagcggccggatggtgtaaactccatcccatgcgagcggaatccatctaagtaggccactgcgttcggccaagacgagaaggaagggggcataaacgccatgctgccacacgatccgatcggtcgcaggccggcgagctcatgccggcatccataaggcgctgctgcacgctctgcgggcgtgcgagggaagtcatgtgcacgagttgccacgggatcttcccgtccatcctgtcatgtagatagagcctcgagtgtcctggagggctctcagcgatgggtgcttccatgtaatgccacgcttcgagactcaggtccccctgagaagactctcgcgagggtggggaacgtgaacgcgctacgattagtctccgagatacgtgcgacaatccacagaaatccggttttcccaggccttaacactgttgctatccgtctagacttacgcggaaattgataatcgggcggcgttgccaccattggttgagcacccaggccaggggcaaacagtgagactggctctccgaaacgtggaacctataggcactggaaggggacacaatttcccttcgaaagacggtttcgccaacggattccccaagtaggcgatcacgaacatcgtaacagggcccccagaagagttctgcccaagtatcagacacgatggtgatctggaaaatccaagaatgggacgtagacaagagtgtgacacggtgacgcacagaccattcctttaagcgaatattccggtcaggcaaattttgcgccgaaggttgcacgggcgacgggtctgccccatgacccactggggaaggggaacacgcaaggccccaacattggacaccgcagggcattttttccagcccagtgattctccgttgccgctggggggagaattcctcccggcgttaggaaggcgcaagaccgacgactttaggtcgtgggaacgtcacctggaatcgccaatttggttacgctgtttgccactacactgtgagccgtttagcccaacgtgaatatggcaaaaatcccggcttagaaagggagaccacatgtacgcacgccggggccctggtgcacctccccgtgacaaaaccctttttcaagtaccattatgtatggcgaggcatttgtgcagcggcacttcggtttgcatgaacaccagaggggatgacttccgacacctgtgttgtatacgcacgctgaaaggcaagaaaagacgcggagaagggaccatctgtgacgtattttcaactttggtgacctataaacagcgagctatccgcaccaacagacagcaaagatctcattatcacgggaggaaaacaaacacgcacacagcgagcagccgaacagcagacagagtagaaccatggcccctaccatgctgcagcgacctggcggagaattccacgaggagcgacccctcggagcgtgggccaaccccccccttttgtctaatagccaaggagttggggtaaaccggaacgcttgaaaaaactcccggtcaaatctcttccgccattgtgcgtttatgccccaacgcatatgtcntgaactctgactccgacaatagtaacacgcgtaaccaatccacgcagacaataaaccacggaagaaataccttgagaacgtaatcaatctgcagctgcttagcagcaacgtcagaagtcatatagagttaaaattccatacatgaataaccatatcatattctcaccacacacaatgacgctggggcgcacggtagaaagtacn

SEQ ID NO: 666099 - DNA, 112 bp, Homo sapiens
ttcgatcccaggaggacgcgcgacgcctgggatccgcgctaccacagttctaggagtggccgcatgcgcgccactgagccctctcccggaacctccgcgggtagtgttgtgt

SEQ ID NO: 666100 - DNA, 137 bp, Homo sapiens
tcgatctagacgatcccccgtgagacgacttcctttcgtacagggaggaattgaagtagatagaaaccgacctggattactccggtcctgaactcagcatcaccgtaggacctttacatcgcttgacacaaaacgaa

SEQ ID NO: 666101 - DNA, 105 bp, Homo sapiens
ggaaaccagctatgaccaggaaacagctattaccaggaaacagctttgaccaggaaacagctattgaccaggaaaccgctataatcaggaatccgctttgaccag

SEQ ID NO: 666102 - DNA, 207 bp, Homo sapiens
gatagcgtgatgtaacacgagaaagcacataccaaggccaccacacaccacctgtccaaaaaggccttcgaatacgggacaaatcccatttataacctcaggaagtttttttctatcgcaggaatttttcatgaagcctatttaccaactccaagcctagaccccataccccaccaatataggaaagggcacttggacccccacaaa

SEQ ID NO: 666103 - DNA, 369 bp, Homo sapiens
atcacactgttgcagatcatgtcaggatctgtaatagccagcacaggctgttgaccttcataagagcctcacacttttccatactttttatgacattccatgtctatacatgcataagtccttatggtaggtcaaaatatttcccaataaagtcagaggtgtgggccctggaattactagcttcttaaaaatgtccatgtgaatgggttccatatagatacaggagcaccagtctgacagccagtagaagccaggtttccatggccaagtctgggatcagagccatctagtactttcctaacttatctctctcctatgagtcttcctttcagctctgtgatgctcttatctgggctatgtgcatggagc

SEQ ID NO: 666104 - DNA, 271 bp, Homo sapiens
  misc_feature (40)..(40): n is a, c, g, or t
  misc_feature (66)..(66): n is a, c, g, or t
  misc_feature (93)..(93): n is a, c, g, or t
  misc_feature (96)..(97): n is a, c, g, or t
  misc_feature (117)..(117): n is a, c, g, or t
  misc_feature (142)..(142): n is a, c, g, or t
  misc_feature (185)..(185): n is a, c, g, or t
ggcacatgaaacatcctatcatctgtaggctccattcatnttctctaacagcagtaatacttaaantaacttttcatgattcgagaaggcccnttnntcgcttcgaagcgaaaagtncctttaatagtagaagaaccctccnataaaaaccctggagtgactatatggatgccccccaccctaanccaacacattcgaagaacccggtagtacataaaatctaggacaaaacaaatcggaacggaatcgaaagccccccaaagctgggttt

SEQ ID NO: 666105 - DNA, 298 bp, Homo sapiens
cgcgacatatacgtacctcagaggatagggatcgagccctatagtgcagacttgtctactgtactgtcactagctatagaccctcaacatgggggtagtaatcacaaggaagtagaacagcagagtacggtagattaaacctacagctattctgactaggagggccatgacaagcgagggactcaggaatacctagaaagtacctcaggaagattgtcgtggagggaggcgctggaggacagccgacctcataaaagtcgcccatggaaatcccagtgctcgacacctgaagcgggga

SEQ ID NO: 666106 - DNA, 81 bp, Homo sapiens
aagctccccgcaaggagcccctgaggaaactggtcgctttttgtcctagatataggggagtgcaggatggtgtggtggagt

SEQ ID NO: 666107 - DNA, 363 bp, Homo sapiens
agccaaagtttcgattgttggttctgtaccagctgatgcgaatgtaatatccacatcaccagatggtgcagtagatgcccaatcgatgatcttaaaaccttctgtagccaattcttcagcttcgtcagcagtgaaccattgttgacgtggttgctttgaagcaacaatcaagttaaccttttgacgttctgagaaggcacgtgcttgaacagccaacaatgagttaccatcggctggcaagtattcacggatgaagttagacttcttttcagccaagtgtgtcacatacctggatcttggtgtgtgtaaccgttgtgatcttgttggagggcagttgatgttgcaatcaagttcaatgatggg

SEQ ID NO: 666108 - DNA, 586 bp, Homo sapiens
  misc_feature (220)..(220): n is a, c, g, or t
  misc_feature (237)..(237): n is a, c, g, or t
  misc_feature (239)..(239): n is a, c, g, or t
  misc_feature (243)..(243): n is a, c, g, or t
  misc_feature (411)..(411): n is a, c, g, or t
agactacgattctgagctccgttccccctccccccgacggggtggccctgagattcttgattcacttccctaggcggtgcccctaggaaaccgggcttccctgacgaactctagcgtctccaaccccgggagggccctgatgacttggccttgtttaaaaggacctggcccttacacttccctgccggccctggccagggacaagggagcccctccctcnattgtttatgatatccncntacntggtttgtttgtcttttttttttttttgagacggagtctcgctctgttgcccaggctggagtgcagtggctcactgcaacctccgcctcccaggttcgagcaattatctgcctcagccttccgaggagcgggattagagacgaccaccaccaagcccggctaattttngtatttttagtagagatggggtttcaccatgttaaccaggctggtcttgaactcctgacctcgtgatccacccgcctcggcctcccaaagtgctgggattacaggtgtgagccactgcgcctggcctgtttgttctttttaagcaacaccttcccaccccgtcgggtggagcggg

SEQ ID NO: 666109 - DNA, 460 bp, Homo sapiens
ttacaggagagagaaaagtagataggagtctcgattccaagtgggcagtagggatcctgcagaagtggctgaaatgagataaggcctacagagaataagttctacagtcattacgtttctgcctatatcctccagattcaaaggcagatggggtcatctcgaaactcatgtctcctccaggacacagcaacaacacattttcaaggaacagcctcattatatgtaaaatctgtagagtataaaacataactgctccactgacaggaggttggatttggacttaatattgtattattctgtccttacattatggcttgataaacagaatgtgattccaattctgattccaaagtgagactctcccagatcatccatgtcttctcattctctttgtccctctagctctctctcccttctcatccccaccaagaagtggaacttgaacctgccattccctaag

SEQ ID NO: 666110 - DNA, 178 bp, Homo sapiens
  misc_feature (152)..(152): n is a, c, g, or t
  misc_feature (164)..(164): n is a, c, g, or t
  misc_feature (168)..(169): n is a, c, g, or t
ggggggggggggggggggggcccccggaacaggcaccccaaatttttttttttaaataaagggtggggggggggggggggccggcgggcggggggagggaggagagagagggggcgggagggccgagcaggggggggggggggcggggcccncggggggggggngggnnggggggggg

SEQ ID NO: 666111 - DNA, 378 bp, Homo sapiens
ttggaggaactggttgtccagcctctgtcggtatcagtcagtgctctgactcttgcaactgaaactgttcggagcatctctgaaaatagatgatgtggtaaacactcgataatctggataactgactagcaccatcatgatcaccagtatcgtggctgcaatggaagcagatcaccttggtgttcctcgcttggacacgattactttcctctcgaatttctcggcctggtctcccagctggcattcgcctgaagttctcttgacacaatttaatgaaaatctcacatatttggcttcacaaggcagactcatcttctccccacatcctgttatttctgatacttttgacaaactactaacaactactaaaagcagcgt

SEQ ID NO: 666112 - DNA, 117 bp, Homo sapiens
tgttaaagctaataaagcattcagcaggggacctctctcaccacaggaagttgaatattggatcttaattggagaatcaagtagtatcataccctgccattcactggaaaaaatggg

SEQ ID NO: 666113 - DNA, 743 bp, Homo sapiens
ggttgccacacttgctgtccccagtgctggggcccttggcgccactgtgagagtccctgtggccagcccccgaccctggtctcgggccccgagggagacctccttttgtcccggctttaggtatccccccgtggatcttcccggggcccccatgagatcctgagtggatggtgccgactgactccagactggagcacccactgggagccccgcatccccgctgtctggacatgctccagcatctcccccttctcctttggctggtcatcccgccggtgttcgaccatggcagcatctaccaccctggagtgcttgatatccccgaggaactctgcacttctcgcttcctggagggtgtcccccatgttgcccgtgtctgtctgccgattggctaccccactggtgcatccgtacccccttcctatcatcaacgggtaccaagcgagtctctggcgttgttctgtggagagcgggattacacctctcccacattgctggaaaggtctcaggccttctctggcgtgatccaatctgccctttgtggactgctgcccctgtgggtgctgccaccaccagctgctcctgctgctgctgcagccccacgctaatggttgtacccacaggaagagtcggaggagtcggacgaggatatgggatttggtctctttgactaatcacccaaaagcaacccaattagaccagattttatttgccaaacacaggcaataaggcttaattcttta

SEQ ID NO: 666114 - DNA, 205 bp, Homo sapiens
  misc_feature (8)..(8): n is a, c, g, or t
  misc_feature (111)..(111): n is a, c, g, or t
  misc_feature (141)..(141): n is a, c, g, or t
  misc_feature (189)..(189): n is a, c, g, or t
  misc_feature (191)..(191): n is a, c, g, or t
accatggnaggcagccctccctctccatactacctcaacccaccccttaagccacagatgaaagggaaaagaaaatgaagaaagcctacagaagggcccctgaccaagggnaagagctgcccccagaatgtgtgagtgtanccacaagatacaagtaactagctgtggctgagaggccagtctagactngnctctacatagagac

SEQ ID NO: 666115 - DNA, 238 bp, Homo sapiens
  misc_feature (79)..(79): n is a, c, g, or t
  misc_feature (81)..(81): n is a, c, g, or t
  misc_feature (122)..(122): n is a, c, g, or t
cccagaacatcacatatgtttatttcagatgtaacagcattgttaaaattgacaagtttaataaaaaactgccctggtncncttagttttttaagtctttttttaagttattccctccaaancactgagggagcttttcttttcccccaccacaccatggtttcccactagttctctttttggaggacttttcccttggtgagtaaactgctttagatctttcagaccttcattcccc

SEQ ID NO: 666116 - DNA, 146 bp, Homo sapiens
acacaggcaatgggataagccgagacacacagacgttgaagaggctgcagaaaagactgtcgtccatatcatatctggagccgggtttatgtgcatgaactcactcctcagagaccagggccatgtagtaacagctgggtaccgag

SEQ ID NO: 666117 - DNA, 604 bp, Homo sapiens
aggtgactctacaggatcctttactgtcaggcggattgcaccatgagccatcatgctggctgggagtttattttgctgtgcagaagttctttgtttaactgaccatggtcaattttggtttgttgcaactgctttggcatcttcgtcatgaaatctttacctggtcctatgtccagaatgatattccctaggttgtctcccagagtttttatagatttagattttacattttagtctttaatcaatcttgagttgatttttgtatatgattctggtacattgtctctttctcattggtttcacagaacttcttgatttctgccttaatttccttatttacccaaagtccttcaggagcaggttgttcaatttccatgtaattgtgtggtttcgagtgcatttccttaatcctgagttctaattttattgctttatggtctgagagactgttcgtcatgattccagttcttttgcatttgctgaggagtgtttcacttccaattatgtggtcgatctttggagctaacgtgtcatgtgccactgaaagaatgtatattctgttgatctggcgcggacaattctgtagacgtctactacgtccact

SEQ ID NO: 666118 - DNA, 357 bp, Homo sapiens
gcctgctgagtttttggaactacaggcatgcactaccacgcctggctaatttttggatttttagtagagatggggattcaccatgttggcccggctggactcgaacttctgacctcaggggatccgcctgccttggcctcccagagtgctgggattataggcatgagccaccacgcctgacccttgagtatacttaggaattctgatttattacctttaacggggacttaaagtattttaatactataaataatgatagggtttcgtaggaccaactctcctggggaaaacctgaatgatgttttatcaaagaaaacctgtggaaataggcagagctgccctgctaagatggtgaaa

SEQ ID NO: 666119 - DNA, 331 bp, Homo sapiens
  misc_feature (9)..(9): n is a, c, g, or t
  misc_feature (90)..(90): n is a, c, g, or t
  misc_feature (154)..(154): n is a, c, g, or t
  misc_feature (169)..(169): n is a, c, g, or t
agagaatgncaagcccggggagaaggcgttccgggcctcaaccttggcgtcgtgagattcttgtaaggcgtctgcctggaagccggcagnaattttccttctttaaagagaaaaagaaggctagggactcaaattcctggattctaagatccanaccagttcctcccanacctctccagaagaagccatgggaacccctcgtatccagcatttcctgatcctcctggtcctaggagcctccctcctaacctcgggcctagagctgtattgtcaaaggggtctgtccatgactgtggaagcagttccggccaatatgtttaactggaccaca

SEQ ID NO: 666120 - DNA, 148 bp, Homo sapiens
aggtattaaggatccagctagtgatttaggcgtaggtttggctagggtgtagctgagaataggggaatagtgaatgaagctctatatggcaatacagctctattgataggacatagtggaagtggtgtaaatgtagtacgtgtcgtgt

SEQ ID NO: 666121 - DNA, 108 bp, Homo sapiens
aacctgcaaccttcgctgagcgccctgagcagcaatatgcaagacattcgcgaggtgctggcgcgctgcgccggcgaggaagaggaggaacgccttaacggcggcgaa

SEQ ID NO: 666122 - DNA, 704 bp, Homo sapiens
  misc_feature (54)..(54): n is a, c, g, or t
  misc_feature (136)..(137): n is a, c, g, or t
  misc_feature (159)..(159): n is a, c, g, or t
  misc_feature (197)..(197): n is a, c, g, or t
  misc_feature (222)..(222): n is a, c, g, or t
  misc_feature (236)..(236): n is a, c, g, or t
  misc_feature (238)..(238): n is a, c, g, or t
  misc_feature (240)..(240): n is a, c, g, or t
ttgcatatggcaaggccaagcacgacaagtacatggcggacatggacgagcttntttctcaggtggatgagaagaggaagaagcgagaatccccgactacctgtgtggcaagatcagctttgagctgatgcggganncgtgcatcacgcccagtggcancacctacgaccgcaaggacatcgaggagcacctgcgtntgggtcattttgaccccgtgacccngagcccctgacccngnancagctcatccccaactatggactatgaagtgaggttattgacgcattcatctctgagaatgtgcatgggtggaggactactgcaggtatccctgccctacctggctgtacctggtccaggggagccctgtggcagaagcccccgagcccctatacatagtttatagttcctggccacctcagaacgcttccacccaagttactgctcgtatgagactctggactgtgtatccccttactcagcatacgctttagctagggccgtgatcggtcaccccttttgtgggctggaataagcagtgtgcactggtgggctgggctagatggcattagccggacaagcggattcgtgtggtcacttcacatatccggtgaacgccacggaatagccagagcaaataaaaagcactcctcaaagcccaccccggagacaccgtaaacatttacagcacaaaaaaaatacgc

SEQ ID NO: 666123 - DNA, 460 bp, Homo sapiens
ggtttctttcaagttgaaaagaaactggttattaggccactatcatttgaaactgccactagtgctcaaatgcccatatgctatcccaaagatttcctgagtctgccagaggcccagacaggctcacttaagctctttaactgaaaagcaacaagacactccaggacaaggttcaaaatggttacaacagcctctacctgaagccccagggagaaaggggtattgatacaagtcttatagtcagagattgttttacactccttctaaatattcccagaggctgaaacaggaggttattttcaattctattttggaattaaatacttttttccctttattactgctgtagtccctcacttggatatacctctgttttcacgatagaaataagggacgtctagagcttctattccttggccatcgtcaacggatagcttgccgtctttaccccttgctacct

SEQ ID NO: 666124 - DNA, 791 bp, Homo sapiens
  misc_feature (54)..(54): n is a, c, g, or t
  misc_feature (136)..(137): n is a, c, g, or t
  misc_feature (159)..(159): n is a, c, g, or t
  misc_feature (284)..(284): n is a, c, g, or t
  misc_feature (309)..(309): n is a, c, g, or t
  misc_feature (323)..(323): n is a, c, g, or t
  misc_feature (325)..(325): n is a, c, g, or t
  misc_feature (327)..(327): n is a, c, g, or t
ttgcatatggcaaggccaagcacgacaagtacatggcggacatggacgagcttntttctcaggtggatgagaagaggaagaagcgagaatccccgactacctgtgtggcaagatcagctttgagctgatgcggganncgtgcatcacgcccagtggcancacctacgaccgcaaggacatcgaggagcacctccaggtaaggctgcggctcggggagcagagccactggcatggtcctcgggccccatgacggccctcggcccttcattgtcacatcccgcgtntgggtcattttgaccccgtgacccngagcccctgacccngnancagctcatccccaactatggactatgaagtgaggttattgacgcattcatctctgagaatgtgcatgggtggaggactactgcaggtatccctgccctacctggctgtacctggtccaggggagccctgtggcagaagcccccgagcccctatacatagtttatagttcctggccacctcagaacgcttccacccaagttactgctcgtatgagactctggactgtgtatccccttactcagcatacgctttagctagggccgtgatcggtcaccccttttgtgggctggaataagcagtgtgcactggtgggctgggctagatggcattagccggacaagcggattcgtgtggtcacttcacatatccggtgaacgccacggaatagccagagcaaataaaaagcactcctcaaagcccaccccggagacaccgtaaacatttacagcacaaaaaaaatacgc

SEQ ID NO: 666125 - DNA, 118 bp, Homo sapiens
tctgcgcgctctagagatcccgacaggccagcatgtattgtttcccaatacaatgaagacttgaaaacaaggatcaagacctgacttaggaattcgtattgagaaccgacaggacatg

SEQ ID NO: 666126 - DNA, 1303 bp, Homo sapiens
  misc_feature (183)..(183): n is a, c, g, or t
gggtgttccatctcagccccattgctgagaacaggatgactggcacgaacaggccctggccttgtgcccagccagctctctgtgttgcgcccttagagcctctgcgccctcagttccgtcctgctcttgtgcgcaatttccagacactctttcagaccagtggccctgaagcccgtatagccntcttcctctactcatgtcactcctcgaacaaacagaagcaatttaagggcatgctatcgtcgttgtacggcgttggtggtgcgttgtgacactttcgagagaatttatgaagaatcattgctccagaccaacctctgagatagggctattccataagaacgccggcggcgggcgtgcttccgggttgtccgccccagggaggggggccctgcttcctttgctgtcccccttgttattctctcttggggccagcttggcggcctccggttacccctgagggccggcgatgtgtatgctccccctacggcggggatggcacgagcccatttggccaggctttgcgggagcggggtgggccaaccccattgcggcgtcccctggcgagtggaagcaaccctgctcgggaggggcacgggagcacccgtaaaccccccccggtgcgagggcgcgggaggcccgtatagtcttgtggaggcggcctccttgtgcgccacggttcaaggcggcgtcctattttgtgcgcacacgcgcatcgtcatacacagccaggggataccctttgtttgccaggtttggtgtggggcctaagggttggggttacgccttggtggggctctggttccaacttcccaatggacgctttgcggtttgttggacccaactcgggtaccgcccctttaacagaagaaagaggtacttcccggggcaaccaattagcacgggattcagctcacttgttccccccacagaacgaacttgtcctactgccacgccgcgaggagccaacgggctgactgtgaatcaccaataccttccccttgggcaagcagctggtttgaccttcattcccccatggcgtccggggacgcacccccccctttggttggcgcctttccaaatttgggtgacctccaaatgttggggcgtcccctttgtgttccatgtttgttctggtcgtggaaatttttaggttcccgtggggatgtggaacgctttcccctggccgggcttactttccttaggtagtggatcacgcttatgctgtctttatgccacaaatggtgccttttatctacctggacacgcgaccagaggcagtctctcacgttcacgccgagac

SEQ ID NO: 666127 - DNA, 599 bp, Homo sapiens
ggagacggggtctcccggggtagccagggatggtctcgatctcttggacctggtgatctggcccgcctcggcctcccaaggggctggggattacagacgtgagccaccaggccgggccgggaattttctagtaagaagaaaaacatacagaatatgtcttcagggtggggtaactctcaaattggtagcaatccgagattttttggtaaaactggggctaatggggatatttaaggtcagagttatggtctctcacttcaatatctagtacgggataaggtttctccggggagcacgtatttttttttcaagtcctcttttccgggacttaacatgttcttctagaagacaccagaagtcatgaccctgagacccggtctccagagggggagagggggtctcaatacggagctggcatatctcagcctataacggatttcagtcatctgagtcaaagattagggaaaggtcaataaaaacggcgagcgctcttaggtttttcttaatcagatggctccacaaaattgataaagactttaataatgatcagtggtgaaataggtgggcctctagaaccttgtgtagaacatgggccaaga

SEQ ID NO: 666128 - DNA, 425 bp, Homo sapiens
cttagaggatccctcgattcaacctgaggtcgggagttcaggatcagcctgaccaacattgagaaaccctactgagaatacagagttagccgggcattgtggtgcatgcctgtagtcccagctgctcagtgagcctgtgcaacaacgagcaaaactccatgctcaaaaaaaaaaaaaaaagaaaaaaaagctggagctggtggcttaggccatcacccttcccttggtctggaactacgggccggcccttttagagatgtgcctgtgttgctgtggagatgtgtgtggtggtctaagctcttgtgtggagctgtgtgtgtgtgtggtgtagtcttagctgtatgctgaatttgggcgtgtgtgggagggcttcttagcctcttgggtgagatttggtattcctatgtgtaggatcgagctagggt

SEQ ID NO: 666129 - DNA, 1855 bp, Homo sapiens
  misc_feature (233)..(233): n is a, c, g, or t
  misc_feature (369)..(369): n is a, c, g, or t
gacacaaggtgttcgcagtcagtttagtcaaacccaatcccattatcctgtaccttggtggcgcttgcgtactattgctctcatctcgtaaactgtatccttcggtctcgtagcgcatgatcattatgtctactttctcggtcccaataagaccgtcttcactcattaacttgacgccctatcattgatgctgagcagcaccgtaacgcggcatactccctaatgtgtactgngacgtgcaaactgttcatctacgcgagcatatacgtcaacactatccaagggcccaccctatacagcccaccgtggtctgcatcaatagggcgcattctgcacttctggtgcgataagtcgcgtaattctatttancttcgatgagagacttttttatgcggtatcagtccgcgaggactctgtgtacctccgatcctattattcacccactatccgagacgcaatggtcactctctctcaccacactccagaacatggctcagggggactacatggagatctccctcgcaaacaagcgaccttactacctcactctgtctatgacaaatgccctcacttaaggtaaggattcacccgaaccaaacgcatatgaagggaactactcacagattatatcaacattccgcaacttaacgcgtaggatagagccaaacgcgcaccactggcagggctctatccgcaaccatagagtctgataggtaagggagacaccagggacaagggctgtatagagcacgcggtcattcaacagtgccaagacgaacgatcggcgcacatattaatattagcaagaatcctcccacaggcttggggggacaatcggaacttccagtgatcgccacttacccccccaaccaatagggcggcaattccattgtatgtcaattctcttctcagagggtttccgccacaaccaatatagcgtatgccctaggaaaacaacccctgtacagtggtaacacaaatatgctatatttgtgggcaatcacagactaacactataacaacagttcacccgaactagaaagaacgacacacaagtctgtacattacgcaccaaaccgttggggattaatccaccaactggaatcaatataacttctcagagaggacattcgaacacacatatatacaccaaacccaacaggaaacgatcggggccaatgagtcgggacaccgcatacgaccgtacaactacattgtgctcagcatgtgaagacaaggtgccaaaatcaaccacaagaaaaatggacaaaaagcgaacactgcggcggcacaacgcccagaagaaatccgcgggcacacagcggcacagaacgaatgacacaacagtcagtaaacgcagagagtaaacgacagggcgaaaacaaaggcgcacaaagacagcgagcaaataccgacacagacacaagaaacaaggcagcagagcaccacgagcacaaacaagaacggaaccacgacggaggagcgaccgaacgaccaacaaaagcacgtacgcgaaaaagcccaactagagacaagaagagggagcacgcaacgaggacaacgagggagagaaaaccaacagcacggtagaacgccagcacagatgcacagccgacaaacgagaacaacgcaaacaaagaaaacagagccgacgacacagacaacagggagagcacagaaggaggccgcagcacccagcaagccggcacgagcagaaacagcagaggacaaggaagccccgcaggacagcgacagagaccacaccatcgaaaaaccgacaagaaagaacgagcaagggacacaagcaaccagaaaacgaacaagaaccaagacaaagcaaataagaagtcacgaa

SEQ ID NO: 666130 - DNA, 130 bp, Homo sapiens
gacgtgaggacccctcggatgcaagggtcagatctcgtcagcatggagtactggagaagaaaaacttcctccacagtctgaatacggacgggtggtcgcatgcactctgatagaagtctctgtgcactct

SEQ ID NO: 666131 - DNA, 160 bp, Homo sapiens
tagactgtaaatgtattttattttgtaagtggcaatcaaaatatatttgtgctactgattttttcaaatgttaaatgggatcttaacaaaatttgtccactttgatgtgttcatgtataattttagaatctgcagagaccctgactaaagaaacagaagt

SEQ ID NO: 666132 - DNA, 380 bp, Homo sapiens
ggcgcctgaccgacatagtgccacgatggacgggggtattgtgcaggtttcgcctgctccatcgcaattgcacctgatgatcgcagcgatgggcggctttgtgcatgcccatgcggggttacgccgcgtcgtgcatggccctgcatttcccgactggcaaattctcgatagctggcgttgtagtgggaggttggagtggcgacactggttttgaccgcgtagggcacggcgattggcgggcccgtcggcggtgctgttggggccatgcttggccagcagctcgatcgcgctatagttggaaatggggccccgccgcgacgggccgcgcttgctggaactggaactgcaaacgtcgagttatggcacttgcattccagcga

SEQ ID NO: 666133 - DNA, 1328 bp, Homo sapiens
gcggccgccgcctccgctctgagccccgccccgctcggccgccgattgctcgggcctggccgccagcccaggggccgatggccgagcgcgtcgcactcgcgtccctgcgccgtgcctgcctcgcgctccctgttacggcgttcgtccccgggcctggcgcccgcgtccggcccggctccgcggcggcctggtccgatggctcctcagcggagggccgcaaccaaggcgcccgagggcaacggagcggccgagcgccggaaccggagcagcaccaagaaggaccgagccccgcgggaggtgcagaggctgtggcagaggccgtggctaaggaccgcgggcctgggggctggctttgtgctcaccgcactcctgctctggagcagcttgggggccgacgacggggtcgcagaggtcctggcccgccgtggcgaggtcgtggcagggagattcatcgaggtgccctgctctgaggactacgacagtcaccgcaggttcgaaggctgcactccccgaaagtgcggcagaggtgtcaccgatgtcgtcatcaccagggaggaagcggagcggattcgcagcgtagctgaaaaggggctctccctgggaggatctgacggaggggcatccattctggacttgcactcaggggccctgtctgtcgggaagcactttgtgaacctgtacagatacttcggggataaaatacagaacatcttctcagaggaggacttccggttataccgggaggtgcggcagaaggtccagctcaccattgctgaggcttttggcatcagcgcatcctcgctgcatctgaccaagcccaccttcttctcccgcataaacagcacggaagcgcggacggcgcacgacgagtactggcatgcgcacgtggacaaggtgacctacggctccttcgactacacctcgctgctgtacctctccaactacctggaggacttcggcggagggcggttcatgttcatggaggagggtgccaacaagacggtggagccgagagctggtcgcgtctccttcttcacctcggggtccgagaacctacaccgcgtggagaaggtccactggggcacccgttacgccatcaccatcgccttcagctgcaaccccgaccatggcatcgaggacccagcgttcccgtagccagcagccgggccaaggtaacttcaggagggcccgtgtggaggcagccgcgccagtcgtgcacccacccccacgtccacccgctcctgttgcacagagtgccttaggaattctctgattttgatttgctgacgtgttaatcttttcatctgtgagtaaatgaagggaaccag

SEQ ID NO: 666134 - DNA, 629 bp, Homo sapiens
  misc_feature (15)..(15): n is a, c, g, or t
  misc_feature (127)..(127): n is a, c, g, or t
  misc_feature (170)..(170): n is a, c, g, or t
  misc_feature (225)..(225): n is a, c, g, or t
  misc_feature (228)..(228): n is a, c, g, or t
  misc_feature (242)..(243): n is a, c, g, or t
  misc_feature (261)..(261): n is a, c, g, or t
  misc_feature (274)..(274): n is a, c, g, or t
  misc_feature (287)..(287): n is a, c, g, or t
  misc_feature (291)..(291): n is a, c, g, or t
  misc_feature (293)..(293): n is a, c, g, or t
  misc_feature (300)..(300): n is a, c, g, or t
  misc_feature (320)..(322): n is a, c, g, or t
  misc_feature (345)..(345): n is a, c, g, or t
  misc_feature (418)..(418): n is a, c, g, or t
  misc_feature (424)..(424): n is a, c, g, or t
  misc_feature (428)..(428): n is a, c, g, or t
  misc_feature (479)..(479): n is a, c, g, or t
  misc_feature (482)..(482): n is a, c, g, or t
  misc_feature (500)..(500): n is a, c, g, or t
  misc_feature (588)..(588): n is a, c, g, or t
aagtaagcacaaatncgtattagaaagaatttgtccaaaaagaattaagtccaataattttaagatggctcaagtgtcaagaggttccctccctgtgcccccactgttgcttcatgcaggtgaatanagaaggaatgaaatgcttaaatattcttaattagtcagaaaanattgaaatgcaacagttgggcaattacaaaaaataaatccagagaggtcaaaacntanattagccatttganngtggctctggtgtctgcnaaaaaaagtagcnattgaaaaaacanagananctatgangtggttcactcattctagannnattttcattttcctcccgaaaanccccccagtccctcaccgagccccggaccttcacccaacacggctgccacgctcaaatgggcctgattcaaantcccangtangtccctggcaccagggagtaggataagaaaacctccagaagtgaaactgangangaagtgacatttaatcanttcaaaaccgaaacttcactggcaaggtcaaaaccccaggccaaggctgacaatcgagcgctggtcagttccaggggtcaggctcggnacctgaaaatgcagatcctagctgttgctgcgtccctcagg

SEQ ID NO: 666135 - DNA, 3804 bp, Homo sapiens
ggcacgaggcacagctcacgaggctcagctgtcctccatccttccccctgtcctttggtgcctctgtttgcaagatgtgcagaaacaccagagggccagaggagaccctccttttactgaatgctggcagcctcctgagaaccacgtctgccagcagcagagagcagagagtgtggacgagcatgggcgactgaggtcccaaatggcgcgagccgctgggccctcctgcttgtgccgatgtctcaggctcgattgaagctggaagaaaccaaggacaatgtgtcctttaaaagtgtaaggttagaaggtgccctgactccagccgacctggaaaaggacgtgtcctgcatatctggaggtggcccacagggtccgggaaagatcggctgccttgcctgcatcccagggcgcttcccggcctccattaagaggtgaccattgcatccacgtgatttcttttgctccactatttccaggcacagtgcaactgactccctcttgaagctagaatgccctgcacacccgggatggacttctctcccctttcaaagatcgagtgaagtttgcaaatgtgaaaggaaggaattgcatttccagtggtaacctttgaaggggaatgaaattgtcacaggacgtcaggagccacgtgggggagcccggtgtcctctgagtctcaacgccccttgcttcccgcttggtgacggtcgatggctgtgtccagcggtgaacgctttaccacaggactctacggtggggtaggcagcgccacttcaatgtgaagacaaatgaactggcgtctcttgagataggcccctgcctccaggacctctcaggccccgggccctggttactgccgtggaagctgcctgttcagacgtcatctctatcaccccttgaagggagacagagaggtgtttgcgagttggatgttttatcttgtctttcctgattctttgttagaacacccccagggcttggtttttgttctcaacctgtgattagaaataagatcctaaagtgtcagatctggaaggcccatgagagctgaggagatcaaatgcccggagctcgggagatcagatgacctggggtgtctggagccagtggtggcctcatctgcagcatcttcctctgtcctgcccaccacagagtccctgctggccccggggggcccctcctccgccacagggcccctgagcattgctgcgtttgtttctccagctcctccttcctgcagaagcagttcccagaggggcaatttctccagcctgcctggttggttgtgttgattggttatagttgctctttcaggtgaccgcagaccctctgaaggctgtggccgtgggtgtggctctatggccacctctctctcttctcctctcccaggtcgcgtctccttcttcacctcggggtccgagaacctacaccgcgtggagaaggtccactggggcacccgttacgccatcaccatcgccttcagctgcaaccccgaccatggcatcgaggacccagcgttcccgtagccagcagccgggccaaggtaacttcaggagggcccgtgtggaggcagccgcgccagtcgtgcacccacccccacgtccacccgctcctgttgcacagagtgccttaggaattctctgattttgatttgctgacgtgttaatcttttcatctgtgagtaaatgaagggaaccagcttttcacttctccagcatcatgtgtgcttgggctgtaggcctgggagcctgaggtggaggccaggaaagggacccagcaggacggggcacaagtccccatctgtgaatggacgggactcatccacccaggttcagcaaccccccgggactcgtccaggttcagcaaccccccggcccatcaaagactggctaaagcatcagccataaatggggacaaacgtggggccagcagcttctgttcggggtctcggcatcagcaaaccgcagcagctttggagaagggtccgtgagtggcggctctggaggcagcaacggggtcctttggggtgggtgggagttctgctggattcaggtggaggtgaacatctgccgttcccacagccctgcgtgcacccccaatgctgctggcccacaaatcaccgtgggccacggccccaccacaccaggcttggccctgtcagcggccagcatcccgagggccagggtccgagtgtcctcaccaaggaggctcttggcgtcgctgtgccggctcccatgggccttctgctgggtcgagggtaggtctcctcctccccctttgccctggcattaaactgatggtcaggctgggcgcggtggctcacacctgtaatctcagcactgcgggaggccgaggcaggaggatcacttgaggtcaggagttcaagaccagcctggccaacatggcgaaaccctgtctctactaaaaacacaaaaacaaattaatcccagctactggggaggctgaggcaggagaatcgcttgaacccagggggcagaagttgcagtgagccgagatcgtgccactacactccagcctgggtgacagagtgagactccatcttaaaaatataaaaataaagtggtggtcagaggagccccgaatagaccagttgtggagaggcctgggtggggtggctggcagggagggcaggccaagcccagtttctgcccacagtcacctcgaggtgactgtccagggctttgggcaccttcccgggagggggacggccgcccaccctgagtggtgttggaagctgggctctcctggatgccctgacccagctgcctggggagagccctgggcccctcctccctcagcacctcctccctcagcccctcctgcctcggtccctcctcccttagcctgtctggcatagatccatgttccctagcccctggcacaggtgcctctgactggagtgagggcctactgtggcccgggagctgctctgggggttgataaagggcagcattattgggtcctgggaaggagcgggcgtgaggccagctgaggcatggtgacccctgggaaggagcgggcgtgaggccagctgaggcatggtgacccctgggaaggagcgggcgtgaggccagctgaggcatggtgacccctgggaaggagcgggcgtgaggccagctgaggcatggtgacccctgggaaggagcgggcgtgaggccagctgaggcatggtgacccctgggtatgggggacttgggggccgcaccttggtttgcccagggcccctcctgcaccacgggccacatgcggaggacggcgtgggataggctccctgggtccacagcttctgcccgtgtatggggaaccctccttggtcagggctgcaggctctgggcagatggggcaggaaccctgaggctcccgcgccctcccatggcctctgatgtgggacactggagcgaggcacgattctgaaggactccatggatctgggaggatgaggcccacctccggttggtggccaaagccgtccttgcggggccggctgcttcacggacactctccgggtcgggctggtgggccccatcgtgggtgggaagtcgcctgagcctgggccgcccttgagcttctcccagtcttgactttccagagggtccgtggctgtggtcatggtcggggcaggtggaaaatgctgcatggaaacctgatcctgtcaccttggagtaaatgatgatgtcgccggcttctcgccacgtctaaaggataaatgcatttgaagaaagtgggtgttgggtttgttatgggttaaagtgcttttgaaataagtaaattattagtttgattttc

SEQ ID NO: 666136 - DNA, 1585 bp, Homo sapiens
ggcacgaggcacagctcacgaggctcagctgtcctccatccttccccctgtcctttggtgcctctgtttgcaagatgtgcagaaacaccagagggccagaggagaccctccttttactgaatgctggcagcctcctgagaaccacgtctgccagcagcagagagcagagagtgtggacgagcatgggcgactgaggtcccaaatggcgcgagccgctgggccctcctgcttgtgccgatgtctcaggctcgattgaagctggaagaaaccaaggacaatgtgtcctttaaaagtgtaaggttagaaggtgccctgactccagccgacctggaaaaggacgtgtcctgcatatctggaggtggcccacagggtccgggaaagatcggctgccttgcctgcatcccagggcgcttcccggcctccattaagaggtgaccattgcatccacgtgatttcttttgctccactatttccaggcacagtgcaactgactccctcttgaagctagaatgccctgcacacccgggatggacttctctcccctttcaaagatcgagtgaagtttgcaaatgtgaaaggaaggaattgcatttccagtggtaacctttgaaggggaatgaaattgtcacaggacgtcaggagccacgtgggggagcccggtgtcctctgagtctcaacgccccttgcttcccgcttggtgacggtcgatggctgtgtccagcggtgaacgctttaccacaggactctacggtggggtaggcagcgccacttcaatgtgaagacaaatgaactggcgtctcttgagataggcccctgcctccaggacctctcaggccccgggccctggttactgccgtggaagctgcctgttcagacgtcatctctatcaccccttgaagggagacagagaggtgtttgcgagttggatgttttatcttgtctttcctgattctttgttagaacacccccagggcttggtttttgttctcaacctgtgattagaaataagatcctaaagtgtcagatctggaaggcccatgagagctgaggagatcaaatgcccggagctcgggagatcagatgacctggggtgtctggagccagtggtggcctcatctgcagcatcttcctctgtcctgcccaccacagagtccctgctggccccggggggcccctcctccgccacagggcccctgagcattgctgcgtttgtttctccagctcctccttcctgcagaagcagttcccagaggggcaatttctccagcctgcctggtcgcgtctccttcttcacctcggggtccgagaacctacaccgcgtggagaaggtccactggggcacccgttacgccatcaccatcgccttcagctgcaaccccgaccatggcatcgaggacccagcgttcccgtagccagcagccgggccaaggtaacttcaggagggcccgtgtggaggcagccgcgccagtcgtgcacccacccccacgtccacccgctcctgttgcacagagtgccttaggaattctctgattttgatttgctgacgtgttaatcttttcatctgtgagtaaatgaagggaaccag

SEQ ID NO: 666137 - DNA, 775 bp, Homo sapiens
ccgaagtgggacgtaactttgaaggtgcttgtaggtattagctctgctaggttgtaccatcatagcaacgtagatttcagcagctatgcgtgactgagcacgtacattcatagttcttcaagatacgttatattgtccagaatccaccccgttcacccaagcataagacatacagtagacataacttttccatcttataacacgtcattttactgtaaccctgcttgcatgcaattatagataccatcccattccagccgtcagaagtcaggaccatcaactgggcagttggagccccagacgagaatacaatcttctaacgtatccacagataaaatggctaaggctagcacttatggtaccatgacttaatacttcaaacacaatcttcactacatcttccatcatatatcacaacgtcacagtacttggacttcccactaaacggggacaaactaaacatgggagtgatttccctcccttctagcggcaggtaactgccaacagcagttgatggacacattcttctaaatctttgacggaacagataaattgactatcccccttgacaggagctatacatatgcgacctgttattcacaaataaccatgttagtgccaccaagttcaaatccgtcatatttaaatcacttaagtttgggtactggcgtcaaaatagcgattggtcttacagcataacaaatcaagaagtgaaatttggaggttatactccaagaaaagtgtgtaaacagtggtgatatggacaaatagcata

SEQ ID NO: 666138 - DNA, 363 bp, Homo sapiens
gcggccgccgcctccgctctgagccccgccccgctcggccgccgattgctcgggcctggccgccagcccaggggccgatggccgagcgcgtcgcactcgcgtccctgcgccgtgcctgcctcgcgctccctgttacggcgttcgtccccgggcctggcgcccgcgtccggcccggctccgcggcggcctggtccgatggctcctcagcggagggccgcaaccaaggcgcccgagggcaacggagcggccgagcgccggaaccggagcaggtagcggtgaggaggggaagggcgcgcgctgcggcggcggacagggccatggagtgggcgggactggggctgatggggcggtgcctggcccgac

SEQ ID NO: 666139 - DNA, 641 bp, Homo sapiens
agcggaggtttgctacctgatcacctcctgaagatgtagggttgacgatgtgtcacactgtgtaagggaatcgcatggagatgggcattccgaactgtgaatggggacatgggactccagttgtctctgatcacttgtgtggattattcctggcgtagtaacgacgaagccgttagttaagtcgccaagacctacacgcagagaattctgcaccaaagggcataaaatcttgtaatattaattggcatctgggagaatgtctgagcaggaggagacctgaatcaggccaatagcagaggaaggagggactgagcaggagacggccactccagagaacggcattgttaagattcagaaagtctggatgaagaggagagactggaactgcagaggcggcgtgtgaggctccgaatcaatgaaacgaaagaagatccaaagtcaggaagcaggaaaagggtagaacctgactcgcgagatcttgctgtctgtgaggaagtcttctgccatgaccagggaggtgaaagtcttcaggatccaggaatcgattcatttacatgctttccagtttctaccaggcctgcaagaggaggatagaactctaggagagatgactctgagaagacgaaaacagaacccggata

SEQ ID NO: 666140 - DNA, 3436 bp, Homo sapiens
gcggccgccgcctccgctctgagccccgccccgctcggccgccgattgctcgggcctggccgccagcccaggggccgatggccgagcgcgtcgcactcgcgtccctgcgccgtgcctgcctcgcgctccctgttacggcgttcgtccccgggcctggcgcccgcgtccggcccggctccgcggcggcctggtccgatggctcctcagcggagggccgcaaccaaggcgcccgagggcaacggagcggccgagcgccggaaccggagcagcaccaagaaggaccgagccccgcgggaggtgcagaggctgtggcagaggccgtggctaaggaccgcgggcctgggggctggctttgtgctcaccgcactcctgctctggagcagcttgggggccgacgacggggtcgcagaggtcctggcccgccgtggcgaggtcgtggcagggagattcatcgaggtgccctgctctgaggactacgacagtcaccgcaggttcgaaggctgcactccccgaaagtgcggcagaggtgtcaccgatgtcgtcatcaccagggaggaagcggagcggattcgcagcgtagctgaaaaggggctctccctgggaggatctgacggaggggcatccattctggacttgcactcaggggccctgtctgtcgggaagcactttgtgaacctgtacagatacttcggggataaaatacagaacatcttctcagaggaggacttccggttataccgggaggtgcggcagaaggtccagctcaccattgctgaggcttttggcatcagcgcatcctcgctgcatctgaccaagcccaccttcttctcccgcataaacagcacggaagcgcggacggcgcacgacgagtactggcatgcgcacgtggacaaggtgacctacggctccttcgactacacctcgctgctgtacctctccaactacctggaggacttcggcggagggcggttcatgttcatggaggagggtgccaacaagacggtggagccgagagctggtcgcgtctccttcttcacctcggggtccgagaacctacaccgcgtggagaaggtccactggggcacccgttacgccatcaccatcgccttcagctgcaaccccgaccatggcatcgaggacccagcgttcccgtagccagcagccgggccaaggtaacttcaggagggcccgtgtggaggcagccgcgccagtcgtgcacccacccccacgtccacccgctcctgttgcacagagtgccttaggaattctctgattttgatttgctgacgtgttaatcttttcatctgtgagtaaatgaagggaaccagcttttcacttctccagcatcatgtgtgcttgggctgtaggcctgggagcctgaggtggaggccaggaaagggacccagcaggacggggcacaagtccccatctgtgaatggacgggactcatccacccaggttcagcaaccccccgggactcgtccaggttcagcaaccccccggcccatcaaagactggctaaagcatcagccataaatggggacaaacgtggggccagcagcttctgttcggggtctcggcatcagcaaaccgcagcagctttggagaagggtccgtgagtggcggctctggaggcagcaacggggtcctttggggtgggtgggagttctgctggattcaggtggaggtgaacatctgccgttcccacagccctgcgtgcacccccaatgctgctggcccacaaatcaccgtgggccacggccccaccacaccaggcttggccctgtcagcggccagcatcccgagggccagggtccgagtgtcctcaccaaggaggctcttggcgtcgctgtgccggctcccatgggccttctgctgggtcgagggtaggtctcctcctccccctttgccctggcattaaactgatggtcaggctgggcgcggtggctcacacctgtaatctcagcactgcgggaggccgaggcaggaggatcacttgaggtcaggagttcaagaccagcctggccaacatggcgaaaccctgtctctactaaaaacacaaaaacaaattaatcccagctactggggaggctgaggcaggagaatcgcttgaacccagggggcagaagttgcagtgagccgagatcgtgccactacactccagcctgggtgacagagtgagactccatcttaaaaatataaaaataaagtggtggtcagaggagccccgaatagaccagttgtggagaggcctgggtggggtggctggcagggagggcaggccaagcccagtttctgcccacagtcacctcgaggtgactgtccagggctttgggcaccttcccgggagggggacggccgcccaccctgagtggtgttggaagctgggctctcctggatgccctgacccagctgcctggggagagccctgggcccctcctccctcagcacctcctccctcagcccctcctgcctcggtccctcctcccttagcctgtctggcatagatccatgttccctagcccctggcacaggtgcctctgactggagtgagggcctactgtggcccgggagctgctctgggggttgataaagggcagcattattgggtcctgggaaggagcgggcgtgaggccagctgaggcatggtgacccctgggaaggagcgggcgtgaggccagctgaggcatggtgacccctgggaaggagcgggcgtgaggccagctgaggcatggtgacccctgggaaggagcgggcgtgaggccagctgaggcatggtgacccctgggaaggagcgggcgtgaggccagctgaggcatggtgacccctgggtatgggggacttgggggccgcaccttggtttgcccagggcccctcctgcaccacgggccacatgcggaggacggcgtgggataggctccctgggtccacagcttctgcccgtgtatggggaaccctccttggtcagggctgcaggctctgggcagatggggcaggaaccctgaggctcccgcgccctcccatggcctctgatgtgggacactggagcgaggcacgattctgaaggactccatggatctgggaggatgaggcccacctccggttggtggccaaagccgtccttgcggggccggctgcttcacggacactctccgggtcgggctggtgggccccatcgtgggtgggaagtcgcctgagcctgggccgcccttgagcttctcccagtcttgactttccagagggtccgtggctgtggtcatggtcggggcaggtggaaaatgctgcatggaaacctgatcctgtcaccttggagtaaatgatgatgtcgccggcttctcgccacgtctaaaggataaatgcatttgaagaaagtgggtgttgggtttgttatgggttaaagtgcttttgaaataagtaaattattagtttgattttc

SEQ ID NO: 666141 - DNA, 3970 bp, Homo sapiens
gcggccgccgcctccgctctgagccccgccccgctcggccgccgattgctcgggcctggccgccagcccaggggccgatggccgagcgcgtcgcactcgcgtccctgcgccgtgcctgcctcgcgctccctgttacggcgttcgtccccgggcctggcgcccgcgtccggcccggctccgcggcggcctggtccgatggctcctcagcggagggccgcaaccaaggcgcccgagggcaacggagcggccgagcgccggaaccggagcagcaccaagaaggaccgagccccgcgggaggtgcagaggctgtggcagaggccgtggctaaggaccgcgggcctgggggctggctttgtgctcaccgcactcctgctctggagcagcttgggggccgacgacggggtcgcagaggtcctggcccgccgtggcgaggtcgtggcagggagattcatcgaggtgccctgctctgaggactacgacagtcaccgcaggttcgaaggctgcactccccgaaagtgcggcagaggtgtcaccgatgtcgtcatcaccagggaggaagcggagcggattcgcagcgtagctgaaaaggggctctccctgggaggatctgacggaggggcatccattctggacttgcactcaggggccctgtctgtcgggaagcactttgtgaacctgtacagatacttcggggataaaatacagaacatcttctcagaggaggacttccggttataccgggaggtgcggcagaaggtccagctcaccattgctgaggcttttggcatcagcgcatcctcgctgcatctgaccaagcccaccttcttctcccgcataaacagcacggaagcgcggacggcgcacgacgagtactggcatgcgcacgtggacaaggtgacctacggctccttcgactacacctcgctgctgtacctctccaactacctggaggacttcggcggagggcggttcatgttcatggaggagggtgccaacaagacggtggagccgagagctggtcgcgtctccttcttcacctcggggtccgagaacctacaccgcgtggagaaggtccactggggcacccgttacgccatcaccatcgccttcagctgcaaccccgaccatggcatcgaggacccagcgttcccgtagccagcagccgggccaaggtaacttcaggagggcccgtgtggaggcagccgcgccagtcgtgcacccacccccacgtccacccgctcctgttgcacagagtgccttaggaattctctgattttgatttgctgacgtgttaatcttttcatctgtgagtaaatgaagggaaccagcttttcacttctccagcatcatgtgtgcttgggctgtaggcctgggagcctgaggtggaggccaggaaagggacccagcaggacggggcacaagtccccatctgtgaatggacgggactcatccacccaggttcagcaaccccccgggactcgtccaggttcagcaaccccccggcccatcaaagactggctaaagcatcagccataaatggggacaaacgtggggccagcagcttctgttcggggtctcggcatcagcaaaccgcagcagctttggagaagggtccgtgagtggcggctctggaggcagcaacggggtcctttggggtgggtgggagttctgctggattcaggtggaggtgaacatctgccgttcccacagccctgcgtgcacccccaatgctgctggcccacaaatcaccgtgggccacggccccaccacaccaggcttggccctgtcagcggccagcatcccgagggccagggtccgagtgtcctcaccaaggaggctcttggcgtcgctgtgccggctcccatgggccttctgctgggtcgagggtaggtctcctcctccccctttgccctggcattaaactgatggtcaggctgggcgcggtggctcacacctgtaatctcagcactgcgggaggccgaggcaggaggatcacttgaggtcaggagttcaagaccagcctggccaacatggcgaaaccctgtctctactaaaaacacaaaaacaaattaatcccagctactggggaggctgaggcaggagaatcgcttgaacccagggggcagaagttgcagtgagccgagatcgtgccactacactccagcctgggtgacagagtgagactccatcttaaaaatataaaaataaagtggtggtcagaggagccccgaatagaccagttgtggagaggcctgggtggggtggctggcagggagggcaggccaagcccagtttctgcccacagtcacctcgaggtgactgtccagggctttgggcaccttcccgggagggggacggccgcccaccctgagtggtgttggaagctgggctctcctggatgccctgacccagctgcctggggagagccctgggcccctcctccctcagcacctcctccctcagcccctcctgcctcggtccctcctcccttagcctgtctggcatagatccatgttccctagcccctggcacaggtgcctctgactggagtgagggcctactgtggcccgggagctgctctgggggttgataaagggcagcattattgggtcctgggaaggagcgggcgtgaggccagctgaggcatggtgacccctgggaaggagcgggcgtgaggccagctgaggcatggtgacccctgggaaggagcgggcgtgaggccagctgaggcatggtgacccctgggaaggagcgggcgtgaggccagctgaggcatggtgacccctgggaaggagcgggcgtgaggccagctgaggcatggtgacccctgggtatgggggacttgggggccgcaccttggtttgcccagggcccctcctgcaccacgggccacatgcggaggacggcgtgggataggctccctgggtccacagcttctgcccgtgtatggggaaccctccttggtcagggctgcaggctctgggcagatggggcaggaaccctgaggctcccgcgccctcccatggcctctgatgtgggacactggagcgaggcacgattctgaaggactccatggatctgggaggatgaggcccacctccggttggtggccaaagccgtccttgcggggccggctgcttcacggacactctccgggtcgggctggtgggccccatcgtgggtgggaagtcgcctgagcctgggccgcccttgagcttctcccagtcttgactttccagagggtccgtggctgtggtcatggtcggggcaggtggaaaatgctgcatggaaacctgatcctgtcaccttggagtaaatgatgatgtcgccggcttctcgccacgtctaaaggataaatgcatttgaagaaagtgggtgttgggtttgttatgggttaaagtgcttttgaaataagtaaattattagtttgattttcattcttggctacttacactattcatgataatcacagagatacttggacaaagaaatatattgggcaaaagcaagaatttccttcttttttttttgagacggagtctaactctgtcgcccaggctggagtgcagtggcgcaatctcggctcactgaaggtccacctcctgggttcccaccattctcctgctcaactcccagtactcggagctgaggcaggacgactgcttgagccaggaggtcgaggctacagtgagctgttgacggctcgactgcattcaagcctggggagacagcaagatacgtgctcagaaaaaaattatcctttgaagctgcgcttttaacaaacaaaaaaaggcggcggcaaaagaaccccagaggccaaactaacgtacccgctttggcacagggcccaacgaaggggacaaagaagcggcggcgaacacggcgggaaacgactcggagattggacgacacaccggtgcaacggaacaccagctccgccgcgaaaacccgcgtacaccacagccacgcc

SEQ ID NO: 666142 - DNA, 825 bp, Homo sapiens
  misc_feature (749)..(749): n is a, c, g, or t
  misc_feature (784)..(784): n is a, c, g, or t
  misc_feature (807)..(807): n is a, c, g, or t
tatatgctagttgtaggaaatatagttattaaaccagactcccagactataacctgtgaaaactgtagattgcttacttgcattgattcaacttttaattggcaacaccgtattctgctggtgagagcaagagagggcgtgtggatccttgtgtccatggaccgaccgtgggaggcctcaccatccgtccatattttgactgaagtattaaaaggtgttttaaatagatccaaaagattcatttttactttaattgcagtgattatgggattaattgcagtcacagctacgggtgctgtagcaggagttgcattgcactcttctgctcagtcagtaaactttgttaatgattggcaaaaaaattctacaagattgtggaattcacaatctagtattggtcaaaaattggcaaatcaaattaatgatcttagacaaactgtcatttggatgggagacagactcatgagcttagaacatcgtttccagttacaatgtgactggaatacgtcagatttttgtattacaccccaaatttataatgagtctgagcatcactgggacatggttagacgccatctacagggaagagaagataatctcactttagacatttccaaattaaaagaacaaattttcgaagcatcaaaagcccatttaaatttggtgccaggaactgaggcaattgcaggagttgctgatggcctcgcaaatcttaaccctgtacttgggttaagacccattgggaagtnctacgattttaaatctcatattaaatccttggggngcctggtttggccggtggtaagnctgaagggggaccccaaa

SEQ ID NO: 666143 - DNA, 3337 bp, Homo sapiens
gcggccgccgcctccgctctgagccccgccccgctcggccgccgattgctcgggcctggccgccagcccaggggccgatggccgagcgcgtcgcactcgcgtccctgcgccgtgcctgcctcgcgctccctgttacggcgttcgtccccgggcctggcgcccgcgtccggcccggctccgcggcggcctggtccgatggctcctcagcggagggccgcaaccaaggcgcccgagggcaacggagcggccgagcgccggaaccggagcagcaccaagaaggaccgagccccgcgggaggtgcagaggctgtggcagaggccgtggctaaggaccgcgggcctgggggctggctttgtgctcaccgcactcctgctctggagcagcttgggggccgacgacggggtcgcagaggtcctggcccgccgtggcgaggtcgtggcagggagattcatcgaggtgccctgctctgaggactacgacagtcaccgcaggttcgaaggctgcactccccgaaagtgcggcagaggtgtcaccgatgtcgtcatcaccagggaggaagcggagcggattcgcagcgtagctgaaaaggggctctccctgggaggatctgacggaggggcatccattctggacttgcactcaggggccctgtctgtcgggaagcactttgtgaacctgtacagatacttcggggataaaatacagaacatcttctcagaggaggacttccggttataccgggaggtgcggcagaaggtccagctcaccattgctgaggcttttggcatcagcgcatcctcgctgcatctgaccaagcccaccttcttctcccgcataaacagcacggaagcgcggacggcgcacgacgagtactggcatgcgcacgtggacaaggtgacctacggctccttcgactacacctcgctgctgtacctctccaactacctggaggacttcggcggagggcggttcatgttcatggaggagggtgccaacaagacggtggagccgagagctggtcgcgtctccttcttcacctcggggtccgagaacctacaccgcgtggagaaggtccactggggcacccgttacgccatcaccatcgccttcagctgcaaccccgaccatggcatcgaggacccagcgttcccgtagccagcagccgggccaaggtaacttcaggagggcccgtgtggaggcagccgcgccagtcgtgcacccacccccacgtccacccgctcctgttgcacagagtgccttaggaattctctgattttgatttgctgacgtgttaatcttttcatctgtgagtaaatgaagggaaccagcttttcacttctccagcatcatgtgtgcttgggctgtaggcctgggagcctgaggtggaggccaggaaagggacccagcaggacggggcacaagtccccatctgtgaatggacgggactcatccacccaggttcagcaaccccccgggactcgtccaggttcagcaaccccccggcccatcaaagactggctaaagcatcagccataaatggggacaaacgtggggccagcagcttctgttcggggtctcggcatcagcaaaccgcagcagctttggagaaggccctgcgtgcacccccaatgctgctggcccacaaatcaccgtgggccacggccccaccacaccaggcttggccctgtcagcggccagcatcccgagggccagggtccgagtgtcctcaccaaggaggctcttggcgtcgctgtgccggctcccatgggccttctgctgggtcgagggtaggtctcctcctccccctttgccctggcattaaactgatggtcaggctgggcgcggtggctcacacctgtaatctcagcactgcgggaggccgaggcaggaggatcacttgaggtcaggagttcaagaccagcctggccaacatggcgaaaccctgtctctactaaaaacacaaaaacaaattaatcccagctactggggaggctgaggcaggagaatcgcttgaacccagggggcagaagttgcagtgagccgagatcgtgccactacactccagcctgggtgacagagtgagactccatcttaaaaatataaaaataaagtggtggtcagaggagccccgaatagaccagttgtggagaggcctgggtggggtggctggcagggagggcaggccaagcccagtttctgcccacagtcacctcgaggtgactgtccagggctttgggcaccttcccgggagggggacggccgcccaccctgagtggtgttggaagctgggctctcctggatgccctgacccagctgcctggggagagccctgggcccctcctccctcagcacctcctccctcagcccctcctgcctcggtccctcctcccttagcctgtctggcatagatccatgttccctagcccctggcacaggtgcctctgactggagtgagggcctactgtggcccgggagctgctctgggggttgataaagggcagcattattgggtcctgggaaggagcgggcgtgaggccagctgaggcatggtgacccctgggaaggagcgggcgtgaggccagctgaggcatggtgacccctgggaaggagcgggcgtgaggccagctgaggcatggtgacccctgggaaggagcgggcgtgaggccagctgaggcatggtgacccctgggaaggagcgggcgtgaggccagctgaggcatggtgacccctgggtatgggggacttgggggccgcaccttggtttgcccagggcccctcctgcaccacgggccacatgcggaggacggcgtgggataggctccctgggtccacagcttctgcccgtgtatggggaaccctccttggtcagggctgcaggctctgggcagatggggcaggaaccctgaggctcccgcgccctcccatggcctctgatgtgggacactggagcgaggcacgattctgaaggactccatggatctgggaggatgaggcccacctccggttggtggccaaagccgtccttgcggggccggctgcttcacggacactctccgggtcgggctggtgggccccatcgtgggtgggaagtcgcctgagcctgggccgcccttgagcttctcccagtcttgactttccagagggtccgtggctgtggtcatggtcggggcaggtggaaaatgctgcatggaaacctgatcctgtcaccttggagtaaatgatgatgtcgccggcttctcgccacgtctaaaggataaatgcatttgaagaaagtgggtgttgggtttgttatgggttaaagtgcttttgaaataagtaaattattagtttgattttc

SEQ ID NO: 666144 - DNA, 803 bp, Homo sapiens
  misc_feature (107)..(107): n is a, c, g, or t
  misc_feature (182)..(182): n is a, c, g, or t
  misc_feature (214)..(214): n is a, c, g, or t
  misc_feature (223)..(223): n is a, c, g, or t
  misc_feature (233)..(233): n is a, c, g, or t
  misc_feature (237)..(237): n is a, c, g, or t
  misc_feature (803)..(803): n is a, c, g, or t
gtacactggtttctcgtatgttacggtggtattccggaactgggtttgtataatagctgccattggagacttccaggcaatgaaggcatatgtttgtttttttaaanggaaacaaactctcaaatcatgaagtgatataaaagctgcatatgcctacaaagctctgaattcaggtcccagtngctgtcacaaaggagtgagtgaaactcccacnctacccccntttttatatnatanaagtgccttagcatgttggtcggcagctggtcaccacttacaggaaagctgggtttacagatggttttccactggagcatcacaataaagaggaccaggtgctaaaaaaaaaaaaaaaaaaaaaaaaaaaaaaaaaaaaggggggcggggggcaaaaaataacccccaggggggcgcccaaagctacgcgccacccattttttgggaaaaggggggccaaaagagaggggtgtgtctatttatatctaacgcataagagcaggggcacgcctgattataacaaagtgtacggtggtgcttgagggaaaaaaccgtggagaaagagagggagattcttcttttgggaagggaaaccactaattatatttggggggggagcagaaaaatatagtgggcgagaaaaaataccatatagaaaattatataagacgttcgaggaggaaaattaaataacattataacggggtgttatagtgtgctaacaaaaagggattattctggctgttagaacaattcgaatacccaagaatgtgttctggacattcttaccagcgatgtatataggn

SEQ ID NO: 666145 - DNA, 3649 bp, Homo sapiens
gcggccgccgcctccgctctgagccccgccccgctcggccgccgattgctcgggcctggccgccagcccaggggccgatggccgagcgcgtcgcactcgcgtccctgcgccgtgcctgcctcgcgctccctgttacggcgttcgtccccgggcctggcgcccgcgtccggcccggctccgcggcggcctggtccgatggctcctcagcggagggccgcaaccaaggcgcccgagggcaacggagcggccgagcgccggaaccggagcagcaccaagaaggaccgagccccgcgggaggtgcagaggctgtggcagaggccgtggctaaggaccgcgggcctgggggctggctttgtgctcaccgcactcctgctctggagcagcttgggggccgacgacggggtcgcagaggtcctggcccgccgtggcgaggtcgtggcagggagattcatcgaggtgccctgctctgaggactacgacagtcaccgcaggttcgaaggctgcactccccgaaagtgcggcagaggtgtcaccgatgtcgtcatcaccagggaggaagcggagcggattcgcagcgtagctgaaaaggggctctccctgggaggatctgacggaggggcatccattctggacttgcactcaggggccctgtctgtcgggaagcactttgtgaacctgtacagatacttcggggataaaatacagaacatcttctcagaggaggacttccggttataccgggaggtgcggcagaaggtccagctcaccattgctgaggcttttggcatcagcgcatcctcgctgcatctgaccaagcccaccttcttctcccgcataaacagcacggaagcgcggacggcgcacgacgagtactggcatgcgcacgtggacaaggtgacctacggctccttcgactacacctcgctgctgtacctctccaactacctggaggacttcggcggagggcggttcatgttcatggaggagggtgccaacaagacggtggagccgagagctggatgtttttgtttccggatgatgtcttgtgggttccaagaagttaatggaccgagagccagtgaagctgctggtgcgaaggctggagtcaggtgtcctccggggactcaccacccgcccgagaggggagagacacatgcgattctggaagctgagagcattgcttattgttgattccttggttgccgtgctgagtcctgctttaaggaagcaggtcgcgtctccttcttcacctcggggtccgagaacctacaccgcgtggagaaggtccactggggcacccgttacgccatcaccatcgccttcagctgcaaccccgaccatggcatcgaggacccagcgttcccgtagccagcagccgggccaaggtaacttcaggagggcccgtgtggaggcagccgcgccagtcgtgcacccacccccacgtccacccgctcctgttgcacagagtgccttaggaattctctgattttgatttgctgacgtgttaatcttttcatctgtgagtaaatgaagggaaccagcttttcacttctccagcatcatgtgtgcttgggctgtaggcctgggagcctgaggtggaggccaggaaagggacccagcaggacggggcacaagtccccatctgtgaatggacgggactcatccacccaggttcagcaaccccccgggactcgtccaggttcagcaaccccccggcccatcaaagactggctaaagcatcagccataaatggggacaaacgtggggccagcagcttctgttcggggtctcggcatcagcaaaccgcagcagctttggagaagggtccgtgagtggcggctctggaggcagcaacggggtcctttggggtgggtgggagttctgctggattcaggtggaggtgaacatctgccgttcccacagccctgcgtgcacccccaatgctgctggcccacaaatcaccgtgggccacggccccaccacaccaggcttggccctgtcagcggccagcatcccgagggccagggtccgagtgtcctcaccaaggaggctcttggcgtcgctgtgccggctcccatgggccttctgctgggtcgagggtaggtctcctcctccccctttgccctggcattaaactgatggtcaggctgggcgcggtggctcacacctgtaatctcagcactgcgggaggccgaggcaggaggatcacttgaggtcaggagttcaagaccagcctggccaacatggcgaaaccctgtctctactaaaaacacaaaaacaaattaatcccagctactggggaggctgaggcaggagaatcgcttgaacccagggggcagaagttgcagtgagccgagatcgtgccactacactccagcctgggtgacagagtgagactccatcttaaaaatataaaaataaagtggtggtcagaggagccccgaatagaccagttgtggagaggcctgggtggggtggctggcagggagggcaggccaagcccagtttctgcccacagtcacctcgaggtgactgtccagggctttgggcaccttcccgggagggggacggccgcccaccctgagtggtgttggaagctgggctctcctggatgccctgacccagctgcctggggagagccctgggcccctcctccctcagcacctcctccctcagcccctcctgcctcggtccctcctcccttagcctgtctggcatagatccatgttccctagcccctggcacaggtgcctctgactggagtgagggcctactgtggcccgggagctgctctgggggttgataaagggcagcattattgggtcctgggaaggagcgggcgtgaggccagctgaggcatggtgacccctgggaaggagcgggcgtgaggccagctgaggcatggtgacccctgggaaggagcgggcgtgaggccagctgaggcatggtgacccctgggaaggagcgggcgtgaggccagctgaggcatggtgacccctgggaaggagcgggcgtgaggccagctgaggcatggtgacccctgggtatgggggacttgggggccgcaccttggtttgcccagggcccctcctgcaccacgggccacatgcggaggacggcgtgggataggctccctgggtccacagcttctgcccgtgtatggggaaccctccttggtcagggctgcaggctctgggcagatggggcaggaaccctgaggctcccgcgccctcccatggcctctgatgtgggacactggagcgaggcacgattctgaaggactccatggatctgggaggatgaggcccacctccggttggtggccaaagccgtccttgcggggccggctgcttcacggacactctccgggtcgggctggtgggccccatcgtgggtgggaagtcgcctgagcctgggccgcccttgagcttctcccagtcttgactttccagagggtccgtggctgtggtcatggtcggggcaggtggaaaatgctgcatggaaacctgatcctgtcaccttggagtaaatgatgatgtcgccggcttctcgccacgtctaaaggataaatgcatttgaagaaagtgggtgttgggtttgttatgggttaaagtgcttttgaaataagtaaattattagtttgattttc

SEQ ID NO: 666146 - DNA, 322 bp, Homo sapiens
  misc_feature (107)..(107): n is a, c, g, or t
  misc_feature (182)..(182): n is a, c, g, or t
  misc_feature (214)..(214): n is a, c, g, or t
  misc_feature (223)..(223): n is a, c, g, or t
  misc_feature (233)..(233): n is a, c, g, or t
  misc_feature (237)..(237): n is a, c, g, or t
gtacactggtttctcgtatgttacggtggtattccggaactgggtttgtataatagctgccattggagacttccaggcaatgaaggcatatgtttgtttttttaaanggaaacaaactctcaaatcatgaagtgatataaaagctgcatatgcctacaaagctctgaattcaggtcccagtngctgtcacaaaggagtgagtgaaactcccacnctacccccntttttatatnatanaagtgccttagcatgtctttgcttgtctgtctattactatcagtaagctgtgtttaccgatgttctgctagagcagcacacatta

SEQ ID NO: 666147 - DNA, 154 bp, Homo sapiens
gcgagaatgattatatactatattttagatgagtagcatcagatattgtaaggagtctatacttctataacttctgtggttaatatatcctctcatagtacacatcactagttggtaaacataatggtaatagctaatgtattgaacacttgcc

SEQ ID NO: 666148 - DNA, 3352 bp, Homo sapiens
  misc_feature (8)..(8): n is a, c, g, or t
  misc_feature (10)..(10): n is a, c, g, or t
  misc_feature (13)..(14): n is a, c, g, or t
  misc_feature (16)..(16): n is a, c, g, or t
  misc_feature (18)..(18): n is a, c, g, or t
  misc_feature (30)..(31): n is a, c, g, or t
  misc_feature (33)..(34): n is a, c, g, or t
taggcagntngcnngncngggtgtttaatnncnnactcgcgctccctgttacggcgttcgtccccgggcctggcgcccgcgtccggcccggctccgcggcggcctggtccgatggctcctcagcggagggccgcaaccaaggcgcccgagggcaacggagcggccgagcgccggaaccggagcagcaccaagaaggaccgagccccgcgggaggtgcagaggctgtggcagaggccgtggctaaggaccgcgggcctgggggctggctttgtgctcaccgcactcctgctctggagcagcttgggggccgacgacggggtcgcagaggtcctggcccgccgtggcgaggtcgtggcagggagattcatcgaggtgccctgctctgaggactacgacagtcaccgcaggttcgaaggctgcactccccgaaagtgcggcagaggtgtcaccgatgtcgtcatcaccagggaggaagcggagcggattcgcagcgtagctgaaaaggggctctccctgggaggatctgacggaggggcatccattctggacttgcactcaggggccctgtctgtcgggaagcactttgtgaacctgtacagatacttcggggataaaatacagaacatcttctcagaggaggacttccggttataccgggaggtgcggcagaaggtccagctcaccattgctgaggcttttggcatcagcgcatcctcgctgcatctgaccaagcccaccttcttctcccgcataaacagcacggaagcgcggacggcgcacgacgagtactggcatgcgcacgtggacaaggtgacctacggctccttcgactacacctcgctgctgtacctctccaactacctggaggacttcggcggagggcggttcatgttcatggaggagggtgccaacaagacggtggagccgagagctggtcgcgtctccttcttcacctcggggtccgagaacctacaccgcgtggagaaggtccactggggcacccgttacgccatcaccatcgccttcagctgcaaccccgaccatggcatcgaggacccagcgttcccgtagccagcagccgggccaaggtaacttcaggagggcccgtgtggaggcagccgcgccagtcgtgcacccacccccacgtccacccgctcctgttgcacagagtgccttaggaattctctgattttgatttgctgacgtgttaatcttttcatctgtgagtaaatgaagggaaccagcttttcacttctccagcatcatgtgtgcttgggctgtaggcctgggagcctgaggtggaggccaggaaagggacccagcaggacggggcacaagtccccatctgtgaatggacgggactcatccacccaggttcagcaaccccccgggactcgtccaggttcagcaaccccccggcccatcaaagactggctaaagcatcagccataaatggggacaaacgtggggccagcagcttctgttcggggtctcggcatcagcaaaccgcagcagctttggagaagggtccgtgagtggcggctctggaggcagcaacggggtcctttggggtgggtgggagttctgctggattcaggtggaggtgaacatctgccgttcccacagccctgcgtgcacccccaatgctgctggcccacaaatcaccgtgggccacggccccaccacaccaggcttggccctgtcagcggccagcatcccgagggccagggtccgagtgtcctcaccaaggaggctcttggcgtcgctgtgccggctcccatgggccttctgctgggtcgagggtaggtctcctcctccccctttgccctggcattaaactgatggtcaggctgggcgcggtggctcacacctgtaatctcagcactgcgggaggccgaggcaggaggatcacttgaggtcaggagttcaagaccagcctggccaacatggcgaaaccctgtctctactaaaaacacaaaaacaaattaatcccagctactggggaggctgaggcaggagaatcgcttgaacccagggggcagaagttgcagtgagccgagatcgtgccactacactccagcctgggtgacagagtgagactccatcttaaaaatataaaaataaagtggtggtcagaggagccccgaatagaccagttgtggagaggcctgggtggggtggctggcagggagggcaggccaagcccagtttctgcccacagtcacctcgaggtgactgtccagggctttgggcaccttcccgggagggggacggccgcccaccctgagtggtgttggaagctgggctctcctggatgccctgacccagctgcctggggagagccctgggcccctcctccctcagcacctcctccctcagcccctcctgcctcggtccctcctcccttagcctgtctggcatagatccatgttccctagcccctggcacaggtgcctctgactggagtgagggcctactgtggcccgggagctgctctgggggttgataaagggcagcattattgggtcctgggaaggagcgggcgtgaggccagctgaggcatggtgacccctgggaaggagcgggcgtgaggccagctgaggcatggtgacccctgggaaggagcgggcgtgaggccagctgaggcatggtgacccctgggaaggagcgggcgtgaggccagctgaggcatggtgacccctgggaaggagcgggcgtgaggccagctgaggcatggtgacccctgggtatgggggacttgggggccgcaccttggtttgcccagggcccctcctgcaccacgggccacatgcggaggacggcgtgggataggctccctgggtccacagcttctgcccgtgtatggggaaccctccttggtcagggctgcaggctctgggcagatggggcaggaaccctgaggctcccgcgccctcccatggcctctgatgtgggacactggagcgaggcacgattctgaaggactccatggatctgggaggatgaggcccacctccggttggtggccaaagccgtccttgcggggccggctgcttcacggacactctccgggtcgggctggtgggccccatcgtgggtgggaagtcgcctgagcctgggccgcccttgagcttctcccagtcttgactttccagagggtccgtggctgtggtcatggtcggggcaggtggaaaatgctgcatggaaacctgatcctgtcaccttggagtaaatgatgatgtcgccggcttctcgccacgtctaaaggataaatgcatttgaagaaagtgggtgttgggtttgttatgggttaaagtgcttttgaaataagtaaattattagtttgattttc

SEQ ID NO: 666149 - DNA, 242 bp, Homo sapiens
ccgcctcagcactcaagtatctgggattacaggtgtgtgccaccatgcccggctaatttttgtatcctttagcagagacgggtttcaccatgttggccaggctggtcttgaactcccgacctcaggcgatcctcccacctcagcctcccgaactattgagatcacagaagtgagccactgcgcccagctcacactgttctttattttactttttttacttgacttttttttttttatgatat

SEQ ID NO: 666150 - DNA, 3378 bp, Homo sapiens
tacaacaaagaaacgaacggcaccaatattataggtacgatccgggtttaatcagccgaggctcgcgctccctgttacggcgttcgtccccgggcctggcgcccgcgtccggcccggctccgcggcggcctggtccgatggctcctcagcggagggccgcaaccaaggcgcccgagggcaacggagcggccgagcgccggaaccggagcagcaccaagaaggaccgagccccgcgggaggtgcagaggctgtggcagaggccgtggctaaggaccgcgggcctgggggctggctttgtgctcaccgcactcctgctctggagcagcttgggggccgacgacggggtcgcagaggtcctggcccgccgtggcgaggtcgtggcagggagattcatcgaggtgccctgctctgaggactacgacagtcaccgcaggttcgaaggctgcactccccgaaagtgcggcagaggtgtcaccgatgtcgtcatcaccagggaggaagcggagcggattcgcagcgtagctgaaaaggggctctccctgggaggatctgacggaggggcatccattctggacttgcactcaggggccctgtctgtcgggaagcactttgtgaacctgtacagatacttcggggataaaatacagaacatcttctcagaggaggacttccggttataccgggaggtgcggcagaaggtccagctcaccattgctgaggcttttggcatcagcgcatcctcgctgcatctgaccaagcccaccttcttctcccgcataaacagcacggaagcgcggacggcgcacgacgagtactggcatgcgcacgtggacaaggtgacctacggctccttcgactacacctcgctgctgtacctctccaactacctggaggacttcggcggagggcggttcatgttcatggaggagggtgccaacaagacggtggagccgagagctggtcgcgtctccttcttcacctcggggtccgagaacctacaccgcgtggagaaggtccactggggcacccgttacgccatcaccatcgccttcagctgcaaccccgaccatggcatcgaggacccagcgttcccgtagccagcagccgggccaaggtaacttcaggagggcccgtgtggaggcagccgcgccagtcgtgcacccacccccacgtccacccgctcctgttgcacagagtgccttaggaattctctgattttgatttgctgacgtgttaatcttttcatctgtgagtaaatgaagggaaccagcttttcacttctccagcatcatgtgtgcttgggctgtaggcctgggagcctgaggtggaggccaggaaagggacccagcaggacggggcacaagtccccatctgtgaatggacgggactcatccacccaggttcagcaaccccccgggactcgtccaggttcagcaaccccccggcccatcaaagactggctaaagcatcagccataaatggggacaaacgtggggccagcagcttctgttcggggtctcggcatcagcaaaccgcagcagctttggagaagggtccgtgagtggcggctctggaggcagcaacggggtcctttggggtgggtgggagttctgctggattcaggtggaggtgaacatctgccgttcccacagccctgcgtgcacccccaatgctgctggcccacaaatcaccgtgggccacggccccaccacaccaggcttggccctgtcagcggccagcatcccgagggccagggtccgagtgtcctcaccaaggaggctcttggcgtcgctgtgccggctcccatgggccttctgctgggtcgagggtaggtctcctcctccccctttgccctggcattaaactgatggtcaggctgggcgcggtggctcacacctgtaatctcagcactgcgggaggccgaggcaggaggatcacttgaggtcaggagttcaagaccagcctggccaacatggcgaaaccctgtctctactaaaaacacaaaaacaaattaatcccagctactggggaggctgaggcaggagaatcgcttgaacccagggggcagaagttgcagtgagccgagatcgtgccactacactccagcctgggtgacagagtgagactccatcttaaaaatataaaaataaagtggtggtcagaggagccccgaatagaccagttgtggagaggcctgggtggggtggctggcagggagggcaggccaagcccagtttctgcccacagtcacctcgaggtgactgtccagggctttgggcaccttcccgggagggggacggccgcccaccctgagtggtgttggaagctgggctctcctggatgccctgacccagctgcctggggagagccctgggcccctcctccctcagcacctcctccctcagcccctcctgcctcggtccctcctcccttagcctgtctggcatagatccatgttccctagcccctggcacaggtgcctctgactggagtgagggcctactgtggcccgggagctgctctgggggttgataaagggcagcattattgggtcctgggaaggagcgggcgtgaggccagctgaggcatggtgacccctgggaaggagcgggcgtgaggccagctgaggcatggtgacccctgggaaggagcgggcgtgaggccagctgaggcatggtgacccctgggaaggagcgggcgtgaggccagctgaggcatggtgacccctgggaaggagcgggcgtgaggccagctgaggcatggtgacccctgggtatgggggacttgggggccgcaccttggtttgcccagggcccctcctgcaccacgggccacatgcggaggacggcgtgggataggctccctgggtccacagcttctgcccgtgtatggggaaccctccttggtcagggctgcaggctctgggcagatggggcaggaaccctgaggctcccgcgccctcccatggcctctgatgtgggacactggagcgaggcacgattctgaaggactccatggatctgggaggatgaggcccacctccggttggtggccaaagccgtccttgcggggccggctgcttcacggacactctccgggtcgggctggtgggccccatcgtgggtgggaagtcgcctgagcctgggccgcccttgagcttctcccagtcttgactttccagagggtccgtggctgtggtcatggtcggggcaggtggaaaatgctgcatggaaacctgatcctgtcaccttggagtaaatgatgatgtcgccggcttctcgccacgtctaaaggataaatgcatttgaagaaagtgggtgttgggtttgttatgggttaaagtgcttttgaaataagtaaattattagtttgattttc

SEQ ID NO: 666151 - DNA, 388 bp, Homo sapiens
  misc_feature (54)..(54): n is a, c, g, or t
  misc_feature (89)..(89): n is a, c, g, or t
  misc_feature (108)..(108): n is a, c, g, or t
  misc_feature (130)..(130): n is a, c, g, or t
  misc_feature (196)..(196): n is a, c, g, or t
  misc_feature (210)..(210): n is a, c, g, or t
  misc_feature (310)..(310): n is a, c, g, or t
  misc_feature (381)..(381): n is a, c, g, or t
ggattcatggaccggatcagttaccaggacataggagtgattcctgccccaacnaaccgcattcgggtggattttttatcaacttaatngctattccaaagatttttntttcctatttttgccgattganccccttaagatccacgatggaattgtgtttgccgtttttggtaaaggagcaaaaccgaggacctgnagataacgctggancatctccttggaggattcagcacgagtagatggtaacattttaaagggaaagggggggttttgtttaaatagtaatcagtaagtcacttctaatttaaanaaacaaaattggagttgaagaataagtaggtttccaattgctattgcccgttttctttgaaaaaataaacnatttttt

SEQ ID NO: 666152 - DNA, 124 bp, Homo sapiens
ctcgaggagttacccgactagcccgacagactttggatcctgggcgagatgaagggaagagggttgttttggcttcggacgacccttgctcctgaccggaagagaagtccctatcccacacctg

SEQ ID NO: 666153 - DNA, 116 bp, Homo sapiens
agaggaacgttgggtgcctgcccttatgtacaaacagagctctgaatttgaggcgggaaagaagactagcgtcacactccatgttcacacgaacattgctgggagtcagtttctct

SEQ ID NO: 666154 - DNA, 989 bp, Homo sapiens
aaaaatgtgtgtatattagtctgtcagggcgttgtgttggaggacgcagttcacgcactgacttgtgtctattcctctgcccaggtgtctctgtttgctgcccaaggcagtcagttcatgatcatcggtccatgtccatgttcgtgcttcagcacttacgtgggaacattgtaccacctttgtcttttctcctagtatcagtggtgttccatcacaaatctttaacgttctcgtcctcatttgcttatcctatcaggcgtaatgtaagtaagtgaaaagaatttaactctcctgcttcatttctttgtcttatagtcctcccgtctttgcagcctgtcttctcttccctcagtgcctggacgctggtactgggcccctggccccatggagcagttctgccttcttgagtcactgacctgtgtaggtacatacctgaccgggagtgcaaaccaccttgagtgcgtactgaaggtccacatgatctcatcacgacctttcttagcctggctcctctcaagggcattctgggcttgtaaacagacataggaagcctctgtataacctgaagcaccatgtgtccagtccgattggttccccactggcagcactggtaagagctgagagaaaacaggcgtctcagggtaccctgacttgagagggactcgttctcatgaagctcgaacttcgacgcaatatgtccagatacgttctttcagagatctgctatccccatcccaaagtattaagaccccaggccatttccactgaagtgtacttcaccaactgaatagcgacaaggacactgactcatcgtgcaactcgacaacttccgagtgcgtcccgatacgctccgcgtttcacttgatcgcccgcgtccggcacccttcggcgccctaccccaagggaactcgaaccgcctaccgaccgccagcagcaccactccgccagcgcccccaccctcatggcccaccaacccctccacccaccca

SEQ ID NO: 666155 - DNA, 188 bp, Homo sapiens
aagctcggccctcctacctgggcataagagctcttccttggcctctcaagtgctgggattatagttgtagccctacaacagccttagaatatttaaaaaacaaagcaaagccgtggtgtttcctgaccctcagactggaccctaacctcctttgtttcttttcttgttgagacagagtctcagctctt

SEQ ID NO: 666156 - DNA, 439 bp, Homo sapiens
gagtgagaaaactgacgaagagaagatgctagtaagtgagtaaagcttggattcgaatgtgggctctctgacttcatagtttgctcttaaccactagacactagttccttcttataatcatatgggttctttaaaaaaggaaggtgaggctgggcgtggtggctcacgcctgtaatcccagcagtttgggatgccaaggtgggtggatcacttgaggccaggagttggagaccagcccggccaacacggtgaaacccggtctctactaataatacacaaaaattagccggggatggtggcaagtgcctacaatcccagctacttgggaggctgaggcaggagaatggcttgaacatgggaggcagaggttgcagtgagctgagaacacgccactggactccagcctgggtgatagagccagactccatctcaaaaaaaa

SEQ ID NO: 666157 - DNA, 535 bp, Homo sapiens
  misc_feature (18)..(18): n is a, c, g, or t
cccactgactgtggcccnccgtgatcatcctctcagggacaagacagagcgcaggaatggaagcggagtcctaacaggatgaaggttcccccatcagttcccccagtacctcaaggcaagtagctttccacatttgtcacagaaatcagaggagagcgggtgttgggagccctttggagacgcccagtctcccaggccccctgcatctatcgagtttgcaatgtcacaacctctttgatcttgtgctcagcatgattctttaatagaagttttattttttcgggccctctgctaatcatgtgggtgagccagtggaacagcgggagacctgtgctagttttacaaattgcctcctaatgacgcggctcaaaaggaaaccaagtggtcaggagttgtttttgaccccctgttttctcctcccccaaggaaaaaagtttaggagaaaccagcttttctggtttttgaaaaattacagcttccccctgtcaagttaccaaggaaggcctgggcccaaaaaaggtttttcccccttgga

SEQ ID NO: 666158 - DNA, 270 bp, Homo sapiens
  misc_feature (180)..(180): n is a, c, g, or t
gtcctttatgtatattccctagcctgtcaccagggggccttgtgccgtttgctccataatattgagcacattagtaccctttctgcttccactttcttcactgtcttagtctgcttggctgcttacaaaataccatagactgggcagcttaaatcacagatatttatcctcacagttctngaagcttggaagtccgtgattaacgtaccagccagtttggtttctagtgagggctttcttcctggcttgcagatcgccaccttctcaccg

SEQ ID NO: 666159 - DNA, 965 bp, Homo sapiens
ggtcgccggtagcgcaggacacgggcgcggctgggtggggctgcggtgcgtagtggcgccgggatgtctgcggtgtgcgcgcatgccgtgagtgtgcgcttttggagagtctgcggctggaagtgatgcccggctcgccgcccgcggtatggagctacgatcgcgccatcaccgtcttctcgcgccgacggcacctcttccaagtggagtacgcgcaggaggccgtctaagaaggggctcgcaccgcgtgttggtgttctgaggaagagacattgttgttcttggtgtggatgaaccaagtcagtggccataactgcaggatgaaagaacacgtgcggcaatgatctgtgtctttggatagactcacgtctgcagtgggcctttgcagtgcctcaccgccgatgcaaggatagtcatcaagcgagggcccgggtgagagtgccagagccaccggctgcactgtggaggacccggtcactgtgagagtacatcacccggtacatcgcagtctgaagcaggttatacgcagagcaatgggcgcaggccgtttggacatctctgccctcatcgtgggtttcgagctttgatggcactcctaggtctatcagactgagccctcgggcacataccagtgtcctggaacgcccaatgccataggccgggcgtgccatcgtcagtggccgtgatgttcctgggagaagaactatactgacgacgcgcttggataccgcatgatctgaccattaagctgtcatccaacggggtcctggaagtggtcacgcttgtggcacaaccttggctttggtgtctaaggcggatcatcctcagatttcaatctggcaccagtgaccgctgtcgttcacttgcacgcaacccacactcgggactcctcggcgggaagcaggacgcaccatggccatgtcccccctcttaaggagagggccaacgagttcagcgcacgctgc

SEQ ID NO: 666160 - DNA, 162 bp, Homo sapiens
ggccatttcatggttgatttgctagggtgcgcttcaattaggtgcatgcagtaggtggctgcagtaatgttagcggtcggcgtacggcaggctattggttgcatgagtcggctgatgttcgctaataactagtatggggataaggggtgtagggtaccgagc

SEQ ID NO: 666161 - DNA, 137 bp, Homo sapiens
gaagcggagagagcacatatgctcagaagaggcaaatagacattagtaaattcagtggtcgaaagtcaacttaatgaaatcactggatcaacaggcattcgtttttttttgaaacggagcctcactctgtcctcagg

SEQ ID NO: 666162 - DNA, 185 bp, Homo sapiens
ctgaggttctgtggcctgttgtcagtcctgagctccctctttgccaactttgtttatgttgtcaccagaactctccagcgcattcaaaggatgagaattgtggacccacataccctgccaaggtccctctgccagggaagcattggccggtttttcagtgctccacataggatcctagacaccgg

SEQ ID NO: 666163 - DNA, 102 bp, Homo sapiens
tgtcgaccttctgctctggacacctgagcttatccaaggctgatactctgctcacacacagggactctcctggactctcagccatggtcttggctgagcaca

SEQ ID NO: 666164 - DNA, 403 bp, Homo sapiens
tattcctgagctgggcctgagaaacaaggggagaaaaggtgacagattatgaacattaaaaaaaaaataagaaaaatgtcatgtcatggccagaagttgcaggacagctcagggcctgtgcatcagggctggcctaggggttacgtgctaatttcactgtgctgtggccaccaagccccagacccagctgcacggatggaggcattccagacggaaaagccccattaggtcatcgctacgccgcctgcaatgccgttcagccttccgctgtgtaatctccagcacactccggggagactgtgaatttcagacactctcccagggaccctggctccacaaagcatgaaatgaattgcattcatccatctgtgggcttttaaaaaattcaataattaattcaaaa

SEQ ID NO: 666165 - DNA, 163 bp, Homo sapiens
ccactggtgttactcgcctctgcgagcatcacacatctcagctgcactattcgagctggactagtgtgtcagcctcagtctaattactcagtacaaagggggaatgatcatatccatgcacataggtttacagctctcaggcctactgcacggaaaacattgt

SEQ ID NO: 666166 - DNA, 1107 bp, Homo sapiens
ttattagtataaaaggggagataggtaggagtagcgtggtaagggcgatgagtgtggggaggaatggggtgggtttggtatgttcaaactgtcattttatttttacgttggttaagatatggggagtagtggtgattggagtgtggagtaagattagcgcgtaggtaagaatgtagaggttaagagagggtgatgggtggctatagatgggggggatgatagaggctatgtgtttttgggtgaattcttcgataattggcccattttgggcaaaaagccggttagcgggggcaggcctcctagggagaaggagggtggatggaattaagggtgtaagtcatgttagctgtgtttcagggtgcgaaatagtagtagggctcggtggtgctggagttttaagtttgagtagtaggaatgcggtagtagttaggataatataaatagttaaattaagaaagtggttatgtaagggttgtacggtaaaacgtgctattattcatcctagtgtgggtaattgaggagtatgctaagaatttggcgtagctgggttgggttaaatccacctcaattgcctgctatgatggactaagattgagacaagtgaggaaaaggcttacgttaagtgagggaagagattgggcatatgattgacatgggggctagtatggtcattgtgagaagaagcaggccggatgtcagaggggtgcctgggggtaaccttctgggactcagacgtgaccgggggggctattcctaatttatggctatagccatttgatttcgtcagattacccatgcaagctcccgttcccgtgagttcaccctctatatcaccaggatcataagggacaggtaaagcagcagaatgccgtcaaaaaggcttagccaagcacaagcccccggggaagcaccgcggtgattacccctatgcacaaacggcaggcttacacagcataataaccccgcgggggccactctgtgccagccacacggctgtagagtaacacagcaataacacggcgcaagaggagttatacaccccccgaaagaaaccactggatgaacagcgtgcgaaacaacaacgagggagcatacatcaacgcgacg

SEQ ID NO: 666167 - DNA, 288 bp, Homo sapiens
cagctatggtgatctttgctttttttttttgaaatggagtcctcatgttgcccaggctagagtgcagtggtgcgatctcagctcactgaaacctccacctcccaagttcaagcgattctcccgcctcagcctcctgagtagctggaattacaggtgtgcaccattatgcccagataatttttggtattttcagtagagatgggttttcaccacgattggccaggctggtctcgaacttccttgacctcttgtgatccgacttccttcggttctcccaaatgtgctggg

SEQ ID NO: 666168 - DNA, 330 bp, Homo sapiens
  misc_feature (97)..(97): n is a, c, g, or t
ggagccccaaactggaaatctgagaaccaggccttccgctttgctggtgcagggtcggctccgccctcccccacctgtgtgtccacacccagtcctngccctcggggatgacaccatcctgccaaggcgctagaagtttcccagataagccaggtgggctcggttcactcccactctcccaggggtgctggcctccccagggtttgccttcttacggatttaacgaggttgaggctcacctatcagggcagctctcaggattgtcattttcctcttgctgtgggttaactttgtatttttttaatccaagtttatcaaatgttttatgta

SEQ ID NO: 666169 - DNA, 530 bp, Homo sapiens
gctcttttataacatgtgcaataaaaagaggtttagtcaaaagagaccaaagcccatgtcatcatcagactcctcggattctgatgatgacatgggctctcggtttgtctaaagttcagccttcatatctagaacatgttgagtaagaagacgttcgcgtgcgtgcgaagactaaaatgccagtgtccatgtatccagcacgtgcctccgtgatatctgacattatcgtcataggtatctacaactgttcgtctactcgcgtcacctgggcgtaagcagcgggcgcaaaggcgcgcaagacgtcgctgcatggtgcacggagcccatgattgacatagggagtcgagaagtccagactccgggactcccgtacgtaggacatggattgaacgggtctctcccgaacctgttgcgaccgatttggagggcgagcggaaccttattgtagaaaaaagaaaaggagcaagcggcgcaaaacaaggggagtccaaacgaatggtcacacccgaggctcgcactcgaacttggag

SEQ ID NO: 666170 - DNA, 156 bp, Homo sapiens
taagttactcctgcggtgcacgcctcccgttacatagttcctggtcttctgtgagcgcctgtgctgacctccaacataccgttaatctggagcctcggtaggcgttcctcctgccctgctggtgcctcccatacggtgccctctctcccctctctt

SEQ ID NO: 666171 - DNA, 490 bp, Homo sapiens
  misc_feature (15)..(15): n is a, c, g, or t
  misc_feature (107)..(107): n is a, c, g, or t
  misc_feature (116)..(116): n is a, c, g, or t
  misc_feature (430)..(430): n is a, c, g, or t
  misc_feature (434)..(434): n is a, c, g, or t
  misc_feature (475)..(475): n is a, c, g, or t
  misc_feature (478)..(478): n is a, c, g, or t
gaaaagggtatccgnaagttaagccctactgtccctgggccatcctctctcctctgcctcccccaacatacctgctctgccctaagcccacccagggcctcccttancttcttcanatgcagtggtacttcctccctctgtgcctttcttcctgctgcttccctcatctgaaaaggccaacccttcacctgtccaaatagcacatttttttcaggatctcgcttttcctgggaagtcatcccttcagagcccgaatcctttgtctcactccctgtaagccccgtcacgttctcaaaatcctttgcacctcaagttaggggttccactggtctcctgattgtgtctattgatattcctctggtcttgtcttgtataagttgttactgttttcctaacttcattttaaattctcacgcttaaggaccatgtntgantagtttcttttatcccccggtaggaaatggcagtacttatnctntatcgtgtccac

SEQ ID NO: 666172 - DNA, 230 bp, Homo sapiens
atcgtgtacacccttccagccaggtcctggtattgggggtctttgatcaggatgtccccgagcagcgacgattggagttaccctaagctgtatgagccgggccagctgaaccttcttttcaacaagcggagtttttcatctgcatcgcccagggaatcttacacctcccgtgcttcatagttcttctattccctatggggggttttgctgattccaccccgggatgatgg

SEQ ID NO: 666173 - DNA, 150 bp, Homo sapiens
cgagacatggcaaccatccgatttctgtgtggaaagaggtagacacggaagaatttttcttgagtacagaacaaaatgaaaagtctcccgtgtctacctgtttgcaactgaagaggtagatctggatatcttggtaagatttcttaggtt

SEQ ID NO: 666174 - DNA, 155 bp, Homo sapiens
tgctgacggtcgcctctagacggatcccctagtacgagacgggatttcaccattgggaggccaaggcaggcagatcacaaggtcagatcgagaccatcctggctaacatggtgaaatcccgtctctactaaacaaaattaaaaaattagccaggc

SEQ ID NO: 666175 - DNA, 491 bp, Homo sapiens
  misc_feature (407)..(407): n is a, c, g, or t
atgggttccccctttataaaatgggcttttttttttcagggccagaaaataaaactttcttttgggcagctgctccagttttgtccaaaataatttttttcccacccttccaaaaaacatttcggcaaaaaaaaaataattcccgtaggagcaggcaaacctttctttctttccgggggttcccctagaacctgccggaaaggggaaagtccggggggggggtccccaaccccaggggggccaaggaaaaggtcaggaaataaaggattgtcctgagccctcctggccatgggggccgacccagggggcactgaggcacttgtgggcaaaggctggaggcccatccccctttgtggggggcaaaagctgtcctggaaggcccaattgggaagggagggggtgcttangccttctttaggaaaaaccacccactccattgggcttttgaggaaaggctctctggggccgggcttgaagggggggaatacttt

SEQ ID NO: 666176 - DNA, 520 bp, Homo sapiens
taaacatttctcagatgtaaatggaaatctaataaaatctgtgaaaggtatttttaaaacagctttattgaggtgtgatttacataccataaaatccacccacttccagcaatttcagtgatccacccacgactcaatgatttcagcgcaaccatcaccaccctccaattttagaaatttccatcacctcgaagtcccttcgcagccatgagcagtcacttcctcttcccacccccagccctaagcaaactctaacctgctttccgccttgatagatttgccttttttggaaattccgcataaatagaatcatacaactggtagtctttggtgtctggctgctctcactgagcataatcctttgaggttggtccacactgtagcatcatgggtgggtagttcttataattctctcccattgtacggcaaagccatattttgtttagccattcaccagctgatggacgttcgagccgtttccatattttggctgttattaataaagctgctatgaacatcc

SEQ ID NO: 666177 - DNA, 1052 bp, Homo sapiens
ggccgcagcatttggcgcgccgtctgtgtgtgtgttgtttccgcgtcgtttgaagttttctctgttgtgatggggccgccgattgtgtttcttcagcggccactgtgttcctctccatgatgtgtcctccggctggttctgttagtgtcggccatctgcgtcgctggcctcgcattgtgtgtcgctgtgtgtgctccccccgcctccgtcgtttgttgcttggatgatgggagggcgtctgctgttctcgttgttgcggactgagccccctcggtgttttttcagtgttgttccgtccgctgtctgtgtgcgtcatttgctgccctgacctgcttgtgcgcttgctacgctgtgcgtgttgcccccgtctgctcctatagtttgctgctctctctctggggggcgatattattcttcgcccccgacgaggagggccttcttcttgggggggatctctcccgcgtgggcgcccgcggtaagtagggtgggtgattattctccccgcgctgtgcgttttccacgctctcgtgttttgtgccgctttgaggaggcgcacagaggcccaccgcgaggaagatgttgtgtctctccccgtttccctctctggtctctccccgtctctatgtgcctctcgcggagtgctcctcgcgtgcgtctctgtgagaggtgtgtatcccccctctactctgggcgtctctcccacctcctgggccctctctcgggaccctccacacggcgcgactggtggtttgttgcgaggtgatagatgaagtagagatgaaggaggactctggggttggctttcccctcgtccccgcccccctctctggtggcacttgttcccttcccacctgcttatattttttctaccccacgttgctattttttctcggacccaatcctctgtaagagtatgtaaccactcccaaggcccggaagggcctcgcccgtggccggccttctggttggaggaatggtaccacgttttatttgtacccggtgcttaaaccccacccccccctaaaaagaaaatgggaaaacaaaaagattta

SEQ ID NO: 666178 - DNA, 956 bp, Homo sapiens
  misc_feature (521)..(521): n is a, c, g, or t
gctcctgtcacagaaaagcaaaaaaaaaatagagagagaccatagaggagggttggccagccctgttggtcgggtgggatgtcagagacactttcccagaataaagtaagagttaaccctgcacctcaggtgtgactagtgggtgtcagtggtatgtgatccaggctgggtgagccagagtgtggatgcatggtgccaactccacatcctatctcctgtttctaggccctcatcctcccttgtacggtttaatgtggcggggaagctcagccttcgctgtggagtggacagagatgcacagagctcttccatccttgtgttggcctcttgaccccttgacgtggccatgtggcaaatcctccactagtccccttcttgcccatccaatccctcatgtccccaattctccattgctccccaagcatagatcttgggggccatcatatgcgctaactgaggtaaacatattcaaataacattcataccatatcatctcatcgaaatcacattgcgaaatatcnctagatccttatcacttttattatcactaccattaaagatctccttcgcaaaaggtaacacagaagagcgacaaacatctcaagaaaccctacaacaacaccacatcgaacggaccatttttgggttcccctgcgaatagcgcctatatcttgcacagccccacggccccgttgacctcttggatagggttctcaaccaaaggcattgaaccgttgcagctgcacgaacattgaacggttctagcgcacactttgacctgtgggcgccccccgggcgctgttgtaacgactattttccacgaaaaactataggcggactttataccaaccgcgaactcgttgcgtgtagacagcacaacagttatataaacgtggggaaaagggcgaaaacggccttttgcccaatgtggtccaccgagaaaaagggcttcgcca

SEQ ID NO: 666179 - DNA, 192 bp, Homo sapiens
agagaaaggtgtgattggtattgttaatttagacgagtatgaagctgtggatttcctgtcgataacaggatgtaagagggtttgctcagtggaataaacgtgtttcaccagtattggctgtagtttcccagtttcagtaaatcgttgtcaacagttcctattaaatgcaaataaataagttttaaaaggtca

SEQ ID NO: 666180 - DNA, 868 bp, Homo sapiens
atgattaaactggcctgagttgaatgaaaggataatgtatgctcaacctgtgactaacaccaaggaggtcaagtggcagaaggtcttgtatgagcgacagccctttcctgataactatgtggaccgcgattcctggaagagctccggaaaaacatccatttgctcggaaataccaatattgggctgtggtattggagtccagtgtggtgatccagcagctgtgcagtgttggtgtttggtggtatctgggtgtatatggatgagggtcttctggccccccatgtgctttagggactgccgggttcttcactgatgcgtatgttggttggatctcattgatggatgtgtgaagggcggaagaagagtggccagacccggtgggctgacctgaagagtgcctagtcttcattcacttccacttatgggttccaccagtgctgaagacccttacagagtctgtcagcactgacacacaatctatgccatgtcagtcttcatgctgttaggcaactcatcttttgtgactatggtgcaatgcgtgccaattgtatccaagaaacctatcctttgaacagtggccatctgggcttctgaatggcctggatcacggtctccccggcccgtgatgcctttcaatcatggtggccttggcatcaagaatttggcgtggggccatgtggcggacgaactaggcatgacccccggagcaagggggacacgggcatggacttaaagcggaggacgcatagccacataggaggggacgcgaccatggctacggcacagtacacacgcgggacccaccctcggacggctaaaacacacggcgggagagcaccagacaaggcggccgaaagaaacacaaacc

SEQ ID NO: 666181 - DNA, 1167 bp, Homo sapiens
  misc_feature (130)..(130): n is a, c, g, or t
  misc_feature (132)..(132): n is a, c, g, or t
  misc_feature (176)..(176): n is a, c, g, or t
  misc_feature (308)..(308): n is a, c, g, or t
  misc_feature (316)..(317): n is a, c, g, or t
  misc_feature (355)..(355): n is a, c, g, or t
  misc_feature (357)..(358): n is a, c, g, or t
  misc_feature (364)..(364): n is a, c, g, or t
  misc_feature (382)..(382): n is a, c, g, or t
  misc_feature (392)..(392): n is a, c, g, or t
  misc_feature (493)..(493): n is a, c, g, or t
caaatcagaaaggaaaaattagcattgtctcttgttgtgcagactacagtttttattacataggaaaacccgtaaaggactccagttaaagaaaacgtatttaggacgtaataacggtcaggtcaaaatngntcgggatacaagtcaagcatacaagaaatcaggttgaggtttcngtatacaacaattcttgtctggaacaaaacattagggacacaacaaggtcgcactttactaacagggcagacaaaagaggcagaaagcattattcacaggacggggcaacaatactttggtttacacagganacaactanncgaaacgggttgcatggaacatttaaacaacgaatacnannagcagnactcggacaggattatcncgtggtggcnttcatacgacttggcacaacgcacgttaatcattgggttcaaacagtgttcagataactggcgcgcaagaggtagatcgtaacaggatttcaagtggtacnatccctaatcagaattgccgcaatgggaacttcttttaataggaacttaggaacaaagatacattgctagaaactttcatatcgggggagtacagaaagtaccgtcgaacataagcttaagaacgagatctttggatcaaaggagggaaacagaactgtaggaggggcattcacgactgtccgtacatgttcaagagattgtattttccaaaaggctcatacgggtaataagcgtatagacacagtgggatactacacaggtgttgctcattcagcaaagaagtgattaacgcatggtgaacggggaatgcagtattgcttacattcagcttagtgtacgtttattgcaagcgattgggtatgtcagtaactgtgtaaaaaagcagatacgcagtttcacttacccactggggtgtagaaagttaccgaaccaaaaaagggtcttgtcaagtccataaattcccaaagtaagaaacacgaagcaagcacaaacgccaacgaaacgacaccacacagcagacacaccacacatatgtgtcgcgagcacgccggcgcggtggcggcccgccagggagaacagacgctcgtcagagagaacgaagaaccgcgtgtagatggaggaggagcggccgagacacgaccgagcatgaggagcatcagatcggcacactagt

SEQ ID NO: 666182 - DNA, 267 bp, Homo sapiens
  misc_feature (9)..(9): n is a, c, g, or t
  misc_feature (24)..(24): n is a, c, g, or t
  misc_feature (43)..(43): n is a, c, g, or t
  misc_feature (68)..(68): n is a, c, g, or t
  misc_feature (141)..(141): n is a, c, g, or t
  misc_feature (162)..(162): n is a, c, g, or t
  misc_feature (221)..(221): n is a, c, g, or t
gtccaccantgtgaagaaggtcgntgtttcccctttggccttnccgccatggagtgtaagtttcctgnaggtctcccagtacatactggctggttaagcctgcagaacggtgtacttgtttgaaatgtatctggcccaatncgactgagcgttccgcgctgncatttctccaaactgcccagcagggggcggtgctaacctcggctccgcgcagccacggnttcccgctggcgaaccaaggggcgcgggaaatctggaaaaggcgag

SEQ ID NO: 666183 - DNA, 432 bp, Homo sapiens
gaacacaatgtaagaatgaatggttggatcagaattgcagttataataattggccagtatggagaattaagattttttttgatcaaggtaggctaaatgctctctggcttcccttgaattcaatgctacagggggcaacaatctatggcgccagatagctgccaaaaggttgaacgtacgtatcgttaggatcataaggaaagccatgagtgaaacatgaaacgttaaattttatctgtgaacatacaaacaccatgttatgattatggattttttggggggcaattcaggcatacaataattaatttcagagttctggcagcttcatctaaccaacattttttttttctttacatcaaacgccctgtgaggagtgctacgcaaacaagcataacaccgtataaaaacgacgtcgacgcggccgcgaattta

SEQ ID NO: 666184 - DNA, 798 bp, Homo sapiens
agcgggggggcgcgaaaatcctcggaagatgtggcattacataccgacgaccggtacctgctgcattgagagcagaggcgctgccactaccgctgccccttcgagggaacattgccgggtgcgccatcttcctagtcgctactgtctgcagcggcggagtgccgtgagtcggtggactcagtgcggactggtgcattgtgttgggtaccgggggcgcaggaggatacgagatgcaatttccttctgacaccgtaatctttgtattggcagaccgccggagaggacgaccgggaccttgacgctccgccttgggcgcgaattcctccttctcctcctcctcagtcaaaggctgccggtcgctcctgccgttcgaagagccgagactatcggaaagggaggatgaacgacggacaggctcttccttgcacgcccacggctgtcttcacgaaagaaccggggcggcgacgatagggccggaaggggggtcgggagagactccccattatcttccgacgtgtcgattatggatgtgcccagacggggactgggttgtcaagggaaaccgggtacagacccggaaccggcccggattacaaagacgtggcacccgcgactttggcttgcaccagatgcctggatccccccttcgaagaccatattcacaacgtgtgccaattggcgacgtacaggcggactcgagacaacgaatggctgagccagcaaggcttataccaacgatatcaccatggtccatgatcgctcctcctgggcgcgtagggactcattttactctctaac

SEQ ID NO: 666185 - DNA, 822 bp, Homo sapiens
atggcggctggcctgacggtgacgactcgctgtaccccatcgcggtgctcatagacgaagctcgcggaatgaggacgttgcatgcttctggctcaacatcgatcaagaagctgtccaccatctgccttgtgcccttggggttgaaaggacccgaagtgatgcttctgcctttccttacagataccatctatgatgaagatgagtgtcctcctggccctggcagaacagctgggaaccttcactaccctggtgggagtgcccagatgtacgtgcactgcctgctgccaccggtggagtctgctgtgccacagtggagtgagacagtggtgcgggacgaaggcagtggagtccttacgtggccatctcacacagagacagcgtcgccctctgacctggatggcgcactttgtgccgctagtgaagcggtggctgggcggctgagtggttcacctccctgtacctcggcctgcgtgcctcttctccagtctgctacccccgagtgtccagtgctgtgaaggctgggaagttcgaccagatacgtccggaacctgtgctcagatgacacccccaatggtgctggtgtggcctgagagcgtccaagcggggggggagtctgtcaaaggtgttgggagctggacaacgtcaggagtgacgatcatgccccatgttctccaaagcctggctctgacgagcaggatcaggggcggtgttgctgtggatgggttcgtaacacgccaattctgcccagaagactggacccgggtgtccattggccatgcatgaaaaagctgcgccggaatagaggcgtcacaagccaaaggg

SEQ ID NO: 666186 - DNA, 203 bp, Homo sapiens
cccttctggcatgctgcgccacatcgtccacgaaggccggcgcacccgcagcctgcggcccacctggctgttccaggcggctcgcacgcgcagcgaacgggcctttgacacggagattgccgaactggtgaaggccggcaatgccgaggtgcactgggtgcgaacgctcagccagcccggcacggcaaaggccggccgcgact

SEQ ID NO: 666187 - DNA, 433 bp, Homo sapiens
  misc_feature (301)..(301): n is a, c, g, or t
agaaaactcaacggatccgaggaatattttattctatctatatctgcttgaacctcgactttcaagaaaatttttaaaaacaaggcctgctgacacagttacgggcgccctgctatgtgaggatctgtgggaaagtgactctccctccttggattattgggtgacacactagctacttcatacctggtgcctgaccactcttgaaaaagatacagctgaaaactcagtccaggaggagaaggacctgtgatatttggctttcccaggaaactcctacattccttctcaagatcaaatctanaaacaggtttgtagaatattcactccagctctaagagatggcagaaggttgcagggagtccattgccaggaacacactttcctcagtctcgtaaatgaaactgcacagatggcaaagctaagcaaagggcac

SEQ ID NO: 666188 - DNA, 506 bp, Homo sapiens
gagtcggaagctgctgactcccaactatagcgatgggcacttggcccctgcttttcctgctcagaatagcctccgccgcgttcagagattacgggtacttgcaatgggacaggtggctgctggctggcccaagcaagagagctgaggtatccaagacatgtccattgggggtggtggtccaggtgaggtgcagcattcctgtgtatgctggcagcacttgaagagcgggtgcagggggtcggggcagtgtaggtcctggggcagcccatttatgcgttatatgccccttctccctcatagcctatatcaaaagtcgcctttgctgtcagatcaacctcaaaactttgaatcggatcagagattctgattggctttaaagaggtggatagaagaatattggaattgcctttatattatgcatgaatgtctataattttatctaaatgactgcgctgtaacacattttgtgtgagacagttgaaactgttagtgtgggggataagatg

SEQ ID NO: 666189 - DNA, 334 bp, Homo sapiens
  misc_feature (45)..(45): n is a, c, g, or t
  misc_feature (47)..(47): n is a, c, g, or t
gataattctaagatctgactgatctggggaatgctgacatccttncnagctctcactctgggagaagcatgctaccacgttgtgaaaagccctatggagaggcccacatgatgaggaactgaagctttcagccaccagccagggaggaatggagccctgtcagcaaccataggaatgaacttggaagcagattcaccagcaacagcctagctctggtcaacagctctaacagcctcatgagagacctggtagcagaaccatgcagatatgctgctttttgattcctcagaaactgtgagagaaaataaatgtttgttttttaaaactgagaaaa

SEQ ID NO: 666190 - DNA, 108 bp, Homo sapiens
aaatctttaggatctaggaataggcaaacagaacttttatttatttgtttttttgagaaggagtttcgctctttttttgcccaggctggagtgcaatggtgcgatctt

SEQ ID NO: 666191 - DNA, 158 bp, Homo sapiens
  misc_feature (55)..(55): n is a, c, g, or t
  misc_feature (63)..(63): n is a, c, g, or t
ggggctgggctctgcgggcgatggggcggcagcatgcatgcttctcgcgctgtgnactaggcncaaggggctctacttccacatcggcgagaccgagaagcgctgtttcatcgaggaaatccccgacgagaccatggtcatcggcaactatcggtacc

SEQ ID NO: 666192 - DNA, 104 bp, Homo sapiens
tgtgggaacccgtatccagaggggagacggcagctgcctttaggggcagcaggatggcatgaggccccgtaggagtacaggctggtctgaatcgcttatccaaa

SEQ ID NO: 666193 - DNA, 565 bp, Homo sapiens
agtttaatgtcagggttggtcagaccatactatacatgctgtgagactttttcatcctatcaggtttattacatttattgtacattattgatttagaaactcataaactacctttcgttaaaattacattttcaaccaaagcaagttattggaaataaaaagcactgtaggaattatatatatatgtacatatatacatacatataattgtatatatgtacgtatatgttatatatgtacatatatgtaaatatataattatatatgtacatataatatatgtacatatataattatacatgtatattatatatgtgcatatatacacaaaacatacaaatatatgtaaacatgcacatattcaactatatattatatcaattatattaatatattaattgtatagtaatataattaatattaatatattaatataatatataatcacacatgtgcatatatacatatatctggatgttatatatgcatatatttatatataaatatgtatccatgtttggatatatttatataaatatacatttatatataaatacatatatcc

SEQ ID NO: 666194 - DNA, 112 bp, Homo sapiens
agcgctcgataaatatcgtagctttctccacttcaagtcaactatgactcataatagttcatgctgtcataatttatgctgtaatagtttatgctgtaatagtatatgctgt

SEQ ID NO: 666195 - DNA, 976 bp, Homo sapiens
agggacaaccgcagctgcgcgcaaagtgcaggccttgccggggggacccggagctcctggggggcaccccggagactccgtgaccacgggcaccgcggaacagcgggaagtacctgggaccagcataatgccgctgcgcacgcgagaagcagaagctcgtggagaagatcatgggaccaatacggctgtgctaggagcctgtgcccctgccccggaccaaagaagggcagactggctggcagacaagggtccccttccccggcacccatgcgccgggcccagagctccctcgtgcctgcgggatgagaccttggcaggcgaggcagcaggcggaaactcagctcaaggttcccggtgggacgaagcatatgagatcacttcaggcctggggacacaccctaggcaacgattccgacagcgccatccaggccacctgggggcgcccgtctcccagcagcaaaggacatggtgtgggatgggagaacctcgcgactgagaaccatgcagcgaacagcgaaaccagatgccaaccgagagggccccgaggtacaggaaccggagaaactgtcccactcaccccatccctcagccagtgacaccgtgggaacagcaggcttcgggagtgcagccttctcgggcactggagtgtcagcggaggcccacaggcagcccaagagctcagggagccaagggaaccccaaggggagtcacttggacaaggaggccatgggcccgtgagagtcctaccacggatcagcgaccggaggcccggagatggaagctgggacgagtcgtgtgtacaggggggatggctggcccccacgagcagctccaggctggagttctggttattcacaggtggctcccgttgaggcagcaggtctcctggagggatcccccatgctgcaggaggctggcaggaattggcaagagaacccagtgccatgtccaggtgggaagctgagtcccaggttaa

SEQ ID NO: 666196 - DNA, 442 bp, Homo sapiens
ctgtggcgatgctcttgcctcatacaagcgtaaggaaagcaaaatgcatcaagtactggtgtctctgggaaggggcgcagaatggctgatgcccactgagtggtggacagagaggggtgggttaaggcccagtacgagggccgactctccctgctggaggagccaggcaacggcaccttcactgtcatcctcaaccagctcaccagccgggacgccggcttctactggtgtctgaccaacggcgatactctctggaggaccaccgtggagatcaagattatcgaaggagaaccaaacctcaaggtaccagggaatgtcacggctgtgctgggagagactctcaaggtcccctgtcactttccatgcaaattctcctcgtacgagaaatactggtgcaagtggaataacacgggctgccaggccctgcccagccaagacgaag

SEQ ID NO: 666197 - DNA, 352 bp, Homo sapiens
tggagagagatagcaacgctacacactactggatctggcaatgatttattggatgtaccgccaaaggcacaggcaacaaagaatagacaaataggactgcatgaaaatttttatttttttggagacggattctggctctgtcgcccaagcttggtctcaataacaccaacaaataaaatgaaccaaaaaaccctccctaacttcacatcttattgatttagcaaaaagaccaatctaaccccaaagctagcagcaagaacggtcattaagagcagagattaatgtatcaatgcaaatagagcatatagaaaaacaataggggaaaaaaaatatcaatgttcgtccctttccg

SEQ ID NO: 666198 - DNA, 1630 bp, Homo sapiens
  misc_feature (260)..(260): n is a, c, g, or t
  misc_feature (1378)..(1378): n is a, c, g, or t
agtaagaactagatgaaaaaagcttaggtccgtcttacgtgccttctcatgtggacgcgtatagattcacttgactaggcccatgaacgacgaaccgttcggtggtggtggtcgcgtcgtagtaggtgtcatgggtgtgtggtcaataccactaatcttttgacttttgtcgaaccgccgcgcgattgtgtcgatgtgaatctgtttcttgtaaaacttcgtggtaatacgtggtcttttcgagtacttagcattccagntatgtaacactgtttctttaagtacttcgactcgaagtgggcacgagagagtgaagtcagtggtccatataactatagtgcatataatataaatatatcctttcctccttctgtgtagtggagtcgtgaaatattcagtgatgagggtgatagtgggtgtggaaattgcatcactctttctcgtttgtggggcttgggatgaggggattcccttctctattcttcttataattattcttgactcgtgtatcgtgtgtcgttttgtgaggggtctgggagtgcagtttatgcgcgagcccccaccgttccgcgcgtttggcgttcccgttccgttttcctcccaacattgggacggcacacataagtttcgttccccgtgatatcatttgtgtgtaagttatcagcctttttcatgttgttgtcagtaattatcttcccgtaagtttttaattcgcaggttatattggaggtttgcatatctacttaaaccctttagcggtaagtttgtgggtacatttccgggaaactggaaccttttcaaatatatataacacacaaatccacatgggtgaggggcttcaagggtctttgggtggaacgctggtgttggggaaacttttttccccaacaatggggtaaccccttggttacaaaagcgtggggacataactccagtggagagaaacccactgggacttctccaattcaaggacaattaatttatttccccccccaaggacgcgcacccggagttgttaacgtgatgacttaaaaaccacggtgtccccgtcaagtttggcgcggtctaatcttcccttttatcggcgccctgtggaaaacaaagaatggtatcaagcgcggagcgcgtcgtttacagctaattatcatatgaaaccccccccgaagagtgcctttggggcaaggatataaccacccatagataacagaactaggagatcacttcccaaagtttgcgtccgccagtgggattcccccatacaagcgcgctctgggtcctggggtcgacaggggacccccagcggcatatacgcaaacatcacagagaagtttatgccttcccccttttgtagagggggacttggcaaatcattgtcccncaaaattgttcgtgctgcttagaattccccacaacttcattgaggcgcattctcgacactgcgtagaaaacgactcgatgaagccccccagacgataaaacatggtgagacacacccacctcgtcatcgacccaacattaccaccggtggtatctcaccagggatacccccacgccgtgctgttacagcagagtccctacaagacagagcgagctcgcggcgcgcactacagcacatcagaactaacaaaca

SEQ ID NO: 666199 - DNA, 118 bp, Homo sapiens
atgagccgcctgatgagcaaagggaacccagagccgaactgtatccacatcatgggctgctacattcaggggaaccccaatggagagaagctgttccagaaccttaggaccctcatga

SEQ ID NO: 666200 - DNA, 182 bp, Homo sapiens
atgatgctacacatacttgctagtaagatacctcttacggacccattttactccctaaagctcatgtcgaagcccccctagctgtgtcaatcgtacttgccgcagtaatcttcaaactaggcggctactgtataatacgcctcacactccttctcaagccccatatataacacatggcctac

SEQ ID NO: 666201 - DNA, 634 bp, Homo sapiens
  misc_feature (5)..(5): n is a, c, g, or t
  misc_feature (64)..(64): n is a, c, g, or t
  misc_feature (101)..(101): n is a, c, g, or t
  misc_feature (132)..(132): n is a, c, g, or t
  misc_feature (157)..(157): n is a, c, g, or t
  misc_feature (205)..(205): n is a, c, g, or t
  misc_feature (213)..(213): n is a, c, g, or t
  misc_feature (217)..(217): n is a, c, g, or t
  misc_feature (222)..(222): n is a, c, g, or t
  misc_feature (239)..(239): n is a, c, g, or t
  misc_feature (242)..(242): n is a, c, g, or t
  misc_feature (244)..(244): n is a, c, g, or t
  misc_feature (247)..(249): n is a, c, g, or t
  misc_feature (252)..(253): n is a, c, g, or t
  misc_feature (264)..(265): n is a, c, g, or t
  misc_feature (269)..(270): n is a, c, g, or t
  misc_feature (272)..(272): n is a, c, g, or t
  misc_feature (283)..(283): n is a, c, g, or t
  misc_feature (286)..(286): n is a, c, g, or t
  misc_feature (289)..(289): n is a, c, g, or t
  misc_feature (306)..(308): n is a, c, g, or t
  misc_feature (312)..(312): n is a, c, g, or t
  misc_feature (319)..(319): n is a, c, g, or t
  misc_feature (328)..(329): n is a, c, g, or t
  misc_feature (342)..(342): n is a, c, g, or t
  misc_feature (351)..(351): n is a, c, g, or t
  misc_feature (380)..(380): n is a, c, g, or t
  misc_feature (385)..(385): n is a, c, g, or t
  misc_feature (416)..(417): n is a, c, g, or t
  misc_feature (420)..(420): n is a, c, g, or t
  misc_feature (425)..(425): n is a, c, g, or t
  misc_feature (435)..(435): n is a, c, g, or t
  misc_feature (439)..(440): n is a, c, g, or t
  misc_feature (448)..(448): n is a, c, g, or t
  misc_feature (453)..(453): n is a, c, g, or t
  misc_feature (455)..(455): n is a, c, g, or t
  misc_feature (461)..(462): n is a, c, g, or t
  misc_feature (466)..(467): n is a, c, g, or t
  misc_feature (481)..(481): n is a, c, g, or t
  misc_feature (499)..(499): n is a, c, g, or t
  misc_feature (507)..(507): n is a, c, g, or t
  misc_feature (515)..(515): n is a, c, g, or t
  misc_feature (518)..(518): n is a, c, g, or t
  misc_feature (534)..(534): n is a, c, g, or t
  misc_feature (539)..(539): n is a, c, g, or t
  misc_feature (562)..(562): n is a, c, g, or t
  misc_feature (567)..(567): n is a, c, g, or t
  misc_feature (574)..(574): n is a, c, g, or t
  misc_feature (618)..(618): n is a, c, g, or t
tcccncttagtctgattcacacgtttattaacgtttaatcctgttttcaaagtccaagattganaacttgcaattaaacactgagcaagccacatgtttangtaatatttcttttaaagtcttaaagaaaanagtttgatacagggcctaagttttnagtggcatatatactattaacacatgttctgaaatctggtaggtcacntcttgtcntgtnttaanttttaattttatttatnttntnggnnnttnntgggctttttnntttnngngtggggttgtnggnttntttgttctttttttttnnntgtngttcttnactttgtgnngttctcagttttnttccataantcttcgaacagtagtcctgcttagtttgnctgantccttgatttttaatttggcttttcatgggnngcncacgncaccggcgcncggnnggttttgnggggntntgctgnntttnncttcagggggggtnttttgtgtgttttctttnttgggttngttgcgtnttnttctgtgcgtgctttngctgngcttcgtgtgtttggtgtcttcnctggncccattnacctcattcttagtatcactttccttcgattctgtgtttgtgtnttcactctgcttttct

SEQ ID NO: 666202 - DNA, 977 bp, Homo sapiens
gctcacgttcaggacccaggacaaaaatccgttggtggacatctcagtgctgagcccctggtcttagcagaagcgtgatggttacagagctagtcccagcaaagctactctctctgctgcttagaactgtggacacgtatgggaacgactggaagcacccgattgctttcattgttcagaagaagcccaggagactatggaagatgaccagaactgggcaaacttgatgtgtccaaaacttggcctcaggatgatgcttgtccatcctccaaggcccttcatggccagatggggaaacgtgaggtctcagagaggagtactgcgtctatggtggcatagccattggaaccccttagagacacttatcagagcttccttttgtcgcaagtataacagacaacagaagagtaagtctcttcagaagttctctcagaatgtgtttaagtctctttctcccccagtagtttggtgaaaaagcaggggtactgtgtacgtgttgtctagccagtagcacaggctgcacgaactacagagacagagcgaaagagactcacgggcagacttacctgtcgactagggacatccttgcgagagaagactcgatcctgctctgacctgtgaacggacatccagtagacgtgtcaacgaagcgccatttggcacacgcttgtgttcgccgcgtgctcgcgttctcagtattcaccactcattgctacgaaagccacactggcttacctgttatatcccgcgcagggtagacacccatggggctccttggcacattgacacgcgttggatacagcgcacaccttgtgtcgggtaaatccctttgtgaaaattcaccactgcaagcacgggtatccattggtggattctggctccttggagccccagttttaggtccgaaggctaaggtacacttaaggtgccacgaaccgagtggtcatgtaaaagggatctcacaagtccacaaggag

SEQ ID NO: 666203 - DNA, 451 bp, Homo sapiens
aataaaaaaaggagaaattcatagcagcattattcacaataaccaagaaatacgtacaacccagatgttcatcagtggatgaatggataaacaaaatgtggtaatatgatttggatatttgttccctcaaaatctcacacggacatgtgacccccagtgttggaggtggcgcctagtgggaggtgttggattatggggtggatctcatgaatggcttggtgtcctccacatggatatgagttcatcctatagctagttgtttaaaagagcctggcacctcctccctctcccttttgttccctcttgccatgtgatatgctagctctccctttgccttctgccataattgtaagcttcctgaggcctcaccagaagcagatgctggcactatgcttcttgtacagcctatagacccataagctaaataaaccatttttaataataaattaaa

SEQ ID NO: 666204 - DNA, 861 bp, Homo sapiens
  misc_feature (1)..(1): n is a, c, g, or t
  misc_feature (62)..(63): n is a, c, g, or t
  misc_feature (172)..(172): n is a, c, g, or t
  misc_feature (187)..(187): n is a, c, g, or t
  misc_feature (200)..(200): n is a, c, g, or t
  misc_feature (208)..(208): n is a, c, g, or t
  misc_feature (230)..(230): n is a, c, g, or t
  misc_feature (238)..(238): n is a, c, g, or t
  misc_feature (244)..(244): n is a, c, g, or t
  misc_feature (251)..(251): n is a, c, g, or t
  misc_feature (260)..(261): n is a, c, g, or t
  misc_feature (292)..(292): n is a, c, g, or t
  misc_feature (314)..(314): n is a, c, g, or t
  misc_feature (332)..(332): n is a, c, g, or t
  misc_feature (360)..(360): n is a, c, g, or t
  misc_feature (366)..(366): n is a, c, g, or t
  misc_feature (370)..(370): n is a, c, g, or t
  misc_feature (373)..(373): n is a, c, g, or t
  misc_feature (435)..(435): n is a, c, g, or t
  misc_feature (449)..(449): n is a, c, g, or t
  misc_feature (453)..(453): n is a, c, g, or t
  misc_feature (502)..(502): n is a, c, g, or t
  misc_feature (515)..(515): n is a, c, g, or t
  misc_feature (560)..(560): n is a, c, g, or t
  misc_feature (620)..(620): n is a, c, g, or t
  misc_feature (631)..(631): n is a, c, g, or t
  misc_feature (665)..(665): n is a, c, g, or t
  misc_feature (671)..(671): n is a, c, g, or t
  misc_feature (682)..(682): n is a, c, g, or t
  misc_feature (710)..(710): n is a, c, g, or t
  misc_feature (721)..(721): n is a, c, g, or t
  misc_feature (771)..(771): n is a, c, g, or t
  misc_feature (798)..(798): n is a, c, g, or t
  misc_feature (860)..(860): n is a, c, g, or t
nctgcagggctggctcctggcctctgtcctggcttcatggtcctgacagccctgggccaacnncaagcgcagggaacatacagtagcaccagcctgtaaaagtcgttctccttggcctggaactccttgaagaagggatgggaccagtgggcatccttcagcagggacaggnatcggtttgtcaccncagggggcttgcncaggtgcngggacaggacgaaaaggttaancaacgtcnccgggnagccacnatccttgtnnagcgcctacagcagcaggcccacaacggccncccaacggccctgggccatgtngcaggccgcctgcccatnaaacagcagcagggtgggcgagcacttntaagcnaacnccnggaagaagtagtaggcatccagcaacatctcaccacccgtagccaggctgacccaggcagtngcgaacagggtaanggtngcatcctcgtccaggtcctgcatacacttcaccaccatccgggcaaagnccaggcggtccancaacaccaggaacagcactatcatggctgttcactccaggctgtncccctggtgcagcgcacgcagggcggcatccgggttctggtcgtggagaaagaaggaggnggccatgagcnggaaggtggtgttggtcacgtccacgctcctccncatctnttggtccagcncggccacgatgctgttcctccgactctngtgggcgaggnagttagcaaacatgcgcacggcctggagctcaggggccgaggagggcttnaactcatccaggaccacaccgaacttnctcttcgccaggtacgctctatacaggaagacgtccctcttcacgtctctttctttggcttna

SEQ ID NO: 666205 - DNA, 156 bp, Homo sapiens
gggcagggttcagaaagcagcgcctgtccaaaagctcagaagggtcaaaagctccagcccagaaagcacctgctccaaaggcatctggcaggaaagcataatgtagcaatcactaacaagtacataacaggttcttttttgacctagttgaacaac

SEQ ID NO: 666206 - DNA, 281 bp, Homo sapiens
  misc_feature (41)..(41): n is a, c, g, or t
taaaaacagaactatgctccagcagttccactactgggtantatatatatctccaaaaggaaagaaatcaatgtatcaaaaagatacctgcactcccatgtttattgcagcagtattcacgatagccaaaacatggaatcaacctaagtgcccatcaatagatgaaaggctaaagaaaatgtattattcagccataagaatgaatgaaatcctgtcattggcagcaacatggatggaattggaggtcattatgttaagtaaaataaaccaagcacagaaac

SEQ ID NO: 666207 - DNA, 284 bp, Homo sapiens
ttatcagctcggccctgtgtaggctgcagtgcagagccagtgggagcatcatgtagtgagacagcaaggtatgtccatccccctaggctccacttgcccccatagaagacttgtaggcccaagaagaactgtctgacctgaattctgcagcacagtcttggccatcggatgggggtgatctgacctgaacactccttggtttactggcctctccagtatcccaactgagccacgcctgcttgcagtgcagccttgggtgccctggtggcccacatcacagctcc

SEQ ID NO: 666208 - DNA, 834 bp, Homo sapiens
gcggacaagcgcacagacaagatcttcaggcatgatggacaccaacctaatgacggtcaaactgtccttggaacgtaattcatcagagcgtgccaaagagctgacccctccatcgtccgcctgctgcagtgcggaccccagcaagtgccagatcagttctgagcgagctggaccctggacagttgcagagaaacacaggcttgtcgtgccgtgttaaagctttgcttgcaagagtggatgccccgcaattcgttcctgctctcccgggccccgggcctggcggcagtgcgttgcacctgtgccggtccctggtggcgtgctgcgctcccgtccttccacgctgatcggcaactgctgatcattcctcccgctcatcgcctggcccggtcccttccagggctaactcccagggatgtggtgacatgcagggtatcaatgtgttcttggttccaggcacctcccggctcacggggagctcagaggtccatgccgaggagaccaggcaggacctcccgaggtctgcgccccggccggtccatgcgtaatagtgatcccaagtgactctgtgggcacagtgcgtgcggacgagtgcgtcgggagggtatacaggtagcccctgcccgtgcatggtgtgcctccctcgttcattttctccagcacaggcgcttgcacgtcctagatactagtggtcccctttcttttaacttatctacttgatgcatggtgccgctggacgtagtatccgcgtacggtccagtattcaatgccttctgtcctggcctcgaagcgcagccttcgtgtgtcgccgtgtccccttccctggctgttgcgtgg

SEQ ID NO: 666209 - DNA, 311 bp, Homo sapiens
tccctagcccctcccctcttcaggggtctacatggcactgtgaggaggggagattcgagtgtggtgcggggactgagtgtggctggtgctccccaggcagttgagggtctctctcttcctcttgtgctcttgctggggctggtggtccagtggtcttactccttggaggccatgtgggccatgaggtccaccaccctggttgctgtatcccaattcgttgtctttccaggcaaatgagcttgacaaagtggtcgttgagggcaatgccagccccagcgtcggatgtggacgagtgggagtcgcttgtcgtc

SEQ ID NO: 666210 - DNA, 174 bp, Homo sapiens
cagtaggaacagcataggattgtatgtgggaggtggataggtcggtgatgtgtggagcggaaaagcaggttggtaaagttcccttcttgggacttagttcctgagagtcaaggtggatacaatgtagatgcacgaatggttcacgacgtgacaaactagatggttcctcaatcg

SEQ ID NO: 666211 - DNA, 289 bp, Homo sapiens
tcatgttcaattaaattcattctctctcaactctagtaggggctgaagacattgaaacgagtaagaatctggcggccacctacctagcacacagtgtagtgttaatagcgattcatcgaactggcctgtgaatgaataataaaattcattatgagagcattatttagagaagtttggttttatgaagaggttcacaagctagacagaaggaatcagggtctaaagctgaagaggccagtcccaggagaccagttaaggagctccagggaagtgggaaaaacagagaaat

SEQ ID NO: 666212 - DNA, 212 bp, Homo sapiens
tcgtctctacacgatccccccctgaaacccagtccagcaatacgtggcctcttcttgaccaggctcgtactcgctcgcgatagccctggccgcctcggtcggttttttcgctgctatccaagctccattgggtgatccctttatgcccatacccgcatgtccggcctacgctgtgaattcctggcggtgcgttctgagtccgtctcatcgcc

SEQ ID NO: 666213 - DNA, 534 bp, Homo sapiens
  misc_feature (534)..(534): n is a, c, g, or t
ggtctcgataccgggttcgagcgccacctgccagccattcacgcccaggacaggcagcccgagctccagcgcctcggcctgctcgccgggaggtatgctgtcctcggccgggggtgccccggagtgcaaggacgacaagaaagacacctgacgtggtgctggctgagtggcaagggcaccagggtggcgcctcgtgtccgaagggttgtgacccacggggctggcacaacggccggattagctgcgtgacgagcgtggatttaatgtggccatgtgaaccagcaatccggcatggggggcccggggaaggcacaggctcttgagagcgtcggggacattgcagtgacaggttatcagtcaggggggcgtccaagcttccaaggcttcctgggccgcacaggtttgcgccccaaccattacctcccacaagatgatagaggctctggaggccatgggtggcttcccggatagtaagcaccatacaaaagccagtagcccataccacgtagttaccctcttgcctcccaggagagn

SEQ ID NO: 666214 - DNA, 343 bp, Homo sapiens
  misc_feature (70)..(70): n is a, c, g, or t
  misc_feature (93)..(93): n is a, c, g, or t
  misc_feature (95)..(96): n is a, c, g, or t
  misc_feature (152)..(152): n is a, c, g, or t
  misc_feature (159)..(159): n is a, c, g, or t
  misc_feature (161)..(162): n is a, c, g, or t
  misc_feature (216)..(216): n is a, c, g, or t
  misc_feature (233)..(234): n is a, c, g, or t
  misc_feature (237)..(238): n is a, c, g, or t
  misc_feature (257)..(257): n is a, c, g, or t
  misc_feature (308)..(308): n is a, c, g, or t
gctgacggtgtccctggggctctgcgctcgtccggccggccccggcctcgccgccccgcgcagaacccancccggccccgccgacccgcctcnanngccggctccgcgcccttccccgagggctggaagaagggctgtttcgccctgcaaanggtggananngagctgaccgcggactcggtggaaatggtgcccgctgcaagagctgcaaagcanctgctggcgtgcggganntannaaactgcggcggccggagnaccggcctgccggcccccaaaaacaaaagtgtcaaaaaccggtggctgganaaagccctcttgggcttggcaaaaagccaaatgga

SEQ ID NO: 666215 - DNA, 356 bp, Homo sapiens
caggcacacagtgtgtgcccctcactacaagtctgagttgcagggctatagctgaccaagtagcagagaagtctttatatccaatagactgctaacagattaggatcgaatacttacaatgtgagtgaatgctatgaccaggcctgacacatcagaatggaaacatacatgaaccactcctgtgagggctggagccttggggttcaggaggaggatacaagactacaggcatactgtcaggcttgctcgggactaggcacacacaggatggcgttataaagagtgtgctgcacgactgacacgccatttacatcagcttcatcactttgcttgctctctgtaacatcctattctcc

SEQ ID NO: 666216 - DNA, 1394 bp, Homo sapiens
acagagaaacgggacggaggcagagtactgagtagagatgcgggacgtcaaagcaacaaggtagcatccaacacgagacccgacactcaaaataaaaacaacgcccagagacaggcaaaaagagacaaaagaaacgaaaaaaaaaaagacgaaagacctggacagcacatcgacgaaacgcccctcatgcagcacaccaaacaaagggaggagcacaacgagcccagcacgccaccgcgcaaacacccccgcggcacaccacaacacgcaaacacgcagccaccacaccccccccggcgccaccgcaacagccgcgcaccccacgccacccccgagagagagcacccgcacgcaacacaggagaccaagacacagacggaccagaccaaaccgaggcatgaacctctgcacacggccacaccgcgccaagacacatacacagaacgaacccaccgaagcggcaaaacgcaccaacaccgacacaaggcaacagaccccgccccaaggcaacgacaaaagcagccccacgctcacaccgactgaccatcacagcccaactgccccagacagcgaccgagacccccaccgggacgcgccgaacaacgcgaccggtgcgcacgagaagaaacgacgcaagcaccatgcaccaccaagccagctcaaccccgccaaaacgccccaccccgcacccacccaacgcgggaacaccacaacgcaggccaccgccccccaccaccaccacccgacaccagcccccacaggaacccccaaccgacagcgacccaaacaccagcacgactgtagaacacaagactcccgcccgcgaccagggcgccgacaccagccgagcacagcgccaccgaccaccgccacgccaaaagccacgcgacgcaccagcacgaagcaccagccagacgaccacgccccacgccagtacacgcacaagagctacgcgtcacacaccgagccccagcgcaacaccacgccaacagcgcacgaggagccgccacagcagccgaccacacacaccccacgaaccctaaccaagaccaaacgacataccacaccacaaatcaagaagcccgagagccaccaacacacgcaccagccgaggcagcacatcccagccaccgcgcacaagaaccgcacccaagagcagagaccgagagatacaaacgagagacaacagacaagagaacaggaagagacacgccaaacaggcgacgggcggcggaggaagcgggaggagaggaagacagagacacagagggcagagcaagagagagagaccgaagagagcgaggaggcagcgcacgctccaggtcggcacggcagccacgcaagaggaaaaaggaaaagaggcggagcgcagacgcgtaggagagcaaggtaag

SEQ ID NO: 666217 - DNA, 214 bp, Homo sapiens
  misc_feature (27)..(27): n is a, c, g, or t
ggattcctccacgtgcgaaatatggangtgtgtgtatatggatgtgtgtggtgtgtggatatggatgtgtgtggacatggatgtgtgtggtgtgtggatatggatgtgtgtggtgtgtggatatggatgtgtgtggatatggatgtgtgtggtgagtggatatggatgtgtgtggatatggatgtgcatggatatggatgtgtgtggtgcgtgg

SEQ ID NO: 666218 - DNA, 274 bp, Homo sapiens
tttattttttttttttaaccccccaggggcccccgcgttttttttggggccaaacccccaaaccatttttgggggccacccattgttttttccccttgccctgggccttccaaaaaccttaagttggcccccgttttccccccctgggttttgggggttttttccccaacccgggaaaatttttttttaaaaaattgggacccaaaaagggggaccccctccccttggtgtttcccaaaattacccttggggggtttttaacccccccccccca

SEQ ID NO: 666219 - DNA, 183 bp, Homo sapiens
  misc_feature (81)..(81): n is a, c, g, or t
cctggctctgaacttaggggaaagatgaaaaattataaccaacgcataacatagcaagggactaacccctgataccttgcngcataatgaattaactagaaatgaactttggcagaggagagctcaaagctaacgacccctcgaaaccgagacgagctatcataagttcagacgccagggggt

SEQ ID NO: 666220 - DNA, 161 bp, Homo sapiens
tgcctgtatgactcagaggatcccgacccgatgtattgacttagtgattaaacttctttattgataaagtacctaatcttgtggtatgtctttatcagcagcatgaaaatggactaatacagttcttatggcccagaccagagtcttgcagagctgctatg

SEQ ID NO: 666221 - DNA, 687 bp, Homo sapiens
tttgatgcaatgcttgtgcagtacagctcagggcatgctaaactgcatctcaggatacgcaaagtgtcacaaggaacgtgtgtctgaacctagagttatttcagtcatctttgacgtaggttccatgtccgaggatgcgtgcatactcgacgtaagtgagattcacaagtttagcgataggtgatgctctgtgcagctcatccagttactcactgtagtacgatcagtcatggtagcagcagctcccacaagtgaccgtcctgtatggacacacgctcatattcgtatcagcaagctacgccctttctgatgacatcttccggttatgagccatccatcgtctgaccagacatggtaaggaacacggtaacagtcatacggcatcatgcatcattcctcacggcatctagatactccccagttggacgcttccacaattaagctagcacaccatgcacatctactctgtagacaaagcgtgatcagctccgtccgtgcatattcgagtctgatatgaagtcctgagtctgagtccggtcgcacataccatgcacattggacattgcacgcgcaggacgttcattggtcatggccagtgatgatccgccagacatggtgctgattcagtcccgggttacagtccacaatgcgcgttcctctaaacgcgtctatcacacgccatcatcc

SEQ ID NO: 666222 - DNA, 550 bp, Homo sapiens
gcgaagctgagaggtgctgtatgtataacacctgatcctcctcagcagagggacctctgcaaaggcagactgacaccacttttcgaagcctcagcaaccgcatttaagcagttactggttttcactgttgcctgataagctcaatgccctccgggtgcaggaaagatctggaaagcaaaatatgaaatgcacccatgtactgcctgccgcggttagggtttctgactaaattagttcctgtggaagcagcaagcaatgcttccctctatgctggaagctgtctgtgatagtcaccataatcaatgagaaaagcccagggtttggggattgccccagaaaaccagccatccatccccaccaccctccaggatggggattcagaagcactcaggaaagtgcccaagatggcggcccatcaagaagtcagcaccaggccaaaggttttccccttgcgtggcctcgacggaatcctgaacagctagcagtcgggtgctgcctgatacatgaattgctgagcttaatgttcaaataaactagtaaaaatcctaaa

SEQ ID NO: 666223 - DNA, 253 bp, Homo sapiens
  misc_feature (8)..(8): n is a, c, g, or t
  misc_feature (93)..(93): n is a, c, g, or t
  misc_feature (118)..(118): n is a, c, g, or t
  misc_feature (164)..(164): n is a, c, g, or t
  misc_feature (179)..(179): n is a, c, g, or t
  misc_feature (241)..(241): n is a, c, g, or t
ccctctgngcgctggttccactcctacaggtccttcttggccttctcccgccattcctgtccgtgaccttagatgcagcatccagctcttgcngccgtttcctctgctcctctcgccncttgcggatggtctcaggctcctgggtcagcctgtcagcctgggcnatggctgcgtagccntcagcaggaccgttggcctcctgagcatctcagtggggagatcagtcatggccaggagggtnggcaaccaggag

SEQ ID NO: 666224 - DNA, 547 bp, Homo sapiens
tgcgtgttcttctatgggttgctctgcacccttttatcttgggagaggctctcgttatatatcttcttgcttggaaaacaacgttgtggctctgcccataaacttccgtatagaatagctaatggaatatattgttcaaaaacttgtgaagcatgtccctatcctatttaaaggaaatatatttaatatgccatctgacatgtagagaggtcatcaggtcttgtggttactgcaggtaagcgcatcacatgaagaagggtgaatggagagatagggatgtgcgtgaatcctgcagtggttacttcatgaggttttgaaaccggcaaatcagcacctaataacttcaaatcctaggaagtagggtggaacgaagtctatgtatgaactcctgagaggcctaagcttgatatagctttatgaaccctggcctagtactgaagagaaataacttctccaagttcccccttgcttgaagttgccttcttctacgaggatttccttggactagctttattaccagaggatttttgtacaagcacctctagtt

SEQ ID NO: 666225 - DNA, 282 bp, Homo sapiens
acaagaacagcagcagtgatactagagaggtcacactctaagtggagtcacgagcgtgacaccgcatataaggtcacgctcgtcacgtcctgcagaggcgatgataaacatggtcacacgtgtgtgtatcaccagtgggtcacctgcttgtacattcctcccgtgacagatagtgtcgcacatcttacctgagcaccaggccatgaaaagtcttggttcccacaatgcgatatattggaattatcacctcaggttatgacgtaaatttcgacatccatagtc

SEQ ID NO: 666226 - DNA, 1223 bp, Homo sapiens
tcaaaacgaaatcaaaaatttatgcttttatttaacacatggtgggcaattggggaagtcacagtcacatggcttccctgggggctcggggggtggtgtaagttggggcgccctatattctctgagccagtcaaggagacactggaggaattttatagccctcaattgtgcagcacacgtgaggacacgtggtgtgccagaaaaaacaactcacgtgggagggggttccaccaaaaccacaaccatagactacactctccttatagaatgtgtgacagaagagacaccatattcgtgcagagagactcctctagatagacaagcgcgcttcgacaagaagagagacagctctatttgacgatttggagagatatctctcccacaaatctacagagggagagagagattctctccaaagcgcttacgccaaggcgggatacaaagcgcgagttattgtgagcccacgagagaagaggagcttgctaatgagggggccctcgcagtgacacaacacacaggagtggcaaaacagagacagacaagagaagagactctcacaccgtgggggaaaaacacccttgtggagggcactcaccaccagagcgcccccgggcgaaaatgtgggggccacactcaggacgaaaaagagagaggagccaagttgagcacagcggtgggggaagagcagcttgagaagaaacatctccactactaaacagcgaaacccacaagaagggacaaccccaggagaacaaaccaaccgaaagagcaggcgcgagggaaaaaacatcgcacaaccaacaacagaacacaacagaaacgagacagacaataataacacacaccacgacaggagaagaagacgaacaacaacccacacagagaggagccaccaaccccaaccgagagaacaacaccaccactccaagcacgcagagaccaacagcaaaacgacgagcaagcacaacatggagggacccacccaaacgacgacgaaagcaacacaacaagtagagcagagacccaccacacagaaccgcacccaccaaacgtgagagacaagcggagaagcaaacagaggagcacacacaagaggagccaacacacaagcagaatcaaagaagggaaacacaccctctgaagggacgacacacccgaagccacaccaacctagagaaaagaaacgccgaaaagaacaacagtcacaacacaacacgaggcag

SEQ ID NO: 666227 - DNA, 1112 bp, Homo sapiens
gtgaaggtcctgacatgcctccgacggaaggagttattaggcccatcgagctagaaacgagaactatggtagtgtgaatggactagtcgatgctgacagtattgtcatggcctatagggtgatatggaagatccgtagagtcgtacgtgtgcggcataggcatgtgattatatggaacgatgtgatacccgatgtatgcgctatggcgtccctcaacaaatcgagtgtacttcttgggggtacgatatcggattgcgtgtctaggcagcatagatatagccagggtctagtagagacactgactcgcggtgtcaatgacacttatgcacagtaatgcatatctgcgagcagcgaacctgcgaagaacaggcagagccattcgctccatggacagcggacaggtggccacagaacatgggacaagcgatcgagcggtagcagcatccttaggtggtttacaccaagataactaagaactctcagaccaatggtgggtttgcccacacacactgtttggaatccaggagaggcacggcaatggatacccagagaggcatttgctttcaaaccctcatcgtagagaacggtgaacggcgcacattccattcgccacatggcccactagtgcccaaccgaggaacttcatccactggctaggggataacccacgggataaagaggccacccctggaatgccccatcaatactcagtgacacccaactgtgatgtgtaaattacccctttgtacgccatcctacacacgtcaacacttggggacacatgtggaaagagtttcacacaataggtcttcctaggagaaagaaccgccatgcacacgactactcaaacaaacatcaccaaaaaccataagatgtgctgcgtcaaccgcaatcagattcagaatgtcgttaattccacgaacacgaaccggaggaggtggcccagcaaaagcgacgtatgtacagtgccatattacacccaacaggaacacgatgagagtgagctcagcacaacgactaggaggcgaccacccgcaatcaacgactaagttgagaccaggataccaataagaatacacataaaacgcacccagtaggcaacacgacgagtc

SEQ ID NO: 666228 - DNA, 337 bp, Homo sapiens
  misc_feature (68)..(68): n is a, c, g, or t
tggtgtactgcaatatgacacacattataggactggctctgaggtatcctctggagaagagtatctgnagcatccctgagatactttctacttgtgtgattttcattacaggagtacagtactttctggtcacctgagaaaaccacccatatttttattagccaaatatataattctcgaatgcttagaattcatttcttaatgatttcactgttgtgcagtatagactgtgaattgcctactaaggatactgttaattatagtaaactgtggaatctagattaaataattacgccctactttttttcttggcttgtggatgtgtagaccacatgat

SEQ ID NO: 666229 - DNA, 353 bp, Homo sapiens
  misc_feature (317)..(317): n is a, c, g, or t
ctcgctctccttttcttgtctctgctgctttggggggctcctggggctcgctgtgcatgagctgggccctggtgggcttggtgtgcaggacgtgaggcctcctccctggtggcggtggtcgtggtgcgtgcaggtagtgggcgtgagggcccctgctgctgtgggaacctcggccacgggagcggcagctgtggggtcttctccactcatgcccaactcgttgactcgggtggggtcgacgcggtagatccaccgttggtagaggtagattaagaaaaccacatcgtcccgcaggcagtcgatccggtacataacgngcatcttgatgaccaaggcgaacaggtcgtcgatga

SEQ ID NO: 666230 - DNA, 481 bp, Homo sapiens
tccgtatccaacagccagctatattttagtagagaggttcacatcttgcagatgtcttgactcctactcctgatcaccgctcgctcccaagtgctggattacaggcgtgagcacgagccggttatatgttttatacttacaacacatctcattcgagtagcacatttcagattgtttgatagtcatgtgtggctaattggttacttgtattaagacagtacatgcttttggtgagtatgtaatgcaggtgtgggtatatatcgaggtcaaaggatatgtgtgtatgctcagttgatattgtcaaatagttttccaacgtgattgtactaatttatattcctcctagcaatatatgagagtcctggttgctccacatttttgcccttagctattctgctgggttagtagtattatctcattgtatgattttaatttttcattttcctgatgactaatatgtcctttttatatacttattagg

SEQ ID NO: 666231 - DNA, 443 bp, Homo sapiens
cccatttgagcagataggtattgatgatgccgttggtgctgagtagccccatccatgcgtacacgcgtagcaagaatgatgtccaaaagggcagcataatcagcagcagcaaggtattgcgaatggatggattggcgcgcgaaatggcatacgccatcggatagccaatcagcaggcaaatcagcgtggttaaaagcgcggttttaatcgacagccaataagtcagcacgtaaatgttgccgccggaatcgcccggagagggggttgatgatgtccagcaaggagggccaaaaatccacgaaaatttcttggtagtttttggtgaaaacctgcagtgcgcctttttcgtcaaataggggcgtgaacggggggatggtgtaggtttggtcggcgaagctgattttgaacacgagtcgacgcggccgcgaatttagtagtagtag

SEQ ID NO: 666232 - DNA, 308 bp, Homo sapiens
  misc_feature (90)..(90): n is a, c, g, or t
  misc_feature (108)..(108): n is a, c, g, or t
  misc_feature (113)..(113): n is a, c, g, or t
  misc_feature (117)..(117): n is a, c, g, or t
  misc_feature (122)..(123): n is a, c, g, or t
  misc_feature (135)..(135): n is a, c, g, or t
  misc_feature (138)..(138): n is a, c, g, or t
acacatcatgtgcacttatgtactaaagacgagctaagggaaatcagtctatccactaacatcaagctcaaagaagtataagagatgctntttcatgaaaacatcctnatgtngatnctacnntatgctgcttgncangctagaaattccaaactccaagaaggaacaaggaaaacaagaatcctggttgcactgctgttattttgcatcgaatcaaaactctagggttccatgctgtcattatgttaacaaagcggcagtgttctagagcaaagcgcatgaggcctaatacccattctatggattgt

SEQ ID NO: 666233 - DNA, 478 bp, Homo sapiens
ttagcaaagcaccataagctatacatattctggtctctcctaagcttttacaaaaatttaccgggatttacccggggaacataaattcatctacaagagacattagagacgtttcaaggactaattctatctcaaattcagaataactgctagtaatttatcctacctcacttaaaaacaatctttgaaccaagtagtatcatgaggacaaatctcatgagtaccaattcaagcagactatttcagcaagtggcttctcattggccacaggtaggacaaaactaatgcttcaagatgtctctagccttgagagagtcgggtatggaccatttatgcctctcacaataacacacctgggagaccacacggtcagagaccaggtctcacaatgggcacttctgtggttccaacatgctatatgtccttaagcaaattctccagaaatacaatcttagacacataggttcacacagaagct

SEQ ID NO: 666234 - DNA, 582 bp, Homo sapiens
taagctcaggccagtgaagactgggatctatcagaactgcagaaagggccctgaatctagacacaggctggcagtgctgggtggtggcaggggatgaatgcaatatttcttgcttagcgtctttatcccgctataccaggttagcgagttttatgcgccgagtattcccagccactccctgtcaggcgagttccaggatatccttaagaacatttgtgctgaagcctagttctgctgaacccactggaaggattccttttgctatctgcgccttccactgaagacacagcccaagtcctgtcacatgtccctgctccaccaccagcctcctttggcagagccaagcccagatgcttccacttaagcattcccaaaaagctcgagcccttctcaccaaaccacagacctttaagcaaggctccatgaccccaaacagcatttccagcaacatatcacaacagcagggcattcagtcagatagctgcacactgtcctctaaagaagcaaagagcagcaacaggcactgagacctcacctccgggtgccccgaagtcagacttcctctgagcctagctgtcccac

SEQ ID NO: 666235 - DNA, 225 bp, Homo sapiens
  misc_feature (191)..(191): n is a, c, g, or t
ttatgtctgtgtaacattgcttggttggtgtagctatggaaactgccacattggttatgtgccatcattggttaatgcaattgtgtcacttgacaggagatttgacagaatactgatcaaccttcaaatagacaaattgagacagcccaagggaatctgtgagcaatttaacaagcaaaccggcgacaccnctttgtcttccaccatacattagtggtacttggg

SEQ ID NO: 666236 - DNA, 276 bp, Homo sapiens
cacctcttacgagttccttgtgggtacagagtcaagatcatgagttcgtgagcctggtgataggttaaagattggtctacgtttggaagcagaagagagcacggcgtaaggaatgtccaaataatcattatgccggacctttatctacataattatagacgctgttgcgagagtgcgctttcgcacccttatgtcctgcggtgaaggtttggcagcttcggtaattggttggactgagcatcccttccgttgagttcatgaaacttcgtggttttc

SEQ ID NO: 666237 - DNA, 846 bp, Homo sapiens
accctttttcgagaatcgcccccattcgctatgggggaagaatccccttatttattcactgcctatatttaaaatataataggatttgtgaataatatttggacaggtttgtgcatcctaaatgtgaccttattcacttcatttcttgaatgggaatgcactgaataagtgaatagggtcatgatttcgtgttcatgttcatggataaatgcggtgtagagaggatgctactcctcaaggtgattctgaaggcaccccaaggtatagtctgataatttaaagatttactgcagaatatcttgtactttactgtgggttatttagttacatctgttaatttagatgatttctttgtgtgctctattcggctagactaggtgattccttccatccgttctaactgaactcatatagtaggtttgtgttgtaacattgtgagttaggatttatacacttaatctcagacgaattgtatctctttactgtacatactgtattcctattaaggtgtcttgaagtcttgttcgtcatggctgtactgtgtctgatggcttggacttagagattcttgatgcactaaatgagggtcactgttgatcagtgttgctagtagcttgagcagctcttcataagaagcatattgggttgtgaaaggtgtttgacccatatttttcggaatctcatttaatagatgtatggtaccatttaaaagtggtgtgtatctgaactctactgatggggataacatacactgtaatggggtcaaattaccttaaccattccaaatggctttccctgtatctcagcgtcctacccagtgcattactcatctgaggcaatacctac

SEQ ID NO: 666238 - DNA, 151 bp, Homo sapiens
caaaaaaaaattaaagcgttgataatagctttttgcttaaaattgggtaataattgaaatttaaaggaagaaaatgtagtaaagccaatgaggtctcaaagttttataaatcttgattcaataaatatcaggtgaatttaggaaattatta

SEQ ID NO: 666239 - DNA, 174 bp, Homo sapiens
gaagaaggaggttcctgcctgtgccagaaaacccttaagaaaaagcgaagggaatttcgcagagctgaagatcaagcgcctaagaaaagaagtttgcccaaaagattgcttcgaaagggcaaggagggaaggcttatctttttaaaaaggcaaaggcacttttcacaagggggt

SEQ ID NO: 666240 - DNA, 194 bp, Homo sapiens
ggctgggactgcgggcgtatgctaccacgcgtggctgatttttggtatttttagtagagatggggtttcaccctgttagccaggatggtcttgatgggaccagcgtgatgtatgcggcttgttattgccatgagcatcatgatgtgaggcgtgaatcgacgtggaggctgacagtttgagggtaggggctctcc

SEQ ID NO: 666241 - DNA, 317 bp, Homo sapiens
tagaggatcccctaggctgcgaaggaggggtaagtaaaaccaaccgtgaatgtgctctcaggaactgagtcaccaggggggaagacagaccttatccaaggagctccactaagaaacagaactgatgagaaggtaagaaatgcggttgtcttacggcaagtcacaaaagaatatgatgtgctctggggtaaccatggcaggcttccctgaggaagagacccctgaactgacacctaaggactgattcagagttaatgcatgatacagccccagatggagaagcagcatgtgcaaacgtccagaagatacctacagca

SEQ ID NO: 666242 - DNA, 210 bp, Homo sapiens
aggctgggcacacagaccctgtctctaagaaaaaaaaattttgaataggctgggtgtggcggctcacgcctgtaatcccagcactgtgggaggctgaggtgggagatctcttgagccctggaattcaagaccagtctagtctgggaaacacagcaagacccgcctcgctgggcgcggtggctcacgcctgtaatcccagcactttgggag

SEQ ID NO: 666243 - DNA, 518 bp, Homo sapiens
atatgttgtctctactctgaccactgaaaatgttgttcatatggtcacagctacatcattctcctgttctttgccctgctaagaatgctgtccttcacttttttttcaaatcctgatttttaggaatagtcaagttcccctatctcctttgagtccacttttgctttttctttttttcaccatagcaatacttactatctttaccactcactgctctattttgagatatatagtatcttgtattattaataaaaatgccctgtttgcataccttctcttctttgtatactgtaaactcctgtataataggaataatagctttgatttttgtagttactctttaaggatattttcattgaacttgtaatatatccagattaacatatgggccaagtgcagcggctcacgcttgtaatctcagtactttgggaggctgaggcaggtggatcacctaaggtcgggagttcaagaccaggctggctaaaatggtgagaccctgtctctactaaaaatacaaa

SEQ ID NO: 666244 - DNA, 312 bp, Homo sapiens
cggtgtatcatgtttcccccgagacagagtctcgcttcagcccaggctggagtgcagcggcccaatctcaattgctcactgaaacctccgtctcccaggttcaagcaagttctcctacactcaagcaccatacacatgaagatacgctgggactacaggtgtgcaccacaaagcccggctaatttttgtatttttccgttgagacacgggctttcagcgtatgttagagccaggttggtctcaaacttctggcctcaagcaatccagatccacctgcctcgacctcccaaagtgctgggattacagcgcgtg

SEQ ID NO: 666245 - DNA, 843 bp, Homo sapiens
caatcttgaatcatgaacgctactaaccagagactggctcttatcgcgagattttattccctcaaagttggccccaccgttaaagccacagctgcgcctgcagtgagcaccgcctgaaactcaggaccttgagtcatatacagttaccaaacgggcttggggaagggaacatatgggcaagatagactcctgtctcaaagacataggagtgttcatctgactcaagacgctgcgaagttaagtgcctgccggcagtataatgaaccaaccattatgctggcgtcttaaaatcctagtctggaggagtaaatggaggtctgaacgatttcaaggataaaccgtgtgaatttgaaaccagctgggttgtggaaattaaagtgtggagcggtcacatgtggaacgagcatagagtgtatactagtgggaaatagcctagcggaggtggatggttgatcatactcaataggagttcactggtcccatgtgccccatggtcacgagaactaccgtcggttgggcaagtcaggagaccgttccacctccaggttcagattggagaaagctggtggtcttttcgccagtagactccttgtcttggacacattggctgctgcagcttaccggaattccttgggttaaacccggatttgggcctggtatacgattggcacaggtgcctcccacgagttcccttcattcgtcagaaccacttaccgctccagccagtgcttggaggcaccgggggagacacctgactgacgtttttagaggttctcacatagggtgggtgggagcctgggccaggcccaccgtgcgtgacactcccccatgtcccttcccccc

SEQ ID NO: 666246 - DNA, 468 bp, Homo sapiens
  misc_feature (6)..(6): n is a, c, g, or t
  misc_feature (24)..(24): n is a, c, g, or t
  misc_feature (49)..(49): n is a, c, g, or t
  misc_feature (59)..(59): n is a, c, g, or t
  misc_feature (102)..(102): n is a, c, g, or t
  misc_feature (109)..(109): n is a, c, g, or t
  misc_feature (326)..(327): n is a, c, g, or t
cggccngggggggggtttttgggntccagcgggaagactgatgttgggnccatcgggtncggattggtgctaatttaaaccaaaagggcctctggggtcttntggtccnatattttacaatttagacttctgtccaacactaatttattttgtcttgagttgtactgcgagagaagaatatggggttttgtatgcccgtgttccttaaagccaagggtttgaaagccacgctggtcttctgagattccaagtccttccccagctgacatgcccgtagccccttccgactcagtggggcgagcgctcaacacggatcgccccccccnncccagttctccatatcagggtagaagatctaggcactacatatgtaattggtaaagaaaaggcattttcttaagagttataactatgtaaacattgtataatgatatgaaataaaacgcacatttaggacattttctaaaa

SEQ ID NO: 666247 - DNA, 275 bp, Homo sapiens
  misc_feature (2)..(2): n is a, c, g, or t
  misc_feature (4)..(4): n is a, c, g, or t
  misc_feature (11)..(11): n is a, c, g, or t
  misc_feature (16)..(16): n is a, c, g, or t
  misc_feature (38)..(38): n is a, c, g, or t
  misc_feature (48)..(48): n is a, c, g, or t
  misc_feature (56)..(56): n is a, c, g, or t
  misc_feature (60)..(60): n is a, c, g, or t
  misc_feature (77)..(77): n is a, c, g, or t
  misc_feature (83)..(83): n is a, c, g, or t
  misc_feature (93)..(93): n is a, c, g, or t
  misc_feature (96)..(96): n is a, c, g, or t
  misc_feature (104)..(104): n is a, c, g, or t
  misc_feature (108)..(108): n is a, c, g, or t
  misc_feature (113)..(113): n is a, c, g, or t
  misc_feature (115)..(115): n is a, c, g, or t
  misc_feature (119)..(119): n is a, c, g, or t
  misc_feature (130)..(130): n is a, c, g, or t
  misc_feature (147)..(147): n is a, c, g, or t
  misc_feature (155)..(155): n is a, c, g, or t
  misc_feature (158)..(158): n is a, c, g, or t
  misc_feature (167)..(168): n is a, c, g, or t
  misc_feature (170)..(170): n is a, c, g, or t
  misc_feature (178)..(178): n is a, c, g, or t
  misc_feature (180)..(180): n is a, c, g, or t
  misc_feature (186)..(186): n is a, c, g, or t
  misc_feature (210)..(210): n is a, c, g, or t
  misc_feature (215)..(215): n is a, c, g, or t
  misc_feature (233)..(233): n is a, c, g, or t
  misc_feature (260)..(260): n is a, c, g, or t
  misc_feature (264)..(264): n is a, c, g, or t
gnantaataanccaantaatcttggagagggccccaanttgggtcccnttgaacancaanatggcgtcacgcattantatttncctatgattnccngcaatganaggngattncntctnccacactgtgncttaacttactcagacntggagacncgnatttttaanngnaatacctnanaggcantcttttattatctcttttcttacntcaanctttggttccaccttaanagtgttttcctgatgctttcccaagtncagntcattggcctc

SEQ ID NO: 666248 - DNA, 945 bp, Homo sapiens
gatcctctgagatggccccagaggctgatccagaatgcaggataacaacccattcagtttccagtcggatgtctactcctatggcatcgatattgtatgaactgatgacgggggagcttccttattctctatcatcaacaaccgagatcagatcatcttcatggtgggccagaggatatgcctccccagatcttagtaagctctataagaactgccccaaagcaatgaagaggctggtagctgactgtgtgaagaaagtaaaggacgagcggcctcattataatcacccagatccatgtcttccattgagctgctccaacaactctctaccgaagatcaaaccggagcgcattacagagaccatccatgacatcgggcagaccacacatgaggatatccatgcttgcacgcatgaccacgtccccgaggctgcctgtctctctagttgacttagcaactgtattcaggctgccaggggcaggaggagaagccagaaggcaaccactatatatgcatccctttctacagaggaagacaaacaatgtagcagagaagatgcatgctaagggacacattctagatgctcaaagggccataaaatcatagatagactatacatacatatccactatagggacctgggagaaggcagcaaatagcagagaaggagagatcaaggagcacccaacacatccacaagcacaagacaacacaagaggacgcacacaagcaaatgaggaaacaaaagacaggaccaacacacaagagagaaacaaaaaaaagagaagaaagaacaaagcagagaaacaggaatgagaagaagagacgtacaaggcaacccacagagaaaactggacagacaaaaaaagaatcggcaaaccagagaaacagaaagaaaagaagaaagacaaaaacaacatacgaggattcactagggctcaaaaa

SEQ ID NO: 666249 - DNA, 358 bp, Homo sapiens
gcttgccctgcgatggcaatggcctttttttcaaaatactaatttgtgggcccatttgtttaaaattatttgaaggcagttcagcctaatttcagtgttttctttttggggtagatgagatggattttttatatttttgggaggactttttaatgagagaattgtccaatttggaaagatttatttagccttaggttacatgggcagtttagcttaagtaaactgtatatttattatccaaccccagctgtaattggaaaagttgagaggaaaagcctgagatccccaattagggggaaaaaaaaaaagggattttttaatttggtgtatttaattccttgtcccaggggggaaatga

SEQ ID NO: 666250 - DNA, 450 bp, Homo sapiens
ccattgccaaagaagaaaaccttagtatgcaccagatgctggatcagactttactggagctaaacaacatgtgaaaccctccttagctgcggccacattctctccccctccccccatgtttaattttgtctttaaacacatgcttaccgtgaaaccccttcaatgcgtttttttttatatatacttttaccactgtcactgaaacatctgccgagagccagctagggcaggagttggggaaagacgcgcagaaaggcaagcccgagtcagggcacttgttatttaaatgtgccatttcccaggttgccacccttcatagagttttaggcatgcagtttgcttagccagtgtaggaagcctcatgagaacagaaaccattaacagccagaagtgccaatggtgggatcagcaggaaagacctgatgttggagacaatccgggttgcggatt

SEQ ID NO: 666251 - DNA, 325 bp, Homo sapiens
  misc_feature (293)..(293): n is a, c, g, or t
gaatctgagctgaaaagggagatctgagaaaggagcagcacagggagtggattgatgggaatagtaccagggagggtgctcccctcagggcagaccacagccagagcaaaggcttcacctgcttctgccaatctgaactctgagtaccaagagtcaacttaagatagtgttcctgggatctacaagtggggttcaagtatcgagtggagaataaaaagttttcccggtctgggcgtggtggcacacatttgtgggtcccagccaatcggggaggcttgagccccagatttttnaggagtgcagttgagcttaaggtttattcccc

SEQ ID NO: 666252 - DNA, 201 bp, Homo sapiens
ggagagcatgtaacaaatactaatgtatgcaggcttaaaacctaatgacaggttgataggtacagcaaaccatggcatgtatacctatgtaacaaaactgcacgttctgcacatgtatctcagaacttaaagtaaaatttaaaagaaataataattgctttctagggttgtttcactacagaaattggacatgtactttca

SEQ ID NO: 666253 - DNA, 526 bp, Homo sapiens
  misc_feature (35)..(35): n is a, c, g, or t
  misc_feature (470)..(470): n is a, c, g, or t
  misc_feature (524)..(524): n is a, c, g, or t
aaatcagggccctagaatggaaaggattaggtaanagacccatagtgcagatcctactgatgggtgaaagaaagtatatatttaagagaaaatttaaatcccctaatgaagtggaatcctccaagccccagggggcagcaaactttggtaagagtattaagtaaaatattttaaggtgttggtgggccctcctttgtataatcctccgtcttttacaaagcttaaaatatagaaccgtgcggctgagtgtggtggttaggcctgtaatcccagcgctttgggaggctgaggcgggctgattgcttgagatcaggagttccagaccagccttggcaatattgtgaaacaatatgtctctacaaaaaatattaatacaaaaaaattagctgggtatggtgatgcatgtctatagtcccagctacttgggaggattgcttaatccagggaggtggaggttgcagtgagttganggttgtgccactttactccagcctgggtgacagagcaagaccctatctcaaaanaa

SEQ ID NO: 666254 - DNA, 427 bp, Homo sapiens
  misc_feature (285)..(286): n is a, c, g, or t
ccattgccaaagaagaaaaccttagtatgcaccagatgctggatcagactttactggagctaaacaacatgtgaaaccctccttagctgcggccacattctctccccctccccccatgtttaattttgtctttaaacacatgcttaccgtgaaaccccttcaatgcgtttttttttatatatacttttaccactgtcactgaaacatctgccgagagccagctgacatgcccgtagccccttccgactcagtggggcgagcgctcaacacggatcgccccccccnncccagttctccatatcagggtagaagatctaggcactacatatgtaattggtaaagaaaaggcattttcttaagagttataactatgtaaacattgtataatgatatgaaataaaacgcacatttaggacattttctaaaa

SEQ ID NO: 666255 - DNA, 1270 bp, Homo sapiens
ggatgacatctcccccgactggtctcctgagcagtgtctgcggagccatggagccggccagcccgacccgacccgactcgctgcgggcacacgcacccaacgcactccgggcctgcagccccgccgccgccatctgaggagccttggggacgcgaagggccagcctgctgctgctgtcgcgcttttcccaggcccctgagccaagtggggcacttgtgacctggccggcgctgtacggcctgctgacctatgtgacctggcgcacctgggaccctgaaccagaaccacagtgcactagctgcattactagtcacagccctcagactgaaaacctgcctgcctcgaggccttcgttgccgcaagctaatggcgcggcagctagctgcgggcctggctggtgctagggggctggagccctgacagacttggcctggcaacacacagttgccacggcaccacatctccagcagacggcaccagagacgctgcggggagaggctactgcagaagctgacggattcatgggctgagatctgcccattacgcggtttgcggacctgacgcacctgctggctctcttgggataccctggaggacccgagttggccccgcaggcgcttgaccccttgacactttacaatctgcccgggagagcccatcctctcgatggacgccgggatagattcttgggagcaggggtgggtcatcactgggcttcctacctttgtgatggtgccttgaaccccgggaccggtacaccccaaaagccggcatactttccctcgtatcgttttgaccacgagagaactccgccttatacccttggcgtcccaaagacacatgggatgtactccgcaagttgatgatgcacgcaagagatgaacaccaaccagggcaaaggtaccccacataggaacgctaagaagtcaacgtatcccgctatgacagtcatcatagaacatacttgctggggcccaagcccgcttgtacccaagagttcacacgacacgtggcacgtaccttggttggacgttcaacgcgcgtcccagagtccactgtgccccttgagagaccctgtatgcccaccagcaaagtgcacagaccccatggctaggaggtacaagaagtggccagcaggaaagggccctcaggaggtggctagactcgggcaccgatataccataacttggctctggggactaagatgcacgaacgcgtcgagaagagaggccgagaggacggaaagaaccagaggtgaaccgcaggcggg

SEQ ID NO: 666256 - DNA, 581 bp, Homo sapiens
  misc_feature (4)..(4): n is a, c, g, or t
  misc_feature (15)..(15): n is a, c, g, or t
  misc_feature (31)..(31): n is a, c, g, or t
  misc_feature (48)..(48): n is a, c, g, or t
  misc_feature (60)..(61): n is a, c, g, or t
  misc_feature (71)..(71): n is a, c, g, or t
  misc_feature (77)..(77): n is a, c, g, or t
  misc_feature (84)..(84): n is a, c, g, or t
  misc_feature (98)..(98): n is a, c, g, or t
  misc_feature (119)..(119): n is a, c, g, or t
  misc_feature (121)..(121): n is a, c, g, or t
  misc_feature (128)..(128): n is a, c, g, or t
  misc_feature (151)..(151): n is a, c, g, or t
  misc_feature (464)..(464): n is a, c, g, or t
accnaccaaaaaganataagagttttatttncccttaaaacagataantaacatgaaaannatggattgancctccnttccaancccaaagggtgacnttccttccttcctttccaaancncctaacnagattgcctgtaatgtgccatcncaatctgattgaatctgattgaattcagtaataaacctgtttcttttttttcctacgtttgtaaagagaattcactggattgacaggagattttagttttaattatttccccagcatcagtagtactttgaaaaaatattctacctctggcactacagaaataaaaatttttaaagttttaccttgaaaagtaaatttttttaagtttttaaagtttctttaattttaaattttttaagtttaagtttttaaaatcttttttaagttttgttaagttttaccctgcaaagtaaaatttttttaagttttaccntgaaaaaatttttttcattgagtgttttgtttagttctaactgtatggtagctaacagtataagttttggagtcagaatgattgggtaagctcgtgccgaattcctgcagcccgggg

SEQ ID NO: 666257 - DNA, 483 bp, Homo sapiens
atgcttcagaaaaatgtaatattgaaatagtcccagagaggtagtacaatgtggtgattaagaacgcagaccctgggaccggccgaggttccagtccccactctgccatgtataagctgagctttcttgagcaaattccttaacttttccatgtctcagtttcctcatctacataatggggttaataacagttgctgtctcctggagttgttgtgaagattaaaccagtaagcctctgagtgaagtgctctgaacaacaccaggatatggctaaggactttgtaagtattcactgttaccaaaaatgctggttattagctgtcactttggacaaccaatcatagttatagaaataaaatagaatgtaaatgttgttaatcttcccaatatgaaataaaatcacatagtcaacaaacattcgggactgattgttaatttcctcaccttttatggagagtcactagtagacagtgcctagagtgg

SEQ ID NO: 666258 - DNA, 375 bp, Homo sapiens
  misc_feature (354)..(354): n is a, c, g, or t
  misc_feature (368)..(368): n is a, c, g, or t
tgagacagggtctcactctgtcacccacgcgggagtgcagtggcatgatcgtagctcactgcagaccagctctccctgggctcaatcaatcctcccacctctgcctcctgactaactgggactacaggcatctgccaccatgcctagctaattttctcttattcttagcagagatgaggtcttgctttgttgcccaggctggtctcaaatttctgagctcaagaaatctttccaccttggactcccaaagtgctgggattataggcgtgagccaccacacccagcaactagttatttttaaagatttatttttttctttttccttttttgagacgaagtcttcactcttgtcgnccaggctggagtgnaagcttc

SEQ ID NO: 666259 - DNA, 471 bp, Homo sapiens
acctgtgttcaacgacatggacaggactatttcgatacgtctgttagacaggactctcaagacaggcacaatggctcacgccatgtaatcccagcactttgggaggccgaggcagttgtggatcacctgaggtcaggagttcgagaccagcctggccaacatggcgaaacactgtctctactaaaaatacaaaaattagccaggcatggtggtgcacgcctgtaatcccagctactggggagggtgaggcaggagatgcttgaacctgggaggctggaggttgcagagagccgagattgcaccttgcacgctgggctgggcgacaagagcgggactctgtctcaacaaaaaaaaaaaaagggccgggcgcggggcctcacacttgtacccccaaacatttgggcaggctgaggtggttgcaccgcttgcggccaggctttcgaacccagactgcccattttggaaaacccc

SEQ ID NO: 666260 - DNA, 714 bp, Homo sapiens
tgtggtgagcactggccccgcacagtgcacaggcagagtacaagtcacaagctgagggagttgtggattcaggccacatgcccaccccagcccagtcaaaatggctgaggggggctgcaccagcccaagggccccatggggatgcctgggcaccaaggtaaataaagttcctagttcctggaaaagttgtaaagcaggctatcagctcacagaggagctacaaacatacctcacttcatcaaacaagctgttcatttcaccaattagtcgctgattttcctgttcaaactgtgaggaaacagacacactcaggatgacatcatactgaacttaggcaagagtctagcaagaaagcggacctacgctccaggaatcactgccgaagcccccatttccagctgcggcaacgtggcagccggtgctggacgaccgttagcattagtgtgaacaacgtccctgctttcaggagaaagttttaaaaaacagctgtgctgcctggtaattgacttctccatctcaaccactgcactccagggtacaagctgactgctatggctgtagctgtatctacctacccgctctcccctgggatcccacggcctgcttcctgactctagtaccattattaagaaaattcttttgttgttgttttctctcatgaactatactgaaggactatacatattttttaatatggagaaggatctggtgtgg

SEQ ID NO: 666261 - DNA, 4631 bp, Homo sapiens
  misc_feature (15)..(15): n is a, c, g, or t
  misc_feature (4462)..(4462): n is a, c, g, or t
ccggggtggcgcacncgcagccctcccgctccgggcgccctccgccgctccgagaccccctgggggcgcgtcctctcccgctcccctgttccctcccccggctcagggcgggcgcgtggtcccaggggaggctcccgcccagccccgcactcctttgtgcggccgggcgggcgctgcgtcaaggtggaggcgcggccacacgcgcgcacccacccgcgcgcacccagcccccgggagaggcaggaagggaggcggcggcgcgaggaggagggagcggccgtggagcccaatcgttcgctccccttcccgggtccgcgcgcggcgccgcctccgccattgctgcgagcaggagcaggagacgcggagctcggagcgctgagctgacctgccggagccgggcgtgggctgcagcctcggagctcccggaacgatggtgaagttggggaacaatttcgcagagaagggcaccaagcagccgctgctggaggatggcttcgacaccattcccctgatgacgcccctcgatgtcaatcagctgcagttcccgcccccggataaggtggtcgtgaaaactaagaccgagtatgaacctgaccgcaagaaagggaaagcacgtcctccccaaattgctgagttcaccgtcagcatcacggagggtgtcaccgagaggtttaaggtctccgtgttggtcctcttcgccctggccttcctcacctgcgtcgtcttcctggttgtctacaaggtgtacaagtatgaccgcgcctgccccgatgggttcgtcctcaagaacacccagtgcatcccagaaggcttggagagctactacgcggagcaagactccagtgcccgggagaaattttacacagtcataaaccactacaacctggccaagcagagcatcacgcgctccgtatcgccctggatgtcagttctgtcagaagagaagctgtccgagcaggagactgaagcggctgagaagtcagcttagcgggatgggcaagttccttacaatgtgtcacttgcaaataacaaagggactttgagggacatttcattaaatataattactgatactttagaggttactcatttacggtgcaattgcttctgtttgctaatgctgctttgcaaataaaacttgctgccgaccacccacgggcataaaatcaagtgcatttcagcattgcctaaagagctctgacaccacttttcatgttaagatcttcatttagctcctttactgggatttattggatgctgtaaaaaaataaatttacactggatatgcgaagggtttggatctcagataaatgcattttgtggaattgattttctgaaccgaccctgctgtctgcaaaccttcctccatagccatatctagagtgatctctcgctgtgctaagagcaagcctacttcgcatttcttcctcggccatcagcgggtaacagtgctgactgctgccaaggtgcactgtagtaagtaagtggcatagagaacgaggaaaaagacccccccacccctccctgtgctgactcctgagtcggggtgggacggccctgcaatgtggcaggctcggtgtggattgactactccctcccctctgactctggcatcttggtaaggagggaggggcaccacccatctgggtggagacagctggggtttgctccagtgtgtgtagactggcagagcatgtgagggagagggctgggaagagacggccctgggcccgtgaggtgcagaactctccctgcaggtagtctgtctgctctgtgatgtgctgataggaaagagcccccactggccctctggttcacttctattatgaataaatttgcaccaatagccccattagtttttaaagaaatgagctgggtgggaaaagtggaaatgtaatttctggtaagcttgagctactttaatttttattctatgaaactgatatcccttgatgtgggaaacaggcaggaaaggctgtggggtgggggtgggggactggtgtggcaccgtgcaaacaaaatgacaaatttcaactcacaatctttgtaagaaaattgttccagtttgaatcttgatattaaagtttatgtttacaaaactgccagttagatgaactaagtgtgtaaaacaaatagaaaagacattcgcagacatttcttctatgttattgaatgtgttgtttctggtgtacgtgtcaaaagtttcagttttttagatcagaaataaacgacaaatagtgtgagatgtgttgtgaacaggcatggtgaccgtggtcagcgccactcttgtttcctgaaatgtgcttctaagacagaaaatgtattttctcatcaagggtgtctggagacacagaccgtgaccttggcgcagcggtgtgcatcagaggcgtgtgctgagaagggtggtgttaagctgtggaaaatgactcaagagcaataaatcagtgccaaagcttccctgcgcatctgaatagacacaagtgaagcccgtgtgcgcacagtgcagaggccgagcctgtatttccaggtagacgtggactttattgactgtgaattcatttacatgtaacttctgacatttcactctgtgcaaataaagaacatgaggatacctgtgctgcccagtggactgtctgtacacacacgcatttcaccaggcgcagtgcagactgtctcatgcccatgtgggcgctgggatgcttcctgtacagatgtctcatgccttcagttacacataggtgttcctgtttacagttcctggaggtcagaagcacaggcacgagagaagcaggcccgttcttccgtggcccacttcttcctttgaacaaaggctccttggacccagtggcgggaaactggccctcccacaccccctgcctgttctgggggcagcagtctttggaggagtaatgccaggcagcccctcactgagggccccagtctcccctgcatttcttccctgattgattgataggaggtggctgggctgccactgaatttgtcaacttagactcattgacaacacattaaggggctgtaattatatttattagattaacaaggcagatgtgaattttctcttctataatccagtaagtctgtgtattcgttgactcagacagacaagaagccacaaggaaacaaagaagtaatcatttgttgagagacgttattaactatgatcttccctgaagctaccgggatgggaaaggtcagtgtcttcctttgaaccctgagacaattaggggctcttgaggcctgctgtgcccctgctgccaaggcagcctcaagttcaaggagcagctaatcacccactcctgcattcagtctgtcttgcctgatgagggctacgcaggctgcctcccattggtgtgcactgtttcctttttcagctgctaaatggctgaacaccatcggcctggggtatccctttttggggaatacgtctgtctgtctgaactcctttcccttcaaatggcactgtgataaaatctggtcataccatgctccagcactggaagtacatgaaagcacgcagtctgtgagtgcccatgaggactctcgtgctgggcccccgtggccctggctagctgtcgtaccagtcgaggaagagcaaggagaaggagcacatcacgaggaagaagaggatccacacgcggaagccagcgttgtttttaatggcctctcttatgtcttcgttgccttccttgatattttcagttgcccccacaactaactggtgaatgctgtcaatctcagcttcctgttgcaaaaccttttccgtgaatatctcttggagtctggaaatctcaaccactctcccttcgatttgcctcacttcatcaaacaagctgttcatttcaccaattagtcgctgattttcctgttcaaacatttgtatttcttctggggataactcatcttcgcctttgccatctccccacgttcccaattcaggttgtgtttcagccaaaattttttctggacgttcttcagtggcagggttttcttcagagtcttttgaaggactctgtgaaactttctcagaagatgtggattctcttgtctttgtatttggttctggttccagcttagataatcttttcttatccaccactcttttaactcggatggctctctgttctgagtaaagtttacatactcttttcaagtaatcttcaatgaaatccaaaacagcggtcctgtgctccttcacttgctgggaatgtatctccttgtgagcttctgttcgtagttgctgaattgcttctgaacaggtcctcatgaatatctgggcatcctggtctatctggtctcgttctgtgtctgtcatcctcccatattcagacatggtatggctataagcattaatataatctttcctgtgttccagaagaaaatctctcagtttgccaatgtgagaaatcacttcgcgggcccggctggagaagtcgcccttggnccgggggctccggcggaacagcctcgtccaacggctgccatcgaccccgccgcccaccagccactcccagcgaccgttgttccgcgtcttcacggtcattgacgctggcccggaatagcagcgtgatctccaccgccatagcgacccgcaccctcagccccacactagg

SEQ ID NO: 666262 - DNA, 4735 bp, Homo sapiens
  misc_feature (15)..(15): n is a, c, g, or t
  misc_feature (4462)..(4462): n is a, c, g, or t
ccggggtggcgcacncgcagccctcccgctccgggcgccctccgccgctccgagaccccctgggggcgcgtcctctcccgctcccctgttccctcccccggctcagggcgggcgcgtggtcccaggggaggctcccgcccagccccgcactcctttgtgcggccgggcgggcgctgcgtcaaggtggaggcgcggccacacgcgcgcacccacccgcgcgcacccagcccccgggagaggcaggaagggaggcggcggcgcgaggaggagggagcggccgtggagcccaatcgttcgctccccttcccgggtccgcgcgcggcgccgcctccgccattgctgcgagcaggagcaggagacgcggagctcggagcgctgagctgacctgccggagccgggcgtgggctgcagcctcggagctcccggaacgatggtgaagttggggaacaatttcgcagagaagggcaccaagcagccgctgctggaggatggcttcgacaccattcccctgatgacgcccctcgatgtcaatcagctgcagttcccgcccccggataaggtggtcgtgaaaactaagaccgagtatgaacctgaccgcaagaaagggaaagcacgtcctccccaaattgctgagttcaccgtcagcatcacggagggtgtcaccgagaggtttaaggtctccgtgttggtcctcttcgccctggccttcctcacctgcgtcgtcttcctggttgtctacaaggtgtacaagtatgaccgcgcctgccccgatgggttcgtcctcaagaacacccagtgcatcccagaaggcttggagagctactacgcggagcaagactccagtgcccgggagaaattttacacagtcataaaccactacaacctggccaagcagagcatcacgcgctccgtatcgccctggatgtcagttctgtcagaagagaagctgtccgagcaggagactgaagcggctgagaagtcagcttagcgggatgggcaagttccttacaatgtgtcacttgcaaataacaaagggactttgagggacatttcattaaatataattactgatactttagaggttactcatttacggtgcaattgcttctgtttgctaatgctgctttgcaaataaaacttgctgccgaccacccacgggcataaaatcaagtgcatttcagcattgcctaaagagctctgacaccacttttcatgttaagatcttcatttagctcctttactgggatttattggatgctgtaaaaaaataaatttacactggatatgcgaagggtttggatctcagataaatgcattttgtggaattgattttctgaaccgaccctgctgtctgcaaaccttcctccatagccatatctagagtgatctctcgctgtgctaagagcaagcctacttcgcatttcttcctcggccatcagcgggtaacagtgctgactgctgccaaggtgcactgtagtaagtaagtggcatagagaacgaggaaaaagacccccccacccctccctgtgctgactcctgagtcggggtgggacggccctgcaatgtggcaggctcggtgtggattgactactccctcccctctgactctggcatcttggtaaggagggaggggcaccacccatctgggtggagacagctggggtttgctccagtgtgtgtagactggcagagcatgtgagggagagggctgggaagagacggccctgggcccgtgaggtgcagaactctccctgcaggtagtctgtctgctctgtgatgtgctgataggaaagagcccccactggccctctggttcacttctattatgaataaatttgcaccaatagccccattagtttttaaagaaatgagctgggtgggaaaagtggaaatgtaatttctggtaagcttgagctactttaatttttattctatgaaactgatatcccttgatgtgggaaacaggcaggaaaggctgtggggtgggggtgggggactggtgtggcaccgtgcaaacaaaatgacaaatttcaactcacaatctttgtaagaaaattgttccagtttgaatcttgatattaaagtttatgtttacaaaactgccagttagatgaactaagtgtgtaaaacaaatagaaaagacattcgcagacatttcttctatgttattgaatgtgttgtttctggtgtacgtgtcaaaagtttcagttttttagatcagaaataaacgacaaatagtgtgagatgtgttgtgaacaggcatggtgaccgtggtcagcgccactcttgtttcctgaaatgtgcttctaagacagaaaatgtattttctcatcaagggtgtctggagacacagaccgtgaccttggcgcagcggtgtgcatcagaggcgtgtgctgagaagggtggtgttaagctgtggaaaatgactcaagagcaataaatcagtgccaaagcttccctgcgcatctgaatagacacaagtgaagcccgtgtgcgcacagtgcagaggccgagcctgtatttccaggtagacgtggactttattgactgtgaattcatttacatgtaacttctgacatttcactctgtgcaaataaagaacatgaggatacctgtgctgcccagtggactgtctgtacacacacgcatttcaccaggcgcagtgcagactgtctcatgcccatgtgggcgctgggatgcttcctgtacagatgtctcatgccttcagttacacataggtgttcctgtttacagttcctggaggtcagaagcacaggcacgagagaagcaggcccgttcttccgtggcccacttcttcctttgaacaaaggctccttggacccagtggcgggaaactggccctcccacaccccctgcctgttctgggggcagcagtctttggaggagtaatgccaggcagcccctcactgagggccccagtctcccctgcatttcttccctgattgattgataggaggtggctgggctgccactgaatttgtcaacttagactcattgacaacacattaaggggctgtaattatatttattagattaacaaggcagatgtgaattttctcttctataatccagtaagtctgtgtattcgttgactcagacagacaagaagccacaaggaaacaaagaagtaatcatttgttgagagacgttattaactatgatcttccctgaagctaccgggatgggaaaggtcagtgtcttcctttgaaccctgagacaattaggggctcttgaggcctgctgtgcccctgctgccaaggcagcctcaagttcaaggagcagctaatcacccactcctgcattcagtctgtcttgcctgatgagggctacgcaggctgcctcccattggtgtgcactgtttcctttttcagctgctaaatggctgaacaccatcggcctggggtatccctttttggggaatacgtctgtctgtctgaactcctttcccttcaaatggcactgtgataaaatctggtcataccatgctccagcactggaagtacatgaaagcacgcagtctgtgagtgcccatgaggactctcgtgctgggcccccgtggccctggctagctgtcgtaccagtcgaggaagagcaaggagaaggagcacatcacgaggaagaagaggatccacacgcggaagccagcgttgtttttaatggcctctcttatgtcttcgttgccttccttgatattttcagttgcccccacaactaactggtgaatgctgtcaatctcagcttcctgttgcaaaaccttttccgtgaatatctcttggagtctggaaatctcaaccactctcccttcgatttgcctcacttcatcaaacaagctgttcatttcaccaattagtcgctgattttcctgttcaaacatttgtatttcttctggggataactcatcttcgcctttgccatctccccacgttcccaattcaggttgtgtttcagccaaaattttttctggacgttcttcagtggcagggttttcttcagagtcttttgaaggactctgtgaaactttctcagaagatgtggattctcttgtctttgtatttggttctggttccagcttagataatcttttcttatccaccactcttttaactcggatggctctctgttctgagtaaagtttacatactcttttcaagtaatcttcaatgaaatccaaaacagcggtcctgtgctccttcacttgctgggaatgtatctccttgtgagcttctgttcgtagttgctgaattgcttctgaacaggtcctcatgaatatctgggcatcctggtctatctggtctcgttctgtgtctgtcatcctcccatattcagacatggtatggctataagcattaatataatctttcctgtgttccagaagaaaatctctcagtttgccaatgtgagaaatcacttcgcgggcccggctggagaagtcgcccttggnccgggggctctgtatttttagtagaaacggggtttcaccatgttggccaggctggtcttgaactcctgaccttgtgatccacctgcctcggcctcccagagtgctggaattacaggcgtgagtcaccgcatccggacaagggcgtttcttatataacagcagctacttgggaggctgaggcacgagaattgcttgaacctgggaggcagaggttgtagtgagtcgaggttgcgccactgcactgcagcctgggcgacagagcaagactgtctc

SEQ ID NO: 666263 - DNA, 806 bp, Homo sapiens
caccgcgcatccggtcccctgcttggaactggctgtgaaggacccagtgagagacagagatgcgaaccaaccaataacacgtcacagccctgtccccgtgtgtgccctgagactagacacagcatgcctcacgctcccaggaatgcatgtggtttcctggtgcttcccacggaggagtccggcagccagacttctggaggaactggttgtataggaagatcctagtgagcaatattcagcctactgcctcggatctctccagccgaagtctgtggactgcaagtctttgctgatgcttcgtgggctcccatcagcctctaacatccttgtctgggtctaccagggaacgcttcagtttccttggggctgctggtttcgtggtttgcggggcctggcagaacatcatcttctccccttggcagtgtccagggccctggatggtcctcttaccaacttctggtcttccaggctctcaaatagctgggaaccagaactctcagcgtccagctctacgcagttcatcggttttggggccacgatggcagacctctgacactcccacgccttgatcctcctggaacgggacctggttggactaactggtaacctgggacccttgacacctgttatgggcccagcgcgcaatggttctcatgggaacgaagattccacgctgggggcattttccatgcacataactactgccccaatttcacactctacttccttaacaactccttggtgagccaccagacatgttatacaacacacgtctcacatcactgccataaactgcgcatcaacca

SEQ ID NO: 666264 - DNA, 394 bp, Homo sapiens
acatcatacatttaatttctaataatttaattacatacatttaatttctaatcatcagagaaatgcaaattaaaatcacaatgagatatcatttcacaccagtcagaatggctgttttttaaaagtcaaaacataatagatgctggcaaggctgtgtagaaaacggaacacatacactgctggtgggaatgtaaattagtacaattataatggaaaacaacatggagatgtctcaaagaacttaagatagaactaccgttcgacccagcgatccattgctggtatatacccaaaggaaaataaattgttctacaaaaaagacacatacacttgtatgttcattgcagcattattctcaataccaaagatatggaagcaactgaggtgtccatcc

SEQ ID NO: 666265 - DNA, 4408 bp, Homo sapiens
  misc_feature (11)..(11): n is a, c, g, or t
  misc_feature (44)..(44): n is a, c, g, or t
  misc_feature (46)..(46): n is a, c, g, or t
  misc_feature (4239)..(4239): n is a, c, g, or t
cgagagggcanaaaaccttcgggctaggtacgaggcctgggtgntngggagcggccgtggagcccaatcgttcgctccccttcccgggtccgcgcgcggcgccgcctccgccattgctgcgagcaggagcaggagacgcggagctcggagcgctgagctgacctgccggagccgggcgtgggctgcagcctcggagctcccggaacgatggtgaagttggggaacaatttcgcagagaagggcaccaagcagccgctgctggaggatggcttcgacaccattcccctgatgacgcccctcgatgtcaatcagctgcagttcccgcccccggataaggtggtcgtgaaaactaagaccgagtatgaacctgaccgcaagaaagggaaagcacgtcctccccaaattgctgagttcaccgtcagcatcacggagggtgtcaccgagaggtttaaggtctccgtgttggtcctcttcgccctggccttcctcacctgcgtcgtcttcctggttgtctacaaggtgtacaagtatgaccgcgcctgccccgatgggttcgtcctcaagaacacccagtgcatcccagaaggcttggagagctactacgcggagcaagactccagtgcccgggagaaattttacacagtcataaaccactacaacctggccaagcagagcatcacgcgctccgtatcgccctggatgtcagttctgtcagaagagaagctgtccgagcaggagactgaagcggctgagaagtcagcttagcgggatgggcaagttccttacaatgtgtcacttgcaaataacaaagggactttgagggacatttcattaaatataattactgatactttagaggttactcatttacggtgcaattgcttctgtttgctaatgctgctttgcaaataaaacttgctgccgaccacccacgggcataaaatcaagtgcatttcagcattgcctaaagagctctgacaccacttttcatgttaagatcttcatttagctcctttactgggatttattggatgctgtaaaaaaataaatttacactggatatgcgaagggtttggatctcagataaatgcattttgtggaattgattttctgaaccgaccctgctgtctgcaaaccttcctccatagccatatctagagtgatctctcgctgtgctaagagcaagcctacttcgcatttcttcctcggccatcagcgggtaacagtgctgactgctgccaaggtgcactgtagtaagtaagtggcatagagaacgaggaaaaagacccccccacccctccctgtgctgactcctgagtcggggtgggacggccctgcaatgtggcaggctcggtgtggattgactactccctcccctctgactctggcatcttggtaaggagggaggggcaccacccatctgggtggagacagctggggtttgctccagtgtgtgtagactggcagagcatgtgagggagagggctgggaagagacggccctgggcccgtgaggtgcagaactctccctgcaggtagtctgtctgctctgtgatgtgctgataggaaagagcccccactggccctctggttcacttctattatgaataaatttgcaccaatagccccattagtttttaaagaaatgagctgggtgggaaaagtggaaatgtaatttctggtaagcttgagctactttaatttttattctatgaaactgatatcccttgatgtgggaaacaggcaggaaaggctgtggggtgggggtgggggactggtgtggcaccgtgcaaacaaaatgacaaatttcaactcacaatctttgtaagaaaattgttccagtttgaatcttgatattaaagtttatgtttacaaaactgccagttagatgaactaagtgtgtaaaacaaatagaaaagacattcgcagacatttcttctatgttattgaatgtgttgtttctggtgtacgtgtcaaaagtttcagttttttagatcagaaataaacgacaaatagtgtgagatgtgttgtgaacaggcatggtgaccgtggtcagcgccactcttgtttcctgaaatgtgcttctaagacagaaaatgtattttctcatcaagggtgtctggagacacagaccgtgaccttggcgcagcggtgtgcatcagaggcgtgtgctgagaagggtggtgttaagctgtggaaaatgactcaagagcaataaatcagtgccaaagcttccctgcgcatctgaatagacacaagtgaagcccgtgtgcgcacagtgcagaggccgagcctgtatttccaggtagacgtggactttattgactgtgaattcatttacatgtaacttctgacatttcactctgtgcaaataaagaacatgaggatacctgtgctgcccagtggactgtctgtacacacacgcatttcaccaggcgcagtgcagactgtctcatgcccatgtgggcgctgggatgcttcctgtacagatgtctcatgccttcagttacacataggtgttcctgtttacagttcctggaggtcagaagcacaggcacgagagaagcaggcccgttcttccgtggcccacttcttcctttgaacaaaggctccttggacccagtggcgggaaactggccctcccacaccccctgcctgttctgggggcagcagtctttggaggagtaatgccaggcagcccctcactgagggccccagtctcccctgcatttcttccctgattgattgataggaggtggctgggctgccactgaatttgtcaacttagactcattgacaacacattaaggggctgtaattatatttattagattaacaaggcagatgtgaattttctcttctataatccagtaagtctgtgtattcgttgactcagacagacaagaagccacaaggaaacaaagaagtaatcatttgttgagagacgttattaactatgatcttccctgaagctaccgggatgggaaaggtcagtgtcttcctttgaaccctgagacaattaggggctcttgaggcctgctgtgcccctgctgccaaggcagcctcaagttcaaggagcagctaatcacccactcctgcattcagtctgtcttgcctgatgagggctacgcaggctgcctcccattggtgtgcactgtttcctttttcagctgctaaatggctgaacaccatcggcctggggtatccctttttggggaatacgtctgtctgtctgaactcctttcccttcaaatggcactgtgataaaatctggtcataccatgctccagcactggaagtacatgaaagcacgcagtctgtgagtgcccatgaggactctcgtgctgggcccccgtggccctggctagctgtcgtaccagtcgaggaagagcaaggagaaggagcacatcacgaggaagaagaggatccacacgcggaagccagcgttgtttttaatggcctctcttatgtcttcgttgccttccttgatattttcagttgcccccacaactaactggtgaatgctgtcaatctcagcttcctgttgcaaaaccttttccgtgaatatctcttggagtctggaaatctcaaccactctcccttcgatttgcctcacttcatcaaacaagctgttcatttcaccaattagtcgctgattttcctgttcaaacatttgtatttcttctggggataactcatcttcgcctttgccatctccccacgttcccaattcaggttgtgtttcagccaaaattttttctggacgttcttcagtggcagggttttcttcagagtcttttgaaggactctgtgaaactttctcagaagatgtggattctcttgtctttgtatttggttctggttccagcttagataatcttttcttatccaccactcttttaactcggatggctctctgttctgagtaaagtttacatactcttttcaagtaatcttcaatgaaatccaaaacagcggtcctgtgctccttcacttgctgggaatgtatctccttgtgagcttctgttcgtagttgctgaattgcttctgaacaggtcctcatgaatatctgggcatcctggtctatctggtctcgttctgtgtctgtcatcctcccatattcagacatggtatggctataagcattaatataatctttcctgtgttccagaagaaaatctctcagtttgccaatgtgagaaatcacttcgcgggcccggctggagaagtcgcccttggnccgggggctccggcggaacagcctcgtccaacggctgccatcgaccccgccgcccaccagccactcccagcgaccgttgttccgcgtcttcacggtcattgacgctggcccggaatagcagcgtgatctccaccgccatagcgacccgcaccctcagccccacactagg

SEQ ID NO: 666266 - DNA, 4287 bp, Homo sapiens
  misc_feature (15)..(15): n is a, c, g, or t
ccggggtggcgcacncgcagccctcccgctccgggcgccctccgccgctccgagaccccctgggggcgcgtcctctcccgctcccctgttccctcccccggctcagggcgggcgcgtggtcccaggggaggctcccgcccagccccgcactcctttgtgcggccgggcgggcgctgcgtcaaggtggaggcgcggccacacgcgcgcacccacccgcgcgcacccagcccccgggagaggcaggaagggaggcggcggcgcgaggaggagggagcggccgtggagcccaatcgttcgctccccttcccgggtccgcgcgcggcgccgcctccgccattgctgcgagcaggagcaggagacgcggagctcggagcgctgagctgacctgccggagccgggcgtgggctgcagcctcggagctcccggaacgatggtgaagttggggaacaatttcgcagagaagggcaccaagcagccgctgctggaggatggcttcgacaccattcccctgatgacgcccctcgatgtcaatcagctgcagttcccgcccccggataaggtggtcgtgaaaactaagaccgagtatgaacctgaccgcaagaaagggaaagcacgtcctccccaaattgctgagttcaccgtcagcatcacggagggtgtcaccgagaggtttaaggtctccgtgttggtcctcttcgccctggccttcctcacctgcgtcgtcttcctggttgtctacaaggtgtacaagtatgaccgcgcctgccccgatgggttcgtcctcaagaacacccagtgcatcccagaaggcttggagagctactacgcggagcaagactccagtgcccgggagaaattttacacagtcataaaccactacaacctggccaagcagagcatcacgcgctccgtatcgccctggatgtcagttctgtcagaagagaagctgtccgagcaggagactgaagcggctgagaagtcagcttagcgggatgggcaagttccttacaatgtgtcacttgcaaataacaaagggactttgagggacatttcattaaatataattactgatactttagaggttactcatttacggtgcaattgcttctgtttgctaatgctgctttgcaaataaaacttgctgccgaccacccacgggcataaaatcaagtgcatttcagcattgcctaaagagctctgacaccacttttcatgttaagatcttcatttagctcctttactgggatttattggatgctgtaaaaaaataaatttacactggatatgcgaagggtttggatctcagataaatgcattttgtggaattgattttctgaaccgaccctgctgtctgcaaaccttcctccatagccatatctagagtgatctctcgctgtgctaagagcaagcctacttcgcatttcttcctcggccatcagcgggtaacagtgctgactgctgccaaggtgcactgtagtaagtaagtggcatagagaacgaggaaaaagacccccccacccctccctgtgctgactcctgagtcggggtgggacggccctgcaatgtggcaggctcggtgtggattgactactccctcccctctgactctggcatcttggtaaggagggaggggcaccacccatctgggtggagacagctggggtttgctccagtgtgtgtagactggcagagcatgtgagggagagggctgggaagagacggccctgggcccgtgaggtgcagaactctccctgcaggtagtctgtctgctctgtgatgtgctgataggaaagagcccccactggccctctggttcacttctattatgaataaatttgcaccaatagccccattagtttttaaagaaatgagctgggtgggaaaagtggaaatgtaatttctggtaagcttgagctactttaatttttattctatgaaactgatatcccttgatgtgggaaacaggcaggaaaggctgtggggtgggggtgggggactggtgtggcaccgtgcaaacaaaatgacaaatttcaactcacaatctttgtaagaaaattgttccagtttgaatcttgatattaaagtttatgtttacaaaactgccagttagatgaactaagtgtgtaaaacaaatagaaaagacattcgcagacatttcttctatgttattgaatgtgttgtttctggtgtacgtgtcaaaagtttcagttttttagatcagaaataaacgacaaatagtgtgagatgtgttgtgaacaggcatggtgaccgtggtcagcgccactcttgtttcctgaaatgtgcttctaagacagaaaatgtattttctcatcaagggtgtctggagacacagaccgtgaccttggcgcagcggtgtgcatcagaggcgtgtgctgagaagggtggtgttaagctgtggaaaatgactcaagagcaataaatcagtgccaaagcttccctgcgcatctgaatagacacaagtgaagcccgtgtgcgcacagtgcagaggccgagcctgtatttccaggtagacgtggactttattgactgtgaattcatttacatgtaacttctgacatttcactctgtgcaaataaagaacatgaggatacctgtgctgcccagtggactgtctgtacacacacgcatttcaccaggcgcagtgcagactgtctcatgcccatgtgggcgctgggatgcttcctgtacagatgtctcatgccttcagttacacataggtgttcctgtttacagttcctggaggtcagaagcacaggcacgagagaagcaggcccgttcttccgtggcccacttcttcctttgaacaaaggctccttggacccagtggcgggaaactggccctcccacaccccctgcctgttctgggggcagcagtctttggaggagtaatgccaggcagcccctcactgagggccccagtctcccctgcatttcttccctgattgattgataggaggtggctgggctgccactgaatttgtcaacttagactcattgacaacacattaaggggctgtaattatatttattagattaacaaggcagatgtgaattttctcttctataatccagtaagtctgtgtattcgttgactcagacagacaagaagccacaaggaaacaaagaagtaatcatttgttgagagacgttattaactatgatcttccctgaagctaccgggatgggaaaggtcagtgtcttcctttgaaccctgagacaattaggggctcttgaggcctgctgtgcccctgctgccaaggcagcctcaagttcaaggagcagctaatcacccactcctgcattcagtctgtcttgcctgatgagggctacgcaggctgcctcccattggtgtgcactgtttcctttttcagctgctaaatggctgaacaccatcggcctggggtatccctttttggggaatacgtctgtctgtctgaactcctttcccttcaaatggcactgtgataaaatctggtcataccatgctccagcactggaagtacatgaaagcacgcagtctgtgagtgcccatgaggactctcgtgctgggcccccgtggccctggctagctgtcgtaccagtcgaggaagagcaaggagaaggagcacatcacgaggaagaagaggatccacacgcggaagccagcgttgtttttaatggcctctcttatgtcttcgttgccttccttgatattttcagttgcccccacaactaactggtgaatgctgtcaatctcagcttcctgttgcaaaaccttttccgtgaatatctcttggagtctggaaatctcaaccactctcccttcgatttgcctcacttcatcaaacaagctgttcatttcaccaattagtcgctgattttcctgttcaaacatttgtatttcttctggggataactcatcttcgcctttgccatctccccacgttcccaattcaggttgtgtttcagccaaaattttttctggacgttcttcagtggcagggttttcttcagagtcttttgaaggactctgtgaaactttctcagaagatgtggattctcttgtctttgtatttggttctggttccagcttagatctaaaaataaataattagcaggcaggtattttatttccataacaggattcctttttgaaaacagaaggagtcacatgtgaccctgcgcttttgctctgtgtccctgtactggggagcagtcactgcctctgggcccagtggccatccggacacacctccactggggcacttaacactggcattttgcctg

SEQ ID NO: 666267 - DNA, 81 bp, Homo sapiens
  misc_feature (54)..(54): n is a, c, g, or t
gacccaggaagaagctgtttgaatccagcaggctcagctggaggctgagatcanaacctctcatggaaagtggagcgtgca

SEQ ID NO: 666268 - DNA, 4572 bp, Homo sapiens
  misc_feature (15)..(15): n is a, c, g, or t
  misc_feature (4403)..(4403): n is a, c, g, or t
ccggggtggcgcacncgcagccctcccgctccgggcgccctccgccgctccgagaccccctgggggcgcgtcctctcccgctcccctgttccctcccccggctcagggcgggcgcgtggtcccaggggaggctcccgcccagccccgcactcctttgtgcggccgggcgggcgctgcgtcaaggtggaggcgcggccacacgcgcgcacccacccgcgcgcacccagcccccgggagaggcaggaagggaggcggcggcgcgaggaggagggagcggccgtggagcccaatcgttcgctccccttcccgggtccgcgcgcggcgccgcctccgccattgctgcgagcaggagcaggagacgcggagctcggagcgctgagctgacctgccggagccgggcgtgggctgcagcctcggagctcccggaacgatggtgaagttggggaacaatttcgcagagaagggcaccaagcagccgctgctggaggatggcttcgacaccattcccctgatgacgcccctcgatgtcaatcagctgcagttcccgcccccggataaggtggtcgtgaaaactaagaccgagtatgaacctgaccgcaagaaagggaaagcacgtcctccccaaattgctgagttcaccgtcagcatcacggagggtgtcaccgagaggtttaaggtctccgtgttggtcctcttcgccctggccttcctcacctgcgtcgtcttcctggttgtctacaaggtgtacaagtatgaccgcgcctgccccgatgggttcgtcctcaagaacacccagtgcatcccagaaggcttggagagctactacgcggagcaagactccagtgcccgggagaaattttacacagtcataaaccactacaacctggccaagcagagcatcacgcgctccgtatcgccctggatgtcagttctgtcagaagagaagctgtccgagcaggagactgaagcggctgagaagtcagcttagcgggatgggcaagttccttacaatgtgtcacttgcaaataacaaagggactttgagggacatttcattaaatataattactgatactttagaggttactcatttacggtgcaattgcttctgtttgctaatgctgctttgcaaataaaacttgctgccgaccacccacgggcataaaatcaagtgcatttcagcattgcctaaagagctctgacaccacttttcatgttaagatcttcatttagctcctttactgggatttattggatgctgtaaaaaaataaatttacactggatatgcgaagggtttggatctcagataaatgcattttgtggaattgattttctgaaccgaccctgctgtctgcaaaccttcctccatagccatatctagagtgatctctcgctgtgctaagagcaagcctacttcgcatttcttcctcggccatcagcgggtaacagtgctgactgctgccaaggtgcactgtagtaagtaagtggcatagagaacgaggaaaaagacccccccacccctccctgtgctgactcctgagtcggggtgggacggccctgcaatgtggcaggctcggtgtggattgactactccctcccctctgactctggcatcttggtaaggagggaggggcaccacccatctgggtggagacagctggggtttgctccagtgtgtgtagactggcagagcatgtgagggagagggctgggaagagacggccctgggcccgtgaggtgcagaactctccctgcaggtagtctgtctgctctgtgatgtgctgataggaaagagcccccactggccctctggttcacttctattatgaataaatttgcaccaatagccccattagtttttaaagaaatgagctgggtgggaaaagtggaaatgtaatttctggtaagcttgagctactttaatttttattctatgaaactgatatcccttgatgtgggaaacaggcaggaaaggctgtggggtgggggtgggggactggtgtggcaccgtgcaaacaaaatgacaaatttcaactcacaatctttgtaagaaaattgttccagtttgaatcttgatattaaagtttatgtttacaaaactgccagttagatgaactaagtgtgtaaaacaaatagaaaagacattcgcagacatttcttctatgttattgaatgtgttgtttctggtgtacgtgtcaaaagtttcagttttttagatcagaaataaacgacaaatagtgtgagatgtgttgtgaacaggcatggtgaccgtggtcagcgccactcttgtttcctgaaatgtgcttctaagacagaaaatgtattttctcatcaagggtgtctggagacacagaccgtgaccttggcgcagcggtgtgcatcagaggcgtgtgctgagaagggtggtgttaagctgtggaaaatgactcaagagcaataaatcagtgccaaagcttccctgcgcatctgaatagacacaagtgaagcccgtgtgcgcacagtgcagaggccgagcctgtatttccaggtagacgtggactttattgactgtgaattcatttacatgtaacttctgacatttcactctgtgcaaataaagaacatgaggatacctgtgctgcccagtggactgtctgtacacacacgcatttcaccaggcgcagtgcagactgtctcatgcccatgtgggcgctgggatgcttcctgtacagatgtctcatgccttcagttacacataggtgttcctgtttacagttcctggaggtcagaagcacaggcacgagagaagcaggcccgttcttccgtggcccacttcttcctttgaacaaaggctccttggacccagtggcgggaaactggccctcccacaccccctgcctgttctgggggcagcagtctttggaggagtaatgccaggcagcccctcactgagggccccagtctcccctgcatttcttccctgattgattgataggaggtggctgggctgccactgaatttgtcaacttagactcattgacaacacattaaggggctgtaattatatttattagattaacaaggcagatgtgaattttctcttctataatccagtaagtctgtgtattcgttgactcagacagacaagaagccacaaggaaacaaagaagtaatcatttgttgagagacgttattaactatgatcttccctgaagctaccgggatgggaaaggtcagtgtcttcctttgaaccctgagacaattaggggctcttgaggcctgctgtgcccctgctgccaaggcagcctcaagttcaaggagcagctaatcacccactcctgcattcagtctgtcttgcctgatgagggctacgcaggctgcctcccattggtgtgcactgtttcctttttcagctgctaaatggctgaacaccatcggcctggggtatccctttttggggaatacgtctgtctgtctgaactcctttcccttcaaatggcactgtgataaaatctggtcataccatgctccagcactggaagtacatgaaagcacgcagtctgtgagtgcccatgaggactctcgtgctgggcccccgtggccctggctagctgtcgtaccagtcgaggaagagcaaggagaaggagcacatcacgaggaagaagaggatccacacgcggaagccagcgttgtttttaatggcctctcttatgtcttcgttgccttccttgatattttcagttgcccccacaactaactggtgaatgctgtcaatctcagcttcctgttgcaaaaccttttccgtgaatatctcttggagtctggaaatctcaaccactctcccttcgatttgccatttgtatttcttctggggataactcatcttcgcctttgccatctccccacgttcccaattcaggttgtgtttcagccaaaattttttctggacgttcttcagtggcagggttttcttcagagtcttttgaaggactctgtgaaactttctcagaagatgtggattctcttgtctttgtatttggttctggttccagcttagataatcttttcttatccaccactcttttaactcggatggctctctgttctgagtaaagtttacatactcttttcaagtaatcttcaatgaaatccaaaacagcggtcctgtgctccttcacttgctgggaatgtatctccttgtgagcttctgttcgtagttgctgaattgcttctgaacaggtcctcatgaatatctgggcatcctggtctatctggtctcgttctgtgtctgtcatcctcccatattcagacatggtatggctataagcattaatataatctttcctgtgttccagaagaaaatctctcagtttgccaatgtgagaaatcacttcgcgggcccggctggagaagtcgcccttggnccgggggctccggcggaacagcctcgtccaacggctgccatcgaccccgccgcccaccagccactcccagcgaccgttgttccgcgtcttcacggtcattgacgctggcccggaatagcagcgtgatctccaccgccatagcgacccgcaccctcagccccacactagg

SEQ ID NO: 666269 - DNA, 922 bp, Homo sapiens
gctctcggcttgcggctcggagcgaggccaaggtgcaacttccttcggtcgacccgaatccgggttcatctcgacacgcaagaccgccttccactcgatgtccgtctgaaattcgactcctcaagcagagaattctaaagttccgttaataccatgaagtgtagcaccgagggggctgaaaggtcggggccgagttttctgccacttggtcccacaagatctgggctcccctgggatctagttgttcctcaatataaaacgtgtcggtggagttggacagtaagccgtcacggccaatcgagagttgacctagtaaggagtggcattgacggaatgtagcggcgctgataaacatgactcgagttcatgagacaacggatctaggcccccacgagtgcgggatggtggggtaggcaatacgtgccatcattgggccatgaatcaatcaaaagctccttctagaggtataccaccccaaggagcaccacgatagttgcacaaccaagacaagaacattagtcctagacgcttgtgggaactaatcgattgtgtttagtatgatgatgagtccaaactatgtggctgctgaacaatgatggttgcgtaactgaataagctttaatagtcaaggatgtaagcttccttgcgtagagaaatctctactctgaaaacgcagagtctctagtaggggacattggcaccaagttccaagtggtgagccttcgcttaaatggtgcgattggggactcgtcctgtctagttccaattgaaccaattcgattccggaagtgcaccaatttaaacagtctgggagctatgatgtgaaattgccccaaagcccaggttaaaggcaccacagcggaaaaaccaatttccaacttaacagggaatccatttgaaccaactgggtgggaaccaaaag

SEQ ID NO: 666270 - DNA, 1197 bp, Homo sapiens
agctggtggtcatcaagcagaacggagctgtcatcaccaacaaagggcggaagcagatccgagagcgcgggctagcttgctttcagaactgggtggaagcagccgatgttttccaaaacttctcggggtgaccagggcagttgctggaagttcagggcaactatcttcaaaaagggcttagctggttcccttctctgctgaggaatgtcattgtagagtcaccatgctgtgacagagagcataaactgctcaggaaagaactacgtctgccccctgtgggtcctagagctccgttgaatgtttatttcttacacctttctccaccggtgcctaggatccaggacacatcagccacgagttaacagaactctatgcaagatgctctttcctacaggaaatttctttgataaattgacctatggaggtgatacattttctgatgacatttttgtgatgctttggtaaacgtatttattactcaggtttgtagactgtgtaatttaataaaccaacactcacactttgaaaaaaaaaaaacaaacacaaaacaacacacaacaaaacaacaaaaaaaaagagacaccacaaaaaaaaaacaccccacacacacacagcaacacaaacggcggggccacataaacatacacccgcgagggccacaaagaggcgccacacctcctttcatagaacaacataggtgcccaatcaatgagcagctatcatcacatacaaacgcgcgcgcggcactcctatcacaaatataccgtggtaagagacatcagtcgtccggagtcattctatgagagagacaccacccatgtggagggcacaaaatcaggcgaccacctcccacgataaatcactccggaggaagatacaacaaccgacgacgatgggatcgccacacccacacttattgtggcaggacaaaataacgctcgctcggttgttttcaaaatcacgcggcggcggactacgtcagcctaggtgcacgcgccactggtaggacatggcgccgcgggcggctgggggaggggccgtgctagtggcatgtccgtggcaacgatgatgcagcgaaggaacgactcatgacatcggtacgccgactgcattcacgaacgcgctatgtcaccaccaacgcaacgcgctgtcattaggcatgacatagcgtcatcagccactgccgaccgatcgcca

SEQ ID NO: 666271 - DNA, 3917 bp, Homo sapiens
  misc_feature (15)..(15): n is a, c, g, or t
ccggggtggcgcacncgcagccctcccgctccgggcgccctccgccgctccgagaccccctgggggcgcgtcctctcccgctcccctgttccctcccccggctcagggcgggcgcgtggtcccaggggaggctcccgcccagccccgcactcctttgtgcggccgggcgggcgctgcgtcaaggtggaggcgcggccacacgcgcgcacccacccgcgcgcacccagcccccgggagaggcaggaagggaggcggcggcgcgaggaggagggagcggccgtggagcccaatcgttcgctccccttcccgggtccgcgcgcggcgccgcctccgccattgctgcgagcaggagcaggagacgcggagctcggagcgctgagctgacctgccggagccgggcgtgggctgcagcctcggagctcccggaacgatggtgaagttggggaacaatttcgcagagaagggcaccaagcagccgctgctggaggatggcttcgacaccattcccctgatgacgcccctcgatgtcaatcagctgcagttcccgcccccggataaggtggtcgtgaaaactaagaccgagtatgaacctgaccgcaagaaagggaaagcacgtcctccccaaattgctgagttcaccgtcagcatcacggagggtgtcaccgagaggtttaaggtctccgtgttggtcctcttcgccctggccttcctcacctgcgtcgtcttcctggttgtctacaaggtgtacaagtatgaccgcgcctgccccgatgggttcgtcctcaagaacacccagtgcatcccagaaggcttggagagctactacgcggagcaagactccagtgcccgggagaaattttacacagtcataaaccactacaacctggccaagcagagcatcacgcgctccgtatcgccctggatgtcagttctgtcagaagagaagctgtccgagcaggagactgaagcggctgagaagtcagcttagcgggatgggcaagttccttacaatgtgtcacttgcaaataacaaagggactttgagggacatttcattaaatataattactgatactttagaggttactcatttacggtgcaattgcttctgtttgctaatgctgctttgcaaataaaacttgctgccgaccacccacgggcataaaatcaagtgcatttcagcattgcctaaagagctctgacaccacttttcatgttaagatcttcatttagctcctttactgggatttattggatgctgtaaaaaaataaatttacactggatatgcgaagggtttggatctcagataaatgcattttgtggaattgattttctgaaccgaccctgctgtctgcaaaccttcctccatagccatatctagagtgatctctcgctgtgctaagagcaagcctacttcgcatttcttcctcggccatcagcgggtaacagtgctgactgctgccaaggtgcactgtagtaagtaagtggcatagagaacgaggaaaaagacccccccacccctccctgtgctgactcctgagtcggggtgggacggccctgcaatgtggcaggctcggtgtggattgactactccctcccctctgactctggcatcttggtaaggagggaggggcaccacccatctgggtggagacagctggggtttgctccagtgtgtgtagactggcagagcatgtgagggagagggctgggaagagacggccctgggcccgtgaggtgcagaactctccctgcaggtagtctgtctgctctgtgatgtgctgataggaaagagcccccactggccctctggttcacttctattatgaataaatttgcaccaatagccccattagtttttaaagaaatgagctgggtgggaaaagtggaaatgtaatttctggtaagcttgagctactttaatttttattctatgaaactgatatcccttgatgtgggaaacaggcaggaaaggctgtggggtgggggtgggggactggtgtggcaccgtgcaaacaaaatgacaaatttcaactcacaatctttgtaagaaaattgttccagtttgaatcttgatattaaagtttatgtttacaaaactgccagttagatgaactaagtgtgtaaaacaaatagaaaagacattcgcagacatttcttctatgttattgaatgtgttgtttctggtgtacgtgtcaaaagtttcagttttttagatcagaaataaacgacaaatagtgtgagatgtgttgtgaacaggcatggtgaccgtggtcagcgccactcttgtttcctgaaatgtgcttctaagacagaaaatgtattttctcatcaagggtgtctggagacacagaccgtgaccttggcgcagcggtgtgcatcagaggcgtgtgctgagaagggtggtgttaagctgtggaaaatgactcaagagcaataaatcagtgccaaagcttccctgcgcatctgaatagacacaagtgaagcccgtgtgcgcacagtgcagaggccgagcctgtatttccaggtagacgtggactttattgactgtgaattcatttacatgtaacttctgacatttcactctgtgcaaataaagaacatgaggatacctgtgctgcccagtggactgtctgtacacacacgcatttcaccaggcgcagtgcagactgtctcatgcccatgtgggcgctgggatgcttcctgtacagatgtctcatgccttcagttacacataggtgttcctgtttacagttcctggaggtcagaagcacaggcacgagagaagcaggcccgttcttccgtggcccacttcttcctttgaacaaaggctccttggacccagtggcgggaaactggccctcccacaccccctgcctgttctgggggcagcagtctttggaggagtaatgccaggcagcccctcactgagggccccagtctcccctgcatttcttccctgattgattgataggaggtggctgggctgccactgaatttgtcaacttagactcattgacaacacattaaggggctgtaattatatttattagattaacaaggcagatgtgaattttctcttctataatccagtaagtctgtgtattcgttgactcagacagacaagaagccacaaggaaacaaagaagtaatcatttgttgagagacgttattaactatgatcttccctgaagctaccgggatgggaaaggtcagtgtcttcctttgaaccctgagacaattaggggctcttgaggcctgctgtgcccctgctgccaaggcagcctcaagttcaaggagcagctaatcacccactcctgcattcagtctgtcttgcctgatgagggctacgcaggctgcctcccattggtgtgcactgtttcctttttcagctgctaaatggctgaacaccatcggcctggggtatccctttttggggaatacgtctgtctgtctgaactcctttcccttcaaatggcactgtgataaaatctggtcataccatgctccagcactggaagtacatgaaagcacgcagtctgtgagtgcccatgaggactctcgtgctgggcccccgtggccctggctagctgtcgtaccagtcgaggaagagcaaggagaaggagcacatcacgaggaagaagaggatccacacgcggaagccagcgttgtttttaatggcctctcttatgtcttcgttgccttccttgatattttcagttgcccccacaactaactggtgaatgctgtcaatctcagcttcctgttgcaaaaccttttccgtgaatatctcttggagtctggaaatctcaaccactctcccttcgatttgccttcataaaaagaacagattacatattaactattagcacttggtaatctaacaggactgttacacacttctaaagaatcctatc

SEQ ID NO: 666272 - DNA, 4318 bp, Homo sapiens
  misc_feature (15)..(15): n is a, c, g, or t
ccggggtggcgcacncgcagccctcccgctccgggcgccctccgccgctccgagaccccctgggggcgcgtcctctcccgctcccctgttccctcccccggctcagggcgggcgcgtggtcccaggggaggctcccgcccagccccgcactcctttgtgcggccgggcgggcgctgcgtcaaggtggaggcgcggccacacgcgcgcacccacccgcgcgcacccagcccccgggagaggcaggaagggaggcggcggcgcgaggaggagggagcggccgtggagcccaatcgttcgctccccttcccgggtccgcgcgcggcgccgcctccgccattgctgcgagcaggagcaggagacgcggagctcggagcgctgagctgacctgccggagccgggcgtgggctgcagcctcggagctcccggaacgatggtgaagttggggaacaatttcgcagagaagggcaccaagcagccgctgctggaggatggcttcgacaccattcccctgatgacgcccctcgatgtcaatcagctgcagttcccgcccccggataaggtggtcgtgaaaactaagaccgagtatgaacctgaccgcaagaaagggaaagcacgtcctccccaaattgctgagttcaccgtcagcatcacggagggtgtcaccgagaggtttaaggtctccgtgttggtcctcttcgccctggccttcctcacctgcgtcgtcttcctggttgtctacaaggtgtacaagtatgaccgcgcctgccccgatgggttcgtcctcaagaacacccagtgcatcccagaaggcttggagagctactacgcggagcaagactccagtgcccgggagaaattttacacagtcataaaccactacaacctggccaagcagagcatcacgcgctccgtatcgccctggatgtcagttctgtcagaagagaagctgtccgagcaggagactgaagcggctgagaagtcagcttagcgggatgggcaagttccttacaatgtgtcacttgcaaataacaaagggactttgagggacatttcattaaatataattactgatactttagaggttactcatttacggtgcaattgcttctgtttgctaatgctgctttgcaaataaaacttgctgccgaccacccacgggcataaaatcaagtgcatttcagcattgcctaaagagctctgacaccacttttcatgttaagatcttcatttagctcctttactgggatttattggatgctgtaaaaaaataaatttacactggatatgcgaagggtttggatctcagataaatgcattttgtggaattgattttctgaaccgaccctgctgtctgcaaaccttcctccatagccatatctagagtgatctctcgctgtgctaagagcaagcctacttcgcatttcttcctcggccatcagcgggtaacagtgctgactgctgccaaggtgcactgtagtaagtaagtggcatagagaacgaggaaaaagacccccccacccctccctgtgctgactcctgagtcggggtgggacggccctgcaatgtggcaggctcggtgtggattgactactccctcccctctgactctggcatcttggtaaggagggaggggcaccacccatctgggtggagacagctggggtttgctccagtgtgtgtagactggcagagcatgtgagggagagggctgggaagagacggccctgggcccgtgaggtgcagaactctccctgcaggtagtctgtctgctctgtgatgtgctgataggaaagagcccccactggccctctggttcacttctattatgaataaatttgcaccaatagccccattagtttttaaagaaatgagctgggtgggaaaagtggaaatgtaatttctggtaagcttgagctactttaatttttattctatgaaactgatatcccttgatgtgggaaacaggcaggaaaggctgtggggtgggggtgggggactggtgtggcaccgtgcaaacaaaatgacaaatttcaactcacaatctttgtaagaaaattgttccagtttgaatcttgatattaaagtttatgtttacaaaactgccagttagatgaactaagtgtgtaaaacaaatagaaaagacattcgcagacatttcttctatgttattgaatgtgttgtttctggtgtacgtgtcaaaagtttcagttttttagatcagaaataaacgacaaatagtgtgagatgtgttgtgaacaggcatggtgaccgtggtcagcgccactcttgtttcctgaaatgtgcttctaagacagaaaatgtattttctcatcaagggtgtctggagacacagaccgtgaccttggcgcagcggtgtgcatcagaggcgtgtgctgagaagggtggtgttaagctgtggaaaatgactcaagagcaataaatcagtgccaaagcttccctgcgcatctgaatagacacaagtgaagcccgtgtgcgcacagtgcagaggccgagcctgtatttccaggtagacgtggactttattgactgtgaattcatttacatgtaacttctgacatttcactctgtgcaaataaagaacatgaggatacctgtgctgcccagtggactgtctgtacacacacgcatttcaccaggcgcagtgcagactgtctcatgcccatgtgggcgctgggatgcttcctgtacagatgtctcatgccttcagttacacataggtgttcctgtttacagttcctggaggtcagaagcacaggcacgagagaagcaggcccgttcttccgtggcccacttcttcctttgaacaaaggctccttggacccagtggcgggaaactggccctcccacaccccctgcctgttctgggggcagcagtctttggaggagtaatgccaggcagcccctcactgagggccccagtctcccctgcatttcttccctgattgattgataggaggtggctgggctgccactgaatttgtcaacttagactcattgacaacacattaaggggctgtaattatatttattagattaacaaggcagatgtgaattttctcttctataatccagtaagtctgtgtattcgttgactcagacagacaagaagccacaaggaaacaaagaagtaatcatttgttgagagacgttattaactatgatcttccctgaagctaccgggatgggaaaggtcagtgtcttcctttgaaccctgagacaattaggggctcttgaggcctgctgtgcccctgctgccaaggcagcctcaagttcaaggagcagctaatcacccactcctgcattcagtctgtcttgcctgatgagggctacgcaggctgcctcccattggtgtgcactgtttcctttttcagctgctaaatggctgaacaccatcggcctggggtatccctttttggggaatacgtctgtctgtctgaactcctttcccttcaaatggcactgtgataaaatctggtcataccatgctccagcactggaagtacatgaaagcacgcagtctgtgagtgcccatgaggactctcgtgctgggcccccgtggccctggctagctgtcgtaccagtcgaggaagagcaaggagaaggagcacatcacgaggaagaagaggatccacacgcggaagccagcgttgtttttaatggcctctcttatgtcttcgttgccttccttgatattttcagttgcccccacaactaactggtgaatgctgtcaatctcagcttcctgttgcaaaaccttttccgtgaatatctcttggagtctggaaatctcaaccactctcccttcgatttgcctcacttcatcaaacaagctgttcatttcaccaattagtcgctgattttcctgttcaaactgtgaggaaacagacacactcaggatgacatcatactgaacttaggcaagagtctagcaagaaagcggacctacgctccaggaatcactgccgaagcccccatttccagctgcggcaacgtggcagccggtgctggacgaccgttagcattagtgtgaacaacgtccctgctttcaggagaaagttttaaaaaacagctgtgctgcctggtaattgacttctccatctcaaccactgcactccagggtacaagctgactgctatggctgtagctgtatctacctacccgctctcccctgggatcccacggcctgcttcctgactctagtaccattattaagaaaattcttttgttgttgttttctctcatgaactatactgaaggactatacatattttttaatatggagaaggatctggtgtgg

SEQ ID NO: 666273 - DNA, 3965 bp, Homo sapiens
  misc_feature (15)..(15): n is a, c, g, or t
ccggggtggcgcacncgcagccctcccgctccgggcgccctccgccgctccgagaccccctgggggcgcgtcctctcccgctcccctgttccctcccccggctcagggcgggcgcgtggtcccaggggaggctcccgcccagccccgcactcctttgtgcggccgggcgggcgctgcgtcaaggtggaggcgcggccacacgcgcgcacccacccgcgcgcacccagcccccgggagaggcaggaagggaggcggcggcgcgaggaggagggagcggccgtggagcccaatcgttcgctccccttcccgggtccgcgcgcggcgccgcctccgccattgctgcgagcaggagcaggagacgcggagctcggagcgctgagctgacctgccggagccgggcgtgggctgcagcctcggagctcccggaacgatggtgaagttggggaacaatttcgcagagaagggcaccaagcagccgctgctggaggatggcttcgacaccattcccctgatgacgcccctcgatgtcaatcagctgcagttcccgcccccggataaggtggtcgtgaaaactaagaccgagtatgaacctgaccgcaagaaagggaaagcacgtcctccccaaattgctgagttcaccgtcagcatcacggagggtgtcaccgagaggtttaaggtctccgtgttggtcctcttcgccctggccttcctcacctgcgtcgtcttcctggttgtctacaaggtgtacaagtatgaccgcgcctgccccgatgggttcgtcctcaagaacacccagtgcatcccagaaggcttggagagctactacgcggagcaagactccagtgcccgggagaaattttacacagtcataaaccactacaacctggccaagcagagcatcacgcgctccgtatcgccctggatgtcagttctgtcagaagagaagctgtccgagcaggagactgaagcggctgagaagtcagcttagcgggatgggcaagttccttacaatgtgtcacttgcaaataacaaagggactttgagggacatttcattaaatataattactgatactttagaggttactcatttacggtgcaattgcttctgtttgctaatgctgctttgcaaataaaacttgctgccgaccacccacgggcataaaatcaagtgcatttcagcattgcctaaagagctctgacaccacttttcatgttaagatcttcatttagctcctttactgggatttattggatgctgtaaaaaaataaatttacactggatatgcgaagggtttggatctcagataaatgcattttgtggaattgattttctgaaccgaccctgctgtctgcaaaccttcctccatagccatatctagagtgatctctcgctgtgctaagagcaagcctacttcgcatttcttcctcggccatcagcgggtaacagtgctgactgctgccaaggtgcactgtagtaagtaagtggcatagagaacgaggaaaaagacccccccacccctccctgtgctgactcctgagtcggggtgggacggccctgcaatgtggcaggctcggtgtggattgactactccctcccctctgactctggcatcttggtaaggagggaggggcaccacccatctgggtggagacagctggggtttgctccagtgtgtgtagactggcagagcatgtgagggagagggctgggaagagacggccctgggcccgtgaggtgcagaactctccctgcaggtagtctgtctgctctgtgatgtgctgataggaaagagcccccactggccctctggttcacttctattatgaataaatttgcaccaatagccccattagtttttaaagaaatgagctgggtgggaaaagtggaaatgtaatttctggtaagcttgagctactttaatttttattctatgaaactgatatcccttgatgtgggaaacaggcaggaaaggctgtggggtgggggtgggggactggtgtggcaccgtgcaaacaaaatgacaaatttcaactcacaatctttgtaagaaaattgttccagtttgaatcttgatattaaagtttatgtttacaaaactgccagttagatgaactaagtgtgtaaaacaaatagaaaagacattcgcagacatttcttctatgttattgaatgtgttgtttctggtgtacgtgtcaaaagtttcagttttttagatcagaaataaacgacaaatagtgtgagatgtgttgtgaacaggcatggtgaccgtggtcagcgccactcttgtttcctgaaatgtgcttctaagacagaaaatgtattttctcatcaagggtgtctggagacacagaccgtgaccttggcgcagcggtgtgcatcagaggcgtgtgctgagaagggtggtgttaagctgtggaaaatgactcaagagcaataaatcagtgccaaagcttccctgcgcatctgaatagacacaagtgaagcccgtgtgcgcacagtgcagaggccgagcctgtatttccaggtagacgtggactttattgactgtgaattcatttacatgtaacttctgacatttcactctgtgcaaataaagaacatgaggatacctgtgctgcccagtggactgtctgtacacacacgcatttcaccaggcgcagtgcagactgtctcatgcccatgtgggcgctgggatgcttcctgtacagatgtctcatgccttcagttacacataggtgttcctgtttacagttcctggaggtcagaagcacaggcacgagagaagcaggcccgttcttccgtggcccacttcttcctttgaacaaaggctccttggacccagtggcgggaaactggccctcccacaccccctgcctgttctgggggcagcagtctttggaggagtaatgccaggcagcccctcactgagggccccagtctcccctgcatttcttccctgattgattgataggaggtggctgggctgccactgaatttgtcaacttagactcattgacaacacattaaggggctgtaattatatttattagattaacaaggcagatgtgaattttctcttctataatccagtaagtctgtgtattcgttgactcagacagacaagaagccacaaggaaacaaagaagtaatcatttgttgagagacgttattaactatgatcttccctgaagctaccgggatgggaaaggtcagtgtcttcctttgaaccctgagacaattaggggctcttgaggcctgctgtgcccctgctgccaaggcagcctcaagttcaaggagcagctaatcacccactcctgcattcagtctgtcttgcctgatgagggctacgcaggctgcctcccattggtgtgcactgtttcctttttcagctgctaaatggctgaacaccatcggcctggggtatccctttttggggaatacgtctgtctgtctgaactcctttcccttcaaatggcactgtgataaaatctggtcataccatgctccagcactggaagtacatgaaagcacgcagtctgtgagtgcccatgaggactctcgtgctgggcccccgtggccctggctagctgtcgtaccagtcgaggaagagcaaggagaaggagcacatcacgaggaagaagaggatccacacgcggaagccagcgttgtttttaatggcctgggcagggacgggagcacaggtgtttttatcacacaggattttggtttgagcagccctgaaatgcccccctcttcccacgtgctctcctgatcctggctgtaactatgggtgtcgttccatctgtgcttaccttgaatagatggcttttgagatccaccagaagacaaatgggttatatttccctctgtttggccatcatttggctcctgcacattctccctcacacaactctcggaatcactcccttctgtcccaggtttaacgggccccgagcaagagt

SEQ ID NO: 666274 - DNA, 4393 bp, Homo sapiens
  misc_feature (4224)..(4224): n is a, c, g, or t
cccctccccaacccagcactaaggagcaccctgctctggtctccgccaccacccagcgcctcctggacccatccccccaaacccttgaacgtcctcaggacccccaggcaggagcaggagacgcggagctcggagcgctgagctgacctgccggagccgggcgtgggctgcagcctcggagctcccggaacgatggtgaagttggggaacaatttcgcagagaagggcaccaagcagccgctgctggaggatggcttcgacaccattcccctgatgacgcccctcgatgtcaatcagctgcagttcccgcccccggataaggtggtcgtgaaaactaagaccgagtatgaacctgaccgcaagaaagggaaagcacgtcctccccaaattgctgagttcaccgtcagcatcacggagggtgtcaccgagaggtttaaggtctccgtgttggtcctcttcgccctggccttcctcacctgcgtcgtcttcctggttgtctacaaggtgtacaagtatgaccgcgcctgccccgatgggttcgtcctcaagaacacccagtgcatcccagaaggcttggagagctactacgcggagcaagactccagtgcccgggagaaattttacacagtcataaaccactacaacctggccaagcagagcatcacgcgctccgtatcgccctggatgtcagttctgtcagaagagaagctgtccgagcaggagactgaagcggctgagaagtcagcttagcgggatgggcaagttccttacaatgtgtcacttgcaaataacaaagggactttgagggacatttcattaaatataattactgatactttagaggttactcatttacggtgcaattgcttctgtttgctaatgctgctttgcaaataaaacttgctgccgaccacccacgggcataaaatcaagtgcatttcagcattgcctaaagagctctgacaccacttttcatgttaagatcttcatttagctcctttactgggatttattggatgctgtaaaaaaataaatttacactggatatgcgaagggtttggatctcagataaatgcattttgtggaattgattttctgaaccgaccctgctgtctgcaaaccttcctccatagccatatctagagtgatctctcgctgtgctaagagcaagcctacttcgcatttcttcctcggccatcagcgggtaacagtgctgactgctgccaaggtgcactgtagtaagtaagtggcatagagaacgaggaaaaagacccccccacccctccctgtgctgactcctgagtcggggtgggacggccctgcaatgtggcaggctcggtgtggattgactactccctcccctctgactctggcatcttggtaaggagggaggggcaccacccatctgggtggagacagctggggtttgctccagtgtgtgtagactggcagagcatgtgagggagagggctgggaagagacggccctgggcccgtgaggtgcagaactctccctgcaggtagtctgtctgctctgtgatgtgctgataggaaagagcccccactggccctctggttcacttctattatgaataaatttgcaccaatagccccattagtttttaaagaaatgagctgggtgggaaaagtggaaatgtaatttctggtaagcttgagctactttaatttttattctatgaaactgatatcccttgatgtgggaaacaggcaggaaaggctgtggggtgggggtgggggactggtgtggcaccgtgcaaacaaaatgacaaatttcaactcacaatctttgtaagaaaattgttccagtttgaatcttgatattaaagtttatgtttacaaaactgccagttagatgaactaagtgtgtaaaacaaatagaaaagacattcgcagacatttcttctatgttattgaatgtgttgtttctggtgtacgtgtcaaaagtttcagttttttagatcagaaataaacgacaaatagtgtgagatgtgttgtgaacaggcatggtgaccgtggtcagcgccactcttgtttcctgaaatgtgcttctaagacagaaaatgtattttctcatcaagggtgtctggagacacagaccgtgaccttggcgcagcggtgtgcatcagaggcgtgtgctgagaagggtggtgttaagctgtggaaaatgactcaagagcaataaatcagtgccaaagcttccctgcgcatctgaatagacacaagtgaagcccgtgtgcgcacagtgcagaggccgagcctgtatttccaggtagacgtggactttattgactgtgaattcatttacatgtaacttctgacatttcactctgtgcaaataaagaacatgaggatacctgtgctgcccagtggactgtctgtacacacacgcatttcaccaggcgcagtgcagactgtctcatgcccatgtgggcgctgggatgcttcctgtacagatgtctcatgccttcagttacacataggtgttcctgtttacagttcctggaggtcagaagcacaggcacgagagaagcaggcccgttcttccgtggcccacttcttcctttgaacaaaggctccttggacccagtggcgggaaactggccctcccacaccccctgcctgttctgggggcagcagtctttggaggagtaatgccaggcagcccctcactgagggccccagtctcccctgcatttcttccctgattgattgataggaggtggctgggctgccactgaatttgtcaacttagactcattgacaacacattaaggggctgtaattatatttattagattaacaaggcagatgtgaattttctcttctataatccagtaagtctgtgtattcgttgactcagacagacaagaagccacaaggaaacaaagaagtaatcatttgttgagagacgttattaactatgatcttccctgaagctaccgggatgggaaaggtcagtgtcttcctttgaaccctgagacaattaggggctcttgaggcctgctgtgcccctgctgccaaggcagcctcaagttcaaggagcagctaatcacccactcctgcattcagtctgtcttgcctgatgagggctacgcaggctgcctcccattggtgtgcactgtttcctttttcagctgctaaatggctgaacaccatcggcctggggtatccctttttggggaatacgtctgtctgtctgaactcctttcccttcaaatggcactgtgataaaatctggtcataccatgctccagcactggaagtacatgaaagcacgcagtctgtgagtgcccatgaggactctcgtgctgggcccccgtggccctggctagctgtcgtaccagtcgaggaagagcaaggagaaggagcacatcacgaggaagaagaggatccacacgcggaagccagcgttgtttttaatggcctctcttatgtcttcgttgccttccttgatattttcagttgcccccacaactaactggtgaatgctgtcaatctcagcttcctgttgcaaaaccttttccgtgaatatctcttggagtctggaaatctcaaccactctcccttcgatttgcctcacttcatcaaacaagctgttcatttcaccaattagtcgctgattttcctgttcaaacatttgtatttcttctggggataactcatcttcgcctttgccatctccccacgttcccaattcaggttgtgtttcagccaaaattttttctggacgttcttcagtggcagggttttcttcagagtcttttgaaggactctgtgaaactttctcagaagatgtggattctcttgtctttgtatttggttctggttccagcttagataatcttttcttatccaccactcttttaactcggatggctctctgttctgagtaaagtttacatactcttttcaagtaatcttcaatgaaatccaaaacagcggtcctgtgctccttcacttgctgggaatgtatctccttgtgagcttctgttcgtagttgctgaattgcttctgaacaggtcctcatgaatatctgggcatcctggtctatctggtctcgttctgtgtctgtcatcctcccatattcagacatggtatggctataagcattaatataatctttcctgtgttccagaagaaaatctctcagtttgccaatgtgagaaatcacttcgcgggcccggctggagaagtcgcccttggnccgggggctccggcggaacagcctcgtccaacggctgccatcgaccccgccgcccaccagccactcccagcgaccgttgttccgcgtcttcacggtcattgacgctggcccggaatagcagcgtgatctccaccgccatagcgacccgcaccctcagccccacactagg

SEQ ID NO: 666275 - DNA, 323 bp, Homo sapiens
ctgtaagaactgcaacacgacatttacttttatggaggacagttaggagaaaatgctagtaagcatactaggggcacgctagagaacggtttcaaagtcaagattagcactttaaattttaaataataaattacgttcaggactgaggatcagtgattgtaaactgtgctttaggaagatcactctgaccactatcataaataatttgagaagacagataataaaggaaaactaagttatgaaacaattaaaataattccaacagaaaagaattgaacattgtgaccaggtgaagactggagcttctgcccaagtgggtgggt

SEQ ID NO: 666276 - DNA, 102 bp, Homo sapiens
tcagtcgcgtgtgctatacctggcccgatgtagcacacgcgggcaacgaccaaattcgaacgcctgccctaatcaactttcggatggtagtcgccgtgccta

SEQ ID NO: 666277 - DNA, 511 bp, Homo sapiens
tctctgccccaggtggtggttcaacaaaaggagtttaaattccattcccttcagattttaaacctttgggtttttttaaaaaggggtggtcattaaaaaaaaattttttaacagtttcccggggtggggggaaatgggtttttccaacatcgaaccggtccattgtttttttggctatgggggggtttggaacccccctttttttcctctttaagggcctcgttttttaaattaaaccctccctctttgcgcgaggaagaaaagagtccccacatggggcgcggggcgagatttaaagatacacacccttttgggggggtggctttttgttgtttaaaaggagcatacccttgtaattgaagggggcgccatctgctctttaggcggggggggggggtatatatgagggagcccagctaagtcctgggtgtggggtaaccacggacgcgtcgtaatatatctgtaggagcgtgtgggtgaaaagataggtgatatcctcgagtttttattt

SEQ ID NO: 666278 - DNA, 118 bp, Homo sapiens
aagctgaatcagacgggccgtgtcaatagtggaaacagagctactcctttcgtgcagagccacctctctatctgtttgggtcaagtatagtctgagtgcgacatgtagacagtggtgc

SEQ ID NO: 666279 - DNA, 631 bp, Homo sapiens
  misc_feature (139)..(139): n is a, c, g, or t
tctacaggagcttcaacaccgcatcttcatggaccagagatattggatgttccttccacagttcaaaagaccctttcgtcaccccacctggtatgacactagaaatggtattcagctatctggcacttctagtcagcanaccagtgtttgtgcacaaatgatcttttgaggacatagttttaggcggaccacaccggccacaatgggcacccccataaggcataggccaagaacataaccgccgaatgtaggtgaggaaatccaaattggtcacatacccaggggaagatgtagactatcacctgtacccacacggtccgggactcaatccaaatgcctctacaggacaagaagctctctctcagacaaccatctcatgggccccattccaggacacttctgagtacatcatttcatgtcatcctgttggcactgatgaagaacccttacagttcagggttcctggaacttctaccagtgccactctgacaggcctcaccagaggtgccacctacaacatcatagtggaggcacagaaagaccagcagaggcataaggttcgcgaagaggttgttcccgtgggcactctgtcaacgaaggcttgaaccaacctacggatgactcgtgcttt

SEQ ID NO: 666280 - DNA, 87 bp, Homo sapiens
  misc_feature (18)..(18): n is a, c, g, or t
  misc_feature (66)..(66): n is a, c, g, or t
atgattactatggttatnattatcacgactatcgtggaggctatgaagatccctactacggctatnatgatggctatgcagtaagag

SEQ ID NO: 666281 - DNA, 103 bp, Homo sapiens
ctgtggtgcatgcatgtggacgactccggaataccggaatgagatttcagagatgaacgggcatccaagaaggtgcagggtgagatcgacaacatccagaaca

SEQ ID NO: 666282 - DNA, 310 bp, Homo sapiens
  misc_feature (125)..(125): n is a, c, g, or t
tgctgctgactattatagtgtatgcggggaaacgccatatcgggggcaccgatattaggggaactagtcagttgccaaagctccgatttggatgggtattactatgaagaagattattacaaatngcatgtgcctgtgactgataaccgttgtagactgtgcgtcgttaccttagaaaggttgccgtggctggcccagcttcggctcgaactaaggaggcttagagctgtgcttaggactccagctcatgcgccgaataataggtatagtgtcccaatgtcttggtggtgtgtagagaatagtcaacggt

SEQ ID NO: 666283 - DNA, 842 bp, Homo sapiens
  misc_feature (294)..(294): n is a, c, g, or t
  misc_feature (529)..(529): n is a, c, g, or t
  misc_feature (544)..(544): n is a, c, g, or t
ctggaataagcagaattgcagatggattcaatggaattttctctgatcattgttacagtgtctgttctatgagacagccagatttaaaatattttgacaacaaagatgatgattctgataccgagacgtcaaatgacttgccaaaatttgcagatggaatcaaggccagaaacagaaatcagaactacctggttcccagtcctgtacttagaattctagaccacactgccttttctacagaaaaatctgctgatattgtaatttgtgatgaagaggttgtgaactcaccttganattcaggtccaaccaggcaaaaccccaaagagggaaggagtcctataggaagttcaacacccgctgaagatgtccaatgctgtagaagtgcatgcgattctgaggattatgatatagagacagaaaacaattcctctgaatctccaagacaaactgatgaagaacgcagctaaacttgtaaaatcttgacaagagccaagcttgaatgtgactgccagcaaaatggcttactganactaatagcagtggnctctataaatgtgaacttgtgagtttaacagcaaatattttctgataagcagcaatatctgaagcataagtatgatcaaatgtgtgtcagtatgcagagagttctctacatatgctctgataacatgcaaatgatgagaggatccctacattgtatacggatatagacagatttttggacctcgcaacaatgcagaaccatttatgataccttatgggtgacgcgtgagtcagtctctcaacagtaatctactattcagaccagggatgaaagatgggtctcggactgactagccagg

SEQ ID NO: 666284 - DNA, 176 bp, Homo sapiens
ggcagagccaataccctagagattttctgtaatattggtaatttggatgaaggaagctagaagaattccagggatgttttttatccccctatgggctcagtttcctggaaaaggatctgtcccctcctggtccttggtggatgtttaacccctattcctttcaactgctgcctggt

SEQ ID NO: 666285 - DNA, 741 bp, Homo sapiens
  misc_feature (615)..(615): n is a, c, g, or t
gcggagaggatcgtggtactgctatggcggaatcatcggaatccttcaccatggcatccagcccggcccagcgtcggcgaggcaatgatcctctcacctccagccctggccgaagctcccggcgtactgatgccctcacctccagccctggccgtgaccttccaccatttgaggatgagtccgaggggctcctaggcacagaggggcccctggaggaagaagaggatggagaggagctcattggagatggcatggaaagggactaccgcgccatcccagagctggacgcctatgaggccgagggactggctctggatgatgaggacgtagaggagctgacggccagtcagagggaggcagcagagcggggccatgcggcagcgtgacctgggaggctggccggggcctggggccgcatgcgccgtgggctcctgtatgacagcgatgaggaggacgaggagcgccctgaccgacaaggcgccgccaggtggaagcgggccacggaggacggcgaggaggaccgaggacgatgatacgagagcatcgagaaccctggaggatctcagaaagtgccacttctgtgcgcgagttgggtgagcatggcgggcccccggntggagatccaaccacgcgcttatcgagaacttcctgcgcactcaggtcgcacagaccatgggcaccaccgtccttccacaggagcgcattcaggacgtttgccaagaagaaccgtgagaaccttgg

SEQ ID NO: 666286 - DNA, 302 bp, Homo sapiens
agcctgggcaacagagttagactctgtctctaaaaaataaataaatatgtaatataaaaaacaaatgaagttaattttgataatgtacttttctcaatatatcaaaagtattacctgcacagcaaaagaaataatcaacagagcaaacaaacaacctacaaaatgggagaaaatatttgcaaattattcatctgacaaaggactaatatccagagactataaggaactcaaacaactcaacgacaaaaacaaataacctccttaaaaagtaggcaaagaacacaaacaaacatttctcaaaa

SEQ ID NO: 666287 - DNA, 103 bp, Homo sapiens
ctggtgtggagtgaagtcatcctcatcatctgagagccttcaaacaggaagccacctggcatatcccggtatgagctggagggcatgctccagggaagaggag

SEQ ID NO: 666288 - DNA, 572 bp, Homo sapiens
ccctcatgacttctgggtcacctcaagcacatcagcaaggcagggttgggctgacagcaaacctagggggtgtggctgtgagctttgggaatatgtcatagatctggtccttgaatccagggcttaacatttcgtcagcttcatccagtacaaccatctgggtgtatgggggggctagagaagaaaaaaaaagccaatatcatagcatatgaggagggaacggtgggagagatcatatccaacttcgctgataaaaaacagagaggagccaagtagtcggctctcagagtacaaagacggatccttggcccaggaacttccggccaggcagcggggcatgtctcagtcccacattgggcagagaagtcagtcaagaggttctacaggggcgggggtccaccttatactcctagaaacacaaaacggcccccaaccccgttttctgggagcaggaagtcacacccataggctatgcacaggcgcacactcaggggggctaggcacgcgtggctcttgtgtggccttaagtgaaatttctgtggtgcttactcagcataacagagtcaggctgg

SEQ ID NO: 666289 - DNA, 188 bp, Homo sapiens
tttctacacagtgatttagtaataatttaacactactatagaaactgcagagcaacaggaagtggcttaatgatcctgaagggatttcttctgcatggtagctttgtgtattatcacagtcagattctattttcatgttgtgtgtaagcaagtttttttttagctgtagaaacttgaaccgggtaccg

SEQ ID NO: 666290 - DNA, 491 bp, Homo sapiens
  misc_feature (243)..(243): n is a, c, g, or t
  misc_feature (250)..(250): n is a, c, g, or t
ctaaaagccaccacttcctctctaaggagaatggccagcctctcccaaagtcacacagggaggtgatagcattgctttcgtgtaaatatgtaatgcaaaattttttaatcttcgccttaatactttattttgttattttgaatgatgagccttcggccccccttcccctttttgtccccaacttgagatgtatgaaggctttggtctccctgggagtgggtggaggcacgcagcgcttacctngtacacntgactttgagacagttgaataaaagttgcaacacaaacaaaaaaaaaaaaaaataaaaaaaaaaatttttgggggcgttggcctaagaaattttataaacatttgttgggggcgccgggccatgtaagggaaatgggcacttgtccaagaaaaccggggagctaggtggttgggtttttccaataaaaaaacggcgggggggccgggtctttctgacaatcaatggggttcggacgcccgg

SEQ ID NO: 666291 - DNA, 647 bp, Homo sapiens
  misc_feature (72)..(72): n is a, c, g, or t
  misc_feature (82)..(82): n is a, c, g, or t
  misc_feature (90)..(90): n is a, c, g, or t
  misc_feature (97)..(97): n is a, c, g, or t
ggcacgagggcatagctggggctctgcagcgcctgtgggagacgctgtgcctcccagtgcaggtctgcggantgatccctcnatcatganttggganagaattacagacaggctgaaaactgcctttccacagcaaaccagaaaggaacttacagatttcttacggaaattgaaggatgcttatggaaaatccttgtctgaactgacatttgatgaaattgtttgcaagatttcccagtttattgaccccaaaaagtctcagagtcaaggaaaatcagtgtcaaatgttaattgtgtttcacctagtcattctccatcacagcctgatgctgcccagcccccaaaaccagcctggaggccactcacttcacagggtcctgccacatgggaaggagccagtaatccagatgaggaagaggaagaagaagagccttgtgtgatctgtcatgagaatctgtctccagaaaatctttcagttttgccttgcgctcacaaattccatgctcagtgcattagaccatggttgatgcaacaggggacatgtccaacgtgcagactccacgttttgctaccagaagaattccctggtcaccccagccggcagttgcccaagatctgatacaaggtacccatgtggagattcccta

SEQ ID NO: 666292 - DNA, 1306 bp, Homo sapiens
ccggatgtgacacgacttaagtgactactctactcggttattcctgtagtctccttaccgcaattgttgtttacgcgaacactgctgcttttctggtacagctgttccctcctcgtctggtgtgtagcgaccccgccgtagaattctggtctctctgctgttgaaagtaacgcctgtcgatgagcgtaaggctctttcatacatctgccttttatgctccgtaattgtaggaaatgctgtcgccaatagggttttactaggtgtggttatataccccataatggatgttcccccttttggtaatgtgtatggtgagagtacagtgaacaactggaaatgcataacctggcctgttacgggatgcatacgggcgtttcagcatcctagacttgggatctattctgttgttgccaggaaacacagaccttctgccacattgatctgatcccctggtttccattcgcggcgcatcaccttgtcagaattgtaactgccaccatattcatccactcaaatcagcagtgcaaggtaattctaggaagtcaggaagcattaacccagacctgtgtacaacatttgtcaccgtgtacataaattcttgcctccactcaggtgattcgtgaacagctctcagactggcactaagctgtcgagcaatccatctggtgatagtgactcctacgatgttagaatctgcatgatctaagctcctgttacagaaggatatgaaagagttaacgaatgcagattcatggaaaagtttaggctatccagtggaaccatgcaggtagtaatgaaatcctcagatgagctcttcatcctcatttagttaagcagccatagattaaggaagtaaaagctcggacatcaggaactcatacggaagcatttggaacattaatactaaggaactaaaagcatctcaagaatatcagagggatcttgggaatggacttgactgtagaatcgttattctcaaataataatacaaaacaagtgctctggagaagagcagaaagtacatcagcagtcatcagaagctcaagataaatccgaactctggcgtgtcaaaggccgtgagtttagcaaggcagcaaggaacaagagaggaggagtgagagaagcgaatggtgggtaccagttagatatcgagccctttaaagtgattattatgacaatgtatgaaaacaaccttggattaaaactcagttctttaaattaaccagtcgacattaaaatgaatggtaaaagatctaaatgcatatggtaaatgactgctttcagattacaagataccaattactcc

SEQ ID NO: 666293 - DNA, 130 bp, Homo sapiens
  misc_feature (18)..(18): n is a, c, g, or t
gtctagaggatccctgtncgggctaagaatattttattgtggacctggagtctttgagagctgctagaagacaaccatggtagtaattccttctttccagcatagttccacaggtctgaaggaacccacg

SEQ ID NO: 666294 - DNA, 119 bp, Homo sapiens
actagaggatcccctctgttaactcagcagctttagggattgctagtggcaaaggcaaggcctctacaggtacccacaccatgcaaattgcatcctggggctcaactggggtaccgaga

SEQ ID NO: 666295 - DNA, 612 bp, Homo sapiens
cgtggtggctcacaccttctatcccagcattttgggaggttgaggcggatggagcacttgaggccagtagttggagaccagcctggccaatgtggtgaaaccccatttcttctaaatatacaaaaaatgttgctgagcgtggtgtcctgcctgtgtagccccagctacttgacgtcctgaggcaagaggctagctgaacctgggaggtcaaggttgctgaacctgagatgatagcgagccaaggcagtgtcaccgatcctaagcgtgtggaacaaagtgagaacttgtctcaagacttcatcaagtttatacatgcggacgtaattggagcttacttggtcaatgtgctctattgtgagtcgctattcagatcaataggccgtcttataacatcatattatctcggaaaaactctggcttaacctaacttaaattgtcttagagaacattcacttttctgcatgttgcgtaatttcgaaaaggtcggcaccgattgcctttaccacaagttgcgtatccttatggccaaaggtaatattaaagcggacatatatggttctggtctatattcattgttcacacttatttttatcctcttgtctgctcgcctcc

SEQ ID NO: 666296 - DNA, 1555 bp, Homo sapiens
  misc_feature (456)..(456): n is a, c, g, or t
gagcggagtaccagcgacttacatccatcagatgcttctgatgacagtccggtggtttgccttcgtgcgcttcaccaccggggatgccatgagcaaagaaggatccaatgcttgtgcccatcaatccacggtggcatcgagttgatgatacggttcagcgggtcttgcttgactgcgtccaaaaaccgtgtgactggatcaaggatcgcctggatgtaatggaggtctggtactgacactttcgcctaagggacgatttcgtagactcgagatgactctggcaagcgagcttgggtagagaacgattttcattctaaagtatgtcgagctgtgaactgataggcgagtggaggaggaccaaatgtgaacggacaggccccacgatcgggagtgaacccccaaggcaccctcgcactaaaacgcatctctcctattgaccgaaaatgcaatacttgnccctagcatccctccattggggcggattgaagggtacaccgtcggtgcacttctgggctttcacataaggaaccctaacccatggtctcgacccaaggggaatggaaaagtatgaatatgtccctatgggaaagcacgtggcgtatgcagcaccgcagattctataagaacatcgatggttgcccaaccggatctcgcccatctggttttctcggtgcttttacccaccttaataagaaaagactttttggggcgagttggttccgctaaatgcattacatattagacacagcattcactttgctaaagtccgagactataatctattttcgagataccattgccttatttgaatctacatttggggctatacaccctcccaatcctcaattccaattggagtccctataagaggccacacaaaagggtccccataaagaaatgaccttgcgcgccaacgggttactcctttggacgctgagagggaatgccgagtgataacccggaagtgtggctccgtctccttggcggagctggtggcaccgcgtgtatatccgcgggcccatttttgtcacctttgtgcccaggcagagaacacatgtggtcttctgggctctgggcgtagctaggcaactttgttgtgggaccctacaccgtgtgggcgttttcccagaaaacgcccgggggagctctatggtttgcgcacgtgttctctcgtgtgcacaccatgtgcgccccgggggtgcccttgttgtgcccacacgtcttgtgggctcaccttgggtgggcaagaaacaggtattagtccgagggcgccctccagctgcctcgataaaaagagcaacgggtgacgacgaaccaatatgtggaccgcaacacacctggtgttagcccgacggacacgtatattcaaaggtgacacgaggatatcaaccataacaactcatatagctcaagatcgctacgtagagaaagtgtcgggcgaccgaacagaacgcagacagtaatcagttgaagtcagagcatcgtaagctgaagagcatcaccactgtacgtacgtagtatatacacaattagttcggtttgttcttggagtagc

SEQ ID NO: 666297 - DNA, 167 bp, Homo sapiens
gtattacgggcattgaactggctgtggctataagattgccagcatcaccgacgtgacgccaatccgatggggctcatcaggcttggtagaagccaatgatgcagaatctcctgcattccagtggacctgggcacaggcttcaatattgtgttggatcatagggaccc

SEQ ID NO: 666298 - DNA, 236 bp, Homo sapiens
tggactcatttggcattcggggtggagtcccagtctatcaaacttcccaccacaagacctaacatctccagtgatctgagccaatcctatagaaggctgatcccctaaacgtctgatggatgcgtctccaatccaattacaatcatgcctctcagaaatgtaccagatagtcagaatcacactctctgcatatactgtgcttccatccaccaaacaaaccccactgacacggacat

SEQ ID NO: 666299 - DNA, 922 bp, Homo sapiens
  misc_feature (426)..(426): n is a, c, g, or t
  misc_feature (464)..(464): n is a, c, g, or t
  misc_feature (807)..(807): n is a, c, g, or t
  misc_feature (831)..(831): n is a, c, g, or t
agtctcaagaaaggggcatgagggcaccctcgtgcaagggaaagtctcatttcttgtcttcaggggtggttacacaacctgtatacaattgtcaaacctcatgacctgaacacttaagatctatatattttattctgttaattatatctcaatttttttaaaaagccaaccaatctaccttcccctgctaaaatgattacacactgatgaataatccaagatggaaacctagaggatgtgagaagatgttgtaagtgagatttcttgggagaaggtgatagctgcctccaatgtgcacaaatacgtctgtgctataagaatccctagaaagaatgttacagagagtgacctcgagtcaacacctactaaggaaatggaaatggaaagtactgtatatttccacttctgtgccagcagatctagggncatcaccggagaggccttttagagtgactagattttgntgaggtgggggagagatggggacaggctttgctagcagtaaatatggcgaccctcatgcctcatccagtggagaaggtggtacatggagatccttcctggggtatttgaggtgttcttcagcttgggagtcaaacgatggatgaaagatcagttggtaagtgtatgctgaaggtggagctgaggtggaagcatcatcaagtcagggatgctggattcgttttaggtgtcagaattgttcttgtgcattgtttcttgaggccagggatgttgggtcctgcctcagataggagatgaagttcatgtgtcaggctcctaatggagaaggataaatcctttatgttnacaattataagaaagtattgagancccaggaggcagagcttgcagtgagccgagatcacgccactgcactctagcctgggcaacagagtgagactctgtctcaggaaaaaaacgg

SEQ ID NO: 666300 - DNA, 203 bp, Homo sapiens
  misc_feature (23)..(23): n is a, c, g, or t
  misc_feature (52)..(52): n is a, c, g, or t
  misc_feature (59)..(59): n is a, c, g, or t
  misc_feature (63)..(63): n is a, c, g, or t
  misc_feature (80)..(80): n is a, c, g, or t
  misc_feature (94)..(94): n is a, c, g, or t
  misc_feature (96)..(96): n is a, c, g, or t
  misc_feature (100)..(100): n is a, c, g, or t
  misc_feature (129)..(129): n is a, c, g, or t
  misc_feature (131)..(131): n is a, c, g, or t
  misc_feature (139)..(139): n is a, c, g, or t
cctaggcaacagagcaagatccngtcaaaaaaaaaaaaaaccgggaaaattntctcggnagcnggtaagagtagttattngggttgtagatttncngtcnggaattagagaaagaagggtcatattttncnttatttcncgtatctaactctaagccggcttttttctcttctcacggattagtaggctctttagtttaacat

SEQ ID NO: 666301 - DNA, 371 bp, Homo sapiens
tatatctcgatcgttatacatgaagacgcatgatgcgtatgtccactgcagcactattcacaattggcaagacagggaatcaacctagatgcccatcaataatagactggataaagaaaatgtggtacacatatgccacagaatactatgcaggccaaaaaatgagatcatgtcctctggcagaaccttgtttttggtggggggccattatcctaagtaaactaaggcagaaacagaaaaccaaataccacatattctcatttataagtggaagctaaacactgagtacacatggacacaaagaagggaacaatagatgccacagcataacttaagagtggaaggaaggaagagggagaggatcaaaaaac

SEQ ID NO: 666302 - DNA, 831 bp, Homo sapiens
  misc_feature (426)..(426): n is a, c, g, or t
  misc_feature (464)..(464): n is a, c, g, or t
agtctcaagaaaggggcatgagggcaccctcgtgcaagggaaagtctcatttcttgtcttcaggggtggttacacaacctgtatacaattgtcaaacctcatgacctgaacacttaagatctatatattttattctgttaattatatctcaatttttttaaaaagccaaccaatctaccttcccctgctaaaatgattacacactgatgaataatccaagatggaaacctagaggatgtgagaagatgttgtaagtgagatttcttgggagaaggtgatagctgcctccaatgtgcacaaatacgtctgtgctataagaatccctagaaagaatgttacagagagtgacctcgagtcaacacctactaaggaaatggaaatggaaagtactgtatatttccacttctgtgccagcagatctagggncatcaccggagaggccttttagagtgactagattttgntgaggtgggggagagatggggacaggctttgctagcagtaaatatggcgaccctcatgcctcatccagtggagaaggtggtacatggagatccttcctggggtatttgaggtgttcttcagcttgggagtcaaacgatggatgaaagatcagttggtaagtgtatgctgaaggtggagctgaggtggaagcatcatcaagtcagggatgctggattcgttttaggtgtcagaattgttcttgtgcattgtttcttgaggccagggatgttgggtcctgcctcagataggagatgaagttcatgtgtcaggctcctagggtctgcgggccggtgctgtaggctggagtcttagcatgatgggggcggg

SEQ ID NO: 666303 - DNA, 420 bp, Homo sapiens
  misc_feature (129)..(129): n is a, c, g, or t
  misc_feature (140)..(140): n is a, c, g, or t
  misc_feature (145)..(145): n is a, c, g, or t
  misc_feature (159)..(159): n is a, c, g, or t
  misc_feature (244)..(244): n is a, c, g, or t
  misc_feature (297)..(297): n is a, c, g, or t
  misc_feature (323)..(323): n is a, c, g, or t
tgagacagagtctcactctgtcacccaggctgaagtgcagtggcctaatcttggctcactgcaagctccgcctcctgggttcacactattctcctgcctcagcctcccgagtagctgggaccacaggcncctgccaccangcccngctaatttttgtanttttagtagagacagggtttcaccatgttgcccaggctggtttcgaactcctgacctcaggtgatccacccgcctcggcctcccnaagtgctgggattacaggcttgagccccgcgcccagccatcaaaatgcttttnatttctgcatatgttgaatacttttnacaatttaaaaaaatgatctgttttgaaggcaaaattgcaaatcttgaaattaagaaggcaaaaatgtaaaggagtcaaactataaatcaagtattt

SEQ ID NO: 666304 - DNA, 254 bp, Homo sapiens
ctgcactgttgttgctgttgctgctgtaagggcatgggacccaggatagggtgctcgtgatagaaagcttgggagcctcctaccagttgcctggaaggaatatacagtagtcagtaggatgaaatcagatgacacaggacgcagacccatggggcttacgggcacgtgacggaccggactacgacacttacctggcagtgacggggacgacacaaggcacatgacggacacgacacgacgaccagtgactacct

SEQ ID NO: 666305 - DNA, 238 bp, Homo sapiens
cctaagtgcctgtgacggatgactagataaataaaatgtggtgcgcacacacacacacactctgcaataccattcagccataagaagaatgaaattatgccattcgcagcaacatggatggaaccagaggccattattttaagtgaaataagccaggcacaaaaagtcatgtctcatgttctcacatgtgggagctaaaaaatgtgaacacatggaggtaaacagtggaaaaatagat

SEQ ID NO: 666306 - DNA, 739 bp, Homo sapiens
ctcttggcagcgtgtagaagaaggaagtgtaggcggggtaagggaatgcaccgtcaggggtctctcacaacccttatcccagactctcctccccaacaatacagtacctggagatggagccctagggtaatcgcaaatcacggggatggcgtccgaaggctgaccaggcatatcagtgggacacacacgtatctgagccattaatgccgcgactcattccgactaacgttaagcggaatagaggctcaccaagccgtaacggggcgttcaggcccaggggaagactaggctccttatgacttcctgccttccaggcctcagattcatcgctagcccccgaggctaagcgccatgcctcatagttgacaacgatgtgaaactgggacttcacaggatgtcgcttcttgaggcccagatacgcagataccgcttaagtctcgtaagtgaggtggatcgtcagctagagatccttttacattctcggaactcaaagcagacatacgtctgtgggtaccctagtcagttgctgccagatatggatactggtgggcacctttgagatggcccaggttctctggaagtactctctcttcactgtcggtccataagcactatagcctcgttcagtggcgagagtttgctggccagaatcctgactgtcttgagcatctggctgcagctcaggcacaggctcttctgacttgagcagctggaacagatctggaactatgcccaggta

SEQ ID NO: 666307 - DNA, 977 bp, Homo sapiens
  misc_feature (893)..(893): n is a, c, g, or t
  misc_feature (897)..(897): n is a, c, g, or t
  misc_feature (907)..(908): n is a, c, g, or t
  misc_feature (917)..(917): n is a, c, g, or t
  misc_feature (932)..(932): n is a, c, g, or t
  misc_feature (938)..(938): n is a, c, g, or t
  misc_feature (941)..(941): n is a, c, g, or t
  misc_feature (946)..(946): n is a, c, g, or t
  misc_feature (960)..(960): n is a, c, g, or t
  misc_feature (965)..(965): n is a, c, g, or t
gtgggggacgtgttctgggcacgaggggggggggaagaggaaccctagtgggcgatgactctcttgatcctctccgcctctcgagataagaccatcatcatgtggaaactgaccagggatgagaccaactatggaattccacagcgtgctctgcggggtcactcccactttgttagtgatgtggttatctcctcagatggccagtttgccctctcaggctcctgggatggaaccctgcgcctctgggatctcacaacgggcaccaccacgaggcgatttgtgggccataccaaggatgtgctgagtgtggccttctcctctgacaaccggcagattgtctctggatctcgagataaaaccatcaagctatggaataccctgggtgtgtgcaaatacactgtccaggatgagagccactcagagtgggtgtcttgtgtccgcttctcgcccaacagcagcaaccctatcatcgtctcctgtggctgggacaagctggtcaaggtatggaacctggctaactgcaagctgaagaccaaccacattggccacacaggctatctgaacacggtgactgtctctccagatggatccctctgtgcttctggaggcaaggatggccaggccatgttatgggatctcaacgaaaggcaaaacacctttacacgctagatggtggggacatcatcaacgccctgtgcttcagccctaaccgctactggctgtgtgctgccacaggccccagcatcaagatctgggatttacgagggaacagatcattgtacgactgaactgaatgcactgacgttatcagtgaccagcagcgaggcagatcggacccagtgcgactccctggcctggtctgctgatggtcagactctggttgctggctacangganaagctggtgnngagtgtggnaggtgaccattgggnacacgntanaagtntatggcaagaggtntacanagtagaaaaaca

SEQ ID NO: 666308 - DNA, 200 bp, Homo sapiens
tcaatgtggaatcaacattttgagcccggtgctgacatattcccatgtattacaggccctcgtgtactagtccactggtctttcttccacaaattcatatacagggctcaggaattttgttcccgctctggagtttacttcgggaagttttagtaaaccgtctatcctttggcccgtttgtttaaaagccccttgaggta

SEQ ID NO: 666309 - DNA, 457 bp, Homo sapiens
ggggggggctttctctctctctttcactgcaaggcggcggcaggagaggttgtggtgctagtttctctaagccatccagtgccatcctcgtcgctgcagcgacacacgctctcgccgccgccatgactgagcagatgacccttcgtggcaccctcaagggccacaacggctgggtaacccagatcgctactaccccgcagttcccggacatgatcctctccgcctctcgagataagaccatcatcatgtggaaactgaccagggatgagaccaactatggaattccacagcgtgctctgcggggtcactcccactttgttagcgatgagcctatcccctcagatgggcagtttgccctatcaggctattgcgatggaacagtgcgtgtatgcgatctgcacgcatactagtactcgttgagttagtgcctatactacgccgcccttagcccaccccc

SEQ ID NO: 666310 - DNA, 1346 bp, Homo sapiens
cctctcttactccattcacacgtttgcactaccccccacccagccccccaatcaagctgctgtatgtcaaagtaccccagatatattcatagttgctaacatccaaacggtcatacctatagcccttgataatacacttgaaccatctaagacgcgatggacacaggtgcacactaccctatactgcttgataagcatttctacacagttagccattctaggacatagtgccctactacctggatctacctatacaatatatctagttacatcggacttaatataacttggcatactacatcctatctactattatccaccatgcctactccaacgcgactacagatccttaggacctacttacttataatatacacaactacacgggcacacctatggcaggagcactcgatagatatcaaaaatcagatctatgtaggatttataacataacacatactagtcatgctaggcagactcccacaattatatcacaacctaccagacccttgcataccacattactaccaatataccaagcatataccatctcatctaccagcattaggtccacttacctagcacacgacttacacaacactccgcgactcatcgttacactcaaaacaagactacaaaaacatccatgggacctaccgcgacgatagcgcgacacatcgatggactactttccccactaaaaaacgacacatcacacttcccaacaccatacttgcacactttccacctatacgcacgccgcagagctcgacacgcgggacagaaccatacccccacaataccccttatcacatagagttccccgatcccgaagcaccacatcagaacgccaaacacaaacccacaagcaccgatcagcgcacacacacgcacacccaaaatagaccacaataggccgacgacaaggatacaaaagacataacacaaacgaacacactaaggacgaaaaacacccagtggacgcggagacacaagtacttaccgctacaaaaacacacctatagcacacacaaacacccaaaacaaacaaaaacaagtgccagcagcaacaccaccacctcctacccccctgcgcaccgccccaagcacaggaagcagacaagcgacacacccaacacaacaccaaactcacagcacccggggtaggtacacaagcaacccaaaaagccctcaaaacacaccgaaaccacgcgcgcccagcgaccacgcaccacacacgaccaactcacaaccaacgcaaaccaagacaaaaacaacgcacgcagcaggagcaacacgcaacggaaccaagcacgcaaagaaagacagaacaccgtgacgccaca

SEQ ID NO: 666311 - DNA, 1369 bp, Homo sapiens
  misc_feature (10)..(10): n is a, c, g, or t
  misc_feature (12)..(12): n is a, c, g, or t
  misc_feature (14)..(15): n is a, c, g, or t
  misc_feature (18)..(18): n is a, c, g, or t
  misc_feature (32)..(32): n is a, c, g, or t
  misc_feature (41)..(41): n is a, c, g, or t
  misc_feature (44)..(45): n is a, c, g, or t
  misc_feature (188)..(188): n is a, c, g, or t
  misc_feature (1285)..(1285): n is a, c, g, or t
  misc_feature (1289)..(1289): n is a, c, g, or t
  misc_feature (1299)..(1300): n is a, c, g, or t
  misc_feature (1309)..(1309): n is a, c, g, or t
  misc_feature (1324)..(1324): n is a, c, g, or t
  misc_feature (1330)..(1330): n is a, c, g, or t
  misc_feature (1333)..(1333): n is a, c, g, or t
  misc_feature (1338)..(1338): n is a, c, g, or t
  misc_feature (1352)..(1352): n is a, c, g, or t
  misc_feature (1357)..(1357): n is a, c, g, or t
agggacacangngnnaancggcatagcacttntttgcatantannacttgagactcataaatggtgctgggggaagggtgcagcaacgatttctcaccaaatcactacacaggacagcaaaggggtgagaaggggctgagggaggaaaagccaggaaactgagatcagcaagagggagcccagcatcnaaaaacaggagatgctgaagctgcgatgaccagcatcattttcttaagagaacattcaaggatttgtcatgatggctgggctttcactgggtgttaagtctacaaacagcaccttcaattgaaactgtcaattaaagttcttaagatttaggaagtggtggagcttggaaagttatgagattacaaaattcctgaaagtccattagaaaaaccacaggatgaaaaaaaaaaaaggccacaaagaaggcttcagaggtccctgctggcccagggacagatacctgtagtgtccagcattgcagtgaacatgatctactttcaaaggcagagggtttaaggggagggtgggtgggaatggtggaggcaaaggctctccccatccccacctcagttttaggtagggcttttaatttaacccaaagacatcgggatggaaccctgcgcctctgggatctcacaacgggcaccaccacgaggcgatttgtgggccataccaaggatgtgctgagtgtggccttctcctctgacaaccggcagattgtctctggatctcgagataaaaccatcaagctatggaataccctgggtgtgtgcaaatacactgtccaggatgagagccactcagagtgggtgtcttgtgtccgcttctcgcccaacagcagcaaccctatcatcgtctcctgtggctgggacaagctggtcaaggtatggaacctggctaactgcaagctgaagaccaaccacattggccacacaggctatctgaacacggtgactgtctctccagatggatccctctgtgcttctggaggcaaggatggccaggccatgttatgggatctcaacgaaaggcaaaacacctttacacgctagatggtggggacatcatcaacgccctgtgcttcagccctaaccgctactggctgtgtgctgccacaggccccagcatcaagatctgggatttacgagggaacagatcattgtacgactgaactgaatgcactgacgttatcagtgaccagcagcgaggcagatcggacccagtgcgactccctggcctggtctgctgatggtcagactctggttgctggctacangganaagctggtgnngagtgtggnaggtgaccattgggnacacgntanaagtntatggcaagaggtntacanagtagaaaaaca

SEQ ID NO: 666312 - DNA, 1169 bp, Homo sapiens
  misc_feature (11)..(11): n is a, c, g, or t
  misc_feature (237)..(237): n is a, c, g, or t
  misc_feature (294)..(294): n is a, c, g, or t
  misc_feature (301)..(301): n is a, c, g, or t
  misc_feature (304)..(304): n is a, c, g, or t
  misc_feature (317)..(317): n is a, c, g, or t
  misc_feature (321)..(321): n is a, c, g, or t
  misc_feature (1085)..(1085): n is a, c, g, or t
  misc_feature (1089)..(1089): n is a, c, g, or t
  misc_feature (1099)..(1100): n is a, c, g, or t
  misc_feature (1109)..(1109): n is a, c, g, or t
  misc_feature (1124)..(1124): n is a, c, g, or t
  misc_feature (1130)..(1130): n is a, c, g, or t
  misc_feature (1133)..(1133): n is a, c, g, or t
  misc_feature (1138)..(1138): n is a, c, g, or t
  misc_feature (1152)..(1152): n is a, c, g, or t
  misc_feature (1157)..(1157): n is a, c, g, or t
cggctggtacnggccggagtcttaggatcggcaggagaggttgtggtgctagtttctctaagccatccagtgccatcctcgtcgctgcagcgacacacgctctcgccgccgccatgactgagcagatgacccttcgtggcaccctcaagggccacaacggctgggtaacccagatcgctactaccccgcagttcccggacaattgatccctcttcccgcgctcttctcgagattaangacaccatctatccattgtgtggaaacacttgacaccagcggggattgacagacacncaacatnatntcggaaaattccncacnatgccgtggcgtcctatagcggggtctacatccccacactttgttagtgatgtggttatctcctcagatggccagtttgccctctcaggctcctgggatggaaccctgcgcctctgggatctcacaacgggcaccaccacgaggcgatttgtgggccataccaaggatgtgctgagtgtggccttctcctctgacaaccggcagattgtctctggatctcgagataaaaccatcaagctatggaataccctgggtgtgtgcaaatacactgtccaggatgagagccactcagagtgggtgtcttgtgtccgcttctcgcccaacagcagcaaccctatcatcgtctcctgtggctgggacaagctggtcaaggtatggaacctggctaactgcaagctgaagaccaaccacattggccacacaggctatctgaacacggtgactgtctctccagatggatccctctgtgcttctggaggcaaggatggccaggccatgttatgggatctcaacgaaaggcaaaacacctttacacgctagatggtggggacatcatcaacgccctgtgcttcagccctaaccgctactggctgtgtgctgccacaggccccagcatcaagatctgggatttacgagggaacagatcattgtacgactgaactgaatgcactgacgttatcagtgaccagcagcgaggcagatcggacccagtgcgactccctggcctggtctgctgatggtcagactctggttgctggctacangganaagctggtgnngagtgtggnaggtgaccattgggnacacgntanaagtntatggcaagaggtntacanagtagaaaaaca

SEQ ID NO: 666313 - DNA, 881 bp, Homo sapiens
  misc_feature (11)..(11): n is a, c, g, or t
cggctggtacnggccggagtcttaggatcggcaggagaggttgtggtgctagtttctctaagccatccagtgccatcctcgtcgctgcagcgacacacgctctcgccgccgccatgactgagcagatgacccttcgtggcaccctcaagggccacaacggctgggtaaccgcagcatcgccgtacctagcgcgccggcagttgtcccggtagcagtgaatccctcgtcctgccgtcatcagacgataagcaccaatcgatcactgtgcgaaatcctgagccaggggagtgagaccagatcgtatggaagttaccaccaggcgatggcgtctgcgaggggtcacttccgcatcgttctggtgtagatgactggtggattagtgcgtcactcatgcacttggtcgcaaggttcttggcgcttcctctagcgcgtcctcgtgggatttggacaccgccgtaggcgccgtcgtggcgtgatctcatcacaccggtgcgaccatctcatctgaggggcgagattttgtggcggccattgaccgaacggaattgtcgcttgagagtgtcggcacttatctccatcttgaacagagccggtgacgagtgtgtcttcctggccattctcggatggatagaaagccgagtcaacgctaatgggaatatccctcgggttgttggtgccaagatcatcgactcgtccaaggtagtgcacgagactcacctcacgaagtgtggctgctctatgctagtcgcgtcgttcatcgccgccaatcacgcagcaaacgccctagtcatcgtcctcctggttggcctggggacatacgctggctcaaggcgttgatggaacgctgggctaaaactaggaaagctggaagacccaacgca

SEQ ID NO: 666314 - DNA, 287 bp, Homo sapiens
tttgagcaagcaggggaaagggagggttaatgggaaactggttttaaatgggaaaagaaaggcaaaaatccaaaggttaatagtatctggtaaaaattccagaaccacgacacaggggctcagtctgtaatcccagcacttggggaggcttaggtaggaggatcactggaggccagaaattcaaggctaagccggggcaacagagcaatatccggtctctggcaaaacaattaaaaaattagccaggcagggtggacatgtaccactaaattccagctggctcagag

SEQ ID NO: 666315 - DNA, 268 bp, Homo sapiens
tatgttcctagctgggaacagggctcacacctgtaatcccagcactttgggaggccgaggcgggtggatcacctggggttaggagtttaacgccagcctggacaacatagtgaaatcccgtctctacaaaaatacaaaaattagctgggcgtgatggatgggtgcctgcaatcccagctatttagggagactgatggtgggagaatagcttcgaacccagggaggaacgaggttgcagtcgagctgagatcacgcctattgcactaca

SEQ ID NO: 666316 - DNA, 370 bp, Homo sapiens
gcggtctacagggtcatacttatgcaggacatctgatatctcccccttaccacgtacagatctctccacagctgccagcagccctaaccttcgcgtctctccaccagctcagagtcctgtccccaccagcccccatccagggcaggagggacctttccaggtcctgggctcgccaccaccatccatgcttggatgccccacagcccactctgttctccaaagggtccctgcgggggcctggcctctccagaaaggtgtcagatggggagcgcccagggcccacgcacacagggtcactgagctacctgggtacctctccctgggaggagagccctagggactgctcagtccatcccactgctcctcgggt

SEQ ID NO: 666317 - DNA, 334 bp, Homo sapiens
gcttgcccttacagattgccaaatcaaactattatcaaatacagcctttttccaggcacctagttctcagactcttacctgctgagaatgaagtcttgacaatcaagatgactgctattatatcaattctgttcatgagaatcagactttatacctagcacaattcactattgtgtgggcgaggacatttaaagggcatatagaagtaaggagtgcaaaaatcagctagggttaacatctaagtgcctgttaatacaaaactagtccacacttaaagggcctatggttccagagaggtaggaaacattgagcctatgtgttacatcctcatccc

SEQ ID NO: 666318 - DNA, 406 bp, Homo sapiens
acagtgttatatgggcaacttcatagttgacctggtcttctattttggtcatccagcaatcaccaggtcgagtatgttagtcccctctgcctatatatcttcccacatattttgatacatacacgagtgtgctcaaacagctgctcataggtagctcgtctggtttcggaggtctaagatttgactctccttgcaaagtaatctttagttaattcattatgcagaagctatgcgggtcagtccttgtcatattacggttggttataatttttgttcttatgctaaaggtacgatatcaacagccacaggtttctattgctattgtatagactgcctcttagaaaatcatatgtctaagtttgtctggcagtaaggtcgcgtggatttgggctcgtgccgaattcct

SEQ ID NO: 666319 - DNA, 180 bp, Homo sapiens
tgaggaccagtctgttggggtccgaaaggaagattgccccgtgtagacacagctgcaccccagctgcagaccgtgggggaggctgggcacggaccggaaacactcgcatcgggacaggaccggttccgctccgggaagcagtgggcggctgtcagcacccagtccccggagagcagggat

SEQ ID NO: 666320 - DNA, 223 bp, Homo sapiens
agatggacaccctgacccttactgtgactcagctgggcctttggagagcatggggagaggccaggagcagacttatgctctgtttgggggccaatcgcagcacaggctcttcctctgcacataaggttccctctgtctaaaatactcttctcccatcttttgggctgactcctactgatcttccgtgtcactctgcagcttctcccaggaagccctcctggat

SEQ ID NO: 666321 - DNA, 444 bp, Homo sapiens
  misc_feature (8)..(8): n is a, c, g, or t
  misc_feature (26)..(26): n is a, c, g, or t
  misc_feature (154)..(154): n is a, c, g, or t
  misc_feature (173)..(173): n is a, c, g, or t
  misc_feature (190)..(190): n is a, c, g, or t
  misc_feature (192)..(192): n is a, c, g, or t
aacatagnatggatggtttcaagaanctcagtccgcctggtgttttggggagcctgttttcctatgtaatcctttaggggttgtctaaagtcttttattatggaaggttttatatccagagtagtcaattaggatataaactttccacacttcngtcgtgacgataaagccangaaggacaaccttgaancngtaacgttggtcattcaatatttgtacctgttttaaatctgttagtgtatttacttcattgtaaatatttttgagggtacctttgtattttgcttttgaccttggttctgtgatttggatgtcaacaacttccctaaaaagcaccagtgtgttaggttctaatgtcatgacccaatttgtgttattcatctttaatcctgttttcagtctctatgtgtacagcagtatttttaataaagaattacagagatg

SEQ ID NO: 666322 - DNA, 909 bp, Homo sapiens
tgattctgtctgtcttccttttgaaactccccagactgggtatatcgcgttctattgtcctctcccctgagaccgcattgctcctgtgtgtaactaatcaatatcggccgatgtcccctgctatattttaaaaaaccaccatgttggccaccaatttcttaacctcccagaggccgccaccaatgtgactatgtaccaaacacatcatttttttcgcgtcccgtcacccctctaatgactcatcagaattacctcggtcctaaggtcgttccccgcccatgtcattatttttctccaccgaaactccctcttctccaagcataaacactattggtggggcccccccaacaaatgagacacaccctgtcaataataacagtccgcgcaccccttggtcgcccacaggacgggggctgtcgtttattgcgccctttacgaaacagtgtatggtggtcataacaaggacgccactcgctgataagattttctggggttgctgcaagcaggggagaaaccacgctcttggtgagaagtcgtgaacccacatgggtggtaatatattctcggcggtgactcgcacctgaggactgttgcaggtttgcaccgttcttttcgacggagaattctgcggctagatatctttctacgaggcgtgtatattagagcggcgttaccgccaccttcatgctttgtgacaccaattgccagtgtctcaccatattcaaagtgcggggtgctctccctcatgaacttttcactctccccggggcttcatttaacacaactgaaagatcccctgggcgtatcatttatcgacaatccttcagcatccgccatagaatcggacgcctggttttatgacagttttgtgggcccgacggaaaaatctacattcccgcccacaaaaca

SEQ ID NO: 666323 - DNA, 872 bp, Homo sapiens
ggctgtgatcgcggcctcacgcgtgtgaatcctggcgcacaggacgtgtatcagcgcggggaggatactttgatacctgaattggtaagctgcctgatgaatattgcgagagccatgctctggaccccgtgagtgccccagacacatatgtttacggttgtgaactaaaggccagacaaagattatcagtctctaaggtggataatgatgacaatgagcaccagttatcgttcgaagaacggcagtttaggggcaggttgccgacagggatgagttcgcacatggttggacggcagaggccatgagattacgaaggtgccagtccaaatataaagtaacggtggaaacagttgtgaacagttgtctgaacaagccagaaggttttccctgggggggcttcgaggagtaacaccacacagggtggtcttaaggttgacagtgtggaatcaaggggccacgtgcattgtgagtggaacagcacttagtagctgtggaggatagatgcagagtcagaagatgacgaggaggaggatgtgaaactcttaagtaatatctggaagccggtcctgcccctggaggtggtagcaaggttccacggaaaaccagtaccacttggtgctgatgaatcatgatgacgatcatgatgacagaggactatgatgacgatgatgatgatgaccgatcgatgatgcggacgctgagacaagcgcccggcagaactcatatcgagatacccagccaacaggcccaaggtcaattacatgaacgatcaacctcctcaccagatcagggcagaacttcaaacgaacacctaaaccaaaggcatttgcaacataaggacatcgataaaagtgttcagggcaacacttgca

SEQ ID NO: 666324 - DNA, 484 bp, Homo sapiens
ataaaatttaaggaacgaagctaagtccataacataaaagtgcaaggtaaagcagcaagtgctgacgtagaagctgcagcaagttctccagaagatctagctaagataattcattgaagaaggtggtgctatagtttgaatgtttatccttctaaaccttttgttgaaatttgttccccagcgttggaggtgggacctaacaggaggtgtttgagtcatgggggcagatcccttaagaaggacttggtgccgtccttgtggaaatgagtgagttcttgttctgttggtttctgtgagcatctggcacctcccctctctcctgctttccctcttgacatatgatctctacacaccagctcccctttgttttctgccatgaggggaggcttcctgagctcttcattagaagcagatgttggcaacacattcttgtgcagcctgcagaaccatgagccaaataaacctcttttctttaaaaatagaa

SEQ ID NO: 666325 - DNA, 319 bp, Homo sapiens
tcctgggtacacaacctagggtcagttctgcaggtggtaaaccatttaccaagatagttgtaggtaagaagggcagatttattagagaaattgtgaaaatatgttgcagtgggcagctcagcagagaaggggctacctgcaaagaggcaagggctggaggaaagttttatagggtcctgctgaagggtgctacgtgtggaatgaggtcattgtgcccgcaggttgtttgtgattagctgtctctaacaattgttcatacaataattgttcattattgttctcaacttggggctctccccaacctggggacccttcctta

SEQ ID NO: 666326 - DNA, 1424 bp, Homo sapiens
  misc_feature (272)..(272): n is a, c, g, or t
  misc_feature (274)..(276): n is a, c, g, or t
  misc_feature (1168)..(1168): n is a, c, g, or t
  misc_feature (1175)..(1177): n is a, c, g, or t
gaattcggcacgagggtgggtggggagtagggagaggctgactaatcctttaacgatagaattacttgatgtctacatctgtactatgccaatcagctgttggacaaggtaacaagcaaggaagtggccaaggacaccatgtgttcccaaagcatcggggttcagcggtaatgtttttgaatcttctcgggtgtaagtaaatatatttcagacagcttttagaatgaagttagctagaagaattttgcagcaatagaagctggttttggttngnnnagacttcaggttctatctatttattggtgctgctcagttggatgggaaagagaggagaagctgagagacgcctggcacctgtacagagtgaaacaggcaatgctgtgtaacgagcagttgacagcaatgaataagggttgcagaaatggcaaaagagggcaccaaattaaccaaagcctagggaagatgacgaagccagagtattcattaagggaccagatgaactagcatttattgagcaccttctgtttgccagggcatataagaacatactgtgatgaggcaccatgaaatacgacctttgaacagaaactgggtaaaaaacaaaagtaggcttcctcctcctcctaacagcatctagtgcagccacattagatggggagagccagaactaggcaagttattccactccctgatctcagctgcctcggttgccatctctgcacctgcagggtgaacacaccccaatagcggtaacgtaagcatacccttagaatgatcctgtgtgggagatgcacctgaatgtgtggtccgggctggggaatccaggagtgaccaacccagagatttgtccctaatatataacagacatctgtgccccatgcctgtcccgtggaacacaggccaaacaggggattgaggtcctgagtttggagttaaatgaagattgccaggtagaggttgttagggggagggtgttaagtgaaggtgtgatataaaccacatgacatttgcaggtggttatggttttcctgcccagcccaccgccaccactggactgtagggaggtggatatcctgtccagcctactgccactggaccatttctgtatgtaaggtgggcagttgtactatccagcccgccatcactggactctctcccttatatgaancccctcnnnataaaacccccatgtctatctgttggctctgagtgtcttcttcagctcttgaacctggtgcctttcctattgaggttaataggggttcagcatgacagcacctccacctcccatggcacagcatatgtacccaataagcagtccttacaataccaatagtttctatctgttggcactgccaattagccaggcatgtcaaatggaagatctcacttaatcttgccaaaaaaaaaaaatgagcggccgc

SEQ ID NO: 666327 - DNA, 108 bp, Homo sapiens
tcagatcaccaaaatatagactaatgtatggacgcccatggcacagtctagtccacacatacatttaaccgttacatcattcctgagctcagagtgttgccataccaa

SEQ ID NO: 666328 - DNA, 641 bp, Homo sapiens
ctcaagcactaataccagcagagcagtctggtggggtagggccgatcccctcttataccttgatagtggttaacactaggttttactgttcgtctccccagtctgcctacaagcatgcaggcaggaagatcggacgcgagagtccgaggaggctcacgccggatagcagtgagccagtcacaaacgcgagagctcccgccgtgggacgcacgcttagctatgcggagagtggtgcacttggggctcgtggttccttgctacctggagggccagtaagtctcttagtgcgagactcgagacatctgtggcattgctggttactcgcaccatcatacagggattctgaggcccaaggagaacggacgaagcaagagctccttgcggggctagaaataaaagaggggtacgtacttacgcgagttcaccgcactttgcgtacctagcatgctcttccgattgtttatcccatgccctaaagtgtgcggggacatgcattgcaatgctcgaactagcttaaagcaacaaggagttcaaggcttgcaatgaaccctagggttgctcgtaatacgcaggtttactcgccggtgaaaaccacagatcgaacatggatgggtaggcagcacacgtcaggggtggcaaaa

SEQ ID NO: 666329 - DNA, 499 bp, Homo sapiens
agagagttgtagtcatctgcagaggttgaaatattggaataaaaagctatctcagatgaattattccagaagatatctgctatatactccctgtgctattccagccatcttaaaatatgaaagggcaagcccgcccttccagttcggacgcatagcattaattcccctgcagcggcaatctcttgcactcagttcttccattgatggtatccctgagttttcactataagaaactcgatttatcattggccctgtccttggccaacagtagacacgggaccaatgagctaagtctgacacaggatgaccaatggttgacagctcccaatccagcactgctatcactcgacactctttagggtggaaaactatgttatctagtctgaaatctccatgcatcaaatctcttcattgtcattatcgggcaagttcttcattagccactcccgataagctgttgcatggcagggatgttctggatgagctgcagcttgatatt

SEQ ID NO: 666330 - DNA, 107 bp, Homo sapiens
aaggcatctggatgccatcaaagtctcctgcaacctggagactggtgagacctgcgtagtagccgagtcagacccgtatgaccagaagaactggaacatcagcaaga

SEQ ID NO: 666331 - DNA, 356 bp, Homo sapiens
ccgacctaaccccacatgctcaaaatcaaatgatacatattcctgttagacccagcaataccataagaattactaaggaaaatttaaaaaaggggcctttggccccctgttttcatcctacccttttttcacttttaatggtattataaacttcatgaacttaattggggtttttttccagaatactttggggtttgttaaaatttgaggattttagggatgggtttggttcagttccagaatttttgactagttacagatttgttagcccttaaatgaaatggaatggcttatgcttaattgctggggcatatccagcttgttttgaactaataacttttaaacttgacttaacc

SEQ ID NO: 666332 - DNA, 182 bp, Homo sapiens
  misc_feature (129)..(129): n is a, c, g, or t
ggctggtccgatggtagtgggttatcagaaaaatcctgcgaagaaaaaaacttctgaggtaataataggatatcccgttcgaggcctttttggacaggtgggttggtggccattgccccatagtgcatngcgctactgcgaaccgtcacactcgaccagctgccgtccgtcactcacagtcc

SEQ ID NO: 666333 - DNA, 166 bp, Homo sapiens
catcgctgacccgttgctctctaggctggccctgtcacccctctccacaccccttccagcccagggttcccattgggcttctggcagtggccaactagccaagtctggtgtccctcatcatccccctactgaaccctcttgccactgcttctaccttgatctcgat

SEQ ID NO: 666334 - DNA, 393 bp, Homo sapiens
  misc_feature (24)..(24): n is a, c, g, or t
  misc_feature (49)..(49): n is a, c, g, or t
  misc_feature (65)..(65): n is a, c, g, or t
  misc_feature (124)..(124): n is a, c, g, or t
ggcttaggcaggaaaattcacttnaggccaggagttcaagcccagcctntgcaatatagtgaganacccccgcccccatctcatttaaagaaaaaaaagagtagaaactctctttgccgggcanagtggctcatgcctgtggtcccagcactttgggaggctgaggcgggcagattgcctgaggtgagtagttcaagaccagcctcgccaacatggtgaaaccctctctctactaaaaatgcaccacattagctgggtgtagcagcgccataatcccagctactagggaggctgcggtaggagaatcacttgaacccaggaggcagaggttgcggtgggcggagatcacgccactgcactccagcctgggagacagagcaagactccatctca

SEQ ID NO: 666335 - DNA, 157 bp, Homo sapiens
  misc_feature (154)..(154): n is a, c, g, or t
aggtattagagtctgcgagtgatggtgatggacacttcttggcatagtctctctgggagcgagcagctttacagtgcatggtggtgctgcatggacttggagcttctagtatctgctctcaaagtcaaggactcatctggctccttgggtttgngcc

SEQ ID NO: 666336 - DNA, 447 bp, Homo sapiens
  misc_feature (11)..(11): n is a, c, g, or t
  misc_feature (31)..(31): n is a, c, g, or t
  misc_feature (45)..(45): n is a, c, g, or t
  misc_feature (153)..(153): n is a, c, g, or t
  misc_feature (155)..(156): n is a, c, g, or t
  misc_feature (158)..(158): n is a, c, g, or t
  misc_feature (283)..(283): n is a, c, g, or t
  misc_feature (297)..(297): n is a, c, g, or t
  misc_feature (311)..(311): n is a, c, g, or t
  misc_feature (318)..(318): n is a, c, g, or t
  misc_feature (347)..(347): n is a, c, g, or t
  misc_feature (361)..(361): n is a, c, g, or t
ataccatttcnatttgtgatgatacgttttngcccttaaattttntttacccttccttggacccattttcttaaaagtaatggctcaaagtaatattagataacatttccccaaaaatggtgggagggtgggtgggttgctaatgggaggggntnncnctagtttaatgatgggaattggcctcataaaaggttagttcataaatgttgtttgcttttctaggaaggaatctgctatgaggcttaactgctgtcataaaatttgtttaaaaaattctgcagangttgctggccaaanaggaacctccttangacagcngcctttattctgggccactgtactccacnctactgccatgcantggggttttagctgtactgctaaaaaatcattcaattttgtgaatggcttactttggtttttttttttaaataaactttttaatta

SEQ ID NO: 666337 - DNA, 828 bp, Homo sapiens
  misc_feature (4)..(4): n is a, c, g, or t
  misc_feature (11)..(11): n is a, c, g, or t
  misc_feature (27)..(27): n is a, c, g, or t
  misc_feature (52)..(52): n is a, c, g, or t
  misc_feature (66)..(66): n is a, c, g, or t
  misc_feature (73)..(73): n is a, c, g, or t
  misc_feature (88)..(89): n is a, c, g, or t
  misc_feature (92)..(92): n is a, c, g, or t
  misc_feature (95)..(95): n is a, c, g, or t
  misc_feature (102)..(102): n is a, c, g, or t
  misc_feature (108)..(108): n is a, c, g, or t
  misc_feature (119)..(119): n is a, c, g, or t
  misc_feature (137)..(137): n is a, c, g, or t
  misc_feature (142)..(142): n is a, c, g, or t
  misc_feature (169)..(169): n is a, c, g, or t
  misc_feature (189)..(189): n is a, c, g, or t
  misc_feature (200)..(200): n is a, c, g, or t
  misc_feature (203)..(203): n is a, c, g, or t
  misc_feature (208)..(208): n is a, c, g, or t
  misc_feature (223)..(223): n is a, c, g, or t
  misc_feature (231)..(231): n is a, c, g, or t
  misc_feature (240)..(240): n is a, c, g, or t
  misc_feature (242)..(242): n is a, c, g, or t
  misc_feature (256)..(256): n is a, c, g, or t
  misc_feature (260)..(260): n is a, c, g, or t
  misc_feature (264)..(264): n is a, c, g, or t
  misc_feature (272)..(272): n is a, c, g, or t
  misc_feature (279)..(279): n is a, c, g, or t
  misc_feature (282)..(282): n is a, c, g, or t
  misc_feature (284)..(284): n is a, c, g, or t
  misc_feature (288)..(288): n is a, c, g, or t
  misc_feature (291)..(291): n is a, c, g, or t
  misc_feature (332)..(332): n is a, c, g, or t
  misc_feature (354)..(354): n is a, c, g, or t
  misc_feature (374)..(374): n is a, c, g, or t
  misc_feature (390)..(390): n is a, c, g, or t
  misc_feature (394)..(394): n is a, c, g, or t
  misc_feature (398)..(398): n is a, c, g, or t
  misc_feature (430)..(430): n is a, c, g, or t
  misc_feature (438)..(438): n is a, c, g, or t
  misc_feature (449)..(449): n is a, c, g, or t
  misc_feature (479)..(479): n is a, c, g, or t
  misc_feature (496)..(496): n is a, c, g, or t
  misc_feature (588)..(588): n is a, c, g, or t
  misc_feature (605)..(605): n is a, c, g, or t
  misc_feature (684)..(684): n is a, c, g, or t
  misc_feature (744)..(744): n is a, c, g, or t
  misc_feature (747)..(747): n is a, c, g, or t
  misc_feature (749)..(749): n is a, c, g, or t
  misc_feature (782)..(782): n is a, c, g, or t
tctnatttaanttttttaatgggtctnaaaattctgtaaaaaatttttggtnaagttgtttccatnaaaaaanactgattttaaaaannaanaanttaaaantgccanacgcaaaaaanaaaaccaaagtggtccanaaaanattctcctttccttctgaaggttttangatgcattgttataattaancagttttttantantaaanttaaatggccaattnaaaaaaanagttctganancgttcttccaccantgantaanagtggggnggcaggnatnangganaanattcatttagccttctgagctttctgggcagaattggtgancttgccagctccagcagccttnttgtccactgctttgatganacccaccgcaactgtntgtntcanatcacgaacagcaaagcgacccaaaggtgganagtctganaagctctaaanaaaaatgggcttgccaggaaccatataaanaatggcagcatcaccanaattcaagaatttagggccatcttccagctttttaccagaacggcgatcaatcttttccttcagctcagcaaacttgcatgcaatgtgagcngtgtggcaatccaatanaggggcatagccggcgcttatttggcctggatggttcaggataatcacctgagcagtgaagccagccgcttccattggngggtcatttttgctgttaccagcaacgttgccacgacgaacatccttgaaagaaacattnttnanattgaagcccacattgtccccaggaagagcttnactcaaagcttcatgggtgcatttcgacagattttacttccgttgt

SEQ ID NO: 666338 - DNA, 330 bp, Homo sapiens
gtcgacggaagggtggttcacacctgtaatccctgtacgttggaggccaaagtgcatgggtcacttaggcctgggggtttgagaccagcctgggcaacatggcaggatcctgtctctatcaaaaaaaaaaaaaaaaaaaattcagaaattagctgggcaggtggtgtgtgcctgttgtcccaggtactcaagaggctgaggtgggaggatggcttgagtccaggaggcgaaggtggcagtgagttgaaattgtgcactgtactccagcctgggtgacagagtgagaccctgtctccaaatctccaaaaaaaaaagtcgacgcggccggca

SEQ ID NO: 666339 - DNA, 344 bp, Homo sapiens
cactactcatgcaccataaataggcagcgccaccctagaaatatcaaacaataacctacccactacacttatcatcttcaaaatactaatatctacagactatcctagaaatcgctgtcgcctataatccaagacctacgtatacacacattctagataagacctctaccatgcacgacaaacaacataatgaccccaccaaatcacatgacctatcactatagttcaacccagtcccatgcaccccataacaggggaccctctcagaccctcctatagacctccggcctagccatgtgatttcacttccactccataacgctcctcatactaggcctactaac

SEQ ID NO: 666340 - DNA, 594 bp, Homo sapiens
  misc_feature (16)..(16): n is a, c, g, or t
  misc_feature (71)..(71): n is a, c, g, or t
  misc_feature (88)..(88): n is a, c, g, or t
  misc_feature (104)..(104): n is a, c, g, or t
  misc_feature (112)..(112): n is a, c, g, or t
  misc_feature (146)..(146): n is a, c, g, or t
  misc_feature (148)..(148): n is a, c, g, or t
  misc_feature (151)..(151): n is a, c, g, or t
  misc_feature (201)..(201): n is a, c, g, or t
  misc_feature (211)..(211): n is a, c, g, or t
  misc_feature (216)..(216): n is a, c, g, or t
  misc_feature (292)..(292): n is a, c, g, or t
  misc_feature (361)..(361): n is a, c, g, or t
  misc_feature (396)..(396): n is a, c, g, or t
  misc_feature (398)..(398): n is a, c, g, or t
ttttaaatattcaagnaatttcaaatttttcagtattaagaaaagttcagtttattcagagggaaaaaaanatttttaactgtcgggngatttgtaacataaanatattaangtattgggggacaaagttcaagccagtaaagaananttntggcagcatttggggagcccaaggcgggcggatcacgaggtcaggagatngagaccgtcntggcnaacaccgtgaaaccccatttttactaaaaatacacaaaattagctgggcgtggtggtgggcacctgtagtcccagntactcgggaggctgaggcaggagaatggtgtgaacctgggaggtggagcttgcagtgaaccgagatcgntccactgcactccagcctgggtgacagatccagantntgtctcaaaaaaaaaaaaaaaaaatacttctggcagagtcttttatcttcctattaaaatctcacttgttctcctttatgggaagtttgtcgacaaaattcatgattagtaaattatccattttttccttcagttagtttaatggtgaagatgattaacaggggaaatgcttgaagtaaatgattgtttcaatggc

SEQ ID NO: 666341 - DNA, 2026 bp, Homo sapiens
tgccactacttgctcttgtgaccttggacaggttacttgatctttctatgccctaatatcctcatctataaataaaggataataatagtgtctgactcaagagctcttgtgaaaattaaatgagatagaatgtgtaagggcttagaagagtgcgtggcatatagttatgtgtgatgatcacagctataaaaataagttaggaaagtaggcaaggggtgaggcagcttgtgagggagattgagctcctggtcacgtttctgtccatcccaggctgatggtgcgctcagggggcagccccctatcccccgtgatctatgattcggacatggacgatgtccccgagcggggtctcatcagtgacgcccagtccctctacgtggagctgctgtcagagacacctgccaatcccctgctgttaagccttcgatttgaagcctttgaggaggatcgctgcttcgcccccttcctggcacatggaaatgtcactaccacggaccctgagtatcgcccaggggcactggcaaccttctcgtgcctcccaggatatgccctggagccccctgggccccccaatgccatcgaatgtgtggatcccacagaaccccactggaacgacacagagccggcctgcaaagccatgtgtggaggggagctgtcggaaccagctggcgtggtcctctctcccgactggccccagagctatagcccgggccaagactgcgtgtggggcgtgcacgtccaggaagagaagcgcatcttgctccaagttgagatattgaatgtgcgggaaggggacatgctgacgctgttcgacggggacggtcccagcgcccgagtcttggcccagctgcggggacctcagccgcgccgccgccttctctcctctgggcccgacctcacactgcagtttcaggcaccgcccgggcccccaaatccaggcctgggccagggcttcgtattgcacttcaaagaggtcccgaggaacgacacgtgccccgagctgccacctccggagtggggctggagaacggcatcccacggggacctgatccggggcacggtgctcacctaccagtgcgagcctggctacgagctgctaggctccgacattctcacttgccagtgggacctgtcttggagcgccgcgccgcccgcctgccaaaagatcatgacttgtgctgaccctggcgagattgccaacgggcaccgcaccgcctcggacgccggcttccccgttggctcccacgtccagtaccgctgcctgccagggtacagcctcgagggggcagccatgctcacctgctacagccgggacacaggcacacccaagtggagcgatagggtccccaaatgcgccttgaagtacgagccgtgcctgaacccgggggttcccgagaatggctaccagacgctgtacaagcaccactaccaggcgggcgagtctctgcgcttcttctgctatgagggctttgagcttatcggcgaggtcaccatcacctgtgtgcccggccacccctcccagtggaccagccagcccccactctgcaaagttgcctatgaggagctcctggacaaccgaaaactggaagtgacccagaccacagatccatcacggcagctggaaggggggaacctggccctggccatcctgctgcctctaggcttggtcattgtcctcggcagtggcgtttacatctactacaccaagcttcagggaaagtcccttttcggcttctcgggctcccactcctacagccccatcaccgtggagtcggacttcagcaacccgctgtatgaagctggggatacgcgggagtatgaagtttccatctgaaccccaagactacagctgcaggacccaggacgcccctcccctcctcattcgggcagagggaaatacgggacccggtctctgcctcctggctgccctcctccctggctgtgtaaatagtctccctatcccacgagggggctttgatggccctggagatcctacagtaaataaaccagcatcctgccgcccaaa

SEQ ID NO: 666342 - DNA, 160 bp, Homo sapiens
atcgtgagacgtcccatctcttaaatatataaaaattactaggacaagcgcagtgtctcatgcctgtaatccgtggcacttttggaaggccgaggcaggaagattacttgagctcaggagttcaagaccagccagtacaacatagtcaaaccccatctct

SEQ ID NO: 666343 - DNA, 1138 bp, Homo sapiens
  misc_feature (291)..(291): n is a, c, g, or t
  misc_feature (523)..(523): n is a, c, g, or t
  misc_feature (797)..(797): n is a, c, g, or t
  misc_feature (1062)..(1062): n is a, c, g, or t
agcgggttaagggtcttctgagctgcagttggcgaattagcaccagaagatcccgcgagtcctgtctctaaagaggggaaagggcataggatggtgcgcaggactctctcatgtagctacctggtaagtctgacactagaccagtcacggatactttgatgcagctacagtgaagtgctcgtaggccgtgggcgttagcacactaggctaggtggtgaacactgtgacctaggatccaagcgggtgaagttatcagtgcaagaaggggaagaccaatcaggtgaggtcatntctgaggacatcatcagggacatattcataggaaacagccgcgagaattatggttatcctaggcctgcgcgagtgaaagatgatctatgagtgatagaacccagcttgtcaggtaatcgaactaagaaaaacttgctacaggtctctggtaagctataagcgcatgcggagtgggagtacacaaaactgttggttctacaattacgcacgcacataagtggggcagtgggcnatagaagcaaaacggagaaactttttagttcaacgaggcacagatctataggagacttgcgcggaaacaaaatgggatctaggttgaacccaatttaacgtcttatggggtgcgactcgatcgggatgtggcctagttctaccgtggcaccattacttgaaggaaagaggcactttagacataaatggtgtccctggggtccggggggcctctgtgcaaacgaagccctctctacaagtttttccagtacttggtatttcccctgcaaacggtnctacgaggtcgggcattattctccttaagtttacccacagcagttgggccatcgaactacatgtgtaatacctttaggaaaccgtgtgtgagttccccttatagggatatgggttgtagaccgcgtatgggaaagatataacgtggggggtggaacttttcctaaagaatgagggtttggattgaagttttccgccaaatgggcaaaatgcgtgtgaggccgcaaaagattgttgtctagagtttctgtgggacagacgagttancatgttcggatgtgtttactgtaacttaaaatttgtgtggaaaattttcaaggagggtgttatgtggtaaccctgc

SEQ ID NO: 666344 - DNA, 2687 bp, Homo sapiens
cgcccgggcaggtcggagacggaggaaaggtggcagccagattacttagagaggcacagaggagagagatcggggtgagtcgccatggggactcccagggcccagcacccgccgcctccccagctgctgttcctaattctgctgagctgtccctggatccagggtctgcccctgaaggaggaggagatattgccagagcctggaagtgagacccccacggtggcctctgaggccctggctgaactgcttcatggggccctgctgaggaggggcccagagatgggctacctgccaggatctgatccggaccccacgctagccacccctccggccggccagactctcgcagtgccctccctgccacgggccactgagccggggacagggcctctgacaacagccgtcacccctaacggggtcaggggggcaggccccactgcgccagaactgctgaccccgcccccaggaaccacagccccacccccacccagccctgcctccccagggcctccccttgggcctgagggaggagaggaggagacgacgaccaccatcatcaccacgacaactgttaccactacggtgaccagcccagttctgtgtaataacaacatctccgagggcgaagggtatgtggagtctccagatctggggagccccgtcagccgcaccctggggctcctggactgcacttacagcatccatgtctaccctggctacggcattgagatccaggtgcagacgctgaacctgtcacaggaagaggagctcctggtgctggctggtgggggatccccaggcctggccccccgactcctggccaactcatccatgcttggagaaggacaagtccttcggagcccaaccaaccggctgcttctgcacttccagagcccacgggtcccaaggggcggtggcttcaggatccactatcaggcctacctcctgagctgtggcttccctccccggccggcccatggggacgtgagtgtgacggacctgcaccctgggggcactgccacctttcactgtgattcgggctaccagctgcagggagaggagaccctcatctgcctcaatggcacccggccatcctggaacggtgaaacccccagctgcatggcatcctgtggtggcaccatccacaatgccaccctgggccgcatcgtgtccccagagcctgggggagccgtagggcccaacctcacctgccgttgggtcattgaagcagctgaggggcgccggctgcacctgcactttgaaagggtctcgctggatgaggacaatgaccggctgatggtgcgctcagggggcagccccctatcccccgtgatctatgattcggacatggacgatgtccccgagcggggtctcatcagtgacgcccagtccctctacgtggagctgctgtcagagacacctgccaatcccctgctgttaagccttcgatttgaagcctttgaggaggatcgctgggggacggtcccagcgcccgagtcttggcccagctgcggggacctcagccgcgccgccgccttctctcctctgggcccgacctcacactgcagtttcaggcaccgcccgggcccccaaatccaggcctgggccagggcttcgtattgcacttcaaagaggtcccgaggaacgacacgtgccccgagctgccacctccggagtggggctggagaacggcatcccacggggacctgatccggggcacggtgctcacctaccagtgcgagcctggctacgagctgctaggctccgacattctcacttgccagtgggacctgtcttggagcgccgcgccgcccgcctgccaaaagatcatgacttgtgctgaccctggcgagattgccaacgggcaccgcaccgcctcggacgccggcttccccgttggctcccacgtccagtaccgctgcctgccagggtacagcctcgagggggcagccatgctcacctgctacagccgggacacaggcacacccaagtggagcgatagggtccccaaatgcgccttgaagtacgagccgtgcctgaacccgggggttcccgagaatggctaccagacgctgtacaagcaccactaccaggcgggcgagtctctgcgcttcttctgctatgagggctttgagcttatcggcgaggtcaccatcacctgtgtgcccggccacccctcccagtggaccagccagcccccactctgcaaagttgcctatgaggagctcctggacaaccgaaaactggaagtgacccagaccacagatccatcacggcagctggaaggggggaacctggccctggccatcctgctgcctctaggcttggtcattgtcctcggcagtggcgtttacatctactacaccaagcttcagggaaagtcccttttcggcttctcgggctcccactcctacagccccatcaccgtggagtcggacttcagcaacccgctgtatgaagctggggatacgcgggagtatgaagtttccatctgaaccccaagactacagctgcaggacccaggacgcccctcccctcctcattcgggcagagggaaatacgggacccggtctctgcctcctggctgccctcctccctggctgtgtaaatagtctccctatcccacgagggggctttgatggccctggagatcctacagtaaataaaccagcatcctgccgcccaaa

SEQ ID NO: 666345 - DNA, 277 bp, Homo sapiens
gccaaggtatgttaaggggccccccctcaaaagtccaagggccgggggggggggttcccagggtcaggagtttaagcccatcccggttaaaagggtgaacccccgttttttttaaaaaaccaaaaaattacccgggggtagggggggggccctgtagtcccccctatttggggggttggggcaggaaaagggggtgcccccgggggggggggcttccagtgacccgagttgggcccccggcccccccgccggggggccaaagggaaaccccttttca

SEQ ID NO: 666346 - DNA, 2885 bp, Homo sapiens
  misc_feature (1228)..(1228): n is a, c, g, or t
  misc_feature (1236)..(1236): n is a, c, g, or t
  misc_feature (1240)..(1240): n is a, c, g, or t
cgcccgggcaggtcggagacggaggaaaggtggcagccagattacttagagaggcacagaggagagagatcggggtgagtcgccatggggactcccagggcccagcacccgccgcctccccagctgctgttcctaattctgctgagctgtccctggatccagggtctgcccctgaaggaggaggagatattgccagagcctggaagtgagacccccacggtggcctctgaggccctggctgaactgcttcatggggccctgctgaggaggggcccagagatgggctacctgccaggatctgatccggaccccacgctagccacccctccggccggccagactctcgcagtgccctccctgccacgggccactgagccggggacagggcctctgacaacagccgtcacccctaacggggtcaggggggcaggccccactgcgccagaactgctgaccccgcccccaggaaccacagccccacccccacccagccctgcctccccagggcctccccttgggcctgagggaggagaggaggagacgacgaccaccatcatcaccacgacaactgttaccactacggtgaccagcccagttctgtgtaataacaacatctccgagggcgaagggtatgtggagtctccagatctggggagccccgtcagccgcaccctggggctcctggactgcacttacagcatccatgtctaccctggctacggcattgagatccaggtgcagacgctgaacctgtcacaggaagaggagctcctggtgctggctggtgggggatccccaggcctggccccccgactcctggccaactcatccatgcttggagaaggacaagtccttcggagcccaaccaaccggctgcttctgcacttccagagcccacgggtcccaaggggcggtggcttcaggatccactatcaggcctacctcctgagctgtggcttccctccccggccggcccatggggacgtgagtgtgacggacctgcaccctgggggcactgccacctttcactgtgattcgggctaccagctgcagggagaggagaccctcatctgcctcaatggcacccggccatcctggaacggtgaaacccccagctgcatggcatcctgtggtggcaccatccacaatgccaccctgggccgcatcgtgtccccagagcctgggggagccgtagggcccaacctcacctgccgttgggtcattgaangcatgctngatnggggctgcccgggcttggcacccttggcaaccttttggaaaacgggttccttcggccttggaattgaatgagacaattgagacccgggttggattgtgtgcgctcagggggcagccccctatcccccgtgatctatgattcggacatggacgatgtccccgagcggggtctcatcagtgacgcccagtccctctacgtggagctgctgtcagagacacctgccaatcccctgctgttaagccttcgatttgaagccatgtgtggaggggagctgtcggaaccagctggcgtggtcctctctcccgactggccccagagctatagcccgggccaagactgcgtgtggggcgtgcacgtccaggaagagaagcgcatcttgctccaagttgagatattgaatgtgcgggaaggggacatgctgacgctgttcgacggggacggtcccagcgcccgagtcttggcccagctgcggggacctcagccgcgccgccgccttctctcctctgggcccgacctcacactgcagtttcaggcaccgcccgggcccccaaatccaggcctgggccagggcttcgtattgcacttcaaagaggtcccgaggaacgacacgtgccccgagctgccacctccggagtggggctggagaacggcatcccacggggacctgatccggggcacggtgctcacctaccagtgcgagcctggctacgagctgctaggctccgacattctcacttgccagtgggacctgtcttggagcgccgcgccgcccgcctgccaaaagatcatgacttgtgctgaccctggcgagattgccaacgggcaccgcaccgcctcggacgccggcttccccgttggctcccacgtccagtaccgctgcctgccagggtacagcctcgagggggcagccatgctcacctgctacagccgggacacaggcacacccaagtggagcgatagggtccccaaatgcgccttgaagtacgagccgtgcctgaacccgggggttcccgagaatggctaccagacgctgtacaagcaccactaccaggcgggcgagtctctgcgcttcttctgctatgagggctttgagcttatcggcgaggtcaccatcacctgtgtgcccggccacccctcccagtggaccagccagcccccactctgcaaagttgcctatgaggagctcctggacaaccgaaaactggaagtgacccagaccacagatccatcacggcagctggaaggggggaacctggccctggccatcctgctgcctctaggcttggtcattgtcctcggcagtggcgtttacatctactacaccaagcttcagggaaagtcccttttcggcttctcgggctcccactcctacagccccatcaccgtggagtcggacttcagcaacccgctgtatgaagctggggatacgcgggagtatgaagtttccatctgaaccccaagactacagctgcaggacccaggacgcccctcccctcctcattcgggcagagggaaatacgggacccggtctctgcctcctggctgccctcctccctggctgtgtaaatagtctccctatcccacgagggggctttgatggccctggagatcctacagtaaataaaccagcatcctgccgcccaaa

SEQ ID NO: 666347 - DNA, 2969 bp, Homo sapiens
cgcccgggcaggtcggagacggaggaaaggtggcagccagattacttagagaggcacagaggagagagatcggggtgagtcgccatggggactcccagggcccagcacccgccgcctccccagctgctgttcctaattctgctgagctgtccctggatccagggtctgcccctgaaggaggaggagatattgccagagcctggaagtgagacccccacggtggcctctgaggccctggctgaactgcttcatggggccctgctgaggaggggcccagagatgggctacctgccaggatctgatccggaccccacgctagccacccctccggccggccagactctcgcagtgccctccctgccacgggccactgagccggggacagggcctctgacaacagccgtcacccctaacggggtcaggggggcaggccccactgcgccagaactgctgaccccgcccccaggaaccacagccccacccccacccagccctgcctccccagggcctccccttgggcctgagggaggagaggaggagacgacgaccaccatcatcaccacgacaactgttaccactacggtgaccagcccagttctgtgtaataacaacatctccgagggcgaagggtatgtggagtctccagatctggggagccccgtcagccgcaccctggggctcctggactgcacttacagcatccatgtctaccctggctacggcattgagatccaggtgcagacgctgaacctgtcacaggaagaggagctcctggtgctggctggtgggggatccccaggcctggccccccgactcctggccaactcatccatgcttggagaaggacaagtccttcggagcccaaccaaccggctgcttctgcacttccagagcccacgggtcccaaggggcggtggcttcaggatccactatcaggcctacctcctgagctgtggcttccctccccggccggcccatggggacgtgagtgtgacggacctgcaccctgggggcactgccacctttcactgtgattcgggctaccagctgcagggagaggagaccctcatctgcctcaatggcacccggccatcctggaacggtgaaacccccagctgcatggcatcctgtggtggcaccatccacaatgccaccctgggccgcatcgtgtccccagagcctgggggagccgtagggcccaacctcacctgccgttgggtcattgaagcagctgaggggcgccggctgcacctgcactttgaaagggtctcgctggatgaggacaatgaccggctgatggtgcgctcagggggcagccccctatcccccgtgatctatgattcggacatggacgatgtccccgagcggggtctcatcagtgacgcccagtccctctacgtggagctgctgtcagagacacctgccaatcccctgctgttaagccttcgatttgaagcctttgaggaggatcgctgcttcgcccccttcctggcacatggaaatgtcactaccacggaccctgagtatcgcccaggggcactggcaaccttctcgtgcctcccaggatatgccctggagccccctgggccccccaatgccatcgaatgtgtggatcccacagaaccccactggaacgacacagagccggcctgcaaagccatgtgtggaggggagctgtcggaaccagctggcgtggtcctctctcccgactggccccagagctatagcccgggccaagactgcgtgtggggcgtgcacgtccaggaagagaagcgcatcttgctccaagttgagatattgaatgtgcgggaaggggacatgctgacgctgttcgacggggacggtcccagcgcccgagtcttggcccagctgcggggacctcagccgcgccgccgccttctctcctctgggcccgacctcacactgcagtttcaggcaccgcccgggcccccaaatccaggcctgggccagggcttcgtattgcacttcaaagaggtcccgaggaacgacacgtgccccgagctgccacctccggagtggggctggagaacggcatcccacggggacctgatccggggcacggtgctcacctaccagtgcgagcctggctacgagctgctaggctccgacattctcacttgccagtgggacctgtcttggagcgccgcgccgcccgcctgccaaaagatcatgacttgtgctgaccctggcgagattgccaacgggcaccgcaccgcctcggacgccggcttccccgttggctcccacgtccagtaccgctgcctgccagggtacagcctcgagggggcagccatgctcacctgctacagccgggacacaggcacacccaagtggagcgatagggtccccaaatgcgccttgaagtacgagccgtgcctgaacccgggggttcccgagaatggctaccagacgctgtacaagcaccactaccaggcgggcgagtctctgcgcttcttctgctatgagggctttgagcttatcggcgaggtcaccatcacctgtgtgcccggccacccctcccagtggaccagccagcccccactctgcaaagttgcctatgaggagctcctggacaaccgaaaactggaagtgacccagaccacagatccatcacggcagctggaaggggggaacctggccctggccatcctgctgcctctaggcttggtcattgtcctcggcagtggcgtttacatctactacaccactaccaggcgggcgagtctctgcgcttcttctgctatgagggctttgagcttataagactacagctgcaggacccaggacgcccctcccctcctcattcgggcagagggaaatacgggacccggtctctgcctcctggctgccctcctccctggctgtgtaaatagtctccctatcccacgagggggctttgatggccctggagatcctacagtaaataaaccagcatcctgccgcccaaa

SEQ ID NO: 666348 - DNA, 127 bp, Homo sapiens
cggtaccaacgatggtctcagctcactgcacctctgcctccgggtcagcgattctcctgcctcaccctcctgatagctgggattacaggtgcgcagacaccatcacccggctaattttatttatata

SEQ ID NO: 666349 - DNA, 418 bp, Homo sapiens
tttattggttatttttagtattttaatgtatgtactttttataaattccaaaagttaatacctgtaaactccacccaaatattaataagatcttagaacacaaattctgaatactttccatccttattcatgctattgccgtgtagtacttttgttctaccttgcttttaaataccaaaaaaattgttgtttttaaaaaattgtattacaatatacaggacataacatttaccattttaaccatttttaagtgtatagttcagtggcattaagtacatttgcattgttgtgcacccattaccaccacccatctccaaaattttttcatcttcctgaactgagactccatacccatcaaataattactttactctccatctcccctccactcccctgcttaataaactctaaaaatcca

SEQ ID NO: 666350 - DNA, 558 bp, Homo sapiens
cccccccccgggggagggtttccttgtgggtgagttttatccacaaaaatatacacaaatttgtgtgttgcctttttaacccccacccccgcccccaagagggggggaattccctcctttttttttttcccccccccaaaattttggatttttaggaggaaggtcccccgagagagaaaaacttggggggttttgaaaggtaatgcaaataacaaacccccaacttttttttaaaaaagataattgtctgagttaaaattactgattctttatttcacacctaaaaaaatatgagaacagggtacttgctttttgtgtcacattacggggcaaactgttcaagtttttttttttaaaacccccctgtatagaaaaaaatcattagggatgtaaacgccatgcttgcctatttgctgtatacataatgaaattgtagataaagtgtggtgcattgaaacaaatgaacaaaaagtagatacttttactatacaggggtgctggtgcagaaaaaaatatatatatttttggaaatgtagcattttatactttcaagtgtta

SEQ ID NO: 666351 - DNA, 238 bp, Homo sapiens
tttaccccgggtcccaaacaaaattcccccccctttttttggggggggggtttcccccaaaattcccggttttaaaaacccggttttggttttgggccttttggggggtccccccccgggggaagggcccttttaactgggggacggggcaatgggggttttaagcccttgggtttttccccggttttgccccggggaattggggaaaaggccccaaaaagggtttttttttaaccca

SEQ ID NO: 666352 - DNA, 515 bp, Homo sapiens
  misc_feature (264)..(264): n is a, c, g, or t
  misc_feature (271)..(271): n is a, c, g, or t
cggggacttgctggcgtggtgcttctcgaattgacagccccgggctctgcagagttgtggggccccggcatcagtgggtggacgggtgttgtcctacggcgcggggcggcgggctggactggacttctctccccggaccgtagccgggtgtgccgcgccaccccagggctcctgggacgggggtatccgcctctcggatgaaggatttgggggcagagcacctctgtgcaggtcagctgaagggggtcctaacgttcgtcgggnggttgcnttgagacgtcgttaccctggagacgaaccgaagaagaagaattcctaaccctctgagacggaaaggggctgagctctgagtgtgaggctacccccggggaaatgatagcactttgtgtccaggattgagaaatgccaaagttgaagatttaaggagtttagccaacttttttggatcttgcactgaaacttttgtcctggctgtcaatattttggacaggttcttggctcttatgaaggtgaac

SEQ ID NO: 666353 - DNA, 701 bp, Homo sapiens
gtgggccgcatgcagatggttgactactatgcgtgtgggaccacgattgatggtgtctgatgatgaagacgagactgcaccccaacatcgactacggccagtctcttccgctggcggcatcagcgcccggcgtggaactgcgatgttacgccaagcttcctcagatacgtgtacgcaacgcgtaggtaccttggacagtggtgctgcctgcgattgctagctgctcggtgtcctgagtgccacgatggaacactgaaggagctggaggtggcctgatggcggccaggcaagagctggatgcgcctgcaggcctgatgcacatgcagtctgcgcaacggaggatgcgtgagctggtcagcagaagctggaggagatgcgcaacgaatgagaagaggtatgccctggaactgtggacacgctcagcaaagatggtttcagcaagagcatggtaaataccaaggcccgagaaagacggaggaggactcagaggaggtgagtggagcagaaacacaagaccttcgtgtgaaaaatacgagaagacagatcaagcacttaggcatgcttcgccgctgggattgacatccaaaaagtaacctgtcagacaagcgtccacctggttgtgcgaggagaccagccaattacctggtcatttggtgcattgacctaaggtggaggagaatgtgcactcattgagcaggttg

SEQ ID NO: 666354 - DNA, 967 bp, Homo sapiens
  misc_feature (908)..(909): n is a, c, g, or t
gagctgggactataggtgcccgcaccacgccaggctaattttttgtattttagtagagatggggtttcaccgtgttagccaggatggtctcgatcttctgacctcgtgatccgcccgcctcggctcccaaagtgctaggattacaggcgtgacccacctggccggcaggcaaatttaaagccaagaaattgaatgttgccagaaccccaggaacacacacacagactcttcccatattgaccaatttccccagaatctccacctttccttacttctatgatgcccctggttacagactagaaacggccttgaaaatctacgtggggtgggagaagaatatcaaaactttcctaagagaattttctaatctgtaagatcaatatacttgattggaaactggctttggataacgtgggaatatataatcatgtgatcaattaaatataccctttacaagagaaggtttataccaataacataaagcgtacaacaaatgtgaacacatgtggagtggaaacaagatctgtagggctcaatggataagatactgaaacttgtgatatttttcagtggggcaacagagttgaatattagtctgatagtttccggtaaaatttttgaatatttctggaaggcgttggaaaacttgatttgtttctttgaatattttccaattgggtcaatgctttacagaaggaagaaaccaaatttgcttgaggactgcagaaaatgagtttggaaagtggactgtcgatgacaaaatcacgacactcttgtgtggacacaagatcagtcattcgcaaatgatgtatccactgatgcggggagggaaacaaaaagaaattggagagggaatgtggttatgatttcaacacgtttcttttctctcgctctctagcgatcacccnnaagaaaagaagaaagaacagagaacaagatgggaaagacagagaatgagtgaacgagg

SEQ ID NO: 666355 - DNA, 120 bp, Homo sapiens
taccaaaaaaacgtattcaagaaatcattgagcagttaggggtcacaactagttgaatatgaaaaggaaaaactgaatgaacggcttgcaataactttcagaatggagtggctgtgctga

SEQ ID NO: 666356 - DNA, 149 bp, Homo sapiens
ccgtgcagatagaatcgagctggtaccccgacacttcatgaccggccgtaccacacgggtggcgagctatcgtaacaacaacttcttcggtctggttgacggtctgaacttcgctctgcaataccaggcaagaaccagaacgacgatcg

SEQ ID NO: 666357 - DNA, 353 bp, Homo sapiens
gctcgacatcgttatgaagtgcgtttgaagaatggaagcgttctggtactggtgcgcgataagccctgagcatccaggtgcaaatcgattaaacggcaacttgatgccttgtgcctgttagttgttttctcgttcagtctttatgcgtcgctaaagaacgactcctattgaaagtgcctatattcccgagcggctcgcggccatcgaataaaggtgcgtatccggctgtgcgtaaacttcaaggaagagagatgaacccgccgaaaatgatgtccgggacacctttgattcgtgtgctcggcgattataaaagtgtgttgttcagcgtcggttgttttaccgcgttggtcgac

SEQ ID NO: 666358 - DNA, 327 bp, Homo sapiens
ctaggaatatggcttacggggaacaatcactttaaagaggatggtgtcgaactggtgtggtaggtacatggctgtcaatcccctgtacttatggagaggtcaaagctgggaggatcactatgaggtcaggattacaagactagcctggccaataaggtgaaaacccgtgcataataaaacagtataaaaatatagctgggtatggtggtgcacgcctgtaatcttggctactcaggaggccgaaggaaggagaatagcttgaactcgggagtgcagaggtagcagtgagtcacggccatgctacttgcactccagcctgggtgacag

SEQ ID NO: 666359 - DNA, 737 bp, Homo sapiens
atctgctgctggtggtcgccccaccacgcggtgccagtgcccagtgtccccacagtgcctgtctgtccactccatgccacctttctcagcatcagtgacggggttgccctgatgttcacacacgacgtgttggcatgcatggactcaagtggcacgcctgtgggacgtgtggccatggccacgatggccatgtgccctgatggagacaactccctcaggactagggacatgggcatgtagccagagccatgtggcccacgggacccacaggcaacccagacagcatcaagggccgcccttgccacacagtctagtcatgccagagcggatgcagccgacgggggcagatcccatccgctgtcatcttacacctagaacaataatgcagaatgcacattttgccgacttcccaatatatcatctttggctaagtgacgaccacagcccatgagagttgggcagcttgcatccccaagaaaagcctgataggtgatccccaaggacccctatgacagatacccatcttactggtacccttgttcctggttagattcacaggcacccacggggaacccccaacactgctccagcgggtggccccggaagggcacaaccccaaagacccaagaccatgacggggggccagataccccagactgaccttgggattaccctggccttgacaggtcctgagcgcaacgggcaggggattccaggtggttgggggaccgtggccc

SEQ ID NO: 666360 - DNA, 243 bp, Homo sapiens
  misc_feature (16)..(16): n is a, c, g, or t
  misc_feature (215)..(215): n is a, c, g, or t
ctgcacatgtagctcngcaagtcttacaggttatctttgtgcttctggcgtgcctgggattgggatggtctgggagagctttggctatacaccccaggatatcgccagtcccggcaccactttttctatcaatttcttgaccatgtggatttttgaaaaatgtgaacaccagttcaggcccttgcttataggtacttggagttggtgtgacgacngagcagcttctttgttgatcacctggtg

SEQ ID NO: 666361 - DNA, 294 bp, Homo sapiens
gcttactctgttggagtaggttctcttcagagctgtgcaaggacgctagggagcattcacagggtgctcttctggatcattccatttgacagataaaggggactggaggtcagagagactgtacccttttcataggatcacacaggagtggctgcacatcttagctcaagggcatgtataactcccaggcagggccaaagctcctagggctgagtgactcccaaaaagagaagggcaggtggtcaaccacaaattccccaagttcggccctcttcagagccgtcctgcctgggt

SEQ ID NO: 666362 - DNA, 409 bp, Homo sapiens
tactgtatgcattaataaattaaagctccatagggtcttctcgtcttgctctgtcacccagactgggtacagtggcacgatctcggctcactacaaactccacctcctgggttcaagagattctcctacctcagcctccagagtagctggaactacaggtgcgtgccagcatgcccagctaattttttgtatttgtagtagagatggggtttcactgtgttagccaggatggtctcgacctcctgacctcatgatctgcccgcctctgcctcccaaagtgctgggattacaggagtgagccaccgcacccagccgaccctacttctaatagtatggagaacgctaatagtccttggcacgaactgtttagagaattaggcaaaataaatgcatttgacactcctgattc

SEQ ID NO: 666363 - DNA, 134 bp, Homo sapiens
  misc_feature (130)..(130): n is a, c, g, or t
gggatttaggttctaagagattctgttttgctgttgcattgatcaattgtttctaaggcctttttttttctttttaaaagaatgtaacaaccatataataaatcacctcttccgcttgttttagctgagngttt

SEQ ID NO: 666364 - DNA, 272 bp, Homo sapiens
gaaggacatcacacatctccccatccttccaatcaactggggtggcaaacctatatatactgctgtcagctaggagcgagatgactaccctgagaatctcatcaaagtacctgccagatggtagctggagaagcaggatagacagctacagaataactaatcaggacaaaaaacaaacaacacacgagctgtcacaggcatgccctttacatccttctctgaaggatccagcatgcccaacaggataggcaaagactcccgatacctatcat

SEQ ID NO: 666365 - DNA, 227 bp, Homo sapiens
agaccagccgagtctgcgtatttcaatgggtcagcatctctgtgccgagaaaaaggtgtgtagtgattgtgtgtatgtgtagtctttctgtgtgtagtctgtgtgatgtaatggtgtagtctctgtggcggggaggggatgtgtgtgattgtgtgtctgtgtgtgtagtctgtgtgtgtctgtgtgtgtagtgtgtgtgtcttagtgatatgtaagggcgtgactgt

SEQ ID NO: 666366 - DNA, 381 bp, Homo sapiens
ttacaacccagaatcacatggaacaaggccctctggctcttctgagcgaagtgttatgttctcgcctttttctgggtgggtaaactgaggctgatgtctgggacgtgacttccccacatatccccaacagatcattaaattcactgtaagtcactttttgtcgtttaccaattcccttccccccacttaccagtcaagttatgaaaacagtgagttattgtttgatcgtctgtgatcccaattttcctaggaatatagactgttaggaatatagatcctgtcacaagaggcttcagaagtaaaggaaccatgtggtttcttggctgttttgcttttcaaagtctgtatcattttaactagtgtagcaatgacagtctcttt

SEQ ID NO: 666367 - DNA, 241 bp, Homo sapiens
  misc_feature (239)..(239): n is a, c, g, or t
ttcggccaccacatgaaccagcagcggatggtcacttacggggtacgagcggcttggaggagactgccccaggccttccggccatagcagccatgagtgtcatgaccaccaccacggtggtcattggaactcagtgtgactccttagggttgaggtccagctgtggttgaaggactgtgacaggcagcagagacttgggacattgcctattttagcccgaatacaaacacctggacttnta

SEQ ID NO: 666368 - DNA, 389 bp, Homo sapiens
ctcgaggccaagcatcgcagcactcttcacgatagcatgtgaatcaacccacaaagccaaggaatcaacccggatgcccatcaacagcggactggacaaagataatgtggtacatatataccatggaatactacacagccattaaacaagaatgaaatcatgtctattgcagcaacatggatgtagctggaggccattatcctaagtgaatgaatgcacaaacagaaaaccaaatatccaatgttcttacttctaagtgggatgctaaacattgcgtacacgttcacacacacacacacacacaccccatgttcttacaagtgagagttaaacattgcattcacaccacattcacacatacacacacatacacacaccccatgttctta

SEQ ID NO: 666369 - DNA, 210 bp, Homo sapiens
caagggtcaggctcgctggaacttaataagtttgtttgacaaactgatttggaggaagcattcagcatctgcccttgtcttccatggtcacaaccaggaactgtgcactgtacgccgcggacatcaccttgcaagatacatgtttttgtaggcttcttcagaagcttcagatgaccacccacgatgaacaatgtacttgcttactcacac

SEQ ID NO: 666370 - DNA, 120 bp, Homo sapiens
tgctgatgtgatctagaggatcccgagctctctctgtggggtctcagcatttccctgccctctctgtcagtatcctcgtcccgaaactggagacagggtaccggagctctgaattctgta

SEQ ID NO: 666371 - DNA, 1006 bp, Homo sapiens
  misc_feature (372)..(372): n is a, c, g, or t
aaggtaggttgagctctaagtcaggccccgatccatgctttcacagcctacgtgagagagtacatatgccccgacccgccgtggcacggacagccgagctgaggtatgtgtgtggtccctcgagtgtttcggcgccgcccagcccgttctctgggtggctgcagaaagtgcatctgcggctccgggtttaccgggcctgcggggactgtcgcgagctcgcgagacggagtcgctaacaatgagtcgtgccgtcgagtgagggagggccctgagtccttaggcacgacaacgtgatatgatagacaacgttcgagtatactgcttgacatatctcctcctgagatgcgctggtgaggtgaaacgacaccaacncccttttgtgtatgaggccttgtaggcctgttgtagaaccagggctcgcgtggcgactggtgtgagttcatctcgcgtgcatctttgttgccgaagatacggtataaagtaactccgccgattcactagatttggtcgtcgccgtttcttcgtccaggaacccctgtcgaaccagggacgtcaaacttgaccttatattcgacgcattttaaatgtcgcggattgagtgacatgaaaggggttcgaaggtagcaagagagggggtgaacgaaaaggttggggctgtgagggacttttgagacatagggagaggcgttcaagtggtagcggtattagaccggaagatggcgtcccggacgtttcgttccgcttgagaaaagattgaacggatggaagacttggagacaccccgacgtaatggttatgtggggtgccgtttagacccacttcatttcgttgctgaaccaattttttcacaacaggtggtcgaaacgtgtaattcaagtatcgttgcccagtacggaacgttggtaaatcccgtcccctccactacgtgggatggtcataggggggtgtgcgtaaattcacgccctggaggggagcattgcttgagcggggcattgcctgggaaagt

SEQ ID NO: 666372 - DNA, 112 bp, Homo sapiens
ccgcaatgcaagtgggcacgcccgtaatccagcacttttagaagacgaggcggccgatggcttgagctcaggagttcaagacaagtctgtgcaacatagcaaaagcctatct

SEQ ID NO: 666373 - DNA, 288 bp, Homo sapiens
atgtatcactgctgacttttattccaatatttggtatggagtaagttttagggttgaattttgttcagtttggatttaatcttttgaaaagtaaattccttgtttactggtttgactataattctctgttatctttacgtggtaaaactgcaagctgactagcattttctttgatttctgccattcctaaaaattttttatacacttgtatacttttctctgttaatgtttgtctccaataaacatatattgtgaaaatgcatccacaatatatggaattcttttctg

SEQ ID NO: 666374 - DNA, 304 bp, Homo sapiens
ggagttctgagaccagcccggcaacatagtgagaccccgtctctaccaaaaacacaaaaaattagccaggcgtggcggcgcgcgcctgtagtcccagctactcgggatgctgaggcaggagaatcggttgaacccatgaggcggaggttgtggtgagctgagatcacgccactgcactccagcctgggcaacagagcaagactccctctcagaaaaacaacccccccctcaaacaaaacaaaacaaaacaaaaaaagtgtaaattgtgaaagaaatcatagaacgtaaggaagtgagtttccac

SEQ ID NO: 666375 - DNA, 681 bp, Homo sapiens
gaaggggtggctgaggcaagaggatcacctgagccttgggaggtcgaggctgcagtgagccattatggtgccactgcactccagcctgggccacagagtgagaccctgtctcaaaaaaacaaaacaacaaagacaaaataacaaaaacattaaaaacaacatctcatccaagcatggaggctcacacctgtaatcatagcactttgggaggctgaggtgggaggctcacttgacaggagttcaagaccagtctgggcaacatagtaagacccctgtctctactaaaacttaaaatatcgaactgggctgggtacgtatgtgccggtacttccagcttactatggaaggctctaggtgggaagaacgcctggggtccaggagtgcaagacggtagtagacgacgactgcatcactgcattcaagccgggttgacacagcaagaccatctctaaaccactacccattaaaggccgggccgcggtggctcagcgcctgtaatcccagcactttgggcaggctaaggcgggcagatcacctgaggtcaggagttcgagaccagctggccaacatggtgaaagcccatctctatacacatcgccagcttagccgctagcaggtcagggagttgggaccactagcctggccaacgtggtaaaaacccaatctctactacacctaccc

SEQ ID NO: 666376 - DNA, 931 bp, Homo sapiens
  misc_feature (23)..(23): n is a, c, g, or t
  misc_feature (63)..(63): n is a, c, g, or t
  misc_feature (87)..(88): n is a, c, g, or t
  misc_feature (95)..(95): n is a, c, g, or t
  misc_feature (131)..(131): n is a, c, g, or t
  misc_feature (142)..(142): n is a, c, g, or t
  misc_feature (186)..(186): n is a, c, g, or t
  misc_feature (198)..(198): n is a, c, g, or t
  misc_feature (226)..(226): n is a, c, g, or t
  misc_feature (230)..(231): n is a, c, g, or t
  misc_feature (237)..(237): n is a, c, g, or t
  misc_feature (265)..(265): n is a, c, g, or t
  misc_feature (268)..(268): n is a, c, g, or t
  misc_feature (275)..(275): n is a, c, g, or t
  misc_feature (296)..(296): n is a, c, g, or t
  misc_feature (298)..(299): n is a, c, g, or t
  misc_feature (317)..(317): n is a, c, g, or t
  misc_feature (372)..(373): n is a, c, g, or t
  misc_feature (375)..(375): n is a, c, g, or t
  misc_feature (377)..(377): n is a, c, g, or t
  misc_feature (405)..(405): n is a, c, g, or t
  misc_feature (422)..(422): n is a, c, g, or t
  misc_feature (431)..(431): n is a, c, g, or t
  misc_feature (491)..(492): n is a, c, g, or t
  misc_feature (544)..(544): n is a, c, g, or t
  misc_feature (693)..(693): n is a, c, g, or t
  misc_feature (821)..(821): n is a, c, g, or t
  misc_feature (893)..(893): n is a, c, g, or t
aaagttgtgtggtgttttgtganaatgtgggttgaggtagagggggggggagttaggatggtntattggatgtgaaagagagatggnngggaaantggaatagagaggaagagagcaaggagatttgaacntatgtgctttnaaggtggtgatgatgatgaaaattagaaaaaaaaataaaaaggnaggtgaaggttncaaggggcaaaagaagataagttggggntacnntcaggntgcaaaggaaaatgggaagaaaggaacntcnaaagtgncctctgcacctcattttgttnannccaatgatgatgggaatngagagggtgaattaaagaagaagtgggttgaggagatgagggagaagcagcaagnngngngggaggaagaaagagaaaaacgcaggancattgagagctagtgtnaggatgtgntaagaggccaggaggagtttgagcataaggaggaagttttgcaggaattaaatatgtttnntcagctggatgacgaggccacgaggaagggttattacaaggagttccgtaantggtggaatactctgatgtgattctggaagtcctggatgccagagacccattaggctgccgctgcttccaaatggaggaggctgtcctgcgagcacaaggcaacaagaagctggtcctggtcttgaacaagattgacctggtccccaangaggttgtggagaaatggctggattaccttcggaatgagttgccaaccgtggctttcaaggccagtacccagcatcaggtcaaaaacctgaatcgttgcagtgtgccagtagatcaggcctctgagtnactgctgaaaagcaaagcctgcttttggagctgaaaacctcatgagggttctggggaactattgccgccttnggtgaagtgcgcaccacattcgtgtgggtgttgtgggt

SEQ ID NO: 666377 - DNA, 707 bp, Homo sapiens
agcggaggccgcgcgttgcaagctcgcagggagccagccggggcgtcggagtcgcggcgcagcgcggagctggcaggggtgcccgcctgggcacgcagtcgcctccccgggggcctcccgggcttctcaagcgcccgcctccgcccgcccagccacaccaggcgccaccgcgtggcctgggcatgagcggcagcgctactgcgcccttgcccggtcggacgcccgcccgcccgattcacgtgcgcccaagtcctcgcggcggggcagcgcggttcccatgcttccaaggctgttgatggagaagggggcgaggatgacaagcccgggaccgtggtccatcacccgggggcatcttggcgaacgtgtgaattttgctctgcaatcagtcgctgtatctgtgctacatgcgagctccagttactacttgctggcaagaaaggaacgagtccgaaggaggaccggaggaggaaccagaattcgccgtacactcgcaaactgccccagcttggagtccaaacgcgagtagctggtgctgaccaaacagggcacggagctcgtaacagaccaaacagcttccaaactcctgacagccagaaaatcccccggcaaggaccggaggcctcttggccggaggatgctcccccactgagaaaccccccccacccttactttccttgcaaggaagcgcgcggaagggaggaaagagg

SEQ ID NO: 666378 - DNA, 215 bp, Homo sapiens
catgcaccacagcggtctccgttgtgtttctgcttcccatggtcgcctacaggccatgtcaacaggctgatatatataagggtacatgtgcaggtataaccttggtcatctgaaggaatgacatctttccttagaaggctcggagggcgtgtgctggttcccaatacgctttccttagaaggatcagtgtgtgtggtctggttcccaactacact

SEQ ID NO: 666379 - DNA, 310 bp, Homo sapiens
ttacacaacctagggtcagttttgcaggtggtaagccattacagatagttgtaggtaaagaagggcagatttattagagaaatgtgaaaatatgttgcagtgggcagctcagcagagaaggggctacctgcaaagaggcaagggctggaggaaagttttatagggtcctgctgaagggtgctacgtgtggaatgaggtcattgtgcccgcaggttgtttgtgattagctgtctctaacaattgttcatacaataattgttcattattgttctcaacttggggctctccccaacctggggacccttcctta

SEQ ID NO: 666380 - DNA, 174 bp, Homo sapiens
cctctctgtctagtagctagtaggcaccaactacttcgtgggaaggtgccttatggctgctatccgccctctccacagagaaaaccactgagacaaacgaattcacaaacattttgagaatatcttctaccaaggacacacaagtaaaacttacagacgtgctcccagacggct

SEQ ID NO: 666381 - DNA, 200 bp, Homo sapiens
cttgttgaatcaggaatagcatttcattagggatagatcttctgctccagcacacaggacagggagttcccccgtttccatcctccccctctggccctctccgataacttgcaggcctgggctatccagtactcactccctagatgagctgacactctgtggacttgtagcctgtgctctagggaaggtcctagccatct

SEQ ID NO: 666382 - DNA, 783 bp, Homo sapiens
  misc_feature (18)..(18): n is a, c, g, or t
  misc_feature (64)..(64): n is a, c, g, or t
  misc_feature (73)..(73): n is a, c, g, or t
  misc_feature (76)..(76): n is a, c, g, or t
  misc_feature (78)..(78): n is a, c, g, or t
  misc_feature (82)..(82): n is a, c, g, or t
  misc_feature (84)..(84): n is a, c, g, or t
  misc_feature (87)..(87): n is a, c, g, or t
  misc_feature (102)..(102): n is a, c, g, or t
  misc_feature (105)..(106): n is a, c, g, or t
  misc_feature (111)..(111): n is a, c, g, or t
  misc_feature (125)..(125): n is a, c, g, or t
  misc_feature (135)..(135): n is a, c, g, or t
  misc_feature (143)..(144): n is a, c, g, or t
  misc_feature (173)..(173): n is a, c, g, or t
  misc_feature (197)..(197): n is a, c, g, or t
  misc_feature (205)..(205): n is a, c, g, or t
  misc_feature (209)..(209): n is a, c, g, or t
  misc_feature (224)..(224): n is a, c, g, or t
  misc_feature (226)..(226): n is a, c, g, or t
  misc_feature (244)..(244): n is a, c, g, or t
  misc_feature (268)..(269): n is a, c, g, or t
  misc_feature (295)..(295): n is a, c, g, or t
  misc_feature (304)..(304): n is a, c, g, or t
  misc_feature (310)..(310): n is a, c, g, or t
  misc_feature (319)..(319): n is a, c, g, or t
  misc_feature (323)..(323): n is a, c, g, or t
  misc_feature (325)..(325): n is a, c, g, or t
  misc_feature (339)..(339): n is a, c, g, or t
  misc_feature (355)..(355): n is a, c, g, or t
  misc_feature (358)..(358): n is a, c, g, or t
  misc_feature (369)..(369): n is a, c, g, or t
  misc_feature (382)..(383): n is a, c, g, or t
  misc_feature (387)..(387): n is a, c, g, or t
  misc_feature (391)..(391): n is a, c, g, or t
  misc_feature (425)..(425): n is a, c, g, or t
  misc_feature (429)..(431): n is a, c, g, or t
  misc_feature (438)..(438): n is a, c, g, or t
  misc_feature (442)..(442): n is a, c, g, or t
  misc_feature (451)..(451): n is a, c, g, or t
  misc_feature (457)..(457): n is a, c, g, or t
  misc_feature (481)..(481): n is a, c, g, or t
  misc_feature (636)..(636): n is a, c, g, or t
  misc_feature (638)..(638): n is a, c, g, or t
  misc_feature (654)..(654): n is a, c, g, or t
  misc_feature (656)..(656): n is a, c, g, or t
  misc_feature (688)..(688): n is a, c, g, or t
  misc_feature (712)..(712): n is a, c, g, or t
  misc_feature (721)..(721): n is a, c, g, or t
  misc_feature (774)..(774): n is a, c, g, or t
aaccatggtggcggcganggtggcagcggcgtggctgctcctgtgggctgcggcctgcgcgcanaggaaaganaananttcnanganttcaaggcggtcaanatnnggggnaaactggtgtcgcnggagaagtancgagagannggtgtccctggtagtgaatgtggccagcnagtgcggcttcaaaaaccagcacnacaaagcnatgnagcagctgcagcgananctgggcccccaccacttnaacgtgctcgccttcccctgcaannagtttggccaaaaggagcctgaaagnaaaaagganattganagctttgcncgcngnacctaaagtgtctnattccccatgtttagnaanattgcagtaancggtactggtgcnnatantganttaaagtaaatggcccgtaagtactggtctattnatannntaaaaantaanttagctggntgaggnaatggataaatgggaagaagaagnaaatggctggttgggtgaaatggggccaattaaaattactgatcatctcgggtggactgatgctttgttccagcactaatctttgaggagagtggaggcaggtacaagctgaggggtattcctgcctaagaatatctccatacctgctgcctctnanttgtccctcagaagtnantcttttggacttttctgggatcctgttttcanattcaggggctcctagaaggaganatttaagtnagtgtgaactagatgagtttatggacatatgatggagaaaccaaggcataganaggggaggc

SEQ ID NO: 666383 - DNA, 881 bp, Homo sapiens
  misc_feature (651)..(651): n is a, c, g, or t
  misc_feature (689)..(689): n is a, c, g, or t
gggaatccgggtcagtactggggggaagggagtgctgatgtgtctcagcttcccctgaagaacagtttaggcagtgattggaaccggtagacctgctgattcagcattagggctgaagctgcagaggctgtgcccaataccaggttggggctagaaagtctcagggcctggcttgtgctgaacacagcttattccagctaaatgagagaatgaggaaagaagagagaatttaaggctaaccttggcaagtttgtgaaaccttgtcaaaagtaaaacaaggactgggggcgtggtcagaggatggagcccctgcctaaaatcccctaccaaggggctgggttagtggctctgcagtgtgcctacctggcaagcatgatggctcgggtgctgtcccagcaataggaaaaaaaatggccacaggaccctttgaagatgccctgaagttgcacgcgtgctcagtggcagccggcatcactgaggcctcaacccctctggaagaccagtggcccagtcccccctacccgaggggccccgtgcagccacagaggagcaattgaggcaggagccctggtaccacggacgaaatgagccggcgggctgcagagcaagctggttcgggccgattggggacttccctttgtgagaagacanggttcaccaaaccggggggcaggtatgtcctccacggngcatgcattgcgggggcagcccaaaggaactgctggtggtggacccccgagggtgttgggtaagcggcacttacagcatcacggggaggaggcaggggtaaataaggggcgctctagaatagaaatcccctgtgaaacatttccgtcagaaaggtttccaagggggcccaacaaggaggatacactaaaggg

SEQ ID NO: 666384 - DNA, 285 bp, Homo sapiens
ccgggggggggccttttggggcccggttttaaccgggtttttttttttaaaaccgggccccctgggggtttcccgggtaacccctgcttcccccccttttgggggggggggggggttttttttttttccccccccccgggaagggggggggggggggtttaaccccaaccttttttttttaagggttttttttttttcggttttttttggggggccccggggggggggttggtttttgggggttttttttttttttttgcttataaattttttctttttttttta

SEQ ID NO: 666385 - DNA, 350 bp, Homo sapiens
ccccaaaacgaaattaataatagcagagtaaggatagtataggacctgtgagtatgtcaggtactagttagcattaataaataacagctccatagggtcttctcgtcttgctgagtcatgcccgactcttcacgggcaggtcaatttcactggttaaacagtaagagacagctgaaccctcgtggagccatacatacaggtccctaattaaggaacaagtgataatgctacctttgcacggttagggtaccgcggacgttaaacatgtgtcactgggcaggcggtgcctctaatactggtgatgctagaggtgatgtaactggtaaacaggcgggataagacttgccgag

SEQ ID NO: 666386 - DNA, 1132 bp, Homo sapiens
  misc_feature (132)..(132): n is a, c, g, or t
  misc_feature (135)..(135): n is a, c, g, or t
  misc_feature (148)..(148): n is a, c, g, or t
  misc_feature (151)..(151): n is a, c, g, or t
  misc_feature (159)..(159): n is a, c, g, or t
  misc_feature (181)..(181): n is a, c, g, or t
  misc_feature (274)..(274): n is a, c, g, or t
  misc_feature (278)..(278): n is a, c, g, or t
  misc_feature (306)..(306): n is a, c, g, or t
  misc_feature (475)..(475): n is a, c, g, or t
  misc_feature (538)..(538): n is a, c, g, or t
  misc_feature (568)..(568): n is a, c, g, or t
  misc_feature (596)..(596): n is a, c, g, or t
  misc_feature (616)..(617): n is a, c, g, or t
agcggggggaggcggggcggaggcgccgcggcgggtgttattgttcggctgggctcggtcgggcgctgtctccctcggctctgcgggtgtcagttcgtccggcttcctcacagcccctcactcccgcgtgcntgnctgacagcagcangcnggctggcnggctgtgtgctgtgcgcctggncgtttcgaggctgagcggcaccggggttgtgggcgcggaggaggagcagcagcggggaggaggagcctgtgtgccctgtgcacttgagctggnccgnggccatggcgtacgcctatctcttcaangtacatcataatcggcgacacaggtgttggtaaatcatgcttattgctacagtttacagacaagaggtttcagccagtgcatgaccttactattggtgtagagttcggtgctcgaatgataactattgatgggaaacagataaaacttcagatatgggatacggcaggncaagaatcctttcgatccatcacaaggtcgtattacagaggtgcagcaggagctttactagtntacgatattacacggagagatacattcaancacttgacaacctggttagaagatgccngcagcattccaattccaacnntggtcattatgcttattggcactacaatgtgattaagaatctagaagaggcagtacaaacagactgaaggtgaagcttttgagcgatgacattgactcatcttcatggaaacgtcatgtaagactgcttcaatgtagaagaggcttatatcatacatgaaaaagaagtatatgaagaactacaagaaggagctatgacattatagtgggcagttggttaaattgtcataagattggtgtacgaatgacgattgcagcataaggaagcaagatgagaagggggtgagaaggcttggatatggttatgatgacaggtggcataacaatattttgagaccatgttgtgaagagtagacgtaacaatagaatgttgatagaacgatatacaggaatgtataactaaggtgtgagcttaaagaaactgaattgtgggaaaaaaaggtcgtgaacgtaagggtatcataaaattgagatcagagagcgaagatgagctccctcctcacgtcaatagagcat

SEQ ID NO: 666387 - DNA, 699 bp, Homo sapiens
  misc_feature (545)..(545): n is a, c, g, or t
  misc_feature (675)..(675): n is a, c, g, or t
ggcgagagcccctttcctcagctgccgccaaggtgctcggtccttccgaggaagctaaggctgcgttggggtgaggccctcacttcatccggcgactagcaccgcgtccggcagcgccagccctacactcgcccgcgccatggcctctgtctccgagctcgcctgcatctactcggccctcattctgcacgacgatgaggtgacagtcacggaggataagatcaatgccctcattaaagcagccggtgtaaatgttgagccttttgtggcctggcttgtttgcaaaggccctggccaacgtcaacatgtgggagcctcatctgcaatgtaggggccggtggacctgctccagcagctggtgctgcaccagcaggaggtccttgccccctccactgctgctgctccagctgaggagaagaaagtggaagcaaagaaagaagaatccgaggagtctgatgatgacatgggctttggtctttttgactaaacctcttttataacatgttcaataaaaagctgaactttaaaaaaaagaaaaataatanattgataattcattgtggccgtcttgtcccacttggctctagacttgagccagcttatgcatgcggccggaattagagctcacttgctcaatacgccctatagtgggaggtattacaattcaatggccgncgtttaaaaacggctttacatgga

SEQ ID NO: 666388 - DNA, 346 bp, Homo sapiens
tacatgtgaaagatacaacaataaacacaactatagctccttacctgatgaagcttacggtcaagtggagagaattcagacactaggctgggtgcagtggctcacgcctgtaatcccagcactttggggggctgaggtgggtggatcacaaggtcaggagatcgagaccatcctggccaacatagtgaaaccccatttctactaaaaataaaaaaattagccgagtgcggtggtgtgtgcctgtggtcccagctgcttgggaggctgaggcgggagaatcgcttgaacgtgggaggcggaggttgtggtgagctgagattgtgccactgtactccagcctggtgac

SEQ ID NO: 666389 - DNA, 327 bp, Homo sapiens
agtgctcttagctatttcctgtttgaacatgccctgagcgtctgactggcactgggggccgatgccagggtttcgagcacagaccctcaacatagtccttctaattgacattttccaggaactttacatagaggcgctgataaccgattatatgcatccccaaaataaccccaaataattactggtagcacaaaactgactcttaccgccgttcctaggaacggcgggaacacgaaataccagctccatcagaggcttcctcagcaagcacagctcagatgagtagaggcagatgcttcaaaacaggatcacagtctttctgtccac

SEQ ID NO: 666390 - DNA, 237 bp, Homo sapiens
tggcgtgaccagagttcttatggatagtcccatcacctccaaagcagggggcccaccctccctcctaccagcccctccccagcacccaagccccttcgaggtgacagggccaactcttcgcgagtgggtgtggcaggtgtgggcacgcaagcggagcaggcctcgttagcgcacgggcggaaacctccgttggaaactcggtggggcaaccagcgccagggcgcggggcctttccca

SEQ ID NO: 666391 - DNA, 525 bp, Homo sapiens
ggcgagagcccctttcctcagctgccgccaaggtgctcggtccttccgaggaagctaaggctgcgttggggtgaggccctcacttcatccggcgactagcaccgcgtccggcagcgccagccctacactcgcccgcgccatggcctctgtctccgagctcgcctgcatctactcggccctcattctgcacgacgatgaggtgacagtcacggaggataagatcaatgccctcattaaagcagccggtgtaaatgttgagccttttgtggcctggcttgtttgcaaaggccctggccaacgtcaacatgtgggagcctcatctgcaatgtaggggccggtggacctgctccagcagctggtgctgcaccagcaggaggtccttgccccctccactgctgctgctccagctgaggagaagaaagtggaagcaaagaaagaagaatccgaggagtctgatgatgacatgggctttggtctttttgactaaacctcttttataacatgttcaataaaaagctgaacttt

SEQ ID NO: 666392 - DNA, 704 bp, Homo sapiens
  misc_feature (362)..(362): n is a, c, g, or t
ccccagttattaagatcatcagttaatacacagaattgtgtttccacggtgtctattagcctgccatggtttaaaatgcgtttacaccataacatgtcgatgaaggctaatgatgggcttactacagaccagaaactgttctgggcacataggttctgtctcattttagctcaccgtctcacaaatagccacaggcagatgcagtaggctaggggatgccggggactgcatgtaggctgcctaaatttacatccgggtccctcaacctgtgcagcctgtgccaagtcacttaatctcgtagtgtctcggtttactccactgggaaacagggacaatgatgtagtcttaaagtaagggttgtnaagaagcctggacatcatagacagtgtatacatatttgatagcctcatttttacaggtaaagacactgaaaacagagatcaaagtaactttaactcagggtttcccgggctgtaaatggtagccctgagatctgaccccaggcagcttaactggagaacctgagttctaaccactaaacgcaccacgggaggaacatttgaatatttatttattttttttaacatttgaatatttctatgaggccttatgatgcatactttgacccaagattgcgtgttaaaccatttccagtactgaaagatatttaaattgcagtcaaaaacgcccaatagaatattgcc

SEQ ID NO: 666393 - DNA, 241 bp, Homo sapiens
ctctgtctctaccaaaaaatataaaaattagccgggcatggttgtacgcacctgtactcccagctactcaggaggctgacatgggagaactgcctggaacccggaaggcagaggctgcagtgaaccgagactgcgccactgcactccagcctgggcaacagagcgagatcctgttcaaaaaagaaaaaagaatctctaccagcatatatgcctaacatattaagtgtgaacttggagagga

SEQ ID NO: 666394 - DNA, 213 bp, Homo sapiens
gtgccttttttgggccatggatcaccccctgtaaggtactaaattactgcccagcctggggagatcaaggaaaggtttgcatagttagtaagttggggttagcttttgtgtgtgcatcagtgacttaaagttctgtaataacttattgttaaagcatgaagccctgttttttaacccaagtaaaaactgccttaaacctgttgatgggaatga

SEQ ID NO: 666395 - DNA, 429 bp, Homo sapiens
  misc_feature (64)..(64): n is a, c, g, or t
tggaactgacagagctggggtgaggcggctgcagcctccgccatctctgtggcccgccccctgntggtctttgaagtgcagcagcccttccttttggtgctttgggcccaacagcccaagttccctgttttcatggggggggtatatgaccccagggcctgaaacctccaggatcaggttagggcgagggatacctttccagcctcagttttcagttgcagccctggtgctgcctgcctggatttgggcccctgcccacctcctgcccagggtgcccgttttcccccaaaagggctccctaagggtttgggcaagggacctgttttttttagcccttttccagggccctgccatgctttccaaacccctttttgcagctttttttggttcaagttcccccgcctctttaaataaaccctgcccgcccca

SEQ ID NO: 666396 - DNA, 516 bp, Homo sapiens
  misc_feature (362)..(362): n is a, c, g, or t
  misc_feature (492)..(492): n is a, c, g, or t
ggcgagagcccctttcctcagctgccgccaaggtgctcggtccttccgaggaagctaaggctgcgttggggtgaggccctcacttcatccggcgactagcaccgcgtccggcagcgccagccctacactcgcccgcgccatggcctctgtctccgagctcgcctgcatctactcggccctcattctgcacgacgatgaggtgacagtcacggaggataatccagctgaggagaagaaagtggaagcaaagaaagaagaatccgaggagtctgatgatgacatgggctttggtctttttgactaaacctcttttataacatgttcaataaaaagctgaactttaaaaaaaagaaaaataatanattgataattcattgtggccgtcttgtcccacttggctctagacttgagccagcttatgcatgcggccggaattagagctcacttgctcaatacgccctatagtgggaggtattacaattcaatggccgncgtttaaaaacggctttacatgga

SEQ ID NO: 666397 - DNA, 313 bp, Homo sapiens
  misc_feature (61)..(61): n is a, c, g, or t
ggcaataaaatcttgctactgctcaaaaaaaacaaaaaacaaaaaacaaaaaaaaacacancaaatgttgctttactcttactgcaaatcagacaggagaacctttgtatctagctcagggattgtaaacgcaccaatcagcgccctgacaaaacaggccactcggctctaccaatcagcaggacgtgggtggggccagataagagaataaaagcaggctgccggagccagcattggcaacccactcgggtccccttccacactgtggaagctttgttctttcgctctttgcaataaatcttgctactgctca

SEQ ID NO: 666398 - DNA, 809 bp, Homo sapiens
agtcaggggccactagggaccaagaaagagtaggaagaaggggacgagccgggtagcaaaaccacctcagacagccgggccttctcagccttctccccgcggacagctgggtctccggggacccgtgggccctgggccgccatgcctggccctcccgctgcatctcagaccgtgacacgccaacggggggatgtgggtggcctgtgcccagacttctctccctccgtccacgacccacgctgcatcgatgaccgacgccctgtggagtatcggcagataaatcgactgggagaaacaaggaggataagacaatggatgaggagaggaaggcaccagtcacaacaaggaggagaacatgtaagaagaccatggtgcgacgacgaacaacgacaccaagaacagcggtcagaaatagcaagagcgacaaaccgaccacacgggggccaccagcacaagccagcaccataacagcggcaaacacagaggcagccaaacgaagagacagacattaacacacgggaggaaagaccacacagacaaaacgacgacacaagccatcgaaacacgaaacaagcaggaagcactccccacgggaaaagcgcacgcaatagacacagaggcagcaccagatgcccgcacacagcccacacgaacagcgaacacagaaaacccggcgaaacaaaccacacaacaagagaacaacaagcgggcaaggacagcacacaaaagcaaaaacacacacacaaagaacgacacccagaacaacagacaccagacaggaagaggaaaaaaacaacaaacagcagaga

SEQ ID NO: 666399 - DNA, 613 bp, Homo sapiens
agcgggcacatgcgcggcagcgtcttttccttcttcctccacttcccctaccctccaccgtccgggagccgccgccagcgacgccgggagtcaggaagttcaagatggccgccgcggagacccatcgctacgggagcagccagagatggaagatgctaattctgaacagagtatacatgaagacacatggacgaagtatcagaagaccagtctcaaaataagcacagtcgtcacacaaaacagaagcataaacacagaagtaaacatagagaaacataagacatgcctcagaagaagacaaggataaaaaagataaacataagcagtcaaataagaaacacaaaagaaaagaggttatcgatgcttctgagtaaagagggtatgtctccagacaaaaagaactaaacttgatgatttagctttgatagaagacattggacaacacagagagccttgattaacggacgaaattgataatgagttaactggaaggcaaggtccagtcatggtatggggcatcatttagcaaggatgtatgagtctggcatctgaaagaagaggggagaaattcatgaaaaggcaagaaatggaaatagggtctacgtcactagga

SEQ ID NO: 666400 - DNA, 339 bp, Homo sapiens
atgagtgcttcactaaggttatattttaaagtagaataacacactgctgagtgtaaactggctttggcattggtcagctgcacgtagtacaacaacagcatagaatttgagacaactaaaactgctatgacgatagctactgagaaacctaaaactgctatgagatagaaatgatgtaaaattatgtggccagttttccctcatatactcacatacagccttcgaagggctctggctctgaccggttgatggccttgagacgagatgaaatcatgacaattgagtcaaatcaatttgacatagaaatgacaagaggaaactcttaaatacctaaaaaca

SEQ ID NO: 666401 - DNA, 771 bp, Homo sapiens
ggaggcaccggctggccagtgatacatgtctaagcggtcgggtaccctaagcggtgtcaagaggtcgcataatcactggtaccttaatagtagggacctgttatgaatgcgttccagcgatgggttcagtctgtactcttactttataatccgagtgaaatggacctgcccgtgaggaggcgggcataaacgacagcaacgatgacgagagacccgtattggacgcttgtacattctatatataatgtcgacatgcagttaccgtaagctaaatcgccaacgaaggtcgctgagaatctgacctaaaccatgaccgattaagagagatggtcgggtaggggcgacctcggacgcagaagccaacgctccgagcgggtacatgctaggagttcgtcagtcaacagcgaaactactagtactcagattggactccagataacgttgaccaaaggaacaagttaccctagggatgacacgggcaatgcctagttcttagagctctcatatgcaactagagtacgggttctacagaggctcgtactgtatggatcgaggatcatcccgatggtcgctagcgctatgtaagaggttcgttggttcaacgattaagagtcctacgtgatctgagttcacgaccggagtaatccaggtcggtttctatctacttcgagattcctccctgtacgaaaggacaagagaaataaggcctacgttcacaaagcgccttcccccgtacatgatatcatctcaacttagtattatagccagagc

SEQ ID NO: 666402 - DNA, 121 bp, Homo sapiens
aattcgcggccgcgtcgacacggctgcgagaagacgacgaaggggagtctgatgatgacatgggctttggtctttttgactaaacctcttttataacatgttcaataaaaagctgaacttt

SEQ ID NO: 666403 - DNA, 387 bp, Homo sapiens
ggggcgttggatattgggtatggcacgggtatatattgataattgtcgtgatgaaattgattgccccttagatagagcagactacctgctaggtgtaaggatgaagatgtgttagtgtctacaggaggctccaggatgggagtagttcccttgctaatcggagggtagactgtacaacctgtttcctgtctccggcctccactattgcagatgtgagctcggagtcggagagagggaggtaagagtcagaagcttatgttgtttatgcggggaaacgccatatcgggggcaccgattattaggggaactagtcagttgccaaagcctccgattatgatgggtattactatgaagaagattattacaaatgaatgcgtccgtcgaagt

SEQ ID NO: 666404 - DNA, 571 bp, Homo sapiens
aattcgcggccgcgtcgacacggctgcgagaagacgacgaagggggagtcaggaagttcaagatggccgccgcggagacccatcgctacgggagcagccagagatggaagatgctaattctgaacagagtatacatgaagacacatggacgaagtatcagaagaccagtctcaaaataagcacagtcgtcacacaaaacagaagcataaacacagaagtaaacatagagaaacataagacatgcctcagaagaagacaaggataaaaaagataaacataagcagtcaaataagaaacacaaaagaaaagaggttatcgatgcttctgagtaaagagggtatgtctccagacaaaaagaactaaacttgatgatttagctttgatagaagacattggacaacacagagagccttgattaacggacgaaattgataatgagttaactggaaggcaaggtccagtcatggtatggggcatcatttagcaaggatgtatgagtctggcatctgaaagaagaggggagaaattcatgaaaaggcaagaaatggaaatagggtctacgtcactagga

SEQ ID NO: 666405 - DNA, 514 bp, Homo sapiens
aagcttacctgctatgtccttgggttcgttaaccatcgctgaaccggctatgatcgccgaatgtaagacgcgtaccgaagttttcgaaatctcgagacgtttgattgaccgcaccaacgccaacttcctggtttggccgccatgtgttgaagtccaacgctgcagtggttgctgtaacaacagaaacgttcagtgtcgacctactcaggttcaactgcgtcctgtccaagttcgtaagatcgaaattgtacgtaagaaaccaatcttcaagaaagccactgtaactctagaagaccacctggcatgcaagtgtgaaactgttgcagctgctcgccctgttactagatctccgggtggttcccaggaacaacgcgctaaaaccccacaaacccgggttaccatcagaactgttcgcgtccgtagacctcccaagggtaaacaccgcaaattcaagcacacccacgacaaaaccgctttaaaggaaaccttaggtgcttagtaaggatccgaattc

SEQ ID NO: 666406 - DNA, 817 bp, Homo sapiens
  misc_feature (308)..(309): n is a, c, g, or t
  misc_feature (663)..(663): n is a, c, g, or t
  misc_feature (793)..(793): n is a, c, g, or t
agggtgggtaggggaaaacaatttcccccgagaacaattttgctccttatttcccccagccgaaattacaccctccaaaagggacaaaaggtgggctcccccgcgggcgcgcccctttaaaaaaagggatccccggggtccagattggccaaaagccaagggtggggctcttcaagaaaaataaggtgggttgggtagggccttcttttatcggggaaaaagccggtgcggaagggcaagcctaaatttgcccggccaagggctttgtttcaaggttgcccggcattaaatgggccccctttttgccnnaaaataaggtacaagtcccggaggataagatcaatgccctcattaaagcagccggtgtaaatgttgagccttttgtggcctggcttgtttgcaaaggccctggccaacgtcaacatgtgggagcctcatctgcaatgtaggggccggtggacctgctccagcagctggtgctgcaccagcaggaggtccttgccccctccactgctgctgctccagctgaggagaagaaagtggaagcaaagaaagaagaatccgaggagtctgatgatgacatgggctttggtctttttgactaaacctcttttataacatgttcaataaaaagctgaactttaaaaaaaagaaaaataatanattgataattcattgtggccgtcttgtcccacttggctctagacttgagccagcttatgcatgcggccggaattagagctcacttgctcaatacgccctatagtgggaggtattacaattcaatggccgncgtttaaaaacggctttacatgga

SEQ ID NO: 666407 - DNA, 484 bp, Homo sapiens
ttcgtagtaattgagcgagcccagaagatgtaatgtggaagtgaggtagatacccatttcctacttgggtgctggataagataccaaagaattaatcaaaacgttttatttgctagcatgcaaatcaagaggttccaatcttcgtgttcactttaaggtatgcgattcatagttgtgatccaacagttcctcatgtaccactcaaaaaaggtagctgcagtgatgactttcttaggacacctttgggatttaccgtgaaaaatcagataaaattctgagcagccaccttatatttaggcattgatgatcagggttgtaaggatgtagcgtttgtgacattgagaagtagtaccagaaaaaccatttgaaaagcctaagtgtgcagatcacggatggggcattttaactggtaataccttgattgatggaatttaaacggtttaaacgtggataactgggggtttgggggtctcttcaaggttta

SEQ ID NO: 666408 - DNA, 648 bp, Homo sapiens
gaggatatgtacagcttcctagcaggacatgggcttgaaggcattcaccagagctcagagattcgttaacccgatatgtgtccactacgccttacaagcgaggtaatgaacactgcatgagacctgagggtctacgtgtaggttttatagagtcatgatgtaactgggaagtaggccattcacgacctggtgccatgttgaagagcctcgacacgggtagacctgtacgaaagtacttcccgtgagacatggatctgggattgggtggtggtaaactcagcatggtgtggctcgaggtacggagtcacagtccctgaccggccatcaccgacgtggaacggtcatggggcccttcgtgcctgtctgaacgatgctggagctatggttatctcttccaactgtctctctccgtagaccttccagcaccttctttgatggagcgtcacaatgtccttactcatgtgattcgtggagaggcctgtcatacatcaaggccacgggcctaaactaccttcccaaatgcatccgggtcagtgtgcagctggaagcctctcccgacttacctagctgtcccagtggagaaggaacaagcgcctcactgcatctgtgcaaacggggcggcaaactgtgtccctgggcagtaaaccc

SEQ ID NO: 666409 - DNA, 637 bp, Homo sapiens
  misc_feature (39)..(39): n is a, c, g, or t
  misc_feature (160)..(160): n is a, c, g, or t
  misc_feature (281)..(281): n is a, c, g, or t
ccccccccacttctgtgaaggagagggagggggggtttncccccctcccccccccttcttcctggggggggttttttttttctttcttctccccaaagagggggggggggccctttggggttttttttttttttggggggggggcgctcctttttttttnttttttgttttgttcgccccccccttgggggggcccccttttttatttataatctctcataagagaaggcccccccccgaaaaaaaaaaggggggcccgcgccaaaagaagagaagggggnaaattttttgttctcctccttccttttcccccccaaaaaaaaaaagtttggggggggggccccccccacccccccccgggggggggggccccccccctctgaaaaaagcccgccgggaagacctctctttcccaaaaaatttgttgtgggggtttttcggcgcgccccccaattttttgtggggggcccccccttggggcccccccaaaaagggccctttggaaatttccccccccccccccggaggggttttccccgcgcccccagggcccaaaaattttcccaaaggtcctgaagggcccaaaatggttttaaaaaatttttcccgttttcctccaacaggctgttttgttatt

SEQ ID NO: 666410 - DNA, 125 bp, Homo sapiens
cttctcgcatactggaggggcagccatgaaaactccaagcgccccttgagcataatgaaggagatgccccaggactctccacgtccaagaaactggtagggatcatggctcactctgaagtccta

SEQ ID NO: 666411 - DNA, 950 bp, Homo sapiens
agcggggtccagccggcggtttgagggaaatgcccaagggaacaagggtgtttaaaaaaaccaaaatgggggagtatagagagggaactggggcccgaatgggccgaaagccaaggtctgggcgtgaactggtgccaccagcgccccagcgacaagtctggtcaaaggcttccggggatcttccctggggccaaagcgcaccaaggggagccagctgcccccaaagcgtttgacccgtaaattagagaatgatcagcccgggggaggaagtgtaaaatctgggagccactttgaaaaatcctttccagtgaggcaccataaaaaagttgccccctcgctggggccccctcgcccaggtggaaactgtttggcccgtgagtggtgttaattgtgcttcgtgttgtgctgaaatactgtctgtcatagagttcccctccgcaccactcccccggatattttaatgtatgtctgccctccattagtgtgtgtattgaagctgctcttttttaatagggcgtctgcaaactcttggtgataccgggatatactcgtgatgttataaactcttgtgagccaccccagaggaggagtgtagcacccccttttaacacgtggccactgcaccactcacgaggagaagagaactcgcactgtttgttgttgagtgagtgagaatataaaatgctacgcggagcacagtcttttttactggtgcttaagctcttctgttgcacccaaagctttaataaaaggggaatttccaaaggggaagccccttaggaattagagagttttgagggacagcccttacaggcctttattaagtatgattgattgttaaatttcagggagacatgattggtttgctgtgtatttgaattcatgtaaccaagaactgttacgatgggattttgctcattttatttaaaaggtactgacttgactttcca

SEQ ID NO: 666412 - DNA, 326 bp, Homo sapiens
taataccaggttgccatcccaggaaagcgagtaggaaaagcccaggctcgagatcggcttgcgcaatcgtccaagtccgtccccggtccgtcgaccggtacagcgtgttccccatggaacggcccaccgtcgattgcggatcccgataaaagatgtttgcttgcaacaagagcagatccggcgtgcgcggattcgggatgatcgccgccgcggtaaccgattcaatccccagcgtattggccgacggcactgccccggcaaccgtccaagtcgcaccatcgtcgctcgataccgagaagccggccggcgccccgggattggctgca

SEQ ID NO: 666413 - DNA, 208 bp, Homo sapiens
tagagcaccccccgctcagagcagtcttaaaggggtcttgtcttctggaatcccttaactagaggatcctctccagagcgtctgcaatatagtctttatttcttcagaacatttagtcacttgttgtctctgcaacttcacttctttgcgaagcgccacaattcccttttccagttttcccttctttggcaatcctccgaggtgaggg

SEQ ID NO: 666414 - DNA, 760 bp, Homo sapiens
cgacaacatggcacgagaaggcggcatgtgatatcctgaatcattgtgtatataactgtattctcagagctgctgaggatcgtacggcctggtgtaaccacacaacagaacagagctgcatgaaattcgccaccggactgtatctcaaatcatgacccaatgacctagcggccatacggtgggatctccttgagtggaagccctaaatagcgttggaaaatactagtatggatcccgatcgctggccaccgtatgcgcaacactatcacagatacaacagtaacgataccttcgcacattcactatcaccacctaggtaagcctcctacacacatcttgacactgcaatactaaccccaccgcccttcatcacaaaattacatcacgaacctcaagactgacagttaccactctaccaccatgactcatcagttactactcaccaataacatatgaccaactacttctattaacccttctaaacacctaacatgacaccaaaacaaagacaaataacacccaacaacaaacactacaacaaaagaccactaccgtaccgtcatacacgaaccaccgtggtagcacctctgtaatcccatcccactttaccactcaacacctgcatagcggcgacaattaaccttacaatgtacagggggaaggcaagattccaaatacaattcacattgacacagaacattaacaggcaatagtggatcgagcaaatacagaaactccggacaacataaattcaccctca

SEQ ID NO: 666415 - DNA, 256 bp, Homo sapiens
tactctatggtcacaaactcaggggtttgggactaagtaaaggcggatcctttagtgtagatcatgtcactaagaatcacacctcatccgttgcttattatcatttttccaatctgcgtgccccctcacggtccaagattctgttagttcatagttacatctttagtgtgtagcatagtgctggggatacaagagttcatgggaatacgtctctcacagtctgcattcacccagtatgcaggacaaaaaaaaaaaa

SEQ ID NO: 666416 - DNA, 939 bp, Homo sapiens
ttcacgaatagatgctgcggtaggacttcgttgccggagctcgactgattagatgtttgaagtgattgatcatgtgagtctatgatggttggccattgggtaccttgcgctgtgggtggaacgagtggtaatctactggaatgtatggcatatactcggtgtgcctttttgtgctgcgcttgaattaagtctctgcgcagacactggaaatttactaagctgcacttgagattagctacactagcgtgagttcaacggacaagtggaagttgaacctttagatatctctgtcccctaacatgcacattgggatggatagtccgatcctgtccctccttctggagatttaaatactgaaggatgtaatttgtacctggaagataaggggtctaactactctgcacagggatcggacttctgtgatgtcttgcatgaatgtaggagtcatgggagtgctagtgagcggtaggagagtgctataggtgctgaaatgaattgtgagatttttcgtgtagattgtgcagtggactggttgggttcatgttagaacatcctgtccgtgaaagtgcgattgtgcatagtagactttgtttagcttaccataattgacgatatatatggcatgtgtgtgacaccaaaatccatgaaaagctcaaaagcaacctagagtgtggtacctgtcattgatgagcgaattagaattgtgggctgccgaatcagtttaggattcctagctctagtataggggactgggcagctgtgttgaggcggcgcccttggtataaccatttcaatgccattttgaatccaattgtttgggggcctccccgggtagagacacgtctcatgggttgggccggttcccccgttgaacccgcctcatacttggggccaattgccgttgacaccccacttggatagagcccggaccccacgctc

SEQ ID NO: 666417 - DNA, 340 bp, Homo sapiens
tagagactgagtctccctctgtcgcccaggctggagagcagtggggtggatttggctcactgcaatctccgcctcccaagttcaagcgatttttctgcctcagcctggcaagagctgggattatagataggcacatgccaccacccgtggctaatttttgtatttttagtagacacagagtttcaccatgttggccaggctggtctccaactcccagcctcaagtgatccagccacctcagcctcccaaagtgctgggattacaggaatggcctctgcgcctaccctattttatttttttcgtgggcttgtttgtttgtggcctatgcccccttcttcct

SEQ ID NO: 666418 - DNA, 1177 bp, Homo sapiens
tctgggttgagcacagggaactttatggagggtccatgaaaagggggggttccctaggcccctcccctcttcagaggggttctactgtggaaacgtggtgaggaggggagaattcaggtggtggggggggcacgtgaggtgtgtggcggggactccccagcaggtgagggtctctctcttcctctgggtgcctctgcgggggcgtgggggctccagggggggtcttaaacctccttgtgggggccattgtgtggcgccattagaggtccaccacctctgtgttggcttgttacccaaaatcggtggtacaataccagagaaattgagctttgaacaaagggggtcgtggaaggggacaagggcacagccccagggtgctcaaagggtggaagagaaggggggtgttcgcgtggtgaaaagcctcagagagggaaaccacgcgggggggccccaggtggtagcccaggaggcccttgggggggcccttcggaagcgccgtggttcaaccaccttttgtgggaggtactcaatatttggggaggggttcctaaaagggcgaggttcaggttccaccatggacccgtgggcaggggggcacacggaaaggggccatgcctatgtgaactttcccgaggtaacgctacagggattagccttttgccaaaaagctttggggactggctgccaattaaaacgggagggaacataaacgtcctggaaaaagcccccgggggcatataacgccacaagattcccccgcgagggggggccaaccccaaagttccttcagggcggggagcaagagattggcactggactcggagggcccaagaagtcttccaacgaaaacccaagttgtgactgggatagacttaggacaggggcggtgcaacaccattggtgggggcaaaaaggaactgtggaaaaacaaagaagggggggaaacctcgcagggagacaaccctaggagacaactggggccacacaggggcataatagcctctggggcccccgggaaatgagccacgattcacgggggaagaaccgggaccaagaaatacgacacagcccagatattgggagcaccggaaaaaaggaacagaaaaggcagcaacaaaaacggaaaggaaacctcaaaggggccaaagaaagggacaaaccactcgaggggcaactc

SEQ ID NO: 666419 - DNA, 479 bp, Homo sapiens
tgggggaatagcctgagtccaggaatgcgaagaccagcctggcgaagatggcaaaacccacctctgaaaaaatacgaaagttggcagtcatggtggttgcgcctgtggtcccagctacttaggagcttagggcgggaggatcacttgagccctggagtgcagtggcatgatctcgagtctcggctgcaggtccgcactccgtgggttcacgccattctcctgcctcgtgcgtcccgagtagctgggactacgggtgccccaacaccatgccgggctacatttttgtcttaaaagtaggagagtggggtttcacgatgttggccaggatggtctcgacctcctgacctcgtgatccgccgtgcctcggcttcaaaagtgctggattacaggtgtgaggcaccacacccagcaatgtgttcttaataagtatagtcgctagggaaagtaactcatttttgtctagtacatatatgtacata

SEQ ID NO: 666420 - DNA, 108 bp, Homo sapiens
  misc_feature (108)..(108): n is a, c, g, or t
gtccccggaccgccggtatgagcgccctcgccacccgtgtcccaggcccggcctttttgaaagagctagctcgggttcctggggcacttcagttttgtaatgtttgan

SEQ ID NO: 666421 - DNA, 1026 bp, Homo sapiens
  misc_feature (489)..(489): n is a, c, g, or t
tatcgccgctcaagaccaccgcggaagaaccacgggccgcgccgtgcgggtggtgctgcgcaccgtggatctcccgtggcccgccagcagacgtttagtcttcaccgacggggacgaccctgagctcgagctcctaggtcggggaccggctggtcatcaagctaccaacatgcttctggcggatgctgctactcggtcagggcccgtcgtgcttgctaaggatgtccggatggaagtattgacgacagttcacttcgagtccggggcagcaatgtggtttttgcgctacgtggactgatggacgagagttgaatgatgaatgcgcccagtgtagtccatccgtgtccgaccgtgcgtcgtctcgagacttcttcaagcgcccagtcgctaagggaggtcttaccatgtgtggctggcctcgagccttgtggaaaccagtcaccatttgattggccaggcgaagagtggtccagtggttgggcagatggntgtgatccacggagtcgaaagcttctaggtttgtgcttgacttggtgggaggcccgcggttctagccatccacgccagcaaggccgttgccgcgtcagcgcgagtgagctcccatggtgcctaggccttggcgtcgatggcttcaatgaggcacgaggctgcagcgagagttgccggacttgccgggaagtgactgcatgcaggttgggcgtacatcggtggcacagggcgtcctgggtcgcgccgacctggcgtgccacagggcccctgcttgccaatctacagccgtggagaagactgtcagagggcgtgccgaacgcgaaaaccacctgcttccaagcaggtttagcctttgtaggccactggcagggtcctgtagaagacctgacatcccgtggttgaacggtgggctggagggcttccaggccgtgcgatcaacgaacgccaagaaccggtttaaaggtcggtatccaatggtcttcgtggtaccccagacaccggagctggggtcccagggcagacaacagggggccccga

SEQ ID NO: 666422 - DNA, 153 bp, Homo sapiens
ccggttatgtcttacggagtgaccccatatcactcatagtttaatcccattaactccatagtcttcaacatgcctttgttctgtcccttttggtcctttaagggccgcacctgcggtatatggaggttccccggctaggggtctaataggagc

SEQ ID NO: 666423 - DNA, 684 bp, Homo sapiens
gagcgggtgtatccgctggtcgatagcagccgggctggtcctgctgcgagccggcgtgccggagtggggcggcgggtaagtgggcacgaacgcggtggacgctgtacagttgccttcgtcggtagggaactgctggcggcctacggggtcgtcctgagagggaaaagcgggctccggctgcaatctgcggcgccctgcgtggacgtaagagccaagtggcctcagaggctcgccccctacgcaaatcctcgtttgacttgccagggtcctgacagtgatcgtgctggaccgcgagaacggacatggggcgggcttggcgggaggcgcttgaggtggtagcaggaggcggcttttgctgagttttctctggaccagaagcgctcgaggctgtccgtgtctacgcagtggtgggacatcccctgagtgggcctggctgtcggagtctgccgtctatcggaggcaccggtcgactggcagagccaacatgccctcttcatcggactgtaaggtcattgtttgccagtctgtggtgcagcgctggcaagctgggggaagaggttttctgtgttggaataggatgagtactgagcaggtttgccttccagactgagatgtaatttcaggcctccatctgtgagaagtgtggaaaactatcttgagtggttggaatgttctaggtatgac

SEQ ID NO: 666424 - DNA, 468 bp, Homo sapiens
  misc_feature (76)..(76): n is a, c, g, or t
  misc_feature (96)..(96): n is a, c, g, or t
  misc_feature (98)..(98): n is a, c, g, or t
  misc_feature (101)..(101): n is a, c, g, or t
  misc_feature (106)..(106): n is a, c, g, or t
  misc_feature (115)..(115): n is a, c, g, or t
  misc_feature (246)..(246): n is a, c, g, or t
  misc_feature (260)..(260): n is a, c, g, or t
ctacttctactggaatggttgggtcccctgaccaggatctccaggaagctgcagctggttgtatatccaatatccncaggctggggggtgctacananaanacaanatacacttnaaatttaaatggacattacaagctatcaaattctacatgacacaggacatgtcactcccatggccagaaagcctaaattgggaaacagttgttagcaaaccctttcaaccatctaaatgagagcaggcaanttgaaaatgcacanaatgttaatcatctgaaaattgcatggagacttttgtttctatttaatgttttcgagatatgacatgtgataagatggaagggcaataaacctgtgataagtttctaagaatatgagaatatacgtgtatgatggatttttagttcagggatgcttttgtatttggggcggatttaataaagggcctggcctcgttggcctcagaggg

SEQ ID NO: 666425 - DNA, 887 bp, Homo sapiens
agctggctaccaggtccaaggcacttgctcccagctgacatccaggctcagtttgccgatcagccgggagctagatccggaacatctacaatagcttctgcagcaagcttcgcgaccagggccagagcggatcgcgtcgcgggccatcgacaatgcggcagatcttctcatattcgtggaatggagctaatgtgcaatagtggtctgacacgaccccgctgccctcctgcgcgtctgctctgaatagcagcaccgtgggggatccctgtaagcatggctctgaaatggcctgtctgtggaatccgcgctgctcgccgacaaggctgcacaactagggtaagcaggaagagaacgacgtggtggagaagcttgaagcctcttcttggatctgctggcgagtcctataagtgacctagtgacgagccggcatagcgaacggcgcgtgtatgccatcacacggcgagccacgacggtgcccttgctacaaggtaccaggcctcgatgaagcagcgcacgatgcatgacgcgaccaccgcgacaggaaccgcgaagcgccggaggtccgtgagaggccgctggaggtcccgcaatcgctgggagcaggcagaaacgcgacttcagacgataggagctagccggagactacgttctccgctgtcactggctgcagcagcgagacggcagctcatccagcgtcgtagcgtgcccgctcagcgtcccgacatcctccggcgccgttcggtcagacgtctcagaatccaaaggtgcacaatggacgatggagccaaggtcgtggcaactgatcctagagggccacaaggctcgaggcttttcctccttctgcggtggacccacactcagcacccctgaccccaccgtgcttcccg

SEQ ID NO: 666426 - DNA, 358 bp, Homo sapiens
gcgatgtggcaggccctgactgggaggtgggagtgtccagtgcctctgtgcttctcacgaactgtcgcggtacccatggcgtctgccaatcataagaggagcccaggcttgtgtgcaccccaatacccatcatgaatacccaagttctggggtgggtccaaagtcgcgcatccctccaatccctcatagaccgtgcaggtcacaccatgccccagcccagtcctcactgtgacctcattcatcgcccatagcccaggcctgaggccatgcacttgcggtcatcggctcattcacagtgaaagcgccttgcctggtgacatgggcagctggtccatcctggggtggcccggtacatggc

SEQ ID NO: 666427 - DNA, 292 bp, Homo sapiens
ctgagaaagggactgagcatagtactttgcctcggcttccttttctccatgatccaatcgagaagagaaagtcatcgaaacaacttctgatcagcatattgggtcatgtaacgctggagtctgatcatgttgtcagtctgctccacactgttgtgtaccagtatatcagaggtcacagtattatctctgcctagagaagctgcccacagggtccgggccttttgaaaaaaagaggagattagagatctgatccatgggcctcgcggacgggtgggtaaccgtagctcgaatt

SEQ ID NO: 666428 - DNA, 179 bp, Homo sapiens
cagtttgatcagtatcagctttggtcgatggaccttgccttcagttaggagacaggccatgccttgcaagtgctgcagctcactgatttcatcctctagtttccgcacagtgcccaccactaagtatgtccgacaagcctagcagaaggcagacctccatactcctgtaccgcccgggt

SEQ ID NO: 666429 - DNA, 433 bp, Homo sapiens
  misc_feature (19)..(19): n is a, c, g, or t
  misc_feature (29)..(29): n is a, c, g, or t
  misc_feature (33)..(33): n is a, c, g, or t
  misc_feature (35)..(35): n is a, c, g, or t
  misc_feature (417)..(417): n is a, c, g, or t
gttgctgcctgcggtaatngaagggggtncttncncttccccttggtgggggacaaatcctctaaggcccaggtcatcctaaggactggaatttaagcctacgggaagccactggggaattatgtgttcatttgagttggctgctgcgtggaccgactacgctggggcaccagtggaagcagggaggggagaggctactgaagaagctactgcagctcttcaggtgagaaagggctggaggtacagatgactatgccaggctgtacagtgaaggaagagctagcgggaccaagaataacaagactcaggactcccaggaagctgagagggaaacaggaaagttagggatcatgcctaggtttctagccagaattctgagagctgccaccaacccccaagggggagaacctagttttnccccttgggggggggg

SEQ ID NO: 666430 - DNA, 200 bp, Homo sapiens
agagcttcttggcttggaagagatataccaagagtttccgggaaaggcaagctttgttccaggtgaatcagtgctaacctggttagaactgctgaagagaggatcagaggaggagctgactaagaccagcaaagccttaatgtgcaaacatactgtgctatgatgtactgcattgacctaccactgcgaaaattcattcc

SEQ ID NO: 666431 - DNA, 716 bp, Homo sapiens
gtgacgcgtgggtcgactacgagaaggaaagctcctgtaaacctgttattctggaaagtaaagcagaggtagagggaatcaaatgttccaggtataggacctggctggagttccagcactctgatagcaggaaagtgatttaatcattgacaggaatctttcctagagatggcggagaaggccatgcccttccaggattttatctgctactagatatttagagccctgagggctgtccattaacagatagatactctggtgttcccatactccaaataggagcaagcataggctaatgactctggctcccgcaaacctgtgtgcttacatgctgacttacagttactaacagggcacaaatcaaaatcttgcgagagtcacaggagccactgaaccaagaaagaccatgacctgcaacaactgggtgggacagcagattacgcacaatgagacataccaaagagtgtacagggtccgttacataattaggagacgatgaggcctgtactaccatattcatagaccaaacaagctgtagcatgctgatattcaaacgtgggaatacacacatcaagcatctagacaacatgtaaacaatgaagcttgccaatattgacaaacactacgtttagcgcaatggacactgagcaatagatgacaacacaatcaaacacacacaagtatatacctgtcaccttcccctactaagaattacg

SEQ ID NO: 666432 - DNA, 188 bp, Homo sapiens
caatctggcagtgtacatacatggtcatagctagagatgaacattaactgctgcagcggctggcagacggggccatctgacctctatgccatggtggtggttctctctgaagtgaggaggcaggcaggaaatgcctgagccggcacgcggactgtgtactagaatcccagcgcggcccaaatttgatt

SEQ ID NO: 666433 - DNA, 116 bp, Homo sapiens
agtggtgcgacgccctaggattcatctttcttttcaccgtagtcggctgctggcattgtataagcaacttcatcactagacatcgtactacagcgacatgtactacgtgtgtcgcc

SEQ ID NO: 666434 - DNA, 150 bp, Homo sapiens
gtttttttaaaaaacccccccttccaaaaatgtaacccaacggaattgttaggatatttaatgtaaacttgttttaacaactcttttcaacattttggccggggtattccccggaaccaaataaatttcatgggtttttagttgttttta

SEQ ID NO: 666435 - DNA, 221 bp, Homo sapiens
ccccccccctttttttttccccctttgaaaaacccgggcgccctccccccccggttttttttttgggccccggggggggttatttttttcccccgggaaccctttttcccttttcctcttttcaaaaacttttttttgtgcccctttaggggggccccccccgggtccccccccggattttccgggtccccccccccctcccttttaattttttaggcgga

SEQ ID NO: 666436 - DNA, 107 bp, Homo sapiens
  misc_feature (104)..(104): n is a, c, g, or t
caacgtgaatccagagtaggagggatcgggtagagggctgggctatgatttgctttccttggcccagttggtgcttgactgatagaataaatgacttttttgcncca

SEQ ID NO: 666437 - DNA, 255 bp, Homo sapiens
ggatataaggacttgaacaatcattagaacgagctacttttgcacatactctaaaacattatataaacagggccaggcatggtggctcacatctgtaatcccatgcaccttgggaggctgacagtgggcggatcatgaggtcaggagtttgagaccaacctggccaacatggtgaaaccgtcttctcttactaaaaatacaaaaaattatccagcgcatgcgtggcgtggcagcctgtagtccctagctactcgc

SEQ ID NO: 666438 - DNA, 334 bp, Homo sapiens
tggaactggaggctattatcttaagtgaaacaactcagaaaaaaataagaaaataaagatttttaaagaaccctcagaaacaaaaaaaaataccacatgtttccacttataagtgggagttaaacagggtgtatacagggtcatggagtgtggaataatagacactggaggcttggaaaggtgggagggggtgagggatgagcaattaccttttgggtacaatgtacagtatttgggtgatggttacactaaaagcccagatttccccactacacaatatatccatgtaacaaaactgcacctgtgaccaggtgtggtggctcacacctgcaac

SEQ ID NO: 666439 - DNA, 311 bp, Homo sapiens
gtttgtggttgtagcgacttgcaagtagccagtgtgagccgcatcccacacactgtccggcccacccctcgggctccatggcagctctttccaggcgcctgccctttccagtctcccagagaaagaaaggcctgggggaagcgggcggagagtgtcttatgctagggatcaggggtccaggaaggaaggggggcaaggggaagctttgggcccccggttcccaaagggggtttggggggccccaaggggggaaaaagggccccctttttcaaggggttttcccccccccaaatttgtggcccacccccccg

SEQ ID NO: 666440 - DNA, 1170 bp, Homo sapiens
  misc_feature (1)..(1): n is a, c, g, or t
nttcgcttgcgtcttgttgttgctatggtagtgaaccatagggggggcgtctcctctggtagccgatctttggagggtggctttgttgcaatatatgttttgtgggtggccacacacagtgtgccactagtgcttttgtgggctcgttgggtgcacaccccctgcaccggggggaagtgtgcactatgtgcgccgcgtcaagtggtcgccccgacagtgctaggtggtctcacaggtgtggctacgtccacagagtgtgtgttttggcgctccctaggtagcgtctccctcatgaggcccccccctagtctgtgtacgacatatgcgtactgtgggccgctccgagtggcgccacaggggcctctacagactgggcctcatgtgtgtccgcctggccctggttgtgtgggcgccccctggtgacagttgccccaagggtgttttgtgagagccgcagactcacacccgcggggttttatgagtgttgggggcgaccctctctgggtgtttcggggttgtggccgctcgtgagagaccccctgtgtgggtgtcgtgtgggcgtgccacgtgtggtttgagacagtgttgtgggggcaccacacactgggggtgttctttttgggcgggtggttgaaggggcgccccccgtgagagggcctcttgtgtgagagaatatccgcgctgtctgtggggctgtctgtgggccctcatggccctctgtggtgcgctgcacctcggctgtgtgttgtgtgttgatgcgccacagggtgctctttccctcagcctgtctcccacaaggccgccagggtggctgtctaagaaggggccgctcggagaggcccactctcgggggcttgcctgtctgttgtcacggggtttcttataagggtgcacatgggtgcccccgtgccctgggaggcccccattgtcctgcccccactgccggacccgatagagaaccgcttggtggcttggaagatagttgccaacaccctatgttgtggatagggccgacttgggtgccatcgccagaccatgcccagcttagagagccatacgtgtgtagctggaacagataaccccttttgtaaattgttaagacccccaaatatttattggttttttaaatttagctcgccatgtattttttttaaaaaagaattatacccc

SEQ ID NO: 666441 - DNA, 720 bp, Homo sapiens
  misc_feature (36)..(36): n is a, c, g, or t
  misc_feature (151)..(151): n is a, c, g, or t
  misc_feature (156)..(156): n is a, c, g, or t
  misc_feature (158)..(158): n is a, c, g, or t
  misc_feature (215)..(215): n is a, c, g, or t
  misc_feature (221)..(221): n is a, c, g, or t
  misc_feature (224)..(224): n is a, c, g, or t
  misc_feature (240)..(240): n is a, c, g, or t
  misc_feature (280)..(280): n is a, c, g, or t
  misc_feature (291)..(291): n is a, c, g, or t
  misc_feature (309)..(309): n is a, c, g, or t
  misc_feature (415)..(415): n is a, c, g, or t
  misc_feature (418)..(419): n is a, c, g, or t
  misc_feature (432)..(432): n is a, c, g, or t
  misc_feature (445)..(445): n is a, c, g, or t
  misc_feature (483)..(483): n is a, c, g, or t
  misc_feature (489)..(489): n is a, c, g, or t
  misc_feature (501)..(501): n is a, c, g, or t
  misc_feature (547)..(547): n is a, c, g, or t
  misc_feature (616)..(616): n is a, c, g, or t
  misc_feature (622)..(622): n is a, c, g, or t
  misc_feature (630)..(630): n is a, c, g, or t
  misc_feature (665)..(665): n is a, c, g, or t
ttgggctgtctgtcccggggctgccgggggttcctngtgcttcctcgtgggcgtcctggtgcttaccccctggccactggtgtggtggtgggggttctcctggtggtccctagtggttgccttcctgttttttcttgttgctgggcgctcnggtgngnggggggggtctggtggccggttgttgatggtcattgccgcccggtaggttgccgccncggggngcntgctgtgtgggcgtcntggggttctccggttctcaccacccttgggccacgccgtnttgtccactcntgaggggttggtcaggtngaaggggcggatgatcgtgcggtagccgttgaagtcccctgccgggccggggacggcggaggtgctcttcgagctgttggtgtccagggcactgggaatcgcagcnttnnagccctcgaaatnggtgacgtctgcnacgaagcccccttcgcagagcattagggctttgttttngtaggnaatggtgcgatntgagccgccagacttggtgaggcccaggacagggagctcgtccgangagcaggagaagccgtagttccagcagctctggatggccgggaggtagaccagggaccaggacaccctnttgttntggaagangaagctggggtgttgtggagtctggaaggactggnaggggtagtatctgtagtcccccggggcttggaagtaattagaagaatatttgac

SEQ ID NO: 666442 - DNA, 1096 bp, Homo sapiens
agcgggtgtgctggccgttgtgcttgcaaatggggggaaatggatccggtcagccgaatacccccagcctcccggtgttgcgcgctgggctgaggtataaggagtcagcaatcgcgagaacaggcatgagggcgcgcaagagatccagtctcgagatgagagaagcggatacagctcagagcaggcaccaaaggattcccacctggacactcggcagagacggagagcagcgacactggcacgaaactgacagggaagcgagagcaggaggacggggaagacatacggacacggaaaaacacatgcagctaaggccggacgggacaaacgaaagaggtacactggatgaacgaggtaaatgcgggagacatcagcctcagggagacatatacgagccctggagtgacaccaacgaggggatatggaacaccacaccaaaaagcatatgggagagctaccaggagacgggaaagaggaacataatcagagacgacacacaaagtcaccacgatataagaaacgaacaataagacaatggaatacaccataggtgcgaagggacccagatagagggaaagacgagtagagcaaaatgtcacacacagagggaactataacaagacatggaaacggtggagacagtaggaacgataaacgacactaaagacaatacatgactagcgcctggagacgaagaggaatgcacaggcgaccaatacaagtctcaccccaagagacaaagaaaaaacaaaggagaacaaccaaaccccacaccatgttagggaggaacaaaggacaccacaagagtgaacatcgcaaacaatacagaataacacttagacacaagatggacaccatcaacgaggaaccccaagcaaaatcagacaacaacaatcaaaacaattggcccaagtaactaacaaagaaagacacaaactatgataacacggacctcaaagtgggaacagcgataagagaccaatgggaagacagtgagaacagacaaactaggacatgagaaccaaagcacaccaaaacagcagaaagtaaggattagcacaacagtgtaacaattacgtacggaaaacacacgagg

SEQ ID NO: 666443 - DNA, 121 bp, Homo sapiens
ctattctcacaggagtacgtagcctttctctctccaatccacagatctgggggcctcataaaacagatgttccggaaaactgggaggcttatctcactgagtgagcagaatctggtagact

SEQ ID NO: 666444 - DNA, 110 bp, Homo sapiens
ctgcggtgcctagaggactctgatagctgtctcatatgaagaccatgtatgctcatacgagacataacgactgagaggacgtaggatacgcagttaaacagtactggagg

SEQ ID NO: 666445 - DNA, 166 bp, Homo sapiens
acctctaataaatttctgtccttcagatggaactctttaacttctcgtacaagtcatatacctatataataaagctactgatattcctttggaggcttttctttaagataatagtttacctgtagtagtacttggaatctagggttattaactaataatgggcttg

SEQ ID NO: 666446 - DNA, 941 bp, Homo sapiens
  misc_feature (589)..(589): n is a, c, g, or t
ggcggtggctcccgcctgtaatcccagcactttgggaggccgaggtgggtggatcacaaggtcaggagatcgagaccatcctggctaacacggtgaaaccccgtctctactaaaaaatacaaaaaaattagccaggcatggtggcgggcgcctgtagtcccggatactcgggaggctgaggcaggagagtgacgtgagcccaggaggtggagcttgcagtgagccaggatcgcaccactgcactccagcctgggtgacagggtgagactctgtctcaaaaaaaaaaaaaaaattagaagtttgtggttaaatccccaggtattggggatttccagctatcttccggatttcaattcctagttaaattccatgaggcctgaaagcagaccctatttgactccttaatatcggcgacggtgtgtttatgggcccagattgtgatccggctggggaatgccccaggtgatttggacgacagacttcgtacctccggctgcctgctgcctggttgacatattcctggagatttgccactttctttcccgttgatctgccacgtgtgcgtggactccacctggtgtcactaacnggtttctgccttgctgacctgtgtggccccattcctggtacgagggaagttggttaaaggtctcccacctattatggttaggattccccccagggtccttctcttgacggttaatccaggctgtttgtcctcctttaccattatttttgggagtgccgcccgggctggttacagggtggcaattccccttttcgcgcaattcatgttgcgggctacgcccgggttgtaccgcgggctcgaattgtcccgtgtttaatcccccccaaggtggtttcgcccattacacggggcatgtgcccctttgtgccctgggggcatacacagcggtgtgtctcttgtgtccacccggttt

SEQ ID NO: 666447 - DNA, 497 bp, Homo sapiens
acaactacattcacaaatggcctgtcttgtgttttgtcaccgttttgagggatgatgttttgtggcacgtgtgtgatcacagcctgatggttctggtcgtgggttggttcttctgggccagctttcacagacttgcgcagctgacctacagtgctgccccataatactgtttcactttggtgaagatcagcccaccttacaccccgagtgcaggtgtgaaccacggtaagtgtgcacagtccttagggaaaacagggacgcagaggcctgcctcctctcttttccatgccaaaatgaaatgaccaagaaacaaaacatttaaaaagttgtttctaaatgctgagacctaaccattgcttatatactgttgtctgttgaaacagtttgttacaatttcattctgttgaactaggtgagactttaagaaatgttgaaattatgttaatttcctattattatttaatataaagatatttaaaatgtctaaaaaaaaaaaa

SEQ ID NO: 666448 - DNA, 714 bp, Homo sapiens
gactagttctagatcgcgagcggccgcccttttttttccaaaaaaaaaaaaaaaaaaaaaaaaaaaaaaaaaaaaaaaaaaaaaaaaggggggggaaaaaaaaaattataatccacgaagggggccaaatttaaaacccacatttttttttgtaaaagggggcccattaggggttttttttaagggggggggttaacaactgttgagtgaggggggaaaaagtgcttcgatgtggagatttcttgtgtgcgaaagaaccacttatcttgcgctggggggtgggacatttaagtgttggggaccatattctcctctatggagcatttttaatagtccttctctgagggttgaacattattaaaacatctgcagcagggtgatatatcgtgggttgcgaacatcattggtgcgcgaaattatgtgccctgccgcgatcgatgaaaaaagatcttgtgtgagcaacattggagtggatattgatgacttcttctatggacaacatttatctattcaccgccgcgcgggccctcgttgtcaaaaatacgcccactacgtctaatgaacgacgacccgacttcagttccgtgatgctcgtaccaacacagctcacaatgcgtccgaccgctcccaccgacctgctacaccacgacctctaccatcacttaactcacatagtcatcattcgaacgacaccagcgcctactacacaccctc

SEQ ID NO: 666449 - DNA, 106 bp, Homo sapiens
catgttaacatgagtatgacatgagaatagcttgaactggaaggcagaggttccagtgagccgagattgtgtcactgcattccaggttcaagctattctcatgtca

SEQ ID NO: 666450 - DNA, 312 bp, Homo sapiens
  misc_feature (15)..(15): n is a, c, g, or t
  misc_feature (61)..(61): n is a, c, g, or t
acaagaaataccttnaatttaggtaaataaagctcaaggaggtgggctgtcatttatcgtntcagtccttctgccccctgctcagtgtcgctccagggccttgacaagcagcctcattcaagcggcccaccatgccctagggtcgtcaacaagtccagcagcaatcatgggccttctcttatatctgatccaccagcagcctgagccaggtcaggctcgcttggccgcagctgattcagcttcttgatgagcgcgctgcctgggttgatctccagcgtggctgcaggagctgtgccgctcctcctggtcttg

SEQ ID NO: 666451 - DNA, 187 bp, Homo sapiens
ctccggaacacctgccttcaccacataaatgcgcgagtccgcgtccagctgtgtttcgactatggcgagcatcttgccgaccttgcgggtgaagaacacagctgacagcacaacgccagtcaacacgccctttgcaaggtcatgggtgcggagcagttccacttaggccggagcagttccacttagg

SEQ ID NO: 666452 - DNA, 606 bp, Homo sapiens
ggagcgcctagggcaacatgatcagcgagaacgcctggatgacctctgcacccgcctgcagatgaccagtaccaaagagcaggtggatgaagtgactgacctcctggtcagcttcacctccctcagtctgcagatgcagagcatggagaagaggtagcaagatgaggctcccatgacttcctgccacttgcacccacaccaagccccactgcatgtctcagtaccaagaaaaagcccaacatctgggactaggagactgcactatgtctggtgaggaccttgccctcacccgcagaatgcagtggggcagaggatgctcatctctcacacggaactcagagaccacagtcccagaccacagtatccagcgatctctgtgtgacaagggaccacagagtcccagcttcttcacagttctcgcagaaacagaccagacctctgcagctgcacttcagatccgcagaactgcgctatctcagcagacctcacattgccaccatggacttcattggcagcgctccaggcctcagacccttctctgtgttccgtccatggccatgggcttgttgcagtacagcagagtgtgggcattaggcgggcacacca

SEQ ID NO: 666453 - DNA, 355 bp, Homo sapiens
gtgtcatagacatcaggtatatcttttaacttacagtattgtgtgaaatttacctgtttttcttgtctaacctgagcactcctccttgtttgaagtttctttatccaaaaccaaagtactgtcctctactctaaggcattacttttaagtgtattatgaaggcagttttcaaaggatatgaccagttggggtaattcaaattaaaaaggaaaagatttgtttggaagtaactggtgtctctaagaggaatttttagatgtcagtttggaggctctttcccccctcaattgagagctcttgttattcagagctccaagactagacctggctaacaaacataggacacgaatgttca

SEQ ID NO: 666454 - DNA, 119 bp, Homo sapiens
gccgcgcgccacggaatgcaatgctgaggcgtccttcaggtaatgaacttcagctgcagtgtgcacggggcaggaagactggcagctgtcacaactggcacagtccagtgagtatgtgc

SEQ ID NO: 666455 - DNA, 495 bp, Homo sapiens
catatcagtgtagattagattgctaagggttgcgagggaaggtgctttgactctagagggtcagaaaatgtaccttgagaatagaaagtaggtgagattctagctcagtcccaaccactgctgcattgcactttgcatctctacattgtgcatgtttgctcctttggtgcttctatgctttattcagacagtccaaaaaatatttcttgagcgtagactgtgtgccaggcagtgttgtagtgcacgtggaggatgtcggtactgaggtgggatcgattgaacgttctgtcccaagggaattgacattgcaaatgggagggcgtaagggggggaaggcagaagctggaaggtgggatgcacagggtacgcgaaaatggaggggtgaagatggtggaaaaggtgccatgagggggaatatgatgtgatatgtgacggtgtgtcatcccgataaggtcggagtgaggaggagcaggccggtagtgtgatcaggtaaga

SEQ ID NO: 666456 - DNA, 2275 bp, Homo sapiens
gcccaggagagcccacccctcccagagagccgggacagccacccgccgctgagactgaagaaatcctttgagattttggtgagaaagcctatgtcctccaagcccaagcctccacccagaaaatactttaaaagtgacagtgaccctcagaagagtctggaagagagagagaactcctcatgctcttctgggcacaccccacccacctgtggccaggaagcgagagagctgctgccactgctgctaccacaggaagacacagcagggagaagccctagtgcctctgccggctgcccaggacctggtatcggcccacagaccaagtcctccacagagggcgagccagggtggagaagagccagcccagtgacccaaacatccccgataaaacacccactgcttaagaggcaggctcggatggactatagctttgataccacagccgaagacccttgggttaggatttctgactgcatcaaaaacttatttagccccatcatgagtgagaaccatggccacatgcctctacagcccaatgccagcctgaatgaagaagaagggacacagggccacccagatgggaccccaccaaagctggacaccgccaatggcactcccaaagtttacaagtcagcagacagcagcactgtgaagaaaggtcctcctgtggctcccaagccagcctggtttcgccaaagcttgaaaggtttgaggaatcgtgcttcagacccaagagggctccctgatcctgccttgtccacccagccagcacctgcttccagggagcacctaggatcacacatccgggcctcctcctcctcctcctccatcaggcagagaatcagctcctttgaaacctttggctcctctcaactgcctgacaaaggagcccagagactgagcctccagccctcctctggggaggcagcaaaacctcttgggaagcatgaggaaggacggttttctggactcttggggcgaggggctgcacccactcttgtgccccagcagcctgagcaagtactgtcctcggggtcccctgcagcctccgaggccagagacccaggtgtgtctgagtcccctcccccagggcggcagcccaatcagaaaactctcccccctggcccggacccgctcctaaggctgctgtcaacacaggctgaggaatctcaaggcccagtgctcaagatgcctagccagcgagcacggagcttccccctgaccaggtcccagtcctgtgagacgaagctacttgacgaaaagaccagcaaactctattctatcagcagccaagtgtcatcggctgtcatgaaatccttgctgtgccttccatcttctatctcctgtgcccagactccctgcatccccaaggaaggggcatctccaacatcatcatccaacgaagactcagctgcaaatggttctgctgaaacatctgccttggacacggggttctcgctcaacctttcagagctgagagaatatacagagggtctcacggaagccaaggaagacgatgatggggaccacagttcccttcagtctggtcagtccgttatctccctgctgagctcagaagaattaaaaaaactcatcgaggaggtgaaggttctggatgaagcaacattaaaggtaggtttcctttgtaagcatctgcagtaaccaatggcttattatggctgtgtggccaccttagttgggccagaggggaagtagcttgagtagcctgctcacatcagacccaggttgcgtcctgtgatggtgggacactgtagcacttgaccacagtaagaccttccatttgaagagagccttttagcttgtgaaccactttcagtagattgacttcttgcatcttcttttgtcattttataaatgagaaaggtaaggctcaatcaaggttacagaacctgggttttctgtctccaagttcaagttcagtgctgtttccacattccatgtgctgctgtcctggcatgtgtctgttgtgggatgctgtccattgtaaacaatgtgggttacaagagctctcacctggagctttcattatttccactgtgcatggagaggtggctgatcccagggctcacaagtcccccacgcttcagtcaagtcattctgaaagtctcacttcccatatgttttctgagcatgaccaaaggggtgtggggaggaagtggccaggctgagctggggccagcagtcaaatgagctcaggctcatgggtcctgccctctaggtgctccccaggcctccgtaggcttttggcactaga

SEQ ID NO: 666457 - DNA, 206 bp, Homo sapiens
  misc_feature (206)..(206): n is a, c, g, or t
ccacctgacagagaggtaagctgttatcatagaaacaacttcataaagctccaaaatcagacaggtgtgggactgaattcaggtccagccagccactgggcaggtgcccatgaccaagcttgcctcttccgagcctcagcttgctcagcctacctcttggggctgttgtgagggtacagtgaggtaatgggcgcacctggcacagn

SEQ ID NO: 666458 - DNA, 1247 bp, Homo sapiens
  misc_feature (1234)..(1234): n is a, c, g, or t
aacagcaccttacagccaagccattcaaaaatgcagaaacaggctggaggcctgggctcacttgcccaaggccagtctcttagattgtgcagaatttctctttgatatcatcaaggtgtaatgctccatgattcacttcttttgaagcctggaacatcatcaaggcactgcctgatggacctgtcacgattgtcatcaggagaaaaagcctccagtccaaggaaaccacagctgctggagactcctaggcaggacatgctgaagccaaagccaataacacacagctaacacacagctcccataaccgctgattctcagggtctctgctgccgccccacccagatgggggaaagcacaggtgggcttcccagtggctgctgcccaggcccagaccttctaggacgccacccagcaaaaggttgttcctaaaataagggcagagtcacacgggggcagctgatacaaattgcagactgtgtaaaaagagagcttaatgataatattgtggtgccacaaataaaatggatttattagaatttcatatgacattcatgcctggcttcgcaaaatgtttcaagtactgtaactgtgtcatgattcacccccaaacagtgacatttatttttctcatgaatctgcaatgtgggcagagattggaatgggcagctcatctctgtcccacttggcatcagctggcgtcatgcaaagtcatgcaaaggctgggaccacgtgagatcattcactcatacatctggccgttgatgttggctgggaactcacctggggctgctggcctgaatgcttataggtggcctctccttgtggcctgggcctcctcacaacatggtgtctggattcccaggatgagcatcccaggatcgcaagagccatgtagaagctgcatcttgtttatacctttgccttggaagttgcatggcatcacctccaccatactccatcagttagagctgacacaaacctgcctgggtttaaggggagaggaaatattgctggggtcatttatgaaaaatacagtttgtcacatgaaacatttgcaaaattgtttttggttggattggagaagtaatcctagggaagggtggtggagccagtaaacagaggagtacaggtgaagcaccaagctcaaagcgtggacaggtgtgccgacagaaggaaccagcgtgtatatgagggtatcaaataaaattgctactacttacctaccacatgccangcactgtgctcag

SEQ ID NO: 666459 - DNA, 528 bp, Homo sapiens
gtgtgcgggtggctcatgagttaaggagttcaagatcagcctagcgaacatggtgaaacctcgtctctactcaaaatacaaaaattagctgggtgtggtggcggtcacctgtaatcccagctacttgggaggctgaggcaggagaatggcttgaacccgggaggcggaggttgtggtgagctaagatcgcgccactgtactccatcctgcatctcaaaaaaaaaacaaaaacaaaaacaaaaacaaaaagcaaaacaaaacaaaacaaaaaaacaaagaaagaaagaaaagaggaaaatttcaaataacagttgggagcccctacatcaagaaactagaagacgaggagcaaaataaacccaaggcaaacagaagaaaggaaataaaggtaacagaaatcaatgaaattaaaaacagaaaacaatagagaaaatcagtgaaacaaaaagctagttcttggaaaagttcaataaaatagacggttatctggcaggactaacaaatagaaaaaaagcttatccaccatga

SEQ ID NO: 666460 - DNA, 1795 bp, Homo sapiens
  misc_feature (1794)..(1794): n is a, c, g, or t
cctgcgtcgtatgtggtatacctggagtgccgcgaggccggacacgaggtctggaacagtgtacacctcccttagcagcggaactactcccaccctggaggctccgaagaactaacgcagtgctgtctgtccttgacgagcctgagcgaggggtgtatccatctagtgcttcacggggcccactccacagtcgtcgaattcaccagaaccagacttactcgagtgagtatagaatgcgccgcgtgggcgatcatagcccgaagtgacgcagagacgactgcgcttcctatccgttcctggagtcacctgtcgctcaaaatcaacgagacatgctccgtaactgtgcatcccctagtactgcatcctcatgttcactagacgtgcttaggcagtccatctgagtaactgacgtataccaagaagcgggaaggcttctaaccaaggagccattcatttcgaaccacccggcaccgaggcaaagagagtggaggaccccccaaaatttcagtatcacactcagacacacctgtgaatgggaggaatcggaaccgagtgcaaaactcgggaagagaatattcactaatcccgtgtagtcatcctaccggagtgcttccggggtcaagttggctgcatcaccaacttaattatgaaaatacattcacggtaatcatccccgggtgagcaataccataaggacaatcacaattattggcgacctaacaagtataggttagtagccatctctagaggcgataagttagactattgcgagactggggcgtttaccaatacgcggggtggaaattctgcttgttgaaagcacacaaggcctactactttggtttacggcaggcatcaggtgaaccgttattgacccgattcggaaatcaccatgcgcgaagggccaagtaaatttcttcagacccgttcgcgcgccgtttagcccattttaaatagttccgacttcacggtctcaaggtaacaccgcgcaccagggaaatcgcctccacacggaagttaacttattacagccatgtgactggttccgaaccaaggaaggctcaccacacggagacaaggaagacacatagtggcagcacactgggtgtcacatggcatgggcgagggagagccatcatggggaaggccaccacgaaaagggacactacaaggaacgtcataacacgtaataaaaccagcccggaaacgacacagtgagcgccggagaaacacggagtgacagatatggtgggcaataacagcccccaacaataactaccgagacacaggcggcaagaacacacatcacacggggcacatacacacaggaacacaagacgtggtataccctaacaggtaatggtactaacaccacgaagcattacacaaatatagatgggtcgccaagagtaggacatcaagaaacacgacaatgattggcacaggccacacaaggagggggggagctaccacacgactaacgatggttgattacccgcaccataataacccaagagagggacggatgaacacgcgatgcatgagacaaacagccacaagcaacacagaagctaccacactacgacgtcaagaagcgacaacaccaaagggagaaaaacaataaagaagagagaccagccgcaacaaaccagtacaagaagaacaaaagagaagcaacagccccaaggcatccaagcgaaaaagatcacacgcgaatcatacgacgactaagagacagaccacaagcgaaggacgccaccacaacgactaagctaagcagatagcaagcagaana

SEQ ID NO: 666461 - DNA, 684 bp, Homo sapiens
cattgtagacagctgagagcctatcagaagtccgagctttatctggaatacacggggtaatacatatggcacaaggcaaaaatcatatgcaagagatatgctaacatctcttcattatttggataaccgcttcgtgcagcctcgtctagagagcttggtatctaaaagtcgtccggcataacgcagcaatataagagagcgcatgctagaaaagttgattctaatgtagagctcattcatcttgaagaatcgctgaaagactgttgcctgccagtgcttgtggacggcatcgctactgtaaatattgcagctgcatctatcaggagagtcgtataacaccaggaccaaatggccaaaagttaggaatcatactcttgcatgtcacatgataaacaggtgtacactgtgtggtcagaatgtgtgtgccaggccgctaccaagaatttgatcatacaactgacaagcatgtttacattctccactataccaggaatgtagcaccattgctatgcacagagagaccgttgatgatgaacaagttcttagacaacagtggaaagaatcttcaggcggtccaatagaccatggctggcattaagggagaaactatggtcaacttgaagaatatctcaattttgcggattactttcaaagaagagaagtcgagttgtagacacatttcca

SEQ ID NO: 666462 - DNA, 83 bp, Homo sapiens
gtgaaaacttcacagttactttaatctgcacgggttccggggaactcctctgcccctccccgctccccttctgtcgtcttctc

SEQ ID NO: 666463 - DNA, 861 bp, Homo sapiens
gggcgtgagttgtggcgagctaggcccgcgtgcggctggagacctacccgacgctgagcccccgtgagcctcctgccctggcccggtgctgcggcctctgcggcggtgggagtagtgggtgggccccggggcgcggggatggggggcaggcgggcacctgctgcgtcggcagcgggatgcctgctactgtattaaacttatggctgaaccgggcgtcggcggggggtcgaccggagctcgggataccgctcttctgaagtccgcagaagacttaggctgatggtcacatatggatgatgtctaaatgctgaacaacttcagtaaactcgtttagctgctggagtcaacggaggatcctgttgaatcatggataagagttgagctactttgggtatcaatgcagccttgtgagttaaccaagcgatatccgtgaatgggtggtattccaaggggtgcgggggggtctcaagcggttccatcccagagtatgaacgagagacgcttttgggtgcactagataagctgagttgtgattgtcgaaaatcgtgttccacgataaagggggggagttgggaagactcgttttggactttgtctgaaaatccagcatgacgagaagggtgctccggtgcccaaagtgggattcatccatttcgtttccctttatgacaggcaccgtagcccaaaggggatcttcttcgagtaacttaaggccatgcggatttaggaaggctcaaaaagaaggcattgtgtggaggctatttcccgagagtccggttccggtacgggagaaggccgacaaaaaggctgtggccccgagggggggggaagggcgcacccccggggttccccaacggcagg

SEQ ID NO: 666464 - DNA, 266 bp, Homo sapiens
ttactggaaatgaatacttaaatctagccgcataccgattaaaatccaatttggtggccgggtgccgtggctcacacttgtaatcccagcacgttgggagcccgaggcaggaagatcacctgaggtcaggagttcaagaccagcctggctaacatggcgaaaccctgtttctactaaaaatacaaaaattagccggatgcagtggcacgtgcctatagtcccagctactcgggaggctgaggcgggagagtcacttgaacccagga

SEQ ID NO: 666465 - DNA, 553 bp, Homo sapiens
gccaggcaggttgagcagtggtcttaacctagttgatggcatgatctagttaatatagtgctaaaactactgtattgcgataatatgacaagaagcctgatgacggagaccacgagataactggaaattcccaaatagcgcttaagaaaaaatactacgagacttgagaattaggcaacgtaacttactaagtgtaagatgacaaaatttagactttcgggatatactggcgtaaattttcccgtccgcctaaatgaggacaaaaattcacagctacgttatattaagcaaatattaacggtgcctattatttgctgagtgctgaaataagataaaaaacttaaaagttaaaaaaagttgtttagaattttactgtcacattgacttatctgggacatcgccaaaattaatcctcacatgagatttggctaagtttattaatcacaatctgttaatctcacaaaaactaaagctgttaagcccagtctaaacccattctgcagggtaagaaattcatctgtaaagcaaactaattgataggaagtaagataag

SEQ ID NO: 666466 - DNA, 155 bp, Homo sapiens
gaggatcccccgtgtagccttaaccctacagctgaaagccaggctgactcggtggcttgtgctgtatcctagattttgggagtctgaggtgatcgcttgagccaggagttcaagaccagcctaggtgacattgtgacaccccaactttacaaaaa

SEQ ID NO: 666467 - DNA, 399 bp, Homo sapiens
cttatgaggatctcgtgaactgcttcggattgtgcaggagcagtgctgcacagccagctggaggagctgcactgtgcacgggcatcagctggcaacgagcaggaccgtgtgccacgccccagggtgacaacggcagcctggaggccacatttgtgaagaggtgctgccattgctgtctgctggggagggcggcccaggcccagggccagagcttgcgagtacaggctcatggttgggtaccagtgtggacaggtcttccggggcatgctgtgtcaaagagccaggagaccggagatttggattgtcgggggcctccaagaaacggataagatcattgaggttgaggcggaacaagaggacccatatcttgaatgatcgctggcgaggaggggggccctg

SEQ ID NO: 666468 - DNA, 1614 bp, Homo sapiens
agccaaatgtctttaacaggttcctctactactcaacaattcccaagtcttcgtcatttgcaacatggcatttcaccagtcctggctcaaacaatctcagcatgttcaatgcacatgaggcattccatcctggctcatcttcctcatgtccagctgtcaatctgtcacatgctctcttgttcctgcaagttctcttcgcctcacgccatggccagagtggcacacaccaacacaattcaccagaccatcatgctgcgacttcccagcttagcaaccatcgttgacttgtccacagctcatgttcatctggatcctaacagaaaccaagtctttgccaagccagatccatcaattattaggttcatttcatagctaactcccagctccaggctcatcctacctctgaggcaacactcgcacagcaacttctatatacaggtctaccccacagcagcgcccatccttctcacacagaccacagattctctcccggtcggcttcttacccttaaccgtccacctcgggcaaccgcacgctcacatggaacagcaagagccattacacacgcccttctagacaacaccctcacttcgggcccgcttaatccacaccccactcaaaaccaaacctttccaccacccctcgccaccttacgaccctccccccacatcactacctcactccctaccgcatccagcgcgccacccactcacacctcccacctcacaccaccggacggcgaggcgatggcgaaccaggagaagaagccccacacaattaacgcaaccagagccgcacacacattcgaaccccacacaccactcggccaccgcgcagcagcaaccaaaacgggactaggcaaccacacagacaacgcgacaccgactccacgtgccaaagcaacgccacagaacgcacacctcacccagaccccctcacactggccgacacgccccaacgcacaacccacaacataccatcccacacaccgcgacaacccacacccacatcgacccaaacacccacgcataccccgacgccgacgagccaggtacaacaggcaccacacaacaagagcaacaacgacacacagctcgaacccgccacaccaacacgggccacgacccacccaccccacgcagcgcgacgcagcacaccacacacaggaacacaacaacgacagacaccaccacacacgtgcccacagtgaaacaggcgcacagacccacggaccactccgcagcgcccacgccgtgtgccacaacgccccagactacttctccaccgagagaccaggccatgcagcacatccctcttgacacgccacttgtgccgcacctcacacaccgcaggaacgccgctgcgccacacacccttatcgtatgcacacaccataccgttagacacggcacgcggctcccggccccccagcgcgtcgacccacgccgctgacggagctcacgcagacacccgcggacgactaccgacccgcgtagcgcaccagtcaccagacgctcccacgagaaccagcactgagcgcccgccgagatcgtcgccctcgcccgccacacacccagaccgcacacccaccacgacaccccgcgacacaactag

SEQ ID NO: 666469 - DNA, 513 bp, Homo sapiens
tcagaattttaagactgattaaaggttttaggtgtttatctcatactttgcatactgagaataatatgtatagtatttttccagtatgatttacaattttataaatgtcagtatacatatgtatatataaattattctcaactccatttttttttaaataaaataagtacatgtttgtgtgctaaattgctcatttggcagtgatagattgaaaaacatttataaatttaaaaataaagcactataagatatgaggaatgaatagcttctatgtgaatttctatgtaattaatatcaatatttagaataaaagtgtatttgaggataagatatttgtttactaaaatgttttatttactaagagtagaggtgaattatgcatctttctaaggaaaagttcttttaatttctgtgtctatgaaaaagaattcataattcataattcttaattgccctcttttgatccatataattctttaaataaacgaaacatttacttttcaaaaaaaaaaa

SEQ ID NO: 666470 - DNA, 124 bp, Homo sapiens
gcgggcgatgagtgactaggatatggcgggcaggatagttcagcacggtttctactttcctgtagtcgtctgtagatgttagatattagtacagtttctgttgtgagtgttagtgaaaagggcc

SEQ ID NO: 666471 - DNA, 119 bp, Homo sapiens
aacggctttgggtcttactggatttgctgtgagtggcaatatgctgtgggagtgtgatatcccacactgtagacattaatgtacttgttggacattttcataaatttttgaacagttca

SEQ ID NO: 666472 - DNA, 233 bp, Homo sapiens
ttgcagtgtttatgcccgccttctttcacgggcaggttcaatttcactggtttaaaagtaagagacaggctgaacccttcgtggagccatttcattacaggtcccttaatttaaggaacaagttgatttatgctacctttttgcacggtttagggtaccgcggccgttaaacatgtgttcactgggccaggcggtgcctcttaatatccggggatgtccagaaggggagtttt

SEQ ID NO: 666473 - DNA, 295 bp, Homo sapiens
taccgagtgatgatgtaggcaagatggcaccactgcactccagcctgggtgacagagtgctatgagtcaccacacctggtatgagccaccgtgcctggcccacaatgacttttacacatgttgttaaatcatcttacagattttataatttgggggaagaaaagttttactaaacttgtcttttaactggaaactctacaagaaccagaatctttgctttgttcacttatgtatccattcctaggcctagaaaaatgtctgacacatagtggcaattattcattgaataaatgga

SEQ ID NO: 666474 - DNA, 180 bp, Homo sapiens
tggggtggaaaaaatgggggggggccccagtgaaatttaaagtaaaacccagctggccccaggggtcccgccggctgtaaacccgtttaatcaaagggccctttttttttttgttcaaatgattttaattattggaatgccctatttttttaatatgcaaataaaaagtttaaaaagtta

SEQ ID NO: 666475 - DNA, 200 bp, Homo sapiens
ttacaaaagtttattcttaaatgtacaacagcttcaagacaacacttaattccagctatacgaggcaaaagatgttatggcagggaatagagaggcttaaatacagatgaaataaagggccaccatctcctcaggcacaaggaacagcttactttttgccagaattcttaattccacctggggccaagggccccttcccc

SEQ ID NO: 666476 - DNA, 409 bp, Homo sapiens
  misc_feature (14)..(14): n is a, c, g, or t
ggcctggcaggtgngaagcccaacggtgcaaagttcagcaaaggtgcagcctttgtgtccaagcaggagggcagcgaggtagttaaaaaacccaggggctacctgtatcaatgggtgggagccccagtcccctacccggatcccctggagcccaggagggaggtgtgtgagctcaatccggactgtgacgagttgggtgaccacatcgggttttaggaggcctattgggggttttacggcccggtttagggggttgttttgctgggctggccggcaaccccagttttggtcctttccaggcaccctttttttcttttccccttgcccttgccctgacctcccagccctatggatgtggggtccccattatcccaggtggtcccaaataaactccaaaaaaggaatttta

SEQ ID NO: 666477 - DNA, 572 bp, Homo sapiens
  misc_feature (31)..(31): n is a, c, g, or t
  misc_feature (33)..(33): n is a, c, g, or t
  misc_feature (35)..(35): n is a, c, g, or t
  misc_feature (135)..(135): n is a, c, g, or t
  misc_feature (155)..(155): n is a, c, g, or t
  misc_feature (191)..(191): n is a, c, g, or t
  misc_feature (218)..(218): n is a, c, g, or t
  misc_feature (257)..(257): n is a, c, g, or t
  misc_feature (266)..(266): n is a, c, g, or t
  misc_feature (310)..(310): n is a, c, g, or t
  misc_feature (351)..(351): n is a, c, g, or t
  misc_feature (354)..(354): n is a, c, g, or t
  misc_feature (501)..(501): n is a, c, g, or t
  misc_feature (538)..(538): n is a, c, g, or t
  misc_feature (552)..(552): n is a, c, g, or t
  misc_feature (563)..(563): n is a, c, g, or t
ggagcgaaggtaggaggcagggttgctcaantngnccaccctcccaaccccaagagcccagccccatggtccccgccgccggcgcatgctgtgggtcctgctgctgaatctgggtccccgggcggcggggccaanggcctgacccagactccgancgaaatgcagcgggtcagtttactcagtcaggtccncatgacccgcagctaccggagcaccgncctgacttggtcttccccggaagacaaggataatcctanaggacgatnaatgatgccatggcccgacgccgaccgcctggctggaccaagcngctgccgagctcttggccgccacggtgtccaccggctttangcnggtcccgccattaaacgaggaaggatggggtcttcagaagagggggttgtgattaatgccggaaaggatagcaccagcagagagcttcccagtgcgactcccaatacagcggggagttccagcacgaggtttatagccaatagtcangagcctgaaatcaggcttgacttcaagcctgccgggntcccccggaggtcntaatgaggacntgccaggct

SEQ ID NO: 666478 - DNA, 802 bp, Homo sapiens
  misc_feature (340)..(340): n is a, c, g, or t
  misc_feature (400)..(400): n is a, c, g, or t
  misc_feature (481)..(481): n is a, c, g, or t
  misc_feature (512)..(512): n is a, c, g, or t
  misc_feature (591)..(591): n is a, c, g, or t
  misc_feature (678)..(678): n is a, c, g, or t
  misc_feature (701)..(701): n is a, c, g, or t
  misc_feature (703)..(703): n is a, c, g, or t
agcggcttttcagtcgggcgctgagtggtttttcggatcatgtctggtggctccgcggattataacagagaacatggcggcccagagggaatggaccccgatggtgtcatcgagagcaactggaatgagattgttgataactttgatgatatgaatttaaaggagtctctccttcgtggcatctatgcttacggttttgagaagccttccgctattcagcagagagctattaattccctgtataaagggtatgatgtgattgctcaatgctcagtcaggtactggcaaggacagccacatttgctatttccatcctgcaacagttggagattgagttcanaggagacccaagcactagtattgtgcccccaccagagaactggctcgaacagatccaaanggtaattctggcacttggagactatatgggagccacttgtcatgcctgcattggtggaacaaatgttcgaaatgaaatgcnaaaactgcaggctgaagcaccacatattgtngttggtacacccgggaggagtgtttgatatgttaaaacagacgatacctttctccaaaatgggtccaaatgttgtgttngatgaagcagatgaactgtttgacccggggtttaaggtcacatctatgagatttccaaaaagtaaacacaagtattcaggtgtgtgnttctgccaaatgcactgtgtgtngnagtgcaccaaacttctgtagatcatcgatttggtgagagaaatgcctgaggacaacagtattagtgagcaggccggggggacactggagtaaactgctc

SEQ ID NO: 666479 - DNA, 108 bp, Homo sapiens
agctctacaagcgtcccttatatgtacaggtaaacacttgcatggaaaggatctttctccattactacagaagtgagcttgtagcacattttaaaatcacagttataa

SEQ ID NO: 666480 - DNA, 198 bp, Homo sapiens
gaggatccccagagaaattctgaactttcactcagctttcagttttgccttaccaaagagatcacatcttagaaatgcgcaaatggagatggatgatcaaacccaaccacgtctcacactccaccgtcacttgcaggaccaagctcaccgtaaggcaatcagcgctgcatcgttgctcagcagaaggcacaccaggca

SEQ ID NO: 666481 - DNA, 202 bp, Homo sapiens
tcggcgacatggctactgtaggaccagaccgacatgtgccggtagatcttgtgtgtggactgttccaccaacaacccatcgcatgctaagctgcgcagggagcttgacgaatcccttcaagtagctgagaggctgaccaggaaatacaacgagctgctaacgtcctaccagagactgatgctcaacacctcctgcttgctgg

SEQ ID NO: 666482 - DNA, 1198 bp, Homo sapiens
tacaacagatcttttaatgtgaacttaatttttacacatataaagaatgtggtgtggtttgtgggaaaacatcttattctctttgtgaaacaatttccactaaattttcaagtggttttaaataacgtggacgagaaaataagtccgtggtggtcgtggtccacaattataaggggtcccagtgaattaccattatacccccttctccaggccccaccaaagctcaatttgtggagtgggtttcagacagaaaattgagacgagcccaaaattttaaaccagaattctcaatagcacttcttcacaaaggttgtttccagagaaacccccttattgtgtttctcattcacttgtggggtttcttaaacacaccaaagagatttccaatgtgagcacgaaccgtgagagtgactcagacaatgggtgttcacaacaatattttgcggtgccacaaagcgtggcctttacagtggggtctcctatagcccactctctaaagaggggggggtaaaaacactttaaaggaaaaaccagcggcacctgtggcccacatcttatgaggtgtgaacaaacacaacaacctgtcaccgcttctttcagaccagcggtacacttctccactaaacaattttggggaaactatttccctacaacccaccacacctgtgggggatgttttataatccccactatatctcgcccttaaaagcgcttttcgggtgcacacaaacagacgacacaacccggtgtttgtggtgcaaccaccacctgttgtgaagacgaagcacctgtcgcactagtggcaagacctcgcaccccacagaaggtcgttatcatcatgtgcgggcaaaaaattcccccccagggcgtttataatcagagaaaaacaatgcgccttgtagccccgccggggggaccatttattgtgccccccaaagagggtgtaaagagattctccccacacagttagtatgggggaacttccccacatgtgtgtaaaaccaaacactcgggggtcaaacacccaccccgtgtggtcagcgggggtttctcccacacgctctttacgcttcaccacgggcgcgcctctcatgcaatgcctgtgagaaaaattgtgcgcaggcgtccctcaaaacaattggcgacgattattcttctcgacacacaacagactctttgtcagaccccgcgcttcact

SEQ ID NO: 666483 - DNA, 397 bp, Homo sapiens
gcgtcgacaaatgtttagctttgaggattttttttttattgagatttacacatattctcacttataagtgggagctaaataatgagaatatatggacgcatagagggaaacaacaacacactgaggcctcttggaggatggagggtgggaggagggagagaagcaggaaatgtgactaatggacactgggcttaatacctggctgatgaaataatctacacaaccaacccccatgacacatgtttacctgtgtaacaaacctgcacatcctgcacatgtacccccaaacgtaaaagttaaaaaataaaataaattgaggtataattcacacgccataaaattcaccctttggaaacggtatacaactcagtgacttttagtatattcacagaattgt

SEQ ID NO: 666484 - DNA, 208 bp, Homo sapiens
ttgctgtagttgatctaaggatccccgcgctagcggcattaatgaacggagggtcttggcggctccttctccctgtgcactggtgctttgcttgtggtggctggagctggaaagcaactccaaacatgctctacttcagggagaaggggtatggggcctgaaaaggcctggtgtgcactgccccaccgttcacttaatgccgctagcg

SEQ ID NO: 666485 - DNA, 743 bp, Homo sapiens
ggcggagcgacgagtctccagatggccgatgtctggtatctaagaagggcgcagtgaagcggcatgcatggcggtctttcgaggaagcatgaagcatgcggtggaagatgaagtctagcacgggagacctcgaccagacggactagccttagtcgtgcgacagtacgcaggtggcccagttagcagccaagggactggacgacgcctcagggaaccctcaagccccaaccacaagaaacccggccgacctgagcgagaaggccgccgcagagacagcgcgcggcgggccgagcaacacgcccacgcacacccctggaccgtgggcgcgcacgacttcccacacacccaaggctctcagggaccgtgcaccacaccatgaaagcgcgccacgcagagatgattcaagcctagtctagtcgccctagcaccgacagcgggctggtcccgacaattcgaaagcggataccttgttgaatagcaacccagatcggcttggccaacggccaacacaaggaccttacggtggcccgatttgtcatgggcggacggcaaattccttatggggcaaggagcggaactatatgaccaaagctcgcacgggtaaccactagggcacctattggaacgcatatgtagactcgccttgcgcgtcagtacgcaggtgacaccaaatgtaccaaagagcaaccttacccgacgggccagcgcacaacacaaaacgcagagcacgttgccacggagtc

SEQ ID NO: 666486 - DNA, 1785 bp, Homo sapiens
  misc_feature (1508)..(1508): n is a, c, g, or t
  misc_feature (1753)..(1754): n is a, c, g, or t
cctcctcgtcgggtggtgggtatgttggtgggggtcggcaccaacggatggctgttggggtggctgcccgctgcgaccaaggagtggtttgtcctgcagaagcgggacccacgatccggtgggtgggggcaaactatgatcatccctgccgggcgtgatgaccgacatgttctgcagcctctggggggcgagacacaaaagaggggggggccccgccgccgtggtgatgagtgttcggtctctgtggaggtggtggagtggggcggcttgctctcccccgaggggtggagcacgacggtggttgtttgtttgtgtgtacatcacgtgggtgggtgtttcccccgcaacaggatggttggtggtgggcggtgttgatgggtggccacaccgcccgcacaacacacacacaacaaggtgagtggttggagcaatagtgggtggggggccgcctcccctctccccccccccggcggggggagaagagtatatacaccgcagggcgagtggtttgtgtatgcgaccaccgctgttgtgttgttagtctccccccgccgggtggtagagacaacgctggttgggggttctccccctcccagcacagttagaggtcgtgctctgtcaactgttgtgtgcctccccgcttttggtcagcacgacacactctcctcgtcttctcctcccagctcggggctgccggcgcacactccacaacaccgctctgttttgtggtggtgggtgatgttgtggggcgtcccacccactgctgcggtgcggttgtctataagagcagtggtgtcgcgacaacactcgacacacacgggctaccactacccacgctcctcacaacacccggcggtgttgggacgacccatacgctgctgtgaggagagacgacacacactgccagcacaccagcaggggctaacacacagcagagagagcacgctgtgtggtcgacacacactgctgctgagacgacgcgacacaacacacaccacaccaccacccccgctgctgtgctgtgtagagaacgctgctgctgctgctgtgtgtctctctcctgctctgctgggacacaccacacacagcatggtgtggtcacgctgcggcgcagtgtgtagtagtgcacaccaacgcagcgcggtgtggtcttctctgctctgtgtgttctctcgctgcgtgagagcgctgctgcgcggtgaggagagagggaggtgagcgagagagagagagcgcgcgctgtgtgtctcgcgacgagagagccaccgcacgacagaatatatagtataggtccacacacctctcagatgagagagagatatatatagtagagagagagagagaggtggtggttgtggagatatctctctttatgaagagagagagagagggtgagagagagagaatagagagagagagagagataatatcaaaaaaagaccacctctccctctctctagagtgccacacgccgcccacgcctgtctcatcgcgtctccccaccatanttatctccacgtccccacgctgtgacgtcgcacacaccgctcttatatatactatctttgtgggtgagagaaggggtgtgtccaccacgggggaacaaattttttcccccgtggccacccgaataatttttccccccacaatgtccccagagaaagagctctcgcttcgcacacaccccaacaaaaaataataaaataaataaaaaaaagggaaaaaaatacacgaaggcatataagctcggcgnncgagatagagtatatcaccatgtggacggct

SEQ ID NO: 666487 - DNA, 668 bp, Homo sapiens
tggtgctcgcatgctggtttggaatcacttgctagtgagtcttgtctctctgccacccagtgacatcatggcagctcacctgtgtaaatgctgatgcactgtgcctcctgagagaatgctgctctgtcagtgcccctgccatggctccagtttggcctgactgagacttgcctgggtagcccataagactctgacttcctcagccacctcacccatttcccacctcccatgtgttccttgatggatgccgtgtggatgaagtgaactgagcatctactccctacatatgagaagcagtgtgtgaccacctcatcaatgaagtgccacaatgtgccatgatgtgatgctcctgtgagctacttgtgttgtgcatgtcactgactttgtgacatgcaatcaagcatgcaatgtgtacttatcctgtgctctctcacttgcttgtcttgagaagccatgaagataaatgtgctttgctcatacatgtgatgcccactttcatcaacttctctgtctgctcaacatgtcagagttgcctcggtcttggcattggtaacccttctctgaagcttgttgggaagcctgtatgctctgtgtcatccccaatgggctccatggagctgcagtctggtgtagccgtagtgccgctggcgcatccgtgagctcagtag

SEQ ID NO: 666488 - DNA, 498 bp, Homo sapiens
atggccacctctaggtcttcaagaccaaggaacacctacactccaggtgtctccttgccagatgtttcacctgcattggtaaaaggcagaatcctcggcaggggtcggtggctcacgcttgcaatgccagcactttgagacgctgaggcgggtggatcacgaggtcaggaattcaagaccagcctggccaagatggtggaaccccgtctctactaacagcacaaaaattagccgggcctggtggcgccatgcctgcaatcccagccaatgggaaggctgaggcagagaatggcctgaacccaggaggcagaggttgcagtgagccaaggtcatgccattgcactctagcctgggcaacaagagcgaaactccatctcaaaaaaaaaaagaggctgggtgcattggctcacgcttgcaatcccagcaccccgggaggccgaggcgggaggatcacaaattcaggagatcgagaccatcctggttaacacggtgaaaccc

SEQ ID NO: 666489 - DNA, 539 bp, Homo sapiens
aattaaaaatgaaacctttcacactttgttaatacgctgatctgaacattgaagtactattaaatgatatccacattatgttggctattaaaatactgcttactgagaggcctagtataagctaggatattatcttccctacacagcaccgagtatcatcatgcctgtgccagtagaaaaggaaatgtacctatcaagcctcttcttattcttcatgaataactcaaaatcagtgcctcattttattttgctctataattggacctgaattttttgacatattgttgatttgtctttcttttttcttgactaaataatcttctcaagcatcccagctcttcaatgatactatctatggcactgaatgcacattcttcccagaaagcccgagacagtatgctctcatctgaaattagtctgctggatagctgtcactctagggtgagatacccttttggctgtcactctagaatgagacatcctaagtaaggtccactgttttatggatcccatttcttcttctttcctggttttcatcc

SEQ ID NO: 666490 - DNA, 1423 bp, Homo sapiens
taaaatgatgagaaacaaaatttatggggtggccttggagtgtcttagggaatgaggcttgggacaggggtgggcggggtcccctccgggttggcgtggtattgggggcgtgcgtgggtggcacgccttaaagggctgctcttactctcggcgttcatctcacgctttaggaagtcctccgggagaaaacccagaattgcaaaagacgcctctcttgggctcacaaactcggggggaggggcctctctcgggtaatatcacaagagaagggggagaagtggggtgccctcaaaatctcgccagagcgccccagagatatatattttcttcaaaaagaacctctcacatacagtgcggtgtgtacccgggggagtgtgtttgtggaaccctatcccttttcccttcggggggctcacaagtggctctcatatatagcgacacgaaaatagcgcgtgtatgtggtggggccctggtggctccctttctcgaaagtgtgtgtctctctcacagagtgtgtgtcttctctcatataagccggggcgggaactcttggagaccgagaaacagagggcaaaaataaattcgccgagcgcgctctccagagggggacatccggggggtgccccccctcagtgtgggcgtgtcgtgcgacacaaaactctgttcttctcaactgaaacagcgtgtgtccgtgtggggtgagaaaattttgaaaagcaattcctccctgtcgtgggtgtggggcccaaatctccccaaagagaacaagagaagtctgttcttccacagagaactttgctagtaaaacacttcttcctacaaattccccgggcgggaccattctcgtggggagacgtcctttgagaaccccggctgtaaaaaagaggggggggggggccacacacattcccaggcctaaaaagtggggcgggggtgcccccgagaagcgaaaataatcccggagccggggccttgggaagaggggaggacacctccgggggtggggcggggccccacgtggttgcgaacggcgaaactttggcggctccacacaccgcccgtgaacccccgcgtaacaaaggacatgcggaaacagcgcggggcgcaaacaaaccacgaggggcccaagggaacacccagttgggtgcgctaaaccccggggggcggcacgagggggaaaaaaaatccacgagggggccgccataggtcccccgctttttcaaagaggccccaacagaggggtatcaaaagaacgagggggggctacacaccggcgcggaaaacactgtgatttgtagaccccccgtggggtatgagaccaccaaaccacggaaaaaaggtgtataaccgcgtagcacgagacgcaacaaaacaagggatcactgtgcacacaacagaaaacactaacactacacacaagcat

SEQ ID NO: 666491 - DNA, 219 bp, Homo sapiens
gcttctgaaaccctgtcggataatacaaaagctaccatcagaagaaatcccttcaggatcatataagccacttcctttgctctggcgtttctatagtagttttacattattcttaaatcacctgaaaaaaattcccaaaggagaaccacacactaacatattccaaccaattttggatttaccataattgtagaaatgtcagccgtcgtcagccgagag

SEQ ID NO: 666492 - DNA, 100 bp, Homo sapiens
tgccgcttctcttttgcctgcgcgccctcccactggcggcccgcggaccttctcttgtgactctttcgtgtgtcggtggttgatgctgctgtctacctgg

SEQ ID NO: 666493 - DNA, 992 bp, Homo sapiens
tgactaatcagtgagagtgaggcaaatagactgaagatacccctacttactcggtgtcactagattatggtataaatcctgcttaatcatcatatgcatctgaatctaacttcttcttattcccaatcttatttgatggcgtaattatactaatattggatcgcatcctccgatgcaggcttctacgaagcacgcgcggtgggaaggaggaccccaatattcttataactactaccatcttaacaaggactaacatatccccatacatcatcagaccacataatataacactcaggaaagcgagccctagagctcacataacacattctaggtacctcactctcactgcccaaggaactatccaaacatcctggagccaacaacttaagtatgactagcttacacaatagctttgatagtaaagatacctctttacggactccacttatgactccctaaagcccatgtcgaagcccccatcgcggggtcaatagtacttgccgcagtactcttgaaactaggcggtatggtataatacgcctcaccactcattctcaaagccggctgacaaaacagatagcctaccccttccttgtactatccctatgaggcataattataacaagctccatctgcctacgaaaaggaaaaactaaaaatcggtccatgtgcatactctttcaatccagcacaatagccctcgtaagtaaccaagcatttctcattccaaaacccccctggaaagcttcacgggggcagtcattctcataatcggccaggggagtaaaatccttattatattctgctagaaaatcaaaattaagaaaggactcaaaggcgattataaaccctcttcagggttaaattattccctaaaatgtttgggggttttaaaaggcggaaactggttaccccatatattggggagccctgggtaaccggtcggaaaatccctaaggggaaaaagatcttttttaaggggggcctaaaat

SEQ ID NO: 666494 - DNA, 993 bp, Homo sapiens
  misc_feature (189)..(189): n is a, c, g, or t
gacaccccatcacatagaaggtacaggggtcagagcggataccgaggagcaattgggagtgtagtaatggtgttctagcaacaatgagaggtgtccactacgtcgtgaatgcagaggtaccagtgtcgctatgaataggttgagccgagtagtgacctagagcccacgcgactatgtggttgcttcccncaaatgatagctagagagcgacggtgatcaagtgcgcttgtagcatctcaagttcagtggtctggcatgtctctttgtgcgggtagagcagcagtggagcatccgatcagggactcctggcgattgcatatccacaacgagcacggtgtcatacgacagctgcggctacataacggtcgtgccgcgtggtcacccgaggaagggtcacgaccgaggcgcggagcctcaaaagagtgaatacaccccggtatgatccagctgtcgtatcaagaaacatttgatgacgccgtcgacacagcacccccggtcgacaggggaacaggggagaggactgtccctgagcagaatttagactgggtgggccgaagtgccagagacgcaggatttggactacgagaggcagagcgtccgactataaatcggctcacaagggattcaagggagtcgatgcccagggcacgcgtttccaacaatgtagaagctgggaggacgagatagtcgcgtctggatcacccatggctagacgctgaaaacccaccatggtaccggaatcctgtcctcagcttcttaaatataactgccttaaaactttaatcccacttgcccctgttacctaattagagcagatgacccctccccctaaatgcctgcggagttgtgcacgtagtacgggtacaggcccacggcaggcctacccggcaattaccgggcaacaggtaacatgagaacatgaaaacagaaaacggttacaaactgtaccattctgtgtgacagatacggttccttaccacggaaatgtgccca

SEQ ID NO: 666495 - DNA, 259 bp, Homo sapiens
agatcccttttcatcctgttaggagacgccaaagaaggtgttagtctattagatccaaaatagaatcaaagctctccaaatcctgatgctgctggcaccttgatcttggacttcccagccaccagcactgtgagaaagtgtatttctgttgtttactgagtttacggctatttatgcttacgcagctccacaatggaactacatgacatctggccacataaagccaacatagatacagtgccagtctacaagaggcaca

SEQ ID NO: 666496 - DNA, 252 bp, Homo sapiens
cccccatcccccttaaaccccttttttttaaattataaaaatttggaaagccgggtttccactttttaaaaccctttggactttttttttgaattattaaagttttttatgccctcctttttaaaccctaaattttgtccccccccgtccttttttttttttttccttccaaaggatttttttttggggctattataaaaaaaaattttttggggtttttctccaaaaaaaccccgttaatgttttaaggga

SEQ ID NO: 666497 - DNA, 670 bp, Homo sapiens
  misc_feature (663)..(663): n is a, c, g, or t
aaaagagggagcgccccctcccaaaataattcagtgtttccgcctggtgtccacttaaccaatacagtgtttccccccggaaaacaatgggggttgggggccccagctcccccttttattgggctgggcgaccataaaacatccccccttcctgaaggcccctttttccccggcgtccctgtgggaccagggtggccattgtctcaccaattctggagtccttcaaacatttttaagagtatttgtgggcctcccccccagggaggggttccaagcagggaggggggcccctttatcccccccccccccgggagacccccccccttggggaggtagggaatttttcccccccacccccccaaaggcggtttctcccccaagaaaagacacccccccctttttttttttgaatttgagaacaccctaacggcggcgtggtatcttttctttggggacaccccgaaaagtcgttatttgggtgtggggacccccccatagtcttcaaacagctaatagaaaaccgcccttttggataaaatttccccgggttcaagtggcacacacaagccttcttataaaaaggtaaagaaaaacttttttgctccttccagagcagcgcgcccatacggtggaatataaaaagtcaaaaaattttcctcaaanttccaga

SEQ ID NO: 666498 - DNA, 143 bp, Homo sapiens
acgttctatgacatcggtgtgcggcgtgtggcgcgttatatgacattccatgttatgtgacattccggtgtgctggcgtgtggctgcgttatatgacattccatgttatgtgatattccggtgtgccggcgcgtggccagaag

SEQ ID NO: 666499 - DNA, 173 bp, Homo sapiens
agcctggtgaccctggacggctcgagacctgggagaaccctagcggccactaggcacagctatcacaggtcaatcacgaaaaagccggaccatgcatcagagatcacattagagagaaaggaagaatagatcagataaatactgaggaacctcctgaggagcatacaaaaaag

SEQ ID NO: 666500 - DNA, 625 bp, Homo sapiens
ggtaacgaattatctattctcgccccatgtcagcgacccagtatcatatcatggaatggaaatggagagaagtagatatccccttaaactgcaagtcagcaggatgttacttatacagtataactatagcaaaattcatacaaaatagtaattaacaatgatcttctatacttgtataactcacaaggaaacaccttcgaaactgcattaagttacagttggtgtactaaaatgtcagaacaactgaactacacacaatattgaaaagttaacaaattccattaattttttattcctggtaccactcaccacaatttacagggcaatcatacctgatgtaatgaaaagaaaaagaaaaagacaacgctccaacagcataaaagcactcaggaatgtacatctaattgacactacattgcattaatcaatagctgcactttatgcaaactgtggctatgacagtcctgaacacgacagggtttcctgtttaagctgcagtaacttttctgactatggatcatcgatccttctgtggcagattatttacacgttcctctaatgcatttgggacgactgtctctaagtaacctgcagataatctgacaactcctcgatctctctcctg

SEQ ID NO: 666501 - DNA, 343 bp, Homo sapiens
tgtccttatgtttctaacagcgctctacctccctccttcttatatttcacccctaatatattgtattttttattctatctattcttatttttattactactttctcaccatcctttactttcaaccccagaacatacactgaaagacatacttcacgatgactaggcgaatagtcatcaatgtatagaatgaggttacaatatttactcaggatttcacgctcgagctgagatatgatacatagcgctttcacagagatttattttgagtcaacgtgtgaactatcttatctatatttttagatagcatcacttctatgtttatgaaagaagaaaagctatcg

SEQ ID NO: 666502 - DNA, 517 bp, Homo sapiens
  misc_feature (36)..(36): n is a, c, g, or t
ccaagaaatgtgcatgggagcacccagcccacaaangccgggttgtgtcaaagcatggcccatgacaaaaaccccaagtttttcaatgtcttcaaagcccggatgaagtcggcccacaagcgggagacaaagcgtgttgtcccaaaagctttggaaaagctgcgtttttaaatggaaaaaaaaaaaagccaacctgtaaataaagctgtagcccacatgcagggtgaaatggccaaaaaatgtaagcaagtaaaggaaaagtgtaaggaggaatttgtaaaaaaaatcaaaaagctggcaacccagcccaagcaattgatttttcagaccaaaaaaaaacagtgggtaaaaaccagttttttttaaccccttatttttgaaaatgtaccccaggtataatgcccgttaattcaaaagggagctgtggcccatccaaaaaatgttttttaaaaaaaatcaaatgtgaaatggtcagctttagttttaaaaattttattaaaagtcctatgttttttca

SEQ ID NO: 666503 - DNA, 123 bp, Homo sapiens
ggaggccgcgtttgggaggatcgcttgagcccgggattacaggggcggccactgcgaccagctgcttctccttggtggactgataaacaccaacaaggcggcgcacgtcccgtcaggctcctg

SEQ ID NO: 666504 - DNA, 344 bp, Homo sapiens
  misc_feature (33)..(33): n is a, c, g, or t
  misc_feature (37)..(37): n is a, c, g, or t
gatccaagcagtcgttacagtcattcctggcanctcnggaggactggttccaggacctctgccaggtgccaaactccacggatgcccaagtcccttatataaaatagcacagtatttgtatataagctaagcacatcctcctgtatactttaagccatctctagattatgtatgatacctaatatgatgtagctaatgctatgcaaagttgttatactttctcatttagagaataatgacaagaagaaaaaagtctgtatatattcagaacagatggaatttttccaagttttttttttttttttttgagacagtctcgctgtcgactgcttggattacaagga

SEQ ID NO: 666505 - DNA, 197 bp, Homo sapiens
tctaacaaccgagaagtggaagcaagccaagtgctcactgacagaggaacagatttctttcaaagcagcatatacatacaacgaaacattattcagcctgaaaaagcaggaaatgtcgtcacacgcagtatgactgaacctggaaaacgtactgctaggtcaagcagattaagcaaaaaaaaatgaaccggatgaga

SEQ ID NO: 666506 - DNA, 117 bp, Homo sapiens
taagaggaaaaaataaatataaatataaataagatggtagagagccgtgcacggtggctcacacctgtaatcccagcactttggcaggccgggtagggatcttcctttcatcgatcg

SEQ ID NO: 666507 - DNA, 903 bp, Homo sapiens
  misc_feature (1)..(1): n is a, c, g, or t
  misc_feature (8)..(8): n is a, c, g, or t
  misc_feature (15)..(15): n is a, c, g, or t
  misc_feature (735)..(735): n is a, c, g, or t
  misc_feature (790)..(790): n is a, c, g, or t
ngagaacnaaggagnacagcgacggacaaaaaaaaggcaaaacacttttaaagcgcccgaataaacccgaaaaaaaagaagaggagtggcatagagcctctgctagactccaattgattctaattttttatatgaaatagaaaaaggcaataagagttaacctaaaagaagaacttatgccggcgatagtaggcatcaaccaaaaatatatttgaataaaaatgcttaatacatatatgaaatattggatgcgagaccaaatgtataaggagtgtcaataatagattacataaaatgacatgaagaaaatcgcaaggaagaatttgacagtaaactctaaagtttaatttatatctaatctgtttatggaattaacaacaagcgcccaaaaatgacgtgacgcagttgttatttttttcttacggatttagcttgatgatgaatatctgggagtgtggaaggcagaagtcagtcaatagtccggtttacaatctatatgtatgtagatgtagaccgttgtatgacatgaaagtgagatttgtcgcgtttttttaatatttagtttatattaatagttagactttatctcattttatttggatcggatatatatcaattctacagagtttagattatatataggtattacaggtgatatgatatgatagatttttgtattgatgtattacgacagtagttatctcgttgaggattttatcacatctccgctcatcngatgagtaggtcccaatatcggtgtttattgatatagatgcgtacattagttttnacatcgatcacggtcgcatctcgtgcactagtgtatttactattatgcgattgaattgcagtatttaggatagttactcattcgtttcttagtgtatgactagagacgtagcg

SEQ ID NO: 666508 - DNA, 175 bp, Homo sapiens
cggtgagccttggaggcttaggtaggtctgaggttggcacctcaatctacaccagagcccaggagtcccagaggcaagtttcacagaatgtcaaatgatcccatttccttgagtctgcttttttttttttttttttttttttttttttttttttttttttggggggcccccgggg

SEQ ID NO: 666509 - DNA, 276 bp, Homo sapiens
gagatcactgtgtatatctaacactttgttccacgtagcattatgtcagatagccagtagacatgtatgtatatagaactcctttaaagtttcttacgatatcttaattatatcgatacatgaattcacttactttcaaatggtagggcaaaaacctaattcaacttttttcgtccattttcctgtttgttaaaataaacattagctctccctacgtataatattcttgaccccaaattgaaattatttaaccttaagggtcaagctgggagaaga

SEQ ID NO: 666510 - DNA, 687 bp, Homo sapiens
  misc_feature (461)..(461): n is a, c, g, or t
  misc_feature (598)..(598): n is a, c, g, or t
tggccgggccctccgccttgcagttcagagtcgtgggcttgcccttagagacgatgacatcggaaggatgctccacaatccgcgggggaaagtcctcctggcgaagacgcgatcctacaaaacatgacggaataaagacaagctttaacatttccttatctaaaccttcggtttcacttgggttcctgatggggaaattaaactcttcgattatccaactgaacattattttatgtttctttttgtgtatgcatctcataagtcatctcaattcctttgcaggatagggcgataccaataaattaatatgttaactcaaaggagttaggtttaatgtgttccatgaatcatgacaagcaaaagtaaaagagaacaagagactttcttgttcttctgggatcagcatgggtactaagatgagtaagactaatttcctgtcctcagattgcttattatacacntgggaagaaagccacgtcagcaagtagctagaagacacacatagatagcatttaatgtgctgccaatatgttatcagactaacacagagacctgtaaattatgtacaaatattatctgcatttaacagatgaggcanaagcttaggaaatgatgtcagttgcccagtgtagatgaggcaagcagcagaggcaggattttgaactcagggtgtgttgactgaaggct

SEQ ID NO: 666511 - DNA, 424 bp, Homo sapiens
ctagaagcatttggagagggcatactcattccgttgctctgtgagaatcatttttcatttcaacattttcctttcagtctttgtctgcttacatatagctatcagaatggcagttttatcatcctttttcataaaacattataagcattttgctctgttattatattttacaatgaaaacttttaatgagtgtggacttttctgttttgtgaatgtcccataatttgtttgacacttgccttcaccccattaattcttgtgaattgtctatgtctgttattttttttggtctttggtatgaaaaaaattttttgtaggcaaatttgtgtgagacgttgaaactctttgtaagtttcaaaacaaaaacataaatattatttttctttacaaagcctgccatgttgatctgaaactacttcctctt

SEQ ID NO: 666512 - DNA, 711 bp, Homo sapiens
  misc_feature (72)..(72): n is a, c, g, or t
  misc_feature (74)..(74): n is a, c, g, or t
  misc_feature (79)..(79): n is a, c, g, or t
  misc_feature (81)..(83): n is a, c, g, or t
  misc_feature (86)..(86): n is a, c, g, or t
  misc_feature (112)..(112): n is a, c, g, or t
  misc_feature (114)..(116): n is a, c, g, or t
  misc_feature (120)..(120): n is a, c, g, or t
  misc_feature (125)..(125): n is a, c, g, or t
  misc_feature (127)..(127): n is a, c, g, or t
  misc_feature (163)..(163): n is a, c, g, or t
  misc_feature (170)..(170): n is a, c, g, or t
  misc_feature (185)..(185): n is a, c, g, or t
  misc_feature (189)..(189): n is a, c, g, or t
  misc_feature (194)..(195): n is a, c, g, or t
  misc_feature (212)..(212): n is a, c, g, or t
  misc_feature (218)..(218): n is a, c, g, or t
  misc_feature (292)..(292): n is a, c, g, or t
  misc_feature (294)..(295): n is a, c, g, or t
  misc_feature (297)..(297): n is a, c, g, or t
  misc_feature (299)..(300): n is a, c, g, or t
  misc_feature (302)..(302): n is a, c, g, or t
  misc_feature (304)..(304): n is a, c, g, or t
  misc_feature (309)..(309): n is a, c, g, or t
  misc_feature (311)..(311): n is a, c, g, or t
  misc_feature (321)..(321): n is a, c, g, or t
  misc_feature (333)..(333): n is a, c, g, or t
  misc_feature (342)..(342): n is a, c, g, or t
  misc_feature (360)..(360): n is a, c, g, or t
  misc_feature (386)..(386): n is a, c, g, or t
  misc_feature (397)..(397): n is a, c, g, or t
  misc_feature (400)..(400): n is a, c, g, or t
  misc_feature (403)..(403): n is a, c, g, or t
  misc_feature (425)..(426): n is a, c, g, or t
  misc_feature (439)..(439): n is a, c, g, or t
  misc_feature (445)..(446): n is a, c, g, or t
  misc_feature (448)..(448): n is a, c, g, or t
  misc_feature (450)..(450): n is a, c, g, or t
  misc_feature (452)..(452): n is a, c, g, or t
  misc_feature (454)..(455): n is a, c, g, or t
  misc_feature (484)..(484): n is a, c, g, or t
  misc_feature (493)..(493): n is a, c, g, or t
  misc_feature (501)..(501): n is a, c, g, or t
  misc_feature (551)..(552): n is a, c, g, or t
  misc_feature (555)..(557): n is a, c, g, or t
  misc_feature (570)..(570): n is a, c, g, or t
  misc_feature (575)..(575): n is a, c, g, or t
  misc_feature (582)..(582): n is a, c, g, or t
  misc_feature (707)..(707): n is a, c, g, or t
ccgccgcctcccacccacccagccctgccccccccccccctccacccctgctcgcctggcttccgccccctncngcccncnnncgnccatggccatactatgacgccataancnnnggcngagtncntgtcctttgtagggacatggacgaaattggaaatcntcattcncagtaaactattgcnaggncaaannaccaaacaccgcatgtnctcacncataggtgggaattgaacaatgagaacacatggacacaggaaggggaacatcacactctggggactgttgtcgngnncnanncngngggcngnacagccttcngcgacacacctnatgctaaangacgagttaatgggtgcngcacaccagcatggcacatgtatacntatgtcactcnccngcncattgtgcacatgtaccctaanncttaaagtataancccccnncncncncnnccgccccccaggccgagggaaaggtagcnaagtgttcnggggtccngacagaggggttccagagggctgaagcccttggtgtgaatagtatgaatnnccnnncctgccccccccntatcngaggtcngaactgggaggaaaaatcacctaatatttaataattaccaagtcctgcttttaactatataactagttatataatactataaacatttgctttattgtgtttaaaatatgtaaaccacttaggtnattt

SEQ ID NO: 666513 - DNA, 146 bp, Homo sapiens
gagctcagttgattatcacagttgaggaccacagcatgatctagatcgagtaagaaactgatggttatctgataggtgtttgcactcatcttggctgttaccatgcaatcagagatttggtgtattactgcctgcatggtaactat

SEQ ID NO: 666514 - DNA, 1069 bp, Homo sapiens
gatctcagctcactgcaagctccaactcccgggttcacgccattctcctgcctcagccttccaagtagctgggactacaggtgcccgccaccgtgcccggctaatttttctgtatttttagtagagacagggtttcaccatgttagccgggatggtcttgatctcctgacctcatgatccacccacctcagcctcccaaagtgttgggattacaggcgtgagccactgcgcccgggcaagaccttttttttaaaaaaaaaaaaaaaaaatttccattctttcttcctccagtcggttctcacattaccagagatacgcttcgggcttttcaaacttcctctcggggctggatcggccggcttatcggggtcttcaacagggtgagcttcccacatagtggttccctcagaacgggggctccagaaacctccgtggcctcaaagcccaatatttccccgggccatacaggcccgtcctacaaattagccgtgggccttacacgggtcattgaagcccacccaacacgtgtggcgccagagaacttagggatgggattacgacactttacaatccgtgggatcaacgccccctgtgtcttgtaagaaagccctttcgtgggcgactatgtcataaatgatcacccccgccgttcgagtttgaacgcagcgtggggtgtcagaacctcttcttctgcaccccgtgggggggtttaaaagtggagacgaacccagtgtggggtactctaatggtgacccgttttaccccccctgtttgaaagccccgttatgttgacactggggcgggaattcttcctcgtggcatagagggacctcccaacgaccaccgaaggtagggttgccccccactccactaagacagctcgcaaaagtagagggggagcacaccgaacccgtggggccattttcatcacggtgggggcccctttttctagcaagcggttgacagcgaagcgcgccaaagacacagacgttccttggacaccccaacgggaggggtaggcaccacctacacattcgcccaccaagaaggcctctgggagacagcaaac

SEQ ID NO: 666515 - DNA, 179 bp, Homo sapiens
cctgggaggccctagggagcaccgtgatggagagacagagcaggggctccagcaccttctttctggactggcgttctcctccctgctcagtggccttgctccacgggcaggggtcagagcactcccatatttatatagcacataaattagggagtgctctgaccctgcccgtggagccc

SEQ ID NO: 666516 - DNA, 306 bp, Homo sapiens
ctgggggaggcaaaaccaacaggtggacaggtgtttgcaggggcccaacttcccctggagctcaaaggtgtcccccctgtaccagcctttgataaactgcctccagttgtcctttatgaacattgcagggacaacctgtgtttgccagctgggtgttccgtgtaaaaaaccagcctgtttctttttcggtgataaaaccccccctttttggtgagcccagggtcccccccttggcttccaggagccctgggaagcatttttaactgggtaaaatttgactgtggcttgaaataaaaagctctcaga

SEQ ID NO: 666517 - DNA, 1607 bp, Homo sapiens
  misc_feature (94)..(94): n is a, c, g, or t
  misc_feature (497)..(497): n is a, c, g, or t
ctaactactctactgctggcctcgtgagcaccttctttcgaccccgacgctgggaggcgagagtcgccatgcgtagtatcgaaccacgccgtanttccttgagtttgttacgctcgatcgccttggataggtagtatcattgctttgattccataggcaaggcgttcggaatagtggactcttctctgattcattgtaagctatagtacttccctgagtccataggaagccactgtgtgggattgagcactgaggggtcattggcgtccttgacgctctcatcgaagtgatctagttggggcgtgtacactcagggggtctctcacttcggtgggtgaagctcagcaaaccagtgacctatttgaaccatgtccagcgtcacttagaccgtgacgcatcagactctagatgctagttagttctctagcgcattctctcgcatgagcgcaataaagatacgagtgcagcgttatgcaccccccaccaagcgcggtctnagaaggtgattttaacgctttgagcctcggcacgaacacttcccagcagcgcacatgcgagataatatgcaatatggatcctttggtagcttagcctgccgtcaatggcagcgctcgtcaggcgtagtttcaatcccccttcgttgtttgcccacgcaggggaacggatccggggtcgtggagacttcgggacccatatggatccattggagcccagaaaaggctcccattcgcacatacaggacgacttgattgacgtatacggacaggtacacacgcttaactgtaaacccctctgggtaagtctgaccaaccgttttcccacagctaagttgggtgccctaaatcctagagtaagcggcagggcctggtaactcttccgcacgaggtgcgattgagcgtgggaagggctttgcgaataatccaccctcgaattttgttcacacacgctaagttgtccctgcaagtgacttatccaattcccattagcaactcgaaacaaccccttaaaattgcccccaaggaaagtccacatttgttttccgagctttaatgtgccactcaatttgccgatcctggcgccgtttgtataattcgtcacaggctggggtaactttttccgcaaacccaacacggacatttttacggtggcggggagccctttattatcccgagtaaggagatagggtcccgcgggagcggtttagccattccaggtgaaactctaccacgcacagttagtgtagccattataccttcgaacgcattggaataaacaccaggttggggcaactttgaaacgggggcgggatggggggcctccacaatatcaatctttccattcctatataaaccagaccacgtgttacatcaatcttaaactataacatatcttgcactggacaaatgcttacggaagcacacgcacctgttggagcttccgaaaaagcgagaaaaacaggttccctacagtatggtatgcagcacagaacaccccatcacaatagaaaccctgggaggttgacataaatatagggggaggtggccccccgaacgaacggtatagcccagaaactttttgagacggcgcgcgatgactgtacaacataa

SEQ ID NO: 666518 - DNA, 292 bp, Homo sapiens
tgctccgggaggcaaggcaagacgatcccctgagcccaggagttagagagcagcctggacaacatagcaagactgtgtctctacaaaatatacaaaaattgggctggggatggtggctcacgcctgtaggcccagcagtctgggagaccaaggcaggaagatcgattgaactcaggagctcgggcacagcctggtcagcatggtgaaaccctgtctctactaataatactaaaatcagaggttgcttgcagtgagccaagatcataccattgccctgtggcctgggcaacca

SEQ ID NO: 666519 - DNA, 250 bp, Homo sapiens
ggctcaagtgactatcgtcagaggccagggagccatcgtgatcgtggagagacaggtgggccatgtggccgcagaggtcaccgaagatgtagtagcacggctcggagaaggtgatctggttgacggtatggcggatgaagccagctttcagcaggtggcgggcatactggcgggcctccctccggtccgtgaagccttccacatggtggtacagccagtccaccacatctgagccgatgaaagcattagg

SEQ ID NO: 666520 - DNA, 184 bp, Homo sapiens
ttagaaaaaacggggttcttcaacgtggccaacctggcttcaacctcctgacctaaggggatccgcaagaaggggcccttttaatggatccagcaccaaattccaaacttcccaggaagggtggtttcctgtcatttatataaaactttgggtctaaggcctttattgcttttttaattgaaat

SEQ ID NO: 666521 - DNA, 235 bp, Homo sapiens
  misc_feature (188)..(188): n is a, c, g, or t
  misc_feature (224)..(224): n is a, c, g, or t
caagcagttatacagaccaaattaggcatcctggagcaggtactctgaaaataacattaggcaacatcagagcttcactggcaaaggaaatgttaaaatcattttagggaaatcagtgaagtctctttagaaaacgagacatctggtggtataggggtaacccaagtctatagggccctacacggagnaagacgggggaagtcttattcatctgattgggtcancaaacaatatc

SEQ ID NO: 666522 - DNA, 598 bp, Homo sapiens
  misc_feature (274)..(274): n is a, c, g, or t
  misc_feature (335)..(335): n is a, c, g, or t
gaccgccagcgtaggtgctaccaccgttgccgtcgcctgcgccattttggatggcatggaagagtccggttctgggacagctggacgacacgtggtggtgactggtgaataacttgtaccaaaggggaaaacgctattttggcggaagctacttcgttctccaagcgggacgatttgggcccaaatgttgctttgtgtaaccaagaagctcagactgggttttccatatctcgccaggatttgggctctatatagttaacaaggcgttggtcanatcccaaaggccattttcgactgtgcaggattcaatcagggttcgggcattgactggtccnttccaccttcgtttgggcggccgttttgcgctttgtgcgcgaaacccccttttcccccaaaagggggacaatgttttaaccttttaacatatttagcgccccatgtttcacacattatgtcccggggggaacaactacaccactctataacactgtggctatgatgggagttatacgacagacacaccccctttttgatggagcatctttgttcgcaacccacacgacaccgtttaaaattgttgcggctgagggaatccccc

SEQ ID NO: 666523 - DNA, 364 bp, Homo sapiens
ttacgcctatagtcccaatactttgggagaccgaggtgggcagatcacttgagcccagcagttcgagaccagcctggacaacattgtgaaaccttgtctctacaaacaaaaaacaaaaacaaaaaaaatgaagaaattcccaggcacaatagtgtgcacctgtagtcccagctattcagaaggctgagatgggagaatcgcttgagcccaggaggtagaaattgcagtgagctgagattgcgccactgcactccagcctgggtgacagagggagaccctctctcaaaaaaataaaaaaagaaacccaggcaggcatggtggcacacacctgtagtccccagctgctccagaggcagagcagaat

SEQ ID NO: 666524 - DNA, 336 bp, Homo sapiens
gcgtcgacgttagtactaactcaaaccagcttttgtctcttcaggcatttgaaatgtcttttgccccagtcgtggtggctcactccagcaatcccagcactttgggagactgaggtgggtggatccattgagcccaggagtttgagaccagcctgggcaacatggcaaaaaacacaaaaatcacaaaaattggccgggcgtggtggcgcacgctgtagtcccagctactctgaaggctgaggtgggagcattgtttgagcctgggagacagaggttgtagtgaaccaagattgtgtcactgcactccagcctaggcaacaagaacaaaactgtctc

SEQ ID NO: 666525 - DNA, 133 bp, Homo sapiens
gcatttggaggccaggcggacggatcacttaaggccagcatggtgaaagccatccctactaaaaatataaaaattagcagggcgtggaggtgcatgcctgtagtcccagttacttgggtactacgctttggca

SEQ ID NO: 666526 - DNA, 305 bp, Homo sapiens
ctgttaatcctgccagccacctccacatattgtacaataactcaaccatgatactaaatcaccatattccgtgcaaactacttaacaacattgcgacttctctcccttaatccactctcgtagatctcttccctcatatttcttcagggacacaacccccctttaactgataacaactttacaccctccccgtcggaaaaccacccacagcttgtgcaatattccacacacacttcgccagcttttaaatgctttaacaactatgaacaccatctcggctcttgcccatacccgcattatcacaa

SEQ ID NO: 666527 - DNA, 111 bp, Homo sapiens
gtatattctagagattagccctgtcagttgcatcattgaaactattttctcccattctgtaagctgtctttttgttttcttttgggtttcctttgctgtgacaagcctttt

SEQ ID NO: 666528 - DNA, 308 bp, Homo sapiens
gacggatgctatggaccaggcaggacacgtgggcacctcatggagcggctgcttcgtcttctgagggccgggcacggtcacgcggcacccgccctgagcaccccatgccctgttcacgctcacccggtcacctccccacatcgcacactggggccccgggttcagcctggcctgcccgtgccctggtgaatcacctggctgagcagttcccctggagccccttcgggagcagggctgtgtcccaggatgggccacggttgagcctttcaagaggtacgtcctgccttggtcccatgggtaccgagctc

SEQ ID NO: 666529 - DNA, 238 bp, Homo sapiens
ttatgctcactaaagggcacagcaggagggtgcatctggaccaatgccctaccctgtcctacttaaagtgattcggtttgggaaactcgaaggtctatttgagagacccctcatcaatgtcactgagaaattgaaggaaaggagtttcttcccagtgtagctttccactgttctacctccccacaaccagatatctttcctaggatttctaacacagtcgatttggactgaaagagta

SEQ ID NO: 666530 - DNA, 712 bp, Homo sapiens
  misc_feature (266)..(267): n is a, c, g, or t
  misc_feature (451)..(451): n is a, c, g, or t
  misc_feature (515)..(515): n is a, c, g, or t
cccatttttttgttccccggaatttcgcccattatgcccgggagatccatcttaatctaaagggtcagggcgatgctctctaatcccagcaatcctgccacattctactcatcatatcttgaccaactcagtgtagagttccaccttactctataaaccataattttcctaatttaaaatgaactaataatgcccagatttcctatagttataacaattagatgatataggggcacatagatacatgcaattcctgcacagtgttnnaacccactgttcttcactctactctacagacagtattaccttaaaaaggatctgacacaggcctcaatcaacttataaccttattttccctatcttaaggccctccccaccttcctaagattaaagtatatttcttaacaattttttaaaatactccagtaaactctgttaatctctcattggntgcagcctactctgatccatctacaccataacttgcaacaccaacaaatgactctacttctctnttatttgcacttatgggccaacacacctataaaaacacttcatccttccaccccaaataagttctccctcttcgagttccccccttaccttttatgattaaacattttatttcttcttaaactgccaatactcatcatctcaacttttccttcttaaaccctttcattaaatccctcatctgtccattcttctctaa

SEQ ID NO: 666531 - DNA, 120 bp, Homo sapiens
aacacttacagatgaagatctgaaattttaaaatcctgtttgtatttttttcccaggccttcgaacgactacattgcattgttccctttgatgagtagattctcatagattggtgcaaaa

SEQ ID NO: 666532 - DNA, 540 bp, Homo sapiens
  misc_feature (299)..(299): n is a, c, g, or t
  misc_feature (362)..(362): n is a, c, g, or t
cctccctccacgggagggtttctcttgttttaaaaaatcccgtgtggcgattttttacccattttacacacagagggtattggtcccactttggccgggccccctgggaaaagattttccccggtgtggaagggcaggacccggaatggacatggtcactcagccccgccggcagtgtccccatgaatgatcatggcttttgcattttggggaaaaaggaaacttcgggatcctgtcagggtgtccccaatgcctggaaaagaagttgggggttcccacccttggggcccggaaaaggntggggctttccccttcccaaaagccagggctcctcctcctgtgggggggataatggggacacnggcctttttaaaagccgggcctggggcctgttaaaggaaaacccccaccccttgactccgggggggggagggggccaaggatgcgggagttaaatcaaacgctgccagtttttcgggcatttttttttcccaatggaattgaacccatgggccaaaaaaagttgaaattttcccccca

SEQ ID NO: 666533 - DNA, 695 bp, Homo sapiens
ttttttaaggcaaattattgaaatggcccttttcccttttattatatatgaagcgcgtgggccaggcaattccaatggagtgggggtttctgatttctttaaaaaagagtcctacatcaaatgtctgcaattggttcatttttttcatgtgagggtttataagtcaatatattgtaatatagcctttttccaccctttttaaagaatgagaattgcatgttctacagtagtcttttatatagtcctccagtccagagggtcagtatgccagacgcagaccctgacagcggttgctgcttgccagtcgatcgaaatcgtggattcttccgtcccacctgcatccctccgccaggcttcccgcgctccctgcctcttaaatgtgcatctgctccaggtatttgtaggtggggttctcatagccatggttctgcatcttgttcaggtgccgctcttgtggggtgagcattggatcatcctccgcgatcccgtggctgatggtgccatattgcttcttcgtcagcctcaccagctttatacgttggccgtgccattgcccactgcgattaccagctggccaatgagagcattgctactcagactgaagtcctcccgcggtgggccccagaattcccgctcttctcaaaatcccccacttctcggggctttgaatatcattcccttaccatccagagctc

SEQ ID NO: 666534 - DNA, 347 bp, Homo sapiens
actctagaggacttccgacgagttgtccgagttaccacctcttggactgaatcgattgtctagactacatgtattacagagtctatttggcaagattgctccatgatcatgtgcatatcatcccattgtaatgcgactttaaaaatatgtgaaacagctagttatttttacacagtgcttattggttctgtgtgtgggtgctgccgcttgactacaacagctattggtttgcctgaatgaggagcggtgctcatttgtgagcctgctatatacgcggacaactcgacaggttccgagcgtgaatgcgcgaacttggacatatcggtttacctgggtgactgtgtgat

SEQ ID NO: 666535 - DNA, 326 bp, Homo sapiens
ggtaccctatagtaccaggtgctattattagggagaagctatacaggagagctgccttatgaagcttcttaacttcattcatgattattctgttcctcattattctttgccttacataactttaaaacgatcaaaatctgtcatcttggatttcctaactctggcttcaatcttcttggcccatcgtgtggctgcccattttgtattgatgtctgccttctgccaggcttgtcggacatacttctggtgggcactgtgcggaaacttgaggatgaaatcagtgagctgcatgcacttgaaaggcatggcctgtctcctcacttgag

SEQ ID NO: 666536 - DNA, 1159 bp, Homo sapiens
ggcccggtatgcaagatgctacaatgtgactcgccttcaacatcagctactcccacaatccactcgtcagcgtagctccttgacatcgcagctgcgtatgactgagtccgactgctacgtgcatctgaccctcggctgcctctgctctcgattgcacccgcctgatcgtcagggctctcatcgttacccggtgtcccctagccagtctggacttcgtcgctcgtaagctccacattagtcttatcatcaatcactacgtacatcgcaggaaacgatggatatgcttctcgatacgtcgctagcatcattgggacatgacccaccgttttaccgcgaacactagccggtcttccttcttgtctgtccccggattgatcagctaggctcgatgcaagcgtgtccagagcccatgtggacagccatgagatcttagctcggagctgagccagcacgccgtctgaggcggccggtgtgcacaaaccagggcagcgcctacgtttgcagctggacaattcgcttaccaactccaaggtcgcagaatttgcctagcattttatgtaagtcccttgctttcgtgcattgcaaccccatggcgtaagtggcaccgtaaactagagcaaggatcctatctcgtggacaaacgcacttaagtgaagagatgtccgtaactaaaggccccacctgtaggttaaagaaagaggcggtggggggaattgcgaattaatgatcggcggctcgattgtagacttcacttgaacagagttctgtcgacggcctctttgtaacagcgactaaggccccaattacttcccatctacaacctcctaataccagtaatgacggcggttggaggccccattctgttcaacgtccacgttctaatccataagagagcttggttcgcggggaggacaatagagttctccgcccatgtggtggctttccaccgacaagtatcacagggcaaagcagcgcatggacaatttggttggtgtacccccaaggtgttgagcagcaacggtacttcagcaccctgggttcaaaagggtcctctggatactgtaatgagttggttcccacagtgacagcccagttacgccatggcgcgttctataagggacgaactagttcagggagcactacgaaggctgcccgagca

SEQ ID NO: 666537 - DNA, 684 bp, Homo sapiens
  misc_feature (601)..(601): n is a, c, g, or t
gaagggctttactcagagatcacatattcaggcccatgaaagaattcacactggagagaaaccatataaatgtggggattgtggtaaacgctttagatgtagctcaaatctttatacccatcagagagtgcacactgtagaaaaaccatacaaatgtgatgagtgtggaaagagctttagattgagctttaatctttataggcatcaacgagttcacacaggagaaaaaccatataaatgtgaagagtgtggtaagggttttaggtcagactcaagtttccagagccatcacagggtccatacaggagagaaaccatttcgatgcaacgtgtgtgtgaaaggctttagtcacagttcatactttcaagcacatcagagagtgcacacttgggaaaaaccctacaaatgtgaagtgtgtgggaaagcgcttaaattgagcctggaattttacaaacattaaagaaggctcaacggagagaaaaccttcacatgtggagaatgtggtgaaggtttttattaagctttcaaatttcagaccatttgagaggtccacttgggaaaaaacattctaaagtggtgcattgacaaaacgaataatttnggcttacaccctttaggccattatagagtgccaacccggaggcatatatatgtgacaatttttgggaaggcttttagcacggt

SEQ ID NO: 666538 - DNA, 211 bp, Homo sapiens
ggtgaaccgggatctggctgcactcttcgacgacatttgcggatgccgtcgatgtcggaaagtacaactgagggtcgaggcctgggtgtacatgttcaacgccacggtcaccaggtcgacgttaccggtacgctcgccgttgccgaacaggcagccttcgacacggtcgcgccgcatcagacccaattcggtagcgccacgccgtccatat

SEQ ID NO: 666539 - DNA, 424 bp, Homo sapiens
gagatgcctatcccttattctataaaaaataagtgagtgtgtcaagaaaccaactctatgaggggggggttaaaaatcacccttacctatgtgttctatctaattatgttggtagtaagtatggtgataatggacagtcaagttaaattttatatataaagaatactgattgatagagattgaagtcatgccagcacgtgtatgtaaaaatgaaggtggcaccggggtgagaccgaaagagaaatagtctactcaggttgtaaaaatatttgattctattctcttcctactgacctccttgccgtcttggtctgaaccatagcagaaggagtcctgcatctctcatgactggcgggctgaggtgatggaatgatcatacaacatacatctcagtctctgttgcatgaaatagcggctgtagtgg

SEQ ID NO: 666540 - DNA, 379 bp, Homo sapiens
gcgcagattgtatgagcccgggagttcaataccatcctggagcaacaaagtgaaaccctatactccataaaaaacaccgtttacccaggcgtggtgatagtagcgcctgtaggtaccagctactacgggaggctgaggtaggaggatcgcttagagcccagtggagcggggtgttgcggtagagccgggatctgcgccactagcactaccaagcctaggtgtgacacagggggagacccttatctcaacaaaaaaatataaaaaagcacaaaggaggaggggaaaagagagagggcaaacagggcaggtaggcaggaaggaactctaaaatttggctgagtagcttatactggtgtaagggcttaaacactaaagtact

SEQ ID NO: 666541 - DNA, 927 bp, Homo sapiens
  misc_feature (528)..(528): n is a, c, g, or t
  misc_feature (726)..(726): n is a, c, g, or t
gaaagaactccagattggacttcctggtgtaaatctcttcttgcttcacacaggtcatttccttggtagggtcgcagaaaaccttaagagctgcagggcttcaaagagaggaacttgcagtccaaagtagcaaaaggtgtctgcattctgagcctcttttgtaactgagcactcaaggtggggatcattgagataagggcttggtccccaaaccaccacagcatgaatttattgactttctcttctcctcgatcctcatggtcctgggaagcaagcacttttccatttccaaatccagtggctcaaacacctggaaatagcctaaagaaaatgcaagtcaggcctggcagctagagcaggagtcctggctcatggcccttccccggcccagcgctcggccatggcaccctagagtgtgtgtctccactgtgctatttttcagaagaatatgaggaacagtactcggaggccagacttgtggggcagaccttccgctcttctgatgaggccactaagcccaaccccaanccaaggccccagtctgccaggcgtctggagtttatattgatggtgagttgcctcatcccccaactgggagagccagcatgcacccactgacaagagacctccagctgcttactttaccactggaagctgctcagccctgtcaccagcagagctaccctgaggcccactgggataggccctgcacaagcaggtgcctgngctggtggcctggtcacgctttcctgcctccagaacgaaagctccaataaccagctaaacagcagcctatgggcactggctccattgccaggcaggaatacccctttcatcagcttctctccaagagctacaaacggaggagaccgaagatgagataccaccaggtgtgagggccccgaaggctccctgaaactgtgtacg

SEQ ID NO: 666542 - DNA, 656 bp, Homo sapiens
  misc_feature (233)..(233): n is a, c, g, or t
  misc_feature (286)..(286): n is a, c, g, or t
  misc_feature (354)..(354): n is a, c, g, or t
  misc_feature (404)..(404): n is a, c, g, or t
  misc_feature (421)..(421): n is a, c, g, or t
  misc_feature (425)..(426): n is a, c, g, or t
  misc_feature (433)..(433): n is a, c, g, or t
  misc_feature (444)..(444): n is a, c, g, or t
  misc_feature (462)..(462): n is a, c, g, or t
  misc_feature (469)..(469): n is a, c, g, or t
  misc_feature (481)..(481): n is a, c, g, or t
  misc_feature (490)..(490): n is a, c, g, or t
  misc_feature (504)..(504): n is a, c, g, or t
  misc_feature (546)..(546): n is a, c, g, or t
  misc_feature (549)..(549): n is a, c, g, or t
  misc_feature (551)..(551): n is a, c, g, or t
  misc_feature (557)..(557): n is a, c, g, or t
  misc_feature (563)..(563): n is a, c, g, or t
  misc_feature (570)..(570): n is a, c, g, or t
  misc_feature (623)..(623): n is a, c, g, or t
ggcatgagggagtccttatggacggtaaatggcgcctgtcagagtgggaaacccagctgcagaggctgcagccccggtccccagcggctaaaggacccccgagctcggggagggggaggccgctccggcccagcgctctgcgccctccggctccccctccccctcctccctgctccttcgctctgcaggtctcggaggaccccatcctagccctacctgtctcggcccgcaanctccccgaagccgtcggtgccactcccagcccatgtgggcccccgcgggctgnccacgcctgtcccccagctccccgttccgctgggctttaccctcgccaggggtggctttctgagccgnccgctccgtgcccctctctgcagcctctcctgccactcggggcccccgtnccccctcccgggggggngggnntgccccngggggggtggnggagtgggccgcgggggnccggggncggcggtgccgnggtcatcgngatgatgcggacgnagtgtctgctgggggtgcgcacgttcgtggccttcgccgcanagntntggagnttcttnatttacnttttgcggagggagatccgcacggtaattcagtaccaaactgttcgatatganatcctccccttatctcctgtgtcccggaatcgg

SEQ ID NO: 666543 - DNA, 1306 bp, Homo sapiens
ggcatgagggagtccttatggacggtaaatggcgcctgtcagagtgggaaacccagctgcagaggctgcagccccggtccccagcggctaaaggacccctacctacctgctccttcgctactgcaaggcccgtatactaccgctgtcacgagaaccacatataagaagacaccgatgaacaaagaataaaaacagaaaaaatacaaagaaaaacaagaagaaaaaaaaaaaaagaagaacacaaacagacgaagacagaagcacaccagggagacaaagagataaaaaggaaaaacaacaatcaacgcgaacaagagcgccagagaccagatcgcactacaaaaaaaccacgacatggagaagaacaagacatatgaagcagaaccataggccaacagactaaacaaaccacgaccaacacccacacataaccacacaaaaaaacaactaaaaagaaaaaaaaatacaaataactaccacattaacacaccacaacaaaaataccattcacacaaacaacaaccaacaaccgcaatacccaatcccacaccaatatataatccaacgttaacaacaacaacactcaacaataaaaactccaaaataaacaatataaccaaacaacacaacacacaactaagcccacacaaaaaaaccaccaacagtcccgaaatataccacaacaacagaatcacgacctaagccattcaatataccaaaagctaaataactaatatcaccataatattatacacacacactcaactaatccataaataataaaagaactaaccatcacactaaaaaaccacacctaccacttatccaacctcaccatacacaacaataccaccccactcaatcaataaactcaccaccacacaccaaacaaccaccatcacacacaaacaccatcacacactaacgactactcaccacacacccacgtcactacaaaacatacaccacacacacaaaaacacataaccccccacaaccaccacaagacagtcaatacaaccacacacacactcacaaacacatccaaccctaactcacactctataataacaacacaacaaaccaccatcaacacatcaaacataaacaaaacacaccgctcactaaccaccaccacaccaccaccccccacaacccccacaccccacatcacaaaactcaaaaatacccaccaacccacagtataacactaacgcacacctcacctaaaccaaaaaccaaactaaccaaaatcaaaaacaaaacatgctaactcataactcccaaccaaaccaccaccaacacc

SEQ ID NO: 666544 - DNA, 896 bp, Homo sapiens
  misc_feature (38)..(38): n is a, c, g, or t
  misc_feature (44)..(44): n is a, c, g, or t
  misc_feature (136)..(136): n is a, c, g, or t
  misc_feature (217)..(217): n is a, c, g, or t
  misc_feature (277)..(277): n is a, c, g, or t
  misc_feature (385)..(385): n is a, c, g, or t
  misc_feature (397)..(397): n is a, c, g, or t
  misc_feature (502)..(502): n is a, c, g, or t
  misc_feature (563)..(563): n is a, c, g, or t
  misc_feature (573)..(573): n is a, c, g, or t
  misc_feature (779)..(779): n is a, c, g, or t
  misc_feature (853)..(853): n is a, c, g, or t
  misc_feature (868)..(871): n is a, c, g, or t
  misc_feature (873)..(873): n is a, c, g, or t
  misc_feature (876)..(877): n is a, c, g, or t
  misc_feature (890)..(893): n is a, c, g, or t
  misc_feature (895)..(896): n is a, c, g, or t
ggccctcacggcccgggtattcttacgaccctggtgcnccttgntgccgccctgctcctcgctctgggcgtggaaaggggtctgcgctacccgagatatgcacccaatgtccagggagcgtgcaaaatttgtcaanagtggccttttattgtaaaacgacacgagagctaatgctgcatgcccgttgctgcctgaatcagaagggcaccatcttggngctggatctccagaactgttctctggagaccctggtccaaacaatcatcaggcacatacnactgtcatcatagacctgcaagcaaaccccctcaaaggtgacttggccaacacctcccgtggcttcactcagccccagactctgacactgccacaacatgtcaactgncctggaggaatnaatgcctggaaaactatcacctctaatatagacaaccaaatctgtcaagggcaaaagaacctttgcaataacactggggacccagaaatgtgtcctgagaatggntcttgtgtacctgatggtccaggtcttttgcagtgtgtttgtgctgatggtttccatgganacaagtgtangcgccagggctcgttctcactgcttatgttcttcgggattctgggagccaccactctatccgtctccattctgctttgggcgacccagcgccgaaaagccaagacttcatgaactacataggtcttaccattgacctaagatcaatctgaactatcttagcccagtcagggagctctgcattcctagaaaggcatctttcgccagnggattcgcctcaaggttgaggccgccatatggaagatgaaaaatagcactcccttggtgtagacaaatacacanttcccattggtgttnnnncntannataaacacttttnnnntnn

SEQ ID NO: 666545 - DNA, 861 bp, Homo sapiens
gccggtcccgcgggcatgctttgaagaggccttcgtgtcaggaagaggactgggccttggcctcccccgccgctctagggccgcagaaatagcagcgctgttttccagatcctggtgtaccgagcagcagcaaaggcggtccggtggcaggcatgtcctcctccccggaccaggccgcacgccctggttagcacccgcctcaggtctccgccattcgccggtagctcttgaccaattcggtggctcgttcccagccttagtcccgcccaagccgtgccgcatcgaagatggggtttcaccatgtgtggcagaggtttggtctcaaacttcctgacctcagaatgatccggctgttttggcctcccagaagtggccaggattataggcatgagccactggtgtctggcctgtcttcacattctgggaccagaaagaacgatttaccataagaggagactcatggaggaatgtacctgcctgcgagagacatgggtctgggctctgtcacccaggctaacagtgcctgtggcattcatcacacaggcttcacggacagtgcttcgactttcctgggtccaggggacttctcaattttcagcctctgtaataagcggggactacagggacttggcatgcatggaggacaggcggggaacctagggaggcctgattaaagatagtcccattctagtggtcttgtcacggtgcctggggcctcgcattgtgtggtgcaccttgtttctatgtaagagaccctcaacgttggtttctcgggtcctggggggggctgcagaaaaaggaacgggatggtctcacaaccctggtgtgcacacacctcagagcttgtcagatcccccaata

SEQ ID NO: 666546 - DNA, 132 bp, Homo sapiens
gagaagaccgacgaggatgactagacagcaaaaaaggaaaagttaaactaaaaaaaaaaaggccgccgtgaccttttaaccctccatttcccgtcttagaatctaaacgagggcaaccttcgagtagggagg

SEQ ID NO: 666547 - DNA, 1050 bp, Homo sapiens
  misc_feature (1050)..(1050): n is a, c, g, or t
ggaagaaccgagtccccgactcctgctgcattaatgttactggtgggcggtgggattaatctcaacgagataggcgatccataaggagggctgtgtggtagaagatgggggctggctgaggaaaaatgtgctggtggtagctgcatgcagcccttggaatgctttgtcgaggtttttgggaatagtctttgcctgaccttggctcggtagaatgagtatcacgaacgtggctacgacggtgattgtaaggggtctggtctccatcagcctcctcatctgggggagtggaatagtatcctccaggtttttcacaattaacatcggattattctgtttcagaccgactctgaaatacaaaggatagaagacttcgagagtctacaaaattatcgggcgctgcagtgcgaaacaaggggaaaggaagtggcccagggactttccttgtgtacgtgacccctagttctattctgggtctcactgagtggagtcaagatactctgaacggagatgtgcctcctagtaagctcgtattaacacttatgaataagcacgggtaacacctcctgttatatgaccttggggaaacatgaaaccttggcataatatgatttatctccacactagcagagagcaaacgagccccttcgacttgccgaaggggagtgcgaactagtctcaggcttcaacatcgaatacgccgcagggcccctgcgcctattcttggctagccgaaatacgcaaacattattataataaagagcctcagcatacatcttcctaaggacaacatatgaggcactctccctgagtctaagaccatatttgtgacagacctattcgaactccgtgctatgatcgaacagaacccgatgcggtgacaatcgtagctcaggaagattcacctcaccagatatgttggagttctacgtaatgcgtccccgctaagaaacaaggaaacacagaaagagccctggggagagaggcgtagtggcctgagagccgcccgttgacgcgcacacagaggcggaacagtgtctctgtggtacaaan

SEQ ID NO: 666548 - DNA, 152 bp, Homo sapiens
caggcggccgcccaggggacggacgctggcaaggccatgcaggacggcttcaaccgtggcgtcaagcaagcaagcgtcgactggtcgaagacgtcgaaggcggacccgagggccgacttctgggctggggtgggcggcttcttcggcaatgc

SEQ ID NO: 666549 - DNA, 300 bp, Homo sapiens
cctgaataatataaccgagatgtgcaactggtctagcaagtcactaagtaaaaaaaaaggaaggggcaggggataagaatacatcggaaccgaacttaggttgagtaccctaattttccttgacaacccatgcctgtccaatcagatgactctgggaaacgccaaacaggctgaatcaatgtcttggtgtggtttttttcttccagatagttgtttctcacctataaaaggatctatctttaaaaataaactgtattaaatctgtaacatcaaaggcagaaggtttgtgtgtgtgtgtgt

SEQ ID NO: 666550 - DNA, 318 bp, Homo sapiens
tctctcccattcatagtgtaattgttgtcatatattttgcttccacttgttataaaccacacaataattggtaattgttttgggaatggtttgcttggaagtatgcttaaaacctcccactgtgtcaaagttgcctttcccttccccaatttgcggctttaaaaaaaggcctttttggagccaaggaccacccttaagttaataatcttcttaaatccctggtgtgcaggatgaatggtctgtagttcacacaatatgaaagtcaatacatgtctaagaatgagaaaaaaaattaaaacaaatttctggagtctcaga

SEQ ID NO: 666551 - DNA, 549 bp, Homo sapiens
tttatactactgaacagtatacttaaaaatgattaacatggtgaaaccccgtctctactaaaaatacaaaaaaattagctgggtgtggtggcgggcacctgtaatcccagctacttgggaggctgaggcagcagaattgcttgaaaccagaaggcggaggttgcagtgagctgagattgcgccaccgcactctagcctgggcaataagagcaaaactccgtctcaaaaaataaaaaataaaaaaaatttaaaaatgattaagcaggaggccaggcacggtggctcacacctataatgccagcactttgggaggccgaggcaggcgatcacttgagaccaggagtttgagaccagcctggccaacatggcaaaaccctgtctctgctaaaaatacaaaaattagccaggcatggtggcatatacttataatcccagctactggtgagactgagacacgagaattgcttgaacccaggaggcagagattgcagtgagtcgagatcgcgccactgaattccagcctgggcgacagagcaagattctgtctcg

SEQ ID NO: 666552 - DNA, 81 bp, Homo sapiens
acatctgtgtacttctgtgccgtcagtgaccggcacgaggctgaagctttctttggacaaggcaccagactcacagttgta

SEQ ID NO: 666553 - DNA, 169 bp, Homo sapiens
cttccacctttcatactgcatactgatgacatagaggtttgtttgtgtcccatatcacaaagtaatgcacagcaagagagtatgaaaaggcccagccaaactgatagcagtagatatcccctgagcagcaagacaagctgaacagaagtgttcctagcccatgtacttt

SEQ ID NO: 666554 - DNA, 410 bp, Homo sapiens
  misc_feature (24)..(24): n is a, c, g, or t
  misc_feature (100)..(100): n is a, c, g, or t
  misc_feature (397)..(397): n is a, c, g, or t
atccacaatttatcctattcctanacttgggtggccagcctgccttccagattttttacttttaaaaaaatataccttaaaagtgaacctacaggcaggncatgaatgcctcatgccctgtaatgcccagcactttgcccaaggtgggcagatcaccctaaggtcaggagttcaagatcagccctggcctagatggcaaaaccctgtctctactaaaaaatacaaaaattagcttggtgtggtggtgggcacatgtaatcccagctacttgggaggctgaggtagggagaactgcttaaacctgagaggtggaggttacagtgagttgagattgtgccactgcactctagcctgggtgacaaagcaagactccatctcagaaaaaaaaaataaaagngaattacaacact

SEQ ID NO: 666555 - DNA, 979 bp, Homo sapiens
  misc_feature (979)..(979): n is a, c, g, or t
ggcatctacatcctcatcgctgtgggcgctgtcatcaggttcgtgtggcttcctggagctagctacgagggccatccaggaatcccagtgcctgctgtggacgttcttcatctgcctgggtcatcctggtgtgtctgtgaggtggtcgccggcaatctggggcttgtgaagcaaggaccagatcgccaaggatgtgaagcagttctatgaccagagccctacaggctggccgtggtgtatgatgacgcgcaatgaacgccgaaggctgtggtgaatgaccttccacgagacgctctgactgctgtggttccaggcacactggacgtgctgttggatcaccgtcagttggctcaagaacaatttgtgtccctcgggcgagcaacatgcatcaggaagcctcttctgagggaggactgccatcaggaagatcgatgacctcgttctccgggaagcatgtacctcatcggcattgctggcatcgtggtctgctgtgatcattgatcttcgaggatgatcctgagtcatggtgctgtgctgtggcatccggaacagctccgtgtactgaggaccccgcagactctggccacagggagctctggagtgccccctaagtgagccggagacttccgatggggccatcatcgcctgtgtatctaacgtttccggtattactctggctacacgtagcctctggactttggggctccgtttgtccgaacgttgctggtgcgtccagggctcacgtcacatgtaggtgggtgataattgagacggcctgggtcctgcggacggggcgggccctttgccggggtccagtggctggcgacacaggcctcctgggacatgccgaaaaccctggccctgggggggtccccccccccttggtgcacacttcccacccagacagtgccatcaccactaaacaaaaacccctaaaagtacaaagagacactctctcaatctcagaatgaataaatan

SEQ ID NO: 666556 - DNA, 643 bp, Homo sapiens
gctggatcgcctatcgccgtcgccacgtgcggcacatctttatgcccgctctgagatcgagggccaccatccaccagaccccagaattgttatccactgacatgcttgcactatgcacctgtaaaagttgcaggcagttaatgctagcctgtgaaagcagctgtggggactatatgcagagccacagaggcagagctgcccagagccttgggagcccactccttgtgtcagtgtggcctggatgtgagacgtggagtcaaagatcattttggaggtttgagatttaatgactgccctcctggattttggacttgcatggggcccatagcccctttgttttggctgatttctcctatttggaatgggagcatttacccaatgcctgtatccccattgtatcttggaaataactgacttgtaatgattttacaggctcacaggaggaagggacttggctggtctcagatgagacttgacttggacatttgagttaatgctggaatgagttaagactttagggggctattgggaaggcatgattgtgtatgaaatgtgaggacatgagatttgggaggggccagggtggaatgatatggtttggctgtgtccccccagccaaatctcatgttgaattgtgatcctg

SEQ ID NO: 666557 - DNA, 221 bp, Homo sapiens
acctgagatcagactatgctacagagctcatatgagtaggtccacaggcatgggtctaaacttagtactaatccaccttcccctggtcccacactcacagaggagccactcccggggtgacacaagcagctccgaatcaggaactgctgtcaaaatggagaaaggttctcagaactctgcattgtccacagctctccggtcagacgccgtgacgcagcgac

SEQ ID NO: 666558 - DNA, 903 bp, Homo sapiens
tcacccgggggtgagaaaaggaagtgtggggatggcaaaagaggtggacagttcaaaaacgtgcgggtgactcacacgagggcgagctcccctggtgtataagccgctcgcgcgggtgtccgtagagaacaacgggggggggcctcccaagatgagagccgtggcttcatcaaacgctgtacgccgcctcggtgtcgataaacaggagggtgcccgcccggaaaggcgaccccggacgcgcggtcgcataggtgatgccgaccgcctaggcgcgctgtagccggaggcagaaaggcacaccacgtttgccgttcggcaccatgccgccccgccccgatggggggtcgggaaagcgcccccactgcaagagcgccgcggggagaagccaccgcccctgcttgtcagaagggaagggtgaaggcaccagagacagttgtgcaggtgacacggcggtccctggcaccagaaggcacgccggtgtctagcgcgggccgcctcctcgccacacccgtgaagggcgtcctgctggagaatgggcgagagagcagcgccatgcggcctcttgccgcacacgcgggggaagccctatcgaggcaggtgcaagagaatgggggagaaaaacgctacatagcggtccgctgggatgccacagtaaaccactgatgccgttgtgttggtgaaatcggacaccacaacccttcgttcgtcttgtgggggactgcccacctggagcacctgcgacgactcccgcagatctgccctgcgctactactccgctgtcccaatagggacccctcttaatatggcaggcgatcaccatgtgagggcagcgagttgccgccatgggcaagagtttaacggcgctgtgcttccaaaaaaaacaaagccttctcaaacaaaaca

SEQ ID NO: 666559 - DNA, 539 bp, Homo sapiens
catcatcggcgcagtgggcatcggcatccccgtggtcatgatatttggcatgatttcagaatgatcttgtgctgtgctatccgcaggacccgcgaaatggtctagagtcagcttacatccctgagcaggaaagtttacccatgaagattggtgggatttttggttggtttgttttgtttggttggttgtttgtggtttgtttttttgcccctaattttagtattcattcggcattgctagataaaagctgaagttcctttatgtttgtcttttaaggcttcattcaaaattgccatttgtagttgagcggggggtttggtttgctttggtttaaattttttcagtggtttgttttggcttgttaaattaagcagaaatcctgcaatgaaagggcctatatttggtagcctttagccaagatattggacataaaagaatttttttgtttttaaaaaaaaccaaatgtctatcccctttaatcaagttgtaacttatattgaagccaatttgatacataataaaaaattatgccaatgtca

SEQ ID NO: 666560 - DNA, 188 bp, Homo sapiens
  misc_feature (173)..(173): n is a, c, g, or t
ctacatcttctccattacaccgtaggcaggtgtttcctctatcttaggggccatcaagtttcatcacgaaacaattatcaatataacaacccccgtggccataacccaagtgggtgatcctcctaagagtcgagcctggcagagctatgcagaggcttgggcagctgggccgntcggttattacaatc

SEQ ID NO: 666561 - DNA, 145 bp, Homo sapiens
cgtgaaccggccacacaggcacttctaaactggaaactttcatcctggctggtatggtgtggccaatccattcatctgaatgttctggccacaggcatgggggtggaatgggaacaaagtttattcataacatttggaaattcac

SEQ ID NO: 666562 - DNA, 349 bp, Homo sapiens; identical to SEQ ID NO: 627911

SEQ ID NO: 666563 - DNA, 210 bp, Homo sapiens
  misc_feature (92)..(92): n is a, c, g, or t
aaaagtggccattttcgttggtggtgttcagttgtggcggttgctggtcagtaacagccaagatgctgcggaatctgctggctcttcgtcanattgggcagaggacgataagcactgcttcccggagcattttaaaaataaagttccggagaagcaaaaactgttccaggaggatgatgaaattccactgtatctaaagggtggggtagc

SEQ ID NO: 666564 - DNA, 478 bp, Homo sapiens
aagcagtatacagactcataagtaatttattaaaataatggatctaatactcttacacttaaaatagtctcaaagattagttgaactataagacaataaaaaaatttttatgagtacctctgcacgtgacattcagtgacatactaaaaggtatttgtaatattagtgctaggtagcacatttaatatatatatattttgtttgtttaagagatgaagtttcgttgttgttgcccaggctggagtgcagtgccgcgatctcggttcactgcaacctctgccttctgggttcaagcgattctcttgcctcagcccctcgagtaactgggattacaggagcccaccaccacgcccagctaattttttgtattgtatctttttaagtagagatggtgttaaaccttgtgggccgggctggccttgaactcctgacctcaggcaatcaacccacctcggcctcccaaagtgctgggataaca

SEQ ID NO: 666565 - DNA, 314 bp, Homo sapiens
tctacaaaaaaaaaaaaaaaacgaaaagggacaaaaatttagccaggcttgggggtgcttgcttgtatccccacccatttggaaggctgaggcaggaggatcatctgacccggcggtttgaggttgcagtgaaatgaatttgtcccattgcttcccagccttggggatagagtgtgagactttgttctaaaaccttaaaataggataaaggggttaaaaattcaagggaaaagaattattccattaggttgtgaaattccttgaattccatattgtttggcttctaacattaaggttttggttgggaaccacag

SEQ ID NO: 666566 - DNA, 107 bp, Homo sapiens
ttctacagtgctgtgtagatgttgggactagaagggtcagtcgaagatctccccagtgtgcctgtaaggactattatccatagcctatatataaagcagagtcatct

SEQ ID NO: 666567 - DNA, 99 bp, Homo sapiens
  misc_feature (6)..(6): n is a, c, g, or t
  misc_feature (49)..(49): n is a, c, g, or t
  misc_feature (74)..(74): n is a, c, g, or t
atcttnatggcccaacattggttgtgggtagcgacaaaaaaaacaaagncacatgctgcctactgacttctggnaagttcctggtccacaacatcaagg

SEQ ID NO: 666568 - DNA, 204 bp, Homo sapiens
  misc_feature (16)..(16): n is a, c, g, or t
  misc_feature (66)..(66): n is a, c, g, or t
  misc_feature (88)..(88): n is a, c, g, or t
  misc_feature (203)..(203): n is a, c, g, or t
ggttccatccacgccnctaaggcccgttttttcccttagcccagacccctgttgatagcccagatncttgagggcaaactgtttgccncctcctcttgaaaatgattaggcccttagggacagtaaagctgtattttctggaaggaagactgtatcttctggaatagttttctagaaaactagtcatatacaataaaagtatnc

SEQ ID NO: 666569 - DNA, 222 bp, Homo sapiens
tgataaggaccatgtgtgatatgtaaaaatggaggagtagggacttggggccagccaagtagtccagaggtccagcttccgtgatgagtaacatggttcgtcctctcaaagagatttctcctagtagatatacttttccctctggcctaaaaggccaggctaacaaggctttaaaggcccaaaagaggaagaggtagttgaggccttcaggtggacctccat

SEQ ID NO: 666570 - DNA, 321 bp, Homo sapiens
  misc_feature (195)..(195): n is a, c, g, or t
ttaggcagggtcttgctctgtagctcaggctggagtgcactggtcaatcttggctcactgcagcctctgcctcccgggtcccgttcaagcaattctcttgcctcagcctcttgagtagctgggattacaggaacgcaccactatgcccagctaacttttgtatttttagtagagacagggtttcaccacgttggnccagactggtcttgaattatttaccttttacaatagttcagggactgtggacagggagatatgggggggaaaatataccttcatcttcctattttgtttccagactggattgtcttgcctgtttct

SEQ ID NO: 666571 - DNA, 328 bp, Homo sapiens
  misc_feature (157)..(157): n is a, c, g, or t
  misc_feature (176)..(176): n is a, c, g, or t
  misc_feature (240)..(240): n is a, c, g, or t
ctaacttgaatttcaaaagaaggataataatggaaatgcccggaagcttcaacatgtagttttaggctgggcacagtggctcatgtgtataatcccagcactttggctattattattaacttttaaaaacgtatggtcaccatatcccactaatcantttcccactctttcaaagntttttttaaattccacgctcaaacatattagagatgaaatcgcacactcacagactaaagaagnctatattcctatgttcgagaaaatgtacaaatattgattctggttttttttgtttcttttttttttcagatggagtcttgccgtctcg

SEQ ID NO: 666572 - DNA, 189 bp, Homo sapiens
taaacccgtctttgcgtctcgctcctgaatcgtagtcgacgttgagcatcactagactgatctatttaaacactgagtgggtgtggcagcgagagtcagtatatgggtcctatcctcctataaaggggtaggacagtatgactttggggcaacaccttcttacgcctccagtgtggcctatatagaatt

SEQ ID NO: 666573 - DNA, 130 bp, Homo sapiens
tagaggatacccgtaacagcgcaccaatgaaaatgaaaaattgcgatcctgatataaaccattctagagcgctcgttactggagggcgctcgttactgtgagggcgctcgttacggacggcgtgttacgt

SEQ ID NO: 666574 - DNA, 173 bp, Homo sapiens
tgctccttgtgcatgacatccacagcttttggagttatcctcttgaaatctcaatgtcacttggcacagtgggagagaggctgacgtatcaagcagtgaagtctccacctgctctgtgcttgctggttcactgaatgccactctcctttccactaactggacccatgttcttg

SEQ ID NO: 666575 - DNA, 791 bp, Homo sapiens
tatcgtttagaatgtaaagaagttttaagctaaattgagattatgtatcttttatttggtgctcatccttggtgctcttgtgatgcctgtccataacacttccatgacattttataatttcgtgtttctctcccttacaagactgctgtgattgctttgaggggtgaatacggtgtcttaaacatctctgtaaatctccaggaaataatttgcattcagtagatgtttgctgaatgactatgtaaactagaaggttaataaattggttgatagtgcaggtacaccatcccagtagctaaaatatttgtatataccatccagggcatccctttcttataatgcaggtaattaggaaaccaattttataatctaacaatgttgtgtatttagagaactggactagaagcattttagattattttaagagctgttttatttagtctctaaaaacaggacaaattttgataagttattccagtccacaattgactaagacaatggcagattcttatggtctaatccccttttttctgggcagcatagagattgtaccctgtattcttcttgcaaatgaaatagcagtaaataaaagattttatttctcttttgtgaactcaaaacatcagtaaattaacagatgaaaatcatgtcttatggattcatagtggtggcaaagagttggtgagcatgttcagtttgtgaattaaatattattttttaattcacagaccatagttgaacttgcagagacaggaagttgtggacctcagtatattctggagtactgttgg

SEQ ID NO: 666576 - DNA, 165 bp, Homo sapiens
tcgaactggcggaagtgcgagaaggggaaccggggctcgggcagctcccgaaggaagagcttcagggctccggtgataacgtggacgtcctccaagcgcccgtcatccaggtcaaggcgctcatcgtggtccaccttatagcgtagcttctggatggtggtcagg

SEQ ID NO: 666577 - DNA, 263 bp, Homo sapiens
  misc_feature (131)..(131): n is a, c, g, or t
gccagctgttcggcattgtcgaccgggtggaattttgccgtcggaatgccgatgccgttcaggaaactcttttgctcacgcggtcctgcgcgacttcgagggctcgggccggcggatggaccggaacgcgnccggccagcatctcggccgctccgaccgggacgttctcgaattcgtaggtcacgacgtcggaggcggcggcgagttcggcaagcgccgcggcatcgtcataggcggcgacgatactgccggttggcgacctg

SEQ ID NO: 666578 - DNA, 518 bp, Homo sapiens
caaaaactacagtgtctctgcaggtgacccaccagttacagtaatgtctttggtggaaactgtgccaaatacaccacaaatatctcctgccatggcaaagaaaattaatgatgatataaaatatcaattaatgaaagaagttcgaaggtttgggcaaaattatgaaagaattttcattttgcttgaagaggtacaaggatctatgaaagtcaagagacaatttgttgaatttaccatcaaggaagcagcaaggtttaaaaaagttgtcttaattcagcaactcgagaaggcgcttaaagaaatagattcccactgccatctcagaaaagttaagcacatgagaaaaagataattgtgttagtgcaaagaccaaggagaaacaaggacatatgctgtaggatggaacaggttattgctgaagctccctataatcctgaaatgaagagaattcccttccagaagctacgaaaaagggagctgtttaaatttaataaatctctgttagtaaaagctgcaaa

SEQ ID NO: 666579 - DNA, 155 bp, Homo sapiens
taaactttgtttggtagagacagagtctcgctcgtgttgcccgaggggggcagatcacctgaggtagggagttgagaccagcctgaacaacatggagagacccggtctctactaaaaataaagatactgtaggctgctgcagtatcacaaccggg

SEQ ID NO: 666580 - DNA, 511 bp, Homo sapiens
ttgatactatcttattctaacactttcttccaataccatggaggcttccaaatttatcaaaatctgggagtgtatgtgggccctcagttgactcactttgtatttttctagtttgtatctttcaatgaggatgcattttctgtttgcatgtagatggtaaattctattttgtatccactctacctcttacatctcatagatcctgtaggtatcctctggtgaatggaatacctctttaatttcaggtttaaaaaagttgtcttaattcagcaactcgagaaggcgcttaaagaaatagattcccactgccatctcagaaaagttaagcacatgagaaaaagataattgtgttagtgcaaagaccaaggagaaacaaggacatatgctgtaggatggaacaggttattgctgaagctccctataatcctgaaatgaagagaattcccttccagaagctacgaaaaagggagctgtttaaatttaataaatctctgttagtaaaagctgcaaa

SEQ ID NO: 666581 - DNA, 458 bp, Homo sapiens
tgctgaggtgatctagaggatcccgagctctctctgttggggacacatgggcagatgtgactgtgcctgtcactgaagtggggaaaagagggctcctgagggcccagtgaaccgccagcaaaccagcctaccacacccaccagaggcgtccaaaaggcctgatctcacccacagaggggggcaggagaggatcgctgtgagtccaggtgaaggagtcagccctccccaaccctcacaggcaaacttttactgctgccgcaggcttcctgagctaggatccccgattttgcgacctgtctcctcagcactaggggcaccagcaccaggcaggaaagcaaagaaaaactcgcagagtccatggggatgggcagggagggctccaggaagcgtcacatgggcacccagaaggcaagatgacacgggggtcttaggaatcgccaattgtgtacggagctcga

SEQ ID NO: 666582 - DNA, 321 bp, Homo sapiens
acgtagtgacaaattctcaaaattatgtgaaggcggtttatagtagaaaaatgaacattaaatgatctggcaacagctctggaggacagctccaattgcactcaccctcaaaacatctgtggcattgtgttgtgtgacaaaagtgcacattttagcctggccttgaattgtccccagcacaaggtacacctctgtaatgatcatgctgttttatcagcttcttgatatgccacacctgtcaggtggatggattatcttggaaaatgggaaatgctcacgaacagggatgtaaacaaattagtgtacaaaatgtgtcgacgc

SEQ ID NO: 666583 - DNA, 167 bp, Homo sapiens
gtctgacgattgtcataaataaatttgaaacgcatggactgcatccagtgtcacggcataaataacgggtaagatttgtctaatcagatgaatcattgctcaaatataattctacgactcgaagagagggaactaaaactcggacagcgtttcgtgaatctttcgtg

SEQ ID NO: 666584 - DNA, 108 bp, Homo sapiens
acagcctcgtgggttcgccagtctgctcgggtctggccccaccttgttggcttctacttcctcactcgtgttactccgagtaccttgaggatgttctggaagagctga

SEQ ID NO: 666585 - DNA, 152 bp, Homo sapiens
tatactaatactaagaactccccaagacatggagacgctccatcatggagtactttgaagaagccatgacctactatgctcagtcatcccgtaggtacaacggtccacggacgttgggcatgcttggaatttccaaacgggggtgcagctct

SEQ ID NO: 666586 - DNA, 103 bp, Homo sapiens
atatatagtaatcgcagctggttacagtagtatcccttatggggtaggtatacgttccaagacccccagtggatggctggaaccacggatagcaccaaaccct

SEQ ID NO: 666587 - DNA, 422 bp, Homo sapiens
gaagtcacgcacgcgcaacccaggccacagcgagtaacaatctctctgccgagtcttgctgggtaagggatgaatgtgcggacgcccgtggctgctggactgggagctgggaatgactctttgaaatgcctgcggctgctgagagacgcagctgagccgcgtataatatcacgttccaagcttgtaggctgatgtgtgtcgtgctcgtatgccagaaggcagtcacgctgcagagacatgctgcattgtaactcgatgccaggaaagtagagcggttcctcgccccctacgggaggcaagaccttcacctgcgtatctttgacccaagcccggaggacatagccagggcggacaacatcttcacggccactgaacggaaccgcatcgactacgtcagctccgcgtccgtatcgaccacgccc

SEQ ID NO: 666588 - DNA, 864 bp, Homo sapiens
  misc_feature (38)..(38): n is a, c, g, or t
  misc_feature (84)..(84): n is a, c, g, or t
  misc_feature (86)..(87): n is a, c, g, or t
  misc_feature (89)..(90): n is a, c, g, or t
  misc_feature (94)..(94): n is a, c, g, or t
  misc_feature (96)..(96): n is a, c, g, or t
  misc_feature (99)..(99): n is a, c, g, or t
  misc_feature (102)..(102): n is a, c, g, or t
  misc_feature (105)..(105): n is a, c, g, or t
  misc_feature (107)..(107): n is a, c, g, or t
  misc_feature (113)..(113): n is a, c, g, or t
  misc_feature (122)..(122): n is a, c, g, or t
  misc_feature (130)..(130): n is a, c, g, or t
  misc_feature (140)..(140): n is a, c, g, or t
  misc_feature (143)..(143): n is a, c, g, or t
  misc_feature (146)..(146): n is a, c, g, or t
  misc_feature (164)..(164): n is a, c, g, or t
  misc_feature (174)..(174): n is a, c, g, or t
  misc_feature (218)..(218): n is a, c, g, or t
  misc_feature (221)..(221): n is a, c, g, or t
  misc_feature (234)..(234): n is a, c, g, or t
  misc_feature (241)..(241): n is a, c, g, or t
  misc_feature (246)..(246): n is a, c, g, or t
  misc_feature (248)..(248): n is a, c, g, or t
  misc_feature (251)..(251): n is a, c, g, or t
  misc_feature (284)..(284): n is a, c, g, or t
  misc_feature (286)..(287): n is a, c, g, or t
  misc_feature (301)..(301): n is a, c, g, or t
  misc_feature (306)..(306): n is a, c, g, or t
  misc_feature (308)..(309): n is a, c, g, or t
  misc_feature (311)..(311): n is a, c, g, or t
  misc_feature (318)..(318): n is a, c, g, or t
  misc_feature (321)..(321): n is a, c, g, or t
  misc_feature (325)..(325): n is a, c, g, or t
  misc_feature (329)..(329): n is a, c, g, or t
  misc_feature (342)..(343): n is a, c, g, or t
  misc_feature (346)..(346): n is a, c, g, or t
  misc_feature (350)..(350): n is a, c, g, or t
  misc_feature (354)..(354): n is a, c, g, or t
  misc_feature (361)..(361): n is a, c, g, or t
  misc_feature (370)..(371): n is a, c, g, or t
  misc_feature (379)..(380): n is a, c, g, or t
  misc_feature (393)..(394): n is a, c, g, or t
  misc_feature (397)..(397): n is a, c, g, or t
  misc_feature (409)..(409): n is a, c, g, or t
  misc_feature (419)..(419): n is a, c, g, or t
  misc_feature (423)..(423): n is a, c, g, or t
  misc_feature (434)..(434): n is a, c, g, or t
  misc_feature (449)..(449): n is a, c, g, or t
  misc_feature (452)..(453): n is a, c, g, or t
  misc_feature (475)..(475): n is a, c, g, or t
  misc_feature (485)..(485): n is a, c, g, or t
  misc_feature (532)..(532): n is a, c, g, or t
  misc_feature (535)..(536): n is a, c, g, or t
  misc_feature (650)..(650): n is a, c, g, or t
  misc_feature (860)..(860): n is a, c, g, or t
gggaaaggagaaagaaatatacaaacaaatgacaggcngcctggtgaacatggtgaaagcctgcctctactaaaaccacaaaantnngnntggngnggnggnttncncctgtnaccccagcnactcaggngggtcagggntgngtntcactgaacctgggaggnagtgtttgcngtgagcagagatcacgccactgcactccagcatgggcgacagantgngactccatctcanacaaagnaaaananaancaaaaatcaaaatagaggggggggggtgggttngnngcggtggctggggngtggngnngnggtgggngtncatnagtnggtgagtgggaannggngatntggngtgtgtncgcggtggnntggtattnngggcttaggggtnnggncttgttatttgngacaacattnatgngcctgagaganattatactaagtganatnngtgaacgcgggaaaggacaganaacataatcntttttttttttttctgaggtggggttttgctcttgtgacccaggctnganngcagtggcaccatctccactcactgcaacatctgcctccaggctcaagagattctcctgcctcagtcacacgtttctacactcaagaagaaagtattacacagctggtgtgtanagactgggaattcagggtattatcttagaacgttgtctacccacataaataaacttttaaaatagtcttttgcctgtcacagtggctcatacctgtaatatcagcactgtgggaggctgaggcaggcagatcatgaggtcagctgttcgagaccagtctggccaacatgatgaaacccgtctcctctaaaaatatgaaaattagtcgggngtgg

SEQ ID NO: 666589 - DNA, 143 bp, Homo sapiens
gctcggtaccctctatccattatccatccatccgttatccactcacccatccatccatattcattcattgtacttaagaatgagctatataaaagtgaaaccacgggagttctagaagaacatatagatggatggatggatgg

SEQ ID NO: 666590 - DNA, 261 bp, Homo sapiens
ccccatcgcagcttgagtatttgtcggtttctgacagaaacatctcactggggagaatcttcatcttggccagctttgctgcttcttgtacctgtttcctccggccgccctcctctttcttcttcctcttctcctcttcaacccgtctcttttcttctctctctttcaataaagggtgtacctgtctaccagtatcaccactgtggccagtccttcgtggtcttcaaaccgcaccccaaagcttagggtacccgagctcga

SEQ ID NO: 666591 - DNA, 1312 bp, Homo sapiens
  misc_feature (181)..(181): n is a, c, g, or t
ttgggatctgcacataagtcttaaatataacccctcaaattgcataggtgacctggctgatacagagagacgaccataagatcaagtatgagtaagtcatgtacctcagcattcgagaagcttcaattcagaggtaaagagtggagttgtaccttgcctaactatctggctagtagggagngagaggtagtgacatgggaatacagactcattagtatttgtattccttgatgaccataggcgcaggagatctggctgtcacttcacttatgtgcagctccttatctacgtctgtgaaatatttctgcgaagcgtaccagagaaagtctcttctacacggttggtcgtagatacgtgttctataagcctagcgttagttcaatttagtcagaaaactactcttaggaccaagtcgcacgaagcacgagacacttaaattagaagacatcaactgttggcgtattttgagtagccccgtatcacgctaggcatatgtgcccacgatgtaccattctggtatgtagcgccgttgctaacgctccaattcgtgcttaggaatttgtaacaaaagtatgtctgcgctgcgcacgtttccagtgcatgatgtgtagggttaagacgcaagacgacaaacgtccgagaaaatataacacggtatggctccatttgttatgggctacaagactatttacgcacgtattaagagcgcgtaaggcgtggcacaaaaagaggtccgcaacgaagagggacgcagtaaaccctcaattgtactttatcttttccttagttagccgtaactgaaaacgtgggcgatggttaataacggcttggcgaaaaagggaaggtataacggtggtatgaagcatttcctgagggaggcccctgttctctagaaaccatcatatgggacttttcgccattataagttgcaagaagatggaggcggagctctaaaacaggtaggtgtagcccatttgggatgcccggccctgttgaggaaacaatccagtggaaagaactcggcaacaatagcttacaagaaccaaacagcaattgggcccgtttattacatccctgtgtttcctcgatggatatcgtgtaagcacgggactagccccatgccaacaacccatggtgtggggaatcttgcacagtggcgtgacgttcacgctttaaatgcgctctcccatttaaaccctgactgaatgacaattagttaaagtggtgcacaggttacacgaggctataccggacaataccgtatttggccagcaataaaactaagcagtgcaatggttacactcatgtttcg

SEQ ID NO: 666592 - DNA, 185 bp, Homo sapiens
  misc_feature (153)..(153): n is a, c, g, or t
ccagattaagatgtcagcacgtctcgactccatcgtggtctgcgccggcggaaatccggccactttctcgcatccacccactctctcttatttgcggagcacggcgcggcatggcgtccggatgatcggcgtctcagcgggtcccttcatccncgcccaggctggcctgctcgacagctatcgcc

SEQ ID NO: 666593 - DNA, 462 bp, Homo sapiens
agctttgggttcaaactgggtatcttggccctttaagcctcacactcacgtagtatcttttctgggacaacagtctatattgggtgggcctagggaaaaggaactgataaacatattctttaaaaatgtggttcatttcactttcctaagttaggcagtgtagcagggtataaaggagccaggatacagggcttcaacatccggctttggtccacttcattctcgatccagcattggcaggcaagtttcctcaaccggtctttctccattttcattcatctgtgcacaggggggctcagtcatagtcacctatggcagagagctttcacacagggttcaacgtcagttaatcacacattcaagcctttggaatcagcacgtgttcgcatcacatattcattcaacacatcaaaattggcagttttgatagcacatccatcattcaggtcacggcagctcggg

SEQ ID NO: 666594 - DNA, 161 bp, Homo sapiens
attgctgcttcgatgacgcaccacagtcacagcaatgcaggattcgatccacatccgtgacctacaccacagctcagacaacaccggatccttaacccactgccgcgaaggccagggattgaacctgcatcctcctggataccaggcaggttcattaccac

SEQ ID NO: 666595 - DNA, 987 bp, Homo sapiens
  misc_feature (52)..(52): n is a, c, g, or t
  misc_feature (96)..(96): n is a, c, g, or t
  misc_feature (100)..(100): n is a, c, g, or t
  misc_feature (112)..(112): n is a, c, g, or t
  misc_feature (117)..(118): n is a, c, g, or t
  misc_feature (158)..(158): n is a, c, g, or t
  misc_feature (176)..(176): n is a, c, g, or t
  misc_feature (180)..(180): n is a, c, g, or t
  misc_feature (184)..(184): n is a, c, g, or t
  misc_feature (186)..(186): n is a, c, g, or t
  misc_feature (210)..(210): n is a, c, g, or t
  misc_feature (213)..(213): n is a, c, g, or t
  misc_feature (235)..(235): n is a, c, g, or t
  misc_feature (258)..(260): n is a, c, g, or t
  misc_feature (273)..(273): n is a, c, g, or t
  misc_feature (280)..(280): n is a, c, g, or t
  misc_feature (287)..(288): n is a, c, g, or t
  misc_feature (324)..(325): n is a, c, g, or t
  misc_feature (363)..(363): n is a, c, g, or t
  misc_feature (441)..(444): n is a, c, g, or t
  misc_feature (446)..(448): n is a, c, g, or t
  misc_feature (453)..(453): n is a, c, g, or t
  misc_feature (462)..(462): n is a, c, g, or t
  misc_feature (464)..(464): n is a, c, g, or t
  misc_feature (958)..(958): n is a, c, g, or t
tctcacaaatattcacacatacgaagggttctagactcaagcagccccagangtaggaaggggcctttttttggaatgtcagttttagaaaagttnaaangactttattttncacannaaaatattaataataatattatcaataataataataaacnatgcaacataataaactntttnagangnctctgcaacatcctcttcccaganttntaggggcacattttatttcctngtttcacattcattttcagtctnnnagagaggcttctnctgtacnactcttnnctggcagagtagttcccagctcccagaactcaactnncccctcaccctgccaagcatggcttggcttggcctttnagaggaaggccctcccgggtctctgagtctctctttttccttggactcaatttccctgctcactcctgatttgtcaannnnannnccttncctactttntnccctcctcttttgccctcccccaaccccacggtggaagtgggtgagcagtcattctggccctcagtgaatgggcacgaaagatgagggagagtgtgtgtgtgttaccgtgaccaaaacactgcactatctggcagtcagagggtgctttcgctgggtatcgggagttggggacaaagaaaggaaatccaggctgtcttccagcagcggcagtagcagaggcggaggcggccgagccgggcctcatttgttagcgggtgtcgaggtaatggtcgccaccgaggcccgtcttctcctcggcagaggaaacaagacagatgggcctggacctggcgtgattaaagatgaaacgtggatccatcttcgccaaagctgaaaacgaggagctgcagcctcctcctaatttctctttctggtctttttctttcttccttcttcttgctttttctttttcttttttttaagaaagaaagcaagagatttgaatcttgcttcnggggggggcctccccgtggccctctattg

SEQ ID NO: 666596 - DNA, 631 bp, Homo sapiens
  misc_feature (395)..(395): n is a, c, g, or t
ctctctctctctctctctctctctctctctctctctctctctctctctctctctctatctctctctctctctctctcctaagataaaaaatgccctaacccacttcttaccacaaggcacacctacaccccttatccccatactagatattatcgaaaccatcacgcgactcattcaaacaataggcctgacccgccgcctaaccgctaacattactgaggccacctactcatgcacctaattggaagcgccaccctagcgatatcaaccataaagcttccgtctacacttatcatctccacaattctaattctaccgactataccagaaatccgctgtcgcctattccagccctcggtttcacactttagtaggccttacctggacgacacccnttttttattaaaaaaaaaaaaaaattgggttgtgggaagggggggggggcggccccacctccttcattaatctgggggggggcccgggccccacattgccctaaaaaggaggggtaaaaaaaaacgggccgggcttaaaaaagtggggaagggaaaaaccctggcgttcccccctaattacggttggaacccccctttgccccttggtatatacggggccgggcggggggccgttc

SEQ ID NO: 666597 - DNA, 341 bp, Homo sapiens
accgctcagtgcgtgattggcggcgcgcgagtgatcaacgagatacaggacccggcggccaacgaccgcatggacgatgccgagtggtacaacatagtcacgccgattctcgatggcatttccctggtgggtgtcggcggttcggcgctgaccactctcaggctgctcaaggccagcaaggcggcgaacaccggcaaaagctggatgcagttgctcaagggcctcaaccgccaggaacgggccaagctgaccaaggaactgttgaccctgcgggacccgagcctgacctccaagctgctgaagctgcaacagcgtgccggtgcgtcgcccaggcgctgttc

SEQ ID NO: 666598 - DNA, 433 bp, Homo sapiens
cgactccacatatctccattcctggtaccagacatgctaaatgtggctagagaaaacactcaagcatgctgatgggtctcactttaaatgcatgtctaggccaggtgcagtggctcacacctgtaatcccagcactttgggaggccaaggtgggtggatcacctgaggtcacaaatttgagaccagcctggccaaaatggcgaaaccccatctctactaaaagtacataaattaggctgggcgcggtggctcacgcctgtaatcccaggactttgggaggccaagacggaagatcgcttgaatcccaagatcgagaccaacctgttgcaacatagtgagactctgtctcacaacacatatatacacaaaaaaccccaagaaacctagctgggcgtggtggtgtgagctttgtggtccccagcttactggggag

SEQ ID NO: 666599 - DNA, 191 bp, Homo sapiens
acaaaaacaaaaaccccccaaaacaaaaccaaatctggaggcaccacattaccagacttcaaactacactacaaggctatggttacccaaacaacatggtactgtatcaaaataggcacatagaccaatggaacagaatagagaacccagaaataaggccaaatacatacagcgactagttctagatcgcg

SEQ ID NO: 666600 - DNA, 751 bp, Homo sapiens
  misc_feature (20)..(20): n is a, c, g, or t
  misc_feature (67)..(67): n is a, c, g, or t
  misc_feature (131)..(132): n is a, c, g, or t
  misc_feature (135)..(135): n is a, c, g, or t
  misc_feature (161)..(161): n is a, c, g, or t
  misc_feature (186)..(186): n is a, c, g, or t
  misc_feature (216)..(216): n is a, c, g, or t
  misc_feature (231)..(232): n is a, c, g, or t
  misc_feature (293)..(293): n is a, c, g, or t
  misc_feature (295)..(295): n is a, c, g, or t
  misc_feature (300)..(300): n is a, c, g, or t
  misc_feature (315)..(315): n is a, c, g, or t
  misc_feature (320)..(320): n is a, c, g, or t
  misc_feature (326)..(326): n is a, c, g, or t
  misc_feature (352)..(352): n is a, c, g, or t
  misc_feature (414)..(414): n is a, c, g, or t
  misc_feature (423)..(423): n is a, c, g, or t
  misc_feature (545)..(545): n is a, c, g, or t
  misc_feature (548)..(548): n is a, c, g, or t
  misc_feature (551)..(551): n is a, c, g, or t
  misc_feature (553)..(553): n is a, c, g, or t
  misc_feature (561)..(561): n is a, c, g, or t
  misc_feature (581)..(581): n is a, c, g, or t
  misc_feature (608)..(608): n is a, c, g, or t
  misc_feature (617)..(617): n is a, c, g, or t
  misc_feature (637)..(637): n is a, c, g, or t
  misc_feature (643)..(643): n is a, c, g, or t
  misc_feature (747)..(747): n is a, c, g, or t
gaatgcaattcattcatagnaacggaaatgcaaccatagcatggagacgctctgagaaaagatccanacccacctcatctcccagcccttcaagcagagctataaaaacaagtttgggagaaaaacacatnnccntccccaaagcagaggccccgcctganctcccccatcctcagcatctggggnggaccaggtgggacgaaggggatccaaggnccagggtggccaggnngcccagagctggggcaattctttgtaaactccaaggtttcataggtatgtgtgtgcatgantnacacngaacttgcctgaagnctggncggaancttagaagccagccctgggtcctagngcgaggctaggactgggcacgtagagggaaacagcacatcccttcctgaagcccctttctanggtaggcantggggtgcccacagctatggaggcagaacgggctgaactctgtatcatccctcctttgcccctggacattcttgggcagtgtcaatggcactgaaaggccaccagctggggtttggcaagantantgncntggcattnttttttttggtttttttttntccctccattcctggtgctggcatcantctgggagntgatgggatgaagaggtganctctgnattcagtctcttgtatcagaaggcgggtctcaaattggggtgagcgcattgctaaagagccagctctcgagcacaggtcatgagggatgagagtacgcactganccat

SEQ ID NO: 666601 - DNA, 463 bp, Homo sapiens
  misc_feature (147)..(147): n is a, c, g, or t
aaccccctttaagcagaggtgcaggatatgtcaataggtggatgcagatggaacgggcccttgacttccggagttcctgtccatgatggcaaaaagatgaagggccagccagtgaggaggagaccgaaaggcgttccgtgtctttgncaaggatgggaatggctacatcagcgccccaaagctgggtcccgtaatgacgaacctgggggagaagctgccccattaggaggtggattagatgatcagggaggctgacatcgatggagatggcccggtcaattatgaagagtttggacagatgatgactgcaaagtgaaggccccccgggcagctggcgaaggccgtttttttgatctctctcttttcgggggggccctcttttttcaacactcccctggggaccccggttttagcaaacccccattgattggctgagaatttgataaagcccccaaagatttga

SEQ ID NO: 666602 - DNA, 171 bp, Homo sapiens
atgggcccgcgttcagccctattttttggatgggaacgacgacgacttgttcctgtgactttctaccccacttatcctggacgagcctgtgggaaactaacaccctttacttgtaccttacacacgttactaccacgacacacactacgacactacacactgttaactacc

SEQ ID NO: 666603 - DNA, 109 bp, Homo sapiens
ctgagatggtacagcagattacttccatcagtattgagcgaggagtgggggtggaagtcagcatgggagatgttaagtcaatattttaataaatggatgagcagttgtt

SEQ ID NO: 666604 - DNA, 1622 bp, Homo sapiens
  misc_feature (1301)..(1301): n is a, c, g, or t
  misc_feature (1427)..(1427): n is a, c, g, or t
taaaaaaataaaaaaaacagggacttttcccgctacccaagcgtgtgttaaagccgcgcgcgtgatacgtggtttccgattatgtgtgtgccacagaagcagcaacgagaaagtgtggacagagccgcaagggttacaacgtttaagaaggttattctcttaaaagaaaaaagaaacaccatagggaccgtgggttcccattatgtgcacctttggagccattttctacagcatgtggcgatctctaagaagttaaacccacccaattatgtggcaaacaattcaaaattttttaaaattttaacctataaaagagtctcgtgaaaatcacatatattttctcaaaacacactgtgatttgtggtaccattgtggttctcattacacacacaaatatatatgtgtgaccgtgactatattccagagccaccgagagaacgcgggcattcctctcttgtgaaacaccagagggggtctcccctcctatagagatgggggggagtgagcggatacggtggtagacgcgcatattattatcttagacaagcttctcacctctccacacacttatcaaccatgagagaaaaacccccaaagggtggagaatcttaaaaaaacctctccaactgtggaaacacagacaaattagaaaccgagagtagtggggtctccgaggaggaagggaacacccaggtgggagaccggggggaaatctggtggaagcacctaccagcgtaatataaccagacaaaacggggctgcagaagggaacctacctaccgaggaaatcacacgacaccattttgtgcgacagacaaccccgggtccccccccgccattggttgtgcctctgggtaggacccccccaaggtgggggctactctttgacaaaccaagactgggtgccatattactccataaaatgcacccaagcgctaatcggtgttgtgttgtcaacaaaccaaatacagacacactccgcgtgggtggaagaccaccatgcccgaggcacccaggcagaacacgccttttcaataaaacaaacctcacggcgggggcgcctcgtggtaacacatatgttagcacatcatcacatcgtgggcacagccaaccatccattacaagcagcaaagagacgagggtagcgcccataagtacaaaataccactggaggattggggacagattaacaccacctggtggtgcgacaaccaccccgaacgagggggcaacacacactcacctgcttcacacaacagcggggggagccaaactgatcaatgtgggtcgcccacaaaaanagcctgtcttggtgcctacacaccaccaccgtcagtgttgcgtagacttttgtgagcgcacccgaagtattacgctatatagataaacaagccgctctcctacaatgtctgtctgcgcccatctcnacttagtccagctccaaccacaaaagaggatcgatccggggcctatcaaacaatatccaaacaacaccgggctgccacaaaatgtgtgctcgactccgtcacactcaaacaacgccagaagtaacactacggcgagcagacaaagctaaatatacgtccgttgatgaactcctccgacaaatcgaaacacgagtg

SEQ ID NO: 666605 - DNA, 368 bp, Homo sapiens
  misc_feature (226)..(226): n is a, c, g, or t
  misc_feature (340)..(340): n is a, c, g, or t
agactccatctcaaaaacaaaaaaaacaaaaaaaaaaagcaaaaacaaacaggtgagattcattttgataaaatagctgatttaacctaatatacctaaaacatcataattttaagataatcaatagaaacatttttgcaagattttatgttattttttaccatacgacgtcttggaaatcttggtttggaccagccatgttcaactgctcagtagccatgtgtgnccaagaggggccgtattggacagtgcagatggtgcatgagggtgttccgggcagtggggaacagcagtacagaggccctgtgggggcaccatgcctgctgctacgggaacagtnaggaacccccgtgttggcttgcaattgg

SEQ ID NO: 666606 - DNA, 126 bp, Homo sapiens
  misc_feature (5)..(5): n is a, c, g, or t
  misc_feature (93)..(93): n is a, c, g, or t
  misc_feature (120)..(120): n is a, c, g, or t
gaaanaatcatgctgtttcatttaaaactttctacttttcacaagaaaaagtcacacaattaatcaacatgtatattttctctatacataaanctctatttctctacggttttataaaanccttgg

SEQ ID NO: 666607 - DNA, 227 bp, Homo sapiens
  misc_feature (13)..(13): n is a, c, g, or t
  misc_feature (110)..(110): n is a, c, g, or t
  misc_feature (195)..(195): n is a, c, g, or t
  misc_feature (197)..(197): n is a, c, g, or t
ccttttgaagaancgactatagactccaatagaactccttattagtctgctttctgagcaggtgtaataatatgctctctatgggaactacgtagtcatttgttcaaccnacaattaaggaggcaccactcatagttggttacataattggcagatatcttccagtcaggattattttagaggccataaagaacnanatggttttgctataagtacattctccgttt

SEQ ID NO: 666608 - DNA, 1144 bp, Homo sapiens
aattttattcaaaattaaataatttaaatctagcatttaaatttaaactaatttaagtctagcatttacttttaaactaacttataatgaacgttttgaaatactacgttaatccagacctttagttgtcccatggctgttaataaagttgccaaacgaagatgtattatgaacaattcagcaataagacaacttgtcaacacagcttgcagaactaacacatggtaactcgttagctaactacttatagaacttggaactttgcctacctgaacatacgttatagactgacttacttgctgatgctgaaacttgaacttgcagcactgacacaacccagacatttccagcttggcttcttgtaagctctcttgcagcacatctaagatacatggaggtctttctatatataatctgcaaagcattaagctctgattctgtaagaggctgcatctcctttgacacaaactgtaaattctctccagcaaaacacacactaaacgaacacataacaacatggaacatgccgtagataaaacaaaacacacaaacaacagaaacacacagaagaaaaacaacgaacaacaagaaacaacaacaatagagacaacgagaagaaagagaggaagcgtaagacaacgagacgaaagacagaaaagacacacccgacgcaacggaacagacgcacacgacagagcgcagagaagaagagagagagcgcaagagcacacgcaaggcgagcgcagaggagataggagaaggaaggacgagccgaatggcgaaagagagagagacaagggagagggagagacagagagtgcgacaagaaaagaagaagagaaggcagcacggcagacaggggacaaaaaagaaaaggagaaagaaagaggagagagacataaggaggaacggacgggggcgcggcaggaggacagaagagagggtgatggcagcgtggtcgatgggcgtagacgggagccgcaaacaagggtgcggagctagcagggctcgtagacggtataaaaagctataaaaaagggaagaggctgaggcgaagggatttgtacagagaggccagttgtagaagaggatgaaggaggtgataggtataacgaagaccatagtataaacgaggagatgggga

SEQ ID NO: 666609 - DNA, 100 bp, Homo sapiens
ccaaacaaactcattattatggggatgggagtcaggtagaggcctccccatgcatgatatccagcgctgtcacacagtgcttatgttcacagtgcttaca

SEQ ID NO: 666610 - DNA, 1747 bp, Homo sapiens
tttttgtaagtactatccttccgttagttagctcgatggtctccgttgtgctggcgtcctgcccttcggagacagaggttgtctgtccagcggtgggctcagtgtaccgcatcgtagtgtcagctgccgtgctgttagtcagctaggtggagcgactccttgtcgtcacatgcgtggggtataatgatcgggtcggtctgttcacgcgtcacaaaccagatgtgtctggtgttgtgtgattacgcgttgtgcgtctttgttgcgtgcttgcgcacagccagcccgctgctgggtcgtgtgtctttgtgtggcgcggcggtccacagttgctcgcctgactcctagttgtgctccgcggcgaagtgtgtgtttgttggttactgccccctgctgacttgtcctcccagcatgtgtgttccccacgtgtgggctgctgttggggtcgtttgggtgcgggcgtgttttaatactatagctcagtgctgctcgtcttgttgagtttccaactgtcctccctatgtagtggcgtgttcatcactcgcactccacgcaggtgaagtagttgtgtgggttgcctcggtccaccccaagggctttcccccgttcggtgctagactaaatgggggggggcgcgactccaacggtatagtcgtgtttcaccgtcttggtggagtacgcggtcgtttgtgcggtatggtagctgttggaggtgcggtccacatccgtcttgcgcgtgcccgcccaccatccttgtgcgtccacggggtggtgtatatcaaccctggtcatgtttctgcgctatttcaactgggcgcctgttgtgtcggcgtgccgtctcgtccgcttcgcatggtggcttcccgccttggggggggtaaacttttcctatccggggcggagtgttgttatgacgcccgcgcgtggcttggtgtcttttcttttcttgtgggggagtgggcccccgccgaagtcctccccccacgctgctcccacgtgtgttaatgaggggccaccccacttgtcgtgccctggtgccagcttggtgtgtccactgatggggggtgtctcacactgtggcccccccctcttttatgttgtgtgacacaacgggggtcccgcctgggcgctaggctctgtccgccttctgggaggccccaccacaccgcaccgctggggggtgtgtgacacacagaagtgtgcccacttacacagcgtgtgccccacggtcgccccacacactcgggcgcccacagagtggcgccacagggtgtgtgacacacagagcccacacggcgttcagacttgtgccttgtgtgtgtctgtgccgtggggagatttttcttgtctgccgctctctggtgtcacccgctctcccactgtgtctcctttcacttgggagagtgagacctcgagagaggtgtgtgggctgtgcgctcccacctcttgtgttctccacagtgagttatctgttgccctctaagtgtgtttccccacacagagagggagaaggcgtggagaacttcttaaactcctaggaacccctctgaatagttagtttaattgctgttttctcctaagtggttacacacacttgagaactgaattgaagagtggtggtcgggtggctaacggaggaccaccctcacccttctcctttccccacttgtgccgcctttatatcacaattgcctgttttgtttttgtttgtttttttaactttcacataataaaatggagttttcttcca

SEQ ID NO: 666611 - DNA, 503 bp, Homo sapiens
cacgactccgagtttccactcatcaaatacgaacgattagatgaattctatcgaatgatttctttatgatattggccagggacgatttgcgtcattcacggggaactactggcatagctgtggctctcactctgtgacaggtgtgacatgtacgtctgtcggaattgggagaacctttgggtgctccttgatatcctaccccttgtgaccatcatttctgaaagcttgtttactgtgaaagattaaaacaaaacacatttagaatagtgcaattcgccatatatgacatctcagcatcttctgcttttcctggactccaaaattaaattgcagttcttgaaaatgtatgtatgccctttgttacagcaacagtagccttctgtcacaggggttatcttgcctctgcagttccagctacttggaaggttgagatgggaagaccgcttcagctcagaaggttgaggctgcattgagccatactcataccactgtactccagagaa

SEQ ID NO: 666612 - DNA, 850 bp, Homo sapiens
cttctgtgctgtgtgcgttgtcatttcggtgcaaccttgtgctccccccacgttttctggccccacacaaagtagtggggtccttctgacgccccctccgggtcttaatactgtgtgttttcctccttaacaaccgttggcgcccccacggggtggtgtctttatgcaaagacactccgcgcgcgcacttctaatgtgtgcttcacacccccacacggggggtgtgcctcccatacgtggttaattgaacaatgtcgctgtgtcaacacccatgtagactccgggcgttcatattgcaacgaatttatctccacccctctggttaggagaaacacacacgcgggcgtttctttgtttgtgccacaccacaacattcgttggaggcgcatgttcgaacaccacccctgtggcctttctgggcgaggttctctctcaccacaagggggacatgtttctggcgcccgcccgagtctgtcaaccacataaagggacctcgcgtgcaatcacggctggggggtttctccttgccccaagtatattgccttcacacccccttcgcgcgtgtctctggcggagtaataacacatctcgactctcgctcgtcgtgatacacccgctaggttaccgcgccagcaccgcagagggtctaccgccaacgggccaagtagacgccccaagtacccgatcgtcggcatactaggggcagccccccctcgcctgcacaacgcaacgtgcgcggaagccacaaggcggatgcacacaagaagtcgaaggaacagacggacaccgcacacaccacaggtacagataataagacagaccgccaccccgccccaccaatcgatacaaa

SEQ ID NO: 666613 - DNA, 369 bp, Homo sapiens
taagagtgaatgttacaaatcataacatgatccaaatttattagaaagtacttttaaaatcagacaaaagacttacaaattactagtttaaatttctattccaccatgtaaaacaagaatacaggatattggtcatgctaatattcaaaatgtgtttaccccagttcataattcctctgctcccctcctacctaaaatctaagaaagtattcattatatattggaagttcagaatttttagaaagccaactggatgctgattcgtatgattttctttacatgtacgatttacttttcagcaacctgtaagccatgtaaagagtaactccatatccgacaaaaaaactcaaagctctatatggctggaga

SEQ ID NO: 666614 - DNA, 139 bp, Homo sapiens
tgcaagctgtatgcttacaagagattcatagaggatcccgactcagtcggtcatcgtcttacctcgggcgtccgtcacgacaacatgcaagcatgacgaccagagttggggtaccgcagcctacgagattcagctaagt

SEQ ID NO: 666615 - DNA, 782 bp, Homo sapiens
  misc_feature (31)..(31): n is a, c, g, or t
aggcagtttggacttggagtcgtgggggggngcttttaacaatctaatttacaccctcttctgggtcacgctagaatcagatctgctctccagcatcttctgtttcctggcaagtgtttcctgctactttggattggccacgatgggctggagctgccttgtgacaagatcaggaggggtggggggtcataggatcgtccgcctgttggtggaagagaaggaactgaaggagatcagggccttggacatggccttcagaccagaattgagagaggaattttctaagctccagaacaggaccaagctgactgtacttgaaggagacattctggatgagccattcctgataagagcctgccaggacgtctcgggtcgtcatccacaccgcctgtatcattagatgtctcttggtgtcactcacagaggagccatcatgaatgtcaatgtgaaaggtacccagctactgttggaggcctgtgtccaagccagggtgccagtcttcatctacaccaggagcatagaggtagccgggcccaactccctccaggaaatcatccagaacggccacggagaagagcctttggaaaacacatggcccactccatacccggacagcaaaagccttgctgaaaaggctgtgcttgcgggtatggggtgggatctaaaaatggggacccctggacacttgggcgttaaaaccccatttttttttgggggggggggccattcctttttcgcgaataaaagaagccccccccacacgggacccttgcaggggttaa

SEQ ID NO: 666616 - DNA, 332 bp, Homo sapiens
tgggtgatcttgttgctgcttataaatactgaatggaattgatcagaagcaagatgcaatatcccgacaaaacgcaggttctccaatgcgaactttatggtgcctctgactaatccataagcaaaccaaaatttgagccctttagagtaatctgagacacagtcatactttcaccctcttgtactttattcctgagctccttattgcagtaaatcagctaatgttcttctactgcacattattttctataagtaaaaatgactaagacagtatgttcatgggccttaacgacgtatctttcattctctcccttcaggagaggggctctcaaa

SEQ ID NO: 666617 - DNA, 447 bp, Homo sapiens
tggtacccgttatcattgaggaggtgtgcggtgcagccctgggaaatacatccagaggactgcaggtatgtaagactctgtattcacagcagtgctgcgcccttacacaaactggcaattgccagtctcctcaagccccttctattattttccactcatacaccatgctgttgatgtttttatatcttttaacaacattgtcctgaaacttcctcctcttttagggctcttagatgttctcatttgttcacactgtaataatcatatgccgttgactcagccgctgtgaatattcctgctgtagtgatggctcctcccctccccaatgctcacatcttattcattccctccatatatggacagcaggcaaagcttcagggaggggaaccctgagcacaaaacgtgaatctccaaggaaataagaaaacggaggtggccttgaaggtg

SEQ ID NO: 666618 - DNA, 383 bp, Homo sapiens
ggatcctgtttacctaatggtagcatgctgtccagtttctgcgtgaacatccgttctgcgcatagtacctttgcagagctgcgctctgtttcctgcatagtgtgactcctgtcttactttatggtagtagtgtactggtctccacagcctgattacatcaaccccagagccgtgcagcatagggatcccttctacgtccgcggactcaccactctaggttataatcaacagagcatagtagctacccctgaaaaacgagtgattacatgccctggaatgtattaagacgaggaagctttaacaatcagaagtacttgcaatactgaaaagggtaatgctgtggaggtacttttagaacaaaatgtgagttcaacagacaccta

SEQ ID NO: 666619 - DNA, 219 bp, Homo sapiens
actggatggatctctagagtctgaccagtgctccagcgttaactgatattttggatggtcagcactggtgctcactgtgtcgacggaacttgtacatgtggaggcatgcacctgcagtgggtgaatacactgtcgaccatggctccagtcttaactgatattttggatggtcatgcactgcgtgctacactgttgtctgactggatactatgtcccatg

SEQ ID NO: 666620 - DNA, 245 bp, Homo sapiens
gatcttttcattaaagaatgttttggaactttactcgctgggccttggcctcttcttctcttttcctccctaataaccttgaaccaggggaacccagggtgtcttgggtgccctaactctggtaaagggaaggggagttgggaactctcttcgagtgccataggaatatatcctcgttgggagcagtggacacagggtctgtgattttgtcttcctcgggaaaggggaaggggaggacacgaccg

SEQ ID NO: 666621 - DNA, 350 bp, Homo sapiens
  misc_feature (36)..(36): n is a, c, g, or t
  misc_feature (52)..(52): n is a, c, g, or t
gagcttattacagcgtcaggcaggcgtcctccgtanctgactcccaaagtgntgggattctgggtgggagccaccatgcccagcaatcacaagggtctttataaaagaaagagagtaggagattcagaattggagcaggagatgtggtgatgaaagcagaggtaagagagggagatttgaagatgcttcacctctggctttgaagatggagtcaggggccatgatccaaggaatgggggtggcttccagaagctggaaaagccaagggaacatattagagtctccagaaggaatgcagccctgctgacaccttgactttagccttaatagacctagtttgggtttctggc

SEQ ID NO: 666622 - DNA, 148 bp, Homo sapiens
acagtgatgctgctgtgactctaaggatcccctctttggtttccctgatggtggtgatcccaggtaaactggcgctctgatgctgatgtgtggagtttccagtgcaaacttccctcccgggccctcagtccatccacaaccaagcaac

SEQ ID NO: 666623 - DNA, 131 bp, Homo sapiens
ggggagtatgctgacgctcgggaggtgtctatgaggctcagggagttatcagttatatgaatgttgttgagttggctggcagtctggaggagtggaggtgggttggcagcagcggctgtagggtggtctgt

SEQ ID NO: 666624 - DNA, 347 bp, Homo sapiens
gggggttcaccatgtggcagggggtctcgagctccgatctcaggtgatccggccggctccgtctcccagggggctgggaattataggcgtgagccacgaccgggctagtttggagtgctggttacttttaatggtggttaccttggttttaatgttaaatcgtaaacttatataatttaaaaaatggtttttaatttttaatttttaagtagagacggggttacaccaacgtggtccagggcgggtctcaaactcctggaactcaaatggatacactccccttcagcctcccaaagtggctggggattcataggtgtagagccattggagcctgggccttaaacttt

SEQ ID NO: 666625 - DNA, 284 bp, Homo sapiens
ttggtccgtgttggccacgcaccgtggctcacgcctgtatcccagcactttgggacgccaaggcgggtggatcatggggtcaggagaccgagaccattctggctaacacggtgaaaccccgtctctactaaaaatacaaaaaattagccgggcgtggtggcgggcgcctgtagtcccagctacctgacggtgcgttggcccaacgttggccaacgcaccgtcatcaccattataatcaccatcaccaccatcatcctcactaccaccatcatcaccatctcaca

SEQ ID NO: 666626 - DNA, 305 bp, Homo sapiens
accacaccgcagactattttgtacttttagtagagacgaggtttcgtcatgtaggccaggcatggtcttgaactcctgacctcaggtgatctgcccacctcggcctctccaagagtgcttgtggttacaggtgtgagccaccatgcctgtgccagggagagggtaatagaagtgacacaggaaagcgggtgtgtgaggctttagctgatggtggaggaatgatgctgaagtccctcagggagttaggatttgagtgggagaggggaggtcgcaatcttctgagtatgaaagttcgtaatactagg

SEQ ID NO: 666627 - DNA, 430 bp, Homo sapiens
aatatattcaaaaaagctttttagtttccacccccgaaatggagggttcaaggtatttgccctcccggggaaaaaaattttaaccccagtttgggattttttggcccctgtcttttcccatctttcaatgaggtggcaaaaatagggccaaattcaaagctaaaattggttttttgaattttaaaaaggtgccctttattttaagctgaccccccacttaatttaaacctttttaaaaaaaattatcccaaaaatggtggaaacgtgggaaaattttaattaatgttggagggccttaaattggaccccgggttaaaaaaaaagatcccttccccgcctattttatgtttaaaaaccacttgggtgattttagccttgcagggtttctgtaatttatgtagccccataaaggataacccgtttgctgtgg

SEQ ID NO: 666628 - DNA, 290 bp, Homo sapiens
tttcccgggttttttttcccccccgggcccaaaaggggtttccccgcctttttgggcccccttcaccccaagggggtttttttaagggggtgttttttttttttggagaggattttttgggcccccccccctttttgtaccccaaaaccggggccttttggggtttttttttttttgttaggaaaaagcccccctttcggggtttttttttgtggaaaaacccccttttcttttgggtggtttcctttttgggcccccccccgttcccctttagggttttgtttggccca

SEQ ID NO: 666629 - DNA, 854 bp, Homo sapiens
ggacgcgtgggtccgaccagcgtcgatgcctatcatatagtaaaaccagcctatgaccctacagggtgcctctcagccctcctaatgacctccggctagccatgtgattcagttccatccataagctcctcatactaggcctacgtaaccaacacactaaccatataccaatgatggcgcgattgtaacacgagaaagcacataccaaggcccccacacaccaccttgcccaacaaggccttcgacttacgggataatcctatttattacctcagaagtttcttcttcgcaggatttttctgagccttttaccactccagcctagccctaccccccaattaggagggcacttggaccccaagcaggcatcaccccgctaaatcccctagaagtcccactcctaaacaccatccgtattactcgccatcaggagtatcaatcactctgagctcaccatagtctaatagacaacaaccgaaacccacaataatccaagcactgcttattacaattacactgggtctctattacaccctcctacaagccctcagagtacttcgagtctcccattcaccaatttcccgaccggccatcctacggcctcaacccattctagtgtagcccacagtgcttcccacaggacttcccgtcattcattggctcaactttcctcaacctatcttgcttcatcccgccaacgtaatattacacctttcacatccaacacatcactttgggcttcgaaagccgccgcctgatactggccattctcgcacactgttgtcagactcattctctgtttgtctccatctacttgctccagggtcctcagcacaaacacacaccacagcggg

SEQ ID NO: 666630 - DNA, 874 bp, Homo sapiens
  misc_feature (583)..(583): n is a, c, g, or t
  misc_feature (748)..(748): n is a, c, g, or t
  misc_feature (766)..(766): n is a, c, g, or t
  misc_feature (773)..(773): n is a, c, g, or t
  misc_feature (779)..(779): n is a, c, g, or t
aatggcgctccgcggccggcgtccggagcatggcggacccccagcagctgttttatgacgcagacatgacagcccggcaaatacgttcgcaactcacggcatgattgatatccacgaccacggcactggctgggcgcagcacttggcacgccttcctttactcttgccagcagcaactaacgccctgcttaccctgcctggcatacttggcctgctggcacctggcgcctgagctggcacacgttatcattgtcagcatgcaacgcggccacctacttgcggctgtggccctggcactactccacgcccccctgtcacactgccctggcactgcagcgccctgctgcgcacccgcagcacgcactagcacgcggcacgcatccctgtcctgccctggcgcgcgcactactgcgcgtccacgcggcctactccctcaactctcacatcgcccacgggcaaccactcttgcactgcgccttgcaactcaagcccactctctcctgccctgctgtcacgcctgtgcctcttgcctacatctgcctacaccacacgcacacgctcttggacaacacccctctggccnacaggcctgaccatgtgtacttggcctctctctctctgccctctctctccttcttctctctccatgtctctacctctgcctaccgcgcgcgcactcacccgcagaccctgtctcacatgatcaggacatggctaacacccatggcagaaaatcatcaagaaagcncagactctgcgcagaccnttgcacnttctancaatacccacaagggagcacaacaaccacgcgacacgcgccatatctcttcccgggcatagggcaaacttgggattgcgactaaagcaccttaca

SEQ ID NO: 666631 - DNA, 533 bp, Homo sapiens
  misc_feature (15)..(15): n is a, c, g, or t
  misc_feature (62)..(62): n is a, c, g, or t
  misc_feature (87)..(87): n is a, c, g, or t
  misc_feature (111)..(111): n is a, c, g, or t
  misc_feature (115)..(115): n is a, c, g, or t
  misc_feature (148)..(148): n is a, c, g, or t
  misc_feature (161)..(161): n is a, c, g, or t
  misc_feature (203)..(203): n is a, c, g, or t
  misc_feature (211)..(211): n is a, c, g, or t
  misc_feature (244)..(244): n is a, c, g, or t
  misc_feature (250)..(250): n is a, c, g, or t
  misc_feature (279)..(279): n is a, c, g, or t
  misc_feature (287)..(287): n is a, c, g, or t
  misc_feature (292)..(292): n is a, c, g, or t
  misc_feature (294)..(294): n is a, c, g, or t
  misc_feature (303)..(303): n is a, c, g, or t
  misc_feature (310)..(310): n is a, c, g, or t
  misc_feature (343)..(343): n is a, c, g, or t
  misc_feature (348)..(348): n is a, c, g, or t
  misc_feature (389)..(389): n is a, c, g, or t
  misc_feature (403)..(403): n is a, c, g, or t
  misc_feature (421)..(421): n is a, c, g, or t
  misc_feature (442)..(442): n is a, c, g, or t
  misc_feature (448)..(448): n is a, c, g, or t
  misc_feature (458)..(458): n is a, c, g, or t
  misc_feature (486)..(486): n is a, c, g, or t
ggggagatggggagngttggcgtctttggggagccacgtcgaccgacggtgatgaacgaggngagcaagccaatggttattttaccnatgcgcgaggggtcaacattctcnaccnatctaggtatgcgctgggctcaaaagcaaagcnattggtggatctnctggctaacagtaaagctgttccatgggtaaggcttttctcnagcaaganatgcacagggggcatattgttggccaagagggnaagtgngatggcggggggtaagggcaccagggttnggtctggnaattntnttcaggtcnaacattncagggactcccatccaaatcttcaggggaagcnagtgnatggggagggacaccaatctgggctaaataaaggcgggttnaagggttagctgtnaggtttggggcggctcgnatatccgagggttttctacgnacagancgtgcataanatgggcctccatttgttctaaccatganaaggcacaatccagagtggctcccaggggtgggtgtggggtgggtgg

SEQ ID NO: 666632 - DNA, 353 bp, Homo sapiens
cacgaggctagcgcacgactactacgccaaggagggcacccgcatgctaagggcggacatgaacagcgagatgtatgacaagtacaggcagatgacgcacgacgctgcatagggtctagaacacatcataacttgactggcaaaaaggtgatgccgtgagccactgcgaaacaggcttgccatcatcccatagcacatgtaacatgtcatgagttactttcttaatacgtctctggatggaactgatgtctggacgctcattgctactggtgtgatgatgcttagagagttcagccaagagaatatccaagctctgaagttcttcgaacagtgaactcttgtcagtccagaca

SEQ ID NO: 666633 - DNA, 184 bp, Homo sapiens
gagggggtggaacacaagatgatcgcaggccagctccggaagccaagagctccatgcagttcacagctgaggccagcagagaggccagtttgtctttgctggcagaagatggtgctctggcatatctggcttcgaatttcataagtacctctgtgagtccgatacagatgggccccaatttaca

SEQ ID NO: 666634 - DNA, 801 bp, Homo sapiens
agcggaagctttccctagactcaggtcaatagtattaggaggttggttcctcagcggagggtcaggtgaatcaagacgccagatgcccttactttccagcgcctgtaagcgaagtaaacggccgatgggtatgtcctctgagcgggctcatcttccaacacaagaaagaacccgtcagcctctctcttggttgcctgcgcatgcctgcgtcgttacttgatcctcaggctcaagttactcgtatctacattttcgagagagatgagaaagtcacgattgcactccattttacataccgtacccatcgtatcaacatatctcactcataccatgtgtgtgactgacttacattgtgaacgatgagatcttgttctactatcaggcagacatgcttattatgctacaatctatattagggcattaggaataggtgtcatcgcaggtgaacttagatacacaattgtacctgttctttcattgttctggtacgcaccaacaatacgctgcagttaagtagacacccctctccttgaaaggccatggtacgacccctcgtcttgagtaatgactgtagcgtggtatactatgacacctgtacaatgccagaacggtaactgttcaaggtcatataacatgcatgctgtagactacgtacggtgggcacttacctaaatctcgtcttgtgctgaaacgcattgaacaggacactaattgccaactgactttgcgcccgacttactttaggtgtttacccaatcttctcctctcgaatccaagggggttccctatcgaagactcacg

SEQ ID NO: 666635 - DNA, 301 bp, Homo sapiens
ccgggttttttttaaaaaagttccccggtcccggcccttgaattgatttacataaactacggccaaggtttaaatggcccttaggtttatattttttagggcaagccaattgggccaaccaattgggaatcaaatgtcataagaattttttatataaatttttcaagaataaaaaggcctccccccccttaagtatttacaggctcccgggtcattgccggtttagggtattaggttgttttttttaaggccttgaattgatagaaaaatttgctttgtaataaaaatttcctttcccata

SEQ ID NO: 666636 - DNA, 187 bp, Homo sapiens
ttaagttgtacgaaaaacgaaaatccttcatactgcacagctggaatgggtaactccgatgggacacttctcgttccatcgtccattctggtgtaaagttctagtatacagacactccactcaggtcccccagagtctcatctcagttatcttgccaccatcgtgggaagaaagttctagaaattat

SEQ ID NO: 666637 - DNA, 181 bp, Homo sapiens
  misc_feature (149)..(150): n is a, c, g, or t
  misc_feature (178)..(178): n is a, c, g, or t
ccagccaggcgcccagagacacgtcctcgctgtgccaggcgcgcaggtagtcgcggctgaggcgcaggtagtgcaccaggtcggccgagagcacgtagccgcgcccagcgcgtagggcaggtagtagtcgcagagttgccaggcggccnncgccagcgcccccccggcttgacgcggncgc

SEQ ID NO: 666638 - DNA, 230 bp, Homo sapiens
atctgcagggctctcacacacaaaccccacagacgcctggtacacgtcaatgagcttcccccagggggtgctgagccgctgccccaatctcagccagctgactcgagcaggtccttcaccaggaccagcagtatctcctcaggacattttctgcccgtagatgccatgactgcttgcagggagtcggtagaactagctccacgaatctacggcagccccttgcctgggca

SEQ ID NO: 666639 - DNA, 394 bp, Homo sapiens
ggcgatctgaggatcccaggtcatagatttaggtccgttgccatgataatcctctgcacgtggtggaaagtagcaaagaagtatagttgcttcagtaacaggtaataaccagagaatgataaacaccagaaatatggaagccaaacatgatatacatctgtgtgtgaccaagatactattcatgaatgaaggaacagttgtataaacgatgcagcctatagggcaaatatcccatcccaatgataatacgcaggctagagggcttcgtcgtataacgcactgttcatggactccgactgtgaaagtctgatttgttcgcactgggctgtccgtggcattctacttaaaaccaaagtatgcaccaataaacgtcagaggcacagatatgcagaac

SEQ ID NO: 666640 - DNA, 1858 bp, Homo sapiens
gggcagtcctagtctttgcttactgaatgatatgggcaaggcaaacatagacgaagtaattccagttgggcttatagttcaaccaatccagcagtcagaagattggtcacaatcttattgttacttccttttttctcagtgcaacaggagaccaagaaatacgtataacatatatatttaaatgtggcctatgtagagaggcgctcatatattgggggtccttctgtgtgtcaaatatttctccccaaagtctattgtgcctgtgtctgtgtatacgcacgtgtgttatagctccgacgctctatattgggaccaaaagtgtgagtctagacacctcacatattgcgcatgtgtcatgcactgttggttcagttgtcgctaaggttttcgagagatctcttttttatgttctactatgctgtgggaagaccagccgaggaaagtgcgggtcttgaggggtccttttttgaaaggatacttttggtggccccctaaggatgcccctggtgggttggaccgaccgtttcaaaaggcgcgcttttgaatgtctgccgtgtggtacatgtgggcggtgaacaaaggcaagcaacacttcatctacttgttccgccacccccccgccgctttatgatagattgtgcccgccggctggttgagtgactaacaacagtgttatattgtgggctatacagaaaaagtaggaaggaaccccaatctatagtcgatagaaggagggagaataaaaagcagacacgatacaaacaaaaaaatgcataataaagaaacgaaggtagtctgtgaatcacaccttacacaacgcatcggtggggagctgatcgatttggggacccgtgctaaataaagctaggtgctgcattaggtattaactcccatatgggtaggggagagtttatcacgagaagcgagggatcgaagagatatagcgcggctaatggacggatacttttagctgaccacccaagggcacaagaacgcaacaaaaccgccagaaaacggcgccttaaaacaccgccaacaccaattcttacctccaaacccacccgtctacctattagaggcgcttacccgttgcttggactgcgatggagagtcatggcggggggggtctgttcccagttgtttgcgcccggtttgttttgtcggtgtgcggctattctctcacctgccttgctcgctaatctattgttgcccccgccaccgctttgtcgggcgggctccctgctgcttatagtcgcgcctcccgcgagcttggcgcgccgtgtgctgtgtcgcccttgtctgggccgttggtccgctactcgtattgttggtggcgttctccgcagcaacgcgattcctcctctatcccgttcgttctgccgatctcagagtctgtgtaacgcgctcggggtgccttgtttgcgggcgtcgcttgcggactggttgttttttccctgtgtcgttctttgtgtgcgctcctctctcgacgtctcagctgtggctcttcccccttctgttttgccgctcgcgtgttttgtttttctgcggaatcggtcgggtgagcactcgtcggtgtttgttctccgcggggggtcgtctgaatcctgcctgcgtgtgcttgctgttaggccgcctcgctctgtgtagggttcggctcgcggcgtggtcttgtcgagcgccgtgcgtctccttcggtcagctggggtggcctctcttgtgtggtgtgtcgtgtcgtgtgtcggcggtgcgctggcgcgttggtgtcgtgttctcgtcgccgtgggtttggtgttggtgggctttgggtgttgtcgtgtgctttgggcggggcgcgcgtctcggcgtgtttggctgctgc

SEQ ID NO: 666641 - DNA, 164 bp, Homo sapiens
tgaaagggccaaaagtaaaagccctgttttgtttttttgttttgttttgttttgccttttgttaaaacatgtttataaagttggcagttaatgctgaatttgtcaaaaaccccttccaaaattatacttgtttttaaaaaataaatgggtttccctaatttcca

SEQ ID NO: 666642 - DNA, 258 bp, Homo sapiens
tggagaggagtgtatgcaggactatttcattggcaagcaacagaaaccaaatccgaacgggcttaaacaaaggaaggacatttatgggtttacgtaactgaaaggtccagaagtagatttttcaactgtgcttcaggtatggctgaatccaggtgctcaaacaacattgtcaggactctgcccctctctatctccgggcctggctttcctctaggagagcttcatggtcaggatagctctctccaaggctctccaagg

SEQ ID NO: 666643 - DNA, 101 bp, Homo sapiens
gagaccccggcagcctgctgcatgttgtgggttacgatcaccacggtgaagcgctccttgagctcactgacaagatcctcgatggctagggtcgagatcgg

SEQ ID NO: 666644 - DNA, 1118 bp, Homo sapiens
gccaaaagctcggcatggcatgactgacgcggtgtttggagaccccgctgtgttcctgagcagttcggctccgtgggatgtgcactggtggcttgctgctgccgcctgctggactgtggagcctgcatgtgggatgtgtctgtgtggtgcttggctgctgtgtgtgtgtgtgctctccatgtggccttcactggtcaagacctgaatgtgacgatgatgctgtggcgaagttgggtggcttcctgtgtggccccctcacctgcccctctcctgggctccatgtgcctgtgttcctgcctcagtggcttccctgatatgctgtcatgccctggactactttgccctaccatgctgtgggattcctgtgcagtgctgttttgcttccatgcctctccgtgctccctatgccacccatggcatgtcttgcttgggcataggggtggggaacgcaaaagccactgtttcagcttgcactggccacctgtgctcgtgaaagattcaacttggcatgctgggccgcatctgtctttgcctggtggaaagggagcaaactggactgcaatgccaagcagtggaggctttttgcggacatactcaatgacgtaggccatgttccttgagattatggtccatgtataccaatctgtatcaccatgaccgtctacacagaacctaggcaagtgcatcgtgagtgttgctggtgggtgctagtcgggctgacatgacctgtgagcattgttcggaggaaaaacattgatgatgtgtaagcaaggaaagaactaggatatgtggtgaacttgggaggatatgggaactctgatgacctttggtgtaaggtgcgcttgattaagagatggatgtggttgttcttattgcttcgatttatgtgataatgggtgtgggcttgttttagtaacgtatataaaagtgagacaagtaggttattaagtctacctgaaggtatgggtatctcacgtagtgaagttgtgacgaagtgcagtcttgaacgctataaggtagacaaaagaggtatatagtaaagtaggagagtacttagagagcgaggagtaaggcagaaagagtgtggggtataatactttgtgtgattgaagataaga

SEQ ID NO: 666645 - DNA, 414 bp, Homo sapiens
tgtacatattacatatgtacatatcgcataagatgaacttctgtatctttctattttctgaaagtctctgaccctgactcaggcagctagtcagatgacccatacattataacgtttatatagtttagcccacaagagatacccactgtcaattctagattgtttcagattttaagtctgcttgctactagtgaaattctcatatctcagggattgcctttaaaggatgaatgtgcagaggctcgtttcgctctaaagagaataagcctttgatatagctgtttggatatacaggggaataactatccagatagtactggctctagtggtatttacatcggaacaaatacgccacatttagaccatctttggccctgtgtttcctttgttctctttgatgtacatgcacttgcc

SEQ ID NO: 666646 - DNA, 138 bp, Homo sapiens
ggcggtaccatatgagtgcagatgggatacatggctgtcgtgacatctttatgtgcaaattgtgatttcaaaaatgtcctgccagtttaagggtacatgtagagccgaactttgagttactgtgcaagattttttttt

SEQ ID NO: 666647 - DNA, 631 bp, Homo sapiens
catgtccagtggctaagggtgctgcgagtagcctgccacccgttcggctgttggctctgtgctgtctgtggtcgttgtgtcgtgacaacctgcgtgcggtagaccgtttcctgagtgcagcagttgcggcctgctttagccctgagctggtgatcttgctgtgcttgcctgctgagtctctgcttgtgcctgacccattctcttcgctggaccccactgccaatgcacgctgaccactgatgcctgacatgcctggatgctgccctggcaaagtgtgctgtgccatcgactgtgcctctagcacctggccacatcaatgtgtgtgatcatatgaatgaacgaatgaccgtctactggacttcgctcgtatgtgttgtgctgtctgtgcctgacacaggccacctgctggtgacattgtctggactgacgtgagcttcgagcacaagaagatcccgagacagtgtggactgagaattgacacatactttgtgctgactgatatcattccgagcgagcacaaatgactagttggtattaagttgacacagtagactgagaccgaagcgactcgctattagccagtaagtagtgatagtggtggatagattgaagactagcgctgataggttga

SEQ ID NO: 666648 - DNA, 685 bp, Homo sapiens
  misc_feature (186)..(186): n is a, c, g, or t
  misc_feature (188)..(188): n is a, c, g, or t
  misc_feature (198)..(199): n is a, c, g, or t
  misc_feature (202)..(203): n is a, c, g, or t
  misc_feature (205)..(205): n is a, c, g, or t
  misc_feature (207)..(207): n is a, c, g, or t
  misc_feature (210)..(210): n is a, c, g, or t
  misc_feature (213)..(213): n is a, c, g, or t
  misc_feature (217)..(219): n is a, c, g, or t
  misc_feature (222)..(222): n is a, c, g, or t
  misc_feature (225)..(225): n is a, c, g, or t
  misc_feature (236)..(236): n is a, c, g, or t
  misc_feature (256)..(256): n is a, c, g, or t
  misc_feature (258)..(258): n is a, c, g, or t
caaggatcatgttgatgttgaaaaggggagatgtgaaattaatccaaactgaaagctgttggaaccgtacctgattttgagccttgagaggaacgtggctgtggggcctgcgtcgcatggtgtgaagctgcaccttctgcttctttattctgggtcaaatctcttcctcattcttgtcctgtaatnantaggaaagannganngntnccnagntgannncgntcnagaccattacncttccttatgggatgttaananaagcttccttagtgtagcgagctgtgaccaatcaagtcaaatcgctataacctatgtcttgatcttgttggaaaatgctgcaacctgttaaacctctgcctctgactatgtaaatgagactttaactttccattttgagagtctgtgtttcctatgtgactatcctccaacttcgtgttcaaataaactccacgattcatcataaaaaaaaaaactaagtatttaagcttgaaaattgcaaagacacattatcatgtttatgcggctgtcagcattctatggaagtttagtgcaattaaactcgggaaaagggtccggtgcagtggctcacacctgtaaatccagcactttgggaggccgaggcgagcggatcacgggtcaggagaccgagaccatactgggtaacaaggtgaaacccgtctctact

SEQ ID NO: 666649 - DNA, 1130 bp, Homo sapiens
  misc_feature (118)..(118): n is a, c, g, or t
  misc_feature (326)..(326): n is a, c, g, or t
  misc_feature (376)..(376): n is a, c, g, or t
  misc_feature (381)..(381): n is a, c, g, or t
ggcacgaggcgggaagcgccgggcgagcccactgtgcggccgtcgtgggggaagcgaaggttcctgattccacctacctcctaagtgaaggcttccgtccctggagaggaggcggcgnctgtatcggccttcgtcctccgcgggtgtgctagcgttgggacggtcctttgttgccgcgaggggtaggagtgggcgtggcggagccagctccgttcggaacactcccgggccgacccgactcgctcatcctgcaggagctgcggcgccaagatgagtggagaggagaacccagccagcaagcccacgccggtgcaggacgtacaggncgacgggcgctggatgtccctgcaccatcggttcgtggctgacagcaaangatanaggcgaagtcgtcttcatcggggactccttggtccagctcatgcaccagtgcgagatctggcgcgagctcttctctcctctgcatgcacttaactttggcattggtggtgacggcacacagcatgtactgtggcggctggagaatggggagctggaacacatgcggcccaaagattgtcggtggtctgggtgggcaccaatcaatcacggacatcacagctagagcaggtgactgggtggcatcaaggccattgtgcaacctggtgaatgagcagacagccaccaggcccgggttgtgtgtgctgggcctgcttccgctgaggccaacgattccgaataccacttcgggagaagaacccgagaggtgaaccgagctggtacgggcgttcactgtacttggcaccctcgggacccacttcctagatgccgagccttggctttgtgcactcactatggcagcaatcagcgcatcatgacatgtatgattaccttgcaatctgagccgtctgggctaacagacctgtttgccgggatctgcagtcacctgagctttctgcgtttgatgggcccacgaacccagggcaaaggtggtcccctttgtggagaccgcgacctaaggattcctggttggctttcccacaagattaactgtccttcctccgaagcgccacaaatacccagcaaaacaaacatcaacacacgcgcgacacgacgcaccacccccggcgggaacacactccagatccccc

SEQ ID NO: 666650 - DNA, 146 bp, Homo sapiens
gccatttgtttcactgtggatgacaaggaacactcaattcaaggtcagcgtagcgaggggagcacagcggggacctggagcatagaagtcagtcctatttccaccccaaactcacacacgattaaagtgggcacaaaaagcaagcc

SEQ ID NO: 666651 - DNA, 1160 bp, Homo sapiens
  misc_feature (118)..(118): n is a, c, g, or t
  misc_feature (326)..(326): n is a, c, g, or t
  misc_feature (376)..(376): n is a, c, g, or t
  misc_feature (381)..(381): n is a, c, g, or t
  misc_feature (385)..(385): n is a, c, g, or t
  misc_feature (391)..(391): n is a, c, g, or t
ggcacgaggcgggaagcgccgggcgagcccactgtgcggccgtcgtgggggaagcgaaggttcctgattccacctacctcctaagtgaaggcttccgtccctggagaggaggcggcgnctgtatcggccttcgtcctccgcgggtgtgctagcgttgggacggtcctttgttgccgcgaggggtaggagtgggcgtggcggagccagctccgttcggaacactcccgggccgacccgactcgctcatcctgcaggagctgcggcgccaagatgagtggagaggagaacccagccagcaagcccacgccggtgcaggacgtacaggncgacgggcgctggatgtccctgcaccatcggttcgtggctgacagcaaangatanaggngggggnaaaaaaaaaaacccccccccccccgaagtcgtcttcatcggggactccttggtccagctcatgcaccagtgcgagatctggcgcgagctcttctctcctctgcatgcacttaactttggcattggtggtgacggcacacagcatgtactgtggcggctggagaatggggagctggaacacatgcggcccaaagattgtcggtggtctgggtgggcaccaatcaatcacggacatcacagctagagcaggtgactgggtggcatcaaggccattgtgcaacctggtgaatgagcagacagccaccaggcccgggttgtgtgtgctgggcctgcttccgctgaggccaacgattccgaataccacttcgggagaagaacccgagaggtgaaccgagctggtacgggcgttcactgtacttggcaccctcgggacccacttcctagatgccgagccttggctttgtgcactcactatggcagcaatcagcgcatcatgacatgtatgattaccttgcaatctgagccgtctgggctaacagacctgtttgccgggatctgcagtcacctgagctttctgcgtttgatgggcccacgaacccagggcaaaggtggtcccctttgtggagaccgcgacctaaggattcctggttggctttcccacaagattaactgtccttcctccgaagcgccacaaatacccagcaaaacaaacatcaacacacgcgcgacacgacgcaccacccccggcgggaacacactccagatccccc

SEQ ID NO: 666652 - DNA, 451 bp, Homo sapiens
  misc_feature (238)..(238): n is a, c, g, or t
aaatctagctcggaccggtcacatgcctctcgcaggcagttctcagagcccggggatctccttctcctcaggcagcgtccaggtgtgggagttctgaaggagtgcttgcaaaacgcgggcacatcttggctgggaagtcacattgtactcttccaggcagatgagaccagcttgaggagtctctctcggcaggttgtgatcgggtctcctgcgcgtgtgtagctgagtccaaggacgnaagtgagctctgcagggaaacatgcacgaggagaagtactgcatcaggtgcactgaccatgtagtctctcatttagaatcccgaagaagatgtcggcagtgcagattgctggatagagatcacagcacagccgaggacctcacaggtagtctcctgggtagttaacgtgtcacgcggaggagctaagtaccggcgcatgagtctctagtgtcg

SEQ ID NO: 666653 - DNA, 171 bp, Homo sapiens
acattctacttttatgaatcaaactctcaatttcttccagactttcatatttgtttattttgggagctgaaatgtcctcagaagaaagtaactgttttggttattattaagctagatgatgagggccaaaaccacaaaataacagtggcttagacaagagaagctggtgta

SEQ ID NO: 666654 - DNA, 244 bp, Homo sapiens
cttattaaacataagaaaattcatactggagagaaaccctacaaatgtgaagaatttggcaaaacttttaaccgattctcaactcttactacccataagataattcatactggagagaaaccctacaaatgtaaagaatcgtggtaaagcttttaaccagtcttcaacccttactacccatagaaaaattcatactggagagaaaccttacaaatgtgaagaatacgtggcaaagctttaagca

SEQ ID NO: 666655 - DNA, 166 bp, Homo sapiens
ctcccatacggtatgactttcctagttctttagtcttataagtgattttattgtgtcctgaattttataattatattatgagaattattctctcttattatttcgtagatggttccctatatgatagtgtaacctgagagctgggtgggtgtgcgtgtttatcttc

SEQ ID NO: 666656 - DNA, 194 bp, Homo sapiens
gcggcgatctagaggatcccatgttatcgccaacacttgcccatccctcccttctttagcttctgcaaccagtactttctggtacacctacctctccggcccctcacctctctatcattatacatttaatcaacacatatttattgagaacctaccatgagctaggcattgttttaggtgtaggagataacata

SEQ ID NO: 666657 - DNA, 305 bp, Homo sapiens
  misc_feature (288)..(288): n is a, c, g, or t
cagcagcagggcgaggccagagaggcagcggtcatatgagactagtagatgccatttgaccatttgggccattagatggaaaggcaattacttgggtgaaaaaggagaacccttagtagagaaagctgcaaaagaccgaagcaaaagaaaaaaatctccagactcactggtgttccttaaaaaaccagctctggttcttggcctatctagagggctttgaatgacacaaagcctgaccctgccatgaacttcatgtttcaggcatctgctgatttgtctgctggcttncaggggtgggcttgtgt

SEQ ID NO: 666658 - DNA, 571 bp, Homo sapiens
tgtcgtgccggtaccctcatagggcagctggccagtaaggaaggagcgataggtgcaggagtcccgccactccagcccaggaggaaccacagggacagcgcctggtccatgtttgcccgtcttgtaggctttgatagaactgggggaaggtagacgcagcaaagcagagactggcgatcaagcccaggcccacgctggcctcgtcccagccgtcctgggcacattcacccaacacatcccatatccactggatggagccactggggcagctggagaagttgcgggagcccagtttcttccagaccatggctgtggaggaggggcccccggccaggcagggctgcaccggagggaggccggctggtgtactgaggccagcaagggttcctaagcacggctgtgggaggagccagtgtagggccatcggaccctgcagacctgggaacgatggtggagggcagggagcgtcccagctcggggcataccaccacattccaggcctcggcgtcctcgggcagagtctccctcctggtgactcagcccggccgcggcccacacgtccagcccctag

SEQ ID NO: 666659 - DNA, 102 bp, Homo sapiens
cacaatacgaaacgaagctcatcactgttctatgtaggtcctgtggcagtcacccaggtgtactgcatcgatataatcatccaagttccgggtcaagtctgc

SEQ ID NO: 666660 - DNA, 439 bp, Homo sapiens
  misc_feature (43)..(43): n is a, c, g, or t
  misc_feature (127)..(127): n is a, c, g, or t
  misc_feature (169)..(169): n is a, c, g, or t
  misc_feature (179)..(179): n is a, c, g, or t
  misc_feature (188)..(189): n is a, c, g, or t
  misc_feature (193)..(195): n is a, c, g, or t
  misc_feature (202)..(202): n is a, c, g, or t
  misc_feature (212)..(212): n is a, c, g, or t
  misc_feature (338)..(339): n is a, c, g, or t
  misc_feature (352)..(352): n is a, c, g, or t
  misc_feature (434)..(434): n is a, c, g, or t
atcacacccaagtgaagctgtggataagcccttaaactccagngccagaaccaacaacctcaactccggaatacacttgcaaggcactggaagatctaaaattcctctttaaacaaaaagataagtnatgccccaccaacatcctttcacctcaaagtaaggtgatccnaatactaganattttactnnaaannnctaaaanaaaaatcaanaaaaaaaaacaaacttgtacaccaccaggagttccattggcagctcgttttgtgaccagtttctcttaggtcaccatgggcctgctcctgctggttctcattctcacgccttcactagcagcctanngccatcctgattncccgttaatggaaaaagctcagcaactgctccaaagtacaggatccccttactccaccaattgctggttatgtaactagctnttcca

SEQ ID NO: 666661 - DNA, 765 bp, Homo sapiens
tgactaagaaattaaagaagaaaaccagcaaactaagatacttctgggcagacaacaaatataataaatgcttcagatgtcaaatacccatggcttgaaagctcggtgtaatttacttcaagattatctgactgctcttcttcaagagctggacctgtgctcttataggaagatgagtttgaactagccttgatgttttcttggcttgtccaatagacgtgaagagatgagtattgaacatcgctagcaagaattggaggtacaggatgtgtagcagtacatctgaccactatctataaatacattcggacatgggtgtccaaatctccctttcttcttcagttccttcctgtgtgcaatatatacccttctctgagaacgtgtgcggtgctaaaagagaatcgactgtccttggagcagaaccagttagtttatcaataggggttatgtcatgttattgtagcggtaccctaacttagatattcagggaggtcggaaaggtgaacagaatagaccagcgatagtgtaatcaaagcaaagaagtaatcgctgacagttaagtgtgaccaaaaaaattatatagttcacacatggattcctaatgtgagccatgtgggggttaatctctagtaaaggcagatagccacgtttgggtcaacattttggaggatatgggggtggcactgagaaaagactgaagttggtcagtgtttgctaatggaggaagattaatggcccgaaccttggctatctcgggggggataa

SEQ ID NO: 666662 - DNA, 216 bp, Homo sapiens
gggcacagatcaggtggatctacaacctggttaccgagcttcccctcagccaagtgaacaggtgcccgtacctagaagttagaatggtagagtcggagcaccaggttctctaaagaatagttccgcttcgcttctgtctgtccaggctgttctacagtcaggactgttgcgcttacctgtttccaggtctacagccgcctatcgtgtacaccagtt

SEQ ID NO: 666663 - DNA, 772 bp, Homo sapiens
cactgtatacagtggtattggaggactttcatcacagtttccagtatgtggtcttggcacaggacatgcactgtagtggtataggaactggtgctctatagactccctgcagtgaatagacgagcctgtttgtatcatgaggaaactgggcaccttctggactgaattcatcctacattccagcagagttacgcatgaagatcttcggactatgttctcaggtgtggacacgcaggcaaaccagcacctttagtaaagagatagatgatgaagctagaacgagctatttccagcgaagtatataactcatcgcatcgcatgatccaaccatgtctgttgatgatggtattacgcaaattgctgcagagatttatacctgactcgtactataaagagggacaccgacgcaatgtatttacactgtatgctaaagtgaactgtgttcttgaatgaatatctgatttcatttccccatataatcctgatgaacggagttacctataacagcctgcctatttggtggtataattgagcaaggactggtcatcgtttcatggcactaggtctggtgtctacgatatgttcttgaacgccttacgcatacgccttgttgtgatccgagatgtattattcccgggattgctgcactagatagatttaaacaactcgattgaaggactatcccagtattgtctacatttgggttctatcagtcactttatgccagttccacatcattacaggagtatatggagaatgggcaggccataac

SEQ ID NO: 666664 - DNA, 104 bp, Homo sapiens
actttcatcaattttagacatgggacacacgttgtgacgtctttattttaatgatataatctcattacccccagccccctccctgattgggactgcaagactgg

SEQ ID NO: 666665 - DNA, 383 bp, Homo sapiens
tatgcagcaaaattcataggtagaaaatgtatgatctttagggataattaggtctccagacactaattgaagtatatcagagataaaattaaaaattcaaggctgggtgcagtggctcatgcctgtaatcccagcactttgggaggccgaggcaggtggatcacaatgtcaagagatggagaccatcctgaccaacatggtgaaaccccgtctctactaaaaatacaaaaattagctgggcgtggtggcgcatgcctgtagtcccagctacttgggaggctgagacagcagaatcacttgaaaccgggaggcagagattgcagtgagccgtgattgtgctactgcactccagcctggtgacagagcgagactccatcaaaaaa

SEQ ID NO: 666666 - DNA, 1658 bp, Homo sapiens
  misc_feature (383)..(383): n is a, c, g, or t
gactgtacggctcctgtagctatagtagagcggtgacgtaggctgtgcctgagagaaagagtttgttgcagcagggacagagctgtcgtgtgttctgcctttagtagagcagatttgcatgacgacaatattgtgttgggggaaacaacccacgccgctgtttgtttgaggagaccaagtagctgtgatagaccgacgtgagaagccgcgtggagagtttttggttcgcttcgtcacacgggggtttttttccttctgtggggcgactaacacacggggtgtgcggcacacagaatgtgtgctcgtggcaaattatggctcctggtgagttgcccccgcgtttgtgtgtgggcccagccagtggccgtgttgttcccctgtgngccacggaggtgtgagccgggtgtgaaggcgccacacgtgtagataagccccccactggtgttggcctgcgtatgatgggggagaaaaatgggggagtgtcttgtcggccgccgtgctaaatgtgagcgccgcctgaggacagcaaggggggtgtaaagaggggcaacaaggcccgacggtgtgtttcgtcccaagggggccgcgctcgtggtgaacaccacgcgtcaaacccccgcgtctgaatgtggtgtacgcagcccaccggggctcccctcctcgggtgtggggtatctcgcggcagtgtgtaagaggagttgaatatgttaacaacctcttgtcctaaagaacatggttttggtgccaccggaggagttctgcttggtagaaaccgtcgggtgttcgaatagccgcgtttggtgggcgtggtagcaccgtctgttaataggcttgttgggtgcctggcaacccaccacatagaagagccccgaaggattactttggtggccacagacgtgcgctgttcctgctgaagggagactccctcccagtagagacgcactgcctctagaaggatgttttcctcgttacaatagtgtaagacgaccccccagaatacaacacgtgtgtggggaggttccactagagtggcgaaacaacagaagagtgtagagcacaagaatagaaagggaagtactaccacatcggccaacatagacctgctgagtctgtgggaccagtctccgtttctcccagagtgggggttctttctgtgggtttcctccccctcgcggggtctctccccgcctggggacccccacggagcccctagagagagtttctcccacagatgtttgcgcgcctttcttgtgggcaacatgtctcagtctccgcattctgtacactgtgtagtgtgttctcaatcgtggcgctgtgtggcccagagtgtaatgtgtacacaccacaagtgtaaacagggcaccagcgtatataagatattccagagtgtgcgccctcttctcgtaagagatgttctcccttgaagacgtggagaggaaacactgtgccccacaatagtactgggaggataacataacctccaccccctaccccagacattccttctctgtaagaccccttcttttctcaccatccttttaccagccaccaccaaaaatacaccacaataaaccaatcaccctaatccccttaaaagttccctgtagggataagcccatcatggtaagccagctggaaattaagattatgacgctcca

SEQ ID NO: 666667 - DNA, 135 bp, Homo sapiens
gacggcaagtctaaagtgacccatgttatgattcgctgtcaggaactgaaatacgacgttggtagagaagaccgctttgatctttgacagaccttgtggacaattataagaggattcctatggtggaaccattgg

SEQ ID NO: 666668 - DNA, 911 bp, Homo sapiens
gccttgctctcccacggcagaggagatcgtaggggtttcaatggccccgcagggcatatctcgcctggcctgcggagagagtgcttcagtaccacaaacaacggagggatatgatagtgcaggccatggtggataatacactcctttagaacaaaggacaattaacttttgatacccatgcattggttcaggacttggaaactcatggatttgacaaaacacaagcagaacacgattgtatcagcgtaaactgctttatcaaatgtcagcctggatactactctataaccgagatggtcactcaagctcaacaggaaataccagtacaacagctagatggctcatattggatgctatcaggaacatgacatggtcatcctaggagaaaaagtgaattcgcaatatctgcagagcacgagagatgacgcaaagactgaggaattgagattagaccaagttaagcaacaaactaatgcatgaaaccggtcgaatcagagcagataatagactggatatcaacttagaacggagcagagtaacagatatgtttacagatcaagaaaagcaacttatggaaacaatacaggaatttacacaacaaggattctcaaagcagagagtattattttcagaagacccagtaaggtacacattggaccgctggaaatttgcttacctttaaaaaccctggatggaatctaacagacttggagaacaagtcggaatctggcaagctacggggtttcttgcctggcaataagcatgggcattaatagaattctggaagtagtactaatgccacctgtgtggctgacgggtcctacatcccgaacgggagcacttccttgaacttgccgatgcacaaaatttcttcccgatttcgcagtaacggctcaaaagacgtgtcactg

SEQ ID NO: 666669 - DNA, 238 bp, Homo sapiens
  misc_feature (1)..(1): n is a, c, g, or t
  misc_feature (137)..(137): n is a, c, g, or t
nttctgcaaaccctaccaaaaaaaactctaccaccactctaatcagatttcaaacctttttttttggcggcaggcgcttttatcaatcaccgggcaactaacacattattttcccctcccactcccatactactaanctcatcaatacaacccccgcccatcctacccagcacacacacaccgctgctaaccccataccccgaaccaaccaaaccccaaagacaccccccccccccaa

SEQ ID NO: 666670 - DNA, 451 bp, Homo sapiens
ggtgactcaaggatcccttgcgcctactactacttcccgacatcacttgtatggggaaggataaggcccagcaatgacagctgaggcataggagggtacaagcactccttgctttctctcacatgttatctccggatgaaatttagaccaaaagataaaaccgtttggaaacatatgtctccagagtcatcctaacttggaggggagggaactcagaggatttaagaggcaaaacctcaaagccagctccccagaggaaaattctaaaaggtcatggtgagaattttccctcagttctacaatgggcttgaggttcgatggtcccaacccacttttaatctcaaaaacttcctccttgataacttgacacataaggtacaacagtaccatgaactcagttgctacgcagaaagagaacttttgaacggcactccatctcaggctggatttt

SEQ ID NO: 666671 - DNA, 841 bp, Homo sapiens
  misc_feature (62)..(62): n is a, c, g, or t
  misc_feature (70)..(70): n is a, c, g, or t
aaaaacgaaaggtaaagaagaaacagacggagaaaggaagaaaaaaaaagtaaaggaaaccnacacacangctacgaggagacaactccttggatcccaacgatcaggtggccatggttttgcaggggcttgcaatccagaagttacgaagcaaaatccacaaaaaagtagataggaaagccagcgaaggcaggaaacttcggtttcatgtccttagcaagctactgagtttcatggcacctattgaccatactacaatgaatgatgatgccagtatttaactgtaccgctctctttatggccagctccaccctcccgacgaaggccacggggattgacatcgcccacctgcgacacccattgggcgccttggctggtgcggctgatggtccaaattgaggaagccagggactttatggggctgagctattaaggaagcccctgggaagatgctgggtttcgaacctgtgcctaatagaggcaagggcgctgtacagacccagaaccgagcgttgaatcggacaatataaagagcatttgcatccgccataaaaaaaagattagactgattggcctaaggtggggcctaggcgggcggagaaggggatcgtgtggggacagttgcctctaatgatggataaaacattatgctaggctgaatgactcgtcggagtcaggtcgaacaaaagagggcatgcggagtagcgtacatgaaatggggcaggaatgggtaggaacagagttagttagctaacgcacgaaaagacccggaaagaaagagggttcggaaaggtcagatttatggatgagggagggtttgtggagggatgagatagggtct

SEQ ID NO: 666672 - DNA, 415 bp, Homo sapiens
  misc_feature (372)..(372): n is a, c, g, or t
  misc_feature (402)..(402): n is a, c, g, or t
tttttttagagacagagtcttgctgtgttgcccaggctggtcttgaacccctggcctcaagcgatcctcccacctcagcctccccaggtgttgggattacaggtgtgcgccactgcacctggtcattcttggggtttttaaaacaagctctccaggagattctggtgtgcaccaaagttggagaaggatttgtgtgcctaaatccagagagaggggaggtcagggcaggctggagtcggttcaggcttcagggaagagagtcctgagtttgtccttttcctagaggagtctgagctatggccagggaagaggggggacagcttgggtgggctcccctccccagctctgaatcccttgccggttaacctaggntgctggtttcttgggccttccttgccctgnaaaacctgggtaa

SEQ ID NO: 666673 - DNA, 857 bp, Homo sapiens
cacaagccacggttgcagctccagaacaaagaaagggctttaacgttttctccagtgatgacaaatcctctgatatgaaatctaagcaactgctaattatagtagttatacgtgttggctgtaactctgtgatgtctcttaagcaggttgggttttatgaaacaggatgtgtcttctttagtaccagtttacttgagttactgttaacctagaaaagtacataggtcatggtgatctcttaagattaagtgtagcagaaattttctgtggaatttcatgtggtaatgacagaaaagtgggcttagaaagtatccacgatgttacaaaaatttacatttcagaaaatatggtagtattgaatactgtgcaactgtgagagtaaatgtgtagacttaatggtatcataagcgttctttttgatgggcagtttggaaagcattgtgaaagtctgctgtttggcacagcaaacagtcaaaatttttgacattcagtatcctcctattttcacagtacaagaactttctgtgaaaatcttatttaattctgagccatatttcattaccttatttaaaataatcaataaagctgcttaaattatttttatatggactgtggtctctaggtagccttgtgatctatgtacacaatctcatttcatatgtcgatcggccaagaagtataaactgtcagtgttttaaaaaaaaaatataaaaaacaataaacaaaacaaacaacgggacaaaaaaaaaaaaaaatatttggcgggggggaaaaaaattagagagggccagaaaaagcattgtacaaaacagctagggcacaaaagggaggaaaaaggttttaaggacaccgcggga

SEQ ID NO: 666674 - DNA, 168 bp, Homo sapiens
atggatgtagaataaaaccagccatccataattgaatctgtaaggtcagtgaacttagccttttcaggttcaaagattacacaaacacaaggattttctttatcgtttcaccctttcaagaggttttctcttttattttggccaccgtgttttccataataatgaagt

SEQ ID NO: 666675 - DNA, 226 bp, Homo sapiens
tccacgctttatacttcttttagttcatggttttatagtagaggtttctatgtgtttttttttttgggaacattatatgtcggatacatatagggcttgggagacaatcaagtaacaacggaaaaggtgaaagtaaccatatctgacaaaattcccttgaattttaatccttggctggcaacatttaagactcaaagtcacgggtcatatgggattcaagtttttt

SEQ ID NO: 666676 - DNA, 152 bp, Homo sapiens
ggcaagcactcagcccagcctcgaggtccttctggggagagtttaagtgacagagtccggtcagggggcaggagtttcccaaggttctggcccacctgctgtctgtctgctcctccgagcccttggacatgaggcagccagatgtccccagg

SEQ ID NO: 666677 - DNA, 302 bp, Homo sapiens
tgaatgtaagtggtggtgaatgtgccggagtagtatgaaggtgcagtatattataagaagttctggtcagtaacggttgtcgagagcagaaataaatctttgcgcggttgaccggtggctcattccagaagcaggctgggatcgctcaaaatctaggttcccaaatgcatcagagtaagttcctagcatgctatatttcataatttccactatatcctcagcgtcttcttgggttgcttcctctctcaattccaaccttgctcgtgcctctgtcagacgaatcaaagattccaaatgccagg

SEQ ID NO: 666678 - DNA, 208 bp, Homo sapiens
tctctttcaggatcttgctattgggggtggccaaacgggattaaagaagctcaatcctggggtcactcggtaggatcctccagtttgaaaggagccttcggaatcctgggtcccgttcaacacgtgcccgaagcgtatcttgcgcttgcgttgtcctagttcgcaggggatccctctagaagtccgacctgcgaggcaatgcaaagct

SEQ ID NO: 666679 - DNA, 230 bp, Homo sapiens
tcgacacttcctgagtagctggattacaggcacccgccacacacctggctaattttttgtatttttagtagagatcgggtttcacaatattggccgggctggtctccagctcctgatctcaggtgatccacccgcctcagccttccaaactgttgggattacaggcgtgagccactgtgcctggccctaaatgccagatggaagtgccccattagatggaagtgccccat

SEQ ID NO: 666680 - DNA, 99 bp, Homo sapiens
taaagaaagggatttatattccaaagcaattcaatgtttcatttgaaaaatcctttcccaagtagaacattctcatcattttaagatttagttccagga

SEQ ID NO: 666681 - DNA, 225 bp, Homo sapiens
ctggtagacctaactctaaaaccaggcacagcctagggggcgggtagacacacactctaaaaccaggcacagccctagggggcgggtagacacactctaaaaccaggcacagccctaggggcaggtagacacactctctaaaaccacaattttcttcccacctctgggggtcagatttatgaatgaaatctcagctgggagggtccaggtgttaggtctacctgg

SEQ ID NO: 666682 - DNA, 1557 bp, Homo sapiens
  misc_feature (945)..(945): n is a, c, g, or t
  misc_feature (1313)..(1313): n is a, c, g, or t
ggatcaggcaacgggcagtgattagacaacgatagctcactgacgtccccgagcagaggaactttgctccaagtgccaggtcatatcgatatgagagggcggagagcagaacggtctatctactaggctatcagtctgtagtcaggcgcatcatatgcgacaacagtttcccgagtgatggagacttgcacgcctagcaggtcccaaacagctggcagaagtctggtacaaggaggcctagggggcccgccgggggatatccgacgcagctcgctgatgtctgtgatgtcgagcacacctcgtagccaagtcctagtcatccactacggcaacaccttcgagcggcgtacgtcgaagggacgcactaccattcaccatgaacacttgcaacccgagacgagacttgaaccagattgatcgaaggcagcgtgaaacaaatgcgcttgcgtactagagcactcattcccctagttgcaagccatagagtatgtcagagggaattgcatcgccgcattgtgcttcacttgcgcaactccagctggaagggacgtcggagggctcgatcttttccggaaagcgccttccaggggctaggggggttccactgggcacggattagagttgggaatgggtaagctcgtcagcaaatccggaggcaattcaattgcacacgtttgcgaagtacactgagagagcgaaatagctgcggccagttttcaacccctctgttgtcattgaccagtctgtgtgtgcccccagggaactcagtctccgggcagaggcgaccccctctgttccaaggggactgacatgggatgacaattctttgcatagaggtaagtcctcaccaagctggaagtggaatcccagagaaggcagagtcgttgtggggtaccccttgtgtgtgcaattgcatggcttcccacagattcgaacgtggaaacnttcgcaatcccttcgagtgttgacccccgcgagagagttacgcatatcccgaaggggcacgggtgggggcaaatgccactcccatatcaaagatagaggacctcttggggagcccctatctcggcgactcttgggcgcacaagatatccaaataagtaaaattgcacaccttgcgacaaatggaagccccttttcaccttagtggacatgccaagtcggaccacacccgccacttcgggatcggggtcagccaaccatggggtgggctgttagcacgagacaacgcgttccccaaggtgcatctgccggtggcacccgtatctagcgaaaaattggcctatggacatgtgtttggcgcaaaagaaccngtcggtaaatccctgttaatgagaggccgatcagagcgtgatcagggacagcaaccttgaagcgggagaccctgtgtcatgagggtacaaccctgtgtgagactccacacattccgggggggaacccgatgatatagagacatcaccacagctggtgaaacgcacagcagtgaacttccgatggagtagagggcgatcaagactatgagcgaactggtgagacgccaacaacagtgatctctat

SEQ ID NO: 666683 - DNA, 582 bp, Homo sapiens
cgtaattgtctaactgaagctgaaatcattggtgatgttgtatgcctggatatatgatgtcagcaatccgcaaatccttatgacatactggtcgccaggatttttgtaacgcacagcactgtgtatggacaggcagacataccttgcttaaagtcggtagcttgcaatggtcagtagcgtgcaatgaaggttccactacaaagaatagcagatatttcaccgttactggagtttctggcaggaatgcagcaaatagtggcctccagcaagagccttgcacgttgcaatactggttggtatgcccccagtacaggatatcttgcgtaacaattggactaacaatggggcatgtatccagatggagtcattacagagacagactctcccgagactatgggccacactgtgatagactagagaattggagaaaagtctgggtctttctataaactgttggaggtgacacaagctgagcgtcaagagttccacgttaaggcttcgagcaagtttggggctactggtttgcagttggggcttgttatgtacaaagcattgtggaagacagcggtgatatcgcagaat

SEQ ID NO: 666684 - DNA, 518 bp, Homo sapiens
gcgcgctaaggcgtgcctgttctgtgccggcagtaggcagcagagccgggagcagtagccgcgtgggagggagccatgaagcatacgaggtggagattctggacgcagaagacaatggagaagctgtgtgcgtggacaaggtggagcaccagccaccattgcggagatcaagaagcatcttcactaagagccatccgcagtggtaccccgcccgacagatccctccgcgctggaccccaaagggcaagtcccgtgaacggatgaggatgttctagcagaagctgcccgttgggcaccagggccacactgtacttccgggaactgggggcccagatcagctgggctgacggtcattccgtaacagaagatacgacggggaccccagttgatcaatcataccgtgtcatcatgtcgtacgttgccgagttgccacttcatactatggaccaacaaagtatgaactttagagtccaagtcggacgatacaagttggatgcaagcgtcgaccttgacatctg

SEQ ID NO: 666685 - DNA, 875 bp, Homo sapiens
  misc_feature (50)..(50): n is a, c, g, or t
  misc_feature (63)..(64): n is a, c, g, or t
  misc_feature (69)..(69): n is a, c, g, or t
  misc_feature (72)..(72): n is a, c, g, or t
  misc_feature (77)..(77): n is a, c, g, or t
  misc_feature (79)..(79): n is a, c, g, or t
  misc_feature (84)..(84): n is a, c, g, or t
  misc_feature (86)..(86): n is a, c, g, or t
  misc_feature (91)..(91): n is a, c, g, or t
  misc_feature (94)..(94): n is a, c, g, or t
  misc_feature (113)..(113): n is a, c, g, or t
  misc_feature (120)..(120): n is a, c, g, or t
  misc_feature (130)..(130): n is a, c, g, or t
  misc_feature (134)..(134): n is a, c, g, or t
  misc_feature (139)..(139): n is a, c, g, or t
  misc_feature (142)..(145): n is a, c, g, or t
  misc_feature (153)..(153): n is a, c, g, or t
  misc_feature (155)..(156): n is a, c, g, or t
  misc_feature (163)..(163): n is a, c, g, or t
  misc_feature (181)..(181): n is a, c, g, or t
  misc_feature (187)..(188): n is a, c, g, or t
  misc_feature (190)..(190): n is a, c, g, or t
  misc_feature (198)..(198): n is a, c, g, or t
  misc_feature (204)..(205): n is a, c, g, or t
  misc_feature (209)..(209): n is a, c, g, or t
  misc_feature (236)..(236): n is a, c, g, or t
  misc_feature (255)..(255): n is a, c, g, or t
  misc_feature (273)..(273): n is a, c, g, or t
  misc_feature (346)..(346): n is a, c, g, or t
  misc_feature (355)..(355): n is a, c, g, or t
  misc_feature (359)..(359): n is a, c, g, or t
cgcggtggctcacacctgtaatcccagcacttaaggaggcagaggtgggnggatcacgaggtnnggagntcnagacnancctgncnaacanggngaaaccccatctctactanaaatacnaaattagccnggcntggtngcnnnngcctgtantnncagctantcgggaggctgaggcagnagaatnncntgaacccnggaggnngagnttgcagtgagctgagatcatagcactncattccagcatgggcgacngagtgagactctgtctcnaaaaaaaattacgtatgataaacttcccacattttcagtggtgacttttaacacatgtatccagctgtgaaancactacccnatcnagatgtaggaactaacatctctggaaagttttctcatgcccctctgcagtcagtctcccctcgaaggcccacatcccctttaatctttaatcgttgagaacattttactgacaccaaagcattttgatcactttaaagtaatgatcatgcacaagaatttatggtcttgtgtaggagaccatgtgagaattcgggagagatgccgaggaatcaaccgagttcgttccaagacagctctgtgggtttgaccttgtggctggggggtggtatcctctgttcatattcatggagagggagatgtcctttactgacatattatttccattgtccttaatatatctgcgattacattatatgcgcagggctcaacgtatcagattggagcggggggtcacgcggtggacatgggacggtataaaacatccggggacgaacgtgggggaaataagcaggagcaaggcaaagaaagaccaagggagcagaaggtaagaggacttaacagtgtagtcgtgttgc

SEQ ID NO: 666686 - DNA, 219 bp, Homo sapiens
  misc_feature (10)..(10): n is a, c, g, or t
  misc_feature (58)..(58): n is a, c, g, or t
  misc_feature (66)..(66): n is a, c, g, or t
  misc_feature (192)..(192): n is a, c, g, or t
  misc_feature (219)..(219): n is a, c, g, or t
cccggcaaancaacaaaatcgaaaattgaatccagtcctggtctcaaacaaactcttnctctggcnttttttgccattaccgtgagacggtatctctgtaatcccagctactcagaaggctgaggcaggagaatcacttgaacctgggagacagaggttgcagtgaccgagattgcaccattacactctagnctgggtgacagaacgagacgccgtctn

SEQ ID NO: 666687 - DNA, 1018 bp, Homo sapiens
tctgagacttggtttcatgcctcccggaggccatctaagcccccgcagcggcgacttgctgcgcccttgggtctgccggtcccggttccaacaggctgagggcctgccctttgtcttgtcctgggatatctggctactgcctcgtgataaatggagatatatttgctcactgacacaatatcaatatactggcctgtgtgtattttgttctgaagacaggcagaccgtgtgcccaaaaaccaggacagggaggacttctaagtaccagcgagttgtctcatgttctgtcttgtcttgctgtttcttggggtaatctctgaatgttgacaatgcaccacgactgtgggtgctttagggctcacacgtttgtcaggaaacatcgtggaagggagagcgggctgtgggaatgtcttgaatggcatagtgtaggatgtggttctgggacctctgccacctgggttaatgggtctatgggctctagagcagaacagcatgacagcgtatctcctcctacttcttgagcgtggggttgcgtcttgtcgtctccactaagccagtagatgctctggacctgttagctgatagaacgagccactatagatagtgccagaagaaatttgtcctttcgggacagagtctccatgcagaaatgctactgcagccacttataggcgggcgaacgtcacttgatcttggcgggacgcgtcttctgctcaacgtgtcctggcgcgtcgtaggactcactgcctacatgaatttcctgagtctattacagtgatgttgcacattctctgggcagctgggatagcccgtgtgctcaaatacggttacgtcgtcttctcctggtgtaccccggtttggatttggcccctggcctgtgtggttgctggggcctccgcggcgacgggtgtccttgccggccgaaagtccccgattttagaaagttccggcccagccttccggtccggcaccggccgggggcctcttccgcccaaggggggcgccccaggccgttcca

SEQ ID NO: 666688 - DNA, 341 bp, Homo sapiens
  misc_feature (31)..(31): n is a, c, g, or t
  misc_feature (224)..(224): n is a, c, g, or t
aaaaaaaattatttttgcccctttcagtagnaacggtgcccccggagaagatcacccacctacccaacacccaacccattcaggggtagggattatggtgggttgttcagtgcccttcattattcctcagattccttaaagtatttgagaatattaaaaatgcggctgagctctgtggctcatgtctgtaatcccagcactttgggaggctgaagcggttggancacgaggtcaggagttcaagagcagcctggccaacatggtgaaaccccatctctactaaaaatacaaaaattagctgggcgtggtggtggcgcgcctgtagtcccagctactcggga

SEQ ID NO: 666689 - DNA, 301 bp, Homo sapiens
  misc_feature (64)..(65): n is a, c, g, or t
aataacgtaattcatgtatttttaaaagttggtgcttttaactactgtaatgtcccccaaatanncttgcagctaactatataaatacatttttataataattatcccctttttatcagagtatagtagagcaaatgaaatatgcttcatttaatcctcactccctgggttgttggttttatgccatgtttcagccagaatcaggaaactccagggccttaaagaggttttctcctcataagtgctagtagttatttgtggctcaatattatccagacccagtgggaatagtttttatgcc

SEQ ID NO: 666690 - DNA, 947 bp, Homo sapiens
  misc_feature (27)..(27): n is a, c, g, or t
atggaggggcgcggggaaggagggggnagagaggacggaggaggatatctcttcctgcttgcattgcattatagcgggcgagaacggaactggtttagaaaaccctttaatgtgtggacagaacctctctcccccaagaaggggttctacaagttgtggacccaattcggcacacgtgggttccaggtgcccagggatatgctccccttcccttccgggattgtgaccgaaaacttgtttgtgataggcccttaggagagacctgccacttaactcgtagccgagctttttttaaggaggaaaacgggcgccacgttccctcgttaaagaatgtaggaagacgcgcccccccccccctttttttgatgaaccttcaacccaaaaattaaatttcgggttcatcccccccaaagaccccggtttcaaccccgatgtgattagtcctccccctgatcaaatgtcttggggacaatcccccttccttatcaagcggttatcagaaatattgccaaggacaaaacaatatctgttgcgcccgtccatgtccatgattggcagcaatgtgtccccctcgggggaaatttctggcccaccaaaggaacgcccctcggccaaagttaaagatgcacgtacactatattctcgccaccataatacaatacagtgtcccagaagccccaaagtgtgaggtcaacatgtttctaaaccccggctttatgccagaaccaaaattggtgtcacttgcgactttgcagcacaaagaaaatctcattaaagttacaggggagctcattaaaatcagagcccccactagtacacgtcatcttggagacacacttgaacgttacaaacgtaaaaaatataatcaagtaccgcgagcgtgaagtaatttgattttaattgggtttttccaaacaaaaattaaaatttctaagcccaaaaaaaca

SEQ ID NO: 666691 - DNA, 242 bp, Homo sapiens
aatatctacagcagggagaagtaagactggagcagtctgttgctctgagtttcccaaatgaaatactgccttggctagagttgaaaaactaattgagcctgtgcctggctagaaaacaagcgtttatttgaatgtgaatagtgtttcaaaggtatgtagttacagaattcctaccaaacagcttaagattcttcaagaaagaattcctgcagcagttattcccttacctgaagtgtcaacgt

SEQ ID NO: 666692 - DNA, 121 bp, Homo sapiens
ctcgtctccgcgtctctcgactctctctgtcttcctctctttctctcgtgtttctctgtctctctctgtccgactctgtctttttctgtctgtctgtctctctctttctttctgtcgtctg

SEQ ID NO: 666693 - DNA, 137 bp, Homo sapiens
ccgctccttcatgaccgtccactgtgctatcgggcggtcttgtcactatgcttcctcacgttgaattatatgcgcttcgagagcctgatatctccccgacccctccataacacggctccatatggcaggctgaggtg

SEQ ID NO: 666694 - DNA, 1069 bp, Homo sapiens
  misc_feature (244)..(244): n is a, c, g, or t
gtccacgtaacaggattgtgatgccaggaggctatagtcgtagctcgtgctgccacactattctgccgcttctgcgtcgacaacgggacacgagagaagccagttcaaggccgcatagagacactacacgactgttcaatcctgctccggaggaactgcgtgaccgtcgagcgtgcaaacagcgtcgtgcctgagccatcgcctcactaaggttgccaacgcgaataataatctctctacgaanttggttcacaccatgcgacagaacggtgggccgacagtagatcgccatggtggccgtgtcgtagtaatacatttcatggtagcagtgatacatgcgtatagtatagcctcttatgatgcttggaaggaggctcctggtatgctattgcgccgtgaagtcatggagttgtaatcggtgacctcgtagcctgttcgagttcagtgacaagtcaaagaatcgcagatgaaagcaatggagtcgtgtgccatgtttgtgatgggccaatttcgatgaccatggggttcataggctgctcctgaaatgatgccggtgccgtagagaggctcgcctggcttcgtggagacacctggaatcaaagagtgcgcacgggtgcccctgattggcacgcacacaggtggcgctctgcgcactgcatcacgtaagttacccagggtgctacgtaccacattaacgctttggaaaccaaagaagcttctgtcgtataccaaattggagcgctgcgactgtattcccgaattggaccctgggacctcaaggaaggtcctcgtgaagaatcttcactacatcttgttgagagcgaccgaaagagaacttctaaacacctagaacactctaattttggctactctggagggcgtgtgcattccaaagcgaatacacatagggctcctatgctgcgttgtgatttcagcctttgattcccataataattagatttgaatgatgtcaaggctggtccttgcatccgagcacgagtggctacgggcgaatcgcccagtgtgtccctaggttcccttggagattacggaaggaaaggggatggcc

SEQ ID NO: 666695 - DNA, 313 bp, Homo sapiens
tagtactacgagagccgttgagttcgcgggcaatccgtgcttgggagaatcctgattgagcagagtttcaatgcgaacggattcaaaatttgatagttgttggtaagccttagagatggtacgcttgatgttggtcatgatgtgcctttcttatgtgcttggtagcttataagcataggtcatcatggcctttttggtctatttaatatgtgttgcacttgattgtaaacgcgggatcctttcagcatcagattagacgattgcatcaacctttgcttatcattgggcacacttcatcacgattgttgtttag

SEQ ID NO: 666696 - DNA, 200 bp, Homo sapiens
gacgagatctgtggggagctactgttatagaatgagtacataaaaagtcccagtgacggtggaaactagctagtagattgcaaccatgtaatggaagctgctgctgagatcccagtcctgcaggctgtgttctttcagaaagatgcgatacacctccacgcatacagacctttctatcgcatagcttcacactatacaac

SEQ ID NO: 666697 - DNA, 1424 bp, Homo sapiens
gagcggcgcggcagcggcaggaccgccgtggcgcctagagtagctgaccctggtggtggagcgctggggcgacgctggctgcagtggacccggtgacagctgtgatgcatgtgttctgcagatgtactaggttttgacaagcttgcatcatgcgtgagtataagctcagtctgttcgttggctcatggagtgctgttggcaaagtcgtgctattgaccttgtaccaactttcgcttcacaggcaattattcttgtcagaacaacatcaccgatccctaacgattagcacacgattctatatacgaacacgcaaggctttgaacgtacggaatgcacaaccacgtgctacttgctctgaacactctttgggatacttgcaggtgacaccgggaggccacactttaccactgcaacttgacgtgggcatttctataccagttgcaacacaaacttggaccacacgcgcacctttgccattttacgctatatactatcccaatcaccaggcgaccaggtccagcactcttaacctgaaatttaacaaaggaaccctgcagcagacacacgcacttactttcgacgctttaacacgaaccacctttgacgtgacctgctttcccagcttagaactttcaaatgcactgcgtaaccttacacgctcgtgaccctttgcggcacggactgcacaccgaacgttgctacgcggggaacacgggagcacctcgacggggctaccacacgcaagctccttaacgcaccagcatgggaagcacaaggctggcgacactccagaggcttttggtttggccggctctctcgtttcgagcgacaaacttcccttatccctatggccccactaagcacgtaccggaagcctcctacagttcaacagccttggctgacaccaccgttagtaacgaggacagtcgatatcgtgaacgttgaagcctcccttaaggagcttggccgcggggccgagaagaactatattaacacgccatcggtgatcgcgatcatacagcgtttcccccaaggcattggcgcccattggagcggatcacacactgcgcggcccgtttctgtggctcagatcacacttgataggggttttccacgatttccaccgctggtgctttctcacggcctcctgtgagcgctgctttcaacacatcttagacttgactcatagagcacactggtggcgcaactcttgtggtcgacggccatctcgtgtgtgcgagaccaccccccgatggtgtgtttccattgtgacagacgcgacacactatcgtcgtgcttatggcggccctccacacgactgatgccgacacgccaggcggcatgtgactccagacgagcgtagattttgtcagccgaccctcgattctgagtggtgttaagaagccccgtttaacccacagagt

SEQ ID NO: 666698 - DNA, 427 bp, Homo sapiens
cacgcggagagagagagagagagagagagagagagagagagagagagagagagagagagagagagagagagacatagagacactgcgatcgaccgcttccccttcccttttattccttccctccctcaccttctttcttttctccccccttctttccctcttttccccttcctccttttctctctctctttctttcttcttcttctctctttcccctctctcccctctcttctcctctctccttcccctctcccctttcttccccttcctcttccttcttttctctctctctcttctttccttcttctttcccttctttcctttcttcttcttcttgtcctcttcttttccttcctctttcttcttcttcctctcttctcctcttctctttcctcttcctcctctcttccttccccccctccccctc

SEQ ID NO: 666699 - DNA, 169 bp, Homo sapiens
taatattggggggtgacatttataaaaggtattgtatttatgtattccttttctaatacttcattgttagtatacagaaatgcgactactttctggagtacccttcatggcaccgaggttaaggaacctgacaaggatcacctgagaatgtgggatactatccctagcc

SEQ ID NO: 666700 - DNA, 158 bp, Homo sapiens
atggcgacatacaagatcagtcaacttcagtaagatagatactagaaacacatatttatggtctttctgtgacggggatgtgaataaggcttatccttaaggccttcattctttaaacaaacaggttgaaatggtatgtggtaaaagagaaagacggg

SEQ ID NO: 666701 - DNA, 160 bp, Homo sapiens
atttatgtttatcatgtcaacttgcattcataaattacattttaaagtatcaaatgttttacttagctccaaattccacaagatttgctaagttctgcacaggtttggccactaatatacagtgttcttgcagcataggggatggagaatctgtaacaga

SEQ ID NO: 666702 - DNA, 420 bp, Homo sapiens
ctagcgccgtacagcagcccatgcgcaaaaccctgagatttcccggcgaaacgcttcgtaatggcggccaatttgtttagctcgttattctggtgtgcccgcatggaaattaaggtcaactttctcgacaaccttcggcttgaagccaagttcgatgacttcacggtcattgccgaccagcccatccgctacaagggcgatggttcggcaccggggccattcgactacttccttgcttcgtcggcgttgtgtgcggcgtactttgtgaagttgtactgccagacgcgcaatattcccaccgagaatattcgcctgtcgcagaacaacatcgtcgacccggaaaaccgctacaaccagattttcaagatccaggtcgaattgcccgcagacatctccgacaaggaccgccaaggcatcctg

SEQ ID NO: 666703 - DNA, 866 bp, Homo sapiens
  misc_feature (552)..(552): n is a, c, g, or t
ctgtgtgtttagggtcagtgtggggcggggagtagtgttggaagtccatgtcagtcattggtttcctagttagtgcaaactcaataagcctgtatttactggaagccatttttctcataagattaacactatgagaaaccatctactgtatatacacccccagatgtatatcgcttttctgatttgacttttggctgattgcttttgaagttaatgtggtttagtcaactgaatgttctaaacatctccctttacctacctggtcggtactcctggtgagtttttgaaaggcagtgtctttcccacagagattaattagaagttagtgtgtgcagtacacttgaccctatgtttgacacacattcagtatatggtggtgattattgtttgaaaatgaaacagagctctctgatggaacctgaagaagtgggattggcacttctagatggatatatgggttgtgtttaactgctttgaatgttagtaagggaaaagtatccacttactattgttcatttctttttttcccagccttaagaggcaaaatgattntctgccacaacgtcttgggttttcttttctagcctgtcttttcatggcttagatattgcagaaaatttggtagcaccagtcataactttttctcttcttgcagacctggttgtggttttgaaaacctagaatcaagtgttaccatgaaggtggaatcagtcattgcacccgagctattcttggtggcacagggccaaatttctaacgggggggccatatggtaagggggtgtggagagcaatttatagacgggccaagaaaaaaggggggaacggaggagaggagagggcaaaacagtgctggggaggttcggc

SEQ ID NO: 666704 - DNA, 524 bp, Homo sapiens
ccagatcattgcataaatatatagtagcataaccatctcacttctaggaatactagtatatcgtcaactcatatctccctatatgcctagaaggaataatactatcttttgctcataatagctagtctataaactcaagagccactccctcttagccaatattgtgcctattgacataataagtctatgccgactgcgaaaagcagcggagggcctagcccatactagtcctcaatctccaacacatatggactagactacgtaccataacctaaaccatatccaatgctaaaactaatcgtcccaaacaattatcatgcactaccacttgacatgagctttccaaaaaacacaataatttgaataaagaaaaccaacaccacagacctaattatggagcatgcatccctcctactaatttataaaagcaacatcaccaaacaacctatgtagctgtgtgcacgagaccttatcctacagacaccataagacaaacaccatatcaatataatagctgatctacc

SEQ ID NO: 666705 - DNA, 353 bp, Homo sapiens
tcactcagacagtatggaagaaacaagcgtctgggagaacacatgggacgaagtgatactcttatatcatggcttgtagtttaaatgttagtttgactcaatttgacagtttcgggtcttggtttctgtggcaggttttaagctcttcttttataaatagttgctttccaagtctgaaatctatacattgtttcagtaatgaattcattatgtaaatttgcccagtcattcatctaaagggaataaacgttaaatggtttttttaaattttgacttgtgtcacatatgagaatataaagtatatctgtacaataaaggaaaatgaaacatcaaagtatctacctcaggtaacg

SEQ ID NO: 666706 - DNA, 877 bp, Homo sapiens
gaaacccactccaccttactaccagacaagcgttagccaaaccatttacccaagataaagtataggcgatagaaattgaaacctggtggcaatagatatagtagccgcagagggagaagatgaagaaattataaccaagcatagatatagtcgaaggactaacccctataccttctgcgataatgagattaactagtaaataactttgcaaggagagccaaagctaagacccccgaataccagacgagctacctaagaacagctagaaagagcacacccgtctatgtagcaagaatagtgggaagatttagtaggtagaggcgactaagacctaccgaggcctggctgatagctggttgtccaagatagaagtcttgagttcaacttctaaatttgcccgacagaaccctctaaagtccccttgtcaatgtaactgtgagtccaacagaggaacagctctttggacactaggaagaaagaccttgtagcagagagtcacaaaatttaacaccgcatagtaggcctaaagagcgagccgactaattaagaaaagcgttcaagctcaagacccattacctaaaaaatcgcctagagacgactagtaactgaactcctcgcacccaattggaccaatctatcacccgtatagaagaactaatgttgagtatcagtaacatgaaaatcatttgtcctccgcataagcgtgcgtcagatttaaacactgaactgacaattaacagtcctattatctacaatcagacagaagtcattattagcctgcacgtcgaccaacaagggatgtcataaggacagttaccccaagtcataggaagtcggaaatctgacccggctgttgaccagaaaatacgttgaatcc

SEQ ID NO: 666707 - DNA, 687 bp, Homo sapiens
gtgacagctgtgaggttgagcccgaggagcctggatggcggagaacaagcacaagccccgcagtgaagtcaaagcagggcaagaaggaggcggagtgacgagctgatgcgccagtgcacccggtggagctggctgatggagcccacccctgagctccctggctgaggtgctcatggtggaggtagagaacgttgtccacgaggacttccaggtcacggaggaggtgaaagccctgactgcagagatcgtgaagaccatccgggacatcattgccttgaaccctctcttacagggaagttcagtgcttgcagaatagttgcagcgcttggcccagcgtgttgtgtggacaacccacatctacctgagcgacatgggcgccgcgctcaccggggccgaggtcccattgagcttgcaggacgtccttggaatgagaccaatattcctaagcggctgtacaaggcccttctccctgctgaagaaggaatttgaactgagcaagctgcagcagctgcctggggcgggaggtgcaggagaagatcaatgccagacccaccgtacgataccttgctgcagggaccagctacaagatcatcagcgaaggagcttggccttggagaaaggacgacaaggcattgccattcgaggacgaagttcctgtggagcgcctgatgggagctcgttgctccc

SEQ ID NO: 666708 - DNA, 383 bp, Homo sapiens
ttataacccacgatcactcagtctttacaaacatcaggtaagataagaccaggtctattaattctactctctcactaatctattgtaattgagacaggatcactctgtttaacccaggctggagcgcattggcgcagtctcaattcaatgaaagccctgcttctcgggctacagcaatccactcttcctcaaactccccagtaactgccaacacaaccagctaataagggctattaattctcattttatatatgacaataatgagccagagggaagataacagcagttttctcagaggtgcacataggtaataatatgcagcaatacttggacccatgccctctgcattttcggaaggacttggttccttagcaaaggtggtt

SEQ ID NO: 666709 - DNA, 127 bp, Homo sapiens
  misc_feature (61)..(61): n is a, c, g, or t
  misc_feature (71)..(71): n is a, c, g, or t
  misc_feature (79)..(79): n is a, c, g, or t
  misc_feature (91)..(91): n is a, c, g, or t
aaaaattacagcaacattatcaaagacaacatatgtaaaatgtttgtacattaccaatatnagtggcagtnagggcaanctgaagaataantagactgagtttccgggcaatgtctttgcggcacga

SEQ ID NO: 666710 - DNA, 564 bp, Homo sapiens
  misc_feature (564)..(564): n is a, c, g, or t
agcggagttccaccagtccagcaggactgccgtcggctccgcggggggggcgggaccgggcaccccggggacgctgcgaggagtcgctcctacggcttctgctccgttctgctcgcgcgtagcgcgttagcatcacgtgctggacaactactgcgcttgtgccctctggacctcttgctacttggctgtgttctgctacagacgtatggctacaggtggccacgtttccctggaggaagccaattgctggacttgttcaggtgacatactgtactacatcggtctgtagcagcacacgtggctggaacgcatgacaacatagttcctcgattctcgtcgcagttgacggtattggcgtccttggcaactggggcacatgactgggacacttgtgaggacccagagagatcgtaccgcagacaagcaaagtccgcacacgtcagatgggcatcatgacagggctaataaacatgggtgacagaattttgcttatcttgcaagggacgttttcgaaacgatgggtacactggcgtaacacgcgacgccgaatattgtgcactgacn

SEQ ID NO: 666711 - DNA, 207 bp, Homo sapiens
taatccaagtactcactttgtccaaatgatcctagtaatggcctagaaatatctttctcttaccggtaatgaatcaattttacccaggtatattaatacgagaaaaaatggtatggaaaacacttagtatgcagtggataagaggaattgggtataataatgggggggggattatttttaatactaaagggtgcggaaggggtaccg

SEQ ID NO: 666712 - DNA, 240 bp, Homo sapiens
tcagtgcccccagaaacgaagcggcccggacgaatttctgagtcaccgtcgcgagaaagcgggctgagccgccattttgaagcctggcaaaccgaagcaagaaatgctgccgtgttggatctttgccagccttcgtgccgaatgggagcaggttggagggagggagagccaatatacactatgggctgattaagcccggttggctgccatgttgttaacgagcaccgatttcctctaaaa

SEQ ID NO: 666713 - DNA, 581 bp, Homo sapiens
tcagtgcccccagaaacgaagcggcccggacgaatttctgagtcaccgtcgcgagaaagcgggctgagccgccattttgaagcctggcaaaccgaagcaagaaatgctgccgtgttggatctttgccatgcccttctgttgcctgagatggtgatgcatgtggctgctggatgtgctgtctggtggctgcccctgatgtgatgcttgtgtgtgatgtgcctgtggttgtggtggcctgctgatgctgcttcctgggccctggacttggcactggagcttggtgcttgctgacctgctggcccctgcctgccagccagcccctgccctggggccccatgtgcctatgccttgcccattggatctgaaggatgcccttgtgctggaggtgcaagctgctgccagatttgcacatcacaacttgagcaatactgcacattgggccgcagcagtggggcatgcacagcatagacgttgctctgggccctcccttgcgggccacccaacacaggcaacgcagcaggcacaagccacagggtacccaagacacccaaggccacaaaccacgggcctaaccccgtggg

SEQ ID NO: 666714 - DNA, 331 bp, Homo sapiens
tctctggatcaggccacattgcctgaatctccacaagggtagaagggcgtgacaggcccgcagcaccacacgtggtataggagagtcctgacagtcaccaccctaggaggcctcctacctgctcccacgctcacctgcaagctgtaccccatggcagccagagggcacccgagagcacccgagtgagggcctgtccctaccctgtccagtgccctccatggctcccacctccctcagggtcaaagcccaaatcctccctgcagcccacatggtcctacccggcctgctctgtccgttccccaccgacctccttttccctctctcccctcct

SEQ ID NO: 666715 - DNA, 144 bp, Homo sapiens
ctcgacaccatatgtaacatcccaaaggggagacagttccagcctgctgcatccggcggctggcatgcctggtccctgtgcatgttgccatctgtgatgctgaggaaggggctatattcaaagccacctgacaacatacggctc

SEQ ID NO: 666716 - DNA, 474 bp, Homo sapiens
ggccggaactggtcgatgtgaggcacctaaaaaatgtctaccgcagttttcaggcgtggattccgtgaaggaacaacaggctaaacccaagagggcagctgtggcagcaatccaggttcatcttacggaatgtcaccgattagtcatgcgataaatgttctggatcttcacaaaataagacaaaaaaaaaaacacagcaagaacaaaaaaaacaaaggataaacaatcagaccaaaaaagataaaaaaaaaaaaacatataagcaagagagtgaatggcacatgccctgtagtcctagtttactcaagagtgctgacgccaggagctatcacttgaagcacagaagatccaaacgctgcagtgcagctgagaatcatgaccactgcaactccacgcccagagcaatacgagcagagacccatgtctctaaagaaataaacaaaatactgaaacatattcacgtctccacacaga

SEQ ID NO: 666717 - DNA, 300 bp, Homo sapiens
tcccccctccccccgagcgccgctcccgctgcaccgacctcgctccctgttttaagctcgtgctaagctagcgccgtcagcgactccctttatgcgccatcatgattatctaccgggacctcatcaaccacgatgagatgttctccgacctctacaagatccgggagatcgcgtacgggttgtgcctgggggtgcaggggaaaatggtcatgtggacagaaggtgacattgatgactacctcattggcggaaatgcctacgatggaggcccctagggcgaaggtaccgaaagcacatgaa

SEQ ID NO: 666718 - DNA, 599 bp, Homo sapiens
catggtggtgcacgcctataataattacaactacttgggaggctgaggcaggagagttgcttgaacccagggggcggaggtagcagtgagccaagatcacgccactgcactcaagcctgggcgacagaaaagcacgacctgtccttaaaaaactaataatctatcccttatacttaagatattgccctctattgtcattatctgcttaccagtattcttgtctgacagagcctgtaactactctaattctcattaactaacccatttctcctttacctctgggaacttctctatcttctccttagaccccttagacagtgaaaattcaatcaaaatgacgagcaatctcgctctgtcagacccaggctagagtacagagagacacacctctcagactcaagtacagacgtcaagacctctatgggattacaaagacaaatacctcccatggccttcgggcgaccacgaaacaaggactaccctctccaaaaaaccatacaccaataaatcagaacagcatatcttgggcacacaccacaagtaatacagacgaaagacataagcacgcccgtattacccaagccaccagacgaacaatg

SEQ ID NO: 666719 - DNA, 307 bp, Homo sapiens
gaaaatgtgacggccaagctccaggctacggaaggtcattccccccgaccagcagaggctcatctcttgccaggcacagcagctggaacgactggccgtaccatctttctgaactaccaacactccacgacacggacgtcgacccctgcaccctgagtcctgacgtctgacgacggtggtcctcgccgactcttcgtgacgacccctgacccggcaagacccctaacccctggacacgtggacgccccgttgaccacccactcgacacaactgtgaacggggactcctctacgacgtcgaccctgca

SEQ ID NO: 666720 - DNA, 765 bp, Homo sapiens
agcgggaggaggagggactcggtgggaggatgggcttgctctcaatgtggcgcaagttgaaaagtgcaccagaccaggaggtgagaatacttctcctgggcttggataatgctggcaagaccacgtcttctgaagcagcttgcatctgaagacatcagccacatcacatcctacactagggtttcaacatcaacagtgtacaatcacaaggtgtgtaaactgaatgtatgggacattggtggacagaggaagaatcagaccgatactggaagaatatatttggaaaataccgatattcttatatatgtaatcgacgagtgcagacgagaaagaagattgtgaatgagacgggtcaggaactagcggtaattgactggaggaagaaaaactaagtagtgtgccagtgctcatctttgctaataagcaggattagctcacagtcaggccctgggctctgaaattggcagaaggaccgaagcctggcataccatccgcgaccgagtctggcagatccagatcttggctcagtctctcacaggagagggcgttacaggatggcatgaacgtgggtctggcaggatatgtcaatgcaaaagaatgacattaacatctagacgaatggagatgcaggagctgccggagagcccgacattcggtcctgcaaaaacatctaattgggctgctttctgacccaaactgttactccatctgtgtacagctccagctgtttgaagagacgggaccaacacggcttcacacagaatc

SEQ ID NO: 666721 - DNA, 326 bp, Homo sapiens
tccgggccaaaaaaaaatcccctttttttaaaaaaccggggggttttttttccccccccccaaataagggggtttgggaaacccacccccttctttcccttgtacccctttttttttttttttaaaagggcgctgtcaaaaaaatttcccaaaacctcctcaaaagccttttcaggggtttttgcagttccccccaacatttttttttttacccaccccccttttttttccccccccccctttttttggccccccttcctgtggaaataaacccccccccccccatttcttttttttccccgggggccggggcctttttttttcaa

SEQ ID NO: 666722 - DNA, 714 bp, Homo sapiens
  misc_feature (15)..(15): n is a, c, g, or t
  misc_feature (61)..(61): n is a, c, g, or t
  misc_feature (94)..(94): n is a, c, g, or t
  misc_feature (111)..(111): n is a, c, g, or t
  misc_feature (118)..(118): n is a, c, g, or t
  misc_feature (148)..(148): n is a, c, g, or t
  misc_feature (171)..(171): n is a, c, g, or t
  misc_feature (523)..(523): n is a, c, g, or t
actccttgatattgnttctcataacacagtttttcatttgacttacgtgtgtcagtatcanttctcctacctgtccccgttcctttacaggacnttttaaatctaatattnatgtttntactaaaattacagatagatggcatagggnaatgaaacgttgaaaagaagaantaaatataaggaagagaatatatggtagtaattttctgtggtaggcagagaaagtgaggtttagctcagctgtgacttggcatctaggttcacacagcttgtgatagtcaaaaaagaacctgtgttgggtatggtggatcacaactgtaatcctagcactttgggagccgaggtgggaggattgcttgagctcaggcatttgagactgggtaacatgggagaacccctgtctacaaaaaaataaaattagcagggcatggtggtgcacgtgtatagtcccagctactggggaggctaaggcaggaggatcgcttgagcccaggaggttgaggctacagtgagccatggtctngccactgcacttgagcctgggtgacagagggagaccctatctcataaaaaaaaagggggggagctatgctgcatagtggcacacacctgtaatctcagcactttgggaggctcaggcaggcagatcacttgagctcaggagctcgagaccagcctgagcagcatggcaaaactccatctctaccagtacca

SEQ ID NO: 666723 - DNA, 499 bp, Homo sapiens
ttttcacaggggatctacatgctctgactatctcgggatcaggtacaattggtggctgtcgcaattagcccaggaactagaggaggagagtgactaaagaccgaatggataatgagtgggtagccacccagttggttgtgatcattcgtgtgcaatgagataaaggcctcagtagcgtgcgccgctgctgtgctccttacccgctatgatgctctagctatatgagccatgatgcatttactgtcatcaagaactgtaatacttctggaatccagacagaatggtctcctcctctcacaatgcttttcctctgtgctacaaaattttctgcctctgccccttcatcttctacagacatcaccagcttcttgagcagtgacccaagttctctgccaaaggtgccagttaccagctcagaagctaagacccagggaagtggcccagcggtgacagccactaagaaagcaaccacgtctctgggtctttgcattgagattgg

SEQ ID NO: 666724 - DNA, 112 bp, Homo sapiens
ttccaaaattgtcccttctccaagcaccaggtctagctctttcttgtccagtctgaagaagccttagggcatcttctctttcctggacgactttatctaatgcatccatggc

SEQ ID NO: 666725 - DNA, 202 bp, Homo sapiens
  misc_feature (37)..(37): n is a, c, g, or t
ggatgtggtattgagtggccatgtgactgtgagtganaaagatagaccctcttccctagaagcaaatctatatatatctttctgtgatttcagaatcagctgatggcaagtgacagaaaaatccagaattacagtggtttaaactggatgctgatttctttctttttcttttttctttcttttttctttttttttttttttt

SEQ ID NO: 666726 - DNA, 835 bp, Homo sapiens
  misc_feature (59)..(59): n is a, c, g, or t
ggggggggggcgggaggggggggggagggggaaggaggcgttctcacgtgaccacgganagattgtgtggcttatcaggccaaaagaggaagaggtcgtggtacttttcaacgtggcagagggggctggagacttcaaaaaatcaggtagcagtcctaaatggactcatgacaaataccaaggggatgggattgttgaagatgaagaagagaccttggaaaataatgaagagaagaaggacagacgcaaggaagaaaaggaataataaatatgaagtaagggggggacagagcaggacttgcacccaccattttttttacctgatttttgttttcaaataagaatgtaagcattttacttaaattttactgtttgcgaggagtctatagaaattttgttttaagtcttcagatatcttgagaaatagtagactgtatgttgaaaattgtactgaaataaaggagaaaattgttacgtaccatatttgtaactatcaacttttaaaacttttaccgtttttgttacatgcattggaattctgcttttgtctataaaatatggccaagtacaggtctgtgaaggcctgattctcttccttccctgtttggaacctgtggattgtggagccaacgttagctcttcttattaaacaaaaaaaaaaagggcctccgttggccttaggggggggaactctgcggccggtcccttttagcgagggtgtaattgtggagccctcggtgactggctgtcttggtctcgggttgttggggtggcggggagggggtaaagatcccatcaagggaggtatacgggtcttccatatactcaggggata

SEQ ID NO: 666727 - DNA, 363 bp, Homo sapiens
gtgatctagagcatccccgctgagtggcatataactctggggctgggggagtgtaaggataagaagcaagtgaggttgggcacaggtggctcacccctgtaatcccagcattttggagagagacagaggtgggcggatcactatgaggtcaagagttcaaggccagcctggccaacatgttgaaactccgtatctactaaaaatactaaaaagtagctgggagtgatggtgtgcacctggtagtcccagctacttgggaggctgaggcaggagaatcacttgaatccgggaagtggaggctgctacacaggaggctgaggaaggagactcacttgaacccaggaggcaaaggatgcagagagc

SEQ ID NO: 666728 - DNA, 969 bp, Homo sapiens
tgaagtggtcgcagttcctcctaagtcttgccagaaatagctctcctcatcatgagagctgatcccctcctcctggtccatgtggccaagcaaaggccttagtacttgttgtcttgcttgctgctttacatacgtggctagaccgatagtgtactaaagaaccatacagagttgacagtctgtgactcatggagtttcggcatgtgctttaccgacagtcccatttgatgatccttttcctcagcttgacccgcatgtaacgggactcctcaatgggccactgaggattctggccgaactcaccgcagactgggcaattggagcagcattgatgaaaatcggcagagtatatgaggatagagatagtagaataaaaattccttagatcgtgagtcctataactcattgaatcatggttttaattccgaaaagcatcagatcgatgtgaaccgagacatttagtatgggtttgccaatgagcaatactctagaggaaggccactgttatccccctcaagaacggttgtcgagccctcctggtcatattcgtatccgtaactctggatgaccatcccggagacaacacagaacctctactcggtatatgcatggtcacggtatatctgcgcaaaaccatggggatttcaagattggccctggaactgaggacaggcagactatctcatacagtgtgtggatcagggaggtcagaccactccttggagctgtgcctgatagtgtctctgattaacaaggatactatggacctatgtaggactggtatcctcgagttagaagtatggcgaccacggcactcttggatctgatttccctttgtttgccactggactctgaagttgcctcatggatcagagagagaaaacggtcggcacgaaatccagagtatgaaacccaggtaggccagggatccgcaaatcaaataacaagtcacagagagcatgagaaagt

SEQ ID NO: 666729 - DNA, 500 bp, Homo sapiens
  misc_feature (348)..(348): n is a, c, g, or t
tgtttcccttggtctctacttccctgattccctcctctcctacttgtctttctcttcttctctccaggagctgagaacagcccccttcctatttgaggctggcctgtccatgcgcacccttggcctcacatcaatggaggatcacccatcccttcctcgtgctagaaacccaatggctgtattccataagcctgcaggactcttgctcttctccttatttaactacaccagcttaggagtagcctacatgctccatcttcatttccttaccccatctactccacagtctaccattctcttgctgaggttacttacctggcctctttcctctacactcttttccacacncacttgtccaggtgcacattaatacctacacctgactatcctacagattacttggaattcaagatgttgggggaataaactcaccatcttactctatatgtctgcctgtccttcagcatttctcatgtgggataagggtgctatgattcacc

SEQ ID NO: 666730 - DNA, 379 bp, Homo sapiens
  misc_feature (72)..(72): n is a, c, g, or t
  misc_feature (101)..(101): n is a, c, g, or t
  misc_feature (198)..(198): n is a, c, g, or t
  misc_feature (218)..(218): n is a, c, g, or t
  misc_feature (293)..(293): n is a, c, g, or t
aaacccttcatggcccggtgtggtagtacatgccctatagtccccagctactcagtggctgaggtgaggagntcacttaagcttagcagttcacgacactnttaaaaaaaaaagcccaggcgttgtggctcacacccataatcacagcactttgggaagccaatgtgggagaatggcttgagtcccaggagttcgagnccagcctgggcaagctaggnagaccaccctgccccgcccccaatctccacagataataaaaaaaattagctgggtgtggtggtacacacctgtgntcccagctactcgggaagctgaggctgcaatgagctgtgattatgccactgcactccagcctgggtggcagagtgagcccctgtct

SEQ ID NO: 666731 - DNA, 416 bp, Homo sapiens
  misc_feature (1)..(1): n is a, c, g, or t
  misc_feature (117)..(117): n is a, c, g, or t
  misc_feature (334)..(334): n is a, c, g, or t
  misc_feature (343)..(343): n is a, c, g, or t
  misc_feature (364)..(364): n is a, c, g, or t
  misc_feature (379)..(379): n is a, c, g, or t
  misc_feature (410)..(410): n is a, c, g, or t
natttgggaaaattgtcagtcattatttctcccaatgttacttctgttcctttccttcttttgcttttcagttttggaagtgtctgttgcgaaatcttcaagctcatagattctttnctcagttctttcctgtatactaatgagcccattgaaaagcattattcatttatttgacagcactttctttaatctttcctgggaatttctacctctctggttacattatccatctgttcttgtatttccattaaagctcttagcatattaatcatagctttaaaaaaaaaatgccgggcccaatcaattccaaaaccctggccatatctgaatctgnattctcatnatcgttcagtctcttggaaanttttgtgtgtgtgtntgtgtgcaagtgtagggaaaggcagacaggngtaaaa

SEQ ID NO: 666732 - DNA, 311 bp, Homo sapiens
gtccaagctcatccgctgctcattgcccagcaccctagatcgcctgcttcctctggcgccagaagaaggcccacctgactggacgatccatggttaacggaggcactgtggccgagaagctggactgggcccgcgagaggcttgagcagcaggtacctctgaacgaagtgtttgggccggatgacgattatccgacggtctccgcggttaccacggccaaggctacaaaggggtcaccagtcgttggcacaccaaaggaagctgcccccgcaagaaccaaccgaggctgcgcaaaggggcccggattgggg

SEQ ID NO: 666733 - DNA, 92 bp, Homo sapiens
ggtcctccaaaatgttcagaagtttgcgtacctggttggcgattactggttggagactggagagcaggcaggaaagcaggcagaagagcaag

SEQ ID NO: 666734 - DNA, 1581 bp, Homo sapiens
  misc_feature (312)..(312): n is a, c, g, or t
  misc_feature (1327)..(1327): n is a, c, g, or t
  misc_feature (1380)..(1380): n is a, c, g, or t
tataaaaaccctcttcattaaatggaaacatacaaagaatagtcaaaccccttctacaaaatgccagttatcagggcggcgggtttcaaacgccaaatgtggatgtgttgtgggtattgtcaaatgtggaaattattaagttgggcggagatgagaacgcgaatatatgtggagagaaatgttgagacgccatataaatggcactgtgagaatgctcctgtgggaacgcctgtgtgtggtctaccacaaatatatgtgttgagagcgcccggtaaatatgcgccggttccgagaatactgtgtgtgagcaangggagagagatctccagaaatgttatctctctgagagggtcttttgtaaggagaggggtgtacacaataacagaagacccacatgataaatatgtgtgtcgatatactaaccaccatgtgtgtctttgcagatatatctatatgtgagtgtgatacacagtgtgtgtgttttctctctatatattaagaggaatctattaatgaggtgggaaacgctccccgaagtgtgttgtatgtggtataaaatcatccccttgatatgggccaagtatgtctatatacacgcgagtattgtcgtgtgttactacagaggagcagtggtcgcagcgcagcatcctcatctcttaaaagaggggagtaatattataaagacgccgcgaggtgtagaagattagcgcttctgtggttgtgggcgggaggcgcccaaatgtggcgccctccttcatcctcctaaatagtaatagagggagggcagggtaaagagagaggcgcctacaagagacgtctcgagaagaattgtagggtggtcacaaaaaagggggtcctcaccaaagtacaaacaatatactctctgcggccagaacaaaaaaacagaaaaaatctttctctagaagaagagtgataaaactcacaacaataaagcgaggatatataataccccccggtgtattcccagaaaaaggggccctatatttgcaggaggacacacgtgtgagtgcgtcgtcgctgattaggagaggggggccgcatatggggcaaaattgtgtacagcattattcccctccagggatgtcaacccatcttcgggcgacgcccactacaatcggggggacaataaacatgggggtataacagcggcggagagtaacaacgacgcatcaaagataaaagagccccttaaagatattatagagcgagaagccatctttaatccgcgaaattctgtcggagcaaggtttggctgaaaaacctccacacagagtttgtggctaattagagcccccgcgaagaagcngagcacacaaataaacaacaagagaggaggcatgtatacaacacacagtgtgncccccccccgttaatctaacgacgggacgcacccaacagggagcagcagcagagggcattatacacacgatatatcatataaaaaccaacggacgaacggatgcttgaatcacattagtggtagagggagccacactaataatacttataggtatgattacatagatgctgagcaagcagcctgaagcgacacataccaac

SEQ ID NO: 666735 - DNA, 1685 bp, Homo sapiens
  misc_feature (1159)..(1159): n is a, c, g, or t
  misc_feature (1267)..(1267): n is a, c, g, or t
tatagggcccaggatgtaaaactggattcctggtgcgggtaaaacttccaatcaccaacacttatagggcccacacacgagttctcctggaaaattttaaaactccctctcaaaaagcgtggttattttattccaaagtgtgagtttgtggagtctccagcgagtgggtctttactcgagtgaggaattctcgtgggtagccgagcggcgggccacacgaaggggccctctccacaacacttttgtggagacactctcgccgagagcgacacagagagtggtctaccagcttcacacgagggcagagggggctcccggagctccactcagtgtgagggagtgagagagagagtgttctctatgtgtgacactctctctccttctctgtggtggagagagcgctctctctatctcgccagcatatatatatctctgcgtggggaaaatacatcatgaggccacacacccgacgggggcgctcttgtgagagagaaaagattcgacaaacgtgagcagcgtgaaatatagcgccatatatacatctcgctggggcaccccagcgtgatgacacccacaacaacaaccctctattatcacgcgcgtgaacacacagcgggtgatgtgtctctatcacacacccgagagcaataaatctctgctactcactatgtgcgcgcgagagaaagagcctcagaaacagcggtggctctcacgagcgcgaagccgcttgtgtactacacccgtgtgatagcccgtgtgcgcgcgcggtctctacaaagcatcatcatctctcacaagagagagaggcgacgcgctccctggtaataccacccctgatgtgagaatagaaaagaacgccaatttggtgcgcgcgcagtattacgagccaaggtcgcggcgcgcccacaaggacgtgtggatccacgcacgtgcgccatcacacatgtgggagcaccccagacaaagaactcctgttgccacaagccaactgttgccacacgggggcggcccccctattagtagaacagcggcgaccatgatggcgtactctcctcaaagaacgccgtggttggagccacctataagaaacacaaaacccctctcacaccccgcggctgagcggaagacaaaataacaaccataccaacgtggcacgagnacacactaataaatctccccgacagagagaacaactctctgaacacaacaacccgcggtggtgccctagtcgtacaaatacaaatagaaaataacctgccgttcaccnatacaggcgccgacaaacaacgatggggtgcctccaacatatctaaacagacacccgcaacgttgtcctctctcacgacgaggacgcacacacgttgtacacaccaacgggtgtgtttgacccccacagaaatacccgcactcgctttcctatgtatttcgccccaaaaaatttattgtgccccccgcggggggtcagcataataaaccgcgggccccacagatttgtgtcctctctctcataagaaccacccccccaccgtgttcagtccgtaccttattgtgccaacccacggccgtccttcttacccgaggcggggtcccccgcagatgttctttgtgtccacaccagcggcggtagtctttctctagcctctcacttctccccacgccgccaactacgtgtgcttccctcactt

SEQ ID NO: 666736 - DNA, 125 bp, Homo sapiens
tagagaacccgtctacccacaggctgggtagattggccgagtccctttaactttttttaaccttcccttatgagcattgcctgtgtggggtgggcagtgagggtaataatgactgtgtgggttga

SEQ ID NO: 666737 - DNA, 941 bp, Homo sapiens
  misc_feature (466)..(467): n is a, c, g, or t
gaagctgtatagaatcattcgatagtggctcgtgcacatggctgtggtcagattggtcctaaatgcctcgtcaatgtatcctggtattctatctatgattgaaatcaaatactcactaatgaaaagcattatttcataccctcttactctccatatctacaagtgtaagtctttcactcgaggttacatgtttctcgctataccctctaacctttagtcctctctacgcacccatatcataatcaagtatgtgacattgagttagacatcttgtaaaggcacaaaaataaagagactacatatttagagagagtccctttagtaaatcagaataatatattttgtattatgaataatatacaaattttacaccctaatttatactgtatagtacaattaacggtttcttgcatgggagaacttccttaagaaggcttcagatatgaagcaagttctggagggatcnnttggaggttcctttgtcttgttttgacttacagaatctttttttacgagtaatcttgagacactcctgaaagaagctaactatggtatagaaaaggataaccaccacgtagctgaaggctaagattcaggtccgaactctcgaactaactagcttgtaacaaagcttgtgtaaccctgagtaaggttactcttgtctctctgggcctatgggtttcatccattaaaaacagaggcgattgggctaaatcactagtcccttccgagtctaatatctgtccttcctacatggaatacctggtccccataggatggttcatctaacctaggtgagccaatgtcgcggctccatggcatttcataaacaggcaagatttaaacccgggggcttatcagggttcctcaaacgcaataaggtggaagttccaaccgcggaaatctctgtttgaatcgcccagggcactcgacataagcag

SEQ ID NO: 666738 - DNA, 241 bp, Homo sapiens
cccaagaaaaacttttttaaaaagggtttttaaaaagggttggaaaattccccttaaaagggccaatttcccttttaaaaggggaccagtttttttggaaaaaaatacccccaaaacaatttttaaatttttcccaaaaaggcgtttggtggaaaaaagaaatttttttttaaaatttgggaaaccccaaaataaattttcccggggaaaccaaaagggaaagcccctttttaaaaaaaat

SEQ ID NO: 666739 - DNA, 120 bp, Homo sapiens
ggacagtagctctctcttcctgccaacggtgtcacactgatcgaaggaagaaggcaacttcaaacaagagtgggtcgcccttcacactcccatctctatcagtgagctgctagtgacggt

SEQ ID NO: 666740 - DNA, 438 bp, Homo sapiens
gagacacggagcatgaaggccttcgagcagacttaccgagagaacctgcggatcgcgctccgctactacagaccagagcgaggccgggtctcacatcatccagaggatgtatggctgcgacctgtggcccgacgggcgcctgctgcgcgggcatgaccagaccgtctacgacggcaaggattacatcgccctgaacgaggacctgagctcctggaccgtggcggacaccgcggctcagatcacccagcgcaagtgggaggcggaccgtgtggcggagcagctgatagcctacctggagggcctgtgcgtggagaggctccgcagatacctgcagaacggggagacgctgccgcgcggacccgccacagacacacgtgacccaccagcccgtctctgaccatgaggccaccctgaggtgcatggccctgggcttctccc

SEQ ID NO: 666741 - DNA, 121 bp, Homo sapiens
gtgaatgattccgagagtcacacctcgtcgcggtacacgaacatgatcacgtcggcgtcctgctcgatcgctccggattcccgcaaggtcggagttcacctggacgcttgtttgggacgtt

SEQ ID NO: 666742 - DNA, 295 bp, Homo sapiens
  misc_feature (81)..(81): n is a, c, g, or t
ttatccccaacacattgatattctgtccgaaaactaaggtaaatgatgcttaattaatataacaaaccaatcattgatcantgtctagaatggaaacatactgatatggaaggaaaatcaatggaaaaatctgaagagctagggggcccctggaaaggacccccaggtggctgtggaaacaacatggagcttaaatgaggtcatggttccccttaacaacaaagaaggaaagctctgaagtgctgttttaataccctagagccttgctccttctggaattcttctgtccccatca

SEQ ID NO: 666743 - DNA, 179 bp, Homo sapiens
agtgctgccatccatgtgatattccatgagagctgacagcgatctgcctagctgtgtctggtgatcctacattcactactttcactgcctaatgcatcctggacctcactcaaatgtgcacagaggcctccacgaagtaatattttttggccgatactcttcacagatggatgaatgtg

SEQ ID NO: 666744 - DNA, 468 bp, Homo sapiens
  misc_feature (35)..(35): n is a, c, g, or t
  misc_feature (152)..(152): n is a, c, g, or t
tttcactttcccagaggcaaaagaggccatctggnaggccaggcccatctgggctcttcccaggattcctagcaggctccacaagcccccacgcagcaagcaggaggggaggcacagaggcggcagctctccaaggtgctgaactggcactncttcagagccaccaagggatcattgcagacatgaggccccagggctggggacttgctattcctggtcttctcatttttgtggtttttctgtccagaaccaccggccttagagatgctctagtgcagtgcgttaaaaataaccctcctcccaccctgagaaccttccagctctgcaccaagcgtcacttgggccgtgagtgtgggatctgtggctgcccgggagacgtggtacctcccccaccccgcacccccgcaggagcacactttgtggcttctcaggacgagcccctttctcagtctgaccccaggagcctcc

SEQ ID NO: 666745 - DNA, 186 bp, Homo sapiens
agcatactttggatagaaggcttgtacacttggggaacacaattacacttagcatatatggtagcgggtaataactagcaccacagttacagggaattcctttacatacaccaacttggctttcacttttaaaacaaaactcagaatccatggctcagtaggatacctataatggtatggctcagc

SEQ ID NO: 666746 - DNA, 414 bp, Homo sapiens
tttttaaaaaaaatttggtagagaccttctgcccaggctggtctcaaactcctgatctcaagtgatcctccggcctgggcctcctgaagtgtggggattacaggtgtgagccaccgcgcctggccaatttttttcctttttaaatctggccttcctgagtaaaagatctggaaatttactttggatattctctactgcacagtggaaagtctaatgtcatcaggcatctttgccatgtcctctttagctatttttttcccccttgggattagatggaagcaaattccaggcaatggtatcggtaaattactaagtatcaagtatgggcagaggtcattctggctacatggtccagggaaaacttggggggcaacctttttcctactaactctccctagtcctggggggccagct

SEQ ID NO: 666747 - DNA, 958 bp, Homo sapiens
  misc_feature (85)..(85): n is a, c, g, or t
  misc_feature (92)..(92): n is a, c, g, or t
  misc_feature (96)..(96): n is a, c, g, or t
  misc_feature (172)..(172): n is a, c, g, or t
  misc_feature (175)..(175): n is a, c, g, or t
  misc_feature (316)..(316): n is a, c, g, or t
  misc_feature (327)..(327): n is a, c, g, or t
  misc_feature (336)..(336): n is a, c, g, or t
  misc_feature (435)..(435): n is a, c, g, or t
  misc_feature (852)..(852): n is a, c, g, or t
  misc_feature (866)..(866): n is a, c, g, or t
  misc_feature (950)..(950): n is a, c, g, or t
ctgcacgtagcccggcgctcggcatggctctcctggtgctcggtctggtgtagctgtaccttctttctggcagtgaatggtctgnattcctntttntttgatgtgatcgaattaaccccatcaaatttcaaccgagaagttattcagagtgaaagtctgtggcctgaagaanccnatgccccaaggtgtggtcaccgtcaaagaataacaccagaatggaagaaagcagcaaccgcataaaaagaagttgtcaaagtcggtgcagttgatgcagaaaagcaccattccccaggaggtcagtatggggtccagggantccccaccaanaagaatccnggacccaacaaaaacagaccagaagaaaaccaagggggcagaaccggtgaagccattgaagaagccgcgccgagtgccccgcgccagcccgtgaaggancgccccgggggacgaagcggaggaaacagtcctggaaaacaaggcagaagtgaaagtgcaagtaagaaggatgtgattgagctgacagacgacagccttgataagaatgtgctggacagtgaagatgtttggatggttgagttctatgctccttggtgtggacactgcaaaaacctagagccagagtgggctgccgcagcttcagaagtaaaagagcagacgaaaggaagagtgaaactggcagctgtggatgctacagtcaatcaggttctggcctcccgatacgggattagaggatttcctacaatcaagatatttcagaaaggcgagtctcctgtggattatgacggtgggcggacaagatccgacatcgtgtcccgggcccttgatttgttttctgataacgccccacctccngagctgcttgagantatcaacgaggacattgccaagaggacgtgtgaggagcaccagctctgtgttgtggctgtgctgccccatatccttgatactgnagctgcag

SEQ ID NO: 666748 - DNA, 738 bp, Homo sapiens
cttcttaccagtgtggcccatcaggcttacaccatgctctgttctgacttctacatgtctcattatgcatgaccaccaagtcctagcagaagatagtatgccatctagtaactcagaggagattttgaccatgtccaacagcgggcgtcttttttcactacagatgggccctttacactaagaacaggggtcagggttgactcacagatccacaaagcccagagatggactggacactgggtagccattcaacaaatgctgattattaaatggtatgtctttaagctgtggatttaaaataaaattttgttgtttcattagaaaggtcaagaaggtttaacactgatctcttgatttcaacagcaccaacagccacagtgaagcctcagaattaacacactaggttagtgctcacctacagataacaacataaccctctactgaagccaagaatttcctaatgattacaagtctgataatgaccaactcagaatatcccagcagagctgagttctggtgagaacaaacaatgtgaagggagatatgcctaccactttataaaatggacagtggtgaggtgtaaatctattcttttaatggcaacacccaagaggacatcaatacgtatagtatagccaggcacagtggctcgtgcctatatatcccagcactttgggagccgagcggcagatcacttgacgtcaggagtttgagaccagtatagttgtgccaacatgg

SEQ ID NO: 666749 - DNA, 252 bp, Homo sapiens
cgatcacaatatgagccacgaacacactgacataggaataatcatatacggagactccctgtgatacctaagccatctgaaatactgatgggcaccatgtatctatagcagagtcccaagtttcatcagacactgaaaccaaccatgccagtcgtaacggtctaccaggtctccctcttctgtcataggccatgaggtctccccctctaggtggtgagtggtggaaggaagaggaagcttccgagctctgat

SEQ ID NO: 666750 - DNA, 1220 bp, Homo sapiens
gtggttatgattcggagggttctgccgcacggtatgaggccggtgtgccttcttgagcctggaggacaaggcacgcgcagaggaggctttctctggactgggatggaaaggtgtctgagattaagaagaagatcaatgtcgagtccgtgcctggcaaggtccatggtgatcgtactgcaaggagaccagcgcacctagcctcccgagcacctctggctgtggtgatcagtgggaggtggaggtgctctgtgcttgtcttgtgtggcctaattgggcgtgacagaagcctggacgagcagcacgaggtgctatctcgagctgctagtggtggaacgggaccacaacgtatatcacagtggcctcctactgggcctcatcaggtaggtgggaataaagtcaggcagtgtctcgattgcgcatgagaacatccaagaatctccactcattgttcagcccagctattctacggaaacgatcaaagtgagtacctggaccggtagtcgaatgcgtaccgtcgccctggacctccggttcaagcccctcgggctacctcttgctggcttcagaagaagggatgctgcagccatggcagaggcaaggtgaacagtgcagaggcaaggagggagccaaagtttctctgatgtcgtccgtgatcagcttcggaacaagtatccctggataaacacagagggagtcgcgcttagcgcgtcttatgcggaatcgcaggacgaagggtcggataggagccctgggtgtcctagtccacggggctacgcgggaaaggtccagtcctttgtgagatcctttaactgacaggcacaaggctgacaccgtatggctcttcatctcaaacgcatttgaccaccagatgaccaaagcgggggtccttaaaatgggactcatgcaggtccatgtctcatcatgaaccggacgcctgtacgtatacccacccctgtctgaaatcggcccactcgttgtactacacaggagccccggaagagcctgtgtccttggccccacactgagagtacacgtggtagggaagtgagagaaagggtccgctcgttgagaacctagtaggctctacaacactgtctcgtgaacccacgggcgagaagttgaccatactatgaaaatatcggaactatagcctagacaccactagctaaaccaccagagcgtccttgtagacaaattagctatcaacagaataccagtca

SEQ ID NO: 666751 - DNA, 699 bp, Homo sapiens
  misc_feature (247)..(247): n is a, c, g, or t
  misc_feature (292)..(292): n is a, c, g, or t
  misc_feature (304)..(304): n is a, c, g, or t
  misc_feature (311)..(311): n is a, c, g, or t
  misc_feature (442)..(442): n is a, c, g, or t
  misc_feature (451)..(451): n is a, c, g, or t
tctccgccttttggtcgctctgtttttgctttgttttttgttttttgttggatgctgtgctgttgtgtatttcgctcctttgttacttgtgtcttcttctcggttgttgggtatgtattggtgtttcttcttctgtgtgttgctgttgactgttcatttgtttaactcccccccccccccaggcctcacgggggccgcgtttttataatatggtttgagaagatctctcgcgcgctctctctcgctnttggagcgctctcctctttgtatatatagactccccctgtaatgngccctctctcgngacctcnccctctctggggatttgtttctccagaaaccctccggtttccccccgcggcgcgtttttttatttgggtggagagagatcccccgcccctgttgtccttggccccgggttctcccttagggaacccgcgtnttggccccnggtttccctttcccctcttgggcgcccgcgcgcgcccccaccgcgattggtgtttaaaagcttttctccgagggcccgcggccgcgccccacccactttttttttttttttttttttttttttttttaggacggggtgtgataggtggcacggagaattttggattctcagggatgggttcgattctcatagtcccccttctgtcgtcttctaacagccgtatagtagtagtaggcggccagctctag

SEQ ID NO: 666752 - DNA, 328 bp, Homo sapiens
tgggagacagagtccactctgtcacccagggtagagtgcagtggcatgatcttggctcactgcagcctctgcctcctgagtttaagctattctcgtacctcagcctcctgagtagttgggattacaggtgtgcgctaccacgcccagctaatttttgcatttttagtagagatggggtttcactatgttgtccaggctggtctcgaatctcaggtgctcttcccgctttggcctcccgaagtttctgggattataggcgtatgcatctggtaacctgggctaaagttttactttttttttaagtaatggtgtaaatttttcccccatg

SEQ ID NO: 666753 - DNA, 322 bp, Homo sapiens
cccgggcaattaaatgtaaaacggccccccataaggggaaatgggcaaattagccccaaattcggccgcaaggataaacttggtcgagtctaaaaatgactggggccaagcgggccacaaggtttttttttttttttttttttttttttttttttttttttttttttttttttttttttttttttttttttttttttttttaggacggggtgtgataggtggcacggagaattttggattctcagggatgggttcgattctcatagtcccccttctgtcgtcttctaacagccgtatagtagtagtaggcggccagctctag

SEQ ID NO: 666754 - DNA, 263 bp, Homo sapiens
  misc_feature (13)..(13): n is a, c, g, or t
agagtagtgattngtgatttaagaaacaaatacagccaatgcccccaaatatatatctgtatatagtatctatgtgtgtatagacacacacacacacacacacacacaacacacacaacacgcacaccccctacgcacatacacgcctttactcattcctcagcctggcctcacacctctctacacactctcccatacatatgtccaacactatgggagggggacaggggcctaccagggctaagacactacaacacagtgtg

SEQ ID NO: 666755 - DNA, 555 bp, Homo sapiens
  misc_feature (5)..(5): n is a, c, g, or t
  misc_feature (348)..(348): n is a, c, g, or t
tcggntctacctgtcatctggtatatctcaagataaacaagagatatacaagataaacaagagatatacaatccttttttttccccctatagacggtagtctatggggaaactggggcaataaaataggtaattacaatgaaggctatagcttggatatcaggagttagtctagctccctctctagctctatccgtctcctttcccaagcccctcggcccttacgttgtggtttaaacagctctgatcatatcaagttatttggaataacttttaaaaaagtggggaagatatacagtccagtgaccatatgcctcagtagggaaaaagggtgtttatgtataccggnctcagaatgaagcgttccggtacctccaaatttataataattttccaaatattttctcagcttttttcaacacttcttttacagcatcctagatcaaaaggatggagtttagagatttttattaaatattctttaagttattcctagggtatgctaggtactatggtatctcgcaaggatataatgataagtaaacagacaaggtag

SEQ ID NO: 666756 - DNA, 608 bp, Homo sapiens
tgaagtgttcaaagctctgtaaaatatttggcgccaccacgagacccctgtctggaatgtccccctctcgtgagaaaaattgagaactcgtgttaggtgtccacaaagaagggagaccagggctctcttttgggagacacactataggagaaaaaacacctctggtatagagagaggaggtttaaaaaaatttaaaacacacccactatgtataggccctctaaaagcactgcccacccacactttatatagaaaagccgtttcaatagctctaaaacacacccacgctaccttgaaaaatcccccaacattattaactggacatcctccacaacacccaattgggacccaattttatccacccttattgaaagaaacttaatagtttagtataaagtgaaccatggaaacattttcctccgcataagcctgcgtccagatttaaaccactgaactgaccaatttaccagccccaatatcttaccaatccaacccgaccagtccattattaccctcactgtccaacacccacaccaggcatgctctataaggaaaggtttaaaaaagttaaagggactcggcaaattttaccccggcctgtttaccca

SEQ ID NO: 666757 - DNA, 375 bp, Homo sapiens
  misc_feature (207)..(207): n is a, c, g, or t
actcggggagctcggattttaaggcagtagcttgccaatgctcccagctgaataaagcccttccttctacagctccgtgtctgagaggttttgtctgtggcttgtcctgctacagtccttggttccctgaccaggaagcgaggtgactgacaagccctgtggagccccgtggagcgtccctgcagaggactccggccagcctgagtnacgcaatccaaagagcgctcccgggtaggaaatggccccggtggaacgccttgccagagcagcgcatagcaggctcccgagaagggattaacactggcttgaacaaccgggaaggaactggcacttgaagtccagacatcttaagctttttcaagattagtcttttgg

SEQ ID NO: 666758 - DNA, 107 bp, Homo sapiens
ctttcctgctctgctcctacttttcaggtttccttctcttgtgtgtcttctacaagtatgtttctagtcttcttatttccctatcttctctcccacagtgcaaagca

SEQ ID NO: 666759 - DNA, 214 bp, Homo sapiens
  misc_feature (15)..(15): n is a, c, g, or t
  misc_feature (22)..(22): n is a, c, g, or t
  misc_feature (24)..(24): n is a, c, g, or t
  misc_feature (31)..(32): n is a, c, g, or t
  misc_feature (45)..(45): n is a, c, g, or t
  misc_feature (55)..(55): n is a, c, g, or t
  misc_feature (74)..(74): n is a, c, g, or t
  misc_feature (98)..(98): n is a, c, g, or t
  misc_feature (104)..(104): n is a, c, g, or t
  misc_feature (116)..(116): n is a, c, g, or t
  misc_feature (139)..(139): n is a, c, g, or t
  misc_feature (156)..(156): n is a, c, g, or t
  misc_feature (159)..(159): n is a, c, g, or t
  misc_feature (161)..(161): n is a, c, g, or t
  misc_feature (188)..(188): n is a, c, g, or t
  misc_feature (190)..(190): n is a, c, g, or t
  misc_feature (192)..(192): n is a, c, g, or t
  misc_feature (198)..(198): n is a, c, g, or t
  misc_feature (202)..(202): n is a, c, g, or t
tataactgaactccncacaccngnttggacnnatctatcaccggntagaagaacnaatgttagtataagtaacntgaaaacattctcctccgcataancctcgncagattaaaacnctgaactgacaattaacagcccnatatctacaatcaaccnacnantcattattaccctcactgtcaacccancngnggcatnctcntaaggaaaggtt

SEQ ID NO: 666760 - DNA, 315 bp, Homo sapiens
  misc_feature (102)..(102): n is a, c, g, or t
agcgtccgaggaggcggcggcggtggcggcagcggcggcggcggggctgtgggtctggtgcgggagcgagaggcgaggaggtggcgggccgtgtttctgagnctggcggcggcctgtcggagcggagagcagcgcccgcgcctcgccgtgcggaggagccccgcacacaatagcggcgcgcgcagcccgcgcccttccccccggcgcgccccgccccgcgcgccgagcgccccgctccggctgacctgccaccagggagtgggggggcattggtcgccgccgccggcgcgcgggcggagcatgggggtctgggct

SEQ ID NO: 666761 - DNA, 386 bp, Homo sapiens
tgatatggagtcttgctctcacccaggctggaatgcagtggcgcgatctcggctcactgcaagctccgcctcccaggtttacaccattctcctgcctcagcctccgaagtagctgggactacaggcacccgctaccatgcccagctaatttttttgtatttttaatagagatggggtttcaccatgttagccaggatggtctcgatctcctgacctcgtgatctgcctgcctcggcctcccaaagtgctgggattacaggcgtgacagccacgcccggcccaatcagcccttcttaaacacctagaaataaatgtgcttctctcccaactccaaaaagttcctataaggaaatgacctcatccacccgttacagaatctctatttc

SEQ ID NO: 666762 - DNA, 169 bp, Homo sapiens
agccactccaccttactaccagacaaccttaggcaaaccatttaccaataagatagcgtagaaattgaaaccttgcgcaatagatatagtacccccagggaaagatgagaaattatataccacagcataatatagcaagggactaacccctatatctctctgcataatg

SEQ ID NO: 666763 - DNA, 809 bp, Homo sapiens
ccccatctgtagaagccggagagcctgatgccaggccagtctccatactggaggaagctgccccatctgtagaagccggagagcctggtgccaggccaatctccatactggaggaagctgccccatctgtagaagccggagagcctggtgccaggccagtctccatactggaggaagctgccccatctgtagaagctggggagctgggtgccaggtccagtctccatactggaggaagctgccccatctgtagaagccggggagccaggtgccaggccatcctctgtgccttacaccagcccttcgctgtaggaaccttttctacagagacagcgataaagctctcgagtcacataaccgctctcctacagtgtgcgcttcagtggctttcaggatattcacaaggttgtacagacatcaccaccatctagttctagaacgtttttatcaccccaaaaaaaaccctgtgcccatgaagaagtcactccctattcccctctcccagccctcggcagccgctccttcctgcctgtggatttgtgcattctggacacttcgagtacgtggttcctacatcccgctcgtttgtgactggctctgtcactcagcgtcacatctttagggtccatctgtgccgtggcgggagtcggcgcttccttcgtctttgcggctgagcgctgttctgccccgtggacggagcacatttgtgcacgcacccctcctccgttggacgcctggcttgcctcccctgtctggctgttgtgagtccagctgccgtgagcttttgtgtaccgcttctgtgtgggcac

SEQ ID NO: 666764 - DNA, 305 bp, Homo sapiens
cgaaggggtttttaaaaacccccgtccgggggggattttccaaaccccccccccccgccggggcccggagggggggggtaaatgggccgggaaatttaaacccggtttttgtgggggcccccccccaattagttaaaaagggggggggggggtttttcctcccccgggggctctgagcccggttaaacgaaaaaattggggttttgttaactgaaacccccccggggattgccaaaaaaaaaaaaggggccgcgggtttggtgcccttttgaagggttttagggaaaacccatttttttttttta

SEQ ID NO: 666765 - DNA, 1067 bp, Homo sapiens
gaggcgctcttcaaagagatcttctccagtgatccagaagaccaatgctgacatcaactgccaccaaatgtcaagactgcacatgcagcaatgtgaccccttcatccgagccatgcagcactaccacccagggtgtgaagccgatggggtccctcagtgcactggagcggaagcagacgaaccaagaagagcgagcagcaacaataagacaggacatgcacaaacacagacagcgcgagacatccgtgaatccaggaaagcaaaggcagagcactgataaaccatgcaacgacaccgggacggcacagccccgagcccagggacagagaagcgcgtaccgaagggaaagaccccatgaggagggacagcacgtcggacagccaaggagccaaaaaggggacgacacaggagctccatgaaggtagcaacagacgagcaaagaaatgataaagcacgagagaaaaagcacaaggagcagcacgcagaacaggagaggagagaaacggaaggagagacaaagaacaggacaacaaagaggagactagaagggagcgaaccaggccggaaagaaacgaacaggagaacggcaagaaggctaaagcgtagaagagagcggaggcgaaaggagggaaaagaaagagaagcgaagcgaaacgacacggagaagagacaagagagagaaaaaagacaagaccaagggaaggagcgacagcagacgcaaggacgcaagagagaggaagagaccgaggaggcgcagacagtaggagcaagcgacagcggggaaagacggagaagagagaagaaggagggagaaagcagcgggagagcgagagcggaagagggaggaggggaagggagggcgcgggcggggggagcgcccagagagcggggggggcaggcggggaggacgaggggagcaagagcagagagaggagagagggagagaggcagagagcgcgcgagaggcagggagagggagcgggcggaggcgcagcaagagaaaggaggagggcccgaggagagcgaagagcacgagggggcgagagggaagaggaggaaggacagag

SEQ ID NO: 666766 - DNA, 487 bp, Homo sapiens
  misc_feature (340)..(340): n is a, c, g, or t
  misc_feature (487)..(487): n is a, c, g, or t
gtagttccggctgctcgggaggctaaggtgggaggatcgcttgggcttggaaagtggaggctgtagtaagccatgatcatgcctctgcactccagcctggacaacaaagcaagacctcatctccccccgcccccgaaaaaaaaaaaaaaaaaaaaaaaaaaaaatttgtgtggggggcctggggccccggaaaaggtttttaaaaccttgcggtggggggggggggccccggggtggggaaggggtgctcctagaagcgtgttccctcgaggaaaacccggggtcccgagaacaaagtggtcggggttttcctccacaatataaaaaaaaggcgccgggnggaacacccggagcagcgtgttctgaaaaaaattcccaggatagaaggagtgccggagggtacatcaaggcgggttcctatataaacagggaggggctcccaagggaggagtccgcgaattacaatatcagcccgcggcctggggan

SEQ ID NO: 666767 - DNA, 748 bp, Homo sapiens
catgagaagggattcatcaagtccatgtccttaaggttgccatgcacgcacagtaagtccagtccgaatcgaagaaatacggtaatgtccatatcttcaggggcgccactagtacaaattcacatttggaaatcaacacaaatgcactgtttcactattacatacgtcggataaatgctgtacctctagaaaagttgatcagcgcggtctcattctcccctagattttgtccttgaatccatcaaagcatcaaggttccacaggccctacattctagaggtaggatctctgtagagtatcttcaatagtagcctaatatactcatttaaccctttcctcctaagtcaaacgccccttctattgcacacaacgagtgcaacaaaggtctgctcgattagtttgaaattgaggagtatagtagtatcaacgcatcattagaccttctatgctttttgctgaaatccactcactaaggtgatgacctatattataatctagtatgtataaaacgatttggtgccaggcgcgatggctcacgcctgtaatcccagcacttgggaggccgagctgggtggatcacgaggtcaggagttcaagaccagcccagccagtgtggtgaaaccccgctctactaaagatagaaaaattagccggcatggtggcgcgtgcctgtaatcccaagctcctcaggaggctgaggcaggagaatcgtgtgaaccaagaagccgcaggttgcagtgagccttga

SEQ ID NO: 666768 - DNA, 896 bp, Homo sapiens
ggccactgcatagccccgtccatggaagacacgccgttggtgatatcgaagcagaagacggagcgtggtgtgcggggtccccacccaggtgttgtgtacggccttcagcagtcacatcctggatggtggtgacccagtttgcggaagattgggctaccctggtctccctggatgcccagcacgctgtggcctacgtgacagtcgagacaaagcctgtgtctctagccaccaaacatgtccgttctggttgcagcgactcgagcctcctctatccactggtctttagtcgaaagcacacctgtggtagcgttatagtgtcttcactgatagcgtggacaagcagaagcatggtcctcctctgccagtcggccagtgagacgggacaagtacgcactggatggcggcttgaatgcgcgcttgacggtgaagtgctgatcctggagtgttgccaggcgtgttggtcgtatcttggcacgcgctcgacctggccctgcagctagcatgacgccattgattctccgtagacccaccgcatagcacccagctcacggtagctcgctgtctccctctccgctccccggttggacggtgcgtgacctttgtgcactagtccccttgtgagccacgtacgatgatcacgtcgtgtcttcaggcacgatctcttagctctggttatctagcgattcatctgtgcatgatcgggccgggtgggcccggtcccggtcggcagtcgcgcactggttctcaccaggacctgaagtcgtcagcattgtggttctgaggacatttggtggacattgagtcatccaggcgtggttcatgggccccccgtgttgcaggactcacttgtaggaacgaaactttcttctcattcaaagagctgactgtggtattcc

SEQ ID NO: 666769 - DNA, 334 bp, Homo sapiens
ttttttgtgagacagagttttgctcttgttgcccaggctggagtgcaatggcacgatcttggctcatcgcaacttccccctcccaggttcaagcaattctcctgtctcagcctccgaagtaggtgggatgacagccatgcaccaccacgactggctaatttcgtatttttagtagagatggggtttctccatgttcgtcagactcgtctcgaactcccaacctcaggtgatctgcctgcctcggcctcccaaagtgctgggattacaggcatgagcaccacacccggcagaaaatccatcttttaggtctgtccagactcacattatgtcgacg

SEQ ID NO: 666770 - DNA, 539 bp, Homo sapiens
gggaccagtgttgctgacagggtgacactgaacacaacagttttcctttaattgttaaatgcggtgcatcgcacagctgtgtgtgagtcaattaaccaaggcaggcagggggactctgttgttttacaagcgaagggaaaaccaaagtaggcagagaactttcatagagaggagagggcctgaactctgagataaaaagctgcagcagaggcctgctggagaacagtggtcggatctgctggctcaccttggtgaacacagtgaccacttcataagcctcaggtggtgtgactcgctccccgggcatgcttctcaccacgtagatttgatcctccacaaagacatggcccttctgttgcaggtttgggtggccaagtcagtgcacacgtaccattcagtggtggcggtgacggtccctgcaggttcacaaacagactatgtaaatgacagcaagggagggaagggagtccatcagtgacgagcagctgcaggttgtacctgagcaatgtgtaccatccttcctgagcaggtgcctgggc

SEQ ID NO: 666771 - DNA, 198 bp, Homo sapiens
caaaccacaacaaaaaaaaaaatgagaaaagaggaggaaaataaatggtcatcagttgataagaaaatccctctctctctccttccttatctccttccagcattttccagggcccctcccaaattccaaataagctccctgcgctggcttccttgtttcagagtctgcttccatgggaaccccagctgggtaccgagc

SEQ ID NO: 666772 - DNA, 624 bp, Homo sapiens
agcggagtgcgcaaagcccggtctgctccgatgccctggtccctggaggctgccatgtaacatgtgccagtcgctgggcgaccagccactgggcccaaaggctgccatcccttggaagcgctgcacggaggagggctgggaacagagtacccaatgacgagtcgactgctggtgcattgcggcccgacctctgacgtcaacgaggctggacaccttctctgtccaactatctacatcgtatctttggaccaagtgtggcccttccccctgagcgcccagccgtgttcagccatgaggctgttgccagtgcatggacagtggaggcgtcctcagcctggagctccagctcaatgcggatactctttatggagagtggggaggttgctctgccagggagcttgaaggggaaggtgtcaggggtgttggggtgtttacctcctccaggaagcctgtccaggttgctcccacgccatcctgacaattagggaccatggcttagcccaattctggatcaacaaacatgtcctgagtattcactctgctacagatgggcgggtcaaccaggtcaactcagtgtctggggtttcccagtttggtaaggctcacttcctgctcattactggc

SEQ ID NO: 666773 - DNA, 118 bp, Homo sapiens
gtctctgggagaatgggcagttcccaatcttgggcccatcactggcagacctcaagaacaattcgacctgcggttgttcttcagccatggttgcgactggagggaccggtacgagctc

SEQ ID NO: 666774 - DNA, 232 bp, Homo sapiens
acaatgtgcacatacatgtgggccttatcattcaggtgtggatggtataggaagattcacagaattgccaaaaacaattaagggtgcgacagaggaggccacaaggggctggttcaatggacatggggaaggaagtagggttaaccaaagagggtggcagatggaaataagtcttggcgactcatgggccacagccagcattagacaggcatggatccttgttcaccagcca

SEQ ID NO: 666775 - DNA, 812 bp, Homo sapiens
cgtggactactggcgctgtgcacgctccagtgcactgagttattgcgcctaacgggacatcgacgggctacatggttgaacctgtgatcaagtaccggggcttcgtgtgcgtcgtcaccaaacgtgtgcttcccattgaggcaaggaccgaaagtaatactacactcatgctcggttccgatgctgcagcgcccgatgtaccgctttgagatgtgggtataagctggatcctggtgctttcctccgtgtgactctacgtatcgagttaagcatcggaggtccagggaagctatagcggaatgatgattctacaagatgcttctggcgcaggagactgataaccgcttccaaacactttgccgcagttactagtattccaagcaaaacgcattccttgtcggtgcacaactgggaggtaaccgcaacgggcccacccgcctggtgcgtagatgtggaatatgaaggagttccgaagccccatggggggcaaaggtgcaaatccgtggagcgaaaattgcctaatcaataggttggtgcacacttctactagctcaaattgcttactcgtccgatccgaacgaacgatagcgtgcgtgggattgaggctgaaatgggccgctaacgtggaaggctcatggtggaaagagattgaccgccctgttgttggagtacgaggaaagcggatacgtgggcgccgcaacataagtgtttccttaaggcgtcccatgaaacgttggttcatttgggacctccagagaccgatttgcccacccattgccccattagacccctttgggactggctgttccctg

SEQ ID NO: 666776 - DNA, 810 bp, Homo sapiens
attttttcagtctatccatttgacaaagggctaatatccagaatctataaagaacttaaacagatttacaagaaaaaaacaacaaccccatcaaaaagtgggcaaaggatgtaaacagacacttctcaaaagaagacatttatgcggccaacaaacatgaaaaaagactcatcatcactggtcattagagaaatgcaaatcaaaaccgcaatgagataccatctcacgccagttagaatggcgatcattaaaaagtcaggaaacaacagatgctggagaggatgtggagaaataggaacactttcacactgttggtgggaatgtaaattagttcaaccattgtggaagacagtgtggtgattcctcaaggatctagaaccagaaataccatttgacccagcaatcccattactgagtatatacccaaaagattataaatcattctactataaagacatatgtacatggatgtttactgaagcactgttcacaatagcagagacttggaaccaacccaaatgcccatcaatgatagactggataaagaaaatgtggcacatatacaccatggaatactatgcagccataaaagaggatgagtccatgtcctttttcacggacatggatgaagctggaaaccatcattctcagcaaactaacccaggaatagaaaaccaaacaccgcatgttctcactcataagtgggagctgaacaatgagaatacatggacacaaggaggggaacatcacacgctggggcctgttgcgggtaagaggccagtggagagatagcattacgataaatacctt

SEQ ID NO: 666777 - DNA, 305 bp, Homo sapiens
gtgatgtcttcgaggagcctatgtcaggcatgagggaagctgggattcctgagagccctgatgactcatatagcagctatggttcccactgcactgacagcctcatgaggtcctcccctgttttcaaccagcgctgctagacgaggatgaggaaaatatacaaggcaaagagggagatgttttgtccagacctactaggccgaacagaaaaggtttacgtattagaatctgtttccttaaaaagtgatttgactcctgttcttaaacacacgtggtttgtcctaattccagaggaactggacgtt

SEQ ID NO: 666778 - DNA, 834 bp, Homo sapiens
gagagaactagtctcgagtttcatattatatatcttcgacgtaagaacaagaagctttactcgtgctcggaaacagcaaaacaggaggcacaggggataatgacggcccctgtttcccattttcccctccatgtggaaggcaccaggcggggaggtgggctctcgctgggattgggcaggtcagcggaaacaaaaggcttcctgtagttatatggcgcccaggcacagtggggcagtgagcacagacccaaaaagatatgtcctgagccacagagttcatgagcggagaagaacattctctggtggctcccacgtcaaagagggcctccgaattgaggccccttggacgtgggagacaaagctctgtggtctcagaagaacattgacctttcccgggtccttgagctcccacttgtggtgcccggccggtgccacccagcccttggcggataaaagagggctggtgtcccccacaaacgcctgccagtgttagagccctttgacaattggccagtggctttggtgcccaggacctttgggcctgagaggcctgctcctttgaagacccaagccagcactagacacccgcctttcagcaaacgggtaagtgagagcccggatggcaagttccctcccagagtgccgcaatgtgctggggttggaacgccttgtttcccccgttgggcattccaaccccttttggtggccctgagcgtcgggagagcgagggcgcacttagagggaccctttggcctatccagcagcttggtggttgcttcggtgactccccaaaaaaaccccattacacgcgagcacccacgaaggattggaaag

SEQ ID NO: 666779 - DNA, 359 bp, Homo sapiens
aattccggctctcctggggaggcccacggccaggagggctccgcagccgcccagctggacgtgttgcgcctgcgcagctctttcatggagaggcgaaagaagggctccgcgagcctgaaggatgagctgctcagagcgctgaaggagctgatgctaaaggaccaggaatgtgagcggctgtccaaggtgcgggagcagctataacaggagctggaagagctgacggccagcccgtttgaggaagctcacaagatggttgagaatctaacatgaagcaagcggcatctgaaaagcagctgaaggaggctcggggcaagatcgacatgctgctggcagaggtgacagccttgaagacgctg

SEQ ID NO: 666780 - DNA, 137 bp, Homo sapiens
tagacgccagggttcggttatctagagcatcatagatttatcccgcgtaaaagacagatagaactctcttattgaagactgtgacattatcccagctcgcctgcagggatctattgaagccactattacatccttca

SEQ ID NO: 666781 - DNA, 325 bp, Homo sapiens
aaggatcccctgggttggggcgcgtggggtgtgggcggggaagaacagagtctcgctctgtcacccagtctagagtgcactggtgtgatctcggctcactgcagcctccacctcccaggttcaagctattctcctgcctcggcctcccgagtggctgggattataggagcgcactaccacacttggctggtttttgtatttttagtggagatggggtttcgccgtgttggccgggctggtcttgagctcctgacctcgagtgatctgcccgcctcggcctcccaaagtgctgggattacaggcgtgagctgtgccgcgcccacaa

SEQ ID NO: 666782 - DNA, 509 bp, Homo sapiens
  misc_feature (12)..(12): n is a, c, g, or t
  misc_feature (34)..(34): n is a, c, g, or t
  misc_feature (67)..(67): n is a, c, g, or t
  misc_feature (168)..(168): n is a, c, g, or t
  misc_feature (182)..(182): n is a, c, g, or t
  misc_feature (217)..(217): n is a, c, g, or t
  misc_feature (292)..(292): n is a, c, g, or t
  misc_feature (354)..(354): n is a, c, g, or t
  misc_feature (361)..(362): n is a, c, g, or t
  misc_feature (420)..(420): n is a, c, g, or t
  misc_feature (456)..(456): n is a, c, g, or t
  misc_feature (501)..(501): n is a, c, g, or t
aatcaaataacnggtgccctgaattcatctggancccctcttaagccccagtgaggtacatgatgtncttggtccaggaatagccaaggcaaagatccatccttcatgactcagtgggtttgtgcacaggcacacacctccacctgttatatacctgtttgtgtaagntcatacttggtctnagccacttgttgtctgtaaaaggtaattgtccttnctaatgctgtacaggggctcttggggttcggctcagctcaacatggcttgacatggtggcacactgcgcccagtnagagagagagagagccaaagctgtccgttttgcagatggacaggaaggagccaggacacagntcagctnncacgcccagagagagaaaaagttaagctctgaccctgaaggcaagggagagcaggctnacagctgtgtgtggaaccacggctcaagcaccaagnagggcggacagtgtgagagagctagtgtaaggctgttgatgagantgttgctg

SEQ ID NO: 666783 - DNA, 194 bp, Homo sapiens
tcgaagaccaccggcagggtgctgtggacagatggttataaataccagctaagggagattttttatattgtattctttttattatattttaccaagcatcataaaggtcaggtaagctagggagatttcatcaggccaaataaaatttttgtcggtctaccacaatttgaagaaaacttcattagcaatataat

SEQ ID NO: 666784 - DNA, 992 bp, Homo sapiens
ggtctgtcacagtctgctcctttttttgtccgccacacgtaactgagatgctcctttaaataaagcgttggtgtttcaaaaaaaaaaaaacaaaaaaaaaaaaaagaaaaaaaaacaacaaaaacaaaacaaaaacacaaaaaaacaaacaacaacaaaaaacaaacaaccatcccacaaaaaagaaaacacgaagaaaaaacaaaaaacatggtccgcacaacaaaacacatctgagtgggtgtggcgccacgacaacccacgaggagggcgcgacaaaacacaatcatgaggtagggagaacgcaggcaagacagtagaggatcgaccaccgacagatccggcgcatcagcagaaagcatgacaagtcacaacacaacaaatgagaatgcaggacggccgataaagaacaaccgcagcgcgaggagaaacacacacggagggaacataccaacaagaaagttggggagcgaaacaaacaatgcggtctagacaaaaaacaccgcgcacacaaaacacaaccggcccctagaaaagaacaacccgcccggcggagaagaaccacaagacacaacgacaaacgaacacaacaagcagtgcaacaacacgaccggagggaaacaaggagcgacgagagaagagagaagagacacaaaagagaaggcgcgcagagaccggcacagcaaggagaagagaaaagaaacaaaggaggaggggaggcagggagcaagaagcagggcaggcacacaacgacagaggagaggcgcggaggcgaaggcagacgagagcagcgaaaggagaggaaggagaggggaagagagggggaggagcgaggaaaagcaaagaggagagagaaccggtaaagcgcaagcgcaaggaacgacggacgaaagaagaacgcaagcagcaacgagaagaagcagaagagaagacgagacgaagggagcgaggcacagcacagaggagcgcaggcagagggacaaccgcgagca

SEQ ID NO: 666785 - DNA, 339 bp, Homo sapiens
gtgggcagtagagctggcttcaccgccctgcacatgatgctgacgaggccctagggcagtgggctggtctagccgggtttcctccgacaaagaggtcgtgctgtgatgctgccttagacgctggcggacgagatttccagcaagagccccgtggcggtgcagagcaccaaggtcaatcctgctgtattcccgcgaccattcggtggccgagagcctcaactacgtggcgtcctggaacatgagcatgctgcagacccgatacctcgtgaagtcggtccaggccacgactgataacaaggaactgaaaaccgtcaccttctccaagctcttattgcccag

SEQ ID NO: 666786 - DNA, 736 bp, Homo sapiens
agcgtaagggacactttgcacgacttgatagaattgcgtcatcatcatttgtaacagcaacacaaccggttcacgctctggcacactttactgggtttgggcgttggtaaggtctcagtcaaaccctcacgccaggctacacaaccgttcttgccaatgggcagattaaacatgctggccgcaaccgggtgcataacccgtagcaccgaaattcatctgtgcttgagtgtagtcggcaagacgtcctgtcggtggttgcagcacatacgcttcggctagttcccaaagctctttttcgatcattgattgacctgaccaaccaacgaattccatgcaagcgtgacagtacacgcttgatgttgccatccagaatcggagcacggtcgttccatgcttgagacagaatcgcagccgtagtactgcggccaataccgggtagtgcttgcaaagcattctggtcacgtggaaggttcgcaccatgcaggctcaacacagcgcttgggggcggcattgtagatagactggtgtagtccgtgaaactatccagggcatggaccaaattcgcgatcagatccaggaaacctcaaaaagtacaagggtctgggtgagcctcccaagaatggtcatcgtagaattatttaggtttcttgacgacccaatttggggctaagagagtaaaagggctttggaaaaaaagggttcacactccgcaaccactttttagaccttggacgtg

SEQ ID NO: 666787 - DNA, 731 bp, Homo sapiens
taaaaaagatgggggtcttactatgtgggctaagcgggtctcaaactccttgcctcaggtaacccttctgcctcagcctcccaaagtggctgaaattacaggcatgacccaccatgcccgactcccctttgggtgtaaaagtgagaataattagtgtttgtgctcacagaaatgtgttttaaggatgataagggcactaagtgtgagaataagttgtagggtgaagttaagatagtgatgccgggctcatagttaaggtgcgtgaattcagtgcatagctacactcaattatcataccttccataacctctttctctcacagattttaaagccttcgtggtcttctcatagggggtataagagtcattaaaccaaaattacacttctcctcgtgctagggttcccctccgcttctccctcttctggcacagctctgatggtgggaaacaagggcacacattaagagcccagtcccaagtagtcaagagcctgagaggaagggatatggagagtaatccttcatatctccaggagtgcctgtgaaaaagctgaggaaggggactggggaaagcacacaaaatagggaaaaccttccctgggggtggggaaacgagacgacagtgcacagcgtgctacataccataaagaattcggtgtcacattgttaagccccaaagattgatgtctcgcttggcctgtgcaacgggctggacctggacaaacgcatgggc

SEQ ID NO: 666788 - DNA, 268 bp, Homo sapiens
gggacagctattatctatctatttgaggaaactgaggactcggcatctctagcacgggctcaacttcgaaactggcacaacagagctgaaacagctaaaaagaacccccccctttaaatggttttctttttgaggcaagttggctgaacagagaagggaagagcgcaagaacgagaggacagcgacgggcaggcagtgtttgtgtagaagcgcagcgccagcagaatcagagttaggcaaaggacgaccttcaggccagtggatgggt

SEQ ID NO: 666789 - DNA, 111 bp, Homo sapiens
cccgtcgcccgcctgcgcccccgcggtctgggtctgcagcatgctcatgtaccaggacgccacgtagttgaggctctcgagcacgaatggtcgcgggaatacagcaggttg

SEQ ID NO: 666790 - DNA, 446 bp, Homo sapiens
  misc_feature (108)..(108): n is a, c, g, or t
  misc_feature (239)..(239): n is a, c, g, or t
  misc_feature (305)..(305): n is a, c, g, or t
  misc_feature (341)..(341): n is a, c, g, or t
  misc_feature (395)..(395): n is a, c, g, or t
cccgcacactcgctttttatttcggtgagttaagaccatgttatcaattccatctcagaggtgctccaaccctaagaggttggtgggttttccaaaaactttaaatancttaaaacgtttccatacaaaaagggctccacaacatttatccgcgcagactgagggcgcctcagtaggctgtacttgggtggagtagtccttgggggacaccaccaagcctctgccttgtgggggccccncagtacaccttctcaataatatccaccatctcctgcttgtcctccatgggccagttaatcttggtngtgttggcagtccccaagtcaatcataatgtgcttngtcctgaggaaaaacatgacagtacatggatcgtataactcatacattgtgttnaagtcaggcacttctgtaatatgcacaagataaataactgcaaaattttta

SEQ ID NO: 666791 - DNA, 268 bp, Homo sapiens
gagtatccaacagagatggaatacaagaggatcccgaagtgcactcagccagcagggtagcgagcacaaccttgacttaaaaataatagcgtctctcaccccaccagaacatttcactcgtcctgatcgctacaacctaactcggggcctgcatacacaaggtgaagctacttgattaggtgcagcggtttagcttgcccactgcactagagatcggaacatgagtaagcattggagctcactcggccagggcttgcccacgggctca

SEQ ID NO: 666792 - DNA, 136 bp, Homo sapiens
taaaagcccagatgcattttctttgagataacttaaatttttggtttcccaaaaggttcctttatttgtttaaaattaggggcttttcccttatattttatacacatcctggttttggggatagatgcttaaatcc

SEQ ID NO: 666793 - DNA, 367 bp, Homo sapiens
cagcgcactagcctcataaagctggtcagtcgtcataaagtgaagtaacaatttatgaccctgctttaaaaaaaaaaaaaaaacatagaaggggcggggcgtggtgggctcgggggtgtaatcccagcactcgggcaggcagaagcgggtggatcacttgagatcaggagttggaaaccagcttggccaacttggcgaaacacggtctccattaaaattacaaaaatagtcgggctggggggcgccccaccccgggcccccggtaatcccagctacacggagggctgaggcaggaggatggcgggaccccaggaggcgcgggttgcagtgagctgagatcacgccagtgtactccatccgggagaca

SEQ ID NO: 666794 - DNA, 909 bp, Homo sapiens
tggcacgagggtggcctgtccactgtatcccaagcagcccggcgcgggcgccgcgccggcgtggcggtgaggctccgggcagcatgggggcttcggtggtgactgtcaatcaagagcgcgggtagggtccacggcgcgggcgagaaggggtcccacgaggaggtagccggtgaagaaacgcggctggcccaggggctaagaagcggacagaatattctgccgagatgggcccaaggcaccggtcacgggctacgtgcagcttccctgtaactgatcggtgcgcagctagatcgcagtcacgcagcactacactcgggtatcttgccctttccgcggcagatcaccaaaggatggctggtgctgccagagatgtgatgcaagcttgcagaccgaacgagaagatgcaggggtaccgtggatgaggtgccgaggagagagaagcatgctaggtacgatgaaggagcgtgcgggctgtaccagcgagtctgaaggcgctataagatgtgcggcggacgaacgatccaggtgaggaacgaatgatcacatggagcacgaagacttcgagtctctgcgcgctcatgaacactctcctgaatgggacacaaggggtggggactgcgatggtttctcgaccttctgatgttgcccgatcttcgacttgaatgagttcttggcacccaaatacaccatagagcgccgttgaggcagcgaggctatcgggccgccttggcggcaaggagtgaaatgtgggccttgcgcagggaagtcagcacagggcggttactggacggggggtgccccccgcagaagcaatgagcagcgctgcgcgacctggtctggagccacggagcgggcgctctttaggaccgcggcagtggcgctgagcgctggggacccaggtccccgcgt

SEQ ID NO: 666795 - DNA, 345 bp, Homo sapiens
  misc_feature (18)..(18): n is a, c, g, or t
cctcagactaccaaaatngatgtcacgtcaaaaagcaaatcaagcaaattcaaaagattttcttatttgagtgcataatgggtcataaagcagcagagacaacctgcaacatcaacaatgcatttggcccaggaactgctaacgaacatacagtgcggtggtgtttcaagaagtttgcaaaggagatgagagccttcaagatgagaagagtagtggctggccatctgaagttgacttcgaccaactaagaccaatcatggaagctgatcctcttacaactacacaagaagttgccgaagaactcaatgtcgaccattctacagttgtttgggatttgaagcacat

SEQ ID NO: 666796 - DNA, 203 bp, Homo sapiens
ccccccccccccccccgggggggggggggcctttttgggggttttttttttttggggggggggcccaaaaattttttttgggccccccccctttggtggatattctccccccggggggggggggggggggggggggggccccgcccccccttttttttttttggccccttcgggtttttttttttttttccccccctttttta

SEQ ID NO: 666797 - DNA, 542 bp, Homo sapiens
tactttcacaggaacggtgattatttaaaaatatgcagaacttatttcatctatgctttagaaattagcggtatacagggtaataagtggaaaagaactcaaaataactaataccaaatatacacctatgtattagaattcaaaaaagcggctttcggtgaggtcaatcagctatattaaaaaaggacacaaattccaaaacaagatgctgtgtatatataaggggacatggtaagtttcctggcggctttaaacccagggatttattccagtgaaatttccttttaataatcatttagacagaagcatgcaaatagtctcaggatctacttaagaacctttcccaaatccactagttacactccccttttcaggaactaagcagggtatccggggtagctgcttcctcctcggcatcagctcggttggctttaatttctggcaagtgtccgggccaaaccggtgcccattcatcatggcggggaacagcaatctgttctcccacatcgtatataacaatctgtccttcagaatcacccaaa

SEQ ID NO: 666798 - DNA, 137 bp, Homo sapiens
  misc_feature (117)..(117): n is a, c, g, or t
aacagcccatctggtgattccagcacgggaggagaaaccatttcagcaccctccacagcacataaccggtcagcacggggggggtgtcggggctacccccagtgctaggacctgcanaaaaatcatactgccactcc

SEQ ID NO: 666799 - DNA, 361 bp, Homo sapiens
tatcgtcaccaactgggacttgacatgtgagaagatctggcaccacaccttctacaagcgacgctgcgtcgtggccccggcaggagcacccattgctgctgtacctgaggcccccctgcacccccaaggcccaacacagacaagatgactcagattatgtctgacaccttcaacactcctcgcgtcatgtacgtggccatcctcgcgccgctgctgctccctctacgcctctgggcgctccactggcattgttcctgtcctctgtagacggggtctcccataccgtgcccctctactagggctacgccctcccccatgccctcctgcgtttggacctggctggccgctacctgactgacta

SEQ ID NO: 666800 - DNA, 218 bp, Homo sapiens
  misc_feature (201)..(201): n is a, c, g, or t
gacttgttcatggacctcattgagtgcagttttaatagtgctaaggaacaaaaaatataatacagggattttgttaacatacggcataggtcaggaaaatgaaactatcattttatacaggtgtcataatttcactttattggtgtcttaatgtatggcttaaaatatatacatatagtgtgggcctcaaattattttttnaatctggggggctcaaa

SEQ ID NO: 666801 - DNA, 1048 bp, Homo sapiens
tggctttaataatgcatattctgttcacgcaaaaggtgcaaaggacaaaaagcaggggttaaactgggctgatgaaaaactcaagcaggagtgacattttcatagttttcatgtgaacaaccttaaaactaggagaaaattagaaaagctcacagcgtggttaccacagaagcacgcccaattttcacagctgtgtctcctcttaggaccttgggctaggggtgagaaaagcttgtgaaaacaggtggccctcataggtggactgggataaggtggcagattttttttttttaaatttttatattttttgtggaactcagtggatagcgtgcattcacaacaagcctccaatctcaaagacggggtggataaaaaagaagggcaccaagattcatgtggcaaattacccaaattttctcctctttctcctcttttgtgggaaattattcccggcgcaatattatataagcataaaatttctcctcttataggggtggagggggtttgtggctggacagggaaaggggaccaggtttgaaccctaacaagtggcatttgtgttaatagaaactcctaaggggggggacaaagaaggcgaggcagctcttagccctgaagcaaaagaaagaggacacttcgcttcgtgacctcacgtgtactcccaaaccttagggaacgccgggtgaacaaaaacagcgataacaaaacccctcaaaaaaaacacaaaacaaacaaaaaacaacacaacaacaggggcgccccaaaaattaccccgcaggggacgcccaacaaagacaagacacacgaatcttgtgacaaagaggtccccaaaaaagaggcgacaaataacaaaagcaagagagcgcgcgattccacacacgccacacgcgagaaaaccacacgcacgggagaccacgtgagacagagcccccatgcgcgggggaacaccgacgggcaccccaccaaagaaaagagccccagcaaacacaacaagggaaatggacaaacacacatacgcggacagatcccgcgcataaaatacggacga

SEQ ID NO: 666802 - DNA, 194 bp, Homo sapiens
tgcaaggctgtacgtgcccaagtcgtatgatggaaagcgttcggggtaggcgattgctgcgacgcgtgcagtgccccgcgccctgcgagatcttcacctcgctggagtacggaccggtgcctggagagccacgcatgcgcactgaaaggagaagccaggcacagtggctcatgcttgtaatcccagcactttgg

SEQ ID NO: 666803 - DNA, 2091 bp, Homo sapiens
  misc_feature (2014)..(2014): n is a, c, g, or t
agcgggagggtgagcgggcgggacccggactgccggcggctgggtctatgctgggtggaggtcgtggccatgcatggctgggccaggtgcgcgggggcatgcctggggcccgcggttggtcacctgccgactggctggtgctgctgcatgcagcggcgatggcggcctggcagcacggcatcgtgaggaccatcgatgcgtgcggcctgcgcgctgggccttcgctcagagctcgcgcacggtgggcccgatcacacctaactcgacatcgatcgcagcaatacaacggctggtgacacccacaggcactggggaacgtcattgcacacactaccctagccacgcagacacctggctggtccccgcgttaacactcaactgggctctcacagtctctcattgcactctagccgtattgtggctacctggaactcccacgcgcgcgcgcaccttgcacaacgtgtgccatggagacagaactcgggacagccacattcacgcccagtaagcgcgctcgcgcacgcctacccccggaacgccgcaggaccccgcaacacgcggactggcggaaggccatccccactaggctggcgacacctaggcggcaagagttccaaggattgcacaccaatatcattggcctgatcaaacaaacgagggcgctggcgacgggccaccacagttcgacaaaccgttcttatgggcatcccttcgtccgcacccatggggcggcatctcccttcctatatgggatccggacacacagtagggggccaacacacggtggctccgccgatttcaagaggagcgaacaacaaagggtgggagccacatgcccccacaccattggcgggtcgattcccccatttggccaaggggcgcaaacgagttaccgcaactgaggggttggattccattccccatatgcgaacaggcaacgcgaaacgcgaagctgcgtgggaggaaggacaacccaccccggacaggaagggggcccacaccgcaccggcaacgttcccgccaagagcatgtcacgcccacaccaaagcggcggatgactgacacgcgagacccgcacaggcccacccattaggagggaccacgagagcgaaacgcacacacgagacgcatgcagatcaggcggcagcacatgtactacacgcacagagctaccaaaaccacacagccgggagtaggcacaccgaattagcgggcgaccgccactatggtgcgcgcgcgacgcgcgcacaccgtccctcacaccgtctcagtgcgtaacacacgaaacaagatgaaccgacgcgatgtccaagagagcagcgacaacacaggcagcggatacgcgcagacgatgtcaccgccgcacagctacgcaggccccacgtaggggaggagccaggaccacccgcgacgactacaacgagagcaacacgacacgccaaccagcacagaggagagtgcgcccacaatcgagcagggccgcaaaaccacagcccgaagccgtacacgagcgttcaggggagccagcgagcttcgacgggattaaaacaacacacacacaaggaagcaaccatctatcccccagcaaaacaaagattgggtggccacgccgaaaagaacattcggagcgcgaaggatggggccaccccagaacacggcgagttcaccgcccccacccacgcgctcaccagaatacgtggaagaacagacaccatcgcggcgccgactaccggaggcgacacgtaccatccaccccacgccagaatgtgggctatggcgcattacgaactagggggcgggggcacacatctaccccgcgtgtggacagaatcaacagccagccgaaacaagacaggcgtatgaggaaaaccatgtgtcgacgcagcgcggaacaacgtcaaaccccactcccgcgagacagtgtagcacaccaaacacagcgggagaggagcgacgaactctggataaacacaacgaccaagctctcacgcaggtacgcaccaagacgacccgnacaaatagctcaaacagccatagacccccaaatcatgacaatccgagagaacaaagcagacagcctacacacaacac

SEQ ID NO: 666804 - DNA, 294 bp, Homo sapiens
ggctggggtgcagtggtgcgatctcagctcactgcaacccccgcctcccaggttcaagcgattctcctgcctcagcctcccgggtagctgggattgcaggtgcccgccaccacatctggctaattttttatatttttggtagagacggggtttccccatgttggccaggctggtctcaatctcttgaccttgagatccacccgccttagcttctgaaagtgctgggattagaggcatgagccaccacgcccgccccagtgtctcttattctaagagattcaaatttccttctac

SEQ ID NO: 666805 - DNA, 433 bp, Homo sapiens
  misc_feature (15)..(15): n is a, c, g, or t
  misc_feature (52)..(52): n is a, c, g, or t
  misc_feature (428)..(429): n is a, c, g, or t
tgaggtttagcccanagttccccaatgaagccggcccgcctagaagccctanttttttaatttttccgagactgccttacaggttgttaagccccacctgcgcccccggccctgttggtgattttgatgccttaaaaatggcccccccaaacgtattgaagtgcctgccctggtgtttttaaacacaagaaggcctttgattacccttacaaggaatgtgtagggaagttttgttcaggcatgagttataatgctgttaactatagttcagtgttaatgaatcagttatttatattaaataaggtgtttttaaatagaaacatacctaaaaggttttatattgtatgtatgtagatctggaaggttgtatattaattggttaatgaaaatatgactagatcatcttctactggctgagagtttatttnngaaa

SEQ ID NO: 666806 - DNA, 242 bp, Homo sapiens
  misc_feature (216)..(216): n is a, c, g, or t
actctagcaggatcctgcgttcgacggtaccaacaccttgtggaaggcgtgaggaggtggatcacctgaggtcaggagttcgagaccagcatggccaacatggggaaaccctcatctctactaaaaatacaaaaaaattggctgagcatggtggcaggcgcctgtaatcccagctacttaggaggcccacatgtctggttaaaactccaactgccnattttttctcctattcgtgacacata

SEQ ID NO: 666807 - DNA, 224 bp, Homo sapiens
cttccatcccggttggtgtttgaaactacatttcccagactgtgtggcccaacatttaaaaataagagtcggggagttcctgaccatccgtggccaacatggcaaaaccccgtctctactaaaaatacaaaaattagcctggcgtggtggttcatgcctgtaatcccagcacttggggaggccaaggttgttggatcacaaggtcaagagatccagaccatcct

SEQ ID NO: 666808 - DNA, 491 bp, Homo sapiens
cagtgaaaagctatgacacacaaccttatgactgcatttctttggtctctggtgagtgtacacacgtctcacaatagaaactgcaactattgagtgcctccaaaatcaaataggtatttaagaaccgagcaatgctatgaaagtatggggctactgggaaatcggcataggccaatgttcctttatcttgaaaagtagctgatttgtccagatgtggtggctcatgcccgtaatcccagcacttcgggaggcagaggcgggtgggacacaaggtcaggagtccaagaccagccctaccaacatggtgaaaccctgtctctactaaaactacaaaaattagccgggtgtggtggtgcgcgcctgcaatcccagctactcaggaggctgagataggagaatcgcttgaacccgggagggagaggttgcagtgggccaagaatgcgccattgtacttactccagcttgggcacaagagcaaaactccgtttcac

SEQ ID NO: 666809 - DNA, 343 bp, Homo sapiens
  misc_feature (69)..(69): n is a, c, g, or t
tctagaggatctcaggcggctggttatggcaggggtttatattgataattgttgtgatgaaattgatgngccctaagatagaggagacacctgctaaggtgtaaggagaagatgggtaggtctacggaaggctccagggtgggaagtagttcccttgctaaagggaggggtagacttgttcaaacctggttcctggctccggggctccaactataggcaagatggcgagcagggaggtaggaagaagaggggagggtaaggaaggtccaagaaggctttattgtttggttttaattgcggggggaaaaccgcccaataattcggggggggcaacccaaattta

SEQ ID NO: 666810 - DNA, 250 bp, Homo sapiens
  misc_feature (38)..(38): n is a, c, g, or t
  misc_feature (45)..(45): n is a, c, g, or t
  misc_feature (93)..(93): n is a, c, g, or t
  misc_feature (107)..(107): n is a, c, g, or t
  misc_feature (123)..(123): n is a, c, g, or t
  misc_feature (178)..(178): n is a, c, g, or t
gatgtggcacccagggggtacacagaacacccctgtanatatcanggccctgtccctctaggctactacataccctgtccagtgctgtcccanaaggcgcagtctcnagtttggggttccacntcctcatgtatccataccagtgacctcctgcccaggacccatgcccatcccaaanccatgggagctgtgccctccactgtgtccccaaatgattttttttttaaaataaaggaaaacatctgtcttg

SEQ ID NO: 666811 - DNA, 310 bp, Homo sapiens
ggcatgcagtggtagtcccagctactcaggaggctgaggtgggaggatcactggaacccgggagcagagactgcagtgagctgagatcacactactgcattccagcctgagcaacagagcaagacacacacacacatcaatttattttcgtcgtataatgcttttttattagtaacgcatcagctaagcttccgcggcctgctccatcccctaatgactcccacgggctatcctaacggaacttccagaaccttcgtggtgtgttgacattgaccatgcagaccaattcttggacaacctggacattgat

SEQ ID NO: 666812 - DNA, 324 bp, Homo sapiens
  misc_feature (3)..(3): n is a, c, g, or t
  misc_feature (324)..(324): n is a, c, g, or t
tangacagcaagtgtcggatccgcagcgcagccgtgcgatgttgtactctacagccatgtattcggctgctggcaagacttggggatgcaccgcacagagccgcgggccctttgcagctgcatttcgccctacgtttcaacggaggggtaaaaacccgaagagagctacggcttttcacttttcgcccttccccctatctgctgaaccctatttagggagtccacgccgtaatggcgctgccccggggctccttgcagggcccttcagaacccgtgagctgaggggggtccgcacaaaaggcggggtcctcccctggcctgtcn

SEQ ID NO: 666813 - DNA, 137 bp, Homo sapiens
aagaccgatgggaccgacaggcgtggaagaacgccagcccccggacatccgcgcagcaatgaggacccatgcacacagggctctggaggtacccgtgagctgcctgggggctagcaggaggggggaccgactggggc

SEQ ID NO: 666814 - DNA, 126 bp, Homo sapiens
tcccctgcctctgagaatatcacacaatgctgcttccaggggcttagagacctgcaagaatatgtgctatgtgtgtactgtactctactgtatactgcttttagaagaacactggacggagggaca

SEQ ID NO: 666815 - DNA, 196 bp, Homo sapiens
  misc_feature (83)..(83): n is a, c, g, or t
  misc_feature (191)..(191): n is a, c, g, or t
tctactaaaaatacaaaaattagccaggcatggtggtccacgcctgtgatcccagcacttggggaggctgaggcggcagatgnctgaagccagaagtttgagacctcatctctcttacaaggccactaatcctataaatgagggcttgccctcatgacttaatcacatcctaaaggtcccaccccgtcggntggag

SEQ ID NO: 666816 - DNA, 1021 bp, Homo sapiens
  misc_feature (726)..(726): n is a, c, g, or t
gctgggggctgatccaccctagtactgaggaacgcacgaagaagtcctagcaatggtgctaagaaacgcaaccaggccagataccaagacagaggacgtatggaatgggcccagggtctcgagcggaccttatggtgtgacagtgcctctcggaactccgttgaccacccaaactcctgtgttctataacacgaccattaacttactactgcaaggcgtcctagtaggctctgtacagcgcacagaactcagctcgatctatccctgcagcgtggcctctctgtgtgtgacccgagtactcgtccatgtgcgcattaccgaatagcaggaatgctgcgccacgctcagatcgagacttagcacctgaaaggttgcctgccgcacatagcttcactgaccttgtgcgtcagtggcggtttaggagacctctcgctcttagtataggaccctctggtgttaccggggcaagcagcgaatccttgcaggtggcccagatggtatcaggctgcccgttcgtgctagacacgtcgtacgcaagtgccgaaaaaggagtaccatggacgtcgaggggcgatgattggagaccacgtcactacttgtacacactcaaagatttgcatcgtcgccaggcatcttttcgctacgggatttgtcagaacattcccgaaggattctatggtacgtccgttaaatgtttactcaatgttgggattgtcgaggcaaatnaacgacatgggcccatggcaagggatagccaatggatgactcgcctcccaggctgatctcccgaggccgaggcacttagccgatagacacccaggcctttcttagccaatccttactacttgtagatcctacccagaacaccttttaaacagcgtgccacgtggggtatgtgcacccagcaaggccccccaagctatggacctgggacttgagctccactcaaaggttttcagcaccagaacacctgcagtagacaacccatgataaggtaccatggactccaatgagtgcccag

SEQ ID NO: 666817 - DNA, 412 bp, Homo sapiens
ggggatttctgaagctgacagcattcgcgccgagaggtctcgctccgtggccttagctgtgctcatgctactatctctctatggcctggaggctatccaccgtactccaaagattcaggcttactcacgccatccaccacagaatggccagtcaaagaccctgaatggctatgtgtctgggcttcatacatccgacattgcagttgacttactgcacaatggcgagagaattgaaaaactggagcattcctggtctttcagacaaggactggtctatctatctcttgtactacactgaattcacccccactgagatgagtctgcctgccgtgtgaaccatgtgactttgtcacagcccaagatcgttaagagggatcgagacatgtaagcagcatgatgaaggcctggtgcc

SEQ ID NO: 666818 - DNA, 219 bp, Homo sapiens
cttcagcaattgcaactggggctctctgtcttatgttcttcacaccccctccatgaatcaggcgtctggaaacgaggagcctcctgcgcgcgcgcgcgcgcacacacacacacacacacatacacacacacacactcatgtccggtggggccagatgtctgggcgcgcgcagtctcttgattcttaaagagtctccatcctatcctctctaaagcgggg

SEQ ID NO: 666819 - DNA, 142 bp, Homo sapiens
gccaaatgggcgacgagacgccggaggggtcgtgttttcgctcaaggcgtcgcgctatgcgaccaactgccgcgatattggcctggcgccaaggattcgatccagcgcttcgtgaacagcgaaatagccgaactgggcaccc

SEQ ID NO: 666820 - DNA, 200 bp, Homo sapiens
tgccacatagcaggtcaccatctctacaaaagaaattttacaaattagccgggtgtggtggcgcatgcttttaatcccaggtactcaggaggctgaggcaagagaatcacttgaacccaggaggtggaggttgcagtgagccgagactgcaccattgcactccagcgcttgcaacaagagcgaaactccggctcaaaaaa

SEQ ID NO: 666821 - DNA, 820 bp, Homo sapiens
ggaggcggaggcgcagtctcagctcaccgcagcctcaccctcctgggatcaagtgatcctcccacttcagccccctgagtggctgggactgtaggtgtatgccaccactgcctggctgattttttttttttttttggaaggggatgacggtggggagttcagaggccggaccttgaccaactgggaagaacaccccggtcttcttacttaaaattacaaatttacgccggacgcggtggggcgccattgccttgtaacctcccagcttacctcccggaggcggagggggggacgaatttcgctttgaccccgggaggggggagggttgccggtttgagccgagaatagccacccagtggggactctcccaggccctgtggcgggattagacgtggaggcaccctccgcttaaaaacaaaaagcacaaccaaaaaacccacggacacaaacaaacacacagtgtgtgtgtggggcaggcctagggggccccaaaagaagaaacggttttttgatgacaaccaccaccttcggtgtgatgtgcggcgcgcggggagcacccccaccaatgttgtgaactgtagggagcaaccggggcgcaacaggggtggtcaccaaaagagagaaaccaccggggacagtaaggacaaacggtggcgggggggttctctccccacaattataaaaaaaaccgcccgggggggagccacacgagcgcgtttttaggaacaaacacccaaagaggggagtacagggacgcccaaccagggggagcacacaaccagggggggcacacagagggagaccccaagtataaatacgg

SEQ ID NO: 666822 - DNA, 1229 bp, Homo sapiens
  misc_feature (418)..(418): n is a, c, g, or t
  misc_feature (445)..(445): n is a, c, g, or t
agcgggcagtctagtactagagggcggccgaagaggcaagcgtcaataaagatgagagcagtcgagcagctatacacctagtagagcagcgtctagcgataggtccggagcgagagccactggccgagatctaaaggcggcagtaccctagcaggaaaatgaaagaatatagcagaacttccagcatgttccacgtagcttgctaggtaccagatatttgatgtattccatgagggattagtaggctggagatgtttgtgaggtgagttacatactgggtgtattcgccatttagtgaccctagacattatcagcaaaaggaggaataaggaagagacctactctcactaagccagagaataaaattaagcacaaaatgcgatgctggagccaatgcaaactagacaatatgccaaanatgagaataatgacgaaatgaagatanaaagcatttaaaccggaatggtaaactataaacaaagcgtttgctccgaaatgaacaaaacaattaaaaaacctgataaataaaatattggaagataacgatggaatataaaaaaaaattgaacgaatattctaagcagatagggtgaaaacccaaaagatgaatatatgcattgagaacataagggaaaatgaaatcattgagaactatagataaagccaaaatattgaaagcaaaaccggaaagagacaaggactatcctgaacccaattctaaagcgaaactgacgagaaaagacaattttaaccgaaaaacttacatataaattagaatttccacaatgaaaatcataatagatacagctatattctcccaagcatgccatttcaattcaaagaatggcagtcgactctaaatacacagccagcttataaattaaactaaccaaaggaaccagaaaaagatttgaagccgcgagaatttcaaataaaccgattttttataaccaaatcacagaaattgatttgacccttattaagcgggatgatacgcaggctattgccatgtaattaagcgaagacgcggggaaaaatcaaatccataattccagggccaccttgagaaaccctccaaatttaaaaaagccctcttgtagagcgacaaaggaaatgaggggcgaatttcaagccgcaacaaaaatcgtgacccagcgggccaaacaaatttgacagcctaattaacgaggaaaaagcatacccggggcctcccgcgcaaaaaaaacgct

SEQ ID NO: 666823 - DNA, 249 bp, Homo sapiens
caggccccccccccccccccggttggccttgccattgtgggtagacccccccccccacccaaccccctgttgggttggggcagcctttgtaacgggggggggtttcccgggttttccgggggaactggatttgggttgggggccttgtcccgggccgcccctggggggcaggggccccttcctttggggccccccgccttttggatcccccccctttgacgctggaataaacaggctgtttttcctcga

SEQ ID NO: 666824 - DNA, 1222 bp, Homo sapiens
  misc_feature (530)..(530): n is a, c, g, or t
  misc_feature (783)..(783): n is a, c, g, or t
ggaataatctggatgacagaagctaaggaatgatagtcacgacaggaaatccaagcgcctggatgaggaggaggaggagaatgaaggcggggtagtgggatgagggtcctgcgggctggcagatgccggtttggattagagagcagatacgccaacacacatgatttgtcaaggcgaattgagcatcactcgcatgctgctatgtctcactccaagaatagctgcaatgagtatccttagcagagcacctgagtgttgcaagagaggggcacactgactcggtgcatgccgcagtgaattgtagcctagctcgcaacgtgactgcgttcctgtgaattgccagtcagggaccacagcaaccatgggcagcagaggcgatccattgttctaaaggaacttcacagttgcacatatgcatcggctctgtctcatcgctatgcaacttacaatgcctccagatccctggtgccacaccctgtactgatggaacggccagggagatatgctgcggtggcacagctgacctgggnacatgactattcaggttgggatgcctgcattgggaagtattccctgctatttgccataacttcgcgcaaatcagtgttgtgggggtccggccaggaaggaaattaattccgtggcacacgcacgtaggttcgagcatacccattgccaatcaaagcggccttgcactcatgtgcaacctgtcggtggtacccgcttgtgccttagcattccttgagagctcttggtgggcaaatcgacactgggagtgaaagnagaattttacgcgagaagtgaatgtccacaatacctgaacccttctacttccacaatggtagttaccgttgagtaggcgaccttttcacaggtagtgatgccgcagggtgtgctgccaatccaatctgatgcgatgtgcggggggcgtatcctgtgaggaagaatgggcacctacccgtaggaagggtcttgccgctattttatcttgactgaagcaattcctgagagaatcttagtaggaaggttttgattacaaggggcccatcaggcgaacaagctgacccctggctgaggtgctcctcaaagtcctgagcaagaccagggcagaaaatgaggggcgacgactcggtgtgttgactggagaaactggggcagtacatctacgcccgaggacggacagaagggatcggacatgtgccatctatggcaatttacaaca

SEQ ID NO: 666825 - DNA, 148 bp, Homo sapiens
cttcagactcagataatgattgaaggttctccatagaggaatcacacagttgctctatgctttagccagataactgcctgctgcataaagaataccaggaaaacggctggacaccagaacttccttcagtacttgctactctggaaag

SEQ ID NO: 666826 - DNA, 164 bp, Homo sapiens
aaaacatcccttttttaataaaccaaactaaaatgttagaaaacaacttttcaaggatgcttgtcccactatctgactatacatacataaattcaatagaaatacttttgaacactcacataagggtttaagtaaataggtaaaatctatttccagtcatcaca

SEQ ID NO: 666827 - DNA, 1227 bp, Homo sapiens
  misc_feature (1014)..(1014): n is a, c, g, or t
ggcttgcagcgcagctcgaatcagcagcagcccaaggaggtctcccggccggttatttccccggcgtccatccctcttgtccccacgggtccggtgaagtcagcggagcttgattggagggccttgtggcttctgggggcactatgtggggaggacaggcatcgaggtccatgggcgggcgggggccccttgtgtggcccttgggacggtggaggggttgtcggacgcccggataggggtagcaccgggagaggatcatatacggggacgcctttcgtgcaaagaaccgctacacagtcggcacggcgtggtacacgcttttacttgaggaacccgtggcccctggggctgtatttggcgccaaaagaaaccttttcgtataaaaccttctccataaataagtgtccgggggcaccttcggggagggagtttccttcaaaaagggttacacaaactgttggccaggggctaatatagttaacttcgaaacgcaaggccccagattaacagcttttgtggggggggacacattatagtggggagggagccactccacatccgacacagagagaaattgggcattggaattttttcaaaagcccgacaaatgtgtggacttcaaaacacagaagcggattaaaggaggccaaaagacgggtgggaagcacaagagatgtgtccggggcatgtcgtgataggaagatttgggcagagatcacttgttggggccgaaacgtgttaccatagttcctgtttgtacccacattttgtggctctattacgaagttgtttgtagtaaagggatcaattaaacagactgggtgggtgttggcgcacaaatgacgataagcgagaggcatagtaagatataacagaggagagcccattttgttgtggttgggtacaacaaaaggcctccgcttgtgaaaaaatgatttatatattagacgccgccaaaaaagaaggtcgggctagtctaaaaagagcatgagattagcggaacaggtgtgggcnacgaaccacataatgtgttggtgcacacgcttaacttgcgagaggggcggaagcaacaaacttaaacttcgtgtggagaaagaggaggcaaccagcgagcagacaaatataagcggcggtgttataaaaaacgaacaagtgtggggaaacaagaatgttcgcccttgagaaaaggaagatgatatgtccgtggagagagaaagatgttgatag

SEQ ID NO: 666828 - DNA, 164 bp, Homo sapiens
  misc_feature (7)..(7): n is a, c, g, or t
cccttgnctaccatttcagccttttatgctgaatgttaacaagaagatacatcaatgccatatctggaccaaatcaaaatccttgggatgtcaattggggtgcacaacatagggcagggccgtgtctcatgtctagactatgatgaacattacattctcacatt

SEQ ID NO: 666829 - DNA, 143 bp, Homo sapiens
  misc_feature (41)..(41): n is a, c, g, or t
gcgcgtaccccatagaaaaagatacacaaccgcgatggatnaaccatgaagctgacttcgttgctgaaacccttggcggcgttgtggcagagctggagcgccaatataatgtagacttaaagctaaaagctaaccgaaataaa

SEQ ID NO: 666830 - DNA, 149 bp, Homo sapiens
gggtcatgattcatcccggaattgtggccatgctcatgtgcccagggtccacggcttgcacccaaggggattgtcttgactggtccatgacaattcccccagactggtctgccgtgccatgctcactgattggggccatgccgatggtg

SEQ ID NO: 666831 - DNA, 552 bp, Homo sapiens
ggatgcacgtccagcaaggatgtcaggaggaggaatatcacaggagttataggacattggagggaacagagactggcacaggacctcgttcatctgcatggcaagatgtgtagtgtaggcaggtcaaccattgcagctcttttcaaacaagaggcagagctacttctatcaagatcaaggcaagtggtcagttatggtggttaacccccggctatcagtccggatggttgccaagcgcctaccgggctgtaagggaatggaaagcaagagcgagtggagtaggggacgggaaggtcgacaagtaaagagcagctcctatacacgagcagaggcgttgtggcgattcattgggagtaaagcctggtattcgtagcacgtctatccgtgggctaccattatgattctacaatggggctcttgggtgctggcgaagcctgtatccgtatttctgagggatggtacgttgtcaatacgtatcgtccaaacccaatgcaggaaaaacgacgtgactcgtgtcagagacgaggtggaagggctcgttcagtgaaaaca

SEQ ID NO: 666832 - DNA, 167 bp, Homo sapiens
aagtaagtcgtggcctgtgtgctggttctgggagcagcgttctgcaggtgttgaggctgacctttagctcacaggtgagatgtcccatcatgatactttggatgctgcttcccaagtgaataaatgtcatcctctgtgaacacagcaacataaccgagcgtggcaat

SEQ ID NO: 666833 - DNA, 397 bp, Homo sapiens
gccacagtaggagtgagacagtaggtagcgggacaaggcagtggagtacctataacgtggccatactacacacgagcactacgccctactgacctggaggcgcactatatgtgccgctagtgaagcggctggcgggacggcgactggtatacacctacccgacacctcggcctagcggcctactatctccgtctgctcacccccgcagtgtacagtgctgtgaaggcggaactatcgcacagtacttccggaacctgtgctcagatgacaccccaataggtgcggtgggccgcagactccgaagctggggagtaagcaaagtgctaggagctggacacgtcacagtagctcatcccagtctcacccggctctacagccatacgtcggtaagacgtga

SEQ ID NO: 666834 - DNA, 400 bp, Homo sapiens
aaggttatcatacgctcaaacattcactttacaataggcaggtaagggagtaatgggtacaggttattgcatcgacgaatacagttttgtcgacaatgtgttcctgtatttatcaggatcctatactctaaatcctgaagaatcagtgtgcataatgcttctaacctcttcacctttgctccacggttgtcgataccagcatcattatcttaccttagcattaggctgagtatgctccttccgggttgcaaaatgcctaatgatcatgtagccccttattaggcgcctattcctcttctatagggagggaaggaagaatatcaagaaagcctcatgtctaagtgccctgtatccctggcgatctttatgtagcatcagagaatagacactgataaaaaca

SEQ ID NO: 666835 - DNA, 905 bp, Homo sapiens
  misc_feature (320)..(320): n is a, c, g, or t
atagttgcgtgtgtacggtcgcggagggctgtgcgctattatgttcatttattagctctggccggaatttaactatatgggtcccacgcgcgtatacttggcgcgcccatttttatccatatagagctcgctcggttcaaaattccgtttgccctccccggggaaccttgggtacaccccacgcgctttagaaaaattattgtggagcccgccaattgaattgttgcaattcccggtttacaccgtgttctctaccgggagtcccctggtcggccgattaataattcacacctgagcgtagaaaaacccccttattaatntgcgcaagcgacccccaaacctagatcggggaccctcctcgcatagtcgtaaactcagtcttaaaaggagggatgctgtgtagtctaagttcacccaccacacacggggttcccgcccccgaagaagaaaaactatggggtgcacccgaaatctccccacgcaaaataaggaccgtgtaagcaacaaatagtggggaaacactgtttagttgtccgtctccgaaatgcggggacccaagactagtagtagtatctgcgaaacacgaaaatctgccgtggttttgaaaatggtgaaaccctcccgtgtacctttccttaaatagttgctattattataacgtagtgccaaaagaaaaacctttagttgtatataacaggcactgcctttagacccacattaaatagttatttgtattattatacttcccgagcaaaacacttgtttagaccaccaatagcgcgcatttgaccaagatgttattaagacagtgatgttttttacaccacaagctactgtaccacgcccacgcattttcaaaaattttgcaccccacaatagcccgcaacaaaacaccacctttttga

SEQ ID NO: 666836 - DNA, 206 bp, Homo sapiens
ggatccttaattctgcacccacagcatactaattacggagcggactgggtgatgagagtcacctctcctggcttacctggtaacgaagctgccactccccatttcttgcttctgctgcaaaggaaagctggggtcctggggtgcttttcggctttgacctctggtgagacccctaaagctctcagtgaacgggctgtgggtggcca

SEQ ID NO: 666837 - DNA, 106 bp, Homo sapiens
ccccaaattttaaaaccaattggttaaaattttaataaaggccattttggaaggggtgaaaaggtaaaggttcaccagccacctttaaaaataattttgaaccttt

SEQ ID NO: 666838 - DNA, 173 bp, Homo sapiens
  misc_feature (14)..(14): n is a, c, g, or t
  misc_feature (62)..(62): n is a, c, g, or t
  misc_feature (143)..(143): n is a, c, g, or t
caaaaaccccatcntatgggcccaacatctgtgacgggcaactttgacaccgtggccatgcntccgaggggagatgtttgtcttcaaggagcgctggttctggcgggtgaggaataaccaagtgatggatggatacccaatgnctattggtcagttttgggggggtctgtctg

SEQ ID NO: 666839 - DNA, 197 bp, Homo sapiens
cgagacagaacacacccagcttagttcttttcttttcacataggcccaaaggttgcatgggtgtgagctttaagaactgattttccccctacccaggctgaactctggtgtgggaggagccttttctggggaaggaggtcactcactggaccttgagcaggccacactgctgctgcaggccaacaagcggtgagtgc

SEQ ID NO: 666840 - DNA, 147 bp, Homo sapiens
tacagcgatgtcggcagcgacatcacgtgcgcatcagcgactttctgcaggtgcgacaggtcacaactttaggcagcaccctacactgcctccccagcatgtctgcacagtatttcgttaatggggtgaataatcgtgcagaagatg

SEQ ID NO: 666841 - DNA, 841 bp, Homo sapiens
tttattgggtaaccggattaaaaaaaaattttaaattcctgtgtctctcttctgatggctgaacaaaactggggtgtcaaatggaaagcagcccccaaaaatctccctgtggcaaaacctgtgatctttcgcaaaaatgcaaaaacccctgagttatacaacttgcaatataattattttctacacagaagttgccaacgtggtgtgcccacgcggtccgcgaactagttctgtagaagactttacaagcaacaatgcaagcaagtatagaaaaagcgctttgaacagctccgtgggcacatacatgtgctaaattaagcccaaagagtggggagaaaggaaaaaggagagacaaatatcagtccatacggagtggtcactcaaccaatctccagacgtgaagtcttcatatttataatctcaaatccccttttctgatttgtgccacccagtgcctcttcaggcgggaaacaatctctgggttccctaaagcacttcctttctgacggccgggtgactccagtgaacctgcccttgggcttctataactgtggcgcatttgggcctcaccctgcacaaaggtgtgttaaaatcccgccttggggctactcccttaaagctggctccaataaattatttggactgcgcccaacaaacacaacacaacacacaaccaacacaacacagggggcgcggcgcgcccaaaaaaatcaccctccgaggggggccccccagaattgaacgggttacccccgtcttttgtgcgaaccaaggggggcctcatagggggcgcggtatataaacacgcaacgacaacggcggcgctaaacaacggctgacg

SEQ ID NO: 666842 - DNA, 344 bp, Homo sapiens
  misc_feature (37)..(37): n is a, c, g, or t
  misc_feature (48)..(48): n is a, c, g, or t
  misc_feature (96)..(96): n is a, c, g, or t
  misc_feature (162)..(162): n is a, c, g, or t
  misc_feature (204)..(204): n is a, c, g, or t
  misc_feature (210)..(210): n is a, c, g, or t
  misc_feature (259)..(259): n is a, c, g, or t
gaggtgctgtggcaagaagctggcgcagggcggcccncccggacctgnctcctcacacctgtggagcgcatggtggcagagaccttttccgcccanggtccccaaggcgagggccagaccacggagcccctgccaaatagtattgaagccagccttgaggtncgctcctcgcatgcggaggcagcccgccagctcctggctggnagccanccggcaccaactgatgaggaggacgagacccccagctgcttgtggctgnccctgaggtccctggaaggcccagcctgcctgaacctgaccccctggacttacgaggagtcttccacgcacccacctcctcaccc

SEQ ID NO: 666843 - DNA, 854 bp, Homo sapiens
ttacaaaccaggttagtaatagaacttgaaatgacaagtccttggaacctgcgggaaggtggttcttgtgtgaagcccaggcttccagacttagggccaaaaaaagggctagtgtgaggggacctaaaatcttgaactccttatatttcttgctgcccccacggttgtcctggggctgagcttcccgttttttttgcttctgtttggcagcgtgctcagccaccatgtcactgaagtcctccttctttatcttggagcctctgtctgtctccccgcactatgtctccctctatatcttctgggtcccatggcctataaggtatcccagctcccaactcttctaggcgccagcgccatttccacactcttgcagtctcaggagccgggcccttcccggtctctataaccgtggactttgtcataatatgtggtgttgtatcccctaatctatggcccctccaacaggtggctgtctctctttctcgtgggcaacccagttgaagagctgaggtgtctcactttccgtccatcgccttcctcaatcttcttcttcctcgagctcaattgaggtccaggggtctccatctccagcaggccacttgttgaaaagcctccaggagttgataaggcccactgtctgcaggggtaataagagcctgtctcatctggttggtctgtcatcacttttcttcccttcttcctctatcttctgaggattcttctctcagatggttcccaagttccccccaagggttccgatcaatctctttctttcctcagttcttgcgtctgaatttcgcccgcttttgttcccaaaaccgtcccccattaaagcggttcccccagttttattc

SEQ ID NO: 666844 - DNA, 616 bp, Homo sapiens
  misc_feature (311)..(311): n is a, c, g, or t
acctaggtgtcttgcgttcccatttcccaatggctcacatagcaaatgatggtacaggccatcaggcctcaagtctcctgttgctatgaaagggtggtccccctagaaatctataaacaatttaacgtttttctgtaagctttgatactacttttctcccacttttttcgtgctctctacacaccgacgtaggtccagcagactgcactgtcactttaacggaaacagatctctgctactgcgaactttaggcgagtctcacgatttaacactcctagcaactgcccaactgcacttgtgctgctgctganccctaagcaaacttactaaacagtctctaagccttaatatgcccatctgctgaatatctatactctacatcacagaactcgctctgacgtactctaacataaagataactgtaactgctgaaaagcaaccttggtatgctacagaacgcgaacaaccatcaaactctgaaagcttccattactcaaactatgctctctactcctgtctccaaacagcacacgtggtaccacactggcgcctcattaactggatcatacaccgttcaataaccctagattcttacttcaggtaccacaccctactc

SEQ ID NO: 666845 - DNA, 121 bp, Homo sapiens
ggggcgagtgcgtcatattgttgttcctaggacgattgtagtggtaaggctgtttattatgattctgtttgtgtattcggctataaagaataggggcgaacgggggttagtgcccgaagct

SEQ ID NO: 666846 - DNA, 445 bp, Homo sapiens
aaagccttgacgaagaaacagggggaggatggtgggcccgtgggcagcagaggagggggagcgtcgatgacaaggaacaataagcccagagacaccgagcacaggaagcgtgtgcaccagacgcgcgacgagagaggcatgatcaagcatgtgaccacagcaagggtgccacgggctccctaagcatgaacaaggaaagggccctcaagtcctaccacagggccaatatatgccagttcagtcataagagccaatagcctcacaagcctgggcagcgtgagtatgaaccatgccaattgctactaagctccaaaaagaagaatgaccagcttttcaaaggagtccgtagggtggccaaaggcaaccgccattgccattattaaggcaggtcaggcggggtgccaggcttgccaccaagtgggaataaaacgcaacttatttcaca

SEQ ID NO: 666847 - DNA, 100 bp, Homo sapiens
catatggtatcttcgggggaaaaaattagaattttagaaatcctatacaattttagacacagggtttgatgaccataaactaaatataacctcaagaagg

SEQ ID NO: 666848 - DNA, 188 bp, Homo sapiens
gatgtgaggatccaggagagagaggcccaaggccgagacactgaagtgatataaactggtataatatttctgggatgtaatcctatttgacccataaattctacctctggtaatatattttaaggaagtatatattttcttttttttttcccaggctattctcaaactccggggcctcggctctccag

SEQ ID NO: 666849 - DNA, 153 bp, Homo sapiens
ggaggacccctccagatcagcaatttcctactcctccaagtagtgagatgacaggcgtgtgcacacgccagctaatttggtattttagtagcgatggtgtttcactacattggccaggctggtctcgaactcctgacctcaggtgaccacccg

SEQ ID NO: 666850 - DNA, 107 bp, Homo sapiens
caccagatgctcccaccacaccagatgctcccatccaagtactaaccaggcccgaccctgcttagcttccgagatcagacgagatcgggcggtgggagcatctggtg

SEQ ID NO: 666851 - DNA, 128 bp, Homo sapiens
tcgatacgacttttttttttgttccttttttcctctgtgtgcagtttacaagacgagtttcctttctcacagtcagcgtaggtagcgatctgtgatggctccagcaccagcgtctggcagccctgcat

SEQ ID NO: 666852 - DNA, 256 bp, Homo sapiens
ctttactccgggtggtggaggctacagttgcagtgagctgagatcatgccactgaacctccagcctgggtgacagagcaagactctatcaaaaaaaaaacaaaaaaaaaaagcccccctcccgggcttgaaaaaaggggttttcctcggttcggctcttgtgggggggcacccctaggggggcaagagtgttggggaagaggcttacaccccaccttcccgtgacgtgcttctatgtaaggtttcggggagctcct

SEQ ID NO: 666853 - DNA, 484 bp, Homo sapiens
gatcctgccgcagtgcttggggctgtaaccttgaactttcccagcgcggtgacacattctccccgctctccctaacggaagaagaaagacccagcagccgacacaaagagcaaaagaaagacaaacaaatcaagagaacacgaagcaaaaaaccaccaaacagcaaaaacaacaccacaccaagacaaaccaaaaaacaagacaaccaccagcacccagacacacacaacacaaacaaaaaaaagagaaaacagagcgaaaaagacgaaacacaaacaacgacaaccgcccacactctaactctcacaaacatcagatagagcacagaaacatcaaccgactccaaagatggaacaaacccgacaaagctcgcacgaagagaaataccacatgacaatacacacgaagcgagacacagcgaaaaagccaacaacaaaaaagtcaaacacccaagatgactaaagagaaagatgaagacacagtc

SEQ ID NO: 666854 - DNA, 555 bp, Homo sapiens
tggccagtctctacctctcatgggctgctggtttaccaataatatccagttggccacccaagatctttggatcccaacaaagagttggatttttgtcagaaggacaaacaaacacaagatcggttttatgattaaaacatatatcagacattaaagcagatcaagagatctagccttagagggacgggaggatcagggggtaggcctactcactgccagggaggggaactataaagtatgctaagatacggtaaagatatcattccacagaccctggtctcaggtggattcaattgtataatttctttcttgctttctttcttaaagagatgatgtctctcggtggcctaggcgggagtgcagaggcaaatgcatggctcatggcagcctggtactcgggggctaaagctatcttctcccctcatcctccatagtagctgagactacgggtatgcaccaccaggccggggcatgtggatttgagaggtgacagtcagggagatgcacagttcagatctctggcaggggaacctggagcagaggtctagcagccca

SEQ ID NO: 666855 - DNA, 181 bp, Homo sapiens
ctgagctttatttaaagcaggggaacaggcgcagtggctcccagtactttgggaggtccaggcggtagcatcacttgagcccaggagttcgaggttgcagtgagccatggtagcgccactgcattctgtccagcctgggtgacagagcgagaccctgtgctcccccttctgtcgtcttctc

SEQ ID NO: 666856 - DNA, 688 bp, Homo sapiens
atttttaattttattaaaaatataatttaatgcaggtgttgaagcatctgtcttcatatgatggcattagaacacctggtataataaaattaaaatctatttttaacctaaaaaaaaaaaaaaaaaaaaaaaaacaaaaccaaaaaaaaaaaaaaaaaaaagacaataaaaaagaaaaaaaaaaagcgagagcggggcggcgcgccacgcaagcaggagactgcccacgcacgagggggggccagcaacaggagtaggcggccgaccccgatgtttagttggtacaaaagagggggccccaatatgagggaggcatatctaataaagaaccagacgaagaagggggggcgggataacaaccagccaccagcgacgacaagggggagaaaaacaatgcgtcaaagaatgggcgaaaaactcatctagggagaggcgaacagaaccacctccacccacagggggggaggggggggaggacaaaatgagtggggaaaaacagcaccctcaccaagcggaaggaaatcaagaaacatcccaacgagagacataacaacaaacacatgacacgagggcagctaacggggggacaaccacaccaagctatcactactcgcggagaaaaaaaagtgaacaaaaccgagaatatgaagcaagaaataatcacaccggcccgtctaataaatgggcg

SEQ ID NO: 666857 - DNA, 933 bp, Homo sapiens
agctctgctgtcaagtgctcatctgcagagtgctatatagccggcaaagtctttatatactgcaagcggccccgtgttcctcgttcggctctttccccttctgaatgcgccacggaagtgtggaatacattgccgtgcccacaatatttgggtgttaaagcgccaaatccctagggaattgcaaaggcccgctttgttaacggcgcattaagggtgacaaagaagatgtatcacatggttgacgaaggcgaatattttccagcgcgctccctttaggtgcaaccccgggcgctccttgctaaagggttgtcgcacaccaccggtccccctgtgggggcgtttgaaaaaccccccccccgggtcttcaaaagtttatttgggctcctacgccccgctcttcctttgggcccgcccctatctatttctgtgtcagggaaagattccaatgttcccaactattaaaaggaggacgcaaatggtcaatcctctcaagtagtacattgtgggaaacgtgttgcccccccgatagggtggcaccacgggttccccacagcgatataacattccaaacctattgctgcagcagtcgatacagattgaggcagcaagtgagtttatgcatggaggcagttactgagagagaataaagtgggtgcgtcagagaggacagtctgtttaagagcagagggaaactgtaagttaaataatgtgcgcccgcgctaggaagattctcttaacccgagagtacattcccgcccgggacagttgacgccgaactcatatccagagtgggtaaagaattctttccaccggtgtgtcgccccccgcgtcctcataaggagaccaaagtccgctccacaagaaacacagggaaacaaatgcttctcaaccccccaagggccattttttaaaaaacacataacccacaaaaca

SEQ ID NO: 666858 - DNA, 1502 bp, Homo sapiens
gactagttctagatcgcgggcggcctgcccttattctatatttattattttgacttaatctagctgagaatctatttctagtacgattaacaacttgaactaactacattaacggataggaactttatttttcatttttgtatcattttttctttgtatcattatttattattgttgggaaagtggagactctcacatcgtggacacccgaggtgtggaagtgtgcaggggggtgtgtgactcatggagcctcacgtgagaaccgtcgtgcacctacccgaggtgtctacaagcaatattctctcgctgtggccctcgagacacctcccacaagtatagacgtgggaacatacgaggcccaacagcgccgaccgagcgaccacaaaatatagaattgtggtgagtatttaaaggatcaaagaagtggggttttcaccaagtgtttggcgcccagagagatgtgtgatctctccaaatctctctttgtgagcacttgtgagagatctccacccacaacctctcaagaactctcacacagaaagggtgcagtgggaatctccccagagagacatgatgaggcacaaccacaacacccacagaggagaaaacgcgagagagttatacacaataaagttgatgtaggcgcacaagcgggcagaggggacctactcccaaaacacaccctgcgaaaccaacaaaaagggagagaactctgtggcgcccgggcacatgtgggcgccctcccccaacaaagggtgccgaggagaacataacaagacgcacataagaagagccaaacacaacgggcaatggggcaccgagggaaagagcagacaaatcaacatgagaaacagaaaaggacaaatactaaccccccgcagataacacagagacttcacgaagcggacatacaccgctacgaggggcgcgagatacacaagaaggggaagaaacccccaaaaaacaggacgacctatacaagcgggaggaaaacatatacaacgaggggggaacaacgaacgggacgaataccattaacacacaaacgcaacatctgggggcgaagcagacaagatatacacaagaaaaacacaacgaacagcaaacacgaaggagcccataagaacacaagcggagccaacggcaggcgcacgtaggttccaccacactatggacgacccaatgtctgagaactaatgtgaccacacacacgggagcaagcgaggaacagagcgagaaaacagtagtaggatcaaacagaagcgccatacaaacgttgtacaggtgaacacacacaaaacgcaaacaggagacaaaacatatacaacgacacaggaagtaaaacaacagaccataagcacttaacgcagacagtaaggtaacaccatgagagtaagagaaaagtcataaaaagcacagcaacatacagcacacgacaggacgacagcagcatgagcaaggcagtaacgacagaacaagtagggctactgtacgacagacaa

SEQ ID NO: 666859 - DNA, 163 bp, Homo sapiens
  misc_feature (154)..(154): n is a, c, g, or t
gagacatggtagactttgatcaaaagacttggccccggtggagttcggggcctttactttggggtatggtgaaatagaccctgagtgactttgtcttggcggtgtttcaggtttcacttgtggtatctgtgtgatggaggacccagtaatgacntgtatcttg

SEQ ID NO: 666860 - DNA, 471 bp, Homo sapiens
  misc_feature (22)..(22): n is a, c, g, or t
  misc_feature (62)..(62): n is a, c, g, or t
aagaggcacctgtggtagatgnatcattatctccagtttgcagatgagtagctggaggcttngatagctaagtaacttgtacgaggtacagaagtgctcagtggcacatctacctgagccccagccgtgtcttgaaggcccatgtgaaaaagcaggcagcattgagaaccggtgaggaactcatactcattatctaggctggggctctttacttatttggtcagtctgatgaatgctctgcatctccaggcttgaaagtacatctccacacagtatttgtgaatgtgtcaaagggttcagacccccaaaagcccatctaatccatatgtccactcaaacacttgtacacaactgttcattgcaccattatccataattgccaaaaggtggaaacagcccaaatgtccatcagctgaggaatgaataaacgaaatgtagtacatccatacaatggaatatgattcagcaata

SEQ ID NO: 666861 - DNA, 1099 bp, Homo sapiens
agcgggttgcattccggtaccggacgccgagatcggtttgtctccgtctctggagttgtaagtggcgatatggtgatcatgtccggtctgcgtggtaacacagggcggcaaatgtgcgagcaaatggcctaaagtcccgctccgtcccgtggtcgggcctgtcagtttccactgtgttgggaccagtagatgccaatcgagtacatgtatgactcaatagggtaactacgcttcgtagcgatgtgggtgcctggggctccgtgtggtactcttggctggcgtgtgtttggagtaccttatcggcggtgagatcctgtgagtctggtctggtgacatacggaccgtcagctgtgcacaacttagtaagaccaaggattaattcctcacgtaacacctgactagcatcgcgcatctcggcaaacagatcagtagtggagttaaacacatatagtctgtctgggacataaaggtgaccactacgtcatcaggggacggtcgatcgcatgttctccaaacattcacaggaccgtgtgcttgcttgacccaaagatagactggacgacgatcaggatatgacgaaagacgctcacatgtgatgccatgacgacctgtcgctactagggagctaggactctcctccaggtaaatagaggcctcgttctttcattgggtcagtcccggcgaatgcttatcgaagtgttgcttgggattgttcatcggaaggggccggattggagcagtactaaggctggggcacggtgggggcggagcaggaccggggtccacgggtcgggggaaatgccattagttaagacgcttgtcggtagacaaaagttcggccaacagaatagccacattcgagaaacttctctatcgagtaccgaccgtgggcacattctcccagaggtcccacatatagagcgggccgcttggtattccctttcgcgagtgggggtgggcgccaccggattaaccccgacacctctatgggattctccccctgttatacgtcaagggggcttaaactttcaccaacgccttgtggcgctcttgagccaccatgggggtccataggactgtgttatcacacgtggtggta

SEQ ID NO: 666862 - DNA, 115 bp, Homo sapiens
agttcctgccggttttatataaggcctttcaaattaaaaccccaaaagatgaaagggaatgttcttgtttgacaacaaatgtaaagggtgtccccgggatactctccaggggcca

SEQ ID NO: 666863 - DNA, 111 bp, Homo sapiens
gagatcccttgtggacgattcgattgagtgtgtcgaggaatgggtgtgcgtttatgtcatgttcaaagcgtgtcacttttcatttttacgttgttagatatggggagtagt

SEQ ID NO: 666864 - DNA, 481 bp, Homo sapiens
attatgaggccaaagcaagaggatcacttgaaactcaggtgttcaagatcagcctgggtaatatattgaggacccctctgcccccagtctattaaaaaaaaaaaaagtaagaattgtcacccatgcctgtggtactacctactcggcaggctgaggcaagagtatcccttgagcccacggagcaccaaggctgccagtgagcaatgatcaccactgaatactagcctgcagccaccagcgggaagaccctgtaactaaggagaaaaaaggtcatgtcattggcacacctggctaattcgcattcttataaagttgacatgcccttaatttgttcctctagccaaaatagctctggccacgaacttctagtaatcatgtagaatcgaagtggtaacgctggccatcccttgtcatgtacaaagatctcagaggaaagacctttcaaataaaccctgtccagtatgatgtcggacgtgggtag

SEQ ID NO: 666865 - DNA, 1182 bp, Homo sapiens
  misc_feature (668)..(668): n is a, c, g, or t
  misc_feature (835)..(835): n is a, c, g, or t
tatgtcgctagtgtgttaccgtggtatctgtcggatcattccctcttggtgggcgccctcaagtgtgcataagagacattttgtgtatgtctgttgtgtctccagcatttttggggaccctgcaccggttcgggtatttctaaagccgttttgcggccctgcgcattggaagcgtcagattttaacccgagcaacccggggatcttggtttggaaagaagggaccggactcttgtaaactttaagaggttttctatggtcctcgcacccggtacacccgggcccctctgggttttaatttcagcagatagtccagagcgataaagaatttcttttttaaattggaggtattactgcttttgggagagagttatttttataaataaagggcataattgtccataagaagtattgtatgaaataattggatgttaaataaatgcttagccctaaatggttagaataaaggtaaatttagaggaatgtcaccgtgtcaccagatagattgtattaagacagccccattaatggaaccccttagaaaacaactaagtttataacctgtattctgaaggttacccaattaagacctctttaaaatgttttctcttgtaacttggtggttttttgaagggcttggcctatgagaaatgaaagccctcggaattnttgggccccaaggtttgtaaaattaaggttggtctccctgtgagctcaacaatatattccgaggaaaaatgagaaccttaaaagagatctcttgtggtcttgttgaaagaaagagaaattattcctccccatggtctcacaatcctggtatggtgaaaattagagcntccacagagaaggccattgttttttccctttttttatttttgtgatataaaataatattttcttaaataatattgtttattgtgcttctcttaacgccacaaaagtgtcttttaataaacaccattagttatattctctctgccgtgccttatttccattagtgaagaccatagttcaacctaaaatggccatcctgctctgaatctagactttttagaaatggccataatagtttttgatgatatagtccacaccattccaaaattgtccttaattaaattgttgtttaaaagtaatgtccactctttataaacctataaaataaaccagtaattaacccctctta

SEQ ID NO: 666866 - DNA, 531 bp, Homo sapiens
  misc_feature (64)..(64): n is a, c, g, or t
  misc_feature (217)..(217): n is a, c, g, or t
  misc_feature (267)..(268): n is a, c, g, or t
  misc_feature (413)..(413): n is a, c, g, or t
tttggtaaagggcacactgccttaggaggcgcccgtggaggagcagagactgatcacgtgtccnatatgtttgcttagagaggactttccctctttgcttttgagctaagctgctgaggcaagccagcaagaggaagatgttcccttgtttgccgggagcaggaatatcaggattctgtgcagctgaggcggccgtgatcacggagcagggactganccatgcgtccatatgtttgcttaaagggaactttcccggccgggcgcganngctcacgcctgtaagcccagcactttgggaggccaaggtgggcggatcatgaggtcaggagttccaggcccgcctggccaacagtgaaacccgtctctaccaaaaatacaaaaattagccgggcatggtggcgagcacctgtagncctggctacttgggaggctgaggcaaaagaatcgcttgaacccgggaggcggaggttgcagtgagctgaaattgcaccactgtactccagcctgggccacagagtgagactctgtctc

SEQ ID NO: 666867 - DNA, 768 bp, Homo sapiens
  misc_feature (380)..(380): n is a, c, g, or t
  misc_feature (402)..(402): n is a, c, g, or t
  misc_feature (451)..(451): n is a, c, g, or t
  misc_feature (676)..(676): n is a, c, g, or t
tggtaaacggggtctggctggttggccgcacgcgggtctggcacttctgggcctcaagcgattctccaacctcagcctcctaaaaggccaggatttataggcttgagccaccaagccgtgacccttcttcttgtgtgcttataattttccgtggtttccctccacatgtgaagcgaggcctccaagtgagaggagggaacgtgggtcagtttaggtgcccgtccagcgttctctcaggtgtgctcaattctcactcaaccaacaccagcgaggggcccaattttaaaattatagagaggctcagtgtggtataagtgacaagaaagtataaaatagcacaaaggagaagggtcctcacgaggtggcgatgaaagtggatntctctacaacgaagggagtgtnggtctcgtggatattctctccacagtataagcccgagggagagcccccntgtgtggctcgtggcgccagcgtggtgttgccgtgtgcagcgacagaagtcgcgtggtcgcgaaacacttcgagtgtggcaatgtagaagaatgtgtgcccgaattgtgggcactccctgtggggttgggcctttatcagaaacgagtgtggtggagtctctcaggaagcgtggtctctatgagggccacacccaataccgagggtgtggcgtgggggagggggncaaaaactacctcttatttctaaaggggtaacattagaacacccttgtgggaagcgtggcaaaatcctcgtgggcaacataattcaattgac

SEQ ID NO: 666868 - DNA, 224 bp, Homo sapiens
acgtcagcacctcctgcagctggtgaaggtgcccatttccctcagcattgaccgtctggagtttgaccttctgtatcctgccatcgaaggtcacctaagcacagagaggttaaccaacttgcccagaatcacacggaaagcaagcccagggaagaagcaaaaagcagaagagcaccaagaggaaataggtcctctaggaagggtgccctcagtgtccatcttca

SEQ ID NO: 666869 - DNA, 172 bp, Homo sapiens
tctctagcaggatcccctgtcagaaaaaagacgccttcctcacatattacttactcattcctttttagcagtgctccctaatacaattacatcactgctcactgacaatgcaccaggtcgccctaatagctgtgattgagatgtacagtttattagtgttttttctgcagca

SEQ ID NO: 666870 - DNA, 884 bp, Homo sapiens
gtctaagttggcagagatgtctgcctctaatgagaggccattgagaaggacattccctcggagcttctcgaggacctggctgtgacagtcgctgaagatgtatgcctggaggcggcacatcttgcagatggccaggcctgtgaggctggcgccactgccaagctctaggacagtcctggcgggaggaaaggggaccatgtctgtgactgcaccagggtgagcctgcctcggtgtcctgccgtgcgccccgaggtcacctatgagagaaggctgccgggttctcgatggcccattctgccaggtagagggcagcatctcatgtgaccaggcctgtgatgtcgtgggagatgatggctgtgctctcggagagtgtgactgagcctcccgagggctgcaccaagagagggcgagagagtcagtccagcaatcagaaggcaagtggcttagaagacaagtagccatccaccacatggctgaataaaccatgacaggaccaatcgccactcagcaatgagaagcagctaactgttgacatgccaacagcttgcacaggacctcaagggtgtcacgtggcatgaaagacactcatctcaggccacacaggattccattcatcgaacattcctgagacaacggaattctggcgatggagcacaggatgcttcacagtctacggcaaaggacagaacgttggttgctcgagagcccgtcttaagtctcctatgagcttcaagccaacacaacagagggcaaactccaggctacctgatccctcagcaaagatgcagatggacacagcgttctggccccacgcatctgaagttcgtcttaagatgtaagccgtttcctaaaaatgcttccactgcagtggcacaggcaaaaaa

SEQ ID NO: 666871 - DNA, 507 bp, Homo sapiens
ggaggcagagtgagggagagacgctggcctccccttcttcccaccctgcactgtctcccatgggtcacactcagctgcagccagttgcctggggaggcccctgccatgccggggtttgcaaagcaggcccagggcctgggaaggacgggggctccagcacgcaggtggctatgctgtccggctactgggcggacactgcccataactgacctttttgatgagttctgagagaaagcaccgggcatacttgactgacggcgggtgcttcacacacacacaggatgcttcacagtctacggcaaaggacagaacgttggttgctcgagagcccgtcttaagtctcctatgagcttcaagccaacacaacagagggcaaactccaggctacctgatccctcagcaaagatgcagatggacacagcgttctggccccacgcatctgaagttcgtcttaagatgtaagccgtttcctaaaaatgcttccactgcagtggcacaggcaaaaaa

SEQ ID NO: 666872 - DNA, 1336 bp, Homo sapiens
ggagagaactagtctcgagtaattgggggtgattttgggaaagtcatgtcaggggtagtaatataattggtggggacgattagtttaagcatgggagtaggttaaggtaatgtacgtagtcataggccatatgtgttggaaattgaaacctacgtagggctacggcccaccgcggggcttcgcagggcggcaaacgacctacgtatgggcaactacggcccaaaactgggctacaaagggacgtgggtgtagacgggtacatcgaaacgtacgccaaatacatgacaccaagcgacagaaataaacccttcaacggcatagaataggagaggaactagcgggtgtagacaagacaactcacaagcaattcgcaacaacaggagcaaagggacaaaaatggcaagtaccaacaaatatcaccaagacaccagaaggggccaaacaatgcccaaaaaagaccacaaaaccatacgaggaggagagaaaaagaaaacaccatcacaagacgaccgcatataacaaaaagaggaagaagaaaaagagggagagcaggggaaacaaccagacaagacgcaccagagagaaaaggagagaaaagaaaacaaaaagagagaaacaccaaaaagagcacacatacggaaaaaaaaaaaggacagaaaccatggagcagaacacaaccgcgccaaagcagaaatatacacaacccgtaaaaacacaatcacaacaacaaacgggagcaacaggaacagagagcatagcgcacaagaaaaataagtagcccgaaagagaaccagcaaacagcacaacgactgcaccacaggaaaacaacacataaaacccatgagagacaagaaacctcgcaacagacacaggcccaagaagggcaaccaaaaccccaggcagcaaagacgaacaaacaaaaaggcaaacagagggacatacaccaaagagcaccaaacaggagcgagcaacccgaaaacacatggagcgaaaacacaactacccaagtatacaagcaaacaacgaaaaacacacagaaagaaaacaaaggacacacgacaacagatcacagcagacgggacagacagccgcacaacaagagcaacccaggaaacacaacaggaggacactgacgcacgaaacagaaagacagacaaccgacagaaaaaagaaacaagacagagtaagaagaacacaaacacagaagaacgtggggaaagccaaaaagaacaaggagaaccaacctcaagatggacagaccccaacaagcgagaggccaaccaaacaatagcacaaacatcgagcgaacgaaacaccacaccgctgacaccactcg

SEQ ID NO: 666873 - DNA, 1314 bp, Homo sapiens
  misc_feature (758)..(759): n is a, c, g, or t
  misc_feature (773)..(773): n is a, c, g, or t
gtctaagttggcagagatgtctgcctctaatgagaggccattgagaaggacattccctcggagcttctcgaggacctggctgtgacagtcgctgaagatgtatgcctggaggcggcacatcttgcagatggccaggcctgtgaggctggcgccactgccaagctctaggacagtcctggcgggaggaaaggggaccatgtctgtgactgcaccagggtgagcctgcctcggtgtcctgccgtgcgccccgaggtcacctatgagagaaggctgccgggttctcgatggcccattctgccaggtagagggcagcatctcatgtgaccaggcctgtgatgtcgtgggagatgatggctgtgctctcggagagtgtgactgagcctcccgagggctgcaccaagagagggcgagagagtcagtccagcaatcagaaggcaagtggcttagaagacaagtagccatccaccacatggctgaataaaccatgacaggaccaatcgccactcagcaatgagaagcagctaactgttgacatgccaacagcttgcacaggacctcaagggtgtcacgtggcatgaaagacactcatctcaggccacacaggattccattcatcgaacattcctgagacaacggaattctggcgatggagcacaggtcagtggtggccaggggccgggtgtggctatgaaggggtggctgccttgtgatgattcaatatgctatgtttttcctttgtggttttctgtatctatgtnntatcttattttttntgagctctgtcacccaggctgaattcagtggcacgatcttggctcactgcaagcctccgtctcctgggttcaagcgattctcctgcctcagctgcccaagtagctgcgattacaggcatgcgtggcatgtccggctaagttttggtattttctctgaagagacaaggagttagccgcacttgtttgggcccaaggcggggggctgtagtatcgcccgaagtcttcgggggccccgtataagagatcgccaaacctctggtgtgttccccagaagattctgcggtgtctcgatgcttccctgagttagctgggataaccggttggcccatttgggcaggaacgcggtgcgacctttgggagttgactcatgcagacgatgctagtggacgccagattgtgggcgcacggttggttcgcgaaaatctgtggatgtcagcgtggagctaaccgagattctggactcttcgggaagatactttcaccgaggatgcagtatgtgatggagatatcaacgggctcagtctctcggaataccagaatc

SEQ ID NO: 666874 - DNA, 881 bp, Homo sapiens
  misc_feature (758)..(759): n is a, c, g, or t
  misc_feature (773)..(773): n is a, c, g, or t
gtctaagttggcagagatgtctgcctctaatgagaggccattgagaaggacattccctcggagcttctcgaggacctggctgtgacagtcgctgaagatgtatgcctggaggcggcacatcttgcagatggccaggcctgtgaggctggcgccactgccaagctctaggacagtcctggcgggaggaaaggggaccatgtctgtgactgcaccagggtgagcctgcctcggtgtcctgccgtgcgccccgaggtcacctatgagagaaggctgccgggttctcgatggcccattctgccaggtagagggcagcatctcatgtgaccaggcctgtgatgtcgtgggagatgatggctgtgctctcggagagtgtgactgagcctcccgagggctgcaccaagagagggcgagagagtcagtccagcaatcagaaggcaagtggcttagaagacaagtagccatccaccacatggctgaataaaccatgacaggaccaatcgccactcagcaatgagaagcagctaactgttgacatgccaacagcttgcacaggacctcaagggtgtcacgtggcatgaaagacactcatctcaggccacacaggattccattcatcgaacattcctgagacaacggaattctggcgatggagcacaggtcagtggtggccaggggccgggtgtggctatgaaggggtggctgccttgtgatgattcaatatgctatgtttttcctttgtggttttctgtatctatgtnntatcttattttttntgagctctgttccccaagactgtgccatggtaatccagcctgggcaacacagtgagactcttgtctcaaaaaaataaataagtaaaaaataaaatccatcctgtatca

SEQ ID NO: 666875 - DNA, 1788 bp, Homo sapiens
  misc_feature (1232)..(1233): n is a, c, g, or t
  misc_feature (1247)..(1247): n is a, c, g, or t
gtatggtatggtatggtatggtatggtatgatggtatggtatggtatggtatggtatggtatggtatgatggtatggtatggtatggtatggtatggtatggtatgatggtatggtatggtatggtatggtatggtatggtatgatggtatggtatggtatggtatggtatggtatggtatgatggtatggtatggtatggtatggtatggtatggtatgatggtatggtatggtatggtatggtatggtatggtatgatggtatggtatggtatggtatggtatggtatggtatgatggtatggtatggtatggtatggtatggtatggtatgatggtatggtatggtatggtatggtatggtatggtatgatggtatggtatggtatggtatggtatggtatggtatgatggtatggtatggtatggtatggtatggtatggtatgatggtatggtatggtatggtatggtatggtatggtatgatggtatggtatggtatggtatggtatggtatggtatgatggtatggtatggtatggtatggtatggtatggtatgatggtatggtatggtatggtatggtatggtatggtatgatggtatggtatggtatggtatggtatggtatggtatgatggtatggtatggtatggtatggtatggtatggtatgatggtatggtatggtatggtatggtatggtatggtatgatggtatggtatggtatggtatggtatggtatggtatgatggtatggtatggtatggtatggtagagggcagcatctcatgtgaccaggcctgtgatgtcgtgggagatgatggctgtgctctcggagagtgtgactgagcctcccgagggctgcaccaagagagggcgagagagtcagtccagcaatcagaaggcaagtggcttagaagacaagtagccatccaccacatggctgaataaaccatgacaggaccaatcgccactcagcaatgagaagcagctaactgttgacatgccaacagcttgcacaggacctcaagggtgtcacgtggcatgaaagacactcatctcaggccacacaggattccattcatcgaacattcctgagacaacggaattctggcgatggagcacaggtcagtggtggccaggggccgggtgtggctatgaaggggtggctgccttgtgatgattcaatatgctatgtttttcctttgtggttttctgtatctatgtnntatcttattttttntgagctctgtcacccaggctgaattcagtggcacgatcttggctcactgcaagcctccgtctcctgggttcaagcgattctcctgcctcagctgcccaagtagctgcgattacaggcatgcgtggcatgtccggctaagttttggtattttctctgaagagacaaggagttagccgcacttgtttgggcccaaggcggggggctgtagtatcgcccgaagtcttcgggggccccgtataagagatcgccaaacctctggtgtgttccccagaagattctgcggtgtctcgatgcttccctgagttagctgggataaccggttggcccatttgggcaggaacgcggtgcgacctttgggagttgactcatgcagacgatgctagtggacgccagattgtgggcgcacggttggttcgcgaaaatctgtggatgtcagcgtggagctaaccgagattctggactcttcgggaagatactttcaccgaggatgcagtatgtgatggagatatcaacgggctcagtctctcggaataccagaatc

SEQ ID NO: 666876 - DNA, 172 bp, Homo sapiens
acatgatacaatcgagcttggtaccccccgactagcccgacagtcagctttggtgatgagaggcacgatgttgaccttctcatgcaatggccttcatgaaacccacatccactggccgcagcccatgccctgaagggggagatgaagtataggcagcagtgcactcgtgttg

SEQ ID NO: 666877 - DNA, 140 bp, Homo sapiens
gcaggctaataggttgaatgagtaggctgatggtttcgataataactagtatggggataaggggtgtaggtgtgctttttttcatttaatttatataatattattatatttaaatgaaatgattttataatatatatata

SEQ ID NO: 666878 - DNA, 1000 bp, Homo sapiens
gtctaagttggcagagatgtctgcctctaatgagaggccattgagaaggacattccctcggagcttctcgaggacctggctgtgacagtcgctgaagatgtatgcctggaggcggcacatcttgcagatggccaggcctgtgaggctggcgccactgccaagctctaggacagtcctggcgggaggaaaggggaccatgtctgtgactgcaccagggtgagcctgcctcggtgtcctgccgtgcgccccgaggtcacctatgagagaaggctgccgggttctcgatggcccattctgccaggtagagggcagcatctcatgtgaccaggcctgtgatgtcgtgggagatgatggctgtgctctcggagagtgtgactgagcctcccgagggctgcaccaagagagggcgagagagtcagtccagcaatcagaaggcaagtggcttagaagacaagtagccatccaccacatggctgaataaaccatgacaggaccaatcgccactcagcaatgagaagcagctaactgttgacatgccaacagcttgcacaggacctcaagggtgtcacgtggcatgaaagacactcatctcaggccacacaggattccattcatcgaacattcctgagacaacggaattctggcgatggagcacaggtataatacgtaagtttggaggtggatgtttcagccattaagttcaaaagtactgccacaagggccaggcatggtggctcacacctgtaatcccaaccctttgggaggtcaaagcaagcagatcacgagatcaggaaactgggaccatcctggccaacatggtgaaatcccatctgtactaaaagtacaaaaattggctgagtgtggtagtgtgtgcctgtggtcccagctacttgggaggctgaggcaggaggattgcttgagcccgggaggcggaggttgcagtgagtcgagattggccattgcagcgcagcctggttacaggagtgagtccgtctcccag

SEQ ID NO: 666879 - DNA, 979 bp, Homo sapiens
  misc_feature (674)..(674): n is a, c, g, or t
gcgctaattaccccgctgggacgtttctcagcgactcattatgataagcttttttttatgtgggttggttcgtctggcggcacctcttttgtgcttgtcaagaaaatgatagacagctgcgtctgttcagcaaaatggtgtttcccaaggagctggcgacggagggaattattttattatacttgcgcggcgaagaatagttccaattgaggtgatcaggattaagggggtgtgatagccaccagcgggtggtgcctccccccgtacataaattgattttctgttagcatcttgttgggtactcttacacacgcgtctggcccttcgtacgacacctcttcgttgtgacacgccggtttgtttgtctttaaaaaagcacgccgggtggttgtttggccccccccaaaaagaagtattattggtttttaattaaaacgaacgcgcctgttctctaggccattttgaaacccttgggaataggtggataactgtccttcagtaatagtgagggtacacccgcgtggttactctcttacatagtgtattctctatttaaggaaatatcccacggggtgtatccagcctctctattgtggcccacacgcaggtgtctaatttttccatcggatcgcagtgtgctattagggggcaccctctccactggagcctctccncgtgatgatacctgataatatctctgggggcacacatattgacagcctgccttatttctacgttttcctcgaggataatatccgggagcatataaatgtctaactttcgcccccttgtcgcctacgaccaataggtgttaataattgatatatcattttgttaacaaaatgtggggtgttctctccaacagttgtcgcaggctcccccggcgccactcctcaacacaatcctgggacacaaatgcggcgccccgtccccggccccgggttttcctttttaagtaaaatctcgccacatcataaca

SEQ ID NO: 666880 - DNA, 100 bp, Homo sapiens
tccttctggccacgccttgaaacaatccgggggagagggtgtaaatctcgcgccggaccacgggaatccgactgtttaattaaaacaaagcatcgcgaag

SEQ ID NO: 666881 - DNA, 340 bp, Homo sapiens
  misc_feature (307)..(307): n is a, c, g, or t
  misc_feature (317)..(317): n is a, c, g, or t
  misc_feature (335)..(335): n is a, c, g, or t
caacatcgaaagaaaacacttgtctgggtcagatctcatcaattagacaatttccaacagagaacacatctctagataactacatgtctgtcatataagggatatgtggacttccggctatgtgcttacagtaaattatctcaagaaaactaggcagcaggtagaaaaagagcaatgcaatcccacttttttaatgctcttgcctatagtctttgatgggactggaacttcatttggatgaccatttctattcttgcctggcatttgggggaatgtttaaatcctattctcatagggggtgtgtatnggggtaggcntggactaaggggtagggntaaag

SEQ ID NO: 666882 - DNA, 175 bp, Homo sapiens
gggccgtctttagctgtactaataatgacgtacttatagccaactactgccccctaatgtgactgaagggattcataatgatcacaattagcattacgagttaagtattttatgcggttgacgtctaagctcacacttgtaaaggtattatatctaattggccactgggctcacc

SEQ ID NO: 666883 - DNA, 237 bp, Homo sapiens
tcatggggaaggacagaagggctccctcagcctgtatataaggtgctaacccattcatgatctccacccccatgaactaaccacctcccacaggccccacatctttattatttttttttttgaaatggagtctcgctctgtcacccaggctggagtgcagtggcacgatctcggctcactgaaatctccacctactgggttcaagctattctcctgtctcatcctccatggtgctga

SEQ ID NO: 666884 - DNA, 1634 bp, Homo sapiens
atgatttagttattaatatctgttgttgggttgttttgacatatacgtttttggttaggtgctgtttgatttatatttctgtttttgataagataatttctctgtgtttatgagatagcatgggtgttattcttaatttgtgtttatttaactgttgtataattatcttccgttttattgattatatttgtatttgtatattaaattttttggtatctatctgatatattatattgtttatgttttatttatgtatattatttttggagaatgtataattagaagaatagggttttgaggtgattattatatagggttgttattttttattgttttatttgtgtgttaatatattttgtttgttattctcattgtttatatgtgtggttgatagtgttgatgagatttattgttaggggatgatgatcgctcagtagttcattgttttgtacttaatttttgtgtgggttgtacatgttccttgtttcatttttatttatgatttgtaattccatgtttttatatctgggtttaagcccattttgtatgggtgtcatcgtaattctctaatagggtattgtatatgtgtgtatgtctgctttatgttagtttgtattgtgtctcgcgttttgttgtataccccttaagttgaaacgtagttgtgtaaatttatttgtggttttattttttttggttatattttctataaattgctcctatcatatctccatttatgggttaatatggcaaattatggttgtaacttagccatgtttatcttctgttggtgtaccccgctttaatatttgtaagtggcgtaatacactgccagggttgttaggtgcgtggcaacactgttagtatatgctcgctacatctacgtacatttcggtcgcccttgcatacactaatgtgatattggctagttttgtcgcctttgagtgtctccaccaagccatttgctgagagacctgtaccctcctctgctttagagtgcagtgagtagtgcgtgagtgttttgttaggtgagtccatgtactttcgcttgcgtagcgccagattggagtcctgtgtggttattcatatacgtctatactacacaagtaggactcccatgatgagggccagactagttttaatcttttgtatgtcgttcacttcgctctacttggattattcgtataggatatcatcgtgttgtcgtgattatatggtacttgacaagcactacgctattagtgtaacgaggaatagttagtgtgtgactacagtacttcttctctatctatgttaggtttcttctagaaggtgcgtactggcactctcagctctctgtatatctgctctcttatccgttgcatactgtgctggtgacacaccactgccctattttctgtctttttattacatccataggtcgctctacggtgtgactgtctacaactgttatgttttcctagctaccactagaagtacgatatttgattattatatttgtatttcaccacctacaatgtaatgttgattcctcaagtatgaaatgtaggcactacattgaaatatgtatttcgctataaattgtgtctatagttgtacagcattttagcatggtatacttcccggagctatatgat

SEQ ID NO: 666885 - DNA, 350 bp, Homo sapiens
  misc_feature (43)..(43): n is a, c, g, or t
taattagaggatccgggaaggcttcttactcttgaggcaggtnagccctatggtacgtcgttcccctaggggctagtgtgggaccgcacagtctaagctaatttccagttagctatttaagaagagagcaggggtatgagccagagtggcggggtgagtagttgggcgggaaggatggttaggaacaggtaactaaaggtgacttaggtcaaagcaggtgaccaggggttggtgaggtcaaagcacatgaccaggatgagtcaggatggagcaggtgaccaggggaacagatgtgacctacggattaaacgtgatggaacgggttgttcactgaaaccatgaggaagtta

SEQ ID NO: 666886 - DNA, 590 bp, Homo sapiens
  misc_feature (5)..(5): n is a, c, g, or t
gaaancgccgtacgtgttgttctatcagcgtcgggatgacgaatgctccagcacatcttcgctcggcagtttccccggttctgatggaggggtgaagctgagcagctcacaccagggcatgggggatgaggaggcttacaacatggacaccaactgatgtggcctctgtgaccctgccaccctcccaacaccagcatcctcccccaggagaatatctgtggcactcttgaagactgctcatatcaatctcaaaccagatgaggacattacctccttttatgagaagaggaaggaaagagaaaccctgctttctgagaagggctctatgttaagaggctggattattttttcttttaaacgggtggtgagagaaaaacctgtggagctcaattgtgggctggggtttggtgcacagtggcatgtgtctcatggattccaaagagtggagaggaagaccctgcaatgagcatggtgcagccatgaagacccacctgcagggctgctccgaactgggttttggattctggtgcccacactgctcaccccagtagtctggccacagtaaaccaagcctccagcaaaaaaaaaaa

SEQ ID NO: 666887 - DNA, 343 bp, Homo sapiens
taccgtactcttagaagctgtatcagacccatgatttgcaccaggctttctcccattctatagactgcttttcactttcttttttttttttggagagggggtttggctctggtggcccaagcgggggggcaagggggggatctgggttaacaaaaacctcggcctccaagattaaggcgattctccggcctaaacctccaaggtggcggggataacgggggggggccaccacccccagctaatttggtttttttggcagagacggggtttctccatgttggccaggcgggttcaaaactccggacctaaggggacccacccacctggccctccaaaggggcgg

SEQ ID NO: 666888 - DNA, 176 bp, Homo sapiens
  misc_feature (140)..(140): n is a, c, g, or t
tgaccgcacggagggccgggctggttgacttctggattctggccgcacagagctgggcgctgagggactggcactgactgcttttagctcaaacgtggcttttagacagatttgttcatagcacccttctcaagctgccnctctccgcagctggctaggcacttccatgcttcctc

SEQ ID NO: 666889 - DNA, 1212 bp, Homo sapiens
  misc_feature (134)..(134): n is a, c, g, or t
  misc_feature (425)..(425): n is a, c, g, or t
gttgatcctgatcattgcatacaatactagagaatatcatggttatgccttgtagactccttccacatgttcatatcttcttataggtaaatagattgaaagtccttttgtctatctacgaatggaagtatatngtgacgtaatgagagcgaaaaataacgctgagtggaaccgcaagttaatttgtagtactccaagggcatagaattgcatctcatatccacgtgatcagttgtcgtgatagactatttgtgtaggcttctcctgcaatttagtgttgtaatgccttgtgtaagaagtacgttagagagagtatgcataattctatctccctagtaactgatactccaacttgttgttgcatatatcatagattttaaattcccggaatgggacaattaactcactacgcatgtacacctatngaaagattgatgcttgaagctactagttttcatgatttgctacaccactgatggaagtagtatacctgtgtaagtaaattgtgttcctataaaagtctgtgtattatatggaattcaagtctataatccatctatggtgaagttcgcatgttggacgtgtagccgagttatacatagtggaatatggctttatactcctattttcctaaataaccctctgttttacggacaattgtcggttaacgcgagattaaccccaagggatgtaaatttaattgggagtatactgatgtccatgtgctggtaaagcgtttcactggacactgcgcagctgccctcgaaacgggagataattcatctttaatgagtataggttactcggtagcatgcgaacaactttgttggaccaataggactgtgtgtagactctatcacgtattacgaataatttcactatgccttcaattttttcatccgtaagttgcctttcatcccggtatccacgcgccgtaagtaatttctaatttaccgatataacacccttttccataggtcatttccaatggttactctcccatgcgccggttcgttatggatcatccttttctaacctacccacttatgtaactggtcctgcacaatggctgtgctcccccggttcaaaagtgccttggacgaaaactacatggacatggtcactgcttttaatcaaacggctgaaccgaggtcctggaccatgtatcgccaaagatggcatgaagtacgcatttggaacaagcaggagaac

SEQ ID NO: 666890 - DNA, 928 bp, Homo sapiens
ccacgcgtcggtcgtgcgccgctgtaggaggagccgctgccgccgtcgccgtcgccgccaccgccgccaccgctaccgaggccgagcggagccgttagcgccgcgccgccgccgcctcccgcccgccccggatagcccgggcctcgcccgtcgcatccatatttttgaaaatctgtctatggttatgagttacctggcaatgaacggctgacctcgcgagaacgaatttgatcgtcaactacctccctcagaagcatgacccaggatgagttaccaagcctgttcagcagcattcggtgaacgttgaatctgcacaacttattcgggataaagtagcaggacacagttgggctatggctttgtgaactacgtgaccgccgaaggatgcagagagagcgatcaacacgctgaacggcttgaagatccagtcaaaaaccattaaggtgtcgtatgctcgcccgagactcagaggtgatcaaagacgccaacttgtacatcagcgggctcccgcggaccatgacccagaaggacgtagaagacatgtgctcacgcgttgggcggatcatacaactcgcggcgtcctcgttggatcacgactacaggtagtccagagggaagcgtagaaatacgggtgtgacaaaaccggtacggaaggcagaagaggcacctaccaggttccaatggttaataaaacacccagggttattcttgaaccccacaacagttttacgatagtaagcaacccaaacagtacaaaaaagggactcatcacgcacatgtacaactgcgaaacaccacgggttgaggccgttcaaaacaggtcgaatttggttcgccactgatcaccacaagcgaccggtgagctccacaaccagctcatcgcctgcatacactccgagaatatgatacacactcgaagcgccactaa

SEQ ID NO: 666891 - DNA, 266 bp, Homo sapiens
gaacctaatatctgaacatcagagaagctatctagcctagagatctagaagagtgccaagaatgagatgcacaagtatagattgtatttgagagatcactgagagaattgcatgtaacatatgcagtgatctctaccttatcattgtaggggtaggattaggaatttgagaaaacaactaaaaggtttggaattaattctccttgggatgggatagggagccacttgcaaatgagtaaaatgaatgctatacagcggtaaaagctt

SEQ ID NO: 666892 - DNA, 446 bp, Homo sapiens
tttaatagcttaaaatatgaattaacacccatgttgcatgcattccacatcatacactcggttctatatgctttgcaaatgcgtatcatgcgttcaatgcaatgacggcgacgctatcgtagtttagatcttatagatagcaggcttagatccgatcacttgtgtgcaggcttcatgaccctacggctcaggacctcatccgagcttagcctagccaacgtgcaacgctagtatatcctacatctcagcatctggaggttaatggtcctcggcgcacggcaagctccagtggccgtcggaggtaaggacgcgggcggaggggggtataaaatgtgctagctctgggcgctcagagcgggtgtaagagacactaaacattaaacagttaagtccggtgcacggcggttcgggtctcgagcgcgcctcttgtcccttctgacccatca

SEQ ID NO: 666893 - DNA, 128 bp, Homo sapiens
gggggggatgtcaacatgttactctaaaatatagctaaaaaaagattttgacataagaagagccttgcattttaaaacaaaaagagagagagatgtaatttaaaaagtttattataaattaaattcag

SEQ ID NO: 666894 - DNA, 343 bp, Homo sapiens
  misc_feature (27)..(27): n is a, c, g, or t
  misc_feature (36)..(36): n is a, c, g, or t
  misc_feature (39)..(39): n is a, c, g, or t
  misc_feature (64)..(64): n is a, c, g, or t
  misc_feature (75)..(75): n is a, c, g, or t
  misc_feature (77)..(77): n is a, c, g, or t
  misc_feature (139)..(139): n is a, c, g, or t
  misc_feature (143)..(143): n is a, c, g, or t
  misc_feature (247)..(247): n is a, c, g, or t
  misc_feature (326)..(326): n is a, c, g, or t
ctcctgggactcacctgtgtcctgtgnagcaggagntcnagcatcacctgggagcttgtgaganatgcagcctgngnctctccccagacccgctgcctgggaatctgcattggaacaagatcccctagtgactcctatncgtncttaagttggagaggcactgaattcttgttaatgcctcagctaaataaaggcttgaggagtgagaacttgaaggaggcagcatgaagctgcggaaagtggtgtnggcatctgatagaactgaaatcacatcttgccttttcccctcatcccctgcaagtacttgctgtgtgatcaattactcnacctctctgaacttcat

SEQ ID NO: 666895 - DNA, 1255 bp, Homo sapiens
gggggagagaaaccatatgaatgtaaagattgtgggaaatccttcactgtttcttcaagcctgactgagcacgcgagaatccataccggagagaaaccctacgaatgtaagcagtgtggcaaagccttcacagggcgctcaggcctcactaaacacatgcggacacacaccggggagaagccctatgaatgtaaggactgtgggaaagcctacaatagggtttatctactgaatgagcatgtgaaaactcacacagaggagaagccctttatatgtacggtatgcaggaaatccttcagaaattcctcgtgcctgaataaacacattcagattcacactggaataaaaccttatgaatgtaaggactgtgggaaaacattcactgtttcttcgagcctaaccgagcacatacgaactcacactggagagaaaccttatgaatgtaaagtatgcggaaaggccttcaccacatcctcacaccttatcgtgcacataagaacccacaccggtgagaaaccctacatatgtaaggagtgtgggaaagcctttgcttcctcctcacaccttatcgaacacagaaggactcacacaggagagaaaccttacatatgtaacgagtgtgggaaagccttccgtgcctcctctcacctgcataaacatggaagaattcacactgggcagaaaccctataaatgtaaggaatgtgggaaagcatacaataggttttatctactaaaagaacatttaaaaacttacactgaagagcaggtttttgtatgtaaggactgtggaaaatcttttaagaattcctcatgccttaaccatcacactcaaattcacactgatgagaaacctttctaatgtaaagaatgtggggaagctgtcagctacactcattcacgttgaagacatgaaagacctctcgttctccagatgtccatgacttgaggaatgtggctaggcaatcagcatctcatcacaacccggcaggcaggaactcaccctggagccctatgcagcagacacagagaaagccctcagtgttctctaaggtcttgctgaatatggatggtatccagtagagagaactctattgatgtgtgatatgcgagcagcattgttgctgttctgctcagtactttgatgatcccttgtgatctcacaatgaagaaaaaccttaggagggtgagaattgttgggaagtcattttttacattacatctttcctcaccctttagtaaacgtggtgattgac

SEQ ID NO: 666896 - DNA, 756 bp, Homo sapiens
gggggagagaaaccatatgaatgtaaagattgtgggaaatccttcactgtttcttcaagcctgactgagcacgcgagaatccataccggagagaaaccctacgaatgtaagcagtgtggcaaagccttcacagggcgctcaggcctcactaaacacatgcggacacacaccggggagaagccctatgaatgtaaggactgtgggaaagcctacaatagggtttatctactgaatgagcatgtgaaaactcacacagaggagaagccctttatatgtacggtatgcaggaaatccttcagaaattcctcgtgcctgaataaacacattcagattcacactggaataaaaccttatgaatgtaaggactgtgggaaaacattcactgtttcttcgagcctaaccgagcacatacgaactcacactggagagaaaccttatgaatgtaaagtatgcggaaaggccttcaccacatcctcacaccttatcgtgcacataagaacccacaccggtgagaaaccctacatatgtaaggagtgtgggaaagcctttgcttcctcctcacaccttatcgaacacagaaggactcacacaggagagaaaccttacatatgtaacgagtgtgggaaagccttccgtgcctcctctcacctgcataaacatggaagaattcacactgggcagaaaccctataaatgtaaggaatgtgggaaagcatacaataggttttatctactaaaagaacatttaaaaacttac

SEQ ID NO: 666897 - DNA, 669 bp, Homo sapiens
tttgcgtctaatcattatgaaagggacttttttattccatgccagaaaaccttgttcacaattggagagcagttttccgtgttgggtcagtgtggaaaagccttcagctctactccaaatgttgtttcccagcaagcatgcactcgggacagatctcttgactacagcagactgaagagcaggtttttgtatgtaaggactgtggaaaatcttttaagaattcctcatgccttaaccatcacactcaaattcacactgatgagaaacctttctaatgtaaagaatgtggggaagctgtcagctacactcattcacgttgaagacatgaaagacctctcgttctccagatgtccatgacttgaggaatgtggctaggcaatcagcatctcatcacaacccggcaggcaggaactcaccctggagccctatgcagcagacacagagaaagccctcagtgttctctaaggtcttgctgaatatggatggtatccagtagagagaactctattgatgtgtgatatgcgagcagcattgttgctgttctgctcagtactttgatgatcccttgtgatctcacaatgaagaaaaaccttaggagggtgagaattgttgggaagtcattttttacattacatctttcctcaccctttagtaaacgtggtgattgac

SEQ ID NO: 666898 - DNA, 148 bp, Homo sapiens
  misc_feature (20)..(20): n is a, c, g, or t
  misc_feature (37)..(37): n is a, c, g, or t
  misc_feature (73)..(73): n is a, c, g, or t
  misc_feature (133)..(133): n is a, c, g, or t
aaaagacaaataattgtagnagggaaggcaaagcagnattcttgggtgggtgacattgggtgatactgttagnagggacccctacacatcttttgtgaaggttgctaccctctgaaatgattgcccgataatnctttgttacgatgcc

SEQ ID NO: 666899 - DNA, 252 bp, Homo sapiens
cgtataatctcctcccccaacattttttaaaggaaaatggattatgcccaaagattaaatgccacttaagtgtcaaaaaaaaaaaaaaaaaacccgatttactggggtaaaatcaaaagaaaggatatccaaaacagggggagaagagatctgcaattcgataacctcaagctcgggataattctgtgtatttcctaaaaaaaaattaataagatttacataaccataaagaaaccaattactatttgtaaa

SEQ ID NO: 666900 - DNA, 102 bp, Homo sapiens
ggtgtggggcgctgcacaggtagggctgcatgtgcctatgcttgtgccagtggcacagtgagctagagcttgtgattgcaacctgatggatcctggtgctgc

SEQ ID NO: 666901 - DNA, 332 bp, Homo sapiens
catgtgtgccatgtgcagagagagttaattctacttttgagagttggaggaatcccaggtgcagaaaggcagacatcacatgttctcactatatttgcgggatctcgtattagtccattttcatactgctatgaagaaatacccgagactgggtaatttataaagaaaaagaggtttaagggactgacagtttcacatggctgtggaggcctcacagtcacgatggaagatgaaggaggagcaaagacatgtcttacatggcagcaggcaagagagtgcatgcagaggaaccaccctttataaaaccatcaaatctcgtgagacttattcac

SEQ ID NO: 666902 - DNA, 280 bp, Homo sapiens
  misc_feature (168)..(168): n is a, c, g, or t
tgctgtatattacgctgttatgatgatagcagccatgatgccttgggaaaaagcctgtctttaggctcagaaaagtcagggagacacatgtagccagcagaaagctaacacagattgggcagatttgcccgaatggaagtctaacacttaaataagcattctcttggnccacgtgagaaactaccgttgtcgtgggtattaccctacaattaccatttgtattacatattaaattaaactcagcattaaatatgcttgtataattacgctgttactagat

SEQ ID NO: 666903 - DNA, 374 bp, Homo sapiens
taagaaaggagcgctccaggtagctcgtcccatgcttcgcggctctgctgcaatacaggcttcaggccacggccatgggaggcatagtccagaccctcctctcccccttctcgggctcctgaggcccggaggctggaggagggaggctcagggacccggaaaagactggatgccatggctgagggaactttggttctgtggacaggcggtggaatacgtgtccctccaaagttcacgtgttggaaatttaatcgcaatgcaacagtgacaagaggtgagacttttaagaggttattaggccatgaagactctgccctcatgaatggattaataccattatctggagagtgatttcattgtcaccagtagtgggt

SEQ ID NO: 666904 - DNA, 279 bp, Homo sapiens
agcgggcggtcgcgggcctctcccggagaagatggcggatcgcgcggagatgttttctctctccaccttccacacaactatacgagcagggctgaggcctccccaggacataagcctggaagaatttgacgaccgaacgatactgatctgacgatcacagactgactgtggcctgggcctcagctacgactacagagccactgatgagaaggacaagacactcactgggggcgctcggagccagaccggagaccgccaactgagaccagcccaggatga

SEQ ID NO: 666905 - DNA, 724 bp, Homo sapiens
atagcagagatcttagagatctcaggagctgggctccaatttgccagccatttccttctctctctgagtctccattcactaacatgtgggattgatggagactgataaggcccttagccaggccacctagttcttctagatatttagctgatgcctcaaatgaaaaccctttgtgctctctttctccttggaaccttagcaaattgcatgcaatcagtgattagtttgtcggttgccacgttctgtaacctcatgcacagagcacctgaaggcaattgccagagcacttgtcgtgcctctttcgccagtgtaatcatctatgcaaggatccaatatgatacttgtgtttcactgtgttcctgtgcgaaggctcagatttctgcataggtctattacgttcacacggaattaaaaaggctaaagtgacttgtttgtaggaaaggggaatttcataaggcagaacagaatgctatctaataaattggccttgtatttttactacatacgagtgctaaatattagtacagaagagtgtcgttggctctgcaagattaagtatcaggctaattcctatgttttggattcttggattttgtaaataatctgcatttacatttgaatattcaagcgatttatatttacctggttgaggggttccaaatggtggataaatcccaaaatcctaaatttttccaatgagaatttgcttaaggggtgtcacggt

SEQ ID NO: 666906 - DNA, 521 bp, Homo sapiens
  misc_feature (42)..(42): n is a, c, g, or t
  misc_feature (106)..(106): n is a, c, g, or t
  misc_feature (154)..(154): n is a, c, g, or t
ccaaattcatgcacccggtcactaaggcatctgcagtcatcnactaaccactgatctccacctggagaaggctgtatggagactacaccactgcacccacctagtnccagaacaactgcactctgcccaaccgatgccctccagcctgtcgtcnaggtgaaagtttttccctatgaaagtcattctctgaagtttggaagaggagactgtacccagaagatgcgcaagcattaatgtgggaataccagaaacatgaaaatgcaagggaacatgatgccaccaagggaacatgagaatttcccagtatctgacccccaaatttacagaaatttatgaagttattgaaaaggaatttaaattaatgatcttaagaaaaccaagagagacaaaatagtatacaaatagaaaattcaatgaaatcagcaaagtaattcatgatctcaatgacaaattcaacaaagaaatatatatcataaaaaagaatcagaaatcttgaagccaaagatttcaatcaattaagc

SEQ ID NO: 666907 - DNA, 420 bp, Homo sapiens
ggagcttatgtctctggaaaagggggcgggcacagcatatcccacctgtaatcctagcattttgggaggctgaggcaggtggatcacctgaggtcaggagttcgagaccaccctggccaacatggtaaacccatctctacaaaaattagctggacatggtagtgagtgcctgtaattccagctactctgaaggctgaggtgagagaatcccttgggcccaggaggtcgaggctgcagtgagcgatagtcatgccactgcactccagccttggtgatagagcaagaccctgtctcaaaaaaaaaaaaaaaaaaaaattttaattcagagtttttattccccttgttaaaaacctttaagacccccaattgggccttccaatatgattcgcaaacacccttttcgggggacacggaggccca

SEQ ID NO: 666908 - DNA, 253 bp, Homo sapiens
ttcggccaaagggtcgcaggggtaagcaacaactgctcaaaatttttttttcttttgagacagttttgctcttgtcacctaggctggagtgcagtggcgtgatctcggctcactgcaacctccacctcctgggttcaagcgattctcctgcctcagcctcccaagtagctgggattacaggcatctgccaccacacacagctaatttttgtagttttagtagagatgcggtttcaccatgggtaccgagctcg

SEQ ID NO: 666909 - DNA, 173 bp, Homo sapiens
tacaaaagtttttttttaaatgtacaaaaggttcaagacaaccttttatttcagtttttcgtgggaaaaaatttttttgcagggaattaaggggtttaaattccgtttaaataaagggttaccatttttttaggcccaaggaacagtttttttttttccaaattttttaattt

SEQ ID NO: 666910 - DNA, 327 bp, Homo sapiens
  misc_feature (119)..(119): n is a, c, g, or t
  misc_feature (170)..(170): n is a, c, g, or t
  misc_feature (231)..(231): n is a, c, g, or t
  misc_feature (265)..(265): n is a, c, g, or t
gtcattttctacacattgctggcctggttctccttggagctgtggtcactggagctgtggtcgctgccgtaatgtggaggaggaagagctcagatagaaaaggagggagttacactcanggctgcaagccagtgacatgtgcccgaggtctctgagtgtgtctctcacangcttgtaaaggtgtgagacagcgtgccttggtgtgggcactgagaggcaacgagttgttcncgtgcccttccctttggtgacttgaagaaccctngactttgtttcgtgcaaagggcaccgtgcattgttgtctgtgttcggtgtagcaaattgaaa

SEQ ID NO: 666911 - DNA, 185 bp, Homo sapiens
atcaacgcacaactaggtggttgaatcaattaaaaggtgtgtggttggatcaatcaatcagtgggcatgcatagatggacctacagtggttagtggcatggaccaggcaggcatggcatggcatgtgcagcagcccccagcaaggaccatacaggcaacagcatggggtggcatagcattgcatg

SEQ ID NO: 666912 - DNA, 910 bp, Homo sapiens
gcggctctcgcttcccggggttcttcgagccgggccccttccgcgtgggtgagtgaatgtgagagtcagggctcgcgcgcggcgccgccggctcgctgtgcggcgctctgttaaggcggtgggttggcgggcgcgctgcgggtcagaacgcatagggactgggcattgagcggctctgtgcgcgctagagccgtcgccggaagtcggagccgggagcctgagccgcgcgcgtgtgtctccgctgcgtgccgccgatggcccccggggtggttctggggaccaatagattcctccggggtggcttcccaggaacggcgggggctcatcttgccgcctgccggtcagacggctttgacgggaagaatgttccgccggccggagccgccggcccgggtatggaggggattcgtggaggaagcccattggtccgggccgagcgtagcgtcgtcctggggagggggcagagaggacccaaggagagggggttccatgggggcacgacaccggagaagcgtcacaaaaaaatgttgggcatccggggttacagcttccacaagagggggagtgggcgacttcaaaagcgggattgaattggacttatggggacaaggcgagttaacgttgttggagtctaccaacaggtggaagggcgcccatgtgacatgtgcaattattaggtgcggcacaattggttcataggatgtccccttaggagtttaaccccgccagtgttgtaaccactacaaagtggggccccccacttttcacacaagtgtggtggggcgagattatgcacttcacccagattaaatatacctgttggatggggggccgattgaacagccggcttaggcaatgtggggcgccccacataacacgcggggggaggttagagttttaggaaccacaa

SEQ ID NO: 666913 - DNA, 561 bp, Homo sapiens
gaggagaacgacggaggagcaagggcccaatcgcatggcaaaagcaaaaagaccgggaggtggaaaaccggaggaaaaggggaagggggaaggatggaaaagagagaagaaaagaaggaaaccaaggggggaaagaaaaaggagaaaggggaaaaaaagggggacaaagaggaaacggggaagagcaaaaagacaggaaaaaagaaagggaaagaaaagaagaaggaaaggaaaaagagaagaagagagaagaagggaaaaagggaggaaggagagaaaagggagaaagggagaaaagagagagggaaaggagtagagggagaagaggaagagagagaagagaaagagaaaagaagggaagggggcgaaggaacaaagagaggggaaggggaagaaaaggggaggcaaaagagggaaagcgagaaaagagaagaggaaggagaggaaggaaaagaaggggggaaggagagagagaggaagggaaagaggacaggagaggagggagagaagggcgaggagagagaaaggggtgaggggatgagaggggggggagatagaggg

SEQ ID NO: 666914 - DNA, 348 bp, Homo sapiens
cacataactattaatatgatagcaccagaaccatggtttccagactgcctcaaaagtctacctacctggacctggcgcggtggctgacgcctgtagtctcagcactttgggaggccaaggtgggcggatcgcgatgtcgggagttcgaggccattctggccggcatggtgaagccctgtctctgctgaggatgcaagaattggccgggggtggcggtgtgtgcctgtcgtcccggctacttgggatgctgcggcaggagaatcacttgaaccggggagttggaggttgaagtgagccgggatcacaccactgcactccaggctggtggcagagcgagactctgtctca

SEQ ID NO: 666915 - DNA, 177 bp, Homo sapiens
tatcatgacagaaccggattctagaatcattatttaaatgagacaatcattttaagttttaagataacagaagtgaccaatgtaatttcacaaacacctaaggattttctggttgatcaggttacttgtgcatttttactgatatgtcctggagtgaataggctgtgcttgttcttg

SEQ ID NO: 666916 - DNA, 337 bp, Homo sapiens
aaagttcaagatcagcctgggcaacttagcaagaacccatctctacaaaaagaaaaaaaaaatgcttaatgagctgggcatggtagcatgtacctgtagccctagctactcaggaggctgaggcaggaagattaccaaagcccagcagtttgaagctgcagtgagctattgatggcaccactatactccaacctggggcacacagcaagtgcaaaaccctgtcccgtgcaacaaggagcaaggagaaggagaaaggagaagaagaaatgagaagaaaggaggaggaggagcaagaggaagaagaaaaaaaaactatgccgggcgcagtggctcacaa

SEQ ID NO: 666917 - DNA, 655 bp, Homo sapiens
tgaaaaaaaagggaaaacaaaaaggaacccccagagggaaggggggtttccccaaaaaattgggttttttccaaaaaagcgcggtcccgggaaaccgggggaaatcaaccggggtcccgaaacgcggttggtgtgtgcccctcaatagttgggatgtttttggggagcgcccttgtgctgtgttgcgcccggtattttgttgcgccgtggcgcccgcaggggcgggcgctgggggggttggccgcgcacactattcgttttgccaaaatgtttgcggcgcgacccccccgggggaaaggggtcctctttctccggggcagctctgtgtggttgtgggcgccaaaaaccacgctatactggtgttctcgccccgaaaaaaggggttccgggtgcgcggctggcggagacaacaacaatttcttggggcggtgacaacaccaaatcggtgcgtagacaaaacacaacacaaaacgggggggcgggcgcgcgactaaaaaattaccccccggggagggcgccaaaatcatagactggaccaccaagtgttttttggcacaaccaaggagcggccccctaaaggagggaccgtcataaaaacgaccagcggacagcggggcaggcttaaaaaacaaacagagcgggaggggacaaactg

SEQ ID NO: 666918 - DNA, 215 bp, Homo sapiens
gatcagctcggcaccgattcctaattacgcaattacattttcatttggccaaagttaggaaggtcaatttaataagcggtttgatagacagggttcaaataatcttgccaaactagaataataggcctaaacatataaattataagcatttatttaatgtctgctctctgctagacatagaagtattgtacatgcactgtccccgtaattagggt

SEQ ID NO: 666919 - DNA, 126 bp, Homo sapiens
tcctaacggggatccaggtttcaatcagattgaagtcgaggctcatgacaacatcgtgatctctcctcatgggattgcgtcggtcctggggatgcttcagctgggggctggacgcaatcccatggt

SEQ ID NO: 666920 - DNA, 1732 bp, Homo sapiens
gcagtgagcaccctcatcggatgggcactgccccatgcttctgagcaaaaactgcaacacaaggaggattttgtcatgtggacctgagactggacgagaagtgcctcagatggagaccagggacgaggaactggaggagtggaggagccacagcatgaggacttcccaagactgtccagagccatcacacacacccatgagtgctatcagacgatactgacgactaacatgacggatgcatggcgcacacaatagacacgacattaggagaaaggtagagagcatagggacctgagaaagcaccacccatgagagaccagggaaacagcaacataccacgtcacgcaggacggcacaaaccttggtactcctcatccacatccacactaatggagtgagcccaacaatggcattggaccaagtggaccacgcatcagatataagaccgatgagcccactatccgtcgacacaacaaaagccatgacccatgaatggaccattgaaagtagacacaagcaacaacaaccaagacaagcaaacagaaacaacaaacaaacatttactagcaagcaacacaagatcgccagccagacacacagcagttgtatgcggaaccaatgcgtacgctatgcggccaatcgcaccggacaccctagaggcggacctagggaagagcagaggagcgacaagaaaaaagaacgacaagcggaattacaacggacctacaccacaagaaccaatctcattatcacgttacaacaccattaccatgactaacatatcattatacatacactctataatgaacacaaacaataaatcagcacacattacatatgaaacatatctataacaatatggacacaacaccatctgaaaatgaatatcaaaccacacatccaaccattactaccactactaaatagcatctattagaataattatacatcaacccatcaagaacatagtaacaatactaacaaactatttataaatcacagatattcacacccataaacacttgctcttagtcacccattagatatacaatctcacaaccaccactcactatagcacatacacacataaaaacagaaacacaacatgcaactaaatctctctctattatataatagctgaacataaagatcaaagacaacaagaagacaccacaccgacactgctacaagccacacctaaacgtgaagacgcacaacatacgaatccgtaagcaaacaaacatctcatattaaacaacaaacatatacacaaccccacactatatactcacactaccaacataccaccacagaaatttaatacacactagacaaggcgggagacgcagtgaaagcaccaaaaggaagtagaagcacaaccagcaacaaacacatacacctgatacacaccatatatctcactcacttcaccaagatacaatcaacatgcatcacagatatatgagaaacaccaacgcgtacaatacacatactacactaagagagagataacagccacaaccaacactcacacgtcgcaatatcaagttagcactcatcctcatgaatcgtcaccacccagaacaaagaaggcaacaaacagtagaagacacatgactaccgatagcatgaagatatacatcatagactaagcatacatcacacacaataaatatacaaaccaaatctaacacagatatcacacaaacaccaacccctatgataactccca

SEQ ID NO: 666921 - DNA, 385 bp, Homo sapiens
gatacatccatggggtaaaaagtgaagagctgaaacacacattgtgcttgctgcaccattcaatttctgctatgttaaaccgggtgattaggctgccagtgtggcaccatccagcacactgggaattgtgtgccactccatacagtgctgctggatctgttcatgctgctctcctgcagtggaatgccagttcccaaagaaccatgctccaaataaacaaaagagaactggagcacgtcaagaaaaacttcagcaaaggagagggtatctcaagtgagtctttcctcattagctggacttggctgcagaaactgtttggtttggagtagctgtagtggttgggagatggtccatctcttggtgcatcaaaaatgtatgccaggca

SEQ ID NO: 666922 - DNA, 221 bp, Homo sapiens
acctgctatttactccatggctagatatttgtatttttagatagagatggggtttcaccatgttggtcaggctggtcttgaactcctgacctcaagtgatccacccgccttggcctcccaaagtgctgggattatagacgtgagccaccgtgcctggcctatcatcttgtttttactttttatctgcattacatgtgtagcaaggctttgctctgggtttg

SEQ ID NO: 666923 - DNA, 246 bp, Homo sapiens
tgcactcttgtgatgttacagacatggtagcggctgggaaagatctccctacctattacattttctcttctccctcctacctaccttattctaaaatgtgcctccacagatgggcagggctcttgtagagagatccctggcccatgacaggagatgccaaatctaatttatctcactgagggcctattgagaaaaacgcttctgggccaggctcagtggctcatgcctatataatcccagtacttt

SEQ ID NO: 666924 - DNA, 427 bp, Homo sapiens
agtcttctagagcagggatcccatcccccaggtcatggactggtactggtccatggcctgttagaaaccaggccacacagcaggagatgagtggaaagcaagtgaaacttcatgggtatttacagcaattccccgtcgctcgcattaccacctgagctgtgtctcctgtgagatcagcagcagcattagattctcaaggagcacaaacccttttggaactgtgtgtgagggatctaagttgcgcatttcttatgagaatctaatacctgatgatctgttgttgtctcccaccacccccagatgggaccatctagttgcaggaaaacaagctcaggctcccactgattctacattatagtgagttgtgtaattatttcattatatataacaatgtaataataatagaaataaagtacataataaatgt

SEQ ID NO: 666925 - DNA, 335 bp, Homo sapiens
tagacagcccccccccaaaaaaaaacaaaaaccacccagaccaaccagttttaaaacccaggcatcctggcttcaaagctggggcatttttcaaattcctacgtttcaagaaaaatgaagccagaacctaccctgccatcgggcccttagcagttcctatgcctactctcgaagtagcactgaatcccgccccccattttcaatgtgtagcccaagggatttggtaccttgataggactaagaaagggaaaatggccataaataaaccaggtgattattaaataacagagaataggactattcatccaaacggcatttcctacagattaatccaa

SEQ ID NO: 666926 - DNA, 1259 bp, Homo sapiens
ggcgcggcgcgggacgaatggcggctgggttcaactaaagggtgcaaacgaaaacatctgtggtctccgtggttgttaaacgcttgcacgaaccgtggaacctctggcagtattacacggagactttctcgaccagaggaactgccgtcctgcactggacacgagaaccccttggtgcacttcagaaccaccacaactgtcacacatcggcttcaccttagctaccgcagcactggctttctgcctcttcgctcgaacgcttggcgcgcacctactacccgctacatctgctgcgagcttccaccggcccccaccttctgcggccaccatctcacccaagcactgccccctgcactcaccccgactcccgcttgctctccctacactgtgcgaccctaccacgtccgctgcgtgctgcactccgagaatctccggtcctggcaccttcctgcgagcaccggaggccccaagctgggtctcgccctgctctcgactctgccggagtgctcctctgcacaacatctccgcgcggactcaactctcacgcgatctcacgcgtctctttgcctcgccgctccctctccccacggagtcagcctcggctctcttgcgcgcgcttctactcccttgctgacgtctccactttttggcccttcagccccgctatcgcactgcgcccccacccgtctgcctgcggcggctgccgttgcccaccacttgtctgccctccgcgccctcgcccggcgctctgttacgctgcgaccgtcgtttcgccaacgttgtcgtctcgttggcgagcgtttccctcgacttgctcgcttggcggcgactcagcctcgacgtgcgctagccccgtgaccgctttcgcctctccgcgcgcgaacgcggaccgaccgcgttcctctcgccgcacgcgtaccttgacgcacacgtgtcgctcgcacggctgtgcgtctcttttcccctgtggcctgggcgctctcgtttcgaccccccttcttgtgcctgctaattctcgttatggacccggctgaacttggcgcagcacgggcaccgggcgcgtttgctagcgcgcgcaccgtggggtacccccgctgttcgggtacgtctagcgtacgcttgggggctttgcacgcgcgctgggctccatcgtcggcccggtgtgggccctgcgccgctctatgcgccaccggctggcgctggttacgcggctagcccctcgtcgtgcgcccctcagcctcccggggtctcggcctcgg

SEQ ID NO: 666927 - DNA, 1117 bp, Homo sapiens
ttgtgctggtgtctgggagcaagagaagggggtactatgggagggcagagtggggaggggagtccatgggcctggggccccaagccggggcgtctgagctcccgcaggctatgagccaatacctcagtggcaggggcctctggcttcaggccccgcctggctgacattcgtgagcccccctcggagggccccgccacagccaagcctgcccagtctttcctctgggcttgatccgcctagggtgattttcgtccaaggccatagggccaggagagaggccctggctaccctgtgctgtgggtgctcgcggcgaaacgcccttgcgaaccagcgtcagtaagctgcaaaattgctagtaccatggcgcggtagaggtctgctcgtagccagggtgaagtggagcgatagacgtgtagaggccggttgatggcctagggcttccaagccgtctggtgctgtctcgtggactcctgaaccgtgtgtgtgcgtgtgtgcccgttcgtgtgactttcttactcaccatagtggttgaacgaagagggaaaacggtggagaattcgaatagacgggggttcaatatccacatcgtcaggtaggtggacggggacgctgccgtgccaattgggttgtaatgaccaggttctgagttatccggatggccgtggttgcctaaactactcgcatcgccatgtagctcgtcgcacgacctaactggggcgatctgggctggttgccttggttgccattgggccaagcgcccaagtcctcatgcctgcaacaggggggcctgtgcacgccccatgggcccacagcctcgttgggaaggcctgtgtgggccctgggcacaagagcgaggagccaggggcttagctcactgaagtggccccagatggcttcattagccctggtccccaagtttttggaagtgcgaatgaatgggcctgtggtgaaacaaccccggtacaaaggccagggccaatgagcaatgaggtgagacagaggaaatagacgttccgggggacaatgttcaaacatcaaaggagtggaagaccgggacacaaacccaaagagcagggaaaaaacacaaaggaaagaaggacaaaaggagaggacacag

SEQ ID NO: 666928 - DNA, 231 bp, Homo sapiens
gcctgtgatatgatctcaagaaacggtctatgcctctcagatgaatgaaacatgagagggaacctcaaacttgcattaggaacacacgtggagtataccaaaccctccctctcaagcagtaagtcactcactcctctctcttccagatggcaaagcgaccacctgcaacaaaacccacgttatataaaacacgtgcagaagtgttaattgtacctccctttccaacaacag

SEQ ID NO: 666929 - DNA, 319 bp, Homo sapiens
cactgaagaagtagagacccaggtcgttccacaccaactccagaacttataacggaaaagcctccagatgacactacggccctgcccctctctttggcccaccactagaatcagcttttagatgaacagaagacagaagttctttcagatcacgcctgagatatggggttcagtccaaccaatgcatccaagacatggagtcgccagagtttgtcatcgttcgtgtagcccattgtggaatatctccaccactgcctctgaaaaatgtaccagttaccccaccctcgaacaggatctctctttataattggaccaggtg

SEQ ID NO: 666930 - DNA, 1244 bp, Homo sapiens
ggcctaattctcgacaatctgtaactatccgctcattctgccgtcgtgtttctctgccgggtccgcacatgtgaatgatagagatcgccgctctgatcattgacaatgggtccggcatgtgcaactgctggttttgcatgggcgatcagacgctctccgagccgtgtttccttccatcgtcgcatggcgtccccagacaaccaaagggcgtccatcggtagcgtgcagtagggcccacgaagtgactccctacgtaggacgcacgatggcctcagagactacgctgtcggtcctccttgaccgctgggattacgcgccgatatagagcgatggccatcggtccacgcaaagctgggacgacgatgcgagaagatctagggaccaaatgccttctcacgaacgcaggctgccgcgtcgtccccgtggagcgtagcacccaatgtgcttgctgcagctgcagcgcaccgcgctgaaagcccctaaaggcctacagctagagcatgaagcatcgccactccagcattgcattgtcctggaatacccgtgtcataggaacgccgcgcttatcgtcacagtgggcccgatccaaggctcgtggctgtaccctttcatctccctccttggtgggcgcaccaagtgcgcagtctggtccatggtacttcctgcgaggaccggcggatccagcgcgacacgtgctgccccatcgtagctcacggtgccttacgcttgcttctctgccgacggtcccagtgcctgcgtctctggaccctggatttgtgcccgctcatcttcgaccgggatctttgcatttcagagaaggaatctcgtacagcttgacgcagaccggcatacctagcgtttcgactcgagcccaactggtcccgatgccggggacattaccggttgcgacgcactattcgaagggacgcaaagcctggttgccgtaccgtcagcaccctgggacccttcgaagcgagggagtattgaggcgacccagcccggcagttccttccggtacatttcatctatggcacgaacgacggcttacgcggaggcctgcgcccggatgcgctcgcccgagttccgtctacgccactttggcagcgacttgacgccggggtaccccgaggtgttcccgggatgggccgccatgtgtcccacgcccgttcgcgttccgtgcgcgtttcggcaactccttgcggcggcgctcccaccatgcacgcgccatttccactttccacttc

SEQ ID NO: 666931 - DNA, 283 bp, Homo sapiens
ccaaacaaaagctttgaaagtggtgacagaaaaatttccctttgagctagacctctagatctgcctcgcacagaaatacattaagtgggctggtctcatgtagtccccccatcattgcaaattacaaacctaaaaatacagaacatcagcggagaagacaggagagcttctatattccccccatgtcgtcctctccagacactgcttccttcctgcactccagcctgggtgacagagcaagactccatctcaaataaataaataaaaataaaaattcccttta

SEQ ID NO: 666932 - DNA, 553 bp, Homo sapiens
  misc_feature (290)..(290): n is a, c, g, or t
  misc_feature (448)..(448): n is a, c, g, or t
  misc_feature (487)..(487): n is a, c, g, or t
  misc_feature (529)..(529): n is a, c, g, or t
tggagaccagattctaatacgtacaacacagatttatacatactttgtttataaaactcgaaatatggatatgaaacagtctcatcatggttttagctggagcttctgaatttgaccctcagtataataaagattccacaagcaggccaacagataatattttaataccacagctaatcagggaaattggcagcataaatttaaagaagaatgaacctccactcacctgtccatacagcctgaaggcagagttcttttactgtctcatcttgctagaatgaaaattcctngagacactggaagaagatcaacagttcatgctgaaaaaatgtcctgctctgcttcaagaaatggttaatgtaatctgccagctaataataatggcccggagccgtgaagaaagggagtttcgtgctcccactttgggcatccttagaaaactgtatgnagctttcccagatggctgttcaggggctccagcagtttnagtctccccctctgcagctccctcatattggagaggacatcntaggagagtttcggatccttaaaa

SEQ ID NO: 666933 - DNA, 999 bp, Homo sapiens
gagaaacaataggacggaaacgccgaggaaccctggctgaggcggcagagcatcctggccaggaacaagtccaaggagccaagacgagagggacacactggacaaagcaacagacatgaaagacgtacgtgagcctgctggactccttctgccatccacccatctccccgccatctgtgcccggaggatgagcccagccttcagtggccatggatgtgagagcccctgcgccaaaggcgtccttctggagcccttatgtccaccaggtcggggggcactcatgcgtgctccgattcaactgagacaaccctgtgcaagcccctgtgtcaccaagggaacatcagttctacgagaccctccctgcgtgagatgcgcaaattcactcaccagtacagaggtgtctcttgatacacgagtaagcccatagtcgccccatatggggggacggtgggggacagactttggcgaggattatacccaggaaatacttgcacgaactgctttttggtcctccaggaacaccagaaggcccgggtaactcaaggagcaaagaccaaaggacaccttgatgacgcatggccaatcccatgccgcgatagaaagcccatagatacactatgcccctggtggagcacaggggacagatgatgagacatgacttaacaccgactgcccgagctcccataagacaacccaagagcaagcggaggaccaacacaacaggaaaaatgtacaaaccacacatcctgaaccaccagcgatacagcactgacagacagggcgaaggacatgcagacagcatcagacagtagaatgcatgggagagcaacaaagacagagccaagcgaaaggacaaaggaggaacaagccaacacacgagaaaggaacagcgggacgcgccaagaccaaccgcgaagcgacaacaacaccccaggtagacgcaacaccaatccccaaacacactagctaacaccaacacatgcaggccaggcaaagagg

SEQ ID NO: 666934 - DNA, 112 bp, Homo sapiens
atggtgagctgagatctcgcactgtagtccagcctaggtgacagcaagaattcgtgtcaaaaaaataaaaaataaatgaagatcttattttttaataatttcagatttacag

SEQ ID NO: 666935 - DNA, 328 bp, Homo sapiens
tcagacgtatccctttcatagatggcacgcgaaagctcactggtgttagtccagagcgggaacgcaaagaacctggagtgtgatgtccaagggcaggaggaatggacagaagcatccagcatggggtaacgacgaacgccagaagactcagcaagctagcttacctactttcttctgcctgccttgttcttagccgcgctggcagccgggttggagggtgcccacccctcactgagggggtggatacttccatctcctagatccacctgactcaaagtttcagctctctctgaggagcacccatcacaaccagcaaacaaataccaga

SEQ ID NO: 666936 - DNA, 127 bp, Homo sapiens
caggattaacgtcagcagagctcattcacccagtctgtcagactaagtctatttgtctctgtatactactacaactatcacgtgtcgagcacatggcaggtgctcagtaaaacagttctaaatgggg

SEQ ID NO: 666937 - DNA, 1915 bp, Homo sapiens
gtaaacttttttcacttaaaaaagtccctccccccacctcacagcatatgaatgcgttctctactgagtaaatcaagcctgagctttctcatgtgggctcctctgtgctccatccacttctctcttggaagacagggtgtctttctgccttccaaggctgatgcctctcgtccccctcccaggggctgcaccctcagccacccccagctggtgttttcagtttgcttctctgataggtggcctcttttatcttctggtttgttgctgctgccttctgaatttacaggcagcctgtggatccttctgttggtatttttctctcctaggtgaactcttggaaggaggtggtcggcattcactgttacctcgggccctttccaccttggcactgctcatcatgctatgatttggctcctatcctgcccactctaataaacaatcacgagtttggcagttctccttattgccaaatttaatggtcatttacaactcgttttcctgaactcttcttctttttttgacaccatagacgtctctctctgtgtcactttctgatttttcttccattgattctctgacttggctcctgaactggttcctgatttctcctgcctgtcactttagttgttccctaagagttggttcttcacctcttaacttttccaggacttttgtttggaatttgacactgttgactatacacctctttcttgaaattgtctgtcattcatctccatggtgttattcctttctggttctccttgaaatgtgtcttgatttcagtggctcttgaagacttggtgggaactttctatttccttagctcccataatgctaatttttcctggtacttcttgtgaaccttttcttttttttagccttcagtagattctaaagagttgcactgagggcctttaatgtggaactggctcaggctggttaaagactcagtctctgagaaaacaattggactgatgcgaatgcagttttggaaaaaaactgtggaagatatatactgtgacaatccaccacatcagcctgtggccattgaactatggaaggctgttaaaagacataatctgactaaaagatggcttatgaaaatcgtcgatgaaaaatcagtcatggagaaaaacatattaaaataatttcatggcactgatgttaattctagtctattagttttataaaagttaggattcttatttaggaacaacaggaaatgactgttaaggagaaaatgaatttattgaatgggatgtcaagtagctcacaaaattgagaagttgccgtgggactagggtgccaagactgctgagattctggcagaggcactgccattggcacccctggcccagacagtgtctgctgtgctgtccctggaagctggagctccaacagggaatattggtgtagctgtgcataggccataagccacacttgagccagtgggcagggagaaggaatgtcattctcccttcaccactggggaaggaaaggggaaagggctcaagttatcataggggcttacatgctgagcagctataacctaggtgttcagaacacctggaagatgcatttatttaggggtcacaaatagtgaaattaatatttgaggaatatcagtcacgtgttgtgggcttttatccttaacgtttaatttttacaatcttgtgtaaaaatttatccatgataataacataacttctttaaggttggagtggctggcaagagcagagccttaatttgactttagctctggctggtctggaagcttttacttttttgttaatcccacttcctcactctgtcattcagcattatcatgatcgtgaacaaaattgtactgagaaagtttgtataagtgatatgaacggtattgtattgaacatccattaaagggttgctacacttt

SEQ ID NO: 666938 - DNA, 275 bp, Homo sapiens
tgtcttcacttcacccagtgtgcacttcgtaaggataatgatgatttcgagttagtttagtattcaacagcttcctctattcctttatatatctctgtatttaatagctgtggcatagagtttccaactaagtataagtatcatgttttctttgtgatgttttctgcaatatattgaaggatgacctgtgattgtccttataactttgttccaacagatttacatgatgttcataagctgaataaatttgctctaaagatatttccataagctca

SEQ ID NO: 666939 - DNA, 485 bp, Homo sapiens
cagctgataccagagtcttgcttcggccgcggtcagcggagccctgggctggggcaggagccgaaatggggtaggctgtgcagacaaacggaactcaaccattaagcaaaacatgggaactcagtttatatgagttacaacgaacacctcaggaggcaataacagatggtttaaaaattgtggtttcacctcgaagtttacacagtgaattaatgcgcccaatttgtttggatatgttgaagaacaccatgactacaaaggagtgtctacatcggtttttggcagactgcattaatacagcccttagaagtggcaacaaagaatgtcctacctgtctgaaaaaacttcttttccaaaagatcactaaggcccagacccaaactttggtgcacttataacatttatcccaacgcgtgatgcagtataaagctaatctcaccacaattgaggaaggactgtaaattcaaggccatgcctgccactgg

SEQ ID NO: 666940 - DNA, 221 bp, Homo sapiens
ttgagcccacagatgtacatcaccacactaaggctaatctattttactctttgtcgagatgcagtcttttcatgctatacatgttggctacaaactgatagaaccaagtaatcctccagcatcgaccttgcaatggaccagaacctcaggcacgagccaccgtgccttgccacaagcgatttttcttcaataaaaaagaaaaaagaaaacgtttgcggccg

SEQ ID NO: 666941 - DNA, 112 bp, Homo sapiens
actgtgcgcaggtcatctagaggatcccgtatccaggaatgtgaagatccaccttggccctgcttgcccggatgggggggcagccagctttcacggatctagaggtgatctt

SEQ ID NO: 666942 - DNA, 150 bp, Homo sapiens
tatactgtaccagtgtcaatgctgcagcctgccaggctgtgattttgtgaggcttgtccttatgtagaatgcaccgcagcccctggccactgcaaagagtgcacagtggactgtggttctccatatgcggcgcgccaagggtggctcgct

SEQ ID NO: 666943 - DNA, 278 bp, Homo sapiens
  misc_feature (235)..(235): n is a, c, g, or t
  misc_feature (275)..(275): n is a, c, g, or t
tggccatttcaaagaaatgatattagtcggacatgctcaagttatatctaagcttggaaacatcgatgtccgagtacctaatggatgaagcagcgatgttttccggtgcagtgctactcgggtcgcaaggatcggaggcgcaatagtcctcgacaagtcgccaaccctcccacttcggtcgatcagctgttagcttcgtaaataaagctatagctttgcgagcgtctttggggtngccagtcgcacgcagtaagttgacaagagcccattgaccnatc

SEQ ID NO: 666944 - DNA, 397 bp, Homo sapiens
ccgggattttttttttaaaaagtggggtggggcccttttttccggcccttaggaaaattggggtttttgggttttttggggaaattttcccccaattgggttggaaaccccgggctttttttttttaaagttggtctttccaaaaccttttttttttttttggatgggcccccttttggccattttcaaaacccaaacccccctttgggttggtggagttaaaaattggtaccccccccagtggatggattggttttcccttttaaaagtttttgggaaacccattttgaattgtttgaaaatttccagtttttttaacttggtttttaggttgtttttaaaactatttttttttttaaatttttaaaaaaaagggttttttttttccccttgccca

SEQ ID NO: 666945 - DNA, 772 bp, Homo sapiens
  misc_feature (5)..(5): n is a, c, g, or t
  misc_feature (74)..(74): n is a, c, g, or t
  misc_feature (100)..(100): n is a, c, g, or t
  misc_feature (151)..(152): n is a, c, g, or t
  misc_feature (155)..(156): n is a, c, g, or t
  misc_feature (158)..(158): n is a, c, g, or t
  misc_feature (169)..(169): n is a, c, g, or t
  misc_feature (173)..(173): n is a, c, g, or t
  misc_feature (193)..(193): n is a, c, g, or t
  misc_feature (198)..(198): n is a, c, g, or t
  misc_feature (200)..(200): n is a, c, g, or t
  misc_feature (207)..(207): n is a, c, g, or t
  misc_feature (212)..(212): n is a, c, g, or t
  misc_feature (221)..(221): n is a, c, g, or t
  misc_feature (236)..(236): n is a, c, g, or t
  misc_feature (264)..(264): n is a, c, g, or t
  misc_feature (275)..(275): n is a, c, g, or t
  misc_feature (289)..(289): n is a, c, g, or t
  misc_feature (292)..(292): n is a, c, g, or t
  misc_feature (304)..(304): n is a, c, g, or t
  misc_feature (310)..(310): n is a, c, g, or t
  misc_feature (312)..(312): n is a, c, g, or t
  misc_feature (321)..(321): n is a, c, g, or t
  misc_feature (346)..(346): n is a, c, g, or t
  misc_feature (368)..(368): n is a, c, g, or t
  misc_feature (377)..(377): n is a, c, g, or t
  misc_feature (385)..(385): n is a, c, g, or t
  misc_feature (405)..(405): n is a, c, g, or t
  misc_feature (425)..(425): n is a, c, g, or t
  misc_feature (428)..(428): n is a, c, g, or t
  misc_feature (438)..(438): n is a, c, g, or t
  misc_feature (457)..(457): n is a, c, g, or t
  misc_feature (500)..(500): n is a, c, g, or t
  misc_feature (519)..(519): n is a, c, g, or t
  misc_feature (605)..(605): n is a, c, g, or t
  misc_feature (616)..(616): n is a, c, g, or t
  misc_feature (621)..(621): n is a, c, g, or t
  misc_feature (646)..(646): n is a, c, g, or t
  misc_feature (657)..(657): n is a, c, g, or t
  misc_feature (668)..(668): n is a, c, g, or t
  misc_feature (742)..(742): n is a, c, g, or t
taaancaggttgtatttattaaaaacaaaatacaaaataacttggaattcagattattgtgatgtttatccccnaacaggtcagtcctaaagaaaaagcnaattgtttcaagggtggtaacggaagaattttaagtaaggattatattaannacnncnagtttgatgcnaacngagttttattcaatgttggnggccncnctatgtnccccnaagttttcnaccattaacaacccnaaccggttgtttccctcataccaacacntggtgtgtgcngtggttcccccccngtncttagaacagcnggtatncngtttcttcngcctttttttttttgaatttgatcnaccttttggtaggaatatttcngcgggggcntatgaccntgtggcattgaatagatatncataaagttgcttagccccnggncatatgcccnggagactttccacagaggncgatgccagcagttgccggcatagtccgtgcaccaggcttccnctgtacagtcgagttaggnccggccccgggaaaggagtggacagcagccggttgagaaacatccccatctggggacagggctgccactgacagaagatgtgagcngtgtctaagtncagtnttgtgcccagccgtgtctgcgcctncactctttggnactctgcatanaacatcttagcaccatcttcctgcagctcttccttaccagggctgttgattatggcaataaagggccccactancattgtgagcagtaaggattgtagatgatg

SEQ ID NO: 666946 - DNA, 120 bp, Homo sapiens
atggttgttgctgacaaggacctgttcaaaaatacacttcatatctcctgaatatttattgttgtggggctggggcagttgcaggcacaggcatgacaacccagctcatttcttccaacc

SEQ ID NO: 666947 - DNA, 182 bp, Homo sapiens
ttttgggccccccccccccccaatccccttttgggaaaagttaacggggttttgggggccttaaaaggccccaattttttttaagggtttttttttaaatcccccccaaaaaaagggttttaaatttaattccttttttttttgggggcctttgggaaaaaagccccccttttggggggtta

SEQ ID NO: 666948 - DNA, 328 bp, Homo sapiens
  misc_feature (173)..(174): n is a, c, g, or t
aaaaaaaaaaaaaaatcccccctttatcccccaaaaggccccctggcccccccgggggccttttttgggccggttttccggggggttttttccccccaaatttaaaccccctttgggccaacccggggggttaataaaaaaaggggtcccttgggggccccccccccttgggnnaaagggccggggggccccccctccctggggggggggcccggggccccgggcccccctttttaccctttgaccttgggggggggggggtttcccctttgtttaaaaaaaaaatttggttttttttttttaaaaaattttttttttcccctcccca

SEQ ID NO: 666949 - DNA, 220 bp, Homo sapiens
acaatgtacatatcccacccctacagttctccctgagagtgatcaaactctcatgagatctaaccaaggcagatgtgacagcaagggccacggaccccatgtccaggggtggcgtcttcatgagggaggggcccaaagcccttgtcggtgctggacctccccttagcctgtcttgaggggccagccctttagtgcattcaggctaaggcccctgtggcag

SEQ ID NO: 666950 - DNA, 921 bp, Homo sapiens
gcaggtttgtagaatatgtggtggaccggtctgtggagcatgacaaagcttcaaaggatgccaaatatgaactagtgaaagcacttgccaattccagagacaattgcagaaatctttgggaacccaaattattggaggcgtcagatacttacctgagtgaagggccatacgtatgtgaaacgctgtttccacgactagcagtagaaggagccgaatgatttcttctagagcgtccatgtagatggaccgagcgtttagaccgaagaacttctcctaaggcatttgacgtccagtctatatttcacataaagagacttcctttccccaagaattatcatggaatggtcagatgttacttgtgttaccaacagctgttatatttgctacattggaaagtgcaaagtggaactaggagttgggaatgcattaagagcagacaagcttggtcataatagatccagtgttatttcagattgcctttcactgccttaatcttgtgcaacagggtggaagtttggttgcttccctcaaaattttcatggacatgcaatcttatctaaaagcctgcttcagggctgggcgcggttggctaacagctataattcccatgcacttatgggaggccaagatgggcacaatcaccttgagtctaggagttcaagaccagcctggccaatatggcaaaaggcctgtctctagctataaaatatataatcagccaggcatggtggtgcaaacctataatctcagatactcaggaggctgaggcacgagaaatcgcttgagcctgggaggcaagaggttgcagttgagctgagatcttggcaatggaaacagagctgggaaaacacagcaagatctggctcaaaatcaattgataaattacaaacttgcaacaaattattctggatctctacataa

SEQ ID NO: 666951 - DNA, 429 bp, Homo sapiens
  misc_feature (289)..(289): n is a, c, g, or t
caggaaggggggctgcacagcaggaggtgagcttcttcatgagccagcatgacggcctgagctcctcctcctgtccaatcaggggcaacattagattctcacagaaacatgaaccctatggtgaatggtgcgtgcctgatgatctgaggtggaacagttaccttccaaaactgtccccatttcacccccggggggtggaaaagttgccttccacaaaatccatccctagtgccaaaagggtgggggaccatgggtatagaggtatcctcagtaggactcagcaagcggncaaccctatttatgtctattaggacaccccaagaagggctctcggcgggaagtaaaatgggtcatgccttagggatgcatttgctagggccaggtttcccaggggggtacagggcatgtcttttgtgaaaaggacctgga

SEQ ID NO: 666952 - DNA, 260 bp, Homo sapiens
gctaccgtgcctgctaattttgtattttcgtgagatggtgtttcactatgttggcaggctggtctcgaactccagacctataatcccagcactttgggagggtgaagtgagaagatccttgagcccagagttcgaaaccagcctgggcaacgtaaggagacccatgtctattagaaaacaaaaaagggaagggcctttttgacctcgctaaggggcgttggcccttccgcgggttccgggggttcagctctcaaggaagc

SEQ ID NO: 666953 - DNA, 1083 bp, Homo sapiens
ctagaactagtccttaaacagttatagtcaccatcacctgcttaagtaccttttgtgtgcctatttatgccatatatctggcatgtgatcttgcgaatcctactgtcgaatggcgagagtctatggcacaaataggccactcaaaaaggtacataaaacagagatcgtcaccaacacctgcctcagactggtctgggatatatgtgtgtaggggcaagtggtgggcagcaggaattgcacgaaaatattcacgatctgtccctagagcgtgaatggatactacaacattaccgtgagctgtcctgaggatacactggccatctcaagtgtcaaatatgtcaaagcctgcctgtccagtctgagatagtacatggtccctaggtgaccacttaagtcagcagactgtcattgccaagatatgcgttcaaaccataacttggaaaagctactgtgcatttcctctctgtcaccaggagatggatcgtacactgcgtcatatcttcccgcgtggctaccgcattcacagagtatgccagggatattgaacattgaccaacctactgtatgcactcattgtcatggctcagcatggcgcatacataaagcattgtaaccaacacgaacgtatctggtttaccccacaacgagtatccgctggtgatcgttaaaatacctatccaattgtacccatgctcacgaaaccagagaactgagcattcgccatgggactacatacacagtgctcccaatgccaactccacctggacgaccggcaatctaacgttagcgaggacacagcaccacgaccatggcgccgccacagtcaggtccaacaacaccatcgcagcgaagcaacgcaccccccgcaagaccgcacagccgtcaccgccgcgccgaccacccgctcgaacccgcgagagcacccgtgcagaaccggcaaacccgcgcacggaaacgccgagcaccacaacgaccacggctcacacagacacggacaaccaccaaccaacgacggtccaccgccaaccaaaagcacagccagcaccacacacacatcgacccagcacgaagcaactccccggt

SEQ ID NO: 666954 - DNA, 318 bp, Homo sapiens
ctaaaatcttcggctccacagtaccatcatttaatacagatgattgagtctaagtctgtattgctgtaggaccagatacgattgtgaatgagattgaatgtgattaccctatggtaagaggaaaatgaatctttttggtggtgagtggatgagagcaggcctttgatatatatgtcgtcattgtataaaaagaaaccccaaatgctgaatcctatcactgttgtcatgggggccaggcgttggatgtggatatcatttaaactccgtgaagattgtatctaattatactgagcagaatgcaattaaagtttgtgaaca

SEQ ID NO: 666955 - DNA, 291 bp, Homo sapiens
ctgctgttttgatctagaggctccccatcaggcgataactgggcagaggatttgttgcattgtgatgagtggcctatgagttgagatgagccactatatcagtagatttgatagcaggataatagttatatcgactggatacctaggcagtacatgacactcggaaaagaatagattactcctcgatgctcttcatcttcctcctgaatctctttacctggtgctggccctccaggctttcacaagtgctcgtgagtcatcactttacacgagtgtgccgttagcttgccc

SEQ ID NO: 666956 - DNA, 196 bp, Homo sapiens
agtaggaggatggtattaatgggtacaaaaaagcagcataagatgtagtataagatagcataacagagatgactatagtcactactaattgtacattttaaaacaaccaagatactttaagtgaaataagaaaaaaaaatcaagagtatacttggattgttagtaacacaaaggtataaatgacatgaagtgatga

SEQ ID NO: 666957 - DNA, 273 bp, Homo sapiens
cactaggggctcccaagatcttctttggcgtccagattgaatgaggtcacacgaactaactgcccacggttaatgcaaaggattttatggggtgggaaaaaactctcagcgcgaaggggagatgaaaaagggacaggccaggaaggtaatgttcccttggagtccagccgtcctggccagaatcctctccaaagcaacatcatcaaactgtccctccgaggttaagctgcttctttccgacatccaaccatagtctccgatgtccagctgctt

SEQ ID NO: 666958 - DNA, 248 bp, Homo sapiens
ccttttttttggggcgccccccccccttttttttccccccccaaaagaccccgggcccgttcccccccccggtttttttcctggcccccgggggggtttccttttttcccccggggccagtttttcccctttgccctttccaaaaagtttttttgttgcccccttcaagggggcccccccggggcccgccccccctttccccggggcccccccccccccgggcctccttttttttgggccttttttta

SEQ ID NO: 666959 - DNA, 1147 bp, Homo sapiens
  misc_feature (491)..(491): n is a, c, g, or t
  misc_feature (508)..(509): n is a, c, g, or t
  misc_feature (525)..(525): n is a, c, g, or t
  misc_feature (553)..(553): n is a, c, g, or t
  misc_feature (555)..(555): n is a, c, g, or t
ctgaggtcaggtccacctcatcagctatgaagtctatgaatcctgggagaatcaagaagtcgttgtaggtgagtccctggtcactggcgaagagctgctgcacggtgtggggaaaagaaagagagatcagattgttactgtgtctgtgtagaaagaagtagacataggagactccattttgttctgtactaagaaaaattcttctgcctcgagatgctgttaatctgtaaccttaccctcaaccctgtgctccctgaaacatgtgctatgtcaactcagggttaagtggattaagggctgtgcaagatgtgctttgttaaacagatgcttgaaggcagcgtgctcgttaagagtcatcaccactccctaatctcaagtacccagggacacaaacactgcggaaggccgcagggacctctgcctaggaaagccaggtattgtccaaggtttctccccatgtgatagtctgaaatatggcctcatgggaaggngaagacctgaccgttcnncagcccgacacccatnaagggtctgtgcttgagaggattagtanangaggaaggaacgccttgttgcagtgagagaagaggaggcatctgctcctgcagtccttggcaatggaatgctcggtgtaaaccctgatgatggtcatctgtgagatagggaaaaccgcttaggccttgagtggacatgcggcagactactggttttaagcattggaagttatgggatgaaatttgagccaggcttaattctaaccttgtctgagcaaacaccttggtcacggtatatgtgactttttcactttattttgacctgcaaacccctttccggaaccctaaatggccattacctagggactaaaggccggggatcctctatgttagccgccctgggccctttttttctcaaaaaaaaaacacaaaaaaacattggccccttcccaagttttattttgagtttattggccccattgggtcttgccaatcccctaggggggttaaaaattgcgcgtttacaccggcggaaaacacgtgccactaagtggggaaacccttttccgggctacgacccccctctttcaaagcgcctcggggcgtagccctatttcagccttttttgagttttcatagcggcgggccctttt

SEQ ID NO: 666960 - DNA, 352 bp, Homo sapiens
ggggtgtagctcagtggtagattatgagaatgactgcgccgttgaatcctcattgtatgctgcataactctgaaactacgaacgcatcatagtcgcatcataatcctctctcaaggacttcaaaggtatactcccagctaatagcttagtctgatgactatctagcaagcctcgctaacctcgcacttaccaccgccaatattaacctactgggagaatctctctgtgcatagtaaccatgtctcctgatcaaatatcactctcctacttacaaggactcacaaatactagtcacaggcctatactccactctacatatttaccacaaaacaaatggggctcatcaacccaa

SEQ ID NO: 666961 - DNA, 807 bp, Homo sapiens
gtccatggttatagaggaaaagacaactgctagaaactgctagtatttcttgagagtcctgcagagcactagtaggccaagtgtggaacgattctttcatgccttgtgatgcttcggaaagagcgtatgaccatggtagagtcgcattttcattgacatgcaagtctcgacacacaaaagtatctggtcgcatgagacgttgtaccctaggaattacacctaccgatagctgtcttgggacccagatatctcacaggagtggggtaagttaacatgttgcaagtcatgtgcattggctcgtagttcacttcctggtagttacctgagcaacttggggcaatttgttatgagccatattagaacaccgattagatggacactacatgcaagtgtttgaaccctattgtaataggactacctggagtaatggcgacaactgggtaacgtcgaacaatgtttagagtaaattcattcctggttgacagtggcacccagtgcgcgtgtgtgcatgacggtaatgaggagaatgggttgattatgacgaagggagccatcagggaatgaaaagcgttctatgggattacagttgaaatccaagtcacgcatgtagggattctgtcagaccatcttacatgtggacaggctttacacgactccctgtaagggatatgggcttgtaggtggcccctgaaagctcctttcaggaaacaaggccagaagaagttttttcaagacgcttaccgaccccaggaaagaatacactgggttccattaccggatttcactttctgggaacgactgttgaat

SEQ ID NO: 666962 - DNA, 447 bp, Homo sapiens
agccagaatttcaaaagaagtgggtgggttagtttttggaaaaaccccattctaccctacgaggcagaagccccgccccaagggtagagccctctgataccccaagccccacccagaggggagggtcccctccaccccgaccaggttgctcctaaaccactcgggttcccccaagcccagaagctccaagctgacaccaccaaggtcaccccacttctcccaagttctctctttttagactatttaggcctaagggcagaaagaaccttaaatcccaagatgctagcttttgacctgcagagaggtgtggcagcccactgacattgattaagcgcctgctgtgtgcctggtactgtgccagcatcaggatgccacagagaacaagacaaaccagatcgctgtgctggggggagcttacagtccagttgaggagacgcagtaagatgc

SEQ ID NO: 666963 - DNA, 215 bp, Homo sapiens
gcggccgcctactactactactgctcgaattcaagcttctaacgatgtacggggacatgcacctggtgccgggccgggaggctgctcccgcgcttgtgccacgtgacctgggcatgttataaaagaggtttagtcaaaaagaccaaagcccatgccttacctacagcactatgtgcatttgctgtcacaataaagtatattttgtcttgcaaaaa

SEQ ID NO: 666964 - DNA, 223 bp, Homo sapiens
tggtactgctgagtgtgggagtcagctaatactttgacgcgatgggatagcgactgatatgtgtagctaggtgacatatgctcgtagtgtctacgtctattctactgtaatatatggtgtgctcacactgataaacctaggaagcaattgatatcatagctcagaccacacctatgtatccacatggttctttttttccggagtagtaagttacaatatggga

SEQ ID NO: 666965 - DNA, 314 bp, Homo sapiens
  misc_feature (9)..(9): n is a, c, g, or t
  misc_feature (62)..(62): n is a, c, g, or t
  misc_feature (91)..(91): n is a, c, g, or t
  misc_feature (98)..(98): n is a, c, g, or t
  misc_feature (100)..(100): n is a, c, g, or t
  misc_feature (131)..(131): n is a, c, g, or t
  misc_feature (133)..(133): n is a, c, g, or t
  misc_feature (141)..(141): n is a, c, g, or t
  misc_feature (158)..(158): n is a, c, g, or t
  misc_feature (187)..(187): n is a, c, g, or t
  misc_feature (196)..(196): n is a, c, g, or t
  misc_feature (224)..(224): n is a, c, g, or t
  misc_feature (252)..(252): n is a, c, g, or t
  misc_feature (295)..(295): n is a, c, g, or t
  misc_feature (309)..(309): n is a, c, g, or t
ctcgtgccntttatacttaaatatacatttcatggttgtatatttattctgcatccaagttncttttcatatcaaataacagcagcttggncatttgngntgcttgctcataactcggcagtaagcatttntnagcatgangttattctttggttganttttattcttgatatggggcttaggagtnagatttctngtctacagaaatgatcatgctcatgtanttttgacatttatcgtcatgatgctttncacaagggctgcaccaatttagatcatctttagcggtgaatgngtggattatttttnctaca

SEQ ID NO: 666966 - DNA, 278 bp, Homo sapiens
acagatgcaaagtgcactttgatggacgccgatgggtctgaagacgaggaaggatttggctacccagatacaatacttatccttccttctatagggaggtatgactgatagatggcgagaacgactaggctgaatttcttccaaagggaaacaagtggtcgggatcggggaggacttaatgcgtccgcctcaaaatagttcatttattcagcacttataatgggcactgtactacacatgtcacatgtacaaacactcatttatcataatgccatata

SEQ ID NO: 666967 - DNA, 753 bp, Homo sapiens
  misc_feature (539)..(539): n is a, c, g, or t
tgggtttttaaaattttttttaaaaaattgaaccccaggtggattaaaaccccaaaaatttctttgggcaaaattttattttgggccaaaaaaaaaagcccccaaaaaattaaaacgtcacgacccaaaccgcagtttgctctaaaaaaaacaaaaaacagacggggacgagctacctatagagccgagggcccatacaggagggcgggagggaggggacaacttgcaaagcggagtctcgaggccttcgactccgcgggcagtgataaaatctccagggggggggggggggagcgctaacatgtacccggaggcgggggggggtataacacccgaggggaggggcgtgacctcttataggggacagaatctacttctatattgtattattttttatatcttgttgtaccaacagatatcattaaaaagagtggttcaccagaaagcaacaactacataattggttgggtatatagaacgcaaagaaaacaaaaagagaatcgcacacagcggaaaggcgggcgcttgtggtcccaccncaggatatgcgcccgcatctggtaagagagcgtaaagtggaggtaccacaagggagggagtgcagcaaaccagcccccgctcccactgcggggcctgggagacaacagtcggtggggcaccacagtgcggcatgagagaggacaaatagtgatcgtgaagtcgagacggactcagagcatgtggtttgacgacaacaatgcggcgtcgtaatgg

SEQ ID NO: 666968 - DNA, 1409 bp, Homo sapiens
  misc_feature (517)..(517): n is a, c, g, or t
  misc_feature (543)..(543): n is a, c, g, or t
ctccctggagaagagctacgagctgcctgacggccatggtctatcacctattgtgcaatgagccggttccgctgccctgaggcactcttccagccttccttcctgggcatggagctcctgatggacatccacgacaactaccttcacactccatcactgaagtgtgacggtggacatccgcaaagacctgtacgccaacacagtgctgtctggcggcaccaccatgtaccctggcattgccgacaggcactgcaggaaggaggatcacctggccctggaccacccagtcacaatgaagtatcaagatcattgcttcctccttgagcgtcaagttactccgctggtggaatcgcgtcggctccaatcctggaccttcgcttgtccagcctgtccacgtcagattgttggatcagcaatgcaggtagctatgatcgagctccggactcccgtccattcggtccatccgcataatgtcttctagcgcggtactagtgacctttaggttgcgttagcaccnctttcattgatcataatgcgctagancttgctgcaggaccatcaaggactgagagttgtgctgtggtctcttctttgctttttgaggtggcgctcctagggtgtctttgctttggctctctgatgtgcggcggttagtgcactcagcggggttccataacattcaggcggacgagtgaccgggtcaacgagccatccttcgtgcgtgagggcagatgggaatcccccgtacagagtttccgcattgggtgggtgccccgagggactttgtgtagtgcccatctcgagatttgtggtgcccatccataatgagctacctttggcacagatatttgctctaccgcggttggtggttccgaggaaaagttgctttgtgcacttctcctttaaaaggccaccccccggatttctcttctttttaaggggaaagaatggggcccgagcctttctcccctaaaggtcccacacggggggcgcggggttcaactcgcccatgaggggttccccgcgggtaaaccattgttgtgtcttcgggccaaccacggttttttttaaacactcttaacgcgctataaccaaatcgttaaccaaattcagggggtgggacacttgagacaatgactagatcgccgtcgtttggtggggcccccccccttctccacctatttttttgtgccccccccccttgatccatgtttttgtacgccgttgatggcgcccccgcggaggaggtgttgatgcaccaggggtgtcactaggtcagcaggtgtgcacccgtgtaaatacagtggcgcctttgtgacagacagagcaccatgcaggtctctttcgtgcgtggcaagtgctgagataggcgctgcatcgatgtcagccaccctttgatgagagactgc

SEQ ID NO: 666969 - DNA, 579 bp, Homo sapiens
agaggatctattctgccacgatcggggggtggtgggatggggggagaagggtgtcaaacacttgcttctcaaggaagtaacatgtagactggaaacctgtaaggaagaacagaagttagcaaacacaatagtgactaaaaatcatagcactgatatccttgtctctggatgtgatggaaaaagctctcatggttgaactgtgaaatcacctacttttggtttcttttttaagagataggggtctcactctgtggcccaggctgaagtacagtggctcaattacagctcactgcagcctgcaagtcctggggctaaggctatcctcctgccttagcctcccaagtagctgggactacaggcgtgagcccctgtgcccagctcattaatgtatgggatatgtttcccctctgggcttattggacatcatattgggtgtctcatatggccttgtataatcattactggctcactagttcttctttaccttaaatgctagtatacctcgacggcttaatcctcctctttcctgtcccaatctaaatactatacctaaagagtcctccacttctatagttccaa

SEQ ID NO: 666970 - DNA, 2413 bp, Homo sapiens
ggcacgagggggccacacagcggacccctaagcggaccgctggcaccggtcgggtggcagcagagtgtcgctcgacatgggggaggccggggctggcgctggcgcctcgggagggccggaggcaagcccggaggcagaggtggtgaagctgctgcccttcctggcgccgggcgcgcgggcggacctgcaggcggcggcggtgcggcacgtgctggcgctgactggctgcggacccggccgcgcgctgttggcggggcaggcggcgctgctgcaggcgctgatggagctggcgccggcctctgccccggcccgggacgccgcccgcgcgctcgtgaacttggccgccgaccccggcctgcacgagacattgctggcggccgaccccgggctgccagcgcgcctgatgggccgcgcgttggacccgcagtggccctgggccgaggaggcggccgccgcgctagccaacctcagtcgcgagccggcgccgtgtgcagcgctcatggcggcgctggcggccgcggagccggcagactcgggcctggagcggctggtgcgcgcgctgtgcacgcccggctacaacgcccgcgcgcccctgcactacctagcgccgctgctctccaacctcagccaacgccctgcggcgcgggccttcctactggaccccgacaggtgcgtggtccagcggctgctgccccttacccagtaccccgactcctctgtacgcaggggcggggtggtggggacgctgcggaattgctgcttcgagcaccgacatcacgagtggttgcttggacctgaggtggacattctcccctttttgctcctgcccttggctgggcctgaggatttctccgaggaagagatggaacggctgcctgtcgacttgcagtacctgccaccagacaagcagcgagaacctgatgcagacatccgcaagatgcttgttgaagccatcatgctgctgacagccacagcaccaggtcggcagcaggtgcgggaccagggagcctacctgatccttcgagagctgcacagctgggagccggagcccgacgtgcggacggcttgtgagaagctcatccaggtgcttattggggacgagcctgaacgtggcatggaaaacctgctggaggtgcaggtgcctgaggatgtggagcagcagctgcagcagctggattgcagggagcaggagcagttggagcgggagctggccccagagccatgggtggagagggccacacccacctgaggcccctgcagccggacaccagctccagggtcccctttgccaggctttctcagaccaggccttcctgcagctgtctgcaggccccctgggtccccttgttcagagactgtgctcttctgagaagcagagctacgcttaggctccagtaaggattggaggcactttccagccctgtgcagtgttgctaccagcaagaatgaaggttgtgcagagcagtactgtgaggtaggcaccgtgactcggctgcctgtgcagaaggtggaggtggcaggcggatggccagggagccatgagaagactcttcctgggcacggcgtggggactggacagaaaaccactgcaagccccaaggagccagctgaagcctcccaatccccagggcactgcagagtctgggcagaggtgggcgcataggtacaagtgctgctttgtcagcctcactccctgcagctctcagctccctgttccctgagacctggcctcaaagggctgacccagccatacgtagatcctggggtctttctaggactgtgcctccctgcttgacctatgctccaggaccctgccctcaacccttgtcagctccctaagtcttcctgtttcccagtctcagattgagtgggtgctctcattggcctctctagctaggccgtctccctggtcagcttccttgagcctgggccactcctccctggccttcttacctctgccaagagcctccagatgtgcctgcagcctagtccctgcccaagcttctcccccagccaccctctgcccctgtggtagagcccactataggcccaggcgccttacgtgcttctcccctggacctatgtgcatccctcacctgccagttatgtggctgccaagccccacaggctgtcatggtggctcttgccacacttcccttcctgagctgacctgacctcactgccacctcttgcattgggatcctgagggctggcccctgctcactgatgggccctcccaggcccgtcaagccctggtgaaggagcttagcttgtcttcttggcaattcacaatgcctcactccacaccctaaaactggagcgtcccctatggtctcctgctgtggcttgggtgccgggcgtctcccgcctccaggatctcctctcacctgcccccattaaagctctgccactc

SEQ ID NO: 666971 - DNA, 2122 bp, Homo sapiens
ggcacgagggggccacacagcggacccctaagcggaccgctggcaccggtcgggtggcagcagagtgtcgctcgacatgggggaggccggggctggcgctggcgcctcgggagggccggaggcaagcccggaggcagaggtggtgaagctgctgcccttcctggcgcgcccctgcactacctagcgccgctgctctccaacctcagccaacgccctgcggcgcgggccttcctactggaccccgacaggtgcgtggtccagcggctgctgccccttacccagtaccccgactcctctgtacgcaggggcggggtggtggggacgctgcggaattgctgcttcgagcaccgacatcacgagtggttgcttggacctgaggtggacattctcccctttttgctcctgcccttggctgggcctgaggatttctccgaggaagagatggaacggctgcctgtcgacttgcagtacctgccaccagacaagcagcgagaacctgatgcagacatccgcaagatgcttgttgaagccatcatgctgctgacagccacagcaccaggtcggcagcaggtgcgggaccagggagcctacctgatccttcgagagctgcacagctgggagccggagcccgacgtgcggacggcttgtgagaagctcatccaggtgcttattggggacgagcctgaacgtggcatggaaaacctgctggaggtgcaggtgcctgaggatgtggagcagcagctgcagcagctggattgcagggagcaggagcagttggagcgggagctggccccagagccatgggtggagagggccacacccacctgaggcccctgcagccggacaccagctccagggtcccctttgccaggctttctcagaccaggccttcctgcagctgtctgcaggccccctgggtccccttgttcagagactgtgctcttctgagaagcagagctacgcttaggctccagtaaggattggaggcactttccagccctgtgcagtgttgctaccagcaagaatgaaggttgtgcagagcagtactgtgaggtaggcaccgtgactcggctgcctgtgcagaaggtggaggtggcaggcggatggccagggagccatgagaagactcttcctgggcacggcgtggggactggacagaaaaccactgcaagccccaaggagccagctgaagcctcccaatccccagggcactgcagagtctgggcagaggtgggcgcataggtacaagtgctgctttgtcagcctcactccctgcagctctcagctccctgttccctgagacctggcctcaaagggctgacccagccatacgtagatcctggggtctttctaggactgtgcctccctgcttgacctatgctccaggaccctgccctcaacccttgtcagctccctaagtcttcctgtttcccagtctcagattgagtgggtgctctcattggcctctctagctaggccgtctccctggtcagcttccttgagcctgggccactcctccctggccttcttacctctgccaagagcctccagatgtgcctgcagcctagtccctgcccaagcttctcccccagccaccctctgcccctgtggtagagcccactataggcccaggcgccttacgtgcttctcccctggacctatgtgcatccctcacctgccagttatgtggctgccaagccccacaggctgtcatggtggctcttgccacacttcccttcctgagctgacctgacctcactgccacctcttgcattgggatcctgagggctggcccctgctcactgatgggccctcccaggcccgtcaagccctggtgaaggagcttagcttgtcttcttggcaattcacaatgcctcactccacaccctaaaactggagcgtcccctatggtctcctgctgtggcttgggtgccgggcgtctcccgcctccaggatctcctctcacctgcccccattaaagctctgccactcatgcaggcatgtgtggaccatgttttcccctggccagagcccccacctgccactggaggccagttgccctcttagcactcagacatcagcactgtcttcacagaataaatgctttatctggccttgcccc

SEQ ID NO: 666972 - DNA, 329 bp, Homo sapiens
cgagtctcggtacccctctgaatgcactgggggaggtgcaggtgcctgaggatgtggagcagcagctgcagcagctggattgcagggagcaggagcagttggagcgggagctggccccagagccatgggtggagagggccacacccacctgaggcccctgcagccggacaccagctccagggtcccctttgccaggctttctcagaccaggccttcctgcagctgtctgcaggccccctgggtccccttgttcagagactgtgctcttctgagaagcagagctacgcttaggctctcacgtaatgacagagcagccaatatcaccacaa

SEQ ID NO: 666973 - DNA, 2738 bp, Homo sapiens
ggcacgagggggccacacagcggacccctaagcggaccgctggcaccggtcgggtggcagcagagtgtcgctcgacatgggggaggccggggctggcgctggcgcctcgggagggccggaggcaagcccggaggcagaggtggtgaagctgctgcccttcctggcgccgggcgcgcgggcggacctgcaggcggcggcggtgcggcacgtgctggcgctgactggctgcggacccggccgcgcgctgttggcggggcaggcggcgctgctgcaggcgctgatggagctggcgccggcctctgccccggcccgggacgccgcccgcgcgctcgtgaacttggccgccgaccccggcctgcacgagacattgctggcggccgaccccgggctgccagcgcgcctgatgggccgcgcgttggacccgcagtggccctgggccgaggaggcggccgccgcgctagccaacctcagtcgcgagccggcgccgtgtgcagcgctcatggcggcgctggcggccgcggagccggcagactcgggcctggagcggctggtgcgcgcgctgtgcacgcccggctacaacgcccgcgcgcccctgcactacctagcgccgctgctctccaacctcagccaacgccctgcggcgcgggccttcctactggaccccgacaggtgcgtggtccagcggctgctgccccttacccagtaccccgactcctctgtacgcaggggcggggtggtggggacgctgcggaattgctgcttcgagcaccgacatcacgagtggttgcttggacctgaggtggacattctcccctttttgctcctgcccttggctgggcctgaggatttctccgaggaagagatggaacgtgagtggctagtgtggagcctcagagttggccggagaggagggaggccagtggagggagagagaggtgtccaggccacaggctcctgaaactttgcagcagtgagttgctgagcacaggtgggacttacacaggcagagcctggctcagctgcccagcccagggacacagtggctcccacacactcacccctagggctgcctgtcgacttgcagtacctgccaccagacaagcagcgagaacctgatgcagacatccgcaagatgcttgttgaagccatcatgctgctgacagccacagcaccaggtcggcagcaggtgcgggaccagggagcctacctgatccttcgagagctgcacagctgggagccggagcccgacgtgcggacggcttgtgagaagctcatccaggtgcttattggggacgagcctgaacgtggcatggaaaacctgctggaggtgcaggtgcctgaggatgtggagcagcagctgcagcagctggattgcagggagcaggagcagttggagcgggagctggccccagagccatgggtggagagggccacacccacctgaggcccctgcagccggacaccagctccagggtcccctttgccaggctttctcagaccaggccttcctgcagctgtctgcaggccccctgggtccccttgttcagagactgtgctcttctgagaagcagagctacgcttaggctccagtaaggattggaggcactttccagccctgtgcagtgttgctaccagcaagaatgaaggttgtgcagagcagtactgtgaggtaggcaccgtgactcggctgcctgtgcagaaggtggaggtggcaggcggatggccagggagccatgagaagactcttcctgggcacggcgtggggactggacagaaaaccactgcaagccccaaggagccagctgaagcctcccaatccccagggcactgcagagtctgggcagaggtgggcgcataggtacaagtgctgctttgtcagcctcactccctgcagctctcagctccctgttccctgagacctggcctcaaagggctgacccagccatacgtagatcctggggtctttctaggactgtgcctccctgcttgacctatgctccaggaccctgccctcaacccttgtcagctccctaagtcttcctgtttcccagtctcagattgagtgggtgctctcattggcctctctagctaggccgtctccctggtcagcttccttgagcctgggccactcctccctggccttcttacctctgccaagagcctccagatgtgcctgcagcctagtccctgcccaagcttctcccccagccaccctctgcccctgtggtagagcccactataggcccaggcgccttacgtgcttctcccctggacctatgtgcatccctcacctgccagttatgtggctgccaagccccacaggctgtcatggtggctcttgccacacttcccttcctgagctgacctgacctcactgccacctcttgcattgggatcctgagggctggcccctgctcactgatgggccctcccaggcccgtcaagccctggtgaaggagcttagcttgtcttcttggcaattcacaatgcctcactccacaccctaaaactggagcgtcccctatggtctcctgctgtggcttgggtgccgggcgtctcccgcctccaggatctcctctcacctgcccccattaaagctctgccactcatgcaggcatgtgtggaccatgttttcccctggccagagcccccacctgccactggaggccagttgccctcttagcactcagacatcagcactgtcttcacagaataaatgctttatctggccttgcccc

SEQ ID NO: 666974 - DNA, 680 bp, Homo sapiens
agcgggggtggactccgtcttctcacagcgggcgcaggatgggtaggggcgggggggcggcagcgagggacgccgctccgcacaggtttcaagaggacgagtgcggggcgcccggcgaaggccgggaacaggtggaggcgggggcagggggcggggcggcgagctgcatcagtcatgctcttaaagggactgccagagagctgaagaaggaggcggcggggcgagccacccaggaaaatgggcttgacgaggcggcccgggagatgagatcaccggcaggaagtcatgtcattcaggacacgggctttctgtgaagatctcgcccctggatcgagcccttctccctgaggtgtccccccaggagatggtgcaggagattcacaggtgtcatggaccggaggacacgtgtcaccgcacctgttctcactgacctggattggaacgtgctggaccacttctcggagctgcgcaggtcgaggggctgcaggagggctctgtgctgcgtgtggtgcaagagccgtacacggtgcgtgaggcccgcatccacgtgcgccatgtcccgagacctgttcaagagctggaccatccgatgcctcaacggggtgatgcaactccttgtctcctgagtgtcttcacgacgggcctggagacacggggaagcggaacaaaggttgcacatg

SEQ ID NO: 666975 - DNA, 241 bp, Homo sapiens
  misc_feature (169)..(169): n is a, c, g, or t
  misc_feature (209)..(209): n is a, c, g, or t
  misc_feature (219)..(219): n is a, c, g, or t
gaggcgttggatagtgaagatatataaaaaacacagagaaattaaactagcgggaaagaacatcaatataagctgtccgtcactgcctatgactgtgggaagaaaagagccacagaagatgttctggtgaagatcagcattaagcccacctgcaccccatgggtggcanaggatggaacaacagtgattgagtatgagcctgggcaccnggcgcgtttnggccgtctgttccagaatatcc

SEQ ID NO: 666976 - DNA, 2637 bp, Homo sapiens
ggcacgagggggccacacagcggacccctaagcggaccgctggcaccggtcgggtggcagcagagtgtcgctcgacatgggggaggccggggctggcgctggcgcctcgggagggccggaggcaagcccggaggcagaggtggtgaagctgctgcccttcctggcgccgggcgcgcgggcggacctgcaggcggcggcggtgcggcacgtgctggcgctgactggctgcggacccggccgcgcgctgttggcggggcaggcggcgctgctgcaggcgctgatggagctggcgccggcctctgccccggcccgggacgccgcccgcgcgctcgtgaacttggccgccgaccccggcctgcacgagacattgctggcggccgaccccgggctgccagcgcgcctgatgggccgcgcgttggacccgcagtggccctgggccgaggaggcggccgccgcgctagccaacctcagtcgcgagccggcgccgtgtgcagcgctcatggcggcgctggcggccgcggagccggcagactcgggcctggagcggctggtgcgcgcgctgtgcacgcccggctacaacgcccgcgcgcccctgcactacctagcgccgctgctctccaacctcagccaacgccctgcggcgcgggccttcctactggaccccgacaggacatcacgagtggttgcttggacctgaggtggacattctcccctttttgctcctgcccttggctgggcctgaggatttctccgaggaagagatggaacgtgagtggctagtgtggagcctcagagttggccggagaggagggaggccagtggagggagagagaggtgtccaggccacaggctcctgaaactttgcagcagtgagttgctgagcacaggtgggacttacacaggcagagcctggctcagctgcccagcccagggacacagtggctcccacacactcacccctagggctgcctgtcgacttgcagtacctgccaccagacaagcagcgagaacctgatgcagacatccgcaagatgcttgttgaagccatcatgctgctgacagccacagcaccaggtcggcagcaggtgcgggaccagggagcctacctgatccttcgagagctgcacagctgggagccggagcccgacgtgcggacggcttgtgagaagctcatccaggtgcttattggggacgagcctgaacgtggcatggaaaacctgctggaggtgcaggtgcctgaggatgtggagcagcagctgcagcagctggattgcagggagcaggagcagttggagcgggagctggccccagagccatgggtggagagggccacacccacctgaggcccctgcagccggacaccagctccagggtcccctttgccaggctttctcagaccaggccttcctgcagctgtctgcaggccccctgggtccccttgttcagagactgtgctcttctgagaagcagagctacgcttaggctccagtaaggattggaggcactttccagccctgtgcagtgttgctaccagcaagaatgaaggttgtgcagagcagtactgtgaggtaggcaccgtgactcggctgcctgtgcagaaggtggaggtggcaggcggatggccagggagccatgagaagactcttcctgggcacggcgtggggactggacagaaaaccactgcaagccccaaggagccagctgaagcctcccaatccccagggcactgcagagtctgggcagaggtgggcgcataggtacaagtgctgctttgtcagcctcactccctgcagctctcagctccctgttccctgagacctggcctcaaagggctgacccagccatacgtagatcctggggtctttctaggactgtgcctccctgcttgacctatgctccaggaccctgccctcaacccttgtcagctccctaagtcttcctgtttcccagtctcagattgagtgggtgctctcattggcctctctagctaggccgtctccctggtcagcttccttgagcctgggccactcctccctggccttcttacctctgccaagagcctccagatgtgcctgcagcctagtccctgcccaagcttctcccccagccaccctctgcccctgtggtagagcccactataggcccaggcgccttacgtgcttctcccctggacctatgtgcatccctcacctgccagttatgtggctgccaagccccacaggctgtcatggtggctcttgccacacttcccttcctgagctgacctgacctcactgccacctcttgcattgggatcctgagggctggcccctgctcactgatgggccctcccaggcccgtcaagccctggtgaaggagcttagcttgtcttcttggcaattcacaatgcctcactccacaccctaaaactggagcgtcccctatggtctcctgctgtggcttgggtgccgggcgtctcccgcctccaggatctcctctcacctgcccccattaaagctctgccactcatgcaggcatgtgtggaccatgttttcccctggccagagcccccacctgccactggaggccagttgccctcttagcactcagacatcagcactgtcttcacagaataaatgctttatctggccttgcccc

SEQ ID NO: 666977 - DNA, 2824 bp, Homo sapiens
ggcacgagggggccacacagcggacccctaagcggaccgctggcaccggtcgggtggcagcagagtgtcgctcgacatgggggaggccggggctggcgctggcgcctcgggagggccggaggcaagcccggaggcagaggtggtgaagctgctgcccttcctggcgccgggcgcgcgggcggacctgcaggcggcggcggtgcggcacgtgctggcgctgactggctgcggacccggccgcgcgctgttggcggggcaggcggcgctgctgcaggcgctgatggagctggcgccggcctctgccccggcccgggacgccgcccgcgcgctcgtgaacttggccgccgaccccggcctgcacgagacattgctggcggccgaccccgggctgccagcgcgcctgatgggccgcgcgttggacccgcagtggccctgggccgaggaggcggccgccgcgctagccaacctcagtcgcgagccggcgccgtgtgcagcgctcatggcggcgctggcggccgcggagccggcagactcgggcctggagcggctggtgcgcgcgctgtgcacgcccggctacaacgcccgcgcgcccctgcactacctagcgccgctgctctccaacctcagccaacgccctgcggcgcgggccttcctactggaccccgacaggtgcgtggtccagcggctgctgccccttacccagtaccccgactcctctgtacgcaggggcggggtggtggggacgctgcggaattgctgcttcgagcaccgacatcacgagtggttgcttggacctgaggtggacattctcccctttttgctcctgcccttggctgggcctgaggatttctccgaggaagagatggaacgtgagtggctagtgtggagcctcagagttggccggagaggagggaggccagtggagggagagagaggtgtccaggccacaggctcctgaaactttgcagcagtgagttgctgagcacaggtgggacttacacaggcagagcctggctcagctgcccagcccagggacacagtggctcccacacactcacccctagggctgcctgtcgacttgcagtacctgccaccagacaagcagcgagaacctgatgcagacatccgcaagatgcttgttgaagccatcatgctggtgagcaggagccctgctgcaataagcaccaccccaacacacacacatgagcatgctgacatctgggtcctcttccacctcctcagctgacagccacagcaccaggtcggcagcaggtgcgggaccagggagcctacctgatccttcgagagctgcacagctgggagccggagcccgacgtgcggacggcttgtgagaagctcatccaggtgcttattggggacgagcctgaacgtggcatggaaaacctgctggaggtgcaggtgcctgaggatgtggagcagcagctgcagcagctggattgcagggagcaggagcagttggagcgggagctggccccagagccatgggtggagagggccacacccacctgaggcccctgcagccggacaccagctccagggtcccctttgccaggctttctcagaccaggccttcctgcagctgtctgcaggccccctgggtccccttgttcagagactgtgctcttctgagaagcagagctacgcttaggctccagtaaggattggaggcactttccagccctgtgcagtgttgctaccagcaagaatgaaggttgtgcagagcagtactgtgaggtaggcaccgtgactcggctgcctgtgcagaaggtggaggtggcaggcggatggccagggagccatgagaagactcttcctgggcacggcgtggggactggacagaaaaccactgcaagccccaaggagccagctgaagcctcccaatccccagggcactgcagagtctgggcagaggtgggcgcataggtacaagtgctgctttgtcagcctcactccctgcagctctcagctccctgttccctgagacctggcctcaaagggctgacccagccatacgtagatcctggggtctttctaggactgtgcctccctgcttgacctatgctccaggaccctgccctcaacccttgtcagctccctaagtcttcctgtttcccagtctcagattgagtgggtgctctcattggcctctctagctaggccgtctccctggtcagcttccttgagcctgggccactcctccctggccttcttacctctgccaagagcctccagatgtgcctgcagcctagtccctgcccaagcttctcccccagccaccctctgcccctgtggtagagcccactataggcccaggcgccttacgtgcttctcccctggacctatgtgcatccctcacctgccagttatgtggctgccaagccccacaggctgtcatggtggctcttgccacacttcccttcctgagctgacctgacctcactgccacctcttgcattgggatcctgagggctggcccctgctcactgatgggccctcccaggcccgtcaagccctggtgaaggagcttagcttgtcttcttggcaattcacaatgcctcactccacaccctaaaactggagcgtcccctatggtctcctgctgtggcttgggtgccgggcgtctcccgcctccaggatctcctctcacctgcccccattaaagctctgccactcatgcaggcatgtgtggaccatgttttcccctggccagagcccccacctgccactggaggccagttgccctcttagcactcagacatcagcactgtcttcacagaataaatgctttatctggccttgcccc

SEQ ID NO: 666978 - DNA, 1589 bp, Homo sapiens
ggcacgagggggccacacagcggacccctaagcggaccgctggcaccggtcgggtggcagcagagtgtcgctcgacatgggggaggccggggctggcgctggcgcctcgggagggccggaggcaagcccggaggcagaggtggtgaagctgctgcccttcctggcgccgggcgcgcgggcggacctgcaggcggcggcggtgcggcacgtgctggcgctgactggctgcggacccggccgcgcgctgttggcggggcaggcggcgctgctgcaggcgctgatggagctggcgccggcctctgccccggcccgggacgccgcccgcgcgctcgtgaacttggccgccgaccccggcctgcacgagacattgctggcggccgaccccgggctgccagcgcgcctgatgggccgcgcgttggacccgcagtggccctgggccgaggaggcggccgccgcgctagccaacctcagtcgcgagccggcgccgtgtgcagcgctcatggcggcgctggcggccgcggagccggcagactcgggcctggagcggctggtgcgcgcgctgtgcacgcccggctacaacgcccgcgcgcccctgcactacctagcgccgctgctctccaacctcagccaacgccctgcggcgcgggccttcctactggaccccgacaggtgcgtggtccagcggctgctgccccttacccagtaccccgactcctctgtacgcaggggcggggtggtggggacgctgcggaattgctgcttcgagcaccgacatcacgagtggttgcttggacctgaggtggacattctcccctttttgctcctgcccttggctgggcctgaggatttctccgaggaagagatggaacggctgcctgtcgacttgcagtacctgccaccagacaagcagcgagaacctgatgcagacatccgcaagatgcttgttgaagccatcatgctgctgacagccacagcaccaggtcggcagcaggtgcgggaccagggagcctacctgatccttcgagagctgcacagctgggagccggagcccgacgtgcggacggcttgtgagaagctcatccaggtgcttattggggacgagcctgaacgtggcatggaaaacctgctggaggtgcaggtgcctgaggatgtggagcagcagctgcagcagctggattgcagggagcaggagcagttggagcgggagctggccccagagccatgggtggagagggccacacccacctgaggcccctgggcccctgctcactgatgggccctcccaggcccgtcaagccctggtgaaggagcttagcttgtcttcttggcaattcacaatgcctcactccacaccctaaaactggagcgtcccctatggtctcctgctgtggcttgggtgccgggcgtctcccgcctccaggatctcctctcacctgcccccattaaagctctgccactcatgcaggcatgtgtggaccatgttttcccctggccagagcccccacctgccactggaggccagttgccctcttagcactcagacatcagcactgtcttcacagaataaatgctttatctggccttgcccc

SEQ ID NO: 666979 - DNA, 144 bp, Homo sapiens
cagtggaatggcaggcttacatcactagtttagcattagtttaggtggtgagtatgatctattaggagacagagaggcaagtaacaggtgtgcatcagggagggttgttttatttttccagaagtgagaaaagggagcatggga

SEQ ID NO: 666980 - DNA, 880 bp, Homo sapiens
ggcacgagggggccacacagcggacccctaagcggaccgctggcaccggtcgggtggcagcagagtgtcgctcgacatgggggaggccggggctggcgctggcgcctcgggagggccggaggcaagcccggaggcagaggtggtgaagctgctgcccttcctggcgccgggcgcgcgggcggacctgcaggcggcggcggtgcggcacgtgctggcgctgactggctgcggacccggccgcgcgctgttggcggggcaggcggcgctgctgcaggcgctgatggagctggcgccggcctctgccccggcccgggacgccgcccgcgcgctcgtgaacttggccgccgaccccggcctgcacgagacattgctggcggccgaccccgggctgccagcgcgcctgatgggccgcgcgttggacccgcagtggccctgggccgaggaggcggccgccgcgctagccaacctcagtcgcgagccggcgccgtgtgcagcgctcatggcggcgctggcggccgcggagccggcagactcgggcctggagcggctggtgcgcgcgctgtgcacgcccggctacaacgcccgcgcgcccctgcactacctagcgccgctgctctccaacctcagccaacgccctgcggcgcgggccttcctactggaccccgacaggtgaagcccagggcgcccgcgcgggcggggaggggacggaagttaggggggacggccctaagtgacacctcccaacaggtgcgtggtccagcggctgctgccccttacccagtaccccgactcctctgtacgcaggggcggggtggtggggacgctgcggaattgctgcttcgagcaccgtgagtggtgggtgtggcgggggtgcgttgcc

SEQ ID NO: 666981 - DNA, 734 bp, Homo sapiens
tgttcgttctctaggctctctagttcgccttcaccatgccggtaagctgcgaagtccgctcccggcccaagaagggctcgaataaagccgtgactaaggcgcggaagaaggacggaagaagcgcaagcggcagcctagctcggaagagctattgtccgatagtacggtgtacacaggtgctgcacggaggtccatcctcgacattcctgggatcatctcggtcataatgagctcaatggcaattcagtgaactcacttcgctcgacgagcattcttcgaatcggcagtcgccgggtgatgggcttcctctagcctggccggcagttaccgaacaatgcagctcgagcgatcgactctccgagggaggatccagcactggtcggtgcgccgtggtagttagcccgagggacgcttcggccgatacggcacggcgcgtgtccggacgggcaccaaggtccgtcacgcagagtacgatccaagtgcgtaaagtagagcgtatgctcaaggatggagacttttctcgtgtgtgttccctgagtgtgacccttagtaaagcgtacttatcaataggaatagcgcaatttggccttcggtttacccgcatttatctactggcggaaaatgaagaacgtgactgcaatgcgatacctagatggacttattagcagaaggcttaaggttggccttcatggattctcatgcggattccaaagagaattcatttcctgatgctc

SEQ ID NO: 666982 - DNA, 389 bp, Homo sapiens
gacggagttttgctcttgttgcccaggccggagtggagtggtgcggtctcggctcactgcagcctccgcctcccgggttggggcgattctcctgcctcggcctcccgggtggctgggattgcaggcatgagccaccacgcctggctagtttgtatttctggtggagatgaggtttctccgtgttggtcgggctggtctcgggctcccgacctcgggtgatccacccgcctcggcctcccggggtggtgggattgcaggcgtgagccaccgtgccgagccttccttgaagtttttgttggtttgattgtttgtttgtttgtttgtatgttttggggatggggtctcgctctgttgcccatgctggagtgcagtggcacggtcttggctcg

SEQ ID NO: 666983 - DNA, 771 bp, Homo sapiens
cctgtagctggcgctgagttggcgcccgtgagcggattgtaagctgctggttttgcggctgggaagagcggcgagagcggttcggccatccgttcgtcgggatccccgtcgaagggatgatcgtgcgtgccatgaagagtcgtcacccgggcatggggtgacagcgttccatgccttccctcgagactgaacggaatctgggatcgtcagcaactctgcggcagcgcagcgagactttggggtcatgccagagagaaaacgcaaaagtacctttgaaggactttattgggtgcgatccgaaatgacaagaaccttactggccgtctttgttactacggagaatcacaaaattcaaccatctcactttccgcaaccgtggcgcacagcaacgcacacagcaacaatttcactgaaccgcaacctggcacgtctccaatctatcaggcaaacgctatgcggaccagtcaacattcactcaggaccggattcatcggcgcacccatcgtggcgccttgcgctttcagccgacaggtagaacaggacccactgcatgggaggaaaggtggaattgttgggctcggacgcatgcattgatggactgacgacatgcatgattctcacccttgcaccccttggcacacgtccaacgcttggactccttgaaaagccgattccccagcatctccacgcacaaatcgatgcaattctccctggaagaacattccaagcgttcgttggaagcccctgattgacagtcggagatcccaaaaa

SEQ ID NO: 666984 - DNA, 248 bp, Homo sapiens
acggaagttcagggacaaaatcagttgaggctgttccccctgagcctaagcttcctttgctgtatgtcgggaatcaggtgggggccaagcgagatccccccagtgcaggccagtgtgcagggcccaggtgggcgccagggaggggaccccgcccagccccatgctttcgccaaaaacgggcagcccaatttggaaaaaaacatttccctctgttaataaaaagcaccggcctctggtcataagtgcca

SEQ ID NO: 666985 - DNA, 319 bp, Homo sapiens
gtcagaccacgagcatgttgagaaggggctgctcaacaccctagccttgttactgagaagagtgaaacatgttaactcttactggtttaactcatacactcaatgcctagataatatcaaacatgttaccctggacagcctgtcacttaacttttctgatctgggatcagaaatgctgaccagatgccactaagttgactaaatagaatttgtagttatttttcacatggtaaagcatcatcacttctaggcacaacaaggctgctcacataagcaggaacctatgtgaaagcacatagcttttttttttttgtcgacg

SEQ ID NO: 666986 - DNA, 178 bp, Homo sapiens
ttaaaccagtgtcagtgggtcatagggtccttttttaaaaaatttgagacagagtctcattgtgtcacccaggctggagtgcagtggcacaatcacggctcactgcagcctcgacctccctgggctcaggtgattctcccacctcagcctcctgaatagctgggaccacaggcatgcg

SEQ ID NO: 666987 - DNA, 397 bp, Homo sapiens
  misc_feature (83)..(83): n is a, c, g, or t
  misc_feature (365)..(365): n is a, c, g, or t
  misc_feature (384)..(384): n is a, c, g, or t
  misc_feature (394)..(394): n is a, c, g, or t
agacgagccatgatacctgttcttaaaaacactctcagagctgtcacatgtgctagatagttctccacagagaagaccttggnttcaggatgtcaggcaaacctcctgactcaagcactgaaataaacacaaatcaccattatgaagtcaaatctataaacaagcttggaaaccaatccaaaatccctcagatccacacctatacactcagtgactcatgtctatgagccatggtgaccatgcccagggttggggtcagaagaatcaggggaagtgcaatagcaacggggactcttccacagccttttttgagggttcttcaagtcctggctaactctggcattcattttatggatggctattgngggaattacaaagaggagntttcaaattnagc

SEQ ID NO: 666988 - DNA, 164 bp, Homo sapiens
ggtgcttcgatggatcccgtcggattgctggattcggacggcttgacgaccaggggcgtttggtttgggttctggccggggttttctttgatcattgttgtgattggaattgatggcgcctccgagagagcgtcgggtaccgcgctcgccttcgtcctcctggt

SEQ ID NO: 666989 - DNA, 222 bp, Homo sapiens
taaaggcactagtcactatagtggcatctccgggttctggtactggtatttaatacgcaagggtacatggctttaattatttaaatggtttggtggctattaattattttacagtttggtttaaccactttggctggctaaaattttggccatcccgttcccattttttcctttacaattttaaactatttctcttcattaaaacactatgtgattaatgtg

SEQ ID NO: 666990 - DNA, 131 bp, Homo sapiens
  misc_feature (48)..(48): n is a, c, g, or t
  misc_feature (90)..(90): n is a, c, g, or t
aggatgaggcccggaagaagaaggctttgtccaacatgatgcattttnggggttacatccagaagcaggcccagacagagcggaaaagtnggaagaggcagacttagcgggaaaaagaagaagaagattct

SEQ ID NO: 666991 - DNA, 106 bp, Homo sapiens
atgcatactggtgcacatgcagttgccgtgttctggaaggccctcatagcactgtcgccacctagcacttttggcaattgcagcggcctgttgcagtgtgcttccg

SEQ ID NO: 666992 - DNA, 265 bp, Homo sapiens
cccgggggtttttttttaagggggggcccccttgaaaattttgggggccaaaaaatgggggccccccgggggggggggggggtttttttaaaaaaccccccggggggccctttttttttttttcccccgcggggggccccccagggggggcccttttcccccccggggggggggtttttcccccccccttttttttttttttttttttttgggccccccccccccccgccggggggcccttaccctttggggtttccacccccca

SEQ ID NO: 666993 - DNA, 227 bp, Homo sapiens
tcacgatgatcatgaccgccaacaggtccccagatgcccacaaagacggtgtgcactatgcgaaggttcatcaggatccgtcccatcaccacggagccagcgggattcctcctcctctgactccccagcacaatcaggtagttgctgccctggctgtggatcttccggccactcagtaactcggcctcaaactggttgggcgtgataatgtctgcaaggaacccacg

SEQ ID NO: 666994 - DNA, 883 bp, Homo sapiens
ctctactcaggagtgcacgaagttcaaggtcagcagactgccgggaatgcatctgagtcggggcccgggtgcacctgtgtgccagaatgctgaacttcacagggtcgggggatactgactccatatacgctgcagacgacgccggccacatgctgctcatgatggggcatgtgcgtgctgacgacatcatggaccccgacaatgcctcgctgaaacccatgtggaagaccacaagttggtgtggccagaagcggctagtccccagaaaaatgtgactgcatttacctggcgagcaggccagtgcagcagctgtacacacgtgagcttccgtgcggtgccaagtgtgctaccccatcgaccgtgtactatctgatggacctctacctagctccatgacttgatgacctcaggaatgtcaagaatggctaggtggcgagctgttccgtggccctcaacgagatcaccgagatccggacgcgaattggcagacgtgggtccttcgaggacaagaccgtgcctgccgttcgtagaacagcgcacccatgaatatagcgtgcgatgactccatgccacagcaggggggcaatgagttgccagagcacccgatattggcttcagtgcacgtgcttgaagcttgacaacaactcacatagcacgtatcagacccgaggtcggaggagcagctgaattcgcggaacctggataagaccgaaggtagtctggacgccatgatgcaggtcgtcgctgaccgaacggaaatcgaatgggacaaacgcggtagcggtgttgccacggataaggaacaacgcggaaagaaatgggcactaccaaaaggcaggaccggagaacgaaacagagcaagaacgacaggaccaggcaatac

SEQ ID NO: 666995 - DNA, 262 bp, Homo sapiens
tatctcttatttcttttctttactttttttttggtttatgacgacagagacttgctctgtcacccagtctgggtatagcatgcctgttctcagtacagagcaacctctgcctcctgggttcgaacaattctcttgcctcaacttcctgagtacctgggattataggcatgcgccaccttgtccggctaatttggtatttttagtagagacggggactcaaactcccgacctcaactcatccgcccgcctcggcctccctaag

SEQ ID NO: 666996 - DNA, 489 bp, Homo sapiens
  misc_feature (81)..(83): n is a, c, g, or t
  misc_feature (88)..(88): n is a, c, g, or t
gcggccgccgcgcccactgccgccccgacccttctccccccgccgccgcccccacgcgggactcccccggggagggggaannncggcngcggggcgagtctgggacgcgccgccgccatgatcatccctgtacgctgcttcacttgtggcaagatcgtcggcaacaagtgggaggcttacctggggctgctgcaggccgagtacaccgagggggacgcgctggatgccctgggcctgaagcgctactgctgccgccggatgctgctggcccacgtggacctgatcgagaagctgctcaattatgcacccctggagaagtgaccacgctgaaacccacccacccgctgtgctgaccatgggccctgagcgtcctaccccgaattcacgaggctgaggcatccgggagctggcgtaatgcctggccgcagtgtgtgtgtatcccataccccactctggaaggaaccatccagtaaaggtctttcagaacca

SEQ ID NO: 666997 - DNA, 1084 bp, Homo sapiens
  misc_feature (194)..(194): n is a, c, g, or t
  misc_feature (388)..(388): n is a, c, g, or t
  misc_feature (430)..(430): n is a, c, g, or t
  misc_feature (464)..(464): n is a, c, g, or t
  misc_feature (583)..(583): n is a, c, g, or t
  misc_feature (607)..(607): n is a, c, g, or t
  misc_feature (623)..(623): n is a, c, g, or t
  misc_feature (629)..(629): n is a, c, g, or t
  misc_feature (635)..(635): n is a, c, g, or t
  misc_feature (647)..(647): n is a, c, g, or t
  misc_feature (659)..(659): n is a, c, g, or t
  misc_feature (690)..(690): n is a, c, g, or t
  misc_feature (701)..(701): n is a, c, g, or t
  misc_feature (708)..(709): n is a, c, g, or t
  misc_feature (711)..(711): n is a, c, g, or t
  misc_feature (713)..(713): n is a, c, g, or t
  misc_feature (726)..(726): n is a, c, g, or t
  misc_feature (728)..(728): n is a, c, g, or t
  misc_feature (734)..(734): n is a, c, g, or t
  misc_feature (737)..(737): n is a, c, g, or t
  misc_feature (742)..(742): n is a, c, g, or t
  misc_feature (750)..(750): n is a, c, g, or t
  misc_feature (773)..(773): n is a, c, g, or t
  misc_feature (782)..(782): n is a, c, g, or t
  misc_feature (785)..(786): n is a, c, g, or t
  misc_feature (793)..(793): n is a, c, g, or t
  misc_feature (811)..(811): n is a, c, g, or t
  misc_feature (939)..(939): n is a, c, g, or t
  misc_feature (945)..(945): n is a, c, g, or t
  misc_feature (956)..(956): n is a, c, g, or t
  misc_feature (964)..(964): n is a, c, g, or t
  misc_feature (986)..(986): n is a, c, g, or t
  misc_feature (994)..(994): n is a, c, g, or t
  misc_feature (1003)..(1003): n is a, c, g, or t
  misc_feature (1012)..(1012): n is a, c, g, or t
  misc_feature (1014)..(1014): n is a, c, g, or t
  misc_feature (1020)..(1021): n is a, c, g, or t
  misc_feature (1068)..(1068): n is a, c, g, or t
tgacttcagtctctttgatgtggtccttaagatgaggaagcagcggcctgcggccgtgcgggcagaggagcagtacaggttcctgtaccacacggtggctcagatgttctgctccacactccagaatgccagcccccactaccagaacatcaaagagaattgtgccccactctacgacgatgccctcttcctcncggactccccaggcacttctcggccataccccgcccaccaggaggggtcctcaggagcatctctgtgcccgggtccccgggccacgccatggctgacacctacgcggtggtgcagaagcgcggggctccagcgggcgccgggagtgggacgcagacggggacggggacggggacgggggcgcgcagcgcggaanggaggcgccgctctacagcaaggtgacgctcgcgcgcccagngacccggggcgcacgcgggaggacgcgagggggnacgctgcctggccgcgttcctgctgaccaaagtcctgccggatctggcgcctacgaggacgtggcgggtggagctcagaccggtgggctaggtttcaacctgcgcattgggaggccgangggtccccgggacccgcctgctgngtggacccgggtgtangtctancgccanttcctgcctgtngcctcttgtganctcggactgctgatgccccggtgctgctgancgccgtgcgcngaatggnnanantgggcctgatcananttaaanttnctcanggtggganatgtgggggctttgcccaatgantgtagcatncanngcttgangctggaggaggtagctanggtatagtggctggtgaggctgcacagagcagattcaacaaagaagatcaggaaggggcatgacccctgagttatgaaggggagaagggacagatgagcttccggagagtgctctcctcaccacacancactantccatcctcancacctgancctccctcacttggacactcangggaacanacagagaantggatggananttcgcnnccaagcaaaataaaccaggcataaccacagccaagcagattaacccnggcagaccgataaaaa

SEQ ID NO: 666998 - DNA, 343 bp, Homo sapiens
atccttccttctttcacgagtaatttgaataaactgagttggtcctcttcacctgaaaaacaccaggggtgtttaatgaccatgacaaagcagcatgaattatggaaggagcaccccaagctgctcccatttccctatgtgaactcaaacaagaacctgcgctcctctgtggctttactttagctatatgcacacagaaagggctctatcacatccacttgtgggatattattcctatgaaaaactgagttacctgataccacaccatatacactttattaagttctggaaacaacctattaatagatcattctatccatctgagttcaattgtggggcacag

SEQ ID NO: 666999 - DNA, 910 bp, Homo sapiens
ctcatggaactcgcctgcagctgcttgggttagtggtggcttccttcgttattggagccaggtctatagcccagcaagcatgttccaagggatgcgtgctacgatatgtgtattgatctgtggtcagacactctacatcttggtgtgggtgtcttgcgcagtcgaacggaagaagttcgacgataatttgccataatgattcagaggagagatcgagaccatctccaacagactattgatcgaccgtttacgtgactacttggaacgggttagatccggttgactgcacgcaaatagacatcagagtttgcatatagaatgccctacactaacaacagtttatgagattgcccaaacgtgatctgatgtggaactgcagagtattgatgactgctagttgtccgagtctggactactgaacacgatggggcccatttagtggctggtgacatgagtgctcggcatggcccaagggtccaacgtaagaagtacagagggacgagaacagaaggctttctatctcagagcgagggtgtacttcctacttggttctggacatactgatgaccggaaattgcgagaacgcctaccttgggaaatgacgtgttaccgaaatgcgtgtggtcacaggtgccagcttacttttactgacctctcagcgtcaggctaccacagatgcttggtaacctagttgctgggtctcgacgtggatccttttaacgaaaactcacttcaagtggaggcccacaacatgggctggccttgggtatttgcgtgtgacggggcttcagaaccacaagagcgggtggacgccaggacacaggcaaagggtgcgccatccttggacccagggggacaggcttggcacccatgtctggaccgtgtgtcacatgctcactatttggaggga

SEQ ID NO: 667000 - DNA, 443 bp, Homo sapiens
  misc_feature (4)..(4): n is a, c, g, or t
  misc_feature (108)..(108): n is a, c, g, or t
  misc_feature (121)..(121): n is a, c, g, or t
  misc_feature (158)..(158): n is a, c, g, or t
  misc_feature (212)..(212): n is a, c, g, or t
  misc_feature (221)..(221): n is a, c, g, or t
  misc_feature (225)..(225): n is a, c, g, or t
  misc_feature (229)..(229): n is a, c, g, or t
  misc_feature (246)..(246): n is a, c, g, or t
  misc_feature (257)..(257): n is a, c, g, or t
  misc_feature (273)..(273): n is a, c, g, or t
  misc_feature (294)..(294): n is a, c, g, or t
  misc_feature (323)..(323): n is a, c, g, or t
  misc_feature (349)..(349): n is a, c, g, or t
  misc_feature (357)..(357): n is a, c, g, or t
  misc_feature (378)..(378): n is a, c, g, or t
  misc_feature (443)..(443): n is a, c, g, or t
agtnagggaatgagaagtagaggggagatggtggtggagatcgtttttatgtagttttcaaagttacttccgaaaaagaagatgaggtaatagttgaatatgccagcnacggacatgaggnacaggaagagtatgatgcgtttcccaaatatgtggcnaggggtgctctgcgttctctcttctaggtaaccgacaaagtacttttgccttanaaacaagtncatnagtncagcaaacgcagcaggnacttggctgcnaagtagccccgcagancagagcacagcaaggaaagtngggtacgcatcttcacagttctggttggnagtttagaaccgctcaaaggcaagtnttccggtnctctggaagctcctcccattntgggttctgctttcgtgctccactttatgggcaaagaatccattttggaccacgctgatgagggn

SEQ ID NO: 667001 - DNA, 1091 bp, Homo sapiens
  misc_feature (81)..(83): n is a, c, g, or t
  misc_feature (88)..(88): n is a, c, g, or t
gcggccgccgcgcccactgccgccccgacccttctccccccgccgccgcccccacgcgggactcccccggggagggggaannncggcngcggggcgagtctgggacgcgccgccgccatgatcatccctgtacgctgcttcacttgtggcaagatcgtcggcaacaagtgggaggcttacctggggctgctgcaggccgagtacaccgagggggacgcgctggatgccctgggcctgaagcgctactgctgccgccggatgctgctggcccacgtggacctgatcgagaagctgctcaattatgcacccctggagaagtgaccacgctgaaacccacccacccgctgtgctgaccatgggccctgagcgtcctaccccgaattcacgaggctgaggcatccgggagctggcgtaatgcctggccgcagtgtgtgtgtatcccataccccactctggaaggaaccatccagtaaaggtctttcagaaccactaaggtcccagccctcactaggatgtcaggagccaggtctaggcccagctttcacactgtggcagcccagtgaagcagactgggccatgaactctcctagccctggggccagcctgttccacaggcacccctgcaggaggcgctgccaggagagccttccatctcggggctctttgaggttccctccttctgggtgttcttcaggctgagcagagaggctcctgtaccctctctctcggaatctgaagagccagatttaggccgggcaaaggggctcacccctataatcccaggactttgggaggccaaggcaggaggatcacttgagtccagaaattcaagacccgcctgggcatcataatgagaccccatctctacaacaaaatttaataaattagctgggcacagtgttcacaccttgtagtcccggcatcagggtgagccgagatccgcactgggggtgcctggaaaaaaaaataaaaaaagaaaaaaaaacgggctctctcggggaaagaaaaagctcgtttttcccctttgaggggtcggcccgagcttgaaccacaagaccacagtcagactaaacacgccacaccaacaaaaa

SEQ ID NO: 667002 - DNA, 364 bp, Homo sapiens
  misc_feature (28)..(28): n is a, c, g, or t
  misc_feature (284)..(284): n is a, c, g, or t
  misc_feature (364)..(364): n is a, c, g, or t
tttgttttgttttgttttgagacggagnttgctctgtcacccaggctggagtgctatggctcgatcttggctcactgcaacctccacctcccaggttcaagcaattctcttgccccagcctcccgagtagctgggattacaggtgcatgccaccatggctggctaatttttgtatttttagtagagatggggtttcaccatattggtcaggctgatctggaactcctgacctcaggtgatccacctgcctcagcctcccaaagtgctgggattacaggcgtganaattcgttgcccagccttgttcttaattttgtatcatccagttcatcgcttaatattacacgcaccttcttcattaatcn

SEQ ID NO: 667003 - DNA, 418 bp, Homo sapiens
  misc_feature (156)..(156): n is a, c, g, or t
tcctatttatgggggttagtattgattgtaagcggtgtggtcgggtgtgttattattctgaattttgggggaggttatatgggtttaatagtttttttaatttaattaaggggggaatgatggttgtctattggttatactacatgcgatggctantttgaggagtatccttgaggcattgggggtcagggggtttgaggtcttgggtgagttgttttagttggggttagcggatggaggtaggatttggtgctggttgggttgaaagaagtatgaatgggggtggttggtttgtggtaaaactttaaataggtgtaaggaatgcttgaattaatttcactgacaggcagaagcgggtccaggggttgaaagcgcggttaccgttggtgggggtaccccggagcctccggaaattccg

SEQ ID NO: 667004 - DNA, 1189 bp, Homo sapiens
  misc_feature (81)..(83): n is a, c, g, or t
  misc_feature (88)..(88): n is a, c, g, or t
gcggccgccgcgcccactgccgccccgacccttctccccccgccgccgcccccacgcgggactcccccggggagggggaannncggcngcggggcgagtctgggacgcgccgccgccatgatcatccctgtacgctgcttcacttgtggcaagatcgtcggcaacaagtgggaggcttacctggggctgctgcaggccgagtacaccgagggggacgcgctggatgccctgggcctgaagcgctactgctgccgccggatgctgctggcccacgtggacctgatcgagaagctgctcaattatgcacccctggagaagtgaccacgctgaaacccacccacccgctgtgctgaccatgggccctgagcgtcctaccccgaattcacgaggctgaggcatccgggagctggcgtaatgcctggccgcagtgtgtgtgtatcccataccccactctggaaggaaccatccagtaaaggtctttcagaaccaaaaaaaaaaaaaaaaaaaaaaaaaaaaaaaaaaaaacaaaacaaaaaaaaaaccccgggggtttttttgggggggggggaaaaagggtttagaacggcgaccaggcgtgtcacatacttgttggtagtctgagcacccccagttttttttgtgtaacaggcggtggggaacatctcgggcgggcgcgcccccatatataggggggcgaggcgcggaattaaacttcccgcaaacaaccacggggtaccctcctttgttttaaatgtgtcttccgagccaacgacacagtactagcgaataacatacaggcagtagcaacagcgaataagtagcgatcaccaccacacagagacacgtccagtcacagcagcagccgcacgaacaaggtaaactataacgacctagatggcggacaaataaacggatcaagagcagatcttagatgaagagtagtccacgagatagcggaaggagagattcgaatagatagggggagcctaatagaatgaacagaaagcgacaaccggacgagaaagcgaagaagagaggggacagcgagagcggaggaagcagaagaagaacgaggatcaccgcgacggcacagggaacgaggcgaaacgaaacggacgcgagaaggaacaacgagcgcagcgcgggcacgacacatagtcagaccacgaaacgcaaggcgcgcgggata

SEQ ID NO: 667005 - DNA, 1041 bp, Homo sapiens
  misc_feature (81)..(83): n is a, c, g, or t
  misc_feature (88)..(88): n is a, c, g, or t
gcggccgccgcgcccactgccgccccgacccttctccccccgccgccgcccccacgcgggactcccccggggagggggaannncggcngcggggcgagtctgggacgcgccgccgccatgatcatccctgtacgctgcttcacttgtggcaagatcgtcggcaacaagtgggaggcttacctggggctgctgcaggccgagtacaccgagggggacgcgctggatgccctgggcctgaagcgctactgctgccgccggatgctgctggcccacgtggacctgatcgagaagctgctcaattatgcacccctggagaagtgaccacgctgaaacccacccacccgctgtgctgaccatgggccctgagcgtcctaccccgaattcacgaggctgaggcatccgggagctggcgtaatgcctggccgcagtgtgtgtgtatcccataccccactctggaaggaaccatccagtaaaggtctttcagaaccaaaaaaaaaaaaaaaaaaaaaaaaaaaaaaaaaaaaacaaaacaaaaaaaaaaaagaaacaaatgtgtggtggcggcgccccggcggcgcccccgagaaaaaccttctctaaaaaccacctccgggtggggcgcgcgggggcccccagtgggaaaaagaaaacgggggcacaaagggtgttcccaggaggagagaaccgcggggcaaaagagacaaagggggcggggagttctctcacaccacacaaataaaaagcgcccgcgggggggaaacacagaggggttttgcgaaacaaatccccaaggggggaggttctcaggggggggccacaaaaggggggggcggcataacacaagagggaggcgccacccaaggggagaacccccgcgatatactaaaacatatagccccccgggggacggggggggggggccaaaacagcgccactgacacggacgccaaccgaacagtcacatcaagagagcgactacgagaaaggaaagaacaaaacataaaacgacaaacaagcgaacacaaaagagggaagagagca

SEQ ID NO: 667006 - DNA, 193 bp, Homo sapiens
caagacccaaaagggtcaaactgtttccaagtaacttaactgcatgtggttattgaacctggctgtattttaaaattaattttattgtaggttatacaaaggtaggaagttcactagaaatggctatccttcgatttggctttaaaaaggatgagaaaaatcccacttgtgccatcatagaatatttgatgac

SEQ ID NO: 667007 - DNA, 156 bp, Homo sapiens
gggcaagtcgagctccagccggcgcttgagcatcttccacgccagctcaaacgtaaactcgaaacgttggatggtggcgtcgcgcaactcttcgtcatccggtgcggcagcggcgcgtgccaacgcacgctccagagctgccagggcgagttcaag

SEQ ID NO: 667008 - DNA, 123 bp, Homo sapiens
gaaagggaccccttgaacagggtgggccggggtggttaaaaaattggagccccatcccaatcccccggttttttagggggcccccctttttaattccccctttataaaatggtggccccccca

SEQ ID NO: 667009 - DNA, 439 bp, Homo sapiens
tttacaaatgtgttatttattttgcaagtggttagaaatgtttctgatatctttttgctgctggtatccaagttgcttccattgtgatcataggatacactttatgtaatttcaattattataaatgtggagcctttggatttattgcctaggatacagtctatattgatatatattccctgagtgcttgaaaagaatgtgtaatctgctgttgggggggcagtattctacaaatgttcatttgagtctgtggattgatggcgacgttgttccttctatatccttgctgaattattgttcagtgctgccaggcgctgagaaagggatgtcgaaaccttgaattataaatagaactcgcgtctatttccctgtgaacgtatacccattccgtcgatgtatgagtactccatccttcttgatggagaggccttctcttatt

SEQ ID NO: 667010 - DNA, 177 bp, Homo sapiens
ccttatcttcagaatcagaatcagctttgcgctagcctccctctgacttatctgtctcatgtgctgcttactgtgactgcagaaactcagcaatgaggtcggggcaatccaggctctcttctggctcccatgtgtcgccctcatctgagaatcccttccactttacgtaggactcca

SEQ ID NO: 667011 - DNA, 642 bp, Homo sapiens
  misc_feature (91)..(91): n is a, c, g, or t
  misc_feature (244)..(244): n is a, c, g, or t
gaacttgtgaaagaaaaattatatctgaatcaagattcatgttttatttttattttttttgatacagagtctcactctgtcactctggctnggagtgcagtgacatgatctcagctcactgcaacctccgcttcctgggttcaagcaattctcatgcctcagcctcctgagtagctgagaccacaggcacccggaacaaacccagctatttttttgtatttttagtagagacagagtctcaccnaattgcccaggctggtctccaactcctgagctcaggcagtctgcccaccttggcctcccaaagtgctgcagttacaggcgtgagcccatgcaacctggcctcatgttttttaaataatggccttttatatttacccttttgtgtcatcactttagaatgaaaattcccatttaaatctgaaaggttaccttaatagtcctctgtgtgttattaggacagtattattatagtacttatttattaatttacgatttaaagttatcttctcttttcttttacttctgctgcttaagggacaattaaaaagtgggaaaactatgaaacagtggaacatttttatcctacctgaaagtaaaccgagtaatggtgaagcataagacactggggtaataacaatc

SEQ ID NO: 667012 - DNA, 851 bp, Homo sapiens
ccagtggtggcaccgagactgacgaaaccccagaaggggatccacgaggggttgccccccccacccacccagacccagagatgggcgtgtcccaaagttcccagcgttaaggaaatcttgtgggagaaaggtgaattccagatgttgaatagattatcgcaataaggaaaagtaccccaagtaaggatgggtaagaaccctttggggaccccgaaatgttggcgcccagcgtcgtgacacccctccaccaactgcttaccaggatagggatccatggccccccctcaatgttgaggtgccaccctaaattgctttcccgcccccctggaagaaagaaagaaacgaagacctgtggttgttgcccctgagttttagccaacacgtggaactcactctccattaccccttttctggggttgaaactgctgtcttctagaagggccctctccaacattgtgcgttgtaatcacgtgcagctgctggaaggaaatcttggatatgcttatgtagccaaactttttaatctttatagttattttggaacctttgctttgggtttgtggcacccctcggccacccccctctggctgtgagccgcctctgccgtccgctgggctggccctttgttgatcttttatagtttccctccctcaccccgtccccctcttttctcggtaaggtgtttctaggaggtctttaggtgtacatcctccgcttattggctttaaaagtactttccctttaagtggtttctttggggcccattgggagaaagagaatccataaagccactgttttgatactggatattgaccagatgtctttttgaattaagaacccctcccccccca

SEQ ID NO: 667013 - DNA, 336 bp, Homo sapiens
gagaccagtgccgatgggggtcctccgtttgttgagcgccggtcctctgggcccagtgttctttctctatacttgggctctgtgtcttatttctttactcagactctaatcccagctgatgagaaatagccacaggtgtggaggggctggccccccttcagggttttatgccttgggattaggttgtaatttggaagggaagccttccaccctttggaacagagctgggtgttccaaagaccacaaggggtttaaggccctggaccccggaatgttccaagattctatataatgtcagactagcaagccctgcctcagatattccccaacatggaa

SEQ ID NO: 667014 - DNA, 559 bp, Homo sapiens
gactgtcgaccaggttgaagcgattctccggcctcagaactcccgagatagctgggactataggtacactaattttatgtattatttattattatatttatttatttatatcgagactgaatttcactactatattgcccaggctggagtgcagtggcacaaactcggctcaccgcaacctctgcctcccaagttcaagcgattctcctgcctcagactctggagtagctgggattacaggcatgcaccaccatgcctggctaattttgtatatttaatagagatgggaattcaccatgttggtcaggctggtctcgaactcccgacctcaggtgatccacctgccttggctcccaaagtgctgggattacaggcatgaaccaatgtggctggcatttaaatgtaatatattgtagagatggggtcacactgtggtagacaggattgtaccgatctcctgagctcgtgatcacccagccttggcctcctaaagtgctgggattacaggcgtcagccataataccttggcacagtccgaatataaatcagcatcattact

SEQ ID NO: 667015 - DNA, 458 bp, Homo sapiens
  misc_feature (13)..(13): n is a, c, g, or t
  misc_feature (82)..(82): n is a, c, g, or t
  misc_feature (109)..(110): n is a, c, g, or t
  misc_feature (151)..(151): n is a, c, g, or t
  misc_feature (169)..(170): n is a, c, g, or t
  misc_feature (218)..(218): n is a, c, g, or t
  misc_feature (237)..(237): n is a, c, g, or t
  misc_feature (242)..(242): n is a, c, g, or t
  misc_feature (319)..(319): n is a, c, g, or t
  misc_feature (321)..(321): n is a, c, g, or t
  misc_feature (323)..(323): n is a, c, g, or t
  misc_feature (440)..(440): n is a, c, g, or t
tgctactgcgggntcctgcccaccctctgctccaaccagccctgagcgatgagcgcacaggcgagcgcggggcccatcactnagggggccatgggggaaacagtctccnngaggtgctgcccctggggacccagaaaagtaggactttttntcctaggacccgcatcgnngcaggggacctcattcctagtgcccaccataggcaaccctttgcccantctgaaaagaggggcttgncgctngggtgggttttggggttggttttgctatcctggtttatttattttcagctcaagatttaattaggtttaaatttatncngntatgcctcaacttaccatggggttacttcctgataaacccatcataaatgaaaatatcctaagtcacaaattcatttaataccccaacagaccaattgtaaagttgaaacatggttnaagttgaaccactgttaa

SEQ ID NO: 667016 - DNA, 192 bp, Homo sapiens
agacacaggctcaagatggtcagggagggatcgttgacctcgtctgttatgtaaatgtgatgcgtagggattggagtggcgatgagtgactaggatgatgtgcgggcagcatagttcatgacggtttctattctcctgagctgtctgatcatgttctgtatctagttagtttctgttgttgcacgcccactc

SEQ ID NO: 667017 - DNA, 703 bp, Homo sapiens
acctccaccgtggacgctcacggaacagcctgtctggacatgatgtgctcgatacgtcttctccaatgttcacggctgtcccgaagaggtctcctgtgggcgaggttcctccttagcggggtggcaggatccatcagatcctggcgtggtgttggggaccaaggtcgttgtcatctgttgtaccgatccatgcgtggggaacccgggatcccgggtccgttacgtaggccctggagctcgggggggagcctgcgatgttccgggcccctgtgcacgtgccgcacgtctcctatgtcccctgtgcgggttgcgattgttgtaggcaccatgcaccatatgtggagtgctgcctcgggctagagcttggtaggtcccatgtgcgtggggccagccagggttgttcccgttgggtggcccctggtgggatctgggggctcccgttccgattgtccagtgggggggcccgattgggctgcctctcggcaggtattgggcggcgcccgtgggactcgttgccctgagctctctcacaagggttcgcctggtggtgcctcgtggcgctgcgtttcctctcccagggacccacttgtggacatggggggcccatgtgcggccggggaaaacccttgggagcagagggggccttccaggccttgggtggaccccctgggggggtttccctggttgcccggggagtaaagga

SEQ ID NO: 667018 - DNA, 117 bp, Homo sapiens
  misc_feature (73)..(74): n is a, c, g, or t
gatccgcccgcctcggcctcccaaagtgcttggattacaggcatgagccaccgcacccagcaagagttatttnnttaacttgaaattttctactagccctggtgaacttctgtgctt

SEQ ID NO: 667019 - DNA, 470 bp, Homo sapiens
  misc_feature (6)..(6): n is a, c, g, or t
  misc_feature (20)..(20): n is a, c, g, or t
ccttantacttggaacatanaattttggggggttgaatggttggaggggccttttaattccaactcagtaacatccttaaataaggaattaatgcccccccccaacttgcccttacaagtccatatattaaaaacaatgttggccctggcacagtggcctcatgccctgtaatcctcaacactttgggaagcccaagggaggaggatcacttgagccccaggagttggagaaccagccctggataacaaagggagacccagtttcctacaaaatatttaaaaattagccaggcatgatggtgcatgcctgtggtcctagctattcaggaaactgaggtgggaggatcacttgagcctggaagttcaagacagcagtgagctatgctcacaccactgcactccatcctgggcaacagagctggactctgtctcaaaaaacataacactaaaacatcaaaattaaaaaaaaa

SEQ ID NO: 667020 - DNA, 185 bp, Homo sapiens
tgcatgtcatcgccaaacacaaaaaaacaaaaaacttcccagtgctgggcacaggtggctccacacctgtaaatccccagccactttgggcaggccaaggccaggtggcatccactgcaggtccaggcagttcccagcaccatgcctggtatacacatggtgacacacctgtcatcccactcaac

SEQ ID NO: 667021 - DNA, 465 bp, Homo sapiens
tgtgggcgcacttcccaaatcatcaggaggatcagcagctgactcataacaagatcacaagagctgggctcttgtagaaggatggtagacctgaccttcatccatctccagcacaatcggctgaaagaggatgctgtttcagcggctgtgaagggtcttaaatcacgcgaataccttgacttgagcttcaatcagatagccagacagccttctggtctcccggtgtctcttctaactactctacttagacaacaataagatcagcgacatcgctgatgagtattgcaaggcgttttaatgcatagcagatatcgtgcgtttatctcacaaggaactggccgactgtggaatacctggaaattctttcaatgtgtcatccctggttgagctggatctgtcctataacaagcttaaaaacataccaactgtcaatgaaaaccttgaaaactattacctggaggttat

SEQ ID NO: 667022 - DNA, 277 bp, Homo sapiens
gattacaggatcttatgcagggactggcatgtgcggaataggaggtgtcgggagcacgcctggcagcccatgctaggtgcaagaggcttgcagctcctgcttgagaaggcaaagggtcattgcttcatcggcaggtaggtagccaggaggtatcggcgctcagaataggggggtgggtgatggacgttgggcttgtcagcaggccggtggcagcgggggtggcagcggcactgggaaagccagcaaagctaaagctatgctggaggcgtggacggtc

SEQ ID NO: 667023 - DNA, 1054 bp, Homo sapiens
cgtctttaaaccctgcgtggcaatccctgacgcaccgccgtgatgcccaggaagacaggacgatcctggaagttcaactacttccttaagatcatccaactattggatgattatccgaaatgtttcattgtggcgagcagacaatgtgggctccatagcaggatgcatgtcagatcccgcgatgtcccttcggcgggaaggctgtggtgctgatgggcaacgaaccaccatgagtgccgcaaggcccatccgagggcaccgtggaaaacaatcgcctaaggcttcgtggagtaataagcgtgcgtgcctgagtatccggggtgaatgtgtgggctttgtgttcaccaaaggaggacctcacgtgatatcagggacatgttgcttggccaataaggtgccatgcatgctgcccgtgctggtgccattgccccatggtgaatgtcagcttgtgccagaccccagtaacacctgtgatcgttcgggcccagaggaagacactctctgttattaccacgggctatttagcgtatgcaagccatcttaagaattctcccagggggcaccattgaaatacctgagtgatgtgcagcctgatcaatgacttggaagacaaatgtaggggagccagcgaagccacgactgctgaacatgctcaatatctgcccccttctcctttgggctgctcatccagcacggtgttcgaccaatggcagcatctacaacctgaaagtggcttgatatcactgatggatgtctctgcgttctcgcttcctggaggtgttcggaaagtagccggtgtctggctgcagaatggtacccacttgtgtgcattctgtacgcctattctatcatcgagtgggttcaccgagtctgggcttgtctgggggacggttagccttcccactggtgaaagggacgcctctgggggtcactgccttggggtgtgcccttgttggccccccgtgtctgtgttgtggccccagtggcgccgctgtgcgtgtttggttttgttcccaccccgttttggaacgcgttttaaaacccctggcggggg

SEQ ID NO: 667024 - DNA, 190 bp, Homo sapiens
cacgagcgccccaaggggcacgacagccccaagcgggagtacaaccttgcgatcttggttcactgcaatctgtgcgttccgtttcatacatacatagcagcttgagcctcgcgcgcagctgtcactacaggagcatgccaccatgcctggctacttcatgtagctcttagcagagatggggtgtcaccat

SEQ ID NO: 667025 - DNA, 605 bp, Homo sapiens
ctaaatatcatggagtcaaaatcttcggaaaagaatttcgttaatacgttcagggggcgcacccataagaaagtgggttaaaaagctgcccttggtcttcttagtgctccaacagaaagtggcctccctttgatccggctctcattgccctgttccccatccaatagttcggaggggtggtcaggaaaaaccccggatgtccttccagttaggtcattattaaaatgattcccctgtccctgtgcgcatggaacgcgggaaggtcgcctctgcccgagaactcgtccttgtagtccagcagcgcttccttcaccgccttgtagccgtgcatcaccaccatgcgctgcgagcccacgtacagcgtgaacaccggcccgaagcgctgggcaaccgggtaaggacttggaatatcttcaattccaactgaaaaggttcccgatgatgggaagcggaaaagggcctgggggcagattccaagctgctgtgcacctgcctccacatggacaccagcagaagaaagccggcccccaccagcagggccccggtgactccgaggccaacatggggccgctggggcctgctgccagctgggcgaatcctcaagc

SEQ ID NO: 667026 - DNA, 432 bp, Homo sapiens
gtcggcccgattaactgcacaagagcaaactctgtctcgttcaaccaatcaatcaatcaatcaataataaaaaaattagctgggtatggtggtgggcgcctgcagtcccagttacttaggaggctgaggcacaagaatcacttgaaactgggaggcggaggttgcagtgagccgagatcgcaccactgcactccagcctggatgacagagtgggactccatcttgaaattattaatggttacaccagtacaacaggcgtacatcggaggtgtcccaggcaaacctggatgtcgggtccctttgttatacatgaagtgttggatttctcacttaggtggagaatagtgaaggtgctcctgttgagcctgggtatcactgctgctgttggggattggcgaagtgcgggtctgttaggatgctggaggaaaggaa

SEQ ID NO: 667027 - DNA, 111 bp, Homo sapiens
cctaattttgtaaacatgggggggaaaccaaagtttttccgatttccttttttggggtttacccgtttcctttttccctttttaaaaaaaaatgtctttatggtttcttta

SEQ ID NO: 667028 - DNA, 133 bp, Homo sapiens
  misc_feature (39)..(39): n is a, c, g, or t
  misc_feature (44)..(44): n is a, c, g, or t
  misc_feature (85)..(85): n is a, c, g, or t
  misc_feature (99)..(99): n is a, c, g, or t
taggtggattaactaaacacagctacgcaaaatcttagnatacnccactattacacacatagtattaataatagtagtctacgtntaccctaatattanattcttattatattatttatctaatactatgtat

SEQ ID NO: 667029 - DNA, 956 bp, Homo sapiens
ggggaggtgtttataatggcagtaatcagtcgacccacgcgccttcggctgatagctccggcttgcatcacccggacgggggatgagctccggtattgcatcacccggaccgggggatagctccggtaatgcatcacccggaccgtgggccgggcgcgcacgagactcgcagcggaagtggagtgcggctccgctgcgcgatccagctgctaggacccagggcagggctggagctgggctgggatcccgagctcggcatgcagcgcagctgggccggcaccacctgctggtgccctggaggctctgagccccggcggcgccctgggcaccacgcggaacgacaggggcgagatgcgagccacccctctggctgctccttgcgggataccctgtccaggaaagacagcggttggagatggatgacaaccttagataccgagcgatacccgatacaagaaaacgagactacgaagatgggccccagaaccaggacatgaacaccacctgcctgtaggacacagtgaaagccccagacctaaagtgctaccaggatcggttgcaagatggctgttggcacactgacctcacaagatcagggggcccctaatgatacctccacatggaagccacagaggagggacgaggcgtaggacgtaacgagggccccatgcaacaatgacccataacagaggcagcatgaagagtcaatgagcccactggcaaatggggataggtacacacacctagagccaaaaaggaaagggacccctaggagacctagagtagcatagagaagaccaataactagcacgctaggagttaggcacacgcccgaagcaaaagcaactgatagggacaccaggagcagccagctgaaaatggtaccatgggatatgagaacacacaagctaccaatctacccagccaaagagatcagtacaggaacccaatagagg

SEQ ID NO: 667030 - DNA, 245 bp, Homo sapiens
aattggggtccccccggggtttttggggggggttccccaaaaaatggggttggtttggcccccggggtttttttttttaaccccctgggttttaaaaattgggggttcttttttgggggggggggccccttttgttcccctttggggagggggggcggggccccccggggtgggggttttttttttttttttgcccccctgggggggggaaggggggggtttttaaaatttttttttggccccca

SEQ ID NO: 667031 - DNA, 433 bp, Homo sapiens
  misc_feature (49)..(49): n is a, c, g, or t
gggtgtgcttggcatcctttcttcatatgtccacatatggccgaccagnatcgaatgaatgggaggcattttcctaggtgcattgtcttttctctactgaaccttgtgctcctgatggcttttctcctccctctttatagttagttccttgtgaccttttcctcaagaagttaataatggtggtagtggtttcacagtaccagtgctgacatttcacatctgggctctttttatgtctttagtctcattaatcctcactgcatcttatctgggcaggtggattattctcgctcggtgtagatttggaaacctaagcttcagagaagtagaatactttcctgtgacactaagagtttagcagagacaaaactgtaggtcagttctgcttctcctgaatttgtagttattatactgctcccatgaagcggctgtg

SEQ ID NO: 667032 - DNA, 175 bp, Homo sapiens
gagttatgagctgcgatcgcgccagagcattccagcctgggcaacacgagtgaaactctgtctcagaaaaaacacaaaaaacagcaaacaaccaaaaaatactagtgcaaccggggcccatttccttctctgcagaaatggtccattggcttaccacaaacctttccatagggca

SEQ ID NO: 667033 - DNA, 103 bp, Homo sapiens
ctttctctctccccggacagcatgagcttcaccacatcgactccaccttcatccacgcaacataccggatcccatgggactctgatccaggcgcccagcatac

SEQ ID NO: 667034 - DNA, 574 bp, Homo sapiens
gattacgctcctagacgtgctttccgaagttcgtccatctcaatttttctgggccgtggctaatgcctcataggtaggagtcctcagatcagccatggggatcagacatatcccggggtctcggctgtaatctttggtctttagcgaagggggggttggtatgtgctgaagaatatgggagcatgaagtgcctatccagcggaccctgaggagcagcaggtcacacatgttccctccagtcaggggccaggtaccaggccggacaccggaatctcttcatgggactatttcagaacaatagggactcagacagaagagacagggacggtgctttcgaggagccgtgccaccacgtggacctttctgtggctgcaggtcaaatcccatggaacaagcaaaggaccctgggtgtccccatcaccctccagccccgtgtgccagacgcacctttgggtagttggtgccaagctcgtcaatggcacagaactggatcagcttctcgtagatgctgaaagaacagtgccggcgctgagcaggcacaagtccacgtcccccgtctaggagcgtaatcggg

SEQ ID NO: 667035 - DNA, 149 bp, Homo sapiens
aaaagtgcagcaacgaacgacagccagctggggaacagaatgctcaagggagagactgtggttcttgccagcgacagcaagagaaagaggcttcagcctccccagaccctgccaagacagagcttcatcgtgtagggcctgcgacaaaa

SEQ ID NO: 667036 - DNA, 331 bp, Homo sapiens
atcatacttgaatcaggatgatatgtctttcttgtattcctggtcttgatgaccttgatgtgactatgaattacagatctcactccccggtatcccacttttcggtgccaattcaaagcaggtgagtatcacgtttatctcctatcctcacagtctgatatgtggtcagtccgtccatagcacccaacaacttccatcttccctgtattatcttgtatatcataataagtgaattcaccccttacatttttcttatgtacctcaaacaccccattcacaaaacttcctttagtttgtgagcaacagctggatttgcactattcttacgcgg

SEQ ID NO: 667037 - DNA, 655 bp, Homo sapiens
  misc_feature (20)..(20): n is a, c, g, or t
  misc_feature (23)..(23): n is a, c, g, or t
  misc_feature (29)..(29): n is a, c, g, or t
  misc_feature (37)..(37): n is a, c, g, or t
  misc_feature (46)..(47): n is a, c, g, or t
  misc_feature (50)..(50): n is a, c, g, or t
  misc_feature (55)..(55): n is a, c, g, or t
  misc_feature (66)..(66): n is a, c, g, or t
  misc_feature (71)..(71): n is a, c, g, or t
  misc_feature (89)..(90): n is a, c, g, or t
  misc_feature (111)..(111): n is a, c, g, or t
  misc_feature (120)..(121): n is a, c, g, or t
  misc_feature (124)..(124): n is a, c, g, or t
  misc_feature (141)..(141): n is a, c, g, or t
  misc_feature (143)..(144): n is a, c, g, or t
  misc_feature (167)..(167): n is a, c, g, or t
  misc_feature (191)..(191): n is a, c, g, or t
  misc_feature (241)..(241): n is a, c, g, or t
  misc_feature (246)..(246): n is a, c, g, or t
  misc_feature (251)..(251): n is a, c, g, or t
  misc_feature (265)..(266): n is a, c, g, or t
  misc_feature (313)..(313): n is a, c, g, or t
  misc_feature (377)..(377): n is a, c, g, or t
ccttgaggtttccgcaagancantttcanttagtctncagcaaganntancatanggccctgcccnatccngaatgctcagttaacttnnacttttcataaaagtaagttntctcaaggnnganaagtcaactggtgtganannaaacagagatcccgtcagttatnctcttttcagttcaaactgtgctngtgagtgcagttctaatctcagttaggggagatgccattcactctctgcnagagnagtantgaaaactggtggnntgtcagctttatttagctcacctagtgttttcaagaaaattgagccnccgtctaagaaatcaagaggtttcacattaaaattagaatttctggcctctctcgattggtcanaatgtgtggcaattctgatctgcattttcagaagaggacaatcaattgaaactaagtaggggtttcttcttttggcaagacttgtactctctcacctggcctgtttcatttatttgtattatctgcctggtccctgaggcgtctgggtctctcctctcccttgcaggtttgggtttgaagctgaggaactacaaagttgatgatttcttttttatctttacgcctgcaattttacctagctaccactaggtggatagtaaatttatacttatgtttcc

SEQ ID NO: 667038 - DNA, 427 bp, Homo sapiens
  misc_feature (31)..(31): n is a, c, g, or t
  misc_feature (36)..(36): n is a, c, g, or t
  misc_feature (75)..(75): n is a, c, g, or t
  misc_feature (96)..(96): n is a, c, g, or t
  misc_feature (144)..(144): n is a, c, g, or t
  misc_feature (199)..(199): n is a, c, g, or t
  misc_feature (217)..(217): n is a, c, g, or t
  misc_feature (250)..(250): n is a, c, g, or t
  misc_feature (414)..(416): n is a, c, g, or t
agttttgaaagttaggaaagtgtaaagaacncccantgttattgtttttccaagattgttttgtctgttttgggncattataatttaggatcactntgttattatcctgcaaagaagcccaggggagattttgatagtgattgnccttaagtctgtaaatcaattagggaatattgccatctgaacaatgttaagtctntcaatcaatgaacattgnatttatttccatttatttaggttgtctttagtntcttttgacaacattttgtacttttccatatacaagtctggcatttgttttgttaaatttattcccaagattgtttttctttttgataccattgtaaatggaatcattttcttaagttcatttcagattgttaatttctactataaagaaatacaattgattannnatattgatatt

SEQ ID NO: 667039 - DNA, 710 bp, Homo sapiens
taacccatggtactccagcctggacaacagactgagaccctgccttaaaaaaaatgggtttttaagtaaacaggcacacatatgtgaaagctaaggaatgcccaagttgttgatgctatgataatgattgaacgagacagggtcttgctctgttgctcaggctgtagtgcatcggtgcagtatccgatcactgaaacctctattggctgaagcgattcttcctgcctaggcctgctcagtaggtgggattacaggtacgcacgactagactcaggtaatttttgtattgctggcagagacgaggctttgtcatgtaggtcagggtcaggctggtcttataactactgactgacgggagccgactaccttgactctgaaaaagctgggttacaggcaaaagaatcctttccaagctaggaattttcaaattctggtattggttataagatgaaagtatcggccgcctttgaaagaatggcgttcataccaggctgatgaaattggaaagccccatttctttttataaataaacgttaatatttttggtgtggcccttcttgttttaccatatcgttggtcccagcacttccggtgttaatgatggaaatatacctaaatcgggtgggggtggttgaattttgtactcccttttaatataaggggggctcgttgaggggatccccattattatgggtgggccttcgtgttcc

SEQ ID NO: 667040 - DNA, 390 bp, Homo sapiens
tagagccattttgcttttctctaggctatcgaatgacctgggtctcccagtgctgccctcttcgaggagccgtcactgtgcgctactccttcaccttcatgttctccctttcctgcttccgctcctattgtatgcgtcatcccgatgtgctgtgcatgaggacatatatgtggcccctaacgctgtgcagtagatcggagctattctcgattcaggagcaggctcctctctctagctatcaagctgcaggttccgcctatcctttagaggtctgtctgtcggcatgttctgttgagcctgtgccgtcgatttaccatcgttcgatgtctagggctacccagtagtggggtatctaatcccagtttgggtcttagctattgtgtgttcaga

SEQ ID NO: 667041 - DNA, 120 bp, Homo sapiens
atgaagtatcctgggacttggccctgtcaggtaagttggggctgacagtggagatcctcacaggagagtaaccgatgctttgtggacacagattgctgcgtcgagctaagatgttaaaca

SEQ ID NO: 667042 - DNA, 324 bp, Homo sapiens
gtcagactttgtgttcatttcatttcagggtcttggctgcctgtgggcttccccaggtggcctggaggtgggcaaagggaagtaacagacacacgatgttgtcaaggatggttttgggcctagaggctcagtggtgggagagatccttcagaccaccaaccagacgtggtttccttagctttactagaaaagattctgggctgtttatgaaatatagacatcctcacatagccagtcatcacattcctcttaccttcagtcagttcttccaataggcttggtcaacttggggccggcctcagtctcggagggcaccactcagct

SEQ ID NO: 667043 - DNA, 696 bp, Homo sapiens
  misc_feature (523)..(523): n is a, c, g, or t
tgggtcctgcgtcttgcgcttgaaagatcgggtgcatctcaaagagttatttttggaaatgaacccactcgggcttgccacccgatgtcgggcgcatgccgcgcttacataccttgctgctcaatgaaacaagcctggtggagtggcctagcagtgtgttccgtgtgcccaggccggaagacttcattctggatatgcggcagaacccgatagcgtggattcccgagttcgcgccgggctcggataaggcattgattgtggcgaaaaccttcctcacccgtgaaacgctgacgcctgaactgcttgctcaattcaagcggtacatcgaggctgccggccgggatccggatcgccaattgccgaaaaggggcgcgcgcgacagcgagcagtggaaaaccggttattcggcgcaggaatggccctccaggcaagtgttatgggacatgcttgaaggttcgtttggctctgagggctttttcaatgttcttcgtgccgtcagaaactccggggactcgacactcangggcggcgtatggttgccggaactgaccgccaaggtctggcgcatactcgaggcgatgggcgaagacgccgaattgcgcgagcagttgttcctgatggcccgggaccctgcagcctgcgtggacgccggacgccagatgtcaatgcgatgcgggaccactcggggatctctag

SEQ ID NO: 667044 - DNA, 844 bp, Homo sapiens
cctttgtgttaacccgcccgtgaggaagattgctctcccttgggccacgggttatcccctaacaagccccgccctgctcaacctgtgctgattttctcaaaaaaggatgaggggcaacaacaaagaggcccgtttctccacccaacacttgtggttgggaaagaaagcaagataagttggctcgcatgtgtagatgtacggcccgcaaggtactttccctcggcacacccattggagacgaggttgttcaagcacatagagcatgttcacaacaggcgcccattgggttagttccaattcctgggggtaaaggggcctcctaaacccactgttaataaagatgtccctggatgacgcccctctctgatgtggctgtgggcacaaatacgctcagaggaggccactggtattagccccggcctccatatccagggcgtgggatgggagacagacagcgtacataaagaggggggtcctgcttccccctcactagatagtcgcctctgtctggcccacagcgccatctttttccgtataaaagaaaatcggcttgccactcattcgcagcacttgcaccccacgtttatacatcctatccaaggaaccaggtaggaccgtcctatataaatgtcgcgcggcggggccattatatacaggccgggggtacagacaggaaccgataattagttcactctatcccgcacggagcctcacagagatagaaatgttgaacatcgctggccttgggcactttggaaatagaagtccgagcttgcccactgtctacggaacacccacgctttcgaaaaaagaggcagaaaacaagcttcaaaaagcgacaaca

SEQ ID NO: 667045 - DNA, 348 bp, Homo sapiens
  misc_feature (28)..(28): n is a, c, g, or t
  misc_feature (50)..(50): n is a, c, g, or t
  misc_feature (142)..(142): n is a, c, g, or t
  misc_feature (160)..(160): n is a, c, g, or t
  misc_feature (230)..(230): n is a, c, g, or t
  misc_feature (253)..(253): n is a, c, g, or t
  misc_feature (332)..(332): n is a, c, g, or t
cagagacacaattaggctccctaatatnactgattttatacccccaaatnatagacctctccttttggtggcagagtctgatccagcacatttactatgcgggtaggcagagaaggcccactcagaacaggctctctaaatnagcagaagtgtatttaantgcactactggatcccaggccatagactcttcatcggcactgttcaacaagaaggaaagtgtacattttnttgttgtgaggcggggcattggngaagacactattaaaaggcttaagctattgttctcagctgggaggcagtgctgcttccctaggacgtaggggcattttngaaaggtgttgggggt

SEQ ID NO: 667046 - DNA, 275 bp, Homo sapiens
gtgacaaacaaaaggaggggtgcactagaatttcaataggcttcctaatttccataggaaaagcaaagcaacccaatgccttcctgagccttcagtgcattaagagagttctttagctgcaaccagccaccaagccttcttgggctaggcaattacttcccactggaacagcagcagcctttttcccctctttgtgtttcatgaagacacggctgtcctctagggagccaggaaatagatacatgggcaactttcaaaggaatctctaccctgtg

SEQ ID NO: 667047 - DNA, 676 bp, Homo sapiens
  misc_feature (32)..(32): n is a, c, g, or t
ttttttttttaaaaggagaggggggggggggngggggccccccccccggggtatgtattttcttccccccccaaaatggggggggggggggcccccccccccccccttttttttttttttttttttttttccaccccccccggggggagagggggaaaaaaaaaaaaaaaaacccccccacaaaaaaaaaaaaaaaagggggggggggggggggggaaaaaaaaaaaaaaggtttgtgtggggaaaaaaaaaaaaaaatttgtggggggggggcgaaaaaaaaaaaaaaggggggggctcccccaaactttttggggggggggggggggggggggggggggaaaaaaaaaatttttccccccccccccccccccgaataaagggaaaaggggcccttttttttttggtggtgtgggggggggaaaaaacacccccccaaatttttttaaaaagggggcgcaaaaaattggggggggggggtttttttaaaaaaaaagggggggccccgggttttaaaactcctcttaggagaaaaaaagggttttttttaaaaagggggctttttaggggtttaaacggggttaaacctttttggggcccaagcccctccaaattggggggtaagggctagcctgaatgggtaaaaggctcaaaaaaatcttgcgagaaaaaaact

SEQ ID NO: 667048 - DNA, 1216 bp, Homo sapiens
  misc_feature (344)..(344): n is a, c, g, or t
gtttcgtgttgtttggtggttcgcgttgcccgtttctggagttgtgaggttttgtatcggccttatgtcttagggggtccccaccgtgtttcgtgtgaagcctttcgcggtccgatggtccccgtttccgccctttttttgagcccgtgccttttcgccctgggggtgacccccgtgtcccccgagtactgcccctgagagggcactttctcttgggtctactctttgccaggaactaatgtgttaatgcctggcgcgaaaatcatataggtctcttggtgaacactagccgttattatacccccgccattggatatagggccacacccccccgttgttcccangatacccctggccacgtattttggcccccctggccatttctggaatggctttttaaatcagctcttccaagtccaaccgaaatacgcttgggaattttgagctggtagcagccttggattctattaaaggcttttagaatgatgcacagtctttcccactcacgctgaaatcttgggaaataatcgtctccccacttgaggagttgttcccctgaggaccataattcctcccagggaataggtgtttgagatcccaagatgtgcgcccatagagacctgtcacaataaaggtgatccttttgtttggggatattattcttggaagggaatatatctcatagcctttgtgaatagcgtatatctttagaatatagcgcatcccctgtgccacaaaatatgtccaaattgtgctcatataatagcctctacaagttatataaaatattataaatatttggaatatttaaataatattaatagctctacacattctctagtgacaccatatgtgaaaatatttcttttatattattcgccaataaccgtgatacccataaaacttttacaaatattttctcagaaaccatcgatagtgaatactgacttttagagagaccacctatattcttttttttcaagatgtttcccaataccctttaacttattactacttttcttttttatttacccgtgctggatagtatcccctggccaccaatactgactatagtccattagttttccattgattcttatgcgtagtctttttttatgctgaaaacattctcctaaaaccaagagtgtgtgtatttactaattttctgtattgacagaagcccccatggaaactccaataaatatttgttgaaaga

SEQ ID NO: 667049 - DNA, 922 bp, Homo sapiens
ggcggccggtcgcctcctgggaaggagaggaagcgggagaggaccccagttgcctgtcacccaatatctccaggccgcgcagtcccgaagagtgtaaagatagttctgccgtgcgccaaatgctcggccgtgcacccgctctctgatccgagccggatccaagagtggcatacaggacccaattctgcttcaggtgtatctcgaccaagaggctagtagggacgtgaagaggggctcaaccggttattataatgggggccccagaaatgggtgtgtctccagctaaatttcaaagaggggcaggtttccagacccaggtgcaattccaggcacagacgatcattgtgattcggtgtgtgcaaaaatttttattgtgcgtgcacgtgttgtgtgaacaagtaagggaaggtggcctggtaccggggggcgggtaatgggacaacaggttctttgtgggcaacgccttaaatacatggggttaattgccaagaaaaccctttcgttgaaaagccaggaaggttgttctcaatatgctatccgtgggattgggcctgttgtatggaaggcgaatggggtcctctatggatgagatggtggtttctggattgtggtgtggccatgtaaccaaaattagttgtgggacattgtggggcttcaatattaacttacggaatggacaatccgggtggtagtcttagtggggactccgaaaaaatggaggtttggcggtcatgggcaatggtacggtattttcaaagtccattttccttaaggtggaagctttcacacaaaaataacggtgaccaacttgtgtgggggcggaaaaaagagaggccaaggagtttaaccattgtgggggcgggcattataactggaatggttcaagaacgggaaaagggggttcacaaagaggggccggtga

SEQ ID NO: 667050 - DNA, 416 bp, Homo sapiens
  misc_feature (298)..(298): n is a, c, g, or t
aggtgatgaaaatattctaagttgactgcagtgatggttgtacagctctatgactatactaaaagtcattaaattgttcactttaaatgggtgaattgtgtataaattatgtctccataaagctgtttatttttttaaaagacacactaaagaagaaactttcctgcagctccagctgaccttgcaggctggccttttccgatctgacctgtgctccctaagctccctgcgaaggagataaattgagctcctggtctgcaacagctattggttattggaatgtctgcttttgttttgnacgagattgtgacccaccttcttatacagattgaatagtatatatttggggatccgggccaaaccccgttctggatgactaaatcccttactagacctacgaagttttctgtcagaag

SEQ ID NO: 667051 - DNA, 748 bp, Homo sapiens
  misc_feature (102)..(102): n is a, c, g, or t
agcggtggggattttaaaaaattcttcaaaataccagttttttcccaacaagtacaattgttcttgtgccttctgtggctttcgatttcatctttatgactntatttccaattactacagctgcaataaacactaaattttttttctggctggttgacataacggtggtagccttgctaatttggggctttttaaaacaaagcgggaaaataccgtttttgaggacaaaaattttaaaaccagttggttcccgaaattaattttttcctaaatggttggaacagcattcgagtttggaaaattctggaagaagccattttttggtacctgtggagcaaaccttgtgttttctaagcctaatgaaaggtagtttagaagcattattcaataccatgtgctatatatgtgtccgcagatgtgtgaccttaaattcacatccacgcatgtacacacatgtaaaattatacatatatatatatgcgtgtaaagtgaaaagttacctttccctatctagatttaagaacctattttacacatttgttatgttttggcgataagaaggctatatgtgcaacaaaacatttaaatctaacggcatctttggcgtgttaatgaaggacgttcacattaagggtaaaacacatggaatatgttggtaggaattttttaaggaaaccgtcacccacatattccagaaatttgctctgcgcctccgagttttattaattggaagtgtttaatgttcccg

SEQ ID NO: 667052 - DNA, 856 bp, Homo sapiens
ggacatctcggtggtgggcactgggcagaccagattcgttcgtactcgtgcgcctcggtcgctttcctccgcatccgtgtctgacaaatgcgatatggctgagatggagaaagttcgagtaagtcgagaactgagagaagacagatacgcaggagaaaaatccagtgtcttccaaagaaacgatgtgaagaggagaagcaagctaggggaatcgtaatgagggggtgagcacgctaatagtgcactgtgacattcacacaagcgaattggctccttagtttgtagttatatattaggtgtgttaacttttgcaagatgcaatggaggtggatgcagtttaaatgattgtgctggccctttcagatcaaatgaactagctgactagacgaggggccgtgcttggcctttgcccatctgtcgtatctatcgtggctggagggaaggatgagaaatttgcagtgtttggtgaaggatgaagtggggtggaagaagtggggtgggtacgatgtgaaatctagaggtataactcagctggaccaatggtgtctgcaggtctgtaatgcagtttgaatcagagtgccatgctgtttctggtaccattgtgtttgaattgtgtggagtggcgacatttggttgtgtattgcaggtaaccatgtttaggaactttgaaatgatggtacagataatacaatatgacaagatgtcggggggaaaggaccttgaagagttgtaaaaacagggggggggggggcgaggggttggaaaatggagaggggttcaaagaacgggaggaaaagtggttgtcaaaaaacgggggaggggctgaaataggtgggctgggtaaggacaggtacca

SEQ ID NO: 667053 - DNA, 884 bp, Homo sapiens
  misc_feature (31)..(31): n is a, c, g, or t
  misc_feature (66)..(66): n is a, c, g, or t
  misc_feature (116)..(116): n is a, c, g, or t
  misc_feature (144)..(144): n is a, c, g, or t
  misc_feature (151)..(151): n is a, c, g, or t
  misc_feature (154)..(154): n is a, c, g, or t
  misc_feature (173)..(173): n is a, c, g, or t
  misc_feature (189)..(189): n is a, c, g, or t
  misc_feature (196)..(196): n is a, c, g, or t
  misc_feature (204)..(204): n is a, c, g, or t
  misc_feature (206)..(206): n is a, c, g, or t
  misc_feature (208)..(208): n is a, c, g, or t
  misc_feature (217)..(217): n is a, c, g, or t
  misc_feature (221)..(221): n is a, c, g, or t
  misc_feature (231)..(231): n is a, c, g, or t
  misc_feature (238)..(239): n is a, c, g, or t
  misc_feature (241)..(241): n is a, c, g, or t
  misc_feature (243)..(243): n is a, c, g, or t
  misc_feature (258)..(258): n is a, c, g, or t
  misc_feature (260)..(260): n is a, c, g, or t
  misc_feature (266)..(266): n is a, c, g, or t
  misc_feature (833)..(834): n is a, c, g, or t
  misc_feature (837)..(838): n is a, c, g, or t
  misc_feature (842)..(843): n is a, c, g, or t
  misc_feature (852)..(852): n is a, c, g, or t
aataacaagccttgtattcattgaagataanacagactatgtttaagatgttatgtgtcacctacncacccagccctgtttgcctgtgtggatggcatggggagattggatttgtngaatctcaataatgacacagaggtaccnactgccngcntttcatgtggagggtaatnctgctcttaatacgtntgagatngacccatncntncatatatantagntgtgggtgantctgaannananatttttatatacaantntggganagacacgattgctagttccccgcaatgatgaatgggcacggtttggccgaacacttgcagaaattaatgcaaaccgagctgatgcagaggaggaagcagctacccgaatacctgcttagttcctgaaaaggggagtgtaactagtggatttgggaaaggttcttaagtagatcctgagactatttgcatgcttctgtctaaatgataattaaaaggaaatttcatggattaaaccatgggtttaatgcagcaaggaaacttacaatgtccctttatatataacatgcatcttgttttggatttgtgtcattttttaatatagctgattgacttcacagaaagcagcttttttgaattctaatacataggtgtatatttggtattagttattttgagttcttttcaacttataacactgtatacagttatttctaaagcacagatgaaataagttctgcatatttttaaataatcacagttccctgttatacagataatgttctcactacccataatatgtaggaacattgtttctccttagccgtagtatgcatacacctatccatnntcnntcgnnatcctttgntgtctttataattcatgtggtagttacctata

SEQ ID NO: 667054 - DNA, 973 bp, Homo sapiens
  misc_feature (31)..(31): n is a, c, g, or t
  misc_feature (66)..(66): n is a, c, g, or t
  misc_feature (116)..(116): n is a, c, g, or t
  misc_feature (144)..(144): n is a, c, g, or t
  misc_feature (151)..(151): n is a, c, g, or t
  misc_feature (154)..(154): n is a, c, g, or t
  misc_feature (173)..(173): n is a, c, g, or t
  misc_feature (189)..(189): n is a, c, g, or t
  misc_feature (196)..(196): n is a, c, g, or t
  misc_feature (204)..(204): n is a, c, g, or t
  misc_feature (206)..(206): n is a, c, g, or t
  misc_feature (208)..(208): n is a, c, g, or t
  misc_feature (217)..(217): n is a, c, g, or t
  misc_feature (221)..(221): n is a, c, g, or t
  misc_feature (231)..(231): n is a, c, g, or t
  misc_feature (238)..(239): n is a, c, g, or t
  misc_feature (241)..(241): n is a, c, g, or t
  misc_feature (243)..(243): n is a, c, g, or t
  misc_feature (258)..(258): n is a, c, g, or t
  misc_feature (260)..(260): n is a, c, g, or t
  misc_feature (266)..(266): n is a, c, g, or t
  misc_feature (922)..(923): n is a, c, g, or t
  misc_feature (926)..(927): n is a, c, g, or t
  misc_feature (931)..(932): n is a, c, g, or t
  misc_feature (941)..(941): n is a, c, g, or t
aataacaagccttgtattcattgaagataanacagactatgtttaagatgttatgtgtcacctacncacccagccctgtttgcctgtgtggatggcatggggagattggatttgtngaatctcaataatgacacagaggtaccnactgccngcntttcatgtggagggtaatnctgctcttaatacgtntgagatngacccatncntncatatatantagntgtgggtgantctgaannananatttttatatacaantntggganagacacgattgctagttccccgcaatgatgaatgggcacggtttggccgaacacttgcagaaattaatgcaaaccgagctgatgcagaggaggaagcagctacccgaatacctgcttagttcctgaaaaggggagtgtaactagtggatttgggaaaggttcttaagtagatcctgagactatttgcatgcttctgtctaaatgataattaaaggaaatttcatggattaaaccatgggtttaatgcagcaaggaaacttacaatgtccctttatatataacatgcatcttgttttatataaaggaaatttcatggattaaaccatgggtttaatgcagcaaggaaacttacaatgtccctttatatataacatgcatcttgttttggatttgtgtcattttttaatatagctgattgacttcacagaaagcagcttttttgaattctaatacataggtgtatatttggtattagttattttgagttcttttcaacttataacactgtatacagttatttctaaagcacagatgaaataagttctgcatatttttaaataatcacagttccctgttatacagataatgttctcactacccataatatgtaggaacattgtttctccttagccgtagtatgcatacacctatccatnntcnntcgnnatcctttgntgtctttataattcatgtggtagttacctata

SEQ ID NO: 667055 - DNA, 1216 bp, Homo sapiens
  misc_feature (1216)..(1216): n is a, c, g, or t
ggccataatgatgaagacgacatagggacagaggcaatggaggctgccgagtatatgtcctctaggccttctaggcaaaactatgcgtagtagttccttcttgtgatcacagttatatggcgatatctatacaggaaaggtagatattgtaccgagcattcacggcgactgtgtgcgtactggttacaaacaagcgtacatgctcccaacaaggtggttatcgcatgtgtcgaagactggaacgattctacatatgttgcccaggcatgctgtccggcatctcgtatgtacatactaaacttacatgttagatggtgcaaagattctatgcccaaggagacacttaacatggtgcgtcatggatgcacatctcagcgctctaagagcccggggaagaagctatccttgcaatacgtcgctagaaagggatcaccatgacttcatggaatcaacggaacagcaagcccacacagaagaaacggtgaccttaggggtatctgagcgtaaaagaaggcgcgcaatggacctggtcataccacgccaggagaaaaggcagcactttgtggttgcacgaaactccaaatggtggtcacagcggatgcccctgtagacctggcatgggaaaaccataaagtatgcgcccgtaattggagactttacgatgggggcgattaaaataaagggtcgtcttagaacaaactagcaaaactcttacatatgtggaacccccttccatggggggctcgttatccatatccgatcagatgactccaccagagataacatcaaaatatctatccagaagaggtgaaccatctcgctcacatgtctaccgaggagtgttgacgagcggctagaccacgacatggggagtgcggtcttcaccacggtgcgaaaactgggggggcccctaccagagtgggcacaaacaccaataacagacggcgcgtaggagaaacaccaccgccggtaggtacaccacgacaaaacggtactcaatttaccacgttgggggcgatcaacccaaaaaaagaagggtgtggggagcacaccaacaaaccggctgtgcgagccgccggtgggggcaacccccccgctaaaaaatagagccgagaggagggaaccacaggaccaaatcaacgacaatggagggccagaacaaagcggggcccacgaggggggattaaaacaccccgggaaggaataaaaggaaacn

SEQ ID NO: 667056 - DNA, 292 bp, Homo sapiens
  misc_feature (36)..(36): n is a, c, g, or t
  misc_feature (40)..(40): n is a, c, g, or t
  misc_feature (42)..(42): n is a, c, g, or t
  misc_feature (44)..(44): n is a, c, g, or t
  misc_feature (47)..(47): n is a, c, g, or t
  misc_feature (49)..(49): n is a, c, g, or t
  misc_feature (56)..(56): n is a, c, g, or t
  misc_feature (83)..(83): n is a, c, g, or t
  misc_feature (89)..(89): n is a, c, g, or t
  misc_feature (91)..(91): n is a, c, g, or t
  misc_feature (119)..(120): n is a, c, g, or t
  misc_feature (123)..(123): n is a, c, g, or t
  misc_feature (125)..(125): n is a, c, g, or t
  misc_feature (171)..(171): n is a, c, g, or t
  misc_feature (219)..(219): n is a, c, g, or t
  misc_feature (275)..(275): n is a, c, g, or t
cgacgcgtaggtccagaccttctttagtcacggtgnacgnantngtngnaggtcanaatgggtgtgggcactcggcgtgtgcntgcacncnccgaaaacccatactgcacacgccgaannacnanactgcacacgccgagtgtccataccccttggtgacacaggtctgtntggacgaagttgttgcgcaacaacttcgtccacgtgacctgagaccanagtatggtgattcggcgtgtgcagcaacaacttcgtccatccggacttgaagtgtntggtcattcggcgtgtg

SEQ ID NO: 667057 - DNA, 224 bp, Homo sapiens
ccgataaaatgtggtctatcaacaattgaatattattcagctataaagataaaggaggccgagcgtggtggctcacgcctgtaatcccagcactttgggaaggtgaggcgggtggatcacctgaggtcaggagttcaagaccaacctggccacctcgtctctattaaaaatacaaaaattgccaggcacggtggctcacgcctgtaatcccagcactttgggag

SEQ ID NO: 667058 - DNA, 104 bp, Homo sapiens
aaccccacacccccagctcacacagcaaaaacaattggacaggcccagtagggtgaacgcaaacagtgtcccttcagggctgctgacggagcctccctcagtaa

SEQ ID NO: 667059 - DNA, 512 bp, Homo sapiens
  misc_feature (10)..(10): n is a, c, g, or t
  misc_feature (14)..(14): n is a, c, g, or t
  misc_feature (31)..(32): n is a, c, g, or t
  misc_feature (38)..(38): n is a, c, g, or t
catcgaagcnccgnttgcgccctttgcactnnctatcnggaatggcctctcgccattttcgtcgaaccctgcaaattggcccataatggccgggaccactttttatgtggtggtcattgtgcataccaaactacggtgggactcttgcgcatatgttgggttatacttcgtatccatgtctgataaacccgatatggctgatatcgagtaaatactcttagtctaatctgaagaagactgagacgcaagagactaatccactggctttcaaagaaacgattgatcaagatatgccagacagcgaatcgttatgaggtgagctccgtcaattagcactgaacattacccaaagtttgactaattacttacttcctttagctgattaactttgtaagactgcaaagatgaaggatcaagattaaatgattgtgcagccctttttatatcaatgaacttctgacgactgctgaagctgacaatgtccatctgtctatctaatatgtctggcacgt

SEQ ID NO: 667060 - DNA, 210 bp, Homo sapiens
gtgcagcagactgtctgtactggcgagcgcctgctgggcaggaatgcacgcggctcactatctgcgacatggcagaacgtctttcagtgtcagctgcctccaagctgctgtccaacatgatgtgccaataccggggcatgggcctctctattggcagtatgatctgttggctgggactagaccgggctcctggactctactacgtgaact

SEQ ID NO: 667061 - DNA, 971 bp, Homo sapiens
atttgtcctgtaaccttgtggagagaaatcccggcacaggatgaaacgctgctgtgacttattcgaactcctacgatgggtccacaatttatgcgtaactagcgccaagggatttgaacttgggttcgctcccactcgcactgcttggcgatcctctaagagctattgcacgagcctgaaaaaaagtagtgcaattgagtgctcagacgtggtaagcgttgcatagcacgttcactagatgtaaggaagctggtgactgaattggcttatggtgtggctcatcgtgagtgtgattgaatgctggttataagtgatctggcaggagacttatagcgtcacagcgtgggcaattcacttgtgctattgagtggtatgaatgaatcgagagtactattgacactaatcgtgattaataagtattcgactatatattaattatgagtagtcagtatggcaggcatagtagtagcattcaagaagcttgcgtaaatctgagattaataataatggatttggtatcaataactgcaagaatgtagattcgtgccatccaggaattactaccaatgcagaaggtttcaccatagtaaaatctttctttggcatttagtcaatagcctagggagataagcactatttagaaaccaagacccctcacaattgctacgctctaagtatcaagaccgcgaccagattcggggcaacagggactcactaagtgggtagcgcccgcactcatttgcaatcccctagagaaccacttggaaattacttccttccggtgcacatttaaccaggtttctaccaacatatgaggccaagcgcatatacgcgcaaagtaataacttctttcgttacaatacggagcgattacttatctccccctcggacacccagggcccaacgggcgataaccggaacgacggcgcgaaacacaaccgctaatataaccattggcccacagaacgtag

SEQ ID NO: 667062 - DNA, 462 bp, Homo sapiens
ggggaagggatggggtttaactgagcagcccagattgcactgcaagtactgtgctgaagtgacactcccgacattgactaccaaagagctgtgacgacaagtactgtcaccgcgctggcctgattggaatgataacgcgtcacacacgcatattacccggaagaacatggacaaatgctaggctctatggacatttaaacatgacttggctctgatcgacacactgctgggacccctgttgacttccacatggacacagtggcgggtgcatcctagggtctaaaggatacgtatgcagactctgcccctgagggtgatcatggtcacacacatttatactgaaaggccagcctatgctgctgaggacactatgccacagaggaggaccatatgctgacactgaggaccagagttgcccacaggcatggcgaatttggatgaacaatgcgtgatgccacacct

SEQ ID NO: 667063 - DNA, 162 bp, Homo sapiens
ctagattgatccccgttctccccgttgttcactttagtattaatgtgtacataaacaaaaatattatctaatattcaccctacactgaatcataatgccacagcttggctactcatacaaggactcagcaaacaatcagtaaagagcattctcgtgataaat

SEQ ID NO: 667064 - DNA, 1434 bp, Homo sapiens
  misc_feature (258)..(258): n is a, c, g, or t
  misc_feature (265)..(265): n is a, c, g, or t
  misc_feature (402)..(402): n is a, c, g, or t
  misc_feature (503)..(503): n is a, c, g, or t
  misc_feature (505)..(505): n is a, c, g, or t
  misc_feature (530)..(530): n is a, c, g, or t
  misc_feature (687)..(687): n is a, c, g, or t
  misc_feature (1221)..(1221): n is a, c, g, or t
agagaagaactaactgagttaaattgcacagagaagcagattactagtatattgccacttaaaccgtatggtggccaagtcggtagtacgataattgcattacactcataggagtgcgtggcatactgagatctcaaattattagtctttcagtagttctatccgatttttatcataatgagcacatcagtgggtatagtaatcacgtattctaacaagggcgattggacttacatagaactagctactttattatgncgactanttgacaaacgagaaggcgttcttaactgagtgtacgcccccatgcacaagtcttaattgaagaatggtaagactcataattccatggggattacctagttcaatgagatacttcaagaagaatgcgttatatagaanatatatatctaagagttagtagttaggtttgtagtcacctaaatgatatatcagttactatatatcacataatagagccatggaccatagacagtatagantntcttacacaaatacacagcgcaacnttgatggaatttaatacgataaacactcgagagacactctggtatattgaagtagatattgacactcggggcatatatgctggatataaagtctagcccatcgagacaaggacgaggaggcaccatggggctaccagcgattgggtctacaatctgnctcggtggatcaaatgctccccaggaatacttctttgtggaaccgctggaatgtgatatcgaagtgaagtcaaccgcagtgctctacaggtagcaatcgcaagaaactctattcacttaggactatgacaaacggcgctgggaaaaaaccacgcgaggggtcgtgatagtacaatggataacaaagaccaaactttaggacttggggtatcattagggtcgagcaagccgatgcacgtagataggatactcactagggcgaatcgtgctaggaggaccgtgagcttaggaggaggccaagggcaaaggaaataccccgggggatggtaaaacgcacagaagggaccctcgcgggaggggtgcatagtggctttggccatggtcggaccaaaagggcacaaaattctattggccccaccggttggtatcttctcacgtgcgtagggaacggaacgaagaagacggggaggggagtaaaccccgttgcttccccccaagatttatcccccaaaccttattaccccaacaaagtctngtgggccagaggggaaaagaggagcttaccgctacattaaaacaggcgggagaaaaaaatagaagccggtcactactgtgtggcaagaagaacccgtctgtgtgcttatatgttctggggtgagacagtctttctcgcgcacaccattatgtctgcctcaagagggaacgacaggcagtcggtcgtcgtactccccagcgcaagaatacacag

SEQ ID NO: 667065 - DNA, 169 bp, Homo sapiens
gtcccgatgctggattgggaccgtgttcattggttctatcactagaatcatctttcaaagattgggccttggggtgtaaaacctgctcttccttgctgctgaccttatcattgcccctctccctgtgtagagagtctccgttgagactgggaccgccctcgaattcgta

SEQ ID NO: 667066 - DNA, 939 bp, Homo sapiens
aggtcggcgctggggagtggagccgacgccatgtctgcgcatctggaatggatggtcgtgcggaactgctccagatccctgatcaagaggaatacgcatgagctacagcactgagcccaatacccttgaagggcctggtagattccttccgctacaagcggacgtgattacagccggcaacgacgtgtgggctgtggatgccggtatgccgagcggctaataggtgtcgtggtggtcattaacgtcgggggatcgcggcccagcggtaatgcctggcaccctcgctatgtgctggaccaccatacgaacaagtaatgtcgtcgcgcgcacgcgtcagcagcatgcagacacatgatccgcaaagaacaaagtatcgacccgacctgcgcactggtgagctggggtgttggggatcacggtgttggggagagtggaccagtgctgtggggacatgggcctcccatctactggttgcttctatgggctgggacgagggatggatgtcttggctttgcagtctagctccccatcacccagtcgttgggctagggggcggctggtgtgatgtgtataggtgctgagccttgctctgttcccccgtccgcaggtagccatccgagggcctagcgcatcctgggcagtcagacgcctgtgatggtgaggaagaatgctggaccctggcgccgacctatgagctcctgagcccacctgggccaagagggataaaagtgcagctggcttagtcagccaggagcaaacccaggcaaaacaggtggcgctggccaagatttgcggcaagcatggagaaacaagcccgaggagggcttggggcaacagtgggccaaaagacacgaaaaaaaaaggacggggcgggtaaaacggcacgaaggcaaaggcagcgattttgagccacttggggggaacagggacaccacagga

SEQ ID NO: 667067 - DNA, 198 bp, Homo sapiens
  misc_feature (1)..(1): n is a, c, g, or t
ncccacggctttaatttcatgaaaacccagcgctggggtttttttctaatagttgtgaacatgtaccaccaatgaaaatgaaaggtttatctcgtgtgcccagaaacccaaggtttatcaaatgctcttaggaaccttgttttctttacacatgccataccgcccattccatgatttaaacccatccgagaaatacca

SEQ ID NO: 667068 - DNA, 237 bp, Homo sapiens
cccccccaccccacccccacccttgactacccattgctccgccgccccccccacatcaaccaagcaaagcatcttcaaatcaaactgtgtccggaattggtgggttcttggtctcactgacttcaagaatgaagccacggaccctggcagtgagtgttacagctcttaaggtggcgtttctggagtccgtctcttctgatgtttagatgtgttcggtgtttcttccttctggtgggt

SEQ ID NO: 667069 - DNA, 519 bp, Homo sapiens
gatagagaagattaggcctgtgcaatacacattggcggagcagaagaggtcgtcttccaagaagagcactccagactcagaactcagaaatacgtagaagatgatagaaggcaaagaagattatcagtttgatgaactcaacacagagattctgaataacttagcagatcaggagttacaactcaatcatctaaagaactccattaccagttattatggtgctgcaggtagaatagcatgtggcgaaaaataccgagttttggcacgtcgggtgacacttgatggaaaggtgcagtatcttgtggaatgggaaggagcaattgcatcctgactgtaggactgaacattatgttcactgcactctgattttctgtaggtacagttcaaagccctaaaggagtctggctttcactatctttcttaaaaaacaaaaaaagtcaaaaaactccaaaaaaggggatgctactagccttcacatgtccctctcaaagtaatggatatggtcataaaagggtatcg

SEQ ID NO: 667070 - DNA, 762 bp, Homo sapiens
  misc_feature (302)..(302): n is a, c, g, or t
gtgaggggggtcagggtcacggcgtcgggaattccaggatgtccaggagtgaggcgctggctgcgtcatagtgcccggcatgcactgggcgtgatcgacgtctaggaagcccaacgtgtgggaagcggaccgagatgtggtgaactgggattgtgctaccggcaagacagaggacttgcttcagcatctgggctggatctccaatgatgtaccgtagccaccgtctgagggtcaagagctgcctgggaatccgaattatacaaccgaaggtattcgatcttacaaacgctggagctcatgtngacttcgatgtcgcgaacggcgcctcgtggctgtcgcatgatcgcgcagttcgcctggggtttggtcaagaccatacttctgtggcagtacactggcacagaaggaaacgtgtggcagcggttagcgtgcgacacacatggtgcgagaacgcatggtctagcacatgggtacgtgcagggcacgagactgtgcgcgccggccccatatgtacttggcagcgctggagcccgtgacagcgaggcaggcagtacatagcgtagagctcagccaggggtgggtggaagggagatgcacgctgcctagtgggaaagcctgtcttcctcattggaccagcaggctcggcttgtctacagcttgctctagtttcctgcttgcgccagccccaggcctggaacggaccgctttattgagtggcttcatctctcttggggctccctggggtggctccatcaagcccat

SEQ ID NO: 667071 - DNA, 457 bp, Homo sapiens
ctctcactccttttgccctctgctttactctcatgtggcaaacgtgccgatcgcggtgtgagtgccagaacctgcctccttggtttggtcaccgtgtgcatcgcaccgatctgtaaatgtggcagactcagcctgcggccaggctttttatttaatgtaaatagtttttgtttccaatgacgcagttactggtactcctatgcaatattactcacttttttttattgtaaaaagaaaaatcaactcactgttcattgctgacaggggatgtacgcccatggacacctggccttcaagagtcgctgtgttgtgagagccggccacacccttggctttagagctgcgttgaaaaccatcttggtggtaaggttttaacccaaactcactgcatttcttaaaatagttctgaatccacctcgagaacacttgaacacacagaacaggagaccccccctag

SEQ ID NO: 667072 - DNA, 207 bp, Homo sapiens
  misc_feature (162)..(163): n is a, c, g, or t
  misc_feature (193)..(193): n is a, c, g, or t
accagcataactattacagcataactattacagcataaactattacagcataaactattacagcataaactattctgcatcacaggtattatgaataacttaataacaaagtaatcctaatttctccttccagtctcttgtaacattgctcagcatttatcnntctctatacacagaagcgtgtcgtgcacantatgcagatatgta

SEQ ID NO: 667073 - DNA, 122 bp, Homo sapiens
cgtgccccttcttactctcgcgagacttcccaacggtgggcttggctgtaggttccttcccccccttaccttctcctgtgatatccagcgcctttggacacctttttcaccattgagtgtgg

SEQ ID NO: 667074 - DNA, 548 bp, Homo sapiens
  misc_feature (144)..(144): n is a, c, g, or t
  misc_feature (162)..(162): n is a, c, g, or t
  misc_feature (173)..(173): n is a, c, g, or t
  misc_feature (288)..(288): n is a, c, g, or t
tactttcacaggagggtgtgagccaccgcgcccggcctgaaaagtgcatcttcattttacagggaattctttcaaatcaaataatcaaaaactgtaaaagggggcaaagtacttttttgcagatctacaagtttcttatgtaantaggaaaaaaagcctttncttttctggtntaagcatttaaattaaaagaggaatgaaactgttttctatccacaatgtgtgaggatgttttttatactgctgcctgaagtttaagttgctgattactttttaaatagataattnggtggtaagtactatattttaaaaatgcgtatgcccgttacccttcaattccattatactaaaatacccttgggaaatagagatacatgcactttgtttttcacagcacttattttaaagagaacccatagaatggatcttataagtaaatttcagttgcatccataggatgcaataatatgtgaccatcaaaggtgacaatagatatagaagtacgttgatgtgcaaagatgtattttgttttagccctgtggaacagc

SEQ ID NO: 667075 - DNA, 208 bp, Homo sapiens
cttaattcttactgaatagaaatactagaatgtctttgttgggagaaaaaaactagataagtaaatcaatgtttactatattttaaagatttgtttttgttttgtgagacagagtctcactgcccaggctggagtgcagtggcagtgattttggctcagtgcagctgccatctcctgggttcaagtgattcacttgcctccgcctccc

SEQ ID NO: 667076 - DNA, 270 bp, Homo sapiens
  misc_feature (9)..(9): n is a, c, g, or t
  misc_feature (61)..(62): n is a, c, g, or t
  misc_feature (83)..(83): n is a, c, g, or t
  misc_feature (143)..(143): n is a, c, g, or t
  misc_feature (148)..(148): n is a, c, g, or t
  misc_feature (153)..(153): n is a, c, g, or t
  misc_feature (162)..(162): n is a, c, g, or t
  misc_feature (165)..(165): n is a, c, g, or t
  misc_feature (177)..(177): n is a, c, g, or t
  misc_feature (198)..(198): n is a, c, g, or t
  misc_feature (243)..(243): n is a, c, g, or t
  misc_feature (246)..(246): n is a, c, g, or t
  misc_feature (254)..(254): n is a, c, g, or t
  misc_feature (263)..(263): n is a, c, g, or t
tcctttttntaatcatccctccatatcccccccagatctgactgaactcgtactttgggannctttgtgcatgaactatacanagagtatctgaaactaactgttgcctgcatagtcatatcgagtgtgcacttactgtatanctttncattnacatacttntanggaaaatatttngtctgcacttgtataaatacntctttatgtatttcattttccataactcactttaatttttgatgnaanttgtcttngtgaaatantttaaca

SEQ ID NO: 667077 - DNA, 115 bp, Homo sapiens
tcccgcctacgtggaatactcccatctactgttagagtggaaagactgtggtctttctggcagttgagtaatggtctccaggcctggctcagcccctcgctagctgtgccctcag

SEQ ID NO: 667078 - DNA, 138 bp, Homo sapiens
  misc_feature (3)..(3): n is a, c, g, or t
  misc_feature (9)..(9): n is a, c, g, or t
  misc_feature (72)..(72): n is a, c, g, or t
ccncaccgngtttaaacaggctttcattggtcatccttgcaatccattggggtctagtttggatctgtcctngcagcaagctcatctcaaaaataaataaaaataataaaacctccataagtaatcctgaaaaaaaaa

SEQ ID NO: 667079 - DNA, 793 bp, Homo sapiens
caaatgcaggctgtactgcccctggaattttgggatggggtcgcggcgccattgggcgtggggggagagctccggggttggcctggagccccgccccccggccttgcgtgctgtgacaatagtgcgccgctgcgtgtggcggggctgtcgtgcggcagcagggcggctgagtgtggccgctggagctcacggcggctgggctgctggctaggtgattggctgaaggagcaactgtgagagaatgggccgcgctgcgccctgcggccggggaaagcctgtctgggaaccctgggagagcctgtgccctatgggcccctgaccgcctgcaaccaccgactgaactcagctctctcgggtctgactcggaggccaacggcttcgccgagcgccgcatcgacaagttcggcttcatctgtgggctcgcagggcgccgagggcgctgctggaggaagtacccctggaggtgctgaggcagaggggagtccaacgtggctgggacattgctcaaacaactgggacaaactggatggccaagaagcacaaaaagattcgtctgcgggtgccaaaaacggtgcatacctgccttctctgcggggcacgtgcattggcagatagctgtcaggaggcaaggtgaagttaacagcagaagcctggaaagtctgacgaggctggacatgtccccttggggaccccaagtggcctgcaacgttgattgagcgttgaccttgcaccggcagttcccaatcccatgagatgtagcagtaccaggtgggtccacggccagacaggagca

SEQ ID NO: 667080 - DNA, 706 bp, Homo sapiens
  misc_feature (463)..(463): n is a, c, g, or t
tgctcaggtgattatcctggaccattcaggcctaatttagccccggctatgcccctgtattggattgcccacacggcgtcacaatgcaagccagtttgctgagctgaaggaaagattgatcccccttctggtaaaaagctggacagatggccctaaattcttgaagtctgggtgatgctgcccttgttgatatggttccctgccagccccatgtgtgttgagagcttttccagactatcccccctttgggtcgctttgctgttccgtgatatgagcaccagcaccagttcgccggtgggtgtcttatccaaagccagtggcaccagaaggctgctggagctggccaggtctccccagtctgccccagaaagctccagaaggcctaaatggatattatccccttataccctgcccacccccacatcctttaatccagtggtggaagaaccggtctccagaactngtttgtttccaattggcccatttaagttttagtagttaaagactgggtttcatgatacacccatgccatctgttaaacctctcagaaggaaaggagaatgttttgtggacccctcttggttttcttttttgcgtgtggccgttttaagttattagtttttaaaatccgtactttcttcatggaaaccacttgaccccaaatttgtcaccgaattttgagacccctttaaaaagtttaatgaga

SEQ ID NO: 667081 - DNA, 1642 bp, Homo sapiens
  misc_feature (665)..(665): n is a, c, g, or t
  misc_feature (1642)..(1642): n is a, c, g, or t
tgtggtttttggaaataaagtctgggctctgtcacctaaggctgggagtgcaagggtgcaatctctcggcctcaggtgcgaacctctctgtggctttccgtgggttctcaggggaattcctccgtgcctttagcccctcccgaagtgtggcgtgggaatgtgcgggtgtgcccgcccgcccgcgcccgcggctataatttgtgtgttttctcaagtgtggagagacacagaaagtgtattccaccagagtgtgtgtgcgccgaggtgtgggtctctctccaaaactctcctgtgaacctctcgaggtgtatactcttgtgccacacactctctgcggcctcctcttgtgagagagtctcgtggagaaatgtgccgagcgcgtgtaggaccccatgtgtgtgtcgcccggtgccacatataaagacaagacacctttatattatatatatgttctctataaacagattctcacatctcatatatgtgagagaagaaatctctatatgtgctggcgccaggcgtgtgtgcgcccttgtgcggctgttgtgggctattctcctctccctgctctgtgtgtataactctcacgagcgcctattatagagctgtgggagagagtgtgattggtgtgaataagacaaaattattttctacaaggagaagcnacgatgtgggcgacaagacaacacgaggaacaccacaccttattagaacagtctttctccccacttcgactgtgatgcccccctgttgttgggccccccgaagtggcgctattattgaggggggacacgagaacgccaagagggtggcggcccacacgagcggcactttttgtaaacaacccccagctgttgcaactctatagaagatttccccccccttcgaggggcccccctcttatttctttctcccgatgaaggagggtcttataacaacacacacgaaaagggcgcacaagtggctccctttccgtggtgtggcccccaaagaaaacacttctcaagcgcggaaccttttcgtcaagcggcaacataatcaaaggggtcgcacacgggggcctactatttcacaccgacgaggacaccttataggaggcccccctgtggtataatgcgaggacacaagcgggtatatcccaccacctctgagtgcacgcaacatcatattacacacccgatttatcaaaccgccagctgtggggctctctctacaaacaacaagacaagattttttgacgaaagaacactcgtcgagggacagagagctcaaaaaaagggggcccccattaagcacttattggcggcgatcctcactacagtggatgtaccccccctcagaatttacccccaggcggtttcatcaccacaagtgcggccaacaaacaattaaacccccgtgagaggggcgaacacattattatgttctgtataatccctccaaagtgtccccactggtgttgctcacaccagtcctgtgagaacaacaacaagactctttattagtaacataatcgctgcggaatataatgagcacacacgaatcctattggatctgaatcaactctattatgattgcaccacacagcaagaagcaaccgattaaaaatataaacacgcgtcggtcacacaccattagttcn

SEQ ID NO: 667082 - DNA, 185 bp, Homo sapiens
tatggtgtgtgtcctgctggcggttaagtgcctgagcctctgtggtgaaagttcctggtgttccgcactgtgggctcctccagctgctgactgcagtctctgctgttccaactgttcctcatagggtgattggaatatgatcattggcttgcgtgaagggtacacctcagcatgcgcgtgccttt

SEQ ID NO: 667083 - DNA, 183 bp, Homo sapiens
aggacccgaaaactgacaggagtcaccacatggtactggtgaagggccaaatagaatttgggtttgggatttgtttgcttgcttttgttttgagatggggtctcactctgttgcccaggctggagtgtagtggcacaatctcagctcactgcaacctcctcctccctacctcaagcgattctc

SEQ ID NO: 667084 - DNA, 139 bp, Homo sapiens
gtgccgtgaggacgcgccatggcttaagccgctggagggtcgccgctgcaagcctggtgctgctgccgccggtgaaggcagtgctgccgcgggctctgctgcccctaatacgccatggtggctgtggaccctgagggcg

SEQ ID NO: 667085 - DNA, 777 bp, Homo sapiens
tgaacttcctgtgctcgggaggggtgcagtgattttgtactgtgggagtctgagagctgaggatgtgtcctgaaatgcctgaatcacagtcgttcggaaagaggagtgagctgaaggctcgagctgtccgtgaagagggtgtggcctcgtgctgtgtgccttagcctccagagcttcttgacctgctgacgggaacacccgaagggggacgcccactttgcaagagtggtggtgccaaaatggacctttgtaagtgtgtggctgtgtcgccgctgcttgcggaggtttgtttattcactgctccaatggctgcgaattgtgatgtgattgcttgggttgtgtgtgatgggttggctgaactgtgcctgctccccttgtgttgttgtgcgtgatgcctgatgtgctgtgttgctatggtggccctcctgtgtggaagctgccttggtgttgttgtgtgtggggcctgcactgtgtagtgcttgccccttgccccctgttgtgggcccccctgccatgaactcggcgcctgtggcctccacgctgcttgctgatgccctgaacgagtgcgcggtctctttgtgccgagatcggcgcccggtgacgtctgagtcagctgccccgcagtccagactctcggacaccacagacttggcctgacaatccttacaatgcgccagcaaagagtgagagcttccagggagcagagcagccttgggaagctgagtgccgggagacccgtccgtcaggagctcctggagaagattacggaggccaggt

SEQ ID NO: 667086 - DNA, 785 bp, Homo sapiens
  misc_feature (7)..(7): n is a, c, g, or t
  misc_feature (401)..(401): n is a, c, g, or t
  misc_feature (691)..(691): n is a, c, g, or t
  misc_feature (696)..(696): n is a, c, g, or t
  misc_feature (706)..(706): n is a, c, g, or t
  misc_feature (710)..(710): n is a, c, g, or t
  misc_feature (723)..(723): n is a, c, g, or t
  misc_feature (725)..(725): n is a, c, g, or t
  misc_feature (728)..(728): n is a, c, g, or t
  misc_feature (731)..(731): n is a, c, g, or t
  misc_feature (733)..(733): n is a, c, g, or t
  misc_feature (739)..(739): n is a, c, g, or t
  misc_feature (744)..(745): n is a, c, g, or t
  misc_feature (749)..(749): n is a, c, g, or t
  misc_feature (754)..(754): n is a, c, g, or t
  misc_feature (758)..(758): n is a, c, g, or t
agcgggncgtcacttcctgccgatgccggtgtggacgctgtgaatcgtggctggcccggttctccgcttctccccatcccctactttcctccctccctccctttccctccctcgtcgactgttgcttgctggtcgcagactccctgacccctccctcacccctccctaacctcggtgccaccggattgcccttcttttcctgttgcccagacccagccctagtgtcagggcgggggcctggagcagacccgaggcactgcagcagaagagagaaaagacaacgacgaccctcagactcgccagtccggtcgctggcttcgccgacgccatggcaatgagacagacgccggatcacctgctctggccacaccgcgacccgtggtttgatttggccttcaggnggcatcacgccttatgggtattctcttaaatcagcgcttgcaaaggatggtaaaacctatgctacgccagggagatacaggagactggatatggaacatttatgggtcataaaggtgctgtatggggtgcaaaactgaataaggatgccaccaaagacagctacagcagctgcatgatttcacagcccaaagtgtgggatgctgtctcaggagatgaattgatgaccctggctcataaacacattgtcaagactgtggatttcacgcaggatagtatgatttgttaaacnggggncaggataacntgtnacgcatatttgantngancananctgaancagannctanggaanttantggtaataaattctggttataacaaca

SEQ ID NO: 667087 - DNA, 911 bp, Homo sapiens
  misc_feature (7)..(7): n is a, c, g, or t
  misc_feature (911)..(911): n is a, c, g, or t
agcgggncgtcacttcctgccgatgccggtgtggacgctgtgaatcgtggctggcccggttctccgcttctccccatcccctactttcctccctccctccctttccctccctcgtcgactgttgcttgctggtcgcagactccctgacccctccctcacccctccctaacctcggtgccaccggattgcccttcttttcctgttgcccagacccagccctagtgtcagggcgggggcctggagcagacccgaggcactgcagcagaagagagaaaagacaacgacgaccctcagactcgccagtccggatcagcatgagcatatcaccgaccgacacaatggacaaatgagagacagacagacacgacatcaaccatagacaacatgagacacaacaacagcagaccgcacgcagcgtagaaatctatgagcacatattcacgaagagaccaatcaaacagccatataaatgagagctactaatccatctacaccagtcaagacgactacagacacacagacatggataaacacacatatgacataaacagcccaaaggagaagacataccaagcgaacgcccctggaaactatggaacaaccacattacaaagcgagatcacgatacccatacgatggccactgctatccatgacgacgactagccaccacacacattggaacacttacacaggcattgacacacacccacaaaagaacaacaccataacacacacaaagacgtagccacagaataaatcacacacacagacgccaaacacggactgttggatacacattgacacttgatccctacaagaggcaagcacatggcacatgacggcattgccccccctggggacttacaataaaacacaacactttgctacaacaggaccttgtttgagcan

SEQ ID NO: 667088 - DNA, 815 bp, Homo sapiens
tgttgcgtgttgccgggagaagtagagccgaggtggaaagggtgccgtgaggtgatgtgtgcagttcccgcaattcacaggggtattgggaaaacatgcgcaggcggtgcgaagtgtgtaataagtaagcgcttataggatggaccggtggctaatggtgttggaatggaaggtgaaaggtggtgtagtgaacgttattgtgtctgaccagggggataaagcgtcaacgcaattcctgctacatctgggagcgcgtagttctagaaatcactagggatatgtgttgaataaagacgcaatagttgataggtctagtctgatctactcacttatgaaaagttataaggggcatgttgtgtcatttcagagtataggcgaggttgttaacaggttagtttttgttgttcgccagtcgggtaagaagtgaaaggttgttctagttcgtaaagtcgttggctaatcgcgagcacttaattgtaagacaacgtcttgcctggcattgccagtgtagtgttcgagtacctagccttatgttaggagttccatgttgctccttccctccactagattttatgtatttctcatatggcttctgtcactcataaagttataataattacttcgaacggcattacatcagaagatcaatcatatagaatcaaaaaagccatcaattcaaaaaacaaaagaaaaatataatataacaaatcaatagaataaataataacaaagaaaatcagaaaattatcaagaataacatatctcacatgaataaaggagaataagaaatcaaataacaaaaaacaccaaaatgc

SEQ ID NO: 667089 - DNA, 124 bp, Homo sapiens
atgagtggctctgcttcaggaagcatgttataatgtgtgttcctacacaagcctctggcaaagtggtttaggaagcttctgggctaggagagacacatgaaacacaaaacacaaagtatgtgag

SEQ ID NO: 667090 - DNA, 432 bp, Homo sapiens
aggggcatcaacaagaagaccaggactagtactgagggcggccgcagccctggctgactgcacggcttccccgtgcctccctccctgctccactcccacattatagtcctttcctaacacggtcggccgggtgctttgtgtcatagctgcagcactggggagccaggcgaggggggcttgggggcatggggccggaaagcaggcaaaagcccgtcctgggaggtgctggcccagttggtgggacccctgtccacacccaccctatttatttccgttgactctttgctgtgtcgcccaacatttcccagggtgctggtggtacctgccccaatcagccacctgtttctgataagccactgttgtgtatttgacaatatcattagttatattatacttactggattttcccttgccttttacctgttattattc

SEQ ID NO: 667091 - DNA, 227 bp, Homo sapiens
aataaactcaacccgttgtccaacccgtttttctactctaccatcctttgcaggcacactctatcacagcgctaagctcgcactgatttatatacctgagtgggcctagaaataaacatgctagcttttattccagttcttaccaaaaaaataaaccctcgcttccacatgaagctgccaccaagttatttcctcactgcaagctacgcgcgatattatgatacctg

SEQ ID NO: 667092 - DNA, 1445 bp, Homo sapiens
  misc_feature (138)..(138): n is a, c, g, or t
  misc_feature (720)..(720): n is a, c, g, or t
tgccttggaccccagctctcctcccccttgctctctaaggatgggccagaaggcatgaatctcctaacccctggcgcctacaggccgacgagacgcgtgaccccatgagcgcagaaaggatgatggagaattagcatntgtggactaaccgacagtctctaacgcggcacgttcacaatgtgatgacgtttgagattgggcgatccctctgcggcaaagcgtcgtttgtattgcctattaggcactgagtgtcctctctctgttctcttcctccctaggcacagtcccgaacatacctggcgatctcgtaccacatcgtattattctattgaccaggaggcaggattctactttgattcgtattgaggtaatagctctcgccacgccgcgagggagacctcgttagcatagagtagactagcaaggacaggagtcatgggcgaaccaattgttgcaccgaagacatgaccgaaatcgaagccatcgattacatgcgcatgggaggttaggcgatggacttgctgctacagtagttacctagcccatgtgggtgaaccgcaaagggtgacttgccatcaggagaacctataaaagtccaggtacaaagtcctggctactataaggggtctgcaccgtgggaggaaggcctggaaaggaattgggctggacattccgggcgtggtctcgtggtggccattgtcggacacctgccccttgaanagaacgcgaaacgaacacactggttggttggggcgacctcgtgtggaaccttatccctaggcccctcaagaaggaatggaccttggcaggggccgggcatgcaccaactggaagaaacgggtgtgcattcttgctcggttggcattagggaagttggctattggcgtaattgaacgctagcctggggttgggggggaaaaacgcaacctcccttttggagagacggtgcgagtctaccagcaagcggaagaaaccgtaaattggggacggaatatcgttccgaaagggttgggacgcctataaaatgtcttccccacggcttttctccgtgtgccccagtggggggaggccacccaggggaccttctatctctgccccaaatctgggtcccagggatgaaaccccttggggaaaacagggggttgtgcccgccgggggtgcccaaagggagtgtcagagcaccaacccccggttggcccggggggcaaccaccttggcagagggggggaggcacccaccaggcgaagaaaaaaaggtaggcagaaaaggagacccgcagaataacacggggcagcgacggaggagacacggaagctcgtgcgcagcaacacacaacaccagccgcaagagtaacacaccgtggagtaagagccgcccggtgcggaaagaaagcaaagacaaaaaacggcgagcacgacgcggacccacacacatatactagcagg

SEQ ID NO: 667093 - DNA, 135 bp, Homo sapiens
cgagatgcgggtcacggcgccccgaaccgtcctcctgctgctcttgggggcagtcgccctgacccagaccttggcccggcttccacttcatgaggtatttctacaaccgcatgtcccggccccgcccccggggag

SEQ ID NO: 667094 - DNA, 300 bp, Homo sapiens
ggccctttccagaggagacgattaatttgtcctaaagccgccgaagcagaaaccactgatgaaacactctgcgttcttttcttttacaaccccacgaacgcgcaaaaaaaaaaaaacccaaacccaacacgagaaagaaacacccccccaacccccactctttgtgggaaaaaaaggggttgtgcatggggggaaacacaataatttcaaaacttacacataagggggagctctataactcaactctttaaaaaaggtatatgagatatccagtcataaccaacacgggattggctttga

SEQ ID NO: 667095 - DNA, 152 bp, Homo sapiens
ctctggtaagtggatagtgttgccatcaatgaccccttcattgacctcactacatggttacatgttccatatgattccacccatggcaaattccatggcacgtaaggcttgagacgggagcgtgtgatcatggaatccatcaccatctccag

SEQ ID NO: 667096 - DNA, 422 bp, Homo sapiens
  misc_feature (48)..(48): n is a, c, g, or t
  misc_feature (267)..(267): n is a, c, g, or t
  misc_feature (397)..(397): n is a, c, g, or t
  misc_feature (421)..(421): n is a, c, g, or t
ttttttttttttcctgttctaaggccatttaaataaacttccattccngctagggaacttgccttggtctctttctgctttacatccctcagttgaattctttcttctgaaaatgcaagggctgaagttgctgtggatgagtacagatttgcccttggtaactcggggtaacttggttttcagccaccaataacattatctgaaattccatatttgggaaaattataacttaggaacttaaaactcagtatagtcatcctttgatanctgtgggggatttgttccaggactccactacagataccaaaatctgtagatggtcaagtctcttatagaaaatggcataatgtttggtatattacttatgcatattctctcatatggctttaaatcatcnttaggatttaaatttataaataanc

SEQ ID NO: 667097 - DNA, 468 bp, Homo sapiens
gcacgaggttggggaaatggagagatgttggtcaagggatagaaattttcaattatgcagaaaaagtaatttctggggacctaacgtagagcatggtgactatagttagtaatactatattgtataattgaaatcagcttagagagtaggtcttaaatgttctcactacacaaagagataattacgagaggtgatgtatatgttaactagcttgattgtggtaatcatttcataatatatacatatatcaaaacatcacagtgtacagcatacataaatatattcaatttttttgtcattacacctcattaaagctgaacagaaaagcatcactgataaatttctaaaataataatgataattggccagacgagatggctcacgcctgtaatacatatatacatatatacatatatatctgggcatgtatgtgtgtatatatacacatatgcacagatatatacatat

SEQ ID NO: 667098 - DNA, 251 bp, Homo sapiens
tcaaaggtccttacagtctattctaacccctgtagacagggactagaagtactaacctcattgtaatgaggtttaagagaaggcccagcactaagccaggctctcagtgacaattcaaacaacatgttcctctattgcccgttcaagtatacgcccctatttcatctagtcattgggctgaatgaaccacatggacctgtacaaccatagcacacaggtaataagtaccacatgaccacggtgcaaggcct

SEQ ID NO: 667099 - DNA, 151 bp, Homo sapiens
atcttgccataaactaagtgaacacctccccagtgactggcccagtttctgacgacccctatttagagatatcctatctatggtctactccagggcagggtgtcgatggtacatgcacattgctctctgatcctcaacagtcttgcctatg

SEQ ID NO: 667100 - DNA, 292 bp, Homo sapiens
tcgttttttgataggcgagcagaatgtaagacttcaccagtcaagcgaactactatactcaattgatccaataacttgtacacggaacaagttaccctagggataacagcgcaatcctattctagagtccatatcaacaatagggtttacgacctctgatgttggatcaggacatcccgatggtgcagccgctattaaaggttcgtttgttcaacgattaaagtcctacgtgatctgagttcagaacggagtaatcccagggcgggtactatctacttcaaatttcttccta

SEQ ID NO: 667101 - DNA, 556 bp, Homo sapiens
  misc_feature (1)..(1): n is a, c, g, or t
  misc_feature (5)..(5): n is a, c, g, or t
  misc_feature (33)..(33): n is a, c, g, or t
  misc_feature (99)..(99): n is a, c, g, or t
  misc_feature (109)..(109): n is a, c, g, or t
  misc_feature (210)..(210): n is a, c, g, or t
nttgnaagcacccaaaaagtccttcaatagggnatagccaaaacttaatggaatattatttagggctagaaataaatgagccatcacgtcacaaagagncatggagaanccttccatgcatattactaagtgaaagaggccactctgaaaagactacctattgtttgattccaactatatgacattctagaaaagttaaaactatggagncagtaaaaaggtcagtggttgccaggggctgggaggacagagggatgaaaaggtggaacagggaggatttcagggcggtgaaactactctgtgtgatattacactggcggatgcatgtcactgtgcacttgtccagacccacagaatgtgcacccccaagtgtgaaccctcgtatggactatgaactctaagcaataatgacatgtccgtgtagggtcatcagttacacatgtaccagtctgatgtgggatgatggtagtaagggaccctgtgcctgtgtggtgggaggaggtgtgtgggaactctgtacttctactcacttttgctgtgaacctaaaactgctct

SEQ ID NO: 667102 - DNA, 416 bp, Homo sapiens
aaatataactggaaaatactgtgtctaaagaaatttcagggttctatcattaaattatgtacttaaaaaaaaaaaggggaaaaaaaaaaaaaaaaaaagaaaaaaaaaaaaaaaaaaaaatgaaggccagaaagggccaaaaaagaatatagactaaagcaagttaatgaaaaggggccgaaattagagctaactgggccaattagccaaatagggggggggattaaaattaatgggccgtggtttaaaaacgttttgacggggaaaaccttggggggcccaagggaaaaagcctggaaaaagaggccctttttgaaagatgggggaatagcaaaaaaggcccgaaccgggggaaattccgagcggttgccacagcttgaagggggaagggaaatcgcatgttgaaaaattgggat

SEQ ID NO: 667103 - DNA, 846 bp, Homo sapiens
gacccacgtacgcaggtagcaagagtgccatggaagaggctgaagcgcggcatcattcacgctagaggactggttcgggagtgcttgtgcagaaacggaacggaagtgccagatcctagctgccttgttggttttgaaggatttccatctttttacaagatgagaagttacagttcatctcccctgttcagatgaaacccttgtgttcgaaaatggttacagttcgtttttcctcccatggttcacgttggctctgaacctacagtctcaacgattgagaacacagatgttgcagttaattaggatttgcatatcaagtagttaggaactgcccaggttgtatgccgttgtgtttaagcattgattttcaagatgctcggaaagttatcttacagcgaaagctgtggagttgcctccatagacagccagtgtctccctgttaatcttctctttggtatacactttgttagcccatgggtgtactattggtgccttttcagtaagctaataccactgtagggattttgtttggaacgcatattgacagcacgctttacttagtagccggttcccatttgccatacaatgtaggttctgcttaatgtaacttattttttgcttaagcatttgcatgactattagtgcttcaaagtccccttttacagaatgcacaggttataaataccgaagaaagagcgccaccaaactaacaaggaccccgaacactttcatactaagactgtaaggtagaatctcaattctggcgttattgtaaggtgagtaacaccatctggaagaaaatgactaaaactggttgcgtctctgcatggtttataactgaagtaa

SEQ ID NO: 667104 - DNA, 447 bp, Homo sapiens
gatggagtctccttctgttacccaggctggagtgcagtggcacgatcttggctcactgcaacctctgcctcccgggttcaagcaattctctgcctcagcctcccaagtagctgggattacaggcgcccccaccatgcctggctaatttttgtatttttagtagagacctggtttcaccatcttggccttgaactcctgaccttgtgatccactggccttggcctctcaaagttctgggattacaggtgtgagccatcgtacccggcagccctggtttcttctttagtttattggtcttggttttgatcaccacagtcacttttttgttctttttcctggtaagccgggagtcaaaacactttcccgaaaatgccagaattagaatttctacctactttgttcactctaggctcgaggtttcctatctctcactatcttgcttactgg

SEQ ID NO: 667105 - DNA, 431 bp, Homo sapiens
ggccccagggccttttcccctcaaacaaaatttgtgcaagacttctttgaaattatttttgttattaaaatacattaaagtaaacgtaagagaaaaaaaaaaaaatttaatattaccaaaatggcccctttatgtgcactggggtcttgggtatagggactctatcacctgaataattactttttaaaattataaggggggatttatttatttgtattcggcttgggggggggccctttggaattttccacatttggaatttatgtttgggtttatgggaaaattggttcaagggaatggggaatcattttactgtcagggtatatttgtttttcttaactgcatattgtcagactaatatttttgggaggggtttgaaatcttttaatatccagatgatctcatttgaggttttgaaaaagaaaccattg

SEQ ID NO: 667106 - DNA, 80 bp, Homo sapiens
ctcaaacccactacaccttactaccagacaaccttagccaaaccatatacccaaataaagcataggcgatagaaacttga

SEQ ID NO: 667107 - DNA, 379 bp, Homo sapiens
gctcggaccttttgtgtctggcttattacactgaaaatatcttcatgaatttacatgttgtagcatgtatcagaatttcattttttaaggctgaataatattcctttgtatgtaatatctcattttgtttatccattcatcggttggtggatatctggattgtttccgccttcggctgttgcaaacaaggctgctgtgaacatgactgggcagatatctgcttgagtccctgctttcgattgttttgcgtataggatatatatccagaattgaaattgttagatcatgataattcatgataattcggtttttgagtaattgttacagttttccacagtaactgtatcatttacatttctgtccagcaatgcacaaaggt

SEQ ID NO: 667108 - DNA, 205 bp, Homo sapiens
  misc_feature (3)..(3): n is a, c, g, or t
  misc_feature (6)..(6): n is a, c, g, or t
  misc_feature (18)..(18): n is a, c, g, or t
aantcntaattacgcatncagtggtttgtaatagaaccacgaagttgtgcagctatgacccaataaccacagttgatttgaaaaatgtgccatcaccctagaaagaaaccctgtaccttttagcagtcacctgtcatccccccactgtctcctggcctgggcaccactaatctactttctgtctccgtattaggattcggaccga

SEQ ID NO: 667109 - DNA, 389 bp, Homo sapiens
ttgtggctggggatgggttttggttttggggtttttttttaaattgttttgacttcgtacagggtactttttcccaacctcatctgtcagaaatccatgtgggcttcctggaaagaaaaaaaaaaaaaaaggaaacctaggcttgaaatcagtttaacccctaaatcttaacccatgccctcattggcccaccctccccaacccaaaaacccccattccctttggaaaaccccctcaattccctggaaacgctcctcccaaatcgctctacataaatttcgggacacacacccacacgacagacaaaccattcgcctccactaaatctaccccagatttttacgggaccttctaaagctggggaaaaatgggagttttttaaaaaaaaa

SEQ ID NO: 667110 - DNA, 302 bp, Homo sapiens
tcgctcggccctcctcagcttccaaagtgttgagattataggcgtgagccacctggccagctctttttgaactttataatgactgacccaatgtatgcttttagcattaaggatcatttcttccgattattgaggcaatgccattctgagtgcattatctcctctattatggtgtctttcaactgtggctgatgagaataccaacaacccttaaacgctttgagaattgttttacctaatcctttcccgtgttggctcactctggctcggggtagtctaatcacatggcgtgcacctgtagt

SEQ ID NO: 667111 - DNA, 164 bp, Homo sapiens
  misc_feature (85)..(85): n is a, c, g, or t
  misc_feature (119)..(119): n is a, c, g, or t
gttccatttactaaatagtaatagaggccgggcgcagtggctcacacctgtaatcccagcactttgggagactgagtcgggtggntcacttggggtcaggagttcgagaccaacctggncaacgtggtgggactccgtctctactaaaagtgcagaagttggct

SEQ ID NO: 667112 - DNA, 887 bp, Homo sapiens
  misc_feature (8)..(8): n is a, c, g, or t
  misc_feature (190)..(190): n is a, c, g, or t
  misc_feature (214)..(214): n is a, c, g, or t
  misc_feature (272)..(272): n is a, c, g, or t
  misc_feature (289)..(289): n is a, c, g, or t
  misc_feature (322)..(322): n is a, c, g, or t
  misc_feature (376)..(376): n is a, c, g, or t
  misc_feature (379)..(379): n is a, c, g, or t
  misc_feature (385)..(385): n is a, c, g, or t
  misc_feature (399)..(399): n is a, c, g, or t
  misc_feature (417)..(417): n is a, c, g, or t
  misc_feature (426)..(426): n is a, c, g, or t
  misc_feature (435)..(435): n is a, c, g, or t
  misc_feature (468)..(468): n is a, c, g, or t
  misc_feature (470)..(470): n is a, c, g, or t
  misc_feature (472)..(472): n is a, c, g, or t
  misc_feature (479)..(479): n is a, c, g, or t
  misc_feature (484)..(485): n is a, c, g, or t
  misc_feature (492)..(492): n is a, c, g, or t
  misc_feature (503)..(503): n is a, c, g, or t
  misc_feature (511)..(511): n is a, c, g, or t
  misc_feature (521)..(521): n is a, c, g, or t
  misc_feature (525)..(525): n is a, c, g, or t
  misc_feature (568)..(568): n is a, c, g, or t
  misc_feature (602)..(602): n is a, c, g, or t
  misc_feature (618)..(618): n is a, c, g, or t
  misc_feature (714)..(714): n is a, c, g, or t
  misc_feature (718)..(718): n is a, c, g, or t
  misc_feature (734)..(734): n is a, c, g, or t
  misc_feature (796)..(796): n is a, c, g, or t
  misc_feature (814)..(814): n is a, c, g, or t
  misc_feature (816)..(816): n is a, c, g, or t
  misc_feature (885)..(885): n is a, c, g, or t
aattaacntaattttattcaaagtaagtctacattaaattacaatattaacaatctctagacacaacgaacttataagacaaaaaaatagaaatctgtttggtctttcttagaccacatatcatggaactcataaatgaaaattttcaaagatagaaatgacaattaaagagtgaggattttaatatggnaacccacaaggtgtcatatttcanacccgcatgtttcaaaaagagactcttaataatttagcacaaaatcaaattatataancttggtatattccaganaatattgctttaaacacttatgccatgatcaanattcctttggtagcttttaatcaaaatgaaacatgctattatgtaaaatataangtncttttnactgttatctcacncgtatctttgtcatagtnccccttctnacatccctnctgccctttcctttccctgttcaccctcatgtntntntccaccncccanngccgggnaccagcggggnccttttgntctttccgcnaganagcctctgcgtcgcagcatcaaggctttgggtctccataaacnttttacagtttacgagcagagaacaagggtcgtncctgcgcatgactgtnaaaaccaaaccaaactttattattgcaatcacacaaatactgcaattaaaaaaaatcaaagagcagttaccccaatgcaaaaaaacagggactgcnagantcaatcttagaatggnaacacaaacacactagccccaaaccctaaaacagagattcacaaggaactcagctgacgaanagacgcagcagggcgganancatggccttggcagctcagggagctcacttagaaacctgacttacgaaaaatcagccatcaaagtttanta

SEQ ID NO: 667113 - DNA, 132 bp, Homo sapiens
gtccgttggccgagtgagacttgtgttctcaaacccggtatggtggtcaccattgctccacgtgcaaccggtaacaacggaagtaaaatgtattttcgacatagcaccacatgaaagcttttgatgtgaaag

SEQ ID NO: 667114 - DNA, 385 bp, Homo sapiens
aaaaattagccggacatggtggcgggagcctgtagtcccagctactcgggaggctgaggcaggagaatggtgtgaacccgggaggtggagcttgcagatgagccgagattgtgcctctgcactccagcctgggtgacagagcgagactccatctcaaaaaaacaaacaaaaaaactacattttaaaattatgtaagtaaatgcaggggcgcattggttcgtgtctgtaatcccatcactttggggaagctgaggcttgagggggaagaggattgcttgagcccaggagtttgagaccagcctgggcaacatagcgagaccccatctcttaaaaaaaattatgtgagtagtaagtgtctattgtataaaattaacaaagtgcagct

SEQ ID NO: 667115 - DNA, 929 bp, Homo sapiens
tggcaaacggcaaccaggggcggcggcgcgaaaaaacccaggggaggtttccgggtttcggaccccaggcggccggttggtgaaatcctccctagaggggttcctcaatagccattgtttcgccaaaaaaaaggaaggggataaacccagggacacacatccaccgcaagcccgcaaccaatggccggctccaaaagccctagcacagccggggaggaagacagaagagagatgtcccaggggtgctccctcccactgggtaggaagaaacccgggtccgggggcctcgaggaggagctacctagatgggcccatcaacaccacccgtgaagatccccaggggggacgaagggaatacgcacagaaggggatccacaaatcattccatggaataaacgttcatacatacactcccaagagaactgcgggcgtgaaatgtaaaccgagaaggaaacataaagcggttcaccaggaccaaagaacagaggtattctacaaggaaccgagacaccagaggactcacaagaacccccaaaacggcaatacaacgcgggcaaaccagctgccttgaagcgtggcggcacagcccctcttaaacgtagaaaactccccggggaggagagacacgccatgaacagacagggggaagcagaggcacagcatacgcaagacaccccgggaaattcggtcgaggagagacagcattgcagaagcacgacgaaatcgtcatcaaactggctcccaacagacaccgtaaggacagagagcccgctcttgcatcgaaccctacagattaggggcatgagaatggcgagacgggggactaccgtgtcccaagaagacccgacgatggcaaagggcaacgggtagaaaaactctcggacggagcgagcaatagcccacagagggaatgacccgcgcccctggac

SEQ ID NO: 667116 - DNA, 157 bp, Homo sapiens
aacgggcgatgcggatgcagcaagccgagaccacagcagtacaggccagcctgggctacagagggagacggaaggccgagggagagggagagggagaaaaaaataatgaaaaagctgtataagcctgctgaattctgtcaaaggcctgtgctaagtc

SEQ ID NO: 667117 - DNA, 1209 bp, Homo sapiens
  misc_feature (318)..(318): n is a, c, g, or t
  misc_feature (322)..(322): n is a, c, g, or t
  misc_feature (547)..(547): n is a, c, g, or t
  misc_feature (564)..(564): n is a, c, g, or t
  misc_feature (617)..(617): n is a, c, g, or t
  misc_feature (746)..(746): n is a, c, g, or t
  misc_feature (772)..(772): n is a, c, g, or t
  misc_feature (821)..(821): n is a, c, g, or t
  misc_feature (832)..(832): n is a, c, g, or t
  misc_feature (892)..(892): n is a, c, g, or t
  misc_feature (902)..(902): n is a, c, g, or t
  misc_feature (915)..(915): n is a, c, g, or t
  misc_feature (944)..(944): n is a, c, g, or t
  misc_feature (958)..(958): n is a, c, g, or t
  misc_feature (966)..(966): n is a, c, g, or t
  misc_feature (979)..(979): n is a, c, g, or t
  misc_feature (1015)..(1015): n is a, c, g, or t
  misc_feature (1112)..(1112): n is a, c, g, or t
agcggcgtaatcagcacctcgtttgtggtcgcctcggtcaccactagtggggggttataatattttgaggagagaagattatagaagaaagattttttggccccccccccgtggcgcgcaagaattatgaccgcgccacacacccctctctcttatgtcggtaagtcagcccttctctctcggcgatgaactctgtgggaggaattataacagcagctctttcttcgagaaaaaaaagaagaggagataattgttgtggtctccctctcggtaagagagccaggcttcgttcgttatgatgatttcttcgtgaggatngatnatcctcaccagccccaccaccttctggcgaggattggtttgtgaatagaaagacgacttctcgtggttgtgtttgtggcttccggagaattgttgttgttcggacgccccccctcctcgttgtatttatgtctaggagaacagttgtattaacaaccctcgtgttggtgctccccgccccctccctcgcgcgttgaatgtatattatgaccaccgacctggctgntgcacatcaggcggcgnggctgctgaggagatggtgttggtctctctgatggtggagattttatgttctnctctaattagaagaggaggcgctgcgtgctcacaacagagaaacccctcaccagctgtctggttgatgttagttggctggtcctctctgacggcgcggttgtccttccgtgcacaacggcgggcttgtngtgagataacagtttcgcccaccagncacggcttgatagggaagacgcgcaccagcctgtgttgccctcctgtgntctttgacagnacttcggagatgagtgttgctctggtcggacgcacaggagacaaccacactcgcctgcgngtggctccgntgttatacctctngcgctgtttggaagaggtgtcgggagaanagcccgggtgtgtngcaacatnttatacgccgccntccgtagaaaattgtgataggtctacattcttctanaaatttaatatgtgataaggtgttctttttgtgaaccgccacattttctgagatttttcttgagaagagagagatgaccacaccccaatgttgtggnttttttatactgttaatgtgagggacccttataggcccccagccacacccgtccattgtgtaagggaaaataaaagggctgccgttaaccccaaaaa

SEQ ID NO: 667118 - DNA, 318 bp, Homo sapiens
ccaaaaccctttttttttttgggcccaaaaaaaaaacaaggggtgaatttcccctccccaaaataaaaagtgggttttacagcaaaaagtccttttgtggatggctaaaaaacttcttttttttgaaaaaaaccacctttgggggaaatttgcaccatggttcccctttttttaaaatcctgctgtccaaaaaagttaaggtttccagggcaaatgaggcgtcacttttgggggctaaaattaacaagttttttttttttcccctcaatcgggaaaaaaatttttattgtttaaacaacccccccggtttgtttaaaa

SEQ ID NO: 667119 - DNA, 275 bp, Homo sapiens
gtcttactcttaccctgatgcccaggctggagtacagtggtgcaattatagctcattgcagccttgtactcctgggttcaagtgatcctcccacctcagcctcccaagtagctaggactacaagcacgcaccaccatgcccagctacatttgtttctttttttttgtagagataggggtcttgctatgttgcccagggtggtctcagactggcctaaagcagtccttcccacctagggccgcccaaagcactggcaattattagggcatgaggcc

SEQ ID NO: 667120 - DNA, 770 bp, Homo sapiens
  misc_feature (210)..(210): n is a, c, g, or t
tttgttacgggagtggttttcgccccgagctgggtgcggggtgtttcgccggatgagcatttgtgctccgccgcggtggtgttctggggcgcccacttttctctccctcgcgttggtgggtatccaagcggtcgtgtgtagtttctatctcacccgctgctgtccaagaggttcgtccttcctgggtgccgggagtgtgtctcgggtccncctcctcctggcagtgcagtttgctctcatcccagtcggcggcgtagtatgatgccgcggccttccctttcgtattacgatcggcagcgccacctgcgctcgcgcgagaagctccccgcgctctgtctcggcgcttcacccccgggtgcgcccgcggcataacacacacgcaccacggtcttctgtggtccacccaggggagtcactgcacatgctcccaccgctctctcgcgctggttgtctccactctcctagagatgagccgctgccctgtcctcatctcgtgcccccagcacacctccgctcgtgttggcacgcacgccgttctctcacttgtcactccgcgcgttctgatcttcggcgtgtgccgcactgcgcttctgcccctcacacgtggtcagactctgcctctcttgcctgggcgccgctatctctctccccacgcgagagaacaaaaccgccaaaacaaccgccggtggggccctctgagcgagaccttgcccgcccggagtccacaataaaccgctgttgccctctctgccacaacaactaaacaacaa

SEQ ID NO: 667121 - DNA, 124 bp, Homo sapiens
caaccctggcccctgcttctttggtacacagtctcaccatgttgctgaggctggcgtagaacccacaaccctcctgcctctacctcctcagtattgaggttggtgctatgccactgtgctctga

SEQ ID NO: 667122 - DNA, 462 bp, Homo sapiens
acatctatagtgccagctgagccccgatggatgacggctatgacagtagtgatggagccagtccgcctcgtccgatggagtgccttcttccgtgagggttagccaggccgaggggggctgggctccatctttgtctgggcctcggggaacgggggccgggaacatgacagctgcaactgcgacggctacaccaacagtatctacacgctgtccatcagcagcgccacgcagtttggcaacgtgccgtggtacagcgaggcctgctcgtccacactggccacgacctacagcagtggcaaccagaatgagaagcagatcgtgacgactgacttgcggcagaagtgcacggagtctcacacgggcacctcagcctctgcccccttagcagccggcatcattgctctcaccctggaggccaataagaacctcacatggcgggacatgcaacacctggtggtacag

SEQ ID NO: 667123 - DNA, 466 bp, Homo sapiens
accttcatcgttgccctgacgcattagtttacagtccctcagggtggaggtctttagtttcataagagcctcagacagattttcctaagacatgtgtaacacaccaacgtactgtgacctacgaaaggctgttaatgatgtctccaacaaaggatatggctttggcatggtcaagattgacctggatacagttaaagcatcacgcatgctagaaaccaaatataatgtctggaactatggacttaccttcacccacaaatggaccacagactgtactttagggactgaaacttcttgctagaataagatgcctgacaggttgaaacctgctcccggtcccatatttgtgccgagcacaggacagaagagtgggaaacagtaggcctattatcaacggaattgatttagcgttgtcagcactgaagagatataatgtcctgcaccaaccaattcatgggtggggtgg

SEQ ID NO: 667124 - DNA, 835 bp, Homo sapiens
ttctccttttttgtgtgctccattcttgctgttcgtttgcttaattgtcactccatccaccgtggtgggtgtccctacctcattgataacttttggtaactctctccttctttcttcgtcgtgttgtggggcgggcttcttcactgctactgcgttgtctgtatctgttacgtactgtccctttgtggtccatcccttattctgtgtttacttcttctcacatcgccccctctgcttccctccttgttctcttgatttttacagcccgtgggatactagtgcgcttcatcttctcgttccaattaattatgtccccccgtccttacgttgcgtcccttggtatgttgtgtatgctcctcgctctcgggcgacgtgtatttggagaagtattggtctaccctctgtgcctccatattgtgggtacctatgttggggtcgtgatctagcgggttgtcgtagtctgtctctttctttctccccttgttgctcgcccatatgccgccactccctctagctcttccacttttcatgtcacattggcatcccttatcctcatacctgtgccaatgctgattatatgtgatgctgcttatttagagagcaagtctccgggtgtctattttaaaaatgtacgagtacaatggtgacagtgttaacggaaataatatatatagaataccagaaatgccgtttacccggagaattttctttctccccatttgttgttgtttttactcaattacaccatttttagttgtatttcctgatagcaaaaggaaaaagaaacactcatccctcaacaaaggccaagtcccattacccgtggtcgtagttg

SEQ ID NO: 667125 - DNA, 434 bp, Homo sapiens
tgtgtaagatgatggtggagtgtgatatgcagcccagttgtccatcattcagagcacaggctccctccataactgagtggacgagggattcgcactatggaatccccagctcgtttccaggaagagaggaggggaggctctgaggggtctgcagccccccttgcttgggcatcccctgcagagtcaggactgctcccgtgtgtgccaagtgctgcccgtgggagccccccctgaacccatgtgcatggtgggctctcatggccctgtgccgtgcctcatgtgtctttcgttgcttgcaggctgctccagcccaagccccgaacctcagtgggcagactggccccttccttggctttctcgctatatgggcacctcccttgtccccaagcccccccaggaatatggtgctctccttgacccttgcctctggccct

SEQ ID NO: 667126 - DNA, 382 bp, Homo sapiens
gccctcagctgtggggcacgcctggggctcagctctggtcctctacctccccctgcctgcctctgctaccacccagctggcccttgatgccggagctcctgtaggctcagcccacccagggtagaggaccgggccagagcctcatagtcttagctgtgtcctctttgacaagtcactcaacctctttgagcttcagtgttctccgttacaaaactcagaagatgacagtatctgcttcatgaggctgctgtggttatcaaaggcattaacgcacacagagagcttagcacacgataaaggcttaagaagcgccagctgccactggcactcctggaattatggtcggggtcctcaagaacagcagcagggaggcctggaggac

SEQ ID NO: 667127 - DNA, 894 bp, Homo sapiens
gaggaatcagctgggctggccagcaagttcagctccggctagtcatttagattcacccggtgatgaaatgggggtcaagcagctctgtgggctttccacgctgtcacaggaccccacctcgtaaggctgtggggatgtgatggagggtcagaatctccagggcgagcttctttcgactcttctcactgcctgttctaatagaggcaggatgcaggaggcatgggaggccaggccctgtgtgggattcctccggcgtgatggagatagctgcagtggaactggacggagctaacctggcgaagtgttgagatgaagtcgctgtcggtgggcttgcatgttcaacgctggacgcgtgggatcttgtcgtactgcctgttgagactgggaatggcccctttaagacaaaggactcctggcataccccttgatcatcgttctcccagtggaccataggagtccgttcgaggacgttcgtaagttcatgccttctgcatggacgctggcctcacgtggctcttgtgggttgctgtagccacgagtcacagggcatgctggtcagcaggcaaccagcctatttcgtgcaagcaggacccaggaagagaaccagccaccaattgaatcgcgtgcagggaggcaatggcatccctgttccgtcagagttggagcgaaagggggaggacagcgagatttcaatgtggcagggacatcctccatggtggcatcagcggggtcaacgtcgtagtggtttaaccggcgttgttgattgcatcgcttgagatcagggtccaaatgccttgggggcacgagtgggtctccaggtgtggccttggttgatgtcggatctgatcgactttgaaaggggccacttcgactgaacgggcgggagtgaggggc

SEQ ID NO: 667128 - DNA, 223 bp, Homo sapiens
agctcggcccgcaccaggcgcacttctggctaggatgggaagtgaacagaatctcatctactgctgttgggaatgtaaaatggtataagcatttcggaaaacagtttagcagtttctttttcttttctttttttttttttggagacgaagtctcgctctggtccggcaggtgggagtgcaagggcatgatctcggctcacggcaacctcgtgctacctgggtg

SEQ ID NO: 667129 - DNA, 885 bp, Homo sapiens
gataacaggccgttcctgaaggtactccctgtttgctggcagaatgtcagatattttcggatggttcgcagtaacgatgtcgcgtatgttggccgcacagttaagtctcaaacttgttgtgctgcctgttttggtggactggccggctctgtacaaactctgtccaaaaagtgcatggaatataacttgtaaagcttcccacaattgacaatatatatgcatggtgtttaaaccaaatccagaaagcttaaacaatagagctgcataatagtatttattaaagaatcacaactgtaaacatgagaataacttaaggattctagtttagtttttggtaattgcaaattatatttttgctgctgatatattagaataatttttaaatgtcatcttgaaatagaaatatgtattttaagcactcacgcaaaggtaaatgaacacgttttaaatgtgtgtgttgctaattttttccataagaattgtaaacattgaactgaacaaattacctataatggattggttaatgacttatgagcaaggtggttcggcagacagtataaccaaacttttatatcatataccgaaggtatcacacttggtgaaatctcctggctaatctggaattggattcccacggggggtaccatgggctatgtgctgcgattaaaagagtaagtggcccccgtgtgcaaatacaaaaaaacagaaatgacaaaagacaagtgtgggagggcgtcgagcacccaaaaaactctagcacacactcagtggggaccggcgacaagagtagaacgagcagtatgttcacgaagacgacgcgagaaatcgcggattccacaaaaacgcggggcacggaccgacaccacaacggaggacagatacagc

SEQ ID NO: 667130 - DNA, 122 bp, Homo sapiens
ggtgctggaatacggctatcgaaggtctgtaggaggctgaaggccggatagaggggccccagtgtaggagcctcaggaagaaccagcaaaagacagtccaacgagactaaccgagatgctag

SEQ ID NO: 667131 - DNA, 847 bp, Homo sapiens
agcggaacgccacgatctctccagtaaacctgaggccttccccatgactgtcccgtgcccgctcctcatccgccggtatatatctataaacctaccttgtactctaccttacccgatcgtccctacccgtctgcacttccgtttcgtttttgccccagtgctaagaggatcactcagcctaaacatatcttaagtacggatgcattagcaccggcctatgaataggctagtacaatttaaccgctgattgttgcagcgcgtagcgcccttcgtgctgtgcgggactcgtggtgctagttcagcatacatctgatcttcggggctcatcaaagcatgtaagtcttctcatgaattgtctcctcatgattggtacagagagtctgcctcgacctccagtgcctattatgtccacacgacctagagcaggcctgagaggatagtaatggtccctgcgtactctcaggaacctctcatatgtagtgactacataaacatgatggtttctggtgggacggaagtgacgatcggcgcaaagcatgctggtctcaggcggtctccgctcaacgatccgttcctcaaagcatggttgcgtgagtacccagagtgcgaaggagttaataagcgtgatttagccaggtggccaatcatgagtgaatggatgaggaaaaggcccttagaatggcaagattacgtttttaccaccgaagggtccgaagtgacggacagtgagaagaatgacgtattacccggatggggtttaactaacagacccaagtcttctgcaaaggttctactgtcacccaggtggaatgcagtggggcagatctcgggtctttgtaacctccac

SEQ ID NO: 667132 - DNA, 690 bp, Homo sapiens
  misc_feature (146)..(146): n is a, c, g, or t
agatactctaaaatacagagaatgtgcccacgttccccccatgccccaaattgtcgcaggggctccccgctgcaaaagacgattaagattcctccaacctcttccacacctgcaaaagaagaatcggtgtgaagttccggtgtatnttgtgtgtattctactacaagagttcggatagtaaagcagtagctttcatacaatcagaagagtttgtccccggcacacacgaaaagcagtcctcctttcagcaaatatgtgatataattctcaacagctttgctaagactgggttggcgaaaagaattagagcattggctactcgggcccaggacaggcagggtcagagaacccgctgtgggcatacccaggcccaggatgacctctaggggacgacagagaaaccaacacgcggagaggggtgtggactgctaagtataggcgctcgtcgacttagccgcaatcaatgtccacaaagtaaccatgaagttttattcatttttaaattaacaatgtccagataagttatgagaattcaaaagaattgaactaggttcctggaatcaaaatacacagatcacctgaattctatgtacaagtcaaacttttttttaaaataagaaatttaaaatgccatgtaaaacatcagccaataataacaatgaagtgcaagaatgcatctccagaaagatg

SEQ ID NO: 667133 - DNA, 592 bp, Homo sapiens
  misc_feature (210)..(210): n is a, c, g, or t
gcccctcaagccccagagatgttgatgcctaagaagaacccggattgcccatttatgaactcccttttaaagagggaatcatggtggcccagaaggatgtcccacaagcctaagccacccggagctggccagaccagaatgtgccccaccttcatagtccatgaaggcccatagccagtctctcaagtcccgaggctacgtgaaggacanagtttgcctggagaacatttctactggtacccttacccaatgagggttatcccagtatctccgtgattaccttcatctgccccccgagattgtgcctgcccaccctacgccgttaacccgtcccagagactggccaggcctcggcctaaaagtctggagggtgagcgacctgcgagactccaccagaggggaagactgaccagagataacctaccagacggagtgctgtgccccctggtgccgaccagaaaaccgaggctggggctgggtcagccacccgaattcccagtttagaggcggatttggtcgtggacgtggtcagccccccccagtaaaattggagaggattctttttgccattgaataaaccttaccagcccca

SEQ ID NO: 667134 - DNA, 276 bp, Homo sapiens
  misc_feature (82)..(82): n is a, c, g, or t
gcactttgggaagccggggtaggaggatcccccagaagccagcaggtccacaaccaagctgggcaacacaagcaagacaccngcattacagaaaaattttaaaattagctgggcgtggtggtgtgtacctgtaggcctagctgctcaggaggctgaagcaggaggatcacttgagcctgagttcaacactgcagtgagctatggtggcaccactgcactccagcctgggtgacagagcaagaccctgtctctaaaataaattttaaaaagacatat

SEQ ID NO: 667135 - DNA, 414 bp, Homo sapiens
  misc_feature (267)..(267): n is a, c, g, or t
  misc_feature (272)..(272): n is a, c, g, or t
cagcacccgtcgagaatcgggtcaacactgaagcattcacaccttcaggatatgaagcagagcttcctgtcacatctgcagatgttgtgctgttggtcaagagccagtgtgcagtgatctctccacctctcatgggagcgactgacctagacacagtctcagtctgagacatgggacttccattttgcacctcagagctgctggcaaggctgatgttctccaaaggttggggaatcattttgccaacgcaaagacgtaagtccaaantcatnttctgtggatggttcaatgaattcctcatcccctggattcccagttactctactgtttcttctcgattccactgcagagggtgaaagaaggactgaggatgaagtcgtggcaattctggagtctttgggtgtagccctctgt

SEQ ID NO: 667136 - DNA, 115 bp, Homo sapiens
gatccaggtgctctctctgttggtgatcacaccaattcttcctatgttatgactccagtcaccatacacaggttacaatgtcgaacatgatgaaatcagtaatcttgccaggctc

SEQ ID NO: 667137 - DNA, 1267 bp, Homo sapiens
tgggagcctgtagcctttattcatgcccccctgaccaaatgcagggaaaaacaaggccctgtgtccgaaaacaattccaggggcctgtggacttctgtgggttccccttacgtgcaaacactttctcctgtgtgtaagccaaaagtgtgtattaaaggtgcgtgggtggtgtgtgaccatcctttgtggggaaggtcaaagggggcaaaatcccccgaggggcccgtggaggaaagggcaagggcaattaggcggtggcctcccaagaagcggcgtgggaagggaagggcccggtgccaaccaacctctcgggggcttagaaaaacaaaaagtgcagcccgtgtggccaaggaaggggcacctgtgtatacatatgggaagccctcttcaaagcctgtgtgaaagcccccttagaggagaagggcgtggggagtatgtgtataagaggggggcactcacattctcgtgttaccccctgtttttacacaggcgaaggtgcggtcatgtgttacggaacacaggggccctttgcggcaaacttcttccagacagaaaaagtgcgggcaagagtccccctttctcggaagcgccctgtggatcccctgtggcggggaaccccgtggtaaggcgtcccacagccccccctgaggttgtggtccgcaaaatcctttcaaaaagacagcctcttcccgcggaatagtctcccctctcccttgttggccacaatgtgagagtgttgtaagaacactctcaacgaggggcatcagccccaaaaaggggcgacctgtggtaatcgcaggggatctgtgcccaaatatgtattcccccggggcgccctttcacccttcaaaaaaccgcgaaaccggggagcacccccgtggcgctcatcaacatccttgtgcggccaaaagactctcttcatcacatggaggttgattaccgtcccacactatggcgccacacagagggatccccttatcataaaatttccccacaaacccaaggtgacgattgaattggcggccaacggtctatagggcagcccaaccaaacggtcgattaaccacccctcagtggaagatcccagactctcccacgagcaaacggcgtgtccccaaagggctggggcaaggcggcgtggccagcgttggcacaaaagcgcccctatgacggactacaaacaacgagaggcgtccagggagaatgagcataaaggccgccgcgacctcgcaccgaaagagccctcccgcagcaccacgaaatacgg

SEQ ID NO: 667138 - DNA, 618 bp, Homo sapiens
cgaacatggtgaaacccagtgtctactaaaaatacaaaaattagccaggcgttgtaatctgagctactcaggaggctgaggcaggacaattgcttgaaccccggaagcggaggttgcagtgagccgagatcttgccactgcactccagcctgggcgacagagtgagactctgtctaaaaaacaaacaaacccgttttgtctgttggagacaagagtgcagcggggccatctcggctcactgcaacgtccagctcctgggcccaagcgatcctcccacctcagcctctccagtaactgggataacaggtacgcaccaccaggcccgactaatcttttttggaattttttgtagagatggggtttcgctatgatgccctggctagtctttaactcctggactcaagtgatctgcccacctcggtcccctaaagtgctgagattacaggcctgagctgcgtaatttcatgccgcgtgacacagtccagttaaaaggaacaaacccccgggggtcagcgtctactcacacaggtggactgatggctgatatccagcacgagccagagcagtcacagtacccatctactcacacaggtggactgatggttgattccagcaggg

SEQ ID NO: 667139 - DNA, 436 bp, Homo sapiens
  misc_feature (39)..(39): n is a, c, g, or t
  misc_feature (54)..(54): n is a, c, g, or t
  misc_feature (58)..(58): n is a, c, g, or t
  misc_feature (90)..(90): n is a, c, g, or t
ggataaagctggaaactatcattctcagcaaacttttcncaaggccagaaaccnaacnccacatgttctcactcatcagtgggaattgancagtgagaacacatggacacagggaggggaacatcacacaccagggcctgtcagggaatgggagactaggggagggatagcattaggagaaatacccaatgtagatgacaggtcgatgggtgcagcaaacaaccttagcacatgtatacctatgtaacctgcacgttctgcacatgtattccagaacttaaattataataataataataataatagactgaaactggccaggtggggtggcttatgcttgtaattccagcattttgggaggctgaggcaggagaattgcttgaagccaggagttggagaccagtctgggaagtatagtgagaccttgtccctattt

SEQ ID NO: 667140 - DNA, 200 bp, Homo sapiens
agtatgtccagtgcacgataaagctcttacctagcggttggtttgcttgagcatacatcttgctgtatgatcaggattatcagcacacagtagagtcagagagtatcgcattgtttggttacatctggtaccgtgtcacattaaagataagcattcgattgtcggcaccatacaccatatgacatgaggtatgtctcacg

SEQ ID NO: 667141 - DNA, 857 bp, Homo sapiens
tggggacggagtcttacggtgtcacccaggctggagtgcaggggcacagtctcggctcacgtgcaaccttcagcctctcccgggtttcaagcaattcttccgtggtctcagttcttcccgagcagcgtgggattacagggtgcccgccacaagtgcccagcataatttcgtgtattttaagtgtgaaacgagggttttccacccaggttgtggccgaggctgtggttcttgtgaaactctcctgtggacctctcgagggtgcactctgtggtccccacacttctgtgcctctgtgctatttctataagttcaatggctctttcttcaaccgaaagaggtgctctgtgctcatttctccgtggtgtgtttccaccgtgtgtggcaacataagtgccttctgtgaatatgtgttccaggggtgtggggggcctcgtgtgttcacccggattgtgctttctccaggctgtggtgctcgtgggttctcccaatttcatgtgcgggccccctcacagagcacagcggaataaaggttaaaacgcgggcaaggacacccccacttaaattcgagagtgcgcaacatggtccccgggggggaacaaacaagagggtcaaaaagggaaacacacgggagggaggagggacgccaggaggtcccaaagcggcccgacaaagtgggtgatccaggcgaaaaccagtgctccattccagagcaatacggccggccccaccaaaagtgtttccgtgcagccataacaaagtgggaccccctcagactctggcggggaacccaggaaagcagggctcacagcctcaagaaagcggccccacaatggtggccaacccacaagaacagcgtg

SEQ ID NO: 667142 - DNA, 261 bp, Homo sapiens
  misc_feature (139)..(139): n is a, c, g, or t
  misc_feature (185)..(185): n is a, c, g, or t
  misc_feature (218)..(218): n is a, c, g, or t
tgggaaaaaaaacattccccagggcctaaggctaacaaacgtgggcgctgaactgtgtttggtctgctgagtgtattttccccaaagcaatcctcattttctcagggggtggggatttggacaaaactcttcctgaacncccagcgtggtggggaagggtggccatggaggttttttgttccttntgttgtccctggtgaaaaacgacttggggcccnatttttaataaacccaatgctattagggtccccccaaaaaaaa

SEQ ID NO: 667143 - DNA, 171 bp, Homo sapiens
cggacagacgaaagcgcgaagagagaagaggtatagctgcaggaactttgatacacgtcatgacccagcgttcaataagggtttccagactgagagaaggtctgcgctggctccataggaaaaagacgaggcgcaagccagacctttcgctacgctaatagccgccgattt

SEQ ID NO: 667144 - DNA, 977 bp, Homo sapiens
tgcggagcgagatagtctcgactccgtggggctgtgactctgtggctgctgcgctactctctctggctggcatggtggatactcgagcgcttgtctagagatccaggttaagtcaacgatacgagtctcgagcatgagggaattgggagacccgtccgaagtctgtcctggaagttggctgatgttggtccggggttgtccagtccactcacgaacgaattgcacagttttgacatatactgagaggaataggagacgagacgttgaaacatatggagcagtgcaggaacttggtctaggcagacaagggagtggctctcgtctatctcttgtagctacagtggaatatcatcccgcactgaatgaagtagtgacgatatggcctggcggtgttggaaccattgtgcagttcgtcaacagtccactaggatagatgcagatggggatcgagacatgtaagcgagtgattaatgggagggtttgaaggagtgccgggatttggagttggatgaaattccagatgtttgtgcttgatatgctttctaaaatattggtgatgattatacgatgttacaggtatatgtcacaaaatgaagggaagaaaaatagggtggaaacgatggagcaataatttattttcatagaatctactttgtagtgtgatctgcatgtttggatgtaatatgaggaagtgtgtacacaggtgagctcttaggagggtggaaatctaaagttgggcgacgcggataggtctcttgtgaacaacagatttggtcaggattcgaactcttcaagcttggcaccaagctgtaagaacagtgacgtggttaagttaattcattctacctgcttagaatggggggaaataaaatttgtgggcgggctctgaaatggttaagtgaaggtgggcaaaaataagtaaaggagaggagggggaggggtttcaagagagggaacaaaagatggtcaaagaaagg

SEQ ID NO: 667145 - DNA, 244 bp, Homo sapiens
ctgactccagctgggagacaatgagcaaaactacatctcaagaaaaaaaaaatgcaaaggggtatggatagtagaaaaatggttatcaaagctaagtgggacatggacatccaacgttggacctgggtaggaaagtgaccggaatgggtggacaggagagaaacataggttggaatttggctagaacacattcatctcatatgatgaaatcaggaaatctaaattaataatttggaagcctgag

SEQ ID NO: 667146 - DNA, 179 bp, Homo sapiens
caggacaacagctagtctacctctagagagctatagacctggaagttagcattacccaagacgccgagaagttgagcacggaggaaccgactctccccggggagcaccctgacctgaggtcaagactgcggagggtccaacgaagacggacaaaagagaaagcagcgtaatttattgca

SEQ ID NO: 667147 - DNA, 881 bp, Homo sapiens
  misc_feature (3)..(3): n is a, c, g, or t
  misc_feature (103)..(103): n is a, c, g, or t
  misc_feature (113)..(113): n is a, c, g, or t
  misc_feature (120)..(120): n is a, c, g, or t
  misc_feature (187)..(187): n is a, c, g, or t
  misc_feature (189)..(189): n is a, c, g, or t
  misc_feature (191)..(191): n is a, c, g, or t
  misc_feature (208)..(208): n is a, c, g, or t
  misc_feature (214)..(214): n is a, c, g, or t
  misc_feature (218)..(218): n is a, c, g, or t
  misc_feature (227)..(227): n is a, c, g, or t
  misc_feature (232)..(232): n is a, c, g, or t
  misc_feature (244)..(244): n is a, c, g, or t
  misc_feature (246)..(246): n is a, c, g, or t
  misc_feature (275)..(275): n is a, c, g, or t
  misc_feature (295)..(295): n is a, c, g, or t
  misc_feature (303)..(303): n is a, c, g, or t
  misc_feature (307)..(307): n is a, c, g, or t
  misc_feature (312)..(312): n is a, c, g, or t
  misc_feature (315)..(315): n is a, c, g, or t
  misc_feature (317)..(317): n is a, c, g, or t
  misc_feature (356)..(356): n is a, c, g, or t
  misc_feature (365)..(367): n is a, c, g, or t
  misc_feature (373)..(373): n is a, c, g, or t
  misc_feature (375)..(375): n is a, c, g, or t
  misc_feature (378)..(381): n is a, c, g, or t
  misc_feature (392)..(392): n is a, c, g, or t
  misc_feature (394)..(394): n is a, c, g, or t
  misc_feature (414)..(415): n is a, c, g, or t
  misc_feature (423)..(423): n is a, c, g, or t
  misc_feature (459)..(459): n is a, c, g, or t
  misc_feature (462)..(462): n is a, c, g, or t
  misc_feature (498)..(498): n is a, c, g, or t
  misc_feature (527)..(528): n is a, c, g, or t
  misc_feature (543)..(543): n is a, c, g, or t
  misc_feature (812)..(812): n is a, c, g, or t
  misc_feature (876)..(876): n is a, c, g, or t
tangtggtagacaagaccccagatatatataaatatacatataggtcccagcaccatcagcaccagaacgttccccagccaggtccctgccagaaggaccaanagtcaggcangattgangacatagaaaggagagggccccagtctttgccaggtatcagtgatcacctgttatggtccccatgtnanangaagaaactaccctttnccttgnattnttgacactntggtncatgaggacggntngaccctctggaggcgccccctttcctgtntccagcctgtgccctcaatnccaaggcnacanaagcnaantnccagcaggagcagcttggggaatgtgagacactgcaggnccctccatnnncatccngntgnnnngcatggatttngngtcctatgccatggtgtgcnnatcacacnggagtctcccccattttgcgtggtggcacttgtgantcncttattctcccggatgtttcggttgcggtcgctgangctgctgatctcttccacatatgcctggnncacccaccccttctnaccatctgccaggcggaccccttccagccagccgtcactggtccaggtcctcactgacaggatgtcagtcttctccaaggtcagctcatctgggtgcagtgccttgtatgtcctaacacactgaacctgggggcaatcttccccctcactgatgacctccttgtcctcctgggggctggaggggcacaaggctgagatccatcgctgcttctcactttccgtccgggcccgcagcaggaactggtgcttcatgtgctgcccgtggaggngctggaggaggaacacgtggccggggatgccctgcagcttcaggctcaggtcccgcacctgcanctcag

SEQ ID NO: 667148 - DNA, 243 bp, Homo sapiens
atcgccatcatgaacgacaccgtaaactatccgcactagaaagttcatgaccaaccgactacttcagaggaaacaaataggtcatgatgtccttcacccgggaaggcgacagtgctcaagacagaattcgggaaaatagccaaatgtacaagacacaccggtgtcatctttgtatttggttcagactcatttggtggtgcagacactggcttggcatgattatgattcctggatatgcaagaa

SEQ ID NO: 667149 - DNA, 154 bp, Homo sapiens
gttatttagggggatgatggtcgctttggtatactaagcgatggtattgaggagtatctgaggcatgggggtcagggttgattcgggaggatcctattggtgcggggctttgtatgattatgggcgttgattagtagtagttactggctcaaaa

SEQ ID NO: 667150 - DNA, 626 bp, Homo sapiens
gcgcagatatgctgtctggacacacgcattatgcacagtgtatgctgtgtcgtgaggcacagcacgcatgcagtatatgctgcctggagacacacacatgatatgctggctcatcactcactacgacgtgatagtatagttgcctggtacgagccactactatgtgtcgacagtactatgtctgtctggtacgagtgcacacacgtgcatatatgctgtccggcatacacacgcacgcactgcatgcatgatatgctgcctgggcgacacaccttccggacagcacatgcatcacacaggtgcatatatgctgcctggatcgcacgcagactgacgtgcttttgggagggtgtgcgcgtgaatgcctgcagtactgtgctgtccctgtgagggctcatacgttagatgaagggacgtaatcgcctgcctccatccgatcagctccccccctaagtcatggcccgggcctcgtgtacagcacgcgctgcaagtaacacgagactacaatagcagcgacgtcatagtaccgcactggggcatatgaacaggctaatgcaaaagacagacctagcaatatgcgagtagacaagagaagttaaccacaactgacttgattagaaagaagt

SEQ ID NO: 667151 - DNA, 140 bp, Homo sapiens
tgctgctgtggacggtcaagacttctatataagagggggtccagaccgcatttgtcacatgtcttaaataggtgcttattaaatcttatgtacaacaagaatcactttgatagcatggttgaggacacaggacgggtgca

SEQ ID NO: 667152 - DNA, 145 bp, Homo sapiens
  misc_feature (19)..(19): n is a, c, g, or t
  misc_feature (105)..(105): n is a, c, g, or t
  misc_feature (113)..(113): n is a, c, g, or t
  misc_feature (139)..(139): n is a, c, g, or t
gaagagtcactacaagatngaggatggataatcgatgtttatattctgaccaaagtgtcagatattttacactcaattattcagtagctacaaagcaaaggtgcntaccatgntccataaatccttctgtcccggcggnccctat

SEQ ID NO: 667153 - DNA, 163 bp, Homo sapiens
  misc_feature (52)..(53): n is a, c, g, or t
  misc_feature (56)..(56): n is a, c, g, or t
tcgcgtgatctcagcacgtgggttcaatttacaatcttttcaaaacatattnnttncaaatttacagaatgttgttaatggaacaagacaaaacatatccactttagtttatcaaaaataaaagaagatttaaaaagaagcacatttctcacaaatagtattt

SEQ ID NO: 667154 - DNA, 418 bp, Homo sapiens
  misc_feature (5)..(5): n is a, c, g, or t
  misc_feature (35)..(35): n is a, c, g, or t
  misc_feature (209)..(209): n is a, c, g, or t
  misc_feature (254)..(254): n is a, c, g, or t
ccctnttaaaaaacccatcacccacaacagacaanggacatatccatccataccccaaaagtttccctcatgtagccccctcccctccccagtcttcccttaccctctcccaccccacccggcaaccccctgatatgcctttatgtaactatacattaatttgtatttccctagaattttatataattggaatcacacattgtatattnctgttttatctggcttctttcactcagcaaaattattacgagttntcactgacgttgtagcatgtatcattagttcattccttttattactgagtagtattcaactgtagggatacaccagtgattttacccattcccttattgatgaacattttggttgtttctagattttggctattgcaaataaagctgctatgaacattcatgta

SEQ ID NO: 667155 - DNA, 541 bp, Homo sapiens
tgactattcgggccgtaaaatggttaccatggagattttttttttttgagacagggtcacactctgtcacccaggctagagtgtagtggcatgatctcggctcacttcaacctctgcctctgggtttaagtgattctcccacctcagcctcttgaattagctgggactataggtgtgtgctaccacgcctgctaacttatgtatttttagtagagacagggtttcaccatgttggccaagctggtctggaactctcagcctcccaaagtgctgtgattataggcgtgagccactgcacccggcccaaaatgtggtatttattaaaggcagaagtaacgataaaaagcggaagtatggtatatcggaaataaggcatctgtaataaaatatatagcaataagagcctttctcaagagatatgaagacagtggagactaggtgatgggaagttttattcgagcacgggcagtttcctcctcacctcatttatggagctcctctggagtccatgcatagacttacatctaagtgtctaattgga

SEQ ID NO: 667156 - DNA, 787 bp, Homo sapiens
cattccggatttgtgccccgtcccgacgcgtggctcctgctttaagttatactgcagtttccataccttattaccccgcatatcctagatgtactaccaacttggaatttgagtctttggagcactctagcccccagccatgaagcctcgtgtccgaggaaccttaaggagggacaccaactggaaaccgggaaggagaaaggccacctgaggtgccccgcgtgccccactgccctgttggccagaggcctgtgtctgtgccacacctgccccggtggcagggggggtacccggggcagcatcgtggctcctgaaccccagaccccatgcttagcccaacgaagtggctccccattgtggccagcacccttctcagtttcgccgtggcttggctcgggatccttggccagttccccccagcccccccctgtctgctccttccccgttccttcccgggccccacacgctgctccagctgcccactttgctgcagagccactgccgcccttgagcctctcaccctgagtgagcccccagctctccacgttcccctcatagcagtgtcactccccacccccccctggccccgggacccgtggaccggttggggatggggtgtgtgccccctgtgctcatcacaggagcctcagttgagaatgacgcgggtaccgataaggcagtgcttcccccactggacctctttcctggttttcttttgccatacattaacagacccctttatccacataaaccatagtaactgagctattaaaggccacctctctga

SEQ ID NO: 667157 - DNA, 364 bp, Homo sapiens
  misc_feature (14)..(14): n is a, c, g, or t
tgttcatcagctgntgaatggatgagcaaaatgtggtccatccatcccacgccccagtggaatattactcagccttaaaaaggaaggagggctgggtgtgatggctcatgcctgtggtcccaacactttgggaggctgaggcaggtgaatcacaaggtcaggagatcgagacccgcctggccaacatggtgaaacccatttctactaaaaattagttgggtgtggtggcatgcacccgtggtcccagctactcgggaggctgaggcagaaagaattgattgaaccagggaggtggaggttgcagtgaactgggattcgcgccattgcactgtaagcctgggggacagagtgagacttcatctcg

SEQ ID NO: 667158 - DNA, 164 bp, Homo sapiens
gtttcaggaaggtagagttctgtgctgctaccttctagggaggggcgaatagactattctgtaccctggtgatgggagcctggggtctgctccagcgaacaacaattgaggtgtcatcaacgttggtccaacagtcgggtcaggatggggcatcagagcgctgt

SEQ ID NO: 667159 - DNA, 236 bp, Homo sapiens
tagagatgaagaatgatagtcagaagaggagcagagcagcagctccgtgagagaagatgagactaatgtgaagatggagtctgaggggggtgcagatactctgctgaggagggggacctactggatgatgatgatactgaagatcggggggatgaccagctggagttgatcaaggatgatgaaaaagaggctgaggagggagaggatgacagagacagcgcccatggggaggatga

SEQ ID NO: 667160 - DNA, 241 bp, Homo sapiens
aaattgtattatacgtacgagacagggaagtgtggaccaaacctgctattccagttcctgtgcgcattcgagtaactcctatgtccttataagtcagggtattatcttgcacagccctatgctgatagacttgagtctctgacagggactgataaggtttggtttccaggtgccatgtccatttcggggctcaggaagattagggtactcgttgcttatccagtacgggatatggcggaga

SEQ ID NO: 667161 - DNA, 1393 bp, Homo sapiens
  misc_feature (1393)..(1393): n is a, c, g, or t
ctatagctaaggaccgccccgaagatcgagacgatgctacctaagagcagcgtaaaagagcacacccgtctatgtagctaaatagtgggatgatttatagcgtagaggctgataatacctagcgcgagcctggtgataagctgggtgtagtaccagagatagactcgtatgagattcgaaacttgtaagattctgcccactagtaagccatctaaatccccgttggtagacattgtaaactgttcagtccaaatgaggaacagctctgtaaggagcatcgtacggacaaacacgccgttggtatgcacgagagtaaaagatctttgtggcagaccatagtaggtcctaaaacagtggacactcaattacagaaacgcgtacacagctgcaaagaccccatctaagcgtaatgattagttctcgataccattataaaactgagaatctcccttctaaaagcgcaaatgtgtgatgcggcaatctgaatttaatccctaattaggaaaagagacttagagtgtgtcaggtactaagagtcaatcctggaattaccttgtcttgccttccgggacttaagcgctgggcggtccgccatttacgtgacggactcgaatttggaacggactgaacccaggccccaattgtgcttaccctcttctacccaaaccaaagtcctttgtttaacccttaactgggctaaccccaactgcaagggccttgcgtccctaaaggcgacgggtcaaccaaatagccgtaccagagggagaacctccgccaacaaatctctaacccccgggctgtgtcaccgcatatatgtcacctcttagcattggccccagcacatggagcgggaaccggtctgtcccatgtgacacccttgttttacagggcccggggtaaccttaagcgggcacaggtgtgcgacaatacgctgtagcccctaaggaagggagccctgtgttgaccacggtgcccccacggtgggcacagcgcacgcaccaagcccgaagcccgacgagtgagacacgcgcctaaaaacagcgcggctatacccggaagacgcaaaccccatgagacggatcaccaatgcagacagcgcccgcacgaccaaaacaccagggcgcccccaccacgaccgccggacacaccacgcgggcaccaccacagaacaacccccggcagacaagatatcccccgccgcgaaactcctcctcccaatctagaggggcgccgaccacgaccactttatcacacgcagcgcagcagctggcccccgtatagcacgcgccaccacacgtcgaacagtacccagatcatttagaacgccgacgatgagacgtgcaccatccccgagaccgccgacaccccaacacgccgacccgccaccccgcgn

SEQ ID NO: 667162 - DNA, 668 bp, Homo sapiens
aggcagttgtccagcctctttcacttccagttgataccagagctgtcagtggggcctgaggctccttagggttgtctctctatttccccgcttgcttcctcattccctcgtctttcccataggcgatcacgagtcagtcgcctttcagcaatggcagactaggtggttcatcgccctggcaggcaggggccctgggctctcatgctgcccctgcctagcgggtcaggttgacaggaggttggagggaaaagccttaaactgcaggcattctcgaccacgctgtgtccggacccagttcttggggtgtgacctcaatttcaattcccgtcatgtacttgaacattatgaagatgggggcctctttcagagaatttgtgaaactagctagaattgaccgacacgctttccagtacccatggggctaggtccttaaggccacatccacagtctcccccacccttgttccggagctgttggttactacctcctctcctgacaatactgtgtgtcgtcagagctccccccaggtctatccctcccggcctggtctgtctggggggcttgtcgatagccagtgggattgccggtcttgaacgccgtcacgtgagctggagatctttggtcacgccaggggctacggcagttccctgtctgtgatgctgtatgcc

SEQ ID NO: 667163 - DNA, 371 bp, Homo sapiens
tgtgctcgcgggcccttctgtgcttgttagttgctcatgacatggctctgagtctgcatttgtgtgtgcctcggagatgtcactgcgtgttgcgcaggagggtacagagactggcggaggctcttctactggctcctgctgatgctcacactcactcgcttctcctcctccattctcctcaccggactcgcgctcggagctttgcactatagtttatatgcctgggaggactccggccatcttgggtttccgcgacattgtcatggtcttggatcttctcttgcagtgtgggtctgtgctctggctgtggctctggccagcgctagggctgcggttgagactctagtcctatgctgtagggggccggcgcg

SEQ ID NO: 667164 - DNA, 424 bp, Homo sapiens
tcaacagacattcgatactagagtaacttctatttacttgttttttttttttggaaagggagttcattctggttggcccaggtgggagtgcaagggcaggatttgggctcagggcaacctcggcctccggggtccaagtgattctctggcctcagcctcccgagtagcgggaataacgggcacccaccaccaccccgggctcattttttttggcattttaagaaaagatgggggttcaccatgtgttgggccaggagtgtctggatctcgggaccttcgtatccacccactggggcctcggaaagtgctgggattacgggggtgagccacgggggccaattaatccagttttaaaaggctaattaatgcttggaaaaatttgggcctttttctcggaaaggcctggctaggtgcggaatccttt

SEQ ID NO: 667165 - DNA, 155 bp, Homo sapiens
  misc_feature (84)..(84): n is a, c, g, or t
agataccctgtcatcccccttcgtagtggagggaatggcatgtgcaaagtccttaaggtgagagagtgcccatcaccttggagnagctaaactgtcagccagatcctctagtgcgagggggtggagtgttgagcagtaaaggaagagaggggtag

SEQ ID NO: 667166 - DNA, 696 bp, Homo sapiens
actacaggtgccctccaccacgcccggctaatttttttttgtatttttagtagagacggggtttcaccatgttagccaggatggtctagatctcctgacctggtgatccacctgcctcggcctcccaaagtgctgggattacaggcgtgagccactgcgcccggcctatcttaactcttaatcaaaaaattttttactttctttttttgagatggaatctcacatgtttcccaggctgaaatgcagtggtgacgatcttggctcactgcaacctcctcctcccgagttcaatgccattctcctgctctcagatgctcgggtggcggaggaggagagtcgcttgaggctggcgaggcggaggttgcagtgagccgagactgtgccacttgcactccagcctggctggcaagacgtgagactgtttacaacaacactacgtaataacttcctactttctcacgctgtgatacactcgaccccacgcttatctgcttcctgcgcactgccaatcggtggcgcaccacggctgacagaaacccttttcccccatgccccccaaccagcctacactcggtcagcgcgagaatccagcgggatcctcaccggctctgctcctgtcagttccttgacggaccacctttccaattacagtctcttgacactcgccaaactcagtctcttgtgcgctctgcatac

SEQ ID NO: 667167 - DNA, 920 bp, Homo sapiens
catgcgcaaccggttctccgaaacatggagtctgtaggcaaggtcttacctgaatcaggatgagggaatggtgggtccaggtggggctgctggccgtgcccctgcttgctgctacctgcacatcccaccccctcagctctcccctgcccttcactcatggaagtcttcaggcacagttttcacttacaagggactgcgtatcttctaccaagactctgtgcgcgtgtggttggaactccagagatagtatgtgcttttacacggttttccaacatccagctacgactggtacacagatttgggaaggtctgaccttgaggtttcatcgggtgatgcccttgactccttaccgctacgccttcagtgacaaaccgagaccacatcactattccatattagagcagcgccagcactcgtgataagccgcttctcggcggcatctggggctcccagaaaccgtcaggacacaaccttcttatctcatgactatggagaaattgtcgctcaggagcctactctacaggtacaagccagacatcgatcctggtcggcttaccataaagagctctctgtctgtcaaatggaggtatctttcctgagactcaccgtccactcctttctcccaagagcttacttcaagcatggccggtgtgctagtctcccagtcctcacacgactgttcacctccctttggcattcctctcggaggtctcacccccagtcctttgggcccgtatacctctggcctcctgagcagttggcctgttgggccctgtatgcagacaggatccgcaccactctgcgaccttctgctttgacgctcttacgtccccccccgagccccctccaacgcctcgtgtagcttcccctgcacttcccacgtcatccctggcccggctcgacccctacccattcgccgc

SEQ ID NO: 667168 - DNA, 305 bp, Homo sapiens
gcctcccgagtagctggggctacaggcgtgtgctaccatgcctggctaattttttgtatttaagtagagacgggataaaagataaatttttaaccttttaggaatcctgcactggaccattggctccaggaggaggggctgtgctttatctccctaacgtagggttgccaaagaaatacaggaccccagctaaatttgacctgcgatgggcatacttatacacatatactagaagtattcatgggtatttcaatcaaatgtactagggtccatagtgtatttctgagctgcaccttcctgattag

SEQ ID NO: 667169 - DNA, 221 bp, Homo sapiens
ccacctcagcctccccagtagctgggactaattttttttttggtagtgatggggtctcactatttttggcccagcctggtctcgaacttctgagctaaagtcatcctcctgccttggcctcccaaactgctgggattacaggtatgagcagcctcgcccggcctcaattactttttatattgacaaagagaagatgttgcagttgttgcagtgtgcttccg

SEQ ID NO: 667170 - DNA, 1062 bp, Homo sapiens
ccaggggggggggaaccccattaacaaaaaatgtggggggggagcgcagccaccacaccccggcggcgtccgtcctgctgtgagagggaagcacactctcactccaccggggaacacacccagccgagagcggggggggatcactattgtgtgtcggcgtcgcccaccaactctcacaagagggggcgcgctctctcttgtgtagagacccgaggcccctggggtctccacagaacagagacgcaaccacactcgcgcgtcgccgtataaagtgggtgtgtctgcaacccacaccacacacacagacggagtaaccacagaggcggggttgtcttctcgcaggagagcgacggagcaacccactgtggggtggtgaagagacaaacttctttctctggtcggggcgcccccacacaagagagcattcactgtctattctcctcacactcttctctctgtgtgaccacgcccagaggggtctggtgggaacgaataaaaagagaggagggggtggagcacacacgcgcgcgccgcactcctctttctggctctgtgtgggaccccaccagggcacgacgagatattctattagaagaggtgggggagcctcacactcctcatgggcggacagcggccccctttatgtacccacctcgctgggggggtctcatgaaaaacacagggggaaactggggttttttttccctcctatcttcgggggggggaaatttttttgggggtggtgggcggagcaacaacagcacctcctcgttctgggggtggcaacagcagcacaccgaagctcaggttgaagcacccccctactggcgggagcagcaacttgttgcgctcccctgcggtgtcttcacacacaacacggcccccacaattgtcgttcctccgcccgcggcggggaggctacagcacacatcgatatggggggcgcaccccgattcttgcggttcccccgcccccccccccccttttttttctgagccccctctgggggcccggggcccccccctggctggttctttaaaaaaaaatggccctttttgttga

SEQ ID NO: 667171 - DNA, 817 bp, Homo sapiens
tgtggtggctcacacgtgtaatcccagcgccctgggaggttgcttgagcctaggagtttgagaccaggccgggcaacaatagcaagacccgtcccaaaaaaaaaaaaaaaaaaaaaaaaaaaaaattgtgtgtggggcgcccgggcccccggaaaaagttttataaaaccatcggttggggcgcggggccccagagggataggaaaaaggggccaaggggtgtccccaagagaaactcggggccagaaacaaggggcggtgggattcccccccattataaaaaaccgcgcggggcgggacaacgcagcgcgtggttatgcgaacaaatcccaaagaggagagtccgaggagggccaaaaacgggggagcccacaccacaaagggagggccacagagcgagcgcgcgcaatcccaaattaacgcccccggacgggggggcacaagagcagaatagacactagacaagcagcagcaacagcaacagcaacgaaggaagtaacacaaaataaaaaacacacaacaaaggaagaaacacacatcaaaacacaacaaacaacaaagaaggagccaaatggatcagcagaaaacaacatgaaacgagagaagagaagagaaagaagcaaaacacaagcaagaagaagacaaaaaaaaaaaaaaaagaaaaacaaaaacaagaaaaagagcaaaagaaacaaaagacaaagacaagatcaaggaaaaaagataaaagagagagagcaaaaaacaaaagacagaacacagaaacaagagaaaaaaagaaaaaaaagaaagatgaagaaagacgaaagaaaaagag

SEQ ID NO: 667172 - DNA, 265 bp, Homo sapiens
tggaaaatcaggtcactcccacctgtcaaggggctaaaaatggcacacaggagattatatcctgcacctggctcggagggtcctacacccatggagtcttgctgattgctggcacagcagtctgagatcaaactgcaaggtggcagagacgctgggggaggggcgtgtgcacattgcccatggcttgcttacggtaaacaaacgcagtacaggaacctctgaacttgagctggagcccaaccacatgctcaacggacggtgtgcc

SEQ ID NO: 667173 - DNA, 598 bp, Homo sapiens
ctaatccaatccaggttcccaaatcgcccgcacatccacacactaaaaggctctaacctcactacgctcgtaacttctcctgacggaacgatagttattcccaaaggcaagaacaaaagtatagccgcccgcaactaatgtaactaaatagggggaagactaagaggagtgcctaatttccgatatttaactgggggcgtacccagcccggttgcgacgcagagagacgtctaactacccttcgtaagagcgagactacgctatagtagaggagctgtcgtcgttaaccgcgattctaaaaccgtcacaaccgtagaatgtacgagggcgcgtcagatgtgtactgttatgttgatatctacatgcgcgtcgagcttaaaaagtaggggtagacatacggataagtgcttcgcccacccctaacgataaagaggagtcggaaccggctacccttgcgttatacgatttaactctgctagcagcccattccttccctaaggaaggcggcggaggataaccagtgaattaagggccgggttacgcgggttcgctagctataaccgctttcgaggcgcgagatttcgtaggctagttgcta

SEQ ID NO: 667174 - DNA, 137 bp, Homo sapiens
  misc_feature (54)..(54): n is a, c, g, or t
  misc_feature (133)..(133): n is a, c, g, or t
tggctccctgtgggcgcggcatggggcgggttggggcgggggctctcggacccnccggtgccgctgacgtgattgaacttctcgatgcactcgtcgatcaggtgttgcggagccttcttgtgcgccaaccgtncacg

SEQ ID NO: 667175 - DNA, 416 bp, Homo sapiens
gagtgggaacacgctgagaattgtatagagacagatagggcttctagtgtataggatcatgtcatctgcaatcaaagatagtagacttcctttcttcctagttgaatacgctttatttctttctcttgcctgattgtcctggccagaacttccaatactatgttgaataggactggtaagaggacaattgtgtcttgtgttagttttcagggggaatgcttccagattttgcccatgcagtatgatattggttgtgggtttatcataaatggctcttaatattttgaggtatgttccttcaatacctagtttattgagagtttttaacatgaagggatgttgaattttaccaaggcctttactttgttcattgagataatcatgtggtttttgtctttagttttttatgtgatgaa

SEQ ID NO: 667176 - DNA, 726 bp, Homo sapiens
tgttatattaagagcgtgtcttattactgacatttgtaatcaagaaaagtgatatagaaaatatgtaggagacctgttaaaatggggtgattatggtaatatgggtcatgtgaatcaattttgtgatttataaagtactcacacaagtgtgtttcaaacgatgataattctctgtgaaacagagaggccatgggaagatttggaacaattatttaaacagaaaaaatttcctacaagatttttccaaatggcagaaggaacccattaagtcaaaaagtaaacatttcttttagtacgtaatgtttccaattaccattcattttaaactttttttttcaaaggtttaattctctgggaaaggaaagggaacaagggtcccctttaaaatttaattttaactaagggtttcctaaaaaaacaaaaatttttaattaaggaatttaacatggtgtcgtggacagcgtaccatttaaattacaggaagctgggaaaattaattctttcccaacaacttctgtctggacttaacacaaattttaagcgcaccaaaaggggtggcgcctgggggttgactctaaacacacattttccggaacacactttactgtcgggttttaaaaacccctttccaagggtctgggttgggaattcccttaaattgggttaattgggttcacacacggtgtgggcacaactctctcaacacatttaagggaatttaatagc

SEQ ID NO: 667177 - DNA, 421 bp, Homo sapiens
taaggtttacctcgggggccaaaaaacatccttaggaaatgcttttggtgtccccatttggatggcaaccaacccctgtgtgtgaagacattggtcgcagtctcctgacttatggccgccggcatccctctggctgagtgggagagccggatttcaggaggtggatgcccagatgctgcgtgacatttgctccaagtacttttatgaccaatgtccagcagtggctggctatggccccatcgagcagctcccagactacaaccggatccgcagtggcatgttcctgctgcgcttctaggcaggaagtctgcacaggcaggcaggagggcggggccgggcacccggggtccctgccacagacataccactcctgctgctcagctgtgtgcagccagttacccccaataaagccctattgaga

SEQ ID NO: 667178 - DNA, 347 bp, Homo sapiens
cactcataaaccacagtgaccccacagaaccagaaagatccctactattgaagtgataaacactagtagcaactcatagcttgctaatggctgtaacaagtatgtgccttacgttatagatagtcatgcataggtcttcctctttaagtgaacacattgttacacgagggaagagctgtgtaagattcatctttatgcttcccatagagtcttgcccatgagaagcactcaaaatacgtgtggactaaagaagcacgtaaagagaagaaatactttgtctagaattgcctatttctttctggtgtggtctgcatgtgtacccccaagttcatatgttacaacttact

SEQ ID NO: 667179 - DNA, 291 bp, Homo sapiens
attgtattcgtctgtagcaagatgctggctccactatggtcagtcatacactcatggttttcaccttgtacactgtgagaaccaaatatctaaaactatgtttttcttaacaaatcgtggttgtaacatatacaccataacctaatcagggtgttcactatgcttccacattagccagtcttctcacacttcttctggtttcaagtcctccaggcctgacagcccgcagggctaggattattctcattctttacaatacagtcttccgccccttgagagctttcttcatgt

SEQ ID NO: 667180 - DNA, 730 bp, Homo sapiens
ttaaaatattatatacctaaaaaagcgggaaatgggcaaaggaaaaaaaaaaagaaaaacaaaaaaaaaaaaaaaaaaaaaaaaaaaaaagaaaaaagaattttaaaaaaaaaaaaaaaaaaaaaaaaaaaaaaagacacaaagacaaaaagaaaaaaaaaacaaaaaaaaaaaacaaagaaaaaaaaagagaaacaaaagaaacaaaaaacacaaaaaaaaaaaaaaaaaaaaaaaaaaaacaaaaaacaaaaaaaagcaacaaaaacaaaaacaaacaacaaaagaaaaaaaaaaaaaaaaaaccacaaaaacacgaagaaaaaaaagaaaaaaaaaagaaagaaaaaaaacagagaaaagaaaacagaagaagacagagaaaaacaagaagagagaaaaaaagagagaaaaggacagaaggaaacagcaacaaaaacaaaaccagagaaaaagaaaacaaaaaaagaaaagaagcaaacaacagaaaaagagaaaaaaaaaagaaaagaaacaaaaaagaagaagaaagaaacaagaagagagaacaaaaaaaaaacagaacaagaacaaacagaagaaaacagaaaaggagcaaaaaagacaagagagaaaaagaaaaagagaaaacagaaaagagaaaaaaaaaaaaaagaaacaaaagagaaaaaaaaaaaaacaagagaaagaaagacaagagagaaaagaagaaaaagaaagaaacgaaaga

SEQ ID NO: 667181 - DNA, 1065 bp, Homo sapiens
  misc_feature (1)..(1): n is a, c, g, or t
  misc_feature (296)..(296): n is a, c, g, or t
nacaactcgtctctcttcgtttctctgtcttcttcgtttgctcttgtgtcctgtcctgttgtctccagctcccacgcatacgcttcgcctctgcagtcgacgtagcgggcgacgcggcgaagcgagcgcgtgcggcgggggcgggagggcggggtgtgtttggtcttgggatgcatggccttttattgatgacccgcgcttgaacacgcctgttggtgttggtgtcctcgctgtgggcgtctcggttgggctcttctttggttgccggcatctgacagcgacaattaggactgtanttaagaagggttctcgttgggcgaccggatgattatagggtgtccatcccacctgccggcgggtgaaataagcctcctctcccgggggatagaccttgtcttcaggccgacttgtggtgacaaggtcttctcggccccccgctgggtactcccctaaggggggcatcccccttcgggtgtaatataaggggcgacctactccgtcctctaaactgtggttcagaaggatgttctggtgtctaaaagaaaatttttgtagcgcggggcttctttcataaaaggcgatgttaatcccccgggcgtcgggttgtacaggtcctcgtcaaatcctctcccccgcgtggcgagaatgtgtggtgtccctttgaaggcccttcgattacgcccacttctcttccattgcccagtcacgcaacactgggggaacaagttcctgcgggcatgggtaggtggtggcaccctcttgcgaggaaaataattcaagagttatcagtgtagcataatcttcgggagtcacccgcagttcccggcggacggccgaatgcaaaatagcattaaagcagcagatgataggagcgaaattatagagaagagagagtacaccacgtaccttttttgcagaaatctaaacagaaagagatttaaaccctagtaagtctggggacgcgccaagcgtccaaactgcccccttcagggctagcaccacaacttgtcagagggccacaaagtcaaccacacactcaaacgaaaaatcaatagacagaaaaga

SEQ ID NO: 667182 - DNA, 152 bp, Homo sapiens
taggttggagggggaatgctggaaatggtaaggggtatggaaacttatcatataagtaatgctagggttggggggaaatttttggtatgatgtctgtgtggaaagcggctgtgcaacatttcaactgggttattatttatgtcctacaaggc

SEQ ID NO: 667183 - DNA, 900 bp, Homo sapiens
tataccttatatgaaaaaatacaaaattcaaaaggataagccagagacatgggaaaaccacatggaacgtgtgtcaaagttcttctctttaatcacttctgtatccagctgttcattggatgtgtggaacctattatttgacagagtatttcaatattgcttatgagtagggaaagaatgccaagatggtatttgacttaggagaagatgcattatgggttgtgcagtcattgaagatacattggaacatatatatctgcatagactcttacaacacaaaagaatatacaagtatatacataaagttcatcatgagtttcaggctccattaggcaatggaagctgaaatatgaacatccttgtggaagacttctaattcttggaactggattagtcatggaatcgtgcattgtgtgatcatgtattcttctttgggcatgggttgacatgcgtattattagaaactattgatgtccatagaggttatgaatattccgtctcaacctttacatctgatgcctttctatgcgggttctcgacatcatgaattcaccacctgaagttcatggaaactatgcttcaaaaattaacatggtgcgatcgacatgtggaaaccgactcacgctaataaggccctctacgcaaggaggaggacgtgtgaggaaacgcgaagacgtaggctaagtaaacctctcgagagaggttgccggatcgaaagtagagcaacatgactagggccacgaatagacattccggcaacaggaaaaccatgcaacaacaacgtctatggcaaacacatcacagaggtattgtgaaacactagcgaacggagggaaagaccacacagcagcgcgagacaagaggaacagaacgcgacggcagagaacgacaacgggggaa

SEQ ID NO: 667184 - DNA, 325 bp, Homo sapiens
tagcaggatgccttataaatgcttcggatgcggaaactgctttagatggttagtggcagagaatgggtaaggttgatagtgtggtggagatagctggggagaggtagagggtggcataagaatgggaatgagaataagagtgagtataaaagtaaagaatagaacttcatcagggtggaagtattggagggtgccttgccagtcaaagatcatctacccactctaagagggagttaagagtggcagtttggggatagcaccaagagatatcagctgtgatggcttgaagaaacagtgtaaaccggcggtgtaaacaggagtaggg

SEQ ID NO: 667185 - DNA, 164 bp, Homo sapiens
tgctgcggtgactctaccggatccttaacggtctttaccatatgcgacggcatgctgcgtcttacacaccacgttctgcgtggaaagcggccctgtgcagcgagctcgacggatttgtttgtagcagaggtagagcatttttcaccgaggcgttgtttgtggtg

SEQ ID NO: 667186 - DNA, 190 bp, Homo sapiens
ctatcagcatccccctttttgcggttatactgttctgcggccagccacccacgaccctactactagctgcgcacctgagccaatctacacattactaacaccactatcaattctataccacccatcctcctaccctaagagaggccctgaccccacgcgtaacgcggctgtttttgccctaaatgcggtc

SEQ ID NO: 667187 - DNA, 129 bp, Homo sapiens
accgctatgtgtaccagctgctcgggagtctgaagtgggaggatcacgtgagcctgggagactaaggctgtgtaatttgtgattgttccactgcattccagcctgggcaacagagccagaccctgtctc

SEQ ID NO: 667188 - DNA, 610 bp, Homo sapiens
gcccgtgagacaaccacactgtctgttcccgaaccatttgatcagcatatccactgctacagaagctacctgcccctgagccagccacactgtctgttcctgacatccaaccatcaacaccttatggcttgatgatccagatcacccaaaacagatactcctgctgttgacatatcctctgaaggtcagtaataacctaacgctacatcacaatgcctatgtcattcccctcacttcatctcatcacacaggccttatattattgcacatcttctcaagaaaaaggatgagtggctgggcgcagtggctcacgcctgtcatcccaacactttggcaggctgaggccagcagataacctgaggtcaggagtttgagaccagcctgggcaacgtggtgaaaccccgtctctactaaaaatacaaaaattagctgggtatggtgccaggtgcctgtaatcctagctactaggtaggctgaagcagaagaattgcttgaacccaggaggcagaggttgcagggaactgagatagtgtactggtctccaggcgggataacacgttcgcgagggggaacgaggcccaaatcggacacacgggcatagctagaaccg

SEQ ID NO: 667189 - DNA, 436 bp, Homo sapiens
gctgaggtgactctaaggatcccatgccagtaacctcccaccgacttcgcgaagccctgcgcctgaacaacgccgtgccacaaggcttgtcatcctgcatcttcaccactgacgtgcgtgaagccgagcagttcatgtcggcggtgggcagcgactgtggcattgccaacgtcaacatcggcccgagcggcgcagagatcggtggcgcgttcgggggtgaaaaagaaaccggcggcgggcgtgaatcgggctcggatgcgtggcgcgggtatatgcgcaggcagaccaataacgtgaactactcgctggagctgcctctggcacaaggcatcacgttcgactgagcctcaggtcggagtgagatcaatgtgggagcaggcaagccagcccccacaggtgataactgatcgttcccacgctctgcgtgggaacgcat

SEQ ID NO: 667190 - DNA, 518 bp, Homo sapiens
  misc_feature (498)..(498): n is a, c, g, or t
gtgggtccctgccctgcgcagcgagatcctgagcctgcccaaacgcaaaggcggcatcctgtgctggacgaaacacaagacacggagctgtggcaacgctggaaagtgctcactgcgcagcagcctgtgggacgcaccgatgaggcatcgctcctggccgccgccatggatctcgccgaaggcatggccttgcccctgtcggtggtctgggccgccatcaagttctgggtcgaccagggactggtctaggtcatggcggtggatgatgagatccaacgccgaggccccatggcgctatcagacctgttcgacggcgccttgaagacccttgcggcccaacaacaggccgcgcccgcccccgtcgccacggatgggttcctctacagcggcaaccgtcacgagagcgtgccccgcgcactgtttctggatcgacggctcacaccactggagcgcaacgcctggcaggtgtttcgcttgctgctcaacgacgatgcaggnacccactcggggtaccgagc

SEQ ID NO: 667191 - DNA, 132 bp, Homo sapiens
tcatgtggacgagaactagtatattcaatgcatccctctgatccagaatgtcaccgcgagacgcaggatctacaccttacacatcgtaaaagcgagtgatgggactagaggagaaactggacatttcacctt

SEQ ID NO: 667192 - DNA, 548 bp, Homo sapiens
gtctgtcagggatgtttgcgtggcaccgtgctggtgacagcaaaattgacccccaaatggaagcagctggcttcactgctcaggtgattatcctgaaccatccaggccaaataggcgccggctatgcccctgtattggattgccacacggctcacattgcatgcaagtttgctgagctgaaggaaaagattgatcgccgttctggtaaaaagctggaagatggccctaaattcttgaagtctggtgatgctgccattgttgatatggttcctggcaagcccatgggtgttgagagcttctcagactatccccctttgggtcgctttgctgttcgtgatatgagccagacagttgcggggggggtcttccaaaccggtggacaaaaaggctgctggagctggcaaggtccccaagtctgcccagaaagctcagagggctaaatgaatattatccctaatacctggctcctccccctcccaatcagggcaagccaacgccccttatccagtgaacccctatcccgaaaaaacctctccctctttttccta

SEQ ID NO: 667193 - DNA, 442 bp, Homo sapiens
gagaacccagcggagatgtgcataagtgtcagatccacaccatatcaaagagacggtacaatatctcactagtatatgacaacatgcaaagaatgccatatccgtaatataccgtgattgaatatatcatatatatcatttaatatataaataaaatatatcatattaatatatattttatatatttatatatattaatgtatcaaggtataatatattacctactattacatattctgcagatatataaaacatataacatatattctcatatattatccattactatactataacatatattaataatctatgtaatatatcaatatataatttaatacatgatatatattatttactatatattttaatatataacttaatatacttaatatagtataaatatatactgtatacttaatatacagtgggtagtcacaga

SEQ ID NO: 667194 - DNA, 425 bp, Homo sapiens
tagttgtatttgtagtttcttttcttttggggaacctccatactgttctccatagtggttgtactggtttacattcccaccaacagtgtttaagagttctcttttctccacatcctcatcagcatttgttattttttgtctttttgataatagctatcatcctaactggggtgagatgattacctcattgtggttttgatttgtatctccctgatgattaatgatgttgagcatgtttccatatatttgtatgacttttggtcatttgtatgtcttttgagaaatgcctgttcagattatttgcccattttttcagattgttgttgttgttggtgctgttgagatatttgagttccttgtatattctggatttaatctcctgtcagaagattggtttttgtttttcagccttacattcctcggat

SEQ ID NO: 667195 - DNA, 104 bp, Homo sapiens
aagacggttaccgcgtgctggtggtagcgacccgcaatattcctaaagcgctggaacgccagacagtacactaccagcgacgaacgcaacatctgaggtatcaa

SEQ ID NO: 667196 - DNA, 591 bp, Homo sapiens
tttttggtgtcattcaaagatgtgggacggaagcctcctacttttggagatgcatcagtcattgcccttgagttgttaaattctggatatgaatttgatgaaggctctatcatttttaatcagttcaagtctgttatctcctacaagacagaagagaagcccatcttctctctgaataccattgcgactgctgagaccatgagcatctatgatgacattgatgctgatgtgctgcagaattaccaggagtacaatctggccaacctcatctactactccctgaaggagtccaccaccagtgagcagagtgccaggatgaccgccatggacaacgccagcaagaacgcttctgatatgattgacaaattgaccttgactttcaaccgcacccgccaggctgtcatcacaaaggagttgattgaaatcatctctggggctgctgctctggattaatgaaaatcaagttgcatcctcagacaagaggtaaagaagaagaatgcgcaggctgattttaactgattgctgtctttgtcagaagaaacttggtccactgagttacaaagacagcaggatgtttgtaaattatcttac

SEQ ID NO: 667197 - DNA, 288 bp, Homo sapiens
aggctaggtctggtccgtactttctatagctctagtagatacacatgcaagctcccgttccagtgagtcaccctctaaatcacacgatccaaagggacagcattcagcacgcaggaatgcagctcaaaacgcttagcctagccacaccccacgggaaacagcagtgattagcctttaggcaataaacgaaagtttaactaagctatactaacccccagggttggtcaatttcgtgcccagcaccgcggtcacacgattaaccccagtcagtagaagcctgcgtaaaag

SEQ ID NO: 667198 - DNA, 136 bp, Homo sapiens
ggtctcgaacttctgacctcaagcgatccaccagcctcagtttcccaaatgctgggattacaggcgtgagctacgtgcctggccagaatctattatttattgagagcttcctcttaatattgtctgatcagctaaa

SEQ ID NO: 667199 - DNA, 903 bp, Homo sapiens
ttaactgtctagtttgatagaatataccaggtctggctgcatgaagatgtggcacgtgtcattttagtggtttcaatcctcttatttatggttctaactctaagaaaatttaaaaggaagagatgtttggatgacaaacacatgccttattgcaaaactaaagcaacttctattataggaagaaactatgggaattgatacacatagatgatgatagtttatttaaaacaaaaacaacagcaacaaaaaatcctagcctccagttgccttttcctttcttagctcctgtattggtgaattactacaactgattgactttacagcctttttggctagatcctgagaggctatttttcttacgaatataccaacatcctgacaagttaaagaaaaaaatctaatgtatgaatgtgactcaccaatttttatcacctaattccttttttttattaaaggcatgcagggataacaggacttctgttacaatggccactctgacatggtcagacacatcttaaccttgtgtgtctggatctcctctgtcttaatccacgctcaggctaactctggggatactgtggccactggcagttgtccgaggtcttgacggctgacgagtgctcttgtgccccaacgagtccccgggggcaaacaggtcccctagggctaccaccaggtgtggggagagctaaggacaccaagcctgcgcacgaatcaacaaactaggtaaacccagaatatcatttcaacagtaggagaactcacactcaatccctgactgggaagagacaaaaagtcatccctaacgagtaagaagatgcgcaatgtactccctcaactaaggcactacaacgacaaataaagaaaaacaaaatgatcagaggactccacagagaccaacaa

SEQ ID NO: 667200 - DNA, 105 bp, Homo sapiens
taagaataataatacctttctcaaatcaactgaagggagagaaaacactgccaacgtcttagaatatgtacactcagctagagcagtgaacaatcatggactttg

SEQ ID NO: 667201 - DNA, 109 bp, Homo sapiens
  misc_feature (63)..(63): n is a, c, g, or t
ttcaaaaacttgaaaagcaggacgccattaagtgtctggtaataattttggaatatttgtatnacctacaattaattaataaaagtgggtttaaaaaacctttccagga

SEQ ID NO: 667202 - DNA, 362 bp, Homo sapiens
  misc_feature (3)..(3): n is a, c, g, or t
  misc_feature (22)..(22): n is a, c, g, or t
gcngccatctgcagggcagaangaagagagccctcaccaggaactgaataagtcagtcagtctgggacttccagcctctagaactgtgaaacaatgaatttctgtggtgtaagcaactcaatctatagtagtttgttactattttgttatagcaaccaaagatgactaggccagacaggttatgtcactcgccaagtgtcttggtctgtttgtgctgctataacgaaataccttagactgggtaatttacaaacaacagagatgtatccagagatccacagttctggaggctgagaagtctaaaatcaaggcaccagcagattccacatctcgtgagggctcactctctgcttcacagatgg

SEQ ID NO: 667203 - DNA, 431 bp, Homo sapiens
gagatgccaaggacaacgtatggagggagtggagcaaagagcttctgtgccctatcctggagtgtcaccctcccagcactttgatgtgttctccaacctggaagtgctctaaatctcattgttcaataatttttatagagctcaatttccagcccccacaaccctacttcttagagttcagtgagtggggctgaaagttccaccctgtagtccctggtcattctagggacggggtctttctaggtctttccagtcccatcctggggctatctaggggccccaacctaagtttattagcataaactctggtgtgatcaaaaagggctgattataaataacaaaagacactcccatcacgtaggaaattcccaggattttaggagttctgtgctgggaacctgggacagagaacaaatatattttgtcttata

SEQ ID NO: 667204 - DNA, 145 bp, Homo sapiens
agtgtgcatctagaagaacctccccgtggaaaataattaaattatgttaaattggcactcggctgggaaggtggatcccacagcccctgtgcatgaagctcttgtcctgaaggttcttatcacgcggttctatagactactccca

SEQ ID NO: 667205 - DNA, 231 bp, Homo sapiens
ccttggtgaaaggaacgatctgtaggatggtgaagtacaggactctggtcgccaggggtcctcagcgtgcatggagacgactggatctcaggcccaccgaggattaatgcccacatcttatccctccactagtaccaaggcccacctgcatcgggagctggatgcctgcgtatacgcgggcagcgagtcttcgctactgccttctcgcgccgtcacgcctgactcagatca

SEQ ID NO: 667206 - DNA, 124 bp, Homo sapiens
ccgcgaccaagctgcgcatcacgcgcacactgccctcgcggcgcgagtatccgtcatttcagacatccacttgggatgccgtggcccatacccgcgcttgcccggacgttttacgttcaacctg

SEQ ID NO: 667207 - DNA, 378 bp, Homo sapiens
ctagagagagatgacagtatgaggaaatccaacaatacaaaaaatactacatctcgtcaggggtagatctctctatgccgggtaacatacattaagtggcactacttacacagtaactatagggtacctaacatgaaaccacagcactgtcactctgccacagctgcatgcaacttgggctttgctggttgagcccattttcaaacaaactgcccaccccagagctatgccaacaaaatctgttcacggcagtaaagccctgaagtggtgactcaccagagtcacttgcagctgacagataataggcaggccatgttagttatacaagtcgttacagcccacttcacaaaagttaccaactgtttctctttctagaac

SEQ ID NO: 667208 - DNA, 146 bp, Homo sapiens
  misc_feature (44)..(44): n is a, c, g, or t
  misc_feature (97)..(97): n is a, c, g, or t
  misc_feature (140)..(140): n is a, c, g, or t
cccatacagacattctcagatagcgctgcctggtgttaatggtnccaacttccagacagaaactaactgctcgtctctgatcctagaatccagcctnactgagattccgtgtcagtgctctcggaaaatcccactaaatnctaaag

SEQ ID NO: 667209 - DNA, 114 bp, Homo sapiens
ggggggataaggtttttttggccccccggtttttcccctggccagcccttgggtttccaaattttttaaggggcttttgttttgtaaaaaaaaccggggccctgtgtttcccca

SEQ ID NO: 667210 - DNA, 325 bp, Homo sapiens
gtcgacggaaaaagtacttcatttgtgtagttatataatcagtctatttaaacaggttttgtcagaattctttatgaagtgtactgtaacaccatactgcaaaaggctttaggctaacaaagacaggagtgttttagattcatcactctagtgcaggggttttcaaccaggggtccgtggcagttcaccattgactttttttatttttataaatatacctgggcccgtcgacatacttatgtctgaatagccaagtcgcattgcccaaaatactgatgtagacccatattcagcgaagaaattacactgacaagtattataggca

SEQ ID NO: 667211 - DNA, 122 bp, Homo sapiens
actgtcaggcggattgcaccatgagccaccatgctggctgggagtttattttgctgtgcaaaagttcttttgtttaattgaccattggtcatttttggttttgttgcaaccgcttgacagtg

SEQ ID NO: 667212 - DNA, 265 bp, Homo sapiens
aacttgagtatcccgaaaccctgataacgccaacatcgaaaaatctacatactgtatgattccaactatatacattctggaaaaggcaaaactatagccagcttaaaaatatcagggattgcagccataggaggaagaggacagacaaataagcagagcacagagaggattttaaggtcagtaaaaaaaaaaattctgtatgatcttgtaatgatggatatatgtcattatatatatatacctccaaaccccgtaattagggtta

SEQ ID NO: 667213 - DNA, 254 bp, Homo sapiens
  misc_feature (4)..(4): n is a, c, g, or t
  misc_feature (35)..(36): n is a, c, g, or t
  misc_feature (50)..(50): n is a, c, g, or t
  misc_feature (58)..(58): n is a, c, g, or t
  misc_feature (67)..(67): n is a, c, g, or t
  misc_feature (72)..(72): n is a, c, g, or t
  misc_feature (74)..(74): n is a, c, g, or t
  misc_feature (84)..(85): n is a, c, g, or t
  misc_feature (120)..(120): n is a, c, g, or t
  misc_feature (185)..(185): n is a, c, g, or t
  misc_feature (187)..(190): n is a, c, g, or t
  misc_feature (196)..(196): n is a, c, g, or t
  misc_feature (200)..(200): n is a, c, g, or t
  misc_feature (246)..(246): n is a, c, g, or t
cctnctgcatcataataaatatatctatatatatnnagcataagacgtgntatttttnatttctttntttananggttatattnntctcttagagttaaaattttctttatataatattngtcatatgtcatagttttaatacaattcacatgatttctatgtttcttaatgatattttccttgncnnnnattgancggnttggttaaaaaacaattctctggaatttgtgcgttcatgctttctnggtattct

SEQ ID NO: 667214 - DNA, 430 bp, Homo sapiens
  misc_feature (111)..(111): n is a, c, g, or t
ttttttgtagagacagggtttcaccatgttcgccgggctggtcttgaactcctggcctcaggtgatctgcccatcttggcttcccaaagcgctgcgacctacaggcgtgantaccaatacctgacccctactactaaggttaaaaggagaccaagcacagaggcttacgcctgtaagccagcactttgggaggctgaggcaggaagattggttgaggccagaagcttgagaccagcctgctgggcaacatggggagactctacctctgcaaaaaaattttgaaaattagccggaagtggtggcgcatgctggtagtcccagctattcaacaggctgagatgggaggattgtttgagcccagaagttccaggctgcagtgaagctatgactgtgctactgactcccagcttggggtgacagaagtgagacc

SEQ ID NO: 667215 - DNA, 1237 bp, Homo sapiens
agcgggaatgagtgatcgaaacgcatggtgtccgtggtgtcggcagctgacgtgacccggacgaggcgttgacatccttgcctaaggccccactcaggctacaagctcttggctgtcaggatacgccatgcccagaagatctgggctggtagactccaaaacacccttcgagtggatcagctcgtcagcgcatgtacgtccaaggtcatcaagaagatatggaatggtctcctactgcttccactggctgcgtggcaatcatcacttggctacatctacaggggcccacctgtcacggtcgttgagtcgatcctctatgggtaggcacccatttgcttgggtgattgctttggggcataagcagattacaagttgatccttgtgacttgcaccttggaaccataagtggcgagtatgtccttgcgtcacgtatagtgagagatcctatcggttggcctctaatcgcgcagcaattaccacaggagtgcatggttggaactcctagcatcggacacgaagggcttggcccagagggcgttggccgtcgatcgcgtccttcacgacagcgacatctattggctcggcaacgcttgtggcttccccttggccccgatgcactcgtaagggccattccctttcaaataggcatgggttgatgccttattcgcttctgcgcttgttctcttgggctgtgaaggaggacccactgcggagaacatgaacggactgtgcatgccgcgcagagaatgtaagcagaggaagcactgggactgcactatgccacggacaggctcctagggcttggagcgagttgagtcgcaacgggcgcgaagcttcgcgcgaaagcgaaaaggagagatcctggcttggattgggaggaacttcctggtcaagcgtgagcaatcttcttgcacgaggttgaaccttgcctggaggggaaaaacccctttttggggggaagaatccctgtgagtcctgggggagcctcctggacaatgttaaacattggctggaagtggcctatgcggggttcgatttggaaaaaccggccattgcctataattgttaggcggtaaccaacgaccaaaaaaagatttcataggaagaaagaccccttcccccccagtaccccccatgggaatacacacggcaccaaatacaggagagcctctaagaacacgccatcggaagggaagggcggcgccccggtttacacccaaacctttcttggtaacga

SEQ ID NO: 667216 - DNA, 609 bp, Homo sapiens
  misc_feature (300)..(300): n is a, c, g, or t
cgtgtctagaggatcccgcactggtcctgtcggtttgctatgttacactgatgctatggaaaaaatatactgtactgctattattagaggaagaataatttgtaccatcatataaacaatatactcagttttcataaagcttacatgaactgggaatcagaatatttttccattaaaaatttgtgtcttggccaggcatggtggctgatgcctgtaatcccagcattttgggaggccgaggcaggtagatcacctgaggtctggagttcgagaccagcctggaacaatatatagtgaaancccatctctaccaaaaaatacaaaaattagctggatgtggtggcacatgcctgtaatcccagctacctgagaggctgaggcaggagcattgattgaacccaggaggtggaggttgcagtgaaccgggaccatgccactgcactccagcctgggcgggcgacagagtgagactctgtctttaaaaaaaaaaaaaaaaaaaaggacgattttccaaaggtggggggaagcgaggataaccccataaggtcagcgatggtggaaaaaaagggtaaggggccagagcagccacagatgcattgaccttccact

SEQ ID NO: 667217 - DNA, 531 bp, Homo sapiens
gggtgttcctcgtcagccccatttctgagaacaggtgaatggcagaacagccctgcgcttggcccagccagctctctgtgttcgcgcccttagagcctctgcgccctcagttccgtcctgctcttggctaaattccagaccctttcagtaaatggccgaatggccctaagtcctctcctcactctgcactcccaaaaacagcaacaactttacaggtatgctatcgtctttcggtgtggtggtgtgttgttaatttcagagaatttagaagaagtcattgctccgaccacggagaacagaacatacacagaatgaaaatcaagggggggcccggcatgaaattctttcccctcagggggccccgcgctgtttgcacgcgcgtccccgcggcctgtttctgtggtcgcaagcgtgggaccccgcaatacgtaggcgtgggcggtatttatgtgagcactgccggggcaggagccggccgaagttccccctaactggtgcagtgcgtgcctgaggcctgaaatggcgagttct

SEQ ID NO: 667218 - DNA, 402 bp, Homo sapiens
gcatgattcgctgaagtccttaccctctccgttagattctgaaagtattgtatcacagagctaataatcggctgggcgcggtggctcatgcctaataatcccggcactttggaaggccgaggagggtggatcacttgaggtcaggagttcgagactagcctggccaatatggtgaaatccatctctacaaaaaatacaaaatcccctctcccctctctcctcccccttccacggtctccctctcatgccgagccaaagctggactgtgctgctgccatctcggctcactgcaacctccctgcctgattctcctgcctcagcctgccgagtgcctgcgattgcaggtgcgtgccgccacgcctgactggttttcgtatttttttggtgatcgtggggttgtaa

SEQ ID NO: 667219 - DNA, 1045 bp, Homo sapiens
gggcacatgcagataaccggcgacatgtactccatgaccaggaggtttgatcgcaggcacgtgtgtgcctatgagatcatcctctggacctgaccaggccccgtatcacccgtgtgacagagtagctcttcctctccgtgcagtacggaagtacctggtgcattcgacactgggctatgcgcatggtccagccccagtgccctggtcctcctaggtgcacggcgccacgtatagttgtggaactgtccaagcaatcaccgggccaagtcgacatacatcgtagcaagtgacatcataacagcggtcaagtgctaacgttgaggttgggagcataaatggcattgtagctagacttgcatgcacccaattggaatagagaagggcatggagcccaggagcactacgtccatgagagggtccgaagagggttcctgcctctctgatcaatgataatctcggatgtctaccctgcatttcactcaagtgacttcgagggtgatgccagtttctagtgactgacaactgggaatcgtggtgcgaaggtgcatccatagcggacgaagatactctccacgtgctgtgccggatagatactggtggttccttccggaatgtcgctgatgatcttcatgaacctaagatctctgctgaggcagccagaggccaagtcccagttgaccaaatgggtatccgggagccgcttccagcgggtgatcctgaagatggggccgtagcacgggccctggagcaggtgcagggtcatcttctgcgcgggaagggtactatgaccgcgaggaagcggggcagcaggacctgggagaaaaagtgggcatcagcgccggggagagtctcatacccttgacgacagccggagggagagtccagtgcggcggcgggtcggggggccccaaatggggaagaaatagccgcttgcaggggggcgggccatgaagtgggcccaggggacccgaagaaccggcggaaagggacgccccccgcggaaaaaggacccgtcgttggcggaaaaagcgggacaaacacagac

SEQ ID NO: 667220 - DNA, 787 bp, Homo sapiens
gttgtgatcggcgaggattgttgccatcccggcggcgaggcattgcagatgtggaagatggcaaagttcatgacacccgtgatccaggagaacccctcaggctggggtccctgtgcgggttcccgagtcaggtttcgggatatgccctatccaggcgttcagcaaaggagatcgggtaggaaaggttgcagactggacagagagccagataccaagataagaggtacacaaataagtactcctctcagtgggtggtggaaggtcagatatgcttagttgtccactgaggaggatgaaagtagcttccagctggtggatacatgcgcgctacagcagaagacgggctaccagcggacatcgaactgagatttgcgccagaggaacctccgcagagagcaaagatcgtcggagacatgtggcagttcaacctgcagatcctgcctaagagtgccaatacagaaagagagagaacgcattgcgacgtgcagaagaagttccgagaggacgaatttggggttcaggcagaaattgggatcagaatatcatcagaatatcccgtagactcttcagttgaagttcgtagtgattgggaagtgaaagaggaaatggattttcctcagtgatgaagatgcgctacttggaagtatcagagccacaggacatgagtgtgtggggccctagaatactacgacaaagcctttgaccgcatcaccacgaggagtgagaagccactgcggagcatcaggcgcatcttccacactgtcaccaccacagacgacctgtcatc

SEQ ID NO: 667221 - DNA, 406 bp, Homo sapiens
  misc_feature (264)..(264): n is a, c, g, or t
  misc_feature (349)..(349): n is a, c, g, or t
  misc_feature (376)..(376): n is a, c, g, or t
gagatggagtctctgtcacccaggctggagtgtagtggtatgatctgggctcagtgcaacctccacttcctgggttcaagcgattattctgcctcagcctcccgcatagctgggactacaggcacgcaccaccacacccggctaatttttgtatttttagtagagacggagtttcgccatattggccaggctggtctcgaactcctgacctcgttgatctgctggccttggctgcccaaagtgctgggattacaggcgtgacanccatgcctggcaacaatttttatttgtcaataaatttgtttttaaataaaaaattaaaaaactgaggttgacagttgcaaagctnctgtgagtattccaaaatttcactganttgttacatttgaaatggcatgaaatgtat

SEQ ID NO: 667222 - DNA, 143 bp, Homo sapiens
aggacctttggagagaagcggggccagttggactaccagtccctcttggtgcgcctgggactgatacgtcagaaagtgcgggagaggctccataatgaggaatgtcagaagatggatctctggatagcagttcatctggggac

SEQ ID NO: 667223 - DNA, 162 bp, Homo sapiens
  misc_feature (12)..(12): n is a, c, g, or t
ggcccccccggntttgggggtaaaaaccctttttggggggggaccccccccccccccccccggggggttttgggggttccccctttttttttagccccctttgggggaaaaaaaaaccccctttttttttcccgggggggaaaaaccccggggtggggggga

SEQ ID NO: 667224 - DNA, 267 bp, Homo sapiens
cacacacacacacatacacacagagagagagagagagagagagagagagaaaagcagaaatacgttggctgaaatctaccctagctctaacctttacccatagcagccctagacacccaagagaacccttagagctgcatggaacacaatctgaaagcccaattttttcacttacagatgagaaaggcccagagaagtgaagggactttgccaaggtcacacagtgggagcaaaaacgcattttcctagaacagattctgaagaagg

SEQ ID NO: 667225 - DNA, 81 bp, Homo sapiens
tctgctgtattcatggacacttggacctgtgtctggctaatggcgcccacgaataaagttgctgttgactttcattttgaa

SEQ ID NO: 667226 - DNA, 268 bp, Homo sapiens
  misc_feature (4)..(4): n is a, c, g, or t
gtangtaccttctgcagatagatagaatctcatacatctcatctaagaaacaaaactacatgatgaggtcctctggaagaatgggagagaggaagaagaggaaactattccatctgaacttacttataaaagcccatatagttgggaaccacatttaagattttaatggtcctcatgggatatgaccacatattggatctccaaaaagtggcattattaattaacactaatcctgaatttggttattgagaatcagggaactgaaatg

SEQ ID NO: 667227 - DNA, 615 bp, Homo sapiens
caggctggtacgcctcggttgcgggatcaggtgctccgggaccggaccgaacctgggctggggctggattgatttataaataaaggcacattcgatccaaaaaaaaaaaaaaaaaaaaaaaaaaaaaaaaaaaaaaaaaaaaaaaaaaaaaaaaaaaaaaaaaaaaaaaaaaaaaaggggggggcctggatgaagatcatcttctctcggaggcggcaaccagctagttagcaccactaccaccgatgtttttgtgtcaacaaaaggggcgcccccatatgggcgcagcttttataatactacaccgcagacagcgccgcgcgcttttaacaaacacagcgtgcgcgagtggagcaacaacacgacgactcgggcgcactctcttgtgtggaggaaagggacgaacccccttatcactgtgtgcggggcgcgtgcccaacacatataagtggtgagtggacgaaacaaacctctctctgtctctcgcagcattattatacaggcgccgcctctaggcggcgcatatatctcatatacaaattttaccaagcggatgtatatatacgcgggtgtctacaacacccaccgcggccatcatatcgtcgcctcgcactc

SEQ ID NO: 667228 - DNA, 582 bp, Homo sapiens
  misc_feature (1)..(1): n is a, c, g, or t
  misc_feature (152)..(152): n is a, c, g, or t
  misc_feature (215)..(215): n is a, c, g, or t
  misc_feature (239)..(241): n is a, c, g, or t
  misc_feature (247)..(249): n is a, c, g, or t
  misc_feature (253)..(253): n is a, c, g, or t
  misc_feature (255)..(256): n is a, c, g, or t
  misc_feature (276)..(276): n is a, c, g, or t
  misc_feature (280)..(280): n is a, c, g, or t
  misc_feature (288)..(288): n is a, c, g, or t
  misc_feature (293)..(293): n is a, c, g, or t
  misc_feature (302)..(302): n is a, c, g, or t
  misc_feature (305)..(305): n is a, c, g, or t
  misc_feature (307)..(307): n is a, c, g, or t
  misc_feature (309)..(309): n is a, c, g, or t
  misc_feature (318)..(318): n is a, c, g, or t
  misc_feature (322)..(323): n is a, c, g, or t
  misc_feature (325)..(325): n is a, c, g, or t
  misc_feature (327)..(327): n is a, c, g, or t
  misc_feature (331)..(331): n is a, c, g, or t
  misc_feature (334)..(336): n is a, c, g, or t
  misc_feature (338)..(338): n is a, c, g, or t
  misc_feature (348)..(348): n is a, c, g, or t
  misc_feature (354)..(354): n is a, c, g, or t
  misc_feature (357)..(358): n is a, c, g, or t
  misc_feature (366)..(366): n is a, c, g, or t
  misc_feature (370)..(370): n is a, c, g, or t
  misc_feature (374)..(374): n is a, c, g, or t
  misc_feature (383)..(383): n is a, c, g, or t
  misc_feature (385)..(385): n is a, c, g, or t
  misc_feature (388)..(388): n is a, c, g, or t
  misc_feature (395)..(395): n is a, c, g, or t
  misc_feature (397)..(397): n is a, c, g, or t
  misc_feature (406)..(406): n is a, c, g, or t
  misc_feature (410)..(410): n is a, c, g, or t
  misc_feature (414)..(414): n is a, c, g, or t
  misc_feature (420)..(420): n is a, c, g, or t
  misc_feature (428)..(428): n is a, c, g, or t
  misc_feature (431)..(431): n is a, c, g, or t
  misc_feature (433)..(433): n is a, c, g, or t
  misc_feature (443)..(443): n is a, c, g, or t
  misc_feature (449)..(450): n is a, c, g, or t
  misc_feature (455)..(455): n is a, c, g, or t
  misc_feature (457)..(457): n is a, c, g, or t
  misc_feature (464)..(464): n is a, c, g, or t
  misc_feature (466)..(466): n is a, c, g, or t
  misc_feature (471)..(471): n is a, c, g, or t
  misc_feature (474)..(475): n is a, c, g, or t
  misc_feature (487)..(487): n is a, c, g, or t
  misc_feature (544)..(544): n is a, c, g, or t
nagcatcttttttgttatttgtttgcatccctcccccacaccctggtgttttaaaatgaagaaaaaaaaaccatcactttttgtacaaaaactcttaatgattaaaaaacaaacaaaacatattggccttgtcatttgtgtgaaagtgggcnaagactggaatagagttagacaactgaaaccaattttcatccttatataactgagggaacccntctttcctcttttttttatataannnatagtnnntaangnnggtacttatactccttaccncaancccccccnctctngttttatcnagntntnggaaagagncganntngncctnccnnncngggtagaccntacccntannttgggggngggnggtngggtggggngnggntggggangnggaggtgtngggnggtnaaatanttttggtnccngnggcggaagangccaanngagtntntatactngntgggnttnntgccatggatgngggggagaaaattcggtcacaagggggttagtgacaacaaaaagaaaaaactctgangcgcacagcgacactggggggggggcggtccggatttt

SEQ ID NO: 667229 - DNA, 1008 bp, Homo sapiens
  misc_feature (638)..(638): n is a, c, g, or t
  misc_feature (773)..(773): n is a, c, g, or t
ggagagaactagtccgagtttttcgttttatatttccaaaagggaaatcccaatctttttattacggaaagccatcaacggggtgtggggatttttgtcaaacctgttagtgaaagtcctccaggggaattttcctccctccaagttccataccacacaagaggaaagttcttcaagccttctatttcacccctttcttcaatctccccacaaaatatagggggttgtgtccaacttattgtgctctctcaatgtgattaaaaaccttggtggtgcgttaagaggtttcctcccttgaggaacctagcgcaaacaacagctatggaggctcttataccctttatagagtgaaagaaccattaaagcgaagcccagaagagggctcttagagcgaagcacaagagagtctccttggggggaaacaatccattaggcgtttctaataccccagacatcttaaccctttgaggggtttcaaaaactcttgagggctctatacaaccccaaagcctgtgtgtgccgaggtctacaaactataaacgacagaggggcaagttgtagtggaaacacccccacgagagagtttttctccagtggacagaacacaccctatgtggagagaaatggctccgtgaaanattaaagctgtgtataagcggcgaggttataacacccagacaatctgttagaccccacaaaggctgttgtgcagagggagaaacaacctaatttttgtccccccctctccacgaatccctatatgtggaacaaanctcgctcataatcactgatgtggccactccacaatgtgtaggaaaaaacaagggttgtggggacaccaaacaatgtatattgtgaggacaatgggcccttcttccctgttgaataatggggtgtgcccctagtgaacacacaatgtttccccactataaaggatgttgccccttcttttataaacaaattttccaagaaacggcgtttgtatgttgctcatggccccccaaaccc

SEQ ID NO: 667230 - DNA, 408 bp, Homo sapiens
gcggatctgggacagaaaccgggagaggagcccaaccgcaccgagagcgcgaggccgaccgggcaaggagtgggaccgcagccgggacgacaggaaccgagagcgcgcaggaccggagcgcgaccggaccgtccgagcagagagcggacgagacaaggccagggacagggagcgggccacgcaagaccggagcaagacaaagaacgctgggacccgaacccgaggctcgaggctcgacgctggcaccgctcgcaggcctagacgccccggccggcagagaccctttttaaagccacgttcgtaagatgcgttgaacaaatagcttttgaaatagccacgatcttagattcaggatagaacattctggacttaaacattactgtaattttgtgtaaatggtttcttaca

SEQ ID NO: 667231 - DNA, 324 bp, Homo sapiens
gattcccccatgagatgtacttaaagaagacttggaagaagagaaagacaaggcattatctgtcagcagctgctggtagcagctgagatcaccaacagtagctttccttgcttctggaagttttcctgagaaacatccactgcagcaccatggataattagtgagggcatcactaagattcctgaacttcagaattttctggaaatagcatttctgacctttgtccctcaatgcttccaatagttgcagaagcctttcattccctgtattaaaactctctttacttaaaaaataagaaataaaaatgaattaatgttttatgtt

SEQ ID NO: 667232 - DNA, 394 bp, Homo sapiens
attaatatttctgcaggtaagcgccgtgtgtgtcccatatgctccatgttccaacccacatcgatgggtcaagtaataggtcgactgtccatttacttttcagtctactacttttgcataatctacttctgagtctttcacctgccccctttcaaatggatatagctgaaacagcaaaaatattctttaacagtgatggttataatggacatgctgtccgatcattaaccacagcagtccttctactagaatacactgctgtaacgaaatcctgcgagctaaaatttactgaataccctaatcacatatttgctaatgcctctgaaatgtctaaatcggtcaaattaataaaaatcagtgctatctattaagtctgactattgagcctagggcc

SEQ ID NO: 667233 - DNA, 581 bp, Homo sapiens
  misc_feature (51)..(51): n is a, c, g, or t
  misc_feature (87)..(87): n is a, c, g, or t
  misc_feature (117)..(117): n is a, c, g, or t
  misc_feature (173)..(173): n is a, c, g, or t
  misc_feature (255)..(255): n is a, c, g, or t
  misc_feature (271)..(271): n is a, c, g, or t
  misc_feature (305)..(305): n is a, c, g, or t
  misc_feature (322)..(322): n is a, c, g, or t
  misc_feature (329)..(329): n is a, c, g, or t
  misc_feature (339)..(339): n is a, c, g, or t
  misc_feature (342)..(342): n is a, c, g, or t
  misc_feature (386)..(386): n is a, c, g, or t
cccccctcgagtcacggcatcgataattttgattcaaccaatactgccacnctggaggcatttattcgctgcaataaaaacagtggnaaaatccccactgcttaagtagagtaactngtcagctcatttgatcacaaatgcttggatcacatctctttcttttgcctccccangaatttggtatttcattggtctaatatttcagaaaatcattacccaggttcagagaaacttagaaatgctccagattctggngtgactttgaggcttnatgggctgaaaggcatccaagctttcactagagnagtgcatgggctcctgngcttagngcatttgganaancttacaaggcacaggcttgggctcctgagtcacacacagctctnttcttcagctctcctgcctcctgacctctccttattaggacacctttgtgagcatctgcctcaccagctccttcctgggcaggcagtattgggtgtgaatcaagttccttggaaccgtgggatccattagttctagagcgaacgccaccggcgtggagctcaatctatagatcccgtaatgagggtaaattgcgc

SEQ ID NO: 667234 - DNA, 503 bp, Homo sapiens
  misc_feature (45)..(45): n is a, c, g, or t
agccttaggggatgccgctgccatcgggttggtgtcacccccccncatggagagtgttttgggatattcccaaggtcccccaccgcaggagggagtttttcattgttggaaaactgcaggatggatttttgcccatccctacctgcagttttgtggctccctggaacagccttagtttagctcagggccgggggtttcccaaaacccaccctgttgggtgtgaggaaagcccagtgttttcctgtttttccctcccctgcaaaatgcaaaggggccctcattgtttgtgggggggccagctcctccaagggttttaaaaggggttccagtcccgtcccctttcctgccttccttgggagccaggggtgtgcccctggcagtcccttgggttccaaaaaaccttaattctgcccggagtggaagtttaagcctgcccagggtcccccctgtttcccctcccttttttttttcgggcaattaaataaaaggtttcccccccccca

SEQ ID NO: 667235 - DNA, 114 bp, Homo sapiens
tgctcagaagacgaaaatgacataagtaattcagggtcgaagtcaacttaatgaaatcactgatcaaaggcattcttttgtttttgaaacgggaccctcagctctgtcctcagg

SEQ ID NO: 667236 - DNA, 368 bp, Homo sapiens
tcgagtcttacccttattgtgtgtgttcatccattgtacattttttgtttcccttcatttgttggtctctcgagttagtggtataagttcacatttattgatacttcagtgctaggcaccactgctgatattctttaaattcattgtctcatgacaaatctatgaagtggattgcatgtgggctgtttttgttcatgcagaccacttttctacttttctatacccctttttgtggttcctgtaggaaactcctttcccacttaacatggtcttggtggggctgtcagctacagtgctctgatcagagtaccccttttcctggccactgtgatagactgaagaactgagtatgtatcacaagtacagtt

SEQ ID NO: 667237 - DNA, 420 bp, Homo sapiens
  misc_feature (8)..(8): n is a, c, g, or t
  misc_feature (249)..(250): n is a, c, g, or t
aatactgncggttaccagtattaacccttcatctgttcttgaaactggttggggaatgaggtgataaacaaggagggtgtaagtttaggggccaaaaaagaaagaatgaataatacgagcagaccttctctgtagaaggtaatggtctgagaatgaaaaggtgttttatggacatgttgggggggccccaatgcaaacccctgctttgagtcctaaggaagggaggggcccttttggccaatgccccanncttccttggaagtggggtttatggggaaagggagggactaagggcaaagtctttgggtttcaggcaagcattatgttatttccattccctattacttaaaaggttgggtgtaaacagggtcatttttgagttttcagggcccttgcccccccccccatttttttaatgga

SEQ ID NO: 667238 - DNA, 361 bp, Homo sapiens
accggtcctgcgggggacgaagaatttatcttgcccatttagcactaaaaatcgttgctcttaaattcttacatggttcacctggatcgatgattactggctattaaacaataacacaggaatgtcttatgttctggatctttctcgaagaccataaacaaagttcgttgagattaacattacaggcttcacctctcgtcccccgtttgtcatagctttgtgctgtttttaaaaagtttaacacttactttgagacttcatttctctaaggacattttttgtttattttgaaatgttctgagttctgtatgattgctttcaatccatgattttcagactttatttcagcagtgtaacttac

SEQ ID NO: 667239 - DNA, 175 bp, Homo sapiens
  misc_feature (32)..(32): n is a, c, g, or t
gccttccccacagtgagtactgggatatcaantaaactcgagaatgtttcttcacatctccttattcttcgtccctccaagtactcagtttggtcttctttcaggtgtaggataacttgttgtccacgacccatatgttcacctgtgtctagtcctcacgtgtggggagaagtgg

SEQ ID NO: 667240 - DNA, 262 bp, Homo sapiens
  misc_feature (217)..(217): n is a, c, g, or t
  misc_feature (237)..(237): n is a, c, g, or t
  misc_feature (239)..(239): n is a, c, g, or t
taggttttaaagggaaatggcccagcctgacccccctggcccctgccatcctgctgccttcccagtggggctggtcagggggcagcctggcccctgcctaactggaatgggaggaagcctgcaggtggccccggtggccctggctgcagttttgggcagcatcctcccaaacaaagaccctgcttaagctcctggggtgtggggtgtgggctggaanccctggctccctggtagggncnataaaggttttgggtctttttta

SEQ ID NO: 667241 - DNA, 183 bp, Homo sapiens
ccctctgactatgatacgggttgcaaatattttccctactttgccattcgtctttgtttatggtgtttttcactctgtacgacttatagctttttcctgttgaccgcatttgtctttttttcccgctctgcgcccctgtgtgcccttctcgccccccctttactctcctgtatcccttctccc

SEQ ID NO: 667242 - DNA, 169 bp, Homo sapiens
ccatggttattgtgagggacattccccaagatgataatgaatgccacatgactagaactgggtcttctatttttatgactcttgaactgggtttttttgttttgtttatttttttatggcagagtctcgctctagtcgcccagtgctggagtgcaataggtgcaatctc

SEQ ID NO: 667243 - DNA, 857 bp, Homo sapiens
  misc_feature (18)..(18): n is a, c, g, or t
  misc_feature (28)..(28): n is a, c, g, or t
  misc_feature (30)..(30): n is a, c, g, or t
  misc_feature (101)..(101): n is a, c, g, or t
  misc_feature (137)..(137): n is a, c, g, or t
  misc_feature (147)..(147): n is a, c, g, or t
  misc_feature (229)..(229): n is a, c, g, or t
  misc_feature (319)..(319): n is a, c, g, or t
  misc_feature (372)..(372): n is a, c, g, or t
  misc_feature (392)..(392): n is a, c, g, or t
  misc_feature (479)..(479): n is a, c, g, or t
  misc_feature (505)..(505): n is a, c, g, or t
  misc_feature (530)..(530): n is a, c, g, or t
  misc_feature (549)..(549): n is a, c, g, or t
  misc_feature (557)..(557): n is a, c, g, or t
  misc_feature (572)..(572): n is a, c, g, or t
  misc_feature (599)..(599): n is a, c, g, or t
  misc_feature (649)..(649): n is a, c, g, or t
  misc_feature (687)..(687): n is a, c, g, or t
  misc_feature (693)..(693): n is a, c, g, or t
  misc_feature (698)..(698): n is a, c, g, or t
  misc_feature (703)..(704): n is a, c, g, or t
  misc_feature (739)..(739): n is a, c, g, or t
  misc_feature (755)..(755): n is a, c, g, or t
  misc_feature (766)..(766): n is a, c, g, or t
  misc_feature (780)..(780): n is a, c, g, or t
  misc_feature (815)..(815): n is a, c, g, or t
tgccagcgccccagaggncccgggacancncgaggcgccgcgcccgcccgaccccgagctccccaagccttcgagagcggcgcacactcccggtctccacncgctcttccaacacccgctcgttttgagcggcagcncgtgtcccanagaccgagttgccccagagaccgagacgccgccgcgtgcgaaggacccaatgagagcccccgctgctacccgccggcgccantggtgctgtcgctcttgatcactcgcgctcaggccattatgctgctgcgattggacctcaatgacacctactctgggaagcgtgaaccantttctggggaccacagtgctgatgcgatttgaggttacctcaagaagtgagangtcttcagggagtgagattncccctgtgagtgaaatgacacttctagtagtgaacccgtacctacgggatgccgactattgactactgcagaagaggtattgataancgaaaccacaaaatacctaggctatnatttgttcgactgatctcagctcangagtgtgaacagggtagtntaacgccnccccccaaaaacaangacgggaacagtgcaaaaatacgttcnagaataacaccccacaaaagaaaagaaaaagaggggagggcaaaaaatgngcaaaaaaatagtaagaaaactagaaaagaacgaaaanatcctntgttnatgcnngcaatttcaaaaatttcctgctattcacaggaganatgcaaaatagtatangagcaacctgngaagcaagtaacantgcaaaatgtcagccaagaaatatttcgggtgaancggatgtgggggaaaagtccaatgaaaacctcacagccatga

SEQ ID NO: 667244 - DNA, 434 bp, Homo sapiens
gatagagcaggatccagcagacagtgcagccattgcttcactcgctggcctcttatcccacctcgttaatcatgtcaacatacggatgcaggttgagctggaagagggcgagaatcccgtcccggcattccagagtgatggcacagatgaaccagagtccaaggaacctgtgtagaaagaggaggagccagatcctgagcctcctcctgtaacaccccaagtgggtaagggcagaaagagccgtaagttctctcgcctctcctgtctccgccgtcggcgccatccaaccaaagttggtgatgacagttagctgagctaaggctttgaatcggactcgagccatgactcagcccgggccagtgagggctcagaacagtgcgttctcacaagaaggtcttgaaggtgggggtccggctgtctaaggggtacccgcc

SEQ ID NO: 667245 - DNA, 338 bp, Homo sapiens
  misc_feature (173)..(173): n is a, c, g, or t
aaacccccaaatgtttgttttttaaggggggtttttaaatccccccgcccgggggtgcgcttcctatttttaggggtggggaaccccccctgcctccagggggccctttcaaaacaaaaaattttttggggggaacttccccttaaaccccttcctatataaacagctttggntggaggggcccttttttttcccggaggggggttcccccgtttaaagggccatattaagtttctttttttatgtggcccacccatagggaaaggtacggggcccttttttttggcccgcccccatggggtcttttactttaaaaattaatccgttaggccggccca

SEQ ID NO: 667246 - DNA, 552 bp, Homo sapiens
tgcgtggaattacgctgatcctatcaatcgcacttctcggtatccaaaataattgaaagcaggctctttgcatatccttgtttcatagcagcattattcataatagccaagaggtgaaaggaacccaaatgtccatagatggatgcttggattaacaaaatgtggtgtatatatacaatggaatattattcagtttttttactgtagcttttttttaggtcttttttttattgttattttagaaatggagtctcgctctgttgcccaggccgtaatgcagtggcacaatctcagctcaccgcaacctccgactccggggttcaagcgataatcttgcctcagcttcccaaagtgctgggattcacaagcatgacccaccaggccgtggccggttatgttcttatggacctgaacatacatgttggtataatcacacaagtaaaagctattggtatttggtgaaaaagacaaaatctattggtgttacaaatcatgtgtcctgatatcaatccagctagtggtggacatcatataggagtgcaacagaaactt

SEQ ID NO: 667247 - DNA, 334 bp, Homo sapiens
tttggtcttggagaaatccaacgagcaaagtggcatatatccacaggtcattgccactgacgatttggggcttataaggcaccccatagatgtgacatagtttgatcttttatcactaccggttcgtcctcttcctcactcgttctattgtatgcgcattcgaattctgttcttcaatgcaaaagctgctgatttggatacggtgattggagattccttccttttcaagtacacccgctggctttccactacttgcttctgtgcgcctcgttgacatgaaattcaaagtgttcatcctctgttttcttctttgattcctgatgggacgaagatg

SEQ ID NO: 667248 - DNA, 225 bp, Homo sapiens
caccatgtgctggctggacactttggtcacttttgaagcatgttaataaatgtcactgattaaaaaaaaaaaaaaaaaaaaaaaaaaaaaaaaaaaaaaaaaaaaaaaaaaacccccctttttttttttggggggggggggggggggggggggggaccagggggggcccgggggggggggggaagagggagggggggggtgggcccccccccaatataggcccca

SEQ ID NO: 667249 - DNA, 318 bp, Homo sapiens
ttgttgatccccttactatctgggtgtgacaagtcactgttcacacggaggctactcatctttttcacgtggggtgctcagtgtagtcacgatagaaagacagtcttgcttgagcaaagtctgaatggctccacttttttcaattctctctccaatcttcagtaagtcacttcaatgtcgggctggatgaagccccaaacattgactcaggaaatttgactttccattctctgctggatgacgtgagtaaacctgcatctttggagtacgcttggatagcctccgggcagaaagagagagtagcgcgagcacagctaa

SEQ ID NO: 667250 - DNA, 205 bp, Homo sapiens
tttccccccccccccgttccggggccggggggaagcccgggccccccttttccccctgtttctttggggggggtttcccccccggggggccccccccccctttgggggccctttccccccccccggcccccccccttttccccccccccagggggggggggggggggggttttttttttttttcccaaaaaatttttttttttta

SEQ ID NO: 667251 - DNA, 316 bp, Homo sapiens
ccttttacatataacttaaccaaaaacttggagtaaattccatagcttcacctctctggtcttattctcttactgccaacctcccagcctctgctaccaaggactcccgtcatgtcacagctgggctaggcactcccccaactgcttttaagacccaggtgcctgatcccttcaaagcacaaataaaaccagttattgacaaggcgtggggtcctactctgttgcccaggttgctctcaaattccaggcttaagggaatcctcccacttcagcctcccaaatttctgggattacagcatgagccaccgtcgacgcg

SEQ ID NO: 667252 - DNA, 281 bp, Homo sapiens
aagggggggtttgggggctttttttccccccggcctttgccaaaagggcccaaaattggggggctttttttaccccttaccccccttccccgggggggccaaaaaggtttgcttttcccttcccggccccccacgggggtttccttaaaatggggtttttttttggaacccttttttttaaaaggcccccccccccccccttgggggggggggggggtcctttgttcccccccccccttttggggtccccctttttaaaaaaaaaacttggggccccccca

SEQ ID NO: 667253 - DNA, 114 bp, Homo sapiens
agaagataagaaagaaacagaggacaaaaaaacagacgttaaggaagaagataaatccagggacaacagtggtgaaaaaacagataccaaaggaaccaaatcagaacagctcag

SEQ ID NO: 667254 - DNA, 361 bp, Homo sapiens
ccgtatcagacatcttaatatggcattcattctcatcataccctgctatcattaccctgctgtattttctttcagtgcattactcactctctgtaaatccttatttgcttgttttccatcctttccatctaggaatacatttatcacgaataagggaccttgatctgaccctgttatatcatgctgtatcctctagttgctctaaccagtgtcctgcgaatgctggcatgaatgttcttgaacaatactcctagtatgacatgagacaatactacttgatcaggcttgcgttagcataatgctcacatagttcgggagacagggcgaagaatgtttacatgaagcccaaatgacgggcata

SEQ ID NO: 667255 - DNA, 509 bp, Homo sapiens
  misc_feature (79)..(79): n is a, c, g, or t
  misc_feature (108)..(108): n is a, c, g, or t
  misc_feature (250)..(250): n is a, c, g, or t
tcagggcggtattccgccaaacgctcccaaaagctcagtgtcccattgtggagcgcctctctaattccatgatgatgcncggccgcaacaacggcaaaaaggttatgnctgtgggcattgtcaagcatgcctttgagtttatacccctgttcacaggggaaaaccctttgcaggttttggtgaaccccatcatcaacagtggtccccgggaggactccccacccattgggggccccgggatttttaaaanacaagctttggatttgtcccccctgccccgttttaacagaccatttggttttgggcacaggcgcttgtaagggtcccttccggaacattaaaaccatttttgagggcctggcaaatgagttcatcaatgttgccaagggctcctcgaactcctttgcccttaaaaaaaaggacaagttggagggtgtggccaagtcccaccccttatttttccagctgttgcccaataaacctttttgccctttggggcagccccccca

SEQ ID NO: 667256 - DNA, 1149 bp, Homo sapiens
tgaggagaacacgtcactcatggaccagcctattccaacagccgccgtttcgacccctcttaatctgagtactcgaaccatctgatcgcttcctcgataggttgggaacctcttctccaaggaggaacccacgcacggtataacctgggtatgtcagtaaacccgggccgctgttcgtgctcgtagtggaccacccttacgagcaagaggtttctttcccggagagcaacctgtccaattgggagccgaaggactctcgtgaagtccatgcaccagcttcgacgtaacgagtgtggccaagctatgtggtgtcataagacactgaattgctcggcacaccttgaagccacgtttaataagaactcaagcatgccctcccatccagcctatacgtctcgtccgggaaacacccttccccggagtgtcccacgtccactcacacctgcctcctcttgctgcaacgtactcgctactcggctatcctctcgcacaggacctgcggcgtcttactacggggagctagcgactaccgagtccaggctcagaacagtcgaaggcacacattcaacgtccatccggagaagatttgtctcctctcatcttccgaaccatacacctttcctcgaggccccacgtagtgttcctctgtcccatacacagggagctcctcctccaagggtagatcggaccgttacatgctgcctaataggcattatgtccctcgaaccaggatactcctgtgccggcatcctagtgtaccaacatgacatgttttaaccgaatcacaatctatcacaatgtgctcagaatccacctgtggcccgaatcgagtataggttcctctttctactccatctgcagatgaccaaacctgtacccgctgccactttcctcactgatattgggaggagggaaggcccagccgaagttccactaaatatgccctcaggagaataggcaccgggctggcttgcacaaagggtttgggttattattgcctctcgtgttacatatcttgctcgccgacgagcacaaagaagtaagggcagttattggacaggtgttatttaaacattctattgtaaatgaatgtgttgattcggttctactgcatagtggagatgcgggggaagagaactgacccagtta

SEQ ID NO: 667257 - DNA, 399 bp, Homo sapiens
taaatgggattctgacaagaatgaggaagagatttgacccagaatcaaagaagttgcagcttcacaccttgtgactcaagccacacggccacattcctctcaaggtgcaaaatgatctcaacttacaacagcttcacatctgaattatttcatttcacagggactttataccaaggttctccacgttgcacaaagatcactacaccttccaaaaccctgctcaggacgtcttagtcatgcattcacaatgggaactggaagtaaaaagcattgagactgttccactgacaattgttttacttcttttttatcttcattagcaggcatcaggcaactttaaccaaccttctaggcagttgtcagtgatcattgtcatattaaagtgcatgttatagatta

SEQ ID NO: 667258 - DNA, 406 bp, Homo sapiens
atgatggaagaagggaaatacgcaactccatacactctagccatcttgtcctatgcaagggggtcaggagggcctgagaagcatgtgtgaagttcacagttcagtggtacaagctcagtaaaagattgagaccccctcctaggactatagaacccttcctctccctccatattttatcaccacattactaaaggcctgtttgcagcagttcctcttaacttgtgtgtcatgtccagtaatcaagaaaaaaaattacaagacatattaaaggcaagaaaaaacagtttgacgagaaagagcaagtatcagaaccagagtcagatatggcagggatgttagaattatacaccaagtgggatttatcccaggtattcaaggctggttcagcattcattcaaaagtcaat

SEQ ID NO: 667259 - DNA, 116 bp, Homo sapiens
tacaatgctggatgttctcggccggtcgatagacctgggagaacactgagaggtgatcctgtctttaacaaaaaagtcacggcctggtgcggtggctcacacctctaatcccagaa

SEQ ID NO: 667260 - DNA, 837 bp, Homo sapiens
aggaaaagtgttgttggtagagagataggttatggaaaaaggggggggggcagcatcacgcccatgggggaaagaagagggcttgagatgatgttggagtatttatacacgggggtgtgtgagaaaaaagaaaatatgatatacgtggagacacaacatatatgtttgtttttaatggtggccgcagagtcccaccggagagagagagagagacacactgtggggctgccacgcctcccacaagagccacacgcggtggcgagaggactgcacgagagaggctgagatgtggtgagtgctccacagagatgaatgtatagagtagatagggtttcacggagagatttaaaggagagagagagagtgggggtgatgatgattttgagacgccgcctcactgatcaatcccgctctcgctcttctggaaggagtgcaccccacttggttgaaccaatctgttttttgtcctctctgtcacggagtcatgccctcttctgaaattttcgtctcttctagagatgttctaagatgtggtgtaatattgagaccctcgctgggcgtgtcacaataaggggcggcagtctgctgcacgcaagaatttgtgaaagccactcttagagaaattctttctggagattttcctcgtggtttatgggcccactagtgaagtggaggccttatattaactgggggtgaggggagcacaccttatcacccatacttgacccacgcgttgttttgggtaacacatcccgaagaaagattttgtcaggaattttttttattttataaatatttccggatatttttcctttaccaaaaaataccattacttta

SEQ ID NO: 667261 - DNA, 327 bp, Homo sapiens
cgtaaaagaaggaaaagctcttctcaccaaaagccatagtaacaattacagaaagtgaaaggaaatagaaaatcaccatgtatatccaatataattaactgccgtatgactcagccctgtgtactacaaccactcgagttgaaaggtagggaatgagcatattcccatattattatattactcattacttacacaagcataaaggggtacctattacaatgggaaaaaccctaggcagacaccacctataagtatgtcagtcgagacaaccactcccttaaaaaacagcgcgggtaccatgtgtctccttgataaatgctcaaccac

SEQ ID NO: 667262 - DNA, 124 bp, Homo sapiens
tgcatggtgactcttagaggatccccctcgcttcacagtaagagcaggtatcatctgcgaactctcctgcagcttgtgccgttcacagcagcttgtggtttcacagtagccttgtgccttcaca

SEQ ID NO: 667263 - DNA, 580 bp, Homo sapiens
cctttaaaacatacctctgacagctccttctctgggcaagttgcatgagcctctcctctcaagtctcaccaggaatttaagagtaattcccaaattgcttctgggccttgactttctgtcatctattcaaatgtcaaaaccttttcctggaagaatgtgctacacctgctgcagctccagttatgcccttgataaaatcagtcagaattatttgctatacaagagtcattcattgatttgtccatcctttctataagcatttcctgaacatctattatgagcaagataccacattggatgctagataaaaagaacagagaaataaagtctattcttaaaggcagcacagtcaagggaggtatggacaagtgaataaagtgtgacagtcactgtgatgagggctatgctaaaggagaaaggcaattagtaaatgtagaagaagaaatggaatttgaaaatcactatttggccaccatcatggtaataattgcttgagtcaagaatcatcagtggatcattctaatgggtggaagtttaaccactaacaggatatttcatggtctcaaagcctcttcccaca

SEQ ID NO: 667264 - DNA, 210 bp, Homo sapiens
agttcatcagctatcattgttagtgtatttaatgtgtggcccaagacaattcttcttccaatgtggtccagggaagctaaaagattggacacccctgatataatgtaaccatacaattcctaaattctgtgagatccttgaagaaatattgaccatttgtctcctaaagctccagaattctattttctaggtcccttctgtcgtcttctc

SEQ ID NO: 667265 - DNA, 897 bp, Homo sapiens
agcggacagacgctgggagcggccgaggcgacgtgatttcttctgacttgaggcctgcagtgtgctgtgagagatctaccactagattatctcaactttggtctcctgggacgcagctcgttgctgacagtcagaacactgaattcttgccgccaggatggggaaatcagagcagcaatgcatgcgcccggaggtcatgcaggacttgctggaaagcacagactttacagagcatgagagtccaggataatggtactacacacggcttcttgagcagactgccccagtggacactttgttcaagtggaagagtttagagaaaatatatgggcaacttttgcccttatggggatgcttccaacatttgcagaggcatgtcttccgcaccttcgatgcatatggagatgggacaatagactttagagaattcagtcatcgtccttgagtgtaacttcgagggggaagctggagcagaagctgaattgggccttcagcatgtacgacctggacggaaatggctatatcagcaaggctgagatgctagagatcgtgcaggcaatctataagatggttgccgtctgtaatgaagaatggctgaagatgagtctgccccagaggaacgagcagtaaaagatcttccgtcagatggactccaatagagacgggaaactctccatgggaagagtccatccgaggagccaaaagcgatccgtccattgtgcgcctcctgcgagtgcgaaccgagcagtgccggccagttctggagccctgaggccaaccatcgaatgtgagagctggtttgtgtcccctttgatgcttctctttgaacatttgggttctttgggccaacatttcatgggggaaacggaccccggtgcgggcttatgcggcccaccc

SEQ ID NO: 667266 - DNA, 1271 bp, Homo sapiens
  misc_feature (384)..(384): n is a, c, g, or t
gcaagtctgctgctaccacctctgacctcaccatatccccattgtcctattacttgaagtatgtggtgtcctccactctctatgctggctgattacattgctcttgtttctcgagagatccagagggttaagcgtatgatattgccttcggtgaccaatctaagtagcactccgttcaagtgatagttcgctcggatggcctctctttcagatatcagcgcataccatcgtattcattggcgcatagagtatcgtacgagactggacatcacttgtgctttcttcctcaacttggtctagttcgtcgcagtaatcgattatgacgagcgctcgcaagacgagacgtcgttgctagtttggttcgctcaaggtgtagacaattgntcaacgatgttgacttgtccgcttgattaaccatatatatagatagaaatgatagggagactttgatgtggcttggttgacgctaggagttccctggtatataccctatgtggtgacaacacgacaagcctgctggagggtacgaggacatgaaacccgccttccggctttcttccctttttgcacaagtcgcgtccaccatggtatggagcttggatcttcgcccatgatagtcccgtgtgcgcctattgtatgcatctatcaagatagatgcgtctagagtctctaacccatgcgactatcaaggcatcttagggaactaagaaaccagcgaaaaaaacaacttgatgggccccagattttcctttgggacggaggaaaaacaaacctatcctctagcttccttcttgtttccttaccccggaaaaacctaaacaatttcatttccagtgggcccattcttcagagaaagcccaaagactccttggggtctaaatcttagttttcccaagcaagttcccatgcacagacaagaacgcgacggggcaccgcaccacaacatttttctccaagagggacacgcttctttggctccattgctggttctggcctggttttccccaaagcaacaattcagggccctatactggacaagactcgttcattgaaggccttgtcttttgcccttggtggacaggcttatcactttttccctatttcccatgagagcaccttttcaaacagtcttgatcgtgccaaaagcctttcctggataacaattccaacgccaaagccctttcaggcactcccttttccttgcaaaagcgcacatttactaccaccccaattataaatttacattgggccttatgcctccccaattccac

SEQ ID NO: 667267 - DNA, 336 bp, Homo sapiens
cggacctgctgctcctcttaagagcagagtccagtgtgggccaggagacgtcagatccatgtccgggtgcgggctctggtttgtgttatcctcagtgggcaggactgggtcgtggtggtccatcttgacccttctctgagctatgcagcgttggcgtggtgcgtctccggcctgtattctctccccttcactcaggcccggggaaaccagcccagttttctggcaggagaggcagaggaggtcggtgcctttgctctgggcttcgctgagcaccagcagaggatgtctctggagaagatgaagagggaggcaggagggggatcctgctatgagtcg

SEQ ID NO: 667268 - DNA, 221 bp, Homo sapiens
  misc_feature (30)..(30): n is a, c, g, or t
gccccgcctttcaggtgacctggaaaaagnatgctagttccaggaaacaaatattatccctagtttcatattcacgggattttctctctctaactatgtaattataaatagagacaagtgctcaaaggaaaaagaacttctctctctagagcgcataatgaaggagctcgacctagacaaggtcaagaaaggtgtctctggaaggggatgcccgctctgac

SEQ ID NO: 667269 - DNA, 496 bp, Homo sapiens
  misc_feature (6)..(6): n is a, c, g, or t
  misc_feature (37)..(37): n is a, c, g, or t
  misc_feature (42)..(42): n is a, c, g, or t
  misc_feature (472)..(472): n is a, c, g, or t
  misc_feature (480)..(480): n is a, c, g, or t
  misc_feature (494)..(494): n is a, c, g, or t
aaaagnttggattttcctggaattggcaggacatgcntttantcttggtaggcttatgcattttagttccagtggtccatagggaaaggcagcatctcaggttctacaccagcacggtcaacagctctatgccagcactggctgcatttcaagatcctcaccccaaaacagagcacacaaatgcacagaccttgcaatggtaaattaggtcacttgtggtggcaaatgactgtaatttttgtcactcaagtggcagaaacaacacagaattcaagatcccggtgatctatatagcaagttacaggccagagaaagtgatgtagagaaaccctgtctcaaaacaaaactcaaaatttaataaagtcagacccaagactgcacactatgagattcaattcatactatgtacagcagactaggcaattccaggcaacaccgtgccactcgtggatgggtatgtgagctctttgangtaataanagtatattgcatgngc

SEQ ID NO: 667270 - DNA, 425 bp, Homo sapiens
gagagagagagagagagagagagagagagagagagagagagagagagagagtgctagcatgggctctactgacatgctgttagataccataggagccaacctatcacaatcctagtagcatatgaagactcacataatagaggctatttacactatagtggcgtagctctaggtcatgattgatttgctatgcctgtcatgactgattagcaagtaatcatcgcagatccatctactcactattgctggcttttgaattgcaccagaggatcccggaccccattacactgtctctcttgatcgtgttaatgatgccatccagatgcatgacaggccctatgaagtctgactgacctgctatgcagacatgaatgtcttcctactgtgctctcacttattcgcggccatcacgggagtgccctgcg

SEQ ID NO: 667271 - DNA, 487 bp, Homo sapiens
  misc_feature (27)..(27): n is a, c, g, or t
  misc_feature (61)..(61): n is a, c, g, or t
  misc_feature (64)..(64): n is a, c, g, or t
  misc_feature (79)..(79): n is a, c, g, or t
caatggcttcaaggttacttcgcggantggaacgctggccgcgcagcctgagggttcgcgngcncagtggcgcggccgnaatgcgctccatggcatctggaggtggtgttcccatgatgaagagcaggcgactgggttggagagggagatcatgctggctgcaaagaagggactggacccatacaatgtactggccccaaagggagcttcaggcaccagggaagaccctaatttagttccctccatcttcaacaagaagaatagtaggctgcatctgtgaagaggacaataccaagcgttcgtctggttttggctgcacaaaggcgaaggcccagcggatgcccccgctgttgaagcccatttacaagctggtgcccccagcaagcttggcacactgagcaactgcaactaaaattacttcaaaaatgttgctgtaaaagttttcttcttttccagtaaaagacttagcccatttgcaatttgggca

SEQ ID NO: 667272 - DNA, 483 bp, Homo sapiens
gtcaacccccgtgctcgctgctcacgtacattcatcacttctagtgatgatgcaactttcgaggaatggttccaccaagggcggcccccaaaagtccctgttcgtgaggtctgtccagtgacccatcgtccagccctataccgggaccctgttacagacataccctatgccactgctcgagccttcaagatcattcgtgaggcttacaagaagtacattactgcccatggactgccgcccactgcctcagccctggccccggcccgccacctcctgagcccctccctggtctgggccccgaccttgcgccagaaaattgtcattaatgaggatgtatatcctcagaacttctttcctgccctgattaggtcttactgtaccgttctatcctgttatcaactttgtcatctctatatataactattagtttaaaacctaacccctattcttacaaaaattgttatttattataaatagaagtcc

SEQ ID NO: 667273 - DNA, 486 bp, Homo sapiens
gtcaacccccgtgctcgctgctcacgtacattcatcacttctagtgatgatgcaactttcgaggaatggttccaccaagggcggcccccaaaagtccctgttcgtgaggtctgtccagtgacccatcgtccagccctataccgggaccctgttacagacataccctatgccactgctcgagccttcaagatcattcgtgaggcttacaagaagtacattactgcccatggactgccgcccactgcctcagccctggccccgagccttccgcttctgaggtgtcgttcatctgatcagatgtctgagctcctcagagagcttctttcctgccctgattggggctcttgctgttccgtttcttctccctgcttctcccctttgtcatctctgatctttgcctatctgtttctttttccttttcccctagtacttacagggtttcgtcgtgttgttttaatctaataaacaatagaaagatcccttttg

SEQ ID NO: 667274 - DNA, 858 bp, Homo sapiens
tggtaaagctcggccataaacttctagcgtgtgccaagggtcaccggccaaacttcgcaccaggtgtggctccgggttagccagcaaacagagttcgtggccatcagcagaccaggccagggagggtgcacggggggtggttcgtgcctggccgtgcgtggatacgtgataacttctggcttcagttcactctacaagtgaatctttccctctaaatcccagaaatctgtgagtgcgtggggccgtggtggcagacacacgagccagataggcggtatagggcgtgaagcaacaggggcgtgtgagtgagtgtccccacacatcttagggggtgtaaagggtgtttggccttcgttggaagatcccataaacatgtgggcgtgggcaattcttggctcccaaaagcgccacagagagggagactcacaatttgggaaaagaaagtcaccggtggttcaagatacgcctgtgtgggccaactggtgggtgggatctctcagctggacagtatacgccaggggttccaataccttgtgaccacgcgtgtgtcccagcacaaaggagaaacagagagaataggagtggcctagacgtgatggggcagaaaacgggagaccaacaaagaaaaccccacatcttgaaggtgcggcacccaacaactccccggggaaaccacggaggataatatggggcacaccaccacacacgagaggtatattatcccaaaataaactgggcagagagatataaaaaatacgcggaggaaatcacagaagcaaccaactcctagcccgggtatagctcaggaggcaacaaagggcccacaactccacggacaacactccagttgagaaaagg

SEQ ID NO: 667275 - DNA, 308 bp, Homo sapiens
agcccccgcctaccaccccccccttcgcggccggtcggacttttttccttttttttgagatagggtatagctctgtcacctgggctagagtgcagtgatactatgagggctcactgcagcctctacctccccaggcttaggtgatcctcccatattagcctcccgagtagctgggactacaggcatgcgccaccactcccggctgtttgtattttttcttttttttagagatggggtcccgctatgttggccaggatagtctcgaactccttgcctcagcctcccaaagtgctgggactacaagcgcg

SEQ ID NO: 667276 - DNA, 1126 bp, Homo sapiens
  misc_feature (1)..(1): n is a, c, g, or t
  misc_feature (268)..(268): n is a, c, g, or t
  misc_feature (716)..(716): n is a, c, g, or t
ntgggggttccccccctccttttccccggaaggggtagctattctgtccccccgttgctatcgcccgaaggggggttctctccctgtgaggcgcgtctcacaccgatgggagaaagaattgggggtgtgggaaccacacggaagtgtgggggccccccagggagtgttgtgtagaggggctctactcgccccgtgggtgtagccccccacgtgcttcgactgatggcccctcttatattggtgagcggtttgtttttttggggggggnccctggtgtggcacaagttgaggcgtggtcgactgagtgtgcctccacaataccccccggttattggtggggagcccccctctccacccgctcggtgaacacacaggaaagttgggggcgacccccccttgcagcccttgtcccagagcgtcgccaagactcatcccacagaggtgtggtataaacagagatgcctatatatattagagttgagccacactcgtgttatagagggacccacgggagaatggccacacagagtgagccccacggggcgccacaggcccactctccctcatagcgctcttataggaatagaaggtggggagtttgagatatacacagagacccctcggtggcccccccgagagggggcctcgggttttttcggccactgaggtgttctcgagatggcgtttattcccccccatgggatcccccccagccncttttcgaggccctcatttcacccccgagtaggagtgtgcgtcacgtccaccctcatgagtgagagcccggtgccccttggggagactcggggtttgtgttcgagaaggagcatagaccctggggatagccggaccagaaaattgtaggagccagaatgaccatttttgaccgggtgtacaaaccctaaggggtaccagatttagaatagtcctacacatgtaaaagccaccagataagaaaagtttgaccaactctggagaaccagacgggtttcccactcttttgtgatgtgaaaggaatttgtgaagatttttttttggacttcccaggaatttcatttactattttaggatggtaaattaaaggggggtttgccaatggttataatagagtaggtttttaggacca

SEQ ID NO: 667277 - DNA, 713 bp, Homo sapiens
  misc_feature (32)..(32): n is a, c, g, or t
  misc_feature (165)..(165): n is a, c, g, or t
  misc_feature (710)..(710): n is a, c, g, or t
ggaatcctgtactaggttttctttatctcccnccagcaggatccatacctatcatcttggcactccccatccagcattatgtttttcatttcagccccttgtcaatctggtatttgtcaatatgcactaactatgtgggaatatgtcctatgagcagattctccncgacatttgattctgtttttaaagctaagccttgctctgtctcccaggctggagtgctgtggcgtgattttggttcactgcaacctccgccttccaagttcaagagattctcctgcctcagcttccaagtagctgggattacaggcatgtggtaccacgcctggctaattttcttgtatttttagtagggacatgttggccaggctggttgtgagctcctggcctcaggtgatccacacgcctcagtgtcccagagtgctgatattacaggcgtaatatgtgatcttttgtgtctggttcctttcacgttgaacgctatttttgaggttcgtgcctgttgtagaccacagtcacacactgctgtagtcttcccccatcctcattcccagctgcctcctcctactgtttccctctatcaaaaagcctccttggcgcaggttccctgagctgtgggattctgcactggtgctttggattccctgatatgttccttcaaatccactgagaattaaataaacatcctaaaagaatgaccttcccaaggnaaa

SEQ ID NO: 667278 - DNA, 607 bp, Homo sapiens
cctcacgcgactataagttggctgctcctatagattatgtgtttgtgtgtattatggatctaagtccataatctcttgtcatatatcatacacaataagtcgttataactaagtcaaacatgttagtgtctatctgaatgaatggtcatcctttgttttggaaatgttactagtttgtgacgacaatttgtttccagtctaaattaaattttctttctatacgagtctttaacatacttcgagaacctatttgggccgtccatgatatgtccaatccggtcctcgatggattgtatcccatactgtggttctctgagtctcacattataatagggttggctctcacagaataataccttgtctcgagaacggagtatgtggccagtgtttgattactataatgttaaaggtctctatattatgaagatgtatataatagctttgtgcgcgttcgaaaaaaaaaaacactattgggggaatcatccttttatttctttttcagccagggacctgtccaactcccttttggaaattaatatggggaaagaaatttaattagaggatgaatggagagaaagggtttgaagtgtggataatttggttggaa

SEQ ID NO: 667279 - DNA, 453 bp, Homo sapiens
  misc_feature (421)..(421): n is a, c, g, or t
aattaagctataattatagtatatcaaggtctcataagcatttttatacttatgttaatcaaattcttctacacttttcaccttataagactaaataagtcagattctcttgaacatttaaaatgctttaagtaacaaacacatgcagggtttttgttttgttttgttttgttttgttttgttttgtttgagatggagtctccctctgttgcctaggctggagtgcaatggcgcaatctcagctcactgaaacctcctcctcccaggttcaagcgattcacctgcctcagcctcccaagtagctgggattgcaggcacccgccaccatgcccagctgaatttttgtatttttagtagagatgggggttttcgccatgttggccagggttagtgttcaaactcctgacctcaggtgatccantcgtttgggcattcccaaagtgctggggttca

SEQ ID NO: 667280 - DNA, 207 bp, Homo sapiens
gatacccattatgtgtctaattaagatttcacgtttcatgtattctccgagaaaattaggctgagtgatggaagtacctaggagtccattagtggaaaagagatgatgtcccaaggtaagaaactatactagcagttaatccatgacaccaccatcctcttatccagaatgatagcatttctctaaggcagcccacgtgaataccat

SEQ ID NO: 667281 - DNA, 330 bp, Homo sapiens
atgggtgctccatcccccgcaaaaagaaaagaaaatcccattttctgaggagaatttcaagctggctgtagagatttgcataagtaacagggagctgaatgttaatcaccaagacaatggggaaaatgtctccagggcatgtcagagatctttgaggcagcccctcccatcacagatccagaggcctatgaggaaaacgtggttttgtgggctgggcccaaaggtccctgtgctgtgtgcttggtcccctgcatcccaggccactccagccggactggaaaggggtcaacattagagctcgggcccgtacgcttcagcagggtgacaagc

SEQ ID NO: 667282 - DNA, 123 bp, Homo sapiens
gaacgggtgatgcggttgggagcactgctgtgatctgggctcccgtagactctccaagccagccaggaggaggacaagaggacggcagcgatgggttttccaagatttgcctggagagtacgt

SEQ ID NO: 667283 - DNA, 114 bp, Homo sapiens
tctgtacgtaatcagatggcatctttactgatgcagcggcatctttcactaatgagcggccatctttactactgagcggcatctttactaatgagcggcatctttactaatgcc

SEQ ID NO: 667284 - DNA, 140 bp, Homo sapiens
gaatttctattattggatctttaggggagatatccttttatacaaattaagaccttctgcccttcttgagtcaatgcggcctcgctcgcggatgagggataacgcgaccaaatgccacccacctcaggcggaaaaaaaaa

SEQ ID NO: 667285 - DNA, 678 bp, Homo sapiens
  misc_feature (240)..(240): n is a, c, g, or t
ttattcagtacagttcagggcagtctatactgagtctcagaggagccaaagtgtcataatgaatgtgtagcttggacctagagttctttcagtcattaatgacagagattccatgtcacactaggagtgcatcatctacgttagtgagattcacatgtatcgcgataggtgatgctctgtgcagctcatccacttagtcactgtagtccagtcagtcatagatagcaccatctctcctcntgtaacaataccgtattgacacacgttgcatattcgtatcagcaataaacggcatatctgatgtcatcttcagtaatgagctatccatggtctgaccgaccattgtaagtaaccaggtaacagtcatacaaggtcatgcgtcattcctcacagcatctagatactgcccagttggacgcttccacaattaagcaggcatacaatgcagttctactttgcagataaagcgtgatcagttccgttcgagcctatacgagtcttatatgaagtcctaagtatgagtatggtgacccatacaatgcgcattaggcatacagtgtctgggcagttattggtctggcgtaatctgaggatccgggagtcatggtgctgattcagtaccgggttacaggagacaattcacgttcctctaaaaccgtctagcatgcgccatcataa

SEQ ID NO: 667286 - DNA, 166 bp, Homo sapiens
ataacatcatgacttacgtgtctagcattctaccaggcacattctctggagcacataaggcggagcccgcagacaatacgcatctgcgagtgtgtaaggccgtcaacccaggaagaacgagcacgcttataggaagactacgatgaagcttggacagtgactctgt

SEQ ID NO: 667287 - DNA, 896 bp, Homo sapiens
  misc_feature (894)..(894): n is a, c, g, or t
gggcttgtacgccctggatgacatacaatacaatggggaagctgctcatcttcagagaaattccacctccacctgagagtgtacctttcgagcaagatgaatgtacttttactcaggagaaaagaaaccgagcagtgcacaggaggaggggagaaactcccattcctacacaggaccaaagggagatcacactactggggtaggctactacatgtacatgtgaggcctcccatatggtgtatggacaaaaagcacgcctctgtgtcacaggcctctggaggagtctctgaaaacactgctgtgacctttttctaccacatgtatggagggggcactgcctgtgagttgtttatctgaaaaaggaccgaagacagtgaagagtccctcttatggaggcagaagaggtgaacagagcatttcctggtacgagcactgtgtgaataccagctgtgagaggcaaacaccagataattttggaagccattcgaggagtatcactacgaagtgatatggcatggatgatgttcaatttcaggcaggaccctgtggagaaatggagatacactcaacattcatcaggatatactgaggacttaatgaattggtattaggaaatgatcggattggattatagagaaacataactttttaatcaaatgaacaagaatgatatgggcggttaaaattataagtataaatgatttgaagacctctcataatttgcaaaataggagcaggctttcttggaatacaggtaaaaggacggtggagaaactatgggcggagacagggttatggtatagacagcgacagagataatgagggtggagagcggtgtaataacatggggcgttgtcttcgcttcttgtgattatataatattattattagacnta

SEQ ID NO: 667288 - DNA, 194 bp, Homo sapiens
gctggacacgagtatcaaatacccatcaccacgatttatgtgcttaacaaaatgtggtatctatactatagaatatcattcagccattaaaaggccaaaagtactacggctacaatactatcacatgcttcacactcggaaccctcatgtcaaggctgcgcgccggtcaccacaatcagcaccactattgtact

SEQ ID NO: 667289 - DNA, 1349 bp, Homo sapiens
gcaagaaccaacagagcatcccagcacttgggaggctgaggcaggagaatcacttgaacccgagaggtggaggttgcagtgaaccaagatcgcaccattgcaaccccacctgggcaacaagagggaaaccctgtctaaaaaaaaaaaaaaaaaaaaggggatttattatggtgctcacgtgcgtggcttcaggccccaaccttctgtggccttttaagtttacctagaacttgagttctggcatccagaagcttaacaatcattctttcagaatcacccacaccggagtggaatctctagctatttatatcagctaagaaaaactcggggctaataacgaaaaagcagttagggccgtggggcttagcactgagtttcagatccagcttttcaggaggacagtgtggaaagagttgcagagccttcttgccttaggcccgtgggccccacgaaagcgaggacgaggcagaagcccaagggttacgtgctgggcaatctcgtggtcctttccctttcgagggaaacccctttaccttattgtgccttcaaccaagaactggggttacacaattaaagaatcaagttctcccggggaaaaacccaaaaaaatagaacaacatacacaataaacataatacagaagacaatataaccataagaccaataataaaaaagaaagatacaacaacacaacagaggcggggggggcgcggccgcctactataaagaaatatttctccctccagaagagaggaggcgcccccatattattatctggtggcgtcccacgaagcgtttttgtttttgatacaaaaaggggggggggcggccaccactataagggatgggagaccagtactattattaaatgaagagagaacgaaaagatgtgaacgggggccgagagcgagttatattaaaaagacacgaagggtgtttgagtgatagggggaggaaaaaaaagctgctgattgattgtgggatggtgacaatatattggatgaagagaaagaaggaacacttaaaataagtggcggaaggaggggagagaaagaacgaacaaatattgtgtgtgggcgagagacacacactctccattccatgagcaaagaagataatattttgagcaggagccctgcaagagagaagaacaattaactaaaagaaaacggtcttaacaggagttaagtataagaaatcggtcggtgataaaaaaaacaacacagcgagcccatataataaatagtatggtggagtgaagtaagaaaagaaaaaaagtatagttgttgtataaaaagcaaagcaacactagtgattgagtagagagcaaaacatatatttttacaacg

SEQ ID NO: 667290 - DNA, 82 bp, Homo sapiens
  misc_feature (52)..(52): n is a, c, g, or t
  misc_feature (66)..(66): n is a, c, g, or t
ccagacaaggcgagggcagggagaggccacgggcacacagccggcgcccagncacccggcccaganggagggcggccgggcc

SEQ ID NO: 667291 - DNA, 109 bp, Homo sapiens
  misc_feature (29)..(29): n is a, c, g, or t
  misc_feature (54)..(54): n is a, c, g, or t
  misc_feature (74)..(74): n is a, c, g, or t
agttgggggctaggggaggggggagccanatgccaggatgcctgagccccctgntttcccaaagggagggtggnagagacagtgggcactaagggtggagagttggggg

SEQ ID NO: 667292 - DNA, 404 bp, Homo sapiens
tctcttgaacgctgcctgctgagtagctgggactacagttgcgcaccaccacgcctggctatttttttgtgttttagtagagacagggtttcactctgttgcccaggctggtctcgaactcctgagctcgggcaatctgctgtcaggcacccaaagtgttgggattacaggtatgagccactgtgcctgcccagaattatttttatggtcagaagcattccaaacatttcccccctactaaaatagcttttaaatgatcaaatgcacatgttcatgtggccaaatgatcttgtttttctcagtataacagtaaaaggaaacgtaactgtgcttagctgtggcatggaattgtgatattaccaggtcaaattcaggaaaaccatatttcctctttggattccaaa

SEQ ID NO: 667293 - DNA, 542 bp, Homo sapiens
ctggcccccccttctatcatgcacacgagttgtcatgcacacacgaattcttattttcgttttgcctgaaagtttaagctttaaatactggcaatgttatgtacagatctacacgtgacaacaaagatgacaacgagagccgactacaaggaacagaaaaagaaaaacaaaataacagtcttaagaaaattacaaagcagctagaaagtattctggcagtgtgtacaaattaattgctatttttgtacaaaattgctaaataatgaaaatgtgagtagactacatatcaacttaaataaaacgattgctatgcacaactctgtacatataaacacactcctaacactgtttgacagctcatgtgttgccctttatacattttattttctaaggctcacgcagtcataatttgcacacttgtaacttttagccatttcgtgtgtgagctttaatagcagcaactcaatggtaccaggaaacctgcatacttagtacttaaagtaacgcaaatactgtagtactaacccactttgtgtgccgga

SEQ ID NO: 667294 - DNA, 464 bp, Homo sapiens
tttttaacaaaaggggcacttatttttttatggataagttttttgaccagtttgtaaatttaacgtggtggagtttatacacggtcgaatttgcacatctggggttttacactaagagggtaattgtagagtttatactaatagggaaaacagtcatgtgaaagaacgagtctttataaggataactctatgttgatgagaatgactagctttttacttttgccgttaactatgagattcatatcggatgtcttcacatttacttacgtgggagatggtagttaatacgcttgagattacagtcgctagcttgtcgcatagaggtcgaggttcttgagcctaacgcgggcactgcgcgagttagttcgtctgtcgttttccgaagggatgggtatatttgcatgatatgtgaatctgtcagcaagcatgttttctagaacgaatatgggatggagtgcccaaac

SEQ ID NO: 667295 - DNA, 1574 bp, Homo sapiens
  misc_feature (1317)..(1317): n is a, c, g, or t
gggcggcgcgttgtacgggcgcatgacccctaggcccactgtctggctaccaggtcccgacatccggcgtcggccaccgtactccatctctggccctgcgacaattaggatgtccggtaaggtgcagggctaaagctggcttcccggtgagcggccggcgcgggtccatgcgtcgcggagtcacgtcgagggggccggcgccccgaggctgcgtcggagccggcacttggctagcagatagctgcgcatctcacggggtgagtcttcggaggcttagcgcagggccgcagtcgctgggtgcgccaatgctcattaggaggcactaacggacctgcgacgggccgagcctctacgctcaggcttggctcagcagacctctcgcgcacaccgcctacgcgcaaggtccagcatcctcatgccggcactagaggaccctccgagaggaccacgtcaaaaacattctgtgctttggcgcgaccttggcaagattatttccggatcattaatccaactcctacgaaaggcaaagtgctcttacagaccgaaatcgcgaccgggcacaagacggccggtgttatcgaaccggatacggattgagagatttatcacttgtgctcctttgagacactcatcatttttgagctagataccattgtgcgagaccccaaaggccatcgatgctagatacccattaagccaaaaaacagagccgcaaggaaactgcgttgtaaacaggcaacttggaacctaaaacaaagcaaattagaacggggcaaaaccacggcctttggggaagactcgccaagggggtcgagggacgcattttgtgacgcccgaataaagcaagaacctggtggcacaacaggaccgcatttaaaccccaagtctgggcgtcttacaatttcacattgggacgacgcgaaccacagtaaaaccgagaaaggaaagagattcccacagttggtgggtaacaaaaaaagacgaagcacccaaaagtgaattggggggcgattgggcgacttaaattttccaaacgaagtgtgggaaaacagtttcacacatgggacaagtttggaccgaatttatccaaagaggtataattatatccccaagaaaagattcacttggggaaagcaaagtgacaaattcctagagcggaaaaacgttttatattttataaccaaggaggaacagagattaacttcaccaatggacgcttggacatcacccggcctaagagcaacaggcaactgggagccgacttccactatttatccccacgagtttacacactatgaattccacccagacaagtcntaatacgctattcctccaccattatttaggcgtaacacagaccataacatttccgcgatctatcgacaattcgcctggacgtggagtaacagaaagatgtgacaccacagccatggatcgtaataagaagctcccacaaggcgggacgaccgttaaaaggcaagagaacgccccttatataatagacttcataattacatggtggcacaaaaactttgtcgaaggacagcttcaacgaaagcaacaacgaaactatt

SEQ ID NO: 667296 - DNA, 224 bp, Homo sapiens
cctagaagtctggagctacatgtccttgcgtgagctctgtgaactacaaccaacagtcttcactgctactaggcctcagctactttgctaagaccatagtcaatggccgtgtacgcctatatgacaagaccaggccctgtactagtcatattcacgtatcatttaataagtcgaccacgatactataagacaggtactactattatgcccacagaatccttacc

SEQ ID NO: 667297 - DNA, 187 bp, Homo sapiens
gggcaagatcccggtcatgcaacttcactcctggcttccagaaattctctctgcctcagcctcctgagtggataggagtgcgggcacccaccaccctgcccagctaatttttgtagtattagtagaggcagggttttgccatgttgaccaggctgtctcaaactcctgacttcaggtgatctgctca

SEQ ID NO: 667298 - DNA, 308 bp, Homo sapiens
tcgcgctgtgtacgctaccacgtggttggctgtcggcggctgcggagcgagtactgctggagcggtggtcgccatggacgtctcaggcacccactgcgcttcagtgagagggagggctgatatacctcaatgacttcgcgcgcgtggtgatcagcgaccatgaggccgtgaacggcatcctggacttcattgaccgtgtcctgctgccccccgaggcgctgcacttgggagcctgatgatgctcccatcccgaggagaaatgtcaccgccgccgccccgggcttcggttaccaagatcttcagcgggc

SEQ ID NO: 667299 - DNA, 1065 bp, Homo sapiens
  misc_feature (165)..(165): n is a, c, g, or t
  misc_feature (202)..(202): n is a, c, g, or t
  misc_feature (223)..(223): n is a, c, g, or t
  misc_feature (286)..(286): n is a, c, g, or t
  misc_feature (294)..(295): n is a, c, g, or t
  misc_feature (313)..(313): n is a, c, g, or t
  misc_feature (331)..(331): n is a, c, g, or t
aatgctctaccacttagtaagactatctttatctcatagttgctcaggaggtggcgttctctgcatataatacgggacatgttgaactagctctttgagatacagctagaaaataaaaacagatggtaaagccacattcgcgtatgatgccagcctcacgcattngtatatctccagaaattcaggtatgcctcaccaattngcccgtctttaataaaatctngtgtaaaattgcatcacgtcgccttcctatgtatgacgaaacaagaaacagagatttccaatngctctttnntcttcagacatttagtantataaagtacctattttnatgctgaaatgtttatacaggtttattaatagcaggtgcaactaactggcggatgcctgtgagaacatttgatatattagccatgcttccggggtaaggcaagcccaaatccttatctttgtgcagtctctctgggatcagtaagagagaagaaaaattaatgggtgttaagagtgtgggaactgtaaatctgttctattttaagtttttgtatagcccatgtacctacctgtggtttagaaagaatcatttcgaaaactttcgaatggaaggggggtacacggaggccatgaaaggtttttgggaattatcattaaatgaggaatcccaaataattcacctacagattttagccaaaaaatagacatgtgtacaacgtgtacacctttacgataagtattctatgcggaggaaggtactctgatctcagtaacaagtttttgccttttaaatcattaatgggtagataagagcctattatctggaggcgaattaagtcctatgtggtaggatcggtctacaaagggttttctggagaaaatactgcttttttacacactgagatggcgtaataaacaggggaggtctgggacaaaattttggcggaatctcaggggggggggacaaagtggtacaaggggattataaattcagcggggaaaaaaaaaaggggggcggaaatagggagaggagtttgatggtgtagttagtagtatgtaggtaaggggaggggt

SEQ ID NO: 667300 - DNA, 196 bp, Homo sapiens
gcagtcaatacgcaccgtccgatgaatcagttgtccagtcttgtaactctacatcaaaatagccattcacagtccttccagaggccccctactaagaaaaataacagtcaagaggaacactgtattacttcatttccaatttactagctcttccagtgtcacagagggatactggttttcaaaatattctcatctg

SEQ ID NO: 667301 - DNA, 216 bp, Homo sapiens
ggtagtgaacatatatatataaggaaaccatcttgagcctgtgtctagacacaggctcaagatagctatcctagcattttctcctcttggccttaaaagttccctgtatagtgagacgggaagtcctgagaagtgtgtgttgagtggctgtgcgcacgcacacaagaagggagtcaacctgtggctacctgacccaagataatgacccattagaac

SEQ ID NO: 667302 - DNA, 428 bp, Homo sapiens
tccactgtcatcatgactggcttctgcttgtcatccacacaacaccaggacttacgcacaaatgggactgatgtcatcttgagctcttcatttcatctcgactgtgcatctatctggagtggaggcatcagtattcaagcaccaacatgtcatgtcaggttgtctacagggtcacatgcctctaaactcatcgagacgagaatgcctttgtagtttacatgcatatttccacactacaattgatcctgtcagagttcctggcagaagctcagagcctgcattgtcaggctcactcactcatccaattaacttctacagtggcagcactcacttctgggcactggaatataaaaaagaatcaaaggttctgatttagagttgccatacagggaaagaccatgctcatagccgtgcccacatctgacgtg

SEQ ID NO: 667303 - DNA, 892 bp, Homo sapiens
  misc_feature (28)..(28): n is a, c, g, or t
  misc_feature (33)..(33): n is a, c, g, or t
  misc_feature (35)..(35): n is a, c, g, or t
  misc_feature (41)..(41): n is a, c, g, or t
  misc_feature (43)..(43): n is a, c, g, or t
  misc_feature (45)..(45): n is a, c, g, or t
  misc_feature (47)..(47): n is a, c, g, or t
  misc_feature (55)..(55): n is a, c, g, or t
  misc_feature (57)..(57): n is a, c, g, or t
  misc_feature (59)..(59): n is a, c, g, or t
  misc_feature (69)..(69): n is a, c, g, or t
  misc_feature (71)..(71): n is a, c, g, or t
  misc_feature (78)..(78): n is a, c, g, or t
  misc_feature (92)..(92): n is a, c, g, or t
  misc_feature (96)..(96): n is a, c, g, or t
  misc_feature (98)..(98): n is a, c, g, or t
  misc_feature (100)..(100): n is a, c, g, or t
  misc_feature (122)..(122): n is a, c, g, or t
  misc_feature (139)..(139): n is a, c, g, or t
  misc_feature (145)..(145): n is a, c, g, or t
  misc_feature (159)..(159): n is a, c, g, or t
  misc_feature (259)..(259): n is a, c, g, or t
  misc_feature (294)..(294): n is a, c, g, or t
  misc_feature (298)..(298): n is a, c, g, or t
  misc_feature (348)..(348): n is a, c, g, or t
  misc_feature (365)..(365): n is a, c, g, or t
  misc_feature (422)..(422): n is a, c, g, or t
  misc_feature (511)..(511): n is a, c, g, or t
  misc_feature (517)..(518): n is a, c, g, or t
  misc_feature (525)..(525): n is a, c, g, or t
  misc_feature (541)..(541): n is a, c, g, or t
  misc_feature (568)..(569): n is a, c, g, or t
  misc_feature (623)..(623): n is a, c, g, or t
  misc_feature (633)..(633): n is a, c, g, or t
  misc_feature (636)..(636): n is a, c, g, or t
  misc_feature (646)..(646): n is a, c, g, or t
  misc_feature (683)..(683): n is a, c, g, or t
  misc_feature (687)..(687): n is a, c, g, or t
  misc_feature (742)..(742): n is a, c, g, or t
  misc_feature (788)..(788): n is a, c, g, or t
  misc_feature (790)..(790): n is a, c, g, or t
  misc_feature (814)..(814): n is a, c, g, or t
  misc_feature (886)..(886): n is a, c, g, or t
cgtcaaaggaataaacaaaaaaaaaggnaggantngcccananananaagtaganananagacagacananggacaanaaaacaaccaagtnggtnanangcccaggccaggctcagcagcngtgtccaggcatcagcnccagcnctgccctggggaantggtggaggagaagggctggccggggcctcagtccttacagggctccttctcctcatgccctactatccctcatccagcctgctgggatccttggcaggnggaattcccagggctatggatggctgggctgagtnagcngaggatcgaggctcttggagactccctggggaggtggaggcctgggtggngtggggtagcagcagcnctggggggaatctggtcaagttccaggatggggccactgctcagcagggcccctgtntccagggcaggccctccacctgcccaccacaccaacatggtgcaataaataaagtttcaagtagtaagttagttttaagcaggagagcngcaggnnggcaganaggcagggactgaganagagaagcctccagccacccaccatanntgctcagtgggctcaagcggtcgcaagtttgttttgtgcactggagttggtgtntggccctgangtncacatgagcnctccccgcaggttcagcccctcacaccagcgccagancctnctcggtggggcagaagcagggcaacacggtgcccacagcgtccacgatggctgcnaggggctcgtcctgcgccttatgcccacagagctgcatgaagtttncnagatgcagcaagttttcaaggttnttgccggagaagccccggcagggcaggatctgcgttgcaatggcttttcaggcgcagggcccaggtaaacanggtact

SEQ ID NO: 667304 - DNA, 356 bp, Homo sapiens
tggatctgagatctgaggctcataccatatgaccttctgtatccgccttcttcatgcatctgcttgtatctccgagaaaaattgcaataaattcctttcaaaaactttacaaaagcaatagatgctcataaaaaatagttcaaatgatatggaagacagaaagtgagtgtgtttctttagtgtttggatgaatgtgtctatggggtagtcactaataacactgggtgtatttccttccagatcttttccagtgtacctacaaatatatatgtacactttgtaaaaaacaaaatagtactgataaacattgagtccccctacccccactcagcagtctacatggatatcctttcatg

SEQ ID NO: 667305 - DNA, 651 bp, Homo sapiens
  misc_feature (28)..(28): n is a, c, g, or t
  misc_feature (33)..(33): n is a, c, g, or t
  misc_feature (35)..(35): n is a, c, g, or t
  misc_feature (41)..(41): n is a, c, g, or t
  misc_feature (43)..(43): n is a, c, g, or t
  misc_feature (45)..(45): n is a, c, g, or t
  misc_feature (47)..(47): n is a, c, g, or t
  misc_feature (55)..(55): n is a, c, g, or t
  misc_feature (57)..(57): n is a, c, g, or t
  misc_feature (59)..(59): n is a, c, g, or t
  misc_feature (69)..(69): n is a, c, g, or t
  misc_feature (71)..(71): n is a, c, g, or t
  misc_feature (78)..(78): n is a, c, g, or t
  misc_feature (92)..(92): n is a, c, g, or t
  misc_feature (96)..(96): n is a, c, g, or t
  misc_feature (98)..(98): n is a, c, g, or t
  misc_feature (100)..(100): n is a, c, g, or t
  misc_feature (122)..(122): n is a, c, g, or t
  misc_feature (139)..(139): n is a, c, g, or t
  misc_feature (145)..(145): n is a, c, g, or t
  misc_feature (159)..(159): n is a, c, g, or t
  misc_feature (259)..(259): n is a, c, g, or t
  misc_feature (294)..(294): n is a, c, g, or t
  misc_feature (298)..(298): n is a, c, g, or t
  misc_feature (332)..(332): n is a, c, g, or t
  misc_feature (340)..(341): n is a, c, g, or t
  misc_feature (361)..(361): n is a, c, g, or t
  misc_feature (364)..(364): n is a, c, g, or t
  misc_feature (367)..(367): n is a, c, g, or t
  misc_feature (375)..(375): n is a, c, g, or t
  misc_feature (380)..(380): n is a, c, g, or t
  misc_feature (382)..(382): n is a, c, g, or t
  misc_feature (401)..(401): n is a, c, g, or t
  misc_feature (403)..(403): n is a, c, g, or t
  misc_feature (413)..(413): n is a, c, g, or t
  misc_feature (419)..(419): n is a, c, g, or t
  misc_feature (432)..(433): n is a, c, g, or t
  misc_feature (439)..(440): n is a, c, g, or t
  misc_feature (444)..(445): n is a, c, g, or t
  misc_feature (448)..(448): n is a, c, g, or t
  misc_feature (450)..(450): n is a, c, g, or t
  misc_feature (453)..(453): n is a, c, g, or t
  misc_feature (455)..(455): n is a, c, g, or t
  misc_feature (463)..(463): n is a, c, g, or t
  misc_feature (465)..(465): n is a, c, g, or t
  misc_feature (468)..(468): n is a, c, g, or t
  misc_feature (531)..(531): n is a, c, g, or t
  misc_feature (546)..(546): n is a, c, g, or t
  misc_feature (582)..(582): n is a, c, g, or t
  misc_feature (642)..(642): n is a, c, g, or t
cgtcaaaggaataaacaaaaaaaaaggnaggantngcccananananaagtaganananagacagacananggacaanaaaacaaccaagtnggtnanangcccaggccaggctcagcagcngtgtccaggcatcagcnccagcnctgccctggggaantggtggaggagaagggctggccggggcctcagtccttacagggctccttctcctcatgccctactatccctcatccagcctgctgggatccttggcaggnggaattcccagggctatggatggctgggctgagtnagcngaggatcgaggctcttggagactccctgggaaantaaaaagnntaaataatataagggtaaanaanagnactagggnaaatntngtaaaataccaaaataggncnactacacaanaagacncctatatccaagnnaagaannccanntananaananaccaacanantgnaataaataaaatatcaaatataaataaatataaaacagaaaaacatcaaactgtgcaaatagncaaaaactaaaaaanaaaaacctccaaccacccaccataactacacaatangctcaatctatctcaaatatttataatacacataaaaataaatatataacccataaagtncacatgagc

SEQ ID NO: 667306 - DNA, 918 bp, Homo sapiens
gacgaatgtttgggcgcgaattactctaagcgcggctctcagaagggtgcaagaagaatcagtgattttttttttttctcgaagcccctggtgtgtttagactccagatgttcttgggtaaagccaatgtgttcccaggaaaaacggctccaccgttaaaaagaaatcccaaggagaaacagagggtatatgacaggaacggtttgtgtgtttgctctcgagcacaataacggcgttagaaaccccgctgtgaacacaccacttttacaatctctcttgaaacgacatcttggcttcctgaagggccacaccaaggcccaacctaaccttataaacccggggaaaagacacgtagaggcgaggcagagaggaaaaacacccggtggggaacctccttgttgtccacagcgagttatcccacaaaaaccccacattttgcgcgaaacctatatgtagtggggaaatcccggtgacaatactatggcccaactttgcgcggacgtataccggcttttaccagcgacacccgctgacacgcagaaattctcacagtaaccgccacgttctctacaactcttccgctgtgagaaagcaccaccggatattgtgtgccaacacacagtgtttgtgaaaccttcttgttaaaaggtccccctctcccagataaaggcattgtggacagaatttttacacccaaacagggttctccacgggttctaccctgagaactctccgcgcacacagggggggcccgataaaacaaaaggctactccttgtagcaccacaaggggtcctggggcaattttccctcaccggggcacgacacctcttctccgtacaccgtgcggtgagaagacaccccccacgaaagggttacgttcacctggtgggaacatcttttctcaaagccccctaaa

SEQ ID NO: 667307 - DNA, 115 bp, Homo sapiens
gaagggcagcaatacgagtactacctcctcagctgccatagcactcacagcctgtgccatccaggaacctccacctttgaacacagagccaggctgggccctatttatgggctcc

SEQ ID NO: 667308 - DNA, 455 bp, Homo sapiens
  misc_feature (10)..(10): n is a, c, g, or t
  misc_feature (29)..(29): n is a, c, g, or t
  misc_feature (40)..(40): n is a, c, g, or t
  misc_feature (227)..(227): n is a, c, g, or t
  misc_feature (270)..(270): n is a, c, g, or t
  misc_feature (359)..(359): n is a, c, g, or t
ggcccaaggnaaaatccaagtccctgaanacttaattggngggatccaaggcgctgaaacaaaggtgccccaggcaaacataatgaaaggtgaacatgcaagttccctacgtgctaaggagcaaactggcccaggatggagaaggaccttgggttaaggctgtgtgctgtcctgctgagccctagaagaagcaagaaccagaaagaacgtgtccgggatccatcctncgccagggctaggccgtgtgctcagacttagtgaggttgtganagtcacgggtggcgcccgcacccctgagcacctgacgtggcccaggttgatgcccagcagtggtggtggtgtctgtgctgtcatcctgnccccttgccttccaaatttccttgctgccttgaagtgtcccctctgtcagcatctgccctctgctgtctgtcccttgccgcccccacctttaaaaa

SEQ ID NO: 667309 - DNA, 125 bp, Homo sapiens
caggatctttgcctgttgtccgtaagatctcactttcaattctcccgctcgtttctgtttgcgtctatatgcacaaccccgggacagccatttaggtaacagccatttaggtaacagccatttag

SEQ ID NO: 667310 - DNA, 726 bp, Homo sapiens
cattcccgctctccgcggaactgctctgacgtctcggcggtgaaagtgtgagagggtccgtagttgggtcaactttgactcctctcgcctgcccggatccttaagggcctcctcgtcctccctgtgtctcctgtgtctgctgcctgggtctggtgctgcctgtgtcctgcgccctgcccttcgctctgccaatgggctgcttccagactcctcacgcgctgtgccctgcctctggctcccatgccctgtgacctgggcccaaggtggctcggggtcgccgctgctaggacttggcctgcgttggcctggggacttgtctgcctgtgctgcctgcgcatgtgccatgtgtggcagcctggcggctgcatgcagggtgtgggcaccgtgtgcgaagctctgtgatctacccggttgaaatcctgcaaaggtgtgtgcctggtgatgcgatggcttgagtgcacggccatggggctgcagcagcggaaacctgcgggacaggtttggctggtgattaaggaagatggacacatgggtcactgacccgacaggagcctcgcctcgtgctcatctccatcatttatgagaataactgcttgatcttcagggctccagacaatggaccagctggtattgcctagcagcagcttcctcaaacaaatccaaaaatgcaggatatttggcttgacattaaggcagagactgtggcaatgaggcagtaagtggtca

SEQ ID NO: 667311 - DNA, 566 bp, Homo sapiens
  misc_feature (54)..(54): n is a, c, g, or t
  misc_feature (108)..(108): n is a, c, g, or t
  misc_feature (171)..(171): n is a, c, g, or t
aaccttaccccttaggtatttaagggcccatggccattattatatccaccgttngtccttgacctgatttcctggcaccataggggatggattggaaaagagggaagnaattatggccagggaaatgaatttaaagtagttgtggtagtttagatgaaaagatgatgagancctgaaagtatatctatggccagtgagggttgagagaaagtagatggaattgagagcttgtataatagtaaaatcaaaaggatttggtgaaccatggagtgaggaagagatagtgttataaatgacttccaaactttaggaaaccagatgccgccatgataagattaaaaagaaaaatacaggaagaggaacaggtttcagtaagccaagaatagattctgtttcatatactttaagattattgtgtttaggaaacagccaggtggagatatccagcatgtgattggaatatgactctggggcagaagagagatttgggctagaaatttaaaaaaaaaaatgtgagtcatcaatactaagaaggttcttcaagctgtaggcataagtgatggtag

SEQ ID NO: 667312 - DNA, 468 bp, Homo sapiens
  misc_feature (192)..(192): n is a, c, g, or t
  misc_feature (267)..(267): n is a, c, g, or t
  misc_feature (315)..(315): n is a, c, g, or t
  misc_feature (402)..(403): n is a, c, g, or t
  misc_feature (462)..(462): n is a, c, g, or t
tcttgagtatcccctgcagtcctctctgatgtcacgcatctgatttcccgctcggccgtggtggtgaagctgttgccgcgctcggtgaggatcttcatgaggtagtcacgtcaggtcccggccatgtccaggtccagacgcaggcctggcatgtggggagggcatacccctctgtagatgggcacagtgtgnggtgacccctgtcaccggtagtccatcacgaatgccagatggtacggaccagaggcgtacagggtatagcacaangcctggatagcaacagtacatgtgctgcgggtgttgagaggtctcagnaacgatgatctgggtcatctgtctcgccggtttggcccttcggggttccagggcgggcctccggtccagcagctacgggtgtgctcnnctcgggagccgacacgcacgctcacttgtacgaacggtgttggtggccagattttctcncatgtc

SEQ ID NO: 667313 - DNA, 171 bp, Homo sapiens
ggcacgagaatccactgtccacagcatcttcctttaaaccaatagtcccagaaggagaccctctgtaaattctaggactggatattaaaatggccggaacctgttatctaaatcccttttaaggaacctaatggtccagctcttggactcacatgtgggacagaatttgtg

SEQ ID NO: 667314 - DNA, 153 bp, Homo sapiens
ccctttttttggggggggggaggggggaaaccccttaaaacccccccaatttttgggggtgggggggggggggcccccccctttttaaggggggggttttccccggtttttggggtttttttttttgggaaaaagggttttttttttccccca

SEQ ID NO: 667315 - DNA, 676 bp, Homo sapiens
ggcgcaactccgctccgcactgtgcgccagcatcccggggcacggagggcgctgcggccgcccggagaccccccacccaggctggatccgggccctggggcccaggagcgggtgggtgtgagtgtgggtgggtgtgagcgagtcagggcgtgggcctgggagcgtccgcgggactgtgcgactgtcgctgccctgccttccccgcccccgtctcccttccgcaccttctccacccccagtttgtcacactccttagacgagggactgggcgacctagaacgaggttcccatatcgtgttcccacaaaagcaaaacttagtctctgttttgctatgcggtattcattgtttgtacgctttaaacgagtaacgagcagccgcacccggcatccctacctgctaatcacgactttcacgattccccatctggcctcagtgctcattccggggaagacaccctgctgagatgtctttttccccctcccccaagcaaaccactcaggtcctacctgcctctttcccggcttgatgcgggcgtgtttacctgtatgtatttctctcgtgcggccaccaaaaaagcatcagctggggttcccgaaggtcagaaaatggctatcgattaatctactagaatagttgccgggagacataaaaacgacgtaaaatagcagggaacc

SEQ ID NO: 667316 - DNA, 957 bp, Homo sapiens
cggtgacgcgctggggcaatgcttctggatcggagaccttgcatcctggttgtgaagcctttgaccttcttttagcaaagagaaaaggtaggctgcttctaccttcaaacagtcaagagcaagttctgtggagttcaccttgctgctgacccagaagtgtggctgcaggggccaagtctaagggtggtgcagaaagggtaaacagtgacttgctgtgaaaaagaagtcatcttcagtcatccctggggagcattccctgtgcccctctctcaacttgagtgcttatcagcttcatgcaggacaagattttagttgccatcttggattaacatttcaatctcgttatagagaagcatacaagctagcgagtcctgagcaactgagtatgacattgtgctgaatacggctagacacgaacacgcgtttcgtaaaacgtagtcctggtttctttgtttctttctacacgggtgtgtctgtacgaaatattcttcagttacagcagtgactatatgcggtatgtcaggaagacacaaggtagtctgtagaactggggaagtgatgaccatactttttagttagagcacctaagtttccatgactggttctaaatctggccagatatttgctaagtaccaaatgacgaggagttcatgggcaatttgtgagtggtcttgagtccccaagttaccagtgcgaaggggtacaaggccgtcatgggtcagtggcggagctttcacatatgagtatgttgatatttcccgtttgagtgcttcgaagaaagcctatgggggcatctgttgcgtcactgtaattctccaatttgacttgggaagcctgagaacttactgaattaggatggaaacggctttgaacctgaagaatgacgaggaaagatgtagtaatatttggaaggcgaggtatggggtgaatagcaataaccaatttaaacaaaaagaa

SEQ ID NO: 667317 - DNA, 398 bp, Homo sapiens
ggatcgttagaggtcaggggttcaagaccatcctggccaacatggtgacatcccatctctactaaaaatacaataagttagctgggtttggtgttgggtgcctgtaatctcagcctcctgagtagctgggataacaggcatgcctggctaatttttgtattgttagtataaatgaggtttcgctatattggtctggttggtctcgaacaactgacctcaagtgatccacccatctcagcctcccaaagtaatgggattacaggcatgagctaccacacctggccttcgtttttcttttgacacagggttttgctctgtcacccaggctggagtgcagtgagctatgaccacaccactgcaccccagtctccgtgacagcacaagaccccaactccaaa

SEQ ID NO: 667318 - DNA, 269 bp, Homo sapiens
aggaagtagctattagcatgatgcgttatcatcaggagactagatttaagcagcgggtgagcaaataccagataaatgtaaaataaggatagatctagtgcccaattattaatagaacaggcttaaatttaatacaaatgtactaaacactccaatttagagacatagggacattagaataaactgtagggcagagaagaccaactatatgctgtttacaagagacatgctttacaaaagaacacagatcagaagttaacagaaactct

SEQ ID NO: 667319 - DNA, 971 bp, Homo sapiens
ggcgtgctcgacgcacgcgtatcttcgttcagtcattatcctccatcagtctatcgcactgtcgtcgcgtcgacacattgtcgagtcctacgggctcgctagcatgcgcagtaacagggaggaggcctagtcgtgggtaagacttgtgcagcatttcggcacgtcgcttctgttgcataggatcactattacagaagcaagatctcagtgaaggaagtctgtgcggactgttggatccgaacggtgcagagcgctctggctgaaagcggagtcacccaaggcttttacgcgcagcataaatcgactagaagctcactgtgccggtcactggtgctagaacccgggtcgcgcttgcgaactccgcagagcatgtcccctgggatgggtgggagaactggtaacctgaccactgggggcaggggcctgtcaattgttaaaactgttgcctactgcgtcgccaggcacggcagttccggtccagaggaccccgtcccaagaaaagcattcaaagacgcgtctcggtgggtgtacggaacagatggtctgacacgagacaattcctggacctacatctgcaagtgcgcggccggatccctggttactaggggctcttgcgccttggtgcgcctacaagccctttggaacaacagcagattgggatccaatgggtaatcaatcccgatgattcccgatcatttgcctggaaaaggtgccgttagcaaaccttttaaatctcgcggcacatggctgaaaggcagaaccaaaggccctgggagagggaataccgggggagaccttcggcaccggtgagaagtcggggcaagaggttctacccgtctaacggaggaggaataatccaagggccttgggcaatttcgcagtcttcgacagatcgggtgtacataggtaggggcgtttggccccaaccggaacgtgaagggatgccttgggaaattcgctgggatggttcc

SEQ ID NO: 667320 - DNA, 1993 bp, Homo sapiens
cctggactggccctgccaccccacccccgtggagcctgatgagctgggcccggtgagatgtcctgatggtgccctggtggtgtgtgtcttggatgagctgctgtgcccctgtgtgcccagcgaggctgcccccgtccaggtggcgccgttctgccgcagctcggagatgcgtggcgcctcgtgtgtgatgctggggacagtgtgctgcttcggtggcggactcacgcgggtcgctggcaatgccgcgcagttacatgcgctactactacagcgtgagacagatttgggatccactatagactagcttataagaatgagaccatacgcattacacagtgcaacacggcactgacataccacgaacgacaaaaaccctgaggtgtggtctcagggaataggtgaacgagaagtagcgacgaggccttaggggagagacccaacatagcgctgggaaacccgacggaatcccgttgacagatacaaggtgagaaatatccagcaatcacaatagaaccatacagtggaagggcccagaaaaccgtagaatataccccgatgacattacaaagttgagaaaccaactatggcttcacatcgacaaccactcggggagctcgagaacctgcaggccacagcagaccccgtcggcggcgacccaaaacagggcaacccaaagaacaaaacacagattgagcagagaacagagcagaaccaaaggcaccacagagcggcaaagcacacacccacagacaagacaccaagaccagcacaaatagaagagaaagacaggaaccagtcacccatagagagcaagacacacgaagcgcagacggacaaagacacccgacagccgagacagaggcaagcgaaacacaggagacgacacaacatagaccacagcagaacaccccacacaccccccagggagcgacagacatccgcagcaacaagcagaccaaagacgacgagtatggacgagagccacaaccgacgactaacaccgaaacagggacagcacagacactaaccacgagagagtgcgacacaacacgcgaaaggagccagccggtggcacacgaaacgcagcagaagcaggcagacagacaaagaaagcacgacaccagaagcgcgaccgaatacacaacaacacatatgcggagacaccacccaaccaccaatcggcgaggcacagcgatcagatctgcgcaacattgacaaaaatgcctcttgacgcatatcgaccacgacctgacattccgacgacaggatgatgaggaagagaccagcacacggccacgaccagagacgggacactatacaaagaccgtatgactagcaatcacacaagcagcagatcacataggaatcgaacagagacgaagtgactggatatcaaacacgagcatgaagctacaagctattacactcagttgcaaccaatgagctctgatgctaccatcacaacgggacagaggaacacaaacacaagagagatgatgacacaccatacatgagaaggagcacggcaaagaagaagcaggaccccggccaataagcaagacaccgccgacacacagaacgacccaaccagacgcagaacaaccgaccgaccacgcgacgcagacagatgagacacacacacgagagacgcgacgagagaggcgcactccgaacgacggactcgacgccgggcgagatgaagcagggggaggaggacgagagacgagagggagaacgcgaggaacagcgagaaaccactgacgtagaaagcgaccgaggcgacaaccacgcagacccgctcaggcacgacctgactgaaggacgtcacgagcaccgcgaccacgatcgatagcgagacgcgaaccgccaataactggacacgcagcagacgcaacgtcagccacgacacgacagatgctcctgacgacaggagcgactcccaacaccacagggcacaccagaacacaagcagacacgaacagggacaacgaaa

SEQ ID NO: 667321 - DNA, 381 bp, Homo sapiens
agatatgagctcggtaccgacgctctctctgtggggcactctggcccagatactgcctttcccatggtctttgcaatccgcagaccaggagattcactaaggtgtccatgccaccagggccctgggtttccagctaccaaactgggcagcctgtttgggcagacactgggctagccgcaggagttttttttccatatcccagtgtctggactggaagtgcgatggagccaggaaccttcagcaagccagggtgtgcgagggccaggctgtggggcctgcgagtcgggtcagcgtgggccggtggctgcgtgatggtcagagtggtcctgtttgatctgatgagcctgcagagcagcctgggcccccccacagagagagcgt

SEQ ID NO: 667322 - DNA, 1114 bp, Homo sapiens
ggaaatataaacgagatcctagtgccaagggggcggcaaaccgcctcggggcatgcttcgcccacaccgcgccttagcgccgtgcaagcctctccaaagaactggacccgcgtgcgggaacccgttattgggttctaaagtatgagacgggtgtgttccttagacgactaaccgtgggaaaacctgcctctaatgccgccaggccggggactcttcggcggggcggtataggagacatctctaactggggggcgaactacggcacggcattggaaatagctggcaaggagaacgaattcccgcttgtgtgtgtgccgcgcacaccaatggtaaatctggggagcgtaccgtgtgcttggtctcttgagccgttggttgggacgcctcccccgtttgtacaggggaccccttggtgctagtcaagctccaagagcgaagggaccggtggagtcccacgcttttgagtaccctcggctgtccagcagcggcagatctggccggttggaccaagtcccgtgagtgacagcaggcaccatcagcgagagtgcctaagccaggcgcttcctggggcttcaacaataacgtgggcgccgtcctggtccatggatcaagcaatgaaagagagggcttgctcgcttcgcagcccaagcctggcgctcacctccaggcgcgcatcgatcagtagcgcctccggggctcccgcgggtcagcctcccgtcaaggttctcccctatgttgaggggtttaccggcgccagcccaacagcctgcacggagaccacagcggagctacgcgtctaccgtccacgtcctgccacgcgccgccggccctcgacgcaccgccccgtcgtccgccatcacgtccaccccgtcagggaccaagaagtcacaagaggggccgtgaggcgtccagggcgctaggaagccggggtgggggtgagggtagcccattgagccctgtcccatgcaggctgtgagagcagactaggagcctgggccacgttcacagagactctgggggtgtgtctgggggtggggtgtgagtgcgtatgaaaagtgtgtgtctgctggggcagctgtgccctgaatattaaccaccggaggccgcccagcac

SEQ ID NO: 667323 - DNA, 671 bp, Homo sapiens
acctatcgccatgcccttgttaaggtaagctaaatggtgtgtaaaggcattgccttaagtacgactgtatggataccttgaccaaagctagcctcctctccagtgatacacatctcacatcgctgaatgccatcagcgtccatcatctggactcagtgtccatcagagcatttctgctacatagtcatcagagttcatgcaatcatccaatgttgcaggtgtatgtcatcgactatatccctaatcatacagtcggtgttaactcacatacagtgtcagccttgaatcttgcagcacacgtggagctctcaggatctatagacatgtcgaactatgcgtcttgaggtcgtttccagccacgactatatgtagtctgactgcagcatagcatgataccagcattagcagtctctatcgtagcatctgtccagttagtcttgcagcaagtgctgctatcggtcgtgtagaccctgagactggtatctcacctatgactacgtccatctgctcagtgtacacagatcgctatgtgatggcggccttcatgcagccgcacctgcatctatatattcatgtatcatcggtttatcaagctctgtcagagcccaggagcgctagtaagacactctagtggtgtaatctaggcagcatgtcatctcagctcctgaaat

SEQ ID NO: 667324 - DNA, 272 bp, Homo sapiens
aagttgccatctaccaagctctgtggatattcaccacatagatactgctagcttacaacactgatgcacacagtcaaggtaggaattatatggcctactacagagggtaccagacccagaaagttttaggtgtaaatagtaaactacaaataccctcttggtaaacgttacttcatcaagttaataaaggtcatattatctatcttctgcaggtgacaacttgtagactacagtatagtctggctcaagaaagaactggttcagatatgcgg

SEQ ID NO: 667325 - DNA, 189 bp, Homo sapiens
ttggtttaaaagggccttttggggttttttttgtaaatgttataaaatttttttttgattttggaaatttttattaaaattcttttccttcccttgttccccaaacctggtgttttaaatttgccttttttttggaaatttttttttcaaattaaatttcccttaagccattttttaaaattgggccca

SEQ ID NO: 667326 - DNA, 123 bp, Homo sapiens
ttgtggtggtggcttgaatatatgaaaacacacgcactctctttctttctatggaagaataagagagattgaggtttctagagaaacattatcttagagtcttggtcaggtggtcaggagtat

SEQ ID NO: 667327 - DNA, 1098 bp, Homo sapiens
aagtttctgagcacttgaaatgtggctagtgtgactgagaaactgaatttttaattttgtttgagactgggcacagtggctcacgcctgtaatcctgacactttgggaggtcgaagcaggaggattgcttgaatccaggagtacgagaccaccctgggcaacatggtgaaatcctgcctctaaaaaaaaaacaaagtaacgagcccagcgaggttgtgcatacctgtgatcccagctacttgggaggctgaggcaggagaatcgattaaacccaggaggcagaggttgcagtgagctgagatcacaccattgcactccagcctgggcgacagagtaaggctctgtctccaaaaaaaaaaaaaaaaaaacaaaaaaaaacccgtttggcttttttttccttggccgtgggctcaatccccaattttggcccccaatttatcccaagtctctctataatctcaagctttcatctaagtggcaacctggtattatttttctaaggttggaaaaaaaaaaaaaaaacaaaaaacaagaaaaacgcaacgaacacacagaaggaagcacaagaaccgaacgccgacgagaatgacaaaaggcgcgcgcccagcgcaaggaaacaaagcgagggacggggcgcgcagcagacgaaaggagacgactacgccagcagcaccacgactggccgcagcccacatcgagacatacagacagaccgcgcaaagacgacacatagaagacaagaagacgacgaaagaaggaccctctccagagaggcgaacaccgacatagcaagacgcccaaagaacaagaacaggcgcagacaaacacacgaaccaacaagccacaccgcctgaggacgcaagcacacagccgcggcagagccgcccaccagcatcccgggtgccacgatcacccgcgaacaacagtattacgagcacgacgcgacacacgatacagcgcaacgagagagcaggagggaataggaacatgaggaggggggaccgcgacgcagcgacgcgcggcaggcaggggcggcggaaggcaatacgcgacagcaagccgatgacacgggcacatgcacgcaccacgccggtcatg

SEQ ID NO: 667328 - DNA, 814 bp, Homo sapiens
agcggggtgtccggtgttcgcggaggagtcgaggcacggagaggctacgaggggagggacggaaagaagggtggcccgccaggagggcggggtccatggattcggggtgagggccgtccgcggcctcgctttcgcctccttccgagccagggccggcgataggccgcagctgtgaggcgaggtcgggtcccgtagcggcgcgcagcctccctgggggactcggggtcctgtatatttgtgaagtacatctgtcttcataacatacaccatgtccaaaatctaacagggccaatgtccaaattattccaccagctttgaagggacttgaagcaagaataacaagacagaagaactagaacggacaggtgataggcatgtgcatgactcacgaactctgtgatagccaagcgaacaacctatttgcctaagttcggcatgttaagaaaactaacgggtcactcactctaggaacagataacttggcagctcaatgcagttgctctgtacaagatcacatctaacatgatcttcaacttcgaacatctttcagattgcagatcattctaagacacaagtacaaaagcacagcgagcaagcaaatctctaaaccacgagatcacgaaggcaataatagatacctggacttacaaaaactacacagtgacccaaactagaagaactcagaaacacgaactctgttcttgatcccaaaccgccgccgttgacttaggcacagaagttgggcctcattgggactccaccagctccagtgtcctcagatgactgggagaaggtgaaacgagcgctctgctca

SEQ ID NO: 667329 - DNA, 307 bp, Homo sapiens
tgctgtggagtatttgagtacagcatcaccaccatccatcttcagcaagctcttttcgggattaagtgcttttaatgtgcacgtgttgtgtgttataggtaccaggacggtcactgagtagaataggtatagcatatagcagggtatacggctcttaaaaatgtccatgttttctgtcttaatatagtcttgctttcttctcttaggcaaggcccagggaaggggactcccctctccaagacgagtacctgaattatccaaggtatcacatcatccgacgaataagtatgatgagaagacatatatc

SEQ ID NO: 667330 - DNA, 97 bp, Homo sapiens
  misc_feature (36)..(36): n is a, c, g, or t
  misc_feature (49)..(49): n is a, c, g, or t
ggggggcaggattcggcacgaggacaaaggttagtnctccagtagttanggaaggcaccagtgtcacagtcagacacacaggagtctgtatctgctg

SEQ ID NO: 667331 - DNA, 363 bp, Homo sapiens
ccaccataaaaacagttactgaccacgtactacggtgccagcgtctagtattcagcgcatgggaggtgttatgcgcgacttcctctgattggggcatgtggggacactccgtataaggagagttcaagcctgtgggagtagaaaaatctcattcccagagtcagaggagaagagacatgtaccttgaccatcgtccttcctctcaagctagccagagggtgggagcctaaggaagcgtggggtagcagatggagtaatggtcacgaggtccagacccactcccaaagctcagacttgccaggctccctttctcttcttccccaggtccttcctttaagtctggttgttgcaccatctgcttgg

SEQ ID NO: 667332 - DNA, 1279 bp, Homo sapiens
  misc_feature (851)..(851): n is a, c, g, or t
  misc_feature (856)..(856): n is a, c, g, or t
  misc_feature (870)..(870): n is a, c, g, or t
  misc_feature (900)..(900): n is a, c, g, or t
gccttgcaagagccggcgccggaggagacgcacgcagctgactttgtcttctccgcacgactgttacagaggtctccagagccttctctctcctgtgcaaaatggcaactcttaaggaaaaactcattgcaccagttgcggaagaagaggcaacagttccaaacaataagatcactgtagtgggtgttggacaagttggtatggcgtgtgctatcagcattctgggaaagtctctggctgatgaacttgctcttgtggatgttttggaagataagcttaaaggagaaatgatggatctgcagcatgggagcttatttcttcagacacctaaaaattgtggcagataaagattattctgtgaccgccaattctaagattgtagtggtaactgcaggagtccgtcagcaagaaggggagagtcggctcaatctggtgcagagaaatgttaatgtcttcaaattcattattcctcagatcgtcaagtacagtcctgattgcatcataattgtggtttccaacccagtggacattcttacgtatgttacctggaaactaagtggattacccaaacaccgcgtgattggaagtggatgtaatctggattctgctagatttcgctaccttatggctgaaaaacttggcattcatcccagcagctgccatggatggatttgggggaacatggcgactcaagtgtggctgtgtggagtggtgtgaatgtggcaggtgtatctctccaggaattgaatccagaaatgggaactgacaatgatagtgaaaattggaaggaagtgcataagatggtggttgaaagtgcctatgaagtcatcaagctaaaaggatataccaantgggntattggattaagtngtggctgatcttattgaatccatgttgaanaatctatccaggatcattcccgtgtcacaccaactggtatacacggggatgctactggcagttgagacactgaagtcttcctcgagaccttccatgtagtccgtcgaagtgcccggggattaacacagcgttatcaaccagaaggtaaaggatgatgaggttgctcagctcaagaaaagtgcagtatatccctgtgggacatccagaaggacctaagaagacctgtgactagtgagctctaggctgtagaaatttaaaaactacaatgtgattaactcgagcctttagttttcaggccactgtacatggatcacagtttgcttggatcttcttcaatactgtgaatttgggctcacagaataacagccaggtgcttggt

SEQ ID NO: 667333 - DNA, 357 bp, Homo sapiens
tggctttccctgtgagcagcgcggagctctctttcaatccggaaggggatgtctgtctcactaatttccatcaagaaatctgttttctgggacaggcacagtggctcacgcttgcaatcgaagcatcctgggaggccgaggtgggcggatcacctgaggtcaggagttcgagaccagcctggccaacattggtgaaaccccgtctccactgaacatacaaaaacttcgccgagcatggtggcgcatgcctgtaaccccagcagcttgggatgggcaagcaggagactcgcttgaacttgggaggcggcggttgcagtgagtcaaaatggcaccatgtgcactccagccggggcaata

SEQ ID NO: 667334 - DNA, 167 bp, Homo sapiens
cctttgaaatttaaaggttttaaatttctgtaaagtagattttgtagaatgtaatgtgttccccgcctttgtgaaacgggaaaaaaatggataatttctgtgtgtaaactgaaagcttgggccttcaaaacagtattcatataaagccataaatattaatgttatga

SEQ ID NO: 667335 - DNA, 666 bp, Homo sapiens
  misc_feature (381)..(381): n is a, c, g, or t
tggttgtgggcttccaaggggctgtcggggctacccccaatattagggccccgcctttttgcccccttgcgggcgcaacgccccttcatccgccccttggtttggtccccccccgggccttggcctgggcaaggttcccccaggggccattcccccgcagcaggtttatgcaaggcagatgcccccctggccagcctctttttggggatcccccgaatcactttttgttcctctcccccccgccagaggggaccacagaggtcattctgtccctgcttttcaatcagttccctgggttcaaggagggccgtttgggccccgggcggcataaccttccctttgtggggttttccaattagggcacggcaggggccgctcccnattcccccgaggggttttagattccccagaacaacccccttaagttttcctttgccaaaaaggaggccctttttcccccaaggcgggccctttccctgttttgggggccccccttttccccttgggtcagcccccttaaggttagtccccccctgggggcctttttggaaccgggtgtgggtggggggttcccccccccccttggtccccaggtttgtcccccccccttgcccccggggctgtttggccgggatttaagtggcttttttgggtttggttttttca

SEQ ID NO: 667336 - DNA, 775 bp, Homo sapiens
gccttgcaagagccggcgccggaggagacgcacgcagctgactttgtcttctccgcacgactgttacagaggtctccagagccttctctctcctgtgcaaaatggcaactcttaaggaaaaactcattgcaccagttgcggaagaagaggcaacagttccaaacaataagatcactgtagtgggtgttggacaagttggtatggcgtgtgctatcagcattctgggaaagtctctggctgatgaacttgctcttgtggatgttttggaagataagcttaaaggagaaatgatggatctgcagcatgggagcttatttcttcagacaccctaacacattgtggcagcactacacacgcacttacttcctgtgaccgcccaattcctaacgacttgctagctgcgtacacctgcaggcagctcccctccagccacacgcacagggcgcgagacgctccggcctcaaaatcatggctggcagagcaacactgtcaactgctcctctcacacactccactctacttccctcagactcgctcaacgctacagctcctgaatctgccctcatccacttcgctgcgtcttccaaccccacgctggcacacttccctaccgtactgctctacccctgcgaacacctaacgctgcgacttaccccaacaccacccgacgctgcactttggccacctgggcctcctcattcctggcatccctgcctacactcctcgcttaccctctactgggctgacccaaccttgggccttccttcccacgcag

SEQ ID NO: 667337 - DNA, 1827 bp, Homo sapiens
gccttgcaagagccggcgccggaggagacgcacgcagctgactttgtcttctccgcacgactgttacagaggtctccagagccttctctctcctgtgcaaaatggcaactcttaaggaaaaactcattgcaccagttgcggaagaagaggcaacagttccaaacaataagatcactgtagtgggtgttggacaagttggtatggcgtgtgctatcagcattctgggaaagtctctggctgatgaacttgctcttgtggatgttttggaagataagcttaaaggagaaatgatggatctgcagcatgggagcttatttcttcagacacctaaaaattgtggcagataaagattattctgtgaccgccaattctaagattgtagtggtaactgcaggagtccgtcagcaagaaggggagagtcggctcaatctggtgcagagaaatgttaatgtcttcaaattcattattcctcagatcgtcaagtacagtcctgattgcatcataattgtggtttccaacccagtggacattcttacgtatgttacctggaaactaagtggattacccaaacaccgcgtgattggaagtggatgtaatctggattctgctagatttcgctaccttatggctgaaaaacttggcattcatcccagcagctgccatggatggatttgggggaacatggcgactcaagtgtggctgtgtggagtggtgtgaatgtggcaggtgtatctctccaggaattgaatccagaaatgggaactgacaatgataacgtgatacagattggacaggcatgtgcgactatacgatcgcgtggtttgcaatacgtgcctgagtgagatgtccatcaaagtcgtacaaacggatgatcaccatactgggacgtactggggcttaacgtgtgcgtatgagtcttattgaaactccatcgtttgcagaacatattctaatccaaggaatgtcattccctggggtccatagatactgggttgaacatgggggattgtatgtggcgattgcacgaaactgtaagcttcctctcctttgaagcaccttgcgaggatatcccttctaatgggccctgcgtggaattttatatccacggctgatagggttgaaagtcgaaaaagactcagaaggggatgttacagaggatttggctccagaattccatagctaactaggttgaccgatatttaagcgctgctggggggaaacattcccaactatagtgcgactcttcattcacatggaccctgttgggacatcaaagtgaagccttgcttaacgcactgtggtgcacacaatttgtttaccttaaaacttagtcaaactcggtttgaatttagagccgtaccgaagccactgacggagggatttccctcaccttcctcacgtttgttaaccacattggggaatacacccaaggagatttctagcagtcttagaaataccattgcgcccccaagagtattggctcgaacatcttctggcggccttctctcaaggagaaatgccaacaagggaccttatttgggcttcaggggcacaaaatgtcgctttagccaagatccctttgaggtcttcctttctggaagcaccactttgacttcagtgggactttcaacttatgcgtcacgctggtgccaagaggacaaccagcccctgtgggccacaaagggctcggggcagctctcttaacacgataaccacaggccaacagcgggtgtgccaaacctgcactttgaccacgagcaaaaaggcgccggacagagcggacccccttagcagccatgttccacccttggacccgcacaagcactc

SEQ ID NO: 667338 - DNA, 282 bp, Homo sapiens
  misc_feature (207)..(207): n is a, c, g, or t
  misc_feature (223)..(223): n is a, c, g, or t
  misc_feature (241)..(241): n is a, c, g, or t
gtttccatagaaatgtatggaactgtcttgatagtttattaaaaacacccgcacaaaaatcctcatcatttttcgaaccgctttgaccctgctgggtgaactggagcttggggactcagtgacaaaggccgctctagcaccaggcctgggcccacctcagttggagaaggaggcagggaccagaggggcagaactggcagcacacgnttcttcctgatttctngaagcatcccagccaggncctcacaaaattgcccttttgaggaggtgatgccccctttt

SEQ ID NO: 667339 - DNA, 1439 bp, Homo sapiens
  misc_feature (1011)..(1011): n is a, c, g, or t
  misc_feature (1016)..(1016): n is a, c, g, or t
  misc_feature (1030)..(1030): n is a, c, g, or t
  misc_feature (1060)..(1060): n is a, c, g, or t
gccttgcaagagccggcgccggaggagacgcacgcagctgactttgtcttctccgcacgactgttacagaggtctccagagccttctctctcctgccttgggggctccgagtaaggaaggcctagacttgtgcccacagaccttactcggggagatctctagcttctgcatggcctcgagatctagctgtatctttgctgccggttgcccgtgaggaaaagatggtggtgcgcaccgggagcagtacaagctgcatgcaaaatggcaactcttaaggaaaaactcattgcaccagttgcggaagaagaggcaacagttccaaacaataagatcactgtagtgggtgttggacaagttggtatggcgtgtgctatcagcattctgggaaagtctctggctgatgaacttgctcttgtggatgttttggaagataagcttaaaggagaaatgatggatctgcagcatgggagcttatttcttcagacacctaaaaattgtggcagataaagattattctgtgaccgccaattctaagattgtagtggtaactgcaggagtccgtcagcaagaaggggagagtcggctcaatctggtgcagagaaatgttaatgtcttcaaattcattattcctcagatcgtcaagtacagtcctgattgcatcataattgtggtttccaacccagtggacattcttacgtatgttacctggaaactaagtggattacccaaacaccgcgtgattggaagtggatgtaatctggattctgctagatttcgctaccttatggctgaaaaacttggcattcatcccagcagctgccatggatggatttgggggaacatggcgactcaagtgtggctgtgtggagtggtgtgaatgtggcaggtgtatctctccaggaattgaatccagaaatgggaactgacaatgatagtgaaaattggaaggaagtgcataagatggtggttgaaagtgcctatgaagtcatcaagctaaaaggatataccaantgggntattggattaagtngtggctgatcttattgaatccatgttgaanaatctatccaggatcattcccgtgtcacaccaactggtatacacggggatgctactggcagttgagacactgaagtcttcctcgagaccttccatgtagtccgtcgaagtgcccggggattaacacagcgttatcaaccagaaggtaaaggatgatgaggttgctcagctcaagaaaagtgcagtatatccctgtgggacatccagaaggacctaagaagacctgtgactagtgagctctaggctgtagaaatttaaaaactacaatgtgattaactcgagcctttagttttcaggccactgtacatggatcacagtttgcttggatcttcttcaatactgtgaatttgggctcacagaataacagccaggtgcttggt

SEQ ID NO: 667340 - DNA, 619 bp, Homo sapiens
  misc_feature (188)..(188): n is a, c, g, or t
  misc_feature (233)..(233): n is a, c, g, or t
  misc_feature (247)..(248): n is a, c, g, or t
  misc_feature (464)..(464): n is a, c, g, or t
  misc_feature (469)..(469): n is a, c, g, or t
  misc_feature (522)..(523): n is a, c, g, or t
  misc_feature (526)..(526): n is a, c, g, or t
  misc_feature (568)..(568): n is a, c, g, or t
  misc_feature (571)..(571): n is a, c, g, or t
agcggctaggggaaatgaaggaagctgaagactgactaccaaaacatgcaatatacttattcactgtctaagtctgtagtataacatgaactggagtctctatccttttctaaaatcgcatttgtaagaaaagaaagaaaaaaaaaaagatgttcccaatcctgattgaagaaccttgtttttatatnctctcttatccacggtgacttttctttaaacggggctcggtgatncaagagtttagaanngtagaaatgaaatgcttagcttaccttttctgggggggtgtggaccctgccagaaatgtaattacgtatgctcaagtgctttaatggaaggcacggtgcacaccatgggacttgctgaccacagttaaacattcccagtaaaatttcgtaacgggtcacagctcattcataatcacggtatttttggaccctgataaagacaattatttggatggngtccnggtactggaatggtatcctttaaattatttaaacctttgggtgtggggcaggnnganagggatggtgtccagagatacatcacatttacatcctatctnacngtcctctgttttctaaccctccttacatcctttcggtcaacacattaa

SEQ ID NO: 667341 - DNA, 1419 bp, Homo sapiens
  misc_feature (1419)..(1419): n is a, c, g, or t
ggggcatgtcctgaagctgacagcattcgggtcgagaggtactcgtctccgtggtccttagactgttgcctcgacgcttactcgtcatctttgctggacctgtgaagtgctatccagactgatactcctaaagattcacggctttactctacgtctatccagtcagagtaatggaaagttctaaatttcctggatattgctatgtgatctgggctgatcatccgatccgatcattagaacgtatgacctgactggtaatgaaatggagacgagaattcgatctcaacgttgcgtagctattcacgactttgtcctgtgcagggacggactcggtcttacgtaatcgtcttgtactacaacgtagaagttgcgagctcgcgcgactgaccacagattgagtattgcctagttcctgtggtggaaaacccgactggttggatcgtatatggtccatcaaggactcgctaaagactagttaatacgctagagtgaacttcagaatgaaccagtgttaacgcctatggcgattctatcgggatgtgtctcgagataaggagtgtccccgtccattattggggcatttgggattcgaaactcttcccagatattttactagggtcctgcttgtgacttttttgttgaacttcagtatcggacttagttgtcctataattaaacagcgttcaaccaacattttaggtggcgaccctgaaaacaattggttagggggctcggaattacttgagattgttttgacatccactggggggacacattggactccgtttccttcttcagtttgaattccttgacctttctggggggtggccttgggttcttcctcgatggttctcttgagccttgctcatgcatactcggcgatgtgctctgatggcgtgagtcgggccgcgacctagatgagggatagggcctacctagaggtcggacgataggccggtgggcgccgagcgttaatacagaaacgacagaaacgcgtagatggcaccgcatgacataaccacacaaaaagaccacagcatgacgcaagcgcagcactaaaagggtcgcgcgaataataagaccacccaacataccatatagctaactaaaattgcatcgcatatcaacacgaatcaataagcgaaaaacttaagaaagttgaaaaatcatagaacaaaaaaagtaatatagcctaatgcccaagttagatatacaataacctagccaatgcataataaacaaaaatctcatacaacccctgatataaaattagatagttccaaatccgtagagattatacgtatgggacagtatcgtatggtctaatgctcagttagcaatagatcgctatattatagatctaataatatcgttgtaccatgattagtagattcacctataaaagctttgatagatagn

SEQ ID NO: 667342 - DNA, 119 bp, Homo sapiens
  misc_feature (8)..(8): n is a, c, g, or t
tagctgantgtagagatatgtgaaattgattggctgtatgtttggtctagtggtgtagcctgagaataggggaaatcagtgaatgaatgcctcctactatgtgcaaatactgtgtggac

SEQ ID NO: 667343 - DNA, 135 bp, Homo sapiens
actgcatcaaacgcgctggtgccttgcagggaaaaggatggagcttgtgttgtgagaattcactgtgctcagatgctatcttgggatggtgttttacatgtggtgtgtgccaagtagagtggggatgattggcca

SEQ ID NO: 667344 - DNA, 352 bp, Homo sapiens
  misc_feature (327)..(327): n is a, c, g, or t
atgctgagtgccagctgcagctgcacaacttccccatggacgaacactcctgcccgctgattttctccagctccaccatcttggccttcagattgtctcttcatgcatatcgctgacgtttaaaagtttcaagcttgatggtgtcttacagatcacctcctcggagactcgcttccattcgtggggaaatgaaggctcagagaggttgcatttgcctccatggggcccacagagctggctggtggttgctgtgaattgggaaatcacattttctgacttctcatcgcgtgttctcactactcaacactgggaggaaccattgaattnaaagttcaaaatcaaaaaaaaaaaa

SEQ ID NO: 667345 - DNA, 280 bp, Homo sapiens
agcttaagcgggtaaactgagatggtgttgacttctcagcccattttcagggatctcccccagccaagagtctgtgtgcggaatgttccagaggcctcagtgccccctccctgtcggagagtgcagttgggcccgtggaggcatgctgcctggtcatcctggctgcagagagcaaggtgagactttctcgccccacttactcagaactggctcctcccagaccctgctcatggccagccccaccctggccacacccagcacagtgctgggcactgctggg

SEQ ID NO: 667346 - DNA, 821 bp, Homo sapiens
  misc_feature (118)..(118): n is a, c, g, or t
  misc_feature (552)..(552): n is a, c, g, or t
  misc_feature (558)..(558): n is a, c, g, or t
  misc_feature (570)..(570): n is a, c, g, or t
  misc_feature (587)..(587): n is a, c, g, or t
  misc_feature (590)..(591): n is a, c, g, or t
aggcgtagcgctgcgacccccgcacccctgcgaacatggcgctgcgagtggtgcggagcgtgcgggccctgctctgcaccctgcgcgcggtcccgttacccgccgcgccctgcccgcngaggccctggcagctgggggtgggcgccgtccgtacgctgcgcactggacccgctctgctctcggtgcgtaaattcacagagaaacacggaatgggtaacaacagaaaatgtgcattggaacagtgggaatcagcaatttttgcacaggaagcgttgggagatgttgtttattcgtagtctccctgaagtttgggacaaaattgaacaaacaagatgagttgggtgcctttggacaaggtgtgaaaagctgctagtgaactctattctcctttatcaggagaagtaactgaaattaatgaagctcttgcacgaaaatccaggacttgtaaacaaatcttgtcatgaagatggttggctgatcaagatgacactgagtaacccttcagaactagatgaacttatgagtgaagaagcatatgagaaatacctaaantctatngaggagtgaaantggactcctaaataaantanntatgaaataacgcaagccagagagttgtctaaataaggggtggatagaaaaattagaatagaagtttagtattaccgatggggacaaaaaaatactgttacttgtaattgagggaaattgcccttactttcaagtgattatagatacatataatatgggttttaaaaaaatcctatggaaaaagaaagggtccaatgtcagaatctgaattattccttggaaaacaagta

SEQ ID NO: 667347 - DNA, 304 bp, Homo sapiens
  misc_feature (76)..(76): n is a, c, g, or t
gcggagaaaacaagaagaaccgggctgtgatccgggaaagcaggaagggtgtcactgaccccaaagaactgaaatnctgcgttcaagacctcagtgaccagctccttgaagtggtggggctagaacgcctctgtgcatggattttaagatggtgatctttagcagtgtgactaggacgcctctgtgcatggattttaagatggcgaccttcagcagtgtgactaagatgcctctgtgcatggattttaagatggtgatcttcagcagtgtgactaagatgcctctgtgcagtgacacaccatcg

SEQ ID NO: 667348 - DNA, 288 bp, Homo sapiens
tcctctctcctgtttatgtcagttccatttcatgtctattttattttaataggtaataagtgtcttcaacaggccaagaaacatgtatttatgggtgaattaaaagcatttagtctgctgaggaacattattgaatcattaaatcattataactctcctacaaatggcttgctaggggtatgtagacaggctttggtaacctagaggaggaggtgcataatcttgcctagaagtgagggcatgcccttttcaggtctctgtgctgtggacttgtcataaagtataata

SEQ ID NO: 667349 - DNA, 247 bp, Homo sapiens
  misc_feature (76)..(76): n is a, c, g, or t
gcggagaaaacaagaagaaccgggctgtgatccgggaaagcaggaagggtgtcactgaccccaaagaactgaaatnctgcgttcaagacctcagtgaccagctccttgaagtggtggggctagaaggagtcatcgagtatggatgtagatctttacctgcctgatgattgcaggcagaaggtttcttccagttatgtcttctttcattcatcaggtacaatacatgctgtttcgtcacatgcatact

SEQ ID NO: 667350 - DNA, 343 bp, Homo sapiens
gtagtccttagtttattagtactgtacttcaaaaaagatttttaaataggtccggcacggtggctcatgcctgtaatcccagcactttgggaggctgaggcgggcgaatcacctgaggtcaggagttcgagatcagcctggccaacatggtgaaaccctgtctcaactaaaaatataaaaattagccgggcgtggtggcaggcgcctgtaatcccagctactcgggaggctgaggcaggagaatcacttgaacccaaggggcagaagctgcagttagccaagatcgcatcattgcactccagcctaggggacaagagcgcgagacttcatctcaaaaaaaaaa

SEQ ID NO: 667351 - DNA, 463 bp, Homo sapiens
aacatccaatcgcttccttccttctgtctgggtttcgttcagcattccctccctccattagccatgcacagcaaggtgcatctccagagggtagacattgcttgctccaagtcaattatgctgtttctgtaccccttcctgaccagctagggcacagcaatgtgctgcaattctagccaataacacacaagggagggcttcttaggagcttgaaggagtaaattttttactcttacaaaagagacactgagaaagtggcctttcggtattgtcacgtctggatgtggtattcagagctgttgcattcatcttgtgagcctgaggtgagccagacaaaatgacagagggcagacagagcccagataatctccgagaagtggagcccggatcacactacaccttatattttcttttggaaacatctttaaaagataaaatcaacataaaataaatataaagtaaa

SEQ ID NO: 667352 - DNA, 349 bp, Homo sapiens
  misc_feature (2)..(2): n is a, c, g, or t
  misc_feature (5)..(5): n is a, c, g, or t
  misc_feature (8)..(8): n is a, c, g, or t
  misc_feature (92)..(92): n is a, c, g, or t
  misc_feature (122)..(122): n is a, c, g, or t
  misc_feature (124)..(124): n is a, c, g, or t
  misc_feature (131)..(131): n is a, c, g, or t
  misc_feature (155)..(155): n is a, c, g, or t
  misc_feature (161)..(161): n is a, c, g, or t
  misc_feature (168)..(168): n is a, c, g, or t
  misc_feature (170)..(170): n is a, c, g, or t
  misc_feature (195)..(195): n is a, c, g, or t
  misc_feature (197)..(197): n is a, c, g, or t
  misc_feature (209)..(209): n is a, c, g, or t
  misc_feature (215)..(215): n is a, c, g, or t
  misc_feature (240)..(240): n is a, c, g, or t
  misc_feature (280)..(280): n is a, c, g, or t
  misc_feature (308)..(308): n is a, c, g, or t
  misc_feature (330)..(330): n is a, c, g, or t
  misc_feature (349)..(349): n is a, c, g, or t
cnacnccntcattccatttcttggaatgtggccatgcctccagtgcctccattcaaccccctctaactgattccttccatcctctgcgacgngagacgccgcccgcctcctgcccaccaccncnagaagcncctggctggggtggactgccgtcncctccnactcccnanattgccatgcctggcgacgcccacncnaccgactcaccnaccccnagtgtccgttgtgtgacctagtgcnccatgtattagcttccatggcccccaccccagcccccacnacaccccctttccccacccctttccccncggcgacttcccttttttgccncgataaacgccatctcagn

SEQ ID NO: 667353 - DNA, 113 bp, Homo sapiens
tttgatgaaccatgtgctgatgtgcaatgaatgatcacgtttaccctagtgagtttgaggctgcagtgatgccatgatcacaccactgcactccattgagccttggtctccat

SEQ ID NO: 667354 - DNA, 834 bp, Homo sapiens
gcaattgatacccaaaataaacccactcacctctgagaaaatcaaatgagcttgtcgtgctacgctaggctgggctatgacacacgtgtgaccagtcctcgggcacgtgcagagaggagggacccctatcggcgtttgacaggatcttggccagcctgcatgggagtggaggcacgtcactcgaccttgctagaggccaccccggatcacctccagtttgcgtcgtgtcactgaacgggaaccacgccgtgcgcctgccgctgatggagctgcagtgctcgatgactctaggtatgtgcagcaaggcgattggacgacaggagatttcaagtatgcggttcgactcctgagggaggagctattgcgggcaagctgaatcacctacaagcgacttgccatcataggctgccggatgatcagatcccaatagaccatattgttaaccgtagtctgtcattcaactgtggtgggcacctcgcggtcgtgggatgaacgcggccgtacgctcagcttgtgcgctgtgggcattgtccgacaggcctacaggatgctctgccgatctatgatggctttgacggcattcgcctaagggccagatcaagatgaagatcgtgctggacagcatgtcgaggggctggacgcggcaagtgaagctcccattctttgtggacaaacacgcgttctcccgggggaagttacttggacagagatcggcacagagatgcgcatgcaaagcatcaaggcgctgctgatcatcggtggattcgaaggtctacctgggactcctggagctgtacagtcgcccgggagagcacgaggagttctgtgtcccca

SEQ ID NO: 667355 - DNA, 560 bp, Homo sapiens
ctcaagttctggctggcacagctgtagtcacagacttaaaacagccaactcattcgttttgtgcagttttacagttgtttatggcagaggtgtgatttgggtccctgttatctcatcatggctagaagcagaagttttggcaaattattcttgtatctttacatttgaaaattaagggaaagtttcacccatggaatattagcattgtgacaatgctaatgagagtttctccagaaactatgatcctggtcagcagccagtcatttcatagaagataaacttcaagaatattctctgaagagcaatgaaactgagataagatctaaccactgttaccaacaaccaagaaaaatagagccgcctggacagcttccgtgtggacgtctgaaacggagagagctcagtcactcagtgctcagctgaggtcccagaggccaagctgcaccctcctctctgtccctgcagcacagttcatccaccttctgaaactcaccaacagatgggtgggcgaggaaagaaaatcagtgtttacaattccagtaaagacattaaaattcaaa

SEQ ID NO: 667356 - DNA, 339 bp, Homo sapiens
ctcctcattggagtttgcatcctcagaagattgaggaaatatgtataagaaataatcatggccgggcacagtgtctcatatctgtaatcccggcactttgggaggctgaggcagacggatcacttgaggtcgggagttcgagagcagcctggccaacatggtgaaaccccaactctgctagaaatacaaaaattagccgggcgtggtggcggcacctgtagtcccagctactccagaggctgaggcaggagaatcgcttgaaccagggaggtggaggtttcagtgagccaagattgtgccaccacgctccagtatgtacgacagagtaagaccctatct

SEQ ID NO: 667357 - DNA, 1626 bp, Homo sapiens
gggacactcccgagctctcctccgcgttcgcagccgccgtcatcccgcggaggagcgcgcagccccggggaggccggaggacgcgcccatagaatgcccaggggcgacaaactgtcctgagcccctctggtgcagccacctgcctgtcccatacgccccgcccaccatggagtccagagggaagtcagccagcagccccaagcccgacaccaaggtgccccaggtcaccaccgaggccaaggtacccccggcagccgatgggaaagcccccttgaccaagccctcgaagaaggaggccccggccgagaagcagcagccgccagcagcccccaccacggcacctgccaagaagacctcggccaaggccgaccctgcccttctcaacaaccacagcaacctgaagccagcccccacggtccccagcagtcccgatgcaaccccggagcccaagggtcctggggacggggcggaggaagatgaggctgccagtggggggcctgggggccgaggtccctggtcctgtgagaacttcaaccccctgctggtggctgggggtgtggccgtggcagccatagccctgattctcggtgtggccttcctggtccggaaaaaataatacctgggggccaggcggggggcacggagccacttcctgtacagacccgaggaagccagtgcatgcagagttcacccttacctattcgtacacacgcacattcattacacacctacatacgcccccaacacacgcgcacggtgaagaggacgcccgagcccacccctgctgacccaggacttccccaacctccagggcagaaagagcccaggctccggggtccacagcacaggatgtggggcgagggcacagctggggaacggcaagaaaggaatggaccctgtgtgtggcccccccacccctggcggctgggtgatcctgggcccccagggctggtctgagtgcaggtgggggtgccgggatgggttgggcctgggcccggccctcgtggggacattaaagggcgcggtggctccactcgccccatttctgctctttgcgtaccccccgggggtctgcctgggcgaatgcagtgggacggacctggggtgggcactcacctcagcagagcctcaatgccacctccccacaccacccaagcctagctgggtgggaagacggagccctgaagcctgcgtgtggagggggtgctgcccaagggtcgccttccccagcttgtgctccaggggagccccgacgccggcggggaggcagggatgtcgagggcccctcacagctgtgcccgccctgccccgctagactgcccctccagcttgcacccagcaccacctgagtctaaccagcgtataatgcaataacaggtagagtagaactgcttttggcggcgaccgtcacacactgtcctcagcccactgcacctggggaagcccctcgtgcagcccctccttagcacatccagtcccagcgtggcccttggcgcgcagcagcaggcgaactcccagaaggtggtggtgggcactgtgagaacgtggcctgccctcactggccagtggccacaggaaccccgggcctgagtggaggctgagtctgaaataaactctgtcgtctga

SEQ ID NO: 667358 - DNA, 118 bp, Homo sapiens
taccgtgtactggcgtgtgtcgcgctcggggtgacggtgctacgggctcggtggtcctcgggctggtgctcgtcgtgctcgtggggctgctgctcgggcggctgcgggtgttcgggga

SEQ ID NO: 667359 - DNA, 1289 bp, Homo sapiens
gggacactcccgagctctcctccgcgttcgcagccgccgtcatcccgcggaggagcgcgcagccccggggaggccggaggacgcgcccatagaatgcccaggggcgacaaactgtcctgagcccctctggtgcagccacctgcctgtcccatacgccccgcccaccatggagtccagagggaagtcagccagcagccccaagcccgacaccaaggtgccccaggtcaccaccgaggccaaggtacccccggcagccgatgggaaagcccccttgaccaagccctcgaagaaggaggccccggccgagaagcagcagccgccagcagcccccaccacggcacctgccaagaagacctcggccaaggccgaccctgcccttctcaacaaccacagcaacctgaagccagcccccacggtccccagcagtcccgatgcaaccccggagcccaagggtcctggggacggggcggaggaagatgaggctgccagtggggggcctgggggccgaggtccctggtcctgtgagaacttcaaccccctgctggtggctgggggtgtggccgtggcagccatagccctgattctcggtgtggccttcctggtccggaaaaaataatacctgggggccaggcggggggcacggagccacttcctgtacagacccagcaccacctgagtctaaccagcgtataatgcaataacaggtagagtagaactgcttttggcggcgaccgtcacacactgtcctcagcccactgcacctggggaagcccctcgtgcagcccctccttagcacatccagtcccagcgtggcccttggcgcgcagcagcaggcgaactcccagaaggtggtggtgggcactgtgagaacgtggcctgccctcactggccagtggccacaggaaccccgggcctgagtggaggctgagtctgaaataaactctgtcgtctgaagaaaaaaaaaaaaaaaaacaacacaaagaaaaaacaaaacaaaaaaacaacaagaggggggcgcgcgagcaaaaaactccccaggggggccgcccacagattagtagcggcgcacctgccgattgttttttttttgaacaaacaaggcgggccccccaataggtagcggcgtcgttttgtaactccactttgcacccgggcgcgcctgctgtttataacaacgctgtgtcacgagtcgtcgtagaaacaatcttcacaggtagaagcgttatggggcgacaaagcaccccatcatctgggggggccggacgaacattggtggcgaactcactctg

SEQ ID NO: 667360 - DNA, 472 bp, Homo sapiens
ttagggacgtggactttcctagggagttgacttttaacagaggcggtattggacacttttggaaaagtgccagtggtataagagttcataagccagctcgtgcatttttgtctccctggagaagtccatggtgtagaccacgtactcttccaagggtggcccgggttcagcgaagagccccaatctaacgttcaagggactttttgaggaggatgcctgtgttaggagccaaactggttaacggtgtgcatccagctcctatgatgaagcttttaactaagcgacccattgtgcatcggaagaagctcaagattcaccatctcccggccctggtaaaacctttggatgcagctatgcccagagcgtttactgagaaactggggaaagttgcatcgtttgtgcgaaaaattcaggggatggtaaaggctgatgaacttagtgccgccttgaagtgccattgtgacagataaag

SEQ ID NO: 667361 - DNA, 381 bp, Homo sapiens
agctcggtacccgccgttgtcagtgggacggacctggggtgggcactcacctcagcagagcctcaatgccacctccccacaccacccaagcctagctgggtgggaagacggagccctgaagcctgcgtgtggagggggtgctgcccaagggtcgccttccccagcttgtgctccaggggagccccgacgccggcggggaggcagggatgtcgagggcccctcacagctgtgcccgccctgccccgctagactgcccctccagcttgcacccagcaccacctgagtctaaccagcgtataatgcaataacaggtagagtagaactgcttttggcggcgaccgtcacacactaacactgacaccggcggggttcctcaagagc

SEQ ID NO: 667362 - DNA, 295 bp, Homo sapiens
taatggacccaatgtgggatatgggatctgcctgtattactgtcaagactggcatcagcacagtgtagagccctggtgcttcatcttcatcagctctgcatgaaaaatattcttccgaaatgcgttcgtccactcgatgctatactgtaatcatcgccatggattgtacccatcagctcatttaaacagcatccgtatgattaggatccggttctctggagtcctaagcatagtgtttatcacttcctggtctgtatcagtttccccattttcttctagtgttgccaagggtttg

SEQ ID NO: 667363 - DNA, 1962 bp, Homo sapiens
gggacactcccgagctctcctccgcgttcgcagccgccgtcatcccgcggaggagcgcgcagccccggggaggccggaggacgcgcccatagaatgcccaggggcgacaaactgtcctgagcccctctggtgcagccacctgcctgtcccatacgccccgcccaccatggagtccagagggaagtcagccagcagccccaagcccgacaccaaggtgccccaggtcaccaccgaggccaaggtacccccggcagccgatgggaaagcccccttgaccaagccctcgaagaaggaggccccggccgagaagcagcagccgccagcagcccccaccacggcacctgccaagaagacctcggccaaggccgaccctgcccttctcaacaaccacagcaacctgaagccagcccccacggtccccagcagtcccgatgcaaccccggagcccaagggtcctggggacggggcggaggaagatgaggctgccagtggggggcctgggggccgaggtccctggtcctgtgagaacttcaaccccctgctggtggctgggggtgtggccgtggcagccatagccctgattctcggtgtggccttcctggtccggaaaaaataatacctgggggccaggcggggggcacggagccacttcctgtacagacccgaggaagccagtgcatgcagagttcacccttacctattcgtacacacgcacattcattacacacctacatacgcccccaacacacgcgcacggtgaagaggacgcccgagcccacccctgctgacccaggacttccccaacctccagggcagaaagagcccaggctccggggtccacagcacaggatgtggggcgagggcacagctggggaacggcaagaaaggaatggaccctgtgtgtggcccccccacccctggcggctgggtgatcctgggcccccagggctggtctgagtgcaggtgggggtgccgggatgggttgggcctgggcccggccctcgtggggacattaaagggcgcggtggctccactcgccccatttctgctctttgcgtaccccccgggggtctgcctgggcgaatgcagtgggacggacctggggtgggcactcacctcagcagagcctcaatgccacctccccacaccacccaagcctagctgggtgggaagacggagccctgaagcctgcgtgtggagggggtgctgcccaagggtcgccttccccagcttgtgctccaggggagccccgacgccggcggggaggcagggatgtcgagggcccctcacagctgtgcccgccctgccccgctagactgcccctccagcttgcacccagcaccacctgagtctaaccagcgtataatgcaataacaggtagagtagaactgcttttggcggcgaccgtcacacactgtcctcagcccactgcacctggggaagcccctcgtgcagcccctccttagcacatccagtcccagcgtggcccttggcgcgcagcagcaggcgaactcccagaaggtggtggtgggcactgtgagaacgtggcctgccctcactggccagtggccacaggaaccccgggcctgagtggaggctgagtctgaaataaactctgtcgtctgaagaaaaaaaaaaaaaaaaacaacacaaagaaaaaacaaaacaaaaaaacaacaagaggggggcgcgcgagcaaaaaactccccaggggggccgcccacagattagtagcggcgcacctgccgattgttttttttttgaacaaacaaggcgggccccccaataggtagcggcgtcgttttgtaactccactttgcacccgggcgcgcctgctgtttataacaacgctgtgtcacgagtcgtcgtagaaacaatcttcacaggtagaagcgttatggggcgacaaagcaccccatcatctgggggggccggacgaacattggtggcgaactcactctg

SEQ ID NO: 667364 - DNA, 178 bp, Homo sapiens
  misc_feature (168)..(168): n is a, c, g, or t
accatgttgtccccctgtataacctctgttctgtattccgccacaatattagtttacattttcacatgcatttcacatggatagtctcttgtaacatgctgtgacattaaacttatcattttgcaggcattaaaatgaggttatcatagggggcgatatcagcctaanggggcaatat

SEQ ID NO: 667365 - DNA, 103 bp, Homo sapiens
ccccttggggggattaaaaaccttttttttttaaaaaaaaaaacctttaggggcccctttttgtgggctctttaaataaaaaaaaaaaatggggaaaaaaaaa

SEQ ID NO: 667366 - DNA, 1214 bp, Homo sapiens
gggacactcccgagctctcctccgcgttcgcagccgccgtcatcccgcggaggagcgcgcagccccggggaggccggaggacgcgcccatagaatgcccaggggcgacaaactgtcctgagcccctctggtgcagccacctgcctgtcccatacgccccgcccaccatggagtccagagggaagtcagccagcagccccaagcccgacaccaaggtgccccaggtcaccaccgaggccaaggtacccccggcagccgatgggaaagcccccttgaccaagccctcgaagaaggaggccccggccgagaagcagcagccgccagcagcccccaccacggcacctgccaagaagacctcggccaaggccgaccctgcccttctcaacaaccacagcaacctgaagccagcccccacggtccccagcagtcccgatgcaaccccggagcccaagggtcctggggacggggcggaggaagatgaggctgccagtggggggcctgggggccgaggtccctggtcctgtgagaacttcaaccccctgctggtggctgggggtgtggccgtggcagccatagccctgattctcggtgtggccttcctggtccggaaaaaataatacctgggggccaggcggggggcacggagccacttcctgtacagacccgaggaagccagtgcatgcagagttcacccttacctattcgtacacacgcacattcattacacacctacatacgcccccaacacacgcgcacggtgaagaggacgcccgagcccacccctgctgacccaggacttccccaacctccagggcagaaagagcccaggctccggggtccacagcacaggatgtggggcgagggccgagggcccctcacagctgtgcccgccctgccccgctagactgcccctccagcttgcacccagcaccacctgagtctaaccagcgtataatgcaataacaggtagagtagaactgcttttggcggcgaccgtcacacactgtcctcagcccactgcacctggggaagcccctcgtgcagcccctccttagcacatccagtcccagcgtggcccttggcgcgcagcagcaggcgaactcccagaaggtggtggtgggcactgtgagaacgtggcctgccctcactggccagtggccacaggaaccccgggcctgagtggaggctgagtctgaaataaactctgtcgtctga

SEQ ID NO: 667367 - DNA, 1504 bp, Homo sapiens
  misc_feature (71)..(71): n is a, c, g, or t
  misc_feature (73)..(74): n is a, c, g, or t
  misc_feature (79)..(80): n is a, c, g, or t
ttaactttaaccttcttaaatatttggagatgaatgataattgtaatatttgtttgcattaccttgctctncnncaccnncagccaccagcagggggtgtggccgtggcagccatagccctgattctcggtgtggccttcctggtccggaaaaaataatacctgggggccaggcggggggcacggagccacttcctgtacagacccgaggaagccagtgcatgcagagttcacccttacctattcgtacacacgcacattcattacacacctacatacgcccccaacacacgcgcacggtgaagaggacgcccgagcccacccctgctgacccaggacttccccaacctccagggcagaaagagcccaggctccggggtccacagcacaggatgtggggcgagggcacagctggggaacggcaagaaaggaatggaccctgtgtgtggcccccccacccctggcggctgggtgatcctgggcccccagggctggtctgagtgcaggtgggggtgccgggatgggttgggcctgggcccggccctcgtggggacattaaagggcgcggtggctccactcgccccatttctgctctttgcgtaccccccgggggtctgcctgggcgaatgcagtgggacggacctggggtgggcactcacctcagcagagcctcaatgccacctccccacaccacccaagcctagctgggtgggaagacggagccctgaagcctgcgtgtggagggggtgctgcccaagggtcgccttccccagcttgtgctccaggggagccccgacgccggcggggaggcagggatgtcgagggcccctcacagctgtgcccgccctgccccgctagactgcccctccagcttgcacccagcaccacctgagtctaaccagcgtataatgcaataacaggtagagtagaactgcttttggcggcgaccgtcacacactgtcctcagcccactgcacctggggaagcccctcgtgcagcccctccttagcacatccagtcccagcgtggcccttggcgcgcagcagcaggcgaactcccagaaggtggtggtgggcactgtgagaacgtggcctgccctcactggccagtggccacaggaaccccgggcctgagtggaggctgagtctgaaataaactctgtcgtctgaagaaaaaaaaaaaaaaaaacaacacaaagaaaaaacaaaacaaaaaaacaacaagaggggggcgcgcgagcaaaaaactccccaggggggccgcccacagattagtagcggcgcacctgccgattgttttttttttgaacaaacaaggcgggccccccaataggtagcggcgtcgttttgtaactccactttgcacccgggcgcgcctgctgtttataacaacgctgtgtcacgagtcgtcgtagaaacaatcttcacaggtagaagcgttatggggcgacaaagcaccccatcatctgggggggccggacgaacattggtggcgaactcactctg

SEQ ID NO: 667368 - DNA, 1275 bp, Homo sapiens
  misc_feature (234)..(234): n is a, c, g, or t
gcaacagttccaaacaataacgatcactgtagctgggtgctcgcgacaacgcttgcctactgcgcgctgctgcctatcagcacttcctgcggaaagctctcctggcctgcactgaaccttgctcctcgctgcgcactgcttctcgcgacacgataacgccttaccacggacgaaactgactgcgactcctgccacgccactgcgcgcacgccctctacttctcctctcagcacnacccctacaccacacttgctgcgccacgactacacacgactctatctcctgctgcacccgcccaaattctcctcacacgcactctgctacgctgcgctacaccttgccacgcgcacgctcccgctccacgcccaaacgcacacggcgcgcacgcacgcctcgcggccctccaacactccttgggctgcccacgcacgccacacacctgctctcacactcgctcctttccacacactctccaccttccactctccccctccaccaaactccggctccacacgggctaaccaagtgtccactttgcacctgtggccactccacctacaactctgcctggcgcctctcttcccaaaagcccccacgcctgcgcaaccactttttcctccttaccgcctaactgctgtaccccctggcgcacacaacctaaacgccctgcgccacctttaccccgctaaaacacacaccccggccgcttgccactctggcgccaacgcctgcgcaccttgctaacacttccttgggcgccacttctcccttcgacccttcacgcgcaactctctcccggcccttactcccccttctccactggcggcgccctttgtcacacaacagccaccctctctggcgggcgccaccttctcccagttctcccccccatggcgccaggcccgttgggctcccccttggcgcccaacgtggcgcgcactcctccctcggcgccgcgcgcgccaacaccccacatcttggcgcgccccgcaaccccctttcctcaacgccgcccttggcgctcggcgcccctcttcggccctcgccttggccgccaccgtgcttgtgcggcgcctgctggcatttgcgacacaccgcttgggcctgtgcggccccagcccgccgcgcctttggcgcttctccctctcccctttccccccttcccccccacaggtcccggcacccaccctttctccgcccgcgccttttctccccgccgtcaacacacgatctctgcgccgcgcggaacaccccccttcggccgcccccacacac

SEQ ID NO: 667369 - DNA, 327 bp, Homo sapiens
gatcggctcggtaccagtctcaaaggctagctgcgagcatggtagagtcaggctgaggtctccaggaagagctagtcctattgttttcacgcgaacattcgcggcctcctcagtgggcacttcccgggcctggctgaggtcacttttgttacccagcgagcatgacgacgatcgtggcttcagcatggtcatagagctccttcagtccatcgctccaccacagcataggtctggtgcttggttaggtcaaacaccaggagggcccccactgcaccacgatagtacctgggtgggaatgagaaggatggacagagatgcgatcagagg

SEQ ID NO: 667370 - DNA, 729 bp, Homo sapiens
  misc_feature (128)..(128): n is a, c, g, or t
  misc_feature (142)..(142): n is a, c, g, or t
  misc_feature (154)..(154): n is a, c, g, or t
  misc_feature (192)..(192): n is a, c, g, or t
  misc_feature (239)..(239): n is a, c, g, or t
  misc_feature (244)..(244): n is a, c, g, or t
  misc_feature (499)..(499): n is a, c, g, or t
taggcgtttatatcatatccgctatttgagacatctcgctgcacgtacaattacccatcgatgcggggctcgacatgtgctttataggagtcgtgagtggagtccagtatagaggtatctttactatnacagctattgtgtnagctactcatantcaagttgttggctcaggagtttgatagattcttgggncagtgcagagtgagtcagtagacatgtttagtcgagcctagggtgtngtgantgtaaataccctgcgatgagtaggggaagggagcctactagggtgtagaataggaagtatgtgcctgcgttcaggcgttctgactggttgcctcatcgggtgatgatagccaaggtggggataagtgtggtttcgaagaagatataaaatatgattagttctgtggctgtgaatgttataattaaggagatttgtagggagattagtatcagcagcaggtagcagttttttcgtgcatagtggttcactggcatnagtggcgttggcttgcccttgcattgtgcacgggtcaggcagtccaggtcagttagtcattcaggcaggggggttgttcagggggtcggcaggcaaaaggttggggcacagctaaatcaggttgttgttgcatttggttaaaccaatcagtagacgggcatgcatgctaatacattcaggctgtgggtggtagtgttgcaatcaaattctgtgtccttaggccagtcatg

SEQ ID NO: 667371 - DNA, 677 bp, Homo sapiens
  misc_feature (76)..(76): n is a, c, g, or t
  misc_feature (90)..(90): n is a, c, g, or t
  misc_feature (102)..(102): n is a, c, g, or t
  misc_feature (140)..(140): n is a, c, g, or t
  misc_feature (187)..(187): n is a, c, g, or t
  misc_feature (192)..(192): n is a, c, g, or t
  misc_feature (447)..(447): n is a, c, g, or t
tattatgggggctgctgaacatgggcatgctagtggtgtcataagatggatttcgtcgggaggtatctttactatnacagctattgtgtnagctactcatantcaagttgttggctcaggagtttgatagattcttgggncagtgcagagtgagtcagtagacatgtttagtcgagcctagggtgtngtgantgtaaataccctgcgatgagtaggggaagggagcctactagggtgtagaataggaagtatgtgcctgcgttcaggcgttctgactggttgcctcatcgggtgatgatagccaaggtggggataagtgtggtttcgaagaagatataaaatatgattagttctgtggctgtgaatgttataattaaggagatttgtagggagattagtatcagcagcaggtagcagttttttcgtgcatagtggttcactggcatnagtggcgttggcttgcccttgcattgtgcacgggtcaggcagtccaggtcagttagtcattcaggcaggggggttgttcagggggtcggcaggcaaaaggttggggcacagctaaatcaggttgttgttgcatttggttaaaccaatcagtagacgggcatgcatgctaatacattcaggctgtgggtggtagtgttgcaatcaaattctgtgtccttaggccagtcatg

SEQ ID NO: 667372 - DNA, 1136 bp, Homo sapiens
tggaggctgagatgtgtgttctgcgcgtgtgcttggacggctgtctgtaaactccgcggtcagttcccggactggtggctggtctgcagtgattgacctgcgcaatgcagagtgctgcaggtagtgctggtgccacctgaggggtcctggcctgattcctggctggatgcctgcaggcctgcgccttgccttgatgctgtgtgcccctgcatggcctctgtgcctgctggacggtggtaggttggttgcactgtggctgtgctgcactggcccatcttgcctggtgctggtgcctgcggtgctgtgctttcaatgtgagcaccgacccccttgacgatgctttctcttcgtgcatgtcagttgacctgctggtttctcgaagggaacgtgaaatactgagtgcctgtgaaacatgcttggggggaccatcttgtggctcgcgacacatgttgcttgccagcccttgggggcccgtggggccaaatccttgggcccctgagagtctgccccactgtttctcttgaacgttgaccattcccctgtgagagaacttgttgccatttttggttccaacttgggtcaactgtaatagaaccgatgtaggtttacgtggtccggtgggggctttaccagtggtggcaaacagttgggtgccccaaatgcccaagataaagctcagtatgggttgtagcaattttcaagcgaacagccacttggcgcgagttcctttaacgttcagacggcgctttgggcggcacgttagtagccccatatggttaggccggcgcgatcgcgcgaagcggtccccaacgctgaggtatcaccccctgttgtcgcgcgctttacgaaccccacagcaaacggggggggaagagcccccccccccttgtgggggagaacgccaacgtttaacgtttataacccctttaatcgcgggcggccgtggcccttctgtggcaactgtgggtggtgtgcgcaacaaccgtggtcggtgcctgtaacaagcgtgtgtgccccacagggaaaggcaagaagctttgggagccccgccttgtgcaactcctttgtcccgcctaacaattggggcgcggggacaacttatgagacccacccctaccctgttggtaactgtgaac

SEQ ID NO: 667373 - DNA, 94 bp, Homo sapiens
aatgtgggaaatggcttggggaggatggcccctagcttaggaaaactgttgtgttatttgttcaatttcaaaaaaatgatttgtaggtcccgca

SEQ ID NO: 667374 - DNA, 886 bp, Homo sapiens
  misc_feature (455)..(455): n is a, c, g, or t
gcactcgtcagttcggtatgggcgcggagacgcttctggaaagaacgccgcagatggctgcgcagggagagccccaggtccatgttcaaacttgtattgggttggtgatggtggtccctggaatagcccgaccttcgttgaaatcgtcattagactggtgaatttgagaagagagtatgtaagccatccgttgtgggtgctgcgagagttcaatccccttatgtgtttccacagctcatagcatgatgagaacctattgaaccttcaatgggattggtgacatcgagtcgcgtggcaggacgacaatttctggtgggatctagagaagaatggcttattcactccaaggccccatatgctgccatcatatagtgttctgatgtatacattcgaagagattacattacaagtaatgtgcctataactgtgtcgatagagattcttggtacgatggngttgttgataaacattccccattgtgtttgtagttggacatactaaagtgtgatagttaacgcgacagggagcggtgaagtgctgagtactgccatcttgtctgtccatccgaacatgtaaatgcaattcttacagctacttactagctttcttcttgtgcttaacgtgacatcttagcaaccttatggagtaaggccgctatcacatcgtggactgtggctacggtaatgctgcatctgggaggacgctcgtgacactttggagattgtgttcgcccattgtcctgtcatcttgcagcgcctcagacatcaagtgggtgatgagatcctcagacgtttggcaagcacaccgtattgaggcacggaacttaaaaggttgctccggacaaagtgcttctcccgggatgagcgctggatgacctgggagacag

SEQ ID NO: 667375 - DNA, 434 bp, Homo sapiens
tcatcttctgaatccaccaaaaaaaaaaaaaataaaaaaaggcaaaaagcccacgcttgggggcccatgcctgtggccccaccttatttgtaaggctgaggcaggaggtttgcttgaaaacgggatttaaaaattgcagggacctatgatggccctacttgccccccacccggggttgacagagtgacactcttattcttctttttaaaaatttaaaaaccaaagtatatttagtgtgaacattcatggaaagaaagagaacgcaagacaaaccttcagggagaggaaaatcgaagtgggttgatttcacccgtggacttaagtggacacagcttattcttgttacgttactaggcgtttacaaagttgttttcaaaagcagttgtctttaacccaacactttttttgaggctctcctctgtgtcctgtgatag

SEQ ID NO: 667376 - DNA, 220 bp, Homo sapiens
gtacagatctagtgcatagactctctcatccactagctaggtgaccagactgactccatgggagctgtgatatgactgaaccatctctgtggtatccgctagatctcactaagtaagacggaccctacaccagaatagatagcaactgtagcgatctattaagattagatctatagtcgctatcatcctatgaggtataagattgggaaagaaaggggcc

SEQ ID NO: 667377 - DNA, 412 bp, Homo sapiens
ggagccccattcataacacatcagatctcatgagactaagtcactaccgcgagaacagtatgtggggaaccatccccatgattcagttatctgcacccggacccacccttaacacgtggtaattattacaatgcaaggtgcgatttgggtgggacccatccaaagtatgtcagtatgttttgacttcttgcttgattgctaggttgcatagaggacaaacatggaaattagtgaagtaccttaatatctggcttcagatcttagacaggatcagagggccagctcaaatttgcaaggaggggaggtagatcccaccattttatgagtgaatggcaaaatcaaacagaaattatgtgggatgggagatactgatgcagccatctttggaaacattctacggcttcgtcggtca

SEQ ID NO: 667378 - DNA, 119 bp, Homo sapiens
aggtagatgagctggtccgtttagttgtgcaggtgagtgagtgggcaatcaaagcttgctgagcttgaactctgggctcaagcaatcctcttacctcaggaactaggactccaggagaa

SEQ ID NO: 667379 - DNA, 774 bp, Homo sapiens
agaaaaaaaaatgccaaaattcatttggaactaaaaaagagtctgcaaagccaaagcaaaactaagcaaaaagaaccaatctagaggcatcacattacccaacttcaaactatattacaaggctatagtcaccaaaacagcatggttctcgtataaaaataggcacatgaccaatgggacagagtagagaagctagaaataaagccaaatacttaaaagccaactgatcttcaacaaagtaaacaaaaacaaagtaagaaaattacaccctatacaacaaatagtgctgggataattggcaagccacatgtagaagaataaaactggatccttatctctcaccttatacaaaaatcaacacaagatggatcaaagacttaaatctaaggtctgaaaccataaacattctagaagataacattggaaaatgcttctacacattggcttaggcaaagagtttatgaccaagaacccaaaagcaaatgcaacagaaacaaagataaatagacgggacttaattaaactaaaggcctcctgcacagcatagggaataatcagcagagtaaacagatcacccacagagtggggagaaaaattttcacaaactgcatctgacaaaaggactaatgtccccgaatctacgggaactctgatcaggcagaaaaaataatctcatccaaaagtgtggccagggctgaatagaccattctccaaagagatttaccaatggcacaaaccttgaaaatgccactcctattccgggatggacaaacc

SEQ ID NO: 667380 - DNA, 687 bp, Homo sapiens
  misc_feature (510)..(510): n is a, c, g, or t
  misc_feature (513)..(513): n is a, c, g, or t
  misc_feature (601)..(601): n is a, c, g, or t
gcctatcataatattggcaatttatagagatttttatgagcaaggtaatgaccatctgaaatgatcaccttgacttctcctgatccttcaattcttttagcttattgttatgaggcaaaagctatgaaatatcttatcctgagaggcacataaatcatcagtagagagatcatagcagagttctgactgaagcagcactgccatccacgttcagtggtgacagatcctgtgggggcatcatgaagacacaccctctctgctggtcatgtggacagaacttgtgcctttgctccgccatgcatttgactgcctctagcatcctcggatggcatgatgcccaccattccatcatctctgctgatcttatgctgtgctccacagcacaagcacctgtggttggaacatgtctgcctgctagatgcactccttgttgtacataataattacccaatgaattcagatttctggccccagcagttctctttcaaatagtttctgtctgtcccacantanataagattgacgcccacccaccatatttgattttccatcagaatccaggtttaagttgctcgtcatcagcaggacccctcacacttgnttaggtatattcttggcctgggcactgttgacttacacctacaattcccagcacttttggaaggcttacgtgggcatattcggtcg

SEQ ID NO: 667381 - DNA, 260 bp, Homo sapiens
gaggaagaagaagggagagagagaggggagggaaggaaggcgaagaagggggaggagggaagggggagagaaggagggaaagggaggggaagagagagaaggaagagaagaggaaaaggaggaaggaagggcagggagagagggggggaggagaggggagaggaggaggggaacgcgaggtggatgtagagatagctatatatatatatatatatatatatatatatatatatatatatatataactccgcgtggagaag

SEQ ID NO: 667382 - DNA, 356 bp, Homo sapiens
  misc_feature (179)..(179): n is a, c, g, or t
catcagtttctcaggatgatccccaagaacgttatggggtccctgttgccataggttctctttggggcctaatgactccttttcccaaaatccgcttttacttttgggacccggttgcttcggtgaaatgaaggtgccccgcatccagaaaaacgcccttctgggccccaaccgggggnttcctcagccccccggctttgcaggatcagggctcgggcaggccccccggaaattaaaaatttgcagggagcccccctgccttccgtcggctgtgaatccttgtctgtcagggggggatcccccaaatccccgaattcatacagatcgttttaataaatggccctccttaaagtcca

SEQ ID NO: 667383 - DNA, 379 bp, Homo sapiens
tgtgtgactagaacacctgcatgaaactgagctgcgtctattgaatagagatacagtactagcaatgagctataacatcatattcctatctacccttaaagtaacacttgaaatatcaaaaatcatgattatctatatcgttgggatctttctgtcttctgggtaccatttatttaaatgtttaacaatatgttagacatggatagtacagttcataaccaatgacttggggcatgctgcaaacacttactgtcgttgggatttcgagtgtattagtcacgcatgtatggggaagtcgtctcgggtatgctgttgtgaaatcgcaactgtcaacgtcgctggttagtgtgttggttagtaggcctagtatgcggcgcgt

SEQ ID NO: 667384 - DNA, 775 bp, Homo sapiens
  misc_feature (10)..(10): n is a, c, g, or t
  misc_feature (248)..(248): n is a, c, g, or t
  misc_feature (260)..(261): n is a, c, g, or t
  misc_feature (263)..(263): n is a, c, g, or t
  misc_feature (270)..(273): n is a, c, g, or t
  misc_feature (279)..(279): n is a, c, g, or t
  misc_feature (283)..(284): n is a, c, g, or t
  misc_feature (289)..(290): n is a, c, g, or t
  misc_feature (330)..(330): n is a, c, g, or t
  misc_feature (333)..(335): n is a, c, g, or t
  misc_feature (354)..(354): n is a, c, g, or t
  misc_feature (358)..(358): n is a, c, g, or t
  misc_feature (365)..(365): n is a, c, g, or t
  misc_feature (379)..(379): n is a, c, g, or t
  misc_feature (388)..(389): n is a, c, g, or t
  misc_feature (432)..(432): n is a, c, g, or t
  misc_feature (440)..(440): n is a, c, g, or t
  misc_feature (450)..(450): n is a, c, g, or t
  misc_feature (459)..(459): n is a, c, g, or t
  misc_feature (476)..(476): n is a, c, g, or t
  misc_feature (557)..(557): n is a, c, g, or t
  misc_feature (621)..(621): n is a, c, g, or t
  misc_feature (676)..(676): n is a, c, g, or t
  misc_feature (693)..(693): n is a, c, g, or t
  misc_feature (698)..(698): n is a, c, g, or t
  misc_feature (715)..(715): n is a, c, g, or t
  misc_feature (769)..(769): n is a, c, g, or t
tctccagggngtccctgcagggatctcactacctctcagctgtgttgcttcactatttgagaatcaagttctttcccaggcgaatgagaatcccaattggcctaaactgtttccagatcccccgaggctcctgggtctccacgcagcttgggtgcgacttccctggatcccgtcacttgcccacacagaagtcctggaagatgatgtccaggatctcctcggtaccccctccacctgggagcgggggnaggggagccggnngnatttgtnnnntttttnttgnnagggnnaggtcttttgactgcttgtagtggccgagggcatccaggnaannntggaggtggtgctggtgcnttgntcgggtnagcagggggggatntgtggacgnnttcccacacactgcagctagctccttcctcagcgcctccaggngggcgtcnagcccctctnccgtcaganaggacagaagcaggtgngggggcaggtcagggccgggacctgggcctccggggacagcaggtccgacttgttcagcaccaggtggaggcgctggctgntgttactggggctctgggctcccaaagaggctacgacggtggccaggaagttgcaacttgttgnagaggccaggtcagaagcatccagcatggccagaatgaggtcagcctgctctagnctctcccgggcgcgcgnatgcnctcctgctccacgggcnccacgcctcccgcaaccagccgtgtcgctcagcagcacaggaaatccggcgagntcgact

SEQ ID NO: 667385 - DNA, 186 bp, Homo sapiens
ttgtccggaggccagccttttcctttttgttgcttttccggatttttaaattgtgactcggtttttgttatggttgtaaaaaaaattccttggccttgttagcctttggcctttttattttgtttaaattttgcttggatttttttgttttttcccaacctttcccattaattaattgaattttta

SEQ ID NO: 667386 - DNA, 1050 bp, Homo sapiens
  misc_feature (585)..(585): n is a, c, g, or t
tatttggggtgacaaaatctaggggactgaacgttgtttaaacccagaggtatggtatatgtttaggttattggtatatattcccgttaaaggtcgtccaaccattgtctcaccattcaattttggaagttgctggtctacggaacggtatgttaactgcaattattattatcgatgtaaaagatagttggagagaagtttttaagaatttaagacacttttcacgagttaagcttctattgaaaagttgcacgttggtttgtcacgacgtaaaaaaggagggattcatacgcgttattgagtaaccttggataactcgggctcatatcatgatctagagaggacttatagtgggtttccaggctcacactgtgtgtaatataattgttctcccttgtataaaccttatcactgagttataaatttctcatatgggaatagaatctcttgtaagcattacccacagatgtttcacaataggttgaaaagagtattgaaagtgtcaaggttgtaatatactttattctgtgaaaccactctcgagtgcacgagaatattcacttgtactcgtgataagaagatgtngctcttgtcctcgattcacacgtgtctcgagaacttgtcagccttagattgccttagaagaaactatttttctaatgagacttaaactctttataccacagtgtttaattttataagctgtgtttctttgaatagacaagggcacactgagaaaatatgagagtaaatgaatatatgtaaggaagataaaggggagattggtgtgtggtgcttttctccaataaaagagtagcaagcttgcctagaaattttcttgagatctcaaaaatagagcttaagattgtggacctctttacgagttccggtggttgaggctctgggttggtgattactgtgccataaaagataatggcttaaacattaagcattagtcgtgctcttcatgattaatatggcagagattttgttaactataattaaaacttaccgatatattggactttgcaataaaaaaaataatataaa

SEQ ID NO: 667387 - DNA, 330 bp, Homo sapiens
aggaaggaagcacgtggaggagggacggaggaggttcccttgctgggcatgcttcgtagagggccagccgcagcaggtcatgtgcacattccgttgcagcacagtttgtgcttccggtagccgtggcttttcattgtgcacagtcccaggtcccagctcccctcttatggtttctgtcataatgtgcttcatctgattgcctccaatcatccggatatgtcacccgcagctttctcgtgggaaccaatatgtacatgtttgcaattatgctgtgagcctttaaatgtgttaggtggttaatgctattggcagggaataataataaaaaaa

SEQ ID NO: 667388 - DNA, 132 bp, Homo sapiens
  misc_feature (51)..(51): n is a, c, g, or t
  misc_feature (76)..(76): n is a, c, g, or t
  misc_feature (110)..(110): n is a, c, g, or t
agccgggtcccaagcctgtgcctgagcctgagcctgagcctgagcccgagncggagccggtcgcgggggctccggnatgtgggaccgctgggcccaggactggcgacccntgtgggaggccttcttcggctt

SEQ ID NO: 667389 - DNA, 156 bp, Homo sapiens
ggtaccccaaggcaacggcgaattcacgccgtatgccggcacggtggtggacctgaacgacaatttctcggcctatgcgagctacacccgcatcttcattccgcgatcggaacgcgattcgtcgaacgcgctgttgccgccgcagaccggcaagaa

SEQ ID NO: 667390 - DNA, 414 bp, Homo sapiens
atttaatgcaatatgagtgttgaaaataatacagaaacagtctgcagagtcacgcgatttaccaaattcacactagcatgagtgcacattttcccttctgtgtatcaccttctgctcagtttaccctaacgcagtttataaagtttatgaccattttggaagactggctgataacattttactgacttgggctttgaggaaattattttcaagagaaattaaatcacgactcatagtacaccaataccaaacaaaagcttttttttttttcactttgttccacagttgtcttaaatggcaaaaattgcgggaaagtctattcacacttgaccatgagtgtagagttgcttttccttcctctgaggccaagatttacttatatccgtgaccgtgaagaactcttttggacctgtt

SEQ ID NO: 667391 - DNA, 238 bp, Homo sapiens
gtgggttgaccgtggcttgtgcgttgaccgtggcttggctcgagacatactctccagacaaggatcgtacatggcttgcagcatcctgcctagatagaggcgctctccatgggctgggttgctgcacttggcaggcagtgagtgccagcaggttcttagctcttgaaagctcttccgggaggaggaggtggtggagacaaattagaggctggagctgatacccccgccactgccaaag

SEQ ID NO: 667392 - DNA, 483 bp, Homo sapiens
  misc_feature (211)..(211): n is a, c, g, or t
ctgcaaacaattgtccagcaccacttagaaccaacaacatttgaagattttgcagcacaggttttttctccagctccctaccaccatttaccatctgatgccgatcattaaatatcagttctgtttatctgaaggctcctacccagagattctacccagtgaaactcccacagcaacgcaaaaggggggggggtttaaaaaaaattggggnctgacctggcctctccaatgtctcctcgaactagcaaaagccgcatgtccatgaagctgcgtcgttcctctggctcagccaataaatcctaaggagacaagcagcccagcagtgatcagcagtagccaccttagcacgaacatagggttaaccctttcaggccttcatgtctgccataacatgcatgtttcttcctgtacatttatttgagaaaacactggatttaaataattttaaataatttgtagcttaatattaaagatttaagttat

SEQ ID NO: 667393 - DNA, 110 bp, Homo sapiens
ctacagagacctcctacacttatgacagaaacaagtgctacacacctgtggtcccactcgtttattggaaggggggcccaaatgggggaaacaggcttaaccccagatcg

SEQ ID NO: 667394 - DNA, 240 bp, Homo sapiens
  misc_feature (129)..(130): n is a, c, g, or t
cttggcgatccacgtttattgaagtggatgtaggaggccgtcacaaatcaaatgtgagcatagaagatatggccaaacataaaatctatcaaattccatagaaacatttccctccacttataaataagnnactttgtgaaaaaaaaccccccaccaaaaaacccccttctttttttttctccccccccaccccacacctttttttttaaaaggggcgcccataagggggggggggggggg

SEQ ID NO: 667395 - DNA, 320 bp, Homo sapiens
cacatctcaaagaacatggaatagcaggtgcaaaggccctgagatgggagtgtgcctgagctgtgagagaagtgttgagcagaccagtgtgcctggtgtgagagggtgcaggagactggcaggagattaggtcaaagcagaagtaacctgctgaaatgactttggctttaaccctggggatgatgagaagcccgtggagtgttttcaacagaggaaggatatgatttgacttatgtttactagaatttctctggctgacagggtatgtgaggggcagcggaagaagtggctagaccagagaggaggtccttgtgataatc

SEQ ID NO: 667396 - DNA, 162 bp, Homo sapiens
  misc_feature (66)..(66): n is a, c, g, or t
  misc_feature (108)..(108): n is a, c, g, or t
  misc_feature (139)..(139): n is a, c, g, or t
  misc_feature (152)..(152): n is a, c, g, or t
tcacaggaacacctgcaaactggaagagaactcagtggtacttatgggccagggcaatggcgacanagacaccactgagttctcttccagtttgcaggtgttcctgtnaccctgaacaccctccttctgcacatggggncttgggcttgggncctttgaggg

SEQ ID NO: 667397 - DNA, 180 bp, Homo sapiens
atgtggcaacgtgcggctcgtggtgtgagtgccactagctgcctccgtggtttggtcacgtgtgcatcgcacgtgctgtaaatgtggcagcgcagcctgcgccaggctttttatttatgtaaatagtttttgtacccaacgagggagttctggtctcctatgcaatattactcagctttt

SEQ ID NO: 667398 - DNA, 259 bp, Homo sapiens
aaaagaagtttttcttgggaaaatcccaaaaggccaaaaaaaatgggttttttttcttgctgctgaaccaaagtagggggatggataggaaaagggaactaaaagttggtccaagtagaaggccgtcttttaatggggttttttatcccaggttgccatccctattatttggttgagaaaacccaaaaatggatattgggtactccccttttaaaaaaaaggtaataattttagctttttaataaaaaaaaggcttgga

SEQ ID NO: 667399 - DNA, 821 bp, Homo sapiens
gttagccaggtggcaatgaaaggatgttttaaaagttgaacttgaaaaggcaaaccggaacccggaaaccccaaaaaaggcaaaaacccatcatccaaaccagagtatagccagcatggtggctcaaaactgtaatcccagcaattcgggaagttcaagttggaagattgcttgagcacagggatttggaaccagcctgggcaacatagcagaccctatctgtaccaaaaaaaaagaaaaaaacaccagttgggagagtgtctccccctcatcattttcctgggggacagagcttaagtatgccctgacagggggattgagttaaggagatttgcatgcagcggttcattaaaatcggtggcaaggtccgaactggtataacccaccctgcgtggattcatggatgtcatcagggttttgacaacacgggagagatttccggtctgatctgtgacaccaggggtcgttttggtgtacatcgttttacacctggggagcccatgtacattttgtgcaatgtgagaaagatctttgtgggcaaaagggactccctcatggggtgactcatgatgcccgcaatatccgttaccggtgatccctcatggaggtgaatgacacccttcgagttgtttaggacactggcagattgctgttttcaagatgttcgacactggaaacctgttttatggtgactggaggtgccacctcaggaataattgttgtgatcacaagcagggagggccaccgggatctatgaggtgattccctgaaagctgcattggaacattgttgccagcggtcttccaaatttttggtattgg

SEQ ID NO: 667400 - DNA, 1007 bp, Homo sapiens
cataactctctataagcgattcctggtcttcacaaccgatctgtcctcctgacgtcgagacgtagatttattgcctagcttcagtccagcttaactgtcactgccatctagtgctcatcacatatcctaatagctgccttccaccgtagcatatacaggcgacggagagacctgtcaatagttgaatcgtgcatcagtgatacatctaactacccaaatacctgatcgcgatctggcaatactgcatcctgtgttgaggaccatgtagttagctgcgaaaaatagagctttcatcgtcgcgctcgatgtggtacatactcccttgtggaggttgagttgacaagatgatatactgacatttagaatctcgcacagtaacaccgaatagacttgggagataatatctgatggtcgaatgaaagtactggagccggataaaggcacgtgtactgtcccctgcctggctcgtcttcttgtgcttctcagttacgttatatgggccttcccatggatcagggagctccatatgcttcgctctgcgcactcttcacttatgtcttgtcgactgggtgtgggcttgcctatcacggtataggagattactgcccattccgataaaaatcccttccacccttactaattcgtcagacgcccctcggattacttttcttccttcttctcctggagtgacattaccctattctcaccagacctcctagggacccgacaagtatcctaggccaacccttaagtgccctccaataagccgacggtgttcctattcgctacgcaaactcagatcgtccctagaaaatagagggtctgcccgatactatcatctcatctaatacccggcgcggttgatttatcaaaagttatggcccagacacttgtactcgggaccccttaccggagggaacagaccttcactggagacggataacctcatatctcttgaatgggcaaaaaaaggcccgcttgcggtgtattgttcgtctgcctccatc

SEQ ID NO: 667401 - DNA, 773 bp, Homo sapiens
tccggggaacttccagtattatcttcacaatttttatgtaaatctaaaactattctaaataaaagactatttcaaaaatataatatcaagcatataaaaaaatgaacaaaaaactttgagctgcctttccaaatgtcatctccccttttggggtttatgatatttcttttgtacgaagtacatgtttactttaatgacttggaatataataaataataacagcaaaagttagcatttactgagtacctgctgtatgctatttatatctgttaactctactagcacagctctaatataaccctgatgataacaacagttgaggcaacaaggaacggacaacaagggttcacccatatctggttttcctctccttcctggacacatgggccatgactagttctaatgacatgttaggcaaaatggaatgtgtcatgtacaggccaagacaataagagctgatataacccatccacatgttttgtctcctttggaagtgaacatggaagctataaattgaggtgtcagaaccacaagatggaagtacgttggatttttgagtcaccacctggaggagagcttccctgcagcattgctggaatttgatgtgaactagatattcattttgatcgtgttgacttgaacctaattcaggcctaagacataatatatactgcataatatatgccgtataatgataatatatttatgcagcctttattgatatgagtagtggtttatctcagttttataataaaaatctttcaaagaaaaaa

SEQ ID NO: 667402 - DNA, 140 bp, Homo sapiens
atctattcattgcaccgcagtcattgagcacaggtgcagtacacacacacaagcacacacatcacagagcacacacacaggcacagacacgcacgcaggtcacacacacgcacactgcaactacgtatgtatggttcccc

SEQ ID NO: 667403 - DNA, 913 bp, Homo sapiens
agcggcgtcacctttcctccccaccagctcctgctccccacgacactaaatctttcctactaaacttgtctctttttatccactattttatcttttgttttattctttgtattatttacttagattgtaccgggtgacatgtcgtcaagaggtcggctctggttctcgtatggtttattatccgcgcgcctctgcgggggtggggtctcggcccgttgccatgtcattgccctctgctttatacgttgtgttcttctgaaaggcgcttgtcgccgtcttcctattagtcctgccagctcctgacttgcgcccgcgatgaggcgtgaggtccgctgctccgtgcattgcgtgtcttggtactgtcgtgttagcccctcacttatgagcttgacacccacggaaggtgctttcgagtgttccggctggcaccctgaggtaatgatccagggaagaagccatccatgggggtcgcaagctttctctccttgggtgttgcccctgaaccggtgctataacttgcaccccctctcttgtcttctaggcatagcgattaagaactcccgcacgcctggtgatcgtagtgaggtacctaactttctgattaggatgacactgcagacgggatagaaggcacattcaggctttcttcgagaggacatgcgtcctgggaatagtgagaataaacgggaccacaaaaagacgtaggatagtcgcacaataagttgcgttggacgagacacggaggtaggacgatacccatgcattgatgccgcgatcattggccaagagctgctctacatttatttaagcctgttggggcaccagtgagaatgggggggggccgcatggccagtttctgcaccatgaaagccaggggggatgaatttatcgggcattgatcaatggaagggct

SEQ ID NO: 667404 - DNA, 406 bp, Homo sapiens
ccacttggaatgggtgtatttaccaaaacaatgggactataggcctcatgcaagtcggaaacgatagggcaattattaaatcttaaagtcccaaaatgatctcctttgattccacgtctcacattcaggtcatgctgatgcaagaggtgggctcccatggccttgggtagtcctgcctctgcagctttgcagggtacagtccccgtcccagctgctttcacaggctggcactgaatgtctgccgctcttccagacgcacagtgcaagctgtcagtggatctaccattctggggtctggaggatggtgggcctcttctcacagctccactaagtagtgcccagtggggactctgtgtggagactccaaccccacgtttcctttccacactgccctagcagaggttcg

SEQ ID NO: 667405 - DNA, 1003 bp, Homo sapiens
agcgggctgaggcgcgggcgcccaggcccgaggcacggcgggcgctgcctggaaggcccgtctcgcaggcccccggatccggccgttggggccttcttccttctcagggagccccagcatggagctttgggccttggttcgggaaactgggactgggccctggctgctaggctggtccctgctgctgctttttggagcatgagagttgctcttccatttatcctccagttaccgcgcgcttttggtgccccgggactcaaaactgtggactccttttgcttagtttgtgaacatgagaagcctagactcttgccttccgataatacatgttcattttaatgaaccacttggtcgatacgcgtgaaagacaccacagaagtcttcatgggcatatacgttgatacatttaatcatttaattcctactgaacacttagatgatgccctaatttctaggatccaacctggacgaaatgaagtctggtgaggatttcagtgcaagtcacacaatggtcttagaggactcgttgaagaacattgcttcagcgataaggatcctattgctaggatctggcagtaaccagttctggtttgcctggttgggatagcaatgatcccaatttccaggatgccttgttcaaccagttgttgggtcttgacgatataatggatgaacggacgtggtcacaacgaacacgtggccaatgaatacccatttgattgccggaagcaactggactattgaccttaaacagcgaactttaaaggaccacagctacgcaacgacaccttcagctgaagatttctccaagaaaaaactcaccctcgtttacaggggcgaccacgcacacccagtaacgaaacgttttgggaacacgagcgcactacttgggccacggtttcaaaatgccggcaccattaagatacacccaaaaaggctttggcgaagccgggatctaatggtaaacgcacggtgaccaccacacaaggctccgttaagcacg

SEQ ID NO: 667406 - DNA, 146 bp, Homo sapiens
gccaaacggcgccagggtaataggaatctgcagaataacggcttagaggagggtgggcaggattggagaggaatggagagacatgtcacctcatatagaaacgcgtccaaatgtacaagctaagcagtggggaaaggaggaggggc

SEQ ID NO: 667407 - DNA, 678 bp, Homo sapiens
taaggtttgagggggaatgctggaaattgtaatggggtttggaaacttgtcatataagtaatgctagggtgatgtggtaggaagtttttccataggaggttgtatgatgttgggccgtagccggaaccgggggtatgctggtccagaattcataaaaaccaggggagtgttaaaatgtaaggtgtcctgggtggacacaaattattgttggtgtgtagatgtccacggggaggatgtggcgtcattattgttggtgccctcaggaagtattggtaatgtggggtggaggtgtgtgttaattatatatataaatgcgtgtgggggttatcccggtcttatgaaagaaataaggggcgaagggggcctcgcgggggtaaatccgatggttggaaaccctggagaactaagttcggaacttcccccttcggacagaggcctcccaagggggggctctcggggtgggctcctcggccctagcggtggtgggaagatttaaacttcacgtcttttatgtgcgccccgggggtctcctagtgtagtgcgcaggggaggtcatctccagaaggggtggtcccctgtgagtggtgtgggcacaacccggggggtggcaaacggttttacagggggcgccccccttactttcgcaaatggtgcgactagttaccacatgactggcca

SEQ ID NO: 667408 - DNA, 125 bp, Homo sapiens
ccaagattgtgccactgcactccagcctggggaaaagagcgggactctgtctcaaacaaacaaaaattaaaaagaaaagaaaaaaaggctgtttaagtgcaaaatgcggcaatgacttgtctagg

SEQ ID NO: 667409 - DNA, 222 bp, Homo sapiens
gtaacaggtacattataagcacattaacataactacactgtgctataaaacagtaatgcccttagggactaaggtatacatgctatcaacttacagtcaaaactcccagagcacgaggagtggtggctcacgcctgtaatcccagcactttgaggaggcctaggcaggctagatcatcatgaggtcagcgagttcacagaccggccatggacaatactggca

SEQ ID NO: 667410 - DNA, 430 bp, Homo sapiens
  misc_feature (12)..(12): n is a, c, g, or t
tgaaatttattnatccattttccctgtgaaaaaagaaaaagaggttttgccctaacccctttcagagcatttgggaacaccagcccagaagtgcattaaatgtatatattaaacttgggcaatgttgacactttaggatgctgaagcccaggtgtagtggcacacgcctgtaatcctagcactttgagaggccaagctgggaatcatcagaggtcaaaagttcaagaccagcctgttcaacacggtgaaaccctgtctctactaaaaatagaaaaactagctcggcatgatggcgtgcacctgtagtcccagctactcaggaggctgaggtgggagaatcactttaaccagtggggcagaggttgaactgagccaagattaggccactgcactccagcctgggcaatagagtgagctctgtcttaaaaat

SEQ ID NO: 667411 - DNA, 133 bp, Homo sapiens
agtactatggtccttagtataaccttgctgcttcgaatcacctagatcttcaagcctagaatctgcctcagctgcttacattttgagtgaaatatgtcgagataaacatgatgcctacggtatccttattata

SEQ ID NO: 667412 - DNA, 283 bp, Homo sapiens
  misc_feature (15)..(15): n is a, c, g, or t
  misc_feature (21)..(21): n is a, c, g, or t
  misc_feature (36)..(36): n is a, c, g, or t
  misc_feature (124)..(124): n is a, c, g, or t
  misc_feature (180)..(180): n is a, c, g, or t
  misc_feature (213)..(213): n is a, c, g, or t
  misc_feature (267)..(267): n is a, c, g, or t
  misc_feature (277)..(277): n is a, c, g, or t
attcccacataaaangaacangttttcccggaaagntttctattactttagcaacagtccttcaagagactgagagaattaatagtatgatacgacagagaactcctactaaaaagagaggatnttttggaagatggagtgatccctgcaaaagatttgccagaaatcattctgcttatncggcgctccaagatgtagctatgacctggtccnctgaggtagtctttgtattaactttcacaaatctgttagcagcagcttatgcantagatatggngttttc

SEQ ID NO: 667413 - DNA, 423 bp, Homo sapiens
  misc_feature (6)..(6): n is a, c, g, or t
  misc_feature (51)..(51): n is a, c, g, or t
  misc_feature (85)..(85): n is a, c, g, or t
  misc_feature (99)..(99): n is a, c, g, or t
aggagnaggtgtctttggttctttatcccaggacttcttccccccttggtncgaggcgattcttgggacggacaggaatagaatntatgcccacccacntagggaagggaaaagcccctcagcccatgttcagaaaatcaggccgggtgcatggctcacggcctatagtcccagcactttgggaggccgaggcaggaggatcacttcaggtcaggagttagagaccagcctggccaacatggcaaaaccccatctctactaaaaatacagattagtggagagtggaggtgggtgcctgtaatcccagctaactgggaggccgaggcaggagaatcacttgaacctgggaggtggaggttgcagtgagccgagactgcaccactgcactccagcctgggcgacagagtgagactctgtctcaga

SEQ ID NO: 667414 - DNA, 300 bp, Homo sapiens
tgctgcaccacagcaaccgtgtatgtacccactacccctctgatcatttcggggatgataccacaccgtccctaaaacatctaggcttccctgttccccgcagagcctttgtcacattcctgatataacccccccaacactaatcctctggctcattccaggatgatatcatccccccacacttcaacccttcctgttttcccccactactacccaggtgtctcattactggaagacaccatctctctaaacccaatgtaccctgtctcccccactactacccaggtgtctcattcctgg

SEQ ID NO: 667415 - DNA, 266 bp, Homo sapiens
ctcccgcctcagcctgctgagtagctggaattgctggcgtggtggcgggtgcctgtaatcccagctacttgggaggctgaggcgggagaatcgcttgaacccggaaggtggttttattgttttcgaggcatgaccctgggggcttgtggcaagggctgaggtgtttggggagcagcagtgcaggaaaggccttactcagctgggcttgcaggtatgctcactcctgtctgaggctgcttccttgtttctagcctccgtttagaatt

SEQ ID NO: 667416 - DNA, 954 bp, Homo sapiens
gaactgggccgcgttgaaaaatgaaggcctggatttcagccacacgcagcagctgccgggaacagattacacgattgcgggcatggtggcttctcagtgcggcataccgctgtttgccccctttgaaggcaacgcctccgcctctgtctccagcttcttcccgcagaacatctgtctgggagatatcctgaaaaactcgggttatcagaactatttcgtgcagggcgcgaatctgcgttttgccggtaaagatgtgttcctgaagtcgcatggcttcgaccacttatacggctcagaagagctgaaaagcgtggtagccgacccgcactatcgcaacgactggggattctacgacgataccgttctcgatgaagcgtggaaaaagtttgaagagctttcccgctcaggtcagcgattctcactgtttaccctgacagtcgatacccatcacccggatggttttatctctcgtacctgtaaccgcaaaaaatatgattttgacggtaaaccgaatcagtcattcagcgcggtaagttgcagccaggagaacatcgcgacgtttatcaacaaaatcaaagcgtcaccgtggtttaaagataccgtcatcgtcgtctcttctgaccattagcgatgaacaacacggcgtggaaaatacctcaataagcaggatccgcaaataaacctggttttttggtcatttccgtggcgacaaagccgcagcaaagagacggctggcaggtgaaagctgtaaccacgatgggaataaccggcgccgacggtgctcgggacattctccggggggcaataactatctctcggacttggtcgtaccacggtttctccgggcaagtcgatgtcgggaatcttcctccatatccaagagcaaaacctgtgggttggagccatatttttccgcctgtgggaaattccctcaaagattagagtttccctcgc

SEQ ID NO: 667417 - DNA, 752 bp, Homo sapiens
  misc_feature (620)..(621): n is a, c, g, or t
  misc_feature (631)..(632): n is a, c, g, or t
  misc_feature (646)..(646): n is a, c, g, or t
  misc_feature (695)..(696): n is a, c, g, or t
  misc_feature (725)..(725): n is a, c, g, or t
gaagtccgccaagtacgcaagtggtggccccacgatttatcatctatatcacacttacattcacttcattcgaaactacacaccaggcacgctgtgccagatagttcatgctcgtctttgaatagaaaagtcatgtacctggcctcaactccacttgagaagagtctggccactgaagaccatcgcgaggattcatcatcatagatgtataaccaaaggacccatgtctacgtgacatgcacgccagttagtcacctcaaaactggtgctatctacacttaaaatccgaccacgaagactcttatatcagtagccctgtaaagactgactgagttggaatatcaagtcctcggacatatggcatacaaactacgcaagagagtcggtcgcttcaatatatatgtgtctttgtgagacatgtctcatcactatctcatatctcatcactcccgtgtctccacgcgagcctaatcactataactgaggaatcatattgtacatcttagcatacaagaattcaacgcctaggaggaaaatcaattgcggaggacacatttctattgcaccgtcacattctgaccatatgtccaaacctctaatacagcgagagctacgtaccnnttcaaactanngtgtcatatataangtacctatctacccggatcgccagtagacccataagttactcaattatnnttctccttgcaagagtgttggcccacaanttgtcaaagcttttaaagcatccagtc

SEQ ID NO: 667418 - DNA, 168 bp, Homo sapiens
gctgcctggttctggctgcggcgatgggcttgaatggcctggcgggcagcacgcttggtttccgaggatgagagcagcttgcggatcttcctggtctcctctgtggccattcaacgcctccgggccattcaacgcctccgggccattcaacgcctccgggccattcaa

SEQ ID NO: 667419 - DNA, 401 bp, Homo sapiens
taggtggttttatggcccccttaacaggggggatgcaaaaagcctcctgtccctttgcaaggaaggcagctacctagttggggtcagttagaccaacccccagggctggtccttgtttttcaggagcaaccagggcttcctgcattttaagtttgcgcggacccgttaaaaccaggtggtgttgggccaacccaacgggccctttcccaggggggccgagcttgtcctcccctacagtttacgccccctgccggggcagggggccgagcatttgggttttttgtaccccgtggttacgcaaaccccctgacagtgaccctcggccccctttttagtcctcggggccaaaattgttttccaaagccctcccatggcctaaaaaataaataagtttttgttta

SEQ ID NO: 667420 - DNA, 583 bp, Homo sapiens
gcacgagagatagagagagagagagagagagagagagagagagagagagagagagagagagagagagagagagtgcgagatagagccagagctatatatagacctatactctgttctgcactagcccttttcttgcccattccccatatttcaaataattttcttcttgcctcttttgctgttttctctattaattctcggaatcttttaaacctggagctccatttttttttttttttatgccttcacccacgtttttttttttttttttggacgcagcacctcattttttttttttctgttctccctgtctaaaccttcttttacccccccttggctcctgcctttttttttcttggtctctcctagcgggcctccccctcgcacggcgtttttgtgctgctgccctttctccccatggcccctttttttcccctccccttttttcccccctttttttttctccccttccagtttttcccggctctttttttccccccccttgttttgggcccggttttttttttccctctcccccttattgggtttcccctttttcctttccccccttctttgaggtggc

SEQ ID NO: 667421 - DNA, 401 bp, Homo sapiens
aggatcccctgtaggagcgctctgtgttgatgcatgtatgcccgatagggcacgtgtcactgatactcaaacactcattgatatgaggacagttgcctagagcatcttgtatacacgccactcttgcactgtagcttgggtcggcagcggaaggatcccagtgtattctgacagataaaatcggggaggcagttatgaataccactctcacactcgtcaatatctttgcagctattgtcctctgtgagctcatagccagtcccgcagctgctgtcccgctggcagcggaaagagcccactgtgttgatgcaggattctccaagccggcagctgtggctgcccgtgatgcattcattgacatcttcacaggagacaccatcagacagcagctggtagcccac

SEQ ID NO: 667422 - DNA, 116 bp, Homo sapiens
agcgacgtctgtgcgaggcgcacacgctatctgtgagcgtctagaatactacctgggactacttgtgacaggaaatgagcatcctgagaaatcacttagggtcctgtggactcagg

SEQ ID NO: 667423 - DNA, 1007 bp, Homo sapiens
acacaaacggtggagttgacatgggtggggtcggtgggtcaggagtgtagcaataggtactcagcgtggtgtgtccgtgaccgttggacatatcttgcctcgtcacactgtttttgagaccttggcatcctgtggtaggatgcccacttcttgtcgtgacgaccctcatgggtcagtgtcgaacagactcgtgttgcgaaacggtaatgtgggcagtgcgcccgtttaacgaagaacctagcgtgctgtctatcatatggtggacaggcaaagtatgagcgacgtagtttgctagcgtctattcagatgaagcgaactgaagtgaactctactcaccaatccctgagaactggagagtgcaccaccgtaggtactacatacctgggacggtctgtatccggtcgggtggcgtgttcaccgggagtgcatttgttgcactgccgacatatacttgatactcgtcgcggtagaataagctaacacaatcagtacaccatgttaaattgtgtgtccccaacagtgattcaacaaagggtttaatttgcccaattccctaagttttatccaaaacacaacgcgttgagagataattccaggcatggcggcctaggcgcccaatcggagcatagctccgtatgccaacaaggtaacttctccagttttaacactatgtggagagcaagggaataaagaaaacctgagaaaacattgggggaataacgcaggcgattaatttggggaaagaaagttcccccatatttagagcgttcgcccaccataatttctttcttaccccggcgaaaagattgtgtccaaaagcaaaattagttcacttaccccggattggagagacgacccgaggtataattatccaggggccccagttttaataacagaggggacgctggaccttattcaacacgaagaaataggttcgggcggataaacgatatggcgcatatggctttacacacactgggtatacccagaaatagcaaagatattat

SEQ ID NO: 667424 - DNA, 1092 bp, Homo sapiens
tggagttttcccaaagatttattggaagcagaaccaagtgggtgggatactgttgcgggaaaaaaaaaagcagtttaaatagtttccaaaatacctttataaaaggttttctagccacaagatttttcggtaacctagcattatgtggtaaacctttttcctaaatctggtaggagtgtcggtggctaagaactagagcttatcctatgccaaatctatctggcgctcctgaaaaacggcagaagggcacttgaaagcggttctcttaaaggatagggattcctttttaatcctggcgggtaatatatggctgcacggagtgtgtgcaatttttatccagggtcatcgtgatgctgagaagttccgtggataaccgtgtccatctctagttcacccgtctaaatcagaagtgtccttttggagtggggtatcacccagaagggagtgaatccagataagttacccctacaggttcggggcaggaacaagttgggaagaggcagagaactcctggatctcctcgccttccagagagtttccgtgtagggggaaatctcaagtgtcaggggccatattaaacattgagcaggtctgggaaatacacgaaagggtgacagagccaatttcctcctcacaatattcggaatctacatcctgaaggcggaccaaaagtagactggggaagtaaaggagtatacaaagggacaaagtactctctacacaatttcacacgcattatggggagttcaccaagggacttcaatggagttcaccatataagggggcatcccacttatcacacggtgacgagaacatgcaccggtgaactccccgggaaatcacaagagggggaacaccccgtagtatgacctgtgaggcgcagggaggcacacatgtccccgggaaggaggaacagcgcatcaagaaaggggtcaagcacacgttgagactatgggcaccaaaactatctaggcgacaccaggcaaagacgtattagagaacgaacccaaacagattgaaatatgtcagacaacgacaagacacggagcaggcggcacaccgtaatagtgacaacgatgtggaacaaatcct

SEQ ID NO: 667425 - DNA, 162 bp, Homo sapiens
cagaataagttagccacagagattcataataaaatacagcaattattgccatatactgtaataagatgcatgtgaactctcaatacatcttatagtactgtactaaaccttctagtgattatatgagcataaaatagctaaataaagtgattgttccccgct

SEQ ID NO: 667426 - DNA, 85 bp, Homo sapiens
cctgaaagaggaacgtgtggatgaagagatgcgcgaataaaggataaagaggatatgaattaaattaaaaataaaattgaagaaa

SEQ ID NO: 667427 - DNA, 277 bp, Homo sapiens
tcgctgggggctgaactgggcagatctcaatgcagagctatagcaagatttgatacaaacgtcgcacaagcagtgaggcactggtcaagaactactgggctgctctactgcttcagtgaaggacatggacaaggtcgagacattcctgcgcatggtgcagtgccgctctgtggagggcagctgtggcatctaggtgcccgaggtagcatccgtgtgatgcctcgctacagtgccctctcctggccctgaaggtggcagtccagttcgcccccagcga

SEQ ID NO: 667428 - DNA, 399 bp, Homo sapiens
cacaagggccaacacccatacctttcctagacacgccaggtgtgacagttaccttttctgactttcaggactctgagctcattgcgactatgatgcgctcctatatcaccagagttcacacagagtgatgaccaatggatccctgatattcagatatgacccaaatgggctttcatttaacccaatatcagatttttcagacacgagcttcccaaaatgtgctggacgcccctggaagtcagttagtgagaattaatccaaccacacaaatgagagaatcttattatttcgatctcactgagggcctttcttaatttaagtggctatgggtatttctttcataccttattggatcaatatccctctcttcattgtgcagatgtatcctgagattgcacc

SEQ ID NO: 667429 - DNA, 249 bp, Homo sapiens
agggtcctggagggaaggatgtggaactaccagcctctgctctcaagaagctcagatctgggcagggaacatccacataccagggctgtctgtcgggggggtggagggctgggggagggataagcattaggggaaatacctaatgtaaatgacaagttgatgggtgcagcaaaccaacatggcacatgtatacctatgtaacaaatctgcatgttgtgcacgtgtaccctagaacttaaagtataatta

SEQ ID NO: 667430 - DNA, 317 bp, Homo sapiens
catctgtttcttcgtgtgtacttggtaattagtgtctttcaaggggttttctattttctccaaggtgtcaaatgtattaacatgaagttttttagaatagtcctgcattatccttttgctgtcaatactgacgtcacctctctttcacagtatatgtaatctgtgccattataaaatgatgccttttccctggtagtatgcttggctccaaagtctatgttattttttcccccttatatttaaaatttttttggagatgaggtcttgctgcactccagcctgggccatagagccagaccttgtctcaaaaaaaaaaa

SEQ ID NO: 667431 - DNA, 759 bp, Homo sapiens
tgaccgaagctgcacttgcgcccgctccgccgcatgccgtgcccgcgccccgtgcgctctggcgggcgcgcgcccgcgtcgggaaggcaagctgacgcacccggggaaggcgatccttgcaggcggctggcgggtggcatcgagatctgcatcagcttccccaccgagtacgtgaagacgcagctgcagctgtgacgagcgctctgcacccgccgctggtaccggggcatccggggactgcgtgcggcagacggttcgcaaccatggcagtcctgggcctgtaccgcggacttagctccctgctctacggttccatccccaagtgcggcgtcacgtgttttggaatgttctgagttccatcagcaagcacatgcgggatgcccagggtacggctggacgagcacgcgtgtggcctgctgtgcggcctgggcgctggcgtgtgccgagtgccgtggtggtcgtgttgccccatggagaccatcacagtgaagttcatccaccgaacatgaactctcgcaaagcccaagtacacgaggattcttccacgggggttagggagattgtgccgggaaccaggggcttgaaggggacgtaccaggggctcacagccactgtcctgaagcagggctcgaacaggccatccgcttctatcgtcatgacgccctgtgcaactggtaccgaggggacaacgccaaaagtccatgaatcctctgatcactggggacctcggagctattgcaggcgcacccaggtctttga

SEQ ID NO: 667432 - DNA, 560 bp, Homo sapiens
  misc_feature (43)..(44): n is a, c, g, or t
  misc_feature (541)..(541): n is a, c, g, or t
ttctccaacccaggggggggggggcgccccccccccccccaannttttttatataaaaaaacacgcggggggggtgggtttttgggcccccccccggggggggggggtgtataaaaaaaataaggggtgggagggagccccccccccacaaaaaaaagggggtgggggtccccccccggggaaacacccaggggggggtttttttttttaaaaaaaaaactttgggaaaaaggggggcgccacatttttctcccccgcccggggggggaaaaaggcgccccccaagtgtttataaaagggaccaccaaagggggggccccccagggggtttttaaggcccccatcccttccccggggaaaaaaaggcccccccccccttgggggagggcctcctgaccctttcgggtccggggggggcccaatcaagaaatggtcttttgtcaaaaaaccctggcaaggttaattggctaaagtttttctttaccaggcaaaaagtaaggatgagaactgggccaaggttcagagcacgtcaagacctttnccacctcccagtgtagacc

SEQ ID NO: 667433 - DNA, 152 bp, Homo sapiens
gacccgtaattcagagggtagatctcaatgatatctcaccactaggcctggccactgtcattgcatatgcctacactggaagctcactctctccttgtatacaataggaagcattatttctgctactattatatcagatccactactctaat

SEQ ID NO: 667434 - DNA, 239 bp, Homo sapiens
cactgctgcagatagtggtgttaactgctccaactcttgtctagcttagtaactacaaatattatagcttcttgtcatatgaaggattacgaaacaaaaacaatccagaaattgatcggtttcattaggccaatcccatcccttctggctaaccagatgttacatcatgcagcatcagagatgctgttcatcagtcccacacacagatggcctagaaatcgccttctccacctcgcctt

SEQ ID NO: 667435 - DNA, 226 bp, Homo sapiens
ggtctgacagggaccagacgacatgtcgggcactggatgtctcgctgcggtttggatcacggtggacgtctggggagcagggtcgtgggtcgcccccagcctcaggcacctcgtgctcctccttgagcatctcatagttggggggctggccactgttgacaggagagaagaaggtttggacagtgtgattcatggtgtccagcgaagaccagcggcggtcgggtta

SEQ ID NO: 667436 - DNA, 388 bp, Homo sapiens
cgtaggggagatggatctggatgagagaaagtgagggagacagggtgaagaggagtgagggatgagagaaagggtgaggggatgaagaaagagcagagagagaaaaggtagggggagagagaggagaaaaagagggggagaaggcaggagggaggagataggcattagggcgagagccccctgcccgctttctgaagcgcatctctacctcgggggttaactcgtcaggcggtggctgttttttacactgtctacatctcttcctccatttaaaaacccggtgggcaccctaaagctgacttgactgtcaaactgagtggccccctgtgaaaacagaacccctcaacttctgccggcctctggagcccacaatcgaagggtaaccgga

SEQ ID NO: 667437 - DNA, 170 bp, Homo sapiens
tatcgcaagtatctaatattgtgacgatttgcggggctcgaagagaggcagagaatctccttgggagctcttgggtggcgctggtgcattctgtttcctcttgatctcaaagcacaatgtggcatttgagggaccaaaaggatccagggcacaccattccccctatagga

SEQ ID NO: 667438 - DNA, 314 bp, Homo sapiens
cacagacaagaaataagaaagaacaacaaacaaaaaaaaatccctcctttctagctggaacaaaatggtgcagttaatactgggcgctggaaaatgcagtagtgaatggtggaaccaagccggtcggtatatctgggtagctcttttctggcttggttttttcttaccagtattctgcctaacgttggcttctggtgagggttatatcgcctagcaagcacacccgggggtggtgaaaatagtatagcaaaaaagaaaaatcccgggttatggatgtactagattggtgtatgtcttttaaacagttctagttg

SEQ ID NO: 667439 - DNA, 158 bp, Homo sapiens
gctcgtggccagtggcagtgaagatagatcctccatgtcttcgtgcttcctgtggagatgctacagctagaggaggctgtgggagaggcctggactggtaccccacctccgtgttcctagaggattactctttcccctgttccacatgctgcccatgt

SEQ ID NO: 667440 - DNA, 103 bp, Homo sapiens
tccctggatctggaagccttggttagtgtctggaaagcagtgaacgagggccgtaggctgaggggcacgccagggcggcgtcatcagcctttgactgctccct

SEQ ID NO: 667441 - DNA, 110 bp, Homo sapiens
ccgcgctatcgtcttacgtacccaacgcatctgggcccaggccgaataccttgcgggtcgctgacccttgctgcccaaccatgtcgaagccgtgcatgcaactgcctact

SEQ ID NO: 667442 - DNA, 564 bp, Homo sapiens
  misc_feature (153)..(153): n is a, c, g, or t
  misc_feature (348)..(349): n is a, c, g, or t
  misc_feature (389)..(389): n is a, c, g, or t
  misc_feature (398)..(399): n is a, c, g, or t
  misc_feature (506)..(506): n is a, c, g, or t
ataagagcttgaccaatgactggtgaagatcacttggcagtgaagcatttttcagttgaaggacagttggaattcagagcccttctatttgtcccacgacgtgctccttttttttttttgaaaacagaaagaaaatgatctgtggggggggtntgtacgcagagttttcatcatgggttactgtgaggagctaatccctgaatatctgaacttcattagaggggtggttgactcggaggatctccctctaaacatatcccgtgagatgttgcaccaaagcataattttgaaagttatcaggaagaatttggtcaaaaaatgcttagaactctttactgaactggcggnngataaagagaactacaagaaattctatgagcagttctctnaaaacattnngcttggaatgcacgaagactctcaaaatcggtagaagctttcagagctgttaaggtcctacacatctgcctctggtgatgagatggtttctctcaaggtctactgcncccgaatgaaggagtacccggaacctgtcttttatatcacaggtgaaaccaaagacca

SEQ ID NO: 667443 - DNA, 233 bp, Homo sapiens
tttttccccgggggggggggggggggggcctcccatccccccccccccccgtttccccccggggccggtggcccccccccccctttggaagggccccggttttcccgggggttttggggggggaaattttttttttcgggggtgcccaaaccccggaccccccccttctaagccccaggttttttaagggggggggttccgtttttttaaaaaaaaccttttttttaggggga

SEQ ID NO: 667444 - DNA, 83 bp, Homo sapiens
gattaaaaggatgggacacttctccctcagcagaaaatgattcagtttatagaaaacctcccctcctctctcacaccccaatt

SEQ ID NO: 667445 - DNA, 508 bp, Homo sapiens
  misc_feature (392)..(392): n is a, c, g, or t
  misc_feature (395)..(395): n is a, c, g, or t
acattttatatttttgctttattttattttattttattttttgagacggagttccactctgtcgccaggctggagtgaagtggtacaatcttggctcactgcaacctccacctcccgggttcaagcaattctcctggctcagcctcctgagtgctgggactacaggcgcgtaccttctttagtagagactgggtttcaccatgttggccaagatggtctctatctcctgaccttgtgatctgcctgcctcagcttcccaaagtgctgaaatgacaggtgtgagccatcagacccaacatttttttttttaatttaaatttaaatttttttcattttttttgagaggttttttttgttttggtttgttggtggtggttggtggttggtgctcnccnccacacaacaacctcgagattttttcaccccctgctgggatgattaattgtattattcttttcaacttattaaatctcccatgtattataatatgttttgtgggttataacat

SEQ ID NO: 667446 - DNA, 1227 bp, Homo sapiens
  misc_feature (362)..(362): n is a, c, g, or t
  misc_feature (369)..(369): n is a, c, g, or t
  misc_feature (395)..(395): n is a, c, g, or t
  misc_feature (405)..(405): n is a, c, g, or t
  misc_feature (412)..(412): n is a, c, g, or t
  misc_feature (414)..(414): n is a, c, g, or t
  misc_feature (416)..(416): n is a, c, g, or t
  misc_feature (420)..(420): n is a, c, g, or t
  misc_feature (426)..(426): n is a, c, g, or t
  misc_feature (460)..(461): n is a, c, g, or t
  misc_feature (464)..(464): n is a, c, g, or t
  misc_feature (483)..(483): n is a, c, g, or t
  misc_feature (499)..(499): n is a, c, g, or t
  misc_feature (506)..(506): n is a, c, g, or t
  misc_feature (517)..(517): n is a, c, g, or t
  misc_feature (519)..(519): n is a, c, g, or t
  misc_feature (526)..(526): n is a, c, g, or t
  misc_feature (559)..(559): n is a, c, g, or t
gcagagctccgtggagctgcacgcggcgggaggggctacaaatgcttgactgcagtgatgcatgaaccttgcacacgttcagctggaagtcacggccctgccgcttgatgcggcctggatcccgcacggggtcgaacgaaggctgaccccgttccacttcatatgtggagggattcttgagaatccatgatgtttcttacgcctttatgctaagaacatctacatctagggatatcctaggacattgaacgagacgtcccgtcatggtgccaaggggtatttttgtacagatgtgacatcgcaagtaaaacgaggtatgatgtcttgggaactgtcattggagtgagagaaagagatgcttnctacgtnatggagtggatgacagcactggagtnataaactgcntctgctngnancaangttgantactgagtctgtatcagctgctccaagtgcagcnnganagctcagcttaacctcacnacttaagaagctacangagaccnttgagcagaananaaagatngagatcggggacacgatccgagtcagaggcagnatccgcacatacagagaagagcgagagattcatgccaccggttactataaagtggacgacccagtgtggaacattcacaattgcaaggatgcttgagctgcccactatctacaggaaagtttatgagcagccttttcacatgctcagccctagagaaagaagaggcactatagcaatccaggcgccctggacctccccagtctcacgagttctgctgagtgaaaaacgccaagagaagttcctcatggagaacagagtgcagagcttttaccagcaggagctggaaatggtcgagtctttgctgtcccttgccaatcagcctgtgattcacagtgcctgctccgaccaagtgaatcttaagaaggacaccagcttccaaggcaattcatagtatattaagaagtgctatacaactgctgcgaggaaaaaggactgtgtctttccacgaaccgctgatggttctggataacctatactatgtacccggagcagaccatgctgcacgaatgatccccgggatcttcagcaggactgccgaagccatccctggggaagggctgcccctttcggccctcttgggctgtgttcgcctgggctccgcccggcttgcgacggtttctcagcagtcttgggcccggggcccgggtcctgtcgcctcgggctttcag

SEQ ID NO: 667447 - DNA, 381 bp, Homo sapiens
attgggctgtagccacttgattaaaatatatctttgtttatttatcttacatgcttgtatcttcagttgcgacggtgtagtacttcaaagagacggggaatgaaggctggatagggaggctggagataaatcagattcacaagttgacatgtcagacagtataaattatacatttgtcaatcatgtcaatcattagtatacaattaatactttaccataataagtactcatttctaatcctacgatatgcaacatgatgcattcagttatctgtaacgttgagaaatgtatctgtgaaatcagctcaccagttcaagtcactatgttggctacttggaccgtcttggtttcagcgagcatcgcgagtggctttcagacatt

SEQ ID NO: 667448 - DNA, 260 bp, Homo sapiens
atagtagactagaggtcccgccatagcaaataaactctttataatcacctagtctcaggtattctttatggtaatgcaagaacaacctaagtacagtccattataagtcatacttcttaaaaccatatacgaaacatttatgtaatgatcgtaagcagaagaagacacaaaattgatttttaaaataaacatgcatatcgataagtgcctggaatataaactgggaaaaacgtgaaaattactcagtgctgttgaacgta

SEQ ID NO: 667449 - DNA, 317 bp, Homo sapiens
ggtgatgttatcccaacacgcacacattagcacatagtagatgttccttttttaaaattttttatttttttttgacaggatctcactttgtctcccaggctggagcgcagtggcacaatcatggctcagtccaacctcaacttcttgggttcaagcaatccttacatctcagcctcctgagtagctgggaccatatgtgcgcaccaccatgcctagctaattaaaaaaaaatttttgtagggatagggtctcctatgttgcccaggctgatctcaaatgcctggcctcaagtgatccttgcaacttggcttcccaaa

SEQ ID NO: 667450 - DNA, 710 bp, Homo sapiens
ctagtagcattcgtttggcgcgcgagatcagtgtgtcagtgaacatggtcatagctcgttacctaggagatcctggtcaatgattagtgcttggatgctcgaccatatcgacaaaacgccctggtgagtagccgagctgtgtacatgatagcaaagaatcggcatatattggaggttcgtcgaggtgagtacactgggttctagtcaagcgaggagtccagagacggagctcggtagtatccatggttatcgcctccgcctctgagtaagaatgtggtcaccattagtagccgcagaatgctcctccggcagaaagatgggtgaacgaaaatagtatgaccggaatacgataagtgccagtgtgaatggctgcgagtggcccggtgagtcaataagccaggtgatagagcaagagagtgggacaagagagtacatattttcgcttcctcggtgtgatacgcctaatcacggaggcgtaagcacgctcgtacatggactgatcccaatagcatctaaatttattggaacgtcatgtgcacaagacccagcccaggagaaagggtaccaaaagcgatactcacacgcaaacttcacactccctcacgcttgagcaatcattccaatgacttctgtccttctgaaagttcaaagcacacaccctctgtaagcttccatggttcacacgtttctctgcaattcacatagtccac

SEQ ID NO: 667451 - DNA, 295 bp, Homo sapiens
  misc_feature (37)..(37): n is a, c, g, or t
  misc_feature (60)..(60): n is a, c, g, or t
  misc_feature (70)..(70): n is a, c, g, or t
  misc_feature (76)..(76): n is a, c, g, or t
  misc_feature (82)..(82): n is a, c, g, or t
  misc_feature (86)..(86): n is a, c, g, or t
  misc_feature (102)..(102): n is a, c, g, or t
  misc_feature (115)..(115): n is a, c, g, or t
  misc_feature (130)..(130): n is a, c, g, or t
  misc_feature (156)..(156): n is a, c, g, or t
  misc_feature (159)..(160): n is a, c, g, or t
  misc_feature (165)..(165): n is a, c, g, or t
  misc_feature (205)..(205): n is a, c, g, or t
  misc_feature (209)..(209): n is a, c, g, or t
  misc_feature (216)..(216): n is a, c, g, or t
  misc_feature (231)..(231): n is a, c, g, or t
  misc_feature (239)..(239): n is a, c, g, or t
  misc_feature (250)..(250): n is a, c, g, or t
  misc_feature (252)..(252): n is a, c, g, or t
  misc_feature (258)..(258): n is a, c, g, or t
  misc_feature (277)..(277): n is a, c, g, or t
aactctagcatccccctcccctttgaccctgggggcnagggttttttttgcatgtggggnttataccccncccctnatgaanacanagtgggagctaggggntgggtttcctcanaaggtggtttccccnccggcctgggggataaggacgtgggnccnnccccntgcccactcatgtcccatactgctttgcctggggtggggnaggnttgggtnttgtccccccacccngcttttgnggctggctgtnanactggnccactgtttttggcccttnaatgctgttggtctttta

SEQ ID NO: 667452 - DNA, 371 bp, Homo sapiens
ctggcattggagtctggatatctgaaacttggttcataggcagaagagacttgccttgtctcagatgagactttggactgtggacttctgagttaatgctgaaatgagttaagactttggggggctgttgggaagccatgattggtttcaaaatgtgaggacatgagatttgggagggttcaggggtggaatgacatggtttggctgtgtccccacccaaatttcatcttgaattgtagctcccacaattcccacatcatgggagggacccagtgggaggtaattgaaattatggggttggatctttctcgtgatgttctcatggtagtaaataaggggtttcccctttcacttggctctcataaaaaaaa

SEQ ID NO: 667453 - DNA, 164 bp, Homo sapiens
  misc_feature (88)..(88): n is a, c, g, or t
  misc_feature (119)..(119): n is a, c, g, or t
caaaaagtacaaaaattagccaggcgtggtggtatgccctggtagtcccagctgctcgggaggctgaggcaggaggatcacctgattntaagaattcgagactgcagtgagccgtgatnttgccactgtagtccaggctgggctacggagagaccctgcctcca

SEQ ID NO: 667454 - DNA, 788 bp, Homo sapiens
  misc_feature (120)..(120): n is a, c, g, or t
ccatctgctgtcgccgcgctctcaggctgaagagggaacagcaaatctttgccccctgactttggaaatctcgtttaaccttcaaagctggcgatgtcgagggttccaatggtcctccancctccgtgccagaaatgtcagagctggccccgtatctgagagttggtgctacacacagatcaaggtagtgaaattctcctacatgtggaccagtcgaataacttttatgcttttgcctgggaggaaatgggtgaagtcatttaatagagttctacatttgtcactcgagtgagcaaattgataaactgatagatggtgtttgctgagtaaaccccaaagggttaggagtgaagatagcatagagattaccgtgtcactttacctgttactggtcagcgtgtccaagagagatgagaggttcgggcaagaattcacattctccagtcctgaaatgccatgggagaagaaagcctacaggctaatggagagttcaatcggtgcatatagtggtttgctgcataggcaaacgactgggcgattcacagaaatttcactccgtcagagcattattgctttggaatgcaggcctaacgggacttctccctggatgacaaggcttaccctcttcttgcgaggctgagtagtagtgcaagattctgtcgaacattatctggtccagcaatatgcatgaacatggtaaaaggttcctgatgtgcccggctggcagatgagttaggaagactgttgggaataatccccgggttcaccgaacttgctgcttgcggtgc

SEQ ID NO: 667455 - DNA, 654 bp, Homo sapiens
  misc_feature (18)..(18): n is a, c, g, or t
  misc_feature (72)..(72): n is a, c, g, or t
  misc_feature (77)..(77): n is a, c, g, or t
  misc_feature (85)..(85): n is a, c, g, or t
  misc_feature (204)..(204): n is a, c, g, or t
  misc_feature (277)..(277): n is a, c, g, or t
  misc_feature (297)..(297): n is a, c, g, or t
  misc_feature (301)..(301): n is a, c, g, or t
  misc_feature (304)..(304): n is a, c, g, or t
  misc_feature (309)..(309): n is a, c, g, or t
  misc_feature (390)..(390): n is a, c, g, or t
  misc_feature (408)..(408): n is a, c, g, or t
  misc_feature (477)..(477): n is a, c, g, or t
  misc_feature (644)..(644): n is a, c, g, or t
ggagggggagggtctcanggcaaagtcgcaatgttagtggttagggcccctggttaaataagactgtaatangtacncgagtggngattgctgggcccgcgtggccaggtgttacgatgtggtaacttggaagttccgcgacgatggcatagcctatgagaaatacgaggatgaaagatgtacatctcagaccctttaagggcnaatatttaacatgggaagctggatgtaaatatctaaagagtgagttcctaaaaagcctatttttagctttacntacacacctgttacctggcntgcntgnacacntctttgacctgttcaaattaggactgggaaaagaggaaaaaatactttgttgaatcaactgtcctagccccactgcaaagnggaaaaaaaaaaaaaatngggccggggggtatttccccctgaaattatgtccccaagtagcatgctagacttcttccagcaggtacnccacacaatggtgacacagcctaatgtgtggtcagtgtgtgccacgttttctgcactatacccaggtttgatggcttgatgttaacttctgaaaatgtagctacagtgttcttcattataaacagaaacagaaaagaattactcaaaaaaaaatccttaaacaaaanttaactttat

SEQ ID NO: 667456 - DNA, 164 bp, Homo sapiens
ggttgaaacacagattggaggtatgggacatgttaccaaagcgcgtcatagacaatgctactctcacgttgactgatccagaaacaggggactgtggcacacccagaaagaacagtccagagatggaaaactatgatcctttgcactatgaaataagctaaagc

SEQ ID NO: 667457 - DNA, 112 bp, Homo sapiens
tcgtaagtctgggctcatattaccctcctgcctcggcctcccaaggtgctgggattacaggcgttagccacctatgcctggccaaatgcccccccctacggtataagttggg

SEQ ID NO: 667458 - DNA, 907 bp, Homo sapiens
catgttcgtgcgctgcgcgccctcgagccgtacacgctgtcttctcgcacggaaacgccgtgacctgggccagatgtgcagttctacattggctcggctcccgaatcattgcaagaatcttctcttacgatactcgggatagggcgtcagttcgggcaaagcccttcggagaaagaacttctaggcggaatcgagcgccgggtgcaaggcggttggggcaacccgggttatggggtgaggtccggagaactttatctttctaatggccagagctttggggaaactgtccccaaagggtacaatttgggccttccgaagggtatgaaattgtggcaggggtaaattttctcaatttcccctcttctgaagtggcctggttagggggggtgtggattttcgggtattaccgaggggaaaacatctttacgtggtttgggaatgggttttacccacgagcttgtggaccaaggttttctttaaagggtcacacctctctccttggtggtgggggccaattcacatgggaaccacgaggagatggaggtcaatcgagaattttcttcccaatgggctattaggggattgtacggaggcgtgtgttccccggagcgcggtggagccccctttggggttagcaggggggctgggcaattaagtgaaataagagctttagtgcaacaataccgtaagaagggactaaagacgaagtcatatatcttcaagaaacgtttccttaagtccgtgaagaacaacaagtttgttcttcacctcattatgtggggacgcagaagaacgcctctgtttgggcaagtgatctaacggacatgtaaagggttgactaccatgtaagagtggccaccttggggggtttaacaaaggggcgaagaattacgctttgttgtacagg

SEQ ID NO: 667459 - DNA, 548 bp, Homo sapiens
aggatccctggatggggtctgtactctctgttcccaagagggtgacctgggcttctcagcattggtgcctctgccctttgctctttcccctaagcctcttagtggtacctcctcagcctggatggggaggaggtgtgttcagtccgctgcacacggattgaaaacctgctgtgtgccaggccccaggtggggtgttggcactcccactgtgctgtcatcctgcgcaaatgatggcaactaaacccaactggctgaaactgaggtgcccaagcggtgagacagctctgacacaaccggatcggggcctcacctgatgatggtcaggatgccacctgtatgtgcatgctggcgttactctccatcagcttctgtctcaggtggctgtaccttgggctgccaggacagtgtccggcagaaaggatggccccctccctgagccaggtggcatgattctgacaggccatctggggatggggttggggtcacttcaatgggaccgcgtgaatgaagaggttgggtgggtcctcaggttgattgcctgacttaca

SEQ ID NO: 667460 - DNA, 211 bp, Homo sapiens
ataattttcatgatttgagaagccttcgcttcgaagcgaaaagtccatatagtcactccaggtttatggagggttcttttactattaggatgcccccccccctaccacacattcgaagaacccgtatacataaaatttagacaaaaaaggaaggaatcgaaccccccaaagctggtttcaagccaaccccatggcctccatgactttttca

SEQ ID NO: 667461 - DNA, 168 bp, Homo sapiens
acaagaatgccatagtcggaataaggataaatgccaaaggtttacctggatcaggattaagtttaaaataatacctaagattctttagccaataaattagagaaggcatgctgatgtaatacaactccatgtatagtaacgttaatcacatgtactgtcgcatgcgaa

SEQ ID NO: 667462 - DNA, 1539 bp, Homo sapiens
gtcgtcgtggtgatcagagagacggagtactaatcgcatttactcccatgtcgcttttcactgctgcaggtctagttgtccaccttctgttctccctttgttgtgggcgtcccgtgttagctacttggggtgcccctcctctcctctgcttcttgttgcaccccatctgggggtcccgtgttgttttttgtcgctttgggtcttcgccgaccacacattttttgtggcagttgtgtgtcccgtgaccatttggttctccctggtttttacagaccacagtggtgtttgggggactcactgttcgtggaccttcttcctccttagtggaccctgatgttggtggcaattgtgtgttgtggtatatgggtggtgccactccttgagacgcacctccggttgtgatgtctcggcgttgtatgttttgctcggtgcctccctgatatatggcgaccgtcctccgtcacgcggagatttccgtgtctgtcacgggcgtcttccgctgtttagctgttgtcccgtgggtcgcgtacaaaattatatggggccgcctgttgttcttgaaaccacccccccccccccgagtgatgagtgggatgggggcccgtggcacaccccacggggctgtgagatgtgacccccggggggctctttcttggggccgttctgtgtgttcttgttatccccctatactcccgtctctcttcccccctatgttaggaggccacctctggagcccctgataggggtcgtgggtctgtgggtcctgttgggcctgagagccccccccgggtggtttccgtgtacacagtgttcacccacgagggtttcttttcacagccgtccacattttgaattcccccccgggtatattgaagggcccctccccaaagcttatagataaatttggagaaaaattgaaacctcttttttgggagcccccaaatatgtctatatagagaattacccccacagagaagcccccacactggggtgggaaggaaataagtggccgtttgttgtccccccagcgtctctggccgctcccctcggtgttgtctggccctctcttcatacggcccctctcccaggggagaaatatgactcttgatgttgctttaatattgtctggcctcttgcgccccctgcaccaccacaggcacctctgttgggcctctgtttttataatagctggagaataaacccacaattgcccaccctacccaacctcgtgaattttaaaaagaaaccacgagaatgagccaccctggagaattgtggcctctcttggtgcccaaccttttcatccctgtggtatgtgtgatagtgtgtgagtgtgtgaagccccccgtttcattctctgtttataatggggtttgttgttcttccttttggtgtctcgttttaggtgcccctgcccctctcgctgggcttgtgtctcgggatccaacccttttggcccgttatgattttgaacctttgacttgaacccccaatgaatctttctcctggtgactccaattaaagtataatttttacccg

SEQ ID NO: 667463 - DNA, 624 bp, Homo sapiens
agcggggcgcggaggagcgtgcggaaccgaggctgcgcgcgcgcgcgcgcctctggccgcggcgtggggacagcgaggcgcactggggctcccagcgcggggcggcgcgccgccagcccgaggtctacggctgcgcccgacccaaggaagatgctgccgcacgaccgggctgcggggctgaacgcctgtcttccaggcgcagcggcagcactgccctcggcggtgtcggtagcggcactcggcgtgccccgggcggacgaagagcgcaggctgggtacaccttgtccgaatcggcggagttcgcagctagtgagggcggccggcggcccggatgggcgcgggttgcggccccgacgggtgctccggagcggccgggcaccgggggcactcttgagtgccggaaccgcggccgcagagagaacttggggcggtggccatgccccggtgcggagtctagagccgagtcggagcgcccgagggtgcccggccggtctgcggcgtcggggtctcacagtcccagacgccgtagttcgagtgcgctccagacaaagatggcgcggcggtccgggaagggctccgaggcccgatgcgttcgcttgccttctcctcttctggttggaaagg

SEQ ID NO: 667464 - DNA, 1458 bp, Homo sapiens
ggtcattggcgacggtcttgagacgagtaaggtcgcggaattgaagacgtgatgaaggtaatggagagttttctggcggttctggctctgggggggtctagatctgttgaagtatcctggtgattcaatagttgcacaatggagatgggatagaaagaaagatcaaatgagacatgtcatgagttggtcatagaatatacaggtttgtatagctagaagagcaccacatagattctcaataaattgaatggtagtgcagatgtttgattaacactacgtcgttaattctccgaggtcaattgaatttgtgatatcaagtactcgattcactcagtgtgtagttacaactaccctaggaggagatcagaaaaactaggccgagtcaatagtgatgtagaacatggactgtataaaatggaaatggtgggtctccgactacaatgggtgtacgggatgtaaatgattatgaaagtatgtaacttttatgtacaagttgaattaggtgtatgtattccatagatagaagcatgttcggtgcgtcatggtgggcaacatgagccatttggggttcggcttgtgggtaacaatttggatgctttggagtgtatgcaccattcacagacaattgggattacaaaaggaggttaaggttttccaatcgatgtggaattttccttatggcatgcaaaggcgcaacaattgagggaaaagtcccatggacattgaacctagtatgtgcaaatggccaagagcaggacggttcgaaagggtggcacatgttacacatttttataagggcaaaaaaacagagtgcccgtgcgtccaattttgttccaatacccattcgaataggaaattttacagaaagcgacttggtatttttgggcgaaaagggaaaaaggcacggtttacttaaaacttaattttgtggggacacccattgggacaattatccacgggaagaaggaaaggaaccttgtgttactttaacaatagcacgttggtggtccgtacctaactaaataagggggtttaagagggttgtggaaatcacagggtttatttgaaaaataggacttcgaaacgcgtcttgagggattatgaggacaacgggaacaaattggttgggaacaacaggttatttatttttggaaatctctcggaggtgagtactttacggaaggaagtccatggagtggggtggataattgtggaaaggccaaattcactcaatgagggggtaaagtggggaacttttatgcgcatggggggacagcgggcaccaggtttgggaaagagccaccacagcgttacattgactttggcacataggaatgttcccgggataacattaggattatcaacatccaagattggtgttcattgcagacagatatagaggacttgggaattgatattgatgtaaacaaaccataatgtcaaatagtagtacaagtg

SEQ ID NO: 667465 - DNA, 901 bp, Homo sapiens
  misc_feature (16)..(16): n is a, c, g, or t
  misc_feature (203)..(203): n is a, c, g, or t
  misc_feature (275)..(275): n is a, c, g, or t
  misc_feature (304)..(304): n is a, c, g, or t
  misc_feature (309)..(309): n is a, c, g, or t
  misc_feature (315)..(315): n is a, c, g, or t
  misc_feature (317)..(317): n is a, c, g, or t
  misc_feature (346)..(346): n is a, c, g, or t
  misc_feature (387)..(387): n is a, c, g, or t
  misc_feature (431)..(431): n is a, c, g, or t
  misc_feature (440)..(440): n is a, c, g, or t
  misc_feature (443)..(443): n is a, c, g, or t
  misc_feature (457)..(457): n is a, c, g, or t
gctctgcggggctacncctacgcctacccgcccatgccagccatggtgccacaccatggcttcgaggactggtcccagatccgctaccccgctcgcatggcatggagcgccgtccgaatcggcctcatctgggataactgggttactgtaggggtgaaatccaaatcagagctcccaagtgatggaccctccccacagccagnctacagaaccagagtctccaaaaaatgaccgtgaggggctcagtgagaccagattgtgtcatttggctccancttcatcttgcagagccagctgatctcanattgncaaganantagaagccacttgcacggtgtggcagagnctcagctggatgagaggctgagatgggtggccagcttgtanaccagtccctgaactgagctgtttacaggactggggaggtccanccagaaggnttncatttgtactctgnggggagtgactgggaaaaactccttccctgctgctgagtggaggagaggcctcatcccggtttgaacccagcatccgttgaagaagcgtccaggagcaagaatcataagagtggagggcagcaaggaaccccttccttccacagctccggaacgtggcttccgggccctctagttgacatgaccaactcgtgtgcgtgtcaataggggctgacaagcctgcagccgggaaccggccaagacaccctaccctctgtgaggacctcgggaagggggtctggccacagagcaacagaacgatgagattccggctgagagcgtcgcacacaaacagaaggtcaggagccacacgaaaggccgcccctcgcagggcacaagacccgacggataacgtaccaccggagagccacaagaggcacccgcgaggagacacgaggacaaaccag

SEQ ID NO: 667466 - DNA, 909 bp, Homo sapiens
  misc_feature (16)..(16): n is a, c, g, or t
  misc_feature (211)..(211): n is a, c, g, or t
  misc_feature (283)..(283): n is a, c, g, or t
  misc_feature (312)..(312): n is a, c, g, or t
  misc_feature (317)..(317): n is a, c, g, or t
  misc_feature (323)..(323): n is a, c, g, or t
  misc_feature (325)..(325): n is a, c, g, or t
  misc_feature (354)..(354): n is a, c, g, or t
  misc_feature (395)..(395): n is a, c, g, or t
  misc_feature (439)..(439): n is a, c, g, or t
  misc_feature (448)..(448): n is a, c, g, or t
  misc_feature (451)..(451): n is a, c, g, or t
  misc_feature (465)..(465): n is a, c, g, or t
gctctgcggggctacncctacgcctacccgcccatgccagccatggtgccacaccatggcttcgaggactggtcccagatccgctaccccccctccgattggcatgggaggcatcgccagtccccaaatcgcgcctcttccatctgccggaatacactggcgtctaccctgtgaggggtcgatccaatcagacccagtgatgacccacagnctacagaaccagagtctccaaaaaatgaccgtgaggggctcagtgagaccagattgtgtcatttggctccancttcatcttgcagagccagctgatctcanattgncaaganantagaagccacttgcacggtgtggcagagnctcagctggatgagaggctgagatgggtggccagcttgtanaccagtccctgaactgagctgtttacaggactggggaggtccanccagaaggnttncatttgtactctgnggggagtgactgggaaaaactccttccctgctgctgagtggaggagaggcctcatcccggtttgaacccagcatccgttgaagaagcgtccaggagcaagaatcataagagtggagggcagcaaggaaccccttccttccacagctccggaacgtggcttccgggccctctagttgacatgaccaactcgtgtgcgtgtcaataggggctgacaagcctgcagccgggaaccggccaagacaccctaccctctgtgaggacctcgggaagggggtctggccacagagcaacagaacgatgagattccggctgagagcgtcgcacacaaacagaaggtcaggagccacacgaaaggccgcccctcgcagggcacaagacccgacggataacgtaccaccggagagccacaagaggcacccgcgaggagacacgaggacaaaccag

SEQ ID NO: 667467 - DNA, 333 bp, Homo sapiens
  misc_feature (233)..(233): n is a, c, g, or t
  misc_feature (253)..(253): n is a, c, g, or t
  misc_feature (282)..(282): n is a, c, g, or t
  misc_feature (287)..(287): n is a, c, g, or t
aaacaaggtccttcaaatgttcctttggcccaaagctgaagggagtttctgagaaaatagttaccaattactgtcaggggtcatccctgttcaaaaggtaagcccctttagaattttgtttttgatagttaactgactaatcttacttcccccaaatatgtgaatttgctgcttttgaaaggcaatgtgaaaaagggagtattacttttatggccaaagttatttatttatanaaattttgggccagtgtccnttgaaaaccctgtaaaatatttaagtgtntaacnaatggccttgaagtgtctttaataaaggttcctttataaatgtcca

SEQ ID NO: 667468 - DNA, 319 bp, Homo sapiens
  misc_feature (17)..(17): n is a, c, g, or t
  misc_feature (150)..(150): n is a, c, g, or t
  misc_feature (153)..(153): n is a, c, g, or t
  misc_feature (263)..(263): n is a, c, g, or t
acataaggccgcattancccgaaattaatcccccctgggtgagattgtgaagaaatacatatatgtgtgtgtgtgtgtgtgtgtgtgtgtgtatatgtatatatatacacatatatatatgttttcttgtttttttcttgcgactgggtnctngctctgctgcccaggctggagtgcagtggcaggatcacggctttctgcagcctcgaacttctgggctcaagggatcctcctgcctcacccttccaaagtgttgggattanctggcatgagccaccacacccagctttcctttataatctgttgtatactttctagt

SEQ ID NO: 667469 - DNA, 184 bp, Homo sapiens
cttaagtcaacatagacgttacgttcaaaccatcagtccattcgtcactagccggtatgtgttcgggcaaattattttacctctcagcctaactgtaataactgcaggtaacactgcctcacgcgagtgtgttgcacactagcaacacacttggcgaacagcttagctattcactcgtggctac

SEQ ID NO: 667470 - DNA, 1007 bp, Homo sapiens
gacagaggctgatgcatggagtggccagtagaggtggtggagcagagcagaacatcttttaagtggggctgtatcaggctgggtttatttaaaagcaacaaaatgttctggttaagaaaattatctatgctttcagtgtaaatcttcgcagtgttctaaacaaagttcagtcttctgctcgcccctttccctcactgcatgtctagcactatggtatagaggtctcctggagcctcacaggctctgctgtatctccacttctcacctagccatcacacgccctgcaagctcatgcaaacacccttatcttcctacctgcggcagagttgttacaggttgcctgggcaggggcttaaacagtgccagccactgaccatcccaaagctatcgttaagcccacaccaggcgtcctaccacccacagcccactagacctgacatgtacacagtatccttgggctgctgcaggggctagtagcagtggtcctgaactctcttatcaagagcacacttctatgctggttgaatccctacaatgacagcatatgcgctgctgactctacttcgagacaacacgattacgcacattgccaccgctaggggtccagaaaagacaattgtccctacctaagacggacctggtgtccttaccaacgcctagccatcggcggcactggaaacaagcaggcggcgcgcgctcacccagaaagaaaacacaaagcaaactcaaccaccaaccaaccaccacacacccacacacccaccacacaccacagccaaccacgacaccacccaaccctgcaacacaaccaagaaaggcgaacgagaaccacccggaccactaacgaacacactacactctcaaaccagagatcacacaaacaacgaagctgcgcgactaaccaaaagagcacagaaacatgactgacacacgcaacaaacacaaaccagaaaaccacacaccacaccacaacaacaaaccaacaaggcaagaaaaaagaagtaacc

SEQ ID NO: 667471 - DNA, 200 bp, Homo sapiens
cactgaccacctgaacccacccaaactgatgcaaatccaaaccccaacaccctagttcctccggtagctattcagatgctgaccttgcggatggtgtctcaggtggagacggaacaggaggcagatgatggtggaggcagccacatgaacatgaaggggaatattttgacgccccatgtataatccccgggataagttgg

SEQ ID NO: 667472 - DNA, 346 bp, Homo sapiens
aggatctaacggcatgggtctgtacatagctattgtagcactactgtggagacacggacctgaaaaggaggtgagcggctctggagctgttggagcgcattgaacagaagtatgtggctatcagtgacttgtatgagcccattgatgatggttgtgagagccacgtgttctgttcctgctcctacgatgccaccacacactttgagacaacctgcaacgagctccaagacatctaccaacgcatgggtagcacggcctttgactttgagaacatgaagcgcaaacagaacgacgtctttggagaagctgagcagtgattgtgggcccctacagaacccttgcgggc

SEQ ID NO: 667473 - DNA, 131 bp, Homo sapiens
ctgctaggaggtatccctcgctattcatcggcaccaccacactccagcctgggcgacagagctagactcatctcaaaaaaaattaataagattctcaatcccaccatttccagggtgccgatgaatagcga

SEQ ID NO: 667474 - DNA, 570 bp, Homo sapiens
gacgagctggctcgggagaccgcgaggagctagacaaggtacgggtctcagaagagtgaggagagcacgacagtggtcatcatacagtctgttgaggttggagctgagtgaaaggacgctcagagagctgatacgtacagtccagtccgttggagatcgagctggactcgatgataaatctgaaggccagattggagaacagcctgagggaggtggaggtccgctacgccctacagatggagcagctcaatcgggatcctgcttgtgacacttggagtcacgagctggcacagagccgggcagagggagagcgccaggcccagagagtatgatgcctctgtctgaacatcaaggtcaggctggaggctgagatcgccacctagcgtcggctggtggaagatggcagaggacttaaatctgggtgatgcctagaacagcggtgactccatgcaaaccatccaaaggaccaccacccgccggcattagtggatggcaaagtggtgtctgagaccaatgacaccaaagttctgaggcattaagccagcagaagcagggtaccctttggggagc

SEQ ID NO: 667475 - DNA, 499 bp, Homo sapiens
  misc_feature (22)..(22): n is a, c, g, or t
  misc_feature (26)..(26): n is a, c, g, or t
ctgtatgtatggctgcctggancgcncgaattgtttggtggccactagggctgtagtccctgttcctactcctgcagctatgccgcccatagtaagtcctcccaacagcagggccagagttaatgacaccggctctcttttatatttggtttttctctcaaactggtcataaacataaccaggggagtggtaggtcacctttggccagagctcaaccaggacacagtaatcggtggtgaggttgagtacagtggtagataggcagggagtgagcccggtgttgcaagcccagatggtcccggcgggagcagccagatagtaggacccgtcgctcgccttctgggtggtattacacagggcctgatgggttttgggaactgctcctacgcagagtccctgcccggtcacttcggacagggtcagcttgtgttgggaggccacggagcagtagctggggcagaggtatggttggagtagtacctagcgcctataggtactg

SEQ ID NO: 667476 - DNA, 596 bp, Homo sapiens
  misc_feature (68)..(68): n is a, c, g, or t
  misc_feature (83)..(83): n is a, c, g, or t
  misc_feature (86)..(86): n is a, c, g, or t
  misc_feature (186)..(186): n is a, c, g, or t
  misc_feature (203)..(204): n is a, c, g, or t
  misc_feature (219)..(219): n is a, c, g, or t
ccctgcggctgcagtgaacttcgtgcactgatgcccccgggtcgctggggcccctgctccctggtggngcccttcccgccccntgngcctgtgtgtcctgcccctgtgtgtggtgtgtgctgggccccccgctagtccctccagcgccggggcgcttcccctgaccctttcggccctccccctcangtgccctcgcgccccanncgcgccccgcccggngtccccagccgatcgggtcaggcaagtccatcccgtcctgagagccccaggccccccttcgacctctaaacagatccctcctcttctcggagacctccctttccaagcctgcctggacggctgttctgtgacttgacagtggctcccccagccccaaagccagcccccttcatctgtgacttaatctgttgtagtggtgagctgatacattcaggtgtgaccgttggtgaaaacttgtgccccttctgtggtatgcccttgccctgttctataaatatctatcactactcctatatataccgccctaaacattgccccgcctcgcctctatgcgctggcaatcagggcactgtgctccttgtgcacgtctggtgccc

SEQ ID NO: 667477 - DNA, 171 bp, Homo sapiens
accaccaaaattttcaacctaattctgtaccaagacgccaaatgtttattaggagaggtgggggggggatacaagataccgatacaaactccctccgccacttttgcgaagtgccctggtatatatagagagggagcctgcgtcgccaatacttcgtagcagcgccgggag

SEQ ID NO: 667478 - DNA, 815 bp, Homo sapiens
  misc_feature (68)..(68): n is a, c, g, or t
  misc_feature (83)..(83): n is a, c, g, or t
  misc_feature (86)..(86): n is a, c, g, or t
  misc_feature (186)..(186): n is a, c, g, or t
  misc_feature (203)..(204): n is a, c, g, or t
  misc_feature (219)..(219): n is a, c, g, or t
ccctgcggctgcagtgaacttcgtgcactgatgcccccgggtcgctggggcccctgctccctggtggngcccttcccgccccntgngcctgtgtgtcctgcccctgtgtgtggtgtgtgctgggccccccgctagtccctccagcgccggggcgcttcccctgaccctttcggccctccccctcangtgccctcgcgccccanncgcgccccgcccggngtccccagccgatcgggtcaggcaagtccatcccgtcctgagagccccaggccccccttcgacctctaaacagatccctcctcttctcggagacctccctttccaagcctgcctggacggctgttctgtgacttgacagtggctcccccagccccaaagccagcccccttcatctgtgacttaatctgttgtagtggtgagctgatacattcaggtgtgaccgttggtgaaaacttgtgccccttctgtggtatgcccttgccctgttctataaatatctataaatactcatatatatacgcacctacacatggccacgcgcctagcctctaacgttgggaacatgttccttgtttgatccataggagatcttgtggcccaaataccagataacgctgtcctccgacatcccgctccaaagtgtgccacctccagtgagcctccttgtcatgcccggcctgtggacagccagcccccgccatcccttccaccccctaccaagcatgggggtgctgtgcaggcagccgtgtggcctgacagtttctaacagtcctgctgtccctcggctgagaataaaacccaattatggatgaaaa

SEQ ID NO: 667479 - DNA, 865 bp, Homo sapiens
tgtctcccttatgtttcgtgaccagaaccccgagtcagctggcggggagtagggcagggacgctatagctcagggagcggagtgcagattgttgcagaactggaggtgtcgcgccagtgagagagtggcgcaatagaagactcgagcctccagcgaggccgacaggcattctcgatgggggggctcctatatgtccagggttgaaactccattggggagagggacctcatctttcacaaaggccttcacaactacgaaactacgagttcagattgggaaagcagccgaaaaaggtgcctaaacgtcgccgaggccgccgagagcttgtccattcagcgccgttctgccctcaatgtgaggctcttcctcagagacttctgctctgagttcctggagaactgttacgaccggctcatgggatcagtcaccaggatcacctgcttcgggagaaagctcagagcgtgatgagacctattatatgtggggccttggtttctctcatggcttcaacgagctgctccttccgggcaggcctttttctgagaacctcaggtgtccgtaccttccacttcattgagcagaaagctcagcatctactatgagatgactgctggctgaccgcaatggagctgcttccctgggacgccgatgcgcttggctctgaaggctattccggggctgctggcccgggtgcaatgagcctggctatctccagatgcggtggcgggaagcagccgtcaatcccgaacaatatttctcttctgtggggtccgggacacatccggccttcggacttttggacagtcccccgctcttcttggccgggggaccccccctctctgaatgggcgcctctcgccggcctt

SEQ ID NO: 667480 - DNA, 450 bp, Homo sapiens
ctgactttgacattgtagctatactgtttccatttttgtttttacaaatcctttgggtctaattctgtgagcctacctatagcactggattaaaatgtctgcatcatttctttagttatccagttaacttcaacactgttgtaaaagtgtaaaccagcccatgacaggtttttgtacatgttaaagaccttagccgttcaggtttcatgagtattgtgtaaggcagcctgatgtagatgttctggagctggtcttgacccttgttgtctacactcccgacgtattttagttcctcatcacgatcatttgtccccagtgacccttttatcctttataggcacatttcttgttgtcgttgttgtggcagttccccttggcagtgtattgctttggcatctgtagtttgaatcagatatgaaaaaggtccagaatagaatatattttgatatt

SEQ ID NO: 667481 - DNA, 432 bp, Homo sapiens
tctacttcaccaagaaggaaactgaacactaggcagtaggcgatgccgtgcaggcgcggtggctcacacctgtaatcccagcactttgagaggccaaggtgggcggatcacgaggtcaagaaatctgagaccatcttgtggcaacatggtgaaaccccgtctctactaaaaataaaaaattaggctgggtgcggtggctcacgcctgttatcccagcacttgggaggacaaggcaggtggatcatctgaggtcaggagttcgagaacagcctgaccaacatggggaaaacccgtctctactaaaaatacaaaattaagccaggtgtggtggcgggctcctgtaatcccagctactcaggaggctgagacaggagaatcacttgcacctgggtggtggaggttgcagtgagctgagattgcaccattgcattc

SEQ ID NO: 667482 - DNA, 174 bp, Homo sapiens
tggtatagtggctggggtttgggcaatgatgacttcaggtacattagcggttgaaggggcagtgtcgctcgctcggttatttgtctcaggggtgggctggcaggcggtaagtgccaaacctagccccatagcgctcaaggtgcttatagtgatatgcaatggtctaaaaaaaaa

SEQ ID NO: 667483 - DNA, 116 bp, Homo sapiens
ctccccataggcattggcggcgtccaggacttgctgatccgtggccttcggggagacctctgcaccaaaagcccacaccactcgacggcaaaatgccatgagaacggttaccagag

SEQ ID NO: 667484 - DNA, 179 bp, Homo sapiens
gaaaaacgaggcaggcaaccagccaccaaggaacaacagcctcttgttaacagttggccaaatgagcttgtaaagtaaaccccctagccataaaacccctaagttggcccccccagttaaacggcaaaatcctgacttgcaaataaaccaaaaaaggttgttttaatttgttacatagc

SEQ ID NO: 667485 - DNA, 484 bp, Homo sapiens
acctccacctccctggttcaagcgattgtcctgcctcagcctcccaaagtggtgggattacaggcatgagccactgcactgggcttagaacactttcattacccctcaaagaaaccccatgccctttagcagtcacccaccttttctccctactcccagccctggcaaccactaatctacttatatctctatggatttgcctattttggacacttacgtaaatggaatcacgtttgtggcctttcgtgtctggcttctatcactttgtgtaatgttttcaaggtatgtaacaggatttcattcttttttatggccaaataatattttgctgtatggatagacctctttgtccattcatcagtggatggacatttgggttatttccacttttttggctattatgaatggtgctgccatgtacacgcatgcacatctttttaagatggtgatgttctcagtgcccttgggcacatacctaggagcg

SEQ ID NO: 667486 - DNA, 755 bp, Homo sapiens
tgtcagatatttacctgtcctgttgctttagggctcaagggtgcatcagtctggaagccttgcaataaaccatgtagatgaatgtcttgatggaccttcaatccagtgacacaactttaaacatgttctcgttgttccacatgtttcttgctacccaaagttaacaagcacaagcaaaatgttcctgcttcttccactttgtggagcaagcaagcattcatgaagccccatccaaaacattaaagaaatatcttcaaggtagatatgtcataagcctctttcagctcagcattactcattatgccaatcacaccttccaattccctcaacacagtccaacgccacacaagggcccaattcaaggccaactttgcccctatcctcaacaccgtcttcaaattcaacagcggccccaattcaacgcccgcccacaggggcgccaccacgtaacacttcggttctcccactttaatgcatccgttacacaccgaccaaaaaaggtatcacgagaacaactgggtatcttccgattgttgcgcgcgtaataacatgtttaacgctctcgtgttgggcacagactgccgaaccccgcatggggagttccacaccgtttcccacatggagaacaccatggctttgtccgcgtatccttcggcgttatgtccgactttaaccccgttggggatttatttatcgcacagactttattggggggaaacgaagacaaacacccgggcaaaacaggaacaccgttg

SEQ ID NO: 667487 - DNA, 452 bp, Homo sapiens
cctgcgagctcgtggtgccatctcatgatttgggccgtcttggaagggttcccttcctcctacaagatggtgtgtgaggagccttcaatacgcagcggggtgtcctgtgtccaactcttattcgtggcctgagtgtcatccccgccgttcttccaagagagagatgagaagatcccttcctgtagtcctcggctcccgggaagagacactgctctttgttcctttgcttgggctgtcggatgcagagaatctgagcgcagggagagtcttctgcagccccatttcctcaaaaatccaagctgaccaggtcgcggctcatgatctgtgctcaggaagctggaatctgaccctggtagcgttgggcccagtctctatggctgccgagcatttattacccgggcctccacccatatagtcaaactttagacttgaggctggaggaaagggaactg

SEQ ID NO: 667488 - DNA, 187 bp, Homo sapiens
ggcacgaggcccaaacccacttccaccttaccaccagacaacttagccaaaccatttacccaaataaagtattagcgatagagaattgaaaccttgcgcaattgatattggtaccgcaagggaaaggtggaaaattttaaacccggcttaatttaggcagggctctacccctctttccctcttccat

SEQ ID NO: 667489 - DNA, 1104 bp, Homo sapiens
  misc_feature (721)..(721): n is a, c, g, or t
aggctgcttcgcctggttaacaggaaacctaggaagatgttggtgctaaactgaaaagatttcttacagcaaaacctgcctcggccaggctacagaattccaactttcaacttgattcctagccgtgaacagactgtcctctgctcagactaaaagggaattataaacaagtgggaacttactctccagttgtgacttaacagttctgaacatacctacaaagggaaagtctttattagcaataattgcctgattgacagcacgccagagggaatgaaatgaggccttctctcctacctcccaggagtatgtaactcagatccttagcataaagatccccaggaataccactgctctaacccggtgaacattttttctaatgcagggttaggcttacgtctgaattccacaagacatcctccccctccagtacggaagttccaaggcacttgttttccagcatatcagcctaacctcagtgccttgaaatatggctttaagcctttgagaactgagatttcctgaaaccataggcccttgccccaggggtttctccacatccgggtgttaagacacctgatggcactgttggtttgtcccctataccccagaaaatctatcctgcaaggtagctacttcaatcttgtcattaaaatgtgtcaagtcacagctcgcaatgccaaaggaatgctggggcagtaagtgaggtggataagtgagnagggcctggtggtgaaagcggccaggaccagaatgctccagacctacagagctggtcaaggttaagtgccttaaacttaccaatcgtgggctcagttctcctttgaaaggagaaagtctttgtcctctacttaggcagctgggctagaagtgccttttgacttctaatgttaactaccctccaaagcctcctgggtcaagaaggctctcccaaactccaccctgttcttcctggtcagagaaccagtcagtcattctagtcttctagtccttaaactgatctgatgacttggaaccactaggatttcactgcacagtctggctttttagtctggaaataccctttgaggtctgtttcgcaccagctggatcacctgtttctgg

SEQ ID NO: 667490 - DNA, 841 bp, Homo sapiens
  misc_feature (627)..(627): n is a, c, g, or t
tcgtaaacggctttcaaagcaggacgagccactgttctgacagagctgtgtgccgagcgtgccacagttcgcactaagtaccgacaccaaccacccgtatcactgaaaattcagagggagccatgactgagaccaagtccgcaccacgcaggacgagccgctctaaggggctgcacgttgagcgcatcttcagcactgaaggtgttcatccttatgacgaggtgacctgggaacgccgtgatgtcgtgcaaacgaactggcgtaccggcgatgtggtttttgagcagcgcggggtcgagttccccgacttctggagcgttaacgcctcgaccatcgttaccaataagtatttccgtggtgctctaggtaccccggcccgcgaggatagcctcaagaccctcatcgaccgagtcgtcaatacctatgtgaccactgggcgtaagaacggttatttcgcgtctgatgacgacgccaaggtctttggcgaggaactgacctggttattggtgcaccagtacttcagcttcaactccccggtgtggttcaacgtcggtaccacgagtccccaacaggttagcgcttgcttcattctttcggtggatgactcgatggagtcgatcctcaatnggtaccgagaagaaggattcatctttaaggtggttctggttgctggtctcaatatttctcgtatccgttcctcgaaggaactactgagctccggtggtacggcttctggtccaagtctcctttatgcgtggtgctgatgctttcgacgggaaccatcaattcagcgcgccactcgtcgtgctgcaagaagggtcgtcttgacaatcgatgaacc

SEQ ID NO: 667491 - DNA, 976 bp, Homo sapiens
  misc_feature (292)..(292): n is a, c, g, or t
  misc_feature (390)..(390): n is a, c, g, or t
  misc_feature (529)..(529): n is a, c, g, or t
  misc_feature (542)..(542): n is a, c, g, or t
  misc_feature (577)..(577): n is a, c, g, or t
  misc_feature (612)..(612): n is a, c, g, or t
  misc_feature (655)..(655): n is a, c, g, or t
aaggaggtgcactgaaccctggcggttaccctcccatcatatgttacccagaattccgaacatccagatccaccactatcctaatgggattgtaactgtgaactgtgcccggctgctgaaagccgaccaccatgcaaccaacggggtggtgcacctcatcgataaggtcatctccaccatcaccaacaacatccagcagatcattgagatcgaggacacctttgagacccttcgggctgctgtgtgctgcatcagggctcaacacgatgcttgaaggtaacggccagtacancgcttttggccccgaccaatgaggccttcgatgaagatccctagtgagactttgaaccgtattcctgggcgacccagaagccctgagagacctgctgnaacaaccacagtcttgaagtcagctatgtgtgctgaagccatcgttgcggggctgtctgtggagaccctggtggggcacgacactggaggtgggctgcaactggggacactgtctcactatcaacgggaaggcgatcantctccaactaaangacatcctagccacacaacggggtgatccactacngttgatgagctactcatcccagactcatgccaagnacgactatttgaagttggctgcagagtctgatgtgtccacagncattgacctttgtcagacaagccgggctcggcaatcatctctctggaagtgagcggttgaccctcctggctcccctgaagttctgtattcaagagatggagaccccctccaatttgtatgccccatacaggaatttgcttcggaagccacataattaaagaccaggctggcctctaagtatctgtaccatggacagacctggaactctgggggcacaaactgagagtttgttatcgtattagcttggcttgagactgttgttgcggccacgacagaggggtggcgggacctgtcagatggacggtgctgaccccccaggga

SEQ ID NO: 667492 - DNA, 425 bp, Homo sapiens
ggggaaaaaaaaaaaaaaaaaattaaaaaaaaataaaaaaaaaaaaaaaaaaaaaaaaaaaaaaaaaaaaaaaaaaaaaaaaaaaaaaaaaaaaaaaaaaaaaaaataaaaaaaaaaaaaaaaaaaaaaaaaaacccccttggggccttttggccccctctctttttaacctcggccgtttttttgctgggggccaaattggggctttttgggcccattcccccttttggggggctttttaccattccagggcccggtttttcaaacggcgggtctggggaaaacccgggtgttcccccatttaaacgctttggagtaaatcccctttttccctggggggctttttcggaaagggcccccccccgtcggcctttcctgttgccccctccttttggcgattgggtttgcccgcttttttttgggtc

SEQ ID NO: 667493 - DNA, 383 bp, Homo sapiens
tctgctcattcattcaaaaagtattcattttcgaggcctcctctgagacatctgagcccctctcttatcctactgtcagtgtccaaatccaggcctttggtcactctcgcttattccagaattgggctgtctgcttccacctctgaccttctcctgggcacgcccaacacagccaccagaatgagctgtccctgtgctcccttgctatgaactcaagtcttactaattggggtacgagagattacgattgctccccaagtgtggagtggatctcaggtggcccaggggatcattgtagttgtaacagagaaaactctttttgcctttcaagttctgtatatattttaatgtgtattcaaaaaatatataactaatacatcaaa

SEQ ID NO: 667494 - DNA, 233 bp, Homo sapiens
atactgttgacttgatgccgaatggtatactcaatgtcgctgctgtggatgacagctacggcacgcgagaacaaaattactatcacgaatgacagggccgttggagcaaggaatacattgaacgtctggcccaggaggccgagatgaacaaagctgaagatcacaagcacagggacacgggtgtcatccacgaaattcacttacagttcctatagtcccaactaacatgaaag

SEQ ID NO: 667495 - DNA, 1352 bp, Homo sapiens
  misc_feature (218)..(218): n is a, c, g, or t
  misc_feature (668)..(668): n is a, c, g, or t
  misc_feature (766)..(766): n is a, c, g, or t
  misc_feature (905)..(905): n is a, c, g, or t
  misc_feature (918)..(918): n is a, c, g, or t
  misc_feature (953)..(953): n is a, c, g, or t
  misc_feature (988)..(988): n is a, c, g, or t
  misc_feature (1031)..(1031): n is a, c, g, or t
ggtgctgtcctggatatgaaaaggtccctggggagatagggtttgtccagcagccctaccagtctcaaaactttacgagatcctgggagatcgttaggagtctcaccatcacacgtctagactgtggatcacagagacccgctacggcacgtacaagcatgcacgtgtccctggaggattgagcagagggctcggcggataggactttcacactatcnttgtcggccccgttagcaaaacggacggcgctggcggccatcgctgtgaccagcatagagagtggtcgtgtgagcatcgcctggtcagctaagtgtcaaaccattgagctggtctaagtgcgccgtccgttagcgaatatggtgggcaggcgagtccatgactgatgagctgaaacacggatgagcctcacctctatgtaccaggaatttccaacgagtcgctagatccaccactatcctaatgggattgtaactgtgaactgtgcccggctgctgaaagccgaccaccatgcaaccaacggggtggtgcacctcatcgataaggtcatctccaccatcaccaacaacatccagcagatcattgagatcgaggacacctttgagacccttcgggctgctgtgtgctgcatcagggctcaacacgatgcttgaaggtaacggccagtacancgcttttggccccgaccaatgaggccttcgatgaagatccctagtgagactttgaaccgtattcctgggcgacccagaagccctgagagacctgctgnaacaaccacagtcttgaagtcagctatgtgtgctgaagccatcgttgcggggctgtctgtggagaccctggtggggcacgacactggaggtgggctgcaactggggacactgtctcactatcaacgggaaggcgatcantctccaactaaangacatcctagccacacaacggggtgatccactacngttgatgagctactcatcccagactcatgccaagnacgactatttgaagttggctgcagagtctgatgtgtccacagncattgacctttgtcagacaagccgggctcggcaatcatctctctggaagtgagcggttgaccctcctggctcccctgaagttctgtattcaagagatggagaccccctccaatttgtatgccccatacaggaatttgcttcggaagccacataattaaagaccaggctggcctctaagtatctgtaccatggacagacctggaactctgggggcacaaactgagagtttgttatcgtattagcttggcttgagactgttgttgcggccacgacagaggggtggcgggacctgtcagatggacggtgctgaccccccaggga

SEQ ID NO: 667496 - DNA, 367 bp, Homo sapiens
ctgctctagaggatccaccggaagcacactgcaacatagtcgcgtgccatatgtgtgcgcgatgtgtatatatatatacatacacacacacacatatagatatatacatacacacacatatatatacacatacacacacacacacatatatatacacgcacacatatacacatacatacacacacacacacacacacacgtattagatgaagtctcgctttgtcacccaggctggagcgcaatggcgccatctcagctcagtgcaacctccgcttcccaggctcgagtgattctcctgcctgagcctcccgaccagccgggattacaggcatgcaccaccacatccagccaacttttgtattattag

SEQ ID NO: 667497 - DNA, 93 bp, Homo sapiens
  misc_feature (47)..(47): n is a, c, g, or t
acggttttgtgcacatgatggttccagtatgccatccagaagaaatngcctctgtacatgagcaccaagaacaccatactgaaagcctacgat

SEQ ID NO: 667498 - DNA, 152 bp, Homo sapiens
tcgttagctacctcccgaatagctagcaatacaggtgcgcacaccatgtctagctatttttgtctattttctgtagagattgggtctcactgtttcccgggctgatcctgaactcctgggctcaaatgatcctcataaagtgcaggcatgag

SEQ ID NO: 667499 - DNA, 330 bp, Homo sapiens
gagaccgtgctcggcgtaggcgccattggcacatatacaccatggaatactattcagccataaaaatgatgagttcatgtcctttgtagggacatggatgaattggaatcatcattctcagtaaactatctcaagaggaaaaaccaaacaccgcatattctcactcataggtgggaattgaacactgagaacacatggacacaggaaggggacatcacactctggggactgttgtggggtggagggaggggggaggatacattaggagatcacctatttatatgacccgtccctaggtattaagccagcatcattactattttaaggagc

SEQ ID NO: 667500 - DNA, 998 bp, Homo sapiens
  misc_feature (143)..(144): n is a, c, g, or t
  misc_feature (164)..(164): n is a, c, g, or t
  misc_feature (220)..(220): n is a, c, g, or t
  misc_feature (222)..(222): n is a, c, g, or t
  misc_feature (238)..(238): n is a, c, g, or t
  misc_feature (246)..(246): n is a, c, g, or t
  misc_feature (249)..(250): n is a, c, g, or t
  misc_feature (320)..(320): n is a, c, g, or t
  misc_feature (331)..(331): n is a, c, g, or t
  misc_feature (351)..(351): n is a, c, g, or t
  misc_feature (356)..(356): n is a, c, g, or t
  misc_feature (360)..(360): n is a, c, g, or t
  misc_feature (374)..(374): n is a, c, g, or t
  misc_feature (394)..(396): n is a, c, g, or t
  misc_feature (432)..(432): n is a, c, g, or t
  misc_feature (995)..(996): n is a, c, g, or t
gagagagtacaaggcgcaccagttgctcatcgatgctctggtggatgggcaggtggtagcactgctggtacagaatctgggagctgcctggcatgagtctgtgaaaggaggaggcaagatggcgtccacaacactctggctanngtggaaaacatggctgagtnccggcctgagatgtgtacagagggtgcccagcagggtcttctacagtggctgttgnangaggctgaaggcaaangatgcctntanngtgccaacaaactgtattgcagtgaagtgctggccatattgctccaggacaatgatgaaaacagggaatngcttggggagnctggatggaatcgatgtgcntatgncagncagttatccgtgtntaaaagacagcaatcccagnnnacggctgaggagcaggagatgatggagaatctgttngattccctctggtcctgtctaatgctttgttccaactcgtgaggctgcttcctgaatgggctgaagggtcttcagcctgatgaatctccatgctccagggcaaaccgaagatctcccggagcagtgcccgtgaaagtgcttggatcatgccaatgattggcccgaaaggcacagacaatggcataagttgttgacattcttggctgacgaacaactttcccctcttgatgaaatctcccagggaagatcaagaaagtgggaaccactggggaaggaccttggggagctgtatgacgaggctggtttctctgggaacttagaagggagctggtcccggtctgattgtgcatgggcatgagtgaaggtgccgccctgtgggggggcatattggggaaggggggggccaacagccagggaaaaatggcgggagaaaacaaggcggggagaaacgcgggggtgtggttcaaacaaagggggaatattcgtggggggcacacaaaagactagtttgtgggggacacgctgaatctttacttatttattttgattgtttgtttgagggnnag

SEQ ID NO: 667501 - DNA, 259 bp, Homo sapiens
  misc_feature (48)..(50): n is a, c, g, or t
  misc_feature (53)..(53): n is a, c, g, or t
  misc_feature (89)..(90): n is a, c, g, or t
  misc_feature (113)..(114): n is a, c, g, or t
  misc_feature (118)..(118): n is a, c, g, or t
  misc_feature (124)..(124): n is a, c, g, or t
  misc_feature (133)..(133): n is a, c, g, or t
  misc_feature (157)..(158): n is a, c, g, or t
  misc_feature (160)..(160): n is a, c, g, or t
  misc_feature (164)..(165): n is a, c, g, or t
  misc_feature (172)..(172): n is a, c, g, or t
gtggagaccccgctcatggtggccgacaccaggtggttgaggtccccnnnggnggggggggcagcttgagggagcggaaacagatgtcnnaaagtgcctcgttgtcgatgcannaggnctcatncgtattctncaccagctggtgcacagacagcgnngngttnnatggctncaccaccgtgtctgacactttgtgcgaggtcaccacgctgaaatgtgacatgatgcgtgatgggaactcctcgcggatactactgat

SEQ ID NO: 667502 - DNA, 1440 bp, Homo sapiens
tcaggagttgagaataacatatcccctaaagagccataatgggaaaggaataggcattcataatcgaagctcgatcgtgggttgagacatagttagactttgagtacaatcattcatcgatctacatgggtaatatcatgtaatctagtaaatgggtgtagaggatggaagaaaaagtaaacgcgaggataaaattctgacgtagatggaggatgtatgtatgcatgggaggaggggctgccttgacagttaatcggcaggggggaacattagtgcttctgaaatgtaacagagtgacatcgctagaagcgtgggtgatactaggatatgaataattcgcttatgttggatacgatagtagaagcactggagtcaaggatatcgtcatctgttagacacctattccaatttaagacttgccacacgcacgtggtacacattatgaacacatgcacgttaatccatatgaggttcccccctggaatatggccacatgcaggtatcactgcatccattgtgacctagtaaacaggcttgggcttgattgccagggaatttaaagaattcggctaagttctagagcaatgtatgagcggtgggaaagcatatatggacaaggctcttgggcataatttggtttcctcataggggaacacctagcgtgcgtaggttaaactcccgggaagaaactgggactttggtacccctttatcctggagcccatttaaaacaacaaaacttgtgggatggagggccaatatacccacaacttaaagattttgggaatctcgtgttggtccttaaaccttacaaaactatgtggggaacttgtcactcacatgaggaagctcacctatcccacattagctagggacgctagttaacaagaacagccacatgattcgaacggcggccaaccactgtcggttagcctgggacgatagtacccatgggaggtatgaaaccctgtgttaagagaacccatttttgagagggcttactgacttcgggccttgtaggaattcaaagggcaaaggacaaatttcagaggttcggctctaccccattggggcactcagggaacattagaggataattcgcggttggaacaaaggggggaatttcgttatagtgggcctttttcggccaaatgtattagggggtttgaacacacctttggcgcctagtaaggcgtccaacttacccgtgggagcacctcggggtagcaaatccgtttggtacacccccaggtctctattaggcgcgtattcggggagcaaaccgtaaccccaacgatggcgaaaaacaccaccttagaccacaagcgcaatttgcacagcgtggacctgcacaggtcccgggttcgaaatattcccctattaccccacctaaaaatattccccgtacacaccaactggggggggagccaaaacaatcccc

SEQ ID NO: 667503 - DNA, 467 bp, Homo sapiens
tcgagatggtgccatggcactccagccggggaaaaaaaaaaacctgcctgccagaaaactactaatgggctaactagggtaattaaaaccccacatttcttaaagtctcaatctttctcccatcaaatagtaaagtcaagtcttatatttcagtggtaaaacatcaaatacacaagctttggatccaatggggttttataagcatccatttaatattatctacaaataacaacggaccaagggttaataaggaggcaccttggaagcagacaaaaagcactctagacggagtcagaaaaagcatcatagggtcccgtcttctccatttcccattggtgatctggctttcatcccaggtgagatccaggggatccgtcataaatcaagtacttccggagtctcatggtggtctactgtgtacccagttccatggacccagttatgggcaaagagtaagggaaagctac

SEQ ID NO: 667504 - DNA, 144 bp, Homo sapiens
aaaaaaccccccccccaattttttggggttggttttttaaggaaatttcccgggggggcttttttttttgacaaaatttccaaaaatttttttttgggccccccccaattttaaaaatttggatttaagggcctggtttttcca

SEQ ID NO: 667505 - DNA, 175 bp, Homo sapiens
ttagtacgatctgagccacatctctgacctataccacagctcacggcaacaacagatccttaacccactgagcaaggccagggatcgaacccatgtccttgtggatgctagtctgattcgttaaccgctgagccacgacacgcgttcacttaagtgccgctacgcgcggtaccga

SEQ ID NO: 667506 - DNA, 112 bp, Homo sapiens
  misc_feature (3)..(3): n is a, c, g, or t
ttntcatcttgacgatcccatcattgctggctgcacatttctttgttctattttttttttttatttggaaacagagtcttgtcctgtccgccagcctgaagtaaagcggtgc

SEQ ID NO: 667507 - DNA, 1392 bp, Homo sapiens
cgaagaaaagtaaaccagcccccagtgaatcagcaggttatggaattccactgcacacagacggagcatgcagcaaaacagatgcaagcacagcagcaggggccatattgcagatacatgcagatgttaacaccacaaagggcttcgaagcatcgcaaagccatgcaacatctgtgcaaacaccaccaacaggccgccaccagcaggtagcggtcacgggtccactcaaacatcacacaagtgcaagaaacagaacacacaaagtgtcatatttctagtccatcatcaccacgtcgaaagtatcccaaagaacagcattcatgcctacaatcaccatcagcacttccatcattctaaaccatgcatcatcattccaggcatattcaccaccattcacacacatgcatctcatcttcacacatctgctggcccagctgcatgcggcgctctctacattatacaatggaactattaagaattggatttatagaatatgtcgtgatacacaaagtggacgtatcgcaaactaatctgcacgttacctaaaagggcaagattcctggcgaagcatgtacgtaacagtccatgctccatcattccacagcacagattcataaagcaacacacatcgaatggatcaggtacagatctgtccccaaacatttccagtctaaacgccaagccactcagccaagtgccctcgcagcattcatcaaggcatgcacacaccaacacaaaatccagacaaggataataacgtatgacaccagggcgacagcccctatcactataacccagggactccaacgcggcaactaccacattcccacgccactttcagatgactgcgtacctaggatgcttactaacaccttcaccattactgggtagcactcaggataatccgtggcgctacaatttacaaaattcgaggggcacatcgaagaaattcacaagacccagctgtgacccacctacacctcacaccgggggaatcaacttacagctgggtacaacagacactcaacacatcgacaacgcaccacgggagtaccacaacatacttacgatcaccagacatacaaacaacatcagtaagccgcaaaaacatacacaaaccaataccacacgacacgaacagaagctaaataaccgaccagaccgaagccacgcagccggcaacagacacagacgcagcggaaccgcaagacgatctacatacgccaacaacaaaccacaacgagagcaacctacacacacacgccgcacaccagccaccaacaacaccatgacacgcggacacaaacaccagaggcacaaccagaccacgaaaacagggaacaacaccaaagcattaaccacaacgaggaatcaaacgagcacgagaacaaa

SEQ ID NO: 667508 - DNA, 187 bp, Homo sapiens
cggtcacacacactgtgacagacaacagcccacgttgccacagacgcctcacaccatcacacgtggccacacgcacgcgttaccgccctgcaacccggcgtcccccgggccccgaggccccagcgtgctggcagacccacacagataaaatgcgcgcacgtggttaataaaattacctacaaatttg

SEQ ID NO: 667509 - DNA, 122 bp, Homo sapiens
cgacacaattactgaggtgcagagcgggtagggaagagtgctgtcagttgcacctgggctgctgtgggaagttgttgattcctgactggggcctgaggtggtggtgctggcaggtaacagtg

SEQ ID NO: 667510 - DNA, 84 bp, Homo sapiens
  misc_feature (80)..(80): n is a, c, g, or t
gaaagaagtcagttaacgtcacccaaaagcacaaaatgggattttagtcaaatatttattggatgatacagtgtttttanggaa

SEQ ID NO: 667511 - DNA, 175 bp, Homo sapiens
  misc_feature (89)..(89): n is a, c, g, or t
cgactaccagactctcttcatgacaccaatctttttgtggtgatcctagaccctggttgtaccagcaactgatgtcactatgacacagncctgccttcataggctcacagtctggtgtgaggggcagaaaaatacacgaatatcaaataatcaggtggtgggagggtaagggctc

SEQ ID NO: 667512 - DNA, 105 bp, Homo sapiens
tcagtacaaatgactaatcaaactaacctcaaacaaatgataaccatacacaacactaaatgtgacgaacctgatctcttatactagtatccttaatcattttta

SEQ ID NO: 667513 - DNA, 257 bp, Homo sapiens
cgcactgggaaactggcagtaggttttggtttttattttttgagacaggttctcgctccgtcgcccaggctggagtgcaatgttgcaatcatggctcactgcagctttgaactcccaggctcaagcgatcctcccatctcagcctcctgagtagctgggactacaggcacaggccaccaaacctggctaatgtttaaattttatgtagagattgcggggggggcgggggtctccctatgttgcccagtgctcagagt

SEQ ID NO: 667514 - DNA, 210 bp, Homo sapiens
gctgattctgacaaggaaaggtatcagcagttggaggaggcatcacccagcctccgtgacgcggactcagcacacctagatgcacatggtcgcattccccagcagaaggaaagtcaagcagaatggtcgaaggagattgactcattaaaggaaaaagttcccaacagacaacagcctcttaactactgcagctttttaagaaaaagatat

SEQ ID NO: 667515 - DNA, 434 bp, Homo sapiens
  misc_feature (84)..(84): n is a, c, g, or t
gtggagcctgagaggtgacagtgctgacactacaaggctcggagctccgggcactcagacatcatgagttggtccttgcacccnccggaatttaattctctaacttctatcctcttatctcttcacatgtgtgcttgtgtacagagaagtgcatctagatgagatcgtatatgcatactgtgatgcagatttccgttacttatcaaaccaaagtagacaaggatctacgtcttggaagacatttactcaagtgaacaaacatcagaagtcaacgctgataagctcaactcacttatattgtatctcaaacatataaagcgtattgagccagaatgtgagaatatgatatagctcgttaaactgccagtatcgttgcgaattttccatatcagatgtacgagaaggtccatgaaccaggcgactgagacggaaca

SEQ ID NO: 667516 - DNA, 179 bp, Homo sapiens
tcgatcgagctcggtccccccattaatgaacaactgattctcacaaccgaagggagaatggacacctcccattgagggaaaaaaaaaaaattcacactctggcctgcttggcaagttcaccggttcatttccagcttcatcttcatagtttccatagtttagttcctatttcttttagt

SEQ ID NO: 667517 - DNA, 1352 bp, Homo sapiens
gcacagggtgccctagcagagtctttctacagtggctgttgaagaggctgaaatggcaaagatgcctttcgatgtccaacaacacgtgtagttgcagtgaacgtgcgtggaccgagtacttcgcgtccaggacaatgatgaaaacgagggacactatgcttggaggagctaggacctgggtacatcgcatgtgcattcttgcagtcatggttaatccggtgtttacagagagacatcgaatcccatgacacgtggctgaggatgcatcgagagtgatggagcaatctgtttgattacccatcgtgctcctgtcgtaaatgcgttgagtctccacaattcgatgagcagcttcgctgatagggcgacgggtctatctagcgtgactgaatctcggtgctcgagggaatcagaacgatctcccggagacagtaccctgaaagtgcccggacccatgccggtgatctggcccccggaagggcgacgaggagcaaacctggccgattaccggttgggtctgaggatttcctgtgggtttcaacggaaccgcagttctttgtcccccccttcttgttgagtggaatacatcctgcaccagggaacgtattccaagtaacaagttggggaaacctggtggacgaagggacaccttgaacgaaggcattggtgcttggtgcccgaatcccctgggggttttcgccttcccgttggggggaaaccccctggaatggaggtgtcgcaggcgagcattgtggacctccgaggggtttcctttggccgagttaaaggtttccactcttgggcacagacattgtagcacaggtgcacgagaaggcgtcggagcaagagaaccttcaatggggacgcattttgggattctccaacaaataatcctcggagtttgcccaacctgcgcagggggtggagccagggaaacagcaacaccgacttctggaaggggcggaacaataggaccccagaacctatttggacgtgcccggggactttatgggaagtattaagcacattgcgaaggaaagttacccacccggaaggcagagggagctcccattacccatacggtgcacggcccctggagaaattttgcgcgagcggcaacaaagggggattcatcccagggaaatggttatgagccaatacatatcgatgtggacctgagggaaacaattgtgcaaaggaccaagataatattctcgccccgctatgttggagcaaatggagaggtgtcccccaaaagatacaataagcacacgtgccaaagggaaggggctacgactcacagattggatagggcgactatttacatacaagagagatttgctgcaaaacaaccg

SEQ ID NO: 667518 - DNA, 871 bp, Homo sapiens
accgagggatgaggggttgactgagcgtttgagagccttagattctcccgaaacgccaggctgaggacaacgatgtcgcggtctccccctcactgctttggggccgacaccttgcctgggcgtgctctgcgtgctgtccgggacaagaacacggacccagcacccgaacgtgacgactttagcgcccatctccaatgtaacctcggcgccggtgaggtccctcccgcttggtcaccattccggcaccagaaacctgtgaagggtcgaaacagcctggcgttaccgtgtttaactgttcgcgtgtgttaatactacctgacttttggatagacactgtacacagatgagagctaattgtgtcaccataactcaacaagttaggtgatggtcaagtggggaacaacgacaagaacttctgttccgtttccacggccactccagtgcccaaacagccaattctacagctaaacccacagttcagccctccccttctacaacttccaagcacagttactacagtcagggtaccaaacaaaatacacactgtgaactcccaacctttcaaaaatcttgtggcgaagagtctacccttttgctgccagccagtttcattggagggaatgtcctggtcatggggatgtgcaagggcatgtaaactgtctttcttttattaattctgaattttaaggaaggaaaattaccaacatctgtaacgtagccattgaattaatagggactggggagtcatggtgtacgtatggagcaaaatacattgtagatgcccatgtgaacgtatcaggacttaacaagggaataggagtggaggcaccgaggaaagaaacttgcagaaaataattatgaggggggtaaa

SEQ ID NO: 667519 - DNA, 153 bp, Homo sapiens
gtatacacgtgggcatagaggatgggaatcaaacccaaggtgccatgagtgttccacatccagctgggttgctgacctgggtgaacatggtgtttgccatgctgtggatcaccatgctgtcctgatcacagttgagggacacaatgtttgctg

SEQ ID NO: 667520 - DNA, 477 bp, Homo sapiens
  misc_feature (176)..(176): n is a, c, g, or t
  misc_feature (213)..(213): n is a, c, g, or t
ggagtccgtcctctaagaaatctgccagggcctttgatacaagaacccggagtgccagagggctggccggtgtcaagggaaaaaaagttgttgtcttcacccttggggcatcacatgcctggatctgttgacaccccaaacccaacaaggaggaagcctgggaagtgcccagtganttatggccaatgtttgatgcttaacccccccaatttntgtgagagggatggccagggcaagggtaacttaaagtgttgcatgggcatgggtgggaaatccggggtttcccctgggaaagcttgattcctcccatatggggggggttttggagtcctgctttggggggtccgggtcctttcccccctgagattggggtccccccctgaaatcccccttgggggaaaggctgggcccccagcgggctttcaaaaagggcccgttgatcaatgaataaataaacgggcctatttttttttgcca

SEQ ID NO: 667521 - DNA, 244 bp, Homo sapiens
acgagctgtcattagagcaactccatcaagatcttcagcagataataaccaaaggctatacggtaagcataggcaatttcaagagcaggtacaatggactggatactagaaattttctatatacactacaacagaacataggcatcctggaatatcacatatctgaccttttgatgtattcctaaagtatggagaaatatagcctcgatccaacttcatgccttcaataatttctaattcatca

SEQ ID NO: 667522 - DNA, 267 bp, Homo sapiens
tttggaaaaaggaaggaatttgccccaagtccgtcagctgggataaaaacctgggggtcctgtcccaaaagtgcaggggctttttgctttgtagcaaggcagcagacatttttgagccaggcccccccacaggcccttatttggggggtgggtcatgatccccttttgcttggacatgctctcaggaaaataaaaaccctggagaaaccctaggcccttggcaaatgatttgagaccccttttgaaaaccatgtaggatgaatggga

SEQ ID NO: 667523 - DNA, 178 bp, Homo sapiens
ctgcccacgcccttggagccttccaccggcattcatgacggcctgcctgcaaacctgctggtggggcaaacccgaaaatccagggtgcccccccccggaggaaggtcccatggcctgttgggcttggctcggggcccccccccctgggtaccttgtgggaataaacaggcaaattaga

SEQ ID NO: 667524 - DNA, 1156 bp, Homo sapiens
actgatcgcgagcggtgcccttttgattactaattttttatcattattacacatataaatagtgatgtttccaaatattaaataaagttcagagattcttacatcaattatctcaaagtgaaaccagtgcaaagcagattcaggtgttatacaacaactcaatttattccccattcaggttcgtgcgtgctatatataccaacaggtggtgaatgtgacagaaaaattgtggaatggcagtggtgcctgtggtctccagaaacaagtgtccactcgtgtatatacagaagaatacacaatcagtgacagccacaagatattcatactatgtggtcgtgacaagttcaaatctcacaaacaaaactatactatatatgttctctgtgtgtttatatacatatgtgaggcagagccacaagtgtgcacaactgtgcacacacacaattatcagcggtgcgccaaaaatatatatactctaacaacgtcaccgcgccacacaaacaaaacaacaaacagacacacacaaatactcgcaccacacagtgcacagagcacccagaacaaaacactctgtgacaaacaaaatatgggagcgagagagggatcagacagacactcagtgaaacacaacgcataatgtgtgtgcccaatccaacccagagcgcaagagaggttacaacacaaagtatacacacgagaaaaaaatatacatagatcctcccacacactaagaggcgccatattaccaatctatacaattataagagaccacaaaacacccgtgaggaaatctcacaagcgaaagaaaaaaccgagtggaaaaaaaacacccccccatcaagtgtacagacaacaatatgagaaaagcatgtatagaaaccacacgtgggagagctagagccacagaccaaattaacacagcacacaacaaactcaaaacggaggccaaaaaaacgtgtgacacacattcaaaaccacaataaaaaaaacaaaggaactaagaagcatactaacaaatggagggaccacagggcacaaaaacactaccgctaaacacacgaacacgtggcaccaccaacaacacatacagcacgaccacaaaagaaggcggtcccatctgaccccccaaaaacaccaaaaaaactaacatcacaca

SEQ ID NO: 667525 - DNA, 279 bp, Homo sapiens
tccttccggccacggactcagccagccactacctggcagaggctgagcagttgtgccgcaacatcggcatcatcgaccacggcaccattgtcgagaacaccagcatgcgcaacctgctgggccagttgcatgtggaaaccttcctgctcgacctgaagaacaacctgtcggtggcgccgcagttgctcggctacccaagccggctggtggacagccacaccctggaggtgcaggtgggtaaggccatgggcatcaccacgctgtgcgtggccagaagga

SEQ ID NO: 667526 - DNA, 295 bp, Homo sapiens
gggggcctgggggtaggaggctttgttttcaccatttgacaagaacccaaagttggaaaggcttttgtttccttccaccccaaggggggggggggaacccaccccgtttttgggaaagccccttggaaaaaaaggttgatttttttttttcgaaaaaatttttccttttcccagggaggcttttttccctttttgccccgtttcccttccccctgcgggagaggggtttttttgccttcaccccgactatgtggcaagtttgtttcctttagtaaactgaaaattattgcttaga

SEQ ID NO: 667527 - DNA, 494 bp, Homo sapiens
ggtgacccaggatcctacggaactagcgaatatataaagatagcctgtgcatccaccaaacagtttgagaaacaaacattccaacttgctatgcatctttctttcatcccattttcctttcctttcttccaccaggtatccattattggactgtggtgtatctagttcctaaagtatatttactacatttattaaacatacaatattttcactgttttaggaattgtacatacatgttaccgttctgtgtatccttctgcaacttgctttcccctcttcaacatcatatttgtgatttatccaggttaattcaggtaatgatatatataatacttgaagaaatgctcatacctatttccctgtttctggtcaatacttgctcttgggtcctctagattaaaaggtactgactccagtgagcaagcgctgaaaatttcctccttttacttctgtaatgtcccccttcactatataagattaagaggtgagaaatg

SEQ ID NO: 667528 - DNA, 526 bp, Homo sapiens
gctgcgcctactactactcaagcataaagacatgaaggatgaagacttttatgatgatccacttccactatgtgaatggtcaatatattttcttatccttatgatgttctttttcttttttttttttgtggaaatgaagtctgtgctctgttgcccagggtggagtggaggggcttcattgcgggtaacggcaacgtcggcctcctggggttcaggcaatgtctcatgcctcagcctccacagtagtggggataacgggcatgcaccaccaagccgggctaatttttttgggtattttaagtagagatggtgtccacaacatgggccaggtgggtctcgaactctggacctggtgatccaccggcctcagcctcccaaggggcggcaactacgggcgtgagccacggggccgggccctagtttaatatccaaatatgggcttccagtgggtgctcgggtactaaaattattagattggaacacccttatacatagcaaccttgtgttccatattataactatttcc

SEQ ID NO: 667529 - DNA, 277 bp, Homo sapiens
attccgcgctaacattatacttcctccctaaaagcaggaccaagagaaggacatctgtctcaccatatctattcaacactctacggggcggcctagtcagtgtaatacaacagggaacagaagtacggggcatccagattgcaatgtgtgctgattcatttagggtgtcaacttgagtggatgaaggatactcgcgacctggcaacgcattgtaccggggtgtgtctgagagggtgtccccagaggaggttggtgtgtgcgtctgtgcactgcgtgg

SEQ ID NO: 667530 - DNA, 127 bp, Homo sapiens
tacactcttgaacctctcacctcgaaaggttggactatgtgaaagtctggccagaaagcccgtgtcttgtgacagtgtctctgattgtgtatacacatgtcacagacacgggctttctggccagact

SEQ ID NO: 667531 - DNA, 347 bp, Homo sapiens
ttccgcttttggggtctttgctgagaatctagttttttgttgttgttgttgttttgttttttaaattttgagaagggggcttaacttggtggccagggcggtcctaaaccatttttccaacttaaccttccaaagtgccgggaataccagccttaaccaattgggtccggcagaacttggattcctgaacggggttcttccttggcccaacagctttctggtttattcggaataattctaacccttggtttttttttttggattttaaaaaaaatgggggcgggtgtttaatatggtttcccacaaacagccacaaattttttggggaatgaatctcaatttaaccc

SEQ ID NO: 667532 - DNA, 331 bp, Homo sapiens
tgtgtattgtgatgctgatgatgatgcagttttcacatagctcactcttaactcagaggtctgtttgtgtttctataggacaagggctcagaggaatggacgtgcttagacatcggtgttcttcttcccagttcttgacccctggtcctgtctccagcccgtcttgggttatccactttgactcctttgagccgtttggaggggcggtttctggtagttgtggcttttatgctttcaaagaatttcttcagaccagagaattcctcctggcagccctgtgtgtgtcacccattggtgacctgcggcagtatgtacttcagagcacctactg

SEQ ID NO: 667533 - DNA, 327 bp, Homo sapiens
  misc_feature (34)..(34): n is a, c, g, or t
gcgagactgtctgaaaaaaaaaaaaaaaaaaacngtgtaaaattccatctgttctgaatatatacggacttttttcttcttgtcattattctctaaatgagaaagtataacaactttgcatagcattagctacatcatattaggtatcatacataatctagagatggcttaaagtatacgggaggatgtgcttagcttatatacaaatactgtgctattttatataagcgacttgggcatccgtggagtttggtattggcagaggtcctggaaccagtcctccatggatgccaggaatgactgtaacgactgcttggattacaagga

SEQ ID NO: 667534 - DNA, 216 bp, Homo sapiens
  misc_feature (202)..(202): n is a, c, g, or t
gaaaatccagcccagtggaggcacaaacaccaacgaagcacttctacgggcaatattcatttagaatgaggccaatagctcaagactgttagaccctaactcgcctagttgattatccaggtccttgatgaggatacaacagtgagcgaactgaaactgtccaaaaatcggaaaaaccatagggagagcaatcaaaacaacncacactcgctcagt

SEQ ID NO: 667535 - DNA, 283 bp, Homo sapiens
  misc_feature (45)..(45): n is a, c, g, or t
gtgacttctttcacttagtaggtttttaaggttcattcaagttgnactgtgtatcattacttcattactttttatggctgaataatattccactgtatgattttgtatgtctacttatcagtttgttaacccattcatcagttgatggacattttggttgcttccatttggggctattatgaataatgctgctacaaatattcatgtacaagtttttgtgtgaatacatgtttccatttctcttgggtatatacctagcagtggaatgctgggtcatattaca

SEQ ID NO: 667536 - DNA, 159 bp, Homo sapiens
cacctaacgatatatcggtcagtggcaaaccatacatacgacagtggcccataagattataataggagctgaaaaattcctatcacctagtgacatcgtaatgtaggtcatgccacacattgctcatgtatttgtggtgatgctgcctttcatcgatcg

SEQ ID NO: 667537 - DNA, 272 bp, Homo sapiens
  misc_feature (12)..(12): n is a, c, g, or t
tgagaaagccanccctgagcttctttctaacccaaattgcttctctaggcagtttataaataaattgaacttcaagattcaagagaatggcctttaagatttcttctaagtctagaatacaaagttctttttttcggccaggcacagtggctcacgccggtaatcccagcactttgggaggccgaggcgggcggatcactaggtcaggagattgagaccatcctggctaacaaggtgaaaccccatctctacaaaaaatacaaatttaagcc

SEQ ID NO: 667538 - DNA, 169 bp, Homo sapiens
actcagaaggtatatcaataagaggcacagaatctatctatttccaagtgcataggttactcctgatcacaactacaggttagaactagtcgttcatttgtcatctcattcctctatccaattccaacagatttatactggggactgaagactaccacattcttcgatc

SEQ ID NO: 667539 - DNA, 1034 bp, Homo sapiens
  misc_feature (36)..(36): n is a, c, g, or t
  misc_feature (968)..(968): n is a, c, g, or t
  misc_feature (1034)..(1034): n is a, c, g, or t
tatctttctatacctataacacacaacaaaaacacngtgatctggaacaatgggcaaaacgttgtgagcagggccggagctgatcataaccttccaggcacagctggttatggcggtcaggaaccccataggcgaggtgtgtggagggtgacccggacaaggtgctccggttgctgttcgtttgtggcgctatgcccacactattactagctcagtctcttcgctgtctgacagtctcctgcacatctatcgctacagtcaataactatattttctgaccgcggtggcgtaccaaggcaaatcagaattgcgaaatcatgaccataagacctgcaacccctcttcgcgctacttctgcaactttggccacacccaatgctcgactcctttccttcattcccttactcatactaagcacgatcgcctcgtaacgaattgctgactccgtactcatgtccgcccacaccgcccctcctcactccattccctcattctcgactcccatcgcctttgcgctctcgttcgtcgatccgccccacctattttgtcttattatccacacgcctctagattagagacttagtccccccgctcaccactgtccctcctcctcctctctataatgtcgtgcctcgtctccccgtcccgtccatactaccacactttgcccttatctgatttatctatctctgtgcactcgcctcttctccgatccagacttcgccaccgttctcctccctgctcatcgtctgcataattgggccgtaccctcaggtcttcttcctcttcactcgtatatattaatttcgaacaaattacttgcacgccccgcgatccttcaccacggggcgctcccagccgattatctgtctcggattctcccatcctgtctgagacaacgccgattctacactcgtccgccctgatgtaccaaccgaggtgactcgtcatccctctatccaaccatntccatccccctgctcagcgagcacgctgtgcccttcgtcctttctgttctcctctgtgcagatggn

SEQ ID NO: 667540 - DNA, 97 bp, Homo sapiens
gcacgaggcctgggtgacagatccagactggagtgcagtggaacgatcccggctcactgcgctccagcctgggtgacagatccagacttcatctcaa

SEQ ID NO: 667541 - DNA, 701 bp, Homo sapiens
gttcatcctttactatcatcgggaggacatggaagaggaccaggagcacacgtaccgtgtcgtccggttcgaggtgattccccagagcatcaggctggaggacctcaaagcagatgagaagagttcgtgcgctctgcctgagggtgccaattcctcgccccaataaatggacaccccaacgaaggagaatcaagccatgtacttcgagctactctgtccactgggaggaaagtgatatctagaagtgggcctctcgcttgggacacttacctgacacatgagtgacggtccagatccacgtggtttttctatcatgtgaactccgtatgttagtaggtctgtgcttccgtggtcaggtatcctgagcatgcattgatcatttcggaccctccgtggaaggacattgccaactagcaagcaaggaggatgacattgaagacaccatggaggagtctgggtggaagtgggtgcaccagttgcagtacagtcattcatggcaccaaccctagataactccatgatcgcatcagcatccgcatggtgggctcgaggctttcagattgtctgtgtgatcctcaatcgtcaatctctagtagccagggttgggatgcggtctgccctccaggcgggagcgtctgatgagctaggagactgtttgcgtcttcatgtcaagggggggtgttgtggggatttacttggtg

SEQ ID NO: 667542 - DNA, 299 bp, Homo sapiens
  misc_feature (1)..(1): n is a, c, g, or t
  misc_feature (146)..(146): n is a, c, g, or t
nacgcggatggatggggaggcatacccctcgtagatgggccagtgtgggtgacccgtcaccggagtccatcacgatgccagtggtacgggccagaggcgtacagcgatagcacagcctggatagcaacgtacatggctggggtgtngaaggtctcaaacatgatctgggtcatcttctcgcggttggccttggggttcaggggggcctcggtcagcagcacggggtgctcctcgggagccacacgcagctcattgtagaaggtgtggtgccagattttctccatgtcgtcccagttggt

SEQ ID NO: 667543 - DNA, 735 bp, Homo sapiens
tgaatgtgctaaataaaaagtgttattaaaaaaaaaaaaaaaaaatttaaaaaaaaaaaaaaaaaaaaaaaaaaaaaaaaaaaaaaataaaaaaaaaaaaaaaaaaaaaaaaaaaaaaaaaaaaaaaaaaaaaaaaaaaaaaaaaaataaaagaaaaaaaaacaaaaaaaatttaaaaaaaaaccgtgtttcccctttggccccaagatctttaaacttgggccattttttccttttggccccattttgggccatttggggccatttcccctaaaggggggggtttttaaaatcccgggccgggtttataaaaagtcccctggggaaaaacccgttttgccccccatttaattcccttgagaaaacctcccctttttcccctttgggaaaatttccaaagggccccccccaaagggtctttccacaaggtttggcacccctataaaggtccagggaaaattgtgggaaaaaaattttttttaaaacccccttggcacctttttggaaaaaacccccttttttctccaccaaaaggccccaaatttgggaatacccctcttttaacccaataggataccccccggcactgtgttaaaggtcgtggccccctttgggcacagagggccacattttaaaaaaaccgggtctttcccccctatagggggaaataaccccctattagagggctattgcgccacttggtgacccatatcccctagaccccccttttaaact

SEQ ID NO: 667544 - DNA, 755 bp, Homo sapiens
tttttttttttaaacaaggagttaacgttttattttctctgtgcttttgcaacattactcaggaccaacataaaaaagaaatacctccggtgtgggaaaaagttactttaaaaaggggaatggagtgggggtgctgaaagggattagtaccttgtgccccaaggagctacagcatctctgatgggtccaaggatatagaaaagtattttgggcgacaattgtacacaggaggacaggaagattgtgaatttactggagggagaggtgcctcgaagtgggccctcgagggggaactggtggcccggggcagtgggcttctgggtgcgagggagaggcccccgttgttagccatagggtgggggttcgtgcaggcgccagtgtacccatggcggggggcatcagtgggagtgaggtccacgcataccatgcggaggcataggacctgggttgacccctgggcgagatccgaactggaggccctcggggcgggcatgcccatttggaggacggcccaggatgaggcatcccaggtgggtgctcggggccggttggctggcccccagagcctggggtcccgctgtggggattgtcctaagccatgagggcccatggtgtgcaacgctgcgtctggaacatccctggatggggcatcccacccgcgtgggaattgggtgaaggatgtgagttgtccctttgaccctgggtttgtcttgcccctggggttcctggcgatggggggcaatgtcctgtgaccg

SEQ ID NO: 667545 - DNA, 1049 bp, Homo sapiens
cggttcactgaggcttcctctgtgtttcacttacccccctatcggaaatcctgatactactgccctaggccccacttgctgttgtttttcccatagcacacgtgtataccacaactacctggcgagctctcatacttcctattccttaatttctatctacttttggtgactccgccttctggcttggaatcaggcttattattcgcttctacttctttttggccccactgttatcaccggtatgaccttcatctctatggtttaaccatacgagagttccagggtcacggggcctaatgtttgttagcaagctcgtaccagtgctctggcctctcattacttcgacgtcatcctgtctagcaacactcagcatggcaagtattgcggctagactgtcctgctaatgaccactgccggttccctgaacttctcctctggcattcggtctcaagctgctaggcatgatatagctctacctatccttgcagcttttgcgatccattagcacgcgccctagcccactgggaggtgttactgcgtgtgcccgtgctatcgaaacccatgtgctatatagtgcgcagcagcacagtgtggacgccaccatgagaagagagctagttatggccacagcatggtggctatgactcctcggggaacatgtggtggcccgctgctctgaggtgcgccaggcctctgccttgccgggaatagacctctaactatctgcgacagttgcgccgacacctgccatgtgttccagcaccgcaggcctgacctctatggcaatctgggtcactcactgtcgataagacgtgacttctgtagagttatagactcatgccacgctcctcacccccacaccgtgccactatgagctagtgctcatgtgacttggaggcaggactctacggcacagctccccttacttggagaaccttgatctctcttgatggaacatcagatggcctgtattgggaaagaaactcccacctgtagcttcactatgaggtcagactgcagaggtcagaaaggtggaatttatatagtca

SEQ ID NO: 667546 - DNA, 755 bp, Homo sapiens
gccacgtgcccacccccccgcgcgcgggcggattaaactccccctacgtatactctcgcacgcgcgcacacgaaaattctttttccactatgggggtgttttccctcgtattctcttgtgggggacaccacgcgggggggcgcccccccccctactctcgagatggggggccccccccccccacatgggcccccccctacacggaagggtgtctcgcacacctctcctctctctctcgggaacacacacccccgtttttctgagagagaggggccactctggagattatagtgtgtgtccccccacacactgttttcacacttttgccctctagagggcgtgagagagtagcgcacacgccgcgcgcgcacacacaataggggcgcacccccacctcttaactctctcttgggagactctccgcggggaactctttgggtttccctctctctctctgcgccacaaggagaccacgcgcacagctgggtggagaagagagagagagaggtgtcctccacctgcggtgaacacataactgggttcacaggcacctaggcacttggagagagaagggtgcacacacagagattggggcacacacggagaggagacccctcgggacccgtccctcggggcccacaggccctctcacacacacaggagcccaaagccacgcccccaaaggagttacaggaaagggtttggtgaattaagggacccccaagggcacccaggattaaatttttttgtgacca

SEQ ID NO: 667547 - DNA, 633 bp, Homo sapiens
  misc_feature (49)..(49): n is a, c, g, or t
  misc_feature (55)..(55): n is a, c, g, or t
  misc_feature (59)..(59): n is a, c, g, or t
  misc_feature (61)..(61): n is a, c, g, or t
  misc_feature (145)..(145): n is a, c, g, or t
  misc_feature (231)..(231): n is a, c, g, or t
  misc_feature (235)..(235): n is a, c, g, or t
  misc_feature (249)..(249): n is a, c, g, or t
  misc_feature (272)..(272): n is a, c, g, or t
  misc_feature (294)..(294): n is a, c, g, or t
  misc_feature (326)..(326): n is a, c, g, or t
  misc_feature (633)..(633): n is a, c, g, or t
taaccgggaggtcgaattggcttgggctgctgatctcgcgatccccgcncctcgncctncnaaagtgctgggattacaggtgtgagccaccgtgcccagcctaatttttgcatttttagtagagaggaggtttcaccatgccggncagggtggtctcaatctcctgaccttgtaatccgcctgcctcagccacccaagtagctgggactacaagcgctgccaccacatccngctnattttttgtatttntagtagagacagggcctcaccgngccagccaggatggtctcaatntcctgatctcgcgatccccgcgcctcggcctnccgaagtgctaggattacgggcgtgagccactgcacctgccaagagttttaactataaggctgctgaatgaggagataggagcaaacctcaaatacacctccctgaggagttcggggataggaattttaaggggattggaatgggccatggcatgaagatcattgattgctctaagaatgcaagacaaaatcgtgggatggggaaatgaaaaaactgcattctcatgccaatttaatgtccctgcgggattttctaaactggtttgtgtcagctgaattcaagatctggaaaacatcttaaaccatn

SEQ ID NO: 667548 - DNA, 109 bp, Homo sapiens
  misc_feature (17)..(17): n is a, c, g, or t
  misc_feature (82)..(82): n is a, c, g, or t
  misc_feature (98)..(98): n is a, c, g, or t
  misc_feature (100)..(100): n is a, c, g, or t
gattggttgctggatgncggacagggggtgcgatgatcgacgtcgacgcattggtgagccgtggaatcgatgggttagaggngcctaacggccatgcnantcacccgtt

SEQ ID NO: 667549 - DNA, 1075 bp, Homo sapiens
gagatggatagaaggcgtcaagaagctaaaaaaaaatcatatagacacggactcgacacatagaagaaaataaataaacaataaaagaaaatagaccacacgtagcaccaccgcaaggagaacgagagagagacaccacgcgacaccacacaaaagcggacatacaacaacccggcacacacaggccagcgaccgcacaacgcgcaccacagcacacgaaaagacaccacacaaccagcagcacgacagacccacgagacgcaaaagaagaacggcatacaaaaaaaagaaagaagaagagaaacaagggagcaccaagcagagaacaaagcgaaacagaaaaaagcaaaaaaaaagagaaaagacacaaggagacgaaaaaagcaacaaaagacgagcacaggcggagaacacacacaaagaaaaaaacagacacacacaagcaaacaacaacgacaacagaagacaacgcacccgcacaacagacacaggacaaagcgcgcaaaagggacaaacgaacaagcaatacagcaacaacgagcaacacaacaacacataaacgaacaaacaaacacacacacacaaaaataacaaagcacgaccacagacaccaacacaacgcagcagcacacactagaaaagatagacaagcaacaacacagaaaagaaagagaaaaatagagaagccgacaacataaagaagcagagcacacacacaaaaaactagacaagatgacacacacagaaacaaaaagagaacgaaaaacagaaaaaataaaagcaagcaaagagcagtagtagaaacaagaacagcaccagaaaagaccagaaagacaaaacacaagaagaaaagaagcaaaacacaagcagacaagacagacaacgcaacagacaccaaagagagagcacaacaaacgagaacaacgcaacacacgaaacgagaacaacaacgacagagaagagaagacaacagagccaacaaagaaaaacacaaacaaagacaaacgcaaagacaaaaacaacacagacgctagcaacgcagaacagcaacgaaaagaagcagaaacacacacac

SEQ ID NO: 667550 - DNA, 553 bp, Homo sapiens
gccagaatcctacgtcagagtcatatgaacaggtgtacacccatcacacccaaggataggcacactgccagtgtcttagcagggtcttgtgagggctgggggcatccaggcactcagaaggcaaaggaaccaccctacccatttggcctctggagggggcagaagaaagaaagaaacctcatcctatattttacaaagcatgtgaattctggcattagctctcataggagacccatgtgcttccttgctcagtgcaaaactgatgattctacttgctgtagatgaatggttaacacgagctagttcaacagtgccattgtttagccagtgaagcctccaaccctaagccactgggacggtggccagagatgccagcagcctctgtcgcccttagtcatataaccaaaatccagaccttatccacaacccggggcttggaaaggaaggtatttaggaatcacaccctccgtgattatgtagctccagtaaaatcttgcctggaaagaggcagtcttcttagcatggtgagctgagttcatggctattttctgta

SEQ ID NO: 667551 - DNA, 316 bp, Homo sapiens
agtaacatgggtatttctcctcacctctaaatgggcttcattctgcaatagcaggcccggttgtagggaagcctctccatagggaacagaaagttccaactaccgggctggtctgtcgatctcggcttggtagccggtctgttctgcgcacatgtacacagaggcgtgtggcgacagtcatgcccctggggaaagaacacagggcaagtggaaagagcagcccgggtctagaccacgtcttcgggacccatgcggtgttggcacttaggggcggcaggcctgtagagctctgccggtcccggccacttggcagaag

SEQ ID NO: 667552 - DNA, 207 bp, Homo sapiens
tcagaggatcccggctcagttcatcggtctatggtgcctaatgtgctgtgaatctctgtcccagcatttcattgaacttttttcttgtatacggcaggtttcagcagtgttgcccaggctggtctcaaactcctgagcttaagtgatctgcccgccttggcctcccaaagtactgggattacaggcgtgagccaccgcgtccggcca

SEQ ID NO: 667553 - DNA, 854 bp, Homo sapiens
gtaaagccaacatcacaataaagcaaggaagcgcatgttttagtttcccagtgcatctaagtcatgtttactgcatattggagtccactaaatgtgcaatagcattatgtctaacaaatatacaaaccttaatttaaaaatatttactgttcaaaatgctgacacagaaacgcaaagtgagcacatgctgtggggaaaaatggtgccaaatagacttgcctgatgccaggcttgtacaaaccttcaatttaacaaacaacaaaacacggtatccacaaagcatagtacgaatgaggtatgcctgtatgggctcttcctgaacgtggtgtgctataaaccatctctaagaaatgtttctaccctaaagatttccccagtaccagtcaagctctccgaaactgtggtctccacatttagatccaacccagcctgggataggaaatacttctgaacacaaacgaatttgcattgtaattgaaacacgtacagaccctttttttctggccaattattccctaaacaatatgctggtagcattattttcaatagacatttaatatggtaactcggggcaatatatggaacatctagaagctggatttatacttttattacccgcgaaggtggttgggtaggttaaaggtgcacaagggctaatgccattggccccaatcagggagattgagcaatcccttcaagatttacgggaggtctgaagggctggcggtttgcacgtccttggaacccattcccccatggatactggcgacaactgtctggggtgttcactttggcgcttcgcacctaccgactggattgtgatcgcttcccacaaatgttttcacacacaacag

SEQ ID NO: 667554 - DNA, 114 bp, Homo sapiens
tcgcgaggtaaacacacagcgaacacgaagtgagctatgcgtctggttcctcactatcagaagcaccaattatgcttgtttactgcatgcgcgtcaccgttctgcgtctattcc

SEQ ID NO: 667555 - DNA, 331 bp, Homo sapiens
gaaaaaaaaattgcttgtcccgtttgaattttgccgaatgcctctttgtgtttttctatcccctttattttttgccaattggtagttatatttggagggttgcctgagttccgttttggtgtctttggtaaaaatcctttgtaggtggtgttgaatgtggcctttccttgggaggccccaaaggtttggttgtttcccctttggggtgatggttgccccgggtatggttttctttttactcctgttatgttaagggagggaggaaggaaaaaaggaggaaggaaggaaggaaggagggaaaaaaggaaggaaggaaaaaaggaaggaagga

SEQ ID NO: 667556 - DNA, 339 bp, Homo sapiens
ccctgtgatttatttatatggggttgaagtactgcaggggtcccgtgctgctgtgtcaggattgggcccacgtagcgcgcagaccatttgccttgcatgaaaaatgcatgatggcgtcgggaagccgctgggaagtttcgcgacgcccgtgcaggggtcctcgcacggccgactggctgtcagcgccccggtcctgccgcccatgttgccaatggatgagccaaatgtccctcgtgcgaggggccttgtagatcctgcagacaccgcgcctctcaccagggagtaagggaatggtcttcccctgggacccacgagttcatcctcagctccaccttcacc

SEQ ID NO: 667557 - DNA, 655 bp, Homo sapiens
cgggaaagtttctttggaggtctggcccggagtcggccatgtcccacggtcccatgcagcccggcgcggccgccgcgccgtgcgggcggcaaggctccgggtccaggcatgggggcttcgtggtgactgtcaagcaagagcgcggcgagggtccacgcgcggtgcgagaaggggtcccacgatggaggagccggttgaagaaactggcggctggccctagagggcaatcaagcggaagaacgattctgccgaagtgggcccgaaggcaccggtcacggtgctactgtgcgcttcctgaacgtatcggcgctgagctagatccgcactgcgcctacccggatctgccctttcccgagatcaccaagatgctgggcgccgagtggagcaagctgctagccaacggtaaaagcagtcggtacctggatgaggccgaggatgcagagaagcaggcagctacgagtgaaggagctgcgggcgtaccaggcagtctgaagcctataagatgtgcacggagaagatccaggagaagaagatcaagaacagaagactcgatgctctgggctcatgaacactctcctgaatggacgcaaggtggggactgcgatgggtttccaacttcgatgtcccatcttcactgaagagttctggaccacac

SEQ ID NO: 667558 - DNA, 119 bp, Homo sapiens
atgtacacagattgtcttatcatatacacagtcttcctcatataacatgatcattgatatacttccattcctcttgtcctggttcatctgtcacggcaaaacgacatcgccaacacctc

SEQ ID NO: 667559 - DNA, 164 bp, Homo sapiens
atgagctggtaccgtatgcgtgtgcgccaggttgctgtagcggccgtcgtgctcgatcagttcgacgccgctgactggcgccggctgggtgatgagccgggtgacgcgggtgctgtagcggaattcgacgccggcgcgcgcgcatgcgctcggccagcgcgacg

SEQ ID NO: 667560 - DNA, 295 bp, Homo sapiens
gggccctttttttccccccccccgggaaaggggggggggcccccccccctggggtgggtcatagggggggggggggggtcccccccctttttttccccctttgggaaaaggggcttccgggggggggttttgtttccctttcccccctaaaaaaaaggggaaattggatggggggggggggggggggacccccccccgggggggggggggggggaaaaactttcccccccggcttttttccctttttttttttaaaaaaaaaagggggggggggggggtccgggttcttcctgga

SEQ ID NO: 667561 - DNA, 258 bp, Homo sapiens
  misc_feature (29)..(29): n is a, c, g, or t
ctccacacttcctgggaggtcagagacanactgtttcagagagtcagatggacttcccaagacttgttgagagatgtgacatggttcttggatttcctctgtagcagcctcctggacttcctgaggactcgacattgtccacagatgtactggccattcaatgaacaaaaaacccaggatttttggtggtggttaattataaatggggccatggtaccaggaagattataggctagtctgtaataaattatcttatag

SEQ ID NO: 667562 - DNA, 713 bp, Homo sapiens
taagtttattaatgttctggcgaaaaatccacaggggccacagctaacatcatggcagcacctttactccttcggcggtgatccaatctccagctcacttcttttggccagcaccaacatgggccttggcagtccccctgactttcttcattctgttctggcgtccctttcgtggctttctggaggtctttttcttctcatacaggccagtgtctgtgcaagtctatgttggggttcatttttcttggcataatccaggaatcataaatcatgccaaagccagtggtctgtgccaccaccaaaatgagttctgaatccaaatacaaagatgacatccggtgtggtcttgtacatttgggctagttttcccgaatttctgtcttaggcacggtcgccttcccggggtgaaggacatcaatgaccattggtttcctctgaagtagtcggtgggtcatgaactttctagtgcggatagtaacggtggtcgttcatgatggcgatctatcttcaggggaagatggcggacattcagacgggagcgtgcctaccaaaagcagcgaccatctttcaaaacaagaagagggtcctgtgggagaaactggcaggagaagctcccgcggtactacaagaacatcggttctgggttcaagacacccaaggaggctatggagggccctaacttgaaaaaaatgcccctccttggtaatgtgtcc

SEQ ID NO: 667563 - DNA, 252 bp, Homo sapiens
aacgcgcctgacagtgaaagatggttagtgacagtatcccactctcagtcacatagctcgtgtcatagctggtatcctgatggtacagcctgtctgatgctaaagccaggacgagggaccacgaccccatgtggtcacttactgcagcgcgagctggtctgaagcggcttctactcccaggccagagcgttctcaggaaatctttctgggagggtggcagtgtgggtcagaggaaggtgaattgattgactg

SEQ ID NO: 667564 - DNA, 1870 bp, Homo sapiens
gtggatgccaggcctatcgtcccagcgacgatgctgcacaggggaccgctgtcatgcttgggctgagttcgatacttggacagcacagctatctgcttgtggtagggtttgtttgtaccagcgagcggaaaagtcggtaggataagttgcgctaattgatcgaggggaaagaccggatacccagtacgccacagcgtatgtctgcctattcagcgcgagcgacgtcgaaccggttagactcgggtgattgctcggctgagaggaattcgagagcttggaccagagtagataccctcacagctcgagagcaggaaggtattgtcccgcaatggcgcaaaagccggttctggcaattcgggagcagcccagtaatatatgtaatgcactgacttgattgctctcgaggatcttggatctatgaaacacagttggaggccttttgagtggatgagtggagatcgagttcgacttaggctatgcgttaccaaagggcattccaaagcggtcaggcaagagtaccccacggggcggaggaaggcaaccccacagaagaaggctttgcgtaatacccacggaaggggaacggctcgcttcgttatactacttcggaggtttgcttcgaaaccaaagaaggaatggaacacgggagtaggaacacttttcgggcgcaagtaaaaacaggcgcctttaaacgccatgtaaggcgcataataccggaaactaggttctcacacggcgaaaacataagtcggtttgctcggtgtgtgccgacccaaagttttgggcaacggaggagcgcttggttaagcctttttgggtaacaccttcgggtaacctatacctggccacagtaccgtgttgccgagggcggctataaaccccaaacaataaaggggacctaccgtctctggtgcgcaaatcaggtggacatcttgggcctggggcggtccatcggcagaagtgggttcaaccctttctcacgcaacaccgttgtattgtcccacgtagggtaaggtcaccaaacaggtggcctttgaccttgagccttatttctggccgtaataagcgggggacttctcaagtgaaccgaatcaaaggggggctgcgggggcaggctgaggcacagaggggaaaaaaccgttgtgagccctcggaaatcttatccgggtaccaccttgtgagagagcaaagtgcgtggtcacaacctgtaatgtgggaaatggcatggatacgaaagggtctactttaccgaccaatacacatagggacggcggcagtcgatgcacacgttcagtaaatatggcagcgagcccgagcagggatcacatccaaaggggtattggacaagcacgtatggctcggcacacatatgagcggttgcgccgatgacgaaagcattttctgtaggccacaggcacggaattggggcgtacccaggccagagtaatatcacttcgcgctcgtaggttcatagagaacgcacagacggcatattagaaagtgtgccctctgaatggtggcgacacgtccatgacacagccctgtggggcgcaacggcaccccgggtaccgggcagtcccgaaacgggcgcagagacagaccatacccattaccgggagcacagggagcaccggacgggcgacagccggacaccagcgccactgtgaaagcgccacgccacgtgatctagcgcgcccagtgtacacaccggccaccagcatggagaccgacaacaggggacagtacgacgcggaccgcaggaggacccgaagtacaaaggcgtgcacaggacacagattaccacgactgtgaccgcaaatctatcacgagaggccactccgcgacaccgacagatagcgatgaagagcta

SEQ ID NO: 667565 - DNA, 319 bp, Homo sapiens
gacagtggtgatgcgccgcactgagcccgctgcacagcagaccctgtctccggagctgggggccaagggggccagccttgtggagcacgtctggctcgtgtttgggcccccgcagggcacatacggagggtatttcctggggccagaagagcggctgccgcacaatcatcggttctacatgcgccggggtgggtcctcccacctgcggtggcacgcggccagctgggctctcccctctggttgccgcttggtccatccgctctttaagtctttttcctctcctctgtcttttaaggtctgtttaacgtttaaaaatata

SEQ ID NO: 667566 - DNA, 1074 bp, Homo sapiens
tcatctcggacacgtttattggctagaatcaggtcttaagttctaaagcgggtcagaaatatcccgcagtgaggaaatgtggtactcatggtaaaaataattagcaggtgactaagatcatgaccacaatctggacaaagaactgttgtgcagtatcccacgaaatataggaactattggctcgactggtcaatctttcacaatataaaatatcgggctccaacccaggagtggccgaggggcattgggcgagggaagggcttgcggacactgccgcccgatgccatagcacgatgtgaaaccccttctgtgccacagtggcggggaacgcggggtttccacaccgggtgtggccaagcagaaattccttgaacttctccccaatccaaggacatgtgtggcatctcggagaggctgaaccggacacacgcagggctcaggagggttgccagggatctgggaaagtgttcctctctcacaacgaggacaccaggcaagtgtcacagctcgagattatcgtgttaaaggtgcctcccgatacgtacagataccaacaaaaaaacacaaaacaaaacaagagggcggcgcgctctaaaaaattatcccataacagacgccaccacagaaaagagaggtataccccaccggacttctctatggaataccaaacagtgtggagcccacataagaggtaaacagaagtacgtattagaaaccggcatttatgagctcatgttgcccgttgcgttactataaccaccgttcttagttactagtggaacaacatgattgacccagtcgctggagcgacatatcatctgagcaaagaacgacacacccatcacttcacagtgtgggagggcaatgaaccaacaaatgttgccacccacaagtcatactcaacagaaagttattccagcgcacaaagcgggagataattatcaatttttgaaacgtgttcataacggtgttataaacacaaatcagagcattattactgtcagagaccgataagaaaagtattgagctgctacgaggaaataagctaatactagaaacgaaatcttttaccgg

SEQ ID NO: 667567 - DNA, 181 bp, Homo sapiens
tgaacgggcccgtagaaggcttcgcaccggagctgtcaccccactacgggacctcaaccaccggtgtcggccacatgacgggtcaccacctgcctgcgcttcccggccagctgaacgcagacctgcgcaagctgcggtgaacatggtgcccttccctcgcctgcacttcttcatgcccggc

SEQ ID NO: 667568 - DNA, 10118 bp, Homo sapiens
ggagaagcgggcgaattgggcaccggtggcggctgcgggcagtttgaattagactctgggctccagcccgccgaagccgcgccagaactgtactctccgagaggtcgttttcccgtccccgagagcaagtttatttacaaatgttggagtaataaagaaggcagaacaaatatgagctgggctttggaagaatgggaaagaaggagctgcctacaagagctcttcagaaaattcaagagcttgaaggacagcttgacaaactgaagaaggaaaagcagcaaaggcagtttcagcttgacagtctcgaggctgcgccgcagaagcaaacacagaaggttgaaaatgaaaaaaccgagggtacaaacctgaaaagggagaatcaaagattgatggaaatatgtgaaagtctggagaaaactaagcagaagatttctcatgaacttcaagtcaaggagtcacaagtgaatttccaggaaggacaactgaattcaggcaaaaaacaaatagaaaaactggaacaggaacttaaaaggtgtaaatctgagcttgaaagaagccaacaagctgcgcagtctgcagatgtctctctgaatccatgcaatacaccacaaaaaatttttacaactccactaacaccaagtcaatattatagtggttccaagtatgaagatctaaaagaaaaatataataaagaggttgaagaacgaaaaagattagaggcagaggttaaagccttgcaggctaaaaaagcaagccagactcttccacaagccaccatgaatcaccgcgacattgcccggcatcaggcttcatcatctgtgttctcatggcagcaagagaagaccccaagtcatctttcatctaattctcaaagaactccaattaggagagatttctctgcatcttacttttctggggaactagaggtgactccaagtcgatcaactttgcaaatagggaaaagagatgctaatagcagtttctttggcaattctagcagtcctcatcttttggatcaattaaaagcgcagaatcaagagctaagaaacaagattaatgagttggaactacgcctgcaaggacatgaaaaagaaatgaaaggccaagtgaataagtttcaagaactccaactccaactggagaaagcaaaagtggaattaattgaaaaagagaaagttttgaacaaatgtagggatgaactagtgagaacaacagcacaatacgaccaggcgtcaaccaagtatactgcattggaacaaaaactgaaaaaattgacggaagatttgagttgtcagcgacaaaatgcagaaagtgccagatgttctctggaacagaaaattaaggaaaaagaaaaggagtttcaagaggagctctcccgtcaacagcgttctttccaaacactggaccaggagtgcatccagatgaaggccagactcacccaggagttacagcaagccaagaatatgcacaacgtcctgcaggctgaactggataaactcacatcagtaaagcaacagctagaaaacaatttggaagagtttaagcaaaagttgtgcagagctgaacaggcgttccaggcgagtcagatcaaggagaatgagctgaggagaagcatggaggaaatgaagaaggaaaacaacctccttaagagtcactctgagcaaaaggccagagaagtctgccacctggaggcagaactcaagaacatcaaacagtgtttaaatcagagccagaattttgcagaagaaatgaaagcgaagaatacctctcaggaaaccatgttaagagatcttcaagaaaaaataaatcagcaagaaaactccttgactttagaaaaactgaagcttgctgtggctgatctggaaaagcagcgagattgttctcaagaccttttgaagaaaagagaacatcacattgaacaacttaatgataagttaagcaagacagagaaagagtccaaagccttgctgagtgctttagagttaaaaaagaaagaatatgaagaattgaaagaagagaaaactctgttttcttgttggaaaagtgaaaacgaaaaacttttaactcagatggaatcagaaaaggaaaacttgcagagtaaaattaatcacttggaaacttgtctgaagacacagcaaataaaaagtcatgaatacaacgagagagtaagaacgctggagatggacagagaaaacctaagtgtcgagatcagaaaccttcacaacgtgttagacagtaagtcagtggaggtagagacccagaaactagcttatatggagctacagcagaaagctgagttctcagatcagaaacatcagaaggaaatagaaaatatgtgtttgaagacttctcagcttactgggcaagttgaagatctagaacacaagcttcagttactgtcaaatgaaataatggacaaagaccggtgttaccaagacttgcatgccgaatatgagagcctcagggatctgctaaaatccaaagatgcttctctggtgacaaatgaagatcatcagagaagtcttttggcttttgatcagcagcctgccatgcatcattcctttgcaaatataattggagaacaaggaagcatgccttcagagaggagtgaatgtcgtttagaagcagaccaaagtccgaaaaattctgccatcctacaaaatagagttgattcacttgaattttcattagagtctcaaaaacagatgaactcagacctgcaaaagcagtgtgaagagttggtgcaaatcaaaggagaaatagaagaaaatctcatgaaagcagaacagatgcatcaaagttttgtggctgaaacaagtcagcgcattagtaagttacaggaagacacttctgctcaccagaatgttgttgctgaaaccttaagtgcccttgagaacaaggaaaaagagctgcaacttttaaatgataaggtagaaactgagcaggcagagattcaagaattaaaaaagagcaaccatctacttgaagactctctaaaggagctacaacttttatccgaaaccctaagcttggagaagaaagaaatgagttccatcatttctttaaataaaagggaaattgaagagctgacccaagagaatgggactcttaaggaaattaatgcatccttaaatcaagagaagatgaacttaatccagaaaagtgagagttttgcaaactatatagatgaaagggagaaaagcatttcagagttatctgatcagtacaagcaagaaaaacttattttactacaaagatgtgaagaaaccggaaatgcatatgaggatcttagtcaaaaatacaaagcagcacaggaaaagaattctaaattagaatgcttgctaaatgaatgcactagtctttgtgaaaataggaaaaatgagttggaacagctaaaggaagcatttgcaaaggaacaccaagaattcttaacaaaattagcatttgctgaagaaagaaatcagaatctgatgctagagttggagacagtgcagcaagctctgagatctgagatgacagataaccaaaacaattctaagagcgaggctggtggtttaaagcaagaaatcatgactttaaaggaagaacaaaacaaaatgcaaaaggaagttaatgacttattacaagagaatgaacagctgatgaaggtaatgaagactaaacatgaatgtcaaaatctagaatcagaaccaattaggaactctgtgaaagaaagagagagtgagagaaatcaatgtaattttaaacctcagatggatcttgaagttaaagaaatttctctagatagttataatgcgcagttggtgcaattagaagctatgctaagaaataaggaattaaaacttcaggaaagtgagaaggagaaggagtgcctgcagcatgaattacagacaattagaggagatcttgaaaccagcaatttgcaagacatgcagtcacaagaaattagtggccttaaagactgtgaaatagatgcggaagaaaagtatatttcagggcctcatgagttgtcaacaagtcaaaacgacaatgcacaccttcagtgctctctgcaaacaacaatgaacaagctgaatgagctagagaaaatatgtgaaatactgcaggctgaaaagtatgaactcgtaactgagctgaatgattcaaggtcagaatgtatcacagcaactaggaaaatggcagaagaggtagggaaactactaaatgaagttaaaatattaaatgatgacagtggtcttctccatggtgagttagtggaagacataccaggaggtgaatttggtgaacaaccaaatgaacagcaccctgtgtctttggctccattggacgagagtaattcctacgagcacttgacattgtcagacaaagaagttcaaatgcactttgccgaattgcaagagaaattcttatctttacaaagtgaacacaaaattttacatgatcagcactgtcagatgagctctaaaatgtcagagctgcagacctatgttgactcattaaaggccgaaaatttggtcttgtcaacgaatctgagaaactttcaaggtgacttggtgaaggagatgcagctgggcttggaggaggggctcgttccatccctgtcatcctcttgtgtgcctgacagctctagtcttagcagtttgggagactcctccttttacagagctcttttagaacagacaggagatatgtctcttttgagtaatttagaaggggctgtttcagcaaaccagtgcagtgtagatgaagtattttgcagcagtctgcagacctatgttgactcattaaaggccgaaaatttggtcttgtcaacgaatctgagaaactttcaaggtgacttggtgaaggagatgcagctgggcttggaggaggggctcgttccatccctgtcatcctcttgtgtgcctgacagctctagtcttagcagtttgggagactcctccttttacagagctcttttagaacagacaggagatatgtctcttttgagtaatttagaaggggttgtttcagcaaaccagtgcagtgtagatgaagtattttgcagcagtctgcaggaggagaatctgaccaggaaagaaaccccttcggccccagcgaagggtgttgaagagcttgagtccctctgtgaggtgtaccggcagtccctcgagaagctagaagagaaaatggaaagtcaagggattatgaaaaataaggaaattcaagagctcgagcagttattaagttctgaaaggcaagagcttgactgccttaggaagcagtatttgtcagaaaatgaacagtggcaacagaagctgacaagcgtgactctggagatggagtccaagttggcggcagaaaagaaacagacggaacaactgtcacttgagctggaagtagcacgactccagctacaaggtctggacttaagttctcggtctttgcttggcatcgacacagaagatgctattcaaggccgaaatgagagctgtgacatatcaaaagaacatacttcagaaactacagaaagaacaccaaagcatgatgttcatcagatttgtgataaagatgctcagcaggacctcaatctagacattgagaaaataactgagactggtgcagtgaaacccacaggagagtgctctggggaacagtccccagataccaattatgagcctccaggggaagataaaacccagggctcttcagaatgcatttctgaattgtcattttctggtcctaatgctttggtacctatggatttcctggggaatcaggaagatatccataatcttcaactgcgggtaaaagagacatcaaatgagaatttgagattacttcatgtgatagaggaccgtgacagaaaagttgaaagtttgctaaatgaaatgaaagaattagactcaaaactccatttacaggaggtacaactaatgaccaaaattgaagcatgcatagaattggaaaaaatagttggggaacttaagaaagaaaactcagatttaagtgaaaaattggaatatttttcttgtgatcaccaggagttactccagagagtagaaacttctgaaggcctcaattctgatttagaaatgcatgcagataaatcatcacgtgaagatattggagataatgtggccaaggtgaatgacagctggaaggagagatttcttgatgtggaaaatgagctgagtaggatcagatcggagaaagctagcattgagcatgaagccctctacctggaggctgacttagaggtagttcaaacagagaagctatgtttagaaaaagacaatgaaaataagcagaaggttattgtctgccttgaagaagaactctcagtggtcacaagtgagagaaaccagcttcgtggagaattagatactatgtcaaaaaaaaccacggcactggatcagttgtctgaaaaaatgaaggagaaaacacaagagcttgagtctcatcaaagtgagtgtctccattgcattcaggtggcagaggcagaggtgaaggaaaagacggaactccttcagactttgtcctctgatgtgagtgagctgttaaaagacaaaactcatctccaggaaaagctgcagagtttggaaaaggactcacaggcactgtctttgacaaaatgtgagctggaaaaccaaattgcacaactgaataaagagaaagaattgcttgtcaaggaatctgaaagcctgcaggccagactgagtgaatcagattatgaaaagctgaatgtctccaaggccttggaggccgcactggtggagaaaggtgagttcgcattgaggctgagctcaacacaggaggaagtgcatcagctgagaagaggcatcgagaaactgagagttcgcattgaggccgatgaaaagaagcagctgcacatcgcagagaaactgaaagaacgcgagcgggagaatgattcacttaaggataaagttgagaaccttgaaagggaattgcagatgtcagaagaaaaccaggagctagtgattcttgatgccgagaattccaaagcagaagtagagactctaaaaacacaaatagaagagatggccagaagcctgaaagtttttgaattagaccttgtcacgttaaggtctgaaaaagaaaatctgacaaaacaaatacaagaaaaacaaggtcagttgtcagaactagacaagttactctcttcatttaaaagtctgttagaagaaaaggagcaagcagagatacagatcaaagaagaatctaaaactgcagtggagatgcttcagaatcagttaaaggagctaaatgaggcagtagcagccttgtgtggtgaccaagaaattatgaaggccacagaacagagtctagacccaccaatagaggaagagcatcagctgagaaatagcattgaaaagctgagagcccgcctagaagctgatgaaaagaagcagctctgtgtcttacaacaactgaaggaaagtgagcatcatgcagatttacttaagggtagagtggagaaccttgaaagagagctagagatagccaggacaaaccaagagcatgcagctcttgaggcagagaattccaaaggagaggtagagaccctaaaagcaaaaatagaagggatgacccaaagtctgagaggtctggaattagatgttgttactataaggtcagaaaaagaagatctgacaaatgaattacaaaaagagcaagagcgaatatctgaattagaaataataaattcatcatttgaaaatattttgcaagaaaaagagcaagagaaagtacagatgaaagaaaaatcaagcactgccatggagatgcttcaaacacaattaaaagagctcaatgagagagtggcagccctgcataatgaccaagaagcctgtaaggccaaagagcagaatcttagtagtcaagtagagtgtcttgaacttgagaaggctcagttgctacaaggccttgatgaggccaaaaataattatattgttttgcaatcttcagtgaatggcctcattcaagaagtagaagatggcaagcagaaactggagaagaaggatgaagaaatcagtagactgaaaaatcaaattcaagaccaagagcagcttgtctctaaactgtcccaggtggaaggagagcaccaactttggaaggagcaaaacttagaactgagaaatctgacagtggaattggagcagaagatccaagtgctacaatccaaaaatgcctctttgcaggacacattagaagtgctgcagagttcttacaagaatctagagaatgagcttgaattgacaaaaatggacaaaatgtcctttgttgaaaaagtaaacaaaatgactgcaaaggaaactgagctgcagagggaaatgcatgagatggcacagaaaacagcagagctgcaagaagaactcagtggagagaaaaataggctagctggagagttgcagttactgttggaagaaataaagagcagcaaagatcaattgaaggagctcacactagaacaatagtgaattgaagaagagcctagattgcatgcacaaagaccaggtggacaaaggcaagggaaagtgagcagaggaaatagctgaatatcagctacggcttcatgaagctgaacaagaaacaccaggctttgcttttggacacaaacaacaccagtatgacagtagaaatccagacataccgacgagaaattgacttctaacagaagaatgtctcagttcacagaagcctggagatagaccttttacaagtctagtaaagaagagctcaataacttcattgaaagctacctactcagattttggaagaattgaagaaaaccaagatggacaatctaaaatatgtaaatcagttgaagaaggaaaatgaacgtgcccaggggaaaatgaagttgttgatcaaatcctgtaaacagctggaagaggaaaaggagatactgcagaaagaactctctcaacttcaagctgcacaggagaagcagaaaacaggtactgttatggataccaaggtcgatgaattaacaactgagatcaaagaactgaaagaaactcttgaagaaaaaaccaaggaggcagatgaatacttggataagtactgttccttgcttataagccatgaaaagttagagaaagctaaagagatgttagagacacaagtggcccatctgtgttcacagcaatctaaacaagattcccgagggtctcctttgctaggtccagttgttccaggaccatctccaatcccttctgttactgaaaagaggttatcatctggccaaaataaagcttcaggcaagaggcaaagatccagtggaatatgggagaatggtggaggaccaacacctgctaccccagagagcttttctaaaaaaagcaagaaagcagtcatgagtggtattcaccctgcagaagacacggaaggtactgagtttgagccagagggacttccagaagttgtaaagaaagggtttgctgacatcccgacaggaaagactagcccatatatcctgcgaagaacaaccatggcaactcggaccagcccccgcctggctgcacagaagttagcgctatccccactgagtctcggcaaagaaaatcttgcagagtcctccaaaccaacagctggtggcagcagatcacaaaaggtcaaagttgctcagcggagcccagtagattcaggcaccatcctccgagaacccaccacgaaatccgtcccagtcaataatcttcctgagagaagtccgactgacagccccagagagggcctgagggtcaagcgaggccgacttgtccccagccccaaagctggactggagtccaagggcagtgagaactgtaaggtccagtgaaggcactttgtgtgtcagtacccctgggaggtgccagtcattgaatagataaggctgtgcctacaggacttctctttagtcagggcatgctttattagtgaggagaaaacaattccttagaagtcttaaatatattgtactctttagatctcccatgtgtaggtattgaaaaagtttggaagcactgatcacctgttagcattgccattcctctactgcaatgtaaatagtataaagctatgtatataaagctttttggtaatatgttacaattaaaatgacaagcactatatcacaa

SEQ ID NO: 667569 - DNA, 135 bp, Homo sapiens
aagcactataaaagctttatatacatagctttatactatttacattgcagtagaggaatggcaatagtataaagctatgtatataaagctttttggtaatatgttacaattaaaatgacaagcactatatcacaa

SEQ ID NO: 667570 - DNA, 203 bp, Homo sapiens
gtaaccttaaaaagaacattataactgattgttgtgaatcgggtgaatttgttaaaatgagtaaccttgataaagtttttcatgcacaggcaaaatgtatccactagatttccacgcagtgatccgcttttaccttgtaatttgtagttctcaaaagacttttttttaaaaaaataaagtccatacttacaaaacaaaaccca

SEQ ID NO: 667571 - DNA, 361 bp, Homo sapiens
agactgatgagataaaccctaatccatggagctgggcaggcgggccccgtttagatttccaggctctagcctggcgccctgcagtcggtgtgctcttgtgaaacgctccatgctgagagggcaggtgccatccaggccgggtgggatactggagccgcgtctcaggagagcggtggggcctgtggaatgtctctaaaggggtggggaaacttccctagtctgggctagcccagacctgagggttgacgggggcccttcttctgagggtgacggggcccctcttctgagggcaaggagcccaaggtgccaggaggggcccggaaaaggccaggccgccacagtgagcagcgcacggggcccc

SEQ ID NO: 667572 - DNA, 924 bp, Homo sapiens
ggggtcatggcgccccgtaaccctcatcctgctgctctcgggagccttggtcctgaccgatacctgggcctgctcccactccatggaggtattgtctacacgcgccgatgctcccggtcccggactcgcggaggagccccgcgttcctcgctagtgggctatcgctggacgtacacgcagtttcgtgcagtttcgtcagtcgacgccgtgagtccgaggaggggagccgcgtggcgccgtgggtggagcaggaggggccggagtattgggaccgggaagacacatgaagtacagatgcgccatgtgcagcagatctgatccgagtgagctctgcggaatcctgcagcgtgtctacgtactaatcctagagctgaggccggttctcacacccttccaagaagggactgtattgtgactagcgaacctggtggtcccagactgggcagcctcctcctgcgggtataaccagttcgaccttacgacggacaaaggattacatcgaccctgaattgaggacctagctgctacctggaccgccgacggacaaggcggctcatgatcagcccatgcgcaagtgggaggctggcccgtgatggcggatgcagcggagagcctacctggagggcacagtgcgtggagtggctccgcagatacctggagaacgggaagaagacgctgcagcagcgcggaacacccaagagacacgacgtgacccatacatcccgtctctgaccatgagggcaacctgaggtgctgggcccctgggcttctaccctggcggagatcacacttgacctggcagcgggaatggcgaaggaccaaaattcaggacaccgagcttgtggagacccaggccagcaggagcatggaaccttccagaagtgggcagctgtggtggttgccttctggaaaagagcagagaaa

SEQ ID NO: 667573 - DNA, 164 bp, Homo sapiens
tatcccctcaaatcaagctctacatcaaatgctgcaccagtagtgtccccttcagaaggtcgtagcattcgttaggtcccataggcccctcccagttcttatcctacttggcctgtaggaggcacccagcgcagcattggtgttatccttcctccatatgactt

SEQ ID NO: 667574 - DNA, 934 bp, Homo sapiens
ggtcaactgcgtggcaagagaagccaaaagaaggcagaatggtgtaaagattccagttgatgccagtaaacctaatccaaatgatgtggagtggataatctgtattgggatatgaatggaatcatccatccctgtactcatcctgaagacaaaccagcaccaaaaaatgaagatgaaatgatggttgcaacttttgagtacattgacagacttttcagtatgtaagaccacgaagacttctctacatggcaatagatggagtggcgaccacgtgctgaacacatgaaccacgcagcgttcaaggaggttcagggcatcaacagaacggaatggaacgcggcagtcgagaagcagcgagtcagggaagaaatatggcaaaaggtggctgtcttcctccagaagaaataagagagaaagattttgacagcaatctgtattacagcaggaactgaattcatggacaatcttgctaggatgccttcgatattacatagctgatcgtttaaataatggacccgtgggtggaaaaatttgacaggttattgtatatactgatgctagtgctcctggtgaatggagaacataaaatcgatggattacgatgagaaggggagagcagtctaaacatgacccaatgatacgtcagtcggatggtctatgtggagcagatgtgatctcattatgcttggcttgccacagcagtgagccgacgttaccattagtgagagagagacttcaagcaaggcaagcccaaagcaagggggcttgaagcagggggacatgggggcgaagactcgtgaggttgcccaggacccgcacgggaacgttgtgactggcgaatctcctgtgccagggaaacctcaaccgggaggctgagcgattggagaggcccccagggcccatccactgggaacgcaagaagtacggctcggga

SEQ ID NO: 667575 - DNA, 642 bp, Homo sapiens
gaggagtggttcagtttagccctgcaagacatctataacttgactgttgctaaaccacaactctttttggctacttgggtcatagagacagcagagttgctccaagtataaatgtgacttaggctccctccagcacacagtgtgtatgttggagggagtgtggattagcagagaatgagaactacctcagctattcctgccataaccacactgagagaggggggcacggtggggagcctatttagctttttttttttttggaaacggagtctggctctgtcgccaggctggagtgtagtgggcggcaatcccgggctccctggcaacctttggcctcccggggttcggggcggattctcctggcctcaagcctcccggggtagctggggattaataggcgctatgccggcacacccggactaatttggggattttcaagtaagagtcagggtttcaccgtgttgcccaggctggtgtcgaactcctgacctcaggtgatctggaccacctcggcctcccgaagtgctgggattacaggtgtgagccacgggacccggctctattaagctttttaaaaattatttccttcaagggccctttaatatctatcaagctccatcccctaacaaaaggggtgtcccg

SEQ ID NO: 667576 - DNA, 389 bp, Homo sapiens
gtcgatactcagataaaggcagaaggtgctgcaactcagcaagaaggtggtcgtttccccaacaaaaaaaggttgcagttgccacaccagccaagaaagcagcttttactccagggcaaaaggcagcagcaacacctgccaagaagacagttacaccagccaaaggcagttaccacacctatcaagaagggagccacaccaggcaaagcattgctagcaactcctggtaaagaagggtgctgccatcccagccaaggcggcaaagaatggcaagaatgccaagaaggaagacagtgatgaagaggaagatgatgacagtgaggaggatgaggaggatgacgaggacgaggatgaggatgaagatgaaattgaaccagcagtgatgaaag

SEQ ID NO: 667577 - DNA, 881 bp, Homo sapiens
cggggtcctctcgagagcggttcccaatagggcggctctccatgggcggcgaaatcgccttcgggtgtaacagggacttccttagagggagctgttccaaaaccccagccttgtcggacctaaccgcggtggtaagcgccccccctttggggcccaaggtcaaccgcgtctgctttggaggctcttcccgggccgcccttttttgggtatttttagaccttcgtcgcctcctgggcctccaaaaatctgcgccacaaccagaatttgtctctccaaggggacccccacccccgcgacaaaatggggggaaaaccacaggcgcaacaccattttcccccaccggcggcgtgaagggaactcctgcgcccattcgacattgtggtcctttaaacttcggcgccaacaaagaggcgtccccgcgcccccgccgttattgggatcgcgtgtttactcccccttgtgagcagctatgaaccccggtggccgaccactcaagtggagtcaagttgcgagtaattgtgaccaagctctcttgttattcagggaggatgaatcgggagcagtagatgcttaccccctccccgtccaacaatatgaaagtttgccttcacatatcacaggccaagagcaccctaaattctctatttcggccccgccacactagttattttaccccccttctctgctgcttgcccttcaggatttggtaccctgagtcgaccatctgtgaataaatccaccgttcctcccatatattaaacaattccttcaggccgtcgcccctaatagaacattaccaccagggtattaaattcctgttaaaatgttcatggatccaatttccccctccccaaaaaaggacaaatgaaacaaaaaaaaca

SEQ ID NO: 667578 - DNA, 894 bp, Homo sapiens
ggccgggcgtggtggctcatgcctgtaatcccagcactttgggaggccgagaggaggtggatcacgaggtcaggagatcaagaccatcctggctaccactgaaaccccatctctactacaaaaaaattagccgggcgtggtgggggcactgacagtcccagctactcgggaggctgaggcacggacggaatgtgtgggacaccctgggaggcagagcttgcatgtgagccaagatcacgccacttgcactccagcctggcaacagagcaagactctgtctcaaaaaaaaatcacctaacatacacattatgaatgagtatttctagaaattccaattgctaagcctgtaatacttaagggtaagttatctagatacagtactttaccttccctgataagtagtatcattggacgcccttaggtataggagacacgaggaccgaagtttcacacacgtgtacctgggccgcgcgttggtcggctcaatgcctgtaaatcccagcacttggggaaggcccgaggggggcgaaaccacgaggtcaggagatccagactatcctggtaccaaggtgaacccgtctctactaacatactacaaacaaactttccgcccggcgttgtagccggcgcttgtagtcccaagctactcggacgcgagtaggacatgttgacccaggagcgacttgcagtgagcgacattgaccatgcatccagcgggacgacaactcgtccaaaacacacttgaggtcaaaaaactgggcgcaaaacataaaagggccgggcggaaatgccagagatcttgtacaccaacagcaactcgttcgcaacggcggttcacggcaacaggcaaactgtggtcctaccgaaatttcccagctagagactttcgaggac

SEQ ID NO: 667579 - DNA, 188 bp, Homo sapiens
aggatcccgccaataacctcccttactatattgtaagcccctcaaaggcagacacaagtatccaattctgcccctgtgcacccacagtgaacagtactcaacacaaggaaccatgtaaataagtgtttgttggctgggcacagtggctcacacctataatctcagcatttggggaggttatttggcat

SEQ ID NO: 667580 - DNA, 225 bp, Homo sapiens
  misc_feature (30)..(30): n is a, c, g, or t
  misc_feature (106)..(106): n is a, c, g, or t
  misc_feature (131)..(131): n is a, c, g, or t
  misc_feature (158)..(158): n is a, c, g, or t
ttccattgcttggttcacatctgaattgtnctggtaatttaagaaaagggtagccccttggtatggatagtagcttgatggcatggaattcagggaaaagactatnatggtgtcacttgtaactccttttntcctgtaaaattgtcatggattaagangagagttggctgggtgcggtggctcacacctgtaatcctagcactttgggaggccaaagtaaggact

SEQ ID NO: 667581 - DNA, 874 bp, Homo sapiens
cacggggcgaatgctgcgcgggtctctgcctctcttgtgtgggtgatggggcgcgcggatcggagagggtggctccggtagcgtgcggtgaccactcagtccacctgtgagccttcggcagctgcgggcggctggcggcgtacccggcccgagacgggtaggagacgctctgtgcggccccctgccctgcctggccctgcctgtggctgcactacactctgcaccctgctgcactgcaccgccagcagtgcagcggccacctgccgctgatgctctgccctgcgggttggggaagtttcccgcctgtgcctcgtgcctgcgtgtgcaccctgttgcttccgcagtgtagtatgctgccgcctctgcgctggctgctgtggctggcctggcgcctccagcatgaccggccagagcctgtgggacgtgtcggaggctaacgtcgaggacggggagacccgctatcaatgtgggcggcttcaagaggaggctgcgctcgcacacgctgctgcgcttccccgagacgcgccttgggccgcttgctgctcttgccactcgcgcgaggccattctggagctctgcgatgactacgacgacgtccagcgggagtactacttcgaccgcaaccctgagctcttcccctacgtgctgcatttctatcacaccggcaagcttcacgtcatggctgagctatgtgtcttctccttcagccaggagatcgagtactggggcatcaacgaggttcttcatttgacttcctgctgcagctacaagctaccatgggccgcaaagtagagcccgagcaggagaagtgggacgagcagagtgaccaggagagcaaccagtctaccttccgatgaggatcttgccttctaca

SEQ ID NO: 667582 - DNA, 316 bp, Homo sapiens
  misc_feature (107)..(107): n is a, c, g, or t
  misc_feature (170)..(170): n is a, c, g, or t
  misc_feature (285)..(285): n is a, c, g, or t
gacaagcgatactcagcagagatgtgcccaggctgatcctcccagtgtgaagtgagcgctcagacctctcaggcaggcacttcctgcacagaggtctcagatggaangatcatcttgagtcggttaagcaacagtagcagatgaccacaagggcgtactggagagtttgntcttggagacacctgacccctgccctgcaaagatgggactgaaggaagtcctctgtgccaggaagaccctacacaatatcatgaaagctccgggaactcagccactggtgacgtnacggttgtgaggcgcagcagtgccaccctgg

SEQ ID NO: 667583 - DNA, 438 bp, Homo sapiens
acgatcacctttcatcatccatccactcttccatccatccaaccatccatccattcaacatccattcatccatctacctatccatccacccatccactcatacatccaattatctactcattcatccattcacctatccatccatctacctgtccaaccattcatccatccacctatccattcatctacctatccaaccattcacccatctgtctatccactcattcatccatccatccatccttctacacatccacccatccattcaaccatccactcacccatccatccatccatccatccaaccatctatccatttatctacccatttatccaaatatatgggcactgactctgtgcccaacccaacacagcataggatagcctggtgattgggatctcttctttgaattcagaaatatctgaatttgactccca

SEQ ID NO: 667584 - DNA, 271 bp, Homo sapiens
  misc_feature (9)..(9): n is a, c, g, or t
tcagcctcncaagtagctgggattacagggcgcccaccacccaaggccagctaatttttgtatgttcggtagagacggggtttcaccatgttggccaggctggtctcaaactcctgacctcaagcgacccacccgcctcggcctcccagagttttgcgattacaggcgtgagccaccacgcccagcggaatttcttattctttttgatctatcaaaacaacctcattgttctcaatgactgaccttataataagtaaatgttatagaacat

SEQ ID NO: 667585 - DNA, 284 bp, Homo sapiens
gcccacttgttatacctactagtctgttactcccaaagtctatacccacaacctgcacaacgtagcccaggtggggtcatcataaaacatggctgtaaattaaatcccatgtggaaaataaaggcttagcagttctgtcatagagcatacacagaatatccgaccactcttgttgtagtaattctctcttcactgtatttaaattgtgtctttatttattgtctaaatctacaactatatatatttaacagttcggtaacacttacctttctgcaatcaaattt

SEQ ID NO: 667586 - DNA, 245 bp, Homo sapiens
tctttaccctttttcaagccatgtgagtggacacatgtagctgtttgtagtcctcccccccctctctgccaggatttgtgcctttgaggagcttcttgggggtcagatcaactctccccctccccatactcccagtgattttattttgcttgtatgtgaaatttgctaaaagtcccttcaacttttttgagcttcctaagtgacgtttttgcaggtattttcaataaaaaaaagggctactttga

SEQ ID NO: 667587 - DNA, 307 bp, Homo sapiens
  misc_feature (87)..(87): n is a, c, g, or t
aaaccccgtctctactaaaaatacaaaattagtcgggtgtggtggcacacacctgtgatcccagctactcaggaggctgagacaggngaatcacttgaacccaggagacagaagttgcggtgagctgagattgcaccattacactccagcctgggcgagaagagtgaaactccatctcaaaaaaaaagaaaagaggaaaaaaaaagaatgtatttacagaggaaaaagaaaatgtacctttcaattgggaatgggttttttaatgggggggagggggaatcctggtaacttcatttagaaattacct

SEQ ID NO: 667588 - DNA, 211 bp, Homo sapiens
taacaaacacctaatggttattaataaattagtacacttgaaggcatttttctgatatcgggcctttaccactacccacaaaccccacccacacaaagggaggccacgccacctttgcattggaacctggcaactgagcattaaaagggacatttgtaaatgggagcatagttgccaatatatcaaacaagggttcttacagttgcagcca

SEQ ID NO: 667589 - DNA, 152 bp, Homo sapiens
taacatgatataatctagctctgtacctcggatgtctgatccaacatcgaggctaatcctattgttgatatggactctacaatatgattgcgcctgttatcccctagtggtaacgttgttccgttgcgccattgttattggatctaattaga

SEQ ID NO: 667590 - DNA, 116 bp, Homo sapiens
  misc_feature (67)..(67): n is a, c, g, or t
  misc_feature (102)..(102): n is a, c, g, or t
gctaaccttgtgtttatgttaagtggcttcgttgaagagggctgtcactgtcttgaaaacttggganaatccatagcaagctgtgccattagttgcctttgngaggcttgaggagg

SEQ ID NO: 667591 - DNA, 859 bp, Homo sapiens
  misc_feature (55)..(55): n is a, c, g, or t
  misc_feature (106)..(106): n is a, c, g, or t
  misc_feature (113)..(113): n is a, c, g, or t
  misc_feature (156)..(156): n is a, c, g, or t
  misc_feature (195)..(195): n is a, c, g, or t
  misc_feature (257)..(257): n is a, c, g, or t
  misc_feature (299)..(299): n is a, c, g, or t
  misc_feature (308)..(308): n is a, c, g, or t
  misc_feature (312)..(312): n is a, c, g, or t
  misc_feature (314)..(314): n is a, c, g, or t
  misc_feature (336)..(336): n is a, c, g, or t
  misc_feature (698)..(698): n is a, c, g, or t
  misc_feature (709)..(709): n is a, c, g, or t
  misc_feature (726)..(726): n is a, c, g, or t
  misc_feature (729)..(729): n is a, c, g, or t
  misc_feature (733)..(734): n is a, c, g, or t
  misc_feature (746)..(746): n is a, c, g, or t
  misc_feature (749)..(749): n is a, c, g, or t
  misc_feature (766)..(766): n is a, c, g, or t
  misc_feature (782)..(782): n is a, c, g, or t
  misc_feature (845)..(845): n is a, c, g, or t
ggtgtgggggtttgtgccggggggtggtccggtccgggattcccggggtcaaganggcagccaccacgggctcgggagtgaaagtccctcgcgatttccgactgtngggaggnctcgaagaaggccagagaggggtgggagatggcacagttagcnggggtctagaagatggcgaagacatgacacttacaaganggacagggatgataattgggcctccaagaacaatttatgagaaccgaatatgcagccttaanataggatgtgggcctaaatacccagaggcacccccctttgtnagatttgtnacananattaatatgagtggggtggatngttctaatggggtggtgggcccaggggccatatcagtgctagcgaaatggcagggttcatatagcatcagagttgtcctgcgagagcttcggcgcctaatggtgtctaaggggaatatggaactccctcagccgcccggggcgcagtgttacggcgattgatcagggagagaaaccacaggcccttccccttccccccaattcgatttagtcagtcttcattttccacagtggtggattttctgggtacgtcttgtagacctcaaagtaccggggagggggctcccattcgggggggatttgtcttgggatactgtggatgatactgattttttgtccatttgggatatatgagctggtgcnatgacagatcntcctgctcaagtgtaanaantgtnnaagtagttgaanttntgggatcaagaaagtcnatttaaattgattcanatcataactggtggggcacatctaactcaactgtgagaagacacatcacacaatcacaatgcngctgattacacggc

SEQ ID NO: 667592 - DNA, 1172 bp, Homo sapiens
  misc_feature (102)..(102): n is a, c, g, or t
  misc_feature (108)..(108): n is a, c, g, or t
  misc_feature (375)..(375): n is a, c, g, or t
atcgggagagcgctgttagttgtgtggggggggccgcgcaaccgaccggcgtgtgttccccgaacaccacgggctggtggggggggtaagaagaaagagggncgggcngagccacctccctcctggggtatatagggtggaaggcgaatatatcatgcgcaatcaaacccggggagcgggcgccccccgctgcgcaacatgaatgaatatcatgtgctcggtggccgttttcccggacggggaaaatagtttgggggtcggcccccttctcccccctccatccaagacgagggggggggggttggaacgaacacggggaataggttgccccagccacgcgactggggggggggcaaacagcccccccgacagggngcggtgtctcatatcaaaggcaggcccgcgttgttcgcacggccgcgtggtttcacttggtctaaggggcgccgcctgtgggtatttatttttgcgccacacaggtgagaggagggtcctcttcaccaggcgggttgtttgtgtgtgtggcgacgacgcggcagaacgctgcgggcgcgtttgttctcttgttgcgcaaacaccgccggttggttggccgacagcagtttggtgatgtggctgttttatcatgggcgggtgttttggcccacagggggcgccacctcttttcccctgccgcgattctccttcagcgctcccggagggggtttggtctccttctctcaacaagacgcgcttggtggatatccctcctccttgtcgggggacgtttttttttccgtgctccgcggcagaggagagctttttccaccgaccaatgatatatatagtgatggtggtgtccgcctcatacattatatgtgtgcgcgctccccacagaaagatgatttgctggaagagtgtggtcgcccaccaccaccgctggagaagaaagaagaagaaaattgttcccccacgttagacgaggtgtgtgaggcagccacataataatagaggtggaatagggtgtttatcaccagcgggattttccgagctgtcgggtgatcgtcaggggtccgagatcttccaccttttggatggacaaagggggccccaaacccccctttttttttggttcccccccggggcccctttgggttttggggccaaaggggggggccaaaaaccttttttta

SEQ ID NO: 667593 - DNA, 217 bp, Homo sapiens
aatcaatacacatgtatacacaaaaagagaggaaaaaagagcctaattaaagtagtgtttacacacagcaaaacatcagaaaacaacctatcctgctcaccaaacgacgcaattgtatcaggacggctgacggcacggaggaccctctgaacacacaacgacttttacacgcctgggactgcttcaaactttcaaaacaagacacggatgacttcta

SEQ ID NO: 667594 - DNA, 686 bp, Homo sapiens
  misc_feature (133)..(133): n is a, c, g, or t
  misc_feature (213)..(213): n is a, c, g, or t
  misc_feature (235)..(235): n is a, c, g, or t
  misc_feature (307)..(307): n is a, c, g, or t
  misc_feature (310)..(311): n is a, c, g, or t
  misc_feature (313)..(314): n is a, c, g, or t
  misc_feature (316)..(317): n is a, c, g, or t
  misc_feature (321)..(321): n is a, c, g, or t
  misc_feature (326)..(326): n is a, c, g, or t
  misc_feature (333)..(333): n is a, c, g, or t
  misc_feature (362)..(362): n is a, c, g, or t
  misc_feature (366)..(366): n is a, c, g, or t
  misc_feature (448)..(448): n is a, c, g, or t
  misc_feature (655)..(655): n is a, c, g, or t
gtgcacagcagcacacatgaggctggaggccgctcactccgctgcctggggcttgtgccgtcttgagttctaatgcccgtgctcattaggatggaccagcacagcgtgggcagacaccgtggaatgacaggcntccctcctgcagcgttctgcctgtctttaacaggtgcttccaaagctcgttccctaaggccattaagcagccctcaggtnacagagacactttgactaaatngcccaagaaacgtacccttcattcattgttggagctcgatgccaacttaattttacttgtagaccagcacanagnncnncnnagcngtaanacagacncagtagaatgacatgttctcaagcgtgcntctnaactcatctgtatggaaaatggaagtcataagacctcctttgctgtgttgtttgaaagatcaaatgcaaaatatgtgtgatnccttatacaacactcttgcacagtgatgcatttgtaaagcctatttatttttgatgaactcttaagaaagcctgaagacattctgtgtgcatggtgtctgcccttctgcccagaaaatacacatctgacattttattttctccatcttccagcaatctcatggtaaaaagtcattggaagatcatacaccaatatggcgcccactgnaaaccagtcatgagtctgtattaactgcttg

SEQ ID NO: 667595 - DNA, 384 bp, Homo sapiens
agctttaccccttactggcaggaatcccagcaaactcacagccaagctctgcttttcaccttcacatcatacagtcctcagactaaaaccctaactctgaccttccaaatcaaaaatcgtactcaaggccgggtgcggcggctcacgcctgtcatctcagcactttgggaggccgaggcaggtggatcacctgaggtcaggagttccagaccagccaggccaacatggtgaaaccccatctctactaaaaatacaaaacttagccagacgtggtggtgggtgtctgtaatcccagcattttgggaggctgacgcatgaaaatcacttgaactcaggaggcagaagttgcagcgatccataatcatgccactgcactccagcctg

SEQ ID NO: 667596 - DNA, 2097 bp, Homo sapiens
  misc_feature (183)..(183): n is a, c, g, or t
  misc_feature (319)..(319): n is a, c, g, or t
  misc_feature (1002)..(1002): n is a, c, g, or t
  misc_feature (1396)..(1396): n is a, c, g, or t
agtttagtagaactactggttatcgacgactgcacatcgtcatatctgtcccttaatttgaccgtaggacaaggtatctgtgctgaatcgaagggacatgtatgagcgtacttcgtcatttcgcacgtcagtactctgcagctccgctcgtgtgagcgcacacttaattggtggtgcatatangcaccattgctagtgtactgttgactcggctctgccggagagacaaagccgttgggggcgcgtagagtactctattttagatagtctcaatgatccacatcaagtaactacattctggggcacgtgaggtaacatnagctgataagtgagtagcattcacgttataaactctcctaaccttcaccaatctggcttgagcacacctgaaattactggttggcgctatagctgcttcgggttaggtaaaacgtcaaaccaatatggtgaacctctcgtagtaatattttcctctaaacacatagacccagtacgtgcttggccttaaggacgactcctatgtttcgggaagacttccatcacgcgtaaaagttgaggcttgaggagtgtggcgtatgaagatcgactaacgatgtaacacccaatgctgtgatccgtaaatcccctagtggtctaaaaaccgccgtaacgacatcctatgaaaggaccaacagagagcaccatcattttataattacacgcccttaaagttctccctcaggagcaaagaacgccgtacacagatcggcttgaagcacagtagatatctacaccatttcattatgtcgatacccctctctcaaccataacccctgtataatttaaagaggttagatctctaacccccattcggtaaactttcccatcaataaaagggaagacgttaccaaactttcaaacatttcacaattcgcagtttcacaagcggcatacatcacaaagttggtcaccttatcgatatatccatttggcacagaggcaatggtcagcatcccattgganttcattggtaaaaacggccccgaagatgtaaactcaactacattattgacctctaatttactatttacaggatcacattacgacattaccctaggattacgcggataacattattctctccccaatggaaaggaggtactcccataatatcaaatttcaatttctacctaagggtgcgcttctatacagcacaagcggtttataccattaaatgacattaatgcgttaggaggcggaggttatccgggctgtaaattgtaaagtttaacctgaaaacaacatgtatgccgtgggaacatcccatgtaatatggcgagctacaaactccatttcatttaccgggacccgcacggggaccatgcgttcgggggacatatggcacatataagtgccncccatgtgtacagtgagtataaggggacaacacgaataagtaatatatttcatgtgaattcacataatagaaagcagtaaaatcatcgtgaggaatcaatgtatataacaaatcctgtgtgacatcaagtgcatggaacaagacagagggtattatctctgacgagcgtagctatatgaaagatagaaccagcaccaactattatggtgcagtacaaacttattatccattaatactttcatgtataatacacgacacaacgtacgtacccacccatgttgtgggacacaaacacacaagtagtgacaacacgagccccgcgaagacgcaagcacggaagcaacacaaataagggtaggacacgagacagagagagataaagaggcagtaggaagagaggcagaaacacaagtttactaaaggaggcgacaacacaggatagaaagcacacagaagcaacaaaatagagaagatgcacagacagaaggcaaaacgaaacgcacacaaagggaaacagaaaataaaaggagggacggaagaaacaacagacaacgacaacaaaagcaagccaaagagagaaacacagtaagcataaagataagcgaagagagacagaaggaagaaagaaagaagcaacagatagcgaacagacgacagaggacaggaacagcagagaccagaacgacgaagagcgacgaagc

SEQ ID NO: 667597 - DNA, 354 bp, Homo sapiens
ggatgcaataaatgttgatggcaatagagaaaataccactttgctggtggcaagagctcttttttatttggaaaaagctactgggggccggccgcgggggctcacgcctgtaatcccagcactttgggagcccgaggcggccggatcacgaggtcaggagatcgagaccatccgggttaaaacggtgaaaccccgtctttactaaaaatacaaaaaattagccggccgaaggggcggccgcttgtagtcccagctactggggaggctgaggcaggagaatggcgtgaacccgggaggcgaaccttgcagggagccgagactgcgccattgcactccagcctgggtgacagagcg

SEQ ID NO: 667598 - DNA, 811 bp, Homo sapiens
agcggactggtagtgaggagccaagaggaatggagcagtttccccacttatccttctggcaggatcttggcaacctggtaccagatggctgtgactatgatctgccgttctaagacctcgaaattgtgcctgcagcatatcgtggtgtgggggatgaccagctgggggaggagtcagaagtaaagggatgaccatttattaccatatgtagattgcactttatatgtccatgccttcttcctcagtctccctcaaaccaaagctacacagccagattgtctcaagcagtgcgtcaactaccagtccctcatctcacccgttactcatgtgctcttgcttgtccagtattcgctttcgatttggcatcttgctcactagtaaaactgcgttccctttgttccttattttctgtctttactctagagagcgtacagttgtaagtcatgagttcaatatcatagggtcctgtgaagacacatgaggcttttgcacttgtctcttgacatcagaagttacaataggcatatgggcaaaatggtgtagcaggctcactggccgtttgtctttgaaacacattttcacaagttgttgagacactggatttctttaattcagcacaatacaatgcgaagaaacattatttatacagggcttgattgctttcatgttcgttattctgtaccctatagtagcctccatgagaatctggtattcttgctgcttggaactactttgcaggtgattacttggttgcagtccaagtactctcgtttagtctgagctgcagcaatgtctagacttgctttctccc

SEQ ID NO: 667599 - DNA, 103 bp, Homo sapiens
tgcgacgccattgtgattttatgattactatgttcaggcacagtatttgtttatggtcatattctcacacatctgaatcccttcctactgtgtagtgtgtgta

SEQ ID NO: 667600 - DNA, 922 bp, Homo sapiens
atgacccaccaatcacatgcctatcatatagtaaaagcacagcccatgacccctaacagggggccgtctcagccctcctaatgaactccggctagccatgtgatttcacttccactccataacgctcctcatactaggcctactaatcagagcacgactaaccatatacgcaagtgtgtggcgcgagtgtatagcacgagaaatgcaggataccaaggccaacacaaatcacctgtccaaagataggccttcgatacgggataatcctatttattacctcagaagtgtcggtctcttcgcaggatttgctgagccgttttaccgactccagtgctagctgcctactcccccaattaggaggagcactgggcgcccaacaggtcattcaccccgctgtaatccctctagaagtcccactcctaagtcacttccgtatgactcgcatcaggagtatcacgcacctgagctgcaccatagtctaatagaaaactggcgaaacccaaatagttcaggcatcggctttatgtacaagttcgtacggggtctctatttggaccctgcctacaaagcctcagagtcaccttcgagtctccccttcaccattctcctgacggctatctacgggctcaacattcctggtacgccacgagggcctcccgacgggacttcacgtattgattgggctcaacttcctcacgaatcgtgcttcatccgcaagtaatatttcactttaggtttcggacctcaattttgggtttcgaaccggcgctgataccggtttggaatgcgcggtgactcagtctggtgcccctcgatgggggcgccccagcgagacaccagcggacaaaatgttcgggcgcgcgcgagagaattaaattttggccgccaggaagaaacaccgctcacaaacgcggggagggcc

SEQ ID NO: 667601 - DNA, 299 bp, Homo sapiens
ctctagaggttaccgtaacagcgcttcgtaacgagcgcctctaacaccctccgtaacagcgcttccgtaacgagcgcctccgtaacgagcgcctccgtaacagccctccgtaacgagcgcttccgtaacgagcgcctccgtaacagcgcctccctaacgagcgcctaacagcgcctccgtaacgagcgcctcctaacacgcctaacgagcgcctccgtaacgagcgcttccgtaacgagcccctagaatggtttatatcgggatcgcgatttttcttttcttggtggcgctgttacgga

SEQ ID NO: 667602 - DNA, 573 bp, Homo sapiens
  misc_feature (29)..(29): n is a, c, g, or t
  misc_feature (33)..(34): n is a, c, g, or t
  misc_feature (37)..(37): n is a, c, g, or t
  misc_feature (57)..(57): n is a, c, g, or t
  misc_feature (71)..(71): n is a, c, g, or t
  misc_feature (174)..(174): n is a, c, g, or t
  misc_feature (184)..(184): n is a, c, g, or t
aaggggggtgggggggggaactctaaccnctcnnatngcaacccccattctacaccnaaaactaggccttngctgctctggaaggacaggggcaagaaagccacgcaaccctaacactcggccaggctcatttcaacaatggagaggacgccgaggccgggggggggggctccngttacattcnccggtgcggggggggggcctctagggacgaggggcccgggagcaaatgcagccctgaggatttggctactggatataacaacagggggcaaatcaaggacttcaggggtgatttttatgaagccatggatgactacacatctggcatagaaggccaacccaattttggagggccatattacaacagagggttgagactggataggctgggatattttgatgatgctttggaagatttcaaggagggcttacacttaaatcctgggatttcaaggtgctactttgagcttaaaacagactattctaggcaagggagaaaaacaaggaaggaatgggggcaggggatcagggatcagaatttagatattggctattttggttatatttaag

SEQ ID NO: 667603 - DNA, 255 bp, Homo sapiens
agagaatggccagccggaaggcggggccccggggcaaggtggcagcccccaagcaggcccaccgtggttcttcccccgtcttttccatgttttagaccaggcccagatccagggttacagggggcgcctcccgccttttccccccgttccgtggtggtcctactctgcggggcgccccggggggcccttctccctcgtggggggggggtttcccccggggggtggtggccgcttctgacggacggccccctctat

SEQ ID NO: 667604 - DNA, 1387 bp, Homo sapiens
ggatatagctggccacagtcaactgggcccgggcaggactgggcctccctctgatcgatgaggtggtgagccgctagaggcccgagccccgtcaatcgacgtcgtgcacttctcttgcagctggatctagtttttagagtgtccagcaagtacccctgggactcagtaggtaggtagcacagcgcctctgctgtcgcccagcccgttcgtaacagcacatagggcgccgcccgagccgcccatgctgtccctcatggaccgtgtcccagaggcatggacatcacgtgtgagtccagcaatggagcaaggtcctgacgtctccttttgaggtcagcgtccccgtagggaccggggtggtattcgactaaccgtcaggtgatagactcgagccaggagcatccaaggcactactcatacggaagagctatgtctgagcagataagatcaatgttaaccggatcccgtttcgagacaccgaggacttggagtgcatcgtgctagggccccggtgccttagcatgaccgtcgagccgggagcttttgcggttccgtcggagcaaagcgcggcccgctagacactcgtgacatcactagccgtggcatgggggcctggcgtcgcataacgtctctgggggacctggcatgtgagcgtgtcgctggggacccccatatccgtatggcgccccatcaatggattcttcaggcacgtaggggcgcggtggcaccggctagcacttggaccacgtcggattccccccaaaactgctggaaacgccacagttccaatgaacaagcccacttcaccaattcgccgacgttggggacccccctattcccgttgaggacccccccattttggcttttggttcgggccttagtgccccagcgctttaagcgaatgttgggggcttcctggtggcgaccgggaggacggcgccggcgggggtacctgtcgggcggcacggggccctggagaggggcaacacgtcattacacccttgggcctggttcctccccttcatacaggccctcacggaccactcaagagcaaccacactaggacagtcccgctaaatggggccaaaaagtgccagacccaacaagtgtggggttctgccaggggacgcagatgccttgagaaagtatccccccggatgtgcgattacaggcaaaattacggtcagtgggacctgggcctttgaccgtacccggggggattcacaagacaactagcgaaaaggacgatgcgaccacccatgtaaaggggcagcttaggaaagcgtcggggaagtttaagacacagatgtgtatttaacaaccaacccactatcagaagaaaacgtgagggcgaagcagagcatacgtgtgcggccaaagagaggatcag

SEQ ID NO: 667605 - DNA, 183 bp, Homo sapiens
tttcgtacattatctcatttaatcctctcaacaagtctacaatataggtcctattattattattcaacctttgttttgttttgttttgttttgagacggagtctctctctgactcccaggccgagattgcgccactgcagtccgcagtccggcctgggcgacagagctgagatccgtctaaaa

SEQ ID NO: 667606 - DNA, 102 bp, Homo sapiens
  misc_feature (9)..(10): n is a, c, g, or t
gtccatctnnacgtggacactgagtaaacgtgtacttagtcgtgtgctcttctgcctaaaatacatgtttacagcaatcatctttcaagacaaagggaaaca

SEQ ID NO: 667607 - DNA, 328 bp, Homo sapiens
cacatgtggctgctcgtatttaagttaattaaaatggaacgatggccgggcgtggtggctcacacctgtaatcccagcactttgggaggcggaggcgggcagatcacttgaggtcaggagttccaagaccagcctggccaacacagtgaaaccccgtctctactaaaaatacaaaaaattagctgggcatcgtggcaggcacctgtaatcccagctactcaggaggctgagccaggacaatcgcctgaacgcgggaggtggaggttgcagtgagctgagattgcgccagtgcactcctgcctgggtgacagagcgagactccatctta

SEQ ID NO: 667608 - DNA, 95 bp, Homo sapiens
  misc_feature (70)..(70): n is a, c, g, or t
  misc_feature (72)..(72): n is a, c, g, or t
agagaggttggattcaccagttctgaaggctgtgtaggaagcatggctggggaggcctcaggaaacttananatcatggcagcaggtgaagggga

SEQ ID NO: 667609 - DNA, 315 bp, Homo sapiens
aagaggcagtgatcgagctcgtgtaccctcgtgacggtgattatcatagttttacaggttttgggataggcggtggagttaggggcaatgttttgcgggcaggggatggatctcacgaagtacattctcaagggtggggagaatgacaaagaaccttcttaagggtgggggagattgcaaagtacattgatcagctagggtggggcagaaacaaatcacaatggtggaatgtcatcagttaaggctcttttcgcttattttgtggatcttcagttgcttcaggccatctggatgtataatcgccggtcacgagat

SEQ ID NO: 667610 - DNA, 259 bp, Homo sapiens
cgtgatcggctccgggtgcctcatcgccggcggcgccgtcgtgctgggtgggaccgaggtcccgcccggctccctcgtcgccggcgtaccggcctcggtccgccgaccgctcacggaagaagaacgcgcgggcctgatcgcgaacgccgacatctacctcgagcacgtcaggacgcatgccgcgacgactcccgtctgagccctcggccactaggctggagcgcgtacggggcggtggccaagctggttaaggcagtgg

SEQ ID NO: 667611 - DNA, 805 bp, Homo sapiens
gggtctctgagcgcctctgctctctctcccggtttcacatccgcatttgctaccagcggcggccgcggcggagccaggccggtcctcagtgcccagcagcgccgctcccggcaacctcggagcgtcgcagccgacaggccggctggccgagtctcgggcatcccagagcatcactcttccacctgctccttagagaagggaagatgagtgagtcgagctcgatagtccagtcagcccttggtcctccaagcaggacaaggacggcatctgagaagcggggtccggggcaggccgcgcaatgcatgacctccgaaggtagcccagctgaagttgtccaaacagcgctacgtagacctcaggggggcctgaccaagagggacacgcaacaaatcaacgggtgcttgccaaagaccccgggagaaacagcagaattccaggaaggaaaccatagggggcagacccgaaaagagactggacgaaaggacgcgaaagaaggagggcatctcgcaggagtccctcggcgtgacggacccatgatgcaaccgatggccgctgccggcccttgcttcgctcaagctggaagggtaggctaggatttcctttcgtgggaactaggagcagacattatgcgtcacgtgtctccaaactggccttccgctatccatatgggtggcgcacgagcgagatacctggacttgtatgacgcttgaacaccacgtgtattgacccttcaccctctaatgttacccagaatttccaacaatccagatccaccacatagtcctaatggggacttgtaactgta

SEQ ID NO: 667612 - DNA, 338 bp, Homo sapiens
  misc_feature (272)..(272): n is a, c, g, or t
tgactctcgcacatcatatgcactagggattctgaaaacttctagcatgactgcaaagtggccaagagaataaaagtccttgatgataaatcacagtataccccttgagcctcaccttcttgccagtgccagattttttctttttaaatctctctgattttttgctaatgaaaacttgaaaaaaaaaaaaaagcttatttggaagcttaaatgttttatcttttctccgtggactaaacctctccgaggactctctcggcacctggatgtcnagctctcgaagcagccaatcagatgggacatcagagttctctcatccctccttaaggcgtgatgac

SEQ ID NO: 667613 - DNA, 235 bp, Homo sapiens
ttcgtttgcccaggctggactgcagtggtgcaatcatagctcactgctgccttgaactcctgggcttaagcaatcctcccagctcagcctcctaagtagctgggactacagccaccatgcgtacctttaaaaaaaaaaataaacttttctcattgaggttcttatgcttagcacatcaggctgcttttctatagattataaatatgaagagttatagggtagttgaaggctttta

SEQ ID NO: 667614 - DNA, 354 bp, Homo sapiens
acaagttactggagcctgttttgcttctgggcaaggagcgatttgctggtgtggatattcgggtccgtgtgaagggtggtggacatgtggcccaaatttatgccatccgacagtccatctcaaaggccctggtagcttattaccaaaaatatgtggatgaagcctccaagaaggagatcaaagatatcctcatccaatacgatcggaccctgcttgtagctgacccccgtcgctgcgaatccaaaaagtttggaggtcctggtgcccgtgcccgataccagaaatcctaccgataagcccatctcaaggatcgggctttacctttgtaatacacctcctaggcttttaacgctc

SEQ ID NO: 667615 - DNA, 538 bp, Homo sapiens
  misc_feature (48)..(48): n is a, c, g, or t
attcgcggccgcgtcgaccttcactccagtcttccctcttgacagagnttccccagagctaagtctgtggtccctgctggggacagattgtgtcacgtgagcctcacagggaccagacccctggagtactcactcctgggaggcctggggaagggggcggagctgggctgtgatctggtgccagcacctgtgatctcaggaccttgggcaggctgctgctctacctgtgaccttgtgactgtgactgggagacagagccggcacccactcaccagagttcaagggggcggtgggcgggaatgttggagtgtggtgtggcccggggtggtggatatttcaacaatgattaaatattccctggagatcagcctgggctgcatagagagacccccatctctacaaaaaaaaaaaaaaaaaaaaaaattagccaggcttggaggatctcttgagcccaggaggtcgagtttgcactgagacatgatggcaccattgccctcactctacaaggcaacagaggagaccctgtctcaaaaaaaaa

SEQ ID NO: 667616 - DNA, 213 bp, Homo sapiens
  misc_feature (130)..(130): n is a, c, g, or t
tcccggtcgctcggaccactgtagtctgatatcctgtcatatccatagttccatagtataccagtataatcatattctgccatagcactatatgtttgatcaccaccataggcactattgtaattcatantcttgatcataatagtattaaatccttggttcagttttggcctgacctcggcacgacccctcgtaccacctcgtccgagcgga

SEQ ID NO: 667617 - DNA, 337 bp, Homo sapiens
  misc_feature (29)..(29): n is a, c, g, or t
  misc_feature (32)..(32): n is a, c, g, or t
  misc_feature (35)..(35): n is a, c, g, or t
  misc_feature (39)..(39): n is a, c, g, or t
  misc_feature (42)..(42): n is a, c, g, or t
  misc_feature (45)..(45): n is a, c, g, or t
  misc_feature (47)..(47): n is a, c, g, or t
  misc_feature (56)..(56): n is a, c, g, or t
  misc_feature (58)..(58): n is a, c, g, or t
  misc_feature (62)..(62): n is a, c, g, or t
  misc_feature (64)..(64): n is a, c, g, or t
  misc_feature (75)..(75): n is a, c, g, or t
  misc_feature (90)..(90): n is a, c, g, or t
  misc_feature (95)..(95): n is a, c, g, or t
  misc_feature (99)..(99): n is a, c, g, or t
  misc_feature (106)..(106): n is a, c, g, or t
  misc_feature (115)..(115): n is a, c, g, or t
  misc_feature (118)..(118): n is a, c, g, or t
  misc_feature (127)..(127): n is a, c, g, or t
  misc_feature (164)..(164): n is a, c, g, or t
  misc_feature (171)..(171): n is a, c, g, or t
ttgtgctagtgttctagagtatcccctcnggntgnatgngcncgngntaaactctnanggtnantttctgtcaantgcagtagatatganagaanggtnggtatantcaggaaangtntctgcagcntttccttgtctctagacctgccatgcctccccaaatngggcatntaattcatctttaaactggtcgtcctgttagacgctaacttagtaagtgcttttcttatagaaccccttctgactgagcaatatgcctccttgtattataaaatctttctgataatgcattagaaggtttttttgtcgattagtaaaagtactttccatgttactt

SEQ ID NO: 667618 - DNA, 277 bp, Homo sapiens
tccatcagccttaaccctgggaaatgcctgctgcccccaatgatttttggttttgtttcccccatacaaaaacagggtggaggggaagggtgggtttcagttaacaggggtccccagggcaagtcagcctcctccccccatgcctttttggtcagggggccttaggggggcctttccctcccccccctttgggccccttgggggaggactggggagggggccgtgggaaagccctgccgctggaacctgtatacccaataaaggacagtttcccaga

SEQ ID NO: 667619 - DNA, 503 bp, Homo sapiens
  misc_feature (463)..(463): n is a, c, g, or t
cgatgctagaggacatcaggatgactggtcctgtggtcacacttatttgtctggattccacactctagggtcctacatcattccttgtgacactgagtaagtgagggtcctgttgtcattggacatctcgcgcctgggactgaccgggaggctctgattatttacccaccacaggtaggttgtgttctgaatctcaggttcacaggttaaggctacagcatcctcatcctccacggggttggagttgttgctggtgatgaagggtttgggtggctctgcatagactgtgatcgtcgtgactgtggtcctattgaggccagtgtctgagttatgggcttggcacgtataggatccactattattcacagtgatgttggggataaagagctcttgggtggattgctggaaagtcccattgacaaaccaagagtactgtgcaggtgggttagaagctgcgtggcangagaggttcagattttcccctgatctgtaagatgtgtcta

SEQ ID NO: 667620 - DNA, 140 bp, Homo sapiens
caggaccccctcctgctcaaccgaacacctcccaccagaccctcacctccaacactggggataacatttcaacatagatatatagcaggggacactaatacaaaccatataatctccatactctaggtcagtagctaggt

SEQ ID NO: 667621 - DNA, 432 bp, Homo sapiens
ggtgacaatttttagagaagaaagaaaaagacaaaaagaaaaagaagactcttgctaaagaggccagtgaaaattaacttccctctgatgttgatatgaatgaccagtactttgctaaagaagtttaaaaaaataggtataaagaaaaaagtgaacaaaatctgcaaaagatggcacatctccagaagaagaaaccaaaatagaaagatgaaaggctgaaatggctttccttactggatgaggaggaggaaagtaagaaacacttcaattacaacaagattgtggagcaccagaacctgagcaaaaagaagaaaaagaagaaaaagcagctcatgaaaaaaaagaaattattagaggatgactttgaggtaaatgttagcaatgcatggtttcaagcaatgtacacttcccacttgttcaatgtgcatccct

SEQ ID NO: 667622 - DNA, 642 bp, Homo sapiens
  misc_feature (546)..(546): n is a, c, g, or t
  misc_feature (568)..(568): n is a, c, g, or t
  misc_feature (594)..(594): n is a, c, g, or t
ccattccacagtatcagctatgacatgttacgattgagctcgtaccttgtgcaccgaatgtgactgcgccatcggcgagggttcggggaatctcctgccggactttgatgtcctcgatctaagtcagtcccacgataatcgctctattccgcccgaccgatctttggggaatacgcggatcgggataaaactggttagtacgttcctcccccttggcatctcgaaccttcgcagcatcgagccgctcgaccacaaccaagggtgttcgactcacctgcgagtaaacaaccgcaaagctatcagaacacagagccattggcttcatggccggcggtacgcttgcgacgttgatcggcctgcctgccgggaaaaggtcgacgcaaccatcgaacgaggccttcttctgctgactggtgtagagggcaagggcttcactcgggttgatcgttccggatcggtagctgcttttttcttcctgggcattgggaaacttgatgaaatccatcaggccgcgagcctgtgcggagccggcggacagcattaccngggtcgatagcccaacagcaantttgcttagcttcatgcgtgagtttncgggattgaatgacgaaatactgacagtcagagcagtgacaacctgat

SEQ ID NO: 667623 - DNA, 694 bp, Homo sapiens
  misc_feature (447)..(447): n is a, c, g, or t
  misc_feature (687)..(687): n is a, c, g, or t
  misc_feature (690)..(690): n is a, c, g, or t
tggggaggccagccataaacacgtgtgacctgtgtgggctagctatcgtcagggtcaccaatgcatgtacatttcctgtaatggaacgaaagttggaccaaccccttatcccgtgagagtaagccaagcccatgcacgactcagtgccggcagctctgcatgcagcgctgacacataaatacaacacttcaatattaatatttggacagctcacggagatctttgatgagtgataaggcaaagcccaggagccggtatggtcttttcattccattcgtattagaaacacagtgttgggaaggtcacgctgtatacatgtgtttacaagcattcttaggagggtgttgcataccaaacgatgcatcaggtcttggccctggatccttgtaggaagcttccaaaccctgagggtttcgcaacaatgtgtagcgtcagctgttgtcttgncgggccccttgttccacacctatgtttatgctaatgaggtgtcacagggggtgttgctctccaatttcagaatcggtcgtgttgggtcatagacccgttattaacggtttgggccttggaaccacggaatgtcatcccttccacctggcagtgagagtagtggactcctttttcctaaccaatcattccacggttcccgttccccatttaaccccaatatgcttttgtaccccgaaaaanccntaaa

SEQ ID NO: 667624 - DNA, 192 bp, Homo sapiens
  misc_feature (7)..(7): n is a, c, g, or t
cagcggngtatgcgacgatcaactttttaaaatggtttattgatgagcaagttgaagaagatgcgatgtttgatagcattattcaaaaattacggcgcattcaaaatgataataatgcactctttatgctcgatagcgagtttgcgaaacggacatttacgccggaagcgcaagcataaggggactctctgg

SEQ ID NO: 667625 - DNA, 420 bp, Homo sapiens
  misc_feature (355)..(355): n is a, c, g, or t
gaacgctcatccctgaccctggccacgggctttaaccaaagaggcatctatgtgatccaggcacgcgaagttggccaaaagatttccccagacacggttctgcacttgatccttcctgagagccctggcagccacgaggagtcacgagagcactctttagaggaggtgaaggagcttttgaacaagttgatgctgatgtctggcaagaaggatcgtaacaacacggaagtggagaggttttcagaggtcttctgcagtgtgcagaggctcagccaggccttcatcgacctgcactctgctgggaatatgctgttcaggacgtggatcgccatggcctactgctcccccaagcagngtgtgtccctccaaatggacttttggcttgtacctggtgacggagcttaaagatggtggagatgt

SEQ ID NO: 667626 - DNA, 335 bp, Homo sapiens
tgaaagaaggactgagaaatatgaggaaaaaagcagcaaaaactgaattggctggctgggcaccgtggctcatgcctgtaaccccagcactttgggaggccgaggcgggcagatcgcaaggtcaggagatcaagaccatcctggccaacatggtggaaccctgtctctactgaaaatacaaaaattagctaggtgtggtggtgcatgcctggaatcccagctactcaggaggctgaggcacgagaatcgcttgaacccaggaggtggaggtcgcagtgagccgagatcacgccactgcactccagcctggcgacagagagagactccatctcaaa

SEQ ID NO: 667627 - DNA, 487 bp, Homo sapiens
cctagaaggaatatctcacacagcaaggaaataggcaaaaaggctcaacaatgaaacacggagaacggtgaagcctcctgcctagataaagccagcacgtctggcagcaattccatttccgtgagggcgttccttgatgaagatgacatgagcttggaagaaataaaaaatcggctataatgcatctcgacataacagcccgcccacggtcggtgcttttggacttacgaggtgcagcgccgttccccttggtagcaggaggcagacctcatagaagccgccgagccgggaggtccacacagcagcagaaatgggctctgccatcctctgaatcacagcaggaccctggcgggccaagagaccaaaggccccccgtggggaggaagcgcatctgccacctgtctcggatttgactgtcgagtttgataaattgaatttgcaaaatataggacgtagcgtttccgagacaccagatcaacatactggc

SEQ ID NO: 667628 - DNA, 131 bp, Homo sapiens
  misc_feature (1)..(1): n is a, c, g, or t
  misc_feature (28)..(28): n is a, c, g, or t
  misc_feature (31)..(31): n is a, c, g, or t
  misc_feature (35)..(35): n is a, c, g, or t
  misc_feature (42)..(42): n is a, c, g, or t
  misc_feature (44)..(44): n is a, c, g, or t
  misc_feature (49)..(50): n is a, c, g, or t
  misc_feature (54)..(56): n is a, c, g, or t
  misc_feature (58)..(58): n is a, c, g, or t
ntaacagaaaaaaaaaataggcatgganttnaagnttcaacnangtacnnggannngntcttgttttgttatataaaaaaattgtaaatgtttaatatctgactgaaattaaacgagcgaagatgagcatc

SEQ ID NO: 667629 - DNA, 199 bp, Homo sapiens
atgtgttatgaagaagggggtgaaataggaccatttaaaccacagaaaaccctctgtacttgtctagcgcctggcagaggggggcagcatgtgcagcagcttggctggagcctggccctatttgtagaggatatcgtagtgtccaggccggtagagaaggtagaccttggtactcgtgagccctcaggggaagatgtgc

SEQ ID NO: 667630 - DNA, 131 bp, Homo sapiens
ggctttccgaaggccatgatctgctccaagaagatgggaggaagggagccccgtcctccaaggcagcacccccactttcaactgaatcaagtgaggaagaggctcagagcctgactctgaggggttccgcc

SEQ ID NO: 667631 - DNA, 963 bp, Homo sapiens
tagtgcacgatgggcgtttggttcatggggcacagtggtcacattggggcacccttgatgggaacctggtgtcaaattgcctttcaggtagggaatacttgtgcttgtagtagtgggcccaatgatagcgccctttgtcttctgttttcttgcggggatatcgggttctttggagaatggtactgttggctaccttgcgtgccattgactccctcaatccgagactagatgtgcttgagcaacggagttcatggaaggtcaaagtgggttctcgtctcactgtgccctcttatggaactaaccctagatccggtcccatgttcggctaacagcgggctcaaggaacaaatggaatttaggggtcttcttgacatgcgctgttgagcagtaggagctgttctcccatgccccaagtcctatcacagtattcaggtagaggtaggctagggaggggtttagtcctttggtcccagatacacaagtatctcggctggcttcctgatggccatccctaccctacagagtgtgggggataggggtgggggtgctgctagtagaattagtactataagaatgagaaccctaatgtaggttccattcgccaaccatattctttggtcctctctgcttcaataccacgcaccttgtccaatctccagattaatgttatcgggtgtgtgtgtgtgtgtgagagagagtgtgtgtgacgatatgaatgcatgtatttgtatgcttgcaggagatggcatattacttgagccaaaccctttctctggcctctcaccttcagggaggatgagtggaaaatagcctcctcttgcccaaacatgaagggtgcttgaggtcatcagcaggagctgaagaacacaatttggggaacagaagggcattttgttttggagggttttgttttttaagatgaattcaacagcctggtggttataatgtctcggacccaagcca

SEQ ID NO: 667632 - DNA, 411 bp, Homo sapiens
atcttccgtgactacatacttcgcgactacatacttccgggactacatacttccgggactacatacttccgtgactacatacttccgggactacatacttccgggactacatacttccgtgactacatacttccgggactacatacttccgtgactacatacttccgggactacatacttccgtgactacatacttccgggactacatacttccgggactacatacttccgggactacatacttccgtgactacatacttccgggactacatacttccgggactacatacttccgggactacatacttccgcgactacatactaccggtactacatacttccgctgccaacatatttcggaagaatacatactcccgacgaccaaaatactgccgctacctacatggggaa

SEQ ID NO: 667633 - DNA, 264 bp, Homo sapiens
ggggtcccccgggccctggggggcccccccccaaccctgtttccggggttttcccccccttccctttcccaagggttggcccccggggggtgaaagggtgggggccctcccccgtcccccccagggcgcggcccttccccggggggattttggttttaccccaaaggttccccggggttttttttttccccccctttcccccctttttttttttgggggggggttgccggccgccttcccccaaaaaactttctttttggggga

SEQ ID NO: 667634 - DNA, 306 bp, Homo sapiens
  misc_feature (133)..(133): n is a, c, g, or t
aagggctccaggggacccacccacccttttccctggaggaaagtcaggtgggctcaaaaaaagccctcaaatttgggccctgggtcagggtggggtcaagtccaccctttaaaaaaatggactttggaatttnacgtttgggtttgaatccagcttccaaccctccctgggtgtgtgactttgggcaaaataacttttccccttgtccccatgtgtcattggagataaactaccccccccccagattgttgttccatgctgggcaaaccctaagtgtttaataatggtagccccctgctcttgtta

SEQ ID NO: 667635 - DNA, 188 bp, Homo sapiens
tatgtctgattcagtgttttaatctgacgcaggcttatgcggcaggcagaatgttttccatgttacttcatactcaacattcagttcttctcatcagggtgatagcattggtccacattaggtgtgcaggagttcagttcatatgtcgccaatgcagagatttacaatctcctccattgcgccagctt

SEQ ID NO: 667636 - DNA, 252 bp, Homo sapiens
gcatacttatgcatgcgagatccctctcatacattggcacctggtaataaagggaatggctcctccacccgtcatgcgttgagtggattcacgactccagacctccgttcttggtttgtcattagcctttttcgcttatctaaaatgccccctcttcttataccctaaaaccttctacactagtgccatgggaaccaggtctgaaaaagtagagagaagtgaaagtagagtctgggaagtagctgcctataa

SEQ ID NO: 667637 - DNA, 375 bp, Homo sapiens
acggcggaagcgacgtgcgtgtgtgtgtgtgtgtgtgtgtgtgtgtgtgtgtgtgtgtgtggtgcagagagtgacaccccacaggtctctgtcactctctcttttctcctctatgggtgtgtgtgtgtgtatctgtctctgagaactctcggggcgcgcaggagatgtcaggacggggaaagcccgccctctctatcttggtgtgccttgtgtgtgaggagcccacagtgatgtatgtcactatctaaagcccggggtgtgtgtgagcgcgcgctccgtggggctgtgccttcgtgtgtgaggcgcccacaagtggggtatgtcgctaaataaagcacagggtgtgcgtgagccctcgcgcggggggctgtgccc

SEQ ID NO: 667638 - DNA, 478 bp, Homo sapiens
cgacaatatacaaacagcacatgaggatccgtcgcgcgccagcatcacggcacgtgtccctagctgaccagaggacagatggtaacaagtaatacaagaaatataaaattaaataactctataatagtataaaaatagctagaacttccatatgagttattcttacaatattaaagttacagataccctgtaactgaattaccttcattgacggcatacagatgaaaatcgatttcttatccaaatttaaaatttctagagtgacagctgtgcttgaaggggtccctactcatactacccattcttactgtacatacccagatacaaatgaacattgctccaataaagatatcttctaatacagacgccttggagcgaagtattagtgacctttccaaggtaactgtcatcttaaaatttaacagtgatttattaagtctaacaataatctgatattaataaaaataaaatcccctaa

SEQ ID NO: 667639 - DNA, 104 bp, Homo sapiens
tggtaccacttacgccgcccttgacaacctcaaagacgcatggccggccagccgtcgaccctggtgctggtgatcggcgagtcaccaaccgccagcgcatgagc

SEQ ID NO: 667640 - DNA, 395 bp, Homo sapiens
  misc_feature (1)..(1): n is a, c, g, or t
naaattggaagtggtcatggtactcaatgaagaatatgagtatgaagatcaggactgtattcccatgtacattatgctattggaatagttctttcatacattatattcctctgtaactctcaagcacatgtgagtgttacgtttgttaagaaagtataggatcaattacattagtatagctacatgattttcatatgtgatcttcatttctcttgctcaccaaagagtatcagtagtatagttttgacagagttggtgttgatcatttcagttcatagtagtttgcgagaattttgatataagtaagaggggtgttttatccttgttgtagggtgcccatgtcgtaaaggaacacctcatggttcatagtcctttgggccgaattcctgcagccc

SEQ ID NO: 667641 - DNA, 1072 bp, Homo sapiens
ttctatttgggctgtggtgttctcccccatgtgggctttgtttttaggggtcagggtgtttcccgtccctcttgcgcgggtctgcccaccgttgtggagtctccccgtctgaggcccaccgttgttgcggcgagtccctccccatgtggtctcggggtgccacgtgatgtgaccgcttcgtcccccccgagttgatgctctcgtgtgtgtgaagatttttgggggcgcgcgtttggggtgattttaagtatcgcgcccttcacccacgttccagtttcgtgcaagccccccccctgggccctgtatcacgcactggcccgtatccgccccttgcgcctgggtagcttattccccccttattgaaggcaataaattgatacacccaagcgttccaatctgcccttacgcacacaaccagtactctttaaattcgcctcacattgcaataactccttcacaatcagccccacaattagcccctctgttagtacaccagccccattctgccatctccataccccccccttgatagcctttctacctggccgcccagatcaattctctcaataaatctcccccccccgggaccttacaatcctctccattacatatatcctgcccttacgccaatacctctcaatacttcaccgataccgccactccacaagtccgcatccataaatccttcttctcaaggacttccaaacttttactccccactatataagcttttttgatagactttcttacgccagacctccgcttaacctccccttaccccccaccttttaacctactgggagaacttcttctttgctaagtaaccaccgttttcctgatcacaatatcacctttcctaacttaccacggaactcacaacacatactagtcaccagccctatactccctttacatatttaccaccaacaccacatggggctcactcaccccccaccatttaccacattaaaccctcattcacaccgagaaaacaccctcatgttcaaacaccctatcccccattttcctcctatccctcaaccccgacatcattaccgggttttcctcttta

SEQ ID NO: 667642 - DNA, 578 bp, Homo sapiens
  misc_feature (367)..(367): n is a, c, g, or t
  misc_feature (527)..(527): n is a, c, g, or t
  misc_feature (536)..(536): n is a, c, g, or t
  misc_feature (563)..(563): n is a, c, g, or t
  misc_feature (572)..(573): n is a, c, g, or t
  misc_feature (575)..(575): n is a, c, g, or t
ccggttgggcgccgcgcggtgaggttgtctagtccacgctcggagccatgccgtccaagggtccgctgcagtcggtgcaggtcttcggacgcaagaagacagcgacagctgtggcgcactgcaaacgcggcaatggtctcatcaaggtgaacgggcggcccctggagatgattgagccgcgcacgctacagtacaagctgctggaagccagttctgcttctcggccaaggagcgatttgctggtgtagacatccgtgtccgtgtaaagggtggtggtcacgttgcccagatttatgctatccgtcagtccatctccaaagccctggtggcctattaccagaaatatgtggatgaggcttccaagaangagcaatcaaagacatcctcatccagtatgaccggaccctgctggtagctgaccctcgtcgctgcgagtccaaaaagtttggaggccctggtgcccgcgctcgctaccagaaatcctaccgataagcccatcgtgactcaaaactcacttgtataataanacagttttntgagggatttcatcacgtttcaagaanagaaaagannanaag

SEQ ID NO: 667643 - DNA, 339 bp, Homo sapiens
  misc_feature (277)..(277): n is a, c, g, or t
  misc_feature (314)..(314): n is a, c, g, or t
tctcctacccgtcagacgctgaactatgtggaatttgaagtcaggtaatggggattttttcgcttttgttctttttgcttaggatagctttggctattctgggtcttttgtggtttcatataaattttagaattattttttctatttctgtgaagaatgttattggtattttgatagagattgcattgagtctatagtttgctatgggtagtatggatattttaacaatatgaactcttcctacccatgaaaattgaatattttccatttttttggngtcctctttaattattttcaccactgttttatagttnttattatagagttcttttatttctt

SEQ ID NO: 667644 - DNA, 592 bp, Homo sapiens
  misc_feature (541)..(541): n is a, c, g, or t
  misc_feature (550)..(550): n is a, c, g, or t
  misc_feature (577)..(577): n is a, c, g, or t
  misc_feature (586)..(587): n is a, c, g, or t
  misc_feature (589)..(589): n is a, c, g, or t
ccggttgggcgccgcgcggtgaggttgtctagtccacgctcggagccatgccgtccaagggtccgctgcagtcggtgcaggtcttcggacgcaagaagacagcgacagctgtggcgcactgcaaacgcggcaatggtctcatcaaggtgaacgggcggcccctggagatgattgagccgcgcacgctacagtacaagctgctggaagccagttctgcttctcggccaaggagcgatttgctggtgtagacatccgtgtccgtgtaaagggtggtggtcacgttgcccagatttatgctatccgtcagtccatctccaaagccctggtggcctattaccagaaatatgtgtgccatgacggtcttccacagcaacgggagcatcaaggaggatcgatgcctcatccagtatgaccggaccctgctggtagctgaccctcgtcgctgcgagtccaaaaagtttggaggccctggtgcccgcgctcgctaccagaaatcctaccgataagcccatcgtgactcaaaactcacttgtataataanacagttttntgagggatttcatcacgtttcaagaanagaaaagannanaag

SEQ ID NO: 667645 - DNA, 205 bp, Homo sapiens
cttatctagtgttactggacggacaccctcaagatacctcactccagtatgactcctatggctctacactctttgagttaaaaaactaaggaggttcttatatggaataaacaggtattacgctatttaaaggagagggctgcgcaatgcttgattatgggctcttcaagattgggaggaccaagcgtatgtcacttttcttcca

SEQ ID NO: 667646 - DNA, 413 bp, Homo sapiens
  misc_feature (5)..(5): n is a, c, g, or t
  misc_feature (82)..(82): n is a, c, g, or t
  misc_feature (97)..(97): n is a, c, g, or t
  misc_feature (101)..(101): n is a, c, g, or t
  misc_feature (156)..(156): n is a, c, g, or t
  misc_feature (179)..(179): n is a, c, g, or t
  misc_feature (215)..(215): n is a, c, g, or t
  misc_feature (326)..(326): n is a, c, g, or t
  misc_feature (348)..(348): n is a, c, g, or t
  misc_feature (375)..(375): n is a, c, g, or t
  misc_feature (397)..(397): n is a, c, g, or t
  misc_feature (407)..(407): n is a, c, g, or t
gcacnaagcggctccagggtacgtccccgccacgccgcatcgcaggatcggtgcgtggtgacgtttcgccggcgcgggccantcccggaagcgcganaagngccgccagatgtgcaggcagcggaggaggagaaagagatggaccttccggaattnggcttcgagggtcttctgcggcngatcctgagcatggtgaacacagatgatgtcaacgncatcatcctggcccagaagaacatgctggaccgctttgagaagaccaatgagatgctgctcaacttcaacaaccctgtccaagtgcccggcttgcagcagatgagcgaacntttccttgcaccacacgaaganccttagtagagattaaaccgggacctnggacaagatttttcggcgtatnaggacgcttnaaagga

SEQ ID NO: 667647 - DNA, 372 bp, Homo sapiens
atctatattcaatttctaactccatatatcaaacaataatacaggatatttggtcatgctaatattcaaatatgggtttaccctcacttcataattcctcttctcccctcctaccttaaatctaataaagttctcattatcaattggaaattcataattcttaaaaagccaattggatgctgagttgaatgattgtctttacagggtccaaatttaacttttcagcgacctgtaagccatggaaagattaactctcatctcctatcaaagtaaactcaaagctctatttggctggggaatgggtgttaaatatgctatggtttggtaaatccgtgctccgacgaatagtctgaagtgcaggatggctgtaga

SEQ ID NO: 667648 - DNA, 421 bp, Homo sapiens
gtccccccccccattgaaagcgtcccgattatgggttaacctccccttgggcaacaacaacaaggaaaggaaccttagggggccccttagagcaccggaaccccggagttccgcccccctggggttcccaaccccaaagtggagtcaagggtgggcccctttggggcagccaaaaaaactgccgaatgcatcccttaaactcccgaaagaggccgtaagggaccccgccccaaagaaccccccacccctattccccccctgggttcccagggagcccactcggttttaaaaaggaggagggattttggggtccaaactgccgtttgggaaagcatgggccccggatttgttttttattccttcccctttgggggaaattttttgttttttaaaaatgataaatttgggggttgggccctta

SEQ ID NO: 667649 - DNA, 525 bp, Homo sapiens
ggggcaccgcggtggctcaggcccaacacttggggagacctagacgggtacatcacttgaggtcagccgttcgagaccagcctggccactacggcgttaacaccgtctctactaaaaaaaaaaaaaaaaatacataaaaaaaaaaaaaaaaaaaaaaaaaaaaacagtggtggcgcgccgcgcgccccggcgccccccacaagaaaaggacttttgaaacacccccgggtggggggcggcgcggggcccaccaacgaggatcaagtagaccaacgtgggccaactacgaggtgttcctcgaagaggacaactccggggcgcagagacacgacaggggcgggggtctctcctacaccaacaatataaaaaacgcgcggggggcgacaccacgagcggcgtctcgtaacaaaactccgacgaaggaggagctccgggagggccgacaacagcgcggacctcaactcaaacggggacccacgagagagagagccataatatcaaaatgagccccgcgcaggggagagc

SEQ ID NO: 667650 - DNA, 149 bp, Homo sapiens
gccggatccttgactgggcgggaccttagaggtggggacgcagagaattctcttatccaacatcaacatctgggtcagattgaactcttcaatctctgcactcaaagctgttaagatagttaagcgtgcataagtgcccgccaatcgaa

SEQ ID NO: 667651 - DNA, 323 bp, Homo sapiens
cgccttaaataggactccagtctatcttattggctataaagcagaagtcaggcagaagagtgcctctcacagcacaacctgctttaacaggttatagtttagatgtttatttgcttgtcagaggtttttctgtcacccaggctggagtgcagtggcgacaatcttctcatggcaacctccaactcctgggttcaagcaattctgcctcatgcttcctgggtagctgggagttatcaggcacccgccatcgcacctggttaacttttgtattttattgtagtagagacggggttgcagcagattggccaggctgacctcgaact

SEQ ID NO: 667652 - DNA, 440 bp, Homo sapiens
tgcatgcttttggtgtctctgaggttcccgctcagtcctggttgatgctggagtaggtcacttgagagatatgctgccgggcctagctcacgacgttcttcgccctgagctgctctcccattcctcatgtgaccctgacattccggggaactgggacccctgttccttattggctacatcagtcctttctttcctctcacaacagaggatcatgttctccgtgaatgcacttttcatttacagctctcaaaagaatatgccttctcaaggaatttttaatgcacttttcttgaatgtcagctcccagtcatcacgagcttgggtgttgtttgggcattccccggctcgggggcggccgctccaacatgtggttccagcggccatgacgaagtacctgcccacgtaccgttcctactatgactcagtggacccccgcatca

SEQ ID NO: 667653 - DNA, 630 bp, Homo sapiens
  misc_feature (40)..(40): n is a, c, g, or t
  misc_feature (67)..(68): n is a, c, g, or t
  misc_feature (84)..(85): n is a, c, g, or t
  misc_feature (99)..(99): n is a, c, g, or t
  misc_feature (101)..(102): n is a, c, g, or t
  misc_feature (104)..(104): n is a, c, g, or t
  misc_feature (106)..(106): n is a, c, g, or t
  misc_feature (127)..(127): n is a, c, g, or t
  misc_feature (138)..(138): n is a, c, g, or t
  misc_feature (307)..(307): n is a, c, g, or t
  misc_feature (311)..(312): n is a, c, g, or t
  misc_feature (314)..(315): n is a, c, g, or t
  misc_feature (335)..(335): n is a, c, g, or t
  misc_feature (337)..(337): n is a, c, g, or t
  misc_feature (344)..(344): n is a, c, g, or t
  misc_feature (430)..(430): n is a, c, g, or t
agggttgggagttctctgggcatccattttttttaaaggnactggacagagtacacacaggaaaggnngctgttaccctcttgnnatctggttcaaggngnntntngtttagcattctttctttttntcttgattggntggggccacatgatgggcagctaggttttgggctgtcccactagagcaggttgtaaacatagccatgtttcagtgaggggttgatctttttccctggtgttccaacctaccagtgcaacgttatagcccagagtgagttctacaagcgttgctggcctaatggatgggntggnngnngggggtgggataggggttgntngtggggntctggggtccatcacggcacaggaacaacacgcatggtgttggtgaagctggagctagggcgctatttggttagcacaatgaccanattttcttttttgaagaagcctcgggccttgccaacattcatggcaaagttcacccggaggtccacgtcctcagcccaggcctcctggactgggtccttgcacagcacagggaagatgccacggtacaggtgggcctgacgagctgtctggggattccgggtcacagcaatgatgggggcacgtgggcggtatctgggca

SEQ ID NO: 667654 - DNA, 756 bp, Homo sapiens
agcggacagaagtccagtcattcttggcaggatggcttctcatcgtctggtacatcgctctggccttgttggactggtattcgtgtctgaggctggccctacgggtcaccggtgaatccaggatgtgtacctcctgatggtcaaatgttctagtatgcgtaagttgggaggcagaccatgccatcagagtgggcgtgcttgtgttcagaagaggctcgtgatgacacctgggagccatgagctctgctgggtaaaatcagtgagtgatggagagctgaatgggctcacaactggaggatgaatttgtggagaggatatacgaagtggatgtagaactgaatcttatggaaggtcatttggctatcttgcgcataaccagggacgcatgcacgaggtggtattcagcgatgccaacgattccgggccgccgccgatacagctaatgccagccctgatgagcgcactactcctattactaccaaggatgtcaataatcgaatctccaaggaatgagggacggctcctccagagggacagtgaacgacgaggggatggggattccatgtatccacggagtataccatgtcgacgtaaaagtcagtgtttttcagctcaatatgctatggttagaagttccaaggccagagtacccataactatcatgccctgcggaagagaccactctcaaaaatccattccttctcaaagatggaatctgactgaaaaaggggggaaaaaccttcaaaggggggggcc

SEQ ID NO: 667655 - DNA, 165 bp, Homo sapiens
tatatattgtatgcggttatactgcacgatatatgagatgaggaatctcaggttttccaacaattcaatactaaaaatacaaaaaattagctgagcgtcgtggcggacgcctgtagtcccaactactcgggaggctgagccaggagaatggcgtgaacccgggag

SEQ ID NO: 667656 - DNA, 1045 bp, Homo sapiens
agccgccacccgtgtatccagtgctgactggtcgtgggtgcatacatgaggagataacctggaccaggtgggcactgacaaaacgtgggaaacccctattcccagccccaacgctgctcgtcctcttcatactcactatttcccactccaagcccagcccatggagattgacctggatggggcaggccaactggctctcacctctaggtccccatactcctatgatctgagtcagagccatgatcttctccctggaataagtagaggccactgtgtaccttccgctatggagctatattccaggcttctgctaggaggcctagggacaactgcatcccacctcctgacacccttctcccactctcctaggcatactggacctctgggttgggatcagggagtaggaatggaacagcgatggagcatcaacagcagggtgggctatgtggggcctgggaggggcaatcctcaaactgcggggtagagaaggcagcacaggacgggcggcatccttctgagctcctgtcccctgctacacctattatcccagctgcctagattcaagggaaagtgggacagcattgtaggggaaggagctcctataccattaaatccttgatgatatgacaacaacccactaatacctttaggccgacccaagagatagagacgttgaagtaactcatcaagagaacttggtgcttacaagatagtacgagacaaggaactgagcacctgacaggggttgactttacccaattggggatggcatgttgcaccatttggtcccccttagaatctgtgaagcacaaactaggagctgggacagaccctagaggaccataaccaccaccacaagagctaaggcacagcatacgtaatatatcagcagcaaaagggaaaaacacttacgaagcgacaaacaagcgagcacgggtgagacccaaaagggcacacgatcagccacaaccaacagagggaacacaaaaggacacacagagggcatcacgaaacacgcgcaacaacaaaagaacaacaacaacag

SEQ ID NO: 667657 - DNA, 784 bp, Homo sapiens
  misc_feature (11)..(11): n is a, c, g, or t
  misc_feature (15)..(15): n is a, c, g, or t
  misc_feature (537)..(537): n is a, c, g, or t
  misc_feature (582)..(582): n is a, c, g, or t
  misc_feature (599)..(599): n is a, c, g, or t
  misc_feature (623)..(624): n is a, c, g, or t
  misc_feature (629)..(629): n is a, c, g, or t
  misc_feature (631)..(632): n is a, c, g, or t
  misc_feature (635)..(636): n is a, c, g, or t
  misc_feature (642)..(643): n is a, c, g, or t
  misc_feature (646)..(646): n is a, c, g, or t
  misc_feature (648)..(648): n is a, c, g, or t
  misc_feature (664)..(664): n is a, c, g, or t
  misc_feature (666)..(666): n is a, c, g, or t
  misc_feature (668)..(668): n is a, c, g, or t
ggctcttcctnaggnggcggccatggcgggacaggaggatccggtgcagcgggagattcaccaggactgggctaaccgggagtacattgagataatcaccagcagcatcaagaaaatcgcagactttctcaactcgttcgatatgtcttgtcgttcaagacttgcaacactaaacgagaaattgacagcccttgaacggagaatagagtacattgaagctcgggtgacaaaaggtgagacactcacctagaacagtgccgtgctgctgctgggaagttgctttacacaacacaggccacatgggaaaggccccagcagccttcagctccttcctttctccttaaagagcaacagggcttattcttgtttttcttttttcaaaagtgtggcctttgggctctgccatctggggtgtggtgtggtatgtgggaagaagttcagaggaaccgttggaaacgacgttaggcattttaccttttcagtaacatttaatacatctacttgtcaatgtatttgagacattcacagccaaaagcnctgggactctttgtgaagtcctcctcacctctaatcttctttctntctcttctcaaactttnccttaaaggttctcattgcctttnnactgntnntgnnaacagnnttngncttcttcccacctttngngngaagtgccgaacattcctggtgaatgacactaatgcccttgcaaaggtgattgccgaataagccggtggttaccccaagtttttgttgataagggcgttatggccctggccccctt

SEQ ID NO: 667658 - DNA, 244 bp, Homo sapiens
tacccaggcaggtttgaagcacacccgtatatccccaaaggaccagcaagtattcattccgtgcatgacgtcccagacactccttctgcttctcagactctattccgactaccctcgcaacgatggaggaaacgcaactagcaaatccaatctaagcgctgctccgaattctcccatgctgctcatcgaagtcgtggcatggagccccgtgcggttactcaggcagtatgttcgccaacgaacc

SEQ ID NO: 667659 - DNA, 149 bp, Homo sapiens
agatatggtgaggcatctcgcgagttacgttcataatctgatgcatggagatgaagatgaggagcccgagagccccagaatccaataatatcggagggtgtcgttcaaaggtagtggattacccccaagtgtgtctttaatatcttgta

SEQ ID NO: 667660 - DNA, 263 bp, Homo sapiens
  misc_feature (17)..(17): n is a, c, g, or t
gagtttagtgtcattantcactctgtatacctttttgtacccatagtagctctcacttataagtgagaacacacagtatttggttttccattcctgagttgcttcacttagaataatatcctccagctccatccaaaattgctgcaaaaaaaaaaaacccacaaactttattgggtcctttttaatggcaaggtcatatcccagggggtagagatcccacttttaatttatccactcacggctgaatggggtggctcccacat

SEQ ID NO: 667661 - DNA, 342 bp, Homo sapiens
taggtaggcagaagcgagcctacaacttggagcctagtgtagactgtcacagtaaggagtttgaagtcctgaaagcagcttgagagctgtaggagcggccatattgggctttggagcaagatagtctaaatcaaagtaaagagatggagacgcttcagcaaccagatggcaggttgggcatgggagctgtggctgtgctgagctgagaagcctcagactgcctgcgaggctctctctgggaggaagtcaggtctttctttccttcgtttccttcctttcattcctttcctttccttcctttttcctctttctttcttttcttttctctctctctgcatgacg

SEQ ID NO: 667662 - DNA, 801 bp, Homo sapiens
cctatgaactgtgagaactgagagcttcctgcatgaggctggctgacctcaacgaagttcagtgtgactgtgctggtggaacgagtttgacggaggtgatcgaggactggtacatgcgaccccaccagtgcaggaacacctgacttgcacttccgtctgtcgccatgccacgtgtcgtgatatggaacagtacaccacgtttgccatggcagcagcagtgtgctctcggcaagatggtggagactatcagcctgctccctgggaacgtggtagaggacacgtcgcaacgagaagcaacgaggctgtcagtggcccaatggcaagacaggcaggtcgagggagttagtcaccaatccaatatagcaatagatgggaagggaagcctgggctggcctatctgcagcgcgacgagcccaagacgcgccagaacgcacgcgaatgacgggcatctcgatcaatcgctagtccccctcatcaactactaccagccaccaccgtgagactggaggcgtacgtagaagcactctcaacccacgaggctactcgcgtgcgtggctccctgcaggtaccccgcgtgtgagtcttctgcacagcctagaccgtgaggcatcagcgagggtgcattagtgccatcctttggcctagcagccagcgtgacttgcgcacacccagccacagccctttcatcgcccccccctcccgtctgctcttttgtgccttggtggcccgctcctttcatgcccacccggcacctccgaccagcacaccgccctccgcggcaatcgcaagctcaatcacgcg

SEQ ID NO: 667663 - DNA, 1231 bp, Homo sapiens
atacatgggaagtatcatcctgctatatgcgctggtctttcattgtcgttcgttagagacgtggaagtatacgtcaggaacaatatccagctttggatgtggtgaaggctgctgtgtgctccatacacatacggaggatttacaaagtatgcgtgtatatgtctgatatttgcgttcgaaatgccgctacaagtaaaaacacatcgccaggactatctgtgattcttatacttcacctatatgtaagatgatggtgacggcttccatgcttttgctcttgatctgcgcatttagcgtcgaagccatggcgagcttaacattgttaacctagggagaagaaatatcacgaagaagaatgcgtatactatgcaggtgcacggtcagtaattaaccgtggacgaacaacctggtgaaaaattcagaggatattgtctcatggaggagagtcaacgttcaaacatagtaaggaactgcgcacctatgcctggtaaggcaccattatctatgtgggtagagaacgcgtcgtacagaagttggggagaaggatgatcacctaggagacgcacaagcaatatccctataatgccacgtatatacaccagctccacacaacattggcttatcctagaggtttgcaagtgcccgtacacatagggcccttcaaacataccttctgggttcaattaactctcgtggagaaccaaagctaagttagtaacccaatgcgtaggtttggaaaacagagggataacatggttaggaggaaaaacaaaaacaggagagagttcattatatagtgtcagaggcacttagataagtacagattacgcagttttacccccttgggactagaacttaccaaacagtagagggaaaaaagtaattatgtaagacaatatggttatgggaggtagaattgcaaaggcggtcataaaattatacttaatctcacccatgtgccctattatgtacccgttgcttatggggcgactcccaaagttatataggagaccgttatctaccgattaaaaagacatggatcgcgtgagacccaatgtagagggtcacgaatatttacagaagcgtgattatgacgccgcgccgaaaccgcgtttaggaaattgacatttacaatggagtgagttcaacacacaaatttttcccgatttcaagatgtcaacacaatgaggtaagagcccccagaagccagaagaactgtgtgtatagggac

SEQ ID NO: 667664 - DNA, 362 bp, Homo sapiens
  misc_feature (39)..(39): n is a, c, g, or t
  misc_feature (109)..(110): n is a, c, g, or t
  misc_feature (114)..(116): n is a, c, g, or t
  misc_feature (121)..(121): n is a, c, g, or t
  misc_feature (136)..(136): n is a, c, g, or t
  misc_feature (138)..(138): n is a, c, g, or t
  misc_feature (144)..(144): n is a, c, g, or t
  misc_feature (148)..(148): n is a, c, g, or t
  misc_feature (160)..(160): n is a, c, g, or t
  misc_feature (169)..(169): n is a, c, g, or t
  misc_feature (171)..(171): n is a, c, g, or t
  misc_feature (177)..(177): n is a, c, g, or t
  misc_feature (217)..(221): n is a, c, g, or t
  misc_feature (223)..(223): n is a, c, g, or t
  misc_feature (225)..(226): n is a, c, g, or t
  misc_feature (236)..(236): n is a, c, g, or t
  misc_feature (242)..(242): n is a, c, g, or t
  misc_feature (251)..(251): n is a, c, g, or t
  misc_feature (260)..(260): n is a, c, g, or t
  misc_feature (362)..(362): n is a, c, g, or t
tttttttaaaccattaaagtaaaatccataattttctanagagtacaacacaagttcacacaaaaaagacattttcttttgcaaatcaaaacaggaaagaaaggaaaanngcannnaaganaaggggggggggttngngggggngggnggggggtgggtngattgggtncngttgtnggtggagaacagactgtgcgtttggtcatagtggcaattnnnnntngnnttgacattgngaaatnactgtaaanttgttttcnagtagaaaaggcaaaaaactgtacaaaacccctagtgttaaatacaacgtttgtaccaataaaaaactcacacaggtttgtctccaaaatgtaaagtttctn

SEQ ID NO: 667665 - DNA, 675 bp, Homo sapiens
  misc_feature (133)..(133): n is a, c, g, or t
  misc_feature (162)..(162): n is a, c, g, or t
  misc_feature (201)..(201): n is a, c, g, or t
  misc_feature (204)..(204): n is a, c, g, or t
  misc_feature (208)..(208): n is a, c, g, or t
  misc_feature (249)..(249): n is a, c, g, or t
  misc_feature (261)..(261): n is a, c, g, or t
  misc_feature (264)..(264): n is a, c, g, or t
  misc_feature (269)..(269): n is a, c, g, or t
  misc_feature (290)..(290): n is a, c, g, or t
  misc_feature (298)..(298): n is a, c, g, or t
  misc_feature (309)..(309): n is a, c, g, or t
  misc_feature (337)..(337): n is a, c, g, or t
  misc_feature (347)..(347): n is a, c, g, or t
  misc_feature (352)..(352): n is a, c, g, or t
  misc_feature (363)..(363): n is a, c, g, or t
  misc_feature (393)..(393): n is a, c, g, or t
  misc_feature (447)..(447): n is a, c, g, or t
  misc_feature (467)..(467): n is a, c, g, or t
  misc_feature (471)..(471): n is a, c, g, or t
  misc_feature (481)..(481): n is a, c, g, or t
  misc_feature (488)..(488): n is a, c, g, or t
  misc_feature (511)..(511): n is a, c, g, or t
  misc_feature (517)..(518): n is a, c, g, or t
  misc_feature (535)..(535): n is a, c, g, or t
  misc_feature (542)..(542): n is a, c, g, or t
  misc_feature (548)..(548): n is a, c, g, or t
  misc_feature (550)..(550): n is a, c, g, or t
  misc_feature (563)..(564): n is a, c, g, or t
  misc_feature (572)..(572): n is a, c, g, or t
  misc_feature (585)..(585): n is a, c, g, or t
  misc_feature (587)..(588): n is a, c, g, or t
  misc_feature (597)..(597): n is a, c, g, or t
  misc_feature (604)..(604): n is a, c, g, or t
  misc_feature (606)..(606): n is a, c, g, or t
  misc_feature (609)..(610): n is a, c, g, or t
  misc_feature (615)..(615): n is a, c, g, or t
  misc_feature (669)..(669): n is a, c, g, or t
tccggaattcccgggatagtacgtccactcttctgtccagcttttaacaatctaactaatgccctctccagggtcaccctagaatcagatctgctccccagcatcttctgtttcctggtgagtgattcctgcnactttggatggccatgacgggctggagcngccttgtgacaggagcaggagggtttctgggacagaggntcntccncctcttggtgaaggagaaggagctgaaggagatcagggtcntggacaaggccntcngaccngaattgagagaggaattttcnaaactccngaacaagaccnagctgacagtgctggaaggagacattcnggatgagccnttccngaagagagccngccaggacgtctcggtcatcatccacaccncctcgtatcattgatgtcttcggtgtcactcacagagagtctatcatgaatgtnaatgtgaaaggtaccccccncccnttagaggccngtgtccnagctagtgtgccagtcttcatcnacaccnntagcatagaggtagccnggccccnctcccncnaggaaatcatccnnaatggccntgaagaagagccncnngaaaacacntggcccncnccnnacccncacagcaaaaagcttgctgagaaggctgtactggcggctaacgggtggaatctnaaaaac

SEQ ID NO: 667666 - DNA, 630 bp, Homo sapiens
  misc_feature (133)..(133): n is a, c, g, or t
  misc_feature (162)..(162): n is a, c, g, or t
  misc_feature (201)..(201): n is a, c, g, or t
  misc_feature (204)..(204): n is a, c, g, or t
  misc_feature (208)..(208): n is a, c, g, or t
  misc_feature (244)..(244): n is a, c, g, or t
  misc_feature (258)..(258): n is a, c, g, or t
  misc_feature (278)..(278): n is a, c, g, or t
  misc_feature (287)..(287): n is a, c, g, or t
  misc_feature (291)..(291): n is a, c, g, or t
  misc_feature (293)..(293): n is a, c, g, or t
  misc_feature (298)..(298): n is a, c, g, or t
  misc_feature (302)..(302): n is a, c, g, or t
  misc_feature (308)..(308): n is a, c, g, or t
  misc_feature (314)..(314): n is a, c, g, or t
  misc_feature (320)..(320): n is a, c, g, or t
  misc_feature (334)..(334): n is a, c, g, or t
  misc_feature (348)..(348): n is a, c, g, or t
  misc_feature (387)..(387): n is a, c, g, or t
  misc_feature (440)..(440): n is a, c, g, or t
  misc_feature (458)..(458): n is a, c, g, or t
  misc_feature (464)..(464): n is a, c, g, or t
  misc_feature (479)..(479): n is a, c, g, or t
  misc_feature (504)..(504): n is a, c, g, or t
  misc_feature (516)..(516): n is a, c, g, or t
  misc_feature (518)..(518): n is a, c, g, or t
  misc_feature (536)..(536): n is a, c, g, or t
  misc_feature (538)..(538): n is a, c, g, or t
  misc_feature (540)..(540): n is a, c, g, or t
  misc_feature (545)..(545): n is a, c, g, or t
  misc_feature (630)..(630): n is a, c, g, or t
tccggaattcccgggatagtacgtccactcttctgtccagcttttaacaatctaactaatgccctctccagggtcaccctagaatcagatctgctccccagcatcttctgtttcctggtgagtgattcctgcnactttggatggccatgacgggctggagcngccttgtgacaggagcaggagggtttctgggacagaggntcntccncctcttggtgcccggcgccggcgctcgcccggcgcnccgggtcttggccncggccttcggcccccccttncccacggcntttncnccccncccncccccncccccnctgccngtcctggccggcgnccttctcggctgcncccttcctgccgcgcccctgcccggaccgtctcggtccncctcaccccccgcctgtctccttcctgtcttcggtgtccctccccccccctcnctcctgcctgtccctgtncccggncacccccctcctgtnccccgcctgtctccccgcccgtgtncccgtcttccancnccccccagtcgcctcccngncnccggncccccctcctccccggccctcctcccgcctggccctgccgccccgcctctggcccccacctggcccgctccctccccacacagcn

SEQ ID NO: 667667 - DNA, 2038 bp, Homo sapiens
ggcacgaggctaagagccccattcagcccattgtctgtcttccagtgcctttccttgggggcccacggtgggggcagcctctgcgccttctttgtgccccaccagggggtcaccacccacccatgttaggaaaacaggccaggcaggacctggctccggacagcctgcagctgctgaggccttggagaccgggctaggggctatgggaggccatctaggggaggggaacactgccccgggtcagtctgagagggccctggcaaggcctgggtagcaggagcttgccctcggggccgctgggaggaggcctggggtacctgggcctgcctgaggtgcactggtgtcctgggaagccccagtggcaggcgctgcctggagactcagctccttggctggcctggtctggggaactgggtatctgcctgcaccaggctgtgagatgggccaggcagagttctccagggggcggggtctcacattgggtcctgcctctgaagacccagaagggcacacgggaccccaggggtgctgtggtggggagcagcaagcccagggacccaatgcagtgcccagcacagagggaggctgtctggaggcagagatgcctcctggcctctggacagcgatgctggtggtggacgagggccaagagggtatcctgcgcagggggtctgagcaactgtgaggagctggctgccgcaggggcctgtgggacatggtccactgggtgactgcctcgtttccaggctgcagggccctcggaagggtgctgagccggggtaacgtgtcccagctgcattttggggacactaagttgcagggggactggattgggaggcggggcaggagagctgtgagcatgggttcccagcccggggtgggtgggggtggggaaagggccctgaactctgtgactgactgttaggggcctgactgggcttctgtggaggtggctaggtggaggaggctttggggcaagcggaggtgatcactcctgggctccaggtgagggcaggagctggacctgtgcggtggcctgcaccaccagatacactacatgctggctgtgctgcccacctggcctctaaccctccccttcccgctgctgagaagccacctgactgcactgccagccacctgctgccctgacacaggatccctggcccgagttgaatcctctgcacctgcctgtctccccttcttactgtaagactcagtgaagttccctcctccttcaggaagccttccaagattacacagccaggtgctccccttctctcccaagtcctctgaatgtcatttggtgcaccctagggatcctctgcatttctcaggagccctagggtaggtggatggagggcagatcctccaggggctagggcaggtgtccttaagggtgtggggagttttgggcagggcactgtccttaagggtgtggggagttttgggtcatgacccaccccctctgaggcccctgatgatgatgtggggaatgggatcctatgggcccagctgcatgccaggcaggcatccccaggtgtaaacagggcagagcggagctgacaggtaagcagttgccatgggggtgatgagctgggcagtcctctgttgctgagtggctttaaagaaccactcgttgttctgtgacttgggggttggctgggctcatcctgccagctctcctgctctcgtttgagtgtctcctgaggctgcagtcagagcgtggtggtccaggatgctggtgatgctgggatggttgccctctctgctccatgaggtctccctacagagcacctcccccatggtggcagcagagacaaaaccctggcctccttcaggctgaggcccagagccagtctcctggtgggtaaggtggccacagggccagctggcagcagggtattggcactgagaggcacaggcctctccaacagaggtggtgccgggacaggggcagtgcctggagaccgcttaggttgtcacaactgggatttgtgtactagttttctgtagctgccataaaaattgccacaaattc

SEQ ID NO: 667668 - DNA, 1753 bp, Homo sapiens
ggcacgaggctaagagccccattcagcccattgtctgtcttccagtgcctttccttgggggcccacggtgggggcagcctctgcgccttctttgtgccccaccagggggtcaccacccacccatgttaggaaaacaggccaggcaggacctggctccggacagcctgcagctgctgaggccttggagaccgggctaggggctatgggaggccatctaggggaggggaacactgccccgggtcagtctgagagggccctggcaaggcctgggtagcaggagcttgccctcggggccgctgggaggaggcctggggtacctgggcctgcctgaggtgcactggtgtcctgggaagccccagtggcaggcgctgcctggagactcagctccttggctggcctggtctggggaactgggtatctgcctgcaccaggctgtgagatgggccaggcagagttctccagggggcggggtctcacattgggtcctgcctctgaagacccagaagggcacacgggaccccaggggtgctgtggtggggagcagcaagcccagggacccaatgcagtgcccagcacagagggaggctgtctggaggcagagatgcctcctggcctctggacagcgatgctggtggtggacgagggccaagagggtatcctgcgcagggggtctgagcaactgtgaggagctggctgccgcaggggcctgtgggacatggtccactgggtgactgcctcgtttccaggctgcagggccctcggaagggtgctgagccggggtaacgtgtcccagctgcattttggggacactaagttgcagggggactggattgggaggcggggcaggagagctgtgagcatgggttcccagcccggggtgggtgggggtggggaaagggccctgaactctgtgactgactgttaggggcctgactgggcttctgtggaggtggctaggtggaggaggctttggggcaagcggaggtgatcactcctgggctccaggtgagggcaggagctggacctgtgcggtggcctgcaccaccagatacactacatgctggctgtgctgcccacctggcctctaaccctccccttcccgctgctgagaagccacctgactgcactgccagccacctgctgccctgacacaggatccctggcccgagttgaatcctctgcacctgcctgtctccccttcttactgtaagactcagtgaagttccctcctccttcaggaagccttccaagattacacagccaggtgctccccttctctcccaagtcctctgaatgtcatttggtgcaccctagggatcctctgcatttctcaggagccctagggtaggtggatggagggcagatcctccaggggctagggcaggtgtccttaagggtgtggggagttttgggcagggcactgtccttaagggtgtggggagttttgggtcatgacccaccccctctgaggcccctgatgatgatgtggggaatgggatcctatgggcccagctgcatgccaggcaggcatccccaggtgtaaacagggcagagcggagctgacaggtaagcagttgccatgggggtgatgagctgggcagtcctctgttgctgagtggctttaaagaaccactcgttgttctgtgacttgggggttggctgggctcatcctgccagctctcctgctctcgttgtcagggtctaatccatcttcaacatctgttcctgggatgttgtgcactagttcctgaag

SEQ ID NO: 667669 - DNA, 1022 bp, Homo sapiens
agcggagacagtacttcgccgagagtcgtcggggtttcctgcttcaacagtgcttgcgacggaatccctggcgtctcgttccccaccccggtccggccgtccatagccagccctccgtacagcctcttcgaccgcacccgtcggtacatgtcccacaggcccccgtcgaccgctccagtcgccgggcagtcaccgacgctcggcgccgacgtcgtccgttagctcgccgccattgacgaccgcgtgcaccctcgtcaggtgcgccgagaactaaccaccaggatcgtcagaggcgcgcaatcgaactcacacaggaatcagacctggagcatcgtacggccatcctacgtttacctgatccatgtctgttacctactctaggaccgcgatgagtgctgggcgtattgacagaacttgtgccaaattactattctatcaccgagtctcactgaggagatgggacacatgctgagtaaaactgcattgaaggctgcagggaaccaacggaggatgggccgcctttacttgcctctcagagatagtcaaggagaatcagcactgatggatgccactgggaagcagcgggcctcaatgtggcgattggcattgtgcacttagcattttgaacatgacaagtgtgacatcaagtacactttctggaaaacttgcacagaacatgggcacaccttgtaccgcaaaaaatgagcccgcaatgtgtggatgacttcatttgcagaacagcattgacctgacattgcatccaggtgaagcgcctttcaaccgaaatagggtgaccagcgtgacccaaatttgcgccaagatgggaagcgccccgaaaatctgggctagggcggaatatactactttgacaaatcaacaccttggagacccgctgataatgacaagcctaaggcctctgggcttattaccccataaccgtggggatagttcacttggtcgccatggcagtgctttcaatgtgggggtcgtattacctttctataattgtaccaaacatccat

SEQ ID NO: 667670 - DNA, 549 bp, Homo sapiens
  misc_feature (5)..(5): n is a, c, g, or t
  misc_feature (25)..(25): n is a, c, g, or t
  misc_feature (45)..(45): n is a, c, g, or t
ccccntcccgaattcctggcttccnctaaaatacctgtgataccntagtacagtgcctacatatcagttcattcatgtggattcactgtagtacttggcatatgtcaaacttaacttttgctttttggaaccttatggaacttttctttctgaaaaaaaattttttattatggagacagggtctcgctctgtcatccaggctggagtgccagtggtgcagtcatagctcactgcagcctccagtcttctgggtttgagagttcactgaagcctccacattccgggttcaagtgatcttcccagctgggctttccaaagtgctgggattagagttgtgagccactgtgcctggccttgggattcttttttttttttttttaacgctctcggatgagtcatgcttttaaaaaggccaagtatatcatgggtccactatgaaacaatagatgtaatagccataatggtgtgttagtagtcctagttgtgtgtgtataattattagtagttcaagttatttaaataaaaacaaaaaattagaaagtgtaaggc

SEQ ID NO: 667671 - DNA, 131 bp, Homo sapiens
gtccgcactcagcatgcatgggtatgagaagccccttataatgaaagctgccagcctttcgtccttgtttcagagggtgggtcaggtggttggtgtgagaccttgctcacggtgcacccaacaagagctgc

SEQ ID NO: 667672 - DNA, 135 bp, Homo sapiens
aatgagctcggtacccttatgttctgacccacccggatctgcacctgcggtggctcgcccgggcccggtgctgtatgattcaggctctaccgcatgtggccctccttctcggttgcgagacccgttccacgggtc

SEQ ID NO: 667673 - DNA, 370 bp, Homo sapiens
catgacatcccattccattccactccattccattcctctccattccattccattccatttcattcctctcgtgttgattccgttccatttgaatccactgcattccaagtgggttgattccaatccatttcattccattccattccattccattctgttgcattccactcgtgttgattccattccattccattgcattccattccattccattaatctcgggttgattccattcctttccattgcattccattccattccattccattccattccattccattccattccattccatttcattccattccattcctttccattgcactggagttgattccatgtcgacgcggccgcgaatttagtagta

SEQ ID NO: 667674 - DNA, 156 bp, Homo sapiens
attttgcctgtgtagatttcatttattggtaattcattagtttaacactattatgtagtgtttaaatgctgctttacatatttctcctgaacctgcaatacttgcaattttcattcttcaacctaaatggaatactaattttacactgtatgggat

SEQ ID NO: 667675 - DNA, 247 bp, Homo sapiens
  misc_feature (13)..(13): n is a, c, g, or t
  misc_feature (29)..(29): n is a, c, g, or t
  misc_feature (93)..(93): n is a, c, g, or t
  misc_feature (153)..(153): n is a, c, g, or t
  misc_feature (180)..(180): n is a, c, g, or t
  misc_feature (183)..(183): n is a, c, g, or t
  misc_feature (246)..(246): n is a, c, g, or t
taaaattctcacnaaagagccctaaaacngcacatctaccataccctctacatcacggcccgaccttagctctcaccatgcccttctactatnacccccctgactctcacaacatattttgtaccaagccctcttctaacctccctgtctatnattgaacagcatacccccgattccgcncgnccaactcatacacctcctataaaaaactcctaccactcaccctagcattcttatatgatatgnt

SEQ ID NO: 667676 - DNA, 107 bp, Homo sapiens
ttgaggatccccaacggcaacattcagtgaatgcctctctgtgatgaacgaaggcagaatgggcgtagcggtgattatgcaagcgagcgaattatgtggaattatta

SEQ ID NO: 667677 - DNA, 223 bp, Homo sapiens
ggggggtcccttttttggttttttaaccccccggccgggaaaggaaccttgggtttttttttgggcttttccccggggggagccccaaaaaaaaaaaggtttttttttgtttatagccggaaccttttccctttccaaaaaataaggggggtggtttttttaaagcctttaggttagtccaagggttgggaccggtttttccaattaaaggtttttgggggga

SEQ ID NO: 667678 - DNA, 333 bp, Homo sapiens
accgctcgccctctctgcgagaacacccaagaatgatcatacaaaaaaaaaaaaattataacagcagtatacaacctacaagaaaaagatgacctcaaaaggtatttatggctggggcatgggggctcaggccggtaatcccagcacttggggaggccaaagcaggcggatcacgaggtcaagagatcaagaccatccggaccaacagggtgaaacccggtcggtactaaaaatggcaaaaattagcggggcatgggggtgcgcacctatattcccagctactcgggaggcggaggcaggagaatctcttgaacccagagaggggcggagcag

SEQ ID NO: 667679 - DNA, 622 bp, Homo sapiens
ctcgagcactcccatagagattcggccttggaacactagacagtgagccaaaaaaatgtatgcgctcacatacaattatgggttttaaaggcaagttattctaaatgagtaacttcgacatatgtccaaaggtagacatcttatggattatcattgcatactctctcccaaatattattatatcttcgacagtatttaaagtagggtctacagagtgagcattccattcccgtctctttctagtcatttgatcttgatggtaaagctgatgaccagtacaagggcccaactgccggccatgacaacaagcagaacaagaaagtgtagcagctagttcctgagctccttggatgtcacaactcacaaaggtcaatctggtcttctctattcacatgccttctttctatacagacacttgtttaacgcttccaatggggccccttcctgtccgtaggcagctgtgtgtgtctggcagcccctgagcccaggctccatctggtcaccgcctcaccgctcataggctctaacctctctttcatggacgtgccatagtgtgctttactctgcagctataaatttctaaaaattccgtaattagagcctgtcactccatagactgtgg

SEQ ID NO: 667680 - DNA, 443 bp, Homo sapiens
agcgggcgcccagcgagcgctcagggccggggccagcgagcacagccaccgcagccaccattccctggccagcagccttcgcagccaccacacacacccgagctacggtcctcccggaggccccctctctacggcccatggagatgcgcccgcccgcggccatggggcccccgaaggagcccgtaccgcgggcgcgagctggcctcagtgcccccggaactgaccgccagcagacagtccttccgcatggcatgggaaaccccaagtgagtcgttgtggatgtgatgtgagcagggccccgtcgcccagctcattccgtcccaccccgagccggctgcagtttcctcatctcccatcccagtccgtctggtggtgtaactttagtcgtcggtaccctggaaaggggcgacactaagagggaacgtaaaagtccaggaggggag

SEQ ID NO: 667681 - DNA, 1352 bp, Homo sapiens
  misc_feature (615)..(615): n is a, c, g, or t
ggcttcttcgccagaaccaaaccggttggcttgctgtcccaggcggcgccccctcatcaccgtctgctcagtgcccggagagtctggcttctacggggacgtaggttcgccaactttgagggccaataccagccgtgcggaacgcatccgtttccacgactgttactagggagactcatggggcatgctcttctcccaaccctcggggacgtttaccccagggtgcaccacagatgctgtgcaggaggctgcgagagagtctggcaccagaatttgccacagaggaatgtgaagtaggattgcccttgcaactagacagtagtggaggaccatctgcctggagcaaggatatcaatgcttacaatggtgaagagcccactagtaaaagttgacctttgtcccatgcatgcgatgataggaatcgggagcttggcatcctgtggggcatgctgggatccagcagagagaggatggaccgggcatgcctagtgacagctcgtgtggggtgtgagaagggccgtgataagaagctggagctagtctatcgctctagccaagactagcagctggagggaacttggatgagaaactcaaggggaaacagctctgtccagntggaggagaacaaagggtggcccccactgaggggggccggggaagggggatggcgttccaccattccgttaatgaagccaagtgtccgcaagggcttcaacgcgagccttggggaaaaactgcttaacccgccatatagtcaaaggcggacaagcagcaccgtgtctcacaaaacgcgtgccgacggtcgcttcctcttctgtccctcgtcttatcactacccatcttcgcactgtacttgtgcagaaaaaacaagaggcgaagaagaagggcagggacggccgcggaaggcggcagaggggggccgcaggaggagagagggagggcggagaggagcgggcagacggaacaaggctggcgggtcaggcacaatgaggagagggagcgaggcaagaagagagaggcgggaggggggagaggagagagagaggagggaggggcagggagaaagggggaggagaggggagagagggggggccgaggagagagaggcaagaaaagcaaggagaggcaagaaaaaacagaacaaagagagagagagaagacaaggaagggaacaaagcgcaaaaacaccgagccgagcgaaaggcgagagaaagcgaaagagcagaagaaggagagaaacaaccgagagaagcggacgcagcgacagaaaaaaaggaagaaacgagaaggagggcgcagagaagaagcagaaagagagacggtaagaaagcaagcaaaagaacacgaaaagg

SEQ ID NO: 667682 - DNA, 707 bp, Homo sapiens
  misc_feature (8)..(8): n is a, c, g, or t
  misc_feature (89)..(89): n is a, c, g, or t
  misc_feature (91)..(91): n is a, c, g, or t
  misc_feature (100)..(101): n is a, c, g, or t
  misc_feature (127)..(127): n is a, c, g, or t
  misc_feature (133)..(133): n is a, c, g, or t
  misc_feature (136)..(136): n is a, c, g, or t
  misc_feature (145)..(145): n is a, c, g, or t
  misc_feature (160)..(160): n is a, c, g, or t
  misc_feature (189)..(189): n is a, c, g, or t
  misc_feature (195)..(195): n is a, c, g, or t
  misc_feature (198)..(198): n is a, c, g, or t
  misc_feature (201)..(201): n is a, c, g, or t
  misc_feature (226)..(226): n is a, c, g, or t
  misc_feature (231)..(231): n is a, c, g, or t
  misc_feature (255)..(255): n is a, c, g, or t
  misc_feature (276)..(276): n is a, c, g, or t
  misc_feature (352)..(352): n is a, c, g, or t
  misc_feature (376)..(376): n is a, c, g, or t
  misc_feature (409)..(409): n is a, c, g, or t
  misc_feature (412)..(412): n is a, c, g, or t
  misc_feature (442)..(442): n is a, c, g, or t
  misc_feature (447)..(448): n is a, c, g, or t
  misc_feature (450)..(451): n is a, c, g, or t
  misc_feature (578)..(578): n is a, c, g, or t
  misc_feature (586)..(586): n is a, c, g, or t
  misc_feature (628)..(628): n is a, c, g, or t
  misc_feature (631)..(631): n is a, c, g, or t
  misc_feature (641)..(641): n is a, c, g, or t
  misc_feature (701)..(701): n is a, c, g, or t
ctgccaanagctggcggccggcgggcacagccggctcattgttctgcactacaaccactcgggccggctggccgggcgcggggggccgnangatgtcggnnttggggccctgcgggggctttcggtngccgcnaantgcctggtnttgctggatgtatanttgtctggttcttgcggccatcactcaancacatnctntcncgacacttggtctactattgcctgntgaanatcacactgagtgacctgctcacnggcgcggcctacctggccaanatgcttctgtcgggggcccgcaccttccgtctggcgcccgcccaaatggttcctacaggagggcctgctcttcacngccctggccgcctccaccttcagnctgctcttcactgcaggggagcgctttgccacnatngtgcggccggtggcgagaagcggggccacnaaaannanncgcgtctacggcttcatcggcctctgctggctgctggccgcgctgctggggatgctgcctttgctgggctggaactgcctgtgcgcctttgaccgctgctccagccttctgcccctctactccaaangctacatnctcttctgcctggtgatcttcgccggcgtcctggccaccatnatnggcctctatngggccatcttccgcctggtgcaggccagcgggcagaaggccccacgcccagcggcccgcngcaaag

SEQ ID NO: 667683 - DNA, 736 bp, Homo sapiens
gcaggaattcggcacgagggcatgtttcttctgaaatggtagccattagtaaatcatccacatactgaaggaccagagtgcctggactttagaagtggcctagatcttgggccagtgcctcaccaaacagatgagggctatccctaaacccttggggcaagaccatccaagtaagttgtgatgtgtggtctgtgggatcctcaaaggcaaagagaaactgggagtcagagtgcaggggaagacagaaggcagcatccttaaggtccagaactgtgaaccatcctgcttcttctggtatttgagagagcagggtataggggttgggtacaactggatatagaggaattactgcctcattgatgagtctaagatcttgcactaatctccactgaccattcggcttttgtactcctagaattggggtgttgcaaagactgctgcatttccttactaagctagagcttttaaatgtttaacaatatcacgtaatcctttatgagctttaggccttaagggatattgcctttgataaggaaaagtggcgggatcttttaacctgaattggactgggcaggcatttttttgcctttctgtcctttcaatgcccagacgtcagggttgatttcctcctcaagtagaggacaacaaatgggtaaccttcttcccattatcatggagataatagcttcaggcttgggttataatatctttccctaataaggtgggggcttttgct

SEQ ID NO: 667684 - DNA, 513 bp, Homo sapiens
tgggtaaaaaaaattttttttacaaaaacaaacaaggaaatccaaaaaaggcaagttttacgtccatgctttttaaaagtaaatccaacaccccaagtaaaattttaactaaataaccccaaccgtaaatgtgtaacttttggatgaacaaatagggtttatcccaggaatgcaaaaatgtttcacattttaaaaatctctcaatataattcacttttttgggagattaaaaaggaaaatcccatgaaatgagtcaattctgataaactattttttaaatgtaaaaaaccatttttgtttaaaaaataaacttttaaaaaacccggaataaaaggaaacctactaatttagtaaagggtgacagcaaaaacttctggaaaaattgagtaaacatactttttcctattcatctcactaaggacaactaaaaactctggacatttttttttttttaaacaaaccttagaagacttttaaagggggaaatgaaaaggcaaaacagctaaaatctta

SEQ ID NO: 667685 - DNA, 219 bp, Homo sapiens
ggaggctgaggtgggaggatcacttgagcccaggagattgaggctgcaataaactatgatggccccactgtactccagcctgggcaacagagtgagaccctgtctcaaaaaaaaaattaattaaattgaaagaaaaagagaaaaagaggctgagtgtggtgggaaaatcaagtgggaagatcacttgaggccaagagttcaagaccagcctaggcaaca

SEQ ID NO: 667686 - DNA, 887 bp, Homo sapiens
ctcggggttcctttaggggcgcgcccccttttggtggcagagttcatgtgcgccgcggtcttggcgcgggcttggcgcatcgccggggcgtttaatcttgggcccccttacctccggaggggcccccatggcccccgggtgtgcatcgcggcaccccctgcgccgtgtgcgggcgttactcgtgccgcctggcacttactggtccgtccacgaggtgcgctccctacgtggcctggtgcttgttatgaaggccacccgctggtgcgcatgtggcgcctcccaagtccccgtggctctgtcaccggtgggcagagagagctgtccctgtagccacctttcttggtctggccaccggcgccactttatcgccccacgcggtcggtgtttaccgacatcactcaggcccccgggatcttgttgtattggatagaaggtgcgtcctggactgtattccccgctgcgtttggaaacacatggttatcgagggtgtggtccccccctcgttggttccacatccacccgtttattgaccgcccgcctcccttcttggggagtgcgtttccataggccacgcgctgctgatccccccgccgtgcggtgcacctccctctttcagaattaaccccccgcgcccgcagacagtctgtaaacccccttttttcttgacaagggtggcgcctcatactgcagccccgctgttgtcgcgccgccccctttgtgccccgcacctcgcctgcggagcccccactgtccagcgaggtcatcgcttgatacatcccactggggcgcagcaggtctcgctggagtttgcagattctgtccaccactcagcacctcctgggcgccccctctcgcgggcttcatcctccccgacaaacaaacaaaac

SEQ ID NO: 667687 - DNA, 169 bp, Homo sapiens
ggcacgagggcagactcagtggtcagcggaaacttgatgatagcatagtggtcaagccaacaagcaccagattaacagggtgttgaccttggccaacatcaatgtcatacagcttgattcggccttgatggagagaagaaggcatattcgactggctcctgattacatg

SEQ ID NO: 667688 - DNA, 179 bp, Homo sapiens
actctacgaggatcttcagctattccaaggatatagtgcagagtgcaacatgaaaataatttctagcattgagtggtggcagtgctgaccttggtgggccaaggaacccatgaaggtcctggaaggtgtgttgcagcagtccacgccattgtgaacaagggtgaggagctggtttcacc

SEQ ID NO: 667689 - DNA, 718 bp, Homo sapiens
ggaagcgctccgggcctggaatccctacgcgtccctttgtgtttagcacgaatgacgctcgatcggcactgggtatgacctgtcgagcctctacatgtctctcctgacggaagagtttttcaagttgaatatgctatgaaggctgtggaaaatagtagtacagctataggaatcagatgcaaagatggtgttgtctttggggtagaaaaggttagtcctttctaaatctttagtgaaggaaggttccaaggaaaagacttttcaatgttgatacggtatgtaggaatggcagtagcaggttcgtaggcagagtgcgtcgtgcttaaagcagagcatagcaagagaagaagcttccaacttcagatctaactttggctacaagattccactacaagatcttgcagacagagtggccatgtagtgtgcatgcactatacagtctacagtgctgttagacccttataggctgcagctcccagtgtcagggtcttacacgcgtgaatgaccggtgcgcaactctacatggattgacccatcaggtgtgccatacggttattggggactgtgccatcggcaaagcccaggcaatgctgccaaagcaccggaacttaggagaaagcttcagcatggaacggaccctgacctggccgtgatattggcaagagaagttgccacaaataatctacatagtacatgcacgaagttcaacggctccagc

SEQ ID NO: 667690 - DNA, 160 bp, Homo sapiens
aggcgaggcaggcggcccaggtttcacctctcaagctgtgggggcagggacagagctaaaaagcaggggtgtgctcagtcctcaggggcacacttcctctacatttgggtgctcttagaaataacagcatttattgggggctcactttaactgtgtcata

SEQ ID NO: 667691 - DNA, 896 bp, Homo sapiens
caggattgtgggaatcaacagggaaccagaatcctcaaccaacgttgatcctagtgccatgcagcatccgcacgtggcaagtaggttccgtctcagtataatcattctgggtttggacagggaagatattaccctagcttgagtgctaccgcgacccttacattttcgctaagagccccaagtactagagaacttagtccacagaatcctgaataacgagctacctatattgaattactgtgtagaccaacaggatggctatggaccagatccttggggtgtgatataagtcttctgtaagcgtctacattcaattctgttagatttaccatcgggtgcttccctagatgccgaacatttgagcactactacactaatcgattcgtcgttcctctctctagtggacataaattttggggatggccggtgtgtatatatttcggcctatttaaatctgctcgcagttagtactaaatttccctccagttcagagtcatggcaagagcctcataagattctacaatagcttgcagtaagtagttatccccggttgacaattatggctgtttttgaaggatgacgctgcatcctgcacggtttggaggattgactaacgtaggataaggctatctctcatatggtataacccttctatattgtgtgctgccgttaaagtatgccaatcgctctactttttccaagccacaggttcttgccccccggagtcgacctttgggtgcccccgtgttagcttcggtgattgtggcctttgcgcgtcaggacctattgtttctgaggtctatctggggatttccgaatacaggtggcgtaattttgcgccgggaactgcggtcatttctcccccttccgtcgggcggttggtccgagggttttcc

SEQ ID NO: 667692 - DNA, 148 bp, Homo sapiens
gggacagggcctccctttgtccccaagggtagagtgcagtggtgtgtttttggctccctgcagcctcaacttcccgggttcaagcgttcctttttcctcagctccccaagtagttggggctgcgggaacgttccccccccccccgcca

SEQ ID NO: 667693 - DNA, 295 bp, Homo sapiens
gagatgtaatacaggtacagatcaaacagcttagaaagtagattggtcattttataattagaatggaatgtacattagaggccaaatgtttttatctgggtttgtcgtgattgattaaaaaaatgtaattgtaaatgcttgagaaataactttttcaatagggctccacactgtcactttgcatttaatttctttacctatcttatttgaaaatgtagcgatagctatggaatattaatacaattctgcaaacaattggtattgcaacaggcaaaccctctgcttgtcctgttcg

SEQ ID NO: 667694 - DNA, 288 bp, Homo sapiens
gggcatcacggggttttattctttatacctggcaggactagtccaagattggaatacccggaacttattgggcaagagcgatgagtactcttaaaattactatctggaaatatatattatttagagatctgccaagttaccatagatccccccgtcaacaatgtgtggtcaccaagagaacttcctgaaaagcacatgtatacagtatcataacatattagacaaatgtttcaaatggctattatatttgatacgaaccattcagttaacaaaatcctaacatcataa

SEQ ID NO: 667695 - DNA, 266 bp, Homo sapiens
gttctcccggctcagacgccagtttctgttgagtgtgggtttagtcatggggtttgtggggttttcttctacgccttctcctatttatgggggtttcgtcttgattgttagcggtgtggtcgggtgtgttattcttctgaattttgggggcggttctctgggtttaatacgtttttttacatttactttacgggggacatgactggttgtctttggactactactacagcgatggctattgaggagtactcctgggtaccgagctc

SEQ ID NO: 667696 - DNA, 622 bp, Homo sapiens
ttccaggacatcatgccctgcctctactggcgctgcccaggctgtgggcaaggtcatcccctgagctgaacgggaagctcactggcatggccttccgggtcccccctgcccacagtgtcagtggtggacctgacctgccgttttagaataacctgcccaatatgagtgacatcaagaaggtggtgaagcacggcgtcggagggccccctcaagggcatcctgggctacacctgagcaccccggtggtctcctctgacttcatacagcgacacccactcctccacctttgacgcctggggctggcattgccctcaacgacccctttgtcaagctcatttcctggtatgaccacgcatttggctacagccaacacgggtggtggacctcactggcccacactggcctccaaggagttagacccctggaccacccagcccccgcacagagcacccagaggtaagagagagaccctcactgctggggagttcctgccacactcagtcccccaccacactgaatttcccctcctcaccgttgccatgtagaccccttgaagaggggaggggcctagggagccgcaccttgtcatgtaccatccataaagtaacctgtgctcaaccca

SEQ ID NO: 667697 - DNA, 333 bp, Homo sapiens
  misc_feature (4)..(4): n is a, c, g, or t
  misc_feature (24)..(24): n is a, c, g, or t
  misc_feature (56)..(56): n is a, c, g, or t
  misc_feature (73)..(73): n is a, c, g, or t
  misc_feature (108)..(108): n is a, c, g, or t
  misc_feature (111)..(111): n is a, c, g, or t
  misc_feature (191)..(191): n is a, c, g, or t
  misc_feature (284)..(284): n is a, c, g, or t
ggtngcccaaggcccggctttccncccgcagtggcagaattgagtggtgaagcccntagggtccctgcaagcncccccaaattttacctaccaggttggcaaaccccnaancccaaaaatcctgaccataaaaaatgcccccaaagttcaaaactttcctgagtgctgacatcatgctgcaagtggaaaantccacgcctgacctcatgtgactggtcatagtcaaaacaattaagactttgtttcatgaacaaaattattaaaactgttgtataaaattaccntcagtctatgtgtataaggtgtttgtgagatataaatgaactttatgtt

SEQ ID NO: 667698 - DNA, 342 bp, Homo sapiens
  misc_feature (72)..(72): n is a, c, g, or t
tacttatcctatttatttgagacggagtctcactctgtcaccccaggctagagagcactctcggctcactgncagcctccgcctccccaggttcaagtgattcatgtgcttcagcctcctcagtagctgggattacaggcgtgtgctaccacagccggctaatttttatatttttagtagagatagggtttcaccatgttggccaggctggtctcaaactcctggcctcaagtgatcctcccgcctcagcctcccaaagtgctgggattacaggagtgagccaccatgcccggccttacttttattttatttatttttatttatttattttttctttgagac

SEQ ID NO: 667699 - DNA, 270 bp, Homo sapiens
  misc_feature (1)..(1): n is a, c, g, or t
nctctacgacggatcccctcgaacgatggcggttgggcactaacgacaggacactcgaggagccgacacgagcttatttacgcctacagagagacgaccacgtacaacccaccccacgcaagacagcagcgatgcttgtagcacacctcccaaaagtagcagaaattttgaaaagccagtttcaaccactagtcaaaaacgactgcgttacaggacagccagctgtggttgaacttgacaatcacgacaaactcttactggcctcaaact

SEQ ID NO: 667700 - DNA, 329 bp, Homo sapiens
gcaacagtcggtgtctctgatgataccacaagggtctctgaaggctctaacacaaaagctactgggggctctaccaacatgatcttcgatggctctggagatagtgctccccacagatttcagcacagactacatctgatactccactgacattgttacaactggctcagataacttcaacaccagtgtagtagtaggcacttggtgctgctgcaaaggaatccagaatctttgtcatggatggttctggcattactgccacagaccgctcttacccgaaacctcatggatactagtcgggtttgaaactgctgagccatgatgggaac

SEQ ID NO: 667701 - DNA, 109 bp, Homo sapiens
gcatgcaggtcgacgtgtatacaccactgcggtgattgcatccctgtacaagtaccgtcgacacgtagagcaccgtgctgacctccaaatatacgttaagctggagcct

SEQ ID NO: 667702 - DNA, 237 bp, Homo sapiens
gtgatctcttcgtatgaaatacagacaacgtctgtctactattccaccatgtaggcgatgatcttcaattagtaacttgtagattattgcgtgctcacatctttgagcttccatcttcactgactatcaactttttgctttttgcaaaatttaacacacatacagtttatctgatccttattctttttgctgccctttgaccgtttcatgattctcctcctctcagttcactgccta

SEQ ID NO: 667703 - DNA, 353 bp, Homo sapiens
agggaggaggggacacgggcttctcaggtctcaggaggttagctgtcctctccgtgtcaagcggtagtcgtgtctttcgcagtctaacggatctgcgttctacttgggcaatttctcgatcgtagcacgatccatactctgtattaactcttcctttgagagtttcgaaggtgaagcattttgatcatctccacatggttgccccgaaagtgggagaggatggagcttcatgttggcctccgaatgctggatccttcttagcatctgcagaagccctcagcccttctggcagcgggtgcactataggcaaaaccgcagcactgacacgctgaacatgagaatcagaaacctgt

SEQ ID NO: 667704 - DNA, 303 bp, Homo sapiens
  misc_feature (58)..(58): n is a, c, g, or t
attgggttatgtttaattttttttaaaaaaaaggctttttttttcccggaaaaatctnaaccgaataaaaaacctttttaaaaattcccttggcccggattagggtcctcaagggattttggggttttgtttggaccgcgggggtttttctccccaaaattggaagggttaacggggagcccttaaaaattataaattttgggttgttcggaaatgccttttataagttttttgggcccccaagccctaaaaactgatggtccccccctcccgcaagtattaaaaaaaaggatgttttttcca

SEQ ID NO: 667705 - DNA, 517 bp, Homo sapiens
aaagagttgaatgctgaaacatgcaccttccatgcagatatatgcgcagctttctgagagaggagagacaaatcaggaaacaatactgcacttgttgagctgcgtgaagaataacgaacgggccggcaaggtaacaaaagagcaagtgaaagctgttatggatagatttacggagctttgtagagaagtggtgcgaaggctgatcgataatggagacggtgtgccgaggagggtgaagaacttggtggtgctgagtcaagctgcgttaggcttatatactatcacaatttaaaagcatctgagactaccatgagaataagagagtgaaaagtgaagaatcacgagcttattgatgtggtatgtcgtttatgcagtatggtgtagagctcaagcagcctgtctaaaaaaacatgaatgtctttgagtcatttggcctcttttctctgtgcttgaattaataaaggatggatgaatcgagaatataaagtgctagtggggctgataactattcgccgca

SEQ ID NO: 667706 - DNA, 179 bp, Homo sapiens
tatggcagtcccaggctaagggtactactcggactgtagctgctggctatgccatagccaccgctaggtcaagtcgcgtctgtgcactacaccacagctcatggcaacgccggatccttaacccactgagaaaggccagggatcgaacccacaacctcatggttcccgagtatagcggt

SEQ ID NO: 667707 - DNA, 237 bp, Homo sapiens
agcgagcggaccttcaggctgattgcaggcacactgttgaaagcaggcatatttggccaggcgcggtggctcatgcctgtcctgtaatcccagcactctgggaggcccaggcgggcagatcacctgaggtcaggagttcgagaagagtctgactaacatggtgaaaccctgtctctactaaaaatacaaaaacaataagttggctgtagtggtgggcgcctgcaatcaagcctggaa

SEQ ID NO: 667708 - DNA, 205 bp, Homo sapiens
gctgatccgttaagctcaggagtttgagaccattctgggcaaaatggcaaaaccctgcctctgtggtggcacacttttggtcccaactacaccagaggctgacgtgggagaatcacttgagcccggatgttcgaggctgcagtgagccgtgatcatgctactgcactccagcctgagtgacagagcaataccctatcttcaaaca

SEQ ID NO: 667709 - DNA, 1209 bp, Homo sapiens
  misc_feature (843)..(843): n is a, c, g, or t
agcaagcagagcctgccagcctgactgcatacccatggctacactcgctcaccccacctgggaccctcctgcttccggccgggggcacatggcctgccgctcctgcgtggttggcttcagcagccatcagcagctgtgaggtgaccccggatgggcagacccacgtgcctggaaacctcaggatgggacagctgcagggcccccgggaccgggcttcagactcaccgcacgcctcacaggctgctggatcgagctggcactcaactccaaggtagacttgtgaacaccaggaccatgctggtagcacccctgcgatgtacaacgtttgggaccaccgccgtggttccagccagcgtgacagaaccaagtgcagaaggcaggcagatgcaagggccctcacgtgcatcaaattatgcgctcccgtaattcggacaaggttgcaaagacacctggacaccagcgcacaccaggcctgactggcgcaccaccgcatggaagacattccctgccacgggcccagcgaacctcacgcccacacatatcgacacatcgcggacaatctctactgacgggaaatatcagggacccggcatgcacggacggaacctgcgcaacagtgagccagcgcagcgcgtcggcaggctgtgaaggacaaaccatggcctgcacggtgctggcgaagcggtgcaggacgtcttcgacatcccgcggtatgagggatgagatctccacagcggcacaccacattgcagatccaccttatggtgccaagatgacagcatggaccctggaatcagaagtcgccttcacatcgggacctgaaatgtacaaacacacagcttncaaccagcctggcagaagcattcgagggcagtcgactaaaagcacagaatgaaccagcgacgccgccagggaacccgtgaaagacaacagcggtaacacggaactgctactcgaagggaaccgagatggccgcagggcacaacggccgcggaccaaccacacgacgaccggacgcgcagcaacgagaaaacaggtgcaccggccccagcaacgacagcccaggcaagaggcacgacgacgacggagccaggccgcgagagcaccacactaggaacacaacgaagcaccatggcaccacccgacacgacacgtacatcgacgcaccacaagacgacaagcgccaacggaacccaagaggaacccaca

SEQ ID NO: 667710 - DNA, 980 bp, Homo sapiens
agcgggttaacttgcagcctggtgtggggtgagtggtacccaacgggcccggggcgccgccgtccgcgagggagagcaggcgcgcggggtgccacggcgttggtaagacgagtataagatagaagagatggcgtgtccaaaatgagctctggctcatccctggacctacacagggacgcgaggaggcacacatgcgagcagcggtcatcccttgctagatcgtcactgcaggcgcagcgtgcgggatctgaacgggtccactcggtctgctgggtgcctgagttggcatacacagacccaaggtgacatgctgctagccgatggaatggtgggtacatcttgatccttgtactgcacaaggccgtatggaaggaagtgcgagacataacataggagtggagccaataatggaatgtaggctaggtatactacgcaagtgaggctaagtcctggcgcgcgacacgagattctatgcatagacgtactggcatgcgtagtggaacgggacgactacgtagacacgtgtatgcacggaacagactcggaaaggaggccgtgactacgcctgcgcaatcttgttgcatcggatcctagcttgcatctgagtttggactcaactgagaataccggattcagagaatgttaaggtatacaaccatgagaacgctcggttgctacaaggatccacaaggtgatgacatgcgaggtcacttacctgactactctgcagaacctgcgtgtggaatccctgacggtctgatttcttagctatgccggggtgccctggtgatcatgattccagtcggcagctatgcgaatgtgttagaagccctgaaatggcgaggacggtggcggctccaaagtgagaggctccacgtatgttctgaagggactagaagcagtgaacgtgcggacgatcagtaaagagaaagcaggggcgcaaggaatccgaattctcactgtgtgcgctctgaaacaaa

SEQ ID NO: 667711 - DNA, 328 bp, Homo sapiens
gtcgacagtcaatgtggcagaataaattggtgtgtcaatacaacaggctattacacagaagtatacaaactattgatacacatgactatggatagttttcaacggtattaaggctgagtgattaaaaccaagttcaacagtgaaacaccgtctctactaaaaatacaaaaaaaaaaaaaaaaattagccggacgtggtggcgggcacctgtagtcccagctactcgggaggctgaggcaggagaatggtgtgaacccggggagcggacgttgcagtgagccgagatcgcgccactgcactccagccggggcgacagagactctgtctc

SEQ ID NO: 667712 - DNA, 1419 bp, Homo sapiens
  misc_feature (496)..(496): n is a, c, g, or t
cgtgacgcgtgggcccgaggagcaccctcgtgactgctgaccgaggccccgcctgtaacccctaagggccaaccgcagagaagatgacccgagatcatgtttgagaaccttcaacagcccagaccatgtacgttagctatccaggtctgtgctatccctgatacagccgtctggccgtagcactggcaatcgtgatggactcctggtgacggggtcatccaagactgttccccatctacggacggcgtatgcccatcccccaatgccaatccttgcgatctggaccatgcgcctggcctgggaccttgactgacataccttcattgaaatgatcctacaccgagacgcggcctacaagcttcaaccacccacggaccgagcgggcacatccgtgccgtgaccactaacgcgacgaaacgcttgtgcataccgttcagccacttggcaacattcacgagaccacgacgattggccaacggccttgctcttccacccntcgctccccatgtgaagaacgacgctaccgagcactgccatgaccggccagcgatcaatcacccatcagtaccaaatgaacgcgacgccccgaaagacactagacagacacatccttccacagccctatcccaatcccttggtgcacctgcacgatccatgctggcaattccaccagagaacaaccttatcacacgtcaccatcacaatgaacattgtcgacgttgaacaatccagaccacacgcacttggtaccggcaaaagaacaaagggtgacatagactcaggccgagcgtcaactaaaccaattggatacccacttgtacctcttttgcacggacaacggcgaactagccacaacacgccgcaattacactggaccagtggtaacacaccagcacaccacacagaaccacactcacgacactcagttgatgctagcctccatgacagcgaccaaaccataactcccgatgcttgcaactgcgacaagccactcaaatcctttctccccactcaagactaccccatatccaacaaccaactatgaataaaacaaacacacaggcacaactacaacactaccacaaccccaatcacaacaaacacgcacacatattcaatacactgaacaccattacatatatactcggtacacccccatattataacacaacctaaaattaccacaacaacaacaatcaataccatgcgacactaccaactaccagtcacactcataaacatccaacactcaaataccaacacacatcagtcaaacagatcagacacaatcaaccatacaaaaacaccaaaaaatacagcacatcataactaacataatcaaacaacaacatccaagacagcaacaaataacaaacccactacagcatacatctctcgctcccttatctctttcccacc

SEQ ID NO: 667713 - DNA, 204 bp, Homo sapiens
acttctacgtttctccattgtacattcccttccatgcttttccatactattttttatttatttatttatttttcacattcttttaatgtcacttctttctatgtgcctagtttcctagggtgttgttttttttttttttttttttttttttttaaggggtacccacccggaaaaaaatacccccgggggtcccgcccccaattt

SEQ ID NO: 667714 - DNA, 130 bp, Homo sapiens
tcaggagttagagaccagcccggccaacacagggagaccctgtctctacaaaaaatacaaaaattccttagggatcaattttgacggtgggataacaagtatctcttactagtatgtcacctatatttca

SEQ ID NO: 667715 - DNA, 138 bp, Homo sapiens
caatcaatccatcatttcatcatcgtggggcatcctctcagcagtcggagcctgccaggccatgccaagctctggcctactggcctgttcgttttcacacacgtacgtgcactagggcatcagcggcatcaacaattt

SEQ ID NO: 667716 - DNA, 376 bp, Homo sapiens
ctggttgacaattggttgagcttagctgaagacctgggatcaatggaaaggaatgttcaggttaagataaaggatcgtggaggccaagttttattgtgcaggggaagctctcagcagacttcagagagagagagagcaggttgtaaactgtttcttatcgacttaaaaggggtgcctggctcttagttgatgatctcctggactggaaagaaaggaaggaaaacaaaggggaaaggggcttctttataggatgtggattctcctcacaagagactctgcagggcaagttcaaggtagggcaaagaaatatatttgggggttaaatatttttgcctcgtcgtgtaatgttatgccatagtcagattaaaaataagtc

SEQ ID NO: 667717 - DNA, 586 bp, Homo sapiens
  misc_feature (151)..(151): n is a, c, g, or t
  misc_feature (154)..(154): n is a, c, g, or t
tcgtagatggcacatgaatgtggcattgatcagagggaccatgcgcggttaaaatctgagggtcaccaccattgatgcctggcctcacctcttggtgttccccaccatgtccagtgcatccttcccaggcagctgggcttcctgccagcgnatnttcaggcattgttcacatttttgccctgtgcttccagctacagaatatgtcctgagcacacaaactgtcccccaggccctttttaggaacagtctgacaaagtcagtctcctaggaggagcaggtgacttcgagaaaataggagacaggccagttgcagtggttcacacctgcaatcccaacactttgggaggccaaggtgagaggatcacttgaggtcaagagtttgagaccagcctaggaaacagcgagaccctgcctctacaaaaaatttaaaaattagccaggtgtggtggcacatgcctataatcctggctactcaggaggctgaggtgggaagactgcttgaatccaggagttcgaggctgcagtgagccgtgatcataccactgtactccagcctgagtgacagaacaagattctgtctttaaca

SEQ ID NO: 667718 - DNA, 741 bp, Homo sapiens
cggacgcgtgggtcgaccacgcgtcgccacgcgtccgcccacgctccgttttcaaaatatattagattggtttttattgtagagcacacatatcagggcgaagtgctgcacacacaactacaaatcattttgggaaaaaagctgtacagaagaaataaaactgcaactgctttaattatgcagtcccgacttgagaaatccacgctggcaaaggagttctggcccctgagaggggcttcttgatggtggctgccccagatttcttgcagcctatgaggtctcagacaccggaactctgtgatcaacaaagcgcccacaagtgggggggtcttgtgggcggggaggggcgtctgctgctcgtggggcgacacgcgcggcgtgcctgctggtgctggcctgagccaagaagacatctctaatgaatctagatccacaaaacttgctgccttccaggatctgagtggatagaagctacccaaagactttacctttttttcttattatttgggaaagccccttcaccaacctcccataccctgaacgcggaggaggaaccacgcccagtctggcaggacctgacgctcgggcatgggatgccatggagcggaaagacaagacggggcaaggccccttccagaaggatgacagggatgggcccagctggcagtggaaacggcaggaccgccacaccagacacacgggacaacacccaaacgaacaaacccccaacacaaatccacc

SEQ ID NO: 667719 - DNA, 878 bp, Homo sapiens
gggcccaagcaatagctacactacaccattctagggtcattgctgccactacacgtggcttcatagagcctgggatactgccaatttttaccatctcagagtccagagtcaccactgcatggtgccttatccccccaggatctaagttgtctctgagccctgttgggtctggttcccaaactgatgcctaccctgctccctaggtccaaactttcagagcatttctagggcagaagtgctctgagggtttgcacctggggagcagggtagactagaacagagtctcagctacaaccaaattcccttggtctgaactgcgaaggtgcctcagagtcatgggtgctgcttctgtgggcagtctatatccaacactgtcacagagagtggatctgcacctcaggacccatatgccacagtaggttcatgaggacctgagcctaggacctcagcttcacagctgctctgaataactgcaccctggaacccagcactagtgtggctacttgcaggtcatgtcagacctgacacaaagaaggatctccatggctaagtctccccattgtggggaaaatgaacataggaagatctaatacacattttccgaccattttatttaacatatgcagaatacacattttggtaatcagcacatgaaacattctcctggggatcgatccatatgctcagatgaacacaggattaggttccaagtaaattcaaaaaacatcaaaagggatatcaaggtaatacattggctctttcaataaccacaggtaaagctcagaaaatcagtaaacaaggaagctttcaaaaacgtggtacacattacctggaaattggaccacctgcctactggagtgaaccaatgactgacatgg

SEQ ID NO: 667720 - DNA, 535 bp, Homo sapiens
ttctgtttctaattcgttgattgtacatcttctaacaacaggattcctctggtagcctctgatctatagatgttgagcttatgacagatataccactgccagatcgaactcttctaaaagaaggtggaatgtattcaggaggcaggacaggtggcagtgtattggccagacatagctacatcaatgaagtgcatggccaggaataaattcctctgcatgtaagattattccatcttgatcaatgtcaaaatgattccattatggaagccagctgagcctgtgataaacattgacctgcatgtgaatagttctggcttggggccctgtcaagtgtccactcatagattttgtcgtgatctataggaactccttggctgtatttcagtcttgatgactgaggaacagcccactctgccactggtgggacactggccacatcaaatgactgtgcctttagtaatttagtgtttagttgtgaccctggaccagatctactaaaggaagaactctttggcaatgtggctgcaggatgagc

SEQ ID NO: 667721 - DNA, 693 bp, Homo sapiens
agcgggatggtccaggcatgcttgtatgtatatttcagaacctttcgtaaatgtaaaagctgtacatgtactgggaagttctgaatctctttggtttccttttttccttcaagcatattttgcagtgagcttcttttttatatactacgcaaacaaagttcgaatacagaatacaaaaagatatgtgaaggttctatttacacaaaagataactacaagtgattacgcgctgggtcaccagtaccacgtgaagatagcacgtttgcataacagcagaaaacgaactaaggtaagacagcgcgctcccattcttgaaagtgtccatgtcaatatgataccttgctggcatgcacgagctatatgacattgtctaagcacacttttatttcaagagagaagtacagattacttgaagttagctgatataacaatgatatatagaatagcagaagacaagaacagaaaaatatacaaacaagacctaagggcctgatgtacaaccgaggcaagcaaggaggggcgcaacaacccatctcccgaggggcggcgaacgatgctaacagaagattatgaggtccggttgtgacaatgcggagaaaagacatagaccacggacgaacaagcgggcagactcctgaccccgggggaagattgcgacagctgcagcacaaccgtgtctgctgaaggaaaggg

SEQ ID NO: 667722 - DNA, 867 bp, Homo sapiens
catggtggctcacgcctgtaatcccagcacttgggaggccgaggcaggtggatcacctgaggtcaggagttccagaccagcctggctaacatggcaaaaccccgtctctactaaaaacacaaaaattagctgggtgtggtggggggcgccgtgtaatcccagctactcgcggaggttgaggcacgagaagactcggctggaacccgaggaggcgagaggttgggcagtggacgccgaagaatgtggaccattggtattccagcctggggcgaacagagaatgaatctcttgtctcaaaaaaaaaaaaaaaaaaataaccaacctgggggggggcggtgccctcaagacccatgctaacaacgggagagggttggaggggcggcgaggacacctagagtgcccagggaaacgttggcgcgtgagctgtgtgacgccaaggaataggtcgccggtgcacccccacgcctggggtgggcccgggacgaacctctaagaaacaccccggggcgacaccaaaggcgcttctagcatacaaatcccgcccggaagggcacccgacggggcacagggcgcgtactgcagacagggtggcaccgaggaaggtccacaaatccaattacggcccggggggggaaacctgaccaactcagggtatacacctcgcaatgtgaaaactgagaagaacaaaagcagcaggtcctgcagatacggacgtagatagaactcctcggtttgacattgcccacactagggggggatccagagcgtgaatagcaggagggggaccccgtaaccaagtgggggcaacgggtcatgggcaggtgaaccggcgggaacttcccgaaacatcgcaggcaggggaccacg

SEQ ID NO: 667723 - DNA, 447 bp, Homo sapiens
  misc_feature (9)..(9): n is a, c, g, or t
  misc_feature (16)..(16): n is a, c, g, or t
  misc_feature (250)..(250): n is a, c, g, or t
  misc_feature (427)..(427): n is a, c, g, or t
  misc_feature (440)..(440): n is a, c, g, or t
  misc_feature (443)..(443): n is a, c, g, or t
  misc_feature (446)..(446): n is a, c, g, or t
aatgaaatnctgatgnaaatatgggggaaatgaaactcctcatgggttttgccgggaatctaagtcaagtgctgtgttgtgaatgtaggtgtacccctttgaactcatatgttgaatcctaaccccccaaagcaatggcattaagaggtggggcctttggggctgggtgtggtggctcatgactgtaatcccagcactttgggatgctggcagggggcagatcacttgaagcccaggagtctgagatcancctggccaacatggtgaaaccccatctgtactaaaaatacaaaaattagccaggtgtgatggcgtacatctgtggtttcagccactcgggaggctgagacgggagaatggcttgaacccagtaggtggagatttcagtgagccgagatcgtgccactgcgctccagccctgggtganagagcgagactcnaanccnt

SEQ ID NO: 667724 - DNA, 538 bp, Homo sapiens
  misc_feature (355)..(355): n is a, c, g, or t
gctaagactgatatcttagcttatcatgcctttatcatgcccttatctctatgtgtttccagacttctgtttcctgcactttctggttctttattccatagggacatgttggatgatttctgtcagtcaggcaccgtgctaatgggataattataagaggccctgccctcgtggaaccttttctctgggatagtattaagacacacagatcaaaataacagtcagaaattcctgataggaaccatgaagaaattaagtgatgagtgagacagagacgaggttggtggggcctctcggggatggtgattttggccagtctccaaagctggacagggatagttgtgcagagagccanaaatggtgctcctgagcagcctccctaggaatgacagtcccagggtgcaggcgctgggggataccgagcagagacggggccaccatagtgagtggacagcaaacaggtcaggtggaccagcatgggcagatcacatgtagatgaggttggattttattttgttattttattttattgttaaaa

SEQ ID NO: 667725 - DNA, 715 bp, Homo sapiens
gagtacttcagtgatgagcagatgcggttccgggccccccatgctatatgagcagtacatcgggcagtatctcatccaggaggagctcagtgcccgcaccacagaacccaccagaccagccaagccacgggtcacaccggagaagaccatgcgttgcccagcatcaccagacattgactagcacagcagtaccatacagacggaagccgagggagactacacagcacacgcgactatgctgccgagacacgcacacgggccaggcaagagcaggcacggagccatgcctcagcgacagcgcacacgacggccaacacagcgcatctgaagcgaccacacgctcgaacccgccgactcgcagacacccaacgcagagcgacaaccggcacgacacgaacccacagcaacgcagacacatcgcagacacaacacccagaagaatacagagaaaaggagaaaacaggaacaatgacaggcaacactcggtcaaagcatgaacgcagccacggagaagacccgaaacgaggagagcacacaggacaccgcggagcacacacaccagcagggaccgacacaaacacacagcaaagaaccaacagagccagacagcagcaggagacgaccgcagagaccgaacacaccacaagcacgaggcacaggaacaccccgaaagggacagacacagcggacagagacgacccagagaacacgaacc

SEQ ID NO: 667726 - DNA, 147 bp, Homo sapiens
  misc_feature (88)..(88): n is a, c, g, or t
gggggcccggggcccccccaaaaggggggggggggttcccccccccaaaaatggggggggggggggggggggcccccccccccccccnccccctttttggggggagggggggccggggtttttttttttttttttttttttttttta

SEQ ID NO: 667727 - DNA, 943 bp, Homo sapiens
  misc_feature (19)..(19): n is a, c, g, or t
aaagaggcaatacgcgctngtggttgtgtactttctcccgcgaggttgttttttgtcgctttgtttgcggtcagtccgcttttctcccccgttttttccccgggccattcccctgtgttgcgggcccccccggagttgtgttgttctgaccaatgcttgcttgtttgaaagtgccctcggccatcgttgctttgtgcccgtcccccaagggtccctcttggcctcaatttcgatctgcccgcgccatttctagctgcgcccgtggctgtccctagggcatccccggcttcggggggggaccttctcaccagcccgggtgtgctgattgccgcacactccctgagcccttgtccacccgccaagtcggaacccggggtgcttcccccccaagaggcacacgtttagggtgtttttcgcagccagtgcaagcggactgtgatgtttaccctgggaagcgatagcacttccactcggtctggtacaaaatggggttctttccccgccgtatacttgtagtgaccgccccttttgtgccaatcttcccagacactccaagtgtgtttcacaccagcaaatgagctgtgcgacaagttttgcaataaagcgcattcgacccagagggccatctggggtaaaaaaaggcgagtccatttctctgtcatcgcctgggcacacaaagtatcggttcacaaatgggctgttcttaaaacagcatatggcccacgaagatggggcagcctgcgagataccatccagaccgtgggggaagcgtatttgcttgtcactcaccttttagcggccccaagtgcgaccgagtggtgatggggacgccgtttttttcaccccagacttgctagcccgccattctgcgctaacgtaaaaaacatgcccccttgtttctttaaaaaaaaaaatacattttttggactcgaaaaacaaaaca

SEQ ID NO: 667728 - DNA, 340 bp, Homo sapiens
tatgcatgagatgagaatagtgtcagggccaggcaccagtggctcacactgtaatcccagcactttgggaggcgaagcaggcggatcacgaggtcaagagatcgagatcatcctggccaatattgtgaaaccccgtctctacgaaaaatacaaaaattagctgggcacggtggcacgcacctgtagtcccagctacttgggaggctgaacccaggagaattgcttgacccgggaggcggaggttgcagtgagccaagattgcgccattgcactccaccctgggcaacaacagcgaaactccatcgcaagaaaaaatagaaaaacacaaatgtagtcatac

SEQ ID NO: 667729 - DNA, 290 bp, Homo sapiens
ggtcgccgtagtaactgttatgcattattcacatcgtgtgcaccagagcttaacagtatgaatacgcctagtgcacagtcagtaatgagctgaggcagatgtgaagaggacatctgaccatgtgaaatactgatacggtgaattagaagcattgctcagtgtattgcgaactgacatgctgtaaacatgagctcagaaatggcaatatagtatcacactcaaggcctagcgtggcgagtcagatggagactcggcgttctgtggagtgatgcacagcagacctgatgcgg

SEQ ID NO: 667730 - DNA, 180 bp, Homo sapiens
  misc_feature (75)..(75): n is a, c, g, or t
  misc_feature (86)..(86): n is a, c, g, or t
  misc_feature (90)..(90): n is a, c, g, or t
  misc_feature (103)..(103): n is a, c, g, or t
  misc_feature (161)..(161): n is a, c, g, or t
cgccatgagataccgcccacagaaacgtcaagacaggtggtcattttcaagtaccccactaccacggactccggncgttatcagtngganaaagacagtgacnaacatcagttagccgtcatcctgatgaccattaatgaaacgcccctcccggcttatcnagcacgcgggtagctttta

SEQ ID NO: 667731 - DNA, 320 bp, Homo sapiens
  misc_feature (35)..(35): n is a, c, g, or t
  misc_feature (59)..(59): n is a, c, g, or t
ggtgcccccaaccaaccaccttactgcattttccngccacccatctgccatttggtggntttacatatacttagtagctgtgtactttctgatcggagctgtttaagagttacggctggtcccacctcactggatcttgatgttaatgttcagaggactctagacaacaacttagcaactgaagcttatgaaagaagaattaagcgccttgagcaagaaaaacttgaactcagtagaaaacttcaagagtcaacacagactgtccaagctctgcagtattcaactgttgatggtccactaacagcaagcaaagatttaga

SEQ ID NO: 667732 - DNA, 223 bp, Homo sapiens
  misc_feature (13)..(13): n is a, c, g, or t
  misc_feature (159)..(159): n is a, c, g, or t
  misc_feature (192)..(192): n is a, c, g, or t
tgtgtgtagatantgatgtgtgggtgtgtggtgtgtatctgcatagtgtgtgtgcatgtgtgtatgttgagtgtgtgtgcgcatgtgtgtttccaagtctctcgccagctgttctgatgcagcatctggtggccataccttgggcgtgcgttgcctgcntgtgaattcgtgtctagcttgatgctgagcctnccccagggtgcgtggttcaaacgaagaaccc

SEQ ID NO: 667733 - DNA, 596 bp, Homo sapiens
gtgtgggctggagcattttagtttcgttgtgtgcttattatatcctagctttgtgcctaatattttgttggatatctccctgtttctctgcggtaatatagtaactcgttgaacgtaatgagtggggtctatgctagaatttggtgcctctgcaaatttctccgagctttatctctgggtgaagtgctgtggacgcaaatcgagaaactgcttgtaatccccggaggcagatgacgtgcagtgatagtccgagacggccagcactccagcctgggtgacagagcgagactccatttaaaaaaaaaaaaaaaaggaaaaggtacaaagttttgtatacacgtttaaaggaggtaggccaggcacggtggctccgcctgtaatcctagcactttgagaggccgaggcaggcagattgcttgagctcaggagttcaggaccagcctgggcaacatggcaaaaccccatctctacaaaaaaatacagaaaattagccaggcgtggtggcgagctcctgtagtgccacctgcttgggggttctgaagtgggaggatcacttgcacctgagaggtggataccgccagggagctaagagtgca

SEQ ID NO: 667734 - DNA, 135 bp, Homo sapiens
ccaagcccacccagccatttacccaggaagggaaaaagcccccaatacccaaaccccctctccccggggtttgcccgattctttaaacaaaggggcccaccagttttcccctttggaaagcggcaagtaagcccc

SEQ ID NO: 667735 - DNA, 720 bp, Homo sapiens
cagaaagattatgttagaagtgtgattttaatttctcagaagtcatatacatgtcagctacaattttgagtgctttataaacacttaagatatatatataaatttttaatttcatagcaacttgtaaaaaataaaatacttgttgaaaagcctttttcaacatatccctaagctaagggcaagaggaaggaataactaactcagttgaaaagatggtctccagtttctgaatgaaatgagctacagctgagaaataatatatgaatgtcatgctgcagaatatgttatagccttattttgtgtaaaggatatatttcattatgtgaatggttgcgtatcagtttttagtagtgatgttttgtctgcttgtattgggaattaggctttactggtaatcttccttatttagttgatagtggtcaaggtctaataacaatgaaactagggctgagctagttagccctacactagccaaactgaaactctatgcgacattaaaagaagagatccatcatgtagcttgtgacacttgtatcttgatgagtcaccggggaacttttcagtgatgaaagatacacagggtaataaaccttcacatggtcttcaccaaggaacacgagcaagtcttctctaatctactcttactataatttcctaagtgtacaccaaactctggatctccccaatctgaagtactattagaacattaagttgaagaag

SEQ ID NO: 667736 - DNA, 178 bp, Homo sapiens
ctgtagagagaaagagattctatttgtttgggagaaagtacaggaaaaaaacaagagtctttatctagtaatccagagaactcttggattttgtccaagaccgtcaaggtggtacctcttaagagtctgcaagaaacacagtcctgctgggcttgaggtcccccctaaagcagataca

SEQ ID NO: 667737 - DNA, 866 bp, Homo sapiens
  misc_feature (866)..(866): n is a, c, g, or t
cttcgtggaggtggccgggtggcctatgtctccttgggacctcatgccggaaaattggtcagcgatagtagagtgttattgatctagaacagggctttggtctgatggacctaggcactcaagtgaggagacatggccatgcctttcagagtgctaatgcgagctcactgatttcatcctcaagtttccgcacagtgcccaccagaagtatgtccgacaagcctggcagaagggagatatcaatacataaatgggcaatgacacatgatgggccgaagaagattgaaggcagagaaaggaaagccaagatgacagatttggatcgttttaaagttatgaaggcgaagaaaatgaggaacagaataatctaagaatgaagttaagaagcttcaaaaggcagtctcctgaaagcttctcccaaaaaagcagctggtactaagggtactgctgctgctgttgctgctgctgctgtctgtgtctgctgctgatgttatagttccagcaaaaatagatcaccggcggagtaaaaaggctccagcccagaaggttcctgcccagaaagtcactggccagaatagcagcgcctgtccaaaagctcagaagggtcaaaaagcttccagccccagaaagcaagctgttcaaggcattggcaagaatgatagtggatcaataaaagtataaggtctttcgactgttgaaagaaaaaggggggttaaaaatactgggggccaagtttggtccgtttttgacaagggccataggggggtaaaagagacgggggtacaggcgggaacggttgggctgggaggccttgggggcatggcccgataggcagaaaatggtggggacgttggggattcgtgaan

SEQ ID NO: 667738 - DNA, 208 bp, Homo sapiens
ccccaaaaaaaaaatttggggggggccccggggccccccccccccaaaaatttttttttggggaaggggggggggggggggtcccccccccccccaagcccctcctttttttggggggggggaacaaatttttggttaaaaaattttttggggggggccccctttgtttaattttttttaaaaaaaaaaaaattttgggaagggccca

SEQ ID NO: 667739 - DNA, 247 bp, Homo sapiens
atcccgtactttcagtagcatctaaccccgactagtctgttgcctccggggtcggcggtgcaggcagccctcctgatgtgggcacacgtccgcgaacgtgcaggacctgctgctgctgggcgtggctccccttttcgctggggtctggccactgccggatggcgtgatgactgccctgatcaatgcgcaactccaccatccccaccaagcagtacgcatatcttagggtacccgaatgcctcgaaat

SEQ ID NO: 667740 - DNA, 105 bp, Homo sapiens
tcatcggcacttgtatcatcggcactctcgcaccaagagagagaaatcatagcactgggagcattgaatcgacgtgcagcttaggtgggtgccgattaatagcga

SEQ ID NO: 667741 - DNA, 602 bp, Homo sapiens
ccggcaggtgggcccacattgttggctatcttctccaatggacgaaggagtccccggatggaatacaactgtggcctgcatcctgaccttgcccccctactaacgccgcggctacgggaagttcctcatcgctttcagttatgagctctccaagctggagagcacagtcatgctccccggagaagccgctgtcatgacctgggcaagctcagctaccgcagctaatggtcctgggtgctgactggagatcctgcgggacttccggggcacacgtgtccatcaaggacctcagccagatgaccagtatcacccgaaatgacgatcatcagtaccatgcaatccctcgatagtggtcaagtatatggaagaggccagcatcgctgagtcatgatagtcagcaccacaaagttcatgtgtggacggagcacttcgacaagtgacctcagctataagataccacccattcttcagtggagctccagtctgcctcaaggtgtgcaccccaacaagcactagctatttaagctctccaagaagtgagcaagcatggcaccgagatgtcggacgtgagcctcctggctcccagcctgtacatagtataa

SEQ ID NO: 667742 - DNA, 519 bp, Homo sapiens
tgtcttccttgctaagactaaggaaatggaaatgaaagtgcctggtttagtgctcaggacacagccagagctctgcgtttccgcatctcctctccacaccaaataataacaatttgctctagaagacaatggacatccaagtgaaataaggctcaagggactgcagccgttttttattagttatccactagtaaatgcactaaaccaaagaagccccacttcaaggaacacagacaaacatctgtctctataattatccatacgccccaaacgcccctcctcatctcattccccctacttatcactctgaacatattctacaatggacttactcatcaggcccaacatctgtctcccctcacgggaatgccagctccacaaggtcaagggctgggatgttttgtttgccaatgtgttagcattcccaaacttagattagcatcaggcataacataagcactctgcctattcctcgttaaatggaatggatttgaaaattatcagaaacactagtttcaa

SEQ ID NO: 667743 - DNA, 263 bp, Homo sapiens
caatactgacgcgggcacgcgataggcccatgcgatcacatgcagcactgtggcacaggtatagagaccgggaacaccggctatagtactatagaacgtatttgacgccgggactagaccaccagttggccgtcaatcagtggccttggagcccagcaacaggcggtaaacgcatggcctatgcggcaggcgagggtagaattctacccgccataacccgatcgcccagggccagggtagtgctgatacacataaccgaccta

SEQ ID NO: 667744 - DNA, 193 bp, Homo sapiens
cctagtctgtctgatagtcagtacggtagttatataagtcagtgtagtcaggtagttagtcaggtagtcagttaggtagttaataatggtaatcagtcagtcaggcagttagttatggtagtcggtcagtgtaggcagtcagtcgtcagtcagtctgaggtagtaaagtcatagcgaatggtcagtcaagtaa

SEQ ID NO: 667745 - DNA, 355 bp, Homo sapiens
catcatggggttctggaggatacatagacacccttgtgatgtggaaaaggatcactgaggaaggcttttaataatgactcttgggataacacactctgtaatggaaaacttgtggtatcctaagcttgcatgctgagtatgatgaggtatttgacgtaatgtagccacagttcactatgtatgtacagcataatcaacttagccttagtagtctgacgagatatatacagacgattttcccacacagaagcgtaatgcaataccccctgccatagttgattcaaaagcctaaagtactatagacagggtccataaatactactacctgttcagaaacattagggttcactgacct

SEQ ID NO: 667746 - DNA, 299 bp, Homo sapiens
ggcattattctcatagaagcacaaactgttgtgaagtgtgcatgcgagggatctaggttgtgtactccttatgagaatctaatgcctgatattctgttactgtttcccatcaccccagatggacagtctagttgcaggaaaacaagctcagagatcccactgagtctacgttatagtgagttgtagaatcatttcattatatattactatgtagtaataatagaaataaagtgcacaatacttttggttaatttcctttattaacttgtccctaatagaatactagtttctattcttta

SEQ ID NO: 667747 - DNA, 337 bp, Homo sapiens
ttgggggaaatcctgtttttttgtttgttttgcttttttaaaacggagtctttttctgtccccagggtggaaaccagtgaaccaaaattgggccagggccctccagcctggggggaagcgagcccctgtttccaaaaaaaaaaaaaaaaaaaaaaaaggggaggggcctttcctttttcttggtcctatttttgccatgggaaaggcccccccccctttttccttcccccatgattttaacattcctgggggttcctcggaaggggagcaaatgccagccccatgtttcctgtaaagcccgcaaaactggggggcaattaaactttttttttaatta

SEQ ID NO: 667748 - DNA, 511 bp, Homo sapiens
acaagtggaaagggagttcatgacctgcagctccgagaaggtaaataaaacatttagaaactattctaatgtgaatatagccatgtagcatctatctacactgcaatctcaaacatcttgattgcccaagttcacctatagaaatttagatcggctgcatcttgcttctgaggcaggattacgaaagatttgtttaaaataatagtattgagcttggtgtgccaaggttgtgaattttgggccatttgaaaataatcaatctggtcaggcatggtggctcacaactgtaatcccagcactttaggcagaggcaggcagatcacctgaggtcaggagctcgagaccagcccggccaacacggtgaaacctcatctctactaaaaatacaaaattagccaggtgtggtggcacatgcctgtaatcccagctactcaagaggctgaggcaggagaatagcttgaacccgggaggcggaggttgcagtgagccaagatcgcgccactgtactcta

SEQ ID NO: 667749 - DNA, 328 bp, Homo sapiens
acagaggctgaatggcagaggctgaatggcgtgaaccccggtaggcggagcttgtagtgggccaaaattgcgccactgctctccaacctgggcgacagagcgagactgggtctcgtaaaaaaaaaaaaaagatgcaatttttaccaaatttaaaaaaggccaattccgtgtgatgttttattctctaaaaggtctcactatgacttaaatcctttattaaagcactatggaagcgggtttacccaaagaaaatattttggatacagggaaattcagctttttaattatttccagggaagttcacgggttctccacattttcccatttc

SEQ ID NO: 667750 - DNA, 102 bp, Homo sapiens
aatgtctgcagcctcagagcactgcatcatttactccatctcctgtcatggctacaactggaccgttcttctgtagcgacttaataattttcatcttgtgcc

SEQ ID NO: 667751 - DNA, 250 bp, Homo sapiens
tgagcgaagtgcactaggctagcccaccttcgacccttaccagcgcggggactatcgtagttcgggggggcagaaaatgtagcccatttcttgccacctcatgggctacaccttgacctaacgcttgtcactggccgctgttccacaactttgtagccttcatcagggtttgcatgaagatggctggtatatagcctgagcaagaggtggtgaggttgatcggggtttatcgattacagaacaggctcct

SEQ ID NO: 667752 - DNA, 881 bp, Homo sapiens
tggtcgtgctttctgtcttggtttttgtcgttttttttgggctcgtttcccttggtgcccaggtggagtgcatggttcaatttcggcttccctgtctgccctccatctttatgtttcctgctaattgtcgtgcctcagcctccctagtagctgggattacaggcaccatgcccagctaacttttgtatttttagtagagacagggtttctccatgttggccaggctggtcttgacacctggcctcaagtgatctgcctgtcttggcctcccaaagtgctgggattacaggcatgagccaccatgcccagcaggtcaactgtttttgcaagcatttagccagagtcatgctgtgctgttaatcagtgtcctggagaatgggttgcttggaaatcttggcgccccctcagtagtaacagccttggtttaagggcgcagagtggagagtaaatgcaagggctataacaagggcattcatgctgtgggttaagatccacaaatcgctaggaatgtgtatactctgggtagtaagtttgtagtattagaaggtttaatgacaagtatttgaagagctgaagttaagtgttgggaggccatcccttatgaaggacaatgaatggcaagtaaaagaccaagttctgttcctgggtccattaatttagttaaaaaggcaaagttctttcagcacacatatctgcatgcagtcacgtgctgcctaaggatgcttcattcaacaatgagcctcacagccgtgctacacaataagattataatactgtatttttactgtaccttttaacattgtgttacaatggcctacaagaagcttgtgtggatggctttgaatgtggcccaacacgaactaataaattttgctaaaaca

SEQ ID NO: 667753 - DNA, 355 bp, Homo sapiens
ccccgacgccatggggtctgtacagaggagtctaagtgagaggcaggccttttttttagctgggcccaggctctctgcagccatgcgtttatggtgtgcctacggggtagcacgcccagatggacaggccagggctgcccagagctgggggtgggagcaaggtaagcagagaggtgagggaaggagggtgctggcttagcaggagctgaatgaatgggcctggaggggaaaagctaagggagatggggtggcttgagtggagtaggtgaggcctaggtgaaggggagctgtggaccttccaggacggacggatgtgagcagtcctgagtggggactggagttagggtggggaagg

SEQ ID NO: 667754 - DNA, 974 bp, Homo sapiens
tggtcgtgctttctgtcttggtttttgtcgttttttttgggctcgtttcccttggtgcccaggtggagtgcatggttcaatttcggcttccctgtctgccctccatctttatgtttcctgctaattgtcgtgcctcagcctccctagtagctgggattacaggcaccatgcccagctaacttttgtatttttagtagagacagggtttctccatgttggccaggctggtcttgacacctggcctcaagtgatctgcctgtcttggcctcccaaagtgctgggattacaggcatgagccaccatgcccagcaggtcaactgtttttgcaagcatttagccagagtcatgctgtgctgttaatcagtgtcctggagaatgggttgcttggaaatcttggcgccccctcagtagtaacagccttggtttaagggcgcagagtggagagtaaatgcaagggctataacaagggcattcatgctgtgggttaagatccacaaatcgctaggaatgtgtatactctgggtagtaagtttgtagtattagaaggtttaatgacaagtatttgaagagctgaagttaagtgttgggaggccatcccttatgaaggacaatgaatggcaagtaaaagaccaagttctgttcctgggtccattaatttagttaaaaaggcaaagttctttcagcacacatatctgcatgcagtcacgtgctgcctaaggatgcttcattcaacaatgagcctcacagccgtgctacacaataagattataatactgtatttttactgtaccttttaacattgtgttacaatggcctacaagaagcttgtgtggatggctttgaatgtggcccaacacgaactaataaattttgctaaaacaggccaaaacgggtggatcacgaggtcaggagttcaagaccagcctggcctagatggtgaaaccctgtctctactaaaactacaaatattagcc

SEQ ID NO: 667755 - DNA, 120 bp, Homo sapiens
tgatgggtcacaaaattagcatgttaggcatcagccatgtagagctaaggaatttaaaggcaccagtaacataaagatcaatacctgctttcctcctccaccaagaacagtagataagtt

SEQ ID NO: 667756 - DNA, 438 bp, Homo sapiens
gctcgactacagtggtgtgagctcctgagctcagaggcatcctcctgtctcagcctcccaagtacctggaacaacaggcatgcacctccatgcctggctaattagagacgagggtctcactctgttgcccaggcttgtcttgaactctggggttcaaacaatctgcctgccttggactcccaaagtgctgaaattacaggcatgagccacctcatttgactttgttcacattctttactaatctgtttgtttgtttgttttttgaaacagagctgcactctgtcacccaggctggagtgcagtgacacaatcttggctcactgcagcctccacctcccaggttcaagcaattctcccatctcagcctcccgagtagctgggattacaggcgcccggcaccatgctggctaatttttgcgtgtttagtagaaatggggt

SEQ ID NO: 667757 - DNA, 535 bp, Homo sapiens
  misc_feature (130)..(130): n is a, c, g, or t
  misc_feature (141)..(141): n is a, c, g, or t
  misc_feature (143)..(143): n is a, c, g, or t
  misc_feature (197)..(197): n is a, c, g, or t
  misc_feature (231)..(231): n is a, c, g, or t
  misc_feature (358)..(358): n is a, c, g, or t
atagttagatggatccatgccagggtccaatgctctataagtggaagtcactgacatcacctctagtgtacagcttttgagggcttgggaataactatctcattctctcatctcctggtgcagtaactangggagaatccntncattaagatggtagaatttccatcattctaggtctttgagtggccatatggagnacaccatacccagccaacccattgtggacatggnatgtaagaaatcaaccttggttgctaagctgctgagactctggggttaatttgttactgcagcataacctagtccatcctgatgcatgcagcatgcaaaccacttacgttgacccttagtcatggtnagtgctccacagatgttggttacttttggtaggaagatagattgcctctgaaagttttgttagctgatctcatgatgccaatgttgctattttgtaattggataaattggacttggctctccttccagcatgtgggagagacagatgactgagagacaataaagcactattatcttc

SEQ ID NO: 667758 - DNA, 190 bp, Homo sapiens
cctcgtcccttatcaaaaattaaaaatagttgggcatggtggcacacaccggtacgtcccagctactcaggaggctgaggcaggagaattgcttgtgagccgggacacggaggttgcagtgagctgagatcacgccattgcactccagcctaggcaacagagcaagagcgaaactccgtctcgtaaggtc

SEQ ID NO: 667759 - DNA, 794 bp, Homo sapiens
ggggtgctcggaaggccacaggatggggctcctggctggcctgaggctggccggatgggaagggctagcaggtgtgtaaacagagggttccatcagtgctgtggtgcagtgatggacagcttccgcacacttgagtgaagcctcccctctccctcggtgacatcttgtcccgaccctcagaaccctggcttgtctccagtgaggtccgaagctctggtgggaactcttgaggggcaaggtggggtgcaggccgtgcggagtaccggaggtcacgcgtgtctgaaacagcagagagcaaggaacgaagcgatgaacacaggatcgttgccccaagtcagaaaccaagggttgcatatgcagcccccagtaatgatgccacaaggatcgtgagataaattgcccattaattacgttcacggcaccctgttgagtgcccctaaagtgccttggcgcgcaagcggaacaatccaagcacatacatggacgaagtgatatacctcatcagaccatcacagacactaaggtatgacacccacgcgaaacattcggaggaacacgcacatcaattaaatttgacacagacacccagcacatgttgacaccatcccaataacaagaaagcagtgtcgcgtaataataattgaaggaatctccggacgatttaaccaagtgcgcacatgagcaaagtagaaaaaaccagccggtatagagaaattagaatagaacaaagaggcgaacggacactgaagtctgtgcaaattaccgaccgacgaagaggggacaaccgcacgcag

SEQ ID NO: 667760 - DNA, 430 bp, Homo sapiens
  misc_feature (62)..(62): n is a, c, g, or t
ggccgtcttcagaaccaggcagggagccgctgcgttggggtttatgcttggatggtggacgnccgtgggtgtgtctggggggccgcactctggggtctggagctgcgtctccatccttccctgtcagggaccctctgaagggcctgcgggccaccagtcaccctcccttagccaagggatcccgggagatgggggcggggacgctgggttctgggttgtggggctggcagggcagagcccgagagcggccagacctgccctttgcacggcacagaggcccccaggaaagggcctgcggtgagccgggggcagatggccccttgggggccaggacctcaggtgggtgggcttcgcgggggagcagtcacctctgcggtatttagggcaggcggacagaggtggaggggccgccccgtgttcgccgcggccg

SEQ ID NO: 667761 - DNA, 278 bp, Homo sapiens
cgtatagcctcgccagtgctgggatcacagaccgtattgactccaattttgaaacaagttctattgtgggtaaaagtgttacccagcatcatcacatggtacagagaaatcttttgtgaaaggaagttgatacagccaacttcgtggttgtcatattttaagaaatttccacagccaccccaacgttcagcaaccaccactgatcaatcagtggccttcaacatcgaggcaagaccccctactaggaaaaagattacaactcactggcaggctaggac

SEQ ID NO: 667762 - DNA, 424 bp, Homo sapiens
ctaaaagtaaactatacattacatacttccaagcatgcatgtatggctactataacagatcagcacttctaaaaacatgtacatcctatatcagtaaaaaataaaagcaaatagagtaccacagcacagaatatgtctgaaatttagttttgtttgatatctgaaagttaagtttttgacatttaccagcagtcccacaacgtgctgaccctgtgccgtcgtggcctggtgccagcctgatgtagggccatgctaaaaatagcagctaagcagcagctgtaacacataggtccttctgacctcaactttatttccctaaagggtgattggaggaagagggggacaactggagggaatgagggaaatggaatatactctcagtaggtattacttatctcttctgattcgtcttcttttctaccac

SEQ ID NO: 667763 - DNA, 1496 bp, Homo sapiens
  misc_feature (350)..(350): n is a, c, g, or t
  misc_feature (375)..(375): n is a, c, g, or t
  misc_feature (397)..(397): n is a, c, g, or t
gagctttttccgcaagctgggcagcgaggggcctgccacccagttctttttccaattacatgcgcgactgtgataccgaagcatgtgcgtacgatagtgtctgtctgctttcggtgccgtcgctttccggctgctgtcttactccatcgggcgtctccgtctattgcccctcttgcctttctctccacgggacggccattacttttcgtctggtcaatccagcgcgggatgaaaatgcactcgatcgcactctcgttttcatatgtcgccgagaatactcgacgcactggggcggagacatagggggacccactagttacgaccgataaatccatgtacatagctggagnggtccgtatctataggacttcttcnatacggctgcctcagagtcacntagcgtgcgcgtgcatgcaagcgtcacctgcgtggcatcttacgcggtcacacgacacgcctactatgcacaaatgtctgtggcgcaccggcacactaacgcggcgacctcactatgggtgttgctccccgctgtcatttgcccttggccattgacgaagggtcacccagacattgtcgcaggcgtggaatggcatcgagcatatactggtcgatgattgtggacacggcagccacacgaacctataatgccttagactgtattagctcgcaggcgaacatcgagggatgcttggcaggtgggcatagtaacttgcgcagaagtgacactggtagcccccccagagtagtgatcgtcacgctggacggtgcagagctaacgggcgtggaagtaacgcgctattaaccaaagtgtgctccccaaggcccgaggttaactctgcggagtggtatcccccacaaactctttgagaggcttatttcattgacaacacgactacaaaaaaaaagcaaggaggcccaaccctaggaggaacagtggcacagacggggagcgaaaacgctggaaagggcggccatttcctgggaagggcgtagcttgggcgttggccttctacttttggaaagcttaccatagcgggaggttttcccctacgggtctgggggcggacatcggatgttgaacacattgtggaggcatgtctctgtgtcccccatggtgtcgttctttggttaccgccttggttttgttgggcttctaaataacagcaagggttcttaagaaggcttgttcctttcccgagccaagggccatgtttcccaatttgacacaaaacacgggccgggggattccctcaacccagtggaggttatacccaaggccccaagattacccggggcagatgagcactgcggcggggaagctggacacctggtgcttgtagacaacggacaatgggcccaccgacatgagtacgcgctgaaacaacagggttgaagagagagagcaacccaatcgttaaacaacgtagcagaacctcaacgcgaacatacacaacagggggtgcagcgagaagcaaaagaatgacaaaatgagcata

SEQ ID NO: 667764 - DNA, 271 bp, Homo sapiens
ctccagatccaagacttacaatatagctagagttgagagtcatctgatcaccctattgctccctgtgatggttaattttatgtgtcaacttgactgggtcatagggtgcccagatatttaggtcaaacatttttctgggtgtgttggggagggtgtttctcggatgtgattcacatctcaaatggaatgagttggcagtaaagcagattgccctcaccaatgcaagtggcctctaaaaaatcagctggaaggcctagaatcagagccaaaa

SEQ ID NO: 667765 - DNA, 444 bp, Homo sapiens
gctttcagtccagatgaactgagggacatctgttgtactatgtataactttgaaaacttggtatagtatctacagcagtgtataatctacaactgacatccactaaagcttaaatcttcatactgcactgtacgatagtagaatcataacagttgaaaggaacctagactccctttcacacatggagtgattataagtttcaatcctggtatctgtgcgtgatttttatcagtttagtgtagatatagatgtggcatattttaaatttaaatcccacattgtaaagtttgtacaatttgtcctgaagctttgtgtttggctgcacctgcataagctgctacaaatagaataaagaatttcatagcctgtatctatcatttagatgcatggaaaaaaatgggctttgcacacaatgggtttggagctgactgggcacacattatg

SEQ ID NO: 667766 - DNA, 381 bp, Homo sapiens
ccaacgccgcagagagtgtacaaccagtgccgtgggtgtttttggtcataatgcgcggtgcggtaaaccgttgttcacctcgcgggtaaacagccagtccgggctttgctcatcatccagatgaccacctttcattagcactgcgccacagcccatcgccaacagcgatcgcccttgttccagcatttcctgttcggtggcccgtgtggcgcgtcgagcaaggcggcagcttcgggcaagtttggcgttattaatgaaacctgtggcaataatcgactgcgcagcgtagcaaccgccgaaggtgaaagcacgggtcgccgctttttgccagcataacggtgtcgagtaccacgttttggatctgataacgttgcaaccgtt

SEQ ID NO: 667767 - DNA, 373 bp, Homo sapiens
ttcactcctttaacctcaaatgtattcctttgttagaatttacccctagattccttatttaatgtctgcagtagactgaatgtttgtgtgcccccccagaattcctaatgttgaaatctcatttcccaatgtgatggtatttggaggtggggcttttggtaagtgataggtcaggagagtaacagcgctcatgaatgtgattagtgcccttatataaagagacccagagagctccatcaccccttctgccatgtgaaagggagaagacaaacatccacgaaccaggaagtgggtcctcaccagaaaacaaatctgtaagcaccttgatcttggacttcccagcctccagaattgtgataaataaatttttgat

SEQ ID NO: 667768 - DNA, 214 bp, Homo sapiens
  misc_feature (16)..(16): n is a, c, g, or t
  misc_feature (37)..(37): n is a, c, g, or t
  misc_feature (84)..(84): n is a, c, g, or t
  misc_feature (88)..(88): n is a, c, g, or t
  misc_feature (107)..(107): n is a, c, g, or t
  misc_feature (111)..(114): n is a, c, g, or t
  misc_feature (128)..(128): n is a, c, g, or t
  misc_feature (155)..(155): n is a, c, g, or t
  misc_feature (159)..(159): n is a, c, g, or t
  misc_feature (174)..(174): n is a, c, g, or t
  misc_feature (176)..(176): n is a, c, g, or t
  misc_feature (197)..(197): n is a, c, g, or t
  misc_feature (208)..(208): n is a, c, g, or t
  misc_feature (213)..(214): n is a, c, g, or t
ctaatactttctcccnaatggaagccctgatcccccngagagctacaggtctgctcccgacgggcctggggcctgacccgtccncacngggccgtgtcaacagcagnggcnnnngggacgtgtgtacntatgtaaatgagaaatagagacgtgtnaacngatgcattcatttcncntggaatgtgtattgtttttantttgcgaaacnaaggnn

SEQ ID NO: 667769 - DNA, 776 bp, Homo sapiens
  misc_feature (23)..(23): n is a, c, g, or t
  misc_feature (128)..(128): n is a, c, g, or t
  misc_feature (141)..(141): n is a, c, g, or t
  misc_feature (146)..(147): n is a, c, g, or t
  misc_feature (190)..(190): n is a, c, g, or t
  misc_feature (192)..(192): n is a, c, g, or t
  misc_feature (216)..(217): n is a, c, g, or t
  misc_feature (221)..(221): n is a, c, g, or t
  misc_feature (226)..(227): n is a, c, g, or t
  misc_feature (249)..(249): n is a, c, g, or t
  misc_feature (258)..(259): n is a, c, g, or t
  misc_feature (265)..(265): n is a, c, g, or t
  misc_feature (276)..(276): n is a, c, g, or t
  misc_feature (288)..(289): n is a, c, g, or t
  misc_feature (291)..(291): n is a, c, g, or t
  misc_feature (295)..(295): n is a, c, g, or t
  misc_feature (299)..(299): n is a, c, g, or t
  misc_feature (302)..(302): n is a, c, g, or t
  misc_feature (307)..(309): n is a, c, g, or t
  misc_feature (312)..(312): n is a, c, g, or t
  misc_feature (325)..(325): n is a, c, g, or t
  misc_feature (330)..(330): n is a, c, g, or t
  misc_feature (350)..(350): n is a, c, g, or t
  misc_feature (358)..(358): n is a, c, g, or t
  misc_feature (364)..(364): n is a, c, g, or t
  misc_feature (366)..(366): n is a, c, g, or t
  misc_feature (369)..(369): n is a, c, g, or t
  misc_feature (376)..(376): n is a, c, g, or t
  misc_feature (388)..(388): n is a, c, g, or t
  misc_feature (391)..(391): n is a, c, g, or t
  misc_feature (396)..(397): n is a, c, g, or t
  misc_feature (411)..(411): n is a, c, g, or t
  misc_feature (417)..(418): n is a, c, g, or t
  misc_feature (444)..(444): n is a, c, g, or t
  misc_feature (464)..(464): n is a, c, g, or t
  misc_feature (467)..(467): n is a, c, g, or t
  misc_feature (478)..(478): n is a, c, g, or t
  misc_feature (490)..(490): n is a, c, g, or t
  misc_feature (493)..(493): n is a, c, g, or t
  misc_feature (501)..(501): n is a, c, g, or t
  misc_feature (505)..(505): n is a, c, g, or t
  misc_feature (521)..(521): n is a, c, g, or t
  misc_feature (594)..(594): n is a, c, g, or t
  misc_feature (639)..(639): n is a, c, g, or t
  misc_feature (649)..(649): n is a, c, g, or t
  misc_feature (655)..(655): n is a, c, g, or t
  misc_feature (712)..(712): n is a, c, g, or t
  misc_feature (761)..(761): n is a, c, g, or t
gggtgggtctttggggtattgtncaggaatcacaagcatctgtggaaaaaactaaggtattacagacactacacggaggtcatgttcttacattcaagacactaaatacaaaccgaagcaatgcaatnatgtatacttttnttttnnaaccctttttttgttctcatcttgaaaagggatcacttttttntntcacaaacaagctggtcggttggnnttcnttttnnctcacttgtcccgcgctacacnctggttctnncctccnctccccctttntctttttttttnncngcgntctnggnggtgnnnttntgccgctgcgggnttctnctgctcactccatgctgctnactttgtncttggngngtngggtgcnttttagctctgngtngggtnnttgggggggggggngggggnntgggggtggggggtcggtggtttgtngggggttgttttttgctggnggnttttgcttcgngggttaggggcnggngccttgcnaggngctgtgttctggggcnctggcctcatggtgtgctcagcgggttgggcacgcggcccaggaagtgcagggcagtggcgctttgatcatanacagccaacaggaatgggcggttcagggtcactccaagacctcangcttgttaanctgttnggtagactctgtgggctctctctcatccgcttcaagctcaaaaaaaatgctgttcancacctcccccaccctggatgcggtcattgctcaatttttgcaggttcanctcggtgtgcagaat

SEQ ID NO: 667770 - DNA, 226 bp, Homo sapiens
gctgttccagaggatcccggtcaagacgctgatactatgttgtaagctttgaggagcttatgctaagtgaaatacgccagtcacataacagcgaagtactatatcattccagtcatataaagtacctggaggactcaaacccattgagaatgctgcttgccaggggctgggaggaggggaaaatagggagttcttattcaaaggatgcacatagttcagcgtctga

SEQ ID NO: 667771 - DNA, 100 bp, Homo sapiens
ggcagagactcgaggattagcaagcatctgtaagaaagtctctggatgcacagggtgtaatttgtgcatggaaaatggctggggtgaagaggagactagg

SEQ ID NO: 667772 - DNA, 868 bp, Homo sapiens
cgaacattttactatgacctcctgttccatctgagaatgcaccctctagccaacatggccaggcaacacctatcaacccctggagctcacaacaattccccaacaccccacttctactcctgcctatctgttctcaacgcgggcttttcgcatcctagctaacctgtcaaggagcttgacactaagaatcgtctggcaggatccccttttaccagttacaaagcttttcaggaccctctaactttctcaacggtaactttgcttacatatcggcgactctgggatggacctttcctgttgcccgtttctggtaatctgtcttgagcttacaatatagagcccgttgcagtaaaattgggctgttagggatcaatcttttaaagaataaatgctatatattaggaaaatctcaatattctagagctcatagttaacaagtacttcgagcgaagacatgctagttgttatgcaggggattctgtattccaaatggatactatccgacatatataaaagttgacagattcttaatctattgactcttatttagcaaatgcaacagacaagaatatccaacttgagtatgtataaaaggtagactttttgccaaaagtgtataagctctaaagagcatatatgcaacctgttgcaagttaatatagtactatgtaatatatattattgtgtatttatgattagccatcattaatgccctatgtgcttggcctttaagagataatcacaaaatattgatattaatttatacatatttgttgcagaagtgcctgtgagagaaatcttcaaaagacaaagcctggtcaaatatattattattgtaatataaacgatgggtttggtctgaaacgtt

SEQ ID NO: 667773 - DNA, 480 bp, Homo sapiens
  misc_feature (185)..(185): n is a, c, g, or t
  misc_feature (313)..(313): n is a, c, g, or t
  misc_feature (317)..(318): n is a, c, g, or t
  misc_feature (385)..(386): n is a, c, g, or t
  misc_feature (457)..(457): n is a, c, g, or t
gagctcatcgggcagggctagccaaggttgttcctccaaaaggagtggaagccacgagcatcctatgatgacattgatgatttggtcattcctgcccccattcaacagctgagtgacggggtcagtctggcctctttactcagtacaacatacagaagaaagccatgactgttcggagagttccngcaaggatatgccacatagacgagtaacgtactggtaccccacgctatagtgagtttgaagagctccgagcggaaattactgggcacacagaagtctgtgacattcagagtcctccaatcctactggntggnncagatgtgaatggtaccctctatgaaaagcatgttgatgagtggaatattcgcgccggctgagaacnnaatcctggacttggtggaaaaggagaggggatcaccattgagggctgtgaaacagcctccaataaccctgntaccttttgggcatgtggaagac

SEQ ID NO: 667774 - DNA, 928 bp, Homo sapiens
gaacaattgtgccgggtcctccctgtaaagaagtgggggaaaccgccgttttttaagcggagtcccgcccacacgtggttgtgtgggcccacgagccccccctagtttgtgacaaggggtccaccaccatggtgcgccgtcgaagcacgccggtgtaaagcctttggttgtgtccacgccccgctgggcgcatactatttttcgcgcctggtagtcgctcccggccgtaatatatgctcccgcactcacctggggaggcagttcagcggaaccattcatggcccgcagaacacaagacacaatggtgcgctgcgcagcatgcttggtggcggacacacactgaatgccctacattttcgctcacggaggagaaaattttgcacgaaaacaaaaatttccttcaccacaccacatgttgggacctgcaccaccctgaaaggttacgccacgcacaatactgtgcgggcaagaatatagcggcgattatgcaactcgatgttcctcacgaagagtcaccctccatgtgtgataacatcccctttatctccactgaaaccccctgttgaagataacaaagagcgtagtccccacacaagatacgttattatcatcacacaataacatagagcacctattttcacacaccgagggtgattcttttgcgagcagccattgatatttcgggctgtcatctccaccggaggtcgtcgccgcacgccagtgcccccatcgggaatgaattaagaggaggcagccaccacgatgaactatacttgtttcgcaaagcggtgctcgccaaacaagaacaatgagtccgcgaggggacaataatcgctgtagaagatgacattcaagacgacaataaaaagcaacggcccgcccggagtctccctaaaccactgttccaacaaaaaccccaaacataaca

SEQ ID NO: 667775 - DNA, 493 bp, Homo sapiens
  misc_feature (472)..(472): n is a, c, g, or t
  misc_feature (483)..(483): n is a, c, g, or t
actatatgagaattgacaacaaaatgctatgggaactttaagctcaggccatgatagtgatgaagaccagctgacttgctttaaacaacaatagaaccagacaaaatatatacatataagaaatattgattttcagacattggacaacagactgcataggacaggcaatgatccctgagaggagaaaataaacaaagtaggctctgaaaatgccctagcacatggttgccaaaccacagtgcagggaagggaagcccaacaaatcatagcattcttactaaattgaagaaacagaaattgaagcttggggaagccaagatgtctggaatttgttgagcaaaatactggagagtagtaagatacacagagggagaactccagaggtctgcagaagaaaccttctagtctttgatttgagcatgcatttgaagaaactactgagggcaggggggagaccaccagaaagtggcangcagaacaatncttggattgg

SEQ ID NO: 667776 - DNA, 576 bp, Homo sapiens
cgggaagtagacaaacagtgttgtaggagttagaaaaggaaggaaatttcataagggatattttaaaaacttacccttggccgggcgcggtagctcacgcccgtaatcccagcactgtgggaggctgaggtgggcggattgcctgaggtcaggagtttgggaccagactgaccagcgtggcgaggccccgtctcactaaaaatacaaaaaaagtagctgggcgtggtggtgggtgcctgtggtcccagctgctcgggaggctgaggcaaagagaatcgcttgaacccgggaggtggaggttgcagtgagctgagattgtgccactgcactccagcctgggcagtagaagtggcactccgcccccaaaaaaacaaaccaaaaaaaaaaaacccaataatgtgtgaccctttggggggcccgagcagatttaaacccaaccttgggtgggcatggggccacggggaggttcttgaccttgggcacacatgtgccccaagggaatcgccggcaggagcgatggtggggtatcctcgcaacaacaagaaagcccggggggatccgcggtttttaggcaac

SEQ ID NO: 667777 - DNA, 1267 bp, Homo sapiens
agcggggcggcgcctgcttgtgctgcgacgctctagcggttacctgctgcgggctggctggtgctgtagtgttgtggcttgctgctggctgccactgtgagctagatgtggcaagtgttgctctgtgcccagctgtgcatgtggaactgctgtgtgctgtgcatgacaactgtgtgcttggtgctcctgtgtgtgccatgcgtgctgctgtgtgctgcttgacgcttggccagtggcctgtgtgtctgtgtggctgctgtgtgcttgctatcctgcagtctccttccagtctgccttgcgatgtaatgtgtgctgtgcctgctgtgcggatgccgtattgacgtggtgaaactgacgtttgtctgtgatggcccgtagaccagtggtgttgtcatcttgatgcccttggttgtggaatcaccactgtgatgctgtcaacaattcacatatatccctgaatcacgttcgacagacggtacaaagcaaggagccggatggggacacctgtgctttgtatcaccccagaatggacgcagagggccttggtttggcgcctttggaaatggatggcccaaggaagcaagttgatcgaagtgcggtgactcggaacactggcgcagccaggtcaaggcggaccccagtggagagagttaagcgagttgaagccagtgggcctttgggcagttctaacggtcccccttcgtggtggaacgcaatgtcgcggaaaccgcgggcccaccggagagaaattggtttctgaggctgaaagggcattccatacgcgtgggtgtgaaacggctggttttggcccgagacgacagttaccaacagcgtgatcttgggcaatcgctccctctcagcgggacagagtcagaaatcgtggcgcatttaaacgccccatgtcttggcagagacaccagttctcatctggggaaagaagcggtatgggccgacccagacaaagtggggttagggcggcgtgcaacatcgtacctcccaataagtcgtctccccacaacgtgcaaagctttggagcaaagacgacgagcgactggtcggctggtctatctagcacagaggaacagcgtagtccccgttagaccgcgcatcaacggttctaaggtctaaccgtttaatcttttccggagatccagctagtggacatgagggggaggacggcgaggaagctagcgggaaaccgtttgcgtattcccagaggactatagtatcgcgcaggtggctttgatcagcaagtgtggtttacagg

SEQ ID NO: 667778 - DNA, 206 bp, Homo sapiens
tcgtacaggcggaattatacacatgggccaccacacccggcctctcttcttttttttatgtaggcacttgtaactataaacttccctcttaatactgctttcactgtgtcctataggttttggcatgttgtgtttccattatcatttatttcaagaaatttttcagtttctctcaatttcttcattgacccactggcgactaggac

SEQ ID NO: 667779 - DNA, 554 bp, Homo sapiens
ggacagcaacccggaccacaccgcaaagttcggcctcacccaagaattcaacacgactcctcgtttacaacctgagctgcccggctatcgtagacaccccgactcctaccaacaacaacaccaactccagccccagcggttctcccaccagcctccccagcaacggcaccacgaacggcaacggaacaagccccagcggcactcccagcagcaccccggctggagaaggcgctggaagcatcacctcggtctcgatggttaacgcttgcgccattgctctgtccatggtcttcgctgtggcaacctgggcggtctaagtcattgaaacattcgagctcgacggctgtgcacctttatctggatagacttgttgattcagtacaatcctgtattaatagtggcgtcttttagaaaaacctgacaccaaattgaatttacatgaaaagtgaagaagatatagtctgagcatgatgcgtattcatgagccatctgattatcccatttaatgttctcactgaagtccaagtcacctgatcctcttcgtggatcgattt

SEQ ID NO: 667780 - DNA, 363 bp, Homo sapiens
ctacggtcctttacgatgaaagctgcggtgctgaccttggccgcgcacttgctgacggggagccaggctcggcattactggcgccacgatgaacccccccagagccgcctgcatcgagtgaaggacctggccactgtgtacgtggatgcgctcaaagacagaggcagagactatgcgctccagtttgagaggctccgccttgggcaggtaaccctaatgctacttgacagctgctacagcgtgaccaccagcttcagcaagctgcgctgacagctcgcacctgcgacccacgagttctgggatcacctgggccatggtgcagtcctaccgggacgacttgcagaggtggcaggaggagtggct

SEQ ID NO: 667781 - DNA, 1202 bp, Homo sapiens
  misc_feature (473)..(473): n is a, c, g, or t
gaataccttgatttgctcgcgaactgaaggagagcaaaggtctatgcagagttcctgcttccattacgcgcactttctagccaatataccatgaactacataaatttgacaattatatcgtgctcgtatccttcgagcctaggattaagtgtgttgactcgaggatgtgatccatggctatgagcatgattatgcccactatcatatctatcgggcaatgatgcatcatgaatgacgcgccacgagctgtttctatttggaccttggacagacgacccggattttgcgacagattcctagtagaatagatgctggtaagactatgataaggcggtgatggcaagatgagtggccataccataggtaatcctatacgtaatcatgtattagagtatgaagggtaagtaaaacgctaggtaatcggacgcagtactcagacttgaaaatagaggggcctttttatgaaagatatntgatatatcccagattctctgctaggataagggtcttgcgaccttccctatggatatttatcacatctcgattcttgaggaccacagatcccacatcatatacaagaccgaggtaccattgctactcttcagtaaaccatatttgaagatccaaggatggaaacggagagtcttagcacaaagtaaacaatcgaggaaattaatattcgtaggaacacgcacgttcctcgctcgagggcccacaaactatgcacgcacttattgcatctgggaagggagtcctgcgagtaacttggaacggtatattaatcttatttacttccttggacatgtcacgggggcttgcttggagaaaagggtaacttggtggtaaaaccctgtgtaacccttatcaattccaattcttaccacttcaaggacaaattcgcagggtgagaggacttatgggaatagacgaaagtttttctaggtacatcgttctccccaaaatatggagtttcctttgaacattaccttcttcgtataaataacctctttgaaggggtaagaggcaccgtggtgggaaattccaagaagttgaagacctcttagttagatggctctggtgcggtggagataaactcccccctttggttcgtgacatcttttttctagaaccttctgtcctaaatttaggcatcggaaactaacttaaaggaactcccaggcaatttcgtggcctttgaagag

SEQ ID NO: 667782 - DNA, 308 bp, Homo sapiens
ggtccccccccctgggggcccgcgtgggattccgggatcgcccctccggtcctgccccaaaacgagggggcatggcctttgcgagtccctttgctacaatccagcttttaatccgccccaaaacggcagcccatcggagcgcgaggacgtggtttggagggccccccggagatttggggccccccagggcctcagggggggtggtttggtcccccttgcgggcccgggagggggatggtttttatggcccaagtttggttttttcccccccgtttaaatttggattaaaactttgaacttttagtcca

SEQ ID NO: 667783 - DNA, 299 bp, Homo sapiens
ctagagttacccagagagtctgttcaccgcgtataccggcacctgctgtgacggtttctacaccaagtacggcgacatcattaaagcatctctacactgcctgcgccagcgcctgctggacatggggtgtgccgacgattacatgatgaccctcaactccggcgtcatgggcctgacccaacaggatgcgcacatcctcgaccactccatcgagttgatggatgaactgttcccccacgcccagggcgcttataccctggaaggagttctggcttgtcatcgccgccataacgtaaccg

SEQ ID NO: 667784 - DNA, 140 bp, Homo sapiens
taattaattaagaccccaaccgagtctcttccccctcccccaatgggaaaatggatttaatattcccacccctcttgccccgggggcaaaaaattgtttggggaacccaaccaaaaaaaggttttttaaccccaaaaaaa

SEQ ID NO: 667785 - DNA, 412 bp, Homo sapiens
  misc_feature (274)..(274): n is a, c, g, or t
  misc_feature (391)..(391): n is a, c, g, or t
  misc_feature (394)..(394): n is a, c, g, or t
gctctgctggtcttccggtctgctcgggctggtgggattgccggtgctgatcatcggcttcgtcaccgcgcacgccattgcccggcgttttggccggcccatcgaggcgcttggccaaagcggcggacaacatcggccaaggcaatttcgaagtgacgctgccgatttcctcggcgatggaaatgaaccagctgaccaagcgcttcgggctgatggccgaggctgcgcgagcatcaggcgactaacgtggacgaattgctggccggtcagcaancctgcaggcggtgctcgacagcatcgacgacggcttgttgatgatcgaccgtgaagggcatctggaacacctcaatccagtggctcagcgtcagttgggttgggacagtgaccgtcntgncaaggcctgggcaccgcg

SEQ ID NO: 667786 - DNA, 105 bp, Homo sapiens
atgggggtcaagaattggccctggatgaagctctaattcaagatcaagcagatgatgaagagtgcagaaagagtgagggagatggcatcattatggtaggtggtt

SEQ ID NO: 667787 - DNA, 180 bp, Homo sapiens
gatccagatcccgttcttcatccagtgcaagcacattatagcatatgggtatgcccttactggagaatgaatctgtcatatgtctgattacgttcctcatctctttaaagtctcaattcttacactcttactgaggcccacccttaccaccctattaaataccggaacctctgaccttat

SEQ ID NO: 667788 - DNA, 294 bp, Homo sapiens
  misc_feature (170)..(170): n is a, c, g, or t
  misc_feature (235)..(235): n is a, c, g, or t
cagattatagtatccatcttaaatatggtggggactaacagcagggtagatggttaccttaatatttttggctggggaccatctaccggcctatatactacacttagagaaaaagtattacatatgggttaattttggaaacttcaagtatatatggccttaatggtctnctaaacccgtgtaacacggcggctggtagacattgttaatataggtaataccttaattgatatantggagtttaagggactaactcttttcctggtttaatcatggtatgctcaggcgcggggt

SEQ ID NO: 667789 - DNA, 317 bp, Homo sapiens
caggctggcctgtgacgtgataccaacggggcgagtggacctgaagggggacgtgggttactgctcccactggcacctgagccagatgtgccagaggttctatgcagggcaggcacgttcctcagctgggaggtttgcagaacatgtccctggaggtgcaaaccagatcagtcctgcccaggtgcagggatgagtcatacgggataaaagtggccctgtaggggcagatcacagtggtgagtctgtgaggaggtgtatcggggtgggctcagaacagctcttcctcctattgaacgataatgaagttcgacactgga

SEQ ID NO: 667790 - DNA, 605 bp, Homo sapiens
  misc_feature (99)..(99): n is a, c, g, or t
  misc_feature (528)..(528): n is a, c, g, or t
  misc_feature (574)..(574): n is a, c, g, or t
gctttatgtctttggatcttttgaaattaattttgactggaattattttcaaaacaaataggcaaaataacactttatcattatcattggtcatatacntagtgcatttgtctatgatatgtttttgagtatatgacactgaaatattagtgtatctatgatactaaatcatttttatatggctaaaatcatcttcagtaagaactctcttaggatatgaatttaagtgaaaatttactgtcttttttttaaaacatgatgaaacagtaatctatagagcaatttcattagtatatgtgagtaatgatggtttagttaactctacaggctgggtaagggctcataagaaagcttctaaagctctgtgctttgtgttcctctgtgaatgtccattctacttctctttctaataatgcatgcttttctttttgtaaacaaaatgttgacttcatggatcaattaaagagaattgtaaaaacctaaattggcttcagttaacagttaaaaaaaaccccttcaattggaagnaaaaaaatttaattcatagatttcaatccacacaaaatcatgtcgncttcccctggtttacacccaaatggcctaac

SEQ ID NO: 667791 - DNA, 162 bp, Homo sapiens
  misc_feature (36)..(36): n is a, c, g, or t
ggtgctaccaggtaggagggacgactggcgcacgantgtccgcagtgtctccagaccctggcctcatgctccgtgcttgcgcgtgtgccatttcgtctctccagaggagctttcctgcctaggatcatcattgtcccctccctgtgtctcttcggggatcct

SEQ ID NO: 667792 - DNA, 715 bp, Homo sapiens
ccagtcggctctggtgtgggcagcttggggctgtttttgagcttctcatgtgtagaatttctagatcccccgattacatttctaagcgtgaaaaaaaaaaaaaaaaaaaaaaaaaaaaaaaaaaaaaaaaaaaaaaaaaaaaaaaaaaaaaaaaaaaaaaataaaaaaaaaaacaagagaaggcggaggggcgccgccggcgagtaagaactctaccgcgcgggggcgaccagcaacatgctttgccactgtcattgattagtgattcaaaagacaggggcgccgcagataaaagggaggccgaaatatattatatgacaacgatcacagcgacgggggtgctttacaaacacagaggaggccgaccgaggagaagacaacagctacccatgccacttccaaggtgagatggacagaccaacacgacatataggccagcggggggggggagacaaacaaacccgagggggacgccagaaaatcagaaacccgacaggaaatatggaaaagcgccgtctcatcgagaggaataaagaaagacacccatggaaacgcgagtgacacaagacggcagggtgacaaacacaccaccagcccatatgatgagtggacttacggccgaagagacatcgagttgggccaatggagacgagaatgcagaatacaagataaaatcctgttatctacaagggagcgcaggaaaaataaaaaacga

SEQ ID NO: 667793 - DNA, 359 bp, Homo sapiens
  misc_feature (221)..(221): n is a, c, g, or t
ccagtcggctctggtgtgggcagcttggggctgtttttgagcttctcatgtgtagaatttctagatcccccgattacatttctaagcgtgaaaaaaaaaaaaaaaaactttcaaatgcttactgggaattactgtgtgccaggtgctactacacacacacacacagcatatagaaaccttgaccaacactattaaccaacttgacctagccaacatatgtngcacactctacatactgactagaatacacattcatttcaggcacacatggagcattctctcggatagaccatatggttggctgtaaatcaagtctgaaatatattttcaaaggactgaaattgtacaaagtgtattct

SEQ ID NO: 667794 - DNA, 266 bp, Homo sapiens
caagactacttttcccttaaactcctaggtgcacttttgtatcgtattttattagctatctgacagcctggggaaagacacaaagaggcggtaggtgcccatgacaactggtgatcaaaaagcccaacagaagctgggcgtggtggctcacacctgtaataccagcactttgggaggccaaggcgggcggatcacctgaggttgggagttcaagaccagcctgaccaacatggagaaaccgtctctagtaaaaatacaaaactagc

SEQ ID NO: 667795 - DNA, 522 bp, Homo sapiens
acccgaggatctcctcagcgaaaagatactatctgaatcagctctgaagatggatatgatctagaggagtgagtacaggcccactcacaggaggagctgtcatagagtatgtgtgatggaggatcagtgagacttagtctgctcagaatatgcatggagtggatctggatgtgatgtgtgagctatcattagcggcagattccaaatacagtgatgtccttctcctcaatagggcattcgcttgggggttctgccatcattgtaaggaattggccttcctcattcagcattctctgtaaggttgcatttggggtcagaagaaatctgcaatggtagaattgagggaggtaatcttgctagtagacagttttaccctgaagcttgtatgtcatttcatctcaagctctgagcagttcagtgcctggatgctctctgggcatctagacttatgcctccagacccctccgggcactggccatgtgtcagtttttaggccaccttctttctgatgatggtggttga

SEQ ID NO: 667796 - DNA, 1133 bp, Homo sapiens
agagggtgtgtctgctgtcgtcgtgttgtgggtctgttgcttctttgttgtatgttcgtcgttcgtttctgcgcgcgtcctttttccgtggttttctttctttttctcttttgttttctgtgtgttgtccatcgtgcggtccgctgtctcgatgtgtcccgctgtctgcttatccggtgaccctgtttccactgttcttttgttttgcgcctgattttggtgttatatccggtgcgccgggcccactgttgggcccctgggggtgtgcatcccctttgcgtgcctcttgtctttgtgcacagggccgttagcgcgccagtattgttcgttacccctgtggattgcccgcccgtacctgtggttttctgacatgtggtttgttcgctttggaactcctcctttccctcattccgcaatccgcgcgtgggtcaagcttcgataccgttggcccctcctattatttttaccccctcttgcttaacccgttttatcaatcctctgatcaagggtgagcatcaaactctaagtacgcctctgattcggccccactgcgagcagttagccccacacacatcttcatatggagagtccaccctagccatcattctgactatcgacattactaataagtggctcctttaacctttccgcccttttccctaccccaggacccctctgattactcctgccatcatgacccttggccataatatgatttatctccacactagcagagaccctaccgtacccccttcgaccttgccgaaggggagtccgaactgagtctcaggcttcaacatcgtaatacgccccaggccccttcgccctatttcttcatagccgaataccccaacacttattataataaacacccctcaccacctacacattcttcctaggagacacacatatgacgcaccttctcccctgaacttctacacaacatattttgtcaccacagaccctacttttaacctccctgttcttatgaattcgaacagcatacccccgattccgctacgacccactcatacacctcctatgaaaaaacttcctaccactcaccctagcattacttatatgatatgtctccataccccattaccatttccagcattccccctcaaacctta

SEQ ID NO: 667797 - DNA, 362 bp, Homo sapiens
  misc_feature (6)..(6): n is a, c, g, or t
  misc_feature (8)..(8): n is a, c, g, or t
  misc_feature (13)..(13): n is a, c, g, or t
  misc_feature (16)..(17): n is a, c, g, or t
  misc_feature (31)..(31): n is a, c, g, or t
  misc_feature (83)..(83): n is a, c, g, or t
  misc_feature (118)..(118): n is a, c, g, or t
  misc_feature (142)..(142): n is a, c, g, or t
  misc_feature (157)..(157): n is a, c, g, or t
  misc_feature (174)..(175): n is a, c, g, or t
  misc_feature (178)..(178): n is a, c, g, or t
  misc_feature (187)..(187): n is a, c, g, or t
  misc_feature (199)..(199): n is a, c, g, or t
  misc_feature (201)..(201): n is a, c, g, or t
  misc_feature (222)..(222): n is a, c, g, or t
  misc_feature (232)..(232): n is a, c, g, or t
  misc_feature (245)..(246): n is a, c, g, or t
  misc_feature (254)..(254): n is a, c, g, or t
  misc_feature (257)..(259): n is a, c, g, or t
  misc_feature (261)..(261): n is a, c, g, or t
  misc_feature (277)..(277): n is a, c, g, or t
  misc_feature (300)..(302): n is a, c, g, or t
  misc_feature (312)..(312): n is a, c, g, or t
  misc_feature (321)..(321): n is a, c, g, or t
  misc_feature (345)..(346): n is a, c, g, or t
  misc_feature (348)..(350): n is a, c, g, or t
tgttangngcctntanncctttcatttactntcatgtccaggggtgctatttacctagaaccattgtctactacaattaccanttacattacaaagtgtgtggttttctttttcaagnaggttcaattaaggcaataagagngtttgctggagaagnctattgtttactgaaannacncaatgaagncaaagtactgangnttttgcctacagcttggtctnttatgtaaanaggttaaatatannagctaagnaannnanccaacagtataagtangtgtttgccattgtcatatcaannntgctttgtancatactaangttacataacttatcgatcaatannannncatttcaatgtt

SEQ ID NO: 667798 - DNA, 341 bp, Homo sapiens
cactcggctccctaccggctctgatagtgaagcatctttggtgataggagtgctatcttgcttggttttgtttcctttctccttagtgactcttctggattcatattcactttcaagctctgactctgattcacaatcggaagaactgtcgtctattgaactacatccttcctttgaagaatccgaaggtgtgcatttgtcattttccttctccccatctccagaatcactttttccttgggcttttgagctcctgtgggctgccctttggttgtctaggcctgactaccctccactctcactgttctgctcactggaggagtcctcactgctggactcat

SEQ ID NO: 667799 - DNA, 538 bp, Homo sapiens
gggtggtcctctcttactttcagtgaatgccctactctgtctatggagtagctattctttcactactttcttttcttttctttttcttttttttggagaaggagtctcgctctatcgccgaggctggagtgcagtggcacgatctcggctcactgcaacctccgcttcctgggttcaagtgattctcctgcctcagcctcctgagtagctgggattacaggcacatgccacacctagcttttttttttttttttttaagaccaggacggggtttggcatggtgggccgggggggcctgagagtcggggcctatggtgatctggccggcttgggcctcccaagggggggggatggaccagttcagcccaaaggtcaagcctcttaacattcttttttcttatgccctctggggggatccctagggggggtcctggcttctcaatgttggaaacaaattggcttatcagggtttggagtgggaggttcagaagaaaaggagcaatttacaagaacattttggtttcatggttggctgggt

SEQ ID NO: 667800 - DNA, 323 bp, Homo sapiens
  misc_feature (248)..(248): n is a, c, g, or t
gtctaaatccccttgtaaatttaactgttagtccaaagaggaccagctcttgacaccagaaaaactgtaggggggggttaaaaattttacaccccttggtagggcttaaaggaggccaccaattaagagagcgttcaagctctaacacccacctatcctcaaaaaatcccagacatatatctgaactcctcacacccaatgtggaccactctatcaccctattagagaaactaatgttagtatatgtnacatgaaaacattctcctccgcataagcctgcgtcagattaaacactgactgacactaacagcccagtatctaca

SEQ ID NO: 667801 - DNA, 362 bp, Homo sapiens
  misc_feature (30)..(31): n is a, c, g, or t
  misc_feature (73)..(73): n is a, c, g, or t
  misc_feature (99)..(99): n is a, c, g, or t
  misc_feature (112)..(112): n is a, c, g, or t
tccttctcggggggaggggggggttcccgnnttgctctttggttctggttgggggttttggccccgggctccnccgtggcccaaggcttgttagtgtcnaggttttcccacngtgcctcagggccttggtttaaatggcccgggtagggggtgcttcctccctggagaacagtgtgggcctggccattttcaacagccacccattttcccttacctccggccaggacaaggcctacctgcaggacttggtggaggggatggattttcagggccctggggagacctagcccttgctcctcatggggggcctcccccccccctgttcccccccccctcaaccaataaattggttcctggtatga

SEQ ID NO: 667802 - DNA, 542 bp, Homo sapiens
  misc_feature (22)..(22): n is a, c, g, or t
  misc_feature (24)..(24): n is a, c, g, or t
  misc_feature (61)..(61): n is a, c, g, or t
aattcccaattaattccattanangtaaccttttttccgaagccccaagggttcccacttntgtcccccaggcaaatggtccaatccaatggtacgattcatatcctcactgcagttgtgaacttcctgggctcaagagatcatcctcctgtctcagcctcccaagtagccaggattacagacacacacccaccatgcccagctattttttttttttttttttaaatacacagggtctcactatgttccccaggctgatctcaaactcctagcctcaagcaaccctcccactttgggaggtcaaggcatacgtatcacctgaggttgggagttcgagaccaacctgacgaacatggagaaaccctgtctctactaaaaatataaaattagccaggtgtggtggcgcatgcctgtaatcccagctactcgggaggctaaggcaggagaattgcttgaacccaggaggcagagattgcagtgagccgagatcacgccattgcactccagcctgggcaacaagcaaaactccatctcaaaaaaat

SEQ ID NO: 667803 - DNA, 660 bp, Homo sapiens
gggcttaatcctggtgcagggggcgagcatggccgctccggcgtagtagttacccacattttcgctgtgactggttgtcatgcgaggtaagtgtcctggcggagaaggatggggtctccaagctagcgaaggtggactgctggcgtgtgtgtgccgagcatgtgatccactggcccagatcgcacgaggacaaggccttatgcagagttgtggatggggactcacccccgaggggatgccaagatccttgacaatgcgcattctcagcagaaggacccgtaagccagtggattgctgagaatccaggacagctttgggctcatgatggtcaaggacgacctttaatggtcaacctgtcccttctctcttcaagagtgctctcagttgtaaactacccctgtccgatccagggacaacctatacacaggagctggcagagaagctgcgatctccaggctccgcagccactaccccgatgccaaccagaagccagagatggtcattggcctcagccccttccaggggcttgtgtggcttccggccgagcgagggagcatgtaacctttctaaagcaaggtgcctgaagtttcagttcctgatcggcagctgaggcagcaacacacctggaagcagagcatgagccatgactcccaggctgtg

SEQ ID NO: 667804 - DNA, 402 bp, Homo sapiens
acgaattgttcttagtatttccttttgaacattttcctctctcaaggaaaatgtttgagaaggtggctagaggggaataaaacttaccagcaggcccaagtgtgcccgtgacaggaactcttctccgccacttgagttgaacccctggggcagctgctggctccggtggcccgccccaacctgtgcgtctccccaggtgcgtgagcatctgctccctggccttcagaatggacgggatggttctttccgctccagaaacactgaaaccgggcccatttcaaaactcggaacttgtgaagaaaagtgagttgcaaatttaccgttttttttaaaaagatgcaaaaaccttttgcccccattggttgccggaatgaaaaggaaagcccgggccccgccaacctt

SEQ ID NO: 667805 - DNA, 283 bp, Homo sapiens
ctactatcattaaggtggtgatggttgggatcgaagatgagggaaaatctgtaatgctccctggtccctaggctggttgtagagtacagatggtggtatcattacacaggacagtgtacaagtggaggagggtcatggctttggagagagagagagagagagagagagagtgtgtgtgtgtgtgtgtgtgtgtgtgtgtgtgtgtcttctctcaaggatcctgtgagatattctgatataccttcttatcctctgtatatattggagtaacatgatggcgcag

SEQ ID NO: 667806 - DNA, 1010 bp, Homo sapiens
  misc_feature (805)..(805): n is a, c, g, or t
acaacaggcttatggtctgatgctgcgttttaatcggcacgatggagttctaacgctctgttgcccagtgctgagtgcatgtgatgctgaggtcatgccattgcactccagcctggtgcttgacaatgagcaaaactctgtctcgaaaaaaaaaaaaaaaagcaatgggatgttagaatgaaataggtgtgattatcaattgctatattagttccctcttgcttgctcataactaatgttcctcatgcaacacatcaattgcacttgaacaacacagcacaagaatttgattgcttgcttacacagtctctctgcagtgtctgtgaaatttttgcaaatagagcttggtattggcacactacaaacattgaaagcaagttgtgtcggtggcttcaatgagaatgtgggacagcagtgctcaatgtgacgtgctcatagagacccatataccatggggagggtgcatcaatgtgggagacagactccgatattgatacactttgtgattattttaccatgcttatccaaagaactcgcttgcccatccatccccttttgttgcatcattgtgcgacatattagctcacgccattcttccccctttatctctctctcgtgggccgccgccatctctcttatcttcagcgtttgaaaccccttttttccccactcccttttgaggtcgttctcgctctgtcgctttctcccgccctctttatatttaaagcggtggcgtgtacagtggcacgatatcaaaccattagtctgtgttacgtaccgtcgaatttcactaatgaatatattngctggtgcgtgatataaaactcctttcccacaatcctatttgataactgcactcccctattaatacgctttttaaacacacaaacgccattaatcgttggcagaaaagagtatcccctatatcaaatttgtgtgggcaacaccacaactagcttgccaaaaactgtgtcgatgatggtttgtttaccccgtttataattacccct

SEQ ID NO: 667807 - DNA, 170 bp, Homo sapiens
tgaacattcgtgtcagaagcaaggggtggagtacgtgcctgcctgcctggtgcaccggaggaggaggagggaggaccactgttcctgttcttctcagaggcagacccttggatggcaggacgccctcagcagctggggacatgcttgtggttggaggacacgaatgttca

SEQ ID NO: 667808 - DNA, 134 bp, Homo sapiens
tacgcatttctctgcgctccctttgtgacttgaagaaccctgacttgtttctgcaaaggcactgcatgtgtctgtgttcgtgtaggcataatgtgaggaggtgtggagaccaccccacccccatagtcaccatg

SEQ ID NO: 667809 - DNA, 648 bp, Homo sapiens
cctcaaaagccccaaaataaaggctcattcaaaaggaggtggttcattttggtgtgccacccgtcaatacgcaacccaacgtctaacgggcttccccagaataaatggtcccagcgtcctcttaaaagatgccttaatccatcccttgagggccgcccttagttgaaataaagcagaaatgtggttctctttggcagctggccttctgcttttgaggtgcacattaatcagaatagcccggattcttttcagtgaattttgataaaggcttccagactctttggggttggaaacgcctgttaggattttcaagtcccatcatagaaaattgaaacccaaagttgttttgctgatagttttggggaaacgtccatctttttaagggattgctttcatttaattttggcagggcctcccccaaagatccagcctcatacctacatcagacaaaaaatcgccgttgttccttttggactaaaggattgggttttgctttggaaacaccccctccctttgcaaaagccgggcaaaatgaaagcagattaccctgattttatgggttaccaaattggagaaaggatttaataaaacccgttaatttttaaactgcccaaaaaaatgtttttcccgatattaatgtttcccaga

SEQ ID NO: 667810 - DNA, 278 bp, Homo sapiens
ctctgaccgtgctctgtcggcccgagacatttggaagtcctgggggatgctggcaaatctcagctgttgctgaggagggggctgggaccccttcccatcccaaccttgagccccaggagataccgcgcccacacccaatcttggacactccctatctggttggaagagagtaaccagtttccagagagccagagagtgagagagagaaagaaagaaagaaagaagaaagaaagagaaagagagaaagaaagaaagaaagaaagaaagaaagaaagaaa

SEQ ID NO: 667811 - DNA, 175 bp, Homo sapiens
ggtttaaaatctgtaaaattagaggattgcactagagaaacttgaatgctccattcaggcctatcattctcgtagagtgtgttctgacccatgggctgtgtcaatcatacttaataaaatgataggcctgaatgtagcatacacgtttctctagtgcaatcctggctaccgagct

SEQ ID NO: 667812 - DNA, 1364 bp, Homo sapiens
agcggactcgagtcacttcgggtaaggcgggagcccgagcaaggtcaagggagggaagtgctgcggttgcctacggtagcgagcacagttcgctctacgcatctgagcgctcgcgacgtccgcgcgctcacgccggatccctgtagcccgttcgctttcgccaagcctggctcacgtggaatgggtagtgaggctcggccctgcgggagctcccgatggcgtgcatgcggcggtcgattgagggctggtggtccgggatcgtgcatgctgcggcgacgccttggcgcgacgaatagtcccccatcttggcgtggacagagaaacccccacgcgtgtattgaattctcctctcgcaacaggaggcgccaagctccgatgtaagaaagactgtagaagatcaaagtacacgcatattcccttgatacgctcgagcagtcacgcgggggacaccttgccgatctgcataggcatgacttgcacgattctcaaaacgaaaaacgggcagactccctggttggcaaccttacgtaatggaccactgcgcgtgatggaggtagggttctagcacttgcccactcttggccccgtttccacccatgggcatccttttgagtggcgggcgccctgaacgagaattccacagccggagaattcatgactcgggggcgccgcgagatgtaaaaccagtggtctgtgggccccaattacattggggttgatagctaaagccaagctctttccgttgttacaacggaaccacccttttcgagctccgctctcaccttcagcttgctttggcgcgcccgattaccgtggcttgtgccggggaggccaggggggatacggggtaggctcaattaggaaccctaggtcatttggtgtcccggggtctggctcgccacattgccctggggttccgcccattcggactgggttaaactgccccgggcggttggcgaagggtgtttgggtcccgcaaataacaggagttgaacttaggaaaagagagaggttcccaacgtgtgaaacccaaagcgccttaggccccaaccacaaagtttggccccctattccggcaggacatccactggccctggtggaacgctccggattcgcggagctccttagagagggacgcaattgcccgccatatacgaaatcggggggaggggccccacgtgataaacacacacgtttatcttaggctccaacgcacaatctcccactggggacacaagtttgttagaaagccgagaaaatagtcccgagcgtgtggtcacaaaccaattgggttcgaggggacatatggtgtgaaccacggttgtcgtgtgaagacccctcggttattgaccgttggaccccca

SEQ ID NO: 667813 - DNA, 431 bp, Homo sapiens
gaactggctgctttctgtggaaatgctgaatttatgccacctatttttctaatttttgtcctggatttctgcccttctttcctaaaagggggtaagcaagtctcatgaaataatgcacttttcagttagcctgaaatatgcaaataggagggagataccatgactaggcagcccagcccgacattcgtgttatattgattgccctgcctggttggtggctgtttaggggaagcagccagagaggtcattttcattaattttaacatgaagttagaatgtacccatttccagtagtctcttttgtagaaagtatatggaagttcataacaccaaggaatgttgcctccttctctggccacagttttctcatgaggggacataagacactcttaacagcatctctagccaacaagggtgcagttcatgggcag

SEQ ID NO: 667814 - DNA, 112 bp, Homo sapiens
ttagacggtaactccgagatatctggtccccggggacaaatgaagaagtgtaaggccggtggtcggcaccctggagggactctggagacggatcctcctgctagccgagcag

SEQ ID NO: 667815 - DNA, 250 bp, Homo sapiens
gcagccctgttccaaccccttaagcttcagaagctgcaggtgaatcagctttgccagcctcaacctaaggagccatgcatccccaaagccaaggagccttgccaccccaaggggccggagccttgccacccaaaagggcctgagccttgccagccaaaggtgccagagccttgccacccaaaggggcctgagccttgcccctcaatggtcactccacgccgagcccagaagaggaccaagcggcggtctg

SEQ ID NO: 667816 - DNA, 175 bp, Homo sapiens
gtgctggaggagcctgctgcacacaccagtgcacctgccctacgccgttgtgtgcgttctcatctcttcctccgctccctgctgctggagagtcagtgccccatactgagttttactgtgaaaagtgctgacatgatgaatcagtgcgtgcacatgccatttcatgtgttgacag

SEQ ID NO: 667817 - DNA, 140 bp, Homo sapiens
tccagtagccgagcatacatgcaatgcctgcaggtctgacgtgtatacaccaatgcggtgcatgccatcccatgaaaaagttccgccgacacgtgagcaaccgtgctgagcttcaaaatatcgttaagctggagcctggt

SEQ ID NO: 667818 - DNA, 229 bp, Homo sapiens
  misc_feature (66)..(66): n is a, c, g, or t
  misc_feature (152)..(152): n is a, c, g, or t
  misc_feature (198)..(198): n is a, c, g, or t
  misc_feature (213)..(213): n is a, c, g, or t
ctggggtgaaggctgcatgatttgggaatgtgtacacacccctgcttcggcctcaggctgcccgcntcgccgcagcaggctccctgtgtcggcatgctggggctggggtcagcctgtccctcatggtgccctcagccagccacgggcaactnactgctctgtccaagggggcagcgtctgggctgggaagtggctggnctagaggtgggcctngacgccgccgtctttt

SEQ ID NO: 667819 - DNA, 366 bp, Homo sapiens
gattacgtgatcttccgtgttgctcgagtaggcggcggtaggtggcaatcttctgtcaccagtcgtgacttgataaacacttagcggatggtactcctgattctgccgctcactatcagctcgcacatcgcccagctgggcttcaataccgctgatcagcgcctgtatatgcgccagctgggctccaaagcgcgcctccgtttctgtcagtgtgtcttccaaggcagctttcatgctcagctgtgactgcagatcactctcgcgaccctgcaagggtgcgccgcaggtcagtcacctcggacctgctcatctggagctgctccgtgtggccagcgacctcccggttcaattcttcagtccggctgg

SEQ ID NO: 667820 - DNA, 181 bp, Homo sapiens
cccttccccccccccgtttttccgccatccggaagggcgctgggtttttttgggttttttctttttccaaggtcccctttggccaagggccctttccgttttttccccctggttccgttgttttttggaaggggtgccttttgcccctttccggaaataaaaccccccccttttttttgga

SEQ ID NO: 667821 - DNA, 1004 bp, Homo sapiens
gagtggtgctcgaaagtgtagcttatacctaatgatcagggccaccattgatcctcaccgagatcaataccggatatcaaacactgggcccgtcagactgttgccccggaaaatctgtgtggcagctgtggagagtgatcactcgctcagcaatgatcatcattgctggaactaagctcactatctcttatccacattcgtattatccaaatagcaacccgtcttcgtccaggatagtatgaacgtaaccacgctagacatgccattgttaagctagcgagtgcgggctggcatcaatgacataaaggccatcccttgtactgacgtaaagtaaaccacgaagctacgcaagcactagtcactagttgcgaatggtgaacctatgttggagagcccgatccggttgttatgcaagaacgatgtctgtcttcttgacctgatacacaggcaatttaatgccagataattccttcctggaagatgtttggctagacgtggtgagtacattgaacccacgatgaatccacaaccctatgcttcaaaggattgacgtgaggtgtatatggactcagatcatatagtgcaaaccatgattcggtctagatgcatggagcgtgtcctgtggttattgtaggtctcagaaatgaacgccatcatatatggactgtatacattggtctcatctggtacgatacttagtgtgctgcgctcgtgaccagtccgccttgacccgctacatacgagtaagacctgatggtcatagatgtgactgccgggcatggaacacctcatttttgaagaaggaagaactctgaggattgcccggaaatcagcaagctggggtggaaccttagttcctttcaaagggcggggccaagtgtaagcaccttcatagggctgcaaaggaagcactaatcaatcgttactataaggacttaaacgaggcctccggttgaaacgcgaaaaagagggccaaacgggagaacatttatggtcgcgaaaac

SEQ ID NO: 667822 - DNA, 212 bp, Homo sapiens
cgaggatccccttcgtcgaacaacaacggcggagttcacggaggcttccagctgtttgaccgaacaggtcatggcagatcctgtacagccagtgtggggacttgatgagggcctgggacaaaaccctaccaacgccgagatgctcaaggtcctggggaaccccaagaggtatgagatgaatgtaacggtgctggacttagagcacttatctg

SEQ ID NO: 667823 - DNA, 206 bp, Homo sapiens
tcagagctgcataatgaagtctagaagataatcaaggcaacaattactgagaacttggctgcttgcttaacctggcaagtctaagagcctctctttaacctttaggaattagagtcataggtttgctgcaacatgttcattgtaaacaaactaagtagagctcttattgcccaggctggagtagctcttattgcccagtctggagt

SEQ ID NO: 667824 - DNA, 246 bp, Homo sapiens
ctcttccaagaagttcccgggtctctaacaggtccttcagtaacacctccttagcaggctcaggaccgacatttcagcttgttctgcagctcgcccctgagttagctgctgctcgcccctgagttaactcaggggcgagctgctgtggacgcgtgtagatgcttcaacgatgcctgagcttgtggtgctgtcagggacgagtgtcgtgtgagtggagcctgggctgctgtggaaggttgtagattc

SEQ ID NO: 667825 - DNA, 108 bp, Homo sapiens
  misc_feature (1)..(1): n is a, c, g, or t
ncgtatctctacaataacggcagtatgcaccaccatgtaaaagtgagctcatacgtctctaaaaaaatgtttcctttataaaagcacattgcggttgaatcttaaggt

SEQ ID NO: 667826 - DNA, 4666 bp, Homo sapiens
gctcagttttttcgttttgatggctggctgatcaacatcgagaactcgctgagtctggccgctgtggggaacatgcctcctttcctgcggtacctcaccacacagctgcaccggcaggtcccagggggcctggtgctctggtatgacagcgtggtgcaaagtgggcagctcaaatggcaagacgaactcaaccagcacaacagggtcttctttgattcctgcgacggcttcttcactaactataactggcgggaggagcacttggagcggatgctggggcaggctggggagcgccgggctgatgtgtacgtgggcgtggatgtgtttgctcgagggaacgtggtcggaggccgattcgacacagacaaggtgggtggtggctttcgtccaagggccagcggcccagtgcctcccctgggacctcatttcctcatggaccttccattcccgtctgcacctcaaaggaatgacagcagctgttcttcccagagtggggatcccgtggcactgagaaacaggtgtcctgccccggccaagctatgtccccactgaaacccctttcccggctatttctacaatcagataatgtatttttgtgtgggtgttaccagacagaggcgcgtcgttcccccgctgtccggtcctcggcgggcctgggcctcctgtcccagctgcgttccttgatcttccccgtgagggaagcctgcggggacgcacaggggcctgcagcgcctctcactgcggctcaggggcgaggacgggggaggtgcccagggtttggggatcggtaggtgtcatgacgagggagcattttctggcaaggcaggtcacaccagcacagaggaaggagcggggccaggccggtgcccctggcgtgggatgcgcagggctctgcctgcctctggtctatcagtcctgcccgttcccagagccccagggatgttctcagcccttaatttagctttaaatgagtaaattaatccaataactaaagagcctctttactgcccgtgattctgataatcgaatgagaggtgtgccagaggacaatgggaccgcgcagccacagccagttggggcccagcccctgcccccctgcccttgcagcagcgctgaccgcctctcccgcgccctcttctggcgggcttgtggaacgacgggggtgatgcccagcagcctccagtcgttggagctgatccgaaagcatggcttctccgtggctttgtttgcccccggctgggtgtatgagtgtctggagaagaaggatttcttccagaaccaggacaagttctggggccgactggagcgttatctgcccacacatagcatctgctccttgcctttcgtcacgtccttctgcctgggcatgggtgcacggagggtctgctatggccaggaagaggcggtagggccctggtaccacctgagcgcccaggagatccagcccttgtttggagaacacaggctgggaggggatggccggggctgggtgaggacgcactgctgcctggaggatgcctggcacggaggcagctccctgctcgtccggggtgtgatcccaccggaggttggaaatgtggctgtgaggttattttccctgcaggccccagtgccacccaagatttacctgtccatggtgtataagcttgaggggcccacggacgtcacagttgctttggagctgaccacaggggatgccggcagctgccacatcggtggcatctcagtgttgaacgaaacaagctcaagacacagcctccgacccctccgggtgccccccaccaagctggccagatgggtgggccgctgcggccggcagctgagtgggggctgggtccagcactgctacgaggtgagcctgcgtgggtgcctgctgctagacctcctcgtttgtttctcacggccgccgggtagtcgggaggaggagagcttcacctgtcggcttggagagatccaggtggtggacgctgccagcctgctggcccctctgccccaggtgcaggccgtcaccatctctcacatccgctggcagccatccgcctctgagcgggaggggccccctgctctgctccagctcagctgcaccctgcactggtccttcctcctctcacaagtccgttgcttccgaatccactgctggggagggatgagtgatgactctccgggcagggagctgccgaggccagagatgcccatgttcctggggttggcttttgccacccagtaccggatagtggacctgctggtggaagccgccgggcccggccaggatcgtcgcatggaatttctggtggagcctgtccccaaggaagggttccgggtacctcaggccgagtggggcagggcagttctgctttattcagcccctgcatgagcggatgctaaggccgggtggtctcctggcctcgggctgaggcctcttcccggctgtctgcccctggcctgcgctggacctgctaagtgcccacagtggcagcgaggtcccggtcccggggctggggtgggagaccccgggctgagtgctgtggctttctggtggggggcgatggaaacaggaaaccaagcagtgggatcgcagcgttggtcactgcgaggcgagtggcgggctttctgtttctgccttgtccctccccacggtacctggttcccaggtgaaaatgaaaggaggggagaagttgagaacagaacattccataaaggatatttcctaataggctgcaagatgctgatgccgagaatgatgattttctttcctgcagatgaaactattagaaagggtcttagattgtggcaggtaggctttggagcaggcgccgagacatttctgagcatgaggacgagctacagcagctcctggggtggggctgcctgcgggatggcgggagaggatgccctggagaaccgtcctcccagtgtggaaggcccttttccctgaggagtgggcattctgggccagccggcgctggcttcgtgcctccacgtgggccagccccagctgctccgtgtttcctggcgttggcaatttactgtgctgctgagtgtgaggtcatctccggagcgttttcagcagcccctggctctgcggcgtctcttccgggctgtgggcatgcagggaagtggctctgaggcagtctgcgctgtggccctgcctctgcccagcgagaggccgtgggctctggacaagccgcccttcaggctggggtagcaggtcagtccaggcaggaagcagcacctgccccccgcgccagcccagccccagcctgagtgcaggagctgcaggacccgcgggggcttttccagctactctgttccttcacgtcctcccttctcagcctcgtccaagcaccgggaagacctccaggctgaccccttgagcagcagtcagcacaggtgcgtgggggcgtgagggaggcagggtcttcaccacaggcgccttcctctgtccttcctgctctttcttctctgcccaggccgctgcagctgcacagcctctgctacacctgggctgcctgggaggcttcctggtgtggtgtctggaccccacggccttgggtcatcctgtggctggtctggggtggggtctgttgtggtccttccacggtgtcagtggcctgaagtccctcgcttttggggggggggtctctcacccccaggccacatagggccagtggtaggggttccctctatgtcgggcagtgctgagggctgggatgctctgtgaccccagctggagcccacacctaagggctggcatccacatcatttcaccctgcagtgagggaagaggccaccaggtggcagcacagccacacccgttcccacgtcagaggagggcaaggctgggtactcagcagccactctgagccggggctccttccaggagctgaaatccacctgtctccatcttccttgcctgcctgggtactcatgccaagcagagactgggattaggggttctgtgctcttgcctaattaggaacattctcccatgtctcttgtgtggtcccagaaggagaagtgagtttgccaaggatatggggcaggaggctccctctgctgaccccctgcagcctggagccagcccggggactgtcctgggtggagggcaggtgaacacaagctgctgccggggactgtcctgggtggagggcaggtgaacacaagctgctgccggggactgtcctgggtggacggcaggtgaacacaagcggctgccgcatgtagccactcactcgactttttttcagctgtgaccattcctgggagctctttgagcctttctgtctcatttggaaccagggggaaccaggaaggggctcctggcctctctgtgtcctctgcagtgggggttgtggggggcgcagcatccacgccttgctgcccttctttcatgaagtctgttttttaagtgctggttcccccgaatattttatgcagaggagggaaaatttatagtggcaattattttctcacagtctggtgagcaggcaattaattaggagtaagggggcctagtagagcgtggcgtgtggcagaatcgcaccgccccggctccccagcccaccgccatgcagggctcgcgtgcgggaaaactaatatgccggcgtttaagcctgtgcccctctgctgggtgtaactgcgctgaaataaatgatctgacaatgtg

SEQ ID NO: 667827 - DNA, 247 bp, Homo sapiens
atcaacagatagctaagatgcaccacgtcccacaggcaggacgtaactctaggaattggagagttacacacagactacccctaccgcaggacgatcgaatgcacccatcacagcccctactgaagtagaagtcatggatgaaaccaagtgctgctgtttttacaaacgaaggaaaaggaaaaccagtagagcgccacaaatgactctggacacagacagatccgggggagttacttacatgtgcatc

SEQ ID NO: 667828 - DNA, 456 bp, Homo sapiens
gaacaggaaactcttgtctctttagtgaatatggtacactttctttcatttgacaccccttctttattgtatacagaggactcgttttgatataaaaggagttctgcgtgtaacagctcaagggatggatctggggggttatctaatttggggttgaatatggcttcattcttgaaaaaaattattgccgcctgccctgaaggggactgttccctcacttcactccaccaggaagggagggtaaccttttgcccccgtaactataacatccatccaaatccgcatggtttctggcgatggggctaccatataataaattttgtcatgagtcttgaccctaaaggtgagtaacggtttaggactcttattagcattcttgaggggatcataatagacttcttaaatggcttgaaagtctcgggccgaattcggcacgaggcaagatcctgtttttcc

SEQ ID NO: 667829 - DNA, 531 bp, Homo sapiens
  misc_feature (186)..(186): n is a, c, g, or t
  misc_feature (414)..(414): n is a, c, g, or t
  misc_feature (516)..(516): n is a, c, g, or t
tgtaaagcagctatatccatggactgcacacagtcctcaaaagcagtcatctgctcctccagcatatctgtgccaactttatcatcttcaactacacactgtatttcgcacacgctttcttaattccgctcatcccactggaactagtttagatgagccccagactaagccgtctgcttgaatgcntctgacgcactcctctaatttcgccatatctgtctcatcatcccaaggctctctcacatctcagctaagcatggaaagcactctgagacaacaagttgacaggttctctctataggtctttcctcttgtatttcataattgtggcaagtacgttccttacccttgaggcgcttctttggctttctttctatcttttctctcccttcattcatccaggatgccaaagcnagcgcttcaaatgcttcattcattcattctttttacttattctgcttagcctccccaactctccctgctcaggtggtgctttcccagcattagcgcacaggnatcccattatttttg

SEQ ID NO: 667830 - DNA, 755 bp, Homo sapiens
ggccgggcgcggtggctcacgcctgtaatcccagctctcagggaggctaagaggcgggaggatagcttgagcccaggagttcgagacctgcctgggcaatatagcgagaacccgttcctccagaaaaagcaaaaaacagaaacacacaaacaaaaaaaaaacaattggtgggtgggccgccgtgggaccctctgaaaaaagagtttcaaagaacacccatctctggttggggcgccggggtcccaaaagtgtggttaggtggacaacgtgtggccaaaatagcgggtggtccccaaaagggaaaacacacgtggcaatgagaatgtaggggcgttggggtttccccaccccgaaaaaaaaaacacgcccggggggaaccccgggtgcggttctgggaaacaatctccaagagggtggaggtctccgggaggggcaaatcagggggcgcccactaacaacacggggaggccccaaaaggggaggaggcatgcgagataattaaaaaaattataagccgcccgggctcgggggtgggagaagaacacaaagacgagcaacaaagaaacaagaagcaagaagcgaagccgaagaagcgaaaccgaacagaacaacagagcaagtacagtcagcaacagagagcaacgagccatagcaggcaggcacgcgaacaaggcgacagcaagcaacagtagaaggagagaacaggaaacagaaacaacagagaaagcaaagagaacgacagaagcagagcgacg

SEQ ID NO: 667831 - DNA, 226 bp, Homo sapiens
catcccttaggtacgagagacataagatgactgtaaactatggtcacaggcatggttctggcagtactatgcggactttatactaacataatgccaaataaacatgcagtctcagtgtgctctcgcatgtatgaatatactagtactttctgtggtactcagccaagacataacaactaggacacagagcacatacaaaaccagatatgtaaacggaaagagggaa

SEQ ID NO: 667832 - DNA, 157 bp, Homo sapiens
gctcactagtggatacagctctgtgtccagtatggttcttctaataaaaacaagctttaaatgtaaatgccaggacaacaacaacaacaacaacagcaacaaccaccaccacccagtgcattgtgcttctggtccacagagattttcaagatggagc

SEQ ID NO: 667833 - DNA, 649 bp, Homo sapiens
accatgcacaatgggctgagtgagagacggctcgcaagctgcaagcctgtacatggatagtcggcaagtagggcacgcattaccaggtactgagtgaggtgccgagcgacatcaccactgggcaaacacgacggaatgagacgtgtacaccccgactgtcaccacagagtatgccgccgctgccggagcctacatgagccaccctaacgggccgtccattacagatcacgcccatttgtgatgcactctctgtacttccgacccatcgtggctccaccaactgtcgagctcaatatcatgctgtcacctgtagcaaggaacacagcatggagggactttgccggacaggagagacaagagatccgacatggatacagacttggcataagtacctcatgctaaccactgccatccatatgagtgcgtgaccccatgagccactgtgttgagagccacattcagagcctgcattggaccgtgctgtatacatacgctgacatctaggaagaggatgacgattattaggataaggattcgggtacgacacagactctagtgcgagtcaaatcgtgagaaccacgagaccttgtgtgatatagcatactgcaggggaacccgtgtgtagagtgctcgacacacgcttttacgt

SEQ ID NO: 667834 - DNA, 243 bp, Homo sapiens
  misc_feature (228)..(228): n is a, c, g, or t
cggttacgatcgttgtagataaatcccagcatcggtgcatcggctaatttcagtatatctgctgtacgttgtagtgcacctttcgttgtatgtcccccactcacaacaataaccacaccatccatcttgctcattaatacttgtgtatcaggcaccatcaataatggtggcacatcaaagattatccagatggaattgctggcgcaactcagtaatcaaggtttgtanccgactagaggccaa

SEQ ID NO: 667835 - DNA, 480 bp, Homo sapiens
cagctctaaattttttgaagaagatggatccttaaaggaggtacataagataaatgaaatgtatgcttcattacaagaggaattaaagctctactccttttctgaatgtcatcttcatccaggatccaggctgaaggagcagcccttatttgggacatgtcctcatggcataaggcaaagagcaagaaagctagtggagccaggcgcggtggctcgcgcctgtggtcccagcgctttgggaggccgaggtgggcggatcgcgaggtcagggggtcgagaccatcctggctagcacggtgaggccccgtctctactagaagtgcagaaaaaattggccgggcgtggtggtgggcgcctgtggtcccggctactcgggtggctggggcaggggaatggcgtgagcccgggggatggagcttgcggtgggccgggatcgtgccgctgcactccagcctgggcgacagggcgggactccgtctc

SEQ ID NO: 667836 - DNA, 100 bp, Homo sapiens
ctgcctcccttctctgagtagcaggtgaggctccttcagctgctggcctggatggacagggaacaggcagggctccgggagcgtccccgcagccctgggg

SEQ ID NO: 667837 - DNA, 444 bp, Homo sapiens
aaacataaaaaagctagaagactataggttccaagaagaacaataaaagtaaaccaactgaggtgtaaaagtgaaaaagaatttggtatgtttactttacaaacaaagcatatctgtgtagaaagaattcagttaaaacattgtcattaatataacacaaatacagcaataaggtctatgatccatataaggaagagatgcatggtggaaaatttaacaaactataaaaaagaacacttccatatattttgttttttaaaaagaaaattcaataactaatgtgactgagaaatacacttatgattgaaatgtaaaacaattgcccagacataagggcaagttcataaaagggagtcttgtgagtgcagtagaaatcgtgtgttctgaatagagagaagtatttggaaatgtgaacctaactagaaacctgctgttccgtctgtg

SEQ ID NO: 667838 - DNA, 1378 bp, Homo sapiens
ggcctcagcctccctcagcagtccggagtagctagagactacaggcgccctgataccatgcccggtgctaaatttatattagtgtagttaatcagtagagacggggttacaccgtgttaagccaggatgatctccatctcctgacctcgtgattccgcccgcctcggccttcccaaagcgttgcggattacacggatgtgagccaatcgtgccctggccggtcacatgtgtccatgtaacctaactcctggttacggaggatatggaatagacaggcacatgttcaactatctggacttctgtccttgaaaccgtgtcgctgatcccatcctttgcttgtcttccttcccgctgactggcactgtggaccttggacagtgcagcacccttacactactgtggcatgcacgcacaaccgatcacacagtgacccaaaggcactctgcatgactactgtagaagaacgaggaacccggagcttgctcaaaccgtcccttgtgcaacgacgacttacactatcaagatttacgcccactgctaatacggggtcctccgtgactaacccacgtggtcaccaatatacctacattcaataattcccttaccatttctacggttcaaccgatgttgaactccactaatacgtggctctaacgtggcgaataaactaacaacacaacagcacacaacacatgtgcggcggccgcggccacagacgagtctaagaacactaggtctggggcgcgccccagagaacagcatgcgactcgcggccacaggaccgcgcacgcaaggggcggcctcaccaaaaaaccgcagggcaagcggtcaaccccaagcgttggtgctacggacacaaggcccgacttactcaccggtgcggtacagcaaacgacacacaaacacgacacaccccaccgaacaccgcacaagacactgagacactaactagcgcaacgcgaacagccgccagcactgaacagaaccaacacagagcccaacacagcacacagcccgacacagacagcacgacagcaggaacaacacacacacacacaacaccaagacagaacacacagaacacaacaacgcacagcacactctataaactgccaacaacaaagacaaacaatcaaatagcatcagacatacaacagccactaaacagacagactaaacagcgataacatgcacacatacaacaacaatcacaatataccactcacaaacagtccaagcacccacagaacacacactcctagcaaatagaatataactaactacacacaacaaagacatcaatacaaagacaagatatcagacatccaagctaaacgacatataaatacaagctccagagacaatgatagaataacaa

SEQ ID NO: 667839 - DNA, 309 bp, Homo sapiens
  misc_feature (126)..(126): n is a, c, g, or t
  misc_feature (154)..(154): n is a, c, g, or t
  misc_feature (169)..(170): n is a, c, g, or t
  misc_feature (179)..(180): n is a, c, g, or t
gaggaatagcatggtttgcatagctccatagttatacttcccgtgttccatgttcctctctgtgggcgataaactggtatccatgtgtgtgacggaggaaagaaggcacatgacgtgttcctcatnacagggcagctgttaggggagttctcangctaggggacccagnncagccgtcnngtcactgtgtatgtatagaagaccacgtgtaagaacttgcattgctcctgtttagtgctgaggcccagtgtactccgaggggaaggattgctatacaggggaagcagggaggtggcacttccacagatg

SEQ ID NO: 667840 - DNA, 978 bp, Homo sapiens
gccacttaagtaatgtatcttaggtgtatttatccgtcctcctcctttctgcctctcctcaaccactcttctcctagtaggaaatcacttttcgttcatgttatatcgagttgtgaacactgtgctttactctggtgcgtagactggggcagaccactttacgtcactggagccttgtgctctcctggtttgtacgatggaagagaaactaatactacctgccatacctctttacaggactgtgtaacgcttatatatccactgaatcttctcttactttctccctttcacttgtggtgtgtgagctctcagacatctgataccattttctcatgcttttttactttataagcaattaggctctaaagcctcccttttttgcacaaaagtctgtgtattaagaaaattaagtgtagcttgggattaaagtgcggtgagccaaccgggacccgagtttacggtatacaaattcaacataacggagaattagggggcttcttggaatggtgacaccaaagggtgggagtgggcatggtgccacaaactacttgtggtttcaagtggacaaccatacaatcatccggtgatcaaagggggaaatctctcgaggaccacaggctcacccaaaaaattctggctattacacggtgctacggtccacccatactgccctcggtgacccaacagttcacacccattatggctccagcagttgcccctctcccgagaccaacaactacgctgtgccaacaacattacgcgacaattgttgccggaaaaataatgttgccgcccgccaacactatacacgtgcccacgttcggcactcggcacacagctgcacaaccgttccctaccaaacacaagtggcttcgcgcggcaccatactagcacccgttagtgcacccataaataaccctccttgttgtgcacaggcggcaccgtcccacgtcctgagagggaacaccaccgatgtca

SEQ ID NO: 667841 - DNA, 274 bp, Homo sapiens
gagcgaccgtggttctctattatcgaccttccactcccgttgtgttgtttgaaaacaacatttcccagacttgtgtggcccaacatttaaaaataagagtcggggagttcctgaccatcctggccaacatggcaaaaccccgtctctactaaaaatacaaaaattagcctggcgtggtggttcatgcctgtaatcccagcactttgggaggccaaggttgttggatcacaaggtcaagcagcatccagcaccatcctgtcgataatagcagcaa

SEQ ID NO: 667842 - DNA, 287 bp, Homo sapiens
  misc_feature (100)..(100): n is a, c, g, or t
  misc_feature (110)..(110): n is a, c, g, or t
gggggctgcctggggggctgatgccaccattccaggagcctcggtgaagagaggatatccatctgtgtagccgaaaaaataacctggattccgggttcanggcagcccgnctgctcctcctgggcatctttctcctgctgctgcccctgcccgtccctgccccgtgccacacagtcgtacgctcagagtgcaagcgcagccacaagttcgtgcctggtgcatggctggccggggagggtgtggacgtgaccagcctccgccgctcgggctccttcccaggggacaca

SEQ ID NO: 667843 - DNA, 210 bp, Homo sapiens
tggcgtcggctggggttatattgatattggtgtgatgaaattgatggccctaaagatagaggagacactgctagggtgtaaaggagaagaatgggtaggtctacgggaggctccaagggtggggagtagttccctgctaaagggaagggtagaactgttcaaccctggtccttgctcctgggcttccaactaatatgcagaatgcggagc

SEQ ID NO: 667844 - DNA, 242 bp, Homo sapiens
tgcgctcggtggaaatgcccagccgagggacgcgaccagcaggacagctctgttgtctgaatccccaccgacaattcgaccccacacaaggaggatctacagcagcacagatcacaagaacaacaacacattgtgtgtggatgaactttctacacccttacagcaagaataggccacagtatataggcaacaacagaacagcaatatattctttcttgcagaccgaacagaaatgctgtctg

SEQ ID NO: 667845 - DNA, 118 bp, Homo sapiens
aataaaggggctgggtgaaggccctgctgggagccattagaacccagatccaaaagaagccagggggtttatgatggtggcgatttttaaaatcaggaaataaaagattttgcctcta

SEQ ID NO: 667846 - DNA, 112 bp, Homo sapiens
gtgccccatgtctgactaaatttggtattttactagagacgggctttcactatgttggccaggctggcctccaactcctgatctcgtgatccgtccaccccgtcgggtggag

SEQ ID NO: 667847 - DNA, 824 bp, Homo sapiens
  misc_feature (12)..(12): n is a, c, g, or t
  misc_feature (63)..(63): n is a, c, g, or t
  misc_feature (72)..(72): n is a, c, g, or t
  misc_feature (87)..(87): n is a, c, g, or t
  misc_feature (91)..(91): n is a, c, g, or t
  misc_feature (103)..(103): n is a, c, g, or t
  misc_feature (112)..(113): n is a, c, g, or t
  misc_feature (120)..(120): n is a, c, g, or t
  misc_feature (127)..(127): n is a, c, g, or t
  misc_feature (147)..(147): n is a, c, g, or t
  misc_feature (154)..(154): n is a, c, g, or t
  misc_feature (164)..(164): n is a, c, g, or t
  misc_feature (166)..(166): n is a, c, g, or t
  misc_feature (169)..(169): n is a, c, g, or t
  misc_feature (182)..(182): n is a, c, g, or t
  misc_feature (218)..(218): n is a, c, g, or t
  misc_feature (235)..(235): n is a, c, g, or t
  misc_feature (249)..(249): n is a, c, g, or t
  misc_feature (260)..(260): n is a, c, g, or t
  misc_feature (265)..(266): n is a, c, g, or t
  misc_feature (300)..(300): n is a, c, g, or t
  misc_feature (306)..(306): n is a, c, g, or t
  misc_feature (312)..(312): n is a, c, g, or t
  misc_feature (330)..(330): n is a, c, g, or t
  misc_feature (340)..(340): n is a, c, g, or t
  misc_feature (342)..(342): n is a, c, g, or t
  misc_feature (357)..(357): n is a, c, g, or t
  misc_feature (359)..(359): n is a, c, g, or t
  misc_feature (366)..(366): n is a, c, g, or t
  misc_feature (369)..(369): n is a, c, g, or t
  misc_feature (374)..(374): n is a, c, g, or t
  misc_feature (398)..(398): n is a, c, g, or t
  misc_feature (410)..(410): n is a, c, g, or t
  misc_feature (422)..(422): n is a, c, g, or t
  misc_feature (436)..(436): n is a, c, g, or t
  misc_feature (472)..(472): n is a, c, g, or t
  misc_feature (608)..(608): n is a, c, g, or t
  misc_feature (650)..(650): n is a, c, g, or t
  misc_feature (670)..(670): n is a, c, g, or t
  misc_feature (672)..(672): n is a, c, g, or t
  misc_feature (675)..(675): n is a, c, g, or t
  misc_feature (725)..(725): n is a, c, g, or t
  misc_feature (758)..(758): n is a, c, g, or t
  misc_feature (763)..(763): n is a, c, g, or t
  misc_feature (819)..(819): n is a, c, g, or t
atttttgctttnaaaaatgaattttaaaaatgaaattatgtgtgtttttgcttttctttaggnagtggtganaaatctgtgcctgcnagtnttttatttgaanaattaaaannatgtaanaaaaaanaactttaatcccaatagaanaaataanctttgggttnanaanggaataataaaanaataaaaaaaaaaggaaattaaaaaaattcccaaanaaaaaaaaaaattaaangaaaaaaaaaaatntaaaaaaaaangtggnnaaaaaaaaaaaaaaaaaataaaaaaaaaaaaaanaaaatnaaaagnaagaaaaaaaataatttntgttaaaaanantaataaatgaaaggnanaaaaaanaanaaggnaaatggttgaaaaaaaaaaaaaangtttggaggagnaggtttttaatnggggaaagaataanggggaatttttttgaatggggaaaaaaaattaaaantgtttgctccatttatagaatctaaaagaatggagtaatttttaaagaaaagtatttgaaaaaaggatttttttatttgcactttctttgtacgcctgcacaaattcttaatgaccttagcttccctattcataanatgggccacttcttcaacggggcacaagggcactaagggatnggtcgctgggaatcagccantntantttgggataatttgagccacggcaggcaccagaggaacctgggccaggcnggtttcaccgcagcctcccttagttttggaganagcanacacgggtgggagagggagacagcacaatcagtcctctccctgaaggcacagaaanatctg

SEQ ID NO: 667848 - DNA, 421 bp, Homo sapiens
ggggctttgttaacgaggaagacttggcaggaagggctgacgatccatggaccggacgctcctgctcctgactcaccgctagacgctctcaccgaggaacaagccggtcgggacgcccgcgcgcagcagccatggctgttaaggataccggaaaaacacccggggagccggaggagacaagggaccggattggaatagccctaacaagccgcaacgttaaagccatgaaaaaggtgtgtgcagactcgagaagaggcgcaatagatgcgagtctcatagggggaccagttcgaatgcctaccaggactttgagaatcactacaagactccaaggggtgaaggttctaagacgtgggacctgttccagatgagaattcacaagcgactcattgacttgcacaggccagctgagatagtgccg

SEQ ID NO: 667849 - DNA, 215 bp, Homo sapiens
  misc_feature (3)..(3): n is a, c, g, or t
tgntatcatagacagatgtggtcgaaacccagtcgatggcatgtcttgtctagatgcttggcctctctcgggagcataccttccttctgggtatgtacaggaccgtctttggaatgggggtcttatgacctacaatctaaaacaaagtacgctcagatcatttattcagagccagatttttacacaaaagcaaggcggacgttagagctagtttt

SEQ ID NO: 667850 - DNA, 954 bp, Homo sapiens
gagttcaacccctcgtggactccgtaccttcgtggccgttggctctcacagggcccacgcgtgatcaaacactgtgtcgtgccacagtgtgcccccccggggggctcccgcttcagggtgtgacccgaggttaccgcacgtatcctgtttaaagggatttccctcttgcatagagcgggatgagtgtcgccccacgtgggaaggggatgcacccgtccttggccagctgtgtataccccccgggtctttttggtattcagcctctgctggaatgcccggttttctgctgatggcgacccccaagctgagcggtcacaatagttctctgcgcaaaaaatcggttgttaccaaacttacgaacaggccccacccttcttcgccccgaaatgttttcaccagaaccccttctgcgagggaccaaaacttttctcgaaacatttaccagtatgttcttaccccgtttgcctgtccctaattcactgcagcaccccacaaatgttatcacaaaacaatgagttgtccaccacagttgtttgccccctcttaaaacatatgtcgtaactattatggcgccgaatacctgtaagtgcttccccaccaccgcgctgtgcccccacactatatattgtcacggcaccaagccggacattttttcttccggtggagaagaaataaagatcttctatgaaagttttgtctgtttaatactaaacaacccaaattactcctctgatttgcccctctgaatatataaaaacccaaccccatgaccttctcccggcccgccacacgatatacacaattacagcggcctccctcgtatctcccagctttttaatataaatcattggcccagaaacgcactaatctatctctctctgttcattgaatcaccactttgaaacaaacccaggagccccccctaaccaatttttcttttctacccacaaaaca

SEQ ID NO: 667851 - DNA, 1093 bp, Homo sapiens
  misc_feature (428)..(428): n is a, c, g, or t
  misc_feature (470)..(470): n is a, c, g, or t
  misc_feature (483)..(483): n is a, c, g, or t
  misc_feature (488)..(488): n is a, c, g, or t
  misc_feature (934)..(934): n is a, c, g, or t
agcgggatggcgtaggcgaggcagggcgcagagaggctaggggcaacggccaggcgtagagtgcgtcggtggagcggccgcagctgcgaggagctcactagcggtcctaaccccagccacagcaccacaaaagcacaggggaagaatggtctagcattatagtctctagatgtattactgttgtgatagtgagaggtaaccttgctagtagctagcgggacattgtatcagagaggattacaccgacattaagacccttgcccgagcagatagtaattcccataatatacaaccacatatatagtcaaactagcatattctaatgataagatcatcctaaaaatagatcatcaataaggcattcaataaatacgatttgagcaaaggcttaaattttgacctatacttccgggacctgaaccgaatanatagaaactcatggactagatgggggcaaaaagattccattnaggctattaatgncatgntatgaactcggatataccatatctttgagataaaatgaatcgcagatagagatgtctcgtaaaacggatgaattagcagaataaaattctacatgtatagtcaatagtgatgggatcccaagcttgcgaaatttgggatccaaaatctaaattaaactggaaaccacaatttgcttatactctatcttgccaaatcgaaaatcgaagcctcaatgttgaaatactcggaattaaattaaaaaaaacctaagagttccattgaaaaccaaaattttccgagactcggaaaagtattcctgcataaagcgggcattctcggaaaggagaaaagagctgcccattggagatttttgcccagagatgatcctgcccaaaagagagaatgcttggtcaagaaaaagaatgaattccctctgggggcaaataaggtcgctcaatatttgtgnaagaattaccggaaagctttggtggttcaagagccgaagaggttttttggaaaatccttgcaggatttttgaggatgacgaaaaaaattgtaattaattataaaccaataaccgcatttcacgagtaaagtgtgggacggggtaataaaagggaaagct

SEQ ID NO: 667852 - DNA, 148 bp, Homo sapiens
  misc_feature (58)..(58): n is a, c, g, or t
ggctcagtcaatcgagctcggtcccccactttatgccggggcaccatcagactgctgngtttgtctatgggtttgtctattctgaacatttcatataaatggagttatgcaatgtatggtcgtttgtgactggcttcttttagcttag

SEQ ID NO: 667853 - DNA, 424 bp, Homo sapiens
ctgagctagcagtggctctagctgctccttcctctccactaggaggtacatagcgatctgctttgatttgtctatagtcagtcactccatttcctgtctctgtaagagggaggaatggcaacagctttgggttggggagggcatctgtggttgtttctaatgggaaatctctttcaagagatgttcatgcaggctccctagggccccatgccagtgccagactggtttccatggagatagggcactgaggcacctgtgaggttggaattgattccaccatgggaggtcccttccaccagcccccaaccccaatcctagcagcaagtgctgggatgccatatttgcacctaattctgggtctatcagtgtgtcttacagaatcttggatcattaaacatatttttactgctaaaaaaaaaaaata

SEQ ID NO: 667854 - DNA, 451 bp, Homo sapiens
acagctatcatcgagctgcgtgatacacccaggagaaatctatgaccggcatacgctaaacaaccgagaaacttgctccaccagacaaccggaaaaaaccatccctatccctgatgagaaactagacatgatctatcatatacaaagagatcaaaaaagccccaggagaactccaaataatctcgaagctcagatgtgctgaacagaagtctacccagaaaaccttctactcatcagcacttcagaaattatcacaggacgcatgttcagaatctcacaataagtttattaaaaatgtaattcaagaaagtaccaacagaaaagacttactacgttttcttctctcactacatcccaatgtaacaacaaaacctcaaactcctggagaacatggttacttattgattccattttctttgttcactctcagacataaatataaacaaaattt

SEQ ID NO: 667855 - DNA, 612 bp, Homo sapiens
  misc_feature (76)..(76): n is a, c, g, or t
  misc_feature (78)..(78): n is a, c, g, or t
  misc_feature (86)..(86): n is a, c, g, or t
  misc_feature (95)..(95): n is a, c, g, or t
  misc_feature (97)..(97): n is a, c, g, or t
  misc_feature (106)..(106): n is a, c, g, or t
  misc_feature (120)..(120): n is a, c, g, or t
  misc_feature (284)..(284): n is a, c, g, or t
  misc_feature (304)..(304): n is a, c, g, or t
  misc_feature (328)..(328): n is a, c, g, or t
  misc_feature (334)..(334): n is a, c, g, or t
  misc_feature (336)..(336): n is a, c, g, or t
  misc_feature (339)..(339): n is a, c, g, or t
  misc_feature (344)..(344): n is a, c, g, or t
  misc_feature (405)..(405): n is a, c, g, or t
  misc_feature (489)..(489): n is a, c, g, or t
  misc_feature (491)..(491): n is a, c, g, or t
  misc_feature (513)..(513): n is a, c, g, or t
  misc_feature (520)..(521): n is a, c, g, or t
  misc_feature (549)..(550): n is a, c, g, or t
  misc_feature (568)..(569): n is a, c, g, or t
  misc_feature (588)..(588): n is a, c, g, or t
tcagaggatctcgagtgtatcctttgtctggggtaaatacgaacaaaatgatacttattgaatcctgaatcataantnacactttntttttcaantncacaaaatncacagtggtgctgnctgtgtaataaccactattgggaaacatcccgtaaacctgcctgttgccatgccaatggagtgactgaactggtgacatactagtttaagcatgctttgtgtggctggtagaatgccaccgctgtgcatacactattgtacatcagtgggtgaagggagggttntctagataattgggggaggntaaaattgggatttttttgttgtncctttntnganggggngtgggggtatagtactcagcttatgccctaaaataacatgtataaaaacccctgaagtatngtgtgggtgtgtacgtgtgagtgtgtgtttgtatacgtctggcaattaaagctttgtcttctggaacttagtgaattcttttcncnttttcctccagaagtatttgtnacaaganntgtaaataagagctctacttagtttgtnnaccatgaacatgttgcannaaaccttatgcatctaatncctacaaggtaacaggaaggctta

SEQ ID NO: 667856 - DNA, 200 bp, Homo sapiens
ccgtagcctcatacatattctgaaatacctcctggagatgtatagttcacagggagaaactttctggtgctgtctttgttctctgaattttcagagactttttataatgttattcatatgggcgactgtgtaactttctcttaagacttaattttctctttgtatgtctgttaccttgttaaataagacttaaatacatg

SEQ ID NO: 667857 - DNA, 913 bp, Homo sapiens
ttggggaacgtcggcgtcgcccaggaacatgtactacgtatagggccgggggcttctagcgccagggctcccgtgggaccaggacgccaggtagggcagggaacctcagtagtcgctccacgccagccattctcagagatgaatgcgtcaataacctcgctcatagccaagtccggggatgagctgctccatggctacagggggctcacggggtcacggggtcaaaatgacccacacgcctgcagccgacaagaagggacagacgggcagtcataggggcccaggaccaccgccaactggcccatgctcccccagcacgtcagcctcacctgacaggtgctccatcgatgtccattgcggtcgtaggtgatgccaactgggcgttgatgcacggctcccgcatcagtctcaaagcgtgatcttgccagcatcaggtagatcgcgggatgtctcgcattcttcgtggcacaggggcacacggtcagaggctgaaaaggggcactgcacgagcacctgccagccatcggcagcaagctgacacacactcaccttcctcgttctcatccacctgagaaaaatagctcgtccatgtccgccatgtacttgtcctgtgaagagttgatgtgctgtgcttgggggagacaccccacgctccctcctccatggggcacagacccaacacaaggcggggatgctcccacgccagcgtgcacacacacaagacccacatgtgggtggggggcaccctcacgtgcttggcctcaatgcaggcctgactgggcccggacgtggctgtcgtcctcatcaccctcgtggtttcgctggcactcttccagctcactgggggttgaccaggagccggtcagagatggacctggccagatgtctgatacaccccaggtcagcgtaagca

SEQ ID NO: 667858 - DNA, 373 bp, Homo sapiens
cctatcaactaatttggcctaattgacatttgcagaaccctcccccccacaacagcagagttcatatttttttccaattcaaatggagcatttatcaaaatagggtccatttttaagttcaggttttcaggtcttttgtcagctttaaccctaaagtttttaaatttttgatgaggtcaaatggattgttaagtttcatgttctgattgggggtagtttatagaaagccaattgatatttgtgcccggcatttaaatcccgcaactggtaaacccaaattaagtttaggccctttttttatagattttggaacattatcggggcagttgataatgtcatttgtgaataaaaaaagtttactttttcctttcca

SEQ ID NO: 667859 - DNA, 591 bp, Homo sapiens
aaattgaaaaaaaaggacaaagagtcggtggcgctcctctgcagggcgttctgtgcagagcgaggcccagggcgcagccctcagagggctgcaggcccaccctgcccagtgcccgccgccgtgcttcaccccagctccagcttctgtgttcccttccgcccatgtgcccagccctcccaggcgggcacagcccgggtgcggcggccgtggggggcggcgggtctgatgcatgcctctgccatggagtcgtctgtctgcttcggtgcctgcccctgcctcccacccacctcgtgtatagattttaacgcttctgttaacattagacctctgccacaggctgggatttctatacataagaacaaaagcaaacacctaggacagcaaacgccaggcggtacaggcgggaaggggctctccacggagatcgaggacacgaagcaaactgcctcttgcttgccttccccttttgtgcttcggacacacgcggactccagcaggcgccacggaaatgggcaagcccctgcagtgtacccctgtcataactgtgagcagctgcagctccggaacaataaatcccttccgcaaagacaa

SEQ ID NO: 667860 - DNA, 116 bp, Homo sapiens
gatctttattctgcaccacagcttccaaggtgctgggattacaggcgtgggccacatgcccagccgaagcgggcgtcttcttatcaatactgtatgacttttaaaacctgttattt

SEQ ID NO: 667861 - DNA, 707 bp, Homo sapiens
ctgtgattcttttacttattttttgtggtttttttttttaaaacaaattttagcccaattttctggagttcattctcctctcttgcagcagcagaggaagggccgtgtacctccctaccaagtgactgggtgtccttattttctaccccaagagcagggatatatagcgtggtgtccaaaggggttctgaattctacagactcatcaacatgaggcagggaatcatgtgaaaaccaccgtggtgtctccttggggagaatgacatatcttaaagtattatacgtagctatattcttctatatctagcatatgcaaagctttccttaacaggtaaggggtacatatgcatagggggaggagatcagacctttacaaggtgagggaaacgcaacttcagaaatgaattattttcttggctttatatatttttaccaagacagagaagtatggtatggagagataatctatttcataatcaatatgggcctaaattatttttaacatcatttcactcggttactatattttcaggaacttacagaatgtggtattcattcagcttaaggtacctctgtggaaataacctaaaaatgcagacggatctgagagatctaaccctggtgtgcttaagaaactggggatctaggatctaaggtatactggctactcaatgatcttacagtgtttcgtcgcgaaagggggtcctc

SEQ ID NO: 667862 - DNA, 850 bp, Homo sapiens
cagcattttgggaggccgaggtgggcagatcacctgaggtcaggagttcaagaccagcctgaccaacatggtgaaaccccatccctactgaaaatacaaaaattagccgggcgtggtggcacgtgcctgtaatcccagctactcgggaggctgaggtagaagaatcgcttgaacccgggaggtggaggttgcatgagccaagatcatgccattgcaccccagccggggtgacaagagtgagactccatctaaaaacaaaacaaaacaaaacaaaacaaacaaacaaaactaaaaaacgaaatcatgctatgaacctcgaaatatacacagtaaaatttattaaaaacacaaaaaaacacaaacacacaaaacaaaacacaacacaaacacggggcgcgcgccccccctccgggcgaacaccccaccccacggcgcgcgcgcggcacaacacacgcggccctccccaacaacgctcggtccgcgccccccacctcgcgcgccccctctttcccacggtctctcacacgcacacggatacacacacgaccgcggggctatcacaaggcgagatatacacaccacagcgctcgcccactcctgctggtataacacaacacccctcctccttttccaccacaccagtgtgcatcgggcgagcacaaaacactgtgtctttagtagcggggttggaagccacacccccacccatccttcgtggcggacgccagatacctcatcaccaggattaacacaacagcgcccccctgtgcgtggcgcgccgccgcttcaccaaaacacgcgcgctattactataacacgcgtctctgtcctacaaaaagatctcctcatt

SEQ ID NO: 667863 - DNA, 194 bp, Homo sapiens
ctgtacagtagtaatcgattgatgatgatagtaaatgattatcaggctttggaggcgactaaagtgctgtagctccttagtctttgctgttgttatagtgtagctcgagccatagacagtaaagttagttagttatgagtgagcacagctgggtgccagtacaattttaatgatcattactcttgtacagccgg

SEQ ID NO: 667864 - DNA, 858 bp, Homo sapiens
  misc_feature (65)..(65): n is a, c, g, or t
  misc_feature (84)..(84): n is a, c, g, or t
tgctgctgcagcggctggccgagcagagccagcgtctggccgatggcgtggaggccctcaaccgnaccctcgagaggctggtgnaagcacgccctacccgggaagcctcaccctcactccaggacggtggtcctgccagtggagtggcccaggggcctgctggaggctcccaggacagccccaagggcacccactcggggctcgaggtcttctcagggatgatcttgaaggtggaggaggagatatagggctggtcgggggtgctggcagagccaaagggcaggagcagggcctccagtctttcccctgctgagtccaggcaggggagaggtggcagtgactgggtctccagggcaccgggacaactccagtccaggagaccggaaggatgagaggatgtgggctgtctacctgtgatgtcgcgtccttgccattgcctgtagagggtggtgacctgcagggaaaggctgcagagagccgacctgtgggactcagtggaccaggtctactcagggatgatgctgttggaggctccaaccccatgtggcagcagctgcgaagtctgcagcccagcgtccctggaagcaggggaggtggggaagatgcactgaggggccccctgctcactggaactctggaaagggtggctcagccaggctctaaaaaggtcccaagcgtgatctggtgtgactcctgaaagcccctgtccctttggtgggcatgcacacttggagggcagggctcctctgccctacgtggttctggcccaggggaaccacatcccatatgcctggaataatttctatccaattttctgttataaatacataaatatatatatatatatatatgcctata

SEQ ID NO: 667865 - DNA, 1117 bp, Homo sapiens
  misc_feature (65)..(65): n is a, c, g, or t
  misc_feature (84)..(84): n is a, c, g, or t
tgctgctgcagcggctggccgagcagagccagcgtctggccgatggcgtggaggccctcaaccgnaccctcgagaggctggtgnaagcacgccctacccgggaagcctcaccctcactccaggacggtggtcctgccagtggagtggcccaggggcctgctggaggctcccaggacagccccaagggcacccactcggggctcgaggtcttctcagggatgatcttgaaggtggaggaggagatatagggctggtcgggggtgctggcagagccaaagggcaggagcagggcctccagtctttcccctgctgagtccaggcaggggagaggtggcagtgactgggtctccagggcaccgggacaactccagtccaggagaccggaaggatgagaggatgtgggctgtctacctgtgatgtcgcgtccttgccattgcctgtagagggtggtgacctgcagggaaaggctgcagagagccgacctgtgggactcagtggaccaggtctactcagggatgatgctgttggaggctccaaccccatgtggcagcagctgcgaagtctgcagcccagcgtccctggaagcaggggaggtggggaagatgcactgaggggccccctgctcactggaactctggaaagggtggctcagccaggctctaaaaaggtcccaagcgtgatctggtgtgactcctgaaagcccctgtccctttggtgggcatgcacacttggagggcagggctcctctgccctacgtggttctggcccaggggaaccacatcccatatgcctggaataatttctatccaattttctgttataaatacataaatatatatatatatatatatgcctatatattacttggtactgtatggggctgggatgacatttgtacctgtagatttttcttgcaaaaagtatttttttacataagcataaaatgacaaagcaggcagcagtgcggctgctgacgagcacgtgagttggagcctgcttctcgggcgtggcaggcaccgctgctttcagcctccctgcgggggcctgggcacttccctgcgtcttcagatccttcttcctccattacctcctttgactcttgggagatcccttggcg

SEQ ID NO: 667866 - DNA, 1026 bp, Homo sapiens
agcatactttataaatcagggaacttgaagctaggtagaatcactagaaaagactaaatctataggaggcagcgacaatggtcgcccgaggtaatatgtagcaggaagaaaatttggaatcaacgtaactaaatcccgtgtggccgatggtatgaatgacaatgtattttgagatgtgaccatgagaatcaatacgccctaatggatggctgcctgcatgttggcatcgaagggcaaaaccatggcagacagtcctaccagccagaggtccctcaacatcctttcatattctgaggatgacaaaacaggaactctgcatctcgaggtggctatccagatctcgaacaacatggatatgaagcccacgaatgtatcagtgtcaccacggtgtgcaagagaaaccacaaatccaaaacaggtggaccgccggatcctggagggcgcaagcagtaacgtggccacagatgccgcctggatcgaagcaaagctgcggtatcatccaggcgtggcagtcactgcctggagattcggcctcaactactaacattgtcaagatttaagaggaagcaaaccaagatgacattctgggaagtcacatataacacggtatgcttacacaatgagtgcagacaaccgagaataccagatgacacaccatggaagaatacacaaaagtatcgaacaccgccgggacatgctacagagtgggagaaacccgggaaggctgagccatcgcagattcgaacaaagaacgaccattaccatgctaacacccatgcacatgaaatgcagaatagcaaagacatagaggccacagaagataaaataggacaacggtaacaatcaagttgaacagaacacgaaaaccaaaggaaccacaaaacagaaaaacaacacgataagaaggaaagagtacacagcaaaagaaggaccgagcgaagcagggaaaggcaaacaaagcacaagcaagaacaggaccacaacaaacaaggagacaaacaacgagaagaccaaccaaccagaaga

SEQ ID NO: 667867 - DNA, 805 bp, Homo sapiens
  misc_feature (65)..(65): n is a, c, g, or t
  misc_feature (84)..(84): n is a, c, g, or t
tgctgctgcagcggctggccgagcagagccagcgtctggccgatggcgtggaggccctcaaccgnaccctcgagaggctggtgnaagcacgccctacccgggaagcctcaccctcactccaggacggtggtcctgccagtggagtggcccaggggcctgctggaggctcccaggacagccccaagggcacccactcggggctcgaggtcttctcagggatgatcttgaaggtggaggaggagatatagggctggtcgggggtgctggcagagccaaagggcaggagcagggcctccagtctttcccctgctgagtccaggcaggggagaggtggcagtgactgggtctccagggcaccgggacaactccagtccaggagaccggaaggatgagaggatgtgggctgtctacctgtgatgtcgcgtccttgccattgcctgtagagggtggtgacctgcagggaaaggctgcagagagccgacctgtgggactcagtggaccaggtctactcagggatgatgctgttggaggctccaaccccatgtggcagcagctgcgaagtctgcagcccagcgtccctggaagcaggggaggtggggaagatgcactgaggggccccctgctcactggaactctggaaagggtggctcagccaggctctaaaaaggtcccaagcgtgatctggtgtgactcctgaaagcccctgtccctgcccaggggaaccacatcccatatgcctggaataatttctatccaattttctgttataaatacataaatatatatatatatatatatgcctata

SEQ ID NO: 667868 - DNA, 127 bp, Homo sapiens
ttgttccttctctaaatttctcatcaacaatcgactaatcaccacccaaaatgactaatcaaactaactcaaaacaaatgataccatacacaacactaaaggacgaacctgacctcatgatctgccg

SEQ ID NO: 667869 - DNA, 418 bp, Homo sapiens
aaaagagctagtacagaaagtgggactctgagagaaagggaaactattatgaacgcggtggttgggagagagtaaggatgggatgtggagtgggactaaagagcacaacggcgtgtgataagacccccgggccacagacccggcgccaaagaaagcggaagtccacaaatacggccgaagtagccttggaggaatacgaggggtatggcctgcatgtgggggtgccctaaacaacgacggcgcaaaggaaagaaatacaaaaggtaccgtgtgtaccgtaataatgcatggttaatgttgtgtacagagaaaaccaggtgggttggggctgactgggcggcttggaacaattacagggggcgggcggcgatggggttgaagatgaccagcggttcgtaccccgattatagcgcatcgt

SEQ ID NO: 667870 - DNA, 241 bp, Homo sapiens
cccccccccccttttggggttttgggtttccaaggcctccccccccccattttgttttttgtttaaaatttttaacagggggggggggcccccccccttttttttttggggtttcccccccaaaaaaattttttttttttcccccgttttgttttcccccccccctaatttaaaggggggggggggggggggttttggggggtggtcccggggcccccaaatggggggggttttttcccca

SEQ ID NO: 667871 - DNA, 142 bp, Homo sapiens
ctacccagaggcagagtgcaagcgaaggtctccctcgatacctcgcaggatgcacatctccgggtttctatgcgtgaatcacagtgacagcaatgcgccctcaccacttcccgtcgtcctacataggcttggtctgggctcg

SEQ ID NO: 667872 - DNA, 125 bp, Homo sapiens
gtaaacagagtttaaccatgtgaccatgctggtctcaaactcccggcctcgggtgatccgcccgcctcgagttcccagagtactgagattacaggcaggagccactgcacccgttcctcatttgg

SEQ ID NO: 667873 - DNA, 284 bp, Homo sapiens
aacaagggatattctgtacctggtattgatcactactcacaacaggaacattttacaacatttgaagcccctcatgctcttctcactagcgatccctgacaattgccgtgacttaaaggataatgaagtatatgaacactgatttgatttgacttctgcatttgatgacattgtcgaaatgggataccgaggacaacgttaacttgccaaacatcagatccatcacagatatggaatctcatcaagataaagtgtccacacccgtcagaaagactcaagaaagt

SEQ ID NO: 667874 - DNA, 1371 bp, Homo sapiens
acagagtctcaccctgtcacccaggcgggatggagtgcaggggtgtagatctcggcctcactggaaggctccggcctcctggggttcacacttttctccggcctaaagcctcctgagtagctgggactacaggcgcccaccaccatgcccagctaattttggcattttaagtagaagaacggggtttaaccagtggtgggccgggcgtggtcctcaaactccgtgagtgttcagggtgactccatcgtgcctcagccttcccaaaggtgcgtgggatatatagggggcgtgtgggccacgtggtgtcccgcgggccaaataattgtggtatacatcttctatgaggtttataatatacgaagaaaagaggggattacaaaaccatatttcataacgcgtgggagttaaaatgtgcatgtggaagaaagggctcttataaagattcaggagtgtttctaaagtggccttataaagtgtgtcgtgtgtattaaaatactcaagtgggtttctacaaaatctcttagattaatagaatataagcgttttataaaagaggcccaaggaaaatttaacagtcttttctaaaacaacacatttgtggaacaaacacaccaaacacataccacacaaaacaacaagaacaacaaacatcaacacacaagaaaacaacgaaaaaaaaaaacacacaaaagaaatacacataacatcaaacaacaataacacaacaaaacacacacacacacaaagacaaaaaacacaacatcaacaaaacagcaacaacgaaagagaggcgcgcagcacccacaaaaaactaacaacaacgaacgacaggggaagaagcgccaccaacaaaagaaaaacaacaagaagtgaagagacgcgtaacaaggtcagagaagaaaagcacaggaccacacacacacacaagatcaaactggcacgccagctacaaaaaaattaccacagcaaccaaacaacaccgcacacccgacgacgacatacaaactctaaaacaacaacagcgtccgcccccacttgcccatacactaacccacagacgaccacacgtactacgtacacatctttcgacgggcaacacccccaccccactacttatgtgtggtggtgaggggcgcccaacatttgacagcgagaagcaaacgaaccgaccagcatgcgcgaatcacgacgaccagacccacgcccgacgagcaataatccaaaacaagacctaccacagacatcgtagctgatgcgcggggccaccccaacggacctcctcatgatcgtgcgcggcggacgggagacgaagagtactcgcggcgagtataatataaattaacggggaggaggcgggtcgcagccacggcc

SEQ ID NO: 667875 - DNA, 251 bp, Homo sapiens
caccagatgctcccaccttctctgcttcctccagcccctggcaaccaccgccccactctctgtttctatgaattaaactcctctaggtgcctcttttaagtggagccatgcaggattttttccttttgtgtctgccttatttcacttagcctcatgtcctcagggttcatccatgttgtaacaagtgtcagaaatgctttcattttaaggctgaacagtattccatgcacatgctgctttatcacctccac

SEQ ID NO: 667876 - DNA, 148 bp, Homo sapiens
ggccagcggtccgcggagatggaggttggtgagcggaatacgccactgcgctccatctcctgggttctagcaattctcctgcctcagcctcccgagtagctgggactacaggcatgtaccactaagcctggctaatttttatattttg

SEQ ID NO: 667877 - DNA, 468 bp, Homo sapiens
ggctctacctcagcctccagagtagctgggatacaagcactcgccacctgcaagtaatttttggtatgtaaagaggagatgggggtccaccatatagccgggagggtctcgatctccggactcggatctccggactcgtgagccacccgcctcggcctcccaaggggctggggataacagaagtgagccaccgatgccgggtaaatgatatttttaaacattctaatttccttctcatagtggcttagtacactgccacatatctagggggctctcgggacgggacggagtgagttctggtttctatataaaggcagattttctatcaggtagagagcctgggaactaatcactagagtgtctacagctcaaacattaaaaaaagaccggtcggggcctaaaagtagttgcaaaacagggacaatttattttccactaggtgggcggttgtgtccttactccttgaag

SEQ ID NO: 667878 - DNA, 1035 bp, Homo sapiens
  misc_feature (395)..(395): n is a, c, g, or t
  misc_feature (602)..(602): n is a, c, g, or t
  misc_feature (646)..(646): n is a, c, g, or t
  misc_feature (667)..(667): n is a, c, g, or t
  misc_feature (774)..(774): n is a, c, g, or t
gactgtaatcttgacagtggtgtcgatagtgatggaatggacgcggccggtactacactcctcggatggtgttgaggcacgttatctctgcccatggtgaacgccgctcggggtccgcggcgagtggttaacgacataatgcggtgcttcccaccagacgtcccgccctaattcttttgggaagcgcccggaaattttcgtgtgacaacacacttaacgaggtctcctgtgccggtccctggaattatcccggggtttgccactctctctcgcgtgcacacgcataatacaccacgtggtggtgggtcacgagacgacaggtaagagactaaagagctggtctctaagaaaagcagaccatttaagttgagctgcacactctattcatgcgcggngcaagttgggtcaatgttcaatacgcacggtttcattatggtgggtatagacgataaggacaccgtttggttctcacaacccgccggcggaaacaatgagggttgcatgatccatcaacaagacaaaacacaggtgtgctggtgcgcaccaatttccccgcggcgactggttcatgctgttagagtgtaataaccacgcgggtaacncacaccgcgtgtgcggtgtttgcatttctgcaccccagaagcgnctgctctacgaagaaggggtntttgtaccaccacaaagagaccctcgtccacaatcgtgtggggtcccacaacagggaacccgctgggtgaaactgtgattaacatagagggacaactgcagtctgtngaacgccgtccgtgcggcctgaaatttcttgtggcgaggtacaaaacaggggggcgggcattaaaaaccctgagatttcattttctggagtaccagaaatttcttgttccactttgaggagaacgggtaacagccaccccaccgtagctatttagggggtcaaataatgctagttgtctcacaccccgggtgtgaatccccctttttccccccctttctttccccctggggcaaaaaagggccctttcccggaaaaaaaaa

SEQ ID NO: 667879 - DNA, 805 bp, Homo sapiens
  misc_feature (587)..(587): n is a, c, g, or t
tcttgaacccgtccagtgctgccagttcaaccaagggtctgtgagttgtcagcgtgggactcaggcagcagagcttttttctcccctttgtgccttgatccttcgcaaggcttgagccacgtgggctgtgggggaaggggctcaaggccatatcccaatacgtgtagggcgagggtccctgttgggcactttcaggctgtgctggggaagaagagaccggggtctgggaaggaaccggtccccgagggttcctgggtggcctcgccttttccccctttggtcagtctgagcagttgggggtttctatgcccgcaagttctcaggaagtattcacaaaagaaaacttactttttttcccccaggggttggggcaaggacagtggagcagagtgctaggaaagtgagtcccctgtgggaaaggggaccgggccgtgatgctaaatatctccggatcccaagtgacgggattggcctaggaccttcagatcaccagatttcagacccttcagaacctgccccggggccaggtggagaacgtgagggccgtacaaggaagtgaaatctgagtcgagggggctaaggcctgnaccccttctccatgctcccggaccaaattccatttgggcctcagtagaatattataccaagtggatggttggttgccaaggcttgaagttgcagtggaccaattggggtcacgtgaacttccacttgcgggggcacagcgaatcacaagccacaacctccctgatagctagagactgagtggtcacaaagccgggaactagggattgaagcacaatcg

SEQ ID NO: 667880 - DNA, 142 bp, Homo sapiens
agcggaccgacgcagggacaccacacatgctggcaaattttctatagagtcaggtttcactatagtctccaggctggtctcaagaatataactcagaatagtattattttccacatgcattagtaatcaccaatagtttatg

SEQ ID NO: 667881 - DNA, 558 bp, Homo sapiens
aggagtgataccagtctcatggaatctacagtcgcggtagtcaagtgacttcatacagtccatgttcatgaagagagtcgctgctagtgattgatagcggggtcggacagacatgtccattgtataaaaagcagcatccatctgaaggactcacttggattaaatgtacacctaaaaaaaaatacagtggcacctgcatgcagtgcccgaggatgggtgtgctgtaataactagatctggtgtctgtgggaggtgcacctttggtagttcattgttgggttggtatttgtctccataacctgtttcagcctcaaggtcatttacctttgatcagtgcttcaagcttagcggtaagtttatatacatgttcatgtatgaattatattactcagtctgatcataatatatgcccagtgcaaatcatttcattaaagcctcagggatacacggtgccaccgtttcctcattcagggacacgggaatagtggtagtgtgtcttcagcacgacatggggaaattcaaaggcagccatccgtgaaagagccaacggcagcccgt

SEQ ID NO: 667882 - DNA, 300 bp, Homo sapiens
agtcgttgagagtggaaaccccgcgagctgtttctctagctctcgaacgcgcacgtactgcgccggcgttctgcagcaaactctggtgtttcttgcgatctcgcctcgccacgtgacgacacctgccagctagaacgccgactccatctctatgtcgtgagtaggcacggacttggtgtacttacaacaggtcagagagggcccgagaacagcttcatggtcttcttctgccgggtcagcccctcggctctggactcccaggggagtcctagaccctcatactccctcctccacagctgg

SEQ ID NO: 667883 - DNA, 417 bp, Homo sapiens
ggcacgagggtccatgagtcagccccactgcctgagattgcggtccaggattgacctgaagaatggaaccagtccagaggcgggggatgcggctgccctcgggctcatgactgacggcccaggcatcttcagaggggctttcctgggattacaagcccccagcagagacagctagggcgtggctaaacccactgccatgtcaggaaacttagcagtaaagccttctcccactccccacaatgggacacgctggtgacagcagcctcggtcctgggcaggctggagaaggacgtggcccctcagtcctgctggaggcctcgggaatgacccccgcctaggacacagccagctccactatggggtcaccctgagtcttctttaggagactcttaagagataacatccctgaaaaaaaaa

SEQ ID NO: 667884 - DNA, 122 bp, Homo sapiens
atcttttcaacacatatagatcgagtatgaggctacaaaagtaatacctctgtgagagttttaaggtacttttcaagtctttccttcggtgagagatatggccccgcacaggggggactcgt

SEQ ID NO: 667885 - DNA, 1713 bp, Homo sapiens
  misc_feature (857)..(857): n is a, c, g, or t
tttgtcgtgagtgtcctcggcttcttctgcttgctttgctgtcgtttgttcatttggtcgctcaattgactcatcgttggttcacgttgacttttgctgcccgctgtgccgacgcccccctgtctggtgtggcaacaatggctgtctgacagacggaggtgttcgggcaccctcgttggtagtggttgctccttggtggcacactttctggtgaagagaccccttttttcatgtcgggcgttgtgctgtgtgtgccaagatgactcttcgtctcgtcccccgctgaacgtcttgtcccggggctgagccatctcctttgtgaccagttctttcttttgggtttccacgggcgggatccccaatggtgagcgtttgtaatggacgttcgccggcgggcgcccagattctctgctggagcgcacagttgttgttccagcgcccgcccctgttgggcccaagtgtcctcgttgtgtgtccaccagaatttcttgtggcccccccactttgatggccgtttcgccttggatggtgtactcataactcggggggggaaggcgccccacaaatgtgggggcccaaaggcgcgccgcacctgttttccctcaagtggtgcagagatccgcctctgtgcttggttatgagaggcctttttggtgacagcctcctccgcaagggcctctcgatccccccccccgacatttttgggtggaaaaagcaaagttgttgtgtgttgagaaggaagaacaaccccacggcgctgccttgtggtctgtgtagacctgtgtgtgccagctctcccaccgcggagaagtctcctccgcagcggtataacgtgaggctccacaacgagtagtttncctctctcctcttcgcacaacgggggcttaaattgttgccgcgccacgctacgctgaatagattatacttcttgggagaaataaattggtaggggcacccaccgcagatgggtatatctcactgcatgagggtgtataactctccccacaggggggggaatatacaccttcgtgtggagataatatagagagagccttcgttgggtgggaaatatatatagagaattgagtctatagagaggctaaacacacacccaacattgttcttggggagactctccacaggctctcctcgtcgcacactgttttgggcacaggagttcaccgcccacagatctcgtgcaacagcgttcgcgcacacagattggcgcactgatatgtccctcgcaccgtctctctgggagtgtctcttgagtatatctcgcacagagtgatgtgtggcgtgcgcacacactctctggtgtgtgtctcgagagagtctttggggtccccctccggtatattcgaattgttctccacggggactcttgtgagagggtccttctgagacacccacatggcttcaccacgagaactgtggctccacagagaggctccactctttttttgccacagagagcgtgaacaccacggtgataggagaaccacgctatgtaacacatgtgttgtagacacctctggttatgaaagcttgctgcacaactgcccttcttcccactcacttattaacactcttcacaccaccacgaaccacccacttctgtcggtcgaaaaggctcacgcccttctttacacacatgaaagttctgtggaccagtaaggaacgcagagattaagagggaaattttatttttta

SEQ ID NO: 667886 - DNA, 1419 bp, Homo sapiens
gagtcagatctcgccgacctatgacgttccacctcgtgatgtcctgcaagacagccgtctgcattcgctcatcctaccgccgaccgcaggactcctagccgagactacaaagattccacacagtgatctaatttactcgaagagtcgcatgcgcacgggagatcgtttgacatgcttcgccgggaactcacacgagcctgctggtagcgcttgaatcgttctctccacctacagaagagtctcttcagtacgactgtcgctgcccaatggctgcgtgtcaagctgggtactcgtaatgaagtgcccccttagaacgctccgtggcactagagtgactagatcattcgcctactactggcggaatgagggtgtctgctagacacggcgtagtggaacacaatgcacactaaaaaaacataatagagctgccctagacaccctaggctttcctggcaacggaaggactggcactcggttgcagcaagaaaaccaaagacgcacaggacttcgaccagacaactggcactttattgctgatgcatggggactagggaaccatgaaagagagtaccacatacttacaagtgtctggggatcgacagaacagcagcacgcaatttcgtggagtgggagattgtccgcactatggcccagtacattgcctagaaggacctagcgcctgcactcgtccgaaagcaaacggcgcggtcccccccccaatgggtaccccgcgatcaacactttccccatgggtacattatgtgacgatttggtgccaagacttcctaggaaaggacatcacgttccccatggcacccagaagtcttcgcgcggcaggtttccaatcttgtgtccaaatcccaaactggggtcggggagtacgtgcaactggcatgaggacaaaatgaaaggcccagggcgccaattgtcacggagaagtttcacacgatgaatcccttccccccagaacggtgtcaggcatgcccagaatcgtcccagccgagacagccccaattgccgacgatttgggaagaccatcaaggggtttaacgcagcgaaaccccctggacccaaatggttgctcaccgcgtgacacaatcatgcggtcaccaggaatgccgcaccttagtgttgccggcattagacaaccacggggaatacgaccccagaaagctgcgtgaacgacaacacacaaccggcaaggacaccctgaccgagaacaaagcggcacatgggaaaaagtgtgtgcgacacagtgacaaacgaagggagcacacgaaatggacaaagtaggcgcaaacacaagatctcgaacaacagacaacactatacccgcacatacaagcgagcccgaaactacccagcgaggacactgtgacgagaaccaatgatgaagcactcaacgacacccacggaagc

SEQ ID NO: 667887 - DNA, 148 bp, Homo sapiens
  misc_feature (124)..(124): n is a, c, g, or t
ggggagtcgggagctaagcagagcgccagtaaaaatgcgaagaagcatatttcctctctgcgagcttctacttctaagtctggaatccagatcagaaaataagtattgtttgtgaggtaacaanataaaataagcatctagactctgg

SEQ ID NO: 667888 - DNA, 1691 bp, Homo sapiens
acggttcggaccgggcccgcgaagattgctgcagtccattcgcggctctcattctgccttcccacatcggacatcattgctcacatgttcccgtgctgtgggattatacattgtgggacaacgcggtggttgggcgacattgtactcatggacatcagaaactaagtgatactacccaaaaccgtgggcctcaccacacaactgtgacacgaacatattaacacacacgggacctgtgtgagttggccaaagaaaggaaaaacaccacctaagattgcagttgacgactgttggctttcaacagccaatttggccattacaggaagacttataataggggattacacataatgtgcatactatagaagggagccctacaggtataaaaaataatcagttggaaacgcaaaaaaaggctatagaggggtataaagcgggatctttccgatggcatctaagaggagaactatatacttactattcgccattgtgggccatgaggaacacccacggtggcatggatatatatgtggaggggccttattaaacaagggcaagcggcagaaaacaaggtgggggcagccacacacaaaatttgttggaagaaaagtgttacaccgcaggcaccatatttttatccacaaaggatattaatgtaccaaacgctttcataatcccccaaattacaatttcccccatatagcccaaaaagtgtgtgacatgtatgggagcgaggcgcttcaacgttacacgtaatcttttgggacaatcattcatagatggaggtatggcactgaagagcaaatttgagtgaataagacaagcatgttggaacgattataataaacgtgtgaagtattagatgtggaatccataccattaaaaaagatgacggataaggggccgaaaatataataaaagatgtaacggcttttgttagttttcccaaagcgaggaatacaatatttggtgatattgaccgcataagtgggtaattaagggcaagtggtggctacgaggcaataccacaatcaatttaagtttaacggttgcacgcttatcgacacaaggatgtaaaaggaatacagtttacttacacagggggggtaacatctgggttacaacaatccaatttgtagcggcaacgcaacacaacatataattgattgtggattgacaacacacgtaataagttaaatacattgtaacgcgtattgataacgagcgatcaagcttatccggtggcggaacagtaacatgcaacatgtcacatcatgacgacaacgaggaggataagagcgaacagcacatgggcaagactcgagaaaaatttgaagcccacaagagagcgaacaattgtggcaatccaatggacgaaacagccgcgtcagtggaacaactggctcaggagactgtggtagtgtgaacaaattaacaaccaatatgagtttgtggccagagaaggataacaaataaaaaggtgaggggtacctaaagtaggtatataatcagaggtcttctaaaaaactaattgttgtaggcaaaatgatgaatagctgatagaggatcatgcggaagtaatactagaaggatattagtcggtcgtgaagaccaatagttagaatgtaatgtggtttttgtagtagatgttgattttattagtagtaactatgaggagagtagcggacgat

SEQ ID NO: 667889 - DNA, 351 bp, Homo sapiens
gactttcctttaaaaaaaaaaaaaggacttctgcaatgggagagatatttccattaaagattaaaggaaggccgggtgccatggctcacactgtaatcccagcactttgggaggccgaggcgggcagatcgcttgagcccagcagttcaagaccagcctgggcaacatggcgagacctcatctctacaaaaaatacgaaaattagctgggtgtggtggcatgtacctgtagtcccagctatttgagagactgaggtgggagaattgcttgggcttaggaggtcgaggctgcagtaagcagagatcatgccactgcactccagcttgggtgacagagtgagaccctatctca

SEQ ID NO: 667890 - DNA, 106 bp, Homo sapiens
ctcatacacggatcccccactgctgatcctggagcctgggccgcatcgcacgccccccgtgcgtcggcaacaacccattcgtacttctgcccctatcaacttccga

SEQ ID NO: 667891 - DNA, 1194 bp, Homo sapiens
  misc_feature (448)..(448): n is a, c, g, or t
  misc_feature (531)..(531): n is a, c, g, or t
  misc_feature (565)..(565): n is a, c, g, or t
  misc_feature (567)..(567): n is a, c, g, or t
  misc_feature (586)..(586): n is a, c, g, or t
  misc_feature (640)..(640): n is a, c, g, or t
  misc_feature (648)..(648): n is a, c, g, or t
  misc_feature (650)..(650): n is a, c, g, or t
gagcaagatcaccgtaagtttggtttcttctgttttctggtggtagtaaaagtgcctcttcccaggctatggccttgttggggttggggaaaactgagatggcagcggggactttcccaggagcctggtctgtacccagttctctcccacctcgtctttttccttggctgaccaaacacaagttgaactgagagtctgagtttgaatcaagttcaaggggaagttcatggagcgtcccctttgtgcttcctgggagggctcccgatcagtcatgtttcgggtgattctgggatgctgattcagaatgtggtaggattggaaaatggattggtgactgtgaaaagtcaagtaaggggaaaagcatatggggagggaagtcagaactttttcccagcttgggggatactcttcttactttcagaggctgcctgcagggtcagtccaagcnatccgcctccctgtcctagaaaagccttctgtttaaaagcatcacagagctagttcatggactgtcctacgagtgtgctcttnttccttgagttggctaatgaagaattcctttctntntccttagagatatagaaanagaaaggaagaagggtaggaaggatggagaggggaaactatgttttggaaaaanctagactntnaatcaataagacaggcagactcctggcttatatagatcatggcttctttgctgaaaagtttgtttctgtatcatacagtcagaaatgcttatgtttgaggggcttccagtagtgactattacatgctgcagcaaattatcctcccagatttctcagggttcctgtgaacaactgtatagaagaaatttgtacacgtatatagtattcatattgctagacccaacctgagtgtaattgagtctcctataagcagttttgctgattagcttcttattctgataaaccttggtaaacccgtgaaaagagagtgatgaaaagagagaggatggatggctgggtgcagtggctcacgcttgtaattccagcactttgggaggccgaggtgggtggatcacctgtggccaacatagtgaaaccccgtctctactaaaaatacaaaattagctgggcgtggtggcacacgcctgtagtcccagctactcaggaggctgaggcaggagaatcacttgaacctgggaggcagaggttgcagtgagccgagatc

SEQ ID NO: 667892 - DNA, 808 bp, Homo sapiens
gcaccgctctggatatcccggctctacgtcgcgtcccataatgggccatcgatccaggtgctcgtgctcagctaatagacacaaatcgtgaatccgtgacacgtaacaatgttcaatctggacaagcatacaattgcttgctcgaaagactattgcacgatatcaatcccgaacatagtgtagtggacccagacgatccatgatcgaacgatagctattgtggatcccagatgcgtgagtgctatatgtgatagaccagatgattggcccatgaccattctatcctagaggagttcgaagtccagtcatccagcggtcgcaagttccatgcagtcgaagagttagcccggaacccagtggatggcaagtaggcttggaagcatgggtgaccgacattccagataatttagtacatctgccgaggggggcaaccattgacttgctcctgttatgacctgtaagacactgtcgcgtgagaatgccacgacacggaatggccactcgcaaagctagatgttgatgtaggtcagatgtcctttaacgcgtggcaaaggggcactccgtgtacttgtactatatgaaactctgaggcagccacttaacacgatcaaagtcactgtattccgcaaggttctggaacaatctagattgagcaagatacacttatagattgcctggacagcaattcgaattcaacaccagggcgtcgtaattaatacataaccccgaagtggctcatacaaagtccgtggtggatccatcccttttgagacttttgtcccactccataggacgctcgttggccgtg

SEQ ID NO: 667893 - DNA, 238 bp, Homo sapiens
gctttggtgcctctgatggtcccggtgcgtggggggcgctcttcttgaatgactacttgctatgcctgggagtggctatggggtgctctttccaacagcccacgtggggtccactccttcgcccaccccctcacatacacctgcttccctgttttgccctattgggcgccccttcgtacggctgcttcacccattggaggatgtaccgtctagtttgcccgcacattcccgggatacc

SEQ ID NO: 667894 - DNA, 112 bp, Homo sapiens
ctctacatgcagactgctctaagaagcacataagtttttatctctcttgaaggcagcacttatacctgagaaggctcagatgtggagagagtgtgcacgggcaaacctcctt

SEQ ID NO: 667895 - DNA, 325 bp, Homo sapiens
tagctattctagagtatcccggtcggactatctagtaggggtcggaccatcttgtagtgaagaagcggtgaggataagaaagtggtgaatcccgctgtaagagcaaagtgactaagaattgtggcattggacaggacatccagtcccaaaagagacctcacccgctttgtgaaatggccccgctatatcaggttgcagcggactagagccatcctctataagcggctgaaagtgcctcctgcgattaaccagttcacccaggccctggaccgcccctcagctactctgctgctttagctggcccacatgtactgatcggccgagc

SEQ ID NO: 667896 - DNA, 222 bp, Homo sapiens
agctctgtaccccccgtactagcccgacagtccccgactagcccgacagcatctcagcaaacctcgcgcgggcggcgcgggcgcggggaagccccccaagcgcaagccttctaccgcaagctgcagaatttcctctacaatgtgctggagcggccgcgcggttgggcgttcatctaccaggcctacgtgttcctcctggttttctcctgtcgggctagtggg

SEQ ID NO: 667897 - DNA, 207 bp, Homo sapiens
tgacggagaggatacaggagctgactctatccggaaggggaactgttgagaagccgagttggctatatcactgggtgcaggtgatggtaggagccagtccagctgttggctgaaggggcaagggtgtctacctaggtatgcctggttgcctgccgtgtatacgtacgcccgtggctcggggtagttcatctagggtcctcgtggtgg

SEQ ID NO: 667898 - DNA, 159 bp, Homo sapiens
aagagtagacatgatttcttggcctctgactttcagtgatgacaatgcaaccatgcagtcccccgtttgcagagggcagttctcccaggctttctggaagcagggcttccgaggaggtctccaccacctaacagaacactcacttatgagccctgcaca

SEQ ID NO: 667899 - DNA, 116 bp, Homo sapiens
ccggagcgcggatggcaatggtcctctgcatcttcatcttggtcaccacgttagagaggatccgccctcgaatggacacatgaccagtgaaggggcatttcttgccaatgtaggtg

SEQ ID NO: 667900 - DNA, 152 bp, Homo sapiens
cggcagggtgcacgctgttagcaaggctgtgagagacgtatggcagcctgggcactgtcgctgcgttgcagccgtgagagtagctccctccgttttctatctgagctgttcctcctccagcctcacaggagcgacgacagctccagcgaaca

SEQ ID NO: 667901 - DNA, 863 bp, Homo sapiens
  misc_feature (47)..(47): n is a, c, g, or t
  misc_feature (93)..(93): n is a, c, g, or t
  misc_feature (103)..(104): n is a, c, g, or t
  misc_feature (131)..(131): n is a, c, g, or t
  misc_feature (221)..(221): n is a, c, g, or t
  misc_feature (223)..(223): n is a, c, g, or t
  misc_feature (227)..(227): n is a, c, g, or t
  misc_feature (232)..(233): n is a, c, g, or t
  misc_feature (242)..(242): n is a, c, g, or t
  misc_feature (248)..(248): n is a, c, g, or t
  misc_feature (290)..(290): n is a, c, g, or t
  misc_feature (302)..(302): n is a, c, g, or t
  misc_feature (318)..(318): n is a, c, g, or t
  misc_feature (350)..(350): n is a, c, g, or t
  misc_feature (428)..(428): n is a, c, g, or t
  misc_feature (458)..(458): n is a, c, g, or t
  misc_feature (608)..(608): n is a, c, g, or t
  misc_feature (672)..(672): n is a, c, g, or t
  misc_feature (678)..(678): n is a, c, g, or t
  misc_feature (696)..(696): n is a, c, g, or t
  misc_feature (735)..(735): n is a, c, g, or t
  misc_feature (801)..(801): n is a, c, g, or t
  misc_feature (803)..(803): n is a, c, g, or t
  misc_feature (850)..(850): n is a, c, g, or t
aacgcaacgatcaaaaacattaagatctacgacaggatgcgatattnggacaataagcattacaatgtcatttttgccaagccaaattttacntgatgttccnngaagcaaagggtaactagaatgcagangttctctcatcatcatcttcaatcagctgtcacagaattccccactactgaacctcccttacaattcttacttctccccacccctccagncntctnaaatnnaaaagaaangcaacnattctccctgagagaataccgcctccttcttctttcttttcnacagcaacctcnactgtcgacagaggtnccttaggattcaaagaacaattctgaagctgnaaacagaatagtctgtttttgaataaatcctaaaatattttcatttcacacccttgttccatgaggaaaaaatttacntagagaccaataggttttgttcaggcagtntgcaataataaagtttaggccaaattagatttataattagatattaaatgctgcgctttggtactatagtatagggataaaatgaacccatatccacatatgtacttatagacaccaaagcacagaacagaaaatctagctggcatccantgtatcttgactgtggctgcaatctctgttcccagaacagactgtaagcgccaaaaggtggggncatgtnttggtcagctttggattnctccaacaccttgcacagtgttcatgcaaagagccactnacagaaattgttgaattcacttaaaaaagaaacaattttggctgggtacagtggctcaagcctgtnancccagcattttgggaggctgaggtgggaggatggcttgaacccaggngtgcgagaccagc

SEQ ID NO: 667902 - DNA, 769 bp, Homo sapiens
  misc_feature (703)..(703): n is a, c, g, or t
atacttggcctgcctcttatcctggtactaagttgaagtaaagctcaccctttacttccctacttgaaagttctactctgagccttgactcttagccacagtgaggcatgttgaaggttcctgctggtttattcttttttttttttttatttttttttagacagagttctcactcgtgttggcccaggcttggagttgcaggggcacgatctcggttcacgtgcgaagcgtccgcctccggggttcacgccatgctccgttgcctcggcctcccaagatagcggggactacgggcaccggtgccaccagcgccggggctaatttttggtatttgtaagtagagagcggggtttcacgggtgtttagcataggagtggtctcgatctccgtgacctggtgtggggtccgcccacctcagcctcccaaaggtgcggggacttacaggcgtgagccaccgcaccgggcctcacatgcactttcttgtaaagtgcctccaagttgattattctcctagctccatatctcctgagtgtgcatgagggagcacggggtcaaataatggggggctgaaaaggtatcaagggtgaggtcagttttccccaggagtcctaaaaaattcgggtaccttacatggagggtgtgggagaagggtgtcatagttctgaaaataggcagttagttgaggccccagacctgtgtcatnccttataaatgtctatctccagttgacagagttgaaaaatgtgggtggaacattggatattcatgg

SEQ ID NO: 667903 - DNA, 767 bp, Homo sapiens
ccagcgtttaccccaaagcacaatgccctggtcacttggcaagcggctgggcctgacagaggccgaggggcagaccggggctccagccagacccctgaaaggaagcaggtgctcccccagcttccaggccttagttggggtgggggggccagcgtccatgggcctggggtcttctcaccgccgcaccgccgcttgtcctggggtaggccccgtgccttgcccctctctgccttttcctcgggtgtcccatccatcgagcccctgtggcattggcttgggtggcagagcccgacttgtatcagggaccccaggaggtgcccccgtggctcccagagacatgagtgatgaggtccaggaggggtgagagggggtggggagaagggtcgggcagaggggatgcaaggggaggaaactccgtcaccaggacgagccaagagaacagggatagagccataagacccaaggaggaaagacccgtgagaaacaacacatgaacacagtcaaagtgaaacacagacaaagcacagataaaaacagaggagagccaagaaaggcaaaaagcacatacggctaaccaaccacaaaaaacaagaaacaagaaaaaacacacacgaaaccacaggcgagggcacgaggcgaaaccacaaaacgaaaaccgcgacgaacaaacaaaaaaaacaaaaacaaaacaacaacgcagagcaggcaacccaaacagcaaaaaacgccaccgcgacaagagaacaaaaggacaccacaaagaaaca

SEQ ID NO: 667904 - DNA, 182 bp, Homo sapiens
acagcagactgcatcattgaccgcacagcgccatctctccctgagaataaaaccgatagccaacctccatccggctccgagacctgcttctgccacacctcgactctcagaatctctccacattatccatagagaccgtgtggtaatagtacacccgggccccccgtcttcctccctgtccc

SEQ ID NO: 667905 - DNA, 278 bp, Homo sapiens
  misc_feature (3)..(3): n is a, c, g, or t
aangtcggagtgcccaccacacacacacaaaaacagaatagccaaaactatcctaagcaaaaagaacaaaactgaagaaatcacattacctcaaattatactacagagcaatagtaaccaaagcagcatggcactggcatagaaacagacacacagaccaaaggaacagaatagagaacccagaaacaaatccatacatctaaagtgaactcattttcgacaaaggtgccaagaacatgcaacagggaaagggcagtctgttcagtaaataaagctca

SEQ ID NO: 667906 - DNA, 255 bp, Homo sapiens
aaaacataaaaatcatcaaaagatatttcttcgaagaataacaaaaaagcaaacacatcccgagtcttgtgcgaagctttttatagaggttgaatcggcccccccttatgttatgatactcttattaacatgctgcacgctcccaaagaccttgggactcttaggaccaaggggggccagtctcagagcctcccaatggatacaaataatatgcacctaatgtagcctgaacaggggcttttttttttttttttt

SEQ ID NO: 667907 - DNA, 1011 bp, Homo sapiens
  misc_feature (285)..(285): n is a, c, g, or t
  misc_feature (371)..(371): n is a, c, g, or t
gacgttccgaaatgggacctcggaaaggggaaggaaaagaacggaagaacaggtcatcaaccttcggaactcatgtggcttgaatgagagaatgtattttggtgtcttggcactatcttttggattcctttcaattgacacctttttggtccatagtccaattggatcctttccttggccaacagcaaacccatctttggccggtggtgacattggcttgggcatagcaaaggttcacaaggcgcagacccgcagcatatgaattcctctcaaccattattggtngcgttatagtttggcgttggcccagagcatagtgtgggcccaagagagttgcccaagggagcgttggtgtcatctcaaccgggcgntaacaaccatctcaaacatcccgaggggccaccagggacaggaacatcagagacaccaaagcaaccccgtgtgcaaccttgggggcgcccagagccggagccctccagcagagcctgtgagcccgcgtccggaggcatagaagcaaccgggccggcattggaagcatgtccaccccccgattcccctcttggaccaggcactcgcgccaggaaagggggggtcggcggtgggtcccgcggtctgggtgaacccaagaattccctccaaaactatttttcctggtttacttaacttgggccttctctggttacaacataccacaacatcactacaacaccaacactaacagaaaacaaactaacacacatatcaacactacaagcatcaacaactgtgacattacaccacactaaacacctagcaccagaacaaccccagaggggccggataacaaatggcccaaatgagcgcacaccaaacagtggcgccggtaacaacatggaagtggaaccccgcgtgcccagtatcgccctgaaaaatcccttttcccaggcgtaacgacccacggcgcccccaatgcgcactcagtgcgacgcagacggtaacccgacgagacagcctcaatccgccggcccctcg

SEQ ID NO: 667908 - DNA, 230 bp, Homo sapiens
cgagcaggaggatcccggaaggacagaggccatcccgcacgagccttcacaggacttctggagtccagggcagtcgtatctatcaagcagcggttagtggggatacaacatggtccaccggatcaagataatggggcaggagccaggcttagtggagactggacctttgactggctcttgcgctaagacttatatcttgacctttaactgaaacttgtccttaggccgaa

SEQ ID NO: 667909 - DNA, 628 bp, Homo sapiens
  misc_feature (628)..(628): n is a, c, g, or t
gggattttcaacttttaacatcaggactaagttattttattattagtttttctcccaaaatactggctttcaaatcactgtagctatgaaaacttgttatccctttgattcctttattacatttaacatcaaattttcctaattagaaatatatccttaaaatatagtcaagcagtgactgcttattttgaatgaaacaaattaaatgtagacaagcagggtgattgtatatagagggttttttcctttatgtttggtttagctttttcggtctatgagttgcccaaaattgaagtttatgttgcaggttccggtgtggtgaggacctacagtgtcaggttcttacaaagtaaatattgacaaaaggcaaatactgggcagttcaatcttgcatgatacctatggccatattacccaaaatatcatgacttggtttatctcaaaagctaagcaggattctgagatactaccaataatgtactactatttctaaaggagtaatttagtaattttgtaaagaaattcacaaacatggaatgacactgtgaattcctgtgaaaaagcagatatccattgcttagtatctaaaatatttcgcaacaattcactgatagctcaagtatgtgan

SEQ ID NO: 667910 - DNA, 320 bp, Homo sapiens
ctgatatttgacagtccgctgacgtagatagaggtggctctggcgtcctgcaggctgtaccccacgcaggcgatgttgatgcccctttctcgcttcctgtgctgtgtctccccagcaggacacaccgtcccccactcaccctctaaagccctggcatgtcctctgcccccatccccaccctggttggctgcctacctttcttccccaacctgatggctttgggctgaaatattcaagaaggaagcatggagactgggaaggagggagagagagaagttcactggctgttccaatgtctgggtggctgtattgcattgaac

SEQ ID NO: 667911 - DNA, 850 bp, Homo sapiens
gccttttttttttgtttttataagattattagtataaagggggagataggtaggagtagcgtggtaagggcgatgagtgtggggaggaatggggtgggtttggtatgtcaaagtggcatttaattttaacgtgtagatatggggagtagtgtgattgaggtggagtagattaggcgtaggtagaagtagaggtcacagggagggtgataggtggctatgatggtggggatgatgaggctatggtttttggtgaattcttcgataagggcccattggggccaaaagccggttacgcgggggaggcctcctagggagaggagggtggctggaataaagggtgtaagtcatgtcagctctgtttcaggtgcgagatagatagtagggctcgtggtgctgggagttcacgtggagtagtaggaatggggcagtagttacggataactataaactagttaaacttaaagaagtggtatatgtaagggttgtcccggtacaaactgggtattataatacctgtggtggggtaactagaggggtatgccacagacttttggcgtagctgggtttgggttaataagttccacacatgaaaagtgggcttggcgtaatgattgggaataacaatttgcgaagcagtgtgagaaagaaaagggaatagcgttctcacgtgaggggacgacacttgcgaaatatggagttgccattgggcgccatgatttgccatgtgtgaaaaacaggcgggaatgtaaaaagggtgtgctgagtaaacctaggggcccaaaagtgtagaagggacttgccaatttaatgtacaacaaagtgattgcaacatatattggcaaatggtatg

SEQ ID NO: 667912 - DNA, 257 bp, Homo sapiens
  misc_feature (244)..(244): n is a, c, g, or t
atgtagacatctgagttttaatccccgtactaagccatctaagcatgaatcatctgttgaactgactgttctttaccgaattatatctcattttcagttacaaacttcagctacacttgtaccaatataaaaagtatcatcagtatagcccaataattaagaaattggattctggaattaggttgcctgggttcaaattccagctctatcacttcctagctatgtgctatagactgaatgtgtncacacccaaaatt

SEQ ID NO: 667913 - DNA, 174 bp, Homo sapiens
ctttgggccccccgggttttcccttttaggtttcgggttggttttttggggggatttgtgaggggttaccattttcccccgggaaccagttttgccttgtttcggattttattccgcccccttttggggatttggcccctcgggcccaagatttgggcccgggccctggtccca

SEQ ID NO: 667914 - DNA, 163 bp, Homo sapiens
  misc_feature (51)..(51): n is a, c, g, or t
  misc_feature (57)..(57): n is a, c, g, or t
  misc_feature (59)..(59): n is a, c, g, or t
  misc_feature (76)..(76): n is a, c, g, or t
  misc_feature (78)..(79): n is a, c, g, or t
  misc_feature (83)..(83): n is a, c, g, or t
tctagaggatcccgagctctctcgtgtgggggtgcggactcatctctggtncgtgcnancagacctcttactggtncnnggtnggatgccattttctcacactctttccttatcatgcctcatggccccacccccattctaggcggagaacttttagccagag

SEQ ID NO: 667915 - DNA, 380 bp, Homo sapiens
cacttagcctcgacagttatgcctccctcggcttggcaggcccttcccgtcccttatccattatgcaattaaattttctatgcttcaaggcagcactttgccgacaacttcccccggggtgccgaggagctcgctcattattatgaagatgagcaatacagaatctacacattgatccagcctttccatccgagccaaatagttgacaatgggaaatatcttcacgactagagaaccttcggctaacaagtgcagaatgaatgatacaaaagcactacttggcagtcccctaatgagaagtggatctcagcaccaatcattagtgtacagaattttatcatgggtgccctatctggtggattaagtttaacaccagtaaa

SEQ ID NO: 667916 - DNA, 189 bp, Homo sapiens
cagggccaaaaaaagggaatgtttttttttaaaaaaattcattttcatgggggtcccctcccttttttgtgaaagtcctcaaaatgaaaaatttgtattttttatattaaatcccttactattgatttttgttgtgtttttaaaagggggtttcccccaaataaaattttggtttttgcccaaaacata

SEQ ID NO: 667917 - DNA, 596 bp, Homo sapiens
gagagagagagagagagagagagagagagagagagagagagagagagagagagagagagagagagagagagagagagctagagagtgcgagcgagatagagactgtcagagcgagaccttgttttttatactctcttaagagccgtcactgcggcacattgtgttctattctctattcgcatacttatctcggttcttatccttcacatacctctgtttctccttagccacatgcttgtcctggtgataccacgttttacacataggcctccaaattttgcctgtcttgaatgctctacatattttttagctacttatgcctctattccattttacttttatttcttgtctcctcctgtacattggcctttctacattgctattttatcactggcaccttttgttcttttttttaggtctgtgttttaaagtttaccttttgtctctaattggatgccattttgaccttctttctatgtatgttctttttttccattccgtctatcatttttttttttcctccctgtttagcttttcttttttgcatttttcgtatgcttttccgacctgcttattttacttagcttatcgctttt

SEQ ID NO: 667918 - DNA, 115 bp, Homo sapiens
atcacccctccgtgagaacacaagaaagggatcacactgccagagaaaccctatgcttgtacagaatgtggaaaaaacattatttaccattcaagcatacaaagacacatggtat

SEQ ID NO: 667919 - DNA, 379 bp, Homo sapiens
ccggctgtaggcagatcccatcatttgaacgtatggtgacatcaaaaaatataagcaattttgttttactttctgaacaaattcaacaagcaaattcaacgtgcctcacacggggctacagagatgagacatagtcccttctttcatgaagttaggaataattaattgtgtttgactgaggttagctggtataatagagattgtgtgggatcagaggaaaaggtgatcagaatttgtgttatgcaactattttagatgagctgtgaggaaatccctgctagagatttgctactctgtgctttccacaaatagctgacatagccagtttggaaataaatactttggtgatttattttattttactttatttcattttgag

SEQ ID NO: 667920 - DNA, 477 bp, Homo sapiens
tattttcacaggtgctggagctttgtccatgttcatccattgtttcctcagtggccagccatgactggcgctcgctggttcagtagtgttgagtaatggcgatcgtgtgctcctgtatccagcatcctgcttgtcgtgctttatatcctagatcatggcgcctctgtgtggattagagttagctttgcccaatggccgtatcgtacatgtgactgctgcctgtgttcttaatgacaggcagggtttgggatcccacaggttcactttgtaaaccattttcgtgtcttgcgtctcctgctattcttggtgagttcttgtcttcagtttgactgaaatttcttttgctgcacttgatagcatctgtctctggtcttctctgagtacacgcaaagtggctagtccctgttctctttgtaacaactcactgggcctcagaactggctcacagtctgactgtttcttgccctgtggacaagt

SEQ ID NO: 667921 - DNA, 257 bp, Homo sapiens
atactgtcctccgtgttctctgtgctcacgctagggtgggccctcgggtcttcctctgcgtaggtcagcttctgagtgagctctgtcatctttacatgaagtctccgaccacgtgggcctgtggatctggcctatcaaaagcgatcacgtgaagctgggcgctgtggcttatgcctataatcccagccctttgagaccaggggttcaaagccagcctgggcagcatagcaagatcctataaacaaaaaaaaagagtt

SEQ ID NO: 667922 - DNA, 901 bp, Homo sapiens
gaaatggtggatggacgccggtgctgtcggggtggtcctggggttccctggtgggcctgggatggggaaccgcggtggcttccgcggaggtttcgtgcattggcatccggggcctggggtcgcgcgcttgtgtgacggggcgcggggcctgagggccgcgttgagctctgcggagtgcgaggttcggatggataaggagtggatgcccgtcaccaagattgtgcctgcttggtcaaggacatgaagatcaagtccctggaggagactctatctcttctccctggccgttttaacggaatctactagatcatggatattcttcctgtgtggcctctctcaaggatgaggtttcgaagattatgccagttgcaataagcagatccgtgccggccagcgcaccaggttcaaggcattagttgctatcgaggactacaatggacaatgtcggctcatgggtgttaagtgctccagagggagggtgtacaccgactatccgtggggacatcgatcctggcaatgctctccatcgtccccgtgtcggcagaggctactgttgggaacaagatcggtaatccccactactgtcccttgacaaggtgacagggccgttgctggctctgtgcttggtacggcctcatcccctgcagccagggcactggcatctgtctccgcaacttgtgcctaaagaaagctgctcatgattggctgtatctgatgactgtaacactcagccgggctgactgcacctgggcaaattcgccaaagacaactttgattgcatttctaagaactacagtaactcaaccccgacctctgaaagaatgtttcaccaaggtctccctattcggagagttcttggcaccttctaaaacaaaccagaagtcccgtgaagagatccaag

SEQ ID NO: 667923 - DNA, 291 bp, Homo sapiens
gactaagggaagctgcggaaggatgatccactcacaaatctgaatacggctttagacgtgacagagaagtacctggtacatccccacagatgctggtatgccgtaagacatcgtgtggaatctgcccgtaccggcatgagtacagccatacatgagcttacgctgtctagacttctaccagcgcctatctctgtgagcccagcaaggcggagtacagctagccaactcgcactctgcgacggtgttggcccgtcaaccacggagaacgcagcagcattatggcaagactac

SEQ ID NO: 667924 - DNA, 144 bp, Homo sapiens
tgggctgggaagatgggcagtgtagctcagagggtccaggcttggggggctctcagacagtctgggtttcatctctccaggaatgacgatgaagcctctgtgtgtgcaatgcgctgacctcatcggcaagctgagtcaccccac

SEQ ID NO: 667925 - DNA, 114 bp, Homo sapiens
  misc_feature (3)..(3): n is a, c, g, or t
  misc_feature (52)..(52): n is a, c, g, or t
  misc_feature (54)..(54): n is a, c, g, or t
  misc_feature (78)..(79): n is a, c, g, or t
atnggcacccaggtttttgaaccttggtcctgtgaaatgcttagaactatgnanatcttgttattcttttatctaccnnttgggcttttaaaaaataatttcattctcagatca

SEQ ID NO: 667926 - DNA, 118 bp, Homo sapiens
gtgttagcacagaggaggtggacagcacaaggaggttcggctggagcagcagagcgtgccagccgcaggtttgggagcctgaaggaagactgacccgtccctccccccctcctctgtg

SEQ ID NO: 667927 - DNA, 943 bp, Homo sapiens
gttgtgaggtaggtgcatcgacgagagaaaaagggcgcggttatactggtgttcagatggcaaaacctgtcgaccgcgacgttgtagcgcgcaacaacgtgtgggcaacgcttatccgggtgcctgtgcccgtcaacggtggtggttggcaggcaagaaggaaccggtggggcctataaaaaatgttctgcatcagtgtttcagacagggaaagtttaaatagacacattgcttttaatgtcgaacacccggatctgtcacgtgggatagcccgcccagacggaaaatgtttttgaaaggtgcgtaaacagatggcgagcacctatgtgttttgacgaggctgggcaccggagaaatttttgataccgtgaaaatgtgggttgccacgcactaatagaagaagttctcttggcgaggttttatttacacgttgctagttgttcgtgaattgtattgccgctgcgtctataggatgtggtagccccgctaaggttaaaaagtgtgtttcgtaagtaggcgtgtaataaccggccagcaccgtgtgccatggtagcgcttattggtaaatggggaggggaattatccccccgcgggtctatatttttttttggcgttaatttaaaatttctcgagaccccccggcccatatataggttatcctactccattagtagccacggtgtgcacaacgaccaaatataaggaagagccttttataatcccccgataaaaatttaatgaaatgttggtgatacgtctttaaatgttcctgtatttaaataattgtaatctcctttttttaaagtcccccacaaaacgttgattttgtagccttctatgttttgccatgagtattttctcctatattttttaatttgtattgagatggaaatttatttttttttgaaatttaaatttccccctttttttgaacccaaaaaaa

SEQ ID NO: 667928 - DNA, 160 bp, Homo sapiens
  misc_feature (105)..(105): n is a, c, g, or t
cgaggtcgggtccttggtatcaggatcccacgatcattgtcttgtgatatgtgtccaagtcgcgctagtaagtagtcagacgttttaaaccatatctctgatagnacatataactattaactataaaccctgagagtcagtgctttctgatagcggaact

SEQ ID NO: 667929 - DNA, 96 bp, Homo sapiens
  misc_feature (39)..(39): n is a, c, g, or t
gagtgtcaggatggccgagtggtctaaggcgccagactnaagttctggtctccggatggagcgtgggttcgaatcccacttctgacacgttccttt

SEQ ID NO: 667930 - DNA, 255 bp, Homo sapiens
aagtatattggatactagtcgtgcatatgtttttttaaaacagagagaaccttgaccacctctaccttacaacttcaacaaacgttatttcaaaatgggatcatagacctaaatcccaacctcaaaattaattcgagggaaacatagcagacaatctctcgtgagcttagattaggaaaaaagtttcttagatatagcttctatatccatgaagcataaacacaaacatatgcttaaactagatttcataaaatt

SEQ ID NO: 667931 - DNA, 326 bp, Homo sapiens
acttcggtcagaccatatacacgctgttgccatatctggattccttgatgcaaacggcccacacggagggagtcactgcagtgcgcgctctgctccatgagcttgtgtcacaccaggtgacatgggacatagacagtcagctcctgctgctcccagccttcctgggcagccctgtcctggagcgcattgccagaaatgacactgcatatttccctagagcccgatgctacgattactacacgggtgtggatattaatgcaagaggcgagagcaagaccttgccagccactcttgaccacattaatcttcatgtctcggggggctac

SEQ ID NO: 667932 - DNA, 298 bp, Homo sapiens
ctgtcaatcaacctcagtgcaatgtaatgtacaggaatggaatggaatggagtagaatgaacacgagtggaatggaatggtatggaatgaaacggaatggaatggaatggaatgcaatggaatcaatccgactggactggaatggaatggaatgcaatggaatggaatgaaatggagtcaaaccgactggaatggaatggaatggatggaatggaatggaatggagtggaatggactggaacgaaatggaatagaatggaatggaatgcaatggaatggattgaacagcggaccctaa

SEQ ID NO: 667933 - DNA, 1126 bp, Homo sapiens
agaactgggaggaggagttggatgtgcctggatgggagcccgcgctcggtgtgcggctgtgctggagtggcagctgcacctgagttccctgcgaggatcatgacctgactggggccccggagccgcgctgcctctcgggtgtctgggtctggtggtggagcccagtgctcgcatgtgcctgtgctgtgtgctgtggtgcctgtgatgtgtgcattgcagtcttccctcgctgtgatgagatgtgaagtgctggagtgagctgtggaacctgctggctgtgctgctctgctgctgtgctgccatagctgtgtggtgggaatgtggcatgttcctgtggcctgtgtgcctgctgccatcaggcagtggtctggctgtgcttcccagcgcgagtctcagtgggcccgtgtgtggctgtgctgtgccgacgttgtgatggaaagtcaagtttgttgcgtgtacggtgattgcccggagtgaggcggtggtgtgacctgggtgtcctcttgcaccgttagggaaggcaaacttcgccacgcatggcctgcaagatgggctgctcgtcgctgtgcctgaggatgtgcttcagtttcgggtttctggctgggcgtgctgtgcggggcggttgtttgggcttgatgtgtggacccctgggacgagccttgagattgccgccctgtggcccccgtgcttcctcctgactgcggattggggggacagtggtttgctaatcgcagaaaaatctttcgcggagacaacgtgaaacattgcgtgattcccttcattgtttgcgggccatggacgtcgtggccctgtggagagtaacagaccaatttccttgttacataagttttgcaaggcttggggcccgaagtcggggggacccgaagccaattttcgcccaagctttggttcggggggtatactgcaagaccggattgggcaacgacctgggcgttggaccgtttactagaataacatttgttcgaacgagttgccaaagcctggtaattaggcggacgttcgttcgacggccgggcgccataggggaaccaacgaattccgcgggagccaggcatactttaggcggcggccaatttaacgttacagcgtttggtggacgcaaaac

SEQ ID NO: 667934 - DNA, 567 bp, Homo sapiens
acgaaaaaagagagcacgaggagccgccatgggaaagccaaagcgcaaaagggagccccatggatagcagggacgagggaaaagagcgggaggagaggaaagggagcagaaggggagagggaagggaaggagaaaagagagaagaggaaggaggcgaaggggggaaagaaaaaggaaaaaggggaggaagaaggggacaaagaggaagaaaggaagagcacaagaagaagagaagagaaaaggaaaggaaagaaaaagggaaggaagaggagaaagagagaaaagaagggaaaaaagggagaagaaaggaaaaagaagaaggggaggagagaaaaagggaaggagagaagacgagaagaggaagaaaaagaagagaaaggaaaaagaaggaaaggcgaagaaaggaggaaagggaggagaggaggaaggaaggggggccaaaagagggaaaagacgggaaagaagagaagaaggaaagggaggggaaaggagaaaggagaggaggggaagggagaagaagaaggcggagagggaaagcaggaagaggagaagaaagggggaagacgg

SEQ ID NO: 667935 - DNA, 191 bp, Homo sapiens
gaacgagttgtcaggtactgatggaatttagttaggacattcagaccttaaatgccaaatttggttaaaatatctcgatgcagtcttattggccacctacattgtttgacatatacgtatgaacagttagaattgcagcctgcaggaatgccctgcattgttttcttttaattagaaataaaaaaaaaaaa

SEQ ID NO: 667936 - DNA, 511 bp, Homo sapiens
agcggacgaaatcggaggcacaatttcatcctcatctgttactatctcggcataattctcgtaaaaacacacgagctctccctgctgatcgtgtctgattaatctcccaaacctcaatcccttacaaaacaacaaactcctttccttcctaggcatggttaatgcagtcagaattcttacacaagagccaggaccgcaccctgtagcctttctgtccaaacaacttgaccttactgttttagcctagccctcatgtctgcgtgcagcggctgccgctgctttaatacttttagaggcctttcctacaaggtctgagaaggccaccgtagtcatttcttcccttctgtcagacataattcctcagtttagccttcccacctctatacagtctgataacagaccagcctttattagtcaaatcagccaagcattttttcaggctcttagtattcagtgacagactaatggtctattaaaaacacacctcaccaagctcagccaccaacttaaa

SEQ ID NO: 667937 - DNA, 397 bp, Homo sapiens
tatagggattaggagttgaaaacaccatcccggaagaggaagaggagactggacgtgagaacgagactgaagggccaaacccgatcccctacttagcggcagtagccaaatacgtctgcatcatcagctcgaaagtctccatagcgccacaggttcagcctggcgctctaggctgactctagggcattcaggtattctgtgatcactttctggaactgtttctccttgcgcacctccaccatgaccagcccttccttcaccaagcccagccccacatcgcccttggaatctgcaaactgcagggtgacatgggggcagccggcactcaggtgttccacgttgagcaggcactgagtgttctggatatcccgaactacgctgtccacggcgtccgtgc

SEQ ID NO: 667938 - DNA, 181 bp, Homo sapiens
acctaaataatttatcataatcccttaccttctctctcctgtaaaatgaactgtttctgagctacaacttcatagttcatactatgtattttagacagcacattttcaaggcagagtattttagacactaattaggacaacacatcatattattgcgccaatgtttgccatttctaaatgt

SEQ ID NO: 667939 - DNA, 172 bp, Homo sapiens
tctagaggatccgacgctactctctgttggggcgctctctctggggactaccccgacctccggtctacgccttacgccctactcccgccctgtcgtgcttggtcccctactgccggactttgctccccgcgtgctccccacttctgctctcactccctgtggcccaccgcgt

SEQ ID NO: 667940 - DNA, 223 bp, Homo sapiens
actcgtatgcagtatgggtgggtctaacatatttggaagacttaaaaagctaatagtttccaatgcactcaaattatttatttacaatctaggagtctctctgagctcagagttctgaaatcgttgtcacatgtaatcttttgtgatactgtaccacgttcggctgttaagtgctttgatagctcacgggggcagtgtcaaggtcagggagaaggcattcgtg

SEQ ID NO: 667941 - DNA, 1389 bp, Homo sapiens
gagggacatccctgagggaagggccgggagcaggagcgccccagcgtgcggcgggcgggcggtgcgagcggacgatgcggcgcggagccggccacgaggctgcagctgccagagggagcccccgtccaccggattcgctggagggcaccgccaagaaggcctctgcagagggtgggcagcatcccgggaccatgccatgagcctctccaggacgccaccgccccgcagtgagctttgaacctgccccaggacggtgaaccaaaagaacaggacctcgaggcgacggctgccgccgccagcctggtcccagggggaccctggcaccagcacccggtgggggactcggcgcggcactacagcgctgccgagttgatgccgtcccggcccggggggaacggggacaggacacccgggcgactcaaaggggctgcggcccaactcaaagaacaagccgtggaaattacggcggccccgtatccgagaggtcgcaggacgccaggcgactgcgagcccaagtgaggccggccagtaccccggcggaaagcccgggcagcccatggcgacaacggcccgaccatttggcgcccaacgaacaacaacgggtgaaccccgggggccctgcgcagggacccgcctattgccagcagtcccctggatactgacggaaccccctggcgcatggaccctctcaccgggaacgacttccaacccagtggagctgaacttcgggcagagaaccaagcggggacgcaaaccgggaccactgtggggcacaacaggccttcccgcgtgaacacgcacatctggcaaggaaaccgccgtacaggcgcgaacaggagaacaccggggccattccacagaggatcagccactccggaaggactcagcgcaacgaaattggcgtgcaaccgcggggtgcccatgacagggcggccaatcaccccaaaacagacctcggcacgaggaccatctaagtgcaacaccgaacagacacgacacacagtggccaccggccccagcggacagcaacgccacggaggcgcagcgggcaggacaccagacggcacagcggaccagcttgggccgcgacgcaccctagcgaacagagacagtccagccgtggggcaacaacgtcagcgcgggatcactacggcaggcagactcggagcgcgacaggcacacggaccagcccagcgtggcaccgacactggacacgtcgcggagccaccgggctgagcagtgggacacccatcggtgggtggaccaaccacgagagaagccacccacgcagaagcgtgacaccacgtcactagagaaccactaggagcggaatgaggagccaaaacacaccggcgccagaacacagggccgccccacagagcccccacg

SEQ ID NO: 667942 - DNA, 320 bp, Homo sapiens
aactcccattcaaagaaagattttaaattgaggtaattttttgactaagccttaagttatggggaagaagaaatagtattttcaaggaacaaaaatgagaaagggcctgaggtgtcagggatagactccaagctcactatgtcaacatggtgattatgggctttggacagagatgggggatgatgctgggttgtggaaagagactttaaatggaattgggatctatatcaggaagggtctttatgttaacattaagaagtttgggcttcatcttttgagcaacgtgtagacagtgcataagcctgaggggagcatgagca

SEQ ID NO: 667943 - DNA, 203 bp, Homo sapiens
gggcccccccctttttttttttcccagggcaaacaaaagttaggtttattttggggtcacccatgcccccctgaaggggcctgttttcatcaaaagttatgtttttgccaaactggagtttgttaagtgtgcaaaaacattgtgtttaaaaaaaacagtgggcatcccttaattaaaaaaaacttttttgttaaaaaatgcca

SEQ ID NO: 667944 - DNA, 188 bp, Homo sapiens
  misc_feature (61)..(61): n is a, c, g, or t
  misc_feature (90)..(90): n is a, c, g, or t
  misc_feature (93)..(93): n is a, c, g, or t
  misc_feature (109)..(109): n is a, c, g, or t
  misc_feature (130)..(130): n is a, c, g, or t
  misc_feature (137)..(137): n is a, c, g, or t
ccgggaccgcttggagcccgggaccccttgcacatcaaactttcctttcgacttatagtcngcaacatccttctcatacttctccttcanctntgccgccttaatgatntaaggctgcttttcactgtcntttaaantatgccacatctcagccagcttttttgccacgtctccaaaggcggtcccgg

SEQ ID NO: 667945 - DNA, 328 bp, Homo sapiens
  misc_feature (21)..(21): n is a, c, g, or t
  misc_feature (29)..(29): n is a, c, g, or t
  misc_feature (156)..(156): n is a, c, g, or t
  misc_feature (228)..(228): n is a, c, g, or t
  misc_feature (292)..(292): n is a, c, g, or t
tgaaaaagccacagcaaaagnctgtaggnaattaggcacatggcacatagctcagtttctcaggtttaaagtgccccagttctgtcttggtactcagggtgatactactatagaagaaattggtaaaatccattcacataaatgcattggtcattncctacttgtctcctccactgttacataagatttatggaggctgagattttgtctatttgttggatcccaggntatcccttagaagcatggtcaggcatcattaatctttgttaaataaatttaaaaaaagaatgantagcttctcccggagtcgggtgacttccctcatatt

SEQ ID NO: 667946 - DNA, 222 bp, Homo sapiens
ggctaagtaacaggaacaacaccacatgcctcctattataatgcactgaggcggacaccatatcgcttccaggagtatctcaccaaaaattggcaacctaaatttaatcatgaagaatcaccagaccaggccgggcacggtgactcactccttgagaggctaaggcggacaaatcacttgaggtcaaggagtatagagatcagcctggacaacatgttgaaa

SEQ ID NO: 667947 - DNA, 890 bp, Homo sapiens
  misc_feature (576)..(576): n is a, c, g, or t
ctggagtgcaatggagcaatctcggctcactgcaacctccacctcctgggttcaagtgattctcctgcctcagcctcctgagtagctgggattacaggcatacaccaccacacccagctagtttttgtattattagtagacacgggggtttctccatgttggccaggctggtctcaaactcctgacctcgtgatacgcccgcctcagcctcccaaagtgctgggattacaggcgcgagccaccatgcccggccagtgtcctttcttatacacgtacatacatgatgatggcttgagtcagctgcagggcagtgggcttaatgagagggatctttgtaaagacagctcttcacttcagctcagtagctttggtcataggcaagtttgttttccattatcataatttgatgattcttgtgatgaattcaatgctagttcttaaagaactcttttatttctgtatgtggagctaatgtttaccttggaaattttgcaaaatacatgtaagaaagaaataaaatatattttgaaaataaaaaaaaaaaaaaaaaaaaaaaaaaaaaaaacaaaaaaaaanaaccaaaaaaacaaaaaaaaagaacaccagcaggagaaaaggacagaaaagaaagaacaaaaacaaaggcacacaccagagagcaaccagagcagcgaaacggcagcaacaggcgaccacacaagcacagagcacgaacaataacacaacagaagagcggggagagcacgcacagagcaacgaaccacctgcgcgacagcggcgggacagacaagatacacacacgcgacatcatctggagaaaaaccaccaaaccacagagagcaggcaaacactacgacgcgagccgaccgaaggcgagacacccccacgtg

SEQ ID NO: 667948 - DNA, 659 bp, Homo sapiens
aagcatggtatcaacgcagagtggccattacgggggctatgtggctgattgaagagtatgcaatgagcgattaggtctgaggtcgagcagatgactctgggcaataacgaagcgcacacgacaaaacagtaagacaaagaacacacagacaagacagcccgcataaggaaaagcccaagagacaagcaaaaaacgcccacaagaacagcgaaagccgcaccacacaacgccacaaacagaggcgcaagcagacggaaagcaaacggagcagtataaaagcatacggcgtacaacacggaacataacaggcaatcacagagagaacaaggagacagcaggctagagaagcacaagagaaaagaacgacagaaaagacacaacgagcgacacggagagagcaagcagagcctgaaacacagagatgagacacaacaaaagaggagagacagagcaaaggaaacagaaaaaagaacagtagcacgcgaggcgcaggcagaatggacgccacagcgcgaatacctacgcagaggcagagcagacaaacacagagcatagcgagagaaagaggagcacacggagagacgcgacacgagcaagacagaaaagaggactagaagaagacagagagacaaggcagagaaacaagagaagcgcagcaa

SEQ ID NO: 667949 - DNA, 529 bp, Homo sapiens
ctggagtgcaatggagcaatctcggctcactgcaacctccacctcctgggttcaagtgattctcctgcctcagcctcctgagtagctgggattacaggcatacaccaccacacccagctagtttttgtattattagtagacacgggggtttctccatgttggccaggctggtctcaaactcctgacctcgtgatacgcccgcctcagcctcccaaagtgctgggattacaggcgcgagccaccatgcccggccagtgtcctttcttatacacgtacatacatgatgatggcttgagtcagctgcagggcagtgggcttaatgagagggatctttgtaaagacagctcttcacttcagctcagtagctttggtcataggcaagtttgttttccattatcataatttgatgattcttgtgatgaattcaatgctagttcttaaagaactcttttatttctgtatgtggagctaatgtttaccttggaaattttgcaaaatacatgtaagaaagaaataaaatatattttga

SEQ ID NO: 667950 - DNA, 129 bp, Homo sapiens
caggggtttgggaaatccaactttttccacagtgtgagtgcacgtgtgaagccccctcatttttccgctagggataaagcaaatgtggatgccctttaaaagatattaaatgcttttattttcaatatt

SEQ ID NO: 667951 - DNA, 1219 bp, Homo sapiens
ctctgaaccaggtggcggagacgcgctactgcgtggaccagaacctgctcaaggagtacttgccccgtgcaggtggtcacgcacaggtgctgctgggcatctaccagtgatgctccatgtgtggctggccattccaccacgcaggagttgctgccagtgcctggcatgatggactgtgctggctctacacctgcgatgggacgctggcctcgtggggagtgtggtcagtgaaagttctacctggacctgtacccgcgggaaggaaatgtacaggtgcacgctggactgcttatggcctgcaagccctggcatgaccttgcaggcaaggatgagtgatgccgccagatacgcacatctgctggccatggtaggcacaaacatatcaccaaggcccaacaaggactgacatgcgcccgacgcttgcatgacagagattgacggacggtggcagaccctacattccacatgagttacggaccacgtgactgcacccatgctcatgctacccaggacggacgatatcgcccattgttcaggacgaggacaccacacagtgagaagccgggacttatgttgggcaggcgccgggaacggcaggaaatgctgggaagacaaactgggggtaggtaggagacaggcagggaagaccatgcatagcatggcagggactggtacaccagggcaacatacccaggaacaagggcacgacgcacaggggacccacggggaaagccaccaatgggacccaaacgcatccactcagaggtcaccgagagaagagggcccaaaaacgcaaggggcactcatagcaaacccgtggtcgaccaagaactcagaacagacggcccaaaggggaggacccaagggacccaggcaacaacggcacgcaccggaaacgccagacgccccgacacgaaggacagaacgtgagcggcgatcatggacaacgagaggaatccatcgaggaatccccggaaaccagaccaaagaaaaccaaaccaccagacagaaaacaccatcacaagcgccatccttgaaaagagtaggaaaaacgaacaggcacccagaacacaacagcgaaacccaagaacagaagaccaaggacagcaaccaaacggcacagcgataacagcagccacacacaaaacaagaaaagaagcacatgaaaccagcaaaggacaggaaagagacaaaaacaacacgaacacacgaacaacag

SEQ ID NO: 667952 - DNA, 1009 bp, Homo sapiens
ggaccgtttactgggcggcggtttggagcaagcgcagatatgcatggcaaggcagtcttcactgcgtcaacatatcgagcggccatcgaattgcaccattccctgtgggattgggataccctgagagatatcccacatccacggggcatgggtgcacttgtatggccgctgatatgggttggaccatttgaacagctcggtgttacccagtgcgacagtctggacgtcgtgcccagtatgctacgcagcaagtgaacgaatgacggtgggcgggtgtagtgcgcatttacatggtgcagcaaagggctctagtggtacgccgaggtgattcgcgttgaaagctggtagaagagatgcctctttcacttctgtactatgctaatgacttgatggtttgcttcggtgaccagtgtagaagggggcctgggtgaatcggaggcctgccagaaaggacgcgtcaggcgaacctgcaagctgggacctaatcacgttggaagtctgctaaatcctctaggtttccatcttgtgggcagcagcttggtttttataaacaaagccgctggtggacaggggcaattctttttaccccgcattatgggaattggaggtcgggggcacaaattgtttgggttttccgcaagttggaacaacccaaatcgaatttcatggaagcaaccgaattggtggccgtgcccaatggggaacagaagcctgggtgggaattgaaagggggctggttgagaaaggctaatctgggacatactcgcaagtttcaaacccaattcttacccagggtggggagaattgacttctctaaaaggcgaaagaggcgtgggtcgttgaaagggttactaaacggccttggccaagttataaacccaggatttcgaagttggccaaccccaattaattcttcagctccagggaggaaaaggtaaatccccaggtaacttgggccaggtacccaaaaggccattcgggtgggtggaaccggcctaacagggcccca

SEQ ID NO: 667953 - DNA, 155 bp, Homo sapiens
  misc_feature (16)..(16): n is a, c, g, or t
ttatttttctatttcncctttaaaaaggaaaaataatctttttctttatttttcctttaaaaagacccacccataataacaccaaaccaggtagcaggatagagactcattttcatctattttggttaaaagaaaataaatgtatttcttcccca

SEQ ID NO: 667954 - DNA, 191 bp, Homo sapiens
  misc_feature (126)..(126): n is a, c, g, or t
cttgagtgcagcctgcccgctttaaccagtgcaacactgacacgcggcaacgaggtcatctccgtgatgaatctgggccaatgaaatgcagtggaagtcatgtgggacgtggtaaccaccacacgnagtgcagcacgcctcgccaggccggaacctacgcccacacggtgaaccgcaactggtacggcggg

SEQ ID NO: 667955 - DNA, 151 bp, Homo sapiens
ccaggagatagcttggactccattagaatatcagcatcaccccgcaggcattccagagtatacgccatgtttcccttgtggcggtcacacttaagttgccaccaactgcttcaatgtccacgggttatcgtgaaagatgaagctcctttgg

SEQ ID NO: 667956 - DNA, 190 bp, Homo sapiens
gctgccgctactactaccagtcgcaggggcacgtgtgtgtcctgcccccgtggtgcacgtgacaagagaatgaagcacccagtctcgtaccattttgagccctccagcgctacttatatttcccccgacctgttgccgtggctgtttgctaggaaggagctgtgctcgatacctcccaagagggacactt

SEQ ID NO: 667957 - DNA, 479 bp, Homo sapiens
caaacctaataaaaaaaaaaaaaaaaaaaacgaaataaaaaaaaaaaaaaaaaaaaaaaaaaaaaaaaaaaaggggaaaaaatccaaaaaaaaaaaaaaaaaaaaaaaaaaaacctttgtgggccccttggcccaagccacttttaacttgaacaaagtttttcattgcggccgaatttggacctaattggccaaattccccttatagggagtgttttaaaaataaatggcccgcggtttaaaaacttgggaatgggaaaaccccgggcgtccccaaattaaatcccttggaaaaaaatccccttttcccaagttgggaaaaaacaaaaagggcccaaccgaatcgcctttccaaaaatttgccaaccctaaaggggaaaggaaaattgaaagcgtaaaatttttgtaaaatatccgttaaaattttggaaaaacaacctaatttttaaacaaaagggccaaaatggcaaaaatccctt

SEQ ID NO: 667958 - DNA, 553 bp, Homo sapiens
cagcttcacggaacccaaggccggggcctgcaggtggccctggaggatttccaaagcacccgcccgtcatgtgggccttccaggagaccagtgtggagagcgccgtggccccgcccttcccagctggaatatttgtaaggctggaatttaagctgcagcaaccaacctgccggaagaggggttggaaaaaacccgggtgcaaagtcgggcccaatgggaggaaacggaaatgcttggcctgcatcaaattgggctttgaggacaaagttttgggcgggttggtcccctgccccataaagacccaagttttggggggggtttaggggccccaggagacccagtgcctcagggtgcaaggggttggttgggacccccccagtttttacttccctggacagtttgccttttccagggccctgccccgcagttaagccagcctttagatgggtggggcctccagggcccttggggggggtaaccagtggaagaccccagcccccagggggggggacccgttttttcccccgccttgtttataaaggtgttttcccca

SEQ ID NO: 667959 - DNA, 343 bp, Homo sapiens
  misc_feature (156)..(156): n is a, c, g, or t
  misc_feature (294)..(294): n is a, c, g, or t
cccgatcctatcgcgttattggcatccgctcaaatgccgagccccgggccgaagttgccggcgacccactgcgtgacggcattgacgtccgcgtagtcctgttccggcagccgtcgagcatcgacagcacctcgttgctcgcgccggcgtcgcggngcattcgacgatcgcatccttgttcgccgggtagcggacggccgccagcacgtcggcgatctgcaggtcgatcgtttcgtgagggatatcgtgagcaggggtagcgggcttgtcgttcacgtcggcgtctcggggttnggcgggaatcggatcgaagcggaaggggttggcgcacccgtttaacccc

SEQ ID NO: 667960 - DNA, 365 bp, Homo sapiens
accttggcgctgggattgataaaataaactaacaaatgtgagggaagacacaaacctcccacagagaattccaaatgaattatgtaaatattccaccctaactgaggaagagcacaactgtccattcagtaagcgtgggctctgcaaagtgacctccttccaaagagaacagtataaaaaggggtgggggaagtaactttacagtggataaatctaacaaacgctactccagaaggatgatcaaggtcagtaataatgtgataagtcaccttgatagtatgtatccttgatagcatgtgttgaaaagggcatcttacctctgtgatcttcccctgatatagtccgtaaggccattttaatcatga

SEQ ID NO: 667961 - DNA, 241 bp, Homo sapiens
tcacactactccccatatctccacaaaaaaataaacaaggttggccaggtgtggtggcgtgcgcctgtggtcccggctactcgggaggctgaggtgggaagagcacttgagctctggaggtcgaggcttcagtgagccatgatctcgcccctgtactctagcctgggcaacagagtaagaccctgtctcaaacataaatgggtgaactagagaatgttctaagatcattactttccttgtg

SEQ ID NO: 667962 - DNA, 977 bp, Homo sapiens
cgttcttgggcacttgcattatggtgggggaaatttggtattttttctttatatggcatatttcctgctcagggtatttctggtttttatggtcatgtgaagtcttttggggttttgattatctgtctttgtgtctttatgaactctcttgttagtaactttcctgatggtttgtggactttggagttattgtttctgttatgaagtatttgcactttcctgggtaaggatgattgtgcgtttcgccttgattctccgagtagcttctcgtgtagtgcttaagtgtgtttgtcatgcgccagttggtggtctatcgggggcctgtccagccctctcccgctatccttcctctatgtgacgtcctttgccttgtcacttagctgtacctgcctgtctatgcctctacccccttgaggatagctatggggtaccctttactatctctggtgccctgctacctagtactaggctgtggtcaggcccaggccaccggccgggttctgcctacagcttcccacgtgcttgctgtacatgcgtgtgcctgtgtgtggtgtctgttgctgtgtcgtgaatactgtgaccatcactcagtcctatactatagtgagtggccctcgtaggcctactagttatgctactttcagtgtgtgtcattatacgtacgtctactgctttttaaactcgtataactctgttattttagtaataatgcccaggagtcctggtaagctacgcggtacttgcagaggttttattttttggccttagaatctgctagtaatattaggtaggcactcgtagccctagcgcagcagcctcggacccggattgcgtttgcacttagacggattatgtttatacagatgaatattaaaatgttatatatttataagggacattatatgcttcatttttatccacacccaatcataactctattcacctatctggaaccggacgcaactacatcaaccaca

SEQ ID NO: 667963 - DNA, 121 bp, Homo sapiens
tgaagtttccatggtcccatgtacacaagctagttacatcgccacacgttctggctaaaggaatgctctcccgtcacctgtctcaatcacactgctacttcgtttcagtgaatccgtttcc

SEQ ID NO: 667964 - DNA, 138 bp, Homo sapiens
ttttggcatgcaaggagaaaatatggtgagctcacagaaggatataagggagtatctaacattctccatccagttcaaaccaggattctggttagcctttggatctggatagtagagccctggaagggagcccaaggg

SEQ ID NO: 667965 - DNA, 464 bp, Homo sapiens
agactacacagcgacatatcatgcaggcatatatatccctttggacaagtagtgtagatatactattgttaatatcaagaatacagtgcaaaactgtggatacaacttgatctgaagcctagatacacaccacctacataatctgagtaagctggatacatatgcttattaataaatcagaggtgagtcatttcctcagtcatgcaagtgaaattatccttgtatgtgttaaggttaaaagtatgtaggtcaagaaataaaagaaggctcggcacagtggctcacgcctgtaatcccagcactctgggaggccgaggcgggcggatcacgatgtcaggagatcgagaccatcctggctaacacggtgaaaccctgtctctactaaaaatacgaaaaattagctgggcttggtggcgggtgcctgtggtcccagctactcgcgaggctgaggaaggagaatggct

SEQ ID NO: 667966 - DNA, 201 bp, Homo sapiens
  misc_feature (177)..(177): n is a, c, g, or t
cgcatcgtatgtagtgacgaaccagttcgtgagtcgacagcgacgccgcgagtacgaggacggagccgggcgcatggatagagcaggatgtgcggatattcgaccggacacacgatttcagaccaacgacagactgccgagtgagctgcggaactggcggtatacaacagagcgagncaggtctcacatcatccagaggat

SEQ ID NO: 667967 - DNA, 348 bp, Homo sapiens
atacatattacgactcgagcttggtacctgtgggtagcacaacctagggtcagtttgcaggtggtaaagccatttaccaagatagttgtaggtaaagaagggcagatttattagagaaattgtgaaaatatgttgcagtgggcagctcagcagagaaggggctacctgcaaagaggcaagggctggaggaaagttttatagggtcctgctgaagggtgctacgtgtggaatgaggtcattgtgcccgcaggttgtttgtgattagctgtctctaacaattgttcatacaataattgttcattattgttctcaacttggggctctccccaacctggggacccttcctta

SEQ ID NO: 667968 - DNA, 451 bp, Homo sapiens
cccctccccgctcgtttgtctcctcccgcgcgccgggggctgtcgcctcttctctcgctctccctcgctcgcgcctccctctctttttgggtggggtgggtcggtcctttctctacaaccctcctctccctctccgtcgatttctgggtgctgcgccggtgggctgttagcgctcctctccccgcccgcctctcgttctctctctctctcgcgcgcgcccccccccctcaaaaataggagggggttgcggggctctattgggcgcccccgcacccccttcttttttttttcccccgccgcgcgggggcccccccccccccgcggggggggcccgcgcgggggggtgtcgcccccgcgcgcgcgcgtggtgttttttttttttgttttttttttttttggttgtaggatgttttttttttttttttggggggccgcccctccctgtttgtta

SEQ ID NO: 667969 - DNA, 198 bp, Homo sapiens
tggggccggggggggcctttgtctgaaaaaaaaggttcgacccggggaattggggaaaagccgggcccctccggaaaaaagggggcttggtttttttttttgggctcccctagggggggggaaaaaccttttttttaataaggtcccccggggttttaaaaattttttgggccccccgggggggcccccgcccccaat

SEQ ID NO: 667970 - DNA, 911 bp, Homo sapiens
agacaaaatgtcttctctttcaaaccagagccatatatatgtctgtatatatgggacctactgcttctctgaggaaatgcataatctgttaatatcagacaaaatgagcaattggtagtgctcataatatattccaatttttatggaattttcgatggaatgttatttcaataaagccatgtaaggtgaaactttgataacttttgactcttcaagttagggtgacattctgatccaatattcagattcatttgtgtactcccacatgcaaaatgctaaattacaatgcagacacttaagaaaaagtatcgactgcaggggttgaattccttgagaatgtacttttatagtctaaatcacaaatactttactcaatttagtctttcaaaaataagtaaacctgaaatattattgtcggtaagcctatcagagtcaatccttcagttggaatgttctcctgtttagccttacctataaatcatttaagaaaactgaattcattgtcttaagatggcataagtctgtctcttgagaaataagtaaaatactcctatcttccagtaatctgtagcacctgaaatagcgtctttgtatagccaggaacagttaatgttgcaagtcagctgacttgtccacagttggacataaaatctgaagtataccagctgattctactggccttcaactgggtcggagaaatcacccgaatctcaccttagggttaccagtctgctagagaggacataaccggattgtgcccgaattgggcattccgcccgtcgaaacaactggtgcgcgaggcccacgcgcaccctcccggtgcgcgctcgcgcaccgccatcacacgacctgcacaaggcaggcgcacaggtatgacagcgggataagcgggtaccctgatataataactg

SEQ ID NO: 667971 - DNA, 152 bp, Homo sapiens
cccgtgaagactgtgtgagtgtagggtctgtcgcctgtgctggcttcgtggtgtgcgtgctggaggtgggagagctgccggaaggacttatcacagtaggatgcagtggtagtggcttgacggcccatggtggatgctgcattgtgcttggg

SEQ ID NO: 667972 - DNA, 817 bp, Homo sapiens
caggcagtctcctttgtgtgtattcagaggcagtgatgacttgctgtccaggcagctccctcctgcacacagaatgctcagggtcactgaaccacgtgcttctcttttgaaagtagagctagctgccactttcacgtggcctccgcagtgtctccaactctacaccgcctgtgtctcgcccgtggccgagcactgatggctcaatgactaaggctggcaagagccctccgcagcaaacgatctactggcgccaggaaagcctctctctccctgccctctctcatgaggcacgagacaaggccaagcgctcatgtggagccagttgggccagccacagagcataagagggtttattttcagtcccctctctctgggtcagaaccagagggcatgctgaatgccccctgcttacttggtgagggtgccccgcctgagtcagtgctctcagctggcagtgcagatgcttgtatgaacgtaggaggacacatgttctcactgggaagaagcgagggcacagaacccaagtgcctcacctcgcatcaggaggcccgtgttccctggagtcagggtgaactgcaacagcttggctgagacctggggatgagataccacaaagcctgattgaacacagggtcgtgcagcgaaactaagcaggatacctaaagcctagggcagacaaagtatagaagtctggaaaagcaagacgaattgagacctggacagtctggccgtagctcagcacaagagagcggcggccataatggaggcctacaagacacaagggaccggggagggagcccgggtacgagcagacgga

SEQ ID NO: 667973 - DNA, 462 bp, Homo sapiens
  misc_feature (100)..(100): n is a, c, g, or t
gctttttctctccctgttttgttttgtaacctaaggaagcagacctctgagaccacacacagcagcgtcgcccgtccccagaggcaccccggccaggacngcaggagaggagacccccgttcctgcatgcgctgtcgcccgccacggtgctctccgcagggtgaggcaggaggggtgggtgggggcgccagcctgtcttaacttgaaaggccgggcattgaccaggaccgggggccaggtaaccaccaggacccagggagcccggccattgtcccccgggggggcccgggggtgtgccgggctggttcagccgaagggttttacacaaccagccggcaaaatccactttttccacctcggaccgcttgatgaaggtgtggtttgtgagcatcttcaggtccgcccgctccgctgggttcttgatgaggcatttattgacaaactcctggaagtcgggggtga

SEQ ID NO: 667974 - DNA, 100 bp, Homo sapiens
gaaaagggaggctggtaggaactgggtctctgggtagacctctgggagctcctccaggctgcaggctctggggaagggcatttgaagaacatgactgggt

SEQ ID NO: 667975 - DNA, 102 bp, Homo sapiens
gctaatacatggcttgtggccacacttctaccgttcattgctgccactgctatattggcttcttctggggaggagaaacacacaaaaccaaaccctttgctg

SEQ ID NO: 667976 - DNA, 155 bp, Homo sapiens
aggggtggtccactggctgacatgtgtggccaaaactgggggtgggggtggaagcaattgccaggtgggcggtggcagagcaatgttcacacagctggaggacacttgggggcagttgaagtaattggcagaggttcttcttctgctgcaggagg

SEQ ID NO: 667977 - DNA, 356 bp, Homo sapiens
  misc_feature (54)..(54): n is a, c, g, or t
  misc_feature (74)..(74): n is a, c, g, or t
  misc_feature (83)..(83): n is a, c, g, or t
  misc_feature (85)..(85): n is a, c, g, or t
  misc_feature (91)..(91): n is a, c, g, or t
  misc_feature (94)..(94): n is a, c, g, or t
  misc_feature (106)..(106): n is a, c, g, or t
  misc_feature (110)..(110): n is a, c, g, or t
  misc_feature (135)..(135): n is a, c, g, or t
  misc_feature (152)..(152): n is a, c, g, or t
  misc_feature (159)..(159): n is a, c, g, or t
  misc_feature (161)..(161): n is a, c, g, or t
  misc_feature (164)..(164): n is a, c, g, or t
  misc_feature (167)..(167): n is a, c, g, or t
  misc_feature (177)..(177): n is a, c, g, or t
  misc_feature (179)..(179): n is a, c, g, or t
  misc_feature (186)..(186): n is a, c, g, or t
  misc_feature (193)..(193): n is a, c, g, or t
  misc_feature (222)..(222): n is a, c, g, or t
  misc_feature (229)..(229): n is a, c, g, or t
  misc_feature (239)..(239): n is a, c, g, or t
  misc_feature (241)..(241): n is a, c, g, or t
  misc_feature (244)..(244): n is a, c, g, or t
  misc_feature (271)..(271): n is a, c, g, or t
  misc_feature (293)..(294): n is a, c, g, or t
  misc_feature (323)..(323): n is a, c, g, or t
  misc_feature (332)..(332): n is a, c, g, or t
  misc_feature (345)..(345): n is a, c, g, or t
aaattcattttttaaattcccgtttggcccctttttttgataaaaaagggccanattcccccttttgggccccnggtttttcngncccccnggnggtggggtaagnaaanaggaatgggtttcccccctgaggcnattaacccctttggaanagggcananccngtncccccgggantnaaggggngggcttnaattcccagggcttttttccccccccggnatccggntccccccccnanggncccccccgttttcagggggggcccccngtcttttttctcccccgcggannaaacttttttttgggccccgttaattttnccccccccnaaaaaaaaaaagnccgttttttca

SEQ ID NO: 667978 - DNA, 304 bp, Homo sapiens
  misc_feature (85)..(85): n is a, c, g, or t
  misc_feature (282)..(282): n is a, c, g, or t
tccatttgtttgggtattatttaatttctctaagcaaaattttatagttttcagtgataggtgttggacatattttgtaagattnatcttcaagtgactcattttttggtgttgttgtaaaacgtcaatttacatttgttcagtgttggtacataaaacagaattgatttttgtacattgatcttgtgttctgcaaacttgctaaagtaacttattaagtatagcaacttttttgtttgtagatttttttgtgggggattttctaagtaaataatcatgtcngtgaataaagacagttttataa

SEQ ID NO: 667979 - DNA, 160 bp, Homo sapiens
cataattaggggaagtatgacggggagaagctcccccagattggtcacacgctcccgaggccgtctcacgaccatctcatctggcgactcgcgcataccccggctctaggcctccgttcccaccaggaatcgggcggcgcatccccccccattctcatcc

SEQ ID NO: 667980 - DNA, 1507 bp, Homo sapiens
  misc_feature (12)..(12): n is a, c, g, or t
  misc_feature (154)..(154): n is a, c, g, or t
  misc_feature (231)..(231): n is a, c, g, or t
  misc_feature (246)..(246): n is a, c, g, or t
  misc_feature (253)..(253): n is a, c, g, or t
  misc_feature (258)..(258): n is a, c, g, or t
  misc_feature (274)..(275): n is a, c, g, or t
  misc_feature (514)..(515): n is a, c, g, or t
  misc_feature (534)..(535): n is a, c, g, or t
  misc_feature (548)..(548): n is a, c, g, or t
  misc_feature (551)..(551): n is a, c, g, or t
  misc_feature (561)..(561): n is a, c, g, or t
  misc_feature (570)..(570): n is a, c, g, or t
  misc_feature (580)..(580): n is a, c, g, or t
  misc_feature (607)..(607): n is a, c, g, or t
ggctttcctagnatccacactttcaaagagaaacccctccagaactcccaccctgacagtcccaacaccaccttcctcctggcttccaggggcagcccagtggaatggaaagaatgtgggatttggagtcagacaagcctgagtccagttcccngtttagaactcattagctgtgtgactctgggtgagtcccttaaccctctgagcccgggtctcttcattagttgaaangggatagttaattanccttacnttgcnaggttgttgtcatctnnagttgagcactggtcacattgaaggtgctgggtaagtggtagctcttgttgcttcccgttcagcgtcacatctgcagtggagcctgaaaaggctccacattaggtcacctgtgcacagccatggctggaatgatgaaggggatacgctggagttgccctgccatcgcctccatcagccagacgaggtcctcacaggagaaggacagtcttccccaccctgggatctcaggagggcagcnncggagtggggaggccccannatgcgcgtggccnaangccaggtccngaggccaanagttctcccntgccatccttggtgccgtcctgccccnttcctccttcatgcctgggcctgcaggcaccagccacgagccaccacatgagtccactcggagtgccctgtgttcctggcgaaggcattccagggttgaatcatggtcccagcctcagcctgggacacctaggtggagcagagtggtctccgctctgaataggatccagggacctgggctcattcttcttggctcaccaatcactgcaggcctcatctttcccaaaacccactttgtctgggagggagtgggtccgcgctgctctgcagcaggggctgcgcgcagtggcacagcatcaggtgggaacaagtggcgtccacccctcatgtatctgtacggattctcaccgatggcgctcgccgacacacagccttcgacttcatttctccaaacacgtcagtcacctcatttattccttacattccaacaactcccccaacccaaggctggtagtcaacgtccgtgcctttacaaatccgtagctccgagcacagttccagttccgataccagacgcgcacgggaacctcccctaaaggtacttcccctggcctgccatcaccgccaaagcccgcccggcaactgacacaacaacctacacacatggccaacacccagcacacaaccccgcacctgcaccagcactgcaccacggacgcggaacccgccacttcacggaaccagcacacaccccacggcgaggccgcacgcaagaccacggaaacacaaggtgaaaaccccccgcgcaacgggccgagacacatggccccccctggccaatcccggctcaccccggcgccacgcccccaacgagcacacccccacagcccagcaccccgggcacccacttgtgcgcatacacagcggggggtaaacaccggaacccccaccgagtacacca

SEQ ID NO: 667981 - DNA, 416 bp, Homo sapiens
  misc_feature (410)..(411): n is a, c, g, or t
gccaaagcgtagtacccacacagtattttcaaccctccctaccccttagtaggctctagtgtttatgttaccatctttatgttcatgagtacccaatgtttaacttccacttataagcgagaacatgtggtacttggttttctgttcctgcattaattgacttaggatgatggcctctagctgcatccatgttgctgcaaaggacatgatttcgttattgtataaaaaaaccatacagctgcttagtattccatggcgtataggtgccacatattccttatccagtccaccattgatggggcacccaggctgattccatgtctttgctattgtgaatagtgctgtgaagaacatgagggtgcatgtgtctttttggtagaatgaattgttttcttttgggtactacgctnntggca

SEQ ID NO: 667982 - DNA, 710 bp, Homo sapiens
ctattaagccatgaaaagacaaggaagaactttaaatgtataataactaagtgaaagaagccaatctgaaaagattacatactgtattattctaactatatgacattctggaaaaaagcaaaactatggagacagtataaagataagtggttgtcagagttggtggcaggagggggcaagtgatgaatatggtggagcacagagaatttttaggcagggaaaatatgtagtggtagatacatgtcattatacagttgtccaaacccgtagaatgtacaacaccaagaaagaagtctaatgtaaactgtagactttgaatgagtataatgcatgaatgtaggttcatgtattgcaacaaacatatcactttggtggggggtgttgataataggggagtaggtaatgcatgtgtaggaacagtgagtatatgggaaatctctgtgccttcctcttaatttggctgtgaacctaaaaactgctctaaaaaaataaaatttttaatttagaaaaaattaaatagaaaaaaggaatcattaaggttagaatggcaatcagtaaaattaaacaaaacacagaaaagaaagaaaggaaagatgcattttgttagatttttaaaaatgagaccaaagctggttcttgaggaaaatcaacaaaaccgatgaacctctatctagactggttcgaaaaaaagggtaaagacccaattacag

SEQ ID NO: 667983 - DNA, 173 bp, Homo sapiens
tgcagcacaaggaaacgaggtggtctgaggctgaatcgggagtgtggcccatccggggggtgacccggggcccggtgatgggcagagccatcagctggtgtcgatccaggatgccccccgtgatgggagcccaaatgggaatttctcgacccgtgaagggagcccaaaggggt

SEQ ID NO: 667984 - DNA, 544 bp, Homo sapiens
  misc_feature (472)..(472): n is a, c, g, or t
gctgggcaaggtgatgagaatgctgggctagaacaccacccctgaggaggtgcagaagatgattaatcaggtgcacgaggcgcgcagcggcgcggtggactttgatgagttcctggtcatgatggtttggtgcatgaaggacgacagcaaagggtaatttaaggaggagctgtttgactttttccgcatgtttgacaaaaatggtgatggctacatcgacctggatgagctgaagataatgttgcagggtacaggcgagaccatctcggaggacgacattgaggagttcatgaaggacggagacaagaacatcgccggccgcatcgactatgataagtttctggagttcatgaagggtgtggagtagaggttgcctttcaccaaaggttgcctatgcccagccttcaattccagttgagtcctggggttggggagggggttggggtcccaggccctgagcctggccatgtcntcaaccccaaatcccccgactccctccccagatttgttttgggggatgcaaataaagcctgttttcccaaga

SEQ ID NO: 667985 - DNA, 429 bp, Homo sapiens
aactatgacggactatagttgatgatactgtatcgtctgcaggattttgccaaaggagagtatcattgctctagccacgaaaaataaaggaggtaactatgtgagatgatggctctgctaatatacctgactatagtagccatttctctatgtacatgtattaatcatatccaaaacatccagttgtataacttaacatatacacaccaaaaataaatttgtatgtactatactccttccacaatggtccagcattccttaaatcttcgttgcacattatgggtcatactatgtaagaggcaaaaacatgacttaagggaacattagagaggagtccatcttatatcaaagccctactgtcacatgaggagacaaccacagggtgtgtaccccttcttaagagtgccagccccctggccccttctttcc

SEQ ID NO: 667986 - DNA, 479 bp, Homo sapiens
  misc_feature (180)..(180): n is a, c, g, or t
acagactggatgtgcagcaagtggtcctggaaggaaagatgtctcatgaacaggagaaagagcgcttacccactcatcatctgacctcacatgtggaggcttccaggccaaaatgacgagggtggaggagtcattctgagccgaaatattagacacatatcaggattatgtgagcccagncagttctgggagcaggagctggagagcttacactttgtcatcgagatgaggaatgagcgtattcatgagctgacaggggtgatcctcatggaacctgtggaagagaaaaatctgatattgggggaaaaaattacgaccctgcaacaggaaaatgaggacctccatgtccgaagccgcaaccaggtggtcctgtcaaggcagctgtcagaagacctggttctcacgcgtgaggcctggagaaggaggtgcgttgggcgacagctcagcaggagaaggagggcttgtgtacgtgtcttggg

SEQ ID NO: 667987 - DNA, 163 bp, Homo sapiens
cgatctagccgatctttttcttgccacgactcgtaggcaaaatatgaaggctttaaaaaatctatcataataatgaaaaagaggtcgtctcccaagcagtgctgtccctcaaagaaaagactggttatgtggaaccggcacgtcgggagagattattctaagt

SEQ ID NO: 667988 - DNA, 243 bp, Homo sapiens
atcatccagttttctggggatgttggccctccctttgtggaaggttctcccagggagcagtaggtacatttttcctgagggagtttgccttcttctgagtctgggccagaatgcagtttctttctgagaagaatcatacctccttggctttatcgtggagcacagtttggacctccttgtcagaactctcacttggtctgctggtgttcaatttctctcccaagttgcatgataggagggggg

SEQ ID NO: 667989 - DNA, 223 bp, Homo sapiens
aggctcgctctctgtttctagatctccatgccgccgccgtggcgctcatccagccaagattctcctctctttggccccgagcatttgcgggtggctgccgtgtcgctcagtgggttcaccgtgagggctgtcggtggcaagtagggcggcgtctcgggaggcaaggtaggcggccagtgtcaccagggcagccgcatacgtgcacacgccgcagccgcggccg

SEQ ID NO: 667990 - DNA, 302 bp, Homo sapiens
ccatcggcaggttgccaccggcaggttgtactggcatggcaccaacatttgctcagcttctggtgagggcctcaggaagcttacagtaaaggcggaaggtgaagggggagcaggcatatcacatgacatgagagagaggtcacgtatccaactcatatcacaaagcgaatcgcactgagagtagggtcggaagaccggcatctagtgcttctcccctccgtcttgctcttccgtcgcggtacttcagtactcaaccctgtagtcctcctctactgtcccctctgctgctcccctcgactgtc

SEQ ID NO: 667991 - DNA, 685 bp, Homo sapiens
gaatcatacctgtctgtgaaccactgtgctttccttgaggggggcattgtaggttgacaccagcaaagactcagagtgacttgagcattggagaaccttctacttggctgctgtattcatgcattatgttggtttgagaatagctagtgtattgatccaagtagtcaaagtgtcttaaaaggacacctatttgtccttttgagccccagctgagtgaatactgatagtggactagaaaagcatagtcaagaaaagtgacccaccttgttacttgaccagcagtctagctgagagatctgattttatgttcgtaactttctgtaaagaaagacacaaggacttttcaaagacagtttatatctttccaaagcaggaagctttgcatatgcaatcttagagttgtgtccctttctgagtttcaaatacatcacaccttgctttctgttttgggagcaaagatgtgaattcaaattcccttggtaaccggcctaaattaaataatttcattctaagagaaatttggtatttttttaaaagtgaactgagcacttttttgtgtttcttaagagagggaggaatcgagaaaaatggtgtgcaattggtaaaaatattttgaataatatttccttggtggcctttaaaaaaccttatacctttctacattggcattggtggggggggtctc

SEQ ID NO: 667992 - DNA, 185 bp, Homo sapiens
gaagctgggagggaagttacgcttatttttttttggtctttggttttttttttccctttttcgggagaagggggtctcgtattggcccaggcgtgatctggttagcggacgacccccgggttcccccaaagaaaaagaacaacagcactaactaaccgacaaaaaacaacagttgctgggggggg

SEQ ID NO: 667993 - DNA, 949 bp, Homo sapiens
agcggattattggttgggggataccctggaaggtgaacgctggcgaggagggtcgctgtccacccgggggcgtgggagtgaggtaccagattcagcccattggggccccgatgcctctgttctcggagtccgggtgctgcggattgaggtcccggttccttaaccgtgtgggatccgggtgtcctcgggatgacgattctggcgtttcctcggggctttgagtgggatcggtgtcctctagcgatgagatttagcggtttcctctggggcttgcgggactcttcacctaattatccgaatctctgctggattggccgtaaccctgtccccgagcgggctcacaagggtctgaacggccacgcattgaggcaagacggtctcggttctgagccaccccggtgcctccttcccaggactgcaacgattggacggaaggcgggaacctagcgaggccttgattcacggatggtcccatctacttggtcgtgctcaacggtgcctgggggcatgcacaatgtagggtgaccttcgtctcaggcttcctgcgtatccgaaaacttcccccgacactaccttcggacataagtgcagagccaaactccttccccttactacttgccacatctccatgggcctgtgccttcatcaaaccgtctgcactctggccttccacagacatgcttggcgctcaggtgcacattctggggaggcccagcccagcttgagcctgatggttccctgagcctttcagctggcccagatgtccaaacggcccagcatggttgggaaaccccagagacccaagagcctgcccaatgtagggcccctctgagaacacgtgggcaagaacgcacacgcaggccaggaatacggggaagactcacccaagaggagccaaaccagaggacaccgcagccgcacacagcgagcttgccacacaacagcccca

SEQ ID NO: 667994 - DNA, 280 bp, Homo sapiens
tgaatagaatggaaagaatggaatcctttccattccattccattccattgcaatcgagttgattccactgctttgcattccattccattccattccattccggatgattccattccattgcattccattccattccattcccctgcactcgggttgattccattccattccactccattctgttccattccattccattccattgtattcgggttaattccattccattccaatgtgctgccccccttttaatactcaccaataaattctacttcctgtc

SEQ ID NO: 667995 - DNA, 916 bp, Homo sapiens
  misc_feature (470)..(470): n is a, c, g, or t
tggctgtaacagtgtttatgggatgatgattccaggctcctgctgaagcccgtgggtggggaggggcacagagcgaaaatggggcgtaagggaatgcttgaaggctgcctccgtgatgctcggctcggagcttccagaactaggcgagggcagggtgaggcctcgggcacacagccggcgcccagtcacccgggcccaagattggaggggcgggccggggcccttgcggcaggcactttgccaagggtggctctcacacttcacgcacacttcgcaccagaaacttcaagggccgtcttccaacaacttccaaccaggtgccaatgtgcactttagtgtgcaaaatttaattctcgagaagagggacacgcggggaaacacgagagagtctcgtgtggagaggcttctgtgaactcctctctcgagaagacaaagaggaacaagcacgagagacagagctctctcagaanacacccaaagagaagactcagagaagcgtgatgagaaacaacagagaagagaaacagacggagacggtgcgagtgaggagagacccggggtgtcacaatccccgcgtcttgggaacgagaagctcacaaggtctctctggggagaatagacctgtgtggagtgaggcctgggagtggtagtaccaaaaaccgcgtgatccacacggcgaccgaccaaaggcggagcagtgttgtggcaccgccgtggttaacagaagaccaattgggggcaattcttctcgcccagcgagtgtgtcacgaggagggaagtagagaggacgtggcccctggagaggggggcgcgcccatcgccgtggtataaccccgacaaaatggggagtgttcacctctgacggaaaaatcggattgagggggggacctggacaacatgaaggaggataacgtga

SEQ ID NO: 667996 - DNA, 954 bp, Homo sapiens
  misc_feature (191)..(191): n is a, c, g, or t
tgggggggagaaaaaaaaatggggggggagaaaaagggggccgggggggggggcccccccccggcccccccgtggggggggcgccggggggggtggctaccgggcgcgcgagagtatacacccaccagccggcgacccaaagaaatagaacaccatcgcgctctcaaaaaaacaatcatataatacacgcngggggtgtgcaggccccagcccgaccacaaaccacacgcctcacacaggaggagcgggcacgagaagacaacgaacttggatgcaccaacgggggagcaaatagtgacgcacaaaaagaaagaggtgcgcccccgacgaccccgccgagcggggggggcaacagaaggcgaagactcccaccttattataaaaaaaaaacctcgagagggcggcggccgcagcagggagagcgccaccaccgcgatcagtatacacacccaacgaggagtagcgaggagggcagccaccaacactgcggatgcagcggcggtgatctacacacaacaccgcgtcgtgcgcaccaaagtggtgtggcagaacccccccgcttgccagtagtaaaaaaagaccgacagacaaacaactacgaacgcacgcaggagctgtggtggcgggaccacgccacgccatgatgtgacgtcgcacgcgagtggagcagcgcaggtagaaacacgccgccagttaccaacccggagagagcgagggacgccacgcagcggagagcagcgcaacaaaatgctgcgtgcaagtaacaaacccagccggggtgaggcagaaacagggggacgagccccctcctcctaaaagaccagacacacaaaagaggggcgggggccgccccacaaagacactcccggcggggggggacaacgactaagactaaacgaacctactttgtcaacaggggcccctccacagaggaggagcgactaaacaccgccg

SEQ ID NO: 667997 - DNA, 169 bp, Homo sapiens
  misc_feature (109)..(109): n is a, c, g, or t
  misc_feature (114)..(114): n is a, c, g, or t
acaggacccaacgggcccctggtggcctgggggccaaacccctgggcaagttgggcattggcccttgccttcggggaccttctggggtgtgagggcaaagggagggttnccatnaaggaacttgggattttcaatggaataaataaaacataaagtttattcttgggga

SEQ ID NO: 667998 - DNA, 409 bp, Homo sapiens
  misc_feature (58)..(58): n is a, c, g, or t
cactgtgcacagccatggcttggaatgatgaagtgtggatacgctgcgagttgccctngccatcgcgctccatcaggccagacgaagggtttccttcaccagcgcagcaaaggggaacaagccctactttttccccacaaacccccttttgcgggaaatttcctcaccacgcgcaggaactggcggcaggcccaatccagccccccaacctatgcggaatcgtatttcgaccaggctagacaccggcggccccccccccaaatcgtgaatcttctcgtccgtggcccctatgcgggtattgcggccgccataataaatcacctggcgccccaaacgggggggattcccctgagacacgtccggcctccgaacaacaaactgggcttttcctcgttcccccccccttatg

SEQ ID NO: 667999 - DNA, 201 bp, Homo sapiens
ggtaatacgactcacatggtcccaggtctcaacgtccaggctaactcagagatttgatggctcaacatgcataacttgaattcaatagactttggctggtaataaaacagatgttttttagattataaatattaaatcaacttaatttgaatgagaattgaaaactgatccaagtaagtttgagtctgtattacctgctgg

SEQ ID NO: 668000 - DNA, 336 bp, Homo sapiens
caggagaatcgcttgaccccagcagatggagctggcagtgagccacgattagcccgggccacagtgagtgagacctcggtctcaaacaacaaacccaactgggacattcttcttgagttaaacaagacactttttattctgaatcagcttccacatcattaactattttctgcacaactggcacaagtggtttttctttttaagtatactaccaggctagctcctgagcctttccctttattggaaactttaaccccactgttaatctatacactgcaaaagaccaaggatgcacttcaacggacaattactcagtgtatagaaaggaaaaaaaaa

SEQ ID NO: 668001 - DNA, 665 bp, Homo sapiens
  misc_feature (10)..(10): n is a, c, g, or t
  misc_feature (13)..(13): n is a, c, g, or t
  misc_feature (40)..(40): n is a, c, g, or t
  misc_feature (72)..(72): n is a, c, g, or t
  misc_feature (92)..(92): n is a, c, g, or t
  misc_feature (110)..(110): n is a, c, g, or t
  misc_feature (112)..(112): n is a, c, g, or t
  misc_feature (117)..(117): n is a, c, g, or t
  misc_feature (135)..(136): n is a, c, g, or t
  misc_feature (142)..(142): n is a, c, g, or t
  misc_feature (151)..(151): n is a, c, g, or t
  misc_feature (164)..(164): n is a, c, g, or t
  misc_feature (167)..(167): n is a, c, g, or t
  misc_feature (179)..(179): n is a, c, g, or t
  misc_feature (181)..(181): n is a, c, g, or t
  misc_feature (188)..(188): n is a, c, g, or t
  misc_feature (202)..(202): n is a, c, g, or t
  misc_feature (222)..(222): n is a, c, g, or t
  misc_feature (245)..(245): n is a, c, g, or t
  misc_feature (278)..(278): n is a, c, g, or t
  misc_feature (291)..(291): n is a, c, g, or t
  misc_feature (294)..(294): n is a, c, g, or t
  misc_feature (313)..(313): n is a, c, g, or t
  misc_feature (333)..(333): n is a, c, g, or t
  misc_feature (346)..(346): n is a, c, g, or t
  misc_feature (436)..(436): n is a, c, g, or t
  misc_feature (517)..(517): n is a, c, g, or t
  misc_feature (533)..(533): n is a, c, g, or t
  misc_feature (559)..(559): n is a, c, g, or t
  misc_feature (568)..(568): n is a, c, g, or t
  misc_feature (621)..(621): n is a, c, g, or t
tccccccccnganatgctttattacatggtttcatcagtnatcaatgaggggtccctatgcccatgcgaggngacaggaacatctgtgtggnacatggcactgttccccncncagcnacgcagtcagaggggggnngggggntgaatgggngcttggcttcccngcngtggggcaggcncngagaacncagcagaaagaaangaaagcctggcaaaaagggnggcaggaatgttcaagcatcggngacccccatgttctgcagcctgttttctagggngacgtctcttgcngcngctttctttttgctgcccncatgttgcttcttctgcttntttgatggctccngcccaatgggcgcaggcttcacaaaggggatcagttcttgcagtcctggcggcatgaaccccttcaatttctcaggcacagtgatgcccntctctgtttggtagttctccaggatggcgcagatgggacgggtagtggcgcacatgggagcattgagcatatggacaaacnccaccttgtccatcancttcttggtttgcccatatcggattngaagccggngagcctggtaatccgtgcaattagaacaggagaacaactcacggaaggctccngagcccggaaaccaggcctccaggtcaagcttcttactggcagc

SEQ ID NO: 668002 - DNA, 205 bp, Homo sapiens
tcgatatataatacctgagaactcctgtactatctttaccacttcctgtgcatctgtaattatttccaattacaaacttagtaaacaaaaaccaactattcagtaaaaccaacatgggctgagataagtaaactcgtaaaacccttttggtctgggtaaattattggggatatacagggagactagggtaaaaaccttgtgacat

SEQ ID NO: 668003 - DNA, 314 bp, Homo sapiens
tgccgagtacttgtgatgaaggcttttctgatactcaattctgtcgcatcaaggttgaattttctaggatttgcttcgactatgcgtgggtccaaaagtcaaggtaaagcaatctcatcttcaaaagtctaacaaccagcatcatgttaaaccaaagaatctcgcataggcaagcaatcgaatctggcccagcctttctgaacacatagtcaacacgaccttagtcattctcaaactttccctgcccacggccagatgaggatccttgtgccccaaggcagagatgacctgcctggtccactacagtctcacgg

SEQ ID NO: 668004 - DNA, 294 bp, Homo sapiens
ggggctttccccccccggggggtttttcccattttttccaaaaattgggggccgggcccgggggccgggccccttccttttttttttttagggtgggggggtttcgggcccccaagttcccccggcgggtttttttccgttttcccgcttccaagtttagtttttcctttcccccccgggtttttgccgtttggccccccccccctttttccccccagggggccccccctttttttttgggggggggccttttttcggggtttcccccatttttttttgggggcccccggttta

SEQ ID NO: 668005 - DNA, 892 bp, Homo sapiens
cagggccgtaggcagccatggcgcccagccggaatggcatggtcttgaagccccacttccacaaggacggcagcggcgcgtgccacgtggttcaaccagccggcccgtaagatccgcagacgtaaggcccggcaagccaagggcgccgatcgccccgcgccccgcgttgggtcccatcggggcccatcgtgcgctgccccacggttcggtaccacacgaaggtgcgcgcggccggggatttcagccctggaggagctcaggttggcctggcattcacaagtaaggttggcccgggacccattcggccatttcttgtggattccagcagggaggcggaaacaaagtccacgggagtccctgcagggcccaacggttgcaggcggctgagggaagtaccggtccaaactcattcctcttccccgagggaagccctcggcccccaagaaggggagacagtcctggtggaaagaacttgaaagtggaccaccccaggttgaaccgggaccggttcatgcccctgtcgggaagcggtctatacagaaggggaagacacgctcagaggtcattcactgggcgaaggagaagaatttcaaacgccttccggataatccttccggtatgggcccggtggccaaacgcgcccgcgggttctttgcggcactttgcggggcaaaaaggacgccaggggaacgccggcagaaccaggattggttcgaaaagggaaagacatatatggcgctccgtgggggactgtgggatccaaacaagacacgaaaagatagagaatacaaccgacaaaagaacagaaacaacaaaagggggccacgcgcacaaaagatctcccggaggcaccaaaatatacggcccccagtttgaaagggggccccaatgg

SEQ ID NO: 668006 - DNA, 1097 bp, Homo sapiens
gctgtactgtaggctggttgttaatttggccgaggcagctctccgtcatggtcggccgacgctatctcgcgctcttgttcatgtgcccggcttgtgcttctttgtccccgtgtctgaggtgttaactgcggaggccccgtgcctcggtccccggactatgccgtgaccccgggtgccatgaagcaggatgggctctggcgcggctggccgtggtggcggacaaaggcgaaaccgcgccggggaggagaacaagaacccccaccgcgctggcccccaggatgtggagatgaagaggaggcagcgacgggtggcgggtcaacgggggagtgcatgacggcaagacggcgtgcggcagcgtgtgagcactcccagcgagagctggacacagtcaccttgtgagtgacatcaaggagcacgtgaaacagctagagaaagcggtttcaggcaagggagccgagattcgtgctgcgggccctgcgggatctgccttccacatcacgccgctcaaccactatgttctgtataaaggggctgtgcagggcttcttcacttcaaaataatgccagctcgaggactttttgctccccttccctggaagagcccattggacacaggagggctgatttacagttcccgtccccgcgcgggagaagagctgcgtcgacgcccctccttgccttgaaggtggaagcctatctccaaatcctcgtggtcatcttcatgattaaccaggcaagcgctacaaagagaggcagcaagaaggatctcttgtggtcttgtcagaagatcgtactcagagcggcggggcctaagactttttagccggcaagggtttactatatacggccggggtctattagtcttgacgaggtgattttgttcgcagtcttcgtgcccggcggaggcaagtcgataaggcagcgggaggcgctcttaactcgtccgatcctactacggttacagccgtgagtgttccattttttcgacggcacacagggtgcggcccctcaccggagaggccgggatataggggaaacaggacgccagcttcaggagcctcggtggcacggagagcacgtaggcactttgtcgcgacc

SEQ ID NO: 668007 - DNA, 606 bp, Homo sapiens
catgctaatcttttagtattttttttttttagtaagagacagggtttcgccatgtcggccaggctggtcttgaatctcctgacctcaggtggtccacccgcctcggcctcccaaaggtgctggcattacaggcgtgaaccaccggtgcctggcgaagtctaaaataagtgatctactctctagcttacagagaccaacatgtgatgtctggggatatcagatggtactctctgcttatcccgccagacactgtattttatgcatcatgtctaggatacagtgtgaaaattaaaagtttagagggcagatgcaattgtggagtgacctgccaataaagcaggtgcagctatagaagcgcataggtatatccttaatggtgctctccctgggcttgtctttgtgtttttccctattcagagctccttaaagtgataaacctccagctttctaaatctccaaccattcacaatcactccagctcatcgctcagtaggcggaactgctatgcggtgcgaccttcgggctccacagagccgcgttacgctctgctcagccctaaaagtatacacttgcggctcaccgacaagctcggcatttaagaacaat

SEQ ID NO: 668008 - DNA, 413 bp, Homo sapiens
gttggtcacaataggtattagctgttaatggtacaggatgacgggggattattattaacttcttgcatatttcccccattattcttagaaccaggggacctgggattctttgaggttgacaatggagtagtactcccgattgaagcccccattggtataataattacatcacaagaggttttgcattcatgagctgtccccacattgggtttaaaaacagatgcaattccgggaggtttaaaccaaaccattttcaccgctacacgaccgggggtatattagggtcaatgttttgaaatttgtggagcaaaccacagttttatgcccttggtcctagaattaattcccctaaaaatttttgaaatggggccggtttttaccctatggccccccctttaccccctttagagcca

SEQ ID NO: 668009 - DNA, 314 bp, Homo sapiens
acagaaaaccaaacccctcattttctcatttatcagttggagctgaacaatgagaacacactgacacacgggtgggaacaacagtcactgggccttttttggggaggacggtgtggggagaacattagagaaaagagattatggatgctagtgctttataccttgctccctttgctttcttgttctccttttcctttagtgtcaactcttttgtcgttcatatcacacttgtttccgtagttctttctttccacgatcttcattggcatgctcatctatttgtctttgccttttgctgatcctgcaaattttgg

SEQ ID NO: 668010 - DNA, 444 bp, Homo sapiens
acgaatatctacaatatattgtacagaaaaaaaaaacatgtacagtatgctctacataggggtggagggagagttcctttcattatatactgatttggtaccatttgaatttaacaccttatttatgcattttcctcttcacaaagaagtaggccaggcacagtggctcatgtttgtaatcccagcactttggaaggtcgaggtgggtggattgcttgagcccaggagttcacgaccagcctgagcaacatggcaaaacccggtctctacaaaaaaatacaaaaaattagccaggtgtggaggcgtgtccttgtagtcccaattacccgggaggctgaggtgggaggatcacctgagcccaggaggtctagactgcagcgagctgtgattgtgccactgcactccagtctgggcaacagagtgagaccctgtctaaaataatat

SEQ ID NO: 668011 - DNA, 164 bp, Homo sapiens
acctagaggatccccagcctaagtgaagaggagataaagatttgggaatctataagtgaaggaaatcccacctgtgcaggaggtcaagttctgtatcttcaaaaagtcatcagaatacatggattgaagagacttccgaacacgtgctatctcttgctgctgct

SEQ ID NO: 668012 - DNA, 215 bp, Homo sapiens
tcgcgttgcaggccttcatcttcatgatgctgacgctggtctatgtcggccaggcgcacgacaagcactgatcgcctgaagtcaacgagttccgttttttctttccgtccgtcaactactctctcataggagcaatcatggaaaacgtgttgggtcttgtcgctctggcttgcggtctgatcatcagcctgggtgccatcggtgcctgtatcggt

SEQ ID NO: 668013 - DNA, 434 bp, Homo sapiens
cgtaaccatgaatggcattaacatgagttcagatcaatatggatcaaatatccaggattagaggaaaagttgctccgctacagcccacgtagaaaatgcactagagataggctgacaaacagtgcaaattagtaagtataacagcatataaagaatgactgggtggaatcagccacaaatgaacacgtgtaaacaaggtgtccttaggcgacatggcagttagacatgggccatttcatgaaagcgtcattagttgcatcactgtaggcaaccttgcgaatgcagtcagccagtgcactggcttgcagggaccgtccataagagtctgtttagttagcaaggctttggcagagggtctcgctctctatctctctctctctctctctctctctctctctctctctctctctctctctctctctctctctcctcgt

SEQ ID NO: 668014 - DNA, 1574 bp, Homo sapiens
  misc_feature (1244)..(1244): n is a, c, g, or t
gccccccattatgggtccgcctatatatttttggggggtggtcccaccccttgtgagtggggacccacacaagtgtgtgtggtgtgcccccacagaaagagacccgccacagggcccgtgggggtttatcccccgcgctggttcctccgcgggagaaattgttccccccccccggggggaaggatattttcttcgcttctggatgaaacccctccaacagcgggcgtggttccccggagcagtgtctaatttattgtgatgatgtgggctccgttgttttgtttcgcacccccggctgtgttcctcatgatgtggatgtttctgacgcctcctccccccccttttctgcttgagtagattaccaaccgtgtgttgttccccccctcctatataattttcctgcgtccgtttttctcccctataaaagttgccccccccggtgtaaattgtgtcgcccccccttctgttttgctcgccgtataaacacgacaccttgtctgtccccctatcccccctgcaaaagtcttttaactccttcaataatatattctataaacaccaacgttttcgttctcaacaaaagatccgccgccttctccaaccagcgggagaaaattattattatagaggacacccctcgttcttcttctgagaagacctatatatttatctccttctggacgcccccgccggcaacatatccaacatctccgtcttaatgttgtggcctcctgtccatcttgtcacgccgccccttcttcgtcacaactattctcctgccttattatcccggcacattgccccctcctcttatgacaacatggtaacaccaccacagcaacagataaggtggtgtccacaacaccgcaggtttcccccctctccccccttcgtaataccacacgtctcccacaatatctcaccctgtgtgggcgccgcaccacccacagctgtgggggttgatctcctgtagaacactcttattctgcgcgggtgtgatcacccctccgcggcttcttttctcgcgcgccgctggagcagctcatgatatttcttgttgcatcacatcgtctctctcacacacaatactttttctccccccacctctatattgtctctatagagacccacacgcggcgagaccctctgcgagactctctctctgagaacgcttgtacacacactctcgaggttatagttagtctctctctcgcagattttaaaagcgcgcccccacatctttnctaatataatatatgtaacacttcacccaagaactctttttgcacactctcactgagagctgttccccaccacattataggcttataaaaccacagagatgcaaattttccccgagacgctttataaacccaaaccacctcttcaccccctacaccgacccgcggggtaaaactatcggtcacaatgctttgagaaatctgtggaggccacaccaccacgtttcacatgccccatcgtcctatgagaattataattccccttaaaaatttttgaaaatatagggcccctattttccctatagcaccccctttaccccctttagagcccca

SEQ ID NO: 668015 - DNA, 878 bp, Homo sapiens
ggtcctaaggtgaataggcgctccccaaggtgtagaactgagcgcagcgatgaacctggacaggttggtacacctgtgcatcagttggctgtggaaccggcatttcttcattggcccataggcccggagatcatggcatcctcgggtcaatcatccaatctatcagaacatccatggcgcatggtggatgactctgccagcagagtgtagtggcgggtgtgtgcatgatcctctgtcacattcgatcgtgcgaacctagacatccaaggccgtggacggtgcaacaggcacgtttcggcattaatggacctaatatcttgccccaatcatcccaattgtgcaggctggtgagtcccttgcaaagcattcaatccctaggttaatccaacccccaaggcgtcattccatcggtgggcccaattgcacagctgttgcgcttcaaccaaagcagacaagcattaggacgaaaggaaaaagatggcttaccggggctctgaagagggcccatgagggggaccccgcgcgttaacaacaccctgggtgaggacatgagtcttggaaaatgcacggtgccaagcaacagtgtgtatcacgaccgaattgcgtacaagggaggaagcaaaccattgttggcggttggtgaaccctataactgtctcaaattcaaggcggtattgaggagtggatcgtaccggggcggagatgggatcaggatatcataggcaagaggcccaggtgcatttcgccaattggatacatggcattccttaactacaattcctaggacataccttacacccacgtgaggtgccattattttgaccccatgtgggtgatgtgccccttggggtatcaaaaaggtttgcatgaacgggatt

SEQ ID NO: 668016 - DNA, 163 bp, Homo sapiens
  misc_feature (81)..(81): n is a, c, g, or t
  misc_feature (97)..(97): n is a, c, g, or t
  misc_feature (100)..(100): n is a, c, g, or t
  misc_feature (102)..(103): n is a, c, g, or t
  misc_feature (109)..(110): n is a, c, g, or t
  misc_feature (112)..(112): n is a, c, g, or t
  misc_feature (114)..(114): n is a, c, g, or t
  misc_feature (119)..(120): n is a, c, g, or t
  misc_feature (122)..(122): n is a, c, g, or t
tttgagaaacatttaataatgtaatgtgtttgtggtacagggctgagtacagatgcacaggaggccatagggtttaggcanaaggggagcacaaaanttnannattaanngntnctcanngngactgacagtcgctgcgatacgcgaaggacctcccctgcgc

SEQ ID NO: 668017 - DNA, 448 bp, Homo sapiens
  misc_feature (23)..(23): n is a, c, g, or t
  misc_feature (75)..(75): n is a, c, g, or t
  misc_feature (115)..(115): n is a, c, g, or t
  misc_feature (229)..(229): n is a, c, g, or t
atgtccattagttccttggcctnccttaggggaatccttttccccttatccccctcccccatcctgaaggggatnccccctgtagtagagggatatccatgtaccttcctttttnaagttcaccttttataataatatttttccccccatgacagtggttccccaactgggggaatcactctcccaggggcatttggcagtgtctggagacatttttggttgtcacaanaggtggaaaggggtactgttcgtgtctagtggatagaggccaaggatgctgctaaatatcccacaatgcacaggacagtgcctgcaagaaagtactatctgggctgggtgcagtggctcattcctgtaattccagtaatcccagcactttgggaagccaaagcaagaggagcacttgagtccaggagttcgagactagcctgggaaacatatagaccct

SEQ ID NO: 668018 - DNA, 314 bp, Homo sapiens
gtaacatcaaccgctagactgatcaagatcaaaagcgactaagcatgcagcctaggcagtaatgcaacatcaaaaagctagtgactatccacagccccacggtaaacagcagtgatcaatcatcatcaataaacgaaagtttaactaagctatactaacccaaggattggtcaatttcgtgccagccaccgcggttcccactgattagcccaagtcaatagaagccggcgtaaagagtgttttagatcaccccctccccaataaagctaaaactcacctgagttgtaaaaaactccagttgacacaaaataaac

SEQ ID NO: 668019 - DNA, 340 bp, Homo sapiens
tgagacagagtctcgctctgtcacctaggctggagtgcagtggcgcaatctcagctcactgcaagctccgcctcccaggtttacgctattctcctgcctcagcctcccgagtagctgggactataggcgtctgccatcacgcccggctaattttttggatttttagtagagacagggtttcaccggggtctcgatctcccgacctcgtgatccgcccacctcagcctcccaaagtgctgggattacaggcgtgagccactgcatccagcccaccccacccagtgttttgacaaatcctccaaggctttctgatgcacatggatgaacccattgatacact

SEQ ID NO: 668020 - DNA, 1048 bp, Homo sapiens
  misc_feature (34)..(34): n is a, c, g, or t
  misc_feature (43)..(43): n is a, c, g, or t
  misc_feature (47)..(47): n is a, c, g, or t
  misc_feature (523)..(523): n is a, c, g, or t
  misc_feature (572)..(572): n is a, c, g, or t
  misc_feature (575)..(575): n is a, c, g, or t
  misc_feature (722)..(722): n is a, c, g, or t
tgcccactaactgagggcaattgcagattcaaanagctttttnactntttaacaaagatgtgatggaactataacaacaaaggaattgggaactgtaatgagatctcttgggcagaatcccacagaagcagagttacaggacatgattaatgaagtagatgctgatggtaatggcacaattgacttccctgaatttctgacaatgatggcaagaaaaatgaaagacacagacagtgaagaagaaattagagaagcattccgtgtgtttgataaggatggcaatggctatattagtgctgcagaacttcgccatgtgatgacaaaccttggagagaagttaacagatgaagaagttgatgaaatgatcagggaagcagatattgatggtgatggtcaagtaaactatgaagagtttgtacaaatgataacagcaaagtgaagaccttgtacagaatgtgttaaatttcttgtacaaaattgtttatttgccttttctttgtttgtaacttatctgtaaaaggtntctccccactgtcaaaaaaatatgcatgtatagtaattagaacttcatnccnccatgttttcttcccttatctcactgtcattgtcctaaaaccttattttagaaaattgatcaagtaacatgttgcatgtggcttactctggatatatctaagcccttctgcacatctaaacttagatggagttggtcaaatgagggnacatctgggttatgccttttttaaagtagttttctttaggaactgtcagcatgttgttgttgaagtgtggagttgtaactctgcgtggactatggacagtcaacaatatgtacttaaaagttgcactattgcaaaacgggtgtattatccaggtactcgtacactatttttttgtactgctggtcctgtaccagaaacattttcttttattgttacttgctttttaaactttgtttagccacttaaaatctgcttatggcacaatttgcctcaaaatccattccaagttgtatatttgttttccaataaaaaaattacaatttata

SEQ ID NO: 668021 - DNA, 109 bp, Homo sapiens
acagggttgggacagttggaattgagaactagttagagaagcagagaatccaaatatttaatgggtagatgatgtgagggtgcagtgaggaagatcatggaaaactaag

SEQ ID NO: 668022 - DNA, 285 bp, Homo sapiens
gggggccgggcgggcacacacttgtggagctataaatagtggggcaggtccttctctatcaccagggctcctccatgggtccgtagcgcttcaccacgcagccgttcttgtcgatgaggaacttggtgaatgttccacttgattggcatttcccaggtatgcccgttgcccttggcgttggatcttcatccactatccacagcgggtgtggcgtcgtccccagttcacgcagtatcttgctagaacatatcgcaatttgacgttgtagctccgacggcgaactct

SEQ ID NO: 668023 - DNA, 163 bp, Homo sapiens
ccgtgatgtaatccccaaccacagtctctacaaaaaaaaaaaaaaaaaaaaaaaaaaattaggggggtgggggaacacgggccttaacccccagtaagggggggggtggggtggaggtcccctgggcccccccgtgggggggggttggcgggaccccttgatt

SEQ ID NO: 668024 - DNA, 105 bp, Homo sapiens
cattgcgtttagaatactatcttatcgatccattttaccaagccccagaatcaagagagatgcagttatatattttaacaaaaagtctggggaggtaattggcat

SEQ ID NO: 668025 - DNA, 167 bp, Homo sapiens
ctgcatcagcattccccccaaggccccccatccccagcagctggaattatagagattaaaggcacacaccaccacaactggctaactttttttgtatttttgtagaaacactgttttgtcatgttgcccaggctcatcttgaactcctgggatcaagtgatccgctc

SEQ ID NO: 668026 - DNA, 323 bp, Homo sapiens
aagttaacattggaactgtttctagtaaaagatttttttcaggctgggcacggtggctcatgcctgtaatcccaacactttgggagaccgagggagctggatcacctgaggtcaggagttcgagaccagcctggccaacatggaaaaactccatctccactaaaaatacaaaagtagcctggtgtggtggcacatgcctgtaatcccagctacttgggaagctgaggcaggagaatcacttgaacctgggaggtggaggttgcagtgagccaagatcacgccattgcactccagcctgggcaacaagagtgaaactccgtctc

SEQ ID NO: 668027 - DNA, 266 bp, Homo sapiens
tcattctatcagaaccctgaacagtgccaagtgttgtctctttgttgtcagagagttagaaccctcatgtgcgctacggagctacaatggacttggggatatgctgtgctggtacaggcaaccaggtaagcaattcaatttgctagaaccaatgacaaacagaccccgtgcaactacgatgaggcaaggggcactcactagacttcagctactcatcatgcatccagacagactgacaatcactttgtccaaaggatgaatcagtt

SEQ ID NO: 668028 - DNA, 188 bp, Homo sapiens
  misc_feature (62)..(62): n is a, c, g, or t
tttttgatgggaagaaaaggtacatgtttccaaagaggttttatgaaaagaataaaaattgncttcttgcttgtacatataggagcaatgctattatattatgtagtccgttaaccctacttaaaagtttagggtttttttttggttgtagagtggcccaaaattgcattttgaatgaataaaggtta

SEQ ID NO: 668029 - DNA, 1167 bp, Homo sapiens
agcggaggcagtagcaggaggtgcgcggaggccactcgactggcgctggctggcctgagagtcaggagcagagaacctcatttacataacggccgtccctctgtctcctggcgaggggtcggagtcccgaccctcgtccaacttgagaatctgtatgcggtcacgggtccaggtacactccgatgctagtgctagagccgctgtgtgctgagagtctgagaagagttggtagaaggctggtcccgggagcggattgggtctggggagttcccagaatgcggcattataagaacctggagaatcttgtggccgcaggcggacgactgaagtcgctaggtaagttgtccgtggttgctttggtctctgacggtggactgttacgtttgactcacgacgcgacgttgcatcatgcgcattgagtttatgcgcgcatgcgctgagatcgtcttcaggcttcggcccttctgtcagagttcccagtgcaatggatcgttgactgctgtggggaaacccggaggcgtgaattcgggcagaatccgaatgccttgggggggccatcgccacctgtattggccagctcggcggatcggaggggatccgttatcccgaaagcgaaagcgaagcaaatgggtagggggaggtaatctgatcgggccctaagcgaatcgcaaggtgtgccaggcttccctgccattcgcgaagcaccgccccccaaggaatttaccaggtggtgaccttaaccaagcgggtgagaacaaccccggaagaaccgactgatcctagaatacctgagggccagatagcagccaccggagcccaatggacaaccccaatgatggttgtgaaccgcagtaggattatccgcccgaaagacaaaaagtgagaacccagtcgcttgtccagaacccggccgccgaaagtgaagaggtgcttggccacttgtgggcaccgtggcgacaatgtatccgtaatgggtaagttgccctgaccaagcattgccaatcgttcatgtgtgaccttaatttggacacacaaccacgcttgcggccccgatgtgttacgcaaggaagacttggcactgtaagtgtgcgaacatgagacgcaagtgggccaagagaccccagcatataaggagtggctcaagggtctaatgcacgggtaacgcag

SEQ ID NO: 668030 - DNA, 194 bp, Homo sapiens
acgctcagctaattttttgtatttttaatagagacgggattcaccgtgttagccaggatggtctcgatctcctgaccttgtgatccgcctgcctcagcctccaaagtgctggggttacaggtgtgagccaccgcacccggccggatctcatcttttgagcaaagcaaaacaaaacaggacaaacagggcaggct

SEQ ID NO: 668031 - DNA, 299 bp, Homo sapiens
  misc_feature (208)..(208): n is a, c, g, or t
tctcccacctaagtctcccaagtagctggaaccacaggcatgtgccaccacacccagttaatttttcatatttttggtggagatgggatttcactatgttgcccaggctagtcttgaactcctgagctcaagcagtccacccacttctgtaatccccagcactttgggagaccaaggtgggaggatcgctttgagtccaggaagttgnagaccagcttgggcaacatagtaaggccttatctttgtaaataataataataattaaagtaaataaaattaaaccatatcgatgaattatt

SEQ ID NO: 668032 - DNA, 454 bp, Homo sapiens
ttcacagtcctagggagtgatccctagtgtcatacacaactgtgaagttaagggagatgaggactagagatgatctactgcagtgcttctcaaagtggggtccccagaccagcagcagcagcaccaggagcttgttgcaattgcagtttcttgagatctactccagacctggtgactctgggagctctgagggaagggcctagcaatctatgttttaacaaggtttcccagtgatcctgatgcatgctaatgtttgagcaccacagctctattgtgttaattgataagtcactggtgatgcagcaacttggtgaaagtaacttcataaaatttacaccctgtttgggcaaattttaaaaatgtttcgtgggactgttaaagttttattctatttgtttagaaatttcaaatgttttattttcttttgcaataaaaatgttgttatttaaaaaaa

SEQ ID NO: 668033 - DNA, 266 bp, Homo sapiens
ccagaaactcgagaagccccagaggcaacagactgagtccccacggctggtatattggccgatatagagctacgtgtaaccaaaacaggaaggcacggctataaaaacagacacaccgcccaatggaacagaactgaaagcccagaaataaacccaagtatttatggtcaatcgagttaggacaaaggggccatcacacagcgcatgacggctcatgtatgcaatagacagtgttcagaaaactgggtatgcataggacagagacc

SEQ ID NO: 668034 - DNA, 307 bp, Homo sapiens
ttcgcggccggtcgactttttttttttgagacagggtctcccattcttgcccaggctggagtgcagtggtgcgatcatggctcgccacagcttcaacctcccagcctcgagcaatcctcccacctcagccacctgagtagctgggattacagatgtatgccaccaagtccagctaatttttgtattttttttgcagagacagggtttcacgatgttgtccaggctggtctcgaacccctgggctcaagcaatccgcccacctctcaaagttgctggaataacaggcatcctaggagaatttaaaatg

SEQ ID NO: 668035 - DNA, 125 bp, Homo sapiens
tgattttattaaacactcaagagtatacttctcaaaatcacagaagagcctccaaatacaagtgttagaaggctcttctgtgatttgagaagtatactcttgagtgtttaataaagtttttttcc

SEQ ID NO: 668036 - DNA, 156 bp, Homo sapiens
ggctgggcatggtggtgcatgcctgtggtcctggctgcttggcagtatgaggtggagcccaggagtcaaaggctgcatggagccatgatcacggcattgtactccaggctgggtgacaaagtgagaccctgtctcacagaaaaaataataataata

SEQ ID NO: 668037 - DNA, 533 bp, Homo sapiens
tggtgcttggtcttttaattattcttatatgggtcctaccaatgtgactctttacccaggcccattgttcctatgcgcatggctttgtaggcattcacatcatatgtctgtgtcctgaaaatctcaattaatttctccttcctattccttttccagttgctcgtgcctcatttctctcagaaatttgaaggcattgtgatatattattttattggttggggctctgtgtaaaggttcctgggcaggagaacattgcatttttgactttaaaataaagaccaacattcgtgacactagggtaagtgcacagaaaaaatacagtactcagacaatcatggcaaataaataccccatacagatgaagttatctcaaatggtaacaatatttcttagtgaattcaacacttggtaggggacctcctatattttatatacctttcgcggtatacaggtggttgagatttcatataagagaaatttttttggtttcacagagatttagagaggttatatcttacaaaattctataggtc

SEQ ID NO: 668038 - DNA, 1147 bp, Homo sapiens
  misc_feature (217)..(217): n is a, c, g, or t
  misc_feature (221)..(221): n is a, c, g, or t
  misc_feature (227)..(228): n is a, c, g, or t
  misc_feature (236)..(236): n is a, c, g, or t
  misc_feature (248)..(248): n is a, c, g, or t
  misc_feature (265)..(265): n is a, c, g, or t
  misc_feature (296)..(297): n is a, c, g, or t
  misc_feature (321)..(321): n is a, c, g, or t
  misc_feature (323)..(323): n is a, c, g, or t
  misc_feature (326)..(326): n is a, c, g, or t
  misc_feature (333)..(333): n is a, c, g, or t
  misc_feature (343)..(343): n is a, c, g, or t
  misc_feature (354)..(355): n is a, c, g, or t
  misc_feature (358)..(358): n is a, c, g, or t
  misc_feature (368)..(368): n is a, c, g, or t
  misc_feature (373)..(373): n is a, c, g, or t
  misc_feature (378)..(378): n is a, c, g, or t
  misc_feature (384)..(384): n is a, c, g, or t
  misc_feature (390)..(390): n is a, c, g, or t
  misc_feature (398)..(398): n is a, c, g, or t
  misc_feature (400)..(400): n is a, c, g, or t
  misc_feature (405)..(407): n is a, c, g, or t
  misc_feature (411)..(411): n is a, c, g, or t
  misc_feature (804)..(804): n is a, c, g, or t
  misc_feature (836)..(836): n is a, c, g, or t
  misc_feature (842)..(842): n is a, c, g, or t
  misc_feature (847)..(848): n is a, c, g, or t
  misc_feature (855)..(855): n is a, c, g, or t
  misc_feature (906)..(906): n is a, c, g, or t
  misc_feature (926)..(926): n is a, c, g, or t
  misc_feature (941)..(941): n is a, c, g, or t
ccaataggtaataccaataaaaagatataagttatgaaaatagttaagtggaaattgggacttgaaatgtttaagaaatgaaaagaaaaaatcactggggcacttaaaaatatatttgagttggcagaagaaagtatcagcaaatttgaagatagatcaatagagattaccacatctgaaaaaaagagaaaaagagaatgaataaaaatatgcagancttnagaaanncatggaanaccattaaatanagcaatgttaagtttantgggaatacttgaatgaaagaagaaagaagnnaaaaaatatatgaagaaataatancnaantactccncaaatttganaaagaatattnntcnttatatccangaagntcaanaaggtncatatnggataaananaaagnnncatncagacacatcatagttgaaattttgaaagctaaagagagagaaaatcttggaagcagtaacagaaagaccacttatcacctacaagagaatactgataagattagcagctgaattctcatcagaaacaatggaggataaaaggcagtgggatgatatattcaaagtgctgaaagaaaaaaaaagttaaccaagaatcattacacagcaaaactattcttcaaaagaatagttgaagacaaaatgaatacaaaataaagtcattaccagaaaaaacaaaaacagaatttgttgttatcaggtccatcttacaagaaatactacagattgttcttcaggctgaatgtgagtcacacaggacagtaattcaaattcacagaagagacaaagagcancactaaaggtaattatataagccattataaanaaaaangtatnngtatatntctcctcctttcttctcttaactgatttagaaaggaattgcataaaaatgnaaattattgtactgctgagnttatatagaaatgtnatatatattaacaggaagcacaaaaatatggaggagggaatacgaactcatataggactaaattttctatatcccactaggaaataagtcaatggaccttggagtgagtcaagaggtatattgtaagcttcagaccaaccagtaagaaaataagtcaagaagtaagagttaaagatattctacatgtccttatcaacaaaaagcat

SEQ ID NO: 668039 - DNA, 179 bp, Homo sapiens
aggtcgctctagagctcccctctcgctccaccgaacaggtaagtctgtgtgaggtgatctctgtggtggtgatcgaacgacgtgaagctgggagtgactgtgtgacctggtctcagtggtggtgaccacagaagatcaagctacgagtactgtgtggtatgtgatcggttgagcggaga

SEQ ID NO: 668040 - DNA, 114 bp, Homo sapiens
aacaggagaggcctggagccatgcgactaaggagaaagaaatcgggggttactgagagcagatagtgccttagtgggtgcagagacttttgtggaaattgtcagcttctcgggg

SEQ ID NO: 668041 - DNA, 849 bp, Homo sapiens
ccaggctggtctggaactcctgggctcaagcggtcctcccacctcggcctgctgagtagctgggactgcacagatgcgccactacacccggctaatcttttaattgtttgtagagatggggtcttggcaggttgtctaggctggtcttgaactgctgggcttgagtgatcctcccgccttgggctcccaaagtactgagattgcggtcatgagccactgctccgagcccaccctacctctttattcccaagcttttctgtctattctgttccttccctaagtacgtctctttttttattttttgtttttttttgagatggagtttcactctgtcccccaggctgaagtgcggtggcgcgatctcggctcactgcgacctccgcctcccgggttcgggcggttctcttgtctcagcctccagagtggctgggattgcaggcgcccaccactacacccagctgattttgtatttttggcggagaccgggtttcatgatatggtcaggtcaggagatccacccgcctcggctctcaaaagtgctggaattgcggcgtgaggcaccacgcctggccgggtgcatcttttactaactctggcctgcttattggtgatatctgctctagtgccaaaaggagaaacactagagggatgtcagcctattggtctgttcatttaaagttctttcttagcaccaaattaagtctaatttaactaaaaatccactttgtgctttgtggcattgtgtcaaggaattccccacagggtccttatgggcatatagcccaggccctctacagaaaagggctccttgtattaagaaaaggcaattttgggtataaaccgggtatt

SEQ ID NO: 668042 - DNA, 136 bp, Homo sapiens
ctgatgtagcctgagatagcagtacagaatgaggagcagcaggcctagcggagttgatatgcagggcgatggggctggcagagctggtggagcctgctatgcagtagggggccttcaagttcccgggaacaccctt

SEQ ID NO: 668043 - DNA, 1118 bp, Homo sapiens
  misc_feature (609)..(609): n is a, c, g, or t
ggacgcgtgggatcgcgacggccgccctttttttttttgttttcacataaatttacacaagcactttataaaagggttacacagaaaacaccttataagtgcataaattaacacccccccacccctcaaagtgggttctggaaaaatgggctgcatttatgtgaaacacctgtctgtgcgtacctggattgggcgctgggattgttgtggtgggggcctggcagaccaagtgaggctgtatgtacgctagtgggctcgttgtgtcgtaggtagtagtgtgtcacagtgtggccatgaccttgtgttcggtcgctggcagggattgccagtgctgtccaggatgagtcttgtgtcaccccttgaacctgtgcctgactcgctaaggctccaaagtgtaaacacttgttgacccctctgtctggttgacactcttcccattagtatgcccatgttgtaggccctctggggtagaacaccagaggcagggcacagtcgcaccaccaccctgtgctgtgggccctatggggttcccatagtgctcgtcgcatcgcaaaagtgggtccacacgaaaaaggggttccccaacggggcaacactctcagatgtganccgcccccgtgggagaccccgcagaaaacgcctccgctcccactccccatattaccctcccactgtgcccctatcagtccttgaagactccccccacgttagaaacacaccgttcacccgttttcacacgcgtcgacaacctaccgccaacaacaaacccacgcgtctccctctaaccgcgcgttccacgccactgtgttgcccgcgacccgcccctcctgggggacgcggcgcggccccccgtgctccccttgcccccctcttgctgcctcctttcgcccccgcgaacgggctgcgaaacacaattgccccagaccacacacacggtcggagagcgcccccatccaccgcccaccgcttcgcgcaaggcggcaacggttacacccacccccacggcgaacgacacgacccgaacgacacaacgaaccgacagtacagcacacaatcaccccggacgccccccacaagacaccaacgctacacccccacgcccagagaacaacaagcgc

SEQ ID NO: 668044 - DNA, 331 bp, Homo sapiens
gaagctgcccgccacagaagcctccatgatcgttcgccctaaacccaacgtcctgggtatcctgttctccctcaaaggctccattgccaagcgcattgcctggcgcagcctgctggtcacgctgttggcctcggtcatcgtgctggtggaaaccctgcaccccgcctatttttccaaggtcaacgctacgcccttcaccttgttgggcctgtcactgtcgatcttcatgagttttcgcaacaacgcctgctacgaccgttggtgggagggccgcaagcaactggggcaaatggtcattgacgtgcgctcgctgattcgcgagacccaggtg

SEQ ID NO: 668045 - DNA, 874 bp, Homo sapiens
  misc_feature (532)..(532): n is a, c, g, or t
tcacggaagagttctccgctcccagacatgggtccctcggccttcctgcctcgtgaagcgcagcagacaggcatcgtggtgaagtgtgaagatgacttccctaaggatgacccgtccaagtccggtccacctcacatgccttcctgagagtatacagagggtctgggcagtgacctcacactcgttggctggggaagtcagactaggaccggtgtatccaaagtgtagagacaaggataggtgagtgtaggctggtagggcctggtgtaccatattgtatgacgtagcagcctaccgcatggtgcgcttgtgtggcaattcgttggggactaactcgtggcacaaacccccataccgatgaggccatcccggtatccgtgtgcgaatggaacttgtgctgttgtagtcgtcggagactacctagtcgacggttgactgcaaattggcagagcgatgagcggttatactactaaagggaagtatgggccagtatacattctatgggacactgaagcgcgctttatatcaccanaggtttacccttgccgacaccgacacattggtggcacgcgatttgacgggagttgtgcgacagtgagaagtcacggctcttggaacgtacacggtcgaacctttgctacgtcaattgacacttgaacacggcataggattagcatatggcgcaagaagggttcacttactcctggttggatacgaataatgtggcgcccccaatctaaccctctaagaaattggacaggcccttggacttattcccttcttagggcggccccaagaaatggaaggtgccccgaagtccttggaatgggaggattcccatggggtgaaacgcggggatggcgcacttggtgag

SEQ ID NO: 668046 - DNA, 520 bp, Homo sapiens
tgaataagttggactcatgtcctgtattcctaggacattgagaggccaaggctggtggatagcttgagctcaggagttcaagaccagtccaggcaacaaagctagaccatgtctcaaaaaaaaaaaagttacaattttatattttactttttcaagttcttttatgaaataccaaaggcagaaaactctgtgacatacaatgggaaatctccctctataagacatcttcccatttctctttaataatgagttcatagattctcctacctgttactcttatccaacacttttcccccagcttgtccacaggttatctacataagatgttaaattttggctgataataagacttgtcctcagcattaatttcattggctaaagaaaggtggttaattccctattgagcctctacgggctgctagtggttaccacttcttatccaagagttgctttcagtgatacactggtaaccttttatcagaaggatctgtggaagcaaaggcccatatttgtagtattt

SEQ ID NO: 668047 - DNA, 731 bp, Homo sapiens
tattccccccggtggggtttttactcgttcttcccccccctatttttccctccccgtgggggtgttccccccgggggtccacaacacccatgggaattggcggggtcctttttgttactaatcgcggttccactacagggaaggggccctttttttcgtagtcacctgtacacggcgcgtggttcccttgggtacatatctcggctccctacagatggtgaggctcatagcttgtgtgccctgctgacccgctctatggtcaagcactgtggcttcctactttacccatgtggaactattttagcacagtatccccgcatcccccttgagacctacaccagacacataaccctagatgctctagcactagaaatgcaccctttaataactccatttaggggtctacatttagccttaagtctctagctctcgagctctttagtacagtcgcttatcaatcacctttcctggtctatataccttgttaacataaattccttccagactaaaccgaagatcgttcagcaactgtaaaagaaattacttcattctatcttatgttatttcttcgcccacaccttcaagctaggtttctctaaaaaacatacacataaagcattacacaggaaaatacacagaacaaaccttcgtacgagggaatcacctcataaagtactatgtaagtgtccaggcacggtggttcacaccgtgtaatcccagcactttgggag

SEQ ID NO: 668048 - DNA, 115 bp, Homo sapiens
ctcatgcagtggcgtttcccaaatcaggcagcttcccaaccagggcttctcccacccatgggctgtgtcatccaaatccactgggtcaccaattttcttttcaacacatcaggtt

SEQ ID NO: 668049 - DNA, 668 bp, Homo sapiens
  misc_feature (137)..(137): n is a, c, g, or t
  misc_feature (139)..(139): n is a, c, g, or t
  misc_feature (198)..(198): n is a, c, g, or t
  misc_feature (393)..(393): n is a, c, g, or t
tcccccccccccccccccacctttttttgttgtttgtggaggagaaaaaaaaaaaaacaccacccccccccccttctctcttttttttttttggtgggggggggggggcggggggggaaaccccataaaaaaaaaancngccctcccccccccccgcgggcgggcgggggtttttttttttttttttctccccccccnaaataattttatttctccccccccccccccacaaaaagagagggagagagcccccccccccccgcgcccccccctttttttatataaaaaacgccgggggggggggggggccctcccccccccccaccaaaaaggggggtgttttttttttttttcccaaaggaaaaagaaaatttttttgggggggggtgtttncccccccgcgggttttaaaccaccccccccgtgggggggggggggggttttttttttttgcgcgctcttttttttttttttttttcttccccccggagggagaacctctccttttttttggggggaagagggggttttttgaaaaattttttttccgaggggaaaaaaccccaaaaccggggctagggcccttttccccggttttcccgggaaaccaaaaaaacctgtgtaataaacccaacgcccgcaatgtttctgcccatcactggataaag

SEQ ID NO: 668050 - DNA, 89 bp, Homo sapiens
tgcgcttgagggggggtgtataagtttccccttttaaggtttcgcccaatttcattgcactttcctttcaataaagttgttgcattccc

SEQ ID NO: 668051 - DNA, 132 bp, Homo sapiens
ctagagcgacgcttaatacaccaccactgattcggaccagatgtacttccatcttcagccagagcgtcagcagcaacttctggtggccatacgcttctcatagaaagtacgaagttggcgtccatcgtccac

SEQ ID NO: 668052 - DNA, 750 bp, Homo sapiens
  misc_feature (418)..(418): n is a, c, g, or t
gggcacttcgggcgccgcaacagcagcttcgagagctgtgcccaggagtgaacaaccagccctacctctgtgagagtggtcactgctgcgggagactggctgtgacctactactatgagctctggtggttctggctgctctgaactgtcctcatcctctttagctgctgtgtgcgccttccgcaaccgagagctaaaactcaggctgcaacaacagcagcggcaggggtgaaaatcaatttgtgttgtggcctatcatggggcatgcccattggggctggtcctttccctaccggttcatgtttgaccttcgtgaggtgactttgatgccctgggtcagctaccagtggccctcccaaaaacgagaacccaaaatcgtctcacattcccttttccacacattcacatttcaaagtatnttttccctaatataaaaactaagcacccctacaaaaaaaaagaaagaacaacacaaaaaaatatttgttcggggggcccgtgccacccgaaaagaaagtcttcaaacaccattgcgtgggggcgccgcggccccaattggtaagtgtcaccgttgcccaaagcgtgtctccacaggagaaacccgcgcgccacagacagctgcgcgtggtcttcccccataaaaaaaacggcggggcggaccccgcgtggctcttgacaatcccgagtgggttcggaggcctagcgctccttcgaccagcgctccagcgaacgattacccccccgtggggtg

SEQ ID NO: 668053 - DNA, 150 bp, Homo sapiens
cggagtttgttagagttgtaggctcgcgacccgcatcatccagtgctctacccctacggtattcgtcgaggcactacacaatagtttcgcggagaccagctattcccggctgattggccttcaccctaacacactcatcgtactttcacg

SEQ ID NO: 668054 - DNA, 270 bp, Homo sapiens
acgccataccgtattaaaagccaaagattaagagaaaatttgaaagcagccagaggaaaaaaatgacatattatataaagggaaagaatgacaaaaataatgtttgacttcttataagaaataatactgtcagaatagaaaatactaacattttaagttgctgatggaaaaaaaaacctgtaaatcaagaatcctatagtgagcaaaaatatctttcaaggcagcatattaaataaatgccttgaaaaaaaatagagcgaatgtcttttg

SEQ ID NO: 668055 - DNA, 291 bp, Homo sapiens
cgaggggtcatcaattatgacaaggaagtacttccaatgattactacaattttacaaaccaatgacagtaagatgaacagagaccattaagtaatacaagcggagaccgaaaggggtactgcgcgtcccaaaggtgggaaatgcatatcgcgacagggaccaccaggattacttaatataagactgacagcgtattgcgtatcccagagccatctctcgggaaacagctacgtcagaatgcaaccgcgaacgacgaaaaagaatccatggcctggactcccacatagacac

SEQ ID NO: 668056 - DNA, 723 bp, Homo sapiens
tcctcctgccttagcctcccaaagtgctgggattacaagcataagcaccacacctggctggacaatcaaaaatttaaaggggaacccaaaagctaagtgggaaaaggtacctaaaatgggaactagaatttctaaaggttctgggaaaagcctcctattaaatggaatggtttcctggaaccatggtaattaggaatggattcctggccaaagacctgacatcaaataagtgattgacattaccagcaatggattttgaaaagcgcaaaaatactattaacctatataaccatttaaaatttaaaaaattgtgttccaagtacctctatattctgagctataagaaaccttatagggcatctgaggatagatttccagagctggatggatccctatggactacctaaactgactttctgtgcactgcatggattcttctaaaaagtatgtgacttatttccctaccctattaagactaaataagtggaacatcatagagctccttatttataacagccattcttttgataagcactcttaaaaggagacctgagatgcttaaatattgtactactggggttatcatgtgaagatttcttaaagggtagtattggtagtttaaaaaggctttggcttatgctgaattatacatgttggaccaaaatggtcaactctacttccttgtctctatttttgctctatttatattagcttcctcggacc

SEQ ID NO: 668057 - DNA, 494 bp, Homo sapiens
gctgcctgctgttattatcatgagtcctagttaacctgaagtggagaagacaacgatacgcaggatgacataatgtgtaagggcgcagactgctgcgaacagagtggtgctagcgcctaaacatagtgtcagagtacggattacgtgggctatttactgctagggggtgtaaagcggatgcgtaagacagactcctgctacaactatagtgcttgcgtggagcaagactagagacctggggtgaagccttctactggctagaggggcgtcacggggtggagacctaattaggctgataagcctgctgctgctcagaggaggcctagtagtgaggtgaggcttggattagcgtatagcagggctatttgtagtgggtctcatgagttggagtgtagaataaatcatgctaaggcgaggatgaaaccgatatcgccgatacggttgtataggattgcttgaatggctagctgtgttggcatctgctcaggcgtact

SEQ ID NO: 668058 - DNA, 436 bp, Homo sapiens
  misc_feature (282)..(282): n is a, c, g, or t
  misc_feature (300)..(300): n is a, c, g, or t
  misc_feature (304)..(304): n is a, c, g, or t
  misc_feature (311)..(311): n is a, c, g, or t
  misc_feature (391)..(391): n is a, c, g, or t
  misc_feature (398)..(398): n is a, c, g, or t
  misc_feature (401)..(401): n is a, c, g, or t
gttgccgagcttcaccacgaactgctgctgctgcgcttgctcctcagtcctagcgtcatcatacacgggttcctggaatccgggctgcggctgtcttccgagatgcacggaatccacgtctgtgtagcacctggggcagctgtcaattaaggcgagtcctcaggagttaaaaaatgaatgctgaactcaaagtgccaatgcaaaaagattaagttggtaatgactctggatcttgaattacttccgttacgaaagtccttcacatttgtcaaactgagctantatatttaaggccttccnaatncttctanctcttccaaaagccttctgccttagttttttttaaattacaccagtccttttagtagctttttgatgtgattttaaccancttcccnttntagcttcaagtattcttctattggcccttatcgag

SEQ ID NO: 668059 - DNA, 122 bp, Homo sapiens
agagacagagtttcaccatgctacccaggctgatcctcaaactcctggacacaagtgattctcctgcctcagcttcccaagtatctaggactataggagcatgccaccacacctagctaatt

SEQ ID NO: 668060 - DNA, 106 bp, Homo sapiens
gtcggactccccgatcggtctttacctacacaatacgggggcttcgatgagacattctcaacacctttctttgtgctctaacactcttcgctcctgctttgttttt

SEQ ID NO: 668061 - DNA, 427 bp, Homo sapiens
  misc_feature (282)..(282): n is a, c, g, or t
  misc_feature (300)..(300): n is a, c, g, or t
  misc_feature (304)..(304): n is a, c, g, or t
  misc_feature (311)..(311): n is a, c, g, or t
gttgccgagcttcaccacgaactgctgctgctgcgcttgctcctcagtcctagcgtcatcatacacgggttcctggaatccgggctgcggctgtcttccgagatgcacggaatccacgtctgtgtagcacctggggcagctgtcaattaaggcgagtcctcaggagttaaaaaatgaatgctgaactcaaagtgccaatgcaaaaagattaagttggtaatgactctggatcttgaattacttccgttacgaaagtccttcacatttgtcaaactgagctantatatttaaggccttccnaatncttctanctcttccaaaagccttctgccttagttttttttaaattacaccagtccttttagtagcttttaactgcagcaactttaatatacgctattgagccaacaccgggcgggatcctcta

SEQ ID NO: 668062 - DNA, 747 bp, Homo sapiens
  misc_feature (93)..(93): n is a, c, g, or t
  misc_feature (189)..(189): n is a, c, g, or t
  misc_feature (236)..(237): n is a, c, g, or t
  misc_feature (241)..(241): n is a, c, g, or t
  misc_feature (259)..(260): n is a, c, g, or t
  misc_feature (300)..(300): n is a, c, g, or t
  misc_feature (313)..(313): n is a, c, g, or t
  misc_feature (352)..(352): n is a, c, g, or t
  misc_feature (461)..(461): n is a, c, g, or t
  misc_feature (479)..(479): n is a, c, g, or t
  misc_feature (499)..(499): n is a, c, g, or t
  misc_feature (516)..(516): n is a, c, g, or t
  misc_feature (546)..(547): n is a, c, g, or t
  misc_feature (564)..(564): n is a, c, g, or t
  misc_feature (679)..(679): n is a, c, g, or t
  misc_feature (685)..(685): n is a, c, g, or t
  misc_feature (695)..(695): n is a, c, g, or t
  misc_feature (715)..(715): n is a, c, g, or t
  misc_feature (720)..(720): n is a, c, g, or t
agcggcgttcgcgcccggcggcgctccaggtgctgacagcgcgagagagcgcggcctcaggagcaaggcgaatgtatgacaacatgtccacantggtgtacataaaggaagacaagttggagaagcttacacaggatgaaattactttctaagacaaagcaagtaattcagggcgtggaagctttgaangaactgagcacaattccattttacaaagtttgctggagacactgaanntgtntgaggaaagatgatgaanngtaattcggtggaggagaaatcaacacatgatccggaagncactggagatgtnggagctcggcctgagtgaggcacaggttatgatggcttngtcaaatcacctgaatgctgtggagtccgagaagcagaaactgcgtgcgcaggttcgtcgtctgtgccaggagaatcagcggctacgggatgaactggccaacacgcangcagaaactgcagaagantgagcagtctgtggctcaantggaggaggagaagcangcatctggagtttatgaatcagctaaacannactactgatgacgacantttccccatccgaggacaaagacactgattctaccaaagagcctctggatgaccttttccccaatgatgaagacgacccagggcaaggaatccagcggcagcacagcagtgcagncgcggntgcccagcanggcggctacgagatccccgngcggntgcggacgctccacaacctggtggatc

SEQ ID NO: 668063 - DNA, 824 bp, Homo sapiens
gacaatggtgctctgaaaagacatctttgcatgttcctacatccgcctccttgcacgcagagcccgcctccgccggcgctcctccgcgacgaggactccggaagatacatcgccagagtcccctgaacctctcgctctcttgttcaatcccctgcatcggactcaacgggcgtgacaccaccactgatcagaccgacagcccgcaagacaccagtccaaaaaataaccaccaagacactataaagagacaaagacggacagttcgtcgcaccgaggccacacacatgcgcaacacaccgccccctgccaacacgcggacactgcctgaacaactcgcggaacaatcggcgccccaccggacgacccctgaacaccacgcacgcgtacaccgaccaaccacagcacagcacgcgcgggacacgccaccgaccccccgacggcaacacaccaccggcgccaccccgcacgacacacgcaccacccctcccccaccaacggcaccctacacgccagcacacgcggcacacgcgagcacgctcgacacgacacggctccccgcgcaccctgtcacaaccacacccacggccacaacacccgcccgcaggcatacataaccaaccgacacacacgaaacagctcacccctacccaacaaaaccaggccaccgccacataatcacccacacattcacgcacaagaacttacaccgggccccctccaaccaaacagccccccaccacccgacccccgcccccccgccagcacacagcacccccccaccccacccacacccccgcacacccccccacgccgacaaccgccca

SEQ ID NO: 668064 - DNA, 1165 bp, Homo sapiens
actgctactgtgtaatccaacttgacaagtagctgttggctgctggtcccacgtgagggatgtgcttgtacacctggctgtggccataagtgagtgctgggctttcctagagtgagctcacagccctgagggagtgcacagagaagcagacaggcccttggtgataatacttgtgcctggtggaagtgcagagccctccctgagtgcccaggcctccctgagtgacagtgggagtcaactacaggagtgggtggtatggacttcccagaagaaattgaacgtgcagcagcaatgtgtgtgttgcattacaatgctcgcatggagcagtgtgccttgtgactgcagagtggaggcagtggctaggatctggtgactcggcttgcaaggcctgagtgacacgctttgacagcagtgtggaggcatgtggaccacgtttgaaggcagcgggcataatgacatggtctgattatgcaactatatggcaaatgaccaacccttagttcctagtatagacttgagtgacaaaggcgcagcatgcacgtaactcaggatgacccaggttgagtgtccgcttggatagtagtgaaccacaatgtgagcagcacattgggatctggcgctagactatgacttgaaggcactatagtgtactattaccactacataagacacacattaatgcctgtaaacgggtaggcccacttgagacttttgcactccaaagccaaggtgccttaatgataggcattggggagacatccccagagtcgcaagggtgtcaacggaacgcggcaattttccacaagtgaattgacagcacagtaagttcataaacagttcgctatcgctgaacaacacaccgtatgacatcataatatcacaagggggcgcgttagagagggagataaaaggaggatgggttccaggagaaattgaagcagtatagtttctatcaaaatgagcacgaaaggtactgtaatagtagaagtataagagttaggtgtgtagatgaggagatattcaaagtggaggtgataaataacattgagagtaatctaggaatggcaagaggtgtctagaactgtttacgattagtccagttgaatagtgtgtttacaaggcggtaataggcagtatagtagtcacatgtagttggggttagtaa

SEQ ID NO: 668065 - DNA, 1742 bp, Homo sapiens
  misc_feature (316)..(316): n is a, c, g, or t
  misc_feature (898)..(898): n is a, c, g, or t
ataggttactacaaagtacacatagggatactcggactaaaatcttaccccgcccgtttatcaataacattcacctctagcatcaccagttattgagaggcgacgcggctgactcctgatggactatcactgttctaaacggagccagcagagatagccccttaacccgtagctaacatggatacgacatagagtcacattgttatccctctaatttaaatgggaacttagctatgtaatggttctcgcaacagccagagtgatgtcaagtaactgtctcatttctatacctatattaagcccagtgtgcacaaantatgacccctgacacacgctgtaaagaagtgcacggtggcagtgcaccacacagtcacaatcactgcagcacagtacactctgtgatgagccagccctttcacaatatcattataaatgcaacacacatagtaacccctttacaccatacatcacgactagtgatcccattcatatactacacacatatacatcatagtgctcattacatagaaacatttatccgcgttatggggaggtccaggactcgtccgggccagtctaagaaaccacaaaacctttaccgttagtctagataacaattgccttaaaatgacgtctctacctaaagcttcgacaacgggcacaaacctaacattaattatgtccacactagcaatcctcaaataatagcctctgtaatcgaatagtgggattccaaagggtctaaacgcctcagaggggcattcacaacctgaacgcgagagtgcccctcaaatctctctaaggaacgctcccccagttaaattctagaaccaaaatctcatggggggcttttataagccggaaactccgtcgagcatatgtgctacgggaactcccncagtgcagcaaataccaacaagacgttgcggttggcaatagcctagggggaacctattaaacaatagggtctcacagtatctaggtttcaaaaccagatttttacaccaggtcccgataacggctcggaactgcttggtaagtttttccaggaacgcacgaggacgcttcaaattacccaccggttgggcggcgcattctactaaatacttaaaacttcttgagaaacttataacactatacccggctcgtttaccgcgaaagcacgggggggccatacggaatgccacacatttcagggtgcctacccttttccaacacaaaataggcgtggccctgtatccccgccggtggacaaagcttggacatcaattgcaatccccgtcaaaagatcctaaggaaccttaaaagtaaccccacgaagacgccaaaagcccaaaggaaacaacggggcgcttgggcgtcacggagacacacccaccaaaccagggcgacacaaccaacacacagcataacaactacccgctactaacaagcaccaccaagaaccgaaaaagcgggcgggccgcggcaactaaacagagaacccccacgaaggaggggaggcagacacactacgacagacctaccgcccgatctctggatccgaccaagacggtgccccacaacaagaaggagctctccaaagaatagacgagaccgccgacgagtgcaacaaaccattcagcagagccgaacaaaactacgaacgcagggaacggagcagcaaggcacccccccatggcggggggatctacgacacagctcacacgacacaaacaagcgacccacgacacaaagcaaca

SEQ ID NO: 668066 - DNA, 253 bp, Homo sapiens
agatgaggtgtgagcagcggaacaggtaatgccagagcacaggctcgcttgctcgttggaacgggtgttggcgacttccttcctctgtccggagaggcacaggtttcgcccagtatccagccaaaggctccctcacagggcgctgtacactttttagtacaacgttttgtacatttttcgaactcaacaaccttgtttcaactttaattaaaaattgctcactgttggggcacagggggggactcttcttaga

SEQ ID NO: 668067 - DNA, 478 bp, Homo sapiens
attgactaaactgggcagggaattgaccgaaataaaaaggtccatataccaaaaaagtggctatactacatatgaccgcccaaactttactagctccataggttttcgggatattcacaagcacacattaaaacaattacagagcggacatacgtttatgattaacgcaaatgaaggcacatgaattacaatctatgcttttaagatagcctttataaaaacctccacttacaagaattcaaatgatggccccgctcacctattcacgaggaatgtaagtgagccgagataggccattcctttttttatccttaaaagcaaagcgtgaagcactggggaacgtaggtctgtgccaaacacataaatccctgtgacggtgggaatcattgggccctgaaaaacattgcttatcgggttctacccagcttaattgttgggaaatgcaggtatacccaaagctggactataatagcccgct

SEQ ID NO: 668068 - DNA, 1264 bp, Homo sapiens
  misc_feature (10)..(10): n is a, c, g, or t
  misc_feature (457)..(457): n is a, c, g, or t
  misc_feature (462)..(462): n is a, c, g, or t
  misc_feature (466)..(466): n is a, c, g, or t
  misc_feature (469)..(469): n is a, c, g, or t
  misc_feature (471)..(472): n is a, c, g, or t
  misc_feature (476)..(476): n is a, c, g, or t
  misc_feature (478)..(479): n is a, c, g, or t
  misc_feature (894)..(894): n is a, c, g, or t
  misc_feature (915)..(915): n is a, c, g, or t
  misc_feature (1204)..(1204): n is a, c, g, or t
  misc_feature (1217)..(1217): n is a, c, g, or t
  misc_feature (1241)..(1241): n is a, c, g, or t
ttgtgagagntcggaggaatgtttgggaaatgtggctgtacgtggtccaggatatcagtggaagaatgagtaggaagggaagaggatacggggagtaaggatgctgggttgagggaagcacttctggtaagactgaatttgggattttttataaagagggcatggagtaattgaatcctggaaggaggaagggagcttactgcttgggaggagaggagatcttgtagattatgagaactgtggacggtggtattccgagccatcagtcaagctgtcctccctactcatcccatagtccataacccctatccacgtctctctctcgtcgctaccaacaccaccctctacactgcaattgacctgaaggatgccttctttaccatttccctacaccctgattcccaaaacctatttgctttcacctggactgaccctgacaccctccagtcacaacaantcacntggnctntnntccntnngggcttcagggatagccctcatttctttggacaagctctagcccgaaacctcacttccttaaacctgtctcccagtcatcttcaatatgtggacgaccttcttctttgcagcccctctctaaaagactctcaaactcacacggccactgctctcttaaactttctcgctatcaaagggtatagggtctccccctccaaggcccaactctccatctccatgatgacttacttaggaattcaactttcccctggggcccaggctatgactccagccagggcagcattaatagaaaatctacccccaccctcctccaaaagcgaaatcctttccttcccagggctagcaggcttctttagaatatggatttccaactttgccctcctagctcatcccctctatgaagtggccaaaggncctcccaatgaacccctaaanccctcacataacatactccccagcttccacaaactccaaactgctcttgtcactgcgtcagctccgtccttacctgatatctcccaacctttcactctctatactgctgaaagctgaggaatagccctcggtgtcttaggacaacagaaaggaaatcctccttcctttgcccctgtagcttacctctctaaacaactagataacacagtcaaagggtggccagcctgctttaagcactagaagtggtagccagcttagctctagaaagcaggaaactaactttcagccngaataccaccggncacagttctcataatctacaaganctcctttctccaagcagtaagct

SEQ ID NO: 668069 - DNA, 970 bp, Homo sapiens
actatttctagatcgctgccccctctgctgacgcccccatgttcgtcatgggtgtgaaccatgagatagtatgacatcaggctcaagatcatcagcaatgcctcctgcgccaccaagtgtttagcacccctggccaaggttcatccatgacaactttggtatcgtggaaggactcatgagcacagttccatgccatcactgccacccataagactgtggttggcccctccgggaaagctgtggcgtgatggccgcggggctctccagaacatcatccctggctctactggcgcgtgccaaggctgtgggcaaggtcatccctgatctgaactggagtaacgactcactggtatggccttccgtagtctcacccactgcaccaatcgtgtcaatgagtgtgacctgactgccgtctagaaatagactgtcgaaatatgatgatcctcaacgaaggtggtgagatcaggcgtcagtacggccccctatcgacggcgtcctagggcatacactgagtcatccaggtggttcgtccctctgacttctaactagacgactatcgcatctctgtccatccttcgatgctgaggctggcgttgcccatcaaggacactttgtcaatcctcatttcctggtatgacaactatatttgggtacagcaacaggttggtgccctctatgaccaatgctcaagagtaagagcctgggaacaccagccagcagagcacaagaggagagagagagccctcactgctggggtcctcccaatttggttccgccatatgatttccttcgccccgtttccaggtgaccctgaaagggggggccgggaagaccgggcgtccacatgggccggccaaccgaaaaaccacggtatgagaggaaaaaacgccgcaaaaaaagcggggtggaaaaaagggcgcaccagcgggaccaaagatatagaaacgactaaaccagccgggcaaaaatt

SEQ ID NO: 668070 - DNA, 372 bp, Homo sapiens
  misc_feature (166)..(166): n is a, c, g, or t
atttgttaagagacagggtctcactatgttgcctgggctggagcacagtggcactgtaccgtacaggacaccctgtgatatggttcgtagtctccgggcggggagagaagaatgatattactcccaatatcgtgtggagtgtccacccccccttgtgatattgttncataatatccagtccccccttcaatattacacacggtatcatggggaagtgtacacacccttacacaccccccgcgatattgagggtactatcatcttgtcacttcctgggctcagtggctcacacctgtaaccccagtatcctgagaggtggaggcaagggaatcactcgaagtccaggagtttaggaccaaccagggcaacatg

SEQ ID NO: 668071 - DNA, 248 bp, Homo sapiens
  misc_feature (187)..(187): n is a, c, g, or t
  misc_feature (212)..(212): n is a, c, g, or t
  misc_feature (230)..(230): n is a, c, g, or t
gccacatgggaagaagaagaattgtctgggccacacataaaatatgctgatgatagctgatgagctaataaaagaaattgcaaaaaaatctcataatgttctaagaaaatttatgaatttgtattgcggttagctgtatcaaagctgtgctggggccgcagtgcgtgtagactgggtggagaatccncaaattttagagtggggtcatgacncttaattttcacattcanggagattaacatgagtgg

SEQ ID NO: 668072 - DNA, 486 bp, Homo sapiens
  misc_feature (383)..(383): n is a, c, g, or t
  misc_feature (474)..(474): n is a, c, g, or t
agcccaacagttcgagagcaacctgggcaacatggtgagaccctgtttctacaaacatttcaaaaattagttgagcatggtggcatgtgcctagtcccggctcctcgggaggctgaggaaagaggattgcttgagcccaggaattggaggctgcagtgagctatggtcatgccactgcactccatcctggggagcagagctggactctgtctcacaatgacgtctataatctcagcactttgggaggccaaggcgggtggatcgcctgaggtcaggtgttcaggaccaacctggccaacatggcaaaaccccgtttctactaacacattggccaggccgtggtggtcatgtctgtggtcccagctgcttggaggctggggcangagaatcgcttgaacccaggaagcatcggcttcaagtgagtcaagatcgagacacttgccttcaacctgggcaacagagcgactctggctnacacacacacac

SEQ ID NO: 668073 - DNA, 334 bp, Homo sapiens
tttgaatccccctaccaagccgccacgtaaaatccttggaaaaggtgtgtgctgcctttataagaggcgccaaaaaaaagaatctccaagtgaaagggcccgttcgaatgcccccccagacttttagaatccctccgaaaaaaaccccctgtggtgaaggttttaaaacgggggatcgtttccagatgagaattcccaagcgcctccttgccttgccccgtccttttgagattgttaagccgattccttccccccgtattgagcccggggttgggggggaagtcccccttgcagatgcttaagtccccttttttaataaattgatgccccgtta

SEQ ID NO: 668074 - DNA, 708 bp, Homo sapiens
gcctctcaagcttggggttgtgggtggggtaaccacgcgggttcaacatgcgtatcgaaaagtgtaattactgtctcggggcccatcttagtcctggacacggcatgatgtcgtccgtagcgatcagcaaggtgtgcagatattggcaatgtctagaatgtcaatagatacaatttaagactagaagcgcagatcctcgtcgaaagtacaggtgggaccaaaggcattctcggaaatgcatgctgggtagaagagctctacagtggatacttccattgcgagatttgaaaaacggtggaagtgaagctatcaaataccgatgggagagcatagctggaataacaatgtattgggattgcgatgaagacgatggttgaagagcttcaatcggaaggcgtcgcagagcatagagaatcttagtagatgcaacgaggatttggacagaagaagattaaacgaaggctataagaagagtccaagggatatcaagactgaaagtcacagcacagtaagatccatctatatccgagcccctccgttgcagtgcatgagggaaaacaggtcgagaagacgataaatgtgttacagcagattacataggagtgattgtggccctcggcaaagattgctcctttaaagaaatcttctggtaaccaatatactatatatttgtacatttggaaaattgccctttggattacttgtaac

SEQ ID NO: 668075 - DNA, 361 bp, Homo sapiens
ctgactggtagcctaagtaggagacttttcttcctttttttctctctccccattttttggggggagtttttcaattatgcggttctgctgctcatgactctaaagtaaagctcttttggatagtatatcctaactttactgctagacagtatggctcattaagattatttctcaataatcctagtttatcataatgattttgtgggaaatcatcaatctatttttattatatgttatgtgtttatattttggactgattttgggaaaaactgttcaatttgggtccttttaatcttattttaagcagcctagaatgtaatgaagctcttatcttatgaaagctgatacactttattaaaag

SEQ ID NO: 668076 - DNA, 162 bp, Homo sapiens
agaggacgcgtttgacgggtctggaaaacaactgagattagcttttctggtaacacttggtatatgagaatttacaggtcctaaatatgcacttcccctgtcattctcacaattatccctaaactgggagacacttagcacgctcacctaaacgatactgac

SEQ ID NO: 668077 - DNA, 246 bp, Homo sapiens
gtcgtgtctgtgacaggccgaggggtgctgtcacctgttgatgctgagtgaaatgtgctggtgacagtgaagaggggtgacatgacctgtggattctgagtgaagtgtctgtgtgacaggaagaggggtggtgtgaccgtgtggatactgagtgaagggctggtgacagtgaagaggtggtggctgatgaccttgtggtattctgagtgaatgtgtcggttgacagtgaacgaggtggtggctgtg

SEQ ID NO: 668078 - DNA, 280 bp, Homo sapiens
ggacggtgcccagcctcaccaagaaactagagaaaaatgaatttaaacaatggtacagtaccttttatcaaaaaaatagtaataataataaaagaggccaggcgcagtgactcatgcctgtaatcagtactttcggaggctgaggcgggtggatcacctgaggtcaggagttcaagaccagcatggccaacaagatgaaaccatgtctttactgaaaatacaaaaattagccaggcgtggtggcgcatgcttgcaggtccccagctacttagggggcctg

SEQ ID NO: 668079 - DNA, 907 bp, Homo sapiens
  misc_feature (264)..(264): n is a, c, g, or t
  misc_feature (275)..(275): n is a, c, g, or t
taaaaaggggagtctcactcggtggcccagttgggagtgcaggggggtgatctcggtctcaccaaaattctcggcctcccgaggttcaagggatttctcctcctcttcagccctcccgagtagcgtgggaataacgggcaagtgttgccaaatacgcccagcataaatttgtgggtattttatagtagagagggggtttcaccagtggtgggccaggcgtggctcttgaactcctgtgaccttcaaatgtgactccactccacnctgggccccancaagaggtgctgtggctcaccatgtgcagtggagtctcacgtggcaccgtgaaccttgggagtatagggttctcacttctcccccccattgtagaaccattttggagcattttttatgtgtggtagcagccttctgcgtgggggtataaaatactcctctgtgggtgactgtgaattagaaacgtgtgcgttgtgggaacggaggaccagcagtggtgcgacaacagtgtttgtcgacccttttaccagggatttaaacacggctggttgagatacactcctgtgttacccatttaattggagctccttctataacacccccatttgaatgaatacctgtccccattgggattgacgcagggggtctctggtggaaaacgacaacagagtactctgttgttatcattctgttcggcgaggaataatgctccccaactttgtgttgtgcgcccccacttcttgtggcgtgtgcgcggcgtgtggggcgccacattcttcggtgtcttccggggggacaacccctcttggcccctcccggggcgtccccaggtggaatacctcgctggttctaagcctcccccaaggtacgcgtgggggcacacgcgtggtcgtgggctcccaaccgctgggga

SEQ ID NO: 668080 - DNA, 226 bp, Homo sapiens
ctggatcgacgaagagttgtggctgggcttcaccaccgtgctgctcaggacagccccatgcctgctttgtcatatccccaccagaatatccctgcccagggaagtgagaggctctctttatggagccatgcagaactggtgcagagaaactaagacggatggaagagatggagtgatcttacggcaggggtagagagagctgagttgcggacgcagtccacttagg

SEQ ID NO: 668081 - DNA, 647 bp, Homo sapiens
taaacccctgttctgtgggtgggtgtgggggtgatcctaagttgaaatgatatacatttactgggggaaggcgctttgtgaagtaggccttatttctcttgtcctttcgtacatgtgaggaatttgaatgtaagataaggaaacctgacctggattacatccggtctgaactcagatcactgtaggacttataatcgttgaacaaacagaaccttaaatagcggctgcaccatacggaatagtcctgtatccaacatcgaggtccgtaaaaccctaataggttagatatattggactctaaaatataggatttgcgctggtaaatcccctaagaggtaacactttgtcccgtgaggtacaatgtttattggtgtctccaatgtgagagattataagataagttaccgctatgtgaaacgagggttagaaagatactatagacaagtgttaacgtggcatacgagaaaggatgaggagatatcatagacctcccgaagaggatacgaccccccaaaacgcgagagacatattatataaatagccgagagcttgtggggaagtttatagagaacccgtggtggagtattgataaaggataacatggaggagggcaatataactaaaatttaaaggctcccataggaggg

SEQ ID NO: 668082 - DNA, 442 bp, Homo sapiens
  misc_feature (8)..(8): n is a, c, g, or t
  misc_feature (86)..(86): n is a, c, g, or t
  misc_feature (232)..(232): n is a, c, g, or t
ggggaagnagtggtggtgaatcctatggattcacctcagtccttgcctcctcagaagaagaattccaccaggggcatgaggcagantgagggaccgaggcagagagccaggagtgaagattaaaatgttttggggcaggtgctgggcacggtagctcacgcctgtaatcccagcactttgggaggccgaggtggttggatcagttgaggtcaggagtttgagaccagcctgnccaacatggccaaaccctgtctctactaaaaatacaaaaattagccagacatagtggcacatgcctataatcccagctactggggaggctgaggtgggagaattgcttgaacccgggaggtggaggttgcagtcagccgagatcacaacactgcactccaacctgggcaacagagcaagactccatctcaaaacaaaaacaaaaccaacc

SEQ ID NO: 668083 - DNA, 493 bp, Homo sapiens
  misc_feature (458)..(458): n is a, c, g, or t
aaaaaaaggagtggggattaaaggggggcccccccaccccggggtaaatttggggggttttttttttgggcaaaaacggggttttcccttgggggctaaattggttttgaactcccggggtaaaaaaatttgccccctttaacttcccaaaggggtgggattacagatgggggcccccatgccccgcctttttttggcatattttaaaatgggctttaaatggggaaaaaacatgggctcagccaaacccttaaagacatttttgggagttgggggggtggccaagggtttttttatcccaaaattttataaaagggggtgggttttgggttttttttttttttggggaagaaattaccttgggccgaatttctgtggcgcgggggattctttttttttaaaggggccccccacgggggggggtctcaatttttgtttctttttgaggggggtaattntggggttggcgataaatgggaaaaagttgtttttg

SEQ ID NO: 668084 - DNA, 1357 bp, Homo sapiens
  misc_feature (350)..(350): n is a, c, g, or t
  misc_feature (1357)..(1357): n is a, c, g, or t
gagtatgttcgaactctgccacgtgcgcctatatcctcgcagatacgattgacacttacgtccactgccatgtccagtactggccgagccgagcgatctgagtgtgacttcaagatcacagaaggctgtctgtgtagggtgacaccggaggcagtattaattgtcaaccgagatgtaaatagcaccacatgccactaggagacagatctctggcagcagtgagtgctttgtcactaaatccttggattctatacactcataggacataacaagggcatatcattcttagtacttaggaccacactgtctgcatgataaggtgggtaggaaagcataggtgataaatcacntatgagagtgatcactctctgtggcagatatatggcctcaggaacgttttgggtccataagagacggttcgattttaaatacaccttggaacaagtatatagaaaatggagaaagcacttagacctagaaagactacgcaacccacgtgcaaacttttaaatgcaccttgggcccacgggttagtccatgggggatgcaatcgtctcggatagtggtaggatacgaacgttggtgggaagttatctcctttttgtgcataatatatctttgggggtggtaacacttagtttatttgggccgttatgggtaacttttgcattcacttatatggtgtatctttgggaaattatttgagagtaaaataacgtaggtttataacattcgcgacttcgattaatcatacagtatcattagcgtttctttgcgtcttagagacacaatcaattggctgggtcaatacacaaccccttttatttttcacattcctttattaacaatgtgtggaggagagaaggcaacaacgacaaattgtactcaatgtatacataacggaatgaattcaattaggggaccaaaaaacagctgtgtggtcgacttttagagggccaatttcgatttttagggtggggagacgggattccgaaaaaaacgtggagaccggttattatatataatgaagatgggttaaaggtgacaaaacataaaggccattaatttttcctccaactttcattataaaatttaacaccaagaaggctaccataccggttgggaagttcagccgacgggtacccataaacatggggcttcccaatatagtaaccacacactcaaaaacaacaggaaatcccgacggtactaaaattttcccccttttccttcttggcaacaagggtttataaaggcgctcctctgtgggcagcatattcttcgtcacagtcggcggatatatgttgggccacacagctgtgagagcgctctctggtgtctccatataacccacgan

SEQ ID NO: 668085 - DNA, 729 bp, Homo sapiens
cctgtgccccatggtcttttatcgtacctctgggcccccccgattgaatggttggcctttgaacgaagcttttggccccaaatagcgcgttctgttctcgcccatctttcacatgaaggagagaagggaaccacatgctgagagaacttgagatgagaagtctcgccagagacccaacgagggtggcccgaatctttcccttccaggagtatttccagaaaccacgactgtgatgaactgggagaagcgcggctgaaatgcccactggaagtgtgcacattaccacatttggaaaaaaaatgtgagaatcacggtcacctatactggaaactgcaccacaaactggccacactgacccacaaagtgacccccacatttgtgtgacttcacttgagacacccttacctgaatgagcccgcgtgagaagccctccaagaattgggtgaccaccgctgacccacttgcgcccagatgggagcggccccgaatctggccttggcggaatatcttctttgacccagcacacaccctgggagaccacggtgataatgaaagctaagacctcgggctatatttccccctagaccctggggtgacttccctggtcacccaggccgtgcatgcctgttggggtttcccttaccttttctataagttgtacccaaacatccccttaagttctttgaatttgtacccttcccttccaataaagaaaatttggtaccccca

SEQ ID NO: 668086 - DNA, 540 bp, Homo sapiens
gctggtgaccactagcgccatgggtaggggctagtgcagaactccctaggaggcaggcactcctgtgaggctttctctgggttcccctctgccaggagatccaggcagcatcaggagccagttcttggaagagcagttggctctgcataggggaactctgagccagttgatactaaactcttgtcccttggattcaagagtttcctttgaccaggcatggtagcgcacacttttaatcccagaatttgggaggcagaggcaaacagatctttgtgagctcagggccagcctggtttacatagtgaattcctggatagccagagctacatagtgagaccttgtctcaaaaacaaaacaaagaaaccaaaacaacaacaacaacaaaaagttgttcttgtacctctggctctgggatcctgggaaaattttggttgtttgttcttatatggttgaaggtttggcaaagaaacacacaacttttggttttagaatatagcaaatgtaaattctagaagactttccaaaataaatggtgtgtct

SEQ ID NO: 668087 - DNA, 220 bp, Homo sapiens
cgcggaggaaggcaccgcagtggtatcagtcttgccaagtaaacgggctgtttccaaacattgtgacttggctactgcactggggatacctggtttcattggcaatcttccagtatctctctcgcaaaaggaacgctgcactttttggttgtctctccgagtgaagatccccgtttttattccccagcactctcgtcggtgactgttcagtcatgaaatc

SEQ ID NO: 668088 - DNA, 128 bp, Homo sapiens
aggtgcctctcatgtcacgctctacctctgggactgtacatttttcccaacatcgttttcttgtgtctgggctgctttctcgtcgactttgagtgccgcatccggccctgcgatgttgccatctccat

SEQ ID NO: 668089 - DNA, 928 bp, Homo sapiens
ctggtcatgagaccatttcaatccctgcagaagcaccactcatgtccccttccatcggtcccctgccccatggacagtcactgctctcatttttttttgttccttttctctttggaggcagcatctcgctcggtcgcctcaggcgggagtgcagggggcatgatctgggtccacttgcagcctgtgcgccaccagtgccgggctaattttggtatttttggtaaagatggggttccttttttgtttttttttttttatgggggggagtctccccccgtgggtcccccagggggggggggcgccggtgggagtgcaactctccgcggcgctacagtgaggaacaccttcgtgcccccgcgggcgattaggggaatatacccctcgctgcacgttaaagacccccgaaaaaagagggggacataaagcggccagcggggcccacaggcggccccgagacgagtaatatcggcggggcctacacaaggggaagacagacagcgggggtgctccaccaagagctgcggtgcacgacgggtggctccattgaaacccgccggacacccaagagggtatcccctcgggccctgacagcaccccaaagggggcggggaacaacaggcgatgttgacacgaaagcgacagggccctgttacctcgtggaaacacagtttttccccccttgagtagccccggggcgtgataatcaggggggcagaacgatgcgggccggacaaacctaccgtccgagggtaagaaaatctgtccgagacaagccatcaaacagcgagaataggggatgcgccacccacccgaggagtatgagtacacgcgggaacagcgtgccagaaaaccaagggggcgtacagctgaccaggagatggcgcgccgcccaaggagggggagggggagtgcccgcgataagagctca

SEQ ID NO: 668090 - DNA, 857 bp, Homo sapiens
ctgtcctgcgaacaatatggtgctcctcgctgatcccaacttgttctgggcgccattacttttttgatggcgcaaagaccaaggttacccccactatctcttggaggtccgcacttttcgtgtgaagaagggcacaacaattttcgcgcgcgtgcccgaccagctcctatacggggggaactccactcccaaagttgttccacccggccccagttcccacgagaccattatgcggtcttctcttccccgggccctctttttgcgcgtaccccctgctcttgcctcgatggaacccctgcgggggaccatcttttacccacaatgctcctatgggtgccaatataccgtatgcaccgcatttttttgaacaggtagccttctcatacaacggcgcggtccggttacaacaatagtttagtcagggcaaggggtctttttaggatcaaaacatatacgggccccctcggcgttgaccctccctttacttcatgaggatcaacatgtgcccgcacgcattacctctctatccgatattcaggcgaaacctccagcccagcttttaatcctcgccctgcacaagaagcccccgctcgcttctttgttgactattgaaatcctgggtctccacgacctgcacgtccgccccatgccatgctgtgtagatgagatatacgtccctgaccccgatacagaacccacaggcctaggcgtgactgagtgaggaatgaataccctcttcttgtggcatggccaaacacaagcacaaacttttcgggagctccttagggttagccacacgcttggaaaacaggaagagccaaacgcgtttttagaaaaaaaacacccccccacaaagc

SEQ ID NO: 668091 - DNA, 254 bp, Homo sapiens
gcagcataagagactccagtctgggttctgactgttgacctggactggggatgggactgggacactagtacttcctttccgctgtagatttttttatggatcagctgtagactttaatgaaagtggcatggtgcccaccaaatagaaggctacatccggttggtaatgtgtctaaagtgcagaccagcccactgcacaaagctgtcccctctggtttggctcttgctctgtgttcaatgttgcttgttccgctg

SEQ ID NO: 668092 - DNA, 686 bp, Homo sapiens
aacaaactcgcaaatggaaaggactttgcaatgcagagtctaaggagggaaaatgaaaatatgacagatacaaagaactgaatgcattctgaaatcttaggggaatacaaatatctagtattgagacagcccaaagctaagagtctgcaaactcagataacagtaagaagctttttcaccaagaaataggaaacttagtgctctaggtacatagagcgtggcacgcaggcagggcctgtgtgttgttaatctgtcgacccgatatcttgctatagctgtaggattatggtacgtgattcagtttcctctctgtatgcaacatccatgaaaatatctatttacttactgcctcgggaatacacattccaacattgtatgatttagatcagacttcgaagatgtatttcatgctggagttttgttaacttcgtataactttctgattatgtggtagctggtggatcgtaggcatatttagcagttgggcgaaatgtctaaggcacaagattacctttgatacaaaatgccagtaggaagggaatcgaaggacgcagagtcgatgcctgcagttgcttgttgcggtgaccccagctctggagacagactgcataggtccgcatcctgactcttcaagttaccgtgtgactatgagcaaacttcttaactttactgtgcctcagtacctc

SEQ ID NO: 668093 - DNA, 128 bp, Homo sapiens
tcacggcactcgctattcatcggcacttcgctattcatcggcacctcgctattcatcggcacctcgctatcatcggaccatacaggactctttcgaggccctgtaattggaatgagtccactttaaat

SEQ ID NO: 668094 - DNA, 116 bp, Homo sapiens
catctagcggatcctattttgccacccacagccttcacttttgttgtattggtttttttttttgagagggagtcttgctctgtcgcccagtctggagtgcagtggcgcgatctcgg

SEQ ID NO: 668095 - DNA, 259 bp, Homo sapiens
ctagactccaacttcctactcctcattgtacattctaatcgcactggattccttatgcttaccgaacgaaaaattctaggctctatacgactactgcaaaggcccaacgttgttggcccctacgggctactaccacccttcgctgacgccatagaactcttcaccaaagagcccctcaaacccgccacatctaccatcaccctctacatcaccgcccctatcttagctctcaccatcgctcttctattatgataccgcg

SEQ ID NO: 668096 - DNA, 254 bp, Homo sapiens
  misc_feature (5)..(5): n is a, c, g, or t
gctancccactccaccctactaccagacaaccttagccaaaccatttaccaaattagtataggcgatagaaattgaaacctggcgcagaagatatagaagagtgcacttttgaaaagtgcactcttctatatctacattcatctgctttcatattgtccccaaatgcctttctttttacctcatccatttacttgttcctacgagtgcaaacagacttactgtagcaattaaagaatataactacctgctttgt

SEQ ID NO: 668097 - DNA, 104 bp, Homo sapiens
gcttgcagtagcgggcggcagagctggagtgaagggagctagttgtagcagtcaccattatgcttaaagcggtgattcttatttgaggccctcaaaaggggact

SEQ ID NO: 668098 - DNA, 444 bp, Homo sapiens
  misc_feature (444)..(444): n is a, c, g, or t
ccaggtcctactacacaatcaatgcttgagcactgtctacacttggacggctcaggctgggcgagaacccaaacttccaccgcagacccgcaatctgcagacctcagcggcagcgcaggtggcagacctgcctactgtgcctgtgagtcatggcagctcccatgaatggccaagtgtgtgtggtgactggtgcctgcagaggtattggacgtggcattgccttgcagctgtgcgcatgcgccacaggttacatcactggccgccatctggacaaccttcacggtgttgctcaagaggcaccatcccttcgtggccaatgcgtgcctgccgtgtgcgattcaagccaagaggagtgagggtgcagcctgtttgaacaagtggattctgaacagcaatgcgcctagatgagcatggccactgttatgcagggtacagacgtcctgn

SEQ ID NO: 668099 - DNA, 366 bp, Homo sapiens
ccttgtaagtgctgagcttcctctctgaaacctcctaccattgttttttttcccctgtagctaacaagaataagtataacagccggccaggcacagtggctcatgcctgtaatcccagcactttgggaggctgagacaggtggatcacctgaggtcaggagtttgagaccagcctggccaacatggtgaaaccgtgtctctactaaaagtacaaaaattagccaggtgtgatggcaggtgcctgtaatcccagctactcgggaggctgaagcagaagaattgcttgaacccgggaggcagaggttgcaatgagccgagatcacgccatcacactctagcctgggggacaagagtgagacttcatct

SEQ ID NO: 668100 - DNA, 140 bp, Homo sapiens
tagaggatctgtgaacttctcctcctccttaattcacttccttgttttcatgaagtaatcctcacatatcctgcagagatcgtccagtgacgctgcctgggaatctccacccgttatgtctccatgatgatggacccaca

SEQ ID NO: 668101 - DNA, 155 bp, Homo sapiens
caagattgcgcactgcactcagcctggcaacaagggagactccatcgcccccctcaacaacaaaaaagttcccatacactggcctgcccaaaacccactacaatttaagcaaacagtccaggccaagaggagcatttatgttcaataagaaccca

SEQ ID NO: 668102 - DNA, 327 bp, Homo sapiens
aacagaaaccagttttttaatggcgggaatgggccatttgaaataccagaaaaattttccaaaggggcaatgactgagtgggaatggggggggtcccattaaggccctccattttttaaaattcaaaggacccatttttcctgggaaattgggaaagcaggacatggttttccaaggttcacaggtaacccctccccccagagccctaaggggccgacggcccccttttactttatttggctgggggggaaaacaaattgactaagcggcccccgaatttttagttttaacagatgtttttttaaaacaggcggtaaattaacaaaa

SEQ ID NO: 668103 - DNA, 619 bp, Homo sapiens
gcacgagagttcatctaggcaatcctctaccggacaatcgaattccacaactaaaacagcagggctacgcctgactaagggcccaatttccataatctgtcttaaagaaataaccatagtataaaatctgtgaatcatatttttggattctctgaaatcttccacattcaagttctcgaatatcataaattccctccccagatccttaagcatttgaagccgatctttcaaacttcgacagccctcaaattgttgcaatagaagaacatactttccaaaggaagagttgatttcagtaagagcctcatatccagaatagtccagaaacatagctaaaaaaaaaaatctcgtcaattttttttttaactattcaataccttaccgagtaatcactttaaaacaaaaaataaataaatttatggactattttcagtgactgatatgccaaattcctttgccctgtatggccatattttcttaccatttctgtggtgacaaaggtgatgcaattactgacacaacaaggtaaaaaagagaggcgggtaacaaattacacacgtccatcatccgctaagcgctttaagcttatagagaggcaagtaacgtcattgatcctgga

SEQ ID NO: 668104 - DNA, 198 bp, Homo sapiens
cacacttctggtaaacacaaagtttttgctcgtacctcttttccctgcccacaggcccgttagatatctctgtggccagtgaaataatggctgtcagaatctcaccagttctctagaagacatgagagagagactgggcaaacatggtggtggcatccatgtaagaaaggagagctcgtcagatccgaagatctggtg

SEQ ID NO: 668105 - DNA, 236 bp, Homo sapiens
  misc_feature (17)..(17): n is a, c, g, or t
  misc_feature (174)..(174): n is a, c, g, or t
gcgtggtcgcggccgangtacctcagtcgtttgggttttcctgcctgcatctgttttgtgaaatggtcctgtttttgggtaggtgacacgtggactctagtgtgtaaatgttacttgaatctgtgcttcactctagtatgtggcatgtgtgtgcggactcttggatgcttcacncctactccactggagcccctgtccccaggaggacagcttccccactgataatcaggagacca

SEQ ID NO: 668106 - DNA, 863 bp, Homo sapiens
ttcttattaggaacacagggataaagaaacaaagaagaagacatacaatctcttcttcccgggttccacatacacagcacagtcagaattagcccatcttatggggttcaggccatcttcgttccagtcacccgatcgtggtcacgccattggtacccacacctcatttccgcgttaatccaatctcggagattttccccacccggaaagcagtaatggaacccctgttttgggggaagaacctttcagaccccctgctcaaacactcttgatgaggtatatagtggaatcacaaacggtacacaactttcagggggacccacccatgtcatttcacggctactttcaatatagtgtgtacaaccccacggttccaacaaaatccccccccccaatatgtgtggcgtacaccctcccccgcccattgtctatacatcccccctgttctgcaccccctgtggtacagtttcccgcaagcgttccaaatacttgttcacatgttagcacacctacttccacacaacatttttcacaaaaccccaagagattggcgacagctccgataaattgtatctgtaaaaagattatccccaataaagtgcgccactggagctcaacaaccccgtacactaacgcttgttaaccaacacccgggggctttaacaattttgtgaaatccacgtgttctgtaccacaatcccctcaacgagacttttctgccaaacatcatagctaaatatcacaataaataacccccctataattttagaacatcttcctataaatagtgggcatattttaataagctttgagggacccctccaataaggcccaattaaaaaaaaatgttctttaacaaaaca

SEQ ID NO: 668107 - DNA, 361 bp, Homo sapiens
taccaggtatgtcttctcagtcaggatgtcttctcagccaggatgcagcccatggagggtgagctgaagcaggcggggcatcaccgtcatccaggaagtgcaagaggttgggggatttccctttcctagccaagggaagccttcacagtactacctggaaaaatgggacactcccgcccaaatactgtgcttttcccaaggtcttagcaaccagcagacaaggtgattctctcccgtgcctggctcggcggctcccacgcccatggagccttgctcactgctagcacagcggtctgagatccatctgtgagacaggagcctgactgggggaggggcatccgccattgctgaggcttgagta

SEQ ID NO: 668108 - DNA, 334 bp, Homo sapiens
ccagctcctctggcaggttctaaaagcacactactgagcagcggtgccctgccggacactgctggcgggggctcagtgagcactactcacagatccacacctgaccctgtttggtcgagtcaggctgggcttggtctgcactgtagcacctctgttctttgagttcacatcatgaatgtggtgacttccagataccatctcaggcttaactagcacatctattctttctctatgatatcaaattgactactcattcaagtgctgtccatttgtcactatctatctgggaattcaactgatgccaccactttgaattctgctaggcaactgtcta

SEQ ID NO: 668109 - DNA, 158 bp, Homo sapiens
agcttctccaccgcagagcattgctggctgctgcctctccactccaggcatgagggaacactgtgtactgctatagtgtttctcagactgatctaatcacagaaccctttgtcacgcgccgtggcccacacctgtaatcccagcagtttgcgcgggcc

SEQ ID NO: 668110 - DNA, 208 bp, Homo sapiens
gttagggggcccttcaagattccagctggtattagccttctgcagactagtcagactaggatggctgtatcactaacagcagctgaaactctggcccttcagggtacacaggggacaagagaggtattattatgggcccaaaggagaggacactcttttgagtattacaccacggctacctggggaccactctaccactaaggggtct

SEQ ID NO: 668111 - DNA, 226 bp, Homo sapiens
gcgtggatatctccggtctgatactctacgcatacgctggactttaatctttgaataaacctaacctttaactagcggccgtaccatcgggatgctcctgcagtccaacatcgaggtcgtgaacggtaaagcccttgtggactctagaataggattgcgctgttatccctagggtaacttgttccgttggtcaagttattggatcaattgagtatagtagttcgct

SEQ ID NO: 668112 - DNA, 827 bp, Homo sapiens
  misc_feature (445)..(445): n is a, c, g, or t
  misc_feature (449)..(450): n is a, c, g, or t
  misc_feature (455)..(455): n is a, c, g, or t
  misc_feature (458)..(458): n is a, c, g, or t
  misc_feature (467)..(467): n is a, c, g, or t
  misc_feature (470)..(471): n is a, c, g, or t
  misc_feature (475)..(475): n is a, c, g, or t
  misc_feature (484)..(484): n is a, c, g, or t
  misc_feature (498)..(498): n is a, c, g, or t
  misc_feature (507)..(507): n is a, c, g, or t
  misc_feature (514)..(514): n is a, c, g, or t
  misc_feature (543)..(543): n is a, c, g, or t
  misc_feature (584)..(584): n is a, c, g, or t
  misc_feature (617)..(617): n is a, c, g, or t
  misc_feature (619)..(619): n is a, c, g, or t
  misc_feature (623)..(623): n is a, c, g, or t
  misc_feature (634)..(634): n is a, c, g, or t
agtcgtacgtcgtgcacacgtggtccggcgtggttcaggcgggtgtcttcggccgggcttgggaacataaaagtttgtttcaccacgtaagccggacctcgcactccggtcccggtctcgtcgccaagatggtgaagcccaagtacaaaggacggagcaccatcaacccgtccaaggccagcacaaacccagatcgagtgcagggagcaggaggccaaaacatgagggaccgggccaccatccggcgcctgaatatgtataggcaaaaggagcgcaggaacagtcgtggtaaaataattaaacccctgcaatatcaatcaacggtggcttctggcacagtggcaagagtagagccaaatattaaatggtttggaaacacacgtgtgattaagcagtcatcattacaaaaatttcaagaggaaatggatacagttatgaaggatcnatannaagtngtnatgaagcanagnnagtnaccgatgtntcttctccatgatngaatccggnctcatancttgaaggtgcacattcttgatactgaanagtctgaaatacatttggcctaagtcacagaggaaagacanattatttgcagtgatatgcagtctcttatcgananatgntgaaatgtcantgagagctatgaccaggggcaaggatcgtgatatggtaacttgaagacaactggtgtgacgaacatgccgctcacagacagagatctgataacaggggactagtcccaacggaatctggggcgagctcgtacagggtggatgcgatccaccagatgcctgtcgttccggttcttgatgccagagtatccccgg

SEQ ID NO: 668113 - DNA, 881 bp, Homo sapiens
  misc_feature (128)..(128): n is a, c, g, or t
  misc_feature (177)..(177): n is a, c, g, or t
  misc_feature (499)..(499): n is a, c, g, or t
  misc_feature (503)..(504): n is a, c, g, or t
  misc_feature (509)..(509): n is a, c, g, or t
  misc_feature (512)..(512): n is a, c, g, or t
  misc_feature (521)..(521): n is a, c, g, or t
  misc_feature (524)..(525): n is a, c, g, or t
  misc_feature (529)..(529): n is a, c, g, or t
  misc_feature (538)..(538): n is a, c, g, or t
  misc_feature (552)..(552): n is a, c, g, or t
  misc_feature (561)..(561): n is a, c, g, or t
  misc_feature (568)..(568): n is a, c, g, or t
  misc_feature (597)..(597): n is a, c, g, or t
  misc_feature (638)..(638): n is a, c, g, or t
  misc_feature (671)..(671): n is a, c, g, or t
  misc_feature (673)..(673): n is a, c, g, or t
  misc_feature (677)..(677): n is a, c, g, or t
  misc_feature (688)..(688): n is a, c, g, or t
gctcaaaaatattagctattcttctcaaatacaatcctatcgaagatcaaagattgggtcagctttgtcataccatgtagcttcaagtactaattattggagcaacatatggagaaagtagagatttntgtggttggtggcttcttacctaatttgggtgaactacttgttgcattntaagcaatgacttgttggttatactggttggttatcaaatagtgcactgtgtacttctgccttttgtagatcgagtgcagggagcaggaggccaaaacatgagggaccgggccaccatccggcgcctgaatatgtataggcaaaaggagcgcaggaacagtcgtggtaaaataattaaacccctgcaatatcaatcaacggtggcttctggcacagtggcaagagtagagccaaatattaaatggtttggaaacacacgtgtgattaagcagtcatcattacaaaaatttcaagaggaaatggatacagttatgaaggatcnatannaagtngtnatgaagcanagnnagtnaccgatgtntcttctccatgatngaatccggnctcatancttgaaggtgcacattcttgatactgaanagtctgaaatacatttggcctaagtcacagaggaaagacanattatttgcagtgatatgcagtctcttatcgananatgntgaaatgtcantgagagctatgaccaggggcaaggatcgtgatatggtaacttgaagacaactggtgtgacgaacatgccgctcacagacagagatctgataacaggggactagtcccaacggaatctggggcgagctcgtacagggtggatgcgatccaccagatgcctgtcgttccggttcttgatgccagagtatccccgg

SEQ ID NO: 668114 - DNA, 551 bp, Homo sapiens
  misc_feature (169)..(169): n is a, c, g, or t
  misc_feature (173)..(174): n is a, c, g, or t
  misc_feature (179)..(179): n is a, c, g, or t
  misc_feature (182)..(182): n is a, c, g, or t
  misc_feature (191)..(191): n is a, c, g, or t
  misc_feature (194)..(195): n is a, c, g, or t
  misc_feature (199)..(199): n is a, c, g, or t
  misc_feature (208)..(208): n is a, c, g, or t
  misc_feature (222)..(222): n is a, c, g, or t
  misc_feature (231)..(231): n is a, c, g, or t
  misc_feature (238)..(238): n is a, c, g, or t
  misc_feature (267)..(267): n is a, c, g, or t
  misc_feature (308)..(308): n is a, c, g, or t
  misc_feature (341)..(341): n is a, c, g, or t
  misc_feature (343)..(343): n is a, c, g, or t
  misc_feature (347)..(347): n is a, c, g, or t
  misc_feature (358)..(358): n is a, c, g, or t
ggccgtgattacgtggattagggcaatgtagttgtaaactttcagtatcaagaatgtgcacagtggcaagagtagagccaaatattaaatggtttggaaacacacgtgtgattaagcagtcatcattacaaaaatttcaagaggaaatggatacagttatgaaggatcnatannaagtngtnatgaagcanagnnagtnaccgatgtntcttctccatgatngaatccggnctcatancttgaaggtgcacattcttgatactgaanagtctgaaatacatttggcctaagtcacagaggaaagacanattatttgcagtgatatgcagtctcttatcgananatgntgaaatgtcantgagagctatgaccaggggcaaggatcgtgatatggtaacttgaagacaactggtgtgacgaacatgccgctcacagacagagatctgataacaggggactagtcccaacggaatctggggcgagctcgtacagggtggatgcgatccaccagatgcctgtcgttccggttcttgatgccagagtatccccgg

SEQ ID NO: 668115 - DNA, 378 bp, Homo sapiens
ttaggctcagtcaatccaggaatatctgcagagctccccactctggacctcaccatcattctggtcataattctacttcttttcactagcaggccctcaaaggtccatagcttttggtgaaaactgacacatccaatcacaaacacataagctataaccacaccgtaactttcaggaattttaaacaatttcttcacacacatgcacaaaaggctaccattgtttagcctgttctgatctggactaagcagagatgggttaaggcttcaagcacctatttccccataggtgagctacatggtaacctgcaggtgaagcaccaaggtgggaggtcaaagaagtgggcttattagttatccaaagccaaaagagaaatcc

SEQ ID NO: 668116 - DNA, 222 bp, Homo sapiens
  misc_feature (159)..(159): n is a, c, g, or t
gctgtgaccgaaggcgtggagggcgaggagtgcaggctgaatggcgaaggggttggacaagtcaacgtctctgtagtacagtccaccatctccagtggctatggcggtgcagcggtgtcggcagtggcttaggcctggtgtggaggaagcagctacccnctatggcatgtggtccttggcatttggacggtggcttcacgttccatgcgttgcgggtcgcag

SEQ ID NO: 668117 - DNA, 1100 bp, Homo sapiens
agtcgtacgtcgtgcacacgtggtccggcgtggttcaggcgggtgtcttcggccgggcttgggaacataaaagtttgtttcaccacgtaagccggacctcgcactccggtcccggtctcgtcgccaagatggtgaagcccaagtacaaaggacggagcaccatcaacccgtccaaggccagcacaaacccagatcgagtgcagggagcaggaggccaaaacatgagggaccgggccaccatccggcgcctgaatatgtataggcaaaaggagcgcaggaacagtcgtggtaaaataattaaacccctgcaatatcaatcaacggtggcttctggcacagtggcaagagtagagccaaatattaaatggtttggaaacacacgtgtgcatctcaagccagtccatccatcaccaaccaatttccaagcagcgcaacatggcataccagtctcatgaaggcatcccatcacacaagcttgctccatgcaagccaacaccaacgctcaccaactgtctccttctccactcactcgacatccggcccatcactaaccttgcaaacgctgccacactccctccaactccctgaccacctctccccgcacaaccttaccaattcttggaccccctacaccctccacaccacccacatactcaccccaacaccctccatcattcgcacacactgcatccttaccagctcctccttactcgcaacacactagctcgaacactgctccaacctgacccaaccctatcaccccagcgcccaccgcgacccgccgaacaccggcctaccctgccaccacacccctgcgccgctgaacgccccctcgccaccccccaccgcaccgagcaccccccccaccaccaacgggacccacatctccacccaacaaccttcttgcccccttacaaccctcacaccacacccgccctacctacccacctcccccctcaaccaacccgcaccacacctcccacaaccaccctccaacaccccatccaacacttcccacattgcgcctcacccccataccacccaatccaccccctccccccacccctaccccctaccataaacccacacaccaccccatc

SEQ ID NO: 668118 - DNA, 364 bp, Homo sapiens
gagcgggacgggtgctcccctcctttcctcccgccacaagcgctcgctgtggttctggcagcgaagtgccgagactgggctcggcaggcggaagtggttggagactgcgctgtattcctagaaagtcctcgaacttcgtcgcgggagagagaggggagtgcatccaattgtgcacggcggaccaagcgacaagtgcggtactggacaagacccaaaccatacttggattcgtgagcctcaggcactcaatacacataaacaagctggaacataagcacgactcactgtcacgcagtgacatggcaaaagaaaaccccaaggtcaacatctcccaagaacgcagtaatgtaacaacaatcagaac

SEQ ID NO: 668119 - DNA, 399 bp, Homo sapiens
agggttagtgcttgtccaggtctccagcctggaatggcagaatccgaatgagaaaccaggtctcttgattggcaggtcacgttcatgtcagcactgagctgaagcgtgaagccgactagagtagaaactgtgttttcagagtcacttgctgtaaccaggggtaaagaaaagctgcgatatgggcccttggcttgttctgtccaggatctggtcacaggcagtattcagtattctgcataactcttaaggaattgccattgggcaggtgggttttagtcatggatgacgtggcagggacggtgtctcctgtcatctgcctggtggccgtcagggtgagagctggggggtctgccatcagcggccgagggaatctcctgcctctggggaagcattggatca

SEQ ID NO: 668120 - DNA, 315 bp, Homo sapiens
caccaggccacctgggccagccccttgtcctctgccttctgctggcagaggagcagctggactggggcctttggcacagcagccggtgtctcctgcgcccgcctcccccatggccccatgcagccccaggggcttcctccctgcccatggagtagagcccgaaatcctgggcactatgccaggtttggacctcgatccccctaccccgagcccatgcaggcagggaacatgctgccttctttccatcctatgtgcctttgatacaggtgggcgtaccctactaatcctcggttgggctaggtggtcctgtccatg

SEQ ID NO: 668121 - DNA, 345 bp, Homo sapiens
acatttcatattcttttattctttcttgtttacattcataataaaagtcagtgttagcatccggcaatgtttttgtaattttttgaataaagtcacatttgtaagaggtctcctctacaaactgcaccatataacacaccaaaggttgaattaaaacacacacatgggcccaactgtttgacttcaatctttccactggtttggcatttaactttgcatttttaaaacctgaaaccttcctaagccaacctatttttggaatcaccaggccattttaaatttgggttacttccacttattttaaaatggtttcttccggtggattttaactttcctttggtccaa

SEQ ID NO: 668122 - DNA, 242 bp, Homo sapiens
tttgttgaatgaataagggccccccagtgaatttcctttgcctggacaaacaaatatggacaacccttgctttttttatttaacaggacccttttatcatttaacatttggggggtatgggaccccatccgataaccatcggatgtactattatttaacccccccgctattaaaaaacattcatgctgtttatattttttggttataataaacattgttgcaggggggatcattgaacccca

SEQ ID NO: 668123 - DNA, 474 bp, Homo sapiens
tagcccactgtgtcatctcttagggcctccaggactatatcaggatgcagaggcattaggacccacatggctcgcagggcctcatttcaaggccctaggagaacgctccacacagttattccccagccactcctgaagcctcacatccatttctcagggcataagaaatgtcactgaaaagttaaagatggatattagatgtcaaatcccttgaagagaaaaaacatttagattacttcacattactaggtatgaatgaccagcgtagtatacttccctggaagtaaatgtggacagatgagaaaaggcccaggaacaggaattctctggttgcataaaagagggtaaaaacccatgaaaagggaagggacactgccagactgcctggcctacaccatatgatggagcattcagttctcacctgaaggacccagtggtgtgtgtaggtatgtgtgtggatgcatgtgtgtttcc

SEQ ID NO: 668124 - DNA, 1365 bp, Homo sapiens
  misc_feature (174)..(174): n is a, c, g, or t
tgggacaggaagtaaaatttatgggggagtattaagaggggggcagcacattgtggaagccctcagtgaggtgcacctctgtgtgtgttattcactctacgtggagaaatccgtgccataggtggtgtttggggagtggtgtccatagcattttacaagaaaaagtgaaaagcngtccttcttaatattgggcaccccggaatatgtgttggctggtggcgctcaagctcaacatattatcccagagggcccctcggttccctggaggccggtgttggccccgggagccccgggagccccttcggcgagttcaaacccttgtggcttggtgtttcccgcgacaacccgcgggtagaaacggcaaggcctcttggggcgccatagtatgcgcaagaacgcagagaaagaggggaggggagaaactctggcgctcctgggggtcaccctggtgacagacaacagggttactacatacggagaagaccagcatgtggacatcttcttcttctccgacagtgcgctccagagggtctttgtgtgtgtgtcacacgtgtgtcttgcgctggggcgcttgtgtgaggctccctatatttgtggcgctgcgggactacaagagaaatgtcccgactgagtgatttgcgggtagcggagcttcagtgggagcatcatatcaacgagagacctcgagcgggaagtgtgttgacaccgggagaaatgagtgtgcgcgagtgacacccagcgctcttaacaagcgcgggaggacaaagcaggaaggcctcccgggggggggggggccccctcgggggggggggctctccaggggtcccacaattttgggcgagtccggtggaacacaaggtgtaacgccgcacagaacccgggtatcgcgggaaaggcggtgggaatgaacaccatagggtgagggcactatcgagggggagaaaaacatttgcgaagggagggcaacccgggggtaggtggcttacaaaatccaagagaccccaaaaagcagagtgtgcaaagggggggtccacccggccaagggggaggaaaagccccttacagggggcgagtgggtgcaacaacacaggcggcaacaccggggagaaaggggagagtgtgttgaaagaaccccccctgaggaaaacacgggcctgtacaaaaaaggggcgggtggtcccttacaaaaggggagcaaaaaaaagggcgggtacaccagacagggggggggagaagttggagcgcgcacacaaaaaaacagaggggaccacacgcggaagaacaaaaaacacgcacgacaggccggagagaagcccccacggcggaagtagagcccaccgggagacaaaaccgtaggtgaaacat

SEQ ID NO: 668125 - DNA, 252 bp, Homo sapiens
acgtcgagctcggcccgaatcctaattacgcagcagaatgaataagccaggtggaggacagattagtggaaattatggatgcgaaaaaaaaaagagaaaaaagattgaaaagaaatgaagagagtcacagagaactcttgacaacattaaatgcaccaacatatgtattataggtgagccagaaggagaagagagagagagacggagacagaaaaaatatttgaagagataatagccaaaaacttccctaac

SEQ ID NO: 668126 - DNA, 146 bp, Homo sapiens
ccggcaacaggacgacgtgctcaacgcccaacgcaccaaaatcgccaaccttgcggcctcggcctttgctggcgccacctcttacatagcgtccccctacgtgggtgcccctgtcggcgccggagtgcgcatgtatgtgaatgaca

SEQ ID NO: 668127 - DNA, 318 bp, Homo sapiens
  misc_feature (52)..(52): n is a, c, g, or t
  misc_feature (101)..(101): n is a, c, g, or t
ttgactttgtgtttcctgccctgaggaaaaaggggtcagattgcagggggcngagggccctttcggtcccctttcctcccacccggggcaaagggccagcntatttttccctccatccagggccacccccccagccattttggcccattatataaatatatatataaatataaatatataaatccaaaatgtgaagacatttttttggtttttattttgaaacaatttttaggcttgttccgggggtttttgtgcggcctgtactgtattgccctgttttaaaggggcctttttattacaaagaaaattcaaaatcca

SEQ ID NO: 668128 - DNA, 713 bp, Homo sapiens
gaagtggcgctgcttgggcccttgggcggattgtaagactgcgtggttttgcggctgggaagagcggcgagagggttcggcatttttcgtcgggatccccgcgaaggatgagtgcgtgccataatgatgtcgtctacccggcatggtggatgaagcgttcatgaccttgccctcgagactgacgaatcctggtgatcgtcaggcaatttgtggcagcgcaagccgagcaccttggggttccatgaaacgagtagcaacacacgaaagagttctttgaagcacctctatggggttgcccgtgacaagtacacagaaacaattaccttggtccgctccttgtcttaatcaacgcggagaatccaccaaatcaaaccacttcttccactttcacgcaacccgcggcgcaacgacacgacccacgaccacatctcaaactcgacaccgaaacctccggacggtcctcccaaatacatccaggccaacaggtcattggaccagtcaaaatttattccaggcacagctatatcccgggccgaccaatcttgtgcgcactttggccttcccacgtcggcacggtcaagaaaagcaccccattgacaatggcgcaccaacggtgccattcgttcggctgggcaacgatcgcactcgcatcgcaatcgcaccggcaattgcatcgcaatttccaccctatgcactcccttgccaagagtcca

SEQ ID NO: 668129 - DNA, 325 bp, Homo sapiens
caattagcgcagtgtgcatcaaaggtcagtcttcatctcgatcatacataggtggggccctatatttagctaccaacccccatatatgctccttaacttataccccattgtccctgtctcccagacccacaggcaggcagcctaattgctccttctgcaaccacgactgactggacctgggacaagaggcactgaggctggggaccagagaccagggagcctgaggaatgagctagtagacagggtggtggcggaaactcctacctccgaaacgcctccactgcaagtgtgctgtacctccagggacgctggacgggggccgcgc

SEQ ID NO: 668130 - DNA, 263 bp, Homo sapiens
ccgggtctcgcttcttccgggccgcttgtaataaaccctgatatgtaaactgtcaggaaaattaatagttcatttatttgttattttatttgtaagaaaatagtgatgacagccctttttcatactgatacctggttgtatattatttgatcctcagttttctcaaatgatatttcaaattgcattagaaattaaaatcatctatctgagtagttaaaatacaagtaaaggagagaaaataaacaatatttgaaaaaaaaaaa

SEQ ID NO: 668131 - DNA, 443 bp, Homo sapiens
  misc_feature (285)..(285): n is a, c, g, or t
  misc_feature (379)..(379): n is a, c, g, or t
tcgcctctcatttgttcttgtctcttctgagggcgccacggtgctgtgatgagtgtcagctgtgagagcgcgcagcgtgtgtgtctgtcgtgtctgtctcgtctcgtcccaacactctgtgtgttgtgtccctctcacacgcccacacagtctgtctatgaaggcgacacactggtgaacgaccccgcttgagagagcactcgtctcgtgtgtgtctctgctcggggcggcacaggctgtctctctctgtgccacccacacgcccacagggagacgctctcctcnaccacagctctgtcctccgcacagcccccgagcctctctccacggttagaaccctgggcccctggagacttaaggggattcttccccgaccccncgccccccccctgctccttccctaatagctttgaggttttcttggttggaagctgccactggcc

SEQ ID NO: 668132 - DNA, 516 bp, Homo sapiens
  misc_feature (23)..(23): n is a, c, g, or t
  misc_feature (32)..(33): n is a, c, g, or t
aatccccggccagaaccacaccnaactggtanntgtgagcatccaattatcggaatttcaagacaatcacacaattaacccccctcataattacactaatgagaaagatggagacaacataaaaggaaacagctggcaaggaggaaagttgtagatgcgtgaacgtcaaatttaaaatacactcacatgttacttattttcatatgttctctgtattttcaacattaaaattaactgtaaagaatagcaaaatgttagtaatttttgaagcttgtggtgggcacatgaaagttaattactttgtactctatttgggtatgtaagttcttcagaatacaaaataaaaaaaaaaaaaaaaaaaccagataatttttagtcactgatgggtaaatgaggctagcagtgtcttttaactataatttaaaatttcccttgatgagatggagtcaagggtttaacatacgggtatcctgatttaaattttcccagtgactatgttcctgatatctaagtcaa

SEQ ID NO: 668133 - DNA, 410 bp, Homo sapiens
  misc_feature (23)..(23): n is a, c, g, or t
  misc_feature (32)..(33): n is a, c, g, or t
aatccccggccagaaccacaccnaactggtanntgtgagcatccaattatcggaatttcaagacaatcacacaattaacccccctcataattacactaatgagaaagatggagacaacataaaaggaaacagctggcaaggaggaaagttgtagatgcgtgaacgtcaaatttaaaatacactcacatgttacttattttcatatgttctctgtattttcaacattaaaattaactgtaaagaatagcaaaatgttagtaatttttgaagcttgtggtgggcacatgaaagttaattactttgtactctatttgggtatgtaagttcttcagaatacaaaataaaaaaagtcacaggaaatttacaaacatctacattatcaatagaaagataagaggccagtggggcgc

SEQ ID NO: 668134 - DNA, 391 bp, Homo sapiens
tgtttaatacgaatgcactgtatgtgtataagcatatattactgtactgtttaatacgaatgcactgtatgtgtataaggatttattactctactgtttaatacgaatgcactgtatgtgtataaggatatattactctactgtttaatacgaatgcactgtatgtgtataaggatatattactctactgtttaatacgaatgcactgtatgtgtataaggatatattactctactgttaagtactgcaaatatctgggggattaatttaaaactggaagaataggactgacctgatccagtctgtctggttgtgatactgatggtacccactccagtaccaggtgaaggcgacctgacttcacatcattcagagtgtaccacgtcgacgc

SEQ ID NO: 668135 - DNA, 497 bp, Homo sapiens
  misc_feature (40)..(40): n is a, c, g, or t
  misc_feature (70)..(70): n is a, c, g, or t
  misc_feature (129)..(129): n is a, c, g, or t
  misc_feature (156)..(156): n is a, c, g, or t
  misc_feature (161)..(161): n is a, c, g, or t
  misc_feature (396)..(396): n is a, c, g, or t
  misc_feature (398)..(399): n is a, c, g, or t
  misc_feature (410)..(412): n is a, c, g, or t
  misc_feature (420)..(421): n is a, c, g, or t
  misc_feature (427)..(427): n is a, c, g, or t
  misc_feature (429)..(429): n is a, c, g, or t
  misc_feature (495)..(495): n is a, c, g, or t
aaaaaactggtgaaaagaattttttttgaatttgaaatantgggtttggtgatttgaggatatgttcgtngtggaaggtagtttgggctctggttggtcgtggcttgggaagcactgctggaggcaggncaaaaaaaagtggcagctcccaaaaangggcngaaaaagagatggaaggtgagtgcttcaagcaggcaaacccaggaataaaatagctttggaatttatttaaatgtataaattcaaggagcataggcctggaagaagcccaggccccaagaagttgtgactgtcccctgggcttcctagggcaacaggcattgaagaatgtaatggtggaagggagtggctgggggagagggcggtgaagagggtggctatagggagtttagggtnannacccacccccnnncctatatnnccacantncgcaggctcattggaggatcttccctccggccacctctcctgcacctccagaccactgtcccgatnat

SEQ ID NO: 668136 - DNA, 971 bp, Homo sapiens
  misc_feature (955)..(955): n is a, c, g, or t
gactctgatgagggctcagacttgataactgtcccgtggattgacccatccctataggacgctggtgagattgcagtcttggtgcatcccctccatacagccgcagctatgggatttacccaccgcagaatctttagtgtaaatgagatcatgattctggataggaggggggtgtaatgcataatctcattcctcgggtaatcgacgttccttcaccagaccgtccagccgtgtagcagcacaggtatctccacgtgcgaagttagccagatggtgtcttaatgaaggccagtgggagtgaaactcgatctctcagtactagaccaggtaccaggtgtgggtagtagggtccaagaaccttacctggacatcgcgaaggctaggctgggatggtcacattgtatccctcttccatagagtttcgaaaatctaagcggaagagcacctctgcagctctgacgtgtgcatgagtcagcccggcggaggggaacgacggggcagtcctctggagcaaatttgcgtcatccgaatgtggaccgggccagtgccagtagtagagctgttccagagttgacacaccataatggcaatgtgtccaagactgaacaaacttgaagctaacataatggaaacctgtaagaaggggccctactcctatgagggcaattaatggacgctattggagatcgatggcaggcgaaaagtactgcaggtcgattcgcataaacgagcggactatccgtgaggcctgttatgcagtgtaaacccccaacagtgcaatccataggaccagagggctgtttggttaccggaactcttgtaccaatagaccgtcaaaggacacatggggtcggcgaaaagaggcattgaaacaaccggtctcacccacggcactcaacagcgggtgggtatggtcaacaacaccggcagcgagttatttccactctccttgccntctagccacagacgat

SEQ ID NO: 668137 - DNA, 162 bp, Homo sapiens
ttatgtggaaagcgacgttaaatggatgggatcccgaatgatatgtgtcgatataatgaagaaaattatggtgttgtgtctatgtatgagtagcgagtttatcttcggttagtacaggtgacgttagaaagagataactcagaagaattttaaaacgggaag

SEQ ID NO: 668138 - DNA, 112 bp, Homo sapiens
ttattcagatcactgtcttgcctccaggctccgtgtgtgactcgtgcagccttcgagtagtgatgctgtaggttatgcggcttttgccctcggctcgtatctcgatctcttt

SEQ ID NO: 668139 - DNA, 204 bp, Homo sapiens
ccgcacgtgctccgtggtacttaaagccctgggggccccgctcggactccgggtctccctaggatatgccccagtagcatttgctgtgtagtctgggtgtaaaatttggccattcgccttttctcaacaattcttgaagggtccagtaattggggattgtggtctttctaacttctaataaactcactccggctgaaaaaaaaa

SEQ ID NO: 668140 - DNA, 730 bp, Homo sapiens
agcggagttcccatagtaactgacaccgcgctcccacttcccagacctggaggacagcaccggccctcgtattaggaacctggaagagagggcgcccaggtgggccactcgcaacttctcacgtatctgcgcgttctctttgctcccactggcgtgagcctgcgctttccgccttccttccatcacaaagccccgcttgagcaaccagtcgaccgattgagaccggacgggagacgccacccacgcgattcgcacacacgaccgcgaccatcatccgcgacgatagcattggaccgagagcgacggccgaaacgggaccacggccctatggatcagccagacagaccgagacgctgcgactgtcctggaaaccctagagcggcgggagcacccggggacgcactcgccggcacggacagcagcgggacgacagatgccgtcaaacacgccaacgaacccagaccactatatcgggcactgagaggtgcacgacggcacgctgacacaaatcgtcatcccgagacctgccaggccgcgagcaacgaccgcggccccaaggcactcagacacaagaagtcaagatgacaatggcgatccgcgaccagccagccggcaaccgcacgctgccaaacgcaggacgcagcgcaccacaaacgatgggacagaacagcggccggacagcgccggacgaaaaacgcgagcactgacacccaaacccacggacagacaa

SEQ ID NO: 668141 - DNA, 366 bp, Homo sapiens
ggggacaaatgtggactggggcatgaggccttccctggtccccactgaacccagcttagattccacattagggtgcatctgaaattatgccgactccagagttctcctcctttattgcccttgcgctcttgacacatctatacccctggatcatctgaatggagcagccaatttcagtcccacattgctgtactgttcctctttcacagctggaatatgtcacatgatgaagttgtatagaaacagaaccatggatggatggccaggattgccgtggtccctagctagatccccttcctatcaatcacctgatagcaacagggacagctgccaataccctgctctttactcaatggtacccaggga

SEQ ID NO: 668142 - DNA, 469 bp, Homo sapiens
  misc_feature (165)..(165): n is a, c, g, or t
tgagagccccaaggtacagacacgcttccggttatcgaaataaccatggtaagggaactcttatctcagtcatgcataaatatgcagtgatatggccgaagaccccagagcagatgcagagagcccttttgtgaatggattggattatttaataaccttcccctnctgtggaggaaggattgtaaaaaaaaatgcccttgagacagttttttagccttttaaatggtggttccttctagtgggctttggaagaggggagaagccttcccttctttgataatgttaaatttgtaaggttcaggggacatgtgaaaccctttttaagatttttctcaaagttttgaaaagctattagcccgggtcctggggtaataagacataacgtttttcccttaaaaaaatttaagggggggggtaaagttaaaaaactgttggccctttatgatttaataaaataatttttaaggga

SEQ ID NO: 668143 - DNA, 789 bp, Homo sapiens
  misc_feature (705)..(705): n is a, c, g, or t
ttgtcttcaagacatcaatgatgaagaacctcgttgttgtgaccatcggtatctcagtccctgcgcatcgctgaatttcacgtcagcctacagaggttgacttctacattcgataatggacatgatccacatcgcggtgcgcctaacgggtcgtccagcgtcgtttatggcggagtttctttcagtccgatcagagtccagcaacagttgtgacggacgcattaactctgaacccctgaatgaagactgggacagtagcaccttgatgcatagttcacacagcagttcaggaaccttgttttcgactgtattatacgcgcgcggacacgttgtttcttggcgtacctgtgtacaaccgttttatccctacgcattcatgccatcaggccttgtcagactcaagttataaccaacgtttaatggtgacccgagagcgtggttttcaatgttggactctcgagcttatagagggcagtcctttttggggacgtgcccccggaggatttaccgccatactgacctagagacaaatacatatatatccccccccggtgggtggctcctctatatcctctttcgcgggggaggggggtcaatacaagaccggtgtagtgagagatcccgtgtggcgcctttgtgtctcccatatggcggttatctttgcccgggtcactcgggcgggtgttcccgtctgtgtgtgtcccncctacaggtgttccgtgagcgctctcgtccggcgggggtgctcccccccctgctatattggggggagctggcccggaattctcc

SEQ ID NO: 668144 - DNA, 1808 bp, Homo sapiens
  misc_feature (259)..(259): n is a, c, g, or t
  misc_feature (389)..(389): n is a, c, g, or t
  misc_feature (1549)..(1549): n is a, c, g, or t
gccatatggcttttgtgtggtcgcccgccctgctgtcgtttggggggcgacccctcctcgtgggggggggagggatcactgccatgctcggcgtcgcgcccctatatagtgagggtggagggggcgctcgcttccccccccgcggtggtttgggccgcccaccttcttctggggagaacggcgcctttggttgtggtgtggaagacatgtttggttatagtgagggcgggacactctctcttctctcccggcggcgatnaggttgtctccgtctgcacgttgtcggttcgccgcgcggtgtgtgttgcctctccggcggggcggtgctctcacttggtccaccaacaaggtgcgtgttgttgtggtggccccaccagcgcggggtgccnctactataaggcggggcactatcgaatacgactcgattgccgcgcccacaaggacggtgttggtggttgggggcgtgggcgtgcccaccgcaaacggtttcggttgtgtgggtgcaccaaactctgctgggggaagggcgtgctttgtcctcctgctggggcctctctgtaaggcatggtgtctccgctcttgggtgtgcgaggatagtgtcctgacgacacgttgggcggccgctagtttgtgttcttccccgccgccgctgcaccagctggtgtggggtcccccgcacctagttgggggtgtctcctactcgggcgccaccggcgttggggccttctcacggggtgaacccctccccctcgtgggtagggaggtttggaccccgcccccggcactctcgctgcgcgccccccagaggattgttggcgcgcacagaatggtgttggggagagccccccacgaggttttttttctccccccactagagtggggcccccctttttggaaagaagtagagagatgtttgtgtagagacagactgcccaacagagggttgcccacaatttgtggggaccgcctgtgatctgcgcacccgagagtgtgtcccccccggtccccatctccactgggatggcgccccgaggagacgtgtcccaagcgtgacgcgcgcgcgcggcgcgcggcgcagagataggggtgtttacacgtgctcggggtgagcccccactgttgagatttctcgcccacccccctcggggtggactatttgttcgggagcattatgtgtgagagtgtgtggagagcgcgctttttaagtagaagccctcggagttctttctcttctgctcacgcggcgctttgggtgggcgctctctatagcccgtgttgtatatatctccccccccccgcccgtgtgtgtgtttttgtataagcggcaccgcgcgcgcgagtcataacacctcgagggggtcacgaggaggtgttttatggacctccgcgcgcggtgagcccacacacacgtgtgaggagaaaccgctctggtgtgttgtgtacggttagagaagatatccacaaatatgtattgcccacgcgacacatgtggtgggcacacacacgccgcgtatatatgtgtctccacgcccacatcaagaggagagcntgtgagcctcagcgagaatctcacttgtgacacccgggaggccagcaagagggtcccaggtggagactgtgagagatctcacaggtctcattgccacagtcccatccgtggagcccacctagagagcccaaactctccttttctccaaaaataaaaaagaaagaaggtggatctcccccccggcccgagaagattttccccgaaggttttgaactctaagaaattaattggtttggtaattaacaaaaaaaaaaataaa

SEQ ID NO: 668145 - DNA, 817 bp, Homo sapiens
ttgagagcaacctgtctgaccaaaatttattaggtgggaatttcctcgtcctaataagcctgggagcgctatgggagactggggcttatttcatccctacagtctcgaccatagaagacagctacacccaagggggccattttagaggcccaccctcaggggcacattctctttctcagggatgttccttgctgagaaaaagaattcggcgatatttctcccatttgcttttgaaagaagagaaatatggctctgttccgcctggctcaccggcggtcagagtttaaggttatctctcttattccctgaacattgctgttatcctgttcttttttcaaggtgcctagatttcatattgtttaaacacacatgctctacaatttctgcacttaacacaattatcacagggtcctgaggcgacatacgtcctcctcggcttacgagatgacaggattaagagattaaaacaggcataggaaatcacaagggtattgattggggaagtgataagtgtccatgaaatcttcacaatttatgtttagagattgcagtaaagacaggcataagaaattataaaagtcattaatttggggaactaataatgtgccatgaaatcttcacgatccacgtcttccgcatggttcagcagtccctcgttgggtcctgatttcgaaagaattgagtggtcaaataaaagattggtggaaggttagttcagaagaaaagggttggaacctttcattttattgtgagggggtatccacaggttttaaacagcataggaaatggttaagggggggcataatttggaaagggg

SEQ ID NO: 668146 - DNA, 850 bp, Homo sapiens
  misc_feature (39)..(39): n is a, c, g, or t
gctgcttcctgttactgaggccagggagttaaccagcanggacctcgccgtctgttgagcggctctgcctctgtggtgggcgtgctaagccctgtgtccccttaggcacccgagtgtacagccccccggagtggatccgctaccaccgctaccacgggcgctcggccaccgtgtggtcgctgggcgtgcttctctacgatatggtgtgtggggacatccccttcgagcaggacgaggagatcctccgaggccgcctgctcttccggaggagggtctctccagagtgccagcagctgatccggtggtgcctgtccctgcggccctcagagcggccgtcgctggatcagattgcggcccatccctggatgctgggggctgacgggggcgccccggagagctgtgacctgcggctgtgcaccctcgaccctgatgacgtggccagcaccacgtccagcagcgagagcttgtgaggagctgcacctgactgggagctaggggaccacctgccttggccagacctgggacgcccccagaccctgactttttcctgcgtgggccgtctcctcctgcggaagcagtgacctctgacccctggtgaccttcgctttgagtgccttttgaacgctggtcccgcgggacttggttttctcaagctctgtctgtccaaagacgctccggtcgaggtcccgcctgccctgggtggatacttgaaccccagacgcccctctgtgctgctgtgtccggaggcggccttcccatctgcctgcccacccggagctctttccgccggcgcagggtcccaagcccacctcccgccctcagcctgcctggtccatgggatcctctagat

SEQ ID NO: 668147 - DNA, 343 bp, Homo sapiens
gaaacctcaggctggggcagggtggcacttgggggggcaggccaagttcccctaaatgggggtctctatatgttcaggcccaggggcccccatttacaggaagtgggaagctttgccccccgagcttcagtcccccccaaaggaaaggaggtaacgaggagggcggactccaggccccggacaaaaatttggacttggctggcttgcaggggtcctaaaaaactcccctttggacagcgccaggaggccctgggttcccttcctaactttgcccccaactgtacatttggataaaccctagtagttccctgggcctgtttttttataaaaccaggcaactgga

SEQ ID NO: 668148 - DNA, 103 bp, Homo sapiens
gtttcttttgctttttaatcagttcttaataggatatagttttatgttttccaagttataactggagaacataaaactatatcctattaagaactgattaaaa

SEQ ID NO: 668149 - DNA, 1260 bp, Homo sapiens
  misc_feature (9)..(10): n is a, c, g, or t
  misc_feature (1195)..(1195): n is a, c, g, or t
  misc_feature (1218)..(1218): n is a, c, g, or t
  misc_feature (1223)..(1224): n is a, c, g, or t
gagcgtgannggggagagcggaccgacgcgacacgccgtgcgcctccgcggctgcgctacgaaaacgagtcccggagcggccccgcgcccgccgcacccggccctcgcccgcccgaagacaggcgccaagctgccccgccgtctccccagctagcgcccggccgccgccgcctcgcgggccccgggcggaagggggcggggtcccgattcgccccgcccccgcggagggatacgcggcgccgcggcccaaaacccccgggcgaggcggccggggcgggtgaggcgctccgcctgctgcgcgtctacgcggtccccgcgggccttccgggcccactgcgccgcgcggaccgcctcgggctcggacggccggtgtccccggcgcgccgctcgcccggatcggccgcggcttcggcgcctggggctcggggctccggggaggccgtcgcccgcgatgctgctctccaagttcggctccctggcgcacctctgcgggcccggcggcgtggaccacctcccggtgaagatcctgcagccaggtacgcgcggggccggcggggccggggccggggccagggcggggaccgggggcgccccgggccgcaccaaccccgcccgcgcctccctgcagccaaggcggacaaggagagcttcgagaaggcgtaccaggtgggcgccgtgctgggtagcggcggcttcggcacggtctacgcgggtagccgcatcgccgacgggctcccggtggctgtgaagcacgtggtgaaggagcgggtgaccgagtggggcagcctgggcggcgcgaccgtgcccctggaggtggtgctgctgcgcaaggtgggcgcggcgggcggcgcgcgcggcgtcatccgcctgctggactggttcgagcggcccgacggcttcctgctggtgctggagcggcccgagccggcgcaggacctcttcgactttatcacggagcgcggcgccctggacgagccgctggcgcgccgcttcttcgcgcaggtgctggccgccgtgcgccactgccacagctgcggggtcgtgcaccgcgacattaaggacgaaaatctgcttgtggacctgcgctccggagagctcaagctcatcgacttcggttcgggtgcgctgctcaaggacacggtctacaccgacttcgacggtgagcgcgggcgcggggcagggaacgttccggggnccttgccggcgggttaacgcctncaggnncggcacatggaggggctgatgactgttgggcggccg

SEQ ID NO: 668150 - DNA, 209 bp, Homo sapiens
ctagaggatccccccttaacggtgctgacagaaatagttgcagtatggtcgtactttaaactctagtatcctattgcttctttcttacccccttacctaggtgaatactcccacagtggtctgtatactcaactattttctatttcaaagggaaaaagatatatatagtatatgttacttattaattagatcagtgtctagtaatatgt
